United States Patent Application Publication US 2005/0244851 A1 - sequence listing, part 139

SEQ ID NO: 5426659 - DNA, 25 bp, Homo sapien
tctgaaggctttatttccctgccag

SEQ ID NO: 5426660 - DNA, 25 bp, Homo sapien
taatctcccgaatctgctttagcca

SEQ ID NO: 5426661 - DNA, 25 bp, Homo sapien
tgtcccactagcaaagctgaagctg

SEQ ID NO: 5426662 - DNA, 25 bp, Homo sapien
gatttggtagtgtcacttccagcca

SEQ ID NO: 5426663 - DNA, 25 bp, Homo sapien
cagttataggttgggaaccagccac

SEQ ID NO: 5426664 - DNA, 25 bp, Homo sapien
ttgaagacgtgcacagagcagagcc

SEQ ID NO: 5426665 - DNA, 25 bp, Homo sapien
gcatgtgtacaaaccagcgtcgttc

SEQ ID NO: 5426666 - DNA, 25 bp, Homo sapien
gcagagcctgcatcattggacactt

SEQ ID NO: 5426667 - DNA, 25 bp, Homo sapien
tcaggtgggcgctgttttccagata

SEQ ID NO: 5426668 - DNA, 25 bp, Homo sapien
cattcacagcatagcaggtatattg

SEQ ID NO: 5426669 - DNA, 25 bp, Homo sapien
tattcagctgagctgtgcaagagtc

SEQ ID NO: 5426670 - DNA, 25 bp, Homo sapien
gataactaatctggtactttccgcc

SEQ ID NO: 5426671 - DNA, 25 bp, Homo sapien
cgtgacgtggcactcaaagtcagca

SEQ ID NO: 5426672 - DNA, 25 bp, Homo sapien
ttatcggttgtgtgcccgtgacgtg

SEQ ID NO: 5426673 - DNA, 25 bp, Homo sapien
tggcccagctgacctttatcggttg

SEQ ID NO: 5426674 - DNA, 25 bp, Homo sapien
caagacggatgtcaaagaagggtgg

SEQ ID NO: 5426675 - DNA, 25 bp, Homo sapien
tataccaagacacggagataggttc

SEQ ID NO: 5426676 - DNA, 25 bp, Homo sapien
taggttctgatccacttatggcaca

SEQ ID NO: 5426677 - DNA, 25 bp, Homo sapien
ttgtagctgtgcaggaatactggcc

SEQ ID NO: 5426678 - DNA, 25 bp, Homo sapien
tgcaaggctccggtcagttttaaaa

SEQ ID NO: 5426679 - DNA, 25 bp, Homo sapien
cttgaacggtaaggaaagttgatgc

SEQ ID NO: 5426680 - DNA, 25 bp, Homo sapien
tataccaggataccccaatttcagg

SEQ ID NO: 5426681 - DNA, 25 bp, Homo sapien
accttaaccggctccaactgcttga

SEQ ID NO: 5426682 - DNA, 25 bp, Homo sapien
cattttgtaagtcgtagtgggtctc

SEQ ID NO: 5426683 - DNA, 25 bp, Homo sapien
tccaggattgccgatttttcagtcg

SEQ ID NO: 5426684 - DNA, 25 bp, Homo sapien
tagttatattacacctctgagaagg

SEQ ID NO: 5426685 - DNA, 25 bp, Homo sapien
gcatcctctactgtgctacttggaa

SEQ ID NO: 5426686 - DNA, 25 bp, Homo sapien
ccagtgaatgtaccctctaggatca

SEQ ID NO: 5426687 - DNA, 25 bp, Homo sapien
aagacacatctaattactaatcgta

SEQ ID NO: 5426688 - DNA, 25 bp, Homo sapien
gtataaatctagaagagcagtctga

SEQ ID NO: 5426689 - DNA, 25 bp, Homo sapien
tactaatcgtataaatctagaagag

SEQ ID NO: 5426690 - DNA, 25 bp, Homo sapien
taatcgtataaatctagaagagcag

SEQ ID NO: 5426691 - DNA, 25 bp, Homo sapien
cagcttcattgctaactatgcaagt

SEQ ID NO: 5426692 - DNA, 25 bp, Homo sapien
tacatcgaacaactccagttcagca

SEQ ID NO: 5426693 - DNA, 25 bp, Homo sapien
aactatgcaagtatattctccactt

SEQ ID NO: 5426694 - DNA, 25 bp, Homo sapien
tccactttgtgatgtatctacatcg

SEQ ID NO: 5426695 - DNA, 25 bp, Homo sapien
tccaaagacacgttgcatctgtcac

SEQ ID NO: 5426696 - DNA, 25 bp, Homo sapien
tcctccaaagacacgttgcatctgt

SEQ ID NO: 5426697 - DNA, 25 bp, Homo sapien
gaatcctccaaagacacgttgcatc

SEQ ID NO: 5426698 - DNA, 25 bp, Homo sapien
atcctccaaagacacgttgcatctg

SEQ ID NO: 5426699 - DNA, 25 bp, Homo sapien
tacgatacttgtgaaagttacattg

SEQ ID NO: 5426700 - DNA, 25 bp, Homo sapien
tggtcccagttaaaacatccatggg

SEQ ID NO: 5426701 - DNA, 25 bp, Homo sapien
gtgaaagttacattggtcccagtta

SEQ ID NO: 5426702 - DNA, 25 bp, Homo sapien
aggtgttccttttacgatacttgtg

SEQ ID NO: 5426703 - DNA, 25 bp, Homo sapien
tctgtcagggtggtctggtatttcc

SEQ ID NO: 5426704 - DNA, 25 bp, Homo sapien
tcatcagaaccagccatattagtag

SEQ ID NO: 5426705 - DNA, 25 bp, Homo sapien
tgaggagccggatagaccatttgtc

SEQ ID NO: 5426706 - DNA, 25 bp, Homo sapien
tggaggtgacccatagactttacac

SEQ ID NO: 5426707 - DNA, 25 bp, Homo sapien
cactccaaggtacaggtgtctcccg

SEQ ID NO: 5426708 - DNA, 25 bp, Homo sapien
ggtgccagctactgtacactccaag

SEQ ID NO: 5426709 - DNA, 25 bp, Homo sapien
cattgatgatcttaaggccggatac

SEQ ID NO: 5426710 - DNA, 25 bp, Homo sapien
tgccaacagggttctgcacctcaaa

SEQ ID NO: 5426711 - DNA, 25 bp, Homo sapien
tggaatgaaatgtaaaagatatcca

SEQ ID NO: 5426712 - DNA, 25 bp, Homo sapien
ctggaatgaaatgtaaaagatatcc

SEQ ID NO: 5426713 - DNA, 25 bp, Homo sapien
gaatgaaatgtaaaagatatccata

SEQ ID NO: 5426714 - DNA, 25 bp, Homo sapien
ggaatgaaatgtaaaagatatccat

SEQ ID NO: 5426715 - DNA, 25 bp, Homo sapien
ttttgatctgacaagtgtattttcc

SEQ ID NO: 5426716 - DNA, 25 bp, Homo sapien
gaagcactcttgcatcccagcatcg

SEQ ID NO: 5426717 - DNA, 25 bp, Homo sapien
gcatcccagcatcgtttttgatctg

SEQ ID NO: 5426718 - DNA, 25 bp, Homo sapien
agaacggatagcgtggcgaagcact

SEQ ID NO: 5426719 - DNA, 25 bp, Homo sapien
tgaataagaaatccatatgttgtca

SEQ ID NO: 5426720 - DNA, 25 bp, Homo sapien
gaataagaaatccatatgttgtcac

SEQ ID NO: 5426721 - DNA, 25 bp, Homo sapien
gacagtagatatgtcactgagcttc

SEQ ID NO: 5426722 - DNA, 25 bp, Homo sapien
gaacttctttaccaacgacagtaga

SEQ ID NO: 5426723 - DNA, 25 bp, Homo sapien
gaaatgggttcagcgccttcaatgg

SEQ ID NO: 5426724 - DNA, 25 bp, Homo sapien
tctaacgatttctcccttatctttg

SEQ ID NO: 5426725 - DNA, 25 bp, Homo sapien
ctttgagagcgatggaaccaacgca

SEQ ID NO: 5426726 - DNA, 25 bp, Homo sapien
agtgccctgaagctcacattcaagg

SEQ ID NO: 5426727 - DNA, 25 bp, Homo sapien
tgtctgcagcatcgacattcaggat

SEQ ID NO: 5426728 - DNA, 25 bp, Homo sapien
tcagtgtctctataggatgaggctt

SEQ ID NO: 5426729 - DNA, 25 bp, Homo sapien
ttcaattctttgttgtgtcctttcc

SEQ ID NO: 5426730 - DNA, 25 bp, Homo sapien
tttcaattctttgttgtgtcctttc

SEQ ID NO: 5426731 - DNA, 25 bp, Homo sapien
tctggagacccaccgattttgcatt

SEQ ID NO: 5426732 - DNA, 25 bp, Homo sapien
acactgagattgtgcatttccagca

SEQ ID NO: 5426733 - DNA, 25 bp, Homo sapien
tctagcttcttaatgaacctgggtg

SEQ ID NO: 5426734 - DNA, 25 bp, Homo sapien
cagccaccgagtcaacgaatgacat

SEQ ID NO: 5426735 - DNA, 25 bp, Homo sapien
tgcatagcaggtgtactgcccggca

SEQ ID NO: 5426736 - DNA, 25 bp, Homo sapien
tcatcttgtagttgcctccagggcg

SEQ ID NO: 5426737 - DNA, 25 bp, Homo sapien
ccagctgagcagaacaagagtcttt

SEQ ID NO: 5426738 - DNA, 25 bp, Homo sapien
ttagatcaaagaaaggaggcacttc

SEQ ID NO: 5426739 - DNA, 25 bp, Homo sapien
ccattgatgcggcattcaaatgcaa

SEQ ID NO: 5426740 - DNA, 25 bp, Homo sapien
tgggaagcctagagtctcatgaacg

SEQ ID NO: 5426741 - DNA, 25 bp, Homo sapien
cctatgtggctctggtcagtttgta

SEQ ID NO: 5426742 - DNA, 25 bp, Homo sapien
gagcaattatactgccctatgtggc

SEQ ID NO: 5426743 - DNA, 25 bp, Homo sapien
gactgcttccacatgttccagaggt

SEQ ID NO: 5426744 - DNA, 25 bp, Homo sapien
tccagaggttcaataaagtacggtg

SEQ ID NO: 5426745 - DNA, 25 bp, Homo sapien
tctgccttgcatgaatactctccca

SEQ ID NO: 5426746 - DNA, 25 bp, Homo sapien
tatgcaggagctgatcgtagctttg

SEQ ID NO: 5426747 - DNA, 25 bp, Homo sapien
taagacagacaccagagcttcacag

SEQ ID NO: 5426748 - DNA, 25 bp, Homo sapien
tgccagtgtatgtggcctcgagaac

SEQ ID NO: 5426749 - DNA, 25 bp, Homo sapien
gctcactgagattggaggtgtgcca

SEQ ID NO: 5426750 - DNA, 25 bp, Homo sapien
cagctgtactgtgcataatcctcta

SEQ ID NO: 5426751 - DNA, 25 bp, Homo sapien
ttgtaacgaggcaagaatagtctcc

SEQ ID NO: 5426752 - DNA, 25 bp, Homo sapien
tgtgacaaaatcttccagagagatg

SEQ ID NO: 5426753 - DNA, 25 bp, Homo sapien
cactggtgaatgtgaggctcattcc

SEQ ID NO: 5426754 - DNA, 25 bp, Homo sapien
ttctaatggctgcacctcaaacaac

SEQ ID NO: 5426755 - DNA, 25 bp, Homo sapien
cgttttccgaaaagctggactgaca

SEQ ID NO: 5426756 - DNA, 25 bp, Homo sapien
tcatcggaaccagctacattggcag

SEQ ID NO: 5426757 - DNA, 25 bp, Homo sapien
gagggctccaacaagctcagattca

SEQ ID NO: 5426758 - DNA, 25 bp, Homo sapien
tatatgcctgtgtcggagggctcca

SEQ ID NO: 5426759 - DNA, 25 bp, Homo sapien
gagaagttttattctgtgcccctcc

SEQ ID NO: 5426760 - DNA, 25 bp, Homo sapien
aagagaagttttattctgtgcccct

SEQ ID NO: 5426761 - DNA, 25 bp, Homo sapien
agagaagttttattctgtgcccctc

SEQ ID NO: 5426762 - DNA, 25 bp, Homo sapien
tggacggatacagtgcagttacttt

SEQ ID NO: 5426763 - DNA, 25 bp, Homo sapien
catggacggatacagtgcagttact

SEQ ID NO: 5426764 - DNA, 25 bp, Homo sapien
gaaacatggacggatacagtgcagt

SEQ ID NO: 5426765 - DNA, 25 bp, Homo sapien
acatggacggatacagtgcagttac

SEQ ID NO: 5426766 - DNA, 25 bp, Homo sapien
tgaaccacttggctgagagttctgg

SEQ ID NO: 5426767 - DNA, 25 bp, Homo sapien
cactacacactctaatgcaaaagga

SEQ ID NO: 5426768 - DNA, 25 bp, Homo sapien
gatttccagtagtgacagtcatggg

SEQ ID NO: 5426769 - DNA, 25 bp, Homo sapien
taagggaagccactttattgatgaa

SEQ ID NO: 5426770 - DNA, 25 bp, Homo sapien
actatggcccgtaactcaacagcat

SEQ ID NO: 5426771 - DNA, 25 bp, Homo sapien
ccccaataagggttgaggtgtcact

SEQ ID NO: 5426772 - DNA, 25 bp, Homo sapien
gagcattctctcattccagcatcgt

SEQ ID NO: 5426773 - DNA, 25 bp, Homo sapien
agaattagatgcttctggactcccc

SEQ ID NO: 5426774 - DNA, 25 bp, Homo sapien
ggccacacaagttattagttaggca

SEQ ID NO: 5426775 - DNA, 25 bp, Homo sapien
caagttattagttaggcaagaacag

SEQ ID NO: 5426776 - DNA, 25 bp, Homo sapien
ccacacaagttattagttaggcaag

SEQ ID NO: 5426777 - DNA, 25 bp, Homo sapien
ttagttaggcaagaacagataggag

SEQ ID NO: 5426778 - DNA, 25 bp, Homo sapien
gagcaagaacacgtgtcacttccca

SEQ ID NO: 5426779 - DNA, 25 bp, Homo sapien
agaacctttaagagctcctactgga

SEQ ID NO: 5426780 - DNA, 25 bp, Homo sapien
cacattggagaatcacatcagaacc

SEQ ID NO: 5426781 - DNA, 25 bp, Homo sapien
tagctttgcagtgatattccccgac

SEQ ID NO: 5426782 - DNA, 25 bp, Homo sapien
gagaacacttgcttactataaagga

SEQ ID NO: 5426783 - DNA, 25 bp, Homo sapien
gaacacttgcttactataaaggaaa

SEQ ID NO: 5426784 - DNA, 25 bp, Homo sapien
tgagaacacttgcttactataaagg

SEQ ID NO: 5426785 - DNA, 25 bp, Homo sapien
agaacacttgcttactataaaggaa

SEQ ID NO: 5426786 - DNA, 25 bp, Homo sapien
cagcactagcttcattgatcgtaag

SEQ ID NO: 5426787 - DNA, 25 bp, Homo sapien
gaagttcgctgtcatttcggaacca

SEQ ID NO: 5426788 - DNA, 25 bp, Homo sapien
tatgagcctcacaaatgtagtcccc

SEQ ID NO: 5426789 - DNA, 25 bp, Homo sapien
ctttcactgtcaacgctgtgctgca

SEQ ID NO: 5426790 - DNA, 25 bp, Homo sapien
cacaaattctaacatgtccagttag

SEQ ID NO: 5426791 - DNA, 25 bp, Homo sapien
gataagattacacttagagttacac

SEQ ID NO: 5426792 - DNA, 25 bp, Homo sapien
gttgcctccaacactaatacacaaa

SEQ ID NO: 5426793 - DNA, 25 bp, Homo sapien
cagaatgccatataacaagaaagca

SEQ ID NO: 5426794 - DNA, 25 bp, Homo sapien
caagtgattcgcatcggttgagcac

SEQ ID NO: 5426795 - DNA, 25 bp, Homo sapien
tgagctgagcacatgtctttgccaa

SEQ ID NO: 5426796 - DNA, 25 bp, Homo sapien
ggttgagcaccagtaacatgacact

SEQ ID NO: 5426797 - DNA, 25 bp, Homo sapien
tcaaatgaggagtgtttcccacaca

SEQ ID NO: 5426798 - DNA, 25 bp, Homo sapien
tggaagctgagcaagagtactggcc

SEQ ID NO: 5426799 - DNA, 25 bp, Homo sapien
tgagtgtaacaggtaaccccacagt

SEQ ID NO: 5426800 - DNA, 25 bp, Homo sapien
taattgtcttgcaaaagaaggtggg

SEQ ID NO: 5426801 - DNA, 25 bp, Homo sapien
cagagccatttaatcgacaagtgag

SEQ ID NO: 5426802 - DNA, 25 bp, Homo sapien
ggcattgtaaagaaaccgaatctcc

SEQ ID NO: 5426803 - DNA, 25 bp, Homo sapien
tccagaggttccagttccgtaacaa

SEQ ID NO: 5426804 - DNA, 25 bp, Homo sapien
ggtgtcccagcaacttggcattgta

SEQ ID NO: 5426805 - DNA, 25 bp, Homo sapien
cctgtattcaggagttggccgtaat

SEQ ID NO: 5426806 - DNA, 25 bp, Homo sapien
ctaatgtagataccagagctccaca

SEQ ID NO: 5426807 - DNA, 25 bp, Homo sapien
tgctctccagaattatggacttccc

SEQ ID NO: 5426808 - DNA, 25 bp, Homo sapien
cattttcaatctcgcaggaatactg

SEQ ID NO: 5426809 - DNA, 25 bp, Homo sapien
ggaagtgttccagtgtaggtgctct

SEQ ID NO: 5426810 - DNA, 25 bp, Homo sapien
acacaaggatgtcggtatacagaaa

SEQ ID NO: 5426811 - DNA, 25 bp, Homo sapien
aggatgtcggtatacagaaaacaga

SEQ ID NO: 5426812 - DNA, 25 bp, Homo sapien
aaaaacacaaggatgtcggtataca

SEQ ID NO: 5426813 - DNA, 25 bp, Homo sapien
acagaaaaagtgaatccacttgagc

SEQ ID NO: 5426814 - DNA, 25 bp, Homo sapien
caaagagacgggtagtgcaagatgc

SEQ ID NO: 5426815 - DNA, 25 bp, Homo sapien
caaaatagatgttgcaccggtctcc

SEQ ID NO: 5426816 - DNA, 25 bp, Homo sapien
gggttcctctaataacgcttgtgaa

SEQ ID NO: 5426817 - DNA, 25 bp, Homo sapien
tgcttggccagcgttgttagaaacc

SEQ ID NO: 5426818 - DNA, 25 bp, Homo sapien
agcgacattagcagccacgcatgtg

SEQ ID NO: 5426819 - DNA, 25 bp, Homo sapien
atcagacccagcgacattagcagcc

SEQ ID NO: 5426820 - DNA, 25 bp, Homo sapien
tgcacgacattcatcagacccagcg

SEQ ID NO: 5426821 - DNA, 25 bp, Homo sapien
cttgtacagttagcactgcacgaca

SEQ ID NO: 5426822 - DNA, 25 bp, Homo sapien
aaaccaggcaactgaaataggtgat

SEQ ID NO: 5426823 - DNA, 25 bp, Homo sapien
ggtttggtactttgctccactgaca

SEQ ID NO: 5426824 - DNA, 25 bp, Homo sapien
tccaagatgcaagaagcacctaaca

SEQ ID NO: 5426825 - DNA, 25 bp, Homo sapien
gatgatccagctactttgcattcca

SEQ ID NO: 5426826 - DNA, 25 bp, Homo sapien
tttttcagtcttcgtgtgaaagagg

SEQ ID NO: 5426827 - DNA, 25 bp, Homo sapien
tatttttcagtcttcgtgtgaaaga

SEQ ID NO: 5426828 - DNA, 25 bp, Homo sapien
gtatttttcagtcttcgtgtgaaag

SEQ ID NO: 5426829 - DNA, 25 bp, Homo sapien
tttcagtcttcgtgtgaaagaggga

SEQ ID NO: 5426830 - DNA, 25 bp, Homo sapien
aggtaagagactcatcatgatttga

SEQ ID NO: 5426831 - DNA, 25 bp, Homo sapien
ggaaaggtaagagactcatcatgat

SEQ ID NO: 5426832 - DNA, 25 bp, Homo sapien
gactcatcatgatttgaaagaatag

SEQ ID NO: 5426833 - DNA, 25 bp, Homo sapien
ctcatcatgatttgaaagaatagaa

SEQ ID NO: 5426834 - DNA, 25 bp, Homo sapien
ctgccttctcaacaatgactgcggg

SEQ ID NO: 5426835 - DNA, 25 bp, Homo sapien
tcaactgagagaatccttaaggaag

SEQ ID NO: 5426836 - DNA, 25 bp, Homo sapien
tcaacagagagttccggagtgccag

SEQ ID NO: 5426837 - DNA, 25 bp, Homo sapien
gagtgcacgtttctcctacagtcac

SEQ ID NO: 5426838 - DNA, 25 bp, Homo sapien
tctccggctacaacagtgaggctgt

SEQ ID NO: 5426839 - DNA, 25 bp, Homo sapien
actgtagagttgcaacattttccac

SEQ ID NO: 5426840 - DNA, 25 bp, Homo sapien
gctgggcgccttctatggatgcttg

SEQ ID NO: 5426841 - DNA, 25 bp, Homo sapien
tcagtttggagacaaatcttggtgg

SEQ ID NO: 5426842 - DNA, 25 bp, Homo sapien
cagtggtattcaccgatgtctgaag

SEQ ID NO: 5426843 - DNA, 25 bp, Homo sapien
gagttgccgcttgtctttgtaccat

SEQ ID NO: 5426844 - DNA, 25 bp, Homo sapien
gtttctactataggagggaagctgc

SEQ ID NO: 5426845 - DNA, 25 bp, Homo sapien
tgtaccataccacctcaaacggtgg

SEQ ID NO: 5426846 - DNA, 25 bp, Homo sapien
gttcatctgtatgacggccactgag

SEQ ID NO: 5426847 - DNA, 25 bp, Homo sapien
ccagcgggattctgagcctcacaaa

SEQ ID NO: 5426848 - DNA, 25 bp, Homo sapien
gggatccagctatcttgcattcaag

SEQ ID NO: 5426849 - DNA, 25 bp, Homo sapien
cattcaagtcgtgaagagtcacctg

SEQ ID NO: 5426850 - DNA, 25 bp, Homo sapien
tagtacaagagtcgctaccaacatc

SEQ ID NO: 5426851 - DNA, 25 bp, Homo sapien
gagtcgctaccaacatcattggtaa

SEQ ID NO: 5426852 - DNA, 25 bp, Homo sapien
catcgtagtacaagagtcgctacca

SEQ ID NO: 5426853 - DNA, 25 bp, Homo sapien
agcaacatcgtagtacaagagtcgc

SEQ ID NO: 5426854 - DNA, 25 bp, Homo sapien
catttaggacctgagacaagttcca

SEQ ID NO: 5426855 - DNA, 25 bp, Homo sapien
aatcaggtatggcttgctgtcgccc

SEQ ID NO: 5426856 - DNA, 25 bp, Homo sapien
taagaagctagtcgacccttccaag

SEQ ID NO: 5426857 - DNA, 25 bp, Homo sapien
gctgtcgcccaggtttcactaggaa

SEQ ID NO: 5426858 - DNA, 25 bp, Homo sapien
atgccactgcatgcatcatctcctg

SEQ ID NO: 5426859 - DNA, 25 bp, Homo sapien
ccatatgaatagaagagcccagaac

SEQ ID NO: 5426860 - DNA, 25 bp, Homo sapien
tacatttgacactttgcatgtgtaa

SEQ ID NO: 5426861 - DNA, 25 bp, Homo sapien
tccttaaaccactgagcactaatgg

SEQ ID NO: 5426862 - DNA, 25 bp, Homo sapien
taagtaggcatcacagctactgctt

SEQ ID NO: 5426863 - DNA, 25 bp, Homo sapien
cactcttaagtaggcatcacagcta

SEQ ID NO: 5426864 - DNA, 25 bp, Homo sapien
tgcttccgaagtcattttccacctt

SEQ ID NO: 5426865 - DNA, 25 bp, Homo sapien
gcatcacagctactgcttccgaagt

SEQ ID NO: 5426866 - DNA, 25 bp, Homo sapien
ggatctttctccgtaacatcaactg

SEQ ID NO: 5426867 - DNA, 25 bp, Homo sapien
ttccagccacaacacattccaaggt

SEQ ID NO: 5426868 - DNA, 25 bp, Homo sapien
tgtttcccgtctttaagccatttca

SEQ ID NO: 5426869 - DNA, 25 bp, Homo sapien
tagctttctctacgatttgagctgg

SEQ ID NO: 5426870 - DNA, 25 bp, Homo sapien
caaaacagtagtggtattttctatc

SEQ ID NO: 5426871 - DNA, 25 bp, Homo sapien
gaaagcataacacctctcaactcct

SEQ ID NO: 5426872 - DNA, 25 bp, Homo sapien
gatcatcctttagccaggttataga

SEQ ID NO: 5426873 - DNA, 25 bp, Homo sapien
gaacctgccacggtactctgaaagg

SEQ ID NO: 5426874 - DNA, 25 bp, Homo sapien
gggcaactctagtactgcatgagca

SEQ ID NO: 5426875 - DNA, 25 bp, Homo sapien
cattggatacaatgcactggtattc

SEQ ID NO: 5426876 - DNA, 25 bp, Homo sapien
gaagggtcacacttggttatatgga

SEQ ID NO: 5426877 - DNA, 25 bp, Homo sapien
caagtgacttcaaacggaggtgttc

SEQ ID NO: 5426878 - DNA, 25 bp, Homo sapien
aagattcaaaaggaagacagtagct

SEQ ID NO: 5426879 - DNA, 25 bp, Homo sapien
gattcaaaaggaagacagtagctta

SEQ ID NO: 5426880 - DNA, 25 bp, Homo sapien
ctaaagattcaaaaggaagacagta

SEQ ID NO: 5426881 - DNA, 25 bp, Homo sapien
aaagattcaaaaggaagacagtagc

SEQ ID NO: 5426882 - DNA, 25 bp, Homo sapien
cgtgcctgcgtcatttcgagcttca

SEQ ID NO: 5426883 - DNA, 25 bp, Homo sapien
gcactaagactggactgggcttctt

SEQ ID NO: 5426884 - DNA, 25 bp, Homo sapien
cgtctagataccaagacactcggat

SEQ ID NO: 5426885 - DNA, 25 bp, Homo sapien
cactattttctaccctggcaccaga

SEQ ID NO: 5426886 - DNA, 25 bp, Homo sapien
cactgggcaaaactgctgtcttaag

SEQ ID NO: 5426887 - DNA, 25 bp, Homo sapien
caggtcactgggcaaaactgctgtc

SEQ ID NO: 5426888 - DNA, 25 bp, Homo sapien
aaaacaggtcactgggcaaaactgc

SEQ ID NO: 5426889 - DNA, 25 bp, Homo sapien
caaaactgctgtcttaagcgtcccc

SEQ ID NO: 5426890 - DNA, 25 bp, Homo sapien
aagtgaggagatgtagagaccagac

SEQ ID NO: 5426891 - DNA, 25 bp, Homo sapien
cagtgccacccacaagagcctttaa

SEQ ID NO: 5426892 - DNA, 25 bp, Homo sapien
tagactggtagaggtgtcatccttc

SEQ ID NO: 5426893 - DNA, 25 bp, Homo sapien
aaactgagcgggctgctcctgagtg

SEQ ID NO: 5426894 - DNA, 25 bp, Homo sapien
gggattgacatcttgtgactgtggc

SEQ ID NO: 5426895 - DNA, 25 bp, Homo sapien
ctttgactgtcagatgcccactgca

SEQ ID NO: 5426896 - DNA, 25 bp, Homo sapien
tgtcagatgcccactgcattggttg

SEQ ID NO: 5426897 - DNA, 25 bp, Homo sapien
ttgtggcagaacaagtgtatgtccc

SEQ ID NO: 5426898 - DNA, 25 bp, Homo sapien
actgcattggttgtgccctgcctta

SEQ ID NO: 5426899 - DNA, 25 bp, Homo sapien
tttgtacttttcactagctgatatt

SEQ ID NO: 5426900 - DNA, 25 bp, Homo sapien
gggatgtgacccagccactatacat

SEQ ID NO: 5426901 - DNA, 25 bp, Homo sapien
gaacctttaatgctgtccattttct

SEQ ID NO: 5426902 - DNA, 25 bp, Homo sapien
gcttatgggatgtgacccagccact

SEQ ID NO: 5426903 - DNA, 25 bp, Homo sapien
acagcttcctcggtgattgttgcag

SEQ ID NO: 5426904 - DNA, 25 bp, Homo sapien
ggctgtaatctccttagtccctgaa

SEQ ID NO: 5426905 - DNA, 25 bp, Homo sapien
caacatcattttggacctcgaaagt

SEQ ID NO: 5426906 - DNA, 25 bp, Homo sapien
tgggtgacatctatagacacagctt

SEQ ID NO: 5426907 - DNA, 25 bp, Homo sapien
ctggccacattgttctcaaaggtca

SEQ ID NO: 5426908 - DNA, 25 bp, Homo sapien
cccggagggagctggtactctcgat

SEQ ID NO: 5426909 - DNA, 25 bp, Homo sapien
catgcttgacttcaatgccactgag

SEQ ID NO: 5426910 - DNA, 25 bp, Homo sapien
caagtcaccgtaattggcaaggagc

SEQ ID NO: 5426911 - DNA, 25 bp, Homo sapien
gtcacccgacactggtattcgccag

SEQ ID NO: 5426912 - DNA, 25 bp, Homo sapien
tctgcagctacaaacttgaggatct

SEQ ID NO: 5426913 - DNA, 25 bp, Homo sapien
aagtgatctcaaagggaggagtgcc

SEQ ID NO: 5426914 - DNA, 25 bp, Homo sapien
tctgcaggctaaccagatgatcctg

SEQ ID NO: 5426915 - DNA, 25 bp, Homo sapien
aatgatttgcattaagggaggaggg

SEQ ID NO: 5426916 - DNA, 25 bp, Homo sapien
atgatttgcattaagggaggagggg

SEQ ID NO: 5426917 - DNA, 25 bp, Homo sapien
gaatgatttgcattaagggaggagg

SEQ ID NO: 5426918 - DNA, 25 bp, Homo sapien
ggaatgatttgcattaagggaggag

SEQ ID NO: 5426919 - DNA, 25 bp, Homo sapien
gcagtagactccacaaaagacattc

SEQ ID NO: 5426920 - DNA, 25 bp, Homo sapien
tacaatgctactgcagtggtcactg

SEQ ID NO: 5426921 - DNA, 25 bp, Homo sapien
tattcaccactgtcttcgatgccaa

SEQ ID NO: 5426922 - DNA, 25 bp, Homo sapien
tcactgccagcctcattttgggcct

SEQ ID NO: 5426923 - DNA, 25 bp, Homo sapien
ttggaggggtaccagttactttgca

SEQ ID NO: 5426924 - DNA, 25 bp, Homo sapien
gggtaccagttactttgcaggctag

SEQ ID NO: 5426925 - DNA, 25 bp, Homo sapien
gatggctctaacttttcaacaaatg

SEQ ID NO: 5426926 - DNA, 25 bp, Homo sapien
ccagttactttgcaggctagctggg

SEQ ID NO: 5426927 - DNA, 25 bp, Homo sapien
gaaagtgctcttcaggcagactgct

SEQ ID NO: 5426928 - DNA, 25 bp, Homo sapien
taaaccatctgattgtgagaggagt

SEQ ID NO: 5426929 - DNA, 25 bp, Homo sapien
caggcagaacatcctttgagccggg

SEQ ID NO: 5426930 - DNA, 25 bp, Homo sapien
gactttacatgtgtacgtgcccgaa

SEQ ID NO: 5426931 - DNA, 25 bp, Homo sapien
aacactatccacgttgcgcaagggt

SEQ ID NO: 5426932 - DNA, 25 bp, Homo sapien
ttgtggctcgacaagtgaaattccc

SEQ ID NO: 5426933 - DNA, 25 bp, Homo sapien
tccttaaaccaggacaccctcatgg

SEQ ID NO: 5426934 - DNA, 25 bp, Homo sapien
gtccagtctgcaggtaccattaaca

SEQ ID NO: 5426935 - DNA, 25 bp, Homo sapien
gtgtggcgggatctcctgctgtcac

SEQ ID NO: 5426936 - DNA, 25 bp, Homo sapien
ctcaaatgtgtattggccactgtcg

SEQ ID NO: 5426937 - DNA, 25 bp, Homo sapien
tgctgtcacctggatcagttctgct

SEQ ID NO: 5426938 - DNA, 25 bp, Homo sapien
gccactgtcgtgcagctcagctgaa

SEQ ID NO: 5426939 - DNA, 25 bp, Homo sapien
tcagggattatcaagactgcaacac

SEQ ID NO: 5426940 - DNA, 25 bp, Homo sapien
cagcttgcagggtaacggtttgtcc

SEQ ID NO: 5426941 - DNA, 25 bp, Homo sapien
tttcagccaggcacgtgtatttgcc

SEQ ID NO: 5426942 - DNA, 25 bp, Homo sapien
ttaactattaattccccaacagatg

SEQ ID NO: 5426943 - DNA, 25 bp, Homo sapien
tgcactattaaacgaaaagatctcc

SEQ ID NO: 5426944 - DNA, 25 bp, Homo sapien
gagtaagtgggttgccatgcagcca

SEQ ID NO: 5426945 - DNA, 25 bp, Homo sapien
cacactgaagtagagcatttgttcc

SEQ ID NO: 5426946 - DNA, 25 bp, Homo sapien
tcactatgtctgcaggctcaagagt

SEQ ID NO: 5426947 - DNA, 25 bp, Homo sapien
tgcttcacatgagtaactcccactg

SEQ ID NO: 5426948 - DNA, 25 bp, Homo sapien
tatcactgccgacgtcattcactgc

SEQ ID NO: 5426949 - DNA, 25 bp, Homo sapien
tccgtaatatcaagtatagcctcag

SEQ ID NO: 5426950 - DNA, 25 bp, Homo sapien
gcttgcaatggaggcgtgctgattc

SEQ ID NO: 5426951 - DNA, 25 bp, Homo sapien
accttcttcacgaaggatggtggct

SEQ ID NO: 5426952 - DNA, 25 bp, Homo sapien
cattaaataagagggatccaccttc

SEQ ID NO: 5426953 - DNA, 25 bp, Homo sapien
gggagcattaaataagagggatcca

SEQ ID NO: 5426954 - DNA, 25 bp, Homo sapien
ggatccaccttcttcacgaaggatg

SEQ ID NO: 5426955 - DNA, 25 bp, Homo sapien
gccaaaggaatctcaagtgttgcta

SEQ ID NO: 5426956 - DNA, 25 bp, Homo sapien
gaaatcctccagttaggtgaaggtg

SEQ ID NO: 5426957 - DNA, 25 bp, Homo sapien
gaatctttcagtttggccaaaggaa

SEQ ID NO: 5426958 - DNA, 25 bp, Homo sapien
tattgatagcggactgcacaggctc

SEQ ID NO: 5426959 - DNA, 25 bp, Homo sapien
acatctgtgccaatgtatggcattt

SEQ ID NO: 5426960 - DNA, 25 bp, Homo sapien
caacatctgtgccaatgtatggcat

SEQ ID NO: 5426961 - DNA, 25 bp, Homo sapien
atctgtgccaatgtatggcatttac

SEQ ID NO: 5426962 - DNA, 25 bp, Homo sapien
tgacaacatctgtgccaatgtatgg

SEQ ID NO: 5426963 - DNA, 25 bp, Homo sapien
aggtggcccagtgctacttccaggg

SEQ ID NO: 5426964 - DNA, 25 bp, Homo sapien
gctgacactgccatactcattggaa

SEQ ID NO: 5426965 - DNA, 25 bp, Homo sapien
gaaccggacattgggagcactttgg

SEQ ID NO: 5426966 - DNA, 25 bp, Homo sapien
cacaggtgaatttggctaggtggcc

SEQ ID NO: 5426967 - DNA, 25 bp, Homo sapien
gaaattggtgagatggattacagca

SEQ ID NO: 5426968 - DNA, 25 bp, Homo sapien
gatgactagcgtatatgtattttga

SEQ ID NO: 5426969 - DNA, 25 bp, Homo sapien
cattcaaggcctcacagacatactc

SEQ ID NO: 5426970 - DNA, 25 bp, Homo sapien
ctccttgatggtcttcggtatttac

SEQ ID NO: 5426971 - DNA, 25 bp, Homo sapien
cggtatttactttgtcgatgactag

SEQ ID NO: 5426972 - DNA, 25 bp, Homo sapien
tagcatttgttatggatgttgtgag

SEQ ID NO: 5426973 - DNA, 25 bp, Homo sapien
tgttgtgaggtgtacaatatcacct

SEQ ID NO: 5426974 - DNA, 25 bp, Homo sapien
ttgttatggatgttgtgaggtgtac

SEQ ID NO: 5426975 - DNA, 25 bp, Homo sapien
tatggatgttgtgaggtgtacaata

SEQ ID NO: 5426976 - DNA, 25 bp, Homo sapien
cctactttgcacgttaaaataactg

SEQ ID NO: 5426977 - DNA, 25 bp, Homo sapien
caacccctttagtgacaggtgtggc

SEQ ID NO: 5426978 - DNA, 25 bp, Homo sapien
tgtagcaacctcctcagtaccactt

SEQ ID NO: 5426979 - DNA, 25 bp, Homo sapien
tgtttttcgtcagagacaacagctg

SEQ ID NO: 5426980 - DNA, 25 bp, Homo sapien
attcaacttctggttcagtaatggg

SEQ ID NO: 5426981 - DNA, 25 bp, Homo sapien
cagtaatgggttcaaccttctgtga

SEQ ID NO: 5426982 - DNA, 25 bp, Homo sapien
tgagatcagatatttagattcaact

SEQ ID NO: 5426983 - DNA, 25 bp, Homo sapien
tcttcagttgagatcagatatttag

SEQ ID NO: 5426984 - DNA, 25 bp, Homo sapien
accctcagctgttaggatgtctatt

SEQ ID NO: 5426985 - DNA, 25 bp, Homo sapien
ctcagctgttaggatgtctatttcc

SEQ ID NO: 5426986 - DNA, 25 bp, Homo sapien
ccttgctgaattctaggaccctcag

SEQ ID NO: 5426987 - DNA, 25 bp, Homo sapien
tcttgcaaacttgttttggctcctt

SEQ ID NO: 5426988 - DNA, 25 bp, Homo sapien
tgggtgatgtttacagcctcgacct

SEQ ID NO: 5426989 - DNA, 25 bp, Homo sapien
tattgccacgggctctcttttagac

SEQ ID NO: 5426990 - DNA, 25 bp, Homo sapien
ctagtggaaatcttaaggacttgcc

SEQ ID NO: 5426991 - DNA, 25 bp, Homo sapien
gactttgccgaagtaacaaggtaca

SEQ ID NO: 5426992 - DNA, 25 bp, Homo sapien
taagctctgactcaagatgagcgca

SEQ ID NO: 5426993 - DNA, 25 bp, Homo sapien
caatctgcagctgtaggttgggaga

SEQ ID NO: 5426994 - DNA, 25 bp, Homo sapien
gttttctgggactgtacaatctgca

SEQ ID NO: 5426995 - DNA, 25 bp, Homo sapien
tcaagtgcttcaactgcgggaccct

SEQ ID NO: 5426996 - DNA, 25 bp, Homo sapien
gcccttgagcacagcgaattggttt

SEQ ID NO: 5426997 - DNA, 25 bp, Homo sapien
caaagatggcaggaagcccttgagc

SEQ ID NO: 5426998 - DNA, 25 bp, Homo sapien
tgctttacagatatagaggccactg

SEQ ID NO: 5426999 - DNA, 25 bp, Homo sapien
tgtgtcttccagaagcacaagcagc

SEQ ID NO: 5427000 - DNA, 25 bp, Homo sapien
caggctatgatcatcaccgtcaaaa

SEQ ID NO: 5427001 - DNA, 25 bp, Homo sapien
ctttgatgaaaattgggccagtgcc

SEQ ID NO: 5427002 - DNA, 25 bp, Homo sapien
tgaggaggacaaggacctcccagct

SEQ ID NO: 5427003 - DNA, 25 bp, Homo sapien
aagttcggcgctatgaagtccttct

SEQ ID NO: 5427004 - DNA, 25 bp, Homo sapien
taagaaaacctatacagaaccactg

SEQ ID NO: 5427005 - DNA, 25 bp, Homo sapien
taagcattagaagacaggactcaag

SEQ ID NO: 5427006 - DNA, 25 bp, Homo sapien
ggagaaactcatctatagcatgcag

SEQ ID NO: 5427007 - DNA, 25 bp, Homo sapien
tcttagctatgtagaacaggcctgt

SEQ ID NO: 5427008 - DNA, 25 bp, Homo sapien
ttcccttcacttgaactcacaaaat

SEQ ID NO: 5427009 - DNA, 25 bp, Homo sapien
ctttcccttcacttgaactcacaaa

SEQ ID NO: 5427010 - DNA, 25 bp, Homo sapien
cccttcacttgaactcacaaaatat

SEQ ID NO: 5427011 - DNA, 25 bp, Homo sapien
tcccttcacttgaactcacaaaata

SEQ ID NO: 5427012 - DNA, 25 bp, Homo sapien
tattctgcgtatactcaagctcacc

SEQ ID NO: 5427013 - DNA, 25 bp, Homo sapien
tatgacaattaaagtaagccaaggc

SEQ ID NO: 5427014 - DNA, 25 bp, Homo sapien
tatgttacgtgccattgagtcagaa

SEQ ID NO: 5427015 - DNA, 25 bp, Homo sapien
catccattatgtgactaagtgcaga

SEQ ID NO: 5427016 - DNA, 25 bp, Homo sapien
gcaggtgacaaatgtagccattaag

SEQ ID NO: 5427017 - DNA, 25 bp, Homo sapien
tgctaaatgcaggtgacaaatgtag

SEQ ID NO: 5427018 - DNA, 25 bp, Homo sapien
tatttctctcgtcctttgttacaaa

SEQ ID NO: 5427019 - DNA, 25 bp, Homo sapien
tgttgaatgatcacctctaaggtct

SEQ ID NO: 5427020 - DNA, 25 bp, Homo sapien
tgcgtggtcatctgatatggtctcc

SEQ ID NO: 5427021 - DNA, 25 bp, Homo sapien
tgcaaatgtctaggtgaaccctgcc

SEQ ID NO: 5427022 - DNA, 25 bp, Homo sapien
gagcacaattggtcccttgaagcca

SEQ ID NO: 5427023 - DNA, 25 bp, Homo sapien
cttatatgagaagacttgggtccac

SEQ ID NO: 5427024 - DNA, 25 bp, Homo sapien
caatgctaataattactgaggcact

SEQ ID NO: 5427025 - DNA, 25 bp, Homo sapien
gggtctccaaggtaatgaattcaaa

SEQ ID NO: 5427026 - DNA, 25 bp, Homo sapien
tacacagcatgattgacacaagtga

SEQ ID NO: 5427027 - DNA, 25 bp, Homo sapien
aatatgaaagcactcagatcaatgc

SEQ ID NO: 5427028 - DNA, 25 bp, Homo sapien
ccattcctgatttgtttgtagctac

SEQ ID NO: 5427029 - DNA, 25 bp, Homo sapien
gcaaagctctcagccattcctgatt

SEQ ID NO: 5427030 - DNA, 25 bp, Homo sapien
agttaaggtgagtgctgcaaagctc

SEQ ID NO: 5427031 - DNA, 25 bp, Homo sapien
ttaagttaaggtgagtgctgcaaag

SEQ ID NO: 5427032 - DNA, 25 bp, Homo sapien
tgataaacctgggaggcccttccac

SEQ ID NO: 5427033 - DNA, 25 bp, Homo sapien
tatggtcaggagtaaattcgggaac

SEQ ID NO: 5427034 - DNA, 25 bp, Homo sapien
ttggagagccacgaactaagcactg

SEQ ID NO: 5427035 - DNA, 25 bp, Homo sapien
tacctattggtgcataacagtcaga

SEQ ID NO: 5427036 - DNA, 25 bp, Homo sapien
tctagtaaagatttatttcgatacc

SEQ ID NO: 5427037 - DNA, 25 bp, Homo sapien
tggctctagtaaagatttatttcga

SEQ ID NO: 5427038 - DNA, 25 bp, Homo sapien
catctggctctagtaaagatttatt

SEQ ID NO: 5427039 - DNA, 25 bp, Homo sapien
tctttcatctggctctagtaaagat

SEQ ID NO: 5427040 - DNA, 25 bp, Homo sapien
caatggcttcattgggtgtaccaaa

SEQ ID NO: 5427041 - DNA, 25 bp, Homo sapien
ggaacgccatatttcataagctgaa

SEQ ID NO: 5427042 - DNA, 25 bp, Homo sapien
gtgtaccaaatgaatcggaacgcca

SEQ ID NO: 5427043 - DNA, 25 bp, Homo sapien
gaaatgctcatttggtgtaccgtct

SEQ ID NO: 5427044 - DNA, 25 bp, Homo sapien
tcctgggggtgtggaatatctctct

SEQ ID NO: 5427045 - DNA, 25 bp, Homo sapien
tggaatatctctctagagtctctcc

SEQ ID NO: 5427046 - DNA, 25 bp, Homo sapien
gggtgtggagtatctctccagagtc

SEQ ID NO: 5427047 - DNA, 25 bp, Homo sapien
tatcgctctagagtctctcctgggg

SEQ ID NO: 5427048 - DNA, 25 bp, Homo sapien
agtatctctctagtgtctcccctgg

SEQ ID NO: 5427049 - DNA, 25 bp, Homo sapien
ctgggggtgtggagtatctttctcc

SEQ ID NO: 5427050 - DNA, 25 bp, Homo sapien
ctggaggtgtggagtatctctctag

SEQ ID NO: 5427051 - DNA, 25 bp, Homo sapien
gggtgtggagtatctttctcctacc

SEQ ID NO: 5427052 - DNA, 25 bp, Homo sapien
aaggtgttgaatatctttcagcaac

SEQ ID NO: 5427053 - DNA, 25 bp, Homo sapien
ggtgttgaatatctttcagcaactt

SEQ ID NO: 5427054 - DNA, 25 bp, Homo sapien
aggtgttgaatatctttcagcaact

SEQ ID NO: 5427055 - DNA, 25 bp, Homo sapien
gtggaatatctttcaactgtctcac

SEQ ID NO: 5427056 - DNA, 25 bp, Homo sapien
attgtttagttatatctgaaggatt

SEQ ID NO: 5427057 - DNA, 25 bp, Homo sapien
ctcctgaatgtattgaggattgttt

SEQ ID NO: 5427058 - DNA, 25 bp, Homo sapien
cagactcaggagaaagtggacgacc

SEQ ID NO: 5427059 - DNA, 25 bp, Homo sapien
tagtttcaggaacctcacgctttcc

SEQ ID NO: 5427060 - DNA, 25 bp, Homo sapien
gacgacctagtgattcctgtttctg

SEQ ID NO: 5427061 - DNA, 25 bp, Homo sapien
gattcactctggacaagctttgcct

SEQ ID NO: 5427062 - DNA, 25 bp, Homo sapien
tctagaaggtatgcaacgcacctgc

SEQ ID NO: 5427063 - DNA, 25 bp, Homo sapien
tcagtcatcaagagtgggaagcact

SEQ ID NO: 5427064 - DNA, 25 bp, Homo sapien
gatgggcgccttttgcttggtcaaa

SEQ ID NO: 5427065 - DNA, 25 bp, Homo sapien
taccaaaagattcgctggcatgtgg

SEQ ID NO: 5427066 - DNA, 25 bp, Homo sapien
tataatccgacgaagacctgttggg

SEQ ID NO: 5427067 - DNA, 25 bp, Homo sapien
tctgaaaaggcgtcacgtgtatccc

SEQ ID NO: 5427068 - DNA, 25 bp, Homo sapien
aaagggagagccagtaaacctcagg

SEQ ID NO: 5427069 - DNA, 25 bp, Homo sapien
gggatgggccgattgttatgaaacc

SEQ ID NO: 5427070 - DNA, 25 bp, Homo sapien
gattctgacacgaaaatcgttcgtt

SEQ ID NO: 5427071 - DNA, 25 bp, Homo sapien
tctgtttaaaagattctgacacgaa

SEQ ID NO: 5427072 - DNA, 25 bp, Homo sapien
cacgaaaatcgttcgttgtctggtc

SEQ ID NO: 5427073 - DNA, 25 bp, Homo sapien
taaaagattctgacacgaaaatcgt

SEQ ID NO: 5427074 - DNA, 25 bp, Homo sapien
gaaaactttgttcttttgatggcta

SEQ ID NO: 5427075 - DNA, 25 bp, Homo sapien
tcaaaataacatgttcctgtgcata

SEQ ID NO: 5427076 - DNA, 25 bp, Homo sapien
tgttttgagagcaggaaaactttgt

SEQ ID NO: 5427077 - DNA, 25 bp, Homo sapien
ttgatggctaagtggaaaatcttac

SEQ ID NO: 5427078 - DNA, 25 bp, Homo sapien
gagtggaataaacgccctttctgat

SEQ ID NO: 5427079 - DNA, 25 bp, Homo sapien
cagagagtggaataaacgccctttc

SEQ ID NO: 5427080 - DNA, 25 bp, Homo sapien
tgattcttttgattgtagattaaat

SEQ ID NO: 5427081 - DNA, 25 bp, Homo sapien
cttgcagagagtggaataaacgccc

SEQ ID NO: 5427082 - DNA, 25 bp, Homo sapien
caatctcttgttcaatcctctcatg

SEQ ID NO: 5427083 - DNA, 25 bp, Homo sapien
tgttcaatcctctcatgcaaaattg

SEQ ID NO: 5427084 - DNA, 25 bp, Homo sapien
atcctctcatgcaaaattgattcag

SEQ ID NO: 5427085 - DNA, 25 bp, Homo sapien
ctctcatgcaaaattgattcaggag

SEQ ID NO: 5427086 - DNA, 25 bp, Homo sapien
tacaatgcagctgtatagtccttgg

SEQ ID NO: 5427087 - DNA, 25 bp, Homo sapien
tatctttgcaccttcgtgagtccag

SEQ ID NO: 5427088 - DNA, 25 bp, Homo sapien
gattgtttcagtctctcggattcct

SEQ ID NO: 5427089 - DNA, 25 bp, Homo sapien
cacttagtactgctgacgttgtcct

SEQ ID NO: 5427090 - DNA, 25 bp, Homo sapien
cgcactttacagtgacgtcctgaag

SEQ ID NO: 5427091 - DNA, 25 bp, Homo sapien
tgacgtcctgaagatgcaggaaaat

SEQ ID NO: 5427092 - DNA, 25 bp, Homo sapien
aggaattgagccgtgtcaccgcact

SEQ ID NO: 5427093 - DNA, 25 bp, Homo sapien
tgcaggaaaatcttgggcgcctcac

SEQ ID NO: 5427094 - DNA, 25 bp, Homo sapien
tgaaagggatgcagtatggcacaac

SEQ ID NO: 5427095 - DNA, 25 bp, Homo sapien
ctgtgtggatggaactttgagatac

SEQ ID NO: 5427096 - DNA, 25 bp, Homo sapien
gaactttgcctatctagggcttgca

SEQ ID NO: 5427097 - DNA, 25 bp, Homo sapien
gggacttggcggactctcttacatc

SEQ ID NO: 5427098 - DNA, 25 bp, Homo sapien
gaattagctgctggttatgaaacca

SEQ ID NO: 5427099 - DNA, 25 bp, Homo sapien
gctgctttgcaagagtactgcccag

SEQ ID NO: 5427100 - DNA, 25 bp, Homo sapien
gagtcactgtgagtgtagctgcaca

SEQ ID NO: 5427101 - DNA, 25 bp, Homo sapien
tagctgcacaagtggcttccccagc

SEQ ID NO: 5427102 - DNA, 25 bp, Homo sapien
ctgataaagagacatgccattggga

SEQ ID NO: 5427103 - DNA, 25 bp, Homo sapien
gagacatgccattgggagtttgatg

SEQ ID NO: 5427104 - DNA, 25 bp, Homo sapien
catgccattgggagtttgatgtatt

SEQ ID NO: 5427105 - DNA, 25 bp, Homo sapien
aaagagacatgccattgggagtttg

SEQ ID NO: 5427106 - DNA, 25 bp, Homo sapien
tcatcttctggataagcttcggcaa

SEQ ID NO: 5427107 - DNA, 25 bp, Homo sapien
tgagtcattctaaagaaccgagatg

SEQ ID NO: 5427108 - DNA, 25 bp, Homo sapien
tagcaacaaacgtgtaagttccttc

SEQ ID NO: 5427109 - DNA, 25 bp, Homo sapien
gatacttggcctacagcattactag

SEQ ID NO: 5427110 - DNA, 25 bp, Homo sapien
gcaggtggataaacaggcatttcct

SEQ ID NO: 5427111 - DNA, 25 bp, Homo sapien
ctgttccagaaacccggcattgaaa

SEQ ID NO: 5427112 - DNA, 25 bp, Homo sapien
atggcaggtggataaacaggcattt

SEQ ID NO: 5427113 - DNA, 25 bp, Homo sapien
caggcatttcctgatcaggagacac

SEQ ID NO: 5427114 - DNA, 25 bp, Homo sapien
ttccggatatcacggcacagaagcg

SEQ ID NO: 5427115 - DNA, 25 bp, Homo sapien
caaaagcgtgtattcttgcccatca

SEQ ID NO: 5427116 - DNA, 25 bp, Homo sapien
aattttgggctgtggtcttccggat

SEQ ID NO: 5427117 - DNA, 25 bp, Homo sapien
tatagactgccgcatcctctgggaa

SEQ ID NO: 5427118 - DNA, 25 bp, Homo sapien
cgctctgtctggtctcagagataaa

SEQ ID NO: 5427119 - DNA, 25 bp, Homo sapien
tataccagtgggcatcaacatcgtc

SEQ ID NO: 5427120 - DNA, 25 bp, Homo sapien
tagagagtgacagaactcctgttcc

SEQ ID NO: 5427121 - DNA, 25 bp, Homo sapien
ggtgtattctcctgcatcgctctgt

SEQ ID NO: 5427122 - DNA, 25 bp, Homo sapien
agagttttgcagttgacacgttgcc

SEQ ID NO: 5427123 - DNA, 25 bp, Homo sapien
ttaatacttcggatgcgaacatctc

SEQ ID NO: 5427124 - DNA, 25 bp, Homo sapien
tcagaaggcggtggacatatttctc

SEQ ID NO: 5427125 - DNA, 25 bp, Homo sapien
cccagcatcagacatccgggtggat

SEQ ID NO: 5427126 - DNA, 25 bp, Homo sapien
tcagaaacttcacattcaaacatgg

SEQ ID NO: 5427127 - DNA, 25 bp, Homo sapien
ccagtaccttaatgtccttaatgtg

SEQ ID NO: 5427128 - DNA, 25 bp, Homo sapien
aacatggctcgcttcttctccagta

SEQ ID NO: 5427129 - DNA, 25 bp, Homo sapien
tacagtgatgtcaggttcagaaact

SEQ ID NO: 5427130 - DNA, 25 bp, Homo sapien
ttcttcagcgttgatgtctttcagc

SEQ ID NO: 5427131 - DNA, 25 bp, Homo sapien
gcatccccaaagtgaacattcctga

SEQ ID NO: 5427132 - DNA, 25 bp, Homo sapien
taagagatgccttcatagttcactg

SEQ ID NO: 5427133 - DNA, 25 bp, Homo sapien
aaaggtgtagtcagcagcatcccca

SEQ ID NO: 5427134 - DNA, 25 bp, Homo sapien
tcagctgatggagttttccctgcac

SEQ ID NO: 5427135 - DNA, 25 bp, Homo sapien
ggcactgacttggtcattgccacag

SEQ ID NO: 5427136 - DNA, 25 bp, Homo sapien
ggacattgaagtgggacacctcaca

SEQ ID NO: 5427137 - DNA, 25 bp, Homo sapien
tattctgccgagtcctctgtgctgg

SEQ ID NO: 5427138 - DNA, 25 bp, Homo sapien
ggcttaatttccacactcttatgga

SEQ ID NO: 5427139 - DNA, 25 bp, Homo sapien
gtctgtgtttgtcacttggcttaat

SEQ ID NO: 5427140 - DNA, 25 bp, Homo sapien
tatggaaccattttactggaacagt

SEQ ID NO: 5427141 - DNA, 25 bp, Homo sapien
cagtgtcatgggaaacactaacttc

SEQ ID NO: 5427142 - DNA, 25 bp, Homo sapien
gatggcacagtttttaatcctcaga

SEQ ID NO: 5427143 - DNA, 25 bp, Homo sapien
cataaacagactcatccacgatggc

SEQ ID NO: 5427144 - DNA, 25 bp, Homo sapien
tagggtgtgtaagctcgacagtgaa

SEQ ID NO: 5427145 - DNA, 25 bp, Homo sapien
cacgtgcagtctggcactggctcca

SEQ ID NO: 5427146 - DNA, 25 bp, Homo sapien
agacaaatttatgattgggttagaa

SEQ ID NO: 5427147 - DNA, 25 bp, Homo sapien
gacaaatttatgattgggttagaaa

SEQ ID NO: 5427148 - DNA, 25 bp, Homo sapien
aagacaaatttatgattgggttaga

SEQ ID NO: 5427149 - DNA, 25 bp, Homo sapien
aaagacaaatttatgattgggttag

SEQ ID NO: 5427150 - DNA, 25 bp, Homo sapien
ttggcagatgttttggaggtggcca

SEQ ID NO: 5427151 - DNA, 25 bp, Homo sapien
gtttggcagatgttttggaggtggc

SEQ ID NO: 5427152 - DNA, 25 bp, Homo sapien
tttggcagatgttttggaggtggcc

SEQ ID NO: 5427153 - DNA, 25 bp, Homo sapien
gagtttggcagatgttttggaggtg

SEQ ID NO: 5427154 - DNA, 25 bp, Homo sapien
cagcaatgataagtctccttttgtg

SEQ ID NO: 5427155 - DNA, 25 bp, Homo sapien
tctccaatgtcatctaatttggtgg

SEQ ID NO: 5427156 - DNA, 25 bp, Homo sapien
tgataagtctccttttgtggccatc

SEQ ID NO: 5427157 - DNA, 25 bp, Homo sapien
ccaatgtcatctaatttggtggcag

SEQ ID NO: 5427158 - DNA, 25 bp, Homo sapien
tggcaacttcacattcaaacacagc

SEQ ID NO: 5427159 - DNA, 25 bp, Homo sapien
ttcctgggattcagctacggtctga

SEQ ID NO: 5427160 - DNA, 25 bp, Homo sapien
tcaaccattcgcctttggaatctgg

SEQ ID NO: 5427161 - DNA, 25 bp, Homo sapien
tcagtggtaggtgtttgccatccct

SEQ ID NO: 5427162 - DNA, 25 bp, Homo sapien
tacaggtaaggtcacgaagacctct

SEQ ID NO: 5427163 - DNA, 25 bp, Homo sapien
caggacatcaattccagagtgggac

SEQ ID NO: 5427164 - DNA, 25 bp, Homo sapien
gtcatattttctcccgcgtaaaatg

SEQ ID NO: 5427165 - DNA, 25 bp, Homo sapien
gagtgggacagctcaacctcaaaca

SEQ ID NO: 5427166 - DNA, 25 bp, Homo sapien
tgccaactatcagcttgtaaggtcc

SEQ ID NO: 5427167 - DNA, 25 bp, Homo sapien
taaggtccttcgtctgaagcatgag

SEQ ID NO: 5427168 - DNA, 25 bp, Homo sapien
cacaatggcctgtacacggtcatca

SEQ ID NO: 5427169 - DNA, 25 bp, Homo sapien
ttaacagaagtcacatcagggactg

SEQ ID NO: 5427170 - DNA, 25 bp, Homo sapien
atagacagagacacgcccactggtg

SEQ ID NO: 5427171 - DNA, 25 bp, Homo sapien
taagtccttgtaggatagcaatggg

SEQ ID NO: 5427172 - DNA, 25 bp, Homo sapien
aacttcaagctgaacaatgtcaccc

SEQ ID NO: 5427173 - DNA, 25 bp, Homo sapien
aatgtcaccctcacagactttttgg

SEQ ID NO: 5427174 - DNA, 25 bp, Homo sapien
gtgaggttctgacgtccacgacgag

SEQ ID NO: 5427175 - DNA, 25 bp, Homo sapien
tggttacatccttgaccgtgaggtt

SEQ ID NO: 5427176 - DNA, 25 bp, Homo sapien
gattctggaacttctatgtcctgaa

SEQ ID NO: 5427177 - DNA, 25 bp, Homo sapien
tttcccgtcgatgacaaagctgtat

SEQ ID NO: 5427178 - DNA, 25 bp, Homo sapien
ttcatcttccacaagtacacagctg

SEQ ID NO: 5427179 - DNA, 25 bp, Homo sapien
tcctgtgtgaaagtgatcaattgct

SEQ ID NO: 5427180 - DNA, 25 bp, Homo sapien
cagcatcagacgtatcaatggtcag

SEQ ID NO: 5427181 - DNA, 25 bp, Homo sapien
gaagtgaacctttctgtcagagtgc

SEQ ID NO: 5427182 - DNA, 25 bp, Homo sapien
caaacattgtcttcgggccagtacc

SEQ ID NO: 5427183 - DNA, 25 bp, Homo sapien
taatagcagtcgcagtataccaggc

SEQ ID NO: 5427184 - DNA, 25 bp, Homo sapien
tgatttgcagtccacgatgtccagg

SEQ ID NO: 5427185 - DNA, 25 bp, Homo sapien
tttcgagacttgagctccacagcgg

SEQ ID NO: 5427186 - DNA, 25 bp, Homo sapien
tgactttcatttcaagtcgggaacc

SEQ ID NO: 5427187 - DNA, 25 bp, Homo sapien
gggttacccgtagctctgactttca

SEQ ID NO: 5427188 - DNA, 25 bp, Homo sapien
gtttttcaaccatacaatgtcaggg

SEQ ID NO: 5427189 - DNA, 25 bp, Homo sapien
tcgggaaccttcctttatattgaca

SEQ ID NO: 5427190 - DNA, 25 bp, Homo sapien
tgatttagagggagtaaggctgaaa

SEQ ID NO: 5427191 - DNA, 25 bp, Homo sapien
catgatttagagggagtaaggctga

SEQ ID NO: 5427192 - DNA, 25 bp, Homo sapien
gatttagagggagtaaggctgaaat

SEQ ID NO: 5427193 - DNA, 25 bp, Homo sapien
atgatttagagggagtaaggctgaa

SEQ ID NO: 5427194 - DNA, 25 bp, Homo sapien
tgtggcagggacaataattagtgat

SEQ ID NO: 5427195 - DNA, 25 bp, Homo sapien
tccccagaatcactgggtgtggcag

SEQ ID NO: 5427196 - DNA, 25 bp, Homo sapien
gagtaccatcttctttaatgactac

SEQ ID NO: 5427197 - DNA, 25 bp, Homo sapien
ttttgggcaaccacagtccattccc

SEQ ID NO: 5427198 - DNA, 25 bp, Homo sapien
gacatccgtgcaggagacatgcgta

SEQ ID NO: 5427199 - DNA, 25 bp, Homo sapien
gacatgcgtataggagacctgctca

SEQ ID NO: 5427200 - DNA, 25 bp, Homo sapien
gaacgtctctggcataggtctacca

SEQ ID NO: 5427201 - DNA, 25 bp, Homo sapien
caggagacatccttgcaggtgacat

SEQ ID NO: 5427202 - DNA, 25 bp, Homo sapien
tctccatgtttgatgcgcttgccat

SEQ ID NO: 5427203 - DNA, 25 bp, Homo sapien
gaagaacaacaggtatacgcagact

SEQ ID NO: 5427204 - DNA, 25 bp, Homo sapien
agctccaagtggtgcagcaggctcc

SEQ ID NO: 5427205 - DNA, 25 bp, Homo sapien
tgggaatgtaagtcggagctccaag

SEQ ID NO: 5427206 - DNA, 25 bp, Homo sapien
gaattctataattcttgattcttga

SEQ ID NO: 5427207 - DNA, 25 bp, Homo sapien
tccagacatcttgcaatgaaaagtg

SEQ ID NO: 5427208 - DNA, 25 bp, Homo sapien
cagattcagaaatgtcaactgccat

SEQ ID NO: 5427209 - DNA, 25 bp, Homo sapien
agcttcagattcagaaatgtcaact

SEQ ID NO: 5427210 - DNA, 25 bp, Homo sapien
cttcaaaggaagaaatatggaattc

SEQ ID NO: 5427211 - DNA, 25 bp, Homo sapien
cataagttctgaccactacagtatc

SEQ ID NO: 5427212 - DNA, 25 bp, Homo sapien
tcttctacataagttctgaccacta

SEQ ID NO: 5427213 - DNA, 25 bp, Homo sapien
tctacataagttctgaccactacag

SEQ ID NO: 5427214 - DNA, 25 bp, Homo sapien
ctgatcttctacataagttctgacc

SEQ ID NO: 5427215 - DNA, 25 bp, Homo sapien
tatacaaatccaggtgctgtttctc

SEQ ID NO: 5427216 - DNA, 25 bp, Homo sapien
cagagtatacaaatccaggtgctgt

SEQ ID NO: 5427217 - DNA, 25 bp, Homo sapien
tactcagagtatacaaatccaggtg

SEQ ID NO: 5427218 - DNA, 25 bp, Homo sapien
tcatactcagagtatacaaatccag

SEQ ID NO: 5427219 - DNA, 25 bp, Homo sapien
tgataaagcatttcttgctgggact

SEQ ID NO: 5427220 - DNA, 25 bp, Homo sapien
ttgaacaaatgcagtcacttgtgtc

SEQ ID NO: 5427221 - DNA, 25 bp, Homo sapien
cttgaacaaatgcagtcacttgtgt

SEQ ID NO: 5427222 - DNA, 25 bp, Homo sapien
ttctccatgcttattgcgaacaaca

SEQ ID NO: 5427223 - DNA, 25 bp, Homo sapien
caatagtgtattctccagcatcatc

SEQ ID NO: 5427224 - DNA, 25 bp, Homo sapien
tcaccggtttgtttgttgtaactca

SEQ ID NO: 5427225 - DNA, 25 bp, Homo sapien
gaaatcaccagcttgcattcaccgg

SEQ ID NO: 5427226 - DNA, 25 bp, Homo sapien
tatccagtggttagaggaacaccag

SEQ ID NO: 5427227 - DNA, 25 bp, Homo sapien
tgtaataaagtaaggcgcggcaggt

SEQ ID NO: 5427228 - DNA, 25 bp, Homo sapien
gggttgccgccaacttggcatccaa

SEQ ID NO: 5427229 - DNA, 25 bp, Homo sapien
gctagtatcagtcataaccacatct

SEQ ID NO: 5427230 - DNA, 25 bp, Homo sapien
agtaaatttctcagtcacggctgtg

SEQ ID NO: 5427231 - DNA, 25 bp, Homo sapien
atttctcagtcacggctgtggtttc

SEQ ID NO: 5427232 - DNA, 25 bp, Homo sapien
tctcagtcacggctgtggtttcctt

SEQ ID NO: 5427233 - DNA, 25 bp, Homo sapien
aaatttctcagtcacggctgtggtt

SEQ ID NO: 5427234 - DNA, 25 bp, Homo sapien
gcttcgcgaatcataagacgagcaa

SEQ ID NO: 5427235 - DNA, 25 bp, Homo sapien
gacggttccagcctcatttacagca

SEQ ID NO: 5427236 - DNA, 25 bp, Homo sapien
gctgtcttccgcaaatgcttcgcga

SEQ ID NO: 5427237 - DNA, 25 bp, Homo sapien
tacagcactgcaagtaaatcgcccg

SEQ ID NO: 5427238 - DNA, 25 bp, Homo sapien
caacaggtgctggtactcttgctgt

SEQ ID NO: 5427239 - DNA, 25 bp, Homo sapien
ttggtggagtaacaggaatttcaac

SEQ ID NO: 5427240 - DNA, 25 bp, Homo sapien
cgagaccaaagttggtggagtaaca

SEQ ID NO: 5427241 - DNA, 25 bp, Homo sapien
ggaatttcaacaggtgctggtactc

SEQ ID NO: 5427242 - DNA, 25 bp, Homo sapien
agtaggagccttcaccgatttggtg

SEQ ID NO: 5427243 - DNA, 25 bp, Homo sapien
caaagcgctcttcacggacggtggt

SEQ ID NO: 5427244 - DNA, 25 bp, Homo sapien
cgtccgtgcagtacttcaaagcgct

SEQ ID NO: 5427245 - DNA, 25 bp, Homo sapien
taatgtggcaatagcactaccggct

SEQ ID NO: 5427246 - DNA, 25 bp, Homo sapien
tccgttgttagatctgtagttttct

SEQ ID NO: 5427247 - DNA, 25 bp, Homo sapien
catggactaatctttccgttgttag

SEQ ID NO: 5427248 - DNA, 25 bp, Homo sapien
tgaaacagtaaagtgagggctagct

SEQ ID NO: 5427249 - DNA, 25 bp, Homo sapien
tgcgggggcgtttatccacatggac

SEQ ID NO: 5427250 - DNA, 25 bp, Homo sapien
gaggctcagctacctttgcggcgga

SEQ ID NO: 5427251 - DNA, 25 bp, Homo sapien
gcttgactgctttagggacaacgtg

SEQ ID NO: 5427252 - DNA, 25 bp, Homo sapien
cctggattactctaggcttgactgc

SEQ ID NO: 5427253 - DNA, 25 bp, Homo sapien
ccgtactccaaagtggtctgctgag

SEQ ID NO: 5427254 - DNA, 25 bp, Homo sapien
gaaccttttagccagtctgctatga

SEQ ID NO: 5427255 - DNA, 25 bp, Homo sapien
caaatgagtatgctggtaaccgctt

SEQ ID NO: 5427256 - DNA, 25 bp, Homo sapien
gaaatgctcactgttcaactggagg

SEQ ID NO: 5427257 - DNA, 25 bp, Homo sapien
cacatgtttgtaacctagagaagca

SEQ ID NO: 5427258 - DNA, 25 bp, Homo sapien
tttaatagtgaatccttctctagtc

SEQ ID NO: 5427259 - DNA, 25 bp, Homo sapien
gcagtggtaactactacttcaggta

SEQ ID NO: 5427260 - DNA, 25 bp, Homo sapien
tctctagtcattggcggtgtggctg

SEQ ID NO: 5427261 - DNA, 25 bp, Homo sapien
tctcttctcgaaaaagatgtatttg

SEQ ID NO: 5427262 - DNA, 25 bp, Homo sapien
tggttaatagtgactcatacataag

SEQ ID NO: 5427263 - DNA, 25 bp, Homo sapien
aatgtattacaataaggaatttcac

SEQ ID NO: 5427264 - DNA, 25 bp, Homo sapien
taagaaattcagagacttgatatta

SEQ ID NO: 5427265 - DNA, 25 bp, Homo sapien
gaatttcacatgatatgtggtatta

SEQ ID NO: 5427266 - DNA, 25 bp, Homo sapien
gtagccatagtttctctagttctca

SEQ ID NO: 5427267 - DNA, 25 bp, Homo sapien
ctttggctttagcagtagcaactgc

SEQ ID NO: 5427268 - DNA, 25 bp, Homo sapien
gacaaggcagttttctcggcttcct

SEQ ID NO: 5427269 - DNA, 25 bp, Homo sapien
gcaactgctattgtagacaaggcag

SEQ ID NO: 5427270 - DNA, 25 bp, Homo sapien
cagggcttcaaacacacatagtatg

SEQ ID NO: 5427271 - DNA, 25 bp, Homo sapien
gatgcaagatggttattcagggtta

SEQ ID NO: 5427272 - DNA, 25 bp, Homo sapien
taaaaaacctctagatgagtccctg

SEQ ID NO: 5427273 - DNA, 25 bp, Homo sapien
gagaaataaactttcaccggcaatg

SEQ ID NO: 5427274 - DNA, 25 bp, Homo sapien
gcaactatgactttaggtacaactg

SEQ ID NO: 5427275 - DNA, 25 bp, Homo sapien
tcctgagttatttgcacttgttctc

SEQ ID NO: 5427276 - DNA, 25 bp, Homo sapien
tctcttttggtagtaatgccttctc

SEQ ID NO: 5427277 - DNA, 25 bp, Homo sapien
ctttgggtgtggcaactatgacttt

SEQ ID NO: 5427278 - DNA, 25 bp, Homo sapien
gcaatctctgagacatttcagtagc

SEQ ID NO: 5427279 - DNA, 25 bp, Homo sapien
tagtaacaagccaaagaaagtctga

SEQ ID NO: 5427280 - DNA, 25 bp, Homo sapien
tgaattgacttgtttacggacatct

SEQ ID NO: 5427281 - DNA, 25 bp, Homo sapien
catccatactgtttcactggcaaaa

SEQ ID NO: 5427282 - DNA, 25 bp, Homo sapien
gaagtgaagaagtgatgattaagat

SEQ ID NO: 5427283 - DNA, 25 bp, Homo sapien
gatccatgatgaaaatgtaggtgat

SEQ ID NO: 5427284 - DNA, 25 bp, Homo sapien
aaatggtgcaagagtgactttcaca

SEQ ID NO: 5427285 - DNA, 25 bp, Homo sapien
aggtgatttgcaaatgaaatggtgc

SEQ ID NO: 5427286 - DNA, 25 bp, Homo sapien
tgtggactttgcagtggcaactacc

SEQ ID NO: 5427287 - DNA, 25 bp, Homo sapien
cttaggtgcatttgatcttgttgtg

SEQ ID NO: 5427288 - DNA, 25 bp, Homo sapien
taccaccatggatgcagcagttatc

SEQ ID NO: 5427289 - DNA, 25 bp, Homo sapien
ataacttaggtgcatttgatcttgt

SEQ ID NO: 5427290 - DNA, 25 bp, Homo sapien
ttggctttagctgcggaaattacta

SEQ ID NO: 5427291 - DNA, 25 bp, Homo sapien
gttctttggctttagctgcggaaat

SEQ ID NO: 5427292 - DNA, 25 bp, Homo sapien
ctttagctgcggaaattactacctt

SEQ ID NO: 5427293 - DNA, 25 bp, Homo sapien
ctttggctttagctgcggaaattac

SEQ ID NO: 5427294 - DNA, 25 bp, Homo sapien
gccactactaccttagttacagcag

SEQ ID NO: 5427295 - DNA, 25 bp, Homo sapien
ctgctcatgagttacgtgcatctgc

SEQ ID NO: 5427296 - DNA, 25 bp, Homo sapien
ttccttggctttatcggcggccact

SEQ ID NO: 5427297 - DNA, 25 bp, Homo sapien
gagttacgtgcatctgctcttgctt

SEQ ID NO: 5427298 - DNA, 25 bp, Homo sapien
tctacagcgctgatcactggttctc

SEQ ID NO: 5427299 - DNA, 25 bp, Homo sapien
tatcaacggcagcaacaacagtcgc

SEQ ID NO: 5427300 - DNA, 25 bp, Homo sapien
agcagtcgtggttgtcctctgagca

SEQ ID NO: 5427301 - DNA, 25 bp, Homo sapien
caacagctgcacttttgtcagcatc

SEQ ID NO: 5427302 - DNA, 25 bp, Homo sapien
tgctgcgtagctagcactggccgac

SEQ ID NO: 5427303 - DNA, 25 bp, Homo sapien
gccacggtggatgcctgagtcttac

SEQ ID NO: 5427304 - DNA, 25 bp, Homo sapien
tgagtcttacgcatgagcaatggag

SEQ ID NO: 5427305 - DNA, 25 bp, Homo sapien
gcaatggagacctaacagacctgat

SEQ ID NO: 5427306 - DNA, 25 bp, Homo sapien
gtcacagcgagatacaatgcacctt

SEQ ID NO: 5427307 - DNA, 25 bp, Homo sapien
aaatgcatcttgtcactatctagga

SEQ ID NO: 5427308 - DNA, 25 bp, Homo sapien
ttaacagcaggacacaggtaagccc

SEQ ID NO: 5427309 - DNA, 25 bp, Homo sapien
tacaacattaaccagtttcacgaag

SEQ ID NO: 5427310 - DNA, 25 bp, Homo sapien
aagagaagtgcgtggtccctagcga

SEQ ID NO: 5427311 - DNA, 25 bp, Homo sapien
ggacactgaagaagcgaaccactct

SEQ ID NO: 5427312 - DNA, 25 bp, Homo sapien
ccaatctgatagaggaagtgatcca

SEQ ID NO: 5427313 - DNA, 25 bp, Homo sapien
aaacccctgagaccctagtaggcag

SEQ ID NO: 5427314 - DNA, 25 bp, Homo sapien
gatcttgactttggcttcggaggaa

SEQ ID NO: 5427315 - DNA, 25 bp, Homo sapien
tgatctggcatcaaagtgggcttca

SEQ ID NO: 5427316 - DNA, 25 bp, Homo sapien
gcggcaccatctatgaccatctcaa

SEQ ID NO: 5427317 - DNA, 25 bp, Homo sapien
ctttggcagcaatagacggtggtgt

SEQ ID NO: 5427318 - DNA, 25 bp, Homo sapien
gaatagctggggacgcaacagcctg

SEQ ID NO: 5427319 - DNA, 25 bp, Homo sapien
tggggacgcaacagcctgaaaggct

SEQ ID NO: 5427320 - DNA, 25 bp, Homo sapien
aacaaagcccacgttgaggaggaat

SEQ ID NO: 5427321 - DNA, 25 bp, Homo sapien
agcccacgttgaggaggaatagctg

SEQ ID NO: 5427322 - DNA, 25 bp, Homo sapien
tgtctttttagcaggtacttcttct

SEQ ID NO: 5427323 - DNA, 25 bp, Homo sapien
tgagcagtcgaaacaattgtctttg

SEQ ID NO: 5427324 - DNA, 25 bp, Homo sapien
caattcgggtttgtcttgattctga

SEQ ID NO: 5427325 - DNA, 25 bp, Homo sapien
tctgagatctgagcagtcgaaacaa

SEQ ID NO: 5427326 - DNA, 25 bp, Homo sapien
catgctctgcagtcgttgaacgaag

SEQ ID NO: 5427327 - DNA, 25 bp, Homo sapien
ggatttcggctccatcccggtagaa

SEQ ID NO: 5427328 - DNA, 25 bp, Homo sapien
caatcagtaagctgtagaggtcgcc

SEQ ID NO: 5427329 - DNA, 25 bp, Homo sapien
accacaggtgtagggattccagtca

SEQ ID NO: 5427330 - DNA, 25 bp, Homo sapien
tcgctaaaggagatctgcacgccgg

SEQ ID NO: 5427331 - DNA, 25 bp, Homo sapien
ggctttcagggaatatcgtccactg

SEQ ID NO: 5427332 - DNA, 25 bp, Homo sapien
gagaagctcagcagtactagtcgct

SEQ ID NO: 5427333 - DNA, 25 bp, Homo sapien
gatcgtcagtttagcgcggccatcg

SEQ ID NO: 5427334 - DNA, 25 bp, Homo sapien
gaaaaccctacagttgcatgatcag

SEQ ID NO: 5427335 - DNA, 25 bp, Homo sapien
tcactgccttgtccgaatctgtaaa

SEQ ID NO: 5427336 - DNA, 25 bp, Homo sapien
taaaagctttccagcatggaatgcc

SEQ ID NO: 5427337 - DNA, 25 bp, Homo sapien
acctttatgtttgaatgggcaccac

SEQ ID NO: 5427338 - DNA, 25 bp, Homo sapien
caaaggttgcggtactaccctccag

SEQ ID NO: 5427339 - DNA, 25 bp, Homo sapien
taacggctgcgtaaacgtcggtgct

SEQ ID NO: 5427340 - DNA, 25 bp, Homo sapien
taaacgtcggtgcttgagttgtcat

SEQ ID NO: 5427341 - DNA, 25 bp, Homo sapien
taccacaacgctttgtaacggctgc

SEQ ID NO: 5427342 - DNA, 25 bp, Homo sapien
ctttgtaatctctttcctgactgga

SEQ ID NO: 5427343 - DNA, 25 bp, Homo sapien
aatatgcaagctttttgtagacggc

SEQ ID NO: 5427344 - DNA, 25 bp, Homo sapien
cctctgcatcagcttagtaagtgaa

SEQ ID NO: 5427345 - DNA, 25 bp, Homo sapien
tgtagacggcatacggtgctttcta

SEQ ID NO: 5427346 - DNA, 25 bp, Homo sapien
cctatggagagttggtttttctgac

SEQ ID NO: 5427347 - DNA, 25 bp, Homo sapien
gaatcggtgagcctctaatcctaaa

SEQ ID NO: 5427348 - DNA, 25 bp, Homo sapien
gaccatctccgacatgaatcggtga

SEQ ID NO: 5427349 - DNA, 25 bp, Homo sapien
caaggttgcttctgaaacgacgtcc

SEQ ID NO: 5427350 - DNA, 25 bp, Homo sapien
tttctacacctttagccacacagtt

SEQ ID NO: 5427351 - DNA, 25 bp, Homo sapien
ccttacctctgtgaccatactttgg

SEQ ID NO: 5427352 - DNA, 25 bp, Homo sapien
catcagtattatcatgagtagagcg

SEQ ID NO: 5427353 - DNA, 25 bp, Homo sapien
gttatttgaatagccctttctacac

SEQ ID NO: 5427354 - DNA, 25 bp, Homo sapien
gacatgtcgcaactagatttcaggt

SEQ ID NO: 5427355 - DNA, 25 bp, Homo sapien
tatgtttcacatcaagtattccctc

SEQ ID NO: 5427356 - DNA, 25 bp, Homo sapien
ccccaccaaaatatcagaggaaggt

SEQ ID NO: 5427357 - DNA, 25 bp, Homo sapien
gatttcaggtttccataatgtctgc

SEQ ID NO: 5427358 - DNA, 25 bp, Homo sapien
caaggaattgatctagttcatttca

SEQ ID NO: 5427359 - DNA, 25 bp, Homo sapien
tcaatatctctaacagataaagggc

SEQ ID NO: 5427360 - DNA, 25 bp, Homo sapien
aaatttgtgagcttagagtttcttt

SEQ ID NO: 5427361 - DNA, 25 bp, Homo sapien
atctctaacagataaagggcttttc

SEQ ID NO: 5427362 - DNA, 25 bp, Homo sapien
tctgttttccaacagcttgtttgtg

SEQ ID NO: 5427363 - DNA, 25 bp, Homo sapien
tgcatttccagctgactctgttttc

SEQ ID NO: 5427364 - DNA, 25 bp, Homo sapien
gctgactctgttttccaacagcttg

SEQ ID NO: 5427365 - DNA, 25 bp, Homo sapien
ttccaacagcttgtttgtgtgtggg

SEQ ID NO: 5427366 - DNA, 25 bp, Homo sapien
tggcaatacaatgacaacagggctg

SEQ ID NO: 5427367 - DNA, 25 bp, Homo sapien
gactgtgtcttaggtactggcaata

SEQ ID NO: 5427368 - DNA, 25 bp, Homo sapien
ggttcttacagcctagccagaggag

SEQ ID NO: 5427369 - DNA, 25 bp, Homo sapien
tattattttagtccgtggagccagc

SEQ ID NO: 5427370 - DNA, 25 bp, Homo sapien
tgggaagggagatcctgccaaatta

SEQ ID NO: 5427371 - DNA, 25 bp, Homo sapien
gcaacagcagttaggcaagattcac

SEQ ID NO: 5427372 - DNA, 25 bp, Homo sapien
caaaaaggatacaagaggccggcta

SEQ ID NO: 5427373 - DNA, 25 bp, Homo sapien
tccccaaagagttaacatgaacaag

SEQ ID NO: 5427374 - DNA, 25 bp, Homo sapien
caaacccgtgagagcaacatgagga

SEQ ID NO: 5427375 - DNA, 25 bp, Homo sapien
tcagactggagatacacttggtggg

SEQ ID NO: 5427376 - DNA, 25 bp, Homo sapien
tatgcagcccaagaaagtatacgcc

SEQ ID NO: 5427377 - DNA, 25 bp, Homo sapien
gagaatgatgtccattggtgccaac

SEQ ID NO: 5427378 - DNA, 25 bp, Homo sapien
tgaggagccagtacattagggacac

SEQ ID NO: 5427379 - DNA, 25 bp, Homo sapien
tattgtgtgaggagccagtacatta

SEQ ID NO: 5427380 - DNA, 25 bp, Homo sapien
cattagggacacactaacatagacg

SEQ ID NO: 5427381 - DNA, 25 bp, Homo sapien
gggacacactaacatagacgacaca

SEQ ID NO: 5427382 - DNA, 25 bp, Homo sapien
agtttactcttgtgattggcagcct

SEQ ID NO: 5427383 - DNA, 25 bp, Homo sapien
gtttactcttgtgattggcagcctg

SEQ ID NO: 5427384 - DNA, 25 bp, Homo sapien
cagtttactcttgtgattggcagcc

SEQ ID NO: 5427385 - DNA, 25 bp, Homo sapien
acattggaagagagagcgccgctag

SEQ ID NO: 5427386 - DNA, 25 bp, Homo sapien
cgagccacatagaggcctgcgtctg

SEQ ID NO: 5427387 - DNA, 25 bp, Homo sapien
tgcatacctttggaatgaacaccga

SEQ ID NO: 5427388 - DNA, 25 bp, Homo sapien
ccgctagagttttgggcccgagcca

SEQ ID NO: 5427389 - DNA, 25 bp, Homo sapien
taaacctttcagttagtgctcacag

SEQ ID NO: 5427390 - DNA, 25 bp, Homo sapien
gaatattaatcagctagccctaaac

SEQ ID NO: 5427391 - DNA, 25 bp, Homo sapien
gggcacacacaataactgaaactga

SEQ ID NO: 5427392 - DNA, 25 bp, Homo sapien
gacacgtgtgactctgttggaaaga

SEQ ID NO: 5427393 - DNA, 25 bp, Homo sapien
ttatggcttgtcattataggctacc

SEQ ID NO: 5427394 - DNA, 25 bp, Homo sapien
atggcttgtcattataggctaccca

SEQ ID NO: 5427395 - DNA, 25 bp, Homo sapien
tatggcttgtcattataggctaccc

SEQ ID NO: 5427396 - DNA, 25 bp, Homo sapien
tggcttgtcattataggctacccac

SEQ ID NO: 5427397 - DNA, 25 bp, Homo sapien
cctgattgaaacctgaggcccgaga

SEQ ID NO: 5427398 - DNA, 25 bp, Homo sapien
gaaccatttgcctctgatagcccct

SEQ ID NO: 5427399 - DNA, 25 bp, Homo sapien
taatctcttctcgaggaaccatttg

SEQ ID NO: 5427400 - DNA, 25 bp, Homo sapien
gaaattaggtgcctggtcagctagg

SEQ ID NO: 5427401 - DNA, 25 bp, Homo sapien
tccacgaatcctctggaggttagtg

SEQ ID NO: 5427402 - DNA, 25 bp, Homo sapien
aggtaaggcctctcaaaatgacttg

SEQ ID NO: 5427403 - DNA, 25 bp, Homo sapien
catcatgctctctggatgttcagca

SEQ ID NO: 5427404 - DNA, 25 bp, Homo sapien
tcagctttgaactggaggtaaggcc

SEQ ID NO: 5427405 - DNA, 25 bp, Homo sapien
tggtggaagaacagattcctgggca

SEQ ID NO: 5427406 - DNA, 25 bp, Homo sapien
agcctgcaccccatagctgcttatg

SEQ ID NO: 5427407 - DNA, 25 bp, Homo sapien
gcaccccatagctgcttatgtgaag

SEQ ID NO: 5427408 - DNA, 25 bp, Homo sapien
cctgcaccccatagctgcttatgtg

SEQ ID NO: 5427409 - DNA, 25 bp, Homo sapien
ctccatgtcagatggtgcaagaggg

SEQ ID NO: 5427410 - DNA, 25 bp, Homo sapien
tccattgatgcccaaaagatctgcc

SEQ ID NO: 5427411 - DNA, 25 bp, Homo sapien
gtcgctcttcccctgttccattgat

SEQ ID NO: 5427412 - DNA, 25 bp, Homo sapien
tcaggtcttgtggtagtcgctcttc

SEQ ID NO: 5427413 - DNA, 25 bp, Homo sapien
ttagcaagtcaatgtaatcataatg

SEQ ID NO: 5427414 - DNA, 25 bp, Homo sapien
gcaagtcaatgtaatcataatggaa

SEQ ID NO: 5427415 - DNA, 25 bp, Homo sapien
ttcctttagcaagtcaatgtaatca

SEQ ID NO: 5427416 - DNA, 25 bp, Homo sapien
gtcaatgtaatcataatggaagtct

SEQ ID NO: 5427417 - DNA, 25 bp, Homo sapien
tttgtattctacgaaaagtgatcat

SEQ ID NO: 5427418 - DNA, 25 bp, Homo sapien
aaagtgatcatgattagtttactat

SEQ ID NO: 5427419 - DNA, 25 bp, Homo sapien
gattagtttactatttccatgagga

SEQ ID NO: 5427420 - DNA, 25 bp, Homo sapien
tcaaatttgtattctacgaaaagtg

SEQ ID NO: 5427421 - DNA, 25 bp, Homo sapien
gggactcacataattcagtcacaga

SEQ ID NO: 5427422 - DNA, 25 bp, Homo sapien
tctgtgagggactcacataattcag

SEQ ID NO: 5427423 - DNA, 25 bp, Homo sapien
tgtgagggactcacataattcagtc

SEQ ID NO: 5427424 - DNA, 25 bp, Homo sapien
tctcaatatatttctgtccttcttc

SEQ ID NO: 5427425 - DNA, 25 bp, Homo sapien
tattttccaactcttacaactgtgg

SEQ ID NO: 5427426 - DNA, 25 bp, Homo sapien
cactgagggtgcaataaacttatta

SEQ ID NO: 5427427 - DNA, 25 bp, Homo sapien
caactgtggcacttgcatcttcgta

SEQ ID NO: 5427428 - DNA, 25 bp, Homo sapien
ttgcatcttcgtaccaaaaatgaca

SEQ ID NO: 5427429 - DNA, 25 bp, Homo sapien
tcttaattttgaccagtgaagtatc

SEQ ID NO: 5427430 - DNA, 25 bp, Homo sapien
taaaacatgatcgtattctacagca

SEQ ID NO: 5427431 - DNA, 25 bp, Homo sapien
taattccctcaacttaatgttcaca

SEQ ID NO: 5427432 - DNA, 25 bp, Homo sapien
cagatgaaagaaataccatccttct

SEQ ID NO: 5427433 - DNA, 25 bp, Homo sapien
cttgtaatctgtcacaactttgtca

SEQ ID NO: 5427434 - DNA, 25 bp, Homo sapien
aactttatcacttggataatttaag

SEQ ID NO: 5427435 - DNA, 25 bp, Homo sapien
aatctgtcacaactttgtcaaagtc

SEQ ID NO: 5427436 - DNA, 25 bp, Homo sapien
gtaatctgtcacaactttgtcaaag

SEQ ID NO: 5427437 - DNA, 25 bp, Homo sapien
gatatttaagcgccttcagattccg

SEQ ID NO: 5427438 - DNA, 25 bp, Homo sapien
ccttcagattccgagatttttcatt

SEQ ID NO: 5427439 - DNA, 25 bp, Homo sapien
ttttttcagcatacatatcaacttg

SEQ ID NO: 5427440 - DNA, 25 bp, Homo sapien
tgatatctttgaatgagtctttgag

SEQ ID NO: 5427441 - DNA, 25 bp, Homo sapien
tcttcttgtgcttgaggccagccgc

SEQ ID NO: 5427442 - DNA, 25 bp, Homo sapien
taaattgtaggtagcaacaggcatc

SEQ ID NO: 5427443 - DNA, 25 bp, Homo sapien
gacttagtaccagagagatttcagg

SEQ ID NO: 5427444 - DNA, 25 bp, Homo sapien
cgctagcggctgaaagtgggataac

SEQ ID NO: 5427445 - DNA, 25 bp, Homo sapien
tcagctttggcacgccacttcatgc

SEQ ID NO: 5427446 - DNA, 25 bp, Homo sapien
cactacgggacagggtccgtccata

SEQ ID NO: 5427447 - DNA, 25 bp, Homo sapien
cacttcatgctgtcctcctcaagga

SEQ ID NO: 5427448 - DNA, 25 bp, Homo sapien
atggcgcagtactccacactacggg

SEQ ID NO: 5427449 - DNA, 25 bp, Homo sapien
taggttctttgcagaaacattagag

SEQ ID NO: 5427450 - DNA, 25 bp, Homo sapien
tgtaggttctttgcagaaacattag

SEQ ID NO: 5427451 - DNA, 25 bp, Homo sapien
ctgtaggttctttgcagaaacatta

SEQ ID NO: 5427452 - DNA, 25 bp, Homo sapien
aggttctttgcagaaacattagagc

SEQ ID NO: 5427453 - DNA, 25 bp, Homo sapien
ctcttgatttgatgagacgtcccag

SEQ ID NO: 5427454 - DNA, 25 bp, Homo sapien
gagatgatgtcgactcctaaggaaa

SEQ ID NO: 5427455 - DNA, 25 bp, Homo sapien
agcaccggaggtgaatctgcacatc

SEQ ID NO: 5427456 - DNA, 25 bp, Homo sapien
tggagatggtctacacgggcttgct

SEQ ID NO: 5427457 - DNA, 25 bp, Homo sapien
cttgatggaactggaccaccttgta

SEQ ID NO: 5427458 - DNA, 25 bp, Homo sapien
ccaccttgtacaggatatcctcgta

SEQ ID NO: 5427459 - DNA, 25 bp, Homo sapien
tctttcataatgtactgaacctcat

SEQ ID NO: 5427460 - DNA, 25 bp, Homo sapien
agtgaataaggtccttcagttgttg

SEQ ID NO: 5427461 - DNA, 25 bp, Homo sapien
tccgaggtcaagtgcagacacaggc

SEQ ID NO: 5427462 - DNA, 25 bp, Homo sapien
gacacaggcataagtgcttcctgaa

SEQ ID NO: 5427463 - DNA, 25 bp, Homo sapien
cattccatttttgtcgtagatctaa

SEQ ID NO: 5427464 - DNA, 25 bp, Homo sapien
ctggaactgaggcttcatgtcattc

SEQ ID NO: 5427465 - DNA, 25 bp, Homo sapien
gttttccaggcttgctttccgtggc

SEQ ID NO: 5427466 - DNA, 25 bp, Homo sapien
gaggctaagttcttcccgttctgct

SEQ ID NO: 5427467 - DNA, 25 bp, Homo sapien
ccgtggctttaagctgccatgccag

SEQ ID NO: 5427468 - DNA, 25 bp, Homo sapien
gttgctctttgaatgccgcccactg

SEQ ID NO: 5427469 - DNA, 25 bp, Homo sapien
ttttcacatctaatatctcgttctc

SEQ ID NO: 5427470 - DNA, 25 bp, Homo sapien
tgttcttcatgaggtacacttcatt

SEQ ID NO: 5427471 - DNA, 25 bp, Homo sapien
tttcacatctaatatctcgttctct

SEQ ID NO: 5427472 - DNA, 25 bp, Homo sapien
ggtgttcttcatgaggtacacttca

SEQ ID NO: 5427473 - DNA, 25 bp, Homo sapien
gattaatcacatcccaggtacagag

SEQ ID NO: 5427474 - DNA, 25 bp, Homo sapien
gagacttccctggagccgagaaaac

SEQ ID NO: 5427475 - DNA, 25 bp, Homo sapien
cagagaactggtcggacaaccggaa

SEQ ID NO: 5427476 - DNA, 25 bp, Homo sapien
gaatgccttgatcgctaggagccaa

SEQ ID NO: 5427477 - DNA, 25 bp, Homo sapien
attaaggaactcaagccctagatct

SEQ ID NO: 5427478 - DNA, 25 bp, Homo sapien
ttctcagccgagtcagaacaatgct

SEQ ID NO: 5427479 - DNA, 25 bp, Homo sapien
ccttctgagggatttcggtttcata

SEQ ID NO: 5427480 - DNA, 25 bp, Homo sapien
gccctagatcttgtgttataaaact

SEQ ID NO: 5427481 - DNA, 25 bp, Homo sapien
aaatgccacgtaagtttgcaggact

SEQ ID NO: 5427482 - DNA, 25 bp, Homo sapien
tgccacgtaagtttgcaggacttgc

SEQ ID NO: 5427483 - DNA, 25 bp, Homo sapien
cacgtaagtttgcaggacttgcgat

SEQ ID NO: 5427484 - DNA, 25 bp, Homo sapien
cagaaatgccacgtaagtttgcagg

SEQ ID NO: 5427485 - DNA, 25 bp, Homo sapien
ggaaagtgataccatttcatcagat

SEQ ID NO: 5427486 - DNA, 25 bp, Homo sapien
taattcttctgctagccatctagct

SEQ ID NO: 5427487 - DNA, 25 bp, Homo sapien
caatgctttggccaaataggtttaa

SEQ ID NO: 5427488 - DNA, 25 bp, Homo sapien
gcagctgcttctaattcatgtgatg

SEQ ID NO: 5427489 - DNA, 25 bp, Homo sapien
gattcagaacgggtagaaccaacat

SEQ ID NO: 5427490 - DNA, 25 bp, Homo sapien
tctagttccagatatttattcaaaa

SEQ ID NO: 5427491 - DNA, 25 bp, Homo sapien
attgcattagaaagtactggactga

SEQ ID NO: 5427492 - DNA, 25 bp, Homo sapien
cttagcttggatatctagttccaga

SEQ ID NO: 5427493 - DNA, 25 bp, Homo sapien
tcatctcatggatgccggacacctg

SEQ ID NO: 5427494 - DNA, 25 bp, Homo sapien
cctccactgaggctgttagttgttg

SEQ ID NO: 5427495 - DNA, 25 bp, Homo sapien
gagcatattccttgtgcgctgaaca

SEQ ID NO: 5427496 - DNA, 25 bp, Homo sapien
gaacactgttcggtcagatgatcca

SEQ ID NO: 5427497 - DNA, 25 bp, Homo sapien
catttggcctgtcttgatctcagac

SEQ ID NO: 5427498 - DNA, 25 bp, Homo sapien
tcagactttcggattgtgtctccct

SEQ ID NO: 5427499 - DNA, 25 bp, Homo sapien
tctctgaagaagtgaccgcaacatc

SEQ ID NO: 5427500 - DNA, 25 bp, Homo sapien
agctccctgactggacgcgggacag

SEQ ID NO: 5427501 - DNA, 25 bp, Homo sapien
gaaactgtgaaaaagcttgttacac

SEQ ID NO: 5427502 - DNA, 25 bp, Homo sapien
tgagaaagaaatcaactttactcac

SEQ ID NO: 5427503 - DNA, 25 bp, Homo sapien
actgtgaaaaagcttgttacactga

SEQ ID NO: 5427504 - DNA, 25 bp, Homo sapien
gtgaaaaagcttgttacactgagaa

SEQ ID NO: 5427505 - DNA, 25 bp, Homo sapien
tcccttttgcaaagcatcagttgtg

SEQ ID NO: 5427506 - DNA, 25 bp, Homo sapien
tacttggctgattaaggtttgtccc

SEQ ID NO: 5427507 - DNA, 25 bp, Homo sapien
aaccctctgatttaaggagcttaag

SEQ ID NO: 5427508 - DNA, 25 bp, Homo sapien
tgtaattcctcatgcctcactgcca

SEQ ID NO: 5427509 - DNA, 25 bp, Homo sapien
actgaggagaaacttaactagcacc

SEQ ID NO: 5427510 - DNA, 25 bp, Homo sapien
taactgacttgtagatgactcactc

SEQ ID NO: 5427511 - DNA, 25 bp, Homo sapien
tagggtttgtactggaagcattgct

SEQ ID NO: 5427512 - DNA, 25 bp, Homo sapien
tttgcaaggctgtaaactatagggt

SEQ ID NO: 5427513 - DNA, 25 bp, Homo sapien
tctggtgagagagctggaggtgttc

SEQ ID NO: 5427514 - DNA, 25 bp, Homo sapien
tccacgtagtcctttgacagcagaa

SEQ ID NO: 5427515 - DNA, 25 bp, Homo sapien
tccaccatgagttgaccaaattctt

SEQ ID NO: 5427516 - DNA, 25 bp, Homo sapien
tcattcgccttctttaaccaggtat

SEQ ID NO: 5427517 - DNA, 25 bp, Homo sapien
ggactggcttcatggtcaactgacc

SEQ ID NO: 5427518 - DNA, 25 bp, Homo sapien
acaaaaggtggttgagtctcagggc

SEQ ID NO: 5427519 - DNA, 25 bp, Homo sapien
tagaaaatagtaccctcagtccagt

SEQ ID NO: 5427520 - DNA, 25 bp, Homo sapien
gcaaaggctgctaggtctttccaga

SEQ ID NO: 5427521 - DNA, 25 bp, Homo sapien
gaattcgatcctcattgtctgaaag

SEQ ID NO: 5427522 - DNA, 25 bp, Homo sapien
ctagactttgttcctgtaaatttct

SEQ ID NO: 5427523 - DNA, 25 bp, Homo sapien
ttgtctgaaagtgatgaacctagac

SEQ ID NO: 5427524 - DNA, 25 bp, Homo sapien
tcctcttgcttatgaattcgatcct

SEQ ID NO: 5427525 - DNA, 25 bp, Homo sapien
gcacgaaatacttcaagctgcttct

SEQ ID NO: 5427526 - DNA, 25 bp, Homo sapien
tgcttctgattttcattaatgaggc

SEQ ID NO: 5427527 - DNA, 25 bp, Homo sapien
ttatgcacgaaatacttcaagctgc

SEQ ID NO: 5427528 - DNA, 25 bp, Homo sapien
cattaatgaggcagattatctgcaa

SEQ ID NO: 5427529 - DNA, 25 bp, Homo sapien
tcaactcaggattcacattaggtcc

SEQ ID NO: 5427530 - DNA, 25 bp, Homo sapien
tggtcccactgacatatctgcagaa

SEQ ID NO: 5427531 - DNA, 25 bp, Homo sapien
aagaaggcggtcaaccttcagacag

SEQ ID NO: 5427532 - DNA, 25 bp, Homo sapien
cagacagctgctatgagctccctga

SEQ ID NO: 5427533 - DNA, 25 bp, Homo sapien
cagcatgtgccccatataaactggc

SEQ ID NO: 5427534 - DNA, 25 bp, Homo sapien
ctgaaaagcaagacatcagtttcac

SEQ ID NO: 5427535 - DNA, 25 bp, Homo sapien
catgtgccccatataaactggccca

SEQ ID NO: 5427536 - DNA, 25 bp, Homo sapien
gccccatataaactggcccacagtg

SEQ ID NO: 5427537 - DNA, 25 bp, Homo sapien
atcatacataagcattctcacatta

SEQ ID NO: 5427538 - DNA, 25 bp, Homo sapien
ataagcattctcacattaacatctt

SEQ ID NO: 5427539 - DNA, 25 bp, Homo sapien
tatcatacataagcattctcacatt

SEQ ID NO: 5427540 - DNA, 25 bp, Homo sapien
cattctcacattaacatcttttaaa

SEQ ID NO: 5427541 - DNA, 25 bp, Homo sapien
cagcttggtctattttaatagcaaa

SEQ ID NO: 5427542 - DNA, 25 bp, Homo sapien
ctttagtatgatgttcatgaagctg

SEQ ID NO: 5427543 - DNA, 25 bp, Homo sapien
aagtgattttaaggactcagcactc

SEQ ID NO: 5427544 - DNA, 25 bp, Homo sapien
caaactcatgagtattctggaggaa

SEQ ID NO: 5427545 - DNA, 25 bp, Homo sapien
gagctgcccatgcttcacccagagt

SEQ ID NO: 5427546 - DNA, 25 bp, Homo sapien
tcacccagagtctcggccatggcat

SEQ ID NO: 5427547 - DNA, 25 bp, Homo sapien
tgcaagagttcccatacccgatctt

SEQ ID NO: 5427548 - DNA, 25 bp, Homo sapien
ggcatcatagacctgactctgatcc

SEQ ID NO: 5427549 - DNA, 25 bp, Homo sapien
ggattgcatctctgtacagtccaat

SEQ ID NO: 5427550 - DNA, 25 bp, Homo sapien
ttgcatctctgtacagtccaatagg

SEQ ID NO: 5427551 - DNA, 25 bp, Homo sapien
aatggtggagaaagtgtagcggtca

SEQ ID NO: 5427552 - DNA, 25 bp, Homo sapien
gcatctctgtacagtccaataggaa

SEQ ID NO: 5427553 - DNA, 25 bp, Homo sapien
ttgcttacgtaaggatttcatgacc

SEQ ID NO: 5427554 - DNA, 25 bp, Homo sapien
catttgcttacgtaaggatttcatg

SEQ ID NO: 5427555 - DNA, 25 bp, Homo sapien
ctagacatttgcttacgtaaggatt

SEQ ID NO: 5427556 - DNA, 25 bp, Homo sapien
gacatttgcttacgtaaggatttca

SEQ ID NO: 5427557 - DNA, 25 bp, Homo sapien
tcgatgcataagcaagaataaactt

SEQ ID NO: 5427558 - DNA, 25 bp, Homo sapien
gatacctttcgatgcataagcaaga

SEQ ID NO: 5427559 - DNA, 25 bp, Homo sapien
tcttgatacctttcgatgcataagc

SEQ ID NO: 5427560 - DNA, 25 bp, Homo sapien
tgatgtcttgatacctttcgatgca

SEQ ID NO: 5427561 - DNA, 25 bp, Homo sapien
tctctccatagcagcaaaaagtaac

SEQ ID NO: 5427562 - DNA, 25 bp, Homo sapien
taggcgagagcaagaacagtgtcac

SEQ ID NO: 5427563 - DNA, 25 bp, Homo sapien
tatctaaaacctgtgagccttcaag

SEQ ID NO: 5427564 - DNA, 25 bp, Homo sapien
tcaagtcccaattacaatgctgcct

SEQ ID NO: 5427565 - DNA, 25 bp, Homo sapien
tctccaggacagttcaaatatcagt

SEQ ID NO: 5427566 - DNA, 25 bp, Homo sapien
tgccttcaaagtccctatagggtgc

SEQ ID NO: 5427567 - DNA, 25 bp, Homo sapien
tcaccccatctttcacgttagagaa

SEQ ID NO: 5427568 - DNA, 25 bp, Homo sapien
ctatatcagaatgcaggtcaaacag

SEQ ID NO: 5427569 - DNA, 25 bp, Homo sapien
gccaaaagaagttcatgatcatgaa

SEQ ID NO: 5427570 - DNA, 25 bp, Homo sapien
tggccaaaagaagttcatgatcatg

SEQ ID NO: 5427571 - DNA, 25 bp, Homo sapien
ttggccaaaagaagttcatgatcat

SEQ ID NO: 5427572 - DNA, 25 bp, Homo sapien
caaaagaagttcatgatcatgaaga

SEQ ID NO: 5427573 - DNA, 25 bp, Homo sapien
ctgtgattcagccagttgaagttgt

SEQ ID NO: 5427574 - DNA, 25 bp, Homo sapien
tcagccagttgaagttgtacccatt

SEQ ID NO: 5427575 - DNA, 25 bp, Homo sapien
gattcagccagttgaagttgtaccc

SEQ ID NO: 5427576 - DNA, 25 bp, Homo sapien
gccagttgaagttgtacccatttgc

SEQ ID NO: 5427577 - DNA, 25 bp, Homo sapien
ttctgcatcaggcttcttttcatct

SEQ ID NO: 5427578 - DNA, 25 bp, Homo sapien
ctgcatcaggcttcttttcatctcc

SEQ ID NO: 5427579 - DNA, 25 bp, Homo sapien
tctgcatcaggcttcttttcatctc

SEQ ID NO: 5427580 - DNA, 25 bp, Homo sapien
ttcttttcatctcctctctgggact

SEQ ID NO: 5427581 - DNA, 25 bp, Homo sapien
cagtaagagtgcttgctgcgttgtc

SEQ ID NO: 5427582 - DNA, 25 bp, Homo sapien
tatagatgctttctggctgactgaa

SEQ ID NO: 5427583 - DNA, 25 bp, Homo sapien
tgtgtcctgccgattgcatggaatg

SEQ ID NO: 5427584 - DNA, 25 bp, Homo sapien
gggttttcaacacacagctagaagc

SEQ ID NO: 5427585 - DNA, 25 bp, Homo sapien
gactgtcgtcgtagaaagcgcaaca

SEQ ID NO: 5427586 - DNA, 25 bp, Homo sapien
cagcaactgaactgactgtcgtcgt

SEQ ID NO: 5427587 - DNA, 25 bp, Homo sapien
cagcctgcacagcaactgaactgac

SEQ ID NO: 5427588 - DNA, 25 bp, Homo sapien
gctataacgattttggagtccccag

SEQ ID NO: 5427589 - DNA, 25 bp, Homo sapien
caaccccattgagtttatcgtgaga

SEQ ID NO: 5427590 - DNA, 25 bp, Homo sapien
agagaattgccacgcccctagtatg

SEQ ID NO: 5427591 - DNA, 25 bp, Homo sapien
ttttgccaccgaaactatgccattg

SEQ ID NO: 5427592 - DNA, 25 bp, Homo sapien
gtcatttcagaaggccagggttact

SEQ ID NO: 5427593 - DNA, 25 bp, Homo sapien
tggaaaggagccatgtcctaacatt

SEQ ID NO: 5427594 - DNA, 25 bp, Homo sapien
tcttggtacggtcctcatgatagtg

SEQ ID NO: 5427595 - DNA, 25 bp, Homo sapien
catatgtggaacatggtgctaggca

SEQ ID NO: 5427596 - DNA, 25 bp, Homo sapien
catcttggctgcctacctaccgagg

SEQ ID NO: 5427597 - DNA, 25 bp, Homo sapien
cacttgctatgggaatcttttctgt

SEQ ID NO: 5427598 - DNA, 25 bp, Homo sapien
tagctatcacttgctatgggaatct

SEQ ID NO: 5427599 - DNA, 25 bp, Homo sapien
tcacaccagcattcacatagctatc

SEQ ID NO: 5427600 - DNA, 25 bp, Homo sapien
tcattccaagcaaaaacacctcaca

SEQ ID NO: 5427601 - DNA, 25 bp, Homo sapien
cggtcatagaacccacatgaaaggc

SEQ ID NO: 5427602 - DNA, 25 bp, Homo sapien
ggtcatagaacccacatgaaaggca

SEQ ID NO: 5427603 - DNA, 25 bp, Homo sapien
tcggtcatagaacccacatgaaagg

SEQ ID NO: 5427604 - DNA, 25 bp, Homo sapien
aaccttcccttagtgatgagatgct

SEQ ID NO: 5427605 - DNA, 25 bp, Homo sapien
taccatagattggatgtgctaatct

SEQ ID NO: 5427606 - DNA, 25 bp, Homo sapien
aaacaaccttcccttagtgatgaga

SEQ ID NO: 5427607 - DNA, 25 bp, Homo sapien
gctaatctttcagaacgtgttaatt

SEQ ID NO: 5427608 - DNA, 25 bp, Homo sapien
caatttccaaagtctggcagtccaa

SEQ ID NO: 5427609 - DNA, 25 bp, Homo sapien
cattggacaaggtataaggcttgcc

SEQ ID NO: 5427610 - DNA, 25 bp, Homo sapien
tggacttctcagtaggaacaatgga

SEQ ID NO: 5427611 - DNA, 25 bp, Homo sapien
gctttgttgtaatatgcctcctcca

SEQ ID NO: 5427612 - DNA, 25 bp, Homo sapien
aatcaaacttattgtccaaagtgac

SEQ ID NO: 5427613 - DNA, 25 bp, Homo sapien
aaatacataccaaaacctgctgcca

SEQ ID NO: 5427614 - DNA, 25 bp, Homo sapien
agaaatacataccaaaacctgctgc

SEQ ID NO: 5427615 - DNA, 25 bp, Homo sapien
agaaatcaaacttattgtccaaagt

SEQ ID NO: 5427616 - DNA, 25 bp, Homo sapien
tagctatcccctatgcaaaactgtg

SEQ ID NO: 5427617 - DNA, 25 bp, Homo sapien
taaaatgtcccgtaaaagcatagct

SEQ ID NO: 5427618 - DNA, 25 bp, Homo sapien
tttcaggcataggaaccccttgagg

SEQ ID NO: 5427619 - DNA, 25 bp, Homo sapien
tagctaacatatcaccatggttggg

SEQ ID NO: 5427620 - DNA, 25 bp, Homo sapien
tgtatttatgccagctcacggagtg

SEQ ID NO: 5427621 - DNA, 25 bp, Homo sapien
taatggccaatcctggaaacagccc

SEQ ID NO: 5427622 - DNA, 25 bp, Homo sapien
tgttctgagtggaaaggcacccagt

SEQ ID NO: 5427623 - DNA, 25 bp, Homo sapien
gaaaagcgtacatgttgcgtgactc

SEQ ID NO: 5427624 - DNA, 25 bp, Homo sapien
gaagatgcattctgatacactagtg

SEQ ID NO: 5427625 - DNA, 25 bp, Homo sapien
agatgcattctgatacactagtgaa

SEQ ID NO: 5427626 - DNA, 25 bp, Homo sapien
caactggaccttttgtatcttcagt

SEQ ID NO: 5427627 - DNA, 25 bp, Homo sapien
cttcagtgtgtaattctgaagatgc

SEQ ID NO: 5427628 - DNA, 25 bp, Homo sapien
aactctgctgggttagacatgtgcg

SEQ ID NO: 5427629 - DNA, 25 bp, Homo sapien
taattgtcatgctcacgctaaggag

SEQ ID NO: 5427630 - DNA, 25 bp, Homo sapien
taacaatgaagcctagacctgccat

SEQ ID NO: 5427631 - DNA, 25 bp, Homo sapien
caaaatgaaactaaccctgccagcg

SEQ ID NO: 5427632 - DNA, 25 bp, Homo sapien
tcagcaggcacatcttaaattaggg

SEQ ID NO: 5427633 - DNA, 25 bp, Homo sapien
tgagagagcacatgttcagcaggca

SEQ ID NO: 5427634 - DNA, 25 bp, Homo sapien
gataccgagaaaagagccaaaagca

SEQ ID NO: 5427635 - DNA, 25 bp, Homo sapien
tagggttatgcgactgtactcacag

SEQ ID NO: 5427636 - DNA, 25 bp, Homo sapien
aattatgtatgccttcttcctcagc

SEQ ID NO: 5427637 - DNA, 25 bp, Homo sapien
gacaaagtatcttcagggtagttaa

SEQ ID NO: 5427638 - DNA, 25 bp, Homo sapien
taaataaggcactcatgtttggaaa

SEQ ID NO: 5427639 - DNA, 25 bp, Homo sapien
tactctgatataaaggattacactg

SEQ ID NO: 5427640 - DNA, 25 bp, Homo sapien
gtaaaattttgaggacaccactgtc

SEQ ID NO: 5427641 - DNA, 25 bp, Homo sapien
gaactgcaaatctgtaggtagctgg

SEQ ID NO: 5427642 - DNA, 25 bp, Homo sapien
gaatctacagcctcgaagcatgtta

SEQ ID NO: 5427643 - DNA, 25 bp, Homo sapien
caacatgcgggattatgaactgcaa

SEQ ID NO: 5427644 - DNA, 25 bp, Homo sapien
catttcaggatgtctcagctgctgc

SEQ ID NO: 5427645 - DNA, 25 bp, Homo sapien
tagaagccatgtcacttggactccc

SEQ ID NO: 5427646 - DNA, 25 bp, Homo sapien
gctgctgccttttgagattaactag

SEQ ID NO: 5427647 - DNA, 25 bp, Homo sapien
aactagtttcatcctgtctctgatg

SEQ ID NO: 5427648 - DNA, 25 bp, Homo sapien
catcggtgatcatactgtttgagca

SEQ ID NO: 5427649 - DNA, 25 bp, Homo sapien
cagtgaatacaaatagaagcaaaaa

SEQ ID NO: 5427650 - DNA, 25 bp, Homo sapien
tgtttgagcaggaaattcagcagga

SEQ ID NO: 5427651 - DNA, 25 bp, Homo sapien
tagcctatgtgtaaatatcagttca

SEQ ID NO: 5427652 - DNA, 25 bp, Homo sapien
tgttggcaagtaccattactgtggc

SEQ ID NO: 5427653 - DNA, 25 bp, Homo sapien
gaagtaacgcatctgttgttggcaa

SEQ ID NO: 5427654 - DNA, 25 bp, Homo sapien
gccaaggctagaacccagtgtctta

SEQ ID NO: 5427655 - DNA, 25 bp, Homo sapien
gaataatcatactggtttggtcctc

SEQ ID NO: 5427656 - DNA, 25 bp, Homo sapien
aactactggaacagttaatctatcc

SEQ ID NO: 5427657 - DNA, 25 bp, Homo sapien
gaacagttaatctatccaaaagtga

SEQ ID NO: 5427658 - DNA, 25 bp, Homo sapien
tactggaacagttaatctatccaaa

SEQ ID NO: 5427659 - DNA, 25 bp, Homo sapien
caggataaactactggaacagttaa

SEQ ID NO: 5427660 - DNA, 25 bp, Homo sapien
aagagcaacatcaatcaagagacac

SEQ ID NO: 5427661 - DNA, 25 bp, Homo sapien
aataaaagagcaacatcaatcaaga

SEQ ID NO: 5427662 - DNA, 25 bp, Homo sapien
caacatcaatcaagagacacagaca

SEQ ID NO: 5427663 - DNA, 25 bp, Homo sapien
agcaacatcaatcaagagacacaga

SEQ ID NO: 5427664 - DNA, 25 bp, Homo sapien
gttctcaaagagcatatagacatta

SEQ ID NO: 5427665 - DNA, 25 bp, Homo sapien
taattcctactaacaatatggtgat

SEQ ID NO: 5427666 - DNA, 25 bp, Homo sapien
gatgtgacaactcagctagatgata

SEQ ID NO: 5427667 - DNA, 25 bp, Homo sapien
gaaaataagttcaatctgtccttaa

SEQ ID NO: 5427668 - DNA, 25 bp, Homo sapien
tcagtcgaggaagtgtatccccaga

SEQ ID NO: 5427669 - DNA, 25 bp, Homo sapien
aactgtggcctgtagcaactgcctg

SEQ ID NO: 5427670 - DNA, 25 bp, Homo sapien
tatccccagatgaccgagaagtgca

SEQ ID NO: 5427671 - DNA, 25 bp, Homo sapien
agattggcataacacaactgtggcc

SEQ ID NO: 5427672 - DNA, 25 bp, Homo sapien
ggaaggtaaagttacattataatca

SEQ ID NO: 5427673 - DNA, 25 bp, Homo sapien
gaaaaggaagataaccagttttgca

SEQ ID NO: 5427674 - DNA, 25 bp, Homo sapien
catgcagaaagctattcaaacactg

SEQ ID NO: 5427675 - DNA, 25 bp, Homo sapien
caaacactgagcttgtggaaaagga

SEQ ID NO: 5427676 - DNA, 25 bp, Homo sapien
gcagagcatccagaagttcacttag

SEQ ID NO: 5427677 - DNA, 25 bp, Homo sapien
tcttgagcatcatcgcccaatctga

SEQ ID NO: 5427678 - DNA, 25 bp, Homo sapien
cccaatctgatgtgagtcttaagca

SEQ ID NO: 5427679 - DNA, 25 bp, Homo sapien
ttccagcaaaactttcgtttcttga

SEQ ID NO: 5427680 - DNA, 25 bp, Homo sapien
tcgcacatctaccatgtcttcacat

SEQ ID NO: 5427681 - DNA, 25 bp, Homo sapien
taaccttcgcacatctaccatgtct

SEQ ID NO: 5427682 - DNA, 25 bp, Homo sapien
tttaaacaactgcaccatctgaagc

SEQ ID NO: 5427683 - DNA, 25 bp, Homo sapien
gcatctttaaccttcgcacatctac

SEQ ID NO: 5427684 - DNA, 25 bp, Homo sapien
gcctgattggagatctgatccagga

SEQ ID NO: 5427685 - DNA, 25 bp, Homo sapien
catcactccttgtatgtggtccaca

SEQ ID NO: 5427686 - DNA, 25 bp, Homo sapien
ttttcacgcaaaccttgcaatccca

SEQ ID NO: 5427687 - DNA, 25 bp, Homo sapien
tgacctttttcacgcaaaccttgca

SEQ ID NO: 5427688 - DNA, 25 bp, Homo sapien
tcttacacaactaaggcgctttccc

SEQ ID NO: 5427689 - DNA, 25 bp, Homo sapien
aaatgtaactcgaattggagctctc

SEQ ID NO: 5427690 - DNA, 25 bp, Homo sapien
cctggatcccaagtataggagcttt

SEQ ID NO: 5427691 - DNA, 25 bp, Homo sapien
taggagctttgtacagtaaaccacc

SEQ ID NO: 5427692 - DNA, 25 bp, Homo sapien
gctggtgctacatctacgcacaaca

SEQ ID NO: 5427693 - DNA, 25 bp, Homo sapien
tttaaagtttgctgaatcgatgctc

SEQ ID NO: 5427694 - DNA, 25 bp, Homo sapien
tgctgaatcgatgctccatcagctg

SEQ ID NO: 5427695 - DNA, 25 bp, Homo sapien
acatccctaataagccatccaactg

SEQ ID NO: 5427696 - DNA, 25 bp, Homo sapien
cagagggacaccaaagagataaccc

SEQ ID NO: 5427697 - DNA, 25 bp, Homo sapien
tgttacaagacaaggacgaatcatt

SEQ ID NO: 5427698 - DNA, 25 bp, Homo sapien
taatttaggaggcatgcaaacctga

SEQ ID NO: 5427699 - DNA, 25 bp, Homo sapien
tcaggtcagcagaatgcaaaaaagt

SEQ ID NO: 5427700 - DNA, 25 bp, Homo sapien
tcctcatcgccagcattcaagagtg

SEQ ID NO: 5427701 - DNA, 25 bp, Homo sapien
ttgctgcagtgactttagttccaca

SEQ ID NO: 5427702 - DNA, 25 bp, Homo sapien
gctgcttgtaagagattttgcctaa

SEQ ID NO: 5427703 - DNA, 25 bp, Homo sapien
cagctgactggcctgtcgataacaa

SEQ ID NO: 5427704 - DNA, 25 bp, Homo sapien
gctgatgttgttacaaggcttagag

SEQ ID NO: 5427705 - DNA, 25 bp, Homo sapien
tacaaggcttagagggagacacatc

SEQ ID NO: 5427706 - DNA, 25 bp, Homo sapien
ggagacacatctcagatgagtgtga

SEQ ID NO: 5427707 - DNA, 25 bp, Homo sapien
ttgttacaaggcttagagggagaca

SEQ ID NO: 5427708 - DNA, 25 bp, Homo sapien
tcagagctgtaataatcagccgcct

SEQ ID NO: 5427709 - DNA, 25 bp, Homo sapien
tcactgggaagtaatcggaaaactc

SEQ ID NO: 5427710 - DNA, 25 bp, Homo sapien
cagcctatctctgttgcctacacaa

SEQ ID NO: 5427711 - DNA, 25 bp, Homo sapien
cagccaaagatcttaattcactggg

SEQ ID NO: 5427712 - DNA, 25 bp, Homo sapien
tgaacctctcaacaaacagctgcat

SEQ ID NO: 5427713 - DNA, 25 bp, Homo sapien
tgcatttggcacaagtaagcacttc

SEQ ID NO: 5427714 - DNA, 25 bp, Homo sapien
catcttgccacaaatccaatggtca

SEQ ID NO: 5427715 - DNA, 25 bp, Homo sapien
gggtttggatgacttcacctagtcc

SEQ ID NO: 5427716 - DNA, 25 bp, Homo sapien
caatagccggtgatttgcttaaaac

SEQ ID NO: 5427717 - DNA, 25 bp, Homo sapien
aagtcttgctggctcaacctcatca

SEQ ID NO: 5427718 - DNA, 25 bp, Homo sapien
tagtagctgctaaggccaaaagcct

SEQ ID NO: 5427719 - DNA, 25 bp, Homo sapien
gacattacatgttttggctcctgac

SEQ ID NO: 5427720 - DNA, 25 bp, Homo sapien
caccactgtggagctaattatttcc

SEQ ID NO: 5427721 - DNA, 25 bp, Homo sapien
taaaatataggctccagcaacctga

SEQ ID NO: 5427722 - DNA, 25 bp, Homo sapien
aacctgaccagggatgtaaatacat

SEQ ID NO: 5427723 - DNA, 25 bp, Homo sapien
aatcagtatctggagttggccctgg

SEQ ID NO: 5427724 - DNA, 25 bp, Homo sapien
gaactacaggttggcagaaatttca

SEQ ID NO: 5427725 - DNA, 25 bp, Homo sapien
ccaatccttgaactagaactacagg

SEQ ID NO: 5427726 - DNA, 25 bp, Homo sapien
caaattctaccgttaacagctgtca

SEQ ID NO: 5427727 - DNA, 25 bp, Homo sapien
cattgagctggtaatgcaagattgt

SEQ ID NO: 5427728 - DNA, 25 bp, Homo sapien
tcatgccccataccaaagtttgcag

SEQ ID NO: 5427729 - DNA, 25 bp, Homo sapien
gtttgcagcaacttatcactcagta

SEQ ID NO: 5427730 - DNA, 25 bp, Homo sapien
tgtaacttgcagaggaaaaagcctc

SEQ ID NO: 5427731 - DNA, 25 bp, Homo sapien
tgacctctaggcacttaacaaactg

SEQ ID NO: 5427732 - DNA, 25 bp, Homo sapien
ctcttcgtgtttctgctgtagggcc

SEQ ID NO: 5427733 - DNA, 25 bp, Homo sapien
taatggagtctccaatgccccactg

SEQ ID NO: 5427734 - DNA, 25 bp, Homo sapien
tgggctcttagttgttctgatccag

SEQ ID NO: 5427735 - DNA, 25 bp, Homo sapien
tctcaatctcttcgtgtttctgctg

SEQ ID NO: 5427736 - DNA, 25 bp, Homo sapien
tcttgtaacagtcctattaagtagg

SEQ ID NO: 5427737 - DNA, 25 bp, Homo sapien
tgcggttactgttgttatcctttgc

SEQ ID NO: 5427738 - DNA, 25 bp, Homo sapien
taatagaagactcattatgtgccag

SEQ ID NO: 5427739 - DNA, 25 bp, Homo sapien
cctttgcttactgaagaggagacta

SEQ ID NO: 5427740 - DNA, 25 bp, Homo sapien
tacaaacttcctggtagcgggtata

SEQ ID NO: 5427741 - DNA, 25 bp, Homo sapien
gaagttcatcatccataggagacca

SEQ ID NO: 5427742 - DNA, 25 bp, Homo sapien
taactgtgtgcgcttgctacgttgc

SEQ ID NO: 5427743 - DNA, 25 bp, Homo sapien
aatcgacgctgctgtaattcggaca

SEQ ID NO: 5427744 - DNA, 25 bp, Homo sapien
ggatcaaccgatggaagaaagttta

SEQ ID NO: 5427745 - DNA, 25 bp, Homo sapien
aactgtttcaggatcaaccgatgga

SEQ ID NO: 5427746 - DNA, 25 bp, Homo sapien
tgtttcaggatcaaccgatggaaga

SEQ ID NO: 5427747 - DNA, 25 bp, Homo sapien
tcaggatcaaccgatggaagaaagt

SEQ ID NO: 5427748 - DNA, 25 bp, Homo sapien
gaaacatcaaacttactcggatgga

SEQ ID NO: 5427749 - DNA, 25 bp, Homo sapien
gagggaaatacagtcaacagcatca

SEQ ID NO: 5427750 - DNA, 25 bp, Homo sapien
ctcggatggactattcagaaaacaa

SEQ ID NO: 5427751 - DNA, 25 bp, Homo sapien
tatacggcatctgtaggatggaaac

SEQ ID NO: 5427752 - DNA, 25 bp, Homo sapien
cattgttaatcaaagcaagttcatc

SEQ ID NO: 5427753 - DNA, 25 bp, Homo sapien
tcctttatcacttccattgttaatc

SEQ ID NO: 5427754 - DNA, 25 bp, Homo sapien
gcaagttcatctaataatgatgtag

SEQ ID NO: 5427755 - DNA, 25 bp, Homo sapien
taatgatgtagattcctttgtaaac

SEQ ID NO: 5427756 - DNA, 25 bp, Homo sapien
tttaaccagtccatgtgatcatagg

SEQ ID NO: 5427757 - DNA, 25 bp, Homo sapien
tgagactcccaccaaaatcttctgt

SEQ ID NO: 5427758 - DNA, 25 bp, Homo sapien
aacgagtcaatttgttggcggacac

SEQ ID NO: 5427759 - DNA, 25 bp, Homo sapien
ggcatggttctatataacgagtcaa

SEQ ID NO: 5427760 - DNA, 25 bp, Homo sapien
cagtgaccattacaatgagaaggca

SEQ ID NO: 5427761 - DNA, 25 bp, Homo sapien
agatataaataacagcggccttctt

SEQ ID NO: 5427762 - DNA, 25 bp, Homo sapien
gtgaccattacaatgagaaggcaaa

SEQ ID NO: 5427763 - DNA, 25 bp, Homo sapien
aaggcaatgagacagcacttttaat

SEQ ID NO: 5427764 - DNA, 25 bp, Homo sapien
aaatgcgttactttcttatcccaga

SEQ ID NO: 5427765 - DNA, 25 bp, Homo sapien
caaacaagggacacctcagctggaa

SEQ ID NO: 5427766 - DNA, 25 bp, Homo sapien
cagaattcatctggctttaccacac

SEQ ID NO: 5427767 - DNA, 25 bp, Homo sapien
tcaaagccaagtctatccttctcct

SEQ ID NO: 5427768 - DNA, 25 bp, Homo sapien
agcattacgactactgttttcacca

SEQ ID NO: 5427769 - DNA, 25 bp, Homo sapien
ctgtagcattacgactactgttttc

SEQ ID NO: 5427770 - DNA, 25 bp, Homo sapien
ggtaaatcctctagccttacacttc

SEQ ID NO: 5427771 - DNA, 25 bp, Homo sapien
tttctgccatccacaatcacggtaa

SEQ ID NO: 5427772 - DNA, 25 bp, Homo sapien
agcatgcacgctagttccaagaagg

SEQ ID NO: 5427773 - DNA, 25 bp, Homo sapien
tcaggggactttactagtcctcctc

SEQ ID NO: 5427774 - DNA, 25 bp, Homo sapien
ttctccctccaagcatgcacgctag

SEQ ID NO: 5427775 - DNA, 25 bp, Homo sapien
cacgctagttccaagaaggctcttg

SEQ ID NO: 5427776 - DNA, 25 bp, Homo sapien
caatgttagtggatttcctggggcc

SEQ ID NO: 5427777 - DNA, 25 bp, Homo sapien
cctggggccaacatcctgcagatct

SEQ ID NO: 5427778 - DNA, 25 bp, Homo sapien
gaagacaatgttagtggatttcctg

SEQ ID NO: 5427779 - DNA, 25 bp, Homo sapien
tcctggggccaacatcctgcagatc

SEQ ID NO: 5427780 - DNA, 25 bp, Homo sapien
tgctgagtaggtagtctaaggtgac

SEQ ID NO: 5427781 - DNA, 25 bp, Homo sapien
gtgacactcagctcatccatatttg

SEQ ID NO: 5427782 - DNA, 25 bp, Homo sapien
tccatatttgtctgttcgaggcata

SEQ ID NO: 5427783 - DNA, 25 bp, Homo sapien
tgttcgaggcataatggaattgtca

SEQ ID NO: 5427784 - DNA, 25 bp, Homo sapien
aatgggtaatattactgaggcctcc

SEQ ID NO: 5427785 - DNA, 25 bp, Homo sapien
gaatgggtaatattactgaggcctc

SEQ ID NO: 5427786 - DNA, 25 bp, Homo sapien
agaatgggtaatattactgaggcct

SEQ ID NO: 5427787 - DNA, 25 bp, Homo sapien
tgggtaatattactgaggcctccat

SEQ ID NO: 5427788 - DNA, 25 bp, Homo sapien
gcagtgttctactttttgtatagga

SEQ ID NO: 5427789 - DNA, 25 bp, Homo sapien
aaaagatgggaggtatgatcaacac

SEQ ID NO: 5427790 - DNA, 25 bp, Homo sapien
tcagaaataacctgaatgtccacaa

SEQ ID NO: 5427791 - DNA, 25 bp, Homo sapien
caggataatcgcctaggaagcagag

SEQ ID NO: 5427792 - DNA, 25 bp, Homo sapien
cctgatactgacgattatattgtgg

SEQ ID NO: 5427793 - DNA, 25 bp, Homo sapien
taaagtctatagagtactgcatcaa

SEQ ID NO: 5427794 - DNA, 25 bp, Homo sapien
gcataatgtctacaaattactccca

SEQ ID NO: 5427795 - DNA, 25 bp, Homo sapien
aatcctgaactggaacctaaaccag

SEQ ID NO: 5427796 - DNA, 25 bp, Homo sapien
cctggtttttccgatgaccttctga

SEQ ID NO: 5427797 - DNA, 25 bp, Homo sapien
tggtcaaagcgttttaaaagcagta

SEQ ID NO: 5427798 - DNA, 25 bp, Homo sapien
ttgatgatccagaacactttgtggt

SEQ ID NO: 5427799 - DNA, 25 bp, Homo sapien
ggttcacaggctttacaatcatgag

SEQ ID NO: 5427800 - DNA, 25 bp, Homo sapien
ccctttgaagtagtcccctcagtca

SEQ ID NO: 5427801 - DNA, 25 bp, Homo sapien
taatatgaagcatcagcccctttga

SEQ ID NO: 5427802 - DNA, 25 bp, Homo sapien
ttctcatggccttagaaatcctgtc

SEQ ID NO: 5427803 - DNA, 25 bp, Homo sapien
taataaaattaacgccttctcatgg

SEQ ID NO: 5427804 - DNA, 25 bp, Homo sapien
tgctataagctctgtactgttcctg

SEQ ID NO: 5427805 - DNA, 25 bp, Homo sapien
taaaagtgactgaaaccactggtat

SEQ ID NO: 5427806 - DNA, 25 bp, Homo sapien
ggatgagtcatctgcaggaagtaca

SEQ ID NO: 5427807 - DNA, 25 bp, Homo sapien
cacagctggaagcattctgggaaag

SEQ ID NO: 5427808 - DNA, 25 bp, Homo sapien
cacatttttagactaaatgggccac

SEQ ID NO: 5427809 - DNA, 25 bp, Homo sapien
gacttaaatgtacagcagatacagg

SEQ ID NO: 5427810 - DNA, 25 bp, Homo sapien
ttacactacctaagagccaaacagg

SEQ ID NO: 5427811 - DNA, 25 bp, Homo sapien
tctgcagacagcaaaatagagtact

SEQ ID NO: 5427812 - DNA, 25 bp, Homo sapien
ttctgttatagcaccctgaatggac

SEQ ID NO: 5427813 - DNA, 25 bp, Homo sapien
tcagggcagagacctaatcaatgag

SEQ ID NO: 5427814 - DNA, 25 bp, Homo sapien
gaaatctggagagttcccttgccct

SEQ ID NO: 5427815 - DNA, 25 bp, Homo sapien
caaaatctgccgtgcttggatccta

SEQ ID NO: 5427816 - DNA, 25 bp, Homo sapien
ggttagctgcctgtcctactaggag

SEQ ID NO: 5427817 - DNA, 25 bp, Homo sapien
aaatgcttgtcttgcacttcgaggc

SEQ ID NO: 5427818 - DNA, 25 bp, Homo sapien
tatcacctgcttaattcagaggccc

SEQ ID NO: 5427819 - DNA, 25 bp, Homo sapien
caaggttcaaaagcagtttagctca

SEQ ID NO: 5427820 - DNA, 25 bp, Homo sapien
ccgcgacctgaggaggcgtccagga

SEQ ID NO: 5427821 - DNA, 25 bp, Homo sapien
ccccgcgacctgaggaggcgtccag

SEQ ID NO: 5427822 - DNA, 25 bp, Homo sapien
tggaagccaagccccgcgacctgag

SEQ ID NO: 5427823 - DNA, 25 bp, Homo sapien
cccgcgacctgaggaggcgtccagg

SEQ ID NO: 5427824 - DNA, 25 bp, Homo sapien
ggacgcgggactcgcccgagagcag

SEQ ID NO: 5427825 - DNA, 25 bp, Homo sapien
ccggtcaccggtcacacaaaggagc

SEQ ID NO: 5427826 - DNA, 25 bp, Homo sapien
cctgcacgctggcaaaagagacccg

SEQ ID NO: 5427827 - DNA, 25 bp, Homo sapien
acaaaggagccagtcgcgggcgctg

SEQ ID NO: 5427828 - DNA, 25 bp, Homo sapien
tgaacaagggcgctcaggaacggaa

SEQ ID NO: 5427829 - DNA, 25 bp, Homo sapien
ccaaacctgttgcacaattcgggtc

SEQ ID NO: 5427830 - DNA, 25 bp, Homo sapien
aggactaacgcccaaacctgttgca

SEQ ID NO: 5427831 - DNA, 25 bp, Homo sapien
tcgggtccctttcacccagaaatga

SEQ ID NO: 5427832 - DNA, 25 bp, Homo sapien
ggctggcgctgacgctagcggccgg

SEQ ID NO: 5427833 - DNA, 25 bp, Homo sapien
gcgctgacgctagcggccggcggct

SEQ ID NO: 5427834 - DNA, 25 bp, Homo sapien
ctggctggcgctgacgctagcggcc

SEQ ID NO: 5427835 - DNA, 25 bp, Homo sapien
tggcgctgacgctagcggccggcgg

SEQ ID NO: 5427836 - DNA, 25 bp, Homo sapien
ggctccagtcactcgcggcaaatcg

SEQ ID NO: 5427837 - DNA, 25 bp, Homo sapien
ggtggcccggcgacctctcggcacc

SEQ ID NO: 5427838 - DNA, 25 bp, Homo sapien
gtcactcgcggcaaatcgcgtcccg

SEQ ID NO: 5427839 - DNA, 25 bp, Homo sapien
cggctgcggctccagtcactcgcgg

SEQ ID NO: 5427840 - DNA, 25 bp, Homo sapien
gagattgagaccattctggacaaaa

SEQ ID NO: 5427841 - DNA, 25 bp, Homo sapien
tgagaccattctggacaaaatggtg

SEQ ID NO: 5427842 - DNA, 25 bp, Homo sapien
gcactgagccgagattgcagtgagc

SEQ ID NO: 5427843 - DNA, 25 bp, Homo sapien
attgagaccattctggacaaaatgg

SEQ ID NO: 5427844 - DNA, 25 bp, Homo sapien
gtgaccgctgcccacaaatatggat

SEQ ID NO: 5427845 - DNA, 25 bp, Homo sapien
tatggatgtgggctctaccataatt

SEQ ID NO: 5427846 - DNA, 25 bp, Homo sapien
gctgctatctggcagtgaccgctgc

SEQ ID NO: 5427847 - DNA, 25 bp, Homo sapien
acaaatatggatgtgggctctacca

SEQ ID NO: 5427848 - DNA, 25 bp, Homo sapien
tcctccaaagcacacgcttcctctc

SEQ ID NO: 5427849 - DNA, 25 bp, Homo sapien
cattttaaagactcgccttgatcca

SEQ ID NO: 5427850 - DNA, 25 bp, Homo sapien
agcgatagctgtactcttggcagca

SEQ ID NO: 5427851 - DNA, 25 bp, Homo sapien
aaaaggacacagagcgatagctgta

SEQ ID NO: 5427852 - DNA, 25 bp, Homo sapien
ggcataatattgcttaacaggtaca

SEQ ID NO: 5427853 - DNA, 25 bp, Homo sapien
caaattctcccagttaatagaggac

SEQ ID NO: 5427854 - DNA, 25 bp, Homo sapien
tattgctgctattctctggctccca

SEQ ID NO: 5427855 - DNA, 25 bp, Homo sapien
gatgattcagcgtcagaaatcccct

SEQ ID NO: 5427856 - DNA, 25 bp, Homo sapien
caagtcttagtactagcccttcctg

SEQ ID NO: 5427857 - DNA, 25 bp, Homo sapien
tggggacctgctaggagattcatac

SEQ ID NO: 5427858 - DNA, 25 bp, Homo sapien
gcactatcccatttgtatggggacc

SEQ ID NO: 5427859 - DNA, 25 bp, Homo sapien
catgcacccatcaaagccaagactg

SEQ ID NO: 5427860 - DNA, 25 bp, Homo sapien
tcctcattgcttaacgtggacaaca

SEQ ID NO: 5427861 - DNA, 25 bp, Homo sapien
tttcctgtcatgatcctcattgctt

SEQ ID NO: 5427862 - DNA, 25 bp, Homo sapien
tcataaacccataagtgagtttatt

SEQ ID NO: 5427863 - DNA, 25 bp, Homo sapien
tggacaacattaaaggccttgtacc

SEQ ID NO: 5427864 - DNA, 25 bp, Homo sapien
aaaggtatttcatctgtccggagcg

SEQ ID NO: 5427865 - DNA, 25 bp, Homo sapien
tggttagtaataagtccggcctata

SEQ ID NO: 5427866 - DNA, 25 bp, Homo sapien
gaaggcagaggttatgcaaagcaat

SEQ ID NO: 5427867 - DNA, 25 bp, Homo sapien
cggagcgtctcccagctagagtgtg

SEQ ID NO: 5427868 - DNA, 25 bp, Homo sapien
tcttctctagacaaggcttgaccac

SEQ ID NO: 5427869 - DNA, 25 bp, Homo sapien
attggtcagtgctgtaagtttggag

SEQ ID NO: 5427870 - DNA, 25 bp, Homo sapien
ttgtggtttctgacagcaaaggctg

SEQ ID NO: 5427871 - DNA, 25 bp, Homo sapien
gtaagtttggaggtctcaaggtcca

SEQ ID NO: 5427872 - DNA, 25 bp, Homo sapien
cagagttgtctccaagagtctcctc

SEQ ID NO: 5427873 - DNA, 25 bp, Homo sapien
ccagaacttctgctggttcgtggcc

SEQ ID NO: 5427874 - DNA, 25 bp, Homo sapien
cagaacttctgctggttcgtggcct

SEQ ID NO: 5427875 - DNA, 25 bp, Homo sapien
gagttgtctccaagagtctcctcac

SEQ ID NO: 5427876 - DNA, 25 bp, Homo sapien
caccaatagtggatgagctcagaag

SEQ ID NO: 5427877 - DNA, 25 bp, Homo sapien
cctcttccacagatggttcaaaatc

SEQ ID NO: 5427878 - DNA, 25 bp, Homo sapien
tccccctgaatcacaacgtggcttg

SEQ ID NO: 5427879 - DNA, 25 bp, Homo sapien
cagctggcgtggaagcttgtttagt

SEQ ID NO: 5427880 - DNA, 25 bp, Homo sapien
caagtgcgttccgaaaactcctggg

SEQ ID NO: 5427881 - DNA, 25 bp, Homo sapien
ggggcttgctttagcccgtctgtca

SEQ ID NO: 5427882 - DNA, 25 bp, Homo sapien
ctgggggcttgctttagcccgtctg

SEQ ID NO: 5427883 - DNA, 25 bp, Homo sapien
gaatacaatttccaagtgcgttccg

SEQ ID NO: 5427884 - DNA, 25 bp, Homo sapien
cttggacttgaggccctaacaccat

SEQ ID NO: 5427885 - DNA, 25 bp, Homo sapien
gacttgaggccctaacaccataacc

SEQ ID NO: 5427886 - DNA, 25 bp, Homo sapien
tggacttgaggccctaacaccataa

SEQ ID NO: 5427887 - DNA, 25 bp, Homo sapien
ggacttgaggccctaacaccataac

SEQ ID NO: 5427888 - DNA, 25 bp, Homo sapien
tcacaaatgcacagactcccatgta

SEQ ID NO: 5427889 - DNA, 25 bp, Homo sapien
caactggaccctcacaaatgcacag

SEQ ID NO: 5427890 - DNA, 25 bp, Homo sapien
gactcccatgtagaacttgccattg

SEQ ID NO: 5427891 - DNA, 25 bp, Homo sapien
cattgtttaggtcaacaaaatccac

SEQ ID NO: 5427892 - DNA, 25 bp, Homo sapien
tgccgttgtaaccaaacatgtcatt

SEQ ID NO: 5427893 - DNA, 25 bp, Homo sapien
agattaattacccaatgaccctcaa

SEQ ID NO: 5427894 - DNA, 25 bp, Homo sapien
atggagtgtgccctgccgttgtaac

SEQ ID NO: 5427895 - DNA, 25 bp, Homo sapien
aatgtaacacaccttctggcctcct

SEQ ID NO: 5427896 - DNA, 25 bp, Homo sapien
gcccttgcctgggtgagtccccagc

SEQ ID NO: 5427897 - DNA, 25 bp, Homo sapien
tggtggctgtcctacgagtgcctga

SEQ ID NO: 5427898 - DNA, 25 bp, Homo sapien
tgtggcacctccatggcacgtgcac

SEQ ID NO: 5427899 - DNA, 25 bp, Homo sapien
cccagaagtgttccacatgtgtggc

SEQ ID NO: 5427900 - DNA, 25 bp, Homo sapien
tggctgtttttgttgtaacagttcc

SEQ ID NO: 5427901 - DNA, 25 bp, Homo sapien
ctgtttttgttgtaacagttcccat

SEQ ID NO: 5427902 - DNA, 25 bp, Homo sapien
ttggctgtttttgttgtaacagttc

SEQ ID NO: 5427903 - DNA, 25 bp, Homo sapien
gctgtttttgttgtaacagttccca

SEQ ID NO: 5427904 - DNA, 25 bp, Homo sapien
tctcttcagtggctaatttgcccgg

SEQ ID NO: 5427905 - DNA, 25 bp, Homo sapien
gaacaggattgcatttccgtctgca

SEQ ID NO: 5427906 - DNA, 25 bp, Homo sapien
taacttctgggtgtgacggtatgca

SEQ ID NO: 5427907 - DNA, 25 bp, Homo sapien
tatgcaaacacgtgcacggcatcct

SEQ ID NO: 5427908 - DNA, 25 bp, Homo sapien
cagtgacattgaatgcagtatagtt

SEQ ID NO: 5427909 - DNA, 25 bp, Homo sapien
ttaggctccctttgggagtctgcac

SEQ ID NO: 5427910 - DNA, 25 bp, Homo sapien
ttcgacataaccgtatctatttctg

SEQ ID NO: 5427911 - DNA, 25 bp, Homo sapien
ccttggtcagtctctttaggctccc

SEQ ID NO: 5427912 - DNA, 25 bp, Homo sapien
tgttctatgataactcttgcccctg

SEQ ID NO: 5427913 - DNA, 25 bp, Homo sapien
aagagtccactctattttgttgttc

SEQ ID NO: 5427914 - DNA, 25 bp, Homo sapien
ccagtcttgttgatatcggcttaga

SEQ ID NO: 5427915 - DNA, 25 bp, Homo sapien
gacattttaccatttacaggttgca

SEQ ID NO: 5427916 - DNA, 25 bp, Homo sapien
tacattattgcattagggagccaca

SEQ ID NO: 5427917 - DNA, 25 bp, Homo sapien
tgcaatatattcagcgaacagaaag

SEQ ID NO: 5427918 - DNA, 25 bp, Homo sapien
tcttgcagaatgcacaagaggtgca

SEQ ID NO: 5427919 - DNA, 25 bp, Homo sapien
tctgtttgtatacgtttgcttagca

SEQ ID NO: 5427920 - DNA, 25 bp, Homo sapien
gaatacacccagttggataccagag

SEQ ID NO: 5427921 - DNA, 25 bp, Homo sapien
gatccgttggtaagatagtatccac

SEQ ID NO: 5427922 - DNA, 25 bp, Homo sapien
tacacaggatacagcagtacttggg

SEQ ID NO: 5427923 - DNA, 25 bp, Homo sapien
tctgagatacacaaattgaacgcgg

SEQ ID NO: 5427924 - DNA, 25 bp, Homo sapien
tctctaaaagccctcgtcaatctag

SEQ ID NO: 5427925 - DNA, 25 bp, Homo sapien
gcctatgctgctgattcctcaatta

SEQ ID NO: 5427926 - DNA, 25 bp, Homo sapien
cgtcaatctagtgatgtgtttctct

SEQ ID NO: 5427927 - DNA, 25 bp, Homo sapien
gaagtagggagataaagcctatgct

SEQ ID NO: 5427928 - DNA, 25 bp, Homo sapien
tgggtgaatggggggtactgcaaca

SEQ ID NO: 5427929 - DNA, 25 bp, Homo sapien
gaatggggggtactgcaacacaaac

SEQ ID NO: 5427930 - DNA, 25 bp, Homo sapien
ggtgaatggggggtactgcaacaca

SEQ ID NO: 5427931 - DNA, 25 bp, Homo sapien
tgaatggggggtactgcaacacaaa

SEQ ID NO: 5427932 - DNA, 25 bp, Homo sapien
ctcaaacgtcttggggtttgcagac

SEQ ID NO: 5427933 - DNA, 25 bp, Homo sapien
tcaaacgtcttggggtttgcagacg

SEQ ID NO: 5427934 - DNA, 25 bp, Homo sapien
gggccaaaggcttcatcatatcttt

SEQ ID NO: 5427935 - DNA, 25 bp, Homo sapien
ggagtggcgcggatgggcccatgcc

SEQ ID NO: 5427936 - DNA, 25 bp, Homo sapien
ctgaggacacggctgccgccgctgc

SEQ ID NO: 5427937 - DNA, 25 bp, Homo sapien
gggtgggagtgacagcgctgaggac

SEQ ID NO: 5427938 - DNA, 25 bp, Homo sapien
gctgccccacaaaacaggtgagcag

SEQ ID NO: 5427939 - DNA, 25 bp, Homo sapien
ctgcccaacccagcaaggctgcccc

SEQ ID NO: 5427940 - DNA, 25 bp, Homo sapien
tgccccacaaaacaggtgagcaggt

SEQ ID NO: 5427941 - DNA, 25 bp, Homo sapien
caacccagcaaggctgccccacaaa

SEQ ID NO: 5427942 - DNA, 25 bp, Homo sapien
tgctagaatactcgggctccgctgg

SEQ ID NO: 5427943 - DNA, 25 bp, Homo sapien
ttccctgcaactcgatctttatgcc

SEQ ID NO: 5427944 - DNA, 25 bp, Homo sapien
tgcaactcgatctttatgccttcgg

SEQ ID NO: 5427945 - DNA, 25 bp, Homo sapien
ttgttgtaagggctgtattttggct

SEQ ID NO: 5427946 - DNA, 25 bp, Homo sapien
tctttaatcttgatccaggtctagg

SEQ ID NO: 5427947 - DNA, 25 bp, Homo sapien
tctaggataggatttaattggacca

SEQ ID NO: 5427948 - DNA, 25 bp, Homo sapien
ggaccagccccattacgagcttcaa

SEQ ID NO: 5427949 - DNA, 25 bp, Homo sapien
ttctgtagtcctgaccccttactgc

SEQ ID NO: 5427950 - DNA, 25 bp, Homo sapien
gaggagaaatgagccactttcagag

SEQ ID NO: 5427951 - DNA, 25 bp, Homo sapien
gagttcacagccactttgcatagtg

SEQ ID NO: 5427952 - DNA, 25 bp, Homo sapien
tctgattcaacaacagtaccgggag

SEQ ID NO: 5427953 - DNA, 25 bp, Homo sapien
tgtgttgtgtgcctctagctgtgac

SEQ ID NO: 5427954 - DNA, 25 bp, Homo sapien
taaggatccctcagattgaatttgc

SEQ ID NO: 5427955 - DNA, 25 bp, Homo sapien
ggcctggaaccctctcatctataag

SEQ ID NO: 5427956 - DNA, 25 bp, Homo sapien
gagactagacacagctagagggtgc

SEQ ID NO: 5427957 - DNA, 25 bp, Homo sapien
tcagtgactgtactaaaacttcagg

SEQ ID NO: 5427958 - DNA, 25 bp, Homo sapien
gaaaccaatcctcttggcatatgga

SEQ ID NO: 5427959 - DNA, 25 bp, Homo sapien
aaccaatcctcttggcatatggaag

SEQ ID NO: 5427960 - DNA, 25 bp, Homo sapien
taagaaaccaatcctcttggcatat

SEQ ID NO: 5427961 - DNA, 25 bp, Homo sapien
agaaaccaatcctcttggcatatgg

SEQ ID NO: 5427962 - DNA, 25 bp, Homo sapien
tactgcctgctcaaaggagactatg

SEQ ID NO: 5427963 - DNA, 25 bp, Homo sapien
tatggacctacgtacttactgcctg

SEQ ID NO: 5427964 - DNA, 25 bp, Homo sapien
ttcatctagtcagggaaacttccag

SEQ ID NO: 5427965 - DNA, 25 bp, Homo sapien
gagacaagctttttgcctcaggctg

SEQ ID NO: 5427966 - DNA, 25 bp, Homo sapien
gctaagtggagtggctaatgtctat

SEQ ID NO: 5427967 - DNA, 25 bp, Homo sapien
gaaacttctagtctgaggtcattcc

SEQ ID NO: 5427968 - DNA, 25 bp, Homo sapien
cttccatcttgtacagagaccacat

SEQ ID NO: 5427969 - DNA, 25 bp, Homo sapien
caggcatcaaccagggcaagtttta

SEQ ID NO: 5427970 - DNA, 25 bp, Homo sapien
tgttagactacaggtactaggaggt

SEQ ID NO: 5427971 - DNA, 25 bp, Homo sapien
tagtccaaatctgtagtcacaaagt

SEQ ID NO: 5427972 - DNA, 25 bp, Homo sapien
tcgttccttgttcacaccactggta

SEQ ID NO: 5427973 - DNA, 25 bp, Homo sapien
gaagaaagaccaccacataggtact

SEQ ID NO: 5427974 - DNA, 25 bp, Homo sapien
agcagctgggattagcctttgcgct

SEQ ID NO: 5427975 - DNA, 25 bp, Homo sapien
ttcctttgtagtgggcctcggcctg

SEQ ID NO: 5427976 - DNA, 25 bp, Homo sapien
gtctagtgctttgaccttcttggca

SEQ ID NO: 5427977 - DNA, 25 bp, Homo sapien
cagagttgttgcctgtgattggagt

SEQ ID NO: 5427978 - DNA, 25 bp, Homo sapien
tgaagccttggttattatcaatcct

SEQ ID NO: 5427979 - DNA, 25 bp, Homo sapien
gacaaagcactcttttaacatgcca

SEQ ID NO: 5427980 - DNA, 25 bp, Homo sapien
taatatcattgattgcttgaagcct

SEQ ID NO: 5427981 - DNA, 25 bp, Homo sapien
aacatgccatgattagattaagcca

SEQ ID NO: 5427982 - DNA, 25 bp, Homo sapien
agttcagcagaactggtgatggtga

SEQ ID NO: 5427983 - DNA, 25 bp, Homo sapien
acatccagccatagctagttcagca

SEQ ID NO: 5427984 - DNA, 25 bp, Homo sapien
tacttccagatcttggtgggtgata

SEQ ID NO: 5427985 - DNA, 25 bp, Homo sapien
tcaatgccagcattacttccagatc

SEQ ID NO: 5427986 - DNA, 25 bp, Homo sapien
catcagcatataggttcttctctga

SEQ ID NO: 5427987 - DNA, 25 bp, Homo sapien
cactctggtaattacctgacaccca

SEQ ID NO: 5427988 - DNA, 25 bp, Homo sapien
attcatcagcatataggttcttctc

SEQ ID NO: 5427989 - DNA, 25 bp, Homo sapien
tgaaggccactctggtaattacctg

SEQ ID NO: 5427990 - DNA, 25 bp, Homo sapien
taagatttgatgaacatttatgcgt

SEQ ID NO: 5427991 - DNA, 25 bp, Homo sapien
taacatatcatgttagacatctatg

SEQ ID NO: 5427992 - DNA, 25 bp, Homo sapien
catgttagacatctatgtatttaaa

SEQ ID NO: 5427993 - DNA, 25 bp, Homo sapien
tatgcgtcatcataatcactttttt

SEQ ID NO: 5427994 - DNA, 25 bp, Homo sapien
tcagaagtctggtatggatctcact

SEQ ID NO: 5427995 - DNA, 25 bp, Homo sapien
gaggtcagaagtctggtatggatct

SEQ ID NO: 5427996 - DNA, 25 bp, Homo sapien
ggtcagaagtctggtatggatctca

SEQ ID NO: 5427997 - DNA, 25 bp, Homo sapien
gaagtctggtatggatctcactggg

SEQ ID NO: 5427998 - DNA, 25 bp, Homo sapien
tatggttaataaccgctttttgcac

SEQ ID NO: 5427999 - DNA, 25 bp, Homo sapien
taaccgctttttgcacaggatccat

SEQ ID NO: 5428000 - DNA, 25 bp, Homo sapien
taaagcgaagctgacagacattaca

SEQ ID NO: 5428001 - DNA, 25 bp, Homo sapien
ggaatggatactccaaatgtatggt

SEQ ID NO: 5428002 - DNA, 25 bp, Homo sapien
tcacattgtgcaaataaagctgtct

SEQ ID NO: 5428003 - DNA, 25 bp, Homo sapien
ctctgtagtcataatgagatgcatg

SEQ ID NO: 5428004 - DNA, 25 bp, Homo sapien
tcaaaaattactggaggtactgcaa

SEQ ID NO: 5428005 - DNA, 25 bp, Homo sapien
taatgaagagggctttcagatacct

SEQ ID NO: 5428006 - DNA, 25 bp, Homo sapien
tggcaaaatttattggtctcaaata

SEQ ID NO: 5428007 - DNA, 25 bp, Homo sapien
ggcaaaatttattggtctcaaataa

SEQ ID NO: 5428008 - DNA, 25 bp, Homo sapien
ctggcaaaatttattggtctcaaat

SEQ ID NO: 5428009 - DNA, 25 bp, Homo sapien
ttggtctcaaataagcctcttcttt

SEQ ID NO: 5428010 - DNA, 25 bp, Homo sapien
tgtattgcatcgcactgctaaaggg

SEQ ID NO: 5428011 - DNA, 25 bp, Homo sapien
cactcgaggcagacatgattattat

SEQ ID NO: 5428012 - DNA, 25 bp, Homo sapien
tgctgcctacacaaacctaaggtgc

SEQ ID NO: 5428013 - DNA, 25 bp, Homo sapien
tcataggtcggcattcaaacacagg

SEQ ID NO: 5428014 - DNA, 25 bp, Homo sapien
agaggcaagcccaggtaggacggtc

SEQ ID NO: 5428015 - DNA, 25 bp, Homo sapien
agttgctgaccaccttccgctagtg

SEQ ID NO: 5428016 - DNA, 25 bp, Homo sapien
gattagtgctaatcatatgatcgca

SEQ ID NO: 5428017 - DNA, 25 bp, Homo sapien
cagagaggcagatgtaagacatttt

SEQ ID NO: 5428018 - DNA, 25 bp, Homo sapien
ctgtgactgggtaccttttaggtat

SEQ ID NO: 5428019 - DNA, 25 bp, Homo sapien
tgatgtatgttctaaagccactgga

SEQ ID NO: 5428020 - DNA, 25 bp, Homo sapien
taaaaagctggctgatgccctaccc

SEQ ID NO: 5428021 - DNA, 25 bp, Homo sapien
tactggctattgtttgggctactcc

SEQ ID NO: 5428022 - DNA, 25 bp, Homo sapien
cacatgtttgaatagaggataccac

SEQ ID NO: 5428023 - DNA, 25 bp, Homo sapien
aagacataaatggtttgatatccag

SEQ ID NO: 5428024 - DNA, 25 bp, Homo sapien
ggtttgatatccagtgaaggctgca

SEQ ID NO: 5428025 - DNA, 25 bp, Homo sapien
aaatggtttgatatccagtgaaggc

SEQ ID NO: 5428026 - DNA, 25 bp, Homo sapien
tgatatccagtgaaggctgcatcat

SEQ ID NO: 5428027 - DNA, 25 bp, Homo sapien
gagcaggaagggtagtagtgtggca

SEQ ID NO: 5428028 - DNA, 25 bp, Homo sapien
cagggtaggtgtgcgcacaagagca

SEQ ID NO: 5428029 - DNA, 25 bp, Homo sapien
ggtaggtgtgcgcacaagagcagga

SEQ ID NO: 5428030 - DNA, 25 bp, Homo sapien
ggtgtgcgcacaagagcaggaaggg

SEQ ID NO: 5428031 - DNA, 25 bp, Homo sapien
taaattaactgtcacctctatttgt

SEQ ID NO: 5428032 - DNA, 25 bp, Homo sapien
acataacgtcctctagtttcatcca

SEQ ID NO: 5428033 - DNA, 25 bp, Homo sapien
ggctcaagcaacccatcagtctcga

SEQ ID NO: 5428034 - DNA, 25 bp, Homo sapien
tatcctttctctgcattacaaacaa

SEQ ID NO: 5428035 - DNA, 25 bp, Homo sapien
tccagagagatttctatgcccaagg

SEQ ID NO: 5428036 - DNA, 25 bp, Homo sapien
cagagagatttctatgcccaagggt

SEQ ID NO: 5428037 - DNA, 25 bp, Homo sapien
tttccagagagatttctatgcccaa

SEQ ID NO: 5428038 - DNA, 25 bp, Homo sapien
ggtttccagagagatttctatgccc

SEQ ID NO: 5428039 - DNA, 25 bp, Homo sapien
tacagtccacgttcacgtctgcatt

SEQ ID NO: 5428040 - DNA, 25 bp, Homo sapien
taaggttacagtccacgttcacgtc

SEQ ID NO: 5428041 - DNA, 25 bp, Homo sapien
ccacgttcacgtctgcatttgagca

SEQ ID NO: 5428042 - DNA, 25 bp, Homo sapien
aggttacagtccacgttcacgtctg

SEQ ID NO: 5428043 - DNA, 25 bp, Homo sapien
cccgtgaaatgtggtgctaggaaac

SEQ ID NO: 5428044 - DNA, 25 bp, Homo sapien
tcaacctggtgctcccgtgaaatgt

SEQ ID NO: 5428045 - DNA, 25 bp, Homo sapien
catctcaacctggtgctcccgtgaa

SEQ ID NO: 5428046 - DNA, 25 bp, Homo sapien
tgctaggaaacagccggcaggcagt

SEQ ID NO: 5428047 - DNA, 25 bp, Homo sapien
gtcctgtaattgccgcttagctcta

SEQ ID NO: 5428048 - DNA, 25 bp, Homo sapien
aggatcgtgtttgcaacttgattcc

SEQ ID NO: 5428049 - DNA, 25 bp, Homo sapien
tagctctaattactattgaggatcg

SEQ ID NO: 5428050 - DNA, 25 bp, Homo sapien
tactattgaggatcgtgtttgcaac

SEQ ID NO: 5428051 - DNA, 25 bp, Homo sapien
caggttttttgcatactacatttga

SEQ ID NO: 5428052 - DNA, 25 bp, Homo sapien
aggtcattacaacagttatggacaa

SEQ ID NO: 5428053 - DNA, 25 bp, Homo sapien
gatattacatgcatagtagctaact

SEQ ID NO: 5428054 - DNA, 25 bp, Homo sapien
tgctcttaactggacaaagtctttg

SEQ ID NO: 5428055 - DNA, 25 bp, Homo sapien
gacaacttagaacaaaatccagctc

SEQ ID NO: 5428056 - DNA, 25 bp, Homo sapien
tgttttggctttccacattgtactc

SEQ ID NO: 5428057 - DNA, 25 bp, Homo sapien
agcagatgaggcactctgcccaggg

SEQ ID NO: 5428058 - DNA, 25 bp, Homo sapien
ctcttaatcagtacttgaaactgct

SEQ ID NO: 5428059 - DNA, 25 bp, Homo sapien
tcactccagttttaatctctttgga

SEQ ID NO: 5428060 - DNA, 25 bp, Homo sapien
ggatccatctcccatgccgctgcca

SEQ ID NO: 5428061 - DNA, 25 bp, Homo sapien
ccatgccgctgccagatcaacgtat

SEQ ID NO: 5428062 - DNA, 25 bp, Homo sapien
tccttcactccagttttaatctctt

SEQ ID NO: 5428063 - DNA, 25 bp, Homo sapien
tgagaatgtcatttggtgagcattt

SEQ ID NO: 5428064 - DNA, 25 bp, Homo sapien
ccatgtaaggcactactctaggtac

SEQ ID NO: 5428065 - DNA, 25 bp, Homo sapien
tttcacactaattatcttccagatg

SEQ ID NO: 5428066 - DNA, 25 bp, Homo sapien
ccagatgatttaatgagaatgtcat

SEQ ID NO: 5428067 - DNA, 25 bp, Homo sapien
cctgctacttgttgtgtacacattg

SEQ ID NO: 5428068 - DNA, 25 bp, Homo sapien
agacatagtccctgttttccaaaag

SEQ ID NO: 5428069 - DNA, 25 bp, Homo sapien
gccatgtgccaaacaacctgctact

SEQ ID NO: 5428070 - DNA, 25 bp, Homo sapien
gtgccaaacaacctgctacttgttg

SEQ ID NO: 5428071 - DNA, 25 bp, Homo sapien
tttgccaagcctttgccatactttg

SEQ ID NO: 5428072 - DNA, 25 bp, Homo sapien
tgccaagcctttgccatactttgca

SEQ ID NO: 5428073 - DNA, 25 bp, Homo sapien
ttgccaagcctttgccatactttgc

SEQ ID NO: 5428074 - DNA, 25 bp, Homo sapien
agtttagtcactggatacaagcagg

SEQ ID NO: 5428075 - DNA, 25 bp, Homo sapien
tacaagcaggtttgtgaaaagtccc

SEQ ID NO: 5428076 - DNA, 25 bp, Homo sapien
tagtctgaaacctactgttgatctg

SEQ ID NO: 5428077 - DNA, 25 bp, Homo sapien
cttatggaaagctatgtattgggcc

SEQ ID NO: 5428078 - DNA, 25 bp, Homo sapien
tgaacttaagttagaaacgactaga

SEQ ID NO: 5428079 - DNA, 25 bp, Homo sapien
aaaactttgtagacctgtgataata

SEQ ID NO: 5428080 - DNA, 25 bp, Homo sapien
ctgggtacaggcacatatgcccatg

SEQ ID NO: 5428081 - DNA, 25 bp, Homo sapien
cccatgtgcagctagtgaacttaag

SEQ ID NO: 5428082 - DNA, 25 bp, Homo sapien
attactcatgtctgccaattgtagc

SEQ ID NO: 5428083 - DNA, 25 bp, Homo sapien
tattactcatgtctgccaattgtag

SEQ ID NO: 5428084 - DNA, 25 bp, Homo sapien
cagagtgaggaacatcacactgggg

SEQ ID NO: 5428085 - DNA, 25 bp, Homo sapien
tgaatatttattaaggttgagggaa

SEQ ID NO: 5428086 - DNA, 25 bp, Homo sapien
ttactattcatcaagcatcgcaccg

SEQ ID NO: 5428087 - DNA, 25 bp, Homo sapien
cctggttgcaactagcaaatgtggg

SEQ ID NO: 5428088 - DNA, 25 bp, Homo sapien
ggataacaaacttgacctggttgca

SEQ ID NO: 5428089 - DNA, 25 bp, Homo sapien
gcaccgaatgcctgcagtatcctga

SEQ ID NO: 5428090 - DNA, 25 bp, Homo sapien
agagcatagttgttgccaagggtga

SEQ ID NO: 5428091 - DNA, 25 bp, Homo sapien
gaggtttccaaaaggaccactcatc

SEQ ID NO: 5428092 - DNA, 25 bp, Homo sapien
tgagacagtttcagattccagattg

SEQ ID NO: 5428093 - DNA, 25 bp, Homo sapien
agtttgtgctgagcaaaagaggcca

SEQ ID NO: 5428094 - DNA, 25 bp, Homo sapien
cagtcctttttagaatacgtatcag

SEQ ID NO: 5428095 - DNA, 25 bp, Homo sapien
taataatcacatagaaccagtcctt

SEQ ID NO: 5428096 - DNA, 25 bp, Homo sapien
gaagttgtgctaacacttagatcat

SEQ ID NO: 5428097 - DNA, 25 bp, Homo sapien
tacgtatcagagcatttaacaacat

SEQ ID NO: 5428098 - DNA, 25 bp, Homo sapien
gcaatagttaagtcagccggtctat

SEQ ID NO: 5428099 - DNA, 25 bp, Homo sapien
aagaagcatgtttcttagcaatagt

SEQ ID NO: 5428100 - DNA, 25 bp, Homo sapien
tttcttagcaatagttaagtcagcc

SEQ ID NO: 5428101 - DNA, 25 bp, Homo sapien
gaagcatgtttcttagcaatagtta

SEQ ID NO: 5428102 - DNA, 25 bp, Homo sapien
ataaatgtatcaggagctgagaggt

SEQ ID NO: 5428103 - DNA, 25 bp, Homo sapien
taataaatgtatcaggagctgagag

SEQ ID NO: 5428104 - DNA, 25 bp, Homo sapien
aataaatgtatcaggagctgagagg

SEQ ID NO: 5428105 - DNA, 25 bp, Homo sapien
ttctgtaatattgacggtgtgagga

SEQ ID NO: 5428106 - DNA, 25 bp, Homo sapien
aggatcaaaccaactaaatatgatg

SEQ ID NO: 5428107 - DNA, 25 bp, Homo sapien
tgaggatcaaaccaactaaatatga

SEQ ID NO: 5428108 - DNA, 25 bp, Homo sapien
acttctgtaatattgacggtgtgag

SEQ ID NO: 5428109 - DNA, 25 bp, Homo sapien
catcagttgtatttaagtcccagcc

SEQ ID NO: 5428110 - DNA, 25 bp, Homo sapien
tgaagagaccacaatatacagtagt

SEQ ID NO: 5428111 - DNA, 25 bp, Homo sapien
tgacttttcacgtatctagacttag

SEQ ID NO: 5428112 - DNA, 25 bp, Homo sapien
ggcctgagtctgtctattccttgca

SEQ ID NO: 5428113 - DNA, 25 bp, Homo sapien
tgcagccggaccctttaatcacaga

SEQ ID NO: 5428114 - DNA, 25 bp, Homo sapien
tttagtggcctagccagaagcagcc

SEQ ID NO: 5428115 - DNA, 25 bp, Homo sapien
caaagtacaccaacacataggctcg

SEQ ID NO: 5428116 - DNA, 25 bp, Homo sapien
taggctcgaactcccaaagattcag

SEQ ID NO: 5428117 - DNA, 25 bp, Homo sapien
tttgttcctacatcgtcaaataaga

SEQ ID NO: 5428118 - DNA, 25 bp, Homo sapien
gttcctacatcgtcaaataagaata

SEQ ID NO: 5428119 - DNA, 25 bp, Homo sapien
tgttcctacatcgtcaaataagaat

SEQ ID NO: 5428120 - DNA, 25 bp, Homo sapien
tgatttgttcctacatcgtcaaata

SEQ ID NO: 5428121 - DNA, 25 bp, Homo sapien
attaaataacgtacatgaacaatgt

SEQ ID NO: 5428122 - DNA, 25 bp, Homo sapien
gattctgttttggacgctcttttaa

SEQ ID NO: 5428123 - DNA, 25 bp, Homo sapien
ttggacgctcttttaaagctgaatc

SEQ ID NO: 5428124 - DNA, 25 bp, Homo sapien
aatttcagttacaggtaggattctg

SEQ ID NO: 5428125 - DNA, 25 bp, Homo sapien
agtgttgcaattacattatcccttg

SEQ ID NO: 5428126 - DNA, 25 bp, Homo sapien
tctactactgaaacaatgagatcta

SEQ ID NO: 5428127 - DNA, 25 bp, Homo sapien
ttaatagccactggcaaaacccata

SEQ ID NO: 5428128 - DNA, 25 bp, Homo sapien
aatgagatctattttccagatcatc

SEQ ID NO: 5428129 - DNA, 25 bp, Homo sapien
attctgcacataataccagaaattc

SEQ ID NO: 5428130 - DNA, 25 bp, Homo sapien
taaactttgcagtcaagctagcaac

SEQ ID NO: 5428131 - DNA, 25 bp, Homo sapien
taatacaacttccagatatcagaag

SEQ ID NO: 5428132 - DNA, 25 bp, Homo sapien
tctccttctctgactaaagtcaata

SEQ ID NO: 5428133 - DNA, 25 bp, Homo sapien
tgagaatttacagtgtgctagaaac

SEQ ID NO: 5428134 - DNA, 25 bp, Homo sapien
ggcttctggcaagaatatcacccag

SEQ ID NO: 5428135 - DNA, 25 bp, Homo sapien
cagggtaaggattccccggagctat

SEQ ID NO: 5428136 - DNA, 25 bp, Homo sapien
tctcatatgaaggttagacatcctc

SEQ ID NO: 5428137 - DNA, 25 bp, Homo sapien
cagggcaaaggccaaagttctaaca

SEQ ID NO: 5428138 - DNA, 25 bp, Homo sapien
ccgcatcccgtgtcagtatcataaa

SEQ ID NO: 5428139 - DNA, 25 bp, Homo sapien
ttggttctgacaacaaaaacttctg

SEQ ID NO: 5428140 - DNA, 25 bp, Homo sapien
gaatgattgcaacagcctaactgtt

SEQ ID NO: 5428141 - DNA, 25 bp, Homo sapien
gaaatagcaaaccattccccaatcg

SEQ ID NO: 5428142 - DNA, 25 bp, Homo sapien
tagcaaaccattccccaatcgtatg

SEQ ID NO: 5428143 - DNA, 25 bp, Homo sapien
cattccccaatcgtatggtacttcc

SEQ ID NO: 5428144 - DNA, 25 bp, Homo sapien
cgtatggtacttccactccatggag

SEQ ID NO: 5428145 - DNA, 25 bp, Homo sapien
tctgttcggcctactgccactggac

SEQ ID NO: 5428146 - DNA, 25 bp, Homo sapien
tgaagtcaataggttctggcatgac

SEQ ID NO: 5428147 - DNA, 25 bp, Homo sapien
acatggtgccatccctattgaagtc

SEQ ID NO: 5428148 - DNA, 25 bp, Homo sapien
ccactggactgccatgtatgtaagt

SEQ ID NO: 5428149 - DNA, 25 bp, Homo sapien
taagttggctattaagggctataat

SEQ ID NO: 5428150 - DNA, 25 bp, Homo sapien
cccagccccttgaagtaactatatt

SEQ ID NO: 5428151 - DNA, 25 bp, Homo sapien
tattaatgtcccaaatagactttaa

SEQ ID NO: 5428152 - DNA, 25 bp, Homo sapien
agcttatctcaaacacctagcctta

SEQ ID NO: 5428153 - DNA, 25 bp, Homo sapien
tttgaggacaaacgttgttggaaga

SEQ ID NO: 5428154 - DNA, 25 bp, Homo sapien
atttgaggacaaacgttgttggaag

SEQ ID NO: 5428155 - DNA, 25 bp, Homo sapien
ttgaggacaaacgttgttggaagat

SEQ ID NO: 5428156 - DNA, 25 bp, Homo sapien
tctagcaagatagtggccctgggac

SEQ ID NO: 5428157 - DNA, 25 bp, Homo sapien
gccctgggacttgccgagacagatt

SEQ ID NO: 5428158 - DNA, 25 bp, Homo sapien
tcctgatgcgtctgcttagccaagc

SEQ ID NO: 5428159 - DNA, 25 bp, Homo sapien
gctgctaaacgagaaaccatgtgct

SEQ ID NO: 5428160 - DNA, 25 bp, Homo sapien
ttctcattcggcacacagtcgttag

SEQ ID NO: 5428161 - DNA, 25 bp, Homo sapien
tcacctactggtaagatgtcctcgg

SEQ ID NO: 5428162 - DNA, 25 bp, Homo sapien
tgtcctcggcaaacagctagcacag

SEQ ID NO: 5428163 - DNA, 25 bp, Homo sapien
tggttgtccagtacatgaccggtca

SEQ ID NO: 5428164 - DNA, 25 bp, Homo sapien
ctctgctaggaagtccactccacat

SEQ ID NO: 5428165 - DNA, 25 bp, Homo sapien
tcaagagcaaccaagttggataaac

SEQ ID NO: 5428166 - DNA, 25 bp, Homo sapien
acagcgctaccgagacttggctcca

SEQ ID NO: 5428167 - DNA, 25 bp, Homo sapien
tatgtgaccaggataatgcacagcg

SEQ ID NO: 5428168 - DNA, 25 bp, Homo sapien
caccagcttcaagagcaaccaagtt

SEQ ID NO: 5428169 - DNA, 25 bp, Homo sapien
ctgtgtgacagcaccacgttatatc

SEQ ID NO: 5428170 - DNA, 25 bp, Homo sapien
cagcaccacgttatatcagtgccgc

SEQ ID NO: 5428171 - DNA, 25 bp, Homo sapien
cgttatatcagtgccgctccaagcc

SEQ ID NO: 5428172 - DNA, 25 bp, Homo sapien
ggcttattgcactgctcattgaaaa

SEQ ID NO: 5428173 - DNA, 25 bp, Homo sapien
tattacgaggacttataaaggctgc

SEQ ID NO: 5428174 - DNA, 25 bp, Homo sapien
ggttcctgggacttcgctatagaca

SEQ ID NO: 5428175 - DNA, 25 bp, Homo sapien
ggaaggacaagcacactctgagtca

SEQ ID NO: 5428176 - DNA, 25 bp, Homo sapien
tatctccatgtgtgctgaaaccaga

SEQ ID NO: 5428177 - DNA, 25 bp, Homo sapien
gacaacacatttaaggttctattca

SEQ ID NO: 5428178 - DNA, 25 bp, Homo sapien
gttttaggttctcattgagactctg

SEQ ID NO: 5428179 - DNA, 25 bp, Homo sapien
gaaggccagacaaactagaatccag

SEQ ID NO: 5428180 - DNA, 25 bp, Homo sapien
tcctaggaggcaacattgacaacac

SEQ ID NO: 5428181 - DNA, 25 bp, Homo sapien
tagagttctgtacttaatccacaca

SEQ ID NO: 5428182 - DNA, 25 bp, Homo sapien
taatccacacccttgtttgacagtt

SEQ ID NO: 5428183 - DNA, 25 bp, Homo sapien
agggtcaaccactccttttaatcat

SEQ ID NO: 5428184 - DNA, 25 bp, Homo sapien
gaaaaagataatccgtccttcacta

SEQ ID NO: 5428185 - DNA, 25 bp, Homo sapien
tgttctgattcctttctacctttgc

SEQ ID NO: 5428186 - DNA, 25 bp, Homo sapien
tgtttttcctgtacctctgttccca

SEQ ID NO: 5428187 - DNA, 25 bp, Homo sapien
tctatgtctttgcagctgtttttcc

SEQ ID NO: 5428188 - DNA, 25 bp, Homo sapien
tctgttcccataggaccagaaaacc

SEQ ID NO: 5428189 - DNA, 25 bp, Homo sapien
tatagctgttcaattactccaggac

SEQ ID NO: 5428190 - DNA, 25 bp, Homo sapien
tctaaacacgtggtatgtctctcca

SEQ ID NO: 5428191 - DNA, 25 bp, Homo sapien
caatattgggtagagagatccctcc

SEQ ID NO: 5428192 - DNA, 25 bp, Homo sapien
tatgtctacaaaaagaacttgctgg

SEQ ID NO: 5428193 - DNA, 25 bp, Homo sapien
tgaacactttttaggactccatctt

SEQ ID NO: 5428194 - DNA, 25 bp, Homo sapien
ttgatgttagcctttaagtttgaca

SEQ ID NO: 5428195 - DNA, 25 bp, Homo sapien
tattaatatagctacccctgccttt

SEQ ID NO: 5428196 - DNA, 25 bp, Homo sapien
gtaattattgatgttagcctttaag

SEQ ID NO: 5428197 - DNA, 25 bp, Homo sapien
gggatcccttcatccacagggtctg

SEQ ID NO: 5428198 - DNA, 25 bp, Homo sapien
gagacagccaaaatagtagtcatca

SEQ ID NO: 5428199 - DNA, 25 bp, Homo sapien
tgttaagacgatgtatgtcccacag

SEQ ID NO: 5428200 - DNA, 25 bp, Homo sapien
ttaagaacagcattgccaccttgca

SEQ ID NO: 5428201 - DNA, 25 bp, Homo sapien
tatttacaacacaccaagaaccatg

SEQ ID NO: 5428202 - DNA, 25 bp, Homo sapien
tgggaggaggcttatcttggcctcc

SEQ ID NO: 5428203 - DNA, 25 bp, Homo sapien
agagtagaatttggagctcttcccc

SEQ ID NO: 5428204 - DNA, 25 bp, Homo sapien
gggcctcattacagagcaaaccctt

SEQ ID NO: 5428205 - DNA, 25 bp, Homo sapien
caccatggataacaataaatttcac

SEQ ID NO: 5428206 - DNA, 25 bp, Homo sapien
tcacagtgaagatacccagtgacca

SEQ ID NO: 5428207 - DNA, 25 bp, Homo sapien
tctgtcacagtgaagatacccagtg

SEQ ID NO: 5428208 - DNA, 25 bp, Homo sapien
agaaatcttcaccatggataacaat

SEQ ID NO: 5428209 - DNA, 25 bp, Homo sapien
aaagattgtttagaattcagggcag

SEQ ID NO: 5428210 - DNA, 25 bp, Homo sapien
tgaaagattgtttagaattcagggc

SEQ ID NO: 5428211 - DNA, 25 bp, Homo sapien
gcccaaggataagataaaggatttg

SEQ ID NO: 5428212 - DNA, 25 bp, Homo sapien
ctgcccaaggataagataaaggatt

SEQ ID NO: 5428213 - DNA, 25 bp, Homo sapien
tgagaggcaagtgaaagcgatggat

SEQ ID NO: 5428214 - DNA, 25 bp, Homo sapien
agggtgagaggcaagtgaaagcgat

SEQ ID NO: 5428215 - DNA, 25 bp, Homo sapien
aagtgaaagcgatggatgatggtgc

SEQ ID NO: 5428216 - DNA, 25 bp, Homo sapien
gaggcaagtgaaagcgatggatgat

SEQ ID NO: 5428217 - DNA, 25 bp, Homo sapien
taacaaatatttcgagaggtgacaa

SEQ ID NO: 5428218 - DNA, 25 bp, Homo sapien
caggaagtctctggacccatataca

SEQ ID NO: 5428219 - DNA, 25 bp, Homo sapien
gaggtgacaaacagctcatgtattt

SEQ ID NO: 5428220 - DNA, 25 bp, Homo sapien
gtatgtcagtgggtgtaacaaatat

SEQ ID NO: 5428221 - DNA, 25 bp, Homo sapien
ctgtaggagaaagagtacatgttat

SEQ ID NO: 5428222 - DNA, 25 bp, Homo sapien
cgcagcacatggaacccgggaccct

SEQ ID NO: 5428223 - DNA, 25 bp, Homo sapien
tcatggtagcccagttttaaggtaa

SEQ ID NO: 5428224 - DNA, 25 bp, Homo sapien
gaaagagtacatgttatcatggtag

SEQ ID NO: 5428225 - DNA, 25 bp, Homo sapien
tgggggctgcccatcactcagctgc

SEQ ID NO: 5428226 - DNA, 25 bp, Homo sapien
tggtgggggctgcccatcactcagc

SEQ ID NO: 5428227 - DNA, 25 bp, Homo sapien
gctgcccatcactcagctgcttcac

SEQ ID NO: 5428228 - DNA, 25 bp, Homo sapien
ggtggtgggggctgcccatcactca

SEQ ID NO: 5428229 - DNA, 25 bp, Homo sapien
tctttgctcaactggtcctcaggcc

SEQ ID NO: 5428230 - DNA, 25 bp, Homo sapien
tttgccgttggaatgcacctgagcc

SEQ ID NO: 5428231 - DNA, 25 bp, Homo sapien
caaagccccgtagaaaatttgccat

SEQ ID NO: 5428232 - DNA, 25 bp, Homo sapien
tcctcaggcctgtcgttctttatcc

SEQ ID NO: 5428233 - DNA, 25 bp, Homo sapien
caagatggttgtcagggcttaagga

SEQ ID NO: 5428234 - DNA, 25 bp, Homo sapien
tgtcagggcttaaggagtacctcat

SEQ ID NO: 5428235 - DNA, 25 bp, Homo sapien
cttcaagatggttgtcagggcttaa

SEQ ID NO: 5428236 - DNA, 25 bp, Homo sapien
gttgtcagggcttaaggagtacctc

SEQ ID NO: 5428237 - DNA, 25 bp, Homo sapien
tttgatggagttgaaatgtagaaca

SEQ ID NO: 5428238 - DNA, 25 bp, Homo sapien
gtttccaggttagcccataaacatc

SEQ ID NO: 5428239 - DNA, 25 bp, Homo sapien
taaaagtccctttataagtcagctg

SEQ ID NO: 5428240 - DNA, 25 bp, Homo sapien
ttttcttattcttgtagtgaaacaa

SEQ ID NO: 5428241 - DNA, 25 bp, Homo sapien
gacatctctgttgcatatgtacagc

SEQ ID NO: 5428242 - DNA, 25 bp, Homo sapien
cacatcagatggagaacaagaaact

SEQ ID NO: 5428243 - DNA, 25 bp, Homo sapien
ttttaaatcactaggatgcaatccg

SEQ ID NO: 5428244 - DNA, 25 bp, Homo sapien
cagggaatttccacaggagtgattt

SEQ ID NO: 5428245 - DNA, 25 bp, Homo sapien
tgccaattccaagatggcagtttcc

SEQ ID NO: 5428246 - DNA, 25 bp, Homo sapien
tcctgatgtcctcgtgatgctccct

SEQ ID NO: 5428247 - DNA, 25 bp, Homo sapien
tttgcaaagtcactataaacacttc

SEQ ID NO: 5428248 - DNA, 25 bp, Homo sapien
ccacaggtagtgcttgtctttgcaa

SEQ ID NO: 5428249 - DNA, 25 bp, Homo sapien
tcctctggtatagatcaaatgcagc

SEQ ID NO: 5428250 - DNA, 25 bp, Homo sapien
tgccaagggttgaaatacataaacg

SEQ ID NO: 5428251 - DNA, 25 bp, Homo sapien
caatttcattaacaagaagttgatg

SEQ ID NO: 5428252 - DNA, 25 bp, Homo sapien
catgcatatgattttcacagagttc

SEQ ID NO: 5428253 - DNA, 25 bp, Homo sapien
aatgtgccatgatctcgtttggact

SEQ ID NO: 5428254 - DNA, 25 bp, Homo sapien
tgccatgatctcgtttggacttcat

SEQ ID NO: 5428255 - DNA, 25 bp, Homo sapien
cctccttgcagtaattttcacttgg

SEQ ID NO: 5428256 - DNA, 25 bp, Homo sapien
ctgcctccttgcagtaattttcact

SEQ ID NO: 5428257 - DNA, 25 bp, Homo sapien
tgtaatcttatcagaagcagaacag

SEQ ID NO: 5428258 - DNA, 25 bp, Homo sapien
cctcctcttcaactcgttgaaacgg

SEQ ID NO: 5428259 - DNA, 25 bp, Homo sapien
gaccattccagtgtaatcttatcag

SEQ ID NO: 5428260 - DNA, 25 bp, Homo sapien
tgaaacggtctaggctgtatcttgg

SEQ ID NO: 5428261 - DNA, 25 bp, Homo sapien
ccttgatgatgaatattgtagtatt

SEQ ID NO: 5428262 - DNA, 25 bp, Homo sapien
gattagctctaagtagggcattaag

SEQ ID NO: 5428263 - DNA, 25 bp, Homo sapien
aactggcccatgtaagattcttgat

SEQ ID NO: 5428264 - DNA, 25 bp, Homo sapien
tattgtagtattatgttccatgaca

SEQ ID NO: 5428265 - DNA, 25 bp, Homo sapien
gagtagttatccaatagtgtctctc

SEQ ID NO: 5428266 - DNA, 25 bp, Homo sapien
gttcagatggttctgagtagttatc

SEQ ID NO: 5428267 - DNA, 25 bp, Homo sapien
tatcagatgtaaagacttctaagcc

SEQ ID NO: 5428268 - DNA, 25 bp, Homo sapien
gaaatgctaagaaacttgtgtgttc

SEQ ID NO: 5428269 - DNA, 25 bp, Homo sapien
ggaggcagcaggcaatatttcaaaa

SEQ ID NO: 5428270 - DNA, 25 bp, Homo sapien
tctgggtttgcatagagattattcc

SEQ ID NO: 5428271 - DNA, 25 bp, Homo sapien
gggaacccaacaagtgctcctgtca

SEQ ID NO: 5428272 - DNA, 25 bp, Homo sapien
gattattccttctcatctcacttgg

SEQ ID NO: 5428273 - DNA, 25 bp, Homo sapien
tcccctagatccaagatgagggagc

SEQ ID NO: 5428274 - DNA, 25 bp, Homo sapien
gatccaagatgagggagctatcccc

SEQ ID NO: 5428275 - DNA, 25 bp, Homo sapien
agatgttataagctcccctagatcc

SEQ ID NO: 5428276 - DNA, 25 bp, Homo sapien
taaaagatgttataagctcccctag

SEQ ID NO: 5428277 - DNA, 25 bp, Homo sapien
ttaggatgcaccatcctagcactgc

SEQ ID NO: 5428278 - DNA, 25 bp, Homo sapien
tagcactgcctaaagacagcagtcc

SEQ ID NO: 5428279 - DNA, 25 bp, Homo sapien
cactatactaaggaaaaccactttg

SEQ ID NO: 5428280 - DNA, 25 bp, Homo sapien
gacagcagtccatttgaatacacta

SEQ ID NO: 5428281 - DNA, 25 bp, Homo sapien
tcatccaagcggcagtccagaaact

SEQ ID NO: 5428282 - DNA, 25 bp, Homo sapien
ttctgaaatgaatcgaacatgcttc

SEQ ID NO: 5428283 - DNA, 25 bp, Homo sapien
aaactgagtttttgcctgagcagaa

SEQ ID NO: 5428284 - DNA, 25 bp, Homo sapien
tgatctgacatccaagagctaaaac

SEQ ID NO: 5428285 - DNA, 25 bp, Homo sapien
catttgaagtatccaatgataaaat

SEQ ID NO: 5428286 - DNA, 25 bp, Homo sapien
tacatttcatcccttcatttgaagt

SEQ ID NO: 5428287 - DNA, 25 bp, Homo sapien
tctgtcttgggaagatttgcgttgc

SEQ ID NO: 5428288 - DNA, 25 bp, Homo sapien
taaaacagtcccaatcagaatcatg

SEQ ID NO: 5428289 - DNA, 25 bp, Homo sapien
caggcatgcttacaacttacaaaac

SEQ ID NO: 5428290 - DNA, 25 bp, Homo sapien
tactgctacccaaaaggtttggcag

SEQ ID NO: 5428291 - DNA, 25 bp, Homo sapien
tgacagtgattcaaacaggcatgct

SEQ ID NO: 5428292 - DNA, 25 bp, Homo sapien
tcccagagaaggagtgttctccatg

SEQ ID NO: 5428293 - DNA, 25 bp, Homo sapien
ccttcagcattaccagaagatgtac

SEQ ID NO: 5428294 - DNA, 25 bp, Homo sapien
gggaaccttattgtcagttttgcta

SEQ ID NO: 5428295 - DNA, 25 bp, Homo sapien
gttttgctactaccattattgctgg

SEQ ID NO: 5428296 - DNA, 25 bp, Homo sapien
tgtactcacatagagggaagacctc

SEQ ID NO: 5428297 - DNA, 25 bp, Homo sapien
caagtgcttctaagacatctggacc

SEQ ID NO: 5428298 - DNA, 25 bp, Homo sapien
ggagccactatcaacacctgaggga

SEQ ID NO: 5428299 - DNA, 25 bp, Homo sapien
tgccagtgggattgctccagtttct

SEQ ID NO: 5428300 - DNA, 25 bp, Homo sapien
catctggaccagtgttaagaataca

SEQ ID NO: 5428301 - DNA, 25 bp, Homo sapien
aggtcatgaagggaagcctaggctc

SEQ ID NO: 5428302 - DNA, 25 bp, Homo sapien
tcatgaagggaagcctaggctcccc

SEQ ID NO: 5428303 - DNA, 25 bp, Homo sapien
gcatggaggtcatgaagggaagcct

SEQ ID NO: 5428304 - DNA, 25 bp, Homo sapien
catggaggtcatgaagggaagccta

SEQ ID NO: 5428305 - DNA, 25 bp, Homo sapien
tcaaaagatatgcaccaacggacca

SEQ ID NO: 5428306 - DNA, 25 bp, Homo sapien
caaaatcccagaagtatgatttcca

SEQ ID NO: 5428307 - DNA, 25 bp, Homo sapien
caacggaccagtgtggtttatggaa

SEQ ID NO: 5428308 - DNA, 25 bp, Homo sapien
aaacaaacatctgatgtgtcccaaa

SEQ ID NO: 5428309 - DNA, 25 bp, Homo sapien
ttctatagtgtccaaagagacaaag

SEQ ID NO: 5428310 - DNA, 25 bp, Homo sapien
tcactatgttctgctgcatagtgca

SEQ ID NO: 5428311 - DNA, 25 bp, Homo sapien
gaaaaaagagtacttctatagtgtc

SEQ ID NO: 5428312 - DNA, 25 bp, Homo sapien
aacacattatgttcctctttttgaa

SEQ ID NO: 5428313 - DNA, 25 bp, Homo sapien
actcaccgaaagtgccactcctaag

SEQ ID NO: 5428314 - DNA, 25 bp, Homo sapien
cagagtctgatggagtcctgcactc

SEQ ID NO: 5428315 - DNA, 25 bp, Homo sapien
gcagcaacatagaccttggtggtca

SEQ ID NO: 5428316 - DNA, 25 bp, Homo sapien
caacagcagcaacatagaccttggt

SEQ ID NO: 5428317 - DNA, 25 bp, Homo sapien
cgttgtgagggatacaaagcagatt

SEQ ID NO: 5428318 - DNA, 25 bp, Homo sapien
ttttcatctaaagatgggttctctt

SEQ ID NO: 5428319 - DNA, 25 bp, Homo sapien
tgtgagggatacaaagcagatttca

SEQ ID NO: 5428320 - DNA, 25 bp, Homo sapien
aattttcatctaaagatgggttctc

SEQ ID NO: 5428321 - DNA, 25 bp, Homo sapien
ttttcttttccaggctatccaaggc

SEQ ID NO: 5428322 - DNA, 25 bp, Homo sapien
ttgccttttgtcaaaatttggttca

SEQ ID NO: 5428323 - DNA, 25 bp, Homo sapien
tggttcactatcaagtaacattttc

SEQ ID NO: 5428324 - DNA, 25 bp, Homo sapien
ccacaaagctgagctcatttataaa

SEQ ID NO: 5428325 - DNA, 25 bp, Homo sapien
tcctcccaattgtctagaatttaat

SEQ ID NO: 5428326 - DNA, 25 bp, Homo sapien
taaattcactcaatctaaagttagt

SEQ ID NO: 5428327 - DNA, 25 bp, Homo sapien
tttgatagtctaaaatgtgttacta

SEQ ID NO: 5428328 - DNA, 25 bp, Homo sapien
tttcaatttttgagtgacagatatc

SEQ ID NO: 5428329 - DNA, 25 bp, Homo sapien
tttgagcagtggtcaaagcacttct

SEQ ID NO: 5428330 - DNA, 25 bp, Homo sapien
tcaatgtttaaatagacaaggaaga

SEQ ID NO: 5428331 - DNA, 25 bp, Homo sapien
tttaacaaagactgatagtgctctg

SEQ ID NO: 5428332 - DNA, 25 bp, Homo sapien
ttggaattgtcaaacaagaatggag

SEQ ID NO: 5428333 - DNA, 25 bp, Homo sapien
agtgctctgtttcttgatacaactc

SEQ ID NO: 5428334 - DNA, 25 bp, Homo sapien
caggatgtttaattgtggccctaaa

SEQ ID NO: 5428335 - DNA, 25 bp, Homo sapien
tgggtaaaatcataactctctcgtg

SEQ ID NO: 5428336 - DNA, 25 bp, Homo sapien
ctctctcgtgagtgataacatctat

SEQ ID NO: 5428337 - DNA, 25 bp, Homo sapien
ctccaaatacaaagagcgttgggta

SEQ ID NO: 5428338 - DNA, 25 bp, Homo sapien
catgtacagtatccatatacctggg

SEQ ID NO: 5428339 - DNA, 25 bp, Homo sapien
cttgtcttggtgacatgtacagtat

SEQ ID NO: 5428340 - DNA, 25 bp, Homo sapien
aagactgatgctccaatacaattga

SEQ ID NO: 5428341 - DNA, 25 bp, Homo sapien
catatgtcaggagcataatgatcac

SEQ ID NO: 5428342 - DNA, 25 bp, Homo sapien
agatggtcacgataggaaactggca

SEQ ID NO: 5428343 - DNA, 25 bp, Homo sapien
cactatttgggagatcctagagacc

SEQ ID NO: 5428344 - DNA, 25 bp, Homo sapien
tgtaaatctgagagcaagtgccacc

SEQ ID NO: 5428345 - DNA, 25 bp, Homo sapien
gataaagtcatcatccaaagggcat

SEQ ID NO: 5428346 - DNA, 25 bp, Homo sapien
accttccactagtgatgccaaaggc

SEQ ID NO: 5428347 - DNA, 25 bp, Homo sapien
tcaaccttccactagtgatgccaaa

SEQ ID NO: 5428348 - DNA, 25 bp, Homo sapien
ttgcataatagctggttttctcttc

SEQ ID NO: 5428349 - DNA, 25 bp, Homo sapien
aaggagttgcataatagctggtttt

SEQ ID NO: 5428350 - DNA, 25 bp, Homo sapien
gcagtgtgctcaaaagctggaaaaa

SEQ ID NO: 5428351 - DNA, 25 bp, Homo sapien
caacccttgtgtgaaaggtagcaaa

SEQ ID NO: 5428352 - DNA, 25 bp, Homo sapien
ggctaagagggaacacactgggatc

SEQ ID NO: 5428353 - DNA, 25 bp, Homo sapien
gttgcagaactctggctaagaggga

SEQ ID NO: 5428354 - DNA, 25 bp, Homo sapien
accatagttagccttatgcaacagt

SEQ ID NO: 5428355 - DNA, 25 bp, Homo sapien
cagttcagatgttgccttttgtatt

SEQ ID NO: 5428356 - DNA, 25 bp, Homo sapien
tatgcaacagttcagatgttgcctt

SEQ ID NO: 5428357 - DNA, 25 bp, Homo sapien
aatttgcctcttaagaagatctgga

SEQ ID NO: 5428358 - DNA, 25 bp, Homo sapien
aagaggaggtctctgccagggcaac

SEQ ID NO: 5428359 - DNA, 25 bp, Homo sapien
cagcagttcgaatgtgcaccaccac

SEQ ID NO: 5428360 - DNA, 25 bp, Homo sapien
tacatttggcacagtcatctcagtc

SEQ ID NO: 5428361 - DNA, 25 bp, Homo sapien
cagggcaacagcagttcgaatgtgc

SEQ ID NO: 5428362 - DNA, 25 bp, Homo sapien
cattcaatagccatagtggtctcaa

SEQ ID NO: 5428363 - DNA, 25 bp, Homo sapien
tcttgggagccaaaaatcgctggct

SEQ ID NO: 5428364 - DNA, 25 bp, Homo sapien
ggtctcaatactatccacctggtca

SEQ ID NO: 5428365 - DNA, 25 bp, Homo sapien
caaaaatacggtgagtcatggaggc

SEQ ID NO: 5428366 - DNA, 25 bp, Homo sapien
actgcggcaggcgtccagtggttca

SEQ ID NO: 5428367 - DNA, 25 bp, Homo sapien
tgagctcacatagatactgcggcag

SEQ ID NO: 5428368 - DNA, 25 bp, Homo sapien
atggaaactcatcgtggactaaaac

SEQ ID NO: 5428369 - DNA, 25 bp, Homo sapien
cagtggttcacgttggcatggaaac

SEQ ID NO: 5428370 - DNA, 25 bp, Homo sapien
aagaccactgtgcaaaagaggaatg

SEQ ID NO: 5428371 - DNA, 25 bp, Homo sapien
cagcttgatgaccacatgcatggga

SEQ ID NO: 5428372 - DNA, 25 bp, Homo sapien
ggaatgagactatatcttgccttct

SEQ ID NO: 5428373 - DNA, 25 bp, Homo sapien
agatggctttagaaccagcttgatg

SEQ ID NO: 5428374 - DNA, 25 bp, Homo sapien
tccctcacttgggtcatttccaagc

SEQ ID NO: 5428375 - DNA, 25 bp, Homo sapien
cctcacttgggtcatttccaagcat

SEQ ID NO: 5428376 - DNA, 25 bp, Homo sapien
ctggatcactccctcacttgggtca

SEQ ID NO: 5428377 - DNA, 25 bp, Homo sapien
actccctcacttgggtcatttccaa

SEQ ID NO: 5428378 - DNA, 25 bp, Homo sapien
tgtcctatgatatggcaggccctga

SEQ ID NO: 5428379 - DNA, 25 bp, Homo sapien
gccctgagctgggtatttcaggaaa

SEQ ID NO: 5428380 - DNA, 25 bp, Homo sapien
cagaactcggtaaaattcaatccaa

SEQ ID NO: 5428381 - DNA, 25 bp, Homo sapien
aatgaaggtcccatgttaggcaagg

SEQ ID NO: 5428382 - DNA, 25 bp, Homo sapien
tggagtgcagagggagatcaggaag

SEQ ID NO: 5428383 - DNA, 25 bp, Homo sapien
ccacacggaagagatcaagcaaaat

SEQ ID NO: 5428384 - DNA, 25 bp, Homo sapien
tcgtagtccacacggaagagatcaa

SEQ ID NO: 5428385 - DNA, 25 bp, Homo sapien
tagtccacacggaagagatcaagca

SEQ ID NO: 5428386 - DNA, 25 bp, Homo sapien
tcctccagccgggaagctgttgctc

SEQ ID NO: 5428387 - DNA, 25 bp, Homo sapien
ctcctccagccgggaagctgttgct

SEQ ID NO: 5428388 - DNA, 25 bp, Homo sapien
cctccagccgggaagctgttgctca

SEQ ID NO: 5428389 - DNA, 25 bp, Homo sapien
tgcaccggggcttcgcgcagacgtt

SEQ ID NO: 5428390 - DNA, 25 bp, Homo sapien
ggggcttcgcgcagacgttctcccg

SEQ ID NO: 5428391 - DNA, 25 bp, Homo sapien
cgcgcagacgttctcccgcgatctg

SEQ ID NO: 5428392 - DNA, 25 bp, Homo sapien
ctgcaccggggcttcgcgcagacgt

SEQ ID NO: 5428393 - DNA, 25 bp, Homo sapien
gtggcgcgggcgacagctcggcccg

SEQ ID NO: 5428394 - DNA, 25 bp, Homo sapien
gcgtgtgcccggagcccgctgggcg

SEQ ID NO: 5428395 - DNA, 25 bp, Homo sapien
cgccgggcttaagcgcccggccgct

SEQ ID NO: 5428396 - DNA, 25 bp, Homo sapien
tgaactgtccaactcttgcccgcgc

SEQ ID NO: 5428397 - DNA, 25 bp, Homo sapien
taaatcccgcctttccaggcgtgcg

SEQ ID NO: 5428398 - DNA, 25 bp, Homo sapien
aagcctagatgccaagccccgcgat

SEQ ID NO: 5428399 - DNA, 25 bp, Homo sapien
cccgaagagatccttggcaatggca

SEQ ID NO: 5428400 - DNA, 25 bp, Homo sapien
cacagcgagccagaggaggctccgt

SEQ ID NO: 5428401 - DNA, 25 bp, Homo sapien
gcggagccgggaaggcccggagcgc

SEQ ID NO: 5428402 - DNA, 25 bp, Homo sapien
gcccggagcgcaagaaggcatcgca

SEQ ID NO: 5428403 - DNA, 25 bp, Homo sapien
cgggaaggcccggagcgcaagaagg

SEQ ID NO: 5428404 - DNA, 25 bp, Homo sapien
gctcattttcgccggatttcttttc

SEQ ID NO: 5428405 - DNA, 25 bp, Homo sapien
gttaacacacattccccagtttggc

SEQ ID NO: 5428406 - DNA, 25 bp, Homo sapien
taatcttctcttaactgcatttgca

SEQ ID NO: 5428407 - DNA, 25 bp, Homo sapien
tctttgctctgagataaatataaaa

SEQ ID NO: 5428408 - DNA, 25 bp, Homo sapien
ttagattgcaaggtgattactgtgg

SEQ ID NO: 5428409 - DNA, 25 bp, Homo sapien
agctgaattataattcagggagcag

SEQ ID NO: 5428410 - DNA, 25 bp, Homo sapien
gagatggacccagctgaattataat

SEQ ID NO: 5428411 - DNA, 25 bp, Homo sapien
tgaattataattcagggagcagggg

SEQ ID NO: 5428412 - DNA, 25 bp, Homo sapien
tgtagctcaggtggattttctgaaa

SEQ ID NO: 5428413 - DNA, 25 bp, Homo sapien
tgtttctttcacatatgttaagttt

SEQ ID NO: 5428414 - DNA, 25 bp, Homo sapien
tgtattttgtggcatataccatccg

SEQ ID NO: 5428415 - DNA, 25 bp, Homo sapien
atctccacgattgtattttgtggca

SEQ ID NO: 5428416 - DNA, 25 bp, Homo sapien
tataccatccgatgtttctttcaca

SEQ ID NO: 5428417 - DNA, 25 bp, Homo sapien
cccatctgacttgagcatcatcagc

SEQ ID NO: 5428418 - DNA, 25 bp, Homo sapien
tcagcaggaaaagcttaactcttgc

SEQ ID NO: 5428419 - DNA, 25 bp, Homo sapien
cattcctggaaggtagaacccatct

SEQ ID NO: 5428420 - DNA, 25 bp, Homo sapien
aaagcttaactcttgcattcctgga

SEQ ID NO: 5428421 - DNA, 25 bp, Homo sapien
gatacgataggtagttaggtagaca

SEQ ID NO: 5428422 - DNA, 25 bp, Homo sapien
gggatttactgagtgcacctttggt

SEQ ID NO: 5428423 - DNA, 25 bp, Homo sapien
tcttgaatggacgtatgatgatagt

SEQ ID NO: 5428424 - DNA, 25 bp, Homo sapien
gatgatagtattcataaacccatga

SEQ ID NO: 5428425 - DNA, 25 bp, Homo sapien
gaaagtgatgtatagcttcatattt

SEQ ID NO: 5428426 - DNA, 25 bp, Homo sapien
tgtctgtcctgcctaattgtgcttc

SEQ ID NO: 5428427 - DNA, 25 bp, Homo sapien
tgagcctgatccaaggtgatttgtc

SEQ ID NO: 5428428 - DNA, 25 bp, Homo sapien
tcagagaccgcagtttcttccctac

SEQ ID NO: 5428429 - DNA, 25 bp, Homo sapien
tgcaccctgggcacttcagtctgag

SEQ ID NO: 5428430 - DNA, 25 bp, Homo sapien
tctcaaatccttactctgggtatca

SEQ ID NO: 5428431 - DNA, 25 bp, Homo sapien
aaatccttactctgggtatcatttg

SEQ ID NO: 5428432 - DNA, 25 bp, Homo sapien
tgggtatcatttgatctgcatacct

SEQ ID NO: 5428433 - DNA, 25 bp, Homo sapien
ttactctgggtatcatttgatctgc

SEQ ID NO: 5428434 - DNA, 25 bp, Homo sapien
acagctgcaggaggtccccttcggg

SEQ ID NO: 5428435 - DNA, 25 bp, Homo sapien
ggagccagtgatggaattcagttca

SEQ ID NO: 5428436 - DNA, 25 bp, Homo sapien
ggaggtccccttcgggcacagtctc

SEQ ID NO: 5428437 - DNA, 25 bp, Homo sapien
gagatgttgccatcaaacagctgca

SEQ ID NO: 5428438 - DNA, 25 bp, Homo sapien
tgcaaaatgactccatataaattac

SEQ ID NO: 5428439 - DNA, 25 bp, Homo sapien
attgtttgaactttagctgccatgt

SEQ ID NO: 5428440 - DNA, 25 bp, Homo sapien
aattgtttgaactttagctgccatg

SEQ ID NO: 5428441 - DNA, 25 bp, Homo sapien
aaattgtttgaactttagctgccat

SEQ ID NO: 5428442 - DNA, 25 bp, Homo sapien
tacgtgtatttgctccagtggacat

SEQ ID NO: 5428443 - DNA, 25 bp, Homo sapien
tgcggaaggagtaatcgggcattac

SEQ ID NO: 5428444 - DNA, 25 bp, Homo sapien
ccaacttcaaattgcggaaggagta

SEQ ID NO: 5428445 - DNA, 25 bp, Homo sapien
taatcgggcattacgtgtatttgct

SEQ ID NO: 5428446 - DNA, 25 bp, Homo sapien
tccacatggatagcataggttttcc

SEQ ID NO: 5428447 - DNA, 25 bp, Homo sapien
caagtggcatcgtctgtagctggaa

SEQ ID NO: 5428448 - DNA, 25 bp, Homo sapien
ggtggtgtcaggtagtcagacttct

SEQ ID NO: 5428449 - DNA, 25 bp, Homo sapien
tctctccatatggtggttccacatg

SEQ ID NO: 5428450 - DNA, 25 bp, Homo sapien
gactgtctaagagcatcacattctg

SEQ ID NO: 5428451 - DNA, 25 bp, Homo sapien
ttctgttggtcacagggccatccca

SEQ ID NO: 5428452 - DNA, 25 bp, Homo sapien
gaatcccaggagatatagttcattg

SEQ ID NO: 5428453 - DNA, 25 bp, Homo sapien
tactcctcaacctgctacaagctgg

SEQ ID NO: 5428454 - DNA, 25 bp, Homo sapien
gggagaagagcgagagtaacaatct

SEQ ID NO: 5428455 - DNA, 25 bp, Homo sapien
gaagagcgagagtaacaatctcact

SEQ ID NO: 5428456 - DNA, 25 bp, Homo sapien
tctcacttagtacatctacaacagg

SEQ ID NO: 5428457 - DNA, 25 bp, Homo sapien
gagagtaacaatctcacttagtaca

SEQ ID NO: 5428458 - DNA, 25 bp, Homo sapien
gatgaacctgccagaggttgtttta

SEQ ID NO: 5428459 - DNA, 25 bp, Homo sapien
gctgttatcccttgtatcaatgcct

SEQ ID NO: 5428460 - DNA, 25 bp, Homo sapien
cctgccagaggttgttttacacgtt

SEQ ID NO: 5428461 - DNA, 25 bp, Homo sapien
ccacatgaagctgttatcccttgta

SEQ ID NO: 5428462 - DNA, 25 bp, Homo sapien
gacttcataacttccagattcctgc

SEQ ID NO: 5428463 - DNA, 25 bp, Homo sapien
aatgacttcataacttccagattcc

SEQ ID NO: 5428464 - DNA, 25 bp, Homo sapien
ttttaatgacttcataacttccaga

SEQ ID NO: 5428465 - DNA, 25 bp, Homo sapien
cttcataacttccagattcctgcat

SEQ ID NO: 5428466 - DNA, 25 bp, Homo sapien
tcagagacgtgatagatcagattca

SEQ ID NO: 5428467 - DNA, 25 bp, Homo sapien
ttttctgagtactatttcctctgta

SEQ ID NO: 5428468 - DNA, 25 bp, Homo sapien
tgaactctatggtttttctgagtac

SEQ ID NO: 5428469 - DNA, 25 bp, Homo sapien
gacgtgatagatcagattcagagtt

SEQ ID NO: 5428470 - DNA, 25 bp, Homo sapien
tccttttctagattccgtgtagacc

SEQ ID NO: 5428471 - DNA, 25 bp, Homo sapien
ttttctgaatcaacacttcaccctg

SEQ ID NO: 5428472 - DNA, 25 bp, Homo sapien
gaatcaacacttcaccctgtaattt

SEQ ID NO: 5428473 - DNA, 25 bp, Homo sapien
aacacttcaccctgtaattttgata

SEQ ID NO: 5428474 - DNA, 25 bp, Homo sapien
tcagagatgtaaatgcctggtatcc

SEQ ID NO: 5428475 - DNA, 25 bp, Homo sapien
cagagatgtaaatgcctggtatcca

SEQ ID NO: 5428476 - DNA, 25 bp, Homo sapien
catcagagatgtaaatgcctggtat

SEQ ID NO: 5428477 - DNA, 25 bp, Homo sapien
ccatcagagatgtaaatgcctggta

SEQ ID NO: 5428478 - DNA, 25 bp, Homo sapien
tatagctttgccaaaagtggccaca

SEQ ID NO: 5428479 - DNA, 25 bp, Homo sapien
actgatgactcactcctgttgcaaa

SEQ ID NO: 5428480 - DNA, 25 bp, Homo sapien
tgatagatgatttgccccaaaggag

SEQ ID NO: 5428481 - DNA, 25 bp, Homo sapien
tggccacaatggattggcaatatct

SEQ ID NO: 5428482 - DNA, 25 bp, Homo sapien
gctaatgtatttggctgacaaagcc

SEQ ID NO: 5428483 - DNA, 25 bp, Homo sapien
aaattgtctcaattccaaggtggga

SEQ ID NO: 5428484 - DNA, 25 bp, Homo sapien
ggaagtggagatacaataggagaaa

SEQ ID NO: 5428485 - DNA, 25 bp, Homo sapien
tgttgcagaatgagatacagctgag

SEQ ID NO: 5428486 - DNA, 25 bp, Homo sapien
agaaacaatatacatgatcagccat

SEQ ID NO: 5428487 - DNA, 25 bp, Homo sapien
cattcttgtgtaggtagtgggctga

SEQ ID NO: 5428488 - DNA, 25 bp, Homo sapien
caccatgactgtatgatagttttgg

SEQ ID NO: 5428489 - DNA, 25 bp, Homo sapien
cctaaagcaatttgggaagcatctc

SEQ ID NO: 5428490 - DNA, 25 bp, Homo sapien
aatgtcctggtatggtcttgataca

SEQ ID NO: 5428491 - DNA, 25 bp, Homo sapien
tccaatagtacaggcacagcacagc

SEQ ID NO: 5428492 - DNA, 25 bp, Homo sapien
gctccaatagtacaggcacagcaca

SEQ ID NO: 5428493 - DNA, 25 bp, Homo sapien
tttgctccaatagtacaggcacagc

SEQ ID NO: 5428494 - DNA, 25 bp, Homo sapien
ttctttgctccaatagtacaggcac

SEQ ID NO: 5428495 - DNA, 25 bp, Homo sapien
atctacagtagttgatgactctttc

SEQ ID NO: 5428496 - DNA, 25 bp, Homo sapien
tccaagaagtatctacagtagttga

SEQ ID NO: 5428497 - DNA, 25 bp, Homo sapien
aatctccaagaagtatctacagtag

SEQ ID NO: 5428498 - DNA, 25 bp, Homo sapien
gaagtatctacagtagttgatgact

SEQ ID NO: 5428499 - DNA, 25 bp, Homo sapien
tgtcacatcgtcttgcttaaaggat

SEQ ID NO: 5428500 - DNA, 25 bp, Homo sapien
tcagacactgacaagcctgtcacat

SEQ ID NO: 5428501 - DNA, 25 bp, Homo sapien
tacagttgttcctgtaaaaatcaga

SEQ ID NO: 5428502 - DNA, 25 bp, Homo sapien
catcgtcttgcttaaaggatggcag

SEQ ID NO: 5428503 - DNA, 25 bp, Homo sapien
gaacttgtgctcttttccgcagtaa

SEQ ID NO: 5428504 - DNA, 25 bp, Homo sapien
ttttccgcagtaaatacacggacat

SEQ ID NO: 5428505 - DNA, 25 bp, Homo sapien
tcagccacaggaacttgtgctcttt

SEQ ID NO: 5428506 - DNA, 25 bp, Homo sapien
gctcttttccgcagtaaatacacgg

SEQ ID NO: 5428507 - DNA, 25 bp, Homo sapien
aaaaaagcactgataattcactata

SEQ ID NO: 5428508 - DNA, 25 bp, Homo sapien
gaatataaggcatgtccagtttatg

SEQ ID NO: 5428509 - DNA, 25 bp, Homo sapien
caagaattctctataaagttcgtca

SEQ ID NO: 5428510 - DNA, 25 bp, Homo sapien
cgagacttacatccctttctggtga

SEQ ID NO: 5428511 - DNA, 25 bp, Homo sapien
taattttatgggtagggccttgaga

SEQ ID NO: 5428512 - DNA, 25 bp, Homo sapien
tatctatcttcatcacttcttgagc

SEQ ID NO: 5428513 - DNA, 25 bp, Homo sapien
gagacttttctcttcgccggtcctg

SEQ ID NO: 5428514 - DNA, 25 bp, Homo sapien
tcgtctctcggcaccattttgatat

SEQ ID NO: 5428515 - DNA, 25 bp, Homo sapien
cagagtatctgctagatttttccca

SEQ ID NO: 5428516 - DNA, 25 bp, Homo sapien
tgaaccacttgaattttgatctctg

SEQ ID NO: 5428517 - DNA, 25 bp, Homo sapien
ggatctctccaatttgaaccacttg

SEQ ID NO: 5428518 - DNA, 25 bp, Homo sapien
ttcgttcagaaggaacatctttgtc

SEQ ID NO: 5428519 - DNA, 25 bp, Homo sapien
ctttgtctgatgtgtactttgttat

SEQ ID NO: 5428520 - DNA, 25 bp, Homo sapien
tgactactgatggatgaagagtcgc

SEQ ID NO: 5428521 - DNA, 25 bp, Homo sapien
ctgaggcagagctatgactactgat

SEQ ID NO: 5428522 - DNA, 25 bp, Homo sapien
tactgatggatgaagagtcgctctc

SEQ ID NO: 5428523 - DNA, 25 bp, Homo sapien
gaggcagagctatgactactgatgg

SEQ ID NO: 5428524 - DNA, 25 bp, Homo sapien
tttttgagatgctcccgcagttcat

SEQ ID NO: 5428525 - DNA, 25 bp, Homo sapien
aacatctggtttctgcgccacaatg

SEQ ID NO: 5428526 - DNA, 25 bp, Homo sapien
caatgacctttggtgtatttttgag

SEQ ID NO: 5428527 - DNA, 25 bp, Homo sapien
tctgcgccacaatgacctttggtgt

SEQ ID NO: 5428528 - DNA, 25 bp, Homo sapien
cgagtgtttcttggattatctcggg

SEQ ID NO: 5428529 - DNA, 25 bp, Homo sapien
aagttgatggcaaaccgagtgtttc

SEQ ID NO: 5428530 - DNA, 25 bp, Homo sapien
tatctcggggtaataatccttcaaa

SEQ ID NO: 5428531 - DNA, 25 bp, Homo sapien
ctatagaagtaaagaagttgatggc

SEQ ID NO: 5428532 - DNA, 25 bp, Homo sapien
tcctttaatcttgcattaagtttag

SEQ ID NO: 5428533 - DNA, 25 bp, Homo sapien
tggatgatgtagtggtttcttcact

SEQ ID NO: 5428534 - DNA, 25 bp, Homo sapien
tatactgtaaccctcttgaaaggag

SEQ ID NO: 5428535 - DNA, 25 bp, Homo sapien
tgctatgggcatatcttacctctgg

SEQ ID NO: 5428536 - DNA, 25 bp, Homo sapien
gaaccatggagagttattccctcag

SEQ ID NO: 5428537 - DNA, 25 bp, Homo sapien
tataagtggtggctaactaacactg

SEQ ID NO: 5428538 - DNA, 25 bp, Homo sapien
tccaagcgatggatggtatcatact

SEQ ID NO: 5428539 - DNA, 25 bp, Homo sapien
taccttcaaaggattccatgtactc

SEQ ID NO: 5428540 - DNA, 25 bp, Homo sapien
aaacatcttagcaacatttcgcaac

SEQ ID NO: 5428541 - DNA, 25 bp, Homo sapien
tgtataaaaggtgagcaaacatctt

SEQ ID NO: 5428542 - DNA, 25 bp, Homo sapien
caagtatcatgttgcagagttcttt

SEQ ID NO: 5428543 - DNA, 25 bp, Homo sapien
ttgggcacagcaatcaagtatcatg

SEQ ID NO: 5428544 - DNA, 25 bp, Homo sapien
caaaaaatttttcgtatgtcctctg

SEQ ID NO: 5428545 - DNA, 25 bp, Homo sapien
ttttcgtatgtcctctgttgggcac

SEQ ID NO: 5428546 - DNA, 25 bp, Homo sapien
cagcaatttgtgagcacattcttca

SEQ ID NO: 5428547 - DNA, 25 bp, Homo sapien
gcaatttgtgagcacattcttcaaa

SEQ ID NO: 5428548 - DNA, 25 bp, Homo sapien
tttgtgagcacattcttcaaaatct

SEQ ID NO: 5428549 - DNA, 25 bp, Homo sapien
tttcagcaatttgtgagcacattct

SEQ ID NO: 5428550 - DNA, 25 bp, Homo sapien
catgctatggctgttgcccctatgc

SEQ ID NO: 5428551 - DNA, 25 bp, Homo sapien
catgcatcgcttaatgacacggtta

SEQ ID NO: 5428552 - DNA, 25 bp, Homo sapien
aatatacctaggctacatgctatgg

SEQ ID NO: 5428553 - DNA, 25 bp, Homo sapien
taataaaaccacctgcagtcatgca

SEQ ID NO: 5428554 - DNA, 25 bp, Homo sapien
cagggtggctatagcaaataacaat

SEQ ID NO: 5428555 - DNA, 25 bp, Homo sapien
gattcacattacgtagcagggtggc

SEQ ID NO: 5428556 - DNA, 25 bp, Homo sapien
tcaaatagcatgaacaaaaagccct

SEQ ID NO: 5428557 - DNA, 25 bp, Homo sapien
tacaatgtataatcacccttagggt

SEQ ID NO: 5428558 - DNA, 25 bp, Homo sapien
gtaactgcaatactaacacagtaaa

SEQ ID NO: 5428559 - DNA, 25 bp, Homo sapien
caatactaacacagtaaatctgctg

SEQ ID NO: 5428560 - DNA, 25 bp, Homo sapien
aagagctccactgtaactcttcaaa

SEQ ID NO: 5428561 - DNA, 25 bp, Homo sapien
tcaaagagctccactgtaactcttc

SEQ ID NO: 5428562 - DNA, 25 bp, Homo sapien
gagaaaataagtaaggataaagcaa

SEQ ID NO: 5428563 - DNA, 25 bp, Homo sapien
agagaaaataagtaaggataaagca

SEQ ID NO: 5428564 - DNA, 25 bp, Homo sapien
caatgttttgctgtttaacgttcct

SEQ ID NO: 5428565 - DNA, 25 bp, Homo sapien
tgctgtttaacgttcctctatttga

SEQ ID NO: 5428566 - DNA, 25 bp, Homo sapien
taaattgtacgacgaaatgagacca

SEQ ID NO: 5428567 - DNA, 25 bp, Homo sapien
ctgttttgtcatgaatagttacttt

SEQ ID NO: 5428568 - DNA, 25 bp, Homo sapien
tacgacgaaatgagaccaggttaat

SEQ ID NO: 5428569 - DNA, 25 bp, Homo sapien
gaatagcaagataaattgtacgacg

SEQ ID NO: 5428570 - DNA, 25 bp, Homo sapien
tcttcttcctcgtcctcttcactac

SEQ ID NO: 5428571 - DNA, 25 bp, Homo sapien
ggtctgtgttcgagtcagtatctcc

SEQ ID NO: 5428572 - DNA, 25 bp, Homo sapien
cctggtctgtgttcgagtcagtatc

SEQ ID NO: 5428573 - DNA, 25 bp, Homo sapien
ctgtgttcgagtcagtatctccctc

SEQ ID NO: 5428574 - DNA, 25 bp, Homo sapien
tcctggtctgtgttcgagtcagtat

SEQ ID NO: 5428575 - DNA, 25 bp, Homo sapien
cttaatagctttgtacttctcttca

SEQ ID NO: 5428576 - DNA, 25 bp, Homo sapien
gctttgtacttctcttcattctcca

SEQ ID NO: 5428577 - DNA, 25 bp, Homo sapien
ctttcttaatagctttgtacttctc

SEQ ID NO: 5428578 - DNA, 25 bp, Homo sapien
tgtacttctcttcattctccataaa

SEQ ID NO: 5428579 - DNA, 25 bp, Homo sapien
tgaatccatctttccgtacagcaaa

SEQ ID NO: 5428580 - DNA, 25 bp, Homo sapien
ggattatagtcatcctccagaggga

SEQ ID NO: 5428581 - DNA, 25 bp, Homo sapien
catgcagaatgtttcgaaggcgttc

SEQ ID NO: 5428582 - DNA, 25 bp, Homo sapien
tccagagggagcatatgagtgaatt

SEQ ID NO: 5428583 - DNA, 25 bp, Homo sapien
gaaaaccaatagctacttcaacgct

SEQ ID NO: 5428584 - DNA, 25 bp, Homo sapien
ttgtgttaatttgaggccacattcc

SEQ ID NO: 5428585 - DNA, 25 bp, Homo sapien
tacttcaacgctatcatctgttggt

SEQ ID NO: 5428586 - DNA, 25 bp, Homo sapien
acttgtgttaatttgaggccacatt

SEQ ID NO: 5428587 - DNA, 25 bp, Homo sapien
tctctaagcataatacttcgtgtgc

SEQ ID NO: 5428588 - DNA, 25 bp, Homo sapien
ggttaataagatgcgccacaaattt

SEQ ID NO: 5428589 - DNA, 25 bp, Homo sapien
cattttggttaataagatgcgccac

SEQ ID NO: 5428590 - DNA, 25 bp, Homo sapien
aataagatgcgccacaaattttgaa

SEQ ID NO: 5428591 - DNA, 25 bp, Homo sapien
cacattttggttaataagatgcgcc

SEQ ID NO: 5428592 - DNA, 25 bp, Homo sapien
taattgccactaatgctgcataaac

SEQ ID NO: 5428593 - DNA, 25 bp, Homo sapien
gaggattaattctccaatttgtgga

SEQ ID NO: 5428594 - DNA, 25 bp, Homo sapien
ggtgaagattggagaagcactctgt

SEQ ID NO: 5428595 - DNA, 25 bp, Homo sapien
tcgatagccttttcgaaaattaaga

SEQ ID NO: 5428596 - DNA, 25 bp, Homo sapien
attggcagtcaactgattttcgaca

SEQ ID NO: 5428597 - DNA, 25 bp, Homo sapien
tacaaacatcaacgcaaaacagatt

SEQ ID NO: 5428598 - DNA, 25 bp, Homo sapien
aacagaatacccagatgcagaagaa

SEQ ID NO: 5428599 - DNA, 25 bp, Homo sapien
gaaaatagaccttagtcccacagca

SEQ ID NO: 5428600 - DNA, 25 bp, Homo sapien
aatagaccttagtcccacagcatat

SEQ ID NO: 5428601 - DNA, 25 bp, Homo sapien
caaaacacattaggcattcaactca

SEQ ID NO: 5428602 - DNA, 25 bp, Homo sapien
ggattacataaaactagaatgcttc

SEQ ID NO: 5428603 - DNA, 25 bp, Homo sapien
gctctgagacactggtatggttaat

SEQ ID NO: 5428604 - DNA, 25 bp, Homo sapien
tctcacaactgttacaatggctgta

SEQ ID NO: 5428605 - DNA, 25 bp, Homo sapien
tcaatgacctttgaaatgaagtagc

SEQ ID NO: 5428606 - DNA, 25 bp, Homo sapien
tcatgagtttaaattactggaggca

SEQ ID NO: 5428607 - DNA, 25 bp, Homo sapien
cattaagtaaatgtctgcaaaaacc

SEQ ID NO: 5428608 - DNA, 25 bp, Homo sapien
ttccatacaacctctaacagcaagg

SEQ ID NO: 5428609 - DNA, 25 bp, Homo sapien
gaagaagctcttgaataataatact

SEQ ID NO: 5428610 - DNA, 25 bp, Homo sapien
ctttgttgataaggccattaattga

SEQ ID NO: 5428611 - DNA, 25 bp, Homo sapien
aggccattaattgacttcttcaggg

SEQ ID NO: 5428612 - DNA, 25 bp, Homo sapien
taatacttatgttggaaatgttgac

SEQ ID NO: 5428613 - DNA, 25 bp, Homo sapien
caagagcggagttaagtagcaacaa

SEQ ID NO: 5428614 - DNA, 25 bp, Homo sapien
tacagtgtgggcttttacagaaaaa

SEQ ID NO: 5428615 - DNA, 25 bp, Homo sapien
tataagggcacgtagtgtgtggctc

SEQ ID NO: 5428616 - DNA, 25 bp, Homo sapien
tctccaatggagctataaagtaaag

SEQ ID NO: 5428617 - DNA, 25 bp, Homo sapien
aagaagaggatccagctcatctttc

SEQ ID NO: 5428618 - DNA, 25 bp, Homo sapien
gttcatcctgagcagaggaactctg

SEQ ID NO: 5428619 - DNA, 25 bp, Homo sapien
tatatgctccaccagtgcgagtaag

SEQ ID NO: 5428620 - DNA, 25 bp, Homo sapien
ttttctttgtagcaggttcatcctg

SEQ ID NO: 5428621 - DNA, 25 bp, Homo sapien
tcccaggagatggggatttccgaga

SEQ ID NO: 5428622 - DNA, 25 bp, Homo sapien
ctcccaggagatggggatttccgag

SEQ ID NO: 5428623 - DNA, 25 bp, Homo sapien
cccaggagatggggatttccgagac

SEQ ID NO: 5428624 - DNA, 25 bp, Homo sapien
cttttccgatccgtatctctttctc

SEQ ID NO: 5428625 - DNA, 25 bp, Homo sapien
ttttccgatccgtatctctttctct

SEQ ID NO: 5428626 - DNA, 25 bp, Homo sapien
ttccgatccgtatctctttctcttt

SEQ ID NO: 5428627 - DNA, 25 bp, Homo sapien
tttccgatccgtatctctttctctt

SEQ ID NO: 5428628 - DNA, 25 bp, Homo sapien
tgaatgctcatagtctgatctgctg

SEQ ID NO: 5428629 - DNA, 25 bp, Homo sapien
taatcaaagtaatctctatcccggg

SEQ ID NO: 5428630 - DNA, 25 bp, Homo sapien
tctgctgtaatcaaagtaatctcta

SEQ ID NO: 5428631 - DNA, 25 bp, Homo sapien
tgctactatcataagaacgtcctct

SEQ ID NO: 5428632 - DNA, 25 bp, Homo sapien
tttagtgaattatcctgattcactt

SEQ ID NO: 5428633 - DNA, 25 bp, Homo sapien
gtttagtgaattatcctgattcact

SEQ ID NO: 5428634 - DNA, 25 bp, Homo sapien
gttcctctgatatgaattaaggttt

SEQ ID NO: 5428635 - DNA, 25 bp, Homo sapien
ggagttcctctgatatgaattaagg

SEQ ID NO: 5428636 - DNA, 25 bp, Homo sapien
gagaggagttcctctgatatgaatt

SEQ ID NO: 5428637 - DNA, 25 bp, Homo sapien
gaggagttcctctgatatgaattaa

SEQ ID NO: 5428638 - DNA, 25 bp, Homo sapien
caaatttttgatgacatctagttta

SEQ ID NO: 5428639 - DNA, 25 bp, Homo sapien
tgtatcattcttacggctttgcaga

SEQ ID NO: 5428640 - DNA, 25 bp, Homo sapien
cggctttgcagaaccaaatacttct

SEQ ID NO: 5428641 - DNA, 25 bp, Homo sapien
tccgctgagtccctaaaacccattg

SEQ ID NO: 5428642 - DNA, 25 bp, Homo sapien
taacaaatgactggcacacatagta

SEQ ID NO: 5428643 - DNA, 25 bp, Homo sapien
catagtaagtgctaacaggagatct

SEQ ID NO: 5428644 - DNA, 25 bp, Homo sapien
gagtaggaaacaatcactgtggcat

SEQ ID NO: 5428645 - DNA, 25 bp, Homo sapien
taacaggagatcttgagtaggaaac

SEQ ID NO: 5428646 - DNA, 25 bp, Homo sapien
ggatttcaccaagttaagaatcact

SEQ ID NO: 5428647 - DNA, 25 bp, Homo sapien
tgctaacggatgaaagtgggaaaac

SEQ ID NO: 5428648 - DNA, 25 bp, Homo sapien
gattgtaagtcagtgcagtagttga

SEQ ID NO: 5428649 - DNA, 25 bp, Homo sapien
cagtagttgaaaatactatacagtc

SEQ ID NO: 5428650 - DNA, 25 bp, Homo sapien
ggagagcagtacgaggagacaaggg

SEQ ID NO: 5428651 - DNA, 25 bp, Homo sapien
tccaacaatgtagggagagcagtac

SEQ ID NO: 5428652 - DNA, 25 bp, Homo sapien
tatggtgacatcatgtagtaactca

SEQ ID NO: 5428653 - DNA, 25 bp, Homo sapien
catgtagtaactcatagtctccaac

SEQ ID NO: 5428654 - DNA, 25 bp, Homo sapien
aaataacaagtacccaatgctctga

SEQ ID NO: 5428655 - DNA, 25 bp, Homo sapien
tatctgtgccacactacttttcatt

SEQ ID NO: 5428656 - DNA, 25 bp, Homo sapien
caaataacaagtacccaatgctctg

SEQ ID NO: 5428657 - DNA, 25 bp, Homo sapien
ccaggttcaagtacagggctagaag

SEQ ID NO: 5428658 - DNA, 25 bp, Homo sapien
gattgccaggttcaagtacagggct

SEQ ID NO: 5428659 - DNA, 25 bp, Homo sapien
ttgaatgactagattgccaggttca

SEQ ID NO: 5428660 - DNA, 25 bp, Homo sapien
agtacagggctagaagttgtgcaga

SEQ ID NO: 5428661 - DNA, 25 bp, Homo sapien
aatgccgctcacagccgtatcagtg

SEQ ID NO: 5428662 - DNA, 25 bp, Homo sapien
tcttgcgggcccgagcgtagcgaga

SEQ ID NO: 5428663 - DNA, 25 bp, Homo sapien
gtagcgagaagacccacgcacactc

SEQ ID NO: 5428664 - DNA, 25 bp, Homo sapien
ctgcttggacctagccgctctcaca

SEQ ID NO: 5428665 - DNA, 25 bp, Homo sapien
ctccaccgcgccgccattacaccgg

SEQ ID NO: 5428666 - DNA, 25 bp, Homo sapien
caccgcgccgccattacaccggacg

SEQ ID NO: 5428667 - DNA, 25 bp, Homo sapien
tccaccgcgccgccattacaccgga

SEQ ID NO: 5428668 - DNA, 25 bp, Homo sapien
ccaccgcgccgccattacaccggac

SEQ ID NO: 5428669 - DNA, 25 bp, Homo sapien
gattttggtcagtaactctatgctc

SEQ ID NO: 5428670 - DNA, 25 bp, Homo sapien
ggtcagtaactctatgctctgtgac

SEQ ID NO: 5428671 - DNA, 25 bp, Homo sapien
ttggtcagtaactctatgctctgtg

SEQ ID NO: 5428672 - DNA, 25 bp, Homo sapien
gagaatggggtatgagtccgtggag

SEQ ID NO: 5428673 - DNA, 25 bp, Homo sapien
tcacatcaagttcctgagctacaag

SEQ ID NO: 5428674 - DNA, 25 bp, Homo sapien
caagttcctgagctacaagattgga

SEQ ID NO: 5428675 - DNA, 25 bp, Homo sapien
ccttaggaccagtcctcacatcaag

SEQ ID NO: 5428676 - DNA, 25 bp, Homo sapien
gctacaagattggagttccagtgtc

SEQ ID NO: 5428677 - DNA, 25 bp, Homo sapien
catttgaatggtaagctcttgtcag

SEQ ID NO: 5428678 - DNA, 25 bp, Homo sapien
aatagacatttgaatggtaagctct

SEQ ID NO: 5428679 - DNA, 25 bp, Homo sapien
gacatttgaatggtaagctcttgtc

SEQ ID NO: 5428680 - DNA, 25 bp, Homo sapien
tagacatttgaatggtaagctcttg

SEQ ID NO: 5428681 - DNA, 25 bp, Homo sapien
ctctccaacacaatttcccctccat

SEQ ID NO: 5428682 - DNA, 25 bp, Homo sapien
tgttgtccattcttcactccctctt

SEQ ID NO: 5428683 - DNA, 25 bp, Homo sapien
cattctctctccaacacaatttccc

SEQ ID NO: 5428684 - DNA, 25 bp, Homo sapien
ctgttgtccattcttcactccctct

SEQ ID NO: 5428685 - DNA, 25 bp, Homo sapien
taaaattatgccttctgtgacttgt

SEQ ID NO: 5428686 - DNA, 25 bp, Homo sapien
aatagtagggttcccacacgcccat

SEQ ID NO: 5428687 - DNA, 25 bp, Homo sapien
cttccacctcccaaactattgtcat

SEQ ID NO: 5428688 - DNA, 25 bp, Homo sapien
tccacctcccaaactattgtcataa

SEQ ID NO: 5428689 - DNA, 25 bp, Homo sapien
gtaagtgtctaacctatcttgttcc

SEQ ID NO: 5428690 - DNA, 25 bp, Homo sapien
aagtgtctaacctatcttgttcctg

SEQ ID NO: 5428691 - DNA, 25 bp, Homo sapien
taacctatcttgttcctgtccaact

SEQ ID NO: 5428692 - DNA, 25 bp, Homo sapien
gtctaacctatcttgttcctgtcca

SEQ ID NO: 5428693 - DNA, 25 bp, Homo sapien
tcttatttcccaactggctatttcc

SEQ ID NO: 5428694 - DNA, 25 bp, Homo sapien
actggctatttccttaatcagacgc

SEQ ID NO: 5428695 - DNA, 25 bp, Homo sapien
gctatttccttaatcagacgctgag

SEQ ID NO: 5428696 - DNA, 25 bp, Homo sapien
tatcttatttcccaactggctattt

SEQ ID NO: 5428697 - DNA, 25 bp, Homo sapien
ctggcctttttggtatgctactcca

SEQ ID NO: 5428698 - DNA, 25 bp, Homo sapien
cctttttggtatgctactccataga

SEQ ID NO: 5428699 - DNA, 25 bp, Homo sapien
tatgctactccatagatacctagga

SEQ ID NO: 5428700 - DNA, 25 bp, Homo sapien
catagatacctaggaacaaccccat

SEQ ID NO: 5428701 - DNA, 25 bp, Homo sapien
ccatcactgccaggttcctgggctt

SEQ ID NO: 5428702 - DNA, 25 bp, Homo sapien
ctaatatactgaccagaatactggg

SEQ ID NO: 5428703 - DNA, 25 bp, Homo sapien
ggttcctgggcttctaatatactga

SEQ ID NO: 5428704 - DNA, 25 bp, Homo sapien
tgggtagaattgcagtgtgaagact

SEQ ID NO: 5428705 - DNA, 25 bp, Homo sapien
tgctccactgcctgacatcaaggtt

SEQ ID NO: 5428706 - DNA, 25 bp, Homo sapien
tccaagacaaggctgtcttctcaca

SEQ ID NO: 5428707 - DNA, 25 bp, Homo sapien
gacatcaaggttactggcagcttaa

SEQ ID NO: 5428708 - DNA, 25 bp, Homo sapien
ggttactggcagcttaatcctaatt

SEQ ID NO: 5428709 - DNA, 25 bp, Homo sapien
tgtaactgttatcccctgacacatg

SEQ ID NO: 5428710 - DNA, 25 bp, Homo sapien
gatactggacagaacattcattggc

SEQ ID NO: 5428711 - DNA, 25 bp, Homo sapien
ttggctgggtcactagagaacagca

SEQ ID NO: 5428712 - DNA, 25 bp, Homo sapien
acataagcaggtaatcagcaggaag

SEQ ID NO: 5428713 - DNA, 25 bp, Homo sapien
ataattttcttgcacagtcagatta

SEQ ID NO: 5428714 - DNA, 25 bp, Homo sapien
ttgcacagtcagattaattctgagc

SEQ ID NO: 5428715 - DNA, 25 bp, Homo sapien
ttcttgcacagtcagattaattctg

SEQ ID NO: 5428716 - DNA, 25 bp, Homo sapien
ttttcttgcacagtcagattaattc

SEQ ID NO: 5428717 - DNA, 25 bp, Homo sapien
tattctgactgcatcttcggtggcc

SEQ ID NO: 5428718 - DNA, 25 bp, Homo sapien
catcacaagatgcatttattctgac

SEQ ID NO: 5428719 - DNA, 25 bp, Homo sapien
tcggtggcctcacccatacacacaa

SEQ ID NO: 5428720 - DNA, 25 bp, Homo sapien
tttaaactctgaaccacgtgatgat

SEQ ID NO: 5428721 - DNA, 25 bp, Homo sapien
tattctggtttagaagcgtcgagat

SEQ ID NO: 5428722 - DNA, 25 bp, Homo sapien
ctatatggaagccagatggctgcaa

SEQ ID NO: 5428723 - DNA, 25 bp, Homo sapien
ggctgcaaatgttattctggtttag

SEQ ID NO: 5428724 - DNA, 25 bp, Homo sapien
gatttttgtattattgccaaagcca

SEQ ID NO: 5428725 - DNA, 25 bp, Homo sapien
ttcattccagagatacagaggatct

SEQ ID NO: 5428726 - DNA, 25 bp, Homo sapien
ataaggcaaattccttctaaggcca

SEQ ID NO: 5428727 - DNA, 25 bp, Homo sapien
tctaaggccacagttatataaaatg

SEQ ID NO: 5428728 - DNA, 25 bp, Homo sapien
taaggccacagttatataaaatgca

SEQ ID NO: 5428729 - DNA, 25 bp, Homo sapien
aaccccatgttgccctataaggcaa

SEQ ID NO: 5428730 - DNA, 25 bp, Homo sapien
gatgagcacgatgtaacttcagtct

SEQ ID NO: 5428731 - DNA, 25 bp, Homo sapien
acttcagtcttaacagtttgtccta

SEQ ID NO: 5428732 - DNA, 25 bp, Homo sapien
tttcagttgtattcccctctgtaga

SEQ ID NO: 5428733 - DNA, 25 bp, Homo sapien
cagtcttaacagtttgtcctatacc

SEQ ID NO: 5428734 - DNA, 25 bp, Homo sapien
ataaaatgtgctccaggtaattgct

SEQ ID NO: 5428735 - DNA, 25 bp, Homo sapien
taattgcttaacactgtgaagttga

SEQ ID NO: 5428736 - DNA, 25 bp, Homo sapien
gctccaggtaattgcttaacactgt

SEQ ID NO: 5428737 - DNA, 25 bp, Homo sapien
aatgtgctccaggtaattgcttaac

SEQ ID NO: 5428738 - DNA, 25 bp, Homo sapien
tccttaagcctgatgcacagtttgg

SEQ ID NO: 5428739 - DNA, 25 bp, Homo sapien
ttgcaactcttgttagcttatcagc

SEQ ID NO: 5428740 - DNA, 25 bp, Homo sapien
aatgcctgcttccttaagcctgatg

SEQ ID NO: 5428741 - DNA, 25 bp, Homo sapien
gacctttggcattgtgttacgtctg

SEQ ID NO: 5428742 - DNA, 25 bp, Homo sapien
gtgaggcaattggagaggttcctac

SEQ ID NO: 5428743 - DNA, 25 bp, Homo sapien
gctctcaccaatatctatctttctt

SEQ ID NO: 5428744 - DNA, 25 bp, Homo sapien
ctctcaccaatatctatctttcttc

SEQ ID NO: 5428745 - DNA, 25 bp, Homo sapien
ataatttccactctgtaagtccaag

SEQ ID NO: 5428746 - DNA, 25 bp, Homo sapien
tcaataatttccactctgtaagtcc

SEQ ID NO: 5428747 - DNA, 25 bp, Homo sapien
aatttccactctgtaagtccaaggt

SEQ ID NO: 5428748 - DNA, 25 bp, Homo sapien
caataatttccactctgtaagtcca

SEQ ID NO: 5428749 - DNA, 25 bp, Homo sapien
agctgatgcaccttgtgttgagaat

SEQ ID NO: 5428750 - DNA, 25 bp, Homo sapien
gctgatgcaccttgtgttgagaatt

SEQ ID NO: 5428751 - DNA, 25 bp, Homo sapien
gatgcaccttgtgttgagaatttag

SEQ ID NO: 5428752 - DNA, 25 bp, Homo sapien
ctgatgcaccttgtgttgagaattt

SEQ ID NO: 5428753 - DNA, 25 bp, Homo sapien
ttcatgctttgggacagctggttcc

SEQ ID NO: 5428754 - DNA, 25 bp, Homo sapien
gatccctggcagaggttaatccatt

SEQ ID NO: 5428755 - DNA, 25 bp, Homo sapien
cagaggtcttctcgattttcaacag

SEQ ID NO: 5428756 - DNA, 25 bp, Homo sapien
tcagaaaactcagtcggagctgcaa

SEQ ID NO: 5428757 - DNA, 25 bp, Homo sapien
gacaatggacagttgtcaggaaatt

SEQ ID NO: 5428758 - DNA, 25 bp, Homo sapien
caatggacagttgtcaggaaattca

SEQ ID NO: 5428759 - DNA, 25 bp, Homo sapien
acaatggacagttgtcaggaaattc

SEQ ID NO: 5428760 - DNA, 25 bp, Homo sapien
aatggacagttgtcaggaaattcag

SEQ ID NO: 5428761 - DNA, 25 bp, Homo sapien
acaaggggcttaagaagcctacttg

SEQ ID NO: 5428762 - DNA, 25 bp, Homo sapien
ccagcaatggtacatgtcactactc

SEQ ID NO: 5428763 - DNA, 25 bp, Homo sapien
ctaattcactgtcccagcaatggta

SEQ ID NO: 5428764 - DNA, 25 bp, Homo sapien
tgtcactactctacccctaacaagg

SEQ ID NO: 5428765 - DNA, 25 bp, Homo sapien
aatgatagcaccactgggcttaatg

SEQ ID NO: 5428766 - DNA, 25 bp, Homo sapien
aaaatgatagcaccactgggcttaa

SEQ ID NO: 5428767 - DNA, 25 bp, Homo sapien
tgatagcaccactgggcttaatgta

SEQ ID NO: 5428768 - DNA, 25 bp, Homo sapien
gatagcaccactgggcttaatgtaa

SEQ ID NO: 5428769 - DNA, 25 bp, Homo sapien
cctgtaatctatcaagaataatcat

SEQ ID NO: 5428770 - DNA, 25 bp, Homo sapien
tttgggtcagattatcagccgtatg

SEQ ID NO: 5428771 - DNA, 25 bp, Homo sapien
gctttaccatttgatggtctctgaa

SEQ ID NO: 5428772 - DNA, 25 bp, Homo sapien
tgataatggaattaaatttctggct

SEQ ID NO: 5428773 - DNA, 25 bp, Homo sapien
tccaaaaattttgggtcagattatc

SEQ ID NO: 5428774 - DNA, 25 bp, Homo sapien
tcttcgttcattctgttgtctgaaa

SEQ ID NO: 5428775 - DNA, 25 bp, Homo sapien
tttcttcgttcattctgttgtctga

SEQ ID NO: 5428776 - DNA, 25 bp, Homo sapien
ttcttcgttcattctgttgtctgaa

SEQ ID NO: 5428777 - DNA, 25 bp, Homo sapien
cttcgttcattctgttgtctgaaat

SEQ ID NO: 5428778 - DNA, 25 bp, Homo sapien
caggtggagcctgatagaacttcac

SEQ ID NO: 5428779 - DNA, 25 bp, Homo sapien
ttctgtattgatggctggcacaccc

SEQ ID NO: 5428780 - DNA, 25 bp, Homo sapien
tggccattcctacagtaactacttg

SEQ ID NO: 5428781 - DNA, 25 bp, Homo sapien
taaggtgcaccatttgtatcttgct

SEQ ID NO: 5428782 - DNA, 25 bp, Homo sapien
ccatattaacgcttgaagggtccca

SEQ ID NO: 5428783 - DNA, 25 bp, Homo sapien
gatttcacccatattaacgcttgaa

SEQ ID NO: 5428784 - DNA, 25 bp, Homo sapien
acagatttcacccatattaacgctt

SEQ ID NO: 5428785 - DNA, 25 bp, Homo sapien
ttcacccatattaacgcttgaaggg

SEQ ID NO: 5428786 - DNA, 25 bp, Homo sapien
tgattgcactgaaaacgatggcagt

SEQ ID NO: 5428787 - DNA, 25 bp, Homo sapien
tgatgagtaccactggcagatccgc

SEQ ID NO: 5428788 - DNA, 25 bp, Homo sapien
tcatagtcatgaaaccccattgtgt

SEQ ID NO: 5428789 - DNA, 25 bp, Homo sapien
tgggaaataacacttcatggcagcc

SEQ ID NO: 5428790 - DNA, 25 bp, Homo sapien
ggcttccttgtgaaatggctgtact

SEQ ID NO: 5428791 - DNA, 25 bp, Homo sapien
cttgtgcttgctgatagaaaaggag

SEQ ID NO: 5428792 - DNA, 25 bp, Homo sapien
gaaaaggagagggccaacaatataa

SEQ ID NO: 5428793 - DNA, 25 bp, Homo sapien
gatcttaataagctcatttgttcca

SEQ ID NO: 5428794 - DNA, 25 bp, Homo sapien
aatgctttaactttcattgcaggca

SEQ ID NO: 5428795 - DNA, 25 bp, Homo sapien
aactttcattgcaggcacagttgag

SEQ ID NO: 5428796 - DNA, 25 bp, Homo sapien
ttgtgatcctctcttggatgttgct

SEQ ID NO: 5428797 - DNA, 25 bp, Homo sapien
tttcattgtgatcctctcttggatg

SEQ ID NO: 5428798 - DNA, 25 bp, Homo sapien
gactggcagtggcagaacttggata

SEQ ID NO: 5428799 - DNA, 25 bp, Homo sapien
caaaaagtgtccagtcccagataag

SEQ ID NO: 5428800 - DNA, 25 bp, Homo sapien
gcaagcagttttcacaaggtataat

SEQ ID NO: 5428801 - DNA, 25 bp, Homo sapien
ttggccccaccttgacaactggatg

SEQ ID NO: 5428802 - DNA, 25 bp, Homo sapien
taatggcagagtggctagcttagga

SEQ ID NO: 5428803 - DNA, 25 bp, Homo sapien
taaattacttgcaggtttgaacgca

SEQ ID NO: 5428804 - DNA, 25 bp, Homo sapien
tttgaacgcatcagcttgtgtctcc

SEQ ID NO: 5428805 - DNA, 25 bp, Homo sapien
gcttaggaatcactgttgctaccaa

SEQ ID NO: 5428806 - DNA, 25 bp, Homo sapien
tatatttgagtaacagctcctccag

SEQ ID NO: 5428807 - DNA, 25 bp, Homo sapien
catatatttgagtaacagctcctcc

SEQ ID NO: 5428808 - DNA, 25 bp, Homo sapien
acacatatatttgagtaacagctcc

SEQ ID NO: 5428809 - DNA, 25 bp, Homo sapien
ccaggattctggtgggccacttttc

SEQ ID NO: 5428810 - DNA, 25 bp, Homo sapien
tgggaagtccctgccatgatagagg

SEQ ID NO: 5428811 - DNA, 25 bp, Homo sapien
cagctggccacaatgagtatagaat

SEQ ID NO: 5428812 - DNA, 25 bp, Homo sapien
gagggtcaaccaaatacacgtgctt

SEQ ID NO: 5428813 - DNA, 25 bp, Homo sapien
taaatgtcaggcgttcagctggcca

SEQ ID NO: 5428814 - DNA, 25 bp, Homo sapien
catgacggctgctgtacatcttcag

SEQ ID NO: 5428815 - DNA, 25 bp, Homo sapien
tgtgtgttatacagaaggctctctc

SEQ ID NO: 5428816 - DNA, 25 bp, Homo sapien
tcctctgcaggacatctctcctggg

SEQ ID NO: 5428817 - DNA, 25 bp, Homo sapien
caaaagtctcagaacaacatgacat

SEQ ID NO: 5428818 - DNA, 25 bp, Homo sapien
ggacagtctgtttgcagaagaggaa

SEQ ID NO: 5428819 - DNA, 25 bp, Homo sapien
ctgcggagaaggacagtctgtttgc

SEQ ID NO: 5428820 - DNA, 25 bp, Homo sapien
gagaaggacagtctgtttgcagaag

SEQ ID NO: 5428821 - DNA, 25 bp, Homo sapien
cggagaaggacagtctgtttgcaga

SEQ ID NO: 5428822 - DNA, 25 bp, Homo sapien
aaggatcctctcaatgtgttggtgg

SEQ ID NO: 5428823 - DNA, 25 bp, Homo sapien
aacttctaaatcctgcagttcagca

SEQ ID NO: 5428824 - DNA, 25 bp, Homo sapien
cagtgaccagagaatgaacttctaa

SEQ ID NO: 5428825 - DNA, 25 bp, Homo sapien
cacctgaccatgatctctgttggca

SEQ ID NO: 5428826 - DNA, 25 bp, Homo sapien
tccaatcacatggcagtgggcctcc

SEQ ID NO: 5428827 - DNA, 25 bp, Homo sapien
ccaatcacatggcagtgggcctcca

SEQ ID NO: 5428828 - DNA, 25 bp, Homo sapien
caatcacatggcagtgggcctccat

SEQ ID NO: 5428829 - DNA, 25 bp, Homo sapien
ctccaatcacatggcagtgggcctc

SEQ ID NO: 5428830 - DNA, 25 bp, Homo sapien
ttcttactctttttagaatagccat

SEQ ID NO: 5428831 - DNA, 25 bp, Homo sapien
cttcctcgacccattccattcttac

SEQ ID NO: 5428832 - DNA, 25 bp, Homo sapien
agatccacatttggttctgtcccta

SEQ ID NO: 5428833 - DNA, 25 bp, Homo sapien
gacacaccattgtacagatccacat

SEQ ID NO: 5428834 - DNA, 25 bp, Homo sapien
attgtacagatccacatttggttct

SEQ ID NO: 5428835 - DNA, 25 bp, Homo sapien
cagacacaccattgtacagatccac

SEQ ID NO: 5428836 - DNA, 25 bp, Homo sapien
gtctctttcagttctgcttgatctt

SEQ ID NO: 5428837 - DNA, 25 bp, Homo sapien
aagggatttttgtgtctctgtctct

SEQ ID NO: 5428838 - DNA, 25 bp, Homo sapien
tctgtctctttcagttctgcttgat

SEQ ID NO: 5428839 - DNA, 25 bp, Homo sapien
caaaaaaaccagcttctagattcat

SEQ ID NO: 5428840 - DNA, 25 bp, Homo sapien
gtaaagtccgcatttgtgttctctg

SEQ ID NO: 5428841 - DNA, 25 bp, Homo sapien
catctccccggtggcaaatgactgt

SEQ ID NO: 5428842 - DNA, 25 bp, Homo sapien
gaaagacatggctcctgtcggcttg

SEQ ID NO: 5428843 - DNA, 25 bp, Homo sapien
cctgctggctttacgcttatgtaaa

SEQ ID NO: 5428844 - DNA, 25 bp, Homo sapien
gttcatagcattccaaacatgttca

SEQ ID NO: 5428845 - DNA, 25 bp, Homo sapien
tagcattccaaacatgttcatcata

SEQ ID NO: 5428846 - DNA, 25 bp, Homo sapien
catagcattccaaacatgttcatca

SEQ ID NO: 5428847 - DNA, 25 bp, Homo sapien
ccatgcactgatgaaagcaagacaa

SEQ ID NO: 5428848 - DNA, 25 bp, Homo sapien
ccagaataaattgatgatgaggtcc

SEQ ID NO: 5428849 - DNA, 25 bp, Homo sapien
aaacttttctatgaggtgttagcca

SEQ ID NO: 5428850 - DNA, 25 bp, Homo sapien
agccagtagcttgtagaaaatgttt

SEQ ID NO: 5428851 - DNA, 25 bp, Homo sapien
tgagttttcccacaacgagtaactg

SEQ ID NO: 5428852 - DNA, 25 bp, Homo sapien
tggcacgatgctatccaggaatagg

SEQ ID NO: 5428853 - DNA, 25 bp, Homo sapien
gcaaactggttccttatggcacgat

SEQ ID NO: 5428854 - DNA, 25 bp, Homo sapien
tatgtcatggactgagaatctgggt

SEQ ID NO: 5428855 - DNA, 25 bp, Homo sapien
caagagggagctataagcagtaagc

SEQ ID NO: 5428856 - DNA, 25 bp, Homo sapien
tacagtttaccatatctagtgacac

SEQ ID NO: 5428857 - DNA, 25 bp, Homo sapien
caatgccaagataatgaatcaggtc

SEQ ID NO: 5428858 - DNA, 25 bp, Homo sapien
gctataggtagttcccctggattca

SEQ ID NO: 5428859 - DNA, 25 bp, Homo sapien
cctgagatggaagcattcactagtt

SEQ ID NO: 5428860 - DNA, 25 bp, Homo sapien
taggtgtgtgaccttcacaatgtgc

SEQ ID NO: 5428861 - DNA, 25 bp, Homo sapien
gagcagaatgcagttcagcagaaaa

SEQ ID NO: 5428862 - DNA, 25 bp, Homo sapien
ttactgttccacaggcataaaatgg

SEQ ID NO: 5428863 - DNA, 25 bp, Homo sapien
gccacatcagctgagtgagaattcc

SEQ ID NO: 5428864 - DNA, 25 bp, Homo sapien
tgttcaatgtgggagccaatcgaat

SEQ ID NO: 5428865 - DNA, 25 bp, Homo sapien
acagtgttcaatgtgggagccaatc

SEQ ID NO: 5428866 - DNA, 25 bp, Homo sapien
tccaacacagtgttcaatgtgggag

SEQ ID NO: 5428867 - DNA, 25 bp, Homo sapien
tgtgggagccaatcgaatttcatct

SEQ ID NO: 5428868 - DNA, 25 bp, Homo sapien
caagctgtagtgagaaaagaggcca

SEQ ID NO: 5428869 - DNA, 25 bp, Homo sapien
caagtttctaatctggccaacgtaa

SEQ ID NO: 5428870 - DNA, 25 bp, Homo sapien
cctagatctttgagacacggtaggg

SEQ ID NO: 5428871 - DNA, 25 bp, Homo sapien
tggttgggaccaataaaatctggct

SEQ ID NO: 5428872 - DNA, 25 bp, Homo sapien
tcatatggctagatagaagatagca

SEQ ID NO: 5428873 - DNA, 25 bp, Homo sapien
catatggctagatagaagatagcac

SEQ ID NO: 5428874 - DNA, 25 bp, Homo sapien
gccctgcacatgattcttgttccga

SEQ ID NO: 5428875 - DNA, 25 bp, Homo sapien
tgggccctgcacatgattcttgttc

SEQ ID NO: 5428876 - DNA, 25 bp, Homo sapien
ggccctgcacatgattcttgttccg

SEQ ID NO: 5428877 - DNA, 25 bp, Homo sapien
gttgggccctgcacatgattcttgt

SEQ ID NO: 5428878 - DNA, 25 bp, Homo sapien
gaagctctggaagggcatatctgcg

SEQ ID NO: 5428879 - DNA, 25 bp, Homo sapien
catatctgcgagagctggtatgttg

SEQ ID NO: 5428880 - DNA, 25 bp, Homo sapien
tgtttcctatcagggtggaagctct

SEQ ID NO: 5428881 - DNA, 25 bp, Homo sapien
tatgttgggtgttgtgattgtgaca

SEQ ID NO: 5428882 - DNA, 25 bp, Homo sapien
gattctcaaagctttgtggcacttt

SEQ ID NO: 5428883 - DNA, 25 bp, Homo sapien
cagggactctatttacaaacccgcg

SEQ ID NO: 5428884 - DNA, 25 bp, Homo sapien
tttttcctcacatcattgaaatgtc

SEQ ID NO: 5428885 - DNA, 25 bp, Homo sapien
taaaagcctgtcaaagactgaccag

SEQ ID NO: 5428886 - DNA, 25 bp, Homo sapien
actgcagaagcaactcatcagcata

SEQ ID NO: 5428887 - DNA, 25 bp, Homo sapien
atgaactgcagaagcaactcatcag

SEQ ID NO: 5428888 - DNA, 25 bp, Homo sapien
gaactgcagaagcaactcatcagca

SEQ ID NO: 5428889 - DNA, 25 bp, Homo sapien
actcatcagcatatcttaattctag

SEQ ID NO: 5428890 - DNA, 25 bp, Homo sapien
gttccatagtgcctgatttcatcca

SEQ ID NO: 5428891 - DNA, 25 bp, Homo sapien
cttaattctcactaagaaaaacagg

SEQ ID NO: 5428892 - DNA, 25 bp, Homo sapien
ttccatagtgcctgatttcatccat

SEQ ID NO: 5428893 - DNA, 25 bp, Homo sapien
tcattaacattcatcatgatacctg

SEQ ID NO: 5428894 - DNA, 25 bp, Homo sapien
gaggagggacaatgtactcttctct

SEQ ID NO: 5428895 - DNA, 25 bp, Homo sapien
ggagggacaatgtactcttctctgc

SEQ ID NO: 5428896 - DNA, 25 bp, Homo sapien
tacctgtggatgatcccttggaggg

SEQ ID NO: 5428897 - DNA, 25 bp, Homo sapien
aataagtcaattttggtttctctat

SEQ ID NO: 5428898 - DNA, 25 bp, Homo sapien
taagtcaattttggtttctctatct

SEQ ID NO: 5428899 - DNA, 25 bp, Homo sapien
cactgactccgcttctttgaaaaat

SEQ ID NO: 5428900 - DNA, 25 bp, Homo sapien
ccactgactccgcttctttgaaaaa

SEQ ID NO: 5428901 - DNA, 25 bp, Homo sapien
taaatgccaagattggcagccgttc

SEQ ID NO: 5428902 - DNA, 25 bp, Homo sapien
ggatgtctggccaccttttgaagat

SEQ ID NO: 5428903 - DNA, 25 bp, Homo sapien
ggcagccgttctagtaggacacgac

SEQ ID NO: 5428904 - DNA, 25 bp, Homo sapien
gatgtctggccaccttttgaagatc

SEQ ID NO: 5428905 - DNA, 25 bp, Homo sapien
cctaggcagtagatgcggaatggca

SEQ ID NO: 5428906 - DNA, 25 bp, Homo sapien
gacttgagacttgatagggagtcct

SEQ ID NO: 5428907 - DNA, 25 bp, Homo sapien
cacaactccattactccattcaaat

SEQ ID NO: 5428908 - DNA, 25 bp, Homo sapien
taactgggcggatatatctgagagc

SEQ ID NO: 5428909 - DNA, 25 bp, Homo sapien
cctcggagccattgtcattgctgag

SEQ ID NO: 5428910 - DNA, 25 bp, Homo sapien
tcctcggagccattgtcattgctga

SEQ ID NO: 5428911 - DNA, 25 bp, Homo sapien
atctcctcggagccattgtcattgc

SEQ ID NO: 5428912 - DNA, 25 bp, Homo sapien
aaagctgtctgcacagaaatgctaa

SEQ ID NO: 5428913 - DNA, 25 bp, Homo sapien
tgtgaagacgtgactctgaccagtc

SEQ ID NO: 5428914 - DNA, 25 bp, Homo sapien
accttgtgtgaagacgtgactctga

SEQ ID NO: 5428915 - DNA, 25 bp, Homo sapien
aaatctgaaaggtatccagctgaaa

SEQ ID NO: 5428916 - DNA, 25 bp, Homo sapien
tgtgtgaagacgtgactctgaccag

SEQ ID NO: 5428917 - DNA, 25 bp, Homo sapien
tctacactgagtccattttccaaga

SEQ ID NO: 5428918 - DNA, 25 bp, Homo sapien
gaagtgtctacactgagtccatttt

SEQ ID NO: 5428919 - DNA, 25 bp, Homo sapien
caaaccatgaagtgtctacactgag

SEQ ID NO: 5428920 - DNA, 25 bp, Homo sapien
ctgaagagcagaacacaaaccatga

SEQ ID NO: 5428921 - DNA, 25 bp, Homo sapien
caccagttctggacacaatttcaag

SEQ ID NO: 5428922 - DNA, 25 bp, Homo sapien
aacccaccagttctggacacaattt

SEQ ID NO: 5428923 - DNA, 25 bp, Homo sapien
cccaccagttctggacacaatttca

SEQ ID NO: 5428924 - DNA, 25 bp, Homo sapien
accagttctggacacaatttcaagt

SEQ ID NO: 5428925 - DNA, 25 bp, Homo sapien
cagtacaatagtagtaatactcatt

SEQ ID NO: 5428926 - DNA, 25 bp, Homo sapien
agttgctgaattttgcaacttaacg

SEQ ID NO: 5428927 - DNA, 25 bp, Homo sapien
gaattttgcaacttaacgaatgaca

SEQ ID NO: 5428928 - DNA, 25 bp, Homo sapien
gcaacttaacgaatgacaagaacat

SEQ ID NO: 5428929 - DNA, 25 bp, Homo sapien
tgcattatgggacttttgtaaggtg

SEQ ID NO: 5428930 - DNA, 25 bp, Homo sapien
gtaaggtgttttcgccccagcatcc

SEQ ID NO: 5428931 - DNA, 25 bp, Homo sapien
tctttctaagtttggttctggatct

SEQ ID NO: 5428932 - DNA, 25 bp, Homo sapien
ggtctgtagatgaccaatttttcac

SEQ ID NO: 5428933 - DNA, 25 bp, Homo sapien
taagcactgattattgcccctatgc

SEQ ID NO: 5428934 - DNA, 25 bp, Homo sapien
ctgtttaagcactgattattgcccc

SEQ ID NO: 5428935 - DNA, 25 bp, Homo sapien
tattgcccctatgcattaatgctac

SEQ ID NO: 5428936 - DNA, 25 bp, Homo sapien
tatgcattaatgctaccctcaccca

SEQ ID NO: 5428937 - DNA, 25 bp, Homo sapien
tatgttgtaattggatgagtctcag

SEQ ID NO: 5428938 - DNA, 25 bp, Homo sapien
tgaagctcatttgacaggacctttc

SEQ ID NO: 5428939 - DNA, 25 bp, Homo sapien
tcagcctctgagaaacgttcaccca

SEQ ID NO: 5428940 - DNA, 25 bp, Homo sapien
gagtctcaggatccagctcttacaa

SEQ ID NO: 5428941 - DNA, 25 bp, Homo sapien
tggaaccgagtcgtccagacctgga

SEQ ID NO: 5428942 - DNA, 25 bp, Homo sapien
gaagattggagttgaaggacagctc

SEQ ID NO: 5428943 - DNA, 25 bp, Homo sapien
tccatgtgtccagacctggaaccga

SEQ ID NO: 5428944 - DNA, 25 bp, Homo sapien
aactctgggtaagactgctgatgga

SEQ ID NO: 5428945 - DNA, 25 bp, Homo sapien
tagctttcccacgaacctgagagct

SEQ ID NO: 5428946 - DNA, 25 bp, Homo sapien
ttgtatgttagctttcccacgaacc

SEQ ID NO: 5428947 - DNA, 25 bp, Homo sapien
tgttagctttcccacgaacctgaga

SEQ ID NO: 5428948 - DNA, 25 bp, Homo sapien
tatgttagctttcccacgaacctga

SEQ ID NO: 5428949 - DNA, 25 bp, Homo sapien
ttgcaacagatgctaaccaatgctg

SEQ ID NO: 5428950 - DNA, 25 bp, Homo sapien
ctttgcaacagatgctaaccaatgc

SEQ ID NO: 5428951 - DNA, 25 bp, Homo sapien
tgcaacagatgctaaccaatgctgg

SEQ ID NO: 5428952 - DNA, 25 bp, Homo sapien
tttgcaacagatgctaaccaatgct

SEQ ID NO: 5428953 - DNA, 25 bp, Homo sapien
acatcattgtgtaaaggagaatatg

SEQ ID NO: 5428954 - DNA, 25 bp, Homo sapien
catcattgtgtaaaggagaatatgg

SEQ ID NO: 5428955 - DNA, 25 bp, Homo sapien
ggagaatatggaagtaggaaaggca

SEQ ID NO: 5428956 - DNA, 25 bp, Homo sapien
atcattgtgtaaaggagaatatgga

SEQ ID NO: 5428957 - DNA, 25 bp, Homo sapien
gtggcatcgagggaatcttcactct

SEQ ID NO: 5428958 - DNA, 25 bp, Homo sapien
tcttcactcttcttactccagtcat

SEQ ID NO: 5428959 - DNA, 25 bp, Homo sapien
ggcatcgagggaatcttcactcttc

SEQ ID NO: 5428960 - DNA, 25 bp, Homo sapien
ggtgtggcatcgagggaatcttcac

SEQ ID NO: 5428961 - DNA, 25 bp, Homo sapien
ccatggagctttggcttgcatgagc

SEQ ID NO: 5428962 - DNA, 25 bp, Homo sapien
aggttttgccatcggcttctccatg

SEQ ID NO: 5428963 - DNA, 25 bp, Homo sapien
ttctccatggagctttggcttgcat

SEQ ID NO: 5428964 - DNA, 25 bp, Homo sapien
ctgtcactcttctgaggttttgcca

SEQ ID NO: 5428965 - DNA, 25 bp, Homo sapien
gaaacacacatttatgccctcggcc

SEQ ID NO: 5428966 - DNA, 25 bp, Homo sapien
ctagaggtccgaataagcaatttgt

SEQ ID NO: 5428967 - DNA, 25 bp, Homo sapien
tgcaggattccacttccgatatcag

SEQ ID NO: 5428968 - DNA, 25 bp, Homo sapien
tattggcagttgctagaggtccgaa

SEQ ID NO: 5428969 - DNA, 25 bp, Homo sapien
cctaaacacaagaaagtgtaacatc

SEQ ID NO: 5428970 - DNA, 25 bp, Homo sapien
tgcaatgagccaactgactcacact

SEQ ID NO: 5428971 - DNA, 25 bp, Homo sapien
aagtgtaacatctagtaaaatgtgc

SEQ ID NO: 5428972 - DNA, 25 bp, Homo sapien
gtattcattatgcacaatgtatgca

SEQ ID NO: 5428973 - DNA, 25 bp, Homo sapien
gcacaggaccccttttgctccatat

SEQ ID NO: 5428974 - DNA, 25 bp, Homo sapien
acaggaccccttttgctccatattc

SEQ ID NO: 5428975 - DNA, 25 bp, Homo sapien
agcacaggaccccttttgctccata

SEQ ID NO: 5428976 - DNA, 25 bp, Homo sapien
ggaccccttttgctccatattccat

SEQ ID NO: 5428977 - DNA, 25 bp, Homo sapien
gcatgcataacaccatgaaaattct

SEQ ID NO: 5428978 - DNA, 25 bp, Homo sapien
gataacagagttgtggactgccagg

SEQ ID NO: 5428979 - DNA, 25 bp, Homo sapien
tttttcagcatgcataacaccatga

SEQ ID NO: 5428980 - DNA, 25 bp, Homo sapien
cagtcattgacgtatcctttgctaa

SEQ ID NO: 5428981 - DNA, 25 bp, Homo sapien
gaagcagggtgctgaaggatcctac

SEQ ID NO: 5428982 - DNA, 25 bp, Homo sapien
aaggatcctaccaatactacactca

SEQ ID NO: 5428983 - DNA, 25 bp, Homo sapien
aaaactctaccatcatgagctctgt

SEQ ID NO: 5428984 - DNA, 25 bp, Homo sapien
aactctaccatcatgagctctgtct

SEQ ID NO: 5428985 - DNA, 25 bp, Homo sapien
ctttccctgatttgcattcagcatt

SEQ ID NO: 5428986 - DNA, 25 bp, Homo sapien
ttgcattcagcattgacatattcat

SEQ ID NO: 5428987 - DNA, 25 bp, Homo sapien
gatttgcattcagcattgacatatt

SEQ ID NO: 5428988 - DNA, 25 bp, Homo sapien
tgatttgcattcagcattgacatat

SEQ ID NO: 5428989 - DNA, 25 bp, Homo sapien
gtttcttaagcaggtctgaaaagcg

SEQ ID NO: 5428990 - DNA, 25 bp, Homo sapien
cgccgtttcttaagcaggtctgaaa

SEQ ID NO: 5428991 - DNA, 25 bp, Homo sapien
gtgacccgattatccaggtgcgtcc

SEQ ID NO: 5428992 - DNA, 25 bp, Homo sapien
tcttaagcaggtctgaaaagcgcaa

SEQ ID NO: 5428993 - DNA, 25 bp, Homo sapien
tggttattccagattcagaggttag

SEQ ID NO: 5428994 - DNA, 25 bp, Homo sapien
ttagagcgcatagtaattagtgccc

SEQ ID NO: 5428995 - DNA, 25 bp, Homo sapien
gcccaggtcttttggaccaagtcac

SEQ ID NO: 5428996 - DNA, 25 bp, Homo sapien
tgaaaagttagaccaagtgcccagg

SEQ ID NO: 5428997 - DNA, 25 bp, Homo sapien
ccaaatttctttatttgaaggaatg

SEQ ID NO: 5428998 - DNA, 25 bp, Homo sapien
caaatttctttatttgaaggaatgg

SEQ ID NO: 5428999 - DNA, 25 bp, Homo sapien
catggctatggggaaattagcctga

SEQ ID NO: 5429000 - DNA, 25 bp, Homo sapien
gaccagggaagtcaccccatggcta

SEQ ID NO: 5429001 - DNA, 25 bp, Homo sapien
ccagggaagtcaccccatggctatg

SEQ ID NO: 5429002 - DNA, 25 bp, Homo sapien
ttggtgaccagggaagtcaccccat

SEQ ID NO: 5429003 - DNA, 25 bp, Homo sapien
gagatattctcccacgccagattcg

SEQ ID NO: 5429004 - DNA, 25 bp, Homo sapien
attctcccacgccagattcgggcgc

SEQ ID NO: 5429005 - DNA, 25 bp, Homo sapien
tcaaagagatattctcccacgccag

SEQ ID NO: 5429006 - DNA, 25 bp, Homo sapien
aaagagatattctcccacgccagat

SEQ ID NO: 5429007 - DNA, 25 bp, Homo sapien
ctcaagtcacacaaatgggggtcat

SEQ ID NO: 5429008 - DNA, 25 bp, Homo sapien
tcaagtcacacaaatgggggtcatt

SEQ ID NO: 5429009 - DNA, 25 bp, Homo sapien
gggtcatttttgtcagtggccagtt

SEQ ID NO: 5429010 - DNA, 25 bp, Homo sapien
gtttgtgcagttccagtagtgactg

SEQ ID NO: 5429011 - DNA, 25 bp, Homo sapien
cccgctctcccagtcatcacagtct

SEQ ID NO: 5429012 - DNA, 25 bp, Homo sapien
ctccatcgcattcagcccgctctcc

SEQ ID NO: 5429013 - DNA, 25 bp, Homo sapien
tccaaatgtaatgcacactccatcg

SEQ ID NO: 5429014 - DNA, 25 bp, Homo sapien
gtaatgcacactccatcgcattcag

SEQ ID NO: 5429015 - DNA, 25 bp, Homo sapien
gcatgtcccctctcctcatgagatt

SEQ ID NO: 5429016 - DNA, 25 bp, Homo sapien
ttcatcagtttctcagcatgtcccc

SEQ ID NO: 5429017 - DNA, 25 bp, Homo sapien
gtcccctctcctcatgagattggtg

SEQ ID NO: 5429018 - DNA, 25 bp, Homo sapien
tcattggttctgcagcttcatcagt

SEQ ID NO: 5429019 - DNA, 25 bp, Homo sapien
atcgcggtcaaagtagtaagacagg

SEQ ID NO: 5429020 - DNA, 25 bp, Homo sapien
caaagtagtaagacagggacaggta

SEQ ID NO: 5429021 - DNA, 25 bp, Homo sapien
gcggtcaaagtagtaagacagggac

SEQ ID NO: 5429022 - DNA, 25 bp, Homo sapien
tcaaagtagtaagacagggacaggt

SEQ ID NO: 5429023 - DNA, 25 bp, Homo sapien
ttaggaggcgtagtgctccaggttg

SEQ ID NO: 5429024 - DNA, 25 bp, Homo sapien
cggttgatggcggcctctgagtact

SEQ ID NO: 5429025 - DNA, 25 bp, Homo sapien
gagtactggtggtagttctggcgca

SEQ ID NO: 5429026 - DNA, 25 bp, Homo sapien
cctctgagtactggtggtagttctg

SEQ ID NO: 5429027 - DNA, 25 bp, Homo sapien
agccttggggcagtcccagggcgcc

SEQ ID NO: 5429028 - DNA, 25 bp, Homo sapien
gcggcgggagccttggggcagtccc

SEQ ID NO: 5429029 - DNA, 25 bp, Homo sapien
ggcgggagccttggggcagtcccag

SEQ ID NO: 5429030 - DNA, 25 bp, Homo sapien
ggagccttggggcagtcccagggcg

SEQ ID NO: 5429031 - DNA, 25 bp, Homo sapien
gaggtccctctttgaagtactttga

SEQ ID NO: 5429032 - DNA, 25 bp, Homo sapien
caagcttgttagaagattccgatct

SEQ ID NO: 5429033 - DNA, 25 bp, Homo sapien
tactcagtatggtaattccagacaa

SEQ ID NO: 5429034 - DNA, 25 bp, Homo sapien
ttattatggtgagatcctttgtgta

SEQ ID NO: 5429035 - DNA, 25 bp, Homo sapien
gattccgatctatttatttcatcat

SEQ ID NO: 5429036 - DNA, 25 bp, Homo sapien
tttggccttcacaataatagctgct

SEQ ID NO: 5429037 - DNA, 25 bp, Homo sapien
ttggccttcacaataatagctgctt

SEQ ID NO: 5429038 - DNA, 25 bp, Homo sapien
acatcaacaatgggagcagctccag

SEQ ID NO: 5429039 - DNA, 25 bp, Homo sapien
gtcaagattgacagcagggcagaag

SEQ ID NO: 5429040 - DNA, 25 bp, Homo sapien
ttgtcaagattgacagcagggcaga

SEQ ID NO: 5429041 - DNA, 25 bp, Homo sapien
ttttagcaacttttacccatgtctg

SEQ ID NO: 5429042 - DNA, 25 bp, Homo sapien
caaagtaacctgggtgatatttgtc

SEQ ID NO: 5429043 - DNA, 25 bp, Homo sapien
cccaaagtaacctgggtgatatttg

SEQ ID NO: 5429044 - DNA, 25 bp, Homo sapien
aagtaacctgggtgatatttgtcaa

SEQ ID NO: 5429045 - DNA, 25 bp, Homo sapien
gtaacctgggtgatatttgtcaaag

SEQ ID NO: 5429046 - DNA, 25 bp, Homo sapien
agctgtggccgtggctcacatagcc

SEQ ID NO: 5429047 - DNA, 25 bp, Homo sapien
ctgtggccgtggctcacatagccca

SEQ ID NO: 5429048 - DNA, 25 bp, Homo sapien
gctgtggccgtggctcacatagccc

SEQ ID NO: 5429049 - DNA, 25 bp, Homo sapien
tgtggccgtggctcacatagcccaa

SEQ ID NO: 5429050 - DNA, 25 bp, Homo sapien
tgtgccgtggggtaaaaaccgcaga

SEQ ID NO: 5429051 - DNA, 25 bp, Homo sapien
gaggaatccacaaattcctttgagg

SEQ ID NO: 5429052 - DNA, 25 bp, Homo sapien
ccggaacaagttctcagtagctgga

SEQ ID NO: 5429053 - DNA, 25 bp, Homo sapien
aaattcctttgaggctccatcaccg

SEQ ID NO: 5429054 - DNA, 25 bp, Homo sapien
ccttagagggtaaaagtcatatgga

SEQ ID NO: 5429055 - DNA, 25 bp, Homo sapien
tgttagcagccattggaatacagct

SEQ ID NO: 5429056 - DNA, 25 bp, Homo sapien
gcttttctatcaaaaggcacctaag

SEQ ID NO: 5429057 - DNA, 25 bp, Homo sapien
tggtgtcctagtatccttttcagaa

SEQ ID NO: 5429058 - DNA, 25 bp, Homo sapien
tactggcctagattccacattgtag

SEQ ID NO: 5429059 - DNA, 25 bp, Homo sapien
tgttaatatacaagaagcatcctcc

SEQ ID NO: 5429060 - DNA, 25 bp, Homo sapien
cacttggcacttgcaaattactggc

SEQ ID NO: 5429061 - DNA, 25 bp, Homo sapien
taaatgctatgttctggccaccaaa

SEQ ID NO: 5429062 - DNA, 25 bp, Homo sapien
tgtctttcagctccgaactaaaacg

SEQ ID NO: 5429063 - DNA, 25 bp, Homo sapien
tcagctccgaactaaaacgggtatc

SEQ ID NO: 5429064 - DNA, 25 bp, Homo sapien
cttgtctttcagctccgaactaaaa

SEQ ID NO: 5429065 - DNA, 25 bp, Homo sapien
tccgaactaaaacgggtatctgcta

SEQ ID NO: 5429066 - DNA, 25 bp, Homo sapien
tttcagtgcagttaatctattcttg

SEQ ID NO: 5429067 - DNA, 25 bp, Homo sapien
tcttgatgagcttttgtgcccgagg

SEQ ID NO: 5429068 - DNA, 25 bp, Homo sapien
tctattcttgatgagcttttgtgcc

SEQ ID NO: 5429069 - DNA, 25 bp, Homo sapien
gatgagcttttgtgcccgaggactc

SEQ ID NO: 5429070 - DNA, 25 bp, Homo sapien
gaaaccagactactttgcacaatta

SEQ ID NO: 5429071 - DNA, 25 bp, Homo sapien
tcttggcatttgtccagaaaccaga

SEQ ID NO: 5429072 - DNA, 25 bp, Homo sapien
tctgggacgaaagttggaagtattc

SEQ ID NO: 5429073 - DNA, 25 bp, Homo sapien
cacatggagatacgttctgggacga

SEQ ID NO: 5429074 - DNA, 25 bp, Homo sapien
gatttgttccgccattacttcaggt

SEQ ID NO: 5429075 - DNA, 25 bp, Homo sapien
gatttcattacctcgactggactgc

SEQ ID NO: 5429076 - DNA, 25 bp, Homo sapien
gactccggccctttcgtgtatgaga

SEQ ID NO: 5429077 - DNA, 25 bp, Homo sapien
aaagatggacctcaacaagtgtggg

SEQ ID NO: 5429078 - DNA, 25 bp, Homo sapien
ccaagtcataattgagcttcttttc

SEQ ID NO: 5429079 - DNA, 25 bp, Homo sapien
aaccaagtcataattgagcttcttt

SEQ ID NO: 5429080 - DNA, 25 bp, Homo sapien
actgtctaggacaaccaagtcataa

SEQ ID NO: 5429081 - DNA, 25 bp, Homo sapien
tttactgtctaggacaaccaagtca

SEQ ID NO: 5429082 - DNA, 25 bp, Homo sapien
tgtttaaaacgcctacttgcaagtc

SEQ ID NO: 5429083 - DNA, 25 bp, Homo sapien
gagagcacctgatgtatcatctcaa

SEQ ID NO: 5429084 - DNA, 25 bp, Homo sapien
gatgtactaaggatactggtcctga

SEQ ID NO: 5429085 - DNA, 25 bp, Homo sapien
tccttttaccctttgtagctcagag

SEQ ID NO: 5429086 - DNA, 25 bp, Homo sapien
cctgcttcaacttcagtggttgtct

SEQ ID NO: 5429087 - DNA, 25 bp, Homo sapien
gcatctatttcagtagcagcttcgg

SEQ ID NO: 5429088 - DNA, 25 bp, Homo sapien
gtcattacatcagtgtactccctgg

SEQ ID NO: 5429089 - DNA, 25 bp, Homo sapien
gtaaactgtttatcaggacagtccc

SEQ ID NO: 5429090 - DNA, 25 bp, Homo sapien
ttccagaaccagaggctaagcacac

SEQ ID NO: 5429091 - DNA, 25 bp, Homo sapien
agttccatccagtggttgaagttca

SEQ ID NO: 5429092 - DNA, 25 bp, Homo sapien
ccatccagtggttgaagttcaatag

SEQ ID NO: 5429093 - DNA, 25 bp, Homo sapien
tggttgaagttcaatagaaaacaag

SEQ ID NO: 5429094 - DNA, 25 bp, Homo sapien
aagaagttccatccagtggttgaag

SEQ ID NO: 5429095 - DNA, 25 bp, Homo sapien
ctcctggggccacttagcatttatt

SEQ ID NO: 5429096 - DNA, 25 bp, Homo sapien
cctggggccacttagcatttatttc

SEQ ID NO: 5429097 - DNA, 25 bp, Homo sapien
agatgttaaattgacttcctcctgg

SEQ ID NO: 5429098 - DNA, 25 bp, Homo sapien
gatgttaaattgacttcctcctggg

SEQ ID NO: 5429099 - DNA, 25 bp, Homo sapien
gactgtgctgcactgaataatcaaa

SEQ ID NO: 5429100 - DNA, 25 bp, Homo sapien
gaagactgtgctgcactgaataatc

SEQ ID NO: 5429101 - DNA, 25 bp, Homo sapien
agactgtgctgcactgaataatcaa

SEQ ID NO: 5429102 - DNA, 25 bp, Homo sapien
aagactgtgctgcactgaataatca

SEQ ID NO: 5429103 - DNA, 25 bp, Homo sapien
gaagaatgtcgggaagaatatacac

SEQ ID NO: 5429104 - DNA, 25 bp, Homo sapien
gcagagaagaatgtcgggaagaata

SEQ ID NO: 5429105 - DNA, 25 bp, Homo sapien
tagatttatatcttcgtgtgcagag

SEQ ID NO: 5429106 - DNA, 25 bp, Homo sapien
ttcttagatttatatcttcgtgtgc

SEQ ID NO: 5429107 - DNA, 25 bp, Homo sapien
agcacagagagcctgagctattccg

SEQ ID NO: 5429108 - DNA, 25 bp, Homo sapien
gctattccgactgtcttcttgagaa

SEQ ID NO: 5429109 - DNA, 25 bp, Homo sapien
tagtcctcaacccaggcctgtagaa

SEQ ID NO: 5429110 - DNA, 25 bp, Homo sapien
tcttgagaatagtcctcaacccagg

SEQ ID NO: 5429111 - DNA, 25 bp, Homo sapien
tcttttcagcttcttgtctatccct

SEQ ID NO: 5429112 - DNA, 25 bp, Homo sapien
ttttcagcttcttgtctatccctcc

SEQ ID NO: 5429113 - DNA, 25 bp, Homo sapien
tttcagcttcttgtctatccctcca

SEQ ID NO: 5429114 - DNA, 25 bp, Homo sapien
ttcagcttcttgtctatccctccag

SEQ ID NO: 5429115 - DNA, 25 bp, Homo sapien
tttaacattaaacttgaagacttca

SEQ ID NO: 5429116 - DNA, 25 bp, Homo sapien
cctaatgaaattctatgatttggta

SEQ ID NO: 5429117 - DNA, 25 bp, Homo sapien
catttaaggcatttggtgtttaact

SEQ ID NO: 5429118 - DNA, 25 bp, Homo sapien
catttaacttgtagtcttcctaatg

SEQ ID NO: 5429119 - DNA, 25 bp, Homo sapien
ttgctgtttacctctctgcataatg

SEQ ID NO: 5429120 - DNA, 25 bp, Homo sapien
atttcatattcatgtatggcttatt

SEQ ID NO: 5429121 - DNA, 25 bp, Homo sapien
tgtttacctctctgcataatgaaaa

SEQ ID NO: 5429122 - DNA, 25 bp, Homo sapien
gctgtttacctctctgcataatgaa

SEQ ID NO: 5429123 - DNA, 25 bp, Homo sapien
aaggctcttctgtagttagggatgc

SEQ ID NO: 5429124 - DNA, 25 bp, Homo sapien
tctaagcaagcaattggtaatccca

SEQ ID NO: 5429125 - DNA, 25 bp, Homo sapien
tactgagctggacttgaataacacc

SEQ ID NO: 5429126 - DNA, 25 bp, Homo sapien
tggaataactgattttccgtagtgg

SEQ ID NO: 5429127 - DNA, 25 bp, Homo sapien
atgtgcttctttggtgtcatcttta

SEQ ID NO: 5429128 - DNA, 25 bp, Homo sapien
gagacacttggcactgagttacctt

SEQ ID NO: 5429129 - DNA, 25 bp, Homo sapien
taggttgatgtcactgggagtccaa

SEQ ID NO: 5429130 - DNA, 25 bp, Homo sapien
tcagtggacaatgggcctcagctgc

SEQ ID NO: 5429131 - DNA, 25 bp, Homo sapien
gaagcttgcccagtctcaaggccag

SEQ ID NO: 5429132 - DNA, 25 bp, Homo sapien
gataagccacagcagacaaatctag

SEQ ID NO: 5429133 - DNA, 25 bp, Homo sapien
agattgggcagataagacagcaaat

SEQ ID NO: 5429134 - DNA, 25 bp, Homo sapien
caaatctagcattgtgagattgggc

SEQ ID NO: 5429135 - DNA, 25 bp, Homo sapien
ctaggtattgctgtctcactaagtc

SEQ ID NO: 5429136 - DNA, 25 bp, Homo sapien
tctggtatagaatgggacatgagga

SEQ ID NO: 5429137 - DNA, 25 bp, Homo sapien
actggagtagaatcccagaagcccc

SEQ ID NO: 5429138 - DNA, 25 bp, Homo sapien
cagaagcccctttacttgttgaagc

SEQ ID NO: 5429139 - DNA, 25 bp, Homo sapien
caatcaggatggcagcactggagta

SEQ ID NO: 5429140 - DNA, 25 bp, Homo sapien
gtcaaactctgacccatggttgctg

SEQ ID NO: 5429141 - DNA, 25 bp, Homo sapien
gtcttggcctcccttaattactctc

SEQ ID NO: 5429142 - DNA, 25 bp, Homo sapien
ttgccacccacactgtgacttagtg

SEQ ID NO: 5429143 - DNA, 25 bp, Homo sapien
ttccgtgttggtgctcagtgcttcc

SEQ ID NO: 5429144 - DNA, 25 bp, Homo sapien
ggcagtcaacttgtcttgtctttga

SEQ ID NO: 5429145 - DNA, 25 bp, Homo sapien
agtacaagttccaggcagtcaactt

SEQ ID NO: 5429146 - DNA, 25 bp, Homo sapien
gtcttgtctttgactactacttaga

SEQ ID NO: 5429147 - DNA, 25 bp, Homo sapien
gactactacttagaacctctttgca

SEQ ID NO: 5429148 - DNA, 25 bp, Homo sapien
tgtggagccagtgagcatagtgact

SEQ ID NO: 5429149 - DNA, 25 bp, Homo sapien
gctgcaaggaatgggatgtggagcc

SEQ ID NO: 5429150 - DNA, 25 bp, Homo sapien
tagaagactgacgtggctgcaagga

SEQ ID NO: 5429151 - DNA, 25 bp, Homo sapien
gactcttcgaagtattggcagaaaa

SEQ ID NO: 5429152 - DNA, 25 bp, Homo sapien
attagtgacaagttgagcggtatgg

SEQ ID NO: 5429153 - DNA, 25 bp, Homo sapien
acaagttgagcggtatggtagccat

SEQ ID NO: 5429154 - DNA, 25 bp, Homo sapien
ttgagcggtatggtagccatgcagt

SEQ ID NO: 5429155 - DNA, 25 bp, Homo sapien
agcggtatggtagccatgcagtata

SEQ ID NO: 5429156 - DNA, 25 bp, Homo sapien
gtaaatctgagtggaagggaggaca

SEQ ID NO: 5429157 - DNA, 25 bp, Homo sapien
tatgttaattccatatatgatacac

SEQ ID NO: 5429158 - DNA, 25 bp, Homo sapien
taggcatgaacccttatttattcct

SEQ ID NO: 5429159 - DNA, 25 bp, Homo sapien
ggaggacaacggtattttaggcatg

SEQ ID NO: 5429160 - DNA, 25 bp, Homo sapien
tgacacccagaattctgattctgca

SEQ ID NO: 5429161 - DNA, 25 bp, Homo sapien
gatgctggcggccaagtgacaccca

SEQ ID NO: 5429162 - DNA, 25 bp, Homo sapien
ccaagtgacacccagaattctgatt

SEQ ID NO: 5429163 - DNA, 25 bp, Homo sapien
ccatggatgctggcggccaagtgac

SEQ ID NO: 5429164 - DNA, 25 bp, Homo sapien
tatttagaaactggcattttaactg

SEQ ID NO: 5429165 - DNA, 25 bp, Homo sapien
aatactgattatttagaaactggca

SEQ ID NO: 5429166 - DNA, 25 bp, Homo sapien
actggcattttaactgttccctcat

SEQ ID NO: 5429167 - DNA, 25 bp, Homo sapien
ctggaggaaaataatactgattatt

SEQ ID NO: 5429168 - DNA, 25 bp, Homo sapien
tttgtgaagctttacactactgtta

SEQ ID NO: 5429169 - DNA, 25 bp, Homo sapien
ctactgttacatggtttctcaatca

SEQ ID NO: 5429170 - DNA, 25 bp, Homo sapien
cttatgtatggtggatttgtgaagc

SEQ ID NO: 5429171 - DNA, 25 bp, Homo sapien
tgaagctttacactactgttacatg

SEQ ID NO: 5429172 - DNA, 25 bp, Homo sapien
ggaaagcaccttcactgagactcca

SEQ ID NO: 5429173 - DNA, 25 bp, Homo sapien
tttggagggagcagtcctaccacag

SEQ ID NO: 5429174 - DNA, 25 bp, Homo sapien
tgctgccagaaagtctttggaggga

SEQ ID NO: 5429175 - DNA, 25 bp, Homo sapien
agactccatcgccctcgagggtggc

SEQ ID NO: 5429176 - DNA, 25 bp, Homo sapien
tgcctaacagagacagaagtataat

SEQ ID NO: 5429177 - DNA, 25 bp, Homo sapien
ttttcagagttgtggctcacaggaa

SEQ ID NO: 5429178 - DNA, 25 bp, Homo sapien
gaagtataattacgatatcattaga

SEQ ID NO: 5429179 - DNA, 25 bp, Homo sapien
tgaagctgtctgattcttatgtaga

SEQ ID NO: 5429180 - DNA, 25 bp, Homo sapien
acaagagcagctaaagcggctgtca

SEQ ID NO: 5429181 - DNA, 25 bp, Homo sapien
tcagtgccttgtggtgacaagagca

SEQ ID NO: 5429182 - DNA, 25 bp, Homo sapien
caagagcagctaaagcggctgtcac

SEQ ID NO: 5429183 - DNA, 25 bp, Homo sapien
ttgtgaatcagcctcaggagatgag

SEQ ID NO: 5429184 - DNA, 25 bp, Homo sapien
ggtcccaagcacgaatatcatccct

SEQ ID NO: 5429185 - DNA, 25 bp, Homo sapien
ctaattcctaggagattctcacctg

SEQ ID NO: 5429186 - DNA, 25 bp, Homo sapien
gggtcaggtcccaagcacgaatatc

SEQ ID NO: 5429187 - DNA, 25 bp, Homo sapien
ccaaaacaagattttggtgacattt

SEQ ID NO: 5429188 - DNA, 25 bp, Homo sapien
tccaaaacaagattttggtgacatt

SEQ ID NO: 5429189 - DNA, 25 bp, Homo sapien
ctacatccaaaacaagattttggtg

SEQ ID NO: 5429190 - DNA, 25 bp, Homo sapien
catccaaaacaagattttggtgaca

SEQ ID NO: 5429191 - DNA, 25 bp, Homo sapien
gaaacaaattggtttaataagctgc

SEQ ID NO: 5429192 - DNA, 25 bp, Homo sapien
tttttccgtgattccaaataaagca

SEQ ID NO: 5429193 - DNA, 25 bp, Homo sapien
aacaaattggtttaataagctgcat

SEQ ID NO: 5429194 - DNA, 25 bp, Homo sapien
tccgtgattccaaataaagcagttt

SEQ ID NO: 5429195 - DNA, 25 bp, Homo sapien
cagttgataaaatctcccctgaggt

SEQ ID NO: 5429196 - DNA, 25 bp, Homo sapien
tctgggataagcctttggaatttga

SEQ ID NO: 5429197 - DNA, 25 bp, Homo sapien
agccatgtatctgggataagccttt

SEQ ID NO: 5429198 - DNA, 25 bp, Homo sapien
cttcctttgatcagcagttgataaa

SEQ ID NO: 5429199 - DNA, 25 bp, Homo sapien
tttccacactctactaggatagaat

SEQ ID NO: 5429200 - DNA, 25 bp, Homo sapien
tgatctcctttatgtcatattctgt

SEQ ID NO: 5429201 - DNA, 25 bp, Homo sapien
cacactctactaggatagaattggc

SEQ ID NO: 5429202 - DNA, 25 bp, Homo sapien
tttctcttctggtcggatttgatct

SEQ ID NO: 5429203 - DNA, 25 bp, Homo sapien
tatctccatcttcctcatcatccag

SEQ ID NO: 5429204 - DNA, 25 bp, Homo sapien
ctctatctccatcttcctcatcatc

SEQ ID NO: 5429205 - DNA, 25 bp, Homo sapien
tctatctccatcttcctcatcatcc

SEQ ID NO: 5429206 - DNA, 25 bp, Homo sapien
tctccatcttcctcatcatccagtt

SEQ ID NO: 5429207 - DNA, 25 bp, Homo sapien
aggaggtaatttactatagtgactt

SEQ ID NO: 5429208 - DNA, 25 bp, Homo sapien
aaggaggtaatttactatagtgact

SEQ ID NO: 5429209 - DNA, 25 bp, Homo sapien
ccttggtcaagtctcttgactcatt

SEQ ID NO: 5429210 - DNA, 25 bp, Homo sapien
cttggtcaagtctcttgactcattt

SEQ ID NO: 5429211 - DNA, 25 bp, Homo sapien
tcatccccatcgatgctctttaaac

SEQ ID NO: 5429212 - DNA, 25 bp, Homo sapien
cactttggtattcatgacttctgcc

SEQ ID NO: 5429213 - DNA, 25 bp, Homo sapien
ctcatcaaaaattagcaaattggaa

SEQ ID NO: 5429214 - DNA, 25 bp, Homo sapien
taaagcactagctcatccccatcga

SEQ ID NO: 5429215 - DNA, 25 bp, Homo sapien
acttgctcaggtacattttccagga

SEQ ID NO: 5429216 - DNA, 25 bp, Homo sapien
tattttcagcactatctacagattt

SEQ ID NO: 5429217 - DNA, 25 bp, Homo sapien
aggataaagttcctctgtggcttgt

SEQ ID NO: 5429218 - DNA, 25 bp, Homo sapien
cgatatgaacccatttgctttcaga

SEQ ID NO: 5429219 - DNA, 25 bp, Homo sapien
gaaaccattgtatgagagaattgct

SEQ ID NO: 5429220 - DNA, 25 bp, Homo sapien
tgaccctcagtcgaaggcggagact

SEQ ID NO: 5429221 - DNA, 25 bp, Homo sapien
cagttagaggctgttgtagcaatcc

SEQ ID NO: 5429222 - DNA, 25 bp, Homo sapien
tctctgtgcatagcagaggcactgt

SEQ ID NO: 5429223 - DNA, 25 bp, Homo sapien
tttaacagagaagtacaattccttg

SEQ ID NO: 5429224 - DNA, 25 bp, Homo sapien
ttgtcctttaacagagaagtacaat

SEQ ID NO: 5429225 - DNA, 25 bp, Homo sapien
cctttaacagagaagtacaattcct

SEQ ID NO: 5429226 - DNA, 25 bp, Homo sapien
gtcctttaacagagaagtacaattc

SEQ ID NO: 5429227 - DNA, 25 bp, Homo sapien
tcttggttggatgtcctagtgccaa

SEQ ID NO: 5429228 - DNA, 25 bp, Homo sapien
tctcttggttggatgtcctagtgcc

SEQ ID NO: 5429229 - DNA, 25 bp, Homo sapien
ggttggatgtcctagtgccaaccat

SEQ ID NO: 5429230 - DNA, 25 bp, Homo sapien
ttcttctcttggttggatgtcctag

SEQ ID NO: 5429231 - DNA, 25 bp, Homo sapien
gagactaccaatggaatcagttgtt

SEQ ID NO: 5429232 - DNA, 25 bp, Homo sapien
aaaggtgcttggattggtggtcttt

SEQ ID NO: 5429233 - DNA, 25 bp, Homo sapien
tttttcttgaggagtggcatttcca

SEQ ID NO: 5429234 - DNA, 25 bp, Homo sapien
caggtttggtgctgatagagagact

SEQ ID NO: 5429235 - DNA, 25 bp, Homo sapien
cacatttctgcaaggttaaggccat

SEQ ID NO: 5429236 - DNA, 25 bp, Homo sapien
catatccaactggaaggccggccat

SEQ ID NO: 5429237 - DNA, 25 bp, Homo sapien
ggcatagtccggttcttgtccaaga

SEQ ID NO: 5429238 - DNA, 25 bp, Homo sapien
gaaagttgagatagacccagggtct

SEQ ID NO: 5429239 - DNA, 25 bp, Homo sapien
taaacaaggatgagaatgttgcgca

SEQ ID NO: 5429240 - DNA, 25 bp, Homo sapien
tccagagccaaatccaagagtaatt

SEQ ID NO: 5429241 - DNA, 25 bp, Homo sapien
taaaccaggctatggtgatccttct

SEQ ID NO: 5429242 - DNA, 25 bp, Homo sapien
tattaaacaggatgagacttcagca

SEQ ID NO: 5429243 - DNA, 25 bp, Homo sapien
cacggaatgtcaattttggagagaa

SEQ ID NO: 5429244 - DNA, 25 bp, Homo sapien
tcacgtaggttctactggaaggact

SEQ ID NO: 5429245 - DNA, 25 bp, Homo sapien
tctttaacccagtatgtccccacta

SEQ ID NO: 5429246 - DNA, 25 bp, Homo sapien
tatgactgatgttacaagggatgca

SEQ ID NO: 5429247 - DNA, 25 bp, Homo sapien
gacagttggagttatatcaacagta

SEQ ID NO: 5429248 - DNA, 25 bp, Homo sapien
aacagaagagacagttggagttata

SEQ ID NO: 5429249 - DNA, 25 bp, Homo sapien
acagactcaggttgtagtaaagaaa

SEQ ID NO: 5429250 - DNA, 25 bp, Homo sapien
aatggaaaacagactcaggttgtag

SEQ ID NO: 5429251 - DNA, 25 bp, Homo sapien
gttgcactttacctgatacacgctg

SEQ ID NO: 5429252 - DNA, 25 bp, Homo sapien
aactggcaaacttcagactgaacat

SEQ ID NO: 5429253 - DNA, 25 bp, Homo sapien
tacccaggagtaatcttcaaatctt

SEQ ID NO: 5429254 - DNA, 25 bp, Homo sapien
cacctttatcaagcatacccaggag

SEQ ID NO: 5429255 - DNA, 25 bp, Homo sapien
ccttcataagagagctgtggccgaa

SEQ ID NO: 5429256 - DNA, 25 bp, Homo sapien
tgaaatgtaagcacaaaacctcctg

SEQ ID NO: 5429257 - DNA, 25 bp, Homo sapien
aagcagagtactatggttgtccaac

SEQ ID NO: 5429258 - DNA, 25 bp, Homo sapien
tatatgaagtccctgccactagcca

SEQ ID NO: 5429259 - DNA, 25 bp, Homo sapien
caggaggttagagcaatggagcatt

SEQ ID NO: 5429260 - DNA, 25 bp, Homo sapien
tgagggatctagagtgccatgttcc

SEQ ID NO: 5429261 - DNA, 25 bp, Homo sapien
ggatatccgtttggccacacagcag

SEQ ID NO: 5429262 - DNA, 25 bp, Homo sapien
catgaaactggtcccaaaaagggtg

SEQ ID NO: 5429263 - DNA, 25 bp, Homo sapien
cttcctccataaagactgataagtc

SEQ ID NO: 5429264 - DNA, 25 bp, Homo sapien
aaagactgataagtcttggatgcaa

SEQ ID NO: 5429265 - DNA, 25 bp, Homo sapien
ccataaagactgataagtcttggat

SEQ ID NO: 5429266 - DNA, 25 bp, Homo sapien
cctccataaagactgataagtcttg

SEQ ID NO: 5429267 - DNA, 25 bp, Homo sapien
acagtgtaagtctcaacaaatggaa

SEQ ID NO: 5429268 - DNA, 25 bp, Homo sapien
aatatggacctctgatgcaacttcc

SEQ ID NO: 5429269 - DNA, 25 bp, Homo sapien
cctcctctggattatatccaccagt

SEQ ID NO: 5429270 - DNA, 25 bp, Homo sapien
acttttacttcctcaacagtgtaag

SEQ ID NO: 5429271 - DNA, 25 bp, Homo sapien
gattttttacactggcatatctttt

SEQ ID NO: 5429272 - DNA, 25 bp, Homo sapien
taaattctggccgagaagtgtttcg

SEQ ID NO: 5429273 - DNA, 25 bp, Homo sapien
aagtgtttcgggcaattataagagc

SEQ ID NO: 5429274 - DNA, 25 bp, Homo sapien
taagagccatacttccattatttaa

SEQ ID NO: 5429275 - DNA, 25 bp, Homo sapien
attcaagaactgaccctggatcatt

SEQ ID NO: 5429276 - DNA, 25 bp, Homo sapien
ctggtattaggtgccaagcctctag

SEQ ID NO: 5429277 - DNA, 25 bp, Homo sapien
tggatcatttgccattgatcattac

SEQ ID NO: 5429278 - DNA, 25 bp, Homo sapien
gtattaggtgccaagcctctaggtg

SEQ ID NO: 5429279 - DNA, 25 bp, Homo sapien
tctcaaggagatacttttcgactca

SEQ ID NO: 5429280 - DNA, 25 bp, Homo sapien
ttctcaaggagatacttttcgactc

SEQ ID NO: 5429281 - DNA, 25 bp, Homo sapien
gttctcaaggagatacttttcgact

SEQ ID NO: 5429282 - DNA, 25 bp, Homo sapien
ctcaaggagatacttttcgactcac

SEQ ID NO: 5429283 - DNA, 25 bp, Homo sapien
agatttgggagatccctgtgccctc

SEQ ID NO: 5429284 - DNA, 25 bp, Homo sapien
cagatttgggagatccctgtgccct

SEQ ID NO: 5429285 - DNA, 25 bp, Homo sapien
gaccaaaattatcacgagggacaaa

SEQ ID NO: 5429286 - DNA, 25 bp, Homo sapien
ttgttgctgccaacataatgtgttg

SEQ ID NO: 5429287 - DNA, 25 bp, Homo sapien
cattgttgtattcaaagtgcctggc

SEQ ID NO: 5429288 - DNA, 25 bp, Homo sapien
ttagagaactcatcattatatatgt

SEQ ID NO: 5429289 - DNA, 25 bp, Homo sapien
ttcttgcacatcatcagagctgtta

SEQ ID NO: 5429290 - DNA, 25 bp, Homo sapien
cttgcacatcatcagagctgttaaa

SEQ ID NO: 5429291 - DNA, 25 bp, Homo sapien
ctttcttgcacatcatcagagctgt

SEQ ID NO: 5429292 - DNA, 25 bp, Homo sapien
tgcacatcatcagagctgttaaatg

SEQ ID NO: 5429293 - DNA, 25 bp, Homo sapien
taagttttgccagtgccttaacaac

SEQ ID NO: 5429294 - DNA, 25 bp, Homo sapien
tggttaggggacatccatcgatatt

SEQ ID NO: 5429295 - DNA, 25 bp, Homo sapien
ttttgccagtgccttaacaacagca

SEQ ID NO: 5429296 - DNA, 25 bp, Homo sapien
cagcaaaatctctccgttggttagg

SEQ ID NO: 5429297 - DNA, 25 bp, Homo sapien
tgctgaaggtgcagacgtcgaccag

SEQ ID NO: 5429298 - DNA, 25 bp, Homo sapien
cagacgtcgaccagctgtacatgcc

SEQ ID NO: 5429299 - DNA, 25 bp, Homo sapien
aaggtgcagacgtcgaccagctgta

SEQ ID NO: 5429300 - DNA, 25 bp, Homo sapien
agaagcttgccagcggtgctgaagg

SEQ ID NO: 5429301 - DNA, 25 bp, Homo sapien
gaatgtgccaatacattggtagatc

SEQ ID NO: 5429302 - DNA, 25 bp, Homo sapien
cagttatcacatgaggaactccatg

SEQ ID NO: 5429303 - DNA, 25 bp, Homo sapien
aactccatgaagagaatgtgccaat

SEQ ID NO: 5429304 - DNA, 25 bp, Homo sapien
ccattataatgtgcaatgttgcagt

SEQ ID NO: 5429305 - DNA, 25 bp, Homo sapien
tttaatgaatctgtagccactccct

SEQ ID NO: 5429306 - DNA, 25 bp, Homo sapien
tcagtttaatgaatctgtagccact

SEQ ID NO: 5429307 - DNA, 25 bp, Homo sapien
gtttaatgaatctgtagccactccc

SEQ ID NO: 5429308 - DNA, 25 bp, Homo sapien
agtttaatgaatctgtagccactcc

SEQ ID NO: 5429309 - DNA, 25 bp, Homo sapien
tccatcccagcattcttctgagctc

SEQ ID NO: 5429310 - DNA, 25 bp, Homo sapien
ggctacttcgctagcagatccatct

SEQ ID NO: 5429311 - DNA, 25 bp, Homo sapien
tgctctgacaggagtcaggattcgg

SEQ ID NO: 5429312 - DNA, 25 bp, Homo sapien
gaagcaaagcatgggctacttcgct

SEQ ID NO: 5429313 - DNA, 25 bp, Homo sapien
cagtgacagagcgtgcccttcatat

SEQ ID NO: 5429314 - DNA, 25 bp, Homo sapien
taagcagtgacagagcgtgcccttc

SEQ ID NO: 5429315 - DNA, 25 bp, Homo sapien
acagagcgtgcccttcatattccat

SEQ ID NO: 5429316 - DNA, 25 bp, Homo sapien
ttccttaagcagtgacagagcgtgc

SEQ ID NO: 5429317 - DNA, 25 bp, Homo sapien
tgcaagcttcaacagaggttcaacc

SEQ ID NO: 5429318 - DNA, 25 bp, Homo sapien
aatgacttcggtctgtttggaaagc

SEQ ID NO: 5429319 - DNA, 25 bp, Homo sapien
tcagtttttattcctgcaagcttca

SEQ ID NO: 5429320 - DNA, 25 bp, Homo sapien
tcaaccttctcataataaacctggg

SEQ ID NO: 5429321 - DNA, 25 bp, Homo sapien
tacgggttgccctgcttcaagagtt

SEQ ID NO: 5429322 - DNA, 25 bp, Homo sapien
aaattatgaatgctgaccctacggg

SEQ ID NO: 5429323 - DNA, 25 bp, Homo sapien
gacacatcagttaagggttcctgct

SEQ ID NO: 5429324 - DNA, 25 bp, Homo sapien
cactagagcgggacaactttcaaac

SEQ ID NO: 5429325 - DNA, 25 bp, Homo sapien
tagaataaaaatgccaccagggccc

SEQ ID NO: 5429326 - DNA, 25 bp, Homo sapien
gaaacactgcaggaacctttgccat

SEQ ID NO: 5429327 - DNA, 25 bp, Homo sapien
cctagggaagactgcctgatgttac

SEQ ID NO: 5429328 - DNA, 25 bp, Homo sapien
catgtctgtcaaccttttccaagca

SEQ ID NO: 5429329 - DNA, 25 bp, Homo sapien
gcatagctttattggctggctgcct

SEQ ID NO: 5429330 - DNA, 25 bp, Homo sapien
tcacttcagctcatctcgcatgagc

SEQ ID NO: 5429331 - DNA, 25 bp, Homo sapien
gcctttgatcaacttgggtcctcat

SEQ ID NO: 5429332 - DNA, 25 bp, Homo sapien
ctttgatcaacttgggtcctcatgg

SEQ ID NO: 5429333 - DNA, 25 bp, Homo sapien
gagtgtgatacctaataaagtacca

SEQ ID NO: 5429334 - DNA, 25 bp, Homo sapien
cacagtggtcttcacttaaattaat

SEQ ID NO: 5429335 - DNA, 25 bp, Homo sapien
tcttgaactgtctaaaccatatgtc

SEQ ID NO: 5429336 - DNA, 25 bp, Homo sapien
gaacaacgccgtttcagtttcacag

SEQ ID NO: 5429337 - DNA, 25 bp, Homo sapien
catagcaagtcatacttagaatcac

SEQ ID NO: 5429338 - DNA, 25 bp, Homo sapien
ctttacatagcaagtcatacttaga

SEQ ID NO: 5429339 - DNA, 25 bp, Homo sapien
tacatagcaagtcatacttagaatc

SEQ ID NO: 5429340 - DNA, 25 bp, Homo sapien
ttacatagcaagtcatacttagaat

SEQ ID NO: 5429341 - DNA, 25 bp, Homo sapien
gcaaggaacttaagtatacatctac

SEQ ID NO: 5429342 - DNA, 25 bp, Homo sapien
taagtatacatctactgggtatcat

SEQ ID NO: 5429343 - DNA, 25 bp, Homo sapien
ggaacttaagtatacatctactggg

SEQ ID NO: 5429344 - DNA, 25 bp, Homo sapien
ttcttgcaaggaacttaagtataca

SEQ ID NO: 5429345 - DNA, 25 bp, Homo sapien
ttatttttacttgaagtgtccagtg

SEQ ID NO: 5429346 - DNA, 25 bp, Homo sapien
ctgagagattaaagtaattgttatt

SEQ ID NO: 5429347 - DNA, 25 bp, Homo sapien
tttttacttgaagtgtccagtggtc

SEQ ID NO: 5429348 - DNA, 25 bp, Homo sapien
ttgttatttttacttgaagtgtcca

SEQ ID NO: 5429349 - DNA, 25 bp, Homo sapien
tggttctcaaattgacctccagata

SEQ ID NO: 5429350 - DNA, 25 bp, Homo sapien
ctccataacccagtcctaaggagct

SEQ ID NO: 5429351 - DNA, 25 bp, Homo sapien
cctaaggagctctgtcgtactttac

SEQ ID NO: 5429352 - DNA, 25 bp, Homo sapien
tctcaaattgacctccagataattc

SEQ ID NO: 5429353 - DNA, 25 bp, Homo sapien
gccattctcccagctttgcagccac

SEQ ID NO: 5429354 - DNA, 25 bp, Homo sapien
ccactgccccctgatctgctggatc

SEQ ID NO: 5429355 - DNA, 25 bp, Homo sapien
cttgccattctcccagctttgcagc

SEQ ID NO: 5429356 - DNA, 25 bp, Homo sapien
actgccccctgatctgctggatcag

SEQ ID NO: 5429357 - DNA, 25 bp, Homo sapien
tttgaataccaggtattaattacaa

SEQ ID NO: 5429358 - DNA, 25 bp, Homo sapien
ccaaagtggtttgaataccaggtat

SEQ ID NO: 5429359 - DNA, 25 bp, Homo sapien
tggtttgaataccaggtattaatta

SEQ ID NO: 5429360 - DNA, 25 bp, Homo sapien
agtggtttgaataccaggtattaat

SEQ ID NO: 5429361 - DNA, 25 bp, Homo sapien
tcaaaagtttctagaccgagcctga

SEQ ID NO: 5429362 - DNA, 25 bp, Homo sapien
caaaagtttctagaccgagcctgaa

SEQ ID NO: 5429363 - DNA, 25 bp, Homo sapien
aaaagtttctagaccgagcctgaag

SEQ ID NO: 5429364 - DNA, 25 bp, Homo sapien
gctaggtagcgaaagaatccctggg

SEQ ID NO: 5429365 - DNA, 25 bp, Homo sapien
aagctgcttgtgacgtttgcccggg

SEQ ID NO: 5429366 - DNA, 25 bp, Homo sapien
aagattttctgctgagactctgagc

SEQ ID NO: 5429367 - DNA, 25 bp, Homo sapien
gactcggtaacctgtccgggcagtg

SEQ ID NO: 5429368 - DNA, 25 bp, Homo sapien
atgccccggagcagaatccgctcgg

SEQ ID NO: 5429369 - DNA, 25 bp, Homo sapien
actgtccctcccgatctcgaagatg

SEQ ID NO: 5429370 - DNA, 25 bp, Homo sapien
cgggcgctcgggctgaatgggccgc

SEQ ID NO: 5429371 - DNA, 25 bp, Homo sapien
tgaatgggccgccaccgcagtgctc

SEQ ID NO: 5429372 - DNA, 25 bp, Homo sapien
taacagcgccggaggcacagcggca

SEQ ID NO: 5429373 - DNA, 25 bp, Homo sapien
ctgctgcggggacgttaacagcgcc

SEQ ID NO: 5429374 - DNA, 25 bp, Homo sapien
cgttaacagcgccggaggcacagcg

SEQ ID NO: 5429375 - DNA, 25 bp, Homo sapien
gggacgttaacagcgccggaggcac

SEQ ID NO: 5429376 - DNA, 25 bp, Homo sapien
ccggttcctgcgcctcctccagggc

SEQ ID NO: 5429377 - DNA, 25 bp, Homo sapien
cggttcctgcgcctcctccagggca

SEQ ID NO: 5429378 - DNA, 25 bp, Homo sapien
ggttcctgcgcctcctccagggcat

SEQ ID NO: 5429379 - DNA, 25 bp, Homo sapien
gtcgcaggctgggcccgagccaggg

SEQ ID NO: 5429380 - DNA, 25 bp, Homo sapien
gagtcgcaggctgggcccgagccag

SEQ ID NO: 5429381 - DNA, 25 bp, Homo sapien
ggcggagtcgcaggctgggcccgag

SEQ ID NO: 5429382 - DNA, 25 bp, Homo sapien
aggctgggcccgagccaggggtccg

SEQ ID NO: 5429383 - DNA, 25 bp, Homo sapien
agggcgcggcagccccagctctagc

SEQ ID NO: 5429384 - DNA, 25 bp, Homo sapien
agaaggaggtggagggcgcggcagc

SEQ ID NO: 5429385 - DNA, 25 bp, Homo sapien
gaggtggagggcgcggcagccccag

SEQ ID NO: 5429386 - DNA, 25 bp, Homo sapien
cgcggcagccccagctctagccgcg

SEQ ID NO: 5429387 - DNA, 25 bp, Homo sapien
tcaaaaaatttgacactagacttgc

SEQ ID NO: 5429388 - DNA, 25 bp, Homo sapien
tgtctttgacttttgcctcattatt

SEQ ID NO: 5429389 - DNA, 25 bp, Homo sapien
aaaatttgacactagacttgctgtc

SEQ ID NO: 5429390 - DNA, 25 bp, Homo sapien
gacactagacttgctgtctttgact

SEQ ID NO: 5429391 - DNA, 25 bp, Homo sapien
gtttggtgccatgcaatataataag

SEQ ID NO: 5429392 - DNA, 25 bp, Homo sapien
tgtttataacacttgctggactgaa

SEQ ID NO: 5429393 - DNA, 25 bp, Homo sapien
tattccaattccagattatatttaa

SEQ ID NO: 5429394 - DNA, 25 bp, Homo sapien
gaaacaatgacagacaactcatgat

SEQ ID NO: 5429395 - DNA, 25 bp, Homo sapien
tgtaagcacagtgggttcgtttccc

SEQ ID NO: 5429396 - DNA, 25 bp, Homo sapien
tacagatcgattccagtggtaccag

SEQ ID NO: 5429397 - DNA, 25 bp, Homo sapien
gaactggtgactccctgtgcaagat

SEQ ID NO: 5429398 - DNA, 25 bp, Homo sapien
taaacagacaagagcatatgccaag

SEQ ID NO: 5429399 - DNA, 25 bp, Homo sapien
gagctgtccatggtaccgtaaggcg

SEQ ID NO: 5429400 - DNA, 25 bp, Homo sapien
tccgaggattgagttgcaggcagcc

SEQ ID NO: 5429401 - DNA, 25 bp, Homo sapien
tgggataagcccttgcaaagcgtct

SEQ ID NO: 5429402 - DNA, 25 bp, Homo sapien
gttcttggccaagcgcagagtctcg

SEQ ID NO: 5429403 - DNA, 25 bp, Homo sapien
tcaaaagccagatacgccttcagct

SEQ ID NO: 5429404 - DNA, 25 bp, Homo sapien
ttataatggcgcgtgcgtgtgcccc

SEQ ID NO: 5429405 - DNA, 25 bp, Homo sapien
aaatgcttgcgaaaagtacctgccc

SEQ ID NO: 5429406 - DNA, 25 bp, Homo sapien
tgtgccccgctagtacgtaggagtg

SEQ ID NO: 5429407 - DNA, 25 bp, Homo sapien
catcgacgggatactgaaaagcaaa

SEQ ID NO: 5429408 - DNA, 25 bp, Homo sapien
tgtacaaaagcgctagctgcagggc

SEQ ID NO: 5429409 - DNA, 25 bp, Homo sapien
taaatgtgtttatggtggttgcccg

SEQ ID NO: 5429410 - DNA, 25 bp, Homo sapien
ttggcaacaaaagtggacagggtct

SEQ ID NO: 5429411 - DNA, 25 bp, Homo sapien
gcctctggagcggtaacaggtagca

SEQ ID NO: 5429412 - DNA, 25 bp, Homo sapien
taatggtcagcgattggcaaccgcg

SEQ ID NO: 5429413 - DNA, 25 bp, Homo sapien
cagcttgacactcccaatgtgcgta

SEQ ID NO: 5429414 - DNA, 25 bp, Homo sapien
taaacagcccattgaaagggccgcc

SEQ ID NO: 5429415 - DNA, 25 bp, Homo sapien
tcctgcgtgggcgaattcctcgtgt

SEQ ID NO: 5429416 - DNA, 25 bp, Homo sapien
gcgcgggcgctcaggttatatagcc

SEQ ID NO: 5429417 - DNA, 25 bp, Homo sapien
gcagtgatagtctcataaccctggg

SEQ ID NO: 5429418 - DNA, 25 bp, Homo sapien
ccagttagtgatgctaagcgcgggc

SEQ ID NO: 5429419 - DNA, 25 bp, Homo sapien
aagaaagtggcccatctgtcgccag

SEQ ID NO: 5429420 - DNA, 25 bp, Homo sapien
ggcatgcgccatatggtcttcccgg

SEQ ID NO: 5429421 - DNA, 25 bp, Homo sapien
tgtcgccagttagagactccgcgga

SEQ ID NO: 5429422 - DNA, 25 bp, Homo sapien
ctgcccatttgtatgccgcggagcg

SEQ ID NO: 5429423 - DNA, 25 bp, Homo sapien
agacagggctgaggttgggtctcac

SEQ ID NO: 5429424 - DNA, 25 bp, Homo sapien
cagagacagggctgaggttgggtct

SEQ ID NO: 5429425 - DNA, 25 bp, Homo sapien
gagacagggctgaggttgggtctca

SEQ ID NO: 5429426 - DNA, 25 bp, Homo sapien
tcagagacagggctgaggttgggtc

SEQ ID NO: 5429427 - DNA, 25 bp, Homo sapien
agtcagccggatcccggagaggaca

SEQ ID NO: 5429428 - DNA, 25 bp, Homo sapien
ctctgcgcggaaaatttcgacccgg

SEQ ID NO: 5429429 - DNA, 25 bp, Homo sapien
atgtgaccctcctctgcgcggaaaa

SEQ ID NO: 5429430 - DNA, 25 bp, Homo sapien
cctggattgaggtgcgttttgtttg

SEQ ID NO: 5429431 - DNA, 25 bp, Homo sapien
ttagcactgaggaccttctccgcgg

SEQ ID NO: 5429432 - DNA, 25 bp, Homo sapien
tctttggacttgtttggacggttgc

SEQ ID NO: 5429433 - DNA, 25 bp, Homo sapien
tgcaggctacccagcggcacgcgaa

SEQ ID NO: 5429434 - DNA, 25 bp, Homo sapien
cacgcgcggacaacaaaagcctctt

SEQ ID NO: 5429435 - DNA, 25 bp, Homo sapien
cagcccggccgacctcgagaggttc

SEQ ID NO: 5429436 - DNA, 25 bp, Homo sapien
gacctcgagaggttcccgcgtcctc

SEQ ID NO: 5429437 - DNA, 25 bp, Homo sapien
ggaggtttgcgttcaatgaaaggat

SEQ ID NO: 5429438 - DNA, 25 bp, Homo sapien
gatgctcgctcttgcaaagggaggt

SEQ ID NO: 5429439 - DNA, 25 bp, Homo sapien
gggatcgaggaacagcttgctgtcc

SEQ ID NO: 5429440 - DNA, 25 bp, Homo sapien
ctgtccaaaggggatcgcagggcca

SEQ ID NO: 5429441 - DNA, 25 bp, Homo sapien
gggccagggaactgacaagcacacg

SEQ ID NO: 5429442 - DNA, 25 bp, Homo sapien
actgacaagcacacgctatttgcca

SEQ ID NO: 5429443 - DNA, 25 bp, Homo sapien
cggcgccggagcgtcgcaagaacaa

SEQ ID NO: 5429444 - DNA, 25 bp, Homo sapien
cagtgggttgggagagaggacccgg

SEQ ID NO: 5429445 - DNA, 25 bp, Homo sapien
gcaagaacaatggttgctgcagtgg

SEQ ID NO: 5429446 - DNA, 25 bp, Homo sapien
ccggagcgtcgcaagaacaatggtt

SEQ ID NO: 5429447 - DNA, 25 bp, Homo sapien
tacgcatcttaagaggttgagaatg

SEQ ID NO: 5429448 - DNA, 25 bp, Homo sapien
acctggaaatttacgcatcttaaga

SEQ ID NO: 5429449 - DNA, 25 bp, Homo sapien
gcttgttgcaaggaacctggaaatt

SEQ ID NO: 5429450 - DNA, 25 bp, Homo sapien
gaggttgagaatgacgctgaatctg

SEQ ID NO: 5429451 - DNA, 25 bp, Homo sapien
tgtgagtgacagtgacgagaacaac

SEQ ID NO: 5429452 - DNA, 25 bp, Homo sapien
gatttgcgggcctaattctgtcaca

SEQ ID NO: 5429453 - DNA, 25 bp, Homo sapien
aaatagccagatctttcagggagta

SEQ ID NO: 5429454 - DNA, 25 bp, Homo sapien
tgtcacaatggcacttataggtctg

SEQ ID NO: 5429455 - DNA, 25 bp, Homo sapien
tcttcgaccactctttatgagttac

SEQ ID NO: 5429456 - DNA, 25 bp, Homo sapien
tttgctcatcccttaaatctttggt

SEQ ID NO: 5429457 - DNA, 25 bp, Homo sapien
cttgtatgacaccatatgctcttgt

SEQ ID NO: 5429458 - DNA, 25 bp, Homo sapien
tctttacctcttcgaccactcttta

SEQ ID NO: 5429459 - DNA, 25 bp, Homo sapien
gagaacccgatcaaccgtgagaaaa

SEQ ID NO: 5429460 - DNA, 25 bp, Homo sapien
ttaagacggagccagagaacccgat

SEQ ID NO: 5429461 - DNA, 25 bp, Homo sapien
cagagaacccgatcaaccgtgagaa

SEQ ID NO: 5429462 - DNA, 25 bp, Homo sapien
ccgggaggagattaagacggagcca

SEQ ID NO: 5429463 - DNA, 25 bp, Homo sapien
ccggggaaacgtacagtccagagag

SEQ ID NO: 5429464 - DNA, 25 bp, Homo sapien
cggggaaacgtacagtccagagagt

SEQ ID NO: 5429465 - DNA, 25 bp, Homo sapien
atggccaccaccaccgaacggacga

SEQ ID NO: 5429466 - DNA, 25 bp, Homo sapien
tggccaccaccaccgaacggacgag

SEQ ID NO: 5429467 - DNA, 25 bp, Homo sapien
cgagttaaggaagttggtagcacca

SEQ ID NO: 5429468 - DNA, 25 bp, Homo sapien
ctatcgagttaaggaagttggtagc

SEQ ID NO: 5429469 - DNA, 25 bp, Homo sapien
gaagttggtagcaccaagtctggca

SEQ ID NO: 5429470 - DNA, 25 bp, Homo sapien
aagttggtagcaccaagtctggcag

SEQ ID NO: 5429471 - DNA, 25 bp, Homo sapien
cgggaatttaccattgtcctcttca

SEQ ID NO: 5429472 - DNA, 25 bp, Homo sapien
aacacaggtccttgagacttcagag

SEQ ID NO: 5429473 - DNA, 25 bp, Homo sapien
tgtttttaggatcaagcctagagat

SEQ ID NO: 5429474 - DNA, 25 bp, Homo sapien
ttaatggttcgagagtcttggaact

SEQ ID NO: 5429475 - DNA, 25 bp, Homo sapien
cattcattcaccatgctcctcttgg

SEQ ID NO: 5429476 - DNA, 25 bp, Homo sapien
agcagccccaatccttcatcgtatt

SEQ ID NO: 5429477 - DNA, 25 bp, Homo sapien
tggcatggttctccctgatctttgt

SEQ ID NO: 5429478 - DNA, 25 bp, Homo sapien
ggctccctggcaacatgctctttcc

SEQ ID NO: 5429479 - DNA, 25 bp, Homo sapien
gtattaactccagcagtagtttctg

SEQ ID NO: 5429480 - DNA, 25 bp, Homo sapien
tctgtattaactccagcagtagttt

SEQ ID NO: 5429481 - DNA, 25 bp, Homo sapien
taactccagcagtagtttctgtggt

SEQ ID NO: 5429482 - DNA, 25 bp, Homo sapien
ctctcttttctgtattaactccagc

SEQ ID NO: 5429483 - DNA, 25 bp, Homo sapien
acaagttgctaacattggcttcttt

SEQ ID NO: 5429484 - DNA, 25 bp, Homo sapien
aatgctgggtgttgagtaactgtag

SEQ ID NO: 5429485 - DNA, 25 bp, Homo sapien
ggaagattagcctcattatgttttc

SEQ ID NO: 5429486 - DNA, 25 bp, Homo sapien
tccactgccccaagcatttggaaga

SEQ ID NO: 5429487 - DNA, 25 bp, Homo sapien
gaagacgctctactctttcagctcc

SEQ ID NO: 5429488 - DNA, 25 bp, Homo sapien
agtactcctgaagacgctctactct

SEQ ID NO: 5429489 - DNA, 25 bp, Homo sapien
ctcctgaagacgctctactctttca

SEQ ID NO: 5429490 - DNA, 25 bp, Homo sapien
tgaagacgctctactctttcagctc

SEQ ID NO: 5429491 - DNA, 25 bp, Homo sapien
cccagatcttgacttctagaatatt

SEQ ID NO: 5429492 - DNA, 25 bp, Homo sapien
tccacccagatcttgacttctagaa

SEQ ID NO: 5429493 - DNA, 25 bp, Homo sapien
attccacccagatcttgacttctag

SEQ ID NO: 5429494 - DNA, 25 bp, Homo sapien
taaaattccacccagatcttgactt

SEQ ID NO: 5429495 - DNA, 25 bp, Homo sapien
tgcatgaaaacaccgtcagccaggg

SEQ ID NO: 5429496 - DNA, 25 bp, Homo sapien
atttgctgccacatctgcatgccag

SEQ ID NO: 5429497 - DNA, 25 bp, Homo sapien
tgaaggccttgtctgtaacagctct

SEQ ID NO: 5429498 - DNA, 25 bp, Homo sapien
tacactgcatgaaaacaccgtcagc

SEQ ID NO: 5429499 - DNA, 25 bp, Homo sapien
tgttcatatccttcacccatttgtt

SEQ ID NO: 5429500 - DNA, 25 bp, Homo sapien
atatccttcacccatttgttgatgg

SEQ ID NO: 5429501 - DNA, 25 bp, Homo sapien
gttcatatccttcacccatttgttg

SEQ ID NO: 5429502 - DNA, 25 bp, Homo sapien
tcatatccttcacccatttgttgat

SEQ ID NO: 5429503 - DNA, 25 bp, Homo sapien
taattccaagctctattaggatgtc

SEQ ID NO: 5429504 - DNA, 25 bp, Homo sapien
tagaaatcatggctaattccaagct

SEQ ID NO: 5429505 - DNA, 25 bp, Homo sapien
taggatgtctggacagtagctgaac

SEQ ID NO: 5429506 - DNA, 25 bp, Homo sapien
gatgtctggacagtagctgaacagc

SEQ ID NO: 5429507 - DNA, 25 bp, Homo sapien
cacagtcagtccaaattgaaggaca

SEQ ID NO: 5429508 - DNA, 25 bp, Homo sapien
attggtgctgacagcagaaatgttg

SEQ ID NO: 5429509 - DNA, 25 bp, Homo sapien
tgtcaggaaaagcacagtcagtcca

SEQ ID NO: 5429510 - DNA, 25 bp, Homo sapien
cagaaatgttggctgaaactgtcag

SEQ ID NO: 5429511 - DNA, 25 bp, Homo sapien
tgtcaagaaaggcttgacaagcaga

SEQ ID NO: 5429512 - DNA, 25 bp, Homo sapien
cacctgaatcctgcttagaggcctt

SEQ ID NO: 5429513 - DNA, 25 bp, Homo sapien
ttaactttgtgctcagaactgatgc

SEQ ID NO: 5429514 - DNA, 25 bp, Homo sapien
gagactttaccaacttagaggcgga

SEQ ID NO: 5429515 - DNA, 25 bp, Homo sapien
caggttgccggtatccaatatgaga

SEQ ID NO: 5429516 - DNA, 25 bp, Homo sapien
ggtctgggcccctagttgctgtgcc

SEQ ID NO: 5429517 - DNA, 25 bp, Homo sapien
tgtgcctttctcaggattaagttct

SEQ ID NO: 5429518 - DNA, 25 bp, Homo sapien
tgggcccctagttgctgtgcctttc

SEQ ID NO: 5429519 - DNA, 25 bp, Homo sapien
gcctttctcaggattaagttctgca

SEQ ID NO: 5429520 - DNA, 25 bp, Homo sapien
tttcctttgagtgaactgttagaat

SEQ ID NO: 5429521 - DNA, 25 bp, Homo sapien
cttttggatgatagtcaaacacttc

SEQ ID NO: 5429522 - DNA, 25 bp, Homo sapien
tgttagaatcttttggatgatagtc

SEQ ID NO: 5429523 - DNA, 25 bp, Homo sapien
gagtgaactgttagaatcttttgga

SEQ ID NO: 5429524 - DNA, 25 bp, Homo sapien
tcgtagtaattagtggtcgagggcc

SEQ ID NO: 5429525 - DNA, 25 bp, Homo sapien
taacaggtatatatggccagtcact

SEQ ID NO: 5429526 - DNA, 25 bp, Homo sapien
taagtggtcccggttcctctgactc

SEQ ID NO: 5429527 - DNA, 25 bp, Homo sapien
gcagaattcccaagcagacttttga

SEQ ID NO: 5429528 - DNA, 25 bp, Homo sapien
agcctacttgcgtcacttggtttta

SEQ ID NO: 5429529 - DNA, 25 bp, Homo sapien
ttatccaatcatagcttcagcaaac

SEQ ID NO: 5429530 - DNA, 25 bp, Homo sapien
tacggccacagaaagcctacttgcg

SEQ ID NO: 5429531 - DNA, 25 bp, Homo sapien
tagcttcagcaaacaatacggccac

SEQ ID NO: 5429532 - DNA, 25 bp, Homo sapien
tgctcagaaacaccagagaattgag

SEQ ID NO: 5429533 - DNA, 25 bp, Homo sapien
gttgctcagaaacaccagagaattg

SEQ ID NO: 5429534 - DNA, 25 bp, Homo sapien
tcagaaacaccagagaattgagcca

SEQ ID NO: 5429535 - DNA, 25 bp, Homo sapien
ctgttgctcagaaacaccagagaat

SEQ ID NO: 5429536 - DNA, 25 bp, Homo sapien
tagtaagccaaacataccttccagg

SEQ ID NO: 5429537 - DNA, 25 bp, Homo sapien
cacatttgtgctaccggaaactgaa

SEQ ID NO: 5429538 - DNA, 25 bp, Homo sapien
caagtgtatgtttcagggtgcccaa

SEQ ID NO: 5429539 - DNA, 25 bp, Homo sapien
catattttgtggcacttgaccagcc

SEQ ID NO: 5429540 - DNA, 25 bp, Homo sapien
caaactaatcttgcccattccgcgg

SEQ ID NO: 5429541 - DNA, 25 bp, Homo sapien
taacaaactaatcttgcccattccg

SEQ ID NO: 5429542 - DNA, 25 bp, Homo sapien
tgcccattccgcgggcagtagtcgg

SEQ ID NO: 5429543 - DNA, 25 bp, Homo sapien
gcgggcagtagtcgggggctggcct

SEQ ID NO: 5429544 - DNA, 25 bp, Homo sapien
gagccccagaagttgtaggacctaa

SEQ ID NO: 5429545 - DNA, 25 bp, Homo sapien
tcatacctgaagtctgaattgggcc

SEQ ID NO: 5429546 - DNA, 25 bp, Homo sapien
ggagtaccttctactgcctcagtgg

SEQ ID NO: 5429547 - DNA, 25 bp, Homo sapien
tggtccctctcatgctaacagaaga

SEQ ID NO: 5429548 - DNA, 25 bp, Homo sapien
ggatgaccaaaagaactgcaaaagg

SEQ ID NO: 5429549 - DNA, 25 bp, Homo sapien
aaacagctcaatgcaattatctctg

SEQ ID NO: 5429550 - DNA, 25 bp, Homo sapien
cactgagatcaggtaataggaagga

SEQ ID NO: 5429551 - DNA, 25 bp, Homo sapien
tagaatatatcgtttaaacagctca

SEQ ID NO: 5429552 - DNA, 25 bp, Homo sapien
tcagcattcaccctactcggtcagg

SEQ ID NO: 5429553 - DNA, 25 bp, Homo sapien
caggtgtgtctatgattaataatcc

SEQ ID NO: 5429554 - DNA, 25 bp, Homo sapien
tccacactatatttgctaactgagg

SEQ ID NO: 5429555 - DNA, 25 bp, Homo sapien
ggctgcctaatgtttagcaaactca

SEQ ID NO: 5429556 - DNA, 25 bp, Homo sapien
cacactagtctctcatttatcaaaa

SEQ ID NO: 5429557 - DNA, 25 bp, Homo sapien
cataccatgtaaaagctgccattct

SEQ ID NO: 5429558 - DNA, 25 bp, Homo sapien
agtattttatgaaaccgacgaggtg

SEQ ID NO: 5429559 - DNA, 25 bp, Homo sapien
tctgagaattttgtcccacactagt

SEQ ID NO: 5429560 - DNA, 25 bp, Homo sapien
tctagactaaatagagtatcatcca

SEQ ID NO: 5429561 - DNA, 25 bp, Homo sapien
gaagtaatttagatttgttctcctc

SEQ ID NO: 5429562 - DNA, 25 bp, Homo sapien
tttcaactcctattgtgtttctttg

SEQ ID NO: 5429563 - DNA, 25 bp, Homo sapien
tgtgtaaagtaaccaccaaatgtta

SEQ ID NO: 5429564 - DNA, 25 bp, Homo sapien
caagccaatgtgtagggcttcatgg

SEQ ID NO: 5429565 - DNA, 25 bp, Homo sapien
tgtaccccagctagtataacaggga

SEQ ID NO: 5429566 - DNA, 25 bp, Homo sapien
taagctcaagccaatgtgtagggct

SEQ ID NO: 5429567 - DNA, 25 bp, Homo sapien
ggttctgtcagcatggtcatgtacc

SEQ ID NO: 5429568 - DNA, 25 bp, Homo sapien
cccatactcatcagccaatgttgat

SEQ ID NO: 5429569 - DNA, 25 bp, Homo sapien
atgttgattcttctggtggctgagg

SEQ ID NO: 5429570 - DNA, 25 bp, Homo sapien
gactgcattgctaatcttgccattg

SEQ ID NO: 5429571 - DNA, 25 bp, Homo sapien
ctgagggtcttgttggatgactgca

SEQ ID NO: 5429572 - DNA, 25 bp, Homo sapien
acagctgaaatgttgatgctgccat

SEQ ID NO: 5429573 - DNA, 25 bp, Homo sapien
gggacagctgaaatgttgatgctgc

SEQ ID NO: 5429574 - DNA, 25 bp, Homo sapien
aggcaactgtgtcaggcagtgggga

SEQ ID NO: 5429575 - DNA, 25 bp, Homo sapien
tggggacagctgaaatgttgatgct

SEQ ID NO: 5429576 - DNA, 25 bp, Homo sapien
tcatcatcatcaagcaggcggtggt

SEQ ID NO: 5429577 - DNA, 25 bp, Homo sapien
atcatcatcaagcaggcggtggtag

SEQ ID NO: 5429578 - DNA, 25 bp, Homo sapien
agtcatcatcatcaagcaggcggtg

SEQ ID NO: 5429579 - DNA, 25 bp, Homo sapien
cagacaccactttgcggcgggtggt

SEQ ID NO: 5429580 - DNA, 25 bp, Homo sapien
gagcctcgtactccccgatctggtg

SEQ ID NO: 5429581 - DNA, 25 bp, Homo sapien
tcgtactccccgatctggtgctgtc

SEQ ID NO: 5429582 - DNA, 25 bp, Homo sapien
tcagcagagcctcgtactccccgat

SEQ ID NO: 5429583 - DNA, 25 bp, Homo sapien
gcagagcctcgtactccccgatctg

SEQ ID NO: 5429584 - DNA, 25 bp, Homo sapien
catggagtccaggtccatctttaag

SEQ ID NO: 5429585 - DNA, 25 bp, Homo sapien
ctgtacgtctcagctccgtgagcgt

SEQ ID NO: 5429586 - DNA, 25 bp, Homo sapien
gtccatctttaaggactggactgta

SEQ ID NO: 5429587 - DNA, 25 bp, Homo sapien
gtacgtctcagctccgtgagcgtca

SEQ ID NO: 5429588 - DNA, 25 bp, Homo sapien
caaccttggtggactgcgtagtgac

SEQ ID NO: 5429589 - DNA, 25 bp, Homo sapien
tctccaaccttggtggactgcgtag

SEQ ID NO: 5429590 - DNA, 25 bp, Homo sapien
accttggtggactgcgtagtgacca

SEQ ID NO: 5429591 - DNA, 25 bp, Homo sapien
agcatctccaaccttggtggactgc

SEQ ID NO: 5429592 - DNA, 25 bp, Homo sapien
ctctcagttctttcgagtcagctca

SEQ ID NO: 5429593 - DNA, 25 bp, Homo sapien
tacttcctcttcgtggttcttcttc

SEQ ID NO: 5429594 - DNA, 25 bp, Homo sapien
gctggcaatctgggcttgtaggcct

SEQ ID NO: 5429595 - DNA, 25 bp, Homo sapien
aatctgggcttgtaggccttttact

SEQ ID NO: 5429596 - DNA, 25 bp, Homo sapien
cttcctcttcgtggttcttcttcat

SEQ ID NO: 5429597 - DNA, 25 bp, Homo sapien
ctccagtggcagccaagtgacattg

SEQ ID NO: 5429598 - DNA, 25 bp, Homo sapien
cagtggcagccaagtgacattggtc

SEQ ID NO: 5429599 - DNA, 25 bp, Homo sapien
gtggcagccaagtgacattggtcat

SEQ ID NO: 5429600 - DNA, 25 bp, Homo sapien
ccaagtgacattggtcatcagtgac

SEQ ID NO: 5429601 - DNA, 25 bp, Homo sapien
tgtggagcccatggatgtcactccc

SEQ ID NO: 5429602 - DNA, 25 bp, Homo sapien
ttgtggagcccatggatgtcactcc

SEQ ID NO: 5429603 - DNA, 25 bp, Homo sapien
tggagcccatggatgtcactcccca

SEQ ID NO: 5429604 - DNA, 25 bp, Homo sapien
agcccatggatgtcactccccacag

SEQ ID NO: 5429605 - DNA, 25 bp, Homo sapien
gtgcatggccagctctgtctcatac

SEQ ID NO: 5429606 - DNA, 25 bp, Homo sapien
ggtgcatggccagctctgtctcata

SEQ ID NO: 5429607 - DNA, 25 bp, Homo sapien
gggtgcatggccagctctgtctcat

SEQ ID NO: 5429608 - DNA, 25 bp, Homo sapien
ctctaaagtcatcggctgcaagaca

SEQ ID NO: 5429609 - DNA, 25 bp, Homo sapien
tgtcaatctgcaaaacgatgccggc

SEQ ID NO: 5429610 - DNA, 25 bp, Homo sapien
aatctgcaaaacgatgccggcattg

SEQ ID NO: 5429611 - DNA, 25 bp, Homo sapien
ggctgcaagacaggcattgtcaatc

SEQ ID NO: 5429612 - DNA, 25 bp, Homo sapien
atagacgctggccatgcagctggcc

SEQ ID NO: 5429613 - DNA, 25 bp, Homo sapien
ggccatgcagctggccggccgggcg

SEQ ID NO: 5429614 - DNA, 25 bp, Homo sapien
gccgggcgccgtagttggacacctg

SEQ ID NO: 5429615 - DNA, 25 bp, Homo sapien
ggcgccgtagttggacacctggaca

SEQ ID NO: 5429616 - DNA, 25 bp, Homo sapien
gctatccagggaggagagtgagagg

SEQ ID NO: 5429617 - DNA, 25 bp, Homo sapien
ctatccagggaggagagtgagagga

SEQ ID NO: 5429618 - DNA, 25 bp, Homo sapien
gactcaggctttgccgacccgtcat

SEQ ID NO: 5429619 - DNA, 25 bp, Homo sapien
acaggactcaggctttgccgacccg

SEQ ID NO: 5429620 - DNA, 25 bp, Homo sapien
tgaaagcaccaccaatgttatgagg

SEQ ID NO: 5429621 - DNA, 25 bp, Homo sapien
gatgttgcttctatcttggacagga

SEQ ID NO: 5429622 - DNA, 25 bp, Homo sapien
tagatgcacctagactcaggccaga

SEQ ID NO: 5429623 - DNA, 25 bp, Homo sapien
caagcaagccactaacattatcagg

SEQ ID NO: 5429624 - DNA, 25 bp, Homo sapien
ttctctttctccacagttacagaat

SEQ ID NO: 5429625 - DNA, 25 bp, Homo sapien
gcatcgtactttgtatccaaatcta

SEQ ID NO: 5429626 - DNA, 25 bp, Homo sapien
ctttctccacagttacagaatgcat

SEQ ID NO: 5429627 - DNA, 25 bp, Homo sapien
ctgatggcatcgtactttgtatcca

SEQ ID NO: 5429628 - DNA, 25 bp, Homo sapien
catgtcctttattttccgactatta

SEQ ID NO: 5429629 - DNA, 25 bp, Homo sapien
tcatgtcctttattttccgactatt

SEQ ID NO: 5429630 - DNA, 25 bp, Homo sapien
atgtcctttattttccgactattat

SEQ ID NO: 5429631 - DNA, 25 bp, Homo sapien
tgtcctttattttccgactattata

SEQ ID NO: 5429632 - DNA, 25 bp, Homo sapien
tcaatctcctttgggatattctcat

SEQ ID NO: 5429633 - DNA, 25 bp, Homo sapien
ctcctttgggatattctcatttccc

SEQ ID NO: 5429634 - DNA, 25 bp, Homo sapien
aatctcctttgggatattctcattt

SEQ ID NO: 5429635 - DNA, 25 bp, Homo sapien
tctcctttgggatattctcatttcc

SEQ ID NO: 5429636 - DNA, 25 bp, Homo sapien
gccatggacccgatgggattaatta

SEQ ID NO: 5429637 - DNA, 25 bp, Homo sapien
gacccgatgggattaattaagtgtg

SEQ ID NO: 5429638 - DNA, 25 bp, Homo sapien
ttgtaaaagccatggacccgatggg

SEQ ID NO: 5429639 - DNA, 25 bp, Homo sapien
ttaagtgtgtttggtgatcagaaag

SEQ ID NO: 5429640 - DNA, 25 bp, Homo sapien
gagttgacaaccattttccttagta

SEQ ID NO: 5429641 - DNA, 25 bp, Homo sapien
tgtgaaacccgttgataagcatacc

SEQ ID NO: 5429642 - DNA, 25 bp, Homo sapien
agtcagtaaaggacaaatgaaggca

SEQ ID NO: 5429643 - DNA, 25 bp, Homo sapien
taagcataccacatgtataaatgac

SEQ ID NO: 5429644 - DNA, 25 bp, Homo sapien
acagtatagcttctggatttttctg

SEQ ID NO: 5429645 - DNA, 25 bp, Homo sapien
taacatcatttagggtaatatacag

SEQ ID NO: 5429646 - DNA, 25 bp, Homo sapien
taatatacagtatagcttctggatt

SEQ ID NO: 5429647 - DNA, 25 bp, Homo sapien
tttgtaacatcatttagggtaatat

SEQ ID NO: 5429648 - DNA, 25 bp, Homo sapien
tctcctgcagcatatattctgtgga

SEQ ID NO: 5429649 - DNA, 25 bp, Homo sapien
agtctcctgttacatttctcctgca

SEQ ID NO: 5429650 - DNA, 25 bp, Homo sapien
tgttttcctaagcagactaattata

SEQ ID NO: 5429651 - DNA, 25 bp, Homo sapien
ttgcagtagatgagtgagtctcctg

SEQ ID NO: 5429652 - DNA, 25 bp, Homo sapien
gacgcaagagcctgaacctttagcc

SEQ ID NO: 5429653 - DNA, 25 bp, Homo sapien
agcctttgttccatgacgtttgctg

SEQ ID NO: 5429654 - DNA, 25 bp, Homo sapien
ttaaatgacgcaagagcctgaacct

SEQ ID NO: 5429655 - DNA, 25 bp, Homo sapien
tgttccatgacgtttgctgatagat

SEQ ID NO: 5429656 - DNA, 25 bp, Homo sapien
gttgccttattcacgttgctcttct

SEQ ID NO: 5429657 - DNA, 25 bp, Homo sapien
cagaaccaaatccagtgtggagtct

SEQ ID NO: 5429658 - DNA, 25 bp, Homo sapien
aaacaaggtgccggagaaacacaga

SEQ ID NO: 5429659 - DNA, 25 bp, Homo sapien
ctctggtgttgccttattcacgttg

SEQ ID NO: 5429660 - DNA, 25 bp, Homo sapien
tgcttaacattgtggagcccaggaa

SEQ ID NO: 5429661 - DNA, 25 bp, Homo sapien
caaaacatgacaaggaagcagggcc

SEQ ID NO: 5429662 - DNA, 25 bp, Homo sapien
caggctggtccacgggttcagaaaa

SEQ ID NO: 5429663 - DNA, 25 bp, Homo sapien
caaagcaggacattcacggtgcaac

SEQ ID NO: 5429664 - DNA, 25 bp, Homo sapien
aatgacagaagtctttaaggtgttt

SEQ ID NO: 5429665 - DNA, 25 bp, Homo sapien
atgacagaagtctttaaggtgtttc

SEQ ID NO: 5429666 - DNA, 25 bp, Homo sapien
tgacagaagtctttaaggtgtttcg

SEQ ID NO: 5429667 - DNA, 25 bp, Homo sapien
taaaatgacagaagtctttaaggtg

SEQ ID NO: 5429668 - DNA, 25 bp, Homo sapien
ttcagcatttactaagtcttctgag

SEQ ID NO: 5429669 - DNA, 25 bp, Homo sapien
tcagcatttactaagtcttctgagt

SEQ ID NO: 5429670 - DNA, 25 bp, Homo sapien
tgcagagggcacttctttgtatgag

SEQ ID NO: 5429671 - DNA, 25 bp, Homo sapien
cagagggcacttctttgtatgagtt

SEQ ID NO: 5429672 - DNA, 25 bp, Homo sapien
caatgcagagggcacttctttgtat

SEQ ID NO: 5429673 - DNA, 25 bp, Homo sapien
cttcaatgcagagggcacttctttg

SEQ ID NO: 5429674 - DNA, 25 bp, Homo sapien
tctgaatcagcagacatgccttcat

SEQ ID NO: 5429675 - DNA, 25 bp, Homo sapien
ctctgaatcagcagacatgccttca

SEQ ID NO: 5429676 - DNA, 25 bp, Homo sapien
tgaatcagcagacatgccttcatat

SEQ ID NO: 5429677 - DNA, 25 bp, Homo sapien
aatcagcagacatgccttcatattt

SEQ ID NO: 5429678 - DNA, 25 bp, Homo sapien
ggaagggtaatgtgggaacacagga

SEQ ID NO: 5429679 - DNA, 25 bp, Homo sapien
gaagggtaatgtgggaacacaggag

SEQ ID NO: 5429680 - DNA, 25 bp, Homo sapien
gacagggtagatttccagcaagcat

SEQ ID NO: 5429681 - DNA, 25 bp, Homo sapien
ttggcactcggtaaagacaaatgcc

SEQ ID NO: 5429682 - DNA, 25 bp, Homo sapien
gcacaaggtgctgatgtagccacta

SEQ ID NO: 5429683 - DNA, 25 bp, Homo sapien
aatctgttcggtagcagttgagccc

SEQ ID NO: 5429684 - DNA, 25 bp, Homo sapien
tactctacttgaattgttgcctgga

SEQ ID NO: 5429685 - DNA, 25 bp, Homo sapien
ttacagaccggaagggctaatgctg

SEQ ID NO: 5429686 - DNA, 25 bp, Homo sapien
ttaatctcctgaaatggcatcaagg

SEQ ID NO: 5429687 - DNA, 25 bp, Homo sapien
ggattcctatggagtccaactctag

SEQ ID NO: 5429688 - DNA, 25 bp, Homo sapien
tacacctgtgatgctggagacttac

SEQ ID NO: 5429689 - DNA, 25 bp, Homo sapien
ggagacttacttcgctgccttagac

SEQ ID NO: 5429690 - DNA, 25 bp, Homo sapien
tctgtgtgctatatgaaaccgtgaa

SEQ ID NO: 5429691 - DNA, 25 bp, Homo sapien
tgatcaacccagacaatatgcagta

SEQ ID NO: 5429692 - DNA, 25 bp, Homo sapien
gacagtgcaacatccaacccaatac

SEQ ID NO: 5429693 - DNA, 25 bp, Homo sapien
atcatctctgttcgacagtgcaaca

SEQ ID NO: 5429694 - DNA, 25 bp, Homo sapien
aaactcccatgaactcttgcatgca

SEQ ID NO: 5429695 - DNA, 25 bp, Homo sapien
gagttttcagaagccacaaaactcc

SEQ ID NO: 5429696 - DNA, 25 bp, Homo sapien
tctgaaagttccactctatcaaatg

SEQ ID NO: 5429697 - DNA, 25 bp, Homo sapien
tactgctaacatgatatagaacatg

SEQ ID NO: 5429698 - DNA, 25 bp, Homo sapien
cctgctctattgtactgctaacatg

SEQ ID NO: 5429699 - DNA, 25 bp, Homo sapien
tctatcaaatgcatactcctgctct

SEQ ID NO: 5429700 - DNA, 25 bp, Homo sapien
aggaacctgtgaccttcttgcctga

SEQ ID NO: 5429701 - DNA, 25 bp, Homo sapien
cctgtgaccttcttgcctgaagtta

SEQ ID NO: 5429702 - DNA, 25 bp, Homo sapien
tgaccttcttgcctgaagttactcc

SEQ ID NO: 5429703 - DNA, 25 bp, Homo sapien
accttcttgcctgaagttactccca

SEQ ID NO: 5429704 - DNA, 25 bp, Homo sapien
tgtggtagaatcaacttggaatggg

SEQ ID NO: 5429705 - DNA, 25 bp, Homo sapien
cttagactagatgaggagagcccca

SEQ ID NO: 5429706 - DNA, 25 bp, Homo sapien
ttggatgtggtagaatcaacttgga

SEQ ID NO: 5429707 - DNA, 25 bp, Homo sapien
gaatccacttagactagatgaggag

SEQ ID NO: 5429708 - DNA, 25 bp, Homo sapien
agggtaaaccagcaggatttaacag

SEQ ID NO: 5429709 - DNA, 25 bp, Homo sapien
ggtaaaccagcaggatttaacagaa

SEQ ID NO: 5429710 - DNA, 25 bp, Homo sapien
taaaccagcaggatttaacagaaaa

SEQ ID NO: 5429711 - DNA, 25 bp, Homo sapien
cagcctagggttggggtccaagttg

SEQ ID NO: 5429712 - DNA, 25 bp, Homo sapien
gatcgtcttagtgcatcagcaatgt

SEQ ID NO: 5429713 - DNA, 25 bp, Homo sapien
gctgaatgatgtccaccaggttgtt

SEQ ID NO: 5429714 - DNA, 25 bp, Homo sapien
gacccatcactcatggagccttttg

SEQ ID NO: 5429715 - DNA, 25 bp, Homo sapien
tgtgtaaccccacaatggtggttga

SEQ ID NO: 5429716 - DNA, 25 bp, Homo sapien
ggctctactatgaaatcgatgaaac

SEQ ID NO: 5429717 - DNA, 25 bp, Homo sapien
ttgagtctgtcagaagagaaaatgt

SEQ ID NO: 5429718 - DNA, 25 bp, Homo sapien
ataggaagaagtttcggcttttgag

SEQ ID NO: 5429719 - DNA, 25 bp, Homo sapien
aaatgttggctctactatgaaatcg

SEQ ID NO: 5429720 - DNA, 25 bp, Homo sapien
ggaaaatggaagccctaattcagct

SEQ ID NO: 5429721 - DNA, 25 bp, Homo sapien
aaatggaagccctaattcagcttct

SEQ ID NO: 5429722 - DNA, 25 bp, Homo sapien
ccatggttgacttccgatcacaaag

SEQ ID NO: 5429723 - DNA, 25 bp, Homo sapien
ggttgacttccgatcacaaagtggg

SEQ ID NO: 5429724 - DNA, 25 bp, Homo sapien
ttgttctatcactttgctcctcaca

SEQ ID NO: 5429725 - DNA, 25 bp, Homo sapien
gttctatcactttgctcctcacaat

SEQ ID NO: 5429726 - DNA, 25 bp, Homo sapien
ttttgttctatcactttgctcctca

SEQ ID NO: 5429727 - DNA, 25 bp, Homo sapien
ctatcactttgctcctcacaatcat

SEQ ID NO: 5429728 - DNA, 25 bp, Homo sapien
agttggaactttaagccagccaggg

SEQ ID NO: 5429729 - DNA, 25 bp, Homo sapien
caaggcaggatggtggtactcgcta

SEQ ID NO: 5429730 - DNA, 25 bp, Homo sapien
actggaaatagcaaggaagctctgc

SEQ ID NO: 5429731 - DNA, 25 bp, Homo sapien
tgcagctggcatctgaagtagagcc

SEQ ID NO: 5429732 - DNA, 25 bp, Homo sapien
tctgatagactaataaattttgctg

SEQ ID NO: 5429733 - DNA, 25 bp, Homo sapien
tacatagacttaatacacctttctg

SEQ ID NO: 5429734 - DNA, 25 bp, Homo sapien
ccccaagaatgtgtaggtggccagt

SEQ ID NO: 5429735 - DNA, 25 bp, Homo sapien
gataatagtaagtcacaagccctgg

SEQ ID NO: 5429736 - DNA, 25 bp, Homo sapien
aaaacatttgcacagagtgtgaaag

SEQ ID NO: 5429737 - DNA, 25 bp, Homo sapien
ccaaaaacatttgcacagagtgtga

SEQ ID NO: 5429738 - DNA, 25 bp, Homo sapien
tccaaaaacatttgcacagagtgtg

SEQ ID NO: 5429739 - DNA, 25 bp, Homo sapien
tttccaaaaacatttgcacagagtg

SEQ ID NO: 5429740 - DNA, 25 bp, Homo sapien
cagggacatggttttggctctgtca

SEQ ID NO: 5429741 - DNA, 25 bp, Homo sapien
tccattagggccatggtccaccgat

SEQ ID NO: 5429742 - DNA, 25 bp, Homo sapien
ggtccaccgataatgcagcttccag

SEQ ID NO: 5429743 - DNA, 25 bp, Homo sapien
tctgctgcgtggagaatcagggaca

SEQ ID NO: 5429744 - DNA, 25 bp, Homo sapien
gctgctgcaaactgtttcttatatt

SEQ ID NO: 5429745 - DNA, 25 bp, Homo sapien
tcaggctgctgcaaactgtttctta

SEQ ID NO: 5429746 - DNA, 25 bp, Homo sapien
aggctgctgcaaactgtttcttata

SEQ ID NO: 5429747 - DNA, 25 bp, Homo sapien
tatttttaatttgctggaagtgacc

SEQ ID NO: 5429748 - DNA, 25 bp, Homo sapien
accatttcaatcactaggttccgaa

SEQ ID NO: 5429749 - DNA, 25 bp, Homo sapien
ttcaatcactaggttccgaagatcc

SEQ ID NO: 5429750 - DNA, 25 bp, Homo sapien
catttcaatcactaggttccgaaga

SEQ ID NO: 5429751 - DNA, 25 bp, Homo sapien
atgtctgtagataaaaccatttcaa

SEQ ID NO: 5429752 - DNA, 25 bp, Homo sapien
ggttcattcagccatttattgttct

SEQ ID NO: 5429753 - DNA, 25 bp, Homo sapien
tctgaagtggaacacttcaataaat

SEQ ID NO: 5429754 - DNA, 25 bp, Homo sapien
ttcaataaataatcactcaccatgt

SEQ ID NO: 5429755 - DNA, 25 bp, Homo sapien
ctgcagagtcaccaaaaggagaaag

SEQ ID NO: 5429756 - DNA, 25 bp, Homo sapien
cagtctttaagaagatatccatatt

SEQ ID NO: 5429757 - DNA, 25 bp, Homo sapien
tatctatgggaatggtaatcactga

SEQ ID NO: 5429758 - DNA, 25 bp, Homo sapien
tatcaaacgtatagcatcaaatagg

SEQ ID NO: 5429759 - DNA, 25 bp, Homo sapien
cagaaacttagacaattacagcaat

SEQ ID NO: 5429760 - DNA, 25 bp, Homo sapien
tcacgtggtgattctcaaggacaga

SEQ ID NO: 5429761 - DNA, 25 bp, Homo sapien
tcttcttgcataagtcgataagctg

SEQ ID NO: 5429762 - DNA, 25 bp, Homo sapien
caaggacagagcgatcattatacaa

SEQ ID NO: 5429763 - DNA, 25 bp, Homo sapien
ctccagtcatctttggataaattta

SEQ ID NO: 5429764 - DNA, 25 bp, Homo sapien
gtttgttgtccctgtatgctcataa

SEQ ID NO: 5429765 - DNA, 25 bp, Homo sapien
tgtttgttgtccctgtatgctcata

SEQ ID NO: 5429766 - DNA, 25 bp, Homo sapien
tgttgtccctgtatgctcataatca

SEQ ID NO: 5429767 - DNA, 25 bp, Homo sapien
tatgctcataatcatgaatggcagc

SEQ ID NO: 5429768 - DNA, 25 bp, Homo sapien
ctaaaatttccagttcagtgagcca

SEQ ID NO: 5429769 - DNA, 25 bp, Homo sapien
aaatttccagttcagtgagccagtg

SEQ ID NO: 5429770 - DNA, 25 bp, Homo sapien
taaaatttccagttcagtgagccag

SEQ ID NO: 5429771 - DNA, 25 bp, Homo sapien
tgctaaaatttccagttcagtgagc

SEQ ID NO: 5429772 - DNA, 25 bp, Homo sapien
ctgtatgaagcattatgtaatgcac

SEQ ID NO: 5429773 - DNA, 25 bp, Homo sapien
gtgacatcagctgcatgaatcaaat

SEQ ID NO: 5429774 - DNA, 25 bp, Homo sapien
tacttgctgtaaccaacttctaaag

SEQ ID NO: 5429775 - DNA, 25 bp, Homo sapien
tgcaaaggtgattaggcaagaaaca

SEQ ID NO: 5429776 - DNA, 25 bp, Homo sapien
gaatcaaattgtgatatggattttt

SEQ ID NO: 5429777 - DNA, 25 bp, Homo sapien
tcatatctggtaaacagttcataaa

SEQ ID NO: 5429778 - DNA, 25 bp, Homo sapien
tagggcaaatacatcgaaagaccat

SEQ ID NO: 5429779 - DNA, 25 bp, Homo sapien
aaacggttgataagatcatatctgg

SEQ ID NO: 5429780 - DNA, 25 bp, Homo sapien
taaacttcagactatgctctccact

SEQ ID NO: 5429781 - DNA, 25 bp, Homo sapien
gacagctgctggatatgccaaacca

SEQ ID NO: 5429782 - DNA, 25 bp, Homo sapien
tgccaaaccaaccatatgatatgtt

SEQ ID NO: 5429783 - DNA, 25 bp, Homo sapien
gctgctggatatgccaaaccaacca

SEQ ID NO: 5429784 - DNA, 25 bp, Homo sapien
ggatatgccaaaccaaccatatgat

SEQ ID NO: 5429785 - DNA, 25 bp, Homo sapien
cagatgggactgagtcagtctgaat

SEQ ID NO: 5429786 - DNA, 25 bp, Homo sapien
aaattccagcttgaacagcatgcac

SEQ ID NO: 5429787 - DNA, 25 bp, Homo sapien
gcacaatgctccgaaattttggttt

SEQ ID NO: 5429788 - DNA, 25 bp, Homo sapien
aaccagtcccggacttcagatggga

SEQ ID NO: 5429789 - DNA, 25 bp, Homo sapien
atagtttgtttatctttttgcccat

SEQ ID NO: 5429790 - DNA, 25 bp, Homo sapien
gacatttggatggttttgatttacc

SEQ ID NO: 5429791 - DNA, 25 bp, Homo sapien
ctgatctgacatttggatggttttg

SEQ ID NO: 5429792 - DNA, 25 bp, Homo sapien
cactgaactagaaaattaaagcaaa

SEQ ID NO: 5429793 - DNA, 25 bp, Homo sapien
gataatgccatttctactatctctt

SEQ ID NO: 5429794 - DNA, 25 bp, Homo sapien
tttaaagataatgccatttctacta

SEQ ID NO: 5429795 - DNA, 25 bp, Homo sapien
aaattagattccctagcccatttca

SEQ ID NO: 5429796 - DNA, 25 bp, Homo sapien
ttgaaattagattccctagcccatt

SEQ ID NO: 5429797 - DNA, 25 bp, Homo sapien
tctgatcaacatgagcagctcctca

SEQ ID NO: 5429798 - DNA, 25 bp, Homo sapien
tcttcttccgtctgatcaacatgag

SEQ ID NO: 5429799 - DNA, 25 bp, Homo sapien
tcgtacccgccttgtactctgtgtc

SEQ ID NO: 5429800 - DNA, 25 bp, Homo sapien
ctgtgtcttcttccgtctgatcaac

SEQ ID NO: 5429801 - DNA, 25 bp, Homo sapien
tatttaaaatggcaagcttaccaat

SEQ ID NO: 5429802 - DNA, 25 bp, Homo sapien
agtatttaaaatggcaagcttacca

SEQ ID NO: 5429803 - DNA, 25 bp, Homo sapien
taaaatggcaagcttaccaatttat

SEQ ID NO: 5429804 - DNA, 25 bp, Homo sapien
atttaaaatggcaagcttaccaatt

SEQ ID NO: 5429805 - DNA, 25 bp, Homo sapien
gagaagtcagttatgccgaccttag

SEQ ID NO: 5429806 - DNA, 25 bp, Homo sapien
tatgaagactgaacttttgggtgga

SEQ ID NO: 5429807 - DNA, 25 bp, Homo sapien
tgaagttagatgtggctttctccaa

SEQ ID NO: 5429808 - DNA, 25 bp, Homo sapien
caaatcttggcgtaaatgaggtcaa

SEQ ID NO: 5429809 - DNA, 25 bp, Homo sapien
agtgcttggtgcctcctccatatcc

SEQ ID NO: 5429810 - DNA, 25 bp, Homo sapien
gtgcttggtgcctcctccatatcca

SEQ ID NO: 5429811 - DNA, 25 bp, Homo sapien
gcttggtgcctcctccatatccaat

SEQ ID NO: 5429812 - DNA, 25 bp, Homo sapien
ggagtgcttggtgcctcctccatat

SEQ ID NO: 5429813 - DNA, 25 bp, Homo sapien
gagaggcagaaaggacccaaagaat

SEQ ID NO: 5429814 - DNA, 25 bp, Homo sapien
agaaagagtcaaattgcttggagag

SEQ ID NO: 5429815 - DNA, 25 bp, Homo sapien
gggaagggcctgagaaagagtcaaa

SEQ ID NO: 5429816 - DNA, 25 bp, Homo sapien
caaagaatgttgaggggaagggcct

SEQ ID NO: 5429817 - DNA, 25 bp, Homo sapien
ttgaactcatgcttgggatcctggc

SEQ ID NO: 5429818 - DNA, 25 bp, Homo sapien
attttagtcacagaacttgaggtcc

SEQ ID NO: 5429819 - DNA, 25 bp, Homo sapien
caccaagatgcttgataagggacct

SEQ ID NO: 5429820 - DNA, 25 bp, Homo sapien
tcctgaactcaggacagcaagacat

SEQ ID NO: 5429821 - DNA, 25 bp, Homo sapien
tctctggaatactcacggcatcgaa

SEQ ID NO: 5429822 - DNA, 25 bp, Homo sapien
cctctctggaatactcacggcatcg

SEQ ID NO: 5429823 - DNA, 25 bp, Homo sapien
tacctctctggaatactcacggcat

SEQ ID NO: 5429824 - DNA, 25 bp, Homo sapien
ctggaatactcacggcatcgaattt

SEQ ID NO: 5429825 - DNA, 25 bp, Homo sapien
gtcgacgacgttaacatcacctctt

SEQ ID NO: 5429826 - DNA, 25 bp, Homo sapien
tcatcgatataaactgcttccagca

SEQ ID NO: 5429827 - DNA, 25 bp, Homo sapien
aatattcttctttaagtcgacgacg

SEQ ID NO: 5429828 - DNA, 25 bp, Homo sapien
ttccagcacagatgccgcatattca

SEQ ID NO: 5429829 - DNA, 25 bp, Homo sapien
tcttgctgaactctctttctcccat

SEQ ID NO: 5429830 - DNA, 25 bp, Homo sapien
gtttttgaatcactgaccatgacaa

SEQ ID NO: 5429831 - DNA, 25 bp, Homo sapien
gtagtttttgaatcactgaccatga

SEQ ID NO: 5429832 - DNA, 25 bp, Homo sapien
ttttgaatcactgaccatgacaaat

SEQ ID NO: 5429833 - DNA, 25 bp, Homo sapien
ttggtagtttttgaatcactgacca

SEQ ID NO: 5429834 - DNA, 25 bp, Homo sapien
actctggtaagttcaaccctgttct

SEQ ID NO: 5429835 - DNA, 25 bp, Homo sapien
ttcactctggtaagttcaaccctgt

SEQ ID NO: 5429836 - DNA, 25 bp, Homo sapien
ccagaaggagccttcactctggtaa

SEQ ID NO: 5429837 - DNA, 25 bp, Homo sapien
cagaaggagccttcactctggtaag

SEQ ID NO: 5429838 - DNA, 25 bp, Homo sapien
tacaaagatacaacctgaagttttc

SEQ ID NO: 5429839 - DNA, 25 bp, Homo sapien
taaccaatgcacgagttagcttagc

SEQ ID NO: 5429840 - DNA, 25 bp, Homo sapien
cacgagttagcttagctatcttcac

SEQ ID NO: 5429841 - DNA, 25 bp, Homo sapien
caatgcacgagttagcttagctatc

SEQ ID NO: 5429842 - DNA, 25 bp, Homo sapien
ttttaaccaatgcacgagttagctt

SEQ ID NO: 5429843 - DNA, 25 bp, Homo sapien
tagcaaacttgcacgcagataattg

SEQ ID NO: 5429844 - DNA, 25 bp, Homo sapien
ctgcacagctatatctaaggatact

SEQ ID NO: 5429845 - DNA, 25 bp, Homo sapien
cagataattgttttgccgcctctga

SEQ ID NO: 5429846 - DNA, 25 bp, Homo sapien
tccacccatcaaagtggcactgcag

SEQ ID NO: 5429847 - DNA, 25 bp, Homo sapien
cagtcctaatcttcatatcgagaaa

SEQ ID NO: 5429848 - DNA, 25 bp, Homo sapien
aatcttcatatcgagaaatgattcc

SEQ ID NO: 5429849 - DNA, 25 bp, Homo sapien
cttcatatcgagaaatgattcctgc

SEQ ID NO: 5429850 - DNA, 25 bp, Homo sapien
cctaatcttcatatcgagaaatgat

SEQ ID NO: 5429851 - DNA, 25 bp, Homo sapien
tctctagcatcactctcttggttct

SEQ ID NO: 5429852 - DNA, 25 bp, Homo sapien
tctctcccacacagtcctttacagc

SEQ ID NO: 5429853 - DNA, 25 bp, Homo sapien
cttggtttctctagcatcactctct

SEQ ID NO: 5429854 - DNA, 25 bp, Homo sapien
tggccccatagggaaatcttgctcc

SEQ ID NO: 5429855 - DNA, 25 bp, Homo sapien
ctgtcatttgatgttccagagccat

SEQ ID NO: 5429856 - DNA, 25 bp, Homo sapien
agagccattaggtctatatcacata

SEQ ID NO: 5429857 - DNA, 25 bp, Homo sapien
gtcatttgatgttccagagccatta

SEQ ID NO: 5429858 - DNA, 25 bp, Homo sapien
atcacataggtatgttcctactgga

SEQ ID NO: 5429859 - DNA, 25 bp, Homo sapien
tctcctttagagtcatgatgcctgg

SEQ ID NO: 5429860 - DNA, 25 bp, Homo sapien
cattcaggcttggagtgtagtggtg

SEQ ID NO: 5429861 - DNA, 25 bp, Homo sapien
gcaacctcaaacctctgggcttaaa

SEQ ID NO: 5429862 - DNA, 25 bp, Homo sapien
cctcaaacctctgggcttaaacaat

SEQ ID NO: 5429863 - DNA, 25 bp, Homo sapien
actgcaacctcaaacctctgggctt

SEQ ID NO: 5429864 - DNA, 25 bp, Homo sapien
tatatttttgcatcatactataaaa

SEQ ID NO: 5429865 - DNA, 25 bp, Homo sapien
tttttgaagccatcactgaaattta

SEQ ID NO: 5429866 - DNA, 25 bp, Homo sapien
tgaagcctggccttttaatcaatat

SEQ ID NO: 5429867 - DNA, 25 bp, Homo sapien
taatcaatatttttgaagccatcac

SEQ ID NO: 5429868 - DNA, 25 bp, Homo sapien
taactcaagggtacgtacagaccag

SEQ ID NO: 5429869 - DNA, 25 bp, Homo sapien
tctgtggatagaggaaagaactcaa

SEQ ID NO: 5429870 - DNA, 25 bp, Homo sapien
tcaaaaccttaccttgtgacagagc

SEQ ID NO: 5429871 - DNA, 25 bp, Homo sapien
gctttgggctactagatgtctgaga

SEQ ID NO: 5429872 - DNA, 25 bp, Homo sapien
tctagattaacactggctcccagat

SEQ ID NO: 5429873 - DNA, 25 bp, Homo sapien
tgcatatacatgaaattacaccgtg

SEQ ID NO: 5429874 - DNA, 25 bp, Homo sapien
tacaacctgatgagcttttctagat

SEQ ID NO: 5429875 - DNA, 25 bp, Homo sapien
ttgggctatgagagatggaacttct

SEQ ID NO: 5429876 - DNA, 25 bp, Homo sapien
tctactgcataactgctatgaggag

SEQ ID NO: 5429877 - DNA, 25 bp, Homo sapien
caaaatgtgagttttccgaagatac

SEQ ID NO: 5429878 - DNA, 25 bp, Homo sapien
ggaaggtattgtgtttgacattaca

SEQ ID NO: 5429879 - DNA, 25 bp, Homo sapien
tgtatttatacaactcatctactgc

SEQ ID NO: 5429880 - DNA, 25 bp, Homo sapien
tacctttgaggttttgggattcaga

SEQ ID NO: 5429881 - DNA, 25 bp, Homo sapien
gggtgagcaccatcttatcagctgt

SEQ ID NO: 5429882 - DNA, 25 bp, Homo sapien
tcagtgcagacagaataaggcaggc

SEQ ID NO: 5429883 - DNA, 25 bp, Homo sapien
tttggacgcttggacttacacgggc

SEQ ID NO: 5429884 - DNA, 25 bp, Homo sapien
gcttcctcatatctacaccctttgg

SEQ ID NO: 5429885 - DNA, 25 bp, Homo sapien
aaagcataagcgttttaagagcaga

SEQ ID NO: 5429886 - DNA, 25 bp, Homo sapien
gcagaataatcgcattaactgatcc

SEQ ID NO: 5429887 - DNA, 25 bp, Homo sapien
tcttcaacagcggaatgaactgcag

SEQ ID NO: 5429888 - DNA, 25 bp, Homo sapien
tacctttttgaagtcgcacgtgcac

SEQ ID NO: 5429889 - DNA, 25 bp, Homo sapien
gcacttgggagaatatagatactac

SEQ ID NO: 5429890 - DNA, 25 bp, Homo sapien
tcatctgggcaactatcataccttt

SEQ ID NO: 5429891 - DNA, 25 bp, Homo sapien
ctttccaaactgctgtgggtgccct

SEQ ID NO: 5429892 - DNA, 25 bp, Homo sapien
caagagtcacgttgatccaggcaag

SEQ ID NO: 5429893 - DNA, 25 bp, Homo sapien
gatctattgtgctgcaaggagccca

SEQ ID NO: 5429894 - DNA, 25 bp, Homo sapien
gctgagcagtgtgtccatagaggcc

SEQ ID NO: 5429895 - DNA, 25 bp, Homo sapien
tagaggccacataagacaggcacgt

SEQ ID NO: 5429896 - DNA, 25 bp, Homo sapien
cctaagttattgcagccatgagagc

SEQ ID NO: 5429897 - DNA, 25 bp, Homo sapien
catgctggtcaagctccgaaaggct

SEQ ID NO: 5429898 - DNA, 25 bp, Homo sapien
tatcaactgatagaagcccatgcga

SEQ ID NO: 5429899 - DNA, 25 bp, Homo sapien
gctgaagtgtggagacgactcatca

SEQ ID NO: 5429900 - DNA, 25 bp, Homo sapien
tgtagttattggcactctccaaata

SEQ ID NO: 5429901 - DNA, 25 bp, Homo sapien
tctccaaatacttccagggagaaag

SEQ ID NO: 5429902 - DNA, 25 bp, Homo sapien
tagttgaatgatccataaaaataaa

SEQ ID NO: 5429903 - DNA, 25 bp, Homo sapien
tgtcacaaaggaggatactatctgt

SEQ ID NO: 5429904 - DNA, 25 bp, Homo sapien
cttgctggtctcgagatagtgagtg

SEQ ID NO: 5429905 - DNA, 25 bp, Homo sapien
tgagtgtgttctcatatatgatggt

SEQ ID NO: 5429906 - DNA, 25 bp, Homo sapien
tttcaccctgattgtaagtttcgta

SEQ ID NO: 5429907 - DNA, 25 bp, Homo sapien
ctgattgtaagtttcgtatggcctc

SEQ ID NO: 5429908 - DNA, 25 bp, Homo sapien
caagccataatcagggacctgagct

SEQ ID NO: 5429909 - DNA, 25 bp, Homo sapien
tcaagccataatcagggacctgagc

SEQ ID NO: 5429910 - DNA, 25 bp, Homo sapien
gccataatcagggacctgagctcac

SEQ ID NO: 5429911 - DNA, 25 bp, Homo sapien
aagccataatcagggacctgagctc

SEQ ID NO: 5429912 - DNA, 25 bp, Homo sapien
aactgaggatgctcagagttgtgca

SEQ ID NO: 5429913 - DNA, 25 bp, Homo sapien
tgcaaacttgcataacctatactct

SEQ ID NO: 5429914 - DNA, 25 bp, Homo sapien
cttttgatggtaccaagaacaccga

SEQ ID NO: 5429915 - DNA, 25 bp, Homo sapien
gagttgtgcagtaccgcttcccatg

SEQ ID NO: 5429916 - DNA, 25 bp, Homo sapien
ttattgttctgatttactgaaactt

SEQ ID NO: 5429917 - DNA, 25 bp, Homo sapien
attgttctgatttactgaaacttaa

SEQ ID NO: 5429918 - DNA, 25 bp, Homo sapien
tattgttctgatttactgaaactta

SEQ ID NO: 5429919 - DNA, 25 bp, Homo sapien
agagcaggaacaattcaagatcttt

SEQ ID NO: 5429920 - DNA, 25 bp, Homo sapien
aagagcaggaacaattcaagatctt

SEQ ID NO: 5429921 - DNA, 25 bp, Homo sapien
ccctcaaccccacaagatggattaa

SEQ ID NO: 5429922 - DNA, 25 bp, Homo sapien
ctcaaccccacaagatggattaaag

SEQ ID NO: 5429923 - DNA, 25 bp, Homo sapien
cctcaaccccacaagatggattaaa

SEQ ID NO: 5429924 - DNA, 25 bp, Homo sapien
ctgcacccatttagcattatttagc

SEQ ID NO: 5429925 - DNA, 25 bp, Homo sapien
tggcaacaatggacttcaggaatgg

SEQ ID NO: 5429926 - DNA, 25 bp, Homo sapien
catggcaacaatggacttcaggaat

SEQ ID NO: 5429927 - DNA, 25 bp, Homo sapien
ccactacttcaacaagcatggcaac

SEQ ID NO: 5429928 - DNA, 25 bp, Homo sapien
agcatggcaacaatggacttcagga

SEQ ID NO: 5429929 - DNA, 25 bp, Homo sapien
tcttgccgtgacaaaggacagctgc

SEQ ID NO: 5429930 - DNA, 25 bp, Homo sapien
ttcttgccgtgacaaaggacagctg

SEQ ID NO: 5429931 - DNA, 25 bp, Homo sapien
attcttgccgtgacaaaggacagct

SEQ ID NO: 5429932 - DNA, 25 bp, Homo sapien
ttgccgtgacaaaggacagctgcat

SEQ ID NO: 5429933 - DNA, 25 bp, Homo sapien
ctcactgcagtttctaaggctatcc

SEQ ID NO: 5429934 - DNA, 25 bp, Homo sapien
gacacgtgcccctgacattagtaca

SEQ ID NO: 5429935 - DNA, 25 bp, Homo sapien
tctcttgaattggtccaggctgact

SEQ ID NO: 5429936 - DNA, 25 bp, Homo sapien
tctttctaaggtgcacgtggccggc

SEQ ID NO: 5429937 - DNA, 25 bp, Homo sapien
tacctgcatactgacagagctcact

SEQ ID NO: 5429938 - DNA, 25 bp, Homo sapien
ggtacctgcatactgacagagctca

SEQ ID NO: 5429939 - DNA, 25 bp, Homo sapien
taagggtacctgcatactgacagag

SEQ ID NO: 5429940 - DNA, 25 bp, Homo sapien
ggtggtaagggtacctgcatactga

SEQ ID NO: 5429941 - DNA, 25 bp, Homo sapien
ccgcaactgtactccgctaattttt

SEQ ID NO: 5429942 - DNA, 25 bp, Homo sapien
gcccgcaactgtactccgctaattt

SEQ ID NO: 5429943 - DNA, 25 bp, Homo sapien
gcgcccgcaactgtactccgctaat

SEQ ID NO: 5429944 - DNA, 25 bp, Homo sapien
caggcgcccgcaactgtactccgct

SEQ ID NO: 5429945 - DNA, 25 bp, Homo sapien
ggcaggagcttggtctaaaaatgct

SEQ ID NO: 5429946 - DNA, 25 bp, Homo sapien
gcaaagtattactgatgggaacatc

SEQ ID NO: 5429947 - DNA, 25 bp, Homo sapien
taagcagcctgacactaaacttcaa

SEQ ID NO: 5429948 - DNA, 25 bp, Homo sapien
tcaaataagagccaccctccaatgc

SEQ ID NO: 5429949 - DNA, 25 bp, Homo sapien
ttttatttgtggcagtatcccggca

SEQ ID NO: 5429950 - DNA, 25 bp, Homo sapien
agtatcccggcaaatggctttctta

SEQ ID NO: 5429951 - DNA, 25 bp, Homo sapien
ttgtggcagtatcccggcaaatggc

SEQ ID NO: 5429952 - DNA, 25 bp, Homo sapien
ggctttcttagttacctttctgcat

SEQ ID NO: 5429953 - DNA, 25 bp, Homo sapien
ttcagtctgttctcctgtaagatac

SEQ ID NO: 5429954 - DNA, 25 bp, Homo sapien
ttcaggcgctgccacattttttcag

SEQ ID NO: 5429955 - DNA, 25 bp, Homo sapien
tcagtctgttctcctgtaagatact

SEQ ID NO: 5429956 - DNA, 25 bp, Homo sapien
gactctgacagatttgctattgact

SEQ ID NO: 5429957 - DNA, 25 bp, Homo sapien
caaaacagtgctgatgtacaaagct

SEQ ID NO: 5429958 - DNA, 25 bp, Homo sapien
gactttgacaggcatatatccactg

SEQ ID NO: 5429959 - DNA, 25 bp, Homo sapien
tcagtttcagcagctagaacaagca

SEQ ID NO: 5429960 - DNA, 25 bp, Homo sapien
tgtgagcctgctactgtactactga

SEQ ID NO: 5429961 - DNA, 25 bp, Homo sapien
ctcacaagaacaatccgtacatgtg

SEQ ID NO: 5429962 - DNA, 25 bp, Homo sapien
caatccgtacatgtgagcctgctac

SEQ ID NO: 5429963 - DNA, 25 bp, Homo sapien
tacatgtgagcctgctactgtacta

SEQ ID NO: 5429964 - DNA, 25 bp, Homo sapien
gactgagtactcaagctctccccaa

SEQ ID NO: 5429965 - DNA, 25 bp, Homo sapien
gactttcgcgctccagaagaagctg

SEQ ID NO: 5429966 - DNA, 25 bp, Homo sapien
ctctctaccaacagaacaagggcag

SEQ ID NO: 5429967 - DNA, 25 bp, Homo sapien
cagaattcctacagtttacgagctc

SEQ ID NO: 5429968 - DNA, 25 bp, Homo sapien
ttctcctagcaactccacacagtag

SEQ ID NO: 5429969 - DNA, 25 bp, Homo sapien
cagtaggtaactgccaatttaacca

SEQ ID NO: 5429970 - DNA, 25 bp, Homo sapien
tcctagcaactccacacagtaggta

SEQ ID NO: 5429971 - DNA, 25 bp, Homo sapien
cagtggaaaatacggcagctgcaca

SEQ ID NO: 5429972 - DNA, 25 bp, Homo sapien
ttcttccttgccaaaccaataccag

SEQ ID NO: 5429973 - DNA, 25 bp, Homo sapien
ccaaaccaataccagaggaacaagt

SEQ ID NO: 5429974 - DNA, 25 bp, Homo sapien
ttgccaaaccaataccagaggaaca

SEQ ID NO: 5429975 - DNA, 25 bp, Homo sapien
ttccttgccaaaccaataccagagg

SEQ ID NO: 5429976 - DNA, 25 bp, Homo sapien
ctccaaaaggctgttgaggaacgtt

SEQ ID NO: 5429977 - DNA, 25 bp, Homo sapien
tcatcgctaatatcaaagcctaagc

SEQ ID NO: 5429978 - DNA, 25 bp, Homo sapien
tcaatctcagtgactccaaaaggct

SEQ ID NO: 5429979 - DNA, 25 bp, Homo sapien
caggaaacatattctttgatcatcg

SEQ ID NO: 5429980 - DNA, 25 bp, Homo sapien
ttcatgtgtcacaactatgttctcc

SEQ ID NO: 5429981 - DNA, 25 bp, Homo sapien
actatgttctccctccattgaacca

SEQ ID NO: 5429982 - DNA, 25 bp, Homo sapien
taggccattaattctctctcatcta

SEQ ID NO: 5429983 - DNA, 25 bp, Homo sapien
agccttccttcatgtgtcacaacta

SEQ ID NO: 5429984 - DNA, 25 bp, Homo sapien
cagcagcttgaagatcagccaaggg

SEQ ID NO: 5429985 - DNA, 25 bp, Homo sapien
gaagatcagccaagggctatgagta

SEQ ID NO: 5429986 - DNA, 25 bp, Homo sapien
gctatgagtatatagagccactttg

SEQ ID NO: 5429987 - DNA, 25 bp, Homo sapien
tatagagccactttgactgtcattg

SEQ ID NO: 5429988 - DNA, 25 bp, Homo sapien
tacactccgttagtcagaatatttc

SEQ ID NO: 5429989 - DNA, 25 bp, Homo sapien
tattatacctgaggagatgctcaca

SEQ ID NO: 5429990 - DNA, 25 bp, Homo sapien
gcctatctattgttattatacctga

SEQ ID NO: 5429991 - DNA, 25 bp, Homo sapien
tatcccaaaccttagcatgaaacaa

SEQ ID NO: 5429992 - DNA, 25 bp, Homo sapien
tatagttgaggagtcggtcagaccc

SEQ ID NO: 5429993 - DNA, 25 bp, Homo sapien
tgtacgggaagttcagaaacgctgc

SEQ ID NO: 5429994 - DNA, 25 bp, Homo sapien
tcagcaaagcgaactttctcccatg

SEQ ID NO: 5429995 - DNA, 25 bp, Homo sapien
gagtctcacaggatgcccgatgagg

SEQ ID NO: 5429996 - DNA, 25 bp, Homo sapien
gtaagcctcattcttaataagacgg

SEQ ID NO: 5429997 - DNA, 25 bp, Homo sapien
cagttgttggagtcagaataggagc

SEQ ID NO: 5429998 - DNA, 25 bp, Homo sapien
taagacggtccagttgttggagtca

SEQ ID NO: 5429999 - DNA, 25 bp, Homo sapien
attctgagccttgcgagtagtaagc

SEQ ID NO: 5430000 - DNA, 25 bp, Homo sapien
catgttatggtcactgcaatttctg

SEQ ID NO: 5430001 - DNA, 25 bp, Homo sapien
taagagtagcctgaggtagcaccaa

SEQ ID NO: 5430002 - DNA, 25 bp, Homo sapien
tcccaagggctcagagacgtaggat

SEQ ID NO: 5430003 - DNA, 25 bp, Homo sapien
agggctcagagacgtaggatttgta

SEQ ID NO: 5430004 - DNA, 25 bp, Homo sapien
ttaagagtagcctgaggtagcacca

SEQ ID NO: 5430005 - DNA, 25 bp, Homo sapien
tcagtattacctgactgttgtaggc

SEQ ID NO: 5430006 - DNA, 25 bp, Homo sapien
catttgatgaccctccaaccctgtc

SEQ ID NO: 5430007 - DNA, 25 bp, Homo sapien
cctcctcctctgacgtaatgttttg

SEQ ID NO: 5430008 - DNA, 25 bp, Homo sapien
tcttgttttcccagtgaagctagcc

SEQ ID NO: 5430009 - DNA, 25 bp, Homo sapien
caaatgccacgtacataaggttgaa

SEQ ID NO: 5430010 - DNA, 25 bp, Homo sapien
tgaatatattgccatgctcccccga

SEQ ID NO: 5430011 - DNA, 25 bp, Homo sapien
tcttagcacatgctggtcatccaat

SEQ ID NO: 5430012 - DNA, 25 bp, Homo sapien
cttggtcatagatacgttgggtggc

SEQ ID NO: 5430013 - DNA, 25 bp, Homo sapien
tacttgtaatattggtcctaaaagc

SEQ ID NO: 5430014 - DNA, 25 bp, Homo sapien
tgaccagatgatagaactattggag

SEQ ID NO: 5430015 - DNA, 25 bp, Homo sapien
cttgatgcagcgcaggctgtttgca

SEQ ID NO: 5430016 - DNA, 25 bp, Homo sapien
cgcaggctgtttgcatggcgaccac

SEQ ID NO: 5430017 - DNA, 25 bp, Homo sapien
ggctcttgatgcagcgcaggctgtt

SEQ ID NO: 5430018 - DNA, 25 bp, Homo sapien
gtttgcatggcgaccactggatggc

SEQ ID NO: 5430019 - DNA, 25 bp, Homo sapien
tatatcgccagtccgtactcagaca

SEQ ID NO: 5430020 - DNA, 25 bp, Homo sapien
tttggggctggtaataaagatactc

SEQ ID NO: 5430021 - DNA, 25 bp, Homo sapien
agtttgcaaacttagtatccctttg

SEQ ID NO: 5430022 - DNA, 25 bp, Homo sapien
gtaagattagtgctaacagcagaca

SEQ ID NO: 5430023 - DNA, 25 bp, Homo sapien
gatacttaagaaaccgattccatgc

SEQ ID NO: 5430024 - DNA, 25 bp, Homo sapien
ggtagtgttaggtgccttccaagtc

SEQ ID NO: 5430025 - DNA, 25 bp, Homo sapien
gtgttaggtgccttccaagtcatca

SEQ ID NO: 5430026 - DNA, 25 bp, Homo sapien
ttccatgcggttgcgagggcttcca

SEQ ID NO: 5430027 - DNA, 25 bp, Homo sapien
gaaaggcaatggcttttctgtaggg

SEQ ID NO: 5430028 - DNA, 25 bp, Homo sapien
agaaaggcaatggcttttctgtagg

SEQ ID NO: 5430029 - DNA, 25 bp, Homo sapien
aaaggcaatggcttttctgtagggg

SEQ ID NO: 5430030 - DNA, 25 bp, Homo sapien
ccccgtgctgttctggttcctgttt

SEQ ID NO: 5430031 - DNA, 25 bp, Homo sapien
gctgttctggttcctgtttttcctc

SEQ ID NO: 5430032 - DNA, 25 bp, Homo sapien
ccgtgctgttctggttcctgttttt

SEQ ID NO: 5430033 - DNA, 25 bp, Homo sapien
tgttctggttcctgtttttcctcac

SEQ ID NO: 5430034 - DNA, 25 bp, Homo sapien
agagctccaggatctacagtgcact

SEQ ID NO: 5430035 - DNA, 25 bp, Homo sapien
tgaagcgtagagtggaatctctccc

SEQ ID NO: 5430036 - DNA, 25 bp, Homo sapien
tctggtgggtaaagaggataccacg

SEQ ID NO: 5430037 - DNA, 25 bp, Homo sapien
gataccacgcagagcgtaccggtgc

SEQ ID NO: 5430038 - DNA, 25 bp, Homo sapien
gacagatgacatcagaagacaccta

SEQ ID NO: 5430039 - DNA, 25 bp, Homo sapien
taaaacgattcttagctcagagcca

SEQ ID NO: 5430040 - DNA, 25 bp, Homo sapien
tttggctgacctgaaaagaggtaac

SEQ ID NO: 5430041 - DNA, 25 bp, Homo sapien
caggtggctggcttgaacatgagtc

SEQ ID NO: 5430042 - DNA, 25 bp, Homo sapien
tgcagcagtatatgtgcacacagta

SEQ ID NO: 5430043 - DNA, 25 bp, Homo sapien
ttgagcaacagtaagtgcacaaatt

SEQ ID NO: 5430044 - DNA, 25 bp, Homo sapien
aattctgtagtttgccgtatcatcc

SEQ ID NO: 5430045 - DNA, 25 bp, Homo sapien
ttaatttttcacagccgagaaacag

SEQ ID NO: 5430046 - DNA, 25 bp, Homo sapien
ccataattaatgttaaaatagactt

SEQ ID NO: 5430047 - DNA, 25 bp, Homo sapien
tgttaaaatagactttgttcttcat

SEQ ID NO: 5430048 - DNA, 25 bp, Homo sapien
tcataagggttattatagccataat

SEQ ID NO: 5430049 - DNA, 25 bp, Homo sapien
tagccataattaatgttaaaataga

SEQ ID NO: 5430050 - DNA, 25 bp, Homo sapien
gttggcagaacctagcacattgttg

SEQ ID NO: 5430051 - DNA, 25 bp, Homo sapien
tgttgacccgtagaagcacagtgtg

SEQ ID NO: 5430052 - DNA, 25 bp, Homo sapien
ccacatgtgtcttattccctgcagt

SEQ ID NO: 5430053 - DNA, 25 bp, Homo sapien
tgtcttattccctgcagtgttggca

SEQ ID NO: 5430054 - DNA, 25 bp, Homo sapien
caaaccagtttatctgcaagagaag

SEQ ID NO: 5430055 - DNA, 25 bp, Homo sapien
caagagaagtgtgtgaagttagact

SEQ ID NO: 5430056 - DNA, 25 bp, Homo sapien
ggaacatcgtaatcctccttgtcat

SEQ ID NO: 5430057 - DNA, 25 bp, Homo sapien
tccgctaatggaacatcgtaatcct

SEQ ID NO: 5430058 - DNA, 25 bp, Homo sapien
gtgttagagactctgtagactgaat

SEQ ID NO: 5430059 - DNA, 25 bp, Homo sapien
gcaagtgttagagactctgtagact

SEQ ID NO: 5430060 - DNA, 25 bp, Homo sapien
tagcagcaagtgttagagactctgt

SEQ ID NO: 5430061 - DNA, 25 bp, Homo sapien
ttaatagcagcaagtgttagagact

SEQ ID NO: 5430062 - DNA, 25 bp, Homo sapien
ttccacaatatcttgaatcttgtct

SEQ ID NO: 5430063 - DNA, 25 bp, Homo sapien
caagaattccacaatatcttgaatc

SEQ ID NO: 5430064 - DNA, 25 bp, Homo sapien
gaattccacaatatcttgaatcttg

SEQ ID NO: 5430065 - DNA, 25 bp, Homo sapien
aattccacaatatcttgaatcttgt

SEQ ID NO: 5430066 - DNA, 25 bp, Homo sapien
caaacggagagagggtgtctggccc

SEQ ID NO: 5430067 - DNA, 25 bp, Homo sapien
aaacggagagagggtgtctggccca

SEQ ID NO: 5430068 - DNA, 25 bp, Homo sapien
aacggagagagggtgtctggcccat

SEQ ID NO: 5430069 - DNA, 25 bp, Homo sapien
gctgtttcaaatcgataagcagtga

SEQ ID NO: 5430070 - DNA, 25 bp, Homo sapien
tcaaatcgataagcagtgacagtaa

SEQ ID NO: 5430071 - DNA, 25 bp, Homo sapien
gtttcaaatcgataagcagtgacag

SEQ ID NO: 5430072 - DNA, 25 bp, Homo sapien
acagctgtttcaaatcgataagcag

SEQ ID NO: 5430073 - DNA, 25 bp, Homo sapien
gctctggagccacgtgccactggtt

SEQ ID NO: 5430074 - DNA, 25 bp, Homo sapien
aagctccttagggtcggatctggct

SEQ ID NO: 5430075 - DNA, 25 bp, Homo sapien
tcctgggggtgcatgttagagctct

SEQ ID NO: 5430076 - DNA, 25 bp, Homo sapien
gctggttctccaagagttcagccat

SEQ ID NO: 5430077 - DNA, 25 bp, Homo sapien
ccacaacagtgtgcgtgacaaccgg

SEQ ID NO: 5430078 - DNA, 25 bp, Homo sapien
tggccacaacagtgtgcgtgacaac

SEQ ID NO: 5430079 - DNA, 25 bp, Homo sapien
acaacagtgtgcgtgacaaccggac

SEQ ID NO: 5430080 - DNA, 25 bp, Homo sapien
gagattggccacaacagtgtgcgtg

SEQ ID NO: 5430081 - DNA, 25 bp, Homo sapien
cagatgctccgccatttacgatggg

SEQ ID NO: 5430082 - DNA, 25 bp, Homo sapien
gaatcattgtaagctagggaccatc

SEQ ID NO: 5430083 - DNA, 25 bp, Homo sapien
ttattttcagcacgccacagcttag

SEQ ID NO: 5430084 - DNA, 25 bp, Homo sapien
aaaaactaaccctggtgcacgtgca

SEQ ID NO: 5430085 - DNA, 25 bp, Homo sapien
gcttgattgctttgcctatgtgaca

SEQ ID NO: 5430086 - DNA, 25 bp, Homo sapien
cattaacaccccagcggctactggt

SEQ ID NO: 5430087 - DNA, 25 bp, Homo sapien
taaggctgtaattagatcggcagag

SEQ ID NO: 5430088 - DNA, 25 bp, Homo sapien
catttggaactttctaagcatgagg

SEQ ID NO: 5430089 - DNA, 25 bp, Homo sapien
catgattagtgaaatagaaaactca

SEQ ID NO: 5430090 - DNA, 25 bp, Homo sapien
tgatgtgcaatagtgcaattttcct

SEQ ID NO: 5430091 - DNA, 25 bp, Homo sapien
tagtaaacaatagaatatgatgtgc

SEQ ID NO: 5430092 - DNA, 25 bp, Homo sapien
caagtaagtcttaataggaagtcca

SEQ ID NO: 5430093 - DNA, 25 bp, Homo sapien
gatgacgaagcttcatatcccagcg

SEQ ID NO: 5430094 - DNA, 25 bp, Homo sapien
tagaatcacttttactgagtccaag

SEQ ID NO: 5430095 - DNA, 25 bp, Homo sapien
ttgccgggggttcgagttcctgcca

SEQ ID NO: 5430096 - DNA, 25 bp, Homo sapien
tggaatcactattgctagaatcact

SEQ ID NO: 5430097 - DNA, 25 bp, Homo sapien
ttaatacacataagaacatagcctt

SEQ ID NO: 5430098 - DNA, 25 bp, Homo sapien
taagtaatatccactaagtacaatg

SEQ ID NO: 5430099 - DNA, 25 bp, Homo sapien
acagaatttgaagggaaggctattt

SEQ ID NO: 5430100 - DNA, 25 bp, Homo sapien
ctatgtgatttgagcagtgaaaaaa

SEQ ID NO: 5430101 - DNA, 25 bp, Homo sapien
tttaccgagtcgatccttccacttc

SEQ ID NO: 5430102 - DNA, 25 bp, Homo sapien
cacttctcagctatagagccttcca

SEQ ID NO: 5430103 - DNA, 25 bp, Homo sapien
ctggtatagaggttgacagtgtccc

SEQ ID NO: 5430104 - DNA, 25 bp, Homo sapien
gcccatgatgatatattcctcatta

SEQ ID NO: 5430105 - DNA, 25 bp, Homo sapien
ttcacctccactactgcagtcacat

SEQ ID NO: 5430106 - DNA, 25 bp, Homo sapien
ttaacattaagtggagggcagaggc

SEQ ID NO: 5430107 - DNA, 25 bp, Homo sapien
tctaataggcttacatttacagcgt

SEQ ID NO: 5430108 - DNA, 25 bp, Homo sapien
catagttgtaattgttccggaaata

SEQ ID NO: 5430109 - DNA, 25 bp, Homo sapien
gttccggaaataggtcttctgtgta

SEQ ID NO: 5430110 - DNA, 25 bp, Homo sapien
taggtcttctgtgtagctctaatag

SEQ ID NO: 5430111 - DNA, 25 bp, Homo sapien
aaggctcttgtcaattctgtgtgtc

SEQ ID NO: 5430112 - DNA, 25 bp, Homo sapien
actagatctcaatttggtggtgaga

SEQ ID NO: 5430113 - DNA, 25 bp, Homo sapien
tcaatttggtggtgagaaggctctt

SEQ ID NO: 5430114 - DNA, 25 bp, Homo sapien
tttttgctcagactagatctcaatt

SEQ ID NO: 5430115 - DNA, 25 bp, Homo sapien
tccgttactagaatccataggaaaa

SEQ ID NO: 5430116 - DNA, 25 bp, Homo sapien
ccgttactagaatccataggaaaat

SEQ ID NO: 5430117 - DNA, 25 bp, Homo sapien
tttccgttactagaatccataggaa

SEQ ID NO: 5430118 - DNA, 25 bp, Homo sapien
ttccgttactagaatccataggaaa

SEQ ID NO: 5430119 - DNA, 25 bp, Homo sapien
tgcatatgaaagttggcacggctca

SEQ ID NO: 5430120 - DNA, 25 bp, Homo sapien
ttcttggtacttggcccctcaaata

SEQ ID NO: 5430121 - DNA, 25 bp, Homo sapien
gagaaacgattaaatggcagctcct

SEQ ID NO: 5430122 - DNA, 25 bp, Homo sapien
tcaaatatttgtagaacagggctaa

SEQ ID NO: 5430123 - DNA, 25 bp, Homo sapien
gcatcttagtcatgttccagggcag

SEQ ID NO: 5430124 - DNA, 25 bp, Homo sapien
tacttgatgagtatgggctcacagc

SEQ ID NO: 5430125 - DNA, 25 bp, Homo sapien
gacttacagggcttgatgggctcgt

SEQ ID NO: 5430126 - DNA, 25 bp, Homo sapien
gctccgtccgcagtaacgatggcct

SEQ ID NO: 5430127 - DNA, 25 bp, Homo sapien
agccgcgcagtggacgccaaaaggc

SEQ ID NO: 5430128 - DNA, 25 bp, Homo sapien
gtgcagccgcgcagtggacgccaaa

SEQ ID NO: 5430129 - DNA, 25 bp, Homo sapien
gcagtggacgccaaaaggcccgctc

SEQ ID NO: 5430130 - DNA, 25 bp, Homo sapien
agtggacgccaaaaggcccgctccg

SEQ ID NO: 5430131 - DNA, 25 bp, Homo sapien
gacacaaggatctgggagcttctcc

SEQ ID NO: 5430132 - DNA, 25 bp, Homo sapien
tacaagtcctgtgtgggctaagagc

SEQ ID NO: 5430133 - DNA, 25 bp, Homo sapien
tcttcccgagaatggagtgggcgcc

SEQ ID NO: 5430134 - DNA, 25 bp, Homo sapien
ggcaatcaccgcttccttggatcaa

SEQ ID NO: 5430135 - DNA, 25 bp, Homo sapien
tagactgccgttttgtttaacttgc

SEQ ID NO: 5430136 - DNA, 25 bp, Homo sapien
aatgaatgctctttggtggatgcat

SEQ ID NO: 5430137 - DNA, 25 bp, Homo sapien
gaatttgcctagtcctaaagggata

SEQ ID NO: 5430138 - DNA, 25 bp, Homo sapien
taagtaaaacctgattgctaccaat

SEQ ID NO: 5430139 - DNA, 25 bp, Homo sapien
actgggcagcatgcatccccgttca

SEQ ID NO: 5430140 - DNA, 25 bp, Homo sapien
catccgccaagctgtgggcatcaga

SEQ ID NO: 5430141 - DNA, 25 bp, Homo sapien
atcagagagagctgtatcacacccc

SEQ ID NO: 5430142 - DNA, 25 bp, Homo sapien
ggtggcaggaacaaacgagctgtaa

SEQ ID NO: 5430143 - DNA, 25 bp, Homo sapien
tagagaaggctaccagctccgtgtg

SEQ ID NO: 5430144 - DNA, 25 bp, Homo sapien
ttctgcctttggatgagacagcctg

SEQ ID NO: 5430145 - DNA, 25 bp, Homo sapien
ggtgtacactgcctgtccaagcatg

SEQ ID NO: 5430146 - DNA, 25 bp, Homo sapien
gataaagctactagaccccacgagg

SEQ ID NO: 5430147 - DNA, 25 bp, Homo sapien
tgagaactgagccttcgtgaggcat

SEQ ID NO: 5430148 - DNA, 25 bp, Homo sapien
tccagcattcaggttgctgagaact

SEQ ID NO: 5430149 - DNA, 25 bp, Homo sapien
caggtctccagcattcaggttgctg

SEQ ID NO: 5430150 - DNA, 25 bp, Homo sapien
ggtctccagcattcaggttgctgag

SEQ ID NO: 5430151 - DNA, 25 bp, Homo sapien
cagctgaccaggaatcaattcttgg

SEQ ID NO: 5430152 - DNA, 25 bp, Homo sapien
gttaagtggatgtctgtgtggcact

SEQ ID NO: 5430153 - DNA, 25 bp, Homo sapien
gaacagcgtgacaaaattaaccagg

SEQ ID NO: 5430154 - DNA, 25 bp, Homo sapien
aaataactggaaagtcagctgacca

SEQ ID NO: 5430155 - DNA, 25 bp, Homo sapien
tgagcttcttgggtactcctaagaa

SEQ ID NO: 5430156 - DNA, 25 bp, Homo sapien
ttgatggacgctcggatttactgcc

SEQ ID NO: 5430157 - DNA, 25 bp, Homo sapien
tgacaccaccaaaaggaatgtagat

SEQ ID NO: 5430158 - DNA, 25 bp, Homo sapien
gagaagatatttagggcacaggaca

SEQ ID NO: 5430159 - DNA, 25 bp, Homo sapien
tatattcattgaactgatgttagga

SEQ ID NO: 5430160 - DNA, 25 bp, Homo sapien
taaaaactatattcattgaactgat

SEQ ID NO: 5430161 - DNA, 25 bp, Homo sapien
gaactgatgttaggatatgacataa

SEQ ID NO: 5430162 - DNA, 25 bp, Homo sapien
cattgaactgatgttaggatatgac

SEQ ID NO: 5430163 - DNA, 25 bp, Homo sapien
agtgggaggatgggaacgggtctag

SEQ ID NO: 5430164 - DNA, 25 bp, Homo sapien
gaggatgggaacgggtctagggata

SEQ ID NO: 5430165 - DNA, 25 bp, Homo sapien
ctgaccaatgagtggacaaagaaag

SEQ ID NO: 5430166 - DNA, 25 bp, Homo sapien
accgcgtctggccttaattattatc

SEQ ID NO: 5430167 - DNA, 25 bp, Homo sapien
taattattatcgagaccggctcttg

SEQ ID NO: 5430168 - DNA, 25 bp, Homo sapien
tggccttaattattatcgagaccgg

SEQ ID NO: 5430169 - DNA, 25 bp, Homo sapien
ttattatcgagaccggctcttgctc

SEQ ID NO: 5430170 - DNA, 25 bp, Homo sapien
tccagtgtcacatttctagaaccaa

SEQ ID NO: 5430171 - DNA, 25 bp, Homo sapien
gagaatctctttctactcaagggaa

SEQ ID NO: 5430172 - DNA, 25 bp, Homo sapien
caaaatatgagtccgtgtgggctgc

SEQ ID NO: 5430173 - DNA, 25 bp, Homo sapien
aagcaacactgtcatcttgagagcc

SEQ ID NO: 5430174 - DNA, 25 bp, Homo sapien
tgaaaacattcaggacgcatcactg

SEQ ID NO: 5430175 - DNA, 25 bp, Homo sapien
gaaggcctgatggtgtacaacagac

SEQ ID NO: 5430176 - DNA, 25 bp, Homo sapien
catgtaagaggtgaccaagatgcac

SEQ ID NO: 5430177 - DNA, 25 bp, Homo sapien
gaggtcatggcaaatcttcggagaa

SEQ ID NO: 5430178 - DNA, 25 bp, Homo sapien
catgtagccaggatgataggtgtgc

SEQ ID NO: 5430179 - DNA, 25 bp, Homo sapien
gcctggccatgaaattgttaaatta

SEQ ID NO: 5430180 - DNA, 25 bp, Homo sapien
tgaaataagcagattacaggccagt

SEQ ID NO: 5430181 - DNA, 25 bp, Homo sapien
caggccagtatgtatggtatgatca

SEQ ID NO: 5430182 - DNA, 25 bp, Homo sapien
cataagaagctgtgaacagaagctc

SEQ ID NO: 5430183 - DNA, 25 bp, Homo sapien
tataggctggacaaatcatacacaa

SEQ ID NO: 5430184 - DNA, 25 bp, Homo sapien
aaactaaatgagctgctttgccctc

SEQ ID NO: 5430185 - DNA, 25 bp, Homo sapien
gagaaacagcctcaacaatgccaat

SEQ ID NO: 5430186 - DNA, 25 bp, Homo sapien
tattttatgttatggcaggtacact

SEQ ID NO: 5430187 - DNA, 25 bp, Homo sapien
agtggttagggactaacatttgtat

SEQ ID NO: 5430188 - DNA, 25 bp, Homo sapien
tatgttatggcaggtacacttgaat

SEQ ID NO: 5430189 - DNA, 25 bp, Homo sapien
catatataaaaagtggttagggact

SEQ ID NO: 5430190 - DNA, 25 bp, Homo sapien
tacaagcaacaacatatgctgctgc

SEQ ID NO: 5430191 - DNA, 25 bp, Homo sapien
tccacagtctacaggtaaaaccaag

SEQ ID NO: 5430192 - DNA, 25 bp, Homo sapien
gaatgtgcaacctaaatcaaccaag

SEQ ID NO: 5430193 - DNA, 25 bp, Homo sapien
tggtagtgctaatgccaacagggca

SEQ ID NO: 5430194 - DNA, 25 bp, Homo sapien
cattgtaaggaatggagattcttgt

SEQ ID NO: 5430195 - DNA, 25 bp, Homo sapien
gaagatgtaacactttgtttgtaga

SEQ ID NO: 5430196 - DNA, 25 bp, Homo sapien
taaggaatggagattcttgtacaat

SEQ ID NO: 5430197 - DNA, 25 bp, Homo sapien
tgtttgtagacagcatggtatgcat

SEQ ID NO: 5430198 - DNA, 25 bp, Homo sapien
taatgtaggccaaagtaatcaagaa

SEQ ID NO: 5430199 - DNA, 25 bp, Homo sapien
tctacctggcaatcaaagactaagc

SEQ ID NO: 5430200 - DNA, 25 bp, Homo sapien
ttttgtactatcaactctacctggc

SEQ ID NO: 5430201 - DNA, 25 bp, Homo sapien
aagactaagctaggaagcaaaacca

SEQ ID NO: 5430202 - DNA, 25 bp, Homo sapien
aaagtattcaatgactaagatgcca

SEQ ID NO: 5430203 - DNA, 25 bp, Homo sapien
aaagattctcaggaacgactggaac

SEQ ID NO: 5430204 - DNA, 25 bp, Homo sapien
gattctcaggaacgactggaacttt

SEQ ID NO: 5430205 - DNA, 25 bp, Homo sapien
aaaaagtattcaatgactaagatgc

SEQ ID NO: 5430206 - DNA, 25 bp, Homo sapien
ttgttgtagttttatctgtctcctg

SEQ ID NO: 5430207 - DNA, 25 bp, Homo sapien
ttttcagtagactggaggatgcaag

SEQ ID NO: 5430208 - DNA, 25 bp, Homo sapien
aataaacagattctctatttcttgt

SEQ ID NO: 5430209 - DNA, 25 bp, Homo sapien
tgactatatttcttagttcccaagg

SEQ ID NO: 5430210 - DNA, 25 bp, Homo sapien
cattcaagcagtaatttagagagta

SEQ ID NO: 5430211 - DNA, 25 bp, Homo sapien
tatacatacacataaagtgagtttg

SEQ ID NO: 5430212 - DNA, 25 bp, Homo sapien
gatgagcttagatagcctacattca

SEQ ID NO: 5430213 - DNA, 25 bp, Homo sapien
gctttggccaagcaatgtatgttgt

SEQ ID NO: 5430214 - DNA, 25 bp, Homo sapien
taaacaaagctgcagcaatctggtt

SEQ ID NO: 5430215 - DNA, 25 bp, Homo sapien
tggccaagcaatgtatgttgttgca

SEQ ID NO: 5430216 - DNA, 25 bp, Homo sapien
gacggtcttcaatgcttcctttgtg

SEQ ID NO: 5430217 - DNA, 25 bp, Homo sapien
ttaacaggagagtaacaaacgatcg

SEQ ID NO: 5430218 - DNA, 25 bp, Homo sapien
tagagttgggacatgaccggacttg

SEQ ID NO: 5430219 - DNA, 25 bp, Homo sapien
gcaaatagggttgtgtagaccccaa

SEQ ID NO: 5430220 - DNA, 25 bp, Homo sapien
cgatcgtgtatatgttaaacaggca

SEQ ID NO: 5430221 - DNA, 25 bp, Homo sapien
tactggccagtgttggcaaagaaac

SEQ ID NO: 5430222 - DNA, 25 bp, Homo sapien
caaacaccatgagaaggcaggcaat

SEQ ID NO: 5430223 - DNA, 25 bp, Homo sapien
aagaaactgccacaaacaccatgag

SEQ ID NO: 5430224 - DNA, 25 bp, Homo sapien
tatagcagggctgtactgagacatc

SEQ ID NO: 5430225 - DNA, 25 bp, Homo sapien
tcacaaggtaatccggcagctgatg

SEQ ID NO: 5430226 - DNA, 25 bp, Homo sapien
gctgatgataactcatacacattca

SEQ ID NO: 5430227 - DNA, 25 bp, Homo sapien
caatgcaggatcaatctcacaaggt

SEQ ID NO: 5430228 - DNA, 25 bp, Homo sapien
gtgaagaaagagctacgaccaatgc

SEQ ID NO: 5430229 - DNA, 25 bp, Homo sapien
gcatgctaactaaccactctaaact

SEQ ID NO: 5430230 - DNA, 25 bp, Homo sapien
tcgctttagagactgtaaaccccaa

SEQ ID NO: 5430231 - DNA, 25 bp, Homo sapien
tgctataggtgatcaaagaagactg

SEQ ID NO: 5430232 - DNA, 25 bp, Homo sapien
caattacaaaggcaagcatgctaac

SEQ ID NO: 5430233 - DNA, 25 bp, Homo sapien
gaaaaggaatgtggtaggataagac

SEQ ID NO: 5430234 - DNA, 25 bp, Homo sapien
cccttggaatgtgatccttaaaatc

SEQ ID NO: 5430235 - DNA, 25 bp, Homo sapien
tgtgatccttaaaatcttcaattga

SEQ ID NO: 5430236 - DNA, 25 bp, Homo sapien
taaaatcttcaattgaacttacaag

SEQ ID NO: 5430237 - DNA, 25 bp, Homo sapien
accgagtatatacttgtaatggttt

SEQ ID NO: 5430238 - DNA, 25 bp, Homo sapien
catcctcttcaagacactgtcaaca

SEQ ID NO: 5430239 - DNA, 25 bp, Homo sapien
tgcttcttgtgccaatgatcggaag

SEQ ID NO: 5430240 - DNA, 25 bp, Homo sapien
gatcggaaggataaaattacaccaa

SEQ ID NO: 5430241 - DNA, 25 bp, Homo sapien
ccaatgatcggaaggataaaattac

SEQ ID NO: 5430242 - DNA, 25 bp, Homo sapien
taataaaattcccatgataaaaggc

SEQ ID NO: 5430243 - DNA, 25 bp, Homo sapien
taaagtaataaaattcccatgataa

SEQ ID NO: 5430244 - DNA, 25 bp, Homo sapien
tgaactggattctttcttaaacttg

SEQ ID NO: 5430245 - DNA, 25 bp, Homo sapien
gagaataaaaaagtgtgaactggat

SEQ ID NO: 5430246 - DNA, 25 bp, Homo sapien
tatacctcccacaaagaatcaatgt

SEQ ID NO: 5430247 - DNA, 25 bp, Homo sapien
taggagaccaactacaaagagatag

SEQ ID NO: 5430248 - DNA, 25 bp, Homo sapien
cagttatctgcttgaacacacttta

SEQ ID NO: 5430249 - DNA, 25 bp, Homo sapien
gaggccagacacaaatttaatctat

SEQ ID NO: 5430250 - DNA, 25 bp, Homo sapien
ggtaatattcatgaactagcgacac

SEQ ID NO: 5430251 - DNA, 25 bp, Homo sapien
tagcgacacatagtagactaagagt

SEQ ID NO: 5430252 - DNA, 25 bp, Homo sapien
tgggttcaaaaccaaattgatactg

SEQ ID NO: 5430253 - DNA, 25 bp, Homo sapien
caggctcagaagctaatccttttag

SEQ ID NO: 5430254 - DNA, 25 bp, Homo sapien
tgtgttaacacatcaacattctcca

SEQ ID NO: 5430255 - DNA, 25 bp, Homo sapien
ttgtgttaacacatcaacattctcc

SEQ ID NO: 5430256 - DNA, 25 bp, Homo sapien
atttgtgttaacacatcaacattct

SEQ ID NO: 5430257 - DNA, 25 bp, Homo sapien
gtgttaacacatcaacattctccac

SEQ ID NO: 5430258 - DNA, 25 bp, Homo sapien
tctctctgggccaaaacaaaactct

SEQ ID NO: 5430259 - DNA, 25 bp, Homo sapien
ggttccccatcttttgtgcgcataa

SEQ ID NO: 5430260 - DNA, 25 bp, Homo sapien
gcccaagcctgatagtgaccatgca

SEQ ID NO: 5430261 - DNA, 25 bp, Homo sapien
taacttctatggtctctgattaggc

SEQ ID NO: 5430262 - DNA, 25 bp, Homo sapien
aaaaatgtcctttaggatcccatga

SEQ ID NO: 5430263 - DNA, 25 bp, Homo sapien
ccatgaagaactagaagaactgatc

SEQ ID NO: 5430264 - DNA, 25 bp, Homo sapien
gaaatggactcaacgcgcacaaccc

SEQ ID NO: 5430265 - DNA, 25 bp, Homo sapien
gctggcagtaataataggaattacc

SEQ ID NO: 5430266 - DNA, 25 bp, Homo sapien
gcctaggatgaggatatctttctcc

SEQ ID NO: 5430267 - DNA, 25 bp, Homo sapien
attatttgcaggaatcatctgaagc

SEQ ID NO: 5430268 - DNA, 25 bp, Homo sapien
catgtgcttgatgaattatttgcag

SEQ ID NO: 5430269 - DNA, 25 bp, Homo sapien
cctgcactaatctccaaaagacttc

SEQ ID NO: 5430270 - DNA, 25 bp, Homo sapien
tttgaagaactaaatgatgaaggca

SEQ ID NO: 5430271 - DNA, 25 bp, Homo sapien
taagaatacgtatgaagtatgcctc

SEQ ID NO: 5430272 - DNA, 25 bp, Homo sapien
tgagacagactagtatacaacacac

SEQ ID NO: 5430273 - DNA, 25 bp, Homo sapien
tatgcctcagtacacagaggctgag

SEQ ID NO: 5430274 - DNA, 25 bp, Homo sapien
gaatgatactgcttgtaaagaacca

SEQ ID NO: 5430275 - DNA, 25 bp, Homo sapien
gaaccaagaccagcatttcaatgtt

SEQ ID NO: 5430276 - DNA, 25 bp, Homo sapien
catttgtccgaaatcaaagcttgta

SEQ ID NO: 5430277 - DNA, 25 bp, Homo sapien
tatgctgagtacctaaaagcttgac

SEQ ID NO: 5430278 - DNA, 25 bp, Homo sapien
tcagcaacttgtgatgaaatatgcc

SEQ ID NO: 5430279 - DNA, 25 bp, Homo sapien
agaaacttcataccatatgggccta

SEQ ID NO: 5430280 - DNA, 25 bp, Homo sapien
tatgccacataaggctttcacttag

SEQ ID NO: 5430281 - DNA, 25 bp, Homo sapien
catatgggcctagtagttctgataa

SEQ ID NO: 5430282 - DNA, 25 bp, Homo sapien
tctgtaggtaagttcacaaacgctt

SEQ ID NO: 5430283 - DNA, 25 bp, Homo sapien
cattgctgacttgtcgtaacaaagt

SEQ ID NO: 5430284 - DNA, 25 bp, Homo sapien
ggaaaatatgctatatggccattgc

SEQ ID NO: 5430285 - DNA, 25 bp, Homo sapien
taggtaagttcacaaacgctttcat

SEQ ID NO: 5430286 - DNA, 25 bp, Homo sapien
gactggagtacggtcatgtatgctc

SEQ ID NO: 5430287 - DNA, 25 bp, Homo sapien
tatacatagtcatcccaacaattga

SEQ ID NO: 5430288 - DNA, 25 bp, Homo sapien
tagacttgtaatggttggctctcca

SEQ ID NO: 5430289 - DNA, 25 bp, Homo sapien
tcctgtgtggcttgattatacatag

SEQ ID NO: 5430290 - DNA, 25 bp, Homo sapien
ggtatgttcccataccaccatgttt

SEQ ID NO: 5430291 - DNA, 25 bp, Homo sapien
agtcaaatattctcgtggggtaaag

SEQ ID NO: 5430292 - DNA, 25 bp, Homo sapien
gtaaagcgtatttccagatgagaag

SEQ ID NO: 5430293 - DNA, 25 bp, Homo sapien
tagagaagcataactcagaaagtgc

SEQ ID NO: 5430294 - DNA, 25 bp, Homo sapien
taaagataatcacgcccaattcctg

SEQ ID NO: 5430295 - DNA, 25 bp, Homo sapien
caaaggtagagcttattctgcactc

SEQ ID NO: 5430296 - DNA, 25 bp, Homo sapien
taagagcaatattctaaagatggcg

SEQ ID NO: 5430297 - DNA, 25 bp, Homo sapien
gatccctgaatgctacctggtctgt

SEQ ID NO: 5430298 - DNA, 25 bp, Homo sapien
tcactgcttgactgatagttttggc

SEQ ID NO: 5430299 - DNA, 25 bp, Homo sapien
tcttattcactgcttgactgatagt

SEQ ID NO: 5430300 - DNA, 25 bp, Homo sapien
ttcctcatgctctcaacacctggtt

SEQ ID NO: 5430301 - DNA, 25 bp, Homo sapien
cttaccagtctgcttttttgatttc

SEQ ID NO: 5430302 - DNA, 25 bp, Homo sapien
aacagagctgctagaaatagttcag

SEQ ID NO: 5430303 - DNA, 25 bp, Homo sapien
ttctaaggataactctgatattggc

SEQ ID NO: 5430304 - DNA, 25 bp, Homo sapien
tagaaatagttcagacaaggcatga

SEQ ID NO: 5430305 - DNA, 25 bp, Homo sapien
gcctggccatgaagaggtaattttc

SEQ ID NO: 5430306 - DNA, 25 bp, Homo sapien
taaagacttacatgttagacctaaa

SEQ ID NO: 5430307 - DNA, 25 bp, Homo sapien
ataagcatgggcaaagacttcatgt

SEQ ID NO: 5430308 - DNA, 25 bp, Homo sapien
tggattaaagacttacatgttagac

SEQ ID NO: 5430309 - DNA, 25 bp, Homo sapien
taagcatgggcaaagacttcatgtc

SEQ ID NO: 5430310 - DNA, 25 bp, Homo sapien
tggtcactaagggtacactgttctg

SEQ ID NO: 5430311 - DNA, 25 bp, Homo sapien
gagatttcgagcttgtttggccatt

SEQ ID NO: 5430312 - DNA, 25 bp, Homo sapien
cataaggaaagactgcgatctccaa

SEQ ID NO: 5430313 - DNA, 25 bp, Homo sapien
tcatctaggaacatattacataagg

SEQ ID NO: 5430314 - DNA, 25 bp, Homo sapien
tcatgcgtgcaactcataaaatgag

SEQ ID NO: 5430315 - DNA, 25 bp, Homo sapien
gattgagagggtaactccaaacact

SEQ ID NO: 5430316 - DNA, 25 bp, Homo sapien
caaacactgttgaaacatcttctca

SEQ ID NO: 5430317 - DNA, 25 bp, Homo sapien
aatgagtgcaaagtagtggaaatgc

SEQ ID NO: 5430318 - DNA, 25 bp, Homo sapien
gatgtgacaggcaaaaatagaatgc

SEQ ID NO: 5430319 - DNA, 25 bp, Homo sapien
acactacatatcttagagtaataag

SEQ ID NO: 5430320 - DNA, 25 bp, Homo sapien
tcccatggtgctgaaattgcgggtg

SEQ ID NO: 5430321 - DNA, 25 bp, Homo sapien
gaataggatcctttgcatagctgaa

SEQ ID NO: 5430322 - DNA, 25 bp, Homo sapien
gagagatctgatgtttccaccaaca

SEQ ID NO: 5430323 - DNA, 25 bp, Homo sapien
agtgaagcctttgagacactagtat

SEQ ID NO: 5430324 - DNA, 25 bp, Homo sapien
aagcctttgagacactagtatatgc

SEQ ID NO: 5430325 - DNA, 25 bp, Homo sapien
tggagagatctgatgtttccaccaa

SEQ ID NO: 5430326 - DNA, 25 bp, Homo sapien
ccaaggattagagattatgagcaac

SEQ ID NO: 5430327 - DNA, 25 bp, Homo sapien
gacacatacatcctaccaagaagaa

SEQ ID NO: 5430328 - DNA, 25 bp, Homo sapien
ggccatcatcacttacgaacataga

SEQ ID NO: 5430329 - DNA, 25 bp, Homo sapien
tggaaaaccgacatgaaatggatac

SEQ ID NO: 5430330 - DNA, 25 bp, Homo sapien
acctaaaccaatctaatctcattcc

SEQ ID NO: 5430331 - DNA, 25 bp, Homo sapien
cctaaaccaatctaatctcattcct

SEQ ID NO: 5430332 - DNA, 25 bp, Homo sapien
ctaaaccaatctaatctcattcctc

SEQ ID NO: 5430333 - DNA, 25 bp, Homo sapien
tgattcatcttcagggcaaacagaa

SEQ ID NO: 5430334 - DNA, 25 bp, Homo sapien
gattcatcttcagggcaaacagaaa

SEQ ID NO: 5430335 - DNA, 25 bp, Homo sapien
catcttcagggcaaacagaaagatt

SEQ ID NO: 5430336 - DNA, 25 bp, Homo sapien
ttgattcatcttcagggcaaacaga

SEQ ID NO: 5430337 - DNA, 25 bp, Homo sapien
ggtccgtatttcctcacatgtgctc

SEQ ID NO: 5430338 - DNA, 25 bp, Homo sapien
tgtgctctaagttcttccatgtaaa

SEQ ID NO: 5430339 - DNA, 25 bp, Homo sapien
aatacctctgcattacaggtccgta

SEQ ID NO: 5430340 - DNA, 25 bp, Homo sapien
agaaaggtactgcacgtaatacctc

SEQ ID NO: 5430341 - DNA, 25 bp, Homo sapien
gacgaagtagccagatgatttcatc

SEQ ID NO: 5430342 - DNA, 25 bp, Homo sapien
aagtcgtctgcactcttctttggca

SEQ ID NO: 5430343 - DNA, 25 bp, Homo sapien
gcatgttatctgcatgacgaagtag

SEQ ID NO: 5430344 - DNA, 25 bp, Homo sapien
tcacgggcaaaggataatgccataa

SEQ ID NO: 5430345 - DNA, 25 bp, Homo sapien
tgggacctagcaatccaggttgatc

SEQ ID NO: 5430346 - DNA, 25 bp, Homo sapien
cagatcttaaaaacttgcgtctttc

SEQ ID NO: 5430347 - DNA, 25 bp, Homo sapien
gttgatcagagaggacagtagccaa

SEQ ID NO: 5430348 - DNA, 25 bp, Homo sapien
ttccttcagtgcagatcttaaaaac

SEQ ID NO: 5430349 - DNA, 25 bp, Homo sapien
ccttgcattctcttatgtcattaat

SEQ ID NO: 5430350 - DNA, 25 bp, Homo sapien
tatgtcattaatacgtttattatag

SEQ ID NO: 5430351 - DNA, 25 bp, Homo sapien
tgacacggctgcctccttgcattct

SEQ ID NO: 5430352 - DNA, 25 bp, Homo sapien
catgtgacacggctgcctccttgca

SEQ ID NO: 5430353 - DNA, 25 bp, Homo sapien
ccaagacacagatagaggaggttag

SEQ ID NO: 5430354 - DNA, 25 bp, Homo sapien
tatctgaagctaggaagcccaactt

SEQ ID NO: 5430355 - DNA, 25 bp, Homo sapien
ggcatggcagtaccgaccagaaaga

SEQ ID NO: 5430356 - DNA, 25 bp, Homo sapien
gatgccggagttttcatatgcaaag

SEQ ID NO: 5430357 - DNA, 25 bp, Homo sapien
gaagagctagtttccaaaggttcag

SEQ ID NO: 5430358 - DNA, 25 bp, Homo sapien
cagtatttaggatcccatggcacaa

SEQ ID NO: 5430359 - DNA, 25 bp, Homo sapien
gagaggcaagagctactttgaagag

SEQ ID NO: 5430360 - DNA, 25 bp, Homo sapien
acttcatcccgaaagagagagaggc

SEQ ID NO: 5430361 - DNA, 25 bp, Homo sapien
catccttaaagtccaatactttcaa

SEQ ID NO: 5430362 - DNA, 25 bp, Homo sapien
ctattaaagtaataaagctaggact

SEQ ID NO: 5430363 - DNA, 25 bp, Homo sapien
ggacttagccccaattattcatcct

SEQ ID NO: 5430364 - DNA, 25 bp, Homo sapien
gaagtgaagggtcaatgactttact

SEQ ID NO: 5430365 - DNA, 25 bp, Homo sapien
catagtttgtaagcttcttagaagc

SEQ ID NO: 5430366 - DNA, 25 bp, Homo sapien
tcatagaaacttggtggtagattta

SEQ ID NO: 5430367 - DNA, 25 bp, Homo sapien
gaaactagtacttttatctcctgtg

SEQ ID NO: 5430368 - DNA, 25 bp, Homo sapien
gggtgttcactctacaattatttca

SEQ ID NO: 5430369 - DNA, 25 bp, Homo sapien
catccaaagagaggtattcacaagg

SEQ ID NO: 5430370 - DNA, 25 bp, Homo sapien
cattgcatccaaagagaggtattca

SEQ ID NO: 5430371 - DNA, 25 bp, Homo sapien
ttccattgcatccaaagagaggtat

SEQ ID NO: 5430372 - DNA, 25 bp, Homo sapien
ccaaagagaggtattcacaaggcat

SEQ ID NO: 5430373 - DNA, 25 bp, Homo sapien
attttcattcaaaagagaaaaatag

SEQ ID NO: 5430374 - DNA, 25 bp, Homo sapien
tttcattcaaaagagaaaaatagaa

SEQ ID NO: 5430375 - DNA, 25 bp, Homo sapien
tattttcattcaaaagagaaaaata

SEQ ID NO: 5430376 - DNA, 25 bp, Homo sapien
ttttcattcaaaagagaaaaataga

SEQ ID NO: 5430377 - DNA, 25 bp, Homo sapien
tcgaggatataccatttgaagagaa

SEQ ID NO: 5430378 - DNA, 25 bp, Homo sapien
tgtgctggattaagcattgtactag

SEQ ID NO: 5430379 - DNA, 25 bp, Homo sapien
agctgaaagattccttcgaggatat

SEQ ID NO: 5430380 - DNA, 25 bp, Homo sapien
attccttcgaggatataccatttga

SEQ ID NO: 5430381 - DNA, 25 bp, Homo sapien
cacctcaaaataagcagtgccatct

SEQ ID NO: 5430382 - DNA, 25 bp, Homo sapien
gctagaagctttcccgtaagaactg

SEQ ID NO: 5430383 - DNA, 25 bp, Homo sapien
aacattcaagctgaggactcaagaa

SEQ ID NO: 5430384 - DNA, 25 bp, Homo sapien
tcccttcacgataaaatgttcaact

SEQ ID NO: 5430385 - DNA, 25 bp, Homo sapien
atccacaatcatctggccaaggcgt

SEQ ID NO: 5430386 - DNA, 25 bp, Homo sapien
aatccacaatcatctggccaaggcg

SEQ ID NO: 5430387 - DNA, 25 bp, Homo sapien
tccacaatcatctggccaaggcgtg

SEQ ID NO: 5430388 - DNA, 25 bp, Homo sapien
caattcgagacagcagtatcattag

SEQ ID NO: 5430389 - DNA, 25 bp, Homo sapien
gagacagcagtatcattagtgttgt

SEQ ID NO: 5430390 - DNA, 25 bp, Homo sapien
ttcttcaattcgagacagcagtatc

SEQ ID NO: 5430391 - DNA, 25 bp, Homo sapien
tcctttcttcaattcgagacagcag

SEQ ID NO: 5430392 - DNA, 25 bp, Homo sapien
gcaaacgtcaatagtattcagcaat

SEQ ID NO: 5430393 - DNA, 25 bp, Homo sapien
aagaagacttggcaaacgtcaatag

SEQ ID NO: 5430394 - DNA, 25 bp, Homo sapien
gacttggcaaacgtcaatagtattc

SEQ ID NO: 5430395 - DNA, 25 bp, Homo sapien
ttggcaaacgtcaatagtattcagc

SEQ ID NO: 5430396 - DNA, 25 bp, Homo sapien
ttaaattccataacatctacaaatg

SEQ ID NO: 5430397 - DNA, 25 bp, Homo sapien
cttaaattccataacatctacaaat

SEQ ID NO: 5430398 - DNA, 25 bp, Homo sapien
taaattccataacatctacaaatgt

SEQ ID NO: 5430399 - DNA, 25 bp, Homo sapien
cttcggataagtcccagaagtggaa

SEQ ID NO: 5430400 - DNA, 25 bp, Homo sapien
tacagttaatcctgctgttactccc

SEQ ID NO: 5430401 - DNA, 25 bp, Homo sapien
tgctctctttatcaataagcttgcc

SEQ ID NO: 5430402 - DNA, 25 bp, Homo sapien
tattcactctatccagctttagaac

SEQ ID NO: 5430403 - DNA, 25 bp, Homo sapien
tgaccacaactgagtagcaatacta

SEQ ID NO: 5430404 - DNA, 25 bp, Homo sapien
tgctgactctgatctcaacctgatt

SEQ ID NO: 5430405 - DNA, 25 bp, Homo sapien
tatatcttgacatgagttcaggcca

SEQ ID NO: 5430406 - DNA, 25 bp, Homo sapien
tgacagtcagcttaaacctaacctg

SEQ ID NO: 5430407 - DNA, 25 bp, Homo sapien
cataatataagctctgtaagaacag

SEQ ID NO: 5430408 - DNA, 25 bp, Homo sapien
caggcattagtcttatgcttttacc

SEQ ID NO: 5430409 - DNA, 25 bp, Homo sapien
cctaagtaaattacatctgccaggc

SEQ ID NO: 5430410 - DNA, 25 bp, Homo sapien
tgttcttcctagaactctttacctg

SEQ ID NO: 5430411 - DNA, 25 bp, Homo sapien
taatttcagaaagtcatggtataac

SEQ ID NO: 5430412 - DNA, 25 bp, Homo sapien
aaaggcttataactataatttcaga

SEQ ID NO: 5430413 - DNA, 25 bp, Homo sapien
aaaggtgacatgattataaggccaa

SEQ ID NO: 5430414 - DNA, 25 bp, Homo sapien
catggtataactatgaaactgtaaa

SEQ ID NO: 5430415 - DNA, 25 bp, Homo sapien
ggatctgtaactgacgcagaacaat

SEQ ID NO: 5430416 - DNA, 25 bp, Homo sapien
attccaggtttttgtcgataagata

SEQ ID NO: 5430417 - DNA, 25 bp, Homo sapien
tgttgttgcgggtttctacagcagg

SEQ ID NO: 5430418 - DNA, 25 bp, Homo sapien
taagataggatggttttgccttggg

SEQ ID NO: 5430419 - DNA, 25 bp, Homo sapien
ttgttgttgcgggtttctacagcag

SEQ ID NO: 5430420 - DNA, 25 bp, Homo sapien
tatggctatgttgtggattgcagaa

SEQ ID NO: 5430421 - DNA, 25 bp, Homo sapien
tctgaaagcgggcaagcgggcagag

SEQ ID NO: 5430422 - DNA, 25 bp, Homo sapien
actgatctgaaagcgggcaagcggg

SEQ ID NO: 5430423 - DNA, 25 bp, Homo sapien
tatgttgtggattgcagaaagagaa

SEQ ID NO: 5430424 - DNA, 25 bp, Homo sapien
gagaaaattacgtgtaaacaatgat

SEQ ID NO: 5430425 - DNA, 25 bp, Homo sapien
agagagaaaattacgtgtaaacaat

SEQ ID NO: 5430426 - DNA, 25 bp, Homo sapien
gaaaattacgtgtaaacaatgattg

SEQ ID NO: 5430427 - DNA, 25 bp, Homo sapien
gagagaaaattacgtgtaaacaatg

SEQ ID NO: 5430428 - DNA, 25 bp, Homo sapien
cagaggggcttctttgtcatgacac

SEQ ID NO: 5430429 - DNA, 25 bp, Homo sapien
agaggggcttctttgtcatgacact

SEQ ID NO: 5430430 - DNA, 25 bp, Homo sapien
ccccggtcgttgaggatggtgagct

SEQ ID NO: 5430431 - DNA, 25 bp, Homo sapien
ggtcgttgaggatggtgagcttctc

SEQ ID NO: 5430432 - DNA, 25 bp, Homo sapien
tgagcatgccgacgccccggtcgtt

SEQ ID NO: 5430433 - DNA, 25 bp, Homo sapien
tgatgttgtagaggcgggtgagcat

SEQ ID NO: 5430434 - DNA, 25 bp, Homo sapien
gcgacagagcgagccgcggcggact

SEQ ID NO: 5430435 - DNA, 25 bp, Homo sapien
ctcgcgcccagtcacgggcccgcgg

SEQ ID NO: 5430436 - DNA, 25 bp, Homo sapien
gagagcgcgcccatggccctcgcgc

SEQ ID NO: 5430437 - DNA, 25 bp, Homo sapien
gcgacctccgccttaggagagcgcg

SEQ ID NO: 5430438 - DNA, 25 bp, Homo sapien
cgtctccggcggctgagaacgaggc

SEQ ID NO: 5430439 - DNA, 25 bp, Homo sapien
tctccggcggctgagaacgaggccg

SEQ ID NO: 5430440 - DNA, 25 bp, Homo sapien
gtctccggcggctgagaacgaggcc

SEQ ID NO: 5430441 - DNA, 25 bp, Homo sapien
ggcgtctccggcggctgagaacgag

SEQ ID NO: 5430442 - DNA, 25 bp, Homo sapien
cggcagcgccggcgcccccgcgagg

SEQ ID NO: 5430443 - DNA, 25 bp, Homo sapien
cagcgccggcgcccccgcgaggccg

SEQ ID NO: 5430444 - DNA, 25 bp, Homo sapien
gcgccggcgcccccgcgaggccgga

SEQ ID NO: 5430445 - DNA, 25 bp, Homo sapien
gatcggcagcgccggcgcccccgcg

SEQ ID NO: 5430446 - DNA, 25 bp, Homo sapien
tgccgggatgggagtcccaagcggg

SEQ ID NO: 5430447 - DNA, 25 bp, Homo sapien
ggaccgcccactacgcctgatgccg

SEQ ID NO: 5430448 - DNA, 25 bp, Homo sapien
acgggccctcggcatggcctcgccg

SEQ ID NO: 5430449 - DNA, 25 bp, Homo sapien
cactacgcctgatgccgggatggga

SEQ ID NO: 5430450 - DNA, 25 bp, Homo sapien
gtgttttccaggcgagtttcgctta

SEQ ID NO: 5430451 - DNA, 25 bp, Homo sapien
ttttccaggcgagtttcgcttaaga

SEQ ID NO: 5430452 - DNA, 25 bp, Homo sapien
ccaggcgagtttcgcttaagagtgg

SEQ ID NO: 5430453 - DNA, 25 bp, Homo sapien
tcgcttaagagtgggctggtggctc

SEQ ID NO: 5430454 - DNA, 25 bp, Homo sapien
taagctgtcaagaaccttcctaaag

SEQ ID NO: 5430455 - DNA, 25 bp, Homo sapien
cttcctaaagggactgctgctgctc

SEQ ID NO: 5430456 - DNA, 25 bp, Homo sapien
gatataagctgtcaagaaccttcct

SEQ ID NO: 5430457 - DNA, 25 bp, Homo sapien
gctgtcaagaaccttcctaaaggga

SEQ ID NO: 5430458 - DNA, 25 bp, Homo sapien
cacggccctggtgtagctgatgcag

SEQ ID NO: 5430459 - DNA, 25 bp, Homo sapien
aactctgacaccagcgtcccatcac

SEQ ID NO: 5430460 - DNA, 25 bp, Homo sapien
acggccctggtgtagctgatgcagc

SEQ ID NO: 5430461 - DNA, 25 bp, Homo sapien
cggccctggtgtagctgatgcagct

SEQ ID NO: 5430462 - DNA, 25 bp, Homo sapien
atctcaatgtccagggccagcttgt

SEQ ID NO: 5430463 - DNA, 25 bp, Homo sapien
gggccagcttgtcgttcatcagctc

SEQ ID NO: 5430464 - DNA, 25 bp, Homo sapien
gtccagggccagcttgtcgttcatc

SEQ ID NO: 5430465 - DNA, 25 bp, Homo sapien
tggcgatctcaatgtccagggccag

SEQ ID NO: 5430466 - DNA, 25 bp, Homo sapien
acggccaactccccgcgctgctccg

SEQ ID NO: 5430467 - DNA, 25 bp, Homo sapien
actccccgcgctgctccgcatctgc

SEQ ID NO: 5430468 - DNA, 25 bp, Homo sapien
acgtcctgcttggtttgctgcaggg

SEQ ID NO: 5430469 - DNA, 25 bp, Homo sapien
cacgtcctgcttggtttgctgcagg

SEQ ID NO: 5430470 - DNA, 25 bp, Homo sapien
gttccgattcatcgcggagatctca

SEQ ID NO: 5430471 - DNA, 25 bp, Homo sapien
cgattcatcgcggagatctcagtct

SEQ ID NO: 5430472 - DNA, 25 bp, Homo sapien
ttgtatgctgcaggtcatctccgtg

SEQ ID NO: 5430473 - DNA, 25 bp, Homo sapien
ctttgtatgctgcaggtcatctccg

SEQ ID NO: 5430474 - DNA, 25 bp, Homo sapien
gcggttggtgatctcgtactgcgct

SEQ ID NO: 5430475 - DNA, 25 bp, Homo sapien
ctggctgcggttggtgatctcgtac

SEQ ID NO: 5430476 - DNA, 25 bp, Homo sapien
gttggtgatctcgtactgcgcttga

SEQ ID NO: 5430477 - DNA, 25 bp, Homo sapien
ttggtgatctcgtactgcgcttgac

SEQ ID NO: 5430478 - DNA, 25 bp, Homo sapien
catgggcagcaccacagacgtgtct

SEQ ID NO: 5430479 - DNA, 25 bp, Homo sapien
gcagcaccacagacgtgtctgagat

SEQ ID NO: 5430480 - DNA, 25 bp, Homo sapien
gggcagcaccacagacgtgtctgag

SEQ ID NO: 5430481 - DNA, 25 bp, Homo sapien
gggactgcagctccgggatatcctc

SEQ ID NO: 5430482 - DNA, 25 bp, Homo sapien
ccgtcttctgctgctgcaggaggct

SEQ ID NO: 5430483 - DNA, 25 bp, Homo sapien
gagccgtcttctgctgctgcaggag

SEQ ID NO: 5430484 - DNA, 25 bp, Homo sapien
atgttgctccgagccgtcttctgct

SEQ ID NO: 5430485 - DNA, 25 bp, Homo sapien
ctggaatatgtgtccatgttgctcc

SEQ ID NO: 5430486 - DNA, 25 bp, Homo sapien
cttgttttgctgctccaggaactgt

SEQ ID NO: 5430487 - DNA, 25 bp, Homo sapien
tcttgttttgctgctccaggaactg

SEQ ID NO: 5430488 - DNA, 25 bp, Homo sapien
atcttgttttgctgctccaggaact

SEQ ID NO: 5430489 - DNA, 25 bp, Homo sapien
ttgttttgctgctccaggaactgta

SEQ ID NO: 5430490 - DNA, 25 bp, Homo sapien
cttgtatatgaaggtggcaaactta

SEQ ID NO: 5430491 - DNA, 25 bp, Homo sapien
gtatatgaaggtggcaaacttagtg

SEQ ID NO: 5430492 - DNA, 25 bp, Homo sapien
tatgaaggtggcaaacttagtgttg

SEQ ID NO: 5430493 - DNA, 25 bp, Homo sapien
tgtatatgaaggtggcaaacttagt

SEQ ID NO: 5430494 - DNA, 25 bp, Homo sapien
tgatgcctcccatgccactggcccc

SEQ ID NO: 5430495 - DNA, 25 bp, Homo sapien
atgcctcccatgccactggccccac

SEQ ID NO: 5430496 - DNA, 25 bp, Homo sapien
tgacagtgacggtggtgatgcctcc

SEQ ID NO: 5430497 - DNA, 25 bp, Homo sapien
ctggttgacagtgacggtggtgatg

SEQ ID NO: 5430498 - DNA, 25 bp, Homo sapien
caccccggaagctgctgctgcccac

SEQ ID NO: 5430499 - DNA, 25 bp, Homo sapien
gccaccccggaagctgctgctgccc

SEQ ID NO: 5430500 - DNA, 25 bp, Homo sapien
cgtagcctcctcccaggccaccccg

SEQ ID NO: 5430501 - DNA, 25 bp, Homo sapien
aggccaccccggaagctgctgctgc

SEQ ID NO: 5430502 - DNA, 25 bp, Homo sapien
gcaccaggcccacttgtgtagaaat

SEQ ID NO: 5430503 - DNA, 25 bp, Homo sapien
gaggagctgatggaggcaccaggcc

SEQ ID NO: 5430504 - DNA, 25 bp, Homo sapien
aggcccacttgtgtagaaatggctg

SEQ ID NO: 5430505 - DNA, 25 bp, Homo sapien
ctgatggaggcaccaggcccacttg

SEQ ID NO: 5430506 - DNA, 25 bp, Homo sapien
tgcaccagggtgacaacgctaactg

SEQ ID NO: 5430507 - DNA, 25 bp, Homo sapien
cattgcatcgctgggataaacggag

SEQ ID NO: 5430508 - DNA, 25 bp, Homo sapien
taatctcaggaagcaatgcaccagg

SEQ ID NO: 5430509 - DNA, 25 bp, Homo sapien
caataagggactagcagttcagccg

SEQ ID NO: 5430510 - DNA, 25 bp, Homo sapien
tctagggtcacaagatgctgctcat

SEQ ID NO: 5430511 - DNA, 25 bp, Homo sapien
tagggtcacaagatgctgctcatga

SEQ ID NO: 5430512 - DNA, 25 bp, Homo sapien
ttcaagatgattatatttgtgttca

SEQ ID NO: 5430513 - DNA, 25 bp, Homo sapien
ttcttctagggtcacaagatgctgc

SEQ ID NO: 5430514 - DNA, 25 bp, Homo sapien
cagggctgctgcaattgtaataggt

SEQ ID NO: 5430515 - DNA, 25 bp, Homo sapien
gttcattgtaatgcaggcgtttcca

SEQ ID NO: 5430516 - DNA, 25 bp, Homo sapien
aatgcaagaccttccatatgtccaa

SEQ ID NO: 5430517 - DNA, 25 bp, Homo sapien
ctgatgaattctgaacaaacctcat

SEQ ID NO: 5430518 - DNA, 25 bp, Homo sapien
taatgtataggtgttctgtcatacg

SEQ ID NO: 5430519 - DNA, 25 bp, Homo sapien
tgcaagatcattgtttagtggtctg

SEQ ID NO: 5430520 - DNA, 25 bp, Homo sapien
catacgttattgtgagctttggttc

SEQ ID NO: 5430521 - DNA, 25 bp, Homo sapien
ggttctttgaacaggtgatctattc

SEQ ID NO: 5430522 - DNA, 25 bp, Homo sapien
gatcatataaaggtcttctttatca

SEQ ID NO: 5430523 - DNA, 25 bp, Homo sapien
caactgtagttgtaattattgctaa

SEQ ID NO: 5430524 - DNA, 25 bp, Homo sapien
tctttatcatctttgtggagagtag

SEQ ID NO: 5430525 - DNA, 25 bp, Homo sapien
tcatctttgtggagagtaggctgag

SEQ ID NO: 5430526 - DNA, 25 bp, Homo sapien
gaaaacgggaaatcactggtattca

SEQ ID NO: 5430527 - DNA, 25 bp, Homo sapien
acgggaaatcactggtattcaattc

SEQ ID NO: 5430528 - DNA, 25 bp, Homo sapien
ggaaatcactggtattcaattctgt

SEQ ID NO: 5430529 - DNA, 25 bp, Homo sapien
aaacgggaaatcactggtattcaat

SEQ ID NO: 5430530 - DNA, 25 bp, Homo sapien
catgagtgataagatgctctctccc

SEQ ID NO: 5430531 - DNA, 25 bp, Homo sapien
caagagtcacctggagttgcgatac

SEQ ID NO: 5430532 - DNA, 25 bp, Homo sapien
aagggtctttggagatcacttgtcc

SEQ ID NO: 5430533 - DNA, 25 bp, Homo sapien
ggttgagctctctgtagccctaggt

SEQ ID NO: 5430534 - DNA, 25 bp, Homo sapien
tagttgccgacgcaatggcagcctt

SEQ ID NO: 5430535 - DNA, 25 bp, Homo sapien
ccgcgttaggtgagtgaaatattgc

SEQ ID NO: 5430536 - DNA, 25 bp, Homo sapien
cagcctttgcagtggaacctcaggg

SEQ ID NO: 5430537 - DNA, 25 bp, Homo sapien
tactggttttaagtgtagttgccga

SEQ ID NO: 5430538 - DNA, 25 bp, Homo sapien
gagacgcgatgctggttgctggatt

SEQ ID NO: 5430539 - DNA, 25 bp, Homo sapien
cgagacgcgatgctggttgctggat

SEQ ID NO: 5430540 - DNA, 25 bp, Homo sapien
cgcggtacacgtgggtgggcggtgc

SEQ ID NO: 5430541 - DNA, 25 bp, Homo sapien
tgggcggtgccctgaagtgtgtggg

SEQ ID NO: 5430542 - DNA, 25 bp, Homo sapien
ctgggaggaactgaccgcggtacac

SEQ ID NO: 5430543 - DNA, 25 bp, Homo sapien
ttgatcaccggtgcttccagttcct

SEQ ID NO: 5430544 - DNA, 25 bp, Homo sapien
cctgtgtatcaggtaccaggtcaag

SEQ ID NO: 5430545 - DNA, 25 bp, Homo sapien
gagtgcaatgagtcacactcaggct

SEQ ID NO: 5430546 - DNA, 25 bp, Homo sapien
gactaaatagttggcagctttcgga

SEQ ID NO: 5430547 - DNA, 25 bp, Homo sapien
aaacatttgacccttctgagtgcaa

SEQ ID NO: 5430548 - DNA, 25 bp, Homo sapien
ggaaatgagatcacctttacttgca

SEQ ID NO: 5430549 - DNA, 25 bp, Homo sapien
cccttcagtaggagtaatggaaatg

SEQ ID NO: 5430550 - DNA, 25 bp, Homo sapien
ggatttgccagctccggtgactcca

SEQ ID NO: 5430551 - DNA, 25 bp, Homo sapien
tgactccacaacctcgatcaattag

SEQ ID NO: 5430552 - DNA, 25 bp, Homo sapien
gcatgttctctgatcgataaagaca

SEQ ID NO: 5430553 - DNA, 25 bp, Homo sapien
cattgcatgttctctgatcgataaa

SEQ ID NO: 5430554 - DNA, 25 bp, Homo sapien
cctgggctgcatcactatttgacat

SEQ ID NO: 5430555 - DNA, 25 bp, Homo sapien
catcactatttgacattgcatgttc

SEQ ID NO: 5430556 - DNA, 25 bp, Homo sapien
gaatttctctctcttagcctctgtc

SEQ ID NO: 5430557 - DNA, 25 bp, Homo sapien
ttgagaatttctctctcttagcctc

SEQ ID NO: 5430558 - DNA, 25 bp, Homo sapien
aattgagaatttctctctcttagcc

SEQ ID NO: 5430559 - DNA, 25 bp, Homo sapien
gagaatttctctctcttagcctctg

SEQ ID NO: 5430560 - DNA, 25 bp, Homo sapien
tttgggccaacatgtagaaagatca

SEQ ID NO: 5430561 - DNA, 25 bp, Homo sapien
tatttgtagcaaagccaagcctaaa

SEQ ID NO: 5430562 - DNA, 25 bp, Homo sapien
gacctacctccatctgaggcaatga

SEQ ID NO: 5430563 - DNA, 25 bp, Homo sapien
ggaacagtagaactgctccaatcag

SEQ ID NO: 5430564 - DNA, 25 bp, Homo sapien
attcaggaaatttgattctcgtaga

SEQ ID NO: 5430565 - DNA, 25 bp, Homo sapien
tcaggaaatttgattctcgtagaga

SEQ ID NO: 5430566 - DNA, 25 bp, Homo sapien
caggaaatttgattctcgtagagat

SEQ ID NO: 5430567 - DNA, 25 bp, Homo sapien
ttcaggaaatttgattctcgtagag

SEQ ID NO: 5430568 - DNA, 25 bp, Homo sapien
tactcaggcataacataatgaaaac

SEQ ID NO: 5430569 - DNA, 25 bp, Homo sapien
agatactcagaatgatagctgagat

SEQ ID NO: 5430570 - DNA, 25 bp, Homo sapien
actgagctaagagaataccgtaatt

SEQ ID NO: 5430571 - DNA, 25 bp, Homo sapien
aataccgtaattactcaggcataac

SEQ ID NO: 5430572 - DNA, 25 bp, Homo sapien
tatacaatagcttggaatgtgaatg

SEQ ID NO: 5430573 - DNA, 25 bp, Homo sapien
atacaatagcttggaatgtgaatgt

SEQ ID NO: 5430574 - DNA, 25 bp, Homo sapien
ctgtcaaattttcgactctcctttt

SEQ ID NO: 5430575 - DNA, 25 bp, Homo sapien
gctgtcaaattttcgactctccttt

SEQ ID NO: 5430576 - DNA, 25 bp, Homo sapien
tgtcaaattttcgactctccttttc

SEQ ID NO: 5430577 - DNA, 25 bp, Homo sapien
agctgtcaaattttcgactctcctt

SEQ ID NO: 5430578 - DNA, 25 bp, Homo sapien
catctctaaagtcaaactttgaaga

SEQ ID NO: 5430579 - DNA, 25 bp, Homo sapien
gcatcattattcatctcctgcatct

SEQ ID NO: 5430580 - DNA, 25 bp, Homo sapien
tgattttatggtaccagccagcatc

SEQ ID NO: 5430581 - DNA, 25 bp, Homo sapien
tgttcagagagctgattttatggta

SEQ ID NO: 5430582 - DNA, 25 bp, Homo sapien
caagttggcatggaagtgaaagaca

SEQ ID NO: 5430583 - DNA, 25 bp, Homo sapien
taaatgcttggatttcacccaatgg

SEQ ID NO: 5430584 - DNA, 25 bp, Homo sapien
gcagcaagggaaacaagcctgacta

SEQ ID NO: 5430585 - DNA, 25 bp, Homo sapien
cacccaatggtgcagcaaactaatg

SEQ ID NO: 5430586 - DNA, 25 bp, Homo sapien
ctatggactcggttgaacctggcat

SEQ ID NO: 5430587 - DNA, 25 bp, Homo sapien
tatcagaagtaagtgtgaagagcca

SEQ ID NO: 5430588 - DNA, 25 bp, Homo sapien
tgtgtagtacgagccaaaacacagc

SEQ ID NO: 5430589 - DNA, 25 bp, Homo sapien
gaacaggtggcaatgaactacaatc

SEQ ID NO: 5430590 - DNA, 25 bp, Homo sapien
tacaatcagtatgccaaaagaaggt

SEQ ID NO: 5430591 - DNA, 25 bp, Homo sapien
ctgctgcaccccctctggccacaaa

SEQ ID NO: 5430592 - DNA, 25 bp, Homo sapien
aaatattgattgcaattgtcagcag

SEQ ID NO: 5430593 - DNA, 25 bp, Homo sapien
aatattgattgcaattgtcagcagg

SEQ ID NO: 5430594 - DNA, 25 bp, Homo sapien
gaatgaggaagaaatccaggagatg

SEQ ID NO: 5430595 - DNA, 25 bp, Homo sapien
tctattgaagtcagtcactgacagc

SEQ ID NO: 5430596 - DNA, 25 bp, Homo sapien
ctctgaatctctattgaagtcagtc

SEQ ID NO: 5430597 - DNA, 25 bp, Homo sapien
gacagctgacatgtaaatttgttga

SEQ ID NO: 5430598 - DNA, 25 bp, Homo sapien
actgtccagattcttgttggagacg

SEQ ID NO: 5430599 - DNA, 25 bp, Homo sapien
cactgtccagattcttgttggagac

SEQ ID NO: 5430600 - DNA, 25 bp, Homo sapien
cctgaaggagacattcagtcttggt

SEQ ID NO: 5430601 - DNA, 25 bp, Homo sapien
tgagaatgtggactaacctgaagga

SEQ ID NO: 5430602 - DNA, 25 bp, Homo sapien
ctagtatgggttgagattttgtctg

SEQ ID NO: 5430603 - DNA, 25 bp, Homo sapien
tgtggttggaggatggctagtatgg

SEQ ID NO: 5430604 - DNA, 25 bp, Homo sapien
tgaatacatgtggattttaggaaga

SEQ ID NO: 5430605 - DNA, 25 bp, Homo sapien
tctgaatacatgtggattttaggaa

SEQ ID NO: 5430606 - DNA, 25 bp, Homo sapien
ttattctaaatgctaggctcagcat

SEQ ID NO: 5430607 - DNA, 25 bp, Homo sapien
ttattattctaaatgctaggctcag

SEQ ID NO: 5430608 - DNA, 25 bp, Homo sapien
gcttccatgtgtttcctgagaacaa

SEQ ID NO: 5430609 - DNA, 25 bp, Homo sapien
ttccgtgcgattccgatttcctctg

SEQ ID NO: 5430610 - DNA, 25 bp, Homo sapien
tgaggctcagttgaacgctgagcag

SEQ ID NO: 5430611 - DNA, 25 bp, Homo sapien
cagttgaacgctgagcagggtttcc

SEQ ID NO: 5430612 - DNA, 25 bp, Homo sapien
tttggttgtttctgagttagctcag

SEQ ID NO: 5430613 - DNA, 25 bp, Homo sapien
ttctgagttagctcagcataaatac

SEQ ID NO: 5430614 - DNA, 25 bp, Homo sapien
tatcttttacgtggccttcctgttc

SEQ ID NO: 5430615 - DNA, 25 bp, Homo sapien
tcctgttcttttggttgtttctgag

SEQ ID NO: 5430616 - DNA, 25 bp, Homo sapien
tctcccttttacgtaatatatgatg

SEQ ID NO: 5430617 - DNA, 25 bp, Homo sapien
accacgctggcctgtgttaccttta

SEQ ID NO: 5430618 - DNA, 25 bp, Homo sapien
tttcatgtacaacttgggcttctag

SEQ ID NO: 5430619 - DNA, 25 bp, Homo sapien
tctagataggttttcgtctagttta

SEQ ID NO: 5430620 - DNA, 25 bp, Homo sapien
tcaaatgtttatgaagccctgtggc

SEQ ID NO: 5430621 - DNA, 25 bp, Homo sapien
aagccctgtggccttgcttgcctga

SEQ ID NO: 5430622 - DNA, 25 bp, Homo sapien
agccctgtggccttgcttgcctgac

SEQ ID NO: 5430623 - DNA, 25 bp, Homo sapien
gagtaaatcaaatgtttatgaagcc

SEQ ID NO: 5430624 - DNA, 25 bp, Homo sapien
gcaggtgcttttgtgagcagtagac

SEQ ID NO: 5430625 - DNA, 25 bp, Homo sapien
aggaatccagaattgggagaagctc

SEQ ID NO: 5430626 - DNA, 25 bp, Homo sapien
agtagactatccaccattgtggcag

SEQ ID NO: 5430627 - DNA, 25 bp, Homo sapien
tcacctttgctgcatggcaggaatc

SEQ ID NO: 5430628 - DNA, 25 bp, Homo sapien
gtcttctgcccttgctgctgctgaa

SEQ ID NO: 5430629 - DNA, 25 bp, Homo sapien
ttctgcccttgctgctgctgaagac

SEQ ID NO: 5430630 - DNA, 25 bp, Homo sapien
tcatttggtcttctgcccttgctgc

SEQ ID NO: 5430631 - DNA, 25 bp, Homo sapien
catttggtcttctgcccttgctgct

SEQ ID NO: 5430632 - DNA, 25 bp, Homo sapien
aatgtaggcctgaaggatctggctg

SEQ ID NO: 5430633 - DNA, 25 bp, Homo sapien
tgtaggcctgaaggatctggctggc

SEQ ID NO: 5430634 - DNA, 25 bp, Homo sapien
ggtgggagtcagtacaggcaatgta

SEQ ID NO: 5430635 - DNA, 25 bp, Homo sapien
gggggtgggagtcagtacaggcaat

SEQ ID NO: 5430636 - DNA, 25 bp, Homo sapien
tgatgtaaccctgggtcccagattt

SEQ ID NO: 5430637 - DNA, 25 bp, Homo sapien
gatgtaaccctgggtcccagattta

SEQ ID NO: 5430638 - DNA, 25 bp, Homo sapien
ttgatgtaaccctgggtcccagatt

SEQ ID NO: 5430639 - DNA, 25 bp, Homo sapien
cttgatgtaaccctgggtcccagat

SEQ ID NO: 5430640 - DNA, 25 bp, Homo sapien
tagggaaccatagctctgacactgg

SEQ ID NO: 5430641 - DNA, 25 bp, Homo sapien
tcaatcaaaattgaatatggtatgc

SEQ ID NO: 5430642 - DNA, 25 bp, Homo sapien
acatgtgcactcctttgaaatatag

SEQ ID NO: 5430643 - DNA, 25 bp, Homo sapien
gcctttaacaattaccgtatcaatc

SEQ ID NO: 5430644 - DNA, 25 bp, Homo sapien
tggtatgaagtatggtatgaaagga

SEQ ID NO: 5430645 - DNA, 25 bp, Homo sapien
tagaggagcatatggtatgaagtat

SEQ ID NO: 5430646 - DNA, 25 bp, Homo sapien
gagcatatggtatgaagtatggtat

SEQ ID NO: 5430647 - DNA, 25 bp, Homo sapien
tatgaagtatggtatgaaaggagct

SEQ ID NO: 5430648 - DNA, 25 bp, Homo sapien
tgggacatcttcagtcccgttacct

SEQ ID NO: 5430649 - DNA, 25 bp, Homo sapien
tctgggacatcttcagtcccgttac

SEQ ID NO: 5430650 - DNA, 25 bp, Homo sapien
caccaatcccagaatctgatagggc

SEQ ID NO: 5430651 - DNA, 25 bp, Homo sapien
gggacatcttcagtcccgttacctc

SEQ ID NO: 5430652 - DNA, 25 bp, Homo sapien
tggtagttcatagtctgactttgga

SEQ ID NO: 5430653 - DNA, 25 bp, Homo sapien
ttttaagaatggtctgcaacactcc

SEQ ID NO: 5430654 - DNA, 25 bp, Homo sapien
ggaaacagaatgtagcctagacttg

SEQ ID NO: 5430655 - DNA, 25 bp, Homo sapien
gcaacactcctggaaacagaatgta

SEQ ID NO: 5430656 - DNA, 25 bp, Homo sapien
aaggaaattcgatttagatcatgaa

SEQ ID NO: 5430657 - DNA, 25 bp, Homo sapien
cttaaggaaattcgatttagatcat

SEQ ID NO: 5430658 - DNA, 25 bp, Homo sapien
ttaaggaaattcgatttagatcatg

SEQ ID NO: 5430659 - DNA, 25 bp, Homo sapien
taaggaaattcgatttagatcatga

SEQ ID NO: 5430660 - DNA, 25 bp, Homo sapien
ctagttttagagtctcatcacacat

SEQ ID NO: 5430661 - DNA, 25 bp, Homo sapien
aatgtatgggatgcatgtactacta

SEQ ID NO: 5430662 - DNA, 25 bp, Homo sapien
gggatgcatgtactactaccagctc

SEQ ID NO: 5430663 - DNA, 25 bp, Homo sapien
gcatgtactactaccagctcttcta

SEQ ID NO: 5430664 - DNA, 25 bp, Homo sapien
cagaggcacagactcctgatacttt

SEQ ID NO: 5430665 - DNA, 25 bp, Homo sapien
tgataatagatgactgcacagaggc

SEQ ID NO: 5430666 - DNA, 25 bp, Homo sapien
tcttatctgccaaatctttagctga

SEQ ID NO: 5430667 - DNA, 25 bp, Homo sapien
gataaagaccctgcagcttgatttc

SEQ ID NO: 5430668 - DNA, 25 bp, Homo sapien
ctttggggttccaataaatgcttct

SEQ ID NO: 5430669 - DNA, 25 bp, Homo sapien
tggggttccaataaatgcttcttcc

SEQ ID NO: 5430670 - DNA, 25 bp, Homo sapien
gggttccaataaatgcttcttcctc

SEQ ID NO: 5430671 - DNA, 25 bp, Homo sapien
ttggggttccaataaatgcttcttc

SEQ ID NO: 5430672 - DNA, 25 bp, Homo sapien
gttcctgtactatattccttgtggc

SEQ ID NO: 5430673 - DNA, 25 bp, Homo sapien
aggttcctgtactatattccttgtg

SEQ ID NO: 5430674 - DNA, 25 bp, Homo sapien
ggttcctgtactatattccttgtgg

SEQ ID NO: 5430675 - DNA, 25 bp, Homo sapien
ttcctgtactatattccttgtggct

SEQ ID NO: 5430676 - DNA, 25 bp, Homo sapien
tttctgaggttctgtcttctttgga

SEQ ID NO: 5430677 - DNA, 25 bp, Homo sapien
tgaggttctgtcttctttggaactt

SEQ ID NO: 5430678 - DNA, 25 bp, Homo sapien
tctgaggttctgtcttctttggaac

SEQ ID NO: 5430679 - DNA, 25 bp, Homo sapien
ctttctgaggttctgtcttctttgg

SEQ ID NO: 5430680 - DNA, 25 bp, Homo sapien
taatcttgacctctgtaggcagttc

SEQ ID NO: 5430681 - DNA, 25 bp, Homo sapien
aattgtaaacgcctattttctcagg

SEQ ID NO: 5430682 - DNA, 25 bp, Homo sapien
taaggctcttgttagaatcagggct

SEQ ID NO: 5430683 - DNA, 25 bp, Homo sapien
tatgacagcatcctcgcatgaacag

SEQ ID NO: 5430684 - DNA, 25 bp, Homo sapien
acatgtatgaagctaccaaagagca

SEQ ID NO: 5430685 - DNA, 25 bp, Homo sapien
gcttcctcacatgtatgaagctacc

SEQ ID NO: 5430686 - DNA, 25 bp, Homo sapien
caatgcctgtgtaaagcttcctcac

SEQ ID NO: 5430687 - DNA, 25 bp, Homo sapien
cctcacatgtatgaagctaccaaag

SEQ ID NO: 5430688 - DNA, 25 bp, Homo sapien
ttacttagtaatttaatatccttga

SEQ ID NO: 5430689 - DNA, 25 bp, Homo sapien
tacttagtaatttaatatccttgat

SEQ ID NO: 5430690 - DNA, 25 bp, Homo sapien
aaagcaatgtttctggtttgaccca

SEQ ID NO: 5430691 - DNA, 25 bp, Homo sapien
tctctttcaggtacaaagcaatgtt

SEQ ID NO: 5430692 - DNA, 25 bp, Homo sapien
tcaggtacaaagcaatgtttctggt

SEQ ID NO: 5430693 - DNA, 25 bp, Homo sapien
tacaaagcaatgtttctggtttgac

SEQ ID NO: 5430694 - DNA, 25 bp, Homo sapien
tcacttttaagacagggaaggatag

SEQ ID NO: 5430695 - DNA, 25 bp, Homo sapien
cagggaaggatagaattgaaagtaa

SEQ ID NO: 5430696 - DNA, 25 bp, Homo sapien
agaggagtttcacttttaagacagg

SEQ ID NO: 5430697 - DNA, 25 bp, Homo sapien
tttaagacagggaaggatagaattg

SEQ ID NO: 5430698 - DNA, 25 bp, Homo sapien
cttaaccaagggagacttattcctg

SEQ ID NO: 5430699 - DNA, 25 bp, Homo sapien
tctgagcgtaggtgtcatggtagcc

SEQ ID NO: 5430700 - DNA, 25 bp, Homo sapien
aatggctttctgagcgtaggtgtca

SEQ ID NO: 5430701 - DNA, 25 bp, Homo sapien
aagggagacttattcctggaatggc

SEQ ID NO: 5430702 - DNA, 25 bp, Homo sapien
gagcagatttgaagtgattatgcat

SEQ ID NO: 5430703 - DNA, 25 bp, Homo sapien
agagcagatttgaagtgattatgca

SEQ ID NO: 5430704 - DNA, 25 bp, Homo sapien
cctgtcagatggctataagcactgt

SEQ ID NO: 5430705 - DNA, 25 bp, Homo sapien
taagcactgttgtaaaggctggcaa

SEQ ID NO: 5430706 - DNA, 25 bp, Homo sapien
gattaactgatgctggcctgtcaga

SEQ ID NO: 5430707 - DNA, 25 bp, Homo sapien
cagggaatatcaaacctttaggaca

SEQ ID NO: 5430708 - DNA, 25 bp, Homo sapien
tcataaaacataaggcccacaaata

SEQ ID NO: 5430709 - DNA, 25 bp, Homo sapien
atcataaaacataaggcccacaaat

SEQ ID NO: 5430710 - DNA, 25 bp, Homo sapien
cataaaacataaggcccacaaatac

SEQ ID NO: 5430711 - DNA, 25 bp, Homo sapien
tgccttcctggaactatagaataat

SEQ ID NO: 5430712 - DNA, 25 bp, Homo sapien
actgtaggatctgaagcaatccttc

SEQ ID NO: 5430713 - DNA, 25 bp, Homo sapien
ctttataggttcctaactgtaggat

SEQ ID NO: 5430714 - DNA, 25 bp, Homo sapien
ggttcctaactgtaggatctgaagc

SEQ ID NO: 5430715 - DNA, 25 bp, Homo sapien
taacatgccagtattcaatgctcac

SEQ ID NO: 5430716 - DNA, 25 bp, Homo sapien
gcctgcttataggaaggtcgccaga

SEQ ID NO: 5430717 - DNA, 25 bp, Homo sapien
ggtcgccagagaacatagataggct

SEQ ID NO: 5430718 - DNA, 25 bp, Homo sapien
tctatgatgcttatcctcctgcttg

SEQ ID NO: 5430719 - DNA, 25 bp, Homo sapien
acattctaggaaagtacagggtctg

SEQ ID NO: 5430720 - DNA, 25 bp, Homo sapien
cattctaggaaagtacagggtctgc

SEQ ID NO: 5430721 - DNA, 25 bp, Homo sapien
aacattctaggaaagtacagggtct

SEQ ID NO: 5430722 - DNA, 25 bp, Homo sapien
attctaggaaagtacagggtctgcc

SEQ ID NO: 5430723 - DNA, 25 bp, Homo sapien
gcaccgtgccagaagtagagcattt

SEQ ID NO: 5430724 - DNA, 25 bp, Homo sapien
gacctcagcaataaaccttcggaag

SEQ ID NO: 5430725 - DNA, 25 bp, Homo sapien
taagctgagaaacgctgaagtcctg

SEQ ID NO: 5430726 - DNA, 25 bp, Homo sapien
ttagttcaaataccgcaggctcttg

SEQ ID NO: 5430727 - DNA, 25 bp, Homo sapien
acccatgtaatggtttgcctttgca

SEQ ID NO: 5430728 - DNA, 25 bp, Homo sapien
aactctaacgtgattggtgctccag

SEQ ID NO: 5430729 - DNA, 25 bp, Homo sapien
tccagggatgtaggaaacccatgta

SEQ ID NO: 5430730 - DNA, 25 bp, Homo sapien
ccagaagagtaattttgatgctagc

SEQ ID NO: 5430731 - DNA, 25 bp, Homo sapien
ccaggataattgtgagggccagtga

SEQ ID NO: 5430732 - DNA, 25 bp, Homo sapien
ggccagtgaggctttagaagacaga

SEQ ID NO: 5430733 - DNA, 25 bp, Homo sapien
ctgagaagccaggataattgtgagg

SEQ ID NO: 5430734 - DNA, 25 bp, Homo sapien
aattgtgagggccagtgaggcttta

SEQ ID NO: 5430735 - DNA, 25 bp, Homo sapien
tgtgcagcagcctaatgtgttttac

SEQ ID NO: 5430736 - DNA, 25 bp, Homo sapien
tatcattaaagaccaccttctaaag

SEQ ID NO: 5430737 - DNA, 25 bp, Homo sapien
ccttctaaaggccaaatccagagtc

SEQ ID NO: 5430738 - DNA, 25 bp, Homo sapien
gaagcactcatcattgctgaccagc

SEQ ID NO: 5430739 - DNA, 25 bp, Homo sapien
gcagatgtccagttgcattgacaat

SEQ ID NO: 5430740 - DNA, 25 bp, Homo sapien
gcagcagatgtccagttgcattgac

SEQ ID NO: 5430741 - DNA, 25 bp, Homo sapien
taaggcagcagatgtccagttgcat

SEQ ID NO: 5430742 - DNA, 25 bp, Homo sapien
ttaaggcagcagatgtccagttgca

SEQ ID NO: 5430743 - DNA, 25 bp, Homo sapien
tttgttttgatctacttttctttca

SEQ ID NO: 5430744 - DNA, 25 bp, Homo sapien
cttctgggaacctttgttttgatct

SEQ ID NO: 5430745 - DNA, 25 bp, Homo sapien
tgttttgatctacttttctttcaat

SEQ ID NO: 5430746 - DNA, 25 bp, Homo sapien
ctgggaacctttgttttgatctact

SEQ ID NO: 5430747 - DNA, 25 bp, Homo sapien
aggcagcacagatgcaaaattgtag

SEQ ID NO: 5430748 - DNA, 25 bp, Homo sapien
gcagcacagatgcaaaattgtagcc

SEQ ID NO: 5430749 - DNA, 25 bp, Homo sapien
tcaggcaggcagcacagatgcaaaa

SEQ ID NO: 5430750 - DNA, 25 bp, Homo sapien
aggcaggcagcacagatgcaaaatt

SEQ ID NO: 5430751 - DNA, 25 bp, Homo sapien
tctggtatgctccttgagtggtcca

SEQ ID NO: 5430752 - DNA, 25 bp, Homo sapien
cttctggtatgctccttgagtggtc

SEQ ID NO: 5430753 - DNA, 25 bp, Homo sapien
ttctggtatgctccttgagtggtcc

SEQ ID NO: 5430754 - DNA, 25 bp, Homo sapien
gcttctggtatgctccttgagtggt

SEQ ID NO: 5430755 - DNA, 25 bp, Homo sapien
cttgtgactaaattcttcttcattc

SEQ ID NO: 5430756 - DNA, 25 bp, Homo sapien
tgtgactaaattcttcttcattcat

SEQ ID NO: 5430757 - DNA, 25 bp, Homo sapien
ttgtgactaaattcttcttcattca

SEQ ID NO: 5430758 - DNA, 25 bp, Homo sapien
ctaataacagttctcattaaaattc

SEQ ID NO: 5430759 - DNA, 25 bp, Homo sapien
ataacagttctcattaaaattccaa

SEQ ID NO: 5430760 - DNA, 25 bp, Homo sapien
cctccagtaggaaatggagaattca

SEQ ID NO: 5430761 - DNA, 25 bp, Homo sapien
tcctccagtaggaaatggagaattc

SEQ ID NO: 5430762 - DNA, 25 bp, Homo sapien
atcctccagtaggaaatggagaatt

SEQ ID NO: 5430763 - DNA, 25 bp, Homo sapien
tatagcccgttgtaatgggagcaac

SEQ ID NO: 5430764 - DNA, 25 bp, Homo sapien
agctcaccaatattcccttactgga

SEQ ID NO: 5430765 - DNA, 25 bp, Homo sapien
tactgattttcaccgtatagcccgt

SEQ ID NO: 5430766 - DNA, 25 bp, Homo sapien
tcaaatttatatatgcagctcacca

SEQ ID NO: 5430767 - DNA, 25 bp, Homo sapien
ctagtagccttttccagcaacacct

SEQ ID NO: 5430768 - DNA, 25 bp, Homo sapien
ttacctcttctagatctttctgtag

SEQ ID NO: 5430769 - DNA, 25 bp, Homo sapien
gcaacacctttacctcttctagatc

SEQ ID NO: 5430770 - DNA, 25 bp, Homo sapien
cttcctagtagccttttccagcaac

SEQ ID NO: 5430771 - DNA, 25 bp, Homo sapien
aaggaacaggaaacgccgcgccaag

SEQ ID NO: 5430772 - DNA, 25 bp, Homo sapien
gaaggaacaggaaacgccgcgccaa

SEQ ID NO: 5430773 - DNA, 25 bp, Homo sapien
aggtcattggttagggcacagaaac

SEQ ID NO: 5430774 - DNA, 25 bp, Homo sapien
ggtcattggttagggcacagaaaca

SEQ ID NO: 5430775 - DNA, 25 bp, Homo sapien
gtcattggttagggcacagaaacac

SEQ ID NO: 5430776 - DNA, 25 bp, Homo sapien
taatgtctttaatagtggaagtagc

SEQ ID NO: 5430777 - DNA, 25 bp, Homo sapien
tagggagaatagttgggagtaggca

SEQ ID NO: 5430778 - DNA, 25 bp, Homo sapien
gaagtagcagttagggagaatagtt

SEQ ID NO: 5430779 - DNA, 25 bp, Homo sapien
ctgttggaatctgactaatgtcttt

SEQ ID NO: 5430780 - DNA, 25 bp, Homo sapien
gaagacctaataaagagcgcccctc

SEQ ID NO: 5430781 - DNA, 25 bp, Homo sapien
ttccatgagaagacctaataaagag

SEQ ID NO: 5430782 - DNA, 25 bp, Homo sapien
ttctctatatgcctggtccgtgcac

SEQ ID NO: 5430783 - DNA, 25 bp, Homo sapien
tctatatgcctggtccgtgcaccaa

SEQ ID NO: 5430784 - DNA, 25 bp, Homo sapien
atccatcagtattgtattcggctct

SEQ ID NO: 5430785 - DNA, 25 bp, Homo sapien
ccatcagtattgtattcggctcttc

SEQ ID NO: 5430786 - DNA, 25 bp, Homo sapien
tccatcagtattgtattcggctctt

SEQ ID NO: 5430787 - DNA, 25 bp, Homo sapien
tccagccggattgttttctgcagtt

SEQ ID NO: 5430788 - DNA, 25 bp, Homo sapien
aaccactgccacctccagaatccat

SEQ ID NO: 5430789 - DNA, 25 bp, Homo sapien
caccacagaatcatgcaaaccactg

SEQ ID NO: 5430790 - DNA, 25 bp, Homo sapien
cacagaatcatgcaaaccactgcca

SEQ ID NO: 5430791 - DNA, 25 bp, Homo sapien
aaaccactgccacctccagaatcca

SEQ ID NO: 5430792 - DNA, 25 bp, Homo sapien
catctttctttactctcttattcat

SEQ ID NO: 5430793 - DNA, 25 bp, Homo sapien
ttcatctttctttactctcttattc

SEQ ID NO: 5430794 - DNA, 25 bp, Homo sapien
tcatctttctttactctcttattca

SEQ ID NO: 5430795 - DNA, 25 bp, Homo sapien
aattcatctttctttactctcttat

SEQ ID NO: 5430796 - DNA, 25 bp, Homo sapien
ctgtttgttactaggaacacagata

SEQ ID NO: 5430797 - DNA, 25 bp, Homo sapien
gaatcactctgattaataggaagag

SEQ ID NO: 5430798 - DNA, 25 bp, Homo sapien
tcactatgggtgattatttattcct

SEQ ID NO: 5430799 - DNA, 25 bp, Homo sapien
taaagtgctgcattctactaaatta

SEQ ID NO: 5430800 - DNA, 25 bp, Homo sapien
tcttccctgtcactgtgtcagaatg

SEQ ID NO: 5430801 - DNA, 25 bp, Homo sapien
cctgaacttccttgggcagctgtcc

SEQ ID NO: 5430802 - DNA, 25 bp, Homo sapien
ggcaggaggacctgagactgtaaag

SEQ ID NO: 5430803 - DNA, 25 bp, Homo sapien
tcagaatgtttagggcaggaggacc

SEQ ID NO: 5430804 - DNA, 25 bp, Homo sapien
gctccattgcatatcacgtccattg

SEQ ID NO: 5430805 - DNA, 25 bp, Homo sapien
tgaccaaggcatcgagaaaaccacc

SEQ ID NO: 5430806 - DNA, 25 bp, Homo sapien
gatgtacaccatcaatccgaatttc

SEQ ID NO: 5430807 - DNA, 25 bp, Homo sapien
taccaagcccattgggatgctgcct

SEQ ID NO: 5430808 - DNA, 25 bp, Homo sapien
attcactggccaacctcttaggtcc

SEQ ID NO: 5430809 - DNA, 25 bp, Homo sapien
tgtattcactggccaacctcttagg

SEQ ID NO: 5430810 - DNA, 25 bp, Homo sapien
cagtgtattcactggccaacctctt

SEQ ID NO: 5430811 - DNA, 25 bp, Homo sapien
tattcactggccaacctcttaggtc

SEQ ID NO: 5430812 - DNA, 25 bp, Homo sapien
tttgccacacccatcaactcgtgat

SEQ ID NO: 5430813 - DNA, 25 bp, Homo sapien
ggtagtttgccacacccatcaactc

SEQ ID NO: 5430814 - DNA, 25 bp, Homo sapien
gggcaggcctcagtgtgtgatattc

SEQ ID NO: 5430815 - DNA, 25 bp, Homo sapien
tcctaatgctaaccccacccccagc

SEQ ID NO: 5430816 - DNA, 25 bp, Homo sapien
ttgggaagaagccatatagcaatct

SEQ ID NO: 5430817 - DNA, 25 bp, Homo sapien
gaagaagccatatagcaatcttccc

SEQ ID NO: 5430818 - DNA, 25 bp, Homo sapien
gccatatagcaatcttcccagagaa

SEQ ID NO: 5430819 - DNA, 25 bp, Homo sapien
gaagccatatagcaatcttcccaga

SEQ ID NO: 5430820 - DNA, 25 bp, Homo sapien
tgtcaaatcgaaaaaggctggactt

SEQ ID NO: 5430821 - DNA, 25 bp, Homo sapien
cacactgaggatagacgctctagct

SEQ ID NO: 5430822 - DNA, 25 bp, Homo sapien
ggctggacttaggagcccacactga

SEQ ID NO: 5430823 - DNA, 25 bp, Homo sapien
cccacactgaggatagacgctctag

SEQ ID NO: 5430824 - DNA, 25 bp, Homo sapien
tgtatattggttgagtactttagtc

SEQ ID NO: 5430825 - DNA, 25 bp, Homo sapien
gtcagatctttaaaccgtgtcttca

SEQ ID NO: 5430826 - DNA, 25 bp, Homo sapien
taatcataattaagtcctttgtgtt

SEQ ID NO: 5430827 - DNA, 25 bp, Homo sapien
cataattaagtcctttgtgttttgt

SEQ ID NO: 5430828 - DNA, 25 bp, Homo sapien
tgaggagacaacatccttatcaatg

SEQ ID NO: 5430829 - DNA, 25 bp, Homo sapien
tcaatgtctgacttctatacttttc

SEQ ID NO: 5430830 - DNA, 25 bp, Homo sapien
ctaggtaagagtggggatgaagtga

SEQ ID NO: 5430831 - DNA, 25 bp, Homo sapien
tctgacttctatacttttcagtcct

SEQ ID NO: 5430832 - DNA, 25 bp, Homo sapien
cacttccacatcttattaacactgg

SEQ ID NO: 5430833 - DNA, 25 bp, Homo sapien
aaagtgagacaaacactcacattaa

SEQ ID NO: 5430834 - DNA, 25 bp, Homo sapien
cacatcgaacagctgtaaagatatt

SEQ ID NO: 5430835 - DNA, 25 bp, Homo sapien
acaaacacatcgaacagctgtaaag

SEQ ID NO: 5430836 - DNA, 25 bp, Homo sapien
gtctgctgcattgccggttcttcct

SEQ ID NO: 5430837 - DNA, 25 bp, Homo sapien
gctgcattgccggttcttccttttt

SEQ ID NO: 5430838 - DNA, 25 bp, Homo sapien
cacaagtctgctgcattgccggttc

SEQ ID NO: 5430839 - DNA, 25 bp, Homo sapien
tgcattgccggttcttcctttttca

SEQ ID NO: 5430840 - DNA, 25 bp, Homo sapien
ggcacagtaactagtaatctatgaa

SEQ ID NO: 5430841 - DNA, 25 bp, Homo sapien
gaattccagcgaaatgacatctgct

SEQ ID NO: 5430842 - DNA, 25 bp, Homo sapien
gacatctgcttacatctgttggcca

SEQ ID NO: 5430843 - DNA, 25 bp, Homo sapien
tgtttatcagcacaaaattatggtg

SEQ ID NO: 5430844 - DNA, 25 bp, Homo sapien
gattatgtgctgatagcataagaag

SEQ ID NO: 5430845 - DNA, 25 bp, Homo sapien
attatgtgctgatagcataagaagg

SEQ ID NO: 5430846 - DNA, 25 bp, Homo sapien
ttatgtgctgatagcataagaaggt

SEQ ID NO: 5430847 - DNA, 25 bp, Homo sapien
cagattatgtgctgatagcataaga

SEQ ID NO: 5430848 - DNA, 25 bp, Homo sapien
taattgtgcaattgttggaaagcca

SEQ ID NO: 5430849 - DNA, 25 bp, Homo sapien
ccactaaattatgctagctcagaca

SEQ ID NO: 5430850 - DNA, 25 bp, Homo sapien
ttcttaaaatgaagggtcccctgca

SEQ ID NO: 5430851 - DNA, 25 bp, Homo sapien
gagagatgacattcattgaagctag

SEQ ID NO: 5430852 - DNA, 25 bp, Homo sapien
aataagaatatattactgctgatgt

SEQ ID NO: 5430853 - DNA, 25 bp, Homo sapien
aagaaataagaatatattactgctg

SEQ ID NO: 5430854 - DNA, 25 bp, Homo sapien
tcatgaagaaagttgagcaagaaat

SEQ ID NO: 5430855 - DNA, 25 bp, Homo sapien
gaaagttgagcaagaaataagaata

SEQ ID NO: 5430856 - DNA, 25 bp, Homo sapien
taaccaaaatcctgtatccaaatat

SEQ ID NO: 5430857 - DNA, 25 bp, Homo sapien
gtaaccaaaatcctgtatccaaata

SEQ ID NO: 5430858 - DNA, 25 bp, Homo sapien
ggctttctttagtctgaaactcaga

SEQ ID NO: 5430859 - DNA, 25 bp, Homo sapien
tggctttctttagtctgaaactcag

SEQ ID NO: 5430860 - DNA, 25 bp, Homo sapien
tttctttagtctgaaactcagattc

SEQ ID NO: 5430861 - DNA, 25 bp, Homo sapien
tctttagtctgaaactcagattcat

SEQ ID NO: 5430862 - DNA, 25 bp, Homo sapien
ctacttgaaagaggagcccatatgc

SEQ ID NO: 5430863 - DNA, 25 bp, Homo sapien
ggagcccatatgcaggaagtaacta

SEQ ID NO: 5430864 - DNA, 25 bp, Homo sapien
aactaagtgcctcttgtctcaagtg

SEQ ID NO: 5430865 - DNA, 25 bp, Homo sapien
tcttgtctcaagtgagtaaagggac

SEQ ID NO: 5430866 - DNA, 25 bp, Homo sapien
taccactctgggaatcaaatcctat

SEQ ID NO: 5430867 - DNA, 25 bp, Homo sapien
aagcagggccctgattttagcgtag

SEQ ID NO: 5430868 - DNA, 25 bp, Homo sapien
attttagcgtaggagagtttctggg

SEQ ID NO: 5430869 - DNA, 25 bp, Homo sapien
ggtgtgtactcaatctcttttgtag

SEQ ID NO: 5430870 - DNA, 25 bp, Homo sapien
ggaaattacgagaaagtgcacaggc

SEQ ID NO: 5430871 - DNA, 25 bp, Homo sapien
agaaacatggaaattacgagaaagt

SEQ ID NO: 5430872 - DNA, 25 bp, Homo sapien
aaacatggaaattacgagaaagtgc

SEQ ID NO: 5430873 - DNA, 25 bp, Homo sapien
catggaaattacgagaaagtgcaca

SEQ ID NO: 5430874 - DNA, 25 bp, Homo sapien
aagatggaggtcccaccaaattgct

SEQ ID NO: 5430875 - DNA, 25 bp, Homo sapien
aaagatggaggtcccaccaaattgc

SEQ ID NO: 5430876 - DNA, 25 bp, Homo sapien
agatggaggtcccaccaaattgctc

SEQ ID NO: 5430877 - DNA, 25 bp, Homo sapien
tctcgtaattcccagataagaaagt

SEQ ID NO: 5430878 - DNA, 25 bp, Homo sapien
cggtgccaagtagatggttttgtcc

SEQ ID NO: 5430879 - DNA, 25 bp, Homo sapien
gagatgtaactaatgagctcctcat

SEQ ID NO: 5430880 - DNA, 25 bp, Homo sapien
gctcctcatactcaggtcagccttt

SEQ ID NO: 5430881 - DNA, 25 bp, Homo sapien
acatcatcatggccaatcatttttt

SEQ ID NO: 5430882 - DNA, 25 bp, Homo sapien
catcatcatggccaatcattttttg

SEQ ID NO: 5430883 - DNA, 25 bp, Homo sapien
tctagagtacgccttactgctaaga

SEQ ID NO: 5430884 - DNA, 25 bp, Homo sapien
gcttgtctagagtacgccttactgc

SEQ ID NO: 5430885 - DNA, 25 bp, Homo sapien
tcctgcttgtctagagtacgcctta

SEQ ID NO: 5430886 - DNA, 25 bp, Homo sapien
agagtacgccttactgctaagaatg

SEQ ID NO: 5430887 - DNA, 25 bp, Homo sapien
ggttatggcatacacattactgtca

SEQ ID NO: 5430888 - DNA, 25 bp, Homo sapien
caatgatgtttcacctgattggtta

SEQ ID NO: 5430889 - DNA, 25 bp, Homo sapien
ctttgaaatgtctgccgtacaatga

SEQ ID NO: 5430890 - DNA, 25 bp, Homo sapien
tactgtcatgtcacaaaacatgctg

SEQ ID NO: 5430891 - DNA, 25 bp, Homo sapien
gtcataatattctgctagggtagct

SEQ ID NO: 5430892 - DNA, 25 bp, Homo sapien
caataaagatgatcgaatccagaat

SEQ ID NO: 5430893 - DNA, 25 bp, Homo sapien
gcttccttagtctcaataaagatga

SEQ ID NO: 5430894 - DNA, 25 bp, Homo sapien
tccagagatttttatggaatttgct

SEQ ID NO: 5430895 - DNA, 25 bp, Homo sapien
tgttgggccatgattgacagtccag

SEQ ID NO: 5430896 - DNA, 25 bp, Homo sapien
ttttcagcagttctagcaaatgcaa

SEQ ID NO: 5430897 - DNA, 25 bp, Homo sapien
tttcagcagttctagcaaatgcaag

SEQ ID NO: 5430898 - DNA, 25 bp, Homo sapien
tgttcaccaagtttaggggatgcct

SEQ ID NO: 5430899 - DNA, 25 bp, Homo sapien
ttcaccaagtttaggggatgcctgc

SEQ ID NO: 5430900 - DNA, 25 bp, Homo sapien
tcaccaagtttaggggatgcctgca

SEQ ID NO: 5430901 - DNA, 25 bp, Homo sapien
gtatgttcaccaagtttaggggatg

SEQ ID NO: 5430902 - DNA, 25 bp, Homo sapien
gtccaggctgcctgtaacttgggcc

SEQ ID NO: 5430903 - DNA, 25 bp, Homo sapien
gatttagtacctccagtgtccaggc

SEQ ID NO: 5430904 - DNA, 25 bp, Homo sapien
cacaacggatttagtacctccagtg

SEQ ID NO: 5430905 - DNA, 25 bp, Homo sapien
ggctgcctgtaacttgggcctctcc

SEQ ID NO: 5430906 - DNA, 25 bp, Homo sapien
gctcttgccgctaagcatgcagcaa

SEQ ID NO: 5430907 - DNA, 25 bp, Homo sapien
tcctgattggttatgcccgtggtaa

SEQ ID NO: 5430908 - DNA, 25 bp, Homo sapien
tgccacagacaactggtcgtgaagt

SEQ ID NO: 5430909 - DNA, 25 bp, Homo sapien
tgtagtcctgagtccttcttcctga

SEQ ID NO: 5430910 - DNA, 25 bp, Homo sapien
cagtatttccacttgtatagtcatc

SEQ ID NO: 5430911 - DNA, 25 bp, Homo sapien
tgaataggtcatctcacagaatcat

SEQ ID NO: 5430912 - DNA, 25 bp, Homo sapien
tttctacatttaggcacaagcattt

SEQ ID NO: 5430913 - DNA, 25 bp, Homo sapien
cacaagcattttgctctttcagtat

SEQ ID NO: 5430914 - DNA, 25 bp, Homo sapien
tctgagaacttaaaccaaagatcag

SEQ ID NO: 5430915 - DNA, 25 bp, Homo sapien
ctagctaatagcgtcctcaaaattg

SEQ ID NO: 5430916 - DNA, 25 bp, Homo sapien
ttgtgtgaattcaccttgttgctgc

SEQ ID NO: 5430917 - DNA, 25 bp, Homo sapien
tgctgctcactatccaacttcttgt

SEQ ID NO: 5430918 - DNA, 25 bp, Homo sapien
tcctgcttatagacattgatacctg

SEQ ID NO: 5430919 - DNA, 25 bp, Homo sapien
tcattcactaactgtatcctgctta

SEQ ID NO: 5430920 - DNA, 25 bp, Homo sapien
gacattgatacctgtgaggttgcct

SEQ ID NO: 5430921 - DNA, 25 bp, Homo sapien
gatacctgtgaggttgcctgggtaa

SEQ ID NO: 5430922 - DNA, 25 bp, Homo sapien
cttttatcctgttctctaaacacat

SEQ ID NO: 5430923 - DNA, 25 bp, Homo sapien
tattccagacacatcctgtaaaatg

SEQ ID NO: 5430924 - DNA, 25 bp, Homo sapien
ctttattccagacacatcctgtaaa

SEQ ID NO: 5430925 - DNA, 25 bp, Homo sapien
tttattccagacacatcctgtaaaa

SEQ ID NO: 5430926 - DNA, 25 bp, Homo sapien
attccagacacatcctgtaaaatgt

SEQ ID NO: 5430927 - DNA, 25 bp, Homo sapien
ttcaaactcgaaattagagacttca

SEQ ID NO: 5430928 - DNA, 25 bp, Homo sapien
gacttttatggcattaggaaccagt

SEQ ID NO: 5430929 - DNA, 25 bp, Homo sapien
ccggatatcccaagttgtcatctga

SEQ ID NO: 5430930 - DNA, 25 bp, Homo sapien
gaggtgcagatatctaagacttctg

SEQ ID NO: 5430931 - DNA, 25 bp, Homo sapien
aactgaattttttgagggctacact

SEQ ID NO: 5430932 - DNA, 25 bp, Homo sapien
cactatttgtatgttgaactagaag

SEQ ID NO: 5430933 - DNA, 25 bp, Homo sapien
tatgttgaactagaagcccaaataa

SEQ ID NO: 5430934 - DNA, 25 bp, Homo sapien
ttttgagggctacactatttgtatg

SEQ ID NO: 5430935 - DNA, 25 bp, Homo sapien
cccagaaacaatatgtgtctgtagg

SEQ ID NO: 5430936 - DNA, 25 bp, Homo sapien
ttttaacccagaaacaatatgtgtc

SEQ ID NO: 5430937 - DNA, 25 bp, Homo sapien
ttcttctcccacttaccggacacta

SEQ ID NO: 5430938 - DNA, 25 bp, Homo sapien
cacttaccggacactaagaaactca

SEQ ID NO: 5430939 - DNA, 25 bp, Homo sapien
ggcatttatcccaaggctacttatt

SEQ ID NO: 5430940 - DNA, 25 bp, Homo sapien
gggagctaagttggtattctgttct

SEQ ID NO: 5430941 - DNA, 25 bp, Homo sapien
tacagcctaacaagtgctctatcat

SEQ ID NO: 5430942 - DNA, 25 bp, Homo sapien
cacaatttctacagttataccagct

SEQ ID NO: 5430943 - DNA, 25 bp, Homo sapien
tcctgaactggatattgagctttat

SEQ ID NO: 5430944 - DNA, 25 bp, Homo sapien
tttgccactagaagcacagtgtgac

SEQ ID NO: 5430945 - DNA, 25 bp, Homo sapien
cagtgtgacattccacgtagactat

SEQ ID NO: 5430946 - DNA, 25 bp, Homo sapien
attctgttccatgggatgagtcata

SEQ ID NO: 5430947 - DNA, 25 bp, Homo sapien
actccaccacctcagaggggctaaa

SEQ ID NO: 5430948 - DNA, 25 bp, Homo sapien
tcactccaccacctcagaggggcta

SEQ ID NO: 5430949 - DNA, 25 bp, Homo sapien
tctcactccaccacctcagaggggc

SEQ ID NO: 5430950 - DNA, 25 bp, Homo sapien
gctctcactccaccacctcagaggg

SEQ ID NO: 5430951 - DNA, 25 bp, Homo sapien
cacagccgggctgatggctgccttg

SEQ ID NO: 5430952 - DNA, 25 bp, Homo sapien
tgatggctgccttggacccttgaaa

SEQ ID NO: 5430953 - DNA, 25 bp, Homo sapien
gcacagccgggctgatggctgcctt

SEQ ID NO: 5430954 - DNA, 25 bp, Homo sapien
ggctgccttggacccttgaaaacca

SEQ ID NO: 5430955 - DNA, 25 bp, Homo sapien
tttccattcaggtcgcttctagggc

SEQ ID NO: 5430956 - DNA, 25 bp, Homo sapien
ctactttccgtgacaaacccattag

SEQ ID NO: 5430957 - DNA, 25 bp, Homo sapien
agttcgtgtgcagatttttccattc

SEQ ID NO: 5430958 - DNA, 25 bp, Homo sapien
aacgcttttgttcgctaccactctg

SEQ ID NO: 5430959 - DNA, 25 bp, Homo sapien
gaggcatgtaaagcaagcttgaggc

SEQ ID NO: 5430960 - DNA, 25 bp, Homo sapien
catgtaaagcaagcttgaggcagca

SEQ ID NO: 5430961 - DNA, 25 bp, Homo sapien
ctagagaggcatgtaaagcaagctt

SEQ ID NO: 5430962 - DNA, 25 bp, Homo sapien
aagcaagcttgaggcagcagcgcct

SEQ ID NO: 5430963 - DNA, 25 bp, Homo sapien
tcgtcccgacgcgaatctgaggaga

SEQ ID NO: 5430964 - DNA, 25 bp, Homo sapien
agcagcagcaactccgagtgcaggc

SEQ ID NO: 5430965 - DNA, 25 bp, Homo sapien
ggcaacgccgctcactataataaca

SEQ ID NO: 5430966 - DNA, 25 bp, Homo sapien
tggctcagtgcaatggaccggcaac

SEQ ID NO: 5430967 - DNA, 25 bp, Homo sapien
cactccattaagctgaagattacca

SEQ ID NO: 5430968 - DNA, 25 bp, Homo sapien
ctcactccattaagctgaagattac

SEQ ID NO: 5430969 - DNA, 25 bp, Homo sapien
cacagtctctccttatttgaagcaa

SEQ ID NO: 5430970 - DNA, 25 bp, Homo sapien
ccattaagctgaagattaccacagt

SEQ ID NO: 5430971 - DNA, 25 bp, Homo sapien
ggcaaacttaatgcacaagatttca

SEQ ID NO: 5430972 - DNA, 25 bp, Homo sapien
taatggtgtaggtgataaaatgcat

SEQ ID NO: 5430973 - DNA, 25 bp, Homo sapien
ccatatttacaataatggtgtaggt

SEQ ID NO: 5430974 - DNA, 25 bp, Homo sapien
aggcaaacttaatgcacaagatttc

SEQ ID NO: 5430975 - DNA, 25 bp, Homo sapien
gaccgaagtttacctatgtggagac

SEQ ID NO: 5430976 - DNA, 25 bp, Homo sapien
tatattcagggccaaattcaggctg

SEQ ID NO: 5430977 - DNA, 25 bp, Homo sapien
tacagatcagcgagaatttcaggga

SEQ ID NO: 5430978 - DNA, 25 bp, Homo sapien
taccttgcttagttcgaggaccgaa

SEQ ID NO: 5430979 - DNA, 25 bp, Homo sapien
atgaacctttgatgtaggacacttg

SEQ ID NO: 5430980 - DNA, 25 bp, Homo sapien
gaacctttgatgtaggacacttgga

SEQ ID NO: 5430981 - DNA, 25 bp, Homo sapien
gatgtaggacacttggatttggaga

SEQ ID NO: 5430982 - DNA, 25 bp, Homo sapien
cctttgatgtaggacacttggattt

SEQ ID NO: 5430983 - DNA, 25 bp, Homo sapien
aatgcgtactttggcaaattccacc

SEQ ID NO: 5430984 - DNA, 25 bp, Homo sapien
ctttaatgcgtactttggcaaattc

SEQ ID NO: 5430985 - DNA, 25 bp, Homo sapien
tttaatgcgtactttggcaaattcc

SEQ ID NO: 5430986 - DNA, 25 bp, Homo sapien
taatgcgtactttggcaaattccac

SEQ ID NO: 5430987 - DNA, 25 bp, Homo sapien
gttttatgctctatggtcctaacag

SEQ ID NO: 5430988 - DNA, 25 bp, Homo sapien
ggaagcttaaatgctgcacctgtga

SEQ ID NO: 5430989 - DNA, 25 bp, Homo sapien
tcatgaaagctagactcagtgatgg

SEQ ID NO: 5430990 - DNA, 25 bp, Homo sapien
gagaaactgtagatgacttggacca

SEQ ID NO: 5430991 - DNA, 25 bp, Homo sapien
tcttcagtgaagacgcattgatcgt

SEQ ID NO: 5430992 - DNA, 25 bp, Homo sapien
gaaacaattgaagtagtccctttgc

SEQ ID NO: 5430993 - DNA, 25 bp, Homo sapien
gaagtagtccctttgcacctaatct

SEQ ID NO: 5430994 - DNA, 25 bp, Homo sapien
ttgatcgtaatgttttcaccaaaag

SEQ ID NO: 5430995 - DNA, 25 bp, Homo sapien
aatgtggacttcaggacttgagcca

SEQ ID NO: 5430996 - DNA, 25 bp, Homo sapien
atgtggacttcaggacttgagccag

SEQ ID NO: 5430997 - DNA, 25 bp, Homo sapien
gtacagaaatctgagccatgtggat

SEQ ID NO: 5430998 - DNA, 25 bp, Homo sapien
gactgtctgaagatgggtggtattc

SEQ ID NO: 5430999 - DNA, 25 bp, Homo sapien
tgagccatgtggataactgttataa

SEQ ID NO: 5431000 - DNA, 25 bp, Homo sapien
tctgaagatgggtggtattctaatt

SEQ ID NO: 5431001 - DNA, 25 bp, Homo sapien
ctcaataaagttaggtactccttgt

SEQ ID NO: 5431002 - DNA, 25 bp, Homo sapien
cttgtttgctaaacactggacgaag

SEQ ID NO: 5431003 - DNA, 25 bp, Homo sapien
taggtactccttgtttgctaaacac

SEQ ID NO: 5431004 - DNA, 25 bp, Homo sapien
tactccttgtttgctaaacactgga

SEQ ID NO: 5431005 - DNA, 25 bp, Homo sapien
cctgggaggtattgttgcttagcat

SEQ ID NO: 5431006 - DNA, 25 bp, Homo sapien
ttctgtttcaagaattgcaaagcct

SEQ ID NO: 5431007 - DNA, 25 bp, Homo sapien
tttcaagaattgcaaagcctgggag

SEQ ID NO: 5431008 - DNA, 25 bp, Homo sapien
gaattgcaaagcctgggaggtattg

SEQ ID NO: 5431009 - DNA, 25 bp, Homo sapien
agcaacacattctggtgtggcagag

SEQ ID NO: 5431010 - DNA, 25 bp, Homo sapien
aagcaacacattctggtgtggcaga

SEQ ID NO: 5431011 - DNA, 25 bp, Homo sapien
tacttagtatctgtaatgccatggc

SEQ ID NO: 5431012 - DNA, 25 bp, Homo sapien
cacggaagcttgaatacttagtatc

SEQ ID NO: 5431013 - DNA, 25 bp, Homo sapien
taattatccacggaagcttgaatac

SEQ ID NO: 5431014 - DNA, 25 bp, Homo sapien
ttagtatctgtaatgccatggcaaa

SEQ ID NO: 5431015 - DNA, 25 bp, Homo sapien
tgaagtaaggcaaatttgtctgaga

SEQ ID NO: 5431016 - DNA, 25 bp, Homo sapien
taaggcaaatttgtctgagacacct

SEQ ID NO: 5431017 - DNA, 25 bp, Homo sapien
tttgaagtaaggcaaatttgtctga

SEQ ID NO: 5431018 - DNA, 25 bp, Homo sapien
agtaaggcaaatttgtctgagacac

SEQ ID NO: 5431019 - DNA, 25 bp, Homo sapien
gaagtttggatgcaccaaatttagc

SEQ ID NO: 5431020 - DNA, 25 bp, Homo sapien
tatgctatcaacttgtgaagtttgg

SEQ ID NO: 5431021 - DNA, 25 bp, Homo sapien
ttggatgcaccaaatttagcaacct

SEQ ID NO: 5431022 - DNA, 25 bp, Homo sapien
gcaacctgggttaattgtttgccat

SEQ ID NO: 5431023 - DNA, 25 bp, Homo sapien
cataacaagatttattagccttagt

SEQ ID NO: 5431024 - DNA, 25 bp, Homo sapien
cttagtatgatcaccatagcctttg

SEQ ID NO: 5431025 - DNA, 25 bp, Homo sapien
tttattagccttagtatgatcacca

SEQ ID NO: 5431026 - DNA, 25 bp, Homo sapien
ctcagtggctttggtcataacaaga

SEQ ID NO: 5431027 - DNA, 25 bp, Homo sapien
agtggtcagaggagccccagcagca

SEQ ID NO: 5431028 - DNA, 25 bp, Homo sapien
cttgctcagtggtcagaggagcccc

SEQ ID NO: 5431029 - DNA, 25 bp, Homo sapien
ccccagcagcagaaatttctgaagg

SEQ ID NO: 5431030 - DNA, 25 bp, Homo sapien
cccagcagcagaaatttctgaaggc

SEQ ID NO: 5431031 - DNA, 25 bp, Homo sapien
tggtagcccagaaaaagagagaaca

SEQ ID NO: 5431032 - DNA, 25 bp, Homo sapien
ctggtagcccagaaaaagagagaac

SEQ ID NO: 5431033 - DNA, 25 bp, Homo sapien
ggtagcccagaaaaagagagaacat

SEQ ID NO: 5431034 - DNA, 25 bp, Homo sapien
cctctctcaggggatatttgcaggg

SEQ ID NO: 5431035 - DNA, 25 bp, Homo sapien
aggagtgcacgtgggagcctctctc

SEQ ID NO: 5431036 - DNA, 25 bp, Homo sapien
tctcaggggatatttgcagggtgtt

SEQ ID NO: 5431037 - DNA, 25 bp, Homo sapien
gcaggagtgcacgtgggagcctctc

SEQ ID NO: 5431038 - DNA, 25 bp, Homo sapien
catagtcagtttgatcttgtgcttg

SEQ ID NO: 5431039 - DNA, 25 bp, Homo sapien
tttattggcaacatccaaacaatca

SEQ ID NO: 5431040 - DNA, 25 bp, Homo sapien
caactgtgttgttagcttcgctctt

SEQ ID NO: 5431041 - DNA, 25 bp, Homo sapien
gccttgacatcctcaatgagcacaa

SEQ ID NO: 5431042 - DNA, 25 bp, Homo sapien
ctgtctctatagctgtgcatctgta

SEQ ID NO: 5431043 - DNA, 25 bp, Homo sapien
tggaaagaaatgatcactctttctg

SEQ ID NO: 5431044 - DNA, 25 bp, Homo sapien
ctattcatctatctggaaagaaatg

SEQ ID NO: 5431045 - DNA, 25 bp, Homo sapien
tctctatagctgtgcatctgtatag

SEQ ID NO: 5431046 - DNA, 25 bp, Homo sapien
gagacctgttccatactgctcttca

SEQ ID NO: 5431047 - DNA, 25 bp, Homo sapien
tgctctctctgttatcatcagaagt

SEQ ID NO: 5431048 - DNA, 25 bp, Homo sapien
gatgcaatcgtgaattcatccagat

SEQ ID NO: 5431049 - DNA, 25 bp, Homo sapien
tcatccagatataatgtttgctctc

SEQ ID NO: 5431050 - DNA, 25 bp, Homo sapien
attcttaactttacctcaggtagtg

SEQ ID NO: 5431051 - DNA, 25 bp, Homo sapien
ttaactttacctcaggtagtgtgaa

SEQ ID NO: 5431052 - DNA, 25 bp, Homo sapien
catattcttaactttacctcaggta

SEQ ID NO: 5431053 - DNA, 25 bp, Homo sapien
gccacatattcttaactttacctca

SEQ ID NO: 5431054 - DNA, 25 bp, Homo sapien
tatgggcatagaggaccaccgaagg

SEQ ID NO: 5431055 - DNA, 25 bp, Homo sapien
cttaaatatgggcatagaggaccac

SEQ ID NO: 5431056 - DNA, 25 bp, Homo sapien
tatagtcttaaatatgggcatagag

SEQ ID NO: 5431057 - DNA, 25 bp, Homo sapien
ggcatagaggaccaccgaaggtttg

SEQ ID NO: 5431058 - DNA, 25 bp, Homo sapien
gcaacaatgaccttcaaacccgtgg

SEQ ID NO: 5431059 - DNA, 25 bp, Homo sapien
aaatttagccaaatagccagcaaca

SEQ ID NO: 5431060 - DNA, 25 bp, Homo sapien
taatttgctttagagcttgtatctc

SEQ ID NO: 5431061 - DNA, 25 bp, Homo sapien
gctgatgggcagctttagagaattt

SEQ ID NO: 5431062 - DNA, 25 bp, Homo sapien
ggcaacagttaattgggcccatgga

SEQ ID NO: 5431063 - DNA, 25 bp, Homo sapien
aaggcaacagttaattgggcccatg

SEQ ID NO: 5431064 - DNA, 25 bp, Homo sapien
gcaacagttaattgggcccatggag

SEQ ID NO: 5431065 - DNA, 25 bp, Homo sapien
caaaggcaacagttaattgggccca

SEQ ID NO: 5431066 - DNA, 25 bp, Homo sapien
tctgtttgatggaaatatacttact

SEQ ID NO: 5431067 - DNA, 25 bp, Homo sapien
tagcctttgtcctcatcatgtttca

SEQ ID NO: 5431068 - DNA, 25 bp, Homo sapien
aattgaggtgtagcctttgtcctca

SEQ ID NO: 5431069 - DNA, 25 bp, Homo sapien
ctgtttgatggaaatatacttactc

SEQ ID NO: 5431070 - DNA, 25 bp, Homo sapien
ccatggtggcagagtacctggcata

SEQ ID NO: 5431071 - DNA, 25 bp, Homo sapien
cttcttcatgttcggatgctttgcc

SEQ ID NO: 5431072 - DNA, 25 bp, Homo sapien
tcttcaggtattcaaacccatcttc

SEQ ID NO: 5431073 - DNA, 25 bp, Homo sapien
catggtggcagagtacctggcatag

SEQ ID NO: 5431074 - DNA, 25 bp, Homo sapien
tcttttgctcgaactatgaataatt

SEQ ID NO: 5431075 - DNA, 25 bp, Homo sapien
tatcttttgctcgaactatgaataa

SEQ ID NO: 5431076 - DNA, 25 bp, Homo sapien
tgttatcttttgctcgaactatgaa

SEQ ID NO: 5431077 - DNA, 25 bp, Homo sapien
cttgttatcttttgctcgaactatg

SEQ ID NO: 5431078 - DNA, 25 bp, Homo sapien
ccttagttaatcgagtagaggtaca

SEQ ID NO: 5431079 - DNA, 25 bp, Homo sapien
taattgtgacagctattgcggtccc

SEQ ID NO: 5431080 - DNA, 25 bp, Homo sapien
tgcggtccctagattacaaacagct

SEQ ID NO: 5431081 - DNA, 25 bp, Homo sapien
cacaagcatagccaagagccgtatt

SEQ ID NO: 5431082 - DNA, 25 bp, Homo sapien
cctggcccaaacttaattcattggg

SEQ ID NO: 5431083 - DNA, 25 bp, Homo sapien
cctttagtatctcctggcccaaact

SEQ ID NO: 5431084 - DNA, 25 bp, Homo sapien
tatctcctggcccaaacttaattca

SEQ ID NO: 5431085 - DNA, 25 bp, Homo sapien
taattcattggggaactttacagtg

SEQ ID NO: 5431086 - DNA, 25 bp, Homo sapien
attggagcactgttgattgatttcc

SEQ ID NO: 5431087 - DNA, 25 bp, Homo sapien
accttcagcaattggagcactgttg

SEQ ID NO: 5431088 - DNA, 25 bp, Homo sapien
gattattgactggtgtacattatgt

SEQ ID NO: 5431089 - DNA, 25 bp, Homo sapien
tttgtatgattattgactggtgtac

SEQ ID NO: 5431090 - DNA, 25 bp, Homo sapien
agcttttagttgctgtatccaccat

SEQ ID NO: 5431091 - DNA, 25 bp, Homo sapien
cacagaccaagacccagtgacttgc

SEQ ID NO: 5431092 - DNA, 25 bp, Homo sapien
cagaccaagacccagtgacttgcat

SEQ ID NO: 5431093 - DNA, 25 bp, Homo sapien
ctccacagaccaagacccagtgact

SEQ ID NO: 5431094 - DNA, 25 bp, Homo sapien
tccacagaccaagacccagtgactt

SEQ ID NO: 5431095 - DNA, 25 bp, Homo sapien
actttgggaagccgcgagacaggcg

SEQ ID NO: 5431096 - DNA, 25 bp, Homo sapien
agctactcgggagtactcgggaggc

SEQ ID NO: 5431097 - DNA, 25 bp, Homo sapien
tgggaagccgcgagacaggcggatc

SEQ ID NO: 5431098 - DNA, 25 bp, Homo sapien
cagctactcgggagtactcgggagg

SEQ ID NO: 5431099 - DNA, 25 bp, Homo sapien
catttttcttgctcctaccatcatc

SEQ ID NO: 5431100 - DNA, 25 bp, Homo sapien
tcttgctcctaccatcatcctcatt

SEQ ID NO: 5431101 - DNA, 25 bp, Homo sapien
tttttcttgctcctaccatcatcct

SEQ ID NO: 5431102 - DNA, 25 bp, Homo sapien
ctcatttttcttgctcctaccatca

SEQ ID NO: 5431103 - DNA, 25 bp, Homo sapien
gaatggacagttgctgtttctctct

SEQ ID NO: 5431104 - DNA, 25 bp, Homo sapien
tgatttgttgagtcaaagtgcacaa

SEQ ID NO: 5431105 - DNA, 25 bp, Homo sapien
caaacaaggcaaatggtgatgacac

SEQ ID NO: 5431106 - DNA, 25 bp, Homo sapien
gatttatgagggtagcaaacaaggc

SEQ ID NO: 5431107 - DNA, 25 bp, Homo sapien
tatcaaccagtaccactgttgtgat

SEQ ID NO: 5431108 - DNA, 25 bp, Homo sapien
caaccagtaccactgttgtgattgc

SEQ ID NO: 5431109 - DNA, 25 bp, Homo sapien
gtggtatcaaccagtaccactgttg

SEQ ID NO: 5431110 - DNA, 25 bp, Homo sapien
agtaccactgttgtgattgctgcca

SEQ ID NO: 5431111 - DNA, 25 bp, Homo sapien
tctttaaaagccaatcttgcataca

SEQ ID NO: 5431112 - DNA, 25 bp, Homo sapien
agccaatcttgcatacataaaccaa

SEQ ID NO: 5431113 - DNA, 25 bp, Homo sapien
ccaaaccaagataagtgttgataac

SEQ ID NO: 5431114 - DNA, 25 bp, Homo sapien
aaaccaaaccaagataagtgttgat

SEQ ID NO: 5431115 - DNA, 25 bp, Homo sapien
tgctgaagcattcataatgtaagcc

SEQ ID NO: 5431116 - DNA, 25 bp, Homo sapien
gaagcattcataatgtaagccttat

SEQ ID NO: 5431117 - DNA, 25 bp, Homo sapien
agcattcataatgtaagccttattt

SEQ ID NO: 5431118 - DNA, 25 bp, Homo sapien
ctgaagcattcataatgtaagcctt

SEQ ID NO: 5431119 - DNA, 25 bp, Homo sapien
ccattgttgggaactaaaatttgca

SEQ ID NO: 5431120 - DNA, 25 bp, Homo sapien
gctgagtgcaatccatagggctttc

SEQ ID NO: 5431121 - DNA, 25 bp, Homo sapien
gcttggaggtgccacttcagctgag

SEQ ID NO: 5431122 - DNA, 25 bp, Homo sapien
taaatagggcaagcttggaggtgcc

SEQ ID NO: 5431123 - DNA, 25 bp, Homo sapien
tcccttttgcatcattgcctttcat

SEQ ID NO: 5431124 - DNA, 25 bp, Homo sapien
tttcccttttgcatcattgcctttc

SEQ ID NO: 5431125 - DNA, 25 bp, Homo sapien
ctgtaattgagctttcccttttgca

SEQ ID NO: 5431126 - DNA, 25 bp, Homo sapien
taattgagctttcccttttgcatca

SEQ ID NO: 5431127 - DNA, 25 bp, Homo sapien
attttctaatctcatcaattgtgtc

SEQ ID NO: 5431128 - DNA, 25 bp, Homo sapien
ttctaatctcatcaattgtgtcttt

SEQ ID NO: 5431129 - DNA, 25 bp, Homo sapien
ttctctggtgtttgcataagaatgt

SEQ ID NO: 5431130 - DNA, 25 bp, Homo sapien
taatctcatcaattgtgtctttctt

SEQ ID NO: 5431131 - DNA, 25 bp, Homo sapien
atgtctgaaaattaatacggatgca

SEQ ID NO: 5431132 - DNA, 25 bp, Homo sapien
tgaaaattaatacggatgcagatgc

SEQ ID NO: 5431133 - DNA, 25 bp, Homo sapien
tgtgtggtctgagttataaaattcc

SEQ ID NO: 5431134 - DNA, 25 bp, Homo sapien
gtggtctgagttataaaattcctgt

SEQ ID NO: 5431135 - DNA, 25 bp, Homo sapien
gaggtctcccctgtgattcaccact

SEQ ID NO: 5431136 - DNA, 25 bp, Homo sapien
ccctgtgattcaccactagggtcct

SEQ ID NO: 5431137 - DNA, 25 bp, Homo sapien
tagaggtctcccctgtgattcacca

SEQ ID NO: 5431138 - DNA, 25 bp, Homo sapien
tctcccctgtgattcaccactaggg

SEQ ID NO: 5431139 - DNA, 25 bp, Homo sapien
tgagctcaccgtaatagtgtgagga

SEQ ID NO: 5431140 - DNA, 25 bp, Homo sapien
tactaatagttacatgggtggaaca

SEQ ID NO: 5431141 - DNA, 25 bp, Homo sapien
tctctaggctgtgaatggtaacatg

SEQ ID NO: 5431142 - DNA, 25 bp, Homo sapien
gatgattagcttcacatgacatgtt

SEQ ID NO: 5431143 - DNA, 25 bp, Homo sapien
gttaaacacagccaaacacatagcc

SEQ ID NO: 5431144 - DNA, 25 bp, Homo sapien
taagagacacctgcaaaaaggtatc

SEQ ID NO: 5431145 - DNA, 25 bp, Homo sapien
gaaaaaatatcacgaggagcaggag

SEQ ID NO: 5431146 - DNA, 25 bp, Homo sapien
cacatacacgtaacattggaaaagg

SEQ ID NO: 5431147 - DNA, 25 bp, Homo sapien
taaacatctgtttgaagatagagta

SEQ ID NO: 5431148 - DNA, 25 bp, Homo sapien
gagtaatgttaccatggaatccaca

SEQ ID NO: 5431149 - DNA, 25 bp, Homo sapien
cacctgaaaatttggatagcattca

SEQ ID NO: 5431150 - DNA, 25 bp, Homo sapien
caaaatcacctgaaaatttggatag

SEQ ID NO: 5431151 - DNA, 25 bp, Homo sapien
gatcttcatgatccttgtagtggcc

SEQ ID NO: 5431152 - DNA, 25 bp, Homo sapien
agatcttcatgatccttgtagtggc

SEQ ID NO: 5431153 - DNA, 25 bp, Homo sapien
gccagaaacatcactcagaggttca

SEQ ID NO: 5431154 - DNA, 25 bp, Homo sapien
gtagtggccagaaacatcactcaga

SEQ ID NO: 5431155 - DNA, 25 bp, Homo sapien
tccttctaccattgtatgcatagaa

SEQ ID NO: 5431156 - DNA, 25 bp, Homo sapien
ccttctaccattgtatgcatagaat

SEQ ID NO: 5431157 - DNA, 25 bp, Homo sapien
tacatccttctaccattgtatgcat

SEQ ID NO: 5431158 - DNA, 25 bp, Homo sapien
catccttctaccattgtatgcatag

SEQ ID NO: 5431159 - DNA, 25 bp, Homo sapien
tcaatgagatttacaattataccca

SEQ ID NO: 5431160 - DNA, 25 bp, Homo sapien
caagttgaggtagagttaatgtaaa

SEQ ID NO: 5431161 - DNA, 25 bp, Homo sapien
ctgttacgttattttcaagttgagg

SEQ ID NO: 5431162 - DNA, 25 bp, Homo sapien
ctagacataaagatctgctgttacg

SEQ ID NO: 5431163 - DNA, 25 bp, Homo sapien
tcctcgaagagatgtaggtcttgtc

SEQ ID NO: 5431164 - DNA, 25 bp, Homo sapien
ctaattgtttcctcgaagagatgta

SEQ ID NO: 5431165 - DNA, 25 bp, Homo sapien
tgtttcctcgaagagatgtaggtct

SEQ ID NO: 5431166 - DNA, 25 bp, Homo sapien
cgaagagatgtaggtcttgtcttct

SEQ ID NO: 5431167 - DNA, 25 bp, Homo sapien
tggtatttccctcataaacttcaac

SEQ ID NO: 5431168 - DNA, 25 bp, Homo sapien
aaactccaggtattagagctacctg

SEQ ID NO: 5431169 - DNA, 25 bp, Homo sapien
gaaaactccaggtattagagctacc

SEQ ID NO: 5431170 - DNA, 25 bp, Homo sapien
tatttccctcataaacttcaactaa

SEQ ID NO: 5431171 - DNA, 25 bp, Homo sapien
tgcttcctgatccagtcagatttga

SEQ ID NO: 5431172 - DNA, 25 bp, Homo sapien
cttcctgatccagtcagatttgact

SEQ ID NO: 5431173 - DNA, 25 bp, Homo sapien
aatgcttcctgatccagtcagattt

SEQ ID NO: 5431174 - DNA, 25 bp, Homo sapien
cctgatccagtcagatttgactttg

SEQ ID NO: 5431175 - DNA, 25 bp, Homo sapien
tggtgcacctgcattaactgactga

SEQ ID NO: 5431176 - DNA, 25 bp, Homo sapien
atggtgcacctgcattaactgactg

SEQ ID NO: 5431177 - DNA, 25 bp, Homo sapien
aatagagaattaatagctctcatta

SEQ ID NO: 5431178 - DNA, 25 bp, Homo sapien
gagaattaatagctctcattaaaaa

SEQ ID NO: 5431179 - DNA, 25 bp, Homo sapien
gagggcatatcttttgtgttctgta

SEQ ID NO: 5431180 - DNA, 25 bp, Homo sapien
ttctcagagggcatatcttttgtgt

SEQ ID NO: 5431181 - DNA, 25 bp, Homo sapien
ggttgcttgcatctgctctagtctc

SEQ ID NO: 5431182 - DNA, 25 bp, Homo sapien
cttttgttcctcatagagctccgtc

SEQ ID NO: 5431183 - DNA, 25 bp, Homo sapien
tagagctccgtcacatctttgtaca

SEQ ID NO: 5431184 - DNA, 25 bp, Homo sapien
acccaaaataagtgggttgcttgca

SEQ ID NO: 5431185 - DNA, 25 bp, Homo sapien
taagcacaactgtatggttcccact

SEQ ID NO: 5431186 - DNA, 25 bp, Homo sapien
agcacaactgtatggttcccacttg

SEQ ID NO: 5431187 - DNA, 25 bp, Homo sapien
gtaagcacaactgtatggttcccac

SEQ ID NO: 5431188 - DNA, 25 bp, Homo sapien
agcacagcccagtaagcacaactgt

SEQ ID NO: 5431189 - DNA, 25 bp, Homo sapien
ttctcgtaattctattgttctccat

SEQ ID NO: 5431190 - DNA, 25 bp, Homo sapien
cttctcgtaattctattgttctcca

SEQ ID NO: 5431191 - DNA, 25 bp, Homo sapien
tcttctcgtaattctattgttctcc

SEQ ID NO: 5431192 - DNA, 25 bp, Homo sapien
ttcttctcgtaattctattgttctc

SEQ ID NO: 5431193 - DNA, 25 bp, Homo sapien
gatagatgctagtgctgttccgaag

SEQ ID NO: 5431194 - DNA, 25 bp, Homo sapien
taattcaagctattcccacacagga

SEQ ID NO: 5431195 - DNA, 25 bp, Homo sapien
cagaaagctgaaggcccagtaaata

SEQ ID NO: 5431196 - DNA, 25 bp, Homo sapien
catatagatatgtcctgttccccta

SEQ ID NO: 5431197 - DNA, 25 bp, Homo sapien
tttctttatattccaggagcagctc

SEQ ID NO: 5431198 - DNA, 25 bp, Homo sapien
tctggaaattcaagcttgtcatcca

SEQ ID NO: 5431199 - DNA, 25 bp, Homo sapien
ctctggaaattcaagcttgtcatcc

SEQ ID NO: 5431200 - DNA, 25 bp, Homo sapien
caactgtggtcctctcagatcaggc

SEQ ID NO: 5431201 - DNA, 25 bp, Homo sapien
tatacgttttcgttaggattggcta

SEQ ID NO: 5431202 - DNA, 25 bp, Homo sapien
cagatcaggcctctcggaccgattt

SEQ ID NO: 5431203 - DNA, 25 bp, Homo sapien
gctaaggcgtgatggtttcagagaa

SEQ ID NO: 5431204 - DNA, 25 bp, Homo sapien
gtggctcggactgtaccggccgcaa

SEQ ID NO: 5431205 - DNA, 25 bp, Homo sapien
gaaccctgattgtataattcttcgg

SEQ ID NO: 5431206 - DNA, 25 bp, Homo sapien
ggttggaccggctcagctactggac

SEQ ID NO: 5431207 - DNA, 25 bp, Homo sapien
aattgtgtctgacagggcgtgcaca

SEQ ID NO: 5431208 - DNA, 25 bp, Homo sapien
cattgtctccaaccagagaggctca

SEQ ID NO: 5431209 - DNA, 25 bp, Homo sapien
taactgacagtatcttggaccaaac

SEQ ID NO: 5431210 - DNA, 25 bp, Homo sapien
gaagagactccataatttgccccag

SEQ ID NO: 5431211 - DNA, 25 bp, Homo sapien
aagttgagtctttcacacctaccca

SEQ ID NO: 5431212 - DNA, 25 bp, Homo sapien
tgaaggaggtttagtacattcttgt

SEQ ID NO: 5431213 - DNA, 25 bp, Homo sapien
gactaagtagtcaatgctgaaggag

SEQ ID NO: 5431214 - DNA, 25 bp, Homo sapien
tgctgaaggaggtttagtacattct

SEQ ID NO: 5431215 - DNA, 25 bp, Homo sapien
ccccagcctttgactaagtagtcaa

SEQ ID NO: 5431216 - DNA, 25 bp, Homo sapien
tgagccagtgcctgatttaacatat

SEQ ID NO: 5431217 - DNA, 25 bp, Homo sapien
tgcaaatagggcaggtgctctctgg

SEQ ID NO: 5431218 - DNA, 25 bp, Homo sapien
cagctgttttctctaatgcagcaga

SEQ ID NO: 5431219 - DNA, 25 bp, Homo sapien
tttctggcccagcaaacttaaaaca

SEQ ID NO: 5431220 - DNA, 25 bp, Homo sapien
taaaactgcacatctctgggcggca

SEQ ID NO: 5431221 - DNA, 25 bp, Homo sapien
taagaagtctcaccaagttgtcctc

SEQ ID NO: 5431222 - DNA, 25 bp, Homo sapien
gcccattagacgtggtcactgactg

SEQ ID NO: 5431223 - DNA, 25 bp, Homo sapien
tcagcctgggaggagtgcccattag

SEQ ID NO: 5431224 - DNA, 25 bp, Homo sapien
taacactggtctatcaagagtcccc

SEQ ID NO: 5431225 - DNA, 25 bp, Homo sapien
ttggagtgtgtccaagatctttctg

SEQ ID NO: 5431226 - DNA, 25 bp, Homo sapien
gtggaagtcattaattcaagaccct

SEQ ID NO: 5431227 - DNA, 25 bp, Homo sapien
gcttctaaatatttggagtgtgtcc

SEQ ID NO: 5431228 - DNA, 25 bp, Homo sapien
gtaatctccacatcctaggctcaag

SEQ ID NO: 5431229 - DNA, 25 bp, Homo sapien
ccaggcccagagcatttcttatagg

SEQ ID NO: 5431230 - DNA, 25 bp, Homo sapien
gggctcaaagcaatctatctgcctc

SEQ ID NO: 5431231 - DNA, 25 bp, Homo sapien
tacaagcatgatccaacacgccagg

SEQ ID NO: 5431232 - DNA, 25 bp, Homo sapien
gatcctaaacagatggcccctgact

SEQ ID NO: 5431233 - DNA, 25 bp, Homo sapien
tggcccctgacttacttacagtggt

SEQ ID NO: 5431234 - DNA, 25 bp, Homo sapien
gcaataaacattcaatagacactgt

SEQ ID NO: 5431235 - DNA, 25 bp, Homo sapien
gaagatgtagctcattgggatccta

SEQ ID NO: 5431236 - DNA, 25 bp, Homo sapien
aaagaactctataccttacctggag

SEQ ID NO: 5431237 - DNA, 25 bp, Homo sapien
gaatctttcatagcaagcattttgg

SEQ ID NO: 5431238 - DNA, 25 bp, Homo sapien
tcctcttgctcaggtttaactgcag

SEQ ID NO: 5431239 - DNA, 25 bp, Homo sapien
gctccaagagcatacacacagatcc

SEQ ID NO: 5431240 - DNA, 25 bp, Homo sapien
ggcaataaatctactaccctgaaga

SEQ ID NO: 5431241 - DNA, 25 bp, Homo sapien
cagggaaggtataaggagtaacagt

SEQ ID NO: 5431242 - DNA, 25 bp, Homo sapien
caattaagggttgcactcaggtgat

SEQ ID NO: 5431243 - DNA, 25 bp, Homo sapien
cctgaagactgtggttaaaacttgt

SEQ ID NO: 5431244 - DNA, 25 bp, Homo sapien
gacagtggaactatggcatttgaac

SEQ ID NO: 5431245 - DNA, 25 bp, Homo sapien
ccatcagggcttttagcagtcagaa

SEQ ID NO: 5431246 - DNA, 25 bp, Homo sapien
cagatgccttgctactccatcaggg

SEQ ID NO: 5431247 - DNA, 25 bp, Homo sapien
cagagaaacacaatgtaggcatggc

SEQ ID NO: 5431248 - DNA, 25 bp, Homo sapien
taatattgacccttcaagacgaggt

SEQ ID NO: 5431249 - DNA, 25 bp, Homo sapien
tcataaaatccaccgagaaagcaac

SEQ ID NO: 5431250 - DNA, 25 bp, Homo sapien
aaggcctttcagatcttgctggtga

SEQ ID NO: 5431251 - DNA, 25 bp, Homo sapien
caagcctattatatcatgggaagcc

SEQ ID NO: 5431252 - DNA, 25 bp, Homo sapien
ccccacatctcagctaggcagatgt

SEQ ID NO: 5431253 - DNA, 25 bp, Homo sapien
caattaactttagtcattcctatat

SEQ ID NO: 5431254 - DNA, 25 bp, Homo sapien
atctcagctaggcagatgtttctga

SEQ ID NO: 5431255 - DNA, 25 bp, Homo sapien
cacatctcagctaggcagatgtttc

SEQ ID NO: 5431256 - DNA, 25 bp, Homo sapien
gctacacatctgcaacaactaaaac

SEQ ID NO: 5431257 - DNA, 25 bp, Homo sapien
caagtttctgtagcacgtgcagtga

SEQ ID NO: 5431258 - DNA, 25 bp, Homo sapien
cctgtgcatttgtagttgacacgtc

SEQ ID NO: 5431259 - DNA, 25 bp, Homo sapien
tgaagactttacatatagaagctac

SEQ ID NO: 5431260 - DNA, 25 bp, Homo sapien
aatagtttctggtggctttgatgac

SEQ ID NO: 5431261 - DNA, 25 bp, Homo sapien
gaatagtttctggtggctttgatga

SEQ ID NO: 5431262 - DNA, 25 bp, Homo sapien
ggaatagtttctggtggctttgatg

SEQ ID NO: 5431263 - DNA, 25 bp, Homo sapien
caggaatagtttctggtggctttga

SEQ ID NO: 5431264 - DNA, 25 bp, Homo sapien
tgttggaagacatgggaaaaaggct

SEQ ID NO: 5431265 - DNA, 25 bp, Homo sapien
gttgttatgataccaaagcacaagc

SEQ ID NO: 5431266 - DNA, 25 bp, Homo sapien
ggatggccttttccacaagtggtga

SEQ ID NO: 5431267 - DNA, 25 bp, Homo sapien
caagtactggtagggatgtcaagaa

SEQ ID NO: 5431268 - DNA, 25 bp, Homo sapien
tagccagactaaaggacacttctag

SEQ ID NO: 5431269 - DNA, 25 bp, Homo sapien
gaccaagtatagaatgcaatgccca

SEQ ID NO: 5431270 - DNA, 25 bp, Homo sapien
taaacacccaatataagaaaggagc

SEQ ID NO: 5431271 - DNA, 25 bp, Homo sapien
tctgattatgttgagagttgcctca

SEQ ID NO: 5431272 - DNA, 25 bp, Homo sapien
aatatggattgtccccacttgttag

SEQ ID NO: 5431273 - DNA, 25 bp, Homo sapien
gattgtccccacttgttagtggaag

SEQ ID NO: 5431274 - DNA, 25 bp, Homo sapien
cactatcaaatatggattgtcccca

SEQ ID NO: 5431275 - DNA, 25 bp, Homo sapien
tgcttcactatcaaatatggattgt

SEQ ID NO: 5431276 - DNA, 25 bp, Homo sapien
taaaacccacttatgacttgtaagc

SEQ ID NO: 5431277 - DNA, 25 bp, Homo sapien
tagcataatcgtggctaactgcagc

SEQ ID NO: 5431278 - DNA, 25 bp, Homo sapien
ccaactgtcagctaaagaattccta

SEQ ID NO: 5431279 - DNA, 25 bp, Homo sapien
tagacagtagcttaacactcaacca

SEQ ID NO: 5431280 - DNA, 25 bp, Homo sapien
tgagccactacgcacgggctatttt

SEQ ID NO: 5431281 - DNA, 25 bp, Homo sapien
aattttcaggtataatattcccaag

SEQ ID NO: 5431282 - DNA, 25 bp, Homo sapien
tgcatatagttagaatataccaaga

SEQ ID NO: 5431283 - DNA, 25 bp, Homo sapien
cccaagacataatatgccatgaata

SEQ ID NO: 5431284 - DNA, 25 bp, Homo sapien
cctggacagctagagtattgacaaa

SEQ ID NO: 5431285 - DNA, 25 bp, Homo sapien
gaagtaaagtagcatccacgataac

SEQ ID NO: 5431286 - DNA, 25 bp, Homo sapien
gtctgatatcaggtaatacatccat

SEQ ID NO: 5431287 - DNA, 25 bp, Homo sapien
catcaggagtcctataagtagaaac

SEQ ID NO: 5431288 - DNA, 25 bp, Homo sapien
ggattagattgactattctgactct

SEQ ID NO: 5431289 - DNA, 25 bp, Homo sapien
tattgcttgatcacaagctcccggg

SEQ ID NO: 5431290 - DNA, 25 bp, Homo sapien
gaaactatgtagagatttcattcta

SEQ ID NO: 5431291 - DNA, 25 bp, Homo sapien
catgcccagacccttgtaatatata

SEQ ID NO: 5431292 - DNA, 25 bp, Homo sapien
gaactgcaatagtgcaaaaatttgg

SEQ ID NO: 5431293 - DNA, 25 bp, Homo sapien
aaatatttggctcgacttaggaagt

SEQ ID NO: 5431294 - DNA, 25 bp, Homo sapien
tccatttctactggcctgtaagatt

SEQ ID NO: 5431295 - DNA, 25 bp, Homo sapien
ttggtctagtctattcgtgaagcct

SEQ ID NO: 5431296 - DNA, 25 bp, Homo sapien
gagaagccttatcaacacctggacc

SEQ ID NO: 5431297 - DNA, 25 bp, Homo sapien
gaccctgtagaaggcagcctctgag

SEQ ID NO: 5431298 - DNA, 25 bp, Homo sapien
tatcccaccattgtatggcaggtgt

SEQ ID NO: 5431299 - DNA, 25 bp, Homo sapien
tacctcttgctatccaggcctgtat

SEQ ID NO: 5431300 - DNA, 25 bp, Homo sapien
tagagaagagggatacattcttcaa

SEQ ID NO: 5431301 - DNA, 25 bp, Homo sapien
ctagagaagagggatacattcttca

SEQ ID NO: 5431302 - DNA, 25 bp, Homo sapien
ttcacactgatcctgtgcaaatcta

SEQ ID NO: 5431303 - DNA, 25 bp, Homo sapien
tttcacactgatcctgtgcaaatct

SEQ ID NO: 5431304 - DNA, 25 bp, Homo sapien
gctttgcactaggtctcagaaagta

SEQ ID NO: 5431305 - DNA, 25 bp, Homo sapien
tctcagaaagtatacttctttgggt

SEQ ID NO: 5431306 - DNA, 25 bp, Homo sapien
gcagctcaggctttgcactaggtct

SEQ ID NO: 5431307 - DNA, 25 bp, Homo sapien
agtatacttctttgggtagagcagg

SEQ ID NO: 5431308 - DNA, 25 bp, Homo sapien
aaaaagttatctcggttgtcagagc

SEQ ID NO: 5431309 - DNA, 25 bp, Homo sapien
tatgctcaacatgcacgttaattat

SEQ ID NO: 5431310 - DNA, 25 bp, Homo sapien
tcaaaaagttatctcggttgtcaga

SEQ ID NO: 5431311 - DNA, 25 bp, Homo sapien
aagttatctcggttgtcagagcact

SEQ ID NO: 5431312 - DNA, 25 bp, Homo sapien
tgcagtatcaccattcttacaggtt

SEQ ID NO: 5431313 - DNA, 25 bp, Homo sapien
gggtacattgtagaatattccagtt

SEQ ID NO: 5431314 - DNA, 25 bp, Homo sapien
tgtatatggccaaaggagcacctcc

SEQ ID NO: 5431315 - DNA, 25 bp, Homo sapien
ccattcttacaggttcacatgtata

SEQ ID NO: 5431316 - DNA, 25 bp, Homo sapien
gtgggagatgaagatctagtttaat

SEQ ID NO: 5431317 - DNA, 25 bp, Homo sapien
tgggagatgaagatctagtttaatt

SEQ ID NO: 5431318 - DNA, 25 bp, Homo sapien
ggtgggagatgaagatctagtttaa

SEQ ID NO: 5431319 - DNA, 25 bp, Homo sapien
cagataagttctactagagttttat

SEQ ID NO: 5431320 - DNA, 25 bp, Homo sapien
tataatgcttaaccagtccagaatt

SEQ ID NO: 5431321 - DNA, 25 bp, Homo sapien
aaaaacatgaacattaagatgaccc

SEQ ID NO: 5431322 - DNA, 25 bp, Homo sapien
ggtaaggattttatagcaatcatca

SEQ ID NO: 5431323 - DNA, 25 bp, Homo sapien
tcagcctgatcttaacttgtgttcc

SEQ ID NO: 5431324 - DNA, 25 bp, Homo sapien
caccactctatgactaagaacaggg

SEQ ID NO: 5431325 - DNA, 25 bp, Homo sapien
tactccagaaccaattgctcaagcc

SEQ ID NO: 5431326 - DNA, 25 bp, Homo sapien
tgctcaagccatttagaagtccacg

SEQ ID NO: 5431327 - DNA, 25 bp, Homo sapien
caggactgccagttttctatgccca

SEQ ID NO: 5431328 - DNA, 25 bp, Homo sapien
cacaactgcttgttacaggactgcc

SEQ ID NO: 5431329 - DNA, 25 bp, Homo sapien
tagtgactctacaagtaagtgagcc

SEQ ID NO: 5431330 - DNA, 25 bp, Homo sapien
aataatcacaagtcacccaatgagg

SEQ ID NO: 5431331 - DNA, 25 bp, Homo sapien
cctagtgccactgtattccttataa

SEQ ID NO: 5431332 - DNA, 25 bp, Homo sapien
catttatctccaacgatgtccataa

SEQ ID NO: 5431333 - DNA, 25 bp, Homo sapien
aatagccactttcagtttatccagc

SEQ ID NO: 5431334 - DNA, 25 bp, Homo sapien
ataaatcatgacttcaatagccact

SEQ ID NO: 5431335 - DNA, 25 bp, Homo sapien
gagcatgagatctcatcaatttgtc

SEQ ID NO: 5431336 - DNA, 25 bp, Homo sapien
tagagcatgagatctcatcaatttg

SEQ ID NO: 5431337 - DNA, 25 bp, Homo sapien
catgagatctcatcaatttgtcata

SEQ ID NO: 5431338 - DNA, 25 bp, Homo sapien
aatagagcatgagatctcatcaatt

SEQ ID NO: 5431339 - DNA, 25 bp, Homo sapien
gcatcaaattaatagatagcggagt

SEQ ID NO: 5431340 - DNA, 25 bp, Homo sapien
gataaagcctttagcaaagatagca

SEQ ID NO: 5431341 - DNA, 25 bp, Homo sapien
gatagcaatgaaagcctatatccaa

SEQ ID NO: 5431342 - DNA, 25 bp, Homo sapien
ttagcaacaggcaatctgtagaaca

SEQ ID NO: 5431343 - DNA, 25 bp, Homo sapien
cagagctgttcacatacggaaagta

SEQ ID NO: 5431344 - DNA, 25 bp, Homo sapien
tagtggaagacgataatatgtgtca

SEQ ID NO: 5431345 - DNA, 25 bp, Homo sapien
taagacaaatacaccagcagagctg

SEQ ID NO: 5431346 - DNA, 25 bp, Homo sapien
aaagtagtagtggaagacgataata

SEQ ID NO: 5431347 - DNA, 25 bp, Homo sapien
ttggcagtgacagggctatagttac

SEQ ID NO: 5431348 - DNA, 25 bp, Homo sapien
gggctatagttactcccactaatat

SEQ ID NO: 5431349 - DNA, 25 bp, Homo sapien
gcccagaaatcacttggcagtgaca

SEQ ID NO: 5431350 - DNA, 25 bp, Homo sapien
cagtgacagggctatagttactccc

SEQ ID NO: 5431351 - DNA, 25 bp, Homo sapien
ttttccctttgcatattcttggcat

SEQ ID NO: 5431352 - DNA, 25 bp, Homo sapien
tttccctttgcatattcttggcatc

SEQ ID NO: 5431353 - DNA, 25 bp, Homo sapien
cctactcgatcatggtggaagatcc

SEQ ID NO: 5431354 - DNA, 25 bp, Homo sapien
aattagatagtgtaatgcctccagc

SEQ ID NO: 5431355 - DNA, 25 bp, Homo sapien
tgagagcttttatcacgcaaggatg

SEQ ID NO: 5431356 - DNA, 25 bp, Homo sapien
agctgttggcttctcctatatggtc

SEQ ID NO: 5431357 - DNA, 25 bp, Homo sapien
ttaatttccttgcttgttatgggaa

SEQ ID NO: 5431358 - DNA, 25 bp, Homo sapien
ttatgggaaatctctattgagacct

SEQ ID NO: 5431359 - DNA, 25 bp, Homo sapien
tagtcttagtaggttatatgtgtct

SEQ ID NO: 5431360 - DNA, 25 bp, Homo sapien
catgatttagtcttagtaggttata

SEQ ID NO: 5431361 - DNA, 25 bp, Homo sapien
gaaagaataactactactatagagt

SEQ ID NO: 5431362 - DNA, 25 bp, Homo sapien
aagaataactactactatagagtaa

SEQ ID NO: 5431363 - DNA, 25 bp, Homo sapien
gaataactactactatagagtaaat

SEQ ID NO: 5431364 - DNA, 25 bp, Homo sapien
aataactactactatagagtaaatt

SEQ ID NO: 5431365 - DNA, 25 bp, Homo sapien
caagagtgtacttgaccagtgtgta

SEQ ID NO: 5431366 - DNA, 25 bp, Homo sapien
aatccacaggtactattctttaggc

SEQ ID NO: 5431367 - DNA, 25 bp, Homo sapien
agagggatagagagcaagaaccagt

SEQ ID NO: 5431368 - DNA, 25 bp, Homo sapien
cagtaagacgtctttattataatcc

SEQ ID NO: 5431369 - DNA, 25 bp, Homo sapien
gctaagcaggcggaaatatgattca

SEQ ID NO: 5431370 - DNA, 25 bp, Homo sapien
catcagtaagacagctctccagaga

SEQ ID NO: 5431371 - DNA, 25 bp, Homo sapien
tctccagagacattacacaaggcaa

SEQ ID NO: 5431372 - DNA, 25 bp, Homo sapien
aatcatggcctcgtacatcagtaag

SEQ ID NO: 5431373 - DNA, 25 bp, Homo sapien
atttcaatctttcccatattagcag

SEQ ID NO: 5431374 - DNA, 25 bp, Homo sapien
tgctgatttcaatctttcccatatt

SEQ ID NO: 5431375 - DNA, 25 bp, Homo sapien
tgatttcaatctttcccatattagc

SEQ ID NO: 5431376 - DNA, 25 bp, Homo sapien
agccagaaacttgctgatttcaatc

SEQ ID NO: 5431377 - DNA, 25 bp, Homo sapien
gaaacaaatcaggactgattttctc

SEQ ID NO: 5431378 - DNA, 25 bp, Homo sapien
tctccgttaattcacagttgccttt

SEQ ID NO: 5431379 - DNA, 25 bp, Homo sapien
tatgaaggatcacataaagaagaaa

SEQ ID NO: 5431380 - DNA, 25 bp, Homo sapien
tctcaaaactagtctccgttaattc

SEQ ID NO: 5431381 - DNA, 25 bp, Homo sapien
ttaacttcttgcagagtcttgtcca

SEQ ID NO: 5431382 - DNA, 25 bp, Homo sapien
ctcttaacttcttgcagagtcttgt

SEQ ID NO: 5431383 - DNA, 25 bp, Homo sapien
acttcttgcagagtcttgtccaaac

SEQ ID NO: 5431384 - DNA, 25 bp, Homo sapien
tcttgcagagtcttgtccaaacttc

SEQ ID NO: 5431385 - DNA, 25 bp, Homo sapien
ccagcaagatttatggcaggcccca

SEQ ID NO: 5431386 - DNA, 25 bp, Homo sapien
gagttttaagagaattccacatgcc

SEQ ID NO: 5431387 - DNA, 25 bp, Homo sapien
ttaaggctaggacacccagagatgc

SEQ ID NO: 5431388 - DNA, 25 bp, Homo sapien
actgctcaggtttaagggacaccaa

SEQ ID NO: 5431389 - DNA, 25 bp, Homo sapien
ccatttcagtgcctcttacaacttc

SEQ ID NO: 5431390 - DNA, 25 bp, Homo sapien
ttttccatttcagtgcctcttacaa

SEQ ID NO: 5431391 - DNA, 25 bp, Homo sapien
tttcttaatgttccatatccaatca

SEQ ID NO: 5431392 - DNA, 25 bp, Homo sapien
ctttcttaatgttccatatccaatc

SEQ ID NO: 5431393 - DNA, 25 bp, Homo sapien
aacactcgcttgaactgctgtcatt

SEQ ID NO: 5431394 - DNA, 25 bp, Homo sapien
ggagcttgaataggagaaattcact

SEQ ID NO: 5431395 - DNA, 25 bp, Homo sapien
cctttgttaggcgatgtttttgtgt

SEQ ID NO: 5431396 - DNA, 25 bp, Homo sapien
atatgagtagtactccaagtgttcc

SEQ ID NO: 5431397 - DNA, 25 bp, Homo sapien
gcctgagataccctcatgtctggag

SEQ ID NO: 5431398 - DNA, 25 bp, Homo sapien
tattgctatcccaaaaatgtagcgg

SEQ ID NO: 5431399 - DNA, 25 bp, Homo sapien
caatgatatggtggatcaactgcac

SEQ ID NO: 5431400 - DNA, 25 bp, Homo sapien
tcaactgcacatggatggcctgaga

SEQ ID NO: 5431401 - DNA, 25 bp, Homo sapien
tgatttggaagctcaaaatctgtgt

SEQ ID NO: 5431402 - DNA, 25 bp, Homo sapien
gttgaataattgatctcttgagctt

SEQ ID NO: 5431403 - DNA, 25 bp, Homo sapien
tgaataattgatctcttgagctttt

SEQ ID NO: 5431404 - DNA, 25 bp, Homo sapien
agttgaataattgatctcttgagct

SEQ ID NO: 5431405 - DNA, 25 bp, Homo sapien
ttgaataattgatctcttgagcttt

SEQ ID NO: 5431406 - DNA, 25 bp, Homo sapien
cctcagtgtgttttcagctttcttc

SEQ ID NO: 5431407 - DNA, 25 bp, Homo sapien
atgttatctctttaattttcccatt

SEQ ID NO: 5431408 - DNA, 25 bp, Homo sapien
tgttatctctttaattttcccatta

SEQ ID NO: 5431409 - DNA, 25 bp, Homo sapien
tcatgttatctctttaattttccca

SEQ ID NO: 5431410 - DNA, 25 bp, Homo sapien
catgttatctctttaattttcccat

SEQ ID NO: 5431411 - DNA, 25 bp, Homo sapien
cagattcagtttcatgcttgactga

SEQ ID NO: 5431412 - DNA, 25 bp, Homo sapien
ggcttgtccttatatacactagata

SEQ ID NO: 5431413 - DNA, 25 bp, Homo sapien
agtttcatgcttgactgagaatggc

SEQ ID NO: 5431414 - DNA, 25 bp, Homo sapien
gcttgactgagaatggcttgtcctt

SEQ ID NO: 5431415 - DNA, 25 bp, Homo sapien
aattgtgcatagaccatctgctgcc

SEQ ID NO: 5431416 - DNA, 25 bp, Homo sapien
gtgtgcaatttaaggtcccaacgac

SEQ ID NO: 5431417 - DNA, 25 bp, Homo sapien
tcccaacgacaagtacagaaatgtt

SEQ ID NO: 5431418 - DNA, 25 bp, Homo sapien
ataatcagatagaacagtgtgcaat

SEQ ID NO: 5431419 - DNA, 25 bp, Homo sapien
cttcatattgtctgactgaactctg

SEQ ID NO: 5431420 - DNA, 25 bp, Homo sapien
gtctgactgaactctgggaaaggct

SEQ ID NO: 5431421 - DNA, 25 bp, Homo sapien
tctgcttcatattgtctgactgaac

SEQ ID NO: 5431422 - DNA, 25 bp, Homo sapien
catctgcttcatattgtctgactga

SEQ ID NO: 5431423 - DNA, 25 bp, Homo sapien
tatagcatcaactgcccttttcagg

SEQ ID NO: 5431424 - DNA, 25 bp, Homo sapien
taattttcggtcaagatggtctgtc

SEQ ID NO: 5431425 - DNA, 25 bp, Homo sapien
gaggttccctactattacagtattg

SEQ ID NO: 5431426 - DNA, 25 bp, Homo sapien
tgacagtggtaccttgaggttccct

SEQ ID NO: 5431427 - DNA, 25 bp, Homo sapien
tgcaagccatggagaaagacctcat

SEQ ID NO: 5431428 - DNA, 25 bp, Homo sapien
gtaaaccaattctgccagccctaga

SEQ ID NO: 5431429 - DNA, 25 bp, Homo sapien
cagccctagatcttggactgccagc

SEQ ID NO: 5431430 - DNA, 25 bp, Homo sapien
gcacatgtacatggaggaacaagct

SEQ ID NO: 5431431 - DNA, 25 bp, Homo sapien
tatatacctactatgcattccaaaa

SEQ ID NO: 5431432 - DNA, 25 bp, Homo sapien
tattgtacattagacttctagtagc

SEQ ID NO: 5431433 - DNA, 25 bp, Homo sapien
taaggtgtaatacctgatgatttgt

SEQ ID NO: 5431434 - DNA, 25 bp, Homo sapien
tacatctgtgatagtcacctatgtt

SEQ ID NO: 5431435 - DNA, 25 bp, Homo sapien
tgcaaacatctataggaagctgcct

SEQ ID NO: 5431436 - DNA, 25 bp, Homo sapien
tgcctaattatgcagtccagatccc

SEQ ID NO: 5431437 - DNA, 25 bp, Homo sapien
aatacaattgtgctggacatacaac

SEQ ID NO: 5431438 - DNA, 25 bp, Homo sapien
aaacctgaaagcaaagtggattggc

SEQ ID NO: 5431439 - DNA, 25 bp, Homo sapien
ggtggattctacataagaccttaca

SEQ ID NO: 5431440 - DNA, 25 bp, Homo sapien
ggcagggtttatcccagattctctt

SEQ ID NO: 5431441 - DNA, 25 bp, Homo sapien
aaaaggtcacttgtgactaggtgga

SEQ ID NO: 5431442 - DNA, 25 bp, Homo sapien
gaatctctcactgtcgcctaccctg

SEQ ID NO: 5431443 - DNA, 25 bp, Homo sapien
tatctgatgtgagttatggatccaa

SEQ ID NO: 5431444 - DNA, 25 bp, Homo sapien
catagataactcattgtggcagaat

SEQ ID NO: 5431445 - DNA, 25 bp, Homo sapien
cagatgtagctagacaactgtctga

SEQ ID NO: 5431446 - DNA, 25 bp, Homo sapien
actatgcacgtgtctgtttccagca

SEQ ID NO: 5431447 - DNA, 25 bp, Homo sapien
taagggcaccaacagcctacttttg

SEQ ID NO: 5431448 - DNA, 25 bp, Homo sapien
aaagtcttactaatagcaaaaacag

SEQ ID NO: 5431449 - DNA, 25 bp, Homo sapien
ttgaacaacatgagggttaagggca

SEQ ID NO: 5431450 - DNA, 25 bp, Homo sapien
gaagaagaggaacggttgttcttga

SEQ ID NO: 5431451 - DNA, 25 bp, Homo sapien
tcatgatgttcacaggctagcacct

SEQ ID NO: 5431452 - DNA, 25 bp, Homo sapien
tataccatcaggaaaaccctacagg

SEQ ID NO: 5431453 - DNA, 25 bp, Homo sapien
ggcaagctacttggtgtccattaaa

SEQ ID NO: 5431454 - DNA, 25 bp, Homo sapien
tttgatatcattacagagcccttcc

SEQ ID NO: 5431455 - DNA, 25 bp, Homo sapien
cctggcccgttctcagtgagctgtt

SEQ ID NO: 5431456 - DNA, 25 bp, Homo sapien
ttttcttagtgcctaacaaaatgaa

SEQ ID NO: 5431457 - DNA, 25 bp, Homo sapien
ccacaaagctgccattgtcatcctg

SEQ ID NO: 5431458 - DNA, 25 bp, Homo sapien
acaaagctgccattgtcatcctggc

SEQ ID NO: 5431459 - DNA, 25 bp, Homo sapien
ccttcatggcaaagcacacattcct

SEQ ID NO: 5431460 - DNA, 25 bp, Homo sapien
attcctcacgaacttagggcccact

SEQ ID NO: 5431461 - DNA, 25 bp, Homo sapien
ttccttcatggcaaagcacacattc

SEQ ID NO: 5431462 - DNA, 25 bp, Homo sapien
gcacacattcctcacgaacttaggg

SEQ ID NO: 5431463 - DNA, 25 bp, Homo sapien
gaattctcttgtcaagccacctagt

SEQ ID NO: 5431464 - DNA, 25 bp, Homo sapien
cctgaattctcttgtcaagccacct

SEQ ID NO: 5431465 - DNA, 25 bp, Homo sapien
ccaccggaggccctcttcctctcag

SEQ ID NO: 5431466 - DNA, 25 bp, Homo sapien
cacctagtctatcttcaccttccac

SEQ ID NO: 5431467 - DNA, 25 bp, Homo sapien
aatatgatcattcccttgagtcaag

SEQ ID NO: 5431468 - DNA, 25 bp, Homo sapien
tttaaatatgatcattcccttgagt

SEQ ID NO: 5431469 - DNA, 25 bp, Homo sapien
gggtgggttataatcatgacaataa

SEQ ID NO: 5431470 - DNA, 25 bp, Homo sapien
aggtgggtgggttataatcatgaca

SEQ ID NO: 5431471 - DNA, 25 bp, Homo sapien
tgaccaatgggaaaactatgcacta

SEQ ID NO: 5431472 - DNA, 25 bp, Homo sapien
catttatattagctgcgtcgatcgg

SEQ ID NO: 5431473 - DNA, 25 bp, Homo sapien
ttcatgatcagcaaacaaggttcct

SEQ ID NO: 5431474 - DNA, 25 bp, Homo sapien
caaggttcctccgagtaaagacaga

SEQ ID NO: 5431475 - DNA, 25 bp, Homo sapien
tctttgcaagtattgttaacttgaa

SEQ ID NO: 5431476 - DNA, 25 bp, Homo sapien
caagtattgttaacttgaagagcct

SEQ ID NO: 5431477 - DNA, 25 bp, Homo sapien
tgcaagtattgttaacttgaagagc

SEQ ID NO: 5431478 - DNA, 25 bp, Homo sapien
gtattgttaacttgaagagcctgaa

SEQ ID NO: 5431479 - DNA, 25 bp, Homo sapien
taatgcctagcataagcgcaaagca

SEQ ID NO: 5431480 - DNA, 25 bp, Homo sapien
tattatttaccctaatgcctagcat

SEQ ID NO: 5431481 - DNA, 25 bp, Homo sapien
cacgcccagccgatcttatgtatta

SEQ ID NO: 5431482 - DNA, 25 bp, Homo sapien
tagcataagcgcaaagcaggcattc

SEQ ID NO: 5431483 - DNA, 25 bp, Homo sapien
tcttaaccgaaagccagaaggcata

SEQ ID NO: 5431484 - DNA, 25 bp, Homo sapien
gaagtccagtacaatgaagcccagg

SEQ ID NO: 5431485 - DNA, 25 bp, Homo sapien
gggacagttaactccatgctgcggt

SEQ ID NO: 5431486 - DNA, 25 bp, Homo sapien
tattaattaatagcccaccttgagg

SEQ ID NO: 5431487 - DNA, 25 bp, Homo sapien
tttaacctcattaatcctcaaccca

SEQ ID NO: 5431488 - DNA, 25 bp, Homo sapien
ttctgggctactcatattaactgca

SEQ ID NO: 5431489 - DNA, 25 bp, Homo sapien
tttaactggcaacattctgggctac

SEQ ID NO: 5431490 - DNA, 25 bp, Homo sapien
aacaggctgaacagcttgaacttca

SEQ ID NO: 5431491 - DNA, 25 bp, Homo sapien
tggcccctttaattcgattttgtga

SEQ ID NO: 5431492 - DNA, 25 bp, Homo sapien
tgatctgtatgttgtccaaatgctg

SEQ ID NO: 5431493 - DNA, 25 bp, Homo sapien
cctttaattcgattttgtgactcaa

SEQ ID NO: 5431494 - DNA, 25 bp, Homo sapien
gcctgtagcctagtgaaagattcaa

SEQ ID NO: 5431495 - DNA, 25 bp, Homo sapien
caatagaggtcactttcaataggat

SEQ ID NO: 5431496 - DNA, 25 bp, Homo sapien
gaaaagataagccatggcttttgta

SEQ ID NO: 5431497 - DNA, 25 bp, Homo sapien
gcttttgtacaattccaggccaagg

SEQ ID NO: 5431498 - DNA, 25 bp, Homo sapien
tcaatagaggtcactttcaatagga

SEQ ID NO: 5431499 - DNA, 25 bp, Homo sapien
caaatgagtagcattattaataaag

SEQ ID NO: 5431500 - DNA, 25 bp, Homo sapien
aatgagtagcattattaataaagca

SEQ ID NO: 5431501 - DNA, 25 bp, Homo sapien
atgagtagcattattaataaagcac

SEQ ID NO: 5431502 - DNA, 25 bp, Homo sapien
gaaagggaagcaaacatgtccttca

SEQ ID NO: 5431503 - DNA, 25 bp, Homo sapien
cttgcaatcatggtggaaagggaag

SEQ ID NO: 5431504 - DNA, 25 bp, Homo sapien
aaacttgcaatcatggtggaaaggg

SEQ ID NO: 5431505 - DNA, 25 bp, Homo sapien
aaagggaagcaaacatgtccttcac

SEQ ID NO: 5431506 - DNA, 25 bp, Homo sapien
ttgggtcctgagtcttcaataatat

SEQ ID NO: 5431507 - DNA, 25 bp, Homo sapien
tgggtcctgagtcttcaataatatt

SEQ ID NO: 5431508 - DNA, 25 bp, Homo sapien
gcataggcatagtgaagcttgtttc

SEQ ID NO: 5431509 - DNA, 25 bp, Homo sapien
tcacagattcttcgtagcctctttg

SEQ ID NO: 5431510 - DNA, 25 bp, Homo sapien
cagactcagtgatcagatggaagat

SEQ ID NO: 5431511 - DNA, 25 bp, Homo sapien
tggcagactcagtgatcagatggaa

SEQ ID NO: 5431512 - DNA, 25 bp, Homo sapien
tgagcacaaaactattggcgtatcc

SEQ ID NO: 5431513 - DNA, 25 bp, Homo sapien
cacctcactgatatagggcttggtc

SEQ ID NO: 5431514 - DNA, 25 bp, Homo sapien
tggcgtatccattttgcactcaagc

SEQ ID NO: 5431515 - DNA, 25 bp, Homo sapien
tattcttatcctaaaccttcaggga

SEQ ID NO: 5431516 - DNA, 25 bp, Homo sapien
caatcttctgtttatggctatccaa

SEQ ID NO: 5431517 - DNA, 25 bp, Homo sapien
ccattctatgggtttctgactgctc

SEQ ID NO: 5431518 - DNA, 25 bp, Homo sapien
gcacaggtcatcctattcaaaagct

SEQ ID NO: 5431519 - DNA, 25 bp, Homo sapien
ggtgtacaaccttacttatgagcta

SEQ ID NO: 5431520 - DNA, 25 bp, Homo sapien
gttcagctctcattgagttatttct

SEQ ID NO: 5431521 - DNA, 25 bp, Homo sapien
aatctagctaggtggcctatcttgc

SEQ ID NO: 5431522 - DNA, 25 bp, Homo sapien
atctagctaggtggcctatcttgct

SEQ ID NO: 5431523 - DNA, 25 bp, Homo sapien
ttcagttcagctctcattgagttat

SEQ ID NO: 5431524 - DNA, 25 bp, Homo sapien
tttcttaaggaatatacaatatcca

SEQ ID NO: 5431525 - DNA, 25 bp, Homo sapien
catgtaacacatatcttgcttcccc

SEQ ID NO: 5431526 - DNA, 25 bp, Homo sapien
cagtctcgggtaaaagcagtgtaaa

SEQ ID NO: 5431527 - DNA, 25 bp, Homo sapien
gactggatcacagggacgggtttcc

SEQ ID NO: 5431528 - DNA, 25 bp, Homo sapien
cttctgtctataggccagaacttgg

SEQ ID NO: 5431529 - DNA, 25 bp, Homo sapien
agtcttctgtctataggccagaact

SEQ ID NO: 5431530 - DNA, 25 bp, Homo sapien
tcttctgtctataggccagaacttg

SEQ ID NO: 5431531 - DNA, 25 bp, Homo sapien
gaagtcttctgtctataggccagaa

SEQ ID NO: 5431532 - DNA, 25 bp, Homo sapien
caatttagggccctaatgagcaagc

SEQ ID NO: 5431533 - DNA, 25 bp, Homo sapien
gactctcctgggaataaaagaaggc

SEQ ID NO: 5431534 - DNA, 25 bp, Homo sapien
taactggacctcatgataaaatagc

SEQ ID NO: 5431535 - DNA, 25 bp, Homo sapien
gataaaatgtcacacaagcaaggtg

SEQ ID NO: 5431536 - DNA, 25 bp, Homo sapien
gagatagcttcctctcaatttgcag

SEQ ID NO: 5431537 - DNA, 25 bp, Homo sapien
aacttccaagggcacgcaactgtgg

SEQ ID NO: 5431538 - DNA, 25 bp, Homo sapien
tggagaaatctcaatggaaatacct

SEQ ID NO: 5431539 - DNA, 25 bp, Homo sapien
caagtgtattaatgcatgccacaca

SEQ ID NO: 5431540 - DNA, 25 bp, Homo sapien
taataaaatttccagcccaccttgc

SEQ ID NO: 5431541 - DNA, 25 bp, Homo sapien
aaatggagatcttaagggacttcag

SEQ ID NO: 5431542 - DNA, 25 bp, Homo sapien
taaagaggtccgtgtagatccaaaa

SEQ ID NO: 5431543 - DNA, 25 bp, Homo sapien
tatggaagatgctctacactggctc

SEQ ID NO: 5431544 - DNA, 25 bp, Homo sapien
gagcagcagttatctccagatgatg

SEQ ID NO: 5431545 - DNA, 25 bp, Homo sapien
tatattttgaaagtccagggcttgt

SEQ ID NO: 5431546 - DNA, 25 bp, Homo sapien
aacatgtacttctggaacctagaga

SEQ ID NO: 5431547 - DNA, 25 bp, Homo sapien
tacaatgtgccttggtctgcaggac

SEQ ID NO: 5431548 - DNA, 25 bp, Homo sapien
aatagcaaactaggagtcactcacc

SEQ ID NO: 5431549 - DNA, 25 bp, Homo sapien
tataggaacactcaagagggcactg

SEQ ID NO: 5431550 - DNA, 25 bp, Homo sapien
tagcacttttaggacctgatcctgg

SEQ ID NO: 5431551 - DNA, 25 bp, Homo sapien
ggcagatctgacttaacagcctgta

SEQ ID NO: 5431552 - DNA, 25 bp, Homo sapien
tttagtgagaccgatgaggccgaag

SEQ ID NO: 5431553 - DNA, 25 bp, Homo sapien
gagttttaccctgacatatatggag

SEQ ID NO: 5431554 - DNA, 25 bp, Homo sapien
cctagaggccttgtacatcaagtga

SEQ ID NO: 5431555 - DNA, 25 bp, Homo sapien
ggccgaagcctcaggcaagtcttga

SEQ ID NO: 5431556 - DNA, 25 bp, Homo sapien
taaggctagaaaccaatgatgactg

SEQ ID NO: 5431557 - DNA, 25 bp, Homo sapien
tgtggaatgcaacaatgccatggta

SEQ ID NO: 5431558 - DNA, 25 bp, Homo sapien
gaggctcaggtctgggcaaattata

SEQ ID NO: 5431559 - DNA, 25 bp, Homo sapien
cttcacatgggaaacgggaggctca

SEQ ID NO: 5431560 - DNA, 25 bp, Homo sapien
gagtcagaagtatgtcaatggcacc

SEQ ID NO: 5431561 - DNA, 25 bp, Homo sapien
gggttccttggcctatcttgagtag

SEQ ID NO: 5431562 - DNA, 25 bp, Homo sapien
cagaagaacttgacatagttgcggc

SEQ ID NO: 5431563 - DNA, 25 bp, Homo sapien
gaccttatgacagtaccttgatgga

SEQ ID NO: 5431564 - DNA, 25 bp, Homo sapien
gcatgtgcatagaaattacctggac

SEQ ID NO: 5431565 - DNA, 25 bp, Homo sapien
agcgtgaaaggccagggaaactgtc

SEQ ID NO: 5431566 - DNA, 25 bp, Homo sapien
caaaagttctcaccacatgcacaca

SEQ ID NO: 5431567 - DNA, 25 bp, Homo sapien
aaagatttacaactaccagagacag

SEQ ID NO: 5431568 - DNA, 25 bp, Homo sapien
caagattttctcataatgctggcag

SEQ ID NO: 5431569 - DNA, 25 bp, Homo sapien
tatagtatcgctattactaagagcc

SEQ ID NO: 5431570 - DNA, 25 bp, Homo sapien
gagaaatggtctcacaggaagcttt

SEQ ID NO: 5431571 - DNA, 25 bp, Homo sapien
gcctactggtttgaaggcttaccaa

SEQ ID NO: 5431572 - DNA, 25 bp, Homo sapien
tttataagctacactcaccctgggt

SEQ ID NO: 5431573 - DNA, 25 bp, Homo sapien
taatcaacctagagttctcacctga

SEQ ID NO: 5431574 - DNA, 25 bp, Homo sapien
tagccatagtatatgatgacccagt

SEQ ID NO: 5431575 - DNA, 25 bp, Homo sapien
aactacctactcaatattcacctgg

SEQ ID NO: 5431576 - DNA, 25 bp, Homo sapien
ccagtgtccgggtggcaatcttaac

SEQ ID NO: 5431577 - DNA, 25 bp, Homo sapien
taccacatattgcatgctgattcag

SEQ ID NO: 5431578 - DNA, 25 bp, Homo sapien
tgcaaaaattttgcgggaggatcat

SEQ ID NO: 5431579 - DNA, 25 bp, Homo sapien
gcatgagtccactgcggccattgtt

SEQ ID NO: 5431580 - DNA, 25 bp, Homo sapien
taacaaattgtaccaactactgact

SEQ ID NO: 5431581 - DNA, 25 bp, Homo sapien
caatgatgagctcagagggaaaagc

SEQ ID NO: 5431582 - DNA, 25 bp, Homo sapien
tctacagaccttcgcatacacatgt

SEQ ID NO: 5431583 - DNA, 25 bp, Homo sapien
tgttaaaagagtatgcacctcatcc

SEQ ID NO: 5431584 - DNA, 25 bp, Homo sapien
tcaggaacctcttccaaagtcactt

SEQ ID NO: 5431585 - DNA, 25 bp, Homo sapien
tcacttgattgttgacagaatttat

SEQ ID NO: 5431586 - DNA, 25 bp, Homo sapien
aacctcttccaaagtcacttgattg

SEQ ID NO: 5431587 - DNA, 25 bp, Homo sapien
tccaaagtcacttgattgttgacag

SEQ ID NO: 5431588 - DNA, 25 bp, Homo sapien
taaagtgggaattgatcagcatgcc

SEQ ID NO: 5431589 - DNA, 25 bp, Homo sapien
taacgagcagagtactgtgggcact

SEQ ID NO: 5431590 - DNA, 25 bp, Homo sapien
ctcactggtagatggaaagcctcaa

SEQ ID NO: 5431591 - DNA, 25 bp, Homo sapien
ttcatacagtgaggcacagaggcac

SEQ ID NO: 5431592 - DNA, 25 bp, Homo sapien
ggcctgcagataactcaacacagct

SEQ ID NO: 5431593 - DNA, 25 bp, Homo sapien
gcagataactcaacacagctggaga

SEQ ID NO: 5431594 - DNA, 25 bp, Homo sapien
aatcagggcctgcagataactcaac

SEQ ID NO: 5431595 - DNA, 25 bp, Homo sapien
agacttggggtctgatggctgacac

SEQ ID NO: 5431596 - DNA, 25 bp, Homo sapien
gacttgcatctcaagaaccaagctc

SEQ ID NO: 5431597 - DNA, 25 bp, Homo sapien
caagctttgtgacaatgacagcggc

SEQ ID NO: 5431598 - DNA, 25 bp, Homo sapien
ggctaacaagctttgtgacaatgac

SEQ ID NO: 5431599 - DNA, 25 bp, Homo sapien
ttgtgacaatgacagcggccaatcc

SEQ ID NO: 5431600 - DNA, 25 bp, Homo sapien
tgtctagggctaacaagctttgtga

SEQ ID NO: 5431601 - DNA, 25 bp, Homo sapien
gctaaatgagacatagtacaaactc

SEQ ID NO: 5431602 - DNA, 25 bp, Homo sapien
caaataggtgaaagttagaatgtac

SEQ ID NO: 5431603 - DNA, 25 bp, Homo sapien
tataatggtggcagagtaaaagctt

SEQ ID NO: 5431604 - DNA, 25 bp, Homo sapien
tcctagggaaaagaatcctgtttca

SEQ ID NO: 5431605 - DNA, 25 bp, Homo sapien
aaaagttatagtatccaagacacag

SEQ ID NO: 5431606 - DNA, 25 bp, Homo sapien
cacacaattatatagtcacttttta

SEQ ID NO: 5431607 - DNA, 25 bp, Homo sapien
caaaattggagtattcacattacct

SEQ ID NO: 5431608 - DNA, 25 bp, Homo sapien
cattacctgatgtcaaaacttattc

SEQ ID NO: 5431609 - DNA, 25 bp, Homo sapien
ggtgtggcggcacactccttttttg

SEQ ID NO: 5431610 - DNA, 25 bp, Homo sapien
cacacaggtcagaagggcttttatt

SEQ ID NO: 5431611 - DNA, 25 bp, Homo sapien
tcacacaggtcagaagggcttttat

SEQ ID NO: 5431612 - DNA, 25 bp, Homo sapien
gagctataagcagaactatcattca

SEQ ID NO: 5431613 - DNA, 25 bp, Homo sapien
cacaggtcagaagggcttttattaa

SEQ ID NO: 5431614 - DNA, 25 bp, Homo sapien
catataggctgaagccggactgcca

SEQ ID NO: 5431615 - DNA, 25 bp, Homo sapien
tgctcttcaaatgaaagggaccctg

SEQ ID NO: 5431616 - DNA, 25 bp, Homo sapien
aagtgcctccttatctgggacgcca

SEQ ID NO: 5431617 - DNA, 25 bp, Homo sapien
tacttctaaggagttcaagtgcctc

SEQ ID NO: 5431618 - DNA, 25 bp, Homo sapien
tggactgagaggaagcacaaacgca

SEQ ID NO: 5431619 - DNA, 25 bp, Homo sapien
tgaaaagggcctatcggatgcgcga

SEQ ID NO: 5431620 - DNA, 25 bp, Homo sapien
gtgacgatggacaagagtcgcccca

SEQ ID NO: 5431621 - DNA, 25 bp, Homo sapien
tgagtaacgtggtcacggagcaacc

SEQ ID NO: 5431622 - DNA, 25 bp, Homo sapien
tagggcttcagtaggccgtgatcat

SEQ ID NO: 5431623 - DNA, 25 bp, Homo sapien
tagtgaacaagaagcacggtgaggc

SEQ ID NO: 5431624 - DNA, 25 bp, Homo sapien
catcaagataaggtacacgaagctt

SEQ ID NO: 5431625 - DNA, 25 bp, Homo sapien
tgatcgagctcagtcaatcaaggct

SEQ ID NO: 5431626 - DNA, 25 bp, Homo sapien
ttcataaaggaaactgcgtatgcag

SEQ ID NO: 5431627 - DNA, 25 bp, Homo sapien
acatgagcactgtacttcataaagg

SEQ ID NO: 5431628 - DNA, 25 bp, Homo sapien
tagaagactgcctaaaacatgagca

SEQ ID NO: 5431629 - DNA, 25 bp, Homo sapien
gcgtatgcagattcagtattgtgta

SEQ ID NO: 5431630 - DNA, 25 bp, Homo sapien
aaatttggccgggcgccctggctca

SEQ ID NO: 5431631 - DNA, 25 bp, Homo sapien
ggccgaggcgggtggatcatgaggt

SEQ ID NO: 5431632 - DNA, 25 bp, Homo sapien
tgaacccaggaagtggagcttgcag

SEQ ID NO: 5431633 - DNA, 25 bp, Homo sapien
cgcctgtaatcccagcactttggga

SEQ ID NO: 5431634 - DNA, 25 bp, Homo sapien
ctagaagtgctatgaaagtacagtg

SEQ ID NO: 5431635 - DNA, 25 bp, Homo sapien
ttgtcatttcagcaagcaccctgaa

SEQ ID NO: 5431636 - DNA, 25 bp, Homo sapien
aaagaattttagcataggatagcca

SEQ ID NO: 5431637 - DNA, 25 bp, Homo sapien
ggatagccataccaaagtgctttgt

SEQ ID NO: 5431638 - DNA, 25 bp, Homo sapien
tattgcagatatcagtacattcctg

SEQ ID NO: 5431639 - DNA, 25 bp, Homo sapien
tctacatattcatccctcccaaaag

SEQ ID NO: 5431640 - DNA, 25 bp, Homo sapien
caaaagatgctcctttgtaatcctt

SEQ ID NO: 5431641 - DNA, 25 bp, Homo sapien
tatgtttgattaattcctctggtga

SEQ ID NO: 5431642 - DNA, 25 bp, Homo sapien
gcctcacatgtccagtaagctactt

SEQ ID NO: 5431643 - DNA, 25 bp, Homo sapien
cagctcaacgtgaatatcctgccag

SEQ ID NO: 5431644 - DNA, 25 bp, Homo sapien
gattttattatccagccaagtggac

SEQ ID NO: 5431645 - DNA, 25 bp, Homo sapien
aagctacttactgcacagctcaacg

SEQ ID NO: 5431646 - DNA, 25 bp, Homo sapien
ctctgcgcttctcctatttatccgt

SEQ ID NO: 5431647 - DNA, 25 bp, Homo sapien
tgtctggatgcaccacaggttattc

SEQ ID NO: 5431648 - DNA, 25 bp, Homo sapien
tctggatgcaccacaggttattcat

SEQ ID NO: 5431649 - DNA, 25 bp, Homo sapien
tatttatccgtctttctcacctaac

SEQ ID NO: 5431650 - DNA, 25 bp, Homo sapien
tctgacatatactggttggtttgtg

SEQ ID NO: 5431651 - DNA, 25 bp, Homo sapien
tagaaactctcttgttatcttaagg

SEQ ID NO: 5431652 - DNA, 25 bp, Homo sapien
caatgcctggctgaagtgtttgttt

SEQ ID NO: 5431653 - DNA, 25 bp, Homo sapien
cctcaggtaagatcttgagttcata

SEQ ID NO: 5431654 - DNA, 25 bp, Homo sapien
ttgatgtggtttcacttccaagatt

SEQ ID NO: 5431655 - DNA, 25 bp, Homo sapien
aatccacaggctgacttcaacttca

SEQ ID NO: 5431656 - DNA, 25 bp, Homo sapien
ccaagattttgatctctggaaatcc

SEQ ID NO: 5431657 - DNA, 25 bp, Homo sapien
cacaggctgacttcaacttcaaatc

SEQ ID NO: 5431658 - DNA, 25 bp, Homo sapien
ctctgggttcaagtgattctcctgc

SEQ ID NO: 5431659 - DNA, 25 bp, Homo sapien
tagctgaatcacaggtgcccaccac

SEQ ID NO: 5431660 - DNA, 25 bp, Homo sapien
ctccagagtagctgaatcacaggtg

SEQ ID NO: 5431661 - DNA, 25 bp, Homo sapien
tcactgaaacttccacctctgggtt

SEQ ID NO: 5431662 - DNA, 25 bp, Homo sapien
gcaggtaagctctctaactcgattt

SEQ ID NO: 5431663 - DNA, 25 bp, Homo sapien
ctttaccacctgattacctgtgtga

SEQ ID NO: 5431664 - DNA, 25 bp, Homo sapien
caatatagcatagtggaggccctag

SEQ ID NO: 5431665 - DNA, 25 bp, Homo sapien
gaggccctaggtatattcaaatgta

SEQ ID NO: 5431666 - DNA, 25 bp, Homo sapien
cctcattttgggagactcatgtggc

SEQ ID NO: 5431667 - DNA, 25 bp, Homo sapien
ttaggcagctgactttgtgtgaagc

SEQ ID NO: 5431668 - DNA, 25 bp, Homo sapien
gaaagggcgcactaaggaaaggaca

SEQ ID NO: 5431669 - DNA, 25 bp, Homo sapien
tttgggagactcatgtggcataaga

SEQ ID NO: 5431670 - DNA, 25 bp, Homo sapien
catgtatggactccttaaggtggtt

SEQ ID NO: 5431671 - DNA, 25 bp, Homo sapien
agttggcaacctttcaaccagctga

SEQ ID NO: 5431672 - DNA, 25 bp, Homo sapien
ttctgagtcacctcttcaagttggc

SEQ ID NO: 5431673 - DNA, 25 bp, Homo sapien
gccacccagtatcaggggcatgtat

SEQ ID NO: 5431674 - DNA, 25 bp, Homo sapien
aattcaacgctcactttaggaggaa

SEQ ID NO: 5431675 - DNA, 25 bp, Homo sapien
ctccctttgcaagcctggtagaaga

SEQ ID NO: 5431676 - DNA, 25 bp, Homo sapien
gcttgggtggaagccctccctttgc

SEQ ID NO: 5431677 - DNA, 25 bp, Homo sapien
taccatagcttgtcctaaaaagtga

SEQ ID NO: 5431678 - DNA, 25 bp, Homo sapien
acttgacggtggtcctctggcagca

SEQ ID NO: 5431679 - DNA, 25 bp, Homo sapien
tgtagttttcagttgtacttgacgg

SEQ ID NO: 5431680 - DNA, 25 bp, Homo sapien
tatatgtgaattctgctagtgtgcc

SEQ ID NO: 5431681 - DNA, 25 bp, Homo sapien
tgaagtgttgaaagctgtagttttc

SEQ ID NO: 5431682 - DNA, 25 bp, Homo sapien
cccaagaaaactctcaatagtagcc

SEQ ID NO: 5431683 - DNA, 25 bp, Homo sapien
agaaaactctcaatagtagccactt

SEQ ID NO: 5431684 - DNA, 25 bp, Homo sapien
gacttttagggagatcaacttgcat

SEQ ID NO: 5431685 - DNA, 25 bp, Homo sapien
ttcccaaggacttttagggagatca

SEQ ID NO: 5431686 - DNA, 25 bp, Homo sapien
ccctattgcatgtgagacacattta

SEQ ID NO: 5431687 - DNA, 25 bp, Homo sapien
caaatacagtaccaaccaaggtgta

SEQ ID NO: 5431688 - DNA, 25 bp, Homo sapien
aaatatgtaatgcaaacatcaggca

SEQ ID NO: 5431689 - DNA, 25 bp, Homo sapien
ttccatatacccaggcagcatgagt

SEQ ID NO: 5431690 - DNA, 25 bp, Homo sapien
tacgctgagctctcccctgtagaag

SEQ ID NO: 5431691 - DNA, 25 bp, Homo sapien
tgggtgcccttgctactcccgtgga

SEQ ID NO: 5431692 - DNA, 25 bp, Homo sapien
aacaacagtcgcacggaagttcccg

SEQ ID NO: 5431693 - DNA, 25 bp, Homo sapien
gattgggacgctggaccgtatctcc

SEQ ID NO: 5431694 - DNA, 25 bp, Homo sapien
caaagagaagtactctggacagctg

SEQ ID NO: 5431695 - DNA, 25 bp, Homo sapien
tggttgtgtcctatatccttgcaag

SEQ ID NO: 5431696 - DNA, 25 bp, Homo sapien
tcttcatatctgagccgtcacctgg

SEQ ID NO: 5431697 - DNA, 25 bp, Homo sapien
cagaatgactcctgcgtctaccagg

SEQ ID NO: 5431698 - DNA, 25 bp, Homo sapien
gctggttggccatggtcaagttacc

SEQ ID NO: 5431699 - DNA, 25 bp, Homo sapien
tctgcaggaataagtaccagagcct

SEQ ID NO: 5431700 - DNA, 25 bp, Homo sapien
tgttatagacacacctgggttcagg

SEQ ID NO: 5431701 - DNA, 25 bp, Homo sapien
ggagaagtattaaccatctgcagga

SEQ ID NO: 5431702 - DNA, 25 bp, Homo sapien
tagggaacatctactcagaggtaca

SEQ ID NO: 5431703 - DNA, 25 bp, Homo sapien
caaatggagctatggtatgaagttc

SEQ ID NO: 5431704 - DNA, 25 bp, Homo sapien
tacatctgctacctaaaatagaggc

SEQ ID NO: 5431705 - DNA, 25 bp, Homo sapien
tgctatgtagctgggcctctgtctc

SEQ ID NO: 5431706 - DNA, 25 bp, Homo sapien
tcaatgccctttctcaggtcaagga

SEQ ID NO: 5431707 - DNA, 25 bp, Homo sapien
tacagtgtgatcagcatatagaagg

SEQ ID NO: 5431708 - DNA, 25 bp, Homo sapien
gaaccttccgtacaatattgagtag

SEQ ID NO: 5431709 - DNA, 25 bp, Homo sapien
ttggctgccaacctcgaagttactg

SEQ ID NO: 5431710 - DNA, 25 bp, Homo sapien
tgcttaaagccatatggagttggaa

SEQ ID NO: 5431711 - DNA, 25 bp, Homo sapien
ctaaagactttataactgcatgaac

SEQ ID NO: 5431712 - DNA, 25 bp, Homo sapien
gagaatgggtcaagatcagtgagaa

SEQ ID NO: 5431713 - DNA, 25 bp, Homo sapien
tacagttgacaggaacctggacccc

SEQ ID NO: 5431714 - DNA, 25 bp, Homo sapien
tggaatacctatgtgcagccactac

SEQ ID NO: 5431715 - DNA, 25 bp, Homo sapien
gaatttgtaagttggcagatcttcc

SEQ ID NO: 5431716 - DNA, 25 bp, Homo sapien
tagtgaatcatgaccctaagggaga

SEQ ID NO: 5431717 - DNA, 25 bp, Homo sapien
gatcagcgatttttgtaaggcaaac

SEQ ID NO: 5431718 - DNA, 25 bp, Homo sapien
ttctcaagtgcaatataacaatgta

SEQ ID NO: 5431719 - DNA, 25 bp, Homo sapien
tgaacttcttgggagaggtactgaa

SEQ ID NO: 5431720 - DNA, 25 bp, Homo sapien
cccacattgggtgagacagaaaatg

SEQ ID NO: 5431721 - DNA, 25 bp, Homo sapien
ggaagctgtgtagtatatcaaatta

SEQ ID NO: 5431722 - DNA, 25 bp, Homo sapien
tatccattcctatcctcgttcgttc

SEQ ID NO: 5431723 - DNA, 25 bp, Homo sapien
cctttggtcccttgatctggtgtcg

SEQ ID NO: 5431724 - DNA, 25 bp, Homo sapien
tctgccctccgggtaatgagctttc

SEQ ID NO: 5431725 - DNA, 25 bp, Homo sapien
ttcctatcctcgttcgttcctgtca

SEQ ID NO: 5431726 - DNA, 25 bp, Homo sapien
ccttgtggattgtgcagccccagct

SEQ ID NO: 5431727 - DNA, 25 bp, Homo sapien
gctgccactggagtggtggagccat

SEQ ID NO: 5431728 - DNA, 25 bp, Homo sapien
cgggctgtcactgccatcagtttgg

SEQ ID NO: 5431729 - DNA, 25 bp, Homo sapien
agtggctgctccacacgggctgtca

SEQ ID NO: 5431730 - DNA, 25 bp, Homo sapien
tcatcagtgaccttactaaagttca

SEQ ID NO: 5431731 - DNA, 25 bp, Homo sapien
attttcaggtgtaagagttgatctt

SEQ ID NO: 5431732 - DNA, 25 bp, Homo sapien
cttaggaaaaattcagttactgaga

SEQ ID NO: 5431733 - DNA, 25 bp, Homo sapien
ttcaaagcaaaagctgatgtttctg

SEQ ID NO: 5431734 - DNA, 25 bp, Homo sapien
gaaggcttcttattggtcttacaca

SEQ ID NO: 5431735 - DNA, 25 bp, Homo sapien
gattatgccctttcagttctatagg

SEQ ID NO: 5431736 - DNA, 25 bp, Homo sapien
aaagttagtgctctgctgaagtgcc

SEQ ID NO: 5431737 - DNA, 25 bp, Homo sapien
taagggtataccattcaggtatgcc

SEQ ID NO: 5431738 - DNA, 25 bp, Homo sapien
gagctgtttataggtaagtaggcaa

SEQ ID NO: 5431739 - DNA, 25 bp, Homo sapien
gggagtaatccctgcatgttatgtg

SEQ ID NO: 5431740 - DNA, 25 bp, Homo sapien
tgaaaacagtgactcaaagtaggaa

SEQ ID NO: 5431741 - DNA, 25 bp, Homo sapien
tattcatgaagacacctaatgctgt

SEQ ID NO: 5431742 - DNA, 25 bp, Homo sapien
tcatccggcttagactagtgtgaaa

SEQ ID NO: 5431743 - DNA, 25 bp, Homo sapien
caggctgtcttgatagatgactaca

SEQ ID NO: 5431744 - DNA, 25 bp, Homo sapien
tatataacttgtccatcaatagggc

SEQ ID NO: 5431745 - DNA, 25 bp, Homo sapien
gaattgcacttgtggaataaccagt

SEQ ID NO: 5431746 - DNA, 25 bp, Homo sapien
catttgtgaaaactgaccctacagg

SEQ ID NO: 5431747 - DNA, 25 bp, Homo sapien
atttgtgaaaactgaccctacaggg

SEQ ID NO: 5431748 - DNA, 25 bp, Homo sapien
taaaactaaaatgatgtgactttta

SEQ ID NO: 5431749 - DNA, 25 bp, Homo sapien
cttgtgagtacatggtagcaatctt

SEQ ID NO: 5431750 - DNA, 25 bp, Homo sapien
caaacaaagtagacactggtagcct

SEQ ID NO: 5431751 - DNA, 25 bp, Homo sapien
tcttagtaatcagttggagaggcag

SEQ ID NO: 5431752 - DNA, 25 bp, Homo sapien
tatgttgaccaagatgaaatgcctt

SEQ ID NO: 5431753 - DNA, 25 bp, Homo sapien
tctagtgatctccatttttggtttc

SEQ ID NO: 5431754 - DNA, 25 bp, Homo sapien
ctgctcttttttctagtgatctcca

SEQ ID NO: 5431755 - DNA, 25 bp, Homo sapien
gcttttcttgaaaatgtgacatctt

SEQ ID NO: 5431756 - DNA, 25 bp, Homo sapien
caatctcatttttagtatctatgta

SEQ ID NO: 5431757 - DNA, 25 bp, Homo sapien
caaaacattcctggcataagtgata

SEQ ID NO: 5431758 - DNA, 25 bp, Homo sapien
ctcacgaaatgtaaacgtgtgggaa

SEQ ID NO: 5431759 - DNA, 25 bp, Homo sapien
gtgatattctatgcattcggtacac

SEQ ID NO: 5431760 - DNA, 25 bp, Homo sapien
taaacgtgtgggaaagatggcagca

SEQ ID NO: 5431761 - DNA, 25 bp, Homo sapien
ttcaaagaaagttacagagggtgag

SEQ ID NO: 5431762 - DNA, 25 bp, Homo sapien
ggctctaagcttggaaacctatgta

SEQ ID NO: 5431763 - DNA, 25 bp, Homo sapien
tgagagatccagcaaggctctaagc

SEQ ID NO: 5431764 - DNA, 25 bp, Homo sapien
tctggcccaatcttcggaatttttg

SEQ ID NO: 5431765 - DNA, 25 bp, Homo sapien
tataacacttcccctcaattggaaa

SEQ ID NO: 5431766 - DNA, 25 bp, Homo sapien
ctgctgcagctactagtttgctaga

SEQ ID NO: 5431767 - DNA, 25 bp, Homo sapien
gcagctactagtttgctagagtttt

SEQ ID NO: 5431768 - DNA, 25 bp, Homo sapien
aactgtttgcagttattacagggaa

SEQ ID NO: 5431769 - DNA, 25 bp, Homo sapien
taagatcttcatgcattttatatga

SEQ ID NO: 5431770 - DNA, 25 bp, Homo sapien
ttcaacatggaagtgtttgatgtac

SEQ ID NO: 5431771 - DNA, 25 bp, Homo sapien
ggaagtgtttgatgtactctgataa

SEQ ID NO: 5431772 - DNA, 25 bp, Homo sapien
tatatgaatactattgccacagcca

SEQ ID NO: 5431773 - DNA, 25 bp, Homo sapien
tttccttctgtttaatgtacccatc

SEQ ID NO: 5431774 - DNA, 25 bp, Homo sapien
cttgacaaatagagcagatatcctc

SEQ ID NO: 5431775 - DNA, 25 bp, Homo sapien
cattttcgtcatttgttcctggttg

SEQ ID NO: 5431776 - DNA, 25 bp, Homo sapien
tctctaaaagtagctcttgacaaat

SEQ ID NO: 5431777 - DNA, 25 bp, Homo sapien
catggttccttggaagcttgaattt

SEQ ID NO: 5431778 - DNA, 25 bp, Homo sapien
attcatggttccttggaagcttgaa

SEQ ID NO: 5431779 - DNA, 25 bp, Homo sapien
gaagcttgaattttttcaacaagac

SEQ ID NO: 5431780 - DNA, 25 bp, Homo sapien
tggaagcttgaattttttcaacaag

SEQ ID NO: 5431781 - DNA, 25 bp, Homo sapien
gatatgcttacaaagttcccctcct

SEQ ID NO: 5431782 - DNA, 25 bp, Homo sapien
agatatgcttacaaagttcccctcc

SEQ ID NO: 5431783 - DNA, 25 bp, Homo sapien
ccctcctttcggaaatgtggaacag

SEQ ID NO: 5431784 - DNA, 25 bp, Homo sapien
ttcggaaatgtggaacagttacaaa

SEQ ID NO: 5431785 - DNA, 25 bp, Homo sapien
taatagggccttcatacagtttcag

SEQ ID NO: 5431786 - DNA, 25 bp, Homo sapien
tgaggcagcaagtatccgcagagat

SEQ ID NO: 5431787 - DNA, 25 bp, Homo sapien
tctggaacactcgtgggaaggcgct

SEQ ID NO: 5431788 - DNA, 25 bp, Homo sapien
gatttacaggactaaggaccactaa

SEQ ID NO: 5431789 - DNA, 25 bp, Homo sapien
ggcggggatgatggccaactggggg

SEQ ID NO: 5431790 - DNA, 25 bp, Homo sapien
tgatggccaactgggggcggtaggg

SEQ ID NO: 5431791 - DNA, 25 bp, Homo sapien
ggggatgatggccaactgggggcgg

SEQ ID NO: 5431792 - DNA, 25 bp, Homo sapien
ggatgatggccaactgggggcggta

SEQ ID NO: 5431793 - DNA, 25 bp, Homo sapien
gggcccatctctcgtaggaggtaga

SEQ ID NO: 5431794 - DNA, 25 bp, Homo sapien
tcagcgcctggtcttggtgccagct

SEQ ID NO: 5431795 - DNA, 25 bp, Homo sapien
cagaggccttatagcctcggcgaag

SEQ ID NO: 5431796 - DNA, 25 bp, Homo sapien
gaaatccatgtattccggctcctcc

SEQ ID NO: 5431797 - DNA, 25 bp, Homo sapien
ggaggcggcccctctgctcggctca

SEQ ID NO: 5431798 - DNA, 25 bp, Homo sapien
cggaggcggcccctctgctcggctc

SEQ ID NO: 5431799 - DNA, 25 bp, Homo sapien
gaggcggcccctctgctcggctcac

SEQ ID NO: 5431800 - DNA, 25 bp, Homo sapien
cattttagacatgcggaattgttcg

SEQ ID NO: 5431801 - DNA, 25 bp, Homo sapien
gcggaattgttcgtagttcagtgat

SEQ ID NO: 5431802 - DNA, 25 bp, Homo sapien
gattatcagaatcctcttgtagcat

SEQ ID NO: 5431803 - DNA, 25 bp, Homo sapien
gaatcctcttgtagcattttagaca

SEQ ID NO: 5431804 - DNA, 25 bp, Homo sapien
ttatctctcggtaactcgctccttc

SEQ ID NO: 5431805 - DNA, 25 bp, Homo sapien
tctcggtaactcgctccttctcgaa

SEQ ID NO: 5431806 - DNA, 25 bp, Homo sapien
cggtaactcgctccttctcgaatct

SEQ ID NO: 5431807 - DNA, 25 bp, Homo sapien
tatctctcggtaactcgctccttct

SEQ ID NO: 5431808 - DNA, 25 bp, Homo sapien
tgcaagaaaggtcacattccctgtg

SEQ ID NO: 5431809 - DNA, 25 bp, Homo sapien
tgtaatttatagatttgggacactg

SEQ ID NO: 5431810 - DNA, 25 bp, Homo sapien
ttatagatttgggacactgtgtgca

SEQ ID NO: 5431811 - DNA, 25 bp, Homo sapien
tgggacactgtgtgcaagaaaggtc

SEQ ID NO: 5431812 - DNA, 25 bp, Homo sapien
agtagttaaggtagttgctattatt

SEQ ID NO: 5431813 - DNA, 25 bp, Homo sapien
ggaggagcagccaacctccactggt

SEQ ID NO: 5431814 - DNA, 25 bp, Homo sapien
aaagcccttggcacaacccgctggg

SEQ ID NO: 5431815 - DNA, 25 bp, Homo sapien
cctccactggtcttgggtgacaaga

SEQ ID NO: 5431816 - DNA, 25 bp, Homo sapien
ttgggtgacaagaaaagcccttggc

SEQ ID NO: 5431817 - DNA, 25 bp, Homo sapien
accagtggctccttcacttgagggc

SEQ ID NO: 5431818 - DNA, 25 bp, Homo sapien
ttcaattacagtggaagatgaaggg

SEQ ID NO: 5431819 - DNA, 25 bp, Homo sapien
ctccttcacttgagggcctcaggag

SEQ ID NO: 5431820 - DNA, 25 bp, Homo sapien
aagaagcatagcaccagtggctcct

SEQ ID NO: 5431821 - DNA, 25 bp, Homo sapien
ttaccaacatgcattgccatcttcc

SEQ ID NO: 5431822 - DNA, 25 bp, Homo sapien
tgtggtcaaccaatagcatacttgt

SEQ ID NO: 5431823 - DNA, 25 bp, Homo sapien
agtcagtgtcaatgtggtcaaccaa

SEQ ID NO: 5431824 - DNA, 25 bp, Homo sapien
ggtcaaccaatagcatacttgtgat

SEQ ID NO: 5431825 - DNA, 25 bp, Homo sapien
ctttgatagtcagtgtcaatgtggt

SEQ ID NO: 5431826 - DNA, 25 bp, Homo sapien
tggtgtatctttccacttcctaagg

SEQ ID NO: 5431827 - DNA, 25 bp, Homo sapien
tcttcacacaaatggtacaactgtt

SEQ ID NO: 5431828 - DNA, 25 bp, Homo sapien
agtttcttatcaaagctggcagaca

SEQ ID NO: 5431829 - DNA, 25 bp, Homo sapien
caaacccttagcagagttttgaagt

SEQ ID NO: 5431830 - DNA, 25 bp, Homo sapien
ggcaaggttgtagaggttactgaga

SEQ ID NO: 5431831 - DNA, 25 bp, Homo sapien
aaagggtgtggagttatctggaaat

SEQ ID NO: 5431832 - DNA, 25 bp, Homo sapien
gcaaggttgtagaggttactgagaa

SEQ ID NO: 5431833 - DNA, 25 bp, Homo sapien
taactactgtcttccgttatcaggc

SEQ ID NO: 5431834 - DNA, 25 bp, Homo sapien
gacaaaggcgactcagttttctctc

SEQ ID NO: 5431835 - DNA, 25 bp, Homo sapien
aaatttgatatgacaaaggcgactc

SEQ ID NO: 5431836 - DNA, 25 bp, Homo sapien
tttgatatgacaaaggcgactcagt

SEQ ID NO: 5431837 - DNA, 25 bp, Homo sapien
gatttctcctcattactctctggca

SEQ ID NO: 5431838 - DNA, 25 bp, Homo sapien
aatacagatttctcctcattactct

SEQ ID NO: 5431839 - DNA, 25 bp, Homo sapien
tacagatttctcctcattactctct

SEQ ID NO: 5431840 - DNA, 25 bp, Homo sapien
ggaatacagatttctcctcattact

SEQ ID NO: 5431841 - DNA, 25 bp, Homo sapien
ttcatcacccctaacgacaaagcag

SEQ ID NO: 5431842 - DNA, 25 bp, Homo sapien
tatctggatgtgctaaagagcccgg

SEQ ID NO: 5431843 - DNA, 25 bp, Homo sapien
cagggacacagatacagggcaaaac

SEQ ID NO: 5431844 - DNA, 25 bp, Homo sapien
gcaaaacatcagaacctcactgcgg

SEQ ID NO: 5431845 - DNA, 25 bp, Homo sapien
tatcagggactaggtttctcaagtg

SEQ ID NO: 5431846 - DNA, 25 bp, Homo sapien
tctcaagtgttgctcagagaaaatt

SEQ ID NO: 5431847 - DNA, 25 bp, Homo sapien
tctgctgttgtttatcagggactag

SEQ ID NO: 5431848 - DNA, 25 bp, Homo sapien
tgttgctcagagaaaattggcaaca

SEQ ID NO: 5431849 - DNA, 25 bp, Homo sapien
gggtctttgcgaggaatcttttcag

SEQ ID NO: 5431850 - DNA, 25 bp, Homo sapien
caggaattgtcctggacaggcccct

SEQ ID NO: 5431851 - DNA, 25 bp, Homo sapien
cagcttgccctgagtacaacttaga

SEQ ID NO: 5431852 - DNA, 25 bp, Homo sapien
cctggtttggtcagccctgcttgaa

SEQ ID NO: 5431853 - DNA, 25 bp, Homo sapien
aatgggggcattgactgttgccacc

SEQ ID NO: 5431854 - DNA, 25 bp, Homo sapien
tgtcaatgggggcattgactgttgc

SEQ ID NO: 5431855 - DNA, 25 bp, Homo sapien
atcttggcgcactctctgtcaatgg

SEQ ID NO: 5431856 - DNA, 25 bp, Homo sapien
tcttggcgcactctctgtcaatggg

SEQ ID NO: 5431857 - DNA, 25 bp, Homo sapien
gagctactggccactctaggctggg

SEQ ID NO: 5431858 - DNA, 25 bp, Homo sapien
caggcctgctttccgtagtgccaag

SEQ ID NO: 5431859 - DNA, 25 bp, Homo sapien
tagtgccaagggagctactggccac

SEQ ID NO: 5431860 - DNA, 25 bp, Homo sapien
gagatttctttcaggcctgctttcc

SEQ ID NO: 5431861 - DNA, 25 bp, Homo sapien
cctcttgtctgtgggctgtactcat

SEQ ID NO: 5431862 - DNA, 25 bp, Homo sapien
gttggaactgcctgagtccgtggcc

SEQ ID NO: 5431863 - DNA, 25 bp, Homo sapien
gtgttggaactgcctgagtccgtgg

SEQ ID NO: 5431864 - DNA, 25 bp, Homo sapien
gcctcttgtctgtgggctgtactca

SEQ ID NO: 5431865 - DNA, 25 bp, Homo sapien
agcacatgggcgtggtcaccacagg

SEQ ID NO: 5431866 - DNA, 25 bp, Homo sapien
tgtcttctcgcctcttttcatcagt

SEQ ID NO: 5431867 - DNA, 25 bp, Homo sapien
ccaaagtgttgagtggttgggaggg

SEQ ID NO: 5431868 - DNA, 25 bp, Homo sapien
ccagagtggactgtcttctcgcctc

SEQ ID NO: 5431869 - DNA, 25 bp, Homo sapien
tatagccatactcacctgccctctt

SEQ ID NO: 5431870 - DNA, 25 bp, Homo sapien
taaccatattattaaccttatagcc

SEQ ID NO: 5431871 - DNA, 25 bp, Homo sapien
tcacacttggtgtatacagctgtcc

SEQ ID NO: 5431872 - DNA, 25 bp, Homo sapien
tacagctgtccttaacccctggtta

SEQ ID NO: 5431873 - DNA, 25 bp, Homo sapien
tgaacttggaggaagtttttcatcc

SEQ ID NO: 5431874 - DNA, 25 bp, Homo sapien
ttttccctttacttcatagatgcca

SEQ ID NO: 5431875 - DNA, 25 bp, Homo sapien
gatgccaatgacaccactactagat

SEQ ID NO: 5431876 - DNA, 25 bp, Homo sapien
tatctacaggccctagaggctctgg

SEQ ID NO: 5431877 - DNA, 25 bp, Homo sapien
tgaggagagggcaggaatgatatac

SEQ ID NO: 5431878 - DNA, 25 bp, Homo sapien
gctgaggagagggcaggaatgatat

SEQ ID NO: 5431879 - DNA, 25 bp, Homo sapien
gcagctgaggagagggcaggaatga

SEQ ID NO: 5431880 - DNA, 25 bp, Homo sapien
tcaactgcagctgaggagagggcag

SEQ ID NO: 5431881 - DNA, 25 bp, Homo sapien
ggaaggtggccatgatcagggaagc

SEQ ID NO: 5431882 - DNA, 25 bp, Homo sapien
tgagtcaggaatgacgggaaggtgg

SEQ ID NO: 5431883 - DNA, 25 bp, Homo sapien
aatgacgggaaggtggccatgatca

SEQ ID NO: 5431884 - DNA, 25 bp, Homo sapien
aaggtggccatgatcagggaagcct

SEQ ID NO: 5431885 - DNA, 25 bp, Homo sapien
tgccctggtacttcttgagccgcac

SEQ ID NO: 5431886 - DNA, 25 bp, Homo sapien
tccagtgagcccatgccctggtact

SEQ ID NO: 5431887 - DNA, 25 bp, Homo sapien
tggtacttcttgagccgcaccccat

SEQ ID NO: 5431888 - DNA, 25 bp, Homo sapien
ccatgccctggtacttcttgagccg

SEQ ID NO: 5431889 - DNA, 25 bp, Homo sapien
tgccgccatcggctatgatggacac

SEQ ID NO: 5431890 - DNA, 25 bp, Homo sapien
tagatgccgccatcggctatgatgg

SEQ ID NO: 5431891 - DNA, 25 bp, Homo sapien
gatgccgccatcggctatgatggac

SEQ ID NO: 5431892 - DNA, 25 bp, Homo sapien
ctagatgccgccatcggctatgatg

SEQ ID NO: 5431893 - DNA, 25 bp, Homo sapien
gccgcagcccatacctatgcgcagc

SEQ ID NO: 5431894 - DNA, 25 bp, Homo sapien
agcccatacctatgcgcagcccgtc

SEQ ID NO: 5431895 - DNA, 25 bp, Homo sapien
gcagcccatacctatgcgcagcccg

SEQ ID NO: 5431896 - DNA, 25 bp, Homo sapien
ccgcagcccatacctatgcgcagcc

SEQ ID NO: 5431897 - DNA, 25 bp, Homo sapien
agactacgacgtctacccccgcctg

SEQ ID NO: 5431898 - DNA, 25 bp, Homo sapien
caagtccaagactacgacgtctacc

SEQ ID NO: 5431899 - DNA, 25 bp, Homo sapien
aagacagcttccctttcttgctatg

SEQ ID NO: 5431900 - DNA, 25 bp, Homo sapien
gaaagacagcttccctttcttgcta

SEQ ID NO: 5431901 - DNA, 25 bp, Homo sapien
ccctttcttgctatgctgcaggatc

SEQ ID NO: 5431902 - DNA, 25 bp, Homo sapien
gcttccctttcttgctatgctgcag

SEQ ID NO: 5431903 - DNA, 25 bp, Homo sapien
tcatttgcctctttcaacatcaggc

SEQ ID NO: 5431904 - DNA, 25 bp, Homo sapien
catttgcctctttcaacatcaggcc

SEQ ID NO: 5431905 - DNA, 25 bp, Homo sapien
atttgcctctttcaacatcaggcct

SEQ ID NO: 5431906 - DNA, 25 bp, Homo sapien
tttgcctctttcaacatcaggcctg

SEQ ID NO: 5431907 - DNA, 25 bp, Homo sapien
aaagttgatgtctctggaggtgacg

SEQ ID NO: 5431908 - DNA, 25 bp, Homo sapien
tgatgtctctggaggtgacgatgcc

SEQ ID NO: 5431909 - DNA, 25 bp, Homo sapien
tggtcctcctcagcaagaaagttga

SEQ ID NO: 5431910 - DNA, 25 bp, Homo sapien
agttgatgtctctggaggtgacgat

SEQ ID NO: 5431911 - DNA, 25 bp, Homo sapien
agcttgctgcctatggtgcccgtct

SEQ ID NO: 5431912 - DNA, 25 bp, Homo sapien
cagcttgctgcctatggtgcccgtc

SEQ ID NO: 5431913 - DNA, 25 bp, Homo sapien
gcctatggtgcccgtctcagtgatg

SEQ ID NO: 5431914 - DNA, 25 bp, Homo sapien
gctgcctatggtgcccgtctcagtg

SEQ ID NO: 5431915 - DNA, 25 bp, Homo sapien
gggtcagcaccaccgggtccgtgat

SEQ ID NO: 5431916 - DNA, 25 bp, Homo sapien
agtgtgcgagggggtcagcaccacc

SEQ ID NO: 5431917 - DNA, 25 bp, Homo sapien
tgtgcgagggggtcagcaccaccgg

SEQ ID NO: 5431918 - DNA, 25 bp, Homo sapien
tgcgagggggtcagcaccaccgggt

SEQ ID NO: 5431919 - DNA, 25 bp, Homo sapien
gaccttccgcacctccttggcctgg

SEQ ID NO: 5431920 - DNA, 25 bp, Homo sapien
tgaccttccgcacctccttggcctg

SEQ ID NO: 5431921 - DNA, 25 bp, Homo sapien
cttcttgaccttccgcacctccttg

SEQ ID NO: 5431922 - DNA, 25 bp, Homo sapien
tcaaacttcttgaccttccgcacct

SEQ ID NO: 5431923 - DNA, 25 bp, Homo sapien
tggggtgcagttgtggtgaatgaaa

SEQ ID NO: 5431924 - DNA, 25 bp, Homo sapien
tgcagttgtggtgaatgaaaccaat

SEQ ID NO: 5431925 - DNA, 25 bp, Homo sapien
gcagttgtggtgaatgaaaccaata

SEQ ID NO: 5431926 - DNA, 25 bp, Homo sapien
ggtgcagttgtggtgaatgaaacca

SEQ ID NO: 5431927 - DNA, 25 bp, Homo sapien
cagagccattgcaatggctatgtcg

SEQ ID NO: 5431928 - DNA, 25 bp, Homo sapien
catcagagccattgcaatggctatg

SEQ ID NO: 5431929 - DNA, 25 bp, Homo sapien
tcccatcagagccattgcaatggct

SEQ ID NO: 5431930 - DNA, 25 bp, Homo sapien
gagccattgcaatggctatgtcggc

SEQ ID NO: 5431931 - DNA, 25 bp, Homo sapien
tcgtcgtaggtgaggcagtcggcgc

SEQ ID NO: 5431932 - DNA, 25 bp, Homo sapien
tatcgggcacatagtcggtgccgcc

SEQ ID NO: 5431933 - DNA, 25 bp, Homo sapien
gggagccagttatcgggcacatagt

SEQ ID NO: 5431934 - DNA, 25 bp, Homo sapien
gcacatagtcggtgccgcccctgat

SEQ ID NO: 5431935 - DNA, 25 bp, Homo sapien
tcaatgttgcggtagttatggaaac

SEQ ID NO: 5431936 - DNA, 25 bp, Homo sapien
tctgaggaactataaaggtttgtgt

SEQ ID NO: 5431937 - DNA, 25 bp, Homo sapien
tgtgttcgtcagaatcaatgttgcg

SEQ ID NO: 5431938 - DNA, 25 bp, Homo sapien
gaaacagggagatcactgtgagcta

SEQ ID NO: 5431939 - DNA, 25 bp, Homo sapien
gcagttgaacagtagagcaaagcct

SEQ ID NO: 5431940 - DNA, 25 bp, Homo sapien
cactgcctgtatgacattgaggagc

SEQ ID NO: 5431941 - DNA, 25 bp, Homo sapien
cttgggccatgagaggaatctaaca

SEQ ID NO: 5431942 - DNA, 25 bp, Homo sapien
tagagaaatagaacagctgcaggtg

SEQ ID NO: 5431943 - DNA, 25 bp, Homo sapien
tgtcttggccactaccgcccctgtg

SEQ ID NO: 5431944 - DNA, 25 bp, Homo sapien
ccctgtgctcctgtgctgcaatctt

SEQ ID NO: 5431945 - DNA, 25 bp, Homo sapien
cctgtgctgcaatcttgtaatggat

SEQ ID NO: 5431946 - DNA, 25 bp, Homo sapien
tgggctcctctccattgtcttggcc

SEQ ID NO: 5431947 - DNA, 25 bp, Homo sapien
actaccagtacaccctggatgatga

SEQ ID NO: 5431948 - DNA, 25 bp, Homo sapien
gcacatggaacagtaaggttgaaag

SEQ ID NO: 5431949 - DNA, 25 bp, Homo sapien
gttctagcacagtagcacaactacc

SEQ ID NO: 5431950 - DNA, 25 bp, Homo sapien
gaaggttgctctctttgactaagct

SEQ ID NO: 5431951 - DNA, 25 bp, Homo sapien
ctctgttctcctgtcctctatgaaa

SEQ ID NO: 5431952 - DNA, 25 bp, Homo sapien
catcttgcatgagaatgcattttat

SEQ ID NO: 5431953 - DNA, 25 bp, Homo sapien
tctatgaaatgaccttcatccccaa

SEQ ID NO: 5431954 - DNA, 25 bp, Homo sapien
tgtagttatctcatccaaaatcaaa

SEQ ID NO: 5431955 - DNA, 25 bp, Homo sapien
agtttcatgagtttgcatattctcc

SEQ ID NO: 5431956 - DNA, 25 bp, Homo sapien
tattctccttgcacggggaccacgc

SEQ ID NO: 5431957 - DNA, 25 bp, Homo sapien
gcatattctccttgcacggggacca

SEQ ID NO: 5431958 - DNA, 25 bp, Homo sapien
taggaaaagtttcatgagtttgcat

SEQ ID NO: 5431959 - DNA, 25 bp, Homo sapien
tcccaaagtaaccaaagtccattgc

SEQ ID NO: 5431960 - DNA, 25 bp, Homo sapien
actttcactgaaatgggtgtagcca

SEQ ID NO: 5431961 - DNA, 25 bp, Homo sapien
tggctggtccagattccttctacag

SEQ ID NO: 5431962 - DNA, 25 bp, Homo sapien
cttctacagcatttgcatcatgggt

SEQ ID NO: 5431963 - DNA, 25 bp, Homo sapien
ccctaaggatagagtggttttgcac

SEQ ID NO: 5431964 - DNA, 25 bp, Homo sapien
aaattggtgatggtagcgtgtctct

SEQ ID NO: 5431965 - DNA, 25 bp, Homo sapien
gaagctgttaaaaagtgcactatgg

SEQ ID NO: 5431966 - DNA, 25 bp, Homo sapien
taggccaaaccttattaaactagca

SEQ ID NO: 5431967 - DNA, 25 bp, Homo sapien
gtttgcatccattgtagtatagttg

SEQ ID NO: 5431968 - DNA, 25 bp, Homo sapien
tttgttaattttgagaagtatccca

SEQ ID NO: 5431969 - DNA, 25 bp, Homo sapien
tcagcataagaaggagtttgcatcc

SEQ ID NO: 5431970 - DNA, 25 bp, Homo sapien
catttactggtttactgaagacttt

SEQ ID NO: 5431971 - DNA, 25 bp, Homo sapien
gactctacaacagacaaaccctggc

SEQ ID NO: 5431972 - DNA, 25 bp, Homo sapien
tatatgggtacaaaactaacagtga

SEQ ID NO: 5431973 - DNA, 25 bp, Homo sapien
tgaatgactgctacgcctcaagact

SEQ ID NO: 5431974 - DNA, 25 bp, Homo sapien
gaacagcctgcgttcctttctatgg

SEQ ID NO: 5431975 - DNA, 25 bp, Homo sapien
tgctggcatctggttgtctttaaaa

SEQ ID NO: 5431976 - DNA, 25 bp, Homo sapien
gaatagcctgggacatttccaaagc

SEQ ID NO: 5431977 - DNA, 25 bp, Homo sapien
caaacagacttctgatgctggcatc

SEQ ID NO: 5431978 - DNA, 25 bp, Homo sapien
aagtagcagattggtatttatcaca

SEQ ID NO: 5431979 - DNA, 25 bp, Homo sapien
caggttagtagcgtcacatcaggca

SEQ ID NO: 5431980 - DNA, 25 bp, Homo sapien
ggcttacaccagctcagaaaagttg

SEQ ID NO: 5431981 - DNA, 25 bp, Homo sapien
tacaaaaaggactacggcactctgg

SEQ ID NO: 5431982 - DNA, 25 bp, Homo sapien
gctacagagtcatgggtccaagtcc

SEQ ID NO: 5431983 - DNA, 25 bp, Homo sapien
gaccatcactgattgttgacactgt

SEQ ID NO: 5431984 - DNA, 25 bp, Homo sapien
cagtcatgactataacctggaccat

SEQ ID NO: 5431985 - DNA, 25 bp, Homo sapien
taagacgcactacgaagagcttctg

SEQ ID NO: 5431986 - DNA, 25 bp, Homo sapien
aagtgttcactaggacagtcatgac

SEQ ID NO: 5431987 - DNA, 25 bp, Homo sapien
agcagaaaatggtagagaccaaaag

SEQ ID NO: 5431988 - DNA, 25 bp, Homo sapien
aagaagcagaaaatggtagagacca

SEQ ID NO: 5431989 - DNA, 25 bp, Homo sapien
cagaaaatggtagagaccaaaagac

SEQ ID NO: 5431990 - DNA, 25 bp, Homo sapien
gaagcagaaaatggtagagaccaaa

SEQ ID NO: 5431991 - DNA, 25 bp, Homo sapien
gattggattccgcttggtgtgtaac

SEQ ID NO: 5431992 - DNA, 25 bp, Homo sapien
gatgtagtcatatacctcctctgca

SEQ ID NO: 5431993 - DNA, 25 bp, Homo sapien
caagataagagtagctctcacagct

SEQ ID NO: 5431994 - DNA, 25 bp, Homo sapien
ccttcaggtcgccatggaatcagca

SEQ ID NO: 5431995 - DNA, 25 bp, Homo sapien
aaattgggccatggataatgtagag

SEQ ID NO: 5431996 - DNA, 25 bp, Homo sapien
tgggccatggataatgtagaggaga

SEQ ID NO: 5431997 - DNA, 25 bp, Homo sapien
attgggccatggataatgtagagga

SEQ ID NO: 5431998 - DNA, 25 bp, Homo sapien
caaattgggccatggataatgtaga

SEQ ID NO: 5431999 - DNA, 25 bp, Homo sapien
gcttctagcaatggcatgtatacaa

SEQ ID NO: 5432000 - DNA, 25 bp, Homo sapien
aatataagcttctagcaatggcatg

SEQ ID NO: 5432001 - DNA, 25 bp, Homo sapien
tagcaatggcatgtatacaagcagg

SEQ ID NO: 5432002 - DNA, 25 bp, Homo sapien
gcatgtatacaagcaggaatcagtg

SEQ ID NO: 5432003 - DNA, 25 bp, Homo sapien
cataagtcattttgaatcagtggac

SEQ ID NO: 5432004 - DNA, 25 bp, Homo sapien
cagcattcgtgtactttctgtgaga

SEQ ID NO: 5432005 - DNA, 25 bp, Homo sapien
tctgtgagatggaattggccaacat

SEQ ID NO: 5432006 - DNA, 25 bp, Homo sapien
cttccactatgagagagattactac

SEQ ID NO: 5432007 - DNA, 25 bp, Homo sapien
gtaattacagcccatcaggtaaaga

SEQ ID NO: 5432008 - DNA, 25 bp, Homo sapien
taggtaaatgccttcacagagcatc

SEQ ID NO: 5432009 - DNA, 25 bp, Homo sapien
gcatccaaaagtaattacagcccat

SEQ ID NO: 5432010 - DNA, 25 bp, Homo sapien
gtgtgtaggtaaatgccttcacaga

SEQ ID NO: 5432011 - DNA, 25 bp, Homo sapien
aggatttgtggctactaaggcctgg

SEQ ID NO: 5432012 - DNA, 25 bp, Homo sapien
gattgttacaacagagttacaaaca

SEQ ID NO: 5432013 - DNA, 25 bp, Homo sapien
taaggcctggttgttggccactgca

SEQ ID NO: 5432014 - DNA, 25 bp, Homo sapien
aggtaatcctttggcaacttaggct

SEQ ID NO: 5432015 - DNA, 25 bp, Homo sapien
tagctctagtaattaaagagcctgg

SEQ ID NO: 5432016 - DNA, 25 bp, Homo sapien
tctgtgattctatatatagctctag

SEQ ID NO: 5432017 - DNA, 25 bp, Homo sapien
tatagctctagtaattaaagagcct

SEQ ID NO: 5432018 - DNA, 25 bp, Homo sapien
caggtctgtgattctatatatagct

SEQ ID NO: 5432019 - DNA, 25 bp, Homo sapien
ccaagcgagataagcagtgatgcaa

SEQ ID NO: 5432020 - DNA, 25 bp, Homo sapien
tccaattatggtcaggtaaaacaaa

SEQ ID NO: 5432021 - DNA, 25 bp, Homo sapien
gtgatgcaatagacaatccgtgtcc

SEQ ID NO: 5432022 - DNA, 25 bp, Homo sapien
aagaatatgccaagcgagataagca

SEQ ID NO: 5432023 - DNA, 25 bp, Homo sapien
ttaaatttcaattcagaattatgac

SEQ ID NO: 5432024 - DNA, 25 bp, Homo sapien
aaatttcaattcagaattatgacat

SEQ ID NO: 5432025 - DNA, 25 bp, Homo sapien
atttcaattcagaattatgacatac

SEQ ID NO: 5432026 - DNA, 25 bp, Homo sapien
tgtaagttaaatttcaattcagaat

SEQ ID NO: 5432027 - DNA, 25 bp, Homo sapien
ttcactttctcgtgggtgttaacat

SEQ ID NO: 5432028 - DNA, 25 bp, Homo sapien
ttacactgggtataatttgtccatg

SEQ ID NO: 5432029 - DNA, 25 bp, Homo sapien
cgtgggtgttaacattacactgggt

SEQ ID NO: 5432030 - DNA, 25 bp, Homo sapien
tggatgtctaaaccagtttccatct

SEQ ID NO: 5432031 - DNA, 25 bp, Homo sapien
gctgcattgattcagttcctgctgc

SEQ ID NO: 5432032 - DNA, 25 bp, Homo sapien
ctgatggatcaaagtcctgaaagta

SEQ ID NO: 5432033 - DNA, 25 bp, Homo sapien
agagctgcattgattcagttcctgc

SEQ ID NO: 5432034 - DNA, 25 bp, Homo sapien
caaagtcctgaaagtaatcagggca

SEQ ID NO: 5432035 - DNA, 25 bp, Homo sapien
gccatccatcccaggttctgttgca

SEQ ID NO: 5432036 - DNA, 25 bp, Homo sapien
tcccaggttctgttgcagtaaacgc

SEQ ID NO: 5432037 - DNA, 25 bp, Homo sapien
tccatcccaggttctgttgcagtaa

SEQ ID NO: 5432038 - DNA, 25 bp, Homo sapien
agagccatccatcccaggttctgtt

SEQ ID NO: 5432039 - DNA, 25 bp, Homo sapien
gtaacattcatattgagctgtcatg

SEQ ID NO: 5432040 - DNA, 25 bp, Homo sapien
tttatttctagtaactcccaactga

SEQ ID NO: 5432041 - DNA, 25 bp, Homo sapien
caactgaattgagtcctcaggactc

SEQ ID NO: 5432042 - DNA, 25 bp, Homo sapien
aatggggtcttgcataatcttttgg

SEQ ID NO: 5432043 - DNA, 25 bp, Homo sapien
agaaccagaaaattcagggtacact

SEQ ID NO: 5432044 - DNA, 25 bp, Homo sapien
aattcagggtacactttttctccat

SEQ ID NO: 5432045 - DNA, 25 bp, Homo sapien
cataaaaaaaggcaagagaaccaga

SEQ ID NO: 5432046 - DNA, 25 bp, Homo sapien
caagagaaccagaaaattcagggta

SEQ ID NO: 5432047 - DNA, 25 bp, Homo sapien
cattaagccaaaatgaaatatgctg

SEQ ID NO: 5432048 - DNA, 25 bp, Homo sapien
aatgaaatatgctgtataacataaa

SEQ ID NO: 5432049 - DNA, 25 bp, Homo sapien
agccaaaatgaaatatgctgtataa

SEQ ID NO: 5432050 - DNA, 25 bp, Homo sapien
taagccaaaatgaaatatgctgtat

SEQ ID NO: 5432051 - DNA, 25 bp, Homo sapien
caaccttgtcaagttgtggttgaca

SEQ ID NO: 5432052 - DNA, 25 bp, Homo sapien
tctttttagtggtagcaatctttca

SEQ ID NO: 5432053 - DNA, 25 bp, Homo sapien
tctataggctagtatgggtttttat

SEQ ID NO: 5432054 - DNA, 25 bp, Homo sapien
agtttgcagcagtcttgtcaagttg

SEQ ID NO: 5432055 - DNA, 25 bp, Homo sapien
atgcacaattgtctccagtctcaaa

SEQ ID NO: 5432056 - DNA, 25 bp, Homo sapien
gtctccagtctcaaatcacattttc

SEQ ID NO: 5432057 - DNA, 25 bp, Homo sapien
ctcttggatcatatttgacattgtc

SEQ ID NO: 5432058 - DNA, 25 bp, Homo sapien
gacattgtctttaagaatttcttaa

SEQ ID NO: 5432059 - DNA, 25 bp, Homo sapien
gttaagtgattaagccagccagaga

SEQ ID NO: 5432060 - DNA, 25 bp, Homo sapien
ttggcactgctagttgttactggca

SEQ ID NO: 5432061 - DNA, 25 bp, Homo sapien
tgaaatattactgcctagtcactca

SEQ ID NO: 5432062 - DNA, 25 bp, Homo sapien
caagagctgctagtctcatagtttc

SEQ ID NO: 5432063 - DNA, 25 bp, Homo sapien
tgattttcccattgtgggcataatt

SEQ ID NO: 5432064 - DNA, 25 bp, Homo sapien
gggactgattttcccattgtgggca

SEQ ID NO: 5432065 - DNA, 25 bp, Homo sapien
tcccattgtgggcataattagccat

SEQ ID NO: 5432066 - DNA, 25 bp, Homo sapien
attttcccattgtgggcataattag

SEQ ID NO: 5432067 - DNA, 25 bp, Homo sapien
tctatcattctgagggaaaaaatgt

SEQ ID NO: 5432068 - DNA, 25 bp, Homo sapien
tacatagtttgagcaaaatcacacc

SEQ ID NO: 5432069 - DNA, 25 bp, Homo sapien
tacatccaagacatatatattaata

SEQ ID NO: 5432070 - DNA, 25 bp, Homo sapien
cattactattacatccaagacatat

SEQ ID NO: 5432071 - DNA, 25 bp, Homo sapien
ccagataggcaaggaataaagtagc

SEQ ID NO: 5432072 - DNA, 25 bp, Homo sapien
tatgcatcctactggtaaaagtgtg

SEQ ID NO: 5432073 - DNA, 25 bp, Homo sapien
caatatgttaaggttcctgcaggaa

SEQ ID NO: 5432074 - DNA, 25 bp, Homo sapien
tgtgagagctccagatgataagata

SEQ ID NO: 5432075 - DNA, 25 bp, Homo sapien
caagaaggtggtgaaccaggcatcg

SEQ ID NO: 5432076 - DNA, 25 bp, Homo sapien
ccaccttcagtgagggggctggcat

SEQ ID NO: 5432077 - DNA, 25 bp, Homo sapien
gctacaccaacagggtggtggatca

SEQ ID NO: 5432078 - DNA, 25 bp, Homo sapien
ccaattatgatgacgtcaagaaggt

SEQ ID NO: 5432079 - DNA, 25 bp, Homo sapien
gatgtcagggatatgcaaacacccc

SEQ ID NO: 5432080 - DNA, 25 bp, Homo sapien
ggccctgctgatactatggactaaa

SEQ ID NO: 5432081 - DNA, 25 bp, Homo sapien
gatgcaataagaaggtgaccctctg

SEQ ID NO: 5432082 - DNA, 25 bp, Homo sapien
tatatttgggcatgacacctttaaa

SEQ ID NO: 5432083 - DNA, 25 bp, Homo sapien
gacctcccacgtggaagtacctata

SEQ ID NO: 5432084 - DNA, 25 bp, Homo sapien
tacatagatcagcagcaagacctcc

SEQ ID NO: 5432085 - DNA, 25 bp, Homo sapien
tcagtagggcctcatgcaacttatt

SEQ ID NO: 5432086 - DNA, 25 bp, Homo sapien
taaattcttgtccactactgccagg

SEQ ID NO: 5432087 - DNA, 25 bp, Homo sapien
aattttaccctctgctgtgttgcca

SEQ ID NO: 5432088 - DNA, 25 bp, Homo sapien
tctctaaagggatggtttgcaagcc

SEQ ID NO: 5432089 - DNA, 25 bp, Homo sapien
gaaaccttgttaggcctcagaagcc

SEQ ID NO: 5432090 - DNA, 25 bp, Homo sapien
tctctttcataggaccaccataggc

SEQ ID NO: 5432091 - DNA, 25 bp, Homo sapien
catcgtcgcaagttggatctcccaa

SEQ ID NO: 5432092 - DNA, 25 bp, Homo sapien
gagcctttacattctcatcgtcgca

SEQ ID NO: 5432093 - DNA, 25 bp, Homo sapien
tccagtaagcatagacaccatgcca

SEQ ID NO: 5432094 - DNA, 25 bp, Homo sapien
tagaagctccaaaccagttcagtgt

SEQ ID NO: 5432095 - DNA, 25 bp, Homo sapien
tggatggcaaaatttactctaaagt

SEQ ID NO: 5432096 - DNA, 25 bp, Homo sapien
tgtctacaatttcccaccaaatatg

SEQ ID NO: 5432097 - DNA, 25 bp, Homo sapien
attatctggttataaattctaaggt

SEQ ID NO: 5432098 - DNA, 25 bp, Homo sapien
gaccttaataggatattattgagga

SEQ ID NO: 5432099 - DNA, 25 bp, Homo sapien
gaaggagtttcaaattcccatctgg

SEQ ID NO: 5432100 - DNA, 25 bp, Homo sapien
tatgcccaatgaggtagttcttcac

SEQ ID NO: 5432101 - DNA, 25 bp, Homo sapien
gttcttcacaatgggaatcgctggt

SEQ ID NO: 5432102 - DNA, 25 bp, Homo sapien
tcgctggttaggtgttggttaccca

SEQ ID NO: 5432103 - DNA, 25 bp, Homo sapien
tctacataagggaaatcaacactgc

SEQ ID NO: 5432104 - DNA, 25 bp, Homo sapien
taactaacatactttgcagggaagc

SEQ ID NO: 5432105 - DNA, 25 bp, Homo sapien
tctggccattcctaagtattgtgac

SEQ ID NO: 5432106 - DNA, 25 bp, Homo sapien
tagcaggaccctatagcttaatgca

SEQ ID NO: 5432107 - DNA, 25 bp, Homo sapien
tcagccatttcaactgacagatcag

SEQ ID NO: 5432108 - DNA, 25 bp, Homo sapien
tgcattgtacaatgaaaagcatggc

SEQ ID NO: 5432109 - DNA, 25 bp, Homo sapien
tattccttatagtgcgggaagtgca

SEQ ID NO: 5432110 - DNA, 25 bp, Homo sapien
tgaaacactctagtaaagagcagtg

SEQ ID NO: 5432111 - DNA, 25 bp, Homo sapien
tttagtgataccctgaaagagagcc

SEQ ID NO: 5432112 - DNA, 25 bp, Homo sapien
ggaataaaggtagcacggagcaaga

SEQ ID NO: 5432113 - DNA, 25 bp, Homo sapien
taataatagtggctaacacgtctgg

SEQ ID NO: 5432114 - DNA, 25 bp, Homo sapien
tatatagagtgtccaccaggtctgg

SEQ ID NO: 5432115 - DNA, 25 bp, Homo sapien
tgaatctttaattatgacctacaag

SEQ ID NO: 5432116 - DNA, 25 bp, Homo sapien
gacctacaagtcattaattgtgtct

SEQ ID NO: 5432117 - DNA, 25 bp, Homo sapien
tctctcatacacatgggagtatacc

SEQ ID NO: 5432118 - DNA, 25 bp, Homo sapien
gtatacctaatttgaactctgagaa

SEQ ID NO: 5432119 - DNA, 25 bp, Homo sapien
acagatggtagcacaagtggttggt

SEQ ID NO: 5432120 - DNA, 25 bp, Homo sapien
tccaaagttttgacagatggtagca

SEQ ID NO: 5432121 - DNA, 25 bp, Homo sapien
ctgaaagtagggccatccaaagttt

SEQ ID NO: 5432122 - DNA, 25 bp, Homo sapien
gtggttggtgtatcatcgtaggacc

SEQ ID NO: 5432123 - DNA, 25 bp, Homo sapien
ccttgaagaaatatactggttaaat

SEQ ID NO: 5432124 - DNA, 25 bp, Homo sapien
tcagaaccttgaagaaatatactgg

SEQ ID NO: 5432125 - DNA, 25 bp, Homo sapien
gaaatatactggttaaattcagctg

SEQ ID NO: 5432126 - DNA, 25 bp, Homo sapien
tatactggttaaattcagctgatgc

SEQ ID NO: 5432127 - DNA, 25 bp, Homo sapien
taaatgtggtatgatcagtgtagcc

SEQ ID NO: 5432128 - DNA, 25 bp, Homo sapien
cagtgtagcccaacctgtagaggtc

SEQ ID NO: 5432129 - DNA, 25 bp, Homo sapien
tcatctccatctgtccattgagcca

SEQ ID NO: 5432130 - DNA, 25 bp, Homo sapien
cagactcatttggtaggttcagaat

SEQ ID NO: 5432131 - DNA, 25 bp, Homo sapien
cattgtcccagtcgaaaaggcagat

SEQ ID NO: 5432132 - DNA, 25 bp, Homo sapien
ggcagataaggctttaccatccaaa

SEQ ID NO: 5432133 - DNA, 25 bp, Homo sapien
ccaagcacctggaagatatttgcat

SEQ ID NO: 5432134 - DNA, 25 bp, Homo sapien
ctgaaaatggtacccactgacatgc

SEQ ID NO: 5432135 - DNA, 25 bp, Homo sapien
aaccagtgtgctgcttatgatttaa

SEQ ID NO: 5432136 - DNA, 25 bp, Homo sapien
tactatggatgtatgttgacaatca

SEQ ID NO: 5432137 - DNA, 25 bp, Homo sapien
gacagagagttatttaatccaaacc

SEQ ID NO: 5432138 - DNA, 25 bp, Homo sapien
tgagtaatagttcatctaagacaga

SEQ ID NO: 5432139 - DNA, 25 bp, Homo sapien
tgtattcatgttggggtagtaggct

SEQ ID NO: 5432140 - DNA, 25 bp, Homo sapien
gggtagtaggctgtattttctctag

SEQ ID NO: 5432141 - DNA, 25 bp, Homo sapien
tatgagaatactacttagaataaat

SEQ ID NO: 5432142 - DNA, 25 bp, Homo sapien
agtgagactatgtttcaacattatt

SEQ ID NO: 5432143 - DNA, 25 bp, Homo sapien
gaccccgcctgcagttagtgttagg

SEQ ID NO: 5432144 - DNA, 25 bp, Homo sapien
taggatgagattcagttagcagagc

SEQ ID NO: 5432145 - DNA, 25 bp, Homo sapien
tcagattgtaagtgatcagcagcag

SEQ ID NO: 5432146 - DNA, 25 bp, Homo sapien
gattccgcagaagagatttacccac

SEQ ID NO: 5432147 - DNA, 25 bp, Homo sapien
tagttcagaaactggacctgcagga

SEQ ID NO: 5432148 - DNA, 25 bp, Homo sapien
ctgcaggaccaacaaaagcaaggtt

SEQ ID NO: 5432149 - DNA, 25 bp, Homo sapien
tgcaggaccaacaaaagcaaggttt

SEQ ID NO: 5432150 - DNA, 25 bp, Homo sapien
ctatgtggttgtaagtagttcagaa

SEQ ID NO: 5432151 - DNA, 25 bp, Homo sapien
tgagtaagtagtgaaccaatggacc

SEQ ID NO: 5432152 - DNA, 25 bp, Homo sapien
caattaggcaactcatcaatgcgct

SEQ ID NO: 5432153 - DNA, 25 bp, Homo sapien
gacttcacatgaatggcctggaggg

SEQ ID NO: 5432154 - DNA, 25 bp, Homo sapien
tgaggtgaacactacagaaactgac

SEQ ID NO: 5432155 - DNA, 25 bp, Homo sapien
gcaggcacatgatgcagagttgact

SEQ ID NO: 5432156 - DNA, 25 bp, Homo sapien
taaataattccctctcgattgccat

SEQ ID NO: 5432157 - DNA, 25 bp, Homo sapien
tagaatgggctatggtcaaacaaaa

SEQ ID NO: 5432158 - DNA, 25 bp, Homo sapien
gacagtttagctcaatatagatgga

SEQ ID NO: 5432159 - DNA, 25 bp, Homo sapien
tccttaatctggttacaggctataa

SEQ ID NO: 5432160 - DNA, 25 bp, Homo sapien
caggctataaaggagataatcattt

SEQ ID NO: 5432161 - DNA, 25 bp, Homo sapien
caccattttatatgtgaaactcagg

SEQ ID NO: 5432162 - DNA, 25 bp, Homo sapien
caaaggactgatttgatgtagccgg

SEQ ID NO: 5432163 - DNA, 25 bp, Homo sapien
acaataagcatagaaaatttaatga

SEQ ID NO: 5432164 - DNA, 25 bp, Homo sapien
atagaaaatcatagtgaaacatttc

SEQ ID NO: 5432165 - DNA, 25 bp, Homo sapien
gaattaatgttacattgctataaca

SEQ ID NO: 5432166 - DNA, 25 bp, Homo sapien
tttcttcatatgctattttcactct

SEQ ID NO: 5432167 - DNA, 25 bp, Homo sapien
tcttcatatgctattttcactctct

SEQ ID NO: 5432168 - DNA, 25 bp, Homo sapien
ttaattaggcctccttttgatattc

SEQ ID NO: 5432169 - DNA, 25 bp, Homo sapien
ccttttgatattctttggatgaaac

SEQ ID NO: 5432170 - DNA, 25 bp, Homo sapien
tcaattaatgggaagagtatcttct

SEQ ID NO: 5432171 - DNA, 25 bp, Homo sapien
tcattggcacgacacaatcctctgt

SEQ ID NO: 5432172 - DNA, 25 bp, Homo sapien
ccactgtacttaaatgggcggcatt

SEQ ID NO: 5432173 - DNA, 25 bp, Homo sapien
ggcggcatttcccaatgactgaatt

SEQ ID NO: 5432174 - DNA, 25 bp, Homo sapien
tgagacaccatgagggaccgtgaaa

SEQ ID NO: 5432175 - DNA, 25 bp, Homo sapien
cagacagtggctcatgaacacccat

SEQ ID NO: 5432176 - DNA, 25 bp, Homo sapien
ggttcaggtgcttccagaggacata

SEQ ID NO: 5432177 - DNA, 25 bp, Homo sapien
gcctaaaccatttagcaaaccatgg

SEQ ID NO: 5432178 - DNA, 25 bp, Homo sapien
caaaccatggaccttactgctatga

SEQ ID NO: 5432179 - DNA, 25 bp, Homo sapien
tgtgtgctcaacaactgggttaaga

SEQ ID NO: 5432180 - DNA, 25 bp, Homo sapien
gaacctgaagccaagcgaaattttg

SEQ ID NO: 5432181 - DNA, 25 bp, Homo sapien
tcttgccacatagaacaaatgagga

SEQ ID NO: 5432182 - DNA, 25 bp, Homo sapien
gcatggtcaacagggactgattcta

SEQ ID NO: 5432183 - DNA, 25 bp, Homo sapien
gtattagatataatcaaaactggaa

SEQ ID NO: 5432184 - DNA, 25 bp, Homo sapien
tggtattagatataatcaaaactgg

SEQ ID NO: 5432185 - DNA, 25 bp, Homo sapien
ggtattagatataatcaaaactgga

SEQ ID NO: 5432186 - DNA, 25 bp, Homo sapien
ccactccactgtgtccctagaagag

SEQ ID NO: 5432187 - DNA, 25 bp, Homo sapien
cccactccactgtgtccctagaaga

SEQ ID NO: 5432188 - DNA, 25 bp, Homo sapien
ccccactccactgtgtccctagaag

SEQ ID NO: 5432189 - DNA, 25 bp, Homo sapien
cactccactgtgtccctagaagagg

SEQ ID NO: 5432190 - DNA, 25 bp, Homo sapien
tgttaagactaaagatggtccagga

SEQ ID NO: 5432191 - DNA, 25 bp, Homo sapien
tacacacaacttagagtagctcaag

SEQ ID NO: 5432192 - DNA, 25 bp, Homo sapien
gaatttattcctactatgttactgg

SEQ ID NO: 5432193 - DNA, 25 bp, Homo sapien
taagctgccctacaccagtcactat

SEQ ID NO: 5432194 - DNA, 25 bp, Homo sapien
gaaagccaacttgtcagaaaatcag

SEQ ID NO: 5432195 - DNA, 25 bp, Homo sapien
gcaggcatctttagattatgaggga

SEQ ID NO: 5432196 - DNA, 25 bp, Homo sapien
gaggctccagatttactatgcaggc

SEQ ID NO: 5432197 - DNA, 25 bp, Homo sapien
tcaggaagtagaaaacttgctgggt

SEQ ID NO: 5432198 - DNA, 25 bp, Homo sapien
gatgtagttccaaggcccctctcaa

SEQ ID NO: 5432199 - DNA, 25 bp, Homo sapien
cacacgttcaacaagaggcgagata

SEQ ID NO: 5432200 - DNA, 25 bp, Homo sapien
tatgcagctggatgtggaactcttt

SEQ ID NO: 5432201 - DNA, 25 bp, Homo sapien
tctttagccggtgagggagagtttc

SEQ ID NO: 5432202 - DNA, 25 bp, Homo sapien
tagttaggtccggtcaaaagactca

SEQ ID NO: 5432203 - DNA, 25 bp, Homo sapien
gatgtatggaagcaaagggatgtat

SEQ ID NO: 5432204 - DNA, 25 bp, Homo sapien
gacatttacaagtgaggtgcagtga

SEQ ID NO: 5432205 - DNA, 25 bp, Homo sapien
cacaactagcacgaactcctgagaa

SEQ ID NO: 5432206 - DNA, 25 bp, Homo sapien
taaaactttattagcagtatgctat

SEQ ID NO: 5432207 - DNA, 25 bp, Homo sapien
tagcagtatgctatcaaaggcatca

SEQ ID NO: 5432208 - DNA, 25 bp, Homo sapien
tatcaaaggcatcacgtatacatat

SEQ ID NO: 5432209 - DNA, 25 bp, Homo sapien
tcaaaggcatcacgtatacatataa

SEQ ID NO: 5432210 - DNA, 25 bp, Homo sapien
tgcagaaggcgttcagaaagacttg

SEQ ID NO: 5432211 - DNA, 25 bp, Homo sapien
gcatgaaatgctatccaatcctaga

SEQ ID NO: 5432212 - DNA, 25 bp, Homo sapien
gaaagacttggtaaatatgagccgc

SEQ ID NO: 5432213 - DNA, 25 bp, Homo sapien
tcctagaaagaacatggatgcatga

SEQ ID NO: 5432214 - DNA, 25 bp, Homo sapien
aaatcttgtaatctagacagtgagg

SEQ ID NO: 5432215 - DNA, 25 bp, Homo sapien
gtattgaaggaatcatagtaagaag

SEQ ID NO: 5432216 - DNA, 25 bp, Homo sapien
caaacacaatatctaatagtacaag

SEQ ID NO: 5432217 - DNA, 25 bp, Homo sapien
tctataaactgtatagtacattatg

SEQ ID NO: 5432218 - DNA, 25 bp, Homo sapien
gcactttagactgcgtttgatgcac

SEQ ID NO: 5432219 - DNA, 25 bp, Homo sapien
tgtgagtaacaccagagaccttgcc

SEQ ID NO: 5432220 - DNA, 25 bp, Homo sapien
ctccagagtgacataacatttaggc

SEQ ID NO: 5432221 - DNA, 25 bp, Homo sapien
gaccttgcctagtgtcatactgact

SEQ ID NO: 5432222 - DNA, 25 bp, Homo sapien
acacattattaagcaacaacgcagg

SEQ ID NO: 5432223 - DNA, 25 bp, Homo sapien
gacatacttctaatacacaatccac

SEQ ID NO: 5432224 - DNA, 25 bp, Homo sapien
aatccacttcattgttagcatgata

SEQ ID NO: 5432225 - DNA, 25 bp, Homo sapien
tagtttcctggaagcaataaaatcc

SEQ ID NO: 5432226 - DNA, 25 bp, Homo sapien
cagcattgagctgggttccataatt

SEQ ID NO: 5432227 - DNA, 25 bp, Homo sapien
tgggttccataattatccacctgga

SEQ ID NO: 5432228 - DNA, 25 bp, Homo sapien
ggaaccttggttgattgcggagtca

SEQ ID NO: 5432229 - DNA, 25 bp, Homo sapien
cagggagttattcacagcattgagc

SEQ ID NO: 5432230 - DNA, 25 bp, Homo sapien
cattcacattgctatgttaaattag

SEQ ID NO: 5432231 - DNA, 25 bp, Homo sapien
tagataaacattgtcacaatctcat

SEQ ID NO: 5432232 - DNA, 25 bp, Homo sapien
gactcatgaagcgtacaacagttaa

SEQ ID NO: 5432233 - DNA, 25 bp, Homo sapien
gtaaggtaatatttccatgagtaac

SEQ ID NO: 5432234 - DNA, 25 bp, Homo sapien
aggcatccaccatacttgaaacgtt

SEQ ID NO: 5432235 - DNA, 25 bp, Homo sapien
ggtaatataacctcgacatattcca

SEQ ID NO: 5432236 - DNA, 25 bp, Homo sapien
aatacctggtaatataacctcgaca

SEQ ID NO: 5432237 - DNA, 25 bp, Homo sapien
cacactgttttgtctgattgttata

SEQ ID NO: 5432238 - DNA, 25 bp, Homo sapien
tctgaacagaggatacaagaacttt

SEQ ID NO: 5432239 - DNA, 25 bp, Homo sapien
tgcctcttgatctttcaaatgaatg

SEQ ID NO: 5432240 - DNA, 25 bp, Homo sapien
aagtggatggaggaaaaatattgca

SEQ ID NO: 5432241 - DNA, 25 bp, Homo sapien
gttgcagatctgcaaaagaacaaac

SEQ ID NO: 5432242 - DNA, 25 bp, Homo sapien
tgcaatgttgtctttataatcctgt

SEQ ID NO: 5432243 - DNA, 25 bp, Homo sapien
ttgcaatgttgtctttataatcctg

SEQ ID NO: 5432244 - DNA, 25 bp, Homo sapien
gcaatgttgtctttataatcctgtt

SEQ ID NO: 5432245 - DNA, 25 bp, Homo sapien
gttgcaatgttgtctttataatcct

SEQ ID NO: 5432246 - DNA, 25 bp, Homo sapien
ttgcttttgggtagacagccagtag

SEQ ID NO: 5432247 - DNA, 25 bp, Homo sapien
gcccacatgtatgcactatttaccc

SEQ ID NO: 5432248 - DNA, 25 bp, Homo sapien
gctgtgctaaacatacaagtacagt

SEQ ID NO: 5432249 - DNA, 25 bp, Homo sapien
agtgtccattgtacccattagatag

SEQ ID NO: 5432250 - DNA, 25 bp, Homo sapien
catgattgctttacatgggccatca

SEQ ID NO: 5432251 - DNA, 25 bp, Homo sapien
gccatcatccgccttgaatgcacaa

SEQ ID NO: 5432252 - DNA, 25 bp, Homo sapien
tatataaattcttcgcactgtcgag

SEQ ID NO: 5432253 - DNA, 25 bp, Homo sapien
cataagtttcagtggtggcaactcc

SEQ ID NO: 5432254 - DNA, 25 bp, Homo sapien
cagaatcagcattaagaggggcagg

SEQ ID NO: 5432255 - DNA, 25 bp, Homo sapien
ctcagaatcagcattaagaggggca

SEQ ID NO: 5432256 - DNA, 25 bp, Homo sapien
cagaagcccaaagtgcatgtacttt

SEQ ID NO: 5432257 - DNA, 25 bp, Homo sapien
aagattaagcagcaggcatacagaa

SEQ ID NO: 5432258 - DNA, 25 bp, Homo sapien
cttgtgctgctaaccgctgagactg

SEQ ID NO: 5432259 - DNA, 25 bp, Homo sapien
ttgtgctgctaaccgctgagactgc

SEQ ID NO: 5432260 - DNA, 25 bp, Homo sapien
gctgctaaccgctgagactgctgtt

SEQ ID NO: 5432261 - DNA, 25 bp, Homo sapien
gcaattaagcaggttaccaagatgc

SEQ ID NO: 5432262 - DNA, 25 bp, Homo sapien
tttctgctatatccggaagtcgagc

SEQ ID NO: 5432263 - DNA, 25 bp, Homo sapien
agcaccctgtgggtcagccctcgag

SEQ ID NO: 5432264 - DNA, 25 bp, Homo sapien
tccctccacatgttaaacaaaagca

SEQ ID NO: 5432265 - DNA, 25 bp, Homo sapien
tcttaccagagctcgagtggtgtgc

SEQ ID NO: 5432266 - DNA, 25 bp, Homo sapien
catccgcccctgctgggagttgtct

SEQ ID NO: 5432267 - DNA, 25 bp, Homo sapien
tggtgtgctgagagatcctctgctc

SEQ ID NO: 5432268 - DNA, 25 bp, Homo sapien
ttgctggcaaggagtgtgatctgtt

SEQ ID NO: 5432269 - DNA, 25 bp, Homo sapien
ttctgcgttgatctctgcgggagct

SEQ ID NO: 5432270 - DNA, 25 bp, Homo sapien
gcgttgatctctgcgggagctgtag

SEQ ID NO: 5432271 - DNA, 25 bp, Homo sapien
gacatgttctaaagattcagatcca

SEQ ID NO: 5432272 - DNA, 25 bp, Homo sapien
cagatccattggagctaaaatattt

SEQ ID NO: 5432273 - DNA, 25 bp, Homo sapien
tgaagcagtacaggtctcaatgtaa

SEQ ID NO: 5432274 - DNA, 25 bp, Homo sapien
taaggtgaagcagtacaggtctcaa

SEQ ID NO: 5432275 - DNA, 25 bp, Homo sapien
aagctcaatgagtactttgccatgt

SEQ ID NO: 5432276 - DNA, 25 bp, Homo sapien
atctctaagctcaatgagtactttg

SEQ ID NO: 5432277 - DNA, 25 bp, Homo sapien
ttaatctctaagctcaatgagtact

SEQ ID NO: 5432278 - DNA, 25 bp, Homo sapien
taatctctaagctcaatgagtactt

SEQ ID NO: 5432279 - DNA, 25 bp, Homo sapien
cactcaatttggctgatctccaggg

SEQ ID NO: 5432280 - DNA, 25 bp, Homo sapien
tgtccactaaaacctggcagcctgt

SEQ ID NO: 5432281 - DNA, 25 bp, Homo sapien
cattttgggtgagtttacagcacac

SEQ ID NO: 5432282 - DNA, 25 bp, Homo sapien
ggtttaaggccgtgtgactgcacat

SEQ ID NO: 5432283 - DNA, 25 bp, Homo sapien
ttctaacaagtcggcacagagcctg

SEQ ID NO: 5432284 - DNA, 25 bp, Homo sapien
caaattctaacaagtcggcacagag

SEQ ID NO: 5432285 - DNA, 25 bp, Homo sapien
aattctaacaagtcggcacagagcc

SEQ ID NO: 5432286 - DNA, 25 bp, Homo sapien
ccacatttttgggatgtcgagtcat

SEQ ID NO: 5432287 - DNA, 25 bp, Homo sapien
tcagagaagggcgtaggtctaaagc

SEQ ID NO: 5432288 - DNA, 25 bp, Homo sapien
ggcagaactagaacctggactacat

SEQ ID NO: 5432289 - DNA, 25 bp, Homo sapien
ggcaaagaagttcacccaacagtca

SEQ ID NO: 5432290 - DNA, 25 bp, Homo sapien
taaagatttgatacaggcagtcacc

SEQ ID NO: 5432291 - DNA, 25 bp, Homo sapien
ccaataagtcttagaatggatcttc

SEQ ID NO: 5432292 - DNA, 25 bp, Homo sapien
caggagctctctcagtctattaggg

SEQ ID NO: 5432293 - DNA, 25 bp, Homo sapien
tcttcaccaggtaagaatacaattg

SEQ ID NO: 5432294 - DNA, 25 bp, Homo sapien
acaattgattctgtgagtgaagctc

SEQ ID NO: 5432295 - DNA, 25 bp, Homo sapien
aaggtgctggtccaatcgttcctgg

SEQ ID NO: 5432296 - DNA, 25 bp, Homo sapien
tcaaggtgctggtccaatcgttcct

SEQ ID NO: 5432297 - DNA, 25 bp, Homo sapien
tggcttgccaatggtggctgctttc

SEQ ID NO: 5432298 - DNA, 25 bp, Homo sapien
caaggtgctggtccaatcgttcctg

SEQ ID NO: 5432299 - DNA, 25 bp, Homo sapien
tcctactgaattaggattgaacatt

SEQ ID NO: 5432300 - DNA, 25 bp, Homo sapien
aggccttctttaaggccatcaatcc

SEQ ID NO: 5432301 - DNA, 25 bp, Homo sapien
caatcctactgaattaggattgaac

SEQ ID NO: 5432302 - DNA, 25 bp, Homo sapien
aatcctactgaattaggattgaaca

SEQ ID NO: 5432303 - DNA, 25 bp, Homo sapien
cgtcatcctcatttataacccttaa

SEQ ID NO: 5432304 - DNA, 25 bp, Homo sapien
taacccttaactatttgagcttgat

SEQ ID NO: 5432305 - DNA, 25 bp, Homo sapien
taactatttgagcttgatcctaaac

SEQ ID NO: 5432306 - DNA, 25 bp, Homo sapien
cacgtcatcctcatttataaccctt

SEQ ID NO: 5432307 - DNA, 25 bp, Homo sapien
gatgacatcgtgatcaactcctctg

SEQ ID NO: 5432308 - DNA, 25 bp, Homo sapien
ggaactacagctgttggtgactaca

SEQ ID NO: 5432309 - DNA, 25 bp, Homo sapien
gtttggttcaagagaggaactacag

SEQ ID NO: 5432310 - DNA, 25 bp, Homo sapien
ttctaatgacaagtatctgggaggg

SEQ ID NO: 5432311 - DNA, 25 bp, Homo sapien
gatagttgtactgcagcattggaac

SEQ ID NO: 5432312 - DNA, 25 bp, Homo sapien
gcaataattccaagtctacacagag

SEQ ID NO: 5432313 - DNA, 25 bp, Homo sapien
cagagacctgtggtccatcacatgg

SEQ ID NO: 5432314 - DNA, 25 bp, Homo sapien
gcattggaacttctattatgggcca

SEQ ID NO: 5432315 - DNA, 25 bp, Homo sapien
caagaaactggcgattgaagagtaa

SEQ ID NO: 5432316 - DNA, 25 bp, Homo sapien
agacaggatttatcttctctacttc

SEQ ID NO: 5432317 - DNA, 25 bp, Homo sapien
ccttccaggtattgaagacaggatt

SEQ ID NO: 5432318 - DNA, 25 bp, Homo sapien
agatcaagaaactggcgattgaaga

SEQ ID NO: 5432319 - DNA, 25 bp, Homo sapien
ctgaaagaaacgcaatctgatctta

SEQ ID NO: 5432320 - DNA, 25 bp, Homo sapien
ctagcagtgaaagagcgaggtaaga

SEQ ID NO: 5432321 - DNA, 25 bp, Homo sapien
gaaagagcgaggtaagaatttgact

SEQ ID NO: 5432322 - DNA, 25 bp, Homo sapien
aagaatttgactattatccagccta

SEQ ID NO: 5432323 - DNA, 25 bp, Homo sapien
ttatccagcctaaagtcgctgctgt

SEQ ID NO: 5432324 - DNA, 25 bp, Homo sapien
caaagagggagcctcagagtcggct

SEQ ID NO: 5432325 - DNA, 25 bp, Homo sapien
agggagcctcagagtcggcttcaga

SEQ ID NO: 5432326 - DNA, 25 bp, Homo sapien
tgttagagcaaagagggagcctcag

SEQ ID NO: 5432327 - DNA, 25 bp, Homo sapien
gagcaaagagggagcctcagagtcg

SEQ ID NO: 5432328 - DNA, 25 bp, Homo sapien
catgcagtctgcctttagagcaaaa

SEQ ID NO: 5432329 - DNA, 25 bp, Homo sapien
taattatttggtggtgactggaaca

SEQ ID NO: 5432330 - DNA, 25 bp, Homo sapien
aaagaaggtcctctttgtatgccca

SEQ ID NO: 5432331 - DNA, 25 bp, Homo sapien
gaagatcgagttcagtatgtggagc

SEQ ID NO: 5432332 - DNA, 25 bp, Homo sapien
ccctcaaccacaatcaaagctatca

SEQ ID NO: 5432333 - DNA, 25 bp, Homo sapien
atgccctgcccctcaaccacaatca

SEQ ID NO: 5432334 - DNA, 25 bp, Homo sapien
cctcaaccacaatcaaagctatcat

SEQ ID NO: 5432335 - DNA, 25 bp, Homo sapien
ctcatgccctgcccctcaaccacaa

SEQ ID NO: 5432336 - DNA, 25 bp, Homo sapien
accaaatttcacgcgcgtccatgtg

SEQ ID NO: 5432337 - DNA, 25 bp, Homo sapien
caaatttcacgcgcgtccatgtgaa

SEQ ID NO: 5432338 - DNA, 25 bp, Homo sapien
ctcacggagcaaagaacaagaggac

SEQ ID NO: 5432339 - DNA, 25 bp, Homo sapien
cggcaccaaatttcacgcgcgtcca

SEQ ID NO: 5432340 - DNA, 25 bp, Homo sapien
cggcaagtcacatgaagttcttttt

SEQ ID NO: 5432341 - DNA, 25 bp, Homo sapien
tctttcctgtgggttgaaacagtca

SEQ ID NO: 5432342 - DNA, 25 bp, Homo sapien
tgtgggttgaaacagtcattcggca

SEQ ID NO: 5432343 - DNA, 25 bp, Homo sapien
cagtcattcggcaagtcacatgaag

SEQ ID NO: 5432344 - DNA, 25 bp, Homo sapien
gaaacaatcttcagtgagtattatg

SEQ ID NO: 5432345 - DNA, 25 bp, Homo sapien
ctgtgtgccccaaagtatggaaaca

SEQ ID NO: 5432346 - DNA, 25 bp, Homo sapien
gccccaaagtatggaaacaatcttc

SEQ ID NO: 5432347 - DNA, 25 bp, Homo sapien
cagtgagtattatgattcctttata

SEQ ID NO: 5432348 - DNA, 25 bp, Homo sapien
ccagatagatgcattcaccagagct

SEQ ID NO: 5432349 - DNA, 25 bp, Homo sapien
tacatcttccatgtgcggtctaaca

SEQ ID NO: 5432350 - DNA, 25 bp, Homo sapien
gagtagtttacttgtcttgtggcga

SEQ ID NO: 5432351 - DNA, 25 bp, Homo sapien
tattggtgatagacaagaagagctt

SEQ ID NO: 5432352 - DNA, 25 bp, Homo sapien
tcagctgagtttgagtccagagaca

SEQ ID NO: 5432353 - DNA, 25 bp, Homo sapien
gcttgacactaaaacattccctgaa

SEQ ID NO: 5432354 - DNA, 25 bp, Homo sapien
gagacagttacagcaactcacccca

SEQ ID NO: 5432355 - DNA, 25 bp, Homo sapien
gaaagttagactgaaaagccctcag

SEQ ID NO: 5432356 - DNA, 25 bp, Homo sapien
atcttgcagcaaggtaataatcaga

SEQ ID NO: 5432357 - DNA, 25 bp, Homo sapien
tgaccagcggttgacttctacttaa

SEQ ID NO: 5432358 - DNA, 25 bp, Homo sapien
gctctagggatccactgccatggct

SEQ ID NO: 5432359 - DNA, 25 bp, Homo sapien
tcagaagaattgatggctctaggga

SEQ ID NO: 5432360 - DNA, 25 bp, Homo sapien
caccgccagaggttgttctttgttt

SEQ ID NO: 5432361 - DNA, 25 bp, Homo sapien
tgtgtggtcatgtctttttctcgta

SEQ ID NO: 5432362 - DNA, 25 bp, Homo sapien
tgtctttttctcgtatgggaaccat

SEQ ID NO: 5432363 - DNA, 25 bp, Homo sapien
accaccgccagaggttgttctttgt

SEQ ID NO: 5432364 - DNA, 25 bp, Homo sapien
gaagaggaagtcgtatggacataac

SEQ ID NO: 5432365 - DNA, 25 bp, Homo sapien
aagaggaagtcgtatggacataacc

SEQ ID NO: 5432366 - DNA, 25 bp, Homo sapien
aggaagtcgtatggacataaccatg

SEQ ID NO: 5432367 - DNA, 25 bp, Homo sapien
ttggaagaggaagtcgtatggacat

SEQ ID NO: 5432368 - DNA, 25 bp, Homo sapien
tgattgccccttttgtagtctgctt

SEQ ID NO: 5432369 - DNA, 25 bp, Homo sapien
actgctgtactccatgtaactgctg

SEQ ID NO: 5432370 - DNA, 25 bp, Homo sapien
taactgtattgattgccccttttgt

SEQ ID NO: 5432371 - DNA, 25 bp, Homo sapien
actccatgtaactgctgctcaagaa

SEQ ID NO: 5432372 - DNA, 25 bp, Homo sapien
ctgcattggtgggaatgtccttttc

SEQ ID NO: 5432373 - DNA, 25 bp, Homo sapien
gcattggtgggaatgtccttttcca

SEQ ID NO: 5432374 - DNA, 25 bp, Homo sapien
cattggtgggaatgtccttttccat

SEQ ID NO: 5432375 - DNA, 25 bp, Homo sapien
ttggtgggaatgtccttttccatgg

SEQ ID NO: 5432376 - DNA, 25 bp, Homo sapien
gctttctgctagactcctttctttt

SEQ ID NO: 5432377 - DNA, 25 bp, Homo sapien
caaaataggcttcaagcacttgtcc

SEQ ID NO: 5432378 - DNA, 25 bp, Homo sapien
gcaagggtatggtcctgagtccaaa

SEQ ID NO: 5432379 - DNA, 25 bp, Homo sapien
gaaatcttgtctccaagatttgtag

SEQ ID NO: 5432380 - DNA, 25 bp, Homo sapien
cacacacattttctcgttagagaaa

SEQ ID NO: 5432381 - DNA, 25 bp, Homo sapien
aagcttctactaagaatatgtctaa

SEQ ID NO: 5432382 - DNA, 25 bp, Homo sapien
taaagcttctactaagaatatgtct

SEQ ID NO: 5432383 - DNA, 25 bp, Homo sapien
ctaaagcttctactaagaatatgtc

SEQ ID NO: 5432384 - DNA, 25 bp, Homo sapien
aaagcttctactaagaatatgtcta

SEQ ID NO: 5432385 - DNA, 25 bp, Homo sapien
tgaatatagcacattgtcaactcca

SEQ ID NO: 5432386 - DNA, 25 bp, Homo sapien
aatatagcacattgtcaactccata

SEQ ID NO: 5432387 - DNA, 25 bp, Homo sapien
tatagcacattgtcaactccataat

SEQ ID NO: 5432388 - DNA, 25 bp, Homo sapien
aactgttaattttcacttcaagcac

SEQ ID NO: 5432389 - DNA, 25 bp, Homo sapien
tccaagttagataagacctgaggat

SEQ ID NO: 5432390 - DNA, 25 bp, Homo sapien
aagttagataagacctgaggattcc

SEQ ID NO: 5432391 - DNA, 25 bp, Homo sapien
caagttagataagacctgaggattc

SEQ ID NO: 5432392 - DNA, 25 bp, Homo sapien
tcttccaagttagataagacctgag

SEQ ID NO: 5432393 - DNA, 25 bp, Homo sapien
gcattcttgcttcaataattctgta

SEQ ID NO: 5432394 - DNA, 25 bp, Homo sapien
tccggtgattaataagtcaataaac

SEQ ID NO: 5432395 - DNA, 25 bp, Homo sapien
caaatagccatattctgcacataaa

SEQ ID NO: 5432396 - DNA, 25 bp, Homo sapien
gaagtttcacactttattgaattgg

SEQ ID NO: 5432397 - DNA, 25 bp, Homo sapien
tttccatgtgcttcactttcttctc

SEQ ID NO: 5432398 - DNA, 25 bp, Homo sapien
ttctttccatgtgcttcactttctt

SEQ ID NO: 5432399 - DNA, 25 bp, Homo sapien
cttttctttccatgtgcttcacttt

SEQ ID NO: 5432400 - DNA, 25 bp, Homo sapien
tgcttttctttccatgtgcttcact

SEQ ID NO: 5432401 - DNA, 25 bp, Homo sapien
aataagtgagtatcgtttatcactc

SEQ ID NO: 5432402 - DNA, 25 bp, Homo sapien
taagtgagtatcgtttatcactcat

SEQ ID NO: 5432403 - DNA, 25 bp, Homo sapien
caataagtgagtatcgtttatcact

SEQ ID NO: 5432404 - DNA, 25 bp, Homo sapien
ccaataagtgagtatcgtttatcac

SEQ ID NO: 5432405 - DNA, 25 bp, Homo sapien
ccagtgcaggcctgaatttcacaga

SEQ ID NO: 5432406 - DNA, 25 bp, Homo sapien
tcacagacgttaactctattaggaa

SEQ ID NO: 5432407 - DNA, 25 bp, Homo sapien
ctgaatttcacagacgttaactcta

SEQ ID NO: 5432408 - DNA, 25 bp, Homo sapien
tttcacagacgttaactctattagg

SEQ ID NO: 5432409 - DNA, 25 bp, Homo sapien
ggtcttcctttgacaggtgtagtga

SEQ ID NO: 5432410 - DNA, 25 bp, Homo sapien
tcatggtcttcctttgacaggtgta

SEQ ID NO: 5432411 - DNA, 25 bp, Homo sapien
acaggtgtagtgatgtaagtattac

SEQ ID NO: 5432412 - DNA, 25 bp, Homo sapien
tcctttgacaggtgtagtgatgtaa

SEQ ID NO: 5432413 - DNA, 25 bp, Homo sapien
ccagtatttggggtatgcaagcaaa

SEQ ID NO: 5432414 - DNA, 25 bp, Homo sapien
cagtatttggggtatgcaagcaaaa

SEQ ID NO: 5432415 - DNA, 25 bp, Homo sapien
agtatttggggtatgcaagcaaaat

SEQ ID NO: 5432416 - DNA, 25 bp, Homo sapien
tccagtatttggggtatgcaagcaa

SEQ ID NO: 5432417 - DNA, 25 bp, Homo sapien
tcctctttttactctcactgttcca

SEQ ID NO: 5432418 - DNA, 25 bp, Homo sapien
ctttcctctttttactctcactgtt

SEQ ID NO: 5432419 - DNA, 25 bp, Homo sapien
ttcctctttttactctcactgttcc

SEQ ID NO: 5432420 - DNA, 25 bp, Homo sapien
tctttttactctcactgttccattt

SEQ ID NO: 5432421 - DNA, 25 bp, Homo sapien
gatgtatttacataataggtgtagc

SEQ ID NO: 5432422 - DNA, 25 bp, Homo sapien
gctgtgtggcccttttgcctcctat

SEQ ID NO: 5432423 - DNA, 25 bp, Homo sapien
tctgtgcttgtaattgatgtattta

SEQ ID NO: 5432424 - DNA, 25 bp, Homo sapien
ctgtcaaatctgttgatttttacca

SEQ ID NO: 5432425 - DNA, 25 bp, Homo sapien
gagacgtgaatcaattcctcaaaaa

SEQ ID NO: 5432426 - DNA, 25 bp, Homo sapien
gttagaatagcctagtaactattaa

SEQ ID NO: 5432427 - DNA, 25 bp, Homo sapien
tgaatttgacagcttgagacgtgaa

SEQ ID NO: 5432428 - DNA, 25 bp, Homo sapien
tatagtaattgaaaagtttatccaa

SEQ ID NO: 5432429 - DNA, 25 bp, Homo sapien
ttttacctttggaccatggcttggc

SEQ ID NO: 5432430 - DNA, 25 bp, Homo sapien
tactctgctactgaagttgccagca

SEQ ID NO: 5432431 - DNA, 25 bp, Homo sapien
acctgctgcagcaagattactctgc

SEQ ID NO: 5432432 - DNA, 25 bp, Homo sapien
gcttggcagagtgtccctcagacaa

SEQ ID NO: 5432433 - DNA, 25 bp, Homo sapien
ctagtttgaggtcgtttgagggtca

SEQ ID NO: 5432434 - DNA, 25 bp, Homo sapien
acttctcactggagaaacactagct

SEQ ID NO: 5432435 - DNA, 25 bp, Homo sapien
gcacaaccctcaacctggagggaca

SEQ ID NO: 5432436 - DNA, 25 bp, Homo sapien
gaggtcgtttgagggtcagctgcac

SEQ ID NO: 5432437 - DNA, 25 bp, Homo sapien
tccatattgatctgcatgaaagcag

SEQ ID NO: 5432438 - DNA, 25 bp, Homo sapien
ccatattgatctgcatgaaagcagg

SEQ ID NO: 5432439 - DNA, 25 bp, Homo sapien
atattgatctgcatgaaagcaggca

SEQ ID NO: 5432440 - DNA, 25 bp, Homo sapien
catattgatctgcatgaaagcaggc

SEQ ID NO: 5432441 - DNA, 25 bp, Homo sapien
tgtttctactgagtaacaaagcaca

SEQ ID NO: 5432442 - DNA, 25 bp, Homo sapien
tttggaatgtctgtagcaattaatc

SEQ ID NO: 5432443 - DNA, 25 bp, Homo sapien
cctttcaatagttctattggattag

SEQ ID NO: 5432444 - DNA, 25 bp, Homo sapien
gaatgtctgtagcaattaatctcct

SEQ ID NO: 5432445 - DNA, 25 bp, Homo sapien
ttataatcctgttcatcatatcttc

SEQ ID NO: 5432446 - DNA, 25 bp, Homo sapien
cttataatcctgttcatcatatctt

SEQ ID NO: 5432447 - DNA, 25 bp, Homo sapien
tataatcctgttcatcatatcttct

SEQ ID NO: 5432448 - DNA, 25 bp, Homo sapien
tgccatggaatcatcaatttttcta

SEQ ID NO: 5432449 - DNA, 25 bp, Homo sapien
ctcttgagtgaagttctaaatgtgt

SEQ ID NO: 5432450 - DNA, 25 bp, Homo sapien
tgtactcaagagtatcacaaacttt

SEQ ID NO: 5432451 - DNA, 25 bp, Homo sapien
tctagtgccttttgaggaattcaat

SEQ ID NO: 5432452 - DNA, 25 bp, Homo sapien
gatggtgtggcttccaaaaatatga

SEQ ID NO: 5432453 - DNA, 25 bp, Homo sapien
tatactattcgaagataatggctga

SEQ ID NO: 5432454 - DNA, 25 bp, Homo sapien
tggctgaaatcaaacgatgaatcct

SEQ ID NO: 5432455 - DNA, 25 bp, Homo sapien
aatttctctccggtgtcacttggat

SEQ ID NO: 5432456 - DNA, 25 bp, Homo sapien
ccttgatttcgaaaaattggtcatc

SEQ ID NO: 5432457 - DNA, 25 bp, Homo sapien
cttgatttcgaaaaattggtcatca

SEQ ID NO: 5432458 - DNA, 25 bp, Homo sapien
ttgatttcgaaaaattggtcatcag

SEQ ID NO: 5432459 - DNA, 25 bp, Homo sapien
accttgatttcgaaaaattggtcat

SEQ ID NO: 5432460 - DNA, 25 bp, Homo sapien
tttgctccattttctgagctatatc

SEQ ID NO: 5432461 - DNA, 25 bp, Homo sapien
tccattttctgagctatatccttca

SEQ ID NO: 5432462 - DNA, 25 bp, Homo sapien
ccattttctgagctatatccttcat

SEQ ID NO: 5432463 - DNA, 25 bp, Homo sapien
tgctccattttctgagctatatcct

SEQ ID NO: 5432464 - DNA, 25 bp, Homo sapien
tggcattactttcataaagaacctg

SEQ ID NO: 5432465 - DNA, 25 bp, Homo sapien
aatgataaatcatactcaccagtga

SEQ ID NO: 5432466 - DNA, 25 bp, Homo sapien
tactaagtatctgtaagtcttggca

SEQ ID NO: 5432467 - DNA, 25 bp, Homo sapien
cctgttttggactgaagaatgataa

SEQ ID NO: 5432468 - DNA, 25 bp, Homo sapien
taaagtctaaagctgcctaatggag

SEQ ID NO: 5432469 - DNA, 25 bp, Homo sapien
ggcaacctcttgtagggttcccagc

SEQ ID NO: 5432470 - DNA, 25 bp, Homo sapien
tattctgggcttgattaatgcagga

SEQ ID NO: 5432471 - DNA, 25 bp, Homo sapien
cacagccaagtaatatcagacccca

SEQ ID NO: 5432472 - DNA, 25 bp, Homo sapien
gctcttcttactccaatcaattccc

SEQ ID NO: 5432473 - DNA, 25 bp, Homo sapien
caggaattcattctctggctcacag

SEQ ID NO: 5432474 - DNA, 25 bp, Homo sapien
cttcttgggctggttcaggaattca

SEQ ID NO: 5432475 - DNA, 25 bp, Homo sapien
ccctgctgccacgagagtcaatgtt

SEQ ID NO: 5432476 - DNA, 25 bp, Homo sapien
cttctgatcctatcataaagataat

SEQ ID NO: 5432477 - DNA, 25 bp, Homo sapien
tctgatcctatcataaagataatca

SEQ ID NO: 5432478 - DNA, 25 bp, Homo sapien
aaagataatcacattgcacctttac

SEQ ID NO: 5432479 - DNA, 25 bp, Homo sapien
taatcacattgcacctttactccaa

SEQ ID NO: 5432480 - DNA, 25 bp, Homo sapien
aatatgttttatcgtttctctcttc

SEQ ID NO: 5432481 - DNA, 25 bp, Homo sapien
aaatatgttttatcgtttctctctt

SEQ ID NO: 5432482 - DNA, 25 bp, Homo sapien
aaaatatgttttatcgtttctctct

SEQ ID NO: 5432483 - DNA, 25 bp, Homo sapien
atgggatggagcctcacagatttcc

SEQ ID NO: 5432484 - DNA, 25 bp, Homo sapien
taagacaaggctcacaatgggatgg

SEQ ID NO: 5432485 - DNA, 25 bp, Homo sapien
gagaggtcttggcagacttgataga

SEQ ID NO: 5432486 - DNA, 25 bp, Homo sapien
cacttggcactttagagttggcttc

SEQ ID NO: 5432487 - DNA, 25 bp, Homo sapien
tatcttcctctgaaagacgaattcc

SEQ ID NO: 5432488 - DNA, 25 bp, Homo sapien
tttctatcttcctctgaaagacgaa

SEQ ID NO: 5432489 - DNA, 25 bp, Homo sapien
ttttctatcttcctctgaaagacga

SEQ ID NO: 5432490 - DNA, 25 bp, Homo sapien
tctatcttcctctgaaagacgaatt

SEQ ID NO: 5432491 - DNA, 25 bp, Homo sapien
atatttgaactttgccaacacagct

SEQ ID NO: 5432492 - DNA, 25 bp, Homo sapien
agctggatactcattgcctgccacc

SEQ ID NO: 5432493 - DNA, 25 bp, Homo sapien
ctacatttcgaagcttgagtttcac

SEQ ID NO: 5432494 - DNA, 25 bp, Homo sapien
tatcctcagttgaaacatgttcact

SEQ ID NO: 5432495 - DNA, 25 bp, Homo sapien
tcattgttggatgctctcgtggagg

SEQ ID NO: 5432496 - DNA, 25 bp, Homo sapien
ttttcattgttggatgctctcgtgg

SEQ ID NO: 5432497 - DNA, 25 bp, Homo sapien
tttcattgttggatgctctcgtgga

SEQ ID NO: 5432498 - DNA, 25 bp, Homo sapien
ttcattgttggatgctctcgtggag

SEQ ID NO: 5432499 - DNA, 25 bp, Homo sapien
taagctaaaccttgagcctagctgc

SEQ ID NO: 5432500 - DNA, 25 bp, Homo sapien
tcactgtaagctaaaccttgagcct

SEQ ID NO: 5432501 - DNA, 25 bp, Homo sapien
agctaaaccttgagcctagctgcac

SEQ ID NO: 5432502 - DNA, 25 bp, Homo sapien
actgtaagctaaaccttgagcctag

SEQ ID NO: 5432503 - DNA, 25 bp, Homo sapien
taaagtcctagcttcaggcaggaac

SEQ ID NO: 5432504 - DNA, 25 bp, Homo sapien
tggataaagtcctagcttcaggcag

SEQ ID NO: 5432505 - DNA, 25 bp, Homo sapien
gataaagtcctagcttcaggcagga

SEQ ID NO: 5432506 - DNA, 25 bp, Homo sapien
gtgtggataaagtcctagcttcagg

SEQ ID NO: 5432507 - DNA, 25 bp, Homo sapien
tacatcaggaataagaggcttttgt

SEQ ID NO: 5432508 - DNA, 25 bp, Homo sapien
gcggtcccgtaggattgcttatctt

SEQ ID NO: 5432509 - DNA, 25 bp, Homo sapien
ccgtggctgtactaggtatcaggaa

SEQ ID NO: 5432510 - DNA, 25 bp, Homo sapien
gaacttgtaaccatctggcggtccc

SEQ ID NO: 5432511 - DNA, 25 bp, Homo sapien
tgaagtggaggtctgagcaaacatg

SEQ ID NO: 5432512 - DNA, 25 bp, Homo sapien
tgagagaataagagtgacctcagca

SEQ ID NO: 5432513 - DNA, 25 bp, Homo sapien
aaacatgagagaataagagtgacct

SEQ ID NO: 5432514 - DNA, 25 bp, Homo sapien
tggaggtctgagcaaacatgagaga

SEQ ID NO: 5432515 - DNA, 25 bp, Homo sapien
ctgcaccaaaggcagcaccactcat

SEQ ID NO: 5432516 - DNA, 25 bp, Homo sapien
acctgcaccaaaggcagcaccactc

SEQ ID NO: 5432517 - DNA, 25 bp, Homo sapien
tgccaaatcatcaagacctgcacca

SEQ ID NO: 5432518 - DNA, 25 bp, Homo sapien
caaatcatcaagacctgcaccaaag

SEQ ID NO: 5432519 - DNA, 25 bp, Homo sapien
cttccattgcatagcttccagattc

SEQ ID NO: 5432520 - DNA, 25 bp, Homo sapien
ctgttactggagcaatgtcaaatga

SEQ ID NO: 5432521 - DNA, 25 bp, Homo sapien
tactggagcaatgtcaaatgacaca

SEQ ID NO: 5432522 - DNA, 25 bp, Homo sapien
tcttccattgcatagcttccagatt

SEQ ID NO: 5432523 - DNA, 25 bp, Homo sapien
gctctgccagtaacctacatcctta

SEQ ID NO: 5432524 - DNA, 25 bp, Homo sapien
cagcattgtcttgacacgttgacca

SEQ ID NO: 5432525 - DNA, 25 bp, Homo sapien
ttttgtgtctcataagccatttggc

SEQ ID NO: 5432526 - DNA, 25 bp, Homo sapien
tacatccttatcaggctcccaaggt

SEQ ID NO: 5432527 - DNA, 25 bp, Homo sapien
tactcaagttactgcagagtccctg

SEQ ID NO: 5432528 - DNA, 25 bp, Homo sapien
catagcacccatcattaatcagagc

SEQ ID NO: 5432529 - DNA, 25 bp, Homo sapien
gagctggccccttttgttgcatcta

SEQ ID NO: 5432530 - DNA, 25 bp, Homo sapien
aactaagtcaataagaattctgggc

SEQ ID NO: 5432531 - DNA, 25 bp, Homo sapien
tgtataataaaaggttaggcttgga

SEQ ID NO: 5432532 - DNA, 25 bp, Homo sapien
atcaatcccgtttgccctgtttggg

SEQ ID NO: 5432533 - DNA, 25 bp, Homo sapien
agccaggtagaagcctcatttgtat

SEQ ID NO: 5432534 - DNA, 25 bp, Homo sapien
tttctttgtccccacatgtgcaggt

SEQ ID NO: 5432535 - DNA, 25 bp, Homo sapien
tcttcgtggaagcatggctcgggca

SEQ ID NO: 5432536 - DNA, 25 bp, Homo sapien
ctgtgtacaatttatcggcggctgc

SEQ ID NO: 5432537 - DNA, 25 bp, Homo sapien
taagtagtaccagtgacagtgacct

SEQ ID NO: 5432538 - DNA, 25 bp, Homo sapien
cacagtatcttagcaccaggcagac

SEQ ID NO: 5432539 - DNA, 25 bp, Homo sapien
tacattctggcattcagtataacac

SEQ ID NO: 5432540 - DNA, 25 bp, Homo sapien
gaattaaatatctctggaacacaag

SEQ ID NO: 5432541 - DNA, 25 bp, Homo sapien
cttttatccattttagcatcatata

SEQ ID NO: 5432542 - DNA, 25 bp, Homo sapien
tagcatcatataggcatttaaaggg

SEQ ID NO: 5432543 - DNA, 25 bp, Homo sapien
gaaccctataagcatgctctgtgga

SEQ ID NO: 5432544 - DNA, 25 bp, Homo sapien
tgttcatagctcgtacccactaagc

SEQ ID NO: 5432545 - DNA, 25 bp, Homo sapien
tgcacagcgagccacgcagaatatg

SEQ ID NO: 5432546 - DNA, 25 bp, Homo sapien
ccatcatcaagtgtagccagtgttt

SEQ ID NO: 5432547 - DNA, 25 bp, Homo sapien
gagaggctgtccactatacacagga

SEQ ID NO: 5432548 - DNA, 25 bp, Homo sapien
tgaggaattaatctccttcatgagg

SEQ ID NO: 5432549 - DNA, 25 bp, Homo sapien
ggctgtccactatacacaggagaaa

SEQ ID NO: 5432550 - DNA, 25 bp, Homo sapien
ggaattaatctccttcatgaggaga

SEQ ID NO: 5432551 - DNA, 25 bp, Homo sapien
agttctagacatatcaacattggta

SEQ ID NO: 5432552 - DNA, 25 bp, Homo sapien
ccagtgttctccacataaaatgagt

SEQ ID NO: 5432553 - DNA, 25 bp, Homo sapien
tagccaaaactacaacacagactga

SEQ ID NO: 5432554 - DNA, 25 bp, Homo sapien
tactgtccaacagcatactatgcac

SEQ ID NO: 5432555 - DNA, 25 bp, Homo sapien
gtggacaccattgcctcagcaagag

SEQ ID NO: 5432556 - DNA, 25 bp, Homo sapien
gaaaccagggagatctgattagcca

SEQ ID NO: 5432557 - DNA, 25 bp, Homo sapien
gcttcttacgactatgtgggactga

SEQ ID NO: 5432558 - DNA, 25 bp, Homo sapien
cctaggcttcttacgactatgtggg

SEQ ID NO: 5432559 - DNA, 25 bp, Homo sapien
gggtttcttggttctgctatatagt

SEQ ID NO: 5432560 - DNA, 25 bp, Homo sapien
tgtcagctgggtttcttggttctgc

SEQ ID NO: 5432561 - DNA, 25 bp, Homo sapien
ggttctgctatatagttgtaggaca

SEQ ID NO: 5432562 - DNA, 25 bp, Homo sapien
tcttggttctgctatatagttgtag

SEQ ID NO: 5432563 - DNA, 25 bp, Homo sapien
gcaccaccctgcttggcttccacga

SEQ ID NO: 5432564 - DNA, 25 bp, Homo sapien
actaaccaggcaccaccctgcttgg

SEQ ID NO: 5432565 - DNA, 25 bp, Homo sapien
caccctgcttggcttccacgatcag

SEQ ID NO: 5432566 - DNA, 25 bp, Homo sapien
tggcttccacgatcagacgagatcg

SEQ ID NO: 5432567 - DNA, 25 bp, Homo sapien
tagagagactgttgatgcagaacca

SEQ ID NO: 5432568 - DNA, 25 bp, Homo sapien
gaaccagcatggcaagtctctgttc

SEQ ID NO: 5432569 - DNA, 25 bp, Homo sapien
cctgcactctcagtatacgtgaaag

SEQ ID NO: 5432570 - DNA, 25 bp, Homo sapien
gaacaatagtcttctgcagtcacac

SEQ ID NO: 5432571 - DNA, 25 bp, Homo sapien
gccgggagtggtggcgcggcgcctg

SEQ ID NO: 5432572 - DNA, 25 bp, Homo sapien
aaagtagtagtatgggccgggcgca

SEQ ID NO: 5432573 - DNA, 25 bp, Homo sapien
gagatcaagaccattctggctacgg

SEQ ID NO: 5432574 - DNA, 25 bp, Homo sapien
atcaagaccattctggctacggtga

SEQ ID NO: 5432575 - DNA, 25 bp, Homo sapien
cccttttgcagttgccctcctattt

SEQ ID NO: 5432576 - DNA, 25 bp, Homo sapien
aacacagtaactttggaacccagag

SEQ ID NO: 5432577 - DNA, 25 bp, Homo sapien
gagcccctaggaactcataggatat

SEQ ID NO: 5432578 - DNA, 25 bp, Homo sapien
caaaataaagcgattctttcagaat

SEQ ID NO: 5432579 - DNA, 25 bp, Homo sapien
gaccccagccaagttattatgagga

SEQ ID NO: 5432580 - DNA, 25 bp, Homo sapien
gttcagctggaactagttaatctgt

SEQ ID NO: 5432581 - DNA, 25 bp, Homo sapien
ttaagagccctagacttcagttacc

SEQ ID NO: 5432582 - DNA, 25 bp, Homo sapien
tagtacctccaaaccatgagatttg

SEQ ID NO: 5432583 - DNA, 25 bp, Homo sapien
tgaggacaaaccagtccgctgaggt

SEQ ID NO: 5432584 - DNA, 25 bp, Homo sapien
cgtgcacgcgcgagatagtccagtg

SEQ ID NO: 5432585 - DNA, 25 bp, Homo sapien
taaatgtgactgtgactccgtgagc

SEQ ID NO: 5432586 - DNA, 25 bp, Homo sapien
caggcgtcccgtgtggaaatgtcca

SEQ ID NO: 5432587 - DNA, 25 bp, Homo sapien
ctccctccaggtagcgtggaatcgc

SEQ ID NO: 5432588 - DNA, 25 bp, Homo sapien
aggctccctccaggtagcgtggaat

SEQ ID NO: 5432589 - DNA, 25 bp, Homo sapien
gctccctccaggtagcgtggaatcg

SEQ ID NO: 5432590 - DNA, 25 bp, Homo sapien
tagccgctggccagcaggttgtaaa

SEQ ID NO: 5432591 - DNA, 25 bp, Homo sapien
taagacctgttgacgcctgctatgg

SEQ ID NO: 5432592 - DNA, 25 bp, Homo sapien
tcgtccagcactaaaggaggctaag

SEQ ID NO: 5432593 - DNA, 25 bp, Homo sapien
cagaaacctccttagccttttgtgg

SEQ ID NO: 5432594 - DNA, 25 bp, Homo sapien
agcaggcaagtcatcgtcgggtcac

SEQ ID NO: 5432595 - DNA, 25 bp, Homo sapien
cgggccgcggatactttaaagctca

SEQ ID NO: 5432596 - DNA, 25 bp, Homo sapien
tgctaaattcgcttggccgggtcca

SEQ ID NO: 5432597 - DNA, 25 bp, Homo sapien
acatggttacccttctgctgcgcgg

SEQ ID NO: 5432598 - DNA, 25 bp, Homo sapien
gatcagaatccggagcaggcagttc

SEQ ID NO: 5432599 - DNA, 25 bp, Homo sapien
tctctctattctgaggctcctgcgg

SEQ ID NO: 5432600 - DNA, 25 bp, Homo sapien
ggatcagaatccggagcaggcagtt

SEQ ID NO: 5432601 - DNA, 25 bp, Homo sapien
cagttctctctattctgaggctcct

SEQ ID NO: 5432602 - DNA, 25 bp, Homo sapien
gagggaaacatagccaataactgga

SEQ ID NO: 5432603 - DNA, 25 bp, Homo sapien
gctaatgtattagaactggtatcag

SEQ ID NO: 5432604 - DNA, 25 bp, Homo sapien
ttaaaagcatggagattgggttgga

SEQ ID NO: 5432605 - DNA, 25 bp, Homo sapien
tggtatcagtatgggtgttaaaagc

SEQ ID NO: 5432606 - DNA, 25 bp, Homo sapien
tctctttggctagcaactaccctct

SEQ ID NO: 5432607 - DNA, 25 bp, Homo sapien
tgatgcctttgtggcctcattgctc

SEQ ID NO: 5432608 - DNA, 25 bp, Homo sapien
tcatcctgtgacaagaaacttctaa

SEQ ID NO: 5432609 - DNA, 25 bp, Homo sapien
ttgggaagtcccacatggtatggcc

SEQ ID NO: 5432610 - DNA, 25 bp, Homo sapien
tgttttcagggtacattagagtaag

SEQ ID NO: 5432611 - DNA, 25 bp, Homo sapien
ttcagggtacattagagtaagggtc

SEQ ID NO: 5432612 - DNA, 25 bp, Homo sapien
cagggtacattagagtaagggtcct

SEQ ID NO: 5432613 - DNA, 25 bp, Homo sapien
gtgttttcagggtacattagagtaa

SEQ ID NO: 5432614 - DNA, 25 bp, Homo sapien
ccagctgcagttcggatgtgatcac

SEQ ID NO: 5432615 - DNA, 25 bp, Homo sapien
tctgagatctctccttaagaccagc

SEQ ID NO: 5432616 - DNA, 25 bp, Homo sapien
gaattttgttatgtgctttgccctc

SEQ ID NO: 5432617 - DNA, 25 bp, Homo sapien
gaaaccatatgattctctgagatct

SEQ ID NO: 5432618 - DNA, 25 bp, Homo sapien
cttccaactctgtgatacctttcat

SEQ ID NO: 5432619 - DNA, 25 bp, Homo sapien
acacctttgataattccttccaact

SEQ ID NO: 5432620 - DNA, 25 bp, Homo sapien
ttccttccaactctgtgataccttt

SEQ ID NO: 5432621 - DNA, 25 bp, Homo sapien
ctttgataattccttccaactctgt

SEQ ID NO: 5432622 - DNA, 25 bp, Homo sapien
ctttggttgacatcctgtagtttcc

SEQ ID NO: 5432623 - DNA, 25 bp, Homo sapien
tgaacttctccatgctgcagaattt

SEQ ID NO: 5432624 - DNA, 25 bp, Homo sapien
ggttatgatcttataaacagtgcca

SEQ ID NO: 5432625 - DNA, 25 bp, Homo sapien
tcccattggcaagatgctctgctgc

SEQ ID NO: 5432626 - DNA, 25 bp, Homo sapien
cagcattatccactatagttctatc

SEQ ID NO: 5432627 - DNA, 25 bp, Homo sapien
tatcttcttttattagctttaccat

SEQ ID NO: 5432628 - DNA, 25 bp, Homo sapien
gaccacagcattatccactatagtt

SEQ ID NO: 5432629 - DNA, 25 bp, Homo sapien
ctggaccacagcattatccactata

SEQ ID NO: 5432630 - DNA, 25 bp, Homo sapien
cttaaatgcttcttcaccttcagag

SEQ ID NO: 5432631 - DNA, 25 bp, Homo sapien
cagagcatctagtgatacataggac

SEQ ID NO: 5432632 - DNA, 25 bp, Homo sapien
ggtgttatctatgtccttaaatgct

SEQ ID NO: 5432633 - DNA, 25 bp, Homo sapien
gggccacatgtctaagcttccatga

SEQ ID NO: 5432634 - DNA, 25 bp, Homo sapien
tatttctgcatcgatgtgtttggcc

SEQ ID NO: 5432635 - DNA, 25 bp, Homo sapien
atttcatatttctgcatcgatgtgt

SEQ ID NO: 5432636 - DNA, 25 bp, Homo sapien
tcatatttctgcatcgatgtgtttg

SEQ ID NO: 5432637 - DNA, 25 bp, Homo sapien
catatttctgcatcgatgtgtttgg

SEQ ID NO: 5432638 - DNA, 25 bp, Homo sapien
gtttgatatggatcatgtgcccttc

SEQ ID NO: 5432639 - DNA, 25 bp, Homo sapien
acccttgtaggtttgatatggatca

SEQ ID NO: 5432640 - DNA, 25 bp, Homo sapien
gcccttcttagccagtctctggata

SEQ ID NO: 5432641 - DNA, 25 bp, Homo sapien
cctgaatagaatcttgctgaccctt

SEQ ID NO: 5432642 - DNA, 25 bp, Homo sapien
aacccctgggaattcaagatcaatc

SEQ ID NO: 5432643 - DNA, 25 bp, Homo sapien
cacaactatcctgtagcacctgcta

SEQ ID NO: 5432644 - DNA, 25 bp, Homo sapien
cctactttctgaatgatctctagca

SEQ ID NO: 5432645 - DNA, 25 bp, Homo sapien
gctgttgaataaagtcatagcctac

SEQ ID NO: 5432646 - DNA, 25 bp, Homo sapien
tacaaactcggtgggagagcctcct

SEQ ID NO: 5432647 - DNA, 25 bp, Homo sapien
tgtgaccatgtggtacaaactcggt

SEQ ID NO: 5432648 - DNA, 25 bp, Homo sapien
gcttcttagtgtgaccatgtggtac

SEQ ID NO: 5432649 - DNA, 25 bp, Homo sapien
catgtggtacaaactcggtgggaga

SEQ ID NO: 5432650 - DNA, 25 bp, Homo sapien
taccccagggatgtattcagaacta

SEQ ID NO: 5432651 - DNA, 25 bp, Homo sapien
taattacttccccataaaggatcca

SEQ ID NO: 5432652 - DNA, 25 bp, Homo sapien
tcctggagcacagctagaggttgat

SEQ ID NO: 5432653 - DNA, 25 bp, Homo sapien
gcacattaatatcgcttagggagct

SEQ ID NO: 5432654 - DNA, 25 bp, Homo sapien
gttgagatcaacattattcccttgg

SEQ ID NO: 5432655 - DNA, 25 bp, Homo sapien
gagatcaacattattcccttgggcc

SEQ ID NO: 5432656 - DNA, 25 bp, Homo sapien
gatcaacattattcccttgggccta

SEQ ID NO: 5432657 - DNA, 25 bp, Homo sapien
caacattattcccttgggcctaata

SEQ ID NO: 5432658 - DNA, 25 bp, Homo sapien
gaactagtccagacactggttcttt

SEQ ID NO: 5432659 - DNA, 25 bp, Homo sapien
ctgtctggatggcttggaactagtc

SEQ ID NO: 5432660 - DNA, 25 bp, Homo sapien
aatagctgtctggatggcttggaac

SEQ ID NO: 5432661 - DNA, 25 bp, Homo sapien
gatggcttggaactagtccagacac

SEQ ID NO: 5432662 - DNA, 25 bp, Homo sapien
gtgtgcacatatttgacctcttcac

SEQ ID NO: 5432663 - DNA, 25 bp, Homo sapien
ttcgggccagggagtacaaagaatg

SEQ ID NO: 5432664 - DNA, 25 bp, Homo sapien
caagttgaaccattttcgggccagg

SEQ ID NO: 5432665 - DNA, 25 bp, Homo sapien
tcagacaagttgaaccattttcggg

SEQ ID NO: 5432666 - DNA, 25 bp, Homo sapien
ttgacatgttgagtaatactctttg

SEQ ID NO: 5432667 - DNA, 25 bp, Homo sapien
ctttgacatgttgagtaatactctt

SEQ ID NO: 5432668 - DNA, 25 bp, Homo sapien
tttgacatgttgagtaatactcttt

SEQ ID NO: 5432669 - DNA, 25 bp, Homo sapien
cctgaaatccacaatgcgtagatat

SEQ ID NO: 5432670 - DNA, 25 bp, Homo sapien
tgtttaagtaggtaattagccagtc

SEQ ID NO: 5432671 - DNA, 25 bp, Homo sapien
tgcccatagatgcaatactgcagca

SEQ ID NO: 5432672 - DNA, 25 bp, Homo sapien
cctcgagggtttttcacaatgtaca

SEQ ID NO: 5432673 - DNA, 25 bp, Homo sapien
cccaggagatggaggttcccgtgag

SEQ ID NO: 5432674 - DNA, 25 bp, Homo sapien
ccaagatcacatcattccactccag

SEQ ID NO: 5432675 - DNA, 25 bp, Homo sapien
gagccaagatcacatcattccactc

SEQ ID NO: 5432676 - DNA, 25 bp, Homo sapien
caggagatggaggttcccgtgagcc

SEQ ID NO: 5432677 - DNA, 25 bp, Homo sapien
cagctcagttatgctgaaatgcaaa

SEQ ID NO: 5432678 - DNA, 25 bp, Homo sapien
tacttgggcagctcagttatgctga

SEQ ID NO: 5432679 - DNA, 25 bp, Homo sapien
gctgaaatgcaaatggctgctgaca

SEQ ID NO: 5432680 - DNA, 25 bp, Homo sapien
atatgagtacttgggcagctcagtt

SEQ ID NO: 5432681 - DNA, 25 bp, Homo sapien
tatccccttgctcaaagcttttaat

SEQ ID NO: 5432682 - DNA, 25 bp, Homo sapien
ttcctccagtctctgtctgatactc

SEQ ID NO: 5432683 - DNA, 25 bp, Homo sapien
atactcaatgccttctacagcataa

SEQ ID NO: 5432684 - DNA, 25 bp, Homo sapien
agttatccccttgctcaaagctttt

SEQ ID NO: 5432685 - DNA, 25 bp, Homo sapien
ttgatagctttacagatggctcctg

SEQ ID NO: 5432686 - DNA, 25 bp, Homo sapien
cagtctgatgttgacataaaggcag

SEQ ID NO: 5432687 - DNA, 25 bp, Homo sapien
taaaggcagccaattttgatagctt

SEQ ID NO: 5432688 - DNA, 25 bp, Homo sapien
gacattcctacccagattctccatg

SEQ ID NO: 5432689 - DNA, 25 bp, Homo sapien
atcctttgtaatattgcctgttctg

SEQ ID NO: 5432690 - DNA, 25 bp, Homo sapien
aatattgcctgttctgaatcaagca

SEQ ID NO: 5432691 - DNA, 25 bp, Homo sapien
tatcctttgtaatattgcctgttct

SEQ ID NO: 5432692 - DNA, 25 bp, Homo sapien
tgtaatattgcctgttctgaatcaa

SEQ ID NO: 5432693 - DNA, 25 bp, Homo sapien
atttgctgggtagtacaagagttac

SEQ ID NO: 5432694 - DNA, 25 bp, Homo sapien
cacttatttgctgggtagtacaaga

SEQ ID NO: 5432695 - DNA, 25 bp, Homo sapien
gctgggtagtacaagagttacataa

SEQ ID NO: 5432696 - DNA, 25 bp, Homo sapien
tcacttatttgctgggtagtacaag

SEQ ID NO: 5432697 - DNA, 25 bp, Homo sapien
tccttatccagtcctccacacttcc

SEQ ID NO: 5432698 - DNA, 25 bp, Homo sapien
ttatccagtcctccacacttccctt

SEQ ID NO: 5432699 - DNA, 25 bp, Homo sapien
ctccttatccagtcctccacacttc

SEQ ID NO: 5432700 - DNA, 25 bp, Homo sapien
ctccacacttcccttttttcagaag

SEQ ID NO: 5432701 - DNA, 25 bp, Homo sapien
tgcgttgaggaggttgatctttaca

SEQ ID NO: 5432702 - DNA, 25 bp, Homo sapien
tacagctgaatctgtgcgttgagga

SEQ ID NO: 5432703 - DNA, 25 bp, Homo sapien
ttgatctttacaattccaagtctgc

SEQ ID NO: 5432704 - DNA, 25 bp, Homo sapien
ctacagctgaatctgtgcgttgagg

SEQ ID NO: 5432705 - DNA, 25 bp, Homo sapien
taggccgtgaggcaatttcacactc

SEQ ID NO: 5432706 - DNA, 25 bp, Homo sapien
atatcattaatagaaaaaaggttca

SEQ ID NO: 5432707 - DNA, 25 bp, Homo sapien
gttcctccatatcattaatagaaaa

SEQ ID NO: 5432708 - DNA, 25 bp, Homo sapien
aaaaggttcatacttaggccgtgag

SEQ ID NO: 5432709 - DNA, 25 bp, Homo sapien
ttttggtctatagcagcatagacaa

SEQ ID NO: 5432710 - DNA, 25 bp, Homo sapien
acattttggtctatagcagcataga

SEQ ID NO: 5432711 - DNA, 25 bp, Homo sapien
aaatggccagagtccttccttagat

SEQ ID NO: 5432712 - DNA, 25 bp, Homo sapien
acaaatggccagagtccttccttag

SEQ ID NO: 5432713 - DNA, 25 bp, Homo sapien
tcttgttggcgaaaagaggagtcaa

SEQ ID NO: 5432714 - DNA, 25 bp, Homo sapien
caagctcagggacagtatgaaggta

SEQ ID NO: 5432715 - DNA, 25 bp, Homo sapien
tgaacaacacgaacactgacaagct

SEQ ID NO: 5432716 - DNA, 25 bp, Homo sapien
tctgttcctggtcttgttggcgaaa

SEQ ID NO: 5432717 - DNA, 25 bp, Homo sapien
ggaataccattactgaccctgcaga

SEQ ID NO: 5432718 - DNA, 25 bp, Homo sapien
gagaggaggttggaataattcccaa

SEQ ID NO: 5432719 - DNA, 25 bp, Homo sapien
cagatggcttcgtgggctatttata

SEQ ID NO: 5432720 - DNA, 25 bp, Homo sapien
tatgtattgcttaaaataagggcac

SEQ ID NO: 5432721 - DNA, 25 bp, Homo sapien
ccgtcagtgactcacaggatgaagt

SEQ ID NO: 5432722 - DNA, 25 bp, Homo sapien
gacactctcccattatgcatgtgcc

SEQ ID NO: 5432723 - DNA, 25 bp, Homo sapien
ccattatgcatgtgcctgtatttac

SEQ ID NO: 5432724 - DNA, 25 bp, Homo sapien
ctgttacccgtcagtgactcacagg

SEQ ID NO: 5432725 - DNA, 25 bp, Homo sapien
tctattgacctcttcgtttatgcca

SEQ ID NO: 5432726 - DNA, 25 bp, Homo sapien
gacctcttcgtttatgccaatataa

SEQ ID NO: 5432727 - DNA, 25 bp, Homo sapien
ttatgccaatataatgcgcagtcat

SEQ ID NO: 5432728 - DNA, 25 bp, Homo sapien
ggcatcccttctattgacctcttcg

SEQ ID NO: 5432729 - DNA, 25 bp, Homo sapien
tgtgtctggagctctgtcatcctca

SEQ ID NO: 5432730 - DNA, 25 bp, Homo sapien
tcctgcagctattgtgtctggagct

SEQ ID NO: 5432731 - DNA, 25 bp, Homo sapien
cagctattgtgtctggagctctgtc

SEQ ID NO: 5432732 - DNA, 25 bp, Homo sapien
attgtgtctggagctctgtcatcct

SEQ ID NO: 5432733 - DNA, 25 bp, Homo sapien
ttgaaggcagacgccacgatcttcc

SEQ ID NO: 5432734 - DNA, 25 bp, Homo sapien
tggttcccagtgcattcctcaacca

SEQ ID NO: 5432735 - DNA, 25 bp, Homo sapien
cctggttcccagtgcattcctcaac

SEQ ID NO: 5432736 - DNA, 25 bp, Homo sapien
aaggcagacgccacgatcttcctgg

SEQ ID NO: 5432737 - DNA, 25 bp, Homo sapien
ctgagtcctttaagagacttcagaa

SEQ ID NO: 5432738 - DNA, 25 bp, Homo sapien
cagcaccatgaaagtgctacttaaa

SEQ ID NO: 5432739 - DNA, 25 bp, Homo sapien
tgaaagtgctacttaaagccatgtg

SEQ ID NO: 5432740 - DNA, 25 bp, Homo sapien
taaagccatgtgtctttcgatttgt

SEQ ID NO: 5432741 - DNA, 25 bp, Homo sapien
ctgggttgctggcaggtctatctat

SEQ ID NO: 5432742 - DNA, 25 bp, Homo sapien
tgtgcttaacatacacgcaaattag

SEQ ID NO: 5432743 - DNA, 25 bp, Homo sapien
gcaaattagaaacttatattctggg

SEQ ID NO: 5432744 - DNA, 25 bp, Homo sapien
ggcaggtctatctatagtcctgaag

SEQ ID NO: 5432745 - DNA, 25 bp, Homo sapien
ttaatgcaggctaacgtaactacct

SEQ ID NO: 5432746 - DNA, 25 bp, Homo sapien
gaaattcagaacagttaaggagtac

SEQ ID NO: 5432747 - DNA, 25 bp, Homo sapien
catggtgactggagagaaagtgcaa

SEQ ID NO: 5432748 - DNA, 25 bp, Homo sapien
tacaaacgaataaagggagatgagc

SEQ ID NO: 5432749 - DNA, 25 bp, Homo sapien
gaaggctccaatgttgcagcagcag

SEQ ID NO: 5432750 - DNA, 25 bp, Homo sapien
gagttaagacactttagcctcacag

SEQ ID NO: 5432751 - DNA, 25 bp, Homo sapien
tgagcattctggacctctatacaca

SEQ ID NO: 5432752 - DNA, 25 bp, Homo sapien
cattgctgagtggtggcaagtaaca

SEQ ID NO: 5432753 - DNA, 25 bp, Homo sapien
ttgtcagggtgggtggtcgggctgt

SEQ ID NO: 5432754 - DNA, 25 bp, Homo sapien
tcagggtgggtggtcgggctgtttc

SEQ ID NO: 5432755 - DNA, 25 bp, Homo sapien
cagggtgggtggtcgggctgtttct

SEQ ID NO: 5432756 - DNA, 25 bp, Homo sapien
tgtcagggtgggtggtcgggctgtt

SEQ ID NO: 5432757 - DNA, 25 bp, Homo sapien
tatgtagagaacactaaaagaatct

SEQ ID NO: 5432758 - DNA, 25 bp, Homo sapien
tgtttatgtagagaacactaaaaga

SEQ ID NO: 5432759 - DNA, 25 bp, Homo sapien
ttatgtagagaacactaaaagaatc

SEQ ID NO: 5432760 - DNA, 25 bp, Homo sapien
gtttatgtagagaacactaaaagaa

SEQ ID NO: 5432761 - DNA, 25 bp, Homo sapien
ttcaaagctctctgtggttatgtga

SEQ ID NO: 5432762 - DNA, 25 bp, Homo sapien
ctgctagattttaatagggctggtg

SEQ ID NO: 5432763 - DNA, 25 bp, Homo sapien
gctagattttaatagggctggtgtt

SEQ ID NO: 5432764 - DNA, 25 bp, Homo sapien
gctctctgtggttatgtgatcatgt

SEQ ID NO: 5432765 - DNA, 25 bp, Homo sapien
tatcttcccgttaaactcaatctac

SEQ ID NO: 5432766 - DNA, 25 bp, Homo sapien
atgccagaatttctactccagccat

SEQ ID NO: 5432767 - DNA, 25 bp, Homo sapien
tcacacttgtggagagaaattcaat

SEQ ID NO: 5432768 - DNA, 25 bp, Homo sapien
tcttggaaggtatttagaagtggaa

SEQ ID NO: 5432769 - DNA, 25 bp, Homo sapien
tgttagcttaacaactgatgcaggg

SEQ ID NO: 5432770 - DNA, 25 bp, Homo sapien
tagtgaggagaaagatgtgttagct

SEQ ID NO: 5432771 - DNA, 25 bp, Homo sapien
aggctgatgggcgtgcatctgatga

SEQ ID NO: 5432772 - DNA, 25 bp, Homo sapien
tgatgggcgtgcatctgatgagagg

SEQ ID NO: 5432773 - DNA, 25 bp, Homo sapien
catgtgcatacattagagaggaaag

SEQ ID NO: 5432774 - DNA, 25 bp, Homo sapien
atgtgcatacattagagaggaaagg

SEQ ID NO: 5432775 - DNA, 25 bp, Homo sapien
aaaggcaaacacagcctgatccttc

SEQ ID NO: 5432776 - DNA, 25 bp, Homo sapien
taactgccaaagctttgaggtttcc

SEQ ID NO: 5432777 - DNA, 25 bp, Homo sapien
ctgaatgtgtcaaaccattttttcc

SEQ ID NO: 5432778 - DNA, 25 bp, Homo sapien
tttgcctataactgccaaagctttg

SEQ ID NO: 5432779 - DNA, 25 bp, Homo sapien
cttttgcaacttaactcatggagga

SEQ ID NO: 5432780 - DNA, 25 bp, Homo sapien
tatgcagcctccctttcagatacag

SEQ ID NO: 5432781 - DNA, 25 bp, Homo sapien
gaatcaagggcttagtttgcagcat

SEQ ID NO: 5432782 - DNA, 25 bp, Homo sapien
aaagctgacagcgtagcatatgcag

SEQ ID NO: 5432783 - DNA, 25 bp, Homo sapien
ctataccgtgactggaatgactatt

SEQ ID NO: 5432784 - DNA, 25 bp, Homo sapien
actggaatgactattgagttgtctc

SEQ ID NO: 5432785 - DNA, 25 bp, Homo sapien
tctaagcggtattgagtatgcaccg

SEQ ID NO: 5432786 - DNA, 25 bp, Homo sapien
gagttgtctctctctaagcggtatt

SEQ ID NO: 5432787 - DNA, 25 bp, Homo sapien
tcagctgggccactaacaatcttct

SEQ ID NO: 5432788 - DNA, 25 bp, Homo sapien
gaattgctacaattagcgtccctgc

SEQ ID NO: 5432789 - DNA, 25 bp, Homo sapien
tccatgactgtgatgagattcagct

SEQ ID NO: 5432790 - DNA, 25 bp, Homo sapien
tcaggaatatgttctcgggatcaga

SEQ ID NO: 5432791 - DNA, 25 bp, Homo sapien
tacagtggtagaacacgtagtacac

SEQ ID NO: 5432792 - DNA, 25 bp, Homo sapien
gtgccatatgaggtcaagagtacag

SEQ ID NO: 5432793 - DNA, 25 bp, Homo sapien
tccagttcccgggtaaatgcttcca

SEQ ID NO: 5432794 - DNA, 25 bp, Homo sapien
ccatttcatttgaggacaggtgcca

SEQ ID NO: 5432795 - DNA, 25 bp, Homo sapien
cgtaagagtccaggatagtaatttc

SEQ ID NO: 5432796 - DNA, 25 bp, Homo sapien
ttccattggcttgtaacttcctgtc

SEQ ID NO: 5432797 - DNA, 25 bp, Homo sapien
ggatagtaatttccattggcttgta

SEQ ID NO: 5432798 - DNA, 25 bp, Homo sapien
atttgttcacgtaagagtccaggat

SEQ ID NO: 5432799 - DNA, 25 bp, Homo sapien
taatatgagctttgcccaaattcac

SEQ ID NO: 5432800 - DNA, 25 bp, Homo sapien
aaattcactaacatgaaccctgcag

SEQ ID NO: 5432801 - DNA, 25 bp, Homo sapien
cctgcagtatcaggaagtaccttga

SEQ ID NO: 5432802 - DNA, 25 bp, Homo sapien
caagggataatatgagctttgccca

SEQ ID NO: 5432803 - DNA, 25 bp, Homo sapien
tgttaatggacaaatagaaagcctc

SEQ ID NO: 5432804 - DNA, 25 bp, Homo sapien
taaaaaccccgctagaaactgcaga

SEQ ID NO: 5432805 - DNA, 25 bp, Homo sapien
ggatttcaaaatcaacaccgatgag

SEQ ID NO: 5432806 - DNA, 25 bp, Homo sapien
gcctcattagtcctgatggttctcg

SEQ ID NO: 5432807 - DNA, 25 bp, Homo sapien
gctatcaaggtattctgtaatatgg

SEQ ID NO: 5432808 - DNA, 25 bp, Homo sapien
ggatgcaaattggatgctatcaagg

SEQ ID NO: 5432809 - DNA, 25 bp, Homo sapien
aactggggaaacatgcataagtgcc

SEQ ID NO: 5432810 - DNA, 25 bp, Homo sapien
actgggttgaccctaaccaaggatg

SEQ ID NO: 5432811 - DNA, 25 bp, Homo sapien
caactgcttgtaaaggtgctcctct

SEQ ID NO: 5432812 - DNA, 25 bp, Homo sapien
tgtgctcaccagtaaaagataacct

SEQ ID NO: 5432813 - DNA, 25 bp, Homo sapien
gaaagattcattggcatgccacagg

SEQ ID NO: 5432814 - DNA, 25 bp, Homo sapien
caaccagtgcaagtgaccgacaaaa

SEQ ID NO: 5432815 - DNA, 25 bp, Homo sapien
aattttttattccaatgagctttag

SEQ ID NO: 5432816 - DNA, 25 bp, Homo sapien
tatgatcttatagggattttcagtg

SEQ ID NO: 5432817 - DNA, 25 bp, Homo sapien
attttttgttccctatgactggtag

SEQ ID NO: 5432818 - DNA, 25 bp, Homo sapien
gttccctatgactggtagcttttta

SEQ ID NO: 5432819 - DNA, 25 bp, Homo sapien
ggagtgaggagcctagtaaagattt

SEQ ID NO: 5432820 - DNA, 25 bp, Homo sapien
agtaaagattttgtgaggatgaggc

SEQ ID NO: 5432821 - DNA, 25 bp, Homo sapien
tttataagaagaaatacagcgtgcc

SEQ ID NO: 5432822 - DNA, 25 bp, Homo sapien
aggatgaggcattgagaagagttct

SEQ ID NO: 5432823 - DNA, 25 bp, Homo sapien
aatggtctgggcaggcttttattgg

SEQ ID NO: 5432824 - DNA, 25 bp, Homo sapien
gaactgttatttctatagttggaaa

SEQ ID NO: 5432825 - DNA, 25 bp, Homo sapien
tgtttgtgacttaatagtattacca

SEQ ID NO: 5432826 - DNA, 25 bp, Homo sapien
ttattggtagcattcccaaaatcca

SEQ ID NO: 5432827 - DNA, 25 bp, Homo sapien
cagtgataattggtgtcatgttgcc

SEQ ID NO: 5432828 - DNA, 25 bp, Homo sapien
taagccagtacatacatgatagaag

SEQ ID NO: 5432829 - DNA, 25 bp, Homo sapien
ctttgtgggtaatgttgtagataga

SEQ ID NO: 5432830 - DNA, 25 bp, Homo sapien
tctaatatggtcaaaggaatttcac

SEQ ID NO: 5432831 - DNA, 25 bp, Homo sapien
cagagatacatgaccaaagttgtat

SEQ ID NO: 5432832 - DNA, 25 bp, Homo sapien
ttgcagagatacatgaccaaagttg

SEQ ID NO: 5432833 - DNA, 25 bp, Homo sapien
tgcagagatacatgaccaaagttgt

SEQ ID NO: 5432834 - DNA, 25 bp, Homo sapien
agatacatgaccaaagttgtatgca

SEQ ID NO: 5432835 - DNA, 25 bp, Homo sapien
gggacctacatgttctggtctaaga

SEQ ID NO: 5432836 - DNA, 25 bp, Homo sapien
ggtctaagaagcatgcaagtattac

SEQ ID NO: 5432837 - DNA, 25 bp, Homo sapien
tgaacaagcattggaacgatgctct

SEQ ID NO: 5432838 - DNA, 25 bp, Homo sapien
ccagatacagtatgacagaggaaca

SEQ ID NO: 5432839 - DNA, 25 bp, Homo sapien
gattagagtcagctccacaactcag

SEQ ID NO: 5432840 - DNA, 25 bp, Homo sapien
caagaatagtaagtccatcccagct

SEQ ID NO: 5432841 - DNA, 25 bp, Homo sapien
catgcatgtaggtctcgatcacaag

SEQ ID NO: 5432842 - DNA, 25 bp, Homo sapien
tcccagcttctagagatgaggtagc

SEQ ID NO: 5432843 - DNA, 25 bp, Homo sapien
tatataccccactctttaagctacc

SEQ ID NO: 5432844 - DNA, 25 bp, Homo sapien
caatcttggaatgagaggtcacaaa

SEQ ID NO: 5432845 - DNA, 25 bp, Homo sapien
taagctacctgccaggaagaagaat

SEQ ID NO: 5432846 - DNA, 25 bp, Homo sapien
catgtgttgtggctctatatacccc

SEQ ID NO: 5432847 - DNA, 25 bp, Homo sapien
aagttcttgtgaatggcggtggtca

SEQ ID NO: 5432848 - DNA, 25 bp, Homo sapien
cattgtcgatgtgtcttggcttact

SEQ ID NO: 5432849 - DNA, 25 bp, Homo sapien
taagaccatatatacaatgctgatg

SEQ ID NO: 5432850 - DNA, 25 bp, Homo sapien
aatcagtttactttctgcaaaggtg

SEQ ID NO: 5432851 - DNA, 25 bp, Homo sapien
caaactggcccaatttcaacgccga

SEQ ID NO: 5432852 - DNA, 25 bp, Homo sapien
gaattcctggtctgtgccgccaaca

SEQ ID NO: 5432853 - DNA, 25 bp, Homo sapien
tccacaggagcaagatctatgatgg

SEQ ID NO: 5432854 - DNA, 25 bp, Homo sapien
tatgatgggcaagcgtgccacattc

SEQ ID NO: 5432855 - DNA, 25 bp, Homo sapien
gataaaaggcgcaaaaaagtcatct

SEQ ID NO: 5432856 - DNA, 25 bp, Homo sapien
ggtgattggtggtctccataagcga

SEQ ID NO: 5432857 - DNA, 25 bp, Homo sapien
gtgtcttgaagaacgatataccgga

SEQ ID NO: 5432858 - DNA, 25 bp, Homo sapien
ggttcttagcttgatcgtccatgta

SEQ ID NO: 5432859 - DNA, 25 bp, Homo sapien
tcaggagatttactggcccaccagg

SEQ ID NO: 5432860 - DNA, 25 bp, Homo sapien
tacgtggtacactggatgggtttgc

SEQ ID NO: 5432861 - DNA, 25 bp, Homo sapien
tatcaagaccataccaaacaggttt

SEQ ID NO: 5432862 - DNA, 25 bp, Homo sapien
gcatcttcaacagatccttggttag

SEQ ID NO: 5432863 - DNA, 25 bp, Homo sapien
gggctgcgcatggtttcaatctgac

SEQ ID NO: 5432864 - DNA, 25 bp, Homo sapien
agctttaggtcatcacacgtgcggg

SEQ ID NO: 5432865 - DNA, 25 bp, Homo sapien
tgacttcagggtagcatgaacccct

SEQ ID NO: 5432866 - DNA, 25 bp, Homo sapien
atagtgccccatgatatccccaaga

SEQ ID NO: 5432867 - DNA, 25 bp, Homo sapien
tctcatgtagagagcaagatctggg

SEQ ID NO: 5432868 - DNA, 25 bp, Homo sapien
gccacataagctgaaggtattccaa

SEQ ID NO: 5432869 - DNA, 25 bp, Homo sapien
tggcagagactacgaaatggatcct

SEQ ID NO: 5432870 - DNA, 25 bp, Homo sapien
tatatggctccagacaagttgcttt

SEQ ID NO: 5432871 - DNA, 25 bp, Homo sapien
tctttacctgaaggaccaactgggc

SEQ ID NO: 5432872 - DNA, 25 bp, Homo sapien
tggaggtccaattggcccaagtggc

SEQ ID NO: 5432873 - DNA, 25 bp, Homo sapien
tcgtacacctggaggtccaattggc

SEQ ID NO: 5432874 - DNA, 25 bp, Homo sapien
gcttctcctacactgcctcgtacac

SEQ ID NO: 5432875 - DNA, 25 bp, Homo sapien
catcatccatgcatggtaaaagaca

SEQ ID NO: 5432876 - DNA, 25 bp, Homo sapien
catctttaatggactaatcacctac

SEQ ID NO: 5432877 - DNA, 25 bp, Homo sapien
catatggagctgtaacagtgatttc

SEQ ID NO: 5432878 - DNA, 25 bp, Homo sapien
tgtgcttatgcctcagaatgccatc

SEQ ID NO: 5432879 - DNA, 25 bp, Homo sapien
tcttgggccaaatggtccagggatt

SEQ ID NO: 5432880 - DNA, 25 bp, Homo sapien
accagtaaagcctctgtggcccttc

SEQ ID NO: 5432881 - DNA, 25 bp, Homo sapien
agaccctgaagaccagtaaagcctc

SEQ ID NO: 5432882 - DNA, 25 bp, Homo sapien
aagaccctgaagaccagtaaagcct

SEQ ID NO: 5432883 - DNA, 25 bp, Homo sapien
ctttgtcaccacgaggtccttgggg

SEQ ID NO: 5432884 - DNA, 25 bp, Homo sapien
cctttgtcaccacgaggtccttggg

SEQ ID NO: 5432885 - DNA, 25 bp, Homo sapien
cagctcgaccaggtggtcctatagg

SEQ ID NO: 5432886 - DNA, 25 bp, Homo sapien
caggtggtcctataggaccccgaga

SEQ ID NO: 5432887 - DNA, 25 bp, Homo sapien
cacgtttcccagctcgaccaggtgg

SEQ ID NO: 5432888 - DNA, 25 bp, Homo sapien
gtttcccagctcgaccaggtggtcc

SEQ ID NO: 5432889 - DNA, 25 bp, Homo sapien
aggggcaccctgagagcctggcaga

SEQ ID NO: 5432890 - DNA, 25 bp, Homo sapien
tgagagcctggcagacctgcaggcc

SEQ ID NO: 5432891 - DNA, 25 bp, Homo sapien
tttgtcctgcatctcctggagcacc

SEQ ID NO: 5432892 - DNA, 25 bp, Homo sapien
gcaggcccagggtctccacgatcac

SEQ ID NO: 5432893 - DNA, 25 bp, Homo sapien
catcccgtcctggggtaccatcatt

SEQ ID NO: 5432894 - DNA, 25 bp, Homo sapien
accatcccgtcctggggtaccatca

SEQ ID NO: 5432895 - DNA, 25 bp, Homo sapien
ccatcccgtcctggggtaccatcat

SEQ ID NO: 5432896 - DNA, 25 bp, Homo sapien
ccctacaggaccattggagcctggg

SEQ ID NO: 5432897 - DNA, 25 bp, Homo sapien
tccaggttcccctacaggaccattg

SEQ ID NO: 5432898 - DNA, 25 bp, Homo sapien
cctgttgcaccagttggtcctactt

SEQ ID NO: 5432899 - DNA, 25 bp, Homo sapien
ttcccctacaggaccattggagcct

SEQ ID NO: 5432900 - DNA, 25 bp, Homo sapien
gcctggtaggccgggcatgcctctc

SEQ ID NO: 5432901 - DNA, 25 bp, Homo sapien
ctggtaggccgggcatgcctctctc

SEQ ID NO: 5432902 - DNA, 25 bp, Homo sapien
cgctgggcctggtaggccgggcatg

SEQ ID NO: 5432903 - DNA, 25 bp, Homo sapien
ctgggcctggtaggccgggcatgcc

SEQ ID NO: 5432904 - DNA, 25 bp, Homo sapien
gccaacaattcctctctgcccggtc

SEQ ID NO: 5432905 - DNA, 25 bp, Homo sapien
aacaattcctctctgcccggtcgtt

SEQ ID NO: 5432906 - DNA, 25 bp, Homo sapien
ctctctgcccggtcgttccagctgg

SEQ ID NO: 5432907 - DNA, 25 bp, Homo sapien
cctctctgcccggtcgttccagctg

SEQ ID NO: 5432908 - DNA, 25 bp, Homo sapien
tggtcctcgatctcccacacgccca

SEQ ID NO: 5432909 - DNA, 25 bp, Homo sapien
tcgatctcccacacgcccatgagag

SEQ ID NO: 5432910 - DNA, 25 bp, Homo sapien
acacgcccatgagagccagggtccc

SEQ ID NO: 5432911 - DNA, 25 bp, Homo sapien
ccagggtccccacgaagacctggag

SEQ ID NO: 5432912 - DNA, 25 bp, Homo sapien
ctggaggtccaactctgcccgcaga

SEQ ID NO: 5432913 - DNA, 25 bp, Homo sapien
actctgcccgcagaaccaggaaatc

SEQ ID NO: 5432914 - DNA, 25 bp, Homo sapien
ggaggtccaactctgcccgcagaac

SEQ ID NO: 5432915 - DNA, 25 bp, Homo sapien
caactctgcccgcagaaccaggaaa

SEQ ID NO: 5432916 - DNA, 25 bp, Homo sapien
tgcactatagtacagttgatacagg

SEQ ID NO: 5432917 - DNA, 25 bp, Homo sapien
aattatcttttacatgaccaggaag

SEQ ID NO: 5432918 - DNA, 25 bp, Homo sapien
gaccaggaagcactaggtaactaga

SEQ ID NO: 5432919 - DNA, 25 bp, Homo sapien
gaattagctgtgcatactttgcaga

SEQ ID NO: 5432920 - DNA, 25 bp, Homo sapien
tcctcgaccaccttttagtccagga

SEQ ID NO: 5432921 - DNA, 25 bp, Homo sapien
tgtacactccaaacatggggcactt

SEQ ID NO: 5432922 - DNA, 25 bp, Homo sapien
gcaaaagaggctgaatgtacactcc

SEQ ID NO: 5432923 - DNA, 25 bp, Homo sapien
aaaagaggctgaatgtacactccaa

SEQ ID NO: 5432924 - DNA, 25 bp, Homo sapien
cactccaaacatggggcacttgact

SEQ ID NO: 5432925 - DNA, 25 bp, Homo sapien
aggttcaccttttactccaggctgt

SEQ ID NO: 5432926 - DNA, 25 bp, Homo sapien
gatcctgctaaaccttgtggtccag

SEQ ID NO: 5432927 - DNA, 25 bp, Homo sapien
gggatcctgctaaaccttgtggtcc

SEQ ID NO: 5432928 - DNA, 25 bp, Homo sapien
ttactccaggctgtccgtcaggacc

SEQ ID NO: 5432929 - DNA, 25 bp, Homo sapien
ccaacagctccagttggcccatttt

SEQ ID NO: 5432930 - DNA, 25 bp, Homo sapien
ttggcccattttcacctcgagaacc

SEQ ID NO: 5432931 - DNA, 25 bp, Homo sapien
aaaccaacagctccagttggcccat

SEQ ID NO: 5432932 - DNA, 25 bp, Homo sapien
ctggggtccggcaaaaccaacagct

SEQ ID NO: 5432933 - DNA, 25 bp, Homo sapien
caggagggccaactaaacctcgagg

SEQ ID NO: 5432934 - DNA, 25 bp, Homo sapien
ccagtaggacctgccggacctggag

SEQ ID NO: 5432935 - DNA, 25 bp, Homo sapien
ttttctccagtaggacctgccggac

SEQ ID NO: 5432936 - DNA, 25 bp, Homo sapien
taggacctgccggacctggagggcc

SEQ ID NO: 5432937 - DNA, 25 bp, Homo sapien
tctccagtaggacctgccggacctg

SEQ ID NO: 5432938 - DNA, 25 bp, Homo sapien
catgcatctttgaacgcttgccctg

SEQ ID NO: 5432939 - DNA, 25 bp, Homo sapien
ggtctccactctacattgcccagaa

SEQ ID NO: 5432940 - DNA, 25 bp, Homo sapien
aacgcttgccctggatcacgtgatc

SEQ ID NO: 5432941 - DNA, 25 bp, Homo sapien
tctttgaacgcttgccctggatcac

SEQ ID NO: 5432942 - DNA, 25 bp, Homo sapien
cactatgcctgacttagttttcttc

SEQ ID NO: 5432943 - DNA, 25 bp, Homo sapien
attgcaagcgtctgtcaccaccaca

SEQ ID NO: 5432944 - DNA, 25 bp, Homo sapien
tgcaagcgtctgtcaccaccacacc

SEQ ID NO: 5432945 - DNA, 25 bp, Homo sapien
gggattgcaagcgtctgtcaccacc

SEQ ID NO: 5432946 - DNA, 25 bp, Homo sapien
ggttcagggaaactcatatgatact

SEQ ID NO: 5432947 - DNA, 25 bp, Homo sapien
gcaaaatgaataaaccgtggttgaa

SEQ ID NO: 5432948 - DNA, 25 bp, Homo sapien
tgtaatgttggttcctagcccagct

SEQ ID NO: 5432949 - DNA, 25 bp, Homo sapien
ctgactaccaaggaaacatgactga

SEQ ID NO: 5432950 - DNA, 25 bp, Homo sapien
cagcacctttttctcctatgccacc

SEQ ID NO: 5432951 - DNA, 25 bp, Homo sapien
ccatcatttccagctgtgccttcag

SEQ ID NO: 5432952 - DNA, 25 bp, Homo sapien
tgccttcagcacctttttctcctat

SEQ ID NO: 5432953 - DNA, 25 bp, Homo sapien
catcatttccagctgtgccttcagc

SEQ ID NO: 5432954 - DNA, 25 bp, Homo sapien
gcctgtatctccaggggtcccagat

SEQ ID NO: 5432955 - DNA, 25 bp, Homo sapien
tctcccggcataccttgaagacctg

SEQ ID NO: 5432956 - DNA, 25 bp, Homo sapien
cggcataccttgaagacctggtggg

SEQ ID NO: 5432957 - DNA, 25 bp, Homo sapien
tctttctcccggcataccttgaaga

SEQ ID NO: 5432958 - DNA, 25 bp, Homo sapien
gagtccagttatcccaggttctcct

SEQ ID NO: 5432959 - DNA, 25 bp, Homo sapien
agtccagttatcccaggttctcctc

SEQ ID NO: 5432960 - DNA, 25 bp, Homo sapien
aggtcctaacgggccaactgctccg

SEQ ID NO: 5432961 - DNA, 25 bp, Homo sapien
tcctaacgggccaactgctccggga

SEQ ID NO: 5432962 - DNA, 25 bp, Homo sapien
tctaggtcctaacgggccaactgct

SEQ ID NO: 5432963 - DNA, 25 bp, Homo sapien
cctaacgggccaactgctccgggat

SEQ ID NO: 5432964 - DNA, 25 bp, Homo sapien
gatagagcattagttttttagaggc

SEQ ID NO: 5432965 - DNA, 25 bp, Homo sapien
aaaactttccagttcatacacctag

SEQ ID NO: 5432966 - DNA, 25 bp, Homo sapien
tattaatgtgccattagaaggctgc

SEQ ID NO: 5432967 - DNA, 25 bp, Homo sapien
gagaacatgcaaagtactatttcac

SEQ ID NO: 5432968 - DNA, 25 bp, Homo sapien
agttatctaacatctgtatgcccca

SEQ ID NO: 5432969 - DNA, 25 bp, Homo sapien
ggccagtgctttgtagaggcaagca

SEQ ID NO: 5432970 - DNA, 25 bp, Homo sapien
tctatgagccaggaaaacgacagaa

SEQ ID NO: 5432971 - DNA, 25 bp, Homo sapien
gaggcaagcacacagagtgttcagc

SEQ ID NO: 5432972 - DNA, 25 bp, Homo sapien
ccaccttctccaggaggccctggag

SEQ ID NO: 5432973 - DNA, 25 bp, Homo sapien
gaggccctggaggaccaggaagccc

SEQ ID NO: 5432974 - DNA, 25 bp, Homo sapien
caggaggccctggaggaccaggaag

SEQ ID NO: 5432975 - DNA, 25 bp, Homo sapien
ttgatcacctggttttccaccttct

SEQ ID NO: 5432976 - DNA, 25 bp, Homo sapien
ggcctggaggtccttgttctcctct

SEQ ID NO: 5432977 - DNA, 25 bp, Homo sapien
tgtggggcctggaggtccttgttct

SEQ ID NO: 5432978 - DNA, 25 bp, Homo sapien
tgttctcctctttcaccagctagac

SEQ ID NO: 5432979 - DNA, 25 bp, Homo sapien
cttgttctcctctttcaccagctag

SEQ ID NO: 5432980 - DNA, 25 bp, Homo sapien
catcatcgaaaaaatgcaatgtgtg

SEQ ID NO: 5432981 - DNA, 25 bp, Homo sapien
taagtcttgaacaaacatcatcgaa

SEQ ID NO: 5432982 - DNA, 25 bp, Homo sapien
ccctgaaacttacccataagtcttg

SEQ ID NO: 5432983 - DNA, 25 bp, Homo sapien
gaaacttacccataagtcttgaaca

SEQ ID NO: 5432984 - DNA, 25 bp, Homo sapien
ccagaaggaccaacttcaccatctt

SEQ ID NO: 5432985 - DNA, 25 bp, Homo sapien
cagaaggaccaacttcaccatcttt

SEQ ID NO: 5432986 - DNA, 25 bp, Homo sapien
gaccagaaggaccaacttcaccatc

SEQ ID NO: 5432987 - DNA, 25 bp, Homo sapien
agaaggaccaacttcaccatctttt

SEQ ID NO: 5432988 - DNA, 25 bp, Homo sapien
cacagatatttgtgaggtgagtcta

SEQ ID NO: 5432989 - DNA, 25 bp, Homo sapien
tgtgaggtgagtctatgataattta

SEQ ID NO: 5432990 - DNA, 25 bp, Homo sapien
cacacacagatatttgtgaggtgag

SEQ ID NO: 5432991 - DNA, 25 bp, Homo sapien
ctagtatcacacacagatatttgtg

SEQ ID NO: 5432992 - DNA, 25 bp, Homo sapien
gcttctccaggtttcccagggtcac

SEQ ID NO: 5432993 - DNA, 25 bp, Homo sapien
caggaactccagcatttcctgcttc

SEQ ID NO: 5432994 - DNA, 25 bp, Homo sapien
cctctgcccaggaactccagcattt

SEQ ID NO: 5432995 - DNA, 25 bp, Homo sapien
tctgcccaggaactccagcatttcc

SEQ ID NO: 5432996 - DNA, 25 bp, Homo sapien
tgaaacttttgtataattccttcaa

SEQ ID NO: 5432997 - DNA, 25 bp, Homo sapien
agaataaatgaaacttttgtataat

SEQ ID NO: 5432998 - DNA, 25 bp, Homo sapien
atgaaacttttgtataattccttca

SEQ ID NO: 5432999 - DNA, 25 bp, Homo sapien
ctggaaggcccatgctcccgggctg

SEQ ID NO: 5433000 - DNA, 25 bp, Homo sapien
ctggaggacctggacggccatcttc

SEQ ID NO: 5433001 - DNA, 25 bp, Homo sapien
tctgattcctatggagcctggagga

SEQ ID NO: 5433002 - DNA, 25 bp, Homo sapien
tggacggccatcttcccctggcgca

SEQ ID NO: 5433003 - DNA, 25 bp, Homo sapien
tcaggaccttgaacaccaggatttc

SEQ ID NO: 5433004 - DNA, 25 bp, Homo sapien
caggttcccctggacgtcctggatc

SEQ ID NO: 5433005 - DNA, 25 bp, Homo sapien
ctttgggtcctgaagaacctacagg

SEQ ID NO: 5433006 - DNA, 25 bp, Homo sapien
tacaggaccccgttctccttgagca

SEQ ID NO: 5433007 - DNA, 25 bp, Homo sapien
ctggatccccctggcttcctttggg

SEQ ID NO: 5433008 - DNA, 25 bp, Homo sapien
caggtaaaccatcagagcctggaaa

SEQ ID NO: 5433009 - DNA, 25 bp, Homo sapien
agcctggaaaaccacgattgccagg

SEQ ID NO: 5433010 - DNA, 25 bp, Homo sapien
ctttggcccaggtaaaccatcagag

SEQ ID NO: 5433011 - DNA, 25 bp, Homo sapien
gaaaaccacgattgccaggagcacc

SEQ ID NO: 5433012 - DNA, 25 bp, Homo sapien
aaacaactatttactagtctccaca

SEQ ID NO: 5433013 - DNA, 25 bp, Homo sapien
catgaggactaggaccatagccttc

SEQ ID NO: 5433014 - DNA, 25 bp, Homo sapien
cacagatggctcaaattggcataga

SEQ ID NO: 5433015 - DNA, 25 bp, Homo sapien
tgtttattgtttacctctccactaa

SEQ ID NO: 5433016 - DNA, 25 bp, Homo sapien
acataattccctcacaactgtaaga

SEQ ID NO: 5433017 - DNA, 25 bp, Homo sapien
cataattccctcacaactgtaagaa

SEQ ID NO: 5433018 - DNA, 25 bp, Homo sapien
cttcttcaccgggtgggcctatcgg

SEQ ID NO: 5433019 - DNA, 25 bp, Homo sapien
gcctatcggaccctgaataccatgt

SEQ ID NO: 5433020 - DNA, 25 bp, Homo sapien
gggtgggcctatcggaccctgaata

SEQ ID NO: 5433021 - DNA, 25 bp, Homo sapien
tcggaccctgaataccatgtggccc

SEQ ID NO: 5433022 - DNA, 25 bp, Homo sapien
tctcctttgaaacctggaactcctg

SEQ ID NO: 5433023 - DNA, 25 bp, Homo sapien
gggccagcttctcctttgaaacctg

SEQ ID NO: 5433024 - DNA, 25 bp, Homo sapien
gcttctcctttgaaacctggaactc

SEQ ID NO: 5433025 - DNA, 25 bp, Homo sapien
cttttgggccagcttctcctttgaa

SEQ ID NO: 5433026 - DNA, 25 bp, Homo sapien
ttggcctcgaattccctgaggacca

SEQ ID NO: 5433027 - DNA, 25 bp, Homo sapien
gccaggaggaccagaggtacctgga

SEQ ID NO: 5433028 - DNA, 25 bp, Homo sapien
ttccctgaggaccagtgctaccctg

SEQ ID NO: 5433029 - DNA, 25 bp, Homo sapien
tcgaattccctgaggaccagtgcta

SEQ ID NO: 5433030 - DNA, 25 bp, Homo sapien
gagtaccatcagttcctattgcacc

SEQ ID NO: 5433031 - DNA, 25 bp, Homo sapien
aggagtaccatcagttcctattgca

SEQ ID NO: 5433032 - DNA, 25 bp, Homo sapien
gcaccaggagtaccatcagttccta

SEQ ID NO: 5433033 - DNA, 25 bp, Homo sapien
ccaggagtaccatcagttcctattg

SEQ ID NO: 5433034 - DNA, 25 bp, Homo sapien
ctcgcgcccctgtaggacctgcttc

SEQ ID NO: 5433035 - DNA, 25 bp, Homo sapien
agtttcacctctctgcccctgagga

SEQ ID NO: 5433036 - DNA, 25 bp, Homo sapien
aagacctggagagccaactggacct

SEQ ID NO: 5433037 - DNA, 25 bp, Homo sapien
ggcctcgcgcccctgtaggacctgc

SEQ ID NO: 5433038 - DNA, 25 bp, Homo sapien
gaagagcctggtatcccaagaggac

SEQ ID NO: 5433039 - DNA, 25 bp, Homo sapien
cagaagagcctggtatcccaagagg

SEQ ID NO: 5433040 - DNA, 25 bp, Homo sapien
agaagagcctggtatcccaagagga

SEQ ID NO: 5433041 - DNA, 25 bp, Homo sapien
aagagcctggtatcccaagaggacc

SEQ ID NO: 5433042 - DNA, 25 bp, Homo sapien
ggcataccatgtgcacctcgttgtc

SEQ ID NO: 5433043 - DNA, 25 bp, Homo sapien
gtatgaatcacccttggcatgccgc

SEQ ID NO: 5433044 - DNA, 25 bp, Homo sapien
gcatgccgcgatggcacaatggaaa

SEQ ID NO: 5433045 - DNA, 25 bp, Homo sapien
ggatttgtaagctggatttcccact

SEQ ID NO: 5433046 - DNA, 25 bp, Homo sapien
tgggctagtaatgcaatatctcggg

SEQ ID NO: 5433047 - DNA, 25 bp, Homo sapien
atgaattgaaatacacatctcagca

SEQ ID NO: 5433048 - DNA, 25 bp, Homo sapien
aaggcaagttcagtaaaccaaatct

SEQ ID NO: 5433049 - DNA, 25 bp, Homo sapien
aaatgaattgaaatacacatctcag

SEQ ID NO: 5433050 - DNA, 25 bp, Homo sapien
ggcaagttcagtaaaccaaatctga

SEQ ID NO: 5433051 - DNA, 25 bp, Homo sapien
tctctcctggcattcccctcggacc

SEQ ID NO: 5433052 - DNA, 25 bp, Homo sapien
ctctctcctggcattcccctcggac

SEQ ID NO: 5433053 - DNA, 25 bp, Homo sapien
ggcacccattggaccagtggggcca

SEQ ID NO: 5433054 - DNA, 25 bp, Homo sapien
atggcacccattggaccagtggggc

SEQ ID NO: 5433055 - DNA, 25 bp, Homo sapien
cagaggacccatggcacccattgga

SEQ ID NO: 5433056 - DNA, 25 bp, Homo sapien
aggacccatggcacccattggacca

SEQ ID NO: 5433057 - DNA, 25 bp, Homo sapien
ggtgctccaacttcacctttagggc

SEQ ID NO: 5433058 - DNA, 25 bp, Homo sapien
gtgctccaacttcacctttagggcc

SEQ ID NO: 5433059 - DNA, 25 bp, Homo sapien
aggtgctccaacttcacctttaggg

SEQ ID NO: 5433060 - DNA, 25 bp, Homo sapien
gacccttcagacctggaagaccagg

SEQ ID NO: 5433061 - DNA, 25 bp, Homo sapien
acccttcagacctggaagaccagga

SEQ ID NO: 5433062 - DNA, 25 bp, Homo sapien
tgcaaatcccacttcaccaggattt

SEQ ID NO: 5433063 - DNA, 25 bp, Homo sapien
gatttccatttctgccaggttcacc

SEQ ID NO: 5433064 - DNA, 25 bp, Homo sapien
cacttcaccaggatttccatttctg

SEQ ID NO: 5433065 - DNA, 25 bp, Homo sapien
cggagatcctgcaaatcccacttca

SEQ ID NO: 5433066 - DNA, 25 bp, Homo sapien
gattgggaaggcaaaagtgattaaa

SEQ ID NO: 5433067 - DNA, 25 bp, Homo sapien
tggaaaaaaatgtaggagattggga

SEQ ID NO: 5433068 - DNA, 25 bp, Homo sapien
agattgggaaggcaaaagtgattaa

SEQ ID NO: 5433069 - DNA, 25 bp, Homo sapien
aaatgtaggagattgggaaggcaaa

SEQ ID NO: 5433070 - DNA, 25 bp, Homo sapien
ctctggtccacgtgaaccaatcgga

SEQ ID NO: 5433071 - DNA, 25 bp, Homo sapien
ccctctggtccacgtgaaccaatcg

SEQ ID NO: 5433072 - DNA, 25 bp, Homo sapien
ggccctctggtccacgtgaaccaat

SEQ ID NO: 5433073 - DNA, 25 bp, Homo sapien
ctggtccacgtgaaccaatcggacc

SEQ ID NO: 5433074 - DNA, 25 bp, Homo sapien
ccagatcatgtgctcaacaagaagt

SEQ ID NO: 5433075 - DNA, 25 bp, Homo sapien
ttttatgttgcatccccagatcatg

SEQ ID NO: 5433076 - DNA, 25 bp, Homo sapien
cagttcatagaacaggactcccaaa

SEQ ID NO: 5433077 - DNA, 25 bp, Homo sapien
gacatcattataatggtggacccaa

SEQ ID NO: 5433078 - DNA, 25 bp, Homo sapien
caggaggtcctgtaggtcctgcacc

SEQ ID NO: 5433079 - DNA, 25 bp, Homo sapien
actctgtcaatatacagtgtaattg

SEQ ID NO: 5433080 - DNA, 25 bp, Homo sapien
ggctgctgaagtaattaatgtatgt

SEQ ID NO: 5433081 - DNA, 25 bp, Homo sapien
tggtacttactttattaggctgtta

SEQ ID NO: 5433082 - DNA, 25 bp, Homo sapien
aattgtttagacagttggctctgcc

SEQ ID NO: 5433083 - DNA, 25 bp, Homo sapien
gctgtccttgtaaaccctgtggtcc

SEQ ID NO: 5433084 - DNA, 25 bp, Homo sapien
tgctgtccttgtaaaccctgtggtc

SEQ ID NO: 5433085 - DNA, 25 bp, Homo sapien
actaaatgatgccatattactagta

SEQ ID NO: 5433086 - DNA, 25 bp, Homo sapien
gatgccatattactagtaactttaa

SEQ ID NO: 5433087 - DNA, 25 bp, Homo sapien
tttgaatggaacatatagtaagaaa

SEQ ID NO: 5433088 - DNA, 25 bp, Homo sapien
tattttgaatggaacatatagtaag

SEQ ID NO: 5433089 - DNA, 25 bp, Homo sapien
gatttttcatccaacccagccattt

SEQ ID NO: 5433090 - DNA, 25 bp, Homo sapien
aggcattagtcctacttgactccca

SEQ ID NO: 5433091 - DNA, 25 bp, Homo sapien
gcattagtcctacttgactcccaag

SEQ ID NO: 5433092 - DNA, 25 bp, Homo sapien
tccaacccagccatttgagctgaaa

SEQ ID NO: 5433093 - DNA, 25 bp, Homo sapien
tccatcaattccctgaggtccacga

SEQ ID NO: 5433094 - DNA, 25 bp, Homo sapien
tgaccaggaacacctggttctccat

SEQ ID NO: 5433095 - DNA, 25 bp, Homo sapien
ggtgggacggatgtccaggaggtcc

SEQ ID NO: 5433096 - DNA, 25 bp, Homo sapien
tggttctccatcaattccctgaggt

SEQ ID NO: 5433097 - DNA, 25 bp, Homo sapien
ccaaatatacacttagtagaaagct

SEQ ID NO: 5433098 - DNA, 25 bp, Homo sapien
ttagaacccactgccaaatatacac

SEQ ID NO: 5433099 - DNA, 25 bp, Homo sapien
cactgccaaatatacacttagtaga

SEQ ID NO: 5433100 - DNA, 25 bp, Homo sapien
agccagttaaaattagaacccactg

SEQ ID NO: 5433101 - DNA, 25 bp, Homo sapien
ggtcttccttttggccctcgctctc

SEQ ID NO: 5433102 - DNA, 25 bp, Homo sapien
tcttccttttggccctcgctctcct

SEQ ID NO: 5433103 - DNA, 25 bp, Homo sapien
gtcttccttttggccctcgctctcc

SEQ ID NO: 5433104 - DNA, 25 bp, Homo sapien
aggtcttccttttggccctcgctct

SEQ ID NO: 5433105 - DNA, 25 bp, Homo sapien
cctggacgaccacgtatgcctgtta

SEQ ID NO: 5433106 - DNA, 25 bp, Homo sapien
gtcctggacgaccacgtatgcctgt

SEQ ID NO: 5433107 - DNA, 25 bp, Homo sapien
ctggacgaccacgtatgcctgttac

SEQ ID NO: 5433108 - DNA, 25 bp, Homo sapien
tcctggacgaccacgtatgcctgtt

SEQ ID NO: 5433109 - DNA, 25 bp, Homo sapien
aacaggcactaatcctggttctccc

SEQ ID NO: 5433110 - DNA, 25 bp, Homo sapien
caggcactaatcctggttctccctt

SEQ ID NO: 5433111 - DNA, 25 bp, Homo sapien
acaggcactaatcctggttctccct

SEQ ID NO: 5433112 - DNA, 25 bp, Homo sapien
tttagccgatggtagtttccctgag

SEQ ID NO: 5433113 - DNA, 25 bp, Homo sapien
tcaattaactcttggttgccttgca

SEQ ID NO: 5433114 - DNA, 25 bp, Homo sapien
tatgtatatattgctccactgtctt

SEQ ID NO: 5433115 - DNA, 25 bp, Homo sapien
taaatgctcacataagttctttgac

SEQ ID NO: 5433116 - DNA, 25 bp, Homo sapien
gcgttacagggtcggcacagtccag

SEQ ID NO: 5433117 - DNA, 25 bp, Homo sapien
gaatggctccattgtcacagacaca

SEQ ID NO: 5433118 - DNA, 25 bp, Homo sapien
tgtttgtgaacagacaggacagcat

SEQ ID NO: 5433119 - DNA, 25 bp, Homo sapien
ccagcacatcctggcattctatctt

SEQ ID NO: 5433120 - DNA, 25 bp, Homo sapien
gagtgcaggctatttcttcaccata

SEQ ID NO: 5433121 - DNA, 25 bp, Homo sapien
tgtttaagtacatctggccattctg

SEQ ID NO: 5433122 - DNA, 25 bp, Homo sapien
tctggccattctgagtgcaggctat

SEQ ID NO: 5433123 - DNA, 25 bp, Homo sapien
gtccctgtttaagtacatctggcca

SEQ ID NO: 5433124 - DNA, 25 bp, Homo sapien
tcttaatcactagatggcagaccaa

SEQ ID NO: 5433125 - DNA, 25 bp, Homo sapien
gaatccattgtgaagtcattcccac

SEQ ID NO: 5433126 - DNA, 25 bp, Homo sapien
taaattatcacaattgcagcttgcc

SEQ ID NO: 5433127 - DNA, 25 bp, Homo sapien
cacaacaattgtggcactgatatat

SEQ ID NO: 5433128 - DNA, 25 bp, Homo sapien
ccttctgctctagggcactgtttat

SEQ ID NO: 5433129 - DNA, 25 bp, Homo sapien
tctttagaccatgcagaggagatgc

SEQ ID NO: 5433130 - DNA, 25 bp, Homo sapien
ggaaagacgaagagggacagcattc

SEQ ID NO: 5433131 - DNA, 25 bp, Homo sapien
gctctagggcactgtttatcattag

SEQ ID NO: 5433132 - DNA, 25 bp, Homo sapien
gaggaactcaacactgccaaattaa

SEQ ID NO: 5433133 - DNA, 25 bp, Homo sapien
tgctaatgtagatgaagaattctcc

SEQ ID NO: 5433134 - DNA, 25 bp, Homo sapien
gtgtcatttctgctagttactatac

SEQ ID NO: 5433135 - DNA, 25 bp, Homo sapien
gatacatctgcaagaaaccaaccca

SEQ ID NO: 5433136 - DNA, 25 bp, Homo sapien
ggatactcctcttatgccattcttt

SEQ ID NO: 5433137 - DNA, 25 bp, Homo sapien
aaccaacccatgctctcaagggtgg

SEQ ID NO: 5433138 - DNA, 25 bp, Homo sapien
caaaaaggtttcaaagaggatgcac

SEQ ID NO: 5433139 - DNA, 25 bp, Homo sapien
tagcggaatgacttctcaggtgtgc

SEQ ID NO: 5433140 - DNA, 25 bp, Homo sapien
cactagacgattaacttcttgggag

SEQ ID NO: 5433141 - DNA, 25 bp, Homo sapien
cacctctcaggcagtatgtgggagg

SEQ ID NO: 5433142 - DNA, 25 bp, Homo sapien
tctatggagagtcttatattccttt

SEQ ID NO: 5433143 - DNA, 25 bp, Homo sapien
gttctagatagttatataagcagtc

SEQ ID NO: 5433144 - DNA, 25 bp, Homo sapien
tattttgcatttagctaactgttca

SEQ ID NO: 5433145 - DNA, 25 bp, Homo sapien
gcatttagctaactgttcattacag

SEQ ID NO: 5433146 - DNA, 25 bp, Homo sapien
taaggttctacccaggtgtgacttg

SEQ ID NO: 5433147 - DNA, 25 bp, Homo sapien
ccatagaggcataaggttctaccca

SEQ ID NO: 5433148 - DNA, 25 bp, Homo sapien
gctctccataccctctctcctgtct

SEQ ID NO: 5433149 - DNA, 25 bp, Homo sapien
cacatcctgcagtctccatagaggc

SEQ ID NO: 5433150 - DNA, 25 bp, Homo sapien
cagataaaatcactgatatattacc

SEQ ID NO: 5433151 - DNA, 25 bp, Homo sapien
taccaaaatgatcatagtagaataa

SEQ ID NO: 5433152 - DNA, 25 bp, Homo sapien
gtaatatctaacatcttggttctca

SEQ ID NO: 5433153 - DNA, 25 bp, Homo sapien
tatgctaggcttaatctctctgaga

SEQ ID NO: 5433154 - DNA, 25 bp, Homo sapien
tgaattcggatcactcatacttgag

SEQ ID NO: 5433155 - DNA, 25 bp, Homo sapien
aaaaattgcccgagaatatggaaat

SEQ ID NO: 5433156 - DNA, 25 bp, Homo sapien
caattggcatttatgcatgggtgga

SEQ ID NO: 5433157 - DNA, 25 bp, Homo sapien
catacttgagtgaacgaattgtgga

SEQ ID NO: 5433158 - DNA, 25 bp, Homo sapien
tcttagtgaacgattggaattgtgc

SEQ ID NO: 5433159 - DNA, 25 bp, Homo sapien
gataagataagatgaaaagggaccc

SEQ ID NO: 5433160 - DNA, 25 bp, Homo sapien
tcatgtggttctaggctgcctttgg

SEQ ID NO: 5433161 - DNA, 25 bp, Homo sapien
aatgactgactgaatgaccgggtag

SEQ ID NO: 5433162 - DNA, 25 bp, Homo sapien
gatttagataggaataatcttgctt

SEQ ID NO: 5433163 - DNA, 25 bp, Homo sapien
ggcaagatttagataggaataatct

SEQ ID NO: 5433164 - DNA, 25 bp, Homo sapien
agaaggcaagatttagataggaata

SEQ ID NO: 5433165 - DNA, 25 bp, Homo sapien
aagatttagataggaataatcttgc

SEQ ID NO: 5433166 - DNA, 25 bp, Homo sapien
tcttcaaaccagagaaaactgtatg

SEQ ID NO: 5433167 - DNA, 25 bp, Homo sapien
gatctcagagaagaaaatccgatta

SEQ ID NO: 5433168 - DNA, 25 bp, Homo sapien
gatcagttgatccatgtccatacat

SEQ ID NO: 5433169 - DNA, 25 bp, Homo sapien
ccatgtaaggccaggtgatgatgca

SEQ ID NO: 5433170 - DNA, 25 bp, Homo sapien
catcctcgtcttcttcctgggcttt

SEQ ID NO: 5433171 - DNA, 25 bp, Homo sapien
cctgggcttttattgagacaaattg

SEQ ID NO: 5433172 - DNA, 25 bp, Homo sapien
cctcgtcttcttcctgggcttttat

SEQ ID NO: 5433173 - DNA, 25 bp, Homo sapien
tgggcttttattgagacaaattgcc

SEQ ID NO: 5433174 - DNA, 25 bp, Homo sapien
aggtcttgcttccgcccagtttgcc

SEQ ID NO: 5433175 - DNA, 25 bp, Homo sapien
gaggtcttgcttccgcccagtttgc

SEQ ID NO: 5433176 - DNA, 25 bp, Homo sapien
ggagaggtcttgcttccgcccagtt

SEQ ID NO: 5433177 - DNA, 25 bp, Homo sapien
agaggtcttgcttccgcccagtttg

SEQ ID NO: 5433178 - DNA, 25 bp, Homo sapien
aagtagattctgaggttattgtagc

SEQ ID NO: 5433179 - DNA, 25 bp, Homo sapien
tgtagcaccatgaagtcagctgtgg

SEQ ID NO: 5433180 - DNA, 25 bp, Homo sapien
tattagacatgtgggttctcctgag

SEQ ID NO: 5433181 - DNA, 25 bp, Homo sapien
tagattctgaggttattgtagcacc

SEQ ID NO: 5433182 - DNA, 25 bp, Homo sapien
ttcagcttgttcaggctcataacca

SEQ ID NO: 5433183 - DNA, 25 bp, Homo sapien
tccagcacagtctgcgaaaactttt

SEQ ID NO: 5433184 - DNA, 25 bp, Homo sapien
gaaaacttttttcaagcgatgcagc

SEQ ID NO: 5433185 - DNA, 25 bp, Homo sapien
gctcataaccatccagtgtctgcca

SEQ ID NO: 5433186 - DNA, 25 bp, Homo sapien
atcttccctttctccgaacttctgc

SEQ ID NO: 5433187 - DNA, 25 bp, Homo sapien
tatgattccaaggtgtcaatcccgg

SEQ ID NO: 5433188 - DNA, 25 bp, Homo sapien
tgggtcattgtttgcttgatagcta

SEQ ID NO: 5433189 - DNA, 25 bp, Homo sapien
tgaccgtgagacaagtggcagtgaa

SEQ ID NO: 5433190 - DNA, 25 bp, Homo sapien
ttatcatattgaaaccttcctgaga

SEQ ID NO: 5433191 - DNA, 25 bp, Homo sapien
gtgtcattaagaacctgaagtgtga

SEQ ID NO: 5433192 - DNA, 25 bp, Homo sapien
gtcattaagaacctgaagtgtgaca

SEQ ID NO: 5433193 - DNA, 25 bp, Homo sapien
tgtcattaagaacctgaagtgtgac

SEQ ID NO: 5433194 - DNA, 25 bp, Homo sapien
tcattaagaacctgaagtgtgacat

SEQ ID NO: 5433195 - DNA, 25 bp, Homo sapien
gtttctaaaactgctgaattagaca

SEQ ID NO: 5433196 - DNA, 25 bp, Homo sapien
cagatgtggagtctgtgcaaatagg

SEQ ID NO: 5433197 - DNA, 25 bp, Homo sapien
gcaaataggaacacagctgtatgca

SEQ ID NO: 5433198 - DNA, 25 bp, Homo sapien
cagctgtatgcagaatactttagtg

SEQ ID NO: 5433199 - DNA, 25 bp, Homo sapien
tagttgtgatcaggatggaacacac

SEQ ID NO: 5433200 - DNA, 25 bp, Homo sapien
gctggatgtgtacgtcttgatctgg

SEQ ID NO: 5433201 - DNA, 25 bp, Homo sapien
ggtatagtgacaaggctatttgcct

SEQ ID NO: 5433202 - DNA, 25 bp, Homo sapien
tacaaaagtaaggagagtccctgga

SEQ ID NO: 5433203 - DNA, 25 bp, Homo sapien
agtggctcgatgttgactctcagca

SEQ ID NO: 5433204 - DNA, 25 bp, Homo sapien
ttgtggtacgagagatagcagcaac

SEQ ID NO: 5433205 - DNA, 25 bp, Homo sapien
ttgggtatagcacagatgagtggca

SEQ ID NO: 5433206 - DNA, 25 bp, Homo sapien
cctaataaggctgctattgggtata

SEQ ID NO: 5433207 - DNA, 25 bp, Homo sapien
gcacaagagattagaacaagtgggt

SEQ ID NO: 5433208 - DNA, 25 bp, Homo sapien
agtgggtgggatcaaactaaattgc

SEQ ID NO: 5433209 - DNA, 25 bp, Homo sapien
tgtctgtctacattgatgcctgggt

SEQ ID NO: 5433210 - DNA, 25 bp, Homo sapien
caatagagcttttgtgcctcatgat

SEQ ID NO: 5433211 - DNA, 25 bp, Homo sapien
tatctcagtggatttgtcagaggcc

SEQ ID NO: 5433212 - DNA, 25 bp, Homo sapien
tgtgtcaatcaggattaataatgcc

SEQ ID NO: 5433213 - DNA, 25 bp, Homo sapien
ccaggtgctataacaaacaatatct

SEQ ID NO: 5433214 - DNA, 25 bp, Homo sapien
gacaatagagtcctaccactgcaca

SEQ ID NO: 5433215 - DNA, 25 bp, Homo sapien
ctgctccccaaagggtaccctgctt

SEQ ID NO: 5433216 - DNA, 25 bp, Homo sapien
ctcctgctccccaaagggtaccctg

SEQ ID NO: 5433217 - DNA, 25 bp, Homo sapien
tccccaaagggtaccctgcttctgc

SEQ ID NO: 5433218 - DNA, 25 bp, Homo sapien
caaagggtaccctgcttctgctggc

SEQ ID NO: 5433219 - DNA, 25 bp, Homo sapien
actatctggcaggtggtggtgtttt

SEQ ID NO: 5433220 - DNA, 25 bp, Homo sapien
cacttggccatccactatctggcag

SEQ ID NO: 5433221 - DNA, 25 bp, Homo sapien
cttggccatccactatctggcaggt

SEQ ID NO: 5433222 - DNA, 25 bp, Homo sapien
atctggcaggtggtggtgttttgga

SEQ ID NO: 5433223 - DNA, 25 bp, Homo sapien
caggcggcggtaggtggtgatctca

SEQ ID NO: 5433224 - DNA, 25 bp, Homo sapien
cagcaggcggcggtaggtggtgatc

SEQ ID NO: 5433225 - DNA, 25 bp, Homo sapien
cttccagcaggcggcggtaggtggt

SEQ ID NO: 5433226 - DNA, 25 bp, Homo sapien
ggcggcggtaggtggtgatctcagc

SEQ ID NO: 5433227 - DNA, 25 bp, Homo sapien
agggcctcctattcctgggcttggt

SEQ ID NO: 5433228 - DNA, 25 bp, Homo sapien
agcagggcctcctattcctgggctt

SEQ ID NO: 5433229 - DNA, 25 bp, Homo sapien
ggcctcctattcctgggcttggtgc

SEQ ID NO: 5433230 - DNA, 25 bp, Homo sapien
atctgctgggcgtagtgggcctcca

SEQ ID NO: 5433231 - DNA, 25 bp, Homo sapien
atgtctcagctccatgagcatcatc

SEQ ID NO: 5433232 - DNA, 25 bp, Homo sapien
gtatgtctcagctccatgagcatca

SEQ ID NO: 5433233 - DNA, 25 bp, Homo sapien
actgtatgtctcagctccatgagca

SEQ ID NO: 5433234 - DNA, 25 bp, Homo sapien
tgtatgtctcagctccatgagcatc

SEQ ID NO: 5433235 - DNA, 25 bp, Homo sapien
accactgtggtctctcctcaatctg

SEQ ID NO: 5433236 - DNA, 25 bp, Homo sapien
ctgtggtctctcctcaatctgctga

SEQ ID NO: 5433237 - DNA, 25 bp, Homo sapien
ctgcatggtgaccactgtggtctct

SEQ ID NO: 5433238 - DNA, 25 bp, Homo sapien
ggtgaccactgtggtctctcctcaa

SEQ ID NO: 5433239 - DNA, 25 bp, Homo sapien
gccagctcatcacattggacctgga

SEQ ID NO: 5433240 - DNA, 25 bp, Homo sapien
cacattggacctggatgtctgaaat

SEQ ID NO: 5433241 - DNA, 25 bp, Homo sapien
ggacctggatgtctgaaatgatcct

SEQ ID NO: 5433242 - DNA, 25 bp, Homo sapien
ttccaagccagctcatcacattgga

SEQ ID NO: 5433243 - DNA, 25 bp, Homo sapien
tcttctttataaagagcagctctgc

SEQ ID NO: 5433244 - DNA, 25 bp, Homo sapien
cttctttataaagagcagctctgcc

SEQ ID NO: 5433245 - DNA, 25 bp, Homo sapien
ttctttataaagagcagctctgcct

SEQ ID NO: 5433246 - DNA, 25 bp, Homo sapien
gcagccgagtgacattggtcatcag

SEQ ID NO: 5433247 - DNA, 25 bp, Homo sapien
ccgagtgacattggtcatcagtgac

SEQ ID NO: 5433248 - DNA, 25 bp, Homo sapien
ctgcagccgagtgacattggtcatc

SEQ ID NO: 5433249 - DNA, 25 bp, Homo sapien
cagccgagtgacattggtcatcagt

SEQ ID NO: 5433250 - DNA, 25 bp, Homo sapien
tgtggagcccatggatgtcactctc

SEQ ID NO: 5433251 - DNA, 25 bp, Homo sapien
tggagcccatggatgtcactctcca

SEQ ID NO: 5433252 - DNA, 25 bp, Homo sapien
cttgtggagcccatggatgtcactc

SEQ ID NO: 5433253 - DNA, 25 bp, Homo sapien
gatgtcactctccacagactggcac

SEQ ID NO: 5433254 - DNA, 25 bp, Homo sapien
cattgtcgatctgcagaatgatgct

SEQ ID NO: 5433255 - DNA, 25 bp, Homo sapien
tgtcgatctgcagaatgatgctggc

SEQ ID NO: 5433256 - DNA, 25 bp, Homo sapien
cgatctgcagaatgatgctggcatt

SEQ ID NO: 5433257 - DNA, 25 bp, Homo sapien
atctgcagaatgatgctggcattgt

SEQ ID NO: 5433258 - DNA, 25 bp, Homo sapien
cccagtgcctgcacagacactggct

SEQ ID NO: 5433259 - DNA, 25 bp, Homo sapien
tggccattcccatggccaggccccc

SEQ ID NO: 5433260 - DNA, 25 bp, Homo sapien
agacccctggccattcccatggcca

SEQ ID NO: 5433261 - DNA, 25 bp, Homo sapien
tgcacagacactggctgcactgctg

SEQ ID NO: 5433262 - DNA, 25 bp, Homo sapien
tggacagagcccagagaccagtagt

SEQ ID NO: 5433263 - DNA, 25 bp, Homo sapien
gagcccagagaccagtagttggtga

SEQ ID NO: 5433264 - DNA, 25 bp, Homo sapien
ccagagaccagtagttggtgaaggt

SEQ ID NO: 5433265 - DNA, 25 bp, Homo sapien
ggacagagcccagagaccagtagtt

SEQ ID NO: 5433266 - DNA, 25 bp, Homo sapien
caaactgcattgatctttcaactca

SEQ ID NO: 5433267 - DNA, 25 bp, Homo sapien
tgaccctgtagaacacctgtgtctg

SEQ ID NO: 5433268 - DNA, 25 bp, Homo sapien
tgcaaacactgatatgagtggtccc

SEQ ID NO: 5433269 - DNA, 25 bp, Homo sapien
tctgagaacagagttggcatgtact

SEQ ID NO: 5433270 - DNA, 25 bp, Homo sapien
gctgacttatcctcaaggattccat

SEQ ID NO: 5433271 - DNA, 25 bp, Homo sapien
ctgtagtgtcaacctatataatgct

SEQ ID NO: 5433272 - DNA, 25 bp, Homo sapien
tataatgctgacttatcctcaagga

SEQ ID NO: 5433273 - DNA, 25 bp, Homo sapien
caacctatataatgctgacttatcc

SEQ ID NO: 5433274 - DNA, 25 bp, Homo sapien
aatgaaaattgatagaggtcgcccc

SEQ ID NO: 5433275 - DNA, 25 bp, Homo sapien
gggccatcactgattgcaaggcaga

SEQ ID NO: 5433276 - DNA, 25 bp, Homo sapien
caggataactgaaagcccggaggtt

SEQ ID NO: 5433277 - DNA, 25 bp, Homo sapien
cagcctaccaaaggatggagacagg

SEQ ID NO: 5433278 - DNA, 25 bp, Homo sapien
atcaaaaacttgatgatccaagatc

SEQ ID NO: 5433279 - DNA, 25 bp, Homo sapien
aaaaacttgatgatccaagatcatg

SEQ ID NO: 5433280 - DNA, 25 bp, Homo sapien
tattatgcaactcttctgctctaat

SEQ ID NO: 5433281 - DNA, 25 bp, Homo sapien
gcaatattatgcaactcttctgctc

SEQ ID NO: 5433282 - DNA, 25 bp, Homo sapien
acagatcctgccaatatgagattag

SEQ ID NO: 5433283 - DNA, 25 bp, Homo sapien
ccatacctcctttgattctgttgtg

SEQ ID NO: 5433284 - DNA, 25 bp, Homo sapien
ggctattccctcaaacttgctatct

SEQ ID NO: 5433285 - DNA, 25 bp, Homo sapien
caatcttccatttctcgttgactct

SEQ ID NO: 5433286 - DNA, 25 bp, Homo sapien
ggttcacacccatacctcctttgat

SEQ ID NO: 5433287 - DNA, 25 bp, Homo sapien
aaaaatcctggattagttatttcat

SEQ ID NO: 5433288 - DNA, 25 bp, Homo sapien
aggtaacaagttctccaacactctt

SEQ ID NO: 5433289 - DNA, 25 bp, Homo sapien
taagttcatcagcatagtacattaa

SEQ ID NO: 5433290 - DNA, 25 bp, Homo sapien
taatagaaaggtaacaagttctcca

SEQ ID NO: 5433291 - DNA, 25 bp, Homo sapien
tcctgtttgtcatctgtgctattag

SEQ ID NO: 5433292 - DNA, 25 bp, Homo sapien
tgtgctattagaagattttctaagg

SEQ ID NO: 5433293 - DNA, 25 bp, Homo sapien
taaggtgaacacagaacatgggaaa

SEQ ID NO: 5433294 - DNA, 25 bp, Homo sapien
tgcaagttaagattcctgccaaacc

SEQ ID NO: 5433295 - DNA, 25 bp, Homo sapien
taagtcccaattaatcttgcagttg

SEQ ID NO: 5433296 - DNA, 25 bp, Homo sapien
ccaattaatcttgcagttgttagca

SEQ ID NO: 5433297 - DNA, 25 bp, Homo sapien
cttgcagttgttagcaagcataagc

SEQ ID NO: 5433298 - DNA, 25 bp, Homo sapien
ttggctaagtaagtcccaattaatc

SEQ ID NO: 5433299 - DNA, 25 bp, Homo sapien
ctttcaacatctgctgaccctctgc

SEQ ID NO: 5433300 - DNA, 25 bp, Homo sapien
cttgattatacctctttcaacatct

SEQ ID NO: 5433301 - DNA, 25 bp, Homo sapien
catgcactaagaaagtcaacacagg

SEQ ID NO: 5433302 - DNA, 25 bp, Homo sapien
tcattccaaggtgtgaaggcccgtc

SEQ ID NO: 5433303 - DNA, 25 bp, Homo sapien
tggtcatgggtcactttcagccggg

SEQ ID NO: 5433304 - DNA, 25 bp, Homo sapien
tcagccgggccaagagaatgtttcc

SEQ ID NO: 5433305 - DNA, 25 bp, Homo sapien
taaaaccctggctaatatcagaata

SEQ ID NO: 5433306 - DNA, 25 bp, Homo sapien
aaattaaaaccctggctaatatcag

SEQ ID NO: 5433307 - DNA, 25 bp, Homo sapien
aaaccctggctaatatcagaataag

SEQ ID NO: 5433308 - DNA, 25 bp, Homo sapien
aattaaaaccctggctaatatcaga

SEQ ID NO: 5433309 - DNA, 25 bp, Homo sapien
taatttatcttctaattttaccagc

SEQ ID NO: 5433310 - DNA, 25 bp, Homo sapien
cataatttatcttctaattttacca

SEQ ID NO: 5433311 - DNA, 25 bp, Homo sapien
tatcttctaattttaccagcagcat

SEQ ID NO: 5433312 - DNA, 25 bp, Homo sapien
atttatcttctaattttaccagcag

SEQ ID NO: 5433313 - DNA, 25 bp, Homo sapien
ccatcacaggtcaagaggccaagga

SEQ ID NO: 5433314 - DNA, 25 bp, Homo sapien
cttagaacagagacaagtactcaat

SEQ ID NO: 5433315 - DNA, 25 bp, Homo sapien
tcagagatcttagagacagccctta

SEQ ID NO: 5433316 - DNA, 25 bp, Homo sapien
taatcctgctccacagaaatggtat

SEQ ID NO: 5433317 - DNA, 25 bp, Homo sapien
taggataatagaagagttttccagg

SEQ ID NO: 5433318 - DNA, 25 bp, Homo sapien
ggtacagtattatctatctttagag

SEQ ID NO: 5433319 - DNA, 25 bp, Homo sapien
caagtttgtcaaattaggataatag

SEQ ID NO: 5433320 - DNA, 25 bp, Homo sapien
cacgtataggtctggaggaatatca

SEQ ID NO: 5433321 - DNA, 25 bp, Homo sapien
tttgcagatccaccaaaagtgacaa

SEQ ID NO: 5433322 - DNA, 25 bp, Homo sapien
cagatccaccaaaagtgacaatctt

SEQ ID NO: 5433323 - DNA, 25 bp, Homo sapien
actttttttgcagatccaccaaaag

SEQ ID NO: 5433324 - DNA, 25 bp, Homo sapien
tttttgcagatccaccaaaagtgac

SEQ ID NO: 5433325 - DNA, 25 bp, Homo sapien
aatgcaccggcatactagctttgta

SEQ ID NO: 5433326 - DNA, 25 bp, Homo sapien
gacctctcagcacaaaaatgcaccg

SEQ ID NO: 5433327 - DNA, 25 bp, Homo sapien
tatgtgagctatgaacccttctaag

SEQ ID NO: 5433328 - DNA, 25 bp, Homo sapien
gaccactgttagagtagctgggaaa

SEQ ID NO: 5433329 - DNA, 25 bp, Homo sapien
gtgggcaaaaagtcagaaatataca

SEQ ID NO: 5433330 - DNA, 25 bp, Homo sapien
cattattgtagtgaattttgcttgt

SEQ ID NO: 5433331 - DNA, 25 bp, Homo sapien
cttgtgggcaaaaagtcagaaatat

SEQ ID NO: 5433332 - DNA, 25 bp, Homo sapien
tgcttgtgggcaaaaagtcagaaat

SEQ ID NO: 5433333 - DNA, 25 bp, Homo sapien
cagaggaccttacatcagccattta

SEQ ID NO: 5433334 - DNA, 25 bp, Homo sapien
tccaagatgacggtgccagatgcat

SEQ ID NO: 5433335 - DNA, 25 bp, Homo sapien
acagtagtttttgcttaggctgaca

SEQ ID NO: 5433336 - DNA, 25 bp, Homo sapien
tctgtctttggcttgcaggatagcc

SEQ ID NO: 5433337 - DNA, 25 bp, Homo sapien
agtgactttagaatgcctgaatcca

SEQ ID NO: 5433338 - DNA, 25 bp, Homo sapien
cagtgactttagaatgcctgaatcc

SEQ ID NO: 5433339 - DNA, 25 bp, Homo sapien
gtgactttagaatgcctgaatccat

SEQ ID NO: 5433340 - DNA, 25 bp, Homo sapien
taaatttcatgaaacctggaaacac

SEQ ID NO: 5433341 - DNA, 25 bp, Homo sapien
gacacattggtttctatcattctaa

SEQ ID NO: 5433342 - DNA, 25 bp, Homo sapien
ttctaatgaacaaaatgactgagcc

SEQ ID NO: 5433343 - DNA, 25 bp, Homo sapien
tgtgaaaacatattggtcaatggac

SEQ ID NO: 5433344 - DNA, 25 bp, Homo sapien
agatatacatagtcacagcagaaca

SEQ ID NO: 5433345 - DNA, 25 bp, Homo sapien
tccagcaaagatatacatagtcaca

SEQ ID NO: 5433346 - DNA, 25 bp, Homo sapien
atgcccagatggtttggtccttcca

SEQ ID NO: 5433347 - DNA, 25 bp, Homo sapien
tggagctcacccgcacaaatcacaa

SEQ ID NO: 5433348 - DNA, 25 bp, Homo sapien
aaatgtaagtaggatggcaagctgc

SEQ ID NO: 5433349 - DNA, 25 bp, Homo sapien
gctcttaggctgtatggtagtagga

SEQ ID NO: 5433350 - DNA, 25 bp, Homo sapien
gaaagtaacaaatgctctgagaccc

SEQ ID NO: 5433351 - DNA, 25 bp, Homo sapien
aaatttggctgggtcttgtaacacg

SEQ ID NO: 5433352 - DNA, 25 bp, Homo sapien
tagtgtcacagaacttgtttaagat

SEQ ID NO: 5433353 - DNA, 25 bp, Homo sapien
cttttaacaagtttagtgtcacaga

SEQ ID NO: 5433354 - DNA, 25 bp, Homo sapien
tgcattctgtagactattttgcgta

SEQ ID NO: 5433355 - DNA, 25 bp, Homo sapien
actattttgcgtattggccactggg

SEQ ID NO: 5433356 - DNA, 25 bp, Homo sapien
gaaatcatcacaaaagcactgagag

SEQ ID NO: 5433357 - DNA, 25 bp, Homo sapien
aactcttgtcttaacactgttgaga

SEQ ID NO: 5433358 - DNA, 25 bp, Homo sapien
gaaattcagcaatgatgatgcaaga

SEQ ID NO: 5433359 - DNA, 25 bp, Homo sapien
tgttgagacaaagtacacacagaga

SEQ ID NO: 5433360 - DNA, 25 bp, Homo sapien
tagctacagctgttttgaatcacag

SEQ ID NO: 5433361 - DNA, 25 bp, Homo sapien
atcacaggcgaggttttaaaaatgt

SEQ ID NO: 5433362 - DNA, 25 bp, Homo sapien
aaactgagctcagaatacctaaaga

SEQ ID NO: 5433363 - DNA, 25 bp, Homo sapien
taaaactgagctcagaatacctaaa

SEQ ID NO: 5433364 - DNA, 25 bp, Homo sapien
aaaatgctccatcgtcccagcagct

SEQ ID NO: 5433365 - DNA, 25 bp, Homo sapien
aatagactcaagaggctgattccat

SEQ ID NO: 5433366 - DNA, 25 bp, Homo sapien
cccagcagctgtgtatgattaagaa

SEQ ID NO: 5433367 - DNA, 25 bp, Homo sapien
tggcaaaagataagactctttctgc

SEQ ID NO: 5433368 - DNA, 25 bp, Homo sapien
cagcggctgatagtgatgaaaggca

SEQ ID NO: 5433369 - DNA, 25 bp, Homo sapien
tggtctcatgtagaacagcggctga

SEQ ID NO: 5433370 - DNA, 25 bp, Homo sapien
tctaaacactggctaaaagtcatac

SEQ ID NO: 5433371 - DNA, 25 bp, Homo sapien
tacaatcaccatcactaatattctg

SEQ ID NO: 5433372 - DNA, 25 bp, Homo sapien
tatatttgtgagtctgtcaaatttt

SEQ ID NO: 5433373 - DNA, 25 bp, Homo sapien
gagtctgtcaaattttttgatataa

SEQ ID NO: 5433374 - DNA, 25 bp, Homo sapien
tttttgatataatgaactgaattat

SEQ ID NO: 5433375 - DNA, 25 bp, Homo sapien
tttgtgagtctgtcaaattttttga

SEQ ID NO: 5433376 - DNA, 25 bp, Homo sapien
ctgaaaaatgcacccattcattccc

SEQ ID NO: 5433377 - DNA, 25 bp, Homo sapien
aaatgaagttacagagcaccatgag

SEQ ID NO: 5433378 - DNA, 25 bp, Homo sapien
aatttacatacaaccctcttgagga

SEQ ID NO: 5433379 - DNA, 25 bp, Homo sapien
gcaccatgaggaataaggaatctct

SEQ ID NO: 5433380 - DNA, 25 bp, Homo sapien
aaataacagctcttcagtcttcgca

SEQ ID NO: 5433381 - DNA, 25 bp, Homo sapien
tttaagtagtttgaagctatgttgt

SEQ ID NO: 5433382 - DNA, 25 bp, Homo sapien
actagaaagcgacgcctccggtggg

SEQ ID NO: 5433383 - DNA, 25 bp, Homo sapien
gccgacaccacagacactagaaagc

SEQ ID NO: 5433384 - DNA, 25 bp, Homo sapien
gacgactggaggtcacgtggtacac

SEQ ID NO: 5433385 - DNA, 25 bp, Homo sapien
acgctgcgaccgagaaaaccaggga

SEQ ID NO: 5433386 - DNA, 25 bp, Homo sapien
attgggttgcgtcccccgattcctg

SEQ ID NO: 5433387 - DNA, 25 bp, Homo sapien
tgcgtcccccgattcctggacagtt

SEQ ID NO: 5433388 - DNA, 25 bp, Homo sapien
gcagattgggttgcgtcccccgatt

SEQ ID NO: 5433389 - DNA, 25 bp, Homo sapien
actgcagattgggttgcgtcccccg

SEQ ID NO: 5433390 - DNA, 25 bp, Homo sapien
tctccgtgtcgaggatctggaaggt

SEQ ID NO: 5433391 - DNA, 25 bp, Homo sapien
tgccactacctttgcagtacctact

SEQ ID NO: 5433392 - DNA, 25 bp, Homo sapien
gcagtacctactctttcgtacagaa

SEQ ID NO: 5433393 - DNA, 25 bp, Homo sapien
tagataaaggccctggagccggtct

SEQ ID NO: 5433394 - DNA, 25 bp, Homo sapien
caggttatatatcgcaaatgctttg

SEQ ID NO: 5433395 - DNA, 25 bp, Homo sapien
ggctggagatgttaagcttctgaac

SEQ ID NO: 5433396 - DNA, 25 bp, Homo sapien
gaaagctgcattgaaggactgtacc

SEQ ID NO: 5433397 - DNA, 25 bp, Homo sapien
gaactgaagtactcatgggaatgga

SEQ ID NO: 5433398 - DNA, 25 bp, Homo sapien
taataaaactaagtacactgggaca

SEQ ID NO: 5433399 - DNA, 25 bp, Homo sapien
gcctatgtgttagtaaggtcttctg

SEQ ID NO: 5433400 - DNA, 25 bp, Homo sapien
caacaaaatctagcagaaacttagt

SEQ ID NO: 5433401 - DNA, 25 bp, Homo sapien
ctgggacaaaagtaagcctatgtgt

SEQ ID NO: 5433402 - DNA, 25 bp, Homo sapien
aagccaacagtttttagaatgggca

SEQ ID NO: 5433403 - DNA, 25 bp, Homo sapien
ctcatttggagatggtttgtatgaa

SEQ ID NO: 5433404 - DNA, 25 bp, Homo sapien
ctgaagccaacagtttttagaatgg

SEQ ID NO: 5433405 - DNA, 25 bp, Homo sapien
gctcatttggagatggtttgtatga

SEQ ID NO: 5433406 - DNA, 25 bp, Homo sapien
ccactgtatgctatggtgtcctcca

SEQ ID NO: 5433407 - DNA, 25 bp, Homo sapien
aacagaacactgacatgaggacaca

SEQ ID NO: 5433408 - DNA, 25 bp, Homo sapien
taaaacagaacactgacatgaggac

SEQ ID NO: 5433409 - DNA, 25 bp, Homo sapien
gaatgccactgtatgctatggtgtc

SEQ ID NO: 5433410 - DNA, 25 bp, Homo sapien
tattgcctttgtaaactctcttaga

SEQ ID NO: 5433411 - DNA, 25 bp, Homo sapien
tagtaactaagaagcctcttcattg

SEQ ID NO: 5433412 - DNA, 25 bp, Homo sapien
cagtcacccaagtgcattgcctttg

SEQ ID NO: 5433413 - DNA, 25 bp, Homo sapien
tgttttggattacataaaccagtca

SEQ ID NO: 5433414 - DNA, 25 bp, Homo sapien
tctgaggagcaggtccatggatctc

SEQ ID NO: 5433415 - DNA, 25 bp, Homo sapien
tctggagactttaaatggctaggtt

SEQ ID NO: 5433416 - DNA, 25 bp, Homo sapien
atctcagactgccattgaagtagac

SEQ ID NO: 5433417 - DNA, 25 bp, Homo sapien
gaaaaaatcaagtttgccctgtgag

SEQ ID NO: 5433418 - DNA, 25 bp, Homo sapien
aacactgaacaccacaagatgtacc

SEQ ID NO: 5433419 - DNA, 25 bp, Homo sapien
tgaacaccacaagatgtaccacatc

SEQ ID NO: 5433420 - DNA, 25 bp, Homo sapien
cacaagatgtaccacatctgtgcag

SEQ ID NO: 5433421 - DNA, 25 bp, Homo sapien
taccacatctgtgcaggtcttttag

SEQ ID NO: 5433422 - DNA, 25 bp, Homo sapien
ggtgaatgaaagtctggactctttc

SEQ ID NO: 5433423 - DNA, 25 bp, Homo sapien
gtgaatgaaagtctggactctttcc

SEQ ID NO: 5433424 - DNA, 25 bp, Homo sapien
tgggtgaatgaaagtctggactctt

SEQ ID NO: 5433425 - DNA, 25 bp, Homo sapien
tgatcccttcctactgcatggccct

SEQ ID NO: 5433426 - DNA, 25 bp, Homo sapien
tgcatggccctcatcgtcatctggg

SEQ ID NO: 5433427 - DNA, 25 bp, Homo sapien
ctggtgctcatctccgggattacct

SEQ ID NO: 5433428 - DNA, 25 bp, Homo sapien
tcatctccgggattaccttcctcat

SEQ ID NO: 5433429 - DNA, 25 bp, Homo sapien
catgtggcccagactagtcttgaat

SEQ ID NO: 5433430 - DNA, 25 bp, Homo sapien
atttcgttattttttgttagagatg

SEQ ID NO: 5433431 - DNA, 25 bp, Homo sapien
ctcgacttccttggctcaagccatc

SEQ ID NO: 5433432 - DNA, 25 bp, Homo sapien
tgcagtgacacaaacacagctcgct

SEQ ID NO: 5433433 - DNA, 25 bp, Homo sapien
gatcttgcaaacagagcaggcaatt

SEQ ID NO: 5433434 - DNA, 25 bp, Homo sapien
acagagcaggcaattatctcatagc

SEQ ID NO: 5433435 - DNA, 25 bp, Homo sapien
cttgcaaacagagcaggcaattatc

SEQ ID NO: 5433436 - DNA, 25 bp, Homo sapien
gcaaacagagcaggcaattatctca

SEQ ID NO: 5433437 - DNA, 25 bp, Homo sapien
ctgctggagcattgtaccaagagta

SEQ ID NO: 5433438 - DNA, 25 bp, Homo sapien
ttttctccaactatggaagtctgct

SEQ ID NO: 5433439 - DNA, 25 bp, Homo sapien
ctgtgctaacactgaggaattctgc

SEQ ID NO: 5433440 - DNA, 25 bp, Homo sapien
tttctccaactatggaagtctgctt

SEQ ID NO: 5433441 - DNA, 25 bp, Homo sapien
tttcttcagtttaggattcccaagc

SEQ ID NO: 5433442 - DNA, 25 bp, Homo sapien
cagacagaacagtggagtccggtcc

SEQ ID NO: 5433443 - DNA, 25 bp, Homo sapien
ttgccactgccacaccaataggttc

SEQ ID NO: 5433444 - DNA, 25 bp, Homo sapien
gcatttgtagtttgtcagtcccatc

SEQ ID NO: 5433445 - DNA, 25 bp, Homo sapien
tcttattcccggattcctgcttgat

SEQ ID NO: 5433446 - DNA, 25 bp, Homo sapien
ccttcatcttattcccggattcctg

SEQ ID NO: 5433447 - DNA, 25 bp, Homo sapien
tttttgatccccttcatcttattcc

SEQ ID NO: 5433448 - DNA, 25 bp, Homo sapien
ttcccggattcctgcttgatttttg

SEQ ID NO: 5433449 - DNA, 25 bp, Homo sapien
caggattcagctacttcagaaggtt

SEQ ID NO: 5433450 - DNA, 25 bp, Homo sapien
atcatgtgtgctatctagtgacaaa

SEQ ID NO: 5433451 - DNA, 25 bp, Homo sapien
tgctatctagtgacaaagctgtctt

SEQ ID NO: 5433452 - DNA, 25 bp, Homo sapien
catgtgtgctatctagtgacaaagc

SEQ ID NO: 5433453 - DNA, 25 bp, Homo sapien
tgtgtgctatctagtgacaaagctg

SEQ ID NO: 5433454 - DNA, 25 bp, Homo sapien
agggagcagagggtccgcgatgcgg

SEQ ID NO: 5433455 - DNA, 25 bp, Homo sapien
actgtgagtgagttctttaagagca

SEQ ID NO: 5433456 - DNA, 25 bp, Homo sapien
tttaagagcatcaggctgcagtggc

SEQ ID NO: 5433457 - DNA, 25 bp, Homo sapien
ccgagcaagaagcaggggagcttca

SEQ ID NO: 5433458 - DNA, 25 bp, Homo sapien
tcactctctccagtagtttgagtgc

SEQ ID NO: 5433459 - DNA, 25 bp, Homo sapien
tccggattatcctgaccaaatttct

SEQ ID NO: 5433460 - DNA, 25 bp, Homo sapien
tcaaacttccggattatcctgacca

SEQ ID NO: 5433461 - DNA, 25 bp, Homo sapien
agtgcttttgcccattacttcaaac

SEQ ID NO: 5433462 - DNA, 25 bp, Homo sapien
tactctctaagtggtctttccctgt

SEQ ID NO: 5433463 - DNA, 25 bp, Homo sapien
ttactctctaagtggtctttccctg

SEQ ID NO: 5433464 - DNA, 25 bp, Homo sapien
actctctaagtggtctttccctgta

SEQ ID NO: 5433465 - DNA, 25 bp, Homo sapien
ctctctaagtggtctttccctgtac

SEQ ID NO: 5433466 - DNA, 25 bp, Homo sapien
tttgggtacactcagcgttttcagc

SEQ ID NO: 5433467 - DNA, 25 bp, Homo sapien
tttcagctcttatggtctcattgag

SEQ ID NO: 5433468 - DNA, 25 bp, Homo sapien
tggacttccacatcggaactccaac

SEQ ID NO: 5433469 - DNA, 25 bp, Homo sapien
ttctcttgctatgacggagggagtg

SEQ ID NO: 5433470 - DNA, 25 bp, Homo sapien
cctttatagcaatagccacagcaat

SEQ ID NO: 5433471 - DNA, 25 bp, Homo sapien
tcctttatagcaatagccacagcaa

SEQ ID NO: 5433472 - DNA, 25 bp, Homo sapien
ggaacagaagatgaccgaccacaaa

SEQ ID NO: 5433473 - DNA, 25 bp, Homo sapien
cagaagatgaccgaccacaaaattt

SEQ ID NO: 5433474 - DNA, 25 bp, Homo sapien
gaacagaagatgaccgaccacaaaa

SEQ ID NO: 5433475 - DNA, 25 bp, Homo sapien
aacagaagatgaccgaccacaaaat

SEQ ID NO: 5433476 - DNA, 25 bp, Homo sapien
caggtagtatctgtacccaagatcc

SEQ ID NO: 5433477 - DNA, 25 bp, Homo sapien
tatgaggacggctaatgccacattc

SEQ ID NO: 5433478 - DNA, 25 bp, Homo sapien
gccacattcatcgtgccaggtagta

SEQ ID NO: 5433479 - DNA, 25 bp, Homo sapien
cagatccacacaagttgccaaggga

SEQ ID NO: 5433480 - DNA, 25 bp, Homo sapien
tttgaataaatggaagacacgctat

SEQ ID NO: 5433481 - DNA, 25 bp, Homo sapien
gagctcgttaagaattgacaaaatg

SEQ ID NO: 5433482 - DNA, 25 bp, Homo sapien
aaaagaatgagaacttgtccatgca

SEQ ID NO: 5433483 - DNA, 25 bp, Homo sapien
tgtccatgcatgttataaaggtaga

SEQ ID NO: 5433484 - DNA, 25 bp, Homo sapien
taagctcctcttatcagttcaccat

SEQ ID NO: 5433485 - DNA, 25 bp, Homo sapien
ttcagagactttcacaataagctcc

SEQ ID NO: 5433486 - DNA, 25 bp, Homo sapien
tggcactacgctatattcagagact

SEQ ID NO: 5433487 - DNA, 25 bp, Homo sapien
tgaactgtggatagaaacggtctct

SEQ ID NO: 5433488 - DNA, 25 bp, Homo sapien
actactaatgtagctctaagcaacc

SEQ ID NO: 5433489 - DNA, 25 bp, Homo sapien
gttgcttactccctgaccattctct

SEQ ID NO: 5433490 - DNA, 25 bp, Homo sapien
gaacgtatgaatgctccactatcct

SEQ ID NO: 5433491 - DNA, 25 bp, Homo sapien
taagcaacctaaaacaatgacccac

SEQ ID NO: 5433492 - DNA, 25 bp, Homo sapien
tctgcaaaggtaagagcaacagctg

SEQ ID NO: 5433493 - DNA, 25 bp, Homo sapien
ccagaccagcagtgattcttttcca

SEQ ID NO: 5433494 - DNA, 25 bp, Homo sapien
tcctattaactcttcaactccatgc

SEQ ID NO: 5433495 - DNA, 25 bp, Homo sapien
gaagtaaacaacaaaggctgtccag

SEQ ID NO: 5433496 - DNA, 25 bp, Homo sapien
taccatcttggtacagacatgttgc

SEQ ID NO: 5433497 - DNA, 25 bp, Homo sapien
gcaacgtattgcagtctccatgaaa

SEQ ID NO: 5433498 - DNA, 25 bp, Homo sapien
catgataaccatgctgtgaagtgct

SEQ ID NO: 5433499 - DNA, 25 bp, Homo sapien
tttagttctcaaggcacagctgtgg

SEQ ID NO: 5433500 - DNA, 25 bp, Homo sapien
caaatcggaaatacataatgtggcc

SEQ ID NO: 5433501 - DNA, 25 bp, Homo sapien
ccttcctaacttcttttgcatcagg

SEQ ID NO: 5433502 - DNA, 25 bp, Homo sapien
gcatcaggaccgcaagcaaagagct

SEQ ID NO: 5433503 - DNA, 25 bp, Homo sapien
ccagagtattttgggcaaatcggaa

SEQ ID NO: 5433504 - DNA, 25 bp, Homo sapien
aaatcaatacgagcaagccaaaagc

SEQ ID NO: 5433505 - DNA, 25 bp, Homo sapien
gatagttcatggagttctgtacacc

SEQ ID NO: 5433506 - DNA, 25 bp, Homo sapien
ctgaaatcaatacgagcaagccaaa

SEQ ID NO: 5433507 - DNA, 25 bp, Homo sapien
ggagccaggatgaccatgatgaaat

SEQ ID NO: 5433508 - DNA, 25 bp, Homo sapien
actgtgtcacagttaaatcaaagga

SEQ ID NO: 5433509 - DNA, 25 bp, Homo sapien
gcaactgtgtcacagttaaatcaaa

SEQ ID NO: 5433510 - DNA, 25 bp, Homo sapien
cagcaactgtgtcacagttaaatca

SEQ ID NO: 5433511 - DNA, 25 bp, Homo sapien
cttgcagcaactgtgtcacagttaa

SEQ ID NO: 5433512 - DNA, 25 bp, Homo sapien
tatcaagactctactagatggcagt

SEQ ID NO: 5433513 - DNA, 25 bp, Homo sapien
aaatataccatagccttgccttaag

SEQ ID NO: 5433514 - DNA, 25 bp, Homo sapien
caaacaataaagctgtcttgcctgg

SEQ ID NO: 5433515 - DNA, 25 bp, Homo sapien
tattactgctagagttctaaagccc

SEQ ID NO: 5433516 - DNA, 25 bp, Homo sapien
cgattctagcagcaatgacgcctgc

SEQ ID NO: 5433517 - DNA, 25 bp, Homo sapien
agagattatgggcacagattcagga

SEQ ID NO: 5433518 - DNA, 25 bp, Homo sapien
cagcagactgacagagattatgggc

SEQ ID NO: 5433519 - DNA, 25 bp, Homo sapien
aatgacgcctgcaaacagcagactg

SEQ ID NO: 5433520 - DNA, 25 bp, Homo sapien
tatcttggtaggtgtaattgactct

SEQ ID NO: 5433521 - DNA, 25 bp, Homo sapien
tattagcagaattagacccattaga

SEQ ID NO: 5433522 - DNA, 25 bp, Homo sapien
ggtgtaattgactctccttgaatga

SEQ ID NO: 5433523 - DNA, 25 bp, Homo sapien
tatttcagttgtaatttcaggtatc

SEQ ID NO: 5433524 - DNA, 25 bp, Homo sapien
ctggttgtagtaggagacccatcca

SEQ ID NO: 5433525 - DNA, 25 bp, Homo sapien
catctgggaggcacaagtaggctct

SEQ ID NO: 5433526 - DNA, 25 bp, Homo sapien
gaggatggaaccactcagtccctga

SEQ ID NO: 5433527 - DNA, 25 bp, Homo sapien
catctcggaaggtacggaagggctc

SEQ ID NO: 5433528 - DNA, 25 bp, Homo sapien
gatatatttaacctcatctggcccc

SEQ ID NO: 5433529 - DNA, 25 bp, Homo sapien
ccaacatttaaggtctgaacatgag

SEQ ID NO: 5433530 - DNA, 25 bp, Homo sapien
gaacctctataactactgctcacat

SEQ ID NO: 5433531 - DNA, 25 bp, Homo sapien
tcttgcctcgtctaccaaagcgata

SEQ ID NO: 5433532 - DNA, 25 bp, Homo sapien
gctaagatgttggttaactggtcaa

SEQ ID NO: 5433533 - DNA, 25 bp, Homo sapien
gcagaacgtactccacgcacatgga

SEQ ID NO: 5433534 - DNA, 25 bp, Homo sapien
ttccatcccgaaataaagccacagc

SEQ ID NO: 5433535 - DNA, 25 bp, Homo sapien
tggtaaaccttccagagcagaacgt

SEQ ID NO: 5433536 - DNA, 25 bp, Homo sapien
tccccttggaattgcataaatcagt

SEQ ID NO: 5433537 - DNA, 25 bp, Homo sapien
gagagactgcccatttacacaatac

SEQ ID NO: 5433538 - DNA, 25 bp, Homo sapien
tgcctcaacaatgataatccccttg

SEQ ID NO: 5433539 - DNA, 25 bp, Homo sapien
tgtgcaaacccatcaaagagagact

SEQ ID NO: 5433540 - DNA, 25 bp, Homo sapien
caatagtaacaagagtagagaccac

SEQ ID NO: 5433541 - DNA, 25 bp, Homo sapien
tctaaataaggcgaggtcagaggac

SEQ ID NO: 5433542 - DNA, 25 bp, Homo sapien
gtcataccctggagcacaatgtgaa

SEQ ID NO: 5433543 - DNA, 25 bp, Homo sapien
tgaatgcttcccatggccttatgga

SEQ ID NO: 5433544 - DNA, 25 bp, Homo sapien
caaaggcagccttcattgatcttac

SEQ ID NO: 5433545 - DNA, 25 bp, Homo sapien
tttcacttgagaggcaaaggcagcc

SEQ ID NO: 5433546 - DNA, 25 bp, Homo sapien
gaggcaaaggcagccttcattgatc

SEQ ID NO: 5433547 - DNA, 25 bp, Homo sapien
cagccttcattgatcttacacttga

SEQ ID NO: 5433548 - DNA, 25 bp, Homo sapien
tggcctgatgccactgaaattctaa

SEQ ID NO: 5433549 - DNA, 25 bp, Homo sapien
tgtattttggcctgatgccactgaa

SEQ ID NO: 5433550 - DNA, 25 bp, Homo sapien
tattttggcctgatgccactgaaat

SEQ ID NO: 5433551 - DNA, 25 bp, Homo sapien
ttttggcctgatgccactgaaattc

SEQ ID NO: 5433552 - DNA, 25 bp, Homo sapien
gatgtgaaagagcaccacttactaa

SEQ ID NO: 5433553 - DNA, 25 bp, Homo sapien
aatccaatccctttggattgtgatt

SEQ ID NO: 5433554 - DNA, 25 bp, Homo sapien
ccaatccctttggattgtgattgca

SEQ ID NO: 5433555 - DNA, 25 bp, Homo sapien
ttggattgtgattgcagtagcagta

SEQ ID NO: 5433556 - DNA, 25 bp, Homo sapien
tggattgtgattgcagtagcagtac

SEQ ID NO: 5433557 - DNA, 25 bp, Homo sapien
tagtgatgatcaggatatagcagga

SEQ ID NO: 5433558 - DNA, 25 bp, Homo sapien
tgcaatatttgcaatagtgatgatc

SEQ ID NO: 5433559 - DNA, 25 bp, Homo sapien
tatttgcaatagtgatgatcaggat

SEQ ID NO: 5433560 - DNA, 25 bp, Homo sapien
tgcaatagtgatgatcaggatatag

SEQ ID NO: 5433561 - DNA, 25 bp, Homo sapien
gcacaaacaaagtataggtcactaa

SEQ ID NO: 5433562 - DNA, 25 bp, Homo sapien
taccactaccagatattcaattttc

SEQ ID NO: 5433563 - DNA, 25 bp, Homo sapien
caaacaactgaattctatagtaaac

SEQ ID NO: 5433564 - DNA, 25 bp, Homo sapien
taaactcttagaaatgccattagaa

SEQ ID NO: 5433565 - DNA, 25 bp, Homo sapien
catccatggtacatggtcagaagct

SEQ ID NO: 5433566 - DNA, 25 bp, Homo sapien
cagaagctcatgtttatgtaagaaa

SEQ ID NO: 5433567 - DNA, 25 bp, Homo sapien
gaaaaccatcatcaggatgattcca

SEQ ID NO: 5433568 - DNA, 25 bp, Homo sapien
tcatcaggatgattccacacaggat

SEQ ID NO: 5433569 - DNA, 25 bp, Homo sapien
gcccgtagactgctgtcaaaaggag

SEQ ID NO: 5433570 - DNA, 25 bp, Homo sapien
gacaccgcaaagtgccacatccgat

SEQ ID NO: 5433571 - DNA, 25 bp, Homo sapien
ttaagtctagcattcttgtccaccc

SEQ ID NO: 5433572 - DNA, 25 bp, Homo sapien
gctgtttccatagagctctaccaga

SEQ ID NO: 5433573 - DNA, 25 bp, Homo sapien
tgtacccgacatttgcaagcactag

SEQ ID NO: 5433574 - DNA, 25 bp, Homo sapien
tatcagatataagcaactggcccct

SEQ ID NO: 5433575 - DNA, 25 bp, Homo sapien
gcttcagcagcgcacaaaaggtttt

SEQ ID NO: 5433576 - DNA, 25 bp, Homo sapien
cacagggcacgtgctgctatgagga

SEQ ID NO: 5433577 - DNA, 25 bp, Homo sapien
gcccctacgttcagtgcataagaaa

SEQ ID NO: 5433578 - DNA, 25 bp, Homo sapien
aaatcatgacttggcagggtgggac

SEQ ID NO: 5433579 - DNA, 25 bp, Homo sapien
taaaaggcattcaaccccacacaaa

SEQ ID NO: 5433580 - DNA, 25 bp, Homo sapien
caaaactaacctgaggcaaccttct

SEQ ID NO: 5433581 - DNA, 25 bp, Homo sapien
tagagacattcctcttttgcactcc

SEQ ID NO: 5433582 - DNA, 25 bp, Homo sapien
ccttatatgattgtagttgctgctg

SEQ ID NO: 5433583 - DNA, 25 bp, Homo sapien
ttgcagcggaaaggagtaaaaatcc

SEQ ID NO: 5433584 - DNA, 25 bp, Homo sapien
taaaaatccactaaaccttatatga

SEQ ID NO: 5433585 - DNA, 25 bp, Homo sapien
tcttgtgggacttttaatgaacatg

SEQ ID NO: 5433586 - DNA, 25 bp, Homo sapien
caaccacggtgccactggttttctg

SEQ ID NO: 5433587 - DNA, 25 bp, Homo sapien
aagcatgtgtcacctttcttgtggg

SEQ ID NO: 5433588 - DNA, 25 bp, Homo sapien
tcctggaacaaccacggtgccactg

SEQ ID NO: 5433589 - DNA, 25 bp, Homo sapien
tattgtattctcatggtgctgcacg

SEQ ID NO: 5433590 - DNA, 25 bp, Homo sapien
gctgcacgctggaactaaattttaa

SEQ ID NO: 5433591 - DNA, 25 bp, Homo sapien
tttcggagagagttttaggagccca

SEQ ID NO: 5433592 - DNA, 25 bp, Homo sapien
tacatatgagccatggacagaatat

SEQ ID NO: 5433593 - DNA, 25 bp, Homo sapien
gaggtcaggtagtcggccaaggatc

SEQ ID NO: 5433594 - DNA, 25 bp, Homo sapien
ttgcagaggtcaggtagtcggccaa

SEQ ID NO: 5433595 - DNA, 25 bp, Homo sapien
aattttgcagaggtcaggtagtcgg

SEQ ID NO: 5433596 - DNA, 25 bp, Homo sapien
ttttgcagaggtcaggtagtcggcc

SEQ ID NO: 5433597 - DNA, 25 bp, Homo sapien
caaagctatggttcacagcagagcc

SEQ ID NO: 5433598 - DNA, 25 bp, Homo sapien
ggcaatccaaactgcccaatctact

SEQ ID NO: 5433599 - DNA, 25 bp, Homo sapien
aatctactccatccgtgcctgtgtg

SEQ ID NO: 5433600 - DNA, 25 bp, Homo sapien
tgtagagttgcttgtctccaaagcc

SEQ ID NO: 5433601 - DNA, 25 bp, Homo sapien
catatgctttcggtcaacgacactc

SEQ ID NO: 5433602 - DNA, 25 bp, Homo sapien
ctgggtttccaccatatgctttcgg

SEQ ID NO: 5433603 - DNA, 25 bp, Homo sapien
tatgctttcggtcaacgacactcac

SEQ ID NO: 5433604 - DNA, 25 bp, Homo sapien
ttccaccatatgctttcggtcaacg

SEQ ID NO: 5433605 - DNA, 25 bp, Homo sapien
tcctctctggcggttgtgatctccc

SEQ ID NO: 5433606 - DNA, 25 bp, Homo sapien
agcatcctctctggcggttgtgatc

SEQ ID NO: 5433607 - DNA, 25 bp, Homo sapien
tctctggcggttgtgatctcccgcc

SEQ ID NO: 5433608 - DNA, 25 bp, Homo sapien
cacagcatcctctctggcggttgtg

SEQ ID NO: 5433609 - DNA, 25 bp, Homo sapien
ctcttctgcggctgctatcgctgct

SEQ ID NO: 5433610 - DNA, 25 bp, Homo sapien
taggcgaccccgctggctcttctgc

SEQ ID NO: 5433611 - DNA, 25 bp, Homo sapien
gctcttctgcggctgctatcgctgc

SEQ ID NO: 5433612 - DNA, 25 bp, Homo sapien
gacactaggcgaccccgctggctct

SEQ ID NO: 5433613 - DNA, 25 bp, Homo sapien
aggagtgcaaggaactggagatagc

SEQ ID NO: 5433614 - DNA, 25 bp, Homo sapien
taacaggagtgcaaggaactggaga

SEQ ID NO: 5433615 - DNA, 25 bp, Homo sapien
cttgttaacaggagtgcaaggaact

SEQ ID NO: 5433616 - DNA, 25 bp, Homo sapien
tgttaacaggagtgcaaggaactgg

SEQ ID NO: 5433617 - DNA, 25 bp, Homo sapien
tagctgaagttggaaaggcaaagcc

SEQ ID NO: 5433618 - DNA, 25 bp, Homo sapien
gggcccagctcttataccgagtcgg

SEQ ID NO: 5433619 - DNA, 25 bp, Homo sapien
gactacaacgacgactttggcaaag

SEQ ID NO: 5433620 - DNA, 25 bp, Homo sapien
caaagccttatggaagcggtttggg

SEQ ID NO: 5433621 - DNA, 25 bp, Homo sapien
gggaccttcgcctcgacgcgttcca

SEQ ID NO: 5433622 - DNA, 25 bp, Homo sapien
ccttcgcctcgacgcgttccactcc

SEQ ID NO: 5433623 - DNA, 25 bp, Homo sapien
gaccttcgcctcgacgcgttccact

SEQ ID NO: 5433624 - DNA, 25 bp, Homo sapien
tcgcctcgacgcgttccactccccg

SEQ ID NO: 5433625 - DNA, 25 bp, Homo sapien
acggtcgcagtgcaaagctccagcg

SEQ ID NO: 5433626 - DNA, 25 bp, Homo sapien
cggctaccccgcagttcagggaaag

SEQ ID NO: 5433627 - DNA, 25 bp, Homo sapien
tgcaaagctccagcgcgagcttggt

SEQ ID NO: 5433628 - DNA, 25 bp, Homo sapien
ccgccggacggtcgcagtgcaaagc

SEQ ID NO: 5433629 - DNA, 25 bp, Homo sapien
caggaataccggttatcccagttgt

SEQ ID NO: 5433630 - DNA, 25 bp, Homo sapien
tgactaaagaacaccagactctagc

SEQ ID NO: 5433631 - DNA, 25 bp, Homo sapien
ggttgacttcgttttaatcctgctg

SEQ ID NO: 5433632 - DNA, 25 bp, Homo sapien
cagataaagccattcggtggcctcc

SEQ ID NO: 5433633 - DNA, 25 bp, Homo sapien
cagtttcctctgccatatcagatgt

SEQ ID NO: 5433634 - DNA, 25 bp, Homo sapien
tcagtttcctctgccatatcagatg

SEQ ID NO: 5433635 - DNA, 25 bp, Homo sapien
ccaggcatcctcagtttcctctgcc

SEQ ID NO: 5433636 - DNA, 25 bp, Homo sapien
cggccaggcatcctcagtttcctct

SEQ ID NO: 5433637 - DNA, 25 bp, Homo sapien
agcactggctgcgagcttccccttg

SEQ ID NO: 5433638 - DNA, 25 bp, Homo sapien
actggctgcgagcttccccttgtct

SEQ ID NO: 5433639 - DNA, 25 bp, Homo sapien
ggctgcgagcttccccttgtctgtc

SEQ ID NO: 5433640 - DNA, 25 bp, Homo sapien
tccaccagcactggctgcgagcttc

SEQ ID NO: 5433641 - DNA, 25 bp, Homo sapien
ccatttgccagcttatgtagtgtac

SEQ ID NO: 5433642 - DNA, 25 bp, Homo sapien
tccaaatattggtatgccagcaatg

SEQ ID NO: 5433643 - DNA, 25 bp, Homo sapien
taacaactgccatctttgaggtcga

SEQ ID NO: 5433644 - DNA, 25 bp, Homo sapien
caggagaagccccaatttgtcccat

SEQ ID NO: 5433645 - DNA, 25 bp, Homo sapien
gtgttttgactacccagcctgtgga

SEQ ID NO: 5433646 - DNA, 25 bp, Homo sapien
ccaatgtgccacctacaagagagat

SEQ ID NO: 5433647 - DNA, 25 bp, Homo sapien
tacctagggatgaaaacctgacagc

SEQ ID NO: 5433648 - DNA, 25 bp, Homo sapien
tcagaagtacaaggtccctggtcat

SEQ ID NO: 5433649 - DNA, 25 bp, Homo sapien
tggaacttggtcttacagcctctgc

SEQ ID NO: 5433650 - DNA, 25 bp, Homo sapien
catctgataaatgtggacggctcca

SEQ ID NO: 5433651 - DNA, 25 bp, Homo sapien
gacggctccaaatcatgtccttaga

SEQ ID NO: 5433652 - DNA, 25 bp, Homo sapien
tcttctgcccaaacgggccatgcag

SEQ ID NO: 5433653 - DNA, 25 bp, Homo sapien
tcttcatttaggttcgtgcagcttg

SEQ ID NO: 5433654 - DNA, 25 bp, Homo sapien
aaatatggcagttaagcttccgtct

SEQ ID NO: 5433655 - DNA, 25 bp, Homo sapien
tcccttacagagactttcctatgaa

SEQ ID NO: 5433656 - DNA, 25 bp, Homo sapien
aagcccactggttaagaaagaattg

SEQ ID NO: 5433657 - DNA, 25 bp, Homo sapien
gagaataggatccaatagtgcatcc

SEQ ID NO: 5433658 - DNA, 25 bp, Homo sapien
ggacccatgtacaaacatagattct

SEQ ID NO: 5433659 - DNA, 25 bp, Homo sapien
cgttaactctatgataacggaagag

SEQ ID NO: 5433660 - DNA, 25 bp, Homo sapien
tagtgcatccgaataggacccatgt

SEQ ID NO: 5433661 - DNA, 25 bp, Homo sapien
tacatcagatatcacaaatgtatca

SEQ ID NO: 5433662 - DNA, 25 bp, Homo sapien
gaccaagaatagtgtgtttgaacca

SEQ ID NO: 5433663 - DNA, 25 bp, Homo sapien
tttgaaccaacttgggaaacatgtc

SEQ ID NO: 5433664 - DNA, 25 bp, Homo sapien
tatcacaaatgtatcaagaccaaga

SEQ ID NO: 5433665 - DNA, 25 bp, Homo sapien
gattcaaagtagctcacatggtaac

SEQ ID NO: 5433666 - DNA, 25 bp, Homo sapien
tacaggaatttagtgtcaggtcaga

SEQ ID NO: 5433667 - DNA, 25 bp, Homo sapien
taaattggtgtgcaagaagcctgat

SEQ ID NO: 5433668 - DNA, 25 bp, Homo sapien
tcaggtcagagttatggtttcaaaa

SEQ ID NO: 5433669 - DNA, 25 bp, Homo sapien
tgagttgtgatctggctactgtact

SEQ ID NO: 5433670 - DNA, 25 bp, Homo sapien
gagttgtgatctggctactgtactc

SEQ ID NO: 5433671 - DNA, 25 bp, Homo sapien
agtgagttgtgatctggctactgta

SEQ ID NO: 5433672 - DNA, 25 bp, Homo sapien
gtgagttgtgatctggctactgtac

SEQ ID NO: 5433673 - DNA, 25 bp, Homo sapien
cctatttactccagagatgatacct

SEQ ID NO: 5433674 - DNA, 25 bp, Homo sapien
tgtggacaactaaagcgtacaatac

SEQ ID NO: 5433675 - DNA, 25 bp, Homo sapien
aacatattatgttagagaaagtcag

SEQ ID NO: 5433676 - DNA, 25 bp, Homo sapien
gatgatacctaataacgaactctta

SEQ ID NO: 5433677 - DNA, 25 bp, Homo sapien
tttagggacttttttgaacagcaga

SEQ ID NO: 5433678 - DNA, 25 bp, Homo sapien
ttagggacttttttgaacagcagaa

SEQ ID NO: 5433679 - DNA, 25 bp, Homo sapien
tagggacttttttgaacagcagaaa

SEQ ID NO: 5433680 - DNA, 25 bp, Homo sapien
ctttagggacttttttgaacagcag

SEQ ID NO: 5433681 - DNA, 25 bp, Homo sapien
tgatatgtctactccaagaggacat

SEQ ID NO: 5433682 - DNA, 25 bp, Homo sapien
ttcttttgatatgtctactccaaga

SEQ ID NO: 5433683 - DNA, 25 bp, Homo sapien
tttgatatgtctactccaagaggac

SEQ ID NO: 5433684 - DNA, 25 bp, Homo sapien
cttttgatatgtctactccaagagg

SEQ ID NO: 5433685 - DNA, 25 bp, Homo sapien
agataaggctttgctttgactgaat

SEQ ID NO: 5433686 - DNA, 25 bp, Homo sapien
taaggctttgctttgactgaatccc

SEQ ID NO: 5433687 - DNA, 25 bp, Homo sapien
tggaaaaagccattatctccagcct

SEQ ID NO: 5433688 - DNA, 25 bp, Homo sapien
tgactgaatcccaacctggaaaaag

SEQ ID NO: 5433689 - DNA, 25 bp, Homo sapien
tataaaggcaaaatccaggctttgt

SEQ ID NO: 5433690 - DNA, 25 bp, Homo sapien
taaaggcaaaatccaggctttgtct

SEQ ID NO: 5433691 - DNA, 25 bp, Homo sapien
ataaaggcaaaatccaggctttgtc

SEQ ID NO: 5433692 - DNA, 25 bp, Homo sapien
tttggttcatagcggatgccttcta

SEQ ID NO: 5433693 - DNA, 25 bp, Homo sapien
ttcatagcggatgccttctatgtca

SEQ ID NO: 5433694 - DNA, 25 bp, Homo sapien
taaaatgcccaagccagcacgtagt

SEQ ID NO: 5433695 - DNA, 25 bp, Homo sapien
tgtaaaatgcccaagccagcacgta

SEQ ID NO: 5433696 - DNA, 25 bp, Homo sapien
cagtgcatagtctgggaggaggaca

SEQ ID NO: 5433697 - DNA, 25 bp, Homo sapien
tacttgcgacaccaccagatgcaac

SEQ ID NO: 5433698 - DNA, 25 bp, Homo sapien
cagagctctgcggatatagaagtta

SEQ ID NO: 5433699 - DNA, 25 bp, Homo sapien
gacacaacaaagtgcactgtgttgc

SEQ ID NO: 5433700 - DNA, 25 bp, Homo sapien
cttttcacaagatgacatgccattg

SEQ ID NO: 5433701 - DNA, 25 bp, Homo sapien
gaggtaacaagtctctctgcttaca

SEQ ID NO: 5433702 - DNA, 25 bp, Homo sapien
tacaaaacagaatagcccgatgtgt

SEQ ID NO: 5433703 - DNA, 25 bp, Homo sapien
ccattgtgtgctgtactgtggcagc

SEQ ID NO: 5433704 - DNA, 25 bp, Homo sapien
taggcacaatccaggaatatttatc

SEQ ID NO: 5433705 - DNA, 25 bp, Homo sapien
aggcacaatccaggaatatttatct

SEQ ID NO: 5433706 - DNA, 25 bp, Homo sapien
cttgtttggccaaatgttctatggc

SEQ ID NO: 5433707 - DNA, 25 bp, Homo sapien
ccaaatgttctatggctttcccacc

SEQ ID NO: 5433708 - DNA, 25 bp, Homo sapien
tttttagcatgatgcaagggaggtt

SEQ ID NO: 5433709 - DNA, 25 bp, Homo sapien
cagtaacgtgttgaagtccagtaaa

SEQ ID NO: 5433710 - DNA, 25 bp, Homo sapien
ctggatgttttattaaagaaagtct

SEQ ID NO: 5433711 - DNA, 25 bp, Homo sapien
ctctggatgttttattaaagaaagt

SEQ ID NO: 5433712 - DNA, 25 bp, Homo sapien
ggtggagcactctggatgttttatt

SEQ ID NO: 5433713 - DNA, 25 bp, Homo sapien
ttattaaagaaagtcttcttgccac

SEQ ID NO: 5433714 - DNA, 25 bp, Homo sapien
tgaaactccttgaactaatgccaac

SEQ ID NO: 5433715 - DNA, 25 bp, Homo sapien
atgccaacagacagtgacctccaga

SEQ ID NO: 5433716 - DNA, 25 bp, Homo sapien
cctaatagtaagtgcatgagcctcc

SEQ ID NO: 5433717 - DNA, 25 bp, Homo sapien
ggtgctatgtccaaagactttccaa

SEQ ID NO: 5433718 - DNA, 25 bp, Homo sapien
taagctaaatgataagcccactccc

SEQ ID NO: 5433719 - DNA, 25 bp, Homo sapien
cttggagagactccactggcagaaa

SEQ ID NO: 5433720 - DNA, 25 bp, Homo sapien
ttgcaattgctgagaggtcacttgg

SEQ ID NO: 5433721 - DNA, 25 bp, Homo sapien
tcccaggcttaaagcaagtcctggt

SEQ ID NO: 5433722 - DNA, 25 bp, Homo sapien
tgtattgcttctcccaacacatttc

SEQ ID NO: 5433723 - DNA, 25 bp, Homo sapien
gaatgtattgcttctcccaacacat

SEQ ID NO: 5433724 - DNA, 25 bp, Homo sapien
gaacttcagtttgggaatgtattgc

SEQ ID NO: 5433725 - DNA, 25 bp, Homo sapien
aatgaacttcagtttgggaatgtat

SEQ ID NO: 5433726 - DNA, 25 bp, Homo sapien
cctgcagtcttagtcaagattagca

SEQ ID NO: 5433727 - DNA, 25 bp, Homo sapien
aaaactcctgcagtcttagtcaaga

SEQ ID NO: 5433728 - DNA, 25 bp, Homo sapien
aaaaaactcctgcagtcttagtcaa

SEQ ID NO: 5433729 - DNA, 25 bp, Homo sapien
actcctgcagtcttagtcaagatta

SEQ ID NO: 5433730 - DNA, 25 bp, Homo sapien
gatgagcgacctatttgcagaaggc

SEQ ID NO: 5433731 - DNA, 25 bp, Homo sapien
agggattagagatgagcgacctatt

SEQ ID NO: 5433732 - DNA, 25 bp, Homo sapien
tagagatgagcgacctatttgcaga

SEQ ID NO: 5433733 - DNA, 25 bp, Homo sapien
gacagacacaacctagaggaattag

SEQ ID NO: 5433734 - DNA, 25 bp, Homo sapien
ctttcgggccaagaaagctgcaggc

SEQ ID NO: 5433735 - DNA, 25 bp, Homo sapien
cctttcgggccaagaaagctgcagg

SEQ ID NO: 5433736 - DNA, 25 bp, Homo sapien
gcgacgggcgcaaactggaaccgct

SEQ ID NO: 5433737 - DNA, 25 bp, Homo sapien
tagcgctggtctcctgtcggctgta

SEQ ID NO: 5433738 - DNA, 25 bp, Homo sapien
tttccaggtgcgcaaaagcgtcagt

SEQ ID NO: 5433739 - DNA, 25 bp, Homo sapien
tctcctgtcggctgtaaggcggcga

SEQ ID NO: 5433740 - DNA, 25 bp, Homo sapien
taaagactgtcgactgcccttatcg

SEQ ID NO: 5433741 - DNA, 25 bp, Homo sapien
cctggcgcccggaagtgatgtcatc

SEQ ID NO: 5433742 - DNA, 25 bp, Homo sapien
tgtcatcggaactgtgcaaggtccc

SEQ ID NO: 5433743 - DNA, 25 bp, Homo sapien
tgggcggcagtagctagcacttgtc

SEQ ID NO: 5433744 - DNA, 25 bp, Homo sapien
aataggatggaatctagcggcgccc

SEQ ID NO: 5433745 - DNA, 25 bp, Homo sapien
catcggacagtgtaaaccgtttctc

SEQ ID NO: 5433746 - DNA, 25 bp, Homo sapien
tgatactttcatcggagaaatagga

SEQ ID NO: 5433747 - DNA, 25 bp, Homo sapien
agaacggaagtgtttctcatcggac

SEQ ID NO: 5433748 - DNA, 25 bp, Homo sapien
tttgcacgttgtgaagctctgggta

SEQ ID NO: 5433749 - DNA, 25 bp, Homo sapien
ctgcactttgcacgttgtgaagctc

SEQ ID NO: 5433750 - DNA, 25 bp, Homo sapien
gcacgttgtgaagctctgggtataa

SEQ ID NO: 5433751 - DNA, 25 bp, Homo sapien
actttgcacgttgtgaagctctggg

SEQ ID NO: 5433752 - DNA, 25 bp, Homo sapien
atgttgggaagccacagagtacagt

SEQ ID NO: 5433753 - DNA, 25 bp, Homo sapien
caacatgttgggaagccacagagta

SEQ ID NO: 5433754 - DNA, 25 bp, Homo sapien
acatgttgggaagccacagagtaca

SEQ ID NO: 5433755 - DNA, 25 bp, Homo sapien
aacaacatgttgggaagccacagag

SEQ ID NO: 5433756 - DNA, 25 bp, Homo sapien
cactcttggccagtgttgagtccga

SEQ ID NO: 5433757 - DNA, 25 bp, Homo sapien
tcatacggttagagaggtcagagct

SEQ ID NO: 5433758 - DNA, 25 bp, Homo sapien
tttacaggcaactgggccacagagt

SEQ ID NO: 5433759 - DNA, 25 bp, Homo sapien
tagaagtcaggacatctggcactgg

SEQ ID NO: 5433760 - DNA, 25 bp, Homo sapien
cagatattgtgtgtctagctttcca

SEQ ID NO: 5433761 - DNA, 25 bp, Homo sapien
gatagttagaatgccactcatgggc

SEQ ID NO: 5433762 - DNA, 25 bp, Homo sapien
ccagctgaatctagatatgcttatt

SEQ ID NO: 5433763 - DNA, 25 bp, Homo sapien
cataaatcgagagttccagctgaat

SEQ ID NO: 5433764 - DNA, 25 bp, Homo sapien
gatgtggaacgttctttcattagtg

SEQ ID NO: 5433765 - DNA, 25 bp, Homo sapien
ttgatgtggaacgttctttcattag

SEQ ID NO: 5433766 - DNA, 25 bp, Homo sapien
gtggaacgttctttcattagtggta

SEQ ID NO: 5433767 - DNA, 25 bp, Homo sapien
tgtggaacgttctttcattagtggt

SEQ ID NO: 5433768 - DNA, 25 bp, Homo sapien
cataaaagtggggtaacacagtatt

SEQ ID NO: 5433769 - DNA, 25 bp, Homo sapien
agaaccaataagctcccattccttc

SEQ ID NO: 5433770 - DNA, 25 bp, Homo sapien
aacaagaaccaataagctcccattc

SEQ ID NO: 5433771 - DNA, 25 bp, Homo sapien
tgattattctaggagttcataaaag

SEQ ID NO: 5433772 - DNA, 25 bp, Homo sapien
cagctttagctagacaagatgaatc

SEQ ID NO: 5433773 - DNA, 25 bp, Homo sapien
tggaaaatggtgaaggctctagtaa

SEQ ID NO: 5433774 - DNA, 25 bp, Homo sapien
tatttattccatgctgttgacacca

SEQ ID NO: 5433775 - DNA, 25 bp, Homo sapien
caatttcatatgtgaagggtaagcc

SEQ ID NO: 5433776 - DNA, 25 bp, Homo sapien
taaactggaatgtaggcaccaaagg

SEQ ID NO: 5433777 - DNA, 25 bp, Homo sapien
aaacattgacgggagaaagcagtga

SEQ ID NO: 5433778 - DNA, 25 bp, Homo sapien
gctcatgactccttagaaattgcca

SEQ ID NO: 5433779 - DNA, 25 bp, Homo sapien
taattgctgcaagaaagatccacca

SEQ ID NO: 5433780 - DNA, 25 bp, Homo sapien
caatcagtcacaaaggtgaacctcc

SEQ ID NO: 5433781 - DNA, 25 bp, Homo sapien
aatacacgggaaaagacagacatac

SEQ ID NO: 5433782 - DNA, 25 bp, Homo sapien
gaagctgcttgtaagacacttggct

SEQ ID NO: 5433783 - DNA, 25 bp, Homo sapien
ctagagacgttgtttctgccagacc

SEQ ID NO: 5433784 - DNA, 25 bp, Homo sapien
tttaacttataagctgggcctgccc

SEQ ID NO: 5433785 - DNA, 25 bp, Homo sapien
tcattataagttaagctggtcctag

SEQ ID NO: 5433786 - DNA, 25 bp, Homo sapien
taaacttgtatagagaggattccgg

SEQ ID NO: 5433787 - DNA, 25 bp, Homo sapien
gaatttatctactacaccctcactg

SEQ ID NO: 5433788 - DNA, 25 bp, Homo sapien
ggaccagccattggccctccaatgt

SEQ ID NO: 5433789 - DNA, 25 bp, Homo sapien
ttataagaaattcagtagctgtaaa

SEQ ID NO: 5433790 - DNA, 25 bp, Homo sapien
aaaacagcacttgaaggaccagcca

SEQ ID NO: 5433791 - DNA, 25 bp, Homo sapien
gaaacagtgcagtttactaaccact

SEQ ID NO: 5433792 - DNA, 25 bp, Homo sapien
ttattaattccaaagatccgaacac

SEQ ID NO: 5433793 - DNA, 25 bp, Homo sapien
tggatcatacttcgtatagaaactt

SEQ ID NO: 5433794 - DNA, 25 bp, Homo sapien
gaagtgagttggatcatacttcgta

SEQ ID NO: 5433795 - DNA, 25 bp, Homo sapien
ttcgtatagaaacttgccagaaaat

SEQ ID NO: 5433796 - DNA, 25 bp, Homo sapien
taggatgaagtgagttggatcatac

SEQ ID NO: 5433797 - DNA, 25 bp, Homo sapien
caagaggaatcggtttggtcccaag

SEQ ID NO: 5433798 - DNA, 25 bp, Homo sapien
cactgcatcctttaaagcaaggctt

SEQ ID NO: 5433799 - DNA, 25 bp, Homo sapien
tcatatgccctctgtaattacaggt

SEQ ID NO: 5433800 - DNA, 25 bp, Homo sapien
gcaaggcttatcaaactagggttca

SEQ ID NO: 5433801 - DNA, 25 bp, Homo sapien
ggttagaagagaggagctacttcca

SEQ ID NO: 5433802 - DNA, 25 bp, Homo sapien
tatatcatatcaaggtgcagacaca

SEQ ID NO: 5433803 - DNA, 25 bp, Homo sapien
ccggtaacctgaaagacactgttgt

SEQ ID NO: 5433804 - DNA, 25 bp, Homo sapien
ttgcagtacgcaaggaaagtattct

SEQ ID NO: 5433805 - DNA, 25 bp, Homo sapien
gtatacaggtacatctcagttggct

SEQ ID NO: 5433806 - DNA, 25 bp, Homo sapien
ctgtatacaggtacatctcagttgg

SEQ ID NO: 5433807 - DNA, 25 bp, Homo sapien
tatacaggtacatctcagttggctt

SEQ ID NO: 5433808 - DNA, 25 bp, Homo sapien
cactgtatacaggtacatctcagtt

SEQ ID NO: 5433809 - DNA, 25 bp, Homo sapien
cctaaggacgggagctggaatacat

SEQ ID NO: 5433810 - DNA, 25 bp, Homo sapien
tatatatgagcaaaccaagctggct

SEQ ID NO: 5433811 - DNA, 25 bp, Homo sapien
tgatatatataggactccacccagg

SEQ ID NO: 5433812 - DNA, 25 bp, Homo sapien
tggaaggcccagaacatcagatagg

SEQ ID NO: 5433813 - DNA, 25 bp, Homo sapien
cgtgaagatgtaaactgtactccat

SEQ ID NO: 5433814 - DNA, 25 bp, Homo sapien
agttaggagccttgctttaccctgg

SEQ ID NO: 5433815 - DNA, 25 bp, Homo sapien
cttccgtgaagatgtaaactgtact

SEQ ID NO: 5433816 - DNA, 25 bp, Homo sapien
tagtccagttgttcccaatgagtta

SEQ ID NO: 5433817 - DNA, 25 bp, Homo sapien
cactgtgggcaactccaacgttcat

SEQ ID NO: 5433818 - DNA, 25 bp, Homo sapien
tatgaagcaagccaactcccaatgc

SEQ ID NO: 5433819 - DNA, 25 bp, Homo sapien
tgttaaagtccaagcaacaggaaca

SEQ ID NO: 5433820 - DNA, 25 bp, Homo sapien
acataccccggctgttcatgacacg

SEQ ID NO: 5433821 - DNA, 25 bp, Homo sapien
cctagttactttgaagtagcacaca

SEQ ID NO: 5433822 - DNA, 25 bp, Homo sapien
caacactgatacaactggcaaccta

SEQ ID NO: 5433823 - DNA, 25 bp, Homo sapien
tgactttagggtaagacaagacttg

SEQ ID NO: 5433824 - DNA, 25 bp, Homo sapien
gctacttgtagatgctgatgacagc

SEQ ID NO: 5433825 - DNA, 25 bp, Homo sapien
tatccataaagaatggtcagagttc

SEQ ID NO: 5433826 - DNA, 25 bp, Homo sapien
cgagccagtgtgtcaagtagtcaga

SEQ ID NO: 5433827 - DNA, 25 bp, Homo sapien
aagtagtcagactcttatatttgac

SEQ ID NO: 5433828 - DNA, 25 bp, Homo sapien
gaatactcaatgtggaaggtacatg

SEQ ID NO: 5433829 - DNA, 25 bp, Homo sapien
gtcaagggataatgtttgtttctca

SEQ ID NO: 5433830 - DNA, 25 bp, Homo sapien
actaggtgaaaataaggagtcttct

SEQ ID NO: 5433831 - DNA, 25 bp, Homo sapien
ggtgtttacttgagactaagaattg

SEQ ID NO: 5433832 - DNA, 25 bp, Homo sapien
aagatggactccaaaggaagaattg

SEQ ID NO: 5433833 - DNA, 25 bp, Homo sapien
tataatgctccttccgctctagaga

SEQ ID NO: 5433834 - DNA, 25 bp, Homo sapien
ccatagaacaggcatcaagggttaa

SEQ ID NO: 5433835 - DNA, 25 bp, Homo sapien
caaacgcttgtattacggagttagc

SEQ ID NO: 5433836 - DNA, 25 bp, Homo sapien
tagttacactaagaccgctaaagcc

SEQ ID NO: 5433837 - DNA, 25 bp, Homo sapien
gaaggcaaagctggtgcggtactca

SEQ ID NO: 5433838 - DNA, 25 bp, Homo sapien
gatagttttcccacgttccacagga

SEQ ID NO: 5433839 - DNA, 25 bp, Homo sapien
gatggaggcctgaaatttacatctc

SEQ ID NO: 5433840 - DNA, 25 bp, Homo sapien
ttttcccagcaggtttgccgcgctg

SEQ ID NO: 5433841 - DNA, 25 bp, Homo sapien
tgtacagcgtccaccgcgttcgtgc

SEQ ID NO: 5433842 - DNA, 25 bp, Homo sapien
gctgttggctctgccctcgccggtg

SEQ ID NO: 5433843 - DNA, 25 bp, Homo sapien
agcagttccctaccgacgaaggcga

SEQ ID NO: 5433844 - DNA, 25 bp, Homo sapien
ggaccctggcaagacaacgaggatt

SEQ ID NO: 5433845 - DNA, 25 bp, Homo sapien
agcccggctgctacggccgcggata

SEQ ID NO: 5433846 - DNA, 25 bp, Homo sapien
ggccgcggatacacgccctcaggcc

SEQ ID NO: 5433847 - DNA, 25 bp, Homo sapien
ggaccagcccggctgctacggccgc

SEQ ID NO: 5433848 - DNA, 25 bp, Homo sapien
gggccgccggctcgcagcaggacca

SEQ ID NO: 5433849 - DNA, 25 bp, Homo sapien
atggaatttccataggacgtttttg

SEQ ID NO: 5433850 - DNA, 25 bp, Homo sapien
agatggaatttccataggacgtttt

SEQ ID NO: 5433851 - DNA, 25 bp, Homo sapien
cagatggaatttccataggacgttt

SEQ ID NO: 5433852 - DNA, 25 bp, Homo sapien
caccattaggagatatttgagtggc

SEQ ID NO: 5433853 - DNA, 25 bp, Homo sapien
cagtctaatctggatggccaatggc

SEQ ID NO: 5433854 - DNA, 25 bp, Homo sapien
cttaagtaagtgagaccaggtatgc

SEQ ID NO: 5433855 - DNA, 25 bp, Homo sapien
tcttacgagttcaaattaggacacc

SEQ ID NO: 5433856 - DNA, 25 bp, Homo sapien
tgtcaccctaagttgcccttgcctt

SEQ ID NO: 5433857 - DNA, 25 bp, Homo sapien
tgttttatggattaattcagccatt

SEQ ID NO: 5433858 - DNA, 25 bp, Homo sapien
agtatgtcaccctaagttgcccttg

SEQ ID NO: 5433859 - DNA, 25 bp, Homo sapien
tttaacagtatgtcaccctaagttg

SEQ ID NO: 5433860 - DNA, 25 bp, Homo sapien
gcttttgcattggaacagttgtaac

SEQ ID NO: 5433861 - DNA, 25 bp, Homo sapien
cagtataacttaaggcttgcttcta

SEQ ID NO: 5433862 - DNA, 25 bp, Homo sapien
ggcgattcaatttagtgttgttcat

SEQ ID NO: 5433863 - DNA, 25 bp, Homo sapien
aattggtctccaaaatatgtaatac

SEQ ID NO: 5433864 - DNA, 25 bp, Homo sapien
ctgtttctctgcactagaatgtaaa

SEQ ID NO: 5433865 - DNA, 25 bp, Homo sapien
tcaagcttaaagtcatctcctcaag

SEQ ID NO: 5433866 - DNA, 25 bp, Homo sapien
tacatcccgagagctgacaacatag

SEQ ID NO: 5433867 - DNA, 25 bp, Homo sapien
catgtggcccagtttaattttacgc

SEQ ID NO: 5433868 - DNA, 25 bp, Homo sapien
gatactaaatgtggcagggttcaac

SEQ ID NO: 5433869 - DNA, 25 bp, Homo sapien
ctaaatgtggcagggttcaacaaat

SEQ ID NO: 5433870 - DNA, 25 bp, Homo sapien
tgatcaaaatacttaactgtccttt

SEQ ID NO: 5433871 - DNA, 25 bp, Homo sapien
gtgatcaaaatacttaactgtcctt

SEQ ID NO: 5433872 - DNA, 25 bp, Homo sapien
tgaccttcaggccattaagagggag

SEQ ID NO: 5433873 - DNA, 25 bp, Homo sapien
gcagcagctccgtgaagaaagatga

SEQ ID NO: 5433874 - DNA, 25 bp, Homo sapien
caggtgtgaaacgatctgcagcgga

SEQ ID NO: 5433875 - DNA, 25 bp, Homo sapien
tgtagtgccctcgaaacgtcagcgt

SEQ ID NO: 5433876 - DNA, 25 bp, Homo sapien
gactggagctggaacctgttcctga

SEQ ID NO: 5433877 - DNA, 25 bp, Homo sapien
tggcagcggctcctgatacggctta

SEQ ID NO: 5433878 - DNA, 25 bp, Homo sapien
aacctgttcctgatatggcagcggc

SEQ ID NO: 5433879 - DNA, 25 bp, Homo sapien
gttccctcgctaaagctagcccagt

SEQ ID NO: 5433880 - DNA, 25 bp, Homo sapien
cagtagtgaacatgggagcaagaga

SEQ ID NO: 5433881 - DNA, 25 bp, Homo sapien
gataagtctctaccttcagaccagg

SEQ ID NO: 5433882 - DNA, 25 bp, Homo sapien
gaagagtcaattaggattaggataa

SEQ ID NO: 5433883 - DNA, 25 bp, Homo sapien
ctgttaactgattgtgaagagtcaa

SEQ ID NO: 5433884 - DNA, 25 bp, Homo sapien
gaatttttctggatcgtttctgcac

SEQ ID NO: 5433885 - DNA, 25 bp, Homo sapien
gggaatttttctggatcgtttctgc

SEQ ID NO: 5433886 - DNA, 25 bp, Homo sapien
tttttctggatcgtttctgcacttt

SEQ ID NO: 5433887 - DNA, 25 bp, Homo sapien
ggtagtagcagaatatggggaattt

SEQ ID NO: 5433888 - DNA, 25 bp, Homo sapien
aaccactttgaaattcaatgtattt

SEQ ID NO: 5433889 - DNA, 25 bp, Homo sapien
tattttcatacaaatgaatggccat

SEQ ID NO: 5433890 - DNA, 25 bp, Homo sapien
taaaaccactttgaaattcaatgta

SEQ ID NO: 5433891 - DNA, 25 bp, Homo sapien
aatgtattttcatacaaatgaatgg

SEQ ID NO: 5433892 - DNA, 25 bp, Homo sapien
tgttaaatacagtatcgggagtacc

SEQ ID NO: 5433893 - DNA, 25 bp, Homo sapien
cccttgtggagtattagcactgatg

SEQ ID NO: 5433894 - DNA, 25 bp, Homo sapien
tggaaaactgtacaggaccctgata

SEQ ID NO: 5433895 - DNA, 25 bp, Homo sapien
tatagtggctgctttgaaatcgttg

SEQ ID NO: 5433896 - DNA, 25 bp, Homo sapien
ctatcccattagtataggtgccacc

SEQ ID NO: 5433897 - DNA, 25 bp, Homo sapien
cattgttgcccttggtgtgcccgtg

SEQ ID NO: 5433898 - DNA, 25 bp, Homo sapien
ccgtgttttgccacctcatgggagg

SEQ ID NO: 5433899 - DNA, 25 bp, Homo sapien
tcccattagtataggtgccaccaag

SEQ ID NO: 5433900 - DNA, 25 bp, Homo sapien
tcatttagtcatagtacaataaatt

SEQ ID NO: 5433901 - DNA, 25 bp, Homo sapien
ttcatttagtcatagtacaataaat

SEQ ID NO: 5433902 - DNA, 25 bp, Homo sapien
tttcatttagtcatagtacaataaa

SEQ ID NO: 5433903 - DNA, 25 bp, Homo sapien
gactgtagcatactctaggcctata

SEQ ID NO: 5433904 - DNA, 25 bp, Homo sapien
tatcgtattagcaccgttggcatgg

SEQ ID NO: 5433905 - DNA, 25 bp, Homo sapien
tatgtgataaacctggtagcctcag

SEQ ID NO: 5433906 - DNA, 25 bp, Homo sapien
gcagtttctccaagtatgctacaga

SEQ ID NO: 5433907 - DNA, 25 bp, Homo sapien
cactctccagagcagtaattggcct

SEQ ID NO: 5433908 - DNA, 25 bp, Homo sapien
tccacagttagagggtaacgacagc

SEQ ID NO: 5433909 - DNA, 25 bp, Homo sapien
gcggtctactaccatcgctggaatt

SEQ ID NO: 5433910 - DNA, 25 bp, Homo sapien
tgttgagtgctcatcacagtcaaga

SEQ ID NO: 5433911 - DNA, 25 bp, Homo sapien
ggattccagtataccttgtaccgtc

SEQ ID NO: 5433912 - DNA, 25 bp, Homo sapien
tctcgacgggtctcaaatatatcca

SEQ ID NO: 5433913 - DNA, 25 bp, Homo sapien
tgtcaagtttcagagatcggattcc

SEQ ID NO: 5433914 - DNA, 25 bp, Homo sapien
cctgggaaggttacagcaagatcat

SEQ ID NO: 5433915 - DNA, 25 bp, Homo sapien
tgatcaatcagttcccggagtggag

SEQ ID NO: 5433916 - DNA, 25 bp, Homo sapien
ttccaaagagccatcgctgctgtca

SEQ ID NO: 5433917 - DNA, 25 bp, Homo sapien
tgtagcgtgataatcgtcatcttcc

SEQ ID NO: 5433918 - DNA, 25 bp, Homo sapien
caagtacatgcattacacagcccct

SEQ ID NO: 5433919 - DNA, 25 bp, Homo sapien
aacaatcagcataaacaggtaaata

SEQ ID NO: 5433920 - DNA, 25 bp, Homo sapien
caatcagcataaacaggtaaatata

SEQ ID NO: 5433921 - DNA, 25 bp, Homo sapien
gcaacaatcagcataaacaggtaaa

SEQ ID NO: 5433922 - DNA, 25 bp, Homo sapien
caacaatcagcataaacaggtaaat

SEQ ID NO: 5433923 - DNA, 25 bp, Homo sapien
gcttttgagtaatgccaagcaaaat

SEQ ID NO: 5433924 - DNA, 25 bp, Homo sapien
cttttgcttttgagtaatgccaagc

SEQ ID NO: 5433925 - DNA, 25 bp, Homo sapien
aattttaatgcatgtacagtctgag

SEQ ID NO: 5433926 - DNA, 25 bp, Homo sapien
gagagacaacttgccacaccagtga

SEQ ID NO: 5433927 - DNA, 25 bp, Homo sapien
tcttcagaaggtcttgaggtgactg

SEQ ID NO: 5433928 - DNA, 25 bp, Homo sapien
acttgcaggcaatctagaggtcatt

SEQ ID NO: 5433929 - DNA, 25 bp, Homo sapien
ggtgactgtattcatactctggcaa

SEQ ID NO: 5433930 - DNA, 25 bp, Homo sapien
tttgtcagttctagggtatagactg

SEQ ID NO: 5433931 - DNA, 25 bp, Homo sapien
aaagaaagtaggctggacatggtgg

SEQ ID NO: 5433932 - DNA, 25 bp, Homo sapien
ccagtgctttgagagaccgaggcag

SEQ ID NO: 5433933 - DNA, 25 bp, Homo sapien
atcccagtgctttgagagaccgagg

SEQ ID NO: 5433934 - DNA, 25 bp, Homo sapien
ctcacacctgtaatcccagtgcttt

SEQ ID NO: 5433935 - DNA, 25 bp, Homo sapien
tagccacatcgagctttgagtccaa

SEQ ID NO: 5433936 - DNA, 25 bp, Homo sapien
aaatgtcctctaagcgttctcccag

SEQ ID NO: 5433937 - DNA, 25 bp, Homo sapien
gtttaaaagataggctccagcaggg

SEQ ID NO: 5433938 - DNA, 25 bp, Homo sapien
caggcccaagaattgaggagacatc

SEQ ID NO: 5433939 - DNA, 25 bp, Homo sapien
tccaacttgggccaagaagggccta

SEQ ID NO: 5433940 - DNA, 25 bp, Homo sapien
ccaagaagggcctaccctctgtcct

SEQ ID NO: 5433941 - DNA, 25 bp, Homo sapien
ctccaacttgggccaagaagggcct

SEQ ID NO: 5433942 - DNA, 25 bp, Homo sapien
tgggccaagaagggcctaccctctg

SEQ ID NO: 5433943 - DNA, 25 bp, Homo sapien
gatttggtcactcttcctaagcagg

SEQ ID NO: 5433944 - DNA, 25 bp, Homo sapien
tccgctgacagtggcctcatgcaat

SEQ ID NO: 5433945 - DNA, 25 bp, Homo sapien
gaactccagcagatcctctgctggg

SEQ ID NO: 5433946 - DNA, 25 bp, Homo sapien
tccaccatatgcctgcctcttggga

SEQ ID NO: 5433947 - DNA, 25 bp, Homo sapien
cattgtagggcggagagctttcact

SEQ ID NO: 5433948 - DNA, 25 bp, Homo sapien
gacgaataatgtagggcgctgtcat

SEQ ID NO: 5433949 - DNA, 25 bp, Homo sapien
ctgagaatgtccttcgtctctatta

SEQ ID NO: 5433950 - DNA, 25 bp, Homo sapien
tctattacacagtctaagtctacca

SEQ ID NO: 5433951 - DNA, 25 bp, Homo sapien
ttctcttggtcagcgttttcattta

SEQ ID NO: 5433952 - DNA, 25 bp, Homo sapien
ctcttggtcagcgttttcatttagt

SEQ ID NO: 5433953 - DNA, 25 bp, Homo sapien
tttttctcttggtcagcgttttcat

SEQ ID NO: 5433954 - DNA, 25 bp, Homo sapien
cttggtcagcgttttcatttagttt

SEQ ID NO: 5433955 - DNA, 25 bp, Homo sapien
tctgtctacattgggagtacttttt

SEQ ID NO: 5433956 - DNA, 25 bp, Homo sapien
ttctgtctacattgggagtactttt

SEQ ID NO: 5433957 - DNA, 25 bp, Homo sapien
tttctgtctacattgggagtacttt

SEQ ID NO: 5433958 - DNA, 25 bp, Homo sapien
ctgtctacattgggagtacttttta

SEQ ID NO: 5433959 - DNA, 25 bp, Homo sapien
agggtttgttttcactgctgagcat

SEQ ID NO: 5433960 - DNA, 25 bp, Homo sapien
ttcagtacagcttcctttggccacc

SEQ ID NO: 5433961 - DNA, 25 bp, Homo sapien
ttctgatgtacttggctaaggacag

SEQ ID NO: 5433962 - DNA, 25 bp, Homo sapien
ccagagcacccaaagagggatgtag

SEQ ID NO: 5433963 - DNA, 25 bp, Homo sapien
gacagacaagcttagtggaagccag

SEQ ID NO: 5433964 - DNA, 25 bp, Homo sapien
taatgtgggcatagtatagtctaat

SEQ ID NO: 5433965 - DNA, 25 bp, Homo sapien
gagcagtccattttaattggttggg

SEQ ID NO: 5433966 - DNA, 25 bp, Homo sapien
tgttgttctcggtgggttgcagcat

SEQ ID NO: 5433967 - DNA, 25 bp, Homo sapien
tgttatgttctttaatagagcagtc

SEQ ID NO: 5433968 - DNA, 25 bp, Homo sapien
taatagaattcaaggtgggggtcat

SEQ ID NO: 5433969 - DNA, 25 bp, Homo sapien
gtttgcagtcggcatctgaagttgg

SEQ ID NO: 5433970 - DNA, 25 bp, Homo sapien
tcattggaagtccaatttatagcca

SEQ ID NO: 5433971 - DNA, 25 bp, Homo sapien
tgggggtcattggaagtccaattta

SEQ ID NO: 5433972 - DNA, 25 bp, Homo sapien
catggttcagatccaaacttaccca

SEQ ID NO: 5433973 - DNA, 25 bp, Homo sapien
tttaaatggtaggattgtctcatgg

SEQ ID NO: 5433974 - DNA, 25 bp, Homo sapien
ccatggtatagatcgttgtccagaa

SEQ ID NO: 5433975 - DNA, 25 bp, Homo sapien
gctggctctatgttggaattgccaa

SEQ ID NO: 5433976 - DNA, 25 bp, Homo sapien
agtcaaggctattttccaggcccaa

SEQ ID NO: 5433977 - DNA, 25 bp, Homo sapien
gaggagagaagtcaaggctattttc

SEQ ID NO: 5433978 - DNA, 25 bp, Homo sapien
cttgaccagaagcatggcctgcagt

SEQ ID NO: 5433979 - DNA, 25 bp, Homo sapien
ggcccaacctgcaagtacctgttca

SEQ ID NO: 5433980 - DNA, 25 bp, Homo sapien
gaagagccagacctatctgcctgtt

SEQ ID NO: 5433981 - DNA, 25 bp, Homo sapien
taccctccttagctacaagttcagg

SEQ ID NO: 5433982 - DNA, 25 bp, Homo sapien
tagatacggctaaaccagctgaagg

SEQ ID NO: 5433983 - DNA, 25 bp, Homo sapien
ttcaggaacaacacaataaaggaca

SEQ ID NO: 5433984 - DNA, 25 bp, Homo sapien
gaagattatgaccactgagttgggc

SEQ ID NO: 5433985 - DNA, 25 bp, Homo sapien
aaagcactctacctgttcccaaagg

SEQ ID NO: 5433986 - DNA, 25 bp, Homo sapien
gcttttgctcttcggtaggcccaga

SEQ ID NO: 5433987 - DNA, 25 bp, Homo sapien
taaagcccttgaactggcaactgga

SEQ ID NO: 5433988 - DNA, 25 bp, Homo sapien
cctggatttaggtgccccagaatgt

SEQ ID NO: 5433989 - DNA, 25 bp, Homo sapien
cagatgttaaaggtacaatctaaca

SEQ ID NO: 5433990 - DNA, 25 bp, Homo sapien
gaatgttctcaaaaactgttcttat

SEQ ID NO: 5433991 - DNA, 25 bp, Homo sapien
aaatacatcagtcccctggatttag

SEQ ID NO: 5433992 - DNA, 25 bp, Homo sapien
cttccagcaatatatgcgttgcatg

SEQ ID NO: 5433993 - DNA, 25 bp, Homo sapien
ttgcatgtcctcaccaacactaagc

SEQ ID NO: 5433994 - DNA, 25 bp, Homo sapien
aatggctggttcacagggtaagtgt

SEQ ID NO: 5433995 - DNA, 25 bp, Homo sapien
aattttagcaatcttagtgtgggta

SEQ ID NO: 5433996 - DNA, 25 bp, Homo sapien
tattccaactttgtgagaaactgcc

SEQ ID NO: 5433997 - DNA, 25 bp, Homo sapien
ttttcatgtatctagggtaaatttc

SEQ ID NO: 5433998 - DNA, 25 bp, Homo sapien
ccgtccccagccagcatacaatttt

SEQ ID NO: 5433999 - DNA, 25 bp, Homo sapien
gattgctgggtcttctatgtggtta

SEQ ID NO: 5434000 - DNA, 25 bp, Homo sapien
ttttcctaacccaagatcgcaaatg

SEQ ID NO: 5434001 - DNA, 25 bp, Homo sapien
ggacatgtcaagtatcagtttacca

SEQ ID NO: 5434002 - DNA, 25 bp, Homo sapien
taacattagataataggagtactcc

SEQ ID NO: 5434003 - DNA, 25 bp, Homo sapien
tgtggctagccttttgtcaatatag

SEQ ID NO: 5434004 - DNA, 25 bp, Homo sapien
ttctctagtgtagccattagggcct

SEQ ID NO: 5434005 - DNA, 25 bp, Homo sapien
cgtaatggccttggtaagagttctc

SEQ ID NO: 5434006 - DNA, 25 bp, Homo sapien
taagtctccagctatgcttgtgggt

SEQ ID NO: 5434007 - DNA, 25 bp, Homo sapien
gcctttgaaatctgctgagactacc

SEQ ID NO: 5434008 - DNA, 25 bp, Homo sapien
cagtttacccattcaccaagaagga

SEQ ID NO: 5434009 - DNA, 25 bp, Homo sapien
acagtttacccattcaccaagaagg

SEQ ID NO: 5434010 - DNA, 25 bp, Homo sapien
gtttacccattcaccaagaaggaca

SEQ ID NO: 5434011 - DNA, 25 bp, Homo sapien
atttgtttgttccagcactcgttga

SEQ ID NO: 5434012 - DNA, 25 bp, Homo sapien
tcttcttctgggttaaacgtatcta

SEQ ID NO: 5434013 - DNA, 25 bp, Homo sapien
cactgaatctaaaaggttgtcgcca

SEQ ID NO: 5434014 - DNA, 25 bp, Homo sapien
tgaccatgtcttaaacagagcagtt

SEQ ID NO: 5434015 - DNA, 25 bp, Homo sapien
ggctcaactcccacggtaatgctgg

SEQ ID NO: 5434016 - DNA, 25 bp, Homo sapien
gaagcagggcatacagaactaaagg

SEQ ID NO: 5434017 - DNA, 25 bp, Homo sapien
tcaaatgtggtccataggctggcta

SEQ ID NO: 5434018 - DNA, 25 bp, Homo sapien
tatatggtggtagacctggcaaaca

SEQ ID NO: 5434019 - DNA, 25 bp, Homo sapien
cattgattactgaagtgccctggag

SEQ ID NO: 5434020 - DNA, 25 bp, Homo sapien
ggaagtagtctttgccactgcttcc

SEQ ID NO: 5434021 - DNA, 25 bp, Homo sapien
tcttgacaggtaaacactacacgtg

SEQ ID NO: 5434022 - DNA, 25 bp, Homo sapien
agctcttcataacatgggctgcatg

SEQ ID NO: 5434023 - DNA, 25 bp, Homo sapien
gaagcagcatgagagtgaagaaccc

SEQ ID NO: 5434024 - DNA, 25 bp, Homo sapien
gatgacaacactttgactgtggagg

SEQ ID NO: 5434025 - DNA, 25 bp, Homo sapien
gatcttggaatatgcacaccgcctg

SEQ ID NO: 5434026 - DNA, 25 bp, Homo sapien
tgaagaaccctttatgccagaagag

SEQ ID NO: 5434027 - DNA, 25 bp, Homo sapien
catgttttcgttgcctttggacacc

SEQ ID NO: 5434028 - DNA, 25 bp, Homo sapien
cataagcctggctaccttttaggga

SEQ ID NO: 5434029 - DNA, 25 bp, Homo sapien
tcagtatacatagggacagacaagt

SEQ ID NO: 5434030 - DNA, 25 bp, Homo sapien
tagtggtaacacaagcctatagggc

SEQ ID NO: 5434031 - DNA, 25 bp, Homo sapien
catccagagtaagggcaaatgggct

SEQ ID NO: 5434032 - DNA, 25 bp, Homo sapien
gccttccccagttgtcgcttatgta

SEQ ID NO: 5434033 - DNA, 25 bp, Homo sapien
agcacaacaaagagcctccaggtgg

SEQ ID NO: 5434034 - DNA, 25 bp, Homo sapien
gactgaaagactgactagctcctgg

SEQ ID NO: 5434035 - DNA, 25 bp, Homo sapien
tatatcttttgaacaaaagtcttct

SEQ ID NO: 5434036 - DNA, 25 bp, Homo sapien
cttgcctagaactttaaggttctga

SEQ ID NO: 5434037 - DNA, 25 bp, Homo sapien
gaatatatcttttgaacaaaagtct

SEQ ID NO: 5434038 - DNA, 25 bp, Homo sapien
agaactttaaggttctgagtctgga

SEQ ID NO: 5434039 - DNA, 25 bp, Homo sapien
gctacagtaactcagttactttaaa

SEQ ID NO: 5434040 - DNA, 25 bp, Homo sapien
gagttaatactgaagagggacgtta

SEQ ID NO: 5434041 - DNA, 25 bp, Homo sapien
aaaacacactcatatatggagaaaa

SEQ ID NO: 5434042 - DNA, 25 bp, Homo sapien
gcattaacacagtatccaaaacaaa

SEQ ID NO: 5434043 - DNA, 25 bp, Homo sapien
ttcaattagatataccactcaagag

SEQ ID NO: 5434044 - DNA, 25 bp, Homo sapien
ccatcttctaaaacaaggattgaca

SEQ ID NO: 5434045 - DNA, 25 bp, Homo sapien
aagagaatctccaaagatcttcaca

SEQ ID NO: 5434046 - DNA, 25 bp, Homo sapien
caacatacaagccaaacgaagatcc

SEQ ID NO: 5434047 - DNA, 25 bp, Homo sapien
ggctttgtaggctttaccatctcta

SEQ ID NO: 5434048 - DNA, 25 bp, Homo sapien
cagtaaataattaggctttgtaggc

SEQ ID NO: 5434049 - DNA, 25 bp, Homo sapien
catctctattgcaactactcatttc

SEQ ID NO: 5434050 - DNA, 25 bp, Homo sapien
aaaccagacagtaaataattaggct

SEQ ID NO: 5434051 - DNA, 25 bp, Homo sapien
ttccaataaagctttatttgtgaat

SEQ ID NO: 5434052 - DNA, 25 bp, Homo sapien
gttccaataaagctttatttgtgaa

SEQ ID NO: 5434053 - DNA, 25 bp, Homo sapien
cacatgctgtagattgccaacccat

SEQ ID NO: 5434054 - DNA, 25 bp, Homo sapien
tctgataattttcacgtcatgaatt

SEQ ID NO: 5434055 - DNA, 25 bp, Homo sapien
tggatttggcccacatgctgtagat

SEQ ID NO: 5434056 - DNA, 25 bp, Homo sapien
cacgtcatgaattattagtctttga

SEQ ID NO: 5434057 - DNA, 25 bp, Homo sapien
cattttggactctggtctttatcaa

SEQ ID NO: 5434058 - DNA, 25 bp, Homo sapien
gcttcccaaagacttaaagtgatta

SEQ ID NO: 5434059 - DNA, 25 bp, Homo sapien
aagtgattattcaaatcttcctcag

SEQ ID NO: 5434060 - DNA, 25 bp, Homo sapien
cagtaacttcttttagatcagctgg

SEQ ID NO: 5434061 - DNA, 25 bp, Homo sapien
ctgtcaagagaagatacaaatgtta

SEQ ID NO: 5434062 - DNA, 25 bp, Homo sapien
tacttactgaattgacagaaattct

SEQ ID NO: 5434063 - DNA, 25 bp, Homo sapien
attgacagaaattcttatactaggc

SEQ ID NO: 5434064 - DNA, 25 bp, Homo sapien
gagaagatacaaatgttaataccat

SEQ ID NO: 5434065 - DNA, 25 bp, Homo sapien
tatgaggcaatctgtaacttctccg

SEQ ID NO: 5434066 - DNA, 25 bp, Homo sapien
tagtatccccacaggattatgaggc

SEQ ID NO: 5434067 - DNA, 25 bp, Homo sapien
taaagaagcagtatgggaaccaagg

SEQ ID NO: 5434068 - DNA, 25 bp, Homo sapien
tacaattaaatgcagatacgggagg

SEQ ID NO: 5434069 - DNA, 25 bp, Homo sapien
acttatggtccaatgaacatttgag

SEQ ID NO: 5434070 - DNA, 25 bp, Homo sapien
ggattttaggatttgggatgcataa

SEQ ID NO: 5434071 - DNA, 25 bp, Homo sapien
ttgcattatacttatggtccaatga

SEQ ID NO: 5434072 - DNA, 25 bp, Homo sapien
cagcatatgctcacaaatcccattt

SEQ ID NO: 5434073 - DNA, 25 bp, Homo sapien
taacgccttcatgaaagtcatgacc

SEQ ID NO: 5434074 - DNA, 25 bp, Homo sapien
cgccttcatgaaagtcatgacctct

SEQ ID NO: 5434075 - DNA, 25 bp, Homo sapien
ctctaacgccttcatgaaagtcatg

SEQ ID NO: 5434076 - DNA, 25 bp, Homo sapien
tctaacgccttcatgaaagtcatga

SEQ ID NO: 5434077 - DNA, 25 bp, Homo sapien
tactgaggtccacagatcctatgac

SEQ ID NO: 5434078 - DNA, 25 bp, Homo sapien
agcccaatttcaccagtcctttaat

SEQ ID NO: 5434079 - DNA, 25 bp, Homo sapien
tatttgctcaagtatctccactgct

SEQ ID NO: 5434080 - DNA, 25 bp, Homo sapien
gagactgaaccacctctgatagccc

SEQ ID NO: 5434081 - DNA, 25 bp, Homo sapien
taaaacacctgcaggcaactgtggc

SEQ ID NO: 5434082 - DNA, 25 bp, Homo sapien
tattaactatgtgacctcggactag

SEQ ID NO: 5434083 - DNA, 25 bp, Homo sapien
caatgccgtggaggaaaggaccatc

SEQ ID NO: 5434084 - DNA, 25 bp, Homo sapien
catcgatgtaggcaatatagctgag

SEQ ID NO: 5434085 - DNA, 25 bp, Homo sapien
ttaaagtataagatcatggcattcc

SEQ ID NO: 5434086 - DNA, 25 bp, Homo sapien
caaaatgttagagttccttagggct

SEQ ID NO: 5434087 - DNA, 25 bp, Homo sapien
gcagcctgagtgatcaattctttaa

SEQ ID NO: 5434088 - DNA, 25 bp, Homo sapien
tcagccaaagtccttagagagacct

SEQ ID NO: 5434089 - DNA, 25 bp, Homo sapien
taacagtgtctacgacatagtaagc

SEQ ID NO: 5434090 - DNA, 25 bp, Homo sapien
catgagggcaggtgttatcctactc

SEQ ID NO: 5434091 - DNA, 25 bp, Homo sapien
cctggagcacacctatgtacctgga

SEQ ID NO: 5434092 - DNA, 25 bp, Homo sapien
tgtacctgggtacctctaacagtgt

SEQ ID NO: 5434093 - DNA, 25 bp, Homo sapien
tctaggcagtgcactaaaagtgtaa

SEQ ID NO: 5434094 - DNA, 25 bp, Homo sapien
tggaatgtgtgaggtatacaggaga

SEQ ID NO: 5434095 - DNA, 25 bp, Homo sapien
tatacaggagagtggtcaagagtgc

SEQ ID NO: 5434096 - DNA, 25 bp, Homo sapien
aatcaatctaggcagtgcactaaaa

SEQ ID NO: 5434097 - DNA, 25 bp, Homo sapien
ccatagttagtacttcttgcaaggt

SEQ ID NO: 5434098 - DNA, 25 bp, Homo sapien
tactccatagttagtacttcttgca

SEQ ID NO: 5434099 - DNA, 25 bp, Homo sapien
ctccatagttagtacttcttgcaag

SEQ ID NO: 5434100 - DNA, 25 bp, Homo sapien
gatactccatagttagtacttcttg

SEQ ID NO: 5434101 - DNA, 25 bp, Homo sapien
gccttagtgtgatctttagagatgt

SEQ ID NO: 5434102 - DNA, 25 bp, Homo sapien
tgccttagtgtgatctttagagatg

SEQ ID NO: 5434103 - DNA, 25 bp, Homo sapien
gagttgccttagtgtgatctttaga

SEQ ID NO: 5434104 - DNA, 25 bp, Homo sapien
gttgccttagtgtgatctttagaga

SEQ ID NO: 5434105 - DNA, 25 bp, Homo sapien
taacactcaacaggtgacgtccggg

SEQ ID NO: 5434106 - DNA, 25 bp, Homo sapien
gatcccctcggtttagcagagcaaa

SEQ ID NO: 5434107 - DNA, 25 bp, Homo sapien
cattttcagagaacccggagtgtgc

SEQ ID NO: 5434108 - DNA, 25 bp, Homo sapien
gagatcccctcggtttagcagctag

SEQ ID NO: 5434109 - DNA, 25 bp, Homo sapien
caagatctcaactagttgctggagg

SEQ ID NO: 5434110 - DNA, 25 bp, Homo sapien
gaggtgcaagtacccactggaagag

SEQ ID NO: 5434111 - DNA, 25 bp, Homo sapien
gaagaggactcttaggcgcttacac

SEQ ID NO: 5434112 - DNA, 25 bp, Homo sapien
caactatacgttggtgcagaagcaa

SEQ ID NO: 5434113 - DNA, 25 bp, Homo sapien
ctgctttagctgtgttgtgattctg

SEQ ID NO: 5434114 - DNA, 25 bp, Homo sapien
tcactttccatgtattgtgcggttt

SEQ ID NO: 5434115 - DNA, 25 bp, Homo sapien
ttcactttccatgtattgtgcggtt

SEQ ID NO: 5434116 - DNA, 25 bp, Homo sapien
ccttcaggagctattgtaatacagg

SEQ ID NO: 5434117 - DNA, 25 bp, Homo sapien
tattgtaatacaggcctggtagtga

SEQ ID NO: 5434118 - DNA, 25 bp, Homo sapien
ggagctattgtaatacaggcctggt

SEQ ID NO: 5434119 - DNA, 25 bp, Homo sapien
ttcaggagctattgtaatacaggcc

SEQ ID NO: 5434120 - DNA, 25 bp, Homo sapien
catgtgatcagctgcagaaatggag

SEQ ID NO: 5434121 - DNA, 25 bp, Homo sapien
agtactgctaactttatgtaatggt

SEQ ID NO: 5434122 - DNA, 25 bp, Homo sapien
tctggtcgtacaaagggtagttgca

SEQ ID NO: 5434123 - DNA, 25 bp, Homo sapien
cttcatattggcatttaagtactgc

SEQ ID NO: 5434124 - DNA, 25 bp, Homo sapien
ggtccacgaatgtcaatacctggta

SEQ ID NO: 5434125 - DNA, 25 bp, Homo sapien
gaagtctgaaatactccaagtctca

SEQ ID NO: 5434126 - DNA, 25 bp, Homo sapien
cattatggaatcatgatgtggagcc

SEQ ID NO: 5434127 - DNA, 25 bp, Homo sapien
cataatcatactagaggtccacgaa

SEQ ID NO: 5434128 - DNA, 25 bp, Homo sapien
gaaccatcttgctgtaagttttcaa

SEQ ID NO: 5434129 - DNA, 25 bp, Homo sapien
cttccacagtattggctgaaaaaca

SEQ ID NO: 5434130 - DNA, 25 bp, Homo sapien
attgctctagggcaaaagatgaacc

SEQ ID NO: 5434131 - DNA, 25 bp, Homo sapien
ttcttccacagtattggctgaaaaa

SEQ ID NO: 5434132 - DNA, 25 bp, Homo sapien
tttgtccatgtgttcctcaagtata

SEQ ID NO: 5434133 - DNA, 25 bp, Homo sapien
ctcaagtataaaagacttgtctcga

SEQ ID NO: 5434134 - DNA, 25 bp, Homo sapien
aagacttgtctcgatcaatcttaga

SEQ ID NO: 5434135 - DNA, 25 bp, Homo sapien
tataaaagacttgtctcgatcaatc

SEQ ID NO: 5434136 - DNA, 25 bp, Homo sapien
gagcagatcactctaaactctaagg

SEQ ID NO: 5434137 - DNA, 25 bp, Homo sapien
tgggttaaaacacaagattcgcact

SEQ ID NO: 5434138 - DNA, 25 bp, Homo sapien
gatcaaaacgctatcagtggtcacc

SEQ ID NO: 5434139 - DNA, 25 bp, Homo sapien
cgacaacaggagactatcaaatgct

SEQ ID NO: 5434140 - DNA, 25 bp, Homo sapien
gagatttcaaggctaacaaatcttc

SEQ ID NO: 5434141 - DNA, 25 bp, Homo sapien
atttcaaggctaacaaatcttcctc

SEQ ID NO: 5434142 - DNA, 25 bp, Homo sapien
aaggagatttcaaggctaacaaatc

SEQ ID NO: 5434143 - DNA, 25 bp, Homo sapien
gatttcaaggctaacaaatcttcct

SEQ ID NO: 5434144 - DNA, 25 bp, Homo sapien
caaattattagtggctaccacagac

SEQ ID NO: 5434145 - DNA, 25 bp, Homo sapien
tcagcctattgagtacttggaacca

SEQ ID NO: 5434146 - DNA, 25 bp, Homo sapien
caggactttttactgttcccagagc

SEQ ID NO: 5434147 - DNA, 25 bp, Homo sapien
aatgaacaggtattcccacacagca

SEQ ID NO: 5434148 - DNA, 25 bp, Homo sapien
ttctaatcgcatccccaaagtatat

SEQ ID NO: 5434149 - DNA, 25 bp, Homo sapien
ttttcatatcctctacagccctgag

SEQ ID NO: 5434150 - DNA, 25 bp, Homo sapien
tctttttcatatcctctacagccct

SEQ ID NO: 5434151 - DNA, 25 bp, Homo sapien
tatttatcttttgtacccacttcta

SEQ ID NO: 5434152 - DNA, 25 bp, Homo sapien
ggttcaggaataagataagccagtc

SEQ ID NO: 5434153 - DNA, 25 bp, Homo sapien
gagtgtgcattacctaggataggcc

SEQ ID NO: 5434154 - DNA, 25 bp, Homo sapien
caattactttcaatgcgctagggaa

SEQ ID NO: 5434155 - DNA, 25 bp, Homo sapien
aatacatcctaagtctcttgctggg

SEQ ID NO: 5434156 - DNA, 25 bp, Homo sapien
aagttttccttggagtcgtggcaag

SEQ ID NO: 5434157 - DNA, 25 bp, Homo sapien
cctgttaatgcaaggaagtaaccaa

SEQ ID NO: 5434158 - DNA, 25 bp, Homo sapien
tctacaaagtgtgtagcaattcctg

SEQ ID NO: 5434159 - DNA, 25 bp, Homo sapien
ccttttagtctgaatcctgttaatg

SEQ ID NO: 5434160 - DNA, 25 bp, Homo sapien
tgtagccactcgaaattgcccatgg

SEQ ID NO: 5434161 - DNA, 25 bp, Homo sapien
tctgtagccactcgaaattgcccat

SEQ ID NO: 5434162 - DNA, 25 bp, Homo sapien
tagccactcgaaattgcccatggac

SEQ ID NO: 5434163 - DNA, 25 bp, Homo sapien
ttttctgtagccactcgaaattgcc

SEQ ID NO: 5434164 - DNA, 25 bp, Homo sapien
tcattgtgatgtcatataaggttac

SEQ ID NO: 5434165 - DNA, 25 bp, Homo sapien
caaacatttgggatttccctattat

SEQ ID NO: 5434166 - DNA, 25 bp, Homo sapien
taaagttgtacataacatcctcttg

SEQ ID NO: 5434167 - DNA, 25 bp, Homo sapien
tccgtatttgtaacatactttgctt

SEQ ID NO: 5434168 - DNA, 25 bp, Homo sapien
tagattaacagaacagcaggctgca

SEQ ID NO: 5434169 - DNA, 25 bp, Homo sapien
aatggcaagattaatccctcaacgc

SEQ ID NO: 5434170 - DNA, 25 bp, Homo sapien
tttaaggcatagttaaccacccatg

SEQ ID NO: 5434171 - DNA, 25 bp, Homo sapien
caagtagatttgtcatcgcacatgc

SEQ ID NO: 5434172 - DNA, 25 bp, Homo sapien
aatcaagttgcttcagacctgtacg

SEQ ID NO: 5434173 - DNA, 25 bp, Homo sapien
ttcagacctgtacggatccaccact

SEQ ID NO: 5434174 - DNA, 25 bp, Homo sapien
gacctgtacggatccaccactaaca

SEQ ID NO: 5434175 - DNA, 25 bp, Homo sapien
gttgcttcagacctgtacggatcca

SEQ ID NO: 5434176 - DNA, 25 bp, Homo sapien
attataccaacctatacaagcccca

SEQ ID NO: 5434177 - DNA, 25 bp, Homo sapien
ataccaacctatacaagccccagaa

SEQ ID NO: 5434178 - DNA, 25 bp, Homo sapien
tattcttggttgttacatatgagga

SEQ ID NO: 5434179 - DNA, 25 bp, Homo sapien
ggccagtgccttcagaaatgatgtg

SEQ ID NO: 5434180 - DNA, 25 bp, Homo sapien
cattgtaattccatgaataagtgca

SEQ ID NO: 5434181 - DNA, 25 bp, Homo sapien
cccacccattgtaattccatgaata

SEQ ID NO: 5434182 - DNA, 25 bp, Homo sapien
catgaataagtgcaacataaggttt

SEQ ID NO: 5434183 - DNA, 25 bp, Homo sapien
ttccatgaataagtgcaacataagg

SEQ ID NO: 5434184 - DNA, 25 bp, Homo sapien
aactggagctatcttctgttttgcc

SEQ ID NO: 5434185 - DNA, 25 bp, Homo sapien
gcattattcagcatatattcttctc

SEQ ID NO: 5434186 - DNA, 25 bp, Homo sapien
tttgccttttcagcttccgagatca

SEQ ID NO: 5434187 - DNA, 25 bp, Homo sapien
tattcttctctgaagaaaactggag

SEQ ID NO: 5434188 - DNA, 25 bp, Homo sapien
ctgacgatcacaggccagacgaaag

SEQ ID NO: 5434189 - DNA, 25 bp, Homo sapien
ctgtaaactgacgatcacaggccag

SEQ ID NO: 5434190 - DNA, 25 bp, Homo sapien
ggccagacgaaaggctaattcaagg

SEQ ID NO: 5434191 - DNA, 25 bp, Homo sapien
tcacaggccagacgaaaggctaatt

SEQ ID NO: 5434192 - DNA, 25 bp, Homo sapien
tatcacccccggcacagaaagcctt

SEQ ID NO: 5434193 - DNA, 25 bp, Homo sapien
aaagtttcaggatcttgttcccact

SEQ ID NO: 5434194 - DNA, 25 bp, Homo sapien
tcctgctccctttataatgatcagg

SEQ ID NO: 5434195 - DNA, 25 bp, Homo sapien
tctgatatcacccccggcacagaaa

SEQ ID NO: 5434196 - DNA, 25 bp, Homo sapien
tgcatatcccagagaattatgtgat

SEQ ID NO: 5434197 - DNA, 25 bp, Homo sapien
ttagatgcatatcccagagaattat

SEQ ID NO: 5434198 - DNA, 25 bp, Homo sapien
gatgcatatcccagagaattatgtg

SEQ ID NO: 5434199 - DNA, 25 bp, Homo sapien
gcatatcccagagaattatgtgatt

SEQ ID NO: 5434200 - DNA, 25 bp, Homo sapien
tagctgtggataaatctgccgaatc

SEQ ID NO: 5434201 - DNA, 25 bp, Homo sapien
ttgaggaactttggtctgtttagtg

SEQ ID NO: 5434202 - DNA, 25 bp, Homo sapien
catattaagagtcagtgcattgagg

SEQ ID NO: 5434203 - DNA, 25 bp, Homo sapien
tagtgttatgactcccgtgcaacct

SEQ ID NO: 5434204 - DNA, 25 bp, Homo sapien
gcagtatggtattagtccttttgaa

SEQ ID NO: 5434205 - DNA, 25 bp, Homo sapien
caaatggtgcagtatggtattagtc

SEQ ID NO: 5434206 - DNA, 25 bp, Homo sapien
ggtgcagtatggtattagtcctttt

SEQ ID NO: 5434207 - DNA, 25 bp, Homo sapien
gtatggtattagtccttttgaatgc

SEQ ID NO: 5434208 - DNA, 25 bp, Homo sapien
agtgccgctgaagagcctgcccttg

SEQ ID NO: 5434209 - DNA, 25 bp, Homo sapien
tcgaaacttcgaggccagcagtctc

SEQ ID NO: 5434210 - DNA, 25 bp, Homo sapien
ggtctcacagcggcgcctctgagcg

SEQ ID NO: 5434211 - DNA, 25 bp, Homo sapien
ctgagcgcgactcgaaacttcgagg

SEQ ID NO: 5434212 - DNA, 25 bp, Homo sapien
tccgaagctaaagcagcagagcgag

SEQ ID NO: 5434213 - DNA, 25 bp, Homo sapien
caggaagccagagcgaccgtttccg

SEQ ID NO: 5434214 - DNA, 25 bp, Homo sapien
gcgccgccgggcacagatgacaagt

SEQ ID NO: 5434215 - DNA, 25 bp, Homo sapien
cagagcgagaatctcccggaccgtt

SEQ ID NO: 5434216 - DNA, 25 bp, Homo sapien
caagaacgacgcctggaggaaatag

SEQ ID NO: 5434217 - DNA, 25 bp, Homo sapien
acgacgcctggaggaaatagttgag

SEQ ID NO: 5434218 - DNA, 25 bp, Homo sapien
gaacgacgcctggaggaaatagttg

SEQ ID NO: 5434219 - DNA, 25 bp, Homo sapien
gggcaagaacgacgcctggaggaaa

SEQ ID NO: 5434220 - DNA, 25 bp, Homo sapien
aatgacacaccttatatcacagaag

SEQ ID NO: 5434221 - DNA, 25 bp, Homo sapien
gacttgtgaaaagcatttaggatca

SEQ ID NO: 5434222 - DNA, 25 bp, Homo sapien
tactcaatacgtatgaagggatttg

SEQ ID NO: 5434223 - DNA, 25 bp, Homo sapien
cactgttggcacattctattacaag

SEQ ID NO: 5434224 - DNA, 25 bp, Homo sapien
gcatgagaccccagctggaatagtt

SEQ ID NO: 5434225 - DNA, 25 bp, Homo sapien
ggaatcacgttagtagagcccagtg

SEQ ID NO: 5434226 - DNA, 25 bp, Homo sapien
catggaggtacctaggagttagcac

SEQ ID NO: 5434227 - DNA, 25 bp, Homo sapien
tggtcaaaaccaactggcatgagac

SEQ ID NO: 5434228 - DNA, 25 bp, Homo sapien
caagttggagaacccaggtgcaggc

SEQ ID NO: 5434229 - DNA, 25 bp, Homo sapien
cacactgaacaagagggatgaccca

SEQ ID NO: 5434230 - DNA, 25 bp, Homo sapien
gaagcgccgctttagaaggcccagt

SEQ ID NO: 5434231 - DNA, 25 bp, Homo sapien
aatggactagattccgccaggtgca

SEQ ID NO: 5434232 - DNA, 25 bp, Homo sapien
gaatcatcgcgctccacttgtgacg

SEQ ID NO: 5434233 - DNA, 25 bp, Homo sapien
cgcagtcccctatgagagtacagat

SEQ ID NO: 5434234 - DNA, 25 bp, Homo sapien
taaaagtgaattcgtgggcggcgac

SEQ ID NO: 5434235 - DNA, 25 bp, Homo sapien
ctgaggccaagctcggatccggtgc

SEQ ID NO: 5434236 - DNA, 25 bp, Homo sapien
tccgtttctcgagggaaaggctgct

SEQ ID NO: 5434237 - DNA, 25 bp, Homo sapien
ctccccgccgcttccgtttctcgag

SEQ ID NO: 5434238 - DNA, 25 bp, Homo sapien
ctcatccccggcttaggtaacacgt

SEQ ID NO: 5434239 - DNA, 25 bp, Homo sapien
gtcctcatccccggcttaggtaaca

SEQ ID NO: 5434240 - DNA, 25 bp, Homo sapien
gggtaggtgagtcgatggcgccggg

SEQ ID NO: 5434241 - DNA, 25 bp, Homo sapien
gggagggttcctcgcctctgcgcgc

SEQ ID NO: 5434242 - DNA, 25 bp, Homo sapien
ccgtcgcctctccgcgggtaggtga

SEQ ID NO: 5434243 - DNA, 25 bp, Homo sapien
tggtgagcggcgcgcgccgtcgcct

SEQ ID NO: 5434244 - DNA, 25 bp, Homo sapien
ccggcagcgaggccgcccccggccg

SEQ ID NO: 5434245 - DNA, 25 bp, Homo sapien
gcagcgaggccgcccccggccgggc

SEQ ID NO: 5434246 - DNA, 25 bp, Homo sapien
ctgccccggcagcgaggccgccccc

SEQ ID NO: 5434247 - DNA, 25 bp, Homo sapien
tgccccggcagcgaggccgcccccg

SEQ ID NO: 5434248 - DNA, 25 bp, Homo sapien
tcttgatcttagctgatttggaaaa

SEQ ID NO: 5434249 - DNA, 25 bp, Homo sapien
ttccatatacaagctatcagaacag

SEQ ID NO: 5434250 - DNA, 25 bp, Homo sapien
caggcttccatatacaagctatcag

SEQ ID NO: 5434251 - DNA, 25 bp, Homo sapien
ttagcacaggcttccatatacaagc

SEQ ID NO: 5434252 - DNA, 25 bp, Homo sapien
gatgtactggtacaggaagttataa

SEQ ID NO: 5434253 - DNA, 25 bp, Homo sapien
agacgctggctgatgtactggtaca

SEQ ID NO: 5434254 - DNA, 25 bp, Homo sapien
gctgctgatcgaagaaaagaaagag

SEQ ID NO: 5434255 - DNA, 25 bp, Homo sapien
gcagttgacttcaagacgctggctg

SEQ ID NO: 5434256 - DNA, 25 bp, Homo sapien
catacctagaggaactctaaccccg

SEQ ID NO: 5434257 - DNA, 25 bp, Homo sapien
tcctgttgctggttaacattcacct

SEQ ID NO: 5434258 - DNA, 25 bp, Homo sapien
tgtacctgtataaactgaactgtga

SEQ ID NO: 5434259 - DNA, 25 bp, Homo sapien
gcacctgcagagacgcatacctaga

SEQ ID NO: 5434260 - DNA, 25 bp, Homo sapien
cacataatgtggaactggattggga

SEQ ID NO: 5434261 - DNA, 25 bp, Homo sapien
aggaacaattgttgatcatcaccaa

SEQ ID NO: 5434262 - DNA, 25 bp, Homo sapien
gaaagattcttgattaacctagtga

SEQ ID NO: 5434263 - DNA, 25 bp, Homo sapien
gcctcatactcagtggcaaagcaat

SEQ ID NO: 5434264 - DNA, 25 bp, Homo sapien
tgagtaatccccttcagtccaatga

SEQ ID NO: 5434265 - DNA, 25 bp, Homo sapien
cagtgacaacatcctcctgaattgc

SEQ ID NO: 5434266 - DNA, 25 bp, Homo sapien
ctggtaaatgttggcccttctctgg

SEQ ID NO: 5434267 - DNA, 25 bp, Homo sapien
tagtacctcaatactgatgactgcc

SEQ ID NO: 5434268 - DNA, 25 bp, Homo sapien
agcccagcgtgcgccgctgtctccg

SEQ ID NO: 5434269 - DNA, 25 bp, Homo sapien
cccagcgtgcgccgctgtctccgct

SEQ ID NO: 5434270 - DNA, 25 bp, Homo sapien
gcccagcgtgcgccgctgtctccgc

SEQ ID NO: 5434271 - DNA, 25 bp, Homo sapien
ccagcgtgcgccgctgtctccgctc

SEQ ID NO: 5434272 - DNA, 25 bp, Homo sapien
caaagtgaaaggtggcatactgaga

SEQ ID NO: 5434273 - DNA, 25 bp, Homo sapien
cctggtcttgctagtggtggctgtc

SEQ ID NO: 5434274 - DNA, 25 bp, Homo sapien
cagaacaatctggtagaaggtagga

SEQ ID NO: 5434275 - DNA, 25 bp, Homo sapien
tggagaaaccaatttacctgctgtg

SEQ ID NO: 5434276 - DNA, 25 bp, Homo sapien
ttgccataaaggaaccatgtcacaa

SEQ ID NO: 5434277 - DNA, 25 bp, Homo sapien
aggctggaaactgggctgacaggac

SEQ ID NO: 5434278 - DNA, 25 bp, Homo sapien
tctttcatcatttggctttgccata

SEQ ID NO: 5434279 - DNA, 25 bp, Homo sapien
ggctttgccataaaggaaccatgtc

SEQ ID NO: 5434280 - DNA, 25 bp, Homo sapien
tcataattgcagcagtatgttagag

SEQ ID NO: 5434281 - DNA, 25 bp, Homo sapien
tggtcataattgcagcagtatgtta

SEQ ID NO: 5434282 - DNA, 25 bp, Homo sapien
tttccctgtgtctatactggtcata

SEQ ID NO: 5434283 - DNA, 25 bp, Homo sapien
tgtgtctatactggtcataattgca

SEQ ID NO: 5434284 - DNA, 25 bp, Homo sapien
tcccaaagccattgagaatgttggc

SEQ ID NO: 5434285 - DNA, 25 bp, Homo sapien
gaaaagttgatttccctgcttcgca

SEQ ID NO: 5434286 - DNA, 25 bp, Homo sapien
agcttcagccctcatcactaggcaa

SEQ ID NO: 5434287 - DNA, 25 bp, Homo sapien
taggcaacactgagttatgatggcc

SEQ ID NO: 5434288 - DNA, 25 bp, Homo sapien
ttctgacggtctctcctgaaacctt

SEQ ID NO: 5434289 - DNA, 25 bp, Homo sapien
cccactagactggttgcccttcaaa

SEQ ID NO: 5434290 - DNA, 25 bp, Homo sapien
cattcaggtgtattggtattctacc

SEQ ID NO: 5434291 - DNA, 25 bp, Homo sapien
gtatcccttgtctgtctttcgcttg

SEQ ID NO: 5434292 - DNA, 25 bp, Homo sapien
tcttcgatccctttgttgtcaccac

SEQ ID NO: 5434293 - DNA, 25 bp, Homo sapien
cagatcttcgatccctttgttgtca

SEQ ID NO: 5434294 - DNA, 25 bp, Homo sapien
tctcagatcttcgatccctttgttg

SEQ ID NO: 5434295 - DNA, 25 bp, Homo sapien
ttaagcaattgtgagtattttttct

SEQ ID NO: 5434296 - DNA, 25 bp, Homo sapien
ctgaggcacattttgtaagaccatt

SEQ ID NO: 5434297 - DNA, 25 bp, Homo sapien
tactcctttggtaagcttagacttg

SEQ ID NO: 5434298 - DNA, 25 bp, Homo sapien
catgctaagaaaagatggttctctt

SEQ ID NO: 5434299 - DNA, 25 bp, Homo sapien
tgtctgagacatatgcagcattttc

SEQ ID NO: 5434300 - DNA, 25 bp, Homo sapien
cagatttgttgcatgtgtatagata

SEQ ID NO: 5434301 - DNA, 25 bp, Homo sapien
tctggtcactggaggaatagcagta

SEQ ID NO: 5434302 - DNA, 25 bp, Homo sapien
tctgcagccgggtgttcaatgtgag

SEQ ID NO: 5434303 - DNA, 25 bp, Homo sapien
tgcaggatgaaccagaacagatagc

SEQ ID NO: 5434304 - DNA, 25 bp, Homo sapien
gaggtggcacatgatagtctggtca

SEQ ID NO: 5434305 - DNA, 25 bp, Homo sapien
ttctaccaatccagatgaaagtttt

SEQ ID NO: 5434306 - DNA, 25 bp, Homo sapien
tgattcatgtactatctttgctgat

SEQ ID NO: 5434307 - DNA, 25 bp, Homo sapien
gctgatgattcatgtactatctttg

SEQ ID NO: 5434308 - DNA, 25 bp, Homo sapien
tgtgctgtttttttgagtcatcagc

SEQ ID NO: 5434309 - DNA, 25 bp, Homo sapien
taaaaatctccaatcgcttgaacct

SEQ ID NO: 5434310 - DNA, 25 bp, Homo sapien
ttaaaaatctccaatcgcttgaacc

SEQ ID NO: 5434311 - DNA, 25 bp, Homo sapien
ttcatcaaagaaggaacatgccgtt

SEQ ID NO: 5434312 - DNA, 25 bp, Homo sapien
cattggaaagttgcattgataagcc

SEQ ID NO: 5434313 - DNA, 25 bp, Homo sapien
cacctggtcaatccattttgggaac

SEQ ID NO: 5434314 - DNA, 25 bp, Homo sapien
cattggcatgtagagaacagctcca

SEQ ID NO: 5434315 - DNA, 25 bp, Homo sapien
ctgtgccttgggcttatctggtaag

SEQ ID NO: 5434316 - DNA, 25 bp, Homo sapien
cctaatgacttaggtgtcactgtct

SEQ ID NO: 5434317 - DNA, 25 bp, Homo sapien
gcatttctgtgggactggagaagca

SEQ ID NO: 5434318 - DNA, 25 bp, Homo sapien
gaacggaagagaatatgttgcccca

SEQ ID NO: 5434319 - DNA, 25 bp, Homo sapien
ttttctatggactgaatggtgtccc

SEQ ID NO: 5434320 - DNA, 25 bp, Homo sapien
cttaatgagagcctgataccctcca

SEQ ID NO: 5434321 - DNA, 25 bp, Homo sapien
tgcagccacggttcatggagcccct

SEQ ID NO: 5434322 - DNA, 25 bp, Homo sapien
ttacaagaatacatgctagagagct

SEQ ID NO: 5434323 - DNA, 25 bp, Homo sapien
agaagacctggttgagtcttgcttc

SEQ ID NO: 5434324 - DNA, 25 bp, Homo sapien
tctgcagtttgttgatctgcacgac

SEQ ID NO: 5434325 - DNA, 25 bp, Homo sapien
caagattttaaggttaagtgatcac

SEQ ID NO: 5434326 - DNA, 25 bp, Homo sapien
cacgaccctggcaacttggtgaacc

SEQ ID NO: 5434327 - DNA, 25 bp, Homo sapien
caagttgacaggtttgaggtaggaa

SEQ ID NO: 5434328 - DNA, 25 bp, Homo sapien
cagagattgctggaactgatgccct

SEQ ID NO: 5434329 - DNA, 25 bp, Homo sapien
tcctgtttcagaagattatgggcag

SEQ ID NO: 5434330 - DNA, 25 bp, Homo sapien
gcatcgtgcggaggtctcagagatt

SEQ ID NO: 5434331 - DNA, 25 bp, Homo sapien
aactctagtataaccaaagcagtta

SEQ ID NO: 5434332 - DNA, 25 bp, Homo sapien
agcgtgcagcatatgccccgccatg

SEQ ID NO: 5434333 - DNA, 25 bp, Homo sapien
aagcagttatgaccactcctgagaa

SEQ ID NO: 5434334 - DNA, 25 bp, Homo sapien
ctcaactatgcatgtgccctggatg

SEQ ID NO: 5434335 - DNA, 25 bp, Homo sapien
gctggacttgatccacacccttgtg

SEQ ID NO: 5434336 - DNA, 25 bp, Homo sapien
tattagacatggacatccaagggtg

SEQ ID NO: 5434337 - DNA, 25 bp, Homo sapien
gaactctagaataaactcctgtgca

SEQ ID NO: 5434338 - DNA, 25 bp, Homo sapien
cattggcctggcctgcaatacggct

SEQ ID NO: 5434339 - DNA, 25 bp, Homo sapien
catcgacttggtacagcaacagaca

SEQ ID NO: 5434340 - DNA, 25 bp, Homo sapien
gctgggctagcaatattacctgtca

SEQ ID NO: 5434341 - DNA, 25 bp, Homo sapien
gatgtcatgccacgcattgagccca

SEQ ID NO: 5434342 - DNA, 25 bp, Homo sapien
tcaagataccttaactgggctcagt

SEQ ID NO: 5434343 - DNA, 25 bp, Homo sapien
ttacagttggttacacaagtgcttg

SEQ ID NO: 5434344 - DNA, 25 bp, Homo sapien
gaaattgctgctggtgatgttctac

SEQ ID NO: 5434345 - DNA, 25 bp, Homo sapien
ggactcttaattacaggacattctt

SEQ ID NO: 5434346 - DNA, 25 bp, Homo sapien
cacttctttatgtggatgttctgtc

SEQ ID NO: 5434347 - DNA, 25 bp, Homo sapien
agaacaatggctgggtggatcgcac

SEQ ID NO: 5434348 - DNA, 25 bp, Homo sapien
tacacttggatgtctcgcttcacaa

SEQ ID NO: 5434349 - DNA, 25 bp, Homo sapien
tggatcgcacgtaaagcttgccact

SEQ ID NO: 5434350 - DNA, 25 bp, Homo sapien
gcaaacgttacaactgcagccagaa

SEQ ID NO: 5434351 - DNA, 25 bp, Homo sapien
aacagtaaattaccgagtgctgagc

SEQ ID NO: 5434352 - DNA, 25 bp, Homo sapien
taatacatacattgtccagcaggca

SEQ ID NO: 5434353 - DNA, 25 bp, Homo sapien
gagcaaccctgctttactggcttat

SEQ ID NO: 5434354 - DNA, 25 bp, Homo sapien
ggcttattaatcctgccatgggtca

SEQ ID NO: 5434355 - DNA, 25 bp, Homo sapien
caattccttccagtactgctgaggt

SEQ ID NO: 5434356 - DNA, 25 bp, Homo sapien
ttacttaggcaatattcctctctgc

SEQ ID NO: 5434357 - DNA, 25 bp, Homo sapien
tgctgaggtactgagaccattactt

SEQ ID NO: 5434358 - DNA, 25 bp, Homo sapien
ggtactgagaccattacttaggcaa

SEQ ID NO: 5434359 - DNA, 25 bp, Homo sapien
agaccctttacactctgcaggtgag

SEQ ID NO: 5434360 - DNA, 25 bp, Homo sapien
tgataactgcacaggaaacccagag

SEQ ID NO: 5434361 - DNA, 25 bp, Homo sapien
cacagctctgtactgtccggtagga

SEQ ID NO: 5434362 - DNA, 25 bp, Homo sapien
tgtgaaatgtaggtacaccagaccc

SEQ ID NO: 5434363 - DNA, 25 bp, Homo sapien
gagccgcagactacagtgtccattg

SEQ ID NO: 5434364 - DNA, 25 bp, Homo sapien
caaattaagaggtatcgaaggtgcc

SEQ ID NO: 5434365 - DNA, 25 bp, Homo sapien
gagaagcactgacaagagccgcaga

SEQ ID NO: 5434366 - DNA, 25 bp, Homo sapien
cacagagtggtcatgaggtgcaaat

SEQ ID NO: 5434367 - DNA, 25 bp, Homo sapien
taatagagaagctacccactaactg

SEQ ID NO: 5434368 - DNA, 25 bp, Homo sapien
cattaacaaggctagccccactggg

SEQ ID NO: 5434369 - DNA, 25 bp, Homo sapien
aaagataatccaactcctaggccag

SEQ ID NO: 5434370 - DNA, 25 bp, Homo sapien
tctttgtcaacagacctggtatctc

SEQ ID NO: 5434371 - DNA, 25 bp, Homo sapien
ctatggtgtgtgaggcacaaagcca

SEQ ID NO: 5434372 - DNA, 25 bp, Homo sapien
tatggtgtgtgaggcacaaagccaa

SEQ ID NO: 5434373 - DNA, 25 bp, Homo sapien
gtgtgtgaggcacaaagccaacttc

SEQ ID NO: 5434374 - DNA, 25 bp, Homo sapien
gtgaggcacaaagccaacttccaac

SEQ ID NO: 5434375 - DNA, 25 bp, Homo sapien
gatggttacacctggctagctgccc

SEQ ID NO: 5434376 - DNA, 25 bp, Homo sapien
gacgaacttggtgagcacaggcact

SEQ ID NO: 5434377 - DNA, 25 bp, Homo sapien
cttaatttggctcaggaaagcagca

SEQ ID NO: 5434378 - DNA, 25 bp, Homo sapien
ggcagccccagcagattgttcatgt

SEQ ID NO: 5434379 - DNA, 25 bp, Homo sapien
caacacttggtagtagcctgtgagc

SEQ ID NO: 5434380 - DNA, 25 bp, Homo sapien
tcaacttgaaggtcgcatgtcaggc

SEQ ID NO: 5434381 - DNA, 25 bp, Homo sapien
ttagtgccctggtgtcgacaaagca

SEQ ID NO: 5434382 - DNA, 25 bp, Homo sapien
catgtcaggcagtactcgggttaaa

SEQ ID NO: 5434383 - DNA, 25 bp, Homo sapien
ccagccatgagggaaagtcgggttt

SEQ ID NO: 5434384 - DNA, 25 bp, Homo sapien
gttttcggcaggcccggcgtagctc

SEQ ID NO: 5434385 - DNA, 25 bp, Homo sapien
cccggcgtagctcctccagagcact

SEQ ID NO: 5434386 - DNA, 25 bp, Homo sapien
gagtctggagacgaccagccatgag

SEQ ID NO: 5434387 - DNA, 25 bp, Homo sapien
ctgtactcgtcttccgtaagatatt

SEQ ID NO: 5434388 - DNA, 25 bp, Homo sapien
cgtcttccgtaagatatttcaccac

SEQ ID NO: 5434389 - DNA, 25 bp, Homo sapien
tcttttgatgtaaaccactgctcca

SEQ ID NO: 5434390 - DNA, 25 bp, Homo sapien
tcaccaccagctcttttgatgtaaa

SEQ ID NO: 5434391 - DNA, 25 bp, Homo sapien
gagaggagtcgcagcatccacatca

SEQ ID NO: 5434392 - DNA, 25 bp, Homo sapien
tctcagtgggtagtgcagactccag

SEQ ID NO: 5434393 - DNA, 25 bp, Homo sapien
ttatggctgcataggcaaactgagg

SEQ ID NO: 5434394 - DNA, 25 bp, Homo sapien
tagaccagaaccagggagaggagtc

SEQ ID NO: 5434395 - DNA, 25 bp, Homo sapien
tcagatcttccatcaactggcatac

SEQ ID NO: 5434396 - DNA, 25 bp, Homo sapien
caactggcatacaatataaactgag

SEQ ID NO: 5434397 - DNA, 25 bp, Homo sapien
ccattagagcccaaaaggtgctata

SEQ ID NO: 5434398 - DNA, 25 bp, Homo sapien
actgaggcaaaccaacaaccaacca

SEQ ID NO: 5434399 - DNA, 25 bp, Homo sapien
acaaagactaatgtcattagaacac

SEQ ID NO: 5434400 - DNA, 25 bp, Homo sapien
caagacaaagactaatgtcattaga

SEQ ID NO: 5434401 - DNA, 25 bp, Homo sapien
agacaaagactaatgtcattagaac

SEQ ID NO: 5434402 - DNA, 25 bp, Homo sapien
gacaaagactaatgtcattagaaca

SEQ ID NO: 5434403 - DNA, 25 bp, Homo sapien
cagttcccgaggagtaatagaaagt

SEQ ID NO: 5434404 - DNA, 25 bp, Homo sapien
cgaggagtaatagaaagtagggctt

SEQ ID NO: 5434405 - DNA, 25 bp, Homo sapien
ccgaggagtaatagaaagtagggct

SEQ ID NO: 5434406 - DNA, 25 bp, Homo sapien
acaaggaagagtttgaaatccatga

SEQ ID NO: 5434407 - DNA, 25 bp, Homo sapien
cacatgtatcatatagttaaatatc

SEQ ID NO: 5434408 - DNA, 25 bp, Homo sapien
tcgattcacatgtatcatatagtta

SEQ ID NO: 5434409 - DNA, 25 bp, Homo sapien
tgtttcgattcacatgtatcatata

SEQ ID NO: 5434410 - DNA, 25 bp, Homo sapien
gattcacatgtatcatatagttaaa

SEQ ID NO: 5434411 - DNA, 25 bp, Homo sapien
gattatggttatttcgttagattcc

SEQ ID NO: 5434412 - DNA, 25 bp, Homo sapien
tcctttggtatccaaaagttatgaa

SEQ ID NO: 5434413 - DNA, 25 bp, Homo sapien
caattctgaacaggcctggactggt

SEQ ID NO: 5434414 - DNA, 25 bp, Homo sapien
tattggcaattatgtctttctgcga

SEQ ID NO: 5434415 - DNA, 25 bp, Homo sapien
tgactcagacgttctaattaaatct

SEQ ID NO: 5434416 - DNA, 25 bp, Homo sapien
gcatagttgaccatatgtatttcca

SEQ ID NO: 5434417 - DNA, 25 bp, Homo sapien
ccacttgggaattttgattgtagca

SEQ ID NO: 5434418 - DNA, 25 bp, Homo sapien
tccttcaaagctttacacctacgaa

SEQ ID NO: 5434419 - DNA, 25 bp, Homo sapien
gtctcctaaatcattccaaacctgg

SEQ ID NO: 5434420 - DNA, 25 bp, Homo sapien
tcaactctcatagaacagttccctt

SEQ ID NO: 5434421 - DNA, 25 bp, Homo sapien
tgttaatggtctgaggaaataacct

SEQ ID NO: 5434422 - DNA, 25 bp, Homo sapien
tcttctagtgagtgctgctacttca

SEQ ID NO: 5434423 - DNA, 25 bp, Homo sapien
aagcctaccggaatggcaggcatcc

SEQ ID NO: 5434424 - DNA, 25 bp, Homo sapien
tggcacactaccagatgctgggcgc

SEQ ID NO: 5434425 - DNA, 25 bp, Homo sapien
tgggcgcttcacagtccgtattgga

SEQ ID NO: 5434426 - DNA, 25 bp, Homo sapien
cagtccgtattggaaagcctaccgg

SEQ ID NO: 5434427 - DNA, 25 bp, Homo sapien
cgttatgtttactcgctcaaggtca

SEQ ID NO: 5434428 - DNA, 25 bp, Homo sapien
tctgtaaaacgagggaattgggcga

SEQ ID NO: 5434429 - DNA, 25 bp, Homo sapien
gatcgcgcggttgcttctaattcta

SEQ ID NO: 5434430 - DNA, 25 bp, Homo sapien
tgccgctcacgtgggaccgttatgt

SEQ ID NO: 5434431 - DNA, 25 bp, Homo sapien
tccccgcgcacgggcagtgtggcca

SEQ ID NO: 5434432 - DNA, 25 bp, Homo sapien
cacatcaacagtagggtaaagctaa

SEQ ID NO: 5434433 - DNA, 25 bp, Homo sapien
aacacatcaacagtagggtaaagct

SEQ ID NO: 5434434 - DNA, 25 bp, Homo sapien
caacacatcaacagtagggtaaagc

SEQ ID NO: 5434435 - DNA, 25 bp, Homo sapien
catcaacagtagggtaaagctaacc

SEQ ID NO: 5434436 - DNA, 25 bp, Homo sapien
cgttatctgggcctcctttatcagt

SEQ ID NO: 5434437 - DNA, 25 bp, Homo sapien
tctgtccagctccattttgattcca

SEQ ID NO: 5434438 - DNA, 25 bp, Homo sapien
tcagttgttctgctatccatgtctc

SEQ ID NO: 5434439 - DNA, 25 bp, Homo sapien
cagcttgccgtataagatttcctgg

SEQ ID NO: 5434440 - DNA, 25 bp, Homo sapien
gggcttgatgctgtctgctcccatc

SEQ ID NO: 5434441 - DNA, 25 bp, Homo sapien
tgctggggcttgatgctgtctgctc

SEQ ID NO: 5434442 - DNA, 25 bp, Homo sapien
tgctgtctgctcccatcaggaccgc

SEQ ID NO: 5434443 - DNA, 25 bp, Homo sapien
gtctgctcccatcaggaccgctcat

SEQ ID NO: 5434444 - DNA, 25 bp, Homo sapien
ttaaaagtgcaactttgtctctggg

SEQ ID NO: 5434445 - DNA, 25 bp, Homo sapien
taagcgaaggtctgtttcacactga

SEQ ID NO: 5434446 - DNA, 25 bp, Homo sapien
gcctgaagaacatggaagaccaaaa

SEQ ID NO: 5434447 - DNA, 25 bp, Homo sapien
gtcaaagaggtagggtggcaaatta

SEQ ID NO: 5434448 - DNA, 25 bp, Homo sapien
ttggaaagcttggttactgtagatg

SEQ ID NO: 5434449 - DNA, 25 bp, Homo sapien
ttaacttccagtcagttggaaagct

SEQ ID NO: 5434450 - DNA, 25 bp, Homo sapien
tagatgttgatatccctgagaaacc

SEQ ID NO: 5434451 - DNA, 25 bp, Homo sapien
cctggataaccagagatttgctgtg

SEQ ID NO: 5434452 - DNA, 25 bp, Homo sapien
ttgtctaagcttggtgaggtttttc

SEQ ID NO: 5434453 - DNA, 25 bp, Homo sapien
tatcccttgtctaagcttggtgagg

SEQ ID NO: 5434454 - DNA, 25 bp, Homo sapien
ttttctatcccttgtctaagcttgg

SEQ ID NO: 5434455 - DNA, 25 bp, Homo sapien
cccttgtctaagcttggtgaggttt

SEQ ID NO: 5434456 - DNA, 25 bp, Homo sapien
tttcataacttgtggcgctgccagc

SEQ ID NO: 5434457 - DNA, 25 bp, Homo sapien
gaatggcatcaagtcgtgttttgct

SEQ ID NO: 5434458 - DNA, 25 bp, Homo sapien
atggatataagcctttgtcttaaag

SEQ ID NO: 5434459 - DNA, 25 bp, Homo sapien
tgtcttaaagaatgctattgattca

SEQ ID NO: 5434460 - DNA, 25 bp, Homo sapien
tggcatctagtatgcaatgcatcag

SEQ ID NO: 5434461 - DNA, 25 bp, Homo sapien
tagttctgtagattctcagagaaga

SEQ ID NO: 5434462 - DNA, 25 bp, Homo sapien
cagagtgtgctgaattgcactgaac

SEQ ID NO: 5434463 - DNA, 25 bp, Homo sapien
attgcactgaacgttgacacccggg

SEQ ID NO: 5434464 - DNA, 25 bp, Homo sapien
gcttccttggtgcctggcttcctac

SEQ ID NO: 5434465 - DNA, 25 bp, Homo sapien
gcagcttccttggtgcctggcttcc

SEQ ID NO: 5434466 - DNA, 25 bp, Homo sapien
tggcagcttccttggtgcctggctt

SEQ ID NO: 5434467 - DNA, 25 bp, Homo sapien
cagcttccttggtgcctggcttcct

SEQ ID NO: 5434468 - DNA, 25 bp, Homo sapien
catgtgaggcacttccagggttcag

SEQ ID NO: 5434469 - DNA, 25 bp, Homo sapien
cctcagtataggtgctgacatgtga

SEQ ID NO: 5434470 - DNA, 25 bp, Homo sapien
tctggtgtgctgatccagagtcctc

SEQ ID NO: 5434471 - DNA, 25 bp, Homo sapien
gagtggaggcatctgaacagcccat

SEQ ID NO: 5434472 - DNA, 25 bp, Homo sapien
tcacataggtcttttatattggctt

SEQ ID NO: 5434473 - DNA, 25 bp, Homo sapien
tggcctcttggaaagtgacattgtt

SEQ ID NO: 5434474 - DNA, 25 bp, Homo sapien
ggaaagtgacattgtttgcttacca

SEQ ID NO: 5434475 - DNA, 25 bp, Homo sapien
ttccaactgtgtcctcttacgaaag

SEQ ID NO: 5434476 - DNA, 25 bp, Homo sapien
tatttgacagagctaagtacaaagt

SEQ ID NO: 5434477 - DNA, 25 bp, Homo sapien
acagagctaagtacaaagttgcttg

SEQ ID NO: 5434478 - DNA, 25 bp, Homo sapien
aagtacaaagttgcttgatcaataa

SEQ ID NO: 5434479 - DNA, 25 bp, Homo sapien
gctaagtacaaagttgcttgatcaa

SEQ ID NO: 5434480 - DNA, 25 bp, Homo sapien
tattcctaccccatagataacttac

SEQ ID NO: 5434481 - DNA, 25 bp, Homo sapien
caaggtctatttgaaggctgagtga

SEQ ID NO: 5434482 - DNA, 25 bp, Homo sapien
agtctcctcattaaagaataccagg

SEQ ID NO: 5434483 - DNA, 25 bp, Homo sapien
taaagtccactacccaagagtcttc

SEQ ID NO: 5434484 - DNA, 25 bp, Homo sapien
agaaaggttggttagtaatcacatg

SEQ ID NO: 5434485 - DNA, 25 bp, Homo sapien
aaggttggttagtaatcacatgaaa

SEQ ID NO: 5434486 - DNA, 25 bp, Homo sapien
aaaggttggttagtaatcacatgaa

SEQ ID NO: 5434487 - DNA, 25 bp, Homo sapien
gaaaggttggttagtaatcacatga

SEQ ID NO: 5434488 - DNA, 25 bp, Homo sapien
taaaagtgcggtacagctgcaggtc

SEQ ID NO: 5434489 - DNA, 25 bp, Homo sapien
tcaattgtgacaacactcctgtggg

SEQ ID NO: 5434490 - DNA, 25 bp, Homo sapien
gggcacacagttttcacatgaacag

SEQ ID NO: 5434491 - DNA, 25 bp, Homo sapien
catgaacagtttatagcacaggtgg

SEQ ID NO: 5434492 - DNA, 25 bp, Homo sapien
tggcatcttcttggactgatgagct

SEQ ID NO: 5434493 - DNA, 25 bp, Homo sapien
ggtttcccaagtgtgcgtgccatat

SEQ ID NO: 5434494 - DNA, 25 bp, Homo sapien
tgatgagctctcgaatgaataacag

SEQ ID NO: 5434495 - DNA, 25 bp, Homo sapien
tccacatctgaccaaggtggcatct

SEQ ID NO: 5434496 - DNA, 25 bp, Homo sapien
ataggaatcacatgattaacacttc

SEQ ID NO: 5434497 - DNA, 25 bp, Homo sapien
atgatgacggtttttaatggtaata

SEQ ID NO: 5434498 - DNA, 25 bp, Homo sapien
aatggtaataggaatcacatgatta

SEQ ID NO: 5434499 - DNA, 25 bp, Homo sapien
tgatgacggtttttaatggtaatag

SEQ ID NO: 5434500 - DNA, 25 bp, Homo sapien
tgtcgtgcctctttgtgttcctggg

SEQ ID NO: 5434501 - DNA, 25 bp, Homo sapien
gcacacttgcctctgggtctgtcgt

SEQ ID NO: 5434502 - DNA, 25 bp, Homo sapien
ggtctgtcgtgcctctttgtgttcc

SEQ ID NO: 5434503 - DNA, 25 bp, Homo sapien
tgcctctgggtctgtcgtgcctctt

SEQ ID NO: 5434504 - DNA, 25 bp, Homo sapien
ggaaggcgacaataagccacacaga

SEQ ID NO: 5434505 - DNA, 25 bp, Homo sapien
taagccacacagaggggccttgtgt

SEQ ID NO: 5434506 - DNA, 25 bp, Homo sapien
aggcgacaataagccacacagaggg

SEQ ID NO: 5434507 - DNA, 25 bp, Homo sapien
tgagtgggagtggaaggcgacaata

SEQ ID NO: 5434508 - DNA, 25 bp, Homo sapien
atctggacagaagcatctgggcagc

SEQ ID NO: 5434509 - DNA, 25 bp, Homo sapien
tcagaggatctggacagaagcatct

SEQ ID NO: 5434510 - DNA, 25 bp, Homo sapien
aggatctggacagaagcatctgggc

SEQ ID NO: 5434511 - DNA, 25 bp, Homo sapien
cagaggatctggacagaagcatctg

SEQ ID NO: 5434512 - DNA, 25 bp, Homo sapien
gacgaaaacgaaccttgactgctgg

SEQ ID NO: 5434513 - DNA, 25 bp, Homo sapien
ctgccacaggaaacttcacagcaat

SEQ ID NO: 5434514 - DNA, 25 bp, Homo sapien
gaaacttcacagcaatgtcaatagt

SEQ ID NO: 5434515 - DNA, 25 bp, Homo sapien
tcaatagtcctgacgaaaacgaacc

SEQ ID NO: 5434516 - DNA, 25 bp, Homo sapien
tggagatgatcaaggcaggtctgga

SEQ ID NO: 5434517 - DNA, 25 bp, Homo sapien
gtggagatgatcaaggcaggtctgg

SEQ ID NO: 5434518 - DNA, 25 bp, Homo sapien
cacgtcaagaggctggtttagagga

SEQ ID NO: 5434519 - DNA, 25 bp, Homo sapien
gctagatgggtgatatggcaactca

SEQ ID NO: 5434520 - DNA, 25 bp, Homo sapien
catttgcttcaagaagggctctctt

SEQ ID NO: 5434521 - DNA, 25 bp, Homo sapien
caatccaagcgaagagagaagactg

SEQ ID NO: 5434522 - DNA, 25 bp, Homo sapien
tccaccctcatgatggagggtactc

SEQ ID NO: 5434523 - DNA, 25 bp, Homo sapien
ccctcatgatggagggtactccagc

SEQ ID NO: 5434524 - DNA, 25 bp, Homo sapien
accctcatgatggagggtactccag

SEQ ID NO: 5434525 - DNA, 25 bp, Homo sapien
caccctcatgatggagggtactcca

SEQ ID NO: 5434526 - DNA, 25 bp, Homo sapien
catgtggtaccaaagagaagtggaa

SEQ ID NO: 5434527 - DNA, 25 bp, Homo sapien
ggcttactgtatacttaggatgaac

SEQ ID NO: 5434528 - DNA, 25 bp, Homo sapien
gagctcacagtgatcttcaaggaag

SEQ ID NO: 5434529 - DNA, 25 bp, Homo sapien
gagaagtataacacatagttgctcc

SEQ ID NO: 5434530 - DNA, 25 bp, Homo sapien
tacttcacaatttacacactgcttc

SEQ ID NO: 5434531 - DNA, 25 bp, Homo sapien
tttaatcagaagtaggcatcacata

SEQ ID NO: 5434532 - DNA, 25 bp, Homo sapien
tagctctgtcttgcccttactttta

SEQ ID NO: 5434533 - DNA, 25 bp, Homo sapien
ctgggatgatatttgcaagagatag

SEQ ID NO: 5434534 - DNA, 25 bp, Homo sapien
tttgtgttccaagcatccagcccta

SEQ ID NO: 5434535 - DNA, 25 bp, Homo sapien
taaacctggcacattcttggtgctc

SEQ ID NO: 5434536 - DNA, 25 bp, Homo sapien
tatgcgtcagccaatgttctagcca

SEQ ID NO: 5434537 - DNA, 25 bp, Homo sapien
tgttttatagcaaagccctgcgggc

SEQ ID NO: 5434538 - DNA, 25 bp, Homo sapien
ccggcgcccacttggttcctcccag

SEQ ID NO: 5434539 - DNA, 25 bp, Homo sapien
gtaccggagcggacggtcgccactc

SEQ ID NO: 5434540 - DNA, 25 bp, Homo sapien
acactttcgcggctgagcggccacg

SEQ ID NO: 5434541 - DNA, 25 bp, Homo sapien
gcagccgctggctgagtacgtaccg

SEQ ID NO: 5434542 - DNA, 25 bp, Homo sapien
ccggtccgccaagtgcgggacactt

SEQ ID NO: 5434543 - DNA, 25 bp, Homo sapien
gaaactctttgtgtctctaaggccg

SEQ ID NO: 5434544 - DNA, 25 bp, Homo sapien
agttttgcagccaccttcgtcaggg

SEQ ID NO: 5434545 - DNA, 25 bp, Homo sapien
catgtgggacatacaagcgttggat

SEQ ID NO: 5434546 - DNA, 25 bp, Homo sapien
ttacagaaacttggcgctgaggtgc

SEQ ID NO: 5434547 - DNA, 25 bp, Homo sapien
tagtcacgtaggaaatgcttagctg

SEQ ID NO: 5434548 - DNA, 25 bp, Homo sapien
taatctgagtgccagtaaaagtggc

SEQ ID NO: 5434549 - DNA, 25 bp, Homo sapien
tcacgcaatgacttaccttcctagg

SEQ ID NO: 5434550 - DNA, 25 bp, Homo sapien
tgaagacctgaaagagctgcttctg

SEQ ID NO: 5434551 - DNA, 25 bp, Homo sapien
catccactgtcgtatgagaaagtta

SEQ ID NO: 5434552 - DNA, 25 bp, Homo sapien
tgtaagtggcaaataacatccactg

SEQ ID NO: 5434553 - DNA, 25 bp, Homo sapien
gatggtctcttgttacttgtgaagg

SEQ ID NO: 5434554 - DNA, 25 bp, Homo sapien
tcatcacggtatagctaagaaccta

SEQ ID NO: 5434555 - DNA, 25 bp, Homo sapien
cactcgtgggcatggctagcaagcc

SEQ ID NO: 5434556 - DNA, 25 bp, Homo sapien
catccagagtaatggctgcggcctt

SEQ ID NO: 5434557 - DNA, 25 bp, Homo sapien
tgatgcctttatccaacaaggtggt

SEQ ID NO: 5434558 - DNA, 25 bp, Homo sapien
tagcaagccccttcatgttagaagg

SEQ ID NO: 5434559 - DNA, 25 bp, Homo sapien
ggttggaatccttctgcttagacgg

SEQ ID NO: 5434560 - DNA, 25 bp, Homo sapien
gaaaaagatcgcctgctagcttagg

SEQ ID NO: 5434561 - DNA, 25 bp, Homo sapien
tagcttaggtgtgccttaaggaacc

SEQ ID NO: 5434562 - DNA, 25 bp, Homo sapien
cctgatctatacatgaaggcttggg

SEQ ID NO: 5434563 - DNA, 25 bp, Homo sapien
cgataactcagatggacaaggtaca

SEQ ID NO: 5434564 - DNA, 25 bp, Homo sapien
gaagagcacagtcctaacggcttga

SEQ ID NO: 5434565 - DNA, 25 bp, Homo sapien
caagctggctatgagagactgcagc

SEQ ID NO: 5434566 - DNA, 25 bp, Homo sapien
tggagttcctttgcaaccaagctgg

SEQ ID NO: 5434567 - DNA, 25 bp, Homo sapien
caaacagatttcatagccaaagcaa

SEQ ID NO: 5434568 - DNA, 25 bp, Homo sapien
taagccttaataaccagtgttgcct

SEQ ID NO: 5434569 - DNA, 25 bp, Homo sapien
gcaaaaggactggtacggtagtctg

SEQ ID NO: 5434570 - DNA, 25 bp, Homo sapien
gttgcctcattcagctcaaacagat

SEQ ID NO: 5434571 - DNA, 25 bp, Homo sapien
gaacaaggtcaattggttacctcag

SEQ ID NO: 5434572 - DNA, 25 bp, Homo sapien
ttatccattcgttgtggacccacag

SEQ ID NO: 5434573 - DNA, 25 bp, Homo sapien
tacagccaatatagtccaagggacc

SEQ ID NO: 5434574 - DNA, 25 bp, Homo sapien
tgtagtctcagatcactgtcacgta

SEQ ID NO: 5434575 - DNA, 25 bp, Homo sapien
tcttacagctgtttgatacatccaa

SEQ ID NO: 5434576 - DNA, 25 bp, Homo sapien
caaatgtaagggttgcctgttcctc

SEQ ID NO: 5434577 - DNA, 25 bp, Homo sapien
gatacatccaagctcactaggcaca

SEQ ID NO: 5434578 - DNA, 25 bp, Homo sapien
ttcctcctttattcagagaaggttg

SEQ ID NO: 5434579 - DNA, 25 bp, Homo sapien
caagaatccatgagatgaatcttat

SEQ ID NO: 5434580 - DNA, 25 bp, Homo sapien
ttccatgcatatccccaagaatcca

SEQ ID NO: 5434581 - DNA, 25 bp, Homo sapien
ctgattccatgcatatccccaagaa

SEQ ID NO: 5434582 - DNA, 25 bp, Homo sapien
atgcatatccccaagaatccatgag

SEQ ID NO: 5434583 - DNA, 25 bp, Homo sapien
agaaggcaaggagaagcaagtcaca

SEQ ID NO: 5434584 - DNA, 25 bp, Homo sapien
catggcagaaggcaaggagaagcaa

SEQ ID NO: 5434585 - DNA, 25 bp, Homo sapien
gcagaaggcaaggagaagcaagtca

SEQ ID NO: 5434586 - DNA, 25 bp, Homo sapien
aaggcaaggagaagcaagtcacatc

SEQ ID NO: 5434587 - DNA, 25 bp, Homo sapien
agcttgctcccataaacctaacttt

SEQ ID NO: 5434588 - DNA, 25 bp, Homo sapien
cgataaatttcagcttgctcccata

SEQ ID NO: 5434589 - DNA, 25 bp, Homo sapien
tttatgttgtgatttgtgcttggaa

SEQ ID NO: 5434590 - DNA, 25 bp, Homo sapien
cttatgtgttcttcaatgaagagct

SEQ ID NO: 5434591 - DNA, 25 bp, Homo sapien
ggacccactggctgcaaacagatgg

SEQ ID NO: 5434592 - DNA, 25 bp, Homo sapien
taagggctaatgctgggtcagaagc

SEQ ID NO: 5434593 - DNA, 25 bp, Homo sapien
agaagctacaacagtcagcagtcct

SEQ ID NO: 5434594 - DNA, 25 bp, Homo sapien
gcagctagcttaggtgttcctaaaa

SEQ ID NO: 5434595 - DNA, 25 bp, Homo sapien
cttttcatcagttgataatgtgtgg

SEQ ID NO: 5434596 - DNA, 25 bp, Homo sapien
acttttcatcagttgataatgtgtg

SEQ ID NO: 5434597 - DNA, 25 bp, Homo sapien
ttttcatcagttgataatgtgtggt

SEQ ID NO: 5434598 - DNA, 25 bp, Homo sapien
aggatcccttggagcagattttggc

SEQ ID NO: 5434599 - DNA, 25 bp, Homo sapien
taggatcccttggagcagattttgg

SEQ ID NO: 5434600 - DNA, 25 bp, Homo sapien
ggatcccttggagcagattttggca

SEQ ID NO: 5434601 - DNA, 25 bp, Homo sapien
gatcccttggagcagattttggcac

SEQ ID NO: 5434602 - DNA, 25 bp, Homo sapien
ttgggccgtatttgtcaatctcttg

SEQ ID NO: 5434603 - DNA, 25 bp, Homo sapien
tgaatatgtctttctacctccacca

SEQ ID NO: 5434604 - DNA, 25 bp, Homo sapien
cctgaatatgtctttctacctccac

SEQ ID NO: 5434605 - DNA, 25 bp, Homo sapien
ttaaatgatagggtattgggccgta

SEQ ID NO: 5434606 - DNA, 25 bp, Homo sapien
attataaaagtaaggcagttactga

SEQ ID NO: 5434607 - DNA, 25 bp, Homo sapien
aggcagttactgagcccaatattca

SEQ ID NO: 5434608 - DNA, 25 bp, Homo sapien
ttataaaagtaaggcagttactgag

SEQ ID NO: 5434609 - DNA, 25 bp, Homo sapien
gtaaggcagttactgagcccaatat

SEQ ID NO: 5434610 - DNA, 25 bp, Homo sapien
gtgttacagttggcgcgtctggagt

SEQ ID NO: 5434611 - DNA, 25 bp, Homo sapien
gtgagtgttacagttggcgcgtctg

SEQ ID NO: 5434612 - DNA, 25 bp, Homo sapien
tgagtgttacagttggcgcgtctgg

SEQ ID NO: 5434613 - DNA, 25 bp, Homo sapien
gagtgttacagttggcgcgtctgga

SEQ ID NO: 5434614 - DNA, 25 bp, Homo sapien
caccctatacttgcctaggttgcct

SEQ ID NO: 5434615 - DNA, 25 bp, Homo sapien
gtttgctacatttcaacaccctata

SEQ ID NO: 5434616 - DNA, 25 bp, Homo sapien
cgcccggctacaaagttcacatctg

SEQ ID NO: 5434617 - DNA, 25 bp, Homo sapien
gtgtaaaatcagtatactcgtcaga

SEQ ID NO: 5434618 - DNA, 25 bp, Homo sapien
ttctgggactttcatcctcaaccac

SEQ ID NO: 5434619 - DNA, 25 bp, Homo sapien
ccttggttattctgggactttcatc

SEQ ID NO: 5434620 - DNA, 25 bp, Homo sapien
gaccttggttattctgggactttca

SEQ ID NO: 5434621 - DNA, 25 bp, Homo sapien
ggttattctgggactttcatcctca

SEQ ID NO: 5434622 - DNA, 25 bp, Homo sapien
tcttcactgttaccccacagataag

SEQ ID NO: 5434623 - DNA, 25 bp, Homo sapien
tgccaatcagtgaccccatttccat

SEQ ID NO: 5434624 - DNA, 25 bp, Homo sapien
cttcactgttaccccacagataagc

SEQ ID NO: 5434625 - DNA, 25 bp, Homo sapien
ctgccaatcagtgaccccatttcca

SEQ ID NO: 5434626 - DNA, 25 bp, Homo sapien
ttctgctagctttttgaaggtgaca

SEQ ID NO: 5434627 - DNA, 25 bp, Homo sapien
agctttttgaaggtgacagctcttc

SEQ ID NO: 5434628 - DNA, 25 bp, Homo sapien
gctagctttttgaaggtgacagctc

SEQ ID NO: 5434629 - DNA, 25 bp, Homo sapien
ctgctagctttttgaaggtgacagc

SEQ ID NO: 5434630 - DNA, 25 bp, Homo sapien
agactcagtggaaagtcctgtccaa

SEQ ID NO: 5434631 - DNA, 25 bp, Homo sapien
caacacatacaactttctttccaca

SEQ ID NO: 5434632 - DNA, 25 bp, Homo sapien
cagtggaaagtcctgtccaatcaac

SEQ ID NO: 5434633 - DNA, 25 bp, Homo sapien
ggaaagtcctgtccaatcaacacat

SEQ ID NO: 5434634 - DNA, 25 bp, Homo sapien
tttacatgcttctctgcagtgacac

SEQ ID NO: 5434635 - DNA, 25 bp, Homo sapien
tctgggttatgcatatgtgaacatc

SEQ ID NO: 5434636 - DNA, 25 bp, Homo sapien
tatttaaaggacgatggaagctgtg

SEQ ID NO: 5434637 - DNA, 25 bp, Homo sapien
cagtgacacttgatgcggtttaatt

SEQ ID NO: 5434638 - DNA, 25 bp, Homo sapien
gactccgtgttagtgcttctctgca

SEQ ID NO: 5434639 - DNA, 25 bp, Homo sapien
acttatacggtgaaagctgggtgca

SEQ ID NO: 5434640 - DNA, 25 bp, Homo sapien
tatcaagacatgcagagactccgtg

SEQ ID NO: 5434641 - DNA, 25 bp, Homo sapien
tgggcaaactactcaagcttcaggt

SEQ ID NO: 5434642 - DNA, 25 bp, Homo sapien
tagcctgagaattaggtgatatgcc

SEQ ID NO: 5434643 - DNA, 25 bp, Homo sapien
gacattttctatctagcctagcctg

SEQ ID NO: 5434644 - DNA, 25 bp, Homo sapien
ctttatggcagggtgtgctcaagct

SEQ ID NO: 5434645 - DNA, 25 bp, Homo sapien
gccaagaacatcctaaagacagtat

SEQ ID NO: 5434646 - DNA, 25 bp, Homo sapien
gcttgaggacaagggtcatgtgttc

SEQ ID NO: 5434647 - DNA, 25 bp, Homo sapien
actgtctcacagttgaggcgttggc

SEQ ID NO: 5434648 - DNA, 25 bp, Homo sapien
cagtaggaatagtgttccaagggat

SEQ ID NO: 5434649 - DNA, 25 bp, Homo sapien
ccaagggatctatgatgagcttcgc

SEQ ID NO: 5434650 - DNA, 25 bp, Homo sapien
acttgtgcatactgcccatggacag

SEQ ID NO: 5434651 - DNA, 25 bp, Homo sapien
tattgtgacagaagggttgtcataa

SEQ ID NO: 5434652 - DNA, 25 bp, Homo sapien
tctcacctccagacaggcgggagtg

SEQ ID NO: 5434653 - DNA, 25 bp, Homo sapien
ggttgtcataacaagcatatctcac

SEQ ID NO: 5434654 - DNA, 25 bp, Homo sapien
tgcagcaccgtgaatgtgagaacct

SEQ ID NO: 5434655 - DNA, 25 bp, Homo sapien
gttgtcccaatctgtctctcagttc

SEQ ID NO: 5434656 - DNA, 25 bp, Homo sapien
ctctggatgttcttaacagacaact

SEQ ID NO: 5434657 - DNA, 25 bp, Homo sapien
ctggtagatttgttccgttgtccca

SEQ ID NO: 5434658 - DNA, 25 bp, Homo sapien
gatgttcttaacagacaactagtta

SEQ ID NO: 5434659 - DNA, 25 bp, Homo sapien
taagagacagtgtgtagtcttgtcc

SEQ ID NO: 5434660 - DNA, 25 bp, Homo sapien
tgtgaacacaatctagctattatgg

SEQ ID NO: 5434661 - DNA, 25 bp, Homo sapien
tcccttggtgctttcaatgaagagt

SEQ ID NO: 5434662 - DNA, 25 bp, Homo sapien
tgggcaaccatactggatttggatc

SEQ ID NO: 5434663 - DNA, 25 bp, Homo sapien
tcaaatgggaccatcagccagaaac

SEQ ID NO: 5434664 - DNA, 25 bp, Homo sapien
ctcaaatgggaccatcagccagaaa

SEQ ID NO: 5434665 - DNA, 25 bp, Homo sapien
caacctctggagaaatgtgagtagc

SEQ ID NO: 5434666 - DNA, 25 bp, Homo sapien
tagtgacaccaaatccaacctctgg

SEQ ID NO: 5434667 - DNA, 25 bp, Homo sapien
gcagtgtgcccaaagttggctgaga

SEQ ID NO: 5434668 - DNA, 25 bp, Homo sapien
gatatgataacagcctcagtcactg

SEQ ID NO: 5434669 - DNA, 25 bp, Homo sapien
gaggttttatggcatcctagcagat

SEQ ID NO: 5434670 - DNA, 25 bp, Homo sapien
cattctctgggacttattctcgcct

SEQ ID NO: 5434671 - DNA, 25 bp, Homo sapien
tgaagaaggatgctcagccgttgac

SEQ ID NO: 5434672 - DNA, 25 bp, Homo sapien
gcagatgaagatcagcctacagatg

SEQ ID NO: 5434673 - DNA, 25 bp, Homo sapien
cacacttggctttaggattttgaca

SEQ ID NO: 5434674 - DNA, 25 bp, Homo sapien
gaagccctcaggtgctatgtaaccc

SEQ ID NO: 5434675 - DNA, 25 bp, Homo sapien
cagaattattcttgagtggccttaa

SEQ ID NO: 5434676 - DNA, 25 bp, Homo sapien
tatgtaacccagaagtcctagcttt

SEQ ID NO: 5434677 - DNA, 25 bp, Homo sapien
tatatgggcccaacagcatggtcta

SEQ ID NO: 5434678 - DNA, 25 bp, Homo sapien
gaactctacaaagactcaggacctg

SEQ ID NO: 5434679 - DNA, 25 bp, Homo sapien
gttagatacatgctccaaagggtgg

SEQ ID NO: 5434680 - DNA, 25 bp, Homo sapien
gaaatatttaggagtccactggcca

SEQ ID NO: 5434681 - DNA, 25 bp, Homo sapien
cttcacgtctgggtagtagccaatc

SEQ ID NO: 5434682 - DNA, 25 bp, Homo sapien
cacttcacgtctgggtagtagccaa

SEQ ID NO: 5434683 - DNA, 25 bp, Homo sapien
acacttcacgtctgggtagtagcca

SEQ ID NO: 5434684 - DNA, 25 bp, Homo sapien
tcacgtctgggtagtagccaatcat

SEQ ID NO: 5434685 - DNA, 25 bp, Homo sapien
tatgtgggaacaaatgttctggtac

SEQ ID NO: 5434686 - DNA, 25 bp, Homo sapien
tgaaaatggttcctgtgtgatagat

SEQ ID NO: 5434687 - DNA, 25 bp, Homo sapien
tactctcatgagctgaaatcacagt

SEQ ID NO: 5434688 - DNA, 25 bp, Homo sapien
tccttttggttcttccagaatgaac

SEQ ID NO: 5434689 - DNA, 25 bp, Homo sapien
atgtaaattctgtaacttgacaggc

SEQ ID NO: 5434690 - DNA, 25 bp, Homo sapien
gaatggaatcaagtgcgatacttac

SEQ ID NO: 5434691 - DNA, 25 bp, Homo sapien
tgttaaaactcagtgcctctatcaa

SEQ ID NO: 5434692 - DNA, 25 bp, Homo sapien
ggcagatgtccttgttaacagtgtt

SEQ ID NO: 5434693 - DNA, 25 bp, Homo sapien
gggtgaaatgtcaggcactgtagca

SEQ ID NO: 5434694 - DNA, 25 bp, Homo sapien
caaatcttagtgtttagaggctggc

SEQ ID NO: 5434695 - DNA, 25 bp, Homo sapien
tatcctagagggtattcttagcacc

SEQ ID NO: 5434696 - DNA, 25 bp, Homo sapien
cattttggtttaggcttacagagca

SEQ ID NO: 5434697 - DNA, 25 bp, Homo sapien
tatccagaggtactgactgactgaa

SEQ ID NO: 5434698 - DNA, 25 bp, Homo sapien
tagtaagcaattaatgaacactgct

SEQ ID NO: 5434699 - DNA, 25 bp, Homo sapien
tcaagttttgctaatgtaacttaaa

SEQ ID NO: 5434700 - DNA, 25 bp, Homo sapien
ttttttatcatttgtcaagttttgc

SEQ ID NO: 5434701 - DNA, 25 bp, Homo sapien
tgtagtttgggcaaccgaatgcctt

SEQ ID NO: 5434702 - DNA, 25 bp, Homo sapien
cccttctagaggtgctggccaaaaa

SEQ ID NO: 5434703 - DNA, 25 bp, Homo sapien
gagataagatactgcgaataggccc

SEQ ID NO: 5434704 - DNA, 25 bp, Homo sapien
tgttagttgcaccagggccatttgt

SEQ ID NO: 5434705 - DNA, 25 bp, Homo sapien
taacaacccagggtagacaagacaa

SEQ ID NO: 5434706 - DNA, 25 bp, Homo sapien
cagttgctggttacccctcgtggag

SEQ ID NO: 5434707 - DNA, 25 bp, Homo sapien
gacaaacctttagagaagcataaac

SEQ ID NO: 5434708 - DNA, 25 bp, Homo sapien
ttaacactgaatgttctctcttagg

SEQ ID NO: 5434709 - DNA, 25 bp, Homo sapien
gctttagggaagagacgagactgaa

SEQ ID NO: 5434710 - DNA, 25 bp, Homo sapien
aatgggaaggcttctaaacaagcta

SEQ ID NO: 5434711 - DNA, 25 bp, Homo sapien
catttggttggaatcagtttcagaa

SEQ ID NO: 5434712 - DNA, 25 bp, Homo sapien
aattttaatcagtgctttagggaag

SEQ ID NO: 5434713 - DNA, 25 bp, Homo sapien
ctctctctcctggtcgacatagcaa

SEQ ID NO: 5434714 - DNA, 25 bp, Homo sapien
gaatgcagcttacacatatacatgt

SEQ ID NO: 5434715 - DNA, 25 bp, Homo sapien
tcaacaaagtggtcagggaagggat

SEQ ID NO: 5434716 - DNA, 25 bp, Homo sapien
tatccttggacattatgtactggag

SEQ ID NO: 5434717 - DNA, 25 bp, Homo sapien
tattggcagtattctaaaacctcat

SEQ ID NO: 5434718 - DNA, 25 bp, Homo sapien
cagaaaagttatgtcagtgtctgac

SEQ ID NO: 5434719 - DNA, 25 bp, Homo sapien
ggttcagctgttagcttgcaagaaa

SEQ ID NO: 5434720 - DNA, 25 bp, Homo sapien
aaaacctcatgttaggttgacagtc

SEQ ID NO: 5434721 - DNA, 25 bp, Homo sapien
ggcttcccagccttaccagaggtga

SEQ ID NO: 5434722 - DNA, 25 bp, Homo sapien
gattgggtaggaagacaggcttcac

SEQ ID NO: 5434723 - DNA, 25 bp, Homo sapien
gggaactacccatcgtaccctgtca

SEQ ID NO: 5434724 - DNA, 25 bp, Homo sapien
tagtggtccgattgagtccatggct

SEQ ID NO: 5434725 - DNA, 25 bp, Homo sapien
tacagtctgtccaaatgggtcaagg

SEQ ID NO: 5434726 - DNA, 25 bp, Homo sapien
aaagtgagagctggcatactatgca

SEQ ID NO: 5434727 - DNA, 25 bp, Homo sapien
tacagaagacgaaccagagacaaaa

SEQ ID NO: 5434728 - DNA, 25 bp, Homo sapien
tttgaacaactatatgcacttacgg

SEQ ID NO: 5434729 - DNA, 25 bp, Homo sapien
taaactttacatgcctgatggcacc

SEQ ID NO: 5434730 - DNA, 25 bp, Homo sapien
tgatggcaccttactccagcagcct

SEQ ID NO: 5434731 - DNA, 25 bp, Homo sapien
agtgagcagtttcctaccccgtgga

SEQ ID NO: 5434732 - DNA, 25 bp, Homo sapien
tcctttggtgaaaccacggccaatg

SEQ ID NO: 5434733 - DNA, 25 bp, Homo sapien
ccatggagacaggtagcatttgtaa

SEQ ID NO: 5434734 - DNA, 25 bp, Homo sapien
taactttattcaaagagcagcccgc

SEQ ID NO: 5434735 - DNA, 25 bp, Homo sapien
gcagcccgctttgtgtgactaaaat

SEQ ID NO: 5434736 - DNA, 25 bp, Homo sapien
catttgtaagatgctgcacaggagc

SEQ ID NO: 5434737 - DNA, 25 bp, Homo sapien
ctgctgccgtcagtaaactccaaag

SEQ ID NO: 5434738 - DNA, 25 bp, Homo sapien
aaatgctgttgactgtgctattaac

SEQ ID NO: 5434739 - DNA, 25 bp, Homo sapien
tgtgctattaactgctgccgtcagt

SEQ ID NO: 5434740 - DNA, 25 bp, Homo sapien
tgttgactgtgctattaactgctgc

SEQ ID NO: 5434741 - DNA, 25 bp, Homo sapien
cccgacactgccctttagctgcaga

SEQ ID NO: 5434742 - DNA, 25 bp, Homo sapien
taatatgctataccccactgctgcc

SEQ ID NO: 5434743 - DNA, 25 bp, Homo sapien
agctgcagagctggattagctgttg

SEQ ID NO: 5434744 - DNA, 25 bp, Homo sapien
gctgttgaccatttgatgctgttgt

SEQ ID NO: 5434745 - DNA, 25 bp, Homo sapien
tgaatcataactaaccaaaggaagc

SEQ ID NO: 5434746 - DNA, 25 bp, Homo sapien
aaacttacactagttagccagggca

SEQ ID NO: 5434747 - DNA, 25 bp, Homo sapien
gaatgtatgatccagtgtctcagaa

SEQ ID NO: 5434748 - DNA, 25 bp, Homo sapien
taatgtcccaattcaaaaggtaagc

SEQ ID NO: 5434749 - DNA, 25 bp, Homo sapien
gcatcaaaccaattcataacgtcag

SEQ ID NO: 5434750 - DNA, 25 bp, Homo sapien
aaagaactgacagctaaacctcagc

SEQ ID NO: 5434751 - DNA, 25 bp, Homo sapien
gtaaagtctcttggctagtgcagta

SEQ ID NO: 5434752 - DNA, 25 bp, Homo sapien
taaaatgaaaccatgccgaattccc

SEQ ID NO: 5434753 - DNA, 25 bp, Homo sapien
cattctcgtcctgatactttgggtg

SEQ ID NO: 5434754 - DNA, 25 bp, Homo sapien
cgttcctacgtcaagcagttcccta

SEQ ID NO: 5434755 - DNA, 25 bp, Homo sapien
gatccatgatggctacctttgaaag

SEQ ID NO: 5434756 - DNA, 25 bp, Homo sapien
gcctcagattgtatgcagtgccacg

SEQ ID NO: 5434757 - DNA, 25 bp, Homo sapien
gaaaaattcacttgctatcaacagg

SEQ ID NO: 5434758 - DNA, 25 bp, Homo sapien
taagatgcatgatgcccttcagagt

SEQ ID NO: 5434759 - DNA, 25 bp, Homo sapien
gatgagaaggaaaactgtcgccaga

SEQ ID NO: 5434760 - DNA, 25 bp, Homo sapien
tatcaacaggttgcagcgaatttgc

SEQ ID NO: 5434761 - DNA, 25 bp, Homo sapien
gattcagatcctgtcactgcgtgac

SEQ ID NO: 5434762 - DNA, 25 bp, Homo sapien
gcccggcctggctgatgtttcaaat

SEQ ID NO: 5434763 - DNA, 25 bp, Homo sapien
caaatgcccaagtcatactgcagag

SEQ ID NO: 5434764 - DNA, 25 bp, Homo sapien
cgtgaccagggcaagtggcttaacc

SEQ ID NO: 5434765 - DNA, 25 bp, Homo sapien
aatggaacggaatggctacagcgag

SEQ ID NO: 5434766 - DNA, 25 bp, Homo sapien
tcttctatgggtttaatgggaggct

SEQ ID NO: 5434767 - DNA, 25 bp, Homo sapien
tacagcgagtgtccaaagaccacaa

SEQ ID NO: 5434768 - DNA, 25 bp, Homo sapien
ttgccaaatcccaaacacatacggg

SEQ ID NO: 5434769 - DNA, 25 bp, Homo sapien
aagtgtaggaaggtacaatctctaa

SEQ ID NO: 5434770 - DNA, 25 bp, Homo sapien
tttcgctgccacaatagctaactgt

SEQ ID NO: 5434771 - DNA, 25 bp, Homo sapien
caatctctaatgattgtagcccgtg

SEQ ID NO: 5434772 - DNA, 25 bp, Homo sapien
ggcctatttcgtcaacaacaatcag

SEQ ID NO: 5434773 - DNA, 25 bp, Homo sapien
tgaaccttttactcttggcaagccc

SEQ ID NO: 5434774 - DNA, 25 bp, Homo sapien
gacacagtgatgaaatcgcattccg

SEQ ID NO: 5434775 - DNA, 25 bp, Homo sapien
caggcaccgggtatacagtaaggaa

SEQ ID NO: 5434776 - DNA, 25 bp, Homo sapien
aatgtctgaagagtgacgccctctc

SEQ ID NO: 5434777 - DNA, 25 bp, Homo sapien
actcctcaggagacatggggagcag

SEQ ID NO: 5434778 - DNA, 25 bp, Homo sapien
actatccgagacacctcgtcaaact

SEQ ID NO: 5434779 - DNA, 25 bp, Homo sapien
gagacacctcgtcaaactcctcagg

SEQ ID NO: 5434780 - DNA, 25 bp, Homo sapien
tgtcgaattctacagagcccactat

SEQ ID NO: 5434781 - DNA, 25 bp, Homo sapien
cctcgtggcttaccctggacagaaa

SEQ ID NO: 5434782 - DNA, 25 bp, Homo sapien
taccctgagatgacaatgcctcgtg

SEQ ID NO: 5434783 - DNA, 25 bp, Homo sapien
gagcatgtgcggtgcactaccctga

SEQ ID NO: 5434784 - DNA, 25 bp, Homo sapien
tccagggatgtgataagcaatagcc

SEQ ID NO: 5434785 - DNA, 25 bp, Homo sapien
tgctccacacagtgtttttacatga

SEQ ID NO: 5434786 - DNA, 25 bp, Homo sapien
tgtttttacatgaaggctacatcca

SEQ ID NO: 5434787 - DNA, 25 bp, Homo sapien
tacatccattcaccccaagacagtg

SEQ ID NO: 5434788 - DNA, 25 bp, Homo sapien
tacatgaaggctacatccattcacc

SEQ ID NO: 5434789 - DNA, 25 bp, Homo sapien
cattactttggccttttctagattg

SEQ ID NO: 5434790 - DNA, 25 bp, Homo sapien
gccaaataactgacaatgacatttc

SEQ ID NO: 5434791 - DNA, 25 bp, Homo sapien
aaagcaagtggagacagtgtatctc

SEQ ID NO: 5434792 - DNA, 25 bp, Homo sapien
aatcaaagcaagtggagacagtgta

SEQ ID NO: 5434793 - DNA, 25 bp, Homo sapien
gggatctcaacaagttcagctgtga

SEQ ID NO: 5434794 - DNA, 25 bp, Homo sapien
tacaagcatcttcaacaggccccag

SEQ ID NO: 5434795 - DNA, 25 bp, Homo sapien
aaaatgctgataggcagtaacacgg

SEQ ID NO: 5434796 - DNA, 25 bp, Homo sapien
tgatggcgatagcaattacaatgga

SEQ ID NO: 5434797 - DNA, 25 bp, Homo sapien
cagaaatcaactcagtcttgatata

SEQ ID NO: 5434798 - DNA, 25 bp, Homo sapien
gggccatcaagttccattggctctg

SEQ ID NO: 5434799 - DNA, 25 bp, Homo sapien
tcctttagggccatcaagttccatt

SEQ ID NO: 5434800 - DNA, 25 bp, Homo sapien
gtcttgatatatccagttcctttag

SEQ ID NO: 5434801 - DNA, 25 bp, Homo sapien
tactgtgtttctagacagcttagcc

SEQ ID NO: 5434802 - DNA, 25 bp, Homo sapien
cagaatacaacatcaacttttcggg

SEQ ID NO: 5434803 - DNA, 25 bp, Homo sapien
tcaaccgaaattccatcagaataca

SEQ ID NO: 5434804 - DNA, 25 bp, Homo sapien
tgtgtacgctttccatcaaccgaaa

SEQ ID NO: 5434805 - DNA, 25 bp, Homo sapien
tggatacagatacttcaggggattc

SEQ ID NO: 5434806 - DNA, 25 bp, Homo sapien
gggttcaaccgcatggaagtcaggt

SEQ ID NO: 5434807 - DNA, 25 bp, Homo sapien
tttcttcgtgtagggttcaaccgca

SEQ ID NO: 5434808 - DNA, 25 bp, Homo sapien
tgactttgtaattgcgaatgatgtc

SEQ ID NO: 5434809 - DNA, 25 bp, Homo sapien
gattccttccaagaacgggttgcag

SEQ ID NO: 5434810 - DNA, 25 bp, Homo sapien
cacactctactctgggatgacccta

SEQ ID NO: 5434811 - DNA, 25 bp, Homo sapien
tatgaagtcttctcccgaagcctgt

SEQ ID NO: 5434812 - DNA, 25 bp, Homo sapien
tacgctgttgagcttcaccctcaga

SEQ ID NO: 5434813 - DNA, 25 bp, Homo sapien
tatctgtatgagctgactggcggcg

SEQ ID NO: 5434814 - DNA, 25 bp, Homo sapien
ggactatgtgctcaaactcccactc

SEQ ID NO: 5434815 - DNA, 25 bp, Homo sapien
gcgatgaagagggacttcacacaca

SEQ ID NO: 5434816 - DNA, 25 bp, Homo sapien
atggaatggtgggactatgtgctca

SEQ ID NO: 5434817 - DNA, 25 bp, Homo sapien
tgggaccgctccacccatgtgaatg

SEQ ID NO: 5434818 - DNA, 25 bp, Homo sapien
ctggtccttcaacagggcacgctct

SEQ ID NO: 5434819 - DNA, 25 bp, Homo sapien
cgcagcaggaaggtccccggctgct

SEQ ID NO: 5434820 - DNA, 25 bp, Homo sapien
gggagctctcactgaaccgcagcag

SEQ ID NO: 5434821 - DNA, 25 bp, Homo sapien
ctggatatcgaagagatggacggat

SEQ ID NO: 5434822 - DNA, 25 bp, Homo sapien
gatggacggatgggcttttagttca

SEQ ID NO: 5434823 - DNA, 25 bp, Homo sapien
tggacggatgggcttttagttcaat

SEQ ID NO: 5434824 - DNA, 25 bp, Homo sapien
gacggatgggcttttagttcaatca

SEQ ID NO: 5434825 - DNA, 25 bp, Homo sapien
tgtgagattcacacacgcctagtca

SEQ ID NO: 5434826 - DNA, 25 bp, Homo sapien
cctataaatgcgcactcctgtgaga

SEQ ID NO: 5434827 - DNA, 25 bp, Homo sapien
tcaaaatacatctatcggtggccct

SEQ ID NO: 5434828 - DNA, 25 bp, Homo sapien
gaggttctactcttctgaagccctg

SEQ ID NO: 5434829 - DNA, 25 bp, Homo sapien
agccagaagggaaaatttttatcat

SEQ ID NO: 5434830 - DNA, 25 bp, Homo sapien
agagggagcaggtgttttttaatga

SEQ ID NO: 5434831 - DNA, 25 bp, Homo sapien
gagttctaggatgctttcaatccaa

SEQ ID NO: 5434832 - DNA, 25 bp, Homo sapien
ccatcattccagagagggagcaggt

SEQ ID NO: 5434833 - DNA, 25 bp, Homo sapien
ccaccatcatttgcaaagactcccc

SEQ ID NO: 5434834 - DNA, 25 bp, Homo sapien
tcccaccatcatttgcaaagactcc

SEQ ID NO: 5434835 - DNA, 25 bp, Homo sapien
tgaaagtatacaaatgcagacatta

SEQ ID NO: 5434836 - DNA, 25 bp, Homo sapien
ctgaaagtatacaaatgcagacatt

SEQ ID NO: 5434837 - DNA, 25 bp, Homo sapien
tcgtccacggaatgagaccatcggg

SEQ ID NO: 5434838 - DNA, 25 bp, Homo sapien
agaccatcggggctggcgttaggac

SEQ ID NO: 5434839 - DNA, 25 bp, Homo sapien
cttacaaaacctcgtccacggaatg

SEQ ID NO: 5434840 - DNA, 25 bp, Homo sapien
aaacctcgtccacggaatgagacca

SEQ ID NO: 5434841 - DNA, 25 bp, Homo sapien
acataacaagttaatatgcatatac

SEQ ID NO: 5434842 - DNA, 25 bp, Homo sapien
aacataacaagttaatatgcatata

SEQ ID NO: 5434843 - DNA, 25 bp, Homo sapien
gtccacattgagacctcttttggtg

SEQ ID NO: 5434844 - DNA, 25 bp, Homo sapien
tctgaaagctgagcccatcgtgcac

SEQ ID NO: 5434845 - DNA, 25 bp, Homo sapien
gcccatcgtgcacatggtggagtca

SEQ ID NO: 5434846 - DNA, 25 bp, Homo sapien
aaagctgagcccatcgtgcacatgg

SEQ ID NO: 5434847 - DNA, 25 bp, Homo sapien
tctagtttatatgacacacaggtgc

SEQ ID NO: 5434848 - DNA, 25 bp, Homo sapien
aagtgtggcactaaaacatatgtcc

SEQ ID NO: 5434849 - DNA, 25 bp, Homo sapien
tctaagggttactacagagacacca

SEQ ID NO: 5434850 - DNA, 25 bp, Homo sapien
ggtcatttgaagacacacccgtgca

SEQ ID NO: 5434851 - DNA, 25 bp, Homo sapien
agatcaccacaacgggcagagaggt

SEQ ID NO: 5434852 - DNA, 25 bp, Homo sapien
cctgggttccgccaccagcatgttg

SEQ ID NO: 5434853 - DNA, 25 bp, Homo sapien
gttccgccaccagcatgttgtacca

SEQ ID NO: 5434854 - DNA, 25 bp, Homo sapien
aggcccaaccgctcgggagctggct

SEQ ID NO: 5434855 - DNA, 25 bp, Homo sapien
caaaactaagggagtgaagctcttc

SEQ ID NO: 5434856 - DNA, 25 bp, Homo sapien
tcgaggtcaattaccaaaccaggct

SEQ ID NO: 5434857 - DNA, 25 bp, Homo sapien
gctcttcagtaacgatgagaggacc

SEQ ID NO: 5434858 - DNA, 25 bp, Homo sapien
aggctggcacaattgggtttcaaaa

SEQ ID NO: 5434859 - DNA, 25 bp, Homo sapien
ctcattcgttctggtgccagcattt

SEQ ID NO: 5434860 - DNA, 25 bp, Homo sapien
tcattcgttctggtgccagcatttt

SEQ ID NO: 5434861 - DNA, 25 bp, Homo sapien
ggatctcttggaatcacaacccgct

SEQ ID NO: 5434862 - DNA, 25 bp, Homo sapien
tgccctcaagtggacgtcaatctct

SEQ ID NO: 5434863 - DNA, 25 bp, Homo sapien
tgcggacaccagtctggagggatct

SEQ ID NO: 5434864 - DNA, 25 bp, Homo sapien
tccatgagcagaagcacgtttcctc

SEQ ID NO: 5434865 - DNA, 25 bp, Homo sapien
aggaaagatggtgcacccacacaga

SEQ ID NO: 5434866 - DNA, 25 bp, Homo sapien
agcttcggactcagcacccacagag

SEQ ID NO: 5434867 - DNA, 25 bp, Homo sapien
gaaagatggtgcacccacacagagc

SEQ ID NO: 5434868 - DNA, 25 bp, Homo sapien
ggaaagcttcggactcagcacccac

SEQ ID NO: 5434869 - DNA, 25 bp, Homo sapien
aattcagccgccagactgccattgg

SEQ ID NO: 5434870 - DNA, 25 bp, Homo sapien
gaaattcagccgccagactgccatt

SEQ ID NO: 5434871 - DNA, 25 bp, Homo sapien
tgccgaaattcagccgccagactgc

SEQ ID NO: 5434872 - DNA, 25 bp, Homo sapien
ggtgccgaaattcagccgccagact

SEQ ID NO: 5434873 - DNA, 25 bp, Homo sapien
tgcgtgcccaaaatgttgaacttcc

SEQ ID NO: 5434874 - DNA, 25 bp, Homo sapien
tgtgtgcgtgcccaaaatgttgaac

SEQ ID NO: 5434875 - DNA, 25 bp, Homo sapien
tgtgcgtgcccaaaatgttgaactt

SEQ ID NO: 5434876 - DNA, 25 bp, Homo sapien
gcgtgcccaaaatgttgaacttcct

SEQ ID NO: 5434877 - DNA, 25 bp, Homo sapien
aggaaagaaatgctgaaaagtcttc

SEQ ID NO: 5434878 - DNA, 25 bp, Homo sapien
aaagaaatgctgaaaagtcttccaa

SEQ ID NO: 5434879 - DNA, 25 bp, Homo sapien
ctatacaatataggaaagaaatgct

SEQ ID NO: 5434880 - DNA, 25 bp, Homo sapien
tatacaatataggaaagaaatgctg

SEQ ID NO: 5434881 - DNA, 25 bp, Homo sapien
ccttttactgtatttctctcattca

SEQ ID NO: 5434882 - DNA, 25 bp, Homo sapien
ttactgtatttctctcattcacatc

SEQ ID NO: 5434883 - DNA, 25 bp, Homo sapien
tactgtatttctctcattcacatct

SEQ ID NO: 5434884 - DNA, 25 bp, Homo sapien
ttttactgtatttctctcattcaca

SEQ ID NO: 5434885 - DNA, 25 bp, Homo sapien
tgtcaaagctaagaagaccgtcaga

SEQ ID NO: 5434886 - DNA, 25 bp, Homo sapien
tggccaaataatgtatccgtgagcg

SEQ ID NO: 5434887 - DNA, 25 bp, Homo sapien
tccgtgagcgtcctagatgtagact

SEQ ID NO: 5434888 - DNA, 25 bp, Homo sapien
caccattagctatggaagggaccta

SEQ ID NO: 5434889 - DNA, 25 bp, Homo sapien
gcctcgggttggatcaggggcctct

SEQ ID NO: 5434890 - DNA, 25 bp, Homo sapien
atcatggcagcctggacgttcagcc

SEQ ID NO: 5434891 - DNA, 25 bp, Homo sapien
tcagcctcgggttggatcaggggcc

SEQ ID NO: 5434892 - DNA, 25 bp, Homo sapien
cagaatcatggcagcctggacgttc

SEQ ID NO: 5434893 - DNA, 25 bp, Homo sapien
aaattataattcagctcttgcaatt

SEQ ID NO: 5434894 - DNA, 25 bp, Homo sapien
tatcaaataagactttgactttcaa

SEQ ID NO: 5434895 - DNA, 25 bp, Homo sapien
ttatcaaataagactttgactttca

SEQ ID NO: 5434896 - DNA, 25 bp, Homo sapien
ttataattcagctcttgcaatttca

SEQ ID NO: 5434897 - DNA, 25 bp, Homo sapien
tgagggtgcgttggcatgcagggct

SEQ ID NO: 5434898 - DNA, 25 bp, Homo sapien
ggacccctgtcttcaagaccagcgg

SEQ ID NO: 5434899 - DNA, 25 bp, Homo sapien
gggctgtctttccaccacaaacgag

SEQ ID NO: 5434900 - DNA, 25 bp, Homo sapien
ttcacagtgaactggacccctgtct

SEQ ID NO: 5434901 - DNA, 25 bp, Homo sapien
agcaaatcagatcttacatataaca

SEQ ID NO: 5434902 - DNA, 25 bp, Homo sapien
caaggaagaactagcaaatcagatc

SEQ ID NO: 5434903 - DNA, 25 bp, Homo sapien
tataactctacaaggaagaactagc

SEQ ID NO: 5434904 - DNA, 25 bp, Homo sapien
taaacatatcttcagttgttttgtt

SEQ ID NO: 5434905 - DNA, 25 bp, Homo sapien
ttgggttcagattgcaaatttatta

SEQ ID NO: 5434906 - DNA, 25 bp, Homo sapien
tgttgctccaggacccattagcttc

SEQ ID NO: 5434907 - DNA, 25 bp, Homo sapien
gttgctccaggacccattagcttct

SEQ ID NO: 5434908 - DNA, 25 bp, Homo sapien
tgacgttttcactgggataatgatc

SEQ ID NO: 5434909 - DNA, 25 bp, Homo sapien
gttgacgttttcactgggataatga

SEQ ID NO: 5434910 - DNA, 25 bp, Homo sapien
ttgttgacgttttcactgggataat

SEQ ID NO: 5434911 - DNA, 25 bp, Homo sapien
gacgttttcactgggataatgatct

SEQ ID NO: 5434912 - DNA, 25 bp, Homo sapien
gagatgactgttcgaaacctttcct

SEQ ID NO: 5434913 - DNA, 25 bp, Homo sapien
tggagatgactgttcgaaacctttc

SEQ ID NO: 5434914 - DNA, 25 bp, Homo sapien
tgactgttcgaaacctttcctgttc

SEQ ID NO: 5434915 - DNA, 25 bp, Homo sapien
cactaggatgccattggctcctctg

SEQ ID NO: 5434916 - DNA, 25 bp, Homo sapien
gtaatttgaataaataatcaatttg

SEQ ID NO: 5434917 - DNA, 25 bp, Homo sapien
tttgaataaataatcaatttgggat

SEQ ID NO: 5434918 - DNA, 25 bp, Homo sapien
tcagaagtaatttgaataaataatc

SEQ ID NO: 5434919 - DNA, 25 bp, Homo sapien
aatttgaataaataatcaatttggg

SEQ ID NO: 5434920 - DNA, 25 bp, Homo sapien
gccacggccacccttgctgctacag

SEQ ID NO: 5434921 - DNA, 25 bp, Homo sapien
ctgccctgactctctgcaccacggg

SEQ ID NO: 5434922 - DNA, 25 bp, Homo sapien
atgtcactgtagctgccaccgctgc

SEQ ID NO: 5434923 - DNA, 25 bp, Homo sapien
tcatgctggacatgtcactgtagct

SEQ ID NO: 5434924 - DNA, 25 bp, Homo sapien
ataggctgttctgggagagtaaatg

SEQ ID NO: 5434925 - DNA, 25 bp, Homo sapien
agtaaatgtcttccccgactctgcc

SEQ ID NO: 5434926 - DNA, 25 bp, Homo sapien
agagtaaatgtcttccccgactctg

SEQ ID NO: 5434927 - DNA, 25 bp, Homo sapien
gctgttctgggagagtaaatgtctt

SEQ ID NO: 5434928 - DNA, 25 bp, Homo sapien
aagcgtggagtgttcagctaggtcc

SEQ ID NO: 5434929 - DNA, 25 bp, Homo sapien
caggctgcagaaggggggccgtgaa

SEQ ID NO: 5434930 - DNA, 25 bp, Homo sapien
tggagtgttcagctaggtccaggct

SEQ ID NO: 5434931 - DNA, 25 bp, Homo sapien
ggggggccgtgaatgcccagctggg

SEQ ID NO: 5434932 - DNA, 25 bp, Homo sapien
tgatgaggaaccagaatggaactct

SEQ ID NO: 5434933 - DNA, 25 bp, Homo sapien
gtgatgaggaaccagaatggaactc

SEQ ID NO: 5434934 - DNA, 25 bp, Homo sapien
ctggggaagagtccagaaaggagga

SEQ ID NO: 5434935 - DNA, 25 bp, Homo sapien
agtccagaaaggaggatttgagagc

SEQ ID NO: 5434936 - DNA, 25 bp, Homo sapien
agagtccagaaaggaggatttgaga

SEQ ID NO: 5434937 - DNA, 25 bp, Homo sapien
gaagagtccagaaaggaggatttga

SEQ ID NO: 5434938 - DNA, 25 bp, Homo sapien
gcagactctccgcaactatagtgaa

SEQ ID NO: 5434939 - DNA, 25 bp, Homo sapien
ttttaagctgctgccgaacttgctg

SEQ ID NO: 5434940 - DNA, 25 bp, Homo sapien
aaagactgaaggtgcggtcccataa

SEQ ID NO: 5434941 - DNA, 25 bp, Homo sapien
tgatagggtcatgttcgtaggtgta

SEQ ID NO: 5434942 - DNA, 25 bp, Homo sapien
caatacaggcgctctgctgtctccg

SEQ ID NO: 5434943 - DNA, 25 bp, Homo sapien
tgtctccgcttccactccactagtt

SEQ ID NO: 5434944 - DNA, 25 bp, Homo sapien
atccaagcaagcattgggcggcccc

SEQ ID NO: 5434945 - DNA, 25 bp, Homo sapien
tacaggcgctctgctgtctccgctt

SEQ ID NO: 5434946 - DNA, 25 bp, Homo sapien
ttctcttattgtcaagcattaaata

SEQ ID NO: 5434947 - DNA, 25 bp, Homo sapien
ctttctcttattgtcaagcattaaa

SEQ ID NO: 5434948 - DNA, 25 bp, Homo sapien
ctttgccacaccattggtctcgtgt

SEQ ID NO: 5434949 - DNA, 25 bp, Homo sapien
tttgccacaccattggtctcgtgtt

SEQ ID NO: 5434950 - DNA, 25 bp, Homo sapien
ctctgttctgcaaggttttgcattt

SEQ ID NO: 5434951 - DNA, 25 bp, Homo sapien
ccaggctcttgatttcatgctctat

SEQ ID NO: 5434952 - DNA, 25 bp, Homo sapien
gttctgcaaggttttgcatttgaag

SEQ ID NO: 5434953 - DNA, 25 bp, Homo sapien
ggctcttgatttcatgctctataca

SEQ ID NO: 5434954 - DNA, 25 bp, Homo sapien
tttctgtttgtctaacatcactgtg

SEQ ID NO: 5434955 - DNA, 25 bp, Homo sapien
aaccttgtccttcacatttctgact

SEQ ID NO: 5434956 - DNA, 25 bp, Homo sapien
gtgctctgaatattccccgactgag

SEQ ID NO: 5434957 - DNA, 25 bp, Homo sapien
gactttactgtcaagctctttctgt

SEQ ID NO: 5434958 - DNA, 25 bp, Homo sapien
tagccatcgttttcttcagggtgtg

SEQ ID NO: 5434959 - DNA, 25 bp, Homo sapien
tgtacttgctggttacactccaaag

SEQ ID NO: 5434960 - DNA, 25 bp, Homo sapien
gctggttacactccaaagtcaagtc

SEQ ID NO: 5434961 - DNA, 25 bp, Homo sapien
gtcaatatgaaatttttcccaaggc

SEQ ID NO: 5434962 - DNA, 25 bp, Homo sapien
tctagtagctgctgtagagccatcc

SEQ ID NO: 5434963 - DNA, 25 bp, Homo sapien
ttggacagctgcaagaaccctctat

SEQ ID NO: 5434964 - DNA, 25 bp, Homo sapien
tgattctactgagcgcaagcttcca

SEQ ID NO: 5434965 - DNA, 25 bp, Homo sapien
gctgaaccctgacaactaggaaggt

SEQ ID NO: 5434966 - DNA, 25 bp, Homo sapien
cagacagctgtaaatgatcatagac

SEQ ID NO: 5434967 - DNA, 25 bp, Homo sapien
aatgatcatagacatctggattggg

SEQ ID NO: 5434968 - DNA, 25 bp, Homo sapien
gacatctggattgggtcttcctgaa

SEQ ID NO: 5434969 - DNA, 25 bp, Homo sapien
ctgattaaatctctgggcgttttcc

SEQ ID NO: 5434970 - DNA, 25 bp, Homo sapien
gactatattgatcatccagctgtga

SEQ ID NO: 5434971 - DNA, 25 bp, Homo sapien
tgaaacatcattggcagcgtgctcc

SEQ ID NO: 5434972 - DNA, 25 bp, Homo sapien
gaaaacggatggtggcaaatgaaac

SEQ ID NO: 5434973 - DNA, 25 bp, Homo sapien
tatgctgtagcaagaagttattctc

SEQ ID NO: 5434974 - DNA, 25 bp, Homo sapien
ttgcttttctaaccactgtgccagg

SEQ ID NO: 5434975 - DNA, 25 bp, Homo sapien
tcataaagctggtgaacctgctcca

SEQ ID NO: 5434976 - DNA, 25 bp, Homo sapien
ttccatgggaaaactgtcatcataa

SEQ ID NO: 5434977 - DNA, 25 bp, Homo sapien
gctgaagttcgtaccactgagacat

SEQ ID NO: 5434978 - DNA, 25 bp, Homo sapien
gaggattctgtgcactggtgtatcc

SEQ ID NO: 5434979 - DNA, 25 bp, Homo sapien
ggaggattctgtgcactggtgtatc

SEQ ID NO: 5434980 - DNA, 25 bp, Homo sapien
tgttcacaaatctggagtcagtctc

SEQ ID NO: 5434981 - DNA, 25 bp, Homo sapien
gctgcccacagattggaccacatca

SEQ ID NO: 5434982 - DNA, 25 bp, Homo sapien
tgtccattcctaggcagatttccac

SEQ ID NO: 5434983 - DNA, 25 bp, Homo sapien
caactcagggagtggcatggccatc

SEQ ID NO: 5434984 - DNA, 25 bp, Homo sapien
taaactctaggaagacattaagccc

SEQ ID NO: 5434985 - DNA, 25 bp, Homo sapien
gaagtcatgtactcattcatctgat

SEQ ID NO: 5434986 - DNA, 25 bp, Homo sapien
tagaaacataattaagattccgaag

SEQ ID NO: 5434987 - DNA, 25 bp, Homo sapien
agacattaagcccttccatctttga

SEQ ID NO: 5434988 - DNA, 25 bp, Homo sapien
tgccaccttgtgccccaacaagggc

SEQ ID NO: 5434989 - DNA, 25 bp, Homo sapien
ctgccaccttgtgccccaacaaggg

SEQ ID NO: 5434990 - DNA, 25 bp, Homo sapien
cctagacagctctcgaggatggcat

SEQ ID NO: 5434991 - DNA, 25 bp, Homo sapien
cacgttaggtgccaagactgtcgag

SEQ ID NO: 5434992 - DNA, 25 bp, Homo sapien
gagcagctacgcacagcacgttagg

SEQ ID NO: 5434993 - DNA, 25 bp, Homo sapien
gagtgcgaacgttaacctagacagc

SEQ ID NO: 5434994 - DNA, 25 bp, Homo sapien
caaggacaatcgtgctgagcagtgc

SEQ ID NO: 5434995 - DNA, 25 bp, Homo sapien
tgggatcactattcgcgggtcagca

SEQ ID NO: 5434996 - DNA, 25 bp, Homo sapien
tggcactgctcgcacttggaatact

SEQ ID NO: 5434997 - DNA, 25 bp, Homo sapien
ttggaatactcaggacgcgttcttc

SEQ ID NO: 5434998 - DNA, 25 bp, Homo sapien
cagactctgcgcaggaaagcgaaac

SEQ ID NO: 5434999 - DNA, 25 bp, Homo sapien
tctgcgcgcaggatccggaagggct

SEQ ID NO: 5435000 - DNA, 25 bp, Homo sapien
cgctgggtcgcctctgctcggtctg

SEQ ID NO: 5435001 - DNA, 25 bp, Homo sapien
gcagcctctcccgagcgcgctgggt

SEQ ID NO: 5435002 - DNA, 25 bp, Homo sapien
aacttgcacagatattagcttcaat

SEQ ID NO: 5435003 - DNA, 25 bp, Homo sapien
tggcactccaaatcccaatttggat

SEQ ID NO: 5435004 - DNA, 25 bp, Homo sapien
ataatcctaacatctgcaaatagga

SEQ ID NO: 5435005 - DNA, 25 bp, Homo sapien
caaataggattatttggcactccaa

SEQ ID NO: 5435006 - DNA, 25 bp, Homo sapien
tgaaccgcttcggaaacagctggcc

SEQ ID NO: 5435007 - DNA, 25 bp, Homo sapien
gggacgcgagtgctcggaagagccg

SEQ ID NO: 5435008 - DNA, 25 bp, Homo sapien
aagagccgccccacgtgctttcggg

SEQ ID NO: 5435009 - DNA, 25 bp, Homo sapien
acgcccctggctttgcgcggtgcag

SEQ ID NO: 5435010 - DNA, 25 bp, Homo sapien
ccaaaggagataagcactgtgccgg

SEQ ID NO: 5435011 - DNA, 25 bp, Homo sapien
ccagggatataactgtgagcagggc

SEQ ID NO: 5435012 - DNA, 25 bp, Homo sapien
tgacatggacctctttggcagtctg

SEQ ID NO: 5435013 - DNA, 25 bp, Homo sapien
gaagcgtggcatgacctgagccatg

SEQ ID NO: 5435014 - DNA, 25 bp, Homo sapien
ctccataagtggaatcagcctaagg

SEQ ID NO: 5435015 - DNA, 25 bp, Homo sapien
cataagtggaatcagcctaaggcct

SEQ ID NO: 5435016 - DNA, 25 bp, Homo sapien
taagtggaatcagcctaaggccttc

SEQ ID NO: 5435017 - DNA, 25 bp, Homo sapien
ccataagtggaatcagcctaaggcc

SEQ ID NO: 5435018 - DNA, 25 bp, Homo sapien
tctgttggttcttttaagagctggt

SEQ ID NO: 5435019 - DNA, 25 bp, Homo sapien
tgagtagaagcagcctaagggcctc

SEQ ID NO: 5435020 - DNA, 25 bp, Homo sapien
gaagcagcctaagggcctcacatgc

SEQ ID NO: 5435021 - DNA, 25 bp, Homo sapien
atgtgatctctacatacaccggctt

SEQ ID NO: 5435022 - DNA, 25 bp, Homo sapien
tagcattacttgctcaacagattca

SEQ ID NO: 5435023 - DNA, 25 bp, Homo sapien
aggcatagagagctctccaggtctt

SEQ ID NO: 5435024 - DNA, 25 bp, Homo sapien
gagagctccatgctattactaagga

SEQ ID NO: 5435025 - DNA, 25 bp, Homo sapien
atggcagatgcctcagtagcattac

SEQ ID NO: 5435026 - DNA, 25 bp, Homo sapien
actcccaattgaggagtgccacggg

SEQ ID NO: 5435027 - DNA, 25 bp, Homo sapien
caaacatttcctagaacctggtatt

SEQ ID NO: 5435028 - DNA, 25 bp, Homo sapien
aagcatttcagtcacaacactccca

SEQ ID NO: 5435029 - DNA, 25 bp, Homo sapien
tggttattgggcaaagaacagtctt

SEQ ID NO: 5435030 - DNA, 25 bp, Homo sapien
cattcagcagaataaggagacttca

SEQ ID NO: 5435031 - DNA, 25 bp, Homo sapien
tcattcagcagaataaggagacttc

SEQ ID NO: 5435032 - DNA, 25 bp, Homo sapien
attcagcagaataaggagacttcat

SEQ ID NO: 5435033 - DNA, 25 bp, Homo sapien
taatatcagcaacacgcaggaccat

SEQ ID NO: 5435034 - DNA, 25 bp, Homo sapien
ggcccatggtgcaagcagcgatagt

SEQ ID NO: 5435035 - DNA, 25 bp, Homo sapien
taagtaactgaaggtgtctgctttc

SEQ ID NO: 5435036 - DNA, 25 bp, Homo sapien
taggaatattttgccctctggtggt

SEQ ID NO: 5435037 - DNA, 25 bp, Homo sapien
cctttgcatcgttggaaacaccttt

SEQ ID NO: 5435038 - DNA, 25 bp, Homo sapien
cacctttgcatcgttggaaacacct

SEQ ID NO: 5435039 - DNA, 25 bp, Homo sapien
tcgttggaaacacctttgaccagca

SEQ ID NO: 5435040 - DNA, 25 bp, Homo sapien
tgcatcgttggaaacacctttgacc

SEQ ID NO: 5435041 - DNA, 25 bp, Homo sapien
gactcaggttttctctcaacaccgc

SEQ ID NO: 5435042 - DNA, 25 bp, Homo sapien
gtttcaattgttgtgggactcaggt

SEQ ID NO: 5435043 - DNA, 25 bp, Homo sapien
gacatgggaagaaggtctgatggag

SEQ ID NO: 5435044 - DNA, 25 bp, Homo sapien
ctcaacaccgcatacacacttggag

SEQ ID NO: 5435045 - DNA, 25 bp, Homo sapien
gataacaaggtcaatatggacaagg

SEQ ID NO: 5435046 - DNA, 25 bp, Homo sapien
aagagataacaaggtcaatatggac

SEQ ID NO: 5435047 - DNA, 25 bp, Homo sapien
taacaaggtcaatatggacaaggat

SEQ ID NO: 5435048 - DNA, 25 bp, Homo sapien
gagataacaaggtcaatatggacaa

SEQ ID NO: 5435049 - DNA, 25 bp, Homo sapien
cacaatagattgtggtaagtgtgcc

SEQ ID NO: 5435050 - DNA, 25 bp, Homo sapien
gaaggctagccttatgtattaaagg

SEQ ID NO: 5435051 - DNA, 25 bp, Homo sapien
tcagttatgtgtactctgctctacc

SEQ ID NO: 5435052 - DNA, 25 bp, Homo sapien
acttactgtggcatatatggcatat

SEQ ID NO: 5435053 - DNA, 25 bp, Homo sapien
cagaaggaacataacctttgtcacc

SEQ ID NO: 5435054 - DNA, 25 bp, Homo sapien
acagaaggaacataacctttgtcac

SEQ ID NO: 5435055 - DNA, 25 bp, Homo sapien
cataataactttgtagtctcgcagg

SEQ ID NO: 5435056 - DNA, 25 bp, Homo sapien
caggatataggtacttcagagggtt

SEQ ID NO: 5435057 - DNA, 25 bp, Homo sapien
tctcgcaggatgtcagcgaatggca

SEQ ID NO: 5435058 - DNA, 25 bp, Homo sapien
cagacaaccggcctttattgtaggg

SEQ ID NO: 5435059 - DNA, 25 bp, Homo sapien
aacagccgttccttctctttgctaa

SEQ ID NO: 5435060 - DNA, 25 bp, Homo sapien
gccaggcattttatcctttagcaac

SEQ ID NO: 5435061 - DNA, 25 bp, Homo sapien
ccaggtgaaagttattcctccgaga

SEQ ID NO: 5435062 - DNA, 25 bp, Homo sapien
cctccgagatggctttcactgaatc

SEQ ID NO: 5435063 - DNA, 25 bp, Homo sapien
tgtgtttcttaattagatccaatat

SEQ ID NO: 5435064 - DNA, 25 bp, Homo sapien
caagccatgtccaaaaggtaaatga

SEQ ID NO: 5435065 - DNA, 25 bp, Homo sapien
attagatccaatattgcttcaagcc

SEQ ID NO: 5435066 - DNA, 25 bp, Homo sapien
taaatgatttaccaggtaaatgttc

SEQ ID NO: 5435067 - DNA, 25 bp, Homo sapien
cttggcccaggtgaggtgaccatca

SEQ ID NO: 5435068 - DNA, 25 bp, Homo sapien
gaggtgaccatcactgtagctagat

SEQ ID NO: 5435069 - DNA, 25 bp, Homo sapien
caggtgaggtgaccatcactgtagc

SEQ ID NO: 5435070 - DNA, 25 bp, Homo sapien
tgaccatcactgtagctagattgga

SEQ ID NO: 5435071 - DNA, 25 bp, Homo sapien
gagttgatctgagttaagaccacga

SEQ ID NO: 5435072 - DNA, 25 bp, Homo sapien
tctctgccagcatatggagttgatc

SEQ ID NO: 5435073 - DNA, 25 bp, Homo sapien
ccagctcatcacctccagtagttga

SEQ ID NO: 5435074 - DNA, 25 bp, Homo sapien
cgaccaacgtacgatgaaaactgcc

SEQ ID NO: 5435075 - DNA, 25 bp, Homo sapien
aggtaactgactgacattggaaatc

SEQ ID NO: 5435076 - DNA, 25 bp, Homo sapien
gaatcgttggttgacacgttgtacc

SEQ ID NO: 5435077 - DNA, 25 bp, Homo sapien
taccaaatgatggatgcccaagcat

SEQ ID NO: 5435078 - DNA, 25 bp, Homo sapien
gaaatcatcaccacaggcaatgagc

SEQ ID NO: 5435079 - DNA, 25 bp, Homo sapien
ctctaaagggccaatctcaagccag

SEQ ID NO: 5435080 - DNA, 25 bp, Homo sapien
tggtgccctggtcactgaaatgact

SEQ ID NO: 5435081 - DNA, 25 bp, Homo sapien
catggtgccctggtcactgaaatga

SEQ ID NO: 5435082 - DNA, 25 bp, Homo sapien
attgatcttatgcttgaccctcgcc

SEQ ID NO: 5435083 - DNA, 25 bp, Homo sapien
gatctgtgtttcaaacgttatggaa

SEQ ID NO: 5435084 - DNA, 25 bp, Homo sapien
ctccaaatctatggtcaggccatag

SEQ ID NO: 5435085 - DNA, 25 bp, Homo sapien
gccatagaggcagatctgtgtttca

SEQ ID NO: 5435086 - DNA, 25 bp, Homo sapien
aacgttatggaatgaagttcttcag

SEQ ID NO: 5435087 - DNA, 25 bp, Homo sapien
ctcactatctaatagaagacttgtt

SEQ ID NO: 5435088 - DNA, 25 bp, Homo sapien
caaatgcatactcactatctaatag

SEQ ID NO: 5435089 - DNA, 25 bp, Homo sapien
tgcatactcactatctaatagaaga

SEQ ID NO: 5435090 - DNA, 25 bp, Homo sapien
tacccccaaacagtctctattattg

SEQ ID NO: 5435091 - DNA, 25 bp, Homo sapien
aatatatggcatgttgaaggcgcag

SEQ ID NO: 5435092 - DNA, 25 bp, Homo sapien
gaacaaaccaactgtcaaatggcct

SEQ ID NO: 5435093 - DNA, 25 bp, Homo sapien
gaaggcgcagatcaaccgtttgtaa

SEQ ID NO: 5435094 - DNA, 25 bp, Homo sapien
gcccggccgtattctctattcctgt

SEQ ID NO: 5435095 - DNA, 25 bp, Homo sapien
ctttacctccagcactggacttcat

SEQ ID NO: 5435096 - DNA, 25 bp, Homo sapien
ctccagcactggacttcatttcctt

SEQ ID NO: 5435097 - DNA, 25 bp, Homo sapien
tacctccagcactggacttcatttc

SEQ ID NO: 5435098 - DNA, 25 bp, Homo sapien
tttacctccagcactggacttcatt

SEQ ID NO: 5435099 - DNA, 25 bp, Homo sapien
gcagtctcgcattgtggcctgggct

SEQ ID NO: 5435100 - DNA, 25 bp, Homo sapien
tttgacattagttccacaaagtaca

SEQ ID NO: 5435101 - DNA, 25 bp, Homo sapien
aattctactgagagactcccattgg

SEQ ID NO: 5435102 - DNA, 25 bp, Homo sapien
tctactgagagactcccattggaag

SEQ ID NO: 5435103 - DNA, 25 bp, Homo sapien
agattcttcaatagacatggctttg

SEQ ID NO: 5435104 - DNA, 25 bp, Homo sapien
ttgtcaattgatgccttaaccttta

SEQ ID NO: 5435105 - DNA, 25 bp, Homo sapien
gtcaattgatgccttaacctttacc

SEQ ID NO: 5435106 - DNA, 25 bp, Homo sapien
gatgccttaacctttacctgatagt

SEQ ID NO: 5435107 - DNA, 25 bp, Homo sapien
aattgatgccttaacctttacctga

SEQ ID NO: 5435108 - DNA, 25 bp, Homo sapien
gttggcatacatggctgtcgctcaa

SEQ ID NO: 5435109 - DNA, 25 bp, Homo sapien
tgggttggcatacatggctgtcgct

SEQ ID NO: 5435110 - DNA, 25 bp, Homo sapien
tgagggtgggttggcatacatggct

SEQ ID NO: 5435111 - DNA, 25 bp, Homo sapien
catggctgtcgctcaaccacaaatg

SEQ ID NO: 5435112 - DNA, 25 bp, Homo sapien
tctttgcattggaatgggatcacct

SEQ ID NO: 5435113 - DNA, 25 bp, Homo sapien
ggttgtagatcaagaaggtgactct

SEQ ID NO: 5435114 - DNA, 25 bp, Homo sapien
gaaaagactttctgccaatagtgta

SEQ ID NO: 5435115 - DNA, 25 bp, Homo sapien
tgaaaaggttgtagatcaagaaggt

SEQ ID NO: 5435116 - DNA, 25 bp, Homo sapien
ctattgaacagaaaatgaaaatcaa

SEQ ID NO: 5435117 - DNA, 25 bp, Homo sapien
atgaaaatcaaagatagtttttcca

SEQ ID NO: 5435118 - DNA, 25 bp, Homo sapien
aacagaaaatgaaaatcaaagatag

SEQ ID NO: 5435119 - DNA, 25 bp, Homo sapien
agaaaatgaaaatcaaagatagttt

SEQ ID NO: 5435120 - DNA, 25 bp, Homo sapien
cagttctgaagctggtcgagcccat

SEQ ID NO: 5435121 - DNA, 25 bp, Homo sapien
tccagtcttgcagctcttctatgag

SEQ ID NO: 5435122 - DNA, 25 bp, Homo sapien
tcgagcccattgtggagtggacccc

SEQ ID NO: 5435123 - DNA, 25 bp, Homo sapien
gatgcaggcgatttgctgccgccgc

SEQ ID NO: 5435124 - DNA, 25 bp, Homo sapien
ctttctcttgaaatcgaggctgtta

SEQ ID NO: 5435125 - DNA, 25 bp, Homo sapien
caaaacttcctgattcaccatggca

SEQ ID NO: 5435126 - DNA, 25 bp, Homo sapien
catggcactattcttgtcactctga

SEQ ID NO: 5435127 - DNA, 25 bp, Homo sapien
tttcctgcagtgtcaaaacttcctg

SEQ ID NO: 5435128 - DNA, 25 bp, Homo sapien
cacgtgaagtgctcggaagctccct

SEQ ID NO: 5435129 - DNA, 25 bp, Homo sapien
tcgtaaaactagcagtgggccagag

SEQ ID NO: 5435130 - DNA, 25 bp, Homo sapien
caaaccgttgtttgttctccagtca

SEQ ID NO: 5435131 - DNA, 25 bp, Homo sapien
tcgtctctccatagcacacgtgaag

SEQ ID NO: 5435132 - DNA, 25 bp, Homo sapien
tcttgcagatcttctaagtatttgg

SEQ ID NO: 5435133 - DNA, 25 bp, Homo sapien
caaattcgtcttgcagatcttctaa

SEQ ID NO: 5435134 - DNA, 25 bp, Homo sapien
gcagatcttctaagtatttggtatc

SEQ ID NO: 5435135 - DNA, 25 bp, Homo sapien
tacctgtagtcaaattcgtcttgca

SEQ ID NO: 5435136 - DNA, 25 bp, Homo sapien
gcacactgtttttaatggcagccac

SEQ ID NO: 5435137 - DNA, 25 bp, Homo sapien
ttgtgctccacattcctctgtcttt

SEQ ID NO: 5435138 - DNA, 25 bp, Homo sapien
tctgtctttctgaaactgaagaact

SEQ ID NO: 5435139 - DNA, 25 bp, Homo sapien
tgaagaactttgtaaggatttctct

SEQ ID NO: 5435140 - DNA, 25 bp, Homo sapien
cactgtaccctaccaaagataataa

SEQ ID NO: 5435141 - DNA, 25 bp, Homo sapien
ccactgtaccctaccaaagataata

SEQ ID NO: 5435142 - DNA, 25 bp, Homo sapien
cacagctacatgcattggatttcca

SEQ ID NO: 5435143 - DNA, 25 bp, Homo sapien
accacagctacatgcattggatttc

SEQ ID NO: 5435144 - DNA, 25 bp, Homo sapien
ccacagctacatgcattggatttcc

SEQ ID NO: 5435145 - DNA, 25 bp, Homo sapien
taaatgtttcatgtgagcttgcaac

SEQ ID NO: 5435146 - DNA, 25 bp, Homo sapien
tatgacccagcatattaatatcttg

SEQ ID NO: 5435147 - DNA, 25 bp, Homo sapien
aatcttttattaccatgcactgacc

SEQ ID NO: 5435148 - DNA, 25 bp, Homo sapien
tcttcttgtgctactgtcatacaca

SEQ ID NO: 5435149 - DNA, 25 bp, Homo sapien
caattaggaattcactcctctgagt

SEQ ID NO: 5435150 - DNA, 25 bp, Homo sapien
tccagagtcagaagtaatagatgtg

SEQ ID NO: 5435151 - DNA, 25 bp, Homo sapien
taaagagtaactagttcatctgctc

SEQ ID NO: 5435152 - DNA, 25 bp, Homo sapien
tcttcttcatacaggcgacatggag

SEQ ID NO: 5435153 - DNA, 25 bp, Homo sapien
tttaaccaattaaccatcaagttca

SEQ ID NO: 5435154 - DNA, 25 bp, Homo sapien
tgtttttacaacaactgccaggtag

SEQ ID NO: 5435155 - DNA, 25 bp, Homo sapien
gctttatgcacagttcccacttgca

SEQ ID NO: 5435156 - DNA, 25 bp, Homo sapien
acattggcgatgacctttagcagca

SEQ ID NO: 5435157 - DNA, 25 bp, Homo sapien
tgaaattatttttgcacccagtggt

SEQ ID NO: 5435158 - DNA, 25 bp, Homo sapien
tgtacttgaagcatgtttactgact

SEQ ID NO: 5435159 - DNA, 25 bp, Homo sapien
ctcaatatgtacttgaagcatgttt

SEQ ID NO: 5435160 - DNA, 25 bp, Homo sapien
tgaagcatgtttactgactgaaatc

SEQ ID NO: 5435161 - DNA, 25 bp, Homo sapien
cttccttacaattttcctgcctgtt

SEQ ID NO: 5435162 - DNA, 25 bp, Homo sapien
tcagtggtacggttagttgtcacac

SEQ ID NO: 5435163 - DNA, 25 bp, Homo sapien
cacactagaggctgtagaaatctca

SEQ ID NO: 5435164 - DNA, 25 bp, Homo sapien
tgttacagctgtcaggccagcagat

SEQ ID NO: 5435165 - DNA, 25 bp, Homo sapien
tgtgaacaccttcatgtcgtctttc

SEQ ID NO: 5435166 - DNA, 25 bp, Homo sapien
caagatttggacctttgaatgcagg

SEQ ID NO: 5435167 - DNA, 25 bp, Homo sapien
tctccatgtcgatccaagggcagct

SEQ ID NO: 5435168 - DNA, 25 bp, Homo sapien
cacaagaggcttcaaaggtaatggt

SEQ ID NO: 5435169 - DNA, 25 bp, Homo sapien
tgtcccaggtgaagaagctaagtcc

SEQ ID NO: 5435170 - DNA, 25 bp, Homo sapien
agttttgaagaagaatcgttgccat

SEQ ID NO: 5435171 - DNA, 25 bp, Homo sapien
aacacgacctaactgttcatccagt

SEQ ID NO: 5435172 - DNA, 25 bp, Homo sapien
tgaagaagaatcgttgccatggttt

SEQ ID NO: 5435173 - DNA, 25 bp, Homo sapien
tagattgtgtatcaagagtaggttt

SEQ ID NO: 5435174 - DNA, 25 bp, Homo sapien
gattttcaatccattgggccaacag

SEQ ID NO: 5435175 - DNA, 25 bp, Homo sapien
cagatgccgaatttccatgggaaag

SEQ ID NO: 5435176 - DNA, 25 bp, Homo sapien
atttctaactgttggacttgattcc

SEQ ID NO: 5435177 - DNA, 25 bp, Homo sapien
tccattgggccaacagatgccgaat

SEQ ID NO: 5435178 - DNA, 25 bp, Homo sapien
ctcaagtccaaagtcagaagcgccc

SEQ ID NO: 5435179 - DNA, 25 bp, Homo sapien
gtgctcaagtccaaagtcagaagcg

SEQ ID NO: 5435180 - DNA, 25 bp, Homo sapien
caagtccaaagtcagaagcgcccct

SEQ ID NO: 5435181 - DNA, 25 bp, Homo sapien
agtccaaagtcagaagcgcccctca

SEQ ID NO: 5435182 - DNA, 25 bp, Homo sapien
cttgaggctttcctgtgcgtcagtg

SEQ ID NO: 5435183 - DNA, 25 bp, Homo sapien
gaaatgctaacacgcagaaactgcc

SEQ ID NO: 5435184 - DNA, 25 bp, Homo sapien
gcgtcagtgttcgagtctctgggac

SEQ ID NO: 5435185 - DNA, 25 bp, Homo sapien
tctctgggactttacttgggtcagt

SEQ ID NO: 5435186 - DNA, 25 bp, Homo sapien
ggcacccggagcaccggaccacccg

SEQ ID NO: 5435187 - DNA, 25 bp, Homo sapien
cgggtggtccggtgctccgggtgcc

SEQ ID NO: 5435188 - DNA, 25 bp, Homo sapien
ttcctctctccctagtataaggctc

SEQ ID NO: 5435189 - DNA, 25 bp, Homo sapien
agcttcctctctccctagtataagg

SEQ ID NO: 5435190 - DNA, 25 bp, Homo sapien
tctccctagtataaggctccactca

SEQ ID NO: 5435191 - DNA, 25 bp, Homo sapien
ctctctccctagtataaggctccac

SEQ ID NO: 5435192 - DNA, 25 bp, Homo sapien
ggaagggatgggtagccaggatcaa

SEQ ID NO: 5435193 - DNA, 25 bp, Homo sapien
gaagggatgggtagccaggatcaaa

SEQ ID NO: 5435194 - DNA, 25 bp, Homo sapien
aagggatgggtagccaggatcaaaa

SEQ ID NO: 5435195 - DNA, 25 bp, Homo sapien
ggtccgctcactccgacgagggtga

SEQ ID NO: 5435196 - DNA, 25 bp, Homo sapien
agcggggtccgctcactccgacgag

SEQ ID NO: 5435197 - DNA, 25 bp, Homo sapien
ttccagcggggtccgctcactccga

SEQ ID NO: 5435198 - DNA, 25 bp, Homo sapien
tccaattccagcggggtccgctcac

SEQ ID NO: 5435199 - DNA, 25 bp, Homo sapien
ctgacccagagggttgggccaagtc

SEQ ID NO: 5435200 - DNA, 25 bp, Homo sapien
aggccaccagtgcttgcccttcctg

SEQ ID NO: 5435201 - DNA, 25 bp, Homo sapien
tgggtaggccaccagtgcttgccct

SEQ ID NO: 5435202 - DNA, 25 bp, Homo sapien
ctgggtaggccaccagtgcttgccc

SEQ ID NO: 5435203 - DNA, 25 bp, Homo sapien
ccaccagtgcttgcccttcctgacc

SEQ ID NO: 5435204 - DNA, 25 bp, Homo sapien
aaatcctatagttctcagtgaagac

SEQ ID NO: 5435205 - DNA, 25 bp, Homo sapien
aagacttcccgatgacctgaaccca

SEQ ID NO: 5435206 - DNA, 25 bp, Homo sapien
tatagttctcagtgaagacttcccg

SEQ ID NO: 5435207 - DNA, 25 bp, Homo sapien
tctcagtgaagacttcccgatgacc

SEQ ID NO: 5435208 - DNA, 25 bp, Homo sapien
gggagtattataatgaccttttcaa

SEQ ID NO: 5435209 - DNA, 25 bp, Homo sapien
gaaagtatggactcacacatttatg

SEQ ID NO: 5435210 - DNA, 25 bp, Homo sapien
aacattggtccactgaagtatgcag

SEQ ID NO: 5435211 - DNA, 25 bp, Homo sapien
gattttctaaatgctgcctacttca

SEQ ID NO: 5435212 - DNA, 25 bp, Homo sapien
ccagggatctgcaggtaacacttag

SEQ ID NO: 5435213 - DNA, 25 bp, Homo sapien
tatccagagatgtctatcatgaggg

SEQ ID NO: 5435214 - DNA, 25 bp, Homo sapien
gacaggctcgtcttggcaactcaaa

SEQ ID NO: 5435215 - DNA, 25 bp, Homo sapien
taccattggtgcaaatgtcagcagg

SEQ ID NO: 5435216 - DNA, 25 bp, Homo sapien
gttgctctagctccatcagaacagg

SEQ ID NO: 5435217 - DNA, 25 bp, Homo sapien
ccacatgagtgggacagcaaggatt

SEQ ID NO: 5435218 - DNA, 25 bp, Homo sapien
cagaaagatgcgttgagttccctgg

SEQ ID NO: 5435219 - DNA, 25 bp, Homo sapien
gatatcactcttgccgctgtaaggg

SEQ ID NO: 5435220 - DNA, 25 bp, Homo sapien
ggtggaaggcaattaactcttgtaa

SEQ ID NO: 5435221 - DNA, 25 bp, Homo sapien
ccagtggagtaaatgctatctggtg

SEQ ID NO: 5435222 - DNA, 25 bp, Homo sapien
ttaaacacgagcttccaacacagtg

SEQ ID NO: 5435223 - DNA, 25 bp, Homo sapien
caaggtcttgttaccactgagaaca

SEQ ID NO: 5435224 - DNA, 25 bp, Homo sapien
ccttctttgcatcccagaactgtca

SEQ ID NO: 5435225 - DNA, 25 bp, Homo sapien
tgccccacttcattcgcccttcttt

SEQ ID NO: 5435226 - DNA, 25 bp, Homo sapien
attcgcccttctttgcatcccagaa

SEQ ID NO: 5435227 - DNA, 25 bp, Homo sapien
atggacaaatagctgccccacttca

SEQ ID NO: 5435228 - DNA, 25 bp, Homo sapien
ccaggagcctctgctgaggttacca

SEQ ID NO: 5435229 - DNA, 25 bp, Homo sapien
ctccaggagcctctgctgaggttac

SEQ ID NO: 5435230 - DNA, 25 bp, Homo sapien
caggagcctctgctgaggttaccat

SEQ ID NO: 5435231 - DNA, 25 bp, Homo sapien
tccaggagcctctgctgaggttacc

SEQ ID NO: 5435232 - DNA, 25 bp, Homo sapien
gaaaattttgtttggagctttcaga

SEQ ID NO: 5435233 - DNA, 25 bp, Homo sapien
attttgtttggagctttcagaggat

SEQ ID NO: 5435234 - DNA, 25 bp, Homo sapien
aaattttgtttggagctttcagagg

SEQ ID NO: 5435235 - DNA, 25 bp, Homo sapien
aattttgtttggagctttcagagga

SEQ ID NO: 5435236 - DNA, 25 bp, Homo sapien
gaaaagcctgatacagcaaaaaagc

SEQ ID NO: 5435237 - DNA, 25 bp, Homo sapien
cgagctaaagaaaagcctgatacag

SEQ ID NO: 5435238 - DNA, 25 bp, Homo sapien
ctgatacagcaaaaaagcgagccat

SEQ ID NO: 5435239 - DNA, 25 bp, Homo sapien
agcctgatacagcaaaaaagcgagc

SEQ ID NO: 5435240 - DNA, 25 bp, Homo sapien
catcaagaacacgagaatcttagcc

SEQ ID NO: 5435241 - DNA, 25 bp, Homo sapien
tagccaatatacacccctggggcag

SEQ ID NO: 5435242 - DNA, 25 bp, Homo sapien
gaacacgagaatcttagccaatata

SEQ ID NO: 5435243 - DNA, 25 bp, Homo sapien
tgcctcactgtacatcaagaacacg

SEQ ID NO: 5435244 - DNA, 25 bp, Homo sapien
gagagcttcaatccgcatgcttgat

SEQ ID NO: 5435245 - DNA, 25 bp, Homo sapien
caagctctacaggaactctctaaag

SEQ ID NO: 5435246 - DNA, 25 bp, Homo sapien
tatgtaatgtgatctgagagcccac

SEQ ID NO: 5435247 - DNA, 25 bp, Homo sapien
gaggtcatgcccctaggagcagcag

SEQ ID NO: 5435248 - DNA, 25 bp, Homo sapien
gtgatcaatgctcccttccccggaa

SEQ ID NO: 5435249 - DNA, 25 bp, Homo sapien
ttgtgatcaatgctcccttccccgg

SEQ ID NO: 5435250 - DNA, 25 bp, Homo sapien
caatgctcccttccccggaagagtt

SEQ ID NO: 5435251 - DNA, 25 bp, Homo sapien
tgctccttgtgatcaatgctccctt

SEQ ID NO: 5435252 - DNA, 25 bp, Homo sapien
gaatccacgccgtgattattccacc

SEQ ID NO: 5435253 - DNA, 25 bp, Homo sapien
gttcacggcctcacttcctgtgaga

SEQ ID NO: 5435254 - DNA, 25 bp, Homo sapien
tgtgagagaatccacgccgtgatta

SEQ ID NO: 5435255 - DNA, 25 bp, Homo sapien
tcgcctctcgccctgttcacggcct

SEQ ID NO: 5435256 - DNA, 25 bp, Homo sapien
gccttattcagctcttgacacttcc

SEQ ID NO: 5435257 - DNA, 25 bp, Homo sapien
tattcagctcttgacacttcctcat

SEQ ID NO: 5435258 - DNA, 25 bp, Homo sapien
gcagccttattcagctcttgacact

SEQ ID NO: 5435259 - DNA, 25 bp, Homo sapien
tgctgcagccttattcagctcttga

SEQ ID NO: 5435260 - DNA, 25 bp, Homo sapien
ccttgttactcccctgggcaggatc

SEQ ID NO: 5435261 - DNA, 25 bp, Homo sapien
catgcagagtcggatgatagcagaa

SEQ ID NO: 5435262 - DNA, 25 bp, Homo sapien
ttaaccggtgtgaccagatcctgaa

SEQ ID NO: 5435263 - DNA, 25 bp, Homo sapien
gggatggagccaatctggcagcact

SEQ ID NO: 5435264 - DNA, 25 bp, Homo sapien
gagcctctaatcagagcagctgtcc

SEQ ID NO: 5435265 - DNA, 25 bp, Homo sapien
tggagtatgaatggagcctctaatc

SEQ ID NO: 5435266 - DNA, 25 bp, Homo sapien
caccttttcctccactactcctctt

SEQ ID NO: 5435267 - DNA, 25 bp, Homo sapien
ccagcaaccttggagagattccctt

SEQ ID NO: 5435268 - DNA, 25 bp, Homo sapien
gattgtgctgtagcccttgagcccc

SEQ ID NO: 5435269 - DNA, 25 bp, Homo sapien
cacttggaacgacacgagaggtcaa

SEQ ID NO: 5435270 - DNA, 25 bp, Homo sapien
agcagcatcagggtcctcgttgcct

SEQ ID NO: 5435271 - DNA, 25 bp, Homo sapien
ttgagccccaggttgcacattactg

SEQ ID NO: 5435272 - DNA, 25 bp, Homo sapien
gacaaagacctgaagctagacccta

SEQ ID NO: 5435273 - DNA, 25 bp, Homo sapien
gaagaagtcctcagggttgagactg

SEQ ID NO: 5435274 - DNA, 25 bp, Homo sapien
gggtagtggtgcctgatcacaagtc

SEQ ID NO: 5435275 - DNA, 25 bp, Homo sapien
tcttgttgtagtgacagggctagca

SEQ ID NO: 5435276 - DNA, 25 bp, Homo sapien
gaactgcttttgtcctaccttgcgc

SEQ ID NO: 5435277 - DNA, 25 bp, Homo sapien
taatgggaaggattatgcaggcatc

SEQ ID NO: 5435278 - DNA, 25 bp, Homo sapien
tcttggcagagattataggctaact

SEQ ID NO: 5435279 - DNA, 25 bp, Homo sapien
taggctctgagaacacaatagtgaa

SEQ ID NO: 5435280 - DNA, 25 bp, Homo sapien
gacatcaatgatgagacagttccca

SEQ ID NO: 5435281 - DNA, 25 bp, Homo sapien
gttagtttcgcccattatcacacca

SEQ ID NO: 5435282 - DNA, 25 bp, Homo sapien
agcagatatagtctgtgaaggtccc

SEQ ID NO: 5435283 - DNA, 25 bp, Homo sapien
tctgaagtgatgctgatggtgacat

SEQ ID NO: 5435284 - DNA, 25 bp, Homo sapien
ccctgtgcgaggatgaagaaaccag

SEQ ID NO: 5435285 - DNA, 25 bp, Homo sapien
gtttgaatgcgcacccttccctgtg

SEQ ID NO: 5435286 - DNA, 25 bp, Homo sapien
taaattctccaatgaggcaataggg

SEQ ID NO: 5435287 - DNA, 25 bp, Homo sapien
ggtcaagaggattgttctaaattct

SEQ ID NO: 5435288 - DNA, 25 bp, Homo sapien
gcaccgggcggacagaggtgagtcg

SEQ ID NO: 5435289 - DNA, 25 bp, Homo sapien
aggtgagtcggctcggaggcggtgg

SEQ ID NO: 5435290 - DNA, 25 bp, Homo sapien
ggggggcgctgtgaagccggcaccg

SEQ ID NO: 5435291 - DNA, 25 bp, Homo sapien
gcggacagaggtgagtcggctcgga

SEQ ID NO: 5435292 - DNA, 25 bp, Homo sapien
tgggcagagtcgaatctcggctgtc

SEQ ID NO: 5435293 - DNA, 25 bp, Homo sapien
tgtgggcagagtcgaatctcggctg

SEQ ID NO: 5435294 - DNA, 25 bp, Homo sapien
gggcagagtcgaatctcggctgtcc

SEQ ID NO: 5435295 - DNA, 25 bp, Homo sapien
ctgtgggcagagtcgaatctcggct

SEQ ID NO: 5435296 - DNA, 25 bp, Homo sapien
aagacacggtgtggcttcctccggg

SEQ ID NO: 5435297 - DNA, 25 bp, Homo sapien
acacggtgtggcttcctccgggcag

SEQ ID NO: 5435298 - DNA, 25 bp, Homo sapien
tccgggcaggaaagcggagggagaa

SEQ ID NO: 5435299 - DNA, 25 bp, Homo sapien
tggaaagacacggtgtggcttcctc

SEQ ID NO: 5435300 - DNA, 25 bp, Homo sapien
tcagggtcgttgtagcagggcaggt

SEQ ID NO: 5435301 - DNA, 25 bp, Homo sapien
tgaagaaaatggctatgacagctgt

SEQ ID NO: 5435302 - DNA, 25 bp, Homo sapien
gcaggtggatgcatcccaagagtgg

SEQ ID NO: 5435303 - DNA, 25 bp, Homo sapien
aagaccaggggaacacttgcttttg

SEQ ID NO: 5435304 - DNA, 25 bp, Homo sapien
ggagctcgctcagatctttgatgtg

SEQ ID NO: 5435305 - DNA, 25 bp, Homo sapien
cagggcgtttgtctgatctctggtc

SEQ ID NO: 5435306 - DNA, 25 bp, Homo sapien
aataagcggtgtggatgccattgca

SEQ ID NO: 5435307 - DNA, 25 bp, Homo sapien
tgcgagcagcatgccacagggcatc

SEQ ID NO: 5435308 - DNA, 25 bp, Homo sapien
cttgttgttctggatcgttccttcc

SEQ ID NO: 5435309 - DNA, 25 bp, Homo sapien
cacaagtgaggggttcattttggga

SEQ ID NO: 5435310 - DNA, 25 bp, Homo sapien
cttcagggactgttgaaatgcaagg

SEQ ID NO: 5435311 - DNA, 25 bp, Homo sapien
ggagcttcagggactgttgaaatgc

SEQ ID NO: 5435312 - DNA, 25 bp, Homo sapien
tgttgggaatggtttgcatagacag

SEQ ID NO: 5435313 - DNA, 25 bp, Homo sapien
ttgttcatcaggctcctataccggc

SEQ ID NO: 5435314 - DNA, 25 bp, Homo sapien
ttcatcaggctcctataccggccgt

SEQ ID NO: 5435315 - DNA, 25 bp, Homo sapien
tcattgttcatcaggctcctatacc

SEQ ID NO: 5435316 - DNA, 25 bp, Homo sapien
tataccggccgtcctctgctaccat

SEQ ID NO: 5435317 - DNA, 25 bp, Homo sapien
ttcctggtgtgtcatcgaggctctc

SEQ ID NO: 5435318 - DNA, 25 bp, Homo sapien
gtgtcatcgaggctctctgatggtc

SEQ ID NO: 5435319 - DNA, 25 bp, Homo sapien
gtcatcgaggctctctgatggtcct

SEQ ID NO: 5435320 - DNA, 25 bp, Homo sapien
cctggtgtgtcatcgaggctctctg

SEQ ID NO: 5435321 - DNA, 25 bp, Homo sapien
tggaagggtagcgatgatggaaacc

SEQ ID NO: 5435322 - DNA, 25 bp, Homo sapien
aagggtagcgatgatggaaaccgtc

SEQ ID NO: 5435323 - DNA, 25 bp, Homo sapien
tggagtggaagggtagcgatgatgg

SEQ ID NO: 5435324 - DNA, 25 bp, Homo sapien
gagtggaagggtagcgatgatggaa

SEQ ID NO: 5435325 - DNA, 25 bp, Homo sapien
caagaggctcagtggaacctctcga

SEQ ID NO: 5435326 - DNA, 25 bp, Homo sapien
tcctatgaggaatggttattgacac

SEQ ID NO: 5435327 - DNA, 25 bp, Homo sapien
tgttctgtctgcctgccatggtctg

SEQ ID NO: 5435328 - DNA, 25 bp, Homo sapien
tctcgagggcctacagctagaacca

SEQ ID NO: 5435329 - DNA, 25 bp, Homo sapien
ccaaaccaaaggatggcagctgtga

SEQ ID NO: 5435330 - DNA, 25 bp, Homo sapien
ttcttaaaagcattagtgatcttgt

SEQ ID NO: 5435331 - DNA, 25 bp, Homo sapien
accaaaccaaaggatggcagctgtg

SEQ ID NO: 5435332 - DNA, 25 bp, Homo sapien
cttaaaagcattagtgatcttgttg

SEQ ID NO: 5435333 - DNA, 25 bp, Homo sapien
tatcatttgtgggtctgttagtccc

SEQ ID NO: 5435334 - DNA, 25 bp, Homo sapien
gttagtctgcaaaagcatccagata

SEQ ID NO: 5435335 - DNA, 25 bp, Homo sapien
gaaatgtatagattggtttcctacc

SEQ ID NO: 5435336 - DNA, 25 bp, Homo sapien
gactttcagatcgtggaaatgtata

SEQ ID NO: 5435337 - DNA, 25 bp, Homo sapien
taagcaattagtgggagcacctggt

SEQ ID NO: 5435338 - DNA, 25 bp, Homo sapien
agttgtccagaagtgagccctccgt

SEQ ID NO: 5435339 - DNA, 25 bp, Homo sapien
taccgttgcccatgagtgatgttgc

SEQ ID NO: 5435340 - DNA, 25 bp, Homo sapien
gcaacaagccctctggtggtcatag

SEQ ID NO: 5435341 - DNA, 25 bp, Homo sapien
aaaaatgctgtttgtgaagccaagc

SEQ ID NO: 5435342 - DNA, 25 bp, Homo sapien
taaaaatgctgtttgtgaagccaag

SEQ ID NO: 5435343 - DNA, 25 bp, Homo sapien
tgtaaaaatgctgtttgtgaagcca

SEQ ID NO: 5435344 - DNA, 25 bp, Homo sapien
aaaatgctgtttgtgaagccaagcc

SEQ ID NO: 5435345 - DNA, 25 bp, Homo sapien
ccggcatacacgataatttcagtga

SEQ ID NO: 5435346 - DNA, 25 bp, Homo sapien
catacacgataatttcagtgataca

SEQ ID NO: 5435347 - DNA, 25 bp, Homo sapien
tcacaccggcatacacgataatttc

SEQ ID NO: 5435348 - DNA, 25 bp, Homo sapien
tacacgataatttcagtgatacaat

SEQ ID NO: 5435349 - DNA, 25 bp, Homo sapien
cagcaaaacagctgctaactgccaa

SEQ ID NO: 5435350 - DNA, 25 bp, Homo sapien
aaacagctgctaactgccaagatgt

SEQ ID NO: 5435351 - DNA, 25 bp, Homo sapien
gccaagatgtggctgacctttgaca

SEQ ID NO: 5435352 - DNA, 25 bp, Homo sapien
acagctgctaactgccaagatgtgg

SEQ ID NO: 5435353 - DNA, 25 bp, Homo sapien
aatcctgctcatcttttgcggtata

SEQ ID NO: 5435354 - DNA, 25 bp, Homo sapien
cctcttctctaaaggccacttggtg

SEQ ID NO: 5435355 - DNA, 25 bp, Homo sapien
ggtatatgggaaaccacctccattc

SEQ ID NO: 5435356 - DNA, 25 bp, Homo sapien
tctaaaggccacttggtggtccaaa

SEQ ID NO: 5435357 - DNA, 25 bp, Homo sapien
tgaggcttcaagcacaaaccaaagc

SEQ ID NO: 5435358 - DNA, 25 bp, Homo sapien
gggtactttatagacatcctctgca

SEQ ID NO: 5435359 - DNA, 25 bp, Homo sapien
catttcagaccaagggtactttata

SEQ ID NO: 5435360 - DNA, 25 bp, Homo sapien
gttgatagccttttaccgctgccca

SEQ ID NO: 5435361 - DNA, 25 bp, Homo sapien
tcagatacattcatgaacgaacttt

SEQ ID NO: 5435362 - DNA, 25 bp, Homo sapien
aaccaggtgctgaaatagatctaaa

SEQ ID NO: 5435363 - DNA, 25 bp, Homo sapien
gcaatgctgtgacttcgtaatgggt

SEQ ID NO: 5435364 - DNA, 25 bp, Homo sapien
tgaagtatctgtagcaatacaactg

SEQ ID NO: 5435365 - DNA, 25 bp, Homo sapien
tatcttgtgaggaggatgtagctgc

SEQ ID NO: 5435366 - DNA, 25 bp, Homo sapien
gcacttatacgtgttgtggactagc

SEQ ID NO: 5435367 - DNA, 25 bp, Homo sapien
ccaggctccgtgtcgatagtcgggt

SEQ ID NO: 5435368 - DNA, 25 bp, Homo sapien
tgagtcgagctaggaaagcccctac

SEQ ID NO: 5435369 - DNA, 25 bp, Homo sapien
ccgtggaagaatactcctttggtag

SEQ ID NO: 5435370 - DNA, 25 bp, Homo sapien
gaaactgttaggacaacggtgcaac

SEQ ID NO: 5435371 - DNA, 25 bp, Homo sapien
gaggtacaggaaagcactaaaatga

SEQ ID NO: 5435372 - DNA, 25 bp, Homo sapien
tattcatccgaaacccaagaacagt

SEQ ID NO: 5435373 - DNA, 25 bp, Homo sapien
aagacctgaggaagcaacgcctgga

SEQ ID NO: 5435374 - DNA, 25 bp, Homo sapien
ctgtatgctgtgaggtttcagagga

SEQ ID NO: 5435375 - DNA, 25 bp, Homo sapien
aacttaaggtcaattcagcccctct

SEQ ID NO: 5435376 - DNA, 25 bp, Homo sapien
gtaattgactccaacatgatggcat

SEQ ID NO: 5435377 - DNA, 25 bp, Homo sapien
aaatccctctacatgtggtttctgt

SEQ ID NO: 5435378 - DNA, 25 bp, Homo sapien
aaagtgacagaagcagtccagtaag

SEQ ID NO: 5435379 - DNA, 25 bp, Homo sapien
ccattcagatagcagtaaaacattc

SEQ ID NO: 5435380 - DNA, 25 bp, Homo sapien
gatcctcgaaatgataatatctcca

SEQ ID NO: 5435381 - DNA, 25 bp, Homo sapien
ttgttcatacacgtcaccatggtga

SEQ ID NO: 5435382 - DNA, 25 bp, Homo sapien
cactgaactctgttcccggaagttc

SEQ ID NO: 5435383 - DNA, 25 bp, Homo sapien
catggtgacgtccatcatgcttgtc

SEQ ID NO: 5435384 - DNA, 25 bp, Homo sapien
agttcccagacctcaagaaggggtg

SEQ ID NO: 5435385 - DNA, 25 bp, Homo sapien
aacactcagatcgttttgagggcag

SEQ ID NO: 5435386 - DNA, 25 bp, Homo sapien
tgataactggaatcaacagctgacc

SEQ ID NO: 5435387 - DNA, 25 bp, Homo sapien
gaaaaagaactagactcttggcctg

SEQ ID NO: 5435388 - DNA, 25 bp, Homo sapien
tacttcactttttacagaggctcag

SEQ ID NO: 5435389 - DNA, 25 bp, Homo sapien
tatcccttggctaacattctccctg

SEQ ID NO: 5435390 - DNA, 25 bp, Homo sapien
ctacgagtgctcagttttaagaaca

SEQ ID NO: 5435391 - DNA, 25 bp, Homo sapien
tgagccctgggtatggaaattgcct

SEQ ID NO: 5435392 - DNA, 25 bp, Homo sapien
tgaatctgatactcaatcttggctc

SEQ ID NO: 5435393 - DNA, 25 bp, Homo sapien
ggctgacctggttctagtactttga

SEQ ID NO: 5435394 - DNA, 25 bp, Homo sapien
gcagaagataccacttgggtttcca

SEQ ID NO: 5435395 - DNA, 25 bp, Homo sapien
tagtaataacgctgtccatgcagcc

SEQ ID NO: 5435396 - DNA, 25 bp, Homo sapien
tgaaattagggagtgtaggctgacc

SEQ ID NO: 5435397 - DNA, 25 bp, Homo sapien
ccgtggatgccaggatatcagccat

SEQ ID NO: 5435398 - DNA, 25 bp, Homo sapien
atccccgtggatgccaggatatcag

SEQ ID NO: 5435399 - DNA, 25 bp, Homo sapien
cagcagctataattccagatcccca

SEQ ID NO: 5435400 - DNA, 25 bp, Homo sapien
cctgagctgattctgagaaccagat

SEQ ID NO: 5435401 - DNA, 25 bp, Homo sapien
gttcagtagtattaaagcacattca

SEQ ID NO: 5435402 - DNA, 25 bp, Homo sapien
cacaagtggctgatatgtatttttc

SEQ ID NO: 5435403 - DNA, 25 bp, Homo sapien
tatccattaagcactatctccctga

SEQ ID NO: 5435404 - DNA, 25 bp, Homo sapien
gataattaaatcacgagggcgggtc

SEQ ID NO: 5435405 - DNA, 25 bp, Homo sapien
cacgccagcaggctgtatcccctgt

SEQ ID NO: 5435406 - DNA, 25 bp, Homo sapien
agcaggctgtatcccctgtcagagg

SEQ ID NO: 5435407 - DNA, 25 bp, Homo sapien
cgccagcaggctgtatcccctgtca

SEQ ID NO: 5435408 - DNA, 25 bp, Homo sapien
ccagcaggctgtatcccctgtcaga

SEQ ID NO: 5435409 - DNA, 25 bp, Homo sapien
gttctggcttaagccgaacagcttc

SEQ ID NO: 5435410 - DNA, 25 bp, Homo sapien
catgcgatgttctggcttaagccga

SEQ ID NO: 5435411 - DNA, 25 bp, Homo sapien
gatgttctggcttaagccgaacagc

SEQ ID NO: 5435412 - DNA, 25 bp, Homo sapien
gcgatgttctggcttaagccgaaca

SEQ ID NO: 5435413 - DNA, 25 bp, Homo sapien
tggagcccttgtgctggcaagccaa

SEQ ID NO: 5435414 - DNA, 25 bp, Homo sapien
aaagaaagcagtctcaggcaattgg

SEQ ID NO: 5435415 - DNA, 25 bp, Homo sapien
caagccaattgcattgaggcagccc

SEQ ID NO: 5435416 - DNA, 25 bp, Homo sapien
agtagtaagtattgggactaagaag

SEQ ID NO: 5435417 - DNA, 25 bp, Homo sapien
gacttcaaattgtgattggcctggc

SEQ ID NO: 5435418 - DNA, 25 bp, Homo sapien
gttttggcagtctttccccaactga

SEQ ID NO: 5435419 - DNA, 25 bp, Homo sapien
ccaactgaaagataaggctcttctc

SEQ ID NO: 5435420 - DNA, 25 bp, Homo sapien
tctgcaccctttgaagaagatgagt

SEQ ID NO: 5435421 - DNA, 25 bp, Homo sapien
ttcagattagaatcagttcctttga

SEQ ID NO: 5435422 - DNA, 25 bp, Homo sapien
ctttgatataagtagacacagtcat

SEQ ID NO: 5435423 - DNA, 25 bp, Homo sapien
ggcccagacattcagattagaatca

SEQ ID NO: 5435424 - DNA, 25 bp, Homo sapien
gatgtggcccagacattcagattag

SEQ ID NO: 5435425 - DNA, 25 bp, Homo sapien
aaggagcctccggaagagatagggt

SEQ ID NO: 5435426 - DNA, 25 bp, Homo sapien
acagtggacaggatgcatcgacaat

SEQ ID NO: 5435427 - DNA, 25 bp, Homo sapien
gatgcatcgacaatgacaacaaatg

SEQ ID NO: 5435428 - DNA, 25 bp, Homo sapien
tttcaaagctttgcggggtgacagt

SEQ ID NO: 5435429 - DNA, 25 bp, Homo sapien
ctcttaccaggtatgggggctccat

SEQ ID NO: 5435430 - DNA, 25 bp, Homo sapien
cccactcttaccaggtatgggggct

SEQ ID NO: 5435431 - DNA, 25 bp, Homo sapien
ctttccccactcttaccaggtatgg

SEQ ID NO: 5435432 - DNA, 25 bp, Homo sapien
tctttccccactcttaccaggtatg

SEQ ID NO: 5435433 - DNA, 25 bp, Homo sapien
cttagcccgtcttctcttctcaggg

SEQ ID NO: 5435434 - DNA, 25 bp, Homo sapien
gagaggggagataaggtaaatgaag

SEQ ID NO: 5435435 - DNA, 25 bp, Homo sapien
gggagaggggagataaggtaaatga

SEQ ID NO: 5435436 - DNA, 25 bp, Homo sapien
aggggagataaggtaaatgaagcca

SEQ ID NO: 5435437 - DNA, 25 bp, Homo sapien
tagcccttgttacctcatggagatg

SEQ ID NO: 5435438 - DNA, 25 bp, Homo sapien
ggtaatagccccatgcacatccact

SEQ ID NO: 5435439 - DNA, 25 bp, Homo sapien
taaagggcgaatctggtacttctgc

SEQ ID NO: 5435440 - DNA, 25 bp, Homo sapien
tccactctgacaggcgattggttgc

SEQ ID NO: 5435441 - DNA, 25 bp, Homo sapien
gctgcttcggccttgttcctggttt

SEQ ID NO: 5435442 - DNA, 25 bp, Homo sapien
agtgtacagagtaatcaccaaccag

SEQ ID NO: 5435443 - DNA, 25 bp, Homo sapien
agtgacttcagcatcgaacgggcag

SEQ ID NO: 5435444 - DNA, 25 bp, Homo sapien
gcttatctgattctccaaatagcag

SEQ ID NO: 5435445 - DNA, 25 bp, Homo sapien
gggcaggcagatgtgccaacagcag

SEQ ID NO: 5435446 - DNA, 25 bp, Homo sapien
gaagcccatagggaaccttctgatt

SEQ ID NO: 5435447 - DNA, 25 bp, Homo sapien
aaggatatgccctcacgtcagacca

SEQ ID NO: 5435448 - DNA, 25 bp, Homo sapien
gaaatataccctggagcttgctcca

SEQ ID NO: 5435449 - DNA, 25 bp, Homo sapien
gatgggatcatttctttgaccacag

SEQ ID NO: 5435450 - DNA, 25 bp, Homo sapien
gacacttttcataggggatcaacca

SEQ ID NO: 5435451 - DNA, 25 bp, Homo sapien
tggacagaagcctgtgatattgttc

SEQ ID NO: 5435452 - DNA, 25 bp, Homo sapien
cttttcataggggatcaaccaggag

SEQ ID NO: 5435453 - DNA, 25 bp, Homo sapien
cataggggatcaaccaggagttagg

SEQ ID NO: 5435454 - DNA, 25 bp, Homo sapien
gaaactttatacctgttcaacaata

SEQ ID NO: 5435455 - DNA, 25 bp, Homo sapien
ggcactatgttgtacggtagttctc

SEQ ID NO: 5435456 - DNA, 25 bp, Homo sapien
tccgtttctgagtctattttagata

SEQ ID NO: 5435457 - DNA, 25 bp, Homo sapien
tagatacctactgcaagtggaatca

SEQ ID NO: 5435458 - DNA, 25 bp, Homo sapien
cactggattttgttcccttggggat

SEQ ID NO: 5435459 - DNA, 25 bp, Homo sapien
ggcttcacacttcccttagccctca

SEQ ID NO: 5435460 - DNA, 25 bp, Homo sapien
tgggcttcacacttcccttagccct

SEQ ID NO: 5435461 - DNA, 25 bp, Homo sapien
gcttcacacttcccttagccctcat

SEQ ID NO: 5435462 - DNA, 25 bp, Homo sapien
gctgggcttcacacttcccttagcc

SEQ ID NO: 5435463 - DNA, 25 bp, Homo sapien
tgactaacggctttctgccccttct

SEQ ID NO: 5435464 - DNA, 25 bp, Homo sapien
ttttttaggctcagtgctgtccggg

SEQ ID NO: 5435465 - DNA, 25 bp, Homo sapien
ctgccttcgcccctgtcccgggagg

SEQ ID NO: 5435466 - DNA, 25 bp, Homo sapien
ggctggtttgcccggtccctgacta

SEQ ID NO: 5435467 - DNA, 25 bp, Homo sapien
attgaagtagaacacgacactgccc

SEQ ID NO: 5435468 - DNA, 25 bp, Homo sapien
cacatttgtcaatattgttggtgag

SEQ ID NO: 5435469 - DNA, 25 bp, Homo sapien
gtttatgaacaatcaacactgacat

SEQ ID NO: 5435470 - DNA, 25 bp, Homo sapien
gtagatgaaaccctgaactgcccct

SEQ ID NO: 5435471 - DNA, 25 bp, Homo sapien
cttcttcaataatgagttagctcac

SEQ ID NO: 5435472 - DNA, 25 bp, Homo sapien
tcttcaataatgagttagctcactg

SEQ ID NO: 5435473 - DNA, 25 bp, Homo sapien
attttctttatgtcattctataagc

SEQ ID NO: 5435474 - DNA, 25 bp, Homo sapien
ttcttcttcaataatgagttagctc

SEQ ID NO: 5435475 - DNA, 25 bp, Homo sapien
cattggatgaagatctacactggac

SEQ ID NO: 5435476 - DNA, 25 bp, Homo sapien
gccatagattacctgataaccaacc

SEQ ID NO: 5435477 - DNA, 25 bp, Homo sapien
taatgtgagttatgtgatgcctgtc

SEQ ID NO: 5435478 - DNA, 25 bp, Homo sapien
tctttctaaaccatgactgaagcca

SEQ ID NO: 5435479 - DNA, 25 bp, Homo sapien
gaaatttgccttcacgatttcctcc

SEQ ID NO: 5435480 - DNA, 25 bp, Homo sapien
tctaccctgctctactgatccaagt

SEQ ID NO: 5435481 - DNA, 25 bp, Homo sapien
ggccacaagttgagggtgtagatat

SEQ ID NO: 5435482 - DNA, 25 bp, Homo sapien
tccagggcccgttcatatttacagg

SEQ ID NO: 5435483 - DNA, 25 bp, Homo sapien
gaagtttcatatccctgtgctcagt

SEQ ID NO: 5435484 - DNA, 25 bp, Homo sapien
tcagtgccaatccatgtgccaatcc

SEQ ID NO: 5435485 - DNA, 25 bp, Homo sapien
ctgaattgcaatcatgagcatgaag

SEQ ID NO: 5435486 - DNA, 25 bp, Homo sapien
gatcacaaaccccatacaatacttc

SEQ ID NO: 5435487 - DNA, 25 bp, Homo sapien
tcttaccccatacaattgctttcat

SEQ ID NO: 5435488 - DNA, 25 bp, Homo sapien
tccaatctcttaccccatacaattg

SEQ ID NO: 5435489 - DNA, 25 bp, Homo sapien
cccttggtgaggctctagttttatc

SEQ ID NO: 5435490 - DNA, 25 bp, Homo sapien
tgtttcctgcactaactccaatctc

SEQ ID NO: 5435491 - DNA, 25 bp, Homo sapien
tactgtgaacggagagtattatgca

SEQ ID NO: 5435492 - DNA, 25 bp, Homo sapien
agttctggacttgtgaagttaaaat

SEQ ID NO: 5435493 - DNA, 25 bp, Homo sapien
ggcagattggtgtccatatgaattc

SEQ ID NO: 5435494 - DNA, 25 bp, Homo sapien
gaactgctgggcagattggtgtcca

SEQ ID NO: 5435495 - DNA, 25 bp, Homo sapien
ggctcttttctctttaccaagtgcc

SEQ ID NO: 5435496 - DNA, 25 bp, Homo sapien
tccattccttggtctgcagctctct

SEQ ID NO: 5435497 - DNA, 25 bp, Homo sapien
agctctctgccctcttggctctttt

SEQ ID NO: 5435498 - DNA, 25 bp, Homo sapien
ttctcccagatttgcctgccctccc

SEQ ID NO: 5435499 - DNA, 25 bp, Homo sapien
gctggctcgatgcaatcagatgaca

SEQ ID NO: 5435500 - DNA, 25 bp, Homo sapien
ggctcgatgcaatcagatgacactg

SEQ ID NO: 5435501 - DNA, 25 bp, Homo sapien
agccaggctggctcgatgcaatcag

SEQ ID NO: 5435502 - DNA, 25 bp, Homo sapien
gatgacactgaaagccgattggaat

SEQ ID NO: 5435503 - DNA, 25 bp, Homo sapien
ggttctgtgctgaacttgttctgtg

SEQ ID NO: 5435504 - DNA, 25 bp, Homo sapien
gtaatcctttctaggcccacagcaa

SEQ ID NO: 5435505 - DNA, 25 bp, Homo sapien
ctcctggcaacggtacgtaactgtg

SEQ ID NO: 5435506 - DNA, 25 bp, Homo sapien
tactgatttgcgcacagtgctgtct

SEQ ID NO: 5435507 - DNA, 25 bp, Homo sapien
ctctgattgatgtgtgggagctgcc

SEQ ID NO: 5435508 - DNA, 25 bp, Homo sapien
tctgattgatgtgtgggagctgcca

SEQ ID NO: 5435509 - DNA, 25 bp, Homo sapien
ggagctggaggactgaaattagaca

SEQ ID NO: 5435510 - DNA, 25 bp, Homo sapien
ccagtgtgaagatcagcgtgtgaag

SEQ ID NO: 5435511 - DNA, 25 bp, Homo sapien
aaattagacatagggtgagggtgct

SEQ ID NO: 5435512 - DNA, 25 bp, Homo sapien
tggaaatcaggttacctaggaggac

SEQ ID NO: 5435513 - DNA, 25 bp, Homo sapien
caagaaatgtcggatgtccatctca

SEQ ID NO: 5435514 - DNA, 25 bp, Homo sapien
ttgggaaattacacactctggatgg

SEQ ID NO: 5435515 - DNA, 25 bp, Homo sapien
gcatgtcattggttactgccaccaa

SEQ ID NO: 5435516 - DNA, 25 bp, Homo sapien
tcattgagactccagtaactgtagc

SEQ ID NO: 5435517 - DNA, 25 bp, Homo sapien
tgcagtgtcgtgtaggatgcctggt

SEQ ID NO: 5435518 - DNA, 25 bp, Homo sapien
tcactgcagtgtcgtgtaggatgcc

SEQ ID NO: 5435519 - DNA, 25 bp, Homo sapien
actgcagtgtcgtgtaggatgcctg

SEQ ID NO: 5435520 - DNA, 25 bp, Homo sapien
cactgcagtgtcgtgtaggatgcct

SEQ ID NO: 5435521 - DNA, 25 bp, Homo sapien
tagtttgctccagtcaaagatttcc

SEQ ID NO: 5435522 - DNA, 25 bp, Homo sapien
gaatagactgttgtaaatctgctgc

SEQ ID NO: 5435523 - DNA, 25 bp, Homo sapien
gatcccctttatagagagctggcag

SEQ ID NO: 5435524 - DNA, 25 bp, Homo sapien
cacaggaactcctcgttgctgccta

SEQ ID NO: 5435525 - DNA, 25 bp, Homo sapien
actgtccaaagatgtactgagagac

SEQ ID NO: 5435526 - DNA, 25 bp, Homo sapien
ctgtccaaagatgtactgagagaca

SEQ ID NO: 5435527 - DNA, 25 bp, Homo sapien
tgtccaaagatgtactgagagacat

SEQ ID NO: 5435528 - DNA, 25 bp, Homo sapien
agtcagttagaaaggtcaggctatt

SEQ ID NO: 5435529 - DNA, 25 bp, Homo sapien
caaaagtcagttagaaaggtcaggc

SEQ ID NO: 5435530 - DNA, 25 bp, Homo sapien
tgggaaatcccaaaagtcagttaga

SEQ ID NO: 5435531 - DNA, 25 bp, Homo sapien
tcccaaaagtcagttagaaaggtca

SEQ ID NO: 5435532 - DNA, 25 bp, Homo sapien
ccatcagtttaagagccccaggttc

SEQ ID NO: 5435533 - DNA, 25 bp, Homo sapien
caggttcctcatccaataagcatgt

SEQ ID NO: 5435534 - DNA, 25 bp, Homo sapien
ggactgatgccatctccatcagttt

SEQ ID NO: 5435535 - DNA, 25 bp, Homo sapien
gtctgggttaatgtcagaagttttc

SEQ ID NO: 5435536 - DNA, 25 bp, Homo sapien
tatgagctaagtttccacaaaacag

SEQ ID NO: 5435537 - DNA, 25 bp, Homo sapien
catagctgaataggttatgccatca

SEQ ID NO: 5435538 - DNA, 25 bp, Homo sapien
tatagtggttcatactaaaggcagg

SEQ ID NO: 5435539 - DNA, 25 bp, Homo sapien
taaaacgctagcatgctttaagaag

SEQ ID NO: 5435540 - DNA, 25 bp, Homo sapien
ttgtaatgtcctttatttattaaga

SEQ ID NO: 5435541 - DNA, 25 bp, Homo sapien
tgtaatgtcctttatttattaagaa

SEQ ID NO: 5435542 - DNA, 25 bp, Homo sapien
tattaccggtacactattcagcaag

SEQ ID NO: 5435543 - DNA, 25 bp, Homo sapien
taaaagtggagtccgtgacaggtcg

SEQ ID NO: 5435544 - DNA, 25 bp, Homo sapien
tcatggtaaagcctggtctcgtgtg

SEQ ID NO: 5435545 - DNA, 25 bp, Homo sapien
tcaatgattactgcctggacaggaa

SEQ ID NO: 5435546 - DNA, 25 bp, Homo sapien
agcgcgtagctaccctcatagcgta

SEQ ID NO: 5435547 - DNA, 25 bp, Homo sapien
ggatgttagcgcgtagctaccctca

SEQ ID NO: 5435548 - DNA, 25 bp, Homo sapien
gggtccccatcggagcgctccgcct

SEQ ID NO: 5435549 - DNA, 25 bp, Homo sapien
cgcctcctcggatgttagcgcgtag

SEQ ID NO: 5435550 - DNA, 25 bp, Homo sapien
tgtttcacaaacacgctggcaggga

SEQ ID NO: 5435551 - DNA, 25 bp, Homo sapien
tcatctgaggagaggtccacggtgt

SEQ ID NO: 5435552 - DNA, 25 bp, Homo sapien
tcggaatgaccctctgcaaaggact

SEQ ID NO: 5435553 - DNA, 25 bp, Homo sapien
tgttgctgtccatccccgagttact

SEQ ID NO: 5435554 - DNA, 25 bp, Homo sapien
ttggagacacggtgatggtaaaaaa

SEQ ID NO: 5435555 - DNA, 25 bp, Homo sapien
ctgaaaagacggacaatgtaggttt

SEQ ID NO: 5435556 - DNA, 25 bp, Homo sapien
ataacatatttcacaaatagtcctg

SEQ ID NO: 5435557 - DNA, 25 bp, Homo sapien
tatttcacaaatagtcctgagctgc

SEQ ID NO: 5435558 - DNA, 25 bp, Homo sapien
cccagcaggaacagagataatccag

SEQ ID NO: 5435559 - DNA, 25 bp, Homo sapien
aatgccagggaaattatatgagagc

SEQ ID NO: 5435560 - DNA, 25 bp, Homo sapien
gatatgtcttcttggctaactgcta

SEQ ID NO: 5435561 - DNA, 25 bp, Homo sapien
tgtccaagcacatgtagctcttacc

SEQ ID NO: 5435562 - DNA, 25 bp, Homo sapien
tattcccactgggatgcagtagaat

SEQ ID NO: 5435563 - DNA, 25 bp, Homo sapien
tcctgtcactaactcatcattcctg

SEQ ID NO: 5435564 - DNA, 25 bp, Homo sapien
gcagtagaatcctggagggatatga

SEQ ID NO: 5435565 - DNA, 25 bp, Homo sapien
gaagaccataaatttgtgtccatgg

SEQ ID NO: 5435566 - DNA, 25 bp, Homo sapien
gattagaactgcacccctaaggcag

SEQ ID NO: 5435567 - DNA, 25 bp, Homo sapien
ggatacagtcattgattagaactgc

SEQ ID NO: 5435568 - DNA, 25 bp, Homo sapien
tgtgtttctgaggtatggattgcca

SEQ ID NO: 5435569 - DNA, 25 bp, Homo sapien
gtatggattgccaagtggatacagt

SEQ ID NO: 5435570 - DNA, 25 bp, Homo sapien
cattagttataatccctgagcagtc

SEQ ID NO: 5435571 - DNA, 25 bp, Homo sapien
ttaaaagctgatgtagaaaacccag

SEQ ID NO: 5435572 - DNA, 25 bp, Homo sapien
ttcagtgttatcaagggttcaattc

SEQ ID NO: 5435573 - DNA, 25 bp, Homo sapien
tgtcggtggaatcagcaagtcataa

SEQ ID NO: 5435574 - DNA, 25 bp, Homo sapien
tttcaattcatctggtgcatgaaaa

SEQ ID NO: 5435575 - DNA, 25 bp, Homo sapien
atttgctttccgcaggcagacaggg

SEQ ID NO: 5435576 - DNA, 25 bp, Homo sapien
tcttcccaacctgtacagagtgcat

SEQ ID NO: 5435577 - DNA, 25 bp, Homo sapien
gattagtctgtagtgacctgggaaa

SEQ ID NO: 5435578 - DNA, 25 bp, Homo sapien
ggtgctccctgacaaatgacccggg

SEQ ID NO: 5435579 - DNA, 25 bp, Homo sapien
actttgaaatggttgcgtcggagga

SEQ ID NO: 5435580 - DNA, 25 bp, Homo sapien
tgatctgtcgctgctccatcttgtg

SEQ ID NO: 5435581 - DNA, 25 bp, Homo sapien
cggagccctccaaactgatctgtcg

SEQ ID NO: 5435582 - DNA, 25 bp, Homo sapien
attctggatgcccttcacggagccc

SEQ ID NO: 5435583 - DNA, 25 bp, Homo sapien
tcctgccgcatgtcagacccagggt

SEQ ID NO: 5435584 - DNA, 25 bp, Homo sapien
agcgtgagcaccgtgactgcgttca

SEQ ID NO: 5435585 - DNA, 25 bp, Homo sapien
tcacctgtgagttgtcccggatggc

SEQ ID NO: 5435586 - DNA, 25 bp, Homo sapien
gaacttttcggcctgtgcagcgtcc

SEQ ID NO: 5435587 - DNA, 25 bp, Homo sapien
ctaggcaggtgggaacgttctttct

SEQ ID NO: 5435588 - DNA, 25 bp, Homo sapien
gatgaggcccgctggttggagctca

SEQ ID NO: 5435589 - DNA, 25 bp, Homo sapien
gaagttgcggtggtgagggtgtagg

SEQ ID NO: 5435590 - DNA, 25 bp, Homo sapien
gagctgcttcttgctcgggtgagaa

SEQ ID NO: 5435591 - DNA, 25 bp, Homo sapien
aggcaacaactggctacgctgatca

SEQ ID NO: 5435592 - DNA, 25 bp, Homo sapien
ctacgctgatcaggggaactgcatt

SEQ ID NO: 5435593 - DNA, 25 bp, Homo sapien
caacaactggctacgctgatcaggg

SEQ ID NO: 5435594 - DNA, 25 bp, Homo sapien
cgctgatcaggggaactgcattcca

SEQ ID NO: 5435595 - DNA, 25 bp, Homo sapien
gtatgcacacacttcctaaccgcgt

SEQ ID NO: 5435596 - DNA, 25 bp, Homo sapien
cacaggacactttgttgcaggttta

SEQ ID NO: 5435597 - DNA, 25 bp, Homo sapien
tacagaactgagaaccatttagggt

SEQ ID NO: 5435598 - DNA, 25 bp, Homo sapien
catttagggttcagacgtatgcaca

SEQ ID NO: 5435599 - DNA, 25 bp, Homo sapien
caaatcctagggatagaggtacagg

SEQ ID NO: 5435600 - DNA, 25 bp, Homo sapien
tctaggaccatgaaggctttagtca

SEQ ID NO: 5435601 - DNA, 25 bp, Homo sapien
gggaatgattagctctgctggagtc

SEQ ID NO: 5435602 - DNA, 25 bp, Homo sapien
taggtaggtagacaaatcctaggga

SEQ ID NO: 5435603 - DNA, 25 bp, Homo sapien
agtgattcccaaggtcccatttgtg

SEQ ID NO: 5435604 - DNA, 25 bp, Homo sapien
cattgcgagtgattcccaaggtccc

SEQ ID NO: 5435605 - DNA, 25 bp, Homo sapien
gattcccaaggtcccatttgtgaat

SEQ ID NO: 5435606 - DNA, 25 bp, Homo sapien
gtgattcccaaggtcccatttgtga

SEQ ID NO: 5435607 - DNA, 25 bp, Homo sapien
ctgttagggacattagaagactttc

SEQ ID NO: 5435608 - DNA, 25 bp, Homo sapien
agtctcacatctctattggcactga

SEQ ID NO: 5435609 - DNA, 25 bp, Homo sapien
gcagtttcagtctcacatctctatt

SEQ ID NO: 5435610 - DNA, 25 bp, Homo sapien
agtttttcaatcttactagagatgt

SEQ ID NO: 5435611 - DNA, 25 bp, Homo sapien
tcacatctctattggcactgagtcc

SEQ ID NO: 5435612 - DNA, 25 bp, Homo sapien
cacttagtgacatatggtagcctat

SEQ ID NO: 5435613 - DNA, 25 bp, Homo sapien
ggcagatcccgaaacacttagtgac

SEQ ID NO: 5435614 - DNA, 25 bp, Homo sapien
gaatgatactggaacacaacccagg

SEQ ID NO: 5435615 - DNA, 25 bp, Homo sapien
cctcaatgacggcagatcccgaaac

SEQ ID NO: 5435616 - DNA, 25 bp, Homo sapien
aaagttaaggtcaaatgctgggtgc

SEQ ID NO: 5435617 - DNA, 25 bp, Homo sapien
tcatttaactcgaggcctaagggtg

SEQ ID NO: 5435618 - DNA, 25 bp, Homo sapien
ggtgtgagaattcctgcttcctgaa

SEQ ID NO: 5435619 - DNA, 25 bp, Homo sapien
tgctgggtgcgtttcaagttctgag

SEQ ID NO: 5435620 - DNA, 25 bp, Homo sapien
cctttgtagtgaaattcacaagtac

SEQ ID NO: 5435621 - DNA, 25 bp, Homo sapien
aattcacaagtactgtgaactggca

SEQ ID NO: 5435622 - DNA, 25 bp, Homo sapien
acaagtactgtgaactggcaagaaa

SEQ ID NO: 5435623 - DNA, 25 bp, Homo sapien
acttccctttgtagtgaaattcaca

SEQ ID NO: 5435624 - DNA, 25 bp, Homo sapien
aagtgcaaaggagtctttcatggtt

SEQ ID NO: 5435625 - DNA, 25 bp, Homo sapien
taaggtagctgtgtcaacatgagga

SEQ ID NO: 5435626 - DNA, 25 bp, Homo sapien
gctgcaggcagctcgtaaaggtgtt

SEQ ID NO: 5435627 - DNA, 25 bp, Homo sapien
caggcagctcgtaaaggtgttgctc

SEQ ID NO: 5435628 - DNA, 25 bp, Homo sapien
gatcaagaagcatcacaaggaacgg

SEQ ID NO: 5435629 - DNA, 25 bp, Homo sapien
gaagcatcacaaggaacgggtcttt

SEQ ID NO: 5435630 - DNA, 25 bp, Homo sapien
cataggggtcttcagacagatcaag

SEQ ID NO: 5435631 - DNA, 25 bp, Homo sapien
cagacagatcaagaagcatcacaag

SEQ ID NO: 5435632 - DNA, 25 bp, Homo sapien
gacccatttatgaaaagggattata

SEQ ID NO: 5435633 - DNA, 25 bp, Homo sapien
tgcagcattgacaagtcacacactt

SEQ ID NO: 5435634 - DNA, 25 bp, Homo sapien
ttttatttgagtgtacatcaactat

SEQ ID NO: 5435635 - DNA, 25 bp, Homo sapien
taattaaggcttagcatcagtcttt

SEQ ID NO: 5435636 - DNA, 25 bp, Homo sapien
ccttgatgggtccaggctcccagac

SEQ ID NO: 5435637 - DNA, 25 bp, Homo sapien
gctcccagactctcaagagagaggt

SEQ ID NO: 5435638 - DNA, 25 bp, Homo sapien
aggagggccccttgatgggtccagg

SEQ ID NO: 5435639 - DNA, 25 bp, Homo sapien
caggctcccagactctcaagagaga

SEQ ID NO: 5435640 - DNA, 25 bp, Homo sapien
aaatacagaataagccaagaactga

SEQ ID NO: 5435641 - DNA, 25 bp, Homo sapien
atacaacagaaacggaggagcgtac

SEQ ID NO: 5435642 - DNA, 25 bp, Homo sapien
catacaacagaaacggaggagcgta

SEQ ID NO: 5435643 - DNA, 25 bp, Homo sapien
tcatacaacagaaacggaggagcgt

SEQ ID NO: 5435644 - DNA, 25 bp, Homo sapien
ctgggaaccaagacagcgggtcgac

SEQ ID NO: 5435645 - DNA, 25 bp, Homo sapien
ggaaccaagacagcgggtcgacatt

SEQ ID NO: 5435646 - DNA, 25 bp, Homo sapien
tctgggaaccaagacagcgggtcga

SEQ ID NO: 5435647 - DNA, 25 bp, Homo sapien
agggtctgggaaccaagacagcggg

SEQ ID NO: 5435648 - DNA, 25 bp, Homo sapien
gcaaagggactcagagggatcaagt

SEQ ID NO: 5435649 - DNA, 25 bp, Homo sapien
ccagccagaagcaaagggactcaga

SEQ ID NO: 5435650 - DNA, 25 bp, Homo sapien
ggtctgcctcttgaccctggacggg

SEQ ID NO: 5435651 - DNA, 25 bp, Homo sapien
ctggtctgcctcttgaccctggacg

SEQ ID NO: 5435652 - DNA, 25 bp, Homo sapien
ctgggagggctgcggacccagtggg

SEQ ID NO: 5435653 - DNA, 25 bp, Homo sapien
accaccgaagtctagtgtatgactt

SEQ ID NO: 5435654 - DNA, 25 bp, Homo sapien
tgccctattactccaaaaccaccga

SEQ ID NO: 5435655 - DNA, 25 bp, Homo sapien
aaaccaccgaagtctagtgtatgac

SEQ ID NO: 5435656 - DNA, 25 bp, Homo sapien
ctgatgccctattactccaaaacca

SEQ ID NO: 5435657 - DNA, 25 bp, Homo sapien
aggtagctcaggtagcttgaaagaa

SEQ ID NO: 5435658 - DNA, 25 bp, Homo sapien
ggtagctcaggtagcttgaaagaat

SEQ ID NO: 5435659 - DNA, 25 bp, Homo sapien
gtagctcaggtagcttgaaagaatc

SEQ ID NO: 5435660 - DNA, 25 bp, Homo sapien
atctttgaacacgacgggaatggtc

SEQ ID NO: 5435661 - DNA, 25 bp, Homo sapien
ggcatctttgaacacgacgggaatg

SEQ ID NO: 5435662 - DNA, 25 bp, Homo sapien
gcatctttgaacacgacgggaatgg

SEQ ID NO: 5435663 - DNA, 25 bp, Homo sapien
catctttgaacacgacgggaatggt

SEQ ID NO: 5435664 - DNA, 25 bp, Homo sapien
ctgccgtccagagtggggacgttca

SEQ ID NO: 5435665 - DNA, 25 bp, Homo sapien
cacacagagcctccgggaggctgat

SEQ ID NO: 5435666 - DNA, 25 bp, Homo sapien
gtgtgccacacagagcctccgggag

SEQ ID NO: 5435667 - DNA, 25 bp, Homo sapien
tgtgtgccacacagagcctccggga

SEQ ID NO: 5435668 - DNA, 25 bp, Homo sapien
tgccacacagagcctccgggaggct

SEQ ID NO: 5435669 - DNA, 25 bp, Homo sapien
aagacgatatcagctggaatgttgt

SEQ ID NO: 5435670 - DNA, 25 bp, Homo sapien
gaaggtgatcttggtcccttctttc

SEQ ID NO: 5435671 - DNA, 25 bp, Homo sapien
tggggaaggtgatcttggtcccttc

SEQ ID NO: 5435672 - DNA, 25 bp, Homo sapien
aggtgatcttggtcccttctttcca

SEQ ID NO: 5435673 - DNA, 25 bp, Homo sapien
ggtgatcttggtcccttctttccac

SEQ ID NO: 5435674 - DNA, 25 bp, Homo sapien
ttttgtcttcgtttcgaatgctctt

SEQ ID NO: 5435675 - DNA, 25 bp, Homo sapien
tttgtcttcgtttcgaatgctcttt

SEQ ID NO: 5435676 - DNA, 25 bp, Homo sapien
attttgtcttcgtttcgaatgctct

SEQ ID NO: 5435677 - DNA, 25 bp, Homo sapien
ttgtcttcgtttcgaatgctctttc

SEQ ID NO: 5435678 - DNA, 25 bp, Homo sapien
cttgtgggagattttcatcttcttg

SEQ ID NO: 5435679 - DNA, 25 bp, Homo sapien
catcttcttggtacatcttcttggt

SEQ ID NO: 5435680 - DNA, 25 bp, Homo sapien
tcttcttggtacatcttcttggtac

SEQ ID NO: 5435681 - DNA, 25 bp, Homo sapien
ttcatcttcttggtacatcttcttg

SEQ ID NO: 5435682 - DNA, 25 bp, Homo sapien
tgccaccgaagaactcagcaaacat

SEQ ID NO: 5435683 - DNA, 25 bp, Homo sapien
gactgggggatcttgcttctttcgg

SEQ ID NO: 5435684 - DNA, 25 bp, Homo sapien
gactcgaaggtcgtgggtgactggg

SEQ ID NO: 5435685 - DNA, 25 bp, Homo sapien
tcttcaagggagactcgaaggtcgt

SEQ ID NO: 5435686 - DNA, 25 bp, Homo sapien
gcttcctcccggtagtggtcgaaga

SEQ ID NO: 5435687 - DNA, 25 bp, Homo sapien
cggcggtaggcccgcttgatctcct

SEQ ID NO: 5435688 - DNA, 25 bp, Homo sapien
ccttgaacttctcctcggcgccggg

SEQ ID NO: 5435689 - DNA, 25 bp, Homo sapien
gcctggcggcggtaggcccgcttga

SEQ ID NO: 5435690 - DNA, 25 bp, Homo sapien
gggtggtagcgcagcgcctggcggc

SEQ ID NO: 5435691 - DNA, 25 bp, Homo sapien
ctggtagtagtctttgcccacggcc

SEQ ID NO: 5435692 - DNA, 25 bp, Homo sapien
ccggtcccggactctgtatacccat

SEQ ID NO: 5435693 - DNA, 25 bp, Homo sapien
tggtagtagtctttgcccacggccc

SEQ ID NO: 5435694 - DNA, 25 bp, Homo sapien
cacctccgcgattggcagtggtgag

SEQ ID NO: 5435695 - DNA, 25 bp, Homo sapien
cactgatttctgacagcagtcgtgg

SEQ ID NO: 5435696 - DNA, 25 bp, Homo sapien
ggcactgtgacatcaaaaggagcag

SEQ ID NO: 5435697 - DNA, 25 bp, Homo sapien
cagtggtgagtcgtgagtagaggcc

SEQ ID NO: 5435698 - DNA, 25 bp, Homo sapien
tgttgtaggcccctctgctgttggt

SEQ ID NO: 5435699 - DNA, 25 bp, Homo sapien
aatctgttgtaggcccctctgctgt

SEQ ID NO: 5435700 - DNA, 25 bp, Homo sapien
tgtaggcccctctgctgttggtgat

SEQ ID NO: 5435701 - DNA, 25 bp, Homo sapien
tctgttgtaggcccctctgctgttg

SEQ ID NO: 5435702 - DNA, 25 bp, Homo sapien
aagggttctgagagcgctctcttct

SEQ ID NO: 5435703 - DNA, 25 bp, Homo sapien
attccaaagggttctgagagcgctc

SEQ ID NO: 5435704 - DNA, 25 bp, Homo sapien
tccaaagggttctgagagcgctctc

SEQ ID NO: 5435705 - DNA, 25 bp, Homo sapien
gttctgagagcgctctcttctttct

SEQ ID NO: 5435706 - DNA, 25 bp, Homo sapien
gagatgtccagttggtcttcatgtg

SEQ ID NO: 5435707 - DNA, 25 bp, Homo sapien
cagagattctaacatatgcctgtga

SEQ ID NO: 5435708 - DNA, 25 bp, Homo sapien
tctaacatatgcctgtgagatgtcc

SEQ ID NO: 5435709 - DNA, 25 bp, Homo sapien
tgaaatggtcatttcagagattcta

SEQ ID NO: 5435710 - DNA, 25 bp, Homo sapien
ttcatcagcaaccaaggcagtgttt

SEQ ID NO: 5435711 - DNA, 25 bp, Homo sapien
tcttttcctgggtaccagacgggca

SEQ ID NO: 5435712 - DNA, 25 bp, Homo sapien
gggttctttcatcagcaaccaaggc

SEQ ID NO: 5435713 - DNA, 25 bp, Homo sapien
gagagaatgagaagtaagtgccagc

SEQ ID NO: 5435714 - DNA, 25 bp, Homo sapien
taatcaggtcttccttatcagtttt

SEQ ID NO: 5435715 - DNA, 25 bp, Homo sapien
gcaaataaactttaatcaggtcttc

SEQ ID NO: 5435716 - DNA, 25 bp, Homo sapien
tctctgaagcaaataaactttaatc

SEQ ID NO: 5435717 - DNA, 25 bp, Homo sapien
aactttaatcaggtcttccttatca

SEQ ID NO: 5435718 - DNA, 25 bp, Homo sapien
gctgcttttataggtaccagatgtg

SEQ ID NO: 5435719 - DNA, 25 bp, Homo sapien
ggtgcagtataaaggcaaagcagca

SEQ ID NO: 5435720 - DNA, 25 bp, Homo sapien
aagcagcatgcacagtaaagcaaaa

SEQ ID NO: 5435721 - DNA, 25 bp, Homo sapien
aattcagggtcttaaagtcatttga

SEQ ID NO: 5435722 - DNA, 25 bp, Homo sapien
attgacatctaaggcaaaacagtga

SEQ ID NO: 5435723 - DNA, 25 bp, Homo sapien
acatctaaggcaaaacagtgaggac

SEQ ID NO: 5435724 - DNA, 25 bp, Homo sapien
tgacatctaaggcaaaacagtgagg

SEQ ID NO: 5435725 - DNA, 25 bp, Homo sapien
tcattgacatctaaggcaaaacagt

SEQ ID NO: 5435726 - DNA, 25 bp, Homo sapien
ggcaaaacgtttttgctttgctgac

SEQ ID NO: 5435727 - DNA, 25 bp, Homo sapien
gagagaatgaacttttgactctggg

SEQ ID NO: 5435728 - DNA, 25 bp, Homo sapien
gactctgggcatcatacaaagcctc

SEQ ID NO: 5435729 - DNA, 25 bp, Homo sapien
tgactctgggcatcatacaaagcct

SEQ ID NO: 5435730 - DNA, 25 bp, Homo sapien
ttttagatccacaatgtgacaggtt

SEQ ID NO: 5435731 - DNA, 25 bp, Homo sapien
gatccacaatgtgacaggtttcctt

SEQ ID NO: 5435732 - DNA, 25 bp, Homo sapien
ttactttcattgcccactgcctgca

SEQ ID NO: 5435733 - DNA, 25 bp, Homo sapien
tagaaacgctttggattttagatcc

SEQ ID NO: 5435734 - DNA, 25 bp, Homo sapien
tcatcttgtcccttgttgccctgga

SEQ ID NO: 5435735 - DNA, 25 bp, Homo sapien
catgctgtaatggaagcggggtccc

SEQ ID NO: 5435736 - DNA, 25 bp, Homo sapien
gctgtaatggaagcggggtcccaca

SEQ ID NO: 5435737 - DNA, 25 bp, Homo sapien
cagagtgtcatgctgtaatggaagc

SEQ ID NO: 5435738 - DNA, 25 bp, Homo sapien
agagtaacaaactctgaaggaggca

SEQ ID NO: 5435739 - DNA, 25 bp, Homo sapien
gagtaacaaactctgaaggaggcat

SEQ ID NO: 5435740 - DNA, 25 bp, Homo sapien
ttcccacttagctctttccggttca

SEQ ID NO: 5435741 - DNA, 25 bp, Homo sapien
tttcccccataccatatattgtcat

SEQ ID NO: 5435742 - DNA, 25 bp, Homo sapien
ggcttctgatttcccacttagctct

SEQ ID NO: 5435743 - DNA, 25 bp, Homo sapien
cccataccatatattgtcatttctc

SEQ ID NO: 5435744 - DNA, 25 bp, Homo sapien
gacagacgctgcctcgggacgatca

SEQ ID NO: 5435745 - DNA, 25 bp, Homo sapien
tgactgtgtgggtcttgacagacgc

SEQ ID NO: 5435746 - DNA, 25 bp, Homo sapien
ccaaaagaatgggtttgactgtgtg

SEQ ID NO: 5435747 - DNA, 25 bp, Homo sapien
ggacgatcaccgtggctgagccact

SEQ ID NO: 5435748 - DNA, 25 bp, Homo sapien
tgatgactaatctagaaaaccaggt

SEQ ID NO: 5435749 - DNA, 25 bp, Homo sapien
cacaagtatcttacaaaggagaccc

SEQ ID NO: 5435750 - DNA, 25 bp, Homo sapien
ggagaccctggctcgttacatcttt

SEQ ID NO: 5435751 - DNA, 25 bp, Homo sapien
gatggttgtgccaatagagtcacac

SEQ ID NO: 5435752 - DNA, 25 bp, Homo sapien
tcccagtgaggtctttcagatgcta

SEQ ID NO: 5435753 - DNA, 25 bp, Homo sapien
aaacctagccactgagtcctgtacg

SEQ ID NO: 5435754 - DNA, 25 bp, Homo sapien
cacgcacaggttatttgaaggagac

SEQ ID NO: 5435755 - DNA, 25 bp, Homo sapien
tatggtgctgcattagccacaaagc

SEQ ID NO: 5435756 - DNA, 25 bp, Homo sapien
catcactgagtatttattatatata

SEQ ID NO: 5435757 - DNA, 25 bp, Homo sapien
tataacaaatacatgggaaagaaaa

SEQ ID NO: 5435758 - DNA, 25 bp, Homo sapien
tatataacaaatacatgggaaagaa

SEQ ID NO: 5435759 - DNA, 25 bp, Homo sapien
tatatataacaaatacatgggaaag

SEQ ID NO: 5435760 - DNA, 25 bp, Homo sapien
tactgtattgtgtagtccaagctct

SEQ ID NO: 5435761 - DNA, 25 bp, Homo sapien
tgcaaggcaacatgtgtagatctct

SEQ ID NO: 5435762 - DNA, 25 bp, Homo sapien
catgttttcattggtgtagattacc

SEQ ID NO: 5435763 - DNA, 25 bp, Homo sapien
taatcaaatatagctgtagtacatg

SEQ ID NO: 5435764 - DNA, 25 bp, Homo sapien
tagattaacctcgtggacgctcttg

SEQ ID NO: 5435765 - DNA, 25 bp, Homo sapien
ttgtattgtctgaactgtagtgccc

SEQ ID NO: 5435766 - DNA, 25 bp, Homo sapien
cgtggacgctcttgttgtattgtct

SEQ ID NO: 5435767 - DNA, 25 bp, Homo sapien
ctgaactgtagtgccctgtattttg

SEQ ID NO: 5435768 - DNA, 25 bp, Homo sapien
acaaatctcagtccaatgctattac

SEQ ID NO: 5435769 - DNA, 25 bp, Homo sapien
atctcagtccaatgctattacctaa

SEQ ID NO: 5435770 - DNA, 25 bp, Homo sapien
tacaaatctcagtccaatgctatta

SEQ ID NO: 5435771 - DNA, 25 bp, Homo sapien
gaaagaatttatcattagtagaagc

SEQ ID NO: 5435772 - DNA, 25 bp, Homo sapien
ttatcattagtagaagcttggatta

SEQ ID NO: 5435773 - DNA, 25 bp, Homo sapien
gatgaaagaatttatcattagtaga

SEQ ID NO: 5435774 - DNA, 25 bp, Homo sapien
tcattagtagaagcttggattattt

SEQ ID NO: 5435775 - DNA, 25 bp, Homo sapien
gcacaaagaatgactcagcacaatg

SEQ ID NO: 5435776 - DNA, 25 bp, Homo sapien
tatctcactttaaaggtcttcaaca

SEQ ID NO: 5435777 - DNA, 25 bp, Homo sapien
gcaatcaagcaagtcatgggcccat

SEQ ID NO: 5435778 - DNA, 25 bp, Homo sapien
cctaagaatgaatgttatattgact

SEQ ID NO: 5435779 - DNA, 25 bp, Homo sapien
ttggtttgcatttggcttgaagtcc

SEQ ID NO: 5435780 - DNA, 25 bp, Homo sapien
gttggtttgcatttggcttgaagtc

SEQ ID NO: 5435781 - DNA, 25 bp, Homo sapien
gacatactgaaatcgtacaggaccg

SEQ ID NO: 5435782 - DNA, 25 bp, Homo sapien
tacaggaccgggaacaacgtataga

SEQ ID NO: 5435783 - DNA, 25 bp, Homo sapien
cacagtgttgtccagtataaccagc

SEQ ID NO: 5435784 - DNA, 25 bp, Homo sapien
tcacagctgcgattaagacatactg

SEQ ID NO: 5435785 - DNA, 25 bp, Homo sapien
gcagaagccattgtaatgttccgga

SEQ ID NO: 5435786 - DNA, 25 bp, Homo sapien
tgatagaatgctcacacttcccatg

SEQ ID NO: 5435787 - DNA, 25 bp, Homo sapien
tccggacaaggtatgtggtgttctc

SEQ ID NO: 5435788 - DNA, 25 bp, Homo sapien
gatggctcctgcatattgatagaat

SEQ ID NO: 5435789 - DNA, 25 bp, Homo sapien
taagcaccccctgtaaatacttagc

SEQ ID NO: 5435790 - DNA, 25 bp, Homo sapien
gaatacagataaaagtaagcacccc

SEQ ID NO: 5435791 - DNA, 25 bp, Homo sapien
ctgtgaatacagataaaagtaagca

SEQ ID NO: 5435792 - DNA, 25 bp, Homo sapien
gtgaatacagataaaagtaagcacc

SEQ ID NO: 5435793 - DNA, 25 bp, Homo sapien
taaacgtggattctaaagtgaacac

SEQ ID NO: 5435794 - DNA, 25 bp, Homo sapien
ctaaagtgaacacttttgcctgcca

SEQ ID NO: 5435795 - DNA, 25 bp, Homo sapien
gataacgaataaacgtggattctaa

SEQ ID NO: 5435796 - DNA, 25 bp, Homo sapien
ggattctaaagtgaacacttttgcc

SEQ ID NO: 5435797 - DNA, 25 bp, Homo sapien
ttctggattcgtgccatattcacaa

SEQ ID NO: 5435798 - DNA, 25 bp, Homo sapien
gtttgtttctggattcgtgccatat

SEQ ID NO: 5435799 - DNA, 25 bp, Homo sapien
tgtttctggattcgtgccatattca

SEQ ID NO: 5435800 - DNA, 25 bp, Homo sapien
tggattcgtgccatattcacaatta

SEQ ID NO: 5435801 - DNA, 25 bp, Homo sapien
cccactgccaggcttgttttagcct

SEQ ID NO: 5435802 - DNA, 25 bp, Homo sapien
tagcctctgagcgtgtgtcattgct

SEQ ID NO: 5435803 - DNA, 25 bp, Homo sapien
tatgctctcacctatgggcagtccc

SEQ ID NO: 5435804 - DNA, 25 bp, Homo sapien
cattgctggcattttgtggaagaca

SEQ ID NO: 5435805 - DNA, 25 bp, Homo sapien
aaatgggagtccgaaatgtctgcat

SEQ ID NO: 5435806 - DNA, 25 bp, Homo sapien
ccagaaataagattgaggtggagct

SEQ ID NO: 5435807 - DNA, 25 bp, Homo sapien
caatttattggtgggaactctggcc

SEQ ID NO: 5435808 - DNA, 25 bp, Homo sapien
caataatagacaatggtagatcagg

SEQ ID NO: 5435809 - DNA, 25 bp, Homo sapien
tgacacttctctaaaggcagatgga

SEQ ID NO: 5435810 - DNA, 25 bp, Homo sapien
tggctctgggatacatctgaacaca

SEQ ID NO: 5435811 - DNA, 25 bp, Homo sapien
tctaccccagggcataggagccttg

SEQ ID NO: 5435812 - DNA, 25 bp, Homo sapien
cagtgcctggtagaatgattataac

SEQ ID NO: 5435813 - DNA, 25 bp, Homo sapien
tggcatatcctgtccagttatccat

SEQ ID NO: 5435814 - DNA, 25 bp, Homo sapien
tagtcactatccaaagtataattct

SEQ ID NO: 5435815 - DNA, 25 bp, Homo sapien
cactatccaaagtataattctggca

SEQ ID NO: 5435816 - DNA, 25 bp, Homo sapien
tgaatttagtcactatccaaagtat

SEQ ID NO: 5435817 - DNA, 25 bp, Homo sapien
aatgcaggattactcagtagcaaac

SEQ ID NO: 5435818 - DNA, 25 bp, Homo sapien
gcaggattactcagtagcaaacact

SEQ ID NO: 5435819 - DNA, 25 bp, Homo sapien
tttattaatgcaggattactcagta

SEQ ID NO: 5435820 - DNA, 25 bp, Homo sapien
tattaatgcaggattactcagtagc

SEQ ID NO: 5435821 - DNA, 25 bp, Homo sapien
aatgaaaagcctggaaagccctagc

SEQ ID NO: 5435822 - DNA, 25 bp, Homo sapien
tggcctggttagctcatctgacaag

SEQ ID NO: 5435823 - DNA, 25 bp, Homo sapien
gacagacctaactctaagcccaagt

SEQ ID NO: 5435824 - DNA, 25 bp, Homo sapien
aaatgaagagatccaaagcccttta

SEQ ID NO: 5435825 - DNA, 25 bp, Homo sapien
gaggacaatgacacatagactctct

SEQ ID NO: 5435826 - DNA, 25 bp, Homo sapien
tgacaccaaactagaagatcctgga

SEQ ID NO: 5435827 - DNA, 25 bp, Homo sapien
ccctccttggacagattttagcata

SEQ ID NO: 5435828 - DNA, 25 bp, Homo sapien
gtttgagggatacgagtcacacagt

SEQ ID NO: 5435829 - DNA, 25 bp, Homo sapien
ctgcataatctgttcttgcataatg

SEQ ID NO: 5435830 - DNA, 25 bp, Homo sapien
cagacttagtagttgtagttgtgtt

SEQ ID NO: 5435831 - DNA, 25 bp, Homo sapien
tgcataatctgttcttgcataatgc

SEQ ID NO: 5435832 - DNA, 25 bp, Homo sapien
cccatcttcagacttagtagttgta

SEQ ID NO: 5435833 - DNA, 25 bp, Homo sapien
ttgaaatgaattttggtatgaacat

SEQ ID NO: 5435834 - DNA, 25 bp, Homo sapien
tgaaatgaattttggtatgaacatt

SEQ ID NO: 5435835 - DNA, 25 bp, Homo sapien
gaaatgaattttggtatgaacatta

SEQ ID NO: 5435836 - DNA, 25 bp, Homo sapien
aaatgaattttggtatgaacattac

SEQ ID NO: 5435837 - DNA, 25 bp, Homo sapien
tgaagttggtttgagaacagtcaat

SEQ ID NO: 5435838 - DNA, 25 bp, Homo sapien
tctttgatttggcatgcattatcat

SEQ ID NO: 5435839 - DNA, 25 bp, Homo sapien
ttgacatcgacccaaagacatgact

SEQ ID NO: 5435840 - DNA, 25 bp, Homo sapien
tgtttctgacacgatgcttctttga

SEQ ID NO: 5435841 - DNA, 25 bp, Homo sapien
tggcttgaaaacaataagctggccg

SEQ ID NO: 5435842 - DNA, 25 bp, Homo sapien
aaagtagtcagatgtgctgttgggc

SEQ ID NO: 5435843 - DNA, 25 bp, Homo sapien
tgaaaacaataagctggccgggcgt

SEQ ID NO: 5435844 - DNA, 25 bp, Homo sapien
aacttcaaagatttgctaaaatggc

SEQ ID NO: 5435845 - DNA, 25 bp, Homo sapien
aagagattttccagatttactgtat

SEQ ID NO: 5435846 - DNA, 25 bp, Homo sapien
taagagattttccagatttactgta

SEQ ID NO: 5435847 - DNA, 25 bp, Homo sapien
gagattttccagatttactgtatat

SEQ ID NO: 5435848 - DNA, 25 bp, Homo sapien
agagattttccagatttactgtata

SEQ ID NO: 5435849 - DNA, 25 bp, Homo sapien
tgacagttatcaggcaggcagattt

SEQ ID NO: 5435850 - DNA, 25 bp, Homo sapien
taaggtctactgagacttgacagtt

SEQ ID NO: 5435851 - DNA, 25 bp, Homo sapien
gacttgacagttatcaggcaggcag

SEQ ID NO: 5435852 - DNA, 25 bp, Homo sapien
ctttgtcactgacataaggtctact

SEQ ID NO: 5435853 - DNA, 25 bp, Homo sapien
cattggatgaaggtttagcaacttt

SEQ ID NO: 5435854 - DNA, 25 bp, Homo sapien
ttgagtaaagataatcacaagcttc

SEQ ID NO: 5435855 - DNA, 25 bp, Homo sapien
aagataatcacaagcttcaaagtga

SEQ ID NO: 5435856 - DNA, 25 bp, Homo sapien
ttgggggcagactatactcattgga

SEQ ID NO: 5435857 - DNA, 25 bp, Homo sapien
aatgtctgaatgcagggcacagata

SEQ ID NO: 5435858 - DNA, 25 bp, Homo sapien
gggcacagatacagcacagctgctt

SEQ ID NO: 5435859 - DNA, 25 bp, Homo sapien
gtctgaatgcagggcacagatacag

SEQ ID NO: 5435860 - DNA, 25 bp, Homo sapien
tgaatgcagggcacagatacagcac

SEQ ID NO: 5435861 - DNA, 25 bp, Homo sapien
ccttacaacgtcaaaagggatgctt

SEQ ID NO: 5435862 - DNA, 25 bp, Homo sapien
tacttgttgaaattagcacacatcc

SEQ ID NO: 5435863 - DNA, 25 bp, Homo sapien
tcctgctgtaatagacgactgtgtg

SEQ ID NO: 5435864 - DNA, 25 bp, Homo sapien
caaggatttatgtggccaagtgcag

SEQ ID NO: 5435865 - DNA, 25 bp, Homo sapien
cccagagcccgcatgttgttgacaa

SEQ ID NO: 5435866 - DNA, 25 bp, Homo sapien
ttgacaagccacagagttgcccaac

SEQ ID NO: 5435867 - DNA, 25 bp, Homo sapien
tcctgtttcaatgatgagaaggcca

SEQ ID NO: 5435868 - DNA, 25 bp, Homo sapien
gaatctgtgagctgacccagagccc

SEQ ID NO: 5435869 - DNA, 25 bp, Homo sapien
caagctgcctcattagataagtctc

SEQ ID NO: 5435870 - DNA, 25 bp, Homo sapien
tgatttggctacaactcagtcacaa

SEQ ID NO: 5435871 - DNA, 25 bp, Homo sapien
caaggccttttgttagtgagaattc

SEQ ID NO: 5435872 - DNA, 25 bp, Homo sapien
catctatcctggtaacaaggccttt

SEQ ID NO: 5435873 - DNA, 25 bp, Homo sapien
tgtgttagaagattggtcagtatca

SEQ ID NO: 5435874 - DNA, 25 bp, Homo sapien
ctgcaaggccttcggggataagtgt

SEQ ID NO: 5435875 - DNA, 25 bp, Homo sapien
tcctgcaaggccttcggggataagt

SEQ ID NO: 5435876 - DNA, 25 bp, Homo sapien
ggataagtgtgttagaagattggtc

SEQ ID NO: 5435877 - DNA, 25 bp, Homo sapien
tccaaagtggttccattattcttct

SEQ ID NO: 5435878 - DNA, 25 bp, Homo sapien
tatttccaaagtggttccattattc

SEQ ID NO: 5435879 - DNA, 25 bp, Homo sapien
ttccaaagtggttccattattcttc

SEQ ID NO: 5435880 - DNA, 25 bp, Homo sapien
cctatttccaaagtggttccattat

SEQ ID NO: 5435881 - DNA, 25 bp, Homo sapien
gtttctgtttgacttctaatctctg

SEQ ID NO: 5435882 - DNA, 25 bp, Homo sapien
cttcgtttctgtttgacttctaatc

SEQ ID NO: 5435883 - DNA, 25 bp, Homo sapien
ttctgtttgacttctaatctctggc

SEQ ID NO: 5435884 - DNA, 25 bp, Homo sapien
ctgtttgacttctaatctctggcat

SEQ ID NO: 5435885 - DNA, 25 bp, Homo sapien
caagcacagtctacatactgcagaa

SEQ ID NO: 5435886 - DNA, 25 bp, Homo sapien
aaaatgatggttaactgctctaggc

SEQ ID NO: 5435887 - DNA, 25 bp, Homo sapien
tgctctaggcaagcacagtctacat

SEQ ID NO: 5435888 - DNA, 25 bp, Homo sapien
aaaataaagagcagccagatgtttt

SEQ ID NO: 5435889 - DNA, 25 bp, Homo sapien
tggcaaatatcacaggtggatgtct

SEQ ID NO: 5435890 - DNA, 25 bp, Homo sapien
ctcggcatcttcgtcacattctgca

SEQ ID NO: 5435891 - DNA, 25 bp, Homo sapien
gcaaatatcacaggtggatgtctcc

SEQ ID NO: 5435892 - DNA, 25 bp, Homo sapien
catcttcgtcacattctgcaccaaa

SEQ ID NO: 5435893 - DNA, 25 bp, Homo sapien
gactccacctgagttgctaaattcc

SEQ ID NO: 5435894 - DNA, 25 bp, Homo sapien
tgaagaggactccacctgagttgct

SEQ ID NO: 5435895 - DNA, 25 bp, Homo sapien
tccaaatgaagaggactccacctga

SEQ ID NO: 5435896 - DNA, 25 bp, Homo sapien
caccagcacaacacaagtactccaa

SEQ ID NO: 5435897 - DNA, 25 bp, Homo sapien
aatgatacaatatccatatctatga

SEQ ID NO: 5435898 - DNA, 25 bp, Homo sapien
tacaatatccatatctatgattact

SEQ ID NO: 5435899 - DNA, 25 bp, Homo sapien
gatacaatatccatatctatgatta

SEQ ID NO: 5435900 - DNA, 25 bp, Homo sapien
aatatccatatctatgattactcca

SEQ ID NO: 5435901 - DNA, 25 bp, Homo sapien
taagttggagggaagacaacattca

SEQ ID NO: 5435902 - DNA, 25 bp, Homo sapien
gccagggttgcggaaatcataagtt

SEQ ID NO: 5435903 - DNA, 25 bp, Homo sapien
ttaattcaatacagtgccagggttg

SEQ ID NO: 5435904 - DNA, 25 bp, Homo sapien
tgcggaaatcataagttggagggaa

SEQ ID NO: 5435905 - DNA, 25 bp, Homo sapien
tgtgctaaatatagtatttggtaaa

SEQ ID NO: 5435906 - DNA, 25 bp, Homo sapien
ctatttcttagtatttaatgtgcta

SEQ ID NO: 5435907 - DNA, 25 bp, Homo sapien
tagtgctatttcttagtatttaatg

SEQ ID NO: 5435908 - DNA, 25 bp, Homo sapien
ccaggcccggcccattttagtgcta

SEQ ID NO: 5435909 - DNA, 25 bp, Homo sapien
cagctagccgatcatcataattcat

SEQ ID NO: 5435910 - DNA, 25 bp, Homo sapien
ctttgccagctagccgatcatcata

SEQ ID NO: 5435911 - DNA, 25 bp, Homo sapien
tgccagctagccgatcatcataatt

SEQ ID NO: 5435912 - DNA, 25 bp, Homo sapien
catctttgccagctagccgatcatc

SEQ ID NO: 5435913 - DNA, 25 bp, Homo sapien
tgaatatcactatcccaaagtgggt

SEQ ID NO: 5435914 - DNA, 25 bp, Homo sapien
taactcagtgtttcatcgaacgtgg

SEQ ID NO: 5435915 - DNA, 25 bp, Homo sapien
tggattcaccttaagacatctgccc

SEQ ID NO: 5435916 - DNA, 25 bp, Homo sapien
ctctgcttggattacggcctggata

SEQ ID NO: 5435917 - DNA, 25 bp, Homo sapien
ttggagaaacattcaccgctcagcc

SEQ ID NO: 5435918 - DNA, 25 bp, Homo sapien
caagccttgatctacaatcttggag

SEQ ID NO: 5435919 - DNA, 25 bp, Homo sapien
agcccaacactgtccagttgaatgc

SEQ ID NO: 5435920 - DNA, 25 bp, Homo sapien
cacaattcacttgtatcaagccttg

SEQ ID NO: 5435921 - DNA, 25 bp, Homo sapien
taacttctcagggaacaaatggagg

SEQ ID NO: 5435922 - DNA, 25 bp, Homo sapien
tgtgtcgagggaggtaccatatggg

SEQ ID NO: 5435923 - DNA, 25 bp, Homo sapien
gagccagaatttccaccctagtaca

SEQ ID NO: 5435924 - DNA, 25 bp, Homo sapien
tgagtttagcatgtcaagtttacat

SEQ ID NO: 5435925 - DNA, 25 bp, Homo sapien
tctgggaactgaatgcgctagtttt

SEQ ID NO: 5435926 - DNA, 25 bp, Homo sapien
tttatgatgaagctgtgattctggg

SEQ ID NO: 5435927 - DNA, 25 bp, Homo sapien
cagtaaccagattggctcattaaaa

SEQ ID NO: 5435928 - DNA, 25 bp, Homo sapien
tatagtccctttagttcaacatgac

SEQ ID NO: 5435929 - DNA, 25 bp, Homo sapien
tctatgtccattgctactcacatca

SEQ ID NO: 5435930 - DNA, 25 bp, Homo sapien
aacaagttgaactctatgtccattg

SEQ ID NO: 5435931 - DNA, 25 bp, Homo sapien
agttgaactctatgtccattgctac

SEQ ID NO: 5435932 - DNA, 25 bp, Homo sapien
gaactctatgtccattgctactcac

SEQ ID NO: 5435933 - DNA, 25 bp, Homo sapien
ggtaggagatctggcttgaagttaa

SEQ ID NO: 5435934 - DNA, 25 bp, Homo sapien
ccactctcagtaagttgagggtcat

SEQ ID NO: 5435935 - DNA, 25 bp, Homo sapien
tatattcgatcagagcattactaca

SEQ ID NO: 5435936 - DNA, 25 bp, Homo sapien
ggatgaaacagaatcactttgcagg

SEQ ID NO: 5435937 - DNA, 25 bp, Homo sapien
tttcttcctgcagtatttgttgctt

SEQ ID NO: 5435938 - DNA, 25 bp, Homo sapien
ctccatctccagatcctgatcctgc

SEQ ID NO: 5435939 - DNA, 25 bp, Homo sapien
tccatctccagatcctgatcctgca

SEQ ID NO: 5435940 - DNA, 25 bp, Homo sapien
ccatctccagatcctgatcctgcat

SEQ ID NO: 5435941 - DNA, 25 bp, Homo sapien
gacaccacaagtatctcactctgct

SEQ ID NO: 5435942 - DNA, 25 bp, Homo sapien
cacacaggcacatagtcattgttgc

SEQ ID NO: 5435943 - DNA, 25 bp, Homo sapien
caggtaacactcattctggtagctc

SEQ ID NO: 5435944 - DNA, 25 bp, Homo sapien
gcagcctgtcgcaggtaacactcat

SEQ ID NO: 5435945 - DNA, 25 bp, Homo sapien
gtgtctccaattcttaaacattccc

SEQ ID NO: 5435946 - DNA, 25 bp, Homo sapien
cttgaactgacagacgcaagtcaca

SEQ ID NO: 5435947 - DNA, 25 bp, Homo sapien
acattccccatcaaatttacaggtg

SEQ ID NO: 5435948 - DNA, 25 bp, Homo sapien
cagacgcaagtcacagtgtctccaa

SEQ ID NO: 5435949 - DNA, 25 bp, Homo sapien
aatctgaaggaacccgagcgagcaa

SEQ ID NO: 5435950 - DNA, 25 bp, Homo sapien
taattaggaagcttcagcagagcga

SEQ ID NO: 5435951 - DNA, 25 bp, Homo sapien
agagcgaagcctgccaagcgttcgc

SEQ ID NO: 5435952 - DNA, 25 bp, Homo sapien
aagcgttcgccgtcagaatctgaag

SEQ ID NO: 5435953 - DNA, 25 bp, Homo sapien
agcaattccagccggtgggcgtttg

SEQ ID NO: 5435954 - DNA, 25 bp, Homo sapien
caattccagccggtgggcgtttggc

SEQ ID NO: 5435955 - DNA, 25 bp, Homo sapien
cagagcaattccagccggtgggcgt

SEQ ID NO: 5435956 - DNA, 25 bp, Homo sapien
aattccagccggtgggcgtttggca

SEQ ID NO: 5435957 - DNA, 25 bp, Homo sapien
cacttaaggaggtagggaaagcagc

SEQ ID NO: 5435958 - DNA, 25 bp, Homo sapien
aggtagggaaagcagcgagcttcac

SEQ ID NO: 5435959 - DNA, 25 bp, Homo sapien
aaggaggtagggaaagcagcgagct

SEQ ID NO: 5435960 - DNA, 25 bp, Homo sapien
tcacttaaggaggtagggaaagcag

SEQ ID NO: 5435961 - DNA, 25 bp, Homo sapien
tacgatgagtagcatgacgggcagc

SEQ ID NO: 5435962 - DNA, 25 bp, Homo sapien
gccctcgcaaagtgtccagctgctg

SEQ ID NO: 5435963 - DNA, 25 bp, Homo sapien
ccagcaaaagccctcgcaaagtgtc

SEQ ID NO: 5435964 - DNA, 25 bp, Homo sapien
gctacgatgagtagcatgacgggca

SEQ ID NO: 5435965 - DNA, 25 bp, Homo sapien
gctactgagcatcccgcggacggcg

SEQ ID NO: 5435966 - DNA, 25 bp, Homo sapien
gaggaacacaggatcgcgggggccg

SEQ ID NO: 5435967 - DNA, 25 bp, Homo sapien
gtggcagtggcacccggcggggaag

SEQ ID NO: 5435968 - DNA, 25 bp, Homo sapien
ccgggcagcgggctactgagcatcc

SEQ ID NO: 5435969 - DNA, 25 bp, Homo sapien
tcgtccgctgagaagctgcgccgga

SEQ ID NO: 5435970 - DNA, 25 bp, Homo sapien
catccctctggcgtttgggaagcag

SEQ ID NO: 5435971 - DNA, 25 bp, Homo sapien
gctgctgccataaggagggagctct

SEQ ID NO: 5435972 - DNA, 25 bp, Homo sapien
tcgagagtttcagcaacatccaggg

SEQ ID NO: 5435973 - DNA, 25 bp, Homo sapien
gggatggctcaaatgagaagctcgg

SEQ ID NO: 5435974 - DNA, 25 bp, Homo sapien
gctcaaatgagaagctcgggcttca

SEQ ID NO: 5435975 - DNA, 25 bp, Homo sapien
ctaggcggggatggctcaaatgaga

SEQ ID NO: 5435976 - DNA, 25 bp, Homo sapien
tggctcaaatgagaagctcgggctt

SEQ ID NO: 5435977 - DNA, 25 bp, Homo sapien
ccgcacactcatataccattcgcct

SEQ ID NO: 5435978 - DNA, 25 bp, Homo sapien
ttcgcctcactctccgctccaggac

SEQ ID NO: 5435979 - DNA, 25 bp, Homo sapien
tcgcctcactctccgctccaggacg

SEQ ID NO: 5435980 - DNA, 25 bp, Homo sapien
actcatataccattcgcctcactct

SEQ ID NO: 5435981 - DNA, 25 bp, Homo sapien
gtccggactagcgcccctcttccgc

SEQ ID NO: 5435982 - DNA, 25 bp, Homo sapien
cgggccgcggctgggtggcgtctct

SEQ ID NO: 5435983 - DNA, 25 bp, Homo sapien
ccgcggctgggtggcgtctctccga

SEQ ID NO: 5435984 - DNA, 25 bp, Homo sapien
cggactagcgcccctcttccgcgcg

SEQ ID NO: 5435985 - DNA, 25 bp, Homo sapien
tcctgctggcgaccggcgctccagc

SEQ ID NO: 5435986 - DNA, 25 bp, Homo sapien
agggcgtcctgctggcgaccggcgc

SEQ ID NO: 5435987 - DNA, 25 bp, Homo sapien
gcgcgggagagggcgtcctgctggc

SEQ ID NO: 5435988 - DNA, 25 bp, Homo sapien
gcgggagagggcgtcctgctggcga

SEQ ID NO: 5435989 - DNA, 25 bp, Homo sapien
agcatctcccacaagagcgtgcaac

SEQ ID NO: 5435990 - DNA, 25 bp, Homo sapien
gacgtttctctagggatttacagga

SEQ ID NO: 5435991 - DNA, 25 bp, Homo sapien
gatggtgttagaaccgctcttgccg

SEQ ID NO: 5435992 - DNA, 25 bp, Homo sapien
tcttgccgacctggaagcaacagca

SEQ ID NO: 5435993 - DNA, 25 bp, Homo sapien
tactcgggtctttgccggatggccg

SEQ ID NO: 5435994 - DNA, 25 bp, Homo sapien
aggctcctctgcatacgccgcgggt

SEQ ID NO: 5435995 - DNA, 25 bp, Homo sapien
agtgaccctgcgttccttactcggg

SEQ ID NO: 5435996 - DNA, 25 bp, Homo sapien
ggctccatttgttggcccaggcagt

SEQ ID NO: 5435997 - DNA, 25 bp, Homo sapien
tctcctttgagagatgtgatcgtgc

SEQ ID NO: 5435998 - DNA, 25 bp, Homo sapien
tcagtgcctcaacgaaatctttttt

SEQ ID NO: 5435999 - DNA, 25 bp, Homo sapien
gatcgtgcagcacctcagtgcctca

SEQ ID NO: 5436000 - DNA, 25 bp, Homo sapien
tgagagatgtgatcgtgcagcacct

SEQ ID NO: 5436001 - DNA, 25 bp, Homo sapien
tgctgctcttctacccacttgtcgt

SEQ ID NO: 5436002 - DNA, 25 bp, Homo sapien
gctcttctacccacttgtcgttctt

SEQ ID NO: 5436003 - DNA, 25 bp, Homo sapien
ctaatgttcccagccgctttgctgc

SEQ ID NO: 5436004 - DNA, 25 bp, Homo sapien
ttgctgctgctcttctacccacttg

SEQ ID NO: 5436005 - DNA, 25 bp, Homo sapien
ctcccatgatttcacttggagaata

SEQ ID NO: 5436006 - DNA, 25 bp, Homo sapien
gaatatcttgcctcttcaactctga

SEQ ID NO: 5436007 - DNA, 25 bp, Homo sapien
agaatatcttgcctcttcaactctg

SEQ ID NO: 5436008 - DNA, 25 bp, Homo sapien
gatttcacttggagaatatcttgcc

SEQ ID NO: 5436009 - DNA, 25 bp, Homo sapien
tctagacgaaaatgcaacttagtaa

SEQ ID NO: 5436010 - DNA, 25 bp, Homo sapien
cccatgagacaaagatgtcgagaaa

SEQ ID NO: 5436011 - DNA, 25 bp, Homo sapien
gattggagacatgagcaatgagctg

SEQ ID NO: 5436012 - DNA, 25 bp, Homo sapien
cacccttcccagtctgattggagac

SEQ ID NO: 5436013 - DNA, 25 bp, Homo sapien
acggcttggtgtcgtttgaccactg

SEQ ID NO: 5436014 - DNA, 25 bp, Homo sapien
gtcgtttgaccactggctcgtggcc

SEQ ID NO: 5436015 - DNA, 25 bp, Homo sapien
ggtgtcgtttgaccactggctcgtg

SEQ ID NO: 5436016 - DNA, 25 bp, Homo sapien
ttggtgtcgtttgaccactggctcg

SEQ ID NO: 5436017 - DNA, 25 bp, Homo sapien
agaatggtaaatgggagaatcaaac

SEQ ID NO: 5436018 - DNA, 25 bp, Homo sapien
tagaatggtaaatgggagaatcaaa

SEQ ID NO: 5436019 - DNA, 25 bp, Homo sapien
taatagaatggtaaatgggagaatc

SEQ ID NO: 5436020 - DNA, 25 bp, Homo sapien
aatagaatggtaaatgggagaatca

SEQ ID NO: 5436021 - DNA, 25 bp, Homo sapien
cacgttatggcatcttgtcttgcct

SEQ ID NO: 5436022 - DNA, 25 bp, Homo sapien
gccttgatgacatttgattctttgc

SEQ ID NO: 5436023 - DNA, 25 bp, Homo sapien
gttatggcatcttgtcttgccttga

SEQ ID NO: 5436024 - DNA, 25 bp, Homo sapien
tcacgttatggcatcttgtcttgcc

SEQ ID NO: 5436025 - DNA, 25 bp, Homo sapien
gaggcactgtatttgtgtcggacaa

SEQ ID NO: 5436026 - DNA, 25 bp, Homo sapien
cactgtatttgtgtcggacaatttc

SEQ ID NO: 5436027 - DNA, 25 bp, Homo sapien
ggcactgtatttgtgtcggacaatt

SEQ ID NO: 5436028 - DNA, 25 bp, Homo sapien
ctggaggcactgtatttgtgtcgga

SEQ ID NO: 5436029 - DNA, 25 bp, Homo sapien
cacaatgccagggaaccgtttctca

SEQ ID NO: 5436030 - DNA, 25 bp, Homo sapien
ggcactctacgggtcttgaatcttg

SEQ ID NO: 5436031 - DNA, 25 bp, Homo sapien
ctcggataacctgtgagaaatggca

SEQ ID NO: 5436032 - DNA, 25 bp, Homo sapien
gaatcttgtttgacacagtggaagg

SEQ ID NO: 5436033 - DNA, 25 bp, Homo sapien
catcatctaagaagttactagtcct

SEQ ID NO: 5436034 - DNA, 25 bp, Homo sapien
tcatcatctaagaagttactagtcc

SEQ ID NO: 5436035 - DNA, 25 bp, Homo sapien
atcatctaagaagttactagtcctc

SEQ ID NO: 5436036 - DNA, 25 bp, Homo sapien
attcatcatctaagaagttactagt

SEQ ID NO: 5436037 - DNA, 25 bp, Homo sapien
ttctaagaagtccacgtcaaatcga

SEQ ID NO: 5436038 - DNA, 25 bp, Homo sapien
gtcaaatcgatcttgtacagctctt

SEQ ID NO: 5436039 - DNA, 25 bp, Homo sapien
ttgctagtagcttcggttttgtaaa

SEQ ID NO: 5436040 - DNA, 25 bp, Homo sapien
tgtacagctcttgctagtagcttcg

SEQ ID NO: 5436041 - DNA, 25 bp, Homo sapien
gattccatttctatcatcgactgtg

SEQ ID NO: 5436042 - DNA, 25 bp, Homo sapien
gtagaatccattacagtccactcat

SEQ ID NO: 5436043 - DNA, 25 bp, Homo sapien
aggagtagaatccattacagtccac

SEQ ID NO: 5436044 - DNA, 25 bp, Homo sapien
atttctatcatcgactgtgaatgct

SEQ ID NO: 5436045 - DNA, 25 bp, Homo sapien
caagttttagctgcagcaagaccca

SEQ ID NO: 5436046 - DNA, 25 bp, Homo sapien
gaatttctagaaatctggttttgca

SEQ ID NO: 5436047 - DNA, 25 bp, Homo sapien
tctagaaatctggttttgcaagttt

SEQ ID NO: 5436048 - DNA, 25 bp, Homo sapien
atctggttttgcaagttttagctgc

SEQ ID NO: 5436049 - DNA, 25 bp, Homo sapien
tctaggacatctcacggtaatggca

SEQ ID NO: 5436050 - DNA, 25 bp, Homo sapien
ttaagttaccatggctgaggaatcc

SEQ ID NO: 5436051 - DNA, 25 bp, Homo sapien
tattcccagggccatagttgaggca

SEQ ID NO: 5436052 - DNA, 25 bp, Homo sapien
gcagcattgtcgtttctaggacatc

SEQ ID NO: 5436053 - DNA, 25 bp, Homo sapien
tgggagtaacccagtagtagattat

SEQ ID NO: 5436054 - DNA, 25 bp, Homo sapien
ggttctgctctgtgggagtaaccca

SEQ ID NO: 5436055 - DNA, 25 bp, Homo sapien
cagtagtagattattctccgtgact

SEQ ID NO: 5436056 - DNA, 25 bp, Homo sapien
tagtagattattctccgtgactctt

SEQ ID NO: 5436057 - DNA, 25 bp, Homo sapien
tcatttctccatgcttggctctccc

SEQ ID NO: 5436058 - DNA, 25 bp, Homo sapien
catttctccatgcttggctctccct

SEQ ID NO: 5436059 - DNA, 25 bp, Homo sapien
ttctccatgcttggctctccctgaa

SEQ ID NO: 5436060 - DNA, 25 bp, Homo sapien
tccatgcttggctctccctgaaatc

SEQ ID NO: 5436061 - DNA, 25 bp, Homo sapien
cccatggcctgaacaattgcttgaa

SEQ ID NO: 5436062 - DNA, 25 bp, Homo sapien
gattgaatctcctaccaaaaaacaa

SEQ ID NO: 5436063 - DNA, 25 bp, Homo sapien
acttaattgactttacacggttgtg

SEQ ID NO: 5436064 - DNA, 25 bp, Homo sapien
tattgtaagggctaatgacactttg

SEQ ID NO: 5436065 - DNA, 25 bp, Homo sapien
tggacaagtttgaaacatgtttctt

SEQ ID NO: 5436066 - DNA, 25 bp, Homo sapien
aggttggcaaattgtgagtcacttg

SEQ ID NO: 5436067 - DNA, 25 bp, Homo sapien
tgtgagtcacttgtccactgatcat

SEQ ID NO: 5436068 - DNA, 25 bp, Homo sapien
cttggcttgtgttatatatgaaact

SEQ ID NO: 5436069 - DNA, 25 bp, Homo sapien
gaaaattcgagcaggtaactatgtg

SEQ ID NO: 5436070 - DNA, 25 bp, Homo sapien
catgctttcttctgtcagctctaca

SEQ ID NO: 5436071 - DNA, 25 bp, Homo sapien
gtgaatcactggtacgtcaccattc

SEQ ID NO: 5436072 - DNA, 25 bp, Homo sapien
atgctttcttctgtcagctctacag

SEQ ID NO: 5436073 - DNA, 25 bp, Homo sapien
ccagtgaatcactggtacgtcacca

SEQ ID NO: 5436074 - DNA, 25 bp, Homo sapien
acatctgtaaagacattagtaaaaa

SEQ ID NO: 5436075 - DNA, 25 bp, Homo sapien
taaaaatgcctgtgagtttggatat

SEQ ID NO: 5436076 - DNA, 25 bp, Homo sapien
ctggaattccagtataactgtcatc

SEQ ID NO: 5436077 - DNA, 25 bp, Homo sapien
tccagtataactgtcatctttaaca

SEQ ID NO: 5436078 - DNA, 25 bp, Homo sapien
ggaagtgtcagtgttatttaaagtc

SEQ ID NO: 5436079 - DNA, 25 bp, Homo sapien
tttccaaggctctaataccaatgct

SEQ ID NO: 5436080 - DNA, 25 bp, Homo sapien
caatgcttgaccctaaagtttccaa

SEQ ID NO: 5436081 - DNA, 25 bp, Homo sapien
tgatcgttaacttttgacaggccag

SEQ ID NO: 5436082 - DNA, 25 bp, Homo sapien
acatgacaaagatgtgactgaggta

SEQ ID NO: 5436083 - DNA, 25 bp, Homo sapien
gcttcgaacatgacaaagatgtgac

SEQ ID NO: 5436084 - DNA, 25 bp, Homo sapien
catgacaaagatgtgactgaggtac

SEQ ID NO: 5436085 - DNA, 25 bp, Homo sapien
agcagcttcgaacatgacaaagatg

SEQ ID NO: 5436086 - DNA, 25 bp, Homo sapien
tggaattaccgtctgagctggtgtt

SEQ ID NO: 5436087 - DNA, 25 bp, Homo sapien
tcctgtggaattaccgtctgagctg

SEQ ID NO: 5436088 - DNA, 25 bp, Homo sapien
ggtgttgctatcaaacctgcattgc

SEQ ID NO: 5436089 - DNA, 25 bp, Homo sapien
tgcttaccacggtgatatctctctt

SEQ ID NO: 5436090 - DNA, 25 bp, Homo sapien
cttgatgaccacgagcttcccttgg

SEQ ID NO: 5436091 - DNA, 25 bp, Homo sapien
agtgaactgccatgaactgtccttc

SEQ ID NO: 5436092 - DNA, 25 bp, Homo sapien
ccagatgcatgcacaactaccaggg

SEQ ID NO: 5436093 - DNA, 25 bp, Homo sapien
gggagtgaacatagcagccttcaca

SEQ ID NO: 5436094 - DNA, 25 bp, Homo sapien
tcttcttggtactgatgagtaccat

SEQ ID NO: 5436095 - DNA, 25 bp, Homo sapien
tggtgtccttgaggggcctcaatct

SEQ ID NO: 5436096 - DNA, 25 bp, Homo sapien
tcttggtactgatgagtaccattgg

SEQ ID NO: 5436097 - DNA, 25 bp, Homo sapien
ggtactgatgagtaccattggtacc

SEQ ID NO: 5436098 - DNA, 25 bp, Homo sapien
gaattttggatgtgatgtctgaaag

SEQ ID NO: 5436099 - DNA, 25 bp, Homo sapien
ttggatgtgatgtctgaaagtggaa

SEQ ID NO: 5436100 - DNA, 25 bp, Homo sapien
ctctgaattttggatgtgatgtctg

SEQ ID NO: 5436101 - DNA, 25 bp, Homo sapien
tggatgtgatgtctgaaagtggaat

SEQ ID NO: 5436102 - DNA, 25 bp, Homo sapien
cactagtattaggagcagtagggaa

SEQ ID NO: 5436103 - DNA, 25 bp, Homo sapien
cagcaatgagagtggaataataaat

SEQ ID NO: 5436104 - DNA, 25 bp, Homo sapien
taataaattaggattggcccactag

SEQ ID NO: 5436105 - DNA, 25 bp, Homo sapien
tggcccactagtattaggagcagta

SEQ ID NO: 5436106 - DNA, 25 bp, Homo sapien
taagcaacttgaatcccaaattaag

SEQ ID NO: 5436107 - DNA, 25 bp, Homo sapien
cttgaatcccaaattaaggagcttt

SEQ ID NO: 5436108 - DNA, 25 bp, Homo sapien
gatactaagcaacttgaatcccaaa

SEQ ID NO: 5436109 - DNA, 25 bp, Homo sapien
ggaaagatactaagcaacttgaatc

SEQ ID NO: 5436110 - DNA, 25 bp, Homo sapien
cattcaacagttgttcgagaacaga

SEQ ID NO: 5436111 - DNA, 25 bp, Homo sapien
aatgaacatcaatcctccattcaac

SEQ ID NO: 5436112 - DNA, 25 bp, Homo sapien
ggatgttacacaggtattcaaactg

SEQ ID NO: 5436113 - DNA, 25 bp, Homo sapien
tccaacggttttctgtctacatgcc

SEQ ID NO: 5436114 - DNA, 25 bp, Homo sapien
gacacagagtaataaataggctcct

SEQ ID NO: 5436115 - DNA, 25 bp, Homo sapien
gggaggagacacagagtaataaata

SEQ ID NO: 5436116 - DNA, 25 bp, Homo sapien
cagagtaataaataggctccttacc

SEQ ID NO: 5436117 - DNA, 25 bp, Homo sapien
taataaataggctccttaccacatt

SEQ ID NO: 5436118 - DNA, 25 bp, Homo sapien
tcagaagctgggtgaaaaacgttac

SEQ ID NO: 5436119 - DNA, 25 bp, Homo sapien
cattgtacgcactgtcaaagggctg

SEQ ID NO: 5436120 - DNA, 25 bp, Homo sapien
caaagggctgaagcatgaacactgc

SEQ ID NO: 5436121 - DNA, 25 bp, Homo sapien
gaattacacgggatcaaatgccatt

SEQ ID NO: 5436122 - DNA, 25 bp, Homo sapien
caatatcactggtgaacatagatgc

SEQ ID NO: 5436123 - DNA, 25 bp, Homo sapien
tagattatttaatacgatccagtgg

SEQ ID NO: 5436124 - DNA, 25 bp, Homo sapien
gatccagtgggattcattctaggga

SEQ ID NO: 5436125 - DNA, 25 bp, Homo sapien
gaggctaacattgttctgataccaa

SEQ ID NO: 5436126 - DNA, 25 bp, Homo sapien
ccataccttatcacggagatttggc

SEQ ID NO: 5436127 - DNA, 25 bp, Homo sapien
ggtccatcaaagaatcccaaatcct

SEQ ID NO: 5436128 - DNA, 25 bp, Homo sapien
ttatcacggagatttggcatgggta

SEQ ID NO: 5436129 - DNA, 25 bp, Homo sapien
ctcctgggtccatcaaagaatccca

SEQ ID NO: 5436130 - DNA, 25 bp, Homo sapien
tgcctttgacatagaggttttttcc

SEQ ID NO: 5436131 - DNA, 25 bp, Homo sapien
cttgcctttgacatagaggtttttt

SEQ ID NO: 5436132 - DNA, 25 bp, Homo sapien
tacttgcctttgacatagaggtttt

SEQ ID NO: 5436133 - DNA, 25 bp, Homo sapien
ttacttgcctttgacatagaggttt

SEQ ID NO: 5436134 - DNA, 25 bp, Homo sapien
catttttcactattttgaccgtcat

SEQ ID NO: 5436135 - DNA, 25 bp, Homo sapien
ttgccatttttcactattttgaccg

SEQ ID NO: 5436136 - DNA, 25 bp, Homo sapien
ttttgccatttttcactattttgac

SEQ ID NO: 5436137 - DNA, 25 bp, Homo sapien
gccatttttcactattttgaccgtc

SEQ ID NO: 5436138 - DNA, 25 bp, Homo sapien
taaaaatggcttcaacatagcagaa

SEQ ID NO: 5436139 - DNA, 25 bp, Homo sapien
taagtagccaggactgtagcccagt

SEQ ID NO: 5436140 - DNA, 25 bp, Homo sapien
tagcccagtttcatgagaatctcag

SEQ ID NO: 5436141 - DNA, 25 bp, Homo sapien
tcagagacgcaacctcatttgatca

SEQ ID NO: 5436142 - DNA, 25 bp, Homo sapien
caagcatgagatttagacgtttggt

SEQ ID NO: 5436143 - DNA, 25 bp, Homo sapien
aaataagtcctaaaactgtcaagca

SEQ ID NO: 5436144 - DNA, 25 bp, Homo sapien
gaaagtattgtagccccataaaaga

SEQ ID NO: 5436145 - DNA, 25 bp, Homo sapien
tctgtgattaaacctgtttactcat

SEQ ID NO: 5436146 - DNA, 25 bp, Homo sapien
tctgaccaggcccttatctgtactc

SEQ ID NO: 5436147 - DNA, 25 bp, Homo sapien
tagaacgactcatccacacatctga

SEQ ID NO: 5436148 - DNA, 25 bp, Homo sapien
cctgtggatttcttagtttgtgcaa

SEQ ID NO: 5436149 - DNA, 25 bp, Homo sapien
ggcagttagtatgatgacctgtgga

SEQ ID NO: 5436150 - DNA, 25 bp, Homo sapien
acaggactatgtttcattacagaag

SEQ ID NO: 5436151 - DNA, 25 bp, Homo sapien
aaggcaagatgtagttttacacaac

SEQ ID NO: 5436152 - DNA, 25 bp, Homo sapien
tgtacactgcgatttgcattccagt

SEQ ID NO: 5436153 - DNA, 25 bp, Homo sapien
gatgaacttctttaggttttagtga

SEQ ID NO: 5436154 - DNA, 25 bp, Homo sapien
tggatctacccagacctcattggct

SEQ ID NO: 5436155 - DNA, 25 bp, Homo sapien
tcaagagaccgtatatgtgttccat

SEQ ID NO: 5436156 - DNA, 25 bp, Homo sapien
caaaagtaatagactggcagccaca

SEQ ID NO: 5436157 - DNA, 25 bp, Homo sapien
ggaactcatcatttaaccagggact

SEQ ID NO: 5436158 - DNA, 25 bp, Homo sapien
acttctttgctatccccaatgcaga

SEQ ID NO: 5436159 - DNA, 25 bp, Homo sapien
cacttctttgctatccccaatgcag

SEQ ID NO: 5436160 - DNA, 25 bp, Homo sapien
cttctttgctatccccaatgcagag

SEQ ID NO: 5436161 - DNA, 25 bp, Homo sapien
tctttgctatccccaatgcagagca

SEQ ID NO: 5436162 - DNA, 25 bp, Homo sapien
taattttgacatattctggtaatag

SEQ ID NO: 5436163 - DNA, 25 bp, Homo sapien
tggtaatagatgaatgtcttcagac

SEQ ID NO: 5436164 - DNA, 25 bp, Homo sapien
tttgacatattctggtaatagatga

SEQ ID NO: 5436165 - DNA, 25 bp, Homo sapien
aatagatgaatgtcttcagacagca

SEQ ID NO: 5436166 - DNA, 25 bp, Homo sapien
agagttgtctgggacttgcattcca

SEQ ID NO: 5436167 - DNA, 25 bp, Homo sapien
cacagcataggcagtaccaggtaaa

SEQ ID NO: 5436168 - DNA, 25 bp, Homo sapien
cctcaaggttgctcactgggaattc

SEQ ID NO: 5436169 - DNA, 25 bp, Homo sapien
gaagaagacaaaaggctccaagttc

SEQ ID NO: 5436170 - DNA, 25 bp, Homo sapien
taatggttaccatgagactgacata

SEQ ID NO: 5436171 - DNA, 25 bp, Homo sapien
cataaacatgagagttacaagaggc

SEQ ID NO: 5436172 - DNA, 25 bp, Homo sapien
ttctttagtggtgtgctataattgc

SEQ ID NO: 5436173 - DNA, 25 bp, Homo sapien
tacaagaggcttcataaagttgact

SEQ ID NO: 5436174 - DNA, 25 bp, Homo sapien
cccggcctgtattatgtgtatctta

SEQ ID NO: 5436175 - DNA, 25 bp, Homo sapien
ccggcctgtattatgtgtatcttaa

SEQ ID NO: 5436176 - DNA, 25 bp, Homo sapien
cggcctgtattatgtgtatcttaat

SEQ ID NO: 5436177 - DNA, 25 bp, Homo sapien
cttaatacattattgtaggtattat

SEQ ID NO: 5436178 - DNA, 25 bp, Homo sapien
ccttcaaatctctcttctacattag

SEQ ID NO: 5436179 - DNA, 25 bp, Homo sapien
cattgtcgttatgactagattcacc

SEQ ID NO: 5436180 - DNA, 25 bp, Homo sapien
ttctctctggtcattgtcgttatga

SEQ ID NO: 5436181 - DNA, 25 bp, Homo sapien
ccacagtgtaaatctttagtttgag

SEQ ID NO: 5436182 - DNA, 25 bp, Homo sapien
tctacaggaagtacataaagcatgg

SEQ ID NO: 5436183 - DNA, 25 bp, Homo sapien
aaaatactacatgctttcaaacaac

SEQ ID NO: 5436184 - DNA, 25 bp, Homo sapien
aatactacatgctttcaaacaacca

SEQ ID NO: 5436185 - DNA, 25 bp, Homo sapien
cagttctacaggaagtacataaagc

SEQ ID NO: 5436186 - DNA, 25 bp, Homo sapien
gattctcattatagtagtgccccac

SEQ ID NO: 5436187 - DNA, 25 bp, Homo sapien
cacagttttgcatggtgtgccggag

SEQ ID NO: 5436188 - DNA, 25 bp, Homo sapien
gagagaatggggacatgttacacat

SEQ ID NO: 5436189 - DNA, 25 bp, Homo sapien
gtccatattgctacccgcatttttg

SEQ ID NO: 5436190 - DNA, 25 bp, Homo sapien
attcatggcaaagaatctcagggtt

SEQ ID NO: 5436191 - DNA, 25 bp, Homo sapien
gtttccgcataatgttgccactata

SEQ ID NO: 5436192 - DNA, 25 bp, Homo sapien
tttactaaaatgtttccgcataatg

SEQ ID NO: 5436193 - DNA, 25 bp, Homo sapien
ttcatggcaaagaatctcagggttt

SEQ ID NO: 5436194 - DNA, 25 bp, Homo sapien
catcatactcgcatatactttatga

SEQ ID NO: 5436195 - DNA, 25 bp, Homo sapien
tatgacggccaggattaatcaccat

SEQ ID NO: 5436196 - DNA, 25 bp, Homo sapien
tactcgcatatactttatgacggcc

SEQ ID NO: 5436197 - DNA, 25 bp, Homo sapien
tatactttatgacggccaggattaa

SEQ ID NO: 5436198 - DNA, 25 bp, Homo sapien
cttttcaattggatgtgcctaattt

SEQ ID NO: 5436199 - DNA, 25 bp, Homo sapien
tgtcttctgtaatggtatatacttt

SEQ ID NO: 5436200 - DNA, 25 bp, Homo sapien
cttgttgtcttctgtaatggtatat

SEQ ID NO: 5436201 - DNA, 25 bp, Homo sapien
aagtatttatgtctaagcttttcaa

SEQ ID NO: 5436202 - DNA, 25 bp, Homo sapien
taaaaaatccactgaagcgtaccag

SEQ ID NO: 5436203 - DNA, 25 bp, Homo sapien
tggcaaactctaaaaaatccactga

SEQ ID NO: 5436204 - DNA, 25 bp, Homo sapien
ctgaagcgtaccaggatattctcca

SEQ ID NO: 5436205 - DNA, 25 bp, Homo sapien
aggatattctccatactgaagagac

SEQ ID NO: 5436206 - DNA, 25 bp, Homo sapien
gttccgcagtctggcaaatcttttt

SEQ ID NO: 5436207 - DNA, 25 bp, Homo sapien
agttccgcagtctggcaaatctttt

SEQ ID NO: 5436208 - DNA, 25 bp, Homo sapien
cagttccgcagtctggcaaatcttt

SEQ ID NO: 5436209 - DNA, 25 bp, Homo sapien
taatgtgttcaatgatgacactgaa

SEQ ID NO: 5436210 - DNA, 25 bp, Homo sapien
aatgtgttcaatgatgacactgaaa

SEQ ID NO: 5436211 - DNA, 25 bp, Homo sapien
gtaatgtgttcaatgatgacactga

SEQ ID NO: 5436212 - DNA, 25 bp, Homo sapien
gaaaagcctgatagccttgattgaa

SEQ ID NO: 5436213 - DNA, 25 bp, Homo sapien
atttaccagggcgaaaagcctgata

SEQ ID NO: 5436214 - DNA, 25 bp, Homo sapien
gggcgaaaagcctgatagccttgat

SEQ ID NO: 5436215 - DNA, 25 bp, Homo sapien
tgatagccttgattgaatgatttgc

SEQ ID NO: 5436216 - DNA, 25 bp, Homo sapien
ctccatgctggaaatcaaagatgtg

SEQ ID NO: 5436217 - DNA, 25 bp, Homo sapien
gaagcaggtgttccttatgaactcc

SEQ ID NO: 5436218 - DNA, 25 bp, Homo sapien
gaagaacataacaccttgaagaagc

SEQ ID NO: 5436219 - DNA, 25 bp, Homo sapien
tgagtgtcggtttcactgtcttctg

SEQ ID NO: 5436220 - DNA, 25 bp, Homo sapien
catctataccaatatattcagcctt

SEQ ID NO: 5436221 - DNA, 25 bp, Homo sapien
tataccaatatattcagccttgcct

SEQ ID NO: 5436222 - DNA, 25 bp, Homo sapien
tggtcaggatgttcaccttctgatt

SEQ ID NO: 5436223 - DNA, 25 bp, Homo sapien
ggtcaggatgttcaccttctgattc

SEQ ID NO: 5436224 - DNA, 25 bp, Homo sapien
gcatcagccctaagataccatacag

SEQ ID NO: 5436225 - DNA, 25 bp, Homo sapien
tggtatccagtgaactgacccacat

SEQ ID NO: 5436226 - DNA, 25 bp, Homo sapien
tagagttgttgatcccctacaccct

SEQ ID NO: 5436227 - DNA, 25 bp, Homo sapien
tcacttgccaaggaactcggatcag

SEQ ID NO: 5436228 - DNA, 25 bp, Homo sapien
acgatgacgctctcgtattccctca

SEQ ID NO: 5436229 - DNA, 25 bp, Homo sapien
atcagccattgcagctcggccgcat

SEQ ID NO: 5436230 - DNA, 25 bp, Homo sapien
gcatggcgcatgtgcatcacgatga

SEQ ID NO: 5436231 - DNA, 25 bp, Homo sapien
ctggtgcatgtctgagatcagccat

SEQ ID NO: 5436232 - DNA, 25 bp, Homo sapien
aatcttcagagggttatccaccagg

SEQ ID NO: 5436233 - DNA, 25 bp, Homo sapien
tggggctgtccctccaaccaggaaa

SEQ ID NO: 5436234 - DNA, 25 bp, Homo sapien
gcaccaggttgagaacctcaccata

SEQ ID NO: 5436235 - DNA, 25 bp, Homo sapien
agcaccaggttgagaacctcaccat

SEQ ID NO: 5436236 - DNA, 25 bp, Homo sapien
ccgagccttcttgcgcttccatttt

SEQ ID NO: 5436237 - DNA, 25 bp, Homo sapien
cgagccttcttgcgcttccatttta

SEQ ID NO: 5436238 - DNA, 25 bp, Homo sapien
ccccgagccttcttgcgcttccatt

SEQ ID NO: 5436239 - DNA, 25 bp, Homo sapien
ccccccgagccttcttgcgcttcca

SEQ ID NO: 5436240 - DNA, 25 bp, Homo sapien
ttgatctctcgctctagtgtcctgg

SEQ ID NO: 5436241 - DNA, 25 bp, Homo sapien
tgtatctgctcccagatcagcctct

SEQ ID NO: 5436242 - DNA, 25 bp, Homo sapien
tcactcaggcgtttgatctctcgct

SEQ ID NO: 5436243 - DNA, 25 bp, Homo sapien
tggtgtatctgctcccagatcagcc

SEQ ID NO: 5436244 - DNA, 25 bp, Homo sapien
tcccgcttccgggcctccagatcaa

SEQ ID NO: 5436245 - DNA, 25 bp, Homo sapien
tgccgctcccgcttccgggcctcca

SEQ ID NO: 5436246 - DNA, 25 bp, Homo sapien
tggtgctgccgctcccgcttccggg

SEQ ID NO: 5436247 - DNA, 25 bp, Homo sapien
gcttccgggcctccagatcaagctt

SEQ ID NO: 5436248 - DNA, 25 bp, Homo sapien
tttttcatctagtttctgagtcctc

SEQ ID NO: 5436249 - DNA, 25 bp, Homo sapien
cttttttcatctagtttctgagtcc

SEQ ID NO: 5436250 - DNA, 25 bp, Homo sapien
tattccttttttcatctagtttctg

SEQ ID NO: 5436251 - DNA, 25 bp, Homo sapien
ttcatctagtttctgagtcctctct

SEQ ID NO: 5436252 - DNA, 25 bp, Homo sapien
gcagccccggctgcagcatcggtca

SEQ ID NO: 5436253 - DNA, 25 bp, Homo sapien
cttgtcatacgcagccccggctgca

SEQ ID NO: 5436254 - DNA, 25 bp, Homo sapien
ttgtcatacgcagccccggctgcag

SEQ ID NO: 5436255 - DNA, 25 bp, Homo sapien
ccccggctgcagcatcggtcagcac

SEQ ID NO: 5436256 - DNA, 25 bp, Homo sapien
ggaggaggccttctgcctatatgcc

SEQ ID NO: 5436257 - DNA, 25 bp, Homo sapien
tcagggtagcaggaggaggccttct

SEQ ID NO: 5436258 - DNA, 25 bp, Homo sapien
ttcagggtagcaggaggaggccttc

SEQ ID NO: 5436259 - DNA, 25 bp, Homo sapien
ctctttgtctgccaccttctcctca

SEQ ID NO: 5436260 - DNA, 25 bp, Homo sapien
tgccaccttctcctcaatgtctagc

SEQ ID NO: 5436261 - DNA, 25 bp, Homo sapien
cttctcctcaatgtctagcagcgcg

SEQ ID NO: 5436262 - DNA, 25 bp, Homo sapien
ctcctcaatgtctagcagcgcgtac

SEQ ID NO: 5436263 - DNA, 25 bp, Homo sapien
ctgtaagatcttgctccttggtcac

SEQ ID NO: 5436264 - DNA, 25 bp, Homo sapien
agatcttgctccttggtcactgcca

SEQ ID NO: 5436265 - DNA, 25 bp, Homo sapien
taagatcttgctccttggtcactgc

SEQ ID NO: 5436266 - DNA, 25 bp, Homo sapien
gatcttgctccttggtcactgccat

SEQ ID NO: 5436267 - DNA, 25 bp, Homo sapien
tttatttagattcgagtgcatgtga

SEQ ID NO: 5436268 - DNA, 25 bp, Homo sapien
catagagtgtctgccattagaatga

SEQ ID NO: 5436269 - DNA, 25 bp, Homo sapien
ggatcagcgttagtccgacacactt

SEQ ID NO: 5436270 - DNA, 25 bp, Homo sapien
taacatctgttaggtggatcagcgt

SEQ ID NO: 5436271 - DNA, 25 bp, Homo sapien
tccttgtggactttatgtttgtttg

SEQ ID NO: 5436272 - DNA, 25 bp, Homo sapien
tgtttgacaaaacgataaacctcat

SEQ ID NO: 5436273 - DNA, 25 bp, Homo sapien
tctccttgtggactttatgtttgtt

SEQ ID NO: 5436274 - DNA, 25 bp, Homo sapien
tttatgtttgtttgacaaaacgata

SEQ ID NO: 5436275 - DNA, 25 bp, Homo sapien
gcattttcctatataaatagctgct

SEQ ID NO: 5436276 - DNA, 25 bp, Homo sapien
tggttctgaggcttccaaaggagcc

SEQ ID NO: 5436277 - DNA, 25 bp, Homo sapien
caaaggagcctaaaattgtcacact

SEQ ID NO: 5436278 - DNA, 25 bp, Homo sapien
cagggacacaatgaggttcaattaa

SEQ ID NO: 5436279 - DNA, 25 bp, Homo sapien
tgtgtgctggttgcattctggaaaa

SEQ ID NO: 5436280 - DNA, 25 bp, Homo sapien
tcaagtaattcctcgttatgggtat

SEQ ID NO: 5436281 - DNA, 25 bp, Homo sapien
tactattacacaactaaggagagtg

SEQ ID NO: 5436282 - DNA, 25 bp, Homo sapien
ataaactaagaaaatgacgaggccg

SEQ ID NO: 5436283 - DNA, 25 bp, Homo sapien
tgataaggccataaaaatatcccct

SEQ ID NO: 5436284 - DNA, 25 bp, Homo sapien
caatggtatcgagttctggaggtcc

SEQ ID NO: 5436285 - DNA, 25 bp, Homo sapien
tctgcagctcttgataaggccataa

SEQ ID NO: 5436286 - DNA, 25 bp, Homo sapien
atgacgacaactttcaacacaatgg

SEQ ID NO: 5436287 - DNA, 25 bp, Homo sapien
gatatcacattccaacacttttctc

SEQ ID NO: 5436288 - DNA, 25 bp, Homo sapien
ctcagggtctgactcaaaagacacc

SEQ ID NO: 5436289 - DNA, 25 bp, Homo sapien
aagacacctcatgcgtgaagcccac

SEQ ID NO: 5436290 - DNA, 25 bp, Homo sapien
gatgtggcactggatatcacattcc

SEQ ID NO: 5436291 - DNA, 25 bp, Homo sapien
ctggaatgataactgccaatggcat

SEQ ID NO: 5436292 - DNA, 25 bp, Homo sapien
actggaatgataactgccaatggca

SEQ ID NO: 5436293 - DNA, 25 bp, Homo sapien
gcttcaatgtagtagtggatttcga

SEQ ID NO: 5436294 - DNA, 25 bp, Homo sapien
agtggatttcgattggtctgtgaga

SEQ ID NO: 5436295 - DNA, 25 bp, Homo sapien
ctcagcaaggagcttcaatgtagta

SEQ ID NO: 5436296 - DNA, 25 bp, Homo sapien
ttggtctgtgagagacggtatcacc

SEQ ID NO: 5436297 - DNA, 25 bp, Homo sapien
ttacttgcgattggagacactcagg

SEQ ID NO: 5436298 - DNA, 25 bp, Homo sapien
tacttgcgattggagacactcagga

SEQ ID NO: 5436299 - DNA, 25 bp, Homo sapien
cactattaccttttcagcatatgaa

SEQ ID NO: 5436300 - DNA, 25 bp, Homo sapien
gttctttcttactacttgtatgagc

SEQ ID NO: 5436301 - DNA, 25 bp, Homo sapien
tgtatgagcttgctgatgcataggt

SEQ ID NO: 5436302 - DNA, 25 bp, Homo sapien
tatgaaatataggtaatgaaaagca

SEQ ID NO: 5436303 - DNA, 25 bp, Homo sapien
ctctcacatcacaagatattgtcac

SEQ ID NO: 5436304 - DNA, 25 bp, Homo sapien
cctctcacatcacaagatattgtca

SEQ ID NO: 5436305 - DNA, 25 bp, Homo sapien
aagatacagattttccagtggagcc

SEQ ID NO: 5436306 - DNA, 25 bp, Homo sapien
catcggtagaagagttggacattca

SEQ ID NO: 5436307 - DNA, 25 bp, Homo sapien
cagtggagccaaaatccccgaagtg

SEQ ID NO: 5436308 - DNA, 25 bp, Homo sapien
tacttgatttttacatcggtagaag

SEQ ID NO: 5436309 - DNA, 25 bp, Homo sapien
aactcaaggatacctaaaatgggca

SEQ ID NO: 5436310 - DNA, 25 bp, Homo sapien
gtttatgtgattcgccagcatacag

SEQ ID NO: 5436311 - DNA, 25 bp, Homo sapien
aaaatgggcagtttatgtgattcgc

SEQ ID NO: 5436312 - DNA, 25 bp, Homo sapien
cactccttaaactcaaggataccta

SEQ ID NO: 5436313 - DNA, 25 bp, Homo sapien
ctgcactttgctctcggtatgctgc

SEQ ID NO: 5436314 - DNA, 25 bp, Homo sapien
tgcactttgctctcggtatgctgca

SEQ ID NO: 5436315 - DNA, 25 bp, Homo sapien
tctgcactttgctctcggtatgctg

SEQ ID NO: 5436316 - DNA, 25 bp, Homo sapien
gcactttgctctcggtatgctgcat

SEQ ID NO: 5436317 - DNA, 25 bp, Homo sapien
atttctttactagcacttttgtatc

SEQ ID NO: 5436318 - DNA, 25 bp, Homo sapien
ttctttactagcacttttgtatcct

SEQ ID NO: 5436319 - DNA, 25 bp, Homo sapien
tctttactagcacttttgtatcctc

SEQ ID NO: 5436320 - DNA, 25 bp, Homo sapien
tttctttactagcacttttgtatcc

SEQ ID NO: 5436321 - DNA, 25 bp, Homo sapien
cagagtccacttattgccttgggcc

SEQ ID NO: 5436322 - DNA, 25 bp, Homo sapien
gagaagagtcataaccagtcagagt

SEQ ID NO: 5436323 - DNA, 25 bp, Homo sapien
cgatagggccaaatgcaaacttgca

SEQ ID NO: 5436324 - DNA, 25 bp, Homo sapien
tgggtttctgccacattatggataa

SEQ ID NO: 5436325 - DNA, 25 bp, Homo sapien
ttttgaatccacatactaggcatgg

SEQ ID NO: 5436326 - DNA, 25 bp, Homo sapien
tttgggtatggacatggtgaccacc

SEQ ID NO: 5436327 - DNA, 25 bp, Homo sapien
tgttgtacagcattaaggccactct

SEQ ID NO: 5436328 - DNA, 25 bp, Homo sapien
ttagaaaagataccgattcagctgg

SEQ ID NO: 5436329 - DNA, 25 bp, Homo sapien
gtctctgcgggcagttgttcctgga

SEQ ID NO: 5436330 - DNA, 25 bp, Homo sapien
cagttgttcctggaagaccaactct

SEQ ID NO: 5436331 - DNA, 25 bp, Homo sapien
aaggtctctgcgggcagttgttcct

SEQ ID NO: 5436332 - DNA, 25 bp, Homo sapien
agttgttcctggaagaccaactctc

SEQ ID NO: 5436333 - DNA, 25 bp, Homo sapien
ggttgtcggttgagcttgcacctgt

SEQ ID NO: 5436334 - DNA, 25 bp, Homo sapien
cttgcacctgtagtcagctggtagt

SEQ ID NO: 5436335 - DNA, 25 bp, Homo sapien
ttggttgtcggttgagcttgcacct

SEQ ID NO: 5436336 - DNA, 25 bp, Homo sapien
tagtcagctggtagtctatggtcat

SEQ ID NO: 5436337 - DNA, 25 bp, Homo sapien
tgatggaagtaactgggctgctcat

SEQ ID NO: 5436338 - DNA, 25 bp, Homo sapien
tccatatatatagtggtcagcttgg

SEQ ID NO: 5436339 - DNA, 25 bp, Homo sapien
aaaagcttgatggaagtaactgggc

SEQ ID NO: 5436340 - DNA, 25 bp, Homo sapien
agtggtcagcttggttcttgaaaag

SEQ ID NO: 5436341 - DNA, 25 bp, Homo sapien
gagacatgaatcaataacacttctt

SEQ ID NO: 5436342 - DNA, 25 bp, Homo sapien
cccagatggctctaagacagtaaaa

SEQ ID NO: 5436343 - DNA, 25 bp, Homo sapien
gaaccaactcccgtagagctgtctg

SEQ ID NO: 5436344 - DNA, 25 bp, Homo sapien
ctgcttcacctgagacatgaatcaa

SEQ ID NO: 5436345 - DNA, 25 bp, Homo sapien
tttgtaaatttgatctggtggcatg

SEQ ID NO: 5436346 - DNA, 25 bp, Homo sapien
taaatttgatctggtggcatgtatt

SEQ ID NO: 5436347 - DNA, 25 bp, Homo sapien
ttctttgtaaatttgatctggtggc

SEQ ID NO: 5436348 - DNA, 25 bp, Homo sapien
tgtaaatttgatctggtggcatgta

SEQ ID NO: 5436349 - DNA, 25 bp, Homo sapien
cacttctaggtgtagggccttgatc

SEQ ID NO: 5436350 - DNA, 25 bp, Homo sapien
gaaacccaagctatattgagactcc

SEQ ID NO: 5436351 - DNA, 25 bp, Homo sapien
tccatatggattagagatgaagcac

SEQ ID NO: 5436352 - DNA, 25 bp, Homo sapien
tagaaaggcctctgtactcagacca

SEQ ID NO: 5436353 - DNA, 25 bp, Homo sapien
tgttttcaaaggtagtcccaatgga

SEQ ID NO: 5436354 - DNA, 25 bp, Homo sapien
taattatggaggaagctataccaac

SEQ ID NO: 5436355 - DNA, 25 bp, Homo sapien
tcatcaggtagaagcagtggtgctc

SEQ ID NO: 5436356 - DNA, 25 bp, Homo sapien
tacttgtgtggccaagactttctgg

SEQ ID NO: 5436357 - DNA, 25 bp, Homo sapien
tgtgcctttcccagtttgagcttgt

SEQ ID NO: 5436358 - DNA, 25 bp, Homo sapien
ggttttatgaaggacactaagcgca

SEQ ID NO: 5436359 - DNA, 25 bp, Homo sapien
catttgtaatgttgtaccatgtgcc

SEQ ID NO: 5436360 - DNA, 25 bp, Homo sapien
tttcccatttgctcactgacaggtt

SEQ ID NO: 5436361 - DNA, 25 bp, Homo sapien
agcaaaggtgaaggttattttatga

SEQ ID NO: 5436362 - DNA, 25 bp, Homo sapien
cagcaaaggtgaaggttattttatg

SEQ ID NO: 5436363 - DNA, 25 bp, Homo sapien
tccacattctgaaatcgaccttgtg

SEQ ID NO: 5436364 - DNA, 25 bp, Homo sapien
tctctccacattctgaaatcgacct

SEQ ID NO: 5436365 - DNA, 25 bp, Homo sapien
tctccacattctgaaatcgaccttg

SEQ ID NO: 5436366 - DNA, 25 bp, Homo sapien
cattctgaaatcgaccttgtgattt

SEQ ID NO: 5436367 - DNA, 25 bp, Homo sapien
caattgaagtgtatgactgagcaga

SEQ ID NO: 5436368 - DNA, 25 bp, Homo sapien
gaagctatagtaatgaaagccctac

SEQ ID NO: 5436369 - DNA, 25 bp, Homo sapien
caaatataggacaattctttgccat

SEQ ID NO: 5436370 - DNA, 25 bp, Homo sapien
gcagaagaatccaagaacttaggag

SEQ ID NO: 5436371 - DNA, 25 bp, Homo sapien
ctcagaggagtctgcatcacactct

SEQ ID NO: 5436372 - DNA, 25 bp, Homo sapien
cacactctaacatagtcactggact

SEQ ID NO: 5436373 - DNA, 25 bp, Homo sapien
tcagaggagtctgcatcacactcta

SEQ ID NO: 5436374 - DNA, 25 bp, Homo sapien
actggactcccatatttcccatcta

SEQ ID NO: 5436375 - DNA, 25 bp, Homo sapien
ttcaatagcaaggtcaccatcagag

SEQ ID NO: 5436376 - DNA, 25 bp, Homo sapien
cttgttggcagaaaagacgtttgga

SEQ ID NO: 5436377 - DNA, 25 bp, Homo sapien
tcgagagggacagaagatttcaata

SEQ ID NO: 5436378 - DNA, 25 bp, Homo sapien
gacgtttggaattcttacagctggt

SEQ ID NO: 5436379 - DNA, 25 bp, Homo sapien
taatgacagaacaggcccatgtctc

SEQ ID NO: 5436380 - DNA, 25 bp, Homo sapien
gcccatgtctcagcgtttcagccat

SEQ ID NO: 5436381 - DNA, 25 bp, Homo sapien
ggcccatgtctcagcgtttcagcca

SEQ ID NO: 5436382 - DNA, 25 bp, Homo sapien
cttggataatgacagaacaggccca

SEQ ID NO: 5436383 - DNA, 25 bp, Homo sapien
ccaaaggctcaaatgttcgttagca

SEQ ID NO: 5436384 - DNA, 25 bp, Homo sapien
tggtaacaaggtaagatcatccacc

SEQ ID NO: 5436385 - DNA, 25 bp, Homo sapien
gtaagagttggttacacatccatgg

SEQ ID NO: 5436386 - DNA, 25 bp, Homo sapien
tgtatgtaccaagcatgcacaaact

SEQ ID NO: 5436387 - DNA, 25 bp, Homo sapien
aatggttgatggagatgttgactca

SEQ ID NO: 5436388 - DNA, 25 bp, Homo sapien
catggtgttgaagttgatgtggaaa

SEQ ID NO: 5436389 - DNA, 25 bp, Homo sapien
tcctttaccaagtgttaattcagca

SEQ ID NO: 5436390 - DNA, 25 bp, Homo sapien
caatttgtgactatcaagaacatgt

SEQ ID NO: 5436391 - DNA, 25 bp, Homo sapien
tctgtccctctggtagagaaatcaa

SEQ ID NO: 5436392 - DNA, 25 bp, Homo sapien
ggcaccatttgcgaaaaatctgtcc

SEQ ID NO: 5436393 - DNA, 25 bp, Homo sapien
tttgcgaaaaatctgtccctctggt

SEQ ID NO: 5436394 - DNA, 25 bp, Homo sapien
gaagcacaggcaccatttgcgaaaa

SEQ ID NO: 5436395 - DNA, 25 bp, Homo sapien
ttcatggaattcagttaggaaccag

SEQ ID NO: 5436396 - DNA, 25 bp, Homo sapien
catggaattcagttaggaaccagac

SEQ ID NO: 5436397 - DNA, 25 bp, Homo sapien
tcatggaattcagttaggaaccaga

SEQ ID NO: 5436398 - DNA, 25 bp, Homo sapien
caggcccctcttggaatcataggca

SEQ ID NO: 5436399 - DNA, 25 bp, Homo sapien
ggcctcctcaatgtacttcacacct

SEQ ID NO: 5436400 - DNA, 25 bp, Homo sapien
ccctcttggaatcataggcacggat

SEQ ID NO: 5436401 - DNA, 25 bp, Homo sapien
tcctcaatgtacttcacacctttct

SEQ ID NO: 5436402 - DNA, 25 bp, Homo sapien
tgggatgaaaggttgctgctatcac

SEQ ID NO: 5436403 - DNA, 25 bp, Homo sapien
gggcttgggatgaaaggttgctgct

SEQ ID NO: 5436404 - DNA, 25 bp, Homo sapien
cttgggatgaaaggttgctgctatc

SEQ ID NO: 5436405 - DNA, 25 bp, Homo sapien
ggatgaaaggttgctgctatcactc

SEQ ID NO: 5436406 - DNA, 25 bp, Homo sapien
acagcaccgtgatatggaccccgtg

SEQ ID NO: 5436407 - DNA, 25 bp, Homo sapien
caattggaaggccaaccgaagggct

SEQ ID NO: 5436408 - DNA, 25 bp, Homo sapien
tacaagcaggcttggtaatcagcct

SEQ ID NO: 5436409 - DNA, 25 bp, Homo sapien
tataggctttgtctgctcccacagc

SEQ ID NO: 5436410 - DNA, 25 bp, Homo sapien
ctgtaaagtaccagagctatcaaaa

SEQ ID NO: 5436411 - DNA, 25 bp, Homo sapien
aattatccagatacacatggcctga

SEQ ID NO: 5436412 - DNA, 25 bp, Homo sapien
ttctcaccctgaggcagagacatgt

SEQ ID NO: 5436413 - DNA, 25 bp, Homo sapien
caccctgaggcagagacatgtacac

SEQ ID NO: 5436414 - DNA, 25 bp, Homo sapien
cttctcaccctgaggcagagacatg

SEQ ID NO: 5436415 - DNA, 25 bp, Homo sapien
ctcaccctgaggcagagacatgtac

SEQ ID NO: 5436416 - DNA, 25 bp, Homo sapien
gatgcttttgttaaagcaggaactt

SEQ ID NO: 5436417 - DNA, 25 bp, Homo sapien
tgatgcttttgttaaagcaggaact

SEQ ID NO: 5436418 - DNA, 25 bp, Homo sapien
atgcttttgttaaagcaggaacttg

SEQ ID NO: 5436419 - DNA, 25 bp, Homo sapien
tcagagtctcctaaatagcccgaac

SEQ ID NO: 5436420 - DNA, 25 bp, Homo sapien
gggctttggttttgtcacacatgcc

SEQ ID NO: 5436421 - DNA, 25 bp, Homo sapien
ggaacgctcacggactgtgcggtaa

SEQ ID NO: 5436422 - DNA, 25 bp, Homo sapien
ccaagcgctccaggggctttggttt

SEQ ID NO: 5436423 - DNA, 25 bp, Homo sapien
aacaactgatgagagcctgaagagc

SEQ ID NO: 5436424 - DNA, 25 bp, Homo sapien
cagagaactccataagtgttctgta

SEQ ID NO: 5436425 - DNA, 25 bp, Homo sapien
gttagtcacaaggttatctatagaa

SEQ ID NO: 5436426 - DNA, 25 bp, Homo sapien
gagggttgtagtcttgttagtcaca

SEQ ID NO: 5436427 - DNA, 25 bp, Homo sapien
taatactgggcacctctatgaggct

SEQ ID NO: 5436428 - DNA, 25 bp, Homo sapien
acctctatgaggctcagaattactg

SEQ ID NO: 5436429 - DNA, 25 bp, Homo sapien
gccaataaggcctctgatacttgtg

SEQ ID NO: 5436430 - DNA, 25 bp, Homo sapien
tagagttaatgctctctcctagctt

SEQ ID NO: 5436431 - DNA, 25 bp, Homo sapien
tgtctaagacagccaataaggcctc

SEQ ID NO: 5436432 - DNA, 25 bp, Homo sapien
tgatacttgtgtagagttaatgctc

SEQ ID NO: 5436433 - DNA, 25 bp, Homo sapien
ttctggaacaatgccaaaatccgca

SEQ ID NO: 5436434 - DNA, 25 bp, Homo sapien
aatgtagtgctacaggttccttctg

SEQ ID NO: 5436435 - DNA, 25 bp, Homo sapien
gctttgcgcttactggaaatgtagt

SEQ ID NO: 5436436 - DNA, 25 bp, Homo sapien
tctgtggtctacagatggttgtggc

SEQ ID NO: 5436437 - DNA, 25 bp, Homo sapien
tctacaagagacataaacttataag

SEQ ID NO: 5436438 - DNA, 25 bp, Homo sapien
tataagtcatctctaatttcagttc

SEQ ID NO: 5436439 - DNA, 25 bp, Homo sapien
gacataaacttataagtcatctcta

SEQ ID NO: 5436440 - DNA, 25 bp, Homo sapien
acttataagtcatctctaatttcag

SEQ ID NO: 5436441 - DNA, 25 bp, Homo sapien
tttctttgaccatttcatagatcat

SEQ ID NO: 5436442 - DNA, 25 bp, Homo sapien
aagggaatttctttgaccatttcat

SEQ ID NO: 5436443 - DNA, 25 bp, Homo sapien
ggaatttctttgaccatttcataga

SEQ ID NO: 5436444 - DNA, 25 bp, Homo sapien
atgacaaaataaagaggtataaagg

SEQ ID NO: 5436445 - DNA, 25 bp, Homo sapien
cttttacattacagcctttcagttc

SEQ ID NO: 5436446 - DNA, 25 bp, Homo sapien
cattacagcctttcagttctcgcat

SEQ ID NO: 5436447 - DNA, 25 bp, Homo sapien
ttacattacagcctttcagttctcg

SEQ ID NO: 5436448 - DNA, 25 bp, Homo sapien
tacattacagcctttcagttctcgc

SEQ ID NO: 5436449 - DNA, 25 bp, Homo sapien
tcatcatcatcactactgccccaca

SEQ ID NO: 5436450 - DNA, 25 bp, Homo sapien
atcatcatcactactgccccacatc

SEQ ID NO: 5436451 - DNA, 25 bp, Homo sapien
atcatcactactgccccacatcagt

SEQ ID NO: 5436452 - DNA, 25 bp, Homo sapien
ctaggctttgctctcttcttcatca

SEQ ID NO: 5436453 - DNA, 25 bp, Homo sapien
aaaattacatcacatcccctcttct

SEQ ID NO: 5436454 - DNA, 25 bp, Homo sapien
tcttctgtaacttctccccaatcaa

SEQ ID NO: 5436455 - DNA, 25 bp, Homo sapien
tccccaatcaaagcagatacaatag

SEQ ID NO: 5436456 - DNA, 25 bp, Homo sapien
tgtagtattataaactcgtaaatgc

SEQ ID NO: 5436457 - DNA, 25 bp, Homo sapien
ctgttccaccagtttgcagtcagtg

SEQ ID NO: 5436458 - DNA, 25 bp, Homo sapien
tataatctgttccaccagtttgcag

SEQ ID NO: 5436459 - DNA, 25 bp, Homo sapien
cttggaagggcccttataatctgtt

SEQ ID NO: 5436460 - DNA, 25 bp, Homo sapien
gggcccttataatctgttccaccag

SEQ ID NO: 5436461 - DNA, 25 bp, Homo sapien
actgtcaagattcatttggctgtgc

SEQ ID NO: 5436462 - DNA, 25 bp, Homo sapien
cccttttgttatcagctgagctcac

SEQ ID NO: 5436463 - DNA, 25 bp, Homo sapien
atttcttatgcttgtggtagtcttc

SEQ ID NO: 5436464 - DNA, 25 bp, Homo sapien
ttcttatgcttgtggtagtcttccc

SEQ ID NO: 5436465 - DNA, 25 bp, Homo sapien
ggtagtcttcccttttgttatcagc

SEQ ID NO: 5436466 - DNA, 25 bp, Homo sapien
ctctcgatactctgtcacagcacag

SEQ ID NO: 5436467 - DNA, 25 bp, Homo sapien
ccttcttctcaaaagatggtgtatt

SEQ ID NO: 5436468 - DNA, 25 bp, Homo sapien
gaatttctctcgatactctgtcaca

SEQ ID NO: 5436469 - DNA, 25 bp, Homo sapien
ctctgaatttctctcgatactctgt

SEQ ID NO: 5436470 - DNA, 25 bp, Homo sapien
gaaattggtcatgttaccatcttca

SEQ ID NO: 5436471 - DNA, 25 bp, Homo sapien
gattatacggttcttgaaattggtc

SEQ ID NO: 5436472 - DNA, 25 bp, Homo sapien
tgctcaatgtcacaccaggtcctct

SEQ ID NO: 5436473 - DNA, 25 bp, Homo sapien
catgttacttcaactcatggagata

SEQ ID NO: 5436474 - DNA, 25 bp, Homo sapien
ggaaaatgatttgtgagattggtct

SEQ ID NO: 5436475 - DNA, 25 bp, Homo sapien
tctggtgtaatttgtctttctttat

SEQ ID NO: 5436476 - DNA, 25 bp, Homo sapien
aaccagttgagcttttggcttctct

SEQ ID NO: 5436477 - DNA, 25 bp, Homo sapien
taagctatagcctatctggtgtaat

SEQ ID NO: 5436478 - DNA, 25 bp, Homo sapien
tgggtctcagacatcttgctatgtg

SEQ ID NO: 5436479 - DNA, 25 bp, Homo sapien
aacctgctgtcgaaatctgatttgc

SEQ ID NO: 5436480 - DNA, 25 bp, Homo sapien
tctgaaaaacagcttggaacctccc

SEQ ID NO: 5436481 - DNA, 25 bp, Homo sapien
catggtaacgacagagctgtagctc

SEQ ID NO: 5436482 - DNA, 25 bp, Homo sapien
gatagacaccctatcagcctagcgc

SEQ ID NO: 5436483 - DNA, 25 bp, Homo sapien
tcaacatgggctggttcagctcttc

SEQ ID NO: 5436484 - DNA, 25 bp, Homo sapien
tggtggtccatcactctcaggagat

SEQ ID NO: 5436485 - DNA, 25 bp, Homo sapien
tgatgtgccctattctcaacatggg

SEQ ID NO: 5436486 - DNA, 25 bp, Homo sapien
ttcttatctttttccagattctcat

SEQ ID NO: 5436487 - DNA, 25 bp, Homo sapien
tcagttcttatctttttccagattc

SEQ ID NO: 5436488 - DNA, 25 bp, Homo sapien
cagttcttatctttttccagattct

SEQ ID NO: 5436489 - DNA, 25 bp, Homo sapien
ttatctttttccagattctcattct

SEQ ID NO: 5436490 - DNA, 25 bp, Homo sapien
tccataatccctacttccatcgaaa

SEQ ID NO: 5436491 - DNA, 25 bp, Homo sapien
catcgaaaaagtaggatagcttctt

SEQ ID NO: 5436492 - DNA, 25 bp, Homo sapien
ataatccctacttccatcgaaaaag

SEQ ID NO: 5436493 - DNA, 25 bp, Homo sapien
tacttccatcgaaaaagtaggatag

SEQ ID NO: 5436494 - DNA, 25 bp, Homo sapien
agctgaactgtgtaaaaacgtccca

SEQ ID NO: 5436495 - DNA, 25 bp, Homo sapien
gctgaactgtgtaaaaacgtcccat

SEQ ID NO: 5436496 - DNA, 25 bp, Homo sapien
caaaccatctgttcttagagacatc

SEQ ID NO: 5436497 - DNA, 25 bp, Homo sapien
actgttggcattgggagattcggca

SEQ ID NO: 5436498 - DNA, 25 bp, Homo sapien
cctgggaccaagatgcagaatatct

SEQ ID NO: 5436499 - DNA, 25 bp, Homo sapien
ggtttgcaacttctcgtgtaccagt

SEQ ID NO: 5436500 - DNA, 25 bp, Homo sapien
tatctttgaagaaatcctcggtagt

SEQ ID NO: 5436501 - DNA, 25 bp, Homo sapien
cggtagtaaggctcgaaattcttct

SEQ ID NO: 5436502 - DNA, 25 bp, Homo sapien
tcacaagaagaatttcctctaaacc

SEQ ID NO: 5436503 - DNA, 25 bp, Homo sapien
agaagaatttcctctaaaccacaat

SEQ ID NO: 5436504 - DNA, 25 bp, Homo sapien
ggagtgcagtttgagggaatgtagc

SEQ ID NO: 5436505 - DNA, 25 bp, Homo sapien
gctatggagtgcagtttgagggaat

SEQ ID NO: 5436506 - DNA, 25 bp, Homo sapien
tatggagtgcagtttgagggaatgt

SEQ ID NO: 5436507 - DNA, 25 bp, Homo sapien
agtgcagtttgagggaatgtagctt

SEQ ID NO: 5436508 - DNA, 25 bp, Homo sapien
tcaactcaaataataggacaaatgc

SEQ ID NO: 5436509 - DNA, 25 bp, Homo sapien
caaggtattctaaagtgaaattgcc

SEQ ID NO: 5436510 - DNA, 25 bp, Homo sapien
tgccttgattcgtactatgtcccca

SEQ ID NO: 5436511 - DNA, 25 bp, Homo sapien
cagtacactttagtatgcagcagaa

SEQ ID NO: 5436512 - DNA, 25 bp, Homo sapien
cctcataaaagtgacgaagtagact

SEQ ID NO: 5436513 - DNA, 25 bp, Homo sapien
aatatttatcatcctcataaaagtg

SEQ ID NO: 5436514 - DNA, 25 bp, Homo sapien
aaagtgacgaagtagactgggcacg

SEQ ID NO: 5436515 - DNA, 25 bp, Homo sapien
cataaaagtgacgaagtagactggg

SEQ ID NO: 5436516 - DNA, 25 bp, Homo sapien
gagagtgggaagtagcaagcacctt

SEQ ID NO: 5436517 - DNA, 25 bp, Homo sapien
ggaagtagcaagcaccttggatgcc

SEQ ID NO: 5436518 - DNA, 25 bp, Homo sapien
ccttggatgccttgggagtactcat

SEQ ID NO: 5436519 - DNA, 25 bp, Homo sapien
aagcaccttggatgccttgggagta

SEQ ID NO: 5436520 - DNA, 25 bp, Homo sapien
gcagccaaattctaatgattccact

SEQ ID NO: 5436521 - DNA, 25 bp, Homo sapien
cagccaaattctaatgattccactt

SEQ ID NO: 5436522 - DNA, 25 bp, Homo sapien
tccacaccttgataaaatccacctt

SEQ ID NO: 5436523 - DNA, 25 bp, Homo sapien
tcaaatccacaccttgataaaatcc

SEQ ID NO: 5436524 - DNA, 25 bp, Homo sapien
atgtctctcaaatccacaccttgat

SEQ ID NO: 5436525 - DNA, 25 bp, Homo sapien
tgtctctcaaatccacaccttgata

SEQ ID NO: 5436526 - DNA, 25 bp, Homo sapien
tgtgtcttagttttgcccttcctca

SEQ ID NO: 5436527 - DNA, 25 bp, Homo sapien
tcctgcaatttgtgccttagttgtg

SEQ ID NO: 5436528 - DNA, 25 bp, Homo sapien
gccaaatttgcaagttgcaaaatcc

SEQ ID NO: 5436529 - DNA, 25 bp, Homo sapien
cttagttgtgtcttagttttgccct

SEQ ID NO: 5436530 - DNA, 25 bp, Homo sapien
agcccttcatctcccacagtagttg

SEQ ID NO: 5436531 - DNA, 25 bp, Homo sapien
cactgcttctgtgagagagaagtgc

SEQ ID NO: 5436532 - DNA, 25 bp, Homo sapien
gaaggccaggctacccccaataaca

SEQ ID NO: 5436533 - DNA, 25 bp, Homo sapien
agcactatggctggccagacattct

SEQ ID NO: 5436534 - DNA, 25 bp, Homo sapien
tccattctgagaatcaaaaatgccc

SEQ ID NO: 5436535 - DNA, 25 bp, Homo sapien
tctgagaatcaaaaatgccctgagg

SEQ ID NO: 5436536 - DNA, 25 bp, Homo sapien
agaatcaaaaatgccctgagggtgg

SEQ ID NO: 5436537 - DNA, 25 bp, Homo sapien
tcaactcttactccattctgagaat

SEQ ID NO: 5436538 - DNA, 25 bp, Homo sapien
tgaggactagcctccccagaaagtc

SEQ ID NO: 5436539 - DNA, 25 bp, Homo sapien
taaccccgtctgcagtacatttaca

SEQ ID NO: 5436540 - DNA, 25 bp, Homo sapien
caacgaggaaggacatactgcctga

SEQ ID NO: 5436541 - DNA, 25 bp, Homo sapien
tgttcatctgctctatgtgccctgc

SEQ ID NO: 5436542 - DNA, 25 bp, Homo sapien
tctgggcgatcacagttgaggcctg

SEQ ID NO: 5436543 - DNA, 25 bp, Homo sapien
agttgaggcctggtccaccaagatg

SEQ ID NO: 5436544 - DNA, 25 bp, Homo sapien
ccttgtctgggcgatcacagttgag

SEQ ID NO: 5436545 - DNA, 25 bp, Homo sapien
gcctggtccaccaagatgtttgatc

SEQ ID NO: 5436546 - DNA, 25 bp, Homo sapien
aagcctgttctctatgctcccgtag

SEQ ID NO: 5436547 - DNA, 25 bp, Homo sapien
tggttgaactaaaagcctgttctct

SEQ ID NO: 5436548 - DNA, 25 bp, Homo sapien
taaaagcctgttctctatgctcccg

SEQ ID NO: 5436549 - DNA, 25 bp, Homo sapien
gaactaaaagcctgttctctatgct

SEQ ID NO: 5436550 - DNA, 25 bp, Homo sapien
attgactacacacgccaaactcctg

SEQ ID NO: 5436551 - DNA, 25 bp, Homo sapien
cattgtagtattgactacacacgcc

SEQ ID NO: 5436552 - DNA, 25 bp, Homo sapien
caagtaatcattgtagtattgacta

SEQ ID NO: 5436553 - DNA, 25 bp, Homo sapien
tagtattgactacacacgccaaact

SEQ ID NO: 5436554 - DNA, 25 bp, Homo sapien
ccaaaaggcataagttcgaatccca

SEQ ID NO: 5436555 - DNA, 25 bp, Homo sapien
ttaaaatatgtgatgaccaagggag

SEQ ID NO: 5436556 - DNA, 25 bp, Homo sapien
aatgtactactttgtgcctggctgc

SEQ ID NO: 5436557 - DNA, 25 bp, Homo sapien
tctatgaattgagcagcactagttg

SEQ ID NO: 5436558 - DNA, 25 bp, Homo sapien
ttttgcttacaaatctcacctttgg

SEQ ID NO: 5436559 - DNA, 25 bp, Homo sapien
attttgcttacaaatctcacctttg

SEQ ID NO: 5436560 - DNA, 25 bp, Homo sapien
tgtctattctgctcattcccaaaaa

SEQ ID NO: 5436561 - DNA, 25 bp, Homo sapien
cccaaaaatcgctatggctttcact

SEQ ID NO: 5436562 - DNA, 25 bp, Homo sapien
tgctcattcccaaaaatcgctatgg

SEQ ID NO: 5436563 - DNA, 25 bp, Homo sapien
caaccatgattcttgtctattctgc

SEQ ID NO: 5436564 - DNA, 25 bp, Homo sapien
ggtctttgagtaacactttcttctc

SEQ ID NO: 5436565 - DNA, 25 bp, Homo sapien
ctgtgcctaccacccttgaggagtt

SEQ ID NO: 5436566 - DNA, 25 bp, Homo sapien
ttctcatcaagtatccatatcttca

SEQ ID NO: 5436567 - DNA, 25 bp, Homo sapien
tctggtctgatgacagaaggtcttt

SEQ ID NO: 5436568 - DNA, 25 bp, Homo sapien
tgtgctatgcagtgccgcttcaggg

SEQ ID NO: 5436569 - DNA, 25 bp, Homo sapien
tactggtaaacacacttggctgtag

SEQ ID NO: 5436570 - DNA, 25 bp, Homo sapien
taactcggttgcactagtgactggg

SEQ ID NO: 5436571 - DNA, 25 bp, Homo sapien
caggcagatgggtgcactctggact

SEQ ID NO: 5436572 - DNA, 25 bp, Homo sapien
tactgcatgctggtgttatttaaac

SEQ ID NO: 5436573 - DNA, 25 bp, Homo sapien
catttcatacactgagtcatggact

SEQ ID NO: 5436574 - DNA, 25 bp, Homo sapien
caaataccatcattggcaattgtag

SEQ ID NO: 5436575 - DNA, 25 bp, Homo sapien
agaatttgactagttatggctgcac

SEQ ID NO: 5436576 - DNA, 25 bp, Homo sapien
ctgtcaaatggctctaaaagttctg

SEQ ID NO: 5436577 - DNA, 25 bp, Homo sapien
tgcatcataggtcctataggtgtct

SEQ ID NO: 5436578 - DNA, 25 bp, Homo sapien
cattgtgacaatccagtagttgtgc

SEQ ID NO: 5436579 - DNA, 25 bp, Homo sapien
cctataggtgtctttgccagctttg

SEQ ID NO: 5436580 - DNA, 25 bp, Homo sapien
agggagagcaattgctttcaatctg

SEQ ID NO: 5436581 - DNA, 25 bp, Homo sapien
gagcaattgctttcaatctggatcc

SEQ ID NO: 5436582 - DNA, 25 bp, Homo sapien
aaaaagggagagcaattgctttcaa

SEQ ID NO: 5436583 - DNA, 25 bp, Homo sapien
ggagagcaattgctttcaatctgga

SEQ ID NO: 5436584 - DNA, 25 bp, Homo sapien
atgtcgaccttgataactgcaccag

SEQ ID NO: 5436585 - DNA, 25 bp, Homo sapien
gaaactccaagacctaagtcctgga

SEQ ID NO: 5436586 - DNA, 25 bp, Homo sapien
tgcaccagtagatctgtttttctca

SEQ ID NO: 5436587 - DNA, 25 bp, Homo sapien
tgttcctccagaaactccaagacct

SEQ ID NO: 5436588 - DNA, 25 bp, Homo sapien
ttaaaatccaaatagttgagcatta

SEQ ID NO: 5436589 - DNA, 25 bp, Homo sapien
ccaaatagttgagcattatgcccat

SEQ ID NO: 5436590 - DNA, 25 bp, Homo sapien
aaatccaaatagttgagcattatgc

SEQ ID NO: 5436591 - DNA, 25 bp, Homo sapien
atccaaatagttgagcattatgccc

SEQ ID NO: 5436592 - DNA, 25 bp, Homo sapien
cagtggccttgctgaatctaacgaa

SEQ ID NO: 5436593 - DNA, 25 bp, Homo sapien
ttccagaaggatgacaaactcacgt

SEQ ID NO: 5436594 - DNA, 25 bp, Homo sapien
gacagaaacttccttggtattccag

SEQ ID NO: 5436595 - DNA, 25 bp, Homo sapien
tagcagaatgccttaatagacagaa

SEQ ID NO: 5436596 - DNA, 25 bp, Homo sapien
gaaggataaataactctgaggggga

SEQ ID NO: 5436597 - DNA, 25 bp, Homo sapien
ctaagtggcagctgggttagtctgt

SEQ ID NO: 5436598 - DNA, 25 bp, Homo sapien
tagtctgtgaaggataaataactct

SEQ ID NO: 5436599 - DNA, 25 bp, Homo sapien
cagctgggttagtctgtgaaggata

SEQ ID NO: 5436600 - DNA, 25 bp, Homo sapien
cttttgctttgtagcatccttcgtc

SEQ ID NO: 5436601 - DNA, 25 bp, Homo sapien
tttgctttgtagcatccttcgtcat

SEQ ID NO: 5436602 - DNA, 25 bp, Homo sapien
ttttgctttgtagcatccttcgtca

SEQ ID NO: 5436603 - DNA, 25 bp, Homo sapien
tcctcccagaccaactctcgaattc

SEQ ID NO: 5436604 - DNA, 25 bp, Homo sapien
cccagaccaactctcgaattccaca

SEQ ID NO: 5436605 - DNA, 25 bp, Homo sapien
ccagaccaactctcgaattccacat

SEQ ID NO: 5436606 - DNA, 25 bp, Homo sapien
ctcccagaccaactctcgaattcca

SEQ ID NO: 5436607 - DNA, 25 bp, Homo sapien
agtcctcaatttggagcattggagg

SEQ ID NO: 5436608 - DNA, 25 bp, Homo sapien
caacatctgagagcgagtcctcaat

SEQ ID NO: 5436609 - DNA, 25 bp, Homo sapien
aacaatgttcattccacacttacaa

SEQ ID NO: 5436610 - DNA, 25 bp, Homo sapien
cacacttacaaccaaattccaaggc

SEQ ID NO: 5436611 - DNA, 25 bp, Homo sapien
tcatataatgtccaggtcagtgtct

SEQ ID NO: 5436612 - DNA, 25 bp, Homo sapien
gaatctttgccgtagctgcctgcgg

SEQ ID NO: 5436613 - DNA, 25 bp, Homo sapien
ccctctaaggtgacgttttccagca

SEQ ID NO: 5436614 - DNA, 25 bp, Homo sapien
tgcattccaggacccacaatagctc

SEQ ID NO: 5436615 - DNA, 25 bp, Homo sapien
gcagcccaggaaaaagtagtcaaac

SEQ ID NO: 5436616 - DNA, 25 bp, Homo sapien
cctgggatagattccaagatgcact

SEQ ID NO: 5436617 - DNA, 25 bp, Homo sapien
tacccctgtaaggagactgttgtct

SEQ ID NO: 5436618 - DNA, 25 bp, Homo sapien
tcagtcagctgatacctggtccagc

SEQ ID NO: 5436619 - DNA, 25 bp, Homo sapien
gcatgatctggcccctggctgcttc

SEQ ID NO: 5436620 - DNA, 25 bp, Homo sapien
ctgcatgatctggcccctggctgct

SEQ ID NO: 5436621 - DNA, 25 bp, Homo sapien
catgatctggcccctggctgcttct

SEQ ID NO: 5436622 - DNA, 25 bp, Homo sapien
tgcatgatctggcccctggctgctt

SEQ ID NO: 5436623 - DNA, 25 bp, Homo sapien
agtgccaatgccagggtcagattgc

SEQ ID NO: 5436624 - DNA, 25 bp, Homo sapien
tcagattgctctaaactttccttat

SEQ ID NO: 5436625 - DNA, 25 bp, Homo sapien
caatgccagggtcagattgctctaa

SEQ ID NO: 5436626 - DNA, 25 bp, Homo sapien
gccaatgccagggtcagattgctct

SEQ ID NO: 5436627 - DNA, 25 bp, Homo sapien
cattgacattggggagaaataagaa

SEQ ID NO: 5436628 - DNA, 25 bp, Homo sapien
ttgacattggggagaaataagaatg

SEQ ID NO: 5436629 - DNA, 25 bp, Homo sapien
tcattgacattggggagaaataaga

SEQ ID NO: 5436630 - DNA, 25 bp, Homo sapien
gacattggggagaaataagaatgcg

SEQ ID NO: 5436631 - DNA, 25 bp, Homo sapien
tggaggccaatattgaacgttctta

SEQ ID NO: 5436632 - DNA, 25 bp, Homo sapien
gagagtggaggccaatattgaacgt

SEQ ID NO: 5436633 - DNA, 25 bp, Homo sapien
gagtggaggccaatattgaacgttc

SEQ ID NO: 5436634 - DNA, 25 bp, Homo sapien
agagagtggaggccaatattgaacg

SEQ ID NO: 5436635 - DNA, 25 bp, Homo sapien
cgagacagaaagttcacaaggatac

SEQ ID NO: 5436636 - DNA, 25 bp, Homo sapien
tcaacgagacagaaagttcacaagg

SEQ ID NO: 5436637 - DNA, 25 bp, Homo sapien
cagaaagttcacaaggatacccagg

SEQ ID NO: 5436638 - DNA, 25 bp, Homo sapien
agatcaacgagacagaaagttcaca

SEQ ID NO: 5436639 - DNA, 25 bp, Homo sapien
tcacaatcaaaagaactagaaaagc

SEQ ID NO: 5436640 - DNA, 25 bp, Homo sapien
aaagcaagagcaaacaccttcaaaa

SEQ ID NO: 5436641 - DNA, 25 bp, Homo sapien
atcacaatcaaaagaactagaaaag

SEQ ID NO: 5436642 - DNA, 25 bp, Homo sapien
tagaaaagcaagagcaaacaccttc

SEQ ID NO: 5436643 - DNA, 25 bp, Homo sapien
ctgaagtcttgtttgcagaactgtc

SEQ ID NO: 5436644 - DNA, 25 bp, Homo sapien
tttttcctatcgtaagagctctctg

SEQ ID NO: 5436645 - DNA, 25 bp, Homo sapien
gcttgtcaccttcgaatatactcca

SEQ ID NO: 5436646 - DNA, 25 bp, Homo sapien
ttgtttaggctcttcgactgcttta

SEQ ID NO: 5436647 - DNA, 25 bp, Homo sapien
ccgatggggctagcgatagtcagtc

SEQ ID NO: 5436648 - DNA, 25 bp, Homo sapien
ggctagcgatagtcagtctggccat

SEQ ID NO: 5436649 - DNA, 25 bp, Homo sapien
atggggctagcgatagtcagtctgg

SEQ ID NO: 5436650 - DNA, 25 bp, Homo sapien
gggctagcgatagtcagtctggcca

SEQ ID NO: 5436651 - DNA, 25 bp, Homo sapien
cattccatgagccacttctaaagat

SEQ ID NO: 5436652 - DNA, 25 bp, Homo sapien
ctgtttattgtcatctggtacctgc

SEQ ID NO: 5436653 - DNA, 25 bp, Homo sapien
ggtacctgctccataaggatgacag

SEQ ID NO: 5436654 - DNA, 25 bp, Homo sapien
tggtacctgctccataaggatgaca

SEQ ID NO: 5436655 - DNA, 25 bp, Homo sapien
tttgctctcctctgtcagcaatatg

SEQ ID NO: 5436656 - DNA, 25 bp, Homo sapien
ctgtcagcaatatgaagaaaatcat

SEQ ID NO: 5436657 - DNA, 25 bp, Homo sapien
tgctctcctctgtcagcaatatgaa

SEQ ID NO: 5436658 - DNA, 25 bp, Homo sapien
ctctgtcagcaatatgaagaaaatc

SEQ ID NO: 5436659 - DNA, 25 bp, Homo sapien
tgtgcaaaatatcgtgggcttcagt

SEQ ID NO: 5436660 - DNA, 25 bp, Homo sapien
caagagtgacttgtgaactagtagc

SEQ ID NO: 5436661 - DNA, 25 bp, Homo sapien
agcagagctcaaaagacagtataca

SEQ ID NO: 5436662 - DNA, 25 bp, Homo sapien
ctatgaacaatggagcttagctaca

SEQ ID NO: 5436663 - DNA, 25 bp, Homo sapien
tcagtagcagtagggatcagactcg

SEQ ID NO: 5436664 - DNA, 25 bp, Homo sapien
tcgaaggggctatcacgggacatgc

SEQ ID NO: 5436665 - DNA, 25 bp, Homo sapien
gggcttcaagcactgcttcatccag

SEQ ID NO: 5436666 - DNA, 25 bp, Homo sapien
tccagtgggcttcaagcactgcttc

SEQ ID NO: 5436667 - DNA, 25 bp, Homo sapien
gggagttactcatcaaagagttggg

SEQ ID NO: 5436668 - DNA, 25 bp, Homo sapien
ccagcaggatgatgcagcacccgtt

SEQ ID NO: 5436669 - DNA, 25 bp, Homo sapien
gagggagttactcatcaaagagttg

SEQ ID NO: 5436670 - DNA, 25 bp, Homo sapien
ttggtgagggagttactcatcaaag

SEQ ID NO: 5436671 - DNA, 25 bp, Homo sapien
ctttaaccaggagcggtccacctgg

SEQ ID NO: 5436672 - DNA, 25 bp, Homo sapien
tgatgttcatcttcccgacagcatt

SEQ ID NO: 5436673 - DNA, 25 bp, Homo sapien
taaccaggagcggtccacctgggct

SEQ ID NO: 5436674 - DNA, 25 bp, Homo sapien
catcttcccgacagcatttttgttg

SEQ ID NO: 5436675 - DNA, 25 bp, Homo sapien
aagtgccaatcaaggatgctgtcat

SEQ ID NO: 5436676 - DNA, 25 bp, Homo sapien
ttaaagtgccaatcaaggatgctgt

SEQ ID NO: 5436677 - DNA, 25 bp, Homo sapien
tcatctgcttaaagtgccaatcaag

SEQ ID NO: 5436678 - DNA, 25 bp, Homo sapien
tgccaatcaaggatgctgtcattac

SEQ ID NO: 5436679 - DNA, 25 bp, Homo sapien
ctgacaggccttgtccatggttgtc

SEQ ID NO: 5436680 - DNA, 25 bp, Homo sapien
ggccttgtccatggttgtcacctca

SEQ ID NO: 5436681 - DNA, 25 bp, Homo sapien
aagatgtcctcctgacaggccttgt

SEQ ID NO: 5436682 - DNA, 25 bp, Homo sapien
atggttgtcacctcatagctctcca

SEQ ID NO: 5436683 - DNA, 25 bp, Homo sapien
gtgacaatgacatgatccacaaaac

SEQ ID NO: 5436684 - DNA, 25 bp, Homo sapien
ctcggtgacaatgacatgatccaca

SEQ ID NO: 5436685 - DNA, 25 bp, Homo sapien
tcggtgacaatgacatgatccacaa

SEQ ID NO: 5436686 - DNA, 25 bp, Homo sapien
cggtgacaatgacatgatccacaaa

SEQ ID NO: 5436687 - DNA, 25 bp, Homo sapien
ttgccatagcccactatcactacta

SEQ ID NO: 5436688 - DNA, 25 bp, Homo sapien
tcttggtgacagagtcgttcacatt

SEQ ID NO: 5436689 - DNA, 25 bp, Homo sapien
tctgtgagggatgcttgcttgctct

SEQ ID NO: 5436690 - DNA, 25 bp, Homo sapien
agagtcgttcacattgatggcaggc

SEQ ID NO: 5436691 - DNA, 25 bp, Homo sapien
tctcttgggagatgcctcgatgccc

SEQ ID NO: 5436692 - DNA, 25 bp, Homo sapien
agatgcctcgatgcccaacaggagc

SEQ ID NO: 5436693 - DNA, 25 bp, Homo sapien
cccagtcagggtctcttgggagatg

SEQ ID NO: 5436694 - DNA, 25 bp, Homo sapien
tgtgggaacttggtgtgaatgaatg

SEQ ID NO: 5436695 - DNA, 25 bp, Homo sapien
gatcaatgtgtgcaagttcaagttc

SEQ ID NO: 5436696 - DNA, 25 bp, Homo sapien
ttctctaaaaggtcaggctgaccct

SEQ ID NO: 5436697 - DNA, 25 bp, Homo sapien
ccagagttggtaggtttgacaagaa

SEQ ID NO: 5436698 - DNA, 25 bp, Homo sapien
tttagagaaaaagctagccgacctc

SEQ ID NO: 5436699 - DNA, 25 bp, Homo sapien
tgggcaacaactctggtaatggtgg

SEQ ID NO: 5436700 - DNA, 25 bp, Homo sapien
ttgaaacccgttgcccacaagtgct

SEQ ID NO: 5436701 - DNA, 25 bp, Homo sapien
tagcccctttgaagcattctttggg

SEQ ID NO: 5436702 - DNA, 25 bp, Homo sapien
gatacaggtaaaggatcaatcttca

SEQ ID NO: 5436703 - DNA, 25 bp, Homo sapien
ccacaagctggcaatgcttttcaga

SEQ ID NO: 5436704 - DNA, 25 bp, Homo sapien
acaagctggcaatgcttttcagaaa

SEQ ID NO: 5436705 - DNA, 25 bp, Homo sapien
ccccacaagctggcaatgcttttca

SEQ ID NO: 5436706 - DNA, 25 bp, Homo sapien
cacaagctggcaatgcttttcagaa

SEQ ID NO: 5436707 - DNA, 25 bp, Homo sapien
aacctgttgatacagctcctttaag

SEQ ID NO: 5436708 - DNA, 25 bp, Homo sapien
agaaggaaaaacctgttgatacagc

SEQ ID NO: 5436709 - DNA, 25 bp, Homo sapien
acaactctccagatagcaagcattc

SEQ ID NO: 5436710 - DNA, 25 bp, Homo sapien
tcctttaagtgctatgggtttcaaa

SEQ ID NO: 5436711 - DNA, 25 bp, Homo sapien
tcccacttcttggatcgctcatcca

SEQ ID NO: 5436712 - DNA, 25 bp, Homo sapien
tgaaaacctgtctcttgccatagtt

SEQ ID NO: 5436713 - DNA, 25 bp, Homo sapien
aacctgtctcttgccatagttccca

SEQ ID NO: 5436714 - DNA, 25 bp, Homo sapien
tcttgccatagttcccacttcttgg

SEQ ID NO: 5436715 - DNA, 25 bp, Homo sapien
cttttaggccatgtaaaagtaacag

SEQ ID NO: 5436716 - DNA, 25 bp, Homo sapien
tgaatcacggaaagaacaagtgagt

SEQ ID NO: 5436717 - DNA, 25 bp, Homo sapien
ggttattactaatcttgaatcacgg

SEQ ID NO: 5436718 - DNA, 25 bp, Homo sapien
gcctctctaggcatagctttgtcta

SEQ ID NO: 5436719 - DNA, 25 bp, Homo sapien
gggataccactcagagttgcagctg

SEQ ID NO: 5436720 - DNA, 25 bp, Homo sapien
gctgggtccaaagggctctatctta

SEQ ID NO: 5436721 - DNA, 25 bp, Homo sapien
taaaaaagcagtgtaggtgccctaa

SEQ ID NO: 5436722 - DNA, 25 bp, Homo sapien
gagtgactaataagagctgggtcca

SEQ ID NO: 5436723 - DNA, 25 bp, Homo sapien
gaactgcttggctggatcgggattt

SEQ ID NO: 5436724 - DNA, 25 bp, Homo sapien
cccagaactcgctgtgttaagtaga

SEQ ID NO: 5436725 - DNA, 25 bp, Homo sapien
cacggtgtaggcacaagtccatgga

SEQ ID NO: 5436726 - DNA, 25 bp, Homo sapien
tgcagatacgcctcaacatgtggat

SEQ ID NO: 5436727 - DNA, 25 bp, Homo sapien
taggtggcgcgtgtacgcccatagc

SEQ ID NO: 5436728 - DNA, 25 bp, Homo sapien
acgccgcaagcgtagcagggtgtca

SEQ ID NO: 5436729 - DNA, 25 bp, Homo sapien
agctgagtggaccttgtacgccgca

SEQ ID NO: 5436730 - DNA, 25 bp, Homo sapien
tagcgtagcacccataggcggacgg

SEQ ID NO: 5436731 - DNA, 25 bp, Homo sapien
gcagtctgctttggtgaatacacga

SEQ ID NO: 5436732 - DNA, 25 bp, Homo sapien
gaatacacgatttggtgcagccggg

SEQ ID NO: 5436733 - DNA, 25 bp, Homo sapien
tgcacacggcactcgagtgtgaggt

SEQ ID NO: 5436734 - DNA, 25 bp, Homo sapien
gtttggtaccgagcggagaggagat

SEQ ID NO: 5436735 - DNA, 25 bp, Homo sapien
gggcagagtgttgggcgccgcggct

SEQ ID NO: 5436736 - DNA, 25 bp, Homo sapien
ggcggccagccgaagcagagcgcgt

SEQ ID NO: 5436737 - DNA, 25 bp, Homo sapien
ttccctcggggatgcgggcgctggg

SEQ ID NO: 5436738 - DNA, 25 bp, Homo sapien
ccgcggctcctcgtgtgcggtctgg

SEQ ID NO: 5436739 - DNA, 25 bp, Homo sapien
ccgcgggatcgggagccggcggcat

SEQ ID NO: 5436740 - DNA, 25 bp, Homo sapien
gggagtgaccgctgggcgggtggcg

SEQ ID NO: 5436741 - DNA, 25 bp, Homo sapien
cttcctgtggaggttggcggagcct

SEQ ID NO: 5436742 - DNA, 25 bp, Homo sapien
tttggggatctgtaggcaggtcttc

SEQ ID NO: 5436743 - DNA, 25 bp, Homo sapien
gccgcggatggcgtcgcaggcgcgg

SEQ ID NO: 5436744 - DNA, 25 bp, Homo sapien
cgggatggagcctcggcaccgctgt

SEQ ID NO: 5436745 - DNA, 25 bp, Homo sapien
cgctgttccggaccgaggctaacgg

SEQ ID NO: 5436746 - DNA, 25 bp, Homo sapien
atggagcctcggcaccgctgttccg

SEQ ID NO: 5436747 - DNA, 25 bp, Homo sapien
tcggcaccgctgttccggaccgagg

SEQ ID NO: 5436748 - DNA, 25 bp, Homo sapien
cggagcgcgggggtgtgaagatctc

SEQ ID NO: 5436749 - DNA, 25 bp, Homo sapien
accgaaaagccgaggcggagcgcgg

SEQ ID NO: 5436750 - DNA, 25 bp, Homo sapien
ccaaccgaaaagccgaggcggagcg

SEQ ID NO: 5436751 - DNA, 25 bp, Homo sapien
gggtgtgaagatctcggcctgctgg

SEQ ID NO: 5436752 - DNA, 25 bp, Homo sapien
tgggccggaggtggcgcggccgcac

SEQ ID NO: 5436753 - DNA, 25 bp, Homo sapien
caggccgggtgggccggaggtggcg

SEQ ID NO: 5436754 - DNA, 25 bp, Homo sapien
ggtgggccggaggtggcgcggccgc

SEQ ID NO: 5436755 - DNA, 25 bp, Homo sapien
gtgggccggaggtggcgcggccgca

SEQ ID NO: 5436756 - DNA, 25 bp, Homo sapien
agggcgcgagcaacatgacgttcaa

SEQ ID NO: 5436757 - DNA, 25 bp, Homo sapien
aaagcccttaggtggagagcgatgt

SEQ ID NO: 5436758 - DNA, 25 bp, Homo sapien
gaaatgttcacgtgggagcctgtcc

SEQ ID NO: 5436759 - DNA, 25 bp, Homo sapien
gatcgcgtagaggaaccttcgcgca

SEQ ID NO: 5436760 - DNA, 25 bp, Homo sapien
gtactaaggatctggcacgaggaag

SEQ ID NO: 5436761 - DNA, 25 bp, Homo sapien
tatcactgcagaacctgaagccctc

SEQ ID NO: 5436762 - DNA, 25 bp, Homo sapien
gaagggtcgttcactcgagtaccta

SEQ ID NO: 5436763 - DNA, 25 bp, Homo sapien
gggctgtactaaggatctggcacga

SEQ ID NO: 5436764 - DNA, 25 bp, Homo sapien
caaaaagtatggtaggttatactgt

SEQ ID NO: 5436765 - DNA, 25 bp, Homo sapien
acaaaaagtatggtaggttatactg

SEQ ID NO: 5436766 - DNA, 25 bp, Homo sapien
tagaacaatcaccaagttaccttgc

SEQ ID NO: 5436767 - DNA, 25 bp, Homo sapien
ccatgagtttagtatcagaaggaca

SEQ ID NO: 5436768 - DNA, 25 bp, Homo sapien
tatggttaggctaaaaatgtcagct

SEQ ID NO: 5436769 - DNA, 25 bp, Homo sapien
tatgggattgttttcaaagcgggaa

SEQ ID NO: 5436770 - DNA, 25 bp, Homo sapien
tttttcaatcttggtgtatgtgctg

SEQ ID NO: 5436771 - DNA, 25 bp, Homo sapien
caacaatatagaccatttcacaaat

SEQ ID NO: 5436772 - DNA, 25 bp, Homo sapien
attttttcaatcttggtgtatgtgc

SEQ ID NO: 5436773 - DNA, 25 bp, Homo sapien
tctctgtattttttcaatcttggtg

SEQ ID NO: 5436774 - DNA, 25 bp, Homo sapien
tgcaaccattgccatgaagaacatg

SEQ ID NO: 5436775 - DNA, 25 bp, Homo sapien
ccaagcaaattttcaaagcaagctg

SEQ ID NO: 5436776 - DNA, 25 bp, Homo sapien
gaagaacatgaccatggccctgaag

SEQ ID NO: 5436777 - DNA, 25 bp, Homo sapien
cagacagcatcgtggaatgacagaa

SEQ ID NO: 5436778 - DNA, 25 bp, Homo sapien
cgtggggagcctagcaatgaacctt

SEQ ID NO: 5436779 - DNA, 25 bp, Homo sapien
aatgaaccttcaacagagaccaata

SEQ ID NO: 5436780 - DNA, 25 bp, Homo sapien
cataatgattccattactcccagtg

SEQ ID NO: 5436781 - DNA, 25 bp, Homo sapien
ttccattactcccagtgagcgtggg

SEQ ID NO: 5436782 - DNA, 25 bp, Homo sapien
tcatgatcctggtcgtggacaccaa

SEQ ID NO: 5436783 - DNA, 25 bp, Homo sapien
ctggtcgtggacaccaagatcttga

SEQ ID NO: 5436784 - DNA, 25 bp, Homo sapien
gatcgtgtacataacccaggtcatt

SEQ ID NO: 5436785 - DNA, 25 bp, Homo sapien
tccagaacgtaatggtcatgatcct

SEQ ID NO: 5436786 - DNA, 25 bp, Homo sapien
aatagaaccatacattatttgcctt

SEQ ID NO: 5436787 - DNA, 25 bp, Homo sapien
cattcataatgttacacaacgatcc

SEQ ID NO: 5436788 - DNA, 25 bp, Homo sapien
gaccctgggacctatcaatctactg

SEQ ID NO: 5436789 - DNA, 25 bp, Homo sapien
gatccatactatctgcctctgtaac

SEQ ID NO: 5436790 - DNA, 25 bp, Homo sapien
tctgaatattaatctcccttatcag

SEQ ID NO: 5436791 - DNA, 25 bp, Homo sapien
tgaccatggcatcgctaagtctgct

SEQ ID NO: 5436792 - DNA, 25 bp, Homo sapien
agcagaacttgacagttggtcattc

SEQ ID NO: 5436793 - DNA, 25 bp, Homo sapien
tctgccagaactgcttttgtcaaat

SEQ ID NO: 5436794 - DNA, 25 bp, Homo sapien
tgagccaaacctaagcaggttttcc

SEQ ID NO: 5436795 - DNA, 25 bp, Homo sapien
catggctagctcctgcttaggaggc

SEQ ID NO: 5436796 - DNA, 25 bp, Homo sapien
tcatcatccttgaacatttccactc

SEQ ID NO: 5436797 - DNA, 25 bp, Homo sapien
gctgatcacccctccggaatagttt

SEQ ID NO: 5436798 - DNA, 25 bp, Homo sapien
gacattctgcgtcagggctgtggca

SEQ ID NO: 5436799 - DNA, 25 bp, Homo sapien
tactagttatgctggatagctctgc

SEQ ID NO: 5436800 - DNA, 25 bp, Homo sapien
tattaagagaatacactgtgagggc

SEQ ID NO: 5436801 - DNA, 25 bp, Homo sapien
tgaattaggccatttcccaaaagaa

SEQ ID NO: 5436802 - DNA, 25 bp, Homo sapien
gatgccaatttggatttgtccccaa

SEQ ID NO: 5436803 - DNA, 25 bp, Homo sapien
catggctgtcatggtacccaagtga

SEQ ID NO: 5436804 - DNA, 25 bp, Homo sapien
ggataaactccattattgccatggc

SEQ ID NO: 5436805 - DNA, 25 bp, Homo sapien
gtttggcactggaaccaagagcaca

SEQ ID NO: 5436806 - DNA, 25 bp, Homo sapien
caagagcacatgtcgtggctggcta

SEQ ID NO: 5436807 - DNA, 25 bp, Homo sapien
tcatattaagtttagctgcatttgc

SEQ ID NO: 5436808 - DNA, 25 bp, Homo sapien
tcagaacatttccttacatttaagt

SEQ ID NO: 5436809 - DNA, 25 bp, Homo sapien
gtttagctgcatttgctcataagta

SEQ ID NO: 5436810 - DNA, 25 bp, Homo sapien
tgagtcatattaagtttagctgcat

SEQ ID NO: 5436811 - DNA, 25 bp, Homo sapien
tacaatggagcaacataacttggcc

SEQ ID NO: 5436812 - DNA, 25 bp, Homo sapien
gataatactcctctccgctcacttg

SEQ ID NO: 5436813 - DNA, 25 bp, Homo sapien
cacaaaattcgtggaatggccagtg

SEQ ID NO: 5436814 - DNA, 25 bp, Homo sapien
taagttgacataacagtgctacacc

SEQ ID NO: 5436815 - DNA, 25 bp, Homo sapien
gaattttgggatgcgattctgcaag

SEQ ID NO: 5436816 - DNA, 25 bp, Homo sapien
tcataaagaattttgggatgcgatt

SEQ ID NO: 5436817 - DNA, 25 bp, Homo sapien
atccagaaataatccgtgaatgaaa

SEQ ID NO: 5436818 - DNA, 25 bp, Homo sapien
cagaaataatccgtgaatgaaaaca

SEQ ID NO: 5436819 - DNA, 25 bp, Homo sapien
caggtgatactagatttgcagccta

SEQ ID NO: 5436820 - DNA, 25 bp, Homo sapien
taaaattaggtgtggaagacgagag

SEQ ID NO: 5436821 - DNA, 25 bp, Homo sapien
tcaagaacattgaaactttgcctag

SEQ ID NO: 5436822 - DNA, 25 bp, Homo sapien
tccaatgaaagcaatctcctgagtg

SEQ ID NO: 5436823 - DNA, 25 bp, Homo sapien
agcacattctgcgtctttacctctg

SEQ ID NO: 5436824 - DNA, 25 bp, Homo sapien
gctggattgcaaaatggaccttgat

SEQ ID NO: 5436825 - DNA, 25 bp, Homo sapien
aataactgccagtgtataactctgg

SEQ ID NO: 5436826 - DNA, 25 bp, Homo sapien
gctgatgggaagaatacgtcggaat

SEQ ID NO: 5436827 - DNA, 25 bp, Homo sapien
ggatcctttaataagttgtgcttta

SEQ ID NO: 5436828 - DNA, 25 bp, Homo sapien
tagtcaaacccaagaagatcaatag

SEQ ID NO: 5436829 - DNA, 25 bp, Homo sapien
caggaggatgcttgtattctttgtc

SEQ ID NO: 5436830 - DNA, 25 bp, Homo sapien
tatttcctggcgtagttctgctggg

SEQ ID NO: 5436831 - DNA, 25 bp, Homo sapien
gaagactggaggaggaccaacctca

SEQ ID NO: 5436832 - DNA, 25 bp, Homo sapien
catagctgccaagtggtttaaggct

SEQ ID NO: 5436833 - DNA, 25 bp, Homo sapien
caaggaagtcattcacatagctgcc

SEQ ID NO: 5436834 - DNA, 25 bp, Homo sapien
ggatttacccatccacatttctgga

SEQ ID NO: 5436835 - DNA, 25 bp, Homo sapien
gatctgtagacatgactgcaagccc

SEQ ID NO: 5436836 - DNA, 25 bp, Homo sapien
taaaacaattgaacttgtggagtta

SEQ ID NO: 5436837 - DNA, 25 bp, Homo sapien
caggccatggaagctaaatattaaa

SEQ ID NO: 5436838 - DNA, 25 bp, Homo sapien
taagttgttgggtacctcctcatgg

SEQ ID NO: 5436839 - DNA, 25 bp, Homo sapien
gcctcgatgtcgaagttgtttggaa

SEQ ID NO: 5436840 - DNA, 25 bp, Homo sapien
tttacgcacgaatctcttatggtct

SEQ ID NO: 5436841 - DNA, 25 bp, Homo sapien
ttgcccaagatgtcactagcgacct

SEQ ID NO: 5436842 - DNA, 25 bp, Homo sapien
tccttagtgatatctgcattggcat

SEQ ID NO: 5436843 - DNA, 25 bp, Homo sapien
agctgagtttctgactgatccttag

SEQ ID NO: 5436844 - DNA, 25 bp, Homo sapien
ttgtgtattcgatgtagcttttgtg

SEQ ID NO: 5436845 - DNA, 25 bp, Homo sapien
ggcagagtctttgtgtattcgatgt

SEQ ID NO: 5436846 - DNA, 25 bp, Homo sapien
tttcaactaattcgggattgaagaa

SEQ ID NO: 5436847 - DNA, 25 bp, Homo sapien
cattcgccagtcatgtaccgcagag

SEQ ID NO: 5436848 - DNA, 25 bp, Homo sapien
tgtttagaatgctgcgcagcgtgcg

SEQ ID NO: 5436849 - DNA, 25 bp, Homo sapien
gatgccacttgagtcgaacttatag

SEQ ID NO: 5436850 - DNA, 25 bp, Homo sapien
ggagctgctgtacgctgattctcag

SEQ ID NO: 5436851 - DNA, 25 bp, Homo sapien
ccgtctttcttgtaccaaagcatga

SEQ ID NO: 5436852 - DNA, 25 bp, Homo sapien
cacaggccataaagcaatttcttga

SEQ ID NO: 5436853 - DNA, 25 bp, Homo sapien
tcattgaactcataaggaatattcc

SEQ ID NO: 5436854 - DNA, 25 bp, Homo sapien
agagagctgtaggcaatagcagccg

SEQ ID NO: 5436855 - DNA, 25 bp, Homo sapien
gagctcaagggtcagctttaaatga

SEQ ID NO: 5436856 - DNA, 25 bp, Homo sapien
ccagagagctgtaggcaatagcagc

SEQ ID NO: 5436857 - DNA, 25 bp, Homo sapien
gctcaagggtcagctttaaatgatt

SEQ ID NO: 5436858 - DNA, 25 bp, Homo sapien
gggtaactcgttagccacattcgga

SEQ ID NO: 5436859 - DNA, 25 bp, Homo sapien
caaagaactccggatcagagatcgg

SEQ ID NO: 5436860 - DNA, 25 bp, Homo sapien
gatcgaatgatattagcccgtaaac

SEQ ID NO: 5436861 - DNA, 25 bp, Homo sapien
cagagatcgggtccatgaggtatga

SEQ ID NO: 5436862 - DNA, 25 bp, Homo sapien
actttctcaagggttggcatccaag

SEQ ID NO: 5436863 - DNA, 25 bp, Homo sapien
acaacccatgttccttccttgacag

SEQ ID NO: 5436864 - DNA, 25 bp, Homo sapien
ccttgacagctttttctaacatctt

SEQ ID NO: 5436865 - DNA, 25 bp, Homo sapien
tcttcatagcaatgggcccttggcc

SEQ ID NO: 5436866 - DNA, 25 bp, Homo sapien
tccaggagagagcacgaaaatcagt

SEQ ID NO: 5436867 - DNA, 25 bp, Homo sapien
caaatgccttggctaaatcaaaggg

SEQ ID NO: 5436868 - DNA, 25 bp, Homo sapien
aatgaatgcacgtcccaatctgttg

SEQ ID NO: 5436869 - DNA, 25 bp, Homo sapien
gattataaattcctgcaacattgga

SEQ ID NO: 5436870 - DNA, 25 bp, Homo sapien
gcaggcataaggctttggaatcatt

SEQ ID NO: 5436871 - DNA, 25 bp, Homo sapien
gatggactgagcaggcataaggctt

SEQ ID NO: 5436872 - DNA, 25 bp, Homo sapien
cataaggctttggaatcattgagct

SEQ ID NO: 5436873 - DNA, 25 bp, Homo sapien
ggaatcattgagctgttttcaaagc

SEQ ID NO: 5436874 - DNA, 25 bp, Homo sapien
ggcctcaagcaacgaataataagca

SEQ ID NO: 5436875 - DNA, 25 bp, Homo sapien
tggcctcaagcaacgaataataagc

SEQ ID NO: 5436876 - DNA, 25 bp, Homo sapien
ctcaagcaacgaataataagcatcc

SEQ ID NO: 5436877 - DNA, 25 bp, Homo sapien
gcctcaagcaacgaataataagcat

SEQ ID NO: 5436878 - DNA, 25 bp, Homo sapien
actctctacgaatggttttgaaggc

SEQ ID NO: 5436879 - DNA, 25 bp, Homo sapien
gaagccatgtacaaaggttggcata

SEQ ID NO: 5436880 - DNA, 25 bp, Homo sapien
gattatccagtccaatgccaccagt

SEQ ID NO: 5436881 - DNA, 25 bp, Homo sapien
gcaggcaaatcatctaatcgacata

SEQ ID NO: 5436882 - DNA, 25 bp, Homo sapien
taaagtgatccttgagaatctgaag

SEQ ID NO: 5436883 - DNA, 25 bp, Homo sapien
cagcagtagatttatggttagacaa

SEQ ID NO: 5436884 - DNA, 25 bp, Homo sapien
ccggcagacattaacatacagtgaa

SEQ ID NO: 5436885 - DNA, 25 bp, Homo sapien
tccttttcaaagagtgaccggcaga

SEQ ID NO: 5436886 - DNA, 25 bp, Homo sapien
cagggtgactcacatttggtctttt

SEQ ID NO: 5436887 - DNA, 25 bp, Homo sapien
tcttgtagacagaaagattgaaggg

SEQ ID NO: 5436888 - DNA, 25 bp, Homo sapien
tcttaactattttatcccctgcagc

SEQ ID NO: 5436889 - DNA, 25 bp, Homo sapien
ctgtccccattattatgctaatagg

SEQ ID NO: 5436890 - DNA, 25 bp, Homo sapien
tattggatggcctcacctagaccag

SEQ ID NO: 5436891 - DNA, 25 bp, Homo sapien
accagaggtggtaagatttgcaact

SEQ ID NO: 5436892 - DNA, 25 bp, Homo sapien
ggcatgggcgaagctaactttggaa

SEQ ID NO: 5436893 - DNA, 25 bp, Homo sapien
tttactagccatgataccagaggtg

SEQ ID NO: 5436894 - DNA, 25 bp, Homo sapien
gtgtcggactcacacctttattagt

SEQ ID NO: 5436895 - DNA, 25 bp, Homo sapien
ttggccaagctcaaagtgtcggact

SEQ ID NO: 5436896 - DNA, 25 bp, Homo sapien
taggttcatactgatcaagaaggtt

SEQ ID NO: 5436897 - DNA, 25 bp, Homo sapien
cccttgtgggtctgaacagtcaaga

SEQ ID NO: 5436898 - DNA, 25 bp, Homo sapien
catgcgggtggtgtcaatctttttc

SEQ ID NO: 5436899 - DNA, 25 bp, Homo sapien
catgggctcaatgttggctaaatca

SEQ ID NO: 5436900 - DNA, 25 bp, Homo sapien
tgagaaatctcattagccaaggcct

SEQ ID NO: 5436901 - DNA, 25 bp, Homo sapien
caataggacgatagcccatgcgggt

SEQ ID NO: 5436902 - DNA, 25 bp, Homo sapien
cagctccttgtaatatcaaggcttg

SEQ ID NO: 5436903 - DNA, 25 bp, Homo sapien
ttcagctccttgtaatatcaaggct

SEQ ID NO: 5436904 - DNA, 25 bp, Homo sapien
tcagctccttgtaatatcaaggctt

SEQ ID NO: 5436905 - DNA, 25 bp, Homo sapien
gtccccaagccggatacatgtactc

SEQ ID NO: 5436906 - DNA, 25 bp, Homo sapien
ggtgcatattcaattgtggagtccc

SEQ ID NO: 5436907 - DNA, 25 bp, Homo sapien
tgaggatttcttaacttggtagtaa

SEQ ID NO: 5436908 - DNA, 25 bp, Homo sapien
tggtagtaatatagaagcggaagtc

SEQ ID NO: 5436909 - DNA, 25 bp, Homo sapien
cagtatatagattgatagaaaaatg

SEQ ID NO: 5436910 - DNA, 25 bp, Homo sapien
atagaaaaatgacacaaaggccagg

SEQ ID NO: 5436911 - DNA, 25 bp, Homo sapien
gattgatagaaaaatgacacaaagg

SEQ ID NO: 5436912 - DNA, 25 bp, Homo sapien
ttgatagaaaaatgacacaaaggcc

SEQ ID NO: 5436913 - DNA, 25 bp, Homo sapien
aggatctatcatcagaggccacctt

SEQ ID NO: 5436914 - DNA, 25 bp, Homo sapien
ggagtaccaaactggatgcaatttt

SEQ ID NO: 5436915 - DNA, 25 bp, Homo sapien
gacatagtcaggttcactaagttta

SEQ ID NO: 5436916 - DNA, 25 bp, Homo sapien
gcaattttccagagtcctgacatag

SEQ ID NO: 5436917 - DNA, 25 bp, Homo sapien
gacgatgctggtcaagccatgattt

SEQ ID NO: 5436918 - DNA, 25 bp, Homo sapien
gaaagacgatgctggtcaagccatg

SEQ ID NO: 5436919 - DNA, 25 bp, Homo sapien
gctggtcaagccatgatttgtttct

SEQ ID NO: 5436920 - DNA, 25 bp, Homo sapien
aggagaaagacgatgctggtcaagc

SEQ ID NO: 5436921 - DNA, 25 bp, Homo sapien
tgacaggctgaagtccttggtttct

SEQ ID NO: 5436922 - DNA, 25 bp, Homo sapien
actgtgacaggctgaagtccttggt

SEQ ID NO: 5436923 - DNA, 25 bp, Homo sapien
tgtgacaggctgaagtccttggttt

SEQ ID NO: 5436924 - DNA, 25 bp, Homo sapien
gtccttggtttctgggaggtgagac

SEQ ID NO: 5436925 - DNA, 25 bp, Homo sapien
gggtacccataagagagcaatcatc

SEQ ID NO: 5436926 - DNA, 25 bp, Homo sapien
gaaggtaatccagcaatattccaag

SEQ ID NO: 5436927 - DNA, 25 bp, Homo sapien
agttcgaattgtcacagcttctccc

SEQ ID NO: 5436928 - DNA, 25 bp, Homo sapien
ggaaaatgagtcagaaggtaatcca

SEQ ID NO: 5436929 - DNA, 25 bp, Homo sapien
aaagttgtccactctttagtttgat

SEQ ID NO: 5436930 - DNA, 25 bp, Homo sapien
acaaagttgtccactctttagtttg

SEQ ID NO: 5436931 - DNA, 25 bp, Homo sapien
caaagttgtccactctttagtttga

SEQ ID NO: 5436932 - DNA, 25 bp, Homo sapien
tttcagtgccaataaggatcagggc

SEQ ID NO: 5436933 - DNA, 25 bp, Homo sapien
tgcgagtggctacggcagggcattt

SEQ ID NO: 5436934 - DNA, 25 bp, Homo sapien
cataatgcagtttgtgagactctac

SEQ ID NO: 5436935 - DNA, 25 bp, Homo sapien
agtggctacggcagggcatttcagt

SEQ ID NO: 5436936 - DNA, 25 bp, Homo sapien
ctgtaggatgctcaggaacccgggc

SEQ ID NO: 5436937 - DNA, 25 bp, Homo sapien
cagtctgtaggatgctcaggaaccc

SEQ ID NO: 5436938 - DNA, 25 bp, Homo sapien
gtctgtaggatgctcaggaacccgg

SEQ ID NO: 5436939 - DNA, 25 bp, Homo sapien
ggacagtctgtaggatgctcaggaa

SEQ ID NO: 5436940 - DNA, 25 bp, Homo sapien
cagcctctgggttgatgagggtgct

SEQ ID NO: 5436941 - DNA, 25 bp, Homo sapien
gcctctgggttgatgagggtgctgg

SEQ ID NO: 5436942 - DNA, 25 bp, Homo sapien
ctgggttgatgagggtgctgggtgc

SEQ ID NO: 5436943 - DNA, 25 bp, Homo sapien
cctctgggttgatgagggtgctggg

SEQ ID NO: 5436944 - DNA, 25 bp, Homo sapien
ctgagaggccacgctgggcactgcc

SEQ ID NO: 5436945 - DNA, 25 bp, Homo sapien
gctgagaggccacgctgggcactgc

SEQ ID NO: 5436946 - DNA, 25 bp, Homo sapien
caggctcctgctgagtaggctggac

SEQ ID NO: 5436947 - DNA, 25 bp, Homo sapien
tcctgctgagtaggctggaccaaca

SEQ ID NO: 5436948 - DNA, 25 bp, Homo sapien
tccctcaggctcctgctgagtaggc

SEQ ID NO: 5436949 - DNA, 25 bp, Homo sapien
ggctcctgctgagtaggctggacca

SEQ ID NO: 5436950 - DNA, 25 bp, Homo sapien
tttgatgggaaataaactgctcgct

SEQ ID NO: 5436951 - DNA, 25 bp, Homo sapien
attgaatgagacagttttgatggga

SEQ ID NO: 5436952 - DNA, 25 bp, Homo sapien
gaaataaactgctcgctgttttgac

SEQ ID NO: 5436953 - DNA, 25 bp, Homo sapien
ttgaatgagacagttttgatgggaa

SEQ ID NO: 5436954 - DNA, 25 bp, Homo sapien
cagtcccttggactgagtctgtcag

SEQ ID NO: 5436955 - DNA, 25 bp, Homo sapien
ccagtgcagacacctagtgatgtgc

SEQ ID NO: 5436956 - DNA, 25 bp, Homo sapien
ggtacatctagctctccaagcactg

SEQ ID NO: 5436957 - DNA, 25 bp, Homo sapien
taaagtggattctgctagtgcactg

SEQ ID NO: 5436958 - DNA, 25 bp, Homo sapien
tctataggtggatgtgaaggctccg

SEQ ID NO: 5436959 - DNA, 25 bp, Homo sapien
agctgtgtggctccatcgagttttc

SEQ ID NO: 5436960 - DNA, 25 bp, Homo sapien
gaaggctccgaggtaagcaaccact

SEQ ID NO: 5436961 - DNA, 25 bp, Homo sapien
tgaggatatccccagtcaagttgat

SEQ ID NO: 5436962 - DNA, 25 bp, Homo sapien
tttgggagctactatttttgccact

SEQ ID NO: 5436963 - DNA, 25 bp, Homo sapien
ctggccagcttgtcctgaacttcct

SEQ ID NO: 5436964 - DNA, 25 bp, Homo sapien
tggcaattttaagctccccttcagc

SEQ ID NO: 5436965 - DNA, 25 bp, Homo sapien
gaacttccttaagggctgcctgctt

SEQ ID NO: 5436966 - DNA, 25 bp, Homo sapien
gaatccattgctatgacccatttgc

SEQ ID NO: 5436967 - DNA, 25 bp, Homo sapien
tttgcacagaccttcggccgctgta

SEQ ID NO: 5436968 - DNA, 25 bp, Homo sapien
caagaagtctcttagctgggcccca

SEQ ID NO: 5436969 - DNA, 25 bp, Homo sapien
gatgcatatagcttccataacaagc

SEQ ID NO: 5436970 - DNA, 25 bp, Homo sapien
ccaggtcagcatcgcactcatcttt

SEQ ID NO: 5436971 - DNA, 25 bp, Homo sapien
cagtaagagtatcaagggcggccag

SEQ ID NO: 5436972 - DNA, 25 bp, Homo sapien
tgaggatgtagtgcctccaactcca

SEQ ID NO: 5436973 - DNA, 25 bp, Homo sapien
cattgtggctacttgagatgaagca

SEQ ID NO: 5436974 - DNA, 25 bp, Homo sapien
aatctatagtagaagtgtggaagct

SEQ ID NO: 5436975 - DNA, 25 bp, Homo sapien
gaggtaggagtcacataattgtatc

SEQ ID NO: 5436976 - DNA, 25 bp, Homo sapien
gaaggtggagattaattcgaggtaa

SEQ ID NO: 5436977 - DNA, 25 bp, Homo sapien
tacacatgtcgatacagccatctcg

SEQ ID NO: 5436978 - DNA, 25 bp, Homo sapien
ccctactaggagagcatggctgcga

SEQ ID NO: 5436979 - DNA, 25 bp, Homo sapien
tgaataatcagccatgtgggcagct

SEQ ID NO: 5436980 - DNA, 25 bp, Homo sapien
gaaggcggtcataatacactcgaag

SEQ ID NO: 5436981 - DNA, 25 bp, Homo sapien
tccaatgggactcatggcaaggacc

SEQ ID NO: 5436982 - DNA, 25 bp, Homo sapien
acccaaagacgtttaatcacttctg

SEQ ID NO: 5436983 - DNA, 25 bp, Homo sapien
ctcatgaacccaaagacgtttaatc

SEQ ID NO: 5436984 - DNA, 25 bp, Homo sapien
caaagacgtttaatcacttctgtgg

SEQ ID NO: 5436985 - DNA, 25 bp, Homo sapien
catgaacccaaagacgtttaatcac

SEQ ID NO: 5436986 - DNA, 25 bp, Homo sapien
tacagagtcattgtgccatttacga

SEQ ID NO: 5436987 - DNA, 25 bp, Homo sapien
tagtgagatttagctggagtaggca

SEQ ID NO: 5436988 - DNA, 25 bp, Homo sapien
tgacacgggagaaatcacggaggtt

SEQ ID NO: 5436989 - DNA, 25 bp, Homo sapien
cacggaggttgaacaagtagtgaga

SEQ ID NO: 5436990 - DNA, 25 bp, Homo sapien
tgtcgcatgtatcgaggagttactg

SEQ ID NO: 5436991 - DNA, 25 bp, Homo sapien
ggagttactggatttcgaccaccac

SEQ ID NO: 5436992 - DNA, 25 bp, Homo sapien
taaatgccaagttaagattctagag

SEQ ID NO: 5436993 - DNA, 25 bp, Homo sapien
ttctagagaagattgtatacatgga

SEQ ID NO: 5436994 - DNA, 25 bp, Homo sapien
tacctcccgagcaggcatattgaca

SEQ ID NO: 5436995 - DNA, 25 bp, Homo sapien
cataccagttccagtggtctaacca

SEQ ID NO: 5436996 - DNA, 25 bp, Homo sapien
taactcaatgggaggttgagcccca

SEQ ID NO: 5436997 - DNA, 25 bp, Homo sapien
ctggaggtcccatagcacacatgat

SEQ ID NO: 5436998 - DNA, 25 bp, Homo sapien
ctcttgtccaattttgacatgacaa

SEQ ID NO: 5436999 - DNA, 25 bp, Homo sapien
tgtagatttccttatttagttgatt

SEQ ID NO: 5437000 - DNA, 25 bp, Homo sapien
aattagcagaggtttgtagatttcc

SEQ ID NO: 5437001 - DNA, 25 bp, Homo sapien
ctgtagtttgtgctgagaagttaat

SEQ ID NO: 5437002 - DNA, 25 bp, Homo sapien
tgagaagttaattagcagaggtttg

SEQ ID NO: 5437003 - DNA, 25 bp, Homo sapien
tgttggtcctacaaatattgaaggc

SEQ ID NO: 5437004 - DNA, 25 bp, Homo sapien
ttttgatgggtggtcagcaattcca

SEQ ID NO: 5437005 - DNA, 25 bp, Homo sapien
cagagtatcgaattgtgtccagagt

SEQ ID NO: 5437006 - DNA, 25 bp, Homo sapien
gcaattccattaatgcagagtatcg

SEQ ID NO: 5437007 - DNA, 25 bp, Homo sapien
tctgtacaagaagcaccaacggacc

SEQ ID NO: 5437008 - DNA, 25 bp, Homo sapien
gatgtttgctcagtaccactctgta

SEQ ID NO: 5437009 - DNA, 25 bp, Homo sapien
ggactttccattagttctcgaagaa

SEQ ID NO: 5437010 - DNA, 25 bp, Homo sapien
caacggaccagatcaatgaaaacag

SEQ ID NO: 5437011 - DNA, 25 bp, Homo sapien
taagtttctcgatcatttctctcct

SEQ ID NO: 5437012 - DNA, 25 bp, Homo sapien
ctcaagcaaagagtaagtttctcga

SEQ ID NO: 5437013 - DNA, 25 bp, Homo sapien
ccaagtttgtatcggaagtaggaga

SEQ ID NO: 5437014 - DNA, 25 bp, Homo sapien
cagtctattagattcattaaggacc

SEQ ID NO: 5437015 - DNA, 25 bp, Homo sapien
gactgacgcaggtaacagattcacc

SEQ ID NO: 5437016 - DNA, 25 bp, Homo sapien
gtggtctccagcctaacatgtgagg

SEQ ID NO: 5437017 - DNA, 25 bp, Homo sapien
gattcacccaggacaacatcagtgg

SEQ ID NO: 5437018 - DNA, 25 bp, Homo sapien
ccttttgaataacactgactgacgc

SEQ ID NO: 5437019 - DNA, 25 bp, Homo sapien
aattagattcatttgtggtgacatc

SEQ ID NO: 5437020 - DNA, 25 bp, Homo sapien
taatctccccactcatcagacatag

SEQ ID NO: 5437021 - DNA, 25 bp, Homo sapien
tctactgggccatcaaaaattaacc

SEQ ID NO: 5437022 - DNA, 25 bp, Homo sapien
gcaggggaagcaacttctaaatcca

SEQ ID NO: 5437023 - DNA, 25 bp, Homo sapien
cattcatgggacactgaatcaaact

SEQ ID NO: 5437024 - DNA, 25 bp, Homo sapien
accccatcagaccattcatgggaca

SEQ ID NO: 5437025 - DNA, 25 bp, Homo sapien
tgaatcaaactgtccgtacagttgg

SEQ ID NO: 5437026 - DNA, 25 bp, Homo sapien
caaactgtccgtacagttggcccat

SEQ ID NO: 5437027 - DNA, 25 bp, Homo sapien
ggtgacagacttaggatttaaaaca

SEQ ID NO: 5437028 - DNA, 25 bp, Homo sapien
tactaccaagacacaacagttttcc

SEQ ID NO: 5437029 - DNA, 25 bp, Homo sapien
tccagatactctctctactaccaag

SEQ ID NO: 5437030 - DNA, 25 bp, Homo sapien
ggcactcccgagcttgggacacaaa

SEQ ID NO: 5437031 - DNA, 25 bp, Homo sapien
tgagcagaaagtacgaagattccag

SEQ ID NO: 5437032 - DNA, 25 bp, Homo sapien
caacaatcataaaaccatgacgcac

SEQ ID NO: 5437033 - DNA, 25 bp, Homo sapien
catatatcatttagtgctccagcta

SEQ ID NO: 5437034 - DNA, 25 bp, Homo sapien
acgatatgcactagtttttcctcca

SEQ ID NO: 5437035 - DNA, 25 bp, Homo sapien
tccaaatggttctccaacaatcata

SEQ ID NO: 5437036 - DNA, 25 bp, Homo sapien
gcaaatcattgtaatctggttttgg

SEQ ID NO: 5437037 - DNA, 25 bp, Homo sapien
tcatatacttgaagaatcttctcgg

SEQ ID NO: 5437038 - DNA, 25 bp, Homo sapien
ttgcaaattcatggaggcacaattg

SEQ ID NO: 5437039 - DNA, 25 bp, Homo sapien
aattcatggaggcacaattgtcttt

SEQ ID NO: 5437040 - DNA, 25 bp, Homo sapien
caaagagtggtaaatcatgggataa

SEQ ID NO: 5437041 - DNA, 25 bp, Homo sapien
ctcaaagagtggtaaatcatgggat

SEQ ID NO: 5437042 - DNA, 25 bp, Homo sapien
caatgatagatctaagcagcaaaat

SEQ ID NO: 5437043 - DNA, 25 bp, Homo sapien
ttggcagatttacatcaatgataga

SEQ ID NO: 5437044 - DNA, 25 bp, Homo sapien
tacagacagtggtcgagcagtgaca

SEQ ID NO: 5437045 - DNA, 25 bp, Homo sapien
gcaatcatggcatagtcaggtacca

SEQ ID NO: 5437046 - DNA, 25 bp, Homo sapien
tcattgctactgtccgaaagagagc

SEQ ID NO: 5437047 - DNA, 25 bp, Homo sapien
tgaacacaagcgatacgtagccaca

SEQ ID NO: 5437048 - DNA, 25 bp, Homo sapien
aagtttacatggagttgaccacaga

SEQ ID NO: 5437049 - DNA, 25 bp, Homo sapien
gaagtttacatggagttgaccacag

SEQ ID NO: 5437050 - DNA, 25 bp, Homo sapien
agtttacatggagttgaccacagag

SEQ ID NO: 5437051 - DNA, 25 bp, Homo sapien
ggaagctgtcagtctaagcatgtga

SEQ ID NO: 5437052 - DNA, 25 bp, Homo sapien
tctgcagagggcattaacaaactca

SEQ ID NO: 5437053 - DNA, 25 bp, Homo sapien
catagcgaacaaatacaagaactgc

SEQ ID NO: 5437054 - DNA, 25 bp, Homo sapien
taaaaccatggaaaagtctgcagag

SEQ ID NO: 5437055 - DNA, 25 bp, Homo sapien
caaacatcagtatatcagcacctgc

SEQ ID NO: 5437056 - DNA, 25 bp, Homo sapien
cattgttataaagacagcacatgtg

SEQ ID NO: 5437057 - DNA, 25 bp, Homo sapien
gtcaagttttagttcagttccttca

SEQ ID NO: 5437058 - DNA, 25 bp, Homo sapien
ctgatcgcccagcatacccagggtt

SEQ ID NO: 5437059 - DNA, 25 bp, Homo sapien
tagtaaggatttgttgagcaaccac

SEQ ID NO: 5437060 - DNA, 25 bp, Homo sapien
ctctttggatagtaaggatttgttg

SEQ ID NO: 5437061 - DNA, 25 bp, Homo sapien
tgagcaaccacagagagtacttcca

SEQ ID NO: 5437062 - DNA, 25 bp, Homo sapien
gcccaggctccacaagataacagtc

SEQ ID NO: 5437063 - DNA, 25 bp, Homo sapien
gccaaatccttggtagtttcagtct

SEQ ID NO: 5437064 - DNA, 25 bp, Homo sapien
ccaaatccttggtagtttcagtctt

SEQ ID NO: 5437065 - DNA, 25 bp, Homo sapien
cttggtagtttcagtcttcccagtg

SEQ ID NO: 5437066 - DNA, 25 bp, Homo sapien
tgccaaatccttggtagtttcagtc

SEQ ID NO: 5437067 - DNA, 25 bp, Homo sapien
gcctaggggaattacccagatattc

SEQ ID NO: 5437068 - DNA, 25 bp, Homo sapien
ttcatatccatatcgcaaaccagca

SEQ ID NO: 5437069 - DNA, 25 bp, Homo sapien
gagtggtgtaataaccagcctaggg

SEQ ID NO: 5437070 - DNA, 25 bp, Homo sapien
ctgtaacatctatccgtgagtggtg

SEQ ID NO: 5437071 - DNA, 25 bp, Homo sapien
gagttacgcgattctgcatggacaa

SEQ ID NO: 5437072 - DNA, 25 bp, Homo sapien
gccagtagtacctaagctgacttaa

SEQ ID NO: 5437073 - DNA, 25 bp, Homo sapien
tctagcatggacatccagtaccaca

SEQ ID NO: 5437074 - DNA, 25 bp, Homo sapien
cagtaccacaagtgctcccagagtt

SEQ ID NO: 5437075 - DNA, 25 bp, Homo sapien
tgttcaaccacaagcagggagatcc

SEQ ID NO: 5437076 - DNA, 25 bp, Homo sapien
tagggatactcttatgccccagtgc

SEQ ID NO: 5437077 - DNA, 25 bp, Homo sapien
gttggtgagtggtagcttaaaagta

SEQ ID NO: 5437078 - DNA, 25 bp, Homo sapien
gagaaatccctctgagtgtggtggt

SEQ ID NO: 5437079 - DNA, 25 bp, Homo sapien
ccattggaatagctgtttgtacttc

SEQ ID NO: 5437080 - DNA, 25 bp, Homo sapien
ttatccccattggaatagctgtttg

SEQ ID NO: 5437081 - DNA, 25 bp, Homo sapien
tccccattggaatagctgtttgtac

SEQ ID NO: 5437082 - DNA, 25 bp, Homo sapien
ccccattggaatagctgtttgtact

SEQ ID NO: 5437083 - DNA, 25 bp, Homo sapien
attttgtataggcaaaagttgcatc

SEQ ID NO: 5437084 - DNA, 25 bp, Homo sapien
ccagttaattcgttcatattttgta

SEQ ID NO: 5437085 - DNA, 25 bp, Homo sapien
ttgtataggcaaaagttgcatctcc

SEQ ID NO: 5437086 - DNA, 25 bp, Homo sapien
aggcaaaagttgcatctccagttac

SEQ ID NO: 5437087 - DNA, 25 bp, Homo sapien
aaataggcgtagcagagaaatgcca

SEQ ID NO: 5437088 - DNA, 25 bp, Homo sapien
gaacaatgataaagggcagaatgct

SEQ ID NO: 5437089 - DNA, 25 bp, Homo sapien
tatgtagtagcctttcaagcatgca

SEQ ID NO: 5437090 - DNA, 25 bp, Homo sapien
taagagcagaagaagccacggaaag

SEQ ID NO: 5437091 - DNA, 25 bp, Homo sapien
taaaaatcatcagtataatcagcta

SEQ ID NO: 5437092 - DNA, 25 bp, Homo sapien
aaaaatcatcagtataatcagctac

SEQ ID NO: 5437093 - DNA, 25 bp, Homo sapien
ctaaaaatcatcagtataatcagct

SEQ ID NO: 5437094 - DNA, 25 bp, Homo sapien
catgtgagtaatgtctaaagtttcc

SEQ ID NO: 5437095 - DNA, 25 bp, Homo sapien
cgtaaattctacctttgcgattcct

SEQ ID NO: 5437096 - DNA, 25 bp, Homo sapien
taactctctctaattcaaccaacca

SEQ ID NO: 5437097 - DNA, 25 bp, Homo sapien
ggctgttgaaataatctctatgagt

SEQ ID NO: 5437098 - DNA, 25 bp, Homo sapien
cagatagtatctcaagaagttcatc

SEQ ID NO: 5437099 - DNA, 25 bp, Homo sapien
agatagtatctcaagaagttcatca

SEQ ID NO: 5437100 - DNA, 25 bp, Homo sapien
tcagatagtatctcaagaagttcat

SEQ ID NO: 5437101 - DNA, 25 bp, Homo sapien
tctcagatagtatctcaagaagttc

SEQ ID NO: 5437102 - DNA, 25 bp, Homo sapien
tccagatacagccacgtggcttgga

SEQ ID NO: 5437103 - DNA, 25 bp, Homo sapien
tgaagcagtaggagcttgccctccc

SEQ ID NO: 5437104 - DNA, 25 bp, Homo sapien
gctgtaaatcgtctgccttcctcag

SEQ ID NO: 5437105 - DNA, 25 bp, Homo sapien
gcatgacacttctcattatatctct

SEQ ID NO: 5437106 - DNA, 25 bp, Homo sapien
catctgatggctgcaaagggtaacc

SEQ ID NO: 5437107 - DNA, 25 bp, Homo sapien
gggcgcaaaccaggattacagatca

SEQ ID NO: 5437108 - DNA, 25 bp, Homo sapien
caaatcggtctatatatggttccag

SEQ ID NO: 5437109 - DNA, 25 bp, Homo sapien
gaaaggagatcctcgcatagtttgt

SEQ ID NO: 5437110 - DNA, 25 bp, Homo sapien
gcttagcataactctccaattcctc

SEQ ID NO: 5437111 - DNA, 25 bp, Homo sapien
tgagccttttttaggtaccgctgaa

SEQ ID NO: 5437112 - DNA, 25 bp, Homo sapien
aaaattcttctgattgcttagcata

SEQ ID NO: 5437113 - DNA, 25 bp, Homo sapien
ctgcagctaaatccaactttccatt

SEQ ID NO: 5437114 - DNA, 25 bp, Homo sapien
tagttcaatcatatcagttacctcc

SEQ ID NO: 5437115 - DNA, 25 bp, Homo sapien
ttgacatactcgatgaggaaggcga

SEQ ID NO: 5437116 - DNA, 25 bp, Homo sapien
tggaatccactaatctctgttctag

SEQ ID NO: 5437117 - DNA, 25 bp, Homo sapien
tctgctggagaaaagttgacatact

SEQ ID NO: 5437118 - DNA, 25 bp, Homo sapien
tgctaagagctttttcagctatcct

SEQ ID NO: 5437119 - DNA, 25 bp, Homo sapien
taagagctttttcagctatcctctc

SEQ ID NO: 5437120 - DNA, 25 bp, Homo sapien
tatttggaggagtgctaagagcttt

SEQ ID NO: 5437121 - DNA, 25 bp, Homo sapien
tgctgtatttggaggagtgctaaga

SEQ ID NO: 5437122 - DNA, 25 bp, Homo sapien
tgattaattcctcacagtgcatttc

SEQ ID NO: 5437123 - DNA, 25 bp, Homo sapien
gatgatctctgaacattttagctag

SEQ ID NO: 5437124 - DNA, 25 bp, Homo sapien
ccacaaataatatctgctcgcttca

SEQ ID NO: 5437125 - DNA, 25 bp, Homo sapien
gctcgcttcaccaaagctctgatta

SEQ ID NO: 5437126 - DNA, 25 bp, Homo sapien
ctttatggatgtgtactgtatttcc

SEQ ID NO: 5437127 - DNA, 25 bp, Homo sapien
cctctattagtttctggtatttgca

SEQ ID NO: 5437128 - DNA, 25 bp, Homo sapien
gaagttatcaacatctcgctcagct

SEQ ID NO: 5437129 - DNA, 25 bp, Homo sapien
taactatgattttctgcgaggaagt

SEQ ID NO: 5437130 - DNA, 25 bp, Homo sapien
tacttgtcatagagtctgaggtgct

SEQ ID NO: 5437131 - DNA, 25 bp, Homo sapien
aaagtcatacttgtcatagagtctg

SEQ ID NO: 5437132 - DNA, 25 bp, Homo sapien
ttgtcatagagtctgaggtgctcag

SEQ ID NO: 5437133 - DNA, 25 bp, Homo sapien
catagagtctgaggtgctcagtagg

SEQ ID NO: 5437134 - DNA, 25 bp, Homo sapien
atgggcttcaaggttgttggtttag

SEQ ID NO: 5437135 - DNA, 25 bp, Homo sapien
tgggcttcaaggttgttggtttaga

SEQ ID NO: 5437136 - DNA, 25 bp, Homo sapien
attatgggcttcaaggttgttggtt

SEQ ID NO: 5437137 - DNA, 25 bp, Homo sapien
tatgggcttcaaggttgttggttta

SEQ ID NO: 5437138 - DNA, 25 bp, Homo sapien
agagtaaagcgggaaatgccctggc

SEQ ID NO: 5437139 - DNA, 25 bp, Homo sapien
aagagtaaagcgggaaatgccctgg

SEQ ID NO: 5437140 - DNA, 25 bp, Homo sapien
tgggaagcacaaggattaagggatc

SEQ ID NO: 5437141 - DNA, 25 bp, Homo sapien
agtgcagcgttaacagtcctttccc

SEQ ID NO: 5437142 - DNA, 25 bp, Homo sapien
gaagtggtctccgagtgcagcgtta

SEQ ID NO: 5437143 - DNA, 25 bp, Homo sapien
ggaagcacaaggattaagggatcca

SEQ ID NO: 5437144 - DNA, 25 bp, Homo sapien
tttcctgacttatccaggagatcat

SEQ ID NO: 5437145 - DNA, 25 bp, Homo sapien
ttcctgacttatccaggagatcatg

SEQ ID NO: 5437146 - DNA, 25 bp, Homo sapien
atttcctgacttatccaggagatca

SEQ ID NO: 5437147 - DNA, 25 bp, Homo sapien
gaggcagtaagtttacaaatggtcc

SEQ ID NO: 5437148 - DNA, 25 bp, Homo sapien
atcaaagatatcactgatgccttcc

SEQ ID NO: 5437149 - DNA, 25 bp, Homo sapien
cagtggaagcttttccaaatcatca

SEQ ID NO: 5437150 - DNA, 25 bp, Homo sapien
caaggctcaggagacagtcctcttg

SEQ ID NO: 5437151 - DNA, 25 bp, Homo sapien
atagaaattgaccaatcgccatgtc

SEQ ID NO: 5437152 - DNA, 25 bp, Homo sapien
caagtcgttggaattgggtttagag

SEQ ID NO: 5437153 - DNA, 25 bp, Homo sapien
cgttggaattgggtttagagatatt

SEQ ID NO: 5437154 - DNA, 25 bp, Homo sapien
gaattgggtttagagatattcccat

SEQ ID NO: 5437155 - DNA, 25 bp, Homo sapien
tgaatccaagtcgttggaattgggt

SEQ ID NO: 5437156 - DNA, 25 bp, Homo sapien
aggagtaaacctcaattggtccttg

SEQ ID NO: 5437157 - DNA, 25 bp, Homo sapien
gacaggagtaaacctcaattggtcc

SEQ ID NO: 5437158 - DNA, 25 bp, Homo sapien
ctcttccggacaggagtaaacctca

SEQ ID NO: 5437159 - DNA, 25 bp, Homo sapien
tccggacaggagtaaacctcaattg

SEQ ID NO: 5437160 - DNA, 25 bp, Homo sapien
attctctgaatctgcggttaatagt

SEQ ID NO: 5437161 - DNA, 25 bp, Homo sapien
cctgactgagcttggttgcttcttt

SEQ ID NO: 5437162 - DNA, 25 bp, Homo sapien
ttcctgactgagcttggttgcttct

SEQ ID NO: 5437163 - DNA, 25 bp, Homo sapien
gattctctgaatctgcggttaatag

SEQ ID NO: 5437164 - DNA, 25 bp, Homo sapien
gctgaatgaacttcttggtgagcac

SEQ ID NO: 5437165 - DNA, 25 bp, Homo sapien
gagctgaatgaacttcttggtgagc

SEQ ID NO: 5437166 - DNA, 25 bp, Homo sapien
caggagctgaatgaacttcttggtg

SEQ ID NO: 5437167 - DNA, 25 bp, Homo sapien
tcaggagctgaatgaacttcttggt

SEQ ID NO: 5437168 - DNA, 25 bp, Homo sapien
atctgagaggtactgtgagcgcctt

SEQ ID NO: 5437169 - DNA, 25 bp, Homo sapien
caagggatgtatcatatggcgtttt

SEQ ID NO: 5437170 - DNA, 25 bp, Homo sapien
gatgtatcatatggcgtttttctga

SEQ ID NO: 5437171 - DNA, 25 bp, Homo sapien
tgtgagcgcctttcctagctctagg

SEQ ID NO: 5437172 - DNA, 25 bp, Homo sapien
ggctcagcaggggaagatgggaggc

SEQ ID NO: 5437173 - DNA, 25 bp, Homo sapien
ctggctcagcaggggaagatgggag

SEQ ID NO: 5437174 - DNA, 25 bp, Homo sapien
tcagcaggggaagatgggaggccag

SEQ ID NO: 5437175 - DNA, 25 bp, Homo sapien
ctcagcaggggaagatgggaggcca

SEQ ID NO: 5437176 - DNA, 25 bp, Homo sapien
gcctcaaggtcgagcaaagttggaa

SEQ ID NO: 5437177 - DNA, 25 bp, Homo sapien
gctttaatgagtttccggcaaggtg

SEQ ID NO: 5437178 - DNA, 25 bp, Homo sapien
ccaagaacactgaagggtgacacaa

SEQ ID NO: 5437179 - DNA, 25 bp, Homo sapien
tcattatgtgcagaagtgagcagct

SEQ ID NO: 5437180 - DNA, 25 bp, Homo sapien
aaaactgacagctttaatcatgacg

SEQ ID NO: 5437181 - DNA, 25 bp, Homo sapien
tatagtcactcaactcaggttcaaa

SEQ ID NO: 5437182 - DNA, 25 bp, Homo sapien
tgtctcaactcttggcacaaaactg

SEQ ID NO: 5437183 - DNA, 25 bp, Homo sapien
gcctcatgatgaaacctggatgttc

SEQ ID NO: 5437184 - DNA, 25 bp, Homo sapien
tgctgtcaccagttggcaattgctt

SEQ ID NO: 5437185 - DNA, 25 bp, Homo sapien
tgtaaagtcataagtgcagcagcac

SEQ ID NO: 5437186 - DNA, 25 bp, Homo sapien
ttaagtccgtgaaatcttgcatgga

SEQ ID NO: 5437187 - DNA, 25 bp, Homo sapien
gcagcacagttgaaaaaagattcca

SEQ ID NO: 5437188 - DNA, 25 bp, Homo sapien
cagctctaatgcatcctggcaatta

SEQ ID NO: 5437189 - DNA, 25 bp, Homo sapien
ccatgtgtctcatgataatgttctg

SEQ ID NO: 5437190 - DNA, 25 bp, Homo sapien
aatgttctgaaaacttgacagctct

SEQ ID NO: 5437191 - DNA, 25 bp, Homo sapien
ctttgatatcaactaaacgtaattt

SEQ ID NO: 5437192 - DNA, 25 bp, Homo sapien
gatccctaatataactgcttgcagc

SEQ ID NO: 5437193 - DNA, 25 bp, Homo sapien
gccacaaatctagtacagccagcat

SEQ ID NO: 5437194 - DNA, 25 bp, Homo sapien
gggttcattgcattcaagtgatccc

SEQ ID NO: 5437195 - DNA, 25 bp, Homo sapien
taaaattagtgtgccacaaatctag

SEQ ID NO: 5437196 - DNA, 25 bp, Homo sapien
ggctggaagttcatctgtcttctta

SEQ ID NO: 5437197 - DNA, 25 bp, Homo sapien
gaagttcatctgtcttcttatcatc

SEQ ID NO: 5437198 - DNA, 25 bp, Homo sapien
gttcatctgtcttcttatcatctcc

SEQ ID NO: 5437199 - DNA, 25 bp, Homo sapien
tggaagttcatctgtcttcttatca

SEQ ID NO: 5437200 - DNA, 25 bp, Homo sapien
gtacgtgttctagccaagaatcttc

SEQ ID NO: 5437201 - DNA, 25 bp, Homo sapien
tatggatttccttacactaagaaga

SEQ ID NO: 5437202 - DNA, 25 bp, Homo sapien
tggaactaaatccagtacgtgttct

SEQ ID NO: 5437203 - DNA, 25 bp, Homo sapien
cagataatgtaactatgctgtcagt

SEQ ID NO: 5437204 - DNA, 25 bp, Homo sapien
caattccatggtgaatataatagta

SEQ ID NO: 5437205 - DNA, 25 bp, Homo sapien
ggtctgtatcaattccatggtgaat

SEQ ID NO: 5437206 - DNA, 25 bp, Homo sapien
tacatggtctgtatcaattccatgg

SEQ ID NO: 5437207 - DNA, 25 bp, Homo sapien
gggctacatggtctgtatcaattcc

SEQ ID NO: 5437208 - DNA, 25 bp, Homo sapien
tagcagtgttgtctttgatatttac

SEQ ID NO: 5437209 - DNA, 25 bp, Homo sapien
ggatttaggacatttccaactggcc

SEQ ID NO: 5437210 - DNA, 25 bp, Homo sapien
tttggtacaattcacataggtatta

SEQ ID NO: 5437211 - DNA, 25 bp, Homo sapien
tgagatctcctaaatgttacaaatg

SEQ ID NO: 5437212 - DNA, 25 bp, Homo sapien
ggtcggttttggaattgtgcttcca

SEQ ID NO: 5437213 - DNA, 25 bp, Homo sapien
tagcagaagcggtcggttttggaat

SEQ ID NO: 5437214 - DNA, 25 bp, Homo sapien
gggacagctgagtctaagtcagcat

SEQ ID NO: 5437215 - DNA, 25 bp, Homo sapien
gacagctgagtctaagtcagcatct

SEQ ID NO: 5437216 - DNA, 25 bp, Homo sapien
tatatcagaggttgtccatgagggc

SEQ ID NO: 5437217 - DNA, 25 bp, Homo sapien
gacaaagtggttacagagcccattc

SEQ ID NO: 5437218 - DNA, 25 bp, Homo sapien
cttactcactatcataggaataata

SEQ ID NO: 5437219 - DNA, 25 bp, Homo sapien
taatatgggagaaaccaaccccatg

SEQ ID NO: 5437220 - DNA, 25 bp, Homo sapien
cctttgatttggaagtagatggtcc

SEQ ID NO: 5437221 - DNA, 25 bp, Homo sapien
acataactatcatcaacttggtggg

SEQ ID NO: 5437222 - DNA, 25 bp, Homo sapien
gttctttatgtggagatttgccctt

SEQ ID NO: 5437223 - DNA, 25 bp, Homo sapien
caagagtacttctaaagttttctcg

SEQ ID NO: 5437224 - DNA, 25 bp, Homo sapien
gatgtagaggcaaattctgaccaca

SEQ ID NO: 5437225 - DNA, 25 bp, Homo sapien
cagctcttatagcatttacaacagc

SEQ ID NO: 5437226 - DNA, 25 bp, Homo sapien
caatcaattattttctgagggaaga

SEQ ID NO: 5437227 - DNA, 25 bp, Homo sapien
aactaaatattgtctggtctctctc

SEQ ID NO: 5437228 - DNA, 25 bp, Homo sapien
atgggactgttcatttttaacacta

SEQ ID NO: 5437229 - DNA, 25 bp, Homo sapien
catgggactgttcatttttaacact

SEQ ID NO: 5437230 - DNA, 25 bp, Homo sapien
aatggaatgatggagctgcctgctg

SEQ ID NO: 5437231 - DNA, 25 bp, Homo sapien
cagtagatcttattcaagcctgtga

SEQ ID NO: 5437232 - DNA, 25 bp, Homo sapien
gaatggtcatggtgtgcaccatttg

SEQ ID NO: 5437233 - DNA, 25 bp, Homo sapien
tctcaaacagatcagaacatctgga

SEQ ID NO: 5437234 - DNA, 25 bp, Homo sapien
tttttccatgaaatgcacgagtgtt

SEQ ID NO: 5437235 - DNA, 25 bp, Homo sapien
gggagaaggctaatgatgataggtt

SEQ ID NO: 5437236 - DNA, 25 bp, Homo sapien
aaaagggagaaggctaatgatgata

SEQ ID NO: 5437237 - DNA, 25 bp, Homo sapien
aagggagaaggctaatgatgatagg

SEQ ID NO: 5437238 - DNA, 25 bp, Homo sapien
ttggcaggtgtcataaaaagggaga

SEQ ID NO: 5437239 - DNA, 25 bp, Homo sapien
gtaaagctcttgctggtgccttgaa

SEQ ID NO: 5437240 - DNA, 25 bp, Homo sapien
tagacagctgtggtaaagctcttgc

SEQ ID NO: 5437241 - DNA, 25 bp, Homo sapien
agacagctgtggtaaagctcttgct

SEQ ID NO: 5437242 - DNA, 25 bp, Homo sapien
gaagtatgatggtatattggtaaat

SEQ ID NO: 5437243 - DNA, 25 bp, Homo sapien
aaggaatgaagtatgatggtatatt

SEQ ID NO: 5437244 - DNA, 25 bp, Homo sapien
tcaagcttgaaaagtagtaaacaaa

SEQ ID NO: 5437245 - DNA, 25 bp, Homo sapien
gtaaacaaacattatcataaaggaa

SEQ ID NO: 5437246 - DNA, 25 bp, Homo sapien
agaaatcttactggtttcttggatt

SEQ ID NO: 5437247 - DNA, 25 bp, Homo sapien
tagaaatcttactggtttcttggat

SEQ ID NO: 5437248 - DNA, 25 bp, Homo sapien
atttttctttgctggccgatttatc

SEQ ID NO: 5437249 - DNA, 25 bp, Homo sapien
caggatcccagcaggtagttttctc

SEQ ID NO: 5437250 - DNA, 25 bp, Homo sapien
ggagacttccttgcaaactttcagg

SEQ ID NO: 5437251 - DNA, 25 bp, Homo sapien
atcccagcaggtagttttctcctcc

SEQ ID NO: 5437252 - DNA, 25 bp, Homo sapien
atcacagagggagacttccttgcaa

SEQ ID NO: 5437253 - DNA, 25 bp, Homo sapien
agcaaatgtttgtccacccactggg

SEQ ID NO: 5437254 - DNA, 25 bp, Homo sapien
ctcccatgaggtcttaaatctaaag

SEQ ID NO: 5437255 - DNA, 25 bp, Homo sapien
tcttctcttcgagcagagagtctct

SEQ ID NO: 5437256 - DNA, 25 bp, Homo sapien
ccatgaggtcttaaatctaaaggct

SEQ ID NO: 5437257 - DNA, 25 bp, Homo sapien
ttgatcccgactctctccttcaggt

SEQ ID NO: 5437258 - DNA, 25 bp, Homo sapien
ctttccacagacattgtacttagca

SEQ ID NO: 5437259 - DNA, 25 bp, Homo sapien
ggtgccctcagcacacatgttgatc

SEQ ID NO: 5437260 - DNA, 25 bp, Homo sapien
cttagcagcaagatagctgaggatg

SEQ ID NO: 5437261 - DNA, 25 bp, Homo sapien
gaacccctaggacgatagaggcagg

SEQ ID NO: 5437262 - DNA, 25 bp, Homo sapien
ccgcggaacccctaggacgatagag

SEQ ID NO: 5437263 - DNA, 25 bp, Homo sapien
ttctgggttgctcctgcccgcggaa

SEQ ID NO: 5437264 - DNA, 25 bp, Homo sapien
ggacgcgctggcctcaccggtgctt

SEQ ID NO: 5437265 - DNA, 25 bp, Homo sapien
gcgcaggttccatttccggtcatct

SEQ ID NO: 5437266 - DNA, 25 bp, Homo sapien
agccgtctagcgtccgggcagcgtt

SEQ ID NO: 5437267 - DNA, 25 bp, Homo sapien
ttgttgctaagcaacgggcccgcgc

SEQ ID NO: 5437268 - DNA, 25 bp, Homo sapien
ctgccagtgttgtgaggtctaaggt

SEQ ID NO: 5437269 - DNA, 25 bp, Homo sapien
cccagcagttccgaggtgtttagaa

SEQ ID NO: 5437270 - DNA, 25 bp, Homo sapien
ggtgtactacgtttagcagctgcca

SEQ ID NO: 5437271 - DNA, 25 bp, Homo sapien
gagggtcatagtccacatgagcagg

SEQ ID NO: 5437272 - DNA, 25 bp, Homo sapien
tgccaaaagaactagtcccagcagt

SEQ ID NO: 5437273 - DNA, 25 bp, Homo sapien
caagtgtccaaagaattgcctctca

SEQ ID NO: 5437274 - DNA, 25 bp, Homo sapien
tgtaagtcaagtgtccaaagaattg

SEQ ID NO: 5437275 - DNA, 25 bp, Homo sapien
gcctctcaaccttatgtctgtggac

SEQ ID NO: 5437276 - DNA, 25 bp, Homo sapien
gactttgagaatgtgctgtacttca

SEQ ID NO: 5437277 - DNA, 25 bp, Homo sapien
tatgtgttctgaagtatttgtcaag

SEQ ID NO: 5437278 - DNA, 25 bp, Homo sapien
tcatagattatgtgttctgaagtat

SEQ ID NO: 5437279 - DNA, 25 bp, Homo sapien
ttctgaagtatttgtcaagtgctgg

SEQ ID NO: 5437280 - DNA, 25 bp, Homo sapien
tgttctgaagtatttgtcaagtgct

SEQ ID NO: 5437281 - DNA, 25 bp, Homo sapien
cactaggccaggtatagaatctcac

SEQ ID NO: 5437282 - DNA, 25 bp, Homo sapien
tacacggtccatgatcagctactcc

SEQ ID NO: 5437283 - DNA, 25 bp, Homo sapien
tgcaaaagtacacgtggtcagagct

SEQ ID NO: 5437284 - DNA, 25 bp, Homo sapien
tgtatggccctgtgctctacacaac

SEQ ID NO: 5437285 - DNA, 25 bp, Homo sapien
aggaagtggagtattagcatgtcta

SEQ ID NO: 5437286 - DNA, 25 bp, Homo sapien
attgaggaagtggagtattagcatg

SEQ ID NO: 5437287 - DNA, 25 bp, Homo sapien
cttgattgggctgaatcaaggcaaa

SEQ ID NO: 5437288 - DNA, 25 bp, Homo sapien
tgaggaagtggagtattagcatgtc

SEQ ID NO: 5437289 - DNA, 25 bp, Homo sapien
gtcataccctgcaatataattgttc

SEQ ID NO: 5437290 - DNA, 25 bp, Homo sapien
atagtcataccctgcaatataattg

SEQ ID NO: 5437291 - DNA, 25 bp, Homo sapien
taccctgcaatataattgttctcag

SEQ ID NO: 5437292 - DNA, 25 bp, Homo sapien
cataccctgcaatataattgttctc

SEQ ID NO: 5437293 - DNA, 25 bp, Homo sapien
cagatgggcctcttagagcaaacct

SEQ ID NO: 5437294 - DNA, 25 bp, Homo sapien
actgtcttcacacactgtccatgtg

SEQ ID NO: 5437295 - DNA, 25 bp, Homo sapien
agtgtcagatgggcctcttagagca

SEQ ID NO: 5437296 - DNA, 25 bp, Homo sapien
ctgtcttcacacactgtccatgtgg

SEQ ID NO: 5437297 - DNA, 25 bp, Homo sapien
atagataatgactgtgccccatgaa

SEQ ID NO: 5437298 - DNA, 25 bp, Homo sapien
ggcatagataatgactgtgccccat

SEQ ID NO: 5437299 - DNA, 25 bp, Homo sapien
cttaaagggcatagataatgactgt

SEQ ID NO: 5437300 - DNA, 25 bp, Homo sapien
taaagggcatagataatgactgtgc

SEQ ID NO: 5437301 - DNA, 25 bp, Homo sapien
aggggtaaggattagagctttcgat

SEQ ID NO: 5437302 - DNA, 25 bp, Homo sapien
taggggtaaggattagagctttcga

SEQ ID NO: 5437303 - DNA, 25 bp, Homo sapien
tatttgattcaacctccagctaaac

SEQ ID NO: 5437304 - DNA, 25 bp, Homo sapien
agaagtcctcttcagcagatagctg

SEQ ID NO: 5437305 - DNA, 25 bp, Homo sapien
cagaggtgagggctaagccattgct

SEQ ID NO: 5437306 - DNA, 25 bp, Homo sapien
tgtttggatgttcagacagcaagag

SEQ ID NO: 5437307 - DNA, 25 bp, Homo sapien
tgtgggtcaataatgtcagggccag

SEQ ID NO: 5437308 - DNA, 25 bp, Homo sapien
ctgtgggtcaataatgtcagggcca

SEQ ID NO: 5437309 - DNA, 25 bp, Homo sapien
caataatgtcagggccagcatctcc

SEQ ID NO: 5437310 - DNA, 25 bp, Homo sapien
aataatgtcagggccagcatctcca

SEQ ID NO: 5437311 - DNA, 25 bp, Homo sapien
gccaaattttctctcttcaagccac

SEQ ID NO: 5437312 - DNA, 25 bp, Homo sapien
aaattttctctcttcaagccacacc

SEQ ID NO: 5437313 - DNA, 25 bp, Homo sapien
tgccaaattttctctcttcaagcca

SEQ ID NO: 5437314 - DNA, 25 bp, Homo sapien
tttgccaaattttctctcttcaagc

SEQ ID NO: 5437315 - DNA, 25 bp, Homo sapien
tctcagcagaagactggctgcaatc

SEQ ID NO: 5437316 - DNA, 25 bp, Homo sapien
actctcagcagaagactggctgcaa

SEQ ID NO: 5437317 - DNA, 25 bp, Homo sapien
tcagcagaagactggctgcaatctt

SEQ ID NO: 5437318 - DNA, 25 bp, Homo sapien
tcttcactctcagcagaagactggc

SEQ ID NO: 5437319 - DNA, 25 bp, Homo sapien
gatgacctaggtcaaaggctagaac

SEQ ID NO: 5437320 - DNA, 25 bp, Homo sapien
caaaggctagaacatgcagacatac

SEQ ID NO: 5437321 - DNA, 25 bp, Homo sapien
gagggttcatagatgacctaggtca

SEQ ID NO: 5437322 - DNA, 25 bp, Homo sapien
tattagacacaaagagggttcatag

SEQ ID NO: 5437323 - DNA, 25 bp, Homo sapien
tcataagaaaagagctcctgggcgg

SEQ ID NO: 5437324 - DNA, 25 bp, Homo sapien
ccacgaccgggctgcatagaaggtg

SEQ ID NO: 5437325 - DNA, 25 bp, Homo sapien
gaaccacacgtgcaagagatctagg

SEQ ID NO: 5437326 - DNA, 25 bp, Homo sapien
ggagctcgaatcctgctgtgaacca

SEQ ID NO: 5437327 - DNA, 25 bp, Homo sapien
cattaaaggaattcaccatgtggtc

SEQ ID NO: 5437328 - DNA, 25 bp, Homo sapien
tccttaacaaatgctgaagacatta

SEQ ID NO: 5437329 - DNA, 25 bp, Homo sapien
gcaaagaatcttgaaaagtgtctaa

SEQ ID NO: 5437330 - DNA, 25 bp, Homo sapien
tcctttggcacctgagttgagcaca

SEQ ID NO: 5437331 - DNA, 25 bp, Homo sapien
tcagtcttgctaccgctgactcggg

SEQ ID NO: 5437332 - DNA, 25 bp, Homo sapien
gttaaaatacgaaggcatgctactc

SEQ ID NO: 5437333 - DNA, 25 bp, Homo sapien
cagtaagctgtctgagtgtgtcaac

SEQ ID NO: 5437334 - DNA, 25 bp, Homo sapien
tgtgttaatagacctaccggtgctg

SEQ ID NO: 5437335 - DNA, 25 bp, Homo sapien
aagtcttgtcttcagaggaccttac

SEQ ID NO: 5437336 - DNA, 25 bp, Homo sapien
ctaacagagcaaatctgaaacaagt

SEQ ID NO: 5437337 - DNA, 25 bp, Homo sapien
gagtcatcgaaacgaaatcttttgg

SEQ ID NO: 5437338 - DNA, 25 bp, Homo sapien
gaggaccttacagaatgatcctgag

SEQ ID NO: 5437339 - DNA, 25 bp, Homo sapien
tggtgatgtgtgagttaacaacata

SEQ ID NO: 5437340 - DNA, 25 bp, Homo sapien
aaagtttcttccgaataatctacat

SEQ ID NO: 5437341 - DNA, 25 bp, Homo sapien
cttgattatcttctcccacaaatgg

SEQ ID NO: 5437342 - DNA, 25 bp, Homo sapien
cattaacttgagaaatattgaggta

SEQ ID NO: 5437343 - DNA, 25 bp, Homo sapien
tgacctgatgatccacctgccttgg

SEQ ID NO: 5437344 - DNA, 25 bp, Homo sapien
gagatagggttctgctatgttggcc

SEQ ID NO: 5437345 - DNA, 25 bp, Homo sapien
acctgatgatccacctgccttggcc

SEQ ID NO: 5437346 - DNA, 25 bp, Homo sapien
cctgacctgatgatccacctgcctt

SEQ ID NO: 5437347 - DNA, 25 bp, Homo sapien
ccggccaactcttttagacctagat

SEQ ID NO: 5437348 - DNA, 25 bp, Homo sapien
tctccctttgtgaggtggagcccgg

SEQ ID NO: 5437349 - DNA, 25 bp, Homo sapien
tgtacttttggctcagaagttaagt

SEQ ID NO: 5437350 - DNA, 25 bp, Homo sapien
tactcttggagtcaaagaaccccag

SEQ ID NO: 5437351 - DNA, 25 bp, Homo sapien
atgggatcatagttcaggatttctg

SEQ ID NO: 5437352 - DNA, 25 bp, Homo sapien
gaatcgaattacatgctctaaaata

SEQ ID NO: 5437353 - DNA, 25 bp, Homo sapien
cacttacatattcagtgtcccctga

SEQ ID NO: 5437354 - DNA, 25 bp, Homo sapien
taaaatatagttctacagaggtatc

SEQ ID NO: 5437355 - DNA, 25 bp, Homo sapien
tcaaatccttttaactgaatcgaat

SEQ ID NO: 5437356 - DNA, 25 bp, Homo sapien
tggtgttcccatgatttcccgaagt

SEQ ID NO: 5437357 - DNA, 25 bp, Homo sapien
gaagttcacacgcatgccctatttt

SEQ ID NO: 5437358 - DNA, 25 bp, Homo sapien
catgatttcccgaagttcacacgca

SEQ ID NO: 5437359 - DNA, 25 bp, Homo sapien
cacgcatgccctatttttcgagaca

SEQ ID NO: 5437360 - DNA, 25 bp, Homo sapien
tccccgagagggtatatgctgctca

SEQ ID NO: 5437361 - DNA, 25 bp, Homo sapien
aatctactattttaatgtccccgag

SEQ ID NO: 5437362 - DNA, 25 bp, Homo sapien
ttaatgtccccgagagggtatatgc

SEQ ID NO: 5437363 - DNA, 25 bp, Homo sapien
gagggtatatgctgctcagtaatat

SEQ ID NO: 5437364 - DNA, 25 bp, Homo sapien
caaggtgtacaatgttattctgatg

SEQ ID NO: 5437365 - DNA, 25 bp, Homo sapien
tttgtttaatgagtctgataacatc

SEQ ID NO: 5437366 - DNA, 25 bp, Homo sapien
tttcagccaactcaggtaaacacag

SEQ ID NO: 5437367 - DNA, 25 bp, Homo sapien
gtttaatgagtctgataacatcatt

SEQ ID NO: 5437368 - DNA, 25 bp, Homo sapien
tagtagtgaactccaaaataaggta

SEQ ID NO: 5437369 - DNA, 25 bp, Homo sapien
atacacactgcctagcggcccttgg

SEQ ID NO: 5437370 - DNA, 25 bp, Homo sapien
gcccttggtctgcatgtcagtattc

SEQ ID NO: 5437371 - DNA, 25 bp, Homo sapien
cgtgcctggccgagacattaatttt

SEQ ID NO: 5437372 - DNA, 25 bp, Homo sapien
tcccagtgcctaggaagagacagga

SEQ ID NO: 5437373 - DNA, 25 bp, Homo sapien
taactaggctaggtgaactgggaca

SEQ ID NO: 5437374 - DNA, 25 bp, Homo sapien
tgggtttcactctagctctgtcact

SEQ ID NO: 5437375 - DNA, 25 bp, Homo sapien
gagcacaaacatcctagaagaatca

SEQ ID NO: 5437376 - DNA, 25 bp, Homo sapien
tataatgagccaacaaacattaatt

SEQ ID NO: 5437377 - DNA, 25 bp, Homo sapien
acatctcgcctttccaaattttggg

SEQ ID NO: 5437378 - DNA, 25 bp, Homo sapien
ccagccaatatcagctattataatg

SEQ ID NO: 5437379 - DNA, 25 bp, Homo sapien
tgcaaatctagccaacatctcgcct

SEQ ID NO: 5437380 - DNA, 25 bp, Homo sapien
tcaaaatgcagcactgaaaacttag

SEQ ID NO: 5437381 - DNA, 25 bp, Homo sapien
tagtatgtccaattagataatacct

SEQ ID NO: 5437382 - DNA, 25 bp, Homo sapien
aaaatgcagcactgaaaacttagta

SEQ ID NO: 5437383 - DNA, 25 bp, Homo sapien
acttagtatgtccaattagataata

SEQ ID NO: 5437384 - DNA, 25 bp, Homo sapien
gattgtgtgctgctcatatggaagg

SEQ ID NO: 5437385 - DNA, 25 bp, Homo sapien
aaaaagaggctatagttgttccaga

SEQ ID NO: 5437386 - DNA, 25 bp, Homo sapien
tattgcccagcctggcgcgtagtgg

SEQ ID NO: 5437387 - DNA, 25 bp, Homo sapien
tcaaaaaataggttaggtagaggca

SEQ ID NO: 5437388 - DNA, 25 bp, Homo sapien
gggaaccactgataagcttgggaca

SEQ ID NO: 5437389 - DNA, 25 bp, Homo sapien
cataggaagtagcttgaaagggaac

SEQ ID NO: 5437390 - DNA, 25 bp, Homo sapien
gacttgaattggagctatgagacta

SEQ ID NO: 5437391 - DNA, 25 bp, Homo sapien
aagtcctaaaaataacgatgctccg

SEQ ID NO: 5437392 - DNA, 25 bp, Homo sapien
catttcagccagaggtatagagatc

SEQ ID NO: 5437393 - DNA, 25 bp, Homo sapien
aaaacctgactttattgccacctga

SEQ ID NO: 5437394 - DNA, 25 bp, Homo sapien
ccccaaaagcggaaggcatagtaat

SEQ ID NO: 5437395 - DNA, 25 bp, Homo sapien
tgagactactaaatgtgacaatgcc

SEQ ID NO: 5437396 - DNA, 25 bp, Homo sapien
taaacgtgacagacaatcatgcaac

SEQ ID NO: 5437397 - DNA, 25 bp, Homo sapien
cattaaaaactattggcacccaagg

SEQ ID NO: 5437398 - DNA, 25 bp, Homo sapien
tataacacgccttaagacggttctg

SEQ ID NO: 5437399 - DNA, 25 bp, Homo sapien
cagccaatctatttcgtggaacaaa

SEQ ID NO: 5437400 - DNA, 25 bp, Homo sapien
tctgtgctgttagtttttgtgtatg

SEQ ID NO: 5437401 - DNA, 25 bp, Homo sapien
agttcttgtcacacctttatcattc

SEQ ID NO: 5437402 - DNA, 25 bp, Homo sapien
atttctccacattcctcaaatgttg

SEQ ID NO: 5437403 - DNA, 25 bp, Homo sapien
gtatgtgcccgaggctatacattta

SEQ ID NO: 5437404 - DNA, 25 bp, Homo sapien
gtaaaatttctgctcgacaatcctg

SEQ ID NO: 5437405 - DNA, 25 bp, Homo sapien
gggacaagactttgccaattcaagc

SEQ ID NO: 5437406 - DNA, 25 bp, Homo sapien
gcacagcaatctcgtgtaaaatttc

SEQ ID NO: 5437407 - DNA, 25 bp, Homo sapien
cttggccagtagattttgatataca

SEQ ID NO: 5437408 - DNA, 25 bp, Homo sapien
gaaaaagccaggacttgcctctgcc

SEQ ID NO: 5437409 - DNA, 25 bp, Homo sapien
tgcctctgcccttaaggtaaaaggc

SEQ ID NO: 5437410 - DNA, 25 bp, Homo sapien
caacatctgcaacgtgaaaaagcca

SEQ ID NO: 5437411 - DNA, 25 bp, Homo sapien
tacctccagaactaaaatcaaactg

SEQ ID NO: 5437412 - DNA, 25 bp, Homo sapien
cactaagaggtacagtaggcagggc

SEQ ID NO: 5437413 - DNA, 25 bp, Homo sapien
tgcacagcctcatgtaacgacagag

SEQ ID NO: 5437414 - DNA, 25 bp, Homo sapien
tgaactcggcagtccactatgctga

SEQ ID NO: 5437415 - DNA, 25 bp, Homo sapien
taagactggaccctaggtaacagca

SEQ ID NO: 5437416 - DNA, 25 bp, Homo sapien
tggaatttgaggagttgtagttagt

SEQ ID NO: 5437417 - DNA, 25 bp, Homo sapien
ggagttgtagttagtaggcctgaaa

SEQ ID NO: 5437418 - DNA, 25 bp, Homo sapien
gaaatacttcggcaatcaaatctcc

SEQ ID NO: 5437419 - DNA, 25 bp, Homo sapien
tttgaggagttgtagttagtaggcc

SEQ ID NO: 5437420 - DNA, 25 bp, Homo sapien
gttaggtgattcccaggtctgcttc

SEQ ID NO: 5437421 - DNA, 25 bp, Homo sapien
ttaggtgattcccaggtctgcttct

SEQ ID NO: 5437422 - DNA, 25 bp, Homo sapien
ggtacagtgcaagtcacaagggcat

SEQ ID NO: 5437423 - DNA, 25 bp, Homo sapien
aagggcatatcgctattgttccaca

SEQ ID NO: 5437424 - DNA, 25 bp, Homo sapien
tgaagaaagcttcgattttgctgcc

SEQ ID NO: 5437425 - DNA, 25 bp, Homo sapien
cactagcactggatgggacggttta

SEQ ID NO: 5437426 - DNA, 25 bp, Homo sapien
tacagcatgacacataaaggcctct

SEQ ID NO: 5437427 - DNA, 25 bp, Homo sapien
gctttgcctaaaaaccacaggctga

SEQ ID NO: 5437428 - DNA, 25 bp, Homo sapien
gcctctgaggccaagtatacaccag

SEQ ID NO: 5437429 - DNA, 25 bp, Homo sapien
tgattccttcattagctccccagta

SEQ ID NO: 5437430 - DNA, 25 bp, Homo sapien
tccgaggcagatgagtttaaaactt

SEQ ID NO: 5437431 - DNA, 25 bp, Homo sapien
ttttgcaccgcttctatggaccagt

SEQ ID NO: 5437432 - DNA, 25 bp, Homo sapien
taacacagcgattagtcaaacctcc

SEQ ID NO: 5437433 - DNA, 25 bp, Homo sapien
tcaatgatcccaagagaaaccgcaa

SEQ ID NO: 5437434 - DNA, 25 bp, Homo sapien
cacgtcaaacgtccctggcaaggtt

SEQ ID NO: 5437435 - DNA, 25 bp, Homo sapien
ttgaaaacgtaaagtggccacacca

SEQ ID NO: 5437436 - DNA, 25 bp, Homo sapien
cagagtgcctctagtccagacagaa

SEQ ID NO: 5437437 - DNA, 25 bp, Homo sapien
taagtgggtcacaaggcatcaaagc

SEQ ID NO: 5437438 - DNA, 25 bp, Homo sapien
cacggaaacagctgtagcccgtctt

SEQ ID NO: 5437439 - DNA, 25 bp, Homo sapien
gatctctcgctggttttaaaacact

SEQ ID NO: 5437440 - DNA, 25 bp, Homo sapien
gtaactgaaaacgtcccacaagatg

SEQ ID NO: 5437441 - DNA, 25 bp, Homo sapien
cactgttcccaagcagtaactgaaa

SEQ ID NO: 5437442 - DNA, 25 bp, Homo sapien
ggagcaggacgcgtccacgagtccc

SEQ ID NO: 5437443 - DNA, 25 bp, Homo sapien
tccacgagtcccgatgggaacgcgc

SEQ ID NO: 5437444 - DNA, 25 bp, Homo sapien
acgcgtccacgagtcccgatgggaa

SEQ ID NO: 5437445 - DNA, 25 bp, Homo sapien
gagtcccgatgggaacgcgcccacg

SEQ ID NO: 5437446 - DNA, 25 bp, Homo sapien
caagcccctctcagccggaccgtac

SEQ ID NO: 5437447 - DNA, 25 bp, Homo sapien
tggccttgctgtggaagggacccgc

SEQ ID NO: 5437448 - DNA, 25 bp, Homo sapien
gcgccagcagcaatcagccacctca

SEQ ID NO: 5437449 - DNA, 25 bp, Homo sapien
cagggaacccggactccagccgcaa

SEQ ID NO: 5437450 - DNA, 25 bp, Homo sapien
gggtcctccttcctcacgtatgagg

SEQ ID NO: 5437451 - DNA, 25 bp, Homo sapien
gaggcggctggttccatcgcagccc

SEQ ID NO: 5437452 - DNA, 25 bp, Homo sapien
tatgaggtctctgtaccgaggcggc

SEQ ID NO: 5437453 - DNA, 25 bp, Homo sapien
tccttcctcacgtatgaggtctctg

SEQ ID NO: 5437454 - DNA, 25 bp, Homo sapien
cgggggccgccacaggacgagttct

SEQ ID NO: 5437455 - DNA, 25 bp, Homo sapien
cgccgggggccgccacaggacgagt

SEQ ID NO: 5437456 - DNA, 25 bp, Homo sapien
ccacgccgggggccgccacaggacg

SEQ ID NO: 5437457 - DNA, 25 bp, Homo sapien
cgccccacgccgggggccgccacag

SEQ ID NO: 5437458 - DNA, 25 bp, Homo sapien
gggagctccgaacgtggcaggatcc

SEQ ID NO: 5437459 - DNA, 25 bp, Homo sapien
gcgccagggagctccgaacgtggca

SEQ ID NO: 5437460 - DNA, 25 bp, Homo sapien
cgggcgaggcgccagggagctccga

SEQ ID NO: 5437461 - DNA, 25 bp, Homo sapien
ctccgaacgtggcaggatccacttt

SEQ ID NO: 5437462 - DNA, 25 bp, Homo sapien
gaagcttgcagtcgcggtttgaaaa

SEQ ID NO: 5437463 - DNA, 25 bp, Homo sapien
cagacaagggccgacggttgtgacc

SEQ ID NO: 5437464 - DNA, 25 bp, Homo sapien
ggtttgaaaactgcagccgcgtctg

SEQ ID NO: 5437465 - DNA, 25 bp, Homo sapien
gtgaagtgactcctggcgacagcag

SEQ ID NO: 5437466 - DNA, 25 bp, Homo sapien
tcttgagagtcttccttaggaccgg

SEQ ID NO: 5437467 - DNA, 25 bp, Homo sapien
ttcttgagagtcttccttaggaccg

SEQ ID NO: 5437468 - DNA, 25 bp, Homo sapien
cttgagagtcttccttaggaccgga

SEQ ID NO: 5437469 - DNA, 25 bp, Homo sapien
caaagacctattttctgactcttct

SEQ ID NO: 5437470 - DNA, 25 bp, Homo sapien
ccgtgtcaaagatatatgttcctgc

SEQ ID NO: 5437471 - DNA, 25 bp, Homo sapien
tcccttgagtaggaaatctccaggt

SEQ ID NO: 5437472 - DNA, 25 bp, Homo sapien
cattctgtggtcattgcttctgacc

SEQ ID NO: 5437473 - DNA, 25 bp, Homo sapien
taaactcattcatcaccgtgtcaaa

SEQ ID NO: 5437474 - DNA, 25 bp, Homo sapien
ggtaatggcacgacactcaccatat

SEQ ID NO: 5437475 - DNA, 25 bp, Homo sapien
gatcctctccggtaatggcacgaca

SEQ ID NO: 5437476 - DNA, 25 bp, Homo sapien
gccagggaaggtgatcctctccggt

SEQ ID NO: 5437477 - DNA, 25 bp, Homo sapien
gaaggtgatcctctccggtaatggc

SEQ ID NO: 5437478 - DNA, 25 bp, Homo sapien
tactcagatggagatgtcgcagtgc

SEQ ID NO: 5437479 - DNA, 25 bp, Homo sapien
tggagatgtcgcagtgcatttactc

SEQ ID NO: 5437480 - DNA, 25 bp, Homo sapien
gagtgtactcagatggagatgtcgc

SEQ ID NO: 5437481 - DNA, 25 bp, Homo sapien
gaatagtgagtgtactcagatggag

SEQ ID NO: 5437482 - DNA, 25 bp, Homo sapien
acagcacattgcaattttgaaagca

SEQ ID NO: 5437483 - DNA, 25 bp, Homo sapien
tacagcacattgcaattttgaaagc

SEQ ID NO: 5437484 - DNA, 25 bp, Homo sapien
gcctacagcacattgcaattttgaa

SEQ ID NO: 5437485 - DNA, 25 bp, Homo sapien
ggtgcctacagcacattgcaatttt

SEQ ID NO: 5437486 - DNA, 25 bp, Homo sapien
tgctgtggcccagattgcctgagga

SEQ ID NO: 5437487 - DNA, 25 bp, Homo sapien
agaactaagaattgcaaaccaagag

SEQ ID NO: 5437488 - DNA, 25 bp, Homo sapien
taataagatttagcacagaactaag

SEQ ID NO: 5437489 - DNA, 25 bp, Homo sapien
tgatttgccacctaaagtaataaga

SEQ ID NO: 5437490 - DNA, 25 bp, Homo sapien
tgcttacctatcaagcaaagattct

SEQ ID NO: 5437491 - DNA, 25 bp, Homo sapien
gcttaggatgaaaacattgcttacc

SEQ ID NO: 5437492 - DNA, 25 bp, Homo sapien
gattcttctcattgcgtgggaggcg

SEQ ID NO: 5437493 - DNA, 25 bp, Homo sapien
cagttgtctgtgctcattgttatag

SEQ ID NO: 5437494 - DNA, 25 bp, Homo sapien
gaaaccatttctaggatgtcaacaa

SEQ ID NO: 5437495 - DNA, 25 bp, Homo sapien
taatactttcagtaagaggcgagag

SEQ ID NO: 5437496 - DNA, 25 bp, Homo sapien
tagtcccagttcagagtcctaggcc

SEQ ID NO: 5437497 - DNA, 25 bp, Homo sapien
cactgtgtggtgaacgtaatgactg

SEQ ID NO: 5437498 - DNA, 25 bp, Homo sapien
gacattctcatcaaactcacggcag

SEQ ID NO: 5437499 - DNA, 25 bp, Homo sapien
taaaatggctaaggtccagagtgct

SEQ ID NO: 5437500 - DNA, 25 bp, Homo sapien
tagaaagatatcacctgcccaaggg

SEQ ID NO: 5437501 - DNA, 25 bp, Homo sapien
tattctaatgtcaagggatgtccgc

SEQ ID NO: 5437502 - DNA, 25 bp, Homo sapien
tattagggcttactagatccatccc

SEQ ID NO: 5437503 - DNA, 25 bp, Homo sapien
tattatgcagggttacagatacctc

SEQ ID NO: 5437504 - DNA, 25 bp, Homo sapien
cactgaatgtggaatatactggtac

SEQ ID NO: 5437505 - DNA, 25 bp, Homo sapien
tcagtttggagattagaccacattc

SEQ ID NO: 5437506 - DNA, 25 bp, Homo sapien
ctattacttgccattgcttcccaat

SEQ ID NO: 5437507 - DNA, 25 bp, Homo sapien
tacactctcgttgtgtaagtgcatc

SEQ ID NO: 5437508 - DNA, 25 bp, Homo sapien
acactttacactctcgttgtgtaag

SEQ ID NO: 5437509 - DNA, 25 bp, Homo sapien
tcaacacttgaccagtattgacata

SEQ ID NO: 5437510 - DNA, 25 bp, Homo sapien
cagagggaatgccaatgatgtgctt

SEQ ID NO: 5437511 - DNA, 25 bp, Homo sapien
ttgtagctccatcgtcaaacaaaca

SEQ ID NO: 5437512 - DNA, 25 bp, Homo sapien
caaacatcaaactggcacagaggga

SEQ ID NO: 5437513 - DNA, 25 bp, Homo sapien
ggagtctactctactacactgtgag

SEQ ID NO: 5437514 - DNA, 25 bp, Homo sapien
gaaagcggaaacctatggtgcacac

SEQ ID NO: 5437515 - DNA, 25 bp, Homo sapien
tgcttggagaatgccagccctgaaa

SEQ ID NO: 5437516 - DNA, 25 bp, Homo sapien
taggctggcaaaccatatgtcaatc

SEQ ID NO: 5437517 - DNA, 25 bp, Homo sapien
gaacatttcttcacactgcagtacg

SEQ ID NO: 5437518 - DNA, 25 bp, Homo sapien
cggttgggttgttccctgggcatca

SEQ ID NO: 5437519 - DNA, 25 bp, Homo sapien
gaaaaagtttggcagtcaagaactg

SEQ ID NO: 5437520 - DNA, 25 bp, Homo sapien
tgggcatcaagctcacccaaatcct

SEQ ID NO: 5437521 - DNA, 25 bp, Homo sapien
caagaactgttgattgaaagacggt

SEQ ID NO: 5437522 - DNA, 25 bp, Homo sapien
aaaacaacagcacatagctttatcc

SEQ ID NO: 5437523 - DNA, 25 bp, Homo sapien
gctttatcctaaaggaagcatcctc

SEQ ID NO: 5437524 - DNA, 25 bp, Homo sapien
agcatcctcttgaaacttccaatgt

SEQ ID NO: 5437525 - DNA, 25 bp, Homo sapien
gcatcctcttgaaacttccaatgtt

SEQ ID NO: 5437526 - DNA, 25 bp, Homo sapien
caaaagtactggtttcttcaactgc

SEQ ID NO: 5437527 - DNA, 25 bp, Homo sapien
cagatccagacggttaaaacatgta

SEQ ID NO: 5437528 - DNA, 25 bp, Homo sapien
gggaggcagatccagacggttaaaa

SEQ ID NO: 5437529 - DNA, 25 bp, Homo sapien
cagacggttaaaacatgtatgcgct

SEQ ID NO: 5437530 - DNA, 25 bp, Homo sapien
catatgttcatctctcttgcccgat

SEQ ID NO: 5437531 - DNA, 25 bp, Homo sapien
ctttggttaccaataaggttgagca

SEQ ID NO: 5437532 - DNA, 25 bp, Homo sapien
tatgaatttcactaccctatgtact

SEQ ID NO: 5437533 - DNA, 25 bp, Homo sapien
tagtacacctacgttattttgcaac

SEQ ID NO: 5437534 - DNA, 25 bp, Homo sapien
tggttatctgttcatgtaaatatcc

SEQ ID NO: 5437535 - DNA, 25 bp, Homo sapien
cgtatatctcccacaaggttcggca

SEQ ID NO: 5437536 - DNA, 25 bp, Homo sapien
gcacttagtaaagccatgaggagta

SEQ ID NO: 5437537 - DNA, 25 bp, Homo sapien
tgggaccaatgatgttggttatctg

SEQ ID NO: 5437538 - DNA, 25 bp, Homo sapien
tattttccggtatactggctgataa

SEQ ID NO: 5437539 - DNA, 25 bp, Homo sapien
tactggctgataattcactttgaca

SEQ ID NO: 5437540 - DNA, 25 bp, Homo sapien
ggttattttccggtatactggctga

SEQ ID NO: 5437541 - DNA, 25 bp, Homo sapien
taattcactttgacagtagacaatg

SEQ ID NO: 5437542 - DNA, 25 bp, Homo sapien
ccccatgacgattgcagctctcagg

SEQ ID NO: 5437543 - DNA, 25 bp, Homo sapien
gtcccatcacccaacttggcaagaa

SEQ ID NO: 5437544 - DNA, 25 bp, Homo sapien
tcctccgtcccatcacccaacttgg

SEQ ID NO: 5437545 - DNA, 25 bp, Homo sapien
tccgtcccatcacccaacttggcaa

SEQ ID NO: 5437546 - DNA, 25 bp, Homo sapien
ccttgtctagaaagactaagattct

SEQ ID NO: 5437547 - DNA, 25 bp, Homo sapien
aagattctctccctcattgctccgg

SEQ ID NO: 5437548 - DNA, 25 bp, Homo sapien
ttgaaaggccctccatcatccttgt

SEQ ID NO: 5437549 - DNA, 25 bp, Homo sapien
atttgcctgcttgaaaattgaaagg

SEQ ID NO: 5437550 - DNA, 25 bp, Homo sapien
gctaagaagaaagctttgataacag

SEQ ID NO: 5437551 - DNA, 25 bp, Homo sapien
aaagctttgataacagattgctcag

SEQ ID NO: 5437552 - DNA, 25 bp, Homo sapien
aatacagttcttaagaactggcatc

SEQ ID NO: 5437553 - DNA, 25 bp, Homo sapien
gaactggcatctttcaattgctaag

SEQ ID NO: 5437554 - DNA, 25 bp, Homo sapien
taatgtgtggacgttgtaataaggc

SEQ ID NO: 5437555 - DNA, 25 bp, Homo sapien
tgggtaatgtgtggacgttgtaata

SEQ ID NO: 5437556 - DNA, 25 bp, Homo sapien
tgtggacgttgtaataaggcttgag

SEQ ID NO: 5437557 - DNA, 25 bp, Homo sapien
tgtgtggacgttgtaataaggcttg

SEQ ID NO: 5437558 - DNA, 25 bp, Homo sapien
cttgggccgttactccctcggagtg

SEQ ID NO: 5437559 - DNA, 25 bp, Homo sapien
ccgttactccctcggagtgaagcaa

SEQ ID NO: 5437560 - DNA, 25 bp, Homo sapien
tccctcggagtgaagcaaatccttc

SEQ ID NO: 5437561 - DNA, 25 bp, Homo sapien
atcttcttgggccgttactccctcg

SEQ ID NO: 5437562 - DNA, 25 bp, Homo sapien
ccaggaaaggcatcacgtcattcac

SEQ ID NO: 5437563 - DNA, 25 bp, Homo sapien
ccagagaccaacagccaggaaaggc

SEQ ID NO: 5437564 - DNA, 25 bp, Homo sapien
atcacgtcattcacgggcagagctc

SEQ ID NO: 5437565 - DNA, 25 bp, Homo sapien
gaaaggcatcacgtcattcacgggc

SEQ ID NO: 5437566 - DNA, 25 bp, Homo sapien
cgagtcaacttagcatcagtccttg

SEQ ID NO: 5437567 - DNA, 25 bp, Homo sapien
cagtccttgatcaatgtcgggtgaa

SEQ ID NO: 5437568 - DNA, 25 bp, Homo sapien
tgggatcaattaacccgagtcaact

SEQ ID NO: 5437569 - DNA, 25 bp, Homo sapien
taaaaaagagaatgtctgggcctgc

SEQ ID NO: 5437570 - DNA, 25 bp, Homo sapien
accttagtcgttgttcattgttgaa

SEQ ID NO: 5437571 - DNA, 25 bp, Homo sapien
ctgtaacaaccttagtcgttgttca

SEQ ID NO: 5437572 - DNA, 25 bp, Homo sapien
attacaatatgattgtcatggtatc

SEQ ID NO: 5437573 - DNA, 25 bp, Homo sapien
gcagcccagaaccaccgaattacaa

SEQ ID NO: 5437574 - DNA, 25 bp, Homo sapien
tccaatcacttaggtctatttcagc

SEQ ID NO: 5437575 - DNA, 25 bp, Homo sapien
taggtctatttcagctgtgcctgcg

SEQ ID NO: 5437576 - DNA, 25 bp, Homo sapien
ccagttctcttgcatcaaaaacaga

SEQ ID NO: 5437577 - DNA, 25 bp, Homo sapien
tgcgatgaccaattccagttctctt

SEQ ID NO: 5437578 - DNA, 25 bp, Homo sapien
gtttgctgtacaacacccctctcaa

SEQ ID NO: 5437579 - DNA, 25 bp, Homo sapien
cccctggctttaattctcgttcagt

SEQ ID NO: 5437580 - DNA, 25 bp, Homo sapien
tcatagaagccacgcactaagctct

SEQ ID NO: 5437581 - DNA, 25 bp, Homo sapien
tctgtaactgggatattggcacccc

SEQ ID NO: 5437582 - DNA, 25 bp, Homo sapien
aaggtattctaggtcactcaggtca

SEQ ID NO: 5437583 - DNA, 25 bp, Homo sapien
gaggtctaggatgtcatggatatca

SEQ ID NO: 5437584 - DNA, 25 bp, Homo sapien
tgcccaaatacttcttcgttcacag

SEQ ID NO: 5437585 - DNA, 25 bp, Homo sapien
ttcacagtgaacgtgaggtctagga

SEQ ID NO: 5437586 - DNA, 25 bp, Homo sapien
caaggatcctaccactgaatcggaa

SEQ ID NO: 5437587 - DNA, 25 bp, Homo sapien
ggcatccaacaaatactggtgtatt

SEQ ID NO: 5437588 - DNA, 25 bp, Homo sapien
aaaagggccgtgtgaagaaggcatc

SEQ ID NO: 5437589 - DNA, 25 bp, Homo sapien
aatactggtgtattagtgcaagacc

SEQ ID NO: 5437590 - DNA, 25 bp, Homo sapien
ccataatatgggttaaagagttctc

SEQ ID NO: 5437591 - DNA, 25 bp, Homo sapien
cattcatggtgattgtctacaaaag

SEQ ID NO: 5437592 - DNA, 25 bp, Homo sapien
gtatgtgtcattggctgaatattca

SEQ ID NO: 5437593 - DNA, 25 bp, Homo sapien
tctacaaaagcagacataggactta

SEQ ID NO: 5437594 - DNA, 25 bp, Homo sapien
caagtggccaaaaatgacgagagta

SEQ ID NO: 5437595 - DNA, 25 bp, Homo sapien
ggctgaaactctaacacctgagcta

SEQ ID NO: 5437596 - DNA, 25 bp, Homo sapien
aaaacagatcctaggcagggcatgt

SEQ ID NO: 5437597 - DNA, 25 bp, Homo sapien
gataaaaagtatacacgtgggctca

SEQ ID NO: 5437598 - DNA, 25 bp, Homo sapien
tcaccagctacaacataacagagtt

SEQ ID NO: 5437599 - DNA, 25 bp, Homo sapien
aattgggccaaattacatcatgtgc

SEQ ID NO: 5437600 - DNA, 25 bp, Homo sapien
gcacattccatacctagagtagaga

SEQ ID NO: 5437601 - DNA, 25 bp, Homo sapien
caaattgatatctaccttgagagca

SEQ ID NO: 5437602 - DNA, 25 bp, Homo sapien
tggagtagcccataatctgattaaa

SEQ ID NO: 5437603 - DNA, 25 bp, Homo sapien
cctccccaacgaaggtgacatatag

SEQ ID NO: 5437604 - DNA, 25 bp, Homo sapien
tctgcaggtcttttctggagtagcc

SEQ ID NO: 5437605 - DNA, 25 bp, Homo sapien
gaaggtgacatatagcttatttctc

SEQ ID NO: 5437606 - DNA, 25 bp, Homo sapien
cctcagtttggcttcgaaatcccgc

SEQ ID NO: 5437607 - DNA, 25 bp, Homo sapien
ctaacttcctgtaaaagttcctcag

SEQ ID NO: 5437608 - DNA, 25 bp, Homo sapien
agcccgggcattggcacgctgggta

SEQ ID NO: 5437609 - DNA, 25 bp, Homo sapien
gtccatatcctttagtctctaactt

SEQ ID NO: 5437610 - DNA, 25 bp, Homo sapien
gagatgacacgggagagccacgtgg

SEQ ID NO: 5437611 - DNA, 25 bp, Homo sapien
acgggagagccacgtggggactgac

SEQ ID NO: 5437612 - DNA, 25 bp, Homo sapien
ggagagccacgtggggactgacagt

SEQ ID NO: 5437613 - DNA, 25 bp, Homo sapien
agatgacacgggagagccacgtggg

SEQ ID NO: 5437614 - DNA, 25 bp, Homo sapien
catgtggaggcacatacgacattat

SEQ ID NO: 5437615 - DNA, 25 bp, Homo sapien
tgtggaggcacatacgacattatct

SEQ ID NO: 5437616 - DNA, 25 bp, Homo sapien
ggcatgtggaggcacatacgacatt

SEQ ID NO: 5437617 - DNA, 25 bp, Homo sapien
ggaggcacatacgacattatctctt

SEQ ID NO: 5437618 - DNA, 25 bp, Homo sapien
aacataacaaggtctgcatcgcttg

SEQ ID NO: 5437619 - DNA, 25 bp, Homo sapien
gagtcccttcagttcggataaattg

SEQ ID NO: 5437620 - DNA, 25 bp, Homo sapien
ccttcagttcggataaattggatct

SEQ ID NO: 5437621 - DNA, 25 bp, Homo sapien
tgaaaggcgcaccaatcctggagtc

SEQ ID NO: 5437622 - DNA, 25 bp, Homo sapien
tattgggttgacgtagaaatgcaac

SEQ ID NO: 5437623 - DNA, 25 bp, Homo sapien
tgagtgattcctggtaagatcaggt

SEQ ID NO: 5437624 - DNA, 25 bp, Homo sapien
caggttgacgctcctgtagaatttc

SEQ ID NO: 5437625 - DNA, 25 bp, Homo sapien
aatgcaacaatcttgtcattgtaag

SEQ ID NO: 5437626 - DNA, 25 bp, Homo sapien
tggaaccatgtcctggtactgtggc

SEQ ID NO: 5437627 - DNA, 25 bp, Homo sapien
aactggtggtcctgcatgtcgagaa

SEQ ID NO: 5437628 - DNA, 25 bp, Homo sapien
tcctggtactgtggcctactgactg

SEQ ID NO: 5437629 - DNA, 25 bp, Homo sapien
tactgactgtattgaatgtactgga

SEQ ID NO: 5437630 - DNA, 25 bp, Homo sapien
tgcgggagttgtggtccacaaagaa

SEQ ID NO: 5437631 - DNA, 25 bp, Homo sapien
cacttgtgggtctactgctctgaag

SEQ ID NO: 5437632 - DNA, 25 bp, Homo sapien
actgtggctgcgttgccttgtcagg

SEQ ID NO: 5437633 - DNA, 25 bp, Homo sapien
tcaggtgttgccgatgaaccagcgc

SEQ ID NO: 5437634 - DNA, 25 bp, Homo sapien
cttgtaaaaagtactccagtgataa

SEQ ID NO: 5437635 - DNA, 25 bp, Homo sapien
ttgtaaaaagtactccagtgataaa

SEQ ID NO: 5437636 - DNA, 25 bp, Homo sapien
tgtaaaaagtactccagtgataaaa

SEQ ID NO: 5437637 - DNA, 25 bp, Homo sapien
taggtcctatttgtatcccacaagg

SEQ ID NO: 5437638 - DNA, 25 bp, Homo sapien
tgtattgaatgaggctgacggtaac

SEQ ID NO: 5437639 - DNA, 25 bp, Homo sapien
gccatgggtggagaataggtcctat

SEQ ID NO: 5437640 - DNA, 25 bp, Homo sapien
ggaaagactgctactgatcccagac

SEQ ID NO: 5437641 - DNA, 25 bp, Homo sapien
tgaaacaactgtagccacacaggct

SEQ ID NO: 5437642 - DNA, 25 bp, Homo sapien
catcagtttcatgcaagattgaaac

SEQ ID NO: 5437643 - DNA, 25 bp, Homo sapien
gtttcatgcaagattgaaaccaggg

SEQ ID NO: 5437644 - DNA, 25 bp, Homo sapien
cagggtctgggtcattactgaaaca

SEQ ID NO: 5437645 - DNA, 25 bp, Homo sapien
cacttacgaattgtgggaccttggt

SEQ ID NO: 5437646 - DNA, 25 bp, Homo sapien
ggaccttggtcaattcacgtaatca

SEQ ID NO: 5437647 - DNA, 25 bp, Homo sapien
caccctccttactggtgagaggcag

SEQ ID NO: 5437648 - DNA, 25 bp, Homo sapien
taaatgaactagtgtctggcccagg

SEQ ID NO: 5437649 - DNA, 25 bp, Homo sapien
ccaaatatagtaccagcaaagccat

SEQ ID NO: 5437650 - DNA, 25 bp, Homo sapien
gcttctctgtcacgcccatctgact

SEQ ID NO: 5437651 - DNA, 25 bp, Homo sapien
gcaaagccatatcttcccctggtgt

SEQ ID NO: 5437652 - DNA, 25 bp, Homo sapien
tgggctctcaggctgttgaaccaaa

SEQ ID NO: 5437653 - DNA, 25 bp, Homo sapien
ttactcatagaatgacttcctgatt

SEQ ID NO: 5437654 - DNA, 25 bp, Homo sapien
tcctgattgtaaccaggctttctgg

SEQ ID NO: 5437655 - DNA, 25 bp, Homo sapien
tgattgtaaccaggctttctggttc

SEQ ID NO: 5437656 - DNA, 25 bp, Homo sapien
tcatagaatgacttcctgattgtaa

SEQ ID NO: 5437657 - DNA, 25 bp, Homo sapien
gtccctccggactttggtgatcatg

SEQ ID NO: 5437658 - DNA, 25 bp, Homo sapien
cacaaggtcgcggttatgctggtag

SEQ ID NO: 5437659 - DNA, 25 bp, Homo sapien
ggtgatcatgtgcttcaaacacgtg

SEQ ID NO: 5437660 - DNA, 25 bp, Homo sapien
cagctctagctgtttgttcgcgaac

SEQ ID NO: 5437661 - DNA, 25 bp, Homo sapien
tgtcacctcctagaattgtcccata

SEQ ID NO: 5437662 - DNA, 25 bp, Homo sapien
tctgccttgcatgaaagcctgtcac

SEQ ID NO: 5437663 - DNA, 25 bp, Homo sapien
taaatgttagcccattctgccttgc

SEQ ID NO: 5437664 - DNA, 25 bp, Homo sapien
cccagagtctagaatgtaccaggca

SEQ ID NO: 5437665 - DNA, 25 bp, Homo sapien
gactgtaacagcaacgtgatcctgg

SEQ ID NO: 5437666 - DNA, 25 bp, Homo sapien
acttcacggggggagactgtaacag

SEQ ID NO: 5437667 - DNA, 25 bp, Homo sapien
gggttagaatgcagcacggtgaaga

SEQ ID NO: 5437668 - DNA, 25 bp, Homo sapien
cacggtgaagaactctgggctgatg

SEQ ID NO: 5437669 - DNA, 25 bp, Homo sapien
tgttgggaatccttatttgcttctt

SEQ ID NO: 5437670 - DNA, 25 bp, Homo sapien
tatgaaattacaaaaacaaagccca

SEQ ID NO: 5437671 - DNA, 25 bp, Homo sapien
tttgcttctttttccacttttatga

SEQ ID NO: 5437672 - DNA, 25 bp, Homo sapien
tgcttctttttccacttttatgaaa

SEQ ID NO: 5437673 - DNA, 25 bp, Homo sapien
ccctgccccatcaatagcattggta

SEQ ID NO: 5437674 - DNA, 25 bp, Homo sapien
tgccccatcaatagcattggtattt

SEQ ID NO: 5437675 - DNA, 25 bp, Homo sapien
cccatcaatagcattggtattttcc

SEQ ID NO: 5437676 - DNA, 25 bp, Homo sapien
tcccctgccccatcaatagcattgg

SEQ ID NO: 5437677 - DNA, 25 bp, Homo sapien
tgtatggagttagatctctgcagca

SEQ ID NO: 5437678 - DNA, 25 bp, Homo sapien
tgccacgtcgtggttctgtttacgt

SEQ ID NO: 5437679 - DNA, 25 bp, Homo sapien
acgtagaagatcctgccgtggctgt

SEQ ID NO: 5437680 - DNA, 25 bp, Homo sapien
agctgtcggtcgctgccacgtcgtg

SEQ ID NO: 5437681 - DNA, 25 bp, Homo sapien
aagaccatgtatccatcttttgaga

SEQ ID NO: 5437682 - DNA, 25 bp, Homo sapien
gactcatgggaatgggtctgcctgt

SEQ ID NO: 5437683 - DNA, 25 bp, Homo sapien
gagactcatgggaatgggtctgcct

SEQ ID NO: 5437684 - DNA, 25 bp, Homo sapien
agaccatgtatccatcttttgagac

SEQ ID NO: 5437685 - DNA, 25 bp, Homo sapien
actgaaggtagtgatcgcagtggct

SEQ ID NO: 5437686 - DNA, 25 bp, Homo sapien
tctggtaccggctaacatcctggcg

SEQ ID NO: 5437687 - DNA, 25 bp, Homo sapien
ggagagcctcgtccaccctctggta

SEQ ID NO: 5437688 - DNA, 25 bp, Homo sapien
tggtgggagagcctcgtccaccctc

SEQ ID NO: 5437689 - DNA, 25 bp, Homo sapien
tgttttctctttcagtatcaaaaca

SEQ ID NO: 5437690 - DNA, 25 bp, Homo sapien
ttctctttcagtatcaaaacagact

SEQ ID NO: 5437691 - DNA, 25 bp, Homo sapien
ttttctctttcagtatcaaaacaga

SEQ ID NO: 5437692 - DNA, 25 bp, Homo sapien
ttaccaggtattgttttctctttca

SEQ ID NO: 5437693 - DNA, 25 bp, Homo sapien
tcctcctgggcagttgccccttcac

SEQ ID NO: 5437694 - DNA, 25 bp, Homo sapien
tgggcagttgccccttcacaggtgc

SEQ ID NO: 5437695 - DNA, 25 bp, Homo sapien
tcctgggcagttgccccttcacagg

SEQ ID NO: 5437696 - DNA, 25 bp, Homo sapien
cctcctcctgggcagttgccccttc

SEQ ID NO: 5437697 - DNA, 25 bp, Homo sapien
tgccttcttcttgcggtgggctctc

SEQ ID NO: 5437698 - DNA, 25 bp, Homo sapien
tcttcttgcggtgggctctcggcag

SEQ ID NO: 5437699 - DNA, 25 bp, Homo sapien
tgcggtgggctctcggcagcagctg

SEQ ID NO: 5437700 - DNA, 25 bp, Homo sapien
ttgcggtgggctctcggcagcagct

SEQ ID NO: 5437701 - DNA, 25 bp, Homo sapien
tcagagccctgatcgagagactcgg

SEQ ID NO: 5437702 - DNA, 25 bp, Homo sapien
tcatcggaagggctacctaagtctc

SEQ ID NO: 5437703 - DNA, 25 bp, Homo sapien
gagtgaatcctgacgtcctctggga

SEQ ID NO: 5437704 - DNA, 25 bp, Homo sapien
tttcaggaaaccgtgcgctctcaag

SEQ ID NO: 5437705 - DNA, 25 bp, Homo sapien
ttcatgaacagaagacgtaacctcc

SEQ ID NO: 5437706 - DNA, 25 bp, Homo sapien
caaggttgtagctgagcatttgatc

SEQ ID NO: 5437707 - DNA, 25 bp, Homo sapien
ggagccttctgccaaggttgtagct

SEQ ID NO: 5437708 - DNA, 25 bp, Homo sapien
taaactggaggtacccactcacgtg

SEQ ID NO: 5437709 - DNA, 25 bp, Homo sapien
cattttaataagtgtaaggacactt

SEQ ID NO: 5437710 - DNA, 25 bp, Homo sapien
gtcctaggactaccaagtttcatgt

SEQ ID NO: 5437711 - DNA, 25 bp, Homo sapien
tcttatcagtatgaaaagtcctagg

SEQ ID NO: 5437712 - DNA, 25 bp, Homo sapien
ctaatctcaacaagatccccaaagg

SEQ ID NO: 5437713 - DNA, 25 bp, Homo sapien
ccgatggcttgtcgctccagcagcc

SEQ ID NO: 5437714 - DNA, 25 bp, Homo sapien
ggcttgtcgctccagcagcctctgg

SEQ ID NO: 5437715 - DNA, 25 bp, Homo sapien
gatggcttgtcgctccagcagcctc

SEQ ID NO: 5437716 - DNA, 25 bp, Homo sapien
cttgtcgctccagcagcctctggac

SEQ ID NO: 5437717 - DNA, 25 bp, Homo sapien
ccccagaaaacgcttgatgatggga

SEQ ID NO: 5437718 - DNA, 25 bp, Homo sapien
aaaacgcttgatgatgggacggctc

SEQ ID NO: 5437719 - DNA, 25 bp, Homo sapien
tttctaagacatcagtaagaagtgc

SEQ ID NO: 5437720 - DNA, 25 bp, Homo sapien
taagacatcagtaagaagtgcaaaa

SEQ ID NO: 5437721 - DNA, 25 bp, Homo sapien
tggcttcactcaggatgatgactcc

SEQ ID NO: 5437722 - DNA, 25 bp, Homo sapien
gatgactggtagcatactgtagctg

SEQ ID NO: 5437723 - DNA, 25 bp, Homo sapien
catgcctcagatctccaagaaatgg

SEQ ID NO: 5437724 - DNA, 25 bp, Homo sapien
tctgcaatcggttttagatcccctg

SEQ ID NO: 5437725 - DNA, 25 bp, Homo sapien
tctcggtgccaaattggattggtgg

SEQ ID NO: 5437726 - DNA, 25 bp, Homo sapien
agtagaccgtctctcctgcccgtgg

SEQ ID NO: 5437727 - DNA, 25 bp, Homo sapien
gttactgatgatagtagaccgtctc

SEQ ID NO: 5437728 - DNA, 25 bp, Homo sapien
ggattggtggtgttactgatgatag

SEQ ID NO: 5437729 - DNA, 25 bp, Homo sapien
gataagggtcaggattgaagaacat

SEQ ID NO: 5437730 - DNA, 25 bp, Homo sapien
taagataagggtcaggattgaagaa

SEQ ID NO: 5437731 - DNA, 25 bp, Homo sapien
cttaagataagggtcaggattgaag

SEQ ID NO: 5437732 - DNA, 25 bp, Homo sapien
agataagggtcaggattgaagaaca

SEQ ID NO: 5437733 - DNA, 25 bp, Homo sapien
tgctgtttcacactatatgctgcta

SEQ ID NO: 5437734 - DNA, 25 bp, Homo sapien
cactatatgctgctaaaagtcctag

SEQ ID NO: 5437735 - DNA, 25 bp, Homo sapien
agtcctagccaaagtccatttagtg

SEQ ID NO: 5437736 - DNA, 25 bp, Homo sapien
cttagattcacaaattgctgtttca

SEQ ID NO: 5437737 - DNA, 25 bp, Homo sapien
tgacctcatgacctgcccacctctg

SEQ ID NO: 5437738 - DNA, 25 bp, Homo sapien
gacctcatgacctgcccacctctgc

SEQ ID NO: 5437739 - DNA, 25 bp, Homo sapien
ctgacctcatgacctgcccacctct

SEQ ID NO: 5437740 - DNA, 25 bp, Homo sapien
tcgaaactgtacactttcaaactgg

SEQ ID NO: 5437741 - DNA, 25 bp, Homo sapien
acactttcaaactggatgtcacgtt

SEQ ID NO: 5437742 - DNA, 25 bp, Homo sapien
tggatgtcacgtttaaagacattct

SEQ ID NO: 5437743 - DNA, 25 bp, Homo sapien
cttcgaaactgtacactttcaaact

SEQ ID NO: 5437744 - DNA, 25 bp, Homo sapien
caagttttcgagaatgcaggtttcc

SEQ ID NO: 5437745 - DNA, 25 bp, Homo sapien
ttttcgagaatgcaggtttcctgaa

SEQ ID NO: 5437746 - DNA, 25 bp, Homo sapien
tgtaaagctaacaagttttcgagaa

SEQ ID NO: 5437747 - DNA, 25 bp, Homo sapien
gctaacaagttttcgagaatgcagg

SEQ ID NO: 5437748 - DNA, 25 bp, Homo sapien
caagcaaagttgagaaattccattc

SEQ ID NO: 5437749 - DNA, 25 bp, Homo sapien
taaatttctactgcctccgctgtaa

SEQ ID NO: 5437750 - DNA, 25 bp, Homo sapien
tgcatcctgattgcttcacatgtcc

SEQ ID NO: 5437751 - DNA, 25 bp, Homo sapien
gctgtaactcctgtaccttagtcaa

SEQ ID NO: 5437752 - DNA, 25 bp, Homo sapien
cttccatctatagatccaattcctg

SEQ ID NO: 5437753 - DNA, 25 bp, Homo sapien
cagggtccatccaggtatctgtttt

SEQ ID NO: 5437754 - DNA, 25 bp, Homo sapien
tggctctcaacaaacatgtgtggtt

SEQ ID NO: 5437755 - DNA, 25 bp, Homo sapien
tactcctctgactcagcgtttccag

SEQ ID NO: 5437756 - DNA, 25 bp, Homo sapien
agcttgtctctcggacacaccttca

SEQ ID NO: 5437757 - DNA, 25 bp, Homo sapien
ggacacaccttcaggtaagccttcc

SEQ ID NO: 5437758 - DNA, 25 bp, Homo sapien
gcttgtctctcggacacaccttcag

SEQ ID NO: 5437759 - DNA, 25 bp, Homo sapien
cagcttgtctctcggacacaccttc

SEQ ID NO: 5437760 - DNA, 25 bp, Homo sapien
tcaatgacggcgtttttcttcatca

SEQ ID NO: 5437761 - DNA, 25 bp, Homo sapien
tctcttctgcaccagacctacgaga

SEQ ID NO: 5437762 - DNA, 25 bp, Homo sapien
tgtttaaatgaatagatgagaggga

SEQ ID NO: 5437763 - DNA, 25 bp, Homo sapien
ggtggcacaatgcttagtacttagc

SEQ ID NO: 5437764 - DNA, 25 bp, Homo sapien
ccatgttggaaatgggcaggctttc

SEQ ID NO: 5437765 - DNA, 25 bp, Homo sapien
tgagtccaaccacccatatacagtg

SEQ ID NO: 5437766 - DNA, 25 bp, Homo sapien
acagtgtagctgtgtattgtgagac

SEQ ID NO: 5437767 - DNA, 25 bp, Homo sapien
cagcatagggtgagtctgaacaatt

SEQ ID NO: 5437768 - DNA, 25 bp, Homo sapien
gaagttgacttccattgagtggcca

SEQ ID NO: 5437769 - DNA, 25 bp, Homo sapien
cactagatccaaactcagcattgag

SEQ ID NO: 5437770 - DNA, 25 bp, Homo sapien
ggaaccagcactaagaccttaagga

SEQ ID NO: 5437771 - DNA, 25 bp, Homo sapien
tatgagccatatctctagacactag

SEQ ID NO: 5437772 - DNA, 25 bp, Homo sapien
gagagtcgactctacaaatggctgt

SEQ ID NO: 5437773 - DNA, 25 bp, Homo sapien
aattagggattcaggtgtgccaacc

SEQ ID NO: 5437774 - DNA, 25 bp, Homo sapien
aacggctccttaagttgactggcag

SEQ ID NO: 5437775 - DNA, 25 bp, Homo sapien
tactttgcttcatgaatgggttccc

SEQ ID NO: 5437776 - DNA, 25 bp, Homo sapien
aggaagctggcagcgaggggcactc

SEQ ID NO: 5437777 - DNA, 25 bp, Homo sapien
ggaagctggcagcgaggggcactca

SEQ ID NO: 5437778 - DNA, 25 bp, Homo sapien
aaggaagctggcagcgaggggcact

SEQ ID NO: 5437779 - DNA, 25 bp, Homo sapien
gaagctggcagcgaggggcactcac

SEQ ID NO: 5437780 - DNA, 25 bp, Homo sapien
tcacagctgggttcttcacggtgat

SEQ ID NO: 5437781 - DNA, 25 bp, Homo sapien
ggtcgtggctcgcagggctccacta

SEQ ID NO: 5437782 - DNA, 25 bp, Homo sapien
aatgccgtggtaatatttaaaacag

SEQ ID NO: 5437783 - DNA, 25 bp, Homo sapien
catcacagctgggttcttcacggtg

SEQ ID NO: 5437784 - DNA, 25 bp, Homo sapien
tcccaaggtgtcgttctaaatatgc

SEQ ID NO: 5437785 - DNA, 25 bp, Homo sapien
gagtcactgaagtgtcactgcgaga

SEQ ID NO: 5437786 - DNA, 25 bp, Homo sapien
ttctctgtatacaaagcgtctgagt

SEQ ID NO: 5437787 - DNA, 25 bp, Homo sapien
tgcgagatgcatttctcccaaggtg

SEQ ID NO: 5437788 - DNA, 25 bp, Homo sapien
tctagtggctgttctgtagtgtagc

SEQ ID NO: 5437789 - DNA, 25 bp, Homo sapien
ctggtctagtggctgttctgtagtg

SEQ ID NO: 5437790 - DNA, 25 bp, Homo sapien
gtggctgttctgtagtgtagctgct

SEQ ID NO: 5437791 - DNA, 25 bp, Homo sapien
tagtggctgttctgtagtgtagctg

SEQ ID NO: 5437792 - DNA, 25 bp, Homo sapien
aggacggtccgagcagaataaagtg

SEQ ID NO: 5437793 - DNA, 25 bp, Homo sapien
taagtagtgtgcacgaggacggtcc

SEQ ID NO: 5437794 - DNA, 25 bp, Homo sapien
gacatgagctcattggtatcacact

SEQ ID NO: 5437795 - DNA, 25 bp, Homo sapien
tgtagtctgcaagaacaaagctaag

SEQ ID NO: 5437796 - DNA, 25 bp, Homo sapien
gacagctgaagccagtcatagatca

SEQ ID NO: 5437797 - DNA, 25 bp, Homo sapien
cctgatatcggctgagccaggtcta

SEQ ID NO: 5437798 - DNA, 25 bp, Homo sapien
ctgtaaggacctgatatcggctgag

SEQ ID NO: 5437799 - DNA, 25 bp, Homo sapien
gatgagcggcatctgctctctgagg

SEQ ID NO: 5437800 - DNA, 25 bp, Homo sapien
gggccccttttgataatcttcagga

SEQ ID NO: 5437801 - DNA, 25 bp, Homo sapien
cttcaggatacatttgcttatagca

SEQ ID NO: 5437802 - DNA, 25 bp, Homo sapien
agatttagcactctgtatttgaata

SEQ ID NO: 5437803 - DNA, 25 bp, Homo sapien
gcttatagcattgctaaaatacaga

SEQ ID NO: 5437804 - DNA, 25 bp, Homo sapien
tccctcagggtagcagcatgcctgc

SEQ ID NO: 5437805 - DNA, 25 bp, Homo sapien
ataaatacaaatgaagatgtccctc

SEQ ID NO: 5437806 - DNA, 25 bp, Homo sapien
cctcagggtagcagcatgcctgctc

SEQ ID NO: 5437807 - DNA, 25 bp, Homo sapien
taaatacaaatgaagatgtccctca

SEQ ID NO: 5437808 - DNA, 25 bp, Homo sapien
gtcacacccctgttcttagaatccc

SEQ ID NO: 5437809 - DNA, 25 bp, Homo sapien
acacccctgttcttagaatcccaga

SEQ ID NO: 5437810 - DNA, 25 bp, Homo sapien
acccctgttcttagaatcccagaag

SEQ ID NO: 5437811 - DNA, 25 bp, Homo sapien
cctgttcttagaatcccagaagttg

SEQ ID NO: 5437812 - DNA, 25 bp, Homo sapien
aattataacctttctctccgtagca

SEQ ID NO: 5437813 - DNA, 25 bp, Homo sapien
agattaattataacctttctctccg

SEQ ID NO: 5437814 - DNA, 25 bp, Homo sapien
tctccgtagcaggaagattaacata

SEQ ID NO: 5437815 - DNA, 25 bp, Homo sapien
taacctttctctccgtagcaggaag

SEQ ID NO: 5437816 - DNA, 25 bp, Homo sapien
tgtggcatccaagaggacattaggc

SEQ ID NO: 5437817 - DNA, 25 bp, Homo sapien
caagaggacattaggcctgatctcc

SEQ ID NO: 5437818 - DNA, 25 bp, Homo sapien
gtgtgaactctgtgtccctaaactc

SEQ ID NO: 5437819 - DNA, 25 bp, Homo sapien
taaactcatgcattctgtggcatcc

SEQ ID NO: 5437820 - DNA, 25 bp, Homo sapien
attcttccttaaaatcatacacctg

SEQ ID NO: 5437821 - DNA, 25 bp, Homo sapien
gctgaactgaagtcaaggcgggtct

SEQ ID NO: 5437822 - DNA, 25 bp, Homo sapien
gagttctaaggtggctgtgaaagct

SEQ ID NO: 5437823 - DNA, 25 bp, Homo sapien
gtccacttcacggatgctcctgctt

SEQ ID NO: 5437824 - DNA, 25 bp, Homo sapien
tctgcaggtccacttcacggatgct

SEQ ID NO: 5437825 - DNA, 25 bp, Homo sapien
acaggattccggcaggtctctaaca

SEQ ID NO: 5437826 - DNA, 25 bp, Homo sapien
atgaaatactagacaggattccggc

SEQ ID NO: 5437827 - DNA, 25 bp, Homo sapien
tactagacaggattccggcaggtct

SEQ ID NO: 5437828 - DNA, 25 bp, Homo sapien
tccggcaggtctctaacaagaggct

SEQ ID NO: 5437829 - DNA, 25 bp, Homo sapien
cagtttgccctgaagcttcgaaggg

SEQ ID NO: 5437830 - DNA, 25 bp, Homo sapien
acacagtttgccctgaagcttcgaa

SEQ ID NO: 5437831 - DNA, 25 bp, Homo sapien
ccagacacagtttgccctgaagctt

SEQ ID NO: 5437832 - DNA, 25 bp, Homo sapien
gcttcgaagggccacagagctttgg

SEQ ID NO: 5437833 - DNA, 25 bp, Homo sapien
tccccaggcaggaatagagtatcat

SEQ ID NO: 5437834 - DNA, 25 bp, Homo sapien
tgcgctctaggttctggattaccca

SEQ ID NO: 5437835 - DNA, 25 bp, Homo sapien
ggctacagcctatggacaacaaata

SEQ ID NO: 5437836 - DNA, 25 bp, Homo sapien
tcctgccaatgctaatcagcctggg

SEQ ID NO: 5437837 - DNA, 25 bp, Homo sapien
cattcaaagctattgatctagcaag

SEQ ID NO: 5437838 - DNA, 25 bp, Homo sapien
caaagctattgatctagcaaggatg

SEQ ID NO: 5437839 - DNA, 25 bp, Homo sapien
ctattgatctagcaaggatgcccat

SEQ ID NO: 5437840 - DNA, 25 bp, Homo sapien
aacattcaaagctattgatctagca

SEQ ID NO: 5437841 - DNA, 25 bp, Homo sapien
gaacctggaagtatgaatctgtgca

SEQ ID NO: 5437842 - DNA, 25 bp, Homo sapien
caataatagcaaccactttcccagt

SEQ ID NO: 5437843 - DNA, 25 bp, Homo sapien
ctgcttcctggttgataatatcctt

SEQ ID NO: 5437844 - DNA, 25 bp, Homo sapien
aatatcctttggtggtcccctacag

SEQ ID NO: 5437845 - DNA, 25 bp, Homo sapien
caccagagtcactggtccacaaagc

SEQ ID NO: 5437846 - DNA, 25 bp, Homo sapien
accagagtcactggtccacaaagct

SEQ ID NO: 5437847 - DNA, 25 bp, Homo sapien
tggcatttggaagcatggttactgc

SEQ ID NO: 5437848 - DNA, 25 bp, Homo sapien
actggcatttggaagcatggttact

SEQ ID NO: 5437849 - DNA, 25 bp, Homo sapien
tagagaaaagttcacaagtgccatt

SEQ ID NO: 5437850 - DNA, 25 bp, Homo sapien
catagagaaaagttcacaagtgcca

SEQ ID NO: 5437851 - DNA, 25 bp, Homo sapien
ccatttttacagattccctgaacac

SEQ ID NO: 5437852 - DNA, 25 bp, Homo sapien
tcacatagagaaaagttcacaagtg

SEQ ID NO: 5437853 - DNA, 25 bp, Homo sapien
ttctgcagatacagaagctcaataa

SEQ ID NO: 5437854 - DNA, 25 bp, Homo sapien
ctgcagatacagaagctcaataact

SEQ ID NO: 5437855 - DNA, 25 bp, Homo sapien
tattctgcagatacagaagctcaat

SEQ ID NO: 5437856 - DNA, 25 bp, Homo sapien
gttattctgcagatacagaagctca

SEQ ID NO: 5437857 - DNA, 25 bp, Homo sapien
gaaaagataagcttaggtattgtat

SEQ ID NO: 5437858 - DNA, 25 bp, Homo sapien
atgcctgcataactctggaaaagat

SEQ ID NO: 5437859 - DNA, 25 bp, Homo sapien
tgagtgaaaagataagcttaggtat

SEQ ID NO: 5437860 - DNA, 25 bp, Homo sapien
taaaatcaagccctttgactgaaac

SEQ ID NO: 5437861 - DNA, 25 bp, Homo sapien
tacttaaaccacacctgcagtccag

SEQ ID NO: 5437862 - DNA, 25 bp, Homo sapien
tcttaagggaattctctacagctga

SEQ ID NO: 5437863 - DNA, 25 bp, Homo sapien
tctccaggtgacgatatcacatgtc

SEQ ID NO: 5437864 - DNA, 25 bp, Homo sapien
gactcaggaccacaaatcttgcagg

SEQ ID NO: 5437865 - DNA, 25 bp, Homo sapien
tcccatcttctgctagaccacagtc

SEQ ID NO: 5437866 - DNA, 25 bp, Homo sapien
tcttctgctagaccacagtctagtg

SEQ ID NO: 5437867 - DNA, 25 bp, Homo sapien
tagaccacagtctagtgctgtttca

SEQ ID NO: 5437868 - DNA, 25 bp, Homo sapien
tctgctagaccacagtctagtgctg

SEQ ID NO: 5437869 - DNA, 25 bp, Homo sapien
attcctgtaacatctccatttccaa

SEQ ID NO: 5437870 - DNA, 25 bp, Homo sapien
tccattcctgtaacatctccatttc

SEQ ID NO: 5437871 - DNA, 25 bp, Homo sapien
tgtcctccattcctgtaacatctcc

SEQ ID NO: 5437872 - DNA, 25 bp, Homo sapien
ctgtcctccattcctgtaacatctc

SEQ ID NO: 5437873 - DNA, 25 bp, Homo sapien
tcagtatgtgttaggatcttctccc

SEQ ID NO: 5437874 - DNA, 25 bp, Homo sapien
gccatgatctggtgcgaacattctg

SEQ ID NO: 5437875 - DNA, 25 bp, Homo sapien
tgcgaacattctgtgagtgtggagt

SEQ ID NO: 5437876 - DNA, 25 bp, Homo sapien
aagggctgattgagctggtatcgcc

SEQ ID NO: 5437877 - DNA, 25 bp, Homo sapien
atgacacttccttcccctaattgat

SEQ ID NO: 5437878 - DNA, 25 bp, Homo sapien
tcaggaaaacatgacacttccttcc

SEQ ID NO: 5437879 - DNA, 25 bp, Homo sapien
gaaaacatgacacttccttccccta

SEQ ID NO: 5437880 - DNA, 25 bp, Homo sapien
acatgacacttccttcccctaattg

SEQ ID NO: 5437881 - DNA, 25 bp, Homo sapien
ttctctgggctcaatgtgtaccgca

SEQ ID NO: 5437882 - DNA, 25 bp, Homo sapien
tttcgacgcctcacaaaaagcaggt

SEQ ID NO: 5437883 - DNA, 25 bp, Homo sapien
tacatgctggcagttaagctggagc

SEQ ID NO: 5437884 - DNA, 25 bp, Homo sapien
ggctctcagaagtcaccaggtcggt

SEQ ID NO: 5437885 - DNA, 25 bp, Homo sapien
gctttcttgcagattccatttaatc

SEQ ID NO: 5437886 - DNA, 25 bp, Homo sapien
ctttcttgcagattccatttaatcc

SEQ ID NO: 5437887 - DNA, 25 bp, Homo sapien
tttcttgcagattccatttaatcct

SEQ ID NO: 5437888 - DNA, 25 bp, Homo sapien
agctggttgttctttaaagacgaat

SEQ ID NO: 5437889 - DNA, 25 bp, Homo sapien
ctggttgttctttaaagacgaatgt

SEQ ID NO: 5437890 - DNA, 25 bp, Homo sapien
cagctggttgttctttaaagacgaa

SEQ ID NO: 5437891 - DNA, 25 bp, Homo sapien
gctggttgttctttaaagacgaatg

SEQ ID NO: 5437892 - DNA, 25 bp, Homo sapien
tgaatgaaggtctgaggtgtgtttt

SEQ ID NO: 5437893 - DNA, 25 bp, Homo sapien
catgaatgaaggtctgaggtgtgtt

SEQ ID NO: 5437894 - DNA, 25 bp, Homo sapien
atgaatgaaggtctgaggtgtgttt

SEQ ID NO: 5437895 - DNA, 25 bp, Homo sapien
cctgattttctactcctgttaccat

SEQ ID NO: 5437896 - DNA, 25 bp, Homo sapien
tttcttttccatcttgccctgattt

SEQ ID NO: 5437897 - DNA, 25 bp, Homo sapien
cttttccatcttgccctgattttct

SEQ ID NO: 5437898 - DNA, 25 bp, Homo sapien
gccctgattttctactcctgttacc

SEQ ID NO: 5437899 - DNA, 25 bp, Homo sapien
gcttatagaagcgtatactgaacat

SEQ ID NO: 5437900 - DNA, 25 bp, Homo sapien
gagagagatatataactcccctatt

SEQ ID NO: 5437901 - DNA, 25 bp, Homo sapien
taataagtccttggcattgttttgc

SEQ ID NO: 5437902 - DNA, 25 bp, Homo sapien
tggaatttacagaggtaataagtcc

SEQ ID NO: 5437903 - DNA, 25 bp, Homo sapien
ctttttcctccatcacttcatcccc

SEQ ID NO: 5437904 - DNA, 25 bp, Homo sapien
ttttcctccatcacttcatccccta

SEQ ID NO: 5437905 - DNA, 25 bp, Homo sapien
tccatcacttcatcccctaaaggca

SEQ ID NO: 5437906 - DNA, 25 bp, Homo sapien
cctccatcacttcatcccctaaagg

SEQ ID NO: 5437907 - DNA, 25 bp, Homo sapien
tttactaatgatgaaagcacggagg

SEQ ID NO: 5437908 - DNA, 25 bp, Homo sapien
cctttaagtccttttactaatgatg

SEQ ID NO: 5437909 - DNA, 25 bp, Homo sapien
acggaggaaggcttatgggtatggc

SEQ ID NO: 5437910 - DNA, 25 bp, Homo sapien
tgaaagcacggaggaaggcttatgg

SEQ ID NO: 5437911 - DNA, 25 bp, Homo sapien
gcatttgaatgcaactcgtacagag

SEQ ID NO: 5437912 - DNA, 25 bp, Homo sapien
ggcatgacagctcaaccgcataggt

SEQ ID NO: 5437913 - DNA, 25 bp, Homo sapien
tctggactgggtatgagaaagacca

SEQ ID NO: 5437914 - DNA, 25 bp, Homo sapien
ccgcataggtgataaactgtactga

SEQ ID NO: 5437915 - DNA, 25 bp, Homo sapien
tcctgagcctgaggcttcctctcat

SEQ ID NO: 5437916 - DNA, 25 bp, Homo sapien
ctcttcctgagcctgaggcttcctc

SEQ ID NO: 5437917 - DNA, 25 bp, Homo sapien
tcattctttctctgtggctggccaa

SEQ ID NO: 5437918 - DNA, 25 bp, Homo sapien
tctttctctgtggctggccaagcat

SEQ ID NO: 5437919 - DNA, 25 bp, Homo sapien
cctggtttcctgatataagcagagt

SEQ ID NO: 5437920 - DNA, 25 bp, Homo sapien
ccaggatactatatgagcatgagca

SEQ ID NO: 5437921 - DNA, 25 bp, Homo sapien
gaatttggagagctttacatcaaac

SEQ ID NO: 5437922 - DNA, 25 bp, Homo sapien
tcctgatataagcagagttgtgaat

SEQ ID NO: 5437923 - DNA, 25 bp, Homo sapien
tttctggacatgtaatccctgctgg

SEQ ID NO: 5437924 - DNA, 25 bp, Homo sapien
ggtactgcaaccatttgaacgtgat

SEQ ID NO: 5437925 - DNA, 25 bp, Homo sapien
gctattgttttaagcacgtagtccc

SEQ ID NO: 5437926 - DNA, 25 bp, Homo sapien
catgttggcgtatcccttgtgtaaa

SEQ ID NO: 5437927 - DNA, 25 bp, Homo sapien
agtctcgcgtcctcggaaacgtcta

SEQ ID NO: 5437928 - DNA, 25 bp, Homo sapien
gatgttcacggcacattcccaacca

SEQ ID NO: 5437929 - DNA, 25 bp, Homo sapien
caagctccagcagaggatgttcacg

SEQ ID NO: 5437930 - DNA, 25 bp, Homo sapien
gaaacgtctacgtctaaatctgcag

SEQ ID NO: 5437931 - DNA, 25 bp, Homo sapien
ggagaaccaaaccatccaacacatc

SEQ ID NO: 5437932 - DNA, 25 bp, Homo sapien
tggagaaccaaaccatccaacacat

SEQ ID NO: 5437933 - DNA, 25 bp, Homo sapien
ctggagaaccaaaccatccaacaca

SEQ ID NO: 5437934 - DNA, 25 bp, Homo sapien
gtctcggctcgcctttgtgctggca

SEQ ID NO: 5437935 - DNA, 25 bp, Homo sapien
tctcggctcgcctttgtgctggcat

SEQ ID NO: 5437936 - DNA, 25 bp, Homo sapien
gcgcccttcccgctagacgcttcgg

SEQ ID NO: 5437937 - DNA, 25 bp, Homo sapien
agctggcggcacgtcggggaccggt

SEQ ID NO: 5437938 - DNA, 25 bp, Homo sapien
cgctagacgcttcggcggcatctgc

SEQ ID NO: 5437939 - DNA, 25 bp, Homo sapien
catctgcccgcaccgccctgcggga

SEQ ID NO: 5437940 - DNA, 25 bp, Homo sapien
tgcggctgggcggaggacgagtccc

SEQ ID NO: 5437941 - DNA, 25 bp, Homo sapien
cggaagaacggggcgggtgcggctg

SEQ ID NO: 5437942 - DNA, 25 bp, Homo sapien
agaacggggcgggtgcggctgggcg

SEQ ID NO: 5437943 - DNA, 25 bp, Homo sapien
ggcgggtgcggctgggcggaggacg

SEQ ID NO: 5437944 - DNA, 25 bp, Homo sapien
agtttgatctcacagtttgatctct

SEQ ID NO: 5437945 - DNA, 25 bp, Homo sapien
gatctcacagtttgatctctcagct

SEQ ID NO: 5437946 - DNA, 25 bp, Homo sapien
ttgatctcacagtttgatctctcag

SEQ ID NO: 5437947 - DNA, 25 bp, Homo sapien
ctcacagtttgatctctcagcttgc

SEQ ID NO: 5437948 - DNA, 25 bp, Homo sapien
agctgggcaagttcaacaacacagt

SEQ ID NO: 5437949 - DNA, 25 bp, Homo sapien
ggcaagttcaacaacacagtagcct

SEQ ID NO: 5437950 - DNA, 25 bp, Homo sapien
tgggcaagttcaacaacacagtagc

SEQ ID NO: 5437951 - DNA, 25 bp, Homo sapien
gctgggcaagttcaacaacacagta

SEQ ID NO: 5437952 - DNA, 25 bp, Homo sapien
ttaccatggtaagtgaggtgccttc

SEQ ID NO: 5437953 - DNA, 25 bp, Homo sapien
tccgtaaagaactgtgtaatgctcc

SEQ ID NO: 5437954 - DNA, 25 bp, Homo sapien
ccttctgctgtcagtggtcctggtc

SEQ ID NO: 5437955 - DNA, 25 bp, Homo sapien
tgcagtcactgatacaaccacacca

SEQ ID NO: 5437956 - DNA, 25 bp, Homo sapien
ttagccctgtgatcaactatgtagg

SEQ ID NO: 5437957 - DNA, 25 bp, Homo sapien
tctatgcctagaggttctgatgcct

SEQ ID NO: 5437958 - DNA, 25 bp, Homo sapien
tatcagcttgcccaacagaaggtgg

SEQ ID NO: 5437959 - DNA, 25 bp, Homo sapien
gaacatccttaagtttgtggcctca

SEQ ID NO: 5437960 - DNA, 25 bp, Homo sapien
cgggcacgctgggagctccagacca

SEQ ID NO: 5437961 - DNA, 25 bp, Homo sapien
tgtcgggcacgctgggagctccaga

SEQ ID NO: 5437962 - DNA, 25 bp, Homo sapien
tatttggtcatcttggaatggaata

SEQ ID NO: 5437963 - DNA, 25 bp, Homo sapien
tgtgtcgggcacgctgggagctcca

SEQ ID NO: 5437964 - DNA, 25 bp, Homo sapien
tgaaagtgcttacttgtcagcatgg

SEQ ID NO: 5437965 - DNA, 25 bp, Homo sapien
ggtaatgaaagtgcttacttgtcag

SEQ ID NO: 5437966 - DNA, 25 bp, Homo sapien
ctgaaagaagtattggtaatgaaag

SEQ ID NO: 5437967 - DNA, 25 bp, Homo sapien
taatgaaagtgcttacttgtcagca

SEQ ID NO: 5437968 - DNA, 25 bp, Homo sapien
ttagcactcatatcattaggttatt

SEQ ID NO: 5437969 - DNA, 25 bp, Homo sapien
gttttagaaccctagcagccccatg

SEQ ID NO: 5437970 - DNA, 25 bp, Homo sapien
tcagtcaatggtgtctagggaagac

SEQ ID NO: 5437971 - DNA, 25 bp, Homo sapien
ggcatattagaaggcgtgaacgctg

SEQ ID NO: 5437972 - DNA, 25 bp, Homo sapien
taccctgtgaggatgtagtcagtca

SEQ ID NO: 5437973 - DNA, 25 bp, Homo sapien
tggcagcactcttgactcttctccg

SEQ ID NO: 5437974 - DNA, 25 bp, Homo sapien
gcagatggcagcactcttgactctt

SEQ ID NO: 5437975 - DNA, 25 bp, Homo sapien
aacagaagtaagttcttgacaagcc

SEQ ID NO: 5437976 - DNA, 25 bp, Homo sapien
gcactcttgactcttctccgccttc

SEQ ID NO: 5437977 - DNA, 25 bp, Homo sapien
caaagctggctttagtctgcaactc

SEQ ID NO: 5437978 - DNA, 25 bp, Homo sapien
ttcagtgtgttagcgccttaccatc

SEQ ID NO: 5437979 - DNA, 25 bp, Homo sapien
cctctaggaaaacaatgggaatagg

SEQ ID NO: 5437980 - DNA, 25 bp, Homo sapien
cacttgcagcagaacttcagtgtgt

SEQ ID NO: 5437981 - DNA, 25 bp, Homo sapien
gggtatgatcttcagggttatgatt

SEQ ID NO: 5437982 - DNA, 25 bp, Homo sapien
taaatttggggtatgatcttcaggg

SEQ ID NO: 5437983 - DNA, 25 bp, Homo sapien
cttcagggttatgattagacttttc

SEQ ID NO: 5437984 - DNA, 25 bp, Homo sapien
caaacaggataaatttggggtatga

SEQ ID NO: 5437985 - DNA, 25 bp, Homo sapien
tgccagcactaacatgcccaagtgg

SEQ ID NO: 5437986 - DNA, 25 bp, Homo sapien
tcattctaccggctgaagaaccagc

SEQ ID NO: 5437987 - DNA, 25 bp, Homo sapien
cattagtatagggactatgggcctg

SEQ ID NO: 5437988 - DNA, 25 bp, Homo sapien
taagcatatcacagcagtcttcctc

SEQ ID NO: 5437989 - DNA, 25 bp, Homo sapien
tcaactgtgatcatgcaggagcagc

SEQ ID NO: 5437990 - DNA, 25 bp, Homo sapien
gaaactcctgattggcccaggttgg

SEQ ID NO: 5437991 - DNA, 25 bp, Homo sapien
ggctatctcctagaacgaatccaag

SEQ ID NO: 5437992 - DNA, 25 bp, Homo sapien
ctggcctgaggatagaactgaaaac

SEQ ID NO: 5437993 - DNA, 25 bp, Homo sapien
gggagacttatttcctccacggcta

SEQ ID NO: 5437994 - DNA, 25 bp, Homo sapien
tttaagagagaaactcggagcacag

SEQ ID NO: 5437995 - DNA, 25 bp, Homo sapien
gtttagcaccatacttagcatacag

SEQ ID NO: 5437996 - DNA, 25 bp, Homo sapien
cagtccagtgagctaatttaagaga

SEQ ID NO: 5437997 - DNA, 25 bp, Homo sapien
gggtgttactaacccatgtgcacat

SEQ ID NO: 5437998 - DNA, 25 bp, Homo sapien
cccatgtgcacattaattacagcat

SEQ ID NO: 5437999 - DNA, 25 bp, Homo sapien
tatttctttgatcctaagcctctac

SEQ ID NO: 5438000 - DNA, 25 bp, Homo sapien
ttgtttccctcccacaattgggctg

SEQ ID NO: 5438001 - DNA, 25 bp, Homo sapien
cttgaaatggaaaccatgtcctgtt

SEQ ID NO: 5438002 - DNA, 25 bp, Homo sapien
tgttattgaacaagctcttctctat

SEQ ID NO: 5438003 - DNA, 25 bp, Homo sapien
gcccagtcttatattacttgtgatc

SEQ ID NO: 5438004 - DNA, 25 bp, Homo sapien
tattccatacgtactacttgcccag

SEQ ID NO: 5438005 - DNA, 25 bp, Homo sapien
tgtattcgactccaagctagctcaa

SEQ ID NO: 5438006 - DNA, 25 bp, Homo sapien
tatattttgaattaagcccagcctc

SEQ ID NO: 5438007 - DNA, 25 bp, Homo sapien
tggtcatgacatcataaagagtccc

SEQ ID NO: 5438008 - DNA, 25 bp, Homo sapien
tacaaataataagccctgagacaga

SEQ ID NO: 5438009 - DNA, 25 bp, Homo sapien
caaaagcgtttgagccattccggta

SEQ ID NO: 5438010 - DNA, 25 bp, Homo sapien
tgtaggcaatatctcttcgtaagtc

SEQ ID NO: 5438011 - DNA, 25 bp, Homo sapien
tcgtaagtctaactggtcaagttct

SEQ ID NO: 5438012 - DNA, 25 bp, Homo sapien
cattccggtattcccactgctctga

SEQ ID NO: 5438013 - DNA, 25 bp, Homo sapien
tcagccccaactgatgaaggccacg

SEQ ID NO: 5438014 - DNA, 25 bp, Homo sapien
tggcagggcccacgtaaactgaggt

SEQ ID NO: 5438015 - DNA, 25 bp, Homo sapien
ttgtagaatgattcctggcagggcc

SEQ ID NO: 5438016 - DNA, 25 bp, Homo sapien
aaggccacggcccaaattgtagaat

SEQ ID NO: 5438017 - DNA, 25 bp, Homo sapien
gattgacgcctaaaagattgagcaa

SEQ ID NO: 5438018 - DNA, 25 bp, Homo sapien
tgtgccgttataggccaataaactt

SEQ ID NO: 5438019 - DNA, 25 bp, Homo sapien
aactttttgatgtgagattgacgcc

SEQ ID NO: 5438020 - DNA, 25 bp, Homo sapien
tttcagagcacagctacaatgacgc

SEQ ID NO: 5438021 - DNA, 25 bp, Homo sapien
catacttctgagatgccatatgaat

SEQ ID NO: 5438022 - DNA, 25 bp, Homo sapien
tgtacaataagagcatgtctccgta

SEQ ID NO: 5438023 - DNA, 25 bp, Homo sapien
tacagaagctatagagaggttcgtc

SEQ ID NO: 5438024 - DNA, 25 bp, Homo sapien
taaaggttaggcctatacagaagct

SEQ ID NO: 5438025 - DNA, 25 bp, Homo sapien
gcgatgatgtcgtacatcttgggag

SEQ ID NO: 5438026 - DNA, 25 bp, Homo sapien
caaacggagacagaagcgatgatgt

SEQ ID NO: 5438027 - DNA, 25 bp, Homo sapien
ttctgggtttttcagcatcaaacgg

SEQ ID NO: 5438028 - DNA, 25 bp, Homo sapien
ccatttaagacacatagggcatgat

SEQ ID NO: 5438029 - DNA, 25 bp, Homo sapien
gaaatcgggataggtcacataagga

SEQ ID NO: 5438030 - DNA, 25 bp, Homo sapien
gcaactcagcctcttgaaatcggga

SEQ ID NO: 5438031 - DNA, 25 bp, Homo sapien
tgtcaagacgcttgtgagcacagca

SEQ ID NO: 5438032 - DNA, 25 bp, Homo sapien
ggagtatatggccttcaacagaaga

SEQ ID NO: 5438033 - DNA, 25 bp, Homo sapien
actccttcaatactatccgcttctt

SEQ ID NO: 5438034 - DNA, 25 bp, Homo sapien
caagttccagctagttccatctgca

SEQ ID NO: 5438035 - DNA, 25 bp, Homo sapien
taacaatctgcattcccaggcacct

SEQ ID NO: 5438036 - DNA, 25 bp, Homo sapien
ccaggcacctgattcggacttggtc

SEQ ID NO: 5438037 - DNA, 25 bp, Homo sapien
gctgtccagtgttacttcatgagtc

SEQ ID NO: 5438038 - DNA, 25 bp, Homo sapien
cacttgagagatttagattggaaaa

SEQ ID NO: 5438039 - DNA, 25 bp, Homo sapien
tattttcaattagattgctgtccag

SEQ ID NO: 5438040 - DNA, 25 bp, Homo sapien
cgaatgagtttattacacttgagag

SEQ ID NO: 5438041 - DNA, 25 bp, Homo sapien
aaacttgggctcgattcattgctac

SEQ ID NO: 5438042 - DNA, 25 bp, Homo sapien
tttgtctctcgatactttaataaga

SEQ ID NO: 5438043 - DNA, 25 bp, Homo sapien
tgcatcacaatttgctgactcttgg

SEQ ID NO: 5438044 - DNA, 25 bp, Homo sapien
taagataaagatgcctctctccaga

SEQ ID NO: 5438045 - DNA, 25 bp, Homo sapien
ttaaagatgaagatttcagattctt

SEQ ID NO: 5438046 - DNA, 25 bp, Homo sapien
tttgccttgtgaaaacaacagagta

SEQ ID NO: 5438047 - DNA, 25 bp, Homo sapien
taaaagcatggctaacatagtaagt

SEQ ID NO: 5438048 - DNA, 25 bp, Homo sapien
cagagtagaacgatgaagcaataac

SEQ ID NO: 5438049 - DNA, 25 bp, Homo sapien
gtaagtaaggtatccacataaccat

SEQ ID NO: 5438050 - DNA, 25 bp, Homo sapien
gcagctcgctccatatagcctaagg

SEQ ID NO: 5438051 - DNA, 25 bp, Homo sapien
aaccaccttgccatagctttcagca

SEQ ID NO: 5438052 - DNA, 25 bp, Homo sapien
gaaatccttgcatccaaatggagtg

SEQ ID NO: 5438053 - DNA, 25 bp, Homo sapien
gtatctggatcatacattggttcca

SEQ ID NO: 5438054 - DNA, 25 bp, Homo sapien
gatgtgagtgcactactgccccaaa

SEQ ID NO: 5438055 - DNA, 25 bp, Homo sapien
gcagattactatggacttaggcaca

SEQ ID NO: 5438056 - DNA, 25 bp, Homo sapien
ggaaatcacttagtagcctagcaag

SEQ ID NO: 5438057 - DNA, 25 bp, Homo sapien
tacactattagtaacacaggagcag

SEQ ID NO: 5438058 - DNA, 25 bp, Homo sapien
gcttcagcaacatctaggtataggt

SEQ ID NO: 5438059 - DNA, 25 bp, Homo sapien
aggtataggtctcccatatcttcag

SEQ ID NO: 5438060 - DNA, 25 bp, Homo sapien
catgacgaagccaaactactgcaag

SEQ ID NO: 5438061 - DNA, 25 bp, Homo sapien
tcaccaacatccagaaaagcttcag

SEQ ID NO: 5438062 - DNA, 25 bp, Homo sapien
tataagaggcaagctgaaaaggagc

SEQ ID NO: 5438063 - DNA, 25 bp, Homo sapien
ggagcaaggcttaataaaaacagcg

SEQ ID NO: 5438064 - DNA, 25 bp, Homo sapien
gttatatggtcatttttctgttcac

SEQ ID NO: 5438065 - DNA, 25 bp, Homo sapien
catatcagttataagaggcaagctg

SEQ ID NO: 5438066 - DNA, 25 bp, Homo sapien
gttgtttccttagatatccccatgg

SEQ ID NO: 5438067 - DNA, 25 bp, Homo sapien
cattgcaggaactaagacacagctc

SEQ ID NO: 5438068 - DNA, 25 bp, Homo sapien
tcaccagccaatgtcccgtatatgt

SEQ ID NO: 5438069 - DNA, 25 bp, Homo sapien
caaagtccgcaaaaaagaatagctg

SEQ ID NO: 5438070 - DNA, 25 bp, Homo sapien
tattggcacgccatcaggtatagtg

SEQ ID NO: 5438071 - DNA, 25 bp, Homo sapien
caaggcagaccatcaacttcactgt

SEQ ID NO: 5438072 - DNA, 25 bp, Homo sapien
caggtatagtgcaggtaacattctc

SEQ ID NO: 5438073 - DNA, 25 bp, Homo sapien
aacttcactgtgatatctattggca

SEQ ID NO: 5438074 - DNA, 25 bp, Homo sapien
caagaagcagttactatatgcaagc

SEQ ID NO: 5438075 - DNA, 25 bp, Homo sapien
ggtagcaagtatgcttcctattcga

SEQ ID NO: 5438076 - DNA, 25 bp, Homo sapien
tagtgtggccaactctattaataag

SEQ ID NO: 5438077 - DNA, 25 bp, Homo sapien
tctctcagtctgtcctttggtagca

SEQ ID NO: 5438078 - DNA, 25 bp, Homo sapien
aattctcttacaagagccgggttat

SEQ ID NO: 5438079 - DNA, 25 bp, Homo sapien
tctgctcataaagatcaattttgct

SEQ ID NO: 5438080 - DNA, 25 bp, Homo sapien
aattttgctacaacttgatgtaggg

SEQ ID NO: 5438081 - DNA, 25 bp, Homo sapien
ggttgaaggtactatacaggaattc

SEQ ID NO: 5438082 - DNA, 25 bp, Homo sapien
ttctcttctgaggtgccttcttctg

SEQ ID NO: 5438083 - DNA, 25 bp, Homo sapien
ctcttctgaggtgccttcttctgaa

SEQ ID NO: 5438084 - DNA, 25 bp, Homo sapien
tctgaggtgccttcttctgaagttt

SEQ ID NO: 5438085 - DNA, 25 bp, Homo sapien
ttattctcttctgaggtgccttctt

SEQ ID NO: 5438086 - DNA, 25 bp, Homo sapien
tcttccatggagactaggccctggt

SEQ ID NO: 5438087 - DNA, 25 bp, Homo sapien
aagctttgtcatactgtttgttaga

SEQ ID NO: 5438088 - DNA, 25 bp, Homo sapien
taatagcagaagtaacatcattggc

SEQ ID NO: 5438089 - DNA, 25 bp, Homo sapien
tgttagaaatatatagttcagctgc

SEQ ID NO: 5438090 - DNA, 25 bp, Homo sapien
taaaggcttgatcgctcccacagat

SEQ ID NO: 5438091 - DNA, 25 bp, Homo sapien
aaaatacgcctataaccatccatgg

SEQ ID NO: 5438092 - DNA, 25 bp, Homo sapien
ccacagataacggacattagtaggt

SEQ ID NO: 5438093 - DNA, 25 bp, Homo sapien
tctagccagctgcataaaacgttcg

SEQ ID NO: 5438094 - DNA, 25 bp, Homo sapien
aaaaaatagcctgcttaatattgtc

SEQ ID NO: 5438095 - DNA, 25 bp, Homo sapien
gcaaaaaatagcctgcttaatattg

SEQ ID NO: 5438096 - DNA, 25 bp, Homo sapien
atagcaaaaaatagcctgcttaata

SEQ ID NO: 5438097 - DNA, 25 bp, Homo sapien
tagcaaaaaatagcctgcttaatat

SEQ ID NO: 5438098 - DNA, 25 bp, Homo sapien
catttctgccagtctaacccattct

SEQ ID NO: 5438099 - DNA, 25 bp, Homo sapien
tgttccagagacatttctgccagtc

SEQ ID NO: 5438100 - DNA, 25 bp, Homo sapien
agtctaacccattcttctgtgtcac

SEQ ID NO: 5438101 - DNA, 25 bp, Homo sapien
ttgttccagagacatttctgccagt

SEQ ID NO: 5438102 - DNA, 25 bp, Homo sapien
aatgcgcagcaatcaactcaaactg

SEQ ID NO: 5438103 - DNA, 25 bp, Homo sapien
gcagcaatcaactcaaactgcaatg

SEQ ID NO: 5438104 - DNA, 25 bp, Homo sapien
tgggatttaaatgcgcagcaatcaa

SEQ ID NO: 5438105 - DNA, 25 bp, Homo sapien
aactgcaatgatttttccatgtcac

SEQ ID NO: 5438106 - DNA, 25 bp, Homo sapien
catatatcatggctagagtagagaa

SEQ ID NO: 5438107 - DNA, 25 bp, Homo sapien
tatcatggctagagtagagaatggc

SEQ ID NO: 5438108 - DNA, 25 bp, Homo sapien
ggtcctcatatatcatggctagagt

SEQ ID NO: 5438109 - DNA, 25 bp, Homo sapien
cttggtcctcatatatcatggctag

SEQ ID NO: 5438110 - DNA, 25 bp, Homo sapien
tgcacatcaatatcgcctcttcacg

SEQ ID NO: 5438111 - DNA, 25 bp, Homo sapien
caaaacgaatgttggcttcacccat

SEQ ID NO: 5438112 - DNA, 25 bp, Homo sapien
tcttcacgttctcctcgagcaaaac

SEQ ID NO: 5438113 - DNA, 25 bp, Homo sapien
tttccatgcacatcaatatcgcctc

SEQ ID NO: 5438114 - DNA, 25 bp, Homo sapien
ctctgggaagtttactccgaggcct

SEQ ID NO: 5438115 - DNA, 25 bp, Homo sapien
tttcttggtttcacgattgagaacc

SEQ ID NO: 5438116 - DNA, 25 bp, Homo sapien
atctccaatacaaatacatcgcccg

SEQ ID NO: 5438117 - DNA, 25 bp, Homo sapien
atacaaatacatcgcccgcagtggg

SEQ ID NO: 5438118 - DNA, 25 bp, Homo sapien
cgattgagaaccatctccaatacaa

SEQ ID NO: 5438119 - DNA, 25 bp, Homo sapien
tcattctctccaagcatggaagcaa

SEQ ID NO: 5438120 - DNA, 25 bp, Homo sapien
cattctctccaagcatggaagcaaa

SEQ ID NO: 5438121 - DNA, 25 bp, Homo sapien
tctctccaagcatggaagcaaagac

SEQ ID NO: 5438122 - DNA, 25 bp, Homo sapien
cttcattctctccaagcatggaagc

SEQ ID NO: 5438123 - DNA, 25 bp, Homo sapien
acttcctcactccatctgatgtttc

SEQ ID NO: 5438124 - DNA, 25 bp, Homo sapien
actgacttcctcactccatctgatg

SEQ ID NO: 5438125 - DNA, 25 bp, Homo sapien
tgaactgacttcctcactccatctg

SEQ ID NO: 5438126 - DNA, 25 bp, Homo sapien
cttgtgaactgacttcctcactcca

SEQ ID NO: 5438127 - DNA, 25 bp, Homo sapien
gtagagttctgggacaattccttac

SEQ ID NO: 5438128 - DNA, 25 bp, Homo sapien
gagtcttggtagagttctgggacaa

SEQ ID NO: 5438129 - DNA, 25 bp, Homo sapien
tcttggtagagttctgggacaattc

SEQ ID NO: 5438130 - DNA, 25 bp, Homo sapien
caagagtcttggtagagttctggga

SEQ ID NO: 5438131 - DNA, 25 bp, Homo sapien
aaaaggatgtatgacattatctgag

SEQ ID NO: 5438132 - DNA, 25 bp, Homo sapien
tatgacattatctgagctgaagcca

SEQ ID NO: 5438133 - DNA, 25 bp, Homo sapien
taggagcttcacatcttaaaaggat

SEQ ID NO: 5438134 - DNA, 25 bp, Homo sapien
gaagccagccagtccttgtgggcct

SEQ ID NO: 5438135 - DNA, 25 bp, Homo sapien
tgtgctgtgtgtgaagttccatgag

SEQ ID NO: 5438136 - DNA, 25 bp, Homo sapien
cacgctaacatttctatcttttctc

SEQ ID NO: 5438137 - DNA, 25 bp, Homo sapien
caacttgccttccacgctaacattt

SEQ ID NO: 5438138 - DNA, 25 bp, Homo sapien
gaggtagcctaccaagacacctgtg

SEQ ID NO: 5438139 - DNA, 25 bp, Homo sapien
caggaagcacataattttaacatac

SEQ ID NO: 5438140 - DNA, 25 bp, Homo sapien
ttgcaggaagcacataattttaaca

SEQ ID NO: 5438141 - DNA, 25 bp, Homo sapien
acattcattgcaggaagcacataat

SEQ ID NO: 5438142 - DNA, 25 bp, Homo sapien
attcattgcaggaagcacataattt

SEQ ID NO: 5438143 - DNA, 25 bp, Homo sapien
cagagtcatcgggattttcttcagc

SEQ ID NO: 5438144 - DNA, 25 bp, Homo sapien
tggtagagttaattcctgatgatga

SEQ ID NO: 5438145 - DNA, 25 bp, Homo sapien
agagtcatcgggattttcttcagct

SEQ ID NO: 5438146 - DNA, 25 bp, Homo sapien
gacatctttgtcttgggatttggta

SEQ ID NO: 5438147 - DNA, 25 bp, Homo sapien
tcgaactcctcaaaggagattttcc

SEQ ID NO: 5438148 - DNA, 25 bp, Homo sapien
tccgccgttcgaactcctcaaagga

SEQ ID NO: 5438149 - DNA, 25 bp, Homo sapien
tgagttccggactgaaccctgacat

SEQ ID NO: 5438150 - DNA, 25 bp, Homo sapien
tcccttccaagtagtcgatgagttc

SEQ ID NO: 5438151 - DNA, 25 bp, Homo sapien
tccagaagctacctcgccggggcca

SEQ ID NO: 5438152 - DNA, 25 bp, Homo sapien
tctgtgcaaccccaggaaccgggac

SEQ ID NO: 5438153 - DNA, 25 bp, Homo sapien
agaagctacctcgccggggccagca

SEQ ID NO: 5438154 - DNA, 25 bp, Homo sapien
ctgtctgtgcaaccccaggaaccgg

SEQ ID NO: 5438155 - DNA, 25 bp, Homo sapien
gagcatctttggaggcgttgacaac

SEQ ID NO: 5438156 - DNA, 25 bp, Homo sapien
gacaacttctagaatcccatgtttg

SEQ ID NO: 5438157 - DNA, 25 bp, Homo sapien
gaaaagcagctattccaaatgtgag

SEQ ID NO: 5438158 - DNA, 25 bp, Homo sapien
tccacctctgaatactctggcaaag

SEQ ID NO: 5438159 - DNA, 25 bp, Homo sapien
caaatacatgcggtgctctacatca

SEQ ID NO: 5438160 - DNA, 25 bp, Homo sapien
gcatagaaatcatagttccagcgat

SEQ ID NO: 5438161 - DNA, 25 bp, Homo sapien
ttgtgatgtttttgtaactcctaca

SEQ ID NO: 5438162 - DNA, 25 bp, Homo sapien
gaaactccatgaaagtttagctatg

SEQ ID NO: 5438163 - DNA, 25 bp, Homo sapien
gaggtctaggattttcattcgtggg

SEQ ID NO: 5438164 - DNA, 25 bp, Homo sapien
gagagaggtctaggattttcattcg

SEQ ID NO: 5438165 - DNA, 25 bp, Homo sapien
gttccaagatcaagacctctgccct

SEQ ID NO: 5438166 - DNA, 25 bp, Homo sapien
agttctgactggaaagagagaggtc

SEQ ID NO: 5438167 - DNA, 25 bp, Homo sapien
tgttgagtggcttccatttgtcctc

SEQ ID NO: 5438168 - DNA, 25 bp, Homo sapien
gggttgttgagtggcttccatttgt

SEQ ID NO: 5438169 - DNA, 25 bp, Homo sapien
tttctggggttgttgagtggcttcc

SEQ ID NO: 5438170 - DNA, 25 bp, Homo sapien
tctgtttctggggttgttgagtggc

SEQ ID NO: 5438171 - DNA, 25 bp, Homo sapien
agcaccagggcaacacatagtagca

SEQ ID NO: 5438172 - DNA, 25 bp, Homo sapien
ccagggcaacacatagtagcaggag

SEQ ID NO: 5438173 - DNA, 25 bp, Homo sapien
caccagggcaacacatagtagcagg

SEQ ID NO: 5438174 - DNA, 25 bp, Homo sapien
ctgagtgaaagaggggatgcgggag

SEQ ID NO: 5438175 - DNA, 25 bp, Homo sapien
gaaattacttcagataccgagctga

SEQ ID NO: 5438176 - DNA, 25 bp, Homo sapien
gattgacttctaaatgaggacccca

SEQ ID NO: 5438177 - DNA, 25 bp, Homo sapien
agattgtcttccactccaaggtgtg

SEQ ID NO: 5438178 - DNA, 25 bp, Homo sapien
tagaaatgcggcagccactccttga

SEQ ID NO: 5438179 - DNA, 25 bp, Homo sapien
agtcacaacactataaactccttag

SEQ ID NO: 5438180 - DNA, 25 bp, Homo sapien
tactgagattatagtaaaaagtcac

SEQ ID NO: 5438181 - DNA, 25 bp, Homo sapien
tataaactccttagacaatgcccac

SEQ ID NO: 5438182 - DNA, 25 bp, Homo sapien
ccaacatggcatgcgtatacctgta

SEQ ID NO: 5438183 - DNA, 25 bp, Homo sapien
aaaatgatagttcattcccagcatg

SEQ ID NO: 5438184 - DNA, 25 bp, Homo sapien
cggccacaaccagtgagcttttatc

SEQ ID NO: 5438185 - DNA, 25 bp, Homo sapien
ttcccagcatgctgagagcactgta

SEQ ID NO: 5438186 - DNA, 25 bp, Homo sapien
gcccggccacaaccagtgagctttt

SEQ ID NO: 5438187 - DNA, 25 bp, Homo sapien
tgtatgtagctgttatatgtagggc

SEQ ID NO: 5438188 - DNA, 25 bp, Homo sapien
tatcattgtaaaaccaaggacagtt

SEQ ID NO: 5438189 - DNA, 25 bp, Homo sapien
tgtagctgttatatgtagggcaatc

SEQ ID NO: 5438190 - DNA, 25 bp, Homo sapien
tatgtagctgttatatgtagggcaa

SEQ ID NO: 5438191 - DNA, 25 bp, Homo sapien
ccaccttcttcaggcagcaatctct

SEQ ID NO: 5438192 - DNA, 25 bp, Homo sapien
ttctccagtaggtcaaaatcttttc

SEQ ID NO: 5438193 - DNA, 25 bp, Homo sapien
gtactgcctaccatgtacaatgctg

SEQ ID NO: 5438194 - DNA, 25 bp, Homo sapien
cagtaggtcaaaatcttttccagaa

SEQ ID NO: 5438195 - DNA, 25 bp, Homo sapien
tacacattaatacctgagcagagac

SEQ ID NO: 5438196 - DNA, 25 bp, Homo sapien
actgtgagtacacagaaatgtgggc

SEQ ID NO: 5438197 - DNA, 25 bp, Homo sapien
tacaaagtactggagatcatgcatg

SEQ ID NO: 5438198 - DNA, 25 bp, Homo sapien
tgaagcccgttttctcttgaagcct

SEQ ID NO: 5438199 - DNA, 25 bp, Homo sapien
tatttcaccaacctcgaagacaagg

SEQ ID NO: 5438200 - DNA, 25 bp, Homo sapien
ggaggcctctacagcaatagttctg

SEQ ID NO: 5438201 - DNA, 25 bp, Homo sapien
tactatgttaggttccagtggacaa

SEQ ID NO: 5438202 - DNA, 25 bp, Homo sapien
gacaagttcccctgtgaaacatgtg

SEQ ID NO: 5438203 - DNA, 25 bp, Homo sapien
agtgaactatgaccgccccattgga

SEQ ID NO: 5438204 - DNA, 25 bp, Homo sapien
tatgaaacagaacgagtgcaacacg

SEQ ID NO: 5438205 - DNA, 25 bp, Homo sapien
caatagggtctaggagttaagcaca

SEQ ID NO: 5438206 - DNA, 25 bp, Homo sapien
taggaactaggccaggtggtcatgc

SEQ ID NO: 5438207 - DNA, 25 bp, Homo sapien
gagtatactcttctgccttgccgat

SEQ ID NO: 5438208 - DNA, 25 bp, Homo sapien
aaaactggtgctcgaggacatccct

SEQ ID NO: 5438209 - DNA, 25 bp, Homo sapien
tataagccgggtatgtctcagcctg

SEQ ID NO: 5438210 - DNA, 25 bp, Homo sapien
taatagtctcctgatgttcaccgag

SEQ ID NO: 5438211 - DNA, 25 bp, Homo sapien
ttgtgaagtagtcttcaacaattta

SEQ ID NO: 5438212 - DNA, 25 bp, Homo sapien
ttgcataatgcatggagtaaaagag

SEQ ID NO: 5438213 - DNA, 25 bp, Homo sapien
gaagacaaagcatggaagcctatat

SEQ ID NO: 5438214 - DNA, 25 bp, Homo sapien
tgtgctgacccaaaagcaatcacac

SEQ ID NO: 5438215 - DNA, 25 bp, Homo sapien
gaattgccatagtcggaataaggat

SEQ ID NO: 5438216 - DNA, 25 bp, Homo sapien
aatgccaaaggtttacatggatcag

SEQ ID NO: 5438217 - DNA, 25 bp, Homo sapien
ccaagaattgccatagtcggaataa

SEQ ID NO: 5438218 - DNA, 25 bp, Homo sapien
tacatggatcaggattaagtttaaa

SEQ ID NO: 5438219 - DNA, 25 bp, Homo sapien
cacagtactgtgcatgcgaaggcta

SEQ ID NO: 5438220 - DNA, 25 bp, Homo sapien
ttggcagataaacgaagatggtgta

SEQ ID NO: 5438221 - DNA, 25 bp, Homo sapien
ggctatcttcagcatcgttggcaga

SEQ ID NO: 5438222 - DNA, 25 bp, Homo sapien
caataaattagagaaggcatgctga

SEQ ID NO: 5438223 - DNA, 25 bp, Homo sapien
aaaagttgttaagctggcttgcaga

SEQ ID NO: 5438224 - DNA, 25 bp, Homo sapien
agttgttaagctggcttgcagatga

SEQ ID NO: 5438225 - DNA, 25 bp, Homo sapien
caggctggctattcttaaaagttgt

SEQ ID NO: 5438226 - DNA, 25 bp, Homo sapien
cacaggctggctattcttaaaagtt

SEQ ID NO: 5438227 - DNA, 25 bp, Homo sapien
tgtttcgtctcttacccatgttcaa

SEQ ID NO: 5438228 - DNA, 25 bp, Homo sapien
aaagaggtgtgaatataaactgccc

SEQ ID NO: 5438229 - DNA, 25 bp, Homo sapien
taaactgccctagtgaaatgttaaa

SEQ ID NO: 5438230 - DNA, 25 bp, Homo sapien
gattaatagcttgatcctactgaca

SEQ ID NO: 5438231 - DNA, 25 bp, Homo sapien
caagttgtccaactaactatgatca

SEQ ID NO: 5438232 - DNA, 25 bp, Homo sapien
taagaaagaagtatggctagtgctc

SEQ ID NO: 5438233 - DNA, 25 bp, Homo sapien
ggctagtgctccacaagttgtccaa

SEQ ID NO: 5438234 - DNA, 25 bp, Homo sapien
taactatgatcaagacaattgtcaa

SEQ ID NO: 5438235 - DNA, 25 bp, Homo sapien
tgatatctttaggaagttcagaggg

SEQ ID NO: 5438236 - DNA, 25 bp, Homo sapien
ttgatatctttaggaagttcagagg

SEQ ID NO: 5438237 - DNA, 25 bp, Homo sapien
cttgatatctttaggaagttcagag

SEQ ID NO: 5438238 - DNA, 25 bp, Homo sapien
gatatctttaggaagttcagagggt

SEQ ID NO: 5438239 - DNA, 25 bp, Homo sapien
cactccagtaggcagtacacgttcc

SEQ ID NO: 5438240 - DNA, 25 bp, Homo sapien
catactctgacaagttaaaatgacg

SEQ ID NO: 5438241 - DNA, 25 bp, Homo sapien
cagaagacagtaggccactccagta

SEQ ID NO: 5438242 - DNA, 25 bp, Homo sapien
aatgacggcatctaattctggtaac

SEQ ID NO: 5438243 - DNA, 25 bp, Homo sapien
caagtgagcctactgatctttgaag

SEQ ID NO: 5438244 - DNA, 25 bp, Homo sapien
caagagagtctctaaagttccatga

SEQ ID NO: 5438245 - DNA, 25 bp, Homo sapien
taggatactcacagatcatggacca

SEQ ID NO: 5438246 - DNA, 25 bp, Homo sapien
gaaacaagtcaactgccaaatctgt

SEQ ID NO: 5438247 - DNA, 25 bp, Homo sapien
aaggatcaactttgtatggtttggc

SEQ ID NO: 5438248 - DNA, 25 bp, Homo sapien
taatgataattacaaaaggatcaac

SEQ ID NO: 5438249 - DNA, 25 bp, Homo sapien
tatggtttggcttctttatccaaca

SEQ ID NO: 5438250 - DNA, 25 bp, Homo sapien
tctttatccaacatggtagcatatt

SEQ ID NO: 5438251 - DNA, 25 bp, Homo sapien
attagctttatgggacaaaattctg

SEQ ID NO: 5438252 - DNA, 25 bp, Homo sapien
gctgttatgaataatactcctatga

SEQ ID NO: 5438253 - DNA, 25 bp, Homo sapien
taaagataggcctattctgaacact

SEQ ID NO: 5438254 - DNA, 25 bp, Homo sapien
tccttctctaaagataggcctattc

SEQ ID NO: 5438255 - DNA, 25 bp, Homo sapien
taaaaggctgggtctggcacagatc

SEQ ID NO: 5438256 - DNA, 25 bp, Homo sapien
taataactgctatactccagggaag

SEQ ID NO: 5438257 - DNA, 25 bp, Homo sapien
caaggcagcaaggaagcattggctc

SEQ ID NO: 5438258 - DNA, 25 bp, Homo sapien
tttggtcccctatgtagaagcagca

SEQ ID NO: 5438259 - DNA, 25 bp, Homo sapien
tattagatacgacataagcaggaag

SEQ ID NO: 5438260 - DNA, 25 bp, Homo sapien
gagaatataactgtcctctataagc

SEQ ID NO: 5438261 - DNA, 25 bp, Homo sapien
taagcaagaaggatattagatacga

SEQ ID NO: 5438262 - DNA, 25 bp, Homo sapien
aatataactgtcctctataagcaag

SEQ ID NO: 5438263 - DNA, 25 bp, Homo sapien
aaataatcaaccagccaggaatctc

SEQ ID NO: 5438264 - DNA, 25 bp, Homo sapien
ttgtgaaaaggaagtcttaactgtc

SEQ ID NO: 5438265 - DNA, 25 bp, Homo sapien
tgtgaaaaggaagtcttaactgtca

SEQ ID NO: 5438266 - DNA, 25 bp, Homo sapien
gtgaaaaggaagtcttaactgtcac

SEQ ID NO: 5438267 - DNA, 25 bp, Homo sapien
atttgtgaaaaggaagtcttaactg

SEQ ID NO: 5438268 - DNA, 25 bp, Homo sapien
catatctaattatttgacagctgag

SEQ ID NO: 5438269 - DNA, 25 bp, Homo sapien
gacagctgagtgaatgctattttgc

SEQ ID NO: 5438270 - DNA, 25 bp, Homo sapien
taatggtaaaccttaaaggcactca

SEQ ID NO: 5438271 - DNA, 25 bp, Homo sapien
gctattttgctcctttactacctaa

SEQ ID NO: 5438272 - DNA, 25 bp, Homo sapien
cattttaaataatgccacatgggta

SEQ ID NO: 5438273 - DNA, 25 bp, Homo sapien
ctcgtaccgacagtctgatgacgtg

SEQ ID NO: 5438274 - DNA, 25 bp, Homo sapien
tctggttgagcaatatggagtttca

SEQ ID NO: 5438275 - DNA, 25 bp, Homo sapien
cagtctgatgacgtgtacattttaa

SEQ ID NO: 5438276 - DNA, 25 bp, Homo sapien
cctctaggacacaggagttgcgaga

SEQ ID NO: 5438277 - DNA, 25 bp, Homo sapien
cacaattgtttgaatgctccctcta

SEQ ID NO: 5438278 - DNA, 25 bp, Homo sapien
tataggaacaatgctacataaagga

SEQ ID NO: 5438279 - DNA, 25 bp, Homo sapien
gacacataattgtggatgggcactt

SEQ ID NO: 5438280 - DNA, 25 bp, Homo sapien
aggaatatgaagtctatagatactg

SEQ ID NO: 5438281 - DNA, 25 bp, Homo sapien
gaagtctatagatactggttatttc

SEQ ID NO: 5438282 - DNA, 25 bp, Homo sapien
gtgaatcttcataagaccaaggaat

SEQ ID NO: 5438283 - DNA, 25 bp, Homo sapien
tcttcataagaccaaggaatatgaa

SEQ ID NO: 5438284 - DNA, 25 bp, Homo sapien
tgagcacttgcttaccacgttgatt

SEQ ID NO: 5438285 - DNA, 25 bp, Homo sapien
gctgagcacttgcttaccacgttga

SEQ ID NO: 5438286 - DNA, 25 bp, Homo sapien
gagcacttgcttaccacgttgattt

SEQ ID NO: 5438287 - DNA, 25 bp, Homo sapien
cacttgcttaccacgttgattttaa

SEQ ID NO: 5438288 - DNA, 25 bp, Homo sapien
tagattgtagtataggccatttgta

SEQ ID NO: 5438289 - DNA, 25 bp, Homo sapien
gccatttgtatttaacaccactttc

SEQ ID NO: 5438290 - DNA, 25 bp, Homo sapien
ttaacaccactttccttgaagacaa

SEQ ID NO: 5438291 - DNA, 25 bp, Homo sapien
gaagctctagattgtagtataggcc

SEQ ID NO: 5438292 - DNA, 25 bp, Homo sapien
aactcctaaaaatctaatctcccag

SEQ ID NO: 5438293 - DNA, 25 bp, Homo sapien
gatatgggtgattcagaattgtcat

SEQ ID NO: 5438294 - DNA, 25 bp, Homo sapien
caggttttcacttctgtatggagtt

SEQ ID NO: 5438295 - DNA, 25 bp, Homo sapien
taatgatagaattggattatagccc

SEQ ID NO: 5438296 - DNA, 25 bp, Homo sapien
taaagaattcacaatctacaacaaa

SEQ ID NO: 5438297 - DNA, 25 bp, Homo sapien
ttttaaagaattcacaatctacaac

SEQ ID NO: 5438298 - DNA, 25 bp, Homo sapien
tttaaagaattcacaatctacaaca

SEQ ID NO: 5438299 - DNA, 25 bp, Homo sapien
tttttaaagaattcacaatctacaa

SEQ ID NO: 5438300 - DNA, 25 bp, Homo sapien
agaggttttagtattgcagatgctg

SEQ ID NO: 5438301 - DNA, 25 bp, Homo sapien
gatgctgaattacctcttacttgag

SEQ ID NO: 5438302 - DNA, 25 bp, Homo sapien
tgcagatgctgaattacctcttact

SEQ ID NO: 5438303 - DNA, 25 bp, Homo sapien
gaggttttagtattgcagatgctga

SEQ ID NO: 5438304 - DNA, 25 bp, Homo sapien
tccacgaacagatggtacataaaca

SEQ ID NO: 5438305 - DNA, 25 bp, Homo sapien
gatggtacataaacaacaagatgag

SEQ ID NO: 5438306 - DNA, 25 bp, Homo sapien
gaacagatggtacataaacaacaag

SEQ ID NO: 5438307 - DNA, 25 bp, Homo sapien
ggtacataaacaacaagatgagaca

SEQ ID NO: 5438308 - DNA, 25 bp, Homo sapien
tttccatgataaatcaaccccttgc

SEQ ID NO: 5438309 - DNA, 25 bp, Homo sapien
ccatgataaatcaaccccttgcagg

SEQ ID NO: 5438310 - DNA, 25 bp, Homo sapien
cagctttccatgataaatcaacccc

SEQ ID NO: 5438311 - DNA, 25 bp, Homo sapien
gctttccatgataaatcaacccctt

SEQ ID NO: 5438312 - DNA, 25 bp, Homo sapien
tagaagtgctgtttatgcaagcaaa

SEQ ID NO: 5438313 - DNA, 25 bp, Homo sapien
agaagtgctgtttatgcaagcaaaa

SEQ ID NO: 5438314 - DNA, 25 bp, Homo sapien
gatagttatatagtaagtaatctac

SEQ ID NO: 5438315 - DNA, 25 bp, Homo sapien
aaagctggaggtagacttttataca

SEQ ID NO: 5438316 - DNA, 25 bp, Homo sapien
gatttcagtaatgtccatactttaa

SEQ ID NO: 5438317 - DNA, 25 bp, Homo sapien
actgtgttttactttatcgtttgag

SEQ ID NO: 5438318 - DNA, 25 bp, Homo sapien
gcatagtgctctgacaatagacatg

SEQ ID NO: 5438319 - DNA, 25 bp, Homo sapien
cagcatagtgctctgacaatagaca

SEQ ID NO: 5438320 - DNA, 25 bp, Homo sapien
gctctgacaatagacatgagtgtag

SEQ ID NO: 5438321 - DNA, 25 bp, Homo sapien
tagtgctctgacaatagacatgagt

SEQ ID NO: 5438322 - DNA, 25 bp, Homo sapien
taagctacataggtccatttggaca

SEQ ID NO: 5438323 - DNA, 25 bp, Homo sapien
tccatttggacacttttactagaac

SEQ ID NO: 5438324 - DNA, 25 bp, Homo sapien
cataggtccatttggacacttttac

SEQ ID NO: 5438325 - DNA, 25 bp, Homo sapien
gttgtaagctacataggtccatttg

SEQ ID NO: 5438326 - DNA, 25 bp, Homo sapien
gttaagtcagaaattatagctggat

SEQ ID NO: 5438327 - DNA, 25 bp, Homo sapien
tgatgggtgtcttataaagtggtga

SEQ ID NO: 5438328 - DNA, 25 bp, Homo sapien
cctcaaaatgttttgatgggtgtct

SEQ ID NO: 5438329 - DNA, 25 bp, Homo sapien
ttataaagtggtgatacaaaactga

SEQ ID NO: 5438330 - DNA, 25 bp, Homo sapien
cgaactgtagtcaactgcaattgtt

SEQ ID NO: 5438331 - DNA, 25 bp, Homo sapien
gaatgctcgaactgtagtcaactgc

SEQ ID NO: 5438332 - DNA, 25 bp, Homo sapien
ttgtttagtatcagcatcaataaga

SEQ ID NO: 5438333 - DNA, 25 bp, Homo sapien
taagatcaaagaatgctcgaactgt

SEQ ID NO: 5438334 - DNA, 25 bp, Homo sapien
gaggtggtctgttgagacccaggtc

SEQ ID NO: 5438335 - DNA, 25 bp, Homo sapien
gagaggtggtctgttgagacccagg

SEQ ID NO: 5438336 - DNA, 25 bp, Homo sapien
agaggtggtctgttgagacccaggt

SEQ ID NO: 5438337 - DNA, 25 bp, Homo sapien
tatgtgtcgagcatttagaatccaa

SEQ ID NO: 5438338 - DNA, 25 bp, Homo sapien
atcctgaacgaacttggtaatcccg

SEQ ID NO: 5438339 - DNA, 25 bp, Homo sapien
ttggtagaaaagtcaatcctgaacg

SEQ ID NO: 5438340 - DNA, 25 bp, Homo sapien
gaatccaatagttgtttacagtcgt

SEQ ID NO: 5438341 - DNA, 25 bp, Homo sapien
tgtaatgaaacgatctaatggcatc

SEQ ID NO: 5438342 - DNA, 25 bp, Homo sapien
ttgcaacaaggccacccatagaatg

SEQ ID NO: 5438343 - DNA, 25 bp, Homo sapien
tcacaggagcaacatgaggtgtggc

SEQ ID NO: 5438344 - DNA, 25 bp, Homo sapien
tcagtgtaagcaatgctcttgcaac

SEQ ID NO: 5438345 - DNA, 25 bp, Homo sapien
taagtgcaatggagccaatagaacg

SEQ ID NO: 5438346 - DNA, 25 bp, Homo sapien
gtcaaagtggtacttgaagtcaatg

SEQ ID NO: 5438347 - DNA, 25 bp, Homo sapien
ttccaccatacaaagccaccagttc

SEQ ID NO: 5438348 - DNA, 25 bp, Homo sapien
tcttcattgaagttcacactaaaga

SEQ ID NO: 5438349 - DNA, 25 bp, Homo sapien
tcacagctcacacaacaacttggat

SEQ ID NO: 5438350 - DNA, 25 bp, Homo sapien
ggtatctagcttacagaagcacagg

SEQ ID NO: 5438351 - DNA, 25 bp, Homo sapien
ttttgggccacatgagagctctatg

SEQ ID NO: 5438352 - DNA, 25 bp, Homo sapien
cacaggtttatgtgctccaggaaac

SEQ ID NO: 5438353 - DNA, 25 bp, Homo sapien
tgtgttcttcagcataggatccctc

SEQ ID NO: 5438354 - DNA, 25 bp, Homo sapien
gcgggatagcgttttgccagtttct

SEQ ID NO: 5438355 - DNA, 25 bp, Homo sapien
agagaactggaatacccgtcaaagg

SEQ ID NO: 5438356 - DNA, 25 bp, Homo sapien
gatacaactcatatgcgggatagcg

SEQ ID NO: 5438357 - DNA, 25 bp, Homo sapien
cttccttgactctgccttagttcag

SEQ ID NO: 5438358 - DNA, 25 bp, Homo sapien
aactcccaggtaatagaaaaatgct

SEQ ID NO: 5438359 - DNA, 25 bp, Homo sapien
taagttctcacaaagaggtctcagt

SEQ ID NO: 5438360 - DNA, 25 bp, Homo sapien
tttgatctagatgaatacacatagt

SEQ ID NO: 5438361 - DNA, 25 bp, Homo sapien
tcagtaaggcctttgctcaccatcc

SEQ ID NO: 5438362 - DNA, 25 bp, Homo sapien
ggttacacatacgaagatagccaga

SEQ ID NO: 5438363 - DNA, 25 bp, Homo sapien
tttcctttcagagagcaaccgttag

SEQ ID NO: 5438364 - DNA, 25 bp, Homo sapien
tgactaggacatctcacatctgggt

SEQ ID NO: 5438365 - DNA, 25 bp, Homo sapien
cctagtaggcttgagatatgggttc

SEQ ID NO: 5438366 - DNA, 25 bp, Homo sapien
aatctgacgagcagatcaccgggcg

SEQ ID NO: 5438367 - DNA, 25 bp, Homo sapien
caatatacactctgcagacgctcgg

SEQ ID NO: 5438368 - DNA, 25 bp, Homo sapien
ggcccggccagtcagaagagcttgt

SEQ ID NO: 5438369 - DNA, 25 bp, Homo sapien
tatgcaactattaagaggctcggct

SEQ ID NO: 5438370 - DNA, 25 bp, Homo sapien
caccaggggccagagtcttggagcg

SEQ ID NO: 5438371 - DNA, 25 bp, Homo sapien
ccagagtcttggagcgcccggctga

SEQ ID NO: 5438372 - DNA, 25 bp, Homo sapien
caaggcaggacgaacccacagaagg

SEQ ID NO: 5438373 - DNA, 25 bp, Homo sapien
gagaggcgcagagagccaaggcagg

SEQ ID NO: 5438374 - DNA, 25 bp, Homo sapien
tcctcgaagccgaagaagacatccc

SEQ ID NO: 5438375 - DNA, 25 bp, Homo sapien
tactccgggtactcaaacatgtagc

SEQ ID NO: 5438376 - DNA, 25 bp, Homo sapien
tgaagacataaaacgccaggttcca

SEQ ID NO: 5438377 - DNA, 25 bp, Homo sapien
catgtagctcatactgcacttattc

SEQ ID NO: 5438378 - DNA, 25 bp, Homo sapien
agcccggactgagcgtgctagacac

SEQ ID NO: 5438379 - DNA, 25 bp, Homo sapien
cccggactgagcgtgctagacactg

SEQ ID NO: 5438380 - DNA, 25 bp, Homo sapien
tgctagacactgtccgaccgccacc

SEQ ID NO: 5438381 - DNA, 25 bp, Homo sapien
cgtgctagacactgtccgaccgcca

SEQ ID NO: 5438382 - DNA, 25 bp, Homo sapien
gtccccaacaggtatctgcgtaatc

SEQ ID NO: 5438383 - DNA, 25 bp, Homo sapien
tatctgcgtaatcagtttgacgctg

SEQ ID NO: 5438384 - DNA, 25 bp, Homo sapien
cgtaatcagtttgacgctgactcgc

SEQ ID NO: 5438385 - DNA, 25 bp, Homo sapien
caggtatctgcgtaatcagtttgac

SEQ ID NO: 5438386 - DNA, 25 bp, Homo sapien
gcaaatgacttaattcgttttgaag

SEQ ID NO: 5438387 - DNA, 25 bp, Homo sapien
tccattcaaactcgcaaatgactta

SEQ ID NO: 5438388 - DNA, 25 bp, Homo sapien
gaggaggcaatttcgtccagcttcc

SEQ ID NO: 5438389 - DNA, 25 bp, Homo sapien
atgggttccacgttaactggaggag

SEQ ID NO: 5438390 - DNA, 25 bp, Homo sapien
tgaggactctgttctatggagaaat

SEQ ID NO: 5438391 - DNA, 25 bp, Homo sapien
gaggactctgttctatggagaaatc

SEQ ID NO: 5438392 - DNA, 25 bp, Homo sapien
atatggtgttaaggccatgtttagc

SEQ ID NO: 5438393 - DNA, 25 bp, Homo sapien
aggccatgtttagcagttttttatt

SEQ ID NO: 5438394 - DNA, 25 bp, Homo sapien
taaggccatgtttagcagtttttta

SEQ ID NO: 5438395 - DNA, 25 bp, Homo sapien
catgtttagcagttttttatttgga

SEQ ID NO: 5438396 - DNA, 25 bp, Homo sapien
gctgttgtacacttcagagcttctt

SEQ ID NO: 5438397 - DNA, 25 bp, Homo sapien
agctgtccgacacatttcagtttgg

SEQ ID NO: 5438398 - DNA, 25 bp, Homo sapien
acatttcagtttggcggctcttcct

SEQ ID NO: 5438399 - DNA, 25 bp, Homo sapien
ctaaggcagctgtccgacacatttc

SEQ ID NO: 5438400 - DNA, 25 bp, Homo sapien
tacatggaactgtccaccacagctg

SEQ ID NO: 5438401 - DNA, 25 bp, Homo sapien
gcatacatggaactgtccaccacag

SEQ ID NO: 5438402 - DNA, 25 bp, Homo sapien
cagcatacatggaactgtccaccac

SEQ ID NO: 5438403 - DNA, 25 bp, Homo sapien
catggaactgtccaccacagctgca

SEQ ID NO: 5438404 - DNA, 25 bp, Homo sapien
ctgcaaccagaggtaggccaagggt

SEQ ID NO: 5438405 - DNA, 25 bp, Homo sapien
caaccagaggtaggccaagggtgca

SEQ ID NO: 5438406 - DNA, 25 bp, Homo sapien
agaggtaggccaagggtgcaccaaa

SEQ ID NO: 5438407 - DNA, 25 bp, Homo sapien
gtaggccaagggtgcaccaaaggat

SEQ ID NO: 5438408 - DNA, 25 bp, Homo sapien
gtcagacagtcttgagggatgaagc

SEQ ID NO: 5438409 - DNA, 25 bp, Homo sapien
gaaatgagcaaggttcatggagtga

SEQ ID NO: 5438410 - DNA, 25 bp, Homo sapien
gatacattagggcaaggagtatgct

SEQ ID NO: 5438411 - DNA, 25 bp, Homo sapien
cagtgagtgtgacccttgaaaggag

SEQ ID NO: 5438412 - DNA, 25 bp, Homo sapien
tccttcttctccttagccaagacct

SEQ ID NO: 5438413 - DNA, 25 bp, Homo sapien
cttccttcttctccttagccaagac

SEQ ID NO: 5438414 - DNA, 25 bp, Homo sapien
ttcttctccttagccaagaccttac

SEQ ID NO: 5438415 - DNA, 25 bp, Homo sapien
cttcttctccttagccaagacctta

SEQ ID NO: 5438416 - DNA, 25 bp, Homo sapien
aaacaaatgtggtcacacactttac

SEQ ID NO: 5438417 - DNA, 25 bp, Homo sapien
gattcataattggtccctcagggtg

SEQ ID NO: 5438418 - DNA, 25 bp, Homo sapien
gaaaataaagggtgcgtgcttccca

SEQ ID NO: 5438419 - DNA, 25 bp, Homo sapien
gacaggcaaggcgaatccggttact

SEQ ID NO: 5438420 - DNA, 25 bp, Homo sapien
tctgtggctgggataaagtgcattc

SEQ ID NO: 5438421 - DNA, 25 bp, Homo sapien
cactggcaccagatttgtatcatcg

SEQ ID NO: 5438422 - DNA, 25 bp, Homo sapien
tttagatcacataagaaacgcatag

SEQ ID NO: 5438423 - DNA, 25 bp, Homo sapien
aactcactggtatcatattgctctg

SEQ ID NO: 5438424 - DNA, 25 bp, Homo sapien
tcgtaagacgaaagcattttagcac

SEQ ID NO: 5438425 - DNA, 25 bp, Homo sapien
tgtatttagcaaagacaggcagaca

SEQ ID NO: 5438426 - DNA, 25 bp, Homo sapien
tagaaaaagacaccgcagcatattg

SEQ ID NO: 5438427 - DNA, 25 bp, Homo sapien
tgtactctctgctacacgacaggaa

SEQ ID NO: 5438428 - DNA, 25 bp, Homo sapien
gaaaagtcaaaacgcagctccatgg

SEQ ID NO: 5438429 - DNA, 25 bp, Homo sapien
gaaatgctaggtttggcccttgggc

SEQ ID NO: 5438430 - DNA, 25 bp, Homo sapien
tgagcagtagaagatgcgtagccct

SEQ ID NO: 5438431 - DNA, 25 bp, Homo sapien
ctaaccaacgcggaagaacctgagg

SEQ ID NO: 5438432 - DNA, 25 bp, Homo sapien
taagctctaagctggctacagactg

SEQ ID NO: 5438433 - DNA, 25 bp, Homo sapien
cttctttttgtacagcggttccagg

SEQ ID NO: 5438434 - DNA, 25 bp, Homo sapien
caggtgtggaacggggtccatttga

SEQ ID NO: 5438435 - DNA, 25 bp, Homo sapien
ccaggtgtggaacggggtccatttg

SEQ ID NO: 5438436 - DNA, 25 bp, Homo sapien
tgtggaacggggtccatttgaccta

SEQ ID NO: 5438437 - DNA, 25 bp, Homo sapien
ctggcaatcggttttacatgctaaa

SEQ ID NO: 5438438 - DNA, 25 bp, Homo sapien
atcatcaagcaactggcaatcggtt

SEQ ID NO: 5438439 - DNA, 25 bp, Homo sapien
caagcaactggcaatcggttttaca

SEQ ID NO: 5438440 - DNA, 25 bp, Homo sapien
gcaactggcaatcggttttacatgc

SEQ ID NO: 5438441 - DNA, 25 bp, Homo sapien
cagccacgtctttgttaggagcgca

SEQ ID NO: 5438442 - DNA, 25 bp, Homo sapien
tattcatagcgaacagctgcctctc

SEQ ID NO: 5438443 - DNA, 25 bp, Homo sapien
tacccagattggagagggtcgtcct

SEQ ID NO: 5438444 - DNA, 25 bp, Homo sapien
tagccaaaatgagggccaggcagtc

SEQ ID NO: 5438445 - DNA, 25 bp, Homo sapien
gaaatcatgccaggtaaaacgagga

SEQ ID NO: 5438446 - DNA, 25 bp, Homo sapien
ttacttctcacaagtcatgctaggg

SEQ ID NO: 5438447 - DNA, 25 bp, Homo sapien
gacaatcaggaggatgtttccgcct

SEQ ID NO: 5438448 - DNA, 25 bp, Homo sapien
tccaaagttaggcaggattccagcc

SEQ ID NO: 5438449 - DNA, 25 bp, Homo sapien
gaaaagggttagctgccttctcagc

SEQ ID NO: 5438450 - DNA, 25 bp, Homo sapien
tggccaaagtttccactacacagtg

SEQ ID NO: 5438451 - DNA, 25 bp, Homo sapien
tcagaggaatggctcaatgaaactt

SEQ ID NO: 5438452 - DNA, 25 bp, Homo sapien
tacacagtgagtagggcacttgctc

SEQ ID NO: 5438453 - DNA, 25 bp, Homo sapien
gcagtcgctgttgactttttccact

SEQ ID NO: 5438454 - DNA, 25 bp, Homo sapien
ctgcagtcgctgttgactttttcca

SEQ ID NO: 5438455 - DNA, 25 bp, Homo sapien
cagtcgctgttgactttttccactt

SEQ ID NO: 5438456 - DNA, 25 bp, Homo sapien
gtcgctgttgactttttccacttac

SEQ ID NO: 5438457 - DNA, 25 bp, Homo sapien
agcaagtacacaggcccctttggcc

SEQ ID NO: 5438458 - DNA, 25 bp, Homo sapien
cacctttaagccattgcgcgcagcg

SEQ ID NO: 5438459 - DNA, 25 bp, Homo sapien
ctttaagccattgcgcgcagcgacg

SEQ ID NO: 5438460 - DNA, 25 bp, Homo sapien
atctacagcaagtacacaggcccct

SEQ ID NO: 5438461 - DNA, 25 bp, Homo sapien
ggactgcatctttcaccactgtgct

SEQ ID NO: 5438462 - DNA, 25 bp, Homo sapien
cacagcaggctcttaatacttattg

SEQ ID NO: 5438463 - DNA, 25 bp, Homo sapien
ccagcttggtcagcacttgtaggta

SEQ ID NO: 5438464 - DNA, 25 bp, Homo sapien
cacgcccggcttaagaatcttaaat

SEQ ID NO: 5438465 - DNA, 25 bp, Homo sapien
cgtcttgtatcttgtcaagtattaa

SEQ ID NO: 5438466 - DNA, 25 bp, Homo sapien
gtattaacaaggcacatttttcatg

SEQ ID NO: 5438467 - DNA, 25 bp, Homo sapien
ggctctcgtcttgtatcttgtcaag

SEQ ID NO: 5438468 - DNA, 25 bp, Homo sapien
tcattaataaggctctcgtcttgta

SEQ ID NO: 5438469 - DNA, 25 bp, Homo sapien
ttgaaataaatcaccgccatgggtg

SEQ ID NO: 5438470 - DNA, 25 bp, Homo sapien
caatgaaaggaatggctgagactac

SEQ ID NO: 5438471 - DNA, 25 bp, Homo sapien
taatgccttgtatgggagaccctta

SEQ ID NO: 5438472 - DNA, 25 bp, Homo sapien
taatcaacatgtggcgtgcagacca

SEQ ID NO: 5438473 - DNA, 25 bp, Homo sapien
ttactacaagccaaatgtaagggtg

SEQ ID NO: 5438474 - DNA, 25 bp, Homo sapien
tccttatcctttacagtcagatcag

SEQ ID NO: 5438475 - DNA, 25 bp, Homo sapien
gatcagcctgggcactgttcaccaa

SEQ ID NO: 5438476 - DNA, 25 bp, Homo sapien
caaatgtaagggtgtattcaagtcc

SEQ ID NO: 5438477 - DNA, 25 bp, Homo sapien
tatctactgcgttcactggagcact

SEQ ID NO: 5438478 - DNA, 25 bp, Homo sapien
gaagctgcaagcactccacatgatc

SEQ ID NO: 5438479 - DNA, 25 bp, Homo sapien
ttccctgaattatctactgcgttca

SEQ ID NO: 5438480 - DNA, 25 bp, Homo sapien
gagcactgtgtctcagaagaagctg

SEQ ID NO: 5438481 - DNA, 25 bp, Homo sapien
tgatgcacaattcccatgatcattg

SEQ ID NO: 5438482 - DNA, 25 bp, Homo sapien
gcctttgtcatctctacaactgacg

SEQ ID NO: 5438483 - DNA, 25 bp, Homo sapien
agcaatgatgcacaattcccatgat

SEQ ID NO: 5438484 - DNA, 25 bp, Homo sapien
tactggaatctatggccccaagcag

SEQ ID NO: 5438485 - DNA, 25 bp, Homo sapien
ctccaaaagtacctctatacagttt

SEQ ID NO: 5438486 - DNA, 25 bp, Homo sapien
ttgctccaaaagtacctctatacag

SEQ ID NO: 5438487 - DNA, 25 bp, Homo sapien
caaaagtacctctatacagttttca

SEQ ID NO: 5438488 - DNA, 25 bp, Homo sapien
gattaccgataaatttgcgaaaaca

SEQ ID NO: 5438489 - DNA, 25 bp, Homo sapien
aagttctggtatacatattgctatg

SEQ ID NO: 5438490 - DNA, 25 bp, Homo sapien
atccacagaaacctggttgaataaa

SEQ ID NO: 5438491 - DNA, 25 bp, Homo sapien
ccataatatggacatgcacattgct

SEQ ID NO: 5438492 - DNA, 25 bp, Homo sapien
ccattataagatcaatccatattga

SEQ ID NO: 5438493 - DNA, 25 bp, Homo sapien
tgaaacaacagtcctcctcagaaag

SEQ ID NO: 5438494 - DNA, 25 bp, Homo sapien
cagcggcgtgtagccttggttatct

SEQ ID NO: 5438495 - DNA, 25 bp, Homo sapien
atttggagcagctcgctcagccacg

SEQ ID NO: 5438496 - DNA, 25 bp, Homo sapien
gaattgacacttcttgttccagcag

SEQ ID NO: 5438497 - DNA, 25 bp, Homo sapien
ctgatgcattgtaattaaaaacaca

SEQ ID NO: 5438498 - DNA, 25 bp, Homo sapien
gcattgtaattaaaaacacaaaaca

SEQ ID NO: 5438499 - DNA, 25 bp, Homo sapien
gatgcattgtaattaaaaacacaaa

SEQ ID NO: 5438500 - DNA, 25 bp, Homo sapien
tgcattgtaattaaaaacacaaaac

SEQ ID NO: 5438501 - DNA, 25 bp, Homo sapien
caatgaaacagcgtcaatatgtcca

SEQ ID NO: 5438502 - DNA, 25 bp, Homo sapien
gcatcctaggatgtcaacagtgtct

SEQ ID NO: 5438503 - DNA, 25 bp, Homo sapien
tatgctactgcaagcatcagtggtg

SEQ ID NO: 5438504 - DNA, 25 bp, Homo sapien
tctgtgtaaagctgtgcatcctagg

SEQ ID NO: 5438505 - DNA, 25 bp, Homo sapien
gcctccgggttgtctgcaatttcta

SEQ ID NO: 5438506 - DNA, 25 bp, Homo sapien
gccgtaaacacagtgtgtgaccatt

SEQ ID NO: 5438507 - DNA, 25 bp, Homo sapien
tagcaacagccgtaaacacagtgtg

SEQ ID NO: 5438508 - DNA, 25 bp, Homo sapien
tggcatctttcacatcgaccgcctc

SEQ ID NO: 5438509 - DNA, 25 bp, Homo sapien
cacaaagatggatgcgccctgattg

SEQ ID NO: 5438510 - DNA, 25 bp, Homo sapien
cagatccagagcagtgcggcctttc

SEQ ID NO: 5438511 - DNA, 25 bp, Homo sapien
caaggcttgatggtgcccattgtag

SEQ ID NO: 5438512 - DNA, 25 bp, Homo sapien
ccaccaacgactgcagaaggacttc

SEQ ID NO: 5438513 - DNA, 25 bp, Homo sapien
atggctcccatgcttgctcgctcac

SEQ ID NO: 5438514 - DNA, 25 bp, Homo sapien
ctgcaaagaagaaaccaatggctcc

SEQ ID NO: 5438515 - DNA, 25 bp, Homo sapien
agaaaccaatggctcccatgcttgc

SEQ ID NO: 5438516 - DNA, 25 bp, Homo sapien
agaagaaaccaatggctcccatgct

SEQ ID NO: 5438517 - DNA, 25 bp, Homo sapien
ctcaaatcccgccacagtccacagg

SEQ ID NO: 5438518 - DNA, 25 bp, Homo sapien
gaggtagatgcttgaccacatagca

SEQ ID NO: 5438519 - DNA, 25 bp, Homo sapien
tgtgttgaagaggtagatgcttgac

SEQ ID NO: 5438520 - DNA, 25 bp, Homo sapien
gatgcttgaccacatagcattgatg

SEQ ID NO: 5438521 - DNA, 25 bp, Homo sapien
gaccacatagcattgatgagcatgt

SEQ ID NO: 5438522 - DNA, 25 bp, Homo sapien
gctggagtctcattccgtcgcccag

SEQ ID NO: 5438523 - DNA, 25 bp, Homo sapien
gctggagtgcagtggtgccatcttg

SEQ ID NO: 5438524 - DNA, 25 bp, Homo sapien
gtgcacgccaccatgcccagctaat

SEQ ID NO: 5438525 - DNA, 25 bp, Homo sapien
ccagtagatgagattacaggtgcac

SEQ ID NO: 5438526 - DNA, 25 bp, Homo sapien
tcaggctatgacacttgactccagg

SEQ ID NO: 5438527 - DNA, 25 bp, Homo sapien
tagcaagcaacctgtactaagggcc

SEQ ID NO: 5438528 - DNA, 25 bp, Homo sapien
tagactggatactctgcaagggcag

SEQ ID NO: 5438529 - DNA, 25 bp, Homo sapien
cacaatggccctacgttgaggtact

SEQ ID NO: 5438530 - DNA, 25 bp, Homo sapien
tcagaggacgtgtgagtgggtgtca

SEQ ID NO: 5438531 - DNA, 25 bp, Homo sapien
cgtgtgagtgggtgtcagcaggtgt

SEQ ID NO: 5438532 - DNA, 25 bp, Homo sapien
tatgagcgtgtagtgggtgtgttgg

SEQ ID NO: 5438533 - DNA, 25 bp, Homo sapien
tcactggactcaaaatgcatgtgtg

SEQ ID NO: 5438534 - DNA, 25 bp, Homo sapien
tatggtcagttctggatactcccaa

SEQ ID NO: 5438535 - DNA, 25 bp, Homo sapien
ttgtgtgatggccttgtctccgctc

SEQ ID NO: 5438536 - DNA, 25 bp, Homo sapien
cactgaaggagtgcttatgtacaca

SEQ ID NO: 5438537 - DNA, 25 bp, Homo sapien
tttgtggccttgaaccaagtgctca

SEQ ID NO: 5438538 - DNA, 25 bp, Homo sapien
caccaagggcacgtgagtgcctcgg

SEQ ID NO: 5438539 - DNA, 25 bp, Homo sapien
tggccaactcttagcaactcacaat

SEQ ID NO: 5438540 - DNA, 25 bp, Homo sapien
gatggccaactcttagcaactcaca

SEQ ID NO: 5438541 - DNA, 25 bp, Homo sapien
agcagcaccaagggcacgtgagtgc

SEQ ID NO: 5438542 - DNA, 25 bp, Homo sapien
gagaggaagcgttactggtgataaa

SEQ ID NO: 5438543 - DNA, 25 bp, Homo sapien
ccaccttggtcactcccatgaagag

SEQ ID NO: 5438544 - DNA, 25 bp, Homo sapien
ttgccttcaattactgggatgtgga

SEQ ID NO: 5438545 - DNA, 25 bp, Homo sapien
tcatcactctgagctgttgcatttg

SEQ ID NO: 5438546 - DNA, 25 bp, Homo sapien
cagacttcgttgaagaccctgattt

SEQ ID NO: 5438547 - DNA, 25 bp, Homo sapien
gacttcgttgaagaccctgatttca

SEQ ID NO: 5438548 - DNA, 25 bp, Homo sapien
gagcctcagacttcgttgaagaccc

SEQ ID NO: 5438549 - DNA, 25 bp, Homo sapien
cctcagacttcgttgaagaccctga

SEQ ID NO: 5438550 - DNA, 25 bp, Homo sapien
tgctctcatcagtttgtgctgaaac

SEQ ID NO: 5438551 - DNA, 25 bp, Homo sapien
tctcatcagtttgtgctgaaacatc

SEQ ID NO: 5438552 - DNA, 25 bp, Homo sapien
cttgctctcatcagtttgtgctgaa

SEQ ID NO: 5438553 - DNA, 25 bp, Homo sapien
gctctcatcagtttgtgctgaaaca

SEQ ID NO: 5438554 - DNA, 25 bp, Homo sapien
gtttttgtaacaggtgaagctgctc

SEQ ID NO: 5438555 - DNA, 25 bp, Homo sapien
tgaaggcgaggcagtctgtctccac

SEQ ID NO: 5438556 - DNA, 25 bp, Homo sapien
tgtgtctaagatcaccagcagatga

SEQ ID NO: 5438557 - DNA, 25 bp, Homo sapien
ctgaggctcaagacagggtaagtca

SEQ ID NO: 5438558 - DNA, 25 bp, Homo sapien
ggactcttagtagcaccagaatctg

SEQ ID NO: 5438559 - DNA, 25 bp, Homo sapien
tcaaatccactgtttgttctttcca

SEQ ID NO: 5438560 - DNA, 25 bp, Homo sapien
gtggactcttagtagcaccagaatc

SEQ ID NO: 5438561 - DNA, 25 bp, Homo sapien
tggactcttagtagcaccagaatct

SEQ ID NO: 5438562 - DNA, 25 bp, Homo sapien
gatcacctcagcacttgaatccaga

SEQ ID NO: 5438563 - DNA, 25 bp, Homo sapien
tagtacgtgagtccaaattttgcaa

SEQ ID NO: 5438564 - DNA, 25 bp, Homo sapien
tatttaaacttctagatcacctcag

SEQ ID NO: 5438565 - DNA, 25 bp, Homo sapien
gagaagttatgcaatttatcagtaa

SEQ ID NO: 5438566 - DNA, 25 bp, Homo sapien
tctaaggagacaaaggtgggagcac

SEQ ID NO: 5438567 - DNA, 25 bp, Homo sapien
tgatggcccagtaaagtctccaggg

SEQ ID NO: 5438568 - DNA, 25 bp, Homo sapien
cagtggcttggaccagcaagaagca

SEQ ID NO: 5438569 - DNA, 25 bp, Homo sapien
gacattctcgtagacccttggtgga

SEQ ID NO: 5438570 - DNA, 25 bp, Homo sapien
aggcttaacggattctcccactctt

SEQ ID NO: 5438571 - DNA, 25 bp, Homo sapien
ccaggcttaacggattctcccactc

SEQ ID NO: 5438572 - DNA, 25 bp, Homo sapien
caggcttaacggattctcccactct

SEQ ID NO: 5438573 - DNA, 25 bp, Homo sapien
ggcaaagaatggtgtcctgacacat

SEQ ID NO: 5438574 - DNA, 25 bp, Homo sapien
ccttcaaccaccgaaggaagttcag

SEQ ID NO: 5438575 - DNA, 25 bp, Homo sapien
ggttttaagtttcttatgcagcaaa

SEQ ID NO: 5438576 - DNA, 25 bp, Homo sapien
atctttttgatatcactccaggttt

SEQ ID NO: 5438577 - DNA, 25 bp, Homo sapien
cagatacgatgatggtttctcattt

SEQ ID NO: 5438578 - DNA, 25 bp, Homo sapien
accagcattggtaaggctgaggcag

SEQ ID NO: 5438579 - DNA, 25 bp, Homo sapien
gaccagcattggtaaggctgaggca

SEQ ID NO: 5438580 - DNA, 25 bp, Homo sapien
tcttcaccacccatatttccaaagg

SEQ ID NO: 5438581 - DNA, 25 bp, Homo sapien
tcctagccagaacgatgagtcccat

SEQ ID NO: 5438582 - DNA, 25 bp, Homo sapien
caaaggcatcctagccagaacgatg

SEQ ID NO: 5438583 - DNA, 25 bp, Homo sapien
atttccaaaggcatcctagccagaa

SEQ ID NO: 5438584 - DNA, 25 bp, Homo sapien
cacctcagactctgggtattggagc

SEQ ID NO: 5438585 - DNA, 25 bp, Homo sapien
caaccagtaccctaaaacttctcat

SEQ ID NO: 5438586 - DNA, 25 bp, Homo sapien
acagctcaaccagtaccctaaaact

SEQ ID NO: 5438587 - DNA, 25 bp, Homo sapien
gtattggagccacagctcaaccagt

SEQ ID NO: 5438588 - DNA, 25 bp, Homo sapien
gcctagacatagaaatacatacctt

SEQ ID NO: 5438589 - DNA, 25 bp, Homo sapien
taatgtccacagactctcagataga

SEQ ID NO: 5438590 - DNA, 25 bp, Homo sapien
tgcagagcacaggtacaatgatagc

SEQ ID NO: 5438591 - DNA, 25 bp, Homo sapien
aactcctttctagtcaatacatgtg

SEQ ID NO: 5438592 - DNA, 25 bp, Homo sapien
gaaaatgaactacaatggtgctggg

SEQ ID NO: 5438593 - DNA, 25 bp, Homo sapien
cacagatatgacaaacagggactag

SEQ ID NO: 5438594 - DNA, 25 bp, Homo sapien
cttcctggaattgacagtgtgtacc

SEQ ID NO: 5438595 - DNA, 25 bp, Homo sapien
agtgtgtaccaaccccaaatcctgt

SEQ ID NO: 5438596 - DNA, 25 bp, Homo sapien
actgcttgaccccacttcttctcca

SEQ ID NO: 5438597 - DNA, 25 bp, Homo sapien
tacgtagagtccagcactgcttgac

SEQ ID NO: 5438598 - DNA, 25 bp, Homo sapien
caccaaccaccatgtgtttgccagg

SEQ ID NO: 5438599 - DNA, 25 bp, Homo sapien
tcacgaaggttctacgtagagtcca

SEQ ID NO: 5438600 - DNA, 25 bp, Homo sapien
aacaggaccaaccactaacagtaga

SEQ ID NO: 5438601 - DNA, 25 bp, Homo sapien
tggtctcaactgctctgaaggcatt

SEQ ID NO: 5438602 - DNA, 25 bp, Homo sapien
acttccctacaataatgaggtcagg

SEQ ID NO: 5438603 - DNA, 25 bp, Homo sapien
tctttgctgaacagacaggagctct

SEQ ID NO: 5438604 - DNA, 25 bp, Homo sapien
tcacacacaatagagcccaaccttc

SEQ ID NO: 5438605 - DNA, 25 bp, Homo sapien
taaggtgctgatgactcacacacaa

SEQ ID NO: 5438606 - DNA, 25 bp, Homo sapien
tttcttatcacttttaaggtgctga

SEQ ID NO: 5438607 - DNA, 25 bp, Homo sapien
ggtaccagcttggttaaatcagaat

SEQ ID NO: 5438608 - DNA, 25 bp, Homo sapien
ccagggtgtatatagctctgccaaa

SEQ ID NO: 5438609 - DNA, 25 bp, Homo sapien
taattacaagcagacctaagaagca

SEQ ID NO: 5438610 - DNA, 25 bp, Homo sapien
gttttggtaatcatgccagggtgta

SEQ ID NO: 5438611 - DNA, 25 bp, Homo sapien
tctgccaaataatacgggaagtaaa

SEQ ID NO: 5438612 - DNA, 25 bp, Homo sapien
ttcaccttccagagcattatgagtt

SEQ ID NO: 5438613 - DNA, 25 bp, Homo sapien
aataatagataagtttaagaagatc

SEQ ID NO: 5438614 - DNA, 25 bp, Homo sapien
gaagggacgttatacaagatgagga

SEQ ID NO: 5438615 - DNA, 25 bp, Homo sapien
cttatagttgatgtcagctgtccta

SEQ ID NO: 5438616 - DNA, 25 bp, Homo sapien
ctgacacctcatgcgcctgggtatc

SEQ ID NO: 5438617 - DNA, 25 bp, Homo sapien
tcatgcgcctgggtatccctctgag

SEQ ID NO: 5438618 - DNA, 25 bp, Homo sapien
catgcgcctgggtatccctctgaga

SEQ ID NO: 5438619 - DNA, 25 bp, Homo sapien
cgactgacacctcatgcgcctgggt

SEQ ID NO: 5438620 - DNA, 25 bp, Homo sapien
gaagacatccttgacttagtctttt

SEQ ID NO: 5438621 - DNA, 25 bp, Homo sapien
ccctctatctaatatttctaggaga

SEQ ID NO: 5438622 - DNA, 25 bp, Homo sapien
tctttatcaagttgttacatgctct

SEQ ID NO: 5438623 - DNA, 25 bp, Homo sapien
gaagttcccctctatctaatatttc

SEQ ID NO: 5438624 - DNA, 25 bp, Homo sapien
tcctcctcctcatctgcctctgcct

SEQ ID NO: 5438625 - DNA, 25 bp, Homo sapien
cctcctcctcatctgcctctgcctc

SEQ ID NO: 5438626 - DNA, 25 bp, Homo sapien
cttctcctcctcctcatctgcctct

SEQ ID NO: 5438627 - DNA, 25 bp, Homo sapien
tctcctcctcctcatctgcctctgc

SEQ ID NO: 5438628 - DNA, 25 bp, Homo sapien
caagaccagcattgttgaggtttcc

SEQ ID NO: 5438629 - DNA, 25 bp, Homo sapien
caatcatcagagacttgtttggagc

SEQ ID NO: 5438630 - DNA, 25 bp, Homo sapien
ttctcttagcaggacctctgaggag

SEQ ID NO: 5438631 - DNA, 25 bp, Homo sapien
aggtcaggcacaacccaagtccttc

SEQ ID NO: 5438632 - DNA, 25 bp, Homo sapien
cctgtgttacaaacggctgactgag

SEQ ID NO: 5438633 - DNA, 25 bp, Homo sapien
tgtacgaactacaccccagaggaat

SEQ ID NO: 5438634 - DNA, 25 bp, Homo sapien
ccagaggaattttgggatgcattcc

SEQ ID NO: 5438635 - DNA, 25 bp, Homo sapien
ttctgtcccactaaaaccattcagg

SEQ ID NO: 5438636 - DNA, 25 bp, Homo sapien
tgacagtagaaagccttcactctgc

SEQ ID NO: 5438637 - DNA, 25 bp, Homo sapien
tataccaacttccatggcaatgctg

SEQ ID NO: 5438638 - DNA, 25 bp, Homo sapien
caatgctggtgttaggaggcagaaa

SEQ ID NO: 5438639 - DNA, 25 bp, Homo sapien
tggtactgccttatatcgatgacta

SEQ ID NO: 5438640 - DNA, 25 bp, Homo sapien
ggcagcatggtgcagtagaaaaaac

SEQ ID NO: 5438641 - DNA, 25 bp, Homo sapien
aaaacagttaatgcctctgtgattt

SEQ ID NO: 5438642 - DNA, 25 bp, Homo sapien
aaaaaaacagttaatgcctctgtga

SEQ ID NO: 5438643 - DNA, 25 bp, Homo sapien
aacagttaatgcctctgtgatttgg

SEQ ID NO: 5438644 - DNA, 25 bp, Homo sapien
acagttaatgcctctgtgatttggg

SEQ ID NO: 5438645 - DNA, 25 bp, Homo sapien
cagacactgcctgtgcccataggcg

SEQ ID NO: 5438646 - DNA, 25 bp, Homo sapien
attccagacactgcctgtgcccata

SEQ ID NO: 5438647 - DNA, 25 bp, Homo sapien
tccagacactgcctgtgcccatagg

SEQ ID NO: 5438648 - DNA, 25 bp, Homo sapien
caattccagacactgcctgtgccca

SEQ ID NO: 5438649 - DNA, 25 bp, Homo sapien
ccttccttgtcccggatagatggat

SEQ ID NO: 5438650 - DNA, 25 bp, Homo sapien
tgtcccggatagatggatttgcatc

SEQ ID NO: 5438651 - DNA, 25 bp, Homo sapien
cccggatagatggatttgcatcatt

SEQ ID NO: 5438652 - DNA, 25 bp, Homo sapien
ccttgtcccggatagatggatttgc

SEQ ID NO: 5438653 - DNA, 25 bp, Homo sapien
caagttcttctgaattatcatgggc

SEQ ID NO: 5438654 - DNA, 25 bp, Homo sapien
tcttctgaattatcatgggcatttc

SEQ ID NO: 5438655 - DNA, 25 bp, Homo sapien
ccctggctctttcaagttcttctga

SEQ ID NO: 5438656 - DNA, 25 bp, Homo sapien
agctccctggctctttcaagttctt

SEQ ID NO: 5438657 - DNA, 25 bp, Homo sapien
tctacaagagaagcaattaccactg

SEQ ID NO: 5438658 - DNA, 25 bp, Homo sapien
tgaatgaaccataaacctgagcttg

SEQ ID NO: 5438659 - DNA, 25 bp, Homo sapien
ttcccagaggaagcatgagcaaggc

SEQ ID NO: 5438660 - DNA, 25 bp, Homo sapien
tcatacccaggtttggagcaatggt

SEQ ID NO: 5438661 - DNA, 25 bp, Homo sapien
tctatccatgtctgatgcagcggcg

SEQ ID NO: 5438662 - DNA, 25 bp, Homo sapien
tgtggtcactaatgtctcaatacag

SEQ ID NO: 5438663 - DNA, 25 bp, Homo sapien
aatgacaattcgcagctgcatagtg

SEQ ID NO: 5438664 - DNA, 25 bp, Homo sapien
tgtttcattaacgttggcccctgtg

SEQ ID NO: 5438665 - DNA, 25 bp, Homo sapien
atggaaatctgctccgctgctctgc

SEQ ID NO: 5438666 - DNA, 25 bp, Homo sapien
tggaaatctgctccgctgctctgca

SEQ ID NO: 5438667 - DNA, 25 bp, Homo sapien
aaatctgctccgctgctctgcaaga

SEQ ID NO: 5438668 - DNA, 25 bp, Homo sapien
tctgctccgctgctctgcaagagtt

SEQ ID NO: 5438669 - DNA, 25 bp, Homo sapien
ttatctggggtgtctatttcaaagc

SEQ ID NO: 5438670 - DNA, 25 bp, Homo sapien
tccaaatttatctggggtgtctatt

SEQ ID NO: 5438671 - DNA, 25 bp, Homo sapien
tgaaggcacgttcttccaaatttat

SEQ ID NO: 5438672 - DNA, 25 bp, Homo sapien
gcagcatgaaggcacgttcttccaa

SEQ ID NO: 5438673 - DNA, 25 bp, Homo sapien
cgtgctcattactaaacaaggatac

SEQ ID NO: 5438674 - DNA, 25 bp, Homo sapien
cagcacgtgctcattactaaacaag

SEQ ID NO: 5438675 - DNA, 25 bp, Homo sapien
agacagcacgtgctcattactaaac

SEQ ID NO: 5438676 - DNA, 25 bp, Homo sapien
gctcattactaaacaaggatactat

SEQ ID NO: 5438677 - DNA, 25 bp, Homo sapien
gaataatcttagcatgctggaacag

SEQ ID NO: 5438678 - DNA, 25 bp, Homo sapien
taggaagaaccgtgaagtcaagaag

SEQ ID NO: 5438679 - DNA, 25 bp, Homo sapien
acattcagccctgggtgaaccacag

SEQ ID NO: 5438680 - DNA, 25 bp, Homo sapien
taagtagggcaatcgacaggcagat

SEQ ID NO: 5438681 - DNA, 25 bp, Homo sapien
tcagagtgagcatttagggcagcta

SEQ ID NO: 5438682 - DNA, 25 bp, Homo sapien
tgataacaactttctgcagcagtca

SEQ ID NO: 5438683 - DNA, 25 bp, Homo sapien
gataacaactttctgcagcagtcag

SEQ ID NO: 5438684 - DNA, 25 bp, Homo sapien
gaagcagcttgatttgagagagaca

SEQ ID NO: 5438685 - DNA, 25 bp, Homo sapien
cccagactcagctagtagacaggac

SEQ ID NO: 5438686 - DNA, 25 bp, Homo sapien
ggcaggttctgagcaaaaccccact

SEQ ID NO: 5438687 - DNA, 25 bp, Homo sapien
acaggactatggctgaacgtcagag

SEQ ID NO: 5438688 - DNA, 25 bp, Homo sapien
agctcggaccaccacaggcgcacat

SEQ ID NO: 5438689 - DNA, 25 bp, Homo sapien
gagtaaacaaggtacccctgtctca

SEQ ID NO: 5438690 - DNA, 25 bp, Homo sapien
tcctgcttcagtgtaatcacagtac

SEQ ID NO: 5438691 - DNA, 25 bp, Homo sapien
tctcaagtcccacaaaggggtcagg

SEQ ID NO: 5438692 - DNA, 25 bp, Homo sapien
tcaagatttctttgagcctccctca

SEQ ID NO: 5438693 - DNA, 25 bp, Homo sapien
gcatcaaactctataagaaaccaat

SEQ ID NO: 5438694 - DNA, 25 bp, Homo sapien
tataaaatggcacttaaagctaatg

SEQ ID NO: 5438695 - DNA, 25 bp, Homo sapien
ttcattcctgaaagaatatgcctgg

SEQ ID NO: 5438696 - DNA, 25 bp, Homo sapien
tacccctaattctgctgttgaggca

SEQ ID NO: 5438697 - DNA, 25 bp, Homo sapien
ctagcgtcaaaagcctaaggagttc

SEQ ID NO: 5438698 - DNA, 25 bp, Homo sapien
gcatcataggtaccacttaggccct

SEQ ID NO: 5438699 - DNA, 25 bp, Homo sapien
gcttgtttaaatcttgctcccaggg

SEQ ID NO: 5438700 - DNA, 25 bp, Homo sapien
tccctaagacatagcagagacaatg

SEQ ID NO: 5438701 - DNA, 25 bp, Homo sapien
tgtcgcatccccagatagttgtgac

SEQ ID NO: 5438702 - DNA, 25 bp, Homo sapien
taaggcacttttgctacatggtctg

SEQ ID NO: 5438703 - DNA, 25 bp, Homo sapien
tcactgaaggtagcatgtcgcatcc

SEQ ID NO: 5438704 - DNA, 25 bp, Homo sapien
cataattatgtccatctagcaaact

SEQ ID NO: 5438705 - DNA, 25 bp, Homo sapien
caaacatccatcttaacaaatttca

SEQ ID NO: 5438706 - DNA, 25 bp, Homo sapien
tttcacaatactcagtaatttgtgc

SEQ ID NO: 5438707 - DNA, 25 bp, Homo sapien
ctcctatatatccttccttttgtta

SEQ ID NO: 5438708 - DNA, 25 bp, Homo sapien
tgaaatagacctcatttggatgaag

SEQ ID NO: 5438709 - DNA, 25 bp, Homo sapien
ttaatatgaagcattgggaaggaca

SEQ ID NO: 5438710 - DNA, 25 bp, Homo sapien
ggaaggacagaagaatattagaaag

SEQ ID NO: 5438711 - DNA, 25 bp, Homo sapien
catttggatgaagctaaaaaataaa

SEQ ID NO: 5438712 - DNA, 25 bp, Homo sapien
tggcagtattcccacttgaggcaat

SEQ ID NO: 5438713 - DNA, 25 bp, Homo sapien
gcacggaagaatctttttggcagta

SEQ ID NO: 5438714 - DNA, 25 bp, Homo sapien
taaatgggaactatctactgcacgg

SEQ ID NO: 5438715 - DNA, 25 bp, Homo sapien
ggtatagatccaccttaacctggat

SEQ ID NO: 5438716 - DNA, 25 bp, Homo sapien
cacatggagaggagtgttgccgtcc

SEQ ID NO: 5438717 - DNA, 25 bp, Homo sapien
tgttgccgtccttatccacacagtc

SEQ ID NO: 5438718 - DNA, 25 bp, Homo sapien
tcagctccgctggttattaaggtgt

SEQ ID NO: 5438719 - DNA, 25 bp, Homo sapien
tcaaaagctcatgaccgtatcttgc

SEQ ID NO: 5438720 - DNA, 25 bp, Homo sapien
tgaatgacttcaatctagaaaggtg

SEQ ID NO: 5438721 - DNA, 25 bp, Homo sapien
gatgactaacgggtatgaggtttct

SEQ ID NO: 5438722 - DNA, 25 bp, Homo sapien
tgcatgcgtgtgtagaattttccca

SEQ ID NO: 5438723 - DNA, 25 bp, Homo sapien
taaattcactgactatccaagatag

SEQ ID NO: 5438724 - DNA, 25 bp, Homo sapien
gagccaaagggtcaaaaatctcaca

SEQ ID NO: 5438725 - DNA, 25 bp, Homo sapien
tgccttggaaggattgtgagccaaa

SEQ ID NO: 5438726 - DNA, 25 bp, Homo sapien
ccaatggtgaggtcaaatgccttca

SEQ ID NO: 5438727 - DNA, 25 bp, Homo sapien
taacctgctggacggcatctgaggg

SEQ ID NO: 5438728 - DNA, 25 bp, Homo sapien
tgtgaaccttccatggacagctgtc

SEQ ID NO: 5438729 - DNA, 25 bp, Homo sapien
catgtgcagtggacttttgccatct

SEQ ID NO: 5438730 - DNA, 25 bp, Homo sapien
tggacagctgtcatgtgcagtggac

SEQ ID NO: 5438731 - DNA, 25 bp, Homo sapien
aatgagggtctgtgaccgtgtgaac

SEQ ID NO: 5438732 - DNA, 25 bp, Homo sapien
gacaacctggcaatggcaatttctg

SEQ ID NO: 5438733 - DNA, 25 bp, Homo sapien
gaattgagaccatgcacaggctaaa

SEQ ID NO: 5438734 - DNA, 25 bp, Homo sapien
tacatatagagaagggaactggtcc

SEQ ID NO: 5438735 - DNA, 25 bp, Homo sapien
tcagtgaacaggaggtagacaacct

SEQ ID NO: 5438736 - DNA, 25 bp, Homo sapien
tgaatctggaataactaaggaggat

SEQ ID NO: 5438737 - DNA, 25 bp, Homo sapien
tccagagtcagacaggatggctcta

SEQ ID NO: 5438738 - DNA, 25 bp, Homo sapien
gatgatccgtgcatccagagtgaat

SEQ ID NO: 5438739 - DNA, 25 bp, Homo sapien
gacagaatagatgaagggagactga

SEQ ID NO: 5438740 - DNA, 25 bp, Homo sapien
tattctagttatgatcagcagtcca

SEQ ID NO: 5438741 - DNA, 25 bp, Homo sapien
gaaaacacgacactccttcctgtct

SEQ ID NO: 5438742 - DNA, 25 bp, Homo sapien
tccttttatcatccctttctctggc

SEQ ID NO: 5438743 - DNA, 25 bp, Homo sapien
gacgacagttccttggtctctttga

SEQ ID NO: 5438744 - DNA, 25 bp, Homo sapien
caacctcagacgacagttccttggt

SEQ ID NO: 5438745 - DNA, 25 bp, Homo sapien
tcaggtctgatcatatgacccctag

SEQ ID NO: 5438746 - DNA, 25 bp, Homo sapien
tagaatgattcgtggcctgcagagc

SEQ ID NO: 5438747 - DNA, 25 bp, Homo sapien
cctttggtgttctgtgaccggatta

SEQ ID NO: 5438748 - DNA, 25 bp, Homo sapien
tgggctcaaaatcatccagtagatg

SEQ ID NO: 5438749 - DNA, 25 bp, Homo sapien
tatgaatgctgcgtgataagctccc

SEQ ID NO: 5438750 - DNA, 25 bp, Homo sapien
aatgcattcaagtgatgtcgcccaa

SEQ ID NO: 5438751 - DNA, 25 bp, Homo sapien
aaggaatgattgtgatgaccagctc

SEQ ID NO: 5438752 - DNA, 25 bp, Homo sapien
gaataaaaggtctcctagcacagct

SEQ ID NO: 5438753 - DNA, 25 bp, Homo sapien
cagtattagcttctgggcaagtcaa

SEQ ID NO: 5438754 - DNA, 25 bp, Homo sapien
tcactaagctaacaagaacacacgg

SEQ ID NO: 5438755 - DNA, 25 bp, Homo sapien
gagttggaaacaggcctacaatcat

SEQ ID NO: 5438756 - DNA, 25 bp, Homo sapien
tgaattcttagcaacactgccctat

SEQ ID NO: 5438757 - DNA, 25 bp, Homo sapien
cataatttgcagcagttgattttgc

SEQ ID NO: 5438758 - DNA, 25 bp, Homo sapien
tgcaaaggcattcaacacagagact

SEQ ID NO: 5438759 - DNA, 25 bp, Homo sapien
gaggttccaactcactaaaacatgg

SEQ ID NO: 5438760 - DNA, 25 bp, Homo sapien
gttgattttgctcaaacagaagctc

SEQ ID NO: 5438761 - DNA, 25 bp, Homo sapien
tccattgtagcaggcgatgtgaagc

SEQ ID NO: 5438762 - DNA, 25 bp, Homo sapien
tggctggttcacgttagcaccgtag

SEQ ID NO: 5438763 - DNA, 25 bp, Homo sapien
acacaaagcaccatgagtggaggca

SEQ ID NO: 5438764 - DNA, 25 bp, Homo sapien
tgaatgttaacatctgccccgttgt

SEQ ID NO: 5438765 - DNA, 25 bp, Homo sapien
tatttccatagacattgatttcatc

SEQ ID NO: 5438766 - DNA, 25 bp, Homo sapien
ttccatagacattgatttcatcaat

SEQ ID NO: 5438767 - DNA, 25 bp, Homo sapien
ctgtatttccatagacattgatttc

SEQ ID NO: 5438768 - DNA, 25 bp, Homo sapien
tgtatttccatagacattgatttca

SEQ ID NO: 5438769 - DNA, 25 bp, Homo sapien
tttccacaaaaagcataacggctgt

SEQ ID NO: 5438770 - DNA, 25 bp, Homo sapien
tagagccagtttactccattttcca

SEQ ID NO: 5438771 - DNA, 25 bp, Homo sapien
gagtccaacacagggtgattaaagt

SEQ ID NO: 5438772 - DNA, 25 bp, Homo sapien
tgcaaaagagtccaacacagggtga

SEQ ID NO: 5438773 - DNA, 25 bp, Homo sapien
tccataatgatgcaacttggttttc

SEQ ID NO: 5438774 - DNA, 25 bp, Homo sapien
ctattgctttctgagacctgccctg

SEQ ID NO: 5438775 - DNA, 25 bp, Homo sapien
tgccgtcaggaggtgtgtttcgtcc

SEQ ID NO: 5438776 - DNA, 25 bp, Homo sapien
cattttagtagcagagcagtggtgc

SEQ ID NO: 5438777 - DNA, 25 bp, Homo sapien
aaatacactggccatgcattgatgc

SEQ ID NO: 5438778 - DNA, 25 bp, Homo sapien
tggccatgcattgatgcattcatca

SEQ ID NO: 5438779 - DNA, 25 bp, Homo sapien
gagcaatgctacaacatccaagtgg

SEQ ID NO: 5438780 - DNA, 25 bp, Homo sapien
cattaatctgtccattggaggctgc

SEQ ID NO: 5438781 - DNA, 25 bp, Homo sapien
taacccttcttatccttacaggtca

SEQ ID NO: 5438782 - DNA, 25 bp, Homo sapien
caggtcacttctgcgccatggttaa

SEQ ID NO: 5438783 - DNA, 25 bp, Homo sapien
tgtgcagctttccaatccagactga

SEQ ID NO: 5438784 - DNA, 25 bp, Homo sapien
tgacaaagcaactgcccgactggag

SEQ ID NO: 5438785 - DNA, 25 bp, Homo sapien
ccgactggagtgcactatgcatgcc

SEQ ID NO: 5438786 - DNA, 25 bp, Homo sapien
tgtgtccttgctttccgagccagtg

SEQ ID NO: 5438787 - DNA, 25 bp, Homo sapien
tgctttccatgcatggaatccttac

SEQ ID NO: 5438788 - DNA, 25 bp, Homo sapien
gcacgccggtccttcttgtcaaatg

SEQ ID NO: 5438789 - DNA, 25 bp, Homo sapien
tgcccagtgcagagcacgccggtcc

SEQ ID NO: 5438790 - DNA, 25 bp, Homo sapien
gatatttgcccctttggccaagagt

SEQ ID NO: 5438791 - DNA, 25 bp, Homo sapien
cctttggccaagagtaaattgacca

SEQ ID NO: 5438792 - DNA, 25 bp, Homo sapien
gtgcttaatcaaaacctgtactgct

SEQ ID NO: 5438793 - DNA, 25 bp, Homo sapien
cgttcagagccgcatggtgcaaggc

SEQ ID NO: 5438794 - DNA, 25 bp, Homo sapien
cctcggtcggagacattgacactgc

SEQ ID NO: 5438795 - DNA, 25 bp, Homo sapien
ggaatgatcacttctgcacatttga

SEQ ID NO: 5438796 - DNA, 25 bp, Homo sapien
tcactgcaacctgtgcctcagttca

SEQ ID NO: 5438797 - DNA, 25 bp, Homo sapien
acaggcatgagccaccgcgcctgga

SEQ ID NO: 5438798 - DNA, 25 bp, Homo sapien
gcaacctgtgcctcagttcaagcga

SEQ ID NO: 5438799 - DNA, 25 bp, Homo sapien
caggcatgagccaccgcgcctggac

SEQ ID NO: 5438800 - DNA, 25 bp, Homo sapien
tcttaatgaacgaacacctgtgagg

SEQ ID NO: 5438801 - DNA, 25 bp, Homo sapien
acctgtgaggattctggtatttccc

SEQ ID NO: 5438802 - DNA, 25 bp, Homo sapien
gaggcatcagcccagttaacgttct

SEQ ID NO: 5438803 - DNA, 25 bp, Homo sapien
gattgtaggccttgttggatgacac

SEQ ID NO: 5438804 - DNA, 25 bp, Homo sapien
catatgggaggtaactggacatgcc

SEQ ID NO: 5438805 - DNA, 25 bp, Homo sapien
gacatgccatttgcgagtcagtcaa

SEQ ID NO: 5438806 - DNA, 25 bp, Homo sapien
aataggaggcatgtgtcttagaaac

SEQ ID NO: 5438807 - DNA, 25 bp, Homo sapien
gaagtagaaacatacactgtggcac

SEQ ID NO: 5438808 - DNA, 25 bp, Homo sapien
tgcttatctatgttagctggcacta

SEQ ID NO: 5438809 - DNA, 25 bp, Homo sapien
acgtgcgttagactttctgggtttg

SEQ ID NO: 5438810 - DNA, 25 bp, Homo sapien
tcttcacagcctagggagtacacag

SEQ ID NO: 5438811 - DNA, 25 bp, Homo sapien
ctgggtttgtgtacatttcgttcct

SEQ ID NO: 5438812 - DNA, 25 bp, Homo sapien
gggaatcccagatgtgccagatgtg

SEQ ID NO: 5438813 - DNA, 25 bp, Homo sapien
aatctaaagaacagacctgtgccag

SEQ ID NO: 5438814 - DNA, 25 bp, Homo sapien
caatctaaagaacagacctgtgcca

SEQ ID NO: 5438815 - DNA, 25 bp, Homo sapien
taaagaacagacctgtgccagctct

SEQ ID NO: 5438816 - DNA, 25 bp, Homo sapien
tctaaagaacagacctgtgccagct

SEQ ID NO: 5438817 - DNA, 25 bp, Homo sapien
gaaaagctgacaccaataacggcca

SEQ ID NO: 5438818 - DNA, 25 bp, Homo sapien
gagctacctgatgcatttaccatgg

SEQ ID NO: 5438819 - DNA, 25 bp, Homo sapien
tgtaccaggcttgggatacatccag

SEQ ID NO: 5438820 - DNA, 25 bp, Homo sapien
gctgaactcagcgttagcaaacagg

SEQ ID NO: 5438821 - DNA, 25 bp, Homo sapien
ggagtcagccacatgttgtccttgg

SEQ ID NO: 5438822 - DNA, 25 bp, Homo sapien
ttgtccttggcatttacacgagctc

SEQ ID NO: 5438823 - DNA, 25 bp, Homo sapien
ccacatgttgtccttggcatttaca

SEQ ID NO: 5438824 - DNA, 25 bp, Homo sapien
tggagtcagccacatgttgtccttg

SEQ ID NO: 5438825 - DNA, 25 bp, Homo sapien
gctaagacatctgatataagcttcc

SEQ ID NO: 5438826 - DNA, 25 bp, Homo sapien
agagatgggatgttttataaaaggg

SEQ ID NO: 5438827 - DNA, 25 bp, Homo sapien
cagggttttgattagtcttctggtc

SEQ ID NO: 5438828 - DNA, 25 bp, Homo sapien
aagtccatgtctgaacagctaagac

SEQ ID NO: 5438829 - DNA, 25 bp, Homo sapien
tttcatagagatcaggggtgaagtg

SEQ ID NO: 5438830 - DNA, 25 bp, Homo sapien
caggggtgaagtgaactctgggcat

SEQ ID NO: 5438831 - DNA, 25 bp, Homo sapien
tcaggggtgaagtgaactctgggca

SEQ ID NO: 5438832 - DNA, 25 bp, Homo sapien
ttattttcatagagatcaggggtga

SEQ ID NO: 5438833 - DNA, 25 bp, Homo sapien
cttttccagaggcaatatttctgtt

SEQ ID NO: 5438834 - DNA, 25 bp, Homo sapien
gcaatatttctgttctgtaagccat

SEQ ID NO: 5438835 - DNA, 25 bp, Homo sapien
tttccagaggcaatatttctgttct

SEQ ID NO: 5438836 - DNA, 25 bp, Homo sapien
gaggcaatatttctgttctgtaagc

SEQ ID NO: 5438837 - DNA, 25 bp, Homo sapien
atctctgcatctcccagaaatgcgg

SEQ ID NO: 5438838 - DNA, 25 bp, Homo sapien
tctcccagaaatgcggccacatgaa

SEQ ID NO: 5438839 - DNA, 25 bp, Homo sapien
tgcatctcccagaaatgcggccaca

SEQ ID NO: 5438840 - DNA, 25 bp, Homo sapien
gaagaggggttcgtttctcagaatc

SEQ ID NO: 5438841 - DNA, 25 bp, Homo sapien
caatgatacccctaaggtccctaga

SEQ ID NO: 5438842 - DNA, 25 bp, Homo sapien
gaactcacaagcctaagccataaga

SEQ ID NO: 5438843 - DNA, 25 bp, Homo sapien
aaaacctagctggatagatatgccc

SEQ ID NO: 5438844 - DNA, 25 bp, Homo sapien
gccataagactcacgtggaaacgtt

SEQ ID NO: 5438845 - DNA, 25 bp, Homo sapien
ttggtgcctgcggttcttgacccct

SEQ ID NO: 5438846 - DNA, 25 bp, Homo sapien
tgggtagcaagaccccttggtgcct

SEQ ID NO: 5438847 - DNA, 25 bp, Homo sapien
gaagagcagcgctcagaagagccct

SEQ ID NO: 5438848 - DNA, 25 bp, Homo sapien
tggtagcggaagacctttccctctg

SEQ ID NO: 5438849 - DNA, 25 bp, Homo sapien
caaaggccggcttcgcggccgctcg

SEQ ID NO: 5438850 - DNA, 25 bp, Homo sapien
aacaaaggccggcttcgcggccgct

SEQ ID NO: 5438851 - DNA, 25 bp, Homo sapien
acaaaggccggcttcgcggccgctc

SEQ ID NO: 5438852 - DNA, 25 bp, Homo sapien
ctccgctcatttgggcctgccgcct

SEQ ID NO: 5438853 - DNA, 25 bp, Homo sapien
ggacgtccgctttctcgccaccagg

SEQ ID NO: 5438854 - DNA, 25 bp, Homo sapien
gctttctcgccaccaggcctccgct

SEQ ID NO: 5438855 - DNA, 25 bp, Homo sapien
ctcctgccccggacgtccgctttct

SEQ ID NO: 5438856 - DNA, 25 bp, Homo sapien
aaaccatgacaagaggacatgctgg

SEQ ID NO: 5438857 - DNA, 25 bp, Homo sapien
caagaggacatgctggataagtgtg

SEQ ID NO: 5438858 - DNA, 25 bp, Homo sapien
atgactcatccccaagggcattggc

SEQ ID NO: 5438859 - DNA, 25 bp, Homo sapien
gactcatccccaagggcattggcaa

SEQ ID NO: 5438860 - DNA, 25 bp, Homo sapien
tgggtggattcccgtgatgtcagaa

SEQ ID NO: 5438861 - DNA, 25 bp, Homo sapien
ctgggtggattcccgtgatgtcaga

SEQ ID NO: 5438862 - DNA, 25 bp, Homo sapien
ggtggattcccgtgatgtcagaaca

SEQ ID NO: 5438863 - DNA, 25 bp, Homo sapien
gggtggattcccgtgatgtcagaac

SEQ ID NO: 5438864 - DNA, 25 bp, Homo sapien
attgtcctgttgtgcttagtgccag

SEQ ID NO: 5438865 - DNA, 25 bp, Homo sapien
cttgcaaaaatgtcacaaaccattg

SEQ ID NO: 5438866 - DNA, 25 bp, Homo sapien
cctgttgtgcttagtgccagctggg

SEQ ID NO: 5438867 - DNA, 25 bp, Homo sapien
aaaatgtcacaaaccattgtcctgt

SEQ ID NO: 5438868 - DNA, 25 bp, Homo sapien
aataaagcattcagccgaccagaca

SEQ ID NO: 5438869 - DNA, 25 bp, Homo sapien
agccgaccagacagacgtaatccac

SEQ ID NO: 5438870 - DNA, 25 bp, Homo sapien
gaacaatggctacaccaaatgactc

SEQ ID NO: 5438871 - DNA, 25 bp, Homo sapien
tggctacaccaaatgactcgccttc

SEQ ID NO: 5438872 - DNA, 25 bp, Homo sapien
cagagtattcacatcttcagtttta

SEQ ID NO: 5438873 - DNA, 25 bp, Homo sapien
catcttcagttttatggatgagcat

SEQ ID NO: 5438874 - DNA, 25 bp, Homo sapien
gtattcacatcttcagttttatgga

SEQ ID NO: 5438875 - DNA, 25 bp, Homo sapien
acatcttcagttttatggatgagca

SEQ ID NO: 5438876 - DNA, 25 bp, Homo sapien
tgaagattgcctgaaccaatggtgg

SEQ ID NO: 5438877 - DNA, 25 bp, Homo sapien
tctggatcaccgctgaagattgcct

SEQ ID NO: 5438878 - DNA, 25 bp, Homo sapien
caccgctgaagattgcctgaaccaa

SEQ ID NO: 5438879 - DNA, 25 bp, Homo sapien
cggatctcctctggatcaccgctga

SEQ ID NO: 5438880 - DNA, 25 bp, Homo sapien
aataggaccggtgtcttcataagaa

SEQ ID NO: 5438881 - DNA, 25 bp, Homo sapien
cctgatccaataggaccggtgtctt

SEQ ID NO: 5438882 - DNA, 25 bp, Homo sapien
cagattaaaagaggtcgtaagggtg

SEQ ID NO: 5438883 - DNA, 25 bp, Homo sapien
agacaccagagctcacgttctcatt

SEQ ID NO: 5438884 - DNA, 25 bp, Homo sapien
cagagtgtggggtaaaagaggaaca

SEQ ID NO: 5438885 - DNA, 25 bp, Homo sapien
agggttgatgttgggcttgcctgca

SEQ ID NO: 5438886 - DNA, 25 bp, Homo sapien
aacagtggcaggctttagggttgat

SEQ ID NO: 5438887 - DNA, 25 bp, Homo sapien
gcaggctttagggttgatgttgggc

SEQ ID NO: 5438888 - DNA, 25 bp, Homo sapien
cttgacctcaccctgtgatctgctg

SEQ ID NO: 5438889 - DNA, 25 bp, Homo sapien
gacctcaccctgtgatctgctgttg

SEQ ID NO: 5438890 - DNA, 25 bp, Homo sapien
tcaccctgtgatctgctgttgggaa

SEQ ID NO: 5438891 - DNA, 25 bp, Homo sapien
cctcaccctgtgatctgctgttggg

SEQ ID NO: 5438892 - DNA, 25 bp, Homo sapien
gcctcctgaaagacgcagcctctga

SEQ ID NO: 5438893 - DNA, 25 bp, Homo sapien
cctcctgaaagacgcagcctctgaa

SEQ ID NO: 5438894 - DNA, 25 bp, Homo sapien
ggcctcctgaaagacgcagcctctg

SEQ ID NO: 5438895 - DNA, 25 bp, Homo sapien
tcaaaacgattctcaccaacttctt

SEQ ID NO: 5438896 - DNA, 25 bp, Homo sapien
gcaagggctagcctcctcaggagtg

SEQ ID NO: 5438897 - DNA, 25 bp, Homo sapien
caggagtggctgcctacattcaaaa

SEQ ID NO: 5438898 - DNA, 25 bp, Homo sapien
gtagcaagggctagcctcctcagga

SEQ ID NO: 5438899 - DNA, 25 bp, Homo sapien
ccacaaatgtgaacagcccgtgttc

SEQ ID NO: 5438900 - DNA, 25 bp, Homo sapien
tacgtaacgagctgaaagaacaaaa

SEQ ID NO: 5438901 - DNA, 25 bp, Homo sapien
gtatacctaagccaagtacatgcta

SEQ ID NO: 5438902 - DNA, 25 bp, Homo sapien
tgggaaacacctaatgcatcaaaac

SEQ ID NO: 5438903 - DNA, 25 bp, Homo sapien
tgagaataacgaagggtctggaaac

SEQ ID NO: 5438904 - DNA, 25 bp, Homo sapien
gacactttgcatcacagctaggaaa

SEQ ID NO: 5438905 - DNA, 25 bp, Homo sapien
gatgccagagctccagacgtttcag

SEQ ID NO: 5438906 - DNA, 25 bp, Homo sapien
tgaaggctgcaacaatctggagaat

SEQ ID NO: 5438907 - DNA, 25 bp, Homo sapien
cagatcccatgctagttcaactatg

SEQ ID NO: 5438908 - DNA, 25 bp, Homo sapien
gcccaaggtgactgccagtcactgg

SEQ ID NO: 5438909 - DNA, 25 bp, Homo sapien
ttgcgaagtgatgtcctccacccca

SEQ ID NO: 5438910 - DNA, 25 bp, Homo sapien
tttcagaacaacctggtgagttgcg

SEQ ID NO: 5438911 - DNA, 25 bp, Homo sapien
caccaatgaggccaggacgttctta

SEQ ID NO: 5438912 - DNA, 25 bp, Homo sapien
gttgcagtcctagttcaccaatgag

SEQ ID NO: 5438913 - DNA, 25 bp, Homo sapien
gaagaagcaagtttggatctacccc

SEQ ID NO: 5438914 - DNA, 25 bp, Homo sapien
aaacttactaaatgtggccgtgcac

SEQ ID NO: 5438915 - DNA, 25 bp, Homo sapien
tctccgcctcctgggttcaagcaat

SEQ ID NO: 5438916 - DNA, 25 bp, Homo sapien
acacaatcttggcccactacaatct

SEQ ID NO: 5438917 - DNA, 25 bp, Homo sapien
acaggcacccaccaccacgcccagc

SEQ ID NO: 5438918 - DNA, 25 bp, Homo sapien
tgacacaatcttggcccactacaat

SEQ ID NO: 5438919 - DNA, 25 bp, Homo sapien
ttggtttttcagtgggtgtgacagt

SEQ ID NO: 5438920 - DNA, 25 bp, Homo sapien
cttcctctcgcccaaggacacatcc

SEQ ID NO: 5438921 - DNA, 25 bp, Homo sapien
ggtttttcagtgggtgtgacagtca

SEQ ID NO: 5438922 - DNA, 25 bp, Homo sapien
tgttggtttttcagtgggtgtgaca

SEQ ID NO: 5438923 - DNA, 25 bp, Homo sapien
ttctaggtggatgacaactgccttt

SEQ ID NO: 5438924 - DNA, 25 bp, Homo sapien
taggtggatgacaactgcctttgtg

SEQ ID NO: 5438925 - DNA, 25 bp, Homo sapien
ctaggtggatgacaactgcctttgt

SEQ ID NO: 5438926 - DNA, 25 bp, Homo sapien
tctaggtggatgacaactgcctttg

SEQ ID NO: 5438927 - DNA, 25 bp, Homo sapien
gggagctcccagagacctgctatct

SEQ ID NO: 5438928 - DNA, 25 bp, Homo sapien
gagggtcaggtaccactaatccagt

SEQ ID NO: 5438929 - DNA, 25 bp, Homo sapien
aatatggacccaattccctgggagc

SEQ ID NO: 5438930 - DNA, 25 bp, Homo sapien
gacaaccatatcaccctgtgggctg

SEQ ID NO: 5438931 - DNA, 25 bp, Homo sapien
tttgctttcagcaatagctggaccg

SEQ ID NO: 5438932 - DNA, 25 bp, Homo sapien
gaccgaggactgcagaattagagca

SEQ ID NO: 5438933 - DNA, 25 bp, Homo sapien
tgaggctcctaagtattgggtgtcc

SEQ ID NO: 5438934 - DNA, 25 bp, Homo sapien
agggcaacttcttgaggaaggaata

SEQ ID NO: 5438935 - DNA, 25 bp, Homo sapien
gacagaggtccaacatcgatgcaga

SEQ ID NO: 5438936 - DNA, 25 bp, Homo sapien
caaaccatgtggagctaggaaggca

SEQ ID NO: 5438937 - DNA, 25 bp, Homo sapien
tggtcctactagtcccaaagggcca

SEQ ID NO: 5438938 - DNA, 25 bp, Homo sapien
tgcagtagggctccagtgtccatgt

SEQ ID NO: 5438939 - DNA, 25 bp, Homo sapien
agaggcaaaggacatgcttttattt

SEQ ID NO: 5438940 - DNA, 25 bp, Homo sapien
atcaagagaggcaaaggacatgctt

SEQ ID NO: 5438941 - DNA, 25 bp, Homo sapien
ctatcaagagaggcaaaggacatgc

SEQ ID NO: 5438942 - DNA, 25 bp, Homo sapien
agagaggcaaaggacatgcttttat

SEQ ID NO: 5438943 - DNA, 25 bp, Homo sapien
tcaacactcaagatgagaccagaaa

SEQ ID NO: 5438944 - DNA, 25 bp, Homo sapien
ctgggcctcaacactcaagatgaga

SEQ ID NO: 5438945 - DNA, 25 bp, Homo sapien
cactcaagatgagaccagaaagcct

SEQ ID NO: 5438946 - DNA, 25 bp, Homo sapien
gcctcaacactcaagatgagaccag

SEQ ID NO: 5438947 - DNA, 25 bp, Homo sapien
aaggccatttgctatagtcttttcc

SEQ ID NO: 5438948 - DNA, 25 bp, Homo sapien
tacataataaaaaggccatttgcta

SEQ ID NO: 5438949 - DNA, 25 bp, Homo sapien
aataaaaaggccatttgctatagtc

SEQ ID NO: 5438950 - DNA, 25 bp, Homo sapien
gccatttgctatagtcttttcccac

SEQ ID NO: 5438951 - DNA, 25 bp, Homo sapien
tgatgctgccaaccatctcgcttac

SEQ ID NO: 5438952 - DNA, 25 bp, Homo sapien
ccataacccctggattcttaaatca

SEQ ID NO: 5438953 - DNA, 25 bp, Homo sapien
tcttttcccattgtagccaccttac

SEQ ID NO: 5438954 - DNA, 25 bp, Homo sapien
cctacaatgggaccttgaattccca

SEQ ID NO: 5438955 - DNA, 25 bp, Homo sapien
cctgtgttgctgctagatttatctt

SEQ ID NO: 5438956 - DNA, 25 bp, Homo sapien
ctgtgttgctgctagatttatcttc

SEQ ID NO: 5438957 - DNA, 25 bp, Homo sapien
aagagtccaaactaggctggctgag

SEQ ID NO: 5438958 - DNA, 25 bp, Homo sapien
gcccaaggtgaagcgggaaatggct

SEQ ID NO: 5438959 - DNA, 25 bp, Homo sapien
aagttctgctcagttcagaccaaga

SEQ ID NO: 5438960 - DNA, 25 bp, Homo sapien
tgctcagttcagaccaagagtccaa

SEQ ID NO: 5438961 - DNA, 25 bp, Homo sapien
caagacggacttctccagcagactg

SEQ ID NO: 5438962 - DNA, 25 bp, Homo sapien
gaccaacttgctatggaggactgct

SEQ ID NO: 5438963 - DNA, 25 bp, Homo sapien
ccctttataaggtcggtgagactca

SEQ ID NO: 5438964 - DNA, 25 bp, Homo sapien
ccttgggagtggaacagcatcatca

SEQ ID NO: 5438965 - DNA, 25 bp, Homo sapien
ttccagaaatcataatctactcatg

SEQ ID NO: 5438966 - DNA, 25 bp, Homo sapien
taatagaagagtgctgacttattcc

SEQ ID NO: 5438967 - DNA, 25 bp, Homo sapien
taacaaaatctctagaggtaggtgg

SEQ ID NO: 5438968 - DNA, 25 bp, Homo sapien
caggcagggtgttttcaactgcaaa

SEQ ID NO: 5438969 - DNA, 25 bp, Homo sapien
tgtgatgggcagttaagagtgcctc

SEQ ID NO: 5438970 - DNA, 25 bp, Homo sapien
tgatgggcagttaagagtgcctccc

SEQ ID NO: 5438971 - DNA, 25 bp, Homo sapien
aagaaagtgtgatgggcagttaaga

SEQ ID NO: 5438972 - DNA, 25 bp, Homo sapien
tagcaaggaagaaagtgtgatgggc

SEQ ID NO: 5438973 - DNA, 25 bp, Homo sapien
ttaattctcactagctagaggccat

SEQ ID NO: 5438974 - DNA, 25 bp, Homo sapien
tgaccccagagccagctaagaattt

SEQ ID NO: 5438975 - DNA, 25 bp, Homo sapien
ggagaagagttgtaaagcccttcaa

SEQ ID NO: 5438976 - DNA, 25 bp, Homo sapien
tgttgagcacatctagtaccaggca

SEQ ID NO: 5438977 - DNA, 25 bp, Homo sapien
tgtaagctgaccgtaggcacagatc

SEQ ID NO: 5438978 - DNA, 25 bp, Homo sapien
aaaaacagctcctgtataacgatgg

SEQ ID NO: 5438979 - DNA, 25 bp, Homo sapien
caggatgttccctgaagtattcagg

SEQ ID NO: 5438980 - DNA, 25 bp, Homo sapien
gcacagatcacgtggcatccactat

SEQ ID NO: 5438981 - DNA, 25 bp, Homo sapien
agaaatttttccctagcccatactg

SEQ ID NO: 5438982 - DNA, 25 bp, Homo sapien
agtaacagtcagctttttagtgatt

SEQ ID NO: 5438983 - DNA, 25 bp, Homo sapien
tatacaaccattaccatcattcatc

SEQ ID NO: 5438984 - DNA, 25 bp, Homo sapien
acaatcatgactttcttcagttcct

SEQ ID NO: 5438985 - DNA, 25 bp, Homo sapien
tcctcaccaagatttgctatttctg

SEQ ID NO: 5438986 - DNA, 25 bp, Homo sapien
gatagtcacactgatgagtatgaag

SEQ ID NO: 5438987 - DNA, 25 bp, Homo sapien
tctaaatggtgttgcaaaatgtgtc

SEQ ID NO: 5438988 - DNA, 25 bp, Homo sapien
gcacaaggtcttcaatttccccaca

SEQ ID NO: 5438989 - DNA, 25 bp, Homo sapien
cagctgctaagccatctgctacctg

SEQ ID NO: 5438990 - DNA, 25 bp, Homo sapien
ctcacagctgctaagccatctgcta

SEQ ID NO: 5438991 - DNA, 25 bp, Homo sapien
cacagctgctaagccatctgctacc

SEQ ID NO: 5438992 - DNA, 25 bp, Homo sapien
agctgctaagccatctgctacctgc

SEQ ID NO: 5438993 - DNA, 25 bp, Homo sapien
cagcttggaaagcagcgccatttca

SEQ ID NO: 5438994 - DNA, 25 bp, Homo sapien
tggccgcagcttggaaagcagcgcc

SEQ ID NO: 5438995 - DNA, 25 bp, Homo sapien
gcttggaaagcagcgccatttcaag

SEQ ID NO: 5438996 - DNA, 25 bp, Homo sapien
cgcagcttggaaagcagcgccattt

SEQ ID NO: 5438997 - DNA, 25 bp, Homo sapien
ggactataggggtgcgtcacagcac

SEQ ID NO: 5438998 - DNA, 25 bp, Homo sapien
aggggtgcgtcacagcaccagctaa

SEQ ID NO: 5438999 - DNA, 25 bp, Homo sapien
gactataggggtgcgtcacagcacc

SEQ ID NO: 5439000 - DNA, 25 bp, Homo sapien
tataggggtgcgtcacagcaccagc

SEQ ID NO: 5439001 - DNA, 25 bp, Homo sapien
tgggcatgcaagagtgtcactaaac

SEQ ID NO: 5439002 - DNA, 25 bp, Homo sapien
tcactaaactctgtataacctcagg

SEQ ID NO: 5439003 - DNA, 25 bp, Homo sapien
ccaaaagacttgaccttggaaatga

SEQ ID NO: 5439004 - DNA, 25 bp, Homo sapien
gagaaatcatctagtatgggcatgc

SEQ ID NO: 5439005 - DNA, 25 bp, Homo sapien
gagcaaccgctgtacaatagccacg

SEQ ID NO: 5439006 - DNA, 25 bp, Homo sapien
tagccacggtcttgataagcctcgc

SEQ ID NO: 5439007 - DNA, 25 bp, Homo sapien
taagcctcgcggatgagattttggc

SEQ ID NO: 5439008 - DNA, 25 bp, Homo sapien
ccaagtgtgggatgcttgagcaacc

SEQ ID NO: 5439009 - DNA, 25 bp, Homo sapien
cagcctgtggattattacttggcca

SEQ ID NO: 5439010 - DNA, 25 bp, Homo sapien
ggaggtgtcctctctaccttagtag

SEQ ID NO: 5439011 - DNA, 25 bp, Homo sapien
caaaaattggccagcataatgacat

SEQ ID NO: 5439012 - DNA, 25 bp, Homo sapien
agggtctttccatactacagtgttc

SEQ ID NO: 5439013 - DNA, 25 bp, Homo sapien
caaaattctagaaatatgactcatt

SEQ ID NO: 5439014 - DNA, 25 bp, Homo sapien
aacaagaactcacggcaacagagag

SEQ ID NO: 5439015 - DNA, 25 bp, Homo sapien
caaacaagaactcacggcaacagag

SEQ ID NO: 5439016 - DNA, 25 bp, Homo sapien
gtcaaacaagaactcacggcaacag

SEQ ID NO: 5439017 - DNA, 25 bp, Homo sapien
ttttgtggcactctagaaggctccc

SEQ ID NO: 5439018 - DNA, 25 bp, Homo sapien
taggttatgtaaggcctgtggaccc

SEQ ID NO: 5439019 - DNA, 25 bp, Homo sapien
tgtggacccattgagccaaactgca

SEQ ID NO: 5439020 - DNA, 25 bp, Homo sapien
ggcagccaagagttagtcactggaa

SEQ ID NO: 5439021 - DNA, 25 bp, Homo sapien
catttgctgctctataagggtcccc

SEQ ID NO: 5439022 - DNA, 25 bp, Homo sapien
gcccagtggcagtaattcaaccatt

SEQ ID NO: 5439023 - DNA, 25 bp, Homo sapien
ctggtgggccagtgtagtcatttgc

SEQ ID NO: 5439024 - DNA, 25 bp, Homo sapien
gtgagtctgacaatggtaccaccca

SEQ ID NO: 5439025 - DNA, 25 bp, Homo sapien
ttgtgacgtcacagaatacttggca

SEQ ID NO: 5439026 - DNA, 25 bp, Homo sapien
gcagtgaaactactccgtatggccc

SEQ ID NO: 5439027 - DNA, 25 bp, Homo sapien
caatgcaggttcatcgatggtaaca

SEQ ID NO: 5439028 - DNA, 25 bp, Homo sapien
acttggcagagaggacgtgtgtttc

SEQ ID NO: 5439029 - DNA, 25 bp, Homo sapien
cttcaagtgatctgcccgcctcagc

SEQ ID NO: 5439030 - DNA, 25 bp, Homo sapien
taatatttgtattttaggagagacg

SEQ ID NO: 5439031 - DNA, 25 bp, Homo sapien
ttcaagtgatctgcccgcctcagcc

SEQ ID NO: 5439032 - DNA, 25 bp, Homo sapien
ctaatatttgtattttaggagagac

SEQ ID NO: 5439033 - DNA, 25 bp, Homo sapien
tcatcaacagatcaagaaattcatt

SEQ ID NO: 5439034 - DNA, 25 bp, Homo sapien
tttaactcttagcatctcaggatca

SEQ ID NO: 5439035 - DNA, 25 bp, Homo sapien
ctcaggatcacatttctattacaaa

SEQ ID NO: 5439036 - DNA, 25 bp, Homo sapien
aataatcattggaaactcaatccag

SEQ ID NO: 5439037 - DNA, 25 bp, Homo sapien
caagtttctttagtcttaattctct

SEQ ID NO: 5439038 - DNA, 25 bp, Homo sapien
caacctccacttttgttagtccaat

SEQ ID NO: 5439039 - DNA, 25 bp, Homo sapien
cagtgtaagtaacaacctccacttt

SEQ ID NO: 5439040 - DNA, 25 bp, Homo sapien
aaactaacagtcaatctccttcccg

SEQ ID NO: 5439041 - DNA, 25 bp, Homo sapien
agaaactaacagtcaatctccttcc

SEQ ID NO: 5439042 - DNA, 25 bp, Homo sapien
taacagtcaatctccttcccgctcc

SEQ ID NO: 5439043 - DNA, 25 bp, Homo sapien
taagaaactaacagtcaatctcctt

SEQ ID NO: 5439044 - DNA, 25 bp, Homo sapien
aaaaggaatgaaataatggcatttg

SEQ ID NO: 5439045 - DNA, 25 bp, Homo sapien
taaaaaggaatgaaataatggcatt

SEQ ID NO: 5439046 - DNA, 25 bp, Homo sapien
aggaatgaaataatggcatttgcag

SEQ ID NO: 5439047 - DNA, 25 bp, Homo sapien
aaaggaatgaaataatggcatttgc

SEQ ID NO: 5439048 - DNA, 25 bp, Homo sapien
taaatcacgtaaagcatgattcttg

SEQ ID NO: 5439049 - DNA, 25 bp, Homo sapien
atattaggattaaatcacgtaaagc

SEQ ID NO: 5439050 - DNA, 25 bp, Homo sapien
gatgatagccatcctctcataaaaa

SEQ ID NO: 5439051 - DNA, 25 bp, Homo sapien
cgtaaagcatgattcttgtcttgtc

SEQ ID NO: 5439052 - DNA, 25 bp, Homo sapien
cattaaacacccctcgattgcttga

SEQ ID NO: 5439053 - DNA, 25 bp, Homo sapien
gattgcttgaatacatgggagatcc

SEQ ID NO: 5439054 - DNA, 25 bp, Homo sapien
gccccagcagagctatgctgtatca

SEQ ID NO: 5439055 - DNA, 25 bp, Homo sapien
tgtcccctcatgtcaccttgatact

SEQ ID NO: 5439056 - DNA, 25 bp, Homo sapien
taacccaagtggtgatttggccagg

SEQ ID NO: 5439057 - DNA, 25 bp, Homo sapien
cagaggctgctgttataacccaagt

SEQ ID NO: 5439058 - DNA, 25 bp, Homo sapien
gatttgtcccggctgacctgaatgt

SEQ ID NO: 5439059 - DNA, 25 bp, Homo sapien
ggtggcagccagtgaaaaatacagc

SEQ ID NO: 5439060 - DNA, 25 bp, Homo sapien
gttagtgtcaatgtaagagcagcag

SEQ ID NO: 5439061 - DNA, 25 bp, Homo sapien
tcatgcaacttggtttggtgcctgt

SEQ ID NO: 5439062 - DNA, 25 bp, Homo sapien
gaaggtggctgttaccattccacag

SEQ ID NO: 5439063 - DNA, 25 bp, Homo sapien
gaaagagctgcaaagagttttgtca

SEQ ID NO: 5439064 - DNA, 25 bp, Homo sapien
tgagtggaggctccgagccgacttc

SEQ ID NO: 5439065 - DNA, 25 bp, Homo sapien
cctgtgagtggaggctccgagccga

SEQ ID NO: 5439066 - DNA, 25 bp, Homo sapien
tgtgagtggaggctccgagccgact

SEQ ID NO: 5439067 - DNA, 25 bp, Homo sapien
cgcctgtgagtggaggctccgagcc

SEQ ID NO: 5439068 - DNA, 25 bp, Homo sapien
ccgatccgaaagggcggtctccagg

SEQ ID NO: 5439069 - DNA, 25 bp, Homo sapien
cccgatccgaaagggcggtctccag

SEQ ID NO: 5439070 - DNA, 25 bp, Homo sapien
gcccgatccgaaagggcggtctcca

SEQ ID NO: 5439071 - DNA, 25 bp, Homo sapien
cgatccgaaagggcggtctccaggg

SEQ ID NO: 5439072 - DNA, 25 bp, Homo sapien
ggtcggtgagtttgagcactgccat

SEQ ID NO: 5439073 - DNA, 25 bp, Homo sapien
tggtcggtgagtttgagcactgcca

SEQ ID NO: 5439074 - DNA, 25 bp, Homo sapien
ctggtcggtgagtttgagcactgcc

SEQ ID NO: 5439075 - DNA, 25 bp, Homo sapien
gaaaaaatctggctcccgaatttga

SEQ ID NO: 5439076 - DNA, 25 bp, Homo sapien
gaagcggaagggattgccaggagaa

SEQ ID NO: 5439077 - DNA, 25 bp, Homo sapien
ggcccgcagatgtcacgccgggagc

SEQ ID NO: 5439078 - DNA, 25 bp, Homo sapien
cgccgagaggctgacactggctagt

SEQ ID NO: 5439079 - DNA, 25 bp, Homo sapien
gggccgccactgacatcaccgcgcg

SEQ ID NO: 5439080 - DNA, 25 bp, Homo sapien
ccactgacatcaccgcgcgctggct

SEQ ID NO: 5439081 - DNA, 25 bp, Homo sapien
cagccgggccgccactgacatcacc

SEQ ID NO: 5439082 - DNA, 25 bp, Homo sapien
agtaccggctgctgccagccgggcc

SEQ ID NO: 5439083 - DNA, 25 bp, Homo sapien
tggcagcgccccgaagatcccaggg

SEQ ID NO: 5439084 - DNA, 25 bp, Homo sapien
gaagatcccagggaccgcaattatg

SEQ ID NO: 5439085 - DNA, 25 bp, Homo sapien
ccagggaccgcaattatgatgctcc

SEQ ID NO: 5439086 - DNA, 25 bp, Homo sapien
cccgaagatcccagggaccgcaatt

SEQ ID NO: 5439087 - DNA, 25 bp, Homo sapien
aggaggcagcggacacattgtgatt

SEQ ID NO: 5439088 - DNA, 25 bp, Homo sapien
ctttgtttaatgccaggaggcagcg

SEQ ID NO: 5439089 - DNA, 25 bp, Homo sapien
ttaatgccaggaggcagcggacaca

SEQ ID NO: 5439090 - DNA, 25 bp, Homo sapien
tgtttaatgccaggaggcagcggac

SEQ ID NO: 5439091 - DNA, 25 bp, Homo sapien
tggtccatgcagaaatgtggatacc

SEQ ID NO: 5439092 - DNA, 25 bp, Homo sapien
tgtggataccatagtctctctagag

SEQ ID NO: 5439093 - DNA, 25 bp, Homo sapien
gccacatagggccaatgctatgcgc

SEQ ID NO: 5439094 - DNA, 25 bp, Homo sapien
aatgctatgcgctggtccatgcaga

SEQ ID NO: 5439095 - DNA, 25 bp, Homo sapien
gatggagaccaagcagtatactgtc

SEQ ID NO: 5439096 - DNA, 25 bp, Homo sapien
gtatactgtcctcgcacttccctct

SEQ ID NO: 5439097 - DNA, 25 bp, Homo sapien
agcgatggagaccaagcagtatact

SEQ ID NO: 5439098 - DNA, 25 bp, Homo sapien
tgcatgggtctgaagcgatggagac

SEQ ID NO: 5439099 - DNA, 25 bp, Homo sapien
ctctgaatgtaggaacgatcttgca

SEQ ID NO: 5439100 - DNA, 25 bp, Homo sapien
gaacgatcttgcagactttcctgtg

SEQ ID NO: 5439101 - DNA, 25 bp, Homo sapien
tcctgtggtgtactgtgaattgaca

SEQ ID NO: 5439102 - DNA, 25 bp, Homo sapien
tgaattgacaccacttaaccagttt

SEQ ID NO: 5439103 - DNA, 25 bp, Homo sapien
tggcttctctgacacccagagggtg

SEQ ID NO: 5439104 - DNA, 25 bp, Homo sapien
ggctctgagcaaatacaacccgagg

SEQ ID NO: 5439105 - DNA, 25 bp, Homo sapien
caagccgtctgcgtttttgcacaca

SEQ ID NO: 5439106 - DNA, 25 bp, Homo sapien
gggatgtccgtgagaacctgctcca

SEQ ID NO: 5439107 - DNA, 25 bp, Homo sapien
acttggtccagctctttccaccatg

SEQ ID NO: 5439108 - DNA, 25 bp, Homo sapien
ttcccccaaggaagacaaggaggca

SEQ ID NO: 5439109 - DNA, 25 bp, Homo sapien
ccagtccatcttccacttggtccag

SEQ ID NO: 5439110 - DNA, 25 bp, Homo sapien
agctctttccaccatgccacatttt

SEQ ID NO: 5439111 - DNA, 25 bp, Homo sapien
agcagaagagaggctaagggcagca

SEQ ID NO: 5439112 - DNA, 25 bp, Homo sapien
gcagccaggcaccagttagtgtgga

SEQ ID NO: 5439113 - DNA, 25 bp, Homo sapien
cagaagagaggctaagggcagcagc

SEQ ID NO: 5439114 - DNA, 25 bp, Homo sapien
ccaggtgtggccctctagtggctgt

SEQ ID NO: 5439115 - DNA, 25 bp, Homo sapien
gtggaaatgcttgccgctagtgaac

SEQ ID NO: 5439116 - DNA, 25 bp, Homo sapien
gggacatcccataatccacactgtg

SEQ ID NO: 5439117 - DNA, 25 bp, Homo sapien
actgcactaagccaaagcatgcgtg

SEQ ID NO: 5439118 - DNA, 25 bp, Homo sapien
gctagtgaacggcttcccctccatg

SEQ ID NO: 5439119 - DNA, 25 bp, Homo sapien
catttttggctcgagtatcttgaat

SEQ ID NO: 5439120 - DNA, 25 bp, Homo sapien
tcctgctcagtcatccagaagcaat

SEQ ID NO: 5439121 - DNA, 25 bp, Homo sapien
taaaaactaagcaggcattttggac

SEQ ID NO: 5439122 - DNA, 25 bp, Homo sapien
cacgtctgaccaccgctactactat

SEQ ID NO: 5439123 - DNA, 25 bp, Homo sapien
catcgtgatcttcgtcatcatcttc

SEQ ID NO: 5439124 - DNA, 25 bp, Homo sapien
ttcatcatcgtgatcttcgtcatca

SEQ ID NO: 5439125 - DNA, 25 bp, Homo sapien
atcttcatcatcgtgatcttcgtca

SEQ ID NO: 5439126 - DNA, 25 bp, Homo sapien
tcatcatcgtgatcttcgtcatcat

SEQ ID NO: 5439127 - DNA, 25 bp, Homo sapien
aacaatgtgcagttcatcccttgca

SEQ ID NO: 5439128 - DNA, 25 bp, Homo sapien
tggactgccttcatcattcatggcc

SEQ ID NO: 5439129 - DNA, 25 bp, Homo sapien
aattggactgccttcatcattcatg

SEQ ID NO: 5439130 - DNA, 25 bp, Homo sapien
tgtgcagttcatcccttgcaccagc

SEQ ID NO: 5439131 - DNA, 25 bp, Homo sapien
ttaaagataactggtctcatcttca

SEQ ID NO: 5439132 - DNA, 25 bp, Homo sapien
taaagataactggtctcatcttcat

SEQ ID NO: 5439133 - DNA, 25 bp, Homo sapien
aactggtctcatcttcatcattatc

SEQ ID NO: 5439134 - DNA, 25 bp, Homo sapien
tggtctcatcttcatcattatccac

SEQ ID NO: 5439135 - DNA, 25 bp, Homo sapien
cattgaatcttccatcagatggtgg

SEQ ID NO: 5439136 - DNA, 25 bp, Homo sapien
gtccattgaatcttccatcagatgg

SEQ ID NO: 5439137 - DNA, 25 bp, Homo sapien
ccattgaatcttccatcagatggtg

SEQ ID NO: 5439138 - DNA, 25 bp, Homo sapien
atgtccattgaatcttccatcagat

SEQ ID NO: 5439139 - DNA, 25 bp, Homo sapien
aggaggacggagataaacgaacgct

SEQ ID NO: 5439140 - DNA, 25 bp, Homo sapien
aacagccacgcaggacggaatcaca

SEQ ID NO: 5439141 - DNA, 25 bp, Homo sapien
cacaccagggatgttctgtatgcat

SEQ ID NO: 5439142 - DNA, 25 bp, Homo sapien
gagataaacgaacgctgctccagag

SEQ ID NO: 5439143 - DNA, 25 bp, Homo sapien
tctcaataggtagaggtcaggaaca

SEQ ID NO: 5439144 - DNA, 25 bp, Homo sapien
tgagaaaccctagggtagctgtagt

SEQ ID NO: 5439145 - DNA, 25 bp, Homo sapien
caaccacaacagagtgcagtgtgat

SEQ ID NO: 5439146 - DNA, 25 bp, Homo sapien
caaactgaacctatgtggctgcaac

SEQ ID NO: 5439147 - DNA, 25 bp, Homo sapien
caattccattagagggcgatggccc

SEQ ID NO: 5439148 - DNA, 25 bp, Homo sapien
gaggccaagcaaacgtaggctacta

SEQ ID NO: 5439149 - DNA, 25 bp, Homo sapien
tctagtggtacttggtgctcacagg

SEQ ID NO: 5439150 - DNA, 25 bp, Homo sapien
taaagttgcatggaagtaccgctga

SEQ ID NO: 5439151 - DNA, 25 bp, Homo sapien
tagtactgccttaatgcttggttcc

SEQ ID NO: 5439152 - DNA, 25 bp, Homo sapien
tgttcttaaaggtagagggcaggtc

SEQ ID NO: 5439153 - DNA, 25 bp, Homo sapien
tcccctgcatataagcacagtggct

SEQ ID NO: 5439154 - DNA, 25 bp, Homo sapien
cctaataggcagaaagcagttttga

SEQ ID NO: 5439155 - DNA, 25 bp, Homo sapien
gccacttattccacataaaccaata

SEQ ID NO: 5439156 - DNA, 25 bp, Homo sapien
tcagctaactactttctataaacca

SEQ ID NO: 5439157 - DNA, 25 bp, Homo sapien
tactttatcaaagttccgcatttta

SEQ ID NO: 5439158 - DNA, 25 bp, Homo sapien
atatagtttttattcagctaactac

SEQ ID NO: 5439159 - DNA, 25 bp, Homo sapien
actgtgttcttggtcactactggca

SEQ ID NO: 5439160 - DNA, 25 bp, Homo sapien
tgtgaagtagctgtgcattaaacac

SEQ ID NO: 5439161 - DNA, 25 bp, Homo sapien
gtttacatcaccaaatcaaagcaag

SEQ ID NO: 5439162 - DNA, 25 bp, Homo sapien
tgaaatccctccagtatagtgtata

SEQ ID NO: 5439163 - DNA, 25 bp, Homo sapien
tgctatgagagcgtcctgggaacca

SEQ ID NO: 5439164 - DNA, 25 bp, Homo sapien
acatctctgactttccgggctgggt

SEQ ID NO: 5439165 - DNA, 25 bp, Homo sapien
taggtgttcttatcatcgttgtaga

SEQ ID NO: 5439166 - DNA, 25 bp, Homo sapien
gtcaagttcataacgaatataggtg

SEQ ID NO: 5439167 - DNA, 25 bp, Homo sapien
caatataccctaatgataatcagga

SEQ ID NO: 5439168 - DNA, 25 bp, Homo sapien
cacacaattgttctaccatatggca

SEQ ID NO: 5439169 - DNA, 25 bp, Homo sapien
gggaacctactaattacactgctct

SEQ ID NO: 5439170 - DNA, 25 bp, Homo sapien
ggaagagacaaaactcactcccctg

SEQ ID NO: 5439171 - DNA, 25 bp, Homo sapien
aaatctttaacttacaggcagtggg

SEQ ID NO: 5439172 - DNA, 25 bp, Homo sapien
aaaaatctttaacttacaggcagtg

SEQ ID NO: 5439173 - DNA, 25 bp, Homo sapien
aaaatctttaacttacaggcagtgg

SEQ ID NO: 5439174 - DNA, 25 bp, Homo sapien
atctttaacttacaggcagtggggg

SEQ ID NO: 5439175 - DNA, 25 bp, Homo sapien
taactgcctgaattacatgaggaga

SEQ ID NO: 5439176 - DNA, 25 bp, Homo sapien
tgcaacattctacatggtccaatag

SEQ ID NO: 5439177 - DNA, 25 bp, Homo sapien
tccataaaccccaagtgacatgtgc

SEQ ID NO: 5439178 - DNA, 25 bp, Homo sapien
cattgggccatacatagttcaacaa

SEQ ID NO: 5439179 - DNA, 25 bp, Homo sapien
tattcaccggcccattagaaactaa

SEQ ID NO: 5439180 - DNA, 25 bp, Homo sapien
aaagatacagtcttagttttacagg

SEQ ID NO: 5439181 - DNA, 25 bp, Homo sapien
taagatgcggtcttataagaaaggg

SEQ ID NO: 5439182 - DNA, 25 bp, Homo sapien
ttacaggaaatattcaccggcccat

SEQ ID NO: 5439183 - DNA, 25 bp, Homo sapien
aatatgagcaggagggctctgtgaa

SEQ ID NO: 5439184 - DNA, 25 bp, Homo sapien
gggctctgtgaagtcttggctttat

SEQ ID NO: 5439185 - DNA, 25 bp, Homo sapien
cgtgcctggccatctaattaacttt

SEQ ID NO: 5439186 - DNA, 25 bp, Homo sapien
ctttattatgctactaaagaggagg

SEQ ID NO: 5439187 - DNA, 25 bp, Homo sapien
ggagtactgtaaagggtgaacatgt

SEQ ID NO: 5439188 - DNA, 25 bp, Homo sapien
cattcattaaggcagggagtactgt

SEQ ID NO: 5439189 - DNA, 25 bp, Homo sapien
catcttcaagtaacggtgttacggc

SEQ ID NO: 5439190 - DNA, 25 bp, Homo sapien
cagtggtacaaactctgttctgcct

SEQ ID NO: 5439191 - DNA, 25 bp, Homo sapien
aagtgtagccaatacatcatgaggg

SEQ ID NO: 5439192 - DNA, 25 bp, Homo sapien
cagaagtgtagccaatacatcatga

SEQ ID NO: 5439193 - DNA, 25 bp, Homo sapien
gaggttgttcagaagtgtagccaat

SEQ ID NO: 5439194 - DNA, 25 bp, Homo sapien
tgttcagaagtgtagccaatacatc

SEQ ID NO: 5439195 - DNA, 25 bp, Homo sapien
tataaccaaatgtgttgactgtggc

SEQ ID NO: 5439196 - DNA, 25 bp, Homo sapien
aaatcctcatccactctcttgcaga

SEQ ID NO: 5439197 - DNA, 25 bp, Homo sapien
ggcctttgcaatataaccaaatgtg

SEQ ID NO: 5439198 - DNA, 25 bp, Homo sapien
tctacgaatagcctttttgtgggct

SEQ ID NO: 5439199 - DNA, 25 bp, Homo sapien
ctgtcagcaatacgaccaacaagat

SEQ ID NO: 5439200 - DNA, 25 bp, Homo sapien
tacaattctcttgtactttttcatg

SEQ ID NO: 5439201 - DNA, 25 bp, Homo sapien
gaccaacaagatcaatacaattctc

SEQ ID NO: 5439202 - DNA, 25 bp, Homo sapien
gcaatacgaccaacaagatcaatac

SEQ ID NO: 5439203 - DNA, 25 bp, Homo sapien
tttaattggtggagtcatcttatgc

SEQ ID NO: 5439204 - DNA, 25 bp, Homo sapien
gatctttaattggtggagtcatctt

SEQ ID NO: 5439205 - DNA, 25 bp, Homo sapien
taattggtggagtcatcttatgcat

SEQ ID NO: 5439206 - DNA, 25 bp, Homo sapien
gcagatctttaattggtggagtcat

SEQ ID NO: 5439207 - DNA, 25 bp, Homo sapien
cactttccttttacttagcaatgtc

SEQ ID NO: 5439208 - DNA, 25 bp, Homo sapien
gaagtcaataaactatcaacatttg

SEQ ID NO: 5439209 - DNA, 25 bp, Homo sapien
catttgaattgcaacttttgttcac

SEQ ID NO: 5439210 - DNA, 25 bp, Homo sapien
gaccagactcagaatcgtttttaac

SEQ ID NO: 5439211 - DNA, 25 bp, Homo sapien
gggcatacttggatggtatttacac

SEQ ID NO: 5439212 - DNA, 25 bp, Homo sapien
aaaacaaacagatctccagtctccc

SEQ ID NO: 5439213 - DNA, 25 bp, Homo sapien
tccagtctccctgcaatgcagggca

SEQ ID NO: 5439214 - DNA, 25 bp, Homo sapien
ccctgcaatgcagggcatacttgga

SEQ ID NO: 5439215 - DNA, 25 bp, Homo sapien
gctgtattacgggttagaaaactga

SEQ ID NO: 5439216 - DNA, 25 bp, Homo sapien
tttttgagctgtgactactcccacc

SEQ ID NO: 5439217 - DNA, 25 bp, Homo sapien
tactagggtcctgtattccatgact

SEQ ID NO: 5439218 - DNA, 25 bp, Homo sapien
ttaggattgccttttcaccccgcag

SEQ ID NO: 5439219 - DNA, 25 bp, Homo sapien
actcatacaatacaacacccaagtg

SEQ ID NO: 5439220 - DNA, 25 bp, Homo sapien
gcccaatacttcagggtactcttca

SEQ ID NO: 5439221 - DNA, 25 bp, Homo sapien
tgctccaagaatgctgcccaatact

SEQ ID NO: 5439222 - DNA, 25 bp, Homo sapien
tacaatggccttcagtgctccaaga

SEQ ID NO: 5439223 - DNA, 25 bp, Homo sapien
agttcgagaaatcaagtcagctgcc

SEQ ID NO: 5439224 - DNA, 25 bp, Homo sapien
tcttgacaagtcttcatgacaacag

SEQ ID NO: 5439225 - DNA, 25 bp, Homo sapien
taaacgccacaaaactgtaccacag

SEQ ID NO: 5439226 - DNA, 25 bp, Homo sapien
tcagctgcctgttgcctaactttag

SEQ ID NO: 5439227 - DNA, 25 bp, Homo sapien
cactgtgccaaagccgttcaacatt

SEQ ID NO: 5439228 - DNA, 25 bp, Homo sapien
tgccaagagcattaaccactgtgcc

SEQ ID NO: 5439229 - DNA, 25 bp, Homo sapien
ggtttgactcgtttgccaagagcat

SEQ ID NO: 5439230 - DNA, 25 bp, Homo sapien
ctgaggcaagtatggtttgactcgt

SEQ ID NO: 5439231 - DNA, 25 bp, Homo sapien
ctctgtagtctgttcttggaaagca

SEQ ID NO: 5439232 - DNA, 25 bp, Homo sapien
tgttcttggaaagcataaagaatac

SEQ ID NO: 5439233 - DNA, 25 bp, Homo sapien
gtctgttcttggaaagcataaagaa

SEQ ID NO: 5439234 - DNA, 25 bp, Homo sapien
tagtctgttcttggaaagcataaag

SEQ ID NO: 5439235 - DNA, 25 bp, Homo sapien
tgctgcacctactttgtttgccaac

SEQ ID NO: 5439236 - DNA, 25 bp, Homo sapien
caatcctggatataatttctgctgc

SEQ ID NO: 5439237 - DNA, 25 bp, Homo sapien
gtactgttcggcttcatctttcaga

SEQ ID NO: 5439238 - DNA, 25 bp, Homo sapien
gccaactccacagtagtatcaacta

SEQ ID NO: 5439239 - DNA, 25 bp, Homo sapien
caaagccatcctgtgctgccagaag

SEQ ID NO: 5439240 - DNA, 25 bp, Homo sapien
ctgtcggtaatttcttctatccaaa

SEQ ID NO: 5439241 - DNA, 25 bp, Homo sapien
ttttaatgtagtttgcttctacacc

SEQ ID NO: 5439242 - DNA, 25 bp, Homo sapien
ggtaatttcttctatccaaagccat

SEQ ID NO: 5439243 - DNA, 25 bp, Homo sapien
ggagactggaattctcgaataagga

SEQ ID NO: 5439244 - DNA, 25 bp, Homo sapien
atccataagaggaataagataccca

SEQ ID NO: 5439245 - DNA, 25 bp, Homo sapien
taaggattaacatcacttctctagt

SEQ ID NO: 5439246 - DNA, 25 bp, Homo sapien
agtatagtagttggcatattctgca

SEQ ID NO: 5439247 - DNA, 25 bp, Homo sapien
caaaagattcgataccataaggagt

SEQ ID NO: 5439248 - DNA, 25 bp, Homo sapien
tgcttcagccaaggcagcaatggcc

SEQ ID NO: 5439249 - DNA, 25 bp, Homo sapien
aagcactgatggtccgaactttctg

SEQ ID NO: 5439250 - DNA, 25 bp, Homo sapien
ttggcggatacccttccataaaggc

SEQ ID NO: 5439251 - DNA, 25 bp, Homo sapien
tatatcaggtctcatggtagagatc

SEQ ID NO: 5439252 - DNA, 25 bp, Homo sapien
taataccagtgtgtctcgcttgcca

SEQ ID NO: 5439253 - DNA, 25 bp, Homo sapien
aagctctagctgttgtgttacggac

SEQ ID NO: 5439254 - DNA, 25 bp, Homo sapien
caggacttcttgcttttgcacacag

SEQ ID NO: 5439255 - DNA, 25 bp, Homo sapien
tcttcatcaatcaatagcggttcaa

SEQ ID NO: 5439256 - DNA, 25 bp, Homo sapien
aatagcggttcaatgaccacgagga

SEQ ID NO: 5439257 - DNA, 25 bp, Homo sapien
tctcggccttccactctagcatagt

SEQ ID NO: 5439258 - DNA, 25 bp, Homo sapien
caaattagaaatgatctctcggcct

SEQ ID NO: 5439259 - DNA, 25 bp, Homo sapien
gtaaatgacgctcttgatcctcaag

SEQ ID NO: 5439260 - DNA, 25 bp, Homo sapien
cctcaagtgtaggagacatcagcag

SEQ ID NO: 5439261 - DNA, 25 bp, Homo sapien
tatgcacatatggacgaactaagtc

SEQ ID NO: 5439262 - DNA, 25 bp, Homo sapien
tctgattaaacaaaggaccagctcc

SEQ ID NO: 5439263 - DNA, 25 bp, Homo sapien
taagtgttgattcatcaacatcaac

SEQ ID NO: 5439264 - DNA, 25 bp, Homo sapien
tggactaagtgttgattcatcaaca

SEQ ID NO: 5439265 - DNA, 25 bp, Homo sapien
gactaagtgttgattcatcaacatc

SEQ ID NO: 5439266 - DNA, 25 bp, Homo sapien
ctaagtgttgattcatcaacatcaa

SEQ ID NO: 5439267 - DNA, 25 bp, Homo sapien
gtttgcatgtggaaaccagtcatac

SEQ ID NO: 5439268 - DNA, 25 bp, Homo sapien
gatggctggtcattaacacttttca

SEQ ID NO: 5439269 - DNA, 25 bp, Homo sapien
tcgagctggagttcgaataggaaca

SEQ ID NO: 5439270 - DNA, 25 bp, Homo sapien
taccacccaaaggtgttggagtagc

SEQ ID NO: 5439271 - DNA, 25 bp, Homo sapien
gcacagaccactaagcattttggat

SEQ ID NO: 5439272 - DNA, 25 bp, Homo sapien
tggatactctaaagatgtgaggcct

SEQ ID NO: 5439273 - DNA, 25 bp, Homo sapien
gctagttaacgtctgcaccagcaca

SEQ ID NO: 5439274 - DNA, 25 bp, Homo sapien
tggacaggccaggattacagcactt

SEQ ID NO: 5439275 - DNA, 25 bp, Homo sapien
tatatcctaaataccacctcattca

SEQ ID NO: 5439276 - DNA, 25 bp, Homo sapien
atcctaaataccacctcattcaaat

SEQ ID NO: 5439277 - DNA, 25 bp, Homo sapien
tgtatatcctaaataccacctcatt

SEQ ID NO: 5439278 - DNA, 25 bp, Homo sapien
tatcctaaataccacctcattcaaa

SEQ ID NO: 5439279 - DNA, 25 bp, Homo sapien
gaaagtgggcgatttctctcatcaa

SEQ ID NO: 5439280 - DNA, 25 bp, Homo sapien
tatccttctgggaacatagcatcta

SEQ ID NO: 5439281 - DNA, 25 bp, Homo sapien
ccaagcctgaagctgttcaggagtc

SEQ ID NO: 5439282 - DNA, 25 bp, Homo sapien
tcaggagtcatactcattatgtgac

SEQ ID NO: 5439283 - DNA, 25 bp, Homo sapien
gactagctggtgtttcatcccaccg

SEQ ID NO: 5439284 - DNA, 25 bp, Homo sapien
gatctgttcgaggagtctcagccca

SEQ ID NO: 5439285 - DNA, 25 bp, Homo sapien
tactggctccaggagtcggtgtttc

SEQ ID NO: 5439286 - DNA, 25 bp, Homo sapien
gaactggagtgcttccacccatctg

SEQ ID NO: 5439287 - DNA, 25 bp, Homo sapien
ttctcaaacagttatactcaaaact

SEQ ID NO: 5439288 - DNA, 25 bp, Homo sapien
attctcaaacagttatactcaaaac

SEQ ID NO: 5439289 - DNA, 25 bp, Homo sapien
ctcaaacagttatactcaaaactat

SEQ ID NO: 5439290 - DNA, 25 bp, Homo sapien
tctcaaacagttatactcaaaacta

SEQ ID NO: 5439291 - DNA, 25 bp, Homo sapien
tcaacaccaggctgggcaatgaagc

SEQ ID NO: 5439292 - DNA, 25 bp, Homo sapien
ttccaacactttggcagatcacttg

SEQ ID NO: 5439293 - DNA, 25 bp, Homo sapien
tgggcaatgaagcaagacattgtct

SEQ ID NO: 5439294 - DNA, 25 bp, Homo sapien
aacaaagggtaagtcaggcacagtg

SEQ ID NO: 5439295 - DNA, 25 bp, Homo sapien
cccatcttaaggaaggagtatgccc

SEQ ID NO: 5439296 - DNA, 25 bp, Homo sapien
catctgtttttacgagcactggaag

SEQ ID NO: 5439297 - DNA, 25 bp, Homo sapien
tggtgtatcacctcgtccaggagta

SEQ ID NO: 5439298 - DNA, 25 bp, Homo sapien
aggagtctcgcttccctttgcacga

SEQ ID NO: 5439299 - DNA, 25 bp, Homo sapien
tatgtaattataaccagataccgtc

SEQ ID NO: 5439300 - DNA, 25 bp, Homo sapien
taatattaccctagctgatgctggc

SEQ ID NO: 5439301 - DNA, 25 bp, Homo sapien
cttgagatcagtttgtatgtacagt

SEQ ID NO: 5439302 - DNA, 25 bp, Homo sapien
tatgtacagttacatgtgtaccaaa

SEQ ID NO: 5439303 - DNA, 25 bp, Homo sapien
gaaaggagtagcattgactatttgc

SEQ ID NO: 5439304 - DNA, 25 bp, Homo sapien
taaggaagaccactatatcatactc

SEQ ID NO: 5439305 - DNA, 25 bp, Homo sapien
gggcttaagttatctatccagaaga

SEQ ID NO: 5439306 - DNA, 25 bp, Homo sapien
tgactatttgctgccagtagtgagg

SEQ ID NO: 5439307 - DNA, 25 bp, Homo sapien
agactaatacagtccataacagaaa

SEQ ID NO: 5439308 - DNA, 25 bp, Homo sapien
ctaatacagtccataacagaaaaaa

SEQ ID NO: 5439309 - DNA, 25 bp, Homo sapien
tggtatcttgctatggcaacccaag

SEQ ID NO: 5439310 - DNA, 25 bp, Homo sapien
gtatcttgctatggcaacccaagca

SEQ ID NO: 5439311 - DNA, 25 bp, Homo sapien
gacgctgctgctccattgacgactt

SEQ ID NO: 5439312 - DNA, 25 bp, Homo sapien
tcagctgtttgatcccaacgccgtt

SEQ ID NO: 5439313 - DNA, 25 bp, Homo sapien
tagttttttgggagtggcaccagga

SEQ ID NO: 5439314 - DNA, 25 bp, Homo sapien
caacgccgttttcgttttgatggag

SEQ ID NO: 5439315 - DNA, 25 bp, Homo sapien
tctttcacaaccattaaaacaggag

SEQ ID NO: 5439316 - DNA, 25 bp, Homo sapien
cacaaccattaaaacaggagacagg

SEQ ID NO: 5439317 - DNA, 25 bp, Homo sapien
tattctttcacaaccattaaaacag

SEQ ID NO: 5439318 - DNA, 25 bp, Homo sapien
tttcacaaccattaaaacaggagac

SEQ ID NO: 5439319 - DNA, 25 bp, Homo sapien
tacatccatgtaagtcctagcattc

SEQ ID NO: 5439320 - DNA, 25 bp, Homo sapien
tcttctttagtcaagtgttgttctc

SEQ ID NO: 5439321 - DNA, 25 bp, Homo sapien
gttgttctcgcattacatccatgta

SEQ ID NO: 5439322 - DNA, 25 bp, Homo sapien
tagtcaagtgttgttctcgcattac

SEQ ID NO: 5439323 - DNA, 25 bp, Homo sapien
tgtttgaacacaaacatctacagca

SEQ ID NO: 5439324 - DNA, 25 bp, Homo sapien
gatttatctgccctgctctaaatat

SEQ ID NO: 5439325 - DNA, 25 bp, Homo sapien
tgagtttgctgatcaatttaacctg

SEQ ID NO: 5439326 - DNA, 25 bp, Homo sapien
gctgatcaatttaacctgtttgaac

SEQ ID NO: 5439327 - DNA, 25 bp, Homo sapien
gacagcacagtttagagtcttcaga

SEQ ID NO: 5439328 - DNA, 25 bp, Homo sapien
atgacagcacagtttagagtcttca

SEQ ID NO: 5439329 - DNA, 25 bp, Homo sapien
tgacagcacagtttagagtcttcag

SEQ ID NO: 5439330 - DNA, 25 bp, Homo sapien
gcagttctgacttcaagcagcagaa

SEQ ID NO: 5439331 - DNA, 25 bp, Homo sapien
tcagcagttctgacttcaagcagca

SEQ ID NO: 5439332 - DNA, 25 bp, Homo sapien
actttcgtgcctttgtctccatcag

SEQ ID NO: 5439333 - DNA, 25 bp, Homo sapien
ccatcagcagttctgacttcaagca

SEQ ID NO: 5439334 - DNA, 25 bp, Homo sapien
agtctagtatgtaaacctgcagcag

SEQ ID NO: 5439335 - DNA, 25 bp, Homo sapien
gatgtgttgaactgcacccttaaga

SEQ ID NO: 5439336 - DNA, 25 bp, Homo sapien
tgatccaagtatagaaagcgtaccc

SEQ ID NO: 5439337 - DNA, 25 bp, Homo sapien
tataacaagattcacagaggcacac

SEQ ID NO: 5439338 - DNA, 25 bp, Homo sapien
aaaaggatcaagacgctctggggaa

SEQ ID NO: 5439339 - DNA, 25 bp, Homo sapien
catcttcccggtctgcaatctttgg

SEQ ID NO: 5439340 - DNA, 25 bp, Homo sapien
gggaaattatcatggtccgcctatg

SEQ ID NO: 5439341 - DNA, 25 bp, Homo sapien
ggtccgcctatgctttttgtattca

SEQ ID NO: 5439342 - DNA, 25 bp, Homo sapien
tctgaccaagcaaactcgtagatga

SEQ ID NO: 5439343 - DNA, 25 bp, Homo sapien
cttctgaccaagcaaactcgtagat

SEQ ID NO: 5439344 - DNA, 25 bp, Homo sapien
ctgttgactgtggtatatcattaag

SEQ ID NO: 5439345 - DNA, 25 bp, Homo sapien
tctgttgactgtggtatatcattaa

SEQ ID NO: 5439346 - DNA, 25 bp, Homo sapien
gatgtcacgtatccagcaaatctgc

SEQ ID NO: 5439347 - DNA, 25 bp, Homo sapien
cataataacctgtagaatcgaggcc

SEQ ID NO: 5439348 - DNA, 25 bp, Homo sapien
tgccttgaatttctcgaatctgtgc

SEQ ID NO: 5439349 - DNA, 25 bp, Homo sapien
ccaccataaatttcctggtcataat

SEQ ID NO: 5439350 - DNA, 25 bp, Homo sapien
taaacgaggccctctggtcagagaa

SEQ ID NO: 5439351 - DNA, 25 bp, Homo sapien
gaatcctactgaggaagccgcttaa

SEQ ID NO: 5439352 - DNA, 25 bp, Homo sapien
tactctgaagtagcaggtcccaaac

SEQ ID NO: 5439353 - DNA, 25 bp, Homo sapien
tcgattcagtctgccggaaaagcgg

SEQ ID NO: 5439354 - DNA, 25 bp, Homo sapien
cttcgtgagtcttggcgatcttcgc

SEQ ID NO: 5439355 - DNA, 25 bp, Homo sapien
cgtgagtcttggcgatcttcgccat

SEQ ID NO: 5439356 - DNA, 25 bp, Homo sapien
ttcgtgagtcttggcgatcttcgcc

SEQ ID NO: 5439357 - DNA, 25 bp, Homo sapien
tcgtgagtcttggcgatcttcgcca

SEQ ID NO: 5439358 - DNA, 25 bp, Homo sapien
ggaactggcgctcccaagaacttcc

SEQ ID NO: 5439359 - DNA, 25 bp, Homo sapien
ttgtccactcgaacacacagacgga

SEQ ID NO: 5439360 - DNA, 25 bp, Homo sapien
cgaacacacagacggaactggcgct

SEQ ID NO: 5439361 - DNA, 25 bp, Homo sapien
acagacggaactggcgctcccaaga

SEQ ID NO: 5439362 - DNA, 25 bp, Homo sapien
ccgccgccacggagaaaaatagctg

SEQ ID NO: 5439363 - DNA, 25 bp, Homo sapien
gggctgcactctgcgcgtgcgccaa

SEQ ID NO: 5439364 - DNA, 25 bp, Homo sapien
tgcgccaaacgggagcgcgctccgt

SEQ ID NO: 5439365 - DNA, 25 bp, Homo sapien
tccgtcgggtgacacgtgacagaac

SEQ ID NO: 5439366 - DNA, 25 bp, Homo sapien
tgataaacctgcaacccaaatacta

SEQ ID NO: 5439367 - DNA, 25 bp, Homo sapien
gctatgtgataaacctgcaacccaa

SEQ ID NO: 5439368 - DNA, 25 bp, Homo sapien
ctcgctatgtgataaacctgcaacc

SEQ ID NO: 5439369 - DNA, 25 bp, Homo sapien
gataaacctgcaacccaaatactaa

SEQ ID NO: 5439370 - DNA, 25 bp, Homo sapien
cgtttgaagggagggaaatggtatg

SEQ ID NO: 5439371 - DNA, 25 bp, Homo sapien
ggtcagtatggtcgtttgaagggag

SEQ ID NO: 5439372 - DNA, 25 bp, Homo sapien
cagtatggtcgtttgaagggaggga

SEQ ID NO: 5439373 - DNA, 25 bp, Homo sapien
catgggtcagtatggtcgtttgaag

SEQ ID NO: 5439374 - DNA, 25 bp, Homo sapien
cgcactcacgggttcggacagttac

SEQ ID NO: 5439375 - DNA, 25 bp, Homo sapien
caagtaaatcaaagcgaagtcgtct

SEQ ID NO: 5439376 - DNA, 25 bp, Homo sapien
caattaccccgtgagataggcaagg

SEQ ID NO: 5439377 - DNA, 25 bp, Homo sapien
taaaatgtgggacacgcaggaagaa

SEQ ID NO: 5439378 - DNA, 25 bp, Homo sapien
tccattggctggaagagaccggagc

SEQ ID NO: 5439379 - DNA, 25 bp, Homo sapien
ttacggtcagcgtgtgtcagcgacg

SEQ ID NO: 5439380 - DNA, 25 bp, Homo sapien
tctatcatggcagctcggactggtc

SEQ ID NO: 5439381 - DNA, 25 bp, Homo sapien
gaccggcttcggagagtctatcatg

SEQ ID NO: 5439382 - DNA, 25 bp, Homo sapien
cccaaggctgtgttcgtggctcgtt

SEQ ID NO: 5439383 - DNA, 25 bp, Homo sapien
cccgtgcggaatggcaggtaatcaa

SEQ ID NO: 5439384 - DNA, 25 bp, Homo sapien
catctgagggactcaagagcggcgc

SEQ ID NO: 5439385 - DNA, 25 bp, Homo sapien
tagtctcgggatgccgtccgaagtc

SEQ ID NO: 5439386 - DNA, 25 bp, Homo sapien
taaccttgaagcatagtcagctttc

SEQ ID NO: 5439387 - DNA, 25 bp, Homo sapien
gaagcatagtcagctttcgattttc

SEQ ID NO: 5439388 - DNA, 25 bp, Homo sapien
aggtcctgtaaccttgaagcatagt

SEQ ID NO: 5439389 - DNA, 25 bp, Homo sapien
cctgtaaccttgaagcatagtcagc

SEQ ID NO: 5439390 - DNA, 25 bp, Homo sapien
tgatataatttcttggtaagtggcc

SEQ ID NO: 5439391 - DNA, 25 bp, Homo sapien
ttaggcattgaagggggtgcagctc

SEQ ID NO: 5439392 - DNA, 25 bp, Homo sapien
ggcattgaagggggtgcagctctca

SEQ ID NO: 5439393 - DNA, 25 bp, Homo sapien
cagctctcagatgtgctctttctgg

SEQ ID NO: 5439394 - DNA, 25 bp, Homo sapien
ttagtcagctctttgttaggcattg

SEQ ID NO: 5439395 - DNA, 25 bp, Homo sapien
tgatattccttcaaattctgaccat

SEQ ID NO: 5439396 - DNA, 25 bp, Homo sapien
gatattccttcaaattctgaccatc

SEQ ID NO: 5439397 - DNA, 25 bp, Homo sapien
ttgatattccttcaaattctgacca

SEQ ID NO: 5439398 - DNA, 25 bp, Homo sapien
cttgatattccttcaaattctgacc

SEQ ID NO: 5439399 - DNA, 25 bp, Homo sapien
taatgaggctagctcccagataaac

SEQ ID NO: 5439400 - DNA, 25 bp, Homo sapien
tcagtaatgctaattgtgtgtcaaa

SEQ ID NO: 5439401 - DNA, 25 bp, Homo sapien
cactttctccgaggtagtttggctg

SEQ ID NO: 5439402 - DNA, 25 bp, Homo sapien
ttttggtgagtggtccagagcttta

SEQ ID NO: 5439403 - DNA, 25 bp, Homo sapien
taagttggttgaatgtctccagcac

SEQ ID NO: 5439404 - DNA, 25 bp, Homo sapien
caacagtaggcaacagatgaagata

SEQ ID NO: 5439405 - DNA, 25 bp, Homo sapien
catagacatagtaaagtgttacagc

SEQ ID NO: 5439406 - DNA, 25 bp, Homo sapien
taaggactgaagttgaagtagcaat

SEQ ID NO: 5439407 - DNA, 25 bp, Homo sapien
gctgcagccagaggaattgggaaat

SEQ ID NO: 5439408 - DNA, 25 bp, Homo sapien
cctctacttctgtccaaggtaagga

SEQ ID NO: 5439409 - DNA, 25 bp, Homo sapien
tctaggtacaggatttcaagtgact

SEQ ID NO: 5439410 - DNA, 25 bp, Homo sapien
agagagattacatccttgcaccggg

SEQ ID NO: 5439411 - DNA, 25 bp, Homo sapien
ccagattttacagctccaagagaga

SEQ ID NO: 5439412 - DNA, 25 bp, Homo sapien
ttctaatcatggaaatgctaacaca

SEQ ID NO: 5439413 - DNA, 25 bp, Homo sapien
gataggataatgttttacacacatg

SEQ ID NO: 5439414 - DNA, 25 bp, Homo sapien
ccttcaactggctttcaattttcag

SEQ ID NO: 5439415 - DNA, 25 bp, Homo sapien
cagtatcttctaatcatggaaatgc

SEQ ID NO: 5439416 - DNA, 25 bp, Homo sapien
cacaaaggttgtcacataattggat

SEQ ID NO: 5439417 - DNA, 25 bp, Homo sapien
tacacaaaggttgtcacataattgg

SEQ ID NO: 5439418 - DNA, 25 bp, Homo sapien
tttattacacaaaggttgtcacata

SEQ ID NO: 5439419 - DNA, 25 bp, Homo sapien
tttttattacacaaaggttgtcaca

SEQ ID NO: 5439420 - DNA, 25 bp, Homo sapien
ctgcttaacttctcatctggtggtg

SEQ ID NO: 5439421 - DNA, 25 bp, Homo sapien
tgcttaacttctcatctggtggtgg

SEQ ID NO: 5439422 - DNA, 25 bp, Homo sapien
gcctcagtgatttaagttgaaagca

SEQ ID NO: 5439423 - DNA, 25 bp, Homo sapien
gaaagcagtacactggtacatggct

SEQ ID NO: 5439424 - DNA, 25 bp, Homo sapien
aagttgaaagcagtacactggtaca

SEQ ID NO: 5439425 - DNA, 25 bp, Homo sapien
atttaagttgaaagcagtacactgg

SEQ ID NO: 5439426 - DNA, 25 bp, Homo sapien
atggacaatgacagcagtaaaccat

SEQ ID NO: 5439427 - DNA, 25 bp, Homo sapien
catccaataaagcagttctcacaac

SEQ ID NO: 5439428 - DNA, 25 bp, Homo sapien
taacagagaggccacaccagcagca

SEQ ID NO: 5439429 - DNA, 25 bp, Homo sapien
tacaacttctgctgtagttaacaga

SEQ ID NO: 5439430 - DNA, 25 bp, Homo sapien
aacttctgctgtagttaacagagag

SEQ ID NO: 5439431 - DNA, 25 bp, Homo sapien
aatatgagcaagacttattgaaaat

SEQ ID NO: 5439432 - DNA, 25 bp, Homo sapien
tattgaaaatttctgtctgggcatg

SEQ ID NO: 5439433 - DNA, 25 bp, Homo sapien
tttcccttagtaaaatatgagcaag

SEQ ID NO: 5439434 - DNA, 25 bp, Homo sapien
ttattgaaaatttctgtctgggcat

SEQ ID NO: 5439435 - DNA, 25 bp, Homo sapien
ggaactttgcataattttctcaact

SEQ ID NO: 5439436 - DNA, 25 bp, Homo sapien
ttgttgggtcaatgattcctttttc

SEQ ID NO: 5439437 - DNA, 25 bp, Homo sapien
tattcacaaaatctccagccatagc

SEQ ID NO: 5439438 - DNA, 25 bp, Homo sapien
caactatcaaagatccttcaacacc

SEQ ID NO: 5439439 - DNA, 25 bp, Homo sapien
ggaatgcatcgaaggagggcacaac

SEQ ID NO: 5439440 - DNA, 25 bp, Homo sapien
ctggaatgcatcgaaggagggcaca

SEQ ID NO: 5439441 - DNA, 25 bp, Homo sapien
aatgcatcgaaggagggcacaaccc

SEQ ID NO: 5439442 - DNA, 25 bp, Homo sapien
atgcatcgaaggagggcacaacccc

SEQ ID NO: 5439443 - DNA, 25 bp, Homo sapien
ttcagggtcaatccctcttctccaa

SEQ ID NO: 5439444 - DNA, 25 bp, Homo sapien
atctgaaagttttgcaagccgttca

SEQ ID NO: 5439445 - DNA, 25 bp, Homo sapien
gttttgcaagccgttcattcagttt

SEQ ID NO: 5439446 - DNA, 25 bp, Homo sapien
gaacgtcttcaagattcagggtcaa

SEQ ID NO: 5439447 - DNA, 25 bp, Homo sapien
accaccagtagcaatagccatatct

SEQ ID NO: 5439448 - DNA, 25 bp, Homo sapien
tctattgtcaccaaaccctggagcc

SEQ ID NO: 5439449 - DNA, 25 bp, Homo sapien
tgccacaacctgaagaccaaccttt

SEQ ID NO: 5439450 - DNA, 25 bp, Homo sapien
aaccctggagccttgactgccacaa

SEQ ID NO: 5439451 - DNA, 25 bp, Homo sapien
tacttgtccatatccgtttaccttc

SEQ ID NO: 5439452 - DNA, 25 bp, Homo sapien
tcccctcaagctgttactagattac

SEQ ID NO: 5439453 - DNA, 25 bp, Homo sapien
aattaagacaggaagtatctgagac

SEQ ID NO: 5439454 - DNA, 25 bp, Homo sapien
aggactccctaagtaatctggtttg

SEQ ID NO: 5439455 - DNA, 25 bp, Homo sapien
taatgcccttagattgtctgcagca

SEQ ID NO: 5439456 - DNA, 25 bp, Homo sapien
tagacctcaccttattttagattgg

SEQ ID NO: 5439457 - DNA, 25 bp, Homo sapien
aaacattccagggtaaggcagctca

SEQ ID NO: 5439458 - DNA, 25 bp, Homo sapien
gatgagcacgtgtaatgtctaaaac

SEQ ID NO: 5439459 - DNA, 25 bp, Homo sapien
ccataaggatacattagagcacacc

SEQ ID NO: 5439460 - DNA, 25 bp, Homo sapien
gaaaggtacccatgtgctaaattag

SEQ ID NO: 5439461 - DNA, 25 bp, Homo sapien
tctagatacaaacccaactggatca

SEQ ID NO: 5439462 - DNA, 25 bp, Homo sapien
tcaaatgtggaggtacacatgatgg

SEQ ID NO: 5439463 - DNA, 25 bp, Homo sapien
tattcaagacgagtgtacttagagc

SEQ ID NO: 5439464 - DNA, 25 bp, Homo sapien
catcttcagcgattatgaccaaagg

SEQ ID NO: 5439465 - DNA, 25 bp, Homo sapien
tcaagacgagtgtacttagagcttc

SEQ ID NO: 5439466 - DNA, 25 bp, Homo sapien
catcaacatcttcagcgattatgac

SEQ ID NO: 5439467 - DNA, 25 bp, Homo sapien
ttttcactcaacagaacataggcat

SEQ ID NO: 5439468 - DNA, 25 bp, Homo sapien
ggcatcctggaattcacatttctga

SEQ ID NO: 5439469 - DNA, 25 bp, Homo sapien
ttcactcaacagaacataggcatcc

SEQ ID NO: 5439470 - DNA, 25 bp, Homo sapien
cactcaacagaacataggcatcctg

SEQ ID NO: 5439471 - DNA, 25 bp, Homo sapien
aatatacaaaaaatgactgcaatac

SEQ ID NO: 5439472 - DNA, 25 bp, Homo sapien
tgtaaaaataatgaagatttcaaaa

SEQ ID NO: 5439473 - DNA, 25 bp, Homo sapien
caaaaaatgactgcaatacatttaa

SEQ ID NO: 5439474 - DNA, 25 bp, Homo sapien
ataatgaagatttcaaaaatataca

SEQ ID NO: 5439475 - DNA, 25 bp, Homo sapien
gcctcgatcaaacttcatgccttca

SEQ ID NO: 5439476 - DNA, 25 bp, Homo sapien
aatatagcctcgatcaaacttcatg

SEQ ID NO: 5439477 - DNA, 25 bp, Homo sapien
tatggagaaatatagcctcgatcaa

SEQ ID NO: 5439478 - DNA, 25 bp, Homo sapien
tggagaaatatagcctcgatcaaac

SEQ ID NO: 5439479 - DNA, 25 bp, Homo sapien
gacccctctggccataagagatgca

SEQ ID NO: 5439480 - DNA, 25 bp, Homo sapien
tgcagggtagagtatgaaacagccc

SEQ ID NO: 5439481 - DNA, 25 bp, Homo sapien
tattctatacatgtgctgagactac

SEQ ID NO: 5439482 - DNA, 25 bp, Homo sapien
cagcaaaggctaattcacataaaac

SEQ ID NO: 5439483 - DNA, 25 bp, Homo sapien
ttccaacttttttcattgcatcaga

SEQ ID NO: 5439484 - DNA, 25 bp, Homo sapien
acttttttcattgcatcagagatga

SEQ ID NO: 5439485 - DNA, 25 bp, Homo sapien
ccaacttttttcattgcatcagaga

SEQ ID NO: 5439486 - DNA, 25 bp, Homo sapien
cattgcatcagagatgatattgcca

SEQ ID NO: 5439487 - DNA, 25 bp, Homo sapien
tacagccatgtagaactaaaatgac

SEQ ID NO: 5439488 - DNA, 25 bp, Homo sapien
taaaaggtaagcctagtgtcctcag

SEQ ID NO: 5439489 - DNA, 25 bp, Homo sapien
gcacctttgacaatggctaagaaca

SEQ ID NO: 5439490 - DNA, 25 bp, Homo sapien
tgacaaccacatgtagaactaaatg

SEQ ID NO: 5439491 - DNA, 25 bp, Homo sapien
tttaagttcagcaattacagcatca

SEQ ID NO: 5439492 - DNA, 25 bp, Homo sapien
tgtgcaatttcttcaggggtggtca

SEQ ID NO: 5439493 - DNA, 25 bp, Homo sapien
ggtcacaggtttagactgcttttta

SEQ ID NO: 5439494 - DNA, 25 bp, Homo sapien
ttacagcatcaacagctaacatcac

SEQ ID NO: 5439495 - DNA, 25 bp, Homo sapien
ctagttcaacgatatatgtcattac

SEQ ID NO: 5439496 - DNA, 25 bp, Homo sapien
aaatcttgagatttgtgacaaatat

SEQ ID NO: 5439497 - DNA, 25 bp, Homo sapien
agtagaaatcttgagatttgtgaca

SEQ ID NO: 5439498 - DNA, 25 bp, Homo sapien
gaaatcttgagatttgtgacaaata

SEQ ID NO: 5439499 - DNA, 25 bp, Homo sapien
tagaaatcttgagatttgtgacaaa

SEQ ID NO: 5439500 - DNA, 25 bp, Homo sapien
cctgggctcaagggagtagctgaga

SEQ ID NO: 5439501 - DNA, 25 bp, Homo sapien
caccatgctcagcttcttttatttt

SEQ ID NO: 5439502 - DNA, 25 bp, Homo sapien
tgggctcaagggagtagctgagacc

SEQ ID NO: 5439503 - DNA, 25 bp, Homo sapien
catgctcagcttcttttatttttgt

SEQ ID NO: 5439504 - DNA, 25 bp, Homo sapien
gcctctgcaggtgtcaattatctga

SEQ ID NO: 5439505 - DNA, 25 bp, Homo sapien
taatagtcccattttgctcaattgg

SEQ ID NO: 5439506 - DNA, 25 bp, Homo sapien
taacacagagttgcgtggcatgtac

SEQ ID NO: 5439507 - DNA, 25 bp, Homo sapien
taggaatctgttgtgactatgcctc

SEQ ID NO: 5439508 - DNA, 25 bp, Homo sapien
caagcttgctaaaggaaaacccagt

SEQ ID NO: 5439509 - DNA, 25 bp, Homo sapien
catacagccaagcttgctaaaggaa

SEQ ID NO: 5439510 - DNA, 25 bp, Homo sapien
taacagtacctacccaccatacagc

SEQ ID NO: 5439511 - DNA, 25 bp, Homo sapien
ccaccatacagccaagcttgctaaa

SEQ ID NO: 5439512 - DNA, 25 bp, Homo sapien
acctttgctaatcttctcgaagcct

SEQ ID NO: 5439513 - DNA, 25 bp, Homo sapien
gctatagagcgtgccagtacagtag

SEQ ID NO: 5439514 - DNA, 25 bp, Homo sapien
caagtttagctccaatgtttttgta

SEQ ID NO: 5439515 - DNA, 25 bp, Homo sapien
agcagtggtagtgccatccccagct

SEQ ID NO: 5439516 - DNA, 25 bp, Homo sapien
actctgctcaataatcactgttctt

SEQ ID NO: 5439517 - DNA, 25 bp, Homo sapien
cccaactctgctcaataatcactgt

SEQ ID NO: 5439518 - DNA, 25 bp, Homo sapien
ccccaactctgctcaataatcactg

SEQ ID NO: 5439519 - DNA, 25 bp, Homo sapien
caactctgctcaataatcactgttc

SEQ ID NO: 5439520 - DNA, 25 bp, Homo sapien
cagtgcgactatttgtgagtaaaat

SEQ ID NO: 5439521 - DNA, 25 bp, Homo sapien
tactgttgaatagttcagtgcgact

SEQ ID NO: 5439522 - DNA, 25 bp, Homo sapien
aactgagttctctcaaaaatggaga

SEQ ID NO: 5439523 - DNA, 25 bp, Homo sapien
aaatggagatgaaagtactgttgaa

SEQ ID NO: 5439524 - DNA, 25 bp, Homo sapien
gaaagactgtgggtaaccgaagcat

SEQ ID NO: 5439525 - DNA, 25 bp, Homo sapien
ggccccattgtaacggccacagcat

SEQ ID NO: 5439526 - DNA, 25 bp, Homo sapien
ccggtctcatctggcgaaagactgt

SEQ ID NO: 5439527 - DNA, 25 bp, Homo sapien
cctggacaccggtctcatctggcga

SEQ ID NO: 5439528 - DNA, 25 bp, Homo sapien
agcaagcaacgtgagatgctgagcc

SEQ ID NO: 5439529 - DNA, 25 bp, Homo sapien
tgcagaacaaacatgcccacctgtg

SEQ ID NO: 5439530 - DNA, 25 bp, Homo sapien
gcaacagagcaagcaacgtgagatg

SEQ ID NO: 5439531 - DNA, 25 bp, Homo sapien
tcatcagaactaccacccgtggtgc

SEQ ID NO: 5439532 - DNA, 25 bp, Homo sapien
ggaaggcgccgcagcttcggaacat

SEQ ID NO: 5439533 - DNA, 25 bp, Homo sapien
tgaatgacggaaggcgccgcagctt

SEQ ID NO: 5439534 - DNA, 25 bp, Homo sapien
gccactacgcctgaatgacggaagg

SEQ ID NO: 5439535 - DNA, 25 bp, Homo sapien
tccgccagccactacgcctgaatga

SEQ ID NO: 5439536 - DNA, 25 bp, Homo sapien
cagccactagcgcaagctaaagagg

SEQ ID NO: 5439537 - DNA, 25 bp, Homo sapien
cccggccggcgcctgacctatagca

SEQ ID NO: 5439538 - DNA, 25 bp, Homo sapien
gacctatagcaccagcacaaagcac

SEQ ID NO: 5439539 - DNA, 25 bp, Homo sapien
actagcgcaagctaaagaggccgcc

SEQ ID NO: 5439540 - DNA, 25 bp, Homo sapien
ggcgcacaccgcaatgagcccgtgt

SEQ ID NO: 5439541 - DNA, 25 bp, Homo sapien
cgtgcgctcggcgagacaggtcgtc

SEQ ID NO: 5439542 - DNA, 25 bp, Homo sapien
gtgcagggcgcacaccgcaatgagc

SEQ ID NO: 5439543 - DNA, 25 bp, Homo sapien
cggcggcaaggcgtgcgctcggcga

SEQ ID NO: 5439544 - DNA, 25 bp, Homo sapien
tcaaatcgcgtcatttccgggaggg

SEQ ID NO: 5439545 - DNA, 25 bp, Homo sapien
cgctccctacggctcaagggtcaaa

SEQ ID NO: 5439546 - DNA, 25 bp, Homo sapien
tctccggccggcttagtctagttcc

SEQ ID NO: 5439547 - DNA, 25 bp, Homo sapien
aactttccagaaaatgccgcgctcc

SEQ ID NO: 5439548 - DNA, 25 bp, Homo sapien
cccttggggcgaatcgcggtgcgcg

SEQ ID NO: 5439549 - DNA, 25 bp, Homo sapien
gtcttcgcgtcagcgtcctgcgcag

SEQ ID NO: 5439550 - DNA, 25 bp, Homo sapien
tttcttccgcctccgagtcttcgcg

SEQ ID NO: 5439551 - DNA, 25 bp, Homo sapien
gctgggcgcctagaaaagcctagaa

SEQ ID NO: 5439552 - DNA, 25 bp, Homo sapien
ctagtgtgatcagtgtttgccttac

SEQ ID NO: 5439553 - DNA, 25 bp, Homo sapien
taagacaaaagaggctgtgcgtggt

SEQ ID NO: 5439554 - DNA, 25 bp, Homo sapien
aatcccctcaatagcaatttggtag

SEQ ID NO: 5439555 - DNA, 25 bp, Homo sapien
ttgagaggaaacttggactgttcgt

SEQ ID NO: 5439556 - DNA, 25 bp, Homo sapien
tgacaaagcagtgagcgcaccaggg

SEQ ID NO: 5439557 - DNA, 25 bp, Homo sapien
agggtcaccccgctcagctgtggta

SEQ ID NO: 5439558 - DNA, 25 bp, Homo sapien
aattaacttcccagatacattgcgt

SEQ ID NO: 5439559 - DNA, 25 bp, Homo sapien
ttgcattggaaagaacagtgctgag

SEQ ID NO: 5439560 - DNA, 25 bp, Homo sapien
aactaggtgccgagcagtgctgcgc

SEQ ID NO: 5439561 - DNA, 25 bp, Homo sapien
tagacgctggcactatggtcatggc

SEQ ID NO: 5439562 - DNA, 25 bp, Homo sapien
gcacttttcttgtcgggcaactagg

SEQ ID NO: 5439563 - DNA, 25 bp, Homo sapien
caccaaggcgcaggtaccatgtctg

SEQ ID NO: 5439564 - DNA, 25 bp, Homo sapien
gctccgacccaggggtaggcgtgag

SEQ ID NO: 5439565 - DNA, 25 bp, Homo sapien
ctccgacccaggggtaggcgtgagg

SEQ ID NO: 5439566 - DNA, 25 bp, Homo sapien
aagccctgggctgcgagcctgtcag

SEQ ID NO: 5439567 - DNA, 25 bp, Homo sapien
gccccagctgactagcattggaggg

SEQ ID NO: 5439568 - DNA, 25 bp, Homo sapien
tgcgagcctgtcagcagcaacggct

SEQ ID NO: 5439569 - DNA, 25 bp, Homo sapien
gcagcaacggcttcttctcgccttg

SEQ ID NO: 5439570 - DNA, 25 bp, Homo sapien
tgggagggggtgtaaacacagccta

SEQ ID NO: 5439571 - DNA, 25 bp, Homo sapien
tgaggtgggagggggtgtaaacaca

SEQ ID NO: 5439572 - DNA, 25 bp, Homo sapien
gtctagccggatccgggtgccgata

SEQ ID NO: 5439573 - DNA, 25 bp, Homo sapien
ccggatccgggtgccgatattctcc

SEQ ID NO: 5439574 - DNA, 25 bp, Homo sapien
cttgtctagccggatccgggtgccg

SEQ ID NO: 5439575 - DNA, 25 bp, Homo sapien
ccagcttgtctagccggatccgggt

SEQ ID NO: 5439576 - DNA, 25 bp, Homo sapien
ggtaaattggtgcttgattaggcat

SEQ ID NO: 5439577 - DNA, 25 bp, Homo sapien
taaaattggcatccagacttgaact

SEQ ID NO: 5439578 - DNA, 25 bp, Homo sapien
cattccttgctaatatgcgtgaagc

SEQ ID NO: 5439579 - DNA, 25 bp, Homo sapien
tggaaaagatgggatgcctcacatt

SEQ ID NO: 5439580 - DNA, 25 bp, Homo sapien
taaattgtggcaatatatatgagac

SEQ ID NO: 5439581 - DNA, 25 bp, Homo sapien
gggatacagacctgagctaccacac

SEQ ID NO: 5439582 - DNA, 25 bp, Homo sapien
tcttgtttgatgttcactcagcttt

SEQ ID NO: 5439583 - DNA, 25 bp, Homo sapien
cacacctggacttatctttgggttt

SEQ ID NO: 5439584 - DNA, 25 bp, Homo sapien
caccttccctgtactgtatgtttgg

SEQ ID NO: 5439585 - DNA, 25 bp, Homo sapien
tatatagcagtgtagctgttctctc

SEQ ID NO: 5439586 - DNA, 25 bp, Homo sapien
gttctctctagatggtgtctcacaa

SEQ ID NO: 5439587 - DNA, 25 bp, Homo sapien
cttttcagacaagaatgtacagcaa

SEQ ID NO: 5439588 - DNA, 25 bp, Homo sapien
gaggaatcaataacaggcaagggcg

SEQ ID NO: 5439589 - DNA, 25 bp, Homo sapien
gacactgatagagctgatttccctg

SEQ ID NO: 5439590 - DNA, 25 bp, Homo sapien
taactccttaggcatagagagccca

SEQ ID NO: 5439591 - DNA, 25 bp, Homo sapien
ggaatggcagatcttcacccaacat

SEQ ID NO: 5439592 - DNA, 25 bp, Homo sapien
tctgggaggttgtgccaaagtttac

SEQ ID NO: 5439593 - DNA, 25 bp, Homo sapien
aataagactgtaacttcctgagaac

SEQ ID NO: 5439594 - DNA, 25 bp, Homo sapien
tcagtacagggttggtgacatgacc

SEQ ID NO: 5439595 - DNA, 25 bp, Homo sapien
tacatatcgcgtgtgctatgagcat

SEQ ID NO: 5439596 - DNA, 25 bp, Homo sapien
taattcccggaggacgttgtcactg

SEQ ID NO: 5439597 - DNA, 25 bp, Homo sapien
taatccgatgcttctactagtggct

SEQ ID NO: 5439598 - DNA, 25 bp, Homo sapien
tcttcctgatcaaactgtccgtcgt

SEQ ID NO: 5439599 - DNA, 25 bp, Homo sapien
ctttgtccagcattcccgggaggga

SEQ ID NO: 5439600 - DNA, 25 bp, Homo sapien
agctcagagctacctccacattccc

SEQ ID NO: 5439601 - DNA, 25 bp, Homo sapien
cacaagacattggtgaccaggagag

SEQ ID NO: 5439602 - DNA, 25 bp, Homo sapien
catcttcaacgaccagctcagagct

SEQ ID NO: 5439603 - DNA, 25 bp, Homo sapien
cctccaggaatgtccttttccccag

SEQ ID NO: 5439604 - DNA, 25 bp, Homo sapien
agcagctgaattccacataactggc

SEQ ID NO: 5439605 - DNA, 25 bp, Homo sapien
gcctctgaaggaatacgatctgctt

SEQ ID NO: 5439606 - DNA, 25 bp, Homo sapien
gaaggaatacgatctgctttgtagc

SEQ ID NO: 5439607 - DNA, 25 bp, Homo sapien
ctgctttgtagccaaattcccttca

SEQ ID NO: 5439608 - DNA, 25 bp, Homo sapien
taatgttccaggtgtgtgatccagg

SEQ ID NO: 5439609 - DNA, 25 bp, Homo sapien
gatccaggtggagaattacatgaaa

SEQ ID NO: 5439610 - DNA, 25 bp, Homo sapien
gaattacatgaaagaaccaggtctg

SEQ ID NO: 5439611 - DNA, 25 bp, Homo sapien
ctggaacgatccgaagatgggaagc

SEQ ID NO: 5439612 - DNA, 25 bp, Homo sapien
tgaatgcactaagatctgatgtttg

SEQ ID NO: 5439613 - DNA, 25 bp, Homo sapien
attctgaatgcactaagatctgatg

SEQ ID NO: 5439614 - DNA, 25 bp, Homo sapien
gaatgcactaagatctgatgtttga

SEQ ID NO: 5439615 - DNA, 25 bp, Homo sapien
tctgaatgcactaagatctgatgtt

SEQ ID NO: 5439616 - DNA, 25 bp, Homo sapien
acattgaggtgcctgttgattccag

SEQ ID NO: 5439617 - DNA, 25 bp, Homo sapien
ctgttgattccagggtccactccag

SEQ ID NO: 5439618 - DNA, 25 bp, Homo sapien
gctttacaaactttaccgtgcattc

SEQ ID NO: 5439619 - DNA, 25 bp, Homo sapien
cgtgcattccaaacattgaggtgcc

SEQ ID NO: 5439620 - DNA, 25 bp, Homo sapien
gatatgtcggaaacttctatgtccc

SEQ ID NO: 5439621 - DNA, 25 bp, Homo sapien
tttcgaggctctaatcacggtagac

SEQ ID NO: 5439622 - DNA, 25 bp, Homo sapien
tactttcagaccagctgtgagacca

SEQ ID NO: 5439623 - DNA, 25 bp, Homo sapien
gggacgtcctcatagtcagatcctt

SEQ ID NO: 5439624 - DNA, 25 bp, Homo sapien
tgtcatgtctcaatacaggtgtggg

SEQ ID NO: 5439625 - DNA, 25 bp, Homo sapien
caggtgtgggcaacacgcttgtcag

SEQ ID NO: 5439626 - DNA, 25 bp, Homo sapien
cttgtcagaagccatccgaattcag

SEQ ID NO: 5439627 - DNA, 25 bp, Homo sapien
cagcagagggccataatctgttttg

SEQ ID NO: 5439628 - DNA, 25 bp, Homo sapien
ataacagtccattgttctactacga

SEQ ID NO: 5439629 - DNA, 25 bp, Homo sapien
ttctactacgatggcatcatttcct

SEQ ID NO: 5439630 - DNA, 25 bp, Homo sapien
cagtccattgttctactacgatggc

SEQ ID NO: 5439631 - DNA, 25 bp, Homo sapien
cattgttctactacgatggcatcat

SEQ ID NO: 5439632 - DNA, 25 bp, Homo sapien
gctcataaaaccatctaaatcctta

SEQ ID NO: 5439633 - DNA, 25 bp, Homo sapien
ggctcataaaaccatctaaatcctt

SEQ ID NO: 5439634 - DNA, 25 bp, Homo sapien
accatctaaatccttaaataactca

SEQ ID NO: 5439635 - DNA, 25 bp, Homo sapien
cataaaaccatctaaatccttaaat

SEQ ID NO: 5439636 - DNA, 25 bp, Homo sapien
tactagtgccacacaaacattttta

SEQ ID NO: 5439637 - DNA, 25 bp, Homo sapien
tgtgctacctctcctctactagtgc

SEQ ID NO: 5439638 - DNA, 25 bp, Homo sapien
tccatcctcactcttcattgtgcta

SEQ ID NO: 5439639 - DNA, 25 bp, Homo sapien
ttcattgtgctacctctcctctact

SEQ ID NO: 5439640 - DNA, 25 bp, Homo sapien
tgccagaccccatagactgacgtgg

SEQ ID NO: 5439641 - DNA, 25 bp, Homo sapien
tgtactcccaggaaagtcccaaatg

SEQ ID NO: 5439642 - DNA, 25 bp, Homo sapien
aaacaaagcgaccaattcagccctg

SEQ ID NO: 5439643 - DNA, 25 bp, Homo sapien
catggtgggctaacttctgacaata

SEQ ID NO: 5439644 - DNA, 25 bp, Homo sapien
gagagagggagtctccctggggctc

SEQ ID NO: 5439645 - DNA, 25 bp, Homo sapien
agagagggagtctccctggggctct

SEQ ID NO: 5439646 - DNA, 25 bp, Homo sapien
attttcatcaggcaagacccaaggc

SEQ ID NO: 5439647 - DNA, 25 bp, Homo sapien
tttctgttcagcagttagtcacaca

SEQ ID NO: 5439648 - DNA, 25 bp, Homo sapien
tagtcacacaccaaaatttgaaatg

SEQ ID NO: 5439649 - DNA, 25 bp, Homo sapien
gttcagcagttagtcacacaccaaa

SEQ ID NO: 5439650 - DNA, 25 bp, Homo sapien
ccaatcagcatcaagtgtactaatg

SEQ ID NO: 5439651 - DNA, 25 bp, Homo sapien
tactttcattgacaggatgccttcc

SEQ ID NO: 5439652 - DNA, 25 bp, Homo sapien
tgccttcctgataggcccaggaggt

SEQ ID NO: 5439653 - DNA, 25 bp, Homo sapien
gaatcaattaaagacaagccttgtt

SEQ ID NO: 5439654 - DNA, 25 bp, Homo sapien
gaaccgtgtctcacatgtagcatcg

SEQ ID NO: 5439655 - DNA, 25 bp, Homo sapien
gatgactgcccacttaacgtccctt

SEQ ID NO: 5439656 - DNA, 25 bp, Homo sapien
catcatggttggttccattgcagaa

SEQ ID NO: 5439657 - DNA, 25 bp, Homo sapien
cctcaattccgctttcagatgactg

SEQ ID NO: 5439658 - DNA, 25 bp, Homo sapien
gcacggtgcgcgcacccactgacct

SEQ ID NO: 5439659 - DNA, 25 bp, Homo sapien
tcggctcgcgcacggtgcgcgcacc

SEQ ID NO: 5439660 - DNA, 25 bp, Homo sapien
cggctcgcgcacggtgcgcgcaccc

SEQ ID NO: 5439661 - DNA, 25 bp, Homo sapien
ggctcgcgcacggtgcgcgcaccca

SEQ ID NO: 5439662 - DNA, 25 bp, Homo sapien
gagccttgggcgtctttgtccactg

SEQ ID NO: 5439663 - DNA, 25 bp, Homo sapien
tcagttcttttgctgcgtcatttgt

SEQ ID NO: 5439664 - DNA, 25 bp, Homo sapien
ccactgggtgctgccgaattctttg

SEQ ID NO: 5439665 - DNA, 25 bp, Homo sapien
acattcctcaatcacgagccttggg

SEQ ID NO: 5439666 - DNA, 25 bp, Homo sapien
caggtaggtgttttcgctgccccac

SEQ ID NO: 5439667 - DNA, 25 bp, Homo sapien
gtataacaggatgaatagccccgac

SEQ ID NO: 5439668 - DNA, 25 bp, Homo sapien
gctgccccacaggttgtataacagg

SEQ ID NO: 5439669 - DNA, 25 bp, Homo sapien
taatttcaagcgcaatagcaccact

SEQ ID NO: 5439670 - DNA, 25 bp, Homo sapien
atattcttaagattgaattatacat

SEQ ID NO: 5439671 - DNA, 25 bp, Homo sapien
catattcttaagattgaattataca

SEQ ID NO: 5439672 - DNA, 25 bp, Homo sapien
cttggtgtttctgaacctgccactc

SEQ ID NO: 5439673 - DNA, 25 bp, Homo sapien
tggtgtttctgaacctgccactctg

SEQ ID NO: 5439674 - DNA, 25 bp, Homo sapien
ccactctgtttcatgccaccaggcc

SEQ ID NO: 5439675 - DNA, 25 bp, Homo sapien
cactctgtttcatgccaccaggcct

SEQ ID NO: 5439676 - DNA, 25 bp, Homo sapien
ttttcttgtagttgtgggtttgtca

SEQ ID NO: 5439677 - DNA, 25 bp, Homo sapien
gccttgggcagtattttaacagtat

SEQ ID NO: 5439678 - DNA, 25 bp, Homo sapien
aatggaatctgtagattgccttggg

SEQ ID NO: 5439679 - DNA, 25 bp, Homo sapien
tcttttgtttggtgtcctcttccat

SEQ ID NO: 5439680 - DNA, 25 bp, Homo sapien
ttccagacagaccacagagttttct

SEQ ID NO: 5439681 - DNA, 25 bp, Homo sapien
tccagacagaccacagagttttctc

SEQ ID NO: 5439682 - DNA, 25 bp, Homo sapien
ccagacagaccacagagttttctct

SEQ ID NO: 5439683 - DNA, 25 bp, Homo sapien
ccaaacatcgtgctggacacagggt

SEQ ID NO: 5439684 - DNA, 25 bp, Homo sapien
caaaatatccgagggcagaaactgt

SEQ ID NO: 5439685 - DNA, 25 bp, Homo sapien
cagaaattcagataaggaagctacc

SEQ ID NO: 5439686 - DNA, 25 bp, Homo sapien
tccagtttgaccgagttgaatacaa

SEQ ID NO: 5439687 - DNA, 25 bp, Homo sapien
accataatgcaggacagggcactgt

SEQ ID NO: 5439688 - DNA, 25 bp, Homo sapien
ctagaaagttataaccaccataatg

SEQ ID NO: 5439689 - DNA, 25 bp, Homo sapien
tcctcctgcccccattggatctact

SEQ ID NO: 5439690 - DNA, 25 bp, Homo sapien
tagaaagttataaccaccataatgc

SEQ ID NO: 5439691 - DNA, 25 bp, Homo sapien
tcctatggatgtacagaaacgagtc

SEQ ID NO: 5439692 - DNA, 25 bp, Homo sapien
taccggtgccaaacagaaagctggc

SEQ ID NO: 5439693 - DNA, 25 bp, Homo sapien
caatgggttgtgcagagaatcctaa

SEQ ID NO: 5439694 - DNA, 25 bp, Homo sapien
taggcgcctgtaccaaataggatcc

SEQ ID NO: 5439695 - DNA, 25 bp, Homo sapien
tctagctttctaagtccgcacccca

SEQ ID NO: 5439696 - DNA, 25 bp, Homo sapien
cacttgcggtctcttcagggtagaa

SEQ ID NO: 5439697 - DNA, 25 bp, Homo sapien
tacatattcgtaagcaaattctgtc

SEQ ID NO: 5439698 - DNA, 25 bp, Homo sapien
aatccagcaatacatattcgtaagc

SEQ ID NO: 5439699 - DNA, 25 bp, Homo sapien
agagttctgtcgctcagggcaccag

SEQ ID NO: 5439700 - DNA, 25 bp, Homo sapien
gattaagctacagctccaggaggct

SEQ ID NO: 5439701 - DNA, 25 bp, Homo sapien
accagcggtgctttgtctattccag

SEQ ID NO: 5439702 - DNA, 25 bp, Homo sapien
tacaacttagcggagaatttccatg

SEQ ID NO: 5439703 - DNA, 25 bp, Homo sapien
gtggcagaatcacatgcaaccacat

SEQ ID NO: 5439704 - DNA, 25 bp, Homo sapien
tttcaggcttgtattctctagaatc

SEQ ID NO: 5439705 - DNA, 25 bp, Homo sapien
gaatctcaactgtgataagggttta

SEQ ID NO: 5439706 - DNA, 25 bp, Homo sapien
ggcagaatcacatgcaaccacatct

SEQ ID NO: 5439707 - DNA, 25 bp, Homo sapien
gccttgggaggtctcttgaaccgat

SEQ ID NO: 5439708 - DNA, 25 bp, Homo sapien
gctataccgtggatggcttccgcta

SEQ ID NO: 5439709 - DNA, 25 bp, Homo sapien
ctgggactgtgactactatgatgaa

SEQ ID NO: 5439710 - DNA, 25 bp, Homo sapien
tactttctccttcggcagggcgtcc

SEQ ID NO: 5439711 - DNA, 25 bp, Homo sapien
actttgccaaagcaggtagcagacc

SEQ ID NO: 5439712 - DNA, 25 bp, Homo sapien
cgtcagttcgtgctcaggcagagga

SEQ ID NO: 5439713 - DNA, 25 bp, Homo sapien
tatgctctggtgagcgcagtggcca

SEQ ID NO: 5439714 - DNA, 25 bp, Homo sapien
tcggatatataaggctctggaggcc

SEQ ID NO: 5439715 - DNA, 25 bp, Homo sapien
taagacatacgaagaaacactaggc

SEQ ID NO: 5439716 - DNA, 25 bp, Homo sapien
cagtaagtcctctctgggttaccaa

SEQ ID NO: 5439717 - DNA, 25 bp, Homo sapien
tataaaaggagtaatgcaccaagtt

SEQ ID NO: 5439718 - DNA, 25 bp, Homo sapien
aattatggcagtcaaggtttcgtga

SEQ ID NO: 5439719 - DNA, 25 bp, Homo sapien
gcttcatgagtgaaagtaaagccac

SEQ ID NO: 5439720 - DNA, 25 bp, Homo sapien
tagagagaatgccacaaaacttgtc

SEQ ID NO: 5439721 - DNA, 25 bp, Homo sapien
gatagacccagccttcacaaatact

SEQ ID NO: 5439722 - DNA, 25 bp, Homo sapien
aaataccacaggtcccatttgatgg

SEQ ID NO: 5439723 - DNA, 25 bp, Homo sapien
gaatagagttgaaagaaaccgcacc

SEQ ID NO: 5439724 - DNA, 25 bp, Homo sapien
tgtaaggacaaagccgatgcgatat

SEQ ID NO: 5439725 - DNA, 25 bp, Homo sapien
gagtagtattcaccatgtaaggaca

SEQ ID NO: 5439726 - DNA, 25 bp, Homo sapien
cagccactgtagttgctaatcagag

SEQ ID NO: 5439727 - DNA, 25 bp, Homo sapien
tttgaacaatgaatgacacccctcc

SEQ ID NO: 5439728 - DNA, 25 bp, Homo sapien
cagtcagtgttatgggatcatgtca

SEQ ID NO: 5439729 - DNA, 25 bp, Homo sapien
acactaagtttcacaacgggcagct

SEQ ID NO: 5439730 - DNA, 25 bp, Homo sapien
tgaaaaccatggcagacgcaaaatt

SEQ ID NO: 5439731 - DNA, 25 bp, Homo sapien
tctcggccacgcaaggatcattgga

SEQ ID NO: 5439732 - DNA, 25 bp, Homo sapien
cagttgagctggaatagagctgccc

SEQ ID NO: 5439733 - DNA, 25 bp, Homo sapien
ggatcattggacaagaaatcagttg

SEQ ID NO: 5439734 - DNA, 25 bp, Homo sapien
ctagctggttcgttgaagctggatc

SEQ ID NO: 5439735 - DNA, 25 bp, Homo sapien
taagtaaagagaaaatatagatcag

SEQ ID NO: 5439736 - DNA, 25 bp, Homo sapien
taaagagaaaatatagatcaggaag

SEQ ID NO: 5439737 - DNA, 25 bp, Homo sapien
aaagagaaaatatagatcaggaaga

SEQ ID NO: 5439738 - DNA, 25 bp, Homo sapien
agtaaagagaaaatatagatcagga

SEQ ID NO: 5439739 - DNA, 25 bp, Homo sapien
ataatatggcatagcaacatcagcc

SEQ ID NO: 5439740 - DNA, 25 bp, Homo sapien
tatggcatagcaacatcagccattt

SEQ ID NO: 5439741 - DNA, 25 bp, Homo sapien
aatatggcatagcaacatcagccat

SEQ ID NO: 5439742 - DNA, 25 bp, Homo sapien
taatatggcatagcaacatcagcca

SEQ ID NO: 5439743 - DNA, 25 bp, Homo sapien
ccttcacatgagtttgctaattctg

SEQ ID NO: 5439744 - DNA, 25 bp, Homo sapien
ttaatttagaattatatttccttca

SEQ ID NO: 5439745 - DNA, 25 bp, Homo sapien
atttccttcacatgagtttgctaat

SEQ ID NO: 5439746 - DNA, 25 bp, Homo sapien
tcacatgagtttgctaattctgtac

SEQ ID NO: 5439747 - DNA, 25 bp, Homo sapien
tgatcacaagtgtgatgtaaatatc

SEQ ID NO: 5439748 - DNA, 25 bp, Homo sapien
ttctgatcacaagtgtgatgtaaat

SEQ ID NO: 5439749 - DNA, 25 bp, Homo sapien
atgtaaatatccaaaattgttcctt

SEQ ID NO: 5439750 - DNA, 25 bp, Homo sapien
tgatgtaaatatccaaaattgttcc

SEQ ID NO: 5439751 - DNA, 25 bp, Homo sapien
ggtgatatgttgcttgaactccatg

SEQ ID NO: 5439752 - DNA, 25 bp, Homo sapien
ttaattggctcaggctgcatcacag

SEQ ID NO: 5439753 - DNA, 25 bp, Homo sapien
cacttggagcataaacctggtgata

SEQ ID NO: 5439754 - DNA, 25 bp, Homo sapien
gcttgaactccatgatcagaataag

SEQ ID NO: 5439755 - DNA, 25 bp, Homo sapien
aggttgcaggtataagaatggagca

SEQ ID NO: 5439756 - DNA, 25 bp, Homo sapien
ctggttgataaataacctcagaagg

SEQ ID NO: 5439757 - DNA, 25 bp, Homo sapien
caggtataagaatggagcagaagag

SEQ ID NO: 5439758 - DNA, 25 bp, Homo sapien
caatttccactggttgataaataac

SEQ ID NO: 5439759 - DNA, 25 bp, Homo sapien
tgaggaacactccactgccactgtc

SEQ ID NO: 5439760 - DNA, 25 bp, Homo sapien
ctgaggaacactccactgccactgt

SEQ ID NO: 5439761 - DNA, 25 bp, Homo sapien
aagagtccatccatcttcttgtatg

SEQ ID NO: 5439762 - DNA, 25 bp, Homo sapien
gaagcaaagagtccatccatcttct

SEQ ID NO: 5439763 - DNA, 25 bp, Homo sapien
ctcatcacatttggtaaaaggaagc

SEQ ID NO: 5439764 - DNA, 25 bp, Homo sapien
ttggtaaaaggaagcaaagagtcca

SEQ ID NO: 5439765 - DNA, 25 bp, Homo sapien
tgataaatgggctgagctaccatca

SEQ ID NO: 5439766 - DNA, 25 bp, Homo sapien
gctaccatcacaggggagctacata

SEQ ID NO: 5439767 - DNA, 25 bp, Homo sapien
ctggtagtgatatgcaggttgctga

SEQ ID NO: 5439768 - DNA, 25 bp, Homo sapien
caggggagctacatacagaacgtga

SEQ ID NO: 5439769 - DNA, 25 bp, Homo sapien
caccattatggtaagtataaggata

SEQ ID NO: 5439770 - DNA, 25 bp, Homo sapien
taaggatatccagttgaagttgtta

SEQ ID NO: 5439771 - DNA, 25 bp, Homo sapien
tatccagttgaagttgttagataca

SEQ ID NO: 5439772 - DNA, 25 bp, Homo sapien
taagcaacaccattatggtaagtat

SEQ ID NO: 5439773 - DNA, 25 bp, Homo sapien
acatgatcttttaataaagttctat

SEQ ID NO: 5439774 - DNA, 25 bp, Homo sapien
aaaaatacattagttctcaatacat

SEQ ID NO: 5439775 - DNA, 25 bp, Homo sapien
catgatcttttaataaagttctata

SEQ ID NO: 5439776 - DNA, 25 bp, Homo sapien
aaatacattagttctcaatacatac

SEQ ID NO: 5439777 - DNA, 25 bp, Homo sapien
tcttattgctggaccaatgttcagc

SEQ ID NO: 5439778 - DNA, 25 bp, Homo sapien
ttattgctggaccaatgttcagctt

SEQ ID NO: 5439779 - DNA, 25 bp, Homo sapien
tttcttattgctggaccaatgttca

SEQ ID NO: 5439780 - DNA, 25 bp, Homo sapien
ttcttattgctggaccaatgttcag

SEQ ID NO: 5439781 - DNA, 25 bp, Homo sapien
ttgtgtttcaaaagtgacgaaacca

SEQ ID NO: 5439782 - DNA, 25 bp, Homo sapien
tgtgtttcaaaagtgacgaaaccat

SEQ ID NO: 5439783 - DNA, 25 bp, Homo sapien
tcttgtgtttcaaaagtgacgaaac

SEQ ID NO: 5439784 - DNA, 25 bp, Homo sapien
tgtttcaaaagtgacgaaaccatac

SEQ ID NO: 5439785 - DNA, 25 bp, Homo sapien
ttctttcacagacccatactgggaa

SEQ ID NO: 5439786 - DNA, 25 bp, Homo sapien
tctttcacagacccatactgggaaa

SEQ ID NO: 5439787 - DNA, 25 bp, Homo sapien
gatgcgattagggatcactgttcca

SEQ ID NO: 5439788 - DNA, 25 bp, Homo sapien
acttgttgggttattcaaaggcaca

SEQ ID NO: 5439789 - DNA, 25 bp, Homo sapien
attcctcctacaaagatgcgattag

SEQ ID NO: 5439790 - DNA, 25 bp, Homo sapien
agggatcactgttccatatcttggg

SEQ ID NO: 5439791 - DNA, 25 bp, Homo sapien
tctagaaattgctcaacagaagcct

SEQ ID NO: 5439792 - DNA, 25 bp, Homo sapien
aattagctcagtacatatccacatg

SEQ ID NO: 5439793 - DNA, 25 bp, Homo sapien
taaatgacgcatgtgttcctggtgg

SEQ ID NO: 5439794 - DNA, 25 bp, Homo sapien
taacaccttctgattgagaggcccc

SEQ ID NO: 5439795 - DNA, 25 bp, Homo sapien
caggtggaggcaacatctaagttca

SEQ ID NO: 5439796 - DNA, 25 bp, Homo sapien
tccaaagcaatgtgccctcactggc

SEQ ID NO: 5439797 - DNA, 25 bp, Homo sapien
tgttagcaatagcaaggctcaggtg

SEQ ID NO: 5439798 - DNA, 25 bp, Homo sapien
ggtttgaaggctcctccgtttgcta

SEQ ID NO: 5439799 - DNA, 25 bp, Homo sapien
acctcgagatctagcatctattttg

SEQ ID NO: 5439800 - DNA, 25 bp, Homo sapien
cgagatctagcatctattttgcaaa

SEQ ID NO: 5439801 - DNA, 25 bp, Homo sapien
tcgagatctagcatctattttgcaa

SEQ ID NO: 5439802 - DNA, 25 bp, Homo sapien
tcaacctcgagatctagcatctatt

SEQ ID NO: 5439803 - DNA, 25 bp, Homo sapien
caaggccagcaagttgcggcactgg

SEQ ID NO: 5439804 - DNA, 25 bp, Homo sapien
tctctcgggtcatcgtgaacttggg

SEQ ID NO: 5439805 - DNA, 25 bp, Homo sapien
gacaacttcctcgagttctctcggg

SEQ ID NO: 5439806 - DNA, 25 bp, Homo sapien
tgaacttgggcaccgaaacgaggat

SEQ ID NO: 5439807 - DNA, 25 bp, Homo sapien
ccagcgagaaattttgccccacaaa

SEQ ID NO: 5439808 - DNA, 25 bp, Homo sapien
ggaaaagaaggctagccagcgagaa

SEQ ID NO: 5439809 - DNA, 25 bp, Homo sapien
aaattttgccccacaaatccgccag

SEQ ID NO: 5439810 - DNA, 25 bp, Homo sapien
gaaggctagccagcgagaaattttg

SEQ ID NO: 5439811 - DNA, 25 bp, Homo sapien
gcgaccccgccgctggcctcgtgcg

SEQ ID NO: 5439812 - DNA, 25 bp, Homo sapien
ccgccgctggcctcgtgcgcagctg

SEQ ID NO: 5439813 - DNA, 25 bp, Homo sapien
cgctggcctcgtgcgcagctggtcc

SEQ ID NO: 5439814 - DNA, 25 bp, Homo sapien
gaccccgccgctggcctcgtgcgca

SEQ ID NO: 5439815 - DNA, 25 bp, Homo sapien
aagacgctgcctagcccaatttcgg

SEQ ID NO: 5439816 - DNA, 25 bp, Homo sapien
tcttcccaaccagatagcgagcgtt

SEQ ID NO: 5439817 - DNA, 25 bp, Homo sapien
ggtttacctgctcggacttcgctgg

SEQ ID NO: 5439818 - DNA, 25 bp, Homo sapien
catgacacagccagacgaggtctgc

SEQ ID NO: 5439819 - DNA, 25 bp, Homo sapien
cacttgagaagagtcggcctctggg

SEQ ID NO: 5439820 - DNA, 25 bp, Homo sapien
agcggtcaggcaaagctccatgcac

SEQ ID NO: 5439821 - DNA, 25 bp, Homo sapien
aggtgaccttaaggctttactgagg

SEQ ID NO: 5439822 - DNA, 25 bp, Homo sapien
ggcagcagcgctgcttgtcctgcct

SEQ ID NO: 5439823 - DNA, 25 bp, Homo sapien
aatgtcaggcattgggtgtatatct

SEQ ID NO: 5439824 - DNA, 25 bp, Homo sapien
ctactgtatattcacttctgcattg

SEQ ID NO: 5439825 - DNA, 25 bp, Homo sapien
gaaaatgtcaggcattgggtgtata

SEQ ID NO: 5439826 - DNA, 25 bp, Homo sapien
tgtatattcacttctgcattgaaaa

SEQ ID NO: 5439827 - DNA, 25 bp, Homo sapien
ggatttttgttgcatctcaggctca

SEQ ID NO: 5439828 - DNA, 25 bp, Homo sapien
ctaaaatatacacggagcgcctccg

SEQ ID NO: 5439829 - DNA, 25 bp, Homo sapien
ggctcgagtacattagccccgctgg

SEQ ID NO: 5439830 - DNA, 25 bp, Homo sapien
tgggccggctcccagttgcagaaca

SEQ ID NO: 5439831 - DNA, 25 bp, Homo sapien
gggcacacccctccgcagtgaggat

SEQ ID NO: 5439832 - DNA, 25 bp, Homo sapien
gtgaggattggtcgggccgagcccc

SEQ ID NO: 5439833 - DNA, 25 bp, Homo sapien
cacacccctccgcagtgaggattgg

SEQ ID NO: 5439834 - DNA, 25 bp, Homo sapien
cccctccgcagtgaggattggtcgg

SEQ ID NO: 5439835 - DNA, 25 bp, Homo sapien
cggactgctagcctcctagaccgaa

SEQ ID NO: 5439836 - DNA, 25 bp, Homo sapien
gaggacgtctctgcccgagcgatgt

SEQ ID NO: 5439837 - DNA, 25 bp, Homo sapien
tagcctcctagaccgaagcccgagg

SEQ ID NO: 5439838 - DNA, 25 bp, Homo sapien
agaccgaagcccgaggacgtctctg

SEQ ID NO: 5439839 - DNA, 25 bp, Homo sapien
gggactgcgtgacggcggcctctgg

SEQ ID NO: 5439840 - DNA, 25 bp, Homo sapien
cagcgaggcgggcctcctggaggca

SEQ ID NO: 5439841 - DNA, 25 bp, Homo sapien
gggtcgcactgccaggcgccgcggg

SEQ ID NO: 5439842 - DNA, 25 bp, Homo sapien
ggccggatgagggaccgtcgcagcg

SEQ ID NO: 5439843 - DNA, 25 bp, Homo sapien
ctagatcatctctgtattctagttc

SEQ ID NO: 5439844 - DNA, 25 bp, Homo sapien
tgtaatcaggggcacacgcattagg

SEQ ID NO: 5439845 - DNA, 25 bp, Homo sapien
gggtgcgcacaccttctagggtgta

SEQ ID NO: 5439846 - DNA, 25 bp, Homo sapien
tgacagccgatgatgagggtgcgca

SEQ ID NO: 5439847 - DNA, 25 bp, Homo sapien
gcacaccttctagggtgtaatcagg

SEQ ID NO: 5439848 - DNA, 25 bp, Homo sapien
ctaccttcactatttcttttgccca

SEQ ID NO: 5439849 - DNA, 25 bp, Homo sapien
tccactaccttcactatttcttttg

SEQ ID NO: 5439850 - DNA, 25 bp, Homo sapien
ctccactaccttcactatttctttt

SEQ ID NO: 5439851 - DNA, 25 bp, Homo sapien
cactaccttcactatttcttttgcc

SEQ ID NO: 5439852 - DNA, 25 bp, Homo sapien
tctttctggtagatggggcagttcc

SEQ ID NO: 5439853 - DNA, 25 bp, Homo sapien
gtagatggggcagttccagtgtctc

SEQ ID NO: 5439854 - DNA, 25 bp, Homo sapien
tgccatatctaaccaggttggagtt

SEQ ID NO: 5439855 - DNA, 25 bp, Homo sapien
tctaaccaggttggagttgtgatgg

SEQ ID NO: 5439856 - DNA, 25 bp, Homo sapien
gactgtaaattccttaaaagccaga

SEQ ID NO: 5439857 - DNA, 25 bp, Homo sapien
tgtgctatatgcaaaacgtgaatga

SEQ ID NO: 5439858 - DNA, 25 bp, Homo sapien
gactcctactcagatattcagcttg

SEQ ID NO: 5439859 - DNA, 25 bp, Homo sapien
gcctatagctccatttactctggag

SEQ ID NO: 5439860 - DNA, 25 bp, Homo sapien
gcacaggtgagtggttggcactcat

SEQ ID NO: 5439861 - DNA, 25 bp, Homo sapien
aacaatgggtttgggagcacccaca

SEQ ID NO: 5439862 - DNA, 25 bp, Homo sapien
tcattaaccaccgaattctgacacg

SEQ ID NO: 5439863 - DNA, 25 bp, Homo sapien
caatgggtttgggagcacccacact

SEQ ID NO: 5439864 - DNA, 25 bp, Homo sapien
caggtcctggtatggaaataggcat

SEQ ID NO: 5439865 - DNA, 25 bp, Homo sapien
tgcaggtcctggtatggaaataggc

SEQ ID NO: 5439866 - DNA, 25 bp, Homo sapien
ctgcaggtcctggtatggaaatagg

SEQ ID NO: 5439867 - DNA, 25 bp, Homo sapien
gcaggtcctggtatggaaataggca

SEQ ID NO: 5439868 - DNA, 25 bp, Homo sapien
tgaccaaaattctgcactatcactt

SEQ ID NO: 5439869 - DNA, 25 bp, Homo sapien
gatagcccagctagtctggtcctgg

SEQ ID NO: 5439870 - DNA, 25 bp, Homo sapien
gcttctccagaacaatctagttggc

SEQ ID NO: 5439871 - DNA, 25 bp, Homo sapien
gcttggattctacaggcttctccag

SEQ ID NO: 5439872 - DNA, 25 bp, Homo sapien
tagcatgacccgagatgcattagca

SEQ ID NO: 5439873 - DNA, 25 bp, Homo sapien
aatgacgcacactaatggattgaaa

SEQ ID NO: 5439874 - DNA, 25 bp, Homo sapien
tgaaagagttatctagcatgacccg

SEQ ID NO: 5439875 - DNA, 25 bp, Homo sapien
taaagaaggaccagtaggatcaatg

SEQ ID NO: 5439876 - DNA, 25 bp, Homo sapien
tggaggctctctaataaacccaagg

SEQ ID NO: 5439877 - DNA, 25 bp, Homo sapien
aaagggacttggaggctctctaata

SEQ ID NO: 5439878 - DNA, 25 bp, Homo sapien
gctctctaataaacccaaggacatg

SEQ ID NO: 5439879 - DNA, 25 bp, Homo sapien
tctaataaacccaaggacatgcttt

SEQ ID NO: 5439880 - DNA, 25 bp, Homo sapien
gttgctaaggacaacccatttccta

SEQ ID NO: 5439881 - DNA, 25 bp, Homo sapien
gaacagttgtgagagccagttgcta

SEQ ID NO: 5439882 - DNA, 25 bp, Homo sapien
taaatattcgtatgaatcccagaca

SEQ ID NO: 5439883 - DNA, 25 bp, Homo sapien
tcccagacagtaggaggaacagttg

SEQ ID NO: 5439884 - DNA, 25 bp, Homo sapien
gatcccgttcttgggctctgtgaac

SEQ ID NO: 5439885 - DNA, 25 bp, Homo sapien
ggctctgtgaacttatagcttgtca

SEQ ID NO: 5439886 - DNA, 25 bp, Homo sapien
tcttgggctctgtgaacttatagct

SEQ ID NO: 5439887 - DNA, 25 bp, Homo sapien
atgaagttgccagatcccgttcttg

SEQ ID NO: 5439888 - DNA, 25 bp, Homo sapien
ggttaaccatgcctattgcacaggg

SEQ ID NO: 5439889 - DNA, 25 bp, Homo sapien
taatctcctgagtcatggccagagg

SEQ ID NO: 5439890 - DNA, 25 bp, Homo sapien
tgctccaacatagaggactggctgc

SEQ ID NO: 5439891 - DNA, 25 bp, Homo sapien
gactggctgcgtgttctgagaacct

SEQ ID NO: 5439892 - DNA, 25 bp, Homo sapien
tcacagaaagtcctcctgcttctct

SEQ ID NO: 5439893 - DNA, 25 bp, Homo sapien
agtcctcctgcttctctgcatgcca

SEQ ID NO: 5439894 - DNA, 25 bp, Homo sapien
ctcctgcttctctgcatgccagagc

SEQ ID NO: 5439895 - DNA, 25 bp, Homo sapien
tcctcctgcttctctgcatgccaga

SEQ ID NO: 5439896 - DNA, 25 bp, Homo sapien
tctcttgcccctctcagctttgtgg

SEQ ID NO: 5439897 - DNA, 25 bp, Homo sapien
ttcagttccacagctgggggtctct

SEQ ID NO: 5439898 - DNA, 25 bp, Homo sapien
tccactggctgcttccaactagtag

SEQ ID NO: 5439899 - DNA, 25 bp, Homo sapien
actagtagagtgtcctttgtttgac

SEQ ID NO: 5439900 - DNA, 25 bp, Homo sapien
agtggatactgccttgtgcttcaca

SEQ ID NO: 5439901 - DNA, 25 bp, Homo sapien
aatgactcgagtgtccagtggatac

SEQ ID NO: 5439902 - DNA, 25 bp, Homo sapien
ctataatggtctgctattgtctgtg

SEQ ID NO: 5439903 - DNA, 25 bp, Homo sapien
tccctttgggaatgactcgagtgtc

SEQ ID NO: 5439904 - DNA, 25 bp, Homo sapien
tgcaggttgggtacctgaattaagc

SEQ ID NO: 5439905 - DNA, 25 bp, Homo sapien
tgggtacctgaattaagctggctct

SEQ ID NO: 5439906 - DNA, 25 bp, Homo sapien
gactgtgcaggttgggtacctgaat

SEQ ID NO: 5439907 - DNA, 25 bp, Homo sapien
gttgggtacctgaattaagctggct

SEQ ID NO: 5439908 - DNA, 25 bp, Homo sapien
tatatgagttaccttcttacctgcc

SEQ ID NO: 5439909 - DNA, 25 bp, Homo sapien
aaactggactccttgcctatatgag

SEQ ID NO: 5439910 - DNA, 25 bp, Homo sapien
ggtgctgtgttaatcccaagggaac

SEQ ID NO: 5439911 - DNA, 25 bp, Homo sapien
accttcttacctgcctttagttgtg

SEQ ID NO: 5439912 - DNA, 25 bp, Homo sapien
acgtggcaaggattgtcaagggcaa

SEQ ID NO: 5439913 - DNA, 25 bp, Homo sapien
ggcaaggctgcgtaattttgtgtct

SEQ ID NO: 5439914 - DNA, 25 bp, Homo sapien
cagccttgccatcaacgtggcaagg

SEQ ID NO: 5439915 - DNA, 25 bp, Homo sapien
tcaagggcaaggctgcgtaattttg

SEQ ID NO: 5439916 - DNA, 25 bp, Homo sapien
ggcaggaccatagcggagaaccaga

SEQ ID NO: 5439917 - DNA, 25 bp, Homo sapien
aggcaggaccatagcggagaaccag

SEQ ID NO: 5439918 - DNA, 25 bp, Homo sapien
caggcaggaccatagcggagaacca

SEQ ID NO: 5439919 - DNA, 25 bp, Homo sapien
gcaggaccatagcggagaaccagaa

SEQ ID NO: 5439920 - DNA, 25 bp, Homo sapien
agaatcaggtggaggttcataggga

SEQ ID NO: 5439921 - DNA, 25 bp, Homo sapien
ttcatagggagttgtgaaggtgaga

SEQ ID NO: 5439922 - DNA, 25 bp, Homo sapien
caggtggaggttcatagggagttgt

SEQ ID NO: 5439923 - DNA, 25 bp, Homo sapien
ggttcatagggagttgtgaaggtga

SEQ ID NO: 5439924 - DNA, 25 bp, Homo sapien
tttgctctgctccaagttgcaactg

SEQ ID NO: 5439925 - DNA, 25 bp, Homo sapien
cacactgtccctgacttcaataatg

SEQ ID NO: 5439926 - DNA, 25 bp, Homo sapien
gaacgatgaaactgggtgagccagt

SEQ ID NO: 5439927 - DNA, 25 bp, Homo sapien
gacaacttccattgaacgatgaaac

SEQ ID NO: 5439928 - DNA, 25 bp, Homo sapien
gtggtggtcacactgtccctgactt

SEQ ID NO: 5439929 - DNA, 25 bp, Homo sapien
tctgaaattgggtttccgcaaatgg

SEQ ID NO: 5439930 - DNA, 25 bp, Homo sapien
ttctgaaattgggtttccgcaaatg

SEQ ID NO: 5439931 - DNA, 25 bp, Homo sapien
cataagctccgccaggattcctggg

SEQ ID NO: 5439932 - DNA, 25 bp, Homo sapien
gtgctggcataagctccgccaggat

SEQ ID NO: 5439933 - DNA, 25 bp, Homo sapien
gaacatcgaattaatcctcacacca

SEQ ID NO: 5439934 - DNA, 25 bp, Homo sapien
cagaaacaacagtcagtgctggcat

SEQ ID NO: 5439935 - DNA, 25 bp, Homo sapien
tgtatgcatcagaactgaattccat

SEQ ID NO: 5439936 - DNA, 25 bp, Homo sapien
gaactgttaggccttgtgtatgggt

SEQ ID NO: 5439937 - DNA, 25 bp, Homo sapien
actgccaaacatggatgtgattttg

SEQ ID NO: 5439938 - DNA, 25 bp, Homo sapien
tgattttgagcataggcccattgga

SEQ ID NO: 5439939 - DNA, 25 bp, Homo sapien
gaaggagatttggagtcgtccaccc

SEQ ID NO: 5439940 - DNA, 25 bp, Homo sapien
gatttggagtcgtccacccttcagt

SEQ ID NO: 5439941 - DNA, 25 bp, Homo sapien
tttctcaccatcaatctgccaagat

SEQ ID NO: 5439942 - DNA, 25 bp, Homo sapien
actctggtggtggtgaagcttagaa

SEQ ID NO: 5439943 - DNA, 25 bp, Homo sapien
atagcatggctactgaaagaacagc

SEQ ID NO: 5439944 - DNA, 25 bp, Homo sapien
tactgaaagaacagcgtgattgctc

SEQ ID NO: 5439945 - DNA, 25 bp, Homo sapien
cagagccaatagcatggctactgaa

SEQ ID NO: 5439946 - DNA, 25 bp, Homo sapien
ctcccaacctgtcagagccaatagc

SEQ ID NO: 5439947 - DNA, 25 bp, Homo sapien
tacagttactgggtgtaaaaggcaa

SEQ ID NO: 5439948 - DNA, 25 bp, Homo sapien
acaactcaagaacatggtggcacgt

SEQ ID NO: 5439949 - DNA, 25 bp, Homo sapien
tataacacccaatatcctggtcagt

SEQ ID NO: 5439950 - DNA, 25 bp, Homo sapien
ggttgcattgcactgaaatcacgcc

SEQ ID NO: 5439951 - DNA, 25 bp, Homo sapien
ggttgctgaggtgttgcaaaacagt

SEQ ID NO: 5439952 - DNA, 25 bp, Homo sapien
attgataacttagtgcagtggacac

SEQ ID NO: 5439953 - DNA, 25 bp, Homo sapien
cagttacaaaatctaatgtctcagg

SEQ ID NO: 5439954 - DNA, 25 bp, Homo sapien
tcagccaagactgttagaacagaac

SEQ ID NO: 5439955 - DNA, 25 bp, Homo sapien
ccaatgatgctacaatggcctgaaa

SEQ ID NO: 5439956 - DNA, 25 bp, Homo sapien
tttaaaactgggcactcgaggagga

SEQ ID NO: 5439957 - DNA, 25 bp, Homo sapien
aagagtttgctatttccatggacca

SEQ ID NO: 5439958 - DNA, 25 bp, Homo sapien
ttactccagggtcaaatccaatcct

SEQ ID NO: 5439959 - DNA, 25 bp, Homo sapien
actctgcttcattccactgggtgtc

SEQ ID NO: 5439960 - DNA, 25 bp, Homo sapien
ctatttctggcagtgggttgtcagc

SEQ ID NO: 5439961 - DNA, 25 bp, Homo sapien
gcagtgggttgtcagccatactctg

SEQ ID NO: 5439962 - DNA, 25 bp, Homo sapien
gccatactctgcttcattccactgg

SEQ ID NO: 5439963 - DNA, 25 bp, Homo sapien
tatgaaggcctgtattcctttcggc

SEQ ID NO: 5439964 - DNA, 25 bp, Homo sapien
gctgcttattccgaatttcttctct

SEQ ID NO: 5439965 - DNA, 25 bp, Homo sapien
gctccactacactttggatattttt

SEQ ID NO: 5439966 - DNA, 25 bp, Homo sapien
ccttcttgtggcagtcttcttgttg

SEQ ID NO: 5439967 - DNA, 25 bp, Homo sapien
ggatattagcaagggtcaccagggt

SEQ ID NO: 5439968 - DNA, 25 bp, Homo sapien
tgtctgtgctgttagggatattagc

SEQ ID NO: 5439969 - DNA, 25 bp, Homo sapien
tttctatgatgggacatgaggagag

SEQ ID NO: 5439970 - DNA, 25 bp, Homo sapien
gaggaaattattggtgacatcagta

SEQ ID NO: 5439971 - DNA, 25 bp, Homo sapien
cctggggatatcacactgtacattt

SEQ ID NO: 5439972 - DNA, 25 bp, Homo sapien
ttggtgggtgggaagaaatctgtga

SEQ ID NO: 5439973 - DNA, 25 bp, Homo sapien
tccacaaaggatggatctggggcac

SEQ ID NO: 5439974 - DNA, 25 bp, Homo sapien
ttgttccctggaatgtagcaagcat

SEQ ID NO: 5439975 - DNA, 25 bp, Homo sapien
tttctcagactgtcttccattgtga

SEQ ID NO: 5439976 - DNA, 25 bp, Homo sapien
cctttctcagactgtcttccattgt

SEQ ID NO: 5439977 - DNA, 25 bp, Homo sapien
ccaagaatttgtttgggagtaagag

SEQ ID NO: 5439978 - DNA, 25 bp, Homo sapien
agaatttgtttgggagtaagaggtg

SEQ ID NO: 5439979 - DNA, 25 bp, Homo sapien
tattcgtgatcctgcagcacactaa

SEQ ID NO: 5439980 - DNA, 25 bp, Homo sapien
ctattcgtgatcctgcagcacacta

SEQ ID NO: 5439981 - DNA, 25 bp, Homo sapien
attcgtgatcctgcagcacactaac

SEQ ID NO: 5439982 - DNA, 25 bp, Homo sapien
ctctcagtatttggcaaaatcttac

SEQ ID NO: 5439983 - DNA, 25 bp, Homo sapien
tttgctctcagtatttggcaaaatc

SEQ ID NO: 5439984 - DNA, 25 bp, Homo sapien
tgctctcagtatttggcaaaatctt

SEQ ID NO: 5439985 - DNA, 25 bp, Homo sapien
ttttttgctctcagtatttggcaaa

SEQ ID NO: 5439986 - DNA, 25 bp, Homo sapien
tattgcagcaactgttccccgaaat

SEQ ID NO: 5439987 - DNA, 25 bp, Homo sapien
tggtgcaccataaataggatcctca

SEQ ID NO: 5439988 - DNA, 25 bp, Homo sapien
ccgttttaagcttggtgcaccataa

SEQ ID NO: 5439989 - DNA, 25 bp, Homo sapien
tgttcgtcacagacctgacagccca

SEQ ID NO: 5439990 - DNA, 25 bp, Homo sapien
gatgatatcactgttgtaggctaag

SEQ ID NO: 5439991 - DNA, 25 bp, Homo sapien
gatactcccttcagtcactcatgga

SEQ ID NO: 5439992 - DNA, 25 bp, Homo sapien
agagacctcctcagcgttccagatt

SEQ ID NO: 5439993 - DNA, 25 bp, Homo sapien
tacagttgtctctggtccaagttac

SEQ ID NO: 5439994 - DNA, 25 bp, Homo sapien
tttggagaagtaaatctagtcctaa

SEQ ID NO: 5439995 - DNA, 25 bp, Homo sapien
aaacataatgtccttaacacagtac

SEQ ID NO: 5439996 - DNA, 25 bp, Homo sapien
tcatggaattagctttttggagaag

SEQ ID NO: 5439997 - DNA, 25 bp, Homo sapien
ctcatggaattagctttttggagaa

SEQ ID NO: 5439998 - DNA, 25 bp, Homo sapien
cagaatggtggtatcagctgtttat

SEQ ID NO: 5439999 - DNA, 25 bp, Homo sapien
caattcatgaaagcttgcaccttca

SEQ ID NO: 5440000 - DNA, 25 bp, Homo sapien
tcactgtaatagttcagaatggtgg

SEQ ID NO: 5440001 - DNA, 25 bp, Homo sapien
ccttcagtgcctatgtggaattcac

SEQ ID NO: 5440002 - DNA, 25 bp, Homo sapien
ctcttcccagctggcttcattaata

SEQ ID NO: 5440003 - DNA, 25 bp, Homo sapien
tggcttcattaatattttcagaaaa

SEQ ID NO: 5440004 - DNA, 25 bp, Homo sapien
catccaaactgctcctcttcccagc

SEQ ID NO: 5440005 - DNA, 25 bp, Homo sapien
tcctcttcccagctggcttcattaa

SEQ ID NO: 5440006 - DNA, 25 bp, Homo sapien
ttcaaaaccaatccagccttcctga

SEQ ID NO: 5440007 - DNA, 25 bp, Homo sapien
ttcctgacaagtccccaaagtctta

SEQ ID NO: 5440008 - DNA, 25 bp, Homo sapien
aaaaccaatccagccttcctgacaa

SEQ ID NO: 5440009 - DNA, 25 bp, Homo sapien
taattcattccagtctttactcaaa

SEQ ID NO: 5440010 - DNA, 25 bp, Homo sapien
cagcatccagttcctggattggtac

SEQ ID NO: 5440011 - DNA, 25 bp, Homo sapien
gagggcagagtaagttgtatccttt

SEQ ID NO: 5440012 - DNA, 25 bp, Homo sapien
atagagggcagagtaagttgtatcc

SEQ ID NO: 5440013 - DNA, 25 bp, Homo sapien
tttcagcatccagttcctggattgg

SEQ ID NO: 5440014 - DNA, 25 bp, Homo sapien
aggaatgatgctgccaaagaatttg

SEQ ID NO: 5440015 - DNA, 25 bp, Homo sapien
ccaagaccttctgtactagaccttg

SEQ ID NO: 5440016 - DNA, 25 bp, Homo sapien
gaccttctgtactagaccttgacct

SEQ ID NO: 5440017 - DNA, 25 bp, Homo sapien
tgtactagaccttgacctatttgtg

SEQ ID NO: 5440018 - DNA, 25 bp, Homo sapien
ccttgacctatttgtgatcagatcc

SEQ ID NO: 5440019 - DNA, 25 bp, Homo sapien
cctaggaagtctaaccaggacaatc

SEQ ID NO: 5440020 - DNA, 25 bp, Homo sapien
caacctttagaatccggagaaccag

SEQ ID NO: 5440021 - DNA, 25 bp, Homo sapien
ggacaatcatgcttagctctagaac

SEQ ID NO: 5440022 - DNA, 25 bp, Homo sapien
ttggtcctcattatcaggaaagcaa

SEQ ID NO: 5440023 - DNA, 25 bp, Homo sapien
gacttttgtttggttccgcatagac

SEQ ID NO: 5440024 - DNA, 25 bp, Homo sapien
tctctgtcagcacttcaatgcatgg

SEQ ID NO: 5440025 - DNA, 25 bp, Homo sapien
ttggttccgcatagacagttgtgtc

SEQ ID NO: 5440026 - DNA, 25 bp, Homo sapien
ttgtgtctaactggatgtgcagagg

SEQ ID NO: 5440027 - DNA, 25 bp, Homo sapien
ggttgcatgataccctcctcggtct

SEQ ID NO: 5440028 - DNA, 25 bp, Homo sapien
gactgcccggttgcatgataccctc

SEQ ID NO: 5440029 - DNA, 25 bp, Homo sapien
ccggttgcatgataccctcctcggt

SEQ ID NO: 5440030 - DNA, 25 bp, Homo sapien
ctgactgcccggttgcatgataccc

SEQ ID NO: 5440031 - DNA, 25 bp, Homo sapien
accaatgccagtaaaaaagagtttg

SEQ ID NO: 5440032 - DNA, 25 bp, Homo sapien
ccaatgccagtaaaaaagagtttgg

SEQ ID NO: 5440033 - DNA, 25 bp, Homo sapien
caatgccagtaaaaaagagtttggc

SEQ ID NO: 5440034 - DNA, 25 bp, Homo sapien
tgtcactgtatgcatggagcctggg

SEQ ID NO: 5440035 - DNA, 25 bp, Homo sapien
tcagcttggagaactctgggacagt

SEQ ID NO: 5440036 - DNA, 25 bp, Homo sapien
gaggaacgaactgtctgagcactag

SEQ ID NO: 5440037 - DNA, 25 bp, Homo sapien
gaaaattccagagcaacagcccagt

SEQ ID NO: 5440038 - DNA, 25 bp, Homo sapien
tgcagctgtctgtttagacacctcc

SEQ ID NO: 5440039 - DNA, 25 bp, Homo sapien
cactggcaccgtgaaagcctgcatc

SEQ ID NO: 5440040 - DNA, 25 bp, Homo sapien
tatggaatggctttgcctgcaattc

SEQ ID NO: 5440041 - DNA, 25 bp, Homo sapien
gtctgtttagacacctccagggcag

SEQ ID NO: 5440042 - DNA, 25 bp, Homo sapien
taggctgcaataactgagttctttg

SEQ ID NO: 5440043 - DNA, 25 bp, Homo sapien
acccctcacttaggctgcaataact

SEQ ID NO: 5440044 - DNA, 25 bp, Homo sapien
tttgcaatcggacaacttgtacggg

SEQ ID NO: 5440045 - DNA, 25 bp, Homo sapien
gtgcccacccctcacttaggctgca

SEQ ID NO: 5440046 - DNA, 25 bp, Homo sapien
catggggacctaatgctgcggcaga

SEQ ID NO: 5440047 - DNA, 25 bp, Homo sapien
tgcccgcatggggacctaatgctgc

SEQ ID NO: 5440048 - DNA, 25 bp, Homo sapien
ctaatgctgcggcagagcagctgca

SEQ ID NO: 5440049 - DNA, 25 bp, Homo sapien
cgttgactctcgctgcccgcatggg

SEQ ID NO: 5440050 - DNA, 25 bp, Homo sapien
taaatggagtatctcaatctgaaag

SEQ ID NO: 5440051 - DNA, 25 bp, Homo sapien
gaacgatatgagtagcttctggcac

SEQ ID NO: 5440052 - DNA, 25 bp, Homo sapien
tgatgcagcagacggtaaatttcca

SEQ ID NO: 5440053 - DNA, 25 bp, Homo sapien
aattgccaagagttttttgactgag

SEQ ID NO: 5440054 - DNA, 25 bp, Homo sapien
acaagagggtctgtagtcaggactg

SEQ ID NO: 5440055 - DNA, 25 bp, Homo sapien
tgtcctccagtaaagttgctaacaa

SEQ ID NO: 5440056 - DNA, 25 bp, Homo sapien
taaagttgctaacaagagggtctgt

SEQ ID NO: 5440057 - DNA, 25 bp, Homo sapien
tccagtaaagttgctaacaagaggg

SEQ ID NO: 5440058 - DNA, 25 bp, Homo sapien
ggttgccaggataatacttcagaaa

SEQ ID NO: 5440059 - DNA, 25 bp, Homo sapien
taagcgggtattctgataattacag

SEQ ID NO: 5440060 - DNA, 25 bp, Homo sapien
ttggttgtaaatgccagcaggttgc

SEQ ID NO: 5440061 - DNA, 25 bp, Homo sapien
gcgggtattctgataattacagcaa

SEQ ID NO: 5440062 - DNA, 25 bp, Homo sapien
ctggaagcgcgggtaagcagagctc

SEQ ID NO: 5440063 - DNA, 25 bp, Homo sapien
atcagaatatggcactggcatcctg

SEQ ID NO: 5440064 - DNA, 25 bp, Homo sapien
gcagagctcggaagggccgtggcac

SEQ ID NO: 5440065 - DNA, 25 bp, Homo sapien
gcagccactttttgtgagaatacta

SEQ ID NO: 5440066 - DNA, 25 bp, Homo sapien
agacttgatgtgagaggactggccc

SEQ ID NO: 5440067 - DNA, 25 bp, Homo sapien
gacttgatgtgagaggactggcccc

SEQ ID NO: 5440068 - DNA, 25 bp, Homo sapien
tgcagacttgatgtgagaggactgg

SEQ ID NO: 5440069 - DNA, 25 bp, Homo sapien
cagacttgatgtgagaggactggcc

SEQ ID NO: 5440070 - DNA, 25 bp, Homo sapien
agctgaaaaaccctcactgcttggt

SEQ ID NO: 5440071 - DNA, 25 bp, Homo sapien
aataggctagaccacatagtctagg

SEQ ID NO: 5440072 - DNA, 25 bp, Homo sapien
gaagctgacatctgagataagcgcc

SEQ ID NO: 5440073 - DNA, 25 bp, Homo sapien
gataagcgccagtaaaatgatctgc

SEQ ID NO: 5440074 - DNA, 25 bp, Homo sapien
taccaagcctagctcaaaagcatca

SEQ ID NO: 5440075 - DNA, 25 bp, Homo sapien
tttttatctttgacaagcaagtaat

SEQ ID NO: 5440076 - DNA, 25 bp, Homo sapien
aaaccatttaccaagcctagctcaa

SEQ ID NO: 5440077 - DNA, 25 bp, Homo sapien
caagcaagtaattgcttctcaaatt

SEQ ID NO: 5440078 - DNA, 25 bp, Homo sapien
cacacagtatggtgataaaagctca

SEQ ID NO: 5440079 - DNA, 25 bp, Homo sapien
tgatggtcttcacacagtatggtga

SEQ ID NO: 5440080 - DNA, 25 bp, Homo sapien
gctcaatggaactactctgggtcat

SEQ ID NO: 5440081 - DNA, 25 bp, Homo sapien
taaaagctcaatggaactactctgg

SEQ ID NO: 5440082 - DNA, 25 bp, Homo sapien
ccttccaaaatgcaatactgcattt

SEQ ID NO: 5440083 - DNA, 25 bp, Homo sapien
caaaatgcaatactgcattttggca

SEQ ID NO: 5440084 - DNA, 25 bp, Homo sapien
atgcaatactgcattttggcaagga

SEQ ID NO: 5440085 - DNA, 25 bp, Homo sapien
aaatgcaatactgcattttggcaag

SEQ ID NO: 5440086 - DNA, 25 bp, Homo sapien
attgatgccttattgagaatcctga

SEQ ID NO: 5440087 - DNA, 25 bp, Homo sapien
tttttcattgatgccttattgagaa

SEQ ID NO: 5440088 - DNA, 25 bp, Homo sapien
tttcattgatgccttattgagaatc

SEQ ID NO: 5440089 - DNA, 25 bp, Homo sapien
tcattgatgccttattgagaatcct

SEQ ID NO: 5440090 - DNA, 25 bp, Homo sapien
tgtgcatatcagtctgtagggggca

SEQ ID NO: 5440091 - DNA, 25 bp, Homo sapien
taccacaaagacttgtgataagtcc

SEQ ID NO: 5440092 - DNA, 25 bp, Homo sapien
gggcactcctcagctaccacaaaga

SEQ ID NO: 5440093 - DNA, 25 bp, Homo sapien
agacttgtgataagtcctttctgtg

SEQ ID NO: 5440094 - DNA, 25 bp, Homo sapien
cctacactggagcttataaacagct

SEQ ID NO: 5440095 - DNA, 25 bp, Homo sapien
tgatttacatgtgggaagaggaacc

SEQ ID NO: 5440096 - DNA, 25 bp, Homo sapien
catagaattacatgccctacactgg

SEQ ID NO: 5440097 - DNA, 25 bp, Homo sapien
ggaaccacagagtttttacatagaa

SEQ ID NO: 5440098 - DNA, 25 bp, Homo sapien
ttccaggacagcatgacttggcagg

SEQ ID NO: 5440099 - DNA, 25 bp, Homo sapien
gagttgtttcttctcgtcttgacta

SEQ ID NO: 5440100 - DNA, 25 bp, Homo sapien
tatttgggagtgtccacgaggtctg

SEQ ID NO: 5440101 - DNA, 25 bp, Homo sapien
agtgtccacgaggtctgtagctttc

SEQ ID NO: 5440102 - DNA, 25 bp, Homo sapien
tagtttgattgtttaatatgacccc

SEQ ID NO: 5440103 - DNA, 25 bp, Homo sapien
gaactattatgttgtcttcttcaag

SEQ ID NO: 5440104 - DNA, 25 bp, Homo sapien
tgacccctaactgtttcatgtattt

SEQ ID NO: 5440105 - DNA, 25 bp, Homo sapien
cctggttgggtcattcctggtgaac

SEQ ID NO: 5440106 - DNA, 25 bp, Homo sapien
gcaccttcactagtagacatacact

SEQ ID NO: 5440107 - DNA, 25 bp, Homo sapien
ttcctctgacatgcaccttcactag

SEQ ID NO: 5440108 - DNA, 25 bp, Homo sapien
tagtagacatacactcttccagagt

SEQ ID NO: 5440109 - DNA, 25 bp, Homo sapien
ccagagtcttgtccatatgatacat

SEQ ID NO: 5440110 - DNA, 25 bp, Homo sapien
tggagggcatcggtgctagctcggt

SEQ ID NO: 5440111 - DNA, 25 bp, Homo sapien
catcggtgctagctcggttcactgc

SEQ ID NO: 5440112 - DNA, 25 bp, Homo sapien
agctgagattccagatggctgccac

SEQ ID NO: 5440113 - DNA, 25 bp, Homo sapien
tagctgagattccagatggctgcca

SEQ ID NO: 5440114 - DNA, 25 bp, Homo sapien
aactgttcctgtgttgagtgcaaac

SEQ ID NO: 5440115 - DNA, 25 bp, Homo sapien
ccatacatggcaggcacggatttct

SEQ ID NO: 5440116 - DNA, 25 bp, Homo sapien
gatcccactcttaaagggacgcttg

SEQ ID NO: 5440117 - DNA, 25 bp, Homo sapien
aacaatgtaagaggtggagacacca

SEQ ID NO: 5440118 - DNA, 25 bp, Homo sapien
ctcctgtaactcaatctgtgattgg

SEQ ID NO: 5440119 - DNA, 25 bp, Homo sapien
tgaatggtctatttaaacaagtgcc

SEQ ID NO: 5440120 - DNA, 25 bp, Homo sapien
tttggaataaatactcctgtaactc

SEQ ID NO: 5440121 - DNA, 25 bp, Homo sapien
tggaaaaccaaaccgatcctgaatg

SEQ ID NO: 5440122 - DNA, 25 bp, Homo sapien
gctcatggatgtgtgctagcacttg

SEQ ID NO: 5440123 - DNA, 25 bp, Homo sapien
tttgtctttgaactagagagctcac

SEQ ID NO: 5440124 - DNA, 25 bp, Homo sapien
gcaatgctccatactatcacctttg

SEQ ID NO: 5440125 - DNA, 25 bp, Homo sapien
ttggctgctccatcgcaatgctcca

SEQ ID NO: 5440126 - DNA, 25 bp, Homo sapien
agtccccaaaatgttactacatcgg

SEQ ID NO: 5440127 - DNA, 25 bp, Homo sapien
tactacatcggtgtatagcacaatc

SEQ ID NO: 5440128 - DNA, 25 bp, Homo sapien
tcggtgtatagcacaatcttgctga

SEQ ID NO: 5440129 - DNA, 25 bp, Homo sapien
tattccataaatctagtccccaaaa

SEQ ID NO: 5440130 - DNA, 25 bp, Homo sapien
cttcatgacccccttcaagtatctt

SEQ ID NO: 5440131 - DNA, 25 bp, Homo sapien
tacacattcttcatgacccccttca

SEQ ID NO: 5440132 - DNA, 25 bp, Homo sapien
tatctgtttgaaatgctacacattc

SEQ ID NO: 5440133 - DNA, 25 bp, Homo sapien
atctgtttgaaatgctacacattct

SEQ ID NO: 5440134 - DNA, 25 bp, Homo sapien
cagattcgactttctacaattgcta

SEQ ID NO: 5440135 - DNA, 25 bp, Homo sapien
agattcgactttctacaattgctac

SEQ ID NO: 5440136 - DNA, 25 bp, Homo sapien
tagggtcagaccaattgctgaagac

SEQ ID NO: 5440137 - DNA, 25 bp, Homo sapien
tccatggcaagagaggctagggtca

SEQ ID NO: 5440138 - DNA, 25 bp, Homo sapien
taggtgaaggcaccagcagttgctg

SEQ ID NO: 5440139 - DNA, 25 bp, Homo sapien
tttgttctgagaaactcctccatgg

SEQ ID NO: 5440140 - DNA, 25 bp, Homo sapien
tgaaagtgacatggtttctgtttga

SEQ ID NO: 5440141 - DNA, 25 bp, Homo sapien
ggaactatagggctgaaagtgacat

SEQ ID NO: 5440142 - DNA, 25 bp, Homo sapien
ggtttctgtttgattgtagagttga

SEQ ID NO: 5440143 - DNA, 25 bp, Homo sapien
tagggctgaaagtgacatggtttct

SEQ ID NO: 5440144 - DNA, 25 bp, Homo sapien
gactgttctgcagaaggtgttaatt

SEQ ID NO: 5440145 - DNA, 25 bp, Homo sapien
gaaggtgttaattcacaatgattca

SEQ ID NO: 5440146 - DNA, 25 bp, Homo sapien
tctgcagaaggtgttaattcacaat

SEQ ID NO: 5440147 - DNA, 25 bp, Homo sapien
tcacaatgattcaaattaacattaa

SEQ ID NO: 5440148 - DNA, 25 bp, Homo sapien
tggcatgcgatgaatcagactgatg

SEQ ID NO: 5440149 - DNA, 25 bp, Homo sapien
gggattgtagcatcagcaactggca

SEQ ID NO: 5440150 - DNA, 25 bp, Homo sapien
tcagactgatgattccagtcctttg

SEQ ID NO: 5440151 - DNA, 25 bp, Homo sapien
tagtcattttctgtgggattgtagc

SEQ ID NO: 5440152 - DNA, 25 bp, Homo sapien
gacagagctttagttccagtaacat

SEQ ID NO: 5440153 - DNA, 25 bp, Homo sapien
ctgtattgtatgtttctggagacag

SEQ ID NO: 5440154 - DNA, 25 bp, Homo sapien
taacattactcaagaatatgcctgg

SEQ ID NO: 5440155 - DNA, 25 bp, Homo sapien
cccgctcaacaactgatgttcagga

SEQ ID NO: 5440156 - DNA, 25 bp, Homo sapien
tgatctatataggagggtggtgact

SEQ ID NO: 5440157 - DNA, 25 bp, Homo sapien
gggtgatctatataggagggtggtg

SEQ ID NO: 5440158 - DNA, 25 bp, Homo sapien
ctctttctcatgtgggggtgatcta

SEQ ID NO: 5440159 - DNA, 25 bp, Homo sapien
tctcatgtgggggtgatctatatag

SEQ ID NO: 5440160 - DNA, 25 bp, Homo sapien
ttacatcccatccttcatcaggacc

SEQ ID NO: 5440161 - DNA, 25 bp, Homo sapien
gcaggagggagcctggtctcagtgt

SEQ ID NO: 5440162 - DNA, 25 bp, Homo sapien
ggagggagcctggtctcagtgtgga

SEQ ID NO: 5440163 - DNA, 25 bp, Homo sapien
gggcaggagggagcctggtctcagt

SEQ ID NO: 5440164 - DNA, 25 bp, Homo sapien
caggagggagcctggtctcagtgtg

SEQ ID NO: 5440165 - DNA, 25 bp, Homo sapien
catagtccttttcatggtcctggtc

SEQ ID NO: 5440166 - DNA, 25 bp, Homo sapien
tatatggtctatggtcatgctgtgt

SEQ ID NO: 5440167 - DNA, 25 bp, Homo sapien
taatataaactactcttgtccacca

SEQ ID NO: 5440168 - DNA, 25 bp, Homo sapien
ttgccttcttctatatggtctatgg

SEQ ID NO: 5440169 - DNA, 25 bp, Homo sapien
tgaccagtgtagtaatacagcacct

SEQ ID NO: 5440170 - DNA, 25 bp, Homo sapien
tgaacaaccatttagcaagcctggc

SEQ ID NO: 5440171 - DNA, 25 bp, Homo sapien
gcctgtggatagtcttgaacaacca

SEQ ID NO: 5440172 - DNA, 25 bp, Homo sapien
cactatgttctccagtcttgcctca

SEQ ID NO: 5440173 - DNA, 25 bp, Homo sapien
gactttgttgtccataaacagctgc

SEQ ID NO: 5440174 - DNA, 25 bp, Homo sapien
tctctatagcacttacgcattggta

SEQ ID NO: 5440175 - DNA, 25 bp, Homo sapien
gcttatttattcttgccatgagctc

SEQ ID NO: 5440176 - DNA, 25 bp, Homo sapien
cattggtaagcacagagtggtgcct

SEQ ID NO: 5440177 - DNA, 25 bp, Homo sapien
agttacccaaacaaccccatagatg

SEQ ID NO: 5440178 - DNA, 25 bp, Homo sapien
gagcctcccgcagaaagtatgcgat

SEQ ID NO: 5440179 - DNA, 25 bp, Homo sapien
atggagtggccagaagagcctcccg

SEQ ID NO: 5440180 - DNA, 25 bp, Homo sapien
agtatgcgatagctttcctgtttag

SEQ ID NO: 5440181 - DNA, 25 bp, Homo sapien
gttagcagaacaccagctcacatgg

SEQ ID NO: 5440182 - DNA, 25 bp, Homo sapien
catggaaacagtctcctccgtgaat

SEQ ID NO: 5440183 - DNA, 25 bp, Homo sapien
gaaaacaagaggcagttcacacaat

SEQ ID NO: 5440184 - DNA, 25 bp, Homo sapien
taagataacaatccttgagtggaac

SEQ ID NO: 5440185 - DNA, 25 bp, Homo sapien
gcagaagtgtcaagagatgcagaat

SEQ ID NO: 5440186 - DNA, 25 bp, Homo sapien
aaacttaataagcatgcacgagatg

SEQ ID NO: 5440187 - DNA, 25 bp, Homo sapien
cacgagatgtatttgcagtgtatgc

SEQ ID NO: 5440188 - DNA, 25 bp, Homo sapien
taattcctcgaggtgtgaacactgg

SEQ ID NO: 5440189 - DNA, 25 bp, Homo sapien
tcaaattgatctggctctgtaatga

SEQ ID NO: 5440190 - DNA, 25 bp, Homo sapien
tcattgacctggatatgccattgat

SEQ ID NO: 5440191 - DNA, 25 bp, Homo sapien
gaatttattttctgatcagtgccac

SEQ ID NO: 5440192 - DNA, 25 bp, Homo sapien
ccttgacaataacctgcaattgaat

SEQ ID NO: 5440193 - DNA, 25 bp, Homo sapien
cattgtaaaggataagggactgatg

SEQ ID NO: 5440194 - DNA, 25 bp, Homo sapien
ttgtaaaggataagggactgatgaa

SEQ ID NO: 5440195 - DNA, 25 bp, Homo sapien
attgtaaaggataagggactgatga

SEQ ID NO: 5440196 - DNA, 25 bp, Homo sapien
aggataagggactgatgaaatgttc

SEQ ID NO: 5440197 - DNA, 25 bp, Homo sapien
tttggtgaagttagacccatctttc

SEQ ID NO: 5440198 - DNA, 25 bp, Homo sapien
cagggaaaagcatgtgatatctcga

SEQ ID NO: 5440199 - DNA, 25 bp, Homo sapien
tgatgttcactgacattcccaggga

SEQ ID NO: 5440200 - DNA, 25 bp, Homo sapien
aaataccatgactgtgtttccaggg

SEQ ID NO: 5440201 - DNA, 25 bp, Homo sapien
ggatacaacagctaacttgtttagc

SEQ ID NO: 5440202 - DNA, 25 bp, Homo sapien
gagtggatacaacagctaacttgtt

SEQ ID NO: 5440203 - DNA, 25 bp, Homo sapien
tatgagtggatacaacagctaactt

SEQ ID NO: 5440204 - DNA, 25 bp, Homo sapien
ctatgagtggatacaacagctaact

SEQ ID NO: 5440205 - DNA, 25 bp, Homo sapien
ctgttggatacacaataggagagct

SEQ ID NO: 5440206 - DNA, 25 bp, Homo sapien
ggatacacaataggagagctgccac

SEQ ID NO: 5440207 - DNA, 25 bp, Homo sapien
gatacacaataggagagctgccact

SEQ ID NO: 5440208 - DNA, 25 bp, Homo sapien
ttggatacacaataggagagctgcc

SEQ ID NO: 5440209 - DNA, 25 bp, Homo sapien
tcccacatccatgcactcctataac

SEQ ID NO: 5440210 - DNA, 25 bp, Homo sapien
cacgatggaaaacttcccacatcca

SEQ ID NO: 5440211 - DNA, 25 bp, Homo sapien
aaaacttcccacatccatgcactcc

SEQ ID NO: 5440212 - DNA, 25 bp, Homo sapien
atggaaaacttcccacatccatgca

SEQ ID NO: 5440213 - DNA, 25 bp, Homo sapien
tgcaccggtggtcaatggtgggtga

SEQ ID NO: 5440214 - DNA, 25 bp, Homo sapien
caatggtgggtgatacagtagttgt

SEQ ID NO: 5440215 - DNA, 25 bp, Homo sapien
agtagttgtatttcctgctgcatca

SEQ ID NO: 5440216 - DNA, 25 bp, Homo sapien
acagtagttgtatttcctgctgcat

SEQ ID NO: 5440217 - DNA, 25 bp, Homo sapien
ggcatcaagttccacgtgactaatg

SEQ ID NO: 5440218 - DNA, 25 bp, Homo sapien
aatagtcaaagtggtatcaagtaga

SEQ ID NO: 5440219 - DNA, 25 bp, Homo sapien
cacgtgactaatgtcaaaagggtaa

SEQ ID NO: 5440220 - DNA, 25 bp, Homo sapien
tcagtgagagaggattcaatagtca

SEQ ID NO: 5440221 - DNA, 25 bp, Homo sapien
tttactcccttgaattactacataa

SEQ ID NO: 5440222 - DNA, 25 bp, Homo sapien
gtgatatctcagatgggtgacgaga

SEQ ID NO: 5440223 - DNA, 25 bp, Homo sapien
tcattctgtctctggagcgctgcca

SEQ ID NO: 5440224 - DNA, 25 bp, Homo sapien
tattaatagctaaacacattgcaaa

SEQ ID NO: 5440225 - DNA, 25 bp, Homo sapien
tgcacctggcactcctctaggtctg

SEQ ID NO: 5440226 - DNA, 25 bp, Homo sapien
tctggagaggtttcagatactaaca

SEQ ID NO: 5440227 - DNA, 25 bp, Homo sapien
aagtccacatgccaatatctagggt

SEQ ID NO: 5440228 - DNA, 25 bp, Homo sapien
tgaggaaattttgagaagagcagcc

SEQ ID NO: 5440229 - DNA, 25 bp, Homo sapien
gtcttgatagacatatttgaagata

SEQ ID NO: 5440230 - DNA, 25 bp, Homo sapien
tatttgtaatcccttctatgtcttg

SEQ ID NO: 5440231 - DNA, 25 bp, Homo sapien
cctcggcgacagagtagaccctgac

SEQ ID NO: 5440232 - DNA, 25 bp, Homo sapien
ctcggcgacagagtagaccctgact

SEQ ID NO: 5440233 - DNA, 25 bp, Homo sapien
actaacaccaaagttagcagcggga

SEQ ID NO: 5440234 - DNA, 25 bp, Homo sapien
caccaaagttagcagcgggaaggaa

SEQ ID NO: 5440235 - DNA, 25 bp, Homo sapien
aacaccaaagttagcagcgggaagg

SEQ ID NO: 5440236 - DNA, 25 bp, Homo sapien
taacaccaaagttagcagcgggaag

SEQ ID NO: 5440237 - DNA, 25 bp, Homo sapien
tacccctgaagaagtatcaggagaa

SEQ ID NO: 5440238 - DNA, 25 bp, Homo sapien
ttgatacccctgaagaagtatcagg

SEQ ID NO: 5440239 - DNA, 25 bp, Homo sapien
aggcattattaagccattctataca

SEQ ID NO: 5440240 - DNA, 25 bp, Homo sapien
gggctgctgttgatacccctgaaga

SEQ ID NO: 5440241 - DNA, 25 bp, Homo sapien
gaattgtaatctcggcagcaatgta

SEQ ID NO: 5440242 - DNA, 25 bp, Homo sapien
catgaggaagcctaagcaaaggtga

SEQ ID NO: 5440243 - DNA, 25 bp, Homo sapien
gaggaagcctaagcaaaggtgagct

SEQ ID NO: 5440244 - DNA, 25 bp, Homo sapien
gtctgagaattgtaatctcggcagc

SEQ ID NO: 5440245 - DNA, 25 bp, Homo sapien
ccattgttttactatttggacaaca

SEQ ID NO: 5440246 - DNA, 25 bp, Homo sapien
cattgttttactatttggacaacag

SEQ ID NO: 5440247 - DNA, 25 bp, Homo sapien
cttgaccattgttttactatttgga

SEQ ID NO: 5440248 - DNA, 25 bp, Homo sapien
gaccattgttttactatttggacaa

SEQ ID NO: 5440249 - DNA, 25 bp, Homo sapien
aatgctccatggatagcataggccc

SEQ ID NO: 5440250 - DNA, 25 bp, Homo sapien
tatttttagacaagtgccagattgg

SEQ ID NO: 5440251 - DNA, 25 bp, Homo sapien
acagtttgttctaatgctccatgga

SEQ ID NO: 5440252 - DNA, 25 bp, Homo sapien
aagcagtcagtggatttaatatttt

SEQ ID NO: 5440253 - DNA, 25 bp, Homo sapien
aggatcactccctgatggaagcaga

SEQ ID NO: 5440254 - DNA, 25 bp, Homo sapien
cctcttcaggatcactccctgatgg

SEQ ID NO: 5440255 - DNA, 25 bp, Homo sapien
gactttttcccgaaggctatagata

SEQ ID NO: 5440256 - DNA, 25 bp, Homo sapien
tatagatatccatggggcctctaag

SEQ ID NO: 5440257 - DNA, 25 bp, Homo sapien
aagcagttgtgattaatgcaccata

SEQ ID NO: 5440258 - DNA, 25 bp, Homo sapien
tctctaaatcaattgtgcatccttc

SEQ ID NO: 5440259 - DNA, 25 bp, Homo sapien
gcagttgtgattaatgcaccataag

SEQ ID NO: 5440260 - DNA, 25 bp, Homo sapien
tccctctaatctcgtctctaaatca

SEQ ID NO: 5440261 - DNA, 25 bp, Homo sapien
cctttggaatgacggattgctcttt

SEQ ID NO: 5440262 - DNA, 25 bp, Homo sapien
gagaaggcacaaagatatgcacctt

SEQ ID NO: 5440263 - DNA, 25 bp, Homo sapien
cacctttggaatgacggattgctct

SEQ ID NO: 5440264 - DNA, 25 bp, Homo sapien
gatatgcacctttggaatgacggat

SEQ ID NO: 5440265 - DNA, 25 bp, Homo sapien
cacgaggttaaagcagtttggttgg

SEQ ID NO: 5440266 - DNA, 25 bp, Homo sapien
agagcgactatctcactcacagtgg

SEQ ID NO: 5440267 - DNA, 25 bp, Homo sapien
caaagcccatcatcacgaggttaaa

SEQ ID NO: 5440268 - DNA, 25 bp, Homo sapien
tgctgaagaactgccatgaacacat

SEQ ID NO: 5440269 - DNA, 25 bp, Homo sapien
tgttgttgccagatccttagtaccc

SEQ ID NO: 5440270 - DNA, 25 bp, Homo sapien
caagtgtcaggttaagcagtggtcc

SEQ ID NO: 5440271 - DNA, 25 bp, Homo sapien
cctattggtcagaaaacaggtccag

SEQ ID NO: 5440272 - DNA, 25 bp, Homo sapien
tattggaacaagagcgcactacctc

SEQ ID NO: 5440273 - DNA, 25 bp, Homo sapien
gagcagtaatgacatatccatgtta

SEQ ID NO: 5440274 - DNA, 25 bp, Homo sapien
cagttcagtagttaagtgagaaaca

SEQ ID NO: 5440275 - DNA, 25 bp, Homo sapien
gcacagtcgtgccatctgcataaag

SEQ ID NO: 5440276 - DNA, 25 bp, Homo sapien
ccatctgcataaagatgtatagagc

SEQ ID NO: 5440277 - DNA, 25 bp, Homo sapien
gtttcccagtgcttaatagcatcaa

SEQ ID NO: 5440278 - DNA, 25 bp, Homo sapien
tgtttcccagtgcttaatagcatca

SEQ ID NO: 5440279 - DNA, 25 bp, Homo sapien
tcccagtgcttaatagcatcaaatt

SEQ ID NO: 5440280 - DNA, 25 bp, Homo sapien
cagtgcttaatagcatcaaatttga

SEQ ID NO: 5440281 - DNA, 25 bp, Homo sapien
ttccaaaagccaacaaaggagaagc

SEQ ID NO: 5440282 - DNA, 25 bp, Homo sapien
tcatcccactttccaaaagccaaca

SEQ ID NO: 5440283 - DNA, 25 bp, Homo sapien
caaaagccaacaaaggagaagcggg

SEQ ID NO: 5440284 - DNA, 25 bp, Homo sapien
cactttccaaaagccaacaaaggag

SEQ ID NO: 5440285 - DNA, 25 bp, Homo sapien
ctttatgaaccttctctccacttaa

SEQ ID NO: 5440286 - DNA, 25 bp, Homo sapien
ttatgaaccttctctccacttaaag

SEQ ID NO: 5440287 - DNA, 25 bp, Homo sapien
cacttaaagccttggtgacgcccat

SEQ ID NO: 5440288 - DNA, 25 bp, Homo sapien
tctccacttaaagccttggtgacgc

SEQ ID NO: 5440289 - DNA, 25 bp, Homo sapien
ttcaaactctggagatgcccttcca

SEQ ID NO: 5440290 - DNA, 25 bp, Homo sapien
aaaactattcaaactctggagatgc

SEQ ID NO: 5440291 - DNA, 25 bp, Homo sapien
aaagtgaatttatcacagctcttaa

SEQ ID NO: 5440292 - DNA, 25 bp, Homo sapien
tattcaaactctggagatgcccttc

SEQ ID NO: 5440293 - DNA, 25 bp, Homo sapien
attacgatactttatatgtgttgac

SEQ ID NO: 5440294 - DNA, 25 bp, Homo sapien
caacatttattacgatactttatat

SEQ ID NO: 5440295 - DNA, 25 bp, Homo sapien
actttatatgtgttgacttttccca

SEQ ID NO: 5440296 - DNA, 25 bp, Homo sapien
gacttttcccaattgctgctctctt

SEQ ID NO: 5440297 - DNA, 25 bp, Homo sapien
attacccagttcatggtgaagagcc

SEQ ID NO: 5440298 - DNA, 25 bp, Homo sapien
atttttattacccagttcatggtga

SEQ ID NO: 5440299 - DNA, 25 bp, Homo sapien
ttattacccagttcatggtgaagag

SEQ ID NO: 5440300 - DNA, 25 bp, Homo sapien
catatttttattacccagttcatgg

SEQ ID NO: 5440301 - DNA, 25 bp, Homo sapien
gctgccaatgccaggtagcaactga

SEQ ID NO: 5440302 - DNA, 25 bp, Homo sapien
gggcgatacccacaaatatgaaata

SEQ ID NO: 5440303 - DNA, 25 bp, Homo sapien
taggtttagctgcaggggcgatacc

SEQ ID NO: 5440304 - DNA, 25 bp, Homo sapien
ttcctgtgcagggacaaccatgggc

SEQ ID NO: 5440305 - DNA, 25 bp, Homo sapien
tttgagaatttcagcaatttcccca

SEQ ID NO: 5440306 - DNA, 25 bp, Homo sapien
taaccaaatttgattggacttgtgc

SEQ ID NO: 5440307 - DNA, 25 bp, Homo sapien
tccagtgaagactaattggtgtgtc

SEQ ID NO: 5440308 - DNA, 25 bp, Homo sapien
gcagaagttagccacagtttttcag

SEQ ID NO: 5440309 - DNA, 25 bp, Homo sapien
tctgtcgtctgctaaccaaatttga

SEQ ID NO: 5440310 - DNA, 25 bp, Homo sapien
tatcacccagtaggcatggcagaac

SEQ ID NO: 5440311 - DNA, 25 bp, Homo sapien
caaatttgtacgtcatatggatgga

SEQ ID NO: 5440312 - DNA, 25 bp, Homo sapien
cagctggtgttattggttgatctac

SEQ ID NO: 5440313 - DNA, 25 bp, Homo sapien
tagaggaacctttgcaatgctgtag

SEQ ID NO: 5440314 - DNA, 25 bp, Homo sapien
ttgttcaaacaagcagcattttgaa

SEQ ID NO: 5440315 - DNA, 25 bp, Homo sapien
ttccttgttcaaacaagcagcattt

SEQ ID NO: 5440316 - DNA, 25 bp, Homo sapien
attccttgttcaaacaagcagcatt

SEQ ID NO: 5440317 - DNA, 25 bp, Homo sapien
ccttgttcaaacaagcagcattttg

SEQ ID NO: 5440318 - DNA, 25 bp, Homo sapien
ctgattctctaaatcaagttttagt

SEQ ID NO: 5440319 - DNA, 25 bp, Homo sapien
tgattctctaaatcaagttttagtg

SEQ ID NO: 5440320 - DNA, 25 bp, Homo sapien
tgttgtttgctcatcctgataccag

SEQ ID NO: 5440321 - DNA, 25 bp, Homo sapien
tataggaaagtttctggcctggaag

SEQ ID NO: 5440322 - DNA, 25 bp, Homo sapien
cactactgttagaggtccgctactg

SEQ ID NO: 5440323 - DNA, 25 bp, Homo sapien
gaagtttatcatggagagcaggatg

SEQ ID NO: 5440324 - DNA, 25 bp, Homo sapien
ctgtaacaatcattctgaaggccat

SEQ ID NO: 5440325 - DNA, 25 bp, Homo sapien
tccatatccttccagaaatccttca

SEQ ID NO: 5440326 - DNA, 25 bp, Homo sapien
ttccatatccttccagaaatccttc

SEQ ID NO: 5440327 - DNA, 25 bp, Homo sapien
ccatatccttccagaaatccttcat

SEQ ID NO: 5440328 - DNA, 25 bp, Homo sapien
cttccatatccttccagaaatcctt

SEQ ID NO: 5440329 - DNA, 25 bp, Homo sapien
gagcagatgctcatccccaggtttg

SEQ ID NO: 5440330 - DNA, 25 bp, Homo sapien
tgtgaaggagcgaaggtaaacaacc

SEQ ID NO: 5440331 - DNA, 25 bp, Homo sapien
ccaggtttggctcatatgggaattg

SEQ ID NO: 5440332 - DNA, 25 bp, Homo sapien
gcattgtggtaatatcttcagagct

SEQ ID NO: 5440333 - DNA, 25 bp, Homo sapien
ttcatgactttccggtgctgcagtg

SEQ ID NO: 5440334 - DNA, 25 bp, Homo sapien
catgactttccggtgctgcagtgta

SEQ ID NO: 5440335 - DNA, 25 bp, Homo sapien
tttccggtgctgcagtgtattgttt

SEQ ID NO: 5440336 - DNA, 25 bp, Homo sapien
gactttccggtgctgcagtgtattg

SEQ ID NO: 5440337 - DNA, 25 bp, Homo sapien
ttcatggttttacaacctccaggac

SEQ ID NO: 5440338 - DNA, 25 bp, Homo sapien
agctgtagatacagggaataatatc

SEQ ID NO: 5440339 - DNA, 25 bp, Homo sapien
catggttttacaacctccaggacca

SEQ ID NO: 5440340 - DNA, 25 bp, Homo sapien
tccaggaccatgtaccacctctaag

SEQ ID NO: 5440341 - DNA, 25 bp, Homo sapien
gatttgtctagctgtttacacacaa

SEQ ID NO: 5440342 - DNA, 25 bp, Homo sapien
cacacaaatacttgcatgacacctc

SEQ ID NO: 5440343 - DNA, 25 bp, Homo sapien
acacaaatacttgcatgacacctcc

SEQ ID NO: 5440344 - DNA, 25 bp, Homo sapien
tagtgacagcaatcacggaagcaaa

SEQ ID NO: 5440345 - DNA, 25 bp, Homo sapien
tatgccacgggacattcattaccaa

SEQ ID NO: 5440346 - DNA, 25 bp, Homo sapien
gagagcccctaattccatgctacta

SEQ ID NO: 5440347 - DNA, 25 bp, Homo sapien
taccaatcccattgtagtgacagca

SEQ ID NO: 5440348 - DNA, 25 bp, Homo sapien
tggcttgaaatccttaacgtaaagc

SEQ ID NO: 5440349 - DNA, 25 bp, Homo sapien
tggcaggtatttcttacagcccatg

SEQ ID NO: 5440350 - DNA, 25 bp, Homo sapien
tgagatcaattctagaactgttaac

SEQ ID NO: 5440351 - DNA, 25 bp, Homo sapien
tccaatcatagaagagtatttgaga

SEQ ID NO: 5440352 - DNA, 25 bp, Homo sapien
gaggctggagccactaatttcccta

SEQ ID NO: 5440353 - DNA, 25 bp, Homo sapien
gaaggccgcccctgttaagaagtca

SEQ ID NO: 5440354 - DNA, 25 bp, Homo sapien
taaacaagcatgaagcctgatggtg

SEQ ID NO: 5440355 - DNA, 25 bp, Homo sapien
gtgattacaggtctaaagacttcct

SEQ ID NO: 5440356 - DNA, 25 bp, Homo sapien
cgaagaataggctcacggaccagcg

SEQ ID NO: 5440357 - DNA, 25 bp, Homo sapien
ggtcccaggtgaattgctttttcga

SEQ ID NO: 5440358 - DNA, 25 bp, Homo sapien
gctcacggaccagcgatgcaaactt

SEQ ID NO: 5440359 - DNA, 25 bp, Homo sapien
ccaggtgaattgctttttcgaagaa

SEQ ID NO: 5440360 - DNA, 25 bp, Homo sapien
atcactggttgcattatcactctct

SEQ ID NO: 5440361 - DNA, 25 bp, Homo sapien
catcactggttgcattatcactctc

SEQ ID NO: 5440362 - DNA, 25 bp, Homo sapien
gttcccatcactggttgcattatca

SEQ ID NO: 5440363 - DNA, 25 bp, Homo sapien
tcactggttgcattatcactctctc

SEQ ID NO: 5440364 - DNA, 25 bp, Homo sapien
tcatcaacttcataaccattgttgt

SEQ ID NO: 5440365 - DNA, 25 bp, Homo sapien
tcaacttcataaccattgttgtact

SEQ ID NO: 5440366 - DNA, 25 bp, Homo sapien
cttcataaccattgttgtactcatt

SEQ ID NO: 5440367 - DNA, 25 bp, Homo sapien
cagtgttaccataaattctgtggca

SEQ ID NO: 5440368 - DNA, 25 bp, Homo sapien
tccaaaattttgccctgtagttgct

SEQ ID NO: 5440369 - DNA, 25 bp, Homo sapien
cttcctccaaaattttgccctgtag

SEQ ID NO: 5440370 - DNA, 25 bp, Homo sapien
caaaattttgccctgtagttgcttt

SEQ ID NO: 5440371 - DNA, 25 bp, Homo sapien
cctccaaaattttgccctgtagttg

SEQ ID NO: 5440372 - DNA, 25 bp, Homo sapien
ctggcatatacggaacgattttggc

SEQ ID NO: 5440373 - DNA, 25 bp, Homo sapien
gaacgattttggcagctagacccca

SEQ ID NO: 5440374 - DNA, 25 bp, Homo sapien
tacggaacgattttggcagctagac

SEQ ID NO: 5440375 - DNA, 25 bp, Homo sapien
ttttggcagctagaccccagatggc

SEQ ID NO: 5440376 - DNA, 25 bp, Homo sapien
tctgacacttcagtcatcctaagag

SEQ ID NO: 5440377 - DNA, 25 bp, Homo sapien
tctacagcagtgtacctgggatgtt

SEQ ID NO: 5440378 - DNA, 25 bp, Homo sapien
tgctaaataaaattgcgtgcaagat

SEQ ID NO: 5440379 - DNA, 25 bp, Homo sapien
gatgtttttgggcaacactcctcca

SEQ ID NO: 5440380 - DNA, 25 bp, Homo sapien
aggagtctacttctgctctataagc

SEQ ID NO: 5440381 - DNA, 25 bp, Homo sapien
tccaaggtggaactgagcaaagcag

SEQ ID NO: 5440382 - DNA, 25 bp, Homo sapien
ttaaatgcagtgcaagccatccaag

SEQ ID NO: 5440383 - DNA, 25 bp, Homo sapien
gtcaaaggacaccagctgaacgcgt

SEQ ID NO: 5440384 - DNA, 25 bp, Homo sapien
tctcatctgccccttatttgctaca

SEQ ID NO: 5440385 - DNA, 25 bp, Homo sapien
tgctacatctgcactcatatcttcc

SEQ ID NO: 5440386 - DNA, 25 bp, Homo sapien
tcaaaccatacagggcatgccatat

SEQ ID NO: 5440387 - DNA, 25 bp, Homo sapien
catacagggcatgccatatttggga

SEQ ID NO: 5440388 - DNA, 25 bp, Homo sapien
tgctgaggatattcctcgttccatg

SEQ ID NO: 5440389 - DNA, 25 bp, Homo sapien
tattcctcgttccatgctgtccttg

SEQ ID NO: 5440390 - DNA, 25 bp, Homo sapien
tcctctggtgggattcaccaccact

SEQ ID NO: 5440391 - DNA, 25 bp, Homo sapien
tgtgctcaatccttaaatctgctcc

SEQ ID NO: 5440392 - DNA, 25 bp, Homo sapien
tctcaagcatgatagtctcccttgt

SEQ ID NO: 5440393 - DNA, 25 bp, Homo sapien
aattctcaagcatgatagtctccct

SEQ ID NO: 5440394 - DNA, 25 bp, Homo sapien
ttctcaagcatgatagtctcccttg

SEQ ID NO: 5440395 - DNA, 25 bp, Homo sapien
ctcaagcatgatagtctcccttgtg

SEQ ID NO: 5440396 - DNA, 25 bp, Homo sapien
ggagcacaccctatcgtgtcataag

SEQ ID NO: 5440397 - DNA, 25 bp, Homo sapien
cataagatgatctccaacctggtct

SEQ ID NO: 5440398 - DNA, 25 bp, Homo sapien
ggctagtagcaaagcccttgatcaa

SEQ ID NO: 5440399 - DNA, 25 bp, Homo sapien
aaataccctcttggagcacacccta

SEQ ID NO: 5440400 - DNA, 25 bp, Homo sapien
ttgtgaacatttctatggaagctca

SEQ ID NO: 5440401 - DNA, 25 bp, Homo sapien
tccctcctcgcacatttattgttac

SEQ ID NO: 5440402 - DNA, 25 bp, Homo sapien
tcaaccacccaacataaagcctagt

SEQ ID NO: 5440403 - DNA, 25 bp, Homo sapien
gattcctgcggtactcgactcctaa

SEQ ID NO: 5440404 - DNA, 25 bp, Homo sapien
acacgggcttgggaaggccttccat

SEQ ID NO: 5440405 - DNA, 25 bp, Homo sapien
taagctggctctgtcagtcagaaga

SEQ ID NO: 5440406 - DNA, 25 bp, Homo sapien
taggagctgacaaaccagacacggg

SEQ ID NO: 5440407 - DNA, 25 bp, Homo sapien
tgacgatcgacgcagagtaagctgg

SEQ ID NO: 5440408 - DNA, 25 bp, Homo sapien
caaaataagcagagattgacagggc

SEQ ID NO: 5440409 - DNA, 25 bp, Homo sapien
aaaataagcagagattgacagggca

SEQ ID NO: 5440410 - DNA, 25 bp, Homo sapien
acaaaataagcagagattgacaggg

SEQ ID NO: 5440411 - DNA, 25 bp, Homo sapien
tcagaaatttccagtctccatccct

SEQ ID NO: 5440412 - DNA, 25 bp, Homo sapien
gctgttgataatacaggataactat

SEQ ID NO: 5440413 - DNA, 25 bp, Homo sapien
ggatcatttacccatggtttaagag

SEQ ID NO: 5440414 - DNA, 25 bp, Homo sapien
taagacacaagttttgctgatatgc

SEQ ID NO: 5440415 - DNA, 25 bp, Homo sapien
gagcactcagataagtccacaaatg

SEQ ID NO: 5440416 - DNA, 25 bp, Homo sapien
tcggtgcccttcattgacagcacgc

SEQ ID NO: 5440417 - DNA, 25 bp, Homo sapien
tatcggtgcccttcattgacagcac

SEQ ID NO: 5440418 - DNA, 25 bp, Homo sapien
tgtatcggtgcccttcattgacagc

SEQ ID NO: 5440419 - DNA, 25 bp, Homo sapien
gtgcccttcattgacagcacgctgg

SEQ ID NO: 5440420 - DNA, 25 bp, Homo sapien
tcaagcacgtaattcttctctgcat

SEQ ID NO: 5440421 - DNA, 25 bp, Homo sapien
ttcagcaacaactcaagcacgtaat

SEQ ID NO: 5440422 - DNA, 25 bp, Homo sapien
gttgccggacatctgctcatcccag

SEQ ID NO: 5440423 - DNA, 25 bp, Homo sapien
ctctgcatggaagaagttgccggac

SEQ ID NO: 5440424 - DNA, 25 bp, Homo sapien
cactccatagtaaatgaatattgaa

SEQ ID NO: 5440425 - DNA, 25 bp, Homo sapien
gatctttggctaaagagggctatga

SEQ ID NO: 5440426 - DNA, 25 bp, Homo sapien
aagagggctatgaatatgtaaaagc

SEQ ID NO: 5440427 - DNA, 25 bp, Homo sapien
aagatctttggctaaagagggctat

SEQ ID NO: 5440428 - DNA, 25 bp, Homo sapien
ttcctgacacgcagtcatttgtggt

SEQ ID NO: 5440429 - DNA, 25 bp, Homo sapien
catggacatatgtgctccaaaagtt

SEQ ID NO: 5440430 - DNA, 25 bp, Homo sapien
tccaaaagtttcctgacacgcagtc

SEQ ID NO: 5440431 - DNA, 25 bp, Homo sapien
agacttttattatgtccattaacca

SEQ ID NO: 5440432 - DNA, 25 bp, Homo sapien
aaggcgggaaattgtgctttgtcaa

SEQ ID NO: 5440433 - DNA, 25 bp, Homo sapien
cagattcacttagaaccactgcaaa

SEQ ID NO: 5440434 - DNA, 25 bp, Homo sapien
cattgtaattcgcaaagatctggca

SEQ ID NO: 5440435 - DNA, 25 bp, Homo sapien
tgtcaagaggcactacaagagaaag

SEQ ID NO: 5440436 - DNA, 25 bp, Homo sapien
gatagatgaaccaccttgtaagagc

SEQ ID NO: 5440437 - DNA, 25 bp, Homo sapien
tacgtgtacagagtgaccttcagca

SEQ ID NO: 5440438 - DNA, 25 bp, Homo sapien
aagcatggattacgttcactaggcc

SEQ ID NO: 5440439 - DNA, 25 bp, Homo sapien
aagataccaaatgcggatgccatcg

SEQ ID NO: 5440440 - DNA, 25 bp, Homo sapien
agcccaaagtgaagcagaaatcaga

SEQ ID NO: 5440441 - DNA, 25 bp, Homo sapien
gcccaaagtgaagcagaaatcagaa

SEQ ID NO: 5440442 - DNA, 25 bp, Homo sapien
aagcccaaagtgaagcagaaatcag

SEQ ID NO: 5440443 - DNA, 25 bp, Homo sapien
gatcaagacttgcactagtggacaa

SEQ ID NO: 5440444 - DNA, 25 bp, Homo sapien
caaacaacttttaaacgagcaggct

SEQ ID NO: 5440445 - DNA, 25 bp, Homo sapien
gagagggagcccctttaactgggca

SEQ ID NO: 5440446 - DNA, 25 bp, Homo sapien
ttcagatttgaagccacaagcaggt

SEQ ID NO: 5440447 - DNA, 25 bp, Homo sapien
tccttggaccgatgtattgctttgc

SEQ ID NO: 5440448 - DNA, 25 bp, Homo sapien
aaagccaaagcgactcactgtgaag

SEQ ID NO: 5440449 - DNA, 25 bp, Homo sapien
gagcaggccgcagtttatcaaaaag

SEQ ID NO: 5440450 - DNA, 25 bp, Homo sapien
caaaaattacccattaagctgccag

SEQ ID NO: 5440451 - DNA, 25 bp, Homo sapien
tctggtcaatttcggcaggtgctgc

SEQ ID NO: 5440452 - DNA, 25 bp, Homo sapien
tggtctgggtacaggcctacatcat

SEQ ID NO: 5440453 - DNA, 25 bp, Homo sapien
tggtgcttcacgtggtaccgctggt

SEQ ID NO: 5440454 - DNA, 25 bp, Homo sapien
taaggagatctttgtgcgagaccgg

SEQ ID NO: 5440455 - DNA, 25 bp, Homo sapien
agaaaaaaatgaacactggactcat

SEQ ID NO: 5440456 - DNA, 25 bp, Homo sapien
gagaaaaaaatgaacactggactca

SEQ ID NO: 5440457 - DNA, 25 bp, Homo sapien
gagagaaaaaaatgaacactggact

SEQ ID NO: 5440458 - DNA, 25 bp, Homo sapien
aagagagaaaaaaatgaacactgga

SEQ ID NO: 5440459 - DNA, 25 bp, Homo sapien
ggtcaggtccactttcatggcagaa

SEQ ID NO: 5440460 - DNA, 25 bp, Homo sapien
tttcatggcagaaggatatttgctc

SEQ ID NO: 5440461 - DNA, 25 bp, Homo sapien
ccactttcatggcagaaggatattt

SEQ ID NO: 5440462 - DNA, 25 bp, Homo sapien
ggtccactttcatggcagaaggata

SEQ ID NO: 5440463 - DNA, 25 bp, Homo sapien
cggccagagcatggagtgcttggca

SEQ ID NO: 5440464 - DNA, 25 bp, Homo sapien
cacggccagagcatggagtgcttgg

SEQ ID NO: 5440465 - DNA, 25 bp, Homo sapien
ggccagagcatggagtgcttggcat

SEQ ID NO: 5440466 - DNA, 25 bp, Homo sapien
acggccagagcatggagtgcttggc

SEQ ID NO: 5440467 - DNA, 25 bp, Homo sapien
cattgtatacacgtggtaaggagaa

SEQ ID NO: 5440468 - DNA, 25 bp, Homo sapien
aaattcctagggcactgtataacct

SEQ ID NO: 5440469 - DNA, 25 bp, Homo sapien
taaagaagctatcactaattacagg

SEQ ID NO: 5440470 - DNA, 25 bp, Homo sapien
tctagtgtgtatctgagagtaggga

SEQ ID NO: 5440471 - DNA, 25 bp, Homo sapien
acagagccctgatcaggtggggtac

SEQ ID NO: 5440472 - DNA, 25 bp, Homo sapien
tgatcaggtggggtacggcggtcgg

SEQ ID NO: 5440473 - DNA, 25 bp, Homo sapien
agccctgatcaggtggggtacggcg

SEQ ID NO: 5440474 - DNA, 25 bp, Homo sapien
cacagagccctgatcaggtggggta

SEQ ID NO: 5440475 - DNA, 25 bp, Homo sapien
gaagctggaccacgtgttgcatgcg

SEQ ID NO: 5440476 - DNA, 25 bp, Homo sapien
gggcttgggttctccttccagcgga

SEQ ID NO: 5440477 - DNA, 25 bp, Homo sapien
tcgctgtggtgatgccttgactcct

SEQ ID NO: 5440478 - DNA, 25 bp, Homo sapien
tacagaggttttcccagagggtgcg

SEQ ID NO: 5440479 - DNA, 25 bp, Homo sapien
gagaggaggtcgcttgcattaacct

SEQ ID NO: 5440480 - DNA, 25 bp, Homo sapien
tagagagaggaggtcgcttgcatta

SEQ ID NO: 5440481 - DNA, 25 bp, Homo sapien
tgcattaacctgcagagtgtagagg

SEQ ID NO: 5440482 - DNA, 25 bp, Homo sapien
gggccttgactgcggtccagtgcca

SEQ ID NO: 5440483 - DNA, 25 bp, Homo sapien
cttgtaagccaatgaaagttcctga

SEQ ID NO: 5440484 - DNA, 25 bp, Homo sapien
aacaaattctatatcatcacttgta

SEQ ID NO: 5440485 - DNA, 25 bp, Homo sapien
ccccatataatatcataagccattg

SEQ ID NO: 5440486 - DNA, 25 bp, Homo sapien
gacacgcattataaaaaccccatat

SEQ ID NO: 5440487 - DNA, 25 bp, Homo sapien
tttctccttcaactgccggctgcag

SEQ ID NO: 5440488 - DNA, 25 bp, Homo sapien
cgcggcctccatgttaataacctga

SEQ ID NO: 5440489 - DNA, 25 bp, Homo sapien
ctgcagcaccgcgaagagacaaaaa

SEQ ID NO: 5440490 - DNA, 25 bp, Homo sapien
atcagccaagacagcaacaccagct

SEQ ID NO: 5440491 - DNA, 25 bp, Homo sapien
gcattgtgggaagccgcagcttgaa

SEQ ID NO: 5440492 - DNA, 25 bp, Homo sapien
cgcagcttgaaagaagacaggtgac

SEQ ID NO: 5440493 - DNA, 25 bp, Homo sapien
ggtgacagctgagtggtatctccac

SEQ ID NO: 5440494 - DNA, 25 bp, Homo sapien
acactgggaatgtctcgcacaacat

SEQ ID NO: 5440495 - DNA, 25 bp, Homo sapien
ttatatgcgctgttataatctgcac

SEQ ID NO: 5440496 - DNA, 25 bp, Homo sapien
gatttatatgcgctgttataatctg

SEQ ID NO: 5440497 - DNA, 25 bp, Homo sapien
cgcatttgatttatatgcgctgtta

SEQ ID NO: 5440498 - DNA, 25 bp, Homo sapien
tgccgcatttgatttatatgcgctg

SEQ ID NO: 5440499 - DNA, 25 bp, Homo sapien
cagctcttgtttcttcgtcaccgaa

SEQ ID NO: 5440500 - DNA, 25 bp, Homo sapien
tgaagtgtgaaatgagccagataat

SEQ ID NO: 5440501 - DNA, 25 bp, Homo sapien
gatggttgagactcttctgaagtgt

SEQ ID NO: 5440502 - DNA, 25 bp, Homo sapien
taaatggaagcacataaagtcccca

SEQ ID NO: 5440503 - DNA, 25 bp, Homo sapien
tacaatgggatcacaattatgcctc

SEQ ID NO: 5440504 - DNA, 25 bp, Homo sapien
cctgactttagtggcagttcctgca

SEQ ID NO: 5440505 - DNA, 25 bp, Homo sapien
gaggattggcagaggtctttaaacc

SEQ ID NO: 5440506 - DNA, 25 bp, Homo sapien
cctgcaagggcataggtagcatgga

SEQ ID NO: 5440507 - DNA, 25 bp, Homo sapien
aatgtggggcattcgctccctggtg

SEQ ID NO: 5440508 - DNA, 25 bp, Homo sapien
ttttgaggaacaaggcattcctgtg

SEQ ID NO: 5440509 - DNA, 25 bp, Homo sapien
ctgtggccacgcagacagaatgtgg

SEQ ID NO: 5440510 - DNA, 25 bp, Homo sapien
cattcctgtggccacgcagacagaa

SEQ ID NO: 5440511 - DNA, 25 bp, Homo sapien
ttggatctcgtcataaatggcagct

SEQ ID NO: 5440512 - DNA, 25 bp, Homo sapien
cagctgtgatgttgatgttggcgcc

SEQ ID NO: 5440513 - DNA, 25 bp, Homo sapien
cagggcttgagacaccttggccctt

SEQ ID NO: 5440514 - DNA, 25 bp, Homo sapien
ttggcgccgtccaccttaataggga

SEQ ID NO: 5440515 - DNA, 25 bp, Homo sapien
tggaggccgaggagaccatgctcac

SEQ ID NO: 5440516 - DNA, 25 bp, Homo sapien
gctgggactgctggaggccgaggag

SEQ ID NO: 5440517 - DNA, 25 bp, Homo sapien
tgaggggttcgggaggagctgggac

SEQ ID NO: 5440518 - DNA, 25 bp, Homo sapien
tgctggaggccgaggagaccatgct

SEQ ID NO: 5440519 - DNA, 25 bp, Homo sapien
tctgcatggccctcaggtttactag

SEQ ID NO: 5440520 - DNA, 25 bp, Homo sapien
cgagggtcttcttccttacgcagaa

SEQ ID NO: 5440521 - DNA, 25 bp, Homo sapien
ttgggattcatgctccgctccctct

SEQ ID NO: 5440522 - DNA, 25 bp, Homo sapien
tcatcctggtagatgcgatctcgct

SEQ ID NO: 5440523 - DNA, 25 bp, Homo sapien
ggccccggatcagtaccatcataat

SEQ ID NO: 5440524 - DNA, 25 bp, Homo sapien
agtttttctcaacatgcggccccgg

SEQ ID NO: 5440525 - DNA, 25 bp, Homo sapien
tgtaaggtccatctacagcgtgtgt

SEQ ID NO: 5440526 - DNA, 25 bp, Homo sapien
cactagatcgttagctccccgagat

SEQ ID NO: 5440527 - DNA, 25 bp, Homo sapien
gtcctgagatccataaagcttttta

SEQ ID NO: 5440528 - DNA, 25 bp, Homo sapien
tatgtcctgagatccataaagcttt

SEQ ID NO: 5440529 - DNA, 25 bp, Homo sapien
tgtcctgagatccataaagcttttt

SEQ ID NO: 5440530 - DNA, 25 bp, Homo sapien
ttctatgtcctgagatccataaagc

SEQ ID NO: 5440531 - DNA, 25 bp, Homo sapien
taaatgcattggacgctggcccaga

SEQ ID NO: 5440532 - DNA, 25 bp, Homo sapien
tgtgtgcggttgaatgccactcttg

SEQ ID NO: 5440533 - DNA, 25 bp, Homo sapien
cttccacggaagagttggttggctc

SEQ ID NO: 5440534 - DNA, 25 bp, Homo sapien
tcatgatgggctgtaatgcgggcac

SEQ ID NO: 5440535 - DNA, 25 bp, Homo sapien
aagagataaaagtgataattaatca

SEQ ID NO: 5440536 - DNA, 25 bp, Homo sapien
taagagataaaagtgataattaatc

SEQ ID NO: 5440537 - DNA, 25 bp, Homo sapien
agagataaaagtgataattaatcat

SEQ ID NO: 5440538 - DNA, 25 bp, Homo sapien
cccagagttctaagaggatcttgca

SEQ ID NO: 5440539 - DNA, 25 bp, Homo sapien
gggaccttccagataaacagttcag

SEQ ID NO: 5440540 - DNA, 25 bp, Homo sapien
ctgtgagacttttggtagctattcc

SEQ ID NO: 5440541 - DNA, 25 bp, Homo sapien
gattccttcaagtttcctgggactg

SEQ ID NO: 5440542 - DNA, 25 bp, Homo sapien
tgaaggccattcatcagtcaggcaa

SEQ ID NO: 5440543 - DNA, 25 bp, Homo sapien
cactgtgtttaaggcctcatgctca

SEQ ID NO: 5440544 - DNA, 25 bp, Homo sapien
agattcatgtctattcccttgggag

SEQ ID NO: 5440545 - DNA, 25 bp, Homo sapien
taaataactgtctcccattaggcaa

SEQ ID NO: 5440546 - DNA, 25 bp, Homo sapien
gagtcactctgtcactcaagactgg

SEQ ID NO: 5440547 - DNA, 25 bp, Homo sapien
tgggattacagctaactttttgtgt

SEQ ID NO: 5440548 - DNA, 25 bp, Homo sapien
gctgggattacagctaactttttgt

SEQ ID NO: 5440549 - DNA, 25 bp, Homo sapien
cagagtcactctgtcactcaagact

SEQ ID NO: 5440550 - DNA, 25 bp, Homo sapien
caccattatacctgtcatgaattct

SEQ ID NO: 5440551 - DNA, 25 bp, Homo sapien
accacttgaactgttttatggcagc

SEQ ID NO: 5440552 - DNA, 25 bp, Homo sapien
ttgatgaatcaacaccacttgaact

SEQ ID NO: 5440553 - DNA, 25 bp, Homo sapien
ccactcccttggttgatgaatcaac

SEQ ID NO: 5440554 - DNA, 25 bp, Homo sapien
gttgctgacacattggcataatatg

SEQ ID NO: 5440555 - DNA, 25 bp, Homo sapien
tggcacttggttgctgacacattgg

SEQ ID NO: 5440556 - DNA, 25 bp, Homo sapien
cattggcataatatgtgctatttac

SEQ ID NO: 5440557 - DNA, 25 bp, Homo sapien
aactcctggcacttggttgctgaca

SEQ ID NO: 5440558 - DNA, 25 bp, Homo sapien
aagagcactttataacctgcactaa

SEQ ID NO: 5440559 - DNA, 25 bp, Homo sapien
cgattacctgaatttaccatccctt

SEQ ID NO: 5440560 - DNA, 25 bp, Homo sapien
ctttttagggacaagaaagagcact

SEQ ID NO: 5440561 - DNA, 25 bp, Homo sapien
tattaacatcaaacacgattacctg

SEQ ID NO: 5440562 - DNA, 25 bp, Homo sapien
caacaagcttacacagccaagaatc

SEQ ID NO: 5440563 - DNA, 25 bp, Homo sapien
gtttctgttccgcttccaactgcaa

SEQ ID NO: 5440564 - DNA, 25 bp, Homo sapien
aagaatctgagaacatccgtgctac

SEQ ID NO: 5440565 - DNA, 25 bp, Homo sapien
gaatctgagaacatccgtgctacac

SEQ ID NO: 5440566 - DNA, 25 bp, Homo sapien
tgctctggacacataccacaaggtc

SEQ ID NO: 5440567 - DNA, 25 bp, Homo sapien
taggcttcactagaatgctctggac

SEQ ID NO: 5440568 - DNA, 25 bp, Homo sapien
tctctaaaggtcctgggacaccgag

SEQ ID NO: 5440569 - DNA, 25 bp, Homo sapien
taagatacagttgatgcagaatggg

SEQ ID NO: 5440570 - DNA, 25 bp, Homo sapien
gtgtttggaatatagaatgagtgca

SEQ ID NO: 5440571 - DNA, 25 bp, Homo sapien
catgtgtttggaatatagaatgagt

SEQ ID NO: 5440572 - DNA, 25 bp, Homo sapien
atcttgatggtctttatgatatgga

SEQ ID NO: 5440573 - DNA, 25 bp, Homo sapien
gggaagaaggtagctctagtgaaat

SEQ ID NO: 5440574 - DNA, 25 bp, Homo sapien
tctttggctaatgtgctctggttca

SEQ ID NO: 5440575 - DNA, 25 bp, Homo sapien
tcctttaaggcattgcggactgtgg

SEQ ID NO: 5440576 - DNA, 25 bp, Homo sapien
cattgcggactgtggcatggttcca

SEQ ID NO: 5440577 - DNA, 25 bp, Homo sapien
tgctccgcaggcaagtcttccaact

SEQ ID NO: 5440578 - DNA, 25 bp, Homo sapien
gcaataatgaacaatacacaaacct

SEQ ID NO: 5440579 - DNA, 25 bp, Homo sapien
atgaacaatacacaaacctcaacca

SEQ ID NO: 5440580 - DNA, 25 bp, Homo sapien
caaacctcaaccagggtccctgact

SEQ ID NO: 5440581 - DNA, 25 bp, Homo sapien
gaacaatacacaaacctcaaccagg

SEQ ID NO: 5440582 - DNA, 25 bp, Homo sapien
taattggattttcaacgtcacaaca

SEQ ID NO: 5440583 - DNA, 25 bp, Homo sapien
acgtcacaacatgatagacatcttg

SEQ ID NO: 5440584 - DNA, 25 bp, Homo sapien
caacatgatagacatcttgtagcat

SEQ ID NO: 5440585 - DNA, 25 bp, Homo sapien
gattttcaacgtcacaacatgatag

SEQ ID NO: 5440586 - DNA, 25 bp, Homo sapien
cactgtcgcgtcgggtgcatctgtc

SEQ ID NO: 5440587 - DNA, 25 bp, Homo sapien
tgtcgcgtcgggtgcatctgtcaca

SEQ ID NO: 5440588 - DNA, 25 bp, Homo sapien
gtcgcgtcgggtgcatctgtcacat

SEQ ID NO: 5440589 - DNA, 25 bp, Homo sapien
ctgtcgcgtcgggtgcatctgtcac

SEQ ID NO: 5440590 - DNA, 25 bp, Homo sapien
agggttccaccttcccagcttgatt

SEQ ID NO: 5440591 - DNA, 25 bp, Homo sapien
ttccaccttcccagcttgattattc

SEQ ID NO: 5440592 - DNA, 25 bp, Homo sapien
gagagggttccaccttcccagcttg

SEQ ID NO: 5440593 - DNA, 25 bp, Homo sapien
gttccaccttcccagcttgattatt

SEQ ID NO: 5440594 - DNA, 25 bp, Homo sapien
cttgatgagccggaagaagacttgt

SEQ ID NO: 5440595 - DNA, 25 bp, Homo sapien
ttgatgagccggaagaagacttgtt

SEQ ID NO: 5440596 - DNA, 25 bp, Homo sapien
ccttgatgagccggaagaagacttg

SEQ ID NO: 5440597 - DNA, 25 bp, Homo sapien
gaaagtcaatcatgtctgaggataa

SEQ ID NO: 5440598 - DNA, 25 bp, Homo sapien
taatcaatgagccattagaagtgtt

SEQ ID NO: 5440599 - DNA, 25 bp, Homo sapien
agaagtgtttgtattaagcatgaag

SEQ ID NO: 5440600 - DNA, 25 bp, Homo sapien
tttgattcaagcctttagaaagtca

SEQ ID NO: 5440601 - DNA, 25 bp, Homo sapien
tcagattaagtaaatgggttccaag

SEQ ID NO: 5440602 - DNA, 25 bp, Homo sapien
cctggcctctgaaacaaaagctcca

SEQ ID NO: 5440603 - DNA, 25 bp, Homo sapien
gaccacacagttagagataatctgg

SEQ ID NO: 5440604 - DNA, 25 bp, Homo sapien
tctgtagagcagtcacgggcctcat

SEQ ID NO: 5440605 - DNA, 25 bp, Homo sapien
tagcaatttggcaggtacccgaggg

SEQ ID NO: 5440606 - DNA, 25 bp, Homo sapien
tcataaatgctgagggtagtctgcc

SEQ ID NO: 5440607 - DNA, 25 bp, Homo sapien
tgctttaatgtaacctgacccacgg

SEQ ID NO: 5440608 - DNA, 25 bp, Homo sapien
gatccgggttcacactaatcaggcc

SEQ ID NO: 5440609 - DNA, 25 bp, Homo sapien
gaatagtaactaatataagccacac

SEQ ID NO: 5440610 - DNA, 25 bp, Homo sapien
actcaacaataatgaatagtaacta

SEQ ID NO: 5440611 - DNA, 25 bp, Homo sapien
caaagctaagtgtatcagataattt

SEQ ID NO: 5440612 - DNA, 25 bp, Homo sapien
cacaaagctaagtgtatcagataat

SEQ ID NO: 5440613 - DNA, 25 bp, Homo sapien
ggaggcagggtttgctgctctccag

SEQ ID NO: 5440614 - DNA, 25 bp, Homo sapien
ctagaagtcccaaaggaaaccatga

SEQ ID NO: 5440615 - DNA, 25 bp, Homo sapien
gtttagcagagtgctatgggacaaa

SEQ ID NO: 5440616 - DNA, 25 bp, Homo sapien
gcagagtgctatgggacaaaagaat

SEQ ID NO: 5440617 - DNA, 25 bp, Homo sapien
tagcagagtgctatgggacaaaaga

SEQ ID NO: 5440618 - DNA, 25 bp, Homo sapien
agtagtttagcagagtgctatggga

SEQ ID NO: 5440619 - DNA, 25 bp, Homo sapien
tgtaatgatactcctgctaagtctg

SEQ ID NO: 5440620 - DNA, 25 bp, Homo sapien
tttttaaagattggtcacagtgtga

SEQ ID NO: 5440621 - DNA, 25 bp, Homo sapien
ttaacttgaaaagagtttccagctc

SEQ ID NO: 5440622 - DNA, 25 bp, Homo sapien
tcttttggtctgtgtacatcacagc

SEQ ID NO: 5440623 - DNA, 25 bp, Homo sapien
tgcactggacacctacacgagacaa

SEQ ID NO: 5440624 - DNA, 25 bp, Homo sapien
aaactcctgtttggttaagccgctg

SEQ ID NO: 5440625 - DNA, 25 bp, Homo sapien
taataaaggcagagcttcacgagag

SEQ ID NO: 5440626 - DNA, 25 bp, Homo sapien
tcctgcctggaatctcaactgggta

SEQ ID NO: 5440627 - DNA, 25 bp, Homo sapien
gtatttcagattaagtagaatgcat

SEQ ID NO: 5440628 - DNA, 25 bp, Homo sapien
aagtatttcagattaagtagaatgc

SEQ ID NO: 5440629 - DNA, 25 bp, Homo sapien
agtatttcagattaagtagaatgca

SEQ ID NO: 5440630 - DNA, 25 bp, Homo sapien
catggctactgccaaaagccttatg

SEQ ID NO: 5440631 - DNA, 25 bp, Homo sapien
ctactgccaaaagccttatggggaa

SEQ ID NO: 5440632 - DNA, 25 bp, Homo sapien
ggagctccatggctactgccaaaag

SEQ ID NO: 5440633 - DNA, 25 bp, Homo sapien
tcaaccagtggactccagaaatctc

SEQ ID NO: 5440634 - DNA, 25 bp, Homo sapien
tctgtgttccacatgtgagctcgcg

SEQ ID NO: 5440635 - DNA, 25 bp, Homo sapien
atgtgagctcgcgacgcgctgaacg

SEQ ID NO: 5440636 - DNA, 25 bp, Homo sapien
tgtgccaagaatcaaatcttggcca

SEQ ID NO: 5440637 - DNA, 25 bp, Homo sapien
gctgtgctaactgagatggatggcc

SEQ ID NO: 5440638 - DNA, 25 bp, Homo sapien
gtgcaagcagtgggatacaatgacc

SEQ ID NO: 5440639 - DNA, 25 bp, Homo sapien
tgcaagcagtgggatacaatgacct

SEQ ID NO: 5440640 - DNA, 25 bp, Homo sapien
gggtgcaagcagtgggatacaatga

SEQ ID NO: 5440641 - DNA, 25 bp, Homo sapien
ggtgcaagcagtgggatacaatgac

SEQ ID NO: 5440642 - DNA, 25 bp, Homo sapien
gaaatattctactgctcactaggaa

SEQ ID NO: 5440643 - DNA, 25 bp, Homo sapien
tcaacattggtcctaacttagagaa

SEQ ID NO: 5440644 - DNA, 25 bp, Homo sapien
aacaatgggctatacttcaaaatga

SEQ ID NO: 5440645 - DNA, 25 bp, Homo sapien
tacaatacgcactgaaataatgatg

SEQ ID NO: 5440646 - DNA, 25 bp, Homo sapien
gtccaactgctccacgacacaaaag

SEQ ID NO: 5440647 - DNA, 25 bp, Homo sapien
caaactcggcgtgttcttctctgtt

SEQ ID NO: 5440648 - DNA, 25 bp, Homo sapien
ttgtcatattcaagagagccgtcca

SEQ ID NO: 5440649 - DNA, 25 bp, Homo sapien
cgcaccaggacaaactcggcgtgtt

SEQ ID NO: 5440650 - DNA, 25 bp, Homo sapien
taaggcctaagctgttatgtgaata

SEQ ID NO: 5440651 - DNA, 25 bp, Homo sapien
gtaaataggttatcaactagcctga

SEQ ID NO: 5440652 - DNA, 25 bp, Homo sapien
cattaacatcagttactggaaaggg

SEQ ID NO: 5440653 - DNA, 25 bp, Homo sapien
taaaataagtccctcttacgtgctg

SEQ ID NO: 5440654 - DNA, 25 bp, Homo sapien
caagaaagcagtattattgtctata

SEQ ID NO: 5440655 - DNA, 25 bp, Homo sapien
aagaaagcagtattattgtctatag

SEQ ID NO: 5440656 - DNA, 25 bp, Homo sapien
aacaagaaagcagtattattgtcta

SEQ ID NO: 5440657 - DNA, 25 bp, Homo sapien
ttattgtctatagcaaatacactct

SEQ ID NO: 5440658 - DNA, 25 bp, Homo sapien
ttcgatgctgaaaatccatgtgcag

SEQ ID NO: 5440659 - DNA, 25 bp, Homo sapien
gctggcatataatctttgcccaagg

SEQ ID NO: 5440660 - DNA, 25 bp, Homo sapien
taaggccatatagtccatggtgcca

SEQ ID NO: 5440661 - DNA, 25 bp, Homo sapien
tttaagcatatgcacacataaggcc

SEQ ID NO: 5440662 - DNA, 25 bp, Homo sapien
caggctgctgttttattactaacta

SEQ ID NO: 5440663 - DNA, 25 bp, Homo sapien
tcttttattagggaacagctctttc

SEQ ID NO: 5440664 - DNA, 25 bp, Homo sapien
acttcttttattagggaacagctct

SEQ ID NO: 5440665 - DNA, 25 bp, Homo sapien
tagggaacagctctttcccccttgc

SEQ ID NO: 5440666 - DNA, 25 bp, Homo sapien
cagaacttgtcagggtatcaccacg

SEQ ID NO: 5440667 - DNA, 25 bp, Homo sapien
tatcaccacgggcatcgcatggatg

SEQ ID NO: 5440668 - DNA, 25 bp, Homo sapien
atgggtgcgtaacaaagtggcatgc

SEQ ID NO: 5440669 - DNA, 25 bp, Homo sapien
tctgtatacaccctagagccacggg

SEQ ID NO: 5440670 - DNA, 25 bp, Homo sapien
ggacatcgatttcataattcagagg

SEQ ID NO: 5440671 - DNA, 25 bp, Homo sapien
gttgctgaaagcatagctctgtgga

SEQ ID NO: 5440672 - DNA, 25 bp, Homo sapien
cagcaatgttaaggacatcgatttc

SEQ ID NO: 5440673 - DNA, 25 bp, Homo sapien
ggattgcaggtcgaagcaagagcct

SEQ ID NO: 5440674 - DNA, 25 bp, Homo sapien
gctcaaatgtgaactatagtctcag

SEQ ID NO: 5440675 - DNA, 25 bp, Homo sapien
tgggaagcagctaataagacctctg

SEQ ID NO: 5440676 - DNA, 25 bp, Homo sapien
tagttcaacatgatatagaggaggg

SEQ ID NO: 5440677 - DNA, 25 bp, Homo sapien
cactgtctccaaggagtttcagaac

SEQ ID NO: 5440678 - DNA, 25 bp, Homo sapien
gacactccgaggcaaggcaaaagag

SEQ ID NO: 5440679 - DNA, 25 bp, Homo sapien
cagttagctggctgtgacataaacc

SEQ ID NO: 5440680 - DNA, 25 bp, Homo sapien
tattccctaaaagcgaacgcacgtg

SEQ ID NO: 5440681 - DNA, 25 bp, Homo sapien
ccttgttcctgtactcgcctgagca

SEQ ID NO: 5440682 - DNA, 25 bp, Homo sapien
gctgcgcgcctccctgctccgggct

SEQ ID NO: 5440683 - DNA, 25 bp, Homo sapien
cgcgcctccctgctccgggctgtta

SEQ ID NO: 5440684 - DNA, 25 bp, Homo sapien
tgcgcgcctccctgctccgggctgt

SEQ ID NO: 5440685 - DNA, 25 bp, Homo sapien
gcgcctccctgctccgggctgttac

SEQ ID NO: 5440686 - DNA, 25 bp, Homo sapien
gccgctccgccggtcggggctgtcc

SEQ ID NO: 5440687 - DNA, 25 bp, Homo sapien
gccccttgacgtccgggctgccgct

SEQ ID NO: 5440688 - DNA, 25 bp, Homo sapien
gggctgtcccgcagacacgggctct

SEQ ID NO: 5440689 - DNA, 25 bp, Homo sapien
cttcactgggggaggccccttgacg

SEQ ID NO: 5440690 - DNA, 25 bp, Homo sapien
acaaagttcccaccggcaggtcgca

SEQ ID NO: 5440691 - DNA, 25 bp, Homo sapien
gctgctccgactcggagacaaagtt

SEQ ID NO: 5440692 - DNA, 25 bp, Homo sapien
caggtcgcaataaaacgcacaggga

SEQ ID NO: 5440693 - DNA, 25 bp, Homo sapien
tccgactcggagacaaagttcccac

SEQ ID NO: 5440694 - DNA, 25 bp, Homo sapien
tgcccagtcgcagctccccagaagt

SEQ ID NO: 5440695 - DNA, 25 bp, Homo sapien
cagcgcctcggttcggcgactctgc

SEQ ID NO: 5440696 - DNA, 25 bp, Homo sapien
cagaagtcagccctcggggtcgcgg

SEQ ID NO: 5440697 - DNA, 25 bp, Homo sapien
agcccagcgcctcggttcggcgact

SEQ ID NO: 5440698 - DNA, 25 bp, Homo sapien
ggtctgtctgaaacttggctgactg

SEQ ID NO: 5440699 - DNA, 25 bp, Homo sapien
tctgtctgaaacttggctgactggg

SEQ ID NO: 5440700 - DNA, 25 bp, Homo sapien
acggtctgtctgaaacttggctgac

SEQ ID NO: 5440701 - DNA, 25 bp, Homo sapien
ctgtctgaaacttggctgactgggg

SEQ ID NO: 5440702 - DNA, 25 bp, Homo sapien
gcaaaagtagagaatccagggtgga

SEQ ID NO: 5440703 - DNA, 25 bp, Homo sapien
tggaaagtttctggtgcttggcttt

SEQ ID NO: 5440704 - DNA, 25 bp, Homo sapien
agtagagaatccagggtggaaagtt

SEQ ID NO: 5440705 - DNA, 25 bp, Homo sapien
aaagtagagaatccagggtggaaag

SEQ ID NO: 5440706 - DNA, 25 bp, Homo sapien
gtaacaccaagagccgagaagacgc

SEQ ID NO: 5440707 - DNA, 25 bp, Homo sapien
agagccttttcacaccttcgggaag

SEQ ID NO: 5440708 - DNA, 25 bp, Homo sapien
gaaggagacccgttctggagagaaa

SEQ ID NO: 5440709 - DNA, 25 bp, Homo sapien
tgtcttcttctggtgcggagatggt

SEQ ID NO: 5440710 - DNA, 25 bp, Homo sapien
aaacgcggcggccgcccaagctgtc

SEQ ID NO: 5440711 - DNA, 25 bp, Homo sapien
tcccctctcggccgcctctgccagc

SEQ ID NO: 5440712 - DNA, 25 bp, Homo sapien
ctctgccagcagccagagccggact

SEQ ID NO: 5440713 - DNA, 25 bp, Homo sapien
tgccagcagccagagccggactcac

SEQ ID NO: 5440714 - DNA, 25 bp, Homo sapien
ctcccctctcggccgcctctgccag

SEQ ID NO: 5440715 - DNA, 25 bp, Homo sapien
tgagagggagatgattattagttgc

SEQ ID NO: 5440716 - DNA, 25 bp, Homo sapien
tgagtcatcaggcaaagtgagtcct

SEQ ID NO: 5440717 - DNA, 25 bp, Homo sapien
attattagttgcgttgagtcatcag

SEQ ID NO: 5440718 - DNA, 25 bp, Homo sapien
cgttgagtcatcaggcaaagtgagt

SEQ ID NO: 5440719 - DNA, 25 bp, Homo sapien
tctggattatttcgggatgggggtg

SEQ ID NO: 5440720 - DNA, 25 bp, Homo sapien
gggggatggatctaaacccaagcca

SEQ ID NO: 5440721 - DNA, 25 bp, Homo sapien
gggatggatctaaacccaagccaga

SEQ ID NO: 5440722 - DNA, 25 bp, Homo sapien
gtaggggaagtctctggattatttc

SEQ ID NO: 5440723 - DNA, 25 bp, Homo sapien
ctggtccaccgcaagaaaagagggg

SEQ ID NO: 5440724 - DNA, 25 bp, Homo sapien
tggtccaccgcaagaaaagagggga

SEQ ID NO: 5440725 - DNA, 25 bp, Homo sapien
tcaatcaatcgctgtgagcacggcg

SEQ ID NO: 5440726 - DNA, 25 bp, Homo sapien
agcacggcgacccaacggcggcggg

SEQ ID NO: 5440727 - DNA, 25 bp, Homo sapien
aatcaatcgctgtgagcacggcgac

SEQ ID NO: 5440728 - DNA, 25 bp, Homo sapien
tcaatcaatcaatcgctgtgagcac

SEQ ID NO: 5440729 - DNA, 25 bp, Homo sapien
ctcatgcacgaggcggcgaaggacc

SEQ ID NO: 5440730 - DNA, 25 bp, Homo sapien
tggccgcggccagcgggtgggtgcg

SEQ ID NO: 5440731 - DNA, 25 bp, Homo sapien
gtgggtgcgtctgggcgcaggcggg

SEQ ID NO: 5440732 - DNA, 25 bp, Homo sapien
aaggaccgatggcagagaaccgagt

SEQ ID NO: 5440733 - DNA, 25 bp, Homo sapien
ttgtggcgggtccagggcgcggccg

SEQ ID NO: 5440734 - DNA, 25 bp, Homo sapien
cttgtggcgggtccagggcgcggcc

SEQ ID NO: 5440735 - DNA, 25 bp, Homo sapien
tgtggcgggtccagggcgcggccgc

SEQ ID NO: 5440736 - DNA, 25 bp, Homo sapien
tctgccggcggagacgcagaccgac

SEQ ID NO: 5440737 - DNA, 25 bp, Homo sapien
agaccgacgcgcaagaggcgaccgc

SEQ ID NO: 5440738 - DNA, 25 bp, Homo sapien
gctctgttaactgcgcggagtactt

SEQ ID NO: 5440739 - DNA, 25 bp, Homo sapien
aaggcagtcgctgggtgccgcgtct

SEQ ID NO: 5440740 - DNA, 25 bp, Homo sapien
cctccgcgccgagccgaacgtcccg

SEQ ID NO: 5440741 - DNA, 25 bp, Homo sapien
ttttcccggtgcctgcgagctcccc

SEQ ID NO: 5440742 - DNA, 25 bp, Homo sapien
ccgccgcgcttcgtgccgccgcgcg

SEQ ID NO: 5440743 - DNA, 25 bp, Homo sapien
ggccgcttctccttcaaagctggca

SEQ ID NO: 5440744 - DNA, 25 bp, Homo sapien
ccgcgagtccggaacaatagtcggg

SEQ ID NO: 5440745 - DNA, 25 bp, Homo sapien
ggccgcgagtccggaacaatagtcg

SEQ ID NO: 5440746 - DNA, 25 bp, Homo sapien
ggggtgtcccgaatgccaggagcac

SEQ ID NO: 5440747 - DNA, 25 bp, Homo sapien
aatagtcggggtgtcccgaatgcca

SEQ ID NO: 5440748 - DNA, 25 bp, Homo sapien
cagagcggggtgcatccctggatgg

SEQ ID NO: 5440749 - DNA, 25 bp, Homo sapien
ggttgcgtggtggatgcagagcggg

SEQ ID NO: 5440750 - DNA, 25 bp, Homo sapien
agcgctcgccgctccggcgacatcg

SEQ ID NO: 5440751 - DNA, 25 bp, Homo sapien
acatcgcgagcggtgcaaaccgggc

SEQ ID NO: 5440752 - DNA, 25 bp, Homo sapien
tggagcccgtgacgcggtggcggcg

SEQ ID NO: 5440753 - DNA, 25 bp, Homo sapien
gagcccgtgacgcggtggcggcgag

SEQ ID NO: 5440754 - DNA, 25 bp, Homo sapien
agcccgtgacgcggtggcggcgagg

SEQ ID NO: 5440755 - DNA, 25 bp, Homo sapien
ctgctggcgccaacagagctgtgcc

SEQ ID NO: 5440756 - DNA, 25 bp, Homo sapien
cgatcccccttaagaagcgttgact

SEQ ID NO: 5440757 - DNA, 25 bp, Homo sapien
tcccccttaagaagcgttgactgta

SEQ ID NO: 5440758 - DNA, 25 bp, Homo sapien
atctcccgcagcaagagccaccgat

SEQ ID NO: 5440759 - DNA, 25 bp, Homo sapien
caccgatcccccttaagaagcgttg

SEQ ID NO: 5440760 - DNA, 25 bp, Homo sapien
tccgccgatcgtgcccgggacaagg

SEQ ID NO: 5440761 - DNA, 25 bp, Homo sapien
tttcgggaaacgctctcgggagcag

SEQ ID NO: 5440762 - DNA, 25 bp, Homo sapien
cgggacaaggctgccttccactcgc

SEQ ID NO: 5440763 - DNA, 25 bp, Homo sapien
agcagagactgcgaaaagctgagtc

SEQ ID NO: 5440764 - DNA, 25 bp, Homo sapien
catgcgcacgggcttagaggcttga

SEQ ID NO: 5440765 - DNA, 25 bp, Homo sapien
gcggcatgcgcacgggcttagaggc

SEQ ID NO: 5440766 - DNA, 25 bp, Homo sapien
ctggtaggcggcatgcgcacgggct

SEQ ID NO: 5440767 - DNA, 25 bp, Homo sapien
aggcggcatgcgcacgggcttagag

SEQ ID NO: 5440768 - DNA, 25 bp, Homo sapien
ttgatgttgaactgcgaatcctcct

SEQ ID NO: 5440769 - DNA, 25 bp, Homo sapien
cctcctccggatcaatgtccaggaa

SEQ ID NO: 5440770 - DNA, 25 bp, Homo sapien
aatcctcctccggatcaatgtccag

SEQ ID NO: 5440771 - DNA, 25 bp, Homo sapien
ctgcgaatcctcctccggatcaatg

SEQ ID NO: 5440772 - DNA, 25 bp, Homo sapien
tgtttcaaattacatacgcttttta

SEQ ID NO: 5440773 - DNA, 25 bp, Homo sapien
tatttcaactgaagcgattatttcc

SEQ ID NO: 5440774 - DNA, 25 bp, Homo sapien
ccagcaggtttaatttcgacaataa

SEQ ID NO: 5440775 - DNA, 25 bp, Homo sapien
tgtcctctcgagttttgtctctaat

SEQ ID NO: 5440776 - DNA, 25 bp, Homo sapien
gtcaggccttcttttatggcctgca

SEQ ID NO: 5440777 - DNA, 25 bp, Homo sapien
tcaggccttcttttatggcctgcac

SEQ ID NO: 5440778 - DNA, 25 bp, Homo sapien
gacaccaagtttttgttgtgcgtgc

SEQ ID NO: 5440779 - DNA, 25 bp, Homo sapien
tgccgggcgcgggacttcggctctc

SEQ ID NO: 5440780 - DNA, 25 bp, Homo sapien
tgtgcgtgctttcgaccctggtcaa

SEQ ID NO: 5440781 - DNA, 25 bp, Homo sapien
gctccggacagcgtaggcctgggcg

SEQ ID NO: 5440782 - DNA, 25 bp, Homo sapien
ccgaggcctcggcttggcgtcaatg

SEQ ID NO: 5440783 - DNA, 25 bp, Homo sapien
tgaggccgaaaccttcggcgccggc

SEQ ID NO: 5440784 - DNA, 25 bp, Homo sapien
gcccaaggtggctgcgaagagcccc

SEQ ID NO: 5440785 - DNA, 25 bp, Homo sapien
cgcctgcagtccacgggttaaggat

SEQ ID NO: 5440786 - DNA, 25 bp, Homo sapien
ctggcgcgtgcaaaatacgaacgcc

SEQ ID NO: 5440787 - DNA, 25 bp, Homo sapien
gtgcaaaatacgaacgcccacagtt

SEQ ID NO: 5440788 - DNA, 25 bp, Homo sapien
cgcgtgcaaaatacgaacgcccaca

SEQ ID NO: 5440789 - DNA, 25 bp, Homo sapien
gcaaaatacgaacgcccacagtttg

SEQ ID NO: 5440790 - DNA, 25 bp, Homo sapien
ggcgcctcgcctgttttctcggtat

SEQ ID NO: 5440791 - DNA, 25 bp, Homo sapien
cggcggcccaaactcgtaaggagtg

SEQ ID NO: 5440792 - DNA, 25 bp, Homo sapien
tctcggtatcacgaatcccctcgga

SEQ ID NO: 5440793 - DNA, 25 bp, Homo sapien
aacttagagggcttcccgagctggc

SEQ ID NO: 5440794 - DNA, 25 bp, Homo sapien
tccccgccctacagccaagcccaga

SEQ ID NO: 5440795 - DNA, 25 bp, Homo sapien
ccctacagccaagcccagaggaaca

SEQ ID NO: 5440796 - DNA, 25 bp, Homo sapien
agaggaacagggcatcgcctcgcgc

SEQ ID NO: 5440797 - DNA, 25 bp, Homo sapien
cagaggaacagggcatcgcctcgcg

SEQ ID NO: 5440798 - DNA, 25 bp, Homo sapien
cattctgagtgtgcctgcagtaggg

SEQ ID NO: 5440799 - DNA, 25 bp, Homo sapien
ttgaaacattctgagtgtgcctgca

SEQ ID NO: 5440800 - DNA, 25 bp, Homo sapien
ttctgagtgtgcctgcagtagggtc

SEQ ID NO: 5440801 - DNA, 25 bp, Homo sapien
gaaacattctgagtgtgcctgcagt

SEQ ID NO: 5440802 - DNA, 25 bp, Homo sapien
tggtgggccgtttgcacccaggctc

SEQ ID NO: 5440803 - DNA, 25 bp, Homo sapien
gctctgatggcaccaggatggcttc

SEQ ID NO: 5440804 - DNA, 25 bp, Homo sapien
tcagctctggtgggccgtttgcacc

SEQ ID NO: 5440805 - DNA, 25 bp, Homo sapien
ggctctgatggcaccaggatggctt

SEQ ID NO: 5440806 - DNA, 25 bp, Homo sapien
cctccctgagcggagctccagtata

SEQ ID NO: 5440807 - DNA, 25 bp, Homo sapien
tggcagttgcggctgactgctctac

SEQ ID NO: 5440808 - DNA, 25 bp, Homo sapien
gaagcagccgtcttcgttaaatggg

SEQ ID NO: 5440809 - DNA, 25 bp, Homo sapien
cagtatagactaagtgaatgaatcc

SEQ ID NO: 5440810 - DNA, 25 bp, Homo sapien
gcccagcggagtgcgcattgcgcta

SEQ ID NO: 5440811 - DNA, 25 bp, Homo sapien
acgggaattgcacccttgccggagc

SEQ ID NO: 5440812 - DNA, 25 bp, Homo sapien
gcattgcgctaacacgcgcacggga

SEQ ID NO: 5440813 - DNA, 25 bp, Homo sapien
cagaactgatgactgcttgggccca

SEQ ID NO: 5440814 - DNA, 25 bp, Homo sapien
tcctgggtccgggtatcccagggca

SEQ ID NO: 5440815 - DNA, 25 bp, Homo sapien
cagaatcggcgagtgcaaagtagct

SEQ ID NO: 5440816 - DNA, 25 bp, Homo sapien
tcgaaggccccaattaactatctgt

SEQ ID NO: 5440817 - DNA, 25 bp, Homo sapien
aactatctgttgtgtcagaatcggc

SEQ ID NO: 5440818 - DNA, 25 bp, Homo sapien
tgagatcagccctaatcccttggta

SEQ ID NO: 5440819 - DNA, 25 bp, Homo sapien
caaggcacgcgcagataccgggcag

SEQ ID NO: 5440820 - DNA, 25 bp, Homo sapien
taacttaagcgcctctgaactcggg

SEQ ID NO: 5440821 - DNA, 25 bp, Homo sapien
tccgtgttccaaggatggtcgttta

SEQ ID NO: 5440822 - DNA, 25 bp, Homo sapien
ctccggcgaagcctccaaggagcgg

SEQ ID NO: 5440823 - DNA, 25 bp, Homo sapien
gcgcttccgctctgcgcggtccggc

SEQ ID NO: 5440824 - DNA, 25 bp, Homo sapien
gtagctcgctgatccctccggcgaa

SEQ ID NO: 5440825 - DNA, 25 bp, Homo sapien
aagcctccaaggagcgggcggctgg

SEQ ID NO: 5440826 - DNA, 25 bp, Homo sapien
acctgctctccagataaggcgccat

SEQ ID NO: 5440827 - DNA, 25 bp, Homo sapien
cgccaggccggattgtgttctggcc

SEQ ID NO: 5440828 - DNA, 25 bp, Homo sapien
caggccggattgtgttctggcctcg

SEQ ID NO: 5440829 - DNA, 25 bp, Homo sapien
ctcagcacagagctcgggaggactc

SEQ ID NO: 5440830 - DNA, 25 bp, Homo sapien
cctggtcaatactcccacagataaa

SEQ ID NO: 5440831 - DNA, 25 bp, Homo sapien
tatacacaaatccatctttcgctgg

SEQ ID NO: 5440832 - DNA, 25 bp, Homo sapien
aaaagactgcaggatctgcttatac

SEQ ID NO: 5440833 - DNA, 25 bp, Homo sapien
tctttcgctgggaacccacaactca

SEQ ID NO: 5440834 - DNA, 25 bp, Homo sapien
aagcccatgtcatctacaatgtaga

SEQ ID NO: 5440835 - DNA, 25 bp, Homo sapien
ccttgatggattctttggattttgt

SEQ ID NO: 5440836 - DNA, 25 bp, Homo sapien
gcccatgtcatctacaatgtagaga

SEQ ID NO: 5440837 - DNA, 25 bp, Homo sapien
tgtacttcaggttgaattcccatga

SEQ ID NO: 5440838 - DNA, 25 bp, Homo sapien
agagagcccaactctttgaatttct

SEQ ID NO: 5440839 - DNA, 25 bp, Homo sapien
aagggagaatgtgagagagcccaac

SEQ ID NO: 5440840 - DNA, 25 bp, Homo sapien
gaagggagaatgtgagagagcccaa

SEQ ID NO: 5440841 - DNA, 25 bp, Homo sapien
cacagctgactgtatgccataaagg

SEQ ID NO: 5440842 - DNA, 25 bp, Homo sapien
gggtacatttgctccacttctgtgt

SEQ ID NO: 5440843 - DNA, 25 bp, Homo sapien
tgtcctgcttccaaaacgaattcca

SEQ ID NO: 5440844 - DNA, 25 bp, Homo sapien
aaatacacgacagcctttgcacagc

SEQ ID NO: 5440845 - DNA, 25 bp, Homo sapien
atcttctttcttgacagcgtagtgc

SEQ ID NO: 5440846 - DNA, 25 bp, Homo sapien
cttctttcttgacagcgtagtgcat

SEQ ID NO: 5440847 - DNA, 25 bp, Homo sapien
tcttctttcttgacagcgtagtgca

SEQ ID NO: 5440848 - DNA, 25 bp, Homo sapien
gacagagaccccatcaactaagtca

SEQ ID NO: 5440849 - DNA, 25 bp, Homo sapien
tcaactaagtcataatggctggaag

SEQ ID NO: 5440850 - DNA, 25 bp, Homo sapien
gtcataatggctggaagacccccca

SEQ ID NO: 5440851 - DNA, 25 bp, Homo sapien
gaccccatcaactaagtcataatgg

SEQ ID NO: 5440852 - DNA, 25 bp, Homo sapien
tcacaaagacaaaggtaattccatg

SEQ ID NO: 5440853 - DNA, 25 bp, Homo sapien
gatggtgatgacatctttactttgc

SEQ ID NO: 5440854 - DNA, 25 bp, Homo sapien
cacagatgagattcatgtccacaaa

SEQ ID NO: 5440855 - DNA, 25 bp, Homo sapien
tcatgctgaacacagtgatggactg

SEQ ID NO: 5440856 - DNA, 25 bp, Homo sapien
cttggtttttcttggcagacagggc

SEQ ID NO: 5440857 - DNA, 25 bp, Homo sapien
gtttttcttggcagacagggcccat

SEQ ID NO: 5440858 - DNA, 25 bp, Homo sapien
ggtttttcttggcagacagggccca

SEQ ID NO: 5440859 - DNA, 25 bp, Homo sapien
ttggtttttcttggcagacagggcc

SEQ ID NO: 5440860 - DNA, 25 bp, Homo sapien
catccatccaccgtgaaagactgtg

SEQ ID NO: 5440861 - DNA, 25 bp, Homo sapien
caccgtgaaagactgtgctccttcc

SEQ ID NO: 5440862 - DNA, 25 bp, Homo sapien
tccatccaccgtgaaagactgtgct

SEQ ID NO: 5440863 - DNA, 25 bp, Homo sapien
catccaccgtgaaagactgtgctcc

SEQ ID NO: 5440864 - DNA, 25 bp, Homo sapien
agagggagatcttttactggcgcta

SEQ ID NO: 5440865 - DNA, 25 bp, Homo sapien
gaaaaccgtctacaatcctcctgag

SEQ ID NO: 5440866 - DNA, 25 bp, Homo sapien
cctgatgttaccacaagctgtttac

SEQ ID NO: 5440867 - DNA, 25 bp, Homo sapien
tttactggcgctagattgggccctg

SEQ ID NO: 5440868 - DNA, 25 bp, Homo sapien
ggggaactgaggcaggtgtctgagg

SEQ ID NO: 5440869 - DNA, 25 bp, Homo sapien
aactgaggcaggtgtctgaggccat

SEQ ID NO: 5440870 - DNA, 25 bp, Homo sapien
gaactgaggcaggtgtctgaggcca

SEQ ID NO: 5440871 - DNA, 25 bp, Homo sapien
ggaactgaggcaggtgtctgaggcc

SEQ ID NO: 5440872 - DNA, 25 bp, Homo sapien
aattcctattttttacttgctccat

SEQ ID NO: 5440873 - DNA, 25 bp, Homo sapien
ggaaacaatctcatgctggacatga

SEQ ID NO: 5440874 - DNA, 25 bp, Homo sapien
ctttagctgtcccacaaactgggaa

SEQ ID NO: 5440875 - DNA, 25 bp, Homo sapien
taacatgatcagaaagtgtgcccgc

SEQ ID NO: 5440876 - DNA, 25 bp, Homo sapien
aacattcatgtaagacaggtacagg

SEQ ID NO: 5440877 - DNA, 25 bp, Homo sapien
cagaaataagtggaaccgtctgctc

SEQ ID NO: 5440878 - DNA, 25 bp, Homo sapien
cagatatgattgcatctaatttcag

SEQ ID NO: 5440879 - DNA, 25 bp, Homo sapien
ggtggtttgctgctgcgtgattcac

SEQ ID NO: 5440880 - DNA, 25 bp, Homo sapien
gctgctgcgtgattcacagatatga

SEQ ID NO: 5440881 - DNA, 25 bp, Homo sapien
ttagctgaaagctgttcgatggcgt

SEQ ID NO: 5440882 - DNA, 25 bp, Homo sapien
cgatggcgttcaaatgactgctgcc

SEQ ID NO: 5440883 - DNA, 25 bp, Homo sapien
tgttcgatggcgttcaaatgactgc

SEQ ID NO: 5440884 - DNA, 25 bp, Homo sapien
aagctgttcgatggcgttcaaatga

SEQ ID NO: 5440885 - DNA, 25 bp, Homo sapien
cacagcaataacttcctcattgtac

SEQ ID NO: 5440886 - DNA, 25 bp, Homo sapien
tatcacagcaataacttcctcattg

SEQ ID NO: 5440887 - DNA, 25 bp, Homo sapien
tcacagcaataacttcctcattgta

SEQ ID NO: 5440888 - DNA, 25 bp, Homo sapien
atatcacagcaataacttcctcatt

SEQ ID NO: 5440889 - DNA, 25 bp, Homo sapien
tttcagacagattgtgttccaacac

SEQ ID NO: 5440890 - DNA, 25 bp, Homo sapien
ctgtaactgtccaaaactattagta

SEQ ID NO: 5440891 - DNA, 25 bp, Homo sapien
tccaaaactattagtaaagtcagct

SEQ ID NO: 5440892 - DNA, 25 bp, Homo sapien
gggataaagtatctgtcttgtattt

SEQ ID NO: 5440893 - DNA, 25 bp, Homo sapien
ctccggccgcttcagacgttttaat

SEQ ID NO: 5440894 - DNA, 25 bp, Homo sapien
ttaatttgtcactcgggaaagcaga

SEQ ID NO: 5440895 - DNA, 25 bp, Homo sapien
gaccacagcgaactgcctgaggggc

SEQ ID NO: 5440896 - DNA, 25 bp, Homo sapien
gcagatgtgtcagggagttggagaa

SEQ ID NO: 5440897 - DNA, 25 bp, Homo sapien
gcttcctcatcaggatttgcaaaca

SEQ ID NO: 5440898 - DNA, 25 bp, Homo sapien
ttgcttcctcatcaggatttgcaaa

SEQ ID NO: 5440899 - DNA, 25 bp, Homo sapien
tgcttcctcatcaggatttgcaaac

SEQ ID NO: 5440900 - DNA, 25 bp, Homo sapien
cttcctcatcaggatttgcaaacat

SEQ ID NO: 5440901 - DNA, 25 bp, Homo sapien
tatcttccctcaaccatgaaaaaca

SEQ ID NO: 5440902 - DNA, 25 bp, Homo sapien
ggtatcttccctcaaccatgaaaaa

SEQ ID NO: 5440903 - DNA, 25 bp, Homo sapien
caccaggtatcttccctcaaccatg

SEQ ID NO: 5440904 - DNA, 25 bp, Homo sapien
caggtatcttccctcaaccatgaaa

SEQ ID NO: 5440905 - DNA, 25 bp, Homo sapien
acattctcagaatcccctggttcca

SEQ ID NO: 5440906 - DNA, 25 bp, Homo sapien
ttccacacttgctagattatggaag

SEQ ID NO: 5440907 - DNA, 25 bp, Homo sapien
agacattctcagaatcccctggttc

SEQ ID NO: 5440908 - DNA, 25 bp, Homo sapien
cacacttgctagattatggaagaga

SEQ ID NO: 5440909 - DNA, 25 bp, Homo sapien
aggtcagttctcatagagtcatttc

SEQ ID NO: 5440910 - DNA, 25 bp, Homo sapien
aatgagtgaatttaaggtcagttct

SEQ ID NO: 5440911 - DNA, 25 bp, Homo sapien
caggactaggctgtaaagtctgctg

SEQ ID NO: 5440912 - DNA, 25 bp, Homo sapien
ggactaggctgtaaagtctgctgag

SEQ ID NO: 5440913 - DNA, 25 bp, Homo sapien
gttgtgaacagcctaaatgtaacct

SEQ ID NO: 5440914 - DNA, 25 bp, Homo sapien
tcagtgttttccgagggtctgtagg

SEQ ID NO: 5440915 - DNA, 25 bp, Homo sapien
aaagttgtgaacagcctaaatgtaa

SEQ ID NO: 5440916 - DNA, 25 bp, Homo sapien
tacatcagtgttttccgagggtctg

SEQ ID NO: 5440917 - DNA, 25 bp, Homo sapien
tcttcaagctgtacaatgggatcta

SEQ ID NO: 5440918 - DNA, 25 bp, Homo sapien
cattcatcgacagagacgtgactcc

SEQ ID NO: 5440919 - DNA, 25 bp, Homo sapien
cacttagaactagagagtgttgcca

SEQ ID NO: 5440920 - DNA, 25 bp, Homo sapien
gatgccagtcattactacacgaaag

SEQ ID NO: 5440921 - DNA, 25 bp, Homo sapien
tcgcgagacagcaagaattggagac

SEQ ID NO: 5440922 - DNA, 25 bp, Homo sapien
ggaggctcgcgagacagcaagaatt

SEQ ID NO: 5440923 - DNA, 25 bp, Homo sapien
gagacagcaagaattggagactagc

SEQ ID NO: 5440924 - DNA, 25 bp, Homo sapien
caagatgggaggctcgcgagacagc

SEQ ID NO: 5440925 - DNA, 25 bp, Homo sapien
gatatttactatgctgcaggaagtc

SEQ ID NO: 5440926 - DNA, 25 bp, Homo sapien
aggtagatttctcagcccagcccaa

SEQ ID NO: 5440927 - DNA, 25 bp, Homo sapien
catacagtccatgcgttcacaggaa

SEQ ID NO: 5440928 - DNA, 25 bp, Homo sapien
tagtccttcagggttaaagtcagac

SEQ ID NO: 5440929 - DNA, 25 bp, Homo sapien
tcttcctcacggttcaagatagatg

SEQ ID NO: 5440930 - DNA, 25 bp, Homo sapien
gagctggtataatgactccatcgtc

SEQ ID NO: 5440931 - DNA, 25 bp, Homo sapien
gatagatgtctgatgtttagtctta

SEQ ID NO: 5440932 - DNA, 25 bp, Homo sapien
ggtccttttgagtgtggctccatca

SEQ ID NO: 5440933 - DNA, 25 bp, Homo sapien
aatctgccaataatgccatccagag

SEQ ID NO: 5440934 - DNA, 25 bp, Homo sapien
tttttcatgactagaagttccacat

SEQ ID NO: 5440935 - DNA, 25 bp, Homo sapien
ggataagtctactgctatgtcttca

SEQ ID NO: 5440936 - DNA, 25 bp, Homo sapien
cctggttatggatcagattttcctg

SEQ ID NO: 5440937 - DNA, 25 bp, Homo sapien
tggaatcccgatactatactccctg

SEQ ID NO: 5440938 - DNA, 25 bp, Homo sapien
ggcagccagtcctagccaataacag

SEQ ID NO: 5440939 - DNA, 25 bp, Homo sapien
taatgctccttttaacccagggcag

SEQ ID NO: 5440940 - DNA, 25 bp, Homo sapien
catctgtgctactagaaagagagga

SEQ ID NO: 5440941 - DNA, 25 bp, Homo sapien
cagactgagcgaggtatgggcacat

SEQ ID NO: 5440942 - DNA, 25 bp, Homo sapien
caatagggtgcagccttctgatgac

SEQ ID NO: 5440943 - DNA, 25 bp, Homo sapien
gccacagtaggcttcaatagggtgc

SEQ ID NO: 5440944 - DNA, 25 bp, Homo sapien
tgaatacagagtgccaaaatgcagc

SEQ ID NO: 5440945 - DNA, 25 bp, Homo sapien
gctctagggttgaagaacatggtcc

SEQ ID NO: 5440946 - DNA, 25 bp, Homo sapien
gagattatcctagtggctaccaaca

SEQ ID NO: 5440947 - DNA, 25 bp, Homo sapien
tggtacaagcgcagcaaccttagtg

SEQ ID NO: 5440948 - DNA, 25 bp, Homo sapien
ggtgtctcaaaacgcatatcaaggc

SEQ ID NO: 5440949 - DNA, 25 bp, Homo sapien
caagcacacggtatgcagacgccat

SEQ ID NO: 5440950 - DNA, 25 bp, Homo sapien
tgtcttagtgaaggcagtgctcttg

SEQ ID NO: 5440951 - DNA, 25 bp, Homo sapien
cagcatgacaccaggcaacaaggca

SEQ ID NO: 5440952 - DNA, 25 bp, Homo sapien
gacgccatagctgtgttcttctcgc

SEQ ID NO: 5440953 - DNA, 25 bp, Homo sapien
ggatgcctgacttgcttgttagaac

SEQ ID NO: 5440954 - DNA, 25 bp, Homo sapien
tatgccaaccccaattagctttgtg

SEQ ID NO: 5440955 - DNA, 25 bp, Homo sapien
caggttaagtggacgcatcttcaga

SEQ ID NO: 5440956 - DNA, 25 bp, Homo sapien
aaatcttctcaaacgctacctgcag

SEQ ID NO: 5440957 - DNA, 25 bp, Homo sapien
attcaatccattaagctgccttcac

SEQ ID NO: 5440958 - DNA, 25 bp, Homo sapien
caatccattaagctgccttcactga

SEQ ID NO: 5440959 - DNA, 25 bp, Homo sapien
ttcaatccattaagctgccttcact

SEQ ID NO: 5440960 - DNA, 25 bp, Homo sapien
tcaatccattaagctgccttcactg

SEQ ID NO: 5440961 - DNA, 25 bp, Homo sapien
ttcggcatcacagtagtgatatcac

SEQ ID NO: 5440962 - DNA, 25 bp, Homo sapien
aagaacttgactagtgtcattcggc

SEQ ID NO: 5440963 - DNA, 25 bp, Homo sapien
tgactagtgtcattcggcatcacag

SEQ ID NO: 5440964 - DNA, 25 bp, Homo sapien
cagagtcaagcctggtgatgttggt

SEQ ID NO: 5440965 - DNA, 25 bp, Homo sapien
tacactgagttcaggcaccaaccaa

SEQ ID NO: 5440966 - DNA, 25 bp, Homo sapien
tgttgcccaaactgtcccactgtgg

SEQ ID NO: 5440967 - DNA, 25 bp, Homo sapien
tctggaaacaattaccttggaccaa

SEQ ID NO: 5440968 - DNA, 25 bp, Homo sapien
caaaagacgcagctacccatacact

SEQ ID NO: 5440969 - DNA, 25 bp, Homo sapien
cttaagaaagctcgtttcaatacac

SEQ ID NO: 5440970 - DNA, 25 bp, Homo sapien
aagctcgtttcaatacacagctgct

SEQ ID NO: 5440971 - DNA, 25 bp, Homo sapien
ctcttaagaaagctcgtttcaatac

SEQ ID NO: 5440972 - DNA, 25 bp, Homo sapien
tcttaagaaagctcgtttcaataca

SEQ ID NO: 5440973 - DNA, 25 bp, Homo sapien
cagagcctctgaatcgccttatttt

SEQ ID NO: 5440974 - DNA, 25 bp, Homo sapien
caaaaggtagagtgggaactcaagc

SEQ ID NO: 5440975 - DNA, 25 bp, Homo sapien
gaactcaagccaagctgtagttctg

SEQ ID NO: 5440976 - DNA, 25 bp, Homo sapien
gagtctgacgtagccagttgcacca

SEQ ID NO: 5440977 - DNA, 25 bp, Homo sapien
ggatcaacgcctggagaattttgca

SEQ ID NO: 5440978 - DNA, 25 bp, Homo sapien
cttaaagtcttgatgatactactac

SEQ ID NO: 5440979 - DNA, 25 bp, Homo sapien
tattcaaagtagtcctacacaaagc

SEQ ID NO: 5440980 - DNA, 25 bp, Homo sapien
gtttaatgatttcaaccgccatatg

SEQ ID NO: 5440981 - DNA, 25 bp, Homo sapien
tctaacagtggcaacagggctagtg

SEQ ID NO: 5440982 - DNA, 25 bp, Homo sapien
tgccagctaggcagagaggtccaag

SEQ ID NO: 5440983 - DNA, 25 bp, Homo sapien
gaagttgcgtcgacttagccttctg

SEQ ID NO: 5440984 - DNA, 25 bp, Homo sapien
gcttaatgtctatgccatggtgcca

SEQ ID NO: 5440985 - DNA, 25 bp, Homo sapien
gaggccagctcgcatcgtttatgat

SEQ ID NO: 5440986 - DNA, 25 bp, Homo sapien
tgagaagtcgtctgaaccagcagaa

SEQ ID NO: 5440987 - DNA, 25 bp, Homo sapien
tttcattgccgtacactgaacccag

SEQ ID NO: 5440988 - DNA, 25 bp, Homo sapien
taaaagtagcaagcaagaagtctcc

SEQ ID NO: 5440989 - DNA, 25 bp, Homo sapien
gggagctggaaagttctctggttca

SEQ ID NO: 5440990 - DNA, 25 bp, Homo sapien
ttctctggttcattctgaggagttc

SEQ ID NO: 5440991 - DNA, 25 bp, Homo sapien
ctggttcattctgaggagttcctct

SEQ ID NO: 5440992 - DNA, 25 bp, Homo sapien
tctggttcattctgaggagttcctc

SEQ ID NO: 5440993 - DNA, 25 bp, Homo sapien
gccttgcagaagttggactctctca

SEQ ID NO: 5440994 - DNA, 25 bp, Homo sapien
gcagaagttggactctctcagcccc

SEQ ID NO: 5440995 - DNA, 25 bp, Homo sapien
ccttgcagaagttggactctctcag

SEQ ID NO: 5440996 - DNA, 25 bp, Homo sapien
ttgcagaagttggactctctcagcc

SEQ ID NO: 5440997 - DNA, 25 bp, Homo sapien
agaaccagggacacgggaacaccag

SEQ ID NO: 5440998 - DNA, 25 bp, Homo sapien
tgtatggatatcaaatatggttccc

SEQ ID NO: 5440999 - DNA, 25 bp, Homo sapien
tcaaaggactttgaggctgtccata

SEQ ID NO: 5441000 - DNA, 25 bp, Homo sapien
aatatggttccctaatcaaaggact

SEQ ID NO: 5441001 - DNA, 25 bp, Homo sapien
gcttgctctctcttggcatggagta

SEQ ID NO: 5441002 - DNA, 25 bp, Homo sapien
ggcagcttgctctctcttggcatgg

SEQ ID NO: 5441003 - DNA, 25 bp, Homo sapien
ttggcatggagtatgcatggcagct

SEQ ID NO: 5441004 - DNA, 25 bp, Homo sapien
ggtggtagcaattggcaaaaactaa

SEQ ID NO: 5441005 - DNA, 25 bp, Homo sapien
aacacactcagggtatggatatgca

SEQ ID NO: 5441006 - DNA, 25 bp, Homo sapien
taaaactcattagtggtcagggaaa

SEQ ID NO: 5441007 - DNA, 25 bp, Homo sapien
gcaagaggccattcccaccaaaaaa

SEQ ID NO: 5441008 - DNA, 25 bp, Homo sapien
gaattggagattcaggtgccctgta

SEQ ID NO: 5441009 - DNA, 25 bp, Homo sapien
cctttaggcttggttgcgcttgtcc

SEQ ID NO: 5441010 - DNA, 25 bp, Homo sapien
gaatttagtaattctgggtatggta

SEQ ID NO: 5441011 - DNA, 25 bp, Homo sapien
tggttcctggatgtcgacctcgcaa

SEQ ID NO: 5441012 - DNA, 25 bp, Homo sapien
tgagtcaccccagatccattctgtg

SEQ ID NO: 5441013 - DNA, 25 bp, Homo sapien
acagtagctacctggcagctgtctt

SEQ ID NO: 5441014 - DNA, 25 bp, Homo sapien
ctgacagtagctacctggcagctgt

SEQ ID NO: 5441015 - DNA, 25 bp, Homo sapien
cagctgtcttccaaggcttcacgtt

SEQ ID NO: 5441016 - DNA, 25 bp, Homo sapien
gctgtcttccaaggcttcacgttct

SEQ ID NO: 5441017 - DNA, 25 bp, Homo sapien
acaatgtgggtgatttgcattctcc

SEQ ID NO: 5441018 - DNA, 25 bp, Homo sapien
ctctgagcgttcacactgtcctctc

SEQ ID NO: 5441019 - DNA, 25 bp, Homo sapien
cagcgtgacttgtagtgtgcaccaa

SEQ ID NO: 5441020 - DNA, 25 bp, Homo sapien
tgtgcaccaagttttgcagagcctt

SEQ ID NO: 5441021 - DNA, 25 bp, Homo sapien
gcctggatctgccagagctcttact

SEQ ID NO: 5441022 - DNA, 25 bp, Homo sapien
ctggatctgccagagctcttacttg

SEQ ID NO: 5441023 - DNA, 25 bp, Homo sapien
gatctgccagagctcttacttgttt

SEQ ID NO: 5441024 - DNA, 25 bp, Homo sapien
tggatctgccagagctcttacttgt

SEQ ID NO: 5441025 - DNA, 25 bp, Homo sapien
cctgagtccagcgaaatcggaggac

SEQ ID NO: 5441026 - DNA, 25 bp, Homo sapien
ggagtcaggactcttctgtgaaatg

SEQ ID NO: 5441027 - DNA, 25 bp, Homo sapien
ttaccggagcagaattactagaatg

SEQ ID NO: 5441028 - DNA, 25 bp, Homo sapien
gactctggccttttaccggagcaga

SEQ ID NO: 5441029 - DNA, 25 bp, Homo sapien
gagagctgcttggtccttgcacctc

SEQ ID NO: 5441030 - DNA, 25 bp, Homo sapien
ttggaatgtaaaccccaaggtgatg

SEQ ID NO: 5441031 - DNA, 25 bp, Homo sapien
tctaccacgtgagaacatagcatct

SEQ ID NO: 5441032 - DNA, 25 bp, Homo sapien
tacagacagtgaagagtattgtgcc

SEQ ID NO: 5441033 - DNA, 25 bp, Homo sapien
tctaatacggtgctgcaatcaaggg

SEQ ID NO: 5441034 - DNA, 25 bp, Homo sapien
tctccacaaaggaaacgtttggatg

SEQ ID NO: 5441035 - DNA, 25 bp, Homo sapien
aagagacttccaccattcatgctgg

SEQ ID NO: 5441036 - DNA, 25 bp, Homo sapien
tagctgtatctctgtgagcattcac

SEQ ID NO: 5441037 - DNA, 25 bp, Homo sapien
ggtgctgaccttcactatctaccag

SEQ ID NO: 5441038 - DNA, 25 bp, Homo sapien
gctgaccttcactatctaccagaaa

SEQ ID NO: 5441039 - DNA, 25 bp, Homo sapien
gtgctgaccttcactatctaccaga

SEQ ID NO: 5441040 - DNA, 25 bp, Homo sapien
ctgaccttcactatctaccagaaaa

SEQ ID NO: 5441041 - DNA, 25 bp, Homo sapien
taagctcatactctacagctcccaa

SEQ ID NO: 5441042 - DNA, 25 bp, Homo sapien
tacagctcccaatttgtcctctgtt

SEQ ID NO: 5441043 - DNA, 25 bp, Homo sapien
tgatgttctctaagctcatactcta

SEQ ID NO: 5441044 - DNA, 25 bp, Homo sapien
catactctacagctcccaatttgtc

SEQ ID NO: 5441045 - DNA, 25 bp, Homo sapien
gagtattctggccattgtctgccgc

SEQ ID NO: 5441046 - DNA, 25 bp, Homo sapien
tctggccattgtctgccgcttcact

SEQ ID NO: 5441047 - DNA, 25 bp, Homo sapien
caaacacaaagagtattctggccat

SEQ ID NO: 5441048 - DNA, 25 bp, Homo sapien
caggcaaacacaaagagtattctgg

SEQ ID NO: 5441049 - DNA, 25 bp, Homo sapien
tctaagactctcaaccagggcatgg

SEQ ID NO: 5441050 - DNA, 25 bp, Homo sapien
tccagggcatgagattgcagtccac

SEQ ID NO: 5441051 - DNA, 25 bp, Homo sapien
gattagattctaagcctgcaacccc

SEQ ID NO: 5441052 - DNA, 25 bp, Homo sapien
tcagtgctatagaatgccagggatc

SEQ ID NO: 5441053 - DNA, 25 bp, Homo sapien
ggtaatatccactcattctccactg

SEQ ID NO: 5441054 - DNA, 25 bp, Homo sapien
ctagctgctgctaataatggcagca

SEQ ID NO: 5441055 - DNA, 25 bp, Homo sapien
gctgctaataatggcagcactgggt

SEQ ID NO: 5441056 - DNA, 25 bp, Homo sapien
ggcagcactgggtaatatccactca

SEQ ID NO: 5441057 - DNA, 25 bp, Homo sapien
catgtgcttcatgtaacaagttctg

SEQ ID NO: 5441058 - DNA, 25 bp, Homo sapien
cttaggccattcacccccatgtgct

SEQ ID NO: 5441059 - DNA, 25 bp, Homo sapien
atgtgcttcatgtaacaagttctgg

SEQ ID NO: 5441060 - DNA, 25 bp, Homo sapien
gtatacctactttaatgacaccaat

SEQ ID NO: 5441061 - DNA, 25 bp, Homo sapien
gggttgtatacctactttaatgaca

SEQ ID NO: 5441062 - DNA, 25 bp, Homo sapien
acaccaatgttaataagttctcgta

SEQ ID NO: 5441063 - DNA, 25 bp, Homo sapien
gttgtatacctactttaatgacacc

SEQ ID NO: 5441064 - DNA, 25 bp, Homo sapien
aacttgagttatctgttctgcttta

SEQ ID NO: 5441065 - DNA, 25 bp, Homo sapien
gtttggttagacatattcttgagtg

SEQ ID NO: 5441066 - DNA, 25 bp, Homo sapien
tccctaacttgagttatctgttctg

SEQ ID NO: 5441067 - DNA, 25 bp, Homo sapien
ttcatcttccctaacttgagttatc

SEQ ID NO: 5441068 - DNA, 25 bp, Homo sapien
cagagggcatcttattaacgagggc

SEQ ID NO: 5441069 - DNA, 25 bp, Homo sapien
tcaaatgagtcagcaccctagtgga

SEQ ID NO: 5441070 - DNA, 25 bp, Homo sapien
gaatccaatcagaggctggtagcca

SEQ ID NO: 5441071 - DNA, 25 bp, Homo sapien
gatcctaaacagaaaccgtgggtgc

SEQ ID NO: 5441072 - DNA, 25 bp, Homo sapien
catgcgtttgagtgtcttaattctt

SEQ ID NO: 5441073 - DNA, 25 bp, Homo sapien
ctgaaatttcatgcgtttgagtgtc

SEQ ID NO: 5441074 - DNA, 25 bp, Homo sapien
aaatgacttaaagatgtggccatat

SEQ ID NO: 5441075 - DNA, 25 bp, Homo sapien
aaagatgtggccatatggtgtgaaa

SEQ ID NO: 5441076 - DNA, 25 bp, Homo sapien
gtgctacaggttctgtggaggtaca

SEQ ID NO: 5441077 - DNA, 25 bp, Homo sapien
cctacgtcctcagagcaattttaga

SEQ ID NO: 5441078 - DNA, 25 bp, Homo sapien
aattgggaaagtgctacaggttctg

SEQ ID NO: 5441079 - DNA, 25 bp, Homo sapien
tgtggaggtacagttcacctacgtc

SEQ ID NO: 5441080 - DNA, 25 bp, Homo sapien
tcaagtagtgataaaacggagacaa

SEQ ID NO: 5441081 - DNA, 25 bp, Homo sapien
taatcagggtagtagtttcctctcc

SEQ ID NO: 5441082 - DNA, 25 bp, Homo sapien
cttccaagtcaaaaccaatacggtg

SEQ ID NO: 5441083 - DNA, 25 bp, Homo sapien
tctgtgtttaaatccagcagtccca

SEQ ID NO: 5441084 - DNA, 25 bp, Homo sapien
agtttgcagtttcgctccactcccg

SEQ ID NO: 5441085 - DNA, 25 bp, Homo sapien
cacaactgtcacaacgccctgaagc

SEQ ID NO: 5441086 - DNA, 25 bp, Homo sapien
gcctcccgcagattggcactcagct

SEQ ID NO: 5441087 - DNA, 25 bp, Homo sapien
gatcccctcactgcaaggctgaaat

SEQ ID NO: 5441088 - DNA, 25 bp, Homo sapien
taacatctgatgtgtagcttttgca

SEQ ID NO: 5441089 - DNA, 25 bp, Homo sapien
taggaccatgtctggaataacacaa

SEQ ID NO: 5441090 - DNA, 25 bp, Homo sapien
caatatttgtgtttgagcactggca

SEQ ID NO: 5441091 - DNA, 25 bp, Homo sapien
cagacaaaacaatagcgaagagccc

SEQ ID NO: 5441092 - DNA, 25 bp, Homo sapien
ctaggatggtggaagtacagacaac

SEQ ID NO: 5441093 - DNA, 25 bp, Homo sapien
tgggatttcagcatggccccaaaac

SEQ ID NO: 5441094 - DNA, 25 bp, Homo sapien
tacgggaaccaaagcataatgagac

SEQ ID NO: 5441095 - DNA, 25 bp, Homo sapien
gaaatgtgtttcttatgctcgccca

SEQ ID NO: 5441096 - DNA, 25 bp, Homo sapien
cacgttgcagggctaatgatatatc

SEQ ID NO: 5441097 - DNA, 25 bp, Homo sapien
aatacttgacgggagcttctaggct

SEQ ID NO: 5441098 - DNA, 25 bp, Homo sapien
cctgcattaacagggtgtggctcat

SEQ ID NO: 5441099 - DNA, 25 bp, Homo sapien
ccagtgccaggagctacgagcattc

SEQ ID NO: 5441100 - DNA, 25 bp, Homo sapien
tctgcacaagactgcgcttctcagg

SEQ ID NO: 5441101 - DNA, 25 bp, Homo sapien
gaagagcactgaaatccctcctcgt

SEQ ID NO: 5441102 - DNA, 25 bp, Homo sapien
tcagcttcgccaaagagaaacacgc

SEQ ID NO: 5441103 - DNA, 25 bp, Homo sapien
ggaacatgcagcaccagatcctcag

SEQ ID NO: 5441104 - DNA, 25 bp, Homo sapien
cacactattccactgtgacaccaga

SEQ ID NO: 5441105 - DNA, 25 bp, Homo sapien
gctcccaggcaagggtggattccct

SEQ ID NO: 5441106 - DNA, 25 bp, Homo sapien
tccatatcgatagcctggaaggcct

SEQ ID NO: 5441107 - DNA, 25 bp, Homo sapien
ccagagagagggtaaatcggaatca

SEQ ID NO: 5441108 - DNA, 25 bp, Homo sapien
tattgtaatgactgatctcttgtag

SEQ ID NO: 5441109 - DNA, 25 bp, Homo sapien
tcaacagaagttgctattgtaatga

SEQ ID NO: 5441110 - DNA, 25 bp, Homo sapien
ctcttgtagtcttgatcggaaaata

SEQ ID NO: 5441111 - DNA, 25 bp, Homo sapien
tgtaatgactgatctcttgtagtct

SEQ ID NO: 5441112 - DNA, 25 bp, Homo sapien
tctgaaacgtttagtaaacaggcag

SEQ ID NO: 5441113 - DNA, 25 bp, Homo sapien
tgtgggcgtcttctggttttcattt

SEQ ID NO: 5441114 - DNA, 25 bp, Homo sapien
tcagtgtgtttatgcagcttaattg

SEQ ID NO: 5441115 - DNA, 25 bp, Homo sapien
acacaaggggtgtgggcgtcttctg

SEQ ID NO: 5441116 - DNA, 25 bp, Homo sapien
cagtgtgtttatgcagcttaattgt

SEQ ID NO: 5441117 - DNA, 25 bp, Homo sapien
ctgcgcggtgccgactaggttcctg

SEQ ID NO: 5441118 - DNA, 25 bp, Homo sapien
gctgaaagggaacccgaagtgactc

SEQ ID NO: 5441119 - DNA, 25 bp, Homo sapien
caccggcacttggaggccgcaagga

SEQ ID NO: 5441120 - DNA, 25 bp, Homo sapien
aaggacgctcgccaggctgccgcaa

SEQ ID NO: 5441121 - DNA, 25 bp, Homo sapien
agctctcgaaccagcggccgcgcct

SEQ ID NO: 5441122 - DNA, 25 bp, Homo sapien
gggttgtggcgcctgggagcgaggg

SEQ ID NO: 5441123 - DNA, 25 bp, Homo sapien
aggtctcgcgggacgcagcagcggc

SEQ ID NO: 5441124 - DNA, 25 bp, Homo sapien
ccggccgagctctcgaaccagcggc

SEQ ID NO: 5441125 - DNA, 25 bp, Homo sapien
gccgcgcgtggcccgcgcgcagcct

SEQ ID NO: 5441126 - DNA, 25 bp, Homo sapien
cgcgcgtggcccgcgcgcagcctcc

SEQ ID NO: 5441127 - DNA, 25 bp, Homo sapien
ggtggggcagggcgaccgcccagcc

SEQ ID NO: 5441128 - DNA, 25 bp, Homo sapien
ggcagggcgaccgcccagcccaagt

SEQ ID NO: 5441129 - DNA, 25 bp, Homo sapien
caacagtattatgtgcgattatgtc

SEQ ID NO: 5441130 - DNA, 25 bp, Homo sapien
tatgtgcgattatgtcagatccagc

SEQ ID NO: 5441131 - DNA, 25 bp, Homo sapien
tattatgtgcgattatgtcagatcc

SEQ ID NO: 5441132 - DNA, 25 bp, Homo sapien
gcgattatgtcagatccagccttct

SEQ ID NO: 5441133 - DNA, 25 bp, Homo sapien
cttgccaaatgagacagcgtaataa

SEQ ID NO: 5441134 - DNA, 25 bp, Homo sapien
ctttccaaacaatcggataatgata

SEQ ID NO: 5441135 - DNA, 25 bp, Homo sapien
gacagcgtaataacattacatctaa

SEQ ID NO: 5441136 - DNA, 25 bp, Homo sapien
gataatgatactacttgccaaatga

SEQ ID NO: 5441137 - DNA, 25 bp, Homo sapien
caacctgtttctgattgtaggcctg

SEQ ID NO: 5441138 - DNA, 25 bp, Homo sapien
tgattgtaggcctgagaggaaactg

SEQ ID NO: 5441139 - DNA, 25 bp, Homo sapien
gattgtccgcttgtgccaacctgtt

SEQ ID NO: 5441140 - DNA, 25 bp, Homo sapien
cctggccctgggattgtccgcttgt

SEQ ID NO: 5441141 - DNA, 25 bp, Homo sapien
ggctgatgtacttatcaaggacaat

SEQ ID NO: 5441142 - DNA, 25 bp, Homo sapien
taactgccatggcttgtcagtgctt

SEQ ID NO: 5441143 - DNA, 25 bp, Homo sapien
ccaggaaggatactggttttgaggc

SEQ ID NO: 5441144 - DNA, 25 bp, Homo sapien
gtgctttgatgaaacctcagatgca

SEQ ID NO: 5441145 - DNA, 25 bp, Homo sapien
tagttaaactcacatggctgctcag

SEQ ID NO: 5441146 - DNA, 25 bp, Homo sapien
gaagcccaatagaagcccttcagct

SEQ ID NO: 5441147 - DNA, 25 bp, Homo sapien
gctcagggatccaaaagggagcatt

SEQ ID NO: 5441148 - DNA, 25 bp, Homo sapien
gaataggtgattcgtttgctccata

SEQ ID NO: 5441149 - DNA, 25 bp, Homo sapien
aaaataggattctgtacttcccact

SEQ ID NO: 5441150 - DNA, 25 bp, Homo sapien
tgtacttcccactagcttgcagctc

SEQ ID NO: 5441151 - DNA, 25 bp, Homo sapien
gattctgtacttcccactagcttgc

SEQ ID NO: 5441152 - DNA, 25 bp, Homo sapien
tacttcccactagcttgcagctcat

SEQ ID NO: 5441153 - DNA, 25 bp, Homo sapien
tcaccaaagggtatctctaaatatg

SEQ ID NO: 5441154 - DNA, 25 bp, Homo sapien
tctcgttaacatcaaaggtaggtgg

SEQ ID NO: 5441155 - DNA, 25 bp, Homo sapien
tctgctgtcaagtatatcaggtttc

SEQ ID NO: 5441156 - DNA, 25 bp, Homo sapien
ggtttcagttattcatccacaggat

SEQ ID NO: 5441157 - DNA, 25 bp, Homo sapien
catttgtgccagatcttcccgccaa

SEQ ID NO: 5441158 - DNA, 25 bp, Homo sapien
ctctgctgctccttatagatacttc

SEQ ID NO: 5441159 - DNA, 25 bp, Homo sapien
ccgccaaggcgagctgtaaaagcat

SEQ ID NO: 5441160 - DNA, 25 bp, Homo sapien
gctgctccttatagatacttcattt

SEQ ID NO: 5441161 - DNA, 25 bp, Homo sapien
tttcagtcaggactcacagttgtaa

SEQ ID NO: 5441162 - DNA, 25 bp, Homo sapien
tgtaagtaacagaagctaattctgg

SEQ ID NO: 5441163 - DNA, 25 bp, Homo sapien
tcaggactcacagttgtaagtaaca

SEQ ID NO: 5441164 - DNA, 25 bp, Homo sapien
tcttcttagcctgttacaggtaaca

SEQ ID NO: 5441165 - DNA, 25 bp, Homo sapien
cacaaaattgacatagcacattaca

SEQ ID NO: 5441166 - DNA, 25 bp, Homo sapien
atgcttaaagaagggatccaactcc

SEQ ID NO: 5441167 - DNA, 25 bp, Homo sapien
tggctaagctaaagtcatgaaggtt

SEQ ID NO: 5441168 - DNA, 25 bp, Homo sapien
gcgatatatgagaaggctttggcta

SEQ ID NO: 5441169 - DNA, 25 bp, Homo sapien
gcatgtgtctatccatttgaccctg

SEQ ID NO: 5441170 - DNA, 25 bp, Homo sapien
taatcaattgagagctgttactttc

SEQ ID NO: 5441171 - DNA, 25 bp, Homo sapien
tggaggtgtctcctacagggctgta

SEQ ID NO: 5441172 - DNA, 25 bp, Homo sapien
ctggaggtgtctcctacagggctgt

SEQ ID NO: 5441173 - DNA, 25 bp, Homo sapien
agctaatcaattgagagctgttact

SEQ ID NO: 5441174 - DNA, 25 bp, Homo sapien
tcaggaaactcaaggtatgaggaga

SEQ ID NO: 5441175 - DNA, 25 bp, Homo sapien
aggagagagattcccttccttcggg

SEQ ID NO: 5441176 - DNA, 25 bp, Homo sapien
ggcttgtaggagacttcccacggaa

SEQ ID NO: 5441177 - DNA, 25 bp, Homo sapien
catgagcacagagatcttcgtatat

SEQ ID NO: 5441178 - DNA, 25 bp, Homo sapien
gcagaacccaccaatcacaaacgcc

SEQ ID NO: 5441179 - DNA, 25 bp, Homo sapien
agaacccaccaatcacaaacgccct

SEQ ID NO: 5441180 - DNA, 25 bp, Homo sapien
cagaacccaccaatcacaaacgccc

SEQ ID NO: 5441181 - DNA, 25 bp, Homo sapien
ggcagaacccaccaatcacaaacgc

SEQ ID NO: 5441182 - DNA, 25 bp, Homo sapien
gatccgcagcgcagcaacgaattgc

SEQ ID NO: 5441183 - DNA, 25 bp, Homo sapien
gctttccaccgtgcctggagccgat

SEQ ID NO: 5441184 - DNA, 25 bp, Homo sapien
tgctgccgcagctcggaatcggaaa

SEQ ID NO: 5441185 - DNA, 25 bp, Homo sapien
aacgaattgctcctgttggcggcgg

SEQ ID NO: 5441186 - DNA, 25 bp, Homo sapien
agttgttaccaccacagcatgaatg

SEQ ID NO: 5441187 - DNA, 25 bp, Homo sapien
gccatcatagcaaaatgagacagtg

SEQ ID NO: 5441188 - DNA, 25 bp, Homo sapien
ctaggttgtctatccagtatgtgaa

SEQ ID NO: 5441189 - DNA, 25 bp, Homo sapien
ttaagagtaagtcaccaggtacaca

SEQ ID NO: 5441190 - DNA, 25 bp, Homo sapien
taagcagcccacctagttgaacctc

SEQ ID NO: 5441191 - DNA, 25 bp, Homo sapien
tttataggtgatagaaaagccgcct

SEQ ID NO: 5441192 - DNA, 25 bp, Homo sapien
gaagtactggagatgtgctgcacat

SEQ ID NO: 5441193 - DNA, 25 bp, Homo sapien
aattactggtcacaacgaatcccgg

SEQ ID NO: 5441194 - DNA, 25 bp, Homo sapien
tgcttaatgaagatcaaaacctggt

SEQ ID NO: 5441195 - DNA, 25 bp, Homo sapien
tacatgactctggatttatactttg

SEQ ID NO: 5441196 - DNA, 25 bp, Homo sapien
cagagatccacacacaatggctcac

SEQ ID NO: 5441197 - DNA, 25 bp, Homo sapien
tatgtggtcttcaatgacactgcaa

SEQ ID NO: 5441198 - DNA, 25 bp, Homo sapien
ttcgatgacaacacttttaggatct

SEQ ID NO: 5441199 - DNA, 25 bp, Homo sapien
acacttttaggatctcatttattca

SEQ ID NO: 5441200 - DNA, 25 bp, Homo sapien
gacaacacttttaggatctcattta

SEQ ID NO: 5441201 - DNA, 25 bp, Homo sapien
gatgacaacacttttaggatctcat

SEQ ID NO: 5441202 - DNA, 25 bp, Homo sapien
ttatgcatcagaacaccctgtgagg

SEQ ID NO: 5441203 - DNA, 25 bp, Homo sapien
ggcaatcatcccatgaccacgaggg

SEQ ID NO: 5441204 - DNA, 25 bp, Homo sapien
tattctagaccctttgccagtgact

SEQ ID NO: 5441205 - DNA, 25 bp, Homo sapien
gggaaagctttctcatactaggaca

SEQ ID NO: 5441206 - DNA, 25 bp, Homo sapien
taacaatctgtatcaagtagaatcc

SEQ ID NO: 5441207 - DNA, 25 bp, Homo sapien
tactaaagtgttaatgtgcattgca

SEQ ID NO: 5441208 - DNA, 25 bp, Homo sapien
caccccttcgtacttacataatctg

SEQ ID NO: 5441209 - DNA, 25 bp, Homo sapien
tatatcgttataccttactaaagtg

SEQ ID NO: 5441210 - DNA, 25 bp, Homo sapien
cattcgtcgtgcatagaagtcccta

SEQ ID NO: 5441211 - DNA, 25 bp, Homo sapien
gcattcagatggaaggtgcttccaa

SEQ ID NO: 5441212 - DNA, 25 bp, Homo sapien
gaagtccctatattcctctggtaac

SEQ ID NO: 5441213 - DNA, 25 bp, Homo sapien
gtaactcggccagtgttttcaaggc

SEQ ID NO: 5441214 - DNA, 25 bp, Homo sapien
taaccagatcccttcgttagcacac

SEQ ID NO: 5441215 - DNA, 25 bp, Homo sapien
gcacactccaggcttttaacagaat

SEQ ID NO: 5441216 - DNA, 25 bp, Homo sapien
gtaagaaataattcttgtaaccaga

SEQ ID NO: 5441217 - DNA, 25 bp, Homo sapien
tatcacgaattgcatatagccaatg

SEQ ID NO: 5441218 - DNA, 25 bp, Homo sapien
aaaagatggcaatagatttgaagac

SEQ ID NO: 5441219 - DNA, 25 bp, Homo sapien
aagccattatatcatatctggccct

SEQ ID NO: 5441220 - DNA, 25 bp, Homo sapien
catagatcttaatcatgctcccaag

SEQ ID NO: 5441221 - DNA, 25 bp, Homo sapien
taatacgttcgttgctttcaatgaa

SEQ ID NO: 5441222 - DNA, 25 bp, Homo sapien
aggttgcccttgaaagcaagactgt

SEQ ID NO: 5441223 - DNA, 25 bp, Homo sapien
tctgttttggccttgaaagatactt

SEQ ID NO: 5441224 - DNA, 25 bp, Homo sapien
cacaaatgatactacaggtgttgag

SEQ ID NO: 5441225 - DNA, 25 bp, Homo sapien
ttttcccagatataaagtgtcccac

SEQ ID NO: 5441226 - DNA, 25 bp, Homo sapien
gatatttagccaagtctgggttatc

SEQ ID NO: 5441227 - DNA, 25 bp, Homo sapien
ccagcttcaagggaacattcatatc

SEQ ID NO: 5441228 - DNA, 25 bp, Homo sapien
gcttcaagggaacattcatatcttc

SEQ ID NO: 5441229 - DNA, 25 bp, Homo sapien
gggttatctatattcagtacttctg

SEQ ID NO: 5441230 - DNA, 25 bp, Homo sapien
gtacaacacgcttttttcctgtcac

SEQ ID NO: 5441231 - DNA, 25 bp, Homo sapien
taaatactgggcatctcgaggactg

SEQ ID NO: 5441232 - DNA, 25 bp, Homo sapien
gtcacttgtattaacaaattatcca

SEQ ID NO: 5441233 - DNA, 25 bp, Homo sapien
tctcgaggactgaagagtacaacac

SEQ ID NO: 5441234 - DNA, 25 bp, Homo sapien
tacaattcaaactagcgttcctctg

SEQ ID NO: 5441235 - DNA, 25 bp, Homo sapien
gagcaatcgtttcccatgaatgtaa

SEQ ID NO: 5441236 - DNA, 25 bp, Homo sapien
gagtcacataattctcagctaagga

SEQ ID NO: 5441237 - DNA, 25 bp, Homo sapien
taaaacataatcatagaggccaggc

SEQ ID NO: 5441238 - DNA, 25 bp, Homo sapien
acacatttttgctgccctacaaata

SEQ ID NO: 5441239 - DNA, 25 bp, Homo sapien
ccccaaattcttacaattggtaatg

SEQ ID NO: 5441240 - DNA, 25 bp, Homo sapien
tgacattctcaaggcatatatatcc

SEQ ID NO: 5441241 - DNA, 25 bp, Homo sapien
tggtaatgactcaacaagcttcagc

SEQ ID NO: 5441242 - DNA, 25 bp, Homo sapien
gatgaatcaagaataggaccacagg

SEQ ID NO: 5441243 - DNA, 25 bp, Homo sapien
tacaaatgtgaggaaccaactaggc

SEQ ID NO: 5441244 - DNA, 25 bp, Homo sapien
tatgcacagcacctattttcaaaag

SEQ ID NO: 5441245 - DNA, 25 bp, Homo sapien
tacacagatgtttagggtaacctat

SEQ ID NO: 5441246 - DNA, 25 bp, Homo sapien
tgtaatcctggtgaactaattcgaa

SEQ ID NO: 5441247 - DNA, 25 bp, Homo sapien
tctcctttcaacaaaggaaactgct

SEQ ID NO: 5441248 - DNA, 25 bp, Homo sapien
tcataatgagtccatagttgtaatc

SEQ ID NO: 5441249 - DNA, 25 bp, Homo sapien
aactgctttctgatatctgcaacat

SEQ ID NO: 5441250 - DNA, 25 bp, Homo sapien
tgcatttacagaaacataaaaagaa

SEQ ID NO: 5441251 - DNA, 25 bp, Homo sapien
gcatttacagaaacataaaaagaaa

SEQ ID NO: 5441252 - DNA, 25 bp, Homo sapien
ctgcatttacagaaacataaaaaga

SEQ ID NO: 5441253 - DNA, 25 bp, Homo sapien
cattaatagaaaggttctttctact

SEQ ID NO: 5441254 - DNA, 25 bp, Homo sapien
tataaacactaagattctacaggcc

SEQ ID NO: 5441255 - DNA, 25 bp, Homo sapien
taaaattacagtgttgccagttaac

SEQ ID NO: 5441256 - DNA, 25 bp, Homo sapien
tctacaggcctacctgaatacaaag

SEQ ID NO: 5441257 - DNA, 25 bp, Homo sapien
cagggaatatgtcaggcagtaagta

SEQ ID NO: 5441258 - DNA, 25 bp, Homo sapien
cttctccaagtgaccgtaagtagta

SEQ ID NO: 5441259 - DNA, 25 bp, Homo sapien
caagtgaccgtaagtagtatttctc

SEQ ID NO: 5441260 - DNA, 25 bp, Homo sapien
ttctccaagtgaccgtaagtagtat

SEQ ID NO: 5441261 - DNA, 25 bp, Homo sapien
tccaagtgaccgtaagtagtatttc

SEQ ID NO: 5441262 - DNA, 25 bp, Homo sapien
cctttctactaatgctctctggtgg

SEQ ID NO: 5441263 - DNA, 25 bp, Homo sapien
ctactaatgctctctggtggccata

SEQ ID NO: 5441264 - DNA, 25 bp, Homo sapien
tcatgatagtgactggatccataaa

SEQ ID NO: 5441265 - DNA, 25 bp, Homo sapien
ttctactaatgctctctggtggcca

SEQ ID NO: 5441266 - DNA, 25 bp, Homo sapien
tccaggatgagttggcagagactgt

SEQ ID NO: 5441267 - DNA, 25 bp, Homo sapien
caatgcaggacttttctcataggca

SEQ ID NO: 5441268 - DNA, 25 bp, Homo sapien
caggattggaatctaggtcatgctc

SEQ ID NO: 5441269 - DNA, 25 bp, Homo sapien
taaaagacctagacattgccaccca

SEQ ID NO: 5441270 - DNA, 25 bp, Homo sapien
tgcgctcgaccaacacaggaaattt

SEQ ID NO: 5441271 - DNA, 25 bp, Homo sapien
tacgaatgtctatcagagacggctg

SEQ ID NO: 5441272 - DNA, 25 bp, Homo sapien
tagacatcaaagtaccaaagggcaa

SEQ ID NO: 5441273 - DNA, 25 bp, Homo sapien
tctcaggtgcagctaatggaatcca

SEQ ID NO: 5441274 - DNA, 25 bp, Homo sapien
cctctggaccaactggtcaaaaggt

SEQ ID NO: 5441275 - DNA, 25 bp, Homo sapien
tgccctctggaccaactggtcaaaa

SEQ ID NO: 5441276 - DNA, 25 bp, Homo sapien
tctggaccaactggtcaaaaggtaa

SEQ ID NO: 5441277 - DNA, 25 bp, Homo sapien
agctgccctctggaccaactggtca

SEQ ID NO: 5441278 - DNA, 25 bp, Homo sapien
tgatgaacagggctgaacactgtgg

SEQ ID NO: 5441279 - DNA, 25 bp, Homo sapien
tacatcacactcttgagctagaagg

SEQ ID NO: 5441280 - DNA, 25 bp, Homo sapien
cactatacataaaggcttgctggag

SEQ ID NO: 5441281 - DNA, 25 bp, Homo sapien
gaacacagaagccagtaacactgct

SEQ ID NO: 5441282 - DNA, 25 bp, Homo sapien
tgtactgagaaagtcgaaagaaaag

SEQ ID NO: 5441283 - DNA, 25 bp, Homo sapien
tctccttgcactgttttcccagaaa

SEQ ID NO: 5441284 - DNA, 25 bp, Homo sapien
tccttgcactgttttcccagaaata

SEQ ID NO: 5441285 - DNA, 25 bp, Homo sapien
ttctccttgcactgttttcccagaa

SEQ ID NO: 5441286 - DNA, 25 bp, Homo sapien
cttgcactgttttcccagaaatata

SEQ ID NO: 5441287 - DNA, 25 bp, Homo sapien
tatatcctcccgcaaaaagctaagg

SEQ ID NO: 5441288 - DNA, 25 bp, Homo sapien
tggcccttggaggaacgcagaagct

SEQ ID NO: 5441289 - DNA, 25 bp, Homo sapien
gatactaccctgctagaatgccgtt

SEQ ID NO: 5441290 - DNA, 25 bp, Homo sapien
tgaattatgtttgcaccaggtggcc

SEQ ID NO: 5441291 - DNA, 25 bp, Homo sapien
ggaataacacaaaagtgtttcaaga

SEQ ID NO: 5441292 - DNA, 25 bp, Homo sapien
aggaataacacaaaagtgtttcaag

SEQ ID NO: 5441293 - DNA, 25 bp, Homo sapien
caggaataacacaaaagtgtttcaa

SEQ ID NO: 5441294 - DNA, 25 bp, Homo sapien
gaataacacaaaagtgtttcaagac

SEQ ID NO: 5441295 - DNA, 25 bp, Homo sapien
agcagacagagtagctcagcccaga

SEQ ID NO: 5441296 - DNA, 25 bp, Homo sapien
tgtggcaaaccttacatgatgagac

SEQ ID NO: 5441297 - DNA, 25 bp, Homo sapien
taatcatgggctccgtggagtcagg

SEQ ID NO: 5441298 - DNA, 25 bp, Homo sapien
gataatgtacccttttgcagcacgc

SEQ ID NO: 5441299 - DNA, 25 bp, Homo sapien
aatcaatcccttccaacacaagagg

SEQ ID NO: 5441300 - DNA, 25 bp, Homo sapien
gtccatttgcttgtacatggcccca

SEQ ID NO: 5441301 - DNA, 25 bp, Homo sapien
tccctccaacttggcttaggtaatc

SEQ ID NO: 5441302 - DNA, 25 bp, Homo sapien
gaagtccatctgtgcaactgcagca

SEQ ID NO: 5441303 - DNA, 25 bp, Homo sapien
tcctaaatgaggaattactgggtca

SEQ ID NO: 5441304 - DNA, 25 bp, Homo sapien
catcaccaagagagtattaccagag

SEQ ID NO: 5441305 - DNA, 25 bp, Homo sapien
tgtacagtgtgagatataaaccgaa

SEQ ID NO: 5441306 - DNA, 25 bp, Homo sapien
tagaaatgccttccatagacctaga

SEQ ID NO: 5441307 - DNA, 25 bp, Homo sapien
atagaggagccagtcggcgtccccc

SEQ ID NO: 5441308 - DNA, 25 bp, Homo sapien
agaggagccagtcggcgtcccccgt

SEQ ID NO: 5441309 - DNA, 25 bp, Homo sapien
tcaatagaggagccagtcggcgtcc

SEQ ID NO: 5441310 - DNA, 25 bp, Homo sapien
caatagaggagccagtcggcgtccc

SEQ ID NO: 5441311 - DNA, 25 bp, Homo sapien
gtctaagggccaaccagtgatctgc

SEQ ID NO: 5441312 - DNA, 25 bp, Homo sapien
gctgtccgaaaggtaaagacgtgtc

SEQ ID NO: 5441313 - DNA, 25 bp, Homo sapien
gctggtttctcgaggttctgccccg

SEQ ID NO: 5441314 - DNA, 25 bp, Homo sapien
cacaccctgggtctctaaaaaccag

SEQ ID NO: 5441315 - DNA, 25 bp, Homo sapien
actgctcccgagaaacgccctccag

SEQ ID NO: 5441316 - DNA, 25 bp, Homo sapien
ccagccggggtaccgggaggtgctg

SEQ ID NO: 5441317 - DNA, 25 bp, Homo sapien
gcatgaactgctcccgagaaacgcc

SEQ ID NO: 5441318 - DNA, 25 bp, Homo sapien
gctgcatgaactgctcccgagaaac

SEQ ID NO: 5441319 - DNA, 25 bp, Homo sapien
tatttccacgaagcgctagggcctt

SEQ ID NO: 5441320 - DNA, 25 bp, Homo sapien
taaaaatggcgctggccgctcgttt

SEQ ID NO: 5441321 - DNA, 25 bp, Homo sapien
cacgagcgacagagaaaaggtccgc

SEQ ID NO: 5441322 - DNA, 25 bp, Homo sapien
tcttcggaacttcggctctaaagcg

SEQ ID NO: 5441323 - DNA, 25 bp, Homo sapien
gaatggtagacacacagcatgtccc

SEQ ID NO: 5441324 - DNA, 25 bp, Homo sapien
ggcactgcaatttggagaagtctag

SEQ ID NO: 5441325 - DNA, 25 bp, Homo sapien
ttagcaataattccatagtatcagc

SEQ ID NO: 5441326 - DNA, 25 bp, Homo sapien
tcaagatccagtcaaggtttacccg

SEQ ID NO: 5441327 - DNA, 25 bp, Homo sapien
aaaattaacacctggctgagaggcc

SEQ ID NO: 5441328 - DNA, 25 bp, Homo sapien
gatttccccagactggcaaaagggc

SEQ ID NO: 5441329 - DNA, 25 bp, Homo sapien
gcaaaagggctcatggtaccaaaaa

SEQ ID NO: 5441330 - DNA, 25 bp, Homo sapien
gacaaagacttcacaaccaagagcc

SEQ ID NO: 5441331 - DNA, 25 bp, Homo sapien
ctggcttcaaattccagcctcaagt

SEQ ID NO: 5441332 - DNA, 25 bp, Homo sapien
caggctggcttcaaattccagcctc

SEQ ID NO: 5441333 - DNA, 25 bp, Homo sapien
tgacaccatgcccagttcatttctt

SEQ ID NO: 5441334 - DNA, 25 bp, Homo sapien
accatgcccagttcatttcttaaaa

SEQ ID NO: 5441335 - DNA, 25 bp, Homo sapien
gaagcagaaggtactcaagccataa

SEQ ID NO: 5441336 - DNA, 25 bp, Homo sapien
agtatggacttgaatgagaaactcc

SEQ ID NO: 5441337 - DNA, 25 bp, Homo sapien
ggcccctgcactttcacggactgta

SEQ ID NO: 5441338 - DNA, 25 bp, Homo sapien
cagtgaagggcgaaggaagatcccc

SEQ ID NO: 5441339 - DNA, 25 bp, Homo sapien
tgaacatcttctggctattcttaga

SEQ ID NO: 5441340 - DNA, 25 bp, Homo sapien
attcttagatctttggtgaaagaat

SEQ ID NO: 5441341 - DNA, 25 bp, Homo sapien
gaggaaaagcagatatgcctggact

SEQ ID NO: 5441342 - DNA, 25 bp, Homo sapien
caaactctccgtatagggtagaggg

SEQ ID NO: 5441343 - DNA, 25 bp, Homo sapien
ctgactcagcacctcttgagggtct

SEQ ID NO: 5441344 - DNA, 25 bp, Homo sapien
cccatagctcagctagcacaggcag

SEQ ID NO: 5441345 - DNA, 25 bp, Homo sapien
cccttatctatttctgagagtcctt

SEQ ID NO: 5441346 - DNA, 25 bp, Homo sapien
gggtaaggctgcacatcgcaccagc

SEQ ID NO: 5441347 - DNA, 25 bp, Homo sapien
aaaatcctgaggttgtcacgggtct

SEQ ID NO: 5441348 - DNA, 25 bp, Homo sapien
cataggacagtaacccagtctgcct

SEQ ID NO: 5441349 - DNA, 25 bp, Homo sapien
tgcctttggcagtttcacacgagaa

SEQ ID NO: 5441350 - DNA, 25 bp, Homo sapien
cactgtgcagatgttccataggaca

SEQ ID NO: 5441351 - DNA, 25 bp, Homo sapien
ccttcagtgggaccaatgctactac

SEQ ID NO: 5441352 - DNA, 25 bp, Homo sapien
aatgctactacttccccatcaaact

SEQ ID NO: 5441353 - DNA, 25 bp, Homo sapien
atgcccttcagtgggaccaatgcta

SEQ ID NO: 5441354 - DNA, 25 bp, Homo sapien
cagtgggaccaatgctactacttcc

SEQ ID NO: 5441355 - DNA, 25 bp, Homo sapien
agactggtccacatcatacaaccca

SEQ ID NO: 5441356 - DNA, 25 bp, Homo sapien
tttctaacatgaggtttgtggcagc

SEQ ID NO: 5441357 - DNA, 25 bp, Homo sapien
ggactaaatatgtgaccaattctca

SEQ ID NO: 5441358 - DNA, 25 bp, Homo sapien
caattctcattctaatagagactgg

SEQ ID NO: 5441359 - DNA, 25 bp, Homo sapien
agaagctgagatagcagtgaacaaa

SEQ ID NO: 5441360 - DNA, 25 bp, Homo sapien
gagtttctgagatcctggttcctga

SEQ ID NO: 5441361 - DNA, 25 bp, Homo sapien
tttgagtccccagttagagtttctg

SEQ ID NO: 5441362 - DNA, 25 bp, Homo sapien
gttagagtttctgagatcctggttc

SEQ ID NO: 5441363 - DNA, 25 bp, Homo sapien
cttgggccatagatagaaatactca

SEQ ID NO: 5441364 - DNA, 25 bp, Homo sapien
cattgacttttgtccctcttgggcc

SEQ ID NO: 5441365 - DNA, 25 bp, Homo sapien
aaggatgcctattgtcttgcagtga

SEQ ID NO: 5441366 - DNA, 25 bp, Homo sapien
tcttgtaaaacaatcaaggatgcct

SEQ ID NO: 5441367 - DNA, 25 bp, Homo sapien
ggagaggtgtatgtttagaagcttc

SEQ ID NO: 5441368 - DNA, 25 bp, Homo sapien
agatgccaggagaggtgtatgttta

SEQ ID NO: 5441369 - DNA, 25 bp, Homo sapien
gaggtgtatgtttagaagcttctgc

SEQ ID NO: 5441370 - DNA, 25 bp, Homo sapien
ccaggagaggtgtatgtttagaagc

SEQ ID NO: 5441371 - DNA, 25 bp, Homo sapien
tttgattgaatgataactggtagct

SEQ ID NO: 5441372 - DNA, 25 bp, Homo sapien
acctttgatttgacgtttgattgaa

SEQ ID NO: 5441373 - DNA, 25 bp, Homo sapien
cataagggtatagtaaacctttgat

SEQ ID NO: 5441374 - DNA, 25 bp, Homo sapien
ggttccgggcagctggttttcactg

SEQ ID NO: 5441375 - DNA, 25 bp, Homo sapien
actcttgaccatagataacttggcc

SEQ ID NO: 5441376 - DNA, 25 bp, Homo sapien
gtgcatttttgtccattctctgaga

SEQ ID NO: 5441377 - DNA, 25 bp, Homo sapien
aagccttatttgtgctgcataatcc

SEQ ID NO: 5441378 - DNA, 25 bp, Homo sapien
tctcctgtaggtgttggtgcatttt

SEQ ID NO: 5441379 - DNA, 25 bp, Homo sapien
gccaggttttataacctcatgcagg

SEQ ID NO: 5441380 - DNA, 25 bp, Homo sapien
aggttttataacctcatgcaggccc

SEQ ID NO: 5441381 - DNA, 25 bp, Homo sapien
ttataagaagctgcggatttccaag

SEQ ID NO: 5441382 - DNA, 25 bp, Homo sapien
gctgcggatttccaagccaggtttt

SEQ ID NO: 5441383 - DNA, 25 bp, Homo sapien
cgaagtgccagcaggtaactaaagc

SEQ ID NO: 5441384 - DNA, 25 bp, Homo sapien
tagcagaatagtgtgtctaatgtcg

SEQ ID NO: 5441385 - DNA, 25 bp, Homo sapien
caaaaagtcaagtaggtagtgctca

SEQ ID NO: 5441386 - DNA, 25 bp, Homo sapien
gtagtgctcaattgaagtaattagc

SEQ ID NO: 5441387 - DNA, 25 bp, Homo sapien
tattgtctgtattgctgaaagccat

SEQ ID NO: 5441388 - DNA, 25 bp, Homo sapien
tgtattgtctgtattgctgaaagcc

SEQ ID NO: 5441389 - DNA, 25 bp, Homo sapien
gtattgtctgtattgctgaaagcca

SEQ ID NO: 5441390 - DNA, 25 bp, Homo sapien
gttttctcatttgatgcctcaaaga

SEQ ID NO: 5441391 - DNA, 25 bp, Homo sapien
ctcatttgatgcctcaaagagcctc

SEQ ID NO: 5441392 - DNA, 25 bp, Homo sapien
tttctcatttgatgcctcaaagagc

SEQ ID NO: 5441393 - DNA, 25 bp, Homo sapien
ttctcatttgatgcctcaaagagcc

SEQ ID NO: 5441394 - DNA, 25 bp, Homo sapien
agagcaggtattgttaatattcatg

SEQ ID NO: 5441395 - DNA, 25 bp, Homo sapien
tggaaaattggagccgcgaatgagt

SEQ ID NO: 5441396 - DNA, 25 bp, Homo sapien
catgggtagagcaggtattgttaat

SEQ ID NO: 5441397 - DNA, 25 bp, Homo sapien
ctgacatgggtagagcaggtattgt

SEQ ID NO: 5441398 - DNA, 25 bp, Homo sapien
ggcacactaaacacttgcaggacag

SEQ ID NO: 5441399 - DNA, 25 bp, Homo sapien
tcaaagtagtcacatatccacaggc

SEQ ID NO: 5441400 - DNA, 25 bp, Homo sapien
tcaatgggccactaacacatggaat

SEQ ID NO: 5441401 - DNA, 25 bp, Homo sapien
agaataattgtagaatgtgcaggga

SEQ ID NO: 5441402 - DNA, 25 bp, Homo sapien
tacagcacagtatcttttgaacctt

SEQ ID NO: 5441403 - DNA, 25 bp, Homo sapien
gaaatttggaaggtcattatgtgga

SEQ ID NO: 5441404 - DNA, 25 bp, Homo sapien
tttctgcataatggtatgaggctca

SEQ ID NO: 5441405 - DNA, 25 bp, Homo sapien
gaggctcattgtacacttgtcctca

SEQ ID NO: 5441406 - DNA, 25 bp, Homo sapien
agcttgatgtgggtccgtgaagttt

SEQ ID NO: 5441407 - DNA, 25 bp, Homo sapien
actttgacttagacaagtccatagt

SEQ ID NO: 5441408 - DNA, 25 bp, Homo sapien
gacttagacaagtccatagtcaggg

SEQ ID NO: 5441409 - DNA, 25 bp, Homo sapien
gggtccgtgaagtttgaagggcaca

SEQ ID NO: 5441410 - DNA, 25 bp, Homo sapien
ccacaatacgttcccggagacgaag

SEQ ID NO: 5441411 - DNA, 25 bp, Homo sapien
cccagattatgctctcaagaatgga

SEQ ID NO: 5441412 - DNA, 25 bp, Homo sapien
atacgttcccggagacgaagccatg

SEQ ID NO: 5441413 - DNA, 25 bp, Homo sapien
agacaggccccagattatgctctca

SEQ ID NO: 5441414 - DNA, 25 bp, Homo sapien
tccctgggctcaataaaggcagaac

SEQ ID NO: 5441415 - DNA, 25 bp, Homo sapien
tctgaggtgacatcctggagaacca

SEQ ID NO: 5441416 - DNA, 25 bp, Homo sapien
tggctctggctgttgggcactctgc

SEQ ID NO: 5441417 - DNA, 25 bp, Homo sapien
tgaatgggcagtcaaatccctgggc

SEQ ID NO: 5441418 - DNA, 25 bp, Homo sapien
aaaaggattcgcatccacacaagag

SEQ ID NO: 5441419 - DNA, 25 bp, Homo sapien
gctttcttccaatgggcaatccaga

SEQ ID NO: 5441420 - DNA, 25 bp, Homo sapien
tggatgaagcttagcaaagcctcag

SEQ ID NO: 5441421 - DNA, 25 bp, Homo sapien
gacccaacaccatctgtgtgtggaa

SEQ ID NO: 5441422 - DNA, 25 bp, Homo sapien
ttcccctcacagatattttcctgtc

SEQ ID NO: 5441423 - DNA, 25 bp, Homo sapien
cagtcttctcgggagttgaagtgag

SEQ ID NO: 5441424 - DNA, 25 bp, Homo sapien
tggagtcagcagtagactgggaaca

SEQ ID NO: 5441425 - DNA, 25 bp, Homo sapien
cttctgaagggccagtcttctcggg

SEQ ID NO: 5441426 - DNA, 25 bp, Homo sapien
gggttgtcgtaggatgcgctcgcgc

SEQ ID NO: 5441427 - DNA, 25 bp, Homo sapien
ccctggcgcccagcgggagtgggat

SEQ ID NO: 5441428 - DNA, 25 bp, Homo sapien
agtgggatgcgttggcgtccgcgct

SEQ ID NO: 5441429 - DNA, 25 bp, Homo sapien
ctggccgcgggacgaagcggtcgcg

SEQ ID NO: 5441430 - DNA, 25 bp, Homo sapien
acgggacacgtcattggagagcaga

SEQ ID NO: 5441431 - DNA, 25 bp, Homo sapien
agcagaagggccaatcttgtcaatt

SEQ ID NO: 5441432 - DNA, 25 bp, Homo sapien
tgtcaattcctttaaagccacggga

SEQ ID NO: 5441433 - DNA, 25 bp, Homo sapien
cagaagggccaatcttgtcaattcc

SEQ ID NO: 5441434 - DNA, 25 bp, Homo sapien
tctttgcccttcacccgcctgctgt

SEQ ID NO: 5441435 - DNA, 25 bp, Homo sapien
ataaaaggccgcccttcctctatct

SEQ ID NO: 5441436 - DNA, 25 bp, Homo sapien
gacaaacaggtttcccgtagacata

SEQ ID NO: 5441437 - DNA, 25 bp, Homo sapien
tgtggagaccgcctgtggaaaaact

SEQ ID NO: 5441438 - DNA, 25 bp, Homo sapien
agaataagccattgagggatctagc

SEQ ID NO: 5441439 - DNA, 25 bp, Homo sapien
gatgaactgtacaaatgcaggcaca

SEQ ID NO: 5441440 - DNA, 25 bp, Homo sapien
tcttaggagaccattttcagaataa

SEQ ID NO: 5441441 - DNA, 25 bp, Homo sapien
tgagggatctagcacacaggtttca

SEQ ID NO: 5441442 - DNA, 25 bp, Homo sapien
tgggctccaaagtggagtgctcaaa

SEQ ID NO: 5441443 - DNA, 25 bp, Homo sapien
tgtctggactactccagacttctaa

SEQ ID NO: 5441444 - DNA, 25 bp, Homo sapien
gactactccagacttctaagtcctt

SEQ ID NO: 5441445 - DNA, 25 bp, Homo sapien
ttctagaccagtgggctccaaagtg

SEQ ID NO: 5441446 - DNA, 25 bp, Homo sapien
gacagcaatatgaccactgtggggc

SEQ ID NO: 5441447 - DNA, 25 bp, Homo sapien
tgctggctggttgcctacacaggac

SEQ ID NO: 5441448 - DNA, 25 bp, Homo sapien
tgctgctggctggttgcctacacag

SEQ ID NO: 5441449 - DNA, 25 bp, Homo sapien
ggctggttgcctacacaggacttct

SEQ ID NO: 5441450 - DNA, 25 bp, Homo sapien
tacatgcagatacattgtgaggtct

SEQ ID NO: 5441451 - DNA, 25 bp, Homo sapien
gagctgtcagacacaagaagtgttt

SEQ ID NO: 5441452 - DNA, 25 bp, Homo sapien
gaaatagaatcatccagtgtggtgc

SEQ ID NO: 5441453 - DNA, 25 bp, Homo sapien
tccccagcacctaggatggtacctg

SEQ ID NO: 5441454 - DNA, 25 bp, Homo sapien
tatgactgtttgttgtcctttgaag

SEQ ID NO: 5441455 - DNA, 25 bp, Homo sapien
tttgttgtcctttgaagacaagtac

SEQ ID NO: 5441456 - DNA, 25 bp, Homo sapien
ttatgactgtttgttgtcctttgaa

SEQ ID NO: 5441457 - DNA, 25 bp, Homo sapien
ctgtttgttgtcctttgaagacaag

SEQ ID NO: 5441458 - DNA, 25 bp, Homo sapien
aaagcactgagcacatctgatagct

SEQ ID NO: 5441459 - DNA, 25 bp, Homo sapien
cttaagctgtgaatttggtcacgaa

SEQ ID NO: 5441460 - DNA, 25 bp, Homo sapien
gaatttggtcacgaaagcactgagc

SEQ ID NO: 5441461 - DNA, 25 bp, Homo sapien
catctgatagctacaaggcaggaaa

SEQ ID NO: 5441462 - DNA, 25 bp, Homo sapien
attggtttccgatccattctatgca

SEQ ID NO: 5441463 - DNA, 25 bp, Homo sapien
ctgccagtgcagctgttttaaaagc

SEQ ID NO: 5441464 - DNA, 25 bp, Homo sapien
gaagtggtattgtagtaatggattt

SEQ ID NO: 5441465 - DNA, 25 bp, Homo sapien
ctgacattggtttccgatccattct

SEQ ID NO: 5441466 - DNA, 25 bp, Homo sapien
aaagcaagttgataaaggtggccag

SEQ ID NO: 5441467 - DNA, 25 bp, Homo sapien
ccagtcgctggaaactggactgaga

SEQ ID NO: 5441468 - DNA, 25 bp, Homo sapien
ggaacagagcttatgtgcctcctga

SEQ ID NO: 5441469 - DNA, 25 bp, Homo sapien
agcttatgtgcctcctgagaaagcc

SEQ ID NO: 5441470 - DNA, 25 bp, Homo sapien
aagtgccagtgcgtttaaggcagta

SEQ ID NO: 5441471 - DNA, 25 bp, Homo sapien
taaggcagtacatcatatactgttt

SEQ ID NO: 5441472 - DNA, 25 bp, Homo sapien
ttttgttccgccagtgccagtgaca

SEQ ID NO: 5441473 - DNA, 25 bp, Homo sapien
tatactgtttttgttccgccagtgc

SEQ ID NO: 5441474 - DNA, 25 bp, Homo sapien
ggcagccttccagagcctgtagagg

SEQ ID NO: 5441475 - DNA, 25 bp, Homo sapien
gatggagcctgtagaggcagccttc

SEQ ID NO: 5441476 - DNA, 25 bp, Homo sapien
ctggaagatggagcctgtagaggca

SEQ ID NO: 5441477 - DNA, 25 bp, Homo sapien
ttccagagcctgtagaggcagcctt

SEQ ID NO: 5441478 - DNA, 25 bp, Homo sapien
tgttgatatcttggcctgactggct

SEQ ID NO: 5441479 - DNA, 25 bp, Homo sapien
tacaaagagattggacaccaaaggc

SEQ ID NO: 5441480 - DNA, 25 bp, Homo sapien
gcagctttagatatggtggtcacct

SEQ ID NO: 5441481 - DNA, 25 bp, Homo sapien
gattatgggcagttttaagggtcca

SEQ ID NO: 5441482 - DNA, 25 bp, Homo sapien
acagtagagcagcagtacccgtgac

SEQ ID NO: 5441483 - DNA, 25 bp, Homo sapien
caaaattatctaggtatggtgccag

SEQ ID NO: 5441484 - DNA, 25 bp, Homo sapien
tgaagaaccttgttactatataatg

SEQ ID NO: 5441485 - DNA, 25 bp, Homo sapien
gatatcctgaaatggttgtccgtca

SEQ ID NO: 5441486 - DNA, 25 bp, Homo sapien
ttttacacccttatccactgccgca

SEQ ID NO: 5441487 - DNA, 25 bp, Homo sapien
cttgttggattataacgataaggat

SEQ ID NO: 5441488 - DNA, 25 bp, Homo sapien
tggtctcttcggcataacatacatc

SEQ ID NO: 5441489 - DNA, 25 bp, Homo sapien
tgcatgagtggaccccgtccacctt

SEQ ID NO: 5441490 - DNA, 25 bp, Homo sapien
tagttgacccccagatagagttaga

SEQ ID NO: 5441491 - DNA, 25 bp, Homo sapien
gaatgaatggacacgcctgcttgaa

SEQ ID NO: 5441492 - DNA, 25 bp, Homo sapien
catttcccatttacgatgttttgca

SEQ ID NO: 5441493 - DNA, 25 bp, Homo sapien
ggcagagaatgggtcttactattac

SEQ ID NO: 5441494 - DNA, 25 bp, Homo sapien
ggtaggcttcacaataccaaatgag

SEQ ID NO: 5441495 - DNA, 25 bp, Homo sapien
gaccacctgtggttcttcagaaaag

SEQ ID NO: 5441496 - DNA, 25 bp, Homo sapien
taatcatcaaatacaggtggtctca

SEQ ID NO: 5441497 - DNA, 25 bp, Homo sapien
caggtggtctcaggtaggcttcaca

SEQ ID NO: 5441498 - DNA, 25 bp, Homo sapien
tcaaacaagaacacaagccacacag

SEQ ID NO: 5441499 - DNA, 25 bp, Homo sapien
ccaagcatttgattagagagagtac

SEQ ID NO: 5441500 - DNA, 25 bp, Homo sapien
tgtagaagtcaatttagtccaaccc

SEQ ID NO: 5441501 - DNA, 25 bp, Homo sapien
taatagataactcgcttcatgggat

SEQ ID NO: 5441502 - DNA, 25 bp, Homo sapien
ttcttttgagtcatccaagagacag

SEQ ID NO: 5441503 - DNA, 25 bp, Homo sapien
tctcaactcatagggaggaagaagg

SEQ ID NO: 5441504 - DNA, 25 bp, Homo sapien
agagggtaggcagccagagcaggca

SEQ ID NO: 5441505 - DNA, 25 bp, Homo sapien
tgcttcctgggtctagggcaagtat

SEQ ID NO: 5441506 - DNA, 25 bp, Homo sapien
gcctttgtggatggtaggtatacct

SEQ ID NO: 5441507 - DNA, 25 bp, Homo sapien
ttttaatgtggataaagccgtgcaa

SEQ ID NO: 5441508 - DNA, 25 bp, Homo sapien
gaaatagtcctggtgctccaacagt

SEQ ID NO: 5441509 - DNA, 25 bp, Homo sapien
tatacctgtaccctgcagctgaaga

SEQ ID NO: 5441510 - DNA, 25 bp, Homo sapien
gaagcctcatgagaagtcattttgg

SEQ ID NO: 5441511 - DNA, 25 bp, Homo sapien
gctcattgattgctgagaagcctca

SEQ ID NO: 5441512 - DNA, 25 bp, Homo sapien
aggcaggttcctcatacctgtaacc

SEQ ID NO: 5441513 - DNA, 25 bp, Homo sapien
tgttgagatctcattaataaagctc

SEQ ID NO: 5441514 - DNA, 25 bp, Homo sapien
catcctgggaaaccaagtcttcggt

SEQ ID NO: 5441515 - DNA, 25 bp, Homo sapien
gcctcctcgtgtaaagcatcctggg

SEQ ID NO: 5441516 - DNA, 25 bp, Homo sapien
tgctgaccttcacgagctggactgt

SEQ ID NO: 5441517 - DNA, 25 bp, Homo sapien
cccattgaataggaattccaggagc

SEQ ID NO: 5441518 - DNA, 25 bp, Homo sapien
ggcgcagcacctgcgcagagctgct

SEQ ID NO: 5441519 - DNA, 25 bp, Homo sapien
gcagcacctgcgcagagctgctttc

SEQ ID NO: 5441520 - DNA, 25 bp, Homo sapien
gcacctgcgcagagctgctttctca

SEQ ID NO: 5441521 - DNA, 25 bp, Homo sapien
tgggcgcagcacctgcgcagagctg

SEQ ID NO: 5441522 - DNA, 25 bp, Homo sapien
tgttcttatggccttgcagggtcac

SEQ ID NO: 5441523 - DNA, 25 bp, Homo sapien
gaaacttgtcaaagggcacagactg

SEQ ID NO: 5441524 - DNA, 25 bp, Homo sapien
aagagaattgcttacagggtccagc

SEQ ID NO: 5441525 - DNA, 25 bp, Homo sapien
gctaccagaggaacgtgcagccttg

SEQ ID NO: 5441526 - DNA, 25 bp, Homo sapien
tccatacgttatgtcagtcacacac

SEQ ID NO: 5441527 - DNA, 25 bp, Homo sapien
ccttctttgcagaataaaggcccac

SEQ ID NO: 5441528 - DNA, 25 bp, Homo sapien
gccttctttgcagaataaaggccca

SEQ ID NO: 5441529 - DNA, 25 bp, Homo sapien
ttatgtcagtcacacacttggcact

SEQ ID NO: 5441530 - DNA, 25 bp, Homo sapien
ttttagtctggcactcgcttgatgt

SEQ ID NO: 5441531 - DNA, 25 bp, Homo sapien
tcttttagtctggcactcgcttgat

SEQ ID NO: 5441532 - DNA, 25 bp, Homo sapien
cttttagtctggcactcgcttgatg

SEQ ID NO: 5441533 - DNA, 25 bp, Homo sapien
tttagtctggcactcgcttgatgta

SEQ ID NO: 5441534 - DNA, 25 bp, Homo sapien
gaatggatcttctaaccaaagacgg

SEQ ID NO: 5441535 - DNA, 25 bp, Homo sapien
caagcagtcccgctaaagtcaagct

SEQ ID NO: 5441536 - DNA, 25 bp, Homo sapien
tctcagaaatctccatagtagagga

SEQ ID NO: 5441537 - DNA, 25 bp, Homo sapien
aaatgggcctgccaagtcgcagggc

SEQ ID NO: 5441538 - DNA, 25 bp, Homo sapien
ctttatctgcacaagaaagcaattt

SEQ ID NO: 5441539 - DNA, 25 bp, Homo sapien
tgtaagtgaaaatggataacctaaa

SEQ ID NO: 5441540 - DNA, 25 bp, Homo sapien
tatttcatactttatctgcacaaga

SEQ ID NO: 5441541 - DNA, 25 bp, Homo sapien
caaactactacagggctccacggct

SEQ ID NO: 5441542 - DNA, 25 bp, Homo sapien
tcagcaacaaagtggacctctctag

SEQ ID NO: 5441543 - DNA, 25 bp, Homo sapien
tttcccagacaggaatacctaaggc

SEQ ID NO: 5441544 - DNA, 25 bp, Homo sapien
cacgttgcctttggagacagagtaa

SEQ ID NO: 5441545 - DNA, 25 bp, Homo sapien
catcctcgggttgcaacaagtaacg

SEQ ID NO: 5441546 - DNA, 25 bp, Homo sapien
ttgttcttcccgttctcagtccgca

SEQ ID NO: 5441547 - DNA, 25 bp, Homo sapien
tcagtccgcactcccaaggcacggg

SEQ ID NO: 5441548 - DNA, 25 bp, Homo sapien
cacagcggagtcctcttcagcttta

SEQ ID NO: 5441549 - DNA, 25 bp, Homo sapien
gagttggcctgcctcgtggccgtgg

SEQ ID NO: 5441550 - DNA, 25 bp, Homo sapien
gcttcttgtcggagagtagcacctt

SEQ ID NO: 5441551 - DNA, 25 bp, Homo sapien
gactgaggccgagttcttgacttta

SEQ ID NO: 5441552 - DNA, 25 bp, Homo sapien
ttctgcggctaccactttgaaaccg

SEQ ID NO: 5441553 - DNA, 25 bp, Homo sapien
ccttagctggaggtaagtgcgtgcc

SEQ ID NO: 5441554 - DNA, 25 bp, Homo sapien
tatagttttagtaactcatgaaaac

SEQ ID NO: 5441555 - DNA, 25 bp, Homo sapien
taactcatgaaaacatctcccaagt

SEQ ID NO: 5441556 - DNA, 25 bp, Homo sapien
cagcattaacagaaaggttttggtc

SEQ ID NO: 5441557 - DNA, 25 bp, Homo sapien
gtcaagaggtttatgggcacctacc

SEQ ID NO: 5441558 - DNA, 25 bp, Homo sapien
gaatacaatatatcaccctgttccc

SEQ ID NO: 5441559 - DNA, 25 bp, Homo sapien
ggtcagtaagcaagtttacaaaaga

SEQ ID NO: 5441560 - DNA, 25 bp, Homo sapien
ccctgttcccaagtatcatgatgtg

SEQ ID NO: 5441561 - DNA, 25 bp, Homo sapien
tcatgatgtgacctacgggataacc

SEQ ID NO: 5441562 - DNA, 25 bp, Homo sapien
caagtctgcatagcatcaatgtgtc

SEQ ID NO: 5441563 - DNA, 25 bp, Homo sapien
caatgtgtcattagaggcgattaca

SEQ ID NO: 5441564 - DNA, 25 bp, Homo sapien
ccccaagcatgaaaggtgactgcaa

SEQ ID NO: 5441565 - DNA, 25 bp, Homo sapien
tagtgaaacctttgatggccagtaa

SEQ ID NO: 5441566 - DNA, 25 bp, Homo sapien
ttttactattgccagtaaagcctgg

SEQ ID NO: 5441567 - DNA, 25 bp, Homo sapien
tgcagttacaaagaattatagccac

SEQ ID NO: 5441568 - DNA, 25 bp, Homo sapien
gaatcactctctcaataagaacatg

SEQ ID NO: 5441569 - DNA, 25 bp, Homo sapien
taaagcctgggattccacttctgtg

SEQ ID NO: 5441570 - DNA, 25 bp, Homo sapien
tagagtccaacactctatcagctca

SEQ ID NO: 5441571 - DNA, 25 bp, Homo sapien
ctctttcgaattggagccatgtgac

SEQ ID NO: 5441572 - DNA, 25 bp, Homo sapien
ccatgtgacgcaggcttccaagtaa

SEQ ID NO: 5441573 - DNA, 25 bp, Homo sapien
taaaggccgttcttctagagtccaa

SEQ ID NO: 5441574 - DNA, 25 bp, Homo sapien
gaagtatttttccaatgcacagtag

SEQ ID NO: 5441575 - DNA, 25 bp, Homo sapien
tatccattgtgtgactggcagtcag

SEQ ID NO: 5441576 - DNA, 25 bp, Homo sapien
tatgaaagtgtcaaagcccttctga

SEQ ID NO: 5441577 - DNA, 25 bp, Homo sapien
agctggcacgacacctgaaggaaga

SEQ ID NO: 5441578 - DNA, 25 bp, Homo sapien
gtccacctgcttccatgaaataaaa

SEQ ID NO: 5441579 - DNA, 25 bp, Homo sapien
cacctgcttccatgaaataaaagaa

SEQ ID NO: 5441580 - DNA, 25 bp, Homo sapien
ttaaagtccacctgcttccatgaaa

SEQ ID NO: 5441581 - DNA, 25 bp, Homo sapien
aagtccacctgcttccatgaaataa

SEQ ID NO: 5441582 - DNA, 25 bp, Homo sapien
ccttcccaagcatcaaaggcatcca

SEQ ID NO: 5441583 - DNA, 25 bp, Homo sapien
aataatagctccaaatgtactgaac

SEQ ID NO: 5441584 - DNA, 25 bp, Homo sapien
tcttcaactctgctactgaataata

SEQ ID NO: 5441585 - DNA, 25 bp, Homo sapien
actctgctactgaataatagctcca

SEQ ID NO: 5441586 - DNA, 25 bp, Homo sapien
acagcttgcaccagatgtgttaaga

SEQ ID NO: 5441587 - DNA, 25 bp, Homo sapien
tgttaagatagtggagaacccaaac

SEQ ID NO: 5441588 - DNA, 25 bp, Homo sapien
gcagactaagccatatgaatcacag

SEQ ID NO: 5441589 - DNA, 25 bp, Homo sapien
ttttcaatagcgtctgttccatcag

SEQ ID NO: 5441590 - DNA, 25 bp, Homo sapien
taaactccgtatatgctgcctgaac

SEQ ID NO: 5441591 - DNA, 25 bp, Homo sapien
tcctcccagagtttatagctaatgc

SEQ ID NO: 5441592 - DNA, 25 bp, Homo sapien
gacagacattgaataagccaccagc

SEQ ID NO: 5441593 - DNA, 25 bp, Homo sapien
gagctgagctctaacgtcctgcaga

SEQ ID NO: 5441594 - DNA, 25 bp, Homo sapien
gaagatgagcattaaccctcccaac

SEQ ID NO: 5441595 - DNA, 25 bp, Homo sapien
tgcctgacacaaacgagatgcctag

SEQ ID NO: 5441596 - DNA, 25 bp, Homo sapien
tccctgggaggaacagctttactgc

SEQ ID NO: 5441597 - DNA, 25 bp, Homo sapien
ggtttcacccagtgaagctgccagg

SEQ ID NO: 5441598 - DNA, 25 bp, Homo sapien
gccctcacatagtatagtatttctc

SEQ ID NO: 5441599 - DNA, 25 bp, Homo sapien
taaacgctgacatccaaatcaaaga

SEQ ID NO: 5441600 - DNA, 25 bp, Homo sapien
taataaccaaccacccatcagcttg

SEQ ID NO: 5441601 - DNA, 25 bp, Homo sapien
tgatctcaaagtgaattagccaaac

SEQ ID NO: 5441602 - DNA, 25 bp, Homo sapien
aaagtgttaaatcttcagtgagcaa

SEQ ID NO: 5441603 - DNA, 25 bp, Homo sapien
cctttgagtggcaatatactttcca

SEQ ID NO: 5441604 - DNA, 25 bp, Homo sapien
ttcagtgagcaatataaactcaatc

SEQ ID NO: 5441605 - DNA, 25 bp, Homo sapien
tacatattgctttgtgcatcataaa

SEQ ID NO: 5441606 - DNA, 25 bp, Homo sapien
tccatcacggtcaataacacaagcc

SEQ ID NO: 5441607 - DNA, 25 bp, Homo sapien
gtatttaaatagacgtccatcacgg

SEQ ID NO: 5441608 - DNA, 25 bp, Homo sapien
ggaatctgaacttctccatgaaggt

SEQ ID NO: 5441609 - DNA, 25 bp, Homo sapien
cagacaggctgtatggataagggat

SEQ ID NO: 5441610 - DNA, 25 bp, Homo sapien
ttcagtcggagaacatctagcacct

SEQ ID NO: 5441611 - DNA, 25 bp, Homo sapien
catctgtttttagaggaaagcgacc

SEQ ID NO: 5441612 - DNA, 25 bp, Homo sapien
gaaagcgaccactgaacatagatgc

SEQ ID NO: 5441613 - DNA, 25 bp, Homo sapien
gtaaatacagccacccacgttcagt

SEQ ID NO: 5441614 - DNA, 25 bp, Homo sapien
caggcacctgaatttttgccgccca

SEQ ID NO: 5441615 - DNA, 25 bp, Homo sapien
aaaacaatgatgtcttggtctccct

SEQ ID NO: 5441616 - DNA, 25 bp, Homo sapien
ggcacctgaatttttgccgcccaac

SEQ ID NO: 5441617 - DNA, 25 bp, Homo sapien
ccccaggcacctgaatttttgccgc

SEQ ID NO: 5441618 - DNA, 25 bp, Homo sapien
cagcacacagttcctcagaaagtct

SEQ ID NO: 5441619 - DNA, 25 bp, Homo sapien
tgggaaaacgaagacactccggcca

SEQ ID NO: 5441620 - DNA, 25 bp, Homo sapien
cactttgaaaaacatcgctcaaggg

SEQ ID NO: 5441621 - DNA, 25 bp, Homo sapien
tgcatcaaaaccatcagggacgctt

SEQ ID NO: 5441622 - DNA, 25 bp, Homo sapien
acgccgcggggcggacgcggaagtg

SEQ ID NO: 5441623 - DNA, 25 bp, Homo sapien
tcggcgcggccgccggacgccgcgg

SEQ ID NO: 5441624 - DNA, 25 bp, Homo sapien
ctgcggcccgccagaccctcggcgc

SEQ ID NO: 5441625 - DNA, 25 bp, Homo sapien
cggcccgccagaccctcggcgcggc

SEQ ID NO: 5441626 - DNA, 25 bp, Homo sapien
tagttccatcagagttcctttctac

SEQ ID NO: 5441627 - DNA, 25 bp, Homo sapien
aaatagttccatcagagttcctttc

SEQ ID NO: 5441628 - DNA, 25 bp, Homo sapien
ccatcagagttcctttctactgtca

SEQ ID NO: 5441629 - DNA, 25 bp, Homo sapien
tcaaaaatagttccatcagagttcc

SEQ ID NO: 5441630 - DNA, 25 bp, Homo sapien
cacaacctttatcaactcaggataa

SEQ ID NO: 5441631 - DNA, 25 bp, Homo sapien
caactcaggataattcggaagtgtt

SEQ ID NO: 5441632 - DNA, 25 bp, Homo sapien
caggataattcggaagtgttatttc

SEQ ID NO: 5441633 - DNA, 25 bp, Homo sapien
ctttatcaactcaggataattcgga

SEQ ID NO: 5441634 - DNA, 25 bp, Homo sapien
tgactttcaattgcagaaaactgtg

SEQ ID NO: 5441635 - DNA, 25 bp, Homo sapien
gatttaactgctagtgaagtcagca

SEQ ID NO: 5441636 - DNA, 25 bp, Homo sapien
tgccagagaacctaatgcagagtgc

SEQ ID NO: 5441637 - DNA, 25 bp, Homo sapien
gcaaaattgtcacagtctcaacagg

SEQ ID NO: 5441638 - DNA, 25 bp, Homo sapien
cctggaaacctagaagacccaagtg

SEQ ID NO: 5441639 - DNA, 25 bp, Homo sapien
gaaacatggccatgatatgcaacct

SEQ ID NO: 5441640 - DNA, 25 bp, Homo sapien
gatcaccaatatgtaccccgttcag

SEQ ID NO: 5441641 - DNA, 25 bp, Homo sapien
aaatcaatgtgactataggacccag

SEQ ID NO: 5441642 - DNA, 25 bp, Homo sapien
tgaaatgaaccagatatatgaggat

SEQ ID NO: 5441643 - DNA, 25 bp, Homo sapien
gaaatgaaccagatatatgaggata

SEQ ID NO: 5441644 - DNA, 25 bp, Homo sapien
aaatgaaccagatatatgaggataa

SEQ ID NO: 5441645 - DNA, 25 bp, Homo sapien
tccaggaaacccagttgaactatgt

SEQ ID NO: 5441646 - DNA, 25 bp, Homo sapien
taagaaagaatcatcatgcaaggca

SEQ ID NO: 5441647 - DNA, 25 bp, Homo sapien
gaatacttgacagcgttcagggaaa

SEQ ID NO: 5441648 - DNA, 25 bp, Homo sapien
aattttgccttggagtgctccccag

SEQ ID NO: 5441649 - DNA, 25 bp, Homo sapien
aataacagtgagagtatcttggaca

SEQ ID NO: 5441650 - DNA, 25 bp, Homo sapien
tataaatggatttggcctttaccac

SEQ ID NO: 5441651 - DNA, 25 bp, Homo sapien
tgcatgtttcttgagagtgagactc

SEQ ID NO: 5441652 - DNA, 25 bp, Homo sapien
tgagtacatgatccatagaaatagc

SEQ ID NO: 5441653 - DNA, 25 bp, Homo sapien
tggcgggtaagtcaattccaggtaa

SEQ ID NO: 5441654 - DNA, 25 bp, Homo sapien
tgtgtagatccctaaggttttggcg

SEQ ID NO: 5441655 - DNA, 25 bp, Homo sapien
tcatggtgccttacacagagtgagt

SEQ ID NO: 5441656 - DNA, 25 bp, Homo sapien
gactagaggaatcttcaaacgcatc

SEQ ID NO: 5441657 - DNA, 25 bp, Homo sapien
ggcacttcaaacgtcccaagcagat

SEQ ID NO: 5441658 - DNA, 25 bp, Homo sapien
tctttgcgcacacatctattcaggc

SEQ ID NO: 5441659 - DNA, 25 bp, Homo sapien
catccacaggttgctaggccggaaa

SEQ ID NO: 5441660 - DNA, 25 bp, Homo sapien
ggctgcctttactcccatggctgga

SEQ ID NO: 5441661 - DNA, 25 bp, Homo sapien
gcagtgttggcagtatagaccctct

SEQ ID NO: 5441662 - DNA, 25 bp, Homo sapien
ggctccatacttgggtacaatccag

SEQ ID NO: 5441663 - DNA, 25 bp, Homo sapien
tagaccctcttagaggtggcaaggg

SEQ ID NO: 5441664 - DNA, 25 bp, Homo sapien
ctgggttcacaagagggttggctcc

SEQ ID NO: 5441665 - DNA, 25 bp, Homo sapien
tccaggagaccaactggccatttgg

SEQ ID NO: 5441666 - DNA, 25 bp, Homo sapien
tggtggcaaattgactacactgaac

SEQ ID NO: 5441667 - DNA, 25 bp, Homo sapien
ctgcttccaacacagaccaaaactg

SEQ ID NO: 5441668 - DNA, 25 bp, Homo sapien
aaaactggtcctcaatttgacacca

SEQ ID NO: 5441669 - DNA, 25 bp, Homo sapien
ttcctttgcgaagtaaacactggga

SEQ ID NO: 5441670 - DNA, 25 bp, Homo sapien
gacgcacaggaatctgatactagtt

SEQ ID NO: 5441671 - DNA, 25 bp, Homo sapien
gcatgggaaaattctgtacagacgc

SEQ ID NO: 5441672 - DNA, 25 bp, Homo sapien
aacactgggatagaggattttcact

SEQ ID NO: 5441673 - DNA, 25 bp, Homo sapien
gacatgagtagcttcattgcaccaa

SEQ ID NO: 5441674 - DNA, 25 bp, Homo sapien
tgaatctcatctctctaggtgttgg

SEQ ID NO: 5441675 - DNA, 25 bp, Homo sapien
tcattgcaccaaaatttcaaatcct

SEQ ID NO: 5441676 - DNA, 25 bp, Homo sapien
tgttggtggtgagtattagacatga

SEQ ID NO: 5441677 - DNA, 25 bp, Homo sapien
caaggggagagaactacctggatca

SEQ ID NO: 5441678 - DNA, 25 bp, Homo sapien
gggagagaactacctggatcactcc

SEQ ID NO: 5441679 - DNA, 25 bp, Homo sapien
agagaactacctggatcactccagg

SEQ ID NO: 5441680 - DNA, 25 bp, Homo sapien
ttccaaggggagagaactacctgga

SEQ ID NO: 5441681 - DNA, 25 bp, Homo sapien
tcagctttaggccagctcggcagac

SEQ ID NO: 5441682 - DNA, 25 bp, Homo sapien
gaaataggccagaaagtcaggtctc

SEQ ID NO: 5441683 - DNA, 25 bp, Homo sapien
taacacagaagaggtctagccagct

SEQ ID NO: 5441684 - DNA, 25 bp, Homo sapien
tccagatcagtgttcagggagcacc

SEQ ID NO: 5441685 - DNA, 25 bp, Homo sapien
aaccagacagcctgattctcttgct

SEQ ID NO: 5441686 - DNA, 25 bp, Homo sapien
aaaccagacagcctgattctcttgc

SEQ ID NO: 5441687 - DNA, 25 bp, Homo sapien
caaaccagacagcctgattctcttg

SEQ ID NO: 5441688 - DNA, 25 bp, Homo sapien
agagtttggccagttatcttgtcca

SEQ ID NO: 5441689 - DNA, 25 bp, Homo sapien
ctctctctttgacatcatgactttg

SEQ ID NO: 5441690 - DNA, 25 bp, Homo sapien
gactttgacacttcggaagagtttg

SEQ ID NO: 5441691 - DNA, 25 bp, Homo sapien
cagttatcttgtccaatgtctccca

SEQ ID NO: 5441692 - DNA, 25 bp, Homo sapien
aatgtgccttcttacagggcctcgg

SEQ ID NO: 5441693 - DNA, 25 bp, Homo sapien
tgccattgctgacgctgtggccgca

SEQ ID NO: 5441694 - DNA, 25 bp, Homo sapien
ccagcaacgccagaatgggttcgaa

SEQ ID NO: 5441695 - DNA, 25 bp, Homo sapien
gagacatagctgaggacttcacggt

SEQ ID NO: 5441696 - DNA, 25 bp, Homo sapien
cttttcacagttgtcaattgaaggg

SEQ ID NO: 5441697 - DNA, 25 bp, Homo sapien
aacccaaagacttgatgtaatgctc

SEQ ID NO: 5441698 - DNA, 25 bp, Homo sapien
aaacccaaagacttgatgtaatgct

SEQ ID NO: 5441699 - DNA, 25 bp, Homo sapien
ttgtcaattgaagggaatgacacag

SEQ ID NO: 5441700 - DNA, 25 bp, Homo sapien
ggcatacaatacagcccggaggagg

SEQ ID NO: 5441701 - DNA, 25 bp, Homo sapien
taaagccatgggcacgttgtcatga

SEQ ID NO: 5441702 - DNA, 25 bp, Homo sapien
cccatctgcggacattggaggcttc

SEQ ID NO: 5441703 - DNA, 25 bp, Homo sapien
gagcccaagagataaagcagcacag

SEQ ID NO: 5441704 - DNA, 25 bp, Homo sapien
ttgggaaattatccatcctccactc

SEQ ID NO: 5441705 - DNA, 25 bp, Homo sapien
ctccactccatgtgttccaaacaag

SEQ ID NO: 5441706 - DNA, 25 bp, Homo sapien
gtttttatttgactgctgtctcttc

SEQ ID NO: 5441707 - DNA, 25 bp, Homo sapien
cttcctttgggaaattatccatcct

SEQ ID NO: 5441708 - DNA, 25 bp, Homo sapien
ggtcctcttcataaatatccacagc

SEQ ID NO: 5441709 - DNA, 25 bp, Homo sapien
caggcaattaggcaattgatgaaca

SEQ ID NO: 5441710 - DNA, 25 bp, Homo sapien
caggtcctcttcataaatatccaca

SEQ ID NO: 5441711 - DNA, 25 bp, Homo sapien
tgatgaacacagcaattggcaggtc

SEQ ID NO: 5441712 - DNA, 25 bp, Homo sapien
gctgctgccagcatcgcttgctgga

SEQ ID NO: 5441713 - DNA, 25 bp, Homo sapien
tgaatggacacaacagactgacggc

SEQ ID NO: 5441714 - DNA, 25 bp, Homo sapien
gagaaccaatagcaatccacacctg

SEQ ID NO: 5441715 - DNA, 25 bp, Homo sapien
gactgacggcagaatcatctagccc

SEQ ID NO: 5441716 - DNA, 25 bp, Homo sapien
tactagcgctatgatcttagacaag

SEQ ID NO: 5441717 - DNA, 25 bp, Homo sapien
tataatggtgaagccagactgcttg

SEQ ID NO: 5441718 - DNA, 25 bp, Homo sapien
taaagtgcatagaagagggcctgat

SEQ ID NO: 5441719 - DNA, 25 bp, Homo sapien
gaggccataggcgtaacatgtcact

SEQ ID NO: 5441720 - DNA, 25 bp, Homo sapien
tagacacttagagatcagactccag

SEQ ID NO: 5441721 - DNA, 25 bp, Homo sapien
gagtcagaaaataccgtgcaaaggc

SEQ ID NO: 5441722 - DNA, 25 bp, Homo sapien
tccttgagaatgtatgagactgcca

SEQ ID NO: 5441723 - DNA, 25 bp, Homo sapien
cattcagaacgtaaccaggatagct

SEQ ID NO: 5441724 - DNA, 25 bp, Homo sapien
ctaatccgcgcgcaatagaaaaggc

SEQ ID NO: 5441725 - DNA, 25 bp, Homo sapien
tagaaaaggcggaagcgcctgtcca

SEQ ID NO: 5441726 - DNA, 25 bp, Homo sapien
cggaagcgcctgtccacgatcaggg

SEQ ID NO: 5441727 - DNA, 25 bp, Homo sapien
cgcgcgcaatagaaaaggcggaagc

SEQ ID NO: 5441728 - DNA, 25 bp, Homo sapien
ccttaaattcggtgagacgcggcgc

SEQ ID NO: 5441729 - DNA, 25 bp, Homo sapien
gcccgaacggaggtcgcctcttgag

SEQ ID NO: 5441730 - DNA, 25 bp, Homo sapien
tctagggcctgaaaggccgccgctt

SEQ ID NO: 5441731 - DNA, 25 bp, Homo sapien
agttccggtcgcagaggagacaccg

SEQ ID NO: 5441732 - DNA, 25 bp, Homo sapien
tatattcctactcggtcatactgga

SEQ ID NO: 5441733 - DNA, 25 bp, Homo sapien
tcagtaatgactcaagcctctggct

SEQ ID NO: 5441734 - DNA, 25 bp, Homo sapien
taaaggtcagcatgttctaattggg

SEQ ID NO: 5441735 - DNA, 25 bp, Homo sapien
tcatactggactggcttcgttctct

SEQ ID NO: 5441736 - DNA, 25 bp, Homo sapien
taatatgtcagtatcccctctttgc

SEQ ID NO: 5441737 - DNA, 25 bp, Homo sapien
tccacatctttagactctctccaag

SEQ ID NO: 5441738 - DNA, 25 bp, Homo sapien
ggtcactgcatcttccagttactac

SEQ ID NO: 5441739 - DNA, 25 bp, Homo sapien
tatcagccaagaaagggctcctccc

SEQ ID NO: 5441740 - DNA, 25 bp, Homo sapien
aaacaactgtggaaagatctaagcc

SEQ ID NO: 5441741 - DNA, 25 bp, Homo sapien
agaatgagaatctgctgagggaaaa

SEQ ID NO: 5441742 - DNA, 25 bp, Homo sapien
gatagagaatgagaatctgctgagg

SEQ ID NO: 5441743 - DNA, 25 bp, Homo sapien
aagctattctcgagcttcagcatcc

SEQ ID NO: 5441744 - DNA, 25 bp, Homo sapien
tggtacttagaacaaactgttcaga

SEQ ID NO: 5441745 - DNA, 25 bp, Homo sapien
aatggtacttagaacaaactgttca

SEQ ID NO: 5441746 - DNA, 25 bp, Homo sapien
gtacttagaacaaactgttcagata

SEQ ID NO: 5441747 - DNA, 25 bp, Homo sapien
tagaacaaactgttcagatacatat

SEQ ID NO: 5441748 - DNA, 25 bp, Homo sapien
tcttcgagagagctgtccaattaca

SEQ ID NO: 5441749 - DNA, 25 bp, Homo sapien
aaaaattagactgatacagtctgta

SEQ ID NO: 5441750 - DNA, 25 bp, Homo sapien
agtctgtaagatctcttcgagagag

SEQ ID NO: 5441751 - DNA, 25 bp, Homo sapien
tagctatgtacttaatgaaccaaat

SEQ ID NO: 5441752 - DNA, 25 bp, Homo sapien
cttctctgagagtaattcttttggc

SEQ ID NO: 5441753 - DNA, 25 bp, Homo sapien
aatgaggtcaaagagacgctcatgt

SEQ ID NO: 5441754 - DNA, 25 bp, Homo sapien
caaagagacgctcatgttcaacatc

SEQ ID NO: 5441755 - DNA, 25 bp, Homo sapien
ttcttttggctggatcatactccaa

SEQ ID NO: 5441756 - DNA, 25 bp, Homo sapien
ttcaacagccttttccactaccatt

SEQ ID NO: 5441757 - DNA, 25 bp, Homo sapien
gccttttccactaccattgactaca

SEQ ID NO: 5441758 - DNA, 25 bp, Homo sapien
ccattgactacactatgtaacagta

SEQ ID NO: 5441759 - DNA, 25 bp, Homo sapien
tgtaacagtatagtaaaccatatat

SEQ ID NO: 5441760 - DNA, 25 bp, Homo sapien
cctggacaacgaagcaaggctcggt

SEQ ID NO: 5441761 - DNA, 25 bp, Homo sapien
gttttgactatttgagcaatgtctc

SEQ ID NO: 5441762 - DNA, 25 bp, Homo sapien
tatttgagcaatgtctcaaaggctt

SEQ ID NO: 5441763 - DNA, 25 bp, Homo sapien
ttgcagtgagctgggccaacatcgt

SEQ ID NO: 5441764 - DNA, 25 bp, Homo sapien
tgaaacatatctgccggcagaactg

SEQ ID NO: 5441765 - DNA, 25 bp, Homo sapien
ccagtctaatcgatcgtggtgaaaa

SEQ ID NO: 5441766 - DNA, 25 bp, Homo sapien
gtgttcatcccagtctaatcgatcg

SEQ ID NO: 5441767 - DNA, 25 bp, Homo sapien
tcagaggtttacagcgtcttgaaac

SEQ ID NO: 5441768 - DNA, 25 bp, Homo sapien
gtatcaattactatgctttcccaga

SEQ ID NO: 5441769 - DNA, 25 bp, Homo sapien
acttaaaacagctagcaaaggtatc

SEQ ID NO: 5441770 - DNA, 25 bp, Homo sapien
tcacttttctagagatttaaatggc

SEQ ID NO: 5441771 - DNA, 25 bp, Homo sapien
cagatcacttttctagagatttaaa

SEQ ID NO: 5441772 - DNA, 25 bp, Homo sapien
gtgatcaaatgatactaaggatgtc

SEQ ID NO: 5441773 - DNA, 25 bp, Homo sapien
taagttctaatcagcagatgtgatc

SEQ ID NO: 5441774 - DNA, 25 bp, Homo sapien
ggatgtcactaactcttaaaacgta

SEQ ID NO: 5441775 - DNA, 25 bp, Homo sapien
tctaatcagcagatgtgatcaaatg

SEQ ID NO: 5441776 - DNA, 25 bp, Homo sapien
ttgctaaatgctccttactatcgtg

SEQ ID NO: 5441777 - DNA, 25 bp, Homo sapien
tcatatgttttggtagaggtccaag

SEQ ID NO: 5441778 - DNA, 25 bp, Homo sapien
tcattgctaaatgctccttactatc

SEQ ID NO: 5441779 - DNA, 25 bp, Homo sapien
gctaaatgctccttactatcgtgtg

SEQ ID NO: 5441780 - DNA, 25 bp, Homo sapien
tgcagaacaaactcgccaatgattc

SEQ ID NO: 5441781 - DNA, 25 bp, Homo sapien
cctttcttgtgcaaagcaaggttga

SEQ ID NO: 5441782 - DNA, 25 bp, Homo sapien
caatgattccctacatggacacgga

SEQ ID NO: 5441783 - DNA, 25 bp, Homo sapien
cagacacagttaaagctgacagcaa

SEQ ID NO: 5441784 - DNA, 25 bp, Homo sapien
cggtaaacccaagatagtattcaat

SEQ ID NO: 5441785 - DNA, 25 bp, Homo sapien
aacccaagatagtattcaataagaa

SEQ ID NO: 5441786 - DNA, 25 bp, Homo sapien
tacggtaaacccaagatagtattca

SEQ ID NO: 5441787 - DNA, 25 bp, Homo sapien
cagacatcacatggttgggaccacc

SEQ ID NO: 5441788 - DNA, 25 bp, Homo sapien
tgcaaagcaaagcaaaatttaagga

SEQ ID NO: 5441789 - DNA, 25 bp, Homo sapien
ctgcaaagcaaagcaaaatttaagg

SEQ ID NO: 5441790 - DNA, 25 bp, Homo sapien
gcaaagcaaagcaaaatttaaggaa

SEQ ID NO: 5441791 - DNA, 25 bp, Homo sapien
tatgttgcactaccaaagtctacaa

SEQ ID NO: 5441792 - DNA, 25 bp, Homo sapien
tgttcgtcatcatatgttgcactac

SEQ ID NO: 5441793 - DNA, 25 bp, Homo sapien
gatttattaaggtgcgttcatcacg

SEQ ID NO: 5441794 - DNA, 25 bp, Homo sapien
aagtctacaactttaatatctggat

SEQ ID NO: 5441795 - DNA, 25 bp, Homo sapien
taaatgatggttaagaaggcataag

SEQ ID NO: 5441796 - DNA, 25 bp, Homo sapien
cataaatgatggttaagaaggcata

SEQ ID NO: 5441797 - DNA, 25 bp, Homo sapien
tagtcagactgcacaaataagatgt

SEQ ID NO: 5441798 - DNA, 25 bp, Homo sapien
ggattatacgcctctgtgtagtcag

SEQ ID NO: 5441799 - DNA, 25 bp, Homo sapien
tctgtgtgagtcaacttattactgt

SEQ ID NO: 5441800 - DNA, 25 bp, Homo sapien
caggctttaagtctgtgtgagtcaa

SEQ ID NO: 5441801 - DNA, 25 bp, Homo sapien
tatatggtggatatcctacttgctg

SEQ ID NO: 5441802 - DNA, 25 bp, Homo sapien
aaatcatagtctgcaacaaagtacg

SEQ ID NO: 5441803 - DNA, 25 bp, Homo sapien
gaagttactatttttgcgcatcaga

SEQ ID NO: 5441804 - DNA, 25 bp, Homo sapien
gatatgtggaatggataaaaccagc

SEQ ID NO: 5441805 - DNA, 25 bp, Homo sapien
accatgatgctcaaaccattccaac

SEQ ID NO: 5441806 - DNA, 25 bp, Homo sapien
aacaatgcaaatgtgaccatgatgc

SEQ ID NO: 5441807 - DNA, 25 bp, Homo sapien
cacagacttgcatatctgatatgcc

SEQ ID NO: 5441808 - DNA, 25 bp, Homo sapien
cagtcgaaatggtagaaaaccattt

SEQ ID NO: 5441809 - DNA, 25 bp, Homo sapien
ggtctgttgtattcagatgttccag

SEQ ID NO: 5441810 - DNA, 25 bp, Homo sapien
gagcgagcagcttcacagtatctat

SEQ ID NO: 5441811 - DNA, 25 bp, Homo sapien
ttttactgctacatgtctacctccc

SEQ ID NO: 5441812 - DNA, 25 bp, Homo sapien
agaacttgtatttctgagcgagcag

SEQ ID NO: 5441813 - DNA, 25 bp, Homo sapien
atgcaaatttaagaatgacagacat

SEQ ID NO: 5441814 - DNA, 25 bp, Homo sapien
acagacatgatgctcaattccaggt

SEQ ID NO: 5441815 - DNA, 25 bp, Homo sapien
tttaagaatgacagacatgatgctc

SEQ ID NO: 5441816 - DNA, 25 bp, Homo sapien
ctgttagaaagatgcatgcaaattt

SEQ ID NO: 5441817 - DNA, 25 bp, Homo sapien
ggacaccaagttatctccagctatg

SEQ ID NO: 5441818 - DNA, 25 bp, Homo sapien
taggcaaacctctcgaggaggatct

SEQ ID NO: 5441819 - DNA, 25 bp, Homo sapien
gatcttaacataaaaccaaggctga

SEQ ID NO: 5441820 - DNA, 25 bp, Homo sapien
ggcaagtacctcttaactggaagtg

SEQ ID NO: 5441821 - DNA, 25 bp, Homo sapien
gctttatgatcgatgcactccacaa

SEQ ID NO: 5441822 - DNA, 25 bp, Homo sapien
ttatgatcgatgcactccacaactt

SEQ ID NO: 5441823 - DNA, 25 bp, Homo sapien
tgatcgatgcactccacaacttttc

SEQ ID NO: 5441824 - DNA, 25 bp, Homo sapien
tgcactccacaacttttccaaaagc

SEQ ID NO: 5441825 - DNA, 25 bp, Homo sapien
cactagatattttattggtcaacac

SEQ ID NO: 5441826 - DNA, 25 bp, Homo sapien
tactgttctggaagttctatataac

SEQ ID NO: 5441827 - DNA, 25 bp, Homo sapien
taaatctcagtcatatcaagaagtg

SEQ ID NO: 5441828 - DNA, 25 bp, Homo sapien
gaagtggaaacaatgtacttatcac

SEQ ID NO: 5441829 - DNA, 25 bp, Homo sapien
ttagtacgtctccactctgacagat

SEQ ID NO: 5441830 - DNA, 25 bp, Homo sapien
tccactctgacagatcaggtgaccc

SEQ ID NO: 5441831 - DNA, 25 bp, Homo sapien
tcatcctctacactcctggttcttt

SEQ ID NO: 5441832 - DNA, 25 bp, Homo sapien
cgtctccactctgacagatcaggtg

SEQ ID NO: 5441833 - DNA, 25 bp, Homo sapien
ggaatgtcaattaggagccaaccaa

SEQ ID NO: 5441834 - DNA, 25 bp, Homo sapien
tggcatacaagaataacactacggc

SEQ ID NO: 5441835 - DNA, 25 bp, Homo sapien
gataagatactcaaagtggcaaggc

SEQ ID NO: 5441836 - DNA, 25 bp, Homo sapien
tacttgtcaaagtaggcggtggcca

SEQ ID NO: 5441837 - DNA, 25 bp, Homo sapien
aaattcaagtttccctgttccacat

SEQ ID NO: 5441838 - DNA, 25 bp, Homo sapien
ttatagaactaaatgtgtactttat

SEQ ID NO: 5441839 - DNA, 25 bp, Homo sapien
atttcctatccaatgcacaaacaca

SEQ ID NO: 5441840 - DNA, 25 bp, Homo sapien
tatttccggaatttcctatccaatg

SEQ ID NO: 5441841 - DNA, 25 bp, Homo sapien
cgatgtgaagtactgtggtgaatcc

SEQ ID NO: 5441842 - DNA, 25 bp, Homo sapien
tgaacgacgatgtgaagtactgtgg

SEQ ID NO: 5441843 - DNA, 25 bp, Homo sapien
gaagtactgtggtgaatcctgtgtt

SEQ ID NO: 5441844 - DNA, 25 bp, Homo sapien
cccatgtgaacgacgatgtgaagta

SEQ ID NO: 5441845 - DNA, 25 bp, Homo sapien
caggttcacatccttgagtgtagtc

SEQ ID NO: 5441846 - DNA, 25 bp, Homo sapien
tgctactatggttctgataccggct

SEQ ID NO: 5441847 - DNA, 25 bp, Homo sapien
gataccggctttcatggtctctttg

SEQ ID NO: 5441848 - DNA, 25 bp, Homo sapien
tgtactcatcaatgtagcgtcgact

SEQ ID NO: 5441849 - DNA, 25 bp, Homo sapien
gtgattgtatttgcagcgcttgttc

SEQ ID NO: 5441850 - DNA, 25 bp, Homo sapien
cctgggcactgctatgtgatctctt

SEQ ID NO: 5441851 - DNA, 25 bp, Homo sapien
cataatcccaatccttgtcatccca

SEQ ID NO: 5441852 - DNA, 25 bp, Homo sapien
ttttagagtgattgtatttgcagcg

SEQ ID NO: 5441853 - DNA, 25 bp, Homo sapien
ttgaacttcattcacaggcactctg

SEQ ID NO: 5441854 - DNA, 25 bp, Homo sapien
ggcactctgcattagccatatcatg

SEQ ID NO: 5441855 - DNA, 25 bp, Homo sapien
gcccagatttattggaagaatgcaa

SEQ ID NO: 5441856 - DNA, 25 bp, Homo sapien
tatagaagtccacgctgtcaggcct

SEQ ID NO: 5441857 - DNA, 25 bp, Homo sapien
tacagagcatttccgtaaacggaca

SEQ ID NO: 5441858 - DNA, 25 bp, Homo sapien
ttgccgactcctttttctgactcag

SEQ ID NO: 5441859 - DNA, 25 bp, Homo sapien
cagagttatatctgagttgctgaca

SEQ ID NO: 5441860 - DNA, 25 bp, Homo sapien
taaacgtgtaccagaaactagtctc

SEQ ID NO: 5441861 - DNA, 25 bp, Homo sapien
gacactaataactattaagttctga

SEQ ID NO: 5441862 - DNA, 25 bp, Homo sapien
tactaattttcgtgacactaataac

SEQ ID NO: 5441863 - DNA, 25 bp, Homo sapien
ttttcgtgacactaataactattaa

SEQ ID NO: 5441864 - DNA, 25 bp, Homo sapien
atactaattttcgtgacactaataa

SEQ ID NO: 5441865 - DNA, 25 bp, Homo sapien
gtttgaggccagcttaatatggtga

SEQ ID NO: 5441866 - DNA, 25 bp, Homo sapien
cacctgagcccagatgtcgaagctg

SEQ ID NO: 5441867 - DNA, 25 bp, Homo sapien
tgagccgtcattgcgccacttgcac

SEQ ID NO: 5441868 - DNA, 25 bp, Homo sapien
cgagaccagccagggtaatatagag

SEQ ID NO: 5441869 - DNA, 25 bp, Homo sapien
gctgcttggctcacgcacattctgg

SEQ ID NO: 5441870 - DNA, 25 bp, Homo sapien
ttggctcacgcacattctggaaccc

SEQ ID NO: 5441871 - DNA, 25 bp, Homo sapien
cagctgcttggctcacgcacattct

SEQ ID NO: 5441872 - DNA, 25 bp, Homo sapien
tccagacaacgtttccccacagctg

SEQ ID NO: 5441873 - DNA, 25 bp, Homo sapien
gaggcggttcacaacatggcgcccg

SEQ ID NO: 5441874 - DNA, 25 bp, Homo sapien
catcttacagctccgccgaggcggt

SEQ ID NO: 5441875 - DNA, 25 bp, Homo sapien
gccggcctagcaaacaccgtaacta

SEQ ID NO: 5441876 - DNA, 25 bp, Homo sapien
ctcagcggagggcagaagctccaag

SEQ ID NO: 5441877 - DNA, 25 bp, Homo sapien
gaggctcacaggaacggccctgtca

SEQ ID NO: 5441878 - DNA, 25 bp, Homo sapien
gcgaggctcacaggaacggccctgt

SEQ ID NO: 5441879 - DNA, 25 bp, Homo sapien
ccgcgaggctcacaggaacggccct

SEQ ID NO: 5441880 - DNA, 25 bp, Homo sapien
gaaaagggggcatcgccaggcgccc

SEQ ID NO: 5441881 - DNA, 25 bp, Homo sapien
ctagtccgctccctcctgcgtctta

SEQ ID NO: 5441882 - DNA, 25 bp, Homo sapien
tagtccgctccctcctgcgtcttac

SEQ ID NO: 5441883 - DNA, 25 bp, Homo sapien
caaagactccaagtcgaaggagaca

SEQ ID NO: 5441884 - DNA, 25 bp, Homo sapien
tgtaacgcaatcacgggaatcacgc

SEQ ID NO: 5441885 - DNA, 25 bp, Homo sapien
acagctgctgcgtcgagactcgtct

SEQ ID NO: 5441886 - DNA, 25 bp, Homo sapien
caacaaaatggagctgacagctgct

SEQ ID NO: 5441887 - DNA, 25 bp, Homo sapien
cacaatattttaattaatttgtcct

SEQ ID NO: 5441888 - DNA, 25 bp, Homo sapien
tacacaatattttaattaatttgtc

SEQ ID NO: 5441889 - DNA, 25 bp, Homo sapien
ggaatatgtaatcaggccactcaaa

SEQ ID NO: 5441890 - DNA, 25 bp, Homo sapien
taacacttccaggatacggacttgc

SEQ ID NO: 5441891 - DNA, 25 bp, Homo sapien
ataaaagctgttgggcgccccttgg

SEQ ID NO: 5441892 - DNA, 25 bp, Homo sapien
ggtaccaccatttcatagaagatca

SEQ ID NO: 5441893 - DNA, 25 bp, Homo sapien
ctactgagcaaatgggttggcatga

SEQ ID NO: 5441894 - DNA, 25 bp, Homo sapien
gggttggcatgaatagttatgtcct

SEQ ID NO: 5441895 - DNA, 25 bp, Homo sapien
tgagcaaatgggttggcatgaatag

SEQ ID NO: 5441896 - DNA, 25 bp, Homo sapien
caaatgggttggcatgaatagttat

SEQ ID NO: 5441897 - DNA, 25 bp, Homo sapien
tagagtttccagaccatctattacc

SEQ ID NO: 5441898 - DNA, 25 bp, Homo sapien
atcattaagaggtcggtatgtcttc

SEQ ID NO: 5441899 - DNA, 25 bp, Homo sapien
attaagaggtcggtatgtcttctca

SEQ ID NO: 5441900 - DNA, 25 bp, Homo sapien
tctagagtttccagaccatctatta

SEQ ID NO: 5441901 - DNA, 25 bp, Homo sapien
tgagatccattggtgttcgggccat

SEQ ID NO: 5441902 - DNA, 25 bp, Homo sapien
tagatacaacacctctaacattgtg

SEQ ID NO: 5441903 - DNA, 25 bp, Homo sapien
gccataggtgatgaagaactgagat

SEQ ID NO: 5441904 - DNA, 25 bp, Homo sapien
tggtgttcgggccattattagccat

SEQ ID NO: 5441905 - DNA, 25 bp, Homo sapien
ttatattaaggaatagtgtgctgga

SEQ ID NO: 5441906 - DNA, 25 bp, Homo sapien
acatacaatggactcttgctagttt

SEQ ID NO: 5441907 - DNA, 25 bp, Homo sapien
catacaatggactcttgctagtttc

SEQ ID NO: 5441908 - DNA, 25 bp, Homo sapien
tagtgtgctggaatgaaatgatcag

SEQ ID NO: 5441909 - DNA, 25 bp, Homo sapien
ctcaaacttcttgccccaaatactg

SEQ ID NO: 5441910 - DNA, 25 bp, Homo sapien
cactgtattcatcctcaaacttctt

SEQ ID NO: 5441911 - DNA, 25 bp, Homo sapien
ttcttgccccaaatactgttgcctc

SEQ ID NO: 5441912 - DNA, 25 bp, Homo sapien
cttaagatattcactgtattcatcc

SEQ ID NO: 5441913 - DNA, 25 bp, Homo sapien
aaggaatactttatagtttgactgc

SEQ ID NO: 5441914 - DNA, 25 bp, Homo sapien
gacctgaagattaaaacagacctac

SEQ ID NO: 5441915 - DNA, 25 bp, Homo sapien
tagtttgactgcttaaatatagata

SEQ ID NO: 5441916 - DNA, 25 bp, Homo sapien
gatatggcctttcctaattccccaa

SEQ ID NO: 5441917 - DNA, 25 bp, Homo sapien
agtatgaaaagcttcacaaatttgt

SEQ ID NO: 5441918 - DNA, 25 bp, Homo sapien
tgtgcaggggccacactaatcttct

SEQ ID NO: 5441919 - DNA, 25 bp, Homo sapien
taagtatgaaaagcttcacaaattt

SEQ ID NO: 5441920 - DNA, 25 bp, Homo sapien
gtctcatccttgtgcaggggccaca

SEQ ID NO: 5441921 - DNA, 25 bp, Homo sapien
tttaaaattgcaccatgtaatacta

SEQ ID NO: 5441922 - DNA, 25 bp, Homo sapien
ttgttcacattttaggggtaggtgc

SEQ ID NO: 5441923 - DNA, 25 bp, Homo sapien
cacattttaggggtaggtgctaata

SEQ ID NO: 5441924 - DNA, 25 bp, Homo sapien
tgctttaaaattgcaccatgtaata

SEQ ID NO: 5441925 - DNA, 25 bp, Homo sapien
tctcctgtttgaaccatgaaaccct

SEQ ID NO: 5441926 - DNA, 25 bp, Homo sapien
cagccattgtagtaattactggcac

SEQ ID NO: 5441927 - DNA, 25 bp, Homo sapien
gaaatatacagccattgtagtaatt

SEQ ID NO: 5441928 - DNA, 25 bp, Homo sapien
gaaacccttgatattcctatgaaat

SEQ ID NO: 5441929 - DNA, 25 bp, Homo sapien
tttccctgcctacaacacttcaata

SEQ ID NO: 5441930 - DNA, 25 bp, Homo sapien
actatgactgttgtcattactttgg

SEQ ID NO: 5441931 - DNA, 25 bp, Homo sapien
tactgaaaacgtgatagcagcatat

SEQ ID NO: 5441932 - DNA, 25 bp, Homo sapien
catatttactgaaaacgtgatagca

SEQ ID NO: 5441933 - DNA, 25 bp, Homo sapien
tcccattattctctatctcaacact

SEQ ID NO: 5441934 - DNA, 25 bp, Homo sapien
cctttcacgaataatgggtttcttg

SEQ ID NO: 5441935 - DNA, 25 bp, Homo sapien
tagtttattggctacacctgccctc

SEQ ID NO: 5441936 - DNA, 25 bp, Homo sapien
catggagatgccctcatacctttgc

SEQ ID NO: 5441937 - DNA, 25 bp, Homo sapien
tgagccaagatcatgccactgcact

SEQ ID NO: 5441938 - DNA, 25 bp, Homo sapien
gaatcgtttgaaccccagaggcgaa

SEQ ID NO: 5441939 - DNA, 25 bp, Homo sapien
agcaagactccgtcttgagaaaaaa

SEQ ID NO: 5441940 - DNA, 25 bp, Homo sapien
ttgcagtgagccaagatcatgccac

SEQ ID NO: 5441941 - DNA, 25 bp, Homo sapien
tttgggtgtcctctcacagaagact

SEQ ID NO: 5441942 - DNA, 25 bp, Homo sapien
ttttgggtgtcctctcacagaagac

SEQ ID NO: 5441943 - DNA, 25 bp, Homo sapien
cccagcctagttgcccactttagat

SEQ ID NO: 5441944 - DNA, 25 bp, Homo sapien
gcccagcctagttgcccactttaga

SEQ ID NO: 5441945 - DNA, 25 bp, Homo sapien
caggaaggactacgtgatttctcag

SEQ ID NO: 5441946 - DNA, 25 bp, Homo sapien
gtcttacagcgagctcaaaaataag

SEQ ID NO: 5441947 - DNA, 25 bp, Homo sapien
tggtttcaggaaggactacgtgatt

SEQ ID NO: 5441948 - DNA, 25 bp, Homo sapien
tacgtgatttctcagtcttacagcg

SEQ ID NO: 5441949 - DNA, 25 bp, Homo sapien
tttcctgtcttaactcacacacgct

SEQ ID NO: 5441950 - DNA, 25 bp, Homo sapien
aactcacacacgctcatctttactg

SEQ ID NO: 5441951 - DNA, 25 bp, Homo sapien
tgtcttaactcacacacgctcatct

SEQ ID NO: 5441952 - DNA, 25 bp, Homo sapien
ctcacacacgctcatctttactgaa

SEQ ID NO: 5441953 - DNA, 25 bp, Homo sapien
tactctgacgttgcaacaacagcct

SEQ ID NO: 5441954 - DNA, 25 bp, Homo sapien
tatcccaagaactaaaccagtagca

SEQ ID NO: 5441955 - DNA, 25 bp, Homo sapien
aactcagcaagcattcgaataagtg

SEQ ID NO: 5441956 - DNA, 25 bp, Homo sapien
actgttcactcgcagtatcccaaga

SEQ ID NO: 5441957 - DNA, 25 bp, Homo sapien
ggaaaaatgcaatcgcagatgccag

SEQ ID NO: 5441958 - DNA, 25 bp, Homo sapien
gctctactaataattgcactgggac

SEQ ID NO: 5441959 - DNA, 25 bp, Homo sapien
atttgacagtgaaagggagctctac

SEQ ID NO: 5441960 - DNA, 25 bp, Homo sapien
tagcacagccgttgttaaaacagga

SEQ ID NO: 5441961 - DNA, 25 bp, Homo sapien
acctcaagcaatgctttacactcgg

SEQ ID NO: 5441962 - DNA, 25 bp, Homo sapien
gggcaacctcaagcaatgctttaca

SEQ ID NO: 5441963 - DNA, 25 bp, Homo sapien
gcaacctcaagcaatgctttacact

SEQ ID NO: 5441964 - DNA, 25 bp, Homo sapien
ctgggcaacctcaagcaatgcttta

SEQ ID NO: 5441965 - DNA, 25 bp, Homo sapien
gtctttgacaagtttatgccctctg

SEQ ID NO: 5441966 - DNA, 25 bp, Homo sapien
ggattctgagcttagacaacctggc

SEQ ID NO: 5441967 - DNA, 25 bp, Homo sapien
tgagcctagcactgtactgattgtc

SEQ ID NO: 5441968 - DNA, 25 bp, Homo sapien
tacagcggttataggtgtggattct

SEQ ID NO: 5441969 - DNA, 25 bp, Homo sapien
agaatgagtgcaagcaagagaaatg

SEQ ID NO: 5441970 - DNA, 25 bp, Homo sapien
tatgcaatatcaaagaatgacctgt

SEQ ID NO: 5441971 - DNA, 25 bp, Homo sapien
tgtgagtttgtgcagccatgtccaa

SEQ ID NO: 5441972 - DNA, 25 bp, Homo sapien
accatgccttgggttagctatgcaa

SEQ ID NO: 5441973 - DNA, 25 bp, Homo sapien
gtgcattgttccgtattttgcgcaa

SEQ ID NO: 5441974 - DNA, 25 bp, Homo sapien
cacatgtattagagggtgctccata

SEQ ID NO: 5441975 - DNA, 25 bp, Homo sapien
gattgtagggaatagtgtcaccacc

SEQ ID NO: 5441976 - DNA, 25 bp, Homo sapien
gatccaaatcagacactagtgcagg

SEQ ID NO: 5441977 - DNA, 25 bp, Homo sapien
ttaaaaggtcgccttggatgcccac

SEQ ID NO: 5441978 - DNA, 25 bp, Homo sapien
ggatgctacaacttatgctattaaa

SEQ ID NO: 5441979 - DNA, 25 bp, Homo sapien
tgaccctaaatacttgggaagcctg

SEQ ID NO: 5441980 - DNA, 25 bp, Homo sapien
tgctattaaaacctcataggctggg

SEQ ID NO: 5441981 - DNA, 25 bp, Homo sapien
tattcaacacattaaggatgctaca

SEQ ID NO: 5441982 - DNA, 25 bp, Homo sapien
cagggacaccgatgcggacacaagt

SEQ ID NO: 5441983 - DNA, 25 bp, Homo sapien
tatttaagactaagcccttggccag

SEQ ID NO: 5441984 - DNA, 25 bp, Homo sapien
tcagtggttgcctaaagaactgggt

SEQ ID NO: 5441985 - DNA, 25 bp, Homo sapien
ccagtagatatttagggcagatgca

SEQ ID NO: 5441986 - DNA, 25 bp, Homo sapien
tttttgtagagacaaggtctcacta

SEQ ID NO: 5441987 - DNA, 25 bp, Homo sapien
tgttgcccaggctgttcttaaactc

SEQ ID NO: 5441988 - DNA, 25 bp, Homo sapien
gcctccacagcagctaggactatag

SEQ ID NO: 5441989 - DNA, 25 bp, Homo sapien
gcatgggccaccatgcccggatgat

SEQ ID NO: 5441990 - DNA, 25 bp, Homo sapien
tgaaagaggtttacaagataagaaa

SEQ ID NO: 5441991 - DNA, 25 bp, Homo sapien
tcatgaaagaggtttacaagataag

SEQ ID NO: 5441992 - DNA, 25 bp, Homo sapien
tttcatgaaagaggtttacaagata

SEQ ID NO: 5441993 - DNA, 25 bp, Homo sapien
catgaaagaggtttacaagataaga

SEQ ID NO: 5441994 - DNA, 25 bp, Homo sapien
aaaagtctcgcgcaaatattcagga

SEQ ID NO: 5441995 - DNA, 25 bp, Homo sapien
ttacagccagccattaatatgctac

SEQ ID NO: 5441996 - DNA, 25 bp, Homo sapien
taggtctacttgacagaggaatcaa

SEQ ID NO: 5441997 - DNA, 25 bp, Homo sapien
tgtaagctgacaacagtagccaagg

SEQ ID NO: 5441998 - DNA, 25 bp, Homo sapien
gaaacaataagagatgacctgccct

SEQ ID NO: 5441999 - DNA, 25 bp, Homo sapien
ccagccaggctgatcaaaaagttct

SEQ ID NO: 5442000 - DNA, 25 bp, Homo sapien
tacactcgttggttctgacacacag

SEQ ID NO: 5442001 - DNA, 25 bp, Homo sapien
tagtactagacggtaccagccaggc

SEQ ID NO: 5442002 - DNA, 25 bp, Homo sapien
tttcaactagaggagtggcagctgg

SEQ ID NO: 5442003 - DNA, 25 bp, Homo sapien
cactttcaactagaggagtggcagc

SEQ ID NO: 5442004 - DNA, 25 bp, Homo sapien
tggcagctggggtacaacccttcca

SEQ ID NO: 5442005 - DNA, 25 bp, Homo sapien
acaacccttccatgggagattcaag

SEQ ID NO: 5442006 - DNA, 25 bp, Homo sapien
acaggaattaataaatactctactc

SEQ ID NO: 5442007 - DNA, 25 bp, Homo sapien
tcaatgttccattatcaacaggaat

SEQ ID NO: 5442008 - DNA, 25 bp, Homo sapien
tccattatcaacaggaattaataaa

SEQ ID NO: 5442009 - DNA, 25 bp, Homo sapien
caggaattaataaatactctactcc

SEQ ID NO: 5442010 - DNA, 25 bp, Homo sapien
cagtggtctcttctgatatctatcc

SEQ ID NO: 5442011 - DNA, 25 bp, Homo sapien
gaacagaattatttgactcaccatg

SEQ ID NO: 5442012 - DNA, 25 bp, Homo sapien
tatccataattaggtcaaatccacc

SEQ ID NO: 5442013 - DNA, 25 bp, Homo sapien
gcctggcctcctagtcttcctttag

SEQ ID NO: 5442014 - DNA, 25 bp, Homo sapien
attcagttaactgggcccggagtgt

SEQ ID NO: 5442015 - DNA, 25 bp, Homo sapien
tgggcccggagtgtcagatcactat

SEQ ID NO: 5442016 - DNA, 25 bp, Homo sapien
gcttgtggtccctaaattcagttaa

SEQ ID NO: 5442017 - DNA, 25 bp, Homo sapien
tattgacgaggaatgcctcccgaca

SEQ ID NO: 5442018 - DNA, 25 bp, Homo sapien
taagtcagcacttaagacatgaccc

SEQ ID NO: 5442019 - DNA, 25 bp, Homo sapien
gacatacccatcatgagtgaccact

SEQ ID NO: 5442020 - DNA, 25 bp, Homo sapien
catgttatcccagagcagtgaacaa

SEQ ID NO: 5442021 - DNA, 25 bp, Homo sapien
gatacacatccatagttagcacaga

SEQ ID NO: 5442022 - DNA, 25 bp, Homo sapien
tgtaagaagggttatcctggttgtc

SEQ ID NO: 5442023 - DNA, 25 bp, Homo sapien
caatgtaagaagggttatcctggtt

SEQ ID NO: 5442024 - DNA, 25 bp, Homo sapien
cctggttgtccagctggtattttat

SEQ ID NO: 5442025 - DNA, 25 bp, Homo sapien
aagaagggttatcctggttgtccag

SEQ ID NO: 5442026 - DNA, 25 bp, Homo sapien
tttttttgccacatgtaagaagaac

SEQ ID NO: 5442027 - DNA, 25 bp, Homo sapien
tctaccatgtaccataaacttacca

SEQ ID NO: 5442028 - DNA, 25 bp, Homo sapien
tccctattggtttggatgtttacat

SEQ ID NO: 5442029 - DNA, 25 bp, Homo sapien
ccctattggtttggatgtttacatt

SEQ ID NO: 5442030 - DNA, 25 bp, Homo sapien
cactactatcatcccatataagtca

SEQ ID NO: 5442031 - DNA, 25 bp, Homo sapien
tggacaatatatatcgtcacactac

SEQ ID NO: 5442032 - DNA, 25 bp, Homo sapien
cagttcagcatttgtcctaaacgaa

SEQ ID NO: 5442033 - DNA, 25 bp, Homo sapien
taaacgaaaatatctggtttggaca

SEQ ID NO: 5442034 - DNA, 25 bp, Homo sapien
cataccagagccagttaaaaagact

SEQ ID NO: 5442035 - DNA, 25 bp, Homo sapien
cagggatccagactgctttaccaga

SEQ ID NO: 5442036 - DNA, 25 bp, Homo sapien
taaggcttcgtaagacatgagtaag

SEQ ID NO: 5442037 - DNA, 25 bp, Homo sapien
aagactctgctttgcatgatcccac

SEQ ID NO: 5442038 - DNA, 25 bp, Homo sapien
gctatccaaattgtggatgagaagg

SEQ ID NO: 5442039 - DNA, 25 bp, Homo sapien
tggtcaatggatgctataaggtaaa

SEQ ID NO: 5442040 - DNA, 25 bp, Homo sapien
tcctctcaacatctggctatccaaa

SEQ ID NO: 5442041 - DNA, 25 bp, Homo sapien
gcattgaggtggtcaatggatgcta

SEQ ID NO: 5442042 - DNA, 25 bp, Homo sapien
gcttaggggtatgtaatttatttga

SEQ ID NO: 5442043 - DNA, 25 bp, Homo sapien
accatacacaatgcctaggtattaa

SEQ ID NO: 5442044 - DNA, 25 bp, Homo sapien
aataatgattgcttaggggtatgta

SEQ ID NO: 5442045 - DNA, 25 bp, Homo sapien
tctaccatacacaatgcctaggtat

SEQ ID NO: 5442046 - DNA, 25 bp, Homo sapien
ccatatgatcgaggacttcttctgt

SEQ ID NO: 5442047 - DNA, 25 bp, Homo sapien
tctagctgatccagtatactgcgga

SEQ ID NO: 5442048 - DNA, 25 bp, Homo sapien
tttgtttactatccagtctagctga

SEQ ID NO: 5442049 - DNA, 25 bp, Homo sapien
cagtatactgcggaaagtacccata

SEQ ID NO: 5442050 - DNA, 25 bp, Homo sapien
gaagccattgatgacaacgtgaatg

SEQ ID NO: 5442051 - DNA, 25 bp, Homo sapien
gcatagtggttcgaaacctttctag

SEQ ID NO: 5442052 - DNA, 25 bp, Homo sapien
tctcttagaacccaaaccataaagc

SEQ ID NO: 5442053 - DNA, 25 bp, Homo sapien
acgtgaatggaatcttgcagcatag

SEQ ID NO: 5442054 - DNA, 25 bp, Homo sapien
ttaagcacttccttatgttcaagtc

SEQ ID NO: 5442055 - DNA, 25 bp, Homo sapien
tatgttcaagtctttttaactgcaa

SEQ ID NO: 5442056 - DNA, 25 bp, Homo sapien
cctggtccatggctctaccttctta

SEQ ID NO: 5442057 - DNA, 25 bp, Homo sapien
agtgacaatgtaactgtgagtgtgc

SEQ ID NO: 5442058 - DNA, 25 bp, Homo sapien
tgctcaataagttacgcaaagtttg

SEQ ID NO: 5442059 - DNA, 25 bp, Homo sapien
cttgctcaataagttacgcaaagtt

SEQ ID NO: 5442060 - DNA, 25 bp, Homo sapien
accttgctcaataagttacgcaaag

SEQ ID NO: 5442061 - DNA, 25 bp, Homo sapien
ccttgctcaataagttacgcaaagt

SEQ ID NO: 5442062 - DNA, 25 bp, Homo sapien
tgtactagaatgaagcagaactggc

SEQ ID NO: 5442063 - DNA, 25 bp, Homo sapien
gaccccaatatccagctgtactaga

SEQ ID NO: 5442064 - DNA, 25 bp, Homo sapien
gcaatctagttttgagcctgggctg

SEQ ID NO: 5442065 - DNA, 25 bp, Homo sapien
tctgccactgtcatgaggataacat

SEQ ID NO: 5442066 - DNA, 25 bp, Homo sapien
ggttttccataatatcctcaagcag

SEQ ID NO: 5442067 - DNA, 25 bp, Homo sapien
gcagaatatcctctactttgtgcaa

SEQ ID NO: 5442068 - DNA, 25 bp, Homo sapien
ggaaccatggtacatagtaatcttg

SEQ ID NO: 5442069 - DNA, 25 bp, Homo sapien
ggatatcaaggaactatgaccctga

SEQ ID NO: 5442070 - DNA, 25 bp, Homo sapien
atacttttcaaatctgttgcttacg

SEQ ID NO: 5442071 - DNA, 25 bp, Homo sapien
tcacattaacttgtgtttcatttga

SEQ ID NO: 5442072 - DNA, 25 bp, Homo sapien
gcttacgtagcatatttttcaggac

SEQ ID NO: 5442073 - DNA, 25 bp, Homo sapien
tcatttgatcaggacaataattcta

SEQ ID NO: 5442074 - DNA, 25 bp, Homo sapien
ctgatccagtttagctctctttagc

SEQ ID NO: 5442075 - DNA, 25 bp, Homo sapien
gatccagtttagctctctttagctt

SEQ ID NO: 5442076 - DNA, 25 bp, Homo sapien
tgatccagtttagctctctttagct

SEQ ID NO: 5442077 - DNA, 25 bp, Homo sapien
tggcctactattccagtcaagcgga

SEQ ID NO: 5442078 - DNA, 25 bp, Homo sapien
gcctggcttcaaatagtcttagcaa

SEQ ID NO: 5442079 - DNA, 25 bp, Homo sapien
caggactaaactctagggtggtaag

SEQ ID NO: 5442080 - DNA, 25 bp, Homo sapien
tgttcttctgattttgggcaggact

SEQ ID NO: 5442081 - DNA, 25 bp, Homo sapien
ttattgcccaggctagtacaatggc

SEQ ID NO: 5442082 - DNA, 25 bp, Homo sapien
gcctcctgggttccagcaattctcc

SEQ ID NO: 5442083 - DNA, 25 bp, Homo sapien
atgatctcggctcactacagcctct

SEQ ID NO: 5442084 - DNA, 25 bp, Homo sapien
tcctgggttccagcaattctcctgc

SEQ ID NO: 5442085 - DNA, 25 bp, Homo sapien
tctgagttggaagcagaatattcgc

SEQ ID NO: 5442086 - DNA, 25 bp, Homo sapien
ggagctgaaactactctattctgag

SEQ ID NO: 5442087 - DNA, 25 bp, Homo sapien
tagaaggtgtttctttgccaacagg

SEQ ID NO: 5442088 - DNA, 25 bp, Homo sapien
tgaatatgactgcattagtgtcctc

SEQ ID NO: 5442089 - DNA, 25 bp, Homo sapien
aatttcatggtttgacaagagaggc

SEQ ID NO: 5442090 - DNA, 25 bp, Homo sapien
tctctcagcaccagtttatttatca

SEQ ID NO: 5442091 - DNA, 25 bp, Homo sapien
taaagccactaataattcctgacac

SEQ ID NO: 5442092 - DNA, 25 bp, Homo sapien
aatagcaatttggacaatttcatgg

SEQ ID NO: 5442093 - DNA, 25 bp, Homo sapien
gccctgatgttaggctgaatttaac

SEQ ID NO: 5442094 - DNA, 25 bp, Homo sapien
cataagacatgggatatagttgaca

SEQ ID NO: 5442095 - DNA, 25 bp, Homo sapien
gctatgaagtatgaagccctgatgt

SEQ ID NO: 5442096 - DNA, 25 bp, Homo sapien
aaaggtccagtcatttgcctcaaag

SEQ ID NO: 5442097 - DNA, 25 bp, Homo sapien
cgaggtgctgttgacagaaattcac

SEQ ID NO: 5442098 - DNA, 25 bp, Homo sapien
ctacgaggtgctgttgacagaaatt

SEQ ID NO: 5442099 - DNA, 25 bp, Homo sapien
tttttcttagactacgaggtgctgt

SEQ ID NO: 5442100 - DNA, 25 bp, Homo sapien
gaggtgctgttgacagaaattcact

SEQ ID NO: 5442101 - DNA, 25 bp, Homo sapien
catcttgacccagtacacgtgtata

SEQ ID NO: 5442102 - DNA, 25 bp, Homo sapien
tactcctagggcaaacagcttatct

SEQ ID NO: 5442103 - DNA, 25 bp, Homo sapien
tgaaagtctggcatgtctaatccca

SEQ ID NO: 5442104 - DNA, 25 bp, Homo sapien
cacgttaacttctgattagccccag

SEQ ID NO: 5442105 - DNA, 25 bp, Homo sapien
tgaaccttgtctgaagcagaatggc

SEQ ID NO: 5442106 - DNA, 25 bp, Homo sapien
tcggttgaaccttgtctgaagcaga

SEQ ID NO: 5442107 - DNA, 25 bp, Homo sapien
cttcggttgaaccttgtctgaagca

SEQ ID NO: 5442108 - DNA, 25 bp, Homo sapien
gttgaaccttgtctgaagcagaatg

SEQ ID NO: 5442109 - DNA, 25 bp, Homo sapien
aagccatgacttactacggacactt

SEQ ID NO: 5442110 - DNA, 25 bp, Homo sapien
gccatgacttactacggacacttca

SEQ ID NO: 5442111 - DNA, 25 bp, Homo sapien
tgacttactacggacacttcacttt

SEQ ID NO: 5442112 - DNA, 25 bp, Homo sapien
ttactacggacacttcacttttcat

SEQ ID NO: 5442113 - DNA, 25 bp, Homo sapien
ctttgaggaacgtttatcgtaatct

SEQ ID NO: 5442114 - DNA, 25 bp, Homo sapien
ccttgctactttgaggaacgtttat

SEQ ID NO: 5442115 - DNA, 25 bp, Homo sapien
gctactttgaggaacgtttatcgta

SEQ ID NO: 5442116 - DNA, 25 bp, Homo sapien
gaacgtttatcgtaatctcaggatc

SEQ ID NO: 5442117 - DNA, 25 bp, Homo sapien
ctggttcccaagctactggttgtgg

SEQ ID NO: 5442118 - DNA, 25 bp, Homo sapien
tattaaactacaaaggagccaggga

SEQ ID NO: 5442119 - DNA, 25 bp, Homo sapien
cattctaggcatacttaaggctcag

SEQ ID NO: 5442120 - DNA, 25 bp, Homo sapien
taaaggctgattcacaggataggga

SEQ ID NO: 5442121 - DNA, 25 bp, Homo sapien
gtagctgggactataggcatgtacc

SEQ ID NO: 5442122 - DNA, 25 bp, Homo sapien
accttgaacccctaggctcaagtca

SEQ ID NO: 5442123 - DNA, 25 bp, Homo sapien
tcatcctcctgcttcagcctcccaa

SEQ ID NO: 5442124 - DNA, 25 bp, Homo sapien
ctgcacccagcctaatttttaaatt

SEQ ID NO: 5442125 - DNA, 25 bp, Homo sapien
ttccaccacctgtagcagagccatt

SEQ ID NO: 5442126 - DNA, 25 bp, Homo sapien
gttgaccaaaagctgcgctcgctcc

SEQ ID NO: 5442127 - DNA, 25 bp, Homo sapien
gctgcgctcgctccttcttcaattt

SEQ ID NO: 5442128 - DNA, 25 bp, Homo sapien
ttgaacatctcttcccataatttcc

SEQ ID NO: 5442129 - DNA, 25 bp, Homo sapien
cctccaaatcatattctggcttctt

SEQ ID NO: 5442130 - DNA, 25 bp, Homo sapien
gcatctcttcaaattgtacaatcac

SEQ ID NO: 5442131 - DNA, 25 bp, Homo sapien
tagttttactaaccagatcaatcct

SEQ ID NO: 5442132 - DNA, 25 bp, Homo sapien
tcctttgcgctatattttcaaaaga

SEQ ID NO: 5442133 - DNA, 25 bp, Homo sapien
cattataataagcatctcttcaaat

SEQ ID NO: 5442134 - DNA, 25 bp, Homo sapien
cacaaagtgaacctccagcatcttg

SEQ ID NO: 5442135 - DNA, 25 bp, Homo sapien
atctcccacaaagtgaacctccagc

SEQ ID NO: 5442136 - DNA, 25 bp, Homo sapien
catcatctcccacaaagtgaacctc

SEQ ID NO: 5442137 - DNA, 25 bp, Homo sapien
ttcacataatgaatacatgtcttta

SEQ ID NO: 5442138 - DNA, 25 bp, Homo sapien
tctttcttacaatcttgttttcacc

SEQ ID NO: 5442139 - DNA, 25 bp, Homo sapien
tcttctgagttcattaactgcagga

SEQ ID NO: 5442140 - DNA, 25 bp, Homo sapien
tcctggaattaagcaattttcccac

SEQ ID NO: 5442141 - DNA, 25 bp, Homo sapien
gagaaactattgactgtgtctctct

SEQ ID NO: 5442142 - DNA, 25 bp, Homo sapien
ctgcagctgcaaaattcagatacag

SEQ ID NO: 5442143 - DNA, 25 bp, Homo sapien
agctgcaaaattcagatacagtcac

SEQ ID NO: 5442144 - DNA, 25 bp, Homo sapien
gcagctgcaaaattcagatacagtc

SEQ ID NO: 5442145 - DNA, 25 bp, Homo sapien
cagctgcaaaattcagatacagtca

SEQ ID NO: 5442146 - DNA, 25 bp, Homo sapien
caaggtgaccgatcagttagctggc

SEQ ID NO: 5442147 - DNA, 25 bp, Homo sapien
tgcacaaaaggcctataactgcggg

SEQ ID NO: 5442148 - DNA, 25 bp, Homo sapien
caggtaggttagtatcaggcgtccc

SEQ ID NO: 5442149 - DNA, 25 bp, Homo sapien
catcaaaggttctagctacagtggt

SEQ ID NO: 5442150 - DNA, 25 bp, Homo sapien
cgccgcgagctaagcagaaaaggga

SEQ ID NO: 5442151 - DNA, 25 bp, Homo sapien
ctcacacgccgcgagctaagcagaa

SEQ ID NO: 5442152 - DNA, 25 bp, Homo sapien
cacacgccgcgagctaagcagaaaa

SEQ ID NO: 5442153 - DNA, 25 bp, Homo sapien
cacgccgcgagctaagcagaaaagg

SEQ ID NO: 5442154 - DNA, 25 bp, Homo sapien
ccgtctggcgccgatccggctgcgt

SEQ ID NO: 5442155 - DNA, 25 bp, Homo sapien
ggtttccgtctggcgccgatccggc

SEQ ID NO: 5442156 - DNA, 25 bp, Homo sapien
gtctggcgccgatccggctgcgtca

SEQ ID NO: 5442157 - DNA, 25 bp, Homo sapien
tttccgtctggcgccgatccggctg

SEQ ID NO: 5442158 - DNA, 25 bp, Homo sapien
aacgacaccccgctgagtcgccgcc

SEQ ID NO: 5442159 - DNA, 25 bp, Homo sapien
cgaacgacaccccgctgagtcgccg

SEQ ID NO: 5442160 - DNA, 25 bp, Homo sapien
acgacaccccgctgagtcgccgccg

SEQ ID NO: 5442161 - DNA, 25 bp, Homo sapien
gaacgacaccccgctgagtcgccgc

SEQ ID NO: 5442162 - DNA, 25 bp, Homo sapien
gcctgcgtgcggcacaccgaatctc

SEQ ID NO: 5442163 - DNA, 25 bp, Homo sapien
gggaggtaaggagcaccggaggcca

SEQ ID NO: 5442164 - DNA, 25 bp, Homo sapien
tttccagtaattcgcgcccgaccac

SEQ ID NO: 5442165 - DNA, 25 bp, Homo sapien
aggtaaggagcaccggaggccagct

SEQ ID NO: 5442166 - DNA, 25 bp, Homo sapien
cggtgcccgaggaagccaataggaa

SEQ ID NO: 5442167 - DNA, 25 bp, Homo sapien
agcgacggctctgccgtccagtcgg

SEQ ID NO: 5442168 - DNA, 25 bp, Homo sapien
gtgcccgaggaagccaataggaaga

SEQ ID NO: 5442169 - DNA, 25 bp, Homo sapien
gaggagtcggccaagagcgacggct

SEQ ID NO: 5442170 - DNA, 25 bp, Homo sapien
gactatctgctctcaaccaaacctc

SEQ ID NO: 5442171 - DNA, 25 bp, Homo sapien
ctgcagcctcgactatctgctctca

SEQ ID NO: 5442172 - DNA, 25 bp, Homo sapien
ctatgatgtcagtaaactccccttc

SEQ ID NO: 5442173 - DNA, 25 bp, Homo sapien
tatttctatgatgtcagtaaactcc

SEQ ID NO: 5442174 - DNA, 25 bp, Homo sapien
gcaatgagtcatatatcccctgggc

SEQ ID NO: 5442175 - DNA, 25 bp, Homo sapien
taaggtgaaccgagaggatctagac

SEQ ID NO: 5442176 - DNA, 25 bp, Homo sapien
tctaccactaggcacaactgagagt

SEQ ID NO: 5442177 - DNA, 25 bp, Homo sapien
tcttacttggctcccagaacgctgg

SEQ ID NO: 5442178 - DNA, 25 bp, Homo sapien
catttggattatcaccccgggccag

SEQ ID NO: 5442179 - DNA, 25 bp, Homo sapien
gatagctaggatcacaagggtgcgc

SEQ ID NO: 5442180 - DNA, 25 bp, Homo sapien
tccctcaggatggtacacaagaacc

SEQ ID NO: 5442181 - DNA, 25 bp, Homo sapien
taaaatactgtgacttacctggaca

SEQ ID NO: 5442182 - DNA, 25 bp, Homo sapien
tttaacatctaagatatgtttctgc

SEQ ID NO: 5442183 - DNA, 25 bp, Homo sapien
taacatctaagatatgtttctgcat

SEQ ID NO: 5442184 - DNA, 25 bp, Homo sapien
tgtaactagatacatctaagggtaa

SEQ ID NO: 5442185 - DNA, 25 bp, Homo sapien
catctaagggtaaattacacatctc

SEQ ID NO: 5442186 - DNA, 25 bp, Homo sapien
tcagaagaaatatgcctacacaggc

SEQ ID NO: 5442187 - DNA, 25 bp, Homo sapien
ccaacttagtggtaaaacgatgaca

SEQ ID NO: 5442188 - DNA, 25 bp, Homo sapien
tagctgagactaccgcatttaagac

SEQ ID NO: 5442189 - DNA, 25 bp, Homo sapien
caatatgaccatcttggcagggaaa

SEQ ID NO: 5442190 - DNA, 25 bp, Homo sapien
taattaatgtcagagcgagctccca

SEQ ID NO: 5442191 - DNA, 25 bp, Homo sapien
tgtattcaccaactactagaccaga

SEQ ID NO: 5442192 - DNA, 25 bp, Homo sapien
aaatggagttaacaacccactgcct

SEQ ID NO: 5442193 - DNA, 25 bp, Homo sapien
tatccaacttggcatacatggcacc

SEQ ID NO: 5442194 - DNA, 25 bp, Homo sapien
tataaagagtctaacagaaagtctc

SEQ ID NO: 5442195 - DNA, 25 bp, Homo sapien
tatgccataaagtgactgacctcca

SEQ ID NO: 5442196 - DNA, 25 bp, Homo sapien
taacataagatttctagccaaagga

SEQ ID NO: 5442197 - DNA, 25 bp, Homo sapien
tgacctccagccatagccaagatct

SEQ ID NO: 5442198 - DNA, 25 bp, Homo sapien
cattcctgggaaatagaacatgccc

SEQ ID NO: 5442199 - DNA, 25 bp, Homo sapien
taggagaaatcaaggtcagtacccc

SEQ ID NO: 5442200 - DNA, 25 bp, Homo sapien
cacagtgttgaaatgggaccgatca

SEQ ID NO: 5442201 - DNA, 25 bp, Homo sapien
gatggattgcacatcacccaaggag

SEQ ID NO: 5442202 - DNA, 25 bp, Homo sapien
tgaaacttggggatcgagactgctt

SEQ ID NO: 5442203 - DNA, 25 bp, Homo sapien
gggatcgagactgcttggtcaaggg

SEQ ID NO: 5442204 - DNA, 25 bp, Homo sapien
acttggggatcgagactgcttggtc

SEQ ID NO: 5442205 - DNA, 25 bp, Homo sapien
ttggtcaagggggctcctgggctga

SEQ ID NO: 5442206 - DNA, 25 bp, Homo sapien
gaactactgaatctcgagggctctc

SEQ ID NO: 5442207 - DNA, 25 bp, Homo sapien
taaattagtacctccctcagtgcca

SEQ ID NO: 5442208 - DNA, 25 bp, Homo sapien
tatccttggctgaacgcccagttgc

SEQ ID NO: 5442209 - DNA, 25 bp, Homo sapien
tgatttacttgaggaagcactggct

SEQ ID NO: 5442210 - DNA, 25 bp, Homo sapien
tgtctatggccttttctactcactg

SEQ ID NO: 5442211 - DNA, 25 bp, Homo sapien
caaaatacgatagtgtcccatcaca

SEQ ID NO: 5442212 - DNA, 25 bp, Homo sapien
catttcatttcatgcagaaactgca

SEQ ID NO: 5442213 - DNA, 25 bp, Homo sapien
tattgagatgtattgtcataatcac

SEQ ID NO: 5442214 - DNA, 25 bp, Homo sapien
aagccaccatgcaagagaatctact

SEQ ID NO: 5442215 - DNA, 25 bp, Homo sapien
gctacatgcagatctgatgcccaag

SEQ ID NO: 5442216 - DNA, 25 bp, Homo sapien
gagagacttagtgctagcttctgaa

SEQ ID NO: 5442217 - DNA, 25 bp, Homo sapien
aaaggcaccttattatatccagcag

SEQ ID NO: 5442218 - DNA, 25 bp, Homo sapien
tacttacacatttggcttctgttaa

SEQ ID NO: 5442219 - DNA, 25 bp, Homo sapien
gaacttttctattcatggctgactt

SEQ ID NO: 5442220 - DNA, 25 bp, Homo sapien
tgaacgccaagaagctatgaaatgg

SEQ ID NO: 5442221 - DNA, 25 bp, Homo sapien
ctgttaatactgatttaaaactaca

SEQ ID NO: 5442222 - DNA, 25 bp, Homo sapien
aatggaaagatgctctgcttgggga

SEQ ID NO: 5442223 - DNA, 25 bp, Homo sapien
gcaactgcctcactgacttctgcct

SEQ ID NO: 5442224 - DNA, 25 bp, Homo sapien
caactgcctcactgacttctgcctc

SEQ ID NO: 5442225 - DNA, 25 bp, Homo sapien
aagatgctctgcttggggatagaga

SEQ ID NO: 5442226 - DNA, 25 bp, Homo sapien
gagtcagcctcgtttgagaagtcaa

SEQ ID NO: 5442227 - DNA, 25 bp, Homo sapien
cacacgtttgatccctaggtcagtg

SEQ ID NO: 5442228 - DNA, 25 bp, Homo sapien
ttgggctccggcgagccatgctcag

SEQ ID NO: 5442229 - DNA, 25 bp, Homo sapien
gagccaggaatactcgagtcagcct

SEQ ID NO: 5442230 - DNA, 25 bp, Homo sapien
acagtgataaatttacttgactcca

SEQ ID NO: 5442231 - DNA, 25 bp, Homo sapien
aataactttagacatttagtcacat

SEQ ID NO: 5442232 - DNA, 25 bp, Homo sapien
taatatcacgtgctaagacagtctg

SEQ ID NO: 5442233 - DNA, 25 bp, Homo sapien
tacttgactccatgtgtggactatg

SEQ ID NO: 5442234 - DNA, 25 bp, Homo sapien
taattgcagtccgagaaatcctcgg

SEQ ID NO: 5442235 - DNA, 25 bp, Homo sapien
tcaggagcatcaaatggtaatgagt

SEQ ID NO: 5442236 - DNA, 25 bp, Homo sapien
tctatgacgacggattgaagctgtt

SEQ ID NO: 5442237 - DNA, 25 bp, Homo sapien
aatcctcggcactgttggagtgact

SEQ ID NO: 5442238 - DNA, 25 bp, Homo sapien
aaagctctagctgggctctataaat

SEQ ID NO: 5442239 - DNA, 25 bp, Homo sapien
ctctataaatgatatcatcaagaac

SEQ ID NO: 5442240 - DNA, 25 bp, Homo sapien
ggttgagaaaaaagctctagctggg

SEQ ID NO: 5442241 - DNA, 25 bp, Homo sapien
taaatgatatcatcaagaacttcct

SEQ ID NO: 5442242 - DNA, 25 bp, Homo sapien
gtttttcatgttgccgtggaaagcc

SEQ ID NO: 5442243 - DNA, 25 bp, Homo sapien
agttgcaccataaattcaggatcca

SEQ ID NO: 5442244 - DNA, 25 bp, Homo sapien
aaacccctgtgagaagttgcaccat

SEQ ID NO: 5442245 - DNA, 25 bp, Homo sapien
tattcgaccacagagttctttccag

SEQ ID NO: 5442246 - DNA, 25 bp, Homo sapien
aatgaaccaaaagtaatgaattata

SEQ ID NO: 5442247 - DNA, 25 bp, Homo sapien
aaataagtttatctgcagataggga

SEQ ID NO: 5442248 - DNA, 25 bp, Homo sapien
tatctgcagatagggagtaagtgct

SEQ ID NO: 5442249 - DNA, 25 bp, Homo sapien
tataaataagtttatctgcagatag

SEQ ID NO: 5442250 - DNA, 25 bp, Homo sapien
caagatttaagcctaggtctgtcca

SEQ ID NO: 5442251 - DNA, 25 bp, Homo sapien
taaggactcctacaggaatgcaagc

SEQ ID NO: 5442252 - DNA, 25 bp, Homo sapien
ggtacaactccacgttcagctagaa

SEQ ID NO: 5442253 - DNA, 25 bp, Homo sapien
caaaggttgaatgagccaatatggc

SEQ ID NO: 5442254 - DNA, 25 bp, Homo sapien
gcatatatacaatagcagaattata

SEQ ID NO: 5442255 - DNA, 25 bp, Homo sapien
tggaacccatccgacaaagagattg

SEQ ID NO: 5442256 - DNA, 25 bp, Homo sapien
caaagagattggtaagatgaggcag

SEQ ID NO: 5442257 - DNA, 25 bp, Homo sapien
taagatgaggcaggcatatatacaa

SEQ ID NO: 5442258 - DNA, 25 bp, Homo sapien
ggatgaagatcactataaacaactc

SEQ ID NO: 5442259 - DNA, 25 bp, Homo sapien
tgatgagatcatgctgacacaatgc

SEQ ID NO: 5442260 - DNA, 25 bp, Homo sapien
agatcactataaacaactctgatga

SEQ ID NO: 5442261 - DNA, 25 bp, Homo sapien
cacaatgccccttctgtcaaagcca

SEQ ID NO: 5442262 - DNA, 25 bp, Homo sapien
tcttctcattcttcacggaaaaggt

SEQ ID NO: 5442263 - DNA, 25 bp, Homo sapien
taaggtacagtatgagacaatgtct

SEQ ID NO: 5442264 - DNA, 25 bp, Homo sapien
tccagaatgagtacaactgcttata

SEQ ID NO: 5442265 - DNA, 25 bp, Homo sapien
gaaaaggttcagaatctttcaactg

SEQ ID NO: 5442266 - DNA, 25 bp, Homo sapien
gataaggaggggatagtgaaagaca

SEQ ID NO: 5442267 - DNA, 25 bp, Homo sapien
gaggggatagtgaaagacagaactt

SEQ ID NO: 5442268 - DNA, 25 bp, Homo sapien
tatattgaaggcttggataaggagg

SEQ ID NO: 5442269 - DNA, 25 bp, Homo sapien
atggtatattgaaggcttggataag

SEQ ID NO: 5442270 - DNA, 25 bp, Homo sapien
tacagatgacgacaatcagaggagt

SEQ ID NO: 5442271 - DNA, 25 bp, Homo sapien
gactgagtagctgcatggcctaaaa

SEQ ID NO: 5442272 - DNA, 25 bp, Homo sapien
gactgcccttactagacctatatgg

SEQ ID NO: 5442273 - DNA, 25 bp, Homo sapien
ccggaagtaaacgttgcagagagct

SEQ ID NO: 5442274 - DNA, 25 bp, Homo sapien
catttataaacaccttatgcaacat

SEQ ID NO: 5442275 - DNA, 25 bp, Homo sapien
ttctgaactgaatgcaagtcattct

SEQ ID NO: 5442276 - DNA, 25 bp, Homo sapien
tataaacaccttatgcaacataatg

SEQ ID NO: 5442277 - DNA, 25 bp, Homo sapien
atggacatttataaacaccttatgc

SEQ ID NO: 5442278 - DNA, 25 bp, Homo sapien
tcagaaaggtgcaacacagatgatc

SEQ ID NO: 5442279 - DNA, 25 bp, Homo sapien
gatgagttcaggtaactgcccaatt

SEQ ID NO: 5442280 - DNA, 25 bp, Homo sapien
tgcactgcgcaagaaaaggtgcctt

SEQ ID NO: 5442281 - DNA, 25 bp, Homo sapien
cccaattttgtagaggcacatgaga

SEQ ID NO: 5442282 - DNA, 25 bp, Homo sapien
tctgtctcggctaactgtaagccgt

SEQ ID NO: 5442283 - DNA, 25 bp, Homo sapien
gaactgcagtgtgaacctcttaagt

SEQ ID NO: 5442284 - DNA, 25 bp, Homo sapien
taaataaacccacatcaattctggc

SEQ ID NO: 5442285 - DNA, 25 bp, Homo sapien
gcaaccattactctgtctgtctcgg

SEQ ID NO: 5442286 - DNA, 25 bp, Homo sapien
tagagccttctaacctgacaggaga

SEQ ID NO: 5442287 - DNA, 25 bp, Homo sapien
taatgaatgctggaccttgagctcg

SEQ ID NO: 5442288 - DNA, 25 bp, Homo sapien
cacttgtgagccctaatgaaaatgt

SEQ ID NO: 5442289 - DNA, 25 bp, Homo sapien
aagggacctccttctatgactaaag

SEQ ID NO: 5442290 - DNA, 25 bp, Homo sapien
gcagaggcactcttggaggctgtat

SEQ ID NO: 5442291 - DNA, 25 bp, Homo sapien
caaataaataatccactgagatgat

SEQ ID NO: 5442292 - DNA, 25 bp, Homo sapien
ccactgagatgatggtcaataaaat

SEQ ID NO: 5442293 - DNA, 25 bp, Homo sapien
acatactgcacactcaacaggaaaa

SEQ ID NO: 5442294 - DNA, 25 bp, Homo sapien
tcaaaacatactgcacactcaacag

SEQ ID NO: 5442295 - DNA, 25 bp, Homo sapien
gaataactttatagagggctggtac

SEQ ID NO: 5442296 - DNA, 25 bp, Homo sapien
gttgctgcataactggtgatctgag

SEQ ID NO: 5442297 - DNA, 25 bp, Homo sapien
ctttatagagggctggtacaagtgt

SEQ ID NO: 5442298 - DNA, 25 bp, Homo sapien
tgtaaagttgctgcataactggtga

SEQ ID NO: 5442299 - DNA, 25 bp, Homo sapien
ccacaacacaacggtcagttcccag

SEQ ID NO: 5442300 - DNA, 25 bp, Homo sapien
acaacacaacggtcagttcccagca

SEQ ID NO: 5442301 - DNA, 25 bp, Homo sapien
tccacaacacaacggtcagttccca

SEQ ID NO: 5442302 - DNA, 25 bp, Homo sapien
cacaacacaacggtcagttcccagc

SEQ ID NO: 5442303 - DNA, 25 bp, Homo sapien
gactgaaacacagtggcgagatctt

SEQ ID NO: 5442304 - DNA, 25 bp, Homo sapien
gttgcaatcaacacccttatacata

SEQ ID NO: 5442305 - DNA, 25 bp, Homo sapien
tatctgtccaataacttactgatgg

SEQ ID NO: 5442306 - DNA, 25 bp, Homo sapien
aactgtaagcacaaacccttatctg

SEQ ID NO: 5442307 - DNA, 25 bp, Homo sapien
ttttctaaaggaggaggtggcacag

SEQ ID NO: 5442308 - DNA, 25 bp, Homo sapien
gtggcacaggaattcggcagagttc

SEQ ID NO: 5442309 - DNA, 25 bp, Homo sapien
tgtattaagatcagttttctaaagg

SEQ ID NO: 5442310 - DNA, 25 bp, Homo sapien
caggaattcggcagagttcaagtgg

SEQ ID NO: 5442311 - DNA, 25 bp, Homo sapien
caagaagcacagtccttaaaaaaga

SEQ ID NO: 5442312 - DNA, 25 bp, Homo sapien
ttcttctgcttccagtatgacccag

SEQ ID NO: 5442313 - DNA, 25 bp, Homo sapien
gccaaaagagtagataccccgatgt

SEQ ID NO: 5442314 - DNA, 25 bp, Homo sapien
gtaaaagacgaattttgtcagactg

SEQ ID NO: 5442315 - DNA, 25 bp, Homo sapien
aaatctcaagtaaagatggtttcac

SEQ ID NO: 5442316 - DNA, 25 bp, Homo sapien
agtgaattctttcaattacgggaga

SEQ ID NO: 5442317 - DNA, 25 bp, Homo sapien
accatgtcagtataaaacggacaca

SEQ ID NO: 5442318 - DNA, 25 bp, Homo sapien
aaattaaattactaatgctgaaaga

SEQ ID NO: 5442319 - DNA, 25 bp, Homo sapien
tgaaggacaagttatcatagctcag

SEQ ID NO: 5442320 - DNA, 25 bp, Homo sapien
caagttatcatagctcagcctgcca

SEQ ID NO: 5442321 - DNA, 25 bp, Homo sapien
ggacaagttatcatagctcagcctg

SEQ ID NO: 5442322 - DNA, 25 bp, Homo sapien
aagttatcatagctcagcctgccac

SEQ ID NO: 5442323 - DNA, 25 bp, Homo sapien
ctatttggaatttatatacaacctg

SEQ ID NO: 5442324 - DNA, 25 bp, Homo sapien
tatttggaatttatatacaacctgc

SEQ ID NO: 5442325 - DNA, 25 bp, Homo sapien
agtgccgaaggcgaaaaaggaagct

SEQ ID NO: 5442326 - DNA, 25 bp, Homo sapien
gctcctacccatcttaaagcagaag

SEQ ID NO: 5442327 - DNA, 25 bp, Homo sapien
tacccatcttaaagcagaagccaaa

SEQ ID NO: 5442328 - DNA, 25 bp, Homo sapien
tgttttcacaagatagtgccgaagg

SEQ ID NO: 5442329 - DNA, 25 bp, Homo sapien
ggctacaaagaagctccataacatt

SEQ ID NO: 5442330 - DNA, 25 bp, Homo sapien
gctgaccagagttcaccatgaagaa

SEQ ID NO: 5442331 - DNA, 25 bp, Homo sapien
gccaagatcaagaccctgatcagac

SEQ ID NO: 5442332 - DNA, 25 bp, Homo sapien
gcaccaggtcaaataggctacaaag

SEQ ID NO: 5442333 - DNA, 25 bp, Homo sapien
cagctcccgtctgtagtttccgcgg

SEQ ID NO: 5442334 - DNA, 25 bp, Homo sapien
ccctcgccagctcccgtctgtagtt

SEQ ID NO: 5442335 - DNA, 25 bp, Homo sapien
cgtctgtagtttccgcggccgaagg

SEQ ID NO: 5442336 - DNA, 25 bp, Homo sapien
tagtttccgcggccgaaggagaaga

SEQ ID NO: 5442337 - DNA, 25 bp, Homo sapien
tgtctaaggattccgtccccaagca

SEQ ID NO: 5442338 - DNA, 25 bp, Homo sapien
gccccgccctgtgtgcggtgtctaa

SEQ ID NO: 5442339 - DNA, 25 bp, Homo sapien
ccttattggctgcagtatgccggca

SEQ ID NO: 5442340 - DNA, 25 bp, Homo sapien
cattgggtgagaacacgctctcaac

SEQ ID NO: 5442341 - DNA, 25 bp, Homo sapien
cctgaataaagataagaagcatcac

SEQ ID NO: 5442342 - DNA, 25 bp, Homo sapien
catagtggtttcttaactctccaaa

SEQ ID NO: 5442343 - DNA, 25 bp, Homo sapien
taatacctggaagcatcatagtggt

SEQ ID NO: 5442344 - DNA, 25 bp, Homo sapien
tgtagcctacttgtctggtttatcc

SEQ ID NO: 5442345 - DNA, 25 bp, Homo sapien
actgcacccggtcgcttagctccca

SEQ ID NO: 5442346 - DNA, 25 bp, Homo sapien
acttgcaagtgagaacataatgaca

SEQ ID NO: 5442347 - DNA, 25 bp, Homo sapien
aatggtctccaaatgcaaacttttt

SEQ ID NO: 5442348 - DNA, 25 bp, Homo sapien
caggtgagcaccacaagcccagcta

SEQ ID NO: 5442349 - DNA, 25 bp, Homo sapien
ggcaggcagaggtcacgtatgggtt

SEQ ID NO: 5442350 - DNA, 25 bp, Homo sapien
tgtggcaggcagaggtcacgtatgg

SEQ ID NO: 5442351 - DNA, 25 bp, Homo sapien
tctcgatgtggcaggcagaggtcac

SEQ ID NO: 5442352 - DNA, 25 bp, Homo sapien
caggcagaggtcacgtatgggttaa

SEQ ID NO: 5442353 - DNA, 25 bp, Homo sapien
tacttggtggcttctcgtgtatgcc

SEQ ID NO: 5442354 - DNA, 25 bp, Homo sapien
tgtatgcctacccttgatggcccag

SEQ ID NO: 5442355 - DNA, 25 bp, Homo sapien
tttgggccagcaaccctgtatctag

SEQ ID NO: 5442356 - DNA, 25 bp, Homo sapien
tagcgtggtttctacacagtacttt

SEQ ID NO: 5442357 - DNA, 25 bp, Homo sapien
ctcattaagcttctttgatcaaagg

SEQ ID NO: 5442358 - DNA, 25 bp, Homo sapien
ctcaggctgcttagaggaagcgagc

SEQ ID NO: 5442359 - DNA, 25 bp, Homo sapien
gaagcgagctcattaagcttctttg

SEQ ID NO: 5442360 - DNA, 25 bp, Homo sapien
gaagttttctaggacaaatgaatag

SEQ ID NO: 5442361 - DNA, 25 bp, Homo sapien
ggaagctcctaattctcagctcatt

SEQ ID NO: 5442362 - DNA, 25 bp, Homo sapien
ctctgaccgaaagcatctgttactg

SEQ ID NO: 5442363 - DNA, 25 bp, Homo sapien
tcagctcattataacgtaggaaacc

SEQ ID NO: 5442364 - DNA, 25 bp, Homo sapien
tctgttactgcactggtccatggca

SEQ ID NO: 5442365 - DNA, 25 bp, Homo sapien
tcctgataaacaaggcgttacctta

SEQ ID NO: 5442366 - DNA, 25 bp, Homo sapien
tttacagctgaatatccctcttagg

SEQ ID NO: 5442367 - DNA, 25 bp, Homo sapien
taaatacatggaaatgcacgcatag

SEQ ID NO: 5442368 - DNA, 25 bp, Homo sapien
taattcttggctaggttgttgggta

SEQ ID NO: 5442369 - DNA, 25 bp, Homo sapien
gaaacttacccagaagttcacactg

SEQ ID NO: 5442370 - DNA, 25 bp, Homo sapien
taaaggctgttgctacaaatctaca

SEQ ID NO: 5442371 - DNA, 25 bp, Homo sapien
gaatgcaaacccagaactagttcca

SEQ ID NO: 5442372 - DNA, 25 bp, Homo sapien
gttcacactgctagtgagaggcaaa

SEQ ID NO: 5442373 - DNA, 25 bp, Homo sapien
tggtgtctcagcactccacccaagg

SEQ ID NO: 5442374 - DNA, 25 bp, Homo sapien
cagaatataactatcttgggaagat

SEQ ID NO: 5442375 - DNA, 25 bp, Homo sapien
caagatgagaaatgctgatatgctg

SEQ ID NO: 5442376 - DNA, 25 bp, Homo sapien
caaggtagagcctctggatggaaga

SEQ ID NO: 5442377 - DNA, 25 bp, Homo sapien
aacaattgtaaacactcgcgccggg

SEQ ID NO: 5442378 - DNA, 25 bp, Homo sapien
tttgagagcgggaaatccaggctgc

SEQ ID NO: 5442379 - DNA, 25 bp, Homo sapien
gttcacgtttgctatgactcccaga

SEQ ID NO: 5442380 - DNA, 25 bp, Homo sapien
ggtgaatcccgagctcttcatgccg

SEQ ID NO: 5442381 - DNA, 25 bp, Homo sapien
gagaagcgccgcgaacagcgatcgc

SEQ ID NO: 5442382 - DNA, 25 bp, Homo sapien
caagtccgcttccaggctttcggtt

SEQ ID NO: 5442383 - DNA, 25 bp, Homo sapien
tattggacttttgtccagtgacagc

SEQ ID NO: 5442384 - DNA, 25 bp, Homo sapien
cacacagtgagtgccggctattgga

SEQ ID NO: 5442385 - DNA, 25 bp, Homo sapien
gaagtaacccttggccaactctggc

SEQ ID NO: 5442386 - DNA, 25 bp, Homo sapien
tgggccacagcggtacaagctgcac

SEQ ID NO: 5442387 - DNA, 25 bp, Homo sapien
tggacctgagagaccggaagtaacc

SEQ ID NO: 5442388 - DNA, 25 bp, Homo sapien
ggccctcagcgtcgtgtaaactttg

SEQ ID NO: 5442389 - DNA, 25 bp, Homo sapien
ctcgatctcactcagtgggagccgc

SEQ ID NO: 5442390 - DNA, 25 bp, Homo sapien
tcgatctcactcagtgggagccgcc

SEQ ID NO: 5442391 - DNA, 25 bp, Homo sapien
cgctcgatctcactcagtgggagcc

SEQ ID NO: 5442392 - DNA, 25 bp, Homo sapien
gatctcactcagtgggagccgccgc

SEQ ID NO: 5442393 - DNA, 25 bp, Homo sapien
tgctttacttaagcttttgggtcaa

SEQ ID NO: 5442394 - DNA, 25 bp, Homo sapien
ccggcccaactccaagatctaaaca

SEQ ID NO: 5442395 - DNA, 25 bp, Homo sapien
ggtcaaatgtcctcgttaaaatggc

SEQ ID NO: 5442396 - DNA, 25 bp, Homo sapien
aatggctttctctagcgactttatg

SEQ ID NO: 5442397 - DNA, 25 bp, Homo sapien
cacggtattacttgcttccttatac

SEQ ID NO: 5442398 - DNA, 25 bp, Homo sapien
catttgcagggtcgctgggtttccc

SEQ ID NO: 5442399 - DNA, 25 bp, Homo sapien
gggtgggccggatagtgtgcagttt

SEQ ID NO: 5442400 - DNA, 25 bp, Homo sapien
taacacggtattacttgcttcctta

SEQ ID NO: 5442401 - DNA, 25 bp, Homo sapien
caggcagaggttctcggacgccctc

SEQ ID NO: 5442402 - DNA, 25 bp, Homo sapien
tcagcaggcagaggttctcggacgc

SEQ ID NO: 5442403 - DNA, 25 bp, Homo sapien
agcaggcagaggttctcggacgccc

SEQ ID NO: 5442404 - DNA, 25 bp, Homo sapien
ggcagaggttctcggacgccctccg

SEQ ID NO: 5442405 - DNA, 25 bp, Homo sapien
ccaattctggttttgcggagcagca

SEQ ID NO: 5442406 - DNA, 25 bp, Homo sapien
tggtcccggcggagatccagtggga

SEQ ID NO: 5442407 - DNA, 25 bp, Homo sapien
aggtctgagcttgtccggcgagggt

SEQ ID NO: 5442408 - DNA, 25 bp, Homo sapien
cgggcgtgagtagaccgagaatcct

SEQ ID NO: 5442409 - DNA, 25 bp, Homo sapien
ggctggctccacacgggatctgtag

SEQ ID NO: 5442410 - DNA, 25 bp, Homo sapien
ttttgttgcatctgagtgggctggc

SEQ ID NO: 5442411 - DNA, 25 bp, Homo sapien
tcttgctgagtgtgcgtgactggca

SEQ ID NO: 5442412 - DNA, 25 bp, Homo sapien
ggaagacagtatgccagtgctcttg

SEQ ID NO: 5442413 - DNA, 25 bp, Homo sapien
taagagctagtcattcttgccagcc

SEQ ID NO: 5442414 - DNA, 25 bp, Homo sapien
caaaggaattgggatcatatgcagg

SEQ ID NO: 5442415 - DNA, 25 bp, Homo sapien
gcctgaaggatagaatgacaagacg

SEQ ID NO: 5442416 - DNA, 25 bp, Homo sapien
gagccattgcctccagctgaaacat

SEQ ID NO: 5442417 - DNA, 25 bp, Homo sapien
tccagttggcctagcacaatggctc

SEQ ID NO: 5442418 - DNA, 25 bp, Homo sapien
ccagttggcctagcacaatggctca

SEQ ID NO: 5442419 - DNA, 25 bp, Homo sapien
cagttggcctagcacaatggctcat

SEQ ID NO: 5442420 - DNA, 25 bp, Homo sapien
gccatggatgccaccgtcgatctgg

SEQ ID NO: 5442421 - DNA, 25 bp, Homo sapien
ccacttctcgtaagagtgcaggcca

SEQ ID NO: 5442422 - DNA, 25 bp, Homo sapien
cgtcgatctgggctgacatggtctg

SEQ ID NO: 5442423 - DNA, 25 bp, Homo sapien
cagtacagccacttctcgtaagagt

SEQ ID NO: 5442424 - DNA, 25 bp, Homo sapien
gatggagcccaagacatcctgcgtg

SEQ ID NO: 5442425 - DNA, 25 bp, Homo sapien
cagccatgctggatgcccactatga

SEQ ID NO: 5442426 - DNA, 25 bp, Homo sapien
ctggatggagcccaagacatcctgc

SEQ ID NO: 5442427 - DNA, 25 bp, Homo sapien
tggagcccaagacatcctgcgtgat

SEQ ID NO: 5442428 - DNA, 25 bp, Homo sapien
tcgccttatccccgtcgttgaagta

SEQ ID NO: 5442429 - DNA, 25 bp, Homo sapien
cgccttatccccgtcgttgaagtat

SEQ ID NO: 5442430 - DNA, 25 bp, Homo sapien
cttcgccttatccccgtcgttgaag

SEQ ID NO: 5442431 - DNA, 25 bp, Homo sapien
ctgcattccgtctgagaagaagcac

SEQ ID NO: 5442432 - DNA, 25 bp, Homo sapien
ttgagctgcattccgtctgagaaga

SEQ ID NO: 5442433 - DNA, 25 bp, Homo sapien
cttgagctgcattccgtctgagaag

SEQ ID NO: 5442434 - DNA, 25 bp, Homo sapien
ttccgtctgagaagaagcactcgcc

SEQ ID NO: 5442435 - DNA, 25 bp, Homo sapien
ctgtggaggctcctagggccagggc

SEQ ID NO: 5442436 - DNA, 25 bp, Homo sapien
catcactgtggaggctcctagggcc

SEQ ID NO: 5442437 - DNA, 25 bp, Homo sapien
gctcctagggccagggccttgacca

SEQ ID NO: 5442438 - DNA, 25 bp, Homo sapien
ggctcctagggccagggccttgacc

SEQ ID NO: 5442439 - DNA, 25 bp, Homo sapien
tgggcacaccaaagttctgggtatg

SEQ ID NO: 5442440 - DNA, 25 bp, Homo sapien
cacaccaaagttctgggtatgcttg

SEQ ID NO: 5442441 - DNA, 25 bp, Homo sapien
caaagttctgggtatgcttggccac

SEQ ID NO: 5442442 - DNA, 25 bp, Homo sapien
agttctgggtatgcttggccacctt

SEQ ID NO: 5442443 - DNA, 25 bp, Homo sapien
tagatggagccgcgcagtccatgcc

SEQ ID NO: 5442444 - DNA, 25 bp, Homo sapien
tggttgatgtagatggagccgcgca

SEQ ID NO: 5442445 - DNA, 25 bp, Homo sapien
ttgatgtagatggagccgcgcagtc

SEQ ID NO: 5442446 - DNA, 25 bp, Homo sapien
atgtagatggagccgcgcagtccat

SEQ ID NO: 5442447 - DNA, 25 bp, Homo sapien
accagcgtcaatcaggttgttggcc

SEQ ID NO: 5442448 - DNA, 25 bp, Homo sapien
cagcgtcaatcaggttgttggcctg

SEQ ID NO: 5442449 - DNA, 25 bp, Homo sapien
gcccagcccatccacaccagcgtca

SEQ ID NO: 5442450 - DNA, 25 bp, Homo sapien
ctgcccagcccatccacaccagcgt

SEQ ID NO: 5442451 - DNA, 25 bp, Homo sapien
tcccttgggacgagtccaagcctat

SEQ ID NO: 5442452 - DNA, 25 bp, Homo sapien
catggcgatctgatacaccgagttc

SEQ ID NO: 5442453 - DNA, 25 bp, Homo sapien
cttgggacgagtccaagcctatgac

SEQ ID NO: 5442454 - DNA, 25 bp, Homo sapien
gatacaccgagttcccttgggacga

SEQ ID NO: 5442455 - DNA, 25 bp, Homo sapien
gtacccacagctgccccgcccagca

SEQ ID NO: 5442456 - DNA, 25 bp, Homo sapien
ctcatgggtacccacagctgccccg

SEQ ID NO: 5442457 - DNA, 25 bp, Homo sapien
ccgcccagcagctgctcatgggaat

SEQ ID NO: 5442458 - DNA, 25 bp, Homo sapien
tgggtacccacagctgccccgccca

SEQ ID NO: 5442459 - DNA, 25 bp, Homo sapien
tggaggccacagggtagtctcggtt

SEQ ID NO: 5442460 - DNA, 25 bp, Homo sapien
ttggaggccacagggtagtctcggt

SEQ ID NO: 5442461 - DNA, 25 bp, Homo sapien
cttggaggccacagggtagtctcgg

SEQ ID NO: 5442462 - DNA, 25 bp, Homo sapien
cttcagcgcggtgcaggtgataatg

SEQ ID NO: 5442463 - DNA, 25 bp, Homo sapien
tcagcgcggtgcaggtgataatggc

SEQ ID NO: 5442464 - DNA, 25 bp, Homo sapien
cagcgcggtgcaggtgataatggcc

SEQ ID NO: 5442465 - DNA, 25 bp, Homo sapien
agcgcggtgcaggtgataatggcca

SEQ ID NO: 5442466 - DNA, 25 bp, Homo sapien
tgcctctttcaacctcacactgctg

SEQ ID NO: 5442467 - DNA, 25 bp, Homo sapien
cactagcttgatccttggcatcatc

SEQ ID NO: 5442468 - DNA, 25 bp, Homo sapien
tttcaacctcacactgctggagcca

SEQ ID NO: 5442469 - DNA, 25 bp, Homo sapien
caccactagcttgatccttggcatc

SEQ ID NO: 5442470 - DNA, 25 bp, Homo sapien
cgatgtctcgggaggtgacgatgcc

SEQ ID NO: 5442471 - DNA, 25 bp, Homo sapien
caagaaagtcgatgtctcgggaggt

SEQ ID NO: 5442472 - DNA, 25 bp, Homo sapien
ggtccttctcagcaagaaagtcgat

SEQ ID NO: 5442473 - DNA, 25 bp, Homo sapien
agggtggtgtggtccttctcagcaa

SEQ ID NO: 5442474 - DNA, 25 bp, Homo sapien
gggtgtgtgataaagcccggttcaa

SEQ ID NO: 5442475 - DNA, 25 bp, Homo sapien
tgtgtgataaagcccggttcaaact

SEQ ID NO: 5442476 - DNA, 25 bp, Homo sapien
ggtgtgtgataaagcccggttcaaa

SEQ ID NO: 5442477 - DNA, 25 bp, Homo sapien
gtgtgtgataaagcccggttcaaac

SEQ ID NO: 5442478 - DNA, 25 bp, Homo sapien
acgatggccaggtcggcctctgtca

SEQ ID NO: 5442479 - DNA, 25 bp, Homo sapien
gatcagcggcgtcttcagagtgacc

SEQ ID NO: 5442480 - DNA, 25 bp, Homo sapien
tcacgatggccaggtcggcctctgt

SEQ ID NO: 5442481 - DNA, 25 bp, Homo sapien
cagagccatcacgatggccaggtcg

SEQ ID NO: 5442482 - DNA, 25 bp, Homo sapien
tgggtcagggctgaggtcaggtcca

SEQ ID NO: 5442483 - DNA, 25 bp, Homo sapien
gggtcagggctgaggtcaggtccac

SEQ ID NO: 5442484 - DNA, 25 bp, Homo sapien
gtccctggtcactggcgaagagctg

SEQ ID NO: 5442485 - DNA, 25 bp, Homo sapien
gtcgttgtaggtgagtccctggtca

SEQ ID NO: 5442486 - DNA, 25 bp, Homo sapien
agtccctggtcactggcgaagagct

SEQ ID NO: 5442487 - DNA, 25 bp, Homo sapien
gagtccctggtcactggcgaagagc

SEQ ID NO: 5442488 - DNA, 25 bp, Homo sapien
ttttaactcagtacctcccttctgc

SEQ ID NO: 5442489 - DNA, 25 bp, Homo sapien
aggagcagggacaagttacaggaat

SEQ ID NO: 5442490 - DNA, 25 bp, Homo sapien
agggacaagttacaggaatgttctc

SEQ ID NO: 5442491 - DNA, 25 bp, Homo sapien
cactattgaagatttatttgataat

SEQ ID NO: 5442492 - DNA, 25 bp, Homo sapien
tgtttagccctttcttgttgctgta

SEQ ID NO: 5442493 - DNA, 25 bp, Homo sapien
actgcctctacttaatcattctgaa

SEQ ID NO: 5442494 - DNA, 25 bp, Homo sapien
tgtgattaacatggaactgcctcta

SEQ ID NO: 5442495 - DNA, 25 bp, Homo sapien
ccctatgcccattgtcctgatctga

SEQ ID NO: 5442496 - DNA, 25 bp, Homo sapien
cacacagacttagctactgacacag

SEQ ID NO: 5442497 - DNA, 25 bp, Homo sapien
tagacacacagacttagctactgac

SEQ ID NO: 5442498 - DNA, 25 bp, Homo sapien
ttagacacacagacttagctactga

SEQ ID NO: 5442499 - DNA, 25 bp, Homo sapien
gacacacagacttagctactgacac

SEQ ID NO: 5442500 - DNA, 25 bp, Homo sapien
tgttttcttatgtcactttcttcag

SEQ ID NO: 5442501 - DNA, 25 bp, Homo sapien
tttcacttgctgtttaagcagcttt

SEQ ID NO: 5442502 - DNA, 25 bp, Homo sapien
gacttgtgttttcttatgtcacttt

SEQ ID NO: 5442503 - DNA, 25 bp, Homo sapien
gcagcttttccagatagcccctgat

SEQ ID NO: 5442504 - DNA, 25 bp, Homo sapien
ctcctgagaacttccatacaaggga

SEQ ID NO: 5442505 - DNA, 25 bp, Homo sapien
tctgagagtgttgttctcctgagaa

SEQ ID NO: 5442506 - DNA, 25 bp, Homo sapien
tgagagtgttgttctcctgagaact

SEQ ID NO: 5442507 - DNA, 25 bp, Homo sapien
ctgagaacttccatacaagggaacc

SEQ ID NO: 5442508 - DNA, 25 bp, Homo sapien
ccttatagaaacagagcaatatcca

SEQ ID NO: 5442509 - DNA, 25 bp, Homo sapien
caatatccagagtctttagcatttc

SEQ ID NO: 5442510 - DNA, 25 bp, Homo sapien
gatggtatatgggtgggaccttata

SEQ ID NO: 5442511 - DNA, 25 bp, Homo sapien
tatatgggtgggaccttatagaaac

SEQ ID NO: 5442512 - DNA, 25 bp, Homo sapien
ctttggatattttctgagctgtgtc

SEQ ID NO: 5442513 - DNA, 25 bp, Homo sapien
ttggatattttctgagctgtgtcag

SEQ ID NO: 5442514 - DNA, 25 bp, Homo sapien
gctttggatattttctgagctgtgt

SEQ ID NO: 5442515 - DNA, 25 bp, Homo sapien
agagctttggatattttctgagctg

SEQ ID NO: 5442516 - DNA, 25 bp, Homo sapien
tatctgcgcgtcaccattgcttgga

SEQ ID NO: 5442517 - DNA, 25 bp, Homo sapien
cagttgttgttggatgtctgactca

SEQ ID NO: 5442518 - DNA, 25 bp, Homo sapien
tggtcgttggcctcagtctcttcta

SEQ ID NO: 5442519 - DNA, 25 bp, Homo sapien
gatgtctgactcaaactgaatcact

SEQ ID NO: 5442520 - DNA, 25 bp, Homo sapien
gagtgcaggagtcagataatgaaca

SEQ ID NO: 5442521 - DNA, 25 bp, Homo sapien
tctggttaacattgaacacttggga

SEQ ID NO: 5442522 - DNA, 25 bp, Homo sapien
tgaacaagcgggtaaggtaattgcc

SEQ ID NO: 5442523 - DNA, 25 bp, Homo sapien
tttgtcactgaagattctaggccca

SEQ ID NO: 5442524 - DNA, 25 bp, Homo sapien
tttgatcctgtacgttagactgggc

SEQ ID NO: 5442525 - DNA, 25 bp, Homo sapien
ctttttgatcctgtacgttagactg

SEQ ID NO: 5442526 - DNA, 25 bp, Homo sapien
tttttgatcctgtacgttagactgg

SEQ ID NO: 5442527 - DNA, 25 bp, Homo sapien
ttttgatcctgtacgttagactggg

SEQ ID NO: 5442528 - DNA, 25 bp, Homo sapien
catggtaaacgctgtccctagtaaa

SEQ ID NO: 5442529 - DNA, 25 bp, Homo sapien
gagaaagaaacttatcctctcctac

SEQ ID NO: 5442530 - DNA, 25 bp, Homo sapien
gaaacttatcctctcctacacataa

SEQ ID NO: 5442531 - DNA, 25 bp, Homo sapien
ttgaactcaatggctacatgtatga

SEQ ID NO: 5442532 - DNA, 25 bp, Homo sapien
cgaatagccactgcataccaacctg

SEQ ID NO: 5442533 - DNA, 25 bp, Homo sapien
catctgcaagcaaggaagccaattc

SEQ ID NO: 5442534 - DNA, 25 bp, Homo sapien
tgctgtgattgtgcctacgaatagc

SEQ ID NO: 5442535 - DNA, 25 bp, Homo sapien
aaaaggacaggaactatcttactca

SEQ ID NO: 5442536 - DNA, 25 bp, Homo sapien
ccgggaacactttgcatccttctat

SEQ ID NO: 5442537 - DNA, 25 bp, Homo sapien
agcaccctcacagatgtacccggga

SEQ ID NO: 5442538 - DNA, 25 bp, Homo sapien
agatgtacccgggaacactttgcat

SEQ ID NO: 5442539 - DNA, 25 bp, Homo sapien
gaacactttgcatccttctattcaa

SEQ ID NO: 5442540 - DNA, 25 bp, Homo sapien
acacagcaacaatctgatttctcta

SEQ ID NO: 5442541 - DNA, 25 bp, Homo sapien
catagatcaacagcatcctaaggca

SEQ ID NO: 5442542 - DNA, 25 bp, Homo sapien
cagcaacaatctgatttctctatct

SEQ ID NO: 5442543 - DNA, 25 bp, Homo sapien
ggtcatagatcaacagcatcctaag

SEQ ID NO: 5442544 - DNA, 25 bp, Homo sapien
gttttaactgatgtgtatctgtatg

SEQ ID NO: 5442545 - DNA, 25 bp, Homo sapien
tctatttcttgaggttttaactgat

SEQ ID NO: 5442546 - DNA, 25 bp, Homo sapien
tctgaaaagtgtcgaagagacagtt

SEQ ID NO: 5442547 - DNA, 25 bp, Homo sapien
catgatcatgtaacagagtctgaaa

SEQ ID NO: 5442548 - DNA, 25 bp, Homo sapien
gacacagggatgagatcaacacaca

SEQ ID NO: 5442549 - DNA, 25 bp, Homo sapien
tctcacttgtaagcggaagctgaac

SEQ ID NO: 5442550 - DNA, 25 bp, Homo sapien
taaacactttacctgatgaagagcc

SEQ ID NO: 5442551 - DNA, 25 bp, Homo sapien
aaagtatgctgtagctcaagtgcag

SEQ ID NO: 5442552 - DNA, 25 bp, Homo sapien
tcctgccttgctcagacctgaatgt

SEQ ID NO: 5442553 - DNA, 25 bp, Homo sapien
tggttgcccaacactcttggtgtgt

SEQ ID NO: 5442554 - DNA, 25 bp, Homo sapien
tgaatgtacccattgtaacaaaccc

SEQ ID NO: 5442555 - DNA, 25 bp, Homo sapien
gatgtggctaagtcatatgcttcct

SEQ ID NO: 5442556 - DNA, 25 bp, Homo sapien
cttttatggcttctttactattgtc

SEQ ID NO: 5442557 - DNA, 25 bp, Homo sapien
tcttttatggcttctttactattgt

SEQ ID NO: 5442558 - DNA, 25 bp, Homo sapien
tcctagatttacctacctgttgttg

SEQ ID NO: 5442559 - DNA, 25 bp, Homo sapien
ttttatggcttctttactattgtca

SEQ ID NO: 5442560 - DNA, 25 bp, Homo sapien
gaaactcgccagatgacctgtagct

SEQ ID NO: 5442561 - DNA, 25 bp, Homo sapien
tgaagactatgcaggcaatcaggac

SEQ ID NO: 5442562 - DNA, 25 bp, Homo sapien
aaagaaatggtaacacctccgcctg

SEQ ID NO: 5442563 - DNA, 25 bp, Homo sapien
taattccaatcctagaaaagcgcct

SEQ ID NO: 5442564 - DNA, 25 bp, Homo sapien
aatggataactctcatcctctaaaa

SEQ ID NO: 5442565 - DNA, 25 bp, Homo sapien
gaccaatggataactctcatcctct

SEQ ID NO: 5442566 - DNA, 25 bp, Homo sapien
agaccaatggataactctcatcctc

SEQ ID NO: 5442567 - DNA, 25 bp, Homo sapien
ccaatggataactctcatcctctaa

SEQ ID NO: 5442568 - DNA, 25 bp, Homo sapien
actatgttgttaggcatggaggcat

SEQ ID NO: 5442569 - DNA, 25 bp, Homo sapien
gaaaactatgttgttaggcatggag

SEQ ID NO: 5442570 - DNA, 25 bp, Homo sapien
tatgttgttaggcatggaggcatga

SEQ ID NO: 5442571 - DNA, 25 bp, Homo sapien
aaactatgttgttaggcatggaggc

SEQ ID NO: 5442572 - DNA, 25 bp, Homo sapien
ttagaccacaatctaacattttgat

SEQ ID NO: 5442573 - DNA, 25 bp, Homo sapien
taaataagaagttgcggacttctat

SEQ ID NO: 5442574 - DNA, 25 bp, Homo sapien
gtaaataagaagttgcggacttcta

SEQ ID NO: 5442575 - DNA, 25 bp, Homo sapien
cggacttctattattagaccacaat

SEQ ID NO: 5442576 - DNA, 25 bp, Homo sapien
ccttaaaggtgagccctcataggga

SEQ ID NO: 5442577 - DNA, 25 bp, Homo sapien
tctatattgacagggcaggaacacc

SEQ ID NO: 5442578 - DNA, 25 bp, Homo sapien
ctcatagggagatccaaagtcctgt

SEQ ID NO: 5442579 - DNA, 25 bp, Homo sapien
aaagtcctgtggttaacgccttcat

SEQ ID NO: 5442580 - DNA, 25 bp, Homo sapien
cgactttagttccttgcccagaggc

SEQ ID NO: 5442581 - DNA, 25 bp, Homo sapien
ctgctggctcaaaacgactttagtt

SEQ ID NO: 5442582 - DNA, 25 bp, Homo sapien
aacgactttagttccttgcccagag

SEQ ID NO: 5442583 - DNA, 25 bp, Homo sapien
gctcaaaacgactttagttccttgc

SEQ ID NO: 5442584 - DNA, 25 bp, Homo sapien
tttggttgttgttggcttatttgat

SEQ ID NO: 5442585 - DNA, 25 bp, Homo sapien
tttaaggagttacatagactcttat

SEQ ID NO: 5442586 - DNA, 25 bp, Homo sapien
tgattgtgctttgggttcatcttgc

SEQ ID NO: 5442587 - DNA, 25 bp, Homo sapien
ccttttaaggagttacatagactct

SEQ ID NO: 5442588 - DNA, 25 bp, Homo sapien
atccgtggtacggattcatgtctgc

SEQ ID NO: 5442589 - DNA, 25 bp, Homo sapien
gtggtacggattcatgtctgcagta

SEQ ID NO: 5442590 - DNA, 25 bp, Homo sapien
taaatccgtggtacggattcatgtc

SEQ ID NO: 5442591 - DNA, 25 bp, Homo sapien
tttctaaatccgtggtacggattca

SEQ ID NO: 5442592 - DNA, 25 bp, Homo sapien
tccaaatctgctttcagccggctgg

SEQ ID NO: 5442593 - DNA, 25 bp, Homo sapien
caaatctgctttcagccggctggtg

SEQ ID NO: 5442594 - DNA, 25 bp, Homo sapien
aatctgctttcagccggctggtgga

SEQ ID NO: 5442595 - DNA, 25 bp, Homo sapien
aggtccaaatctgctttcagccggc

SEQ ID NO: 5442596 - DNA, 25 bp, Homo sapien
ctacgttgccaagccaggtctcgaa

SEQ ID NO: 5442597 - DNA, 25 bp, Homo sapien
gctacgttgccaagccaggtctcga

SEQ ID NO: 5442598 - DNA, 25 bp, Homo sapien
tgctacgttgccaagccaggtctcg

SEQ ID NO: 5442599 - DNA, 25 bp, Homo sapien
gtgtcttagtatctcagtaaataca

SEQ ID NO: 5442600 - DNA, 25 bp, Homo sapien
tgtcttagtatctcagtaaatacac

SEQ ID NO: 5442601 - DNA, 25 bp, Homo sapien
gtcttagtatctcagtaaatacact

SEQ ID NO: 5442602 - DNA, 25 bp, Homo sapien
agtgtcttagtatctcagtaaatac

SEQ ID NO: 5442603 - DNA, 25 bp, Homo sapien
ttctcggtactgaaacagccctagg

SEQ ID NO: 5442604 - DNA, 25 bp, Homo sapien
caagttaatacaccgtagtccctgg

SEQ ID NO: 5442605 - DNA, 25 bp, Homo sapien
tgttagccacgaagcacagatgagt

SEQ ID NO: 5442606 - DNA, 25 bp, Homo sapien
tgcaatgcatgaatgggagaccctc

SEQ ID NO: 5442607 - DNA, 25 bp, Homo sapien
gaaagcaagtcctcttactagggag

SEQ ID NO: 5442608 - DNA, 25 bp, Homo sapien
tccctgtggaggtaaagaacattct

SEQ ID NO: 5442609 - DNA, 25 bp, Homo sapien
ggaacacacttggatgcaggtacag

SEQ ID NO: 5442610 - DNA, 25 bp, Homo sapien
gggacactgactttacaacgatggg

SEQ ID NO: 5442611 - DNA, 25 bp, Homo sapien
gctgcagtgcaataacatgatcttg

SEQ ID NO: 5442612 - DNA, 25 bp, Homo sapien
gtatttagtagagatggggtttcac

SEQ ID NO: 5442613 - DNA, 25 bp, Homo sapien
catacccagttaattgtatttagta

SEQ ID NO: 5442614 - DNA, 25 bp, Homo sapien
gccaccatacccagttaattgtatt

SEQ ID NO: 5442615 - DNA, 25 bp, Homo sapien
tcataaaattgaaccagagaggctc

SEQ ID NO: 5442616 - DNA, 25 bp, Homo sapien
tatgaatggacaaccaaaggtcagc

SEQ ID NO: 5442617 - DNA, 25 bp, Homo sapien
tagctctgatgtgctgacagggaca

SEQ ID NO: 5442618 - DNA, 25 bp, Homo sapien
gatacagacttacctctggagaagc

SEQ ID NO: 5442619 - DNA, 25 bp, Homo sapien
gagaaattcatctggcctatggaac

SEQ ID NO: 5442620 - DNA, 25 bp, Homo sapien
catggttatgctccagcaaaggaaa

SEQ ID NO: 5442621 - DNA, 25 bp, Homo sapien
acagggaacctactatggaagagac

SEQ ID NO: 5442622 - DNA, 25 bp, Homo sapien
tttggccagatccattgagcacttg

SEQ ID NO: 5442623 - DNA, 25 bp, Homo sapien
tatccacacagacccggcaaccatc

SEQ ID NO: 5442624 - DNA, 25 bp, Homo sapien
ttgtcatcatggcccatccccaatg

SEQ ID NO: 5442625 - DNA, 25 bp, Homo sapien
ctatccacacagacccggcaaccat

SEQ ID NO: 5442626 - DNA, 25 bp, Homo sapien
tggcccatccccaatgagccgctgg

SEQ ID NO: 5442627 - DNA, 25 bp, Homo sapien
cctcccagacagggttgcggcccag

SEQ ID NO: 5442628 - DNA, 25 bp, Homo sapien
acagggttgcggcccagcagaggcg

SEQ ID NO: 5442629 - DNA, 25 bp, Homo sapien
gtggttgccagacggaggggctcct

SEQ ID NO: 5442630 - DNA, 25 bp, Homo sapien
ccagacagggttgcggcccagcaga

SEQ ID NO: 5442631 - DNA, 25 bp, Homo sapien
gacaccgaggtttctgatggtcaaa

SEQ ID NO: 5442632 - DNA, 25 bp, Homo sapien
gatgcgatgtcaattcgaggcagag

SEQ ID NO: 5442633 - DNA, 25 bp, Homo sapien
taagctctgagacaacccatttacc

SEQ ID NO: 5442634 - DNA, 25 bp, Homo sapien
ggaaacagatgcctcagcctacttt

SEQ ID NO: 5442635 - DNA, 25 bp, Homo sapien
gatatatatatgcttggctaactat

SEQ ID NO: 5442636 - DNA, 25 bp, Homo sapien
ccaaacttgctttatgccttcttat

SEQ ID NO: 5442637 - DNA, 25 bp, Homo sapien
tatatatatgcttggctaactatat

SEQ ID NO: 5442638 - DNA, 25 bp, Homo sapien
tccccaaacttgctttatgccttct

SEQ ID NO: 5442639 - DNA, 25 bp, Homo sapien
ccagtatggagagcatcatttttca

SEQ ID NO: 5442640 - DNA, 25 bp, Homo sapien
gagtccgtgataagctgtgaaattc

SEQ ID NO: 5442641 - DNA, 25 bp, Homo sapien
ggtgtgccaaccatcttcaacaatg

SEQ ID NO: 5442642 - DNA, 25 bp, Homo sapien
cattcagagagtcagagcaacccaa

SEQ ID NO: 5442643 - DNA, 25 bp, Homo sapien
ttcttgctaccatcttgcacagtgt

SEQ ID NO: 5442644 - DNA, 25 bp, Homo sapien
agtaatagaggccaatctcccagaa

SEQ ID NO: 5442645 - DNA, 25 bp, Homo sapien
tcttgtcctttcttgctaccatctt

SEQ ID NO: 5442646 - DNA, 25 bp, Homo sapien
taatagaggccaatctcccagaaca

SEQ ID NO: 5442647 - DNA, 25 bp, Homo sapien
caggatctgtatggtgtgcttatac

SEQ ID NO: 5442648 - DNA, 25 bp, Homo sapien
tctgtatggtgtgcttatacttttc

SEQ ID NO: 5442649 - DNA, 25 bp, Homo sapien
gcaaacttggtttgaagcattttct

SEQ ID NO: 5442650 - DNA, 25 bp, Homo sapien
ttccgtcaggatctgtatggtgtgc

SEQ ID NO: 5442651 - DNA, 25 bp, Homo sapien
cagggcagagctatatggcagagct

SEQ ID NO: 5442652 - DNA, 25 bp, Homo sapien
caacccagagccatccagggcagag

SEQ ID NO: 5442653 - DNA, 25 bp, Homo sapien
catccccactccagtagggactcac

SEQ ID NO: 5442654 - DNA, 25 bp, Homo sapien
gacatacattttaatagccatcttc

SEQ ID NO: 5442655 - DNA, 25 bp, Homo sapien
gcttgtgcatgcaattcttcctgca

SEQ ID NO: 5442656 - DNA, 25 bp, Homo sapien
gactctaggataagggcttgtgcat

SEQ ID NO: 5442657 - DNA, 25 bp, Homo sapien
gaggtttgtgttcagtgactctagg

SEQ ID NO: 5442658 - DNA, 25 bp, Homo sapien
ctctttctggagttccaactgggta

SEQ ID NO: 5442659 - DNA, 25 bp, Homo sapien
agctgttgcaggacatcatgccaat

SEQ ID NO: 5442660 - DNA, 25 bp, Homo sapien
tttctcagctcttctaattgcaagg

SEQ ID NO: 5442661 - DNA, 25 bp, Homo sapien
ttctcagctcttctaattgcaaggt

SEQ ID NO: 5442662 - DNA, 25 bp, Homo sapien
accaaggtgctttgggctgagttac

SEQ ID NO: 5442663 - DNA, 25 bp, Homo sapien
tcaccaaggtgctttgggctgagtt

SEQ ID NO: 5442664 - DNA, 25 bp, Homo sapien
caccaaggtgctttgggctgagtta

SEQ ID NO: 5442665 - DNA, 25 bp, Homo sapien
ttcttctcctgactccatttcgaat

SEQ ID NO: 5442666 - DNA, 25 bp, Homo sapien
catttcgaattttttggtcatcttt

SEQ ID NO: 5442667 - DNA, 25 bp, Homo sapien
tcctgactccatttcgaattttttg

SEQ ID NO: 5442668 - DNA, 25 bp, Homo sapien
cttgaatgaagttctcaaagacagc

SEQ ID NO: 5442669 - DNA, 25 bp, Homo sapien
gtagcaggatattttctcgctcgaa

SEQ ID NO: 5442670 - DNA, 25 bp, Homo sapien
tttctcgctcgaacttctcatcctt

SEQ ID NO: 5442671 - DNA, 25 bp, Homo sapien
gatattttctcgctcgaacttctca

SEQ ID NO: 5442672 - DNA, 25 bp, Homo sapien
tttgctgtagcaggatattttctcg

SEQ ID NO: 5442673 - DNA, 25 bp, Homo sapien
gtacaaaggcaccatgaagaaaaga

SEQ ID NO: 5442674 - DNA, 25 bp, Homo sapien
ggtacaaaggcaccatgaagaaaag

SEQ ID NO: 5442675 - DNA, 25 bp, Homo sapien
tatacaccatagactgctactcagt

SEQ ID NO: 5442676 - DNA, 25 bp, Homo sapien
aaagtagatttaccattcaatctag

SEQ ID NO: 5442677 - DNA, 25 bp, Homo sapien
cagaaaaagacacttgtacacgtat

SEQ ID NO: 5442678 - DNA, 25 bp, Homo sapien
tacttgatctctaccgaaaggaaaa

SEQ ID NO: 5442679 - DNA, 25 bp, Homo sapien
gatacgtacgaaacatattcttcaa

SEQ ID NO: 5442680 - DNA, 25 bp, Homo sapien
ctgatacgtacgaaacatattcttc

SEQ ID NO: 5442681 - DNA, 25 bp, Homo sapien
gaaacatattcttcaaatacttgta

SEQ ID NO: 5442682 - DNA, 25 bp, Homo sapien
catattcttcaaatacttgtattct

SEQ ID NO: 5442683 - DNA, 25 bp, Homo sapien
tttgtagttgttctccaactcactg

SEQ ID NO: 5442684 - DNA, 25 bp, Homo sapien
aggctgctttgtagttgttctccaa

SEQ ID NO: 5442685 - DNA, 25 bp, Homo sapien
ctgctttgtagttgttctccaactc

SEQ ID NO: 5442686 - DNA, 25 bp, Homo sapien
aaggctgctttgtagttgttctcca

SEQ ID NO: 5442687 - DNA, 25 bp, Homo sapien
tcgggaaactatgggctgcattgcc

SEQ ID NO: 5442688 - DNA, 25 bp, Homo sapien
aaatgagtccatatgagctatcaag

SEQ ID NO: 5442689 - DNA, 25 bp, Homo sapien
cctccattccaggaagcaatgttgg

SEQ ID NO: 5442690 - DNA, 25 bp, Homo sapien
cagattcccctctaatagtcagcac

SEQ ID NO: 5442691 - DNA, 25 bp, Homo sapien
ggcacactccataatacctggctaa

SEQ ID NO: 5442692 - DNA, 25 bp, Homo sapien
ggttatgatagccttgatctatatc

SEQ ID NO: 5442693 - DNA, 25 bp, Homo sapien
cttgacagcattgtcaaagatcagt

SEQ ID NO: 5442694 - DNA, 25 bp, Homo sapien
gatctatatcaaggagtgcagttgg

SEQ ID NO: 5442695 - DNA, 25 bp, Homo sapien
ccttcaggtgcattattagattgtt

SEQ ID NO: 5442696 - DNA, 25 bp, Homo sapien
cacagcggagatccatttcactgga

SEQ ID NO: 5442697 - DNA, 25 bp, Homo sapien
ctcagcacagcggagatccatttca

SEQ ID NO: 5442698 - DNA, 25 bp, Homo sapien
ttcatctcagcacagcggagatcca

SEQ ID NO: 5442699 - DNA, 25 bp, Homo sapien
agcacagcggagatccatttcactg

SEQ ID NO: 5442700 - DNA, 25 bp, Homo sapien
tgtcacacaacaagtggtcagcaga

SEQ ID NO: 5442701 - DNA, 25 bp, Homo sapien
gagaagccagggactgtgtcacaca

SEQ ID NO: 5442702 - DNA, 25 bp, Homo sapien
gaagccagggactgtgtcacacaac

SEQ ID NO: 5442703 - DNA, 25 bp, Homo sapien
ctgtgtcacacaacaagtggtcagc

SEQ ID NO: 5442704 - DNA, 25 bp, Homo sapien
tctgggcagactggtggtctctgtt

SEQ ID NO: 5442705 - DNA, 25 bp, Homo sapien
tcttctaggtcagaaatgatgttgg

SEQ ID NO: 5442706 - DNA, 25 bp, Homo sapien
tgctcttctaggtcagaaatgatgt

SEQ ID NO: 5442707 - DNA, 25 bp, Homo sapien
ttctaggtcagaaatgatgttggtc

SEQ ID NO: 5442708 - DNA, 25 bp, Homo sapien
tgtcggtgctagcttgactataggt

SEQ ID NO: 5442709 - DNA, 25 bp, Homo sapien
gtgcacaactggtgacaacttcctt

SEQ ID NO: 5442710 - DNA, 25 bp, Homo sapien
tacaacaagcacaggttatcatatt

SEQ ID NO: 5442711 - DNA, 25 bp, Homo sapien
ccaagaggtggctgtcggtgctagc

SEQ ID NO: 5442712 - DNA, 25 bp, Homo sapien
ggaaaatctgcctttgtccgggatc

SEQ ID NO: 5442713 - DNA, 25 bp, Homo sapien
gatagccaggtgacacgttgatcac

SEQ ID NO: 5442714 - DNA, 25 bp, Homo sapien
cagaaatctgttcccgattccgaac

SEQ ID NO: 5442715 - DNA, 25 bp, Homo sapien
catcccctaaggtgacagaaatctg

SEQ ID NO: 5442716 - DNA, 25 bp, Homo sapien
acagcccaagcccttctgggccctt

SEQ ID NO: 5442717 - DNA, 25 bp, Homo sapien
aagcccttctgggcccttcacccat

SEQ ID NO: 5442718 - DNA, 25 bp, Homo sapien
gactccacagcccaagcccttctgg

SEQ ID NO: 5442719 - DNA, 25 bp, Homo sapien
tgggactccacagcccaagcccttc

SEQ ID NO: 5442720 - DNA, 25 bp, Homo sapien
ctgagagctgcgcagcacatgctgc

SEQ ID NO: 5442721 - DNA, 25 bp, Homo sapien
ttgatccctgctgttgtcacctcct

SEQ ID NO: 5442722 - DNA, 25 bp, Homo sapien
agccccttgatccctgctgttgtca

SEQ ID NO: 5442723 - DNA, 25 bp, Homo sapien
ctctgagagctgcgcagcacatgct

SEQ ID NO: 5442724 - DNA, 25 bp, Homo sapien
cctcctcccaggatctttgtgaaga

SEQ ID NO: 5442725 - DNA, 25 bp, Homo sapien
gaagattcgacaaggtaagtataaa

SEQ ID NO: 5442726 - DNA, 25 bp, Homo sapien
accgccctctcctgcctttactcac

SEQ ID NO: 5442727 - DNA, 25 bp, Homo sapien
cataatgtgcaatattaacagcacc

SEQ ID NO: 5442728 - DNA, 25 bp, Homo sapien
ttgccttgctgaatggattttcatt

SEQ ID NO: 5442729 - DNA, 25 bp, Homo sapien
ttcttgccttgctgaatggattttc

SEQ ID NO: 5442730 - DNA, 25 bp, Homo sapien
aaaatgatttattagtctcttcttg

SEQ ID NO: 5442731 - DNA, 25 bp, Homo sapien
aaatgatttattagtctcttcttgc

SEQ ID NO: 5442732 - DNA, 25 bp, Homo sapien
ttggagctggtacaagaggagttag

SEQ ID NO: 5442733 - DNA, 25 bp, Homo sapien
ttgttggttggaggtaattgtgatt

SEQ ID NO: 5442734 - DNA, 25 bp, Homo sapien
tgttggttggaggtaattgtgattt

SEQ ID NO: 5442735 - DNA, 25 bp, Homo sapien
tggagctggtacaagaggagttagc

SEQ ID NO: 5442736 - DNA, 25 bp, Homo sapien
tgattagcttccgtggtcccaagtt

SEQ ID NO: 5442737 - DNA, 25 bp, Homo sapien
ccagcaggtgcagtagatgagaggg

SEQ ID NO: 5442738 - DNA, 25 bp, Homo sapien
ggagttcttgcgtggtagttgaggg

SEQ ID NO: 5442739 - DNA, 25 bp, Homo sapien
ttggaactccctgtggagttcttgc

SEQ ID NO: 5442740 - DNA, 25 bp, Homo sapien
tggctgctagatcaggaggctcttg

SEQ ID NO: 5442741 - DNA, 25 bp, Homo sapien
agtcttggctgctagatcaggaggc

SEQ ID NO: 5442742 - DNA, 25 bp, Homo sapien
tcttggctgctagatcaggaggctc

SEQ ID NO: 5442743 - DNA, 25 bp, Homo sapien
gggagtcttggctgctagatcagga

SEQ ID NO: 5442744 - DNA, 25 bp, Homo sapien
aataaaatttgccatagccgagtcc

SEQ ID NO: 5442745 - DNA, 25 bp, Homo sapien
taaaactgctcaattattgttatgc

SEQ ID NO: 5442746 - DNA, 25 bp, Homo sapien
aaatttgccatagccgagtccttgc

SEQ ID NO: 5442747 - DNA, 25 bp, Homo sapien
atagccgagtccttgctgtgagcca

SEQ ID NO: 5442748 - DNA, 25 bp, Homo sapien
cagtcagcagaggagtcggcagaaa

SEQ ID NO: 5442749 - DNA, 25 bp, Homo sapien
tagaggctcgtgctgtgagtcctgt

SEQ ID NO: 5442750 - DNA, 25 bp, Homo sapien
tgctagatgctggttggaccttgcc

SEQ ID NO: 5442751 - DNA, 25 bp, Homo sapien
cagtacaaatctttagaggctcgtg

SEQ ID NO: 5442752 - DNA, 25 bp, Homo sapien
tatgggtgatacaatcactcagtgg

SEQ ID NO: 5442753 - DNA, 25 bp, Homo sapien
aaatgttgtaatcgtcattaccata

SEQ ID NO: 5442754 - DNA, 25 bp, Homo sapien
tttcccatgataaacaatgtcttgg

SEQ ID NO: 5442755 - DNA, 25 bp, Homo sapien
actcagtggagttttacatagattt

SEQ ID NO: 5442756 - DNA, 25 bp, Homo sapien
ctgcccaaagatctgttattctcat

SEQ ID NO: 5442757 - DNA, 25 bp, Homo sapien
tggactgcccaaagatctgttattc

SEQ ID NO: 5442758 - DNA, 25 bp, Homo sapien
cttggactgcccaaagatctgttat

SEQ ID NO: 5442759 - DNA, 25 bp, Homo sapien
gactgcccaaagatctgttattctc

SEQ ID NO: 5442760 - DNA, 25 bp, Homo sapien
gaagacagacttctagtgaatccaa

SEQ ID NO: 5442761 - DNA, 25 bp, Homo sapien
taaagaaaccaccatgttagagaga

SEQ ID NO: 5442762 - DNA, 25 bp, Homo sapien
tagtggccattccaagtggttgaaa

SEQ ID NO: 5442763 - DNA, 25 bp, Homo sapien
gctggcctggcacaaacatgaattt

SEQ ID NO: 5442764 - DNA, 25 bp, Homo sapien
ggatatacctcagttcttatactca

SEQ ID NO: 5442765 - DNA, 25 bp, Homo sapien
cctggtgggtcacaacccctagctt

SEQ ID NO: 5442766 - DNA, 25 bp, Homo sapien
ttatactcaatacaacttagagacc

SEQ ID NO: 5442767 - DNA, 25 bp, Homo sapien
tccactagattgatttcatgatcct

SEQ ID NO: 5442768 - DNA, 25 bp, Homo sapien
tgttcaagaatacgtgggcccgggc

SEQ ID NO: 5442769 - DNA, 25 bp, Homo sapien
tcacgaagtggcaaacatggtcagc

SEQ ID NO: 5442770 - DNA, 25 bp, Homo sapien
tatcaaaattggtctgcacagggct

SEQ ID NO: 5442771 - DNA, 25 bp, Homo sapien
catgagtaaagcttcgccagttcca

SEQ ID NO: 5442772 - DNA, 25 bp, Homo sapien
ctttgtttctcgcaagctctggagc

SEQ ID NO: 5442773 - DNA, 25 bp, Homo sapien
gagagcactttgtttctcgcaagct

SEQ ID NO: 5442774 - DNA, 25 bp, Homo sapien
tgtttctcgcaagctctggagctaa

SEQ ID NO: 5442775 - DNA, 25 bp, Homo sapien
gctaacttggggaagcggcttggaa

SEQ ID NO: 5442776 - DNA, 25 bp, Homo sapien
ccataggagcaagagtcaagagttc

SEQ ID NO: 5442777 - DNA, 25 bp, Homo sapien
tgacaaagtcaaatcccaggtatcg

SEQ ID NO: 5442778 - DNA, 25 bp, Homo sapien
gaacaatagtattcccctggctgcc

SEQ ID NO: 5442779 - DNA, 25 bp, Homo sapien
tacagagcacggcaagatctagttc

SEQ ID NO: 5442780 - DNA, 25 bp, Homo sapien
aaaccacaatctcaaagcaagcacc

SEQ ID NO: 5442781 - DNA, 25 bp, Homo sapien
aaaaaccacaatctcaaagcaagca

SEQ ID NO: 5442782 - DNA, 25 bp, Homo sapien
gaaaaaaccacaatctcaaagcaag

SEQ ID NO: 5442783 - DNA, 25 bp, Homo sapien
cacaatctcaaagcaagcacccggg

SEQ ID NO: 5442784 - DNA, 25 bp, Homo sapien
tatgcatagcgcactttggaaaaag

SEQ ID NO: 5442785 - DNA, 25 bp, Homo sapien
tatataaatatacaacattccctaa

SEQ ID NO: 5442786 - DNA, 25 bp, Homo sapien
ggctactgtacttattcagacgaaa

SEQ ID NO: 5442787 - DNA, 25 bp, Homo sapien
taattcctattgattgcacttctgg

SEQ ID NO: 5442788 - DNA, 25 bp, Homo sapien
cctaattttgctaatgctgcgagca

SEQ ID NO: 5442789 - DNA, 25 bp, Homo sapien
taatagactgagcttaccccaccaa

SEQ ID NO: 5442790 - DNA, 25 bp, Homo sapien
aatttgcccgacttcctccattagg

SEQ ID NO: 5442791 - DNA, 25 bp, Homo sapien
aatgtgccagcaagttcagtatctc

SEQ ID NO: 5442792 - DNA, 25 bp, Homo sapien
ttcaactggccaacatcaggagggt

SEQ ID NO: 5442793 - DNA, 25 bp, Homo sapien
tttcagagagatgcactcgaggctc

SEQ ID NO: 5442794 - DNA, 25 bp, Homo sapien
tctcgtcggttggtgatggactcac

SEQ ID NO: 5442795 - DNA, 25 bp, Homo sapien
gaagtttggccaagctcatggtgct

SEQ ID NO: 5442796 - DNA, 25 bp, Homo sapien
tgttggatgaactgctaccgctact

SEQ ID NO: 5442797 - DNA, 25 bp, Homo sapien
tcacagccgtgttggatgaactgct

SEQ ID NO: 5442798 - DNA, 25 bp, Homo sapien
tacttccacaggataatgaagggaa

SEQ ID NO: 5442799 - DNA, 25 bp, Homo sapien
aactgctaccgctacttccacagga

SEQ ID NO: 5442800 - DNA, 25 bp, Homo sapien
gaggactggccctgtaaatcttgca

SEQ ID NO: 5442801 - DNA, 25 bp, Homo sapien
tattagttgtctgccctaggaccag

SEQ ID NO: 5442802 - DNA, 25 bp, Homo sapien
taacgaatcatgtacttgaggaaac

SEQ ID NO: 5442803 - DNA, 25 bp, Homo sapien
tccgggtatatagccccagctgggt

SEQ ID NO: 5442804 - DNA, 25 bp, Homo sapien
catgaaaatatagctgaggaaagaa

SEQ ID NO: 5442805 - DNA, 25 bp, Homo sapien
aaattcatgaaaatatagctgagga

SEQ ID NO: 5442806 - DNA, 25 bp, Homo sapien
ccccagatttcccaggcactcttac

SEQ ID NO: 5442807 - DNA, 25 bp, Homo sapien
aggaaagaagtgaggccccagattt

SEQ ID NO: 5442808 - DNA, 25 bp, Homo sapien
ctgagtgatgtcagagggatgtaat

SEQ ID NO: 5442809 - DNA, 25 bp, Homo sapien
agtgatgtcagagggatgtaatatt

SEQ ID NO: 5442810 - DNA, 25 bp, Homo sapien
tgagtgatgtcagagggatgtaata

SEQ ID NO: 5442811 - DNA, 25 bp, Homo sapien
gagtgatgtcagagggatgtaatat

SEQ ID NO: 5442812 - DNA, 25 bp, Homo sapien
tgagtttgtgcacgacaggcacttt

SEQ ID NO: 5442813 - DNA, 25 bp, Homo sapien
gagtttgtgcacgacaggcactttc

SEQ ID NO: 5442814 - DNA, 25 bp, Homo sapien
tgttgagtttgtgcacgacaggcac

SEQ ID NO: 5442815 - DNA, 25 bp, Homo sapien
gttgagtttgtgcacgacaggcact

SEQ ID NO: 5442816 - DNA, 25 bp, Homo sapien
gatctagtatccaaatgattcagcc

SEQ ID NO: 5442817 - DNA, 25 bp, Homo sapien
cagcacaaaacaaggcaatatcacc

SEQ ID NO: 5442818 - DNA, 25 bp, Homo sapien
actctgtgggagtctacatgtcaaa

SEQ ID NO: 5442819 - DNA, 25 bp, Homo sapien
tcatagtaatggtaagacagaggcc

SEQ ID NO: 5442820 - DNA, 25 bp, Homo sapien
actcttgctgcacactgagatacag

SEQ ID NO: 5442821 - DNA, 25 bp, Homo sapien
gatacagtggttatctagaggaaaa

SEQ ID NO: 5442822 - DNA, 25 bp, Homo sapien
tcttggccgttgagtctttttcctg

SEQ ID NO: 5442823 - DNA, 25 bp, Homo sapien
atgggaaggatgtattaagcactct

SEQ ID NO: 5442824 - DNA, 25 bp, Homo sapien
tccaactgcatgtttgtgcctggct

SEQ ID NO: 5442825 - DNA, 25 bp, Homo sapien
aagttcattgttagggtttcagatc

SEQ ID NO: 5442826 - DNA, 25 bp, Homo sapien
tcacattgctacaaacgttcaagaa

SEQ ID NO: 5442827 - DNA, 25 bp, Homo sapien
cagatgctgataatgagaataaagc

SEQ ID NO: 5442828 - DNA, 25 bp, Homo sapien
taccctccagtgagcagaggtagcc

SEQ ID NO: 5442829 - DNA, 25 bp, Homo sapien
cgcaggctggctaagataaagtgga

SEQ ID NO: 5442830 - DNA, 25 bp, Homo sapien
gatatgcaagattaagtaccctcca

SEQ ID NO: 5442831 - DNA, 25 bp, Homo sapien
tacccaatctactaacgcaggctgg

SEQ ID NO: 5442832 - DNA, 25 bp, Homo sapien
tcccaagtttggttgagcaagctgc

SEQ ID NO: 5442833 - DNA, 25 bp, Homo sapien
agcctttagtaatgacacctggtcg

SEQ ID NO: 5442834 - DNA, 25 bp, Homo sapien
tggtcgtggatcaaggatggttccc

SEQ ID NO: 5442835 - DNA, 25 bp, Homo sapien
tgtgataaatagcatccccgggcaa

SEQ ID NO: 5442836 - DNA, 25 bp, Homo sapien
gcgatgcagtgctgtagccaaatca

SEQ ID NO: 5442837 - DNA, 25 bp, Homo sapien
cagaacctggatcttccgctgccat

SEQ ID NO: 5442838 - DNA, 25 bp, Homo sapien
acctcgaaggcaactggcactgctg

SEQ ID NO: 5442839 - DNA, 25 bp, Homo sapien
tcgacgcaagctaaggcgatgcagt

SEQ ID NO: 5442840 - DNA, 25 bp, Homo sapien
ctcctgagggtcctggttggcccat

SEQ ID NO: 5442841 - DNA, 25 bp, Homo sapien
tcctggttggcccatcttctgggag

SEQ ID NO: 5442842 - DNA, 25 bp, Homo sapien
ctatctcctgagggtcctggttggc

SEQ ID NO: 5442843 - DNA, 25 bp, Homo sapien
tatctcctgagggtcctggttggcc

SEQ ID NO: 5442844 - DNA, 25 bp, Homo sapien
cccctggttcaggagtgatttgtcc

SEQ ID NO: 5442845 - DNA, 25 bp, Homo sapien
tggcaatcctgacggtatcaaatac

SEQ ID NO: 5442846 - DNA, 25 bp, Homo sapien
atcaaatacccgcttctgttgggct

SEQ ID NO: 5442847 - DNA, 25 bp, Homo sapien
cacttgaacggttggagcctggaat

SEQ ID NO: 5442848 - DNA, 25 bp, Homo sapien
actcagctttttacgcatagtcccc

SEQ ID NO: 5442849 - DNA, 25 bp, Homo sapien
tttacgcatagtcccctcaatctca

SEQ ID NO: 5442850 - DNA, 25 bp, Homo sapien
ccaaactcagctttttacgcatagt

SEQ ID NO: 5442851 - DNA, 25 bp, Homo sapien
gctttttacgcatagtcccctcaat

SEQ ID NO: 5442852 - DNA, 25 bp, Homo sapien
gtaacattcctagacactccatatt

SEQ ID NO: 5442853 - DNA, 25 bp, Homo sapien
gctccatatgattgggagaagtaga

SEQ ID NO: 5442854 - DNA, 25 bp, Homo sapien
tattcctgtcttgtaactcgtgcag

SEQ ID NO: 5442855 - DNA, 25 bp, Homo sapien
tagggccagatctactacgaagttc

SEQ ID NO: 5442856 - DNA, 25 bp, Homo sapien
agattctaggctctcactccagacc

SEQ ID NO: 5442857 - DNA, 25 bp, Homo sapien
caccagggttgaagatgcttattaa

SEQ ID NO: 5442858 - DNA, 25 bp, Homo sapien
ttgctctccgaggtgattctttccc

SEQ ID NO: 5442859 - DNA, 25 bp, Homo sapien
agtagaagctcttgggatggtgcct

SEQ ID NO: 5442860 - DNA, 25 bp, Homo sapien
atatcatcttaaccttttgttgttg

SEQ ID NO: 5442861 - DNA, 25 bp, Homo sapien
ttacttcttagatctcataatatca

SEQ ID NO: 5442862 - DNA, 25 bp, Homo sapien
tagatctcataatatcatcttaacc

SEQ ID NO: 5442863 - DNA, 25 bp, Homo sapien
taatatcatcttaaccttttgttgt

SEQ ID NO: 5442864 - DNA, 25 bp, Homo sapien
tgggcatctttggaagcttgcaggt

SEQ ID NO: 5442865 - DNA, 25 bp, Homo sapien
ttgtcagttgccgttgggcatcttt

SEQ ID NO: 5442866 - DNA, 25 bp, Homo sapien
ttgcaggtgaagttttagttcttcc

SEQ ID NO: 5442867 - DNA, 25 bp, Homo sapien
gaagcttgcaggtgaagttttagtt

SEQ ID NO: 5442868 - DNA, 25 bp, Homo sapien
catgtgaagcctttccaagtaaaat

SEQ ID NO: 5442869 - DNA, 25 bp, Homo sapien
aagacatgtgaagcctttccaagta

SEQ ID NO: 5442870 - DNA, 25 bp, Homo sapien
attctctttcttataaagacatgtg

SEQ ID NO: 5442871 - DNA, 25 bp, Homo sapien
aaaaagacatgtgaagcctttccaa

SEQ ID NO: 5442872 - DNA, 25 bp, Homo sapien
cagcaatcagattagggcattttaa

SEQ ID NO: 5442873 - DNA, 25 bp, Homo sapien
cacttagcatggtgcaagatactat

SEQ ID NO: 5442874 - DNA, 25 bp, Homo sapien
caagatactatgtgagtgcttaaca

SEQ ID NO: 5442875 - DNA, 25 bp, Homo sapien
ttgtttattgtatctagcacttagc

SEQ ID NO: 5442876 - DNA, 25 bp, Homo sapien
ttcttggtatcgaatcagctcatca

SEQ ID NO: 5442877 - DNA, 25 bp, Homo sapien
cttggtatcgaatcagctcatcact

SEQ ID NO: 5442878 - DNA, 25 bp, Homo sapien
ttgtgctgaaggtctacaatctgtg

SEQ ID NO: 5442879 - DNA, 25 bp, Homo sapien
taagtttgtgctgaaggtctacaat

SEQ ID NO: 5442880 - DNA, 25 bp, Homo sapien
ctggacatctgagcatttgtttcac

SEQ ID NO: 5442881 - DNA, 25 bp, Homo sapien
tctggacatctgagcatttgtttca

SEQ ID NO: 5442882 - DNA, 25 bp, Homo sapien
ttttcttcataggtaacagtttctg

SEQ ID NO: 5442883 - DNA, 25 bp, Homo sapien
cttttcttcataggtaacagtttct

SEQ ID NO: 5442884 - DNA, 25 bp, Homo sapien
tttcttcataggtaacagtttctgt

SEQ ID NO: 5442885 - DNA, 25 bp, Homo sapien
tcattgaaccgaagaggtgtagaac

SEQ ID NO: 5442886 - DNA, 25 bp, Homo sapien
ttccaactgcagcaacccttgagat

SEQ ID NO: 5442887 - DNA, 25 bp, Homo sapien
gaagcaatggagacgattcgaagta

SEQ ID NO: 5442888 - DNA, 25 bp, Homo sapien
taagctaaaggactcattgaaccga

SEQ ID NO: 5442889 - DNA, 25 bp, Homo sapien
gacatggttccgctttaagagagct

SEQ ID NO: 5442890 - DNA, 25 bp, Homo sapien
tgatcaaaggcttgtcccaattgct

SEQ ID NO: 5442891 - DNA, 25 bp, Homo sapien
ccagggattcgttctgctcagataa

SEQ ID NO: 5442892 - DNA, 25 bp, Homo sapien
taagagagcttgtccaattcgagca

SEQ ID NO: 5442893 - DNA, 25 bp, Homo sapien
gattccaaatgatcctcaagtttta

SEQ ID NO: 5442894 - DNA, 25 bp, Homo sapien
ccaaatgatcctcaagttttacctt

SEQ ID NO: 5442895 - DNA, 25 bp, Homo sapien
tttgatagattccaaatgatcctca

SEQ ID NO: 5442896 - DNA, 25 bp, Homo sapien
tgatagattccaaatgatcctcaag

SEQ ID NO: 5442897 - DNA, 25 bp, Homo sapien
tgtcattgtaagttttggtcatctg

SEQ ID NO: 5442898 - DNA, 25 bp, Homo sapien
gtaaccatgtcgatgtcattgtaag

SEQ ID NO: 5442899 - DNA, 25 bp, Homo sapien
ctctgccaggagatgtgtaaccatg

SEQ ID NO: 5442900 - DNA, 25 bp, Homo sapien
gagatgtgtaaccatgtcgatgtca

SEQ ID NO: 5442901 - DNA, 25 bp, Homo sapien
ctcacttatgagaatcttggctggg

SEQ ID NO: 5442902 - DNA, 25 bp, Homo sapien
tgatcaaaaggcagtcacatcttga

SEQ ID NO: 5442903 - DNA, 25 bp, Homo sapien
tagtccaatcattacaaacgaagtg

SEQ ID NO: 5442904 - DNA, 25 bp, Homo sapien
tcctcctcccctggtaagacaggaa

SEQ ID NO: 5442905 - DNA, 25 bp, Homo sapien
gagagcatcagatgcatgctgccgc

SEQ ID NO: 5442906 - DNA, 25 bp, Homo sapien
catgtaacggaaagtctcttcagca

SEQ ID NO: 5442907 - DNA, 25 bp, Homo sapien
gagagtgtctacttttagcctatac

SEQ ID NO: 5442908 - DNA, 25 bp, Homo sapien
caacttcagggagatcctcattgga

SEQ ID NO: 5442909 - DNA, 25 bp, Homo sapien
acaaattattgccaactatagccac

SEQ ID NO: 5442910 - DNA, 25 bp, Homo sapien
tagccaccctatggtgcttaagaac

SEQ ID NO: 5442911 - DNA, 25 bp, Homo sapien
gttaactaacatctcctgatccctc

SEQ ID NO: 5442912 - DNA, 25 bp, Homo sapien
tattgccaactatagccaccctatg

SEQ ID NO: 5442913 - DNA, 25 bp, Homo sapien
ctgagggccaaagagattattaagg

SEQ ID NO: 5442914 - DNA, 25 bp, Homo sapien
ccaaagagattattaagggcagaca

SEQ ID NO: 5442915 - DNA, 25 bp, Homo sapien
cttgaggaggtacaaactgattaag

SEQ ID NO: 5442916 - DNA, 25 bp, Homo sapien
ggtacaaactgattaagccactgat

SEQ ID NO: 5442917 - DNA, 25 bp, Homo sapien
tcgcaccagcaggaggaacattcaa

SEQ ID NO: 5442918 - DNA, 25 bp, Homo sapien
gcaccagcaggaggaacattcaaag

SEQ ID NO: 5442919 - DNA, 25 bp, Homo sapien
cttcgcaccagcaggaggaacattc

SEQ ID NO: 5442920 - DNA, 25 bp, Homo sapien
caccagcaggaggaacattcaaagc

SEQ ID NO: 5442921 - DNA, 25 bp, Homo sapien
tagtaacgggcatgttgaatcctga

SEQ ID NO: 5442922 - DNA, 25 bp, Homo sapien
ccatggaaggaacagaagtgaacgt

SEQ ID NO: 5442923 - DNA, 25 bp, Homo sapien
gggtactaacagaaaggctagtcaa

SEQ ID NO: 5442924 - DNA, 25 bp, Homo sapien
gaaaacatcatgtcaatgcccatgg

SEQ ID NO: 5442925 - DNA, 25 bp, Homo sapien
tgtttaacagcagcaataggtgtgt

SEQ ID NO: 5442926 - DNA, 25 bp, Homo sapien
ctgtttaacagcagcaataggtgtg

SEQ ID NO: 5442927 - DNA, 25 bp, Homo sapien
tttaacagcagcaataggtgtgtac

SEQ ID NO: 5442928 - DNA, 25 bp, Homo sapien
ttaacagcagcaataggtgtgtaca

SEQ ID NO: 5442929 - DNA, 25 bp, Homo sapien
ggtttaagaggctgctggcctttca

SEQ ID NO: 5442930 - DNA, 25 bp, Homo sapien
cttggggtttaagaggctgctggcc

SEQ ID NO: 5442931 - DNA, 25 bp, Homo sapien
taagaggctgctggcctttcaactt

SEQ ID NO: 5442932 - DNA, 25 bp, Homo sapien
tttaagaggctgctggcctttcaac

SEQ ID NO: 5442933 - DNA, 25 bp, Homo sapien
caagtgtaagtgatgctcttttatg

SEQ ID NO: 5442934 - DNA, 25 bp, Homo sapien
ctatgcctgctcttgttctcttgct

SEQ ID NO: 5442935 - DNA, 25 bp, Homo sapien
tgcctgctcttgttctcttgctaat

SEQ ID NO: 5442936 - DNA, 25 bp, Homo sapien
ttttcttcaagtgtaagtgatgctc

SEQ ID NO: 5442937 - DNA, 25 bp, Homo sapien
ccatcctctttattttcggaatcac

SEQ ID NO: 5442938 - DNA, 25 bp, Homo sapien
ccagtcagaaggtctgctccaatgt

SEQ ID NO: 5442939 - DNA, 25 bp, Homo sapien
gccagtcagaaggtctgctccaatg

SEQ ID NO: 5442940 - DNA, 25 bp, Homo sapien
ttgtcaatttgctgattcccaatat

SEQ ID NO: 5442941 - DNA, 25 bp, Homo sapien
tgtcaatttgctgattcccaatatt

SEQ ID NO: 5442942 - DNA, 25 bp, Homo sapien
cagcatctcttttatgatggaaatg

SEQ ID NO: 5442943 - DNA, 25 bp, Homo sapien
tcagcatctcttttatgatggaaat

SEQ ID NO: 5442944 - DNA, 25 bp, Homo sapien
ctgcagactctttggatggaatttg

SEQ ID NO: 5442945 - DNA, 25 bp, Homo sapien
tgcagactctttggatggaatttgt

SEQ ID NO: 5442946 - DNA, 25 bp, Homo sapien
gacatttgtagacaggcatttttaa

SEQ ID NO: 5442947 - DNA, 25 bp, Homo sapien
atgaatttacaggaacagcaaggga

SEQ ID NO: 5442948 - DNA, 25 bp, Homo sapien
taagcacactaatgaatttacagga

SEQ ID NO: 5442949 - DNA, 25 bp, Homo sapien
caggaacagcaagggaagacatttg

SEQ ID NO: 5442950 - DNA, 25 bp, Homo sapien
tttgcaaaggttggaatgatgttta

SEQ ID NO: 5442951 - DNA, 25 bp, Homo sapien
gatgggtagtctataagatttgcaa

SEQ ID NO: 5442952 - DNA, 25 bp, Homo sapien
tagtctataagatttgcaaaggttg

SEQ ID NO: 5442953 - DNA, 25 bp, Homo sapien
taagatttgcaaaggttggaatgat

SEQ ID NO: 5442954 - DNA, 25 bp, Homo sapien
agagctcctggtattgaatggaagg

SEQ ID NO: 5442955 - DNA, 25 bp, Homo sapien
cattcctcaacgatcagtagaacac

SEQ ID NO: 5442956 - DNA, 25 bp, Homo sapien
ttggtgcattcctcaacgatcagta

SEQ ID NO: 5442957 - DNA, 25 bp, Homo sapien
aagttcaggtggaattaatgtgaca

SEQ ID NO: 5442958 - DNA, 25 bp, Homo sapien
agtcaaatcaaaattctctgtacaa

SEQ ID NO: 5442959 - DNA, 25 bp, Homo sapien
ctgaagtcaaatcaaaattctctgt

SEQ ID NO: 5442960 - DNA, 25 bp, Homo sapien
gaagtcaaatcaaaattctctgtac

SEQ ID NO: 5442961 - DNA, 25 bp, Homo sapien
tcaaatcaaaattctctgtacaatg

SEQ ID NO: 5442962 - DNA, 25 bp, Homo sapien
ctcttgttcagaaggattggttgat

SEQ ID NO: 5442963 - DNA, 25 bp, Homo sapien
cagcatacataacagttcctaaaga

SEQ ID NO: 5442964 - DNA, 25 bp, Homo sapien
gcagtgttactgcaccaacatcatc

SEQ ID NO: 5442965 - DNA, 25 bp, Homo sapien
ttacatgttcacgaacttcctcagg

SEQ ID NO: 5442966 - DNA, 25 bp, Homo sapien
ttggtttctacatcataaagtttat

SEQ ID NO: 5442967 - DNA, 25 bp, Homo sapien
tggtttctacatcataaagtttata

SEQ ID NO: 5442968 - DNA, 25 bp, Homo sapien
cacactgctatgcaagaatgacaat

SEQ ID NO: 5442969 - DNA, 25 bp, Homo sapien
tgaagtcgagttaagtgttggactc

SEQ ID NO: 5442970 - DNA, 25 bp, Homo sapien
gtacacaacaccaagcaatccctgg

SEQ ID NO: 5442971 - DNA, 25 bp, Homo sapien
tcgagggtgttgaagtcgagttaag

SEQ ID NO: 5442972 - DNA, 25 bp, Homo sapien
tgttgaagtcgagttaagtgttgga

SEQ ID NO: 5442973 - DNA, 25 bp, Homo sapien
attacagcactagtgacatcagctg

SEQ ID NO: 5442974 - DNA, 25 bp, Homo sapien
cattacagcactagtgacatcagct

SEQ ID NO: 5442975 - DNA, 25 bp, Homo sapien
agaggtcagcaaacgacagcccaca

SEQ ID NO: 5442976 - DNA, 25 bp, Homo sapien
ctgatacttatcacaagtggataaa

SEQ ID NO: 5442977 - DNA, 25 bp, Homo sapien
tttttcatgtactgtccaaggctgc

SEQ ID NO: 5442978 - DNA, 25 bp, Homo sapien
cacaggccaacttcggcttgctgcc

SEQ ID NO: 5442979 - DNA, 25 bp, Homo sapien
cagatggatatgatgcagctactac

SEQ ID NO: 5442980 - DNA, 25 bp, Homo sapien
ggcagattctgttaatgcgtcaggg

SEQ ID NO: 5442981 - DNA, 25 bp, Homo sapien
gggagtccgacatagacaggaaata

SEQ ID NO: 5442982 - DNA, 25 bp, Homo sapien
taggtcatatatgctggactgaggc

SEQ ID NO: 5442983 - DNA, 25 bp, Homo sapien
ctctccgagtctctgtgattgctat

SEQ ID NO: 5442984 - DNA, 25 bp, Homo sapien
gagtctctgtgattgctattcatga

SEQ ID NO: 5442985 - DNA, 25 bp, Homo sapien
ctccgagtctctgtgattgctattc

SEQ ID NO: 5442986 - DNA, 25 bp, Homo sapien
ccgagtctctgtgattgctattcat

SEQ ID NO: 5442987 - DNA, 25 bp, Homo sapien
aaaattgcattctgggattgactca

SEQ ID NO: 5442988 - DNA, 25 bp, Homo sapien
taaaaattgcattctgggattgact

SEQ ID NO: 5442989 - DNA, 25 bp, Homo sapien
tgtaaaaattgcattctgggattga

SEQ ID NO: 5442990 - DNA, 25 bp, Homo sapien
aaattgcattctgggattgactcat

SEQ ID NO: 5442991 - DNA, 25 bp, Homo sapien
ggaaatccatcaagccattcaataa

SEQ ID NO: 5442992 - DNA, 25 bp, Homo sapien
ggatttggtcacatggatattttct

SEQ ID NO: 5442993 - DNA, 25 bp, Homo sapien
gagaaggacagctttggtatgaatc

SEQ ID NO: 5442994 - DNA, 25 bp, Homo sapien
aatgacatccgtagcaacgagcact

SEQ ID NO: 5442995 - DNA, 25 bp, Homo sapien
gttgaactaagaactaagtccatct

SEQ ID NO: 5442996 - DNA, 25 bp, Homo sapien
ggaacctgttcagcctgcagactgt

SEQ ID NO: 5442997 - DNA, 25 bp, Homo sapien
tccagggtgatctggcaatggtatg

SEQ ID NO: 5442998 - DNA, 25 bp, Homo sapien
acctccagaagggaccgtctacttg

SEQ ID NO: 5442999 - DNA, 25 bp, Homo sapien
agtgagcaatatcttctctctgcca

SEQ ID NO: 5443000 - DNA, 25 bp, Homo sapien
gaaagagcaacttgacataaactct

SEQ ID NO: 5443001 - DNA, 25 bp, Homo sapien
tggcataaaagctacccaaggctat

SEQ ID NO: 5443002 - DNA, 25 bp, Homo sapien
gacataaactctacctgaaattctg

SEQ ID NO: 5443003 - DNA, 25 bp, Homo sapien
caccctaacggcttcatctgaactt

SEQ ID NO: 5443004 - DNA, 25 bp, Homo sapien
tgtcagactggattagaacccaccc

SEQ ID NO: 5443005 - DNA, 25 bp, Homo sapien
tctctgcccaggctaattcccattt

SEQ ID NO: 5443006 - DNA, 25 bp, Homo sapien
ctgaggttacggctgttagggcttc

SEQ ID NO: 5443007 - DNA, 25 bp, Homo sapien
tgtagtagctacatgacctttggta

SEQ ID NO: 5443008 - DNA, 25 bp, Homo sapien
gaaccttgaagtacgacaagcatgg

SEQ ID NO: 5443009 - DNA, 25 bp, Homo sapien
caggatggtaactaaagaggttcaa

SEQ ID NO: 5443010 - DNA, 25 bp, Homo sapien
taagaacactgcagatctgaacaga

SEQ ID NO: 5443011 - DNA, 25 bp, Homo sapien
agtggtgccatcatcgctcaaggga

SEQ ID NO: 5443012 - DNA, 25 bp, Homo sapien
gggcttttcgggtcttactgagcag

SEQ ID NO: 5443013 - DNA, 25 bp, Homo sapien
cacccagcagggtcatatttttatt

SEQ ID NO: 5443014 - DNA, 25 bp, Homo sapien
aagggatcctttgatctcagctggc

SEQ ID NO: 5443015 - DNA, 25 bp, Homo sapien
cactcatcctaaaagacagggctcc

SEQ ID NO: 5443016 - DNA, 25 bp, Homo sapien
ctgtatggcagaggataaggcgcta

SEQ ID NO: 5443017 - DNA, 25 bp, Homo sapien
tcacagatggcgactgaagcttaag

SEQ ID NO: 5443018 - DNA, 25 bp, Homo sapien
ttgggctgctactaaaaaggacatg

SEQ ID NO: 5443019 - DNA, 25 bp, Homo sapien
aaaggagagccactctcccagcggc

SEQ ID NO: 5443020 - DNA, 25 bp, Homo sapien
ttctgcggcgacaccgggtcaatgg

SEQ ID NO: 5443021 - DNA, 25 bp, Homo sapien
gagtggttcggcatcctctgtcgtc

SEQ ID NO: 5443022 - DNA, 25 bp, Homo sapien
ctaatgcagcggcagcctgaaagca

SEQ ID NO: 5443023 - DNA, 25 bp, Homo sapien
tgtatgtgttgtagattttatgatt

SEQ ID NO: 5443024 - DNA, 25 bp, Homo sapien
aaacaaacaggcgaagagaactaat

SEQ ID NO: 5443025 - DNA, 25 bp, Homo sapien
caggcgaagagaactaataaaaact

SEQ ID NO: 5443026 - DNA, 25 bp, Homo sapien
aaagtgacaacttgacactgattgc

SEQ ID NO: 5443027 - DNA, 25 bp, Homo sapien
tcgctgcaagcagacatttgtgggc

SEQ ID NO: 5443028 - DNA, 25 bp, Homo sapien
tcaatggtggtcgtccaacctccaa

SEQ ID NO: 5443029 - DNA, 25 bp, Homo sapien
cacttggatggcaccggttactcca

SEQ ID NO: 5443030 - DNA, 25 bp, Homo sapien
gcttgatgcctgagccacacttgga

SEQ ID NO: 5443031 - DNA, 25 bp, Homo sapien
tctagttaaccaaggatttccaaca

SEQ ID NO: 5443032 - DNA, 25 bp, Homo sapien
cacactatattctggttaactgagg

SEQ ID NO: 5443033 - DNA, 25 bp, Homo sapien
tggtatcgaaaaacaaggctcttat

SEQ ID NO: 5443034 - DNA, 25 bp, Homo sapien
tcaccagatgattggccatcctcct

SEQ ID NO: 5443035 - DNA, 25 bp, Homo sapien
cacattactgatgcttggtgtatat

SEQ ID NO: 5443036 - DNA, 25 bp, Homo sapien
tgatgaaagggcaaagtaactctga

SEQ ID NO: 5443037 - DNA, 25 bp, Homo sapien
gcaagcagtttattgtcccatgttt

SEQ ID NO: 5443038 - DNA, 25 bp, Homo sapien
aaacaggtgagctgatctatcatcc

SEQ ID NO: 5443039 - DNA, 25 bp, Homo sapien
tatggtaacacctaactgagcctca

SEQ ID NO: 5443040 - DNA, 25 bp, Homo sapien
gatcctaaattcacgcaccccgtgg

SEQ ID NO: 5443041 - DNA, 25 bp, Homo sapien
ggccctcagaggacagtgcttccaa

SEQ ID NO: 5443042 - DNA, 25 bp, Homo sapien
ttcgcacagagtactatgacaagga

SEQ ID NO: 5443043 - DNA, 25 bp, Homo sapien
gcctggcctaaaagtatatattcat

SEQ ID NO: 5443044 - DNA, 25 bp, Homo sapien
acggtgcctggcctaaaagtatata

SEQ ID NO: 5443045 - DNA, 25 bp, Homo sapien
ggcacgctatcacgcccagctgatt

SEQ ID NO: 5443046 - DNA, 25 bp, Homo sapien
tatattcataacaaaaggctgcaca

SEQ ID NO: 5443047 - DNA, 25 bp, Homo sapien
agatctccaaaccattttgttaatg

SEQ ID NO: 5443048 - DNA, 25 bp, Homo sapien
agagatctccaaaccattttgttaa

SEQ ID NO: 5443049 - DNA, 25 bp, Homo sapien
aatggagaagtgatattctgactgc

SEQ ID NO: 5443050 - DNA, 25 bp, Homo sapien
tgttaatggagaagtgatattctga

SEQ ID NO: 5443051 - DNA, 25 bp, Homo sapien
tatatgaactaagcctgatgaaacc

SEQ ID NO: 5443052 - DNA, 25 bp, Homo sapien
tgatgaaaccattcgacgacttgta

SEQ ID NO: 5443053 - DNA, 25 bp, Homo sapien
catggttatggatatcatctgagct

SEQ ID NO: 5443054 - DNA, 25 bp, Homo sapien
tgttaacctccggagcagtatatgg

SEQ ID NO: 5443055 - DNA, 25 bp, Homo sapien
ttcttcttgcagtccagtgaagcag

SEQ ID NO: 5443056 - DNA, 25 bp, Homo sapien
tggttgggcgacacggtctctttct

SEQ ID NO: 5443057 - DNA, 25 bp, Homo sapien
cagtgtggttggtagtatcctgact

SEQ ID NO: 5443058 - DNA, 25 bp, Homo sapien
tgaagcagtgtccttggaacagact

SEQ ID NO: 5443059 - DNA, 25 bp, Homo sapien
tattgtgcaaatgttactaaatgct

SEQ ID NO: 5443060 - DNA, 25 bp, Homo sapien
caatgtctgacaatactggtcttct

SEQ ID NO: 5443061 - DNA, 25 bp, Homo sapien
ctcatcttctacaaccttatattgg

SEQ ID NO: 5443062 - DNA, 25 bp, Homo sapien
gaggtgtggtttcaagtttttctca

SEQ ID NO: 5443063 - DNA, 25 bp, Homo sapien
ctttgccaggaagggaaagtgattc

SEQ ID NO: 5443064 - DNA, 25 bp, Homo sapien
tgatgacttacttaatggacttgcc

SEQ ID NO: 5443065 - DNA, 25 bp, Homo sapien
tcttggatacgatgttaatactgct

SEQ ID NO: 5443066 - DNA, 25 bp, Homo sapien
gaggaagctgcgtgaatacatgttc

SEQ ID NO: 5443067 - DNA, 25 bp, Homo sapien
tctagaaacacacgcaactttggac

SEQ ID NO: 5443068 - DNA, 25 bp, Homo sapien
gaatgatgggtatactctgctcaga

SEQ ID NO: 5443069 - DNA, 25 bp, Homo sapien
tcctttaggagaagtgatccccgta

SEQ ID NO: 5443070 - DNA, 25 bp, Homo sapien
gaagatattagggtcatgggcccag

SEQ ID NO: 5443071 - DNA, 25 bp, Homo sapien
ggtgaattatattcttttggtgaaa

SEQ ID NO: 5443072 - DNA, 25 bp, Homo sapien
taaaagctaattaagctatatcttg

SEQ ID NO: 5443073 - DNA, 25 bp, Homo sapien
taattaagctatatcttgaaaggct

SEQ ID NO: 5443074 - DNA, 25 bp, Homo sapien
cactgtcagggtttaagtaaaagct

SEQ ID NO: 5443075 - DNA, 25 bp, Homo sapien
gctatatcttgaaaggcttaattta

SEQ ID NO: 5443076 - DNA, 25 bp, Homo sapien
tcaggagtttaaccttattttcaga

SEQ ID NO: 5443077 - DNA, 25 bp, Homo sapien
tccaacagctgtcaggagtttaacc

SEQ ID NO: 5443078 - DNA, 25 bp, Homo sapien
ccaacagctgtcaggagtttaacct

SEQ ID NO: 5443079 - DNA, 25 bp, Homo sapien
taaagttcattgagggtcaggtgcg

SEQ ID NO: 5443080 - DNA, 25 bp, Homo sapien
tattcctgaataaccactgcgtgaa

SEQ ID NO: 5443081 - DNA, 25 bp, Homo sapien
gatctaaagagagggataggctcca

SEQ ID NO: 5443082 - DNA, 25 bp, Homo sapien
cactattagcattggagacatccct

SEQ ID NO: 5443083 - DNA, 25 bp, Homo sapien
tgccttatgcctgacatttagtgtg

SEQ ID NO: 5443084 - DNA, 25 bp, Homo sapien
gacatttagtgtgtcagagctagat

SEQ ID NO: 5443085 - DNA, 25 bp, Homo sapien
ttagtgtgtcagagctagatggttc

SEQ ID NO: 5443086 - DNA, 25 bp, Homo sapien
atcttgctgccttatgcctgacatt

SEQ ID NO: 5443087 - DNA, 25 bp, Homo sapien
taagactaaatctcagtaccatctg

SEQ ID NO: 5443088 - DNA, 25 bp, Homo sapien
gatatttactactgcctaccgtgga

SEQ ID NO: 5443089 - DNA, 25 bp, Homo sapien
ggtgagttctaagtagtaacagctc

SEQ ID NO: 5443090 - DNA, 25 bp, Homo sapien
tggccgaccctgcagtatttttaac

SEQ ID NO: 5443091 - DNA, 25 bp, Homo sapien
tgtgcccatacaagtggttaatatc

SEQ ID NO: 5443092 - DNA, 25 bp, Homo sapien
ggtaaactacaaactatgtgcccat

SEQ ID NO: 5443093 - DNA, 25 bp, Homo sapien
tacattaggagataatcacagatcc

SEQ ID NO: 5443094 - DNA, 25 bp, Homo sapien
ggagagcaatttgttagcatgccat

SEQ ID NO: 5443095 - DNA, 25 bp, Homo sapien
gaagcagaatctcacttagaactca

SEQ ID NO: 5443096 - DNA, 25 bp, Homo sapien
agagacttagatgcccaagctagta

SEQ ID NO: 5443097 - DNA, 25 bp, Homo sapien
cataggtaactgagagtaattccca

SEQ ID NO: 5443098 - DNA, 25 bp, Homo sapien
tcagctgaattactaacccaagaga

SEQ ID NO: 5443099 - DNA, 25 bp, Homo sapien
gattgttgttttgccagctaatttc

SEQ ID NO: 5443100 - DNA, 25 bp, Homo sapien
gatgaatctaagttcctgctctttg

SEQ ID NO: 5443101 - DNA, 25 bp, Homo sapien
acttctaatataagggcagacacct

SEQ ID NO: 5443102 - DNA, 25 bp, Homo sapien
tgagctcaaggccttcttttgggtc

SEQ ID NO: 5443103 - DNA, 25 bp, Homo sapien
tttaaaatgcttggatagttatctt

SEQ ID NO: 5443104 - DNA, 25 bp, Homo sapien
ttttctgtctggcatgctttctgat

SEQ ID NO: 5443105 - DNA, 25 bp, Homo sapien
ctgatagagatgagtctgcttttaa

SEQ ID NO: 5443106 - DNA, 25 bp, Homo sapien
agagatgagtctgcttttaaaatgc

SEQ ID NO: 5443107 - DNA, 25 bp, Homo sapien
tcctggttagaaatagtgcacaatg

SEQ ID NO: 5443108 - DNA, 25 bp, Homo sapien
catttttagaagcatcagcagttga

SEQ ID NO: 5443109 - DNA, 25 bp, Homo sapien
cagcagttgaattatcttggtccga

SEQ ID NO: 5443110 - DNA, 25 bp, Homo sapien
caaagttggtatagtcaggcctttc

SEQ ID NO: 5443111 - DNA, 25 bp, Homo sapien
catttgcagtagtttcagcttcctc

SEQ ID NO: 5443112 - DNA, 25 bp, Homo sapien
gcttcctcatttacaagagggatat

SEQ ID NO: 5443113 - DNA, 25 bp, Homo sapien
ctcatttgcagtagtttcagcttcc

SEQ ID NO: 5443114 - DNA, 25 bp, Homo sapien
cagcttcctcatttacaagagggat

SEQ ID NO: 5443115 - DNA, 25 bp, Homo sapien
tcttcaggatgattacttttcgtgt

SEQ ID NO: 5443116 - DNA, 25 bp, Homo sapien
atgattacttttcgtgttttcagat

SEQ ID NO: 5443117 - DNA, 25 bp, Homo sapien
cagatgcctcatctatattagtttc

SEQ ID NO: 5443118 - DNA, 25 bp, Homo sapien
cctcttcaggatgattacttttcgt

SEQ ID NO: 5443119 - DNA, 25 bp, Homo sapien
gttccaattttggcattagaatgct

SEQ ID NO: 5443120 - DNA, 25 bp, Homo sapien
aatagttagctttatctatccatgt

SEQ ID NO: 5443121 - DNA, 25 bp, Homo sapien
tggcattagaatgctttctaaatag

SEQ ID NO: 5443122 - DNA, 25 bp, Homo sapien
tagctttatctatccatgtattcag

SEQ ID NO: 5443123 - DNA, 25 bp, Homo sapien
cagtggtggaactctcatctaaaaa

SEQ ID NO: 5443124 - DNA, 25 bp, Homo sapien
gcttcacttcaaaatgggaagtgtc

SEQ ID NO: 5443125 - DNA, 25 bp, Homo sapien
tcaaaaagcccatatacgtagaagc

SEQ ID NO: 5443126 - DNA, 25 bp, Homo sapien
tttcgaatgatttcatggccaccca

SEQ ID NO: 5443127 - DNA, 25 bp, Homo sapien
ccctataactggtttcaggctagct

SEQ ID NO: 5443128 - DNA, 25 bp, Homo sapien
ttcaggctagcttcataaccattat

SEQ ID NO: 5443129 - DNA, 25 bp, Homo sapien
actggtttcaggctagcttcataac

SEQ ID NO: 5443130 - DNA, 25 bp, Homo sapien
caaggagtcaaaccccctataactg

SEQ ID NO: 5443131 - DNA, 25 bp, Homo sapien
gtggcatacctattccagtcaggct

SEQ ID NO: 5443132 - DNA, 25 bp, Homo sapien
agtcaggctttcaagatgcagcatc

SEQ ID NO: 5443133 - DNA, 25 bp, Homo sapien
gatgcagcatcatctattatagaag

SEQ ID NO: 5443134 - DNA, 25 bp, Homo sapien
taggtaaaatgagtatctcttcccc

SEQ ID NO: 5443135 - DNA, 25 bp, Homo sapien
tgagcaggaacagtaactactggtt

SEQ ID NO: 5443136 - DNA, 25 bp, Homo sapien
tggttatcccactatgagcaggaac

SEQ ID NO: 5443137 - DNA, 25 bp, Homo sapien
cattatcaatatatctaggtatggt

SEQ ID NO: 5443138 - DNA, 25 bp, Homo sapien
cagtaactactggtttccaccacaa

SEQ ID NO: 5443139 - DNA, 25 bp, Homo sapien
ctggttggaggattgcacagctgga

SEQ ID NO: 5443140 - DNA, 25 bp, Homo sapien
tttttcaagtcgcactacagatggc

SEQ ID NO: 5443141 - DNA, 25 bp, Homo sapien
tcgcactacagatggctggttggag

SEQ ID NO: 5443142 - DNA, 25 bp, Homo sapien
tggagtcccaacagtaacattcagg

SEQ ID NO: 5443143 - DNA, 25 bp, Homo sapien
cagtggcagctatcacttttgaacc

SEQ ID NO: 5443144 - DNA, 25 bp, Homo sapien
acttttagctcacctagccaccttg

SEQ ID NO: 5443145 - DNA, 25 bp, Homo sapien
catcgaaggctagagctaggaaaaa

SEQ ID NO: 5443146 - DNA, 25 bp, Homo sapien
caccttgggccatcgaaggctagag

SEQ ID NO: 5443147 - DNA, 25 bp, Homo sapien
gaggtggtgcaagattcataaacat

SEQ ID NO: 5443148 - DNA, 25 bp, Homo sapien
ggaggtggtgcaagattcataaaca

SEQ ID NO: 5443149 - DNA, 25 bp, Homo sapien
tggaggtggtgcaagattcataaac

SEQ ID NO: 5443150 - DNA, 25 bp, Homo sapien
tctggaggtggtgcaagattcataa

SEQ ID NO: 5443151 - DNA, 25 bp, Homo sapien
tacctccggagttggtgctcataag

SEQ ID NO: 5443152 - DNA, 25 bp, Homo sapien
cagtatcacgataggttaagtaggg

SEQ ID NO: 5443153 - DNA, 25 bp, Homo sapien
ttcagacacaaaacctacctccgga

SEQ ID NO: 5443154 - DNA, 25 bp, Homo sapien
tctcagttaacacagcggtagactt

SEQ ID NO: 5443155 - DNA, 25 bp, Homo sapien
ccataggagaacataaattccacct

SEQ ID NO: 5443156 - DNA, 25 bp, Homo sapien
cataaccaaagtttccataggagaa

SEQ ID NO: 5443157 - DNA, 25 bp, Homo sapien
ataggagaacataaattccacctcc

SEQ ID NO: 5443158 - DNA, 25 bp, Homo sapien
taaccaaagtttccataggagaaca

SEQ ID NO: 5443159 - DNA, 25 bp, Homo sapien
gtttccatgcaacacttggacctct

SEQ ID NO: 5443160 - DNA, 25 bp, Homo sapien
tttccatgcaacacttggacctctt

SEQ ID NO: 5443161 - DNA, 25 bp, Homo sapien
tccatgcaacacttggacctcttca

SEQ ID NO: 5443162 - DNA, 25 bp, Homo sapien
catgcaacacttggacctcttcaat

SEQ ID NO: 5443163 - DNA, 25 bp, Homo sapien
tctacactggtatgtcccatttctg

SEQ ID NO: 5443164 - DNA, 25 bp, Homo sapien
tacactcagcttgattagatttggg

SEQ ID NO: 5443165 - DNA, 25 bp, Homo sapien
tcgagctcttggttaaagtggcaac

SEQ ID NO: 5443166 - DNA, 25 bp, Homo sapien
gctaattctatgtgtgtagagacag

SEQ ID NO: 5443167 - DNA, 25 bp, Homo sapien
tctattgtcatattgtatgagttcc

SEQ ID NO: 5443168 - DNA, 25 bp, Homo sapien
gcttatcatcataacgtctgggaac

SEQ ID NO: 5443169 - DNA, 25 bp, Homo sapien
taaaatattattccgcttatcatca

SEQ ID NO: 5443170 - DNA, 25 bp, Homo sapien
tacctcataaagatgtatctgaaca

SEQ ID NO: 5443171 - DNA, 25 bp, Homo sapien
ttcacttcatcgaacttaattacag

SEQ ID NO: 5443172 - DNA, 25 bp, Homo sapien
gatagcaagctacacatttttgtac

SEQ ID NO: 5443173 - DNA, 25 bp, Homo sapien
atttcacagctttgtttatagagat

SEQ ID NO: 5443174 - DNA, 25 bp, Homo sapien
cagtgttcttctcatcgtttttgga

SEQ ID NO: 5443175 - DNA, 25 bp, Homo sapien
aaatgtctgcagttctttatatgaa

SEQ ID NO: 5443176 - DNA, 25 bp, Homo sapien
gttctttatatgaatgcccaggcag

SEQ ID NO: 5443177 - DNA, 25 bp, Homo sapien
tctgcagttctttatatgaatgccc

SEQ ID NO: 5443178 - DNA, 25 bp, Homo sapien
ttaggcataaaatgtctgcagttct

SEQ ID NO: 5443179 - DNA, 25 bp, Homo sapien
atacaggtttttgagggttactcat

SEQ ID NO: 5443180 - DNA, 25 bp, Homo sapien
tatacaggtttttgagggttactca

SEQ ID NO: 5443181 - DNA, 25 bp, Homo sapien
tacaggtttttgagggttactcata

SEQ ID NO: 5443182 - DNA, 25 bp, Homo sapien
atttggcgtctcctgtgttatttcc

SEQ ID NO: 5443183 - DNA, 25 bp, Homo sapien
gcaccaaatttggcgtctcctgtgt

SEQ ID NO: 5443184 - DNA, 25 bp, Homo sapien
caaatttggcgtctcctgtgttatt

SEQ ID NO: 5443185 - DNA, 25 bp, Homo sapien
ggcgtctcctgtgttatttccagtt

SEQ ID NO: 5443186 - DNA, 25 bp, Homo sapien
tcctccaggtgccggccaggccccc

SEQ ID NO: 5443187 - DNA, 25 bp, Homo sapien
aggtgccggccaggcccccgctcac

SEQ ID NO: 5443188 - DNA, 25 bp, Homo sapien
gctggccccggtcctccaggtgccg

SEQ ID NO: 5443189 - DNA, 25 bp, Homo sapien
ctccaggtgccctgctggccccggt

SEQ ID NO: 5443190 - DNA, 25 bp, Homo sapien
gttcagcagccggtgcccggtgccc

SEQ ID NO: 5443191 - DNA, 25 bp, Homo sapien
tcagcagccggtgcccggtgccctc

SEQ ID NO: 5443192 - DNA, 25 bp, Homo sapien
cggtgcccggtgccctcctggttct

SEQ ID NO: 5443193 - DNA, 25 bp, Homo sapien
tgcccggtgccctcctggttcttgt

SEQ ID NO: 5443194 - DNA, 25 bp, Homo sapien
tttaatgtgcatgatatccgggctg

SEQ ID NO: 5443195 - DNA, 25 bp, Homo sapien
agaagcctccgaccctttaatgtgc

SEQ ID NO: 5443196 - DNA, 25 bp, Homo sapien
acaggacttggacctgcccgctgcg

SEQ ID NO: 5443197 - DNA, 25 bp, Homo sapien
cgctgcggttatcaagtgtgctgaa

SEQ ID NO: 5443198 - DNA, 25 bp, Homo sapien
ctgtctgcgcccaaccgacggcccg

SEQ ID NO: 5443199 - DNA, 25 bp, Homo sapien
tgcggcctgtctgcgcccaaccgac

SEQ ID NO: 5443200 - DNA, 25 bp, Homo sapien
atcttctgcggcctgtctgcgccca

SEQ ID NO: 5443201 - DNA, 25 bp, Homo sapien
tctccatcttctgcggcctgtctgc

SEQ ID NO: 5443202 - DNA, 25 bp, Homo sapien
tcctcttatttttggaatctattct

SEQ ID NO: 5443203 - DNA, 25 bp, Homo sapien
cttaatatggaaaccaaaggtctgc

SEQ ID NO: 5443204 - DNA, 25 bp, Homo sapien
tagttaactcttatatccccataca

SEQ ID NO: 5443205 - DNA, 25 bp, Homo sapien
cacatatcctaaaggcagagttaac

SEQ ID NO: 5443206 - DNA, 25 bp, Homo sapien
gaatggtaccgccaactctggaaaa

SEQ ID NO: 5443207 - DNA, 25 bp, Homo sapien
tcaaaagtatgacatgggcagcacc

SEQ ID NO: 5443208 - DNA, 25 bp, Homo sapien
gctctgatcagcaaggtgcccctgt

SEQ ID NO: 5443209 - DNA, 25 bp, Homo sapien
tgaattctcatcgacggcctcagca

SEQ ID NO: 5443210 - DNA, 25 bp, Homo sapien
tgcttgctaatcagggcaggctcaa

SEQ ID NO: 5443211 - DNA, 25 bp, Homo sapien
ttattgccagattgagaaccattgc

SEQ ID NO: 5443212 - DNA, 25 bp, Homo sapien
gaaagctggaactagcaggatgcct

SEQ ID NO: 5443213 - DNA, 25 bp, Homo sapien
gagaatcccttttcggcagctccag

SEQ ID NO: 5443214 - DNA, 25 bp, Homo sapien
acttgagctttagggtctcatatac

SEQ ID NO: 5443215 - DNA, 25 bp, Homo sapien
cttgagctttagggtctcatataca

SEQ ID NO: 5443216 - DNA, 25 bp, Homo sapien
agctagtcttctcctcaacttgagc

SEQ ID NO: 5443217 - DNA, 25 bp, Homo sapien
cagaggaaagggtactgcagatgtc

SEQ ID NO: 5443218 - DNA, 25 bp, Homo sapien
ccagatatgagaaccactagtacag

SEQ ID NO: 5443219 - DNA, 25 bp, Homo sapien
gaaacctctctgacaaagagctgga

SEQ ID NO: 5443220 - DNA, 25 bp, Homo sapien
tgcagatgtcaactgggagcccaca

SEQ ID NO: 5443221 - DNA, 25 bp, Homo sapien
gatactcaatcactaagccagtttc

SEQ ID NO: 5443222 - DNA, 25 bp, Homo sapien
ttttattggtcataatgtagagcat

SEQ ID NO: 5443223 - DNA, 25 bp, Homo sapien
tattggtcataatgtagagcatctt

SEQ ID NO: 5443224 - DNA, 25 bp, Homo sapien
atgatactcaatcactaagccagtt

SEQ ID NO: 5443225 - DNA, 25 bp, Homo sapien
tgggtcattattcctccaaaggtga

SEQ ID NO: 5443226 - DNA, 25 bp, Homo sapien
ttttcccttctaccatattcgctaa

SEQ ID NO: 5443227 - DNA, 25 bp, Homo sapien
ttaagatgataatgctagacaaatt

SEQ ID NO: 5443228 - DNA, 25 bp, Homo sapien
cagtgctttttaaggtaatagttat

SEQ ID NO: 5443229 - DNA, 25 bp, Homo sapien
tcttccacctctgaggagaacatta

SEQ ID NO: 5443230 - DNA, 25 bp, Homo sapien
ggatattcttccacctctgaggaga

SEQ ID NO: 5443231 - DNA, 25 bp, Homo sapien
caggatattcttccacctctgagga

SEQ ID NO: 5443232 - DNA, 25 bp, Homo sapien
tccacctctgaggagaacattaact

SEQ ID NO: 5443233 - DNA, 25 bp, Homo sapien
tggagaagaaaatgaacagatcata

SEQ ID NO: 5443234 - DNA, 25 bp, Homo sapien
aagaaaatgaacagatcatacttaa

SEQ ID NO: 5443235 - DNA, 25 bp, Homo sapien
ctggagaagaaaatgaacagatcat

SEQ ID NO: 5443236 - DNA, 25 bp, Homo sapien
gagaagaaaatgaacagatcatact

SEQ ID NO: 5443237 - DNA, 25 bp, Homo sapien
tacagaggaaggacttggaactaac

SEQ ID NO: 5443238 - DNA, 25 bp, Homo sapien
gacaatatacacaatcctacctgga

SEQ ID NO: 5443239 - DNA, 25 bp, Homo sapien
tcatcaaaacaacgcaagaagccag

SEQ ID NO: 5443240 - DNA, 25 bp, Homo sapien
agttttgatcccagccacaatgtag

SEQ ID NO: 5443241 - DNA, 25 bp, Homo sapien
atagccaagataatccaaccagaag

SEQ ID NO: 5443242 - DNA, 25 bp, Homo sapien
ataagacaaaaatagccaagataat

SEQ ID NO: 5443243 - DNA, 25 bp, Homo sapien
gataatccaaccagaagagccacca

SEQ ID NO: 5443244 - DNA, 25 bp, Homo sapien
gagccaccacgagattcaccacaat

SEQ ID NO: 5443245 - DNA, 25 bp, Homo sapien
aaaaatgtagaaacactcattagaa

SEQ ID NO: 5443246 - DNA, 25 bp, Homo sapien
tgtagaaacactcattagaagtgcc

SEQ ID NO: 5443247 - DNA, 25 bp, Homo sapien
aatgtagaaacactcattagaagtg

SEQ ID NO: 5443248 - DNA, 25 bp, Homo sapien
gtagaaacactcattagaagtgcct

SEQ ID NO: 5443249 - DNA, 25 bp, Homo sapien
tgaactataatctcagccatcctgt

SEQ ID NO: 5443250 - DNA, 25 bp, Homo sapien
gactacttttggatgctacgtgcag

SEQ ID NO: 5443251 - DNA, 25 bp, Homo sapien
taaatgcaaagttagtattcccaag

SEQ ID NO: 5443252 - DNA, 25 bp, Homo sapien
gtccctagccactctctcaaaaaag

SEQ ID NO: 5443253 - DNA, 25 bp, Homo sapien
aacttgaagatctaaaacagatttt

SEQ ID NO: 5443254 - DNA, 25 bp, Homo sapien
taacaattgctaatgtcattgtgaa

SEQ ID NO: 5443255 - DNA, 25 bp, Homo sapien
gataagaaaagttgctgttattgcc

SEQ ID NO: 5443256 - DNA, 25 bp, Homo sapien
tgcaggtggacataacaatagttac

SEQ ID NO: 5443257 - DNA, 25 bp, Homo sapien
aaggtgtgtaaaggtggattctgtc

SEQ ID NO: 5443258 - DNA, 25 bp, Homo sapien
cacttgtcatttgctgactcagaga

SEQ ID NO: 5443259 - DNA, 25 bp, Homo sapien
gaggctaccattaacagaagaaggt

SEQ ID NO: 5443260 - DNA, 25 bp, Homo sapien
gactcagagatagtataagagcagt

SEQ ID NO: 5443261 - DNA, 25 bp, Homo sapien
ctatactttcatgactgatgatata

SEQ ID NO: 5443262 - DNA, 25 bp, Homo sapien
taatctatactttcatgactgatga

SEQ ID NO: 5443263 - DNA, 25 bp, Homo sapien
tatagattaatatcgaaaataatct

SEQ ID NO: 5443264 - DNA, 25 bp, Homo sapien
gattaatatcgaaaataatctatac

SEQ ID NO: 5443265 - DNA, 25 bp, Homo sapien
tcggattgctactgatattttagca

SEQ ID NO: 5443266 - DNA, 25 bp, Homo sapien
gctactgatattttagcaaagtcaa

SEQ ID NO: 5443267 - DNA, 25 bp, Homo sapien
aaaaaatttcggattgctactgata

SEQ ID NO: 5443268 - DNA, 25 bp, Homo sapien
tactgatattttagcaaagtcaatc

SEQ ID NO: 5443269 - DNA, 25 bp, Homo sapien
agaggttggatagctgatctcctgc

SEQ ID NO: 5443270 - DNA, 25 bp, Homo sapien
gaagactctggaatggatacgctag

SEQ ID NO: 5443271 - DNA, 25 bp, Homo sapien
tactcagagccaaaagcaagtacag

SEQ ID NO: 5443272 - DNA, 25 bp, Homo sapien
tacgctagggtcttgtattgttgca

SEQ ID NO: 5443273 - DNA, 25 bp, Homo sapien
gaaggcttcacgtccattgacacat

SEQ ID NO: 5443274 - DNA, 25 bp, Homo sapien
tttctgtggtctttatcaactctga

SEQ ID NO: 5443275 - DNA, 25 bp, Homo sapien
ctctgaacgatcagcagcctggaat

SEQ ID NO: 5443276 - DNA, 25 bp, Homo sapien
ggtgcactgtaagtgccacatctct

SEQ ID NO: 5443277 - DNA, 25 bp, Homo sapien
taacaactagcgagagagaaccctg

SEQ ID NO: 5443278 - DNA, 25 bp, Homo sapien
tgaaaattctccttgactcagtacc

SEQ ID NO: 5443279 - DNA, 25 bp, Homo sapien
taaattccatactcaggaagccgca

SEQ ID NO: 5443280 - DNA, 25 bp, Homo sapien
ggaagccgcaaactaagactgaaat

SEQ ID NO: 5443281 - DNA, 25 bp, Homo sapien
ccagtgggtgcagtgaatacagact

SEQ ID NO: 5443282 - DNA, 25 bp, Homo sapien
caaatactttgcctacaggctggct

SEQ ID NO: 5443283 - DNA, 25 bp, Homo sapien
tacaggctggctaatgccagtgggt

SEQ ID NO: 5443284 - DNA, 25 bp, Homo sapien
gctcatcagtgattatgtcttcatc

SEQ ID NO: 5443285 - DNA, 25 bp, Homo sapien
ccattttcatttcgtaataaagatg

SEQ ID NO: 5443286 - DNA, 25 bp, Homo sapien
cagctggctccgcatcaataccatt

SEQ ID NO: 5443287 - DNA, 25 bp, Homo sapien
tgtcttcctccgaggtttttgaata

SEQ ID NO: 5443288 - DNA, 25 bp, Homo sapien
tgaactagatgacttcttttgggtg

SEQ ID NO: 5443289 - DNA, 25 bp, Homo sapien
tccatccaatcaagacacgccgttt

SEQ ID NO: 5443290 - DNA, 25 bp, Homo sapien
ttccatccaatcaagacacgccgtt

SEQ ID NO: 5443291 - DNA, 25 bp, Homo sapien
cttccatccaatcaagacacgccgt

SEQ ID NO: 5443292 - DNA, 25 bp, Homo sapien
ccatccaatcaagacacgccgtttt

SEQ ID NO: 5443293 - DNA, 25 bp, Homo sapien
tcagagggccttcgaccagcagtct

SEQ ID NO: 5443294 - DNA, 25 bp, Homo sapien
tgggtgctctttgagttctttagtt

SEQ ID NO: 5443295 - DNA, 25 bp, Homo sapien
cttcgaccagcagtctgagcaaggc

SEQ ID NO: 5443296 - DNA, 25 bp, Homo sapien
tgatggctcattgccctcagagggc

SEQ ID NO: 5443297 - DNA, 25 bp, Homo sapien
agaaataaatgaaggaataagaaag

SEQ ID NO: 5443298 - DNA, 25 bp, Homo sapien
tgaatgcgtccagatactcctcagg

SEQ ID NO: 5443299 - DNA, 25 bp, Homo sapien
tgtttactacgcctgaggtcctggg

SEQ ID NO: 5443300 - DNA, 25 bp, Homo sapien
caaaaacgagttctgctcatgactg

SEQ ID NO: 5443301 - DNA, 25 bp, Homo sapien
caagggtctggaatcaatcatagct

SEQ ID NO: 5443302 - DNA, 25 bp, Homo sapien
cttaggacgactaagtggaatatca

SEQ ID NO: 5443303 - DNA, 25 bp, Homo sapien
tttcttaggacgactaagtggaata

SEQ ID NO: 5443304 - DNA, 25 bp, Homo sapien
ttaggacgactaagtggaatatcat

SEQ ID NO: 5443305 - DNA, 25 bp, Homo sapien
tcttaggacgactaagtggaatatc

SEQ ID NO: 5443306 - DNA, 25 bp, Homo sapien
ataaagcaagaaaaaacgtcaacag

SEQ ID NO: 5443307 - DNA, 25 bp, Homo sapien
taaagcaagaaaaaacgtcaacaga

SEQ ID NO: 5443308 - DNA, 25 bp, Homo sapien
cttggcacaggtggaagagctcgtg

SEQ ID NO: 5443309 - DNA, 25 bp, Homo sapien
gcacaggtggaagagctcgtggagg

SEQ ID NO: 5443310 - DNA, 25 bp, Homo sapien
tggcacaggtggaagagctcgtgga

SEQ ID NO: 5443311 - DNA, 25 bp, Homo sapien
caggtggaagagctcgtggaggacg

SEQ ID NO: 5443312 - DNA, 25 bp, Homo sapien
ggcccccaagcacctggcgccccac

SEQ ID NO: 5443313 - DNA, 25 bp, Homo sapien
tctgcgtttagccggcctcggcggc

SEQ ID NO: 5443314 - DNA, 25 bp, Homo sapien
ggccgccggcccccaagcacctggc

SEQ ID NO: 5443315 - DNA, 25 bp, Homo sapien
cgccggcccccaagcacctggcgcc

SEQ ID NO: 5443316 - DNA, 25 bp, Homo sapien
cagaaatctggcgaccgtggcgctg

SEQ ID NO: 5443317 - DNA, 25 bp, Homo sapien
tttcctaagtggtggcggtgatttg

SEQ ID NO: 5443318 - DNA, 25 bp, Homo sapien
cacagctttcccgtggtttcctaag

SEQ ID NO: 5443319 - DNA, 25 bp, Homo sapien
attggccagtccagactagccctgc

SEQ ID NO: 5443320 - DNA, 25 bp, Homo sapien
tctcgaggccgacgcgcccctcgcc

SEQ ID NO: 5443321 - DNA, 25 bp, Homo sapien
ccgccacctctcgaggccgacgcgc

SEQ ID NO: 5443322 - DNA, 25 bp, Homo sapien
gccacctctcgaggccgacgcgccc

SEQ ID NO: 5443323 - DNA, 25 bp, Homo sapien
cctctcgaggccgacgcgcccctcg

SEQ ID NO: 5443324 - DNA, 25 bp, Homo sapien
gccgagcccccgagtcagtcctcat

SEQ ID NO: 5443325 - DNA, 25 bp, Homo sapien
agccgagcccccgagtcagtcctca

SEQ ID NO: 5443326 - DNA, 25 bp, Homo sapien
gggctgccccggcgcaaccgccggc

SEQ ID NO: 5443327 - DNA, 25 bp, Homo sapien
ccccgcgacgcagcggcctccggga

SEQ ID NO: 5443328 - DNA, 25 bp, Homo sapien
agctccccgcgacgcagcggcctcc

SEQ ID NO: 5443329 - DNA, 25 bp, Homo sapien
ccagctccccgcgacgcagcggcct

SEQ ID NO: 5443330 - DNA, 25 bp, Homo sapien
ttcgtggcgcctggcgaggcagccg

SEQ ID NO: 5443331 - DNA, 25 bp, Homo sapien
gggcttcgtggcgcctggcgaggca

SEQ ID NO: 5443332 - DNA, 25 bp, Homo sapien
gacgccggggcttcgtggcgcctgg

SEQ ID NO: 5443333 - DNA, 25 bp, Homo sapien
ctgtgggacgccggggcttcgtggc

SEQ ID NO: 5443334 - DNA, 25 bp, Homo sapien
atttctaccacagctgcatatgagg

SEQ ID NO: 5443335 - DNA, 25 bp, Homo sapien
catgtgaaatctgcgaaaggttctc

SEQ ID NO: 5443336 - DNA, 25 bp, Homo sapien
tatggatcgctgtatcaagggtaca

SEQ ID NO: 5443337 - DNA, 25 bp, Homo sapien
caagggtacagtgttaaaactccag

SEQ ID NO: 5443338 - DNA, 25 bp, Homo sapien
tcattgagactcagtatctgaggaa

SEQ ID NO: 5443339 - DNA, 25 bp, Homo sapien
gcatcgtgcaagctgtcattcacaa

SEQ ID NO: 5443340 - DNA, 25 bp, Homo sapien
aacaactgggcacatgcatcgtgca

SEQ ID NO: 5443341 - DNA, 25 bp, Homo sapien
acaatcacatgatcaaaaaattggc

SEQ ID NO: 5443342 - DNA, 25 bp, Homo sapien
tcctgagccttctgtatggcagaca

SEQ ID NO: 5443343 - DNA, 25 bp, Homo sapien
gtgcttgctttggtagcacacagac

SEQ ID NO: 5443344 - DNA, 25 bp, Homo sapien
tgtgcttgctttggtagcacacaga

SEQ ID NO: 5443345 - DNA, 25 bp, Homo sapien
taaatatgacatagggcttcagttc

SEQ ID NO: 5443346 - DNA, 25 bp, Homo sapien
catagtagtcagtaataaccttggc

SEQ ID NO: 5443347 - DNA, 25 bp, Homo sapien
ttcatacacctcatattcgatggct

SEQ ID NO: 5443348 - DNA, 25 bp, Homo sapien
taaccttggcatttttccgagattg

SEQ ID NO: 5443349 - DNA, 25 bp, Homo sapien
gagtaggattctatacatgatctca

SEQ ID NO: 5443350 - DNA, 25 bp, Homo sapien
tactagcagagtaagagtctataca

SEQ ID NO: 5443351 - DNA, 25 bp, Homo sapien
caaagacagactctcaaggtggatc

SEQ ID NO: 5443352 - DNA, 25 bp, Homo sapien
gcccaggagttccattgccagacca

SEQ ID NO: 5443353 - DNA, 25 bp, Homo sapien
gacacagatctttccttcgacaagg

SEQ ID NO: 5443354 - DNA, 25 bp, Homo sapien
cttcgacaaggactgtttgaacagc

SEQ ID NO: 5443355 - DNA, 25 bp, Homo sapien
gaacagcatccacactagtgccata

SEQ ID NO: 5443356 - DNA, 25 bp, Homo sapien
gaggctctaggtccatgacacagat

SEQ ID NO: 5443357 - DNA, 25 bp, Homo sapien
ttcaaatgtttccttggacacatag

SEQ ID NO: 5443358 - DNA, 25 bp, Homo sapien
tagtgatactcacgcccattcattt

SEQ ID NO: 5443359 - DNA, 25 bp, Homo sapien
tttccttggacacatagtgatactc

SEQ ID NO: 5443360 - DNA, 25 bp, Homo sapien
ccattcatttcgtaactctttttag

SEQ ID NO: 5443361 - DNA, 25 bp, Homo sapien
tagatgcctgaaagctcccaggtag

SEQ ID NO: 5443362 - DNA, 25 bp, Homo sapien
ccttatgtgaggcaagatcttcccc

SEQ ID NO: 5443363 - DNA, 25 bp, Homo sapien
tcaagtagaagctagaaaccggcct

SEQ ID NO: 5443364 - DNA, 25 bp, Homo sapien
gatgcattaatacccaaccgagtgg

SEQ ID NO: 5443365 - DNA, 25 bp, Homo sapien
tcatttactccaacaccagagggtc

SEQ ID NO: 5443366 - DNA, 25 bp, Homo sapien
gaaaatggctgggattaaattcaat

SEQ ID NO: 5443367 - DNA, 25 bp, Homo sapien
gagctcatttactccaacaccagag

SEQ ID NO: 5443368 - DNA, 25 bp, Homo sapien
ttcaataagttgtcttctgagctca

SEQ ID NO: 5443369 - DNA, 25 bp, Homo sapien
cactatgaggcggtacttgtctgaa

SEQ ID NO: 5443370 - DNA, 25 bp, Homo sapien
ggctgaggtgagacttcctgcgaca

SEQ ID NO: 5443371 - DNA, 25 bp, Homo sapien
tcctgcgacaaaggcgcatgctgcg

SEQ ID NO: 5443372 - DNA, 25 bp, Homo sapien
tctgaagggcgtcgctggtacctca

SEQ ID NO: 5443373 - DNA, 25 bp, Homo sapien
aagcccagagcggttttacatgagt

SEQ ID NO: 5443374 - DNA, 25 bp, Homo sapien
tgggaaccaaccttctagaccctgc

SEQ ID NO: 5443375 - DNA, 25 bp, Homo sapien
ttacatgagtggtacctggtccttc

SEQ ID NO: 5443376 - DNA, 25 bp, Homo sapien
gaaactagaatgaggaacaggtctg

SEQ ID NO: 5443377 - DNA, 25 bp, Homo sapien
ataaagaacttctgaccgtagccaa

SEQ ID NO: 5443378 - DNA, 25 bp, Homo sapien
acttctgaccgtagccaacaaactc

SEQ ID NO: 5443379 - DNA, 25 bp, Homo sapien
gaacttctgaccgtagccaacaaac

SEQ ID NO: 5443380 - DNA, 25 bp, Homo sapien
aagaacttctgaccgtagccaacaa

SEQ ID NO: 5443381 - DNA, 25 bp, Homo sapien
aaaatacatacccagttcttatgtt

SEQ ID NO: 5443382 - DNA, 25 bp, Homo sapien
gcatttttcatcctattattcacac

SEQ ID NO: 5443383 - DNA, 25 bp, Homo sapien
ctagtatggttaaagccaaaacgag

SEQ ID NO: 5443384 - DNA, 25 bp, Homo sapien
gacgcacttcacagaatttgagcgt

SEQ ID NO: 5443385 - DNA, 25 bp, Homo sapien
caaatcaaggcaaatgacataagca

SEQ ID NO: 5443386 - DNA, 25 bp, Homo sapien
gatcatgttagccatcaaatcaagg

SEQ ID NO: 5443387 - DNA, 25 bp, Homo sapien
gacgtgcacgtcaccactagcaaaa

SEQ ID NO: 5443388 - DNA, 25 bp, Homo sapien
tatttgggtaagtgcagaaacagac

SEQ ID NO: 5443389 - DNA, 25 bp, Homo sapien
atgttattacatgaccatctacact

SEQ ID NO: 5443390 - DNA, 25 bp, Homo sapien
ttttcctaaatcaaggtcgaatcga

SEQ ID NO: 5443391 - DNA, 25 bp, Homo sapien
tcgaatcgatggtgtctctatggca

SEQ ID NO: 5443392 - DNA, 25 bp, Homo sapien
acacatggtattcggcagttgagcc

SEQ ID NO: 5443393 - DNA, 25 bp, Homo sapien
tctctatggcatatatcagctttac

SEQ ID NO: 5443394 - DNA, 25 bp, Homo sapien
gactgttggatactgctcggctttg

SEQ ID NO: 5443395 - DNA, 25 bp, Homo sapien
gatgtgagataaaccaacttccgca

SEQ ID NO: 5443396 - DNA, 25 bp, Homo sapien
caatgcatgcgtccttggatcaggc

SEQ ID NO: 5443397 - DNA, 25 bp, Homo sapien
tacgtaggcttgatcaggtggctga

SEQ ID NO: 5443398 - DNA, 25 bp, Homo sapien
ccaagtgttctaccatcggatatgc

SEQ ID NO: 5443399 - DNA, 25 bp, Homo sapien
tgtcagactaaggttctccaactgg

SEQ ID NO: 5443400 - DNA, 25 bp, Homo sapien
ctagactagcctgtaaagcaaagac

SEQ ID NO: 5443401 - DNA, 25 bp, Homo sapien
ttttctagtagatcagtgggaacct

SEQ ID NO: 5443402 - DNA, 25 bp, Homo sapien
tgcttccacacatttctcatcaatc

SEQ ID NO: 5443403 - DNA, 25 bp, Homo sapien
cacacatttctcatcaatcttcatg

SEQ ID NO: 5443404 - DNA, 25 bp, Homo sapien
ttctcatcaatcttcatgtcatctt

SEQ ID NO: 5443405 - DNA, 25 bp, Homo sapien
catttctcatcaatcttcatgtcat

SEQ ID NO: 5443406 - DNA, 25 bp, Homo sapien
tatagaaagggagaaacagaattta

SEQ ID NO: 5443407 - DNA, 25 bp, Homo sapien
aaagagtatagaaagggagaaacag

SEQ ID NO: 5443408 - DNA, 25 bp, Homo sapien
agtatagaaagggagaaacagaatt

SEQ ID NO: 5443409 - DNA, 25 bp, Homo sapien
agagtatagaaagggagaaacagaa

SEQ ID NO: 5443410 - DNA, 25 bp, Homo sapien
tacgtgggaggctgaggcaggagaa

SEQ ID NO: 5443411 - DNA, 25 bp, Homo sapien
ttgcagtgagtcgagatagtgccat

SEQ ID NO: 5443412 - DNA, 25 bp, Homo sapien
atcgtttgaacccgggaggcagagg

SEQ ID NO: 5443413 - DNA, 25 bp, Homo sapien
ctatataatcccagctacgtgggag

SEQ ID NO: 5443414 - DNA, 25 bp, Homo sapien
tgcacgaaaagctcaggcatatggt

SEQ ID NO: 5443415 - DNA, 25 bp, Homo sapien
taggctaggattgagaaaatgcacg

SEQ ID NO: 5443416 - DNA, 25 bp, Homo sapien
gcatgatctaaacccagcttggaag

SEQ ID NO: 5443417 - DNA, 25 bp, Homo sapien
catcttacgctaccattagagtgga

SEQ ID NO: 5443418 - DNA, 25 bp, Homo sapien
aggctggtacggctgagaccaccag

SEQ ID NO: 5443419 - DNA, 25 bp, Homo sapien
gaggctggtacggctgagaccacca

SEQ ID NO: 5443420 - DNA, 25 bp, Homo sapien
ggcaccttttagctgggtcctccca

SEQ ID NO: 5443421 - DNA, 25 bp, Homo sapien
tgaggtctcaactcagccttgaaag

SEQ ID NO: 5443422 - DNA, 25 bp, Homo sapien
tcaaggagccagtggatgcagtgtc

SEQ ID NO: 5443423 - DNA, 25 bp, Homo sapien
tgtcaaaactcagtagcataaggtg

SEQ ID NO: 5443424 - DNA, 25 bp, Homo sapien
tcattctggtccacaatctggagga

SEQ ID NO: 5443425 - DNA, 25 bp, Homo sapien
caggtagcagggtctgagatttttc

SEQ ID NO: 5443426 - DNA, 25 bp, Homo sapien
ggaaaggcaatccagcgtccatgca

SEQ ID NO: 5443427 - DNA, 25 bp, Homo sapien
atttttcgggcctgccaccagaggg

SEQ ID NO: 5443428 - DNA, 25 bp, Homo sapien
agtactcagtcatggcacggacgta

SEQ ID NO: 5443429 - DNA, 25 bp, Homo sapien
actcagtcatggcacggacgtacac

SEQ ID NO: 5443430 - DNA, 25 bp, Homo sapien
ccagtactcagtcatggcacggacg

SEQ ID NO: 5443431 - DNA, 25 bp, Homo sapien
gggccagtactcagtcatggcacgg

SEQ ID NO: 5443432 - DNA, 25 bp, Homo sapien
gtcagagactggaaccaccttgaac

SEQ ID NO: 5443433 - DNA, 25 bp, Homo sapien
acatgattgtgcctcgagacatggc

SEQ ID NO: 5443434 - DNA, 25 bp, Homo sapien
cagagactggaaccaccttgaacat

SEQ ID NO: 5443435 - DNA, 25 bp, Homo sapien
ccaccttgaacatgattgtgcctcg

SEQ ID NO: 5443436 - DNA, 25 bp, Homo sapien
caccccaggttcagtttccaatgga

SEQ ID NO: 5443437 - DNA, 25 bp, Homo sapien
gggccctggcagtcttcccgtggct

SEQ ID NO: 5443438 - DNA, 25 bp, Homo sapien
ccaccccaggttcagtttccaatgg

SEQ ID NO: 5443439 - DNA, 25 bp, Homo sapien
cctggcagtcttcccgtggctgaag

SEQ ID NO: 5443440 - DNA, 25 bp, Homo sapien
gtcagcaagtgacatgggtgacaga

SEQ ID NO: 5443441 - DNA, 25 bp, Homo sapien
cagcaagtgacatgggtgacagaca

SEQ ID NO: 5443442 - DNA, 25 bp, Homo sapien
caagtgacatgggtgacagacaagg

SEQ ID NO: 5443443 - DNA, 25 bp, Homo sapien
ctcggggtagaggagggaggtcagc

SEQ ID NO: 5443444 - DNA, 25 bp, Homo sapien
gaaactccattcacttctaccagtt

SEQ ID NO: 5443445 - DNA, 25 bp, Homo sapien
cagaatatggatcacttgttcaggg

SEQ ID NO: 5443446 - DNA, 25 bp, Homo sapien
cagtttgtctccagcatatagcaac

SEQ ID NO: 5443447 - DNA, 25 bp, Homo sapien
tgttcagggtccagtccctcaactg

SEQ ID NO: 5443448 - DNA, 25 bp, Homo sapien
gccagcccaccgtggatgatcctgg

SEQ ID NO: 5443449 - DNA, 25 bp, Homo sapien
tccgccagcccaccgtggatgatcc

SEQ ID NO: 5443450 - DNA, 25 bp, Homo sapien
cttctctccgccagcccaccgtgga

SEQ ID NO: 5443451 - DNA, 25 bp, Homo sapien
tctccgccagcccaccgtggatgat

SEQ ID NO: 5443452 - DNA, 25 bp, Homo sapien
tcccctgtcatctcgtggcgcttga

SEQ ID NO: 5443453 - DNA, 25 bp, Homo sapien
cccctgtcatctcgtggcgcttgat

SEQ ID NO: 5443454 - DNA, 25 bp, Homo sapien
atgtcccctgtcatctcgtggcgct

SEQ ID NO: 5443455 - DNA, 25 bp, Homo sapien
tgtcccctgtcatctcgtggcgctt

SEQ ID NO: 5443456 - DNA, 25 bp, Homo sapien
ctaaatggaaagataaaaaatgatt

SEQ ID NO: 5443457 - DNA, 25 bp, Homo sapien
atggaaagataaaaaatgatttcct

SEQ ID NO: 5443458 - DNA, 25 bp, Homo sapien
cctaaatggaaagataaaaaatgat

SEQ ID NO: 5443459 - DNA, 25 bp, Homo sapien
tttttcactaaacaaacaatcctca

SEQ ID NO: 5443460 - DNA, 25 bp, Homo sapien
tcactaaacaaacaatcctcattgc

SEQ ID NO: 5443461 - DNA, 25 bp, Homo sapien
aatctttctgagctatcgtgtcatg

SEQ ID NO: 5443462 - DNA, 25 bp, Homo sapien
ttctgagctatcgtgtcatgggcac

SEQ ID NO: 5443463 - DNA, 25 bp, Homo sapien
ctcttggatctcaggggaagtaggg

SEQ ID NO: 5443464 - DNA, 25 bp, Homo sapien
ctggagcatttgtctcagctcttgg

SEQ ID NO: 5443465 - DNA, 25 bp, Homo sapien
agcctggagcatttgtctcagctct

SEQ ID NO: 5443466 - DNA, 25 bp, Homo sapien
tcttggatctcaggggaagtagggg

SEQ ID NO: 5443467 - DNA, 25 bp, Homo sapien
acatcagagctctactatcctgtgg

SEQ ID NO: 5443468 - DNA, 25 bp, Homo sapien
tcatttgaactagcaatgtggggaa

SEQ ID NO: 5443469 - DNA, 25 bp, Homo sapien
gagctctactatcctgtggaataaa

SEQ ID NO: 5443470 - DNA, 25 bp, Homo sapien
tactatcctgtggaataaaatctcc

SEQ ID NO: 5443471 - DNA, 25 bp, Homo sapien
acacctgtgcatgtggtgtggcagg

SEQ ID NO: 5443472 - DNA, 25 bp, Homo sapien
ctcataggataacacctgtgcatgt

SEQ ID NO: 5443473 - DNA, 25 bp, Homo sapien
cacctgtgcatgtggtgtggcagga

SEQ ID NO: 5443474 - DNA, 25 bp, Homo sapien
gggagggagaattgatattgataat

SEQ ID NO: 5443475 - DNA, 25 bp, Homo sapien
caactgcaccaatggctgcacagca

SEQ ID NO: 5443476 - DNA, 25 bp, Homo sapien
taatatgactattgccattttggat

SEQ ID NO: 5443477 - DNA, 25 bp, Homo sapien
cattttggatttaagactctcaaag

SEQ ID NO: 5443478 - DNA, 25 bp, Homo sapien
tcgtggtggctgttttgtgattcca

SEQ ID NO: 5443479 - DNA, 25 bp, Homo sapien
ctgcaaggacaaacggttgtagcca

SEQ ID NO: 5443480 - DNA, 25 bp, Homo sapien
tttatccagggttgctgcaaggaca

SEQ ID NO: 5443481 - DNA, 25 bp, Homo sapien
ccatcgtggtggctgttttgtgatt

SEQ ID NO: 5443482 - DNA, 25 bp, Homo sapien
aaaggcttccgagcaaagaagcact

SEQ ID NO: 5443483 - DNA, 25 bp, Homo sapien
gcaagcaaaggcttccgagcaaaga

SEQ ID NO: 5443484 - DNA, 25 bp, Homo sapien
ggcttccgagcaaagaagcactcac

SEQ ID NO: 5443485 - DNA, 25 bp, Homo sapien
ttcagcaagcaaaggcttccgagca

SEQ ID NO: 5443486 - DNA, 25 bp, Homo sapien
tggaggagatcgtacaagagacaca

SEQ ID NO: 5443487 - DNA, 25 bp, Homo sapien
gagcctgaagccacggcgagtggag

SEQ ID NO: 5443488 - DNA, 25 bp, Homo sapien
cagactcagctcttgcagcacaagc

SEQ ID NO: 5443489 - DNA, 25 bp, Homo sapien
cattcacatctctgccgtagaacag

SEQ ID NO: 5443490 - DNA, 25 bp, Homo sapien
attctgtggattggtggctgtagaa

SEQ ID NO: 5443491 - DNA, 25 bp, Homo sapien
tggattggtggctgtagaaagcttc

SEQ ID NO: 5443492 - DNA, 25 bp, Homo sapien
ggctgtagaaagcttcatgtccttc

SEQ ID NO: 5443493 - DNA, 25 bp, Homo sapien
tggtggctgtagaaagcttcatgtc

SEQ ID NO: 5443494 - DNA, 25 bp, Homo sapien
actaggaagcgggtcaatacacggc

SEQ ID NO: 5443495 - DNA, 25 bp, Homo sapien
attcaggactaggaagcgggtcaat

SEQ ID NO: 5443496 - DNA, 25 bp, Homo sapien
cgggtcaatacacggcacacagctc

SEQ ID NO: 5443497 - DNA, 25 bp, Homo sapien
aggaagcgggtcaatacacggcaca

SEQ ID NO: 5443498 - DNA, 25 bp, Homo sapien
cctcgacctcttaggttcaaatcat

SEQ ID NO: 5443499 - DNA, 25 bp, Homo sapien
cctcttaggttcaaatcatcctgct

SEQ ID NO: 5443500 - DNA, 25 bp, Homo sapien
gcaccctcgacctcttaggttcaaa

SEQ ID NO: 5443501 - DNA, 25 bp, Homo sapien
gacctcttaggttcaaatcatcctg

SEQ ID NO: 5443502 - DNA, 25 bp, Homo sapien
ggctactgctctgtcaccctagggt

SEQ ID NO: 5443503 - DNA, 25 bp, Homo sapien
acaagttgccctacacagtgaagaa

SEQ ID NO: 5443504 - DNA, 25 bp, Homo sapien
tctgtctacctgctccaagatggca

SEQ ID NO: 5443505 - DNA, 25 bp, Homo sapien
gaagaatcgcctcatgccctgtata

SEQ ID NO: 5443506 - DNA, 25 bp, Homo sapien
tcaaggaggtattcagtagagttaa

SEQ ID NO: 5443507 - DNA, 25 bp, Homo sapien
gaaagatgctgatgcctggcatgat

SEQ ID NO: 5443508 - DNA, 25 bp, Homo sapien
gggcagaagcggatcttagagataa

SEQ ID NO: 5443509 - DNA, 25 bp, Homo sapien
catgtagtaaaatcgagttttcctc

SEQ ID NO: 5443510 - DNA, 25 bp, Homo sapien
tccatgacttctgtaccaaatttgt

SEQ ID NO: 5443511 - DNA, 25 bp, Homo sapien
tgagagtgagaattcttgattgaga

SEQ ID NO: 5443512 - DNA, 25 bp, Homo sapien
taccaaatttgtcagttgaagctta

SEQ ID NO: 5443513 - DNA, 25 bp, Homo sapien
ctatttctgctatcttgagagtgag

SEQ ID NO: 5443514 - DNA, 25 bp, Homo sapien
gactgatgcctaaggaatttgtcct

SEQ ID NO: 5443515 - DNA, 25 bp, Homo sapien
taagtaagcacccaccacatgcaat

SEQ ID NO: 5443516 - DNA, 25 bp, Homo sapien
ggatagccagttcttgactcagaag

SEQ ID NO: 5443517 - DNA, 25 bp, Homo sapien
catgcaattccggactgagtacaca

SEQ ID NO: 5443518 - DNA, 25 bp, Homo sapien
aaactgacaggcaagctaggcagtt

SEQ ID NO: 5443519 - DNA, 25 bp, Homo sapien
cagttatggatacatcttctggtaa

SEQ ID NO: 5443520 - DNA, 25 bp, Homo sapien
gacaggcaagctaggcagttatgga

SEQ ID NO: 5443521 - DNA, 25 bp, Homo sapien
taggcagttatggatacatcttctg

SEQ ID NO: 5443522 - DNA, 25 bp, Homo sapien
gcaagactgtaaacatgcatgttgc

SEQ ID NO: 5443523 - DNA, 25 bp, Homo sapien
tgcatgttgctcctatccagacaaa

SEQ ID NO: 5443524 - DNA, 25 bp, Homo sapien
gctcctatccagacaaaagctttag

SEQ ID NO: 5443525 - DNA, 25 bp, Homo sapien
aagctttagtaggatactagtggcc

SEQ ID NO: 5443526 - DNA, 25 bp, Homo sapien
cgcatgtgaatgaccattgtaaact

SEQ ID NO: 5443527 - DNA, 25 bp, Homo sapien
gcattcattacgcatgtgaatgacc

SEQ ID NO: 5443528 - DNA, 25 bp, Homo sapien
tgtaaactgctgcaggagtgccaag

SEQ ID NO: 5443529 - DNA, 25 bp, Homo sapien
tgggctgctgtaagcattcattacg

SEQ ID NO: 5443530 - DNA, 25 bp, Homo sapien
ccaatacttagaggcatggattaca

SEQ ID NO: 5443531 - DNA, 25 bp, Homo sapien
gctagaaagggtgctataactattg

SEQ ID NO: 5443532 - DNA, 25 bp, Homo sapien
taatagatttctttggagacccgtg

SEQ ID NO: 5443533 - DNA, 25 bp, Homo sapien
gagggacttttgaggccaatactta

SEQ ID NO: 5443534 - DNA, 25 bp, Homo sapien
cattcacaggccttggaatacagcg

SEQ ID NO: 5443535 - DNA, 25 bp, Homo sapien
caaatgaggttcctagcagctcaga

SEQ ID NO: 5443536 - DNA, 25 bp, Homo sapien
gaatacagcgtttgcacatggacaa

SEQ ID NO: 5443537 - DNA, 25 bp, Homo sapien
ggacactctgtatgctcaccacggt

SEQ ID NO: 5443538 - DNA, 25 bp, Homo sapien
tcttgcaaacggatcggggtaactg

SEQ ID NO: 5443539 - DNA, 25 bp, Homo sapien
ctggttcttgcaaacggatcggggt

SEQ ID NO: 5443540 - DNA, 25 bp, Homo sapien
ttgcaaacggatcggggtaactgca

SEQ ID NO: 5443541 - DNA, 25 bp, Homo sapien
cggatcggggtaactgcaggtggat

SEQ ID NO: 5443542 - DNA, 25 bp, Homo sapien
cactacaggaagactccagatggtg

SEQ ID NO: 5443543 - DNA, 25 bp, Homo sapien
cctttactgtaggaagggatatcct

SEQ ID NO: 5443544 - DNA, 25 bp, Homo sapien
taatataagaagctctactggaagc

SEQ ID NO: 5443545 - DNA, 25 bp, Homo sapien
gaacttatcataggccaagaactgg

SEQ ID NO: 5443546 - DNA, 25 bp, Homo sapien
ctgatggcccaacagatttaattga

SEQ ID NO: 5443547 - DNA, 25 bp, Homo sapien
gcctacttgtaattagtatagacaa

SEQ ID NO: 5443548 - DNA, 25 bp, Homo sapien
tgttcccttctagttcccctatcta

SEQ ID NO: 5443549 - DNA, 25 bp, Homo sapien
tatctagtggctgtcttttgcctac

SEQ ID NO: 5443550 - DNA, 25 bp, Homo sapien
gggtccattagatcctcaatgaggt

SEQ ID NO: 5443551 - DNA, 25 bp, Homo sapien
ccatgctgaagataggggtccatta

SEQ ID NO: 5443552 - DNA, 25 bp, Homo sapien
cctcaatgaggtgtacctcagagcc

SEQ ID NO: 5443553 - DNA, 25 bp, Homo sapien
cttcaaggtggtgaacattataccc

SEQ ID NO: 5443554 - DNA, 25 bp, Homo sapien
tcttcgtggagtgacgccaggacac

SEQ ID NO: 5443555 - DNA, 25 bp, Homo sapien
aaaacaggaaacaagtcatccatgg

SEQ ID NO: 5443556 - DNA, 25 bp, Homo sapien
caaaagtctgctggatgaccttaag

SEQ ID NO: 5443557 - DNA, 25 bp, Homo sapien
ggcccgtagcaccacatataagaaa

SEQ ID NO: 5443558 - DNA, 25 bp, Homo sapien
caagcatctttcgtggttggcaaaa

SEQ ID NO: 5443559 - DNA, 25 bp, Homo sapien
ctactgctgaggcaaaacaagcatc

SEQ ID NO: 5443560 - DNA, 25 bp, Homo sapien
aagcatctttcgtggttggcaaaac

SEQ ID NO: 5443561 - DNA, 25 bp, Homo sapien
gctgaggcaaaacaagcatctttcg

SEQ ID NO: 5443562 - DNA, 25 bp, Homo sapien
tttttactctctccaaggattgaca

SEQ ID NO: 5443563 - DNA, 25 bp, Homo sapien
tgacaaggttgctggccaaaatttc

SEQ ID NO: 5443564 - DNA, 25 bp, Homo sapien
tctctccaaggattgacaaggttgc

SEQ ID NO: 5443565 - DNA, 25 bp, Homo sapien
tactctctccaaggattgacaaggt

SEQ ID NO: 5443566 - DNA, 25 bp, Homo sapien
ttttcctggtagcacaaatagagat

SEQ ID NO: 5443567 - DNA, 25 bp, Homo sapien
ttcctggtagcacaaatagagattg

SEQ ID NO: 5443568 - DNA, 25 bp, Homo sapien
ttggggaggtggaatcagctttatc

SEQ ID NO: 5443569 - DNA, 25 bp, Homo sapien
aggtggaatcagctttatcactgcc

SEQ ID NO: 5443570 - DNA, 25 bp, Homo sapien
gcataaagcataaacagcggtgggt

SEQ ID NO: 5443571 - DNA, 25 bp, Homo sapien
tagagccgaggtagcagcacaggaa

SEQ ID NO: 5443572 - DNA, 25 bp, Homo sapien
cccaggagagcaatatctggctgct

SEQ ID NO: 5443573 - DNA, 25 bp, Homo sapien
gctgcttatttagtcgaaggacaca

SEQ ID NO: 5443574 - DNA, 25 bp, Homo sapien
gacttcccagtgcaaaaagacttcc

SEQ ID NO: 5443575 - DNA, 25 bp, Homo sapien
gctctggtgattcagatcgggaatc

SEQ ID NO: 5443576 - DNA, 25 bp, Homo sapien
gattcagatcgggaatctgacttcc

SEQ ID NO: 5443577 - DNA, 25 bp, Homo sapien
tctgacttcccagtgcaaaaagact

SEQ ID NO: 5443578 - DNA, 25 bp, Homo sapien
tttatattaactctgagcaaggacc

SEQ ID NO: 5443579 - DNA, 25 bp, Homo sapien
cacatatgtagttgtgttgcacgga

SEQ ID NO: 5443580 - DNA, 25 bp, Homo sapien
gagatatgtgttccttactggcaaa

SEQ ID NO: 5443581 - DNA, 25 bp, Homo sapien
tacaatataagcaaacaccgacaga

SEQ ID NO: 5443582 - DNA, 25 bp, Homo sapien
ctggaaaattcgcttaagataggac

SEQ ID NO: 5443583 - DNA, 25 bp, Homo sapien
gataggacttaatctcctttacagc

SEQ ID NO: 5443584 - DNA, 25 bp, Homo sapien
aataacctgcggttggctcctacgc

SEQ ID NO: 5443585 - DNA, 25 bp, Homo sapien
ttacagcctcctgcaataacctgcg

SEQ ID NO: 5443586 - DNA, 25 bp, Homo sapien
attccaaactctctagtgtctgagt

SEQ ID NO: 5443587 - DNA, 25 bp, Homo sapien
caaactctctagtgtctgagtctgt

SEQ ID NO: 5443588 - DNA, 25 bp, Homo sapien
ctgtgaacgactcagtatttctgga

SEQ ID NO: 5443589 - DNA, 25 bp, Homo sapien
gtctgagtctgtgaacgactcagta

SEQ ID NO: 5443590 - DNA, 25 bp, Homo sapien
ctgggcagaaacatgagacacgtgt

SEQ ID NO: 5443591 - DNA, 25 bp, Homo sapien
gctatctttagaagcacctgagcta

SEQ ID NO: 5443592 - DNA, 25 bp, Homo sapien
gacacgtgtcgctgcattttgctgc

SEQ ID NO: 5443593 - DNA, 25 bp, Homo sapien
ggcacttgggaattaagcttcgtaa

SEQ ID NO: 5443594 - DNA, 25 bp, Homo sapien
aacattcgtcaaacaccgctttcca

SEQ ID NO: 5443595 - DNA, 25 bp, Homo sapien
ccacagcaatattgtcccatgcttt

SEQ ID NO: 5443596 - DNA, 25 bp, Homo sapien
tcacagcccagttggcgccaacatt

SEQ ID NO: 5443597 - DNA, 25 bp, Homo sapien
tattgtcccatgctttccaaacttc

SEQ ID NO: 5443598 - DNA, 25 bp, Homo sapien
aaaataaccttcaatgtagtctcca

SEQ ID NO: 5443599 - DNA, 25 bp, Homo sapien
tcactctcatatagactaggtttga

SEQ ID NO: 5443600 - DNA, 25 bp, Homo sapien
ctaggtttgaagtaggttccagtga

SEQ ID NO: 5443601 - DNA, 25 bp, Homo sapien
tagtctccatttggcatagtcagtg

SEQ ID NO: 5443602 - DNA, 25 bp, Homo sapien
caaagcttcgcaaactttcagaaaa

SEQ ID NO: 5443603 - DNA, 25 bp, Homo sapien
gaaataataccaaagcttcgcaaac

SEQ ID NO: 5443604 - DNA, 25 bp, Homo sapien
aagtaatgcttaggcccagaagact

SEQ ID NO: 5443605 - DNA, 25 bp, Homo sapien
cccagaagacttcattggtgaattc

SEQ ID NO: 5443606 - DNA, 25 bp, Homo sapien
gaagccacatagaggagattgcatg

SEQ ID NO: 5443607 - DNA, 25 bp, Homo sapien
ccaggcatctacttgagaaatgaaa

SEQ ID NO: 5443608 - DNA, 25 bp, Homo sapien
ggtggtttgtacagccatgttgacc

SEQ ID NO: 5443609 - DNA, 25 bp, Homo sapien
tacaacttagcaattacactccagg

SEQ ID NO: 5443610 - DNA, 25 bp, Homo sapien
ttctccttcatagatagtatcatct

SEQ ID NO: 5443611 - DNA, 25 bp, Homo sapien
catcttcggaaagcaaaaccccatt

SEQ ID NO: 5443612 - DNA, 25 bp, Homo sapien
tagtatcatcttcggaaagcaaaac

SEQ ID NO: 5443613 - DNA, 25 bp, Homo sapien
tagatagtatcatcttcggaaagca

SEQ ID NO: 5443614 - DNA, 25 bp, Homo sapien
cctcgtagtataatccaaactgggt

SEQ ID NO: 5443615 - DNA, 25 bp, Homo sapien
catcttgccacattcccatatactt

SEQ ID NO: 5443616 - DNA, 25 bp, Homo sapien
cacaccattcccttgacacacatca

SEQ ID NO: 5443617 - DNA, 25 bp, Homo sapien
caaactgggtaaccaccacaccatt

SEQ ID NO: 5443618 - DNA, 25 bp, Homo sapien
tatcatcaaagacaccatatcctgc

SEQ ID NO: 5443619 - DNA, 25 bp, Homo sapien
tatcctgctttcttatccattaccc

SEQ ID NO: 5443620 - DNA, 25 bp, Homo sapien
atcaaagacaccatatcctgctttc

SEQ ID NO: 5443621 - DNA, 25 bp, Homo sapien
tagtgatatcatcaaagacaccata

SEQ ID NO: 5443622 - DNA, 25 bp, Homo sapien
gaccatgaccatgacgcatattatc

SEQ ID NO: 5443623 - DNA, 25 bp, Homo sapien
tggccaatgaacatactaggagaag

SEQ ID NO: 5443624 - DNA, 25 bp, Homo sapien
tttcccacttcgtagaagaccatga

SEQ ID NO: 5443625 - DNA, 25 bp, Homo sapien
gagaagaggacgtcaatttcccact

SEQ ID NO: 5443626 - DNA, 25 bp, Homo sapien
ccttgaccgcacatttttccttctt

SEQ ID NO: 5443627 - DNA, 25 bp, Homo sapien
ttgttcattgccttgtttgggattc

SEQ ID NO: 5443628 - DNA, 25 bp, Homo sapien
cttctttccaatggcccacataatg

SEQ ID NO: 5443629 - DNA, 25 bp, Homo sapien
tctttgttcattgccttgtttggga

SEQ ID NO: 5443630 - DNA, 25 bp, Homo sapien
tacatctttccatcaggccacttca

SEQ ID NO: 5443631 - DNA, 25 bp, Homo sapien
acatctttccatcaggccacttcaa

SEQ ID NO: 5443632 - DNA, 25 bp, Homo sapien
atacatctttccatcaggccacttc

SEQ ID NO: 5443633 - DNA, 25 bp, Homo sapien
tgaaagccagcgtccatcataggtg

SEQ ID NO: 5443634 - DNA, 25 bp, Homo sapien
cctttaggcgaggatccttgtagaa

SEQ ID NO: 5443635 - DNA, 25 bp, Homo sapien
tcaaagcctgatctacggcttggct

SEQ ID NO: 5443636 - DNA, 25 bp, Homo sapien
gaaagtatatttggcactgcgtgaa

SEQ ID NO: 5443637 - DNA, 25 bp, Homo sapien
gaactgctcctcaggtgtagttatc

SEQ ID NO: 5443638 - DNA, 25 bp, Homo sapien
aactgctcctcaggtgtagttatct

SEQ ID NO: 5443639 - DNA, 25 bp, Homo sapien
ggccagagggaaaacatggtgcgtg

SEQ ID NO: 5443640 - DNA, 25 bp, Homo sapien
tatgaaagcccatgtagacctcggg

SEQ ID NO: 5443641 - DNA, 25 bp, Homo sapien
tgaaacagagaacacggaggcactt

SEQ ID NO: 5443642 - DNA, 25 bp, Homo sapien
tagttaagcccatgtaggtgccacc

SEQ ID NO: 5443643 - DNA, 25 bp, Homo sapien
gctgcagaaccccttgaaatagtta

SEQ ID NO: 5443644 - DNA, 25 bp, Homo sapien
caattcacggaaaacctcccagcat

SEQ ID NO: 5443645 - DNA, 25 bp, Homo sapien
gggctcggttactactctcacacag

SEQ ID NO: 5443646 - DNA, 25 bp, Homo sapien
cacacagcagtcgacgctctggctt

SEQ ID NO: 5443647 - DNA, 25 bp, Homo sapien
catggaccagggcatcattaaagag

SEQ ID NO: 5443648 - DNA, 25 bp, Homo sapien
tttcctgccgagatggagagcaaga

SEQ ID NO: 5443649 - DNA, 25 bp, Homo sapien
ttttcctgccgagatggagagcaag

SEQ ID NO: 5443650 - DNA, 25 bp, Homo sapien
cttttcctgccgagatggagagcaa

SEQ ID NO: 5443651 - DNA, 25 bp, Homo sapien
tacaaacaactatgatccttggctt

SEQ ID NO: 5443652 - DNA, 25 bp, Homo sapien
acaactatgatccttggctttccaa

SEQ ID NO: 5443653 - DNA, 25 bp, Homo sapien
ttccaaatgtccaaagaggtataca

SEQ ID NO: 5443654 - DNA, 25 bp, Homo sapien
caaagaggtatacatgggagcttac

SEQ ID NO: 5443655 - DNA, 25 bp, Homo sapien
tgttttcgtcattcacttctgacaa

SEQ ID NO: 5443656 - DNA, 25 bp, Homo sapien
tagcaaaacttttgcgtaattatga

SEQ ID NO: 5443657 - DNA, 25 bp, Homo sapien
tatgaagtcgtctgattggcaagaa

SEQ ID NO: 5443658 - DNA, 25 bp, Homo sapien
aacaagtagcaagctttagcaaaac

SEQ ID NO: 5443659 - DNA, 25 bp, Homo sapien
agactaattgttctaggcagctgtg

SEQ ID NO: 5443660 - DNA, 25 bp, Homo sapien
aataaatggcaagactaattgttct

SEQ ID NO: 5443661 - DNA, 25 bp, Homo sapien
atttcaaagccaaaagtcacagcaa

SEQ ID NO: 5443662 - DNA, 25 bp, Homo sapien
taaatggcaagactaattgttctag

SEQ ID NO: 5443663 - DNA, 25 bp, Homo sapien
cacctaacaagagtttattatagga

SEQ ID NO: 5443664 - DNA, 25 bp, Homo sapien
gccaaaaattagctaatattcagtt

SEQ ID NO: 5443665 - DNA, 25 bp, Homo sapien
taaagatgattatatgtgaagattt

SEQ ID NO: 5443666 - DNA, 25 bp, Homo sapien
ctagtattacagttaacaagaaaca

SEQ ID NO: 5443667 - DNA, 25 bp, Homo sapien
taactggaaggtgtgggtttgctta

SEQ ID NO: 5443668 - DNA, 25 bp, Homo sapien
tttccctgagcactcgaaaacagag

SEQ ID NO: 5443669 - DNA, 25 bp, Homo sapien
gagcactcgaaaacagagcactata

SEQ ID NO: 5443670 - DNA, 25 bp, Homo sapien
ctttggcggagagaatgataactgg

SEQ ID NO: 5443671 - DNA, 25 bp, Homo sapien
gaaatttgtaatagatgtgcaatac

SEQ ID NO: 5443672 - DNA, 25 bp, Homo sapien
caggcttagcaagaagctggaatcc

SEQ ID NO: 5443673 - DNA, 25 bp, Homo sapien
tggaatcctcccataaccaggaaat

SEQ ID NO: 5443674 - DNA, 25 bp, Homo sapien
atggcaggcttagcaagaagctgga

SEQ ID NO: 5443675 - DNA, 25 bp, Homo sapien
gctggtgcttttcgcaggccccatg

SEQ ID NO: 5443676 - DNA, 25 bp, Homo sapien
accaacaaaacacgaactccctgag

SEQ ID NO: 5443677 - DNA, 25 bp, Homo sapien
tggagctccccgcaaatgcctggca

SEQ ID NO: 5443678 - DNA, 25 bp, Homo sapien
ccagggtacttcctctttgacaaca

SEQ ID NO: 5443679 - DNA, 25 bp, Homo sapien
tccagaactatagttggcttaagat

SEQ ID NO: 5443680 - DNA, 25 bp, Homo sapien
tacaatcagcagttggtcttgaaat

SEQ ID NO: 5443681 - DNA, 25 bp, Homo sapien
tgtaaattatgctatcactctgcta

SEQ ID NO: 5443682 - DNA, 25 bp, Homo sapien
agaaccagacttattatagtacatt

SEQ ID NO: 5443683 - DNA, 25 bp, Homo sapien
agtctcttctgattaaggagctgtt

SEQ ID NO: 5443684 - DNA, 25 bp, Homo sapien
tagtctcttctgattaaggagctgt

SEQ ID NO: 5443685 - DNA, 25 bp, Homo sapien
tctagtctcttctgattaaggagct

SEQ ID NO: 5443686 - DNA, 25 bp, Homo sapien
ctagtctcttctgattaaggagctg

SEQ ID NO: 5443687 - DNA, 25 bp, Homo sapien
tataactatccaagaagagacttga

SEQ ID NO: 5443688 - DNA, 25 bp, Homo sapien
gtataactatccaagaagagacttg

SEQ ID NO: 5443689 - DNA, 25 bp, Homo sapien
catgaaggaagctgctcaatgaggc

SEQ ID NO: 5443690 - DNA, 25 bp, Homo sapien
cacagcttgctgaatcggctagcca

SEQ ID NO: 5443691 - DNA, 25 bp, Homo sapien
tcaatgaggctccatgctgaccaat

SEQ ID NO: 5443692 - DNA, 25 bp, Homo sapien
tgaccaatgaggtaacacagcttgc

SEQ ID NO: 5443693 - DNA, 25 bp, Homo sapien
caaagtcctggagtgttcagcctac

SEQ ID NO: 5443694 - DNA, 25 bp, Homo sapien
tgaggaccactgagctaatgcaact

SEQ ID NO: 5443695 - DNA, 25 bp, Homo sapien
caaacattggaccactgaggatgct

SEQ ID NO: 5443696 - DNA, 25 bp, Homo sapien
tttccactagaaacaatgggcaggc

SEQ ID NO: 5443697 - DNA, 25 bp, Homo sapien
gggcagtgaggctattgacaaattg

SEQ ID NO: 5443698 - DNA, 25 bp, Homo sapien
caggggcagtgaggctattgacaaa

SEQ ID NO: 5443699 - DNA, 25 bp, Homo sapien
ggggcagtgaggctattgacaaatt

SEQ ID NO: 5443700 - DNA, 25 bp, Homo sapien
gcaggggcagtgaggctattgacaa

SEQ ID NO: 5443701 - DNA, 25 bp, Homo sapien
cacttagttttgaatagaatcgtct

SEQ ID NO: 5443702 - DNA, 25 bp, Homo sapien
gctgtcactctgcttatatatccaa

SEQ ID NO: 5443703 - DNA, 25 bp, Homo sapien
tttttatccaccaaggctaaatagc

SEQ ID NO: 5443704 - DNA, 25 bp, Homo sapien
gagactggcaatataccccataatg

SEQ ID NO: 5443705 - DNA, 25 bp, Homo sapien
tcttctgtatccactaaaaacaggg

SEQ ID NO: 5443706 - DNA, 25 bp, Homo sapien
tggagtcttagaaccactgtgattc

SEQ ID NO: 5443707 - DNA, 25 bp, Homo sapien
tctggaaggttgtcaccttctgtag

SEQ ID NO: 5443708 - DNA, 25 bp, Homo sapien
gtcggccactgtaatataacccagg

SEQ ID NO: 5443709 - DNA, 25 bp, Homo sapien
cagcaatttgcccaatcaaatgcag

SEQ ID NO: 5443710 - DNA, 25 bp, Homo sapien
tgcaggagtaagacggaatcccttg

SEQ ID NO: 5443711 - DNA, 25 bp, Homo sapien
gacggaatcccttgttcagctttta

SEQ ID NO: 5443712 - DNA, 25 bp, Homo sapien
aatttgcccaatcaaatgcagagca

SEQ ID NO: 5443713 - DNA, 25 bp, Homo sapien
ctgttgttggaaaatcggaatgccc

SEQ ID NO: 5443714 - DNA, 25 bp, Homo sapien
ggaatgcccaagttgaccaaaggta

SEQ ID NO: 5443715 - DNA, 25 bp, Homo sapien
ctttgcaagacgaggaactgttgtt

SEQ ID NO: 5443716 - DNA, 25 bp, Homo sapien
aaggtattgctaccccatgagtaaa

SEQ ID NO: 5443717 - DNA, 25 bp, Homo sapien
gggatttcgcagtaagtgcaagaga

SEQ ID NO: 5443718 - DNA, 25 bp, Homo sapien
gacattttacacacaacggttgaag

SEQ ID NO: 5443719 - DNA, 25 bp, Homo sapien
cacctgcctccagatggattacttc

SEQ ID NO: 5443720 - DNA, 25 bp, Homo sapien
gcaagagaatggtaaccacctgcct

SEQ ID NO: 5443721 - DNA, 25 bp, Homo sapien
actgtcctcgttttcacccgtgcag

SEQ ID NO: 5443722 - DNA, 25 bp, Homo sapien
cagagaaggcaggagcgcatctgct

SEQ ID NO: 5443723 - DNA, 25 bp, Homo sapien
tgtgggggtcagaaccactgtcctc

SEQ ID NO: 5443724 - DNA, 25 bp, Homo sapien
taggcagaacatcgccgtgccccag

SEQ ID NO: 5443725 - DNA, 25 bp, Homo sapien
gagagtcttcgactgcctccctctg

SEQ ID NO: 5443726 - DNA, 25 bp, Homo sapien
gggccaatggcactactgcctgcct

SEQ ID NO: 5443727 - DNA, 25 bp, Homo sapien
cttgtgacaacaatccagggaggga

SEQ ID NO: 5443728 - DNA, 25 bp, Homo sapien
gcttcataagtagcagccactctca

SEQ ID NO: 5443729 - DNA, 25 bp, Homo sapien
tattcagggcccaccaaaattcagt

SEQ ID NO: 5443730 - DNA, 25 bp, Homo sapien
tgggcaacaggctctactctactta

SEQ ID NO: 5443731 - DNA, 25 bp, Homo sapien
gggccagaacaaacataaagagtga

SEQ ID NO: 5443732 - DNA, 25 bp, Homo sapien
tctgcctacaattgaaggatctgcc

SEQ ID NO: 5443733 - DNA, 25 bp, Homo sapien
agtttctaaagaaaagcccatacag

SEQ ID NO: 5443734 - DNA, 25 bp, Homo sapien
tttattttataaaattgagcaggta

SEQ ID NO: 5443735 - DNA, 25 bp, Homo sapien
ttattttataaaattgagcaggtac

SEQ ID NO: 5443736 - DNA, 25 bp, Homo sapien
taatgagacccaactgacaaccggt

SEQ ID NO: 5443737 - DNA, 25 bp, Homo sapien
gacaggatttggttccggcacatac

SEQ ID NO: 5443738 - DNA, 25 bp, Homo sapien
tcctgactgctaacaaagggctggc

SEQ ID NO: 5443739 - DNA, 25 bp, Homo sapien
ccttttgcggctttgtcactgggaa

SEQ ID NO: 5443740 - DNA, 25 bp, Homo sapien
gtctgtcactgctccactatggaag

SEQ ID NO: 5443741 - DNA, 25 bp, Homo sapien
gggctacttggacaaatctccactg

SEQ ID NO: 5443742 - DNA, 25 bp, Homo sapien
gagtcccaaagctgtagacctcacc

SEQ ID NO: 5443743 - DNA, 25 bp, Homo sapien
gtaataacatattgcccaaccaggg

SEQ ID NO: 5443744 - DNA, 25 bp, Homo sapien
ctaactggcccccaacctctggaag

SEQ ID NO: 5443745 - DNA, 25 bp, Homo sapien
agacctacagctaactggcccccaa

SEQ ID NO: 5443746 - DNA, 25 bp, Homo sapien
caagacctacagctaactggccccc

SEQ ID NO: 5443747 - DNA, 25 bp, Homo sapien
ctacagctaactggcccccaacctc

SEQ ID NO: 5443748 - DNA, 25 bp, Homo sapien
taaatctcataggacaggtattgaa

SEQ ID NO: 5443749 - DNA, 25 bp, Homo sapien
gaaatccatgtttatcccatacaac

SEQ ID NO: 5443750 - DNA, 25 bp, Homo sapien
taaaactgatataagacaaactaga

SEQ ID NO: 5443751 - DNA, 25 bp, Homo sapien
taaagtcctgaagaataatattata

SEQ ID NO: 5443752 - DNA, 25 bp, Homo sapien
ttttataatatgcattgtgaattgc

SEQ ID NO: 5443753 - DNA, 25 bp, Homo sapien
atgcattgtgaattgctattcatgc

SEQ ID NO: 5443754 - DNA, 25 bp, Homo sapien
tatgcattgtgaattgctattcatg

SEQ ID NO: 5443755 - DNA, 25 bp, Homo sapien
tataatatgcattgtgaattgctat

SEQ ID NO: 5443756 - DNA, 25 bp, Homo sapien
actcaggcatttgttagcattgcag

SEQ ID NO: 5443757 - DNA, 25 bp, Homo sapien
gcatttgttagcattgcagttcgta

SEQ ID NO: 5443758 - DNA, 25 bp, Homo sapien
tagcattgcagttcgtatttgttac

SEQ ID NO: 5443759 - DNA, 25 bp, Homo sapien
gcagttcgtatttgttacgccattc

SEQ ID NO: 5443760 - DNA, 25 bp, Homo sapien
gatcctgcctgccagatatggacca

SEQ ID NO: 5443761 - DNA, 25 bp, Homo sapien
cctggcaatctctctggtgttatgg

SEQ ID NO: 5443762 - DNA, 25 bp, Homo sapien
gcaatctctctggtgttatgggaaa

SEQ ID NO: 5443763 - DNA, 25 bp, Homo sapien
tccatgtttcactccgagggctgcc

SEQ ID NO: 5443764 - DNA, 25 bp, Homo sapien
cactccatcaccaaatcattccttc

SEQ ID NO: 5443765 - DNA, 25 bp, Homo sapien
cggtcagtgggaacactccatcacc

SEQ ID NO: 5443766 - DNA, 25 bp, Homo sapien
gggaacactccatcaccaaatcatt

SEQ ID NO: 5443767 - DNA, 25 bp, Homo sapien
ttctttacagaaagtctatcaagac

SEQ ID NO: 5443768 - DNA, 25 bp, Homo sapien
aggtctttatcattccttaagaggg

SEQ ID NO: 5443769 - DNA, 25 bp, Homo sapien
aactttcctgcatagacctgttaac

SEQ ID NO: 5443770 - DNA, 25 bp, Homo sapien
tcctgcatagacctgttaaccagct

SEQ ID NO: 5443771 - DNA, 25 bp, Homo sapien
ggcaagatccttgtactctgctgct

SEQ ID NO: 5443772 - DNA, 25 bp, Homo sapien
taaaatgagcaaaccagacttcagt

SEQ ID NO: 5443773 - DNA, 25 bp, Homo sapien
gtaaaatgagcaaaccagacttcag

SEQ ID NO: 5443774 - DNA, 25 bp, Homo sapien
ccgtaaaatgagcaaaccagacttc

SEQ ID NO: 5443775 - DNA, 25 bp, Homo sapien
ctccgtaaaatgagcaaaccagact

SEQ ID NO: 5443776 - DNA, 25 bp, Homo sapien
tgaaactacactctcctggttatga

SEQ ID NO: 5443777 - DNA, 25 bp, Homo sapien
ggttatgacgatcctctaatcggaa

SEQ ID NO: 5443778 - DNA, 25 bp, Homo sapien
cgatcctctaatcggaaattattca

SEQ ID NO: 5443779 - DNA, 25 bp, Homo sapien
tacactctcctggttatgacgatcc

SEQ ID NO: 5443780 - DNA, 25 bp, Homo sapien
ttttcttaaggactgacaccctaca

SEQ ID NO: 5443781 - DNA, 25 bp, Homo sapien
gcctctgagtgagaaaggtacctca

SEQ ID NO: 5443782 - DNA, 25 bp, Homo sapien
caaagcgggccttcctttatacaag

SEQ ID NO: 5443783 - DNA, 25 bp, Homo sapien
tacaagcttaaaaatcaccactctg

SEQ ID NO: 5443784 - DNA, 25 bp, Homo sapien
tcaaagtgcccaaagtaagtgtttc

SEQ ID NO: 5443785 - DNA, 25 bp, Homo sapien
tatcattagaatggacccagcagct

SEQ ID NO: 5443786 - DNA, 25 bp, Homo sapien
ttttcatgaaaaggtaggagattcc

SEQ ID NO: 5443787 - DNA, 25 bp, Homo sapien
taagtgtttcaaatgacagcccaaa

SEQ ID NO: 5443788 - DNA, 25 bp, Homo sapien
catcaaagccttaagcaatagaacg

SEQ ID NO: 5443789 - DNA, 25 bp, Homo sapien
caccagcgtcaaggacctgtgttat

SEQ ID NO: 5443790 - DNA, 25 bp, Homo sapien
tattatccgaggacgaacaccagcg

SEQ ID NO: 5443791 - DNA, 25 bp, Homo sapien
gaacgattctaccagtctactgttg

SEQ ID NO: 5443792 - DNA, 25 bp, Homo sapien
gccttttcaagtagcccttggtcca

SEQ ID NO: 5443793 - DNA, 25 bp, Homo sapien
gacttgcctaaactactaattctta

SEQ ID NO: 5443794 - DNA, 25 bp, Homo sapien
ggtccactcttcaacgcgatttgca

SEQ ID NO: 5443795 - DNA, 25 bp, Homo sapien
tacttgataggctcaaagacttgcc

SEQ ID NO: 5443796 - DNA, 25 bp, Homo sapien
gaaattctcgtgaatgaatagctgg

SEQ ID NO: 5443797 - DNA, 25 bp, Homo sapien
cagtttatcagctcagcgcctagtg

SEQ ID NO: 5443798 - DNA, 25 bp, Homo sapien
ggccacggaccccagtttatcagct

SEQ ID NO: 5443799 - DNA, 25 bp, Homo sapien
cctagtgtgggcattcaagaaattc

SEQ ID NO: 5443800 - DNA, 25 bp, Homo sapien
accactgcagcggcgcccagtctgg

SEQ ID NO: 5443801 - DNA, 25 bp, Homo sapien
agggagagaccggggcaagtgggag

SEQ ID NO: 5443802 - DNA, 25 bp, Homo sapien
ggcgctgctggaccggcaggagcag

SEQ ID NO: 5443803 - DNA, 25 bp, Homo sapien
ctcgggcgctgctggaccggcagga

SEQ ID NO: 5443804 - DNA, 25 bp, Homo sapien
ctgctggaccggcaggagcagtcga

SEQ ID NO: 5443805 - DNA, 25 bp, Homo sapien
gaccggcaggagcagtcgatcgcac

SEQ ID NO: 5443806 - DNA, 25 bp, Homo sapien
tccttagccaatagccaacccggga

SEQ ID NO: 5443807 - DNA, 25 bp, Homo sapien
gtcccagccgataagccctccttag

SEQ ID NO: 5443808 - DNA, 25 bp, Homo sapien
gctctccggcctcgaccacagcctc

SEQ ID NO: 5443809 - DNA, 25 bp, Homo sapien
tgtccccggccttccgcatacaagg

SEQ ID NO: 5443810 - DNA, 25 bp, Homo sapien
ccggcgcgagcttggcaacccagtg

SEQ ID NO: 5443811 - DNA, 25 bp, Homo sapien
caacccagtgggtccgcgggatcag

SEQ ID NO: 5443812 - DNA, 25 bp, Homo sapien
gcaacccagtgggtccgcgggatca

SEQ ID NO: 5443813 - DNA, 25 bp, Homo sapien
cgcgctccgcatccggcgcgagctt

SEQ ID NO: 5443814 - DNA, 25 bp, Homo sapien
cttggaatccgagctcctgggaatt

SEQ ID NO: 5443815 - DNA, 25 bp, Homo sapien
tgcagggcgactagcgaaggtaaac

SEQ ID NO: 5443816 - DNA, 25 bp, Homo sapien
tcttgggagactgtcgacggcgtct

SEQ ID NO: 5443817 - DNA, 25 bp, Homo sapien
gagctcctgggaattgttcttggga

SEQ ID NO: 5443818 - DNA, 25 bp, Homo sapien
tgagaatgcgttaggcactgcaggc

SEQ ID NO: 5443819 - DNA, 25 bp, Homo sapien
tctctcccttagtttagggcggagc

SEQ ID NO: 5443820 - DNA, 25 bp, Homo sapien
agcacagtctctcccttagtttagg

SEQ ID NO: 5443821 - DNA, 25 bp, Homo sapien
ggctacgtacttgggagcacagtct

SEQ ID NO: 5443822 - DNA, 25 bp, Homo sapien
cttctcccccctactcccgcgaatg

SEQ ID NO: 5443823 - DNA, 25 bp, Homo sapien
tctcccccctactcccgcgaatgac

SEQ ID NO: 5443824 - DNA, 25 bp, Homo sapien
tcgcttctcccccctactcccgcga

SEQ ID NO: 5443825 - DNA, 25 bp, Homo sapien
ttctcccccctactcccgcgaatga

SEQ ID NO: 5443826 - DNA, 25 bp, Homo sapien
tcgcctcgcggccccgtttcgccat

SEQ ID NO: 5443827 - DNA, 25 bp, Homo sapien
atcgcctcgcggccccgtttcgcca

SEQ ID NO: 5443828 - DNA, 25 bp, Homo sapien
gtcatcgcctcgcggccccgtttcg

SEQ ID NO: 5443829 - DNA, 25 bp, Homo sapien
tcatcgcctcgcggccccgtttcgc

SEQ ID NO: 5443830 - DNA, 25 bp, Homo sapien
tctccagtgattcccgtagtactcc

SEQ ID NO: 5443831 - DNA, 25 bp, Homo sapien
ttgtcccgcgcacagtttcataaca

SEQ ID NO: 5443832 - DNA, 25 bp, Homo sapien
tggttagttgcaaccccaaaagatg

SEQ ID NO: 5443833 - DNA, 25 bp, Homo sapien
cataacactgtttttcgcagccaca

SEQ ID NO: 5443834 - DNA, 25 bp, Homo sapien
agcctgcactctcaagtcctcccat

SEQ ID NO: 5443835 - DNA, 25 bp, Homo sapien
agagctgccactcatgtcgcacagt

SEQ ID NO: 5443836 - DNA, 25 bp, Homo sapien
tgccactcatgtcgcacagtgggtg

SEQ ID NO: 5443837 - DNA, 25 bp, Homo sapien
tcaagtcctcccatgattttatgat

SEQ ID NO: 5443838 - DNA, 25 bp, Homo sapien
tcctgcatcggtgcagaaaatcaca

SEQ ID NO: 5443839 - DNA, 25 bp, Homo sapien
cttgctcactcctgcatcggtgcag

SEQ ID NO: 5443840 - DNA, 25 bp, Homo sapien
tcactcctgcatcggtgcagaaaat

SEQ ID NO: 5443841 - DNA, 25 bp, Homo sapien
tgctcactcctgcatcggtgcagaa

SEQ ID NO: 5443842 - DNA, 25 bp, Homo sapien
caccatttccttaagtctactgaaa

SEQ ID NO: 5443843 - DNA, 25 bp, Homo sapien
tcaccatttccttaagtctactgaa

SEQ ID NO: 5443844 - DNA, 25 bp, Homo sapien
ctcaccatttccttaagtctactga

SEQ ID NO: 5443845 - DNA, 25 bp, Homo sapien
ccatttccttaagtctactgaaatc

SEQ ID NO: 5443846 - DNA, 25 bp, Homo sapien
gctgtcggtacaaggctgtcttctt

SEQ ID NO: 5443847 - DNA, 25 bp, Homo sapien
cgagtggtgctgtcggtacaaggct

SEQ ID NO: 5443848 - DNA, 25 bp, Homo sapien
gtgctgtcggtacaaggctgtcttc

SEQ ID NO: 5443849 - DNA, 25 bp, Homo sapien
tggtgctgtcggtacaaggctgtct

SEQ ID NO: 5443850 - DNA, 25 bp, Homo sapien
gccacgctaacagggcgttcttgta

SEQ ID NO: 5443851 - DNA, 25 bp, Homo sapien
taatgtaaggagagcattggccacg

SEQ ID NO: 5443852 - DNA, 25 bp, Homo sapien
tattgtgaactcagcggcaaagatg

SEQ ID NO: 5443853 - DNA, 25 bp, Homo sapien
ccaggtaatattgatctgagcttct

SEQ ID NO: 5443854 - DNA, 25 bp, Homo sapien
aaacctgacacttggtcattgtctc

SEQ ID NO: 5443855 - DNA, 25 bp, Homo sapien
ttcattcattgcctgtaaacctgac

SEQ ID NO: 5443856 - DNA, 25 bp, Homo sapien
tcattgcctgtaaacctgacacttg

SEQ ID NO: 5443857 - DNA, 25 bp, Homo sapien
cctgtaaacctgacacttggtcatt

SEQ ID NO: 5443858 - DNA, 25 bp, Homo sapien
tgatgctgacccagtcggatttctc

SEQ ID NO: 5443859 - DNA, 25 bp, Homo sapien
gacccagtcggatttctctgacagt

SEQ ID NO: 5443860 - DNA, 25 bp, Homo sapien
gttttctagccatcaattcagattc

SEQ ID NO: 5443861 - DNA, 25 bp, Homo sapien
gcagggttgtaagttttctagccat

SEQ ID NO: 5443862 - DNA, 25 bp, Homo sapien
tctgcttaatagcagctccctgact

SEQ ID NO: 5443863 - DNA, 25 bp, Homo sapien
gaaaaatcaatgggagagaggcaag

SEQ ID NO: 5443864 - DNA, 25 bp, Homo sapien
ggcaaggtcattcagcctcaggtta

SEQ ID NO: 5443865 - DNA, 25 bp, Homo sapien
acaaacaggcgatgggctttgcttc

SEQ ID NO: 5443866 - DNA, 25 bp, Homo sapien
ccaggaattccaggattagtttcct

SEQ ID NO: 5443867 - DNA, 25 bp, Homo sapien
tatttgccatgaaaaccaggaattc

SEQ ID NO: 5443868 - DNA, 25 bp, Homo sapien
tgaaaaccaggaattccaggattag

SEQ ID NO: 5443869 - DNA, 25 bp, Homo sapien
ggattagtttccttttggacagcac

SEQ ID NO: 5443870 - DNA, 25 bp, Homo sapien
atggccagggagtcgctcttcccac

SEQ ID NO: 5443871 - DNA, 25 bp, Homo sapien
tggccagggagtcgctcttcccact

SEQ ID NO: 5443872 - DNA, 25 bp, Homo sapien
cagacaccggcttatggccacactt

SEQ ID NO: 5443873 - DNA, 25 bp, Homo sapien
tatggccacacttgtggtcctcgtg

SEQ ID NO: 5443874 - DNA, 25 bp, Homo sapien
accatcccgatatctatactccgaa

SEQ ID NO: 5443875 - DNA, 25 bp, Homo sapien
gatatctatactccgaaagttcttc

SEQ ID NO: 5443876 - DNA, 25 bp, Homo sapien
ctttgatcacaccatcccgatatct

SEQ ID NO: 5443877 - DNA, 25 bp, Homo sapien
tgatcacaccatcccgatatctata

SEQ ID NO: 5443878 - DNA, 25 bp, Homo sapien
cataagatgattagaaccgccggcc

SEQ ID NO: 5443879 - DNA, 25 bp, Homo sapien
ccttgaagtccccaggatgtgactg

SEQ ID NO: 5443880 - DNA, 25 bp, Homo sapien
tgaggtactggtgtgcataagatga

SEQ ID NO: 5443881 - DNA, 25 bp, Homo sapien
gtcatctacacactgatggtccttg

SEQ ID NO: 5443882 - DNA, 25 bp, Homo sapien
caactctcggagatctttccggcaa

SEQ ID NO: 5443883 - DNA, 25 bp, Homo sapien
gcagatgaggctgccgacttgttcc

SEQ ID NO: 5443884 - DNA, 25 bp, Homo sapien
gaactgccacccagggttagaggaa

SEQ ID NO: 5443885 - DNA, 25 bp, Homo sapien
ttagaggaatcaaggctgctgtgcg

SEQ ID NO: 5443886 - DNA, 25 bp, Homo sapien
gcgactccggctcctgatgctttct

SEQ ID NO: 5443887 - DNA, 25 bp, Homo sapien
caatttcatcctgatcctgacaaga

SEQ ID NO: 5443888 - DNA, 25 bp, Homo sapien
aatttcatcctgatcctgacaagaa

SEQ ID NO: 5443889 - DNA, 25 bp, Homo sapien
taccacaggctcaagtgactgccgg

SEQ ID NO: 5443890 - DNA, 25 bp, Homo sapien
cagagccgggtagcctgaaggattt

SEQ ID NO: 5443891 - DNA, 25 bp, Homo sapien
caggaccctgcggtttcattttgtt

SEQ ID NO: 5443892 - DNA, 25 bp, Homo sapien
tgaggtttggatacctaccacaggc

SEQ ID NO: 5443893 - DNA, 25 bp, Homo sapien
agagccaggtccaacaactgggcat

SEQ ID NO: 5443894 - DNA, 25 bp, Homo sapien
ggtccaacaactgggcatcctcaca

SEQ ID NO: 5443895 - DNA, 25 bp, Homo sapien
catatgtcaggctgtggggggccca

SEQ ID NO: 5443896 - DNA, 25 bp, Homo sapien
cagggctggcagcaatagctgtcat

SEQ ID NO: 5443897 - DNA, 25 bp, Homo sapien
ctggagccctttgaggagaggtaca

SEQ ID NO: 5443898 - DNA, 25 bp, Homo sapien
gccctggagccctttgaggagaggt

SEQ ID NO: 5443899 - DNA, 25 bp, Homo sapien
agggcagccctggagccctttgagg

SEQ ID NO: 5443900 - DNA, 25 bp, Homo sapien
gcagccctggagccctttgaggaga

SEQ ID NO: 5443901 - DNA, 25 bp, Homo sapien
ttgtctcccctggtggcacagccat

SEQ ID NO: 5443902 - DNA, 25 bp, Homo sapien
tttgtctcccctggtggcacagcca

SEQ ID NO: 5443903 - DNA, 25 bp, Homo sapien
gaagagctgttctagtggcgcaaac

SEQ ID NO: 5443904 - DNA, 25 bp, Homo sapien
cagtttacaggtacaggctgtggcc

SEQ ID NO: 5443905 - DNA, 25 bp, Homo sapien
tggcgcaaacaatgtgaacaggctg

SEQ ID NO: 5443906 - DNA, 25 bp, Homo sapien
tactgctgctaatcttgatccaggg

SEQ ID NO: 5443907 - DNA, 25 bp, Homo sapien
gccatgtggaagtattatctcagag

SEQ ID NO: 5443908 - DNA, 25 bp, Homo sapien
caatggtaggatagccctttgcagt

SEQ ID NO: 5443909 - DNA, 25 bp, Homo sapien
cacgaatgtataaccagggatacct

SEQ ID NO: 5443910 - DNA, 25 bp, Homo sapien
gacacatacctccatggtcacgaat

SEQ ID NO: 5443911 - DNA, 25 bp, Homo sapien
caggaatgaattagccatgcagctc

SEQ ID NO: 5443912 - DNA, 25 bp, Homo sapien
gaatgaattagccatgcagctcact

SEQ ID NO: 5443913 - DNA, 25 bp, Homo sapien
gaattagccatgcagctcacttcag

SEQ ID NO: 5443914 - DNA, 25 bp, Homo sapien
ggtgccaggaatgaattagccatgc

SEQ ID NO: 5443915 - DNA, 25 bp, Homo sapien
tgcagcaggtaggtctgagctgcgt

SEQ ID NO: 5443916 - DNA, 25 bp, Homo sapien
cagcaggtaggtctgagctgcgtgt

SEQ ID NO: 5443917 - DNA, 25 bp, Homo sapien
gcagcaggtaggtctgagctgcgtg

SEQ ID NO: 5443918 - DNA, 25 bp, Homo sapien
gggcaggatgacagtgccacatgca

SEQ ID NO: 5443919 - DNA, 25 bp, Homo sapien
ggcaggatgacagtgccacatgcat

SEQ ID NO: 5443920 - DNA, 25 bp, Homo sapien
ttccgcacaacaggggaagcagcag

SEQ ID NO: 5443921 - DNA, 25 bp, Homo sapien
tcctagtgtcttccgcacaacaggg

SEQ ID NO: 5443922 - DNA, 25 bp, Homo sapien
cgaagcctcgccttctcctagtgtc

SEQ ID NO: 5443923 - DNA, 25 bp, Homo sapien
tctcctagtgtcttccgcacaacag

SEQ ID NO: 5443924 - DNA, 25 bp, Homo sapien
gactgtacattggaacatccttatc

SEQ ID NO: 5443925 - DNA, 25 bp, Homo sapien
aggcctcttcaacgcctccctcatg

SEQ ID NO: 5443926 - DNA, 25 bp, Homo sapien
tctggactgtacattggaacatcct

SEQ ID NO: 5443927 - DNA, 25 bp, Homo sapien
tctctggactgtacattggaacatc

SEQ ID NO: 5443928 - DNA, 25 bp, Homo sapien
ttgcatctctgagatcttcacaggg

SEQ ID NO: 5443929 - DNA, 25 bp, Homo sapien
tttgcatctctgagatcttcacagg

SEQ ID NO: 5443930 - DNA, 25 bp, Homo sapien
aggtgacgattttcaagccagcggg

SEQ ID NO: 5443931 - DNA, 25 bp, Homo sapien
aaaggtgacgattttcaagccagcg

SEQ ID NO: 5443932 - DNA, 25 bp, Homo sapien
gggagaaaggtgacgattttcaagc

SEQ ID NO: 5443933 - DNA, 25 bp, Homo sapien
gagaaaggtgacgattttcaagcca

SEQ ID NO: 5443934 - DNA, 25 bp, Homo sapien
tgtcttctgtccagggctcacctga

SEQ ID NO: 5443935 - DNA, 25 bp, Homo sapien
aaaggctcttgttgcaaacaccaga

SEQ ID NO: 5443936 - DNA, 25 bp, Homo sapien
tgagtactggattgttcaaaacagc

SEQ ID NO: 5443937 - DNA, 25 bp, Homo sapien
tcaaaacagccgtggaaactctggt

SEQ ID NO: 5443938 - DNA, 25 bp, Homo sapien
tactttaaccgagaagcctcaccag

SEQ ID NO: 5443939 - DNA, 25 bp, Homo sapien
gctgggtttatgaagcctgcctcca

SEQ ID NO: 5443940 - DNA, 25 bp, Homo sapien
taagggcatgggtacaaggtttaca

SEQ ID NO: 5443941 - DNA, 25 bp, Homo sapien
tgaaaaaagtatcagtgctgctggg

SEQ ID NO: 5443942 - DNA, 25 bp, Homo sapien
ctctccagtgatgtcacactcccaa

SEQ ID NO: 5443943 - DNA, 25 bp, Homo sapien
ccagtgatgtcacactcccaacaga

SEQ ID NO: 5443944 - DNA, 25 bp, Homo sapien
tccagtgatgtcacactcccaacag

SEQ ID NO: 5443945 - DNA, 25 bp, Homo sapien
tctccagtgatgtcacactcccaac

SEQ ID NO: 5443946 - DNA, 25 bp, Homo sapien
acaacaggccatggtccacattcca

SEQ ID NO: 5443947 - DNA, 25 bp, Homo sapien
taacaacaggccatggtccacattc

SEQ ID NO: 5443948 - DNA, 25 bp, Homo sapien
tgtaacaacaggccatggtccacat

SEQ ID NO: 5443949 - DNA, 25 bp, Homo sapien
cctgtaacaacaggccatggtccac

SEQ ID NO: 5443950 - DNA, 25 bp, Homo sapien
gggatgctccaaaaccggaatggct

SEQ ID NO: 5443951 - DNA, 25 bp, Homo sapien
atgagcagcacatattccggaaagc

SEQ ID NO: 5443952 - DNA, 25 bp, Homo sapien
cagaagcagattgaggcagccttgc

SEQ ID NO: 5443953 - DNA, 25 bp, Homo sapien
tgacaagtgcgattaccttccaagc

SEQ ID NO: 5443954 - DNA, 25 bp, Homo sapien
tgtagtcttcagacatagcagctgg

SEQ ID NO: 5443955 - DNA, 25 bp, Homo sapien
tcagtgatggttctgtgcaaatcca

SEQ ID NO: 5443956 - DNA, 25 bp, Homo sapien
tagtcttcagacatagcagctggct

SEQ ID NO: 5443957 - DNA, 25 bp, Homo sapien
gcagctggctttgagtggttttcca

SEQ ID NO: 5443958 - DNA, 25 bp, Homo sapien
cactggctcttccatcacactgtca

SEQ ID NO: 5443959 - DNA, 25 bp, Homo sapien
gtgaaaggcaccaggccaatccctc

SEQ ID NO: 5443960 - DNA, 25 bp, Homo sapien
gtcatcgcatagcaggaaacaccct

SEQ ID NO: 5443961 - DNA, 25 bp, Homo sapien
ggtggtgaaaggcaccaggccaatc

SEQ ID NO: 5443962 - DNA, 25 bp, Homo sapien
ctatggtaggtgggaggctcttcat

SEQ ID NO: 5443963 - DNA, 25 bp, Homo sapien
gagttgtcatcgtcactatttacca

SEQ ID NO: 5443964 - DNA, 25 bp, Homo sapien
cattgggctggataggatcctcagt

SEQ ID NO: 5443965 - DNA, 25 bp, Homo sapien
ataggatcctcagtctccatgctgg

SEQ ID NO: 5443966 - DNA, 25 bp, Homo sapien
caaggacttcagtgcatcctgagtt

SEQ ID NO: 5443967 - DNA, 25 bp, Homo sapien
ccagcctttagaggtaggtcaagtg

SEQ ID NO: 5443968 - DNA, 25 bp, Homo sapien
tgaaatccacccttccagcatgcat

SEQ ID NO: 5443969 - DNA, 25 bp, Homo sapien
tgagcctgcttgagcctcgggcagc

SEQ ID NO: 5443970 - DNA, 25 bp, Homo sapien
agacagctgaagaaaggcccgggta

SEQ ID NO: 5443971 - DNA, 25 bp, Homo sapien
atggtagctgctcctgaacggaggc

SEQ ID NO: 5443972 - DNA, 25 bp, Homo sapien
gtagctgctcctgaacggaggccat

SEQ ID NO: 5443973 - DNA, 25 bp, Homo sapien
ggtagctgctcctgaacggaggcca

SEQ ID NO: 5443974 - DNA, 25 bp, Homo sapien
tggtagctgctcctgaacggaggcc

SEQ ID NO: 5443975 - DNA, 25 bp, Homo sapien
agagaagggcatctccgtgccggac

SEQ ID NO: 5443976 - DNA, 25 bp, Homo sapien
ctgcgtgggccagaacacgtcggac

SEQ ID NO: 5443977 - DNA, 25 bp, Homo sapien
tatgctccatgtatgcgcccgtgtg

SEQ ID NO: 5443978 - DNA, 25 bp, Homo sapien
ctgcgagaacttcccggtgcacggt

SEQ ID NO: 5443979 - DNA, 25 bp, Homo sapien
cgaaagcaacttttataggcaaagc

SEQ ID NO: 5443980 - DNA, 25 bp, Homo sapien
tggtctaataccctgaaaagaagtg

SEQ ID NO: 5443981 - DNA, 25 bp, Homo sapien
tccccttgtctttgttgtaagagac

SEQ ID NO: 5443982 - DNA, 25 bp, Homo sapien
tgtggaaaggcataactgtgacgaa

SEQ ID NO: 5443983 - DNA, 25 bp, Homo sapien
aactcggattcttttgcatgatggg

SEQ ID NO: 5443984 - DNA, 25 bp, Homo sapien
gaatcatgggagctaacctttatcc

SEQ ID NO: 5443985 - DNA, 25 bp, Homo sapien
gaggcgatcagcagataccatagtg

SEQ ID NO: 5443986 - DNA, 25 bp, Homo sapien
gaaggtttgaaccatgggccccatc

SEQ ID NO: 5443987 - DNA, 25 bp, Homo sapien
tggtgtccgagtccctaagaggcct

SEQ ID NO: 5443988 - DNA, 25 bp, Homo sapien
cacgtctagcccctcaggagttggt

SEQ ID NO: 5443989 - DNA, 25 bp, Homo sapien
ccctcaggagttggtgtccgagtcc

SEQ ID NO: 5443990 - DNA, 25 bp, Homo sapien
ttcccagacaccacgtctagcccct

SEQ ID NO: 5443991 - DNA, 25 bp, Homo sapien
ggctgatagactgatggagccacag

SEQ ID NO: 5443992 - DNA, 25 bp, Homo sapien
cacctgttgggctgatagactgatg

SEQ ID NO: 5443993 - DNA, 25 bp, Homo sapien
ccacagggggcttggacttagctca

SEQ ID NO: 5443994 - DNA, 25 bp, Homo sapien
atggccacctgttgggctgatagac

SEQ ID NO: 5443995 - DNA, 25 bp, Homo sapien
aactccctgcatatgctccgcagtg

SEQ ID NO: 5443996 - DNA, 25 bp, Homo sapien
gtccaggcaactccctgcatatgct

SEQ ID NO: 5443997 - DNA, 25 bp, Homo sapien
aagcctgataagagcacccctgggc

SEQ ID NO: 5443998 - DNA, 25 bp, Homo sapien
aggcctctggaggtcggcagcgaag

SEQ ID NO: 5443999 - DNA, 25 bp, Homo sapien
ttcctctactcctgatcactctagg

SEQ ID NO: 5444000 - DNA, 25 bp, Homo sapien
gctggaatgcgagtccagaaggaaa

SEQ ID NO: 5444001 - DNA, 25 bp, Homo sapien
tctaggacaactaaaggaatcctca

SEQ ID NO: 5444002 - DNA, 25 bp, Homo sapien
agaaggaaatcagagcgaaggcctg

SEQ ID NO: 5444003 - DNA, 25 bp, Homo sapien
ggctgggtaaggagcccggcacttg

SEQ ID NO: 5444004 - DNA, 25 bp, Homo sapien
taaggagcccggcacttggctggcc

SEQ ID NO: 5444005 - DNA, 25 bp, Homo sapien
tggctggcccatcaggataacagag

SEQ ID NO: 5444006 - DNA, 25 bp, Homo sapien
catcaggataacagagggtgtttcc

SEQ ID NO: 5444007 - DNA, 25 bp, Homo sapien
aaatggagagccattggccagaata

SEQ ID NO: 5444008 - DNA, 25 bp, Homo sapien
gagccattggccagaatagaaaaca

SEQ ID NO: 5444009 - DNA, 25 bp, Homo sapien
agagccattggccagaatagaaaac

SEQ ID NO: 5444010 - DNA, 25 bp, Homo sapien
tggagagccattggccagaatagaa

SEQ ID NO: 5444011 - DNA, 25 bp, Homo sapien
gaattcccatctttatgagttacag

SEQ ID NO: 5444012 - DNA, 25 bp, Homo sapien
tgagcaattctggagctgctgagat

SEQ ID NO: 5444013 - DNA, 25 bp, Homo sapien
tgagttacagaatcgagtcaacttt

SEQ ID NO: 5444014 - DNA, 25 bp, Homo sapien
gtaagactgaagaattcccctaaga

SEQ ID NO: 5444015 - DNA, 25 bp, Homo sapien
gaggctcatggatctctgccgaaca

SEQ ID NO: 5444016 - DNA, 25 bp, Homo sapien
tatcacagattagcccaggaaacag

SEQ ID NO: 5444017 - DNA, 25 bp, Homo sapien
ggcccagtagaaaaccagtgcaagg

SEQ ID NO: 5444018 - DNA, 25 bp, Homo sapien
ttggcagctgagtcctacaaggcct

SEQ ID NO: 5444019 - DNA, 25 bp, Homo sapien
ttgcaggtcaacagggcctggatga

SEQ ID NO: 5444020 - DNA, 25 bp, Homo sapien
attgcaggtcaacagggcctggatg

SEQ ID NO: 5444021 - DNA, 25 bp, Homo sapien
cattgcaggtcaacagggcctggat

SEQ ID NO: 5444022 - DNA, 25 bp, Homo sapien
tgcaggtcaacagggcctggatgaa

SEQ ID NO: 5444023 - DNA, 25 bp, Homo sapien
tgtgccacgctgatgccttgatgag

SEQ ID NO: 5444024 - DNA, 25 bp, Homo sapien
tcctacagatagcaaggcagtttcc

SEQ ID NO: 5444025 - DNA, 25 bp, Homo sapien
gaaaccaccgtgatgtgtatgcatg

SEQ ID NO: 5444026 - DNA, 25 bp, Homo sapien
tattgaagcagccacccagtatatg

SEQ ID NO: 5444027 - DNA, 25 bp, Homo sapien
gactgaatactccaggtgccacaaa

SEQ ID NO: 5444028 - DNA, 25 bp, Homo sapien
gaaggatacatgtcaaaccactgga

SEQ ID NO: 5444029 - DNA, 25 bp, Homo sapien
gaatgaacttcctaggcttgtgtgg

SEQ ID NO: 5444030 - DNA, 25 bp, Homo sapien
tatggcaagcagtccacatggcaag

SEQ ID NO: 5444031 - DNA, 25 bp, Homo sapien
agttactcatggacagccccgtggt

SEQ ID NO: 5444032 - DNA, 25 bp, Homo sapien
gacattgtcccctggagtcgtgcat

SEQ ID NO: 5444033 - DNA, 25 bp, Homo sapien
cacaccacaagctaggagccgatct

SEQ ID NO: 5444034 - DNA, 25 bp, Homo sapien
tgctgctgcttcagaccaagggaag

SEQ ID NO: 5444035 - DNA, 25 bp, Homo sapien
tcgatgggttaatcagtttctttga

SEQ ID NO: 5444036 - DNA, 25 bp, Homo sapien
tggtcgatgggttaatcagtttctt

SEQ ID NO: 5444037 - DNA, 25 bp, Homo sapien
gttggtcgatgggttaatcagtttc

SEQ ID NO: 5444038 - DNA, 25 bp, Homo sapien
tgggttggtcgatgggttaatcagt

SEQ ID NO: 5444039 - DNA, 25 bp, Homo sapien
caccagaacccattggtttgtccaa

SEQ ID NO: 5444040 - DNA, 25 bp, Homo sapien
tagtcccaattcctttagaagcagc

SEQ ID NO: 5444041 - DNA, 25 bp, Homo sapien
aacccattggtttgtccaagtcgca

SEQ ID NO: 5444042 - DNA, 25 bp, Homo sapien
tgtccaagtcgcagtagtcccaatt

SEQ ID NO: 5444043 - DNA, 25 bp, Homo sapien
tccatggcaatgactaatttcatgt

SEQ ID NO: 5444044 - DNA, 25 bp, Homo sapien
ccactggcaatccaggggattcctt

SEQ ID NO: 5444045 - DNA, 25 bp, Homo sapien
gggccactggcaatccaggggattc

SEQ ID NO: 5444046 - DNA, 25 bp, Homo sapien
ttgatgggccactggcaatccaggg

SEQ ID NO: 5444047 - DNA, 25 bp, Homo sapien
cttgatgggccactggcaatccagg

SEQ ID NO: 5444048 - DNA, 25 bp, Homo sapien
catcaaaagaaacgagagtagcaac

SEQ ID NO: 5444049 - DNA, 25 bp, Homo sapien
gaaacgagagtagcaactgatatca

SEQ ID NO: 5444050 - DNA, 25 bp, Homo sapien
caaaagaaacgagagtagcaactga

SEQ ID NO: 5444051 - DNA, 25 bp, Homo sapien
acgagagtagcaactgatatcagca

SEQ ID NO: 5444052 - DNA, 25 bp, Homo sapien
tctctgtgtagaggccgcaggttgg

SEQ ID NO: 5444053 - DNA, 25 bp, Homo sapien
tgtagaggccgcaggttgggtaagg

SEQ ID NO: 5444054 - DNA, 25 bp, Homo sapien
tgagctgctgacatcaatcactgga

SEQ ID NO: 5444055 - DNA, 25 bp, Homo sapien
agctgctgacatcaatcactggaga

SEQ ID NO: 5444056 - DNA, 25 bp, Homo sapien
aacctgtgtttaccgccatctgttt

SEQ ID NO: 5444057 - DNA, 25 bp, Homo sapien
taaacctgtgtttaccgccatctgt

SEQ ID NO: 5444058 - DNA, 25 bp, Homo sapien
gaataaacctgtgtttaccgccatc

SEQ ID NO: 5444059 - DNA, 25 bp, Homo sapien
ttgaataaacctgtgtttaccgcca

SEQ ID NO: 5444060 - DNA, 25 bp, Homo sapien
tttcttaattgctttcgccatatac

SEQ ID NO: 5444061 - DNA, 25 bp, Homo sapien
gtttcttaattgctttcgccatata

SEQ ID NO: 5444062 - DNA, 25 bp, Homo sapien
tgggggccaggagcactgtgtcagc

SEQ ID NO: 5444063 - DNA, 25 bp, Homo sapien
caggagcactgtgtcagcagggcac

SEQ ID NO: 5444064 - DNA, 25 bp, Homo sapien
agcagggcaccacggcccacagcac

SEQ ID NO: 5444065 - DNA, 25 bp, Homo sapien
ctaagggcgcacagctgaaggtcta

SEQ ID NO: 5444066 - DNA, 25 bp, Homo sapien
tcccagtctaaaatagaatgtgtca

SEQ ID NO: 5444067 - DNA, 25 bp, Homo sapien
ctcccagtctaaaatagaatgtgtc

SEQ ID NO: 5444068 - DNA, 25 bp, Homo sapien
ttggcaccaagatactttaatcagc

SEQ ID NO: 5444069 - DNA, 25 bp, Homo sapien
tcaaccacctttgcgcgttaacaat

SEQ ID NO: 5444070 - DNA, 25 bp, Homo sapien
tgctctctgttaatgttacatatta

SEQ ID NO: 5444071 - DNA, 25 bp, Homo sapien
aataaattccaaggtgcagccccag

SEQ ID NO: 5444072 - DNA, 25 bp, Homo sapien
tgtgctttggctcttcgggtaaaga

SEQ ID NO: 5444073 - DNA, 25 bp, Homo sapien
gctgactacattcagcccgtctgat

SEQ ID NO: 5444074 - DNA, 25 bp, Homo sapien
gcggtacggcttttcgctgactaca

SEQ ID NO: 5444075 - DNA, 25 bp, Homo sapien
taaagatggcggagcgcggtacggc

SEQ ID NO: 5444076 - DNA, 25 bp, Homo sapien
gatttagggggcttactccaactga

SEQ ID NO: 5444077 - DNA, 25 bp, Homo sapien
tgaagttaagattacttggctgcca

SEQ ID NO: 5444078 - DNA, 25 bp, Homo sapien
tagaagttggaatcttcaacgaagc

SEQ ID NO: 5444079 - DNA, 25 bp, Homo sapien
atcttcaacgaagctggatttaggg

SEQ ID NO: 5444080 - DNA, 25 bp, Homo sapien
atttctacatggcttaaatcgactg

SEQ ID NO: 5444081 - DNA, 25 bp, Homo sapien
ccagaatttcagataatctatctac

SEQ ID NO: 5444082 - DNA, 25 bp, Homo sapien
catggcttaaatcgactgtttttaa

SEQ ID NO: 5444083 - DNA, 25 bp, Homo sapien
cagataatctatctacttaaacatg

SEQ ID NO: 5444084 - DNA, 25 bp, Homo sapien
gtcaacggtacaaacatcacatgta

SEQ ID NO: 5444085 - DNA, 25 bp, Homo sapien
acttccagaacagtcaacggtacaa

SEQ ID NO: 5444086 - DNA, 25 bp, Homo sapien
gattcaagtcgttttgtagtgaggc

SEQ ID NO: 5444087 - DNA, 25 bp, Homo sapien
ctattaacccactccaggaattttg

SEQ ID NO: 5444088 - DNA, 25 bp, Homo sapien
aggaaaaggcacacactaatgcgtt

SEQ ID NO: 5444089 - DNA, 25 bp, Homo sapien
aaaggcacacactaatgcgttccat

SEQ ID NO: 5444090 - DNA, 25 bp, Homo sapien
gatccttagggcagcttcgcccaca

SEQ ID NO: 5444091 - DNA, 25 bp, Homo sapien
tcaaaatgcttcagagagttactgc

SEQ ID NO: 5444092 - DNA, 25 bp, Homo sapien
ttcagagagttactgctaccattac

SEQ ID NO: 5444093 - DNA, 25 bp, Homo sapien
aaggaagatccttagggcagcttcg

SEQ ID NO: 5444094 - DNA, 25 bp, Homo sapien
cactgagttacgaggacattggctg

SEQ ID NO: 5444095 - DNA, 25 bp, Homo sapien
actgagttacgaggacattggctgc

SEQ ID NO: 5444096 - DNA, 25 bp, Homo sapien
ctccaggaaagcggccgacatggtg

SEQ ID NO: 5444097 - DNA, 25 bp, Homo sapien
aacagccacagactgggccatggga

SEQ ID NO: 5444098 - DNA, 25 bp, Homo sapien
aggctccaggaaagcggccgacatg

SEQ ID NO: 5444099 - DNA, 25 bp, Homo sapien
ccatgggaagatacagagaggctcc

SEQ ID NO: 5444100 - DNA, 25 bp, Homo sapien
tgcacaaagcttggatgatagagct

SEQ ID NO: 5444101 - DNA, 25 bp, Homo sapien
gggtgcacaaagcttggatgataga

SEQ ID NO: 5444102 - DNA, 25 bp, Homo sapien
ggtgcacaaagcttggatgatagag

SEQ ID NO: 5444103 - DNA, 25 bp, Homo sapien
ctggggtgcacaaagcttggatgat

SEQ ID NO: 5444104 - DNA, 25 bp, Homo sapien
taggcagtcggagcatcagtatagg

SEQ ID NO: 5444105 - DNA, 25 bp, Homo sapien
tcggagcatcagtatagggtagagc

SEQ ID NO: 5444106 - DNA, 25 bp, Homo sapien
agtaggcagtcggagcatcagtata

SEQ ID NO: 5444107 - DNA, 25 bp, Homo sapien
gcagtcggagcatcagtatagggta

SEQ ID NO: 5444108 - DNA, 25 bp, Homo sapien
ctgagaaagatgcaaggtctgaggg

SEQ ID NO: 5444109 - DNA, 25 bp, Homo sapien
ggaggctgcacaggctaggttggct

SEQ ID NO: 5444110 - DNA, 25 bp, Homo sapien
gcacaggctaggttggctgtgttgg

SEQ ID NO: 5444111 - DNA, 25 bp, Homo sapien
ggtagactggattcccaggaggctg

SEQ ID NO: 5444112 - DNA, 25 bp, Homo sapien
gctgcaggtccggttcgtctcggca

SEQ ID NO: 5444113 - DNA, 25 bp, Homo sapien
atggtggctgcaggtccggttcgtc

SEQ ID NO: 5444114 - DNA, 25 bp, Homo sapien
gtggctgcaggtccggttcgtctcg

SEQ ID NO: 5444115 - DNA, 25 bp, Homo sapien
ctgcaggtccggttcgtctcggcat

SEQ ID NO: 5444116 - DNA, 25 bp, Homo sapien
ccaacctatttgtagtctgtattgc

SEQ ID NO: 5444117 - DNA, 25 bp, Homo sapien
ttggccctactctatacttaactgt

SEQ ID NO: 5444118 - DNA, 25 bp, Homo sapien
cagaaattacacctttacaacccag

SEQ ID NO: 5444119 - DNA, 25 bp, Homo sapien
tggcccaggatgagacttgattaga

SEQ ID NO: 5444120 - DNA, 25 bp, Homo sapien
taattaaatccttgattcagaaggc

SEQ ID NO: 5444121 - DNA, 25 bp, Homo sapien
ttcagtaactttcagtgcttcaaag

SEQ ID NO: 5444122 - DNA, 25 bp, Homo sapien
taggtaactgtatcatatatgcacc

SEQ ID NO: 5444123 - DNA, 25 bp, Homo sapien
tatgcaccatacaggaatatcaagt

SEQ ID NO: 5444124 - DNA, 25 bp, Homo sapien
ttaatgaagctggtacagacaatgt

SEQ ID NO: 5444125 - DNA, 25 bp, Homo sapien
tacagacaatgtccatttaaaaccc

SEQ ID NO: 5444126 - DNA, 25 bp, Homo sapien
tgtccatttaaaacccatatcccag

SEQ ID NO: 5444127 - DNA, 25 bp, Homo sapien
catatcccaggccaaaaagtacaaa

SEQ ID NO: 5444128 - DNA, 25 bp, Homo sapien
tatagctttattaattgctaatgaa

SEQ ID NO: 5444129 - DNA, 25 bp, Homo sapien
tgtatagctttattaattgctaatg

SEQ ID NO: 5444130 - DNA, 25 bp, Homo sapien
gtatagctttattaattgctaatga

SEQ ID NO: 5444131 - DNA, 25 bp, Homo sapien
ctcttcttttggtccagaccctcaa

SEQ ID NO: 5444132 - DNA, 25 bp, Homo sapien
catcttgacttcaacctgatattcc

SEQ ID NO: 5444133 - DNA, 25 bp, Homo sapien
cttatctgtcatcttgacttcaacc

SEQ ID NO: 5444134 - DNA, 25 bp, Homo sapien
atctgtcatcttgacttcaacctga

SEQ ID NO: 5444135 - DNA, 25 bp, Homo sapien
catttttccacagttcagttctctg

SEQ ID NO: 5444136 - DNA, 25 bp, Homo sapien
aaaggtcatttttccacagttcagt

SEQ ID NO: 5444137 - DNA, 25 bp, Homo sapien
agcttcaagttaaggaaaggtcatt

SEQ ID NO: 5444138 - DNA, 25 bp, Homo sapien
gtagcttcaagttaaggaaaggtca

SEQ ID NO: 5444139 - DNA, 25 bp, Homo sapien
aagtcacagtccaggagtgaagtaa

SEQ ID NO: 5444140 - DNA, 25 bp, Homo sapien
gagtgaagtaatcacatgctagaac

SEQ ID NO: 5444141 - DNA, 25 bp, Homo sapien
tccatctcccactgaaagtcacagt

SEQ ID NO: 5444142 - DNA, 25 bp, Homo sapien
tctcccactgaaagtcacagtccag

SEQ ID NO: 5444143 - DNA, 25 bp, Homo sapien
aacacttgcattggtcgatcttatt

SEQ ID NO: 5444144 - DNA, 25 bp, Homo sapien
tcattatgaacacttgcattggtcg

SEQ ID NO: 5444145 - DNA, 25 bp, Homo sapien
cagggccaattggaaagtcattatg

SEQ ID NO: 5444146 - DNA, 25 bp, Homo sapien
ttatgaacacttgcattggtcgatc

SEQ ID NO: 5444147 - DNA, 25 bp, Homo sapien
ggcttgatcaccaaaaatcagcaca

SEQ ID NO: 5444148 - DNA, 25 bp, Homo sapien
agagggtaatatgaaggggactgag

SEQ ID NO: 5444149 - DNA, 25 bp, Homo sapien
gagggtaatatgaaggggactgagg

SEQ ID NO: 5444150 - DNA, 25 bp, Homo sapien
tgataaacttcaatcacatcttctt

SEQ ID NO: 5444151 - DNA, 25 bp, Homo sapien
ataaacttcaatcacatcttcttcc

SEQ ID NO: 5444152 - DNA, 25 bp, Homo sapien
ttcctgataaacttcaatcacatct

SEQ ID NO: 5444153 - DNA, 25 bp, Homo sapien
tgaatgaccccccgtttgttcctga

SEQ ID NO: 5444154 - DNA, 25 bp, Homo sapien
tcctgacctgcagtgatccagcccg

SEQ ID NO: 5444155 - DNA, 25 bp, Homo sapien
tgacctgcagtgatccagcccgcct

SEQ ID NO: 5444156 - DNA, 25 bp, Homo sapien
ctgacctgcagtgatccagcccgcc

SEQ ID NO: 5444157 - DNA, 25 bp, Homo sapien
cctgcagtgatccagcccgcctcag

SEQ ID NO: 5444158 - DNA, 25 bp, Homo sapien
aacctgagtgaattcattggaacac

SEQ ID NO: 5444159 - DNA, 25 bp, Homo sapien
ccctcaaagagaaacctgagtgaat

SEQ ID NO: 5444160 - DNA, 25 bp, Homo sapien
agaaacctgagtgaattcattggaa

SEQ ID NO: 5444161 - DNA, 25 bp, Homo sapien
acctgagtgaattcattggaacacc

SEQ ID NO: 5444162 - DNA, 25 bp, Homo sapien
tctttgacagtatgattctttgagt

SEQ ID NO: 5444163 - DNA, 25 bp, Homo sapien
ttttcactttgaagtgaatctcact

SEQ ID NO: 5444164 - DNA, 25 bp, Homo sapien
ctgtctttgacagtatgattctttg

SEQ ID NO: 5444165 - DNA, 25 bp, Homo sapien
tcattttcactttgaagtgaatctc

SEQ ID NO: 5444166 - DNA, 25 bp, Homo sapien
cccaagtcctcagttgaaggttttg

SEQ ID NO: 5444167 - DNA, 25 bp, Homo sapien
tcttatcccccaagtcctcagttga

SEQ ID NO: 5444168 - DNA, 25 bp, Homo sapien
ctgtccaatgactttgagtttaata

SEQ ID NO: 5444169 - DNA, 25 bp, Homo sapien
gagtttaatatattcaccttccttc

SEQ ID NO: 5444170 - DNA, 25 bp, Homo sapien
ttctgaatccaagattatcttctca

SEQ ID NO: 5444171 - DNA, 25 bp, Homo sapien
aagagcttattccatgcagtgaagg

SEQ ID NO: 5444172 - DNA, 25 bp, Homo sapien
gcaataaacagcaaccaagccctga

SEQ ID NO: 5444173 - DNA, 25 bp, Homo sapien
tccatgcagtgaagggcaataaaca

SEQ ID NO: 5444174 - DNA, 25 bp, Homo sapien
ttcttcctctaagtatctagaaggc

SEQ ID NO: 5444175 - DNA, 25 bp, Homo sapien
ccatgtaaggccaagtccaggattt

SEQ ID NO: 5444176 - DNA, 25 bp, Homo sapien
ttaaaactcgtctatgaaccacagc

SEQ ID NO: 5444177 - DNA, 25 bp, Homo sapien
tcttcctttaatgctcctacttgca

SEQ ID NO: 5444178 - DNA, 25 bp, Homo sapien
tcccttgaccttacttctctagtcg

SEQ ID NO: 5444179 - DNA, 25 bp, Homo sapien
gtaccacttgtttaatagcctcatg

SEQ ID NO: 5444180 - DNA, 25 bp, Homo sapien
ctgtaccacttgtttaatagcctca

SEQ ID NO: 5444181 - DNA, 25 bp, Homo sapien
accacttgtttaatagcctcatgct

SEQ ID NO: 5444182 - DNA, 25 bp, Homo sapien
taccacttgtttaatagcctcatgc

SEQ ID NO: 5444183 - DNA, 25 bp, Homo sapien
aaaaagattatcggcctctcttcct

SEQ ID NO: 5444184 - DNA, 25 bp, Homo sapien
aaagattatcggcctctcttccttt

SEQ ID NO: 5444185 - DNA, 25 bp, Homo sapien
aaaagattatcggcctctcttcctt

SEQ ID NO: 5444186 - DNA, 25 bp, Homo sapien
aaagcaaaattgacccattccccag

SEQ ID NO: 5444187 - DNA, 25 bp, Homo sapien
tcaggtaaaactccaaaaggagcca

SEQ ID NO: 5444188 - DNA, 25 bp, Homo sapien
cagtggattcggatgaaaactggta

SEQ ID NO: 5444189 - DNA, 25 bp, Homo sapien
gcaaaattgacccattccccagtgg

SEQ ID NO: 5444190 - DNA, 25 bp, Homo sapien
agcagaggtgagtctaatccacaga

SEQ ID NO: 5444191 - DNA, 25 bp, Homo sapien
gacaactagctgttccagcccccag

SEQ ID NO: 5444192 - DNA, 25 bp, Homo sapien
cagaggtgagtctaatccacagagc

SEQ ID NO: 5444193 - DNA, 25 bp, Homo sapien
ctgacaactagctgttccagccccc

SEQ ID NO: 5444194 - DNA, 25 bp, Homo sapien
agcacaacaccgcggctgcagtaac

SEQ ID NO: 5444195 - DNA, 25 bp, Homo sapien
acaacaccgcggctgcagtaacttc

SEQ ID NO: 5444196 - DNA, 25 bp, Homo sapien
acagcacaacaccgcggctgcagta

SEQ ID NO: 5444197 - DNA, 25 bp, Homo sapien
aacaccgcggctgcagtaacttccg

SEQ ID NO: 5444198 - DNA, 25 bp, Homo sapien
cctttgagctcgggaagtcagggct

SEQ ID NO: 5444199 - DNA, 25 bp, Homo sapien
gaagatcctttgagctcgggaagtc

SEQ ID NO: 5444200 - DNA, 25 bp, Homo sapien
gatcctttgagctcgggaagtcagg

SEQ ID NO: 5444201 - DNA, 25 bp, Homo sapien
aagatcctttgagctcgggaagtca

SEQ ID NO: 5444202 - DNA, 25 bp, Homo sapien
gaatgtgattgacctacttgaaaaa

SEQ ID NO: 5444203 - DNA, 25 bp, Homo sapien
tcagaattcatttagctcaccacat

SEQ ID NO: 5444204 - DNA, 25 bp, Homo sapien
gaagacttacgatccttctggtgac

SEQ ID NO: 5444205 - DNA, 25 bp, Homo sapien
cactttctagttaggtgtgaagacg

SEQ ID NO: 5444206 - DNA, 25 bp, Homo sapien
gctttggccatcaaccttgactttt

SEQ ID NO: 5444207 - DNA, 25 bp, Homo sapien
tagtagccacagtggaaccaccact

SEQ ID NO: 5444208 - DNA, 25 bp, Homo sapien
tccacttgaaagtatgtagtagcca

SEQ ID NO: 5444209 - DNA, 25 bp, Homo sapien
atctagtctgacagcaaatcctctc

SEQ ID NO: 5444210 - DNA, 25 bp, Homo sapien
ggaggatgatccatcatagtcttgt

SEQ ID NO: 5444211 - DNA, 25 bp, Homo sapien
taaaactcctagtccaaactgtgcc

SEQ ID NO: 5444212 - DNA, 25 bp, Homo sapien
tttgctgcctataaccacgactcca

SEQ ID NO: 5444213 - DNA, 25 bp, Homo sapien
actgtgcccccaaagcttctgcatt

SEQ ID NO: 5444214 - DNA, 25 bp, Homo sapien
aagagcaggatctgtgtggtcttat

SEQ ID NO: 5444215 - DNA, 25 bp, Homo sapien
ggtagacggtaaacctccaagagca

SEQ ID NO: 5444216 - DNA, 25 bp, Homo sapien
caagagcaggatctgtgtggtctta

SEQ ID NO: 5444217 - DNA, 25 bp, Homo sapien
tagacggtaaacctccaagagcagg

SEQ ID NO: 5444218 - DNA, 25 bp, Homo sapien
gagagatgatgtcaccactctcttc

SEQ ID NO: 5444219 - DNA, 25 bp, Homo sapien
tccagaaggcagcctcctgcatcga

SEQ ID NO: 5444220 - DNA, 25 bp, Homo sapien
cataggctctaggtcactgccagac

SEQ ID NO: 5444221 - DNA, 25 bp, Homo sapien
tggagatgctgaattcccaccccca

SEQ ID NO: 5444222 - DNA, 25 bp, Homo sapien
tgagtgagccgtagcctggaggccc

SEQ ID NO: 5444223 - DNA, 25 bp, Homo sapien
cacggaagttgaggttgatggctct

SEQ ID NO: 5444224 - DNA, 25 bp, Homo sapien
ggaagggcctgcacggaagttgagg

SEQ ID NO: 5444225 - DNA, 25 bp, Homo sapien
gatggctctcagaggcagcctccat

SEQ ID NO: 5444226 - DNA, 25 bp, Homo sapien
cccagggacccgcggagttctcctg

SEQ ID NO: 5444227 - DNA, 25 bp, Homo sapien
agggacccgcggagttctcctgatg

SEQ ID NO: 5444228 - DNA, 25 bp, Homo sapien
cagggacccgcggagttctcctgat

SEQ ID NO: 5444229 - DNA, 25 bp, Homo sapien
ccagggacccgcggagttctcctga

SEQ ID NO: 5444230 - DNA, 25 bp, Homo sapien
agaatcatatcagtgtgaaccaaga

SEQ ID NO: 5444231 - DNA, 25 bp, Homo sapien
tcatatcagtgtgaaccaagaagtc

SEQ ID NO: 5444232 - DNA, 25 bp, Homo sapien
tttttatcagacagaatcatatcag

SEQ ID NO: 5444233 - DNA, 25 bp, Homo sapien
tcagacagaatcatatcagtgtgaa

SEQ ID NO: 5444234 - DNA, 25 bp, Homo sapien
gctagacagaaacccagccttctat

SEQ ID NO: 5444235 - DNA, 25 bp, Homo sapien
gaagttccagaacatgttagcagta

SEQ ID NO: 5444236 - DNA, 25 bp, Homo sapien
ataaacttaaaagattgcctcgaag

SEQ ID NO: 5444237 - DNA, 25 bp, Homo sapien
tagcagtagagctagacagaaaccc

SEQ ID NO: 5444238 - DNA, 25 bp, Homo sapien
tcttatcatgtcgaaaggctgcagg

SEQ ID NO: 5444239 - DNA, 25 bp, Homo sapien
cttatcatgtcgaaaggctgcaggg

SEQ ID NO: 5444240 - DNA, 25 bp, Homo sapien
ggacatctcaattttcccttggtag

SEQ ID NO: 5444241 - DNA, 25 bp, Homo sapien
ggtaaggccacggttgaggacatct

SEQ ID NO: 5444242 - DNA, 25 bp, Homo sapien
tgcacagacattgaggttcaccctt

SEQ ID NO: 5444243 - DNA, 25 bp, Homo sapien
cctatcaagttgagtcctgcacaga

SEQ ID NO: 5444244 - DNA, 25 bp, Homo sapien
taacttggcttgagtcactaaaggc

SEQ ID NO: 5444245 - DNA, 25 bp, Homo sapien
tatttgctgagaaggagcttcactg

SEQ ID NO: 5444246 - DNA, 25 bp, Homo sapien
aaaaatcaacatcaagcgagctttt

SEQ ID NO: 5444247 - DNA, 25 bp, Homo sapien
gctttcacggtctgtattcgtacta

SEQ ID NO: 5444248 - DNA, 25 bp, Homo sapien
ttcatgaggctctgctttcacggtc

SEQ ID NO: 5444249 - DNA, 25 bp, Homo sapien
tctgtattcgtactaaaaatcaaca

SEQ ID NO: 5444250 - DNA, 25 bp, Homo sapien
gtattcacagacacaataccactac

SEQ ID NO: 5444251 - DNA, 25 bp, Homo sapien
gtgcaatgggtattcacagacacaa

SEQ ID NO: 5444252 - DNA, 25 bp, Homo sapien
gggtattcacagacacaataccact

SEQ ID NO: 5444253 - DNA, 25 bp, Homo sapien
gagtgcaatgggtattcacagacac

SEQ ID NO: 5444254 - DNA, 25 bp, Homo sapien
tgatgtggaacttatgctgacacct

SEQ ID NO: 5444255 - DNA, 25 bp, Homo sapien
gcttctaggtggtcaccatactgat

SEQ ID NO: 5444256 - DNA, 25 bp, Homo sapien
gaacttatgctgacacctgatcggc

SEQ ID NO: 5444257 - DNA, 25 bp, Homo sapien
tgcttctaggtggtcaccatactga

SEQ ID NO: 5444258 - DNA, 25 bp, Homo sapien
ctttctcactgtgagtgaacagcca

SEQ ID NO: 5444259 - DNA, 25 bp, Homo sapien
ggacaggtttcttgccaagtcttaa

SEQ ID NO: 5444260 - DNA, 25 bp, Homo sapien
tgagtgaacagccatgtcccaactg

SEQ ID NO: 5444261 - DNA, 25 bp, Homo sapien
ttgtctgccttttgtcgtggacagg

SEQ ID NO: 5444262 - DNA, 25 bp, Homo sapien
gaatccggggttggtattgctacaa

SEQ ID NO: 5444263 - DNA, 25 bp, Homo sapien
taaacagcataaacatatttcaact

SEQ ID NO: 5444264 - DNA, 25 bp, Homo sapien
gctacaacccctaattatggaagat

SEQ ID NO: 5444265 - DNA, 25 bp, Homo sapien
tctctgtctaaagggtaaacagcat

SEQ ID NO: 5444266 - DNA, 25 bp, Homo sapien
gagtctgctgaacgccgaacaaaag

SEQ ID NO: 5444267 - DNA, 25 bp, Homo sapien
taacagcggactagaagaagcaagc

SEQ ID NO: 5444268 - DNA, 25 bp, Homo sapien
cgagagtactgagacggagacgcct

SEQ ID NO: 5444269 - DNA, 25 bp, Homo sapien
tggaaactgcggtaccaacgggatc

SEQ ID NO: 5444270 - DNA, 25 bp, Homo sapien
tgtctggtctgctcggagccactgg

SEQ ID NO: 5444271 - DNA, 25 bp, Homo sapien
attcaccggagagacgcgctgcggt

SEQ ID NO: 5444272 - DNA, 25 bp, Homo sapien
agccactggaagtgcctcccggagg

SEQ ID NO: 5444273 - DNA, 25 bp, Homo sapien
cgcaggcgcagtgcgggcttcatcc

SEQ ID NO: 5444274 - DNA, 25 bp, Homo sapien
cgcgacgcccgagttccgtcaggag

SEQ ID NO: 5444275 - DNA, 25 bp, Homo sapien
ggtccgcgacgcccgagttccgtca

SEQ ID NO: 5444276 - DNA, 25 bp, Homo sapien
ctcggtccgcgacgcccgagttccg

SEQ ID NO: 5444277 - DNA, 25 bp, Homo sapien
tccgcgacgcccgagttccgtcagg

SEQ ID NO: 5444278 - DNA, 25 bp, Homo sapien
gcgggagaacgaggcggcggcggcg

SEQ ID NO: 5444279 - DNA, 25 bp, Homo sapien
ctgcgggagaacgaggcggcggcgg

SEQ ID NO: 5444280 - DNA, 25 bp, Homo sapien
tgcgggagaacgaggcggcggcggc

SEQ ID NO: 5444281 - DNA, 25 bp, Homo sapien
gggagaacgaggcggcggcggcggc

SEQ ID NO: 5444282 - DNA, 25 bp, Homo sapien
ggttgtgattcgctcacaggagcca

SEQ ID NO: 5444283 - DNA, 25 bp, Homo sapien
cacaggagccattgacgggagaaga

SEQ ID NO: 5444284 - DNA, 25 bp, Homo sapien
gattcgctcacaggagccattgacg

SEQ ID NO: 5444285 - DNA, 25 bp, Homo sapien
cctcggggggttgtgattcgctcac

SEQ ID NO: 5444286 - DNA, 25 bp, Homo sapien
ttctgcgaaggcgtggggactgtga

SEQ ID NO: 5444287 - DNA, 25 bp, Homo sapien
aaccctctcacggttgttctgcgaa

SEQ ID NO: 5444288 - DNA, 25 bp, Homo sapien
ctctcctcagccttcgccagggcct

SEQ ID NO: 5444289 - DNA, 25 bp, Homo sapien
ctcacggttgttctgcgaaggcgtg

SEQ ID NO: 5444290 - DNA, 25 bp, Homo sapien
cccagggatgacttcctcgctgcag

SEQ ID NO: 5444291 - DNA, 25 bp, Homo sapien
ggatgacttcctcgctgcagcggcc

SEQ ID NO: 5444292 - DNA, 25 bp, Homo sapien
agggatgacttcctcgctgcagcgg

SEQ ID NO: 5444293 - DNA, 25 bp, Homo sapien
tgcagcggccctggcgggtgccctg

SEQ ID NO: 5444294 - DNA, 25 bp, Homo sapien
tccggccggcacgtcccggccactg

SEQ ID NO: 5444295 - DNA, 25 bp, Homo sapien
cggtgcagcggagctgcgacccggt

SEQ ID NO: 5444296 - DNA, 25 bp, Homo sapien
ctgcggctggtgagtagctccggcc

SEQ ID NO: 5444297 - DNA, 25 bp, Homo sapien
ctgtgcttgcccttcgccatgcgtc

SEQ ID NO: 5444298 - DNA, 25 bp, Homo sapien
cgctttgttgcccaggtgggagtac

SEQ ID NO: 5444299 - DNA, 25 bp, Homo sapien
gtgtgcgccaccatgtccggctagt

SEQ ID NO: 5444300 - DNA, 25 bp, Homo sapien
tagacacggagtttcactgtgttgg

SEQ ID NO: 5444301 - DNA, 25 bp, Homo sapien
agtggcgtgatctcggctcacgaca

SEQ ID NO: 5444302 - DNA, 25 bp, Homo sapien
gcatctaaaggcgtacaagtttcaa

SEQ ID NO: 5444303 - DNA, 25 bp, Homo sapien
tatgtccctgatggctaaatgttgt

SEQ ID NO: 5444304 - DNA, 25 bp, Homo sapien
ttttgacctatctgtagcatgagcc

SEQ ID NO: 5444305 - DNA, 25 bp, Homo sapien
cagcaactttgatagttcctcctta

SEQ ID NO: 5444306 - DNA, 25 bp, Homo sapien
gactgtactggcacaatggtgtata

SEQ ID NO: 5444307 - DNA, 25 bp, Homo sapien
ctgtactggcacaatggtgtataaa

SEQ ID NO: 5444308 - DNA, 25 bp, Homo sapien
cttgactgtactggcacaatggtgt

SEQ ID NO: 5444309 - DNA, 25 bp, Homo sapien
tgactgtactggcacaatggtgtat

SEQ ID NO: 5444310 - DNA, 25 bp, Homo sapien
gccatatgtgcattgtaagattttg

SEQ ID NO: 5444311 - DNA, 25 bp, Homo sapien
ggaggagccatatgtgcattgtaag

SEQ ID NO: 5444312 - DNA, 25 bp, Homo sapien
ggagccatatgtgcattgtaagatt

SEQ ID NO: 5444313 - DNA, 25 bp, Homo sapien
aattgccttcagagcagggttttcc

SEQ ID NO: 5444314 - DNA, 25 bp, Homo sapien
tctgaagttttgctagctctgcact

SEQ ID NO: 5444315 - DNA, 25 bp, Homo sapien
taatgcagtagtaacaaaattccat

SEQ ID NO: 5444316 - DNA, 25 bp, Homo sapien
gaatgccagcctctatcccgtatct

SEQ ID NO: 5444317 - DNA, 25 bp, Homo sapien
aatataaggttgcatcctttaggaa

SEQ ID NO: 5444318 - DNA, 25 bp, Homo sapien
ctctcaaaaagtaatcctttttcat

SEQ ID NO: 5444319 - DNA, 25 bp, Homo sapien
tttactttggatgtagttcaattta

SEQ ID NO: 5444320 - DNA, 25 bp, Homo sapien
gctgcctgcaagaggtaattcttta

SEQ ID NO: 5444321 - DNA, 25 bp, Homo sapien
cctgcaagaggtaattctttatttg

SEQ ID NO: 5444322 - DNA, 25 bp, Homo sapien
ttatctattcttttgctgcctgcaa

SEQ ID NO: 5444323 - DNA, 25 bp, Homo sapien
tcattaatgccaatagccctctaac

SEQ ID NO: 5444324 - DNA, 25 bp, Homo sapien
tacttacctatcaacatgagttctg

SEQ ID NO: 5444325 - DNA, 25 bp, Homo sapien
gttcctggtctacactcattaatgc

SEQ ID NO: 5444326 - DNA, 25 bp, Homo sapien
ttacttctccatgctaatggaaggc

SEQ ID NO: 5444327 - DNA, 25 bp, Homo sapien
cccaggttgggcacttctaatgaat

SEQ ID NO: 5444328 - DNA, 25 bp, Homo sapien
cttaatggctaaagaagaccccagg

SEQ ID NO: 5444329 - DNA, 25 bp, Homo sapien
ttgcctgtattgcaccacaatcaag

SEQ ID NO: 5444330 - DNA, 25 bp, Homo sapien
caatgcaaacgccagaacactgcta

SEQ ID NO: 5444331 - DNA, 25 bp, Homo sapien
gaaggttctagttagctgaaatcac

SEQ ID NO: 5444332 - DNA, 25 bp, Homo sapien
aaagcaaatgtgaactggaacacta

SEQ ID NO: 5444333 - DNA, 25 bp, Homo sapien
tggaacactaattgaagagtttccc

SEQ ID NO: 5444334 - DNA, 25 bp, Homo sapien
agagtttccctaccttgtgaatggg

SEQ ID NO: 5444335 - DNA, 25 bp, Homo sapien
ggtgacacgcgcacataatctgagc

SEQ ID NO: 5444336 - DNA, 25 bp, Homo sapien
tggtgacacgcgcacataatctgag

SEQ ID NO: 5444337 - DNA, 25 bp, Homo sapien
agatgtggtgacacgcgcacataat

SEQ ID NO: 5444338 - DNA, 25 bp, Homo sapien
tgtggtgacacgcgcacataatctg

SEQ ID NO: 5444339 - DNA, 25 bp, Homo sapien
tctattttcagtcttctggcacgta

SEQ ID NO: 5444340 - DNA, 25 bp, Homo sapien
ttatcacttagctaaagacagccta

SEQ ID NO: 5444341 - DNA, 25 bp, Homo sapien
aagaatatcttgttagtgcccagga

SEQ ID NO: 5444342 - DNA, 25 bp, Homo sapien
gccttctcatttgccatgtgctgtg

SEQ ID NO: 5444343 - DNA, 25 bp, Homo sapien
ttaattgtatgctaatactcatctg

SEQ ID NO: 5444344 - DNA, 25 bp, Homo sapien
attgtatgctaatactcatctgata

SEQ ID NO: 5444345 - DNA, 25 bp, Homo sapien
taaaaattaatatgccagattaaaa

SEQ ID NO: 5444346 - DNA, 25 bp, Homo sapien
ggaaaggtggaaagtatatatcatt

SEQ ID NO: 5444347 - DNA, 25 bp, Homo sapien
tcttagtcttcagtatgcttcaggc

SEQ ID NO: 5444348 - DNA, 25 bp, Homo sapien
gaccaccagcaaatcggcacttaat

SEQ ID NO: 5444349 - DNA, 25 bp, Homo sapien
gaaagtggattcaaccatcagacca

SEQ ID NO: 5444350 - DNA, 25 bp, Homo sapien
tcacctcatagttaggctgggcgcg

SEQ ID NO: 5444351 - DNA, 25 bp, Homo sapien
tcctgtcagataggattttctcaag

SEQ ID NO: 5444352 - DNA, 25 bp, Homo sapien
tataaagccttctaaaagtgaacta

SEQ ID NO: 5444353 - DNA, 25 bp, Homo sapien
ttctcaagagacaatttaacgttat

SEQ ID NO: 5444354 - DNA, 25 bp, Homo sapien
gaatcagacaagttcaagctctaaa

SEQ ID NO: 5444355 - DNA, 25 bp, Homo sapien
gaaaatactcgcacttcctcagaac

SEQ ID NO: 5444356 - DNA, 25 bp, Homo sapien
tatggatgccactatgaaagctgac

SEQ ID NO: 5444357 - DNA, 25 bp, Homo sapien
gaaagctgacattaagccactaaag

SEQ ID NO: 5444358 - DNA, 25 bp, Homo sapien
tgctgtaaaatggtgcgttattccg

SEQ ID NO: 5444359 - DNA, 25 bp, Homo sapien
gaaccattaagatgagcattggaga

SEQ ID NO: 5444360 - DNA, 25 bp, Homo sapien
aaagagaatcagtaggacccagtga

SEQ ID NO: 5444361 - DNA, 25 bp, Homo sapien
taaaccaaggtagagtcagtgatgg

SEQ ID NO: 5444362 - DNA, 25 bp, Homo sapien
gagagaaagactgttaacttcaggg

SEQ ID NO: 5444363 - DNA, 25 bp, Homo sapien
aggaattgaacttccagaaattggt

SEQ ID NO: 5444364 - DNA, 25 bp, Homo sapien
gaacttccagaaattggtttcaagc

SEQ ID NO: 5444365 - DNA, 25 bp, Homo sapien
gaaaggaaggaattgaacttccaga

SEQ ID NO: 5444366 - DNA, 25 bp, Homo sapien
aatcccataacttctatgactctct

SEQ ID NO: 5444367 - DNA, 25 bp, Homo sapien
ccaatggcaccagctgtgcgattaa

SEQ ID NO: 5444368 - DNA, 25 bp, Homo sapien
cacactagttctgtcaactatcagt

SEQ ID NO: 5444369 - DNA, 25 bp, Homo sapien
gccacactagttctgtcaactatca

SEQ ID NO: 5444370 - DNA, 25 bp, Homo sapien
ggcaccagctgtgcgattaacagcc

SEQ ID NO: 5444371 - DNA, 25 bp, Homo sapien
taatggctcctaaaatagaagaggc

SEQ ID NO: 5444372 - DNA, 25 bp, Homo sapien
tactgggacatagctgggggtttta

SEQ ID NO: 5444373 - DNA, 25 bp, Homo sapien
gggtgtttgatactgggacatagct

SEQ ID NO: 5444374 - DNA, 25 bp, Homo sapien
tgtttgatactgggacatagctggg

SEQ ID NO: 5444375 - DNA, 25 bp, Homo sapien
gataaaccgtccagccggttccagc

SEQ ID NO: 5444376 - DNA, 25 bp, Homo sapien
gagcgagaagatggtcaggtccaca

SEQ ID NO: 5444377 - DNA, 25 bp, Homo sapien
tcctgcatgtgctaggtttcctctt

SEQ ID NO: 5444378 - DNA, 25 bp, Homo sapien
catgtgctaggtttcctcttaaagg

SEQ ID NO: 5444379 - DNA, 25 bp, Homo sapien
gagtttctggttggtctagtcctgc

SEQ ID NO: 5444380 - DNA, 25 bp, Homo sapien
gaagatgaaaacgaacgcgtgggca

SEQ ID NO: 5444381 - DNA, 25 bp, Homo sapien
cgctcttgcgccgaatagcaggtat

SEQ ID NO: 5444382 - DNA, 25 bp, Homo sapien
ggtgcctattatctccgctcttgcg

SEQ ID NO: 5444383 - DNA, 25 bp, Homo sapien
tagtgacgtcagatctatccagagc

SEQ ID NO: 5444384 - DNA, 25 bp, Homo sapien
cagccaacttaaggcaggttcctgg

SEQ ID NO: 5444385 - DNA, 25 bp, Homo sapien
tgtatgttcctatccagtgagaagc

SEQ ID NO: 5444386 - DNA, 25 bp, Homo sapien
gacttggctctttgcatggatcctg

SEQ ID NO: 5444387 - DNA, 25 bp, Homo sapien
agacgggcgcgtccgcgacgtccac

SEQ ID NO: 5444388 - DNA, 25 bp, Homo sapien
ccgcgacgtccacgcgaggcaccag

SEQ ID NO: 5444389 - DNA, 25 bp, Homo sapien
ccccacggtggccacgcagacgggc

SEQ ID NO: 5444390 - DNA, 25 bp, Homo sapien
gtggccacgcagacgggcgcgtccg

SEQ ID NO: 5444391 - DNA, 25 bp, Homo sapien
tgctgggcaccgtgtcgtcgcccag

SEQ ID NO: 5444392 - DNA, 25 bp, Homo sapien
cagctcgtcgcccacccacctgtgg

SEQ ID NO: 5444393 - DNA, 25 bp, Homo sapien
tccggcatcggaggaggtctccgga

SEQ ID NO: 5444394 - DNA, 25 bp, Homo sapien
acccacctgtggaccggcgaggtga

SEQ ID NO: 5444395 - DNA, 25 bp, Homo sapien
ctagtttagtgtggtaatgagaagg

SEQ ID NO: 5444396 - DNA, 25 bp, Homo sapien
gaagactagtttagtgtggtaatga

SEQ ID NO: 5444397 - DNA, 25 bp, Homo sapien
agactagtttagtgtggtaatgaga

SEQ ID NO: 5444398 - DNA, 25 bp, Homo sapien
gactagtttagtgtggtaatgagaa

SEQ ID NO: 5444399 - DNA, 25 bp, Homo sapien
tcagtttcatatccaaagagccaga

SEQ ID NO: 5444400 - DNA, 25 bp, Homo sapien
caaatgagtatactgggcaggcaaa

SEQ ID NO: 5444401 - DNA, 25 bp, Homo sapien
taataagtagtataccacactgggc

SEQ ID NO: 5444402 - DNA, 25 bp, Homo sapien
ggcaactggtcatcagtctcgctga

SEQ ID NO: 5444403 - DNA, 25 bp, Homo sapien
tgatgactctttaactagcatgctg

SEQ ID NO: 5444404 - DNA, 25 bp, Homo sapien
ctctttaactagcatgctgccttca

SEQ ID NO: 5444405 - DNA, 25 bp, Homo sapien
gactctttaactagcatgctgcctt

SEQ ID NO: 5444406 - DNA, 25 bp, Homo sapien
gtggtgatgactctttaactagcat

SEQ ID NO: 5444407 - DNA, 25 bp, Homo sapien
agtaatgacagtagtactcatgttt

SEQ ID NO: 5444408 - DNA, 25 bp, Homo sapien
catgtttaattgaaactcacgctgg

SEQ ID NO: 5444409 - DNA, 25 bp, Homo sapien
ttaattgaaactcacgctggccggg

SEQ ID NO: 5444410 - DNA, 25 bp, Homo sapien
gacagtagtactcatgtttaattga

SEQ ID NO: 5444411 - DNA, 25 bp, Homo sapien
ttctgggaaattgggaacctcctca

SEQ ID NO: 5444412 - DNA, 25 bp, Homo sapien
tgtctaggccaaaacagcttcatga

SEQ ID NO: 5444413 - DNA, 25 bp, Homo sapien
ggatcttacactcaagggctctggc

SEQ ID NO: 5444414 - DNA, 25 bp, Homo sapien
gaacaagtacagtcatgccatcagc

SEQ ID NO: 5444415 - DNA, 25 bp, Homo sapien
ggtaaatagaatagcttcaatggga

SEQ ID NO: 5444416 - DNA, 25 bp, Homo sapien
tgttggtttctaaagttacactcca

SEQ ID NO: 5444417 - DNA, 25 bp, Homo sapien
ctttcagagaaaggagctatttggt

SEQ ID NO: 5444418 - DNA, 25 bp, Homo sapien
gacactctcaatagaatgcataatg

SEQ ID NO: 5444419 - DNA, 25 bp, Homo sapien
gaacacttgttgctgcctcacaaga

SEQ ID NO: 5444420 - DNA, 25 bp, Homo sapien
tacttatgtattccctgtacctgaa

SEQ ID NO: 5444421 - DNA, 25 bp, Homo sapien
aaacagcatttccaatggtaatcgg

SEQ ID NO: 5444422 - DNA, 25 bp, Homo sapien
ggtaatcggtattgttacgctgtac

SEQ ID NO: 5444423 - DNA, 25 bp, Homo sapien
gataaagcagttatgtcagagcctt

SEQ ID NO: 5444424 - DNA, 25 bp, Homo sapien
catccctaacatgtgactaccaaag

SEQ ID NO: 5444425 - DNA, 25 bp, Homo sapien
catcctagctgcctaatatgataat

SEQ ID NO: 5444426 - DNA, 25 bp, Homo sapien
tagggatgtttatctccaacaagac

SEQ ID NO: 5444427 - DNA, 25 bp, Homo sapien
tcattaatcaattcatttgttgatg

SEQ ID NO: 5444428 - DNA, 25 bp, Homo sapien
cttcattaatcaattcatttgttga

SEQ ID NO: 5444429 - DNA, 25 bp, Homo sapien
attaatcaattcatttgttgatgct

SEQ ID NO: 5444430 - DNA, 25 bp, Homo sapien
tcttcattaatcaattcatttgttg

SEQ ID NO: 5444431 - DNA, 25 bp, Homo sapien
gctcctgtcggccaaaggccgtgac

SEQ ID NO: 5444432 - DNA, 25 bp, Homo sapien
tgagtcttctcgctcctgtcggcca

SEQ ID NO: 5444433 - DNA, 25 bp, Homo sapien
gggcggctcctgagtcttctcgctc

SEQ ID NO: 5444434 - DNA, 25 bp, Homo sapien
tcttctcgctcctgtcggccaaagg

SEQ ID NO: 5444435 - DNA, 25 bp, Homo sapien
cgcgcgcgttccccgcagcgctgag

SEQ ID NO: 5444436 - DNA, 25 bp, Homo sapien
gggcgaccgcggacggcggcgcgcg

SEQ ID NO: 5444437 - DNA, 25 bp, Homo sapien
cgttccccgcagcgctgaggcgagc

SEQ ID NO: 5444438 - DNA, 25 bp, Homo sapien
cggcgcgcgcgttccccgcagcgct

SEQ ID NO: 5444439 - DNA, 25 bp, Homo sapien
gcgctccgctcagcgtggtctggca

SEQ ID NO: 5444440 - DNA, 25 bp, Homo sapien
cgcgctccgctcagcgtggtctggc

SEQ ID NO: 5444441 - DNA, 25 bp, Homo sapien
ctgcgcctccaacagccagggtcga

SEQ ID NO: 5444442 - DNA, 25 bp, Homo sapien
tgcgcctccaacagccagggtcgag

SEQ ID NO: 5444443 - DNA, 25 bp, Homo sapien
cctccaacagccagggtcgagcccc

SEQ ID NO: 5444444 - DNA, 25 bp, Homo sapien
caacagccagggtcgagcccctggc

SEQ ID NO: 5444445 - DNA, 25 bp, Homo sapien
tattatgccctggtattcctgcgtc

SEQ ID NO: 5444446 - DNA, 25 bp, Homo sapien
cacactaggcaaagtttagctcgtc

SEQ ID NO: 5444447 - DNA, 25 bp, Homo sapien
gagggttgttctcagcctaccattg

SEQ ID NO: 5444448 - DNA, 25 bp, Homo sapien
tctagatggtctatacagatacgtg

SEQ ID NO: 5444449 - DNA, 25 bp, Homo sapien
tgcacacatgtgagggagataaata

SEQ ID NO: 5444450 - DNA, 25 bp, Homo sapien
tgctctgggttaaatgggaaacata

SEQ ID NO: 5444451 - DNA, 25 bp, Homo sapien
aatgcattagcaaggtgaccactac

SEQ ID NO: 5444452 - DNA, 25 bp, Homo sapien
tgtattcgataacagggacttcctt

SEQ ID NO: 5444453 - DNA, 25 bp, Homo sapien
gatgggacatggactgcattttacc

SEQ ID NO: 5444454 - DNA, 25 bp, Homo sapien
gcctgtgggcagttactattgtaga

SEQ ID NO: 5444455 - DNA, 25 bp, Homo sapien
ttgagagcatcagagtcaccatggg

SEQ ID NO: 5444456 - DNA, 25 bp, Homo sapien
gaactaagagcacatggaagctact

SEQ ID NO: 5444457 - DNA, 25 bp, Homo sapien
aaatgtcttcttatggaaatgcaat

SEQ ID NO: 5444458 - DNA, 25 bp, Homo sapien
aaaatgtcttcttatggaaatgcaa

SEQ ID NO: 5444459 - DNA, 25 bp, Homo sapien
ttgatgtctcaaggccactgaagtg

SEQ ID NO: 5444460 - DNA, 25 bp, Homo sapien
tctctctaacccaaaacaaagctgg

SEQ ID NO: 5444461 - DNA, 25 bp, Homo sapien
caaagctggtctggttctaatggtg

SEQ ID NO: 5444462 - DNA, 25 bp, Homo sapien
gaatactattgccagttgcttaggg

SEQ ID NO: 5444463 - DNA, 25 bp, Homo sapien
aagtctgcaaacagattgaaccagg

SEQ ID NO: 5444464 - DNA, 25 bp, Homo sapien
gattgaaccaggctgacatgtcttg

SEQ ID NO: 5444465 - DNA, 25 bp, Homo sapien
gcatctgggtttgaaagtggatcca

SEQ ID NO: 5444466 - DNA, 25 bp, Homo sapien
gggtttgaaagtggatccaagtctg

SEQ ID NO: 5444467 - DNA, 25 bp, Homo sapien
taagatcacttatagaagactctca

SEQ ID NO: 5444468 - DNA, 25 bp, Homo sapien
cctcagcctccgagaacactaggat

SEQ ID NO: 5444469 - DNA, 25 bp, Homo sapien
aaaggcaagcaatactgtggtctcc

SEQ ID NO: 5444470 - DNA, 25 bp, Homo sapien
taacttgtgctttgatgaggtgcct

SEQ ID NO: 5444471 - DNA, 25 bp, Homo sapien
actggctggttatcagtgtgtgaaa

SEQ ID NO: 5444472 - DNA, 25 bp, Homo sapien
gaaggcactggctggttatcagtgt

SEQ ID NO: 5444473 - DNA, 25 bp, Homo sapien
ttaatttctttggactctgtgaagg

SEQ ID NO: 5444474 - DNA, 25 bp, Homo sapien
gttaatttctttggactctgtgaag

SEQ ID NO: 5444475 - DNA, 25 bp, Homo sapien
gaaccagaacttaggaggttgttca

SEQ ID NO: 5444476 - DNA, 25 bp, Homo sapien
agccacatgaaagccaaggtcaaag

SEQ ID NO: 5444477 - DNA, 25 bp, Homo sapien
gcattcttgggtaaattcactagta

SEQ ID NO: 5444478 - DNA, 25 bp, Homo sapien
tcactagtacttgaagaaccagaac

SEQ ID NO: 5444479 - DNA, 25 bp, Homo sapien
aactgaggtgctccaaattctctca

SEQ ID NO: 5444480 - DNA, 25 bp, Homo sapien
ctgaggtgctccaaattctctcatt

SEQ ID NO: 5444481 - DNA, 25 bp, Homo sapien
actgaggtgctccaaattctctcat

SEQ ID NO: 5444482 - DNA, 25 bp, Homo sapien
tgaggtgctccaaattctctcattt

SEQ ID NO: 5444483 - DNA, 25 bp, Homo sapien
gtttactcagtatagacacacatag

SEQ ID NO: 5444484 - DNA, 25 bp, Homo sapien
ttgtgatcaaaacagcgctgtcttg

SEQ ID NO: 5444485 - DNA, 25 bp, Homo sapien
gcttgactagtaatgatctcacagg

SEQ ID NO: 5444486 - DNA, 25 bp, Homo sapien
tgtgccctattgcaacaatgggagc

SEQ ID NO: 5444487 - DNA, 25 bp, Homo sapien
taaacagtagattagatgcaagagg

SEQ ID NO: 5444488 - DNA, 25 bp, Homo sapien
tgaagaacttacctagaatgtactg

SEQ ID NO: 5444489 - DNA, 25 bp, Homo sapien
aacaaagagcatatcctaaaaacgg

SEQ ID NO: 5444490 - DNA, 25 bp, Homo sapien
gacacactgtactgaaagagcagaa

SEQ ID NO: 5444491 - DNA, 25 bp, Homo sapien
tctcaaagcttgcttcctcatcaga

SEQ ID NO: 5444492 - DNA, 25 bp, Homo sapien
taagaaaaccgcctatttgttcatc

SEQ ID NO: 5444493 - DNA, 25 bp, Homo sapien
tattgagctgttcagtaagaaaacc

SEQ ID NO: 5444494 - DNA, 25 bp, Homo sapien
tcactaatcttgcttggcgtgtctt

SEQ ID NO: 5444495 - DNA, 25 bp, Homo sapien
cttcactaatcttgcttggcgtgtc

SEQ ID NO: 5444496 - DNA, 25 bp, Homo sapien
atgaatttgggacatcattcgagct

SEQ ID NO: 5444497 - DNA, 25 bp, Homo sapien
gaatttgggacatcattcgagctgt

SEQ ID NO: 5444498 - DNA, 25 bp, Homo sapien
gagagctacaaaatcatacggatga

SEQ ID NO: 5444499 - DNA, 25 bp, Homo sapien
gaaagccaatacaggcttcatgaat

SEQ ID NO: 5444500 - DNA, 25 bp, Homo sapien
tgcagcgactagctccaagtaaatc

SEQ ID NO: 5444501 - DNA, 25 bp, Homo sapien
gagatagcatattgcagcgactagc

SEQ ID NO: 5444502 - DNA, 25 bp, Homo sapien
taggtagtgagcgaatgagatagca

SEQ ID NO: 5444503 - DNA, 25 bp, Homo sapien
gagcgaatgagatagcatattgcag

SEQ ID NO: 5444504 - DNA, 25 bp, Homo sapien
atcttaattattctgtggcagtttc

SEQ ID NO: 5444505 - DNA, 25 bp, Homo sapien
tatcttaattattctgtggcagttt

SEQ ID NO: 5444506 - DNA, 25 bp, Homo sapien
ttatcttaattattctgtggcagtt

SEQ ID NO: 5444507 - DNA, 25 bp, Homo sapien
gtgcgtgcctgctccatccgattaa

SEQ ID NO: 5444508 - DNA, 25 bp, Homo sapien
ttcttgcttcagacgagacagagga

SEQ ID NO: 5444509 - DNA, 25 bp, Homo sapien
agatactgccctttgactgaatgtt

SEQ ID NO: 5444510 - DNA, 25 bp, Homo sapien
catttgctttaaggtgtctgggtcc

SEQ ID NO: 5444511 - DNA, 25 bp, Homo sapien
gagttgcatcccgttctgcttgaaa

SEQ ID NO: 5444512 - DNA, 25 bp, Homo sapien
tcattttgccagcttgagttgcatc

SEQ ID NO: 5444513 - DNA, 25 bp, Homo sapien
taaaaagagccctagctcattttct

SEQ ID NO: 5444514 - DNA, 25 bp, Homo sapien
cttggctgaagaacaaagtgccttg

SEQ ID NO: 5444515 - DNA, 25 bp, Homo sapien
gggaatctggcttcttatcagcact

SEQ ID NO: 5444516 - DNA, 25 bp, Homo sapien
ggtttcgacacagtgaatccatgga

SEQ ID NO: 5444517 - DNA, 25 bp, Homo sapien
tttccagagactctactttccatag

SEQ ID NO: 5444518 - DNA, 25 bp, Homo sapien
tatcagcactccagatggtttcgac

SEQ ID NO: 5444519 - DNA, 25 bp, Homo sapien
ttgtctctctttttgtgcaaaaagt

SEQ ID NO: 5444520 - DNA, 25 bp, Homo sapien
ttttgtgcaaaaagttgtttctcca

SEQ ID NO: 5444521 - DNA, 25 bp, Homo sapien
ttgtgcaaaaagttgtttctccaac

SEQ ID NO: 5444522 - DNA, 25 bp, Homo sapien
tctctctttttgtgcaaaaagttgt

SEQ ID NO: 5444523 - DNA, 25 bp, Homo sapien
tctgtccttaaggagggcatactct

SEQ ID NO: 5444524 - DNA, 25 bp, Homo sapien
tatcgagtactgactacatgctaga

SEQ ID NO: 5444525 - DNA, 25 bp, Homo sapien
ggcatactctagtggtgggaagaaa

SEQ ID NO: 5444526 - DNA, 25 bp, Homo sapien
tattaactggacagggagttttgag

SEQ ID NO: 5444527 - DNA, 25 bp, Homo sapien
aataaatctgggtcagaggatttga

SEQ ID NO: 5444528 - DNA, 25 bp, Homo sapien
ttcatattttgccataagaagctat

SEQ ID NO: 5444529 - DNA, 25 bp, Homo sapien
gtcagaggatttgattaactgagga

SEQ ID NO: 5444530 - DNA, 25 bp, Homo sapien
cataagaagctattcacaaaattgt

SEQ ID NO: 5444531 - DNA, 25 bp, Homo sapien
cttcagaagttcagtgcatgtctct

SEQ ID NO: 5444532 - DNA, 25 bp, Homo sapien
tgagtcttagctggtatttctcgat

SEQ ID NO: 5444533 - DNA, 25 bp, Homo sapien
cagaagttcagtgcatgtctcttga

SEQ ID NO: 5444534 - DNA, 25 bp, Homo sapien
ggtatttctcgattatcttcagaag

SEQ ID NO: 5444535 - DNA, 25 bp, Homo sapien
tataagcaccccaaaagcataacat

SEQ ID NO: 5444536 - DNA, 25 bp, Homo sapien
taagcaccccaaaagcataacattt

SEQ ID NO: 5444537 - DNA, 25 bp, Homo sapien
tgttataagcaccccaaaagcataa

SEQ ID NO: 5444538 - DNA, 25 bp, Homo sapien
cttctaagtattatgtctgttttaa

SEQ ID NO: 5444539 - DNA, 25 bp, Homo sapien
aagtattaactcgaagtctggcttt

SEQ ID NO: 5444540 - DNA, 25 bp, Homo sapien
aaagtattaactcgaagtctggctt

SEQ ID NO: 5444541 - DNA, 25 bp, Homo sapien
tttcctgttgctttgataaagacct

SEQ ID NO: 5444542 - DNA, 25 bp, Homo sapien
gcatcagacgccaccaagtgctcat

SEQ ID NO: 5444543 - DNA, 25 bp, Homo sapien
cagacgccaccaagtgctcatcctc

SEQ ID NO: 5444544 - DNA, 25 bp, Homo sapien
tgataaagacctgtttagttttcca

SEQ ID NO: 5444545 - DNA, 25 bp, Homo sapien
tgactactgactgattatcttctgg

SEQ ID NO: 5444546 - DNA, 25 bp, Homo sapien
gactactgactgattatcttctggt

SEQ ID NO: 5444547 - DNA, 25 bp, Homo sapien
ctgactactgactgattatcttctg

SEQ ID NO: 5444548 - DNA, 25 bp, Homo sapien
taaaaattctcaataataggctggg

SEQ ID NO: 5444549 - DNA, 25 bp, Homo sapien
atgaacagactaaaattaaacttct

SEQ ID NO: 5444550 - DNA, 25 bp, Homo sapien
aaattctcaataataggctgggcac

SEQ ID NO: 5444551 - DNA, 25 bp, Homo sapien
ctacaatgaacagactaaaattaaa

SEQ ID NO: 5444552 - DNA, 25 bp, Homo sapien
ccatcgtggatctcaatcttcttca

SEQ ID NO: 5444553 - DNA, 25 bp, Homo sapien
acaactatggccctggtgaagctgg

SEQ ID NO: 5444554 - DNA, 25 bp, Homo sapien
gcttcccatcgtggatctcaatctt

SEQ ID NO: 5444555 - DNA, 25 bp, Homo sapien
accagcttcccatcgtggatctcaa

SEQ ID NO: 5444556 - DNA, 25 bp, Homo sapien
tgaaggagatggagcccatgccaga

SEQ ID NO: 5444557 - DNA, 25 bp, Homo sapien
gagccgaggccatagctgaggctgg

SEQ ID NO: 5444558 - DNA, 25 bp, Homo sapien
tggggcttgtgagaccctcataggc

SEQ ID NO: 5444559 - DNA, 25 bp, Homo sapien
ggctggggcttgtgagaccctcata

SEQ ID NO: 5444560 - DNA, 25 bp, Homo sapien
cttcatatggatattcatgttctgc

SEQ ID NO: 5444561 - DNA, 25 bp, Homo sapien
cccagactccaactggctctcctcg

SEQ ID NO: 5444562 - DNA, 25 bp, Homo sapien
tggtggtcttcatatggatattcat

SEQ ID NO: 5444563 - DNA, 25 bp, Homo sapien
gactccaactggctctcctcgccct

SEQ ID NO: 5444564 - DNA, 25 bp, Homo sapien
cagggccagcctgatgttcgtcagt

SEQ ID NO: 5444565 - DNA, 25 bp, Homo sapien
tccagggccagcctgatgttcgtca

SEQ ID NO: 5444566 - DNA, 25 bp, Homo sapien
ccagggccagcctgatgttcgtcag

SEQ ID NO: 5444567 - DNA, 25 bp, Homo sapien
gggccagcctgatgttcgtcagttc

SEQ ID NO: 5444568 - DNA, 25 bp, Homo sapien
acactgctaggcatctgcgatggca

SEQ ID NO: 5444569 - DNA, 25 bp, Homo sapien
tactcatgcagctgctacgccatgt

SEQ ID NO: 5444570 - DNA, 25 bp, Homo sapien
caactccccacactgctaggcatct

SEQ ID NO: 5444571 - DNA, 25 bp, Homo sapien
tggcagcctccagggaaactctctg

SEQ ID NO: 5444572 - DNA, 25 bp, Homo sapien
catcccagatctcagtctttgcatg

SEQ ID NO: 5444573 - DNA, 25 bp, Homo sapien
ccagatctcagtctttgcatgccgc

SEQ ID NO: 5444574 - DNA, 25 bp, Homo sapien
gttcatcccagatctcagtctttgc

SEQ ID NO: 5444575 - DNA, 25 bp, Homo sapien
gttctggttcatcccagatctcagt

SEQ ID NO: 5444576 - DNA, 25 bp, Homo sapien
tggttggccatctcctcatactgcg

SEQ ID NO: 5444577 - DNA, 25 bp, Homo sapien
tggctgttgttcatgcacagcacca

SEQ ID NO: 5444578 - DNA, 25 bp, Homo sapien
ctggctgtggttggccatctcctca

SEQ ID NO: 5444579 - DNA, 25 bp, Homo sapien
gagtggctgttgttcatgcacagca

SEQ ID NO: 5444580 - DNA, 25 bp, Homo sapien
tcagcccttccaggcaagactctag

SEQ ID NO: 5444581 - DNA, 25 bp, Homo sapien
ctgcccgaggaggttgatctcttca

SEQ ID NO: 5444582 - DNA, 25 bp, Homo sapien
ccgaggaggttgatctcttcagtca

SEQ ID NO: 5444583 - DNA, 25 bp, Homo sapien
tgcccgaggaggttgatctcttcag

SEQ ID NO: 5444584 - DNA, 25 bp, Homo sapien
cacatactgcctgatgaggacaaat

SEQ ID NO: 5444585 - DNA, 25 bp, Homo sapien
ctaagccatcttctgctgctgcagg

SEQ ID NO: 5444586 - DNA, 25 bp, Homo sapien
tcttctgctgctgcaggagggctcc

SEQ ID NO: 5444587 - DNA, 25 bp, Homo sapien
ttctgctgctgcaggagggctccac

SEQ ID NO: 5444588 - DNA, 25 bp, Homo sapien
catcttctgctgctgcaggagggct

SEQ ID NO: 5444589 - DNA, 25 bp, Homo sapien
cgcataggagcagttgccgaaggcc

SEQ ID NO: 5444590 - DNA, 25 bp, Homo sapien
cacgcgcataggagcagttgccgaa

SEQ ID NO: 5444591 - DNA, 25 bp, Homo sapien
cataggagcagttgccgaaggcctg

SEQ ID NO: 5444592 - DNA, 25 bp, Homo sapien
cgggcccacgcgcataggagcagtt

SEQ ID NO: 5444593 - DNA, 25 bp, Homo sapien
ctactgacaatggtcaagtttctgg

SEQ ID NO: 5444594 - DNA, 25 bp, Homo sapien
aattcaacaagccagtcagaggtaa

SEQ ID NO: 5444595 - DNA, 25 bp, Homo sapien
aaataatcttcataaccgagcacta

SEQ ID NO: 5444596 - DNA, 25 bp, Homo sapien
attcaacaagccagtcagaggtaac

SEQ ID NO: 5444597 - DNA, 25 bp, Homo sapien
ccgagcactaaaattaaattcaaca

SEQ ID NO: 5444598 - DNA, 25 bp, Homo sapien
tgagagctacggaagttaggaacca

SEQ ID NO: 5444599 - DNA, 25 bp, Homo sapien
tcagggaaacactcagagtctcaag

SEQ ID NO: 5444600 - DNA, 25 bp, Homo sapien
tctcaaggcaggtcaaaggagggca

SEQ ID NO: 5444601 - DNA, 25 bp, Homo sapien
caagactcctttttgggctcgatta

SEQ ID NO: 5444602 - DNA, 25 bp, Homo sapien
tgagacttcagctttattggaaatg

SEQ ID NO: 5444603 - DNA, 25 bp, Homo sapien
gagacttcagctttattggaaatgt

SEQ ID NO: 5444604 - DNA, 25 bp, Homo sapien
atgagacttcagctttattggaaat

SEQ ID NO: 5444605 - DNA, 25 bp, Homo sapien
tgtgaagatgattaaagtaatatcg

SEQ ID NO: 5444606 - DNA, 25 bp, Homo sapien
cattcggagatgtttactcggccag

SEQ ID NO: 5444607 - DNA, 25 bp, Homo sapien
tcctactaaaggatgaggcacctgt

SEQ ID NO: 5444608 - DNA, 25 bp, Homo sapien
gtaatatcgtcttacagtacgtcgc

SEQ ID NO: 5444609 - DNA, 25 bp, Homo sapien
taaaaagaggtcagcagggaagcac

SEQ ID NO: 5444610 - DNA, 25 bp, Homo sapien
cgttaaaaagaggtcagcagggaag

SEQ ID NO: 5444611 - DNA, 25 bp, Homo sapien
ttaaaaagaggtcagcagggaagca

SEQ ID NO: 5444612 - DNA, 25 bp, Homo sapien
cacgttaaaaagaggtcagcaggga

SEQ ID NO: 5444613 - DNA, 25 bp, Homo sapien
ccgccgccgcctctattaggagcga

SEQ ID NO: 5444614 - DNA, 25 bp, Homo sapien
cgccgagggaaatcacccaaacgag

SEQ ID NO: 5444615 - DNA, 25 bp, Homo sapien
ttcactacagcgagcgtggccggga

SEQ ID NO: 5444616 - DNA, 25 bp, Homo sapien
ctgaaggctgttcgggtgatccgcc

SEQ ID NO: 5444617 - DNA, 25 bp, Homo sapien
tcgcgttcggccgtacggtgatccg

SEQ ID NO: 5444618 - DNA, 25 bp, Homo sapien
tcttccgcctcctcgggtcgcgttc

SEQ ID NO: 5444619 - DNA, 25 bp, Homo sapien
agtgcccctccgcaccagtgcgtgg

SEQ ID NO: 5444620 - DNA, 25 bp, Homo sapien
cagtgcgtggaggtgtcaggctccc

SEQ ID NO: 5444621 - DNA, 25 bp, Homo sapien
gaggcgggagatttaaaccgcgcga

SEQ ID NO: 5444622 - DNA, 25 bp, Homo sapien
gagcatctctcggtctgctcttgaa

SEQ ID NO: 5444623 - DNA, 25 bp, Homo sapien
accggcccgactcgggatcggagca

SEQ ID NO: 5444624 - DNA, 25 bp, Homo sapien
cggtctgctcttgaatgaactcggg

SEQ ID NO: 5444625 - DNA, 25 bp, Homo sapien
tcgggatcggagcatctctcggtct

SEQ ID NO: 5444626 - DNA, 25 bp, Homo sapien
ccaagccattaatgaagtgtagtat

SEQ ID NO: 5444627 - DNA, 25 bp, Homo sapien
tcacttaactgggtaaaattacaga

SEQ ID NO: 5444628 - DNA, 25 bp, Homo sapien
tagtatttacacttcatataatcac

SEQ ID NO: 5444629 - DNA, 25 bp, Homo sapien
cagaaagatacacagtatctccaag

SEQ ID NO: 5444630 - DNA, 25 bp, Homo sapien
aatgtagagctagctgctgatgctt

SEQ ID NO: 5444631 - DNA, 25 bp, Homo sapien
ggcacagtgtaggaatagtatcaga

SEQ ID NO: 5444632 - DNA, 25 bp, Homo sapien
agactgaggcaagcggagcacttgt

SEQ ID NO: 5444633 - DNA, 25 bp, Homo sapien
taaatggcttgcactaggaagagcg

SEQ ID NO: 5444634 - DNA, 25 bp, Homo sapien
taccgaagacgtcaggagaagcatt

SEQ ID NO: 5444635 - DNA, 25 bp, Homo sapien
gagaagcattataggtcagtgacag

SEQ ID NO: 5444636 - DNA, 25 bp, Homo sapien
gatgacttggaatgtagggctccac

SEQ ID NO: 5444637 - DNA, 25 bp, Homo sapien
ggccatggagagctatcttcccaga

SEQ ID NO: 5444638 - DNA, 25 bp, Homo sapien
tataccagttaagagcttgtccaag

SEQ ID NO: 5444639 - DNA, 25 bp, Homo sapien
ggtacttaacctgtctgcattgtgg

SEQ ID NO: 5444640 - DNA, 25 bp, Homo sapien
cagtaatacgtttagtggcacgcta

SEQ ID NO: 5444641 - DNA, 25 bp, Homo sapien
tattactcagatgtatgtcgcacag

SEQ ID NO: 5444642 - DNA, 25 bp, Homo sapien
atattattggaatatcccttgcata

SEQ ID NO: 5444643 - DNA, 25 bp, Homo sapien
aaaaagatattattggaatatccct

SEQ ID NO: 5444644 - DNA, 25 bp, Homo sapien
gcatatagtcttaaaatgtcatatt

SEQ ID NO: 5444645 - DNA, 25 bp, Homo sapien
cagtttctggctagtaaaatctgga

SEQ ID NO: 5444646 - DNA, 25 bp, Homo sapien
tctccaataatatactaggaagcat

SEQ ID NO: 5444647 - DNA, 25 bp, Homo sapien
gttattatcagaaattcccagatgg

SEQ ID NO: 5444648 - DNA, 25 bp, Homo sapien
gctatgtttttctacaaaggcccca

SEQ ID NO: 5444649 - DNA, 25 bp, Homo sapien
ttgcagggttgcttgttccattata

SEQ ID NO: 5444650 - DNA, 25 bp, Homo sapien
cacatgaggaaagattagggttaca

SEQ ID NO: 5444651 - DNA, 25 bp, Homo sapien
tactaaaaggttgtgaatgctctac

SEQ ID NO: 5444652 - DNA, 25 bp, Homo sapien
tgtttagctctcaactgcagccaag

SEQ ID NO: 5444653 - DNA, 25 bp, Homo sapien
ggaacaaaacctacatcagccctgg

SEQ ID NO: 5444654 - DNA, 25 bp, Homo sapien
ccgtgccctgccgaatcaatatttt

SEQ ID NO: 5444655 - DNA, 25 bp, Homo sapien
cgtgccctgccgaatcaatattttg

SEQ ID NO: 5444656 - DNA, 25 bp, Homo sapien
gtgccctgccgaatcaatattttgt

SEQ ID NO: 5444657 - DNA, 25 bp, Homo sapien
atgtaaaactcagtttaatttcaag

SEQ ID NO: 5444658 - DNA, 25 bp, Homo sapien
tgaagggtgaaaacattatataaac

SEQ ID NO: 5444659 - DNA, 25 bp, Homo sapien
aagaaaaagtgatacgttagctgtt

SEQ ID NO: 5444660 - DNA, 25 bp, Homo sapien
cgttagctgttatgaagggtgaaaa

SEQ ID NO: 5444661 - DNA, 25 bp, Homo sapien
tcatgccccaacatgggaagtggta

SEQ ID NO: 5444662 - DNA, 25 bp, Homo sapien
aagtggtaggtgaatatctgtagga

SEQ ID NO: 5444663 - DNA, 25 bp, Homo sapien
tgtctgctcctccactcagaagtag

SEQ ID NO: 5444664 - DNA, 25 bp, Homo sapien
taggaatacaatttattgtctgctc

SEQ ID NO: 5444665 - DNA, 25 bp, Homo sapien
gccagatcatagagaggagccttac

SEQ ID NO: 5444666 - DNA, 25 bp, Homo sapien
gcagccagatcatagagaggagcct

SEQ ID NO: 5444667 - DNA, 25 bp, Homo sapien
cagccagatcatagagaggagcctt

SEQ ID NO: 5444668 - DNA, 25 bp, Homo sapien
cagatcatagagaggagccttacaa

SEQ ID NO: 5444669 - DNA, 25 bp, Homo sapien
tactcttctggttttagataagaat

SEQ ID NO: 5444670 - DNA, 25 bp, Homo sapien
tcttctggttttagataagaatttc

SEQ ID NO: 5444671 - DNA, 25 bp, Homo sapien
tttactcttctggttttagataaga

SEQ ID NO: 5444672 - DNA, 25 bp, Homo sapien
ttctataacaggtaattgatatgtt

SEQ ID NO: 5444673 - DNA, 25 bp, Homo sapien
ctgatgtcacccaaccagtatgtga

SEQ ID NO: 5444674 - DNA, 25 bp, Homo sapien
gatgtcacccaaccagtatgtgacg

SEQ ID NO: 5444675 - DNA, 25 bp, Homo sapien
atgtcacccaaccagtatgtgacgt

SEQ ID NO: 5444676 - DNA, 25 bp, Homo sapien
tactgatgtcacccaaccagtatgt

SEQ ID NO: 5444677 - DNA, 25 bp, Homo sapien
atgctaaacgtttacaaagtggaga

SEQ ID NO: 5444678 - DNA, 25 bp, Homo sapien
agatgctaaacgtttacaaagtgga

SEQ ID NO: 5444679 - DNA, 25 bp, Homo sapien
gatgctaaacgtttacaaagtggag

SEQ ID NO: 5444680 - DNA, 25 bp, Homo sapien
cagatgctaaacgtttacaaagtgg

SEQ ID NO: 5444681 - DNA, 25 bp, Homo sapien
gtttatcacttaaaagaacactgaa

SEQ ID NO: 5444682 - DNA, 25 bp, Homo sapien
aaaccatctctagaagtttatcact

SEQ ID NO: 5444683 - DNA, 25 bp, Homo sapien
catggtagactaaaaaccatctcta

SEQ ID NO: 5444684 - DNA, 25 bp, Homo sapien
ggaaagaacattaaccatggtagac

SEQ ID NO: 5444685 - DNA, 25 bp, Homo sapien
taagactgccagactcaacatccca

SEQ ID NO: 5444686 - DNA, 25 bp, Homo sapien
cttcagcatctgaccacagaactga

SEQ ID NO: 5444687 - DNA, 25 bp, Homo sapien
catctgaccacagaactgaggaaac

SEQ ID NO: 5444688 - DNA, 25 bp, Homo sapien
ttgacttaagactgccagactcaac

SEQ ID NO: 5444689 - DNA, 25 bp, Homo sapien
ctactcagatatgttctttaaaagt

SEQ ID NO: 5444690 - DNA, 25 bp, Homo sapien
tataactcaggaaatcttttcctac

SEQ ID NO: 5444691 - DNA, 25 bp, Homo sapien
aaagagctaccttctcagtaaaaca

SEQ ID NO: 5444692 - DNA, 25 bp, Homo sapien
tataaactcccactggcacaatatc

SEQ ID NO: 5444693 - DNA, 25 bp, Homo sapien
ttggtcgatttgtggactcctccat

SEQ ID NO: 5444694 - DNA, 25 bp, Homo sapien
gtttctttcttggtcgatttgtgga

SEQ ID NO: 5444695 - DNA, 25 bp, Homo sapien
ccttgttagtcccaactgttctgtc

SEQ ID NO: 5444696 - DNA, 25 bp, Homo sapien
tgttagtcccaactgttctgtcttc

SEQ ID NO: 5444697 - DNA, 25 bp, Homo sapien
ctgtagaccagatctttagcatctt

SEQ ID NO: 5444698 - DNA, 25 bp, Homo sapien
agatctttagcatcttatcccagga

SEQ ID NO: 5444699 - DNA, 25 bp, Homo sapien
ccagatctttagcatcttatcccag

SEQ ID NO: 5444700 - DNA, 25 bp, Homo sapien
tagaccagatctttagcatcttatc

SEQ ID NO: 5444701 - DNA, 25 bp, Homo sapien
acagatgtatatgaagggaaaagac

SEQ ID NO: 5444702 - DNA, 25 bp, Homo sapien
ggaaaagacatatgtaatatgattc

SEQ ID NO: 5444703 - DNA, 25 bp, Homo sapien
attatttgcctacaacagtaggtct

SEQ ID NO: 5444704 - DNA, 25 bp, Homo sapien
ttgcctacaacagtaggtctcttcc

SEQ ID NO: 5444705 - DNA, 25 bp, Homo sapien
ccagggattcaaactgagcaagtga

SEQ ID NO: 5444706 - DNA, 25 bp, Homo sapien
tgaaatcctatcttttgtcaccgat

SEQ ID NO: 5444707 - DNA, 25 bp, Homo sapien
gcaagtgactatctcctattgtatg

SEQ ID NO: 5444708 - DNA, 25 bp, Homo sapien
tcaccgattgttaggaaactaggcc

SEQ ID NO: 5444709 - DNA, 25 bp, Homo sapien
gcatgacctctacagcagtgtaggg

SEQ ID NO: 5444710 - DNA, 25 bp, Homo sapien
tcctgagccatcaacagctatagaa

SEQ ID NO: 5444711 - DNA, 25 bp, Homo sapien
agagaatagtctgatccatagaagc

SEQ ID NO: 5444712 - DNA, 25 bp, Homo sapien
cactcaataataagcaggacaaact

SEQ ID NO: 5444713 - DNA, 25 bp, Homo sapien
aacatccgtatgtcccacaattgtc

SEQ ID NO: 5444714 - DNA, 25 bp, Homo sapien
gccacatcttttacaacatccgtat

SEQ ID NO: 5444715 - DNA, 25 bp, Homo sapien
gaccagatccgagaagtcttatcat

SEQ ID NO: 5444716 - DNA, 25 bp, Homo sapien
ccttccaaggaccagatccgagaag

SEQ ID NO: 5444717 - DNA, 25 bp, Homo sapien
tgcccctttaattgaactgatccag

SEQ ID NO: 5444718 - DNA, 25 bp, Homo sapien
tctgcccctttaattgaactgatcc

SEQ ID NO: 5444719 - DNA, 25 bp, Homo sapien
taattgaactgatccagtcatcatg

SEQ ID NO: 5444720 - DNA, 25 bp, Homo sapien
ccctttaattgaactgatccagtca

SEQ ID NO: 5444721 - DNA, 25 bp, Homo sapien
ttcgcagaaactggcccttaataag

SEQ ID NO: 5444722 - DNA, 25 bp, Homo sapien
gcagaaactggcccttaataaggaa

SEQ ID NO: 5444723 - DNA, 25 bp, Homo sapien
cattcgcagaaactggcccttaata

SEQ ID NO: 5444724 - DNA, 25 bp, Homo sapien
tcgcagaaactggcccttaataagg

SEQ ID NO: 5444725 - DNA, 25 bp, Homo sapien
tgagaagggaacatcatctacggca

SEQ ID NO: 5444726 - DNA, 25 bp, Homo sapien
gaagggaacatcatctacggcatat

SEQ ID NO: 5444727 - DNA, 25 bp, Homo sapien
agaagggaacatcatctacggcata

SEQ ID NO: 5444728 - DNA, 25 bp, Homo sapien
gagaagggaacatcatctacggcat

SEQ ID NO: 5444729 - DNA, 25 bp, Homo sapien
ttgttatcagtgtagaagcgtgttt

SEQ ID NO: 5444730 - DNA, 25 bp, Homo sapien
tcttgttatcagtgtagaagcgtgt

SEQ ID NO: 5444731 - DNA, 25 bp, Homo sapien
tatcagtgtagaagcgtgtttggag

SEQ ID NO: 5444732 - DNA, 25 bp, Homo sapien
atcagtgtagaagcgtgtttggagc

SEQ ID NO: 5444733 - DNA, 25 bp, Homo sapien
agtacacacgacttgcccacggaaa

SEQ ID NO: 5444734 - DNA, 25 bp, Homo sapien
ggcgaggagtacacacgacttgccc

SEQ ID NO: 5444735 - DNA, 25 bp, Homo sapien
gttagcagacccacaacacgaagct

SEQ ID NO: 5444736 - DNA, 25 bp, Homo sapien
cgtacgggttagcagacccacaaca

SEQ ID NO: 5444737 - DNA, 25 bp, Homo sapien
gatagtcgtaaaggtagcatgtccc

SEQ ID NO: 5444738 - DNA, 25 bp, Homo sapien
taactgcggcttttagagagaggcg

SEQ ID NO: 5444739 - DNA, 25 bp, Homo sapien
tagactgcacaggtaagcgaggaac

SEQ ID NO: 5444740 - DNA, 25 bp, Homo sapien
cgtgtgggcccgtaatcgattagga

SEQ ID NO: 5444741 - DNA, 25 bp, Homo sapien
ggagctccgagcaactgccggcctc

SEQ ID NO: 5444742 - DNA, 25 bp, Homo sapien
cgcagccggtcactggcggcgcctt

SEQ ID NO: 5444743 - DNA, 25 bp, Homo sapien
cgcgccaagcttgggggccttttcg

SEQ ID NO: 5444744 - DNA, 25 bp, Homo sapien
gcggcgccttccgcgccaagcttgg

SEQ ID NO: 5444745 - DNA, 25 bp, Homo sapien
aacagccactccctcgatttaaatg

SEQ ID NO: 5444746 - DNA, 25 bp, Homo sapien
ccctcgatttaaatggcatccttgc

SEQ ID NO: 5444747 - DNA, 25 bp, Homo sapien
tcttggtcacatccctggtcctgtc

SEQ ID NO: 5444748 - DNA, 25 bp, Homo sapien
agttcttggtcacatccctggtcct

SEQ ID NO: 5444749 - DNA, 25 bp, Homo sapien
taaatcgttacgtctcaatagtggt

SEQ ID NO: 5444750 - DNA, 25 bp, Homo sapien
tcagaggactcagactttggtatag

SEQ ID NO: 5444751 - DNA, 25 bp, Homo sapien
tctagtcagttacctgtgaggatga

SEQ ID NO: 5444752 - DNA, 25 bp, Homo sapien
tttaatcagaaagttacagagcaac

SEQ ID NO: 5444753 - DNA, 25 bp, Homo sapien
ttaacttagtcataaggacaaagcc

SEQ ID NO: 5444754 - DNA, 25 bp, Homo sapien
tccatcagctggcttagacatcaaa

SEQ ID NO: 5444755 - DNA, 25 bp, Homo sapien
gaccttgaaaatcttaatctctcca

SEQ ID NO: 5444756 - DNA, 25 bp, Homo sapien
tctgtacctatttttgaggaccttg

SEQ ID NO: 5444757 - DNA, 25 bp, Homo sapien
aatgacgccatcagcgaaaagcggg

SEQ ID NO: 5444758 - DNA, 25 bp, Homo sapien
aaggctcgtttcagtgccgcggccg

SEQ ID NO: 5444759 - DNA, 25 bp, Homo sapien
agagcctgtcgactgcggctgcgca

SEQ ID NO: 5444760 - DNA, 25 bp, Homo sapien
tacgcgaccattgaacagctgccgc

SEQ ID NO: 5444761 - DNA, 25 bp, Homo sapien
tcaagcatgcaccaagtagagatgt

SEQ ID NO: 5444762 - DNA, 25 bp, Homo sapien
ttaatgagctttcagaccacttgag

SEQ ID NO: 5444763 - DNA, 25 bp, Homo sapien
tacctctgagggacaagcagttttt

SEQ ID NO: 5444764 - DNA, 25 bp, Homo sapien
cgtagtttagttttggctctgctgc

SEQ ID NO: 5444765 - DNA, 25 bp, Homo sapien
attcagtctagtgttgtctttcttg

SEQ ID NO: 5444766 - DNA, 25 bp, Homo sapien
tgtgatggaagcatagcctgtgtct

SEQ ID NO: 5444767 - DNA, 25 bp, Homo sapien
gtgatggaagcatagcctgtgtctc

SEQ ID NO: 5444768 - DNA, 25 bp, Homo sapien
cacataaagttttttggacaccatg

SEQ ID NO: 5444769 - DNA, 25 bp, Homo sapien
ctctattgtgaacccttttatgtcc

SEQ ID NO: 5444770 - DNA, 25 bp, Homo sapien
ctattgtgaacccttttatgtcctt

SEQ ID NO: 5444771 - DNA, 25 bp, Homo sapien
tttctctattgtgaacccttttatg

SEQ ID NO: 5444772 - DNA, 25 bp, Homo sapien
tctctattgtgaacccttttatgtc

SEQ ID NO: 5444773 - DNA, 25 bp, Homo sapien
gatctgggaaaagtgaaggctttac

SEQ ID NO: 5444774 - DNA, 25 bp, Homo sapien
tcatgctgttgaagggatctgggaa

SEQ ID NO: 5444775 - DNA, 25 bp, Homo sapien
catgctgttgaagggatctgggaaa

SEQ ID NO: 5444776 - DNA, 25 bp, Homo sapien
agggatctgggaaaagtgaaggctt

SEQ ID NO: 5444777 - DNA, 25 bp, Homo sapien
ttgtatgcttatgaaggaaactgga

SEQ ID NO: 5444778 - DNA, 25 bp, Homo sapien
cccttgtatgcttatgaaggaaact

SEQ ID NO: 5444779 - DNA, 25 bp, Homo sapien
gagcccttgtatgcttatgaaggaa

SEQ ID NO: 5444780 - DNA, 25 bp, Homo sapien
tgagcccttgtatgcttatgaagga

SEQ ID NO: 5444781 - DNA, 25 bp, Homo sapien
atgttctcgaagggcgtaggaagaa

SEQ ID NO: 5444782 - DNA, 25 bp, Homo sapien
tgttctcgaagggcgtaggaagaag

SEQ ID NO: 5444783 - DNA, 25 bp, Homo sapien
gttctcgaagggcgtaggaagaagc

SEQ ID NO: 5444784 - DNA, 25 bp, Homo sapien
catgttctcgaagggcgtaggaaga

SEQ ID NO: 5444785 - DNA, 25 bp, Homo sapien
tgtgagttttctggtgcatttgaaa

SEQ ID NO: 5444786 - DNA, 25 bp, Homo sapien
ggaataattgaagtctttaccacaa

SEQ ID NO: 5444787 - DNA, 25 bp, Homo sapien
ctggaataattgaagtctttaccac

SEQ ID NO: 5444788 - DNA, 25 bp, Homo sapien
cagtgtgagttttctggtgcatttg

SEQ ID NO: 5444789 - DNA, 25 bp, Homo sapien
aaagttttccccacatactgtacat

SEQ ID NO: 5444790 - DNA, 25 bp, Homo sapien
taaagttttccccacatactgtaca

SEQ ID NO: 5444791 - DNA, 25 bp, Homo sapien
cctgcgtcacatctctataagagtt

SEQ ID NO: 5444792 - DNA, 25 bp, Homo sapien
tctcccatattttctgacttgatcg

SEQ ID NO: 5444793 - DNA, 25 bp, Homo sapien
ggtttcctgcgtcacatctctataa

SEQ ID NO: 5444794 - DNA, 25 bp, Homo sapien
gacttgatcgtcaacattctggtct

SEQ ID NO: 5444795 - DNA, 25 bp, Homo sapien
cctgaggggtgaaggttacagccac

SEQ ID NO: 5444796 - DNA, 25 bp, Homo sapien
ctgaggggtgaaggttacagccaca

SEQ ID NO: 5444797 - DNA, 25 bp, Homo sapien
tgaggggtgaaggttacagccacat

SEQ ID NO: 5444798 - DNA, 25 bp, Homo sapien
tcctgaggggtgaaggttacagcca

SEQ ID NO: 5444799 - DNA, 25 bp, Homo sapien
gtggcttaaagggattttgatgctg

SEQ ID NO: 5444800 - DNA, 25 bp, Homo sapien
tagtagtcaagtttgtatcttctct

SEQ ID NO: 5444801 - DNA, 25 bp, Homo sapien
cgtttggaaccatagtgtcttgggc

SEQ ID NO: 5444802 - DNA, 25 bp, Homo sapien
ggtggatgccttttagccctgcctg

SEQ ID NO: 5444803 - DNA, 25 bp, Homo sapien
tttgacattatggtcatcgtattct

SEQ ID NO: 5444804 - DNA, 25 bp, Homo sapien
cttaatatgactattgataaataca

SEQ ID NO: 5444805 - DNA, 25 bp, Homo sapien
tgggcctgactggtctttttgacat

SEQ ID NO: 5444806 - DNA, 25 bp, Homo sapien
ttccccaagaaacttaatatgacta

SEQ ID NO: 5444807 - DNA, 25 bp, Homo sapien
agctgagtgctatagctcatgagta

SEQ ID NO: 5444808 - DNA, 25 bp, Homo sapien
tgtctgtgggtcagcatagcttggt

SEQ ID NO: 5444809 - DNA, 25 bp, Homo sapien
caagaggatcactaaagggcaggag

SEQ ID NO: 5444810 - DNA, 25 bp, Homo sapien
gtgctatagctcatgagtataatcc

SEQ ID NO: 5444811 - DNA, 25 bp, Homo sapien
ttggggtcgaacttcggcggcatgg

SEQ ID NO: 5444812 - DNA, 25 bp, Homo sapien
tcgttggggtcgaacttcggcggca

SEQ ID NO: 5444813 - DNA, 25 bp, Homo sapien
atctcgttggggtcgaacttcggcg

SEQ ID NO: 5444814 - DNA, 25 bp, Homo sapien
gttggggtcgaacttcggcggcatg

SEQ ID NO: 5444815 - DNA, 25 bp, Homo sapien
gatctcgttggggtcgaacttcggc

SEQ ID NO: 5444816 - DNA, 25 bp, Homo sapien
cgttggggtcgaacttcggcggcat

SEQ ID NO: 5444817 - DNA, 25 bp, Homo sapien
tccggtgcacctcaggtatacgact

SEQ ID NO: 5444818 - DNA, 25 bp, Homo sapien
acctcaggtatacgactttgatctc

SEQ ID NO: 5444819 - DNA, 25 bp, Homo sapien
ggtgcacctcaggtatacgactttg

SEQ ID NO: 5444820 - DNA, 25 bp, Homo sapien
tgcacctcaggtatacgactttgat

SEQ ID NO: 5444821 - DNA, 25 bp, Homo sapien
cctccggtgcacctcaggtatacga

SEQ ID NO: 5444822 - DNA, 25 bp, Homo sapien
gcacctcaggtatacgactttgatc

SEQ ID NO: 5444823 - DNA, 25 bp, Homo sapien
aaagtcgtatacctgaggtgcaccg

SEQ ID NO: 5444824 - DNA, 25 bp, Homo sapien
tcgtatacctgaggtgcaccggagg

SEQ ID NO: 5444825 - DNA, 25 bp, Homo sapien
gatcaaagtcgtatacctgaggtgc

SEQ ID NO: 5444826 - DNA, 25 bp, Homo sapien
agtcgtatacctgaggtgcaccgga

SEQ ID NO: 5444827 - DNA, 25 bp, Homo sapien
tcaaagtcgtatacctgaggtgcac

SEQ ID NO: 5444828 - DNA, 25 bp, Homo sapien
gagatcaaagtcgtatacctgaggt

SEQ ID NO: 5444829 - DNA, 25 bp, Homo sapien
ccatgccgccgaagttcgaccccaa

SEQ ID NO: 5444830 - DNA, 25 bp, Homo sapien
gccgaagttcgaccccaacgagatc

SEQ ID NO: 5444831 - DNA, 25 bp, Homo sapien
tgccgccgaagttcgaccccaacga

SEQ ID NO: 5444832 - DNA, 25 bp, Homo sapien
cgccgaagttcgaccccaacgagat

SEQ ID NO: 5444833 - DNA, 25 bp, Homo sapien
catgccgccgaagttcgaccccaac

SEQ ID NO: 5444834 - DNA, 25 bp, Homo sapien
atgccgccgaagttcgaccccaacg

SEQ ID NO: 5444835 - DNA, 25 bp, Homo sapien
gagttagtagtacccaaatatgttg

SEQ ID NO: 5444836 - DNA, 25 bp, Homo sapien
actcggtgaaagttacaagtttgca

SEQ ID NO: 5444837 - DNA, 25 bp, Homo sapien
gtgattttgacagttgggcctttta

SEQ ID NO: 5444838 - DNA, 25 bp, Homo sapien
ttaaaggtatctgttgcacacttgg

SEQ ID NO: 5444839 - DNA, 25 bp, Homo sapien
tagggtattttatgcccagggcaac

SEQ ID NO: 5444840 - DNA, 25 bp, Homo sapien
tcaaacagattgttgtacgcgcccc

SEQ ID NO: 5444841 - DNA, 25 bp, Homo sapien
tccccgggagggctctgttcaaaca

SEQ ID NO: 5444842 - DNA, 25 bp, Homo sapien
cagaaattctgcgaaacaaggcgta

SEQ ID NO: 5444843 - DNA, 25 bp, Homo sapien
cgcgcccggcatcgataatctgaat

SEQ ID NO: 5444844 - DNA, 25 bp, Homo sapien
cattgcgaaaactgttgggcggaca

SEQ ID NO: 5444845 - DNA, 25 bp, Homo sapien
tctgaatctctaacgagctcccggg

SEQ ID NO: 5444846 - DNA, 25 bp, Homo sapien
ttgatgcagctggtaccgggaccac

SEQ ID NO: 5444847 - DNA, 25 bp, Homo sapien
tgaaatcgtgtgcaccgaaatcccc

SEQ ID NO: 5444848 - DNA, 25 bp, Homo sapien
gaagtcgcgggcatattctgtctga

SEQ ID NO: 5444849 - DNA, 25 bp, Homo sapien
catgttggacttcgcgatcttcgcc

SEQ ID NO: 5444850 - DNA, 25 bp, Homo sapien
agggttcgggttcgctccagagctt

SEQ ID NO: 5444851 - DNA, 25 bp, Homo sapien
ctgagagcgacgtgggctgcgtcgc

SEQ ID NO: 5444852 - DNA, 25 bp, Homo sapien
gagctgctgaggaaaagcccgcgcc

SEQ ID NO: 5444853 - DNA, 25 bp, Homo sapien
agcgacgtgggctgcgtcgctaccc

SEQ ID NO: 5444854 - DNA, 25 bp, Homo sapien
gtcgctacccctcaggcgccgggcc

SEQ ID NO: 5444855 - DNA, 25 bp, Homo sapien
gcgccactctccaaggcggctctca

SEQ ID NO: 5444856 - DNA, 25 bp, Homo sapien
tccaaggcggctctcaagtactttg

SEQ ID NO: 5444857 - DNA, 25 bp, Homo sapien
tctccaaggcggctctcaagtactt

SEQ ID NO: 5444858 - DNA, 25 bp, Homo sapien
aaggcggctctcaagtactttgggc

SEQ ID NO: 5444859 - DNA, 25 bp, Homo sapien
tcgggtgcgaggtttcctctgccgc

SEQ ID NO: 5444860 - DNA, 25 bp, Homo sapien
cttgcctccgtcagcgagagaggga

SEQ ID NO: 5444861 - DNA, 25 bp, Homo sapien
aaagtgctcgaggtccaggtcttgc

SEQ ID NO: 5444862 - DNA, 25 bp, Homo sapien
tcctgactggaatccaaagtgctcg

SEQ ID NO: 5444863 - DNA, 25 bp, Homo sapien
tgttgatgactgaggaccgtcttta

SEQ ID NO: 5444864 - DNA, 25 bp, Homo sapien
aaagtgttgatgactgaggaccgtc

SEQ ID NO: 5444865 - DNA, 25 bp, Homo sapien
aacaaaagtgttgatgactgaggac

SEQ ID NO: 5444866 - DNA, 25 bp, Homo sapien
tgaaaacaaaagtgttgatgactga

SEQ ID NO: 5444867 - DNA, 25 bp, Homo sapien
acattgctacacctgatgtgtagta

SEQ ID NO: 5444868 - DNA, 25 bp, Homo sapien
cctgatgtgtagtaattgattacca

SEQ ID NO: 5444869 - DNA, 25 bp, Homo sapien
agaaagagagatggtaaaatgttgg

SEQ ID NO: 5444870 - DNA, 25 bp, Homo sapien
gctacacctgatgtgtagtaattga

SEQ ID NO: 5444871 - DNA, 25 bp, Homo sapien
ttctaggccaggtacgatagctcat

SEQ ID NO: 5444872 - DNA, 25 bp, Homo sapien
gctacttagatgaaaacagttggga

SEQ ID NO: 5444873 - DNA, 25 bp, Homo sapien
gtcgagtcatgccaccaggagtaat

SEQ ID NO: 5444874 - DNA, 25 bp, Homo sapien
caagggatggccattgtcgagtcat

SEQ ID NO: 5444875 - DNA, 25 bp, Homo sapien
tcctaagtgaactgataaatcggcc

SEQ ID NO: 5444876 - DNA, 25 bp, Homo sapien
aaatcggcctaataaggttgagtgc

SEQ ID NO: 5444877 - DNA, 25 bp, Homo sapien
caccacgtctggttgagaactgttc

SEQ ID NO: 5444878 - DNA, 25 bp, Homo sapien
gagataatccattgcaacagccaac

SEQ ID NO: 5444879 - DNA, 25 bp, Homo sapien
ttctatccctcatcgccccaccgtt

SEQ ID NO: 5444880 - DNA, 25 bp, Homo sapien
cataccttagctcccaagaatttcc

SEQ ID NO: 5444881 - DNA, 25 bp, Homo sapien
tgttctgtggtacgtgggttatttg

SEQ ID NO: 5444882 - DNA, 25 bp, Homo sapien
cctcataccttagctcccaagaatt

SEQ ID NO: 5444883 - DNA, 25 bp, Homo sapien
ccaggcaacattgggagaccctgcc

SEQ ID NO: 5444884 - DNA, 25 bp, Homo sapien
ggaaggccaaagctggtggattgct

SEQ ID NO: 5444885 - DNA, 25 bp, Homo sapien
acttgagaccaggagaggtcaaggc

SEQ ID NO: 5444886 - DNA, 25 bp, Homo sapien
cagcccaggcaacattgggagaccc

SEQ ID NO: 5444887 - DNA, 25 bp, Homo sapien
aattatctggacatgctggcgtgcg

SEQ ID NO: 5444888 - DNA, 25 bp, Homo sapien
aaaaattatctggacatgctggcgt

SEQ ID NO: 5444889 - DNA, 25 bp, Homo sapien
tatctggacatgctggcgtgcgcct

SEQ ID NO: 5444890 - DNA, 25 bp, Homo sapien
ttatctggacatgctggcgtgcgcc

SEQ ID NO: 5444891 - DNA, 25 bp, Homo sapien
caagaatatactctggtagactgag

SEQ ID NO: 5444892 - DNA, 25 bp, Homo sapien
tgatagcattgtatattagtccaac

SEQ ID NO: 5444893 - DNA, 25 bp, Homo sapien
gccactgtaggaaatatgccaagta

SEQ ID NO: 5444894 - DNA, 25 bp, Homo sapien
tctgcaagtgggcttatttttaaca

SEQ ID NO: 5444895 - DNA, 25 bp, Homo sapien
atcgcttgaacccagtaggggaagg

SEQ ID NO: 5444896 - DNA, 25 bp, Homo sapien
attgcaccattgcactccagcctgg

SEQ ID NO: 5444897 - DNA, 25 bp, Homo sapien
ccaagattgcaccattgcactccag

SEQ ID NO: 5444898 - DNA, 25 bp, Homo sapien
cccagtaggggaaggttgtggtgag

SEQ ID NO: 5444899 - DNA, 25 bp, Homo sapien
cacggcacctggtccataaaacatt

SEQ ID NO: 5444900 - DNA, 25 bp, Homo sapien
acggcacctggtccataaaacattt

SEQ ID NO: 5444901 - DNA, 25 bp, Homo sapien
tccctgcgtcgcccagtcttgtctc

SEQ ID NO: 5444902 - DNA, 25 bp, Homo sapien
ccacggcacctggtccataaaacat

SEQ ID NO: 5444903 - DNA, 25 bp, Homo sapien
ataccaaaagtagcgggcgtggtga

SEQ ID NO: 5444904 - DNA, 25 bp, Homo sapien
aataccaaaagtagcgggcgtggtg

SEQ ID NO: 5444905 - DNA, 25 bp, Homo sapien
gacgagcgaaaatccgtctcaacca

SEQ ID NO: 5444906 - DNA, 25 bp, Homo sapien
aacttaactggcctttggggcacat

SEQ ID NO: 5444907 - DNA, 25 bp, Homo sapien
gcgaaaatccgtctcaaccaagaaa

SEQ ID NO: 5444908 - DNA, 25 bp, Homo sapien
cagtgtgggtgacgagcgaaaatcc

SEQ ID NO: 5444909 - DNA, 25 bp, Homo sapien
gaattttatgacactaaatggataa

SEQ ID NO: 5444910 - DNA, 25 bp, Homo sapien
agacattcaggctataaacaaggta

SEQ ID NO: 5444911 - DNA, 25 bp, Homo sapien
tggataattgtaaagtttgagttgg

SEQ ID NO: 5444912 - DNA, 25 bp, Homo sapien
aagacattcaggctataaacaaggt

SEQ ID NO: 5444913 - DNA, 25 bp, Homo sapien
gagattgaaccgtagatgaccatct

SEQ ID NO: 5444914 - DNA, 25 bp, Homo sapien
gtgccaagagattgaaccgtagatg

SEQ ID NO: 5444915 - DNA, 25 bp, Homo sapien
ccatcagctaaatgtgccaagagat

SEQ ID NO: 5444916 - DNA, 25 bp, Homo sapien
gccatcagctaaatgtgccaagaga

SEQ ID NO: 5444917 - DNA, 25 bp, Homo sapien
ttgagaaccactactacagaagatg

SEQ ID NO: 5444918 - DNA, 25 bp, Homo sapien
gaatcttagtgtgtgtgaccctgca

SEQ ID NO: 5444919 - DNA, 25 bp, Homo sapien
taaaactagttggactagaccaaca

SEQ ID NO: 5444920 - DNA, 25 bp, Homo sapien
ttccacagtgaaaactcatacattc

SEQ ID NO: 5444921 - DNA, 25 bp, Homo sapien
aagtcaggtggcattgaaagctgcg

SEQ ID NO: 5444922 - DNA, 25 bp, Homo sapien
taaaggtcatggcttcatatctcag

SEQ ID NO: 5444923 - DNA, 25 bp, Homo sapien
gagaaaagcctcgagaagttcccta

SEQ ID NO: 5444924 - DNA, 25 bp, Homo sapien
caagtctaagatggtactgcctgga

SEQ ID NO: 5444925 - DNA, 25 bp, Homo sapien
tacacaaatctggaacgggtggccg

SEQ ID NO: 5444926 - DNA, 25 bp, Homo sapien
tctccggctggagaaactgcatttt

SEQ ID NO: 5444927 - DNA, 25 bp, Homo sapien
ggccctcttcgacagctacacaaat

SEQ ID NO: 5444928 - DNA, 25 bp, Homo sapien
tactgcgagaacaactacatacagg

SEQ ID NO: 5444929 - DNA, 25 bp, Homo sapien
cattttctgtttgacggaatcctgc

SEQ ID NO: 5444930 - DNA, 25 bp, Homo sapien
aaaaagcggtgaagcagttctcggc

SEQ ID NO: 5444931 - DNA, 25 bp, Homo sapien
tcctgtgaatgcttcagaaaccctt

SEQ ID NO: 5444932 - DNA, 25 bp, Homo sapien
ttgctgcagagtgaagtgcttcagg

SEQ ID NO: 5444933 - DNA, 25 bp, Homo sapien
gctgcagtgacccttgatagtgctt

SEQ ID NO: 5444934 - DNA, 25 bp, Homo sapien
ttggcaaaaagacgagagagacccc

SEQ ID NO: 5444935 - DNA, 25 bp, Homo sapien
gatagtgcttgaaatgtcaaatgtt

SEQ ID NO: 5444936 - DNA, 25 bp, Homo sapien
gccttggcaaaaagacgagagagac

SEQ ID NO: 5444937 - DNA, 25 bp, Homo sapien
cctgtgtgaaaggcgagaattctac

SEQ ID NO: 5444938 - DNA, 25 bp, Homo sapien
tcctgtgtgaaaggcgagaattcta

SEQ ID NO: 5444939 - DNA, 25 bp, Homo sapien
tctcctgtgtgaaaggcgagaattc

SEQ ID NO: 5444940 - DNA, 25 bp, Homo sapien
ggtctcctgtgtgaaaggcgagaat

SEQ ID NO: 5444941 - DNA, 25 bp, Homo sapien
gaaggtgaatactcagccaccctag

SEQ ID NO: 5444942 - DNA, 25 bp, Homo sapien
gaaaagtgttagcaagctcaaggag

SEQ ID NO: 5444943 - DNA, 25 bp, Homo sapien
gctgtcaggaatacgtcgaaccttc

SEQ ID NO: 5444944 - DNA, 25 bp, Homo sapien
gaggcctcagtcaaagctgtcagga

SEQ ID NO: 5444945 - DNA, 25 bp, Homo sapien
tagttgggttaatccactgtaactg

SEQ ID NO: 5444946 - DNA, 25 bp, Homo sapien
ctttcaattatctgtggtaatggga

SEQ ID NO: 5444947 - DNA, 25 bp, Homo sapien
cactgatgggcagctaactgaggta

SEQ ID NO: 5444948 - DNA, 25 bp, Homo sapien
ggtagtgctatccagtacagtcaac

SEQ ID NO: 5444949 - DNA, 25 bp, Homo sapien
catctcagaaaatgtcgggaagtgc

SEQ ID NO: 5444950 - DNA, 25 bp, Homo sapien
cagcagtcgagagaacagtggaagt

SEQ ID NO: 5444951 - DNA, 25 bp, Homo sapien
tgaagtggtacgcttttgaattacc

SEQ ID NO: 5444952 - DNA, 25 bp, Homo sapien
agccacccaagtagtcggagcagca

SEQ ID NO: 5444953 - DNA, 25 bp, Homo sapien
gatataaagtgcatgaaagcctgag

SEQ ID NO: 5444954 - DNA, 25 bp, Homo sapien
tgggtccctctcgtaaattaagtgc

SEQ ID NO: 5444955 - DNA, 25 bp, Homo sapien
cctggaatattgctcaggaactgtt

SEQ ID NO: 5444956 - DNA, 25 bp, Homo sapien
cacgtttagtgtttttggctatgcc

SEQ ID NO: 5444957 - DNA, 25 bp, Homo sapien
ttctggagacgaaaaacacatgctg

SEQ ID NO: 5444958 - DNA, 25 bp, Homo sapien
cagtttctctgcgtggctcagctgg

SEQ ID NO: 5444959 - DNA, 25 bp, Homo sapien
catgaacatgagagagacgtggaat

SEQ ID NO: 5444960 - DNA, 25 bp, Homo sapien
tgcaatcaaggtatcagctgaggct

SEQ ID NO: 5444961 - DNA, 25 bp, Homo sapien
aatgaccatttttatgtatgtcaaa

SEQ ID NO: 5444962 - DNA, 25 bp, Homo sapien
tgtcaaaggtataacagcataactg

SEQ ID NO: 5444963 - DNA, 25 bp, Homo sapien
tctgccatcatttgtacaatgctga

SEQ ID NO: 5444964 - DNA, 25 bp, Homo sapien
ctttctgccatcatttgtacaatgc

SEQ ID NO: 5444965 - DNA, 25 bp, Homo sapien
gaaagtctcccaacactctgagggt

SEQ ID NO: 5444966 - DNA, 25 bp, Homo sapien
tgtgtgaagctagacacgaaggtcc

SEQ ID NO: 5444967 - DNA, 25 bp, Homo sapien
gaaggtccctaaggttctgaagaga

SEQ ID NO: 5444968 - DNA, 25 bp, Homo sapien
tgctaatggccagtgtacccagatg

SEQ ID NO: 5444969 - DNA, 25 bp, Homo sapien
gttcccacagctcaccactacagaa

SEQ ID NO: 5444970 - DNA, 25 bp, Homo sapien
gggaagacaactatgcagaaaacag

SEQ ID NO: 5444971 - DNA, 25 bp, Homo sapien
cagaaaacagagttagtggcggtca

SEQ ID NO: 5444972 - DNA, 25 bp, Homo sapien
aaaacagagttagtggcggtcagca

SEQ ID NO: 5444973 - DNA, 25 bp, Homo sapien
catatttaccgtgatgtctggaccg

SEQ ID NO: 5444974 - DNA, 25 bp, Homo sapien
cagccttattggagagagccttata

SEQ ID NO: 5444975 - DNA, 25 bp, Homo sapien
ccatcagagttgtgtaaaggcgtgt

SEQ ID NO: 5444976 - DNA, 25 bp, Homo sapien
tatattactccaacactggcaggag

SEQ ID NO: 5444977 - DNA, 25 bp, Homo sapien
tctgttgccagtaatgttccttgtg

SEQ ID NO: 5444978 - DNA, 25 bp, Homo sapien
tgccattaaaccacctccagatgag

SEQ ID NO: 5444979 - DNA, 25 bp, Homo sapien
gtaaacaatttgtgatctggccagt

SEQ ID NO: 5444980 - DNA, 25 bp, Homo sapien
gccgtgtactaagaacttgacctaa

SEQ ID NO: 5444981 - DNA, 25 bp, Homo sapien
cttaatggtgccgatccacaaacac

SEQ ID NO: 5444982 - DNA, 25 bp, Homo sapien
gttttgggtaccctgacatgaaatg

SEQ ID NO: 5444983 - DNA, 25 bp, Homo sapien
caaaaccagattcttaatggtgccg

SEQ ID NO: 5444984 - DNA, 25 bp, Homo sapien
tgtatggcctatgttttgggtaccc

SEQ ID NO: 5444985 - DNA, 25 bp, Homo sapien
gcacaatcagggagcaaggcacata

SEQ ID NO: 5444986 - DNA, 25 bp, Homo sapien
taaatgtctttggtagaaagcagcc

SEQ ID NO: 5444987 - DNA, 25 bp, Homo sapien
ccccacgtgggtagtgatgtctctt

SEQ ID NO: 5444988 - DNA, 25 bp, Homo sapien
tgcctaagacgttgaggctgcaaca

SEQ ID NO: 5444989 - DNA, 25 bp, Homo sapien
gaaacagtcaccctctcgtcaagtg

SEQ ID NO: 5444990 - DNA, 25 bp, Homo sapien
tacatatagaccttgcaagggcacg

SEQ ID NO: 5444991 - DNA, 25 bp, Homo sapien
caagggcacggtaagaactgagcac

SEQ ID NO: 5444992 - DNA, 25 bp, Homo sapien
tgagagtcaaagcaggccaatccac

SEQ ID NO: 5444993 - DNA, 25 bp, Homo sapien
tacagtctaggaaaagctacatccc

SEQ ID NO: 5444994 - DNA, 25 bp, Homo sapien
cacagtactagtgtcgtgcggcagt

SEQ ID NO: 5444995 - DNA, 25 bp, Homo sapien
gctgccctacagcattggtgccaaa

SEQ ID NO: 5444996 - DNA, 25 bp, Homo sapien
taataagcacctgtttgcactgccc

SEQ ID NO: 5444997 - DNA, 25 bp, Homo sapien
gaaatggcctgttgtcggacaagcc

SEQ ID NO: 5444998 - DNA, 25 bp, Homo sapien
cagttactggacttggactgtccca

SEQ ID NO: 5444999 - DNA, 25 bp, Homo sapien
tgtgtcgttagagcactgactccac

SEQ ID NO: 5445000 - DNA, 25 bp, Homo sapien
tcatgaatcacagtagcgcttggca

SEQ ID NO: 5445001 - DNA, 25 bp, Homo sapien
cgaataggctacacatggacagaca

SEQ ID NO: 5445002 - DNA, 25 bp, Homo sapien
taatacacaacatgcacgaataggc

SEQ ID NO: 5445003 - DNA, 25 bp, Homo sapien
aactggtgacccaaagacatactgg

SEQ ID NO: 5445004 - DNA, 25 bp, Homo sapien
tacacatatagctggacactacctg

SEQ ID NO: 5445005 - DNA, 25 bp, Homo sapien
tccgcaacgttgcatagcctgatat

SEQ ID NO: 5445006 - DNA, 25 bp, Homo sapien
taaccagccttctgttgatcagaca

SEQ ID NO: 5445007 - DNA, 25 bp, Homo sapien
agccgtgccgagtgatggactttcg

SEQ ID NO: 5445008 - DNA, 25 bp, Homo sapien
gcctgatatatgactgcctccgtaa

SEQ ID NO: 5445009 - DNA, 25 bp, Homo sapien
tgctgactagactgtccaccgaggg

SEQ ID NO: 5445010 - DNA, 25 bp, Homo sapien
ttctgctggcggtgtaaacttgctg

SEQ ID NO: 5445011 - DNA, 25 bp, Homo sapien
ggattaacgactgccacttttggag

SEQ ID NO: 5445012 - DNA, 25 bp, Homo sapien
gaactccaggaaggttgactccaga

SEQ ID NO: 5445013 - DNA, 25 bp, Homo sapien
tggagatccacttttgtcaggggta

SEQ ID NO: 5445014 - DNA, 25 bp, Homo sapien
cagggctggacgtcttactggtctt

SEQ ID NO: 5445015 - DNA, 25 bp, Homo sapien
tcccccagggctggacgtcttactg

SEQ ID NO: 5445016 - DNA, 25 bp, Homo sapien
ccacttttgtcaggggtaggagaag

SEQ ID NO: 5445017 - DNA, 25 bp, Homo sapien
gactgtggagctacatttgctggga

SEQ ID NO: 5445018 - DNA, 25 bp, Homo sapien
gcagcttgagtcacaacaggtgcca

SEQ ID NO: 5445019 - DNA, 25 bp, Homo sapien
gctatctgcttcacgaccgagggca

SEQ ID NO: 5445020 - DNA, 25 bp, Homo sapien
ctttaagggctgagattccatggca

SEQ ID NO: 5445021 - DNA, 25 bp, Homo sapien
tgggggagccacctgagtaatatgc

SEQ ID NO: 5445022 - DNA, 25 bp, Homo sapien
gttgggggagccacctgagtaatat

SEQ ID NO: 5445023 - DNA, 25 bp, Homo sapien
gagccacctgagtaatatgctgaac

SEQ ID NO: 5445024 - DNA, 25 bp, Homo sapien
gggagccacctgagtaatatgctga

SEQ ID NO: 5445025 - DNA, 25 bp, Homo sapien
gctttagctgggccatggcagagcc

SEQ ID NO: 5445026 - DNA, 25 bp, Homo sapien
aggctttagctgggccatggcagag

SEQ ID NO: 5445027 - DNA, 25 bp, Homo sapien
tgcaggctttagctgggccatggca

SEQ ID NO: 5445028 - DNA, 25 bp, Homo sapien
agggggtggtggaacaactccattg

SEQ ID NO: 5445029 - DNA, 25 bp, Homo sapien
ctgagacgcattctgtagccgtgtt

SEQ ID NO: 5445030 - DNA, 25 bp, Homo sapien
tgtgctgtacttgacgaacattggg

SEQ ID NO: 5445031 - DNA, 25 bp, Homo sapien
tattgtgctgtacttgacgaacatt

SEQ ID NO: 5445032 - DNA, 25 bp, Homo sapien
cattctgtagccgtgttattgtgct

SEQ ID NO: 5445033 - DNA, 25 bp, Homo sapien
gcacaagtgaagtgtagggccgatt

SEQ ID NO: 5445034 - DNA, 25 bp, Homo sapien
gactatcttaggttgcggggataaa

SEQ ID NO: 5445035 - DNA, 25 bp, Homo sapien
aagtgtagggccgattcatagactc

SEQ ID NO: 5445036 - DNA, 25 bp, Homo sapien
tgtagggccgattcatagactccat

SEQ ID NO: 5445037 - DNA, 25 bp, Homo sapien
taacaatctaggaaaaatgtccggc

SEQ ID NO: 5445038 - DNA, 25 bp, Homo sapien
ggatgcatgacttctgaccttggct

SEQ ID NO: 5445039 - DNA, 25 bp, Homo sapien
tatgagaatgttgagcaggcgtgca

SEQ ID NO: 5445040 - DNA, 25 bp, Homo sapien
taaaatctgattgtgcgggcaagaa

SEQ ID NO: 5445041 - DNA, 25 bp, Homo sapien
caccgaggttaatgtgtttccagag

SEQ ID NO: 5445042 - DNA, 25 bp, Homo sapien
tctgaaactctgtgcaataacggac

SEQ ID NO: 5445043 - DNA, 25 bp, Homo sapien
tgagattgggatacaggcgtcaccg

SEQ ID NO: 5445044 - DNA, 25 bp, Homo sapien
tacagagtgatcaagccttaaagca

SEQ ID NO: 5445045 - DNA, 25 bp, Homo sapien
ataaaggagactgaaataaggccaa

SEQ ID NO: 5445046 - DNA, 25 bp, Homo sapien
gggaagtcaaatcaacaggtctctc

SEQ ID NO: 5445047 - DNA, 25 bp, Homo sapien
gatccccgataaagacataagagag

SEQ ID NO: 5445048 - DNA, 25 bp, Homo sapien
tgtctttacccactacaattaggaa

SEQ ID NO: 5445049 - DNA, 25 bp, Homo sapien
ttccaactgagtgcctcgtttccag

SEQ ID NO: 5445050 - DNA, 25 bp, Homo sapien
gaaactccgctatcagactgattgg

SEQ ID NO: 5445051 - DNA, 25 bp, Homo sapien
caatgctctgggaacggacgtgtcc

SEQ ID NO: 5445052 - DNA, 25 bp, Homo sapien
caggcttcagagaatacggagctca

SEQ ID NO: 5445053 - DNA, 25 bp, Homo sapien
tcttttacacaaggtcaagtgctgt

SEQ ID NO: 5445054 - DNA, 25 bp, Homo sapien
tagaggagtctctcaatcatgtctg

SEQ ID NO: 5445055 - DNA, 25 bp, Homo sapien
cattattggtatcctgacacccagt

SEQ ID NO: 5445056 - DNA, 25 bp, Homo sapien
taatacccctgccttaaggtcacgc

SEQ ID NO: 5445057 - DNA, 25 bp, Homo sapien
tagggactgggtattctcattgttc

SEQ ID NO: 5445058 - DNA, 25 bp, Homo sapien
gaaacctctatgatctagggactgg

SEQ ID NO: 5445059 - DNA, 25 bp, Homo sapien
gatctatttaagcagcatccttggc

SEQ ID NO: 5445060 - DNA, 25 bp, Homo sapien
tataggaatctgaaggagtgcagct

SEQ ID NO: 5445061 - DNA, 25 bp, Homo sapien
tcataggctgactctgtcctcttca

SEQ ID NO: 5445062 - DNA, 25 bp, Homo sapien
gtagttcatatagagctgcttccca

SEQ ID NO: 5445063 - DNA, 25 bp, Homo sapien
gataaggaagtccaatcataggctg

SEQ ID NO: 5445064 - DNA, 25 bp, Homo sapien
cccgatttaatgctggagctggata

SEQ ID NO: 5445065 - DNA, 25 bp, Homo sapien
gaatagttgtcatgaaaacgaaaac

SEQ ID NO: 5445066 - DNA, 25 bp, Homo sapien
tatatcatcgacaaacacctcatta

SEQ ID NO: 5445067 - DNA, 25 bp, Homo sapien
cctgaaaaacgtaggcactggcaaa

SEQ ID NO: 5445068 - DNA, 25 bp, Homo sapien
catgaaatagtcagaatagttgtca

SEQ ID NO: 5445069 - DNA, 25 bp, Homo sapien
tgcaatgcggatcccattgacccac

SEQ ID NO: 5445070 - DNA, 25 bp, Homo sapien
ggatcccattgacccactgatgcag

SEQ ID NO: 5445071 - DNA, 25 bp, Homo sapien
tgcggatcccattgacccactgatg

SEQ ID NO: 5445072 - DNA, 25 bp, Homo sapien
ctttgcaatgcggatcccattgacc

SEQ ID NO: 5445073 - DNA, 25 bp, Homo sapien
gatatattgagatttcttctggatt

SEQ ID NO: 5445074 - DNA, 25 bp, Homo sapien
caaaggtatttgatatattgagatt

SEQ ID NO: 5445075 - DNA, 25 bp, Homo sapien
gtatttgatatattgagatttcttc

SEQ ID NO: 5445076 - DNA, 25 bp, Homo sapien
tttgatatattgagatttcttctgg

SEQ ID NO: 5445077 - DNA, 25 bp, Homo sapien
catttatgcttcttatatggccata

SEQ ID NO: 5445078 - DNA, 25 bp, Homo sapien
gacaagttataggccattagagtaa

SEQ ID NO: 5445079 - DNA, 25 bp, Homo sapien
gccattagagtaatggccaatacat

SEQ ID NO: 5445080 - DNA, 25 bp, Homo sapien
tataggccattagagtaatggccaa

SEQ ID NO: 5445081 - DNA, 25 bp, Homo sapien
tactttccttatggtcatccaggct

SEQ ID NO: 5445082 - DNA, 25 bp, Homo sapien
tggcatttattgcacccttgctatg

SEQ ID NO: 5445083 - DNA, 25 bp, Homo sapien
gagtaaggttaaaacagcgctcaaa

SEQ ID NO: 5445084 - DNA, 25 bp, Homo sapien
caggctctgtacaagtacttctgca

SEQ ID NO: 5445085 - DNA, 25 bp, Homo sapien
caccagacaatagtctgtaggtgct

SEQ ID NO: 5445086 - DNA, 25 bp, Homo sapien
gctggagaaagcacaccagatcccg

SEQ ID NO: 5445087 - DNA, 25 bp, Homo sapien
ataaacgttgacatgatccagctgg

SEQ ID NO: 5445088 - DNA, 25 bp, Homo sapien
gtatttgttccgatagtcctggcca

SEQ ID NO: 5445089 - DNA, 25 bp, Homo sapien
cttgttaaggagtgttggcatttta

SEQ ID NO: 5445090 - DNA, 25 bp, Homo sapien
gatactattaatatagtctagtaca

SEQ ID NO: 5445091 - DNA, 25 bp, Homo sapien
aatatagtctagtacattaaaaaca

SEQ ID NO: 5445092 - DNA, 25 bp, Homo sapien
caatgaacactaacttgttaaggag

SEQ ID NO: 5445093 - DNA, 25 bp, Homo sapien
agatgctcgcaagagaaaataacgc

SEQ ID NO: 5445094 - DNA, 25 bp, Homo sapien
ttcctttgggaacatagtagatacc

SEQ ID NO: 5445095 - DNA, 25 bp, Homo sapien
agataccagatgctcgcaagagaaa

SEQ ID NO: 5445096 - DNA, 25 bp, Homo sapien
tttctggtacagttacagaacttcc

SEQ ID NO: 5445097 - DNA, 25 bp, Homo sapien
tttgtttctatctgccatctcagct

SEQ ID NO: 5445098 - DNA, 25 bp, Homo sapien
ttctatctgccatctcagctgtttc

SEQ ID NO: 5445099 - DNA, 25 bp, Homo sapien
gtttctatctgccatctcagctgtt

SEQ ID NO: 5445100 - DNA, 25 bp, Homo sapien
ctccaagaggacttctttgtttcta

SEQ ID NO: 5445101 - DNA, 25 bp, Homo sapien
ttgtcataaactgtccttacccaga

SEQ ID NO: 5445102 - DNA, 25 bp, Homo sapien
cttgcctgtccacttgtcataaact

SEQ ID NO: 5445103 - DNA, 25 bp, Homo sapien
cactaaaatgcttaacaccagtctc

SEQ ID NO: 5445104 - DNA, 25 bp, Homo sapien
ctgtgtatgggcatcatcactaaaa

SEQ ID NO: 5445105 - DNA, 25 bp, Homo sapien
caaaaagatctgttgatacccccaa

SEQ ID NO: 5445106 - DNA, 25 bp, Homo sapien
aacatccagaaaagatgtgtcatgg

SEQ ID NO: 5445107 - DNA, 25 bp, Homo sapien
agaaaagatgtgtcatggttatgcc

SEQ ID NO: 5445108 - DNA, 25 bp, Homo sapien
ccagaaaagatgtgtcatggttatg

SEQ ID NO: 5445109 - DNA, 25 bp, Homo sapien
aatataagcttgttttggctatctc

SEQ ID NO: 5445110 - DNA, 25 bp, Homo sapien
tcttgtccaattaagaagattttca

SEQ ID NO: 5445111 - DNA, 25 bp, Homo sapien
tatacgctccataaatataagcttg

SEQ ID NO: 5445112 - DNA, 25 bp, Homo sapien
aagtgcatatttttctatacgctcc

SEQ ID NO: 5445113 - DNA, 25 bp, Homo sapien
gatttgtccatcaggttatccagta

SEQ ID NO: 5445114 - DNA, 25 bp, Homo sapien
cagaaacggtttctaccagtgacca

SEQ ID NO: 5445115 - DNA, 25 bp, Homo sapien
tgcctctcatccaccatcattgttt

SEQ ID NO: 5445116 - DNA, 25 bp, Homo sapien
cagtctaaactataaccgcagtggg

SEQ ID NO: 5445117 - DNA, 25 bp, Homo sapien
aactctgatcttctcagctttcaat

SEQ ID NO: 5445118 - DNA, 25 bp, Homo sapien
ttaattttctctagggcaactctga

SEQ ID NO: 5445119 - DNA, 25 bp, Homo sapien
cagctttcaattttgctgcctgttc

SEQ ID NO: 5445120 - DNA, 25 bp, Homo sapien
ttcacttgtgcctctttaattttct

SEQ ID NO: 5445121 - DNA, 25 bp, Homo sapien
gaatataactacacacagagcacat

SEQ ID NO: 5445122 - DNA, 25 bp, Homo sapien
tttttatccttaaggatgctcccag

SEQ ID NO: 5445123 - DNA, 25 bp, Homo sapien
cttaaggatgctcccagcaataaat

SEQ ID NO: 5445124 - DNA, 25 bp, Homo sapien
taaacaatgctaagatgatgaaata

SEQ ID NO: 5445125 - DNA, 25 bp, Homo sapien
caatgtgaagcagatgaatttcagg

SEQ ID NO: 5445126 - DNA, 25 bp, Homo sapien
ttctacatccaatattctagaggaa

SEQ ID NO: 5445127 - DNA, 25 bp, Homo sapien
tctgttacactgaaagtataccact

SEQ ID NO: 5445128 - DNA, 25 bp, Homo sapien
cctccaaagtaagggcaagtctttg

SEQ ID NO: 5445129 - DNA, 25 bp, Homo sapien
agaagggaggtttccctgtccagat

SEQ ID NO: 5445130 - DNA, 25 bp, Homo sapien
aggtttccctgtccagataggagtg

SEQ ID NO: 5445131 - DNA, 25 bp, Homo sapien
ggaggtttccctgtccagataggag

SEQ ID NO: 5445132 - DNA, 25 bp, Homo sapien
agggaggtttccctgtccagatagg

SEQ ID NO: 5445133 - DNA, 25 bp, Homo sapien
caacttttgagtgtggaaccatgcc

SEQ ID NO: 5445134 - DNA, 25 bp, Homo sapien
gcttcatataaacagggccttctta

SEQ ID NO: 5445135 - DNA, 25 bp, Homo sapien
taattctgaaaaagctacagtcctg

SEQ ID NO: 5445136 - DNA, 25 bp, Homo sapien
agggtagctctgtcctcaagcagga

SEQ ID NO: 5445137 - DNA, 25 bp, Homo sapien
taaatatttaataggcacacgtggc

SEQ ID NO: 5445138 - DNA, 25 bp, Homo sapien
caaccatggcaaatggcatggcaaa

SEQ ID NO: 5445139 - DNA, 25 bp, Homo sapien
tcttcattaagtcatgccatggcat

SEQ ID NO: 5445140 - DNA, 25 bp, Homo sapien
tggctaccgtatgggacagtacacc

SEQ ID NO: 5445141 - DNA, 25 bp, Homo sapien
tcaatatgacgcttggcctgcttgc

SEQ ID NO: 5445142 - DNA, 25 bp, Homo sapien
cttggcctgcttgctggaacatctc

SEQ ID NO: 5445143 - DNA, 25 bp, Homo sapien
gcctgcttgctggaacatctcagag

SEQ ID NO: 5445144 - DNA, 25 bp, Homo sapien
ttctgtgaagtcaatatgacgcttg

SEQ ID NO: 5445145 - DNA, 25 bp, Homo sapien
aaaatgcagtaaggaagaaaatgat

SEQ ID NO: 5445146 - DNA, 25 bp, Homo sapien
aatgcagtaaggaagaaaatgatag

SEQ ID NO: 5445147 - DNA, 25 bp, Homo sapien
tgaaaatgcagtaaggaagaaaatg

SEQ ID NO: 5445148 - DNA, 25 bp, Homo sapien
ctgtgaaaatgcagtaaggaagaaa

SEQ ID NO: 5445149 - DNA, 25 bp, Homo sapien
ggcatatgtgccagtgattattggg

SEQ ID NO: 5445150 - DNA, 25 bp, Homo sapien
ccaacaataagagtcaaggcatatg

SEQ ID NO: 5445151 - DNA, 25 bp, Homo sapien
taagagtcaaggcatatgtgccagt

SEQ ID NO: 5445152 - DNA, 25 bp, Homo sapien
gaaacaccaacaataagagtcaagg

SEQ ID NO: 5445153 - DNA, 25 bp, Homo sapien
taattggctgcccttgatgtgtcaa

SEQ ID NO: 5445154 - DNA, 25 bp, Homo sapien
taactgtgcagtgacgtcgtccaag

SEQ ID NO: 5445155 - DNA, 25 bp, Homo sapien
tatgtcggctaacaggcaatttctg

SEQ ID NO: 5445156 - DNA, 25 bp, Homo sapien
tcaatatccaaagagtccatgctgg

SEQ ID NO: 5445157 - DNA, 25 bp, Homo sapien
tgaaccaatgctgctgagctcctgc

SEQ ID NO: 5445158 - DNA, 25 bp, Homo sapien
gatttgacgcttactgtttcctgaa

SEQ ID NO: 5445159 - DNA, 25 bp, Homo sapien
tcctgctctatagagcaaagatcag

SEQ ID NO: 5445160 - DNA, 25 bp, Homo sapien
tccacagtctctccctgattcagag

SEQ ID NO: 5445161 - DNA, 25 bp, Homo sapien
gaggagatctttttactggttccat

SEQ ID NO: 5445162 - DNA, 25 bp, Homo sapien
gagaagcggtaagaaaagttggcca

SEQ ID NO: 5445163 - DNA, 25 bp, Homo sapien
tcaaatcctcaaccagtttttcaag

SEQ ID NO: 5445164 - DNA, 25 bp, Homo sapien
gagtttgtctagttctccaagccag

SEQ ID NO: 5445165 - DNA, 25 bp, Homo sapien
gttctccaagccaggctccaaacat

SEQ ID NO: 5445166 - DNA, 25 bp, Homo sapien
tctccaagccaggctccaaacattt

SEQ ID NO: 5445167 - DNA, 25 bp, Homo sapien
tgagtttgtctagttctccaagcca

SEQ ID NO: 5445168 - DNA, 25 bp, Homo sapien
tcaggtcattctaccctggcaagtg

SEQ ID NO: 5445169 - DNA, 25 bp, Homo sapien
atctgggatccttaaaggttaggag

SEQ ID NO: 5445170 - DNA, 25 bp, Homo sapien
cacacatggactggtatcttcaaag

SEQ ID NO: 5445171 - DNA, 25 bp, Homo sapien
gggaagaaccacagctaaccaatat

SEQ ID NO: 5445172 - DNA, 25 bp, Homo sapien
gcagaggaaccaacatatacaaggg

SEQ ID NO: 5445173 - DNA, 25 bp, Homo sapien
cataggatgggtggtacagactcat

SEQ ID NO: 5445174 - DNA, 25 bp, Homo sapien
ggaagcggcaaaatcctaagccata

SEQ ID NO: 5445175 - DNA, 25 bp, Homo sapien
tacaagggtataaagacgtgagaac

SEQ ID NO: 5445176 - DNA, 25 bp, Homo sapien
tcgttaacatcacaagtaggtcaga

SEQ ID NO: 5445177 - DNA, 25 bp, Homo sapien
cagaattcggttccaaatccaaagt

SEQ ID NO: 5445178 - DNA, 25 bp, Homo sapien
aaaagttcgttaacatcacaagtag

SEQ ID NO: 5445179 - DNA, 25 bp, Homo sapien
aatcagaattcggttccaaatccaa

SEQ ID NO: 5445180 - DNA, 25 bp, Homo sapien
cgctccctcgccagagacgcagcga

SEQ ID NO: 5445181 - DNA, 25 bp, Homo sapien
gggcaaggaaaccgccgctcgcgct

SEQ ID NO: 5445182 - DNA, 25 bp, Homo sapien
agccgagtgtgctcgcgtccagccg

SEQ ID NO: 5445183 - DNA, 25 bp, Homo sapien
cgcggcagtcggtcggccttcccgc

SEQ ID NO: 5445184 - DNA, 25 bp, Homo sapien
gctattgaccaaatggttggctcca

SEQ ID NO: 5445185 - DNA, 25 bp, Homo sapien
tcttcaagcctaaatgggagctgca

SEQ ID NO: 5445186 - DNA, 25 bp, Homo sapien
gaaagggaggccttatcttcaagcc

SEQ ID NO: 5445187 - DNA, 25 bp, Homo sapien
gagaaggcttgtcctccacctgtca

SEQ ID NO: 5445188 - DNA, 25 bp, Homo sapien
tatgctgaaattcctttccttgaca

SEQ ID NO: 5445189 - DNA, 25 bp, Homo sapien
tcctttccttgacagctcttttcat

SEQ ID NO: 5445190 - DNA, 25 bp, Homo sapien
ctgcttgattatgctgaaattcctt

SEQ ID NO: 5445191 - DNA, 25 bp, Homo sapien
ttcctttccttgacagctcttttca

SEQ ID NO: 5445192 - DNA, 25 bp, Homo sapien
ctttctctaaatctgtactcaaggc

SEQ ID NO: 5445193 - DNA, 25 bp, Homo sapien
tctctaaatctgtactcaaggccaa

SEQ ID NO: 5445194 - DNA, 25 bp, Homo sapien
ttctctaaatctgtactcaaggcca

SEQ ID NO: 5445195 - DNA, 25 bp, Homo sapien
tctaaatctgtactcaaggccaacc

SEQ ID NO: 5445196 - DNA, 25 bp, Homo sapien
gtagagcatagtctttttcttaagg

SEQ ID NO: 5445197 - DNA, 25 bp, Homo sapien
gtacgaaattgagtagagcatagtc

SEQ ID NO: 5445198 - DNA, 25 bp, Homo sapien
gactctgcagggtgtacgaaattga

SEQ ID NO: 5445199 - DNA, 25 bp, Homo sapien
gagcatagtctttttcttaaggagc

SEQ ID NO: 5445200 - DNA, 25 bp, Homo sapien
ttaactctgtaccttgttgcagtgg

SEQ ID NO: 5445201 - DNA, 25 bp, Homo sapien
gcacagatggccgtaaacacatgat

SEQ ID NO: 5445202 - DNA, 25 bp, Homo sapien
cactgctgagtcgtgtgcttgccag

SEQ ID NO: 5445203 - DNA, 25 bp, Homo sapien
catttcacagaagcggcaatagagt

SEQ ID NO: 5445204 - DNA, 25 bp, Homo sapien
taacacatcagcagtagatactttc

SEQ ID NO: 5445205 - DNA, 25 bp, Homo sapien
tagatactttcacttcatcagagga

SEQ ID NO: 5445206 - DNA, 25 bp, Homo sapien
cactagtatcatctatttccttgga

SEQ ID NO: 5445207 - DNA, 25 bp, Homo sapien
tacacgacatccatattaatttcca

SEQ ID NO: 5445208 - DNA, 25 bp, Homo sapien
cttagcaataatctcccagctgaaa

SEQ ID NO: 5445209 - DNA, 25 bp, Homo sapien
gctgaaaaatacagaggaatacgta

SEQ ID NO: 5445210 - DNA, 25 bp, Homo sapien
tatgtatgtacttgaaagcataaac

SEQ ID NO: 5445211 - DNA, 25 bp, Homo sapien
gattatgctcatcatataaattacc

SEQ ID NO: 5445212 - DNA, 25 bp, Homo sapien
taattgataattaggttattcccaa

SEQ ID NO: 5445213 - DNA, 25 bp, Homo sapien
cttcccacaaaggagactgaaagca

SEQ ID NO: 5445214 - DNA, 25 bp, Homo sapien
ttcccacaaaggagactgaaagcat

SEQ ID NO: 5445215 - DNA, 25 bp, Homo sapien
ctgtgaggaacctgggaagagtttc

SEQ ID NO: 5445216 - DNA, 25 bp, Homo sapien
tgtgaggaacctgggaagagtttct

SEQ ID NO: 5445217 - DNA, 25 bp, Homo sapien
ctgggtaaccaggagcagaagactg

SEQ ID NO: 5445218 - DNA, 25 bp, Homo sapien
tccataaggcgcagctgagcgggaa

SEQ ID NO: 5445219 - DNA, 25 bp, Homo sapien
gactggttcaatatgaaatccataa

SEQ ID NO: 5445220 - DNA, 25 bp, Homo sapien
gctgagcgggaatttggagagccaa

SEQ ID NO: 5445221 - DNA, 25 bp, Homo sapien
ttgcaatgaagtttaccggtacaga

SEQ ID NO: 5445222 - DNA, 25 bp, Homo sapien
tattgcaatgaagtttaccggtaca

SEQ ID NO: 5445223 - DNA, 25 bp, Homo sapien
attgcaatgaagtttaccggtacag

SEQ ID NO: 5445224 - DNA, 25 bp, Homo sapien
aaagtgatatgttcatgttattcca

SEQ ID NO: 5445225 - DNA, 25 bp, Homo sapien
ttacaaaagagcaatgtaaggttac

SEQ ID NO: 5445226 - DNA, 25 bp, Homo sapien
tttacaaaagagcaatgtaaggtta

SEQ ID NO: 5445227 - DNA, 25 bp, Homo sapien
gatatgttcatgttattccagcacc

SEQ ID NO: 5445228 - DNA, 25 bp, Homo sapien
tgtaaaatcaacgtccaatagttcc

SEQ ID NO: 5445229 - DNA, 25 bp, Homo sapien
gaagccacacagtataaattgcaac

SEQ ID NO: 5445230 - DNA, 25 bp, Homo sapien
tgaaaacgaagccacacagtataaa

SEQ ID NO: 5445231 - DNA, 25 bp, Homo sapien
aaattgcaacttcaggaaaagctcc

SEQ ID NO: 5445232 - DNA, 25 bp, Homo sapien
aggcccactctggtaagggggcact

SEQ ID NO: 5445233 - DNA, 25 bp, Homo sapien
cccactctggtaagggggcactgtt

SEQ ID NO: 5445234 - DNA, 25 bp, Homo sapien
attggaggtcgaggaggcccactct

SEQ ID NO: 5445235 - DNA, 25 bp, Homo sapien
tcattcccattggaggtcgaggagg

SEQ ID NO: 5445236 - DNA, 25 bp, Homo sapien
tgcccatatggggggatagcaccag

SEQ ID NO: 5445237 - DNA, 25 bp, Homo sapien
ctgcccatatggggggatagcacca

SEQ ID NO: 5445238 - DNA, 25 bp, Homo sapien
tagcaccaggaaggtatgctggcat

SEQ ID NO: 5445239 - DNA, 25 bp, Homo sapien
gggatagcaccaggaaggtatgctg

SEQ ID NO: 5445240 - DNA, 25 bp, Homo sapien
ccaccatactgaccatgaggcggca

SEQ ID NO: 5445241 - DNA, 25 bp, Homo sapien
ggcttgatgatgaccaccatactga

SEQ ID NO: 5445242 - DNA, 25 bp, Homo sapien
gcttgatgatgaccaccatactgac

SEQ ID NO: 5445243 - DNA, 25 bp, Homo sapien
tgaccaccatactgaccatgaggcg

SEQ ID NO: 5445244 - DNA, 25 bp, Homo sapien
ttccaattggttcaactggtggatt

SEQ ID NO: 5445245 - DNA, 25 bp, Homo sapien
ccaattggttcaactggtggattac

SEQ ID NO: 5445246 - DNA, 25 bp, Homo sapien
tccaattggttcaactggtggatta

SEQ ID NO: 5445247 - DNA, 25 bp, Homo sapien
tgttgatctctaggtaaccgtgccc

SEQ ID NO: 5445248 - DNA, 25 bp, Homo sapien
cagaggaagattatgttgatctcta

SEQ ID NO: 5445249 - DNA, 25 bp, Homo sapien
atctctaggtaaccgtgcccttctg

SEQ ID NO: 5445250 - DNA, 25 bp, Homo sapien
gattatgttgatctctaggtaaccg

SEQ ID NO: 5445251 - DNA, 25 bp, Homo sapien
gttgtactagtggttgaatctgcag

SEQ ID NO: 5445252 - DNA, 25 bp, Homo sapien
tgtgtataagcagagaacataggct

SEQ ID NO: 5445253 - DNA, 25 bp, Homo sapien
tggttgttacaagtgtagcaggctt

SEQ ID NO: 5445254 - DNA, 25 bp, Homo sapien
gatgctgtagttgcttcaggggtac

SEQ ID NO: 5445255 - DNA, 25 bp, Homo sapien
caacaggtccttggacagctgcctg

SEQ ID NO: 5445256 - DNA, 25 bp, Homo sapien
ctgtaccaacaggtccttggacagc

SEQ ID NO: 5445257 - DNA, 25 bp, Homo sapien
tggacagctgcctgagcctgtccag

SEQ ID NO: 5445258 - DNA, 25 bp, Homo sapien
ggacagctgcctgagcctgtccagc

SEQ ID NO: 5445259 - DNA, 25 bp, Homo sapien
gaggctgtggagcaggtacagttgc

SEQ ID NO: 5445260 - DNA, 25 bp, Homo sapien
gtacagttgctgttggtgcaggtgg

SEQ ID NO: 5445261 - DNA, 25 bp, Homo sapien
aggctgtggagcaggtacagttgct

SEQ ID NO: 5445262 - DNA, 25 bp, Homo sapien
ctggaggctgtggagcaggtacagt

SEQ ID NO: 5445263 - DNA, 25 bp, Homo sapien
ggtgctgaaacagcctgtgtttggg

SEQ ID NO: 5445264 - DNA, 25 bp, Homo sapien
tgctgaaacagcctgtgtttgggtc

SEQ ID NO: 5445265 - DNA, 25 bp, Homo sapien
gctgaaacagcctgtgtttgggtca

SEQ ID NO: 5445266 - DNA, 25 bp, Homo sapien
ctggtgctgaaacagcctgtgtttg

SEQ ID NO: 5445267 - DNA, 25 bp, Homo sapien
tggaggattctaggatgtggaatgg

SEQ ID NO: 5445268 - DNA, 25 bp, Homo sapien
ctggaggattctaggatgtggaatg

SEQ ID NO: 5445269 - DNA, 25 bp, Homo sapien
atcagaggtggtattcctggtccag

SEQ ID NO: 5445270 - DNA, 25 bp, Homo sapien
ggcatcagaggtggtattcctggtc

SEQ ID NO: 5445271 - DNA, 25 bp, Homo sapien
gcatcagaggtggtattcctggtcc

SEQ ID NO: 5445272 - DNA, 25 bp, Homo sapien
catcagaggtggtattcctggtcca

SEQ ID NO: 5445273 - DNA, 25 bp, Homo sapien
tcctggtccaggtggtatattccac

SEQ ID NO: 5445274 - DNA, 25 bp, Homo sapien
cataactggtggcattcctggcatc

SEQ ID NO: 5445275 - DNA, 25 bp, Homo sapien
attcctggcatcagaggaggaacac

SEQ ID NO: 5445276 - DNA, 25 bp, Homo sapien
gcataactggtggcattcctggcat

SEQ ID NO: 5445277 - DNA, 25 bp, Homo sapien
gagctatgcctagaggcattcctgg

SEQ ID NO: 5445278 - DNA, 25 bp, Homo sapien
gctatgcctagaggcattcctggtg

SEQ ID NO: 5445279 - DNA, 25 bp, Homo sapien
agctatgcctagaggcattcctggt

SEQ ID NO: 5445280 - DNA, 25 bp, Homo sapien
agttgaacaggttgtgggtgaaatg

SEQ ID NO: 5445281 - DNA, 25 bp, Homo sapien
tgagcctgcagagtcgtcgtcatcg

SEQ ID NO: 5445282 - DNA, 25 bp, Homo sapien
ttgtgggtgaaatgaagttgagcct

SEQ ID NO: 5445283 - DNA, 25 bp, Homo sapien
ttcaagaacttgtcgtccttcatcc

SEQ ID NO: 5445284 - DNA, 25 bp, Homo sapien
tattatttctttatgcacctgcatg

SEQ ID NO: 5445285 - DNA, 25 bp, Homo sapien
tctattatttctttatgcacctgca

SEQ ID NO: 5445286 - DNA, 25 bp, Homo sapien
attatttctttatgcacctgcatgc

SEQ ID NO: 5445287 - DNA, 25 bp, Homo sapien
ctattatttctttatgcacctgcat

SEQ ID NO: 5445288 - DNA, 25 bp, Homo sapien
ctctattacaataccagcaccacgg

SEQ ID NO: 5445289 - DNA, 25 bp, Homo sapien
agcaagagaaacaaggcaaaaaatc

SEQ ID NO: 5445290 - DNA, 25 bp, Homo sapien
gagaaacaaggcaaaaaatcactca

SEQ ID NO: 5445291 - DNA, 25 bp, Homo sapien
aagaagcaagagaaacaaggcaaaa

SEQ ID NO: 5445292 - DNA, 25 bp, Homo sapien
caagagaaacaaggcaaaaaatcac

SEQ ID NO: 5445293 - DNA, 25 bp, Homo sapien
catggatcccgtggtcactgcaact

SEQ ID NO: 5445294 - DNA, 25 bp, Homo sapien
ccaaccgggctgtacctggcttgta

SEQ ID NO: 5445295 - DNA, 25 bp, Homo sapien
tccaagtgccgacacaagagtgggc

SEQ ID NO: 5445296 - DNA, 25 bp, Homo sapien
gcagtatcatgttagaaagtcccct

SEQ ID NO: 5445297 - DNA, 25 bp, Homo sapien
gactagtgtctggataaatgttttg

SEQ ID NO: 5445298 - DNA, 25 bp, Homo sapien
cccagaagactagtgtctggataaa

SEQ ID NO: 5445299 - DNA, 25 bp, Homo sapien
gaagactagtgtctggataaatgtt

SEQ ID NO: 5445300 - DNA, 25 bp, Homo sapien
cagaagactagtgtctggataaatg

SEQ ID NO: 5445301 - DNA, 25 bp, Homo sapien
ggatgggagccaactgattgcttac

SEQ ID NO: 5445302 - DNA, 25 bp, Homo sapien
ttcctggatgggagccaactgattg

SEQ ID NO: 5445303 - DNA, 25 bp, Homo sapien
tcctggatgggagccaactgattgc

SEQ ID NO: 5445304 - DNA, 25 bp, Homo sapien
ctggatgggagccaactgattgctt

SEQ ID NO: 5445305 - DNA, 25 bp, Homo sapien
tctccccatgaacagtcatggtggc

SEQ ID NO: 5445306 - DNA, 25 bp, Homo sapien
ggctgctgtgtactggagtcctgca

SEQ ID NO: 5445307 - DNA, 25 bp, Homo sapien
ctcatctccccatgaacagtcatgg

SEQ ID NO: 5445308 - DNA, 25 bp, Homo sapien
atggtggctgctgtgtactggagtc

SEQ ID NO: 5445309 - DNA, 25 bp, Homo sapien
tgtgtagcaggcctttgatccaaca

SEQ ID NO: 5445310 - DNA, 25 bp, Homo sapien
atgacgaacatgctgcaatgacttc

SEQ ID NO: 5445311 - DNA, 25 bp, Homo sapien
gcaaaaccaagcctagcaagttagt

SEQ ID NO: 5445312 - DNA, 25 bp, Homo sapien
tcctttttagcaatatgacatgacg

SEQ ID NO: 5445313 - DNA, 25 bp, Homo sapien
gaggcagaaggaggagtaacacttt

SEQ ID NO: 5445314 - DNA, 25 bp, Homo sapien
tgctccggtgaaacatagttgaaag

SEQ ID NO: 5445315 - DNA, 25 bp, Homo sapien
gcagaaggaggagtaacacttttag

SEQ ID NO: 5445316 - DNA, 25 bp, Homo sapien
ggaaaataaatgctccggtgaaaca

SEQ ID NO: 5445317 - DNA, 25 bp, Homo sapien
cctgcaggcaactcagaccactaag

SEQ ID NO: 5445318 - DNA, 25 bp, Homo sapien
tgcaggcaactcagaccactaagcc

SEQ ID NO: 5445319 - DNA, 25 bp, Homo sapien
atcctgcaggcaactcagaccacta

SEQ ID NO: 5445320 - DNA, 25 bp, Homo sapien
aggcaactcagaccactaagccctt

SEQ ID NO: 5445321 - DNA, 25 bp, Homo sapien
acctcaggtcacctgcccccttcag

SEQ ID NO: 5445322 - DNA, 25 bp, Homo sapien
taaattttgcagtgacatatttata

SEQ ID NO: 5445323 - DNA, 25 bp, Homo sapien
tatatgaggaagagagtgtgttgta

SEQ ID NO: 5445324 - DNA, 25 bp, Homo sapien
gtgctctgcctatttgtttaggttt

SEQ ID NO: 5445325 - DNA, 25 bp, Homo sapien
gtttgctgtaatccatatgcactga

SEQ ID NO: 5445326 - DNA, 25 bp, Homo sapien
gacacaagagatacactgctgctcc

SEQ ID NO: 5445327 - DNA, 25 bp, Homo sapien
atgccagacacaagagatacactgc

SEQ ID NO: 5445328 - DNA, 25 bp, Homo sapien
tttgctgtaatccatatgcactgag

SEQ ID NO: 5445329 - DNA, 25 bp, Homo sapien
tgtctgctgccatcaactcgggacc

SEQ ID NO: 5445330 - DNA, 25 bp, Homo sapien
tgctgccatcaactcgggacctcag

SEQ ID NO: 5445331 - DNA, 25 bp, Homo sapien
caactcgggacctcagaaggtggta

SEQ ID NO: 5445332 - DNA, 25 bp, Homo sapien
ccatcaactcgggacctcagaaggt

SEQ ID NO: 5445333 - DNA, 25 bp, Homo sapien
tctgaagcacatcaagccttaaact

SEQ ID NO: 5445334 - DNA, 25 bp, Homo sapien
aatatctgaagcacatcaagcctta

SEQ ID NO: 5445335 - DNA, 25 bp, Homo sapien
tatctgaagcacatcaagccttaaa

SEQ ID NO: 5445336 - DNA, 25 bp, Homo sapien
gaagcacatcaagccttaaactggg

SEQ ID NO: 5445337 - DNA, 25 bp, Homo sapien
agaggagtgaattaagggcgttgga

SEQ ID NO: 5445338 - DNA, 25 bp, Homo sapien
gaggagtgaattaagggcgttggag

SEQ ID NO: 5445339 - DNA, 25 bp, Homo sapien
gagaggagtgaattaagggcgttgg

SEQ ID NO: 5445340 - DNA, 25 bp, Homo sapien
aggagtgaattaagggcgttggagg

SEQ ID NO: 5445341 - DNA, 25 bp, Homo sapien
gtttcagcgttggagaaaccctctc

SEQ ID NO: 5445342 - DNA, 25 bp, Homo sapien
caagttgccatgtagcccctttctt

SEQ ID NO: 5445343 - DNA, 25 bp, Homo sapien
aatccacacaaaagttccaagttgc

SEQ ID NO: 5445344 - DNA, 25 bp, Homo sapien
gagtctctgactcactactagattg

SEQ ID NO: 5445345 - DNA, 25 bp, Homo sapien
caatgattgacgtctgaaagagcag

SEQ ID NO: 5445346 - DNA, 25 bp, Homo sapien
tctagccagaaatacaaggaaacca

SEQ ID NO: 5445347 - DNA, 25 bp, Homo sapien
tttctccggcacacccaatgattga

SEQ ID NO: 5445348 - DNA, 25 bp, Homo sapien
gaactctgaagtgtggtctggatct

SEQ ID NO: 5445349 - DNA, 25 bp, Homo sapien
taaagactctctccctggaggtggg

SEQ ID NO: 5445350 - DNA, 25 bp, Homo sapien
gcagaaagcaagtgtcctgctctgg

SEQ ID NO: 5445351 - DNA, 25 bp, Homo sapien
tccctgcagaaagcaagtgtcctgc

SEQ ID NO: 5445352 - DNA, 25 bp, Homo sapien
tgctctgggccatgtggtagcttag

SEQ ID NO: 5445353 - DNA, 25 bp, Homo sapien
tgcttgttgtgactgcacggctcag

SEQ ID NO: 5445354 - DNA, 25 bp, Homo sapien
tgtgatgggtgggtaggtctgccta

SEQ ID NO: 5445355 - DNA, 25 bp, Homo sapien
gggtagccctctatcagcgatattt

SEQ ID NO: 5445356 - DNA, 25 bp, Homo sapien
tcttggtctgtcttataggatttag

SEQ ID NO: 5445357 - DNA, 25 bp, Homo sapien
ggatatcttgcaacatctcagattc

SEQ ID NO: 5445358 - DNA, 25 bp, Homo sapien
ttggatatcttgcaacatctcagat

SEQ ID NO: 5445359 - DNA, 25 bp, Homo sapien
gatatcttgcaacatctcagattca

SEQ ID NO: 5445360 - DNA, 25 bp, Homo sapien
tattggatatcttgcaacatctcag

SEQ ID NO: 5445361 - DNA, 25 bp, Homo sapien
actcatacccttacccagtgcgtga

SEQ ID NO: 5445362 - DNA, 25 bp, Homo sapien
aactctgggtcggtttccattcctg

SEQ ID NO: 5445363 - DNA, 25 bp, Homo sapien
ccagtgcgtgaactctgggtcggtt

SEQ ID NO: 5445364 - DNA, 25 bp, Homo sapien
attttgtcaatggtgcctccactca

SEQ ID NO: 5445365 - DNA, 25 bp, Homo sapien
caaagaacaaatcatgagctgggtg

SEQ ID NO: 5445366 - DNA, 25 bp, Homo sapien
cactgaaggatatgtgtgggtgtca

SEQ ID NO: 5445367 - DNA, 25 bp, Homo sapien
gagcatctctgccaacactgaagga

SEQ ID NO: 5445368 - DNA, 25 bp, Homo sapien
aatgtgcagcatgaactccagttgt

SEQ ID NO: 5445369 - DNA, 25 bp, Homo sapien
ttttccttatgggtatattctgggc

SEQ ID NO: 5445370 - DNA, 25 bp, Homo sapien
gatggaacatggacccttttgggaa

SEQ ID NO: 5445371 - DNA, 25 bp, Homo sapien
aaggtttcatgaatccggctccatg

SEQ ID NO: 5445372 - DNA, 25 bp, Homo sapien
gtttcattcactggcaaggtttcat

SEQ ID NO: 5445373 - DNA, 25 bp, Homo sapien
tatgcttggcagattagattatgac

SEQ ID NO: 5445374 - DNA, 25 bp, Homo sapien
cagttggtgcccacatatgcttggc

SEQ ID NO: 5445375 - DNA, 25 bp, Homo sapien
gattccttagaaacacagttggtgc

SEQ ID NO: 5445376 - DNA, 25 bp, Homo sapien
gagcttctgagctgatacctttgtg

SEQ ID NO: 5445377 - DNA, 25 bp, Homo sapien
tgccatccactgttggcaggtggga

SEQ ID NO: 5445378 - DNA, 25 bp, Homo sapien
ccatccactgttggcaggtgggagt

SEQ ID NO: 5445379 - DNA, 25 bp, Homo sapien
gagtcttttgggtggtttgcgtgga

SEQ ID NO: 5445380 - DNA, 25 bp, Homo sapien
tttgccatccactgttggcaggtgg

SEQ ID NO: 5445381 - DNA, 25 bp, Homo sapien
cgccatcttccagcaggcggcggta

SEQ ID NO: 5445382 - DNA, 25 bp, Homo sapien
caaaattgaagtcctcgccatcttc

SEQ ID NO: 5445383 - DNA, 25 bp, Homo sapien
gcggcggtaggtggcgatctcagcc

SEQ ID NO: 5445384 - DNA, 25 bp, Homo sapien
tggcgatctcagcctccagcttgac

SEQ ID NO: 5445385 - DNA, 25 bp, Homo sapien
gtgcagcaggatcccattgagttgt

SEQ ID NO: 5445386 - DNA, 25 bp, Homo sapien
cagcaggatcccattgagttgttcc

SEQ ID NO: 5445387 - DNA, 25 bp, Homo sapien
cttgatgtttggcagggcctggtac

SEQ ID NO: 5445388 - DNA, 25 bp, Homo sapien
ttgatgtttggcagggcctggtact

SEQ ID NO: 5445389 - DNA, 25 bp, Homo sapien
tagcaggcctccacccccccttcag

SEQ ID NO: 5445390 - DNA, 25 bp, Homo sapien
gatttttcatccagtccaggtcgat

SEQ ID NO: 5445391 - DNA, 25 bp, Homo sapien
gctggcctccagatttttcatccag

SEQ ID NO: 5445392 - DNA, 25 bp, Homo sapien
aggcctccacccccccttcaggctg

SEQ ID NO: 5445393 - DNA, 25 bp, Homo sapien
gagtcagcttgttgtattgggcctg

SEQ ID NO: 5445394 - DNA, 25 bp, Homo sapien
tgagtcagcttgttgtattgggcct

SEQ ID NO: 5445395 - DNA, 25 bp, Homo sapien
agttcttctgagtcagcttgttgta

SEQ ID NO: 5445396 - DNA, 25 bp, Homo sapien
ggcaatctgggcttgtaggcctttt

SEQ ID NO: 5445397 - DNA, 25 bp, Homo sapien
ccatggtcaacagagctggcaatct

SEQ ID NO: 5445398 - DNA, 25 bp, Homo sapien
ctccatggtcaacagagctggcaat

SEQ ID NO: 5445399 - DNA, 25 bp, Homo sapien
caatctgggcttgtaggccttttac

SEQ ID NO: 5445400 - DNA, 25 bp, Homo sapien
actggtgtcatcaatgaccttgtgg

SEQ ID NO: 5445401 - DNA, 25 bp, Homo sapien
gtggagcccatggatgtcgttctcc

SEQ ID NO: 5445402 - DNA, 25 bp, Homo sapien
tctagctgcagctgagtgacactgg

SEQ ID NO: 5445403 - DNA, 25 bp, Homo sapien
gtctctagctgcagctgagtgacac

SEQ ID NO: 5445404 - DNA, 25 bp, Homo sapien
gatctgagtcaggtcctcctcgatg

SEQ ID NO: 5445405 - DNA, 25 bp, Homo sapien
agatctgagtcaggtcctcctcgat

SEQ ID NO: 5445406 - DNA, 25 bp, Homo sapien
aagatctgagtcaggtcctcctcga

SEQ ID NO: 5445407 - DNA, 25 bp, Homo sapien
atctgagtcaggtcctcctcgatgg

SEQ ID NO: 5445408 - DNA, 25 bp, Homo sapien
cggccatacctgcggccatgctcct

SEQ ID NO: 5445409 - DNA, 25 bp, Homo sapien
cccccggccatacctgcggccatgc

SEQ ID NO: 5445410 - DNA, 25 bp, Homo sapien
cccggccatacctgcggccatgctc

SEQ ID NO: 5445411 - DNA, 25 bp, Homo sapien
ccggccatacctgcggccatgctcc

SEQ ID NO: 5445412 - DNA, 25 bp, Homo sapien
ctgaccagtgggcgcggtagctggg

SEQ ID NO: 5445413 - DNA, 25 bp, Homo sapien
accagtgggcgcggtagctgggcgc

SEQ ID NO: 5445414 - DNA, 25 bp, Homo sapien
tgaccagtgggcgcggtagctgggc

SEQ ID NO: 5445415 - DNA, 25 bp, Homo sapien
gaccagtgggcgcggtagctgggcg

SEQ ID NO: 5445416 - DNA, 25 bp, Homo sapien
ctggacagaaccaagttggtgggga

SEQ ID NO: 5445417 - DNA, 25 bp, Homo sapien
ttggtggggaaacaagtggtgaagc

SEQ ID NO: 5445418 - DNA, 25 bp, Homo sapien
ggggaaacaagtggtgaagcgcata

SEQ ID NO: 5445419 - DNA, 25 bp, Homo sapien
caagttggtggggaaacaagtggtg

SEQ ID NO: 5445420 - DNA, 25 bp, Homo sapien
gagtagcctcctgctcagtcatctg

SEQ ID NO: 5445421 - DNA, 25 bp, Homo sapien
ttgagtagcctcctgctcagtcatc

SEQ ID NO: 5445422 - DNA, 25 bp, Homo sapien
atctggaagtaattcttcacataat

SEQ ID NO: 5445423 - DNA, 25 bp, Homo sapien
cctcctgctcagtcatctggaagta

SEQ ID NO: 5445424 - DNA, 25 bp, Homo sapien
ttgacttttgtgcatctttggctcg

SEQ ID NO: 5445425 - DNA, 25 bp, Homo sapien
acttttgtgcatctttggctcgagt

SEQ ID NO: 5445426 - DNA, 25 bp, Homo sapien
gttgatgatggttttgagccttttc

SEQ ID NO: 5445427 - DNA, 25 bp, Homo sapien
ttgatgatggttttgagccttttcc

SEQ ID NO: 5445428 - DNA, 25 bp, Homo sapien
tccttttttctgtggaaccttgcta

SEQ ID NO: 5445429 - DNA, 25 bp, Homo sapien
cagcaagttttccttttttctgtgg

SEQ ID NO: 5445430 - DNA, 25 bp, Homo sapien
cagctactaagcactgtctactaat

SEQ ID NO: 5445431 - DNA, 25 bp, Homo sapien
cacagctactaagcactgtctacta

SEQ ID NO: 5445432 - DNA, 25 bp, Homo sapien
ctactaagcactgtctactaatatg

SEQ ID NO: 5445433 - DNA, 25 bp, Homo sapien
gctactaagcactgtctactaatat

SEQ ID NO: 5445434 - DNA, 25 bp, Homo sapien
ccagcccctaaactgactattctta

SEQ ID NO: 5445435 - DNA, 25 bp, Homo sapien
ttcatcccttgcaccagcccctaaa

SEQ ID NO: 5445436 - DNA, 25 bp, Homo sapien
gcaattcatcccttgcaccagcccc

SEQ ID NO: 5445437 - DNA, 25 bp, Homo sapien
cctaaactgactattcttaaagata

SEQ ID NO: 5445438 - DNA, 25 bp, Homo sapien
ttttcccattactggtcaccacagg

SEQ ID NO: 5445439 - DNA, 25 bp, Homo sapien
ctgcggacaggattagagagcttct

SEQ ID NO: 5445440 - DNA, 25 bp, Homo sapien
aagctgcggacaggattagagagct

SEQ ID NO: 5445441 - DNA, 25 bp, Homo sapien
atgtgggtgtgcacgagtgatgggc

SEQ ID NO: 5445442 - DNA, 25 bp, Homo sapien
ttttcagtgaaaggattggtctgaa

SEQ ID NO: 5445443 - DNA, 25 bp, Homo sapien
tttcagtgaaaggattggtctgaaa

SEQ ID NO: 5445444 - DNA, 25 bp, Homo sapien
ttcagtgaaaggattggtctgaaaa

SEQ ID NO: 5445445 - DNA, 25 bp, Homo sapien
gacaaagagttggtgggctgctgga

SEQ ID NO: 5445446 - DNA, 25 bp, Homo sapien
tagagttgagggatagaatactgtg

SEQ ID NO: 5445447 - DNA, 25 bp, Homo sapien
tgtcattttcccagtacagcaatgg

SEQ ID NO: 5445448 - DNA, 25 bp, Homo sapien
tacagcaatggacttggcccctgtt

SEQ ID NO: 5445449 - DNA, 25 bp, Homo sapien
tcccagtacagcaatggacttggcc

SEQ ID NO: 5445450 - DNA, 25 bp, Homo sapien
ccttaaaaatacatcgttattgact

SEQ ID NO: 5445451 - DNA, 25 bp, Homo sapien
tggtcctcttgtaccagtgtggagg

SEQ ID NO: 5445452 - DNA, 25 bp, Homo sapien
gatcatgtccaatcttgaggtggtc

SEQ ID NO: 5445453 - DNA, 25 bp, Homo sapien
gttttcggagagttctgccagaata

SEQ ID NO: 5445454 - DNA, 25 bp, Homo sapien
cactgggacatctacatcagagttc

SEQ ID NO: 5445455 - DNA, 25 bp, Homo sapien
ggcactgggacatctacatcagagt

SEQ ID NO: 5445456 - DNA, 25 bp, Homo sapien
gcactgggacatctacatcagagtt

SEQ ID NO: 5445457 - DNA, 25 bp, Homo sapien
ctgggacatctacatcagagttcat

SEQ ID NO: 5445458 - DNA, 25 bp, Homo sapien
gtgatgtgggtctagtttttccagg

SEQ ID NO: 5445459 - DNA, 25 bp, Homo sapien
tcagcctaaaccctggtgatgtggg

SEQ ID NO: 5445460 - DNA, 25 bp, Homo sapien
ggatcattctagtaagatttacacc

SEQ ID NO: 5445461 - DNA, 25 bp, Homo sapien
gatttacaccttcccattgacaata

SEQ ID NO: 5445462 - DNA, 25 bp, Homo sapien
gggactgaatgacccggtgagaaca

SEQ ID NO: 5445463 - DNA, 25 bp, Homo sapien
gcctcaaccagtagaggaaatgtta

SEQ ID NO: 5445464 - DNA, 25 bp, Homo sapien
gaaaagcgtgaactcagtaacctct

SEQ ID NO: 5445465 - DNA, 25 bp, Homo sapien
agctgagttgggtatgaataaggcc

SEQ ID NO: 5445466 - DNA, 25 bp, Homo sapien
gggattccattatgactgacatctg

SEQ ID NO: 5445467 - DNA, 25 bp, Homo sapien
cattatgactgacatctggtattct

SEQ ID NO: 5445468 - DNA, 25 bp, Homo sapien
tcttaataggaaagcaatctcactg

SEQ ID NO: 5445469 - DNA, 25 bp, Homo sapien
tcactgtcccagagcatttcgatgg

SEQ ID NO: 5445470 - DNA, 25 bp, Homo sapien
acatctatgcagagtacttggaaat

SEQ ID NO: 5445471 - DNA, 25 bp, Homo sapien
ttttagaatgaagcaggttgaaaac

SEQ ID NO: 5445472 - DNA, 25 bp, Homo sapien
aggttttagaatgaagcaggttgaa

SEQ ID NO: 5445473 - DNA, 25 bp, Homo sapien
tgcagagtacttggaaatgtatgaa

SEQ ID NO: 5445474 - DNA, 25 bp, Homo sapien
tcacatggctcctggtcttggaaat

SEQ ID NO: 5445475 - DNA, 25 bp, Homo sapien
caggtaaggcccagcttttccacgg

SEQ ID NO: 5445476 - DNA, 25 bp, Homo sapien
atagtcaggtaaggcccagcttttc

SEQ ID NO: 5445477 - DNA, 25 bp, Homo sapien
ctcacatggctcctggtcttggaaa

SEQ ID NO: 5445478 - DNA, 25 bp, Homo sapien
cagaagccctgacccaaactcttat

SEQ ID NO: 5445479 - DNA, 25 bp, Homo sapien
ctgaggccagaagccctgacccaaa

SEQ ID NO: 5445480 - DNA, 25 bp, Homo sapien
gaagccctgacccaaactcttatct

SEQ ID NO: 5445481 - DNA, 25 bp, Homo sapien
ggccagaagccctgacccaaactct

SEQ ID NO: 5445482 - DNA, 25 bp, Homo sapien
ttatgcctggtaaaagtttgtcatc

SEQ ID NO: 5445483 - DNA, 25 bp, Homo sapien
tatgcctgcctgtatgcgttatctt

SEQ ID NO: 5445484 - DNA, 25 bp, Homo sapien
tctttaggttctagtgcggttattc

SEQ ID NO: 5445485 - DNA, 25 bp, Homo sapien
cggttattcgaattatgcctggtaa

SEQ ID NO: 5445486 - DNA, 25 bp, Homo sapien
gacatgcttggtgtatcttgtatga

SEQ ID NO: 5445487 - DNA, 25 bp, Homo sapien
gttagaaactgaggacatgcactca

SEQ ID NO: 5445488 - DNA, 25 bp, Homo sapien
aacccttgacatctgaagtccactg

SEQ ID NO: 5445489 - DNA, 25 bp, Homo sapien
cactgtaaactgaaggtagtctgcc

SEQ ID NO: 5445490 - DNA, 25 bp, Homo sapien
aggagatgcatttgatggaagcttc

SEQ ID NO: 5445491 - DNA, 25 bp, Homo sapien
atttgatggaagcttcttgacctgc

SEQ ID NO: 5445492 - DNA, 25 bp, Homo sapien
catgctcacaattgtctattttatc

SEQ ID NO: 5445493 - DNA, 25 bp, Homo sapien
tgctcacaattgtctattttatcca

SEQ ID NO: 5445494 - DNA, 25 bp, Homo sapien
catggcttgccttggatttcagcgg

SEQ ID NO: 5445495 - DNA, 25 bp, Homo sapien
gaacaccgctcccataaagccatgg

SEQ ID NO: 5445496 - DNA, 25 bp, Homo sapien
atttcagcggcacaaggctcagctg

SEQ ID NO: 5445497 - DNA, 25 bp, Homo sapien
aaggctcagctgaacctggctacca

SEQ ID NO: 5445498 - DNA, 25 bp, Homo sapien
tttgttacacggcttaaaatgatga

SEQ ID NO: 5445499 - DNA, 25 bp, Homo sapien
cggcttaaaatgatgagtatatcca

SEQ ID NO: 5445500 - DNA, 25 bp, Homo sapien
agactgacaccaggtttgttacacg

SEQ ID NO: 5445501 - DNA, 25 bp, Homo sapien
tacacggcttaaaatgatgagtata

SEQ ID NO: 5445502 - DNA, 25 bp, Homo sapien
gaaccacttgtcacaggcaagactg

SEQ ID NO: 5445503 - DNA, 25 bp, Homo sapien
caaaaggggcttggcctaccatgca

SEQ ID NO: 5445504 - DNA, 25 bp, Homo sapien
gctccaagcccaaataatccatgaa

SEQ ID NO: 5445505 - DNA, 25 bp, Homo sapien
acaagggagccggatagagtggcca

SEQ ID NO: 5445506 - DNA, 25 bp, Homo sapien
ggtactcgcattcctgctacttccc

SEQ ID NO: 5445507 - DNA, 25 bp, Homo sapien
tactcgcattcctgctacttcccat

SEQ ID NO: 5445508 - DNA, 25 bp, Homo sapien
gtactcgcattcctgctacttccca

SEQ ID NO: 5445509 - DNA, 25 bp, Homo sapien
tggtgcctcctgaagattgcatggc

SEQ ID NO: 5445510 - DNA, 25 bp, Homo sapien
ccagggtagagtgggcaatgatcaa

SEQ ID NO: 5445511 - DNA, 25 bp, Homo sapien
gtgtgtcaggacatagctgtgcgtc

SEQ ID NO: 5445512 - DNA, 25 bp, Homo sapien
ttagaaggaagggtgaatccgactc

SEQ ID NO: 5445513 - DNA, 25 bp, Homo sapien
caatgacaatgaaccccaactatgg

SEQ ID NO: 5445514 - DNA, 25 bp, Homo sapien
tttataactaccagcaaagagctct

SEQ ID NO: 5445515 - DNA, 25 bp, Homo sapien
tatgtgacttctatagagctctttc

SEQ ID NO: 5445516 - DNA, 25 bp, Homo sapien
cagggtgttagctgtcaatgacaat

SEQ ID NO: 5445517 - DNA, 25 bp, Homo sapien
cactcagaatccaagagattaaact

SEQ ID NO: 5445518 - DNA, 25 bp, Homo sapien
gaatccaagagattaaacttgtgca

SEQ ID NO: 5445519 - DNA, 25 bp, Homo sapien
agctgctcactcagagaccactcag

SEQ ID NO: 5445520 - DNA, 25 bp, Homo sapien
tgacacatagaaagacacctacacc

SEQ ID NO: 5445521 - DNA, 25 bp, Homo sapien
gaaacaggggatatctgggtagtat

SEQ ID NO: 5445522 - DNA, 25 bp, Homo sapien
attgcaatggaaacaggggatatct

SEQ ID NO: 5445523 - DNA, 25 bp, Homo sapien
ctaccttttagtaattgcaatggaa

SEQ ID NO: 5445524 - DNA, 25 bp, Homo sapien
ccttttagtaattgcaatggaaaca

SEQ ID NO: 5445525 - DNA, 25 bp, Homo sapien
tatcagacttaatgcaatctctcat

SEQ ID NO: 5445526 - DNA, 25 bp, Homo sapien
ataaagatttattactactaaagct

SEQ ID NO: 5445527 - DNA, 25 bp, Homo sapien
caatctctcataatgattgtttcca

SEQ ID NO: 5445528 - DNA, 25 bp, Homo sapien
gacttaatgcaatctctcataatga

SEQ ID NO: 5445529 - DNA, 25 bp, Homo sapien
tcttctccattaaactcttcaacca

SEQ ID NO: 5445530 - DNA, 25 bp, Homo sapien
aatcaccaagacattgtgatctgtc

SEQ ID NO: 5445531 - DNA, 25 bp, Homo sapien
tgatctgtcactccatcttctccat

SEQ ID NO: 5445532 - DNA, 25 bp, Homo sapien
ctgccttaatcaccaagacattgtg

SEQ ID NO: 5445533 - DNA, 25 bp, Homo sapien
tatatccacagtgtggtcattggcc

SEQ ID NO: 5445534 - DNA, 25 bp, Homo sapien
gaatgagatagcgcccatggtctaa

SEQ ID NO: 5445535 - DNA, 25 bp, Homo sapien
ttggccagtgtatatctgtgggaga

SEQ ID NO: 5445536 - DNA, 25 bp, Homo sapien
ctagtactcaagtatatccacagtg

SEQ ID NO: 5445537 - DNA, 25 bp, Homo sapien
agaggcctgacaatatgtttctgta

SEQ ID NO: 5445538 - DNA, 25 bp, Homo sapien
ggtgggttgagtccgaaaagagtca

SEQ ID NO: 5445539 - DNA, 25 bp, Homo sapien
agcgaagggagatggggtggggccg

SEQ ID NO: 5445540 - DNA, 25 bp, Homo sapien
ctcagaggcctgacaatatgtttct

SEQ ID NO: 5445541 - DNA, 25 bp, Homo sapien
cacattcgtcacaagagaggaccat

SEQ ID NO: 5445542 - DNA, 25 bp, Homo sapien
aactaatgttctctgccttgttatg

SEQ ID NO: 5445543 - DNA, 25 bp, Homo sapien
tccttctgtaggagtcttagcttga

SEQ ID NO: 5445544 - DNA, 25 bp, Homo sapien
gcttgaattctgacaactaatgttc

SEQ ID NO: 5445545 - DNA, 25 bp, Homo sapien
tagtcttgtctgtcagctatcgtgg

SEQ ID NO: 5445546 - DNA, 25 bp, Homo sapien
gaaactcaatgcgtgtgatttgagc

SEQ ID NO: 5445547 - DNA, 25 bp, Homo sapien
tgggttgatggctaacacattttcc

SEQ ID NO: 5445548 - DNA, 25 bp, Homo sapien
gatttgagcatcattctaccgtcac

SEQ ID NO: 5445549 - DNA, 25 bp, Homo sapien
taacattcgtcaatgttgagagaca

SEQ ID NO: 5445550 - DNA, 25 bp, Homo sapien
ttttccttgtggatcatatgtcaca

SEQ ID NO: 5445551 - DNA, 25 bp, Homo sapien
agcaggttggtaacattcgtcaatg

SEQ ID NO: 5445552 - DNA, 25 bp, Homo sapien
gtggatcatatgtcacagcaggttg

SEQ ID NO: 5445553 - DNA, 25 bp, Homo sapien
ttcacctttaaagcggcactctttc

SEQ ID NO: 5445554 - DNA, 25 bp, Homo sapien
gcacacagcagctaacatgctcaat

SEQ ID NO: 5445555 - DNA, 25 bp, Homo sapien
aattcttcacctttaaagcggcact

SEQ ID NO: 5445556 - DNA, 25 bp, Homo sapien
cctttaaagcggcactctttctggc

SEQ ID NO: 5445557 - DNA, 25 bp, Homo sapien
ttcaccatccaacacccactctttc

SEQ ID NO: 5445558 - DNA, 25 bp, Homo sapien
ctctgaatggagataaaaatctgtt

SEQ ID NO: 5445559 - DNA, 25 bp, Homo sapien
tcaaagctctgaatggagataaaaa

SEQ ID NO: 5445560 - DNA, 25 bp, Homo sapien
aaggtttcaaagctctgaatggaga

SEQ ID NO: 5445561 - DNA, 25 bp, Homo sapien
gcttggggttatagccctagtggaa

SEQ ID NO: 5445562 - DNA, 25 bp, Homo sapien
agtggaagaactgattatggtaggc

SEQ ID NO: 5445563 - DNA, 25 bp, Homo sapien
tagccctagtggaagaactgattat

SEQ ID NO: 5445564 - DNA, 25 bp, Homo sapien
ggttatagccctagtggaagaactg

SEQ ID NO: 5445565 - DNA, 25 bp, Homo sapien
ctcagcaccttgcagagaatctgtc

SEQ ID NO: 5445566 - DNA, 25 bp, Homo sapien
tagacacaatgcactcaagacctgg

SEQ ID NO: 5445567 - DNA, 25 bp, Homo sapien
ctctgtgctctacctctagacacaa

SEQ ID NO: 5445568 - DNA, 25 bp, Homo sapien
ctggcatgtctgctaccttgctcag

SEQ ID NO: 5445569 - DNA, 25 bp, Homo sapien
cccagagtttgggagggagcctgaa

SEQ ID NO: 5445570 - DNA, 25 bp, Homo sapien
ctgccccagagtttgggagggagcc

SEQ ID NO: 5445571 - DNA, 25 bp, Homo sapien
ccagagtttgggagggagcctgaag

SEQ ID NO: 5445572 - DNA, 25 bp, Homo sapien
gccccagagtttgggagggagcctg

SEQ ID NO: 5445573 - DNA, 25 bp, Homo sapien
gagaagtaatacctctgagctgcct

SEQ ID NO: 5445574 - DNA, 25 bp, Homo sapien
atgccatactgagaagtaatacctc

SEQ ID NO: 5445575 - DNA, 25 bp, Homo sapien
tactgagaagtaatacctctgagct

SEQ ID NO: 5445576 - DNA, 25 bp, Homo sapien
gcagctgtttcaaatggggatgcca

SEQ ID NO: 5445577 - DNA, 25 bp, Homo sapien
ccaatctgtgtagtttcaacgacct

SEQ ID NO: 5445578 - DNA, 25 bp, Homo sapien
ctgtgtagtttcaacgacctgctct

SEQ ID NO: 5445579 - DNA, 25 bp, Homo sapien
gtgtagtttcaacgacctgctctcc

SEQ ID NO: 5445580 - DNA, 25 bp, Homo sapien
aatctgtgtagtttcaacgacctgc

SEQ ID NO: 5445581 - DNA, 25 bp, Homo sapien
tagcatctggctcacgtgaggaggg

SEQ ID NO: 5445582 - DNA, 25 bp, Homo sapien
gtgacatggtttcctctcttgcata

SEQ ID NO: 5445583 - DNA, 25 bp, Homo sapien
atctggctcacgtgaggagggtgac

SEQ ID NO: 5445584 - DNA, 25 bp, Homo sapien
tgacatggtttcctctcttgcatag

SEQ ID NO: 5445585 - DNA, 25 bp, Homo sapien
ggataatctttagaatcagcagctg

SEQ ID NO: 5445586 - DNA, 25 bp, Homo sapien
tccccagcaactatgcatccaggat

SEQ ID NO: 5445587 - DNA, 25 bp, Homo sapien
tgaaacttagttgaaaggataatct

SEQ ID NO: 5445588 - DNA, 25 bp, Homo sapien
ctggcaatggtaatgcacatatcca

SEQ ID NO: 5445589 - DNA, 25 bp, Homo sapien
tacccactggatccaatcttgacca

SEQ ID NO: 5445590 - DNA, 25 bp, Homo sapien
ttattgagtctaaagtgcgtcctga

SEQ ID NO: 5445591 - DNA, 25 bp, Homo sapien
taaagtgcgtcctgatcccaacata

SEQ ID NO: 5445592 - DNA, 25 bp, Homo sapien
ggatccacgggctcagtttttattg

SEQ ID NO: 5445593 - DNA, 25 bp, Homo sapien
gaaaattgcaaagatctcagtgcgt

SEQ ID NO: 5445594 - DNA, 25 bp, Homo sapien
taattgatgaggatcataagggact

SEQ ID NO: 5445595 - DNA, 25 bp, Homo sapien
gattatttggcccacactgggattt

SEQ ID NO: 5445596 - DNA, 25 bp, Homo sapien
tgcaaagatctcagtgcgtcctcaa

SEQ ID NO: 5445597 - DNA, 25 bp, Homo sapien
tcgtcatattgtcagcttcagttgg

SEQ ID NO: 5445598 - DNA, 25 bp, Homo sapien
tgcatatgtcaagcggaagcctgac

SEQ ID NO: 5445599 - DNA, 25 bp, Homo sapien
ccttctttcgtcatattgtcagctt

SEQ ID NO: 5445600 - DNA, 25 bp, Homo sapien
gtcttgccattaacatgtctaatgc

SEQ ID NO: 5445601 - DNA, 25 bp, Homo sapien
cccacgctgagctgatatagcttta

SEQ ID NO: 5445602 - DNA, 25 bp, Homo sapien
attcatgcacaaacccacgctgagc

SEQ ID NO: 5445603 - DNA, 25 bp, Homo sapien
tataggtgcacatgcattcatgcac

SEQ ID NO: 5445604 - DNA, 25 bp, Homo sapien
gaaacatgacaacgtggctataggt

SEQ ID NO: 5445605 - DNA, 25 bp, Homo sapien
tcagctctatatgcgaggtgcttga

SEQ ID NO: 5445606 - DNA, 25 bp, Homo sapien
tgtccatccaaagggtcatccagag

SEQ ID NO: 5445607 - DNA, 25 bp, Homo sapien
cacactcagctctatatgcgaggtg

SEQ ID NO: 5445608 - DNA, 25 bp, Homo sapien
tatgcgaggtgcttgacagacaaca

SEQ ID NO: 5445609 - DNA, 25 bp, Homo sapien
aaagcacatttcggccaggcttcct

SEQ ID NO: 5445610 - DNA, 25 bp, Homo sapien
taatcgggacattttatccaaaagc

SEQ ID NO: 5445611 - DNA, 25 bp, Homo sapien
tgtgtgctcttggttaatcgggaca

SEQ ID NO: 5445612 - DNA, 25 bp, Homo sapien
gtctgcacattttgtgtgctcttgg

SEQ ID NO: 5445613 - DNA, 25 bp, Homo sapien
aaaactgttgtggttgcctttgcag

SEQ ID NO: 5445614 - DNA, 25 bp, Homo sapien
agtggttggaatttgctcacagaag

SEQ ID NO: 5445615 - DNA, 25 bp, Homo sapien
tcacacggacattctagtggttgga

SEQ ID NO: 5445616 - DNA, 25 bp, Homo sapien
ggagccccacaatcatccccagttt

SEQ ID NO: 5445617 - DNA, 25 bp, Homo sapien
caagcagtgggctctaagggcaggt

SEQ ID NO: 5445618 - DNA, 25 bp, Homo sapien
gacacaggtgacgtctttaaggacc

SEQ ID NO: 5445619 - DNA, 25 bp, Homo sapien
gctgtgaggacacaggtgacgtctt

SEQ ID NO: 5445620 - DNA, 25 bp, Homo sapien
tctaagggcaggtctgcttgtgctg

SEQ ID NO: 5445621 - DNA, 25 bp, Homo sapien
tttccagggcaagccaagtaaggcc

SEQ ID NO: 5445622 - DNA, 25 bp, Homo sapien
tgggccactttcctaaagccatcgt

SEQ ID NO: 5445623 - DNA, 25 bp, Homo sapien
agtaaggcctatgcttaaaacaagg

SEQ ID NO: 5445624 - DNA, 25 bp, Homo sapien
aagccatcgtcatcaaactttgtgt

SEQ ID NO: 5445625 - DNA, 25 bp, Homo sapien
gagagccttgtgacaattaaatcaa

SEQ ID NO: 5445626 - DNA, 25 bp, Homo sapien
gaaccagcaacttatctgagaggat

SEQ ID NO: 5445627 - DNA, 25 bp, Homo sapien
tcctcaaggagacatgttagactaa

SEQ ID NO: 5445628 - DNA, 25 bp, Homo sapien
ccccgaggtgggacttctacagctt

SEQ ID NO: 5445629 - DNA, 25 bp, Homo sapien
ccgtgatgcgtcatagggtctgcgt

SEQ ID NO: 5445630 - DNA, 25 bp, Homo sapien
tccacctgaactagctgggaactga

SEQ ID NO: 5445631 - DNA, 25 bp, Homo sapien
tgagcacatacagccatcgcaggtg

SEQ ID NO: 5445632 - DNA, 25 bp, Homo sapien
gaggcacagagcatgcattccacct

SEQ ID NO: 5445633 - DNA, 25 bp, Homo sapien
agagaaggatggagaaagctgaggt

SEQ ID NO: 5445634 - DNA, 25 bp, Homo sapien
ctgagcatccagtgggcaaagttgg

SEQ ID NO: 5445635 - DNA, 25 bp, Homo sapien
ccagtgggcaaagttggggagtggc

SEQ ID NO: 5445636 - DNA, 25 bp, Homo sapien
ggagtggcaagagaaggatggagaa

SEQ ID NO: 5445637 - DNA, 25 bp, Homo sapien
ggttggaaagccactcaaggctttg

SEQ ID NO: 5445638 - DNA, 25 bp, Homo sapien
ccagaatgacttgtggatggaggct

SEQ ID NO: 5445639 - DNA, 25 bp, Homo sapien
ttggaaagccactcaaggctttgac

SEQ ID NO: 5445640 - DNA, 25 bp, Homo sapien
ttgaccagacccatatgttgaactc

SEQ ID NO: 5445641 - DNA, 25 bp, Homo sapien
tattgacaacttggaaaagtcaact

SEQ ID NO: 5445642 - DNA, 25 bp, Homo sapien
gacacacagttctcttggaagccac

SEQ ID NO: 5445643 - DNA, 25 bp, Homo sapien
tgaaatgcacgaaatttaaacggga

SEQ ID NO: 5445644 - DNA, 25 bp, Homo sapien
ggtactgacacaggtatcagataac

SEQ ID NO: 5445645 - DNA, 25 bp, Homo sapien
tagagggcgcctttcgcccagccat

SEQ ID NO: 5445646 - DNA, 25 bp, Homo sapien
ctgcttcataggagagcacattaag

SEQ ID NO: 5445647 - DNA, 25 bp, Homo sapien
cctccggcggccttgtagaagatag

SEQ ID NO: 5445648 - DNA, 25 bp, Homo sapien
gccatggctccaagcgctaaacctg

SEQ ID NO: 5445649 - DNA, 25 bp, Homo sapien
tacaaaagcattcgagcaggaagat

SEQ ID NO: 5445650 - DNA, 25 bp, Homo sapien
cggtggaacctataaaccaggatgc

SEQ ID NO: 5445651 - DNA, 25 bp, Homo sapien
gatgctcgtactcatctctggttga

SEQ ID NO: 5445652 - DNA, 25 bp, Homo sapien
gatggtctctaaagacccggtggaa

SEQ ID NO: 5445653 - DNA, 25 bp, Homo sapien
agtcatcacctggcatacttaccat

SEQ ID NO: 5445654 - DNA, 25 bp, Homo sapien
ttacagtataaaggtgatgttttgg

SEQ ID NO: 5445655 - DNA, 25 bp, Homo sapien
atgatgctgcagccactcgctgtcc

SEQ ID NO: 5445656 - DNA, 25 bp, Homo sapien
ggctcagccatttgcagaggacccc

SEQ ID NO: 5445657 - DNA, 25 bp, Homo sapien
ccccgatcaggctaatgcaggcaag

SEQ ID NO: 5445658 - DNA, 25 bp, Homo sapien
tttcatgctagactgcagccgccag

SEQ ID NO: 5445659 - DNA, 25 bp, Homo sapien
aattgaaggttgagagggttttgct

SEQ ID NO: 5445660 - DNA, 25 bp, Homo sapien
caacattagtcctctggtgaatcag

SEQ ID NO: 5445661 - DNA, 25 bp, Homo sapien
gtaatatccgatgaggctatctgtg

SEQ ID NO: 5445662 - DNA, 25 bp, Homo sapien
tctgtgtggctatcagcaacattag

SEQ ID NO: 5445663 - DNA, 25 bp, Homo sapien
cgaacaggctgattctcacattctg

SEQ ID NO: 5445664 - DNA, 25 bp, Homo sapien
acaggctgattctcacattctgtct

SEQ ID NO: 5445665 - DNA, 25 bp, Homo sapien
caaagggagccgtacttacaaagca

SEQ ID NO: 5445666 - DNA, 25 bp, Homo sapien
aaagggagccgtacttacaaagcag

SEQ ID NO: 5445667 - DNA, 25 bp, Homo sapien
ggccagttacaggatgatagtccaa

SEQ ID NO: 5445668 - DNA, 25 bp, Homo sapien
ctggaataaccatgttagagggcca

SEQ ID NO: 5445669 - DNA, 25 bp, Homo sapien
tggaataaccatgttagagggccag

SEQ ID NO: 5445670 - DNA, 25 bp, Homo sapien
tacaggatgatagtccaaacctgca

SEQ ID NO: 5445671 - DNA, 25 bp, Homo sapien
ccacttgggacctgctctgcttttc

SEQ ID NO: 5445672 - DNA, 25 bp, Homo sapien
tgtcacagacggttctctcatcatt

SEQ ID NO: 5445673 - DNA, 25 bp, Homo sapien
agggactcccatgtcacagacggtt

SEQ ID NO: 5445674 - DNA, 25 bp, Homo sapien
ggctgaggccccctacaagggactc

SEQ ID NO: 5445675 - DNA, 25 bp, Homo sapien
agtgttcctgcagcttatggctgtt

SEQ ID NO: 5445676 - DNA, 25 bp, Homo sapien
cacttccctgggtagggtgggccag

SEQ ID NO: 5445677 - DNA, 25 bp, Homo sapien
cctctttgtgcttcacaggcctctg

SEQ ID NO: 5445678 - DNA, 25 bp, Homo sapien
tggctgttggaagcctctttccagg

SEQ ID NO: 5445679 - DNA, 25 bp, Homo sapien
tatgtatatcttagtcttcctgagg

SEQ ID NO: 5445680 - DNA, 25 bp, Homo sapien
ggtactagttgcatgaaggccccac

SEQ ID NO: 5445681 - DNA, 25 bp, Homo sapien
cagagatggccatagataatgtttt

SEQ ID NO: 5445682 - DNA, 25 bp, Homo sapien
gaaaagaacattattcctaccactc

SEQ ID NO: 5445683 - DNA, 25 bp, Homo sapien
tttgtctctatcactccgaacgcca

SEQ ID NO: 5445684 - DNA, 25 bp, Homo sapien
gaacgccaattacatctggatccag

SEQ ID NO: 5445685 - DNA, 25 bp, Homo sapien
gaaattaaagttggtggctccttga

SEQ ID NO: 5445686 - DNA, 25 bp, Homo sapien
agtttccagaagtgtccaagtgggc

SEQ ID NO: 5445687 - DNA, 25 bp, Homo sapien
ttaaggtttagtaatgattcaattc

SEQ ID NO: 5445688 - DNA, 25 bp, Homo sapien
ggtttagtaatgattcaattccaca

SEQ ID NO: 5445689 - DNA, 25 bp, Homo sapien
taatctctgtttaatgctcatttga

SEQ ID NO: 5445690 - DNA, 25 bp, Homo sapien
aatataatctctgtttaatgctcat

SEQ ID NO: 5445691 - DNA, 25 bp, Homo sapien
ggattcagcttcatactgatgtggg

SEQ ID NO: 5445692 - DNA, 25 bp, Homo sapien
tgcaccggttttactcttggacagg

SEQ ID NO: 5445693 - DNA, 25 bp, Homo sapien
gcgcttcttacatgcaccggtttta

SEQ ID NO: 5445694 - DNA, 25 bp, Homo sapien
tgggaggtcaccagagcttgtcccc

SEQ ID NO: 5445695 - DNA, 25 bp, Homo sapien
cagccccagcattttcgttactcag

SEQ ID NO: 5445696 - DNA, 25 bp, Homo sapien
cacagaaatgtaccgctttatcaag

SEQ ID NO: 5445697 - DNA, 25 bp, Homo sapien
ttatcaaggtctgcttgaatatcag

SEQ ID NO: 5445698 - DNA, 25 bp, Homo sapien
caattggaatgattgcttgcacaga

SEQ ID NO: 5445699 - DNA, 25 bp, Homo sapien
gagcaaagcagctaaagaccctttt

SEQ ID NO: 5445700 - DNA, 25 bp, Homo sapien
tccagttctgcaaggagaggagcct

SEQ ID NO: 5445701 - DNA, 25 bp, Homo sapien
tcagtgctgtcacttgttcttagct

SEQ ID NO: 5445702 - DNA, 25 bp, Homo sapien
cttgtacttattcactggagctgga

SEQ ID NO: 5445703 - DNA, 25 bp, Homo sapien
cagatcctgtccacggacagtccgt

SEQ ID NO: 5445704 - DNA, 25 bp, Homo sapien
agatcctgtccacggacagtccgtc

SEQ ID NO: 5445705 - DNA, 25 bp, Homo sapien
ctcagatcctgtccacggacagtcc

SEQ ID NO: 5445706 - DNA, 25 bp, Homo sapien
tcagatcctgtccacggacagtccg

SEQ ID NO: 5445707 - DNA, 25 bp, Homo sapien
aagtgcaggttctatgtctacacat

SEQ ID NO: 5445708 - DNA, 25 bp, Homo sapien
ctcaagaccagtggtgttgaattgc

SEQ ID NO: 5445709 - DNA, 25 bp, Homo sapien
tcaagaccagtggtgttgaattgcc

SEQ ID NO: 5445710 - DNA, 25 bp, Homo sapien
cctcaagaccagtggtgttgaattg

SEQ ID NO: 5445711 - DNA, 25 bp, Homo sapien
ccaatccagtccgagtatggtcggc

SEQ ID NO: 5445712 - DNA, 25 bp, Homo sapien
tacagaacaagccaatccagtccga

SEQ ID NO: 5445713 - DNA, 25 bp, Homo sapien
gaacaagccaatccagtccgagtat

SEQ ID NO: 5445714 - DNA, 25 bp, Homo sapien
ttaagccacagggatcaatgtctct

SEQ ID NO: 5445715 - DNA, 25 bp, Homo sapien
ttctctaatatctgtatctgccatg

SEQ ID NO: 5445716 - DNA, 25 bp, Homo sapien
atctgtatctgccatgaggttaggg

SEQ ID NO: 5445717 - DNA, 25 bp, Homo sapien
tggagacctttctctaatatctgta

SEQ ID NO: 5445718 - DNA, 25 bp, Homo sapien
tgtatctgccatgaggttagggatg

SEQ ID NO: 5445719 - DNA, 25 bp, Homo sapien
cagaaatactggcttgctaggtcaa

SEQ ID NO: 5445720 - DNA, 25 bp, Homo sapien
tcagatccacttcctaggaccagga

SEQ ID NO: 5445721 - DNA, 25 bp, Homo sapien
tactattgattgtttgtccacagaa

SEQ ID NO: 5445722 - DNA, 25 bp, Homo sapien
tttcactggacttccaccttcagat

SEQ ID NO: 5445723 - DNA, 25 bp, Homo sapien
tgttttgacacacaaacggagccaa

SEQ ID NO: 5445724 - DNA, 25 bp, Homo sapien
tatgaaggccaactagtgggcccac

SEQ ID NO: 5445725 - DNA, 25 bp, Homo sapien
cacgttgctgctgtataaagccgaa

SEQ ID NO: 5445726 - DNA, 25 bp, Homo sapien
aggcagtttgccatgtgttttgaca

SEQ ID NO: 5445727 - DNA, 25 bp, Homo sapien
cagacctcgcaggaaatgacccgag

SEQ ID NO: 5445728 - DNA, 25 bp, Homo sapien
gtgaggcagtgctattacagattcc

SEQ ID NO: 5445729 - DNA, 25 bp, Homo sapien
gaggcagtgctattacagattcccc

SEQ ID NO: 5445730 - DNA, 25 bp, Homo sapien
catacagcccagacctcgcaggaaa

SEQ ID NO: 5445731 - DNA, 25 bp, Homo sapien
gattgacaacgctggagaccttctt

SEQ ID NO: 5445732 - DNA, 25 bp, Homo sapien
aaataagattttatggcctggtgca

SEQ ID NO: 5445733 - DNA, 25 bp, Homo sapien
ctcttcctcagttcggtttcctctt

SEQ ID NO: 5445734 - DNA, 25 bp, Homo sapien
tgcatggtgggttgattgacaacgc

SEQ ID NO: 5445735 - DNA, 25 bp, Homo sapien
acccgactatcatctgatttagaag

SEQ ID NO: 5445736 - DNA, 25 bp, Homo sapien
cgtattactcgtacaacccgactat

SEQ ID NO: 5445737 - DNA, 25 bp, Homo sapien
cgtacaacccgactatcatctgatt

SEQ ID NO: 5445738 - DNA, 25 bp, Homo sapien
gcatctcatttagacgtattactcg

SEQ ID NO: 5445739 - DNA, 25 bp, Homo sapien
tgtgttgaaatgtagaatatggaaa

SEQ ID NO: 5445740 - DNA, 25 bp, Homo sapien
ctgtgttgaaatgtagaatatggaa

SEQ ID NO: 5445741 - DNA, 25 bp, Homo sapien
tgctctgtcactggtcaaatttctc

SEQ ID NO: 5445742 - DNA, 25 bp, Homo sapien
ttgaaaatggcattgctcttcccag

SEQ ID NO: 5445743 - DNA, 25 bp, Homo sapien
gtctgggctaaattttgctctgtca

SEQ ID NO: 5445744 - DNA, 25 bp, Homo sapien
caggaaagtgaaaagtctgggctaa

SEQ ID NO: 5445745 - DNA, 25 bp, Homo sapien
gcagcaaacgatgcctatgtcttag

SEQ ID NO: 5445746 - DNA, 25 bp, Homo sapien
gctttggccctaacctcagcaggga

SEQ ID NO: 5445747 - DNA, 25 bp, Homo sapien
gacaaagaatcctctaccacagcca

SEQ ID NO: 5445748 - DNA, 25 bp, Homo sapien
ctgggatgtcggtgcaaaggtaatc

SEQ ID NO: 5445749 - DNA, 25 bp, Homo sapien
gacactgtgtcccaactttatctca

SEQ ID NO: 5445750 - DNA, 25 bp, Homo sapien
aacaaatggtggattgtgattccaa

SEQ ID NO: 5445751 - DNA, 25 bp, Homo sapien
ctttatctcagaatggtccaccaag

SEQ ID NO: 5445752 - DNA, 25 bp, Homo sapien
caccaagataccatgtttagaccaa

SEQ ID NO: 5445753 - DNA, 25 bp, Homo sapien
atatcatctggcgtttatacctcat

SEQ ID NO: 5445754 - DNA, 25 bp, Homo sapien
tcttgacctattaacctgttgtttc

SEQ ID NO: 5445755 - DNA, 25 bp, Homo sapien
ctttcttgacctattaacctgttgt

SEQ ID NO: 5445756 - DNA, 25 bp, Homo sapien
cctttcttgacctattaacctgttg

SEQ ID NO: 5445757 - DNA, 25 bp, Homo sapien
gcttcgcagtcagagctgagtctcc

SEQ ID NO: 5445758 - DNA, 25 bp, Homo sapien
tccctggttcctggttagctcactt

SEQ ID NO: 5445759 - DNA, 25 bp, Homo sapien
gctcactttggagggctgcgtgtcc

SEQ ID NO: 5445760 - DNA, 25 bp, Homo sapien
tatgtctacttgtttacagcacctt

SEQ ID NO: 5445761 - DNA, 25 bp, Homo sapien
ttgataagaaattggaggaggttga

SEQ ID NO: 5445762 - DNA, 25 bp, Homo sapien
tgcttgataagaaattggaggaggt

SEQ ID NO: 5445763 - DNA, 25 bp, Homo sapien
ttgcttgataagaaattggaggagg

SEQ ID NO: 5445764 - DNA, 25 bp, Homo sapien
gcttgataagaaattggaggaggtt

SEQ ID NO: 5445765 - DNA, 25 bp, Homo sapien
aaagatcaagatgcctggaaggaca

SEQ ID NO: 5445766 - DNA, 25 bp, Homo sapien
tgaaagatcaagatgcctggaagga

SEQ ID NO: 5445767 - DNA, 25 bp, Homo sapien
agatcaagatgcctggaaggacagc

SEQ ID NO: 5445768 - DNA, 25 bp, Homo sapien
gaaagatcaagatgcctggaaggac

SEQ ID NO: 5445769 - DNA, 25 bp, Homo sapien
tgccgtgcgagaaactgggacgacc

SEQ ID NO: 5445770 - DNA, 25 bp, Homo sapien
gtaacgtgccattcctccaaagggc

SEQ ID NO: 5445771 - DNA, 25 bp, Homo sapien
gatgccaaggagttggtaacgtgcc

SEQ ID NO: 5445772 - DNA, 25 bp, Homo sapien
gccactgaagcgttttgccaggaaa

SEQ ID NO: 5445773 - DNA, 25 bp, Homo sapien
aagatgactcggcagttctgggaac

SEQ ID NO: 5445774 - DNA, 25 bp, Homo sapien
tgtgctctgacacacccatggtgta

SEQ ID NO: 5445775 - DNA, 25 bp, Homo sapien
gaagttgaaaatcctcctagagcca

SEQ ID NO: 5445776 - DNA, 25 bp, Homo sapien
gtaagttcccattatgtcagcagtg

SEQ ID NO: 5445777 - DNA, 25 bp, Homo sapien
ttctcattttgagcagccacgatat

SEQ ID NO: 5445778 - DNA, 25 bp, Homo sapien
ttttgagcagccacgatatgttcaa

SEQ ID NO: 5445779 - DNA, 25 bp, Homo sapien
gagcagccacgatatgttcaatttg

SEQ ID NO: 5445780 - DNA, 25 bp, Homo sapien
tgacaacattgcagcttgtatattg

SEQ ID NO: 5445781 - DNA, 25 bp, Homo sapien
cttccaccccaaggcaagtcagcac

SEQ ID NO: 5445782 - DNA, 25 bp, Homo sapien
ctagagccaaggaaaactcaccgga

SEQ ID NO: 5445783 - DNA, 25 bp, Homo sapien
gtgaccagggtacactggctgttct

SEQ ID NO: 5445784 - DNA, 25 bp, Homo sapien
tatgagatgctttcggggtgaccag

SEQ ID NO: 5445785 - DNA, 25 bp, Homo sapien
ggaatcttgccagccattgatccaa

SEQ ID NO: 5445786 - DNA, 25 bp, Homo sapien
tctttccttcttcgaggctccagga

SEQ ID NO: 5445787 - DNA, 25 bp, Homo sapien
ggcctcttgcctcgctgcttggagc

SEQ ID NO: 5445788 - DNA, 25 bp, Homo sapien
gcttggagctcctttgacggtggaa

SEQ ID NO: 5445789 - DNA, 25 bp, Homo sapien
gagttatcgcggcagtgcaactgca

SEQ ID NO: 5445790 - DNA, 25 bp, Homo sapien
gttatcgcggcagtgcaactgcagt

SEQ ID NO: 5445791 - DNA, 25 bp, Homo sapien
atcgcggcagtgcaactgcagtcag

SEQ ID NO: 5445792 - DNA, 25 bp, Homo sapien
ctgggagttatcgcggcagtgcaac

SEQ ID NO: 5445793 - DNA, 25 bp, Homo sapien
tccattccagaatgggtacgggaaa

SEQ ID NO: 5445794 - DNA, 25 bp, Homo sapien
tgactgccccgcttctccattccag

SEQ ID NO: 5445795 - DNA, 25 bp, Homo sapien
ccagcgttagttgtgtgactgcccc

SEQ ID NO: 5445796 - DNA, 25 bp, Homo sapien
agcagggtgaagaaaatgcccagga

SEQ ID NO: 5445797 - DNA, 25 bp, Homo sapien
gtgctgaagtgctgtaaattagcag

SEQ ID NO: 5445798 - DNA, 25 bp, Homo sapien
tgctgtaaattagcagcgttcaatt

SEQ ID NO: 5445799 - DNA, 25 bp, Homo sapien
ctgaagtgctgtaaattagcagcgt

SEQ ID NO: 5445800 - DNA, 25 bp, Homo sapien
gaagtgctgtaaattagcagcgttc

SEQ ID NO: 5445801 - DNA, 25 bp, Homo sapien
agggctatctctaccactggctctt

SEQ ID NO: 5445802 - DNA, 25 bp, Homo sapien
cctctgtggccagggctatctctac

SEQ ID NO: 5445803 - DNA, 25 bp, Homo sapien
tggttgctggcaccagttgctctgc

SEQ ID NO: 5445804 - DNA, 25 bp, Homo sapien
gtggttgctggcaccagttgctctg

SEQ ID NO: 5445805 - DNA, 25 bp, Homo sapien
aacagggatattcttgtgtgtctga

SEQ ID NO: 5445806 - DNA, 25 bp, Homo sapien
ggctgccccggtgcccttggcagag

SEQ ID NO: 5445807 - DNA, 25 bp, Homo sapien
tactggtgtagccagggtgggaaca

SEQ ID NO: 5445808 - DNA, 25 bp, Homo sapien
tgaggaccacgttcagtcacacggc

SEQ ID NO: 5445809 - DNA, 25 bp, Homo sapien
gcagccctgctcaatctctctaaga

SEQ ID NO: 5445810 - DNA, 25 bp, Homo sapien
cactgggactgaacctgcgtctgaa

SEQ ID NO: 5445811 - DNA, 25 bp, Homo sapien
tgcgtctgaagcaagcatggcagca

SEQ ID NO: 5445812 - DNA, 25 bp, Homo sapien
tccctgggtacaaactcaataagtg

SEQ ID NO: 5445813 - DNA, 25 bp, Homo sapien
cacctcaccctggattttgctctta

SEQ ID NO: 5445814 - DNA, 25 bp, Homo sapien
caaagcttccctcaataattgttta

SEQ ID NO: 5445815 - DNA, 25 bp, Homo sapien
tcagttctaacttgtgcttgtgagt

SEQ ID NO: 5445816 - DNA, 25 bp, Homo sapien
tttatcctgatagtccaattctctg

SEQ ID NO: 5445817 - DNA, 25 bp, Homo sapien
caagcaccccatggattgcagaggg

SEQ ID NO: 5445818 - DNA, 25 bp, Homo sapien
gcagaccagtaaaagtcccagattg

SEQ ID NO: 5445819 - DNA, 25 bp, Homo sapien
ggtaccctgaagactaagacttgca

SEQ ID NO: 5445820 - DNA, 25 bp, Homo sapien
taactccgagaatgacatgcagcca

SEQ ID NO: 5445821 - DNA, 25 bp, Homo sapien
catttaagctctcctgggcctagtc

SEQ ID NO: 5445822 - DNA, 25 bp, Homo sapien
tcaggagaatatacgggctgctaca

SEQ ID NO: 5445823 - DNA, 25 bp, Homo sapien
tggtaccccgactttagagaccaca

SEQ ID NO: 5445824 - DNA, 25 bp, Homo sapien
caaatccagaatatatggtaccccg

SEQ ID NO: 5445825 - DNA, 25 bp, Homo sapien
tacgaagtcctcaaaaagggtcatg

SEQ ID NO: 5445826 - DNA, 25 bp, Homo sapien
ccattgaagttgtcaggtaactacc

SEQ ID NO: 5445827 - DNA, 25 bp, Homo sapien
agggtcatgtgcttatgtgacccag

SEQ ID NO: 5445828 - DNA, 25 bp, Homo sapien
tttctgtctctgccctacgaagtcc

SEQ ID NO: 5445829 - DNA, 25 bp, Homo sapien
acagcaaagtcttgtgaatactttt

SEQ ID NO: 5445830 - DNA, 25 bp, Homo sapien
tgtcattcttggaatacagcaaagt

SEQ ID NO: 5445831 - DNA, 25 bp, Homo sapien
aacgccaactgttttgatgtctcag

SEQ ID NO: 5445832 - DNA, 25 bp, Homo sapien
cctgctgcaaggtagacaaagccct

SEQ ID NO: 5445833 - DNA, 25 bp, Homo sapien
tttgagcataaaaatggcaatccca

SEQ ID NO: 5445834 - DNA, 25 bp, Homo sapien
ggcaatcccaatcggccacagtgaa

SEQ ID NO: 5445835 - DNA, 25 bp, Homo sapien
tggagcatgtgccttgtcgtctgac

SEQ ID NO: 5445836 - DNA, 25 bp, Homo sapien
cagcaagggtaatagtggtcggaat

SEQ ID NO: 5445837 - DNA, 25 bp, Homo sapien
cacagcttgtgccatgggaggagac

SEQ ID NO: 5445838 - DNA, 25 bp, Homo sapien
caatttcaggacaagctgctggagc

SEQ ID NO: 5445839 - DNA, 25 bp, Homo sapien
caggcatatttatctaccgagcagg

SEQ ID NO: 5445840 - DNA, 25 bp, Homo sapien
ggctactccagtacttgctaagctg

SEQ ID NO: 5445841 - DNA, 25 bp, Homo sapien
tctagtgttactcaatcaaggcaaa

SEQ ID NO: 5445842 - DNA, 25 bp, Homo sapien
gaacccgggcttggcatcatctagt

SEQ ID NO: 5445843 - DNA, 25 bp, Homo sapien
tgaactggatggctaagaaaactgc

SEQ ID NO: 5445844 - DNA, 25 bp, Homo sapien
caacggtagtcgcattccagaaggc

SEQ ID NO: 5445845 - DNA, 25 bp, Homo sapien
gaaacacatgatgcagccctgaggg

SEQ ID NO: 5445846 - DNA, 25 bp, Homo sapien
tccagaaggctatgtgtcaacacac

SEQ ID NO: 5445847 - DNA, 25 bp, Homo sapien
cagcctcgccccttgggtgtttttg

SEQ ID NO: 5445848 - DNA, 25 bp, Homo sapien
cctcgggtgttctttctgagatccg

SEQ ID NO: 5445849 - DNA, 25 bp, Homo sapien
tttggtgggcgtgactagaagcacc

SEQ ID NO: 5445850 - DNA, 25 bp, Homo sapien
cacgggctgtgcttaaggcgagttc

SEQ ID NO: 5445851 - DNA, 25 bp, Homo sapien
tgcgcgtcggcgagctcacccagca

SEQ ID NO: 5445852 - DNA, 25 bp, Homo sapien
gcttcggcaggacgggcatcgtggt

SEQ ID NO: 5445853 - DNA, 25 bp, Homo sapien
aaggagggccagctgcgcgtcggcg

SEQ ID NO: 5445854 - DNA, 25 bp, Homo sapien
aggatgaaagtgaccgtgtgcttcg

SEQ ID NO: 5445855 - DNA, 25 bp, Homo sapien
tcaagattgaggatgaagttgaggt

SEQ ID NO: 5445856 - DNA, 25 bp, Homo sapien
tatatttcgtggacagcgtctgaga

SEQ ID NO: 5445857 - DNA, 25 bp, Homo sapien
tgccattctatatttcgtggacagc

SEQ ID NO: 5445858 - DNA, 25 bp, Homo sapien
gcactgagtaatgtagatgggagaa

SEQ ID NO: 5445859 - DNA, 25 bp, Homo sapien
tctccaggacagttgtgggacgggt

SEQ ID NO: 5445860 - DNA, 25 bp, Homo sapien
aggatagaattgtgggaagtttctc

SEQ ID NO: 5445861 - DNA, 25 bp, Homo sapien
gatggagatattgttggacctacct

SEQ ID NO: 5445862 - DNA, 25 bp, Homo sapien
ctaccgctgtttgaaggtaaacatg

SEQ ID NO: 5445863 - DNA, 25 bp, Homo sapien
taagacatggcctttgctttacaga

SEQ ID NO: 5445864 - DNA, 25 bp, Homo sapien
caagggattgccgctgttaggacca

SEQ ID NO: 5445865 - DNA, 25 bp, Homo sapien
gttgggtctcaaacaatggcaaggg

SEQ ID NO: 5445866 - DNA, 25 bp, Homo sapien
ggcctgttgggtctcaaacaatggc

SEQ ID NO: 5445867 - DNA, 25 bp, Homo sapien
caatggcaagggattgccgctgtta

SEQ ID NO: 5445868 - DNA, 25 bp, Homo sapien
tggtttactgccaaagtttggacta

SEQ ID NO: 5445869 - DNA, 25 bp, Homo sapien
actgccaaagtttggactaataaag

SEQ ID NO: 5445870 - DNA, 25 bp, Homo sapien
tgtcccttgatggtttactgccaaa

SEQ ID NO: 5445871 - DNA, 25 bp, Homo sapien
tgatggtttactgccaaagtttgga

SEQ ID NO: 5445872 - DNA, 25 bp, Homo sapien
ttgtagaccatacctgaagaactgc

SEQ ID NO: 5445873 - DNA, 25 bp, Homo sapien
ctgtgaaatgacaaatcaaaagggc

SEQ ID NO: 5445874 - DNA, 25 bp, Homo sapien
tgaagtgtctaatctcttttaaggc

SEQ ID NO: 5445875 - DNA, 25 bp, Homo sapien
taacaaatcagttgccatggaatta

SEQ ID NO: 5445876 - DNA, 25 bp, Homo sapien
tctgtattagcaaggcaaagaacag

SEQ ID NO: 5445877 - DNA, 25 bp, Homo sapien
ttgatgttgggaagacaaataggct

SEQ ID NO: 5445878 - DNA, 25 bp, Homo sapien
ttctgtattagcaaggcaaagaaca

SEQ ID NO: 5445879 - DNA, 25 bp, Homo sapien
caaataggctgctttgtgccgcctt

SEQ ID NO: 5445880 - DNA, 25 bp, Homo sapien
gaaaccccttgatgctaagaaagca

SEQ ID NO: 5445881 - DNA, 25 bp, Homo sapien
ccttttgtatagaatggacttaggc

SEQ ID NO: 5445882 - DNA, 25 bp, Homo sapien
gggctcaccagtgctgagacagctg

SEQ ID NO: 5445883 - DNA, 25 bp, Homo sapien
cattcgttgatacagctgaactggc

SEQ ID NO: 5445884 - DNA, 25 bp, Homo sapien
gagcgtcttggctttgagactcttc

SEQ ID NO: 5445885 - DNA, 25 bp, Homo sapien
atagggagcgtcttggctttgagac

SEQ ID NO: 5445886 - DNA, 25 bp, Homo sapien
cttggctttgagactcttcatccat

SEQ ID NO: 5445887 - DNA, 25 bp, Homo sapien
gtcttggctttgagactcttcatcc

SEQ ID NO: 5445888 - DNA, 25 bp, Homo sapien
tattcccctgagcagttaaaagtgt

SEQ ID NO: 5445889 - DNA, 25 bp, Homo sapien
ttcccctgagcagttaaaagtgtca

SEQ ID NO: 5445890 - DNA, 25 bp, Homo sapien
ctattcccctgagcagttaaaagtg

SEQ ID NO: 5445891 - DNA, 25 bp, Homo sapien
tcccctgagcagttaaaagtgtcac

SEQ ID NO: 5445892 - DNA, 25 bp, Homo sapien
ggagatcacggttaaaatcttgaac

SEQ ID NO: 5445893 - DNA, 25 bp, Homo sapien
tttgtggatgtttccggagatcacg

SEQ ID NO: 5445894 - DNA, 25 bp, Homo sapien
gatgtttattccgtgagagaggtca

SEQ ID NO: 5445895 - DNA, 25 bp, Homo sapien
cttgaactatgcactctactatggg

SEQ ID NO: 5445896 - DNA, 25 bp, Homo sapien
gactggatgaacacaaccctgggaa

SEQ ID NO: 5445897 - DNA, 25 bp, Homo sapien
ggaacaatgcctttggcacagctct

SEQ ID NO: 5445898 - DNA, 25 bp, Homo sapien
gcttcatctaaggaaactggctctg

SEQ ID NO: 5445899 - DNA, 25 bp, Homo sapien
tcgagcagcagtcccttctggttca

SEQ ID NO: 5445900 - DNA, 25 bp, Homo sapien
tgatactgataagtttcttcagctt

SEQ ID NO: 5445901 - DNA, 25 bp, Homo sapien
cttcagctttgcattcttgcctcat

SEQ ID NO: 5445902 - DNA, 25 bp, Homo sapien
tctgatactgataagtttcttcagc

SEQ ID NO: 5445903 - DNA, 25 bp, Homo sapien
ttttctgatactgataagtttcttc

SEQ ID NO: 5445904 - DNA, 25 bp, Homo sapien
tccttcaggacaatggaggcagcag

SEQ ID NO: 5445905 - DNA, 25 bp, Homo sapien
tgaaaacaacccagcagtaactagc

SEQ ID NO: 5445906 - DNA, 25 bp, Homo sapien
caaccttggagggagctaggaccaa

SEQ ID NO: 5445907 - DNA, 25 bp, Homo sapien
aatgcttcctattggcccagaccag

SEQ ID NO: 5445908 - DNA, 25 bp, Homo sapien
cacgtgaaccgatcttgttaccaca

SEQ ID NO: 5445909 - DNA, 25 bp, Homo sapien
tgcaagctcccatcagaatatgact

SEQ ID NO: 5445910 - DNA, 25 bp, Homo sapien
tattgccgcattaactgcaagctcc

SEQ ID NO: 5445911 - DNA, 25 bp, Homo sapien
ccatttctaagaccacgtgaaccga

SEQ ID NO: 5445912 - DNA, 25 bp, Homo sapien
tccttggagggagactcaagacctg

SEQ ID NO: 5445913 - DNA, 25 bp, Homo sapien
tggagggagactcaagacctgcttc

SEQ ID NO: 5445914 - DNA, 25 bp, Homo sapien
ctccttggagggagactcaagacct

SEQ ID NO: 5445915 - DNA, 25 bp, Homo sapien
cttggagggagactcaagacctgct

SEQ ID NO: 5445916 - DNA, 25 bp, Homo sapien
gttgtgcaaaagtgagccctcttct

SEQ ID NO: 5445917 - DNA, 25 bp, Homo sapien
ctcccaactcccacgataccctcat

SEQ ID NO: 5445918 - DNA, 25 bp, Homo sapien
tctcccaactcccacgataccctca

SEQ ID NO: 5445919 - DNA, 25 bp, Homo sapien
tctgttgtgcaaaagtgagccctct

SEQ ID NO: 5445920 - DNA, 25 bp, Homo sapien
gagctgtacctctggggagatatat

SEQ ID NO: 5445921 - DNA, 25 bp, Homo sapien
caaagcataaaccttgtttttgatg

SEQ ID NO: 5445922 - DNA, 25 bp, Homo sapien
gtttccagtgtcatggtgtactgta

SEQ ID NO: 5445923 - DNA, 25 bp, Homo sapien
gggacctaatttcagagcgctgtct

SEQ ID NO: 5445924 - DNA, 25 bp, Homo sapien
tcatgtctgtacactggtggatcac

SEQ ID NO: 5445925 - DNA, 25 bp, Homo sapien
taaaaagtagaagcctgactgcgag

SEQ ID NO: 5445926 - DNA, 25 bp, Homo sapien
ggtggatcactacccttaactagtc

SEQ ID NO: 5445927 - DNA, 25 bp, Homo sapien
gaggatgacatcaaaggcccactgt

SEQ ID NO: 5445928 - DNA, 25 bp, Homo sapien
gatgcacagattccatcccactgtc

SEQ ID NO: 5445929 - DNA, 25 bp, Homo sapien
tcccactgtcgtatcactttcttct

SEQ ID NO: 5445930 - DNA, 25 bp, Homo sapien
actgtttgatgcacagattccatcc

SEQ ID NO: 5445931 - DNA, 25 bp, Homo sapien
gattccatcccactgtcgtatcact

SEQ ID NO: 5445932 - DNA, 25 bp, Homo sapien
gcattcttagatgtgttactgctgt

SEQ ID NO: 5445933 - DNA, 25 bp, Homo sapien
attcttagatgtgttactgctgtac

SEQ ID NO: 5445934 - DNA, 25 bp, Homo sapien
cattcttagatgtgttactgctgta

SEQ ID NO: 5445935 - DNA, 25 bp, Homo sapien
tgcattcttagatgtgttactgctg

SEQ ID NO: 5445936 - DNA, 25 bp, Homo sapien
gtaattccttatcccagttcgccat

SEQ ID NO: 5445937 - DNA, 25 bp, Homo sapien
atataggtatctttacatttgccac

SEQ ID NO: 5445938 - DNA, 25 bp, Homo sapien
ttagtaattccttatcccagttcgc

SEQ ID NO: 5445939 - DNA, 25 bp, Homo sapien
catataggtatctttacatttgcca

SEQ ID NO: 5445940 - DNA, 25 bp, Homo sapien
caaaactcttgtttttccctgcact

SEQ ID NO: 5445941 - DNA, 25 bp, Homo sapien
tccttcctgggtgcattgtggggca

SEQ ID NO: 5445942 - DNA, 25 bp, Homo sapien
ggctggctactcagaggctcctgtt

SEQ ID NO: 5445943 - DNA, 25 bp, Homo sapien
aacagtctgcagacatgctctgtca

SEQ ID NO: 5445944 - DNA, 25 bp, Homo sapien
tgctgttgtgttccagtaggtaaga

SEQ ID NO: 5445945 - DNA, 25 bp, Homo sapien
ccaccaggaaaccagttgcatggct

SEQ ID NO: 5445946 - DNA, 25 bp, Homo sapien
ttgcatggctgagaactgtaattca

SEQ ID NO: 5445947 - DNA, 25 bp, Homo sapien
tgtaattcatgtagcccctctccaa

SEQ ID NO: 5445948 - DNA, 25 bp, Homo sapien
gggagaccctggcatgggagtctgg

SEQ ID NO: 5445949 - DNA, 25 bp, Homo sapien
tattccctactgaagattgtggagc

SEQ ID NO: 5445950 - DNA, 25 bp, Homo sapien
ttgtggagctctacccagaggcggc

SEQ ID NO: 5445951 - DNA, 25 bp, Homo sapien
gaagattgtggagctctacccagag

SEQ ID NO: 5445952 - DNA, 25 bp, Homo sapien
tcatctcttggtcagtatctccctc

SEQ ID NO: 5445953 - DNA, 25 bp, Homo sapien
gaactcaagggtcaatgtctcagaa

SEQ ID NO: 5445954 - DNA, 25 bp, Homo sapien
gaactgggaggagcaagtactcttc

SEQ ID NO: 5445955 - DNA, 25 bp, Homo sapien
ctcccgacccacagcaggatgagga

SEQ ID NO: 5445956 - DNA, 25 bp, Homo sapien
gaatccacttgcaaatgctaggtaa

SEQ ID NO: 5445957 - DNA, 25 bp, Homo sapien
gagagccacggtcatctctatgtca

SEQ ID NO: 5445958 - DNA, 25 bp, Homo sapien
agaatgagcagttggacagaaatcc

SEQ ID NO: 5445959 - DNA, 25 bp, Homo sapien
gagccaaattgggaactagacaaag

SEQ ID NO: 5445960 - DNA, 25 bp, Homo sapien
aagctacattaggtctgttgccacg

SEQ ID NO: 5445961 - DNA, 25 bp, Homo sapien
tgcgagccagcagaaatgatccata

SEQ ID NO: 5445962 - DNA, 25 bp, Homo sapien
tgttgccacgtgagaatccttggtg

SEQ ID NO: 5445963 - DNA, 25 bp, Homo sapien
gtcatggccatgaactgcgtttttg

SEQ ID NO: 5445964 - DNA, 25 bp, Homo sapien
ctccacattagtttggattgcgcac

SEQ ID NO: 5445965 - DNA, 25 bp, Homo sapien
tcattgaagaatctccacattagtt

SEQ ID NO: 5445966 - DNA, 25 bp, Homo sapien
tctccacattagtttggattgcgca

SEQ ID NO: 5445967 - DNA, 25 bp, Homo sapien
aagaatctccacattagtttggatt

SEQ ID NO: 5445968 - DNA, 25 bp, Homo sapien
tttggggcatgtataaattgacagt

SEQ ID NO: 5445969 - DNA, 25 bp, Homo sapien
ctttggggcatgtataaattgacag

SEQ ID NO: 5445970 - DNA, 25 bp, Homo sapien
ttggggcatgtataaattgacagtg

SEQ ID NO: 5445971 - DNA, 25 bp, Homo sapien
ccttagcatagaatgtgttggacca

SEQ ID NO: 5445972 - DNA, 25 bp, Homo sapien
tgctgagctggagtgtacaacatcc

SEQ ID NO: 5445973 - DNA, 25 bp, Homo sapien
tttatctgtgccatctggtgctaca

SEQ ID NO: 5445974 - DNA, 25 bp, Homo sapien
tgttggaccaaaatcactctttgcc

SEQ ID NO: 5445975 - DNA, 25 bp, Homo sapien
taatttcttagctctgagcacttcc

SEQ ID NO: 5445976 - DNA, 25 bp, Homo sapien
ctactaatttcttagctctgagcac

SEQ ID NO: 5445977 - DNA, 25 bp, Homo sapien
ctctactaatttcttagctctgagc

SEQ ID NO: 5445978 - DNA, 25 bp, Homo sapien
actaatttcttagctctgagcactt

SEQ ID NO: 5445979 - DNA, 25 bp, Homo sapien
tctaacacccgttttagctcatcaa

SEQ ID NO: 5445980 - DNA, 25 bp, Homo sapien
tctctaacacccgttttagctcatc

SEQ ID NO: 5445981 - DNA, 25 bp, Homo sapien
actctctaacacccgttttagctca

SEQ ID NO: 5445982 - DNA, 25 bp, Homo sapien
ctctaacacccgttttagctcatca

SEQ ID NO: 5445983 - DNA, 25 bp, Homo sapien
ccaacttggaccatatattctcctg

SEQ ID NO: 5445984 - DNA, 25 bp, Homo sapien
catatattctcctgtatccgacaga

SEQ ID NO: 5445985 - DNA, 25 bp, Homo sapien
gtccaacttggaccatatattctcc

SEQ ID NO: 5445986 - DNA, 25 bp, Homo sapien
aatttgactcatatctaatgagagc

SEQ ID NO: 5445987 - DNA, 25 bp, Homo sapien
tctaatgagagcataaaatagcctt

SEQ ID NO: 5445988 - DNA, 25 bp, Homo sapien
caatttggcacccaccaatttgact

SEQ ID NO: 5445989 - DNA, 25 bp, Homo sapien
tatttctccttggttctcgatacgg

SEQ ID NO: 5445990 - DNA, 25 bp, Homo sapien
gaacgtcatgcatttactgggtaaa

SEQ ID NO: 5445991 - DNA, 25 bp, Homo sapien
tattaatttgtgtccagctgatcgc

SEQ ID NO: 5445992 - DNA, 25 bp, Homo sapien
ggctaactgggcttgcgaagattct

SEQ ID NO: 5445993 - DNA, 25 bp, Homo sapien
tgaacaactctgagaacgtcatgca

SEQ ID NO: 5445994 - DNA, 25 bp, Homo sapien
tggcttgcaggtttctccacttctc

SEQ ID NO: 5445995 - DNA, 25 bp, Homo sapien
ttactctgtaagacactctaaactc

SEQ ID NO: 5445996 - DNA, 25 bp, Homo sapien
aggccccattgaatgaattgggttg

SEQ ID NO: 5445997 - DNA, 25 bp, Homo sapien
tataaaaggccccattgaatgaatt

SEQ ID NO: 5445998 - DNA, 25 bp, Homo sapien
gacactctaaactctatttcattga

SEQ ID NO: 5445999 - DNA, 25 bp, Homo sapien
aactgacccaaatggagggaacctg

SEQ ID NO: 5446000 - DNA, 25 bp, Homo sapien
gaatttcaactgactaggcaacttg

SEQ ID NO: 5446001 - DNA, 25 bp, Homo sapien
gggaacctggtgtaatcataatcag

SEQ ID NO: 5446002 - DNA, 25 bp, Homo sapien
tcttcatgcaatggagacaatgcag

SEQ ID NO: 5446003 - DNA, 25 bp, Homo sapien
tgactttgaagatgcgagggctata

SEQ ID NO: 5446004 - DNA, 25 bp, Homo sapien
ctttgaagatgcgagggctatattt

SEQ ID NO: 5446005 - DNA, 25 bp, Homo sapien
ttgaagatgcgagggctatattttt

SEQ ID NO: 5446006 - DNA, 25 bp, Homo sapien
gatgcgagggctatatttttgttcg

SEQ ID NO: 5446007 - DNA, 25 bp, Homo sapien
gagttcttgacagtaataactattg

SEQ ID NO: 5446008 - DNA, 25 bp, Homo sapien
gacagtaataactattgattccagt

SEQ ID NO: 5446009 - DNA, 25 bp, Homo sapien
taactattgattccagttttctgat

SEQ ID NO: 5446010 - DNA, 25 bp, Homo sapien
cttgacagtaataactattgattcc

SEQ ID NO: 5446011 - DNA, 25 bp, Homo sapien
tgcccataatcagattttgcaaggg

SEQ ID NO: 5446012 - DNA, 25 bp, Homo sapien
gattgtgcccataatcagattttgc

SEQ ID NO: 5446013 - DNA, 25 bp, Homo sapien
aatcagattttgcaagggccagagc

SEQ ID NO: 5446014 - DNA, 25 bp, Homo sapien
taaaataaggattgtgcccataatc

SEQ ID NO: 5446015 - DNA, 25 bp, Homo sapien
gaatggcactaatcaggtttgaaag

SEQ ID NO: 5446016 - DNA, 25 bp, Homo sapien
ctaaggaatggcactaatcaggttt

SEQ ID NO: 5446017 - DNA, 25 bp, Homo sapien
cactaatcaggtttgaaagtttggg

SEQ ID NO: 5446018 - DNA, 25 bp, Homo sapien
ggcactaatcaggtttgaaagtttg

SEQ ID NO: 5446019 - DNA, 25 bp, Homo sapien
tgtgctcttactttaactgattgat

SEQ ID NO: 5446020 - DNA, 25 bp, Homo sapien
gcagatttgttataggacagttggt

SEQ ID NO: 5446021 - DNA, 25 bp, Homo sapien
tcctgtgctgcagaatgacgggtct

SEQ ID NO: 5446022 - DNA, 25 bp, Homo sapien
gacagttggttatcttgtgctctta

SEQ ID NO: 5446023 - DNA, 25 bp, Homo sapien
gagattccgactgcctgtaatgtgt

SEQ ID NO: 5446024 - DNA, 25 bp, Homo sapien
aatcacagggaatatgcccagtcca

SEQ ID NO: 5446025 - DNA, 25 bp, Homo sapien
ataccaggagattccgactgcctgt

SEQ ID NO: 5446026 - DNA, 25 bp, Homo sapien
tgcctgtaatgtgttcagttccctg

SEQ ID NO: 5446027 - DNA, 25 bp, Homo sapien
tggcctggacgctgaagcagagctt

SEQ ID NO: 5446028 - DNA, 25 bp, Homo sapien
cagagcttggcagatggtaccgcag

SEQ ID NO: 5446029 - DNA, 25 bp, Homo sapien
cagtgctgccagcttgtatacagaa

SEQ ID NO: 5446030 - DNA, 25 bp, Homo sapien
tagaaccagtcagctagaggagagt

SEQ ID NO: 5446031 - DNA, 25 bp, Homo sapien
tacctcttgtatacctgactcccag

SEQ ID NO: 5446032 - DNA, 25 bp, Homo sapien
cacatgaggccttattcattgttgc

SEQ ID NO: 5446033 - DNA, 25 bp, Homo sapien
caccttccagtctgatgcttgttga

SEQ ID NO: 5446034 - DNA, 25 bp, Homo sapien
taaagtctttgcactgtgggatgag

SEQ ID NO: 5446035 - DNA, 25 bp, Homo sapien
tcttactctggtgaggagtcgtact

SEQ ID NO: 5446036 - DNA, 25 bp, Homo sapien
aggagtcgtactctcagcccctgtg

SEQ ID NO: 5446037 - DNA, 25 bp, Homo sapien
tgaggagtcgtactctcagcccctg

SEQ ID NO: 5446038 - DNA, 25 bp, Homo sapien
tctggtgaggagtcgtactctcagc

SEQ ID NO: 5446039 - DNA, 25 bp, Homo sapien
gctttcgtcaaagcctctttgcagg

SEQ ID NO: 5446040 - DNA, 25 bp, Homo sapien
ctctgagtaggctttcgtcaaagcc

SEQ ID NO: 5446041 - DNA, 25 bp, Homo sapien
gcctctttgcagggtcttgcctcag

SEQ ID NO: 5446042 - DNA, 25 bp, Homo sapien
ttctggatccactccttcactggct

SEQ ID NO: 5446043 - DNA, 25 bp, Homo sapien
gcagaccatggcagtggagccagtt

SEQ ID NO: 5446044 - DNA, 25 bp, Homo sapien
ctggatttgaagagggaattgtact

SEQ ID NO: 5446045 - DNA, 25 bp, Homo sapien
gagggaattgtactcctgtttgcag

SEQ ID NO: 5446046 - DNA, 25 bp, Homo sapien
gtggagccagttgtaagctattggc

SEQ ID NO: 5446047 - DNA, 25 bp, Homo sapien
agtttcggaaacagagtggtgtatc

SEQ ID NO: 5446048 - DNA, 25 bp, Homo sapien
gtttcggaaacagagtggtgtatcc

SEQ ID NO: 5446049 - DNA, 25 bp, Homo sapien
tcggaaacagagtggtgtatccatc

SEQ ID NO: 5446050 - DNA, 25 bp, Homo sapien
ctgagtttcggaaacagagtggtgt

SEQ ID NO: 5446051 - DNA, 25 bp, Homo sapien
tgattgtctgggaaaattagttgtt

SEQ ID NO: 5446052 - DNA, 25 bp, Homo sapien
gaagaattgctgaacttggtagatg

SEQ ID NO: 5446053 - DNA, 25 bp, Homo sapien
tatagatctcgttctgaaaaagaag

SEQ ID NO: 5446054 - DNA, 25 bp, Homo sapien
tagttgttttgagttatagatctcg

SEQ ID NO: 5446055 - DNA, 25 bp, Homo sapien
cagcacagtcgccttcttacacatg

SEQ ID NO: 5446056 - DNA, 25 bp, Homo sapien
ggtctggagatagctgacacccttg

SEQ ID NO: 5446057 - DNA, 25 bp, Homo sapien
ggctttcacttttagagggtctgga

SEQ ID NO: 5446058 - DNA, 25 bp, Homo sapien
gcatcactaagacacatcctggcgt

SEQ ID NO: 5446059 - DNA, 25 bp, Homo sapien
tcatccttcacaatgaattgcttaa

SEQ ID NO: 5446060 - DNA, 25 bp, Homo sapien
tattggtaatcagactccttgacaa

SEQ ID NO: 5446061 - DNA, 25 bp, Homo sapien
aatgtattggtaatcagactccttg

SEQ ID NO: 5446062 - DNA, 25 bp, Homo sapien
ttgcttaatgtattggtaatcagac

SEQ ID NO: 5446063 - DNA, 25 bp, Homo sapien
tagtggaaatcatcatcgacaccat

SEQ ID NO: 5446064 - DNA, 25 bp, Homo sapien
cttctaaaggtcttctctgctcttc

SEQ ID NO: 5446065 - DNA, 25 bp, Homo sapien
tgactccttctaaaggtcttctctg

SEQ ID NO: 5446066 - DNA, 25 bp, Homo sapien
tacaccaataagcttgactccttct

SEQ ID NO: 5446067 - DNA, 25 bp, Homo sapien
tccttctaaaggtcttctctgctct

SEQ ID NO: 5446068 - DNA, 25 bp, Homo sapien
tctccccatagctccatttgtttga

SEQ ID NO: 5446069 - DNA, 25 bp, Homo sapien
tttaatagtgaaggcatccaggtgc

SEQ ID NO: 5446070 - DNA, 25 bp, Homo sapien
ttgattagcattacgatactgtgac

SEQ ID NO: 5446071 - DNA, 25 bp, Homo sapien
tagcatggagatgatatgaacacag

SEQ ID NO: 5446072 - DNA, 25 bp, Homo sapien
ctcttgtctcttcccttactcttgt

SEQ ID NO: 5446073 - DNA, 25 bp, Homo sapien
tgcagtctcattgaaaaccagccac

SEQ ID NO: 5446074 - DNA, 25 bp, Homo sapien
ttgtctcttcccttactcttgtcac

SEQ ID NO: 5446075 - DNA, 25 bp, Homo sapien
gaaaaccagccacattcttctctga

SEQ ID NO: 5446076 - DNA, 25 bp, Homo sapien
actagggctgtgacagatgatgtga

SEQ ID NO: 5446077 - DNA, 25 bp, Homo sapien
tggaggacaatgactagggctgtga

SEQ ID NO: 5446078 - DNA, 25 bp, Homo sapien
tgtggaggacaatgactagggctgt

SEQ ID NO: 5446079 - DNA, 25 bp, Homo sapien
ggaggacaatgactagggctgtgac

SEQ ID NO: 5446080 - DNA, 25 bp, Homo sapien
tgtcactgatgcatattaatgacat

SEQ ID NO: 5446081 - DNA, 25 bp, Homo sapien
ttctgtggtttcattgtcactgatg

SEQ ID NO: 5446082 - DNA, 25 bp, Homo sapien
cctgttcactaggtttttctgtggt

SEQ ID NO: 5446083 - DNA, 25 bp, Homo sapien
ggtttcattgtcactgatgcatatt

SEQ ID NO: 5446084 - DNA, 25 bp, Homo sapien
ttattgctgtctctgtgcgagactg

SEQ ID NO: 5446085 - DNA, 25 bp, Homo sapien
aattaatttatcatcgctgttgtgt

SEQ ID NO: 5446086 - DNA, 25 bp, Homo sapien
ccttctaaacattggatccatgtca

SEQ ID NO: 5446087 - DNA, 25 bp, Homo sapien
cccttttgccttctaaacattggat

SEQ ID NO: 5446088 - DNA, 25 bp, Homo sapien
tgagctttgggcatgctgatttagc

SEQ ID NO: 5446089 - DNA, 25 bp, Homo sapien
gtgagctttgggcatgctgatttag

SEQ ID NO: 5446090 - DNA, 25 bp, Homo sapien
ggtgagctttgggcatgctgattta

SEQ ID NO: 5446091 - DNA, 25 bp, Homo sapien
gagctttgggcatgctgatttagca

SEQ ID NO: 5446092 - DNA, 25 bp, Homo sapien
tcaccatgccagttgttggacaaag

SEQ ID NO: 5446093 - DNA, 25 bp, Homo sapien
tcttccgacatgttatttcatgttc

SEQ ID NO: 5446094 - DNA, 25 bp, Homo sapien
tagtcaccatgccagttgttggaca

SEQ ID NO: 5446095 - DNA, 25 bp, Homo sapien
tgccagttgttggacaaagaactct

SEQ ID NO: 5446096 - DNA, 25 bp, Homo sapien
atacattagtcttgtaaagaaatgt

SEQ ID NO: 5446097 - DNA, 25 bp, Homo sapien
cattagtcttgtaaagaaatgtgca

SEQ ID NO: 5446098 - DNA, 25 bp, Homo sapien
taaagtggtcctctgaaatgaggca

SEQ ID NO: 5446099 - DNA, 25 bp, Homo sapien
acattagtcttgtaaagaaatgtgc

SEQ ID NO: 5446100 - DNA, 25 bp, Homo sapien
gctgcaagctggtagcttcccctgg

SEQ ID NO: 5446101 - DNA, 25 bp, Homo sapien
atccatcaagctgcaagctggtagc

SEQ ID NO: 5446102 - DNA, 25 bp, Homo sapien
tcaagctgcaagctggtagcttccc

SEQ ID NO: 5446103 - DNA, 25 bp, Homo sapien
gatgtgccctttggtaaatagcaat

SEQ ID NO: 5446104 - DNA, 25 bp, Homo sapien
tcaaaacttgtgttataggctacca

SEQ ID NO: 5446105 - DNA, 25 bp, Homo sapien
gccacccccaggacatatgaagctg

SEQ ID NO: 5446106 - DNA, 25 bp, Homo sapien
aaaacttgtgttataggctaccagg

SEQ ID NO: 5446107 - DNA, 25 bp, Homo sapien
acccccaggacatatgaagctgtca

SEQ ID NO: 5446108 - DNA, 25 bp, Homo sapien
cctggtgcagataattatggcagac

SEQ ID NO: 5446109 - DNA, 25 bp, Homo sapien
tactgttgacatataggtagggaca

SEQ ID NO: 5446110 - DNA, 25 bp, Homo sapien
aaggaccctcgtgctatgtgacaag

SEQ ID NO: 5446111 - DNA, 25 bp, Homo sapien
caaagtgaagatacccatatggcag

SEQ ID NO: 5446112 - DNA, 25 bp, Homo sapien
tttggtctccacccattctgttttc

SEQ ID NO: 5446113 - DNA, 25 bp, Homo sapien
gcagtagaggcagtattgatggcac

SEQ ID NO: 5446114 - DNA, 25 bp, Homo sapien
agaggcagtattgatggcacttctg

SEQ ID NO: 5446115 - DNA, 25 bp, Homo sapien
gctgtcctgtctggtccaccctgaa

SEQ ID NO: 5446116 - DNA, 25 bp, Homo sapien
tgcagtttgcaattcaggaatcttg

SEQ ID NO: 5446117 - DNA, 25 bp, Homo sapien
ttaacatgtctattacaaaatgcct

SEQ ID NO: 5446118 - DNA, 25 bp, Homo sapien
tacatattcatctttgtggccatga

SEQ ID NO: 5446119 - DNA, 25 bp, Homo sapien
tctgttctctaaatacaagtactgc

SEQ ID NO: 5446120 - DNA, 25 bp, Homo sapien
cgctactccccggacacgatctgca

SEQ ID NO: 5446121 - DNA, 25 bp, Homo sapien
ccatgactaccaacaatgtccgcta

SEQ ID NO: 5446122 - DNA, 25 bp, Homo sapien
actccccggacacgatctgcaagga

SEQ ID NO: 5446123 - DNA, 25 bp, Homo sapien
aatgtccgctactccccggacacga

SEQ ID NO: 5446124 - DNA, 25 bp, Homo sapien
taactcggcatatggttcacaagaa

SEQ ID NO: 5446125 - DNA, 25 bp, Homo sapien
ggcatatggttcacaagaattttct

SEQ ID NO: 5446126 - DNA, 25 bp, Homo sapien
ccttaactcggcatatggttcacaa

SEQ ID NO: 5446127 - DNA, 25 bp, Homo sapien
actcggcatatggttcacaagaatt

SEQ ID NO: 5446128 - DNA, 25 bp, Homo sapien
ccatttttgcattgcatgtgtgaga

SEQ ID NO: 5446129 - DNA, 25 bp, Homo sapien
agtagcaggaaatggagcggccctg

SEQ ID NO: 5446130 - DNA, 25 bp, Homo sapien
ccagatgtcatggttaggaggagaa

SEQ ID NO: 5446131 - DNA, 25 bp, Homo sapien
tgcatgtgtgagactggaatcccca

SEQ ID NO: 5446132 - DNA, 25 bp, Homo sapien
tgtgttgcatatctccctcagagca

SEQ ID NO: 5446133 - DNA, 25 bp, Homo sapien
atgtgttgcatatctccctcagagc

SEQ ID NO: 5446134 - DNA, 25 bp, Homo sapien
ttgaggtatttttcattaccaggag

SEQ ID NO: 5446135 - DNA, 25 bp, Homo sapien
tgaggtatttttcattaccaggaga

SEQ ID NO: 5446136 - DNA, 25 bp, Homo sapien
tgacaggcaccgtcagctgaagctg

SEQ ID NO: 5446137 - DNA, 25 bp, Homo sapien
caatagctttactgggagactctga

SEQ ID NO: 5446138 - DNA, 25 bp, Homo sapien
gagactctgacccagtgtgacaggc

SEQ ID NO: 5446139 - DNA, 25 bp, Homo sapien
tgaagctgcaccgtccagaatacct

SEQ ID NO: 5446140 - DNA, 25 bp, Homo sapien
ctgggctttgtaatgaagctttgat

SEQ ID NO: 5446141 - DNA, 25 bp, Homo sapien
gatttgcatcgctattctgagaact

SEQ ID NO: 5446142 - DNA, 25 bp, Homo sapien
cataaaacgttcttgcaataatgct

SEQ ID NO: 5446143 - DNA, 25 bp, Homo sapien
aatgctattgcactgggctttgtaa

SEQ ID NO: 5446144 - DNA, 25 bp, Homo sapien
ctaatttgctttctacggtgctctt

SEQ ID NO: 5446145 - DNA, 25 bp, Homo sapien
cgtctgagacttccccacgcaggca

SEQ ID NO: 5446146 - DNA, 25 bp, Homo sapien
ggtccggtgacagtttcccgtctga

SEQ ID NO: 5446147 - DNA, 25 bp, Homo sapien
ggtgctcttttgttcgtctgtcttc

SEQ ID NO: 5446148 - DNA, 25 bp, Homo sapien
ctagaccgtttctgcactccacctg

SEQ ID NO: 5446149 - DNA, 25 bp, Homo sapien
cccaacagttacactgaagttgatt

SEQ ID NO: 5446150 - DNA, 25 bp, Homo sapien
tccacctgaggccaccactcccaac

SEQ ID NO: 5446151 - DNA, 25 bp, Homo sapien
actcccaacagttacactgaagttg

SEQ ID NO: 5446152 - DNA, 25 bp, Homo sapien
ctcattcccttcatgaggaacctgc

SEQ ID NO: 5446153 - DNA, 25 bp, Homo sapien
attcccttcatgaggaacctgccca

SEQ ID NO: 5446154 - DNA, 25 bp, Homo sapien
tctcattcccttcatgaggaacctg

SEQ ID NO: 5446155 - DNA, 25 bp, Homo sapien
tcattcccttcatgaggaacctgcc

SEQ ID NO: 5446156 - DNA, 25 bp, Homo sapien
ccatgtaatactcagatcattaaat

SEQ ID NO: 5446157 - DNA, 25 bp, Homo sapien
tctttccatgtaatactcagatcat

SEQ ID NO: 5446158 - DNA, 25 bp, Homo sapien
ctttagcgtaatctttccatgtaat

SEQ ID NO: 5446159 - DNA, 25 bp, Homo sapien
tttccatgtaatactcagatcatta

SEQ ID NO: 5446160 - DNA, 25 bp, Homo sapien
tgtgatcgctttcacagagaggaga

SEQ ID NO: 5446161 - DNA, 25 bp, Homo sapien
gttttcaacaccatctggcacatgg

SEQ ID NO: 5446162 - DNA, 25 bp, Homo sapien
taataattgtacgtggcagcaatgc

SEQ ID NO: 5446163 - DNA, 25 bp, Homo sapien
gcaatgctgcttagacaggtcccca

SEQ ID NO: 5446164 - DNA, 25 bp, Homo sapien
gtgtgttcagtctgcggcacttaga

SEQ ID NO: 5446165 - DNA, 25 bp, Homo sapien
taactagcggcactaaaaagggctg

SEQ ID NO: 5446166 - DNA, 25 bp, Homo sapien
tttaggtcgggcaagagtgtgttca

SEQ ID NO: 5446167 - DNA, 25 bp, Homo sapien
gctgtgattcaggtattaatgccga

SEQ ID NO: 5446168 - DNA, 25 bp, Homo sapien
tctccatcccaaacatatcctccaa

SEQ ID NO: 5446169 - DNA, 25 bp, Homo sapien
ctccatcccaaacatatcctccaaa

SEQ ID NO: 5446170 - DNA, 25 bp, Homo sapien
catcccaaacatatcctccaaatga

SEQ ID NO: 5446171 - DNA, 25 bp, Homo sapien
ccatcccaaacatatcctccaaatg

SEQ ID NO: 5446172 - DNA, 25 bp, Homo sapien
tagacacttgggaactgacttcact

SEQ ID NO: 5446173 - DNA, 25 bp, Homo sapien
tctcctatgaggacgtggcttgact

SEQ ID NO: 5446174 - DNA, 25 bp, Homo sapien
tgaggacatagtcaccagcagctac

SEQ ID NO: 5446175 - DNA, 25 bp, Homo sapien
cagcagctacatacccaatcaggga

SEQ ID NO: 5446176 - DNA, 25 bp, Homo sapien
ataacttgagagtggatgaacacca

SEQ ID NO: 5446177 - DNA, 25 bp, Homo sapien
agataacttgagagtggatgaacac

SEQ ID NO: 5446178 - DNA, 25 bp, Homo sapien
ctgaaagataacttgagagtggatg

SEQ ID NO: 5446179 - DNA, 25 bp, Homo sapien
aaagataacttgagagtggatgaac

SEQ ID NO: 5446180 - DNA, 25 bp, Homo sapien
ctctcttcaccccagggttcttttg

SEQ ID NO: 5446181 - DNA, 25 bp, Homo sapien
tctcttcaccccagggttcttttga

SEQ ID NO: 5446182 - DNA, 25 bp, Homo sapien
tcatgcactctcttcaccccagggt

SEQ ID NO: 5446183 - DNA, 25 bp, Homo sapien
gcactctcttcaccccagggttctt

SEQ ID NO: 5446184 - DNA, 25 bp, Homo sapien
tccagtaggtatcctgctgcttgta

SEQ ID NO: 5446185 - DNA, 25 bp, Homo sapien
tgctggtgaggagaagcagtgaccc

SEQ ID NO: 5446186 - DNA, 25 bp, Homo sapien
cagagtctgaaactggttgttccag

SEQ ID NO: 5446187 - DNA, 25 bp, Homo sapien
gctgatacccagccaagcgcttcac

SEQ ID NO: 5446188 - DNA, 25 bp, Homo sapien
cattgaccaaaagtgcttataacca

SEQ ID NO: 5446189 - DNA, 25 bp, Homo sapien
gagtggtgtacattttcaagctccc

SEQ ID NO: 5446190 - DNA, 25 bp, Homo sapien
taggtaatcttcgataacatagcca

SEQ ID NO: 5446191 - DNA, 25 bp, Homo sapien
tcaagctcccaatatcacgaaaatg

SEQ ID NO: 5446192 - DNA, 25 bp, Homo sapien
tcttgattgtaacctggtgttcttg

SEQ ID NO: 5446193 - DNA, 25 bp, Homo sapien
tgattgtaacctggtgttcttggct

SEQ ID NO: 5446194 - DNA, 25 bp, Homo sapien
cttttcttgattgtaacctggtgtt

SEQ ID NO: 5446195 - DNA, 25 bp, Homo sapien
ttttcttgattgtaacctggtgttc

SEQ ID NO: 5446196 - DNA, 25 bp, Homo sapien
tctcaaacttgcaatggaacagaac

SEQ ID NO: 5446197 - DNA, 25 bp, Homo sapien
gatgtgtattagaaggatggctcta

SEQ ID NO: 5446198 - DNA, 25 bp, Homo sapien
aacattctgagtgaccaaatcatat

SEQ ID NO: 5446199 - DNA, 25 bp, Homo sapien
tgggtactgatgtgtattagaagga

SEQ ID NO: 5446200 - DNA, 25 bp, Homo sapien
tactgatgtgtattagaaggatggc

SEQ ID NO: 5446201 - DNA, 25 bp, Homo sapien
gttttccaaagaggagagatggatg

SEQ ID NO: 5446202 - DNA, 25 bp, Homo sapien
tgttttccaaagaggagagatggat

SEQ ID NO: 5446203 - DNA, 25 bp, Homo sapien
caatattggaactacatcaatgaac

SEQ ID NO: 5446204 - DNA, 25 bp, Homo sapien
gcaatattggaactacatcaatgaa

SEQ ID NO: 5446205 - DNA, 25 bp, Homo sapien
ggcaatattggaactacatcaatga

SEQ ID NO: 5446206 - DNA, 25 bp, Homo sapien
aggcaatattggaactacatcaatg

SEQ ID NO: 5446207 - DNA, 25 bp, Homo sapien
actgtcttcctccacattggggaga

SEQ ID NO: 5446208 - DNA, 25 bp, Homo sapien
tgtcttcctccacattggggagaca

SEQ ID NO: 5446209 - DNA, 25 bp, Homo sapien
gtcttcctccacattggggagacat

SEQ ID NO: 5446210 - DNA, 25 bp, Homo sapien
ctgtcttcctccacattggggagac

SEQ ID NO: 5446211 - DNA, 25 bp, Homo sapien
gtatttgcctggcagtttctcttga

SEQ ID NO: 5446212 - DNA, 25 bp, Homo sapien
tgcatgcgtgcttgattttagagaa

SEQ ID NO: 5446213 - DNA, 25 bp, Homo sapien
attttagagaaagccgtgaagttca

SEQ ID NO: 5446214 - DNA, 25 bp, Homo sapien
ccttttgcagaacactctcagtatt

SEQ ID NO: 5446215 - DNA, 25 bp, Homo sapien
catgaagaaaatgatcatgtctcac

SEQ ID NO: 5446216 - DNA, 25 bp, Homo sapien
gagacaatacttaaggaagttcttg

SEQ ID NO: 5446217 - DNA, 25 bp, Homo sapien
catagggttgccgaggaagtggttt

SEQ ID NO: 5446218 - DNA, 25 bp, Homo sapien
gttcttgagcttatgaaagagtttc

SEQ ID NO: 5446219 - DNA, 25 bp, Homo sapien
gcttatgaaagagtttcagggcatc

SEQ ID NO: 5446220 - DNA, 25 bp, Homo sapien
gccgccatagacaaggaggctgctc

SEQ ID NO: 5446221 - DNA, 25 bp, Homo sapien
ctccggagagcagtggagaagcatt

SEQ ID NO: 5446222 - DNA, 25 bp, Homo sapien
atgggtgccatgcttctccggagag

SEQ ID NO: 5446223 - DNA, 25 bp, Homo sapien
gaagcgctttgagcctggagatgac

SEQ ID NO: 5446224 - DNA, 25 bp, Homo sapien
tatttggtagattctctggtcgttc

SEQ ID NO: 5446225 - DNA, 25 bp, Homo sapien
ttctatttggtagattctctggtcg

SEQ ID NO: 5446226 - DNA, 25 bp, Homo sapien
ttcattaggcagcataatttgacgt

SEQ ID NO: 5446227 - DNA, 25 bp, Homo sapien
gacgttgagtatcgtttctatttgg

SEQ ID NO: 5446228 - DNA, 25 bp, Homo sapien
cacggcctttatctaagacatgtct

SEQ ID NO: 5446229 - DNA, 25 bp, Homo sapien
aaacacggcctttatctaagacatg

SEQ ID NO: 5446230 - DNA, 25 bp, Homo sapien
tctttggcctgctgtcaacttccag

SEQ ID NO: 5446231 - DNA, 25 bp, Homo sapien
aagacatgtctttggcctgctgtca

SEQ ID NO: 5446232 - DNA, 25 bp, Homo sapien
ggtgtaacctgagagagaatctcca

SEQ ID NO: 5446233 - DNA, 25 bp, Homo sapien
ggtgaggaaggattgccaacaagct

SEQ ID NO: 5446234 - DNA, 25 bp, Homo sapien
tgtccacagccactaagcaagtagg

SEQ ID NO: 5446235 - DNA, 25 bp, Homo sapien
tgatgtgcaacagccagagtagggt

SEQ ID NO: 5446236 - DNA, 25 bp, Homo sapien
tgtaaagagctatttcgtgccaagt

SEQ ID NO: 5446237 - DNA, 25 bp, Homo sapien
ttttatactatccaagaccaacagg

SEQ ID NO: 5446238 - DNA, 25 bp, Homo sapien
tcagatccaatcaaaggcccaggta

SEQ ID NO: 5446239 - DNA, 25 bp, Homo sapien
aaatggttgatccttcggagctcag

SEQ ID NO: 5446240 - DNA, 25 bp, Homo sapien
aaatagaaactggcgatacagaaaa

SEQ ID NO: 5446241 - DNA, 25 bp, Homo sapien
atagaaactggcgatacagaaaagg

SEQ ID NO: 5446242 - DNA, 25 bp, Homo sapien
agaaactggcgatacagaaaaggtc

SEQ ID NO: 5446243 - DNA, 25 bp, Homo sapien
tagaaactggcgatacagaaaaggt

SEQ ID NO: 5446244 - DNA, 25 bp, Homo sapien
acacaaaggctctggccgcccccct

SEQ ID NO: 5446245 - DNA, 25 bp, Homo sapien
ttaacacaaaggctctggccgcccc

SEQ ID NO: 5446246 - DNA, 25 bp, Homo sapien
taacacaaaggctctggccgccccc

SEQ ID NO: 5446247 - DNA, 25 bp, Homo sapien
cacaaaggctctggccgccccccta

SEQ ID NO: 5446248 - DNA, 25 bp, Homo sapien
gaggccatggaaccgatggaactga

SEQ ID NO: 5446249 - DNA, 25 bp, Homo sapien
catggaaccgatggaactgatggag

SEQ ID NO: 5446250 - DNA, 25 bp, Homo sapien
gaaccgatggaactgatggaggaaa

SEQ ID NO: 5446251 - DNA, 25 bp, Homo sapien
aaaggaggccatggaaccgatggaa

SEQ ID NO: 5446252 - DNA, 25 bp, Homo sapien
tggatcaccttgtggatggatgcaa

SEQ ID NO: 5446253 - DNA, 25 bp, Homo sapien
cttctgctccagagccagtcagttc

SEQ ID NO: 5446254 - DNA, 25 bp, Homo sapien
acttctgctccagagccagtcagtt

SEQ ID NO: 5446255 - DNA, 25 bp, Homo sapien
gcgctgctacatgtttttcgcaaat

SEQ ID NO: 5446256 - DNA, 25 bp, Homo sapien
agcgctgctacatgtttttcgcaaa

SEQ ID NO: 5446257 - DNA, 25 bp, Homo sapien
gctgctacatgtttttcgcaaataa

SEQ ID NO: 5446258 - DNA, 25 bp, Homo sapien
gctacatgtttttcgcaaataaaat

SEQ ID NO: 5446259 - DNA, 25 bp, Homo sapien
ttcctgtccgtagtcaaatgccttc

SEQ ID NO: 5446260 - DNA, 25 bp, Homo sapien
cttttcctgtccgtagtcaaatgcc

SEQ ID NO: 5446261 - DNA, 25 bp, Homo sapien
gtgccttttcctgtccgtagtcaaa

SEQ ID NO: 5446262 - DNA, 25 bp, Homo sapien
cctgtccgtagtcaaatgccttcat

SEQ ID NO: 5446263 - DNA, 25 bp, Homo sapien
cagtcatgtaagactgttaccatag

SEQ ID NO: 5446264 - DNA, 25 bp, Homo sapien
agtcatgtaagactgttaccataga

SEQ ID NO: 5446265 - DNA, 25 bp, Homo sapien
actgttaccatagagtaagtggtga

SEQ ID NO: 5446266 - DNA, 25 bp, Homo sapien
taccatagagtaagtggtgagtttg

SEQ ID NO: 5446267 - DNA, 25 bp, Homo sapien
gtcagctgaaatggctacagcaaca

SEQ ID NO: 5446268 - DNA, 25 bp, Homo sapien
tgtcagctgaaatggctacagcaac

SEQ ID NO: 5446269 - DNA, 25 bp, Homo sapien
atgtcagctgaaatggctacagcaa

SEQ ID NO: 5446270 - DNA, 25 bp, Homo sapien
tcagctgaaatggctacagcaacac

SEQ ID NO: 5446271 - DNA, 25 bp, Homo sapien
gattttcaacaaaaacgatctcatc

SEQ ID NO: 5446272 - DNA, 25 bp, Homo sapien
tatgccagttttagggcttgttatt

SEQ ID NO: 5446273 - DNA, 25 bp, Homo sapien
gcttgttattgacttgcccctatag

SEQ ID NO: 5446274 - DNA, 25 bp, Homo sapien
ttttcaacaaaaacgatctcatcct

SEQ ID NO: 5446275 - DNA, 25 bp, Homo sapien
tgctgggctgctgattctcaataac

SEQ ID NO: 5446276 - DNA, 25 bp, Homo sapien
ctgctgggctgctgattctcaataa

SEQ ID NO: 5446277 - DNA, 25 bp, Homo sapien
gttccttcaggggcaattgggctgc

SEQ ID NO: 5446278 - DNA, 25 bp, Homo sapien
ttccttcaggggcaattgggctgct

SEQ ID NO: 5446279 - DNA, 25 bp, Homo sapien
tggtgacataaagaagtaaagttcc

SEQ ID NO: 5446280 - DNA, 25 bp, Homo sapien
attggtgacataaagaagtaaagtt

SEQ ID NO: 5446281 - DNA, 25 bp, Homo sapien
ttggtgacataaagaagtaaagttc

SEQ ID NO: 5446282 - DNA, 25 bp, Homo sapien
tattggtgacataaagaagtaaagt

SEQ ID NO: 5446283 - DNA, 25 bp, Homo sapien
aagtagtatagaaatgggcggctgc

SEQ ID NO: 5446284 - DNA, 25 bp, Homo sapien
aggagggagatttcagtggatatca

SEQ ID NO: 5446285 - DNA, 25 bp, Homo sapien
gatatcagattggttgtatctctga

SEQ ID NO: 5446286 - DNA, 25 bp, Homo sapien
ctctgattctctgggattcttccac

SEQ ID NO: 5446287 - DNA, 25 bp, Homo sapien
ttccacacatagctcattgtccaga

SEQ ID NO: 5446288 - DNA, 25 bp, Homo sapien
cagacggctttaacacatttccaca

SEQ ID NO: 5446289 - DNA, 25 bp, Homo sapien
acacatttccacacatagctcattg

SEQ ID NO: 5446290 - DNA, 25 bp, Homo sapien
agctaaggtcttcccccagacggct

SEQ ID NO: 5446291 - DNA, 25 bp, Homo sapien
cttttgtagtgagccagcagggcgc

SEQ ID NO: 5446292 - DNA, 25 bp, Homo sapien
ttccttttgtagtgagccagcaggg

SEQ ID NO: 5446293 - DNA, 25 bp, Homo sapien
tttgtagtgagccagcagggcgcct

SEQ ID NO: 5446294 - DNA, 25 bp, Homo sapien
ccttttgtagtgagccagcagggcg

SEQ ID NO: 5446295 - DNA, 25 bp, Homo sapien
tctcggcaacgttgggggatattta

SEQ ID NO: 5446296 - DNA, 25 bp, Homo sapien
aagctccaaagtggcttgcagcgct

SEQ ID NO: 5446297 - DNA, 25 bp, Homo sapien
tatcagccgacatttacacagaaac

SEQ ID NO: 5446298 - DNA, 25 bp, Homo sapien
gcttgcagcgctttatcagccgaca

SEQ ID NO: 5446299 - DNA, 25 bp, Homo sapien
aagaattgccgaaataagtggtcat

SEQ ID NO: 5446300 - DNA, 25 bp, Homo sapien
aaagaattgccgaaataagtggtca

SEQ ID NO: 5446301 - DNA, 25 bp, Homo sapien
aactttctgtaaggttggctgtcat

SEQ ID NO: 5446302 - DNA, 25 bp, Homo sapien
aaactttctgtaaggttggctgtca

SEQ ID NO: 5446303 - DNA, 25 bp, Homo sapien
gatctgaaaggtggtgtttgatttt

SEQ ID NO: 5446304 - DNA, 25 bp, Homo sapien
tggatcctttagacatttagcacct

SEQ ID NO: 5446305 - DNA, 25 bp, Homo sapien
ctgaaaggtggtgtttgattttatc

SEQ ID NO: 5446306 - DNA, 25 bp, Homo sapien
ggtcctggatcctttagacatttag

SEQ ID NO: 5446307 - DNA, 25 bp, Homo sapien
ttgatcccataacagctgttacagg

SEQ ID NO: 5446308 - DNA, 25 bp, Homo sapien
taaatgtaatgtggccgcagcctgt

SEQ ID NO: 5446309 - DNA, 25 bp, Homo sapien
tacaggtctcatgtacaataaatgt

SEQ ID NO: 5446310 - DNA, 25 bp, Homo sapien
cagctgttacaggtctcatgtacaa

SEQ ID NO: 5446311 - DNA, 25 bp, Homo sapien
ctttaacttgagctgctgtctgttc

SEQ ID NO: 5446312 - DNA, 25 bp, Homo sapien
tctttaacttgagctgctgtctgtt

SEQ ID NO: 5446313 - DNA, 25 bp, Homo sapien
ttcttggtattagaaaaagccacat

SEQ ID NO: 5446314 - DNA, 25 bp, Homo sapien
ttctttaacttgagctgctgtctgt

SEQ ID NO: 5446315 - DNA, 25 bp, Homo sapien
catttttgtgttctcctcagtacct

SEQ ID NO: 5446316 - DNA, 25 bp, Homo sapien
tatcctctcacatatatggcctcat

SEQ ID NO: 5446317 - DNA, 25 bp, Homo sapien
tctcatatcctctcacatatatggc

SEQ ID NO: 5446318 - DNA, 25 bp, Homo sapien
agtacctccgcctttgccacatttt

SEQ ID NO: 5446319 - DNA, 25 bp, Homo sapien
ggaaaggtttagcaattctatgctg

SEQ ID NO: 5446320 - DNA, 25 bp, Homo sapien
cttggcatcccacaatgaagctaat

SEQ ID NO: 5446321 - DNA, 25 bp, Homo sapien
cacaatgaagctaatggaaaggttt

SEQ ID NO: 5446322 - DNA, 25 bp, Homo sapien
aggtttagcaattctatgctgttgc

SEQ ID NO: 5446323 - DNA, 25 bp, Homo sapien
aactcttgcaaggtaactgcagcct

SEQ ID NO: 5446324 - DNA, 25 bp, Homo sapien
gaactcttgcaaggtaactgcagcc

SEQ ID NO: 5446325 - DNA, 25 bp, Homo sapien
actcttgcaaggtaactgcagcctc

SEQ ID NO: 5446326 - DNA, 25 bp, Homo sapien
gctagccttggcttgcaacaacagc

SEQ ID NO: 5446327 - DNA, 25 bp, Homo sapien
cagcagggcataggctgaggcaact

SEQ ID NO: 5446328 - DNA, 25 bp, Homo sapien
agtctccttgcttgggttaacccag

SEQ ID NO: 5446329 - DNA, 25 bp, Homo sapien
aatgggtgttggactcttgctagcc

SEQ ID NO: 5446330 - DNA, 25 bp, Homo sapien
caccaagaggcaagagatatatgtt

SEQ ID NO: 5446331 - DNA, 25 bp, Homo sapien
gtgttgcactgaagtgccatgagct

SEQ ID NO: 5446332 - DNA, 25 bp, Homo sapien
taaacgtggctgttccaacatgttg

SEQ ID NO: 5446333 - DNA, 25 bp, Homo sapien
gtagtaggaagagctttggcaccaa

SEQ ID NO: 5446334 - DNA, 25 bp, Homo sapien
caagagatggtcagatcttctttct

SEQ ID NO: 5446335 - DNA, 25 bp, Homo sapien
caacatttatgcgacttggcttgaa

SEQ ID NO: 5446336 - DNA, 25 bp, Homo sapien
gtctgtacttaaaatgagcaactcc

SEQ ID NO: 5446337 - DNA, 25 bp, Homo sapien
catgagttcccttttcatctgcaag

SEQ ID NO: 5446338 - DNA, 25 bp, Homo sapien
tcacttgatagagtgcagacttccc

SEQ ID NO: 5446339 - DNA, 25 bp, Homo sapien
caagccaacaccaagcagccagtgg

SEQ ID NO: 5446340 - DNA, 25 bp, Homo sapien
tctataacctgtagtgtaaacacac

SEQ ID NO: 5446341 - DNA, 25 bp, Homo sapien
tgggttttggctgacataaggcctc

SEQ ID NO: 5446342 - DNA, 25 bp, Homo sapien
gattcaaggtactcaatcttattgc

SEQ ID NO: 5446343 - DNA, 25 bp, Homo sapien
gaaaccatctccttggtttgcacat

SEQ ID NO: 5446344 - DNA, 25 bp, Homo sapien
gagcctctcaggtatatgtaggatt

SEQ ID NO: 5446345 - DNA, 25 bp, Homo sapien
tgtgtggagactttgaagagcctct

SEQ ID NO: 5446346 - DNA, 25 bp, Homo sapien
tctctatatgattttaactctagaa

SEQ ID NO: 5446347 - DNA, 25 bp, Homo sapien
caggagatccaacacaggagccact

SEQ ID NO: 5446348 - DNA, 25 bp, Homo sapien
catttccggtgatgttttctgattc

SEQ ID NO: 5446349 - DNA, 25 bp, Homo sapien
gaaattggaggcagttatttcattt

SEQ ID NO: 5446350 - DNA, 25 bp, Homo sapien
agcctgtgccaccacttgggagtaa

SEQ ID NO: 5446351 - DNA, 25 bp, Homo sapien
caaagcaataggttttctctaaaca

SEQ ID NO: 5446352 - DNA, 25 bp, Homo sapien
ctttaactcgttactgtgtccagcc

SEQ ID NO: 5446353 - DNA, 25 bp, Homo sapien
gtctagactaacatcctttgggaat

SEQ ID NO: 5446354 - DNA, 25 bp, Homo sapien
gatctccataaccatttgtcaacat

SEQ ID NO: 5446355 - DNA, 25 bp, Homo sapien
ggatctccataaccatttgtcaaca

SEQ ID NO: 5446356 - DNA, 25 bp, Homo sapien
tcgaaatcaagcacaggaagccatc

SEQ ID NO: 5446357 - DNA, 25 bp, Homo sapien
aagccatcagcaacagctaaaacat

SEQ ID NO: 5446358 - DNA, 25 bp, Homo sapien
taactctcattatgctgtagccctg

SEQ ID NO: 5446359 - DNA, 25 bp, Homo sapien
cactggagggcggtattaaaatgct

SEQ ID NO: 5446360 - DNA, 25 bp, Homo sapien
tccataggttttccaagactgttcc

SEQ ID NO: 5446361 - DNA, 25 bp, Homo sapien
atccataggttttccaagactgttc

SEQ ID NO: 5446362 - DNA, 25 bp, Homo sapien
cacagcatggcacccatatcctgga

SEQ ID NO: 5446363 - DNA, 25 bp, Homo sapien
caggataatatgcaatgtgtacctc

SEQ ID NO: 5446364 - DNA, 25 bp, Homo sapien
atgtgtacctctcgaggaaggcagg

SEQ ID NO: 5446365 - DNA, 25 bp, Homo sapien
gaccagttcaggataatatgcaatg

SEQ ID NO: 5446366 - DNA, 25 bp, Homo sapien
gactgtgatattgtcctgaatgttt

SEQ ID NO: 5446367 - DNA, 25 bp, Homo sapien
gaaacttgttctgtatggggcctac

SEQ ID NO: 5446368 - DNA, 25 bp, Homo sapien
tgtgtttattgactggccactgtgc

SEQ ID NO: 5446369 - DNA, 25 bp, Homo sapien
tggtctgtagaacaaagcagcttgt

SEQ ID NO: 5446370 - DNA, 25 bp, Homo sapien
taatcgttgtcaatgtcaagtatta

SEQ ID NO: 5446371 - DNA, 25 bp, Homo sapien
ctgacacttgtctcatccaatgata

SEQ ID NO: 5446372 - DNA, 25 bp, Homo sapien
ctttgttctccagtactgttcttat

SEQ ID NO: 5446373 - DNA, 25 bp, Homo sapien
aagtattaccctgacacttgtctca

SEQ ID NO: 5446374 - DNA, 25 bp, Homo sapien
caagtactgcatgcaactgagagtg

SEQ ID NO: 5446375 - DNA, 25 bp, Homo sapien
taggacatgcagtttgatagcagca

SEQ ID NO: 5446376 - DNA, 25 bp, Homo sapien
gatccttgagcagcgatgatgtctg

SEQ ID NO: 5446377 - DNA, 25 bp, Homo sapien
ataaaatccggaatcactgccatgg

SEQ ID NO: 5446378 - DNA, 25 bp, Homo sapien
taagtaaaatcattactgagcagtc

SEQ ID NO: 5446379 - DNA, 25 bp, Homo sapien
ataagtaaaatcattactgagcagt

SEQ ID NO: 5446380 - DNA, 25 bp, Homo sapien
tgagcaatggttgttctcaaaggct

SEQ ID NO: 5446381 - DNA, 25 bp, Homo sapien
agcaatggttgttctcaaaggctcc

SEQ ID NO: 5446382 - DNA, 25 bp, Homo sapien
acatgagcaatggttgttctcaaag

SEQ ID NO: 5446383 - DNA, 25 bp, Homo sapien
aatttgaaacacatgagcaatggtt

SEQ ID NO: 5446384 - DNA, 25 bp, Homo sapien
cattgagctgtttttccgggagaag

SEQ ID NO: 5446385 - DNA, 25 bp, Homo sapien
ggcaagtgcccttttgaccactggc

SEQ ID NO: 5446386 - DNA, 25 bp, Homo sapien
tactgttaatccacatatggtcaac

SEQ ID NO: 5446387 - DNA, 25 bp, Homo sapien
gaagtgatggattcatgctgctcca

SEQ ID NO: 5446388 - DNA, 25 bp, Homo sapien
aggccaagttgagcggagactttgc

SEQ ID NO: 5446389 - DNA, 25 bp, Homo sapien
gctgaattggatcctgttatgatga

SEQ ID NO: 5446390 - DNA, 25 bp, Homo sapien
ttgagcggagactttgcccagctgg

SEQ ID NO: 5446391 - DNA, 25 bp, Homo sapien
tcctgttatgatgaaggaggccaag

SEQ ID NO: 5446392 - DNA, 25 bp, Homo sapien
caagcatagtgagcttggcatgaga

SEQ ID NO: 5446393 - DNA, 25 bp, Homo sapien
tattgatcgccggttggaagttgct

SEQ ID NO: 5446394 - DNA, 25 bp, Homo sapien
agttgctcctcaagcatagtgagct

SEQ ID NO: 5446395 - DNA, 25 bp, Homo sapien
tcgccggttggaagttgctcctcaa

SEQ ID NO: 5446396 - DNA, 25 bp, Homo sapien
ttcctggtagtcatcttgtgcccta

SEQ ID NO: 5446397 - DNA, 25 bp, Homo sapien
gcatatggtcgtctataaaagcctc

SEQ ID NO: 5446398 - DNA, 25 bp, Homo sapien
tatgtgcaagtagcatatggtcgtc

SEQ ID NO: 5446399 - DNA, 25 bp, Homo sapien
ggccatggtagaacctttctcctcg

SEQ ID NO: 5446400 - DNA, 25 bp, Homo sapien
tccctgtcctaggtatagtcatggt

SEQ ID NO: 5446401 - DNA, 25 bp, Homo sapien
ctttgaactagatggaaacctcagg

SEQ ID NO: 5446402 - DNA, 25 bp, Homo sapien
gaagggtctgtgtttatccctgtcc

SEQ ID NO: 5446403 - DNA, 25 bp, Homo sapien
gtcatggttctatacttaaggtggt

SEQ ID NO: 5446404 - DNA, 25 bp, Homo sapien
caggtcagaatattgttggtgctgt

SEQ ID NO: 5446405 - DNA, 25 bp, Homo sapien
tcctcatatcggtgagatttgtgag

SEQ ID NO: 5446406 - DNA, 25 bp, Homo sapien
tatcggtgagatttgtgagaaatcc

SEQ ID NO: 5446407 - DNA, 25 bp, Homo sapien
tcatttcctcatatcggtgagattt

SEQ ID NO: 5446408 - DNA, 25 bp, Homo sapien
tttcacggtgagcatcaggtacttc

SEQ ID NO: 5446409 - DNA, 25 bp, Homo sapien
cttctcactgttgggtccagtgttc

SEQ ID NO: 5446410 - DNA, 25 bp, Homo sapien
atgggtagcactggttctcacgtct

SEQ ID NO: 5446411 - DNA, 25 bp, Homo sapien
tagcactggttctcacgtctctgca

SEQ ID NO: 5446412 - DNA, 25 bp, Homo sapien
tgttcagttgccctgaagtgtgcag

SEQ ID NO: 5446413 - DNA, 25 bp, Homo sapien
ttgagtcatacctcaactgtacaaa

SEQ ID NO: 5446414 - DNA, 25 bp, Homo sapien
cctcaactgtacaaatcctcctttg

SEQ ID NO: 5446415 - DNA, 25 bp, Homo sapien
tgatgttcagttgccctgaagtgtg

SEQ ID NO: 5446416 - DNA, 25 bp, Homo sapien
gccactttgttccatgagcattaag

SEQ ID NO: 5446417 - DNA, 25 bp, Homo sapien
tttgcctgtctgttcaacctcatca

SEQ ID NO: 5446418 - DNA, 25 bp, Homo sapien
tgtaaagcccatatgatctcagttt

SEQ ID NO: 5446419 - DNA, 25 bp, Homo sapien
aatccaaagatctgtccaagtcctg

SEQ ID NO: 5446420 - DNA, 25 bp, Homo sapien
tagaaagctcttacagctgtccaag

SEQ ID NO: 5446421 - DNA, 25 bp, Homo sapien
tccaagatattcctgccatggcaga

SEQ ID NO: 5446422 - DNA, 25 bp, Homo sapien
aaaatggcagctctaattaggttcc

SEQ ID NO: 5446423 - DNA, 25 bp, Homo sapien
gacaaaaggcccctggaagctacag

SEQ ID NO: 5446424 - DNA, 25 bp, Homo sapien
ttcatattttgccagtgaaagtcct

SEQ ID NO: 5446425 - DNA, 25 bp, Homo sapien
tattataaggatgcattttgaccat

SEQ ID NO: 5446426 - DNA, 25 bp, Homo sapien
tttgccagtgaaagtcctaatactg

SEQ ID NO: 5446427 - DNA, 25 bp, Homo sapien
tcctgtagtgagtatccattaagca

SEQ ID NO: 5446428 - DNA, 25 bp, Homo sapien
ccaaattccaacttctacaataata

SEQ ID NO: 5446429 - DNA, 25 bp, Homo sapien
caggatgtcgagtttagaataggtt

SEQ ID NO: 5446430 - DNA, 25 bp, Homo sapien
tgtgttggatcatggttaaaacccc

SEQ ID NO: 5446431 - DNA, 25 bp, Homo sapien
aaccacagccgtttgtgttggatca

SEQ ID NO: 5446432 - DNA, 25 bp, Homo sapien
ttttagcagtgcttaaatgttctaa

SEQ ID NO: 5446433 - DNA, 25 bp, Homo sapien
ttagcagtgcttaaatgttctaaaa

SEQ ID NO: 5446434 - DNA, 25 bp, Homo sapien
ttattttagcagtgcttaaatgttc

SEQ ID NO: 5446435 - DNA, 25 bp, Homo sapien
tagcagtgcttaaatgttctaaaat

SEQ ID NO: 5446436 - DNA, 25 bp, Homo sapien
atagagaaactataccaactgccac

SEQ ID NO: 5446437 - DNA, 25 bp, Homo sapien
catctggtagcatgaacgaaaaatc

SEQ ID NO: 5446438 - DNA, 25 bp, Homo sapien
tagcatgaacgaaaaatcataacag

SEQ ID NO: 5446439 - DNA, 25 bp, Homo sapien
ctggtctccatctggtagcatgaac

SEQ ID NO: 5446440 - DNA, 25 bp, Homo sapien
tgttcctttgtgatcatgccttggc

SEQ ID NO: 5446441 - DNA, 25 bp, Homo sapien
gcataactgtcttctgagtgttcct

SEQ ID NO: 5446442 - DNA, 25 bp, Homo sapien
cagaatctgcgaatgcgctggcata

SEQ ID NO: 5446443 - DNA, 25 bp, Homo sapien
gccttggcattcgaacatggataat

SEQ ID NO: 5446444 - DNA, 25 bp, Homo sapien
tatcgtgaaataggctctattcctg

SEQ ID NO: 5446445 - DNA, 25 bp, Homo sapien
tgtgtccccaggaatatcgtgaaat

SEQ ID NO: 5446446 - DNA, 25 bp, Homo sapien
tccccaggaatatcgtgaaataggc

SEQ ID NO: 5446447 - DNA, 25 bp, Homo sapien
caggaatatcgtgaaataggctcta

SEQ ID NO: 5446448 - DNA, 25 bp, Homo sapien
tgcacacaacctccgctttgaaggg

SEQ ID NO: 5446449 - DNA, 25 bp, Homo sapien
gcaggcagtaacagcatttgtgcac

SEQ ID NO: 5446450 - DNA, 25 bp, Homo sapien
catggttgatttttggcaggcagta

SEQ ID NO: 5446451 - DNA, 25 bp, Homo sapien
gatgcattgtcagtaaccaaggtgt

SEQ ID NO: 5446452 - DNA, 25 bp, Homo sapien
tgctgacctgctgaatgctaccttc

SEQ ID NO: 5446453 - DNA, 25 bp, Homo sapien
tagagtgtttgcaatttgttcgaag

SEQ ID NO: 5446454 - DNA, 25 bp, Homo sapien
cgaagtggttgaggatctcaggccc

SEQ ID NO: 5446455 - DNA, 25 bp, Homo sapien
taccttcccctcgagttgaatacac

SEQ ID NO: 5446456 - DNA, 25 bp, Homo sapien
cccctggaagagagtggcacattga

SEQ ID NO: 5446457 - DNA, 25 bp, Homo sapien
tgatgtttgccctcaagtcactaga

SEQ ID NO: 5446458 - DNA, 25 bp, Homo sapien
tccacttggctgcagatctgactgc

SEQ ID NO: 5446459 - DNA, 25 bp, Homo sapien
catgaaggccgtgaaatgatgtttg

SEQ ID NO: 5446460 - DNA, 25 bp, Homo sapien
tcgggttgtggcactctcacccttg

SEQ ID NO: 5446461 - DNA, 25 bp, Homo sapien
gccataataccgtttcctaacaata

SEQ ID NO: 5446462 - DNA, 25 bp, Homo sapien
tccccagaatccattatgccatcgg

SEQ ID NO: 5446463 - DNA, 25 bp, Homo sapien
aatcagtggatgaaatacaagctca

SEQ ID NO: 5446464 - DNA, 25 bp, Homo sapien
acaaaacctgttgtttgtaccatca

SEQ ID NO: 5446465 - DNA, 25 bp, Homo sapien
gaaagtgttctcctgttccatctgt

SEQ ID NO: 5446466 - DNA, 25 bp, Homo sapien
ggctgcttactactggaacctaaaa

SEQ ID NO: 5446467 - DNA, 25 bp, Homo sapien
ccatctgtagggctgcttactactg

SEQ ID NO: 5446468 - DNA, 25 bp, Homo sapien
gcaggtgaactgtcttgcaggtttg

SEQ ID NO: 5446469 - DNA, 25 bp, Homo sapien
ggctttgtcccataacatgaatctt

SEQ ID NO: 5446470 - DNA, 25 bp, Homo sapien
gcagcatttgcatatctgcaggtga

SEQ ID NO: 5446471 - DNA, 25 bp, Homo sapien
gagtatctgcaatatcaagctacag

SEQ ID NO: 5446472 - DNA, 25 bp, Homo sapien
tcaccccccaagccgtgggtggctg

SEQ ID NO: 5446473 - DNA, 25 bp, Homo sapien
ggattttcaccatctgcccataggc

SEQ ID NO: 5446474 - DNA, 25 bp, Homo sapien
cccttcttgctcccagctggatttt

SEQ ID NO: 5446475 - DNA, 25 bp, Homo sapien
tgcccataggcccttttcttactct

SEQ ID NO: 5446476 - DNA, 25 bp, Homo sapien
accctgctagtgccttcctgtattc

SEQ ID NO: 5446477 - DNA, 25 bp, Homo sapien
actgaattcctgataactgcgcaaa

SEQ ID NO: 5446478 - DNA, 25 bp, Homo sapien
ttcctgataactgcgcaaaccctgc

SEQ ID NO: 5446479 - DNA, 25 bp, Homo sapien
taactgcgcaaaccctgctagtgcc

SEQ ID NO: 5446480 - DNA, 25 bp, Homo sapien
agacaattcgttcagctggaaagaa

SEQ ID NO: 5446481 - DNA, 25 bp, Homo sapien
gagacaattcgttcagctggaaaga

SEQ ID NO: 5446482 - DNA, 25 bp, Homo sapien
tgagacaattcgttcagctggaaag

SEQ ID NO: 5446483 - DNA, 25 bp, Homo sapien
gacaattcgttcagctggaaagaat

SEQ ID NO: 5446484 - DNA, 25 bp, Homo sapien
tctggttctcccatcccaatggatg

SEQ ID NO: 5446485 - DNA, 25 bp, Homo sapien
tcccaatggatgtcaacaaggcttc

SEQ ID NO: 5446486 - DNA, 25 bp, Homo sapien
ttaaggatgatgtatcattgattcc

SEQ ID NO: 5446487 - DNA, 25 bp, Homo sapien
cctcagtgggatctccttggtctgg

SEQ ID NO: 5446488 - DNA, 25 bp, Homo sapien
gccacccaactcctcttgtaacgcc

SEQ ID NO: 5446489 - DNA, 25 bp, Homo sapien
ccacccaactcctcttgtaacgcca

SEQ ID NO: 5446490 - DNA, 25 bp, Homo sapien
cacccaactcctcttgtaacgccat

SEQ ID NO: 5446491 - DNA, 25 bp, Homo sapien
tattgttacgcttggctttcgggaa

SEQ ID NO: 5446492 - DNA, 25 bp, Homo sapien
ttagaaacctctgcataagacgttg

SEQ ID NO: 5446493 - DNA, 25 bp, Homo sapien
tgccgcgggatgtgtgtcagtttac

SEQ ID NO: 5446494 - DNA, 25 bp, Homo sapien
aagaaacctacgaacccagctctgg

SEQ ID NO: 5446495 - DNA, 25 bp, Homo sapien
tcctttggtgggtggtcagacttcc

SEQ ID NO: 5446496 - DNA, 25 bp, Homo sapien
tattctctccgtgtacttcctttgg

SEQ ID NO: 5446497 - DNA, 25 bp, Homo sapien
aaatagatgttatttgtcgtttcca

SEQ ID NO: 5446498 - DNA, 25 bp, Homo sapien
atcgcagggcctttgcggaaaaaga

SEQ ID NO: 5446499 - DNA, 25 bp, Homo sapien
cgggagatgggcgtcttagagaaga

SEQ ID NO: 5446500 - DNA, 25 bp, Homo sapien
gttcaaggtgaacccacaaacatca

SEQ ID NO: 5446501 - DNA, 25 bp, Homo sapien
gatcttcaagacaggtcagtgtggt

SEQ ID NO: 5446502 - DNA, 25 bp, Homo sapien
ggcaggcttctctctgcgctacgag

SEQ ID NO: 5446503 - DNA, 25 bp, Homo sapien
tatacgcatactaaactggtctcat

SEQ ID NO: 5446504 - DNA, 25 bp, Homo sapien
tgcagaggtcacaccttgtagggta

SEQ ID NO: 5446505 - DNA, 25 bp, Homo sapien
ttgaagaggcacaaactggaatccc

SEQ ID NO: 5446506 - DNA, 25 bp, Homo sapien
tctgaagcactaatcccagagagcc

SEQ ID NO: 5446507 - DNA, 25 bp, Homo sapien
cggcgagtggaagcacgggcggatc

SEQ ID NO: 5446508 - DNA, 25 bp, Homo sapien
atcctgcccagctacgacatggagt

SEQ ID NO: 5446509 - DNA, 25 bp, Homo sapien
cctgcccagctacgacatggagtac

SEQ ID NO: 5446510 - DNA, 25 bp, Homo sapien
agcacgggcggatcatcctgcccag

SEQ ID NO: 5446511 - DNA, 25 bp, Homo sapien
gcactgatgtcccactggagaactg

SEQ ID NO: 5446512 - DNA, 25 bp, Homo sapien
cattcggataagcactgatgtccca

SEQ ID NO: 5446513 - DNA, 25 bp, Homo sapien
gccattgatgacattcggataagca

SEQ ID NO: 5446514 - DNA, 25 bp, Homo sapien
cactgatgtcccactggagaactgc

SEQ ID NO: 5446515 - DNA, 25 bp, Homo sapien
tagcaacacctgtagatgcgggaag

SEQ ID NO: 5446516 - DNA, 25 bp, Homo sapien
tctcgcaagagaaaagagacgccac

SEQ ID NO: 5446517 - DNA, 25 bp, Homo sapien
ccttcctgccgctagatggcactag

SEQ ID NO: 5446518 - DNA, 25 bp, Homo sapien
tgagagcctcactgtctcttgttta

SEQ ID NO: 5446519 - DNA, 25 bp, Homo sapien
tttggccaataggccacagtgagct

SEQ ID NO: 5446520 - DNA, 25 bp, Homo sapien
atttggccaataggccacagtgagc

SEQ ID NO: 5446521 - DNA, 25 bp, Homo sapien
gatttggccaataggccacagtgag

SEQ ID NO: 5446522 - DNA, 25 bp, Homo sapien
tagccgtgactctgacacttgctag

SEQ ID NO: 5446523 - DNA, 25 bp, Homo sapien
cttgctagcagtgtacagttcctca

SEQ ID NO: 5446524 - DNA, 25 bp, Homo sapien
ttttgtccacctggttctagccgtg

SEQ ID NO: 5446525 - DNA, 25 bp, Homo sapien
ctcttgggtttcactgaatgcttct

SEQ ID NO: 5446526 - DNA, 25 bp, Homo sapien
tgtgaagcccgtagaccaatggtta

SEQ ID NO: 5446527 - DNA, 25 bp, Homo sapien
gtttcccaattgcatagtgacccta

SEQ ID NO: 5446528 - DNA, 25 bp, Homo sapien
tatttgcagataggaatgaccggaa

SEQ ID NO: 5446529 - DNA, 25 bp, Homo sapien
tcagggtggccgttgttacagacac

SEQ ID NO: 5446530 - DNA, 25 bp, Homo sapien
taggaccactaatgcatgaaggagc

SEQ ID NO: 5446531 - DNA, 25 bp, Homo sapien
atgcatgaaggagcccgcagcactt

SEQ ID NO: 5446532 - DNA, 25 bp, Homo sapien
cactaatgcatgaaggagcccgcag

SEQ ID NO: 5446533 - DNA, 25 bp, Homo sapien
gaccactaatgcatgaaggagcccg

SEQ ID NO: 5446534 - DNA, 25 bp, Homo sapien
gctcctagtccctttctgggccaga

SEQ ID NO: 5446535 - DNA, 25 bp, Homo sapien
tgcatcaagtgggactccagccagt

SEQ ID NO: 5446536 - DNA, 25 bp, Homo sapien
gggagaatcaagttgtaacactgct

SEQ ID NO: 5446537 - DNA, 25 bp, Homo sapien
tctcatctgatgtaaatctttggga

SEQ ID NO: 5446538 - DNA, 25 bp, Homo sapien
tgccatgcttcgcagcttcaaaaag

SEQ ID NO: 5446539 - DNA, 25 bp, Homo sapien
gtctaccccagcaattttcatagtg

SEQ ID NO: 5446540 - DNA, 25 bp, Homo sapien
cacttcagctgaggatgtcaccttc

SEQ ID NO: 5446541 - DNA, 25 bp, Homo sapien
tcatagtgttatccaggtactgtgc

SEQ ID NO: 5446542 - DNA, 25 bp, Homo sapien
tcacattaatcctatttgcagatag

SEQ ID NO: 5446543 - DNA, 25 bp, Homo sapien
tgcttttcatcctatccaaacctag

SEQ ID NO: 5446544 - DNA, 25 bp, Homo sapien
ggccttctgacaacctgggagccct

SEQ ID NO: 5446545 - DNA, 25 bp, Homo sapien
aacctagatccaggaaggagtgctt

SEQ ID NO: 5446546 - DNA, 25 bp, Homo sapien
gatcctatttctgtcagagtcctgc

SEQ ID NO: 5446547 - DNA, 25 bp, Homo sapien
cccgtgggcattggaccaagaaata

SEQ ID NO: 5446548 - DNA, 25 bp, Homo sapien
agaaataggaaagaccatttgaaca

SEQ ID NO: 5446549 - DNA, 25 bp, Homo sapien
gggaggactgagtgttatgtgggaa

SEQ ID NO: 5446550 - DNA, 25 bp, Homo sapien
caaaaagctaaagtcccgtgggcat

SEQ ID NO: 5446551 - DNA, 25 bp, Homo sapien
agtggacatcccagaaatacatgag

SEQ ID NO: 5446552 - DNA, 25 bp, Homo sapien
gacatcccagaaatacatgagagag

SEQ ID NO: 5446553 - DNA, 25 bp, Homo sapien
cagaaatacatgagagagaaggata

SEQ ID NO: 5446554 - DNA, 25 bp, Homo sapien
tacatgagagagaaggatatgaaga

SEQ ID NO: 5446555 - DNA, 25 bp, Homo sapien
tacaacttcgagctctacgatggcc

SEQ ID NO: 5446556 - DNA, 25 bp, Homo sapien
ggatgattaccctcctaggaccgcg

SEQ ID NO: 5446557 - DNA, 25 bp, Homo sapien
ggaccgcggtggctaagtcattgca

SEQ ID NO: 5446558 - DNA, 25 bp, Homo sapien
tctgctgggacaaaacaggagctca

SEQ ID NO: 5446559 - DNA, 25 bp, Homo sapien
tgcttcagccttgagagacctaggt

SEQ ID NO: 5446560 - DNA, 25 bp, Homo sapien
tattaacgcctaaggattgcctgtg

SEQ ID NO: 5446561 - DNA, 25 bp, Homo sapien
tttgaaactcaaccagtatgcccag

SEQ ID NO: 5446562 - DNA, 25 bp, Homo sapien
aatgagtcctgctacccgagtggta

SEQ ID NO: 5446563 - DNA, 25 bp, Homo sapien
acagaaagaaagacgctgggcccaa

SEQ ID NO: 5446564 - DNA, 25 bp, Homo sapien
tctcccggactaggtggtcaacagg

SEQ ID NO: 5446565 - DNA, 25 bp, Homo sapien
taaaaagaagcagggtacgcagggc

SEQ ID NO: 5446566 - DNA, 25 bp, Homo sapien
tggctgagccagatcacgggaactt

SEQ ID NO: 5446567 - DNA, 25 bp, Homo sapien
cctggaatccgagctagaaaaggga

SEQ ID NO: 5446568 - DNA, 25 bp, Homo sapien
gacacagggacaacaccagtaggaa

SEQ ID NO: 5446569 - DNA, 25 bp, Homo sapien
aagcatgtgaagcatcagtgacccc

SEQ ID NO: 5446570 - DNA, 25 bp, Homo sapien
tcagatcaaagcagtggaagcctac

SEQ ID NO: 5446571 - DNA, 25 bp, Homo sapien
gaaaagtttcttcggcagaagtctg

SEQ ID NO: 5446572 - DNA, 25 bp, Homo sapien
tctaactgggggctttattatctta

SEQ ID NO: 5446573 - DNA, 25 bp, Homo sapien
ggggctttattatcttaaggtgtga

SEQ ID NO: 5446574 - DNA, 25 bp, Homo sapien
tttcaagccggttgccacttccacc

SEQ ID NO: 5446575 - DNA, 25 bp, Homo sapien
ctatattctttcaggtatccaagcc

SEQ ID NO: 5446576 - DNA, 25 bp, Homo sapien
tatattctttcaggtatccaagccc

SEQ ID NO: 5446577 - DNA, 25 bp, Homo sapien
tattctttcaggtatccaagcccag

SEQ ID NO: 5446578 - DNA, 25 bp, Homo sapien
cgcagtttctacataattggatttc

SEQ ID NO: 5446579 - DNA, 25 bp, Homo sapien
caaattcgcagtttctacataattg

SEQ ID NO: 5446580 - DNA, 25 bp, Homo sapien
aattcgcagtttctacataattgga

SEQ ID NO: 5446581 - DNA, 25 bp, Homo sapien
ttcgcagtttctacataattggatt

SEQ ID NO: 5446582 - DNA, 25 bp, Homo sapien
catggtggacattttatctctaagg

SEQ ID NO: 5446583 - DNA, 25 bp, Homo sapien
tctctaaggtacacttgtgtatggc

SEQ ID NO: 5446584 - DNA, 25 bp, Homo sapien
catcagtagagttactgccagatct

SEQ ID NO: 5446585 - DNA, 25 bp, Homo sapien
catccatcagtagagttactgccag

SEQ ID NO: 5446586 - DNA, 25 bp, Homo sapien
ctgggatctccatgagattcattaa

SEQ ID NO: 5446587 - DNA, 25 bp, Homo sapien
atttctgggatctccatgagattca

SEQ ID NO: 5446588 - DNA, 25 bp, Homo sapien
tctatttccaatggctcataggccc

SEQ ID NO: 5446589 - DNA, 25 bp, Homo sapien
aagtgctccctacattcctctattt

SEQ ID NO: 5446590 - DNA, 25 bp, Homo sapien
ggaatcatcagagcccgatccagct

SEQ ID NO: 5446591 - DNA, 25 bp, Homo sapien
taacacccttggtctttagagaggc

SEQ ID NO: 5446592 - DNA, 25 bp, Homo sapien
tgcggtcttgggttcatcattccac

SEQ ID NO: 5446593 - DNA, 25 bp, Homo sapien
cattttctagctgtgcggtcttggg

SEQ ID NO: 5446594 - DNA, 25 bp, Homo sapien
tttctgcgtgagaagctgtgttcct

SEQ ID NO: 5446595 - DNA, 25 bp, Homo sapien
ctttgctgctgatcaatagatattc

SEQ ID NO: 5446596 - DNA, 25 bp, Homo sapien
cctgtgaaaggcagcagtgcgcgct

SEQ ID NO: 5446597 - DNA, 25 bp, Homo sapien
tctgattgcttatgatgaatgattc

SEQ ID NO: 5446598 - DNA, 25 bp, Homo sapien
catccaagcttgaacgtacgcaggg

SEQ ID NO: 5446599 - DNA, 25 bp, Homo sapien
attgagtggctagcagttaatgtcc

SEQ ID NO: 5446600 - DNA, 25 bp, Homo sapien
caggtaccagcatgcaagcttgagc

SEQ ID NO: 5446601 - DNA, 25 bp, Homo sapien
aagcaggacccaacaccgtctgttc

SEQ ID NO: 5446602 - DNA, 25 bp, Homo sapien
ttctccggttgcctccctcgtgctc

SEQ ID NO: 5446603 - DNA, 25 bp, Homo sapien
agatgcctgggtgcattcttctccg

SEQ ID NO: 5446604 - DNA, 25 bp, Homo sapien
tcctggggatgcatcagggtcctct

SEQ ID NO: 5446605 - DNA, 25 bp, Homo sapien
tgggtgcattcttctccggttgcct

SEQ ID NO: 5446606 - DNA, 25 bp, Homo sapien
caggagcggcgtttctcaatgagct

SEQ ID NO: 5446607 - DNA, 25 bp, Homo sapien
cattagggctacacatgcttcgggt

SEQ ID NO: 5446608 - DNA, 25 bp, Homo sapien
gaaggactcattcttccctgtggat

SEQ ID NO: 5446609 - DNA, 25 bp, Homo sapien
tcaatgagctgtacagaggacacca

SEQ ID NO: 5446610 - DNA, 25 bp, Homo sapien
caaatacagtcagtcatcgcagcca

SEQ ID NO: 5446611 - DNA, 25 bp, Homo sapien
gctcagcacgcacgcttttcagctg

SEQ ID NO: 5446612 - DNA, 25 bp, Homo sapien
caaaaacgcccagtggcaaatacag

SEQ ID NO: 5446613 - DNA, 25 bp, Homo sapien
gagccatcggacacctggagccgct

SEQ ID NO: 5446614 - DNA, 25 bp, Homo sapien
cctagtccttcatggcgggagaaca

SEQ ID NO: 5446615 - DNA, 25 bp, Homo sapien
taagccaagtgcagcgatttccctc

SEQ ID NO: 5446616 - DNA, 25 bp, Homo sapien
cctcgtgtggactgccgggttcttg

SEQ ID NO: 5446617 - DNA, 25 bp, Homo sapien
tgagaaagccgcataagcagcatcc

SEQ ID NO: 5446618 - DNA, 25 bp, Homo sapien
gctagttgcctagacttaaacagga

SEQ ID NO: 5446619 - DNA, 25 bp, Homo sapien
aattccactcattaaacgtgcggct

SEQ ID NO: 5446620 - DNA, 25 bp, Homo sapien
tctcaaccgtctgaatgcctgtggc

SEQ ID NO: 5446621 - DNA, 25 bp, Homo sapien
gaagcacaaacaggccattggagcc

SEQ ID NO: 5446622 - DNA, 25 bp, Homo sapien
tacttggtcccaccataaaagagca

SEQ ID NO: 5446623 - DNA, 25 bp, Homo sapien
catttacttggtcccaccataaaag

SEQ ID NO: 5446624 - DNA, 25 bp, Homo sapien
ttacttggtcccaccataaaagagc

SEQ ID NO: 5446625 - DNA, 25 bp, Homo sapien
cttggtcccaccataaaagagcaca

SEQ ID NO: 5446626 - DNA, 25 bp, Homo sapien
tttcttcttgccctggtggtataaa

SEQ ID NO: 5446627 - DNA, 25 bp, Homo sapien
tggtggtataaactctcaggcgacc

SEQ ID NO: 5446628 - DNA, 25 bp, Homo sapien
tataaactctcaggcgacctgctca

SEQ ID NO: 5446629 - DNA, 25 bp, Homo sapien
acatcagcccctacaccagtgtctc

SEQ ID NO: 5446630 - DNA, 25 bp, Homo sapien
tgtgaatccccacagggcatttgtc

SEQ ID NO: 5446631 - DNA, 25 bp, Homo sapien
tcataatggcagagtgtgttaagtc

SEQ ID NO: 5446632 - DNA, 25 bp, Homo sapien
gcagagtgtgttaagtcctctgtga

SEQ ID NO: 5446633 - DNA, 25 bp, Homo sapien
ctgtgaatccccacagggcatttgt

SEQ ID NO: 5446634 - DNA, 25 bp, Homo sapien
tctgtctcagatgtatgtggagtgt

SEQ ID NO: 5446635 - DNA, 25 bp, Homo sapien
cgaatactgctttcttgcttatgaa

SEQ ID NO: 5446636 - DNA, 25 bp, Homo sapien
agtcactggttccagtcgaacgaat

SEQ ID NO: 5446637 - DNA, 25 bp, Homo sapien
gtgtggactagccaaataaaaggaa

SEQ ID NO: 5446638 - DNA, 25 bp, Homo sapien
gaccatctcctttacctgattgtca

SEQ ID NO: 5446639 - DNA, 25 bp, Homo sapien
gttccagaccatctcctttacctga

SEQ ID NO: 5446640 - DNA, 25 bp, Homo sapien
cactctgcccctgttccagaccatc

SEQ ID NO: 5446641 - DNA, 25 bp, Homo sapien
tgcccctgttccagaccatctcctt

SEQ ID NO: 5446642 - DNA, 25 bp, Homo sapien
ggacctaatcaagtcttccaagacg

SEQ ID NO: 5446643 - DNA, 25 bp, Homo sapien
tcatccactggacctaatcaagtct

SEQ ID NO: 5446644 - DNA, 25 bp, Homo sapien
agagctccactctttgtatttgtgc

SEQ ID NO: 5446645 - DNA, 25 bp, Homo sapien
agacgtggcccatagctgacaccca

SEQ ID NO: 5446646 - DNA, 25 bp, Homo sapien
tctcccagtggaaaagccgtaatac

SEQ ID NO: 5446647 - DNA, 25 bp, Homo sapien
tgcaggtgcgtgtctctaggcctct

SEQ ID NO: 5446648 - DNA, 25 bp, Homo sapien
tataggttacttctgctcggttgct

SEQ ID NO: 5446649 - DNA, 25 bp, Homo sapien
tgggcccagcggaccttatagaata

SEQ ID NO: 5446650 - DNA, 25 bp, Homo sapien
tcaagttgcccaatgaatttcaatt

SEQ ID NO: 5446651 - DNA, 25 bp, Homo sapien
gcccaatgaatttcaattgccagtt

SEQ ID NO: 5446652 - DNA, 25 bp, Homo sapien
cccggacatccatgcgatttccaaa

SEQ ID NO: 5446653 - DNA, 25 bp, Homo sapien
tttccaaactgagattaaacctcag

SEQ ID NO: 5446654 - DNA, 25 bp, Homo sapien
taacgctctgcatcggaactgctgc

SEQ ID NO: 5446655 - DNA, 25 bp, Homo sapien
aggccacttgccgatcggtgtgaag

SEQ ID NO: 5446656 - DNA, 25 bp, Homo sapien
tgctgatacaatgaaacaaagttaa

SEQ ID NO: 5446657 - DNA, 25 bp, Homo sapien
tcacaagagccgaaataatcctgag

SEQ ID NO: 5446658 - DNA, 25 bp, Homo sapien
tctgaatagcacagaatggttttca

SEQ ID NO: 5446659 - DNA, 25 bp, Homo sapien
ccccttcatgatgggcggtgaaggg

SEQ ID NO: 5446660 - DNA, 25 bp, Homo sapien
tgagagtctgaatagcacagaatgg

SEQ ID NO: 5446661 - DNA, 25 bp, Homo sapien
tcatctgagagtctgaatagcacag

SEQ ID NO: 5446662 - DNA, 25 bp, Homo sapien
aacaatttgctgcttcttggtcacc

SEQ ID NO: 5446663 - DNA, 25 bp, Homo sapien
ctttatttccaacaatttgctgctt

SEQ ID NO: 5446664 - DNA, 25 bp, Homo sapien
caatttgctgcttcttggtcaccat

SEQ ID NO: 5446665 - DNA, 25 bp, Homo sapien
ccaacaatttgctgcttcttggtca

SEQ ID NO: 5446666 - DNA, 25 bp, Homo sapien
ttgtaaaagccactgtgagactcag

SEQ ID NO: 5446667 - DNA, 25 bp, Homo sapien
catgtgtgcacgtgagatgccagct

SEQ ID NO: 5446668 - DNA, 25 bp, Homo sapien
gccttcagccttgcgtgcatgtgtg

SEQ ID NO: 5446669 - DNA, 25 bp, Homo sapien
tattagtgcagttcttgtaaaagcc

SEQ ID NO: 5446670 - DNA, 25 bp, Homo sapien
cagatgggtcccgtgaaggatacac

SEQ ID NO: 5446671 - DNA, 25 bp, Homo sapien
ctgcgcagatgggtcccgtgaagga

SEQ ID NO: 5446672 - DNA, 25 bp, Homo sapien
tcccgtgaaggatacacacagaaaa

SEQ ID NO: 5446673 - DNA, 25 bp, Homo sapien
gctcaggatcgagcagagaatcctg

SEQ ID NO: 5446674 - DNA, 25 bp, Homo sapien
cagcgtgtgaacttctcccctctga

SEQ ID NO: 5446675 - DNA, 25 bp, Homo sapien
ggtcaaattagagaagatggatgtg

SEQ ID NO: 5446676 - DNA, 25 bp, Homo sapien
tgacactagccagcgtgtgaacttc

SEQ ID NO: 5446677 - DNA, 25 bp, Homo sapien
tgctcatttttggagcgcaaggtca

SEQ ID NO: 5446678 - DNA, 25 bp, Homo sapien
gaagtaaagggagccagtgttctgt

SEQ ID NO: 5446679 - DNA, 25 bp, Homo sapien
taaagggagccagtgttctgtatca

SEQ ID NO: 5446680 - DNA, 25 bp, Homo sapien
gagccagtgttctgtatcaaagttc

SEQ ID NO: 5446681 - DNA, 25 bp, Homo sapien
ctaagaagtaaagggagccagtgtt

SEQ ID NO: 5446682 - DNA, 25 bp, Homo sapien
tctgagtgctagcggaaggggagct

SEQ ID NO: 5446683 - DNA, 25 bp, Homo sapien
tgagtgctagcggaaggggagctgg

SEQ ID NO: 5446684 - DNA, 25 bp, Homo sapien
ttctgagtgctagcggaaggggagc

SEQ ID NO: 5446685 - DNA, 25 bp, Homo sapien
gagtgctagcggaaggggagctggc

SEQ ID NO: 5446686 - DNA, 25 bp, Homo sapien
ggattctatgactcttcgggcggga

SEQ ID NO: 5446687 - DNA, 25 bp, Homo sapien
gctatacaccttgacacggcagaga

SEQ ID NO: 5446688 - DNA, 25 bp, Homo sapien
gcctgttaaacatacttgggtgcca

SEQ ID NO: 5446689 - DNA, 25 bp, Homo sapien
tcttactctcatgggacagatggca

SEQ ID NO: 5446690 - DNA, 25 bp, Homo sapien
actgctgaccgatgatgcccactga

SEQ ID NO: 5446691 - DNA, 25 bp, Homo sapien
gaagaaaaccgtatggacagggcac

SEQ ID NO: 5446692 - DNA, 25 bp, Homo sapien
taaggctccctaagtttgacccaca

SEQ ID NO: 5446693 - DNA, 25 bp, Homo sapien
gaccttctgaactaacctggaggag

SEQ ID NO: 5446694 - DNA, 25 bp, Homo sapien
aggtgagagattgggcttatttaaa

SEQ ID NO: 5446695 - DNA, 25 bp, Homo sapien
tagtgtcagtcacagaaaatgatga

SEQ ID NO: 5446696 - DNA, 25 bp, Homo sapien
gatgattcttaactgcaggtgagag

SEQ ID NO: 5446697 - DNA, 25 bp, Homo sapien
taaggaagagctttagtgtcagtca

SEQ ID NO: 5446698 - DNA, 25 bp, Homo sapien
tcctactaatagacgagaatggctc

SEQ ID NO: 5446699 - DNA, 25 bp, Homo sapien
tagccaatggtatctcaagggacag

SEQ ID NO: 5446700 - DNA, 25 bp, Homo sapien
tatcacacatggtaggtcaccagag

SEQ ID NO: 5446701 - DNA, 25 bp, Homo sapien
taacctacccagatgtgcaaattgc

SEQ ID NO: 5446702 - DNA, 25 bp, Homo sapien
gaaaaaggttgtgctactcacacga

SEQ ID NO: 5446703 - DNA, 25 bp, Homo sapien
tcaaactaatgggacagctgcttcc

SEQ ID NO: 5446704 - DNA, 25 bp, Homo sapien
catgtgaacactgtagcgaggtcca

SEQ ID NO: 5446705 - DNA, 25 bp, Homo sapien
caattacgaatggaatcctggcctc

SEQ ID NO: 5446706 - DNA, 25 bp, Homo sapien
ccttaggaatgccactgtgagaact

SEQ ID NO: 5446707 - DNA, 25 bp, Homo sapien
ggcacctgttactgtgaagcctgta

SEQ ID NO: 5446708 - DNA, 25 bp, Homo sapien
tattggtacttgtagctgtggcacc

SEQ ID NO: 5446709 - DNA, 25 bp, Homo sapien
ccaaaggctgcgctgaactgaggga

SEQ ID NO: 5446710 - DNA, 25 bp, Homo sapien
tggtaaccccggaagcacactggag

SEQ ID NO: 5446711 - DNA, 25 bp, Homo sapien
gaagctggtctgtggtaaccccgga

SEQ ID NO: 5446712 - DNA, 25 bp, Homo sapien
ggtctgtggtaaccccggaagcaca

SEQ ID NO: 5446713 - DNA, 25 bp, Homo sapien
ccccatgccactgaagctggtctgt

SEQ ID NO: 5446714 - DNA, 25 bp, Homo sapien
tgggtggcgtggatagggaagtgga

SEQ ID NO: 5446715 - DNA, 25 bp, Homo sapien
ctctgagttcgaagtggtgggtggc

SEQ ID NO: 5446716 - DNA, 25 bp, Homo sapien
ggaaagaagatgtccatctgcgccg

SEQ ID NO: 5446717 - DNA, 25 bp, Homo sapien
tgcgccgagaaggttgctaaatgga

SEQ ID NO: 5446718 - DNA, 25 bp, Homo sapien
ggttgggagcaagtgctgcgccatg

SEQ ID NO: 5446719 - DNA, 25 bp, Homo sapien
tgctgcgccatgatgggcatctctg

SEQ ID NO: 5446720 - DNA, 25 bp, Homo sapien
cctccaagtggcacctcaagttggg

SEQ ID NO: 5446721 - DNA, 25 bp, Homo sapien
tgagttctggggtttaccacgcctc

SEQ ID NO: 5446722 - DNA, 25 bp, Homo sapien
ttgacaaggtagcagaacggagcag

SEQ ID NO: 5446723 - DNA, 25 bp, Homo sapien
tcactgtagggagacggcacatgct

SEQ ID NO: 5446724 - DNA, 25 bp, Homo sapien
tggactggcacaccatctgactggg

SEQ ID NO: 5446725 - DNA, 25 bp, Homo sapien
cactcgagagaagttacagcctgca

SEQ ID NO: 5446726 - DNA, 25 bp, Homo sapien
cttcgttttggaaaagtgcacttca

SEQ ID NO: 5446727 - DNA, 25 bp, Homo sapien
tggcaggattaagcaaacttcgttt

SEQ ID NO: 5446728 - DNA, 25 bp, Homo sapien
aagaaacaacgttgggccaggtgtg

SEQ ID NO: 5446729 - DNA, 25 bp, Homo sapien
aaaagtcatattcgagatgtctttg

SEQ ID NO: 5446730 - DNA, 25 bp, Homo sapien
ggtagccgtggcaggacatctgaaa

SEQ ID NO: 5446731 - DNA, 25 bp, Homo sapien
caagtcatgtggaatgtcagtgatc

SEQ ID NO: 5446732 - DNA, 25 bp, Homo sapien
tggcaatgtcatccggcaactcatc

SEQ ID NO: 5446733 - DNA, 25 bp, Homo sapien
tcttgtaagtcatcaggtagccgtg

SEQ ID NO: 5446734 - DNA, 25 bp, Homo sapien
tgctgaactttacgggagttatctc

SEQ ID NO: 5446735 - DNA, 25 bp, Homo sapien
gtcgacgaggtccacgccttctctt

SEQ ID NO: 5446736 - DNA, 25 bp, Homo sapien
ctccactggcagtgagacgctggcg

SEQ ID NO: 5446737 - DNA, 25 bp, Homo sapien
ctggcgggcatgctgaggttccctt

SEQ ID NO: 5446738 - DNA, 25 bp, Homo sapien
tatgtaaacaacataccccctatgg

SEQ ID NO: 5446739 - DNA, 25 bp, Homo sapien
aataatccaggcaaagataatggta

SEQ ID NO: 5446740 - DNA, 25 bp, Homo sapien
gaaagtagaacatagacacacccag

SEQ ID NO: 5446741 - DNA, 25 bp, Homo sapien
caagaagggagatcaattaggagac

SEQ ID NO: 5446742 - DNA, 25 bp, Homo sapien
tcccagtgtcagtctctcataggag

SEQ ID NO: 5446743 - DNA, 25 bp, Homo sapien
gtctgatgtgtaatgtcaaaaactg

SEQ ID NO: 5446744 - DNA, 25 bp, Homo sapien
tgcaaacttggctgtgcaacttgag

SEQ ID NO: 5446745 - DNA, 25 bp, Homo sapien
ctgctgagagtggttcaagaggata

SEQ ID NO: 5446746 - DNA, 25 bp, Homo sapien
taatgtcaaaaactggcacagagca

SEQ ID NO: 5446747 - DNA, 25 bp, Homo sapien
agcgcactgttcacccttcacggtt

SEQ ID NO: 5446748 - DNA, 25 bp, Homo sapien
ccttcacggttccactgcatgctgc

SEQ ID NO: 5446749 - DNA, 25 bp, Homo sapien
agggctttgttagcgcactgttcac

SEQ ID NO: 5446750 - DNA, 25 bp, Homo sapien
atggaagggctttgttagcgcactg

SEQ ID NO: 5446751 - DNA, 25 bp, Homo sapien
gcaatgcattcacatggatccataa

SEQ ID NO: 5446752 - DNA, 25 bp, Homo sapien
gtgaagaatcgacttcttgcccttg

SEQ ID NO: 5446753 - DNA, 25 bp, Homo sapien
ccactccctctataatacgtattca

SEQ ID NO: 5446754 - DNA, 25 bp, Homo sapien
gaatgctaggcagtgaagaatcgac

SEQ ID NO: 5446755 - DNA, 25 bp, Homo sapien
gactgcatgcagctctccgcagttc

SEQ ID NO: 5446756 - DNA, 25 bp, Homo sapien
ctggttcgactgcatgcagctctcc

SEQ ID NO: 5446757 - DNA, 25 bp, Homo sapien
gttcgactgcatgcagctctccgca

SEQ ID NO: 5446758 - DNA, 25 bp, Homo sapien
tctccgcagttcttgtattaactga

SEQ ID NO: 5446759 - DNA, 25 bp, Homo sapien
tatgccggcatttcttttgacgaga

SEQ ID NO: 5446760 - DNA, 25 bp, Homo sapien
gtaagtgcaaagttgagtcaccctg

SEQ ID NO: 5446761 - DNA, 25 bp, Homo sapien
aagctttcctaaacgtatgccggca

SEQ ID NO: 5446762 - DNA, 25 bp, Homo sapien
tttgacgagattctgcccgctccag

SEQ ID NO: 5446763 - DNA, 25 bp, Homo sapien
gaaaaactgattacacattaggctc

SEQ ID NO: 5446764 - DNA, 25 bp, Homo sapien
ggaaaaactgattacacattaggct

SEQ ID NO: 5446765 - DNA, 25 bp, Homo sapien
aaaactgattacacattaggctcat

SEQ ID NO: 5446766 - DNA, 25 bp, Homo sapien
aaaggaaaaactgattacacattag

SEQ ID NO: 5446767 - DNA, 25 bp, Homo sapien
aatgcccactggacttgaaaactga

SEQ ID NO: 5446768 - DNA, 25 bp, Homo sapien
ttaccgttaggaataatgcccactg

SEQ ID NO: 5446769 - DNA, 25 bp, Homo sapien
cccactggacttgaaaactgacctg

SEQ ID NO: 5446770 - DNA, 25 bp, Homo sapien
ggaataatgcccactggacttgaaa

SEQ ID NO: 5446771 - DNA, 25 bp, Homo sapien
gaggcctgctctgagtcctctggtt

SEQ ID NO: 5446772 - DNA, 25 bp, Homo sapien
gagggtttcccggatggaccatgca

SEQ ID NO: 5446773 - DNA, 25 bp, Homo sapien
tctttgatatctgagggtttcccgg

SEQ ID NO: 5446774 - DNA, 25 bp, Homo sapien
catgcaacctggtagggcgaggcct

SEQ ID NO: 5446775 - DNA, 25 bp, Homo sapien
gacattccatccagtccgttgggca

SEQ ID NO: 5446776 - DNA, 25 bp, Homo sapien
tcttcaaggccaacgtgggcactgt

SEQ ID NO: 5446777 - DNA, 25 bp, Homo sapien
ggcagaggcctcttgtgagacaact

SEQ ID NO: 5446778 - DNA, 25 bp, Homo sapien
tttcgggataaagccaagtacctgc

SEQ ID NO: 5446779 - DNA, 25 bp, Homo sapien
acaaatccgtttcaagacttcaagc

SEQ ID NO: 5446780 - DNA, 25 bp, Homo sapien
tcattctagtggcaaaaccgaccct

SEQ ID NO: 5446781 - DNA, 25 bp, Homo sapien
ttagcgaagcataaactcatcattc

SEQ ID NO: 5446782 - DNA, 25 bp, Homo sapien
ccgacccttaatgtgaaaatagtgt

SEQ ID NO: 5446783 - DNA, 25 bp, Homo sapien
gttatacttggccacatattcacat

SEQ ID NO: 5446784 - DNA, 25 bp, Homo sapien
gtagccgttgagtcgcctctgcttg

SEQ ID NO: 5446785 - DNA, 25 bp, Homo sapien
gttggtgcagcgttggctgttatac

SEQ ID NO: 5446786 - DNA, 25 bp, Homo sapien
gggcagtcttgtcctccagaacgtg

SEQ ID NO: 5446787 - DNA, 25 bp, Homo sapien
agggcttattgtcaacctcagagaa

SEQ ID NO: 5446788 - DNA, 25 bp, Homo sapien
cacaagggcttattgtcaacctcag

SEQ ID NO: 5446789 - DNA, 25 bp, Homo sapien
tgagcacaagggcttattgtcaacc

SEQ ID NO: 5446790 - DNA, 25 bp, Homo sapien
tatatgagcacaagggcttattgtc

SEQ ID NO: 5446791 - DNA, 25 bp, Homo sapien
acgtgactctattccttgtgaacat

SEQ ID NO: 5446792 - DNA, 25 bp, Homo sapien
tgactctattccttgtgaacatcag

SEQ ID NO: 5446793 - DNA, 25 bp, Homo sapien
cacgtgactctattccttgtgaaca

SEQ ID NO: 5446794 - DNA, 25 bp, Homo sapien
cgtgactctattccttgtgaacatc

SEQ ID NO: 5446795 - DNA, 25 bp, Homo sapien
aaggataccacagtttggaatgccg

SEQ ID NO: 5446796 - DNA, 25 bp, Homo sapien
ctgcaccatagcaatgttaagagaa

SEQ ID NO: 5446797 - DNA, 25 bp, Homo sapien
tttggaatgccgcagaatcaggatg

SEQ ID NO: 5446798 - DNA, 25 bp, Homo sapien
accatagcaatgttaagagaacccc

SEQ ID NO: 5446799 - DNA, 25 bp, Homo sapien
ggttgctcaaatttctcaagcttgc

SEQ ID NO: 5446800 - DNA, 25 bp, Homo sapien
gatttattctccgacagcttcaggg

SEQ ID NO: 5446801 - DNA, 25 bp, Homo sapien
gagatgaggttgcactataatgccc

SEQ ID NO: 5446802 - DNA, 25 bp, Homo sapien
gattgactgtattccctatctgtca

SEQ ID NO: 5446803 - DNA, 25 bp, Homo sapien
ggttctacagaggaaatcatcctct

SEQ ID NO: 5446804 - DNA, 25 bp, Homo sapien
tgtgtcactttcttgagagaaagct

SEQ ID NO: 5446805 - DNA, 25 bp, Homo sapien
tcttgccctggttcaattttcactg

SEQ ID NO: 5446806 - DNA, 25 bp, Homo sapien
gggagcccaacatacatatatccaa

SEQ ID NO: 5446807 - DNA, 25 bp, Homo sapien
tgtaaactggaaacagatcaatatc

SEQ ID NO: 5446808 - DNA, 25 bp, Homo sapien
taaagaagaagttatgacaaacgca

SEQ ID NO: 5446809 - DNA, 25 bp, Homo sapien
tattgtagtatcaaaatcactgttc

SEQ ID NO: 5446810 - DNA, 25 bp, Homo sapien
aacgcactgaggcagttctcagaaa

SEQ ID NO: 5446811 - DNA, 25 bp, Homo sapien
gaaaggtaaggatagtttatgcagc

SEQ ID NO: 5446812 - DNA, 25 bp, Homo sapien
taaggatagtttatgcagcagaaag

SEQ ID NO: 5446813 - DNA, 25 bp, Homo sapien
agcagaaagatcactcactggctct

SEQ ID NO: 5446814 - DNA, 25 bp, Homo sapien
ctcactggctctggtaggtatcaga

SEQ ID NO: 5446815 - DNA, 25 bp, Homo sapien
ctcagggcaccaaaatatagctaaa

SEQ ID NO: 5446816 - DNA, 25 bp, Homo sapien
aactgtagaccttgtttcgggagct

SEQ ID NO: 5446817 - DNA, 25 bp, Homo sapien
caaagtagttttgctaggttccgag

SEQ ID NO: 5446818 - DNA, 25 bp, Homo sapien
tctaggtcgaatacaagaatgtcac

SEQ ID NO: 5446819 - DNA, 25 bp, Homo sapien
cactaactaataaagctaagaaaag

SEQ ID NO: 5446820 - DNA, 25 bp, Homo sapien
aacccagtcactaactaataaagct

SEQ ID NO: 5446821 - DNA, 25 bp, Homo sapien
agctaagaaaagccccttgcaaact

SEQ ID NO: 5446822 - DNA, 25 bp, Homo sapien
taaagctaagaaaagccccttgcaa

SEQ ID NO: 5446823 - DNA, 25 bp, Homo sapien
cagcccgccgccctacgggagcccg

SEQ ID NO: 5446824 - DNA, 25 bp, Homo sapien
cggcctcacgtaagcgcgctcgccg

SEQ ID NO: 5446825 - DNA, 25 bp, Homo sapien
ctttcattctccgcccggggcctgg

SEQ ID NO: 5446826 - DNA, 25 bp, Homo sapien
tggcgtgggccggcgaatccccggc

SEQ ID NO: 5446827 - DNA, 25 bp, Homo sapien
ccctcggctgggctgacagatcaga

SEQ ID NO: 5446828 - DNA, 25 bp, Homo sapien
gcaatggactaggaagctcggctgc

SEQ ID NO: 5446829 - DNA, 25 bp, Homo sapien
gatcagagtgagaggcgctggcaat

SEQ ID NO: 5446830 - DNA, 25 bp, Homo sapien
gcgctggcaatggactaggaagctc

SEQ ID NO: 5446831 - DNA, 25 bp, Homo sapien
aggcactgcgaggacataacaccag

SEQ ID NO: 5446832 - DNA, 25 bp, Homo sapien
cgacaactttcctaccatcttggag

SEQ ID NO: 5446833 - DNA, 25 bp, Homo sapien
ctgaatatactctccagccaagaag

SEQ ID NO: 5446834 - DNA, 25 bp, Homo sapien
ctaaaaagtgctcccagggtcggtg

SEQ ID NO: 5446835 - DNA, 25 bp, Homo sapien
agggtacccatttacatcgattcca

SEQ ID NO: 5446836 - DNA, 25 bp, Homo sapien
caatagaacgcttattggaggataa

SEQ ID NO: 5446837 - DNA, 25 bp, Homo sapien
atagaaaaagaaccgactatctttg

SEQ ID NO: 5446838 - DNA, 25 bp, Homo sapien
gactatctttgtatgttctactggg

SEQ ID NO: 5446839 - DNA, 25 bp, Homo sapien
atgcccggcctaatatcctgttttt

SEQ ID NO: 5446840 - DNA, 25 bp, Homo sapien
gcgttccctgggagtcaacacctgt

SEQ ID NO: 5446841 - DNA, 25 bp, Homo sapien
caatgcagattcaatggcagcctca

SEQ ID NO: 5446842 - DNA, 25 bp, Homo sapien
gctgagatggctagacctttatacc

SEQ ID NO: 5446843 - DNA, 25 bp, Homo sapien
ggtcaggagctaaagtggtccttca

SEQ ID NO: 5446844 - DNA, 25 bp, Homo sapien
cacactcaagggtagcggattaccc

SEQ ID NO: 5446845 - DNA, 25 bp, Homo sapien
tcactcacgtggttgctggtaggcc

SEQ ID NO: 5446846 - DNA, 25 bp, Homo sapien
gagagtattcctcaagaccaaggag

SEQ ID NO: 5446847 - DNA, 25 bp, Homo sapien
aggaagctgcctatgggacctcaga

SEQ ID NO: 5446848 - DNA, 25 bp, Homo sapien
gagcccaaggtgtggaatgctatgt

SEQ ID NO: 5446849 - DNA, 25 bp, Homo sapien
gctggcacctgatcatggtcttcct

SEQ ID NO: 5446850 - DNA, 25 bp, Homo sapien
ccatatcagcacgttgagatctagc

SEQ ID NO: 5446851 - DNA, 25 bp, Homo sapien
tataaaaagggtttgcgggagcatg

SEQ ID NO: 5446852 - DNA, 25 bp, Homo sapien
atgaagggttactcagtgtcatctt

SEQ ID NO: 5446853 - DNA, 25 bp, Homo sapien
tgatcagccaaccatcttcataacg

SEQ ID NO: 5446854 - DNA, 25 bp, Homo sapien
ccatcttcataacgagatttgttta

SEQ ID NO: 5446855 - DNA, 25 bp, Homo sapien
tcataacgagatttgtttacaagtc

SEQ ID NO: 5446856 - DNA, 25 bp, Homo sapien
aaaggagaatagagttcactagcag

SEQ ID NO: 5446857 - DNA, 25 bp, Homo sapien
ctgataaaggagaatagagttcact

SEQ ID NO: 5446858 - DNA, 25 bp, Homo sapien
actagcagctttcacactctccaaa

SEQ ID NO: 5446859 - DNA, 25 bp, Homo sapien
gcaccaaactcatcttgtttgttca

SEQ ID NO: 5446860 - DNA, 25 bp, Homo sapien
gattacagtaaccagacggcgccca

SEQ ID NO: 5446861 - DNA, 25 bp, Homo sapien
tcaggcagattacagtaaccagacg

SEQ ID NO: 5446862 - DNA, 25 bp, Homo sapien
cttcaggcagattacagtaaccaga

SEQ ID NO: 5446863 - DNA, 25 bp, Homo sapien
gcagattacagtaaccagacggcgc

SEQ ID NO: 5446864 - DNA, 25 bp, Homo sapien
tatcagcaataggtaagtcaatctc

SEQ ID NO: 5446865 - DNA, 25 bp, Homo sapien
aagacaactagacatgcccactgtg

SEQ ID NO: 5446866 - DNA, 25 bp, Homo sapien
ggtgacagagttgcctcaatcagtc

SEQ ID NO: 5446867 - DNA, 25 bp, Homo sapien
tcagaagagctgatccaaacccaag

SEQ ID NO: 5446868 - DNA, 25 bp, Homo sapien
aattgactgggcacggatagctcac

SEQ ID NO: 5446869 - DNA, 25 bp, Homo sapien
aaattgactgggcacggatagctca

SEQ ID NO: 5446870 - DNA, 25 bp, Homo sapien
aaaattgactgggcacggatagctc

SEQ ID NO: 5446871 - DNA, 25 bp, Homo sapien
ggcatttagtatatgtcaggaaaca

SEQ ID NO: 5446872 - DNA, 25 bp, Homo sapien
catggctttccctcatagtctatga

SEQ ID NO: 5446873 - DNA, 25 bp, Homo sapien
tacaatgatcatcctcagttagcac

SEQ ID NO: 5446874 - DNA, 25 bp, Homo sapien
tctatgaggctggaagtaggtacaa

SEQ ID NO: 5446875 - DNA, 25 bp, Homo sapien
gaatgtcatgattccaccagacagg

SEQ ID NO: 5446876 - DNA, 25 bp, Homo sapien
tatgtgcccatgagacagacggagc

SEQ ID NO: 5446877 - DNA, 25 bp, Homo sapien
gctagcagcctacaatcagatatgg

SEQ ID NO: 5446878 - DNA, 25 bp, Homo sapien
cactttgaggagaggaatacaagca

SEQ ID NO: 5446879 - DNA, 25 bp, Homo sapien
cgcgacctccgccttgactctcagt

SEQ ID NO: 5446880 - DNA, 25 bp, Homo sapien
gattgttcaccacaagctgcctagc

SEQ ID NO: 5446881 - DNA, 25 bp, Homo sapien
cgcgcccggtccagacaaggtattt

SEQ ID NO: 5446882 - DNA, 25 bp, Homo sapien
gaaaaacgacatcctagactgggcg

SEQ ID NO: 5446883 - DNA, 25 bp, Homo sapien
gctgcctagcaggtagcccaaggat

SEQ ID NO: 5446884 - DNA, 25 bp, Homo sapien
ttatctatttttaattatctcctaa

SEQ ID NO: 5446885 - DNA, 25 bp, Homo sapien
tcaagcgatccacccaccttggccc

SEQ ID NO: 5446886 - DNA, 25 bp, Homo sapien
gccaccacacccaaccttagattaa

SEQ ID NO: 5446887 - DNA, 25 bp, Homo sapien
cagactggtctccaactgcctgggc

SEQ ID NO: 5446888 - DNA, 25 bp, Homo sapien
ccaagggaggtctcataagtataca

SEQ ID NO: 5446889 - DNA, 25 bp, Homo sapien
tctcacagggttgtagcaagaacaa

SEQ ID NO: 5446890 - DNA, 25 bp, Homo sapien
catgtaaaaccagagtgcttagcac

SEQ ID NO: 5446891 - DNA, 25 bp, Homo sapien
ttgcagttaagaacaacaggctttg

SEQ ID NO: 5446892 - DNA, 25 bp, Homo sapien
tatttatgaagataagccaacaact

SEQ ID NO: 5446893 - DNA, 25 bp, Homo sapien
tttatgaagataagccaacaactca

SEQ ID NO: 5446894 - DNA, 25 bp, Homo sapien
ttttacagacaaattatttatgaag

SEQ ID NO: 5446895 - DNA, 25 bp, Homo sapien
attgaacctcttttcatttcatcca

SEQ ID NO: 5446896 - DNA, 25 bp, Homo sapien
tgcttttaagagcatctgcatagtt

SEQ ID NO: 5446897 - DNA, 25 bp, Homo sapien
tttcaaataggcatagtataacctt

SEQ ID NO: 5446898 - DNA, 25 bp, Homo sapien
cagttgtccattaattatctgcggc

SEQ ID NO: 5446899 - DNA, 25 bp, Homo sapien
aaggatctctttatgttcgtcacaa

SEQ ID NO: 5446900 - DNA, 25 bp, Homo sapien
catatggatggttcctctactgcct

SEQ ID NO: 5446901 - DNA, 25 bp, Homo sapien
atatggatggttcctctactgcctg

SEQ ID NO: 5446902 - DNA, 25 bp, Homo sapien
cagcatatggatggttcctctactg

SEQ ID NO: 5446903 - DNA, 25 bp, Homo sapien
gcatatggatggttcctctactgcc

SEQ ID NO: 5446904 - DNA, 25 bp, Homo sapien
ggccattgtctgtgaggctctgcta

SEQ ID NO: 5446905 - DNA, 25 bp, Homo sapien
gtctgtgaggctctgctaattgaat

SEQ ID NO: 5446906 - DNA, 25 bp, Homo sapien
cagctttgacacatttggccattgt

SEQ ID NO: 5446907 - DNA, 25 bp, Homo sapien
cctctgtgacagctttgacacattt

SEQ ID NO: 5446908 - DNA, 25 bp, Homo sapien
cgataaaccccttactggccacatg

SEQ ID NO: 5446909 - DNA, 25 bp, Homo sapien
gattataaggccctatgcaagtata

SEQ ID NO: 5446910 - DNA, 25 bp, Homo sapien
tatatgtaaccaacagattccaacg

SEQ ID NO: 5446911 - DNA, 25 bp, Homo sapien
taactatagagcagctagacagtgc

SEQ ID NO: 5446912 - DNA, 25 bp, Homo sapien
agtcttttatagttagctgaggtgg

SEQ ID NO: 5446913 - DNA, 25 bp, Homo sapien
aagtcttttatagttagctgaggtg

SEQ ID NO: 5446914 - DNA, 25 bp, Homo sapien
gtcttttatagttagctgaggtgga

SEQ ID NO: 5446915 - DNA, 25 bp, Homo sapien
gcttgctggaagtaattagcccctt

SEQ ID NO: 5446916 - DNA, 25 bp, Homo sapien
tgatccagagtatcatatggaagag

SEQ ID NO: 5446917 - DNA, 25 bp, Homo sapien
tcatatcgaacaagattaggagaga

SEQ ID NO: 5446918 - DNA, 25 bp, Homo sapien
agtaattagccccttcaatatcatc

SEQ ID NO: 5446919 - DNA, 25 bp, Homo sapien
gttactcaggaagcttgcgcccggg

SEQ ID NO: 5446920 - DNA, 25 bp, Homo sapien
tatgcctttagtagcatcactaaga

SEQ ID NO: 5446921 - DNA, 25 bp, Homo sapien
tcaaatatgcctttagtagcatcac

SEQ ID NO: 5446922 - DNA, 25 bp, Homo sapien
ccttgactttgaaaatcattctaac

SEQ ID NO: 5446923 - DNA, 25 bp, Homo sapien
ctcagagagtgctcttataattttc

SEQ ID NO: 5446924 - DNA, 25 bp, Homo sapien
ttctcttgccaagccaggaggtgtc

SEQ ID NO: 5446925 - DNA, 25 bp, Homo sapien
ccagtcttctcttgccaagccagga

SEQ ID NO: 5446926 - DNA, 25 bp, Homo sapien
gagagtgctcttataattttccagt

SEQ ID NO: 5446927 - DNA, 25 bp, Homo sapien
gttgacatatgtagcagacttctct

SEQ ID NO: 5446928 - DNA, 25 bp, Homo sapien
gctcctgggagaataacatcagcta

SEQ ID NO: 5446929 - DNA, 25 bp, Homo sapien
tgctgagctctaccctcagtgttga

SEQ ID NO: 5446930 - DNA, 25 bp, Homo sapien
agaataacatcagctatgggagccc

SEQ ID NO: 5446931 - DNA, 25 bp, Homo sapien
cttatagccaaggtccaaagcagct

SEQ ID NO: 5446932 - DNA, 25 bp, Homo sapien
tcctttggcaaatcctgtcgtgtga

SEQ ID NO: 5446933 - DNA, 25 bp, Homo sapien
gagggttcttccgaattgcttccac

SEQ ID NO: 5446934 - DNA, 25 bp, Homo sapien
tgtcgtgtgatacaacctccatctg

SEQ ID NO: 5446935 - DNA, 25 bp, Homo sapien
caccactagtcatccgaatcttttg

SEQ ID NO: 5446936 - DNA, 25 bp, Homo sapien
tttgtgcaatgctagaaacagctgc

SEQ ID NO: 5446937 - DNA, 25 bp, Homo sapien
aactttccaatcaccagtaacacca

SEQ ID NO: 5446938 - DNA, 25 bp, Homo sapien
gatattcataactttccaatcacca

SEQ ID NO: 5446939 - DNA, 25 bp, Homo sapien
cccaagtcttaggtgtaacatgaat

SEQ ID NO: 5446940 - DNA, 25 bp, Homo sapien
cctctataatataggttgtcccaag

SEQ ID NO: 5446941 - DNA, 25 bp, Homo sapien
ttgttagcccaacatacagacacac

SEQ ID NO: 5446942 - DNA, 25 bp, Homo sapien
tattacaagtaagctgaacaccaaa

SEQ ID NO: 5446943 - DNA, 25 bp, Homo sapien
cctataagggccacttttaagtcat

SEQ ID NO: 5446944 - DNA, 25 bp, Homo sapien
ctggctaaatggatggcttcccgaa

SEQ ID NO: 5446945 - DNA, 25 bp, Homo sapien
ggagtctcccaggtggtcatatgtg

SEQ ID NO: 5446946 - DNA, 25 bp, Homo sapien
ggtccactggactgcctataagggc

SEQ ID NO: 5446947 - DNA, 25 bp, Homo sapien
tgggtttgtaccaaccagaagaaca

SEQ ID NO: 5446948 - DNA, 25 bp, Homo sapien
caccagcaattgtagtattaagaag

SEQ ID NO: 5446949 - DNA, 25 bp, Homo sapien
ttcgaattctagcattaaacagtgg

SEQ ID NO: 5446950 - DNA, 25 bp, Homo sapien
cagtggtgcctcaaaacgtgggttt

SEQ ID NO: 5446951 - DNA, 25 bp, Homo sapien
tgcataaggtgtcagagtccactct

SEQ ID NO: 5446952 - DNA, 25 bp, Homo sapien
agacctcttcagtgcataaggtgtc

SEQ ID NO: 5446953 - DNA, 25 bp, Homo sapien
tcagagtccactctattaagcaaat

SEQ ID NO: 5446954 - DNA, 25 bp, Homo sapien
caccaagccacctgcaattgctgcc

SEQ ID NO: 5446955 - DNA, 25 bp, Homo sapien
ttccagctacgcgagagagcgcatc

SEQ ID NO: 5446956 - DNA, 25 bp, Homo sapien
agcgcatcctcccaagaagtatagg

SEQ ID NO: 5446957 - DNA, 25 bp, Homo sapien
tttgacgttttagcccatcataggc

SEQ ID NO: 5446958 - DNA, 25 bp, Homo sapien
tctgaccattggctcggtaagtctt

SEQ ID NO: 5446959 - DNA, 25 bp, Homo sapien
gatgtcctcatgcatacgtggcaaa

SEQ ID NO: 5446960 - DNA, 25 bp, Homo sapien
catacgtggcaaaatcctcatcact

SEQ ID NO: 5446961 - DNA, 25 bp, Homo sapien
tccagttcttgtgctaaccacaata

SEQ ID NO: 5446962 - DNA, 25 bp, Homo sapien
ttgtgctaaccacaatattacttcc

SEQ ID NO: 5446963 - DNA, 25 bp, Homo sapien
cccaaggccgggcagtaaaggcata

SEQ ID NO: 5446964 - DNA, 25 bp, Homo sapien
cctacagggcagatatcaatgatat

SEQ ID NO: 5446965 - DNA, 25 bp, Homo sapien
gatattcccagacagttcagacatg

SEQ ID NO: 5446966 - DNA, 25 bp, Homo sapien
catagggcttagaggttagggcacc

SEQ ID NO: 5446967 - DNA, 25 bp, Homo sapien
ctgatgcagcgagtacactgtatac

SEQ ID NO: 5446968 - DNA, 25 bp, Homo sapien
gttcttgtcttccacagcacgcttc

SEQ ID NO: 5446969 - DNA, 25 bp, Homo sapien
catgatggtctttaccaatggccca

SEQ ID NO: 5446970 - DNA, 25 bp, Homo sapien
taaaaatcggctcctatcatttcca

SEQ ID NO: 5446971 - DNA, 25 bp, Homo sapien
taggacagtccaatgggtgatttgc

SEQ ID NO: 5446972 - DNA, 25 bp, Homo sapien
gtccaatgggtgatttgctaataag

SEQ ID NO: 5446973 - DNA, 25 bp, Homo sapien
caaataggacagtccaatgggtgat

SEQ ID NO: 5446974 - DNA, 25 bp, Homo sapien
cagtccaatgggtgatttgctaata

SEQ ID NO: 5446975 - DNA, 25 bp, Homo sapien
tcattactggcatggcacaagcagc

SEQ ID NO: 5446976 - DNA, 25 bp, Homo sapien
ctgagtttgttaggatattccaacc

SEQ ID NO: 5446977 - DNA, 25 bp, Homo sapien
ttttctgagtttgttaggatattcc

SEQ ID NO: 5446978 - DNA, 25 bp, Homo sapien
ttccaacccttcattactggcatgg

SEQ ID NO: 5446979 - DNA, 25 bp, Homo sapien
acagacaacctttcatgataacaga

SEQ ID NO: 5446980 - DNA, 25 bp, Homo sapien
tcatgataacagaatcgagggatct

SEQ ID NO: 5446981 - DNA, 25 bp, Homo sapien
tttccagcaacagacaacctttcat

SEQ ID NO: 5446982 - DNA, 25 bp, Homo sapien
gatctgcatgccaaccttctcacaa

SEQ ID NO: 5446983 - DNA, 25 bp, Homo sapien
ggataaagtatccttccactgtgct

SEQ ID NO: 5446984 - DNA, 25 bp, Homo sapien
tggataaagtatccttccactgtgc

SEQ ID NO: 5446985 - DNA, 25 bp, Homo sapien
ctggataaagtatccttccactgtg

SEQ ID NO: 5446986 - DNA, 25 bp, Homo sapien
attgtccacaatgtccccagtggtt

SEQ ID NO: 5446987 - DNA, 25 bp, Homo sapien
ttgtccacaatgtccccagtggttt

SEQ ID NO: 5446988 - DNA, 25 bp, Homo sapien
cattgtccacaatgtccccagtggt

SEQ ID NO: 5446989 - DNA, 25 bp, Homo sapien
ccattgtccacaatgtccccagtgg

SEQ ID NO: 5446990 - DNA, 25 bp, Homo sapien
tttggattagagatttcactacaca

SEQ ID NO: 5446991 - DNA, 25 bp, Homo sapien
ttggattagagatttcactacacat

SEQ ID NO: 5446992 - DNA, 25 bp, Homo sapien
ctttggattagagatttcactacac

SEQ ID NO: 5446993 - DNA, 25 bp, Homo sapien
tgtatttcatgactggaccttccct

SEQ ID NO: 5446994 - DNA, 25 bp, Homo sapien
ggcttttgtagtatcctgtcccaat

SEQ ID NO: 5446995 - DNA, 25 bp, Homo sapien
gacactatctattttagggcttttg

SEQ ID NO: 5446996 - DNA, 25 bp, Homo sapien
aaatgatcatcctctacagtcgctg

SEQ ID NO: 5446997 - DNA, 25 bp, Homo sapien
gtcgttcccggttccaccatgacag

SEQ ID NO: 5446998 - DNA, 25 bp, Homo sapien
tcgttcccggttccaccatgacaga

SEQ ID NO: 5446999 - DNA, 25 bp, Homo sapien
ggtcgttcccggttccaccatgaca

SEQ ID NO: 5447000 - DNA, 25 bp, Homo sapien
tacttcaatcaagttgcttgctgct

SEQ ID NO: 5447001 - DNA, 25 bp, Homo sapien
aatacttcaatcaagttgcttgctg

SEQ ID NO: 5447002 - DNA, 25 bp, Homo sapien
caaatacttcaatcaagttgcttgc

SEQ ID NO: 5447003 - DNA, 25 bp, Homo sapien
atacttcaatcaagttgcttgctgc

SEQ ID NO: 5447004 - DNA, 25 bp, Homo sapien
gaaaatatgttcatgggaagatcac

SEQ ID NO: 5447005 - DNA, 25 bp, Homo sapien
tagggtctttgataaactatgccat

SEQ ID NO: 5447006 - DNA, 25 bp, Homo sapien
ttttggcattgatgtgtgtagttcc

SEQ ID NO: 5447007 - DNA, 25 bp, Homo sapien
ggtctaatatccacgaatgcaaatt

SEQ ID NO: 5447008 - DNA, 25 bp, Homo sapien
tactaaggcctttcttacaggtatc

SEQ ID NO: 5447009 - DNA, 25 bp, Homo sapien
cacatcctttaggagacttagaaag

SEQ ID NO: 5447010 - DNA, 25 bp, Homo sapien
catcctttaggagacttagaaaggc

SEQ ID NO: 5447011 - DNA, 25 bp, Homo sapien
gcctttcttacaggtatccttaaca

SEQ ID NO: 5447012 - DNA, 25 bp, Homo sapien
taaactgcaagactaacagtgagct

SEQ ID NO: 5447013 - DNA, 25 bp, Homo sapien
tcagtacctatccaccaggctggca

SEQ ID NO: 5447014 - DNA, 25 bp, Homo sapien
gtgctgaagttgagacactgctcta

SEQ ID NO: 5447015 - DNA, 25 bp, Homo sapien
tatgtgtttataagcccgttctgcc

SEQ ID NO: 5447016 - DNA, 25 bp, Homo sapien
caatcctgggctaacttttcaaaag

SEQ ID NO: 5447017 - DNA, 25 bp, Homo sapien
tgagccattgctaacacaacagcga

SEQ ID NO: 5447018 - DNA, 25 bp, Homo sapien
taaggcctaagtcatcggacactgg

SEQ ID NO: 5447019 - DNA, 25 bp, Homo sapien
aaacaatcatgcactgtatcaggcg

SEQ ID NO: 5447020 - DNA, 25 bp, Homo sapien
ccgcggaggctgttctgctaaactg

SEQ ID NO: 5447021 - DNA, 25 bp, Homo sapien
tggcggcctcggctaactctgtcag

SEQ ID NO: 5447022 - DNA, 25 bp, Homo sapien
ctaggaggccgggtcgcttattcaa

SEQ ID NO: 5447023 - DNA, 25 bp, Homo sapien
tgctaaactgtctggaccacgacga

SEQ ID NO: 5447024 - DNA, 25 bp, Homo sapien
caattcgtacgtggagaagtgggaa

SEQ ID NO: 5447025 - DNA, 25 bp, Homo sapien
aaacgcctccgtctctatataagga

SEQ ID NO: 5447026 - DNA, 25 bp, Homo sapien
caaacgcaacgaaaggtccatggac

SEQ ID NO: 5447027 - DNA, 25 bp, Homo sapien
ccatggacaatttgtgggccattta

SEQ ID NO: 5447028 - DNA, 25 bp, Homo sapien
ttgtgtcatgccctacgttggtata

SEQ ID NO: 5447029 - DNA, 25 bp, Homo sapien
gtcatgccctacgttggtataatca

SEQ ID NO: 5447030 - DNA, 25 bp, Homo sapien
tgtgccatcacaagcagatgtggca

SEQ ID NO: 5447031 - DNA, 25 bp, Homo sapien
gtatgtgccatcacaagcagatgtg

SEQ ID NO: 5447032 - DNA, 25 bp, Homo sapien
atgacattgacctctttggatctga

SEQ ID NO: 5447033 - DNA, 25 bp, Homo sapien
gatgatgacattgacctctttggat

SEQ ID NO: 5447034 - DNA, 25 bp, Homo sapien
tgatgacattgacctctttggatct

SEQ ID NO: 5447035 - DNA, 25 bp, Homo sapien
tgatgatgacattgacctctttgga

SEQ ID NO: 5447036 - DNA, 25 bp, Homo sapien
gaacgtcttgcacaatatgaatcaa

SEQ ID NO: 5447037 - DNA, 25 bp, Homo sapien
cgtcttgcacaatatgaatcaaaga

SEQ ID NO: 5447038 - DNA, 25 bp, Homo sapien
ggctaagggaagaacgtcttgcaca

SEQ ID NO: 5447039 - DNA, 25 bp, Homo sapien
gggaagaacgtcttgcacaatatga

SEQ ID NO: 5447040 - DNA, 25 bp, Homo sapien
tgatgagacagatatggcgaaatta

SEQ ID NO: 5447041 - DNA, 25 bp, Homo sapien
ctagatgtgaaaccttgggatgatg

SEQ ID NO: 5447042 - DNA, 25 bp, Homo sapien
ttgccaagtcttccatcttactaga

SEQ ID NO: 5447043 - DNA, 25 bp, Homo sapien
gacagatatggcgaaattagaggag

SEQ ID NO: 5447044 - DNA, 25 bp, Homo sapien
aacttcaaatacagtgtgtagttga

SEQ ID NO: 5447045 - DNA, 25 bp, Homo sapien
aagatctaaaatccatcctggatca

SEQ ID NO: 5447046 - DNA, 25 bp, Homo sapien
ccatggatgtggctgctttcaacaa

SEQ ID NO: 5447047 - DNA, 25 bp, Homo sapien
agcagatcactgcttttgaggacta

SEQ ID NO: 5447048 - DNA, 25 bp, Homo sapien
tggcgacggtatttgtggacactgt

SEQ ID NO: 5447049 - DNA, 25 bp, Homo sapien
tcccattgcaaccaataaaggctgt

SEQ ID NO: 5447050 - DNA, 25 bp, Homo sapien
gtcccaggaacatgagctgtcatat

SEQ ID NO: 5447051 - DNA, 25 bp, Homo sapien
cccaaatcattaactagaacagatg

SEQ ID NO: 5447052 - DNA, 25 bp, Homo sapien
taaaaatgtgtctagcaggttattg

SEQ ID NO: 5447053 - DNA, 25 bp, Homo sapien
gaaattaagtacacatgttgcattt

SEQ ID NO: 5447054 - DNA, 25 bp, Homo sapien
gataaccaacaattactttaattca

SEQ ID NO: 5447055 - DNA, 25 bp, Homo sapien
cataaagaaattaagtacacatgtt

SEQ ID NO: 5447056 - DNA, 25 bp, Homo sapien
aaaaattatgcggatccttcctaag

SEQ ID NO: 5447057 - DNA, 25 bp, Homo sapien
tgccacatcacaaggagtcaagagg

SEQ ID NO: 5447058 - DNA, 25 bp, Homo sapien
aaaatgtgatgcctatatagtgacc

SEQ ID NO: 5447059 - DNA, 25 bp, Homo sapien
gagtcggctctctatcttggaaaca

SEQ ID NO: 5447060 - DNA, 25 bp, Homo sapien
gcaggaccgccaattagagaagcca

SEQ ID NO: 5447061 - DNA, 25 bp, Homo sapien
taaacaggtgataaggagtccagca

SEQ ID NO: 5447062 - DNA, 25 bp, Homo sapien
cacagtgtcccggaagtacagggca

SEQ ID NO: 5447063 - DNA, 25 bp, Homo sapien
catggtgcctgatcaaagtgaggtc

SEQ ID NO: 5447064 - DNA, 25 bp, Homo sapien
agtcaggagcctccccttccaatgt

SEQ ID NO: 5447065 - DNA, 25 bp, Homo sapien
aggagcctccccttccaatgtcatt

SEQ ID NO: 5447066 - DNA, 25 bp, Homo sapien
gagcctccccttccaatgtcattat

SEQ ID NO: 5447067 - DNA, 25 bp, Homo sapien
aaagtcaggagcctccccttccaat

SEQ ID NO: 5447068 - DNA, 25 bp, Homo sapien
ttgaaggcaaccgtcttcttccgca

SEQ ID NO: 5447069 - DNA, 25 bp, Homo sapien
cctgttgaaggcaaccgtcttcttc

SEQ ID NO: 5447070 - DNA, 25 bp, Homo sapien
gaaggcaaccgtcttcttccgcatt

SEQ ID NO: 5447071 - DNA, 25 bp, Homo sapien
tgttgaaggcaaccgtcttcttccg

SEQ ID NO: 5447072 - DNA, 25 bp, Homo sapien
tcatccagcctctggcagctggatt

SEQ ID NO: 5447073 - DNA, 25 bp, Homo sapien
ttttggtacaatcagctcctgttcc

SEQ ID NO: 5447074 - DNA, 25 bp, Homo sapien
tcctgttccttcatcgatgatatag

SEQ ID NO: 5447075 - DNA, 25 bp, Homo sapien
catataagtgttttggtacaatcag

SEQ ID NO: 5447076 - DNA, 25 bp, Homo sapien
tgttccttcatcgatgatataggga

SEQ ID NO: 5447077 - DNA, 25 bp, Homo sapien
cagctggtagttagtcaaatgctgt

SEQ ID NO: 5447078 - DNA, 25 bp, Homo sapien
tcaggtccactgtaaatgtgtcagt

SEQ ID NO: 5447079 - DNA, 25 bp, Homo sapien
tctgcaggaatcctcatcaggtcca

SEQ ID NO: 5447080 - DNA, 25 bp, Homo sapien
gccagctggtagttagtcaaatgct

SEQ ID NO: 5447081 - DNA, 25 bp, Homo sapien
gtgaggagagaagctattgtcatgc

SEQ ID NO: 5447082 - DNA, 25 bp, Homo sapien
aagctattgtcatgcctgggtgtac

SEQ ID NO: 5447083 - DNA, 25 bp, Homo sapien
gagaagctattgtcatgcctgggtg

SEQ ID NO: 5447084 - DNA, 25 bp, Homo sapien
ggagagaagctattgtcatgcctgg

SEQ ID NO: 5447085 - DNA, 25 bp, Homo sapien
cttcccggttccagaatgaaatgga

SEQ ID NO: 5447086 - DNA, 25 bp, Homo sapien
gagggtggtgttcagaacggctgca

SEQ ID NO: 5447087 - DNA, 25 bp, Homo sapien
tgttcagaacggctgcattcctcat

SEQ ID NO: 5447088 - DNA, 25 bp, Homo sapien
tcccggttccagaatgaaatggagg

SEQ ID NO: 5447089 - DNA, 25 bp, Homo sapien
gatgttgggttttgaatgtggttct

SEQ ID NO: 5447090 - DNA, 25 bp, Homo sapien
atgttgggttttgaatgtggttctt

SEQ ID NO: 5447091 - DNA, 25 bp, Homo sapien
tgatgttgggttttgaatgtggttc

SEQ ID NO: 5447092 - DNA, 25 bp, Homo sapien
tgttgggttttgaatgtggttcttc

SEQ ID NO: 5447093 - DNA, 25 bp, Homo sapien
catggtataaggctcatcaggagat

SEQ ID NO: 5447094 - DNA, 25 bp, Homo sapien
gttcttcgaatgcatggtataaggc

SEQ ID NO: 5447095 - DNA, 25 bp, Homo sapien
gcagagatggaatgttcttcgaatg

SEQ ID NO: 5447096 - DNA, 25 bp, Homo sapien
gatggaatgttcttcgaatgcatgg

SEQ ID NO: 5447097 - DNA, 25 bp, Homo sapien
tggctgctgcgggaaagtgcgtggc

SEQ ID NO: 5447098 - DNA, 25 bp, Homo sapien
ctctctgaagttgccggtgcctgtg

SEQ ID NO: 5447099 - DNA, 25 bp, Homo sapien
ctgcgggaaagtgcgtggccaaagt

SEQ ID NO: 5447100 - DNA, 25 bp, Homo sapien
tgaatccttgtggtttaatgatttc

SEQ ID NO: 5447101 - DNA, 25 bp, Homo sapien
agtgatggtagaaaaccaatacttt

SEQ ID NO: 5447102 - DNA, 25 bp, Homo sapien
tttcagtgatggtagaaaaccaata

SEQ ID NO: 5447103 - DNA, 25 bp, Homo sapien
ttcagtgatggtagaaaaccaatac

SEQ ID NO: 5447104 - DNA, 25 bp, Homo sapien
tcagtgatggtagaaaaccaatact

SEQ ID NO: 5447105 - DNA, 25 bp, Homo sapien
cttctgaatcttggtcttaacagac

SEQ ID NO: 5447106 - DNA, 25 bp, Homo sapien
cagacatgtcaacatatttctctca

SEQ ID NO: 5447107 - DNA, 25 bp, Homo sapien
ccacccatgattgacggatcagtct

SEQ ID NO: 5447108 - DNA, 25 bp, Homo sapien
aatgcgcacaatcattccacccatg

SEQ ID NO: 5447109 - DNA, 25 bp, Homo sapien
tccaatttcaatacttggctttgac

SEQ ID NO: 5447110 - DNA, 25 bp, Homo sapien
gctcttcaggactgtttttaattca

SEQ ID NO: 5447111 - DNA, 25 bp, Homo sapien
ttggctttgacttaggaagctcttc

SEQ ID NO: 5447112 - DNA, 25 bp, Homo sapien
tgtttttaattcagagagtgtggct

SEQ ID NO: 5447113 - DNA, 25 bp, Homo sapien
cagtggtccctgtgcaaggtacctc

SEQ ID NO: 5447114 - DNA, 25 bp, Homo sapien
caaggtacctctccacggtggacac

SEQ ID NO: 5447115 - DNA, 25 bp, Homo sapien
ctctaaaggagatgcagtggtccct

SEQ ID NO: 5447116 - DNA, 25 bp, Homo sapien
tctaaaggagatgcagtggtccctg

SEQ ID NO: 5447117 - DNA, 25 bp, Homo sapien
ttgggtattgcttaagcaaccatat

SEQ ID NO: 5447118 - DNA, 25 bp, Homo sapien
tattgcttaagcaaccatattgagc

SEQ ID NO: 5447119 - DNA, 25 bp, Homo sapien
taagcaaccatattgagcaagcaaa

SEQ ID NO: 5447120 - DNA, 25 bp, Homo sapien
caaccatattgagcaagcaaattga

SEQ ID NO: 5447121 - DNA, 25 bp, Homo sapien
tactgtgtacctaaacaggaggcct

SEQ ID NO: 5447122 - DNA, 25 bp, Homo sapien
aacacttcacacagggattcaaaat

SEQ ID NO: 5447123 - DNA, 25 bp, Homo sapien
actgtgtacctaaacaggaggcctc

SEQ ID NO: 5447124 - DNA, 25 bp, Homo sapien
acttcacacagggattcaaaataga

SEQ ID NO: 5447125 - DNA, 25 bp, Homo sapien
tccactaggatctgaaccttcctgt

SEQ ID NO: 5447126 - DNA, 25 bp, Homo sapien
tcctgtcacccataaacaggccctt

SEQ ID NO: 5447127 - DNA, 25 bp, Homo sapien
gggatatgggctctattccaggcac

SEQ ID NO: 5447128 - DNA, 25 bp, Homo sapien
ctactgctggttcctccactaggat

SEQ ID NO: 5447129 - DNA, 25 bp, Homo sapien
tcatcttgggattctttcagtgaac

SEQ ID NO: 5447130 - DNA, 25 bp, Homo sapien
tcttgggattctttcagtgaacgca

SEQ ID NO: 5447131 - DNA, 25 bp, Homo sapien
cagtgaacgcaggtcccagtttttt

SEQ ID NO: 5447132 - DNA, 25 bp, Homo sapien
gattctttcagtgaacgcaggtccc

SEQ ID NO: 5447133 - DNA, 25 bp, Homo sapien
attgcatgtaataccgccggcggca

SEQ ID NO: 5447134 - DNA, 25 bp, Homo sapien
tctacacgacttggagccgcctgcg

SEQ ID NO: 5447135 - DNA, 25 bp, Homo sapien
gagccgcctgcgctaccgtatgcag

SEQ ID NO: 5447136 - DNA, 25 bp, Homo sapien
tggaaccgttcgcagcactctattg

SEQ ID NO: 5447137 - DNA, 25 bp, Homo sapien
tgcttcagcagaggctggactctcc

SEQ ID NO: 5447138 - DNA, 25 bp, Homo sapien
cagaggctggactctccttattttc

SEQ ID NO: 5447139 - DNA, 25 bp, Homo sapien
gaggctggactctccttattttcag

SEQ ID NO: 5447140 - DNA, 25 bp, Homo sapien
gctggactctccttattttcagttt

SEQ ID NO: 5447141 - DNA, 25 bp, Homo sapien
agacttcaagcacggagagacttct

SEQ ID NO: 5447142 - DNA, 25 bp, Homo sapien
agtcttcacttcggctcttccttcg

SEQ ID NO: 5447143 - DNA, 25 bp, Homo sapien
ctgagggtactggtgcctgcagact

SEQ ID NO: 5447144 - DNA, 25 bp, Homo sapien
gggaacttgctctagggcatcttgg

SEQ ID NO: 5447145 - DNA, 25 bp, Homo sapien
tcctctatcagagtaggttgtcctt

SEQ ID NO: 5447146 - DNA, 25 bp, Homo sapien
ttgacggagctcacagcttcaggag

SEQ ID NO: 5447147 - DNA, 25 bp, Homo sapien
taccctccatcgaagagtgatcctc

SEQ ID NO: 5447148 - DNA, 25 bp, Homo sapien
tactcatataccctccatcgaagag

SEQ ID NO: 5447149 - DNA, 25 bp, Homo sapien
caccttaaggaattctgcgggccgt

SEQ ID NO: 5447150 - DNA, 25 bp, Homo sapien
cgtgtaccagtggagtttgttgccc

SEQ ID NO: 5447151 - DNA, 25 bp, Homo sapien
gaggagcgtgggaagatctgtttcc

SEQ ID NO: 5447152 - DNA, 25 bp, Homo sapien
cagtcgatgtaagtccttagcagag

SEQ ID NO: 5447153 - DNA, 25 bp, Homo sapien
tctttggaaatgctacctttatact

SEQ ID NO: 5447154 - DNA, 25 bp, Homo sapien
ttatactgttggactaatgtctgaa

SEQ ID NO: 5447155 - DNA, 25 bp, Homo sapien
ttttccgattctttggaaatgctac

SEQ ID NO: 5447156 - DNA, 25 bp, Homo sapien
tatactgttggactaatgtctgaag

SEQ ID NO: 5447157 - DNA, 25 bp, Homo sapien
ctcggacggtctgggattcgggcgc

SEQ ID NO: 5447158 - DNA, 25 bp, Homo sapien
cacgttgccttggatgcctgcgtga

SEQ ID NO: 5447159 - DNA, 25 bp, Homo sapien
ggccgaagtcgcctatttctggctc

SEQ ID NO: 5447160 - DNA, 25 bp, Homo sapien
ccatcagggttgcaacgccacgttg

SEQ ID NO: 5447161 - DNA, 25 bp, Homo sapien
gctccgggccgggatcgaggtggcg

SEQ ID NO: 5447162 - DNA, 25 bp, Homo sapien
ctccgggccgggatcgaggtggcgg

SEQ ID NO: 5447163 - DNA, 25 bp, Homo sapien
cctgctgcgtgagaggtgtcggcgg

SEQ ID NO: 5447164 - DNA, 25 bp, Homo sapien
ctgcccctgctgcgtgagaggtgtc

SEQ ID NO: 5447165 - DNA, 25 bp, Homo sapien
ctgggtcagaggggccggcggacga

SEQ ID NO: 5447166 - DNA, 25 bp, Homo sapien
gcggtctgcggggtcggattgaggg

SEQ ID NO: 5447167 - DNA, 25 bp, Homo sapien
tctgcggggtcggattgagggccgg

SEQ ID NO: 5447168 - DNA, 25 bp, Homo sapien
tgcggggtcggattgagggccggga

SEQ ID NO: 5447169 - DNA, 25 bp, Homo sapien
ctgtccacacacccccttcccccag

SEQ ID NO: 5447170 - DNA, 25 bp, Homo sapien
tccacacacccccttcccccagtgc

SEQ ID NO: 5447171 - DNA, 25 bp, Homo sapien
taaatgtggtcgtgttacgccatcg

SEQ ID NO: 5447172 - DNA, 25 bp, Homo sapien
ccagcctcgggcgattatagtttat

SEQ ID NO: 5447173 - DNA, 25 bp, Homo sapien
ccgccgtgcaacagttgtgtaaatg

SEQ ID NO: 5447174 - DNA, 25 bp, Homo sapien
taatgattcttttactaccgccgtg

SEQ ID NO: 5447175 - DNA, 25 bp, Homo sapien
caaagtacttaactgggtatgacat

SEQ ID NO: 5447176 - DNA, 25 bp, Homo sapien
tggaaactcgggtgaattacgatgt

SEQ ID NO: 5447177 - DNA, 25 bp, Homo sapien
tttgtgaaaagacatgtctcgaaac

SEQ ID NO: 5447178 - DNA, 25 bp, Homo sapien
tgcctaagtcatctgggtagctcag

SEQ ID NO: 5447179 - DNA, 25 bp, Homo sapien
gataatagctattctaattgaagtg

SEQ ID NO: 5447180 - DNA, 25 bp, Homo sapien
ttttcgataatagctattctaattg

SEQ ID NO: 5447181 - DNA, 25 bp, Homo sapien
aatacctaatcagtaggattgctgg

SEQ ID NO: 5447182 - DNA, 25 bp, Homo sapien
tgactataataatttgtattcccac

SEQ ID NO: 5447183 - DNA, 25 bp, Homo sapien
ggcacattgggcgaccttggatata

SEQ ID NO: 5447184 - DNA, 25 bp, Homo sapien
gatatatccacataggctctgcagg

SEQ ID NO: 5447185 - DNA, 25 bp, Homo sapien
tggttgaacaatcggtgtcctcctg

SEQ ID NO: 5447186 - DNA, 25 bp, Homo sapien
gagattcctaatgagaggctccctg

SEQ ID NO: 5447187 - DNA, 25 bp, Homo sapien
actgtagaagttccaaggatataag

SEQ ID NO: 5447188 - DNA, 25 bp, Homo sapien
tagaactgtagaagttccaaggata

SEQ ID NO: 5447189 - DNA, 25 bp, Homo sapien
tagaagttccaaggatataagtcac

SEQ ID NO: 5447190 - DNA, 25 bp, Homo sapien
tatagaactgtagaagttccaagga

SEQ ID NO: 5447191 - DNA, 25 bp, Homo sapien
tgctggcatagagtacagcttcttt

SEQ ID NO: 5447192 - DNA, 25 bp, Homo sapien
tggcatagagtacagcttcttttcc

SEQ ID NO: 5447193 - DNA, 25 bp, Homo sapien
actgctggcatagagtacagcttct

SEQ ID NO: 5447194 - DNA, 25 bp, Homo sapien
gcatagagtacagcttcttttccag

SEQ ID NO: 5447195 - DNA, 25 bp, Homo sapien
aaactcccctccctatgttggatgg

SEQ ID NO: 5447196 - DNA, 25 bp, Homo sapien
gatgggtcctagaaagtccacgtcc

SEQ ID NO: 5447197 - DNA, 25 bp, Homo sapien
gagggacacagcaacatagctttag

SEQ ID NO: 5447198 - DNA, 25 bp, Homo sapien
ccgtcttagttgagtgctgccaaaa

SEQ ID NO: 5447199 - DNA, 25 bp, Homo sapien
agcaatcacttttggtgcctgattg

SEQ ID NO: 5447200 - DNA, 25 bp, Homo sapien
gtaaagcctgctattctcttccagc

SEQ ID NO: 5447201 - DNA, 25 bp, Homo sapien
cacttttggtgcctgattggcagtt

SEQ ID NO: 5447202 - DNA, 25 bp, Homo sapien
tccaatctcccagtaaagcctgcta

SEQ ID NO: 5447203 - DNA, 25 bp, Homo sapien
tcagctctccattatctggactgct

SEQ ID NO: 5447204 - DNA, 25 bp, Homo sapien
gacagtcggcatgctgtcagctctc

SEQ ID NO: 5447205 - DNA, 25 bp, Homo sapien
tcacaatctgacagtcggcatgctg

SEQ ID NO: 5447206 - DNA, 25 bp, Homo sapien
tgaaccaccgccactgagcaatcat

SEQ ID NO: 5447207 - DNA, 25 bp, Homo sapien
gagtaagactttggatatcctggtc

SEQ ID NO: 5447208 - DNA, 25 bp, Homo sapien
agagtaagactttggatatcctggt

SEQ ID NO: 5447209 - DNA, 25 bp, Homo sapien
tgtaggtccagaaataggcagagtg

SEQ ID NO: 5447210 - DNA, 25 bp, Homo sapien
attttcatgggccagaaatggaaac

SEQ ID NO: 5447211 - DNA, 25 bp, Homo sapien
tacttccccatcaagtggtgttgtg

SEQ ID NO: 5447212 - DNA, 25 bp, Homo sapien
taagctggactgcagtataggcctg

SEQ ID NO: 5447213 - DNA, 25 bp, Homo sapien
ttgttgcttcatgtccataccgacc

SEQ ID NO: 5447214 - DNA, 25 bp, Homo sapien
gttgcttcatgtccataccgaccca

SEQ ID NO: 5447215 - DNA, 25 bp, Homo sapien
ttgcttcatgtccataccgacccat

SEQ ID NO: 5447216 - DNA, 25 bp, Homo sapien
tttccttagtattgttgcttcatgt

SEQ ID NO: 5447217 - DNA, 25 bp, Homo sapien
aaatgagtatccctgaggttgataa

SEQ ID NO: 5447218 - DNA, 25 bp, Homo sapien
tgagtatccctgaggttgataattc

SEQ ID NO: 5447219 - DNA, 25 bp, Homo sapien
gtatccctgaggttgataattccca

SEQ ID NO: 5447220 - DNA, 25 bp, Homo sapien
tccctgaggttgataattcccacca

SEQ ID NO: 5447221 - DNA, 25 bp, Homo sapien
aaccagcccacgagtgcatagttac

SEQ ID NO: 5447222 - DNA, 25 bp, Homo sapien
gcccacgagtgcatagttactgcca

SEQ ID NO: 5447223 - DNA, 25 bp, Homo sapien
cacgagtgcatagttactgccagca

SEQ ID NO: 5447224 - DNA, 25 bp, Homo sapien
ccagcccacgagtgcatagttactg

SEQ ID NO: 5447225 - DNA, 25 bp, Homo sapien
ttctcgctgggccagaatttgatga

SEQ ID NO: 5447226 - DNA, 25 bp, Homo sapien
ctcgctgggccagaatttgatgaca

SEQ ID NO: 5447227 - DNA, 25 bp, Homo sapien
ccatttctcgctgggccagaatttg

SEQ ID NO: 5447228 - DNA, 25 bp, Homo sapien
gcccatttctcgctgggccagaatt

SEQ ID NO: 5447229 - DNA, 25 bp, Homo sapien
atggcaggcttgacaaatgccaggc

SEQ ID NO: 5447230 - DNA, 25 bp, Homo sapien
tgatgagcagtgcagcgcaaggaac

SEQ ID NO: 5447231 - DNA, 25 bp, Homo sapien
ttgacaaatgccaggcacgtcataa

SEQ ID NO: 5447232 - DNA, 25 bp, Homo sapien
gtgcagcgcaaggaactcccagggt

SEQ ID NO: 5447233 - DNA, 25 bp, Homo sapien
acaggacacagaccaccaccttgaa

SEQ ID NO: 5447234 - DNA, 25 bp, Homo sapien
tgcagacaggacacagaccaccacc

SEQ ID NO: 5447235 - DNA, 25 bp, Homo sapien
cagacaggacacagaccaccacctt

SEQ ID NO: 5447236 - DNA, 25 bp, Homo sapien
agacaggacacagaccaccaccttg

SEQ ID NO: 5447237 - DNA, 25 bp, Homo sapien
ggtcattccgaaagatctttggtag

SEQ ID NO: 5447238 - DNA, 25 bp, Homo sapien
cattccgaaagatctttggtagata

SEQ ID NO: 5447239 - DNA, 25 bp, Homo sapien
gtcattccgaaagatctttggtaga

SEQ ID NO: 5447240 - DNA, 25 bp, Homo sapien
attccgaaagatctttggtagatac

SEQ ID NO: 5447241 - DNA, 25 bp, Homo sapien
acccaaaggactgcaagttcatcaa

SEQ ID NO: 5447242 - DNA, 25 bp, Homo sapien
gaaactaagggttgcatggaagtag

SEQ ID NO: 5447243 - DNA, 25 bp, Homo sapien
ttgcatggaagtagacggatccaat

SEQ ID NO: 5447244 - DNA, 25 bp, Homo sapien
cacatcagaacccaaaggactgcaa

SEQ ID NO: 5447245 - DNA, 25 bp, Homo sapien
gattaagtagatgccgctgttgaag

SEQ ID NO: 5447246 - DNA, 25 bp, Homo sapien
aagtagatgccgctgttgaagcatg

SEQ ID NO: 5447247 - DNA, 25 bp, Homo sapien
cagattaagtagatgccgctgttga

SEQ ID NO: 5447248 - DNA, 25 bp, Homo sapien
gatgccgctgttgaagcatgttgca

SEQ ID NO: 5447249 - DNA, 25 bp, Homo sapien
ctgatcatgttatagaactcggcga

SEQ ID NO: 5447250 - DNA, 25 bp, Homo sapien
attgctgatcatgttatagaactcg

SEQ ID NO: 5447251 - DNA, 25 bp, Homo sapien
catgttatagaactcggcgacagca

SEQ ID NO: 5447252 - DNA, 25 bp, Homo sapien
gatcatgttatagaactcggcgaca

SEQ ID NO: 5447253 - DNA, 25 bp, Homo sapien
cacatgagtacttgtctaaaacatg

SEQ ID NO: 5447254 - DNA, 25 bp, Homo sapien
gtcctcgagctttttgcccatacac

SEQ ID NO: 5447255 - DNA, 25 bp, Homo sapien
caaaatcctttgttggaatgcttta

SEQ ID NO: 5447256 - DNA, 25 bp, Homo sapien
acaaatacagtcctcgagctttttg

SEQ ID NO: 5447257 - DNA, 25 bp, Homo sapien
tatcctgctaagcttctgccactgc

SEQ ID NO: 5447258 - DNA, 25 bp, Homo sapien
ctatcctgctaagcttctgccactg

SEQ ID NO: 5447259 - DNA, 25 bp, Homo sapien
ctctcctatcctgctaagcttctgc

SEQ ID NO: 5447260 - DNA, 25 bp, Homo sapien
tcctatcctgctaagcttctgccac

SEQ ID NO: 5447261 - DNA, 25 bp, Homo sapien
gacctctttggctggacgaagcatt

SEQ ID NO: 5447262 - DNA, 25 bp, Homo sapien
cgacctctttggctggacgaagcat

SEQ ID NO: 5447263 - DNA, 25 bp, Homo sapien
ccacctccacgaccacgaccaaagt

SEQ ID NO: 5447264 - DNA, 25 bp, Homo sapien
ctctttggctggacgaagcattagc

SEQ ID NO: 5447265 - DNA, 25 bp, Homo sapien
cccctcctccacagtgtcatatatg

SEQ ID NO: 5447266 - DNA, 25 bp, Homo sapien
ccctcctccacagtgtcatatatga

SEQ ID NO: 5447267 - DNA, 25 bp, Homo sapien
tgtgaccaaggtaggaaacactgcc

SEQ ID NO: 5447268 - DNA, 25 bp, Homo sapien
gacaaataagctatggtcactggac

SEQ ID NO: 5447269 - DNA, 25 bp, Homo sapien
cctttggagcacctagatgaggcct

SEQ ID NO: 5447270 - DNA, 25 bp, Homo sapien
cctgaggtgactagaaccactgggc

SEQ ID NO: 5447271 - DNA, 25 bp, Homo sapien
gctcgggcgcgctctcggggggcgg

SEQ ID NO: 5447272 - DNA, 25 bp, Homo sapien
taaaagggatctctgccccagtaat

SEQ ID NO: 5447273 - DNA, 25 bp, Homo sapien
tccatagtcgtagatgaggtcagaa

SEQ ID NO: 5447274 - DNA, 25 bp, Homo sapien
cactgaacttttcctaatctgtagc

SEQ ID NO: 5447275 - DNA, 25 bp, Homo sapien
aatctgtagctgtagttctctgtag

SEQ ID NO: 5447276 - DNA, 25 bp, Homo sapien
ccacttaggaatatcattgtcaaac

SEQ ID NO: 5447277 - DNA, 25 bp, Homo sapien
acttaggaatatcattgtcaaacag

SEQ ID NO: 5447278 - DNA, 25 bp, Homo sapien
aagaccacttaggaatatcattgtc

SEQ ID NO: 5447279 - DNA, 25 bp, Homo sapien
gaccacttaggaatatcattgtcaa

SEQ ID NO: 5447280 - DNA, 25 bp, Homo sapien
aagtgaatgccaagggcatagtggc

SEQ ID NO: 5447281 - DNA, 25 bp, Homo sapien
ggagaaagacgcagactccacagga

SEQ ID NO: 5447282 - DNA, 25 bp, Homo sapien
ccttcagtgtgtggaagtgaatgcc

SEQ ID NO: 5447283 - DNA, 25 bp, Homo sapien
gctttagactttgaaaggtgtggga

SEQ ID NO: 5447284 - DNA, 25 bp, Homo sapien
aactagcagcccatcatgctcactg

SEQ ID NO: 5447285 - DNA, 25 bp, Homo sapien
ttctctccaactagcagcccatcat

SEQ ID NO: 5447286 - DNA, 25 bp, Homo sapien
tgaatccagattggcaggccttttg

SEQ ID NO: 5447287 - DNA, 25 bp, Homo sapien
tctccaactagcagcccatcatgct

SEQ ID NO: 5447288 - DNA, 25 bp, Homo sapien
ttagtccgaaggaattagaggagac

SEQ ID NO: 5447289 - DNA, 25 bp, Homo sapien
agagagctggtcacacactctgggc

SEQ ID NO: 5447290 - DNA, 25 bp, Homo sapien
ttagaggagactatgtgaacattgc

SEQ ID NO: 5447291 - DNA, 25 bp, Homo sapien
gtttatgatgctgctaactcgaagg

SEQ ID NO: 5447292 - DNA, 25 bp, Homo sapien
tctgaggctctcccttattactgtt

SEQ ID NO: 5447293 - DNA, 25 bp, Homo sapien
gaggctctcccttattactgttcat

SEQ ID NO: 5447294 - DNA, 25 bp, Homo sapien
tgaggctctcccttattactgttca

SEQ ID NO: 5447295 - DNA, 25 bp, Homo sapien
ctgaggctctcccttattactgttc

SEQ ID NO: 5447296 - DNA, 25 bp, Homo sapien
ttatccaccgttgatgaatcaccct

SEQ ID NO: 5447297 - DNA, 25 bp, Homo sapien
ccgttgatgaatcaccctctctcat

SEQ ID NO: 5447298 - DNA, 25 bp, Homo sapien
atccaccgttgatgaatcaccctct

SEQ ID NO: 5447299 - DNA, 25 bp, Homo sapien
ctgtgtgagggatccctggttcgct

SEQ ID NO: 5447300 - DNA, 25 bp, Homo sapien
tagagtagtaccctgagttttgaag

SEQ ID NO: 5447301 - DNA, 25 bp, Homo sapien
caggcccatgtacccgtaaaggata

SEQ ID NO: 5447302 - DNA, 25 bp, Homo sapien
ttttaagttgcacatgccaggccca

SEQ ID NO: 5447303 - DNA, 25 bp, Homo sapien
tgttttgtattagccagcctcctta

SEQ ID NO: 5447304 - DNA, 25 bp, Homo sapien
aaggcccaagaatcctgccaccatg

SEQ ID NO: 5447305 - DNA, 25 bp, Homo sapien
caaactgcaaggcccaagaatcctg

SEQ ID NO: 5447306 - DNA, 25 bp, Homo sapien
ctcaaactgcaaggcccaagaatcc

SEQ ID NO: 5447307 - DNA, 25 bp, Homo sapien
actgcaaggcccaagaatcctgcca

SEQ ID NO: 5447308 - DNA, 25 bp, Homo sapien
cccacttgaagcctctgtagaaatg

SEQ ID NO: 5447309 - DNA, 25 bp, Homo sapien
tctaaaacctacatgattttgtctt

SEQ ID NO: 5447310 - DNA, 25 bp, Homo sapien
ttgaatacccacttgaagcctctgt

SEQ ID NO: 5447311 - DNA, 25 bp, Homo sapien
aatgtctcgtcctccggttgtattt

SEQ ID NO: 5447312 - DNA, 25 bp, Homo sapien
ttgtgtgcacacaggcacagacaca

SEQ ID NO: 5447313 - DNA, 25 bp, Homo sapien
tgtgtgcacacaggcacagacacac

SEQ ID NO: 5447314 - DNA, 25 bp, Homo sapien
cattttgcctttgtagcgggaacct

SEQ ID NO: 5447315 - DNA, 25 bp, Homo sapien
ctgcaaacaatgtgtcttccaactt

SEQ ID NO: 5447316 - DNA, 25 bp, Homo sapien
aactgcaaacaatgtgtcttccaac

SEQ ID NO: 5447317 - DNA, 25 bp, Homo sapien
aacaccaaacttcattttgcctttg

SEQ ID NO: 5447318 - DNA, 25 bp, Homo sapien
tcattccaggcccattttccaggat

SEQ ID NO: 5447319 - DNA, 25 bp, Homo sapien
aggcccattttccaggattggaaag

SEQ ID NO: 5447320 - DNA, 25 bp, Homo sapien
ccaggcccattttccaggattggaa

SEQ ID NO: 5447321 - DNA, 25 bp, Homo sapien
attccaggcccattttccaggattg

SEQ ID NO: 5447322 - DNA, 25 bp, Homo sapien
ccttgtggtgtgacttggatgttgc

SEQ ID NO: 5447323 - DNA, 25 bp, Homo sapien
tcttgtgtcatgtagaaccttctcc

SEQ ID NO: 5447324 - DNA, 25 bp, Homo sapien
cttctcctgtctggaacaatgtggg

SEQ ID NO: 5447325 - DNA, 25 bp, Homo sapien
ctgggtgtgcttccgatatcttcat

SEQ ID NO: 5447326 - DNA, 25 bp, Homo sapien
taaatatattgtgtgccacttgccc

SEQ ID NO: 5447327 - DNA, 25 bp, Homo sapien
cacttgcccattaagctgtcacaga

SEQ ID NO: 5447328 - DNA, 25 bp, Homo sapien
gtataaccataagtgaacagctgca

SEQ ID NO: 5447329 - DNA, 25 bp, Homo sapien
tcgtcttaaaagtagccagggtgta

SEQ ID NO: 5447330 - DNA, 25 bp, Homo sapien
aggactttgaccagacttagatctt

SEQ ID NO: 5447331 - DNA, 25 bp, Homo sapien
ggactttgaccagacttagatcttc

SEQ ID NO: 5447332 - DNA, 25 bp, Homo sapien
ctctatggactgtgaagctggttag

SEQ ID NO: 5447333 - DNA, 25 bp, Homo sapien
tatggactgtgaagctggttagcac

SEQ ID NO: 5447334 - DNA, 25 bp, Homo sapien
aagctggttagcacaggggaagcta

SEQ ID NO: 5447335 - DNA, 25 bp, Homo sapien
tggactgtgaagctggttagcacag

SEQ ID NO: 5447336 - DNA, 25 bp, Homo sapien
gcaattaagctaagtaaataaaggc

SEQ ID NO: 5447337 - DNA, 25 bp, Homo sapien
cgtagcatctaaaatgcaattaagc

SEQ ID NO: 5447338 - DNA, 25 bp, Homo sapien
atctaaaatgcaattaagctaagta

SEQ ID NO: 5447339 - DNA, 25 bp, Homo sapien
taaaatgcaattaagctaagtaaat

SEQ ID NO: 5447340 - DNA, 25 bp, Homo sapien
ggtcctagtgccaccaatctcataa

SEQ ID NO: 5447341 - DNA, 25 bp, Homo sapien
gggatttaagtaagcaacgccgcat

SEQ ID NO: 5447342 - DNA, 25 bp, Homo sapien
tcataataggctccatcgctggtgc

SEQ ID NO: 5447343 - DNA, 25 bp, Homo sapien
ggttggttcatatgactctcttccc

SEQ ID NO: 5447344 - DNA, 25 bp, Homo sapien
ccttcctgtgccctgtaactctgat

SEQ ID NO: 5447345 - DNA, 25 bp, Homo sapien
tgtgccctgtaactctgataatcac

SEQ ID NO: 5447346 - DNA, 25 bp, Homo sapien
ggacctgtactgctgagctgagtca

SEQ ID NO: 5447347 - DNA, 25 bp, Homo sapien
gttgttgctgtgtagggacctgtac

SEQ ID NO: 5447348 - DNA, 25 bp, Homo sapien
ttgctcttgttgattcactttcccc

SEQ ID NO: 5447349 - DNA, 25 bp, Homo sapien
cttgctcttgttgattcactttccc

SEQ ID NO: 5447350 - DNA, 25 bp, Homo sapien
ggaaaagaacatgcagttttactca

SEQ ID NO: 5447351 - DNA, 25 bp, Homo sapien
ttaggaaaagaacatgcagttttac

SEQ ID NO: 5447352 - DNA, 25 bp, Homo sapien
tttaggaaaagaacatgcagtttta

SEQ ID NO: 5447353 - DNA, 25 bp, Homo sapien
taggaaaagaacatgcagttttact

SEQ ID NO: 5447354 - DNA, 25 bp, Homo sapien
ttcatgacaccaaatccattgctag

SEQ ID NO: 5447355 - DNA, 25 bp, Homo sapien
tgctaggtttagctcctggtccctt

SEQ ID NO: 5447356 - DNA, 25 bp, Homo sapien
gcaagattcatgttatccgtcttac

SEQ ID NO: 5447357 - DNA, 25 bp, Homo sapien
catgttatccgtcttacaactttga

SEQ ID NO: 5447358 - DNA, 25 bp, Homo sapien
tctctaggactaggtgtacgtttat

SEQ ID NO: 5447359 - DNA, 25 bp, Homo sapien
gggaagtaccacaaacatagagcag

SEQ ID NO: 5447360 - DNA, 25 bp, Homo sapien
gctttctgagtaataggtgctacgc

SEQ ID NO: 5447361 - DNA, 25 bp, Homo sapien
tgctacgcaggtaggcgggctttct

SEQ ID NO: 5447362 - DNA, 25 bp, Homo sapien
ggaggaaactcagattacttggtat

SEQ ID NO: 5447363 - DNA, 25 bp, Homo sapien
aatggctctttcagctcggaggaag

SEQ ID NO: 5447364 - DNA, 25 bp, Homo sapien
ggtagcatccctctagtcattggca

SEQ ID NO: 5447365 - DNA, 25 bp, Homo sapien
cctggcttcataggacacaggtagc

SEQ ID NO: 5447366 - DNA, 25 bp, Homo sapien
ggcaaggcaatttgatcaacaaggg

SEQ ID NO: 5447367 - DNA, 25 bp, Homo sapien
caaggcaatttgatcaacaagggca

SEQ ID NO: 5447368 - DNA, 25 bp, Homo sapien
aggcaatttgatcaacaagggcaga

SEQ ID NO: 5447369 - DNA, 25 bp, Homo sapien
ttgggcaaggcaatttgatcaacaa

SEQ ID NO: 5447370 - DNA, 25 bp, Homo sapien
gaagaatggtcaaccttgttcccca

SEQ ID NO: 5447371 - DNA, 25 bp, Homo sapien
tcatttcagcaggaaccattttggg

SEQ ID NO: 5447372 - DNA, 25 bp, Homo sapien
ggcgtttctagattgaaggcatcca

SEQ ID NO: 5447373 - DNA, 25 bp, Homo sapien
cagtccctcctgataactgggtagg

SEQ ID NO: 5447374 - DNA, 25 bp, Homo sapien
tggttttgagtttgtgaatccttgt

SEQ ID NO: 5447375 - DNA, 25 bp, Homo sapien
catagactatcctggttggttttga

SEQ ID NO: 5447376 - DNA, 25 bp, Homo sapien
tgaatccttgtttcaaatcgacaaa

SEQ ID NO: 5447377 - DNA, 25 bp, Homo sapien
taggtcccgtcttatctgttgtagc

SEQ ID NO: 5447378 - DNA, 25 bp, Homo sapien
ggtgtatatagcttgcaacttgtct

SEQ ID NO: 5447379 - DNA, 25 bp, Homo sapien
gggaggtgtatatagcttgcaactt

SEQ ID NO: 5447380 - DNA, 25 bp, Homo sapien
tatagcttgcaacttgtctttgtat

SEQ ID NO: 5447381 - DNA, 25 bp, Homo sapien
ctgggaggtgtatatagcttgcaac

SEQ ID NO: 5447382 - DNA, 25 bp, Homo sapien
taggaacattgttgcacaggaacag

SEQ ID NO: 5447383 - DNA, 25 bp, Homo sapien
tggctcccacacatcggaatgaaag

SEQ ID NO: 5447384 - DNA, 25 bp, Homo sapien
tgtggctacaatctgcagtcttctc

SEQ ID NO: 5447385 - DNA, 25 bp, Homo sapien
aaacagctgtggctacaatctgcag

SEQ ID NO: 5447386 - DNA, 25 bp, Homo sapien
cgagacattctttcaggtacaggta

SEQ ID NO: 5447387 - DNA, 25 bp, Homo sapien
tggtaacatgagttgctgtcctcag

SEQ ID NO: 5447388 - DNA, 25 bp, Homo sapien
tcagtttgttgaccccgagacattc

SEQ ID NO: 5447389 - DNA, 25 bp, Homo sapien
ttcaggtacaggtataggcttggag

SEQ ID NO: 5447390 - DNA, 25 bp, Homo sapien
tacatctgctgttcctttagaactc

SEQ ID NO: 5447391 - DNA, 25 bp, Homo sapien
aacttttaattatcaggtatgacat

SEQ ID NO: 5447392 - DNA, 25 bp, Homo sapien
tactgaatggagacgctattactga

SEQ ID NO: 5447393 - DNA, 25 bp, Homo sapien
tttccattggtccagttggccttac

SEQ ID NO: 5447394 - DNA, 25 bp, Homo sapien
cagtagaacaccatgctgtgtcctt

SEQ ID NO: 5447395 - DNA, 25 bp, Homo sapien
aattgttatttgacctagcagcagc

SEQ ID NO: 5447396 - DNA, 25 bp, Homo sapien
catttgacagtagaacaccatgctg

SEQ ID NO: 5447397 - DNA, 25 bp, Homo sapien
ctttgtaaatggagtgtcacagggc

SEQ ID NO: 5447398 - DNA, 25 bp, Homo sapien
tctgtgaccaggtggttagcatgaa

SEQ ID NO: 5447399 - DNA, 25 bp, Homo sapien
ctgcaataggaagttctctgtgacc

SEQ ID NO: 5447400 - DNA, 25 bp, Homo sapien
gacgcatgtcgatggtggcctcaaa

SEQ ID NO: 5447401 - DNA, 25 bp, Homo sapien
aagttggtcttcagcatgcggcagg

SEQ ID NO: 5447402 - DNA, 25 bp, Homo sapien
agaggcccctacaaatgtccccatg

SEQ ID NO: 5447403 - DNA, 25 bp, Homo sapien
catcattggcatagctttttgcaca

SEQ ID NO: 5447404 - DNA, 25 bp, Homo sapien
tggagaagaccatgtatatagggac

SEQ ID NO: 5447405 - DNA, 25 bp, Homo sapien
ctgtggcatcattggcatagctttt

SEQ ID NO: 5447406 - DNA, 25 bp, Homo sapien
ggtgttctcgaatgagaaatctggg

SEQ ID NO: 5447407 - DNA, 25 bp, Homo sapien
gcaggtataatctgtgaagtccaca

SEQ ID NO: 5447408 - DNA, 25 bp, Homo sapien
cacaggacttggagtcaacttcccc

SEQ ID NO: 5447409 - DNA, 25 bp, Homo sapien
cagctgcacgatgacacaattcatt

SEQ ID NO: 5447410 - DNA, 25 bp, Homo sapien
tggatggtaaattcaccggcctttg

SEQ ID NO: 5447411 - DNA, 25 bp, Homo sapien
aggagcagagtggatggtaaattca

SEQ ID NO: 5447412 - DNA, 25 bp, Homo sapien
gtcacagcgtagtgtatactgaatg

SEQ ID NO: 5447413 - DNA, 25 bp, Homo sapien
atgtcacagcgtagtgtatactgaa

SEQ ID NO: 5447414 - DNA, 25 bp, Homo sapien
ctgataataagtctcatacagaact

SEQ ID NO: 5447415 - DNA, 25 bp, Homo sapien
gggactgaatccttacaagatacga

SEQ ID NO: 5447416 - DNA, 25 bp, Homo sapien
tacgaccaccacactggagagcatt

SEQ ID NO: 5447417 - DNA, 25 bp, Homo sapien
tgtcaaagacactacttgatgtggg

SEQ ID NO: 5447418 - DNA, 25 bp, Homo sapien
gccatagggaaatttccctggcttc

SEQ ID NO: 5447419 - DNA, 25 bp, Homo sapien
cagggaggtccctgttttgaattct

SEQ ID NO: 5447420 - DNA, 25 bp, Homo sapien
aggtccctgttttgaattctccaca

SEQ ID NO: 5447421 - DNA, 25 bp, Homo sapien
ggaggtccctgttttgaattctcca

SEQ ID NO: 5447422 - DNA, 25 bp, Homo sapien
cctgttttgaattctccacagcagc

SEQ ID NO: 5447423 - DNA, 25 bp, Homo sapien
tttcttcctacagcgcccctgaaga

SEQ ID NO: 5447424 - DNA, 25 bp, Homo sapien
gaaggttgtttctgagggtcctgaa

SEQ ID NO: 5447425 - DNA, 25 bp, Homo sapien
tggcctgcgcatggtgaggcacacc

SEQ ID NO: 5447426 - DNA, 25 bp, Homo sapien
ggcacaccctttggattcacctggt

SEQ ID NO: 5447427 - DNA, 25 bp, Homo sapien
gaatagtttggtatgtgacattaaa

SEQ ID NO: 5447428 - DNA, 25 bp, Homo sapien
ttaatgaatagtttggtatgtgaca

SEQ ID NO: 5447429 - DNA, 25 bp, Homo sapien
tagtttggtatgtgacattaaatgt

SEQ ID NO: 5447430 - DNA, 25 bp, Homo sapien
tttggtatgtgacattaaatgttac

SEQ ID NO: 5447431 - DNA, 25 bp, Homo sapien
gttgagacacttcagacagcggtat

SEQ ID NO: 5447432 - DNA, 25 bp, Homo sapien
aaacacatctggcagatgtcaaagt

SEQ ID NO: 5447433 - DNA, 25 bp, Homo sapien
caggatgagacttctgatgggactt

SEQ ID NO: 5447434 - DNA, 25 bp, Homo sapien
gaatgcagtgctcaatgacaggatg

SEQ ID NO: 5447435 - DNA, 25 bp, Homo sapien
ccagttaaaatagaagcacagctta

SEQ ID NO: 5447436 - DNA, 25 bp, Homo sapien
gttaaaatagaagcacagcttacgt

SEQ ID NO: 5447437 - DNA, 25 bp, Homo sapien
ctgccagttaaaatagaagcacagc

SEQ ID NO: 5447438 - DNA, 25 bp, Homo sapien
taaaatagaagcacagcttacgtca

SEQ ID NO: 5447439 - DNA, 25 bp, Homo sapien
ttcagatgtgtaaggaggaccccaa

SEQ ID NO: 5447440 - DNA, 25 bp, Homo sapien
agaaccatatggagaatgataatcc

SEQ ID NO: 5447441 - DNA, 25 bp, Homo sapien
aagggatgcagctccaactgtagaa

SEQ ID NO: 5447442 - DNA, 25 bp, Homo sapien
ggatgcagctccaactgtagaacca

SEQ ID NO: 5447443 - DNA, 25 bp, Homo sapien
cagggtgagtgaccctttcagcagc

SEQ ID NO: 5447444 - DNA, 25 bp, Homo sapien
gatgggaggctcagattggacccaa

SEQ ID NO: 5447445 - DNA, 25 bp, Homo sapien
tttcagcagctgataaccggtggca

SEQ ID NO: 5447446 - DNA, 25 bp, Homo sapien
tcagattggacccaagacaggaatt

SEQ ID NO: 5447447 - DNA, 25 bp, Homo sapien
cccttggaaacagctgcgggtggca

SEQ ID NO: 5447448 - DNA, 25 bp, Homo sapien
ttggaaacagctgcgggtggcactt

SEQ ID NO: 5447449 - DNA, 25 bp, Homo sapien
aacagctgcgggtggcactttccac

SEQ ID NO: 5447450 - DNA, 25 bp, Homo sapien
aaacagctgcgggtggcactttcca

SEQ ID NO: 5447451 - DNA, 25 bp, Homo sapien
tcaagaagttcaatctgtattcaat

SEQ ID NO: 5447452 - DNA, 25 bp, Homo sapien
gtagatcaagaagttcaatctgtat

SEQ ID NO: 5447453 - DNA, 25 bp, Homo sapien
gatcaagaagttcaatctgtattca

SEQ ID NO: 5447454 - DNA, 25 bp, Homo sapien
caagaagttcaatctgtattcaatc

SEQ ID NO: 5447455 - DNA, 25 bp, Homo sapien
agtggtttccaactttcagccacag

SEQ ID NO: 5447456 - DNA, 25 bp, Homo sapien
tatttcaacggctcaatctgtgcca

SEQ ID NO: 5447457 - DNA, 25 bp, Homo sapien
taaggcactaagaaccttttgtgac

SEQ ID NO: 5447458 - DNA, 25 bp, Homo sapien
cagccacagtcaccataaggcgttc

SEQ ID NO: 5447459 - DNA, 25 bp, Homo sapien
ttctcaaaacccttcgagtcatgcg

SEQ ID NO: 5447460 - DNA, 25 bp, Homo sapien
agaatcatagcctcccctgctattt

SEQ ID NO: 5447461 - DNA, 25 bp, Homo sapien
cgagtcatgcgtggcccagaatcat

SEQ ID NO: 5447462 - DNA, 25 bp, Homo sapien
gatctgttagtagttttctcaaaac

SEQ ID NO: 5447463 - DNA, 25 bp, Homo sapien
gtatctttgaagagtacttgctttg

SEQ ID NO: 5447464 - DNA, 25 bp, Homo sapien
ctagacatgtaggaggaacaatctt

SEQ ID NO: 5447465 - DNA, 25 bp, Homo sapien
tctttaaattgaatacttgcaatgt

SEQ ID NO: 5447466 - DNA, 25 bp, Homo sapien
ctttgaagtaacagtctctttgtgg

SEQ ID NO: 5447467 - DNA, 25 bp, Homo sapien
gccgcaggcataagctggagaaaac

SEQ ID NO: 5447468 - DNA, 25 bp, Homo sapien
cggccgcaggcataagctggagaaa

SEQ ID NO: 5447469 - DNA, 25 bp, Homo sapien
aagagggctgtctcctgagagggtt

SEQ ID NO: 5447470 - DNA, 25 bp, Homo sapien
agagggttattagggcagcggccgc

SEQ ID NO: 5447471 - DNA, 25 bp, Homo sapien
ggccttctgaaacagctcttggagt

SEQ ID NO: 5447472 - DNA, 25 bp, Homo sapien
tgagttccggagctctgggatgcac

SEQ ID NO: 5447473 - DNA, 25 bp, Homo sapien
gatgcacttgtcctgggttttcctc

SEQ ID NO: 5447474 - DNA, 25 bp, Homo sapien
tgtacattgtcgtgagaaggctcag

SEQ ID NO: 5447475 - DNA, 25 bp, Homo sapien
acttggacgcagtaggacctgctga

SEQ ID NO: 5447476 - DNA, 25 bp, Homo sapien
cacagaaagggagtgcttgcgagct

SEQ ID NO: 5447477 - DNA, 25 bp, Homo sapien
gacgcagtaggacctgctgaatcag

SEQ ID NO: 5447478 - DNA, 25 bp, Homo sapien
ttcccagaaacttggacgcagtagg

SEQ ID NO: 5447479 - DNA, 25 bp, Homo sapien
ggaattctcaatactattaagagca

SEQ ID NO: 5447480 - DNA, 25 bp, Homo sapien
ctgattgtaatttgaaggctgttct

SEQ ID NO: 5447481 - DNA, 25 bp, Homo sapien
tttgcactgattgtaatttgaaggc

SEQ ID NO: 5447482 - DNA, 25 bp, Homo sapien
tctataaatggaattctcaatacta

SEQ ID NO: 5447483 - DNA, 25 bp, Homo sapien
ctgtggaaagtgactgcaaggtgtt

SEQ ID NO: 5447484 - DNA, 25 bp, Homo sapien
tggaaagtgactgcaaggtgttcaa

SEQ ID NO: 5447485 - DNA, 25 bp, Homo sapien
gaaagtgactgcaaggtgttcaagg

SEQ ID NO: 5447486 - DNA, 25 bp, Homo sapien
aaagtgactgcaaggtgttcaaggt

SEQ ID NO: 5447487 - DNA, 25 bp, Homo sapien
ctttgtagttactgttgcagccccc

SEQ ID NO: 5447488 - DNA, 25 bp, Homo sapien
actttgtagttactgttgcagcccc

SEQ ID NO: 5447489 - DNA, 25 bp, Homo sapien
tttgtagttactgttgcagccccct

SEQ ID NO: 5447490 - DNA, 25 bp, Homo sapien
ttgtagttactgttgcagccccctg

SEQ ID NO: 5447491 - DNA, 25 bp, Homo sapien
caggtaggaagaaggcgcaatcttt

SEQ ID NO: 5447492 - DNA, 25 bp, Homo sapien
aagcaggtaggaagaaggcgcaatc

SEQ ID NO: 5447493 - DNA, 25 bp, Homo sapien
aaggcgcaatctttccacacaatca

SEQ ID NO: 5447494 - DNA, 25 bp, Homo sapien
ggaagaaggcgcaatctttccacac

SEQ ID NO: 5447495 - DNA, 25 bp, Homo sapien
gatgaatatcaccaacttttgtgat

SEQ ID NO: 5447496 - DNA, 25 bp, Homo sapien
tgtggtcacattccttgggttgagg

SEQ ID NO: 5447497 - DNA, 25 bp, Homo sapien
tgtgcccagctctgcgtaaagcacc

SEQ ID NO: 5447498 - DNA, 25 bp, Homo sapien
cataagaagccctgtatgttgagga

SEQ ID NO: 5447499 - DNA, 25 bp, Homo sapien
tgttgaggagcaatcgccatgtgcc

SEQ ID NO: 5447500 - DNA, 25 bp, Homo sapien
tatctcttgtcaaggagcagaaacc

SEQ ID NO: 5447501 - DNA, 25 bp, Homo sapien
tcaggccatatctcttgtcaaggag

SEQ ID NO: 5447502 - DNA, 25 bp, Homo sapien
aattcattttattcaggccatatct

SEQ ID NO: 5447503 - DNA, 25 bp, Homo sapien
tcaaggagcagaaacctattcaatc

SEQ ID NO: 5447504 - DNA, 25 bp, Homo sapien
caggtcttatgaaggtggtgaaccc

SEQ ID NO: 5447505 - DNA, 25 bp, Homo sapien
gcacactcaaggaaaaatggtacag

SEQ ID NO: 5447506 - DNA, 25 bp, Homo sapien
tgcaaaatgacggaactctgacctc

SEQ ID NO: 5447507 - DNA, 25 bp, Homo sapien
ggttctctcagaagatgtatgggca

SEQ ID NO: 5447508 - DNA, 25 bp, Homo sapien
atttaggaactcaagactctgtggc

SEQ ID NO: 5447509 - DNA, 25 bp, Homo sapien
catttaggaactcaagactctgtgg

SEQ ID NO: 5447510 - DNA, 25 bp, Homo sapien
ttaggaactcaagactctgtggctt

SEQ ID NO: 5447511 - DNA, 25 bp, Homo sapien
tttaggaactcaagactctgtggct

SEQ ID NO: 5447512 - DNA, 25 bp, Homo sapien
ttcttcatcagggaccagatcttta

SEQ ID NO: 5447513 - DNA, 25 bp, Homo sapien
catctgacatagctagatttttttc

SEQ ID NO: 5447514 - DNA, 25 bp, Homo sapien
cttcatcagggaccagatctttatg

SEQ ID NO: 5447515 - DNA, 25 bp, Homo sapien
ttttttcttcatcagggaccagatc

SEQ ID NO: 5447516 - DNA, 25 bp, Homo sapien
aacatgctggatttagaatataacc

SEQ ID NO: 5447517 - DNA, 25 bp, Homo sapien
tatagtccaatgtgtacatttgtgt

SEQ ID NO: 5447518 - DNA, 25 bp, Homo sapien
tataaccaacaacctaactaggtca

SEQ ID NO: 5447519 - DNA, 25 bp, Homo sapien
tcatgagatgttctgagtcaatgtt

SEQ ID NO: 5447520 - DNA, 25 bp, Homo sapien
taccgagtgccaacttgattggatt

SEQ ID NO: 5447521 - DNA, 25 bp, Homo sapien
tatctttttctaattgtgatggtta

SEQ ID NO: 5447522 - DNA, 25 bp, Homo sapien
atggttaataccgagtgccaacttg

SEQ ID NO: 5447523 - DNA, 25 bp, Homo sapien
ttatctttttctaattgtgatggtt

SEQ ID NO: 5447524 - DNA, 25 bp, Homo sapien
cttcccttctatccgcaggcatgag

SEQ ID NO: 5447525 - DNA, 25 bp, Homo sapien
tactcctcatggctgtatctctcag

SEQ ID NO: 5447526 - DNA, 25 bp, Homo sapien
gatatgtactttcctgcttcagatt

SEQ ID NO: 5447527 - DNA, 25 bp, Homo sapien
ttccaaacaagttgatatgtacttt

SEQ ID NO: 5447528 - DNA, 25 bp, Homo sapien
gattggtatggctgaaaatgtatct

SEQ ID NO: 5447529 - DNA, 25 bp, Homo sapien
ttgtctccaagtgcaacaagtttct

SEQ ID NO: 5447530 - DNA, 25 bp, Homo sapien
tgattggtatggctgaaaatgtatc

SEQ ID NO: 5447531 - DNA, 25 bp, Homo sapien
atgtatcttgtctccaagtgcaaca

SEQ ID NO: 5447532 - DNA, 25 bp, Homo sapien
tctgtaagaaccacccaagttccat

SEQ ID NO: 5447533 - DNA, 25 bp, Homo sapien
ttcacaggcatagaaaagacgatcc

SEQ ID NO: 5447534 - DNA, 25 bp, Homo sapien
cgatccctttcggaataccaaactg

SEQ ID NO: 5447535 - DNA, 25 bp, Homo sapien
aattagatcacttgtcattcgggtc

SEQ ID NO: 5447536 - DNA, 25 bp, Homo sapien
tcctaaagatacaatctccccaggt

SEQ ID NO: 5447537 - DNA, 25 bp, Homo sapien
cagtgtagtggctatactgtgtgca

SEQ ID NO: 5447538 - DNA, 25 bp, Homo sapien
cagccaaaatgcctccaaattgtct

SEQ ID NO: 5447539 - DNA, 25 bp, Homo sapien
tcctgtggtggtcaagtttttaaga

SEQ ID NO: 5447540 - DNA, 25 bp, Homo sapien
ttgaatatatgaactactgaaggat

SEQ ID NO: 5447541 - DNA, 25 bp, Homo sapien
gcgtgaataatgaagaggtccccaa

SEQ ID NO: 5447542 - DNA, 25 bp, Homo sapien
gatattaccccaaatgatcacgtct

SEQ ID NO: 5447543 - DNA, 25 bp, Homo sapien
tctcagatcaacgtaattatttcca

SEQ ID NO: 5447544 - DNA, 25 bp, Homo sapien
gcactctcatatctgtacacccttg

SEQ ID NO: 5447545 - DNA, 25 bp, Homo sapien
tacttttcagtagtgtatcatagac

SEQ ID NO: 5447546 - DNA, 25 bp, Homo sapien
tataattataaggttgatgacagag

SEQ ID NO: 5447547 - DNA, 25 bp, Homo sapien
gtatcatagactttctgagataagt

SEQ ID NO: 5447548 - DNA, 25 bp, Homo sapien
agtcactgtctacacatataattat

SEQ ID NO: 5447549 - DNA, 25 bp, Homo sapien
ggaaactgacgcactgaaagactaa

SEQ ID NO: 5447550 - DNA, 25 bp, Homo sapien
cacatcaattctaggagataggcac

SEQ ID NO: 5447551 - DNA, 25 bp, Homo sapien
gaaaaatggaatacgatgtgtcaca

SEQ ID NO: 5447552 - DNA, 25 bp, Homo sapien
tgacggctcaagatcatacgggtgg

SEQ ID NO: 5447553 - DNA, 25 bp, Homo sapien
agatactcagaatgttcctagaggg

SEQ ID NO: 5447554 - DNA, 25 bp, Homo sapien
tcctagctgctttgaaatcatgttg

SEQ ID NO: 5447555 - DNA, 25 bp, Homo sapien
tatacttcctattccagatactcag

SEQ ID NO: 5447556 - DNA, 25 bp, Homo sapien
agtcaaatcacacaataagttcttt

SEQ ID NO: 5447557 - DNA, 25 bp, Homo sapien
gaggcagtcctccagagtgaacacc

SEQ ID NO: 5447558 - DNA, 25 bp, Homo sapien
cccagcgccacagcaataatgttgt

SEQ ID NO: 5447559 - DNA, 25 bp, Homo sapien
accacaatgacgtgggcctggcgga

SEQ ID NO: 5447560 - DNA, 25 bp, Homo sapien
ggccagtatggctttcgcttcacct

SEQ ID NO: 5447561 - DNA, 25 bp, Homo sapien
gcgcaggacgggagatgccaggtct

SEQ ID NO: 5447562 - DNA, 25 bp, Homo sapien
tccgcctgcttgttgtcaaatagag

SEQ ID NO: 5447563 - DNA, 25 bp, Homo sapien
tttgagatgttcttccgcctgcttg

SEQ ID NO: 5447564 - DNA, 25 bp, Homo sapien
caaatagagttatgctaatttctgt

SEQ ID NO: 5447565 - DNA, 25 bp, Homo sapien
tatgggaattaggttgtagcaggca

SEQ ID NO: 5447566 - DNA, 25 bp, Homo sapien
caatatgggaattaggttgtagcag

SEQ ID NO: 5447567 - DNA, 25 bp, Homo sapien
cttcgccactcgtcaatatgggaat

SEQ ID NO: 5447568 - DNA, 25 bp, Homo sapien
cactcgtcaatatgggaattaggtt

SEQ ID NO: 5447569 - DNA, 25 bp, Homo sapien
tttcaaacctgacattcaggtattc

SEQ ID NO: 5447570 - DNA, 25 bp, Homo sapien
caggtattcttccatcatgaaatta

SEQ ID NO: 5447571 - DNA, 25 bp, Homo sapien
catttatgagttatatggaggatac

SEQ ID NO: 5447572 - DNA, 25 bp, Homo sapien
cacagagatgcatatgtatatgtgt

SEQ ID NO: 5447573 - DNA, 25 bp, Homo sapien
tgctagaggtgacatcataataaag

SEQ ID NO: 5447574 - DNA, 25 bp, Homo sapien
tgagcaattaccatcatcagttcag

SEQ ID NO: 5447575 - DNA, 25 bp, Homo sapien
cccaggttctcttgagcaattacca

SEQ ID NO: 5447576 - DNA, 25 bp, Homo sapien
caaggggttgatgcaagttttcagg

SEQ ID NO: 5447577 - DNA, 25 bp, Homo sapien
catgctccaggaactcattatatcc

SEQ ID NO: 5447578 - DNA, 25 bp, Homo sapien
gggaattcttgtgactccacttatt

SEQ ID NO: 5447579 - DNA, 25 bp, Homo sapien
tttcctccacgatccaacagctctc

SEQ ID NO: 5447580 - DNA, 25 bp, Homo sapien
tctctccagatgataggggaattct

SEQ ID NO: 5447581 - DNA, 25 bp, Homo sapien
ctgttgaatgatatcccaagtgaag

SEQ ID NO: 5447582 - DNA, 25 bp, Homo sapien
gaatgatatcccaagtgaagtcata

SEQ ID NO: 5447583 - DNA, 25 bp, Homo sapien
tgatatcccaagtgaagtcatatat

SEQ ID NO: 5447584 - DNA, 25 bp, Homo sapien
tatattaaatctgcctgagaattca

SEQ ID NO: 5447585 - DNA, 25 bp, Homo sapien
gattcttttgtaaatagtctgccac

SEQ ID NO: 5447586 - DNA, 25 bp, Homo sapien
caaacctcaggacgttgtgtgattt

SEQ ID NO: 5447587 - DNA, 25 bp, Homo sapien
ttgtaaatagtctgccacaagttct

SEQ ID NO: 5447588 - DNA, 25 bp, Homo sapien
tgattttatgtatccgaaaatcagg

SEQ ID NO: 5447589 - DNA, 25 bp, Homo sapien
gactcagaggcagggaccgcggctt

SEQ ID NO: 5447590 - DNA, 25 bp, Homo sapien
agactcagaggcagggaccgcggct

SEQ ID NO: 5447591 - DNA, 25 bp, Homo sapien
atctattcagtagaagctcttcctg

SEQ ID NO: 5447592 - DNA, 25 bp, Homo sapien
tggaagatgcagtcacatttttgaa

SEQ ID NO: 5447593 - DNA, 25 bp, Homo sapien
tgttagtatcgtctcacaaactgat

SEQ ID NO: 5447594 - DNA, 25 bp, Homo sapien
tggacaaactagagatggaagatgc

SEQ ID NO: 5447595 - DNA, 25 bp, Homo sapien
tgtgacttagcttcctctatgcaga

SEQ ID NO: 5447596 - DNA, 25 bp, Homo sapien
ggtaatgtttctgccaacaaacagc

SEQ ID NO: 5447597 - DNA, 25 bp, Homo sapien
agagcccctttcagcttgaattcca

SEQ ID NO: 5447598 - DNA, 25 bp, Homo sapien
gatgtacctacttgaaactgggaag

SEQ ID NO: 5447599 - DNA, 25 bp, Homo sapien
ctcaggcaatctctttacaccaggg

SEQ ID NO: 5447600 - DNA, 25 bp, Homo sapien
tctctttacaccaggggccacataa

SEQ ID NO: 5447601 - DNA, 25 bp, Homo sapien
tcctctcaggcaatctctttacacc

SEQ ID NO: 5447602 - DNA, 25 bp, Homo sapien
aggctcctctcaggcaatctcttta

SEQ ID NO: 5447603 - DNA, 25 bp, Homo sapien
ggaggctggccaaatgcagaacttc

SEQ ID NO: 5447604 - DNA, 25 bp, Homo sapien
gaaggaggctggccaaatgcagaac

SEQ ID NO: 5447605 - DNA, 25 bp, Homo sapien
gcagaacttctgaaagtccacttcc

SEQ ID NO: 5447606 - DNA, 25 bp, Homo sapien
gaggctggccaaatgcagaacttct

SEQ ID NO: 5447607 - DNA, 25 bp, Homo sapien
ccatctccaacacgttttcaactgt

SEQ ID NO: 5447608 - DNA, 25 bp, Homo sapien
tttgggaaggtaaccatagcaacta

SEQ ID NO: 5447609 - DNA, 25 bp, Homo sapien
gctaaagcctcctaccatcgattcc

SEQ ID NO: 5447610 - DNA, 25 bp, Homo sapien
tgaagttgctttgtgtcctccgcta

SEQ ID NO: 5447611 - DNA, 25 bp, Homo sapien
aggcagcacagtgagcggggcagga

SEQ ID NO: 5447612 - DNA, 25 bp, Homo sapien
agcaaggggggcaaacagcaaaaga

SEQ ID NO: 5447613 - DNA, 25 bp, Homo sapien
gttggaatgaatttccgcatgaata

SEQ ID NO: 5447614 - DNA, 25 bp, Homo sapien
atttccgcatgaataagaaaggccc

SEQ ID NO: 5447615 - DNA, 25 bp, Homo sapien
aatgaatttccgcatgaataagaaa

SEQ ID NO: 5447616 - DNA, 25 bp, Homo sapien
agttggaatgaatttccgcatgaat

SEQ ID NO: 5447617 - DNA, 25 bp, Homo sapien
tctgagagaatgctgacagttttcc

SEQ ID NO: 5447618 - DNA, 25 bp, Homo sapien
cttctgagagaatgctgacagtttt

SEQ ID NO: 5447619 - DNA, 25 bp, Homo sapien
tgagagaatgctgacagttttccag

SEQ ID NO: 5447620 - DNA, 25 bp, Homo sapien
gagaatgctgacagttttccagaat

SEQ ID NO: 5447621 - DNA, 25 bp, Homo sapien
caagcatgattagggtgaggaacag

SEQ ID NO: 5447622 - DNA, 25 bp, Homo sapien
gagactcaacgaagagtgagtatag

SEQ ID NO: 5447623 - DNA, 25 bp, Homo sapien
cggtaattgtgggagactcaacgaa

SEQ ID NO: 5447624 - DNA, 25 bp, Homo sapien
tcaagcatgattagggtgaggaaca

SEQ ID NO: 5447625 - DNA, 25 bp, Homo sapien
acccaatccatgaattagcaccttt

SEQ ID NO: 5447626 - DNA, 25 bp, Homo sapien
cttcgtattttggagattcttagta

SEQ ID NO: 5447627 - DNA, 25 bp, Homo sapien
agcacctttcctcttgatcctggat

SEQ ID NO: 5447628 - DNA, 25 bp, Homo sapien
tatttctaaccctgagatacccaat

SEQ ID NO: 5447629 - DNA, 25 bp, Homo sapien
tctgaaagacttggatcaaaactgc

SEQ ID NO: 5447630 - DNA, 25 bp, Homo sapien
gaggtatttatctctggcgagttca

SEQ ID NO: 5447631 - DNA, 25 bp, Homo sapien
tcctaagacatgttgtgcatctgcc

SEQ ID NO: 5447632 - DNA, 25 bp, Homo sapien
tttctttggaagaatgcaatggctg

SEQ ID NO: 5447633 - DNA, 25 bp, Homo sapien
gagtcccatgttcagtccttagcag

SEQ ID NO: 5447634 - DNA, 25 bp, Homo sapien
taaagagaatgtcacacagacctgg

SEQ ID NO: 5447635 - DNA, 25 bp, Homo sapien
tccactaagtacaggccagcgtggg

SEQ ID NO: 5447636 - DNA, 25 bp, Homo sapien
catgggtgtcactctggaaatgcta

SEQ ID NO: 5447637 - DNA, 25 bp, Homo sapien
catattcaagtattaatgccactcc

SEQ ID NO: 5447638 - DNA, 25 bp, Homo sapien
tcctcaccactaagccaatcaatta

SEQ ID NO: 5447639 - DNA, 25 bp, Homo sapien
tatcggttccaacttgtatgatggg

SEQ ID NO: 5447640 - DNA, 25 bp, Homo sapien
tccttggaacctggcaattaagatt

SEQ ID NO: 5447641 - DNA, 25 bp, Homo sapien
gaagtgggacagtatctctaaacag

SEQ ID NO: 5447642 - DNA, 25 bp, Homo sapien
catggatatacaaagtccaggacgc

SEQ ID NO: 5447643 - DNA, 25 bp, Homo sapien
gggaaacttccttcagtgtatgaga

SEQ ID NO: 5447644 - DNA, 25 bp, Homo sapien
gactgatggcttctgcgtactctga

SEQ ID NO: 5447645 - DNA, 25 bp, Homo sapien
tgctcttctgtgtttacgggggaat

SEQ ID NO: 5447646 - DNA, 25 bp, Homo sapien
cccacctaattcctgttacggtcat

SEQ ID NO: 5447647 - DNA, 25 bp, Homo sapien
gcttgatcaattgttaatccggcca

SEQ ID NO: 5447648 - DNA, 25 bp, Homo sapien
agcttgatcaattgttaatccggcc

SEQ ID NO: 5447649 - DNA, 25 bp, Homo sapien
cagcttgatcaattgttaatccggc

SEQ ID NO: 5447650 - DNA, 25 bp, Homo sapien
cacagcttgatcaattgttaatccg

SEQ ID NO: 5447651 - DNA, 25 bp, Homo sapien
catttaggctggtctaatctggcag

SEQ ID NO: 5447652 - DNA, 25 bp, Homo sapien
tgtgtgtaattctgcggtcgctgac

SEQ ID NO: 5447653 - DNA, 25 bp, Homo sapien
cctttgaaccatctatatttatcca

SEQ ID NO: 5447654 - DNA, 25 bp, Homo sapien
aatctggcagataaaatcacatttt

SEQ ID NO: 5447655 - DNA, 25 bp, Homo sapien
tatcttggagtagggaagcctctgc

SEQ ID NO: 5447656 - DNA, 25 bp, Homo sapien
ccgtaactgcgctgcctgagtctgg

SEQ ID NO: 5447657 - DNA, 25 bp, Homo sapien
tcagtgtaaatcatggagccattgc

SEQ ID NO: 5447658 - DNA, 25 bp, Homo sapien
gagccattgctacccctgaaggcga

SEQ ID NO: 5447659 - DNA, 25 bp, Homo sapien
gttttgagcgtgagcatcctcaagc

SEQ ID NO: 5447660 - DNA, 25 bp, Homo sapien
ttgaccttgaccagtccccgtcctg

SEQ ID NO: 5447661 - DNA, 25 bp, Homo sapien
ggcaaccacaggatctgatagaacc

SEQ ID NO: 5447662 - DNA, 25 bp, Homo sapien
gatctgatagaacctgttttgagcg

SEQ ID NO: 5447663 - DNA, 25 bp, Homo sapien
gaaatataggaggaaggtgcagtcc

SEQ ID NO: 5447664 - DNA, 25 bp, Homo sapien
agaaagaagaggaaatataggagga

SEQ ID NO: 5447665 - DNA, 25 bp, Homo sapien
aatataggaggaaggtgcagtccat

SEQ ID NO: 5447666 - DNA, 25 bp, Homo sapien
gaggaaatataggaggaaggtgcag

SEQ ID NO: 5447667 - DNA, 25 bp, Homo sapien
tgacacttattgatatcactgttgc

SEQ ID NO: 5447668 - DNA, 25 bp, Homo sapien
tgttgctgagtttgggcatacttcc

SEQ ID NO: 5447669 - DNA, 25 bp, Homo sapien
tttgggcatacttccagagaagctc

SEQ ID NO: 5447670 - DNA, 25 bp, Homo sapien
ttatacatgcctccacgtgacactt

SEQ ID NO: 5447671 - DNA, 25 bp, Homo sapien
tgcagatcagtagatgctagcacca

SEQ ID NO: 5447672 - DNA, 25 bp, Homo sapien
cttgtccaggcaccacaagggtgca

SEQ ID NO: 5447673 - DNA, 25 bp, Homo sapien
tagatgctagcaccattacattgag

SEQ ID NO: 5447674 - DNA, 25 bp, Homo sapien
caccacaagggtgcagatcagtaga

SEQ ID NO: 5447675 - DNA, 25 bp, Homo sapien
tctttttctttctgatgcaattttg

SEQ ID NO: 5447676 - DNA, 25 bp, Homo sapien
ctttctgatgcaattttgtgaaacc

SEQ ID NO: 5447677 - DNA, 25 bp, Homo sapien
ttctgatgcaattttgtgaaaccag

SEQ ID NO: 5447678 - DNA, 25 bp, Homo sapien
ttttctttctgatgcaattttgtga

SEQ ID NO: 5447679 - DNA, 25 bp, Homo sapien
tgtgccttccagttcttaagtcact

SEQ ID NO: 5447680 - DNA, 25 bp, Homo sapien
tccagttcttaagtcactgaagctg

SEQ ID NO: 5447681 - DNA, 25 bp, Homo sapien
taagtcactgaagctgttcaccttc

SEQ ID NO: 5447682 - DNA, 25 bp, Homo sapien
gttcttaagtcactgaagctgttca

SEQ ID NO: 5447683 - DNA, 25 bp, Homo sapien
cataaatcttttggcctagtgttcc

SEQ ID NO: 5447684 - DNA, 25 bp, Homo sapien
gaacttgctctcacataacatagaa

SEQ ID NO: 5447685 - DNA, 25 bp, Homo sapien
tttcagatacttacagagtccagga

SEQ ID NO: 5447686 - DNA, 25 bp, Homo sapien
ctctggacatctatactgaggaaat

SEQ ID NO: 5447687 - DNA, 25 bp, Homo sapien
tactcgagtgtcacctcaaaatgct

SEQ ID NO: 5447688 - DNA, 25 bp, Homo sapien
caaaatgcttcttactagtttcaaa

SEQ ID NO: 5447689 - DNA, 25 bp, Homo sapien
aagtcactgtaaccagggtagggag

SEQ ID NO: 5447690 - DNA, 25 bp, Homo sapien
tactagtttcaaagtcactgtaacc

SEQ ID NO: 5447691 - DNA, 25 bp, Homo sapien
ctgcaaaacgcattttcttctgttg

SEQ ID NO: 5447692 - DNA, 25 bp, Homo sapien
cagctgccagatctgcaaaacgcat

SEQ ID NO: 5447693 - DNA, 25 bp, Homo sapien
gttggtggtaacatttgcattgagt

SEQ ID NO: 5447694 - DNA, 25 bp, Homo sapien
ggttcctgttggtggtaacatttgc

SEQ ID NO: 5447695 - DNA, 25 bp, Homo sapien
tcttttgccattgtagttgctggtg

SEQ ID NO: 5447696 - DNA, 25 bp, Homo sapien
ttgccattgtagttgctggtgtgag

SEQ ID NO: 5447697 - DNA, 25 bp, Homo sapien
ttttgccattgtagttgctggtgtg

SEQ ID NO: 5447698 - DNA, 25 bp, Homo sapien
ttcttttgccattgtagttgctggt

SEQ ID NO: 5447699 - DNA, 25 bp, Homo sapien
gccacttcagggacaggtcctctca

SEQ ID NO: 5447700 - DNA, 25 bp, Homo sapien
cacttcagggacaggtcctctcaga

SEQ ID NO: 5447701 - DNA, 25 bp, Homo sapien
ttcttccagcaggccacttcaggga

SEQ ID NO: 5447702 - DNA, 25 bp, Homo sapien
tccttcttccagcaggccacttcag

SEQ ID NO: 5447703 - DNA, 25 bp, Homo sapien
ttggccctgagaacactaatgggtt

SEQ ID NO: 5447704 - DNA, 25 bp, Homo sapien
ttctttcaagccctagttcttcctg

SEQ ID NO: 5447705 - DNA, 25 bp, Homo sapien
gagaagagcacagcggatgatattc

SEQ ID NO: 5447706 - DNA, 25 bp, Homo sapien
gatattcacttcccatgtcatttgc

SEQ ID NO: 5447707 - DNA, 25 bp, Homo sapien
tgacttggggcctgaatggtgcttc

SEQ ID NO: 5447708 - DNA, 25 bp, Homo sapien
tatgtacttctggtcaccaaatctt

SEQ ID NO: 5447709 - DNA, 25 bp, Homo sapien
tacttctggtcaccaaatcttaaga

SEQ ID NO: 5447710 - DNA, 25 bp, Homo sapien
actatgttcagtgtcactgacttgg

SEQ ID NO: 5447711 - DNA, 25 bp, Homo sapien
ccatctctcgtctttagtcctttca

SEQ ID NO: 5447712 - DNA, 25 bp, Homo sapien
aacacttcaatcatgttgccttcca

SEQ ID NO: 5447713 - DNA, 25 bp, Homo sapien
ttctctccatctctcgtctttagtc

SEQ ID NO: 5447714 - DNA, 25 bp, Homo sapien
caaacacttcaatcatgttgccttc

SEQ ID NO: 5447715 - DNA, 25 bp, Homo sapien
acacttagcaaagaaaatggcaaac

SEQ ID NO: 5447716 - DNA, 25 bp, Homo sapien
ctaacacttagcaaagaaaatggca

SEQ ID NO: 5447717 - DNA, 25 bp, Homo sapien
caaagaaaatggcaaacattcccac

SEQ ID NO: 5447718 - DNA, 25 bp, Homo sapien
cttagcaaagaaaatggcaaacatt

SEQ ID NO: 5447719 - DNA, 25 bp, Homo sapien
gctcgctgaggatccccctgttaag

SEQ ID NO: 5447720 - DNA, 25 bp, Homo sapien
tgaagtctccggacaaagagcagga

SEQ ID NO: 5447721 - DNA, 25 bp, Homo sapien
gatggaacctgggaaacacctgccc

SEQ ID NO: 5447722 - DNA, 25 bp, Homo sapien
ttttctgagagtgcattgattagct

SEQ ID NO: 5447723 - DNA, 25 bp, Homo sapien
tctttcttgtcctgaaccccaaagc

SEQ ID NO: 5447724 - DNA, 25 bp, Homo sapien
tcttgtcctgaaccccaaagctgag

SEQ ID NO: 5447725 - DNA, 25 bp, Homo sapien
gaggccacagtccaagcttcgggct

SEQ ID NO: 5447726 - DNA, 25 bp, Homo sapien
ggctgagcgtgagcagtgtgcgcat

SEQ ID NO: 5447727 - DNA, 25 bp, Homo sapien
ttcctgttccaagagccaaccacat

SEQ ID NO: 5447728 - DNA, 25 bp, Homo sapien
gatttatggcaattcccttcctgtt

SEQ ID NO: 5447729 - DNA, 25 bp, Homo sapien
ttccaaattagctcagatttatggc

SEQ ID NO: 5447730 - DNA, 25 bp, Homo sapien
agacatcgttctattgattgctgcg

SEQ ID NO: 5447731 - DNA, 25 bp, Homo sapien
catataagaggactgaatcaaaccc

SEQ ID NO: 5447732 - DNA, 25 bp, Homo sapien
caaagggcgtgagatgccaagtcca

SEQ ID NO: 5447733 - DNA, 25 bp, Homo sapien
gcgcctggccagtaacagatatttc

SEQ ID NO: 5447734 - DNA, 25 bp, Homo sapien
cagagattatctcagcaaagggcgt

SEQ ID NO: 5447735 - DNA, 25 bp, Homo sapien
gaagctgtgcctcacagcatgcatt

SEQ ID NO: 5447736 - DNA, 25 bp, Homo sapien
aaggtgagcacattttgaagctgtg

SEQ ID NO: 5447737 - DNA, 25 bp, Homo sapien
tcagaactgtgccacgaaggtgagc

SEQ ID NO: 5447738 - DNA, 25 bp, Homo sapien
gggcattgactgttgattgggaaac

SEQ ID NO: 5447739 - DNA, 25 bp, Homo sapien
gagtatgtgcgttcactccactcac

SEQ ID NO: 5447740 - DNA, 25 bp, Homo sapien
aggcagagtatgtgcgttcactcca

SEQ ID NO: 5447741 - DNA, 25 bp, Homo sapien
tccaagcaggggaaaacgaggcaga

SEQ ID NO: 5447742 - DNA, 25 bp, Homo sapien
tatgtgcgttcactccactcacagg

SEQ ID NO: 5447743 - DNA, 25 bp, Homo sapien
aatgcaaagaaagcttgactactgc

SEQ ID NO: 5447744 - DNA, 25 bp, Homo sapien
gattagggatagaggttattcacca

SEQ ID NO: 5447745 - DNA, 25 bp, Homo sapien
cacttctgtaagtccaaagaatgca

SEQ ID NO: 5447746 - DNA, 25 bp, Homo sapien
tattcaccaccgtatccacttctgt

SEQ ID NO: 5447747 - DNA, 25 bp, Homo sapien
atgctgaggcgacaccaccagctgg

SEQ ID NO: 5447748 - DNA, 25 bp, Homo sapien
ggaatcgctgagctcgggatgctga

SEQ ID NO: 5447749 - DNA, 25 bp, Homo sapien
ctgtttcctgtgaatgacaccactt

SEQ ID NO: 5447750 - DNA, 25 bp, Homo sapien
gctgggttctctaccttcctcctta

SEQ ID NO: 5447751 - DNA, 25 bp, Homo sapien
gctggatttcctggcttccggttac

SEQ ID NO: 5447752 - DNA, 25 bp, Homo sapien
tccatctagttttttgtactctcca

SEQ ID NO: 5447753 - DNA, 25 bp, Homo sapien
tcaaagatcctttcccaataggttc

SEQ ID NO: 5447754 - DNA, 25 bp, Homo sapien
ttctctcgccaaataaaccgctttc

SEQ ID NO: 5447755 - DNA, 25 bp, Homo sapien
aactcagtgacccttatttgggcat

SEQ ID NO: 5447756 - DNA, 25 bp, Homo sapien
taatctccaacaattggctcccttt

SEQ ID NO: 5447757 - DNA, 25 bp, Homo sapien
ggttgagaaccagccaataagcccc

SEQ ID NO: 5447758 - DNA, 25 bp, Homo sapien
gagatcttggccattaacaggtgta

SEQ ID NO: 5447759 - DNA, 25 bp, Homo sapien
caaaagatattaggcactggtggct

SEQ ID NO: 5447760 - DNA, 25 bp, Homo sapien
cataaccgagggctataagactggg

SEQ ID NO: 5447761 - DNA, 25 bp, Homo sapien
ttggaaaacctgctcgctctagcgg

SEQ ID NO: 5447762 - DNA, 25 bp, Homo sapien
aagcctcaggcagttcgtcgtggga

SEQ ID NO: 5447763 - DNA, 25 bp, Homo sapien
tgaaccatcaaaacgagtcactggg

SEQ ID NO: 5447764 - DNA, 25 bp, Homo sapien
tctgaaccctggataaaagcgtgct

SEQ ID NO: 5447765 - DNA, 25 bp, Homo sapien
tcacaagtcatggtgggcctagcca

SEQ ID NO: 5447766 - DNA, 25 bp, Homo sapien
tataatcccatggtacgccctgatg

SEQ ID NO: 5447767 - DNA, 25 bp, Homo sapien
taatacagctgaggttcaaggtccc

SEQ ID NO: 5447768 - DNA, 25 bp, Homo sapien
tagtgcactgactggaggcgctaca

SEQ ID NO: 5447769 - DNA, 25 bp, Homo sapien
tctgacgcacggaatagtaggactt

SEQ ID NO: 5447770 - DNA, 25 bp, Homo sapien
aaggtgttattccagtctgccgccg

SEQ ID NO: 5447771 - DNA, 25 bp, Homo sapien
ccgctaaggccgttgggatcgacgc

SEQ ID NO: 5447772 - DNA, 25 bp, Homo sapien
tgcagtcatgctagaagtttccaga

SEQ ID NO: 5447773 - DNA, 25 bp, Homo sapien
tgctgaagtaagcagccagtctgcc

SEQ ID NO: 5447774 - DNA, 25 bp, Homo sapien
gccttgctgagttcacctggtttcc

SEQ ID NO: 5447775 - DNA, 25 bp, Homo sapien
ccattggcaacagcgggaaataatt

SEQ ID NO: 5447776 - DNA, 25 bp, Homo sapien
ggaaataattccaatagtgctgaag

SEQ ID NO: 5447777 - DNA, 25 bp, Homo sapien
tagggcaaggcataaagaatagacg

SEQ ID NO: 5447778 - DNA, 25 bp, Homo sapien
ctttagacactagccgatgccatgg

SEQ ID NO: 5447779 - DNA, 25 bp, Homo sapien
gaactttcttctgcgaggcaatggg

SEQ ID NO: 5447780 - DNA, 25 bp, Homo sapien
tgcctcatggcgtttcctttagaca

SEQ ID NO: 5447781 - DNA, 25 bp, Homo sapien
gggcaagatggtcagacctggaaaa

SEQ ID NO: 5447782 - DNA, 25 bp, Homo sapien
tggagggcaagatggtcagacctgg

SEQ ID NO: 5447783 - DNA, 25 bp, Homo sapien
gcaagatggtcagacctggaaaaac

SEQ ID NO: 5447784 - DNA, 25 bp, Homo sapien
gagggcaagatggtcagacctggaa

SEQ ID NO: 5447785 - DNA, 25 bp, Homo sapien
tttaattcctcctcagtagagtggg

SEQ ID NO: 5447786 - DNA, 25 bp, Homo sapien
gagatgatctatgcaaggtacttag

SEQ ID NO: 5447787 - DNA, 25 bp, Homo sapien
catttacctcataggtgggttgtga

SEQ ID NO: 5447788 - DNA, 25 bp, Homo sapien
ggtacttagaatacggactggcaca

SEQ ID NO: 5447789 - DNA, 25 bp, Homo sapien
atccctcccatgagcacttataagg

SEQ ID NO: 5447790 - DNA, 25 bp, Homo sapien
tccctcccatgagcacttataaggc

SEQ ID NO: 5447791 - DNA, 25 bp, Homo sapien
ccctcccatgagcacttataaggct

SEQ ID NO: 5447792 - DNA, 25 bp, Homo sapien
cctcccatgagcacttataaggctt

SEQ ID NO: 5447793 - DNA, 25 bp, Homo sapien
cttccaactgtatggtggactggtt

SEQ ID NO: 5447794 - DNA, 25 bp, Homo sapien
ccttccaactgtatggtggactggt

SEQ ID NO: 5447795 - DNA, 25 bp, Homo sapien
cacaaacgttatacacagtagatgc

SEQ ID NO: 5447796 - DNA, 25 bp, Homo sapien
tatccacagtggctagcacaaacgt

SEQ ID NO: 5447797 - DNA, 25 bp, Homo sapien
catataggacccataaaagtgccat

SEQ ID NO: 5447798 - DNA, 25 bp, Homo sapien
tctctttaaattgttctcatcccct

SEQ ID NO: 5447799 - DNA, 25 bp, Homo sapien
gaggtttagccaacaaacaccactg

SEQ ID NO: 5447800 - DNA, 25 bp, Homo sapien
tcaagatgacaactacaccaagtga

SEQ ID NO: 5447801 - DNA, 25 bp, Homo sapien
caccaagtgaatctgtttgaaactc

SEQ ID NO: 5447802 - DNA, 25 bp, Homo sapien
tacctgaagctgtatgttctcaagt

SEQ ID NO: 5447803 - DNA, 25 bp, Homo sapien
ggcaaaaggtgtacaactcctagtg

SEQ ID NO: 5447804 - DNA, 25 bp, Homo sapien
tagagacgatgcctcccaatgctgc

SEQ ID NO: 5447805 - DNA, 25 bp, Homo sapien
tgggtaatatcaaggcatcactctg

SEQ ID NO: 5447806 - DNA, 25 bp, Homo sapien
caatgctgcacaggccggtcttgaa

SEQ ID NO: 5447807 - DNA, 25 bp, Homo sapien
taccaatctgatgatcttcagcggc

SEQ ID NO: 5447808 - DNA, 25 bp, Homo sapien
tttgggtaaattagcaagcttctcc

SEQ ID NO: 5447809 - DNA, 25 bp, Homo sapien
cttcagcggcatccctatcaatttg

SEQ ID NO: 5447810 - DNA, 25 bp, Homo sapien
tttttctcagctactgctcctacca

SEQ ID NO: 5447811 - DNA, 25 bp, Homo sapien
caaagatgtacaggaacacaggatc

SEQ ID NO: 5447812 - DNA, 25 bp, Homo sapien
ttaagattatttccacggcaggtag

SEQ ID NO: 5447813 - DNA, 25 bp, Homo sapien
gcttagtagccaattatcagcaagg

SEQ ID NO: 5447814 - DNA, 25 bp, Homo sapien
aacaatcctcaaaagagtggagccc

SEQ ID NO: 5447815 - DNA, 25 bp, Homo sapien
tcagatctctggatataatataaat

SEQ ID NO: 5447816 - DNA, 25 bp, Homo sapien
tctgaggttcctgtagatccttttg

SEQ ID NO: 5447817 - DNA, 25 bp, Homo sapien
gctagaaagcagctattcttcttca

SEQ ID NO: 5447818 - DNA, 25 bp, Homo sapien
tttggcagaatgctagaaagcagct

SEQ ID NO: 5447819 - DNA, 25 bp, Homo sapien
gtggctggaccaaaagatttgctgt

SEQ ID NO: 5447820 - DNA, 25 bp, Homo sapien
ggatgtcccgataccctccttgaac

SEQ ID NO: 5447821 - DNA, 25 bp, Homo sapien
cagacattgacaggatgtcccgata

SEQ ID NO: 5447822 - DNA, 25 bp, Homo sapien
tgtcacacataatggcctcttcaga

SEQ ID NO: 5447823 - DNA, 25 bp, Homo sapien
caggcccaggctggtacccaggaag

SEQ ID NO: 5447824 - DNA, 25 bp, Homo sapien
cactgtatttaatgctgatgtggtt

SEQ ID NO: 5447825 - DNA, 25 bp, Homo sapien
gcccaggctggtacccaggaagaaa

SEQ ID NO: 5447826 - DNA, 25 bp, Homo sapien
ggaagaaacaggatagccaattagc

SEQ ID NO: 5447827 - DNA, 25 bp, Homo sapien
tcaatatgagggatcattatttcct

SEQ ID NO: 5447828 - DNA, 25 bp, Homo sapien
aataccaatactagtttcaacaggc

SEQ ID NO: 5447829 - DNA, 25 bp, Homo sapien
ctagtttcaacaggctcatgaccaa

SEQ ID NO: 5447830 - DNA, 25 bp, Homo sapien
gaccaattgagaattcaatatgagg

SEQ ID NO: 5447831 - DNA, 25 bp, Homo sapien
tgtacaggataaccatgatcatgac

SEQ ID NO: 5447832 - DNA, 25 bp, Homo sapien
tgatcatgacggtaattaacactca

SEQ ID NO: 5447833 - DNA, 25 bp, Homo sapien
gtgtcaaaaagcgaggtcctcggca

SEQ ID NO: 5447834 - DNA, 25 bp, Homo sapien
tcggcaataaagagggactagtgta

SEQ ID NO: 5447835 - DNA, 25 bp, Homo sapien
ggcaatatgtttaaggaccctccta

SEQ ID NO: 5447836 - DNA, 25 bp, Homo sapien
tactgtttggtgcaaatccttgccc

SEQ ID NO: 5447837 - DNA, 25 bp, Homo sapien
tatcagtaacgataataggcctgga

SEQ ID NO: 5447838 - DNA, 25 bp, Homo sapien
gcttggaagttaagagagctcccac

SEQ ID NO: 5447839 - DNA, 25 bp, Homo sapien
gaacatggcttcttcacatctccct

SEQ ID NO: 5447840 - DNA, 25 bp, Homo sapien
agagtcctccaagcagcacgttcag

SEQ ID NO: 5447841 - DNA, 25 bp, Homo sapien
ctatagagagagtcctccaagcagc

SEQ ID NO: 5447842 - DNA, 25 bp, Homo sapien
cacgttcagagaacatggcttcttc

SEQ ID NO: 5447843 - DNA, 25 bp, Homo sapien
tgccctcgagcttttaccagtccat

SEQ ID NO: 5447844 - DNA, 25 bp, Homo sapien
tagcttgcctgaatccaaccagcgc

SEQ ID NO: 5447845 - DNA, 25 bp, Homo sapien
tccagtccttgtatcagcagcctct

SEQ ID NO: 5447846 - DNA, 25 bp, Homo sapien
catttccacatttggtcagcagctc

SEQ ID NO: 5447847 - DNA, 25 bp, Homo sapien
gattctcatccatttaatccaaatt

SEQ ID NO: 5447848 - DNA, 25 bp, Homo sapien
caggtgccaggtaacataatgagct

SEQ ID NO: 5447849 - DNA, 25 bp, Homo sapien
taaatctaggaagcgacagtgcgag

SEQ ID NO: 5447850 - DNA, 25 bp, Homo sapien
aatgcctggtgcctccctgagtgaa

SEQ ID NO: 5447851 - DNA, 25 bp, Homo sapien
taagcaggatgtgcccttagtgcca

SEQ ID NO: 5447852 - DNA, 25 bp, Homo sapien
cacagcccaaagacaacacaacatt

SEQ ID NO: 5447853 - DNA, 25 bp, Homo sapien
tgtccataatcatgaactccacagc

SEQ ID NO: 5447854 - DNA, 25 bp, Homo sapien
gaaagtgtccataatcatgaactcc

SEQ ID NO: 5447855 - DNA, 25 bp, Homo sapien
gacaacacaacattcttgccctttt

SEQ ID NO: 5447856 - DNA, 25 bp, Homo sapien
aactctgaaaccctcctgctgttgg

SEQ ID NO: 5447857 - DNA, 25 bp, Homo sapien
taaagcacgcgccagagaacaatgc

SEQ ID NO: 5447858 - DNA, 25 bp, Homo sapien
gaatgatcacatctaatgaactctg

SEQ ID NO: 5447859 - DNA, 25 bp, Homo sapien
gaggagatgccaattaattatagaa

SEQ ID NO: 5447860 - DNA, 25 bp, Homo sapien
gacaaacccgtctgtgcttgggaca

SEQ ID NO: 5447861 - DNA, 25 bp, Homo sapien
aaacagctatgagtcactgccaggg

SEQ ID NO: 5447862 - DNA, 25 bp, Homo sapien
tcaggaaagcgacaagtgtctgtgt

SEQ ID NO: 5447863 - DNA, 25 bp, Homo sapien
tggttggcactgtagggacaaaccc

SEQ ID NO: 5447864 - DNA, 25 bp, Homo sapien
gagccctcccacatgacgaggctac

SEQ ID NO: 5447865 - DNA, 25 bp, Homo sapien
cccacatgacgaggctacaggaggg

SEQ ID NO: 5447866 - DNA, 25 bp, Homo sapien
gaaagaagaaaccacgtgcggccaa

SEQ ID NO: 5447867 - DNA, 25 bp, Homo sapien
cctcccacatgacgaggctacagga

SEQ ID NO: 5447868 - DNA, 25 bp, Homo sapien
tccttggtcactgtcgctctgtcca

SEQ ID NO: 5447869 - DNA, 25 bp, Homo sapien
cctccttggtcactgtcgctctgtc

SEQ ID NO: 5447870 - DNA, 25 bp, Homo sapien
ccttggtcactgtcgctctgtccac

SEQ ID NO: 5447871 - DNA, 25 bp, Homo sapien
cttggtcactgtcgctctgtccact

SEQ ID NO: 5447872 - DNA, 25 bp, Homo sapien
caacttgtcccgagagagcaagatg

SEQ ID NO: 5447873 - DNA, 25 bp, Homo sapien
aagatgtccactgccgagctcttct

SEQ ID NO: 5447874 - DNA, 25 bp, Homo sapien
gaggtcactgcgttgagctgggcct

SEQ ID NO: 5447875 - DNA, 25 bp, Homo sapien
ctgtctagagaagagctggccggct

SEQ ID NO: 5447876 - DNA, 25 bp, Homo sapien
agccatcagaggcacagaacaccat

SEQ ID NO: 5447877 - DNA, 25 bp, Homo sapien
aacagccatcagaggcacagaacac

SEQ ID NO: 5447878 - DNA, 25 bp, Homo sapien
gggagagaaacagccatcagaggca

SEQ ID NO: 5447879 - DNA, 25 bp, Homo sapien
gaaacagccatcagaggcacagaac

SEQ ID NO: 5447880 - DNA, 25 bp, Homo sapien
ttctgaactccacttctcaaaaatt

SEQ ID NO: 5447881 - DNA, 25 bp, Homo sapien
tctgaactccacttctcaaaaattt

SEQ ID NO: 5447882 - DNA, 25 bp, Homo sapien
gtgtcagttcaaggcaccagctggc

SEQ ID NO: 5447883 - DNA, 25 bp, Homo sapien
gtcagttcaaggcaccagctggcca

SEQ ID NO: 5447884 - DNA, 25 bp, Homo sapien
tcagttcaaggcaccagctggccat

SEQ ID NO: 5447885 - DNA, 25 bp, Homo sapien
ctgtgtcagttcaaggcaccagctg

SEQ ID NO: 5447886 - DNA, 25 bp, Homo sapien
cataatgaagtcaagccctaagctg

SEQ ID NO: 5447887 - DNA, 25 bp, Homo sapien
gccctcggtggcagatgcaatttag

SEQ ID NO: 5447888 - DNA, 25 bp, Homo sapien
tccactgcggaatgttaaagacaag

SEQ ID NO: 5447889 - DNA, 25 bp, Homo sapien
tagaggatgctttcaaaacggagag

SEQ ID NO: 5447890 - DNA, 25 bp, Homo sapien
gaaacctatcgagggcatggagatg

SEQ ID NO: 5447891 - DNA, 25 bp, Homo sapien
ggaagatcaaccctgactagctggg

SEQ ID NO: 5447892 - DNA, 25 bp, Homo sapien
gggtgactttaacttcaatgggctc

SEQ ID NO: 5447893 - DNA, 25 bp, Homo sapien
ggaactgatagatagctctgctgtc

SEQ ID NO: 5447894 - DNA, 25 bp, Homo sapien
cagcccacgaggtactgaatcagag

SEQ ID NO: 5447895 - DNA, 25 bp, Homo sapien
tgtaacagctctaactcccaggtga

SEQ ID NO: 5447896 - DNA, 25 bp, Homo sapien
cccctgtgagactgtaataggcagc

SEQ ID NO: 5447897 - DNA, 25 bp, Homo sapien
actcttttgaaagcacgccctgagc

SEQ ID NO: 5447898 - DNA, 25 bp, Homo sapien
ggatatcctggaagtaaggcttctg

SEQ ID NO: 5447899 - DNA, 25 bp, Homo sapien
tatcttccaggatatcctggaagta

SEQ ID NO: 5447900 - DNA, 25 bp, Homo sapien
ttccaggatatcctggaagtaaggc

SEQ ID NO: 5447901 - DNA, 25 bp, Homo sapien
caggatatcctggaagtaaggcttc

SEQ ID NO: 5447902 - DNA, 25 bp, Homo sapien
gatatgccggatactaacaccagcc

SEQ ID NO: 5447903 - DNA, 25 bp, Homo sapien
ggcgaagctcctgtgtaacacgata

SEQ ID NO: 5447904 - DNA, 25 bp, Homo sapien
ccattgggagaagctggcgaagctc

SEQ ID NO: 5447905 - DNA, 25 bp, Homo sapien
taggatagctacatgagatggcgcc

SEQ ID NO: 5447906 - DNA, 25 bp, Homo sapien
cacagtcaatgtggtcctcgggtct

SEQ ID NO: 5447907 - DNA, 25 bp, Homo sapien
tccttccaagctgcagtaaccttct

SEQ ID NO: 5447908 - DNA, 25 bp, Homo sapien
ccaactttatcctgggctaggacaa

SEQ ID NO: 5447909 - DNA, 25 bp, Homo sapien
tgtcttaagcaggatgtaaatctca

SEQ ID NO: 5447910 - DNA, 25 bp, Homo sapien
caatttagcacacattaaaagtgga

SEQ ID NO: 5447911 - DNA, 25 bp, Homo sapien
gtaagccttctccaaaatattcgat

SEQ ID NO: 5447912 - DNA, 25 bp, Homo sapien
tcccaaaattccatgaaccagtagt

SEQ ID NO: 5447913 - DNA, 25 bp, Homo sapien
tgttctagaacctagccaatcccaa

SEQ ID NO: 5447914 - DNA, 25 bp, Homo sapien
cagctcaatgaagaatggtatcccc

SEQ ID NO: 5447915 - DNA, 25 bp, Homo sapien
ggtaatacagataggcacaggtcag

SEQ ID NO: 5447916 - DNA, 25 bp, Homo sapien
gaagtcactcgcacctcatttgggc

SEQ ID NO: 5447917 - DNA, 25 bp, Homo sapien
tatgttcctcgctttggtacaaggc

SEQ ID NO: 5447918 - DNA, 25 bp, Homo sapien
cactgtacttggtaagattcggcat

SEQ ID NO: 5447919 - DNA, 25 bp, Homo sapien
cctatcaacttgagccagatgggac

SEQ ID NO: 5447920 - DNA, 25 bp, Homo sapien
gcaaatcgcagttctaacacatagg

SEQ ID NO: 5447921 - DNA, 25 bp, Homo sapien
aacaaagggactactggacagagga

SEQ ID NO: 5447922 - DNA, 25 bp, Homo sapien
ccacatttggatgcttaaggtctct

SEQ ID NO: 5447923 - DNA, 25 bp, Homo sapien
tgaagcccctaaatctacacaaaga

SEQ ID NO: 5447924 - DNA, 25 bp, Homo sapien
taggaccctctctgaactatctcca

SEQ ID NO: 5447925 - DNA, 25 bp, Homo sapien
catttatgtttagaatgggctggca

SEQ ID NO: 5447926 - DNA, 25 bp, Homo sapien
tcaatgacacgacgcaaagctaagt

SEQ ID NO: 5447927 - DNA, 25 bp, Homo sapien
tgaggcaaacctacggatggacaga

SEQ ID NO: 5447928 - DNA, 25 bp, Homo sapien
tttcagtgtggctagcaaggctcct

SEQ ID NO: 5447929 - DNA, 25 bp, Homo sapien
aagagaggcctgaaactgaccccat

SEQ ID NO: 5447930 - DNA, 25 bp, Homo sapien
aagcgcttaaggctggtagtcttaa

SEQ ID NO: 5447931 - DNA, 25 bp, Homo sapien
ttgaccttttcctacttttgctcag

SEQ ID NO: 5447932 - DNA, 25 bp, Homo sapien
taaggctggtagtcttaagaattgc

SEQ ID NO: 5447933 - DNA, 25 bp, Homo sapien
gtcttaagaattgcgcgtcagctga

SEQ ID NO: 5447934 - DNA, 25 bp, Homo sapien
gagagctgttaatgtgtgatgtcca

SEQ ID NO: 5447935 - DNA, 25 bp, Homo sapien
aatttacagttatatgacaggcaga

SEQ ID NO: 5447936 - DNA, 25 bp, Homo sapien
tatgacaggcagaaagatgatgtta

SEQ ID NO: 5447937 - DNA, 25 bp, Homo sapien
gtgcttaagtatgcagtcagagccc

SEQ ID NO: 5447938 - DNA, 25 bp, Homo sapien
gactattaagcaggacaattatccc

SEQ ID NO: 5447939 - DNA, 25 bp, Homo sapien
gactttgtcacaggctcactgacta

SEQ ID NO: 5447940 - DNA, 25 bp, Homo sapien
tccaatgtcaaaacgaggatctccg

SEQ ID NO: 5447941 - DNA, 25 bp, Homo sapien
gatctccgtgacgagagggagccct

SEQ ID NO: 5447942 - DNA, 25 bp, Homo sapien
taacagttagtcacaaacaagggct

SEQ ID NO: 5447943 - DNA, 25 bp, Homo sapien
tagacagttgttaatatgcaaccga

SEQ ID NO: 5447944 - DNA, 25 bp, Homo sapien
ccttctctaacctgtctagacagtt

SEQ ID NO: 5447945 - DNA, 25 bp, Homo sapien
gctgactaaatcaacagattccctt

SEQ ID NO: 5447946 - DNA, 25 bp, Homo sapien
gacacactctcgttaaggataagga

SEQ ID NO: 5447947 - DNA, 25 bp, Homo sapien
gcctctgaccagaagtgaactagca

SEQ ID NO: 5447948 - DNA, 25 bp, Homo sapien
aagcatctgctagcgtccttggaca

SEQ ID NO: 5447949 - DNA, 25 bp, Homo sapien
aagatccagtgagacccttcatgag

SEQ ID NO: 5447950 - DNA, 25 bp, Homo sapien
caatcgctcctaacaccccaaacca

SEQ ID NO: 5447951 - DNA, 25 bp, Homo sapien
tcagcaatcgctcctaacaccccaa

SEQ ID NO: 5447952 - DNA, 25 bp, Homo sapien
agcaatcgctcctaacaccccaaac

SEQ ID NO: 5447953 - DNA, 25 bp, Homo sapien
cagcaatcgctcctaacaccccaaa

SEQ ID NO: 5447954 - DNA, 25 bp, Homo sapien
cccgacaacgtgtgcgcagggatgt

SEQ ID NO: 5447955 - DNA, 25 bp, Homo sapien
atgtgtgttggcgactgaaacgcag

SEQ ID NO: 5447956 - DNA, 25 bp, Homo sapien
aaccccagaagttcggcaggtctct

SEQ ID NO: 5447957 - DNA, 25 bp, Homo sapien
aaacgcaggcagctcgcaccggctg

SEQ ID NO: 5447958 - DNA, 25 bp, Homo sapien
gtgggtggagaggtaagcgcagatg

SEQ ID NO: 5447959 - DNA, 25 bp, Homo sapien
tgggtggagaggtaagcgcagatga

SEQ ID NO: 5447960 - DNA, 25 bp, Homo sapien
gggtgggtggagaggtaagcgcaga

SEQ ID NO: 5447961 - DNA, 25 bp, Homo sapien
ggtgggtggagaggtaagcgcagat

SEQ ID NO: 5447962 - DNA, 25 bp, Homo sapien
ccaccacacgatttacacaagtaat

SEQ ID NO: 5447963 - DNA, 25 bp, Homo sapien
cgccaccacacgatttacacaagta

SEQ ID NO: 5447964 - DNA, 25 bp, Homo sapien
aacgcagcccctgcgtctccgccgc

SEQ ID NO: 5447965 - DNA, 25 bp, Homo sapien
ccgccgccaccacacgatttacaca

SEQ ID NO: 5447966 - DNA, 25 bp, Homo sapien
gagaagtagccggtgtcgtggacaa

SEQ ID NO: 5447967 - DNA, 25 bp, Homo sapien
agctgagaagtagccggtgtcgtgg

SEQ ID NO: 5447968 - DNA, 25 bp, Homo sapien
tagccggtgtcgtggacaagttgta

SEQ ID NO: 5447969 - DNA, 25 bp, Homo sapien
cggtgtcgtggacaagttgtagctc

SEQ ID NO: 5447970 - DNA, 25 bp, Homo sapien
ggcagacatccagtggcccttttgt

SEQ ID NO: 5447971 - DNA, 25 bp, Homo sapien
aggcagacatccagtggcccttttg

SEQ ID NO: 5447972 - DNA, 25 bp, Homo sapien
aaggcagacatccagtggccctttt

SEQ ID NO: 5447973 - DNA, 25 bp, Homo sapien
gcagacatccagtggcccttttgtt

SEQ ID NO: 5447974 - DNA, 25 bp, Homo sapien
cacgggagtaacaattcccttccag

SEQ ID NO: 5447975 - DNA, 25 bp, Homo sapien
ggcatccagcgtgtacagtgcagac

SEQ ID NO: 5447976 - DNA, 25 bp, Homo sapien
cagacgactgccaggaaaaggggac

SEQ ID NO: 5447977 - DNA, 25 bp, Homo sapien
gacttctccacgggagtaacaattc

SEQ ID NO: 5447978 - DNA, 25 bp, Homo sapien
tgttcgctcctaatgcaatctttgc

SEQ ID NO: 5447979 - DNA, 25 bp, Homo sapien
actgacacgaagctgccatctattt

SEQ ID NO: 5447980 - DNA, 25 bp, Homo sapien
gcaaactcactgacacgaagctgcc

SEQ ID NO: 5447981 - DNA, 25 bp, Homo sapien
ccatctatttctgcagcgctgttcg

SEQ ID NO: 5447982 - DNA, 25 bp, Homo sapien
ttcccgaactccccacgggctgcca

SEQ ID NO: 5447983 - DNA, 25 bp, Homo sapien
tcccgaactccccacgggctgccag

SEQ ID NO: 5447984 - DNA, 25 bp, Homo sapien
ttgggatgtagacatagagagatct

SEQ ID NO: 5447985 - DNA, 25 bp, Homo sapien
cgatttctcgttttctggagttggg

SEQ ID NO: 5447986 - DNA, 25 bp, Homo sapien
ctgcagagcttcgatggtgagagga

SEQ ID NO: 5447987 - DNA, 25 bp, Homo sapien
tggtgagaggaggaactcgatttct

SEQ ID NO: 5447988 - DNA, 25 bp, Homo sapien
tctggaattctgttggccagattca

SEQ ID NO: 5447989 - DNA, 25 bp, Homo sapien
tgttggccagattcatagcattcat

SEQ ID NO: 5447990 - DNA, 25 bp, Homo sapien
aattctgttggccagattcatagca

SEQ ID NO: 5447991 - DNA, 25 bp, Homo sapien
ttagtgtctggaattctgttggcca

SEQ ID NO: 5447992 - DNA, 25 bp, Homo sapien
caatttgtccaaatgggaaattcca

SEQ ID NO: 5447993 - DNA, 25 bp, Homo sapien
ttttcaatctttgaggaatattcat

SEQ ID NO: 5447994 - DNA, 25 bp, Homo sapien
tgaggattataagaatacactggtt

SEQ ID NO: 5447995 - DNA, 25 bp, Homo sapien
taaaaaccagggcattgcaaagcaa

SEQ ID NO: 5447996 - DNA, 25 bp, Homo sapien
cattgcattcctataaagcaggttg

SEQ ID NO: 5447997 - DNA, 25 bp, Homo sapien
tccttttacccactctctatattag

SEQ ID NO: 5447998 - DNA, 25 bp, Homo sapien
tgccactaccttaaataaggttctc

SEQ ID NO: 5447999 - DNA, 25 bp, Homo sapien
tgaacttggattgtagtgtaggcca

SEQ ID NO: 5448000 - DNA, 25 bp, Homo sapien
aatgtccagttaatccattcatttc

SEQ ID NO: 5448001 - DNA, 25 bp, Homo sapien
ctatcaccaagttctatcaaatact

SEQ ID NO: 5448002 - DNA, 25 bp, Homo sapien
gtcttttatgaggttatagtcagta

SEQ ID NO: 5448003 - DNA, 25 bp, Homo sapien
gagtggcttagagggttctggttca

SEQ ID NO: 5448004 - DNA, 25 bp, Homo sapien
tatagtcagtatattggctgaggtt

SEQ ID NO: 5448005 - DNA, 25 bp, Homo sapien
tctgctttcagtttagcttgttcac

SEQ ID NO: 5448006 - DNA, 25 bp, Homo sapien
gcaagcagcatatcatgcacactca

SEQ ID NO: 5448007 - DNA, 25 bp, Homo sapien
cacactatttggataagagatggag

SEQ ID NO: 5448008 - DNA, 25 bp, Homo sapien
cgaaggctcgaagtagcaagcagca

SEQ ID NO: 5448009 - DNA, 25 bp, Homo sapien
tatattgtaaaggtcaggagagctc

SEQ ID NO: 5448010 - DNA, 25 bp, Homo sapien
tcccactgctttcatcctaacagag

SEQ ID NO: 5448011 - DNA, 25 bp, Homo sapien
gctttcatcctaacagagttcttta

SEQ ID NO: 5448012 - DNA, 25 bp, Homo sapien
tctgtgacaatatctctcacaacca

SEQ ID NO: 5448013 - DNA, 25 bp, Homo sapien
ggtctgtgacaatatctctcacaac

SEQ ID NO: 5448014 - DNA, 25 bp, Homo sapien
ctatatgtcaatggatggagataga

SEQ ID NO: 5448015 - DNA, 25 bp, Homo sapien
tcctcgtctcatggggcagagacca

SEQ ID NO: 5448016 - DNA, 25 bp, Homo sapien
agaccaaggagccatagaccaccca

SEQ ID NO: 5448017 - DNA, 25 bp, Homo sapien
ggatggagatagaatcctcgtctca

SEQ ID NO: 5448018 - DNA, 25 bp, Homo sapien
aggagggaacccatcccagataaca

SEQ ID NO: 5448019 - DNA, 25 bp, Homo sapien
cataggtctcccatagcattcctgt

SEQ ID NO: 5448020 - DNA, 25 bp, Homo sapien
tcccagataacatccataggtctcc

SEQ ID NO: 5448021 - DNA, 25 bp, Homo sapien
taacatccataggtctcccatagca

SEQ ID NO: 5448022 - DNA, 25 bp, Homo sapien
gttgttaggtcagcggcattggctc

SEQ ID NO: 5448023 - DNA, 25 bp, Homo sapien
tctctgtggagttgttaggtcagcg

SEQ ID NO: 5448024 - DNA, 25 bp, Homo sapien
gcagttccaaattagaagctcttct

SEQ ID NO: 5448025 - DNA, 25 bp, Homo sapien
atcctccattgtgcctctcatccag

SEQ ID NO: 5448026 - DNA, 25 bp, Homo sapien
accttttctgagctccttggaccat

SEQ ID NO: 5448027 - DNA, 25 bp, Homo sapien
ctactttttcccatgtgccaccttt

SEQ ID NO: 5448028 - DNA, 25 bp, Homo sapien
caccttttctgagctccttggacca

SEQ ID NO: 5448029 - DNA, 25 bp, Homo sapien
tcccatgtgccaccttttctgagct

SEQ ID NO: 5448030 - DNA, 25 bp, Homo sapien
ttgacaccctcgcttctgtaatcct

SEQ ID NO: 5448031 - DNA, 25 bp, Homo sapien
cttgacaccctcgcttctgtaatcc

SEQ ID NO: 5448032 - DNA, 25 bp, Homo sapien
gacaccctcgcttctgtaatcctca

SEQ ID NO: 5448033 - DNA, 25 bp, Homo sapien
acaccctcgcttctgtaatcctcac

SEQ ID NO: 5448034 - DNA, 25 bp, Homo sapien
caagttccaggtgcccaaactccct

SEQ ID NO: 5448035 - DNA, 25 bp, Homo sapien
acagcagtgattccttgaggattta

SEQ ID NO: 5448036 - DNA, 25 bp, Homo sapien
atttaaacagcagtgattccttgag

SEQ ID NO: 5448037 - DNA, 25 bp, Homo sapien
caaactccctctctcaagtagacag

SEQ ID NO: 5448038 - DNA, 25 bp, Homo sapien
ggttggaactgcgtgttgacactta

SEQ ID NO: 5448039 - DNA, 25 bp, Homo sapien
actgcgtgttgacacttacagaaga

SEQ ID NO: 5448040 - DNA, 25 bp, Homo sapien
tggaactgcgtgttgacacttacag

SEQ ID NO: 5448041 - DNA, 25 bp, Homo sapien
acaggttggaactgcgtgttgacac

SEQ ID NO: 5448042 - DNA, 25 bp, Homo sapien
tgaatggcggcagccctttgcgaac

SEQ ID NO: 5448043 - DNA, 25 bp, Homo sapien
tttgcgaactaccagcttgctctct

SEQ ID NO: 5448044 - DNA, 25 bp, Homo sapien
tgtgatagcaatctctactgacaag

SEQ ID NO: 5448045 - DNA, 25 bp, Homo sapien
gaaacgtgtctagtagattgtgcca

SEQ ID NO: 5448046 - DNA, 25 bp, Homo sapien
ctgcaggatcaacctttccttcagc

SEQ ID NO: 5448047 - DNA, 25 bp, Homo sapien
tctgcaggatcaacctttccttcag

SEQ ID NO: 5448048 - DNA, 25 bp, Homo sapien
tgggtcagtcagattcgcataggaa

SEQ ID NO: 5448049 - DNA, 25 bp, Homo sapien
tttggcttgcgaatggacatctgct

SEQ ID NO: 5448050 - DNA, 25 bp, Homo sapien
gcgggcagtcaaagggaccatcagt

SEQ ID NO: 5448051 - DNA, 25 bp, Homo sapien
tctagccaagaggttggaatgaagc

SEQ ID NO: 5448052 - DNA, 25 bp, Homo sapien
caagagcaaggatccattggcagat

SEQ ID NO: 5448053 - DNA, 25 bp, Homo sapien
gcagatatgaagtgcagtgaggact

SEQ ID NO: 5448054 - DNA, 25 bp, Homo sapien
cggtctgctagaacaaattactgta

SEQ ID NO: 5448055 - DNA, 25 bp, Homo sapien
gggtggcttacacaatgtttgtttc

SEQ ID NO: 5448056 - DNA, 25 bp, Homo sapien
ggcttgaggatgttgagtcatgtca

SEQ ID NO: 5448057 - DNA, 25 bp, Homo sapien
taagcacctcatcatgtgtacccag

SEQ ID NO: 5448058 - DNA, 25 bp, Homo sapien
gctctattctaggtgctagagatcc

SEQ ID NO: 5448059 - DNA, 25 bp, Homo sapien
ttgcagggagcacaacacaaagtcc

SEQ ID NO: 5448060 - DNA, 25 bp, Homo sapien
ttgccccatgcgacatgccacatgg

SEQ ID NO: 5448061 - DNA, 25 bp, Homo sapien
gctggtattctgactcagccaaccc

SEQ ID NO: 5448062 - DNA, 25 bp, Homo sapien
cacatggctggtattctgactcagc

SEQ ID NO: 5448063 - DNA, 25 bp, Homo sapien
agcacagctcttgccccatgcgaca

SEQ ID NO: 5448064 - DNA, 25 bp, Homo sapien
aagtccacactactctacttacaag

SEQ ID NO: 5448065 - DNA, 25 bp, Homo sapien
tgaccccagtggagttctttaccca

SEQ ID NO: 5448066 - DNA, 25 bp, Homo sapien
taaactgcctagtgggatccaacgc

SEQ ID NO: 5448067 - DNA, 25 bp, Homo sapien
ccatgaatcatgagtgagaggctct

SEQ ID NO: 5448068 - DNA, 25 bp, Homo sapien
ctgcctgaaatcaatatgctcaagt

SEQ ID NO: 5448069 - DNA, 25 bp, Homo sapien
gagaatgaacttcttaaagctgaac

SEQ ID NO: 5448070 - DNA, 25 bp, Homo sapien
catctgaatgtggagaatgaacttc

SEQ ID NO: 5448071 - DNA, 25 bp, Homo sapien
caagtcaaacgcatttgcctgcatc

SEQ ID NO: 5448072 - DNA, 25 bp, Homo sapien
tttggaaagctgtgcgaataactgc

SEQ ID NO: 5448073 - DNA, 25 bp, Homo sapien
ggcagtgaatgcactaccgtgtgca

SEQ ID NO: 5448074 - DNA, 25 bp, Homo sapien
taaacacccaggacagcttatgcat

SEQ ID NO: 5448075 - DNA, 25 bp, Homo sapien
agggagccaggacaccggagttctt

SEQ ID NO: 5448076 - DNA, 25 bp, Homo sapien
cactgtatcttgtggccagcccttt

SEQ ID NO: 5448077 - DNA, 25 bp, Homo sapien
gtgcaaccaagaacacactgtatct

SEQ ID NO: 5448078 - DNA, 25 bp, Homo sapien
agtcaccacagctgtgcaaccaaga

SEQ ID NO: 5448079 - DNA, 25 bp, Homo sapien
ggctccttgtgactgagtgagtatc

SEQ ID NO: 5448080 - DNA, 25 bp, Homo sapien
ccttcactacatccaatggtctcat

SEQ ID NO: 5448081 - DNA, 25 bp, Homo sapien
tcactacatccaatggtctcatctc

SEQ ID NO: 5448082 - DNA, 25 bp, Homo sapien
taaccttcactacatccaatggtct

SEQ ID NO: 5448083 - DNA, 25 bp, Homo sapien
ttaaccttcactacatccaatggtc

SEQ ID NO: 5448084 - DNA, 25 bp, Homo sapien
acatctgcagggtctgtatggctgg

SEQ ID NO: 5448085 - DNA, 25 bp, Homo sapien
ttgctttgtattcaattcacacatc

SEQ ID NO: 5448086 - DNA, 25 bp, Homo sapien
tcagcttgacccgaaatattgtctc

SEQ ID NO: 5448087 - DNA, 25 bp, Homo sapien
tgtgaaatctcctaattgctttgta

SEQ ID NO: 5448088 - DNA, 25 bp, Homo sapien
catcagggaaggtgcatgtgacttt

SEQ ID NO: 5448089 - DNA, 25 bp, Homo sapien
ggcatcagggaaggtgcatgtgact

SEQ ID NO: 5448090 - DNA, 25 bp, Homo sapien
tggcagtggcatcagggaaggtgca

SEQ ID NO: 5448091 - DNA, 25 bp, Homo sapien
gaaggtgcatgtgactttttgaccc

SEQ ID NO: 5448092 - DNA, 25 bp, Homo sapien
taaagctggactgaacataggaggg

SEQ ID NO: 5448093 - DNA, 25 bp, Homo sapien
cattagaggtccagcagagaatcct

SEQ ID NO: 5448094 - DNA, 25 bp, Homo sapien
catacaggttgtagccaaggagcca

SEQ ID NO: 5448095 - DNA, 25 bp, Homo sapien
tatacactgagatagcgaacactgg

SEQ ID NO: 5448096 - DNA, 25 bp, Homo sapien
cagtccaatcgggtatggctacatg

SEQ ID NO: 5448097 - DNA, 25 bp, Homo sapien
taaaaatgaacagcccccgaccatg

SEQ ID NO: 5448098 - DNA, 25 bp, Homo sapien
cccgactccagtccaatcgggtatg

SEQ ID NO: 5448099 - DNA, 25 bp, Homo sapien
ccaatcgggtatggctacatgctga

SEQ ID NO: 5448100 - DNA, 25 bp, Homo sapien
gatggtaatagcagatagtgagtga

SEQ ID NO: 5448101 - DNA, 25 bp, Homo sapien
cacatgacgtccctggtgtaacgat

SEQ ID NO: 5448102 - DNA, 25 bp, Homo sapien
gagaatcttgtctggctcctccaag

SEQ ID NO: 5448103 - DNA, 25 bp, Homo sapien
tgtaacgatactcacacatgctgtg

SEQ ID NO: 5448104 - DNA, 25 bp, Homo sapien
taccaatttcgacactgaagaaaac

SEQ ID NO: 5448105 - DNA, 25 bp, Homo sapien
atccacgtctccataccaatttcga

SEQ ID NO: 5448106 - DNA, 25 bp, Homo sapien
ccaaattcctaagactcaaatctcc

SEQ ID NO: 5448107 - DNA, 25 bp, Homo sapien
tcaaatctccatccacgtctccata

SEQ ID NO: 5448108 - DNA, 25 bp, Homo sapien
cctttcttcttgtatctctcgggat

SEQ ID NO: 5448109 - DNA, 25 bp, Homo sapien
tctcgggatagagccacatgcctct

SEQ ID NO: 5448110 - DNA, 25 bp, Homo sapien
gagccacatgcctctggacggcttc

SEQ ID NO: 5448111 - DNA, 25 bp, Homo sapien
tcttgtatctctcgggatagagcca

SEQ ID NO: 5448112 - DNA, 25 bp, Homo sapien
gggctgagctacatgcaagctatgt

SEQ ID NO: 5448113 - DNA, 25 bp, Homo sapien
tgtggcctctcaactgcctgtaagg

SEQ ID NO: 5448114 - DNA, 25 bp, Homo sapien
ctgcctgtaaggacacatgggactt

SEQ ID NO: 5448115 - DNA, 25 bp, Homo sapien
tagtggtcctgaaagccgttctcta

SEQ ID NO: 5448116 - DNA, 25 bp, Homo sapien
ggcgggagtggggactctcagaccc

SEQ ID NO: 5448117 - DNA, 25 bp, Homo sapien
agctgggcgggagtggggactctca

SEQ ID NO: 5448118 - DNA, 25 bp, Homo sapien
caagctgggcgggagtggggactct

SEQ ID NO: 5448119 - DNA, 25 bp, Homo sapien
ctgggcgggagtggggactctcaga

SEQ ID NO: 5448120 - DNA, 25 bp, Homo sapien
caggtaaccccagatcccatgaggt

SEQ ID NO: 5448121 - DNA, 25 bp, Homo sapien
ggttctcttcatcctgcgtctttcc

SEQ ID NO: 5448122 - DNA, 25 bp, Homo sapien
accaggtaaccccagatcccatgag

SEQ ID NO: 5448123 - DNA, 25 bp, Homo sapien
ctggttctcttcatcctgcgtcttt

SEQ ID NO: 5448124 - DNA, 25 bp, Homo sapien
ggaggagcaggtcacttcctgattc

SEQ ID NO: 5448125 - DNA, 25 bp, Homo sapien
tcatctatgtcagggaaaggcccat

SEQ ID NO: 5448126 - DNA, 25 bp, Homo sapien
ctcctcaggttcatggtaagtggtc

SEQ ID NO: 5448127 - DNA, 25 bp, Homo sapien
aaacagacttgtcaagataggcagc

SEQ ID NO: 5448128 - DNA, 25 bp, Homo sapien
cagagagtttgtcagttcccgtcac

SEQ ID NO: 5448129 - DNA, 25 bp, Homo sapien
tctgggcatggatccatattgcccc

SEQ ID NO: 5448130 - DNA, 25 bp, Homo sapien
atggttgtgagggaaaacaggattt

SEQ ID NO: 5448131 - DNA, 25 bp, Homo sapien
tctctccaagtctatgcaaagcagg

SEQ ID NO: 5448132 - DNA, 25 bp, Homo sapien
aaaattgatatgtaatgctctctcc

SEQ ID NO: 5448133 - DNA, 25 bp, Homo sapien
ggcttctgaaatgtaggtcacctcc

SEQ ID NO: 5448134 - DNA, 25 bp, Homo sapien
tctgaaatgtaggtcacctccagtg

SEQ ID NO: 5448135 - DNA, 25 bp, Homo sapien
ccatttcgctgcctctctggtgttg

SEQ ID NO: 5448136 - DNA, 25 bp, Homo sapien
aaatgtaggtcacctccagtggcat

SEQ ID NO: 5448137 - DNA, 25 bp, Homo sapien
gtgcaaaagcacaaggtgcatgaat

SEQ ID NO: 5448138 - DNA, 25 bp, Homo sapien
aggcctcaagaactgcctggtccca

SEQ ID NO: 5448139 - DNA, 25 bp, Homo sapien
aggtgcatgaattaccaaaggcctc

SEQ ID NO: 5448140 - DNA, 25 bp, Homo sapien
caaaggcctcaagaactgcctggtc

SEQ ID NO: 5448141 - DNA, 25 bp, Homo sapien
tagggaactggtaccttagcggcaa

SEQ ID NO: 5448142 - DNA, 25 bp, Homo sapien
tatatgccacaatacagcccgttga

SEQ ID NO: 5448143 - DNA, 25 bp, Homo sapien
aaatacctgctagtcttcacacgtg

SEQ ID NO: 5448144 - DNA, 25 bp, Homo sapien
aaaatcctctctcctagtagcatgg

SEQ ID NO: 5448145 - DNA, 25 bp, Homo sapien
caaccgctgcccgggcatcttgggg

SEQ ID NO: 5448146 - DNA, 25 bp, Homo sapien
ccaaccgctgcccgggcatcttggg

SEQ ID NO: 5448147 - DNA, 25 bp, Homo sapien
cgctgcccgggcatcttggggctga

SEQ ID NO: 5448148 - DNA, 25 bp, Homo sapien
accgctgcccgggcatcttggggct

SEQ ID NO: 5448149 - DNA, 25 bp, Homo sapien
aagaagccactgaaaagagcagaaa

SEQ ID NO: 5448150 - DNA, 25 bp, Homo sapien
tgcccagagttcactattgtgttgc

SEQ ID NO: 5448151 - DNA, 25 bp, Homo sapien
tcaagaagccactgaaaagagcaga

SEQ ID NO: 5448152 - DNA, 25 bp, Homo sapien
gaaaattaggaaactcagtctttgc

SEQ ID NO: 5448153 - DNA, 25 bp, Homo sapien
ttccatcatggtttcttcggatgcc

SEQ ID NO: 5448154 - DNA, 25 bp, Homo sapien
ctcctcttgcagatttccatcatgg

SEQ ID NO: 5448155 - DNA, 25 bp, Homo sapien
ggtttcttcggatgccagtttggag

SEQ ID NO: 5448156 - DNA, 25 bp, Homo sapien
cttcggatgccagtttggagaatcc

SEQ ID NO: 5448157 - DNA, 25 bp, Homo sapien
tgcacctcttgctgatgcagcactt

SEQ ID NO: 5448158 - DNA, 25 bp, Homo sapien
aaggtgcacctcttgctgatgcagc

SEQ ID NO: 5448159 - DNA, 25 bp, Homo sapien
gcagcacttgatgtattgcatttca

SEQ ID NO: 5448160 - DNA, 25 bp, Homo sapien
acacaaaggtgcacctcttgctgat

SEQ ID NO: 5448161 - DNA, 25 bp, Homo sapien
aacattcaacaatcttaaagaatgt

SEQ ID NO: 5448162 - DNA, 25 bp, Homo sapien
ccaacattcaacaatcttaaagaat

SEQ ID NO: 5448163 - DNA, 25 bp, Homo sapien
aacactacaggccagaagagaatgg

SEQ ID NO: 5448164 - DNA, 25 bp, Homo sapien
cattcaacaatcttaaagaatgttc

SEQ ID NO: 5448165 - DNA, 25 bp, Homo sapien
tcaacacctcctaaaaacactcaat

SEQ ID NO: 5448166 - DNA, 25 bp, Homo sapien
taggtcttgatggaattaatctcaa

SEQ ID NO: 5448167 - DNA, 25 bp, Homo sapien
ataaactaggtcttgatggaattaa

SEQ ID NO: 5448168 - DNA, 25 bp, Homo sapien
attcaacacctcctaaaaacactca

SEQ ID NO: 5448169 - DNA, 25 bp, Homo sapien
tcttccacggattggaagcaccgct

SEQ ID NO: 5448170 - DNA, 25 bp, Homo sapien
ccgctaaagaagctggctgacttgt

SEQ ID NO: 5448171 - DNA, 25 bp, Homo sapien
tccgggtactgtgcttggagcatat

SEQ ID NO: 5448172 - DNA, 25 bp, Homo sapien
gaagtatgaatgtacagctccgggt

SEQ ID NO: 5448173 - DNA, 25 bp, Homo sapien
ttatacagttttcattcccacagtc

SEQ ID NO: 5448174 - DNA, 25 bp, Homo sapien
gttatacagttttcattcccacagt

SEQ ID NO: 5448175 - DNA, 25 bp, Homo sapien
tgttgaccaagaagtccacaggccc

SEQ ID NO: 5448176 - DNA, 25 bp, Homo sapien
tctgaattggctcgacatccttatg

SEQ ID NO: 5448177 - DNA, 25 bp, Homo sapien
gagctaaggaagttattccatacag

SEQ ID NO: 5448178 - DNA, 25 bp, Homo sapien
tctaggcggctatctgaacttttca

SEQ ID NO: 5448179 - DNA, 25 bp, Homo sapien
caagacagtttgttgggtgcatccc

SEQ ID NO: 5448180 - DNA, 25 bp, Homo sapien
catctaactccaaaagtccatggca

SEQ ID NO: 5448181 - DNA, 25 bp, Homo sapien
tacaccttaggtttgggtcagccaa

SEQ ID NO: 5448182 - DNA, 25 bp, Homo sapien
tcacctaggaacttaggcaaagctg

SEQ ID NO: 5448183 - DNA, 25 bp, Homo sapien
ctccaccccgtgaaagggccactgg

SEQ ID NO: 5448184 - DNA, 25 bp, Homo sapien
agctttccgggcctgtcctgtggag

SEQ ID NO: 5448185 - DNA, 25 bp, Homo sapien
atgctgtgtcgctgcagctttccgg

SEQ ID NO: 5448186 - DNA, 25 bp, Homo sapien
aggatgcttcccaccgcaccaacag

SEQ ID NO: 5448187 - DNA, 25 bp, Homo sapien
aagtctgctgtaaatactgagtggg

SEQ ID NO: 5448188 - DNA, 25 bp, Homo sapien
tcaagtctgctgtaaatactgagtg

SEQ ID NO: 5448189 - DNA, 25 bp, Homo sapien
gtctgctgtaaatactgagtggggt

SEQ ID NO: 5448190 - DNA, 25 bp, Homo sapien
gctgtaaatactgagtggggtctac

SEQ ID NO: 5448191 - DNA, 25 bp, Homo sapien
aatgtcagcgcgactccccgcacgt

SEQ ID NO: 5448192 - DNA, 25 bp, Homo sapien
atttgctccaccgttgtacagtaga

SEQ ID NO: 5448193 - DNA, 25 bp, Homo sapien
accgttgtacagtagaaatgtcagc

SEQ ID NO: 5448194 - DNA, 25 bp, Homo sapien
gcatctctcagtaatactaaaccat

SEQ ID NO: 5448195 - DNA, 25 bp, Homo sapien
aaaaagacggttcctacagcctatg

SEQ ID NO: 5448196 - DNA, 25 bp, Homo sapien
tgtttccatccaatcctgggctgtc

SEQ ID NO: 5448197 - DNA, 25 bp, Homo sapien
tagacactgcagcttaataggcatc

SEQ ID NO: 5448198 - DNA, 25 bp, Homo sapien
tgttctgacttttacccgagtgaca

SEQ ID NO: 5448199 - DNA, 25 bp, Homo sapien
agtgtccccacgggtcaaaccactg

SEQ ID NO: 5448200 - DNA, 25 bp, Homo sapien
acgacaggttgcaatcccaacagca

SEQ ID NO: 5448201 - DNA, 25 bp, Homo sapien
tggaggtatccacgacaggttgcaa

SEQ ID NO: 5448202 - DNA, 25 bp, Homo sapien
tgcaaatcctctatggaggtatcca

SEQ ID NO: 5448203 - DNA, 25 bp, Homo sapien
caaattagaaactcggtcaccgtct

SEQ ID NO: 5448204 - DNA, 25 bp, Homo sapien
ccaactaaagaaattcggcaatggg

SEQ ID NO: 5448205 - DNA, 25 bp, Homo sapien
gggcatttgccacacagggaactct

SEQ ID NO: 5448206 - DNA, 25 bp, Homo sapien
caccgttgtatgagtagcagccaaa

SEQ ID NO: 5448207 - DNA, 25 bp, Homo sapien
tttcctgttcatagaggacattagg

SEQ ID NO: 5448208 - DNA, 25 bp, Homo sapien
caaaacatttgaacgagaggaaaag

SEQ ID NO: 5448209 - DNA, 25 bp, Homo sapien
taggagaaattgtctcatgtttggg

SEQ ID NO: 5448210 - DNA, 25 bp, Homo sapien
tactttttgccacttgtgaatttcc

SEQ ID NO: 5448211 - DNA, 25 bp, Homo sapien
taagatgtgagctgtagattataat

SEQ ID NO: 5448212 - DNA, 25 bp, Homo sapien
attaagtagtatggcttggctgctg

SEQ ID NO: 5448213 - DNA, 25 bp, Homo sapien
tgtgagctgtagattataatgaacc

SEQ ID NO: 5448214 - DNA, 25 bp, Homo sapien
taacttttgattaagtagtatggct

SEQ ID NO: 5448215 - DNA, 25 bp, Homo sapien
ccctggagaacgtggagcccgagat

SEQ ID NO: 5448216 - DNA, 25 bp, Homo sapien
gagcccgagatgacatgggtagcca

SEQ ID NO: 5448217 - DNA, 25 bp, Homo sapien
agaacgtggagcccgagatgacatg

SEQ ID NO: 5448218 - DNA, 25 bp, Homo sapien
aacgtggagcccgagatgacatggg

SEQ ID NO: 5448219 - DNA, 25 bp, Homo sapien
ttaggctagcttccctcttgaggac

SEQ ID NO: 5448220 - DNA, 25 bp, Homo sapien
ggtagtcccagtcaacctcatggct

SEQ ID NO: 5448221 - DNA, 25 bp, Homo sapien
tgcatcaatcaccatgacagaaggg

SEQ ID NO: 5448222 - DNA, 25 bp, Homo sapien
ggtacatacctgaacctggcagtgg

SEQ ID NO: 5448223 - DNA, 25 bp, Homo sapien
gaggtctaaccttccttgcaagcta

SEQ ID NO: 5448224 - DNA, 25 bp, Homo sapien
ggacttattactcacagctcagcga

SEQ ID NO: 5448225 - DNA, 25 bp, Homo sapien
ccaaaggtgtgacacggaacagcca

SEQ ID NO: 5448226 - DNA, 25 bp, Homo sapien
gatggtgactacctgattctgtcag

SEQ ID NO: 5448227 - DNA, 25 bp, Homo sapien
tcatgtgtgacaacttgcagtgact

SEQ ID NO: 5448228 - DNA, 25 bp, Homo sapien
ctgaaaggtcttgcaaactaagcat

SEQ ID NO: 5448229 - DNA, 25 bp, Homo sapien
ccctgaaaggtcttgcaaactaagc

SEQ ID NO: 5448230 - DNA, 25 bp, Homo sapien
cctgaaaggtcttgcaaactaagca

SEQ ID NO: 5448231 - DNA, 25 bp, Homo sapien
caacaggctgaatcaaccacatgca

SEQ ID NO: 5448232 - DNA, 25 bp, Homo sapien
caaggaacatccttcagcaggaatg

SEQ ID NO: 5448233 - DNA, 25 bp, Homo sapien
tcaatgtcatgtagccaacaggctg

SEQ ID NO: 5448234 - DNA, 25 bp, Homo sapien
cagatgtgtctaacctgtctccaaa

SEQ ID NO: 5448235 - DNA, 25 bp, Homo sapien
gctatggaagcagttaattctgccc

SEQ ID NO: 5448236 - DNA, 25 bp, Homo sapien
cagagtgcctataaggtttggcttc

SEQ ID NO: 5448237 - DNA, 25 bp, Homo sapien
ggaagcagttaattctgccctaaat

SEQ ID NO: 5448238 - DNA, 25 bp, Homo sapien
caagcatatttccaggctatggaag

SEQ ID NO: 5448239 - DNA, 25 bp, Homo sapien
acttcatcattctgcccttcggtgc

SEQ ID NO: 5448240 - DNA, 25 bp, Homo sapien
cattctgcccttcggtgctttttct

SEQ ID NO: 5448241 - DNA, 25 bp, Homo sapien
catcattctgcccttcggtgctttt

SEQ ID NO: 5448242 - DNA, 25 bp, Homo sapien
cttcatcattctgcccttcggtgct

SEQ ID NO: 5448243 - DNA, 25 bp, Homo sapien
gcagacgcttgacctctatcacaaa

SEQ ID NO: 5448244 - DNA, 25 bp, Homo sapien
taaggcagacgcttgacctctatca

SEQ ID NO: 5448245 - DNA, 25 bp, Homo sapien
gcttgacctctatcacaaaccctga

SEQ ID NO: 5448246 - DNA, 25 bp, Homo sapien
ctaaggtaaggcagacgcttgacct

SEQ ID NO: 5448247 - DNA, 25 bp, Homo sapien
ccaagtccctgctcgcaaataacag

SEQ ID NO: 5448248 - DNA, 25 bp, Homo sapien
gaaacgtagcaattcggcctctccg

SEQ ID NO: 5448249 - DNA, 25 bp, Homo sapien
gaaagtctgtcctcgcactgcaatc

SEQ ID NO: 5448250 - DNA, 25 bp, Homo sapien
gaattaaactggaaggtcagagcca

SEQ ID NO: 5448251 - DNA, 25 bp, Homo sapien
ccaaatggtgaaacagcctcacgaa

SEQ ID NO: 5448252 - DNA, 25 bp, Homo sapien
tgtcctaatggttgcgcagacgaag

SEQ ID NO: 5448253 - DNA, 25 bp, Homo sapien
tgtctgaggttcaaatgcagtcgcc

SEQ ID NO: 5448254 - DNA, 25 bp, Homo sapien
tgtgtttgtgtagacaatgctgccc

SEQ ID NO: 5448255 - DNA, 25 bp, Homo sapien
tgtccaaccctcagggattctttct

SEQ ID NO: 5448256 - DNA, 25 bp, Homo sapien
gaccatggaagcacttgtgaaaaca

SEQ ID NO: 5448257 - DNA, 25 bp, Homo sapien
aaggagaaggagaccatggaagcac

SEQ ID NO: 5448258 - DNA, 25 bp, Homo sapien
ggcccagtgaaagatgaccaagcag

SEQ ID NO: 5448259 - DNA, 25 bp, Homo sapien
aataaaactccagcgagatccgggc

SEQ ID NO: 5448260 - DNA, 25 bp, Homo sapien
tagctcggctgtttccgtgcgcggc

SEQ ID NO: 5448261 - DNA, 25 bp, Homo sapien
tgtaccaccggtaagaggagcagga

SEQ ID NO: 5448262 - DNA, 25 bp, Homo sapien
gatccgggccgtgaacgaaagcagt

SEQ ID NO: 5448263 - DNA, 25 bp, Homo sapien
taggcctaggtctgaatccaagcat

SEQ ID NO: 5448264 - DNA, 25 bp, Homo sapien
ctgtactgcagtatcacttgagaca

SEQ ID NO: 5448265 - DNA, 25 bp, Homo sapien
gacagagaatgtagttgaaagagca

SEQ ID NO: 5448266 - DNA, 25 bp, Homo sapien
tgaggtttggaatcataggcctagg

SEQ ID NO: 5448267 - DNA, 25 bp, Homo sapien
ctcaaacttcagtgtacgggaaagt

SEQ ID NO: 5448268 - DNA, 25 bp, Homo sapien
aagtatgattgggttcctgttagag

SEQ ID NO: 5448269 - DNA, 25 bp, Homo sapien
tatggaattgagatgagatactctg

SEQ ID NO: 5448270 - DNA, 25 bp, Homo sapien
cctgtgtgactctaatgaagctatt

SEQ ID NO: 5448271 - DNA, 25 bp, Homo sapien
aatagctaaaaccattactctctcg

SEQ ID NO: 5448272 - DNA, 25 bp, Homo sapien
tactctctcgtttatccatcctgat

SEQ ID NO: 5448273 - DNA, 25 bp, Homo sapien
gatgtaccatagttgattcaaccac

SEQ ID NO: 5448274 - DNA, 25 bp, Homo sapien
aaaagtatactcagtagtgcctccc

SEQ ID NO: 5448275 - DNA, 25 bp, Homo sapien
ccttttgacatctagatcaatccct

SEQ ID NO: 5448276 - DNA, 25 bp, Homo sapien
ttgacatctagatcaatccctgacc

SEQ ID NO: 5448277 - DNA, 25 bp, Homo sapien
gacccatgaagagtttattcatgta

SEQ ID NO: 5448278 - DNA, 25 bp, Homo sapien
atctagatcaatccctgacccatga

SEQ ID NO: 5448279 - DNA, 25 bp, Homo sapien
ttgtttattaaacctggtgctgccc

SEQ ID NO: 5448280 - DNA, 25 bp, Homo sapien
ggtgctgcccatttatacccttttc

SEQ ID NO: 5448281 - DNA, 25 bp, Homo sapien
gaaatatgcataaaagtttgaggcc

SEQ ID NO: 5448282 - DNA, 25 bp, Homo sapien
gagatagtttcctaatccctgaggg

SEQ ID NO: 5448283 - DNA, 25 bp, Homo sapien
gataattgaataatcctgaaacacc

SEQ ID NO: 5448284 - DNA, 25 bp, Homo sapien
gaatctttatggatagcagttaacc

SEQ ID NO: 5448285 - DNA, 25 bp, Homo sapien
ttaatgccaggttagaaatttgctg

SEQ ID NO: 5448286 - DNA, 25 bp, Homo sapien
aatgcattttgcctgtgttaggtaa

SEQ ID NO: 5448287 - DNA, 25 bp, Homo sapien
gatagagcagcacgtctttgagaaa

SEQ ID NO: 5448288 - DNA, 25 bp, Homo sapien
tctactcgtgatctgttagccacag

SEQ ID NO: 5448289 - DNA, 25 bp, Homo sapien
gtgcccatctgggtctaggatcctg

SEQ ID NO: 5448290 - DNA, 25 bp, Homo sapien
taggatcctgggctagatagagcag

SEQ ID NO: 5448291 - DNA, 25 bp, Homo sapien
tgggaagatgttctcggacaaaagc

SEQ ID NO: 5448292 - DNA, 25 bp, Homo sapien
aagatgttctcggacaaaagcaggt

SEQ ID NO: 5448293 - DNA, 25 bp, Homo sapien
gatgttctcggacaaaagcaggtta

SEQ ID NO: 5448294 - DNA, 25 bp, Homo sapien
ggaagatgttctcggacaaaagcag

SEQ ID NO: 5448295 - DNA, 25 bp, Homo sapien
taatcttagtatattacataaccag

SEQ ID NO: 5448296 - DNA, 25 bp, Homo sapien
cagagttccggatacccttcatcca

SEQ ID NO: 5448297 - DNA, 25 bp, Homo sapien
atacagagttccggatacccttcat

SEQ ID NO: 5448298 - DNA, 25 bp, Homo sapien
tacagagttccggatacccttcatc

SEQ ID NO: 5448299 - DNA, 25 bp, Homo sapien
tatccctcagtttgcatttgtccag

SEQ ID NO: 5448300 - DNA, 25 bp, Homo sapien
catatcgcatttaattatagtctcc

SEQ ID NO: 5448301 - DNA, 25 bp, Homo sapien
aatccagtttgggtaccatatcgca

SEQ ID NO: 5448302 - DNA, 25 bp, Homo sapien
tctttgatggccttgtaacttttga

SEQ ID NO: 5448303 - DNA, 25 bp, Homo sapien
catccgggagcacatacataattgg

SEQ ID NO: 5448304 - DNA, 25 bp, Homo sapien
tttctcataacatcacatccgggag

SEQ ID NO: 5448305 - DNA, 25 bp, Homo sapien
aattggcgatattaactttgatcac

SEQ ID NO: 5448306 - DNA, 25 bp, Homo sapien
ggtgtctccactgttgagctaccat

SEQ ID NO: 5448307 - DNA, 25 bp, Homo sapien
ggaatgagctgtttttccaatgatc

SEQ ID NO: 5448308 - DNA, 25 bp, Homo sapien
cttccctagccttggaatgagctgt

SEQ ID NO: 5448309 - DNA, 25 bp, Homo sapien
aatgagctgtttttccaatgatctc

SEQ ID NO: 5448310 - DNA, 25 bp, Homo sapien
tagccttggaatgagctgtttttcc

SEQ ID NO: 5448311 - DNA, 25 bp, Homo sapien
caaagcagcgatggataatactgac

SEQ ID NO: 5448312 - DNA, 25 bp, Homo sapien
gacaatagttggatcagtttggcaa

SEQ ID NO: 5448313 - DNA, 25 bp, Homo sapien
ctgcaggtatctagtttcttaagac

SEQ ID NO: 5448314 - DNA, 25 bp, Homo sapien
gcagaccaaatgatctgtcacaact

SEQ ID NO: 5448315 - DNA, 25 bp, Homo sapien
gacctcccggcctccaacctcagct

SEQ ID NO: 5448316 - DNA, 25 bp, Homo sapien
aggttggaatgcaggtggcaggatc

SEQ ID NO: 5448317 - DNA, 25 bp, Homo sapien
tacacgcacacaccacctaactaat

SEQ ID NO: 5448318 - DNA, 25 bp, Homo sapien
caggttcttggtttgtcacccaggt

SEQ ID NO: 5448319 - DNA, 25 bp, Homo sapien
taaggtgcggcccaacctcactctt

SEQ ID NO: 5448320 - DNA, 25 bp, Homo sapien
ttagttggatatagtcctatttgtc

SEQ ID NO: 5448321 - DNA, 25 bp, Homo sapien
tatttattgtctttcgatgtgcaga

SEQ ID NO: 5448322 - DNA, 25 bp, Homo sapien
ccaaatccaatgtcagagagtgttt

SEQ ID NO: 5448323 - DNA, 25 bp, Homo sapien
gattgccttagggacagaattaccc

SEQ ID NO: 5448324 - DNA, 25 bp, Homo sapien
caacgccaggaatcatgaagagact

SEQ ID NO: 5448325 - DNA, 25 bp, Homo sapien
tgtgggccgcatgcataaagtaagt

SEQ ID NO: 5448326 - DNA, 25 bp, Homo sapien
gatttcaaggtttgtgctgagctcc

SEQ ID NO: 5448327 - DNA, 25 bp, Homo sapien
ttaaagcaattgtcctcacagagac

SEQ ID NO: 5448328 - DNA, 25 bp, Homo sapien
gttgggaggcttacatacatcttga

SEQ ID NO: 5448329 - DNA, 25 bp, Homo sapien
gcagaccgactttaagagggaccag

SEQ ID NO: 5448330 - DNA, 25 bp, Homo sapien
tctagaatcaatggctaggagaggc

SEQ ID NO: 5448331 - DNA, 25 bp, Homo sapien
gatgtatttttatccaagtgccact

SEQ ID NO: 5448332 - DNA, 25 bp, Homo sapien
tgtttgttggccaagtgaaatgatc

SEQ ID NO: 5448333 - DNA, 25 bp, Homo sapien
aagttgtccttgactgatttgtcca

SEQ ID NO: 5448334 - DNA, 25 bp, Homo sapien
gcagttttccatgtaaagttgtcct

SEQ ID NO: 5448335 - DNA, 25 bp, Homo sapien
gatgagaattctaacacgggcctga

SEQ ID NO: 5448336 - DNA, 25 bp, Homo sapien
tacactcaggttgcaaaacacaggc

SEQ ID NO: 5448337 - DNA, 25 bp, Homo sapien
taagcaaatcggaatcgggtcaccc

SEQ ID NO: 5448338 - DNA, 25 bp, Homo sapien
ttaagtgcagtgaccaaaccggatg

SEQ ID NO: 5448339 - DNA, 25 bp, Homo sapien
catcctatgcgttgttaaggaagca

SEQ ID NO: 5448340 - DNA, 25 bp, Homo sapien
gggcaatactaccactgaatgagca

SEQ ID NO: 5448341 - DNA, 25 bp, Homo sapien
tcaaggagcttacactctacagggc

SEQ ID NO: 5448342 - DNA, 25 bp, Homo sapien
taggaagctaacctctcaggcaggg

SEQ ID NO: 5448343 - DNA, 25 bp, Homo sapien
tattcaagatttcaggtgctttttt

SEQ ID NO: 5448344 - DNA, 25 bp, Homo sapien
attcaagatttcaggtgcttttttt

SEQ ID NO: 5448345 - DNA, 25 bp, Homo sapien
ctattcaagatttcaggtgcttttt

SEQ ID NO: 5448346 - DNA, 25 bp, Homo sapien
taccggcccttcatatcatcagtgg

SEQ ID NO: 5448347 - DNA, 25 bp, Homo sapien
taaaagggaggagtatgggatacac

SEQ ID NO: 5448348 - DNA, 25 bp, Homo sapien
tttaaatagcactaacagctcaagg

SEQ ID NO: 5448349 - DNA, 25 bp, Homo sapien
ccggccagatttcaggtgcttttaa

SEQ ID NO: 5448350 - DNA, 25 bp, Homo sapien
tcgatccgtgatagtcacatgagca

SEQ ID NO: 5448351 - DNA, 25 bp, Homo sapien
ttatcccgttcatagcgaattcggc

SEQ ID NO: 5448352 - DNA, 25 bp, Homo sapien
tcaggatcgtagtgaacctttctca

SEQ ID NO: 5448353 - DNA, 25 bp, Homo sapien
cagagatgttccagtgtctgaagaa

SEQ ID NO: 5448354 - DNA, 25 bp, Homo sapien
aagtgatgtgtacatcagtacaatt

SEQ ID NO: 5448355 - DNA, 25 bp, Homo sapien
ctacaatgtggaacaaagaaaaagt

SEQ ID NO: 5448356 - DNA, 25 bp, Homo sapien
gaaaaagtgatgtgtacatcagtac

SEQ ID NO: 5448357 - DNA, 25 bp, Homo sapien
aaaagtgatgtgtacatcagtacaa

SEQ ID NO: 5448358 - DNA, 25 bp, Homo sapien
gatttgcctctatgacatacctgct

SEQ ID NO: 5448359 - DNA, 25 bp, Homo sapien
catacctgctatttgctaaaattgt

SEQ ID NO: 5448360 - DNA, 25 bp, Homo sapien
taactactggtagaagtgactcttg

SEQ ID NO: 5448361 - DNA, 25 bp, Homo sapien
agtgactcttgatttgcctctatga

SEQ ID NO: 5448362 - DNA, 25 bp, Homo sapien
taaccagtgacacggctgatgcttc

SEQ ID NO: 5448363 - DNA, 25 bp, Homo sapien
gaatgaaatatctgggagcaggcca

SEQ ID NO: 5448364 - DNA, 25 bp, Homo sapien
tttaattaagcacagtgcacacctg

SEQ ID NO: 5448365 - DNA, 25 bp, Homo sapien
tatcatgtgagtatgggagatcgag

SEQ ID NO: 5448366 - DNA, 25 bp, Homo sapien
gaacgtaagcttccggagacacctg

SEQ ID NO: 5448367 - DNA, 25 bp, Homo sapien
tgctaatggtaactctggtggtatc

SEQ ID NO: 5448368 - DNA, 25 bp, Homo sapien
taatcaacactcgtggagcacttcc

SEQ ID NO: 5448369 - DNA, 25 bp, Homo sapien
cagagaaccagattgctagatcaga

SEQ ID NO: 5448370 - DNA, 25 bp, Homo sapien
ccagcagggcagccactatgcccac

SEQ ID NO: 5448371 - DNA, 25 bp, Homo sapien
gctccacggcagagcggcccctgag

SEQ ID NO: 5448372 - DNA, 25 bp, Homo sapien
ccaggtatgtggaaagaacgatggc

SEQ ID NO: 5448373 - DNA, 25 bp, Homo sapien
ctcccatctccaggtatgtggaaag

SEQ ID NO: 5448374 - DNA, 25 bp, Homo sapien
atctccaggtatgtggaaagaacga

SEQ ID NO: 5448375 - DNA, 25 bp, Homo sapien
tgcaacccaaattccgtggtctcct

SEQ ID NO: 5448376 - DNA, 25 bp, Homo sapien
tctcctcatagggcacgagggccat

SEQ ID NO: 5448377 - DNA, 25 bp, Homo sapien
ctggatcgtgtggtttgcaaaggaa

SEQ ID NO: 5448378 - DNA, 25 bp, Homo sapien
tcctgccggatctggatcgtgtggt

SEQ ID NO: 5448379 - DNA, 25 bp, Homo sapien
tccgcctgcaccccgccctctgctc

SEQ ID NO: 5448380 - DNA, 25 bp, Homo sapien
ggctcttccgaatctgagtgagatt

SEQ ID NO: 5448381 - DNA, 25 bp, Homo sapien
gccgtgcaaaagaatcctgggtgac

SEQ ID NO: 5448382 - DNA, 25 bp, Homo sapien
gacgctctggccaaaagatacatta

SEQ ID NO: 5448383 - DNA, 25 bp, Homo sapien
gaaacaggtggaggaagcctttgtc

SEQ ID NO: 5448384 - DNA, 25 bp, Homo sapien
gaaatacatggtcgccgcagttccg

SEQ ID NO: 5448385 - DNA, 25 bp, Homo sapien
tgataacaatgggacagaacctgcc

SEQ ID NO: 5448386 - DNA, 25 bp, Homo sapien
cggctgcttcgatagtgataacaat

SEQ ID NO: 5448387 - DNA, 25 bp, Homo sapien
ccttagactgggtgttagcggtttg

SEQ ID NO: 5448388 - DNA, 25 bp, Homo sapien
gggtcacagggcctcttaggatccc

SEQ ID NO: 5448389 - DNA, 25 bp, Homo sapien
cgggacgaccagtgcgcccttcctg

SEQ ID NO: 5448390 - DNA, 25 bp, Homo sapien
ctgcggcaaccctccaggggtgaga

SEQ ID NO: 5448391 - DNA, 25 bp, Homo sapien
tcttaggatccccaggccatacggg

SEQ ID NO: 5448392 - DNA, 25 bp, Homo sapien
cggtcccgcgtggagcgcgcgctcc

SEQ ID NO: 5448393 - DNA, 25 bp, Homo sapien
cgggctggctgcgaaaaccgccggc

SEQ ID NO: 5448394 - DNA, 25 bp, Homo sapien
ggtcccgcgtggagcgcgcgctccg

SEQ ID NO: 5448395 - DNA, 25 bp, Homo sapien
cgccccgggctggctgcgaaaaccg

SEQ ID NO: 5448396 - DNA, 25 bp, Homo sapien
gcggtggaggagtgacgttgcggga

SEQ ID NO: 5448397 - DNA, 25 bp, Homo sapien
ttccctcgtgcgtccccagggtaca

SEQ ID NO: 5448398 - DNA, 25 bp, Homo sapien
tgcgtccccagggtacacggacgac

SEQ ID NO: 5448399 - DNA, 25 bp, Homo sapien
cagggtacacggacgacttaatccg

SEQ ID NO: 5448400 - DNA, 25 bp, Homo sapien
ctggcgctgaatgtgcctctcgacc

SEQ ID NO: 5448401 - DNA, 25 bp, Homo sapien
ctatcatgtgctccgccgctctctg

SEQ ID NO: 5448402 - DNA, 25 bp, Homo sapien
gcctctcgaccttttctatcatgtg

SEQ ID NO: 5448403 - DNA, 25 bp, Homo sapien
tgactttgtcgcttgcgcgttgtgc

SEQ ID NO: 5448404 - DNA, 25 bp, Homo sapien
gtcagaagcggcgtaatagcccgct

SEQ ID NO: 5448405 - DNA, 25 bp, Homo sapien
gcggcaatcgagtggaaaagtcaca

SEQ ID NO: 5448406 - DNA, 25 bp, Homo sapien
ggcgcgttagcggatgatggagaca

SEQ ID NO: 5448407 - DNA, 25 bp, Homo sapien
tcgctccgaagaaggcatggtcact

SEQ ID NO: 5448408 - DNA, 25 bp, Homo sapien
gctggacgtggaaggtgccgagggc

SEQ ID NO: 5448409 - DNA, 25 bp, Homo sapien
cccgtgaggacccacgctggacgtg

SEQ ID NO: 5448410 - DNA, 25 bp, Homo sapien
gcctggtaccctggccgcaggccct

SEQ ID NO: 5448411 - DNA, 25 bp, Homo sapien
ggtccattgagtgggaccgtgcggg

SEQ ID NO: 5448412 - DNA, 25 bp, Homo sapien
agctgaccaatcagcaggctctctt

SEQ ID NO: 5448413 - DNA, 25 bp, Homo sapien
gctgaccaatcagcaggctctcttc

SEQ ID NO: 5448414 - DNA, 25 bp, Homo sapien
gagctgaccaatcagcaggctctct

SEQ ID NO: 5448415 - DNA, 25 bp, Homo sapien
ctttaagccatggggtatccaactt

SEQ ID NO: 5448416 - DNA, 25 bp, Homo sapien
gctccatcacaagagggagccccat

SEQ ID NO: 5448417 - DNA, 25 bp, Homo sapien
tcaggctccatcacaagagggagcc

SEQ ID NO: 5448418 - DNA, 25 bp, Homo sapien
tttcaggctccatcacaagagggag

SEQ ID NO: 5448419 - DNA, 25 bp, Homo sapien
atgtcatccttatgcaggggacatg

SEQ ID NO: 5448420 - DNA, 25 bp, Homo sapien
tgcatgtcatccttatgcaggggac

SEQ ID NO: 5448421 - DNA, 25 bp, Homo sapien
tttagtatatgtgctgctgaaacta

SEQ ID NO: 5448422 - DNA, 25 bp, Homo sapien
ctaatcttctctgcatcattccaat

SEQ ID NO: 5448423 - DNA, 25 bp, Homo sapien
tttcaggttttcatagggccttcca

SEQ ID NO: 5448424 - DNA, 25 bp, Homo sapien
agaagtaatctgaggcggcccttag

SEQ ID NO: 5448425 - DNA, 25 bp, Homo sapien
ggcccttagtgctgaatgaccagac

SEQ ID NO: 5448426 - DNA, 25 bp, Homo sapien
cagactttgtcaccttgcctcggtt

SEQ ID NO: 5448427 - DNA, 25 bp, Homo sapien
atatcagaggagggttacatttctg

SEQ ID NO: 5448428 - DNA, 25 bp, Homo sapien
gaggagggttacatttctgcattcc

SEQ ID NO: 5448429 - DNA, 25 bp, Homo sapien
tcaaagtttggtccaactctgagct

SEQ ID NO: 5448430 - DNA, 25 bp, Homo sapien
ccattaccactgagttgatggacat

SEQ ID NO: 5448431 - DNA, 25 bp, Homo sapien
ccacaaattagtaatagcaggtggc

SEQ ID NO: 5448432 - DNA, 25 bp, Homo sapien
tatgccacaaattagtaatagcagg

SEQ ID NO: 5448433 - DNA, 25 bp, Homo sapien
taaagcttagtgaaatatgccacaa

SEQ ID NO: 5448434 - DNA, 25 bp, Homo sapien
aagcttagtgaaatatgccacaaat

SEQ ID NO: 5448435 - DNA, 25 bp, Homo sapien
tagaagttatgaacggttaatagaa

SEQ ID NO: 5448436 - DNA, 25 bp, Homo sapien
ttctctgtagcaaatataaattctg

SEQ ID NO: 5448437 - DNA, 25 bp, Homo sapien
gtcatacttttaactggctgttagg

SEQ ID NO: 5448438 - DNA, 25 bp, Homo sapien
gcacagcgagtggatgtcacagctc

SEQ ID NO: 5448439 - DNA, 25 bp, Homo sapien
agatctgtcatctcggacatgtctg

SEQ ID NO: 5448440 - DNA, 25 bp, Homo sapien
gatctgtcatctcggacatgtctgt

SEQ ID NO: 5448441 - DNA, 25 bp, Homo sapien
ttacaggacatattgcctctagtct

SEQ ID NO: 5448442 - DNA, 25 bp, Homo sapien
atattgtacttacaggacatattgc

SEQ ID NO: 5448443 - DNA, 25 bp, Homo sapien
aagcattatccagatactgctcaca

SEQ ID NO: 5448444 - DNA, 25 bp, Homo sapien
tatcaagacaccaagggtcagagac

SEQ ID NO: 5448445 - DNA, 25 bp, Homo sapien
tcagagactagtccaagggtttggt

SEQ ID NO: 5448446 - DNA, 25 bp, Homo sapien
aagccaagcattatccagatactgc

SEQ ID NO: 5448447 - DNA, 25 bp, Homo sapien
cgtgcgcttccagtaggaccggaaa

SEQ ID NO: 5448448 - DNA, 25 bp, Homo sapien
tccagttacaaatgcccgtgcgctt

SEQ ID NO: 5448449 - DNA, 25 bp, Homo sapien
tttagtgagcaaacgaaagctgtca

SEQ ID NO: 5448450 - DNA, 25 bp, Homo sapien
cgatgaatgaaaacccgagtctggg

SEQ ID NO: 5448451 - DNA, 25 bp, Homo sapien
cagcggccttcagtcggtaggcggc

SEQ ID NO: 5448452 - DNA, 25 bp, Homo sapien
ctccagccgcgctctctcccggcag

SEQ ID NO: 5448453 - DNA, 25 bp, Homo sapien
ggccttcagtcggtaggcggcggcg

SEQ ID NO: 5448454 - DNA, 25 bp, Homo sapien
cagccgcgctctctcccggcagtgg

SEQ ID NO: 5448455 - DNA, 25 bp, Homo sapien
ccgacatctacgaggcggtgtccgg

SEQ ID NO: 5448456 - DNA, 25 bp, Homo sapien
tccgacatctacgaggcggtgtccg

SEQ ID NO: 5448457 - DNA, 25 bp, Homo sapien
tgcgcgtccgacatctacgaggcgg

SEQ ID NO: 5448458 - DNA, 25 bp, Homo sapien
gcgtccgacatctacgaggcggtgt

SEQ ID NO: 5448459 - DNA, 25 bp, Homo sapien
tagcattttggttcgtgtatttttg

SEQ ID NO: 5448460 - DNA, 25 bp, Homo sapien
aaatgaaaggttctatgggcagaag

SEQ ID NO: 5448461 - DNA, 25 bp, Homo sapien
aaagtacccatatggtactgttctg

SEQ ID NO: 5448462 - DNA, 25 bp, Homo sapien
taagcatgtatacaaataggtagaa

SEQ ID NO: 5448463 - DNA, 25 bp, Homo sapien
ccctggtagtgagctgtaatttgtt

SEQ ID NO: 5448464 - DNA, 25 bp, Homo sapien
ttacgtggctaatagtgcaccctgg

SEQ ID NO: 5448465 - DNA, 25 bp, Homo sapien
aagtgataagaagatgacctagcct

SEQ ID NO: 5448466 - DNA, 25 bp, Homo sapien
gacctagcctcacgcaaatatatag

SEQ ID NO: 5448467 - DNA, 25 bp, Homo sapien
cataattggcagaatagaggcagag

SEQ ID NO: 5448468 - DNA, 25 bp, Homo sapien
gaccttggcaagaggagtctcagga

SEQ ID NO: 5448469 - DNA, 25 bp, Homo sapien
gcaactaggtgaatggaaatgccct

SEQ ID NO: 5448470 - DNA, 25 bp, Homo sapien
gaatcaaaagcgagcagcctaccaa

SEQ ID NO: 5448471 - DNA, 25 bp, Homo sapien
agagtatcctcaccctgtcatagtg

SEQ ID NO: 5448472 - DNA, 25 bp, Homo sapien
ggacggtagatactgagcacctcag

SEQ ID NO: 5448473 - DNA, 25 bp, Homo sapien
tgcttaagcatttggcaagggcagc

SEQ ID NO: 5448474 - DNA, 25 bp, Homo sapien
cattctgttctgaccaggacggtag

SEQ ID NO: 5448475 - DNA, 25 bp, Homo sapien
taaaacatgggactctaactaaagc

SEQ ID NO: 5448476 - DNA, 25 bp, Homo sapien
cacttaggagcagacagcagcgttg

SEQ ID NO: 5448477 - DNA, 25 bp, Homo sapien
ccaacatggtggttcagtgacgatg

SEQ ID NO: 5448478 - DNA, 25 bp, Homo sapien
gatatttgcttactgtgtgggccga

SEQ ID NO: 5448479 - DNA, 25 bp, Homo sapien
tccaacctggacaacgttatcaaga

SEQ ID NO: 5448480 - DNA, 25 bp, Homo sapien
tgcttgaggtcaagtattggaggct

SEQ ID NO: 5448481 - DNA, 25 bp, Homo sapien
ttgaggtcaagtattggaggctgca

SEQ ID NO: 5448482 - DNA, 25 bp, Homo sapien
ctggacaacgttatcaagaccccat

SEQ ID NO: 5448483 - DNA, 25 bp, Homo sapien
aatagttggatatggtggcatgtgt

SEQ ID NO: 5448484 - DNA, 25 bp, Homo sapien
taaaaatagttggatatggtggcat

SEQ ID NO: 5448485 - DNA, 25 bp, Homo sapien
ataataaaaatagttggatatggtg

SEQ ID NO: 5448486 - DNA, 25 bp, Homo sapien
aaatagttggatatggtggcatgtg

SEQ ID NO: 5448487 - DNA, 25 bp, Homo sapien
gatttgatccatgcctctagttaag

SEQ ID NO: 5448488 - DNA, 25 bp, Homo sapien
gaatagttggttatcgtgtctgaga

SEQ ID NO: 5448489 - DNA, 25 bp, Homo sapien
tgagaggatgtcttaagccacataa

SEQ ID NO: 5448490 - DNA, 25 bp, Homo sapien
cagcctagttttaagtcaatcctga

SEQ ID NO: 5448491 - DNA, 25 bp, Homo sapien
tggctttacaacagctcaaggttca

SEQ ID NO: 5448492 - DNA, 25 bp, Homo sapien
taagccaaagccaattttaaccaga

SEQ ID NO: 5448493 - DNA, 25 bp, Homo sapien
gaaatccaacagcactaaatcctgg

SEQ ID NO: 5448494 - DNA, 25 bp, Homo sapien
cagtatttctgggaactagtttagc

SEQ ID NO: 5448495 - DNA, 25 bp, Homo sapien
tttctgcaaccttctaagcccaaca

SEQ ID NO: 5448496 - DNA, 25 bp, Homo sapien
gaaaaatgagtgacaagaaagcatg

SEQ ID NO: 5448497 - DNA, 25 bp, Homo sapien
tctgcaaccttctaagcccaacagt

SEQ ID NO: 5448498 - DNA, 25 bp, Homo sapien
tctaagcccaacagtccctctctct

SEQ ID NO: 5448499 - DNA, 25 bp, Homo sapien
agcagcatcagtaggtggtccaaca

SEQ ID NO: 5448500 - DNA, 25 bp, Homo sapien
tgacaaagttttgggagttcctgcc

SEQ ID NO: 5448501 - DNA, 25 bp, Homo sapien
tttagagcgcaataccaagttgcag

SEQ ID NO: 5448502 - DNA, 25 bp, Homo sapien
caggcttactaagcatctgtccaga

SEQ ID NO: 5448503 - DNA, 25 bp, Homo sapien
tgactacagcatgggataggcacta

SEQ ID NO: 5448504 - DNA, 25 bp, Homo sapien
tcataaacagtatcgaatgccctgg

SEQ ID NO: 5448505 - DNA, 25 bp, Homo sapien
tgactcccaggaacgaagcagaaac

SEQ ID NO: 5448506 - DNA, 25 bp, Homo sapien
tatcgctggctctagtgtaacttct

SEQ ID NO: 5448507 - DNA, 25 bp, Homo sapien
cagacagacactatcctggctgaaa

SEQ ID NO: 5448508 - DNA, 25 bp, Homo sapien
tcctattgtcatcaggctgctagct

SEQ ID NO: 5448509 - DNA, 25 bp, Homo sapien
gagagtcttgactcaggttagctac

SEQ ID NO: 5448510 - DNA, 25 bp, Homo sapien
taaaatgatgcactcacagacagac

SEQ ID NO: 5448511 - DNA, 25 bp, Homo sapien
ccttctttaacgtcttggcagttct

SEQ ID NO: 5448512 - DNA, 25 bp, Homo sapien
taacgtcttggcagttctttcagaa

SEQ ID NO: 5448513 - DNA, 25 bp, Homo sapien
ttctttcagaaccaccctccgcaat

SEQ ID NO: 5448514 - DNA, 25 bp, Homo sapien
cctccgcaatccagacagatttgtt

SEQ ID NO: 5448515 - DNA, 25 bp, Homo sapien
cagccggtgtcaggattagcgcagc

SEQ ID NO: 5448516 - DNA, 25 bp, Homo sapien
tatacgtgtgatgtgctctgtcctg

SEQ ID NO: 5448517 - DNA, 25 bp, Homo sapien
agagggagcaggcaattcttagcca

SEQ ID NO: 5448518 - DNA, 25 bp, Homo sapien
cattctgtactggagagtgcaggtc

SEQ ID NO: 5448519 - DNA, 25 bp, Homo sapien
taaaatctggtcagctaattcactg

SEQ ID NO: 5448520 - DNA, 25 bp, Homo sapien
atctggtcagctaattcactgagag

SEQ ID NO: 5448521 - DNA, 25 bp, Homo sapien
tcctaaaatctggtcagctaattca

SEQ ID NO: 5448522 - DNA, 25 bp, Homo sapien
aagatttcctaaaatctggtcagct

SEQ ID NO: 5448523 - DNA, 25 bp, Homo sapien
tgtgaagaagttgctgaactactcc

SEQ ID NO: 5448524 - DNA, 25 bp, Homo sapien
tgaatggaatccttaccccctaagc

SEQ ID NO: 5448525 - DNA, 25 bp, Homo sapien
aagggacagccctgaagctgtacac

SEQ ID NO: 5448526 - DNA, 25 bp, Homo sapien
agagactccaatgggccctaagtcc

SEQ ID NO: 5448527 - DNA, 25 bp, Homo sapien
atcacatgcaaattgggggaagtaa

SEQ ID NO: 5448528 - DNA, 25 bp, Homo sapien
aagtgcttctgaaagttggtctgga

SEQ ID NO: 5448529 - DNA, 25 bp, Homo sapien
tcagtaagacttagggatgcaggtg

SEQ ID NO: 5448530 - DNA, 25 bp, Homo sapien
caaagatcctgactaatattgcccc

SEQ ID NO: 5448531 - DNA, 25 bp, Homo sapien
taaattagttgttcagcatgttgct

SEQ ID NO: 5448532 - DNA, 25 bp, Homo sapien
tcccacaacttttggatacactgtg

SEQ ID NO: 5448533 - DNA, 25 bp, Homo sapien
gagggacaacccaaatgaggcacaa

SEQ ID NO: 5448534 - DNA, 25 bp, Homo sapien
ggatacactgtgcatcatttccaga

SEQ ID NO: 5448535 - DNA, 25 bp, Homo sapien
agaaggagggacaacccaaatgagg

SEQ ID NO: 5448536 - DNA, 25 bp, Homo sapien
tttcaagattctaggaagaggcttc

SEQ ID NO: 5448537 - DNA, 25 bp, Homo sapien
gagaggaattggcattcagtcaagg

SEQ ID NO: 5448538 - DNA, 25 bp, Homo sapien
gtcaaggtgatcagaaaaggttctc

SEQ ID NO: 5448539 - DNA, 25 bp, Homo sapien
ggaagacatatgaaatgagggaaaa

SEQ ID NO: 5448540 - DNA, 25 bp, Homo sapien
ccaatgtttgttcacaggtagccag

SEQ ID NO: 5448541 - DNA, 25 bp, Homo sapien
tattcaagacacaacgatggtgctg

SEQ ID NO: 5448542 - DNA, 25 bp, Homo sapien
aaatagaatacacgtgagctgggcc

SEQ ID NO: 5448543 - DNA, 25 bp, Homo sapien
gctaaggctgaacacaaaaccgcta

SEQ ID NO: 5448544 - DNA, 25 bp, Homo sapien
acgactccaccgtcttgcccgacca

SEQ ID NO: 5448545 - DNA, 25 bp, Homo sapien
cagcagcggctggtgaaacgccgcc

SEQ ID NO: 5448546 - DNA, 25 bp, Homo sapien
gtcctgcctgtgagcgcggcgctcg

SEQ ID NO: 5448547 - DNA, 25 bp, Homo sapien
cctcggggtagtcccctgcggccat

SEQ ID NO: 5448548 - DNA, 25 bp, Homo sapien
ttgagcatgagcacccagtactcgg

SEQ ID NO: 5448549 - DNA, 25 bp, Homo sapien
caggtccggcgagcattggatctcc

SEQ ID NO: 5448550 - DNA, 25 bp, Homo sapien
tatccagaaggtggcgaacgtgcgc

SEQ ID NO: 5448551 - DNA, 25 bp, Homo sapien
tgtaatccatgcagaggacctcggc

SEQ ID NO: 5448552 - DNA, 25 bp, Homo sapien
aaactgcttcgggaaggcgctgcct

SEQ ID NO: 5448553 - DNA, 25 bp, Homo sapien
cacacaggcagaggaatccgggccg

SEQ ID NO: 5448554 - DNA, 25 bp, Homo sapien
gggctggcaacctgttggttgcttt

SEQ ID NO: 5448555 - DNA, 25 bp, Homo sapien
agcccgcgagggacgcacacaggca

SEQ ID NO: 5448556 - DNA, 25 bp, Homo sapien
tccacggatcccgccgagaagagca

SEQ ID NO: 5448557 - DNA, 25 bp, Homo sapien
cacggatcccgccgagaagagcaga

SEQ ID NO: 5448558 - DNA, 25 bp, Homo sapien
ggatcccgccgagaagagcagacag

SEQ ID NO: 5448559 - DNA, 25 bp, Homo sapien
acggatcccgccgagaagagcagac

SEQ ID NO: 5448560 - DNA, 25 bp, Homo sapien
tgggtcactccgctgagaagcgcga

SEQ ID NO: 5448561 - DNA, 25 bp, Homo sapien
ggtcactccgctgagaagcgcgact

SEQ ID NO: 5448562 - DNA, 25 bp, Homo sapien
cgtccctgggtcactccgctgagaa

SEQ ID NO: 5448563 - DNA, 25 bp, Homo sapien
actccgctgagaagcgcgactcaga

SEQ ID NO: 5448564 - DNA, 25 bp, Homo sapien
acaggggcggcgcaggccggtcact

SEQ ID NO: 5448565 - DNA, 25 bp, Homo sapien
ctgggtacccgtggcagcggcacat

SEQ ID NO: 5448566 - DNA, 25 bp, Homo sapien
ccccgcatgatccagacggagccgg

SEQ ID NO: 5448567 - DNA, 25 bp, Homo sapien
aggggcaggccgtgcgttctccccg

SEQ ID NO: 5448568 - DNA, 25 bp, Homo sapien
acagcggactcacggccgcaggctg

SEQ ID NO: 5448569 - DNA, 25 bp, Homo sapien
tttcgcccacctctggcgagcacgg

SEQ ID NO: 5448570 - DNA, 25 bp, Homo sapien
cgggactgcatggtgagcgccggcc

SEQ ID NO: 5448571 - DNA, 25 bp, Homo sapien
tggcgacgctctcgggacgtgccct

SEQ ID NO: 5448572 - DNA, 25 bp, Homo sapien
gaaatagttatctacctcccagagc

SEQ ID NO: 5448573 - DNA, 25 bp, Homo sapien
gggcaagtcacctaacagctccagg

SEQ ID NO: 5448574 - DNA, 25 bp, Homo sapien
tgccaaagcagggatcgtgtcactt

SEQ ID NO: 5448575 - DNA, 25 bp, Homo sapien
ggtatttccagactagctcccaaca

SEQ ID NO: 5448576 - DNA, 25 bp, Homo sapien
tcctgatttgcagcatccgtgagca

SEQ ID NO: 5448577 - DNA, 25 bp, Homo sapien
gacttaaaggtggtggaacactcca

SEQ ID NO: 5448578 - DNA, 25 bp, Homo sapien
tttgagctggtcacccagaaggcct

SEQ ID NO: 5448579 - DNA, 25 bp, Homo sapien
gatcttaatatcctgctgcagtgag

SEQ ID NO: 5448580 - DNA, 25 bp, Homo sapien
tgacatctaaggtgacactgtctaa

SEQ ID NO: 5448581 - DNA, 25 bp, Homo sapien
ctgtctaatccccattgcctatttt

SEQ ID NO: 5448582 - DNA, 25 bp, Homo sapien
tcttccttcttgacatctaaggtga

SEQ ID NO: 5448583 - DNA, 25 bp, Homo sapien
tctaaggtgacactgtctaatcccc

SEQ ID NO: 5448584 - DNA, 25 bp, Homo sapien
ggaatggtcctgcttatcgcctctg

SEQ ID NO: 5448585 - DNA, 25 bp, Homo sapien
ccaggaatggatgactttgcaagca

SEQ ID NO: 5448586 - DNA, 25 bp, Homo sapien
taacaagaaccgtggccaggaatgg

SEQ ID NO: 5448587 - DNA, 25 bp, Homo sapien
tgagtcccacactgaaggtcaccgt

SEQ ID NO: 5448588 - DNA, 25 bp, Homo sapien
cattgaagtcagtcagatttgcttc

SEQ ID NO: 5448589 - DNA, 25 bp, Homo sapien
ttgaagtcagtcagatttgcttcag

SEQ ID NO: 5448590 - DNA, 25 bp, Homo sapien
aatagtcaccccttttgaggccaga

SEQ ID NO: 5448591 - DNA, 25 bp, Homo sapien
aaatagtcaccccttttgaggccag

SEQ ID NO: 5448592 - DNA, 25 bp, Homo sapien
tgaaccaagctatcctggtggcagg

SEQ ID NO: 5448593 - DNA, 25 bp, Homo sapien
tgcaaaatgcaaacgtggagaccct

SEQ ID NO: 5448594 - DNA, 25 bp, Homo sapien
ccccagcttggagagtgtacgtgca

SEQ ID NO: 5448595 - DNA, 25 bp, Homo sapien
gagcattaaatccagtgagcacaca

SEQ ID NO: 5448596 - DNA, 25 bp, Homo sapien
gcatctttggtaggagactctgaac

SEQ ID NO: 5448597 - DNA, 25 bp, Homo sapien
tgataatccagttattgccgctgtg

SEQ ID NO: 5448598 - DNA, 25 bp, Homo sapien
gactctgaactctttggcgaagtag

SEQ ID NO: 5448599 - DNA, 25 bp, Homo sapien
aagtatctgttcacctgtagctggc

SEQ ID NO: 5448600 - DNA, 25 bp, Homo sapien
attgtggcaggtttcgtgtgacgac

SEQ ID NO: 5448601 - DNA, 25 bp, Homo sapien
tatttcttggacagagtgggtgtga

SEQ ID NO: 5448602 - DNA, 25 bp, Homo sapien
ttctctttatcgtggattgtggcag

SEQ ID NO: 5448603 - DNA, 25 bp, Homo sapien
catcgtatgtctagtttggttcagt

SEQ ID NO: 5448604 - DNA, 25 bp, Homo sapien
tctttactctccactctttgctcct

SEQ ID NO: 5448605 - DNA, 25 bp, Homo sapien
gagagctgccgttttgaggaggaag

SEQ ID NO: 5448606 - DNA, 25 bp, Homo sapien
ttctttactctccactctttgctcc

SEQ ID NO: 5448607 - DNA, 25 bp, Homo sapien
agctgccgttttgaggaggaagttt

SEQ ID NO: 5448608 - DNA, 25 bp, Homo sapien
cacaaagtgatataacagcccagac

SEQ ID NO: 5448609 - DNA, 25 bp, Homo sapien
gacagatgaccttaaaaactagagg

SEQ ID NO: 5448610 - DNA, 25 bp, Homo sapien
cagcccagacccaaaattttagtca

SEQ ID NO: 5448611 - DNA, 25 bp, Homo sapien
ctttatacattaggaactggtgcac

SEQ ID NO: 5448612 - DNA, 25 bp, Homo sapien
tattcacagtaagattctacttctt

SEQ ID NO: 5448613 - DNA, 25 bp, Homo sapien
atatatatcttctagggtaggctag

SEQ ID NO: 5448614 - DNA, 25 bp, Homo sapien
tttggccattccttcttttagctac

SEQ ID NO: 5448615 - DNA, 25 bp, Homo sapien
tagggtaggctagtagctattcaca

SEQ ID NO: 5448616 - DNA, 25 bp, Homo sapien
tgataggtgaccaaagctagaacct

SEQ ID NO: 5448617 - DNA, 25 bp, Homo sapien
taatttgatggctcagtggacacac

SEQ ID NO: 5448618 - DNA, 25 bp, Homo sapien
catgcccagcgtaacagtaagattc

SEQ ID NO: 5448619 - DNA, 25 bp, Homo sapien
tagctcacgccaaacaaagagacat

SEQ ID NO: 5448620 - DNA, 25 bp, Homo sapien
aataaacaaaaagagcgattgaaga

SEQ ID NO: 5448621 - DNA, 25 bp, Homo sapien
tttctctacccattggccttggtga

SEQ ID NO: 5448622 - DNA, 25 bp, Homo sapien
caaaaagagcgattgaagaacagca

SEQ ID NO: 5448623 - DNA, 25 bp, Homo sapien
tatttctctacccattggccttggt

SEQ ID NO: 5448624 - DNA, 25 bp, Homo sapien
tctaacaagacgaacaggcagtggc

SEQ ID NO: 5448625 - DNA, 25 bp, Homo sapien
taaggcactcctacagggacaagag

SEQ ID NO: 5448626 - DNA, 25 bp, Homo sapien
ttcacggccaataggagggagccct

SEQ ID NO: 5448627 - DNA, 25 bp, Homo sapien
ccagcggccactttacgaagacagt

SEQ ID NO: 5448628 - DNA, 25 bp, Homo sapien
cattcggcaactagggtggtgtaaa

SEQ ID NO: 5448629 - DNA, 25 bp, Homo sapien
cattggcttgactctaaaggaggac

SEQ ID NO: 5448630 - DNA, 25 bp, Homo sapien
caaatacacgagcaacagcattggc

SEQ ID NO: 5448631 - DNA, 25 bp, Homo sapien
cgattcaggtcacgcaaaggaggga

SEQ ID NO: 5448632 - DNA, 25 bp, Homo sapien
tcatgtgcgccaaggtattctgggc

SEQ ID NO: 5448633 - DNA, 25 bp, Homo sapien
ctggcaccgaccaagctgtcagggt

SEQ ID NO: 5448634 - DNA, 25 bp, Homo sapien
tggcagacccaactcctaagctggc

SEQ ID NO: 5448635 - DNA, 25 bp, Homo sapien
cgacagtttctaagcagtggaacaa

SEQ ID NO: 5448636 - DNA, 25 bp, Homo sapien
ggaaggaatgggagctgtcagggtc

SEQ ID NO: 5448637 - DNA, 25 bp, Homo sapien
tcataaagtctactgagaactgttc

SEQ ID NO: 5448638 - DNA, 25 bp, Homo sapien
gagaactgttccattataaacatat

SEQ ID NO: 5448639 - DNA, 25 bp, Homo sapien
cctacctgccgttttggtcacagtg

SEQ ID NO: 5448640 - DNA, 25 bp, Homo sapien
gaaaaacagaccgacaacacgcagt

SEQ ID NO: 5448641 - DNA, 25 bp, Homo sapien
aacacgcagttattggtcgcagagg

SEQ ID NO: 5448642 - DNA, 25 bp, Homo sapien
gaaaacacggtggagcgtcacatca

SEQ ID NO: 5448643 - DNA, 25 bp, Homo sapien
ttaaaatgaataggtaggaactgcc

SEQ ID NO: 5448644 - DNA, 25 bp, Homo sapien
ggaaggacccagcagtctcttgtgt

SEQ ID NO: 5448645 - DNA, 25 bp, Homo sapien
aggaggaactgaggcgggagcgcca

SEQ ID NO: 5448646 - DNA, 25 bp, Homo sapien
ggagcgccacggacaccaggtcctg

SEQ ID NO: 5448647 - DNA, 25 bp, Homo sapien
cagcagtctcttgtgttttgaaggt

SEQ ID NO: 5448648 - DNA, 25 bp, Homo sapien
gacaatgatgtacacagagcatacg

SEQ ID NO: 5448649 - DNA, 25 bp, Homo sapien
gaggttctgtggatcgtctggacaa

SEQ ID NO: 5448650 - DNA, 25 bp, Homo sapien
gtataccacgttttgtctgggagca

SEQ ID NO: 5448651 - DNA, 25 bp, Homo sapien
ggtagtttctcgagccacagaggtt

SEQ ID NO: 5448652 - DNA, 25 bp, Homo sapien
gattgttgattggtgaatccctggc

SEQ ID NO: 5448653 - DNA, 25 bp, Homo sapien
ggtctaactggctagttaggaggcc

SEQ ID NO: 5448654 - DNA, 25 bp, Homo sapien
taactggctagttaggaggccgctc

SEQ ID NO: 5448655 - DNA, 25 bp, Homo sapien
atccctggccttcgggtcggctgga

SEQ ID NO: 5448656 - DNA, 25 bp, Homo sapien
cctctagactctcgtccatgttcag

SEQ ID NO: 5448657 - DNA, 25 bp, Homo sapien
tctggtaggacagctcgaacatggt

SEQ ID NO: 5448658 - DNA, 25 bp, Homo sapien
actctcgtccatgttcagtctctgc

SEQ ID NO: 5448659 - DNA, 25 bp, Homo sapien
tcttctgcagctctcggcgaacaca

SEQ ID NO: 5448660 - DNA, 25 bp, Homo sapien
cagaatggaaaacggctccacagct

SEQ ID NO: 5448661 - DNA, 25 bp, Homo sapien
ctcgggcaggggacagacttttctt

SEQ ID NO: 5448662 - DNA, 25 bp, Homo sapien
ggcaggggacagacttttctttgca

SEQ ID NO: 5448663 - DNA, 25 bp, Homo sapien
acttttctttgcattcagaatggaa

SEQ ID NO: 5448664 - DNA, 25 bp, Homo sapien
tgggccagctccttcctagtggcaa

SEQ ID NO: 5448665 - DNA, 25 bp, Homo sapien
ctttcccctgctgggttagtcagtg

SEQ ID NO: 5448666 - DNA, 25 bp, Homo sapien
taaagtgacactaatgatagcttta

SEQ ID NO: 5448667 - DNA, 25 bp, Homo sapien
tgtaaccttctatcactaaagtgac

SEQ ID NO: 5448668 - DNA, 25 bp, Homo sapien
tgaatttgcaagtgtcacctgctgg

SEQ ID NO: 5448669 - DNA, 25 bp, Homo sapien
catacctagggatctcaaccttggc

SEQ ID NO: 5448670 - DNA, 25 bp, Homo sapien
ggcctctctcggctagatgccaata

SEQ ID NO: 5448671 - DNA, 25 bp, Homo sapien
ctctgcgggcaaaaccatccctgtt

SEQ ID NO: 5448672 - DNA, 25 bp, Homo sapien
aggaactgacggaggatttaaacat

SEQ ID NO: 5448673 - DNA, 25 bp, Homo sapien
gatacgcacctaagactctgaatgg

SEQ ID NO: 5448674 - DNA, 25 bp, Homo sapien
ttcctcaaaggactaagacactaag

SEQ ID NO: 5448675 - DNA, 25 bp, Homo sapien
tacgagattattaggcgaatgcaga

SEQ ID NO: 5448676 - DNA, 25 bp, Homo sapien
gaatgggactcacttgtatttaaca

SEQ ID NO: 5448677 - DNA, 25 bp, Homo sapien
gccaagccagcatcactagagaatt

SEQ ID NO: 5448678 - DNA, 25 bp, Homo sapien
actggttattgatgtaaatttagga

SEQ ID NO: 5448679 - DNA, 25 bp, Homo sapien
caatgctcttcaaagatggtaacca

SEQ ID NO: 5448680 - DNA, 25 bp, Homo sapien
gccctatctaactttatgagcagtg

SEQ ID NO: 5448681 - DNA, 25 bp, Homo sapien
actgacacatctggggcttgatggt

SEQ ID NO: 5448682 - DNA, 25 bp, Homo sapien
ttaggcaaaatcatctccacattca

SEQ ID NO: 5448683 - DNA, 25 bp, Homo sapien
tggagccttctccatgcactgtgcc

SEQ ID NO: 5448684 - DNA, 25 bp, Homo sapien
tccacattcagcctccatggagcct

SEQ ID NO: 5448685 - DNA, 25 bp, Homo sapien
agcctccatggagccttctccatgc

SEQ ID NO: 5448686 - DNA, 25 bp, Homo sapien
aaatcttgcaatctgggctttacgg

SEQ ID NO: 5448687 - DNA, 25 bp, Homo sapien
gtcctctaggaggataaatcctgga

SEQ ID NO: 5448688 - DNA, 25 bp, Homo sapien
ggattaggctttagcaaagcagttt

SEQ ID NO: 5448689 - DNA, 25 bp, Homo sapien
tgtagtcctctaggaggataaatcc

SEQ ID NO: 5448690 - DNA, 25 bp, Homo sapien
gcatcaggccacatatccttgtaat

SEQ ID NO: 5448691 - DNA, 25 bp, Homo sapien
tcaggccacatatccttgtaataaa

SEQ ID NO: 5448692 - DNA, 25 bp, Homo sapien
tgtaataaatctgcatatgggtctc

SEQ ID NO: 5448693 - DNA, 25 bp, Homo sapien
taaatctgcatatgggtctccgaat

SEQ ID NO: 5448694 - DNA, 25 bp, Homo sapien
tgcctgccttggcctcccaaagtgc

SEQ ID NO: 5448695 - DNA, 25 bp, Homo sapien
gcatgtaccactatacccggctaat

SEQ ID NO: 5448696 - DNA, 25 bp, Homo sapien
tctgcctgccttggcctcccaaagt

SEQ ID NO: 5448697 - DNA, 25 bp, Homo sapien
acaggcatgtaccactatacccggc

SEQ ID NO: 5448698 - DNA, 25 bp, Homo sapien
gaaccacagtataagtgagccctgc

SEQ ID NO: 5448699 - DNA, 25 bp, Homo sapien
cagtataagtgagccctgcagggtg

SEQ ID NO: 5448700 - DNA, 25 bp, Homo sapien
cttctgttctgaaccacagtataag

SEQ ID NO: 5448701 - DNA, 25 bp, Homo sapien
tgttctgaaccacagtataagtgag

SEQ ID NO: 5448702 - DNA, 25 bp, Homo sapien
taaaactttcatcgctccactgcag

SEQ ID NO: 5448703 - DNA, 25 bp, Homo sapien
ttgtgaatcatccatcaatccatgg

SEQ ID NO: 5448704 - DNA, 25 bp, Homo sapien
ccatggatgtgatgatgcccaaata

SEQ ID NO: 5448705 - DNA, 25 bp, Homo sapien
agatttctattacgcttttgggatg

SEQ ID NO: 5448706 - DNA, 25 bp, Homo sapien
tgagactgcagtttcccattgccta

SEQ ID NO: 5448707 - DNA, 25 bp, Homo sapien
tgaaccccttctggctacaaagact

SEQ ID NO: 5448708 - DNA, 25 bp, Homo sapien
aagactgcagctgtacacgtgtgag

SEQ ID NO: 5448709 - DNA, 25 bp, Homo sapien
aatatcctcaaaagggtagaggatc

SEQ ID NO: 5448710 - DNA, 25 bp, Homo sapien
ctccattgttacagatttcacagat

SEQ ID NO: 5448711 - DNA, 25 bp, Homo sapien
tgcaatttggcagcctgatggccat

SEQ ID NO: 5448712 - DNA, 25 bp, Homo sapien
gatgatctagcacaactatgcttgg

SEQ ID NO: 5448713 - DNA, 25 bp, Homo sapien
agaacagaagtcttgtacacacagg

SEQ ID NO: 5448714 - DNA, 25 bp, Homo sapien
ggaaccctgcttggatagaccaact

SEQ ID NO: 5448715 - DNA, 25 bp, Homo sapien
tggctgttttgagtcaagcatacat

SEQ ID NO: 5448716 - DNA, 25 bp, Homo sapien
gagtcaagcatacatttcccaccat

SEQ ID NO: 5448717 - DNA, 25 bp, Homo sapien
gtcaagcatacatttcccaccattc

SEQ ID NO: 5448718 - DNA, 25 bp, Homo sapien
ctggctgttttgagtcaagcataca

SEQ ID NO: 5448719 - DNA, 25 bp, Homo sapien
ctctgaggaaccattaactccaata

SEQ ID NO: 5448720 - DNA, 25 bp, Homo sapien
gaagccatagatagaccttctttta

SEQ ID NO: 5448721 - DNA, 25 bp, Homo sapien
tgaggaaccattaactccaataaac

SEQ ID NO: 5448722 - DNA, 25 bp, Homo sapien
ttaggaagccatagatagaccttct

SEQ ID NO: 5448723 - DNA, 25 bp, Homo sapien
ctctaaaggagaagtttgagcatct

SEQ ID NO: 5448724 - DNA, 25 bp, Homo sapien
aatagggaccttaataagctctggg

SEQ ID NO: 5448725 - DNA, 25 bp, Homo sapien
ccttgaggaagacatgagagttatt

SEQ ID NO: 5448726 - DNA, 25 bp, Homo sapien
tctctatttagtccttggagaaagg

SEQ ID NO: 5448727 - DNA, 25 bp, Homo sapien
gaaagcatcgaatatagtttctgac

SEQ ID NO: 5448728 - DNA, 25 bp, Homo sapien
gtttctgacttacagcaagggatca

SEQ ID NO: 5448729 - DNA, 25 bp, Homo sapien
tagcttatcccaatctaaatagaga

SEQ ID NO: 5448730 - DNA, 25 bp, Homo sapien
gattttctatgatttagactcattc

SEQ ID NO: 5448731 - DNA, 25 bp, Homo sapien
tgtgtgaaagaagcccatgaaatct

SEQ ID NO: 5448732 - DNA, 25 bp, Homo sapien
ttgtgtgaaagaagcccatgaaatc

SEQ ID NO: 5448733 - DNA, 25 bp, Homo sapien
gaaatctgcctggttgaacttccag

SEQ ID NO: 5448734 - DNA, 25 bp, Homo sapien
cctggttgaacttccagctcaggga

SEQ ID NO: 5448735 - DNA, 25 bp, Homo sapien
aaattgcagtgtcatgttcaaggtc

SEQ ID NO: 5448736 - DNA, 25 bp, Homo sapien
aattgcagtgtcatgttcaaggtct

SEQ ID NO: 5448737 - DNA, 25 bp, Homo sapien
ttgcagtgtcatgttcaaggtctgc

SEQ ID NO: 5448738 - DNA, 25 bp, Homo sapien
attgcagtgtcatgttcaaggtctg

SEQ ID NO: 5448739 - DNA, 25 bp, Homo sapien
ctaaacaagaggacaacggagggtg

SEQ ID NO: 5448740 - DNA, 25 bp, Homo sapien
cagaccgggttatggcctaatggca

SEQ ID NO: 5448741 - DNA, 25 bp, Homo sapien
tctgtgggctgccagaaaggccaaa

SEQ ID NO: 5448742 - DNA, 25 bp, Homo sapien
ggaacattcctactgcaagctctgg

SEQ ID NO: 5448743 - DNA, 25 bp, Homo sapien
gacgttaccattggttgacaaggct

SEQ ID NO: 5448744 - DNA, 25 bp, Homo sapien
gttaccattggttgacaaggctttg

SEQ ID NO: 5448745 - DNA, 25 bp, Homo sapien
aaggctttggtaccatgtgctcagc

SEQ ID NO: 5448746 - DNA, 25 bp, Homo sapien
ctgtgacgttaccattggttgacaa

SEQ ID NO: 5448747 - DNA, 25 bp, Homo sapien
acaggcttctcggtgacatctttac

SEQ ID NO: 5448748 - DNA, 25 bp, Homo sapien
tcaatgtaggacagtttcttccatc

SEQ ID NO: 5448749 - DNA, 25 bp, Homo sapien
tgcaacaggcttctcggtgacatct

SEQ ID NO: 5448750 - DNA, 25 bp, Homo sapien
caatgtaggacagtttcttccatct

SEQ ID NO: 5448751 - DNA, 25 bp, Homo sapien
ctccagcatctcaaggtgttccttt

SEQ ID NO: 5448752 - DNA, 25 bp, Homo sapien
cctccagcatctcaaggtgttcctt

SEQ ID NO: 5448753 - DNA, 25 bp, Homo sapien
tgaaagtcaattgtttacttgaact

SEQ ID NO: 5448754 - DNA, 25 bp, Homo sapien
agtcaattgtttacttgaactcggg

SEQ ID NO: 5448755 - DNA, 25 bp, Homo sapien
tacttgaactcgggaccgagcagtc

SEQ ID NO: 5448756 - DNA, 25 bp, Homo sapien
aaagtcaattgtttacttgaactcg

SEQ ID NO: 5448757 - DNA, 25 bp, Homo sapien
cagagagagtcctggtcttaaaaat

SEQ ID NO: 5448758 - DNA, 25 bp, Homo sapien
tggactgcaatatattctgtggatt

SEQ ID NO: 5448759 - DNA, 25 bp, Homo sapien
taaatccatatctaattaggctgca

SEQ ID NO: 5448760 - DNA, 25 bp, Homo sapien
ttcccttttggactgcaatatattc

SEQ ID NO: 5448761 - DNA, 25 bp, Homo sapien
aagtgacctggaatagcttggctgt

SEQ ID NO: 5448762 - DNA, 25 bp, Homo sapien
tgacctggaatagcttggctgtttc

SEQ ID NO: 5448763 - DNA, 25 bp, Homo sapien
caattagtatctcaagggtttggga

SEQ ID NO: 5448764 - DNA, 25 bp, Homo sapien
cctgtgcaagtctgccaattagtat

SEQ ID NO: 5448765 - DNA, 25 bp, Homo sapien
tccttctcgtaattcagcattcatt

SEQ ID NO: 5448766 - DNA, 25 bp, Homo sapien
attcattagtttgacggaacaaaag

SEQ ID NO: 5448767 - DNA, 25 bp, Homo sapien
ttccttctcgtaattcagcattcat

SEQ ID NO: 5448768 - DNA, 25 bp, Homo sapien
tagtttgacggaacaaaagcaggca

SEQ ID NO: 5448769 - DNA, 25 bp, Homo sapien
tctatgagggctaatctggacttcc

SEQ ID NO: 5448770 - DNA, 25 bp, Homo sapien
aaaacaggccctcacttcgtcagta

SEQ ID NO: 5448771 - DNA, 25 bp, Homo sapien
cacacattttgtcggtcggtcagga

SEQ ID NO: 5448772 - DNA, 25 bp, Homo sapien
tagtcacagacctgcccaaattcgg

SEQ ID NO: 5448773 - DNA, 25 bp, Homo sapien
catgaggcatgaactgttcggcacc

SEQ ID NO: 5448774 - DNA, 25 bp, Homo sapien
gctcagcaggtagtaaggacatcaa

SEQ ID NO: 5448775 - DNA, 25 bp, Homo sapien
tgaaagtgagaagtcagaagaccca

SEQ ID NO: 5448776 - DNA, 25 bp, Homo sapien
cactgggagaccgagcatgaggcat

SEQ ID NO: 5448777 - DNA, 25 bp, Homo sapien
ctggtgactcggttgtgggcactga

SEQ ID NO: 5448778 - DNA, 25 bp, Homo sapien
cctgtgagctgtggattcaaagatg

SEQ ID NO: 5448779 - DNA, 25 bp, Homo sapien
agggctgctgagaagctatgaatac

SEQ ID NO: 5448780 - DNA, 25 bp, Homo sapien
ctgaggcgctgtgttcctgtgagct

SEQ ID NO: 5448781 - DNA, 25 bp, Homo sapien
gatgacaattcctaagctctgtggg

SEQ ID NO: 5448782 - DNA, 25 bp, Homo sapien
tccaacaaatgctgaggtcacacgg

SEQ ID NO: 5448783 - DNA, 25 bp, Homo sapien
gctctgtgggtatgctggactagca

SEQ ID NO: 5448784 - DNA, 25 bp, Homo sapien
ttttcaagggagagagaaccagtga

SEQ ID NO: 5448785 - DNA, 25 bp, Homo sapien
tagggtttcccgataccaccacatg

SEQ ID NO: 5448786 - DNA, 25 bp, Homo sapien
tgaagcagtccagaagaggccaaaa

SEQ ID NO: 5448787 - DNA, 25 bp, Homo sapien
taaaacgcctgaaactgacaagaag

SEQ ID NO: 5448788 - DNA, 25 bp, Homo sapien
tactcgatatgacagacaggtctgc

SEQ ID NO: 5448789 - DNA, 25 bp, Homo sapien
ctatgtagtaaaggtcaggcaggac

SEQ ID NO: 5448790 - DNA, 25 bp, Homo sapien
tgtgtcctcaggcactacgatcagg

SEQ ID NO: 5448791 - DNA, 25 bp, Homo sapien
aaagagtactcactttggagcccac

SEQ ID NO: 5448792 - DNA, 25 bp, Homo sapien
tcaaaactcacgtttgaaaggctcc

SEQ ID NO: 5448793 - DNA, 25 bp, Homo sapien
aatacaggtggatctgttgaaggag

SEQ ID NO: 5448794 - DNA, 25 bp, Homo sapien
acaggtggatctgttgaaggaggta

SEQ ID NO: 5448795 - DNA, 25 bp, Homo sapien
caggtggatctgttgaaggaggtat

SEQ ID NO: 5448796 - DNA, 25 bp, Homo sapien
tacaggtggatctgttgaaggaggt

SEQ ID NO: 5448797 - DNA, 25 bp, Homo sapien
aactgaaggttatctggcttagcag

SEQ ID NO: 5448798 - DNA, 25 bp, Homo sapien
acaaactaactgaaggttatctggc

SEQ ID NO: 5448799 - DNA, 25 bp, Homo sapien
tgaaggttatctggcttagcagtcc

SEQ ID NO: 5448800 - DNA, 25 bp, Homo sapien
ctaactgaaggttatctggcttagc

SEQ ID NO: 5448801 - DNA, 25 bp, Homo sapien
ttatgccaatgcaagccctgacacc

SEQ ID NO: 5448802 - DNA, 25 bp, Homo sapien
tcaaaggaaacgatatcactagcag

SEQ ID NO: 5448803 - DNA, 25 bp, Homo sapien
ctagcaggtagcactaccgagtttc

SEQ ID NO: 5448804 - DNA, 25 bp, Homo sapien
ttcactcgcccatcaaaggaaacga

SEQ ID NO: 5448805 - DNA, 25 bp, Homo sapien
gacgtggacaggattcgtatgtcca

SEQ ID NO: 5448806 - DNA, 25 bp, Homo sapien
cgtggacaggattcgtatgtccagc

SEQ ID NO: 5448807 - DNA, 25 bp, Homo sapien
ctggacgtggacaggattcgtatgt

SEQ ID NO: 5448808 - DNA, 25 bp, Homo sapien
ggacaggattcgtatgtccagccat

SEQ ID NO: 5448809 - DNA, 25 bp, Homo sapien
gcactaacccaattgtcatgcctgg

SEQ ID NO: 5448810 - DNA, 25 bp, Homo sapien
taaatgcatttgctagcactaaccc

SEQ ID NO: 5448811 - DNA, 25 bp, Homo sapien
taagtttacaggtctgggacatagg

SEQ ID NO: 5448812 - DNA, 25 bp, Homo sapien
cataggagggtctggcaaatgctga

SEQ ID NO: 5448813 - DNA, 25 bp, Homo sapien
tgctagctcacataaagttgcccca

SEQ ID NO: 5448814 - DNA, 25 bp, Homo sapien
caacaacaaaaccaagtgccctgag

SEQ ID NO: 5448815 - DNA, 25 bp, Homo sapien
gaggattatgcagaagggcagccga

SEQ ID NO: 5448816 - DNA, 25 bp, Homo sapien
gggcagccgaggtgttgggtattcc

SEQ ID NO: 5448817 - DNA, 25 bp, Homo sapien
cttctactgatcctgtgtgctctgc

SEQ ID NO: 5448818 - DNA, 25 bp, Homo sapien
tgagggatccgggtagatcgctact

SEQ ID NO: 5448819 - DNA, 25 bp, Homo sapien
ggccagagtccgcatctcataactt

SEQ ID NO: 5448820 - DNA, 25 bp, Homo sapien
cataacttctactgatcctgtgtgc

SEQ ID NO: 5448821 - DNA, 25 bp, Homo sapien
tacatggtggtaaaccaccagactg

SEQ ID NO: 5448822 - DNA, 25 bp, Homo sapien
gtggtctggccataaggcacagtac

SEQ ID NO: 5448823 - DNA, 25 bp, Homo sapien
ctggtggtctggccataaggcacag

SEQ ID NO: 5448824 - DNA, 25 bp, Homo sapien
acagtacatggtggtaaaccaccag

SEQ ID NO: 5448825 - DNA, 25 bp, Homo sapien
gggttatgtcagtttctttggatct

SEQ ID NO: 5448826 - DNA, 25 bp, Homo sapien
aactccatcacttcaatactttcca

SEQ ID NO: 5448827 - DNA, 25 bp, Homo sapien
taggcaggtaggcttacctccaaaa

SEQ ID NO: 5448828 - DNA, 25 bp, Homo sapien
gttcttaggcaggtaggcttacctc

SEQ ID NO: 5448829 - DNA, 25 bp, Homo sapien
atttaacatgactaatgcatgctgc

SEQ ID NO: 5448830 - DNA, 25 bp, Homo sapien
catttaacatgactaatgcatgctg

SEQ ID NO: 5448831 - DNA, 25 bp, Homo sapien
tatgagagcaggcacattttacttt

SEQ ID NO: 5448832 - DNA, 25 bp, Homo sapien
agtttgtatatgccaagggtgagac

SEQ ID NO: 5448833 - DNA, 25 bp, Homo sapien
tatttttagagacttatgaacgcca

SEQ ID NO: 5448834 - DNA, 25 bp, Homo sapien
tttggacttggtgttctatgaacta

SEQ ID NO: 5448835 - DNA, 25 bp, Homo sapien
taagttacgggaaagcagcctgcac

SEQ ID NO: 5448836 - DNA, 25 bp, Homo sapien
cacccacggtaagatgaaaaggcag

SEQ ID NO: 5448837 - DNA, 25 bp, Homo sapien
gcctgcatcattgaccaagtttggg

SEQ ID NO: 5448838 - DNA, 25 bp, Homo sapien
agcctgcacccacggtaagatgaaa

SEQ ID NO: 5448839 - DNA, 25 bp, Homo sapien
gagtctctgtctctattctttaaaa

SEQ ID NO: 5448840 - DNA, 25 bp, Homo sapien
ctgtacagaaaataagatttgaggc

SEQ ID NO: 5448841 - DNA, 25 bp, Homo sapien
aaataagatttgaggcccacacagt

SEQ ID NO: 5448842 - DNA, 25 bp, Homo sapien
acagaaaataagatttgaggcccac

SEQ ID NO: 5448843 - DNA, 25 bp, Homo sapien
tggtggtacagcatggcgttctcct

SEQ ID NO: 5448844 - DNA, 25 bp, Homo sapien
gatgagcggctcttcgtacacgtac

SEQ ID NO: 5448845 - DNA, 25 bp, Homo sapien
gctgcccggcagctgaacaaatagg

SEQ ID NO: 5448846 - DNA, 25 bp, Homo sapien
aataggctcggagcgacttcagccg

SEQ ID NO: 5448847 - DNA, 25 bp, Homo sapien
cactggtagcttagaggaaggagaa

SEQ ID NO: 5448848 - DNA, 25 bp, Homo sapien
caaaagaggtatggatggggcccac

SEQ ID NO: 5448849 - DNA, 25 bp, Homo sapien
cctgtcatctgctacaaaagaggta

SEQ ID NO: 5448850 - DNA, 25 bp, Homo sapien
gcccactggtagcttagaggaagga

SEQ ID NO: 5448851 - DNA, 25 bp, Homo sapien
taataccacccactgtagttgcaca

SEQ ID NO: 5448852 - DNA, 25 bp, Homo sapien
tatcccagttgtggactatgcgtgc

SEQ ID NO: 5448853 - DNA, 25 bp, Homo sapien
gagaaagctgtcatccacgtggcag

SEQ ID NO: 5448854 - DNA, 25 bp, Homo sapien
gaaagacctatggatcgctggcagc

SEQ ID NO: 5448855 - DNA, 25 bp, Homo sapien
tgtaagggtcatcaactggtcccct

SEQ ID NO: 5448856 - DNA, 25 bp, Homo sapien
tgctgtaagggtcatcaactggtcc

SEQ ID NO: 5448857 - DNA, 25 bp, Homo sapien
gctgtaagggtcatcaactggtccc

SEQ ID NO: 5448858 - DNA, 25 bp, Homo sapien
ctcctagggtattgctgtaagggtc

SEQ ID NO: 5448859 - DNA, 25 bp, Homo sapien
acctccgcgtcccgcgctcatgcca

SEQ ID NO: 5448860 - DNA, 25 bp, Homo sapien
tgcaacctccgcgtcccgcgctcat

SEQ ID NO: 5448861 - DNA, 25 bp, Homo sapien
caacctccgcgtcccgcgctcatgc

SEQ ID NO: 5448862 - DNA, 25 bp, Homo sapien
cctccgcgtcccgcgctcatgccat

SEQ ID NO: 5448863 - DNA, 25 bp, Homo sapien
agtaaggtaaatccagtcttttgca

SEQ ID NO: 5448864 - DNA, 25 bp, Homo sapien
taaggtaaatccagtcttttgcatt

SEQ ID NO: 5448865 - DNA, 25 bp, Homo sapien
attcagtaaggtaaatccagtcttt

SEQ ID NO: 5448866 - DNA, 25 bp, Homo sapien
tcagtaaggtaaatccagtcttttg

SEQ ID NO: 5448867 - DNA, 25 bp, Homo sapien
taaactcttgactggatgtggtggc

SEQ ID NO: 5448868 - DNA, 25 bp, Homo sapien
gaaaggaaggtcaatctcaccatcc

SEQ ID NO: 5448869 - DNA, 25 bp, Homo sapien
agaatgcttcttgtcatagttgacc

SEQ ID NO: 5448870 - DNA, 25 bp, Homo sapien
gggctaccaggattctctatatatt

SEQ ID NO: 5448871 - DNA, 25 bp, Homo sapien
tatgttgtacaagatttagggactg

SEQ ID NO: 5448872 - DNA, 25 bp, Homo sapien
cagcttcctttaaatccatgcttga

SEQ ID NO: 5448873 - DNA, 25 bp, Homo sapien
gaattccctagagtgatattcctag

SEQ ID NO: 5448874 - DNA, 25 bp, Homo sapien
gacttactaggtaagacacaagtgg

SEQ ID NO: 5448875 - DNA, 25 bp, Homo sapien
tgcctcatttgtatgcccacatggg

SEQ ID NO: 5448876 - DNA, 25 bp, Homo sapien
taaatggttttcatgtagccatagc

SEQ ID NO: 5448877 - DNA, 25 bp, Homo sapien
tgagctactgcaccaatcttgtaaa

SEQ ID NO: 5448878 - DNA, 25 bp, Homo sapien
tagccatagcaacacaaatgctggc

SEQ ID NO: 5448879 - DNA, 25 bp, Homo sapien
gtgtacctttactgacaaacttcta

SEQ ID NO: 5448880 - DNA, 25 bp, Homo sapien
taagtagtttacctagggtcgcaca

SEQ ID NO: 5448881 - DNA, 25 bp, Homo sapien
cttctagactgagagggaaccatta

SEQ ID NO: 5448882 - DNA, 25 bp, Homo sapien
tgatcaaacagtggaggtacggaga

SEQ ID NO: 5448883 - DNA, 25 bp, Homo sapien
cataagaaggcaacaatacgctaaa

SEQ ID NO: 5448884 - DNA, 25 bp, Homo sapien
tctcctctgggagacaacaatccaa

SEQ ID NO: 5448885 - DNA, 25 bp, Homo sapien
aaatacctagggatttctcctctgg

SEQ ID NO: 5448886 - DNA, 25 bp, Homo sapien
catttctcatgtatccaagttgttt

SEQ ID NO: 5448887 - DNA, 25 bp, Homo sapien
taatgagtaattaaccaccccatac

SEQ ID NO: 5448888 - DNA, 25 bp, Homo sapien
taaatgatgccataaaacaggcctt

SEQ ID NO: 5448889 - DNA, 25 bp, Homo sapien
tcaaggatgcttgtattgctagggt

SEQ ID NO: 5448890 - DNA, 25 bp, Homo sapien
caccccatactttctatcaaggatg

SEQ ID NO: 5448891 - DNA, 25 bp, Homo sapien
agaagacacaatgccggtaattaca

SEQ ID NO: 5448892 - DNA, 25 bp, Homo sapien
tgccggtaattacaggaatttgcac

SEQ ID NO: 5448893 - DNA, 25 bp, Homo sapien
caaagaggggatttgtacctcctgt

SEQ ID NO: 5448894 - DNA, 25 bp, Homo sapien
taaggtctcaattaggaatggcttc

SEQ ID NO: 5448895 - DNA, 25 bp, Homo sapien
gccaacatttgtggctcccctgaat

SEQ ID NO: 5448896 - DNA, 25 bp, Homo sapien
taaggccaattgcactattttgtag

SEQ ID NO: 5448897 - DNA, 25 bp, Homo sapien
gagctactccatacaatcttccact

SEQ ID NO: 5448898 - DNA, 25 bp, Homo sapien
gctcccctgaatagcaagtaaatga

SEQ ID NO: 5448899 - DNA, 25 bp, Homo sapien
tatgaggatgcaaagttagaagaca

SEQ ID NO: 5448900 - DNA, 25 bp, Homo sapien
tgaaatacagtgaattagcctctcc

SEQ ID NO: 5448901 - DNA, 25 bp, Homo sapien
gaagatcaacatgctatgccaccag

SEQ ID NO: 5448902 - DNA, 25 bp, Homo sapien
agacataggtacaaaaggaagaagc

SEQ ID NO: 5448903 - DNA, 25 bp, Homo sapien
ccacaagtatcacaaagcaactgaa

SEQ ID NO: 5448904 - DNA, 25 bp, Homo sapien
cacaagtatcacaaagcaactgaat

SEQ ID NO: 5448905 - DNA, 25 bp, Homo sapien
tatggaacctaactaaggcagctgc

SEQ ID NO: 5448906 - DNA, 25 bp, Homo sapien
tcttgagtgtcaggaatgctacgaa

SEQ ID NO: 5448907 - DNA, 25 bp, Homo sapien
gctgccggatgcgaatgagcttgct

SEQ ID NO: 5448908 - DNA, 25 bp, Homo sapien
tctgtaatctaaagccacggaagtg

SEQ ID NO: 5448909 - DNA, 25 bp, Homo sapien
ccaagcctgacgaatttttgcactt

SEQ ID NO: 5448910 - DNA, 25 bp, Homo sapien
caagcctgacgaatttttgcacttt

SEQ ID NO: 5448911 - DNA, 25 bp, Homo sapien
cttacatagcagttccagaaggcct

SEQ ID NO: 5448912 - DNA, 25 bp, Homo sapien
cagagggaatggaatcacagccgac

SEQ ID NO: 5448913 - DNA, 25 bp, Homo sapien
aatacagtaagcttctcgaggagag

SEQ ID NO: 5448914 - DNA, 25 bp, Homo sapien
ggcataagcccatagtgactcagtg

SEQ ID NO: 5448915 - DNA, 25 bp, Homo sapien
ctataggctgaaaatctgcttcata

SEQ ID NO: 5448916 - DNA, 25 bp, Homo sapien
tataggctgaaaatctgcttcatac

SEQ ID NO: 5448917 - DNA, 25 bp, Homo sapien
tcccactgctgtcgaggctgtagaa

SEQ ID NO: 5448918 - DNA, 25 bp, Homo sapien
tggatcctcgtctagcttgccaggc

SEQ ID NO: 5448919 - DNA, 25 bp, Homo sapien
gacaaagtcgtcaaaatgctcagga

SEQ ID NO: 5448920 - DNA, 25 bp, Homo sapien
gcagtgagtcctcgttccaaagaca

SEQ ID NO: 5448921 - DNA, 25 bp, Homo sapien
agagagtctgtcctgattccccaac

SEQ ID NO: 5448922 - DNA, 25 bp, Homo sapien
cctctttcagagagtctgtcctgat

SEQ ID NO: 5448923 - DNA, 25 bp, Homo sapien
gtctgtcctgattccccaacctcgc

SEQ ID NO: 5448924 - DNA, 25 bp, Homo sapien
ctctttcagagagtctgtcctgatt

SEQ ID NO: 5448925 - DNA, 25 bp, Homo sapien
aattgattagctcaagataaaagaa

SEQ ID NO: 5448926 - DNA, 25 bp, Homo sapien
tcgccctccatcaatataattgatt

SEQ ID NO: 5448927 - DNA, 25 bp, Homo sapien
actcgccctccatcaatataattga

SEQ ID NO: 5448928 - DNA, 25 bp, Homo sapien
aatataattgattagctcaagataa

SEQ ID NO: 5448929 - DNA, 25 bp, Homo sapien
ggcttgtcttcacttatggccaata

SEQ ID NO: 5448930 - DNA, 25 bp, Homo sapien
gacagcatgctacttggttcaacct

SEQ ID NO: 5448931 - DNA, 25 bp, Homo sapien
tctcttgtcttttaggccccatttc

SEQ ID NO: 5448932 - DNA, 25 bp, Homo sapien
gttcaacctcacctaatggctctgg

SEQ ID NO: 5448933 - DNA, 25 bp, Homo sapien
cccttgtggcactgtctaaagcaaa

SEQ ID NO: 5448934 - DNA, 25 bp, Homo sapien
acatgcggactcagcgggaaagaac

SEQ ID NO: 5448935 - DNA, 25 bp, Homo sapien
tctaaggctgcacacttctccaagg

SEQ ID NO: 5448936 - DNA, 25 bp, Homo sapien
ggttttagcatcctgacaacacagt

SEQ ID NO: 5448937 - DNA, 25 bp, Homo sapien
gaattgatattcagagacggcagga

SEQ ID NO: 5448938 - DNA, 25 bp, Homo sapien
acagagtttatagcccatagtggag

SEQ ID NO: 5448939 - DNA, 25 bp, Homo sapien
tctgtggagataccaaaccaatcag

SEQ ID NO: 5448940 - DNA, 25 bp, Homo sapien
tatgcagcataaagtactcagagcc

SEQ ID NO: 5448941 - DNA, 25 bp, Homo sapien
gtcacaagcatcactggatagccag

SEQ ID NO: 5448942 - DNA, 25 bp, Homo sapien
tcctgggaaactgcccatgaagggc

SEQ ID NO: 5448943 - DNA, 25 bp, Homo sapien
ggagcggaccagaattagtgctctt

SEQ ID NO: 5448944 - DNA, 25 bp, Homo sapien
tagtgctcttaggacagcagctgaa

SEQ ID NO: 5448945 - DNA, 25 bp, Homo sapien
ctttgtgctcatcaaacagtcagat

SEQ ID NO: 5448946 - DNA, 25 bp, Homo sapien
tttactcacattcgctatctcctgg

SEQ ID NO: 5448947 - DNA, 25 bp, Homo sapien
tattatagcgatacttgcaaatgcc

SEQ ID NO: 5448948 - DNA, 25 bp, Homo sapien
aaaacttggcatgccatttactcac

SEQ ID NO: 5448949 - DNA, 25 bp, Homo sapien
tctcctggatgactaaaaggtggca

SEQ ID NO: 5448950 - DNA, 25 bp, Homo sapien
tacccttggctagatgtaagactgg

SEQ ID NO: 5448951 - DNA, 25 bp, Homo sapien
ttggctagatgtaagactggtgaga

SEQ ID NO: 5448952 - DNA, 25 bp, Homo sapien
ctacccttggctagatgtaagactg

SEQ ID NO: 5448953 - DNA, 25 bp, Homo sapien
cccttggctagatgtaagactggtg

SEQ ID NO: 5448954 - DNA, 25 bp, Homo sapien
cagtatttccttgagcatcttctat

SEQ ID NO: 5448955 - DNA, 25 bp, Homo sapien
cctggtgacatgcgggccttgaagc

SEQ ID NO: 5448956 - DNA, 25 bp, Homo sapien
gctgctgctgcaaaggcgtggtttt

SEQ ID NO: 5448957 - DNA, 25 bp, Homo sapien
catgcgggccttgaagcaatggctg

SEQ ID NO: 5448958 - DNA, 25 bp, Homo sapien
ctgcaaaggcgtggttttgaggact

SEQ ID NO: 5448959 - DNA, 25 bp, Homo sapien
taagtcatttacagaacgaggccgg

SEQ ID NO: 5448960 - DNA, 25 bp, Homo sapien
tctgatcgtgatcgagcatgccctg

SEQ ID NO: 5448961 - DNA, 25 bp, Homo sapien
catgccctggcttgaaagttgaggt

SEQ ID NO: 5448962 - DNA, 25 bp, Homo sapien
cctccgacgctgacagatattgaag

SEQ ID NO: 5448963 - DNA, 25 bp, Homo sapien
tgttatgttactgagtacctcatgc

SEQ ID NO: 5448964 - DNA, 25 bp, Homo sapien
tgttactgagtacctcatgccccac

SEQ ID NO: 5448965 - DNA, 25 bp, Homo sapien
caccattgtctgttatgttactgag

SEQ ID NO: 5448966 - DNA, 25 bp, Homo sapien
atagcaccattgtctgttatgttac

SEQ ID NO: 5448967 - DNA, 25 bp, Homo sapien
gctgggctgatatcatccacttcca

SEQ ID NO: 5448968 - DNA, 25 bp, Homo sapien
tggatcccataaacctctgcctgct

SEQ ID NO: 5448969 - DNA, 25 bp, Homo sapien
gcacagccttttctagattactatc

SEQ ID NO: 5448970 - DNA, 25 bp, Homo sapien
aattcctccgtaacttctaaggctg

SEQ ID NO: 5448971 - DNA, 25 bp, Homo sapien
tacttgtcaaagcaatgccacgcca

SEQ ID NO: 5448972 - DNA, 25 bp, Homo sapien
gaagaaaccttcattgggctccctg

SEQ ID NO: 5448973 - DNA, 25 bp, Homo sapien
cattaacagatgtatagggagacca

SEQ ID NO: 5448974 - DNA, 25 bp, Homo sapien
tgagacctctgtgaagacaacagca

SEQ ID NO: 5448975 - DNA, 25 bp, Homo sapien
tcaccttggttgaaggttgtggccg

SEQ ID NO: 5448976 - DNA, 25 bp, Homo sapien
cattgagggcgttcacatcaccttg

SEQ ID NO: 5448977 - DNA, 25 bp, Homo sapien
agagccaagggtgattacaaggatg

SEQ ID NO: 5448978 - DNA, 25 bp, Homo sapien
ttacaaggatggtccacattgaggg

SEQ ID NO: 5448979 - DNA, 25 bp, Homo sapien
tctctgtgttgttccagttttaatg

SEQ ID NO: 5448980 - DNA, 25 bp, Homo sapien
tgcatgtcatccctgcacagaagcc

SEQ ID NO: 5448981 - DNA, 25 bp, Homo sapien
gcatgtcatccctgcacagaagcca

SEQ ID NO: 5448982 - DNA, 25 bp, Homo sapien
ctgtgttgttccagttttaatgtat

SEQ ID NO: 5448983 - DNA, 25 bp, Homo sapien
acaacagtgagcgatggaccagcca

SEQ ID NO: 5448984 - DNA, 25 bp, Homo sapien
gtgtgcgtggcgtaatcatacctca

SEQ ID NO: 5448985 - DNA, 25 bp, Homo sapien
ctcacttaacttccaactcttgggt

SEQ ID NO: 5448986 - DNA, 25 bp, Homo sapien
catgtctgtagactagtacgggtcc

SEQ ID NO: 5448987 - DNA, 25 bp, Homo sapien
tcgcggtcccactctgaaatgcttc

SEQ ID NO: 5448988 - DNA, 25 bp, Homo sapien
tgcggggccttcagtccgctcctgg

SEQ ID NO: 5448989 - DNA, 25 bp, Homo sapien
tgggccccggctgctactctccatt

SEQ ID NO: 5448990 - DNA, 25 bp, Homo sapien
tttacaagcggcttctcgcggtccc

SEQ ID NO: 5448991 - DNA, 25 bp, Homo sapien
gctgcagtgaaaatccgttttcact

SEQ ID NO: 5448992 - DNA, 25 bp, Homo sapien
ttggggctgcagtgaaaatccgttt

SEQ ID NO: 5448993 - DNA, 25 bp, Homo sapien
agtgaaaatccgttttcactgtcct

SEQ ID NO: 5448994 - DNA, 25 bp, Homo sapien
tcatttccggttttggggctgcagt

SEQ ID NO: 5448995 - DNA, 25 bp, Homo sapien
cagggatatgctggtctgattggac

SEQ ID NO: 5448996 - DNA, 25 bp, Homo sapien
tgcagtgactgtggtcgctttgcag

SEQ ID NO: 5448997 - DNA, 25 bp, Homo sapien
gacagaccttccttgcagtttcctg

SEQ ID NO: 5448998 - DNA, 25 bp, Homo sapien
tttccatcatagcacacttcttagc

SEQ ID NO: 5448999 - DNA, 25 bp, Homo sapien
aaataggtcttaggagtcttccagc

SEQ ID NO: 5449000 - DNA, 25 bp, Homo sapien
tcttaggagtcttccagcatcttgt

SEQ ID NO: 5449001 - DNA, 25 bp, Homo sapien
ggtcttaggagtcttccagcatctt

SEQ ID NO: 5449002 - DNA, 25 bp, Homo sapien
aggtcttaggagtcttccagcatct

SEQ ID NO: 5449003 - DNA, 25 bp, Homo sapien
tgaaacaagctgaatgttgtttcct

SEQ ID NO: 5449004 - DNA, 25 bp, Homo sapien
tttgaaacaagctgaatgttgtttc

SEQ ID NO: 5449005 - DNA, 25 bp, Homo sapien
aatttgaaacaagctgaatgttgtt

SEQ ID NO: 5449006 - DNA, 25 bp, Homo sapien
aacaagctgaatgttgtttccttca

SEQ ID NO: 5449007 - DNA, 25 bp, Homo sapien
gtgactataaatagtctgaacggta

SEQ ID NO: 5449008 - DNA, 25 bp, Homo sapien
cagttcctttttgttacctcactat

SEQ ID NO: 5449009 - DNA, 25 bp, Homo sapien
ctgtgtgtgactataaatagtctga

SEQ ID NO: 5449010 - DNA, 25 bp, Homo sapien
tcatgttctgtgtgtgactataaat

SEQ ID NO: 5449011 - DNA, 25 bp, Homo sapien
ctttcttcctaagaaggctgagttc

SEQ ID NO: 5449012 - DNA, 25 bp, Homo sapien
gcctctttcttcctaagaaggctga

SEQ ID NO: 5449013 - DNA, 25 bp, Homo sapien
cctctttcttcctaagaaggctgag

SEQ ID NO: 5449014 - DNA, 25 bp, Homo sapien
tctttcttcctaagaaggctgagtt

SEQ ID NO: 5449015 - DNA, 25 bp, Homo sapien
tgtgcgtcccttcagagtgatgtcg

SEQ ID NO: 5449016 - DNA, 25 bp, Homo sapien
gtcaacagtctggttgctgagaatg

SEQ ID NO: 5449017 - DNA, 25 bp, Homo sapien
atgtgactgaagtccctccacaggc

SEQ ID NO: 5449018 - DNA, 25 bp, Homo sapien
gcgtcccttcagagtgatgtcgaca

SEQ ID NO: 5449019 - DNA, 25 bp, Homo sapien
ttgcagtagatgtggcaacaacaac

SEQ ID NO: 5449020 - DNA, 25 bp, Homo sapien
cactcctggaaactcttcttttcca

SEQ ID NO: 5449021 - DNA, 25 bp, Homo sapien
caacaacaacaagaaagcctgtttt

SEQ ID NO: 5449022 - DNA, 25 bp, Homo sapien
tcttgcagtagatgtggcaacaaca

SEQ ID NO: 5449023 - DNA, 25 bp, Homo sapien
cctcagagctaacactatgccagtg

SEQ ID NO: 5449024 - DNA, 25 bp, Homo sapien
tcgattatgccttgacctagcccct

SEQ ID NO: 5449025 - DNA, 25 bp, Homo sapien
tggcagcagatttcactggtgctca

SEQ ID NO: 5449026 - DNA, 25 bp, Homo sapien
tggtgctcactcctcgattatgcct

SEQ ID NO: 5449027 - DNA, 25 bp, Homo sapien
tcatccaagtattaagcaggccccc

SEQ ID NO: 5449028 - DNA, 25 bp, Homo sapien
catccaagtattaagcaggccccca

SEQ ID NO: 5449029 - DNA, 25 bp, Homo sapien
aagtattaagcaggcccccagacct

SEQ ID NO: 5449030 - DNA, 25 bp, Homo sapien
tccaagtattaagcaggcccccaga

SEQ ID NO: 5449031 - DNA, 25 bp, Homo sapien
tgcttttgatgatgtgaccgtttgc

SEQ ID NO: 5449032 - DNA, 25 bp, Homo sapien
ttgatgatgtgaccgtttgctccca

SEQ ID NO: 5449033 - DNA, 25 bp, Homo sapien
tgatgtgaccgtttgctcccatcta

SEQ ID NO: 5449034 - DNA, 25 bp, Homo sapien
ctagtttgcttttgatgatgtgacc

SEQ ID NO: 5449035 - DNA, 25 bp, Homo sapien
gccatcaacattatggctcacagac

SEQ ID NO: 5449036 - DNA, 25 bp, Homo sapien
ggccatcaacattatggctcacaga

SEQ ID NO: 5449037 - DNA, 25 bp, Homo sapien
atcagggcagaggcagaaggcacta

SEQ ID NO: 5449038 - DNA, 25 bp, Homo sapien
ttctgtctcttggtggttccttgag

SEQ ID NO: 5449039 - DNA, 25 bp, Homo sapien
tcaagcaatgttgatgatctcatca

SEQ ID NO: 5449040 - DNA, 25 bp, Homo sapien
tgtctcttggtggttccttgagggc

SEQ ID NO: 5449041 - DNA, 25 bp, Homo sapien
tccagcgcagacgtggcactgactt

SEQ ID NO: 5449042 - DNA, 25 bp, Homo sapien
cgatcttggggtccagcgcagacgt

SEQ ID NO: 5449043 - DNA, 25 bp, Homo sapien
aacttctgcagcatggtggaggtgg

SEQ ID NO: 5449044 - DNA, 25 bp, Homo sapien
gggtccagcgcagacgtggcactga

SEQ ID NO: 5449045 - DNA, 25 bp, Homo sapien
ccatcactagctgttgatatcgatg

SEQ ID NO: 5449046 - DNA, 25 bp, Homo sapien
tgctgcaccatcactagctgttgat

SEQ ID NO: 5449047 - DNA, 25 bp, Homo sapien
gttgatatcgatggaattcctgacc

SEQ ID NO: 5449048 - DNA, 25 bp, Homo sapien
tggaattcctgaccagtaacatttc

SEQ ID NO: 5449049 - DNA, 25 bp, Homo sapien
gtcgccctctactggacgaattaag

SEQ ID NO: 5449050 - DNA, 25 bp, Homo sapien
gataagcaaaccttcagccttcagc

SEQ ID NO: 5449051 - DNA, 25 bp, Homo sapien
tgccacaaatgcctggctgtggtcg

SEQ ID NO: 5449052 - DNA, 25 bp, Homo sapien
gcctggctgtggtcgccctctactg

SEQ ID NO: 5449053 - DNA, 25 bp, Homo sapien
tttaggtctgagagaggcctctcag

SEQ ID NO: 5449054 - DNA, 25 bp, Homo sapien
cagcatcccccctttctctcaccat

SEQ ID NO: 5449055 - DNA, 25 bp, Homo sapien
cctttaggtctgagagaggcctctc

SEQ ID NO: 5449056 - DNA, 25 bp, Homo sapien
ggcctctcagcatcccccctttctc

SEQ ID NO: 5449057 - DNA, 25 bp, Homo sapien
cacatatcacacttaggcacaaaca

SEQ ID NO: 5449058 - DNA, 25 bp, Homo sapien
ggcacaaacaccaaatcatgctcct

SEQ ID NO: 5449059 - DNA, 25 bp, Homo sapien
gggaaatcggagatgctctccatag

SEQ ID NO: 5449060 - DNA, 25 bp, Homo sapien
gctaactgggaaatcggagatgctc

SEQ ID NO: 5449061 - DNA, 25 bp, Homo sapien
taaagctgcatgtgatagggtgcta

SEQ ID NO: 5449062 - DNA, 25 bp, Homo sapien
catgtgatagggtgctaactgggaa

SEQ ID NO: 5449063 - DNA, 25 bp, Homo sapien
tccacgccacgttcactgcctgact

SEQ ID NO: 5449064 - DNA, 25 bp, Homo sapien
caatccatagttgctctgcctgtgg

SEQ ID NO: 5449065 - DNA, 25 bp, Homo sapien
tttggaaagaagcaataagtcccat

SEQ ID NO: 5449066 - DNA, 25 bp, Homo sapien
cctgtggatggtggttagtttgatt

SEQ ID NO: 5449067 - DNA, 25 bp, Homo sapien
catcatttgttggaggagttagccc

SEQ ID NO: 5449068 - DNA, 25 bp, Homo sapien
tgtcaatgctacaacctgcctgaag

SEQ ID NO: 5449069 - DNA, 25 bp, Homo sapien
tgtaggaacacaagcacccagatcg

SEQ ID NO: 5449070 - DNA, 25 bp, Homo sapien
ggtacagttgctattcaaacccgag

SEQ ID NO: 5449071 - DNA, 25 bp, Homo sapien
aagcaagggatagagtacaaacatt

SEQ ID NO: 5449072 - DNA, 25 bp, Homo sapien
gaagcaagggatagagtacaaacat

SEQ ID NO: 5449073 - DNA, 25 bp, Homo sapien
tgaagcaagggatagagtacaaaca

SEQ ID NO: 5449074 - DNA, 25 bp, Homo sapien
atgaagcaagggatagagtacaaac

SEQ ID NO: 5449075 - DNA, 25 bp, Homo sapien
agggagcccactctcgcatccgtgg

SEQ ID NO: 5449076 - DNA, 25 bp, Homo sapien
ccagcacgttgaaggagtggatctc

SEQ ID NO: 5449077 - DNA, 25 bp, Homo sapien
tcagcaggtactgccgcccctggta

SEQ ID NO: 5449078 - DNA, 25 bp, Homo sapien
cccctggtagttgggcagctcgtag

SEQ ID NO: 5449079 - DNA, 25 bp, Homo sapien
aggtggaagcggtcgtgaagagagg

SEQ ID NO: 5449080 - DNA, 25 bp, Homo sapien
tggaagcggtcgtgaagagaggagc

SEQ ID NO: 5449081 - DNA, 25 bp, Homo sapien
gctcatagatcctgagcctgtggga

SEQ ID NO: 5449082 - DNA, 25 bp, Homo sapien
ctctcgctcatagatcctgagcctg

SEQ ID NO: 5449083 - DNA, 25 bp, Homo sapien
cggcaggagcggaccgagtcgctga

SEQ ID NO: 5449084 - DNA, 25 bp, Homo sapien
gaggcggcaggagcggaccgagtcg

SEQ ID NO: 5449085 - DNA, 25 bp, Homo sapien
atgaggcggcaggagcggaccgagt

SEQ ID NO: 5449086 - DNA, 25 bp, Homo sapien
ggcggcaggagcggaccgagtcgct

SEQ ID NO: 5449087 - DNA, 25 bp, Homo sapien
ggtcggcatagtcgccgcggcgcag

SEQ ID NO: 5449088 - DNA, 25 bp, Homo sapien
ctggtggtcggcatagtcgccgcgg

SEQ ID NO: 5449089 - DNA, 25 bp, Homo sapien
gtggtcggcatagtcgccgcggcgc

SEQ ID NO: 5449090 - DNA, 25 bp, Homo sapien
tggtggtcggcatagtcgccgcggc

SEQ ID NO: 5449091 - DNA, 25 bp, Homo sapien
gagtagttgggctgctcatagagca

SEQ ID NO: 5449092 - DNA, 25 bp, Homo sapien
cgagtagttgggctgctcatagagc

SEQ ID NO: 5449093 - DNA, 25 bp, Homo sapien
ggaggcccgagtagttgggctgctc

SEQ ID NO: 5449094 - DNA, 25 bp, Homo sapien
gcccgagtagttgggctgctcatag

SEQ ID NO: 5449095 - DNA, 25 bp, Homo sapien
agttgcagcggctcaagtagggctg

SEQ ID NO: 5449096 - DNA, 25 bp, Homo sapien
gagttgcagcggctcaagtagggct

SEQ ID NO: 5449097 - DNA, 25 bp, Homo sapien
cgagttgcagcggctcaagtagggc

SEQ ID NO: 5449098 - DNA, 25 bp, Homo sapien
tgccccagtctccggcccccgccat

SEQ ID NO: 5449099 - DNA, 25 bp, Homo sapien
cccatggctggctgggcgcacggcg

SEQ ID NO: 5449100 - DNA, 25 bp, Homo sapien
ccatggctggctgggcgcacggcgg

SEQ ID NO: 5449101 - DNA, 25 bp, Homo sapien
tccccatggctggctgggcgcacgg

SEQ ID NO: 5449102 - DNA, 25 bp, Homo sapien
cttccccatggctggctgggcgcac

SEQ ID NO: 5449103 - DNA, 25 bp, Homo sapien
gccaggaacacacagaaaatatttt

SEQ ID NO: 5449104 - DNA, 25 bp, Homo sapien
attaagaaacaacaaaagaggacat

SEQ ID NO: 5449105 - DNA, 25 bp, Homo sapien
aagaaacaacaaaagaggacatatt

SEQ ID NO: 5449106 - DNA, 25 bp, Homo sapien
caggaacacacagaaaatattttat

SEQ ID NO: 5449107 - DNA, 25 bp, Homo sapien
ggtactgccgtcctcggtagttgga

SEQ ID NO: 5449108 - DNA, 25 bp, Homo sapien
gaaatctatgactctcctcagagag

SEQ ID NO: 5449109 - DNA, 25 bp, Homo sapien
tagcgcctatagtcccctggcatca

SEQ ID NO: 5449110 - DNA, 25 bp, Homo sapien
ggatttcattgaagcggaagcggtc

SEQ ID NO: 5449111 - DNA, 25 bp, Homo sapien
tctctctcatagagtctgatcctgt

SEQ ID NO: 5449112 - DNA, 25 bp, Homo sapien
tcagtgaactctatcatctggcctc

SEQ ID NO: 5449113 - DNA, 25 bp, Homo sapien
ctctctctcatagagtctgatcctg

SEQ ID NO: 5449114 - DNA, 25 bp, Homo sapien
gaactctatcatctggcctctgtag

SEQ ID NO: 5449115 - DNA, 25 bp, Homo sapien
gcctgggtcctgacttgaggatgta

SEQ ID NO: 5449116 - DNA, 25 bp, Homo sapien
ctgggtcctgacttgaggatgtact

SEQ ID NO: 5449117 - DNA, 25 bp, Homo sapien
tgggtcctgacttgaggatgtactc

SEQ ID NO: 5449118 - DNA, 25 bp, Homo sapien
cctgggtcctgacttgaggatgtac

SEQ ID NO: 5449119 - DNA, 25 bp, Homo sapien
gagttgcagcggctcaagtagggct

SEQ ID NO: 5449120 - DNA, 25 bp, Homo sapien
cactgctggtggtcggcatagtcgc

SEQ ID NO: 5449121 - DNA, 25 bp, Homo sapien
atgaggcggcaggagcggaccgagt

SEQ ID NO: 5449122 - DNA, 25 bp, Homo sapien
agccccggtcctcgtagagggtgat

SEQ ID NO: 5449123 - DNA, 25 bp, Homo sapien
ctgggcgcacggcggtgctgagctg

SEQ ID NO: 5449124 - DNA, 25 bp, Homo sapien
tgggaaattggtagtgttaagctat

SEQ ID NO: 5449125 - DNA, 25 bp, Homo sapien
aatgggaaattggtagtgttaagct

SEQ ID NO: 5449126 - DNA, 25 bp, Homo sapien
atgggaaattggtagtgttaagcta

SEQ ID NO: 5449127 - DNA, 25 bp, Homo sapien
gaacggatctcgctgaggtggaagc

SEQ ID NO: 5449128 - DNA, 25 bp, Homo sapien
actctccgcaaagagcctgccttag

SEQ ID NO: 5449129 - DNA, 25 bp, Homo sapien
tcctggcaccgcctgtactcttggg

SEQ ID NO: 5449130 - DNA, 25 bp, Homo sapien
ttggggcctcagcaggtattgccgc

SEQ ID NO: 5449131 - DNA, 25 bp, Homo sapien
atggagttgcagcggctgaaatacg

SEQ ID NO: 5449132 - DNA, 25 bp, Homo sapien
gaccttggtagttgggacgctcata

SEQ ID NO: 5449133 - DNA, 25 bp, Homo sapien
tcccctcgccgcagcaagtattgtt

SEQ ID NO: 5449134 - DNA, 25 bp, Homo sapien
tcgccgcagcaagtattgttgacct

SEQ ID NO: 5449135 - DNA, 25 bp, Homo sapien
tggttgacacggatgatgcgagttc

SEQ ID NO: 5449136 - DNA, 25 bp, Homo sapien
tgacacggatgatgcgagttcagtg

SEQ ID NO: 5449137 - DNA, 25 bp, Homo sapien
cacggatgatgcgagttcagtgtga

SEQ ID NO: 5449138 - DNA, 25 bp, Homo sapien
ggctggttgacacggatgatgcgag

SEQ ID NO: 5449139 - DNA, 25 bp, Homo sapien
caggatggctgctgcgttggcaaga

SEQ ID NO: 5449140 - DNA, 25 bp, Homo sapien
ttggcaagaacaacacaaaaggggc

SEQ ID NO: 5449141 - DNA, 25 bp, Homo sapien
ctatatagcaggatggctgctgcgt

SEQ ID NO: 5449142 - DNA, 25 bp, Homo sapien
tggcaagaacaacacaaaaggggcc

SEQ ID NO: 5449143 - DNA, 25 bp, Homo sapien
tctgctttcataccagtgtatccaa

SEQ ID NO: 5449144 - DNA, 25 bp, Homo sapien
tgtcttctgacgtagcctggccagg

SEQ ID NO: 5449145 - DNA, 25 bp, Homo sapien
tccactttatcagttattctgccat

SEQ ID NO: 5449146 - DNA, 25 bp, Homo sapien
ccgttgtcggcagaagggagttcac

SEQ ID NO: 5449147 - DNA, 25 bp, Homo sapien
gatgccataggtgagcaggaatctt

SEQ ID NO: 5449148 - DNA, 25 bp, Homo sapien
catctccttcatgagcagggggtgg

SEQ ID NO: 5449149 - DNA, 25 bp, Homo sapien
ggtttccttgacatgggcattcaca

SEQ ID NO: 5449150 - DNA, 25 bp, Homo sapien
aggaatcttgtaggtttccttgaca

SEQ ID NO: 5449151 - DNA, 25 bp, Homo sapien
tcgtcgcagaccctgaacatacttc

SEQ ID NO: 5449152 - DNA, 25 bp, Homo sapien
gaccctgaacatacttctcgctgta

SEQ ID NO: 5449153 - DNA, 25 bp, Homo sapien
gcagaccctgaacatacttctcgct

SEQ ID NO: 5449154 - DNA, 25 bp, Homo sapien
ctcgtcgcagaccctgaacatactt

SEQ ID NO: 5449155 - DNA, 25 bp, Homo sapien
tgaagccagatcctgggaagatgga

SEQ ID NO: 5449156 - DNA, 25 bp, Homo sapien
gaagccagatcctgggaagatggac

SEQ ID NO: 5449157 - DNA, 25 bp, Homo sapien
ctgaagccagatcctgggaagatgg

SEQ ID NO: 5449158 - DNA, 25 bp, Homo sapien
ttcagggcctgtctcatgtctccct

SEQ ID NO: 5449159 - DNA, 25 bp, Homo sapien
gcaagttgttcagggcctgtctcat

SEQ ID NO: 5449160 - DNA, 25 bp, Homo sapien
agggcctgtctcatgtctccctgac

SEQ ID NO: 5449161 - DNA, 25 bp, Homo sapien
tgcaagttgttcagggcctgtctca

SEQ ID NO: 5449162 - DNA, 25 bp, Homo sapien
tggtccgggcatcggtcagctttgt

SEQ ID NO: 5449163 - DNA, 25 bp, Homo sapien
gcattcattggcctcacactggtcc

SEQ ID NO: 5449164 - DNA, 25 bp, Homo sapien
gcggaggactatgcactgggatcca

SEQ ID NO: 5449165 - DNA, 25 bp, Homo sapien
tctaggccaaagtcagtgtacagaa

SEQ ID NO: 5449166 - DNA, 25 bp, Homo sapien
ggttcccctgaaggcttgctggact

SEQ ID NO: 5449167 - DNA, 25 bp, Homo sapien
gagtcgttttagagcagatttcaat

SEQ ID NO: 5449168 - DNA, 25 bp, Homo sapien
agcaagaacacagtgagtcgtttta

SEQ ID NO: 5449169 - DNA, 25 bp, Homo sapien
tgctggactccatcagttatgctgt

SEQ ID NO: 5449170 - DNA, 25 bp, Homo sapien
cctcgcaacgtcaatgcccttgcca

SEQ ID NO: 5449171 - DNA, 25 bp, Homo sapien
tcgcaacgtcaatgcccttgccatt

SEQ ID NO: 5449172 - DNA, 25 bp, Homo sapien
gcaacgtcaatgcccttgccatttg

SEQ ID NO: 5449173 - DNA, 25 bp, Homo sapien
cgcaacgtcaatgcccttgccattt

SEQ ID NO: 5449174 - DNA, 25 bp, Homo sapien
cccaggatgcttataactttgtcag

SEQ ID NO: 5449175 - DNA, 25 bp, Homo sapien
aagatgatgtgaggcatattccctt

SEQ ID NO: 5449176 - DNA, 25 bp, Homo sapien
gggcccaggatgcttataactttgt

SEQ ID NO: 5449177 - DNA, 25 bp, Homo sapien
ggcatattcccttctcttgcaaaga

SEQ ID NO: 5449178 - DNA, 25 bp, Homo sapien
actctcacatccagatgtgcccatt

SEQ ID NO: 5449179 - DNA, 25 bp, Homo sapien
ctctcacatccagatgtgcccattc

SEQ ID NO: 5449180 - DNA, 25 bp, Homo sapien
tcgcctgcaccaccgctactcactt

SEQ ID NO: 5449181 - DNA, 25 bp, Homo sapien
agggtcttgggctgcaagctcgcct

SEQ ID NO: 5449182 - DNA, 25 bp, Homo sapien
gcaccaccgctactcacttgcacct

SEQ ID NO: 5449183 - DNA, 25 bp, Homo sapien
tcttgggctgcaagctcgcctgcac

SEQ ID NO: 5449184 - DNA, 25 bp, Homo sapien
agaaacacaagctaaatattttatt

SEQ ID NO: 5449185 - DNA, 25 bp, Homo sapien
aaacacaagctaaatattttattag

SEQ ID NO: 5449186 - DNA, 25 bp, Homo sapien
aacacaagctaaatattttattaga

SEQ ID NO: 5449187 - DNA, 25 bp, Homo sapien
gaaacacaagctaaatattttatta

SEQ ID NO: 5449188 - DNA, 25 bp, Homo sapien
gcggtcctgaacagagatacagtcg

SEQ ID NO: 5449189 - DNA, 25 bp, Homo sapien
gacatttgtcccctcaattcatctc

SEQ ID NO: 5449190 - DNA, 25 bp, Homo sapien
cattgagggagtgaatttcagtgag

SEQ ID NO: 5449191 - DNA, 25 bp, Homo sapien
aattcatctctgtcgtagatcttca

SEQ ID NO: 5449192 - DNA, 25 bp, Homo sapien
cccaagttcaagcaattctcctgcc

SEQ ID NO: 5449193 - DNA, 25 bp, Homo sapien
caccacaacctctgccacccaagtt

SEQ ID NO: 5449194 - DNA, 25 bp, Homo sapien
accacaacctctgccacccaagttc

SEQ ID NO: 5449195 - DNA, 25 bp, Homo sapien
agatggaaggcaaagacagagccac

SEQ ID NO: 5449196 - DNA, 25 bp, Homo sapien
caaaaagatggaaggcaaagacaga

SEQ ID NO: 5449197 - DNA, 25 bp, Homo sapien
catgaaatagcttttatttccaaaa

SEQ ID NO: 5449198 - DNA, 25 bp, Homo sapien
aaggcaaagacagagccacactcac

SEQ ID NO: 5449199 - DNA, 25 bp, Homo sapien
tggaaggccctgtcctcgtagaagg

SEQ ID NO: 5449200 - DNA, 25 bp, Homo sapien
ttgcagcggctgaaatagggttgta

SEQ ID NO: 5449201 - DNA, 25 bp, Homo sapien
cctggtagttggggcgctcatagat

SEQ ID NO: 5449202 - DNA, 25 bp, Homo sapien
taggttggggcagtcagtggtgcat

SEQ ID NO: 5449203 - DNA, 25 bp, Homo sapien
tttgaaggaagtgagcagatgtttt

SEQ ID NO: 5449204 - DNA, 25 bp, Homo sapien
gtgagcagatgttttctggttgctg

SEQ ID NO: 5449205 - DNA, 25 bp, Homo sapien
tgagcagatgttttctggttgctgt

SEQ ID NO: 5449206 - DNA, 25 bp, Homo sapien
gaaggaagtgagcagatgttttctg

SEQ ID NO: 5449207 - DNA, 25 bp, Homo sapien
tattatgtttctatggggatcacaa

SEQ ID NO: 5449208 - DNA, 25 bp, Homo sapien
gggaacacaacttgtatatttatta

SEQ ID NO: 5449209 - DNA, 25 bp, Homo sapien
ttatgtttctatggggatcacaaca

SEQ ID NO: 5449210 - DNA, 25 bp, Homo sapien
tgcagggaacacaacttgtatattt

SEQ ID NO: 5449211 - DNA, 25 bp, Homo sapien
ggaacacaggcgcagtcatcagtga

SEQ ID NO: 5449212 - DNA, 25 bp, Homo sapien
tcagtgagctcagacataaggcctc

SEQ ID NO: 5449213 - DNA, 25 bp, Homo sapien
gatctcagggagacggaacagttct

SEQ ID NO: 5449214 - DNA, 25 bp, Homo sapien
gggcatttcatagaggacccagcag

SEQ ID NO: 5449215 - DNA, 25 bp, Homo sapien
tatacggcaggattggaccgagtcg

SEQ ID NO: 5449216 - DNA, 25 bp, Homo sapien
agttgcagcggctgaagtagacccg

SEQ ID NO: 5449217 - DNA, 25 bp, Homo sapien
cagccgctgtctactcggatggagt

SEQ ID NO: 5449218 - DNA, 25 bp, Homo sapien
gatgcaattgtagcagcgaccctga

SEQ ID NO: 5449219 - DNA, 25 bp, Homo sapien
gtatatatagcagggaagctgctgt

SEQ ID NO: 5449220 - DNA, 25 bp, Homo sapien
catctagtatgatagggacaaaggg

SEQ ID NO: 5449221 - DNA, 25 bp, Homo sapien
caaaggggcaactggtatatatagc

SEQ ID NO: 5449222 - DNA, 25 bp, Homo sapien
agagggtgattagcatctagtatga

SEQ ID NO: 5449223 - DNA, 25 bp, Homo sapien
gcagtcttccagtcacaatgaagta

SEQ ID NO: 5449224 - DNA, 25 bp, Homo sapien
tcagtgcagttgtaccaaaaacagt

SEQ ID NO: 5449225 - DNA, 25 bp, Homo sapien
aaagccagcttgctctaacacagaa

SEQ ID NO: 5449226 - DNA, 25 bp, Homo sapien
gatgatgcttctcgtctgctcccag

SEQ ID NO: 5449227 - DNA, 25 bp, Homo sapien
gagatcgagaccacggtgaaacccc

SEQ ID NO: 5449228 - DNA, 25 bp, Homo sapien
aggagatcgagaccacggtgaaacc

SEQ ID NO: 5449229 - DNA, 25 bp, Homo sapien
ggagatcgagaccacggtgaaaccc

SEQ ID NO: 5449230 - DNA, 25 bp, Homo sapien
tgtgctttggctgtgtgtctgaaaa

SEQ ID NO: 5449231 - DNA, 25 bp, Homo sapien
tggctgtgtgtctgaaaacctttgt

SEQ ID NO: 5449232 - DNA, 25 bp, Homo sapien
gctttggctgtgtgtctgaaaacct

SEQ ID NO: 5449233 - DNA, 25 bp, Homo sapien
tttgtgctttggctgtgtgtctgaa

SEQ ID NO: 5449234 - DNA, 25 bp, Homo sapien
tgttgttacctttcttgacttgaca

SEQ ID NO: 5449235 - DNA, 25 bp, Homo sapien
gttgttacctttcttgacttgacac

SEQ ID NO: 5449236 - DNA, 25 bp, Homo sapien
ctgtttgcgggcgtatgctgctgct

SEQ ID NO: 5449237 - DNA, 25 bp, Homo sapien
tttgggtgctgttaacatggcaaag

SEQ ID NO: 5449238 - DNA, 25 bp, Homo sapien
ctgctttgggtgctgttaacatggc

SEQ ID NO: 5449239 - DNA, 25 bp, Homo sapien
tttgcgggcgtatgctgctgctttg

SEQ ID NO: 5449240 - DNA, 25 bp, Homo sapien
gggcacgtgaagtatatgaacgtga

SEQ ID NO: 5449241 - DNA, 25 bp, Homo sapien
gaacgtgaacttgcacacatggcct

SEQ ID NO: 5449242 - DNA, 25 bp, Homo sapien
gagtactgtccaacggacacactgt

SEQ ID NO: 5449243 - DNA, 25 bp, Homo sapien
tcagaatccttgagtccaattgttg

SEQ ID NO: 5449244 - DNA, 25 bp, Homo sapien
ttgacttctaaggtggacctggtgg

SEQ ID NO: 5449245 - DNA, 25 bp, Homo sapien
atgaccccactgcttgcacaatgac

SEQ ID NO: 5449246 - DNA, 25 bp, Homo sapien
gggctcttgaactctacatgacccc

SEQ ID NO: 5449247 - DNA, 25 bp, Homo sapien
acacttgacttctaaggtggacctg

SEQ ID NO: 5449248 - DNA, 25 bp, Homo sapien
taccagaatcggcagaagaatcagc

SEQ ID NO: 5449249 - DNA, 25 bp, Homo sapien
aaagacttcctcaatcgggatactg

SEQ ID NO: 5449250 - DNA, 25 bp, Homo sapien
tttaaagacttcctcaatcgggata

SEQ ID NO: 5449251 - DNA, 25 bp, Homo sapien
cttgatggtaccagaatcggcagaa

SEQ ID NO: 5449252 - DNA, 25 bp, Homo sapien
gataaaatcatagcttctcgttctc

SEQ ID NO: 5449253 - DNA, 25 bp, Homo sapien
ttggatatatgggtctgccatggag

SEQ ID NO: 5449254 - DNA, 25 bp, Homo sapien
cattaagattccagcataagatgat

SEQ ID NO: 5449255 - DNA, 25 bp, Homo sapien
agcttctcgttctctacgatttgga

SEQ ID NO: 5449256 - DNA, 25 bp, Homo sapien
tcccactccagccaagttaagtctt

SEQ ID NO: 5449257 - DNA, 25 bp, Homo sapien
gagggatccagccattgcaaagcaa

SEQ ID NO: 5449258 - DNA, 25 bp, Homo sapien
tgcaaagcaacactgatggccaagt

SEQ ID NO: 5449259 - DNA, 25 bp, Homo sapien
caagttaagtcttctgagggatcca

SEQ ID NO: 5449260 - DNA, 25 bp, Homo sapien
agatagctagaatcccaagaagctt

SEQ ID NO: 5449261 - DNA, 25 bp, Homo sapien
gggcttgtgggatgagaatgtctac

SEQ ID NO: 5449262 - DNA, 25 bp, Homo sapien
agctagaatcccaagaagcttcaga

SEQ ID NO: 5449263 - DNA, 25 bp, Homo sapien
ctggggagatagctagaatcccaag

SEQ ID NO: 5449264 - DNA, 25 bp, Homo sapien
catatcatctagaaaggtgagttgc

SEQ ID NO: 5449265 - DNA, 25 bp, Homo sapien
tctagaaaggtgagttgccgtcttc

SEQ ID NO: 5449266 - DNA, 25 bp, Homo sapien
aattcattttcccgaagtctgatgc

SEQ ID NO: 5449267 - DNA, 25 bp, Homo sapien
tcattttcccgaagtctgatgccaa

SEQ ID NO: 5449268 - DNA, 25 bp, Homo sapien
gagagcagcattgaaccattggagt

SEQ ID NO: 5449269 - DNA, 25 bp, Homo sapien
caagagagcagcattgaaccattgg

SEQ ID NO: 5449270 - DNA, 25 bp, Homo sapien
tgaaccattggagtgacacgggctc

SEQ ID NO: 5449271 - DNA, 25 bp, Homo sapien
accattggagtgacacgggctcagt

SEQ ID NO: 5449272 - DNA, 25 bp, Homo sapien
ttcccgtgttaaattcaagcagcat

SEQ ID NO: 5449273 - DNA, 25 bp, Homo sapien
aattctgtaggtaagtattcttttg

SEQ ID NO: 5449274 - DNA, 25 bp, Homo sapien
gtccaaagttgatacattccagata

SEQ ID NO: 5449275 - DNA, 25 bp, Homo sapien
caagcagcatgtccaaagttgatac

SEQ ID NO: 5449276 - DNA, 25 bp, Homo sapien
tttccttctttatgagccttctttc

SEQ ID NO: 5449277 - DNA, 25 bp, Homo sapien
tttcatttccttctttatgagcctt

SEQ ID NO: 5449278 - DNA, 25 bp, Homo sapien
tcatttccttctttatgagccttct

SEQ ID NO: 5449279 - DNA, 25 bp, Homo sapien
catttccttctttatgagccttctt

SEQ ID NO: 5449280 - DNA, 25 bp, Homo sapien
aacactacacttagacccagcttct

SEQ ID NO: 5449281 - DNA, 25 bp, Homo sapien
tgcagctaacactacacttagaccc

SEQ ID NO: 5449282 - DNA, 25 bp, Homo sapien
gctaacactacacttagacccagct

SEQ ID NO: 5449283 - DNA, 25 bp, Homo sapien
atctgcagctaacactacacttaga

SEQ ID NO: 5449284 - DNA, 25 bp, Homo sapien
tctctcgggctgttctattaagtgc

SEQ ID NO: 5449285 - DNA, 25 bp, Homo sapien
caatcgtggtacaggtctctcgggc

SEQ ID NO: 5449286 - DNA, 25 bp, Homo sapien
agtgcctgctcttaacaaattcccc

SEQ ID NO: 5449287 - DNA, 25 bp, Homo sapien
caaattcccctttgagaatcgctca

SEQ ID NO: 5449288 - DNA, 25 bp, Homo sapien
ggaggcatgctgaagcatccgcgca

SEQ ID NO: 5449289 - DNA, 25 bp, Homo sapien
aagcatccgcgcatctcagactggt

SEQ ID NO: 5449290 - DNA, 25 bp, Homo sapien
tccgcgcatctcagactggtgctca

SEQ ID NO: 5449291 - DNA, 25 bp, Homo sapien
cggagaccggttccagtgcttttgt

SEQ ID NO: 5449292 - DNA, 25 bp, Homo sapien
gttcatcgatcccaatagtcacctt

SEQ ID NO: 5449293 - DNA, 25 bp, Homo sapien
tcttgatcaagagagcttttcaccc

SEQ ID NO: 5449294 - DNA, 25 bp, Homo sapien
gaccttgctaggcttgttcatccct

SEQ ID NO: 5449295 - DNA, 25 bp, Homo sapien
caactcagccaagtgttcatcgatc

SEQ ID NO: 5449296 - DNA, 25 bp, Homo sapien
acatggagaatggccctcaggctgg

SEQ ID NO: 5449297 - DNA, 25 bp, Homo sapien
caggaccaccatcaggacatggaga

SEQ ID NO: 5449298 - DNA, 25 bp, Homo sapien
ctgaaccaggaccaccatcaggaca

SEQ ID NO: 5449299 - DNA, 25 bp, Homo sapien
gggccatgctgctttctcttcgcat

SEQ ID NO: 5449300 - DNA, 25 bp, Homo sapien
gttcttgacaatcttaacaccagtg

SEQ ID NO: 5449301 - DNA, 25 bp, Homo sapien
caatgagggagtcatcaatgctact

SEQ ID NO: 5449302 - DNA, 25 bp, Homo sapien
caggcacagccatctcctggatctt

SEQ ID NO: 5449303 - DNA, 25 bp, Homo sapien
tctttcaagggatggttcttgacaa

SEQ ID NO: 5449304 - DNA, 25 bp, Homo sapien
gaatttgaaagtcgatatccccatc

SEQ ID NO: 5449305 - DNA, 25 bp, Homo sapien
tggtgacaaccctagcaccctagta

SEQ ID NO: 5449306 - DNA, 25 bp, Homo sapien
ggtcagtaactggtgacaaccctag

SEQ ID NO: 5449307 - DNA, 25 bp, Homo sapien
gaaagtccatcgtgtggactccata

SEQ ID NO: 5449308 - DNA, 25 bp, Homo sapien
ttcaacaatactttctgctgagaca

SEQ ID NO: 5449309 - DNA, 25 bp, Homo sapien
gatccatcttgaaacaggcggtctt

SEQ ID NO: 5449310 - DNA, 25 bp, Homo sapien
ttaagttaagtaagtctccagtctc

SEQ ID NO: 5449311 - DNA, 25 bp, Homo sapien
tccagtctctggagatccatcttga

SEQ ID NO: 5449312 - DNA, 25 bp, Homo sapien
gtagtataatattcaggccaggcca

SEQ ID NO: 5449313 - DNA, 25 bp, Homo sapien
caaaacgggatatctatgacaccag

SEQ ID NO: 5449314 - DNA, 25 bp, Homo sapien
gagtactaaccgaattcctaggctg

SEQ ID NO: 5449315 - DNA, 25 bp, Homo sapien
gagttgcactcctacttcgttccag

SEQ ID NO: 5449316 - DNA, 25 bp, Homo sapien
tattcaagtagtcagaacgttgcac

SEQ ID NO: 5449317 - DNA, 25 bp, Homo sapien
gaactcaaatgtattcaagtagtca

SEQ ID NO: 5449318 - DNA, 25 bp, Homo sapien
gttttctccaagtttatccatgaac

SEQ ID NO: 5449319 - DNA, 25 bp, Homo sapien
ggcctgagctagtttgatcttcaag

SEQ ID NO: 5449320 - DNA, 25 bp, Homo sapien
ttgttatcaagctttgctctgtggg

SEQ ID NO: 5449321 - DNA, 25 bp, Homo sapien
gccaagtccttggtcatgaagccag

SEQ ID NO: 5449322 - DNA, 25 bp, Homo sapien
tctgtgggctaaccctctggtccag

SEQ ID NO: 5449323 - DNA, 25 bp, Homo sapien
tcaatagagacttcttccaaagcat

SEQ ID NO: 5449324 - DNA, 25 bp, Homo sapien
ggattggtggacgtctcctgtcctt

SEQ ID NO: 5449325 - DNA, 25 bp, Homo sapien
aatgggattggtggacgtctcctgt

SEQ ID NO: 5449326 - DNA, 25 bp, Homo sapien
ttggtggacgtctcctgtcctttct

SEQ ID NO: 5449327 - DNA, 25 bp, Homo sapien
ggacaaaccagcacgctggtcatca

SEQ ID NO: 5449328 - DNA, 25 bp, Homo sapien
taaacaagagcacatggaatcacca

SEQ ID NO: 5449329 - DNA, 25 bp, Homo sapien
gaaggcaggtaaacacaggatcggt

SEQ ID NO: 5449330 - DNA, 25 bp, Homo sapien
gacttcatagctactgcggctcagt

SEQ ID NO: 5449331 - DNA, 25 bp, Homo sapien
tccagatatcagagccaatgggtct

SEQ ID NO: 5449332 - DNA, 25 bp, Homo sapien
gagaactaccctggaatgaccctgt

SEQ ID NO: 5449333 - DNA, 25 bp, Homo sapien
gatttggcccttaccccatgcatga

SEQ ID NO: 5449334 - DNA, 25 bp, Homo sapien
tgctgaggaaaccaggcgctgtgtt

SEQ ID NO: 5449335 - DNA, 25 bp, Homo sapien
tcaagttcatacagctaccaagggc

SEQ ID NO: 5449336 - DNA, 25 bp, Homo sapien
ggccaccatgtcgtcgatgagccta

SEQ ID NO: 5449337 - DNA, 25 bp, Homo sapien
ccatgtcgtcgatgagcctatgctc

SEQ ID NO: 5449338 - DNA, 25 bp, Homo sapien
tgtcgtcgatgagcctatgctcata

SEQ ID NO: 5449339 - DNA, 25 bp, Homo sapien
ttgggccaccatgtcgtcgatgagc

SEQ ID NO: 5449340 - DNA, 25 bp, Homo sapien
ttacccaccttgcagggaagccgtg

SEQ ID NO: 5449341 - DNA, 25 bp, Homo sapien
tgagacagtagagtatcccaatgac

SEQ ID NO: 5449342 - DNA, 25 bp, Homo sapien
tgcttgtcccaaacagaagaccgga

SEQ ID NO: 5449343 - DNA, 25 bp, Homo sapien
cacctaaagggagttatgccaatct

SEQ ID NO: 5449344 - DNA, 25 bp, Homo sapien
agatacaaaggccaacccttagaca

SEQ ID NO: 5449345 - DNA, 25 bp, Homo sapien
tacaaaggccaacccttagacagag

SEQ ID NO: 5449346 - DNA, 25 bp, Homo sapien
gccaacccttagacagagccatttg

SEQ ID NO: 5449347 - DNA, 25 bp, Homo sapien
aaaggccaacccttagacagagcca

SEQ ID NO: 5449348 - DNA, 25 bp, Homo sapien
cagaagtcccagacaggtttccaac

SEQ ID NO: 5449349 - DNA, 25 bp, Homo sapien
cctttggtgattacgtgagttctcg

SEQ ID NO: 5449350 - DNA, 25 bp, Homo sapien
tgtaataaggctaaaatcacccacc

SEQ ID NO: 5449351 - DNA, 25 bp, Homo sapien
tggcttaggaccatcccctttggtg

SEQ ID NO: 5449352 - DNA, 25 bp, Homo sapien
tgtaccaggtatgtcaccttttggg

SEQ ID NO: 5449353 - DNA, 25 bp, Homo sapien
gttatgtaccaggtatgtcaccttt

SEQ ID NO: 5449354 - DNA, 25 bp, Homo sapien
atgtaccaggtatgtcaccttttgg

SEQ ID NO: 5449355 - DNA, 25 bp, Homo sapien
tatgtaccaggtatgtcaccttttg

SEQ ID NO: 5449356 - DNA, 25 bp, Homo sapien
aatgctttgtccttactctatgcca

SEQ ID NO: 5449357 - DNA, 25 bp, Homo sapien
aagagctttcaaatgccaaaagagg

SEQ ID NO: 5449358 - DNA, 25 bp, Homo sapien
tattaggtgcctatacgaggtatag

SEQ ID NO: 5449359 - DNA, 25 bp, Homo sapien
aagaggtgaccatggaaggaagtca

SEQ ID NO: 5449360 - DNA, 25 bp, Homo sapien
tcagatacttgcagagttaggtacc

SEQ ID NO: 5449361 - DNA, 25 bp, Homo sapien
tgcatccagggtcaaaggacttgag

SEQ ID NO: 5449362 - DNA, 25 bp, Homo sapien
gggcctcagctactcagtggaataa

SEQ ID NO: 5449363 - DNA, 25 bp, Homo sapien
tgaggtctcgtccttacttaggcca

SEQ ID NO: 5449364 - DNA, 25 bp, Homo sapien
tatacgcagaaaaaaggcacgactg

SEQ ID NO: 5449365 - DNA, 25 bp, Homo sapien
tacaagattagcgagtttgcaccac

SEQ ID NO: 5449366 - DNA, 25 bp, Homo sapien
ggcacgactgaactggaaagaatct

SEQ ID NO: 5449367 - DNA, 25 bp, Homo sapien
gaaaggatagttttagccacagagt

SEQ ID NO: 5449368 - DNA, 25 bp, Homo sapien
gctctgttgcgtaggcagtggtgtg

SEQ ID NO: 5449369 - DNA, 25 bp, Homo sapien
ttcgcctactcactttgtatatgaa

SEQ ID NO: 5449370 - DNA, 25 bp, Homo sapien
actcagcttcgcctactcactttgt

SEQ ID NO: 5449371 - DNA, 25 bp, Homo sapien
cagcttcgcctactcactttgtata

SEQ ID NO: 5449372 - DNA, 25 bp, Homo sapien
tcacattattgccaacatgacttac

SEQ ID NO: 5449373 - DNA, 25 bp, Homo sapien
ggtgtagataccaaaagataagaat

SEQ ID NO: 5449374 - DNA, 25 bp, Homo sapien
cttaatgggtgtagataccaaaaga

SEQ ID NO: 5449375 - DNA, 25 bp, Homo sapien
tcaatttcataccttgcttaatggg

SEQ ID NO: 5449376 - DNA, 25 bp, Homo sapien
gagtgatagtggcacatttgacgcc

SEQ ID NO: 5449377 - DNA, 25 bp, Homo sapien
cgttggtggcatcacgattctctat

SEQ ID NO: 5449378 - DNA, 25 bp, Homo sapien
gaccgtgccacccagaatatttcgt

SEQ ID NO: 5449379 - DNA, 25 bp, Homo sapien
gatccccataagcatgacgacctat

SEQ ID NO: 5449380 - DNA, 25 bp, Homo sapien
tctgggctgaggcaaacacacttag

SEQ ID NO: 5449381 - DNA, 25 bp, Homo sapien
tgtccccaggcactttacacacagg

SEQ ID NO: 5449382 - DNA, 25 bp, Homo sapien
tagtttggctgaaacgtgttgctca

SEQ ID NO: 5449383 - DNA, 25 bp, Homo sapien
catcagcagcttaggtttagaacaa

SEQ ID NO: 5449384 - DNA, 25 bp, Homo sapien
gattatcctttctgagtttgctaca

SEQ ID NO: 5449385 - DNA, 25 bp, Homo sapien
tcctttctgagtttgctacacggag

SEQ ID NO: 5449386 - DNA, 25 bp, Homo sapien
tgcccagccagattatcctttctga

SEQ ID NO: 5449387 - DNA, 25 bp, Homo sapien
tttgctacacggaggggtaactcat

SEQ ID NO: 5449388 - DNA, 25 bp, Homo sapien
tagatccaattccacgtagggaaaa

SEQ ID NO: 5449389 - DNA, 25 bp, Homo sapien
ctatgtagatccaattccacgtagg

SEQ ID NO: 5449390 - DNA, 25 bp, Homo sapien
tcaattcccaaatgattcgtgtcat

SEQ ID NO: 5449391 - DNA, 25 bp, Homo sapien
gaaccgccactgatttttttggaca

SEQ ID NO: 5449392 - DNA, 25 bp, Homo sapien
gggaaccttctggaactgaactaga

SEQ ID NO: 5449393 - DNA, 25 bp, Homo sapien
tagatttcttatcaccccagttcct

SEQ ID NO: 5449394 - DNA, 25 bp, Homo sapien
cttgacagtgaatagatttcttatc

SEQ ID NO: 5449395 - DNA, 25 bp, Homo sapien
gactcaactgaatgtagtttatcgc

SEQ ID NO: 5449396 - DNA, 25 bp, Homo sapien
tcccagtcttgcagactcaactgaa

SEQ ID NO: 5449397 - DNA, 25 bp, Homo sapien
gttaacatacagaacactcacagga

SEQ ID NO: 5449398 - DNA, 25 bp, Homo sapien
gaacactcacaggagaatttagctg

SEQ ID NO: 5449399 - DNA, 25 bp, Homo sapien
catacagaacactcacaggagaatt

SEQ ID NO: 5449400 - DNA, 25 bp, Homo sapien
cagaacactcacaggagaatttagc

SEQ ID NO: 5449401 - DNA, 25 bp, Homo sapien
caatcaaggctggatcggtacctcc

SEQ ID NO: 5449402 - DNA, 25 bp, Homo sapien
aaggccaattttaggcccgcaggca

SEQ ID NO: 5449403 - DNA, 25 bp, Homo sapien
cacaatttatctctgcgtgtgcgag

SEQ ID NO: 5449404 - DNA, 25 bp, Homo sapien
tgtactcggtgggacaaaggccaat

SEQ ID NO: 5449405 - DNA, 25 bp, Homo sapien
agcgacccctctgaaggccgctgga

SEQ ID NO: 5449406 - DNA, 25 bp, Homo sapien
ctctcgccccgtgtggcctagcgac

SEQ ID NO: 5449407 - DNA, 25 bp, Homo sapien
cctagcgacccctctgaaggccgct

SEQ ID NO: 5449408 - DNA, 25 bp, Homo sapien
taaactccaggcacccggaactggc

SEQ ID NO: 5449409 - DNA, 25 bp, Homo sapien
cccttgtcgttgcatccaacttcct

SEQ ID NO: 5449410 - DNA, 25 bp, Homo sapien
cttgtcgttgcatccaacttcctca

SEQ ID NO: 5449411 - DNA, 25 bp, Homo sapien
tttccccttgtcgttgcatccaact

SEQ ID NO: 5449412 - DNA, 25 bp, Homo sapien
cttcctcaccgcccagtttctccct

SEQ ID NO: 5449413 - DNA, 25 bp, Homo sapien
ttctcaatacctggatttgttccct

SEQ ID NO: 5449414 - DNA, 25 bp, Homo sapien
ttctttgcacgcaggccttgactcc

SEQ ID NO: 5449415 - DNA, 25 bp, Homo sapien
cacacccaagatctgcgcttttttc

SEQ ID NO: 5449416 - DNA, 25 bp, Homo sapien
tctgcatatccaagcatccagcatc

SEQ ID NO: 5449417 - DNA, 25 bp, Homo sapien
cagcctggcaatcccaaaccggact

SEQ ID NO: 5449418 - DNA, 25 bp, Homo sapien
ccgggatgatatgctggcgaagagt

SEQ ID NO: 5449419 - DNA, 25 bp, Homo sapien
cacagccgctcacaagctcagactc

SEQ ID NO: 5449420 - DNA, 25 bp, Homo sapien
actcccagtgcctccgcttctgaag

SEQ ID NO: 5449421 - DNA, 25 bp, Homo sapien
cacagggtaggtccgagcttttcct

SEQ ID NO: 5449422 - DNA, 25 bp, Homo sapien
tgggatgggcggagtcagcgagagg

SEQ ID NO: 5449423 - DNA, 25 bp, Homo sapien
cacacgccaattcccgtgggatggg

SEQ ID NO: 5449424 - DNA, 25 bp, Homo sapien
cgagaggggcgtggccacagtcaaa

SEQ ID NO: 5449425 - DNA, 25 bp, Homo sapien
accacagagtgtttccaggtcggca

SEQ ID NO: 5449426 - DNA, 25 bp, Homo sapien
tcccgacagcgaagagacttgtatg

SEQ ID NO: 5449427 - DNA, 25 bp, Homo sapien
caggtcggcacaaaagcgaacggga

SEQ ID NO: 5449428 - DNA, 25 bp, Homo sapien
tgtaacaatctagagcaccacagag

SEQ ID NO: 5449429 - DNA, 25 bp, Homo sapien
ctgaagaaagagtgctcccggccag

SEQ ID NO: 5449430 - DNA, 25 bp, Homo sapien
tgaagaaagagtgctcccggccagc

SEQ ID NO: 5449431 - DNA, 25 bp, Homo sapien
ggtcgcctagggggttccgcgctgc

SEQ ID NO: 5449432 - DNA, 25 bp, Homo sapien
aagaaagagtgctcccggccagcgc

SEQ ID NO: 5449433 - DNA, 25 bp, Homo sapien
tgccatgggacagcaagatgatgtc

SEQ ID NO: 5449434 - DNA, 25 bp, Homo sapien
tttcttaactttgcgatgccatggg

SEQ ID NO: 5449435 - DNA, 25 bp, Homo sapien
tacatagagtcacagatctgatggc

SEQ ID NO: 5449436 - DNA, 25 bp, Homo sapien
gagacaaggtgcagttcaacaaaga

SEQ ID NO: 5449437 - DNA, 25 bp, Homo sapien
taactctagccaagctgaacaagat

SEQ ID NO: 5449438 - DNA, 25 bp, Homo sapien
agttaactgcactgcgctctcagca

SEQ ID NO: 5449439 - DNA, 25 bp, Homo sapien
aactgcggcgagcatgttttctgca

SEQ ID NO: 5449440 - DNA, 25 bp, Homo sapien
cagaaatgacgaataactctagcca

SEQ ID NO: 5449441 - DNA, 25 bp, Homo sapien
gaaacagagtcatcgctaactccgg

SEQ ID NO: 5449442 - DNA, 25 bp, Homo sapien
tccggttcagtgctacacgagtgaa

SEQ ID NO: 5449443 - DNA, 25 bp, Homo sapien
tatgagtgcccacagtatcgaacac

SEQ ID NO: 5449444 - DNA, 25 bp, Homo sapien
ttaatccgactttacacaccagagg

SEQ ID NO: 5449445 - DNA, 25 bp, Homo sapien
gttgaccccgcatgcgtgacgctca

SEQ ID NO: 5449446 - DNA, 25 bp, Homo sapien
taatctcggccaaaagatcaggacg

SEQ ID NO: 5449447 - DNA, 25 bp, Homo sapien
agagcaccaagcacccatccgttga

SEQ ID NO: 5449448 - DNA, 25 bp, Homo sapien
caggaaggctgaagcggcctaatct

SEQ ID NO: 5449449 - DNA, 25 bp, Homo sapien
cttattcagttatcagcttacttcc

SEQ ID NO: 5449450 - DNA, 25 bp, Homo sapien
tacttattcagttatcagcttactt

SEQ ID NO: 5449451 - DNA, 25 bp, Homo sapien
gtatacttattcagttatcagctta

SEQ ID NO: 5449452 - DNA, 25 bp, Homo sapien
tatacttattcagttatcagcttac

SEQ ID NO: 5449453 - DNA, 25 bp, Homo sapien
agttgatgctgtcctcatgtcctgc

SEQ ID NO: 5449454 - DNA, 25 bp, Homo sapien
ctagttgatgctgtcctcatgtcct

SEQ ID NO: 5449455 - DNA, 25 bp, Homo sapien
ttgatgctgtcctcatgtcctgcca

SEQ ID NO: 5449456 - DNA, 25 bp, Homo sapien
tgatgctgtcctcatgtcctgccag

SEQ ID NO: 5449457 - DNA, 25 bp, Homo sapien
acatgaagcccctccaggtagtcct

SEQ ID NO: 5449458 - DNA, 25 bp, Homo sapien
tcatatgtgccttggttctgcttct

SEQ ID NO: 5449459 - DNA, 25 bp, Homo sapien
ttcccctccttgactaacacatgaa

SEQ ID NO: 5449460 - DNA, 25 bp, Homo sapien
taacacatgaagcccctccaggtag

SEQ ID NO: 5449461 - DNA, 25 bp, Homo sapien
gttccccaggaccttcatcaccttg

SEQ ID NO: 5449462 - DNA, 25 bp, Homo sapien
ttggcactggtgaggttctggtcca

SEQ ID NO: 5449463 - DNA, 25 bp, Homo sapien
accttcatcaccttggcactggtga

SEQ ID NO: 5449464 - DNA, 25 bp, Homo sapien
tgaggttctggtccagggcccccat

SEQ ID NO: 5449465 - DNA, 25 bp, Homo sapien
ggcagttttaatgggtgtgtagtat

SEQ ID NO: 5449466 - DNA, 25 bp, Homo sapien
tattatctcatgtgattgacttttg

SEQ ID NO: 5449467 - DNA, 25 bp, Homo sapien
gtattatctcatgtgattgactttt

SEQ ID NO: 5449468 - DNA, 25 bp, Homo sapien
ttttggcagttttaatgggtgtgta

SEQ ID NO: 5449469 - DNA, 25 bp, Homo sapien
gatagcagtctttgtcttagataca

SEQ ID NO: 5449470 - DNA, 25 bp, Homo sapien
tattaagtctacacagaagtacatg

SEQ ID NO: 5449471 - DNA, 25 bp, Homo sapien
ccatagtctatagtttgtagcagct

SEQ ID NO: 5449472 - DNA, 25 bp, Homo sapien
taaatggaaacatctgatagcagtc

SEQ ID NO: 5449473 - DNA, 25 bp, Homo sapien
aggttacttaggaaatacagtctat

SEQ ID NO: 5449474 - DNA, 25 bp, Homo sapien
ggaggatcacaagctcagaaggttg

SEQ ID NO: 5449475 - DNA, 25 bp, Homo sapien
ttgacttgtgattaaatttcttata

SEQ ID NO: 5449476 - DNA, 25 bp, Homo sapien
cttataaaaccaagagccccggctg

SEQ ID NO: 5449477 - DNA, 25 bp, Homo sapien
tttattcagagatccagaaaaaggg

SEQ ID NO: 5449478 - DNA, 25 bp, Homo sapien
gatctttaactgtagctgttctagg

SEQ ID NO: 5449479 - DNA, 25 bp, Homo sapien
gattacacttttggagctgaaggca

SEQ ID NO: 5449480 - DNA, 25 bp, Homo sapien
ctgtagtcctagaagggtgaagcag

SEQ ID NO: 5449481 - DNA, 25 bp, Homo sapien
ggcttggatccctcttatgttatgg

SEQ ID NO: 5449482 - DNA, 25 bp, Homo sapien
ggaacaagtatatccaaaaagtgga

SEQ ID NO: 5449483 - DNA, 25 bp, Homo sapien
taaggaactgtcatcactcttagga

SEQ ID NO: 5449484 - DNA, 25 bp, Homo sapien
ggaagatacagttagggctcacagt

SEQ ID NO: 5449485 - DNA, 25 bp, Homo sapien
gacagcagggaaaagccccgatctc

SEQ ID NO: 5449486 - DNA, 25 bp, Homo sapien
gcattactcagattgattagcttca

SEQ ID NO: 5449487 - DNA, 25 bp, Homo sapien
caataagtaacaacatgaaggacaa

SEQ ID NO: 5449488 - DNA, 25 bp, Homo sapien
gagaccttacgtggagcagatagtg

SEQ ID NO: 5449489 - DNA, 25 bp, Homo sapien
ggcattgctgctgtactcacttctg

SEQ ID NO: 5449490 - DNA, 25 bp, Homo sapien
cacggcgttggccaaaattcttgga

SEQ ID NO: 5449491 - DNA, 25 bp, Homo sapien
gaagttagatctccttgtcatggaa

SEQ ID NO: 5449492 - DNA, 25 bp, Homo sapien
tctcttgattagaggcccacggcgt

SEQ ID NO: 5449493 - DNA, 25 bp, Homo sapien
ttgtgtctaggaacaatggattttg

SEQ ID NO: 5449494 - DNA, 25 bp, Homo sapien
ggaacaatggattttgtatctgatt

SEQ ID NO: 5449495 - DNA, 25 bp, Homo sapien
taaaggagctgtacagaggtaaaaa

SEQ ID NO: 5449496 - DNA, 25 bp, Homo sapien
attttttctgtgaggatacttaagg

SEQ ID NO: 5449497 - DNA, 25 bp, Homo sapien
taaaacggaccaggccattcattat

SEQ ID NO: 5449498 - DNA, 25 bp, Homo sapien
gaatgagcctgatcataaaacggac

SEQ ID NO: 5449499 - DNA, 25 bp, Homo sapien
gaacttttggagacttgtactgtaa

SEQ ID NO: 5449500 - DNA, 25 bp, Homo sapien
tgatcctgtgtaaaactgccaagga

SEQ ID NO: 5449501 - DNA, 25 bp, Homo sapien
tactggtccctaggaactttcgcca

SEQ ID NO: 5449502 - DNA, 25 bp, Homo sapien
ggcagcgtgctcctcgcaggttact

SEQ ID NO: 5449503 - DNA, 25 bp, Homo sapien
cttcgaagcagtttgtcaaccagca

SEQ ID NO: 5449504 - DNA, 25 bp, Homo sapien
ttgaacaggtaagaagagcgcccca

SEQ ID NO: 5449505 - DNA, 25 bp, Homo sapien
cggaagcagtcgtcgcctgctgcca

SEQ ID NO: 5449506 - DNA, 25 bp, Homo sapien
gaagcagtcgtcgcctgctgccacc

SEQ ID NO: 5449507 - DNA, 25 bp, Homo sapien
ccggaagcagtcgtcgcctgctgcc

SEQ ID NO: 5449508 - DNA, 25 bp, Homo sapien
agcagtcgtcgcctgctgccaccag

SEQ ID NO: 5449509 - DNA, 25 bp, Homo sapien
ggccagggttgcaaggccctcctct

SEQ ID NO: 5449510 - DNA, 25 bp, Homo sapien
aggcacccgctgactgagaagccaa

SEQ ID NO: 5449511 - DNA, 25 bp, Homo sapien
aaggccctcctcttgttggcatcag

SEQ ID NO: 5449512 - DNA, 25 bp, Homo sapien
ccaggcacgcagtgctgtcgtggct

SEQ ID NO: 5449513 - DNA, 25 bp, Homo sapien
ctcagacatcagcaccccaaagggt

SEQ ID NO: 5449514 - DNA, 25 bp, Homo sapien
acccagccgcacctaccgctggcct

SEQ ID NO: 5449515 - DNA, 25 bp, Homo sapien
caaagggtatgttggagtcccatgg

SEQ ID NO: 5449516 - DNA, 25 bp, Homo sapien
gcaccccaaagggtatgttggagtc

SEQ ID NO: 5449517 - DNA, 25 bp, Homo sapien
cttgacgtcgcagggggcattagcc

SEQ ID NO: 5449518 - DNA, 25 bp, Homo sapien
tgtataccgaggatcccatgcttga

SEQ ID NO: 5449519 - DNA, 25 bp, Homo sapien
gagcacgttgctgggatgccagtcc

SEQ ID NO: 5449520 - DNA, 25 bp, Homo sapien
tattctcccgctggaaataacagat

SEQ ID NO: 5449521 - DNA, 25 bp, Homo sapien
acacacagcaggcagtgggtgcggg

SEQ ID NO: 5449522 - DNA, 25 bp, Homo sapien
cacagcaggcagtgggtgcgggctt

SEQ ID NO: 5449523 - DNA, 25 bp, Homo sapien
acacagcaggcagtgggtgcgggct

SEQ ID NO: 5449524 - DNA, 25 bp, Homo sapien
cagcaggcagtgggtgcgggcttac

SEQ ID NO: 5449525 - DNA, 25 bp, Homo sapien
gccataggtcacgatgaggttactc

SEQ ID NO: 5449526 - DNA, 25 bp, Homo sapien
tggcccgtcagcgtccacacagagg

SEQ ID NO: 5449527 - DNA, 25 bp, Homo sapien
cacgatgaggttactcttggaggcc

SEQ ID NO: 5449528 - DNA, 25 bp, Homo sapien
aggccttgtggcctgtgccataggt

SEQ ID NO: 5449529 - DNA, 25 bp, Homo sapien
ctgggtgcggcccttgctccaggtt

SEQ ID NO: 5449530 - DNA, 25 bp, Homo sapien
gtggccatctgggtgcggcccttgc

SEQ ID NO: 5449531 - DNA, 25 bp, Homo sapien
ggccatctgggtgcggcccttgctc

SEQ ID NO: 5449532 - DNA, 25 bp, Homo sapien
atctgggtgcggcccttgctccagg

SEQ ID NO: 5449533 - DNA, 25 bp, Homo sapien
agctgtgggaggctgtagttgctct

SEQ ID NO: 5449534 - DNA, 25 bp, Homo sapien
gctgtgggaggctgtagttgctctc

SEQ ID NO: 5449535 - DNA, 25 bp, Homo sapien
actggatgagatgcctctctgagtc

SEQ ID NO: 5449536 - DNA, 25 bp, Homo sapien
tttcactggatgagatgcctctctg

SEQ ID NO: 5449537 - DNA, 25 bp, Homo sapien
ttcactggatgagatgcctctctga

SEQ ID NO: 5449538 - DNA, 25 bp, Homo sapien
tcactggatgagatgcctctctgag

SEQ ID NO: 5449539 - DNA, 25 bp, Homo sapien
ctgctcctcaatgattgctcctgtg

SEQ ID NO: 5449540 - DNA, 25 bp, Homo sapien
tctgctcctcaatgattgctcctgt

SEQ ID NO: 5449541 - DNA, 25 bp, Homo sapien
tgtgatattctctgaggcacactgc

SEQ ID NO: 5449542 - DNA, 25 bp, Homo sapien
actgcatgctgctagtgtgccctgg

SEQ ID NO: 5449543 - DNA, 25 bp, Homo sapien
ctagtgtgccctggttcataaagct

SEQ ID NO: 5449544 - DNA, 25 bp, Homo sapien
tgggccttcagcattgatcccactc

SEQ ID NO: 5449545 - DNA, 25 bp, Homo sapien
tccttcaacactacaatgacatctt

SEQ ID NO: 5449546 - DNA, 25 bp, Homo sapien
cttcggtgacgttccacactatcct

SEQ ID NO: 5449547 - DNA, 25 bp, Homo sapien
cggtgacgttccacactatccttca

SEQ ID NO: 5449548 - DNA, 25 bp, Homo sapien
cacactatccttcaacactacaatg

SEQ ID NO: 5449549 - DNA, 25 bp, Homo sapien
cctgccacctgtatgttccaatgtt

SEQ ID NO: 5449550 - DNA, 25 bp, Homo sapien
ctacctgccacctgtatgttccaat

SEQ ID NO: 5449551 - DNA, 25 bp, Homo sapien
tgccacctgtatgttccaatgttac

SEQ ID NO: 5449552 - DNA, 25 bp, Homo sapien
tacctgccacctgtatgttccaatg

SEQ ID NO: 5449553 - DNA, 25 bp, Homo sapien
aagaaacttctggatcactcctgga

SEQ ID NO: 5449554 - DNA, 25 bp, Homo sapien
ctggcctcgggagcctttagccatc

SEQ ID NO: 5449555 - DNA, 25 bp, Homo sapien
gtcagcgcacgcaggacaggaagaa

SEQ ID NO: 5449556 - DNA, 25 bp, Homo sapien
tagccatcttatcgctgtcctcggg

SEQ ID NO: 5449557 - DNA, 25 bp, Homo sapien
gcatcctggcatccgcaaagtaagg

SEQ ID NO: 5449558 - DNA, 25 bp, Homo sapien
tagtggagggagcttcaaagatctg

SEQ ID NO: 5449559 - DNA, 25 bp, Homo sapien
gggccggcactgtttagaccagcat

SEQ ID NO: 5449560 - DNA, 25 bp, Homo sapien
gggatatttccgaacagcggagtcg

SEQ ID NO: 5449561 - DNA, 25 bp, Homo sapien
gttcaaaacccgtgcattcatacat

SEQ ID NO: 5449562 - DNA, 25 bp, Homo sapien
gatatagaccagtgctcatcaattg

SEQ ID NO: 5449563 - DNA, 25 bp, Homo sapien
tcatcaattgttttaagggtctctg

SEQ ID NO: 5449564 - DNA, 25 bp, Homo sapien
ttgtctcaaagcacagttcaaaacc

SEQ ID NO: 5449565 - DNA, 25 bp, Homo sapien
tacacatttggcctggattgcacac

SEQ ID NO: 5449566 - DNA, 25 bp, Homo sapien
gcacacagctcggtgtctccagaga

SEQ ID NO: 5449567 - DNA, 25 bp, Homo sapien
tcatagtggattgtcaagcaagttc

SEQ ID NO: 5449568 - DNA, 25 bp, Homo sapien
agagaggccaacctgatagacgtca

SEQ ID NO: 5449569 - DNA, 25 bp, Homo sapien
cctccagtagatggcacactggcct

SEQ ID NO: 5449570 - DNA, 25 bp, Homo sapien
caggttgctttgagggcaatctgca

SEQ ID NO: 5449571 - DNA, 25 bp, Homo sapien
cagtagatggcacactggcctttgt

SEQ ID NO: 5449572 - DNA, 25 bp, Homo sapien
ttttttgcaggttgctttgagggca

SEQ ID NO: 5449573 - DNA, 25 bp, Homo sapien
gcacaaatcctctgataaccaaaat

SEQ ID NO: 5449574 - DNA, 25 bp, Homo sapien
tgttcagggctgatacagtcagtca

SEQ ID NO: 5449575 - DNA, 25 bp, Homo sapien
tcacagggttgtcagtggtcggata

SEQ ID NO: 5449576 - DNA, 25 bp, Homo sapien
tcagtggtcggatagcagtgagttt

SEQ ID NO: 5449577 - DNA, 25 bp, Homo sapien
tatgccctgctgttggatgagctgc

SEQ ID NO: 5449578 - DNA, 25 bp, Homo sapien
ttgtaacttttaatatgccctgctg

SEQ ID NO: 5449579 - DNA, 25 bp, Homo sapien
tattgcggtacaccagctgatgctt

SEQ ID NO: 5449580 - DNA, 25 bp, Homo sapien
tctgaccatgtttagggtttggaca

SEQ ID NO: 5449581 - DNA, 25 bp, Homo sapien
cactggtgatgacacagatggtatc

SEQ ID NO: 5449582 - DNA, 25 bp, Homo sapien
tgggcatgttctggtcactggtgat

SEQ ID NO: 5449583 - DNA, 25 bp, Homo sapien
ccatcaacaactctctgctggtgga

SEQ ID NO: 5449584 - DNA, 25 bp, Homo sapien
tggtgatgacacagatggtatccat

SEQ ID NO: 5449585 - DNA, 25 bp, Homo sapien
taggattctctttgcacagtcaggg

SEQ ID NO: 5449586 - DNA, 25 bp, Homo sapien
ccatattctgcattacaaatgtcag

SEQ ID NO: 5449587 - DNA, 25 bp, Homo sapien
cccatgcttgggagctcagccatga

SEQ ID NO: 5449588 - DNA, 25 bp, Homo sapien
tctgcactccacagttctatctctt

SEQ ID NO: 5449589 - DNA, 25 bp, Homo sapien
ctgctctggatgtttttgttttttc

SEQ ID NO: 5449590 - DNA, 25 bp, Homo sapien
ccaggccaattcagtatttgaacaa

SEQ ID NO: 5449591 - DNA, 25 bp, Homo sapien
cacaagaattacttctacgtcaatg

SEQ ID NO: 5449592 - DNA, 25 bp, Homo sapien
ttctacgtcaatgggggcatagtcc

SEQ ID NO: 5449593 - DNA, 25 bp, Homo sapien
ctgtggcttcgtccagttgctccac

SEQ ID NO: 5449594 - DNA, 25 bp, Homo sapien
tctgtggcttcgtccagttgctcca

SEQ ID NO: 5449595 - DNA, 25 bp, Homo sapien
gctgttgaacacatgaggctccatc

SEQ ID NO: 5449596 - DNA, 25 bp, Homo sapien
gctgtgttgggcttgtggtttctaa

SEQ ID NO: 5449597 - DNA, 25 bp, Homo sapien
tgcttcctgaagagaataactgttg

SEQ ID NO: 5449598 - DNA, 25 bp, Homo sapien
ggctccatcgcatgtctctctgctg

SEQ ID NO: 5449599 - DNA, 25 bp, Homo sapien
catgtacacaaggctaagaggggaa

SEQ ID NO: 5449600 - DNA, 25 bp, Homo sapien
ttcagttgtttgtatcacatgtaca

SEQ ID NO: 5449601 - DNA, 25 bp, Homo sapien
attcagttgtttgtatcacatgtac

SEQ ID NO: 5449602 - DNA, 25 bp, Homo sapien
cacatgtacacaaggctaagagggg

SEQ ID NO: 5449603 - DNA, 25 bp, Homo sapien
cttgtggggaccctggttttctgcg

SEQ ID NO: 5449604 - DNA, 25 bp, Homo sapien
ttggaaccaggcacctccatggttt

SEQ ID NO: 5449605 - DNA, 25 bp, Homo sapien
tctcagccattggaaccaggcacct

SEQ ID NO: 5449606 - DNA, 25 bp, Homo sapien
gtttctcagccattggaaccaggca

SEQ ID NO: 5449607 - DNA, 25 bp, Homo sapien
tagtgccacgtggtttggtgaagtt

SEQ ID NO: 5449608 - DNA, 25 bp, Homo sapien
caattgaatagcgtgcaggaccaga

SEQ ID NO: 5449609 - DNA, 25 bp, Homo sapien
gagttctgtctgcttaacgttgccg

SEQ ID NO: 5449610 - DNA, 25 bp, Homo sapien
ttattaattggatccccagaggctg

SEQ ID NO: 5449611 - DNA, 25 bp, Homo sapien
cagcacacaagcctgaattggaggt

SEQ ID NO: 5449612 - DNA, 25 bp, Homo sapien
caactgtgcattcagcacacaagcc

SEQ ID NO: 5449613 - DNA, 25 bp, Homo sapien
catgtttggcatcaactgtgcattc

SEQ ID NO: 5449614 - DNA, 25 bp, Homo sapien
gtgtgtccatgtttggcatcaactg

SEQ ID NO: 5449615 - DNA, 25 bp, Homo sapien
ctataacagaagtagaatgttgcat

SEQ ID NO: 5449616 - DNA, 25 bp, Homo sapien
caaagactggataatcttgaggata

SEQ ID NO: 5449617 - DNA, 25 bp, Homo sapien
cttgaggatatgttgatggttcacc

SEQ ID NO: 5449618 - DNA, 25 bp, Homo sapien
tatccaaagactggataatcttgag

SEQ ID NO: 5449619 - DNA, 25 bp, Homo sapien
ttcaccagattgctgaagagaagga

SEQ ID NO: 5449620 - DNA, 25 bp, Homo sapien
tatagacttgtgagctcttaaaaaa

SEQ ID NO: 5449621 - DNA, 25 bp, Homo sapien
gacaagtagaagtgttttgactgac

SEQ ID NO: 5449622 - DNA, 25 bp, Homo sapien
gtagaagtgttttgactgacaccat

SEQ ID NO: 5449623 - DNA, 25 bp, Homo sapien
ttttcttttatagacttgtgagctc

SEQ ID NO: 5449624 - DNA, 25 bp, Homo sapien
tgagtttaggcagttaccagttaga

SEQ ID NO: 5449625 - DNA, 25 bp, Homo sapien
gagttgagccatgaaatcaatcgag

SEQ ID NO: 5449626 - DNA, 25 bp, Homo sapien
caatcgagtgtatagatgtggacat

SEQ ID NO: 5449627 - DNA, 25 bp, Homo sapien
taatgttgtccacatagggtagcca

SEQ ID NO: 5449628 - DNA, 25 bp, Homo sapien
gcttcctgatatgaaagcctcttca

SEQ ID NO: 5449629 - DNA, 25 bp, Homo sapien
tataacttttgctacaccattgaaa

SEQ ID NO: 5449630 - DNA, 25 bp, Homo sapien
gttcttctttagtggcttcctgata

SEQ ID NO: 5449631 - DNA, 25 bp, Homo sapien
tctttagtggcttcctgatatgaaa

SEQ ID NO: 5449632 - DNA, 25 bp, Homo sapien
tcaggctatacggaaaaagtgtaca

SEQ ID NO: 5449633 - DNA, 25 bp, Homo sapien
gctatacggaaaaagtgtacaacca

SEQ ID NO: 5449634 - DNA, 25 bp, Homo sapien
accagatccatacgggaataattta

SEQ ID NO: 5449635 - DNA, 25 bp, Homo sapien
ccaaaccagatccatacgggaataa

SEQ ID NO: 5449636 - DNA, 25 bp, Homo sapien
caactctacttaggttttgagatag

SEQ ID NO: 5449637 - DNA, 25 bp, Homo sapien
tagcctgacatatgagagaagactc

SEQ ID NO: 5449638 - DNA, 25 bp, Homo sapien
tgtagtttcaaaagatggccatgcc

SEQ ID NO: 5449639 - DNA, 25 bp, Homo sapien
tatgctgcgaagaagtccaaatgag

SEQ ID NO: 5449640 - DNA, 25 bp, Homo sapien
cataaaaatgtcacgcactcagggt

SEQ ID NO: 5449641 - DNA, 25 bp, Homo sapien
ttgtggcaaatattcctctattgct

SEQ ID NO: 5449642 - DNA, 25 bp, Homo sapien
cactgatgtgctgtagttgaccggt

SEQ ID NO: 5449643 - DNA, 25 bp, Homo sapien
aatattcctctattgcttctgtgcc

SEQ ID NO: 5449644 - DNA, 25 bp, Homo sapien
tgcaggttatcagaagtaacactga

SEQ ID NO: 5449645 - DNA, 25 bp, Homo sapien
tcttcagctctgtatgggccagaca

SEQ ID NO: 5449646 - DNA, 25 bp, Homo sapien
ctcttcagctctgtatgggccagac

SEQ ID NO: 5449647 - DNA, 25 bp, Homo sapien
aaatgatgtaaacacccatccatgc

SEQ ID NO: 5449648 - DNA, 25 bp, Homo sapien
agcaatagtgcaaactccactgttg

SEQ ID NO: 5449649 - DNA, 25 bp, Homo sapien
gcaaggattttcaaagcaatagtgc

SEQ ID NO: 5449650 - DNA, 25 bp, Homo sapien
aaaaaatgatgtaaacacccatcca

SEQ ID NO: 5449651 - DNA, 25 bp, Homo sapien
catctacgcatctccaaccactagc

SEQ ID NO: 5449652 - DNA, 25 bp, Homo sapien
gctttttcatctacgcatctccaac

SEQ ID NO: 5449653 - DNA, 25 bp, Homo sapien
ttcatctacgcatctccaaccacta

SEQ ID NO: 5449654 - DNA, 25 bp, Homo sapien
ctacgcatctccaaccactagccat

SEQ ID NO: 5449655 - DNA, 25 bp, Homo sapien
tggaacctagagccttctgaggcca

SEQ ID NO: 5449656 - DNA, 25 bp, Homo sapien
atggaacctagagccttctgaggcc

SEQ ID NO: 5449657 - DNA, 25 bp, Homo sapien
ctagtttaggagcatggaacctaga

SEQ ID NO: 5449658 - DNA, 25 bp, Homo sapien
gatccactaggaaatcttatgactg

SEQ ID NO: 5449659 - DNA, 25 bp, Homo sapien
cttagtatcagatccactaggaaat

SEQ ID NO: 5449660 - DNA, 25 bp, Homo sapien
gtatcagatccactaggaaatctta

SEQ ID NO: 5449661 - DNA, 25 bp, Homo sapien
tcagatccactaggaaatcttatga

SEQ ID NO: 5449662 - DNA, 25 bp, Homo sapien
tctattggttcctgtgtctaagcac

SEQ ID NO: 5449663 - DNA, 25 bp, Homo sapien
catgcttagctaaatgccctgcaca

SEQ ID NO: 5449664 - DNA, 25 bp, Homo sapien
ggccagagcctcattgaattagaat

SEQ ID NO: 5449665 - DNA, 25 bp, Homo sapien
tcatgatcatatgtgggccagagcc

SEQ ID NO: 5449666 - DNA, 25 bp, Homo sapien
gactcagggtaatgcaaccctaagg

SEQ ID NO: 5449667 - DNA, 25 bp, Homo sapien
gctgactcagggtaatgcaacccta

SEQ ID NO: 5449668 - DNA, 25 bp, Homo sapien
ctgctgactcagggtaatgcaaccc

SEQ ID NO: 5449669 - DNA, 25 bp, Homo sapien
tgactcagggtaatgcaaccctaag

SEQ ID NO: 5449670 - DNA, 25 bp, Homo sapien
agcaggaagtatgcctgtgagctca

SEQ ID NO: 5449671 - DNA, 25 bp, Homo sapien
tcttacctacagcagagatattgag

SEQ ID NO: 5449672 - DNA, 25 bp, Homo sapien
caaatgcccctggtcattagtgatg

SEQ ID NO: 5449673 - DNA, 25 bp, Homo sapien
ttcataaacttgaatgaggacatca

SEQ ID NO: 5449674 - DNA, 25 bp, Homo sapien
gacaataacatggatctgcaacttg

SEQ ID NO: 5449675 - DNA, 25 bp, Homo sapien
aggacaataacatggatctgcaact

SEQ ID NO: 5449676 - DNA, 25 bp, Homo sapien
ggacaataacatggatctgcaactt

SEQ ID NO: 5449677 - DNA, 25 bp, Homo sapien
caataacatggatctgcaacttgtc

SEQ ID NO: 5449678 - DNA, 25 bp, Homo sapien
aaagatttcatcctcaagagtaagg

SEQ ID NO: 5449679 - DNA, 25 bp, Homo sapien
tcaagagtaaggacagacacatcaa

SEQ ID NO: 5449680 - DNA, 25 bp, Homo sapien
tcaaaaatttcatctcttaagtcat

SEQ ID NO: 5449681 - DNA, 25 bp, Homo sapien
ttcatctcttaagtcatagatgagc

SEQ ID NO: 5449682 - DNA, 25 bp, Homo sapien
ttcagctccaaactttttgtctgtg

SEQ ID NO: 5449683 - DNA, 25 bp, Homo sapien
agctccaaactttttgtctgtgcca

SEQ ID NO: 5449684 - DNA, 25 bp, Homo sapien
caatggttccaggatctttggtaac

SEQ ID NO: 5449685 - DNA, 25 bp, Homo sapien
tgccataagcaatagaagcagcagt

SEQ ID NO: 5449686 - DNA, 25 bp, Homo sapien
tcagccctcttcactccatctcctt

SEQ ID NO: 5449687 - DNA, 25 bp, Homo sapien
tctcctcttgttcaatcacaaaagc

SEQ ID NO: 5449688 - DNA, 25 bp, Homo sapien
ttgttcaatcacaaaagcacaggaa

SEQ ID NO: 5449689 - DNA, 25 bp, Homo sapien
cagaatcttatcagccctcttcact

SEQ ID NO: 5449690 - DNA, 25 bp, Homo sapien
tacaaaagaaggcagttgtctacac

SEQ ID NO: 5449691 - DNA, 25 bp, Homo sapien
ttctcaccttacagtcacgctgtga

SEQ ID NO: 5449692 - DNA, 25 bp, Homo sapien
tgtgaccgtcctacaactctactgc

SEQ ID NO: 5449693 - DNA, 25 bp, Homo sapien
tgccctagatgacccatacaatcct

SEQ ID NO: 5449694 - DNA, 25 bp, Homo sapien
ttccagggccgccactacgaatgca

SEQ ID NO: 5449695 - DNA, 25 bp, Homo sapien
gccgccactacgaatgcagcagtga

SEQ ID NO: 5449696 - DNA, 25 bp, Homo sapien
cctctacgaggaccggggcttccag

SEQ ID NO: 5449697 - DNA, 25 bp, Homo sapien
ccactacgaatgcagcagtgaccac

SEQ ID NO: 5449698 - DNA, 25 bp, Homo sapien
tactcgggcctccagtagttcctgc

SEQ ID NO: 5449699 - DNA, 25 bp, Homo sapien
atgggcctcagcgactcggtccgct

SEQ ID NO: 5449700 - DNA, 25 bp, Homo sapien
tgcgactatgccgaccaccagcagt

SEQ ID NO: 5449701 - DNA, 25 bp, Homo sapien
gctctatgagcagcccaactactcg

SEQ ID NO: 5449702 - DNA, 25 bp, Homo sapien
tgagctgcccaactactggggggac

SEQ ID NO: 5449703 - DNA, 25 bp, Homo sapien
ccttcaatgtactggagggctcctg

SEQ ID NO: 5449704 - DNA, 25 bp, Homo sapien
ttcacgaccgcttccacctcagtga

SEQ ID NO: 5449705 - DNA, 25 bp, Homo sapien
gctcaggatctatgagcgagaggat

SEQ ID NO: 5449706 - DNA, 25 bp, Homo sapien
ctggtgattcatggtagaacacttt

SEQ ID NO: 5449707 - DNA, 25 bp, Homo sapien
ttcatggtagaacactttactatgc

SEQ ID NO: 5449708 - DNA, 25 bp, Homo sapien
catggtagaacactttactatgcat

SEQ ID NO: 5449709 - DNA, 25 bp, Homo sapien
tgattcatggtagaacactttacta

SEQ ID NO: 5449710 - DNA, 25 bp, Homo sapien
ggatgaagtcggtcctatcccagca

SEQ ID NO: 5449711 - DNA, 25 bp, Homo sapien
tctgggcagccatccgaaaataaaa

SEQ ID NO: 5449712 - DNA, 25 bp, Homo sapien
ttttagcagaaagttccaacccagc

SEQ ID NO: 5449713 - DNA, 25 bp, Homo sapien
gatgctgtagcacccatcggtggtg

SEQ ID NO: 5449714 - DNA, 25 bp, Homo sapien
tagccatctgttccaagagcatgtg

SEQ ID NO: 5449715 - DNA, 25 bp, Homo sapien
ttttatagccatctgttccaagagc

SEQ ID NO: 5449716 - DNA, 25 bp, Homo sapien
gttccaagagcatgtggtcgctgca

SEQ ID NO: 5449717 - DNA, 25 bp, Homo sapien
tctgttccaagagcatgtggtcgct

SEQ ID NO: 5449718 - DNA, 25 bp, Homo sapien
agataggaggcaatgcagttatttc

SEQ ID NO: 5449719 - DNA, 25 bp, Homo sapien
ccttcatggttttctgctacatctg

SEQ ID NO: 5449720 - DNA, 25 bp, Homo sapien
cataatagataggaggcaatgcagt

SEQ ID NO: 5449721 - DNA, 25 bp, Homo sapien
tctctgtcctgggtaaagacataat

SEQ ID NO: 5449722 - DNA, 25 bp, Homo sapien
ttttctgaatgtctttcgctgagga

SEQ ID NO: 5449723 - DNA, 25 bp, Homo sapien
atgtctttcgctgaggacttttgca

SEQ ID NO: 5449724 - DNA, 25 bp, Homo sapien
tctgaatgtctttcgctgaggactt

SEQ ID NO: 5449725 - DNA, 25 bp, Homo sapien
gaaatcaacttgtttcaaagactgc

SEQ ID NO: 5449726 - DNA, 25 bp, Homo sapien
ggtattgaggtatagctcggagtat

SEQ ID NO: 5449727 - DNA, 25 bp, Homo sapien
ttgaggtatagctcggagtatgtgt

SEQ ID NO: 5449728 - DNA, 25 bp, Homo sapien
tgaggtatagctcggagtatgtgtt

SEQ ID NO: 5449729 - DNA, 25 bp, Homo sapien
tattgaggtatagctcggagtatgt

SEQ ID NO: 5449730 - DNA, 25 bp, Homo sapien
cagacccctctggtaggaaatgcca

SEQ ID NO: 5449731 - DNA, 25 bp, Homo sapien
ccagacccctctggtaggaaatgcc

SEQ ID NO: 5449732 - DNA, 25 bp, Homo sapien
caagaagtttgtaggacattccaac

SEQ ID NO: 5449733 - DNA, 25 bp, Homo sapien
caggaagggccaacaagaagtttgt

SEQ ID NO: 5449734 - DNA, 25 bp, Homo sapien
ctaaagctgtatagcatctatttga

SEQ ID NO: 5449735 - DNA, 25 bp, Homo sapien
taaagctgtatagcatctatttgac

SEQ ID NO: 5449736 - DNA, 25 bp, Homo sapien
cctgcacactcgctgtggattgtcg

SEQ ID NO: 5449737 - DNA, 25 bp, Homo sapien
tcattcggtttagacttggaaataa

SEQ ID NO: 5449738 - DNA, 25 bp, Homo sapien
gattgtcgatgccagtgaaagccag

SEQ ID NO: 5449739 - DNA, 25 bp, Homo sapien
taattgcatttcattcggtttagac

SEQ ID NO: 5449740 - DNA, 25 bp, Homo sapien
gttctttttaagcacatcacagtca

SEQ ID NO: 5449741 - DNA, 25 bp, Homo sapien
tctagccctctcacgccattccgtt

SEQ ID NO: 5449742 - DNA, 25 bp, Homo sapien
atcacagtcatctagccctctcacg

SEQ ID NO: 5449743 - DNA, 25 bp, Homo sapien
caaccccagcagttgggtcgttctt

SEQ ID NO: 5449744 - DNA, 25 bp, Homo sapien
gttgtcctcacagtttttatatgaa

SEQ ID NO: 5449745 - DNA, 25 bp, Homo sapien
ttgtcctcacagtttttatatgaat

SEQ ID NO: 5449746 - DNA, 25 bp, Homo sapien
cagagggaacctaggagttactgag

SEQ ID NO: 5449747 - DNA, 25 bp, Homo sapien
ttcagagggaacctaggagttactg

SEQ ID NO: 5449748 - DNA, 25 bp, Homo sapien
caataaaattccatcccgaagcttt

SEQ ID NO: 5449749 - DNA, 25 bp, Homo sapien
agattatcccctgcccgtcagaagg

SEQ ID NO: 5449750 - DNA, 25 bp, Homo sapien
catgactttctgacacctcttgaga

SEQ ID NO: 5449751 - DNA, 25 bp, Homo sapien
gaccgctatacccacaatagcaaag

SEQ ID NO: 5449752 - DNA, 25 bp, Homo sapien
aatagagtattcagagtacaaagca

SEQ ID NO: 5449753 - DNA, 25 bp, Homo sapien
taatagagtattcagagtacaaagc

SEQ ID NO: 5449754 - DNA, 25 bp, Homo sapien
ctaatagagtattcagagtacaaag

SEQ ID NO: 5449755 - DNA, 25 bp, Homo sapien
gatcacccttatagttggcttctaa

SEQ ID NO: 5449756 - DNA, 25 bp, Homo sapien
tgatgctgatgatcacccttatagt

SEQ ID NO: 5449757 - DNA, 25 bp, Homo sapien
ccttttctagcacaattatgttcag

SEQ ID NO: 5449758 - DNA, 25 bp, Homo sapien
gtgccttttctagcacaattatgtt

SEQ ID NO: 5449759 - DNA, 25 bp, Homo sapien
tctgcatctgtcactagtttagtga

SEQ ID NO: 5449760 - DNA, 25 bp, Homo sapien
tattgctgctgacaagtgcagttga

SEQ ID NO: 5449761 - DNA, 25 bp, Homo sapien
ggctggtgacttggctattgctgct

SEQ ID NO: 5449762 - DNA, 25 bp, Homo sapien
tagtttagtgattgtcagggcggta

SEQ ID NO: 5449763 - DNA, 25 bp, Homo sapien
tctgcggaggttgctcccgagagac

SEQ ID NO: 5449764 - DNA, 25 bp, Homo sapien
gctgttgcccccgattttccaagga

SEQ ID NO: 5449765 - DNA, 25 bp, Homo sapien
ttccaaggacgccagtgaggaaggc

SEQ ID NO: 5449766 - DNA, 25 bp, Homo sapien
ggttgctcccgagagactaaagctg

SEQ ID NO: 5449767 - DNA, 25 bp, Homo sapien
acgggctcgcggagtctggcgggac

SEQ ID NO: 5449768 - DNA, 25 bp, Homo sapien
gccgcccacgggctcgcggagtctg

SEQ ID NO: 5449769 - DNA, 25 bp, Homo sapien
gccgcggccgcccacgggctcgcgg

SEQ ID NO: 5449770 - DNA, 25 bp, Homo sapien
aaggcgaagcggtcgtgctccccct

SEQ ID NO: 5449771 - DNA, 25 bp, Homo sapien
ggtgcatccagtttctgcgcccagg

SEQ ID NO: 5449772 - DNA, 25 bp, Homo sapien
tttctgcgcccaggtaagagaccgt

SEQ ID NO: 5449773 - DNA, 25 bp, Homo sapien
agtttctgcgcccaggtaagagacc

SEQ ID NO: 5449774 - DNA, 25 bp, Homo sapien
cgcgggtgcatccagtttctgcgcc

SEQ ID NO: 5449775 - DNA, 25 bp, Homo sapien
tggtcgagtggccagccgtgcacct

SEQ ID NO: 5449776 - DNA, 25 bp, Homo sapien
ccttttgcctcggtctctgagtaga

SEQ ID NO: 5449777 - DNA, 25 bp, Homo sapien
tatgtagggcgcctctccttttgcc

SEQ ID NO: 5449778 - DNA, 25 bp, Homo sapien
gggttgtgtctcgtcctctgggact

SEQ ID NO: 5449779 - DNA, 25 bp, Homo sapien
cgtgtatcgaaagccagtattacct

SEQ ID NO: 5449780 - DNA, 25 bp, Homo sapien
gccaggttagaatacgtgtatcgaa

SEQ ID NO: 5449781 - DNA, 25 bp, Homo sapien
tacgtgtatcgaaagccagtattac

SEQ ID NO: 5449782 - DNA, 25 bp, Homo sapien
tagaatacgtgtatcgaaagccagt

SEQ ID NO: 5449783 - DNA, 25 bp, Homo sapien
tttgttcatccagctgcagagaact

SEQ ID NO: 5449784 - DNA, 25 bp, Homo sapien
agccttgtccatttcaaatcatgtt

SEQ ID NO: 5449785 - DNA, 25 bp, Homo sapien
ttgttcatccagctgcagagaactg

SEQ ID NO: 5449786 - DNA, 25 bp, Homo sapien
gagtgagtgagggaagccttgtcca

SEQ ID NO: 5449787 - DNA, 25 bp, Homo sapien
tgctgtggttcctgtgttcagcaga

SEQ ID NO: 5449788 - DNA, 25 bp, Homo sapien
taaataagaattgggtgttgctgtg

SEQ ID NO: 5449789 - DNA, 25 bp, Homo sapien
ttaaataagaattgggtgttgctgt

SEQ ID NO: 5449790 - DNA, 25 bp, Homo sapien
gaactgctgcccttttgctagccat

SEQ ID NO: 5449791 - DNA, 25 bp, Homo sapien
tgaactgctgcccttttgctagcca

SEQ ID NO: 5449792 - DNA, 25 bp, Homo sapien
gcgatagcagttgtgcaccatgtct

SEQ ID NO: 5449793 - DNA, 25 bp, Homo sapien
ggcacattgaaatcgggccgataga

SEQ ID NO: 5449794 - DNA, 25 bp, Homo sapien
tatctctggtcccaaaggcacattg

SEQ ID NO: 5449795 - DNA, 25 bp, Homo sapien
tcgggccgatagaaacgcgatagca

SEQ ID NO: 5449796 - DNA, 25 bp, Homo sapien
tttatacttccatttgacaacatgc

SEQ ID NO: 5449797 - DNA, 25 bp, Homo sapien
tccatttgacaacatgcttttctgc

SEQ ID NO: 5449798 - DNA, 25 bp, Homo sapien
tacttccatttgacaacatgctttt

SEQ ID NO: 5449799 - DNA, 25 bp, Homo sapien
ttctttatacttccatttgacaaca

SEQ ID NO: 5449800 - DNA, 25 bp, Homo sapien
ggcggatgttcttaatgtctaacca

SEQ ID NO: 5449801 - DNA, 25 bp, Homo sapien
ggtcaacttccagtaccttctcagg

SEQ ID NO: 5449802 - DNA, 25 bp, Homo sapien
tgtctaaccagtaagcttcagtgct

SEQ ID NO: 5449803 - DNA, 25 bp, Homo sapien
actgcacgcagtccaatttatagaa

SEQ ID NO: 5449804 - DNA, 25 bp, Homo sapien
ggaggctcctgtcgtaattcagcag

SEQ ID NO: 5449805 - DNA, 25 bp, Homo sapien
ctggacccaaatgctaggcccttct

SEQ ID NO: 5449806 - DNA, 25 bp, Homo sapien
tggacccaaatgctaggcccttctc

SEQ ID NO: 5449807 - DNA, 25 bp, Homo sapien
gcagctttcttcacaacaatgaggt

SEQ ID NO: 5449808 - DNA, 25 bp, Homo sapien
ctttctcaggtgcttagtgtgacac

SEQ ID NO: 5449809 - DNA, 25 bp, Homo sapien
tgttgtctggtcttcccctcgcagc

SEQ ID NO: 5449810 - DNA, 25 bp, Homo sapien
catacttgattaaggaaccatctct

SEQ ID NO: 5449811 - DNA, 25 bp, Homo sapien
atgccaccctcaaagaggacaggag

SEQ ID NO: 5449812 - DNA, 25 bp, Homo sapien
ttagggacatcgatgtgatgccacc

SEQ ID NO: 5449813 - DNA, 25 bp, Homo sapien
gacatcgatgtgatgccaccctcaa

SEQ ID NO: 5449814 - DNA, 25 bp, Homo sapien
ccaccctcaaagaggacaggagagg

SEQ ID NO: 5449815 - DNA, 25 bp, Homo sapien
tgcacattgtggtagacaggtcttt

SEQ ID NO: 5449816 - DNA, 25 bp, Homo sapien
ttgatgccgataacaggtgcttccc

SEQ ID NO: 5449817 - DNA, 25 bp, Homo sapien
gatccctgcaaagctttaagaacac

SEQ ID NO: 5449818 - DNA, 25 bp, Homo sapien
ggtgcttccctacttatcctggaca

SEQ ID NO: 5449819 - DNA, 25 bp, Homo sapien
aagatgaaggctagcgcctggtaca

SEQ ID NO: 5449820 - DNA, 25 bp, Homo sapien
tgtgtatgactctgggtataaatag

SEQ ID NO: 5449821 - DNA, 25 bp, Homo sapien
tagcgcctggtacactttggattaa

SEQ ID NO: 5449822 - DNA, 25 bp, Homo sapien
ttggaaaagatgaaggctagcgcct

SEQ ID NO: 5449823 - DNA, 25 bp, Homo sapien
gagggctgcatcctattgtcagtga

SEQ ID NO: 5449824 - DNA, 25 bp, Homo sapien
tattgtcagtgaatgatggcggagc

SEQ ID NO: 5449825 - DNA, 25 bp, Homo sapien
gagtggcttgtcatcattctcgaaa

SEQ ID NO: 5449826 - DNA, 25 bp, Homo sapien
ctaaatcgtaagtgagggctgcatc

SEQ ID NO: 5449827 - DNA, 25 bp, Homo sapien
ttattttcctgttcgccactgcggg

SEQ ID NO: 5449828 - DNA, 25 bp, Homo sapien
cacagacacgagctggtggcttgca

SEQ ID NO: 5449829 - DNA, 25 bp, Homo sapien
ggcttgcagactgcgtctgtctgga

SEQ ID NO: 5449830 - DNA, 25 bp, Homo sapien
cactgcggggacttctaatttgcag

SEQ ID NO: 5449831 - DNA, 25 bp, Homo sapien
taaaagccccgggtgactctgctta

SEQ ID NO: 5449832 - DNA, 25 bp, Homo sapien
atccctctgagggatttgtcagaac

SEQ ID NO: 5449833 - DNA, 25 bp, Homo sapien
catctctttgtggtggactgttttg

SEQ ID NO: 5449834 - DNA, 25 bp, Homo sapien
ctgttttggttggtgacagcaacct

SEQ ID NO: 5449835 - DNA, 25 bp, Homo sapien
ggtggaggttaggtgtcctgaggca

SEQ ID NO: 5449836 - DNA, 25 bp, Homo sapien
aatgggtccaccaaggccatgctca

SEQ ID NO: 5449837 - DNA, 25 bp, Homo sapien
tcaggagctgctgagttagggtcaa

SEQ ID NO: 5449838 - DNA, 25 bp, Homo sapien
atgctcagtgcagcgacccacctct

SEQ ID NO: 5449839 - DNA, 25 bp, Homo sapien
ctcattagcacaccagggatactga

SEQ ID NO: 5449840 - DNA, 25 bp, Homo sapien
tctcattagcacaccagggatactg

SEQ ID NO: 5449841 - DNA, 25 bp, Homo sapien
ctctcattagcacaccagggatact

SEQ ID NO: 5449842 - DNA, 25 bp, Homo sapien
ctttccagttctcctacggaataag

SEQ ID NO: 5449843 - DNA, 25 bp, Homo sapien
gttctcctacggaataagcaatcat

SEQ ID NO: 5449844 - DNA, 25 bp, Homo sapien
gcctccttattagaattctccaatt

SEQ ID NO: 5449845 - DNA, 25 bp, Homo sapien
tccagttctcctacggaataagcaa

SEQ ID NO: 5449846 - DNA, 25 bp, Homo sapien
gaaagtctcaccatggagtccttga

SEQ ID NO: 5449847 - DNA, 25 bp, Homo sapien
gagattgccgtcaaattgtcagtgg

SEQ ID NO: 5449848 - DNA, 25 bp, Homo sapien
ttgaggctacacaggacatgacccc

SEQ ID NO: 5449849 - DNA, 25 bp, Homo sapien
catttatgggtgttgagtctggcca

SEQ ID NO: 5449850 - DNA, 25 bp, Homo sapien
ctgaggtggaaaggagaccatctcc

SEQ ID NO: 5449851 - DNA, 25 bp, Homo sapien
tcagggtcccacagcgtgcgttttg

SEQ ID NO: 5449852 - DNA, 25 bp, Homo sapien
gatgagaccaccattgacgactcca

SEQ ID NO: 5449853 - DNA, 25 bp, Homo sapien
gaggaatttgtggagacctgcccaa

SEQ ID NO: 5449854 - DNA, 25 bp, Homo sapien
ggagaaggttatgttatagaaccta

SEQ ID NO: 5449855 - DNA, 25 bp, Homo sapien
agtgtttgacacataaacagtaggc

SEQ ID NO: 5449856 - DNA, 25 bp, Homo sapien
gcaggctccacagaccgtttgccat

SEQ ID NO: 5449857 - DNA, 25 bp, Homo sapien
taaggcggcaggtcaataaaaggtg

SEQ ID NO: 5449858 - DNA, 25 bp, Homo sapien
ctaatcaagcccgatcctgcttaaa

SEQ ID NO: 5449859 - DNA, 25 bp, Homo sapien
caagcccgatcctgcttaaattcca

SEQ ID NO: 5449860 - DNA, 25 bp, Homo sapien
tgcttaaattccaagattagatggg

SEQ ID NO: 5449861 - DNA, 25 bp, Homo sapien
taaattccaagattagatgggaatg

SEQ ID NO: 5449862 - DNA, 25 bp, Homo sapien
caattcatttatccctttgagaaca

SEQ ID NO: 5449863 - DNA, 25 bp, Homo sapien
caattattctgctagtcaggagaaa

SEQ ID NO: 5449864 - DNA, 25 bp, Homo sapien
aaactctgcctccatagatatgtaa

SEQ ID NO: 5449865 - DNA, 25 bp, Homo sapien
taacaattgagctgttagctgacaa

SEQ ID NO: 5449866 - DNA, 25 bp, Homo sapien
agtagatgttagcagggttctctcc

SEQ ID NO: 5449867 - DNA, 25 bp, Homo sapien
tattcacagtatctgtgtctcctgc

SEQ ID NO: 5449868 - DNA, 25 bp, Homo sapien
cctgcaccctttggtgttgcaattt

SEQ ID NO: 5449869 - DNA, 25 bp, Homo sapien
tctttattcacagtatctgtgtctc

SEQ ID NO: 5449870 - DNA, 25 bp, Homo sapien
gaaatcttcgtggtctcaattctag

SEQ ID NO: 5449871 - DNA, 25 bp, Homo sapien
gggacacacatacgctgatctagga

SEQ ID NO: 5449872 - DNA, 25 bp, Homo sapien
tcatgatgagtttcaaaggccacgt

SEQ ID NO: 5449873 - DNA, 25 bp, Homo sapien
cataatgatgcaggaaagacccgag

SEQ ID NO: 5449874 - DNA, 25 bp, Homo sapien
gcgtgatgggctgacatcccaccta

SEQ ID NO: 5449875 - DNA, 25 bp, Homo sapien
caccagctaggtacggctggagaag

SEQ ID NO: 5449876 - DNA, 25 bp, Homo sapien
tacaagtatgacacctgtgtaacac

SEQ ID NO: 5449877 - DNA, 25 bp, Homo sapien
gtgtaacaccagctaggtacggctg

SEQ ID NO: 5449878 - DNA, 25 bp, Homo sapien
gataattctagagcctgttaccata

SEQ ID NO: 5449879 - DNA, 25 bp, Homo sapien
gggattccgaggttccaacacactg

SEQ ID NO: 5449880 - DNA, 25 bp, Homo sapien
aggtgaaggccaagactctctgcag

SEQ ID NO: 5449881 - DNA, 25 bp, Homo sapien
tatactctgtatgctgggattccga

SEQ ID NO: 5449882 - DNA, 25 bp, Homo sapien
gattaatgctaagcggactgttgcc

SEQ ID NO: 5449883 - DNA, 25 bp, Homo sapien
taatgctaagcggactgttgccaac

SEQ ID NO: 5449884 - DNA, 25 bp, Homo sapien
gagattaatgctaagcggactgttg

SEQ ID NO: 5449885 - DNA, 25 bp, Homo sapien
tgctaagcggactgttgccaacttc

SEQ ID NO: 5449886 - DNA, 25 bp, Homo sapien
tcaattccttcacagtttatgtagg

SEQ ID NO: 5449887 - DNA, 25 bp, Homo sapien
aattccttcacagtttatgtaggac

SEQ ID NO: 5449888 - DNA, 25 bp, Homo sapien
tgtcaattccttcacagtttatgta

SEQ ID NO: 5449889 - DNA, 25 bp, Homo sapien
ttccttcacagtttatgtaggacat

SEQ ID NO: 5449890 - DNA, 25 bp, Homo sapien
tgcggctcaagctgccccggattcg

SEQ ID NO: 5449891 - DNA, 25 bp, Homo sapien
tacccagacggcgacagtttggatg

SEQ ID NO: 5449892 - DNA, 25 bp, Homo sapien
ttagcgactgctctgcggttcccca

SEQ ID NO: 5449893 - DNA, 25 bp, Homo sapien
cggattcgcttctccggccgtgcag

SEQ ID NO: 5449894 - DNA, 25 bp, Homo sapien
atttcagtgaagtttgacgacaagc

SEQ ID NO: 5449895 - DNA, 25 bp, Homo sapien
gtttgacgacaagcagattggcagt

SEQ ID NO: 5449896 - DNA, 25 bp, Homo sapien
tctgcaccagcttaaaaacacgcat

SEQ ID NO: 5449897 - DNA, 25 bp, Homo sapien
ggcagttgtcgcataaatgtataca

SEQ ID NO: 5449898 - DNA, 25 bp, Homo sapien
gaatactctgagattatgaaatgca

SEQ ID NO: 5449899 - DNA, 25 bp, Homo sapien
ctgagattatgaaatgcataactca

SEQ ID NO: 5449900 - DNA, 25 bp, Homo sapien
tgagattatgaaatgcataactcat

SEQ ID NO: 5449901 - DNA, 25 bp, Homo sapien
ccggaatactctgagattatgaaat

SEQ ID NO: 5449902 - DNA, 25 bp, Homo sapien
taattttagacagagctgaacataa

SEQ ID NO: 5449903 - DNA, 25 bp, Homo sapien
agcctttggaaattgcactcacata

SEQ ID NO: 5449904 - DNA, 25 bp, Homo sapien
tacaacttctttaccatagaaggaa

SEQ ID NO: 5449905 - DNA, 25 bp, Homo sapien
tcaagaggaccaagtttctgctaat

SEQ ID NO: 5449906 - DNA, 25 bp, Homo sapien
cagatacaggtgtgactgccttacc

SEQ ID NO: 5449907 - DNA, 25 bp, Homo sapien
cattaagttgctggttgaggcacca

SEQ ID NO: 5449908 - DNA, 25 bp, Homo sapien
tgtccggcttgtagcattgcagata

SEQ ID NO: 5449909 - DNA, 25 bp, Homo sapien
aaaggctgggcaaaatctgtgaaac

SEQ ID NO: 5449910 - DNA, 25 bp, Homo sapien
gcagcctctctaggtacagtgtcaa

SEQ ID NO: 5449911 - DNA, 25 bp, Homo sapien
tacctgtctattggtgtctgtgctg

SEQ ID NO: 5449912 - DNA, 25 bp, Homo sapien
gaacctaatgtcctcgatgactccc

SEQ ID NO: 5449913 - DNA, 25 bp, Homo sapien
tacccctcctgcagtgaacctaatg

SEQ ID NO: 5449914 - DNA, 25 bp, Homo sapien
gaagagatctgaaccaagtctagca

SEQ ID NO: 5449915 - DNA, 25 bp, Homo sapien
tgacattcgtgtttgccagcccttg

SEQ ID NO: 5449916 - DNA, 25 bp, Homo sapien
taattccattagcaggagctttggg

SEQ ID NO: 5449917 - DNA, 25 bp, Homo sapien
ccaattcagtgtgtcctggttccag

SEQ ID NO: 5449918 - DNA, 25 bp, Homo sapien
tgtcttcatggaaaggtcgcatctg

SEQ ID NO: 5449919 - DNA, 25 bp, Homo sapien
tgaatttcgttattgtgaaccccaa

SEQ ID NO: 5449920 - DNA, 25 bp, Homo sapien
gagacaagtggactgcctcaatttc

SEQ ID NO: 5449921 - DNA, 25 bp, Homo sapien
taacctcctcttaatggccaaggga

SEQ ID NO: 5449922 - DNA, 25 bp, Homo sapien
tgcaaacatgtgttgaatgtgcccc

SEQ ID NO: 5449923 - DNA, 25 bp, Homo sapien
agatgttcccatccatgtgatagag

SEQ ID NO: 5449924 - DNA, 25 bp, Homo sapien
gaatgaaaaaggaccatgggcccat

SEQ ID NO: 5449925 - DNA, 25 bp, Homo sapien
tctccttactactgcagctgggtat

SEQ ID NO: 5449926 - DNA, 25 bp, Homo sapien
gctgttctgaacatgattatgctgg

SEQ ID NO: 5449927 - DNA, 25 bp, Homo sapien
gtctgggctattggcgcgtctctat

SEQ ID NO: 5449928 - DNA, 25 bp, Homo sapien
gtttggtaattacaagtgtctgggc

SEQ ID NO: 5449929 - DNA, 25 bp, Homo sapien
ggttatggtcctattcactaagaga

SEQ ID NO: 5449930 - DNA, 25 bp, Homo sapien
gagtggctgcttccggtagaatccg

SEQ ID NO: 5449931 - DNA, 25 bp, Homo sapien
tggctgcttccggtagaatccggaa

SEQ ID NO: 5449932 - DNA, 25 bp, Homo sapien
cagagtggctgcttccggtagaatc

SEQ ID NO: 5449933 - DNA, 25 bp, Homo sapien
ccgcagagtggctgcttccggtaga

SEQ ID NO: 5449934 - DNA, 25 bp, Homo sapien
ccgagtgctccggatgctagactct

SEQ ID NO: 5449935 - DNA, 25 bp, Homo sapien
gggccgagtgctccggatgctagac

SEQ ID NO: 5449936 - DNA, 25 bp, Homo sapien
agtgctccggatgctagactctggg

SEQ ID NO: 5449937 - DNA, 25 bp, Homo sapien
agactctggggccgattatctgcac

SEQ ID NO: 5449938 - DNA, 25 bp, Homo sapien
tggatgtaccgcgtccctgtaccac

SEQ ID NO: 5449939 - DNA, 25 bp, Homo sapien
tattgactgcttgttggatgtaccg

SEQ ID NO: 5449940 - DNA, 25 bp, Homo sapien
gggcggatcagtgcacctttattga

SEQ ID NO: 5449941 - DNA, 25 bp, Homo sapien
cgagcgcctcactctgaacgcgatg

SEQ ID NO: 5449942 - DNA, 25 bp, Homo sapien
tgtttggcaaatttgggacaccctg

SEQ ID NO: 5449943 - DNA, 25 bp, Homo sapien
tgttcaaaattcagattcccggtcc

SEQ ID NO: 5449944 - DNA, 25 bp, Homo sapien
ggacaccctgacttcgtgcttagga

SEQ ID NO: 5449945 - DNA, 25 bp, Homo sapien
caatatacttcgtgaacctagtgca

SEQ ID NO: 5449946 - DNA, 25 bp, Homo sapien
tctcttgaatctcttctccgctaga

SEQ ID NO: 5449947 - DNA, 25 bp, Homo sapien
ctctcttgaatctcttctccgctag

SEQ ID NO: 5449948 - DNA, 25 bp, Homo sapien
ctcttgaatctcttctccgctagac

SEQ ID NO: 5449949 - DNA, 25 bp, Homo sapien
gggctcccattgtcacaccatacta

SEQ ID NO: 5449950 - DNA, 25 bp, Homo sapien
tattgtctatatcccttcctgtcag

SEQ ID NO: 5449951 - DNA, 25 bp, Homo sapien
gactccgtctattacccaggcaaga

SEQ ID NO: 5449952 - DNA, 25 bp, Homo sapien
ccttttagcaatcctgtgttgctgc

SEQ ID NO: 5449953 - DNA, 25 bp, Homo sapien
gctggccagatgatgagtgagctca

SEQ ID NO: 5449954 - DNA, 25 bp, Homo sapien
cttggcgatgaccttaaacagcagg

SEQ ID NO: 5449955 - DNA, 25 bp, Homo sapien
cacaaaacagattgggtttccatcc

SEQ ID NO: 5449956 - DNA, 25 bp, Homo sapien
acagcaggatatgaagaactcccac

SEQ ID NO: 5449957 - DNA, 25 bp, Homo sapien
tacggctgcattagggttacaaaca

SEQ ID NO: 5449958 - DNA, 25 bp, Homo sapien
ttatcagggtgttttgtcaaagcag

SEQ ID NO: 5449959 - DNA, 25 bp, Homo sapien
ggagggcatattagctacactacaa

SEQ ID NO: 5449960 - DNA, 25 bp, Homo sapien
agcaggttattcagtgattcctccc

SEQ ID NO: 5449961 - DNA, 25 bp, Homo sapien
ggaactatggatcttgaccccaagg

SEQ ID NO: 5449962 - DNA, 25 bp, Homo sapien
taattttacgctgtagcagaaccag

SEQ ID NO: 5449963 - DNA, 25 bp, Homo sapien
tattccaagaaagatcaggtaggcg

SEQ ID NO: 5449964 - DNA, 25 bp, Homo sapien
gggaaagctttgtgccatgaatacg

SEQ ID NO: 5449965 - DNA, 25 bp, Homo sapien
gattataatatcagacgtgacaaag

SEQ ID NO: 5449966 - DNA, 25 bp, Homo sapien
tatttgaatagagtaagctatggca

SEQ ID NO: 5449967 - DNA, 25 bp, Homo sapien
gatagggctttactgtttgtggctc

SEQ ID NO: 5449968 - DNA, 25 bp, Homo sapien
ggcaaagaatgaccaaattagctag

SEQ ID NO: 5449969 - DNA, 25 bp, Homo sapien
aaatagctgtcacttggcacacagg

SEQ ID NO: 5449970 - DNA, 25 bp, Homo sapien
gaaagtagcctgtgtttagtcccaa

SEQ ID NO: 5449971 - DNA, 25 bp, Homo sapien
tccagaacagggctttatttcctcc

SEQ ID NO: 5449972 - DNA, 25 bp, Homo sapien
tctatattcaggacgttcagatgtc

SEQ ID NO: 5449973 - DNA, 25 bp, Homo sapien
aaagctgtgcttgacctttcaacct

SEQ ID NO: 5449974 - DNA, 25 bp, Homo sapien
tacactggtaccgaagatttcacca

SEQ ID NO: 5449975 - DNA, 25 bp, Homo sapien
gatttcaccatggaaagctgtgctt

SEQ ID NO: 5449976 - DNA, 25 bp, Homo sapien
gctgccatgtcttcacccttcagtg

SEQ ID NO: 5449977 - DNA, 25 bp, Homo sapien
gtaagccatatgcacacagatcctg

SEQ ID NO: 5449978 - DNA, 25 bp, Homo sapien
aggtaagccatatgcacacagatcc

SEQ ID NO: 5449979 - DNA, 25 bp, Homo sapien
ggtaagccatatgcacacagatcct

SEQ ID NO: 5449980 - DNA, 25 bp, Homo sapien
gaaggtaagccatatgcacacagat

SEQ ID NO: 5449981 - DNA, 25 bp, Homo sapien
ccacttgctttgctcccatagtgac

SEQ ID NO: 5449982 - DNA, 25 bp, Homo sapien
tgtttcttctgtgccacttgctttg

SEQ ID NO: 5449983 - DNA, 25 bp, Homo sapien
cttgctttgctcccatagtgaccac

SEQ ID NO: 5449984 - DNA, 25 bp, Homo sapien
tgtgccacttgctttgctcccatag

SEQ ID NO: 5449985 - DNA, 25 bp, Homo sapien
tattttttgtgccttagggagaaga

SEQ ID NO: 5449986 - DNA, 25 bp, Homo sapien
tttgtgccttagggagaagacttca

SEQ ID NO: 5449987 - DNA, 25 bp, Homo sapien
ttttgtgccttagggagaagacttc

SEQ ID NO: 5449988 - DNA, 25 bp, Homo sapien
atattttttgtgccttagggagaag

SEQ ID NO: 5449989 - DNA, 25 bp, Homo sapien
aagagtttctcatgtagaaaacagt

SEQ ID NO: 5449990 - DNA, 25 bp, Homo sapien
gcccgagactctacaggtattacgt

SEQ ID NO: 5449991 - DNA, 25 bp, Homo sapien
tgtctgattacttttacgcccgaga

SEQ ID NO: 5449992 - DNA, 25 bp, Homo sapien
ctaaaccgaagagcaaattggtcct

SEQ ID NO: 5449993 - DNA, 25 bp, Homo sapien
catagcctgatctgaaatgatgtga

SEQ ID NO: 5449994 - DNA, 25 bp, Homo sapien
aggctgaagaacaaccatcctccag

SEQ ID NO: 5449995 - DNA, 25 bp, Homo sapien
ttctttgcctaaattatattcatcc

SEQ ID NO: 5449996 - DNA, 25 bp, Homo sapien
gaatagtctgttctgtatagctgca

SEQ ID NO: 5449997 - DNA, 25 bp, Homo sapien
tagtgtttccttggcacttccatgg

SEQ ID NO: 5449998 - DNA, 25 bp, Homo sapien
gactgaagtcagtggtacgctgata

SEQ ID NO: 5449999 - DNA, 25 bp, Homo sapien
tacgctgataaactggcctggccaa

SEQ ID NO: 5450000 - DNA, 25 bp, Homo sapien
tctgtgtatggcattcagggacctc

SEQ ID NO: 5450001 - DNA, 25 bp, Homo sapien
cctccatggctatgaaggaactggg

SEQ ID NO: 5450002 - DNA, 25 bp, Homo sapien
ggctaagccttacacacttgtcctg

SEQ ID NO: 5450003 - DNA, 25 bp, Homo sapien
tgtgaataccccatgaaaacgtaga

SEQ ID NO: 5450004 - DNA, 25 bp, Homo sapien
tcacttctcaatctccgtcgtgcag

SEQ ID NO: 5450005 - DNA, 25 bp, Homo sapien
tgggaatcacaatgttatctatgtc

SEQ ID NO: 5450006 - DNA, 25 bp, Homo sapien
tagctggggctactaatgacatggg

SEQ ID NO: 5450007 - DNA, 25 bp, Homo sapien
tatctatgtcataagagctctcact

SEQ ID NO: 5450008 - DNA, 25 bp, Homo sapien
gaaacatttttggtcagcccttcag

SEQ ID NO: 5450009 - DNA, 25 bp, Homo sapien
tatttatgtgtgcaagcatacaagc

SEQ ID NO: 5450010 - DNA, 25 bp, Homo sapien
gaaaagaccaacatacatcacccta

SEQ ID NO: 5450011 - DNA, 25 bp, Homo sapien
ttcatttatgcattcctggttcctg

SEQ ID NO: 5450012 - DNA, 25 bp, Homo sapien
aattgctatgggatcctgattctgt

SEQ ID NO: 5450013 - DNA, 25 bp, Homo sapien
tcgtgatgaattctggattcttgat

SEQ ID NO: 5450014 - DNA, 25 bp, Homo sapien
attggaaacagcagtaaaattgcta

SEQ ID NO: 5450015 - DNA, 25 bp, Homo sapien
acagcagtaaaattgctatgggatc

SEQ ID NO: 5450016 - DNA, 25 bp, Homo sapien
gcagtcatgccacaagttatttcca

SEQ ID NO: 5450017 - DNA, 25 bp, Homo sapien
cagtcatgccacaagttatttccat

SEQ ID NO: 5450018 - DNA, 25 bp, Homo sapien
tgcagtcatgccacaagttatttcc

SEQ ID NO: 5450019 - DNA, 25 bp, Homo sapien
tatgtatgcgtttacttactgccct

SEQ ID NO: 5450020 - DNA, 25 bp, Homo sapien
tgaagttagatctaaagtgtcagtc

SEQ ID NO: 5450021 - DNA, 25 bp, Homo sapien
gtctcctaggtttcttatagtctag

SEQ ID NO: 5450022 - DNA, 25 bp, Homo sapien
attgacttttgacaggctggaccag

SEQ ID NO: 5450023 - DNA, 25 bp, Homo sapien
ggcttacatataggtgaatatccat

SEQ ID NO: 5450024 - DNA, 25 bp, Homo sapien
tctccattgattcagagtactatgt

SEQ ID NO: 5450025 - DNA, 25 bp, Homo sapien
gaccttatttgaggcttacatatag

SEQ ID NO: 5450026 - DNA, 25 bp, Homo sapien
ccctgtaacagttgtgcagaagatt

SEQ ID NO: 5450027 - DNA, 25 bp, Homo sapien
taaatctggaaataagttgggacca

SEQ ID NO: 5450028 - DNA, 25 bp, Homo sapien
gttgggaccaagtaagattcaacat

SEQ ID NO: 5450029 - DNA, 25 bp, Homo sapien
agttgggaccaagtaagattcaaca

SEQ ID NO: 5450030 - DNA, 25 bp, Homo sapien
tctggaaataagttgggaccaagta

SEQ ID NO: 5450031 - DNA, 25 bp, Homo sapien
tcatggacccttgaaaccgtaggaa

SEQ ID NO: 5450032 - DNA, 25 bp, Homo sapien
tacagagaaccaattacatggcaag

SEQ ID NO: 5450033 - DNA, 25 bp, Homo sapien
tctattgataaacctcccagccttt

SEQ ID NO: 5450034 - DNA, 25 bp, Homo sapien
tcctagagttcatcctaagatcaca

SEQ ID NO: 5450035 - DNA, 25 bp, Homo sapien
gacaacttggcaattggtttagacc

SEQ ID NO: 5450036 - DNA, 25 bp, Homo sapien
gtgtgggtgacaaagactgagctct

SEQ ID NO: 5450037 - DNA, 25 bp, Homo sapien
gactgtgagagtagtcgaaggcaca

SEQ ID NO: 5450038 - DNA, 25 bp, Homo sapien
cactgcctacagtgattaaagggaa

SEQ ID NO: 5450039 - DNA, 25 bp, Homo sapien
taagtagttacatactccttattta

SEQ ID NO: 5450040 - DNA, 25 bp, Homo sapien
atctggaacgctccacccttctttc

SEQ ID NO: 5450041 - DNA, 25 bp, Homo sapien
ttaagtagtcgaagctgcacttagg

SEQ ID NO: 5450042 - DNA, 25 bp, Homo sapien
aattccaattaagtagtcgaagctg

SEQ ID NO: 5450043 - DNA, 25 bp, Homo sapien
tgtgtgcctaacacgtttaactgcc

SEQ ID NO: 5450044 - DNA, 25 bp, Homo sapien
tatgcattccccttaattgtgtgcc

SEQ ID NO: 5450045 - DNA, 25 bp, Homo sapien
cacttaatagtctgcctggcactaa

SEQ ID NO: 5450046 - DNA, 25 bp, Homo sapien
gaactcaaatcactaacagcaaaag

SEQ ID NO: 5450047 - DNA, 25 bp, Homo sapien
caagggagtttttaagccacactga

SEQ ID NO: 5450048 - DNA, 25 bp, Homo sapien
tcagaatgcagggttaacagtccag

SEQ ID NO: 5450049 - DNA, 25 bp, Homo sapien
gcatagtgtctgactataagctcag

SEQ ID NO: 5450050 - DNA, 25 bp, Homo sapien
gatgaatacagttgcgaaaaaagct

SEQ ID NO: 5450051 - DNA, 25 bp, Homo sapien
tgcaaaaatagtaagtataaagaca

SEQ ID NO: 5450052 - DNA, 25 bp, Homo sapien
tatagagtacaagaactgtaaatgt

SEQ ID NO: 5450053 - DNA, 25 bp, Homo sapien
tagaatgcaaaaatagtaagtataa

SEQ ID NO: 5450054 - DNA, 25 bp, Homo sapien
aaaaggcatatagagtacaagaact

SEQ ID NO: 5450055 - DNA, 25 bp, Homo sapien
ttattttcagcaagattgcctttta

SEQ ID NO: 5450056 - DNA, 25 bp, Homo sapien
tgtgttcatagctactccaagttga

SEQ ID NO: 5450057 - DNA, 25 bp, Homo sapien
ctgatggcaatgatagaacagaatg

SEQ ID NO: 5450058 - DNA, 25 bp, Homo sapien
gttctcttaataggtaagactccga

SEQ ID NO: 5450059 - DNA, 25 bp, Homo sapien
ggaatctaactctgatacatgttct

SEQ ID NO: 5450060 - DNA, 25 bp, Homo sapien
gccagctggcctttacagtataata

SEQ ID NO: 5450061 - DNA, 25 bp, Homo sapien
ttagcaggcttaccataagattctg

SEQ ID NO: 5450062 - DNA, 25 bp, Homo sapien
tccatagagattacaatgtgcatcc

SEQ ID NO: 5450063 - DNA, 25 bp, Homo sapien
gatggctgtaacctcaaatgatgga

SEQ ID NO: 5450064 - DNA, 25 bp, Homo sapien
gtggtggcacaatctatcaagactc

SEQ ID NO: 5450065 - DNA, 25 bp, Homo sapien
ctaacgtcagttattccagaaagga

SEQ ID NO: 5450066 - DNA, 25 bp, Homo sapien
tctttagtacaacaggctgccctgg

SEQ ID NO: 5450067 - DNA, 25 bp, Homo sapien
tctaccaaggtcagctatattctcc

SEQ ID NO: 5450068 - DNA, 25 bp, Homo sapien
aattgaaactagacggccgggcatg

SEQ ID NO: 5450069 - DNA, 25 bp, Homo sapien
taaatgtaaattgaaactagacggc

SEQ ID NO: 5450070 - DNA, 25 bp, Homo sapien
tactgtgttataaagatgttggcaa

SEQ ID NO: 5450071 - DNA, 25 bp, Homo sapien
tggtaactagactataacaccattt

SEQ ID NO: 5450072 - DNA, 25 bp, Homo sapien
tgtcagcaacattcatggcagcccc

SEQ ID NO: 5450073 - DNA, 25 bp, Homo sapien
gtttgggaaccttcgcctagccatc

SEQ ID NO: 5450074 - DNA, 25 bp, Homo sapien
aatgtttccacctcatgtcagcaac

SEQ ID NO: 5450075 - DNA, 25 bp, Homo sapien
tctccccgctgcaaattgcactgta

SEQ ID NO: 5450076 - DNA, 25 bp, Homo sapien
tactacttctgcaagaccagcgtct

SEQ ID NO: 5450077 - DNA, 25 bp, Homo sapien
caaaaaagtggcctgcattcacata

SEQ ID NO: 5450078 - DNA, 25 bp, Homo sapien
tatacatgttaggtcactacagctg

SEQ ID NO: 5450079 - DNA, 25 bp, Homo sapien
gatatgcaaatagcgttcttcagag

SEQ ID NO: 5450080 - DNA, 25 bp, Homo sapien
ggagcacacaacctacatacctcag

SEQ ID NO: 5450081 - DNA, 25 bp, Homo sapien
gcaggaggcactttaagacagcagt

SEQ ID NO: 5450082 - DNA, 25 bp, Homo sapien
cagtgttatcctccctcacaggtga

SEQ ID NO: 5450083 - DNA, 25 bp, Homo sapien
tcctgaccccagagttatacccatt

SEQ ID NO: 5450084 - DNA, 25 bp, Homo sapien
tcaaggccctgcagatctggaaata

SEQ ID NO: 5450085 - DNA, 25 bp, Homo sapien
tattctagaccactgcagtaggcaa

SEQ ID NO: 5450086 - DNA, 25 bp, Homo sapien
cattctgggcatgtcaaggaaggct

SEQ ID NO: 5450087 - DNA, 25 bp, Homo sapien
tactgagcacattctatcagacagg

SEQ ID NO: 5450088 - DNA, 25 bp, Homo sapien
taaccagctactggaggaagacagc

SEQ ID NO: 5450089 - DNA, 25 bp, Homo sapien
ccttgttcgggctgatgtactcatg

SEQ ID NO: 5450090 - DNA, 25 bp, Homo sapien
aaagtagggctcaatctgtacagtt

SEQ ID NO: 5450091 - DNA, 25 bp, Homo sapien
tgtggagtccaataaaaagtagggc

SEQ ID NO: 5450092 - DNA, 25 bp, Homo sapien
aatcttccaaatgatgtagtttaga

SEQ ID NO: 5450093 - DNA, 25 bp, Homo sapien
tgggttgcaggcatataacataact

SEQ ID NO: 5450094 - DNA, 25 bp, Homo sapien
gatcctttgggttgcaggcatataa

SEQ ID NO: 5450095 - DNA, 25 bp, Homo sapien
tgtagtttagatcctttgggttgca

SEQ ID NO: 5450096 - DNA, 25 bp, Homo sapien
tgatgctttcccttgttctctgtgt

SEQ ID NO: 5450097 - DNA, 25 bp, Homo sapien
ttgcatgatgctttcccttgtctca

SEQ ID NO: 5450098 - DNA, 25 bp, Homo sapien
atcttgcatgatgctttcccttgtt

SEQ ID NO: 5450099 - DNA, 25 bp, Homo sapien
atcttgcatgatgctttcccttgtc

SEQ ID NO: 5450100 - DNA, 25 bp, Homo sapien
tatgtgattagtttgccagcctaac

SEQ ID NO: 5450101 - DNA, 25 bp, Homo sapien
ataattgagaagtgactattgaaaa

SEQ ID NO: 5450102 - DNA, 25 bp, Homo sapien
gattagtttgccagcctaactgcag

SEQ ID NO: 5450103 - DNA, 25 bp, Homo sapien
actttttatgtgattagtttgccag

SEQ ID NO: 5450104 - DNA, 25 bp, Homo sapien
catgcatcaacacatctggctcact

SEQ ID NO: 5450105 - DNA, 25 bp, Homo sapien
gcagctgagaccacatgcatcaaca

SEQ ID NO: 5450106 - DNA, 25 bp, Homo sapien
gaccacatgcatcaacacatctggc

SEQ ID NO: 5450107 - DNA, 25 bp, Homo sapien
gagaccacatgcatcaacacatctg

SEQ ID NO: 5450108 - DNA, 25 bp, Homo sapien
tgacactagtggcaaggtgaaaagg

SEQ ID NO: 5450109 - DNA, 25 bp, Homo sapien
tcaattgtcagaagaattggcagat

SEQ ID NO: 5450110 - DNA, 25 bp, Homo sapien
aatccaaaggccgaaatcctgtcaa

SEQ ID NO: 5450111 - DNA, 25 bp, Homo sapien
aaatcctgtcaattgtcagaagaat

SEQ ID NO: 5450112 - DNA, 25 bp, Homo sapien
gatattatcttagggaagacgtgcc

SEQ ID NO: 5450113 - DNA, 25 bp, Homo sapien
ttcctgaagcaggtgggcattggct

SEQ ID NO: 5450114 - DNA, 25 bp, Homo sapien
tgcaagccagttagcatgtgagaaa

SEQ ID NO: 5450115 - DNA, 25 bp, Homo sapien
ttggcggtgacaagaacagtggtac

SEQ ID NO: 5450116 - DNA, 25 bp, Homo sapien
catactgatgcttactttaagaagc

SEQ ID NO: 5450117 - DNA, 25 bp, Homo sapien
agtgtaaggttgatcaggaagctgt

SEQ ID NO: 5450118 - DNA, 25 bp, Homo sapien
attacagagtagtgtaaggttgatc

SEQ ID NO: 5450119 - DNA, 25 bp, Homo sapien
aaagagacatatgaaattacagagt

SEQ ID NO: 5450120 - DNA, 25 bp, Homo sapien
cagagtagtgtaaggttgatcagga

SEQ ID NO: 5450121 - DNA, 25 bp, Homo sapien
aatctccctgtggtccctagtggtg

SEQ ID NO: 5450122 - DNA, 25 bp, Homo sapien
ccaagggctttgacctatgttcatt

SEQ ID NO: 5450123 - DNA, 25 bp, Homo sapien
tctgctctgcttagccccaaggcaa

SEQ ID NO: 5450124 - DNA, 25 bp, Homo sapien
ataggccctgaaagagaatggtctc

SEQ ID NO: 5450125 - DNA, 25 bp, Homo sapien
tgatagctaccaatgttctgtgcct

SEQ ID NO: 5450126 - DNA, 25 bp, Homo sapien
cctaggacttgactatgtggcatac

SEQ ID NO: 5450127 - DNA, 25 bp, Homo sapien
tacatgtttcaccaaccagactgtg

SEQ ID NO: 5450128 - DNA, 25 bp, Homo sapien
tgcactgcaacgacagcatggagct

SEQ ID NO: 5450129 - DNA, 25 bp, Homo sapien
ttagccagacatttatggctacagg

SEQ ID NO: 5450130 - DNA, 25 bp, Homo sapien
tgatgatctcagtcaactgtgcact

SEQ ID NO: 5450131 - DNA, 25 bp, Homo sapien
gggcaatcaaactgttgatgatctc

SEQ ID NO: 5450132 - DNA, 25 bp, Homo sapien
tcctgtaaatgccattagccagaca

SEQ ID NO: 5450133 - DNA, 25 bp, Homo sapien
catcccatcatctaacacatttgaa

SEQ ID NO: 5450134 - DNA, 25 bp, Homo sapien
tatataatattacccttgaggcagg

SEQ ID NO: 5450135 - DNA, 25 bp, Homo sapien
catcatctaacacatttgaacccag

SEQ ID NO: 5450136 - DNA, 25 bp, Homo sapien
tgaacccagctaacagcctttatat

SEQ ID NO: 5450137 - DNA, 25 bp, Homo sapien
tagcagcgcgaaccatactgtgaag

SEQ ID NO: 5450138 - DNA, 25 bp, Homo sapien
tgtcagaccacccacagcattagat

SEQ ID NO: 5450139 - DNA, 25 bp, Homo sapien
aagtatctcacatcttccggttgga

SEQ ID NO: 5450140 - DNA, 25 bp, Homo sapien
taagccactggacgtcgctaattgg

SEQ ID NO: 5450141 - DNA, 25 bp, Homo sapien
aagtcatttcataccactgatatcc

SEQ ID NO: 5450142 - DNA, 25 bp, Homo sapien
tttgaatagtttacaaaatcaatga

SEQ ID NO: 5450143 - DNA, 25 bp, Homo sapien
caatgaaaagtcatttcataccact

SEQ ID NO: 5450144 - DNA, 25 bp, Homo sapien
gaaaagtcatttcataccactgata

SEQ ID NO: 5450145 - DNA, 25 bp, Homo sapien
aagaagtaaagtagggctgcttggt

SEQ ID NO: 5450146 - DNA, 25 bp, Homo sapien
cgaagaagtaaagtagggctgcttg

SEQ ID NO: 5450147 - DNA, 25 bp, Homo sapien
ctgtttttcgatgtttcgaagaagt

SEQ ID NO: 5450148 - DNA, 25 bp, Homo sapien
agtaaagtagggctgcttggtgaca

SEQ ID NO: 5450149 - DNA, 25 bp, Homo sapien
gacattcttctaggaccactatccc

SEQ ID NO: 5450150 - DNA, 25 bp, Homo sapien
ggattccctagaatgtttagtgaag

SEQ ID NO: 5450151 - DNA, 25 bp, Homo sapien
aatatcttttggaagctgacattct

SEQ ID NO: 5450152 - DNA, 25 bp, Homo sapien
gaatgtttagtgaagctgcttggtc

SEQ ID NO: 5450153 - DNA, 25 bp, Homo sapien
tgccaactcgtgctctgtctacaag

SEQ ID NO: 5450154 - DNA, 25 bp, Homo sapien
cattctaggtctgaaatctgagctt

SEQ ID NO: 5450155 - DNA, 25 bp, Homo sapien
ctgttagttgttggattttgcattc

SEQ ID NO: 5450156 - DNA, 25 bp, Homo sapien
cttggaggcacgaatttgcctgtga

SEQ ID NO: 5450157 - DNA, 25 bp, Homo sapien
tttctgtagagggtaacttatccta

SEQ ID NO: 5450158 - DNA, 25 bp, Homo sapien
acaggagtgaataaaacatgtttgc

SEQ ID NO: 5450159 - DNA, 25 bp, Homo sapien
ggctaacttgctcaaacaagatcaa

SEQ ID NO: 5450160 - DNA, 25 bp, Homo sapien
caagatcaacatgttataccccaaa

SEQ ID NO: 5450161 - DNA, 25 bp, Homo sapien
agcatactcagagtgtcccaactcc

SEQ ID NO: 5450162 - DNA, 25 bp, Homo sapien
accagcatactcagagtgtcccaac

SEQ ID NO: 5450163 - DNA, 25 bp, Homo sapien
gtaaccaaatagcatataactaatg

SEQ ID NO: 5450164 - DNA, 25 bp, Homo sapien
tataactaatgcaccagcatactca

SEQ ID NO: 5450165 - DNA, 25 bp, Homo sapien
ctggtctgccactgactccctgaat

SEQ ID NO: 5450166 - DNA, 25 bp, Homo sapien
tggtctgccactgactccctgaatc

SEQ ID NO: 5450167 - DNA, 25 bp, Homo sapien
tctgccactgactccctgaatcttt

SEQ ID NO: 5450168 - DNA, 25 bp, Homo sapien
gcctggtctgccactgactccctga

SEQ ID NO: 5450169 - DNA, 25 bp, Homo sapien
agaccaccacatgctgaccataatg

SEQ ID NO: 5450170 - DNA, 25 bp, Homo sapien
ctagagtgtgcaaaactgatcacag

SEQ ID NO: 5450171 - DNA, 25 bp, Homo sapien
acctgggaatacagagaatggtttg

SEQ ID NO: 5450172 - DNA, 25 bp, Homo sapien
agtaatttagtagctgcatccctca

SEQ ID NO: 5450173 - DNA, 25 bp, Homo sapien
taggagacttagaccacagactaca

SEQ ID NO: 5450174 - DNA, 25 bp, Homo sapien
caatgccagaacatctatagtgata

SEQ ID NO: 5450175 - DNA, 25 bp, Homo sapien
tttctttagtgcgtgtatactgaca

SEQ ID NO: 5450176 - DNA, 25 bp, Homo sapien
aaatctgtttttacccagtatgatt

SEQ ID NO: 5450177 - DNA, 25 bp, Homo sapien
ctttagtgcgtgtatactgacaact

SEQ ID NO: 5450178 - DNA, 25 bp, Homo sapien
taaaatttctttagtgcgtgtatac

SEQ ID NO: 5450179 - DNA, 25 bp, Homo sapien
catttcggagggaactcgactagga

SEQ ID NO: 5450180 - DNA, 25 bp, Homo sapien
caaggtcagggactatgaaggacaa

SEQ ID NO: 5450181 - DNA, 25 bp, Homo sapien
taacaaagactatccctgggagcca

SEQ ID NO: 5450182 - DNA, 25 bp, Homo sapien
gacaagggagcttatctcagaaagc

SEQ ID NO: 5450183 - DNA, 25 bp, Homo sapien
caaggactatctgaggttggaactt

SEQ ID NO: 5450184 - DNA, 25 bp, Homo sapien
tgagatcttatgcaattctgcctag

SEQ ID NO: 5450185 - DNA, 25 bp, Homo sapien
gaactctggcagaacctagtgtcaa

SEQ ID NO: 5450186 - DNA, 25 bp, Homo sapien
aaattctggcatgaagataaaccac

SEQ ID NO: 5450187 - DNA, 25 bp, Homo sapien
gacaaggttttgacatgttacccaa

SEQ ID NO: 5450188 - DNA, 25 bp, Homo sapien
taaagacaaggttttgacatgttac

SEQ ID NO: 5450189 - DNA, 25 bp, Homo sapien
gtaaagacaaggttttgacatgtta

SEQ ID NO: 5450190 - DNA, 25 bp, Homo sapien
aaggttttgacatgttacccaagct

SEQ ID NO: 5450191 - DNA, 25 bp, Homo sapien
gaacagaggtagaagatgccaacat

SEQ ID NO: 5450192 - DNA, 25 bp, Homo sapien
cactgaatccgctgacaacttggcc

SEQ ID NO: 5450193 - DNA, 25 bp, Homo sapien
tgaaggaaagaacaagccctcacct

SEQ ID NO: 5450194 - DNA, 25 bp, Homo sapien
tttcttacaatagcccaagcagatg

SEQ ID NO: 5450195 - DNA, 25 bp, Homo sapien
ggcacatacagctagctgggtctta

SEQ ID NO: 5450196 - DNA, 25 bp, Homo sapien
tgtgtccttatactggaagtgagtc

SEQ ID NO: 5450197 - DNA, 25 bp, Homo sapien
gtgagtctctcacagggcacataca

SEQ ID NO: 5450198 - DNA, 25 bp, Homo sapien
tatccgaggcaattgttgataggta

SEQ ID NO: 5450199 - DNA, 25 bp, Homo sapien
gccagaagcctaccttaatgaactg

SEQ ID NO: 5450200 - DNA, 25 bp, Homo sapien
tacctcaataaactggcagagttgg

SEQ ID NO: 5450201 - DNA, 25 bp, Homo sapien
ccaataatgcaagaggccagaagcc

SEQ ID NO: 5450202 - DNA, 25 bp, Homo sapien
taatgttgagtacagtctttcccac

SEQ ID NO: 5450203 - DNA, 25 bp, Homo sapien
gagggctccctatgtgcagactaaa

SEQ ID NO: 5450204 - DNA, 25 bp, Homo sapien
aattatttaacccatgctgagtctg

SEQ ID NO: 5450205 - DNA, 25 bp, Homo sapien
tcagaacactagaagacccgaatgc

SEQ ID NO: 5450206 - DNA, 25 bp, Homo sapien
tctctcaagtacatgccccaaaagg

SEQ ID NO: 5450207 - DNA, 25 bp, Homo sapien
gcttaacaacatgctttgccaggag

SEQ ID NO: 5450208 - DNA, 25 bp, Homo sapien
gatttccgcagctgtacaccgtgca

SEQ ID NO: 5450209 - DNA, 25 bp, Homo sapien
catctgctgaccatagtgcttaaca

SEQ ID NO: 5450210 - DNA, 25 bp, Homo sapien
ggcacatttgagtggccaggtacaa

SEQ ID NO: 5450211 - DNA, 25 bp, Homo sapien
agatgaaaagctgataccctttgct

SEQ ID NO: 5450212 - DNA, 25 bp, Homo sapien
cctttgctgttgcctccctcagagc

SEQ ID NO: 5450213 - DNA, 25 bp, Homo sapien
gcgattcctgtagataagtattgga

SEQ ID NO: 5450214 - DNA, 25 bp, Homo sapien
attcctgtagataagtattggaaac

SEQ ID NO: 5450215 - DNA, 25 bp, Homo sapien
cgattcctgtagataagtattggaa

SEQ ID NO: 5450216 - DNA, 25 bp, Homo sapien
ggcgattcctgtagataagtattgg

SEQ ID NO: 5450217 - DNA, 25 bp, Homo sapien
agtctctggataaagatacggaaaa

SEQ ID NO: 5450218 - DNA, 25 bp, Homo sapien
cctaggtgtggcgacatgtgccagt

SEQ ID NO: 5450219 - DNA, 25 bp, Homo sapien
taaaaaatgtcctaggtgtggcgac

SEQ ID NO: 5450220 - DNA, 25 bp, Homo sapien
gatacggaaaagctaaatataacaa

SEQ ID NO: 5450221 - DNA, 25 bp, Homo sapien
tagtctaatgatgcagaacttcgaa

SEQ ID NO: 5450222 - DNA, 25 bp, Homo sapien
ttagtctaatgatgcagaacttcga

SEQ ID NO: 5450223 - DNA, 25 bp, Homo sapien
ttctgaaacggccaggataccgcct

SEQ ID NO: 5450224 - DNA, 25 bp, Homo sapien
taaacctcgccagaacatgaatgtc

SEQ ID NO: 5450225 - DNA, 25 bp, Homo sapien
caccggtgacacaaacttggaagca

SEQ ID NO: 5450226 - DNA, 25 bp, Homo sapien
ttacaagaacgtccatccagtgcct

SEQ ID NO: 5450227 - DNA, 25 bp, Homo sapien
ccccgtcatcccgccgctgagacgc

SEQ ID NO: 5450228 - DNA, 25 bp, Homo sapien
gtcatcccgccgctgagacgccggc

SEQ ID NO: 5450229 - DNA, 25 bp, Homo sapien
atcccgccgctgagacgccggccac

SEQ ID NO: 5450230 - DNA, 25 bp, Homo sapien
ccgccgctgagacgccggccactcg

SEQ ID NO: 5450231 - DNA, 25 bp, Homo sapien
cctccgccgccgcaccttcggtccg

SEQ ID NO: 5450232 - DNA, 25 bp, Homo sapien
tccgccgccgcaccttcggtccggc

SEQ ID NO: 5450233 - DNA, 25 bp, Homo sapien
ccgccgcaccttcggtccggccgtg

SEQ ID NO: 5450234 - DNA, 25 bp, Homo sapien
cgcaccttcggtccggccgtggtgg

SEQ ID NO: 5450235 - DNA, 25 bp, Homo sapien
ggggcgccgctgactcgtctccaga

SEQ ID NO: 5450236 - DNA, 25 bp, Homo sapien
ccgcggtttaacagtccgcccgctg

SEQ ID NO: 5450237 - DNA, 25 bp, Homo sapien
ctcgtctccagagcgcgccccgctc

SEQ ID NO: 5450238 - DNA, 25 bp, Homo sapien
gcggtttaacagtccgcccgctgcc

SEQ ID NO: 5450239 - DNA, 25 bp, Homo sapien
tttatcttctagtcagccctgccgc

SEQ ID NO: 5450240 - DNA, 25 bp, Homo sapien
tatcccttgacactgaatattgttc

SEQ ID NO: 5450241 - DNA, 25 bp, Homo sapien
cccggccgctccagattaattcttt

SEQ ID NO: 5450242 - DNA, 25 bp, Homo sapien
tacatgttaagcacactatcccttg

SEQ ID NO: 5450243 - DNA, 25 bp, Homo sapien
gcgttcatgttctttgtggggatat

SEQ ID NO: 5450244 - DNA, 25 bp, Homo sapien
cgttcatgttctttgtggggatatg

SEQ ID NO: 5450245 - DNA, 25 bp, Homo sapien
tttaagtcttaaatcaaatgtcatt

SEQ ID NO: 5450246 - DNA, 25 bp, Homo sapien
cttttaagtcttaaatcaaatgtca

SEQ ID NO: 5450247 - DNA, 25 bp, Homo sapien
gtcttaaatcaaatgtcatttcctc

SEQ ID NO: 5450248 - DNA, 25 bp, Homo sapien
cttaaatcaaatgtcatttcctcac

SEQ ID NO: 5450249 - DNA, 25 bp, Homo sapien
caaatggtagccgaaatgagtttac

SEQ ID NO: 5450250 - DNA, 25 bp, Homo sapien
ccctggtcagggttaggcaaatact

SEQ ID NO: 5450251 - DNA, 25 bp, Homo sapien
ttgacagaaccaaggcattccctgg

SEQ ID NO: 5450252 - DNA, 25 bp, Homo sapien
gcaaatacttagctgagtcctaggg

SEQ ID NO: 5450253 - DNA, 25 bp, Homo sapien
ttaaaacgagattagctgtaatagg

SEQ ID NO: 5450254 - DNA, 25 bp, Homo sapien
gatttaaaacgagattagctgtaat

SEQ ID NO: 5450255 - DNA, 25 bp, Homo sapien
gagcagatttaaaacgagattagct

SEQ ID NO: 5450256 - DNA, 25 bp, Homo sapien
cagatttaaaacgagattagctgta

SEQ ID NO: 5450257 - DNA, 25 bp, Homo sapien
ttcatttgtaccaccatagattggc

SEQ ID NO: 5450258 - DNA, 25 bp, Homo sapien
ttatttcatttgtaccaccatagat

SEQ ID NO: 5450259 - DNA, 25 bp, Homo sapien
ggctgaactctggcatccacataag

SEQ ID NO: 5450260 - DNA, 25 bp, Homo sapien
ctgaactctggcatccacataagct

SEQ ID NO: 5450261 - DNA, 25 bp, Homo sapien
tcagcaatgtgtggagttaaaatac

SEQ ID NO: 5450262 - DNA, 25 bp, Homo sapien
caggaatataaactaatgctttagc

SEQ ID NO: 5450263 - DNA, 25 bp, Homo sapien
tgcacaggatgtcttagtttctttt

SEQ ID NO: 5450264 - DNA, 25 bp, Homo sapien
caattagtgaagtacaaacaataaa

SEQ ID NO: 5450265 - DNA, 25 bp, Homo sapien
ttcttctccatattcatcagggttc

SEQ ID NO: 5450266 - DNA, 25 bp, Homo sapien
cttttggacttattcttctccatat

SEQ ID NO: 5450267 - DNA, 25 bp, Homo sapien
cacttttggacttattcttctccat

SEQ ID NO: 5450268 - DNA, 25 bp, Homo sapien
tttggacttattcttctccatattc

SEQ ID NO: 5450269 - DNA, 25 bp, Homo sapien
tgggtactcccacatgtatccccaa

SEQ ID NO: 5450270 - DNA, 25 bp, Homo sapien
caacctccatggagctgtacacagt

SEQ ID NO: 5450271 - DNA, 25 bp, Homo sapien
tacacagtcgtaagctacactattt

SEQ ID NO: 5450272 - DNA, 25 bp, Homo sapien
tgcaattgggtactcccacatgtat

SEQ ID NO: 5450273 - DNA, 25 bp, Homo sapien
caaatgctcgggttacacatatatg

SEQ ID NO: 5450274 - DNA, 25 bp, Homo sapien
caatatttcgccatgcaagcagtgg

SEQ ID NO: 5450275 - DNA, 25 bp, Homo sapien
aaacgtttcgcttcatgcagctgga

SEQ ID NO: 5450276 - DNA, 25 bp, Homo sapien
gacagttgtccacaaatgctcgggt

SEQ ID NO: 5450277 - DNA, 25 bp, Homo sapien
gacatttctaaacacctgagtgaaa

SEQ ID NO: 5450278 - DNA, 25 bp, Homo sapien
tacgtgtaaatcagtgatccataaa

SEQ ID NO: 5450279 - DNA, 25 bp, Homo sapien
ttcctgacatttctaaacacctgag

SEQ ID NO: 5450280 - DNA, 25 bp, Homo sapien
ctgatacgtgtaaatcagtgatcca

SEQ ID NO: 5450281 - DNA, 25 bp, Homo sapien
ccacatcagcaattaacagcctttc

SEQ ID NO: 5450282 - DNA, 25 bp, Homo sapien
catgaattcactagctgaaattgcc

SEQ ID NO: 5450283 - DNA, 25 bp, Homo sapien
tcactagctgaaattgccacatcag

SEQ ID NO: 5450284 - DNA, 25 bp, Homo sapien
ctgtaggtgagcaactgttttgcca

SEQ ID NO: 5450285 - DNA, 25 bp, Homo sapien
gctggcaaccgtatatcttcaaaga

SEQ ID NO: 5450286 - DNA, 25 bp, Homo sapien
ggcactagctggcaaccgtatatct

SEQ ID NO: 5450287 - DNA, 25 bp, Homo sapien
agctctttcatgatgtaatagaagc

SEQ ID NO: 5450288 - DNA, 25 bp, Homo sapien
ctccaagtagggcactagctggcaa

SEQ ID NO: 5450289 - DNA, 25 bp, Homo sapien
cttcatgatttgtgaccgcaactac

SEQ ID NO: 5450290 - DNA, 25 bp, Homo sapien
cacaacatcacttaatgacccatta

SEQ ID NO: 5450291 - DNA, 25 bp, Homo sapien
cattttatgtagctttcgtcccttg

SEQ ID NO: 5450292 - DNA, 25 bp, Homo sapien
gaaaaaggctaataccatgggcagg

SEQ ID NO: 5450293 - DNA, 25 bp, Homo sapien
ctgcaaaaccccaagtacattatta

SEQ ID NO: 5450294 - DNA, 25 bp, Homo sapien
cccaagtacattattaatgcaccat

SEQ ID NO: 5450295 - DNA, 25 bp, Homo sapien
tgtgcaagttatgattgggagaaag

SEQ ID NO: 5450296 - DNA, 25 bp, Homo sapien
aattcaattctatgtgcaagttatg

SEQ ID NO: 5450297 - DNA, 25 bp, Homo sapien
tgactcatgggcaggacatattcct

SEQ ID NO: 5450298 - DNA, 25 bp, Homo sapien
cacatttcttgataggacctggacc

SEQ ID NO: 5450299 - DNA, 25 bp, Homo sapien
gacctggacctgaataagtacttgc

SEQ ID NO: 5450300 - DNA, 25 bp, Homo sapien
gatagttccacctgatgactcatgg

SEQ ID NO: 5450301 - DNA, 25 bp, Homo sapien
catttgggcaatgtgagcctcacct

SEQ ID NO: 5450302 - DNA, 25 bp, Homo sapien
tgaaaagaagggctatagaagtcct

SEQ ID NO: 5450303 - DNA, 25 bp, Homo sapien
tcctgcctgagtccctagatttaat

SEQ ID NO: 5450304 - DNA, 25 bp, Homo sapien
tatagaagaagctaccacagatctt

SEQ ID NO: 5450305 - DNA, 25 bp, Homo sapien
cattgagaatccagtcacttccatc

SEQ ID NO: 5450306 - DNA, 25 bp, Homo sapien
tccattgagaatccagtcacttcca

SEQ ID NO: 5450307 - DNA, 25 bp, Homo sapien
gcttccattgagaatccagtcactt

SEQ ID NO: 5450308 - DNA, 25 bp, Homo sapien
cttgcttccattgagaatccagtca

SEQ ID NO: 5450309 - DNA, 25 bp, Homo sapien
tctgttgacccacaagttgctgctg

SEQ ID NO: 5450310 - DNA, 25 bp, Homo sapien
ttctttggcatctttaagttctttc

SEQ ID NO: 5450311 - DNA, 25 bp, Homo sapien
cttctttggcatctttaagttcttt

SEQ ID NO: 5450312 - DNA, 25 bp, Homo sapien
acttctttggcatctttaagttctt

SEQ ID NO: 5450313 - DNA, 25 bp, Homo sapien
tctgtcattgctattgcaccaatac

SEQ ID NO: 5450314 - DNA, 25 bp, Homo sapien
gcaccaatacatttgcctgcagtca

SEQ ID NO: 5450315 - DNA, 25 bp, Homo sapien
gaatgaatactaaaacctgggcctg

SEQ ID NO: 5450316 - DNA, 25 bp, Homo sapien
tgagccatggtttgtaatataggac

SEQ ID NO: 5450317 - DNA, 25 bp, Homo sapien
attaaggtcctatcaaattgtttgg

SEQ ID NO: 5450318 - DNA, 25 bp, Homo sapien
tcacaaacctatgacattcctgagt

SEQ ID NO: 5450319 - DNA, 25 bp, Homo sapien
gcaataaaaaacgactattataaca

SEQ ID NO: 5450320 - DNA, 25 bp, Homo sapien
tggtagtggcctatctcatcacaaa

SEQ ID NO: 5450321 - DNA, 25 bp, Homo sapien
caagatgctctgcaatattgacacc

SEQ ID NO: 5450322 - DNA, 25 bp, Homo sapien
tgcggagtacagatcccctccaatt

SEQ ID NO: 5450323 - DNA, 25 bp, Homo sapien
gctcctcccagacaatagctgcgga

SEQ ID NO: 5450324 - DNA, 25 bp, Homo sapien
accaagcagtccttgttttccagct

SEQ ID NO: 5450325 - DNA, 25 bp, Homo sapien
tgatgaggaatcacttcttcttgga

SEQ ID NO: 5450326 - DNA, 25 bp, Homo sapien
gagaaaagattcttcgaattcctat

SEQ ID NO: 5450327 - DNA, 25 bp, Homo sapien
gacgttcttcccctccggaatgaga

SEQ ID NO: 5450328 - DNA, 25 bp, Homo sapien
cagaaggagtttctagacgttcttc

SEQ ID NO: 5450329 - DNA, 25 bp, Homo sapien
taccttatcattattcaactcggtc

SEQ ID NO: 5450330 - DNA, 25 bp, Homo sapien
cttatcattattcaactcggtctcc

SEQ ID NO: 5450331 - DNA, 25 bp, Homo sapien
gaagtaccttatcattattcaactc

SEQ ID NO: 5450332 - DNA, 25 bp, Homo sapien
tatcattattcaactcggtctccat

SEQ ID NO: 5450333 - DNA, 25 bp, Homo sapien
tgatgcctagaactaaccacaggtc

SEQ ID NO: 5450334 - DNA, 25 bp, Homo sapien
gatgcctagaactaaccacaggtct

SEQ ID NO: 5450335 - DNA, 25 bp, Homo sapien
tgcctagaactaaccacaggtctga

SEQ ID NO: 5450336 - DNA, 25 bp, Homo sapien
atgcctagaactaaccacaggtctg

SEQ ID NO: 5450337 - DNA, 25 bp, Homo sapien
gcccagtcgctattacaacctattt

SEQ ID NO: 5450338 - DNA, 25 bp, Homo sapien
gtcgctattacaacctatttctaag

SEQ ID NO: 5450339 - DNA, 25 bp, Homo sapien
tgtgcccagtcgctattacaaccta

SEQ ID NO: 5450340 - DNA, 25 bp, Homo sapien
ctgttctagtaacttgggatacaat

SEQ ID NO: 5450341 - DNA, 25 bp, Homo sapien
tacgccaatggataaaacagaagca

SEQ ID NO: 5450342 - DNA, 25 bp, Homo sapien
gcaactaatcttattggctaggcta

SEQ ID NO: 5450343 - DNA, 25 bp, Homo sapien
tataaatacacaatctcaggcccca

SEQ ID NO: 5450344 - DNA, 25 bp, Homo sapien
tcagagggtctctcaggtctccctt

SEQ ID NO: 5450345 - DNA, 25 bp, Homo sapien
ccttgtttgatggaaccctcgccag

SEQ ID NO: 5450346 - DNA, 25 bp, Homo sapien
aaacaccaccttagtagtcactgaa

SEQ ID NO: 5450347 - DNA, 25 bp, Homo sapien
ctggacaattctggtccgcgccgca

SEQ ID NO: 5450348 - DNA, 25 bp, Homo sapien
ctaccgcgcggcgagtctaagccgt

SEQ ID NO: 5450349 - DNA, 25 bp, Homo sapien
aactgggacacagatcgcagcccgc

SEQ ID NO: 5450350 - DNA, 25 bp, Homo sapien
tctggagaaatctttcggctttccc

SEQ ID NO: 5450351 - DNA, 25 bp, Homo sapien
cccagtccgcgggatccaggaaagg

SEQ ID NO: 5450352 - DNA, 25 bp, Homo sapien
actgcaggccgctgaactagacggg

SEQ ID NO: 5450353 - DNA, 25 bp, Homo sapien
cagatgctggttgcacccagtccgc

SEQ ID NO: 5450354 - DNA, 25 bp, Homo sapien
gagttggggagcactcccagccgcg

SEQ ID NO: 5450355 - DNA, 25 bp, Homo sapien
tagcccggcgccggagttggggagc

SEQ ID NO: 5450356 - DNA, 25 bp, Homo sapien
ctagcccggcgccggagttggggag

SEQ ID NO: 5450357 - DNA, 25 bp, Homo sapien
ttggggagcactcccagccgcgcgc

SEQ ID NO: 5450358 - DNA, 25 bp, Homo sapien
cgcgtagggaccctcggagaaggcg

SEQ ID NO: 5450359 - DNA, 25 bp, Homo sapien
ccaggacgcgtagggaccctcggag

SEQ ID NO: 5450360 - DNA, 25 bp, Homo sapien
tggccgcccaggacgcgtagggacc

SEQ ID NO: 5450361 - DNA, 25 bp, Homo sapien
ggaccctcggagaaggcgtgcggcc

SEQ ID NO: 5450362 - DNA, 25 bp, Homo sapien
cctgaagcgctttgagtaacggatg

SEQ ID NO: 5450363 - DNA, 25 bp, Homo sapien
tgagcctttttagcgtcctgaagcg

SEQ ID NO: 5450364 - DNA, 25 bp, Homo sapien
taacggatgaaagctatggagcccc

SEQ ID NO: 5450365 - DNA, 25 bp, Homo sapien
tcttgtttatcgaagcagctctgag

SEQ ID NO: 5450366 - DNA, 25 bp, Homo sapien
gtctgtgagcttgtagagaaaaacc

SEQ ID NO: 5450367 - DNA, 25 bp, Homo sapien
aaaccagcaccataattgacaactt

SEQ ID NO: 5450368 - DNA, 25 bp, Homo sapien
ccagcaccataattgacaacttctt

SEQ ID NO: 5450369 - DNA, 25 bp, Homo sapien
ctcagaagtctgtgagcttgtagag

SEQ ID NO: 5450370 - DNA, 25 bp, Homo sapien
tctggagccctatgttctatttctg

SEQ ID NO: 5450371 - DNA, 25 bp, Homo sapien
ctagaggcaatcttccctgggggat

SEQ ID NO: 5450372 - DNA, 25 bp, Homo sapien
ctctggagccctatgttctatttct

SEQ ID NO: 5450373 - DNA, 25 bp, Homo sapien
cttaggattgaaaacactagaggca

SEQ ID NO: 5450374 - DNA, 25 bp, Homo sapien
tatttgcttatgctgtgtaggcttc

SEQ ID NO: 5450375 - DNA, 25 bp, Homo sapien
gaaggtaactcgaagatagctaaaa

SEQ ID NO: 5450376 - DNA, 25 bp, Homo sapien
taaagactgaggaattaggcacctg

SEQ ID NO: 5450377 - DNA, 25 bp, Homo sapien
attttgtcaggaaggtaactcgaag

SEQ ID NO: 5450378 - DNA, 25 bp, Homo sapien
aaagttctactggatgaggctgtga

SEQ ID NO: 5450379 - DNA, 25 bp, Homo sapien
tagttaccatataagacagagcaga

SEQ ID NO: 5450380 - DNA, 25 bp, Homo sapien
tgaagctcccaatatcaggagaaag

SEQ ID NO: 5450381 - DNA, 25 bp, Homo sapien
catgggccacgtttcagatgttcaa

SEQ ID NO: 5450382 - DNA, 25 bp, Homo sapien
aagaatgtttgttgattcatggtag

SEQ ID NO: 5450383 - DNA, 25 bp, Homo sapien
aatgtttgttgattcatggtagata

SEQ ID NO: 5450384 - DNA, 25 bp, Homo sapien
tgtttgttgattcatggtagataat

SEQ ID NO: 5450385 - DNA, 25 bp, Homo sapien
agaatgtttgttgattcatggtaga

SEQ ID NO: 5450386 - DNA, 25 bp, Homo sapien
tttgtgtggtatgaattcaattcag

SEQ ID NO: 5450387 - DNA, 25 bp, Homo sapien
ttgtgtggtatgaattcaattcaga

SEQ ID NO: 5450388 - DNA, 25 bp, Homo sapien
tgtgtggtatgaattcaattcagag

SEQ ID NO: 5450389 - DNA, 25 bp, Homo sapien
gtgtggtatgaattcaattcagaga

SEQ ID NO: 5450390 - DNA, 25 bp, Homo sapien
gatggtaaacagatctggagagttt

SEQ ID NO: 5450391 - DNA, 25 bp, Homo sapien
tcttgaaccgtccagattgctttgt

SEQ ID NO: 5450392 - DNA, 25 bp, Homo sapien
gtgattaaaataagtttccagccag

SEQ ID NO: 5450393 - DNA, 25 bp, Homo sapien
gccagtcttcctaaacaatgcttgt

SEQ ID NO: 5450394 - DNA, 25 bp, Homo sapien
tcagatagacatgatgtgcttgaca

SEQ ID NO: 5450395 - DNA, 25 bp, Homo sapien
gatagacatgatgtgcttgacaaaa

SEQ ID NO: 5450396 - DNA, 25 bp, Homo sapien
atagacatgatgtgcttgacaaaag

SEQ ID NO: 5450397 - DNA, 25 bp, Homo sapien
cagatagacatgatgtgcttgacaa

SEQ ID NO: 5450398 - DNA, 25 bp, Homo sapien
catatgtatgtcaataaggaaggaa

SEQ ID NO: 5450399 - DNA, 25 bp, Homo sapien
tatgttcagatcctcacatatcttt

SEQ ID NO: 5450400 - DNA, 25 bp, Homo sapien
tagagttatgcaattgattgtcata

SEQ ID NO: 5450401 - DNA, 25 bp, Homo sapien
tcaaaaggagcccatcatcaatctg

SEQ ID NO: 5450402 - DNA, 25 bp, Homo sapien
gagtcttcttgacctgccatcaggg

SEQ ID NO: 5450403 - DNA, 25 bp, Homo sapien
gccatcagggcttccacttcttcct

SEQ ID NO: 5450404 - DNA, 25 bp, Homo sapien
ttggagtcttcttgacctgccatca

SEQ ID NO: 5450405 - DNA, 25 bp, Homo sapien
cattggagtcttcttgacctgccat

SEQ ID NO: 5450406 - DNA, 25 bp, Homo sapien
ttggaaatggcttgcatcataggca

SEQ ID NO: 5450407 - DNA, 25 bp, Homo sapien
tcataggcagaaattgttcaaactc

SEQ ID NO: 5450408 - DNA, 25 bp, Homo sapien
tagaacatggcggagttcagcaccc

SEQ ID NO: 5450409 - DNA, 25 bp, Homo sapien
aaagacacgcagaccctcaacaaag

SEQ ID NO: 5450410 - DNA, 25 bp, Homo sapien
ggacatcaccgacctggcttaaggt

SEQ ID NO: 5450411 - DNA, 25 bp, Homo sapien
gagctcgaaggacatcaccgacctg

SEQ ID NO: 5450412 - DNA, 25 bp, Homo sapien
agaactttcctgacctctgcattgg

SEQ ID NO: 5450413 - DNA, 25 bp, Homo sapien
cattggtgggatttgtgcccagagc

SEQ ID NO: 5450414 - DNA, 25 bp, Homo sapien
cctgctgttccttagagaactcgat

SEQ ID NO: 5450415 - DNA, 25 bp, Homo sapien
atcctgctgttccttagagaactcg

SEQ ID NO: 5450416 - DNA, 25 bp, Homo sapien
tcctgctgttccttagagaactcga

SEQ ID NO: 5450417 - DNA, 25 bp, Homo sapien
tacttttgaatctaggaacataaaa

SEQ ID NO: 5450418 - DNA, 25 bp, Homo sapien
gaaggttgccttaggatacttttga

SEQ ID NO: 5450419 - DNA, 25 bp, Homo sapien
gaatgagtgctggttgctctgagat

SEQ ID NO: 5450420 - DNA, 25 bp, Homo sapien
tatgtaggtgtcttggcattagaag

SEQ ID NO: 5450421 - DNA, 25 bp, Homo sapien
aatagtacacaaaacccaatgcatc

SEQ ID NO: 5450422 - DNA, 25 bp, Homo sapien
gatatgtctaataagatacacggtg

SEQ ID NO: 5450423 - DNA, 25 bp, Homo sapien
tagttttagctatcagcatcactgg

SEQ ID NO: 5450424 - DNA, 25 bp, Homo sapien
gaagcataaagcacagctcttggaa

SEQ ID NO: 5450425 - DNA, 25 bp, Homo sapien
cagggaagctgaagagtgagttgag

SEQ ID NO: 5450426 - DNA, 25 bp, Homo sapien
agggaagctgaagagtgagttgagg

SEQ ID NO: 5450427 - DNA, 25 bp, Homo sapien
ggaagctgaagagtgagttgagggc

SEQ ID NO: 5450428 - DNA, 25 bp, Homo sapien
gaagctgaagagtgagttgagggct

SEQ ID NO: 5450429 - DNA, 25 bp, Homo sapien
gcaggtgcaggtgccggtgccgggg

SEQ ID NO: 5450430 - DNA, 25 bp, Homo sapien
ttcttctttgggtttggctggggca

SEQ ID NO: 5450431 - DNA, 25 bp, Homo sapien
aatggcagagaggtcaattttttct

SEQ ID NO: 5450432 - DNA, 25 bp, Homo sapien
cttaatggcagagaggtcaattttt

SEQ ID NO: 5450433 - DNA, 25 bp, Homo sapien
gccacaggtttcttcacgtctttct

SEQ ID NO: 5450434 - DNA, 25 bp, Homo sapien
ccacaggtttcttcacgtctttctt

SEQ ID NO: 5450435 - DNA, 25 bp, Homo sapien
aggagtggtggttgggttgatccac

SEQ ID NO: 5450436 - DNA, 25 bp, Homo sapien
ggagttcctccaaaagaacctgtca

SEQ ID NO: 5450437 - DNA, 25 bp, Homo sapien
cagtgtcttgaagatggacccagag

SEQ ID NO: 5450438 - DNA, 25 bp, Homo sapien
tggttgggttgatccacagcccagt

SEQ ID NO: 5450439 - DNA, 25 bp, Homo sapien
gagactttactgaaggattccattt

SEQ ID NO: 5450440 - DNA, 25 bp, Homo sapien
ttttggcagggagtatcaccaactt

SEQ ID NO: 5450441 - DNA, 25 bp, Homo sapien
aaagcagacgtataaggaaagccca

SEQ ID NO: 5450442 - DNA, 25 bp, Homo sapien
tgcaaggaaatgttggtcagcaaag

SEQ ID NO: 5450443 - DNA, 25 bp, Homo sapien
cagctgaggattcatgttcttggtg

SEQ ID NO: 5450444 - DNA, 25 bp, Homo sapien
gaaaaaagggcaacagctgaggatt

SEQ ID NO: 5450445 - DNA, 25 bp, Homo sapien
ggcaacagctgaggattcatgttct

SEQ ID NO: 5450446 - DNA, 25 bp, Homo sapien
gattcatgttcttggtgacagctga

SEQ ID NO: 5450447 - DNA, 25 bp, Homo sapien
ttctagtagcaccatgccagccaca

SEQ ID NO: 5450448 - DNA, 25 bp, Homo sapien
cgttctctcaattttgacgtgggat

SEQ ID NO: 5450449 - DNA, 25 bp, Homo sapien
ctcaattttgacgtgggattctttg

SEQ ID NO: 5450450 - DNA, 25 bp, Homo sapien
gattaaggaagtgatgtgtccatta

SEQ ID NO: 5450451 - DNA, 25 bp, Homo sapien
ttcgttctctcaattttgacgtggg

SEQ ID NO: 5450452 - DNA, 25 bp, Homo sapien
aataagcctaggagtgctacaggag

SEQ ID NO: 5450453 - DNA, 25 bp, Homo sapien
taataagcctaggagtgctacagga

SEQ ID NO: 5450454 - DNA, 25 bp, Homo sapien
agaaggaaggagtgtacaaataagg

SEQ ID NO: 5450455 - DNA, 25 bp, Homo sapien
ctaataagcctaggagtgctacagg

SEQ ID NO: 5450456 - DNA, 25 bp, Homo sapien
tctagcagccaaaggagtatacatg

SEQ ID NO: 5450457 - DNA, 25 bp, Homo sapien
taaagtagctagtaaaaggcagggc

SEQ ID NO: 5450458 - DNA, 25 bp, Homo sapien
gaaacagttcgtctacagctcaata

SEQ ID NO: 5450459 - DNA, 25 bp, Homo sapien
tgaggtgctcttacttagcggaagc

SEQ ID NO: 5450460 - DNA, 25 bp, Homo sapien
gataataggagactgctacctgcag

SEQ ID NO: 5450461 - DNA, 25 bp, Homo sapien
ttcagcaatctgagaggcacaaggt

SEQ ID NO: 5450462 - DNA, 25 bp, Homo sapien
tccttggaaagcaacggaagcactt

SEQ ID NO: 5450463 - DNA, 25 bp, Homo sapien
caggaaccagtacacactcagtggg

SEQ ID NO: 5450464 - DNA, 25 bp, Homo sapien
cttttgtggggactagcaggtcagc

SEQ ID NO: 5450465 - DNA, 25 bp, Homo sapien
tttgtggggactagcaggtcagcca

SEQ ID NO: 5450466 - DNA, 25 bp, Homo sapien
tcagccaggaaatatattgttccag

SEQ ID NO: 5450467 - DNA, 25 bp, Homo sapien
aggaaatatattgttccagccattc

SEQ ID NO: 5450468 - DNA, 25 bp, Homo sapien
catactctaagcaccattcagcaaa

SEQ ID NO: 5450469 - DNA, 25 bp, Homo sapien
ccatactctaagcaccattcagcaa

SEQ ID NO: 5450470 - DNA, 25 bp, Homo sapien
tccatactctaagcaccattcagca

SEQ ID NO: 5450471 - DNA, 25 bp, Homo sapien
cagcacactgataggcatcacagag

SEQ ID NO: 5450472 - DNA, 25 bp, Homo sapien
aggcattccctgcagaaccgtggca

SEQ ID NO: 5450473 - DNA, 25 bp, Homo sapien
caggtacttcatgtcctgtgtgagg

SEQ ID NO: 5450474 - DNA, 25 bp, Homo sapien
tcttcagcaacccatattgccagat

SEQ ID NO: 5450475 - DNA, 25 bp, Homo sapien
ggaatttcagctggcagacgtagtc

SEQ ID NO: 5450476 - DNA, 25 bp, Homo sapien
cgtagtctacactgggcttgaccaa

SEQ ID NO: 5450477 - DNA, 25 bp, Homo sapien
gcaccaatggacaagcagatctcga

SEQ ID NO: 5450478 - DNA, 25 bp, Homo sapien
gatgagcatgtagattaccccaggg

SEQ ID NO: 5450479 - DNA, 25 bp, Homo sapien
agtggagactttgccgtgaagtttc

SEQ ID NO: 5450480 - DNA, 25 bp, Homo sapien
cttcctagctaggttttctccagag

SEQ ID NO: 5450481 - DNA, 25 bp, Homo sapien
catgagcagcccctacataatattc

SEQ ID NO: 5450482 - DNA, 25 bp, Homo sapien
agtaataaattccagccaggccatg

SEQ ID NO: 5450483 - DNA, 25 bp, Homo sapien
ctccaaagttcttattgacaaaaag

SEQ ID NO: 5450484 - DNA, 25 bp, Homo sapien
caaaaagaagagcatagatgtagcc

SEQ ID NO: 5450485 - DNA, 25 bp, Homo sapien
gcatttcatttggagcatgaggatc

SEQ ID NO: 5450486 - DNA, 25 bp, Homo sapien
gcctattcgcccatagagcatttca

SEQ ID NO: 5450487 - DNA, 25 bp, Homo sapien
ccacacctggctaattttgtatttt

SEQ ID NO: 5450488 - DNA, 25 bp, Homo sapien
gcctcgcgaggggatgggattatag

SEQ ID NO: 5450489 - DNA, 25 bp, Homo sapien
gtacacaccaccacacctggctaat

SEQ ID NO: 5450490 - DNA, 25 bp, Homo sapien
tcctacctcagcctcgcgaggggat

SEQ ID NO: 5450491 - DNA, 25 bp, Homo sapien
gagcctaaactctgagggagggaaa

SEQ ID NO: 5450492 - DNA, 25 bp, Homo sapien
ggaaatttccccacagattggagga

SEQ ID NO: 5450493 - DNA, 25 bp, Homo sapien
catggcacagcagggtcatcaaagc

SEQ ID NO: 5450494 - DNA, 25 bp, Homo sapien
taagcagaagcagtgtgccgtgcct

SEQ ID NO: 5450495 - DNA, 25 bp, Homo sapien
taggacatacattaccactaggtgg

SEQ ID NO: 5450496 - DNA, 25 bp, Homo sapien
tttgaaccacggcattaactccatt

SEQ ID NO: 5450497 - DNA, 25 bp, Homo sapien
gaaacagtggttatcttaggaagag

SEQ ID NO: 5450498 - DNA, 25 bp, Homo sapien
cactaggtggcaatatataattagc

SEQ ID NO: 5450499 - DNA, 25 bp, Homo sapien
tgtgatatagcacagcggccactgc

SEQ ID NO: 5450500 - DNA, 25 bp, Homo sapien
gctaactgtaggtaggcagggtccc

SEQ ID NO: 5450501 - DNA, 25 bp, Homo sapien
gagcgcttggttaagcagttcagac

SEQ ID NO: 5450502 - DNA, 25 bp, Homo sapien
cgtgtgatgcaatcttctgcctgct

SEQ ID NO: 5450503 - DNA, 25 bp, Homo sapien
cagtcaatgcctagaaatgccttca

SEQ ID NO: 5450504 - DNA, 25 bp, Homo sapien
taatacatacttgtgggcctggctt

SEQ ID NO: 5450505 - DNA, 25 bp, Homo sapien
gactttaagtggtgagtgctgctgc

SEQ ID NO: 5450506 - DNA, 25 bp, Homo sapien
caaagactcagggatggttggcaag

SEQ ID NO: 5450507 - DNA, 25 bp, Homo sapien
ccatggcaggtagcattacgttctc

SEQ ID NO: 5450508 - DNA, 25 bp, Homo sapien
taagaatcgtcacagttaagagtgg

SEQ ID NO: 5450509 - DNA, 25 bp, Homo sapien
ggaaccactcagtagctgaccagtg

SEQ ID NO: 5450510 - DNA, 25 bp, Homo sapien
taaagacagtagtgagatcagccat

SEQ ID NO: 5450511 - DNA, 25 bp, Homo sapien
gtggcaggctttacgcaaagactta

SEQ ID NO: 5450512 - DNA, 25 bp, Homo sapien
tgtggcaggctttacgcaaagactt

SEQ ID NO: 5450513 - DNA, 25 bp, Homo sapien
tttctgtggcaggctttacgcaaag

SEQ ID NO: 5450514 - DNA, 25 bp, Homo sapien
tctgtggcaggctttacgcaaagac

SEQ ID NO: 5450515 - DNA, 25 bp, Homo sapien
aactcaagacaactgtgcgctgtgc

SEQ ID NO: 5450516 - DNA, 25 bp, Homo sapien
tgtgtcattattggttgagtacccg

SEQ ID NO: 5450517 - DNA, 25 bp, Homo sapien
tacaatgtggcaatcaagaggaaaa

SEQ ID NO: 5450518 - DNA, 25 bp, Homo sapien
ggtccaacattatctagtccagtct

SEQ ID NO: 5450519 - DNA, 25 bp, Homo sapien
caatgattgagattggcaatgcagc

SEQ ID NO: 5450520 - DNA, 25 bp, Homo sapien
caaacagcaatgaccatatgggagg

SEQ ID NO: 5450521 - DNA, 25 bp, Homo sapien
cattacctccgcttcaggcattgta

SEQ ID NO: 5450522 - DNA, 25 bp, Homo sapien
taccctgtatggattcctgtatgga

SEQ ID NO: 5450523 - DNA, 25 bp, Homo sapien
gaagctcccgaatcttattggtcaa

SEQ ID NO: 5450524 - DNA, 25 bp, Homo sapien
tgcccagccagtgtaaccggtgcca

SEQ ID NO: 5450525 - DNA, 25 bp, Homo sapien
gccatcccgagggtctgctgatttc

SEQ ID NO: 5450526 - DNA, 25 bp, Homo sapien
tctccatttgctgaagaagctcccg

SEQ ID NO: 5450527 - DNA, 25 bp, Homo sapien
tgcaggcagacatatcctaaactca

SEQ ID NO: 5450528 - DNA, 25 bp, Homo sapien
tacgtatttatcgtcgaatcatgta

SEQ ID NO: 5450529 - DNA, 25 bp, Homo sapien
gggatgctcaactctctcaggcaaa

SEQ ID NO: 5450530 - DNA, 25 bp, Homo sapien
atgagcacctttccgaacaccgtgg

SEQ ID NO: 5450531 - DNA, 25 bp, Homo sapien
tgttataatcagcataaggattcgg

SEQ ID NO: 5450532 - DNA, 25 bp, Homo sapien
ggccagggatttgttataatcagca

SEQ ID NO: 5450533 - DNA, 25 bp, Homo sapien
tcagcataaggattcgggaaggccc

SEQ ID NO: 5450534 - DNA, 25 bp, Homo sapien
caaagtagccttcggccagggattt

SEQ ID NO: 5450535 - DNA, 25 bp, Homo sapien
ccgtctcggcggtccgagtggacct

SEQ ID NO: 5450536 - DNA, 25 bp, Homo sapien
ccaactgctaggacatggcgccttc

SEQ ID NO: 5450537 - DNA, 25 bp, Homo sapien
gacatggcgccttcgcgaaaaagct

SEQ ID NO: 5450538 - DNA, 25 bp, Homo sapien
aaacagaaactaggttgagataggg

SEQ ID NO: 5450539 - DNA, 25 bp, Homo sapien
ccacgcccgcgacttgaagcaagtg

SEQ ID NO: 5450540 - DNA, 25 bp, Homo sapien
cgacttgaagcaagtgcgcctcccg

SEQ ID NO: 5450541 - DNA, 25 bp, Homo sapien
cttgaagcaagtgcgcctcccgcgt

SEQ ID NO: 5450542 - DNA, 25 bp, Homo sapien
cccgcgacttgaagcaagtgcgcct

SEQ ID NO: 5450543 - DNA, 25 bp, Homo sapien
tctccggtttcaatgaagagtccta

SEQ ID NO: 5450544 - DNA, 25 bp, Homo sapien
taggcccattctattgctcagagaa

SEQ ID NO: 5450545 - DNA, 25 bp, Homo sapien
ctccttggcctaagtttgtccttct

SEQ ID NO: 5450546 - DNA, 25 bp, Homo sapien
agtcctagctccagacctccaactg

SEQ ID NO: 5450547 - DNA, 25 bp, Homo sapien
ctttgcacatgtttgtgctcccagc

SEQ ID NO: 5450548 - DNA, 25 bp, Homo sapien
cccagctgtacatatcaattcgtaa

SEQ ID NO: 5450549 - DNA, 25 bp, Homo sapien
gctgtacatatcaattcgtaaaaag

SEQ ID NO: 5450550 - DNA, 25 bp, Homo sapien
catatcaattcgtaaaaagccaaat

SEQ ID NO: 5450551 - DNA, 25 bp, Homo sapien
catcttcctccaagtcaggtgctca

SEQ ID NO: 5450552 - DNA, 25 bp, Homo sapien
ttcctccaagtcaggtgctcagtgt

SEQ ID NO: 5450553 - DNA, 25 bp, Homo sapien
cctccaagtcaggtgctcagtgttt

SEQ ID NO: 5450554 - DNA, 25 bp, Homo sapien
tcttcctccaagtcaggtgctcagt

SEQ ID NO: 5450555 - DNA, 25 bp, Homo sapien
ctaatgagacaaggacggtaatggg

SEQ ID NO: 5450556 - DNA, 25 bp, Homo sapien
gatactcccggtcaaacctaatgag

SEQ ID NO: 5450557 - DNA, 25 bp, Homo sapien
tggggtttgcctagaacaacataga

SEQ ID NO: 5450558 - DNA, 25 bp, Homo sapien
tagaaaggagctattaccagatcca

SEQ ID NO: 5450559 - DNA, 25 bp, Homo sapien
cagctgtcagaacgcaggcactcaa

SEQ ID NO: 5450560 - DNA, 25 bp, Homo sapien
gaacagctgtcagaacgcaggcact

SEQ ID NO: 5450561 - DNA, 25 bp, Homo sapien
agaacagctgtcagaacgcaggcac

SEQ ID NO: 5450562 - DNA, 25 bp, Homo sapien
ctgtcagaacgcaggcactcaatga

SEQ ID NO: 5450563 - DNA, 25 bp, Homo sapien
catgtgtctctatccaacgtagtca

SEQ ID NO: 5450564 - DNA, 25 bp, Homo sapien
gaacctgggtattaagagtcctatg

SEQ ID NO: 5450565 - DNA, 25 bp, Homo sapien
aaagcctcccgtgggatagaacctg

SEQ ID NO: 5450566 - DNA, 25 bp, Homo sapien
gacaatacagtcaccctgggtcaga

SEQ ID NO: 5450567 - DNA, 25 bp, Homo sapien
cctgtaatcccagctacttaggagg

SEQ ID NO: 5450568 - DNA, 25 bp, Homo sapien
acaaaaactagccagttatagtggt

SEQ ID NO: 5450569 - DNA, 25 bp, Homo sapien
ctgaggcagaagaatcacttgaacc

SEQ ID NO: 5450570 - DNA, 25 bp, Homo sapien
aactagccagttatagtggtgcaca

SEQ ID NO: 5450571 - DNA, 25 bp, Homo sapien
caagaaacctgtgtaacttacatgg

SEQ ID NO: 5450572 - DNA, 25 bp, Homo sapien
gagacccttgaattgttgacataga

SEQ ID NO: 5450573 - DNA, 25 bp, Homo sapien
gaatgattacacgtgcagccaagaa

SEQ ID NO: 5450574 - DNA, 25 bp, Homo sapien
cataaaaacacgagagatttgaggg

SEQ ID NO: 5450575 - DNA, 25 bp, Homo sapien
cactttgagaacctcatcgtgggca

SEQ ID NO: 5450576 - DNA, 25 bp, Homo sapien
gctggagcctgtagtgatgactgaa

SEQ ID NO: 5450577 - DNA, 25 bp, Homo sapien
ttttcatttgcacgtgctggagcct

SEQ ID NO: 5450578 - DNA, 25 bp, Homo sapien
gatttcttcttttagcaggcaaccg

SEQ ID NO: 5450579 - DNA, 25 bp, Homo sapien
gctagaaacttatagtatgccagtc

SEQ ID NO: 5450580 - DNA, 25 bp, Homo sapien
caaagatgaaaccagctatagttgc

SEQ ID NO: 5450581 - DNA, 25 bp, Homo sapien
gaacagtagacagcaaataatttag

SEQ ID NO: 5450582 - DNA, 25 bp, Homo sapien
gaaaccactccaattaagccacatg

SEQ ID NO: 5450583 - DNA, 25 bp, Homo sapien
ggacaaattcaatgttttaattgaa

SEQ ID NO: 5450584 - DNA, 25 bp, Homo sapien
ttggacaaattcaatgttttaattg

SEQ ID NO: 5450585 - DNA, 25 bp, Homo sapien
gacaaattcaatgttttaattgaat

SEQ ID NO: 5450586 - DNA, 25 bp, Homo sapien
tggacaaattcaatgttttaattga

SEQ ID NO: 5450587 - DNA, 25 bp, Homo sapien
ttaaaggaagcaattgatagctacg

SEQ ID NO: 5450588 - DNA, 25 bp, Homo sapien
gctacgatgcaaatgctattcttat

SEQ ID NO: 5450589 - DNA, 25 bp, Homo sapien
ctgacatattgtgagggcccaagaa

SEQ ID NO: 5450590 - DNA, 25 bp, Homo sapien
gacatattgtgagggcccaagaaaa

SEQ ID NO: 5450591 - DNA, 25 bp, Homo sapien
tccttactccatattggagccaggt

SEQ ID NO: 5450592 - DNA, 25 bp, Homo sapien
caagtctcgatgtacagtttttagg

SEQ ID NO: 5450593 - DNA, 25 bp, Homo sapien
acatgttatctcatacaagtctcga

SEQ ID NO: 5450594 - DNA, 25 bp, Homo sapien
taggaggtatgtgtctctatcccat

SEQ ID NO: 5450595 - DNA, 25 bp, Homo sapien
gtcctcatttgatgttgggtaggta

SEQ ID NO: 5450596 - DNA, 25 bp, Homo sapien
gagagaaacagaattaagtcctcat

SEQ ID NO: 5450597 - DNA, 25 bp, Homo sapien
ctcatttgatgttgggtaggtagga

SEQ ID NO: 5450598 - DNA, 25 bp, Homo sapien
taagtcctcatttgatgttgggtag

SEQ ID NO: 5450599 - DNA, 25 bp, Homo sapien
gctacctgtttgttcattgggtgaa

SEQ ID NO: 5450600 - DNA, 25 bp, Homo sapien
cactgtggcataaggtataagtcat

SEQ ID NO: 5450601 - DNA, 25 bp, Homo sapien
tcattagggaaagtatccaatacca

SEQ ID NO: 5450602 - DNA, 25 bp, Homo sapien
ggtgaaatagttgacgccacacagt

SEQ ID NO: 5450603 - DNA, 25 bp, Homo sapien
gcgcctgcagttccagctacttcgg

SEQ ID NO: 5450604 - DNA, 25 bp, Homo sapien
gcagttccagctacttcggagactg

SEQ ID NO: 5450605 - DNA, 25 bp, Homo sapien
aatcgcctgaactggggaggtggag

SEQ ID NO: 5450606 - DNA, 25 bp, Homo sapien
cctgcagttccagctacttcggaga

SEQ ID NO: 5450607 - DNA, 25 bp, Homo sapien
gccaggtggagtgctcattttcaca

SEQ ID NO: 5450608 - DNA, 25 bp, Homo sapien
catggtcttgaacccgtgaaacgcc

SEQ ID NO: 5450609 - DNA, 25 bp, Homo sapien
cagatgtcattactgaacgtcaggc

SEQ ID NO: 5450610 - DNA, 25 bp, Homo sapien
taattagaatgctgcaggcgttcct

SEQ ID NO: 5450611 - DNA, 25 bp, Homo sapien
aacaacaacaatatctacattggaa

SEQ ID NO: 5450612 - DNA, 25 bp, Homo sapien
cattggaagtcttagagaatgagga

SEQ ID NO: 5450613 - DNA, 25 bp, Homo sapien
caacaatatctacattggaagtctt

SEQ ID NO: 5450614 - DNA, 25 bp, Homo sapien
cagagatgacagggaggaattttaa

SEQ ID NO: 5450615 - DNA, 25 bp, Homo sapien
tagcccatggtcacaattatagatg

SEQ ID NO: 5450616 - DNA, 25 bp, Homo sapien
cacttatggtgctgccgtgttagcc

SEQ ID NO: 5450617 - DNA, 25 bp, Homo sapien
acttccaccgaaaggctgagtgcat

SEQ ID NO: 5450618 - DNA, 25 bp, Homo sapien
tgggagcatattcttggcaaggaaa

SEQ ID NO: 5450619 - DNA, 25 bp, Homo sapien
gagatcagagattgtcagctttgca

SEQ ID NO: 5450620 - DNA, 25 bp, Homo sapien
tattagaacagtaaatgcacttgcc

SEQ ID NO: 5450621 - DNA, 25 bp, Homo sapien
aagaggtcgcatagagtgtgaaagc

SEQ ID NO: 5450622 - DNA, 25 bp, Homo sapien
tcatagaggctagaagattgagtgg

SEQ ID NO: 5450623 - DNA, 25 bp, Homo sapien
tgtagtacacagagtgaattatggg

SEQ ID NO: 5450624 - DNA, 25 bp, Homo sapien
catttattgagatagggaacactga

SEQ ID NO: 5450625 - DNA, 25 bp, Homo sapien
tgctatagctcagggtagagatgac

SEQ ID NO: 5450626 - DNA, 25 bp, Homo sapien
gataactgggtagacagtgatgcca

SEQ ID NO: 5450627 - DNA, 25 bp, Homo sapien
gcctatacttgaggattcagaactc

SEQ ID NO: 5450628 - DNA, 25 bp, Homo sapien
tcttttctctaattgacctggatgc

SEQ ID NO: 5450629 - DNA, 25 bp, Homo sapien
ctgagttctcccacaattctcaaag

SEQ ID NO: 5450630 - DNA, 25 bp, Homo sapien
tagggagttgtagtgcttagaaaag

SEQ ID NO: 5450631 - DNA, 25 bp, Homo sapien
actgagaaagtttagcttaagcaca

SEQ ID NO: 5450632 - DNA, 25 bp, Homo sapien
ttaagcacaattgagacaaagtccc

SEQ ID NO: 5450633 - DNA, 25 bp, Homo sapien
gattctagctgtgacagttacaggc

SEQ ID NO: 5450634 - DNA, 25 bp, Homo sapien
acttctttgcagtgaatacctccac

SEQ ID NO: 5450635 - DNA, 25 bp, Homo sapien
taattccacccactgtaagggcaag

SEQ ID NO: 5450636 - DNA, 25 bp, Homo sapien
tatttttggtggactaggcttgcct

SEQ ID NO: 5450637 - DNA, 25 bp, Homo sapien
acttggcccgagtgaaataatcaga

SEQ ID NO: 5450638 - DNA, 25 bp, Homo sapien
tatcattggattttaacttggcccg

SEQ ID NO: 5450639 - DNA, 25 bp, Homo sapien
aaaccatggctgaatgcagttgagt

SEQ ID NO: 5450640 - DNA, 25 bp, Homo sapien
agttgagtgctctgtaattacatgc

SEQ ID NO: 5450641 - DNA, 25 bp, Homo sapien
ttacatgccagtgttgccatttggc

SEQ ID NO: 5450642 - DNA, 25 bp, Homo sapien
ttggctgctggtgtagtctcctgtg

SEQ ID NO: 5450643 - DNA, 25 bp, Homo sapien
gacatctattgtgaactggttgctg

SEQ ID NO: 5450644 - DNA, 25 bp, Homo sapien
ttctgacggatcaatcttaaggttg

SEQ ID NO: 5450645 - DNA, 25 bp, Homo sapien
tacatttgcaatccatctagaggtt

SEQ ID NO: 5450646 - DNA, 25 bp, Homo sapien
gcatacctactcaaatgtcatgatg

SEQ ID NO: 5450647 - DNA, 25 bp, Homo sapien
tgaattgtaagagccctgaggacag

SEQ ID NO: 5450648 - DNA, 25 bp, Homo sapien
gacaggaaggaggtttatgattgtc

SEQ ID NO: 5450649 - DNA, 25 bp, Homo sapien
atgaattgtaagagccctgaggaca

SEQ ID NO: 5450650 - DNA, 25 bp, Homo sapien
caggaaggaggtttatgattgtcat

SEQ ID NO: 5450651 - DNA, 25 bp, Homo sapien
ccttagagctgtgaaactcttcttc

SEQ ID NO: 5450652 - DNA, 25 bp, Homo sapien
gatttggaattccttatctgaaggg

SEQ ID NO: 5450653 - DNA, 25 bp, Homo sapien
gctttgttgttgataggctctgacc

SEQ ID NO: 5450654 - DNA, 25 bp, Homo sapien
ggagagtatacatgcattgccagct

SEQ ID NO: 5450655 - DNA, 25 bp, Homo sapien
tccggcgtatttacaacagctgagg

SEQ ID NO: 5450656 - DNA, 25 bp, Homo sapien
cagctgaggatagcgtgccctgaag

SEQ ID NO: 5450657 - DNA, 25 bp, Homo sapien
agcctctgtattgagcctgctgaca

SEQ ID NO: 5450658 - DNA, 25 bp, Homo sapien
cctgctgacagagacattccggcgt

SEQ ID NO: 5450659 - DNA, 25 bp, Homo sapien
taaatattgcaacagtttcatgctc

SEQ ID NO: 5450660 - DNA, 25 bp, Homo sapien
tcctctgggatctttattaaaacga

SEQ ID NO: 5450661 - DNA, 25 bp, Homo sapien
tcaagggtagaggttttagatttca

SEQ ID NO: 5450662 - DNA, 25 bp, Homo sapien
gctctttggagaatgactcctttag

SEQ ID NO: 5450663 - DNA, 25 bp, Homo sapien
cataaaagtctctggtgaggaaata

SEQ ID NO: 5450664 - DNA, 25 bp, Homo sapien
cttcataaaagtctctggtgaggaa

SEQ ID NO: 5450665 - DNA, 25 bp, Homo sapien
aagtctctggtgaggaaatattcca

SEQ ID NO: 5450666 - DNA, 25 bp, Homo sapien
aaagtctctggtgaggaaatattcc

SEQ ID NO: 5450667 - DNA, 25 bp, Homo sapien
cttgtgccttaattccttctgccat

SEQ ID NO: 5450668 - DNA, 25 bp, Homo sapien
aatgtgactctgaaccagtttggtc

SEQ ID NO: 5450669 - DNA, 25 bp, Homo sapien
taatgtgactctgaaccagtttggt

SEQ ID NO: 5450670 - DNA, 25 bp, Homo sapien
cttaatgtgactctgaaccagtttg

SEQ ID NO: 5450671 - DNA, 25 bp, Homo sapien
tgtgactctgaaccagtttggtcat

SEQ ID NO: 5450672 - DNA, 25 bp, Homo sapien
tctgggacttgtagttgattaaatt

SEQ ID NO: 5450673 - DNA, 25 bp, Homo sapien
ttcacagcagtttgctctcttccaa

SEQ ID NO: 5450674 - DNA, 25 bp, Homo sapien
attcacagcagtttgctctcttcca

SEQ ID NO: 5450675 - DNA, 25 bp, Homo sapien
cattttgccaaaccgtggtactgaa

SEQ ID NO: 5450676 - DNA, 25 bp, Homo sapien
caaaccgtggtactgaacacagtct

SEQ ID NO: 5450677 - DNA, 25 bp, Homo sapien
tgccaaaccgtggtactgaacacag

SEQ ID NO: 5450678 - DNA, 25 bp, Homo sapien
gtggtactgaacacagtcttttggg

SEQ ID NO: 5450679 - DNA, 25 bp, Homo sapien
ttgtaattgcttgccagtcacaggc

SEQ ID NO: 5450680 - DNA, 25 bp, Homo sapien
ttccctgtggaagagtcagcaaaca

SEQ ID NO: 5450681 - DNA, 25 bp, Homo sapien
tcacaccaggttattagaggaaaca

SEQ ID NO: 5450682 - DNA, 25 bp, Homo sapien
ccaggcaggctttgtcaagattaac

SEQ ID NO: 5450683 - DNA, 25 bp, Homo sapien
tagcagttttacttctgttatgcca

SEQ ID NO: 5450684 - DNA, 25 bp, Homo sapien
catacttcagcatagatatctttgc

SEQ ID NO: 5450685 - DNA, 25 bp, Homo sapien
ggtggctccacacaaactagcagtt

SEQ ID NO: 5450686 - DNA, 25 bp, Homo sapien
gccctgagacaagggtctagcttac

SEQ ID NO: 5450687 - DNA, 25 bp, Homo sapien
ttagattgcttgtagccattttcct

SEQ ID NO: 5450688 - DNA, 25 bp, Homo sapien
tagattgcttgtagccattttcctc

SEQ ID NO: 5450689 - DNA, 25 bp, Homo sapien
ttggcttgtgcctttaatttgatcc

SEQ ID NO: 5450690 - DNA, 25 bp, Homo sapien
gaaagcgttggcttgtgcctttaat

SEQ ID NO: 5450691 - DNA, 25 bp, Homo sapien
ttaaaggaaagcgttggcttgtgcc

SEQ ID NO: 5450692 - DNA, 25 bp, Homo sapien
tttgatcctgcagacaagtggatga

SEQ ID NO: 5450693 - DNA, 25 bp, Homo sapien
tctctttggcgtggataccaataac

SEQ ID NO: 5450694 - DNA, 25 bp, Homo sapien
ataaccttgcttcacgttcttgttt

SEQ ID NO: 5450695 - DNA, 25 bp, Homo sapien
accttgcttcacgttcttgtttctc

SEQ ID NO: 5450696 - DNA, 25 bp, Homo sapien
ctctttggcgtggataccaataacc

SEQ ID NO: 5450697 - DNA, 25 bp, Homo sapien
ggagggaacagtaattacaagccat

SEQ ID NO: 5450698 - DNA, 25 bp, Homo sapien
aactcagaaggccatcggcatagac

SEQ ID NO: 5450699 - DNA, 25 bp, Homo sapien
aaggccatcggcatagacaaacatt

SEQ ID NO: 5450700 - DNA, 25 bp, Homo sapien
tatacagtttaaggagggaacagta

SEQ ID NO: 5450701 - DNA, 25 bp, Homo sapien
tacttgtagcaatactaaacatttc

SEQ ID NO: 5450702 - DNA, 25 bp, Homo sapien
agtacttgtagcaatactaaacatt

SEQ ID NO: 5450703 - DNA, 25 bp, Homo sapien
acttgtagcaatactaaacatttca

SEQ ID NO: 5450704 - DNA, 25 bp, Homo sapien
gtacttgtagcaatactaaacattt

SEQ ID NO: 5450705 - DNA, 25 bp, Homo sapien
gcattctgtttttctttctttgtcc

SEQ ID NO: 5450706 - DNA, 25 bp, Homo sapien
ttctgcattctgtttttctttcttt

SEQ ID NO: 5450707 - DNA, 25 bp, Homo sapien
tgcattctgtttttctttctttgtc

SEQ ID NO: 5450708 - DNA, 25 bp, Homo sapien
tctgcattctgtttttctttctttg

SEQ ID NO: 5450709 - DNA, 25 bp, Homo sapien
aaaggtctggaaacacggcaacact

SEQ ID NO: 5450710 - DNA, 25 bp, Homo sapien
aaacttctttcagccttgagataag

SEQ ID NO: 5450711 - DNA, 25 bp, Homo sapien
caagtgctgaggcttgatgtattgt

SEQ ID NO: 5450712 - DNA, 25 bp, Homo sapien
tctgctctgttgtctaataatatga

SEQ ID NO: 5450713 - DNA, 25 bp, Homo sapien
tattccactttcattactccgggac

SEQ ID NO: 5450714 - DNA, 25 bp, Homo sapien
tactccgggacacccaccatgtgaa

SEQ ID NO: 5450715 - DNA, 25 bp, Homo sapien
attactccgggacacccaccatgtg

SEQ ID NO: 5450716 - DNA, 25 bp, Homo sapien
ttccactttcattactccgggacac

SEQ ID NO: 5450717 - DNA, 25 bp, Homo sapien
tgcacaattgctttcagctgatctg

SEQ ID NO: 5450718 - DNA, 25 bp, Homo sapien
ctgatctgttttccccgcaatagat

SEQ ID NO: 5450719 - DNA, 25 bp, Homo sapien
cattgctcttggtccggtatgctgt

SEQ ID NO: 5450720 - DNA, 25 bp, Homo sapien
gtggcgaaccttttgcacaattgct

SEQ ID NO: 5450721 - DNA, 25 bp, Homo sapien
taatttttgccaatcatcccctata

SEQ ID NO: 5450722 - DNA, 25 bp, Homo sapien
aatttttgccaatcatcccctataa

SEQ ID NO: 5450723 - DNA, 25 bp, Homo sapien
atttttgccaatcatcccctataat

SEQ ID NO: 5450724 - DNA, 25 bp, Homo sapien
tgtgttctcctcgaactggacttgt

SEQ ID NO: 5450725 - DNA, 25 bp, Homo sapien
tcctcgaactggacttgtcttatta

SEQ ID NO: 5450726 - DNA, 25 bp, Homo sapien
caaaactcagatattctcccacaca

SEQ ID NO: 5450727 - DNA, 25 bp, Homo sapien
caccacttccctattgttctgtcta

SEQ ID NO: 5450728 - DNA, 25 bp, Homo sapien
cttgacatttccaaattgtaggtcc

SEQ ID NO: 5450729 - DNA, 25 bp, Homo sapien
tgacatttccaaattgtaggtccat

SEQ ID NO: 5450730 - DNA, 25 bp, Homo sapien
ttgacatttccaaattgtaggtcca

SEQ ID NO: 5450731 - DNA, 25 bp, Homo sapien
tctgtgaactttggagtagtagttt

SEQ ID NO: 5450732 - DNA, 25 bp, Homo sapien
tgaactttggagtagtagtttgcac

SEQ ID NO: 5450733 - DNA, 25 bp, Homo sapien
tatctgtgaactttggagtagtagt

SEQ ID NO: 5450734 - DNA, 25 bp, Homo sapien
tgtgaactttggagtagtagtttgc

SEQ ID NO: 5450735 - DNA, 25 bp, Homo sapien
ttgtaaatttgcattgtaggcagaa

SEQ ID NO: 5450736 - DNA, 25 bp, Homo sapien
cagaagtttcgattggagatttcag

SEQ ID NO: 5450737 - DNA, 25 bp, Homo sapien
ttgtaggcagaagtttcgattggag

SEQ ID NO: 5450738 - DNA, 25 bp, Homo sapien
agtttcgattggagatttcagttta

SEQ ID NO: 5450739 - DNA, 25 bp, Homo sapien
ctaaggagcagaaaaatgtatttct

SEQ ID NO: 5450740 - DNA, 25 bp, Homo sapien
tacgtgtaacgtaggtgttgagatg

SEQ ID NO: 5450741 - DNA, 25 bp, Homo sapien
cccgttcagatctcttcggaaaaag

SEQ ID NO: 5450742 - DNA, 25 bp, Homo sapien
tgctacatacatatccagctaaagc

SEQ ID NO: 5450743 - DNA, 25 bp, Homo sapien
cagctaaagctttgatggcagtttt

SEQ ID NO: 5450744 - DNA, 25 bp, Homo sapien
gttgtgagataacttgaaagctgaa

SEQ ID NO: 5450745 - DNA, 25 bp, Homo sapien
tatactgtactttcgatcctcatac

SEQ ID NO: 5450746 - DNA, 25 bp, Homo sapien
aatgcctagctgacttagttgtgag

SEQ ID NO: 5450747 - DNA, 25 bp, Homo sapien
gaaagctgaaagactgctgttacta

SEQ ID NO: 5450748 - DNA, 25 bp, Homo sapien
agggaattaggctgcctttttcatt

SEQ ID NO: 5450749 - DNA, 25 bp, Homo sapien
gaattaggctgcctttttcattctg

SEQ ID NO: 5450750 - DNA, 25 bp, Homo sapien
ttagggaattaggctgcctttttca

SEQ ID NO: 5450751 - DNA, 25 bp, Homo sapien
attaggctgcctttttcattctgtt

SEQ ID NO: 5450752 - DNA, 25 bp, Homo sapien
caacttcaccaactttgggcagctg

SEQ ID NO: 5450753 - DNA, 25 bp, Homo sapien
tcgaccttgctctccacttgactgt

SEQ ID NO: 5450754 - DNA, 25 bp, Homo sapien
aacactgttctctagataatcgacc

SEQ ID NO: 5450755 - DNA, 25 bp, Homo sapien
ttatctaccaaacactgttctctag

SEQ ID NO: 5450756 - DNA, 25 bp, Homo sapien
tgaaaaagggaagctgcaccagaca

SEQ ID NO: 5450757 - DNA, 25 bp, Homo sapien
tattctgaacaatagttgctactat

SEQ ID NO: 5450758 - DNA, 25 bp, Homo sapien
gatacgaaggcaatattctgaacaa

SEQ ID NO: 5450759 - DNA, 25 bp, Homo sapien
aatttttctccaatgatacgaaggc

SEQ ID NO: 5450760 - DNA, 25 bp, Homo sapien
gttgctactatttcaggacttatag

SEQ ID NO: 5450761 - DNA, 25 bp, Homo sapien
tgtggcatgtggtgggctctcattg

SEQ ID NO: 5450762 - DNA, 25 bp, Homo sapien
tttggttatcatcaaggaggacaag

SEQ ID NO: 5450763 - DNA, 25 bp, Homo sapien
ttcaataagggaccgcatcacctgc

SEQ ID NO: 5450764 - DNA, 25 bp, Homo sapien
tctttcaggaaattcaataagggac

SEQ ID NO: 5450765 - DNA, 25 bp, Homo sapien
agcacccttcccatcatcgtgacca

SEQ ID NO: 5450766 - DNA, 25 bp, Homo sapien
tcccatcatcgtgaccacattcact

SEQ ID NO: 5450767 - DNA, 25 bp, Homo sapien
tcatcgtgaccacattcactcatgt

SEQ ID NO: 5450768 - DNA, 25 bp, Homo sapien
ccttcccatcatcgtgaccacattc

SEQ ID NO: 5450769 - DNA, 25 bp, Homo sapien
tgtcagacatgcaagggtaagggcc

SEQ ID NO: 5450770 - DNA, 25 bp, Homo sapien
catgcaagggtaagggcctacatta

SEQ ID NO: 5450771 - DNA, 25 bp, Homo sapien
gggcctacgttattgtcagacatgc

SEQ ID NO: 5450772 - DNA, 25 bp, Homo sapien
cacactctgggcctacgttattgtc

SEQ ID NO: 5450773 - DNA, 25 bp, Homo sapien
aaagcgtgcacatttgcatggtgac

SEQ ID NO: 5450774 - DNA, 25 bp, Homo sapien
agcttgtctgggtgcaaagcgtgca

SEQ ID NO: 5450775 - DNA, 25 bp, Homo sapien
tgtcagatttcaggccatttctctg

SEQ ID NO: 5450776 - DNA, 25 bp, Homo sapien
aaagaagggtcagaacttgtcacag

SEQ ID NO: 5450777 - DNA, 25 bp, Homo sapien
ctgcctgcatcttgaatttcaatgt

SEQ ID NO: 5450778 - DNA, 25 bp, Homo sapien
tctctgcctgcatcttgaatttcaa

SEQ ID NO: 5450779 - DNA, 25 bp, Homo sapien
atctggtctatgtcctctttctctg

SEQ ID NO: 5450780 - DNA, 25 bp, Homo sapien
tctgcctgcatcttgaatttcaatg

SEQ ID NO: 5450781 - DNA, 25 bp, Homo sapien
ttcctgatttgcattgtctttgggc

SEQ ID NO: 5450782 - DNA, 25 bp, Homo sapien
cctgatttgcattgtctttgggcat

SEQ ID NO: 5450783 - DNA, 25 bp, Homo sapien
ttttttcctgatttgcattgtcttt

SEQ ID NO: 5450784 - DNA, 25 bp, Homo sapien
ctttttttcctgatttgcattgtct

SEQ ID NO: 5450785 - DNA, 25 bp, Homo sapien
tggcagcaagtgttgatttgtatat

SEQ ID NO: 5450786 - DNA, 25 bp, Homo sapien
tatatgcaaataagatatcttttcc

SEQ ID NO: 5450787 - DNA, 25 bp, Homo sapien
ttgtatatgcaaataagatatcttt

SEQ ID NO: 5450788 - DNA, 25 bp, Homo sapien
tgagtcaggtcatcagcaaatggca

SEQ ID NO: 5450789 - DNA, 25 bp, Homo sapien
ctaaggattattaactacaagaaca

SEQ ID NO: 5450790 - DNA, 25 bp, Homo sapien
actacaagaacaattgaagcatgga

SEQ ID NO: 5450791 - DNA, 25 bp, Homo sapien
ttgaagcatggaatttcagagtcat

SEQ ID NO: 5450792 - DNA, 25 bp, Homo sapien
tattaactacaagaacaattgaagc

SEQ ID NO: 5450793 - DNA, 25 bp, Homo sapien
tggaactcacagcaccaaagtattc

SEQ ID NO: 5450794 - DNA, 25 bp, Homo sapien
gaactcacagcaccaaagtattcat

SEQ ID NO: 5450795 - DNA, 25 bp, Homo sapien
actcacagcaccaaagtattcattt

SEQ ID NO: 5450796 - DNA, 25 bp, Homo sapien
ggaactcacagcaccaaagtattca

SEQ ID NO: 5450797 - DNA, 25 bp, Homo sapien
gatttagtcactcaaagatatgttg

SEQ ID NO: 5450798 - DNA, 25 bp, Homo sapien
ggcctcctgtgttgcatatctgtaa

SEQ ID NO: 5450799 - DNA, 25 bp, Homo sapien
cagctcattcagaacacttttagga

SEQ ID NO: 5450800 - DNA, 25 bp, Homo sapien
tattatactcactccaaaacaacat

SEQ ID NO: 5450801 - DNA, 25 bp, Homo sapien
aaattggaatgggatttgcagactt

SEQ ID NO: 5450802 - DNA, 25 bp, Homo sapien
ttggaatgggatttgcagacttggc

SEQ ID NO: 5450803 - DNA, 25 bp, Homo sapien
cttggcaattgtgattccatgcacc

SEQ ID NO: 5450804 - DNA, 25 bp, Homo sapien
tgcaccaccgataggttttgcatcc

SEQ ID NO: 5450805 - DNA, 25 bp, Homo sapien
tattgaggcgacctacactgaggtg

SEQ ID NO: 5450806 - DNA, 25 bp, Homo sapien
tggtggctataatagcacctacaat

SEQ ID NO: 5450807 - DNA, 25 bp, Homo sapien
gagagctgcttgaatgtattgaggc

SEQ ID NO: 5450808 - DNA, 25 bp, Homo sapien
tcttaagcagaaatcatgagagctg

SEQ ID NO: 5450809 - DNA, 25 bp, Homo sapien
ggaactggaatttgctgaagcccac

SEQ ID NO: 5450810 - DNA, 25 bp, Homo sapien
tgaagcccactgtgatcgacagctg

SEQ ID NO: 5450811 - DNA, 25 bp, Homo sapien
gacagctgccgaaaaactgaatgta

SEQ ID NO: 5450812 - DNA, 25 bp, Homo sapien
cattgtttagcacaagttcccatgt

SEQ ID NO: 5450813 - DNA, 25 bp, Homo sapien
tggagaggctctcagaatgactggt

SEQ ID NO: 5450814 - DNA, 25 bp, Homo sapien
ggagaggctctcagaatgactggtg

SEQ ID NO: 5450815 - DNA, 25 bp, Homo sapien
ggcggaggaacttgccacattcttc

SEQ ID NO: 5450816 - DNA, 25 bp, Homo sapien
tccaggctttcagggcggaggaact

SEQ ID NO: 5450817 - DNA, 25 bp, Homo sapien
gctttcagggcggaggaacttgcca

SEQ ID NO: 5450818 - DNA, 25 bp, Homo sapien
tctctccaggctttcagggcggagg

SEQ ID NO: 5450819 - DNA, 25 bp, Homo sapien
caggtgcttgcaagaatctcatgca

SEQ ID NO: 5450820 - DNA, 25 bp, Homo sapien
ccggtacaattgaattgaggagctc

SEQ ID NO: 5450821 - DNA, 25 bp, Homo sapien
gaggagctctccagttgtatctgca

SEQ ID NO: 5450822 - DNA, 25 bp, Homo sapien
gcagaaaactagagatccccggtac

SEQ ID NO: 5450823 - DNA, 25 bp, Homo sapien
actgtaccctctgactctttggtca

SEQ ID NO: 5450824 - DNA, 25 bp, Homo sapien
cctccagtggagagtatcattgtct

SEQ ID NO: 5450825 - DNA, 25 bp, Homo sapien
gtcagtacctgcacccagtgtcagt

SEQ ID NO: 5450826 - DNA, 25 bp, Homo sapien
tctttggtcacaaagtcagtacctg

SEQ ID NO: 5450827 - DNA, 25 bp, Homo sapien
tgtaggcaagtggaggacagtggag

SEQ ID NO: 5450828 - DNA, 25 bp, Homo sapien
aaagagatcttttgcaagaagcatg

SEQ ID NO: 5450829 - DNA, 25 bp, Homo sapien
ggatgaaagagatcttttgcaagaa

SEQ ID NO: 5450830 - DNA, 25 bp, Homo sapien
tgaaagagatcttttgcaagaagca

SEQ ID NO: 5450831 - DNA, 25 bp, Homo sapien
agagatcttttgcaagaagcatgtt

SEQ ID NO: 5450832 - DNA, 25 bp, Homo sapien
aaggatcctgctttaatgccttcca

SEQ ID NO: 5450833 - DNA, 25 bp, Homo sapien
agattttggcttccccactgtccct

SEQ ID NO: 5450834 - DNA, 25 bp, Homo sapien
tgtccctgcaaccacttctaaagct

SEQ ID NO: 5450835 - DNA, 25 bp, Homo sapien
aggtgcatcaggctataaacaggag

SEQ ID NO: 5450836 - DNA, 25 bp, Homo sapien
gattttgtcgttccaataaagacat

SEQ ID NO: 5450837 - DNA, 25 bp, Homo sapien
tcgattttgtcgttccaataaagac

SEQ ID NO: 5450838 - DNA, 25 bp, Homo sapien
cttcgattttgtcgttccaataaag

SEQ ID NO: 5450839 - DNA, 25 bp, Homo sapien
cgattttgtcgttccaataaagaca

SEQ ID NO: 5450840 - DNA, 25 bp, Homo sapien
cctttttggccgataggatgctgga

SEQ ID NO: 5450841 - DNA, 25 bp, Homo sapien
gccgataggatgctggatgctccct

SEQ ID NO: 5450842 - DNA, 25 bp, Homo sapien
cttctccctttttggccgataggat

SEQ ID NO: 5450843 - DNA, 25 bp, Homo sapien
taggatgctggatgctcccttgcat

SEQ ID NO: 5450844 - DNA, 25 bp, Homo sapien
acccagggcaggccttttcagtgca

SEQ ID NO: 5450845 - DNA, 25 bp, Homo sapien
gactagatcatctgtcatgtgaccc

SEQ ID NO: 5450846 - DNA, 25 bp, Homo sapien
cccgggagagaatctgactagatca

SEQ ID NO: 5450847 - DNA, 25 bp, Homo sapien
ttgaatgattgtcaaaattcccggg

SEQ ID NO: 5450848 - DNA, 25 bp, Homo sapien
atgagctacagggaagagtccccta

SEQ ID NO: 5450849 - DNA, 25 bp, Homo sapien
agctacagggaagagtcccctacca

SEQ ID NO: 5450850 - DNA, 25 bp, Homo sapien
tacacaataacggtatgagcaggta

SEQ ID NO: 5450851 - DNA, 25 bp, Homo sapien
caataacggtatgagcaggtagcag

SEQ ID NO: 5450852 - DNA, 25 bp, Homo sapien
tttgggttcacatgtggccctggga

SEQ ID NO: 5450853 - DNA, 25 bp, Homo sapien
cctcctggattgactgaaatcaggg

SEQ ID NO: 5450854 - DNA, 25 bp, Homo sapien
tgaggataccagaaccctcctggat

SEQ ID NO: 5450855 - DNA, 25 bp, Homo sapien
aatcaggggtgattgtccattttct

SEQ ID NO: 5450856 - DNA, 25 bp, Homo sapien
gatgaactagtcatacaccatggga

SEQ ID NO: 5450857 - DNA, 25 bp, Homo sapien
tatggaatgaggcaaagcagttcgc

SEQ ID NO: 5450858 - DNA, 25 bp, Homo sapien
gagtgctatggttgtagtcccctca

SEQ ID NO: 5450859 - DNA, 25 bp, Homo sapien
tatcctattgtgtaagcgagtgcag

SEQ ID NO: 5450860 - DNA, 25 bp, Homo sapien
tactaatactatgcagaaaaccagg

SEQ ID NO: 5450861 - DNA, 25 bp, Homo sapien
tcatctagtagcagagcctcacaca

SEQ ID NO: 5450862 - DNA, 25 bp, Homo sapien
caggagctgcttggtagtctaacac

SEQ ID NO: 5450863 - DNA, 25 bp, Homo sapien
gctacaattggcctctggaatctga

SEQ ID NO: 5450864 - DNA, 25 bp, Homo sapien
ctctgaatggataggagagccctga

SEQ ID NO: 5450865 - DNA, 25 bp, Homo sapien
gagtgattctgctttctatagccca

SEQ ID NO: 5450866 - DNA, 25 bp, Homo sapien
gagctattagattgtggcccctgaa

SEQ ID NO: 5450867 - DNA, 25 bp, Homo sapien
tatagtatccaaaaagagggctgtg

SEQ ID NO: 5450868 - DNA, 25 bp, Homo sapien
ggtagacatacccaatccagtgtgt

SEQ ID NO: 5450869 - DNA, 25 bp, Homo sapien
tgtgctggcctctcatcatagtccc

SEQ ID NO: 5450870 - DNA, 25 bp, Homo sapien
catagtccctggataccgttgcaag

SEQ ID NO: 5450871 - DNA, 25 bp, Homo sapien
gaacaaatttccttgcgtagcaaag

SEQ ID NO: 5450872 - DNA, 25 bp, Homo sapien
tgaccaacccatgcagagaaatgaa

SEQ ID NO: 5450873 - DNA, 25 bp, Homo sapien
caaccaacggcctatcaagtagtgt

SEQ ID NO: 5450874 - DNA, 25 bp, Homo sapien
tagtttgatagtaggcagcattgcc

SEQ ID NO: 5450875 - DNA, 25 bp, Homo sapien
tcctgcagataggaacagatagcat

SEQ ID NO: 5450876 - DNA, 25 bp, Homo sapien
aggaagaccaccagagaaagagagg

SEQ ID NO: 5450877 - DNA, 25 bp, Homo sapien
tgtctctccacctaaaaaaccacaa

SEQ ID NO: 5450878 - DNA, 25 bp, Homo sapien
cttggggtagaaggaagaccaccag

SEQ ID NO: 5450879 - DNA, 25 bp, Homo sapien
gtgtctctccacctaaaaaaccaca

SEQ ID NO: 5450880 - DNA, 25 bp, Homo sapien
tgtgctgtactcctgcaggtagtct

SEQ ID NO: 5450881 - DNA, 25 bp, Homo sapien
tagtcagggttgtcaaacgctttct

SEQ ID NO: 5450882 - DNA, 25 bp, Homo sapien
tcgggattatccaatgcttgaaggt

SEQ ID NO: 5450883 - DNA, 25 bp, Homo sapien
ggattctctgccacaataggccgga

SEQ ID NO: 5450884 - DNA, 25 bp, Homo sapien
aatctcagcagtagcaccctgtgcc

SEQ ID NO: 5450885 - DNA, 25 bp, Homo sapien
cgtagggtgccattacagcaggagt

SEQ ID NO: 5450886 - DNA, 25 bp, Homo sapien
tgtacctctgggtgctactgtcctc

SEQ ID NO: 5450887 - DNA, 25 bp, Homo sapien
tgtagggcacagacactccttgttc

SEQ ID NO: 5450888 - DNA, 25 bp, Homo sapien
cctgacatgggggtgtaggcaggag

SEQ ID NO: 5450889 - DNA, 25 bp, Homo sapien
gaggagggctgtgtccaatttcact

SEQ ID NO: 5450890 - DNA, 25 bp, Homo sapien
caggaggagggctgtgtccaatttc

SEQ ID NO: 5450891 - DNA, 25 bp, Homo sapien
tcctgacatgggggtgtaggcagga

SEQ ID NO: 5450892 - DNA, 25 bp, Homo sapien
ctgttctctaatcaccttaaatata

SEQ ID NO: 5450893 - DNA, 25 bp, Homo sapien
gttctctaatcaccttaaatatagg

SEQ ID NO: 5450894 - DNA, 25 bp, Homo sapien
tctctaatcaccttaaatataggca

SEQ ID NO: 5450895 - DNA, 25 bp, Homo sapien
ctctaatcaccttaaatataggcat

SEQ ID NO: 5450896 - DNA, 25 bp, Homo sapien
ttttaatattggaaagaatgacagc

SEQ ID NO: 5450897 - DNA, 25 bp, Homo sapien
agctgcaagtaaattggttgagtaa

SEQ ID NO: 5450898 - DNA, 25 bp, Homo sapien
agaatgacagctgcaagtaaattgg

SEQ ID NO: 5450899 - DNA, 25 bp, Homo sapien
acttttaatattggaaagaatgaca

SEQ ID NO: 5450900 - DNA, 25 bp, Homo sapien
tgtttggttggttctagcaactttc

SEQ ID NO: 5450901 - DNA, 25 bp, Homo sapien
tggttggttctagcaactttctctt

SEQ ID NO: 5450902 - DNA, 25 bp, Homo sapien
catttccattagcatgttgtcataa

SEQ ID NO: 5450903 - DNA, 25 bp, Homo sapien
catgttgtcataattgaaccttttc

SEQ ID NO: 5450904 - DNA, 25 bp, Homo sapien
tagataaaccaactgtaggcagatg

SEQ ID NO: 5450905 - DNA, 25 bp, Homo sapien
caaatgggtgagtgattctgaatgc

SEQ ID NO: 5450906 - DNA, 25 bp, Homo sapien
ggataatcatggctaaatgctacag

SEQ ID NO: 5450907 - DNA, 25 bp, Homo sapien
aagtggtacatatcacctaactgca

SEQ ID NO: 5450908 - DNA, 25 bp, Homo sapien
tataattaggtacatagataagaga

SEQ ID NO: 5450909 - DNA, 25 bp, Homo sapien
ctagcatactcagttgacagcagat

SEQ ID NO: 5450910 - DNA, 25 bp, Homo sapien
tataccccattatcctttatcctta

SEQ ID NO: 5450911 - DNA, 25 bp, Homo sapien
caacgttagtatttacgtaattatg

SEQ ID NO: 5450912 - DNA, 25 bp, Homo sapien
tcatgtattaatagtaacgttaacg

SEQ ID NO: 5450913 - DNA, 25 bp, Homo sapien
ttcatgtattaatagtaacgttaac

SEQ ID NO: 5450914 - DNA, 25 bp, Homo sapien
catgtattaatagtaacgttaacgt

SEQ ID NO: 5450915 - DNA, 25 bp, Homo sapien
cccactctgcaacatccaactgata

SEQ ID NO: 5450916 - DNA, 25 bp, Homo sapien
catccaactgatacccaaatcctgt

SEQ ID NO: 5450917 - DNA, 25 bp, Homo sapien
tctgcaacatccaactgatacccaa

SEQ ID NO: 5450918 - DNA, 25 bp, Homo sapien
gcaacatccaactgatacccaaatc

SEQ ID NO: 5450919 - DNA, 25 bp, Homo sapien
gatttgaattacactgcttgtagca

SEQ ID NO: 5450920 - DNA, 25 bp, Homo sapien
tacactgcttgtagcaaactccgag

SEQ ID NO: 5450921 - DNA, 25 bp, Homo sapien
tagcaaactccgaggatgtaaaggg

SEQ ID NO: 5450922 - DNA, 25 bp, Homo sapien
tcactgatttgaattacactgcttg

SEQ ID NO: 5450923 - DNA, 25 bp, Homo sapien
tgggaagcttcatacgatcatcacc

SEQ ID NO: 5450924 - DNA, 25 bp, Homo sapien
tcagcatccatcatatcttccaaat

SEQ ID NO: 5450925 - DNA, 25 bp, Homo sapien
tgttgaaagcctgagggaccaagta

SEQ ID NO: 5450926 - DNA, 25 bp, Homo sapien
tattcgagtcaattcttgctctgga

SEQ ID NO: 5450927 - DNA, 25 bp, Homo sapien
aactaggtatctttgagggtctcga

SEQ ID NO: 5450928 - DNA, 25 bp, Homo sapien
agggtctcgagccatccttgaaaac

SEQ ID NO: 5450929 - DNA, 25 bp, Homo sapien
taaatttaggtctactgtcagcatc

SEQ ID NO: 5450930 - DNA, 25 bp, Homo sapien
tctactgtcagcatcaatcatccaa

SEQ ID NO: 5450931 - DNA, 25 bp, Homo sapien
acacagtgaaaatgtcactatattc

SEQ ID NO: 5450932 - DNA, 25 bp, Homo sapien
atttacacagtgaaaatgtcactat

SEQ ID NO: 5450933 - DNA, 25 bp, Homo sapien
agtgaaaatgtcactatattcgtaa

SEQ ID NO: 5450934 - DNA, 25 bp, Homo sapien
cacagtgaaaatgtcactatattcg

SEQ ID NO: 5450935 - DNA, 25 bp, Homo sapien
cgttggaattccatcatagggtttt

SEQ ID NO: 5450936 - DNA, 25 bp, Homo sapien
gaccatgaccatgtaaacgtcaata

SEQ ID NO: 5450937 - DNA, 25 bp, Homo sapien
gaggctgaggcaaacgttctccttt

SEQ ID NO: 5450938 - DNA, 25 bp, Homo sapien
aaatcagggatttctcgcgttggaa

SEQ ID NO: 5450939 - DNA, 25 bp, Homo sapien
acgtcactctgatgggtgaatttcc

SEQ ID NO: 5450940 - DNA, 25 bp, Homo sapien
atagctccaaacgtcactctgatgg

SEQ ID NO: 5450941 - DNA, 25 bp, Homo sapien
cactctgatgggtgaatttcctgta

SEQ ID NO: 5450942 - DNA, 25 bp, Homo sapien
ccaaacgtcactctgatgggtgaat

SEQ ID NO: 5450943 - DNA, 25 bp, Homo sapien
gaagagaagacacattgaaagtaat

SEQ ID NO: 5450944 - DNA, 25 bp, Homo sapien
tacgggcaaggagttagcagacttt

SEQ ID NO: 5450945 - DNA, 25 bp, Homo sapien
gaatcatggtattcagtgaaaggga

SEQ ID NO: 5450946 - DNA, 25 bp, Homo sapien
tttccctacgggcaaggagttagca

SEQ ID NO: 5450947 - DNA, 25 bp, Homo sapien
tcccgatgaacgagtcgtctttctt

SEQ ID NO: 5450948 - DNA, 25 bp, Homo sapien
aagagtctggctagcccaaaatctg

SEQ ID NO: 5450949 - DNA, 25 bp, Homo sapien
cacatggtttggagatttcactaag

SEQ ID NO: 5450950 - DNA, 25 bp, Homo sapien
gacattacgggctgccaaatcccga

SEQ ID NO: 5450951 - DNA, 25 bp, Homo sapien
tgcaccaagatatgcaattctgtat

SEQ ID NO: 5450952 - DNA, 25 bp, Homo sapien
gcataatgtatgagggacagtggtg

SEQ ID NO: 5450953 - DNA, 25 bp, Homo sapien
ttgcaccaagatatgcaattctgta

SEQ ID NO: 5450954 - DNA, 25 bp, Homo sapien
tgattttggcaaccacttgcactga

SEQ ID NO: 5450955 - DNA, 25 bp, Homo sapien
tgaggtcacaacacttgcccagcaa

SEQ ID NO: 5450956 - DNA, 25 bp, Homo sapien
tgtgggctccaatcagtgcaataga

SEQ ID NO: 5450957 - DNA, 25 bp, Homo sapien
tagcctactgtacaatgagcctttg

SEQ ID NO: 5450958 - DNA, 25 bp, Homo sapien
gaacatacataataggcactcgcca

SEQ ID NO: 5450959 - DNA, 25 bp, Homo sapien
gaattaatgatgaggcactgcgtag

SEQ ID NO: 5450960 - DNA, 25 bp, Homo sapien
taatctaaagttgcaaccactctgt

SEQ ID NO: 5450961 - DNA, 25 bp, Homo sapien
cgtagagttatgcaatactgtggcc

SEQ ID NO: 5450962 - DNA, 25 bp, Homo sapien
agtattcatgtaaaccattttggag

SEQ ID NO: 5450963 - DNA, 25 bp, Homo sapien
ctttagtattcatgtaaaccatttt

SEQ ID NO: 5450964 - DNA, 25 bp, Homo sapien
ttagtattcatgtaaaccattttgg

SEQ ID NO: 5450965 - DNA, 25 bp, Homo sapien
tattcatgtaaaccattttggagat

SEQ ID NO: 5450966 - DNA, 25 bp, Homo sapien
gcagagacctgatcccgcatgtaat

SEQ ID NO: 5450967 - DNA, 25 bp, Homo sapien
gagtcctgtgtttcatgtacagcat

SEQ ID NO: 5450968 - DNA, 25 bp, Homo sapien
gctcgtaagccccttcagacaaaga

SEQ ID NO: 5450969 - DNA, 25 bp, Homo sapien
tggaagggaaactctgctcgtaagc

SEQ ID NO: 5450970 - DNA, 25 bp, Homo sapien
caacatttatgacttgggctcttgc

SEQ ID NO: 5450971 - DNA, 25 bp, Homo sapien
tgttgcatccaaatctgagcgagta

SEQ ID NO: 5450972 - DNA, 25 bp, Homo sapien
aagatatccctaggtcataaaagcc

SEQ ID NO: 5450973 - DNA, 25 bp, Homo sapien
gattcaactactgggaaggatcctg

SEQ ID NO: 5450974 - DNA, 25 bp, Homo sapien
cctcatggtctcatgggaaatgcag

SEQ ID NO: 5450975 - DNA, 25 bp, Homo sapien
tgaagtgtggcataaccagttgtct

SEQ ID NO: 5450976 - DNA, 25 bp, Homo sapien
tctgatctatctgccaccattggaa

SEQ ID NO: 5450977 - DNA, 25 bp, Homo sapien
tcgaattgtaatccacggcattggg

SEQ ID NO: 5450978 - DNA, 25 bp, Homo sapien
ggttcaccaattacacacctatagt

SEQ ID NO: 5450979 - DNA, 25 bp, Homo sapien
cattagtaaaaagtgattgaatacc

SEQ ID NO: 5450980 - DNA, 25 bp, Homo sapien
tatcccattaagaggtcatagaaac

SEQ ID NO: 5450981 - DNA, 25 bp, Homo sapien
gaaaaagccacattgtgaacacaca

SEQ ID NO: 5450982 - DNA, 25 bp, Homo sapien
gcacaataggacgatatatctagga

SEQ ID NO: 5450983 - DNA, 25 bp, Homo sapien
ccgtgagtatgtgaggagctgcttc

SEQ ID NO: 5450984 - DNA, 25 bp, Homo sapien
ctgctgtgcttatgaacaaaggtaa

SEQ ID NO: 5450985 - DNA, 25 bp, Homo sapien
tgatcatggttacatactccgtgag

SEQ ID NO: 5450986 - DNA, 25 bp, Homo sapien
taatctctgccaaatcaggctatgc

SEQ ID NO: 5450987 - DNA, 25 bp, Homo sapien
catgctaaaaacgtagggttgtcct

SEQ ID NO: 5450988 - DNA, 25 bp, Homo sapien
taaatgcccatgagtcctaaatgtg

SEQ ID NO: 5450989 - DNA, 25 bp, Homo sapien
gacacttctgtttgagcctctaata

SEQ ID NO: 5450990 - DNA, 25 bp, Homo sapien
gttcaagttgttcagcggcaagatg

SEQ ID NO: 5450991 - DNA, 25 bp, Homo sapien
gaaatataatgtgcaaggttctgcc

SEQ ID NO: 5450992 - DNA, 25 bp, Homo sapien
tgttcagcggcaagatgaaagatgt

SEQ ID NO: 5450993 - DNA, 25 bp, Homo sapien
caaggttctgccaatagttcatcca

SEQ ID NO: 5450994 - DNA, 25 bp, Homo sapien
cccctctagttgaacaatggcatct

SEQ ID NO: 5450995 - DNA, 25 bp, Homo sapien
tgatgacaatcactagcccctctag

SEQ ID NO: 5450996 - DNA, 25 bp, Homo sapien
tagtgagtgatgacaatcactagcc

SEQ ID NO: 5450997 - DNA, 25 bp, Homo sapien
actagcccctctagttgaacaatgg

SEQ ID NO: 5450998 - DNA, 25 bp, Homo sapien
ctataaatgccagttcaatttcaga

SEQ ID NO: 5450999 - DNA, 25 bp, Homo sapien
gtacattgttaccagcttctataaa

SEQ ID NO: 5451000 - DNA, 25 bp, Homo sapien
ctttaaagcagtatgcttttcagat

SEQ ID NO: 5451001 - DNA, 25 bp, Homo sapien
aaattgttgtacattgttaccagct

SEQ ID NO: 5451002 - DNA, 25 bp, Homo sapien
gaagattcacacagcattggtttaa

SEQ ID NO: 5451003 - DNA, 25 bp, Homo sapien
taaatcatggagacattgtatacca

SEQ ID NO: 5451004 - DNA, 25 bp, Homo sapien
tattgggtggacaggaagaagattc

SEQ ID NO: 5451005 - DNA, 25 bp, Homo sapien
cagagggtactcataactattgggt

SEQ ID NO: 5451006 - DNA, 25 bp, Homo sapien
aaaggttagtcttcactcagccctc

SEQ ID NO: 5451007 - DNA, 25 bp, Homo sapien
ctgtcagtggctccgtccaagcatc

SEQ ID NO: 5451008 - DNA, 25 bp, Homo sapien
tgcagtgcagatccagacgagttac

SEQ ID NO: 5451009 - DNA, 25 bp, Homo sapien
tatcagtagggatttgggaacaggc

SEQ ID NO: 5451010 - DNA, 25 bp, Homo sapien
cattttagtggtctagatcgatcaa

SEQ ID NO: 5451011 - DNA, 25 bp, Homo sapien
aacccaaggtagactgaaagctagt

SEQ ID NO: 5451012 - DNA, 25 bp, Homo sapien
cacagcattcatctagaccaaagcc

SEQ ID NO: 5451013 - DNA, 25 bp, Homo sapien
tagtccccttgcaccaaacagatag

SEQ ID NO: 5451014 - DNA, 25 bp, Homo sapien
gacagaatctactcatggtgaaggc

SEQ ID NO: 5451015 - DNA, 25 bp, Homo sapien
caaacaactttgctagctagagata

SEQ ID NO: 5451016 - DNA, 25 bp, Homo sapien
cactaaaggcttagacgatcattct

SEQ ID NO: 5451017 - DNA, 25 bp, Homo sapien
gataactacaattagagtggagctt

SEQ ID NO: 5451018 - DNA, 25 bp, Homo sapien
gagcgagagcgttgactaatgacac

SEQ ID NO: 5451019 - DNA, 25 bp, Homo sapien
caaataggcagacgaaaacagatgg

SEQ ID NO: 5451020 - DNA, 25 bp, Homo sapien
tataagtctaaatgagcagtcaggg

SEQ ID NO: 5451021 - DNA, 25 bp, Homo sapien
tacatgactagactgagccctgctg

SEQ ID NO: 5451022 - DNA, 25 bp, Homo sapien
caggcgctgctgtaatatcttgaat

SEQ ID NO: 5451023 - DNA, 25 bp, Homo sapien
tataatggaaatgtcgacagactct

SEQ ID NO: 5451024 - DNA, 25 bp, Homo sapien
tagcaggcgctgctgtaatatcttg

SEQ ID NO: 5451025 - DNA, 25 bp, Homo sapien
aatgtcgacagactctagcaggcgc

SEQ ID NO: 5451026 - DNA, 25 bp, Homo sapien
attgtcaatgttactccaatgcagc

SEQ ID NO: 5451027 - DNA, 25 bp, Homo sapien
tcaatgttactccaatgcagctctg

SEQ ID NO: 5451028 - DNA, 25 bp, Homo sapien
gactcattcattgtcaatgttactc

SEQ ID NO: 5451029 - DNA, 25 bp, Homo sapien
tgttactccaatgcagctctggacc

SEQ ID NO: 5451030 - DNA, 25 bp, Homo sapien
gcttgtgatggaaccttggtcccag

SEQ ID NO: 5451031 - DNA, 25 bp, Homo sapien
ctgtagacaccacaggtactgtctg

SEQ ID NO: 5451032 - DNA, 25 bp, Homo sapien
tagacaccacaggtactgtctgcct

SEQ ID NO: 5451033 - DNA, 25 bp, Homo sapien
catatgcttgcttgtgatggaacct

SEQ ID NO: 5451034 - DNA, 25 bp, Homo sapien
agcacatgcagagggagcatgactg

SEQ ID NO: 5451035 - DNA, 25 bp, Homo sapien
caaattcagtcaagtccaaaggcag

SEQ ID NO: 5451036 - DNA, 25 bp, Homo sapien
gtccaaaggcagcacatgcagaggg

SEQ ID NO: 5451037 - DNA, 25 bp, Homo sapien
caaaggcagcacatgcagagggagc

SEQ ID NO: 5451038 - DNA, 25 bp, Homo sapien
cccagcaaccggactaggtgtggat

SEQ ID NO: 5451039 - DNA, 25 bp, Homo sapien
caatgttatccttgtgctcgtggac

SEQ ID NO: 5451040 - DNA, 25 bp, Homo sapien
ggcataagttgagtaaccagctgga

SEQ ID NO: 5451041 - DNA, 25 bp, Homo sapien
gttaagcagcagttgtgatccaatg

SEQ ID NO: 5451042 - DNA, 25 bp, Homo sapien
tccttacagatttgttctccaacct

SEQ ID NO: 5451043 - DNA, 25 bp, Homo sapien
ctccttacagatttgttctccaacc

SEQ ID NO: 5451044 - DNA, 25 bp, Homo sapien
aaagttagatattgatctggtcagc

SEQ ID NO: 5451045 - DNA, 25 bp, Homo sapien
tcggttcctgccatatcttgtagtg

SEQ ID NO: 5451046 - DNA, 25 bp, Homo sapien
tccttttacttctgcccatacgcaa

SEQ ID NO: 5451047 - DNA, 25 bp, Homo sapien
gatctggtcagcaagttgttttcgg

SEQ ID NO: 5451048 - DNA, 25 bp, Homo sapien
gagctttagaccacgcatctctcca

SEQ ID NO: 5451049 - DNA, 25 bp, Homo sapien
aggctccagagctttagaccacgca

SEQ ID NO: 5451050 - DNA, 25 bp, Homo sapien
tccagagctttagaccacgcatctc

SEQ ID NO: 5451051 - DNA, 25 bp, Homo sapien
aacactgactgccaagagaggctcc

SEQ ID NO: 5451052 - DNA, 25 bp, Homo sapien
aaggtgttatcggtgcaatcaacac

SEQ ID NO: 5451053 - DNA, 25 bp, Homo sapien
attctgtaaggtgttatcggtgcaa

SEQ ID NO: 5451054 - DNA, 25 bp, Homo sapien
tctgtaaggtgttatcggtgcaatc

SEQ ID NO: 5451055 - DNA, 25 bp, Homo sapien
tgtaaggtgttatcggtgcaatcaa

SEQ ID NO: 5451056 - DNA, 25 bp, Homo sapien
gaaaaatgtgattgcctgggtgtct

SEQ ID NO: 5451057 - DNA, 25 bp, Homo sapien
tgattgcctgggtgtctgtacttac

SEQ ID NO: 5451058 - DNA, 25 bp, Homo sapien
aatgtgattgcctgggtgtctgtac

SEQ ID NO: 5451059 - DNA, 25 bp, Homo sapien
gagaaaaatgtgattgcctgggtgt

SEQ ID NO: 5451060 - DNA, 25 bp, Homo sapien
tccatgaactccacatttgccttgg

SEQ ID NO: 5451061 - DNA, 25 bp, Homo sapien
atttgccttgggaccagttgtctca

SEQ ID NO: 5451062 - DNA, 25 bp, Homo sapien
ctcattaagaatcttaatagccaca

SEQ ID NO: 5451063 - DNA, 25 bp, Homo sapien
tgggaccagttgtctcattaagaat

SEQ ID NO: 5451064 - DNA, 25 bp, Homo sapien
tacgaagttgagcttgattgggtgc

SEQ ID NO: 5451065 - DNA, 25 bp, Homo sapien
tttctttcaaaatacgaagttgagc

SEQ ID NO: 5451066 - DNA, 25 bp, Homo sapien
tgattgggtgctgtgccactgggag

SEQ ID NO: 5451067 - DNA, 25 bp, Homo sapien
caaaatacgaagttgagcttgattg

SEQ ID NO: 5451068 - DNA, 25 bp, Homo sapien
tgaccagaatgaagagcccaccaat

SEQ ID NO: 5451069 - DNA, 25 bp, Homo sapien
aatgaccagaatgaagagcccacca

SEQ ID NO: 5451070 - DNA, 25 bp, Homo sapien
ccagaatgaagagcccaccaattac

SEQ ID NO: 5451071 - DNA, 25 bp, Homo sapien
aatgaagagcccaccaattactcca

SEQ ID NO: 5451072 - DNA, 25 bp, Homo sapien
cactctgcaggaacggtagaggtac

SEQ ID NO: 5451073 - DNA, 25 bp, Homo sapien
ctgcaggaacggtagaggtacaaac

SEQ ID NO: 5451074 - DNA, 25 bp, Homo sapien
gcaggaacggtagaggtacaaacaa

SEQ ID NO: 5451075 - DNA, 25 bp, Homo sapien
tctgcaggaacggtagaggtacaaa

SEQ ID NO: 5451076 - DNA, 25 bp, Homo sapien
attggcctgctggtagccctttttc

SEQ ID NO: 5451077 - DNA, 25 bp, Homo sapien
ttggcctgctggtagccctttttcc

SEQ ID NO: 5451078 - DNA, 25 bp, Homo sapien
aaaatggaaacatggtagatgttac

SEQ ID NO: 5451079 - DNA, 25 bp, Homo sapien
ggatttgagcgacaaaatggaaaca

SEQ ID NO: 5451080 - DNA, 25 bp, Homo sapien
gcgacaaaatggaaacatggtagat

SEQ ID NO: 5451081 - DNA, 25 bp, Homo sapien
aggaaaggatttgagcgacaaaatg

SEQ ID NO: 5451082 - DNA, 25 bp, Homo sapien
ttgtggtaaagtggaatggcccgtc

SEQ ID NO: 5451083 - DNA, 25 bp, Homo sapien
aatgcagtcatgactagtgggaccg

SEQ ID NO: 5451084 - DNA, 25 bp, Homo sapien
gtcatgactagtgggaccgttacac

SEQ ID NO: 5451085 - DNA, 25 bp, Homo sapien
gaatggcccgtccatgggtagtaaa

SEQ ID NO: 5451086 - DNA, 25 bp, Homo sapien
catgcaccagtgctcacacatggag

SEQ ID NO: 5451087 - DNA, 25 bp, Homo sapien
acatgcaccagtgctcacacatgga

SEQ ID NO: 5451088 - DNA, 25 bp, Homo sapien
atgcaccagtgctcacacatggagc

SEQ ID NO: 5451089 - DNA, 25 bp, Homo sapien
tgcagtcttcaatacttgagcctat

SEQ ID NO: 5451090 - DNA, 25 bp, Homo sapien
atccatcaggccgatgcagtcttca

SEQ ID NO: 5451091 - DNA, 25 bp, Homo sapien
ctatccatcaggccgatgcagtctt

SEQ ID NO: 5451092 - DNA, 25 bp, Homo sapien
gtcttcaatacttgagcctatgcac

SEQ ID NO: 5451093 - DNA, 25 bp, Homo sapien
ctgttcacttggagttcccaaatgc

SEQ ID NO: 5451094 - DNA, 25 bp, Homo sapien
ggctgcaaattgctaaaggtgtctt

SEQ ID NO: 5451095 - DNA, 25 bp, Homo sapien
tgtctcaacttaattctgcggctgc

SEQ ID NO: 5451096 - DNA, 25 bp, Homo sapien
gccagggagtacaatattcaaattc

SEQ ID NO: 5451097 - DNA, 25 bp, Homo sapien
caaaaacagcaaaaggtctcatttt

SEQ ID NO: 5451098 - DNA, 25 bp, Homo sapien
ttgaatggcaacagctgttgacatc

SEQ ID NO: 5451099 - DNA, 25 bp, Homo sapien
cattgtaattagatttgcaaaaaca

SEQ ID NO: 5451100 - DNA, 25 bp, Homo sapien
aatggcctcattgtaattagatttg

SEQ ID NO: 5451101 - DNA, 25 bp, Homo sapien
tttttccacacagtttgggccatct

SEQ ID NO: 5451102 - DNA, 25 bp, Homo sapien
cccctgtaagccatctggacatttt

SEQ ID NO: 5451103 - DNA, 25 bp, Homo sapien
gatggcatgggtggcactcccgatc

SEQ ID NO: 5451104 - DNA, 25 bp, Homo sapien
tctggatcagcatacttgaaaatga

SEQ ID NO: 5451105 - DNA, 25 bp, Homo sapien
tgaaaactaataaaggcatactgaa

SEQ ID NO: 5451106 - DNA, 25 bp, Homo sapien
gacagttgttgaagtctctccttag

SEQ ID NO: 5451107 - DNA, 25 bp, Homo sapien
taataaaggcatactgaagggacag

SEQ ID NO: 5451108 - DNA, 25 bp, Homo sapien
tgaagggacagttgttgaagtctct

SEQ ID NO: 5451109 - DNA, 25 bp, Homo sapien
ggtcacactccacacagatggagcc

SEQ ID NO: 5451110 - DNA, 25 bp, Homo sapien
acactgggggtcacactccacacag

SEQ ID NO: 5451111 - DNA, 25 bp, Homo sapien
ccatggcatgtgaggaggccatctt

SEQ ID NO: 5451112 - DNA, 25 bp, Homo sapien
tcttctcacactgggggtcacactc

SEQ ID NO: 5451113 - DNA, 25 bp, Homo sapien
ttcctctactgaagcggcgacacga

SEQ ID NO: 5451114 - DNA, 25 bp, Homo sapien
tacaagactctatgcagatccttcc

SEQ ID NO: 5451115 - DNA, 25 bp, Homo sapien
ggaacacagatggttgcacaccatt

SEQ ID NO: 5451116 - DNA, 25 bp, Homo sapien
acgacagacattggtctggcccagg

SEQ ID NO: 5451117 - DNA, 25 bp, Homo sapien
tcttgaggacattgacaaggtcaca

SEQ ID NO: 5451118 - DNA, 25 bp, Homo sapien
ccttggcactgtctattttatgata

SEQ ID NO: 5451119 - DNA, 25 bp, Homo sapien
tcacgttatttactttcaggtttgc

SEQ ID NO: 5451120 - DNA, 25 bp, Homo sapien
aggtcacaaacattcccttggcact

SEQ ID NO: 5451121 - DNA, 25 bp, Homo sapien
gagtgttgtccagttaatggtatga

SEQ ID NO: 5451122 - DNA, 25 bp, Homo sapien
gcttgaggataagcaaggacaggcc

SEQ ID NO: 5451123 - DNA, 25 bp, Homo sapien
gcttttctgttgtcccggattacta

SEQ ID NO: 5451124 - DNA, 25 bp, Homo sapien
ctggaactgtagagaggtgatgccc

SEQ ID NO: 5451125 - DNA, 25 bp, Homo sapien
gtcaccaggttagaaaaaacactga

SEQ ID NO: 5451126 - DNA, 25 bp, Homo sapien
aaacactgaagtcagtcatgtttgg

SEQ ID NO: 5451127 - DNA, 25 bp, Homo sapien
gagtactcttccaccaatggtcacc

SEQ ID NO: 5451128 - DNA, 25 bp, Homo sapien
ggccatgactgtatgttcaggaaac

SEQ ID NO: 5451129 - DNA, 25 bp, Homo sapien
ctctgactgtccgaaagacgttcag

SEQ ID NO: 5451130 - DNA, 25 bp, Homo sapien
tccgaaagacgttcagtttctctgg

SEQ ID NO: 5451131 - DNA, 25 bp, Homo sapien
ctgggtctatggcttcaattgcatt

SEQ ID NO: 5451132 - DNA, 25 bp, Homo sapien
cagtttctctgggtctatggcttca

SEQ ID NO: 5451133 - DNA, 25 bp, Homo sapien
tagtacctggaattcgtaagaagga

SEQ ID NO: 5451134 - DNA, 25 bp, Homo sapien
tcatattcacgtttataacacagga

SEQ ID NO: 5451135 - DNA, 25 bp, Homo sapien
gcatttccgctcctcaaagaagtat

SEQ ID NO: 5451136 - DNA, 25 bp, Homo sapien
taacacaggaactattcgcttccaa

SEQ ID NO: 5451137 - DNA, 25 bp, Homo sapien
acagtctgagctgacatcaatgatc

SEQ ID NO: 5451138 - DNA, 25 bp, Homo sapien
caatgttactggaatccacagtctg

SEQ ID NO: 5451139 - DNA, 25 bp, Homo sapien
cagtgactagaaagatcaaattccc

SEQ ID NO: 5451140 - DNA, 25 bp, Homo sapien
caaattcccattgatcttggtacag

SEQ ID NO: 5451141 - DNA, 25 bp, Homo sapien
acaagaactggaatctaccacaaag

SEQ ID NO: 5451142 - DNA, 25 bp, Homo sapien
gcaggcacgcacacaagaactggaa

SEQ ID NO: 5451143 - DNA, 25 bp, Homo sapien
ttccatcttggaactagggcaggca

SEQ ID NO: 5451144 - DNA, 25 bp, Homo sapien
ttctacttccatcttggaactaggg

SEQ ID NO: 5451145 - DNA, 25 bp, Homo sapien
agaatgctccatatgtgtactttgc

SEQ ID NO: 5451146 - DNA, 25 bp, Homo sapien
gggacactgagtaacacatgctcca

SEQ ID NO: 5451147 - DNA, 25 bp, Homo sapien
tccactgtcattgaaattcatgcag

SEQ ID NO: 5451148 - DNA, 25 bp, Homo sapien
gaaattgtgctccagttgaaaggtg

SEQ ID NO: 5451149 - DNA, 25 bp, Homo sapien
agcacattctcgatggcagcagtca

SEQ ID NO: 5451150 - DNA, 25 bp, Homo sapien
ctgacgtaaggtccgtagcatctgc

SEQ ID NO: 5451151 - DNA, 25 bp, Homo sapien
tgttctgcacacaccgtccttgtca

SEQ ID NO: 5451152 - DNA, 25 bp, Homo sapien
gcagcagtcactgacgtaaggtccg

SEQ ID NO: 5451153 - DNA, 25 bp, Homo sapien
agacagagataggaccatgatcaaa

SEQ ID NO: 5451154 - DNA, 25 bp, Homo sapien
aagacagagataggaccatgatcaa

SEQ ID NO: 5451155 - DNA, 25 bp, Homo sapien
acagagataggaccatgatcaaagt

SEQ ID NO: 5451156 - DNA, 25 bp, Homo sapien
atgaaccattgtggctggccagaaa

SEQ ID NO: 5451157 - DNA, 25 bp, Homo sapien
ttttagtagacaggtcaaactcctg

SEQ ID NO: 5451158 - DNA, 25 bp, Homo sapien
gaaccattgtggctggccagaaaat

SEQ ID NO: 5451159 - DNA, 25 bp, Homo sapien
gcatgaaccattgtggctggccaga

SEQ ID NO: 5451160 - DNA, 25 bp, Homo sapien
gttagagtggtatgtaagtgcttgc

SEQ ID NO: 5451161 - DNA, 25 bp, Homo sapien
tcatgcttgctaaattctcaaaccg

SEQ ID NO: 5451162 - DNA, 25 bp, Homo sapien
gcaagctccgcttacagggtttatg

SEQ ID NO: 5451163 - DNA, 25 bp, Homo sapien
caagctccgcttacagggtttatgc

SEQ ID NO: 5451164 - DNA, 25 bp, Homo sapien
caccaggtctagcaggacaaaagga

SEQ ID NO: 5451165 - DNA, 25 bp, Homo sapien
tgtagagctcataggttacgactca

SEQ ID NO: 5451166 - DNA, 25 bp, Homo sapien
caaccaccctttctgataatgggag

SEQ ID NO: 5451167 - DNA, 25 bp, Homo sapien
gcttcatatatcttgcagggacaga

SEQ ID NO: 5451168 - DNA, 25 bp, Homo sapien
cacgtgtctgcttggcaattatcct

SEQ ID NO: 5451169 - DNA, 25 bp, Homo sapien
ccacgtgtctgcttggcaattatcc

SEQ ID NO: 5451170 - DNA, 25 bp, Homo sapien
ggccacgtgtctgcttggcaattat

SEQ ID NO: 5451171 - DNA, 25 bp, Homo sapien
gaaggccacgtgtctgcttggcaat

SEQ ID NO: 5451172 - DNA, 25 bp, Homo sapien
gaatttgccatgtggaaaccagtga

SEQ ID NO: 5451173 - DNA, 25 bp, Homo sapien
agagagtctttcttggtatctgcag

SEQ ID NO: 5451174 - DNA, 25 bp, Homo sapien
aactccatagatgttcacttccctt

SEQ ID NO: 5451175 - DNA, 25 bp, Homo sapien
actcatatatctcaatctgagaata

SEQ ID NO: 5451176 - DNA, 25 bp, Homo sapien
ccatagctgtgctgttgagatcatt

SEQ ID NO: 5451177 - DNA, 25 bp, Homo sapien
aagttatagctaatatcaccatagc

SEQ ID NO: 5451178 - DNA, 25 bp, Homo sapien
tatcaccatagctgtgctgttgaga

SEQ ID NO: 5451179 - DNA, 25 bp, Homo sapien
gctaatatcaccatagctgtgctgt

SEQ ID NO: 5451180 - DNA, 25 bp, Homo sapien
ctgtgggtccccagcaacggccagt

SEQ ID NO: 5451181 - DNA, 25 bp, Homo sapien
gtacaggacttatggcaacgtccac

SEQ ID NO: 5451182 - DNA, 25 bp, Homo sapien
tgtgggtccccagcaacggccagta

SEQ ID NO: 5451183 - DNA, 25 bp, Homo sapien
gccagtacaggacttatggcaacgt

SEQ ID NO: 5451184 - DNA, 25 bp, Homo sapien
tgagcttgccagagccaccaagggt

SEQ ID NO: 5451185 - DNA, 25 bp, Homo sapien
tatgagcttgccagagccaccaagg

SEQ ID NO: 5451186 - DNA, 25 bp, Homo sapien
agccaccaagggtgtccagaagcat

SEQ ID NO: 5451187 - DNA, 25 bp, Homo sapien
agcttgccagagccaccaagggtgt

SEQ ID NO: 5451188 - DNA, 25 bp, Homo sapien
cactctgccactggaacttcgggct

SEQ ID NO: 5451189 - DNA, 25 bp, Homo sapien
acttcgggctcttgtagagttcagg

SEQ ID NO: 5451190 - DNA, 25 bp, Homo sapien
tgttacgaataacccaactccagtg

SEQ ID NO: 5451191 - DNA, 25 bp, Homo sapien
tcctttgacaaaggcgtgaaaagcc

SEQ ID NO: 5451192 - DNA, 25 bp, Homo sapien
ctctgctggtcaccttcatgtaata

SEQ ID NO: 5451193 - DNA, 25 bp, Homo sapien
ctgtggacatgacgaaccttggcct

SEQ ID NO: 5451194 - DNA, 25 bp, Homo sapien
gaaccttggcctttcgtgctagtgc

SEQ ID NO: 5451195 - DNA, 25 bp, Homo sapien
tgctagaccatgctacacaacatct

SEQ ID NO: 5451196 - DNA, 25 bp, Homo sapien
gggttgtcactgctagtcatgaatc

SEQ ID NO: 5451197 - DNA, 25 bp, Homo sapien
tttgccagataggtgagtgtggtct

SEQ ID NO: 5451198 - DNA, 25 bp, Homo sapien
ggctcagtagggttgtcactgctag

SEQ ID NO: 5451199 - DNA, 25 bp, Homo sapien
tattttgccagataggtgagtgtgg

SEQ ID NO: 5451200 - DNA, 25 bp, Homo sapien
aatcttctggccataagccagatgc

SEQ ID NO: 5451201 - DNA, 25 bp, Homo sapien
cttctggccataagccagatgcttt

SEQ ID NO: 5451202 - DNA, 25 bp, Homo sapien
gatgaaatcttctggccataagcca

SEQ ID NO: 5451203 - DNA, 25 bp, Homo sapien
aaatcttctggccataagccagatg

SEQ ID NO: 5451204 - DNA, 25 bp, Homo sapien
ctgtttatgaggttgtgtgaaccca

SEQ ID NO: 5451205 - DNA, 25 bp, Homo sapien
gcatcagttgaacgcaaataaacca

SEQ ID NO: 5451206 - DNA, 25 bp, Homo sapien
attctgcatcagttgaacgcaaata

SEQ ID NO: 5451207 - DNA, 25 bp, Homo sapien
tctgcatcagttgaacgcaaataaa

SEQ ID NO: 5451208 - DNA, 25 bp, Homo sapien
ctaagggctgcaagactctattctg

SEQ ID NO: 5451209 - DNA, 25 bp, Homo sapien
ctagactggtggaattcaaaaccac

SEQ ID NO: 5451210 - DNA, 25 bp, Homo sapien
taaaccccctaatcaactggcttca

SEQ ID NO: 5451211 - DNA, 25 bp, Homo sapien
aaccccctaatcaactggcttcaat

SEQ ID NO: 5451212 - DNA, 25 bp, Homo sapien
gactggtggaattcaaaaccacgaa

SEQ ID NO: 5451213 - DNA, 25 bp, Homo sapien
ttcaacatgagaaatcacttcaggg

SEQ ID NO: 5451214 - DNA, 25 bp, Homo sapien
tgcaattcaacatgagaaatcactt

SEQ ID NO: 5451215 - DNA, 25 bp, Homo sapien
gcaattcaacatgagaaatcacttc

SEQ ID NO: 5451216 - DNA, 25 bp, Homo sapien
aattcaacatgagaaatcacttcag

SEQ ID NO: 5451217 - DNA, 25 bp, Homo sapien
ggtgaacagtggccttgacctctgt

SEQ ID NO: 5451218 - DNA, 25 bp, Homo sapien
gcgtcttcaatagtggaagccggcg

SEQ ID NO: 5451219 - DNA, 25 bp, Homo sapien
ctaattgggagtttcagcaactggc

SEQ ID NO: 5451220 - DNA, 25 bp, Homo sapien
actcgtacttgcgtcttcaatagtg

SEQ ID NO: 5451221 - DNA, 25 bp, Homo sapien
tcttctttatggtgatactaatcct

SEQ ID NO: 5451222 - DNA, 25 bp, Homo sapien
acagtaggggtagatgcagacacac

SEQ ID NO: 5451223 - DNA, 25 bp, Homo sapien
tgcagacacacgagcatacagcacc

SEQ ID NO: 5451224 - DNA, 25 bp, Homo sapien
gggtagatgcagacacacgagcata

SEQ ID NO: 5451225 - DNA, 25 bp, Homo sapien
tatatttacagtaggggtagatgca

SEQ ID NO: 5451226 - DNA, 25 bp, Homo sapien
gctatccctactggcatcaaggtct

SEQ ID NO: 5451227 - DNA, 25 bp, Homo sapien
catcaaggtctttagctgattagct

SEQ ID NO: 5451228 - DNA, 25 bp, Homo sapien
ttattgctatccctactggcatcaa

SEQ ID NO: 5451229 - DNA, 25 bp, Homo sapien
ttgctatccctactggcatcaaggt

SEQ ID NO: 5451230 - DNA, 25 bp, Homo sapien
gcccatcccataacctctatgactc

SEQ ID NO: 5451231 - DNA, 25 bp, Homo sapien
gaaaagaaggaatcaaactcccaga

SEQ ID NO: 5451232 - DNA, 25 bp, Homo sapien
catcccataacctctatgactctct

SEQ ID NO: 5451233 - DNA, 25 bp, Homo sapien
tcccagaaactggtttcaagcccat

SEQ ID NO: 5451234 - DNA, 25 bp, Homo sapien
atatcttgccaatgaatggtgtctg

SEQ ID NO: 5451235 - DNA, 25 bp, Homo sapien
tgacacaagagtcaagttggaaggc

SEQ ID NO: 5451236 - DNA, 25 bp, Homo sapien
tgaactaccatttgttgacacaaga

SEQ ID NO: 5451237 - DNA, 25 bp, Homo sapien
catgggttccgaacaatatcttgcc

SEQ ID NO: 5451238 - DNA, 25 bp, Homo sapien
tgcattgcatgtacgaaaccctcca

SEQ ID NO: 5451239 - DNA, 25 bp, Homo sapien
gcatgtacgaaaccctccagattag

SEQ ID NO: 5451240 - DNA, 25 bp, Homo sapien
accctccagattagttttgatattg

SEQ ID NO: 5451241 - DNA, 25 bp, Homo sapien
gaaaccctccagattagttttgata

SEQ ID NO: 5451242 - DNA, 25 bp, Homo sapien
catcagtcatttcactgactattgg

SEQ ID NO: 5451243 - DNA, 25 bp, Homo sapien
tcatttcactgactattggttccat

SEQ ID NO: 5451244 - DNA, 25 bp, Homo sapien
cagtcatttcactgactattggttc

SEQ ID NO: 5451245 - DNA, 25 bp, Homo sapien
gtcatttcactgactattggttcca

SEQ ID NO: 5451246 - DNA, 25 bp, Homo sapien
tctagcaaaagtacatcaattaatt

SEQ ID NO: 5451247 - DNA, 25 bp, Homo sapien
tgtctaaaatacaccttaggcatat

SEQ ID NO: 5451248 - DNA, 25 bp, Homo sapien
taacgcatagatgtcatactgggac

SEQ ID NO: 5451249 - DNA, 25 bp, Homo sapien
gaatacgtgagtaaaaaattgagac

SEQ ID NO: 5451250 - DNA, 25 bp, Homo sapien
tacccatgctctatccgaaaatgac

SEQ ID NO: 5451251 - DNA, 25 bp, Homo sapien
tgctctatccgaaaatgactttcta

SEQ ID NO: 5451252 - DNA, 25 bp, Homo sapien
tatccgaaaatgactttctacccat

SEQ ID NO: 5451253 - DNA, 25 bp, Homo sapien
cctacccatgctctatccgaaaatg

SEQ ID NO: 5451254 - DNA, 25 bp, Homo sapien
cacagctaaacatgacttgaagagt

SEQ ID NO: 5451255 - DNA, 25 bp, Homo sapien
tggttaaacttcaaacatggcaaga

SEQ ID NO: 5451256 - DNA, 25 bp, Homo sapien
gaaaccagttttaggcaatagaaga

SEQ ID NO: 5451257 - DNA, 25 bp, Homo sapien
caatgggagccaaatagttaagtac

SEQ ID NO: 5451258 - DNA, 25 bp, Homo sapien
ttccatggaagtcatgatggtgttc

SEQ ID NO: 5451259 - DNA, 25 bp, Homo sapien
tgggacagctgaagggcactgcact

SEQ ID NO: 5451260 - DNA, 25 bp, Homo sapien
caattcttgtagcattgggaggcac

SEQ ID NO: 5451261 - DNA, 25 bp, Homo sapien
tggaagtcatgatggtgttcttcac

SEQ ID NO: 5451262 - DNA, 25 bp, Homo sapien
cagattgccttgatcacaggttgct

SEQ ID NO: 5451263 - DNA, 25 bp, Homo sapien
gtcatcacagcctactactggatct

SEQ ID NO: 5451264 - DNA, 25 bp, Homo sapien
tagttctgtcgatttgtgcttccct

SEQ ID NO: 5451265 - DNA, 25 bp, Homo sapien
gctgtcatccctttctgtgcttggg

SEQ ID NO: 5451266 - DNA, 25 bp, Homo sapien
gactgttgttggtctaatagtcttg

SEQ ID NO: 5451267 - DNA, 25 bp, Homo sapien
tccactctcaacactcttgatctgc

SEQ ID NO: 5451268 - DNA, 25 bp, Homo sapien
ctccactctcaacactcttgatctg

SEQ ID NO: 5451269 - DNA, 25 bp, Homo sapien
tctccactctcaacactcttgatct

SEQ ID NO: 5451270 - DNA, 25 bp, Homo sapien
gagcctaaagaatgtcttcgaagca

SEQ ID NO: 5451271 - DNA, 25 bp, Homo sapien
caaataggaccaagagcctaaagaa

SEQ ID NO: 5451272 - DNA, 25 bp, Homo sapien
tggcattaccgttacaatcctaaaa

SEQ ID NO: 5451273 - DNA, 25 bp, Homo sapien
gaagtgaaacatggcattaccgtta

SEQ ID NO: 5451274 - DNA, 25 bp, Homo sapien
taactgggattagagtcacccacta

SEQ ID NO: 5451275 - DNA, 25 bp, Homo sapien
actgggattagagtcacccactacc

SEQ ID NO: 5451276 - DNA, 25 bp, Homo sapien
tagagtcacccactaccaccacaac

SEQ ID NO: 5451277 - DNA, 25 bp, Homo sapien
ggattagagtcacccactaccacca

SEQ ID NO: 5451278 - DNA, 25 bp, Homo sapien
ttgcacatgtttatcccatctcaag

SEQ ID NO: 5451279 - DNA, 25 bp, Homo sapien
tcaacatcatcatctcagagattaa

SEQ ID NO: 5451280 - DNA, 25 bp, Homo sapien
taaggcatcgcatataacgggagtg

SEQ ID NO: 5451281 - DNA, 25 bp, Homo sapien
catctcaagatgttatctgtggtgt

SEQ ID NO: 5451282 - DNA, 25 bp, Homo sapien
ttattgagccatgattccgaacacc

SEQ ID NO: 5451283 - DNA, 25 bp, Homo sapien
gccatgattccgaacacccactgaa

SEQ ID NO: 5451284 - DNA, 25 bp, Homo sapien
gatttgcccagcattttatgaaacc

SEQ ID NO: 5451285 - DNA, 25 bp, Homo sapien
ctcagatttgcccagcattttatga

SEQ ID NO: 5451286 - DNA, 25 bp, Homo sapien
tatgggtgtatcacaactgtactca

SEQ ID NO: 5451287 - DNA, 25 bp, Homo sapien
ccaaaggctgttgctaggagtccca

SEQ ID NO: 5451288 - DNA, 25 bp, Homo sapien
gccctgtggcagctatggacatcca

SEQ ID NO: 5451289 - DNA, 25 bp, Homo sapien
tattagtcctctaaagccctgtggc

SEQ ID NO: 5451290 - DNA, 25 bp, Homo sapien
gaatggtacctgtgccaaggatgga

SEQ ID NO: 5451291 - DNA, 25 bp, Homo sapien
taactaggaatgtctcggagccacg

SEQ ID NO: 5451292 - DNA, 25 bp, Homo sapien
ttgccccaattaagtagaaccagat

SEQ ID NO: 5451293 - DNA, 25 bp, Homo sapien
ggcaagaatttaccccagtctctga

SEQ ID NO: 5451294 - DNA, 25 bp, Homo sapien
cacagatgtgaagttcagccacaca

SEQ ID NO: 5451295 - DNA, 25 bp, Homo sapien
taagaggcgcttgagccaagacact

SEQ ID NO: 5451296 - DNA, 25 bp, Homo sapien
ttttccctgagcaccataggactgc

SEQ ID NO: 5451297 - DNA, 25 bp, Homo sapien
tactgcccagtactctttgaacaag

SEQ ID NO: 5451298 - DNA, 25 bp, Homo sapien
tgtaggtcaagacaaatgtcagggc

SEQ ID NO: 5451299 - DNA, 25 bp, Homo sapien
taacaacaatccctgaactagcctg

SEQ ID NO: 5451300 - DNA, 25 bp, Homo sapien
gcaacaggtgcttggcatgaaacac

SEQ ID NO: 5451301 - DNA, 25 bp, Homo sapien
ccaagacctttcacagggtagttga

SEQ ID NO: 5451302 - DNA, 25 bp, Homo sapien
gaagacatgatgtcccctgtccagc

SEQ ID NO: 5451303 - DNA, 25 bp, Homo sapien
tcccaatggcctcaagatagagatg

SEQ ID NO: 5451304 - DNA, 25 bp, Homo sapien
tctctgatgcagtagggaccttccc

SEQ ID NO: 5451305 - DNA, 25 bp, Homo sapien
tgtgcaagtgaccttaacggaagac

SEQ ID NO: 5451306 - DNA, 25 bp, Homo sapien
tcattttcacccgaacatgcagtgt

SEQ ID NO: 5451307 - DNA, 25 bp, Homo sapien
tattttcattttcacccgaacatgc

SEQ ID NO: 5451308 - DNA, 25 bp, Homo sapien
ttcacccgaacatgcagtgtatttc

SEQ ID NO: 5451309 - DNA, 25 bp, Homo sapien
catgcagtgtatttcttgtcatgaa

SEQ ID NO: 5451310 - DNA, 25 bp, Homo sapien
ggtgcgatctcaataagcagctcat

SEQ ID NO: 5451311 - DNA, 25 bp, Homo sapien
gtgggatagcaagaaccagcttaca

SEQ ID NO: 5451312 - DNA, 25 bp, Homo sapien
ttcatgcaccctgagctatgtgaac

SEQ ID NO: 5451313 - DNA, 25 bp, Homo sapien
gctgatgggatttagtgagctactg

SEQ ID NO: 5451314 - DNA, 25 bp, Homo sapien
ctcattattgcaaggatttgatgat

SEQ ID NO: 5451315 - DNA, 25 bp, Homo sapien
ctaagcgctaatgatagttatctca

SEQ ID NO: 5451316 - DNA, 25 bp, Homo sapien
taagcgctaatgatagttatctcat

SEQ ID NO: 5451317 - DNA, 25 bp, Homo sapien
caaggatttgatgatatggtccact

SEQ ID NO: 5451318 - DNA, 25 bp, Homo sapien
gagtgttcctcaatgtaacaaatat

SEQ ID NO: 5451319 - DNA, 25 bp, Homo sapien
tcactgatatttaaatgccttagag

SEQ ID NO: 5451320 - DNA, 25 bp, Homo sapien
taacaaatatgacagtaaccctaca

SEQ ID NO: 5451321 - DNA, 25 bp, Homo sapien
catcacagggcatcattgcttataa

SEQ ID NO: 5451322 - DNA, 25 bp, Homo sapien
tgtcccacgaataatgcgtaaattc

SEQ ID NO: 5451323 - DNA, 25 bp, Homo sapien
tgattaagagccactaacacgtagc

SEQ ID NO: 5451324 - DNA, 25 bp, Homo sapien
tctccagaggcaggtaacgaaactg

SEQ ID NO: 5451325 - DNA, 25 bp, Homo sapien
tattgccaaggcatatcgatcctca

SEQ ID NO: 5451326 - DNA, 25 bp, Homo sapien
caagaggtaggaaacctggtaagat

SEQ ID NO: 5451327 - DNA, 25 bp, Homo sapien
atactgcgtgaaataatactcaaga

SEQ ID NO: 5451328 - DNA, 25 bp, Homo sapien
cgtgaaataatactcaagaggtagg

SEQ ID NO: 5451329 - DNA, 25 bp, Homo sapien
gaggtaggaaacctggtaagatcat

SEQ ID NO: 5451330 - DNA, 25 bp, Homo sapien
gagaaatggccccaagaatgatgac

SEQ ID NO: 5451331 - DNA, 25 bp, Homo sapien
aattggtgaacatcaaggtgttctc

SEQ ID NO: 5451332 - DNA, 25 bp, Homo sapien
ctggtgacctgaggatatgtcacca

SEQ ID NO: 5451333 - DNA, 25 bp, Homo sapien
gacctgaggatatgtcaccatcata

SEQ ID NO: 5451334 - DNA, 25 bp, Homo sapien
aaggtgttctctaactacaccaaag

SEQ ID NO: 5451335 - DNA, 25 bp, Homo sapien
tacagacaaagaggatattaccaga

SEQ ID NO: 5451336 - DNA, 25 bp, Homo sapien
cagtgtttcctagaggctgccttga

SEQ ID NO: 5451337 - DNA, 25 bp, Homo sapien
tggagagctagagcaagaccgcaca

SEQ ID NO: 5451338 - DNA, 25 bp, Homo sapien
caaaggaagttctaagtgagtcagt

SEQ ID NO: 5451339 - DNA, 25 bp, Homo sapien
tttgtactgtatttgaccaatgact

SEQ ID NO: 5451340 - DNA, 25 bp, Homo sapien
tatttgaccaatgactaaagctttt

SEQ ID NO: 5451341 - DNA, 25 bp, Homo sapien
tactgtatttgaccaatgactaaag

SEQ ID NO: 5451342 - DNA, 25 bp, Homo sapien
tgtatttgaccaatgactaaagctt

SEQ ID NO: 5451343 - DNA, 25 bp, Homo sapien
aggagccgtagatatcacattgaag

SEQ ID NO: 5451344 - DNA, 25 bp, Homo sapien
aagcacagtccaaagaaggagccgt

SEQ ID NO: 5451345 - DNA, 25 bp, Homo sapien
ctagacgtgagttgtacctatcaat

SEQ ID NO: 5451346 - DNA, 25 bp, Homo sapien
tagacatgcatatcttctagacgtg

SEQ ID NO: 5451347 - DNA, 25 bp, Homo sapien
cgaagtgaaggataacagcagaaat

SEQ ID NO: 5451348 - DNA, 25 bp, Homo sapien
gaaggtctgcaactttcactatgac

SEQ ID NO: 5451349 - DNA, 25 bp, Homo sapien
ggtttgtgatacctctctggactgc

SEQ ID NO: 5451350 - DNA, 25 bp, Homo sapien
tctggactgcttttaactgcgaagt

SEQ ID NO: 5451351 - DNA, 25 bp, Homo sapien
ggtactccatttgcattccacactc

SEQ ID NO: 5451352 - DNA, 25 bp, Homo sapien
tccacactctaatgagagcacaact

SEQ ID NO: 5451353 - DNA, 25 bp, Homo sapien
gtcacaggggtgtgaggtactccat

SEQ ID NO: 5451354 - DNA, 25 bp, Homo sapien
catttgcattccacactctaatgag

SEQ ID NO: 5451355 - DNA, 25 bp, Homo sapien
ctttttgatccagacatatgatttt

SEQ ID NO: 5451356 - DNA, 25 bp, Homo sapien
ttttgatccagacatatgattttga

SEQ ID NO: 5451357 - DNA, 25 bp, Homo sapien
tttgatccagacatatgattttgat

SEQ ID NO: 5451358 - DNA, 25 bp, Homo sapien
tttttgatccagacatatgattttg

SEQ ID NO: 5451359 - DNA, 25 bp, Homo sapien
tcatgcggattgagcaaaaacttcc

SEQ ID NO: 5451360 - DNA, 25 bp, Homo sapien
aacttccataactggagcaatccga

SEQ ID NO: 5451361 - DNA, 25 bp, Homo sapien
cagagattcaacgtacaactcataa

SEQ ID NO: 5451362 - DNA, 25 bp, Homo sapien
atatagtattttgagagcagaaaca

SEQ ID NO: 5451363 - DNA, 25 bp, Homo sapien
cttgaactgaggaagtggataagcc

SEQ ID NO: 5451364 - DNA, 25 bp, Homo sapien
caaaaatatgtctacgacctaagcg

SEQ ID NO: 5451365 - DNA, 25 bp, Homo sapien
tccaaaactccttgaactgaggaag

SEQ ID NO: 5451366 - DNA, 25 bp, Homo sapien
caaaggcctgacaagtttggttcct

SEQ ID NO: 5451367 - DNA, 25 bp, Homo sapien
gagtactacagtctcatatgcagaa

SEQ ID NO: 5451368 - DNA, 25 bp, Homo sapien
cctgtaaggaaactggatctcgctc

SEQ ID NO: 5451369 - DNA, 25 bp, Homo sapien
gcttttttgaagctccctgtaagga

SEQ ID NO: 5451370 - DNA, 25 bp, Homo sapien
gctgtgcggcaaaggaaaatctatt

SEQ ID NO: 5451371 - DNA, 25 bp, Homo sapien
aagatctaatgagcctctgacactt

SEQ ID NO: 5451372 - DNA, 25 bp, Homo sapien
cagttaacataatagccatcaaaag

SEQ ID NO: 5451373 - DNA, 25 bp, Homo sapien
gacttggattcccttggtatggcaa

SEQ ID NO: 5451374 - DNA, 25 bp, Homo sapien
tctcaacttgacctttgggacttgg

SEQ ID NO: 5451375 - DNA, 25 bp, Homo sapien
cagcaaaaccagggctggaaggact

SEQ ID NO: 5451376 - DNA, 25 bp, Homo sapien
accagggctggaaggactggacaac

SEQ ID NO: 5451377 - DNA, 25 bp, Homo sapien
caaaaccagggctggaaggactgga

SEQ ID NO: 5451378 - DNA, 25 bp, Homo sapien
aaaccagggctggaaggactggaca

SEQ ID NO: 5451379 - DNA, 25 bp, Homo sapien
aatgtggtttcttctagcaggtccc

SEQ ID NO: 5451380 - DNA, 25 bp, Homo sapien
cagtgccaatcctagagtgccaaaa

SEQ ID NO: 5451381 - DNA, 25 bp, Homo sapien
ctagtgatgggaatatttgaaaaac

SEQ ID NO: 5451382 - DNA, 25 bp, Homo sapien
agggacaaaagccatcagatgcttt

SEQ ID NO: 5451383 - DNA, 25 bp, Homo sapien
ttttgagaatctcagatcaagctga

SEQ ID NO: 5451384 - DNA, 25 bp, Homo sapien
tctcagatggaatcaattgagctgt

SEQ ID NO: 5451385 - DNA, 25 bp, Homo sapien
ctgatgaaaaggacataatgaacac

SEQ ID NO: 5451386 - DNA, 25 bp, Homo sapien
cagatggaatcaattgagctgttag

SEQ ID NO: 5451387 - DNA, 25 bp, Homo sapien
caaaatacggacagctataaagaag

SEQ ID NO: 5451388 - DNA, 25 bp, Homo sapien
gaagttaaatgaaacagcgtagata

SEQ ID NO: 5451389 - DNA, 25 bp, Homo sapien
tgtgcactatctttcaaaatacgga

SEQ ID NO: 5451390 - DNA, 25 bp, Homo sapien
tgttgttgtgcactatctttcaaaa

SEQ ID NO: 5451391 - DNA, 25 bp, Homo sapien
agcaacggcttccccttatcttcca

SEQ ID NO: 5451392 - DNA, 25 bp, Homo sapien
tccccttatcttccaaatccagaaa

SEQ ID NO: 5451393 - DNA, 25 bp, Homo sapien
ggcttccccttatcttccaaatcca

SEQ ID NO: 5451394 - DNA, 25 bp, Homo sapien
ttccccttatcttccaaatccagaa

SEQ ID NO: 5451395 - DNA, 25 bp, Homo sapien
tgagatactgtctcaggttgagaac

SEQ ID NO: 5451396 - DNA, 25 bp, Homo sapien
ttgcagtattgtaactccctcttaa

SEQ ID NO: 5451397 - DNA, 25 bp, Homo sapien
ggttgagaactattagactgatgga

SEQ ID NO: 5451398 - DNA, 25 bp, Homo sapien
gcagtattgtaactccctcttaaca

SEQ ID NO: 5451399 - DNA, 25 bp, Homo sapien
tgtattactcaatgcaccagaggca

SEQ ID NO: 5451400 - DNA, 25 bp, Homo sapien
gaaaaaggcttgtgactcgattgct

SEQ ID NO: 5451401 - DNA, 25 bp, Homo sapien
gaagagggactacctttgtcctgga

SEQ ID NO: 5451402 - DNA, 25 bp, Homo sapien
tatatgccaagctttctcccgggat

SEQ ID NO: 5451403 - DNA, 25 bp, Homo sapien
gaagtaagcagatttccatcccaag

SEQ ID NO: 5451404 - DNA, 25 bp, Homo sapien
tatatcaatggaccttatcctggcc

SEQ ID NO: 5451405 - DNA, 25 bp, Homo sapien
gcaatagatctaactgacagcatgg

SEQ ID NO: 5451406 - DNA, 25 bp, Homo sapien
tggcctcaattatagacatcagcat

SEQ ID NO: 5451407 - DNA, 25 bp, Homo sapien
tagatttggttataggcaagggacc

SEQ ID NO: 5451408 - DNA, 25 bp, Homo sapien
catttagataactaggccttgagtc

SEQ ID NO: 5451409 - DNA, 25 bp, Homo sapien
caagggaccagttcttgatagacga

SEQ ID NO: 5451410 - DNA, 25 bp, Homo sapien
ccagtgtgtagcacatggcggataa

SEQ ID NO: 5451411 - DNA, 25 bp, Homo sapien
gtctaccgtcaacacagacctccat

SEQ ID NO: 5451412 - DNA, 25 bp, Homo sapien
ctgtctaccgtcaacacagacctcc

SEQ ID NO: 5451413 - DNA, 25 bp, Homo sapien
tgtctaccgtcaacacagacctcca

SEQ ID NO: 5451414 - DNA, 25 bp, Homo sapien
ccctgtctaccgtcaacacagacct

SEQ ID NO: 5451415 - DNA, 25 bp, Homo sapien
acaagttctattattctctcatatc

SEQ ID NO: 5451416 - DNA, 25 bp, Homo sapien
tctcatatctgctgccaggtaaaac

SEQ ID NO: 5451417 - DNA, 25 bp, Homo sapien
tattattctctcatatctgctgcca

SEQ ID NO: 5451418 - DNA, 25 bp, Homo sapien
tatctgctgccaggtaaaacatgcc

SEQ ID NO: 5451419 - DNA, 25 bp, Homo sapien
tcttggctgagtatctatggtggta

SEQ ID NO: 5451420 - DNA, 25 bp, Homo sapien
ggaagtagcgtcacattttaagaag

SEQ ID NO: 5451421 - DNA, 25 bp, Homo sapien
aaatgcatgaaatcttgtccctcct

SEQ ID NO: 5451422 - DNA, 25 bp, Homo sapien
tgctgccttgtcctactctgcagaa

SEQ ID NO: 5451423 - DNA, 25 bp, Homo sapien
caaaggtgtataggtgaagctatcc

SEQ ID NO: 5451424 - DNA, 25 bp, Homo sapien
gaagctatcccactcaaaggattcg

SEQ ID NO: 5451425 - DNA, 25 bp, Homo sapien
cacccgtccccagtatatttattgc

SEQ ID NO: 5451426 - DNA, 25 bp, Homo sapien
gtggcttcctctcagcttatccaaa

SEQ ID NO: 5451427 - DNA, 25 bp, Homo sapien
cttgggatgcaaagcacatttccaa

SEQ ID NO: 5451428 - DNA, 25 bp, Homo sapien
ttgggatgcaaagcacatttccaat

SEQ ID NO: 5451429 - DNA, 25 bp, Homo sapien
taaggcgctcttgagttcaatctgg

SEQ ID NO: 5451430 - DNA, 25 bp, Homo sapien
tgtcaactattacagatagcactgt

SEQ ID NO: 5451431 - DNA, 25 bp, Homo sapien
agatgtagctcttgttttaaggcgc

SEQ ID NO: 5451432 - DNA, 25 bp, Homo sapien
tgccaaatgcatgctactcaatcat

SEQ ID NO: 5451433 - DNA, 25 bp, Homo sapien
atcagttatacatctttatcataga

SEQ ID NO: 5451434 - DNA, 25 bp, Homo sapien
tatttactatcagttatacatcttt

SEQ ID NO: 5451435 - DNA, 25 bp, Homo sapien
ttatttgtatcattccttctaatac

SEQ ID NO: 5451436 - DNA, 25 bp, Homo sapien
cacagcatcagcctattgaaaatat

SEQ ID NO: 5451437 - DNA, 25 bp, Homo sapien
gccaaagcaaaacactacgacctca

SEQ ID NO: 5451438 - DNA, 25 bp, Homo sapien
tacgacctcactagctagagatgaa

SEQ ID NO: 5451439 - DNA, 25 bp, Homo sapien
ggagagaagctactaagagcacaaa

SEQ ID NO: 5451440 - DNA, 25 bp, Homo sapien
aatgaggtatcagggaaaattgtca

SEQ ID NO: 5451441 - DNA, 25 bp, Homo sapien
cacgtacagaaaagtaaagcaaaca

SEQ ID NO: 5451442 - DNA, 25 bp, Homo sapien
tgactgtcatttacaatagtcacaa

SEQ ID NO: 5451443 - DNA, 25 bp, Homo sapien
tctaggatagcttgcatgtgctccc

SEQ ID NO: 5451444 - DNA, 25 bp, Homo sapien
cttctttgaacaacagctccctcaa

SEQ ID NO: 5451445 - DNA, 25 bp, Homo sapien
tatgtgatataaaataatctaaaag

SEQ ID NO: 5451446 - DNA, 25 bp, Homo sapien
atgtgatataaaataatctaaaagt

SEQ ID NO: 5451447 - DNA, 25 bp, Homo sapien
gctttaaactcaggagcgtcagtca

SEQ ID NO: 5451448 - DNA, 25 bp, Homo sapien
gattggtcctctgactctcctagtt

SEQ ID NO: 5451449 - DNA, 25 bp, Homo sapien
tcttagggcaacagcaactgcttta

SEQ ID NO: 5451450 - DNA, 25 bp, Homo sapien
gacgactggctagagttatcaattg

SEQ ID NO: 5451451 - DNA, 25 bp, Homo sapien
ccttccaggtatcagcacacaggtc

SEQ ID NO: 5451452 - DNA, 25 bp, Homo sapien
ggtgcgtttcgctatctcttatctt

SEQ ID NO: 5451453 - DNA, 25 bp, Homo sapien
cttccaggtatcagcacacaggtct

SEQ ID NO: 5451454 - DNA, 25 bp, Homo sapien
ttcctgggtgcgtttcgctatctct

SEQ ID NO: 5451455 - DNA, 25 bp, Homo sapien
tcacaaagaagagaaagaaagccac

SEQ ID NO: 5451456 - DNA, 25 bp, Homo sapien
aaagaagagaaagaaagccacagct

SEQ ID NO: 5451457 - DNA, 25 bp, Homo sapien
aagagaaagaaagccacagctttac

SEQ ID NO: 5451458 - DNA, 25 bp, Homo sapien
aagaagagaaagaaagccacagctt

SEQ ID NO: 5451459 - DNA, 25 bp, Homo sapien
ccggttgtgctcaatgctggttatc

SEQ ID NO: 5451460 - DNA, 25 bp, Homo sapien
gaggtcccggttgtgctcaatgctg

SEQ ID NO: 5451461 - DNA, 25 bp, Homo sapien
cacagttttcatagtacttgcgcaa

SEQ ID NO: 5451462 - DNA, 25 bp, Homo sapien
gtacttgcgcaaggctcggtactgc

SEQ ID NO: 5451463 - DNA, 25 bp, Homo sapien
gatttatatccaacagcgtgtgaac

SEQ ID NO: 5451464 - DNA, 25 bp, Homo sapien
agatttatatccaacagcgtgtgaa

SEQ ID NO: 5451465 - DNA, 25 bp, Homo sapien
aagatttatatccaacagcgtgtga

SEQ ID NO: 5451466 - DNA, 25 bp, Homo sapien
atttatatccaacagcgtgtgaacc

SEQ ID NO: 5451467 - DNA, 25 bp, Homo sapien
tgtttacatagagatacagatggaa

SEQ ID NO: 5451468 - DNA, 25 bp, Homo sapien
gatacagatggaaaagaaaacacac

SEQ ID NO: 5451469 - DNA, 25 bp, Homo sapien
tacagatggaaaagaaaacacacac

SEQ ID NO: 5451470 - DNA, 25 bp, Homo sapien
gagatacagatggaaaagaaaacac

SEQ ID NO: 5451471 - DNA, 25 bp, Homo sapien
tcctgccacagcacgaatctgatca

SEQ ID NO: 5451472 - DNA, 25 bp, Homo sapien
ctatttttaatcctgccacagcacg

SEQ ID NO: 5451473 - DNA, 25 bp, Homo sapien
ttttaatcctgccacagcacgaatc

SEQ ID NO: 5451474 - DNA, 25 bp, Homo sapien
gccacagcacgaatctgatcaattt

SEQ ID NO: 5451475 - DNA, 25 bp, Homo sapien
aataaaggactataaatcacgctgc

SEQ ID NO: 5451476 - DNA, 25 bp, Homo sapien
aaataaaggactataaatcacgctg

SEQ ID NO: 5451477 - DNA, 25 bp, Homo sapien
taaaataaaggactataaatcacgc

SEQ ID NO: 5451478 - DNA, 25 bp, Homo sapien
taaaggactataaatcacgctgcta

SEQ ID NO: 5451479 - DNA, 25 bp, Homo sapien
tatgattattaccacttgctacgct

SEQ ID NO: 5451480 - DNA, 25 bp, Homo sapien
aatggtgccgcaattcaaatgtact

SEQ ID NO: 5451481 - DNA, 25 bp, Homo sapien
tgaaggagaaacttgacactggtgc

SEQ ID NO: 5451482 - DNA, 25 bp, Homo sapien
tgaaatgatttcaatgtcacaggac

SEQ ID NO: 5451483 - DNA, 25 bp, Homo sapien
caggggagctgaatttgatcagttc

SEQ ID NO: 5451484 - DNA, 25 bp, Homo sapien
cagcaggggagctgaatttgatcag

SEQ ID NO: 5451485 - DNA, 25 bp, Homo sapien
ccagttcatcagcaggggagctgaa

SEQ ID NO: 5451486 - DNA, 25 bp, Homo sapien
ggggagctgaatttgatcagttctg

SEQ ID NO: 5451487 - DNA, 25 bp, Homo sapien
gaaacagatagctaatacagaccag

SEQ ID NO: 5451488 - DNA, 25 bp, Homo sapien
cactggtgcattaatgaaagcctgc

SEQ ID NO: 5451489 - DNA, 25 bp, Homo sapien
cagcctgggttgcataatgtggacc

SEQ ID NO: 5451490 - DNA, 25 bp, Homo sapien
tcccaagttgggtatgacaggctag

SEQ ID NO: 5451491 - DNA, 25 bp, Homo sapien
aatggggagatgatctcctattcca

SEQ ID NO: 5451492 - DNA, 25 bp, Homo sapien
acaagaaatggggagatgatctcct

SEQ ID NO: 5451493 - DNA, 25 bp, Homo sapien
ggagatgatctcctattccataaat

SEQ ID NO: 5451494 - DNA, 25 bp, Homo sapien
caagaaatggggagatgatctccta

SEQ ID NO: 5451495 - DNA, 25 bp, Homo sapien
aggtctgccattagacagattcctg

SEQ ID NO: 5451496 - DNA, 25 bp, Homo sapien
tgccattagacagattcctgctgca

SEQ ID NO: 5451497 - DNA, 25 bp, Homo sapien
tctgccattagacagattcctgctg

SEQ ID NO: 5451498 - DNA, 25 bp, Homo sapien
ggtctgccattagacagattcctgc

SEQ ID NO: 5451499 - DNA, 25 bp, Homo sapien
ttctctgccacttttgcaggcaaat

SEQ ID NO: 5451500 - DNA, 25 bp, Homo sapien
cttttctctgccacttttgcaggca

SEQ ID NO: 5451501 - DNA, 25 bp, Homo sapien
ctaaacgtcttcaataagtcttctt

SEQ ID NO: 5451502 - DNA, 25 bp, Homo sapien
tctgccacttttgcaggcaaataaa

SEQ ID NO: 5451503 - DNA, 25 bp, Homo sapien
tactgatcacagatacgtactttga

SEQ ID NO: 5451504 - DNA, 25 bp, Homo sapien
gatcacagatacgtactttgacttc

SEQ ID NO: 5451505 - DNA, 25 bp, Homo sapien
gatacgtactttgacttctgtttac

SEQ ID NO: 5451506 - DNA, 25 bp, Homo sapien
tcacagatacgtactttgacttctg

SEQ ID NO: 5451507 - DNA, 25 bp, Homo sapien
tatggccctggttctactgacctgt

SEQ ID NO: 5451508 - DNA, 25 bp, Homo sapien
tgtttcatggttacagaccctcacg

SEQ ID NO: 5451509 - DNA, 25 bp, Homo sapien
tttcttcaagtatcctaacacaggg

SEQ ID NO: 5451510 - DNA, 25 bp, Homo sapien
agcacaggatctgacacaagctggg

SEQ ID NO: 5451511 - DNA, 25 bp, Homo sapien
taaagagtttatagactaggaccta

SEQ ID NO: 5451512 - DNA, 25 bp, Homo sapien
tgaactcaaagaacagtgaagcttt

SEQ ID NO: 5451513 - DNA, 25 bp, Homo sapien
tgtctgtcgccatgtgctacacaac

SEQ ID NO: 5451514 - DNA, 25 bp, Homo sapien
taatacgacagtgttaggcttacaa

SEQ ID NO: 5451515 - DNA, 25 bp, Homo sapien
gctgaagcccaaacccttagagtga

SEQ ID NO: 5451516 - DNA, 25 bp, Homo sapien
gatgcaccagagactagaggttgag

SEQ ID NO: 5451517 - DNA, 25 bp, Homo sapien
ccatgagggtgaggcactaatccaa

SEQ ID NO: 5451518 - DNA, 25 bp, Homo sapien
tgtttcccatccaatagtccagagt

SEQ ID NO: 5451519 - DNA, 25 bp, Homo sapien
aatattcgggtcttatgtagagtgc

SEQ ID NO: 5451520 - DNA, 25 bp, Homo sapien
cctgcctcattctgaagtagataaa

SEQ ID NO: 5451521 - DNA, 25 bp, Homo sapien
tagagtgctaagtatacttactccc

SEQ ID NO: 5451522 - DNA, 25 bp, Homo sapien
cagcaagacttttatgttgccagca

SEQ ID NO: 5451523 - DNA, 25 bp, Homo sapien
tgtaaatcaacctcataagtccatc

SEQ ID NO: 5451524 - DNA, 25 bp, Homo sapien
tccaaaggcaacacggaggaagtct

SEQ ID NO: 5451525 - DNA, 25 bp, Homo sapien
cattctgacaagacatacaactgtg

SEQ ID NO: 5451526 - DNA, 25 bp, Homo sapien
tgaaattcacgggtcatgacaggag

SEQ ID NO: 5451527 - DNA, 25 bp, Homo sapien
cttgcttacagcggcttgtcaagga

SEQ ID NO: 5451528 - DNA, 25 bp, Homo sapien
tttttcttgtgctctctgagatact

SEQ ID NO: 5451529 - DNA, 25 bp, Homo sapien
ttacagcggcttgtcaaggaaagag

SEQ ID NO: 5451530 - DNA, 25 bp, Homo sapien
tgcttacagcggcttgtcaaggaaa

SEQ ID NO: 5451531 - DNA, 25 bp, Homo sapien
gctggttagcagaacacacttggaa

SEQ ID NO: 5451532 - DNA, 25 bp, Homo sapien
tacagacattagatgctcagacaca

SEQ ID NO: 5451533 - DNA, 25 bp, Homo sapien
taaacatcatgagtagcagtcgcca

SEQ ID NO: 5451534 - DNA, 25 bp, Homo sapien
taggttctgattccgtagtctggag

SEQ ID NO: 5451535 - DNA, 25 bp, Homo sapien
ggctcaatctgctctaccgtgggat

SEQ ID NO: 5451536 - DNA, 25 bp, Homo sapien
taaaattgcaatcctgtaagtggca

SEQ ID NO: 5451537 - DNA, 25 bp, Homo sapien
tgacacactgatcacaccacagagg

SEQ ID NO: 5451538 - DNA, 25 bp, Homo sapien
tcagatgtcacctaagagccgagta

SEQ ID NO: 5451539 - DNA, 25 bp, Homo sapien
cactgggtaggtgcacatagaatac

SEQ ID NO: 5451540 - DNA, 25 bp, Homo sapien
aatcactgggtaggtgcacatagaa

SEQ ID NO: 5451541 - DNA, 25 bp, Homo sapien
tgggtaggtgcacatagaatacttt

SEQ ID NO: 5451542 - DNA, 25 bp, Homo sapien
caaatcactgggtaggtgcacatag

SEQ ID NO: 5451543 - DNA, 25 bp, Homo sapien
cagtggactcgatctggacccagaa

SEQ ID NO: 5451544 - DNA, 25 bp, Homo sapien
tgtcagtcaataaaaacggtcccca

SEQ ID NO: 5451545 - DNA, 25 bp, Homo sapien
gattttcattccaacaagccaggga

SEQ ID NO: 5451546 - DNA, 25 bp, Homo sapien
aaagtaggccctctgcgcagtggct

SEQ ID NO: 5451547 - DNA, 25 bp, Homo sapien
tatacctggcactattagatctggc

SEQ ID NO: 5451548 - DNA, 25 bp, Homo sapien
gagatgaccatatcacaagacaggg

SEQ ID NO: 5451549 - DNA, 25 bp, Homo sapien
tcaacagagtgctatgcccaataca

SEQ ID NO: 5451550 - DNA, 25 bp, Homo sapien
caccagagagaattatatagcccaa

SEQ ID NO: 5451551 - DNA, 25 bp, Homo sapien
tacttggcaagttaggatggccaac

SEQ ID NO: 5451552 - DNA, 25 bp, Homo sapien
gggagggccactattacgactttga

SEQ ID NO: 5451553 - DNA, 25 bp, Homo sapien
gatggccaacatatttctataaggg

SEQ ID NO: 5451554 - DNA, 25 bp, Homo sapien
tatgtttactgactagggagggcca

SEQ ID NO: 5451555 - DNA, 25 bp, Homo sapien
caaatgtcttctctgcgtttctgtt

SEQ ID NO: 5451556 - DNA, 25 bp, Homo sapien
aatgtcttctctgcgtttctgttgc

SEQ ID NO: 5451557 - DNA, 25 bp, Homo sapien
aaatgtcttctctgcgtttctgttg

SEQ ID NO: 5451558 - DNA, 25 bp, Homo sapien
tcaaatgtcttctctgcgtttctgt

SEQ ID NO: 5451559 - DNA, 25 bp, Homo sapien
caagactaagacttctaaacaaatg

SEQ ID NO: 5451560 - DNA, 25 bp, Homo sapien
taaacaaatgccatccccagtcaca

SEQ ID NO: 5451561 - DNA, 25 bp, Homo sapien
cctctgtgagctcgcatttttaaaa

SEQ ID NO: 5451562 - DNA, 25 bp, Homo sapien
gaaacagaaatcatccacagaactg

SEQ ID NO: 5451563 - DNA, 25 bp, Homo sapien
tatgccactcaatacacgatacgtt

SEQ ID NO: 5451564 - DNA, 25 bp, Homo sapien
tgtggttcatcaaataacctggagc

SEQ ID NO: 5451565 - DNA, 25 bp, Homo sapien
tgataacatgcccaacattgcaatg

SEQ ID NO: 5451566 - DNA, 25 bp, Homo sapien
tgtgttccagccatttgggtcactc

SEQ ID NO: 5451567 - DNA, 25 bp, Homo sapien
cttgtatgaagtaacccagggacct

SEQ ID NO: 5451568 - DNA, 25 bp, Homo sapien
gactttgttacgtagcccgatgctg

SEQ ID NO: 5451569 - DNA, 25 bp, Homo sapien
ccatggcagggacaaaacaattcta

SEQ ID NO: 5451570 - DNA, 25 bp, Homo sapien
taatgcagaccatggatttcacgga

SEQ ID NO: 5451571 - DNA, 25 bp, Homo sapien
ggacaacaaacattctaagagagac

SEQ ID NO: 5451572 - DNA, 25 bp, Homo sapien
tatatggtcccaaatgctagttacg

SEQ ID NO: 5451573 - DNA, 25 bp, Homo sapien
gctagttacgaagtcaacctggatt

SEQ ID NO: 5451574 - DNA, 25 bp, Homo sapien
taagagagactgtagccaaaattgc

SEQ ID NO: 5451575 - DNA, 25 bp, Homo sapien
gagtcttgataaccaccagggaggg

SEQ ID NO: 5451576 - DNA, 25 bp, Homo sapien
tgctccacaggtagcccaaatggca

SEQ ID NO: 5451577 - DNA, 25 bp, Homo sapien
gacaagtaaccataaacaacgcgct

SEQ ID NO: 5451578 - DNA, 25 bp, Homo sapien
tggcacaacctcgatcagcatgtag

SEQ ID NO: 5451579 - DNA, 25 bp, Homo sapien
cacacgggacaatggcaaaaggaga

SEQ ID NO: 5451580 - DNA, 25 bp, Homo sapien
ttacgagggctctatctaaggaaaa

SEQ ID NO: 5451581 - DNA, 25 bp, Homo sapien
tgctaataccgcgaggcacacggga

SEQ ID NO: 5451582 - DNA, 25 bp, Homo sapien
gcttgaggaaccacgaacatactat

SEQ ID NO: 5451583 - DNA, 25 bp, Homo sapien
tcatggttgtgtgacgagaaccccg

SEQ ID NO: 5451584 - DNA, 25 bp, Homo sapien
agatcttgatctaaggccctgggaa

SEQ ID NO: 5451585 - DNA, 25 bp, Homo sapien
gaagccttgtaagccaccagactga

SEQ ID NO: 5451586 - DNA, 25 bp, Homo sapien
ccagccgtggctacataattcgtca

SEQ ID NO: 5451587 - DNA, 25 bp, Homo sapien
gatatttttgaccaaacttcctcaa

SEQ ID NO: 5451588 - DNA, 25 bp, Homo sapien
taaatgttataacactaaaagacac

SEQ ID NO: 5451589 - DNA, 25 bp, Homo sapien
aatcgatggtatatatgtgatccag

SEQ ID NO: 5451590 - DNA, 25 bp, Homo sapien
ttcatccctagccaaaattgacatt

SEQ ID NO: 5451591 - DNA, 25 bp, Homo sapien
gtgttccagtatccaccaactcata

SEQ ID NO: 5451592 - DNA, 25 bp, Homo sapien
ctaaatcctgaagtgttccagtatc

SEQ ID NO: 5451593 - DNA, 25 bp, Homo sapien
tgaagtgttccagtatccaccaact

SEQ ID NO: 5451594 - DNA, 25 bp, Homo sapien
taaatcctgaagtgttccagtatcc

SEQ ID NO: 5451595 - DNA, 25 bp, Homo sapien
gaatatcgtaagtcaacatgtgtac

SEQ ID NO: 5451596 - DNA, 25 bp, Homo sapien
tccagaatatcgtaagtcaacatgt

SEQ ID NO: 5451597 - DNA, 25 bp, Homo sapien
taagtcaacatgtgtacgacactcc

SEQ ID NO: 5451598 - DNA, 25 bp, Homo sapien
tatcgtaagtcaacatgtgtacgac

SEQ ID NO: 5451599 - DNA, 25 bp, Homo sapien
tcctgctggatgtgaaaaaggcagc

SEQ ID NO: 5451600 - DNA, 25 bp, Homo sapien
tatcacagttgctttcggcagccgt

SEQ ID NO: 5451601 - DNA, 25 bp, Homo sapien
cagtgaactggtaaactgtgacttc

SEQ ID NO: 5451602 - DNA, 25 bp, Homo sapien
tgaccacacgaataaccagcaaggc

SEQ ID NO: 5451603 - DNA, 25 bp, Homo sapien
ggtaaagccaaaagtgttaatggca

SEQ ID NO: 5451604 - DNA, 25 bp, Homo sapien
ccaaaagtgttaatggcaggtaaca

SEQ ID NO: 5451605 - DNA, 25 bp, Homo sapien
agccaaaagtgttaatggcaggtaa

SEQ ID NO: 5451606 - DNA, 25 bp, Homo sapien
aaagccaaaagtgttaatggcaggt

SEQ ID NO: 5451607 - DNA, 25 bp, Homo sapien
ggaaatagtctgtcggcctctcact

SEQ ID NO: 5451608 - DNA, 25 bp, Homo sapien
gatgtcatggactgaaccaagagga

SEQ ID NO: 5451609 - DNA, 25 bp, Homo sapien
catgaacagcttaggagcagcgggt

SEQ ID NO: 5451610 - DNA, 25 bp, Homo sapien
tctcagttcagacattcacttggtg

SEQ ID NO: 5451611 - DNA, 25 bp, Homo sapien
tgtttggtgctaagtttaccagaga

SEQ ID NO: 5451612 - DNA, 25 bp, Homo sapien
ggtgctaagtttaccagagagttta

SEQ ID NO: 5451613 - DNA, 25 bp, Homo sapien
tgcttgtttggtgctaagtttacca

SEQ ID NO: 5451614 - DNA, 25 bp, Homo sapien
tttggtgctaagtttaccagagagt

SEQ ID NO: 5451615 - DNA, 25 bp, Homo sapien
cagatgggttggtttgatggattca

SEQ ID NO: 5451616 - DNA, 25 bp, Homo sapien
tgtacagggctacactgggcatttc

SEQ ID NO: 5451617 - DNA, 25 bp, Homo sapien
tcatttaggaaactcagtggtactc

SEQ ID NO: 5451618 - DNA, 25 bp, Homo sapien
gatggattcaagatggcttcaatca

SEQ ID NO: 5451619 - DNA, 25 bp, Homo sapien
tattatttgcataggtatagcccct

SEQ ID NO: 5451620 - DNA, 25 bp, Homo sapien
aataatcactgcctcacaactatgg

SEQ ID NO: 5451621 - DNA, 25 bp, Homo sapien
aatatgagggatagacgagagctcc

SEQ ID NO: 5451622 - DNA, 25 bp, Homo sapien
tatagcccctacagtgttgttcaaa

SEQ ID NO: 5451623 - DNA, 25 bp, Homo sapien
ttttaccagttgaggatcccaaatc

SEQ ID NO: 5451624 - DNA, 25 bp, Homo sapien
gaaactgagctcataccctcaagtg

SEQ ID NO: 5451625 - DNA, 25 bp, Homo sapien
ttaaaggcacctccagtccatacag

SEQ ID NO: 5451626 - DNA, 25 bp, Homo sapien
caggaaaaggaagatcgtgatagtc

SEQ ID NO: 5451627 - DNA, 25 bp, Homo sapien
aagatgagagtgaagttaaacacat

SEQ ID NO: 5451628 - DNA, 25 bp, Homo sapien
gaagatgagagtgaagttaaacaca

SEQ ID NO: 5451629 - DNA, 25 bp, Homo sapien
aaagcgatattaagtcgttcaaatc

SEQ ID NO: 5451630 - DNA, 25 bp, Homo sapien
aaattgtaaagcgatattaagtcgt

SEQ ID NO: 5451631 - DNA, 25 bp, Homo sapien
tagaaaattgtaaagcgatattaag

SEQ ID NO: 5451632 - DNA, 25 bp, Homo sapien
taatattagaaaattgtaaagcgat

SEQ ID NO: 5451633 - DNA, 25 bp, Homo sapien
aaatcactctaaaccaacgaaaatg

SEQ ID NO: 5451634 - DNA, 25 bp, Homo sapien
cttttactgtggtgagttgcctgga

SEQ ID NO: 5451635 - DNA, 25 bp, Homo sapien
aaaatccttttactgtggtgagttg

SEQ ID NO: 5451636 - DNA, 25 bp, Homo sapien
gggcaaattaaatcactctaaacca

SEQ ID NO: 5451637 - DNA, 25 bp, Homo sapien
ttaggctttgaattctctggcaata

SEQ ID NO: 5451638 - DNA, 25 bp, Homo sapien
tgcagccgtcaggaccagttctagg

SEQ ID NO: 5451639 - DNA, 25 bp, Homo sapien
tttgttaggctttgaattctctggc

SEQ ID NO: 5451640 - DNA, 25 bp, Homo sapien
gtgtcaaatgcagccgtcaggacca

SEQ ID NO: 5451641 - DNA, 25 bp, Homo sapien
taaatacagatactcgtgttaggct

SEQ ID NO: 5451642 - DNA, 25 bp, Homo sapien
tacaataaaatgtgaccagtcagta

SEQ ID NO: 5451643 - DNA, 25 bp, Homo sapien
tgtaagagggcacatgtgaccttga

SEQ ID NO: 5451644 - DNA, 25 bp, Homo sapien
cctgtcctgagggaacaatgtaaga

SEQ ID NO: 5451645 - DNA, 25 bp, Homo sapien
tactcgctgttccaaactgcttttt

SEQ ID NO: 5451646 - DNA, 25 bp, Homo sapien
gctgttccaaactgctttttgtaga

SEQ ID NO: 5451647 - DNA, 25 bp, Homo sapien
tccaaactgctttttgtagactgct

SEQ ID NO: 5451648 - DNA, 25 bp, Homo sapien
aaatattactcgctgttccaaactg

SEQ ID NO: 5451649 - DNA, 25 bp, Homo sapien
agaagtcacgaacattttcctccag

SEQ ID NO: 5451650 - DNA, 25 bp, Homo sapien
cagccagagcacaaagggtaaacac

SEQ ID NO: 5451651 - DNA, 25 bp, Homo sapien
cctccagagggttgtcacggatgga

SEQ ID NO: 5451652 - DNA, 25 bp, Homo sapien
ctagggttaaagaagtcacgaacat

SEQ ID NO: 5451653 - DNA, 25 bp, Homo sapien
tattgctcaaataccactagtgacc

SEQ ID NO: 5451654 - DNA, 25 bp, Homo sapien
taatactttcagacacaaggaaggt

SEQ ID NO: 5451655 - DNA, 25 bp, Homo sapien
tggtgccggatatcttccacaagtc

SEQ ID NO: 5451656 - DNA, 25 bp, Homo sapien
taattgttttcatggtccacaggtc

SEQ ID NO: 5451657 - DNA, 25 bp, Homo sapien
attttggtcacctttctgtcagcag

SEQ ID NO: 5451658 - DNA, 25 bp, Homo sapien
taaatgaccaccatccatgaactaa

SEQ ID NO: 5451659 - DNA, 25 bp, Homo sapien
tctgcattgtatggcctcatagata

SEQ ID NO: 5451660 - DNA, 25 bp, Homo sapien
catagatatatcaccaacagcactg

SEQ ID NO: 5451661 - DNA, 25 bp, Homo sapien
atcttctttaggcaggcctgctagc

SEQ ID NO: 5451662 - DNA, 25 bp, Homo sapien
tctttaggcaggcctgctagccata

SEQ ID NO: 5451663 - DNA, 25 bp, Homo sapien
ttaggcaggcctgctagccataact

SEQ ID NO: 5451664 - DNA, 25 bp, Homo sapien
cttctttaggcaggcctgctagcca

SEQ ID NO: 5451665 - DNA, 25 bp, Homo sapien
gaagtaatcactcttcccgttgttc

SEQ ID NO: 5451666 - DNA, 25 bp, Homo sapien
actcttcccgttgttcccacagtgt

SEQ ID NO: 5451667 - DNA, 25 bp, Homo sapien
gtaatcactcttcccgttgttccca

SEQ ID NO: 5451668 - DNA, 25 bp, Homo sapien
aggcagaagtaatcactcttcccgt

SEQ ID NO: 5451669 - DNA, 25 bp, Homo sapien
ttaatagtgattggaagaatacaac

SEQ ID NO: 5451670 - DNA, 25 bp, Homo sapien
aaatagccacatatacacctggcta

SEQ ID NO: 5451671 - DNA, 25 bp, Homo sapien
aacagttctatggtttgtatacctt

SEQ ID NO: 5451672 - DNA, 25 bp, Homo sapien
caaaactagtaatacgatatgggaa

SEQ ID NO: 5451673 - DNA, 25 bp, Homo sapien
gttttattcatctgtgaaatagtga

SEQ ID NO: 5451674 - DNA, 25 bp, Homo sapien
tacttaatcttcagattctcagttt

SEQ ID NO: 5451675 - DNA, 25 bp, Homo sapien
tcaggtatatttacttaatcttcag

SEQ ID NO: 5451676 - DNA, 25 bp, Homo sapien
agctatagaaatcaggtatatttac

SEQ ID NO: 5451677 - DNA, 25 bp, Homo sapien
cagcctgaatgcctttagtcggaag

SEQ ID NO: 5451678 - DNA, 25 bp, Homo sapien
gaagaggtgtcttgcgtaccagaag

SEQ ID NO: 5451679 - DNA, 25 bp, Homo sapien
aaacaactttgcatatctcatggga

SEQ ID NO: 5451680 - DNA, 25 bp, Homo sapien
catgagttgacagtaaattgcccca

SEQ ID NO: 5451681 - DNA, 25 bp, Homo sapien
cataatctcattgcagtaggtctgg

SEQ ID NO: 5451682 - DNA, 25 bp, Homo sapien
taaactctgccaacctgatgctaat

SEQ ID NO: 5451683 - DNA, 25 bp, Homo sapien
gaatccagacatcgactttaaggcc

SEQ ID NO: 5451684 - DNA, 25 bp, Homo sapien
tgaaaggaatgatccaagaactggg

SEQ ID NO: 5451685 - DNA, 25 bp, Homo sapien
cagagcttccctgtaaggatacaac

SEQ ID NO: 5451686 - DNA, 25 bp, Homo sapien
tactgaagctctaactcccatggga

SEQ ID NO: 5451687 - DNA, 25 bp, Homo sapien
gcagtcataagggtgaagctctcat

SEQ ID NO: 5451688 - DNA, 25 bp, Homo sapien
gaagaaggcccttacaaataactga

SEQ ID NO: 5451689 - DNA, 25 bp, Homo sapien
gctgagaatatgacacattcatgcc

SEQ ID NO: 5451690 - DNA, 25 bp, Homo sapien
tgaggacctactgttgtgaggaatg

SEQ ID NO: 5451691 - DNA, 25 bp, Homo sapien
catacatagaactgaattaacgtcc

SEQ ID NO: 5451692 - DNA, 25 bp, Homo sapien
taaaccttcttgcattgaaacactg

SEQ ID NO: 5451693 - DNA, 25 bp, Homo sapien
cacattccagtatgggccaatataa

SEQ ID NO: 5451694 - DNA, 25 bp, Homo sapien
agttaatagttagtgtccatcctga

SEQ ID NO: 5451695 - DNA, 25 bp, Homo sapien
aagtataaagctaattctctgtcac

SEQ ID NO: 5451696 - DNA, 25 bp, Homo sapien
gagctagtatttgtagcatggaaca

SEQ ID NO: 5451697 - DNA, 25 bp, Homo sapien
tattttattaacacatacactttcc

SEQ ID NO: 5451698 - DNA, 25 bp, Homo sapien
gggaaaaatgtcatgagtagagcag

SEQ ID NO: 5451699 - DNA, 25 bp, Homo sapien
aaaatgtcatgagtagagcagaaag

SEQ ID NO: 5451700 - DNA, 25 bp, Homo sapien
aatcatgccagcctaatgaccttgc

SEQ ID NO: 5451701 - DNA, 25 bp, Homo sapien
tttcagaggagagtatttatgcata

SEQ ID NO: 5451702 - DNA, 25 bp, Homo sapien
ctaggaagttggcaatttgtcttct

SEQ ID NO: 5451703 - DNA, 25 bp, Homo sapien
ctgagaagacagactaatttaagac

SEQ ID NO: 5451704 - DNA, 25 bp, Homo sapien
tgctgtcatattgaaagactcaatg

SEQ ID NO: 5451705 - DNA, 25 bp, Homo sapien
tatccagtcagttaacaagaaaatg

SEQ ID NO: 5451706 - DNA, 25 bp, Homo sapien
tgtgcaaagaaacaacctagcttat

SEQ ID NO: 5451707 - DNA, 25 bp, Homo sapien
tcacctcctctgactcaaattaggg

SEQ ID NO: 5451708 - DNA, 25 bp, Homo sapien
taaatcgagatctctgcaacattga

SEQ ID NO: 5451709 - DNA, 25 bp, Homo sapien
actgtgcctgtctcacactggtatt

SEQ ID NO: 5451710 - DNA, 25 bp, Homo sapien
cgagtaataaggttcaaagtagcta

SEQ ID NO: 5451711 - DNA, 25 bp, Homo sapien
caaatatggtactttgcaaataggg

SEQ ID NO: 5451712 - DNA, 25 bp, Homo sapien
aatataggaggcataaacgagtaat

SEQ ID NO: 5451713 - DNA, 25 bp, Homo sapien
tgcttggaagggtccagtgcttctc

SEQ ID NO: 5451714 - DNA, 25 bp, Homo sapien
gccagctttatagacaggcaacctg

SEQ ID NO: 5451715 - DNA, 25 bp, Homo sapien
gcattttcttgcacgaggccctgca

SEQ ID NO: 5451716 - DNA, 25 bp, Homo sapien
gttgcgtcaatatcacctaagccct

SEQ ID NO: 5451717 - DNA, 25 bp, Homo sapien
taagtaaaaactggctgacatacct

SEQ ID NO: 5451718 - DNA, 25 bp, Homo sapien
acctccaactggataaggtcaccag

SEQ ID NO: 5451719 - DNA, 25 bp, Homo sapien
tatgaccagggcatcctatacttgt

SEQ ID NO: 5451720 - DNA, 25 bp, Homo sapien
ggataccaattaaaccatgctctga

SEQ ID NO: 5451721 - DNA, 25 bp, Homo sapien
taacagaggacttcatgatgattgc

SEQ ID NO: 5451722 - DNA, 25 bp, Homo sapien
tgtaacattacaacaaagctgtgtg

SEQ ID NO: 5451723 - DNA, 25 bp, Homo sapien
gaacaacctcaaaggaagatggtac

SEQ ID NO: 5451724 - DNA, 25 bp, Homo sapien
tattttcaactctgtctctaggcaa

SEQ ID NO: 5451725 - DNA, 25 bp, Homo sapien
tgaaattcactggaacagatgactg

SEQ ID NO: 5451726 - DNA, 25 bp, Homo sapien
gatgactgacgtgatgctctcagtg

SEQ ID NO: 5451727 - DNA, 25 bp, Homo sapien
ggaacagatgactgacgtgatgctc

SEQ ID NO: 5451728 - DNA, 25 bp, Homo sapien
tgtgaaattcactggaacagatgac

SEQ ID NO: 5451729 - DNA, 25 bp, Homo sapien
cctggaatgttgtggtggcccctgc

SEQ ID NO: 5451730 - DNA, 25 bp, Homo sapien
tcttagaacatgactcgttggacca

SEQ ID NO: 5451731 - DNA, 25 bp, Homo sapien
gaccaaataaccacatagtgctccc

SEQ ID NO: 5451732 - DNA, 25 bp, Homo sapien
tggccacagtgacaattccagagat

SEQ ID NO: 5451733 - DNA, 25 bp, Homo sapien
ggctgaacagctacggaatgaattg

SEQ ID NO: 5451734 - DNA, 25 bp, Homo sapien
tataaactcttggaaggcatgcatt

SEQ ID NO: 5451735 - DNA, 25 bp, Homo sapien
ggcatgcattaatgtcaggcctaat

SEQ ID NO: 5451736 - DNA, 25 bp, Homo sapien
tctttacaaaggtagagtcagtccc

SEQ ID NO: 5451737 - DNA, 25 bp, Homo sapien
taaaacacatgaagctaaaatatct

SEQ ID NO: 5451738 - DNA, 25 bp, Homo sapien
atcaatatttctcaaataaggcggg

SEQ ID NO: 5451739 - DNA, 25 bp, Homo sapien
aatatctacagtaaaaaggcagata

SEQ ID NO: 5451740 - DNA, 25 bp, Homo sapien
cataatgcacggaaaatcaatattt

SEQ ID NO: 5451741 - DNA, 25 bp, Homo sapien
actcaggtataggataaaggtgtca

SEQ ID NO: 5451742 - DNA, 25 bp, Homo sapien
gcttcagttttagcactagacctat

SEQ ID NO: 5451743 - DNA, 25 bp, Homo sapien
tatagcactacctggaatctggtca

SEQ ID NO: 5451744 - DNA, 25 bp, Homo sapien
tatagactccacaacacatggtaaa

SEQ ID NO: 5451745 - DNA, 25 bp, Homo sapien
tcagtctaaatatggaacagacaaa

SEQ ID NO: 5451746 - DNA, 25 bp, Homo sapien
tggaacagacaaagtatatcgattg

SEQ ID NO: 5451747 - DNA, 25 bp, Homo sapien
caaagtatatcgattgttgattgac

SEQ ID NO: 5451748 - DNA, 25 bp, Homo sapien
aatatggaacagacaaagtatatcg

SEQ ID NO: 5451749 - DNA, 25 bp, Homo sapien
tcatcgcccactgcaatgaaaaggt

SEQ ID NO: 5451750 - DNA, 25 bp, Homo sapien
attcatcgcccactgcaatgaaaag

SEQ ID NO: 5451751 - DNA, 25 bp, Homo sapien
atcgcccactgcaatgaaaaggttg

SEQ ID NO: 5451752 - DNA, 25 bp, Homo sapien
catcgcccactgcaatgaaaaggtt

SEQ ID NO: 5451753 - DNA, 25 bp, Homo sapien
ccaagagtacttagaaagagcacaa

SEQ ID NO: 5451754 - DNA, 25 bp, Homo sapien
gcattgcaatgtttaagccatccta

SEQ ID NO: 5451755 - DNA, 25 bp, Homo sapien
gcttgtgattgtctggccaaccagc

SEQ ID NO: 5451756 - DNA, 25 bp, Homo sapien
taatctcaaggtggctctaatcaag

SEQ ID NO: 5451757 - DNA, 25 bp, Homo sapien
agacccaaagtcctgtcgccggctt

SEQ ID NO: 5451758 - DNA, 25 bp, Homo sapien
aaggctcacccagacccaaagtcct

SEQ ID NO: 5451759 - DNA, 25 bp, Homo sapien
acccagacccaaagtcctgtcgccg

SEQ ID NO: 5451760 - DNA, 25 bp, Homo sapien
gtccccgccgccacgagaaggctca

SEQ ID NO: 5451761 - DNA, 25 bp, Homo sapien
tgtgctcggtgtgtgcgcttggcgc

SEQ ID NO: 5451762 - DNA, 25 bp, Homo sapien
ttacatgtccaaatggcatatcccc

SEQ ID NO: 5451763 - DNA, 25 bp, Homo sapien
ccctttcgggcacgcggaggagatc

SEQ ID NO: 5451764 - DNA, 25 bp, Homo sapien
ggactgtgcagctatttccccgcgt

SEQ ID NO: 5451765 - DNA, 25 bp, Homo sapien
tcttagacccacagcaaataacagg

SEQ ID NO: 5451766 - DNA, 25 bp, Homo sapien
tccatggagctgagaacagatagga

SEQ ID NO: 5451767 - DNA, 25 bp, Homo sapien
gagcgtgcggttttaccagaagcag

SEQ ID NO: 5451768 - DNA, 25 bp, Homo sapien
gacgcccaacaagctgagcgtgcgg

SEQ ID NO: 5451769 - DNA, 25 bp, Homo sapien
gaggctgagggatgacaagcgctgg

SEQ ID NO: 5451770 - DNA, 25 bp, Homo sapien
ggctgagggatgacaagcgctggaa

SEQ ID NO: 5451771 - DNA, 25 bp, Homo sapien
gagggatgacaagcgctggaaccca

SEQ ID NO: 5451772 - DNA, 25 bp, Homo sapien
ctgagggatgacaagcgctggaacc

SEQ ID NO: 5451773 - DNA, 25 bp, Homo sapien
gcttggacttgatcatgtaggatga

SEQ ID NO: 5451774 - DNA, 25 bp, Homo sapien
cttgatcatgtaggatgagggtgaa

SEQ ID NO: 5451775 - DNA, 25 bp, Homo sapien
gatggaaaggccgactggcacctta

SEQ ID NO: 5451776 - DNA, 25 bp, Homo sapien
caccttattaggaagcttggacttg

SEQ ID NO: 5451777 - DNA, 25 bp, Homo sapien
attttggagtcttgaatgtccaacc

SEQ ID NO: 5451778 - DNA, 25 bp, Homo sapien
tttggagtcttgaatgtccaaccca

SEQ ID NO: 5451779 - DNA, 25 bp, Homo sapien
ttttggagtcttgaatgtccaaccc

SEQ ID NO: 5451780 - DNA, 25 bp, Homo sapien
gcaaatgaaatcgaagggacaatga

SEQ ID NO: 5451781 - DNA, 25 bp, Homo sapien
gaagtcattcggattcccaaggccc

SEQ ID NO: 5451782 - DNA, 25 bp, Homo sapien
tagatttgtgcctgtataccatcca

SEQ ID NO: 5451783 - DNA, 25 bp, Homo sapien
caaggcccacagttttgtgataacc

SEQ ID NO: 5451784 - DNA, 25 bp, Homo sapien
ctgtgaaccttctccaaccaaagcc

SEQ ID NO: 5451785 - DNA, 25 bp, Homo sapien
gtgaaccttctccaaccaaagccat

SEQ ID NO: 5451786 - DNA, 25 bp, Homo sapien
tgtgaaccttctccaaccaaagcca

SEQ ID NO: 5451787 - DNA, 25 bp, Homo sapien
gcttccatatcttggctcttttgaa

SEQ ID NO: 5451788 - DNA, 25 bp, Homo sapien
tgcttccatatcttggctcttttga

SEQ ID NO: 5451789 - DNA, 25 bp, Homo sapien
cttccatatcttggctcttttgaat

SEQ ID NO: 5451790 - DNA, 25 bp, Homo sapien
ttgcttccatatcttggctcttttg

SEQ ID NO: 5451791 - DNA, 25 bp, Homo sapien
tgtcccagcgattctggttgtgtct

SEQ ID NO: 5451792 - DNA, 25 bp, Homo sapien
gtgtcccagcgattctggttgtgtc

SEQ ID NO: 5451793 - DNA, 25 bp, Homo sapien
acctcagtgatctgaaatttgaggg

SEQ ID NO: 5451794 - DNA, 25 bp, Homo sapien
gagacctcagtgatctgaaatttga

SEQ ID NO: 5451795 - DNA, 25 bp, Homo sapien
ctgccagcaatcaataagagacctc

SEQ ID NO: 5451796 - DNA, 25 bp, Homo sapien
cagcaatcaataagagacctcagtg

SEQ ID NO: 5451797 - DNA, 25 bp, Homo sapien
catgtgaacgataataataagaggg

SEQ ID NO: 5451798 - DNA, 25 bp, Homo sapien
taaacaccatcattgtccttgagaa

SEQ ID NO: 5451799 - DNA, 25 bp, Homo sapien
gatgaagaccttgcctaatgaggat

SEQ ID NO: 5451800 - DNA, 25 bp, Homo sapien
tcctgagattgatcaaagagcatga

SEQ ID NO: 5451801 - DNA, 25 bp, Homo sapien
catggttactgaactgcagcttctg

SEQ ID NO: 5451802 - DNA, 25 bp, Homo sapien
tgggaggccaaactctaccaaatgc

SEQ ID NO: 5451803 - DNA, 25 bp, Homo sapien
taatgtcttttagtccacaggtgcc

SEQ ID NO: 5451804 - DNA, 25 bp, Homo sapien
tctccactgggctcaactactcttg

SEQ ID NO: 5451805 - DNA, 25 bp, Homo sapien
gattctaggtacctccactggagcc

SEQ ID NO: 5451806 - DNA, 25 bp, Homo sapien
ggcatgtcagattcccaaacgtgtg

SEQ ID NO: 5451807 - DNA, 25 bp, Homo sapien
gccaagtgaagtagcagcctccaaa

SEQ ID NO: 5451808 - DNA, 25 bp, Homo sapien
gaaagtcacatagcgtagcctagga

SEQ ID NO: 5451809 - DNA, 25 bp, Homo sapien
catcatgtcacctggagttctcaac

SEQ ID NO: 5451810 - DNA, 25 bp, Homo sapien
gatgcaaaactagtccctgaatgag

SEQ ID NO: 5451811 - DNA, 25 bp, Homo sapien
gagtccacttgtatgtagctccacc

SEQ ID NO: 5451812 - DNA, 25 bp, Homo sapien
aatggtgccataacccatgcatagg

SEQ ID NO: 5451813 - DNA, 25 bp, Homo sapien
tattcacatttcatcgcaagcccca

SEQ ID NO: 5451814 - DNA, 25 bp, Homo sapien
tcctgacctgaaatcattagcccgc

SEQ ID NO: 5451815 - DNA, 25 bp, Homo sapien
tgctgcagcctaggttaattcctcc

SEQ ID NO: 5451816 - DNA, 25 bp, Homo sapien
actttacctgttcaaccaatctcag

SEQ ID NO: 5451817 - DNA, 25 bp, Homo sapien
ccaagatgtggagcatataaacacc

SEQ ID NO: 5451818 - DNA, 25 bp, Homo sapien
gcattgcaatgtttatgtgcccagc

SEQ ID NO: 5451819 - DNA, 25 bp, Homo sapien
taagttttatcagaagcagacagtg

SEQ ID NO: 5451820 - DNA, 25 bp, Homo sapien
tgaactatcttgtgacttgtcagga

SEQ ID NO: 5451821 - DNA, 25 bp, Homo sapien
tgtgcaatgacagggaaacaagtta

SEQ ID NO: 5451822 - DNA, 25 bp, Homo sapien
tatagcatgactacaggtgcttcag

SEQ ID NO: 5451823 - DNA, 25 bp, Homo sapien
gatgggtggatctcagccaagtaga

SEQ ID NO: 5451824 - DNA, 25 bp, Homo sapien
gctgctcaggataaacacctcaaaa

SEQ ID NO: 5451825 - DNA, 25 bp, Homo sapien
tacatttagctacacagaaacccct

SEQ ID NO: 5451826 - DNA, 25 bp, Homo sapien
cagggttacctgaggctacagcttt

SEQ ID NO: 5451827 - DNA, 25 bp, Homo sapien
ggatgatgagttttctaacaccaaa

SEQ ID NO: 5451828 - DNA, 25 bp, Homo sapien
cacataggcttagttggattctgga

SEQ ID NO: 5451829 - DNA, 25 bp, Homo sapien
atgctgggagattttgtcaccacca

SEQ ID NO: 5451830 - DNA, 25 bp, Homo sapien
aataaaatactttacagacaagcaa

SEQ ID NO: 5451831 - DNA, 25 bp, Homo sapien
gagattttgtcaccaccaggtctgc

SEQ ID NO: 5451832 - DNA, 25 bp, Homo sapien
agccaaattaagcttcataaggaga

SEQ ID NO: 5451833 - DNA, 25 bp, Homo sapien
attcaaaagctagcagaaggcaaga

SEQ ID NO: 5451834 - DNA, 25 bp, Homo sapien
aggaaatatataaaattgacaccct

SEQ ID NO: 5451835 - DNA, 25 bp, Homo sapien
gaactagagaagaaagaacaaacac

SEQ ID NO: 5451836 - DNA, 25 bp, Homo sapien
aacattacaattaaaagaactagag

SEQ ID NO: 5451837 - DNA, 25 bp, Homo sapien
cctttttgggcactgtcttgactat

SEQ ID NO: 5451838 - DNA, 25 bp, Homo sapien
cttgactattggcctgagatttgcc

SEQ ID NO: 5451839 - DNA, 25 bp, Homo sapien
tatgcacgccttctttgaccaagaa

SEQ ID NO: 5451840 - DNA, 25 bp, Homo sapien
ctacccctgaaatacggagatattt

SEQ ID NO: 5451841 - DNA, 25 bp, Homo sapien
tctccacaaatataacagaaagctt

SEQ ID NO: 5451842 - DNA, 25 bp, Homo sapien
tgtaaccaaacttataaccatatgc

SEQ ID NO: 5451843 - DNA, 25 bp, Homo sapien
tctagcctgaatgaattaaactcaa

SEQ ID NO: 5451844 - DNA, 25 bp, Homo sapien
tctttgatcattgccgtggttttct

SEQ ID NO: 5451845 - DNA, 25 bp, Homo sapien
caatcttgtgtcagtaacaggaaga

SEQ ID NO: 5451846 - DNA, 25 bp, Homo sapien
cagaatgttacaataataataggct

SEQ ID NO: 5451847 - DNA, 25 bp, Homo sapien
tgaatccaggtcttcttagggactg

SEQ ID NO: 5451848 - DNA, 25 bp, Homo sapien
tcctgcacaatcctgtaagcctaca

SEQ ID NO: 5451849 - DNA, 25 bp, Homo sapien
acatcccctcaagtgtattccttca

SEQ ID NO: 5451850 - DNA, 25 bp, Homo sapien
gggactgaatcctcctgcacaatcc

SEQ ID NO: 5451851 - DNA, 25 bp, Homo sapien
atctgatattttcccgttcctagga

SEQ ID NO: 5451852 - DNA, 25 bp, Homo sapien
acctttctgctttgtagtccaaact

SEQ ID NO: 5451853 - DNA, 25 bp, Homo sapien
tgtagtccaaacttgaatccccata

SEQ ID NO: 5451854 - DNA, 25 bp, Homo sapien
tcccgttcctaggattccaatcaga

SEQ ID NO: 5451855 - DNA, 25 bp, Homo sapien
tgttatctttgatgaagctacgtta

SEQ ID NO: 5451856 - DNA, 25 bp, Homo sapien
aatatcccacatcaaatggtacatt

SEQ ID NO: 5451857 - DNA, 25 bp, Homo sapien
tgaagctacgttaacacatcattat

SEQ ID NO: 5451858 - DNA, 25 bp, Homo sapien
tatcccacatcaaatggtacatttg

SEQ ID NO: 5451859 - DNA, 25 bp, Homo sapien
cctggcttctggcatacagtgtcta

SEQ ID NO: 5451860 - DNA, 25 bp, Homo sapien
gaatcaatgagcaatggaaggtcca

SEQ ID NO: 5451861 - DNA, 25 bp, Homo sapien
cattaaagcttgagaggccaggaag

SEQ ID NO: 5451862 - DNA, 25 bp, Homo sapien
tgtgggctcctagatatgggctgat

SEQ ID NO: 5451863 - DNA, 25 bp, Homo sapien
ggtgaagaggaacccaatcctagca

SEQ ID NO: 5451864 - DNA, 25 bp, Homo sapien
tctgcaggtaaagtgcccagtctca

SEQ ID NO: 5451865 - DNA, 25 bp, Homo sapien
tgttgagtttgacaggcccatctgc

SEQ ID NO: 5451866 - DNA, 25 bp, Homo sapien
tggcatggaggtgtttgtgacccca

SEQ ID NO: 5451867 - DNA, 25 bp, Homo sapien
ggcttagagggaacatcatggattc

SEQ ID NO: 5451868 - DNA, 25 bp, Homo sapien
tggatgtgaaattctaagatagttc

SEQ ID NO: 5451869 - DNA, 25 bp, Homo sapien
ctttccattcatccttttgctcttt

SEQ ID NO: 5451870 - DNA, 25 bp, Homo sapien
gaaattctaagatagttccttggct

SEQ ID NO: 5451871 - DNA, 25 bp, Homo sapien
gaatcttgacgcttataacatttcc

SEQ ID NO: 5451872 - DNA, 25 bp, Homo sapien
caaagctgtcttcacgacctcttag

SEQ ID NO: 5451873 - DNA, 25 bp, Homo sapien
caagagaagcaggtgtatcttgagc

SEQ ID NO: 5451874 - DNA, 25 bp, Homo sapien
ttcacgacctcttagtactcaagaa

SEQ ID NO: 5451875 - DNA, 25 bp, Homo sapien
cttccaaagatgccaaatacagtca

SEQ ID NO: 5451876 - DNA, 25 bp, Homo sapien
gacaaatgtgatgttccctagcatg

SEQ ID NO: 5451877 - DNA, 25 bp, Homo sapien
tgtccaagcagtatgatatcatcaa

SEQ ID NO: 5451878 - DNA, 25 bp, Homo sapien
atgttctccatgtccaagcagtatg

SEQ ID NO: 5451879 - DNA, 25 bp, Homo sapien
gatgttccctagcatggaaaagtgt

SEQ ID NO: 5451880 - DNA, 25 bp, Homo sapien
ccatatgtgtatccatggccacagg

SEQ ID NO: 5451881 - DNA, 25 bp, Homo sapien
tactgcaactctgatcaacagtttc

SEQ ID NO: 5451882 - DNA, 25 bp, Homo sapien
gaagaatcaatactgcaactctgat

SEQ ID NO: 5451883 - DNA, 25 bp, Homo sapien
catatgtgtatccatggccacagga

SEQ ID NO: 5451884 - DNA, 25 bp, Homo sapien
actaccagtgctagcattgtgaggg

SEQ ID NO: 5451885 - DNA, 25 bp, Homo sapien
ttttactaccagtgctagcattgtg

SEQ ID NO: 5451886 - DNA, 25 bp, Homo sapien
agtgctagcattgtgaggggtcctc

SEQ ID NO: 5451887 - DNA, 25 bp, Homo sapien
ttactaccagtgctagcattgtgag

SEQ ID NO: 5451888 - DNA, 25 bp, Homo sapien
ccctgctgctgaacacaatggtgat

SEQ ID NO: 5451889 - DNA, 25 bp, Homo sapien
catcataacagatgtatggatgggt

SEQ ID NO: 5451890 - DNA, 25 bp, Homo sapien
tttccactgggcaaaagctcccagg

SEQ ID NO: 5451891 - DNA, 25 bp, Homo sapien
tccaagacttgggtacattcagagc

SEQ ID NO: 5451892 - DNA, 25 bp, Homo sapien
catttacacagtctgaggtctgttt

SEQ ID NO: 5451893 - DNA, 25 bp, Homo sapien
ttctaaagttagaagcttgcttttc

SEQ ID NO: 5451894 - DNA, 25 bp, Homo sapien
taaagttagaagcttgcttttcaaa

SEQ ID NO: 5451895 - DNA, 25 bp, Homo sapien
atttacacagtctgaggtctgtttc

SEQ ID NO: 5451896 - DNA, 25 bp, Homo sapien
catcttctggcaaactgtgacaaca

SEQ ID NO: 5451897 - DNA, 25 bp, Homo sapien
gacaacagtcttcattggcaaccga

SEQ ID NO: 5451898 - DNA, 25 bp, Homo sapien
ctatggagtccattatcactgggca

SEQ ID NO: 5451899 - DNA, 25 bp, Homo sapien
gaggactccaagtcctatctatgga

SEQ ID NO: 5451900 - DNA, 25 bp, Homo sapien
tctaaaattgttactaatgtttcat

SEQ ID NO: 5451901 - DNA, 25 bp, Homo sapien
aatgtttcattaataaagtgtgcca

SEQ ID NO: 5451902 - DNA, 25 bp, Homo sapien
taaaattgttactaatgtttcatta

SEQ ID NO: 5451903 - DNA, 25 bp, Homo sapien
atgtttcattaataaagtgtgccat

SEQ ID NO: 5451904 - DNA, 25 bp, Homo sapien
cagccacctgaagaaccgggcacag

SEQ ID NO: 5451905 - DNA, 25 bp, Homo sapien
caggcacggggggactggcagccac

SEQ ID NO: 5451906 - DNA, 25 bp, Homo sapien
ctggcagccacctgaagaaccgggc

SEQ ID NO: 5451907 - DNA, 25 bp, Homo sapien
ggcacagccgtggttgttctccatg

SEQ ID NO: 5451908 - DNA, 25 bp, Homo sapien
aaggtaatgagatgttagatggcca

SEQ ID NO: 5451909 - DNA, 25 bp, Homo sapien
agcctgctaccttgacgggatgtgg

SEQ ID NO: 5451910 - DNA, 25 bp, Homo sapien
gaagcctgctaccttgacgggatgt

SEQ ID NO: 5451911 - DNA, 25 bp, Homo sapien
atgttagatggccatttctgaagcc

SEQ ID NO: 5451912 - DNA, 25 bp, Homo sapien
ctggattgggggacaaagcatcaca

SEQ ID NO: 5451913 - DNA, 25 bp, Homo sapien
ggattgggggacaaagcatcacaaa

SEQ ID NO: 5451914 - DNA, 25 bp, Homo sapien
tggattgggggacaaagcatcacaa

SEQ ID NO: 5451915 - DNA, 25 bp, Homo sapien
tgcagcagtgaccagcgttctccat

SEQ ID NO: 5451916 - DNA, 25 bp, Homo sapien
cagcgttctccatctcttactttca

SEQ ID NO: 5451917 - DNA, 25 bp, Homo sapien
agtgaccagcgttctccatctctta

SEQ ID NO: 5451918 - DNA, 25 bp, Homo sapien
ctttgcagcagtgaccagcgttctc

SEQ ID NO: 5451919 - DNA, 25 bp, Homo sapien
cactcaggtctgagagttataaacc

SEQ ID NO: 5451920 - DNA, 25 bp, Homo sapien
tatgtcaggcgtctctgagtcttcc

SEQ ID NO: 5451921 - DNA, 25 bp, Homo sapien
cattctagtgttacatatgtcaggc

SEQ ID NO: 5451922 - DNA, 25 bp, Homo sapien
gctctcctgtggtgttacatacctg

SEQ ID NO: 5451923 - DNA, 25 bp, Homo sapien
aatggtacaaaaggtgggcagagag

SEQ ID NO: 5451924 - DNA, 25 bp, Homo sapien
atggtacaaaaggtgggcagagagc

SEQ ID NO: 5451925 - DNA, 25 bp, Homo sapien
aaatggtacaaaaggtgggcagaga

SEQ ID NO: 5451926 - DNA, 25 bp, Homo sapien
acattcatataatcacactggttgg

SEQ ID NO: 5451927 - DNA, 25 bp, Homo sapien
gagaacctactgtgttgcaagcatt

SEQ ID NO: 5451928 - DNA, 25 bp, Homo sapien
actagccagctgaaaatgagttgct

SEQ ID NO: 5451929 - DNA, 25 bp, Homo sapien
tcctttcagatagctaactagccag

SEQ ID NO: 5451930 - DNA, 25 bp, Homo sapien
aaaactgagtggtgcaacgaaaagc

SEQ ID NO: 5451931 - DNA, 25 bp, Homo sapien
gagtgtgtagcactttctattaaag

SEQ ID NO: 5451932 - DNA, 25 bp, Homo sapien
cgttattaattgtgatgccttccca

SEQ ID NO: 5451933 - DNA, 25 bp, Homo sapien
aaggtgaggatggtatgtgcttttc

SEQ ID NO: 5451934 - DNA, 25 bp, Homo sapien
cacaagagctgtgtctgtactgtgc

SEQ ID NO: 5451935 - DNA, 25 bp, Homo sapien
tactgacccatcattgtgggccttc

SEQ ID NO: 5451936 - DNA, 25 bp, Homo sapien
cagggcccctctcagttactgaccc

SEQ ID NO: 5451937 - DNA, 25 bp, Homo sapien
tgaggattcatcttctagggtcaca

SEQ ID NO: 5451938 - DNA, 25 bp, Homo sapien
attcatcttctagggtcacagggcc

SEQ ID NO: 5451939 - DNA, 25 bp, Homo sapien
catttaagcatgtttttcccccagt

SEQ ID NO: 5451940 - DNA, 25 bp, Homo sapien
ttttcccccagtccttactgctcat

SEQ ID NO: 5451941 - DNA, 25 bp, Homo sapien
catgtttttcccccagtccttactg

SEQ ID NO: 5451942 - DNA, 25 bp, Homo sapien
tcatttaagcatgtttttcccccag

SEQ ID NO: 5451943 - DNA, 25 bp, Homo sapien
tatatactccaccagacatacgtct

SEQ ID NO: 5451944 - DNA, 25 bp, Homo sapien
tcccattagcttggcgttcaagatc

SEQ ID NO: 5451945 - DNA, 25 bp, Homo sapien
tcctttttatatactccaccagaca

SEQ ID NO: 5451946 - DNA, 25 bp, Homo sapien
tagcttggcgttcaagatcttttag

SEQ ID NO: 5451947 - DNA, 25 bp, Homo sapien
cattccatttggtttgatgatcagc

SEQ ID NO: 5451948 - DNA, 25 bp, Homo sapien
tccatttggtttgatgatcagcttc

SEQ ID NO: 5451949 - DNA, 25 bp, Homo sapien
gacattccatttggtttgatgatca

SEQ ID NO: 5451950 - DNA, 25 bp, Homo sapien
cagacattccatttggtttgatgat

SEQ ID NO: 5451951 - DNA, 25 bp, Homo sapien
gaacagtcttctggcttgagcatgc

SEQ ID NO: 5451952 - DNA, 25 bp, Homo sapien
tgaaaagtcaagagcatatggcaca

SEQ ID NO: 5451953 - DNA, 25 bp, Homo sapien
tggttcacaccccaagaacagtctt

SEQ ID NO: 5451954 - DNA, 25 bp, Homo sapien
gttaccttcactggaacctctagtg

SEQ ID NO: 5451955 - DNA, 25 bp, Homo sapien
gcacttacacttctgagaagaaata

SEQ ID NO: 5451956 - DNA, 25 bp, Homo sapien
taaaaactgcacttacacttctgag

SEQ ID NO: 5451957 - DNA, 25 bp, Homo sapien
gaagaaataaatcttggacaaatta

SEQ ID NO: 5451958 - DNA, 25 bp, Homo sapien
tacagaattaaaaactgcacttaca

SEQ ID NO: 5451959 - DNA, 25 bp, Homo sapien
tattccagtagctgtgcactcagac

SEQ ID NO: 5451960 - DNA, 25 bp, Homo sapien
gcggaggtctccaaatcagtatgta

SEQ ID NO: 5451961 - DNA, 25 bp, Homo sapien
tacagcagttttactacagggacac

SEQ ID NO: 5451962 - DNA, 25 bp, Homo sapien
tgtgacttagcagagggcctttaac

SEQ ID NO: 5451963 - DNA, 25 bp, Homo sapien
taccgggctcactaaactattcttg

SEQ ID NO: 5451964 - DNA, 25 bp, Homo sapien
gttcactatgtaccaaggcatgcag

SEQ ID NO: 5451965 - DNA, 25 bp, Homo sapien
gataatccagtcacagtcaggtctg

SEQ ID NO: 5451966 - DNA, 25 bp, Homo sapien
cctctaatgtggctggactgcaaag

SEQ ID NO: 5451967 - DNA, 25 bp, Homo sapien
tttatgaaagtagaagtccctccca

SEQ ID NO: 5451968 - DNA, 25 bp, Homo sapien
ccagggtgtctataaaatgccagtc

SEQ ID NO: 5451969 - DNA, 25 bp, Homo sapien
tatggacagaacaccgggaggtcac

SEQ ID NO: 5451970 - DNA, 25 bp, Homo sapien
ctcagatgtattgtaggtggccctt

SEQ ID NO: 5451971 - DNA, 25 bp, Homo sapien
tagtggaatgtgtgctcccctcgaa

SEQ ID NO: 5451972 - DNA, 25 bp, Homo sapien
gcagctattgctgggagaggcctct

SEQ ID NO: 5451973 - DNA, 25 bp, Homo sapien
tgaaaactcataacggtcctggctt

SEQ ID NO: 5451974 - DNA, 25 bp, Homo sapien
tctaggaaaaggactcggcagtgct

SEQ ID NO: 5451975 - DNA, 25 bp, Homo sapien
gcctccttctcatatgttaagttca

SEQ ID NO: 5451976 - DNA, 25 bp, Homo sapien
gaatatctgggtagctgaatcgcat

SEQ ID NO: 5451977 - DNA, 25 bp, Homo sapien
gctccaaggtaggtgattgcattgt

SEQ ID NO: 5451978 - DNA, 25 bp, Homo sapien
tatgagactgcatcagctcagcctc

SEQ ID NO: 5451979 - DNA, 25 bp, Homo sapien
gcaccagagaaatattgttgtccat

SEQ ID NO: 5451980 - DNA, 25 bp, Homo sapien
tccccgtgagcttctctatgacagc

SEQ ID NO: 5451981 - DNA, 25 bp, Homo sapien
gacagcaggtctctcaaaaggcacc

SEQ ID NO: 5451982 - DNA, 25 bp, Homo sapien
tgttgtccataataggctcttgttc

SEQ ID NO: 5451983 - DNA, 25 bp, Homo sapien
aaaatgcaatctgataatttcttca

SEQ ID NO: 5451984 - DNA, 25 bp, Homo sapien
aaccatagaaaaatgcaatctgata

SEQ ID NO: 5451985 - DNA, 25 bp, Homo sapien
tagaaaaatgcaatctgataatttc

SEQ ID NO: 5451986 - DNA, 25 bp, Homo sapien
atgcaatctgataatttcttcaaca

SEQ ID NO: 5451987 - DNA, 25 bp, Homo sapien
gagtagaaatactgcccaaggatgt

SEQ ID NO: 5451988 - DNA, 25 bp, Homo sapien
gaaagaataccctctagtgtgaaag

SEQ ID NO: 5451989 - DNA, 25 bp, Homo sapien
taacaactcagacaaggcgaatcag

SEQ ID NO: 5451990 - DNA, 25 bp, Homo sapien
gctttctccagttgcacttgtgcca

SEQ ID NO: 5451991 - DNA, 25 bp, Homo sapien
taaatgggcactcttgttatcaaga

SEQ ID NO: 5451992 - DNA, 25 bp, Homo sapien
tgttgcaaattttctccgtgttacc

SEQ ID NO: 5451993 - DNA, 25 bp, Homo sapien
cactcttgttatcaagagaaggagg

SEQ ID NO: 5451994 - DNA, 25 bp, Homo sapien
tctaaaggtaaatgggcactcttgt

SEQ ID NO: 5451995 - DNA, 25 bp, Homo sapien
ttttccttcaagctaagcagacttg

SEQ ID NO: 5451996 - DNA, 25 bp, Homo sapien
aacactagcttagcagagaagactc

SEQ ID NO: 5451997 - DNA, 25 bp, Homo sapien
tatcatgtatcctcattggagacat

SEQ ID NO: 5451998 - DNA, 25 bp, Homo sapien
gagaagactctgtctttgcatcaca

SEQ ID NO: 5451999 - DNA, 25 bp, Homo sapien
ctgtgcctacggagggctaagcaat

SEQ ID NO: 5452000 - DNA, 25 bp, Homo sapien
cagcaccacctgtaaagggcctgtg

SEQ ID NO: 5452001 - DNA, 25 bp, Homo sapien
cctgtgcctacggagggctaagcaa

SEQ ID NO: 5452002 - DNA, 25 bp, Homo sapien
cctgtaaagggcctgtgcctacgga

SEQ ID NO: 5452003 - DNA, 25 bp, Homo sapien
tgccgtagtgtatttagagatcagg

SEQ ID NO: 5452004 - DNA, 25 bp, Homo sapien
tgcttggagaatgttttttgtggag

SEQ ID NO: 5452005 - DNA, 25 bp, Homo sapien
caggatgttttgcttggagaatgtt

SEQ ID NO: 5452006 - DNA, 25 bp, Homo sapien
tagagatcaggatgttttgcttgga

SEQ ID NO: 5452007 - DNA, 25 bp, Homo sapien
cctacagactaatgtggaatcagct

SEQ ID NO: 5452008 - DNA, 25 bp, Homo sapien
attcattcttttaggcagcctacag

SEQ ID NO: 5452009 - DNA, 25 bp, Homo sapien
taggcagcctacagactaatgtgga

SEQ ID NO: 5452010 - DNA, 25 bp, Homo sapien
ttcttttaggcagcctacagactaa

SEQ ID NO: 5452011 - DNA, 25 bp, Homo sapien
cagtgaactgcgctgcttgtagctt

SEQ ID NO: 5452012 - DNA, 25 bp, Homo sapien
tccacagtagttgcacttgtgaggt

SEQ ID NO: 5452013 - DNA, 25 bp, Homo sapien
atggtgactcatgacctgcccagca

SEQ ID NO: 5452014 - DNA, 25 bp, Homo sapien
tgtggcagcgttccttgtgctcctc

SEQ ID NO: 5452015 - DNA, 25 bp, Homo sapien
agttggaactgatggtaccctgggt

SEQ ID NO: 5452016 - DNA, 25 bp, Homo sapien
aaaaatcaaatagtcccaagtggca

SEQ ID NO: 5452017 - DNA, 25 bp, Homo sapien
cctggtagttaaggattcagctctc

SEQ ID NO: 5452018 - DNA, 25 bp, Homo sapien
gaacaatgtcataggtccttgccag

SEQ ID NO: 5452019 - DNA, 25 bp, Homo sapien
gctcctttctgccaagccgtaaagt

SEQ ID NO: 5452020 - DNA, 25 bp, Homo sapien
tcagttgacagtgctcctttctgcc

SEQ ID NO: 5452021 - DNA, 25 bp, Homo sapien
gatactcttcagttgacagtgctcc

SEQ ID NO: 5452022 - DNA, 25 bp, Homo sapien
tattgaagtaagatactcttcagtt

SEQ ID NO: 5452023 - DNA, 25 bp, Homo sapien
ttctcaaggagttggtgacacttac

SEQ ID NO: 5452024 - DNA, 25 bp, Homo sapien
cttctcaaggagttggtgacactta

SEQ ID NO: 5452025 - DNA, 25 bp, Homo sapien
tatcattcaatagtactcttctaag

SEQ ID NO: 5452026 - DNA, 25 bp, Homo sapien
cattcaatagtactcttctaagttt

SEQ ID NO: 5452027 - DNA, 25 bp, Homo sapien
tgagtaaaagaagctccacactggt

SEQ ID NO: 5452028 - DNA, 25 bp, Homo sapien
tgtcctgtgagggcgtcccttcttc

SEQ ID NO: 5452029 - DNA, 25 bp, Homo sapien
tacaggcgtagctacagaaaggaca

SEQ ID NO: 5452030 - DNA, 25 bp, Homo sapien
ccagagtgtaactttatgtgtctca

SEQ ID NO: 5452031 - DNA, 25 bp, Homo sapien
ggctttgggagatattgatttgaat

SEQ ID NO: 5452032 - DNA, 25 bp, Homo sapien
taatttcaataagataaggctttgg

SEQ ID NO: 5452033 - DNA, 25 bp, Homo sapien
tgctttttacatttggatactaatt

SEQ ID NO: 5452034 - DNA, 25 bp, Homo sapien
gatttgaattatgaataagtcttga

SEQ ID NO: 5452035 - DNA, 25 bp, Homo sapien
gaacccttatcatattattgctata

SEQ ID NO: 5452036 - DNA, 25 bp, Homo sapien
gaaggctggaagtcaagacccaggc

SEQ ID NO: 5452037 - DNA, 25 bp, Homo sapien
tgatatgctattcagatttgaaggc

SEQ ID NO: 5452038 - DNA, 25 bp, Homo sapien
tattgctatattaagaactgtggaa

SEQ ID NO: 5452039 - DNA, 25 bp, Homo sapien
tctgaaaaggtagttttcaccactg

SEQ ID NO: 5452040 - DNA, 25 bp, Homo sapien
tgaaaaggtagttttcaccactgcc

SEQ ID NO: 5452041 - DNA, 25 bp, Homo sapien
cagaattctgaaaaggtagttttca

SEQ ID NO: 5452042 - DNA, 25 bp, Homo sapien
ctagcagaattctgaaaaggtagtt

SEQ ID NO: 5452043 - DNA, 25 bp, Homo sapien
tttatgtaccataagcacattgggc

SEQ ID NO: 5452044 - DNA, 25 bp, Homo sapien
tatgtaccataagcacattgggccc

SEQ ID NO: 5452045 - DNA, 25 bp, Homo sapien
tgtaccataagcacattgggcccaa

SEQ ID NO: 5452046 - DNA, 25 bp, Homo sapien
taccataagcacattgggcccaatg

SEQ ID NO: 5452047 - DNA, 25 bp, Homo sapien
atcatggcccctgatctcatcttca

SEQ ID NO: 5452048 - DNA, 25 bp, Homo sapien
gccacctcgctgctctcaattaggg

SEQ ID NO: 5452049 - DNA, 25 bp, Homo sapien
attcggaagccggattcctccctcg

SEQ ID NO: 5452050 - DNA, 25 bp, Homo sapien
ggttcttctaggctgctaccctcat

SEQ ID NO: 5452051 - DNA, 25 bp, Homo sapien
ggaattttgttagcacagccttcat

SEQ ID NO: 5452052 - DNA, 25 bp, Homo sapien
tgctgtttttggatcatcccacaga

SEQ ID NO: 5452053 - DNA, 25 bp, Homo sapien
tactacactgcctaacaccttcaca

SEQ ID NO: 5452054 - DNA, 25 bp, Homo sapien
ctaacaccttcacagtatagcaaca

SEQ ID NO: 5452055 - DNA, 25 bp, Homo sapien
cagtatagcaacacctcctgggaca

SEQ ID NO: 5452056 - DNA, 25 bp, Homo sapien
acaccttcacagtatagcaacacct

SEQ ID NO: 5452057 - DNA, 25 bp, Homo sapien
tgtgttcacaaccaaactgctctct

SEQ ID NO: 5452058 - DNA, 25 bp, Homo sapien
actgtgttcacaaccaaactgctct

SEQ ID NO: 5452059 - DNA, 25 bp, Homo sapien
gtgttcacaaccaaactgctctctg

SEQ ID NO: 5452060 - DNA, 25 bp, Homo sapien
gttcacaaccaaactgctctctgag

SEQ ID NO: 5452061 - DNA, 25 bp, Homo sapien
agcatatagagctagccagtggtta

SEQ ID NO: 5452062 - DNA, 25 bp, Homo sapien
agagctagccagtggttatcccagc

SEQ ID NO: 5452063 - DNA, 25 bp, Homo sapien
tatagagctagccagtggttatccc

SEQ ID NO: 5452064 - DNA, 25 bp, Homo sapien
catatagagctagccagtggttatc

SEQ ID NO: 5452065 - DNA, 25 bp, Homo sapien
tcaacaaactggagcatggcccaaa

SEQ ID NO: 5452066 - DNA, 25 bp, Homo sapien
tgcagggtttttaacaattcattta

SEQ ID NO: 5452067 - DNA, 25 bp, Homo sapien
ttcatttagaggtccagaaaagcat

SEQ ID NO: 5452068 - DNA, 25 bp, Homo sapien
tggagacatttcactacttttgaca

SEQ ID NO: 5452069 - DNA, 25 bp, Homo sapien
ggagacatttcactacttttgacag

SEQ ID NO: 5452070 - DNA, 25 bp, Homo sapien
ccagcctcagatggcgaactttatt

SEQ ID NO: 5452071 - DNA, 25 bp, Homo sapien
gcgcccagcctcagatggcgaactt

SEQ ID NO: 5452072 - DNA, 25 bp, Homo sapien
gcccagcctcagatggcgaacttta

SEQ ID NO: 5452073 - DNA, 25 bp, Homo sapien
gcctcagatggcgaactttattgtg

SEQ ID NO: 5452074 - DNA, 25 bp, Homo sapien
aaacacctgaaacccataacataat

SEQ ID NO: 5452075 - DNA, 25 bp, Homo sapien
actttggcattcacatttctatttg

SEQ ID NO: 5452076 - DNA, 25 bp, Homo sapien
ggcattcacatttctatttgatgct

SEQ ID NO: 5452077 - DNA, 25 bp, Homo sapien
ttcacatttctatttgatgctttgg

SEQ ID NO: 5452078 - DNA, 25 bp, Homo sapien
tttggcattcacatttctatttgat

SEQ ID NO: 5452079 - DNA, 25 bp, Homo sapien
tttagcctttatgtccagtagatga

SEQ ID NO: 5452080 - DNA, 25 bp, Homo sapien
tacccttgagattctatgacttaca

SEQ ID NO: 5452081 - DNA, 25 bp, Homo sapien
tgtatcatagaacctgacacacagc

SEQ ID NO: 5452082 - DNA, 25 bp, Homo sapien
aattgtgactcctatattacgggtg

SEQ ID NO: 5452083 - DNA, 25 bp, Homo sapien
caaggaacagaagtatatcaaagga

SEQ ID NO: 5452084 - DNA, 25 bp, Homo sapien
gaagtatatcaaaggacacttctaa

SEQ ID NO: 5452085 - DNA, 25 bp, Homo sapien
cagaagtatatcaaaggacacttct

SEQ ID NO: 5452086 - DNA, 25 bp, Homo sapien
ggaacagaagtatatcaaaggacac

SEQ ID NO: 5452087 - DNA, 25 bp, Homo sapien
cacagaagttaggtcagtgatatca

SEQ ID NO: 5452088 - DNA, 25 bp, Homo sapien
gagtagagcaactcgcaaaatgaga

SEQ ID NO: 5452089 - DNA, 25 bp, Homo sapien
tatccatggctctagaccttcactg

SEQ ID NO: 5452090 - DNA, 25 bp, Homo sapien
gagactagaatccaagtttccaatt

SEQ ID NO: 5452091 - DNA, 25 bp, Homo sapien
caaggtgctgacgtgacctcagttg

SEQ ID NO: 5452092 - DNA, 25 bp, Homo sapien
gctagatccaactaacaaaatccaa

SEQ ID NO: 5452093 - DNA, 25 bp, Homo sapien
attctgctggagctagatccaacta

SEQ ID NO: 5452094 - DNA, 25 bp, Homo sapien
gctgacgtgacctcagttgtcattc

SEQ ID NO: 5452095 - DNA, 25 bp, Homo sapien
actgcatattaagtaggactactat

SEQ ID NO: 5452096 - DNA, 25 bp, Homo sapien
ttaatttcaaggcagactggtaaca

SEQ ID NO: 5452097 - DNA, 25 bp, Homo sapien
tactctatcaaactttggtgacagt

SEQ ID NO: 5452098 - DNA, 25 bp, Homo sapien
tggtgtttcacttacatgaatctca

SEQ ID NO: 5452099 - DNA, 25 bp, Homo sapien
ggcaatcaaatcagtagcacgaacg

SEQ ID NO: 5452100 - DNA, 25 bp, Homo sapien
tagcacgaacgatagtacactcaca

SEQ ID NO: 5452101 - DNA, 25 bp, Homo sapien
tccaagatgctaatgatagtagctg

SEQ ID NO: 5452102 - DNA, 25 bp, Homo sapien
tatagtacagcttgttccatgtttg

SEQ ID NO: 5452103 - DNA, 25 bp, Homo sapien
acaacacttagggttccctcagaca

SEQ ID NO: 5452104 - DNA, 25 bp, Homo sapien
gagcaaattagcctgctcagagtca

SEQ ID NO: 5452105 - DNA, 25 bp, Homo sapien
acacttagggttccctcagacacac

SEQ ID NO: 5452106 - DNA, 25 bp, Homo sapien
aaattagcctgctcagagtcagaaa

SEQ ID NO: 5452107 - DNA, 25 bp, Homo sapien
attagctttatgtactacttctgcc

SEQ ID NO: 5452108 - DNA, 25 bp, Homo sapien
tccatagggaaattatatgctcagc

SEQ ID NO: 5452109 - DNA, 25 bp, Homo sapien
cattttcagtcctactccataggga

SEQ ID NO: 5452110 - DNA, 25 bp, Homo sapien
tcaaggtattgagattgtgtagttc

SEQ ID NO: 5452111 - DNA, 25 bp, Homo sapien
ggttaagaactgtgagactaacatt

SEQ ID NO: 5452112 - DNA, 25 bp, Homo sapien
ctcctgaattataatcagagactga

SEQ ID NO: 5452113 - DNA, 25 bp, Homo sapien
ggcagcctgtccatcaacttcagat

SEQ ID NO: 5452114 - DNA, 25 bp, Homo sapien
cctgaattataatcagagactgatg

SEQ ID NO: 5452115 - DNA, 25 bp, Homo sapien
aacttcagatccacatatctcctga

SEQ ID NO: 5452116 - DNA, 25 bp, Homo sapien
taaggatatttagaagctgtggttt

SEQ ID NO: 5452117 - DNA, 25 bp, Homo sapien
atttagaagctgtggttttataggg

SEQ ID NO: 5452118 - DNA, 25 bp, Homo sapien
gatatttagaagctgtggttttata

SEQ ID NO: 5452119 - DNA, 25 bp, Homo sapien
gctgtggttttataggggctttatc

SEQ ID NO: 5452120 - DNA, 25 bp, Homo sapien
tcctgtgtgcataagggcatgtgat

SEQ ID NO: 5452121 - DNA, 25 bp, Homo sapien
tgatatcagattaaaattggccttt

SEQ ID NO: 5452122 - DNA, 25 bp, Homo sapien
gtgcataagggcatgtgatatcaga

SEQ ID NO: 5452123 - DNA, 25 bp, Homo sapien
tcagattaaaattggcctttactag

SEQ ID NO: 5452124 - DNA, 25 bp, Homo sapien
gtgacataattaaatgggctaacat

SEQ ID NO: 5452125 - DNA, 25 bp, Homo sapien
catagctcttaaatttatatccaat

SEQ ID NO: 5452126 - DNA, 25 bp, Homo sapien
taacatagctcttaaatttatatcc

SEQ ID NO: 5452127 - DNA, 25 bp, Homo sapien
aacatagctcttaaatttatatcca

SEQ ID NO: 5452128 - DNA, 25 bp, Homo sapien
ttcagggttgacatttcccctacca

SEQ ID NO: 5452129 - DNA, 25 bp, Homo sapien
gactttcgcctcaatgtacaggttt

SEQ ID NO: 5452130 - DNA, 25 bp, Homo sapien
gttgttgtactactctctccccatg

SEQ ID NO: 5452131 - DNA, 25 bp, Homo sapien
tctaggatgctcaggcaaagcctcg

SEQ ID NO: 5452132 - DNA, 25 bp, Homo sapien
taatgtcatagaatgcctggagagg

SEQ ID NO: 5452133 - DNA, 25 bp, Homo sapien
tacttcttccgattccatacatgcc

SEQ ID NO: 5452134 - DNA, 25 bp, Homo sapien
gactgtacagttgatccacttaaca

SEQ ID NO: 5452135 - DNA, 25 bp, Homo sapien
tcagactgataaatagcattgactg

SEQ ID NO: 5452136 - DNA, 25 bp, Homo sapien
gattccatacatgccacctggccat

SEQ ID NO: 5452137 - DNA, 25 bp, Homo sapien
aaagttgctctctctggatagtcag

SEQ ID NO: 5452138 - DNA, 25 bp, Homo sapien
taccacaatgtgagaggaccccaca

SEQ ID NO: 5452139 - DNA, 25 bp, Homo sapien
gacggtttagctttctaccaaggca

SEQ ID NO: 5452140 - DNA, 25 bp, Homo sapien
gccaccttgggatagttcagactag

SEQ ID NO: 5452141 - DNA, 25 bp, Homo sapien
gcttgaggtgaggtcaattgccata

SEQ ID NO: 5452142 - DNA, 25 bp, Homo sapien
tcaattgccatattggagtgctccc

SEQ ID NO: 5452143 - DNA, 25 bp, Homo sapien
catgctgtccattgggtgtgcttga

SEQ ID NO: 5452144 - DNA, 25 bp, Homo sapien
cctttcgggtgaaagctcattgtca

SEQ ID NO: 5452145 - DNA, 25 bp, Homo sapien
tatatagccatcaatagcctctgtt

SEQ ID NO: 5452146 - DNA, 25 bp, Homo sapien
ttatatagccatcaatagcctctgt

SEQ ID NO: 5452147 - DNA, 25 bp, Homo sapien
tgtgctcatttgcaagtcactgaac

SEQ ID NO: 5452148 - DNA, 25 bp, Homo sapien
gaagctccaagcagttagtccatgt

SEQ ID NO: 5452149 - DNA, 25 bp, Homo sapien
tgcagtttgaggacttccccagtat

SEQ ID NO: 5452150 - DNA, 25 bp, Homo sapien
caatgattcctttcagtatctgcca

SEQ ID NO: 5452151 - DNA, 25 bp, Homo sapien
gtcctttgattaaaaaagattcatc

SEQ ID NO: 5452152 - DNA, 25 bp, Homo sapien
tcctttgattaaaaaagattcatca

SEQ ID NO: 5452153 - DNA, 25 bp, Homo sapien
cctttgattaaaaaagattcatcac

SEQ ID NO: 5452154 - DNA, 25 bp, Homo sapien
ggagatctcagcttcttctaacccc

SEQ ID NO: 5452155 - DNA, 25 bp, Homo sapien
aggtgacaatgtcgggctgaagata

SEQ ID NO: 5452156 - DNA, 25 bp, Homo sapien
aatgtcgggctgaagataaacggag

SEQ ID NO: 5452157 - DNA, 25 bp, Homo sapien
gcttcttctaacccctcaaagagga

SEQ ID NO: 5452158 - DNA, 25 bp, Homo sapien
gattaatcgattaacatcccagaaa

SEQ ID NO: 5452159 - DNA, 25 bp, Homo sapien
ggcagaggacatcatcttcaacccg

SEQ ID NO: 5452160 - DNA, 25 bp, Homo sapien
aatcattaccctaatcagaaccaca

SEQ ID NO: 5452161 - DNA, 25 bp, Homo sapien
gattccctgagcgtcctttacaaaa

SEQ ID NO: 5452162 - DNA, 25 bp, Homo sapien
tgcatgcagtaaaataatcccatca

SEQ ID NO: 5452163 - DNA, 25 bp, Homo sapien
gtgcatgcagtaaaataatcccatc

SEQ ID NO: 5452164 - DNA, 25 bp, Homo sapien
gcatgcagtaaaataatcccatcac

SEQ ID NO: 5452165 - DNA, 25 bp, Homo sapien
agtgcatgcagtaaaataatcccat

SEQ ID NO: 5452166 - DNA, 25 bp, Homo sapien
gtttgtgtttactgttaatgtgtcc

SEQ ID NO: 5452167 - DNA, 25 bp, Homo sapien
gtgtttactgttaatgtgtcctctg

SEQ ID NO: 5452168 - DNA, 25 bp, Homo sapien
tgtttgtgtttactgttaatgtgtc

SEQ ID NO: 5452169 - DNA, 25 bp, Homo sapien
ttgtgtttactgttaatgtgtcctc

SEQ ID NO: 5452170 - DNA, 25 bp, Homo sapien
tcttcagcgaggagcagggttagcc

SEQ ID NO: 5452171 - DNA, 25 bp, Homo sapien
tggtggaaactaaggcagtggatct

SEQ ID NO: 5452172 - DNA, 25 bp, Homo sapien
ggacagctggtcaaaccccgagaaa

SEQ ID NO: 5452173 - DNA, 25 bp, Homo sapien
gatctgtagctaagggtaatcctgt

SEQ ID NO: 5452174 - DNA, 25 bp, Homo sapien
ggaggcttggagcggtgaggtgacg

SEQ ID NO: 5452175 - DNA, 25 bp, Homo sapien
gaggcttggagcggtgaggtgacgt

SEQ ID NO: 5452176 - DNA, 25 bp, Homo sapien
gttttctgccggctggaggcttgga

SEQ ID NO: 5452177 - DNA, 25 bp, Homo sapien
tttctgccggctggaggcttggagc

SEQ ID NO: 5452178 - DNA, 25 bp, Homo sapien
cgtcccggccgagtcggggagtgtg

SEQ ID NO: 5452179 - DNA, 25 bp, Homo sapien
tcatttcggccgcgtgaagttttct

SEQ ID NO: 5452180 - DNA, 25 bp, Homo sapien
ggcgccctgcgcggagtccgggagc

SEQ ID NO: 5452181 - DNA, 25 bp, Homo sapien
ttcggccgcgtgaagttttctttca

SEQ ID NO: 5452182 - DNA, 25 bp, Homo sapien
ttcggaaagcgcaccgcattgaccg

SEQ ID NO: 5452183 - DNA, 25 bp, Homo sapien
tctgcggccccatttcggaaagcgc

SEQ ID NO: 5452184 - DNA, 25 bp, Homo sapien
cattgaccgggacctgaagcgggat

SEQ ID NO: 5452185 - DNA, 25 bp, Homo sapien
ggtctccgccggcaactctgcggcc

SEQ ID NO: 5452186 - DNA, 25 bp, Homo sapien
cgggatatggaacaatggtctcact

SEQ ID NO: 5452187 - DNA, 25 bp, Homo sapien
ttgtctttgaagtagtgttctcttt

SEQ ID NO: 5452188 - DNA, 25 bp, Homo sapien
ttctctttttaagcgggatatggaa

SEQ ID NO: 5452189 - DNA, 25 bp, Homo sapien
tagtgttctctttttaagcgggata

SEQ ID NO: 5452190 - DNA, 25 bp, Homo sapien
tcacttgcttaacaatcctgttaag

SEQ ID NO: 5452191 - DNA, 25 bp, Homo sapien
gtttgtgagaagcttcaactcttta

SEQ ID NO: 5452192 - DNA, 25 bp, Homo sapien
cagtaaagcaaagtctaatcacttg

SEQ ID NO: 5452193 - DNA, 25 bp, Homo sapien
cagtgtttgtgagaagcttcaactc

SEQ ID NO: 5452194 - DNA, 25 bp, Homo sapien
gctgtcaggcctggtaccattaggc

SEQ ID NO: 5452195 - DNA, 25 bp, Homo sapien
ggcagtctatcgtacacaaaactct

SEQ ID NO: 5452196 - DNA, 25 bp, Homo sapien
cagttctaagcccaacattagcgac

SEQ ID NO: 5452197 - DNA, 25 bp, Homo sapien
cattagcgactttctgatattttca

SEQ ID NO: 5452198 - DNA, 25 bp, Homo sapien
tcttcctatgtgaaatgaagggata

SEQ ID NO: 5452199 - DNA, 25 bp, Homo sapien
tgattgggtgacttcattgctcttg

SEQ ID NO: 5452200 - DNA, 25 bp, Homo sapien
gtgaaatgaagggataataccagag

SEQ ID NO: 5452201 - DNA, 25 bp, Homo sapien
tactctgattgggtgacttcattgc

SEQ ID NO: 5452202 - DNA, 25 bp, Homo sapien
gaggaaacacagtgttggttacata

SEQ ID NO: 5452203 - DNA, 25 bp, Homo sapien
ttctgcaaacatagtaatcagataa

SEQ ID NO: 5452204 - DNA, 25 bp, Homo sapien
aagaggaaacacagtgttggttaca

SEQ ID NO: 5452205 - DNA, 25 bp, Homo sapien
caaacatagtaatcagataaaagag

SEQ ID NO: 5452206 - DNA, 25 bp, Homo sapien
ttattttgagcgcatttgtatgaaa

SEQ ID NO: 5452207 - DNA, 25 bp, Homo sapien
tgttctttgcattatgtgctctggg

SEQ ID NO: 5452208 - DNA, 25 bp, Homo sapien
catgcataaagtatgcctgaaggct

SEQ ID NO: 5452209 - DNA, 25 bp, Homo sapien
catccatgttcaagccggttgtggc

SEQ ID NO: 5452210 - DNA, 25 bp, Homo sapien
gagaaaggtaccttgtagaaacatg

SEQ ID NO: 5452211 - DNA, 25 bp, Homo sapien
cagttttgtttatcagagaccaagg

SEQ ID NO: 5452212 - DNA, 25 bp, Homo sapien
tcgtggatgctggagttcacgagaa

SEQ ID NO: 5452213 - DNA, 25 bp, Homo sapien
gaccaaggttggtgacttgttcaga

SEQ ID NO: 5452214 - DNA, 25 bp, Homo sapien
gtcatctggtttcactggggcctgt

SEQ ID NO: 5452215 - DNA, 25 bp, Homo sapien
ttttgacttgaatcactcccttgga

SEQ ID NO: 5452216 - DNA, 25 bp, Homo sapien
tcactcccttggatgcagacacttc

SEQ ID NO: 5452217 - DNA, 25 bp, Homo sapien
tctgatacttgctaaactttttgac

SEQ ID NO: 5452218 - DNA, 25 bp, Homo sapien
aaataggttgttatggtactggaag

SEQ ID NO: 5452219 - DNA, 25 bp, Homo sapien
tgcctcacctggtaatgacactgcc

SEQ ID NO: 5452220 - DNA, 25 bp, Homo sapien
gacatggaattgtaatggcacactc

SEQ ID NO: 5452221 - DNA, 25 bp, Homo sapien
tttatagcctaattgctgtagaaca

SEQ ID NO: 5452222 - DNA, 25 bp, Homo sapien
aaagatagtatagcttaactcagct

SEQ ID NO: 5452223 - DNA, 25 bp, Homo sapien
aagatagtatagcttaactcagctt

SEQ ID NO: 5452224 - DNA, 25 bp, Homo sapien
gatagtatagcttaactcagctttt

SEQ ID NO: 5452225 - DNA, 25 bp, Homo sapien
agatagtatagcttaactcagcttt

SEQ ID NO: 5452226 - DNA, 25 bp, Homo sapien
tcttctcagtccatagatagtgcct

SEQ ID NO: 5452227 - DNA, 25 bp, Homo sapien
tggacttcaaaggtagcccattcag

SEQ ID NO: 5452228 - DNA, 25 bp, Homo sapien
tgaacaagatagaggagggtgccct

SEQ ID NO: 5452229 - DNA, 25 bp, Homo sapien
caaatgtggcatgttctcacgtatc

SEQ ID NO: 5452230 - DNA, 25 bp, Homo sapien
tgcgtaagtaacaagtaaccgaatg

SEQ ID NO: 5452231 - DNA, 25 bp, Homo sapien
gttttagatgtaccaagaagttgca

SEQ ID NO: 5452232 - DNA, 25 bp, Homo sapien
tctttttgccctaggatcccacatt

SEQ ID NO: 5452233 - DNA, 25 bp, Homo sapien
gcatacctctttagggatctcttgg

SEQ ID NO: 5452234 - DNA, 25 bp, Homo sapien
tgggaaaccatctcttgcatcagct

SEQ ID NO: 5452235 - DNA, 25 bp, Homo sapien
aaaggtagatccaccgatagcttgc

SEQ ID NO: 5452236 - DNA, 25 bp, Homo sapien
agccaggagggagattgtaccctgc

SEQ ID NO: 5452237 - DNA, 25 bp, Homo sapien
cccagaaaggtagatccaccgatag

SEQ ID NO: 5452238 - DNA, 25 bp, Homo sapien
tcaagagaaaggtaattcagagacg

SEQ ID NO: 5452239 - DNA, 25 bp, Homo sapien
tcaaagcgaaagaaaaccaagctgc

SEQ ID NO: 5452240 - DNA, 25 bp, Homo sapien
ctgaaattggaggatgctaatgggc

SEQ ID NO: 5452241 - DNA, 25 bp, Homo sapien
cagagacgacaacgaagtgggaaag

SEQ ID NO: 5452242 - DNA, 25 bp, Homo sapien
tctcctgtaaagataggctaatttc

SEQ ID NO: 5452243 - DNA, 25 bp, Homo sapien
gaatgtgagaggcttcattagcaaa

SEQ ID NO: 5452244 - DNA, 25 bp, Homo sapien
tatgtaggttcgtcagttgttaaca

SEQ ID NO: 5452245 - DNA, 25 bp, Homo sapien
taacttaccaacaagaagggaatgc

SEQ ID NO: 5452246 - DNA, 25 bp, Homo sapien
aactcattgtatcacttcccactag

SEQ ID NO: 5452247 - DNA, 25 bp, Homo sapien
caagttgatcagaaatagagtgttt

SEQ ID NO: 5452248 - DNA, 25 bp, Homo sapien
ctagaatgtaagtcccatgaaagca

SEQ ID NO: 5452249 - DNA, 25 bp, Homo sapien
gattttaaaggtgatgcatctgatg

SEQ ID NO: 5452250 - DNA, 25 bp, Homo sapien
tccttgtatgtagccctcagagtct

SEQ ID NO: 5452251 - DNA, 25 bp, Homo sapien
gagtctcaatccaaaccatggggtg

SEQ ID NO: 5452252 - DNA, 25 bp, Homo sapien
cagcttcagttgtagtccttgtttc

SEQ ID NO: 5452253 - DNA, 25 bp, Homo sapien
ttattccttgtatgtagccctcaga

SEQ ID NO: 5452254 - DNA, 25 bp, Homo sapien
gtatatgtcgtgagaacatagcaca

SEQ ID NO: 5452255 - DNA, 25 bp, Homo sapien
tgtctatggtatatgtcgtgagaac

SEQ ID NO: 5452256 - DNA, 25 bp, Homo sapien
gcaagaatattgtctatggtatatg

SEQ ID NO: 5452257 - DNA, 25 bp, Homo sapien
tagcacatatgaatacttctgtcat

SEQ ID NO: 5452258 - DNA, 25 bp, Homo sapien
tagggcatgttgagtgtggaatggc

SEQ ID NO: 5452259 - DNA, 25 bp, Homo sapien
tttgacaagttagggcatgttgagt

SEQ ID NO: 5452260 - DNA, 25 bp, Homo sapien
tcaccaggtctaaccctggttagct

SEQ ID NO: 5452261 - DNA, 25 bp, Homo sapien
caccaggtctaaccctggttagctt

SEQ ID NO: 5452262 - DNA, 25 bp, Homo sapien
cagtgcttccttttagatatcttta

SEQ ID NO: 5452263 - DNA, 25 bp, Homo sapien
ttatgacattgccataaaaggtcat

SEQ ID NO: 5452264 - DNA, 25 bp, Homo sapien
agtgcttccttttagatatctttat

SEQ ID NO: 5452265 - DNA, 25 bp, Homo sapien
gtgcttccttttagatatctttatg

SEQ ID NO: 5452266 - DNA, 25 bp, Homo sapien
tgatgaagtgaagcaacagccccat

SEQ ID NO: 5452267 - DNA, 25 bp, Homo sapien
catttgatgatgaagtgaagcaaca

SEQ ID NO: 5452268 - DNA, 25 bp, Homo sapien
agaacatttgatgatgaagtgaagc

SEQ ID NO: 5452269 - DNA, 25 bp, Homo sapien
ggtaccattttagaagaacatttga

SEQ ID NO: 5452270 - DNA, 25 bp, Homo sapien
aatttgttgacaggatgattcgatc

SEQ ID NO: 5452271 - DNA, 25 bp, Homo sapien
agatggggctaatttgttgacagga

SEQ ID NO: 5452272 - DNA, 25 bp, Homo sapien
attcgatctccccactgaatctctg

SEQ ID NO: 5452273 - DNA, 25 bp, Homo sapien
acaggatgattcgatctccccactg

SEQ ID NO: 5452274 - DNA, 25 bp, Homo sapien
attagcaaggctggtctcaaactcc

SEQ ID NO: 5452275 - DNA, 25 bp, Homo sapien
tagcaaggctggtctcaaactcctg

SEQ ID NO: 5452276 - DNA, 25 bp, Homo sapien
agacagagtctcgcttgttcaccca

SEQ ID NO: 5452277 - DNA, 25 bp, Homo sapien
atattagcaaggctggtctcaaact

SEQ ID NO: 5452278 - DNA, 25 bp, Homo sapien
ctagtaatagcagcgatgagtagtt

SEQ ID NO: 5452279 - DNA, 25 bp, Homo sapien
tcatggacacctgctaaatcaccag

SEQ ID NO: 5452280 - DNA, 25 bp, Homo sapien
ggcaatgtgataccgcccctcatgg

SEQ ID NO: 5452281 - DNA, 25 bp, Homo sapien
tgagtagttgatctcatggcaatgt

SEQ ID NO: 5452282 - DNA, 25 bp, Homo sapien
gatggagataccaactttatggtta

SEQ ID NO: 5452283 - DNA, 25 bp, Homo sapien
atggagataccaactttatggttac

SEQ ID NO: 5452284 - DNA, 25 bp, Homo sapien
gttgacacgtagtaggcctggggag

SEQ ID NO: 5452285 - DNA, 25 bp, Homo sapien
agttcttcctcactgggggttgaca

SEQ ID NO: 5452286 - DNA, 25 bp, Homo sapien
gaatttttcaacagtgacgtcccca

SEQ ID NO: 5452287 - DNA, 25 bp, Homo sapien
tttttcaacagtgacgtccccactc

SEQ ID NO: 5452288 - DNA, 25 bp, Homo sapien
gtccccactccacttctatatttga

SEQ ID NO: 5452289 - DNA, 25 bp, Homo sapien
tatatttgacctgaataccattttg

SEQ ID NO: 5452290 - DNA, 25 bp, Homo sapien
ttggttttctctgctatcacatttc

SEQ ID NO: 5452291 - DNA, 25 bp, Homo sapien
gcaggtgccatatatgtggaaaaac

SEQ ID NO: 5452292 - DNA, 25 bp, Homo sapien
aaaacatggagtatggaaaaccagc

SEQ ID NO: 5452293 - DNA, 25 bp, Homo sapien
tctacaccctgaatgagtgtgctga

SEQ ID NO: 5452294 - DNA, 25 bp, Homo sapien
gcatttctcttgatgtaggtctttt

SEQ ID NO: 5452295 - DNA, 25 bp, Homo sapien
cttgatgtaggtcttttgctcttgc

SEQ ID NO: 5452296 - DNA, 25 bp, Homo sapien
ttctcttgatgtaggtcttttgctc

SEQ ID NO: 5452297 - DNA, 25 bp, Homo sapien
tgatgtaggtcttttgctcttgctg

SEQ ID NO: 5452298 - DNA, 25 bp, Homo sapien
ggtaaggctttatgatatttttcca

SEQ ID NO: 5452299 - DNA, 25 bp, Homo sapien
aatcctcttccctccgtttcctgat

SEQ ID NO: 5452300 - DNA, 25 bp, Homo sapien
cctcttccctccgtttcctgataag

SEQ ID NO: 5452301 - DNA, 25 bp, Homo sapien
tcttccctccgtttcctgataagcc

SEQ ID NO: 5452302 - DNA, 25 bp, Homo sapien
gatagtggatgccgctttcttgaaa

SEQ ID NO: 5452303 - DNA, 25 bp, Homo sapien
gggatagtggatgccgctttcttga

SEQ ID NO: 5452304 - DNA, 25 bp, Homo sapien
tagtggatgccgctttcttgaaaac

SEQ ID NO: 5452305 - DNA, 25 bp, Homo sapien
agtggatgccgctttcttgaaaact

SEQ ID NO: 5452306 - DNA, 25 bp, Homo sapien
tctggatggatgctcgccgtttgta

SEQ ID NO: 5452307 - DNA, 25 bp, Homo sapien
tgtagtgtctttgtttgcatgcaca

SEQ ID NO: 5452308 - DNA, 25 bp, Homo sapien
ctattgtagctcagtctggatggat

SEQ ID NO: 5452309 - DNA, 25 bp, Homo sapien
ggtcatgtgttggtcccgtgtgtaa

SEQ ID NO: 5452310 - DNA, 25 bp, Homo sapien
tttgacttgtcccttcaacagcctc

SEQ ID NO: 5452311 - DNA, 25 bp, Homo sapien
atcaataagagcaataaagtggtca

SEQ ID NO: 5452312 - DNA, 25 bp, Homo sapien
gactatttttgacttgtcccttcaa

SEQ ID NO: 5452313 - DNA, 25 bp, Homo sapien
gagcaataaagtggtcagaatgaca

SEQ ID NO: 5452314 - DNA, 25 bp, Homo sapien
gcatatattaactgggagcaaaatt

SEQ ID NO: 5452315 - DNA, 25 bp, Homo sapien
ggcatatattaactgggagcaaaat

SEQ ID NO: 5452316 - DNA, 25 bp, Homo sapien
gtaatcttcagcttggcatatatta

SEQ ID NO: 5452317 - DNA, 25 bp, Homo sapien
tgtgtaatcttcagcttggcatata

SEQ ID NO: 5452318 - DNA, 25 bp, Homo sapien
ggtgcttagaaccatcagtagggat

SEQ ID NO: 5452319 - DNA, 25 bp, Homo sapien
tagggatgaatagcacagagtcagc

SEQ ID NO: 5452320 - DNA, 25 bp, Homo sapien
taactgccagggtgcttagaaccat

SEQ ID NO: 5452321 - DNA, 25 bp, Homo sapien
catgaacatagagcaaaggcgaaca

SEQ ID NO: 5452322 - DNA, 25 bp, Homo sapien
attttccccattattcccacattct

SEQ ID NO: 5452323 - DNA, 25 bp, Homo sapien
cccattttccccattattcccacat

SEQ ID NO: 5452324 - DNA, 25 bp, Homo sapien
cattttccccattattcccacattc

SEQ ID NO: 5452325 - DNA, 25 bp, Homo sapien
attcccacattctttattttttctg

SEQ ID NO: 5452326 - DNA, 25 bp, Homo sapien
atagtccagaccactctttgcagac

SEQ ID NO: 5452327 - DNA, 25 bp, Homo sapien
aatagtccagaccactctttgcaga

SEQ ID NO: 5452328 - DNA, 25 bp, Homo sapien
aaatagtccagaccactctttgcag

SEQ ID NO: 5452329 - DNA, 25 bp, Homo sapien
tgccaggatctgcttcttagttttc

SEQ ID NO: 5452330 - DNA, 25 bp, Homo sapien
ccaggatctgcttcttagttttcat

SEQ ID NO: 5452331 - DNA, 25 bp, Homo sapien
gccaggatctgcttcttagttttca

SEQ ID NO: 5452332 - DNA, 25 bp, Homo sapien
atcatcatggaatgcccatccatcc

SEQ ID NO: 5452333 - DNA, 25 bp, Homo sapien
tcatcatggaatgcccatccatcct

SEQ ID NO: 5452334 - DNA, 25 bp, Homo sapien
aaagtccagtttaggcctactcttg

SEQ ID NO: 5452335 - DNA, 25 bp, Homo sapien
taggcctactcttgtggcgtgcatt

SEQ ID NO: 5452336 - DNA, 25 bp, Homo sapien
cttgtggcgtgcatttatgcccctg

SEQ ID NO: 5452337 - DNA, 25 bp, Homo sapien
tactagatttagaagttcacatcac

SEQ ID NO: 5452338 - DNA, 25 bp, Homo sapien
tagattgcgttgtagttcaggccat

SEQ ID NO: 5452339 - DNA, 25 bp, Homo sapien
tggtagattgcgttgtagttcaggc

SEQ ID NO: 5452340 - DNA, 25 bp, Homo sapien
gtagattgcgttgtagttcaggcca

SEQ ID NO: 5452341 - DNA, 25 bp, Homo sapien
tctggtagattgcgttgtagttcag

SEQ ID NO: 5452342 - DNA, 25 bp, Homo sapien
gtacatttcactgccaaccgacaag

SEQ ID NO: 5452343 - DNA, 25 bp, Homo sapien
tcttctatacccctgtacatttcac

SEQ ID NO: 5452344 - DNA, 25 bp, Homo sapien
cactgccaaccgacaaggcaatgag

SEQ ID NO: 5452345 - DNA, 25 bp, Homo sapien
accgacaaggcaatgagatgaaaaa

SEQ ID NO: 5452346 - DNA, 25 bp, Homo sapien
tggacatacagattctgtgaacagc

SEQ ID NO: 5452347 - DNA, 25 bp, Homo sapien
tatatgggatgcaagaacagtaagc

SEQ ID NO: 5452348 - DNA, 25 bp, Homo sapien
gatgcagatgtactttgtatggaca

SEQ ID NO: 5452349 - DNA, 25 bp, Homo sapien
gataagtctgattactctcggtcat

SEQ ID NO: 5452350 - DNA, 25 bp, Homo sapien
tagactaactgcgggcacttgtcca

SEQ ID NO: 5452351 - DNA, 25 bp, Homo sapien
agcttacagcattctcctgacttag

SEQ ID NO: 5452352 - DNA, 25 bp, Homo sapien
tccagtaacttgtcactgcgagttt

SEQ ID NO: 5452353 - DNA, 25 bp, Homo sapien
aaagatccagtaacttgtcactgcg

SEQ ID NO: 5452354 - DNA, 25 bp, Homo sapien
agttaacctgttggctcctgtttgg

SEQ ID NO: 5452355 - DNA, 25 bp, Homo sapien
aagagttaacctgttggctcctgtt

SEQ ID NO: 5452356 - DNA, 25 bp, Homo sapien
aaaagagttaacctgttggctcctg

SEQ ID NO: 5452357 - DNA, 25 bp, Homo sapien
gagttaacctgttggctcctgtttg

SEQ ID NO: 5452358 - DNA, 25 bp, Homo sapien
tgttgaaatatgtgagggcctggtt

SEQ ID NO: 5452359 - DNA, 25 bp, Homo sapien
gaaagtgtcaggctattccatagta

SEQ ID NO: 5452360 - DNA, 25 bp, Homo sapien
tgtccacagagctaacaaggttaga

SEQ ID NO: 5452361 - DNA, 25 bp, Homo sapien
ttagaacaccgactggaacatagta

SEQ ID NO: 5452362 - DNA, 25 bp, Homo sapien
gctgccccagataaccaagcaccat

SEQ ID NO: 5452363 - DNA, 25 bp, Homo sapien
ctgaattgcaatcataaagaccaac

SEQ ID NO: 5452364 - DNA, 25 bp, Homo sapien
taaagaccaactctggctgccccag

SEQ ID NO: 5452365 - DNA, 25 bp, Homo sapien
gaattgcaatcataaagaccaactc

SEQ ID NO: 5452366 - DNA, 25 bp, Homo sapien
gtatttccaccaagtctgacaccat

SEQ ID NO: 5452367 - DNA, 25 bp, Homo sapien
cgtatttccaccaagtctgacacca

SEQ ID NO: 5452368 - DNA, 25 bp, Homo sapien
tctccaagaacagcattgactaggt

SEQ ID NO: 5452369 - DNA, 25 bp, Homo sapien
ggacttgcctttcttccgaagcaga

SEQ ID NO: 5452370 - DNA, 25 bp, Homo sapien
tagctcccagactaatggacttgcc

SEQ ID NO: 5452371 - DNA, 25 bp, Homo sapien
cattatttataacggagagcccaag

SEQ ID NO: 5452372 - DNA, 25 bp, Homo sapien
tgtgttcctgtgtcccctctgattc

SEQ ID NO: 5452373 - DNA, 25 bp, Homo sapien
ttagatgtgttcctgtgtcccctct

SEQ ID NO: 5452374 - DNA, 25 bp, Homo sapien
gatgtgttcctgtgtcccctctgat

SEQ ID NO: 5452375 - DNA, 25 bp, Homo sapien
gttcctgtgtcccctctgattcttt

SEQ ID NO: 5452376 - DNA, 25 bp, Homo sapien
actttcaggtctaccgaaccagaca

SEQ ID NO: 5452377 - DNA, 25 bp, Homo sapien
ctttcaggtctaccgaaccagacat

SEQ ID NO: 5452378 - DNA, 25 bp, Homo sapien
ttactttcaggtctaccgaaccaga

SEQ ID NO: 5452379 - DNA, 25 bp, Homo sapien
tactttcaggtctaccgaaccagac

SEQ ID NO: 5452380 - DNA, 25 bp, Homo sapien
gtactttggttcatttgatgctgcc

SEQ ID NO: 5452381 - DNA, 25 bp, Homo sapien
gatgctgcctgtttaactctgttcg

SEQ ID NO: 5452382 - DNA, 25 bp, Homo sapien
ttagtgtttccctctgccattatac

SEQ ID NO: 5452383 - DNA, 25 bp, Homo sapien
tcatcaaaaggaatccccagagggt

SEQ ID NO: 5452384 - DNA, 25 bp, Homo sapien
gatggttgtgacattccattattag

SEQ ID NO: 5452385 - DNA, 25 bp, Homo sapien
gacattccattattagggctccatt

SEQ ID NO: 5452386 - DNA, 25 bp, Homo sapien
gcagctgtcagatggttgtgacatt

SEQ ID NO: 5452387 - DNA, 25 bp, Homo sapien
gctgtcagatggttgtgacattcca

SEQ ID NO: 5452388 - DNA, 25 bp, Homo sapien
gacacagttccactgcgcagagacc

SEQ ID NO: 5452389 - DNA, 25 bp, Homo sapien
caacagcctagggaccctccttaag

SEQ ID NO: 5452390 - DNA, 25 bp, Homo sapien
cctgctcagctttcatcaacagcct

SEQ ID NO: 5452391 - DNA, 25 bp, Homo sapien
tttcagtcttaggttcctgctcagc

SEQ ID NO: 5452392 - DNA, 25 bp, Homo sapien
cagccaggaagttgggccagtctat

SEQ ID NO: 5452393 - DNA, 25 bp, Homo sapien
cactaattttgcatcgtatttggca

SEQ ID NO: 5452394 - DNA, 25 bp, Homo sapien
attttgcatcgtatttggcagccag

SEQ ID NO: 5452395 - DNA, 25 bp, Homo sapien
tattcaattccttcaggactgtgct

SEQ ID NO: 5452396 - DNA, 25 bp, Homo sapien
cataggcctgtcctaagagacatgc

SEQ ID NO: 5452397 - DNA, 25 bp, Homo sapien
tattgaggaaatggtgtaatgagct

SEQ ID NO: 5452398 - DNA, 25 bp, Homo sapien
tgctttatttgtgccattagagtat

SEQ ID NO: 5452399 - DNA, 25 bp, Homo sapien
gtaatgagctattgcttaatgctgc

SEQ ID NO: 5452400 - DNA, 25 bp, Homo sapien
tgatgtttcccggacttaatgtctc

SEQ ID NO: 5452401 - DNA, 25 bp, Homo sapien
taccttcacatattgaaggcagctg

SEQ ID NO: 5452402 - DNA, 25 bp, Homo sapien
tctgccatttgcttgatgacccctc

SEQ ID NO: 5452403 - DNA, 25 bp, Homo sapien
taataccaagttgcaggtcattacc

SEQ ID NO: 5452404 - DNA, 25 bp, Homo sapien
attggcagatggccctccaattttc

SEQ ID NO: 5452405 - DNA, 25 bp, Homo sapien
tattctgtctcgaggaaggagattg

SEQ ID NO: 5452406 - DNA, 25 bp, Homo sapien
ctagtttattctgtctcgaggaagg

SEQ ID NO: 5452407 - DNA, 25 bp, Homo sapien
tctgtctcgaggaaggagattggca

SEQ ID NO: 5452408 - DNA, 25 bp, Homo sapien
ctggtccctgtcattctacctgcta

SEQ ID NO: 5452409 - DNA, 25 bp, Homo sapien
tgtcattctacctgctatgcgatat

SEQ ID NO: 5452410 - DNA, 25 bp, Homo sapien
tctacctgctatgcgatattcttct

SEQ ID NO: 5452411 - DNA, 25 bp, Homo sapien
tgctatgcgatattcttctctcact

SEQ ID NO: 5452412 - DNA, 25 bp, Homo sapien
ccatcgatataggtccaagtcctgg

SEQ ID NO: 5452413 - DNA, 25 bp, Homo sapien
caattgtgtccatcgatataggtcc

SEQ ID NO: 5452414 - DNA, 25 bp, Homo sapien
ttcggaagctgttaccaattgtgtc

SEQ ID NO: 5452415 - DNA, 25 bp, Homo sapien
aaagctgtgggactttcggaagctg

SEQ ID NO: 5452416 - DNA, 25 bp, Homo sapien
cattttagctgcattctgttctccc

SEQ ID NO: 5452417 - DNA, 25 bp, Homo sapien
gctgcattctgttctccctataaat

SEQ ID NO: 5452418 - DNA, 25 bp, Homo sapien
tagctgcattctgttctccctataa

SEQ ID NO: 5452419 - DNA, 25 bp, Homo sapien
gcattctgttctccctataaatcct

SEQ ID NO: 5452420 - DNA, 25 bp, Homo sapien
tgccttcccttgagtgtaagacgaa

SEQ ID NO: 5452421 - DNA, 25 bp, Homo sapien
gacgaacggctgttgaatagaaact

SEQ ID NO: 5452422 - DNA, 25 bp, Homo sapien
gattagccccattgatattctctcc

SEQ ID NO: 5452423 - DNA, 25 bp, Homo sapien
ttgctttgagctccgagcactttga

SEQ ID NO: 5452424 - DNA, 25 bp, Homo sapien
gcctggattgtattgctattaagcc

SEQ ID NO: 5452425 - DNA, 25 bp, Homo sapien
ccttaaagcgtttgagcctggattg

SEQ ID NO: 5452426 - DNA, 25 bp, Homo sapien
aagtatccttaaagcgtttgagcct

SEQ ID NO: 5452427 - DNA, 25 bp, Homo sapien
gaacttggtgatgaacaagttaatt

SEQ ID NO: 5452428 - DNA, 25 bp, Homo sapien
tgaacaatatcatctcccctagctt

SEQ ID NO: 5452429 - DNA, 25 bp, Homo sapien
ctcccctagcttgaacggaagctga

SEQ ID NO: 5452430 - DNA, 25 bp, Homo sapien
tagcttgaacggaagctgagaaaca

SEQ ID NO: 5452431 - DNA, 25 bp, Homo sapien
tcatccactgtagcagaagacagca

SEQ ID NO: 5452432 - DNA, 25 bp, Homo sapien
tgtcagctaggtttatcattgtctc

SEQ ID NO: 5452433 - DNA, 25 bp, Homo sapien
atgtcagctaggtttatcattgtct

SEQ ID NO: 5452434 - DNA, 25 bp, Homo sapien
gtcagctaggtttatcattgtctct

SEQ ID NO: 5452435 - DNA, 25 bp, Homo sapien
tgccgtaacccattcccactttgct

SEQ ID NO: 5452436 - DNA, 25 bp, Homo sapien
tgccaggaagatcagaattctggtc

SEQ ID NO: 5452437 - DNA, 25 bp, Homo sapien
attgcctgtccattgccctgccgta

SEQ ID NO: 5452438 - DNA, 25 bp, Homo sapien
taatctgattgcctgtccattgccc

SEQ ID NO: 5452439 - DNA, 25 bp, Homo sapien
catgtagaatacttattgctagcaa

SEQ ID NO: 5452440 - DNA, 25 bp, Homo sapien
tgtagaatacttattgctagcaatg

SEQ ID NO: 5452441 - DNA, 25 bp, Homo sapien
ttgctagcaatgtaattatcatgaa

SEQ ID NO: 5452442 - DNA, 25 bp, Homo sapien
ctagcaatgtaattatcatgaacag

SEQ ID NO: 5452443 - DNA, 25 bp, Homo sapien
ccatatcccaaagacccgtattctg

SEQ ID NO: 5452444 - DNA, 25 bp, Homo sapien
tcccaaagacccgtattctgtatcc

SEQ ID NO: 5452445 - DNA, 25 bp, Homo sapien
caaagacccgtattctgtatcctga

SEQ ID NO: 5452446 - DNA, 25 bp, Homo sapien
gacccgtattctgtatcctgatgcc

SEQ ID NO: 5452447 - DNA, 25 bp, Homo sapien
tccttttgacaaggatggagcactg

SEQ ID NO: 5452448 - DNA, 25 bp, Homo sapien
cagtccttttgacaaggatggagca

SEQ ID NO: 5452449 - DNA, 25 bp, Homo sapien
cctgcagtccttttgacaaggatgg

SEQ ID NO: 5452450 - DNA, 25 bp, Homo sapien
tgttccctgcagtccttttgacaag

SEQ ID NO: 5452451 - DNA, 25 bp, Homo sapien
ctggagacagggatagaggacactc

SEQ ID NO: 5452452 - DNA, 25 bp, Homo sapien
tggagacagggatagaggacactca

SEQ ID NO: 5452453 - DNA, 25 bp, Homo sapien
actttaatgttgtcagctagtccaa

SEQ ID NO: 5452454 - DNA, 25 bp, Homo sapien
tcagctagtccaacatcattatgca

SEQ ID NO: 5452455 - DNA, 25 bp, Homo sapien
tgttgtcagctagtccaacatcatt

SEQ ID NO: 5452456 - DNA, 25 bp, Homo sapien
agtccaacatcattatgcactatta

SEQ ID NO: 5452457 - DNA, 25 bp, Homo sapien
cataacccttacatgcagtatcagt

SEQ ID NO: 5452458 - DNA, 25 bp, Homo sapien
cagcatcttttgtgttgtcataacc

SEQ ID NO: 5452459 - DNA, 25 bp, Homo sapien
gcagtatcagtaaatatggctttat

SEQ ID NO: 5452460 - DNA, 25 bp, Homo sapien
aaatatggctttattgtttgacaac

SEQ ID NO: 5452461 - DNA, 25 bp, Homo sapien
taatgtacataagatctccaggact

SEQ ID NO: 5452462 - DNA, 25 bp, Homo sapien
tcatctgtcctctccggtgaattct

SEQ ID NO: 5452463 - DNA, 25 bp, Homo sapien
tatcagtcttgcgatttcagagtac

SEQ ID NO: 5452464 - DNA, 25 bp, Homo sapien
tgagggcacaggtgcaatgacccca

SEQ ID NO: 5452465 - DNA, 25 bp, Homo sapien
tctggctgataatgtgcttccagtg

SEQ ID NO: 5452466 - DNA, 25 bp, Homo sapien
cctccatgtctagagttatgccgtt

SEQ ID NO: 5452467 - DNA, 25 bp, Homo sapien
tgtaatctgcgacattctggctgat

SEQ ID NO: 5452468 - DNA, 25 bp, Homo sapien
tcctctacttagtagcacatgtaat

SEQ ID NO: 5452469 - DNA, 25 bp, Homo sapien
agctccctcagggcgccagaaactt

SEQ ID NO: 5452470 - DNA, 25 bp, Homo sapien
ctccctcagggcgccagaaacttta

SEQ ID NO: 5452471 - DNA, 25 bp, Homo sapien
tccctcagggcgccagaaactttat

SEQ ID NO: 5452472 - DNA, 25 bp, Homo sapien
gctccctcagggcgccagaaacttt

SEQ ID NO: 5452473 - DNA, 25 bp, Homo sapien
tacgctgcagcgtaatttgtcaagc

SEQ ID NO: 5452474 - DNA, 25 bp, Homo sapien
ttcatgtgcatatgctatgcagact

SEQ ID NO: 5452475 - DNA, 25 bp, Homo sapien
gcagttcatgtgcatatgctatgca

SEQ ID NO: 5452476 - DNA, 25 bp, Homo sapien
cgctgcagcgtaatttgtcaagcca

SEQ ID NO: 5452477 - DNA, 25 bp, Homo sapien
atacaggcataagcaatatgacaaa

SEQ ID NO: 5452478 - DNA, 25 bp, Homo sapien
agcaatatgacaaatgatatctgtt

SEQ ID NO: 5452479 - DNA, 25 bp, Homo sapien
aaatgatatctgttacactatcatc

SEQ ID NO: 5452480 - DNA, 25 bp, Homo sapien
gacaaatgatatctgttacactatc

SEQ ID NO: 5452481 - DNA, 25 bp, Homo sapien
ttcctatttatttttatcctgtatc

SEQ ID NO: 5452482 - DNA, 25 bp, Homo sapien
tcctatttatttttatcctgtatca

SEQ ID NO: 5452483 - DNA, 25 bp, Homo sapien
ctgtatttgggtgtttcctatttat

SEQ ID NO: 5452484 - DNA, 25 bp, Homo sapien
cctatttatttttatcctgtatcac

SEQ ID NO: 5452485 - DNA, 25 bp, Homo sapien
taatcaattttaccgtcccattgtc

SEQ ID NO: 5452486 - DNA, 25 bp, Homo sapien
tcaattttaccgtcccattgtcttc

SEQ ID NO: 5452487 - DNA, 25 bp, Homo sapien
atcaattttaccgtcccattgtctt

SEQ ID NO: 5452488 - DNA, 25 bp, Homo sapien
caattttaccgtcccattgtcttct

SEQ ID NO: 5452489 - DNA, 25 bp, Homo sapien
tccttgcatatttagcaaatgccat

SEQ ID NO: 5452490 - DNA, 25 bp, Homo sapien
cctccttgcatatttagcaaatgcc

SEQ ID NO: 5452491 - DNA, 25 bp, Homo sapien
ctccttgcatatttagcaaatgcca

SEQ ID NO: 5452492 - DNA, 25 bp, Homo sapien
gcatgatatccttgagtgggaagtt

SEQ ID NO: 5452493 - DNA, 25 bp, Homo sapien
tggttggactataatatgctgtgga

SEQ ID NO: 5452494 - DNA, 25 bp, Homo sapien
cctaacaggtttctgctgagcccca

SEQ ID NO: 5452495 - DNA, 25 bp, Homo sapien
gatgggagttcctttataggtgaca

SEQ ID NO: 5452496 - DNA, 25 bp, Homo sapien
catgtttgttaagtggatataatgc

SEQ ID NO: 5452497 - DNA, 25 bp, Homo sapien
gccaccttcagttaatgtattttta

SEQ ID NO: 5452498 - DNA, 25 bp, Homo sapien
tctagtataccaatcacccaaagag

SEQ ID NO: 5452499 - DNA, 25 bp, Homo sapien
gatatgagattggaccagctgctct

SEQ ID NO: 5452500 - DNA, 25 bp, Homo sapien
tcttggttagatgtatgcctatata

SEQ ID NO: 5452501 - DNA, 25 bp, Homo sapien
ccttcttggttagatgtatgcctat

SEQ ID NO: 5452502 - DNA, 25 bp, Homo sapien
ttaccttcttggttagatgtatgcc

SEQ ID NO: 5452503 - DNA, 25 bp, Homo sapien
ttgctttggaagtatgatcatttta

SEQ ID NO: 5452504 - DNA, 25 bp, Homo sapien
gcacctgccctaatgaagctcatgg

SEQ ID NO: 5452505 - DNA, 25 bp, Homo sapien
ctaggaggccaggaatacagggatc

SEQ ID NO: 5452506 - DNA, 25 bp, Homo sapien
cccttgaaggtgtgactgtagtaca

SEQ ID NO: 5452507 - DNA, 25 bp, Homo sapien
caaccgaggctctgtatgaattcat

SEQ ID NO: 5452508 - DNA, 25 bp, Homo sapien
gaggacatcccacatcgtttatggg

SEQ ID NO: 5452509 - DNA, 25 bp, Homo sapien
agccagtgtcagagataccataaga

SEQ ID NO: 5452510 - DNA, 25 bp, Homo sapien
cagccagtgtcagagataccataag

SEQ ID NO: 5452511 - DNA, 25 bp, Homo sapien
cccactaacttaacaagcagctgat

SEQ ID NO: 5452512 - DNA, 25 bp, Homo sapien
gacccactaacttaacaagcagctg

SEQ ID NO: 5452513 - DNA, 25 bp, Homo sapien
cctgacccactaacttaacaagcag

SEQ ID NO: 5452514 - DNA, 25 bp, Homo sapien
ctaacttaacaagcagctgatatac

SEQ ID NO: 5452515 - DNA, 25 bp, Homo sapien
gcagcagccagtagccaaactgcat

SEQ ID NO: 5452516 - DNA, 25 bp, Homo sapien
aagcagcagccagtagccaaactgc

SEQ ID NO: 5452517 - DNA, 25 bp, Homo sapien
aatcacgctgggaagcagcagccag

SEQ ID NO: 5452518 - DNA, 25 bp, Homo sapien
ggaagcagcagccagtagccaaact

SEQ ID NO: 5452519 - DNA, 25 bp, Homo sapien
tgatccttctgggaaccaagcccat

SEQ ID NO: 5452520 - DNA, 25 bp, Homo sapien
tggtggcactgactgatccttctgg

SEQ ID NO: 5452521 - DNA, 25 bp, Homo sapien
cctggtggcactgactgatccttct

SEQ ID NO: 5452522 - DNA, 25 bp, Homo sapien
actgactgatccttctgggaaccaa

SEQ ID NO: 5452523 - DNA, 25 bp, Homo sapien
gaactgcagcgagttggacttattg

SEQ ID NO: 5452524 - DNA, 25 bp, Homo sapien
caaatagattgcgatatttctttcc

SEQ ID NO: 5452525 - DNA, 25 bp, Homo sapien
ggtgtagtacttaatgaactgcagc

SEQ ID NO: 5452526 - DNA, 25 bp, Homo sapien
cttttgcaaagatcaatgaagcaca

SEQ ID NO: 5452527 - DNA, 25 bp, Homo sapien
gaaatcttctagattaactttctgc

SEQ ID NO: 5452528 - DNA, 25 bp, Homo sapien
gaagaaatcttctagattaactttc

SEQ ID NO: 5452529 - DNA, 25 bp, Homo sapien
agaaatcttctagattaactttctg

SEQ ID NO: 5452530 - DNA, 25 bp, Homo sapien
aagaaatcttctagattaactttct

SEQ ID NO: 5452531 - DNA, 25 bp, Homo sapien
ggacttgacatttggctaatatctg

SEQ ID NO: 5452532 - DNA, 25 bp, Homo sapien
agactttgttgaaattgacttgcca

SEQ ID NO: 5452533 - DNA, 25 bp, Homo sapien
tatttgactactgaacccggtatcc

SEQ ID NO: 5452534 - DNA, 25 bp, Homo sapien
gacttgccatttgcctggacttgac

SEQ ID NO: 5452535 - DNA, 25 bp, Homo sapien
gccaagtccccagaatccttgaatt

SEQ ID NO: 5452536 - DNA, 25 bp, Homo sapien
tgataagcaccacagcatgtcgggc

SEQ ID NO: 5452537 - DNA, 25 bp, Homo sapien
tccacgatgtgaagtcaattattgc

SEQ ID NO: 5452538 - DNA, 25 bp, Homo sapien
tgctgaacatggacaccactgtttg

SEQ ID NO: 5452539 - DNA, 25 bp, Homo sapien
cgggcagcagcagtatgctgaacat

SEQ ID NO: 5452540 - DNA, 25 bp, Homo sapien
gacttaagctctttcacggaggagg

SEQ ID NO: 5452541 - DNA, 25 bp, Homo sapien
gtacgtttataactcatggcagctg

SEQ ID NO: 5452542 - DNA, 25 bp, Homo sapien
tgtttctgcaggtaatagccttcag

SEQ ID NO: 5452543 - DNA, 25 bp, Homo sapien
tgtgggcccctatccagtgactcaa

SEQ ID NO: 5452544 - DNA, 25 bp, Homo sapien
gccagtggcagaacatgttttccag

SEQ ID NO: 5452545 - DNA, 25 bp, Homo sapien
ttccaggcagcaaaactctttttca

SEQ ID NO: 5452546 - DNA, 25 bp, Homo sapien
tgttttccaggcagcaaaactcttt

SEQ ID NO: 5452547 - DNA, 25 bp, Homo sapien
aagccagtggcagaacatgttttcc

SEQ ID NO: 5452548 - DNA, 25 bp, Homo sapien
tcaagaacccccagaaggtgagctt

SEQ ID NO: 5452549 - DNA, 25 bp, Homo sapien
cctcaagaacccccagaaggtgagc

SEQ ID NO: 5452550 - DNA, 25 bp, Homo sapien
caagaacccccagaaggtgagcttt

SEQ ID NO: 5452551 - DNA, 25 bp, Homo sapien
cttcctcaagaacccccagaaggtg

SEQ ID NO: 5452552 - DNA, 25 bp, Homo sapien
gcaacaatggcaatttcaagaatga

SEQ ID NO: 5452553 - DNA, 25 bp, Homo sapien
aaaatgtcactgttgtgtagcaaca

SEQ ID NO: 5452554 - DNA, 25 bp, Homo sapien
aatcctgacctcgtgtgctgcacct

SEQ ID NO: 5452555 - DNA, 25 bp, Homo sapien
cactgttgtgtagcaacaatggcaa

SEQ ID NO: 5452556 - DNA, 25 bp, Homo sapien
gatttgttcctagccctctccatgt

SEQ ID NO: 5452557 - DNA, 25 bp, Homo sapien
tgagcccagcaatgaagttcactgt

SEQ ID NO: 5452558 - DNA, 25 bp, Homo sapien
gcagttcctgagtgtgtcaacccag

SEQ ID NO: 5452559 - DNA, 25 bp, Homo sapien
tgtgaatggtgtcgctgtgagccca

SEQ ID NO: 5452560 - DNA, 25 bp, Homo sapien
ttatcttggctgtcaaatactttgg

SEQ ID NO: 5452561 - DNA, 25 bp, Homo sapien
cataaatggttattttggcgggcaa

SEQ ID NO: 5452562 - DNA, 25 bp, Homo sapien
ttacaacttgccaaaagcatgaggc

SEQ ID NO: 5452563 - DNA, 25 bp, Homo sapien
tatggattcaaggtagatgcaacta

SEQ ID NO: 5452564 - DNA, 25 bp, Homo sapien
tatctgattcgtggctctgcttgcg

SEQ ID NO: 5452565 - DNA, 25 bp, Homo sapien
gcctgagaccggataggaacagcca

SEQ ID NO: 5452566 - DNA, 25 bp, Homo sapien
tctgcttgcgattacctgacaaacc

SEQ ID NO: 5452567 - DNA, 25 bp, Homo sapien
gacagtctacaacctctacaagtga

SEQ ID NO: 5452568 - DNA, 25 bp, Homo sapien
gcagatattggtggctggaatcaag

SEQ ID NO: 5452569 - DNA, 25 bp, Homo sapien
tagcgctgcttgattcccttcagtt

SEQ ID NO: 5452570 - DNA, 25 bp, Homo sapien
tacatagggccaaattggaccctcc

SEQ ID NO: 5452571 - DNA, 25 bp, Homo sapien
gattcacaccgggtatctctgagat

SEQ ID NO: 5452572 - DNA, 25 bp, Homo sapien
aagccgttgtcgcatcctaatgcca

SEQ ID NO: 5452573 - DNA, 25 bp, Homo sapien
cagaagccgttgtcgcatcctaatg

SEQ ID NO: 5452574 - DNA, 25 bp, Homo sapien
gttgtcgcatcctaatgccaattgt

SEQ ID NO: 5452575 - DNA, 25 bp, Homo sapien
gtaccagaagccgttgtcgcatcct

SEQ ID NO: 5452576 - DNA, 25 bp, Homo sapien
gaaacttgtgcacagtttagaaatc

SEQ ID NO: 5452577 - DNA, 25 bp, Homo sapien
cagggataaatttatcccaggggtg

SEQ ID NO: 5452578 - DNA, 25 bp, Homo sapien
ggttaaagctaatggctgtacaatt

SEQ ID NO: 5452579 - DNA, 25 bp, Homo sapien
acctccacattactgaaacttgtgc

SEQ ID NO: 5452580 - DNA, 25 bp, Homo sapien
cagtgttcgaaacgtgaatgccaag

SEQ ID NO: 5452581 - DNA, 25 bp, Homo sapien
tgaaagtggacgaatgtaacatctg

SEQ ID NO: 5452582 - DNA, 25 bp, Homo sapien
agctggcattgaagtgaaagtggac

SEQ ID NO: 5452583 - DNA, 25 bp, Homo sapien
gaacgacgataattccagctggcat

SEQ ID NO: 5452584 - DNA, 25 bp, Homo sapien
agctcactgtcccctggtttacttc

SEQ ID NO: 5452585 - DNA, 25 bp, Homo sapien
tttttactcttctgtacattgtaca

SEQ ID NO: 5452586 - DNA, 25 bp, Homo sapien
catttttactcttctgtacattgta

SEQ ID NO: 5452587 - DNA, 25 bp, Homo sapien
cactgtcccctggtttacttcattt

SEQ ID NO: 5452588 - DNA, 25 bp, Homo sapien
aaaatgaggcactcggataaaagtt

SEQ ID NO: 5452589 - DNA, 25 bp, Homo sapien
agggactgttcacatggagttcaaa

SEQ ID NO: 5452590 - DNA, 25 bp, Homo sapien
cactcggataaaagttctgggaggg

SEQ ID NO: 5452591 - DNA, 25 bp, Homo sapien
tgataatgactttgggatcaaaata

SEQ ID NO: 5452592 - DNA, 25 bp, Homo sapien
acaaaaagtgcctgtagggttgttg

SEQ ID NO: 5452593 - DNA, 25 bp, Homo sapien
gaagagtctctagccagggccttgg

SEQ ID NO: 5452594 - DNA, 25 bp, Homo sapien
tcatgtcatgctaaatccaccttgc

SEQ ID NO: 5452595 - DNA, 25 bp, Homo sapien
taaacactctttgaatcgaagagtc

SEQ ID NO: 5452596 - DNA, 25 bp, Homo sapien
ggtgattgtgtgtcctggaaaccat

SEQ ID NO: 5452597 - DNA, 25 bp, Homo sapien
accattgacaagcaagagtatccag

SEQ ID NO: 5452598 - DNA, 25 bp, Homo sapien
ggtcctggagtcttgttttatgtag

SEQ ID NO: 5452599 - DNA, 25 bp, Homo sapien
ttcagttgacctgcttgtaaatggg

SEQ ID NO: 5452600 - DNA, 25 bp, Homo sapien
ggaagattcatacagcatccgtcta

SEQ ID NO: 5452601 - DNA, 25 bp, Homo sapien
tcaacacaggaagattcatacagca

SEQ ID NO: 5452602 - DNA, 25 bp, Homo sapien
tacagcatccgtctatatccaattg

SEQ ID NO: 5452603 - DNA, 25 bp, Homo sapien
cgtctatatccaattgcccagtctg

SEQ ID NO: 5452604 - DNA, 25 bp, Homo sapien
tgggcacctatgtcaatcaagatcc

SEQ ID NO: 5452605 - DNA, 25 bp, Homo sapien
agtttccaaatgcaaggtgacagca

SEQ ID NO: 5452606 - DNA, 25 bp, Homo sapien
ggcacctatgtcaatcaagatccaa

SEQ ID NO: 5452607 - DNA, 25 bp, Homo sapien
gttctgggcacctatgtcaatcaag

SEQ ID NO: 5452608 - DNA, 25 bp, Homo sapien
aagaatgtgcactctctattttcag

SEQ ID NO: 5452609 - DNA, 25 bp, Homo sapien
gaggctctgtcatcaacacagctgc

SEQ ID NO: 5452610 - DNA, 25 bp, Homo sapien
tttcagaggctctgtcatcaacaca

SEQ ID NO: 5452611 - DNA, 25 bp, Homo sapien
cccttaattgaaggcttgaaagaat

SEQ ID NO: 5452612 - DNA, 25 bp, Homo sapien
tactcaggactgacacaagctgtgc

SEQ ID NO: 5452613 - DNA, 25 bp, Homo sapien
gaaataagaaactagggcctggctc

SEQ ID NO: 5452614 - DNA, 25 bp, Homo sapien
gcaaactttaccagtgcagatggga

SEQ ID NO: 5452615 - DNA, 25 bp, Homo sapien
caggagtggctacatagatgggcaa

SEQ ID NO: 5452616 - DNA, 25 bp, Homo sapien
caataacagctaatgtggccccact

SEQ ID NO: 5452617 - DNA, 25 bp, Homo sapien
caattgtgactgtaatgaggcccat

SEQ ID NO: 5452618 - DNA, 25 bp, Homo sapien
tgaggcccatgaacgtttagaatat

SEQ ID NO: 5452619 - DNA, 25 bp, Homo sapien
tctaggcagaggtcacttaactatt

SEQ ID NO: 5452620 - DNA, 25 bp, Homo sapien
tagttaatagacttcctcaccaagt

SEQ ID NO: 5452621 - DNA, 25 bp, Homo sapien
taagccaattttatacaagacacag

SEQ ID NO: 5452622 - DNA, 25 bp, Homo sapien
caccaagtcatgttgagcctcattc

SEQ ID NO: 5452623 - DNA, 25 bp, Homo sapien
actatcaaagttatactgtattcgg

SEQ ID NO: 5452624 - DNA, 25 bp, Homo sapien
tcagagctaattcacccagcaaggt

SEQ ID NO: 5452625 - DNA, 25 bp, Homo sapien
agtacaatgactgggctctcacaaa

SEQ ID NO: 5452626 - DNA, 25 bp, Homo sapien
tgcttaacagtcagggaaaaacaac

SEQ ID NO: 5452627 - DNA, 25 bp, Homo sapien
gacaatttgctagactggtcagacc

SEQ ID NO: 5452628 - DNA, 25 bp, Homo sapien
gatcagaatcgggtctcgcatggta

SEQ ID NO: 5452629 - DNA, 25 bp, Homo sapien
tggcttgggctttctactgaggatc

SEQ ID NO: 5452630 - DNA, 25 bp, Homo sapien
cagtctataaaccagctcgaaggag

SEQ ID NO: 5452631 - DNA, 25 bp, Homo sapien
agtcacgtcactgtctggcttgggc

SEQ ID NO: 5452632 - DNA, 25 bp, Homo sapien
tgactgtgttctgaccgtgacctgt

SEQ ID NO: 5452633 - DNA, 25 bp, Homo sapien
gaatatcccttacctgaaacatttg

SEQ ID NO: 5452634 - DNA, 25 bp, Homo sapien
gctacttaatgaggtgctgggacaa

SEQ ID NO: 5452635 - DNA, 25 bp, Homo sapien
gtatcttaaggatgaggctcaagcc

SEQ ID NO: 5452636 - DNA, 25 bp, Homo sapien
cctgcttctgcgtggaccttcagga

SEQ ID NO: 5452637 - DNA, 25 bp, Homo sapien
tgttctctgttgagcctgcttctgc

SEQ ID NO: 5452638 - DNA, 25 bp, Homo sapien
gaccttcaggaatttcatacttttc

SEQ ID NO: 5452639 - DNA, 25 bp, Homo sapien
gcttctgcgtggaccttcaggaatt

SEQ ID NO: 5452640 - DNA, 25 bp, Homo sapien
cagcctgccgatttgaaacttttga

SEQ ID NO: 5452641 - DNA, 25 bp, Homo sapien
caaggattgcgactcaaatgcctac

SEQ ID NO: 5452642 - DNA, 25 bp, Homo sapien
gagatggcagataccaacagagcag

SEQ ID NO: 5452643 - DNA, 25 bp, Homo sapien
gaagctatggagactgtaacaaaca

SEQ ID NO: 5452644 - DNA, 25 bp, Homo sapien
ttgtcttctagggtccatctctcct

SEQ ID NO: 5452645 - DNA, 25 bp, Homo sapien
gattgtcttctagggtccatctctc

SEQ ID NO: 5452646 - DNA, 25 bp, Homo sapien
tgattgtcttctagggtccatctct

SEQ ID NO: 5452647 - DNA, 25 bp, Homo sapien
taatgattgtcttctagggtccatc

SEQ ID NO: 5452648 - DNA, 25 bp, Homo sapien
cattgagaatcccaagcatacactt

SEQ ID NO: 5452649 - DNA, 25 bp, Homo sapien
ttttagaatccagcatccattgaga

SEQ ID NO: 5452650 - DNA, 25 bp, Homo sapien
catcaccaggaacaacaacatgagt

SEQ ID NO: 5452651 - DNA, 25 bp, Homo sapien
ctgcatcaccaggaacaacaacatg

SEQ ID NO: 5452652 - DNA, 25 bp, Homo sapien
ccttaagaattactgcaagctcact

SEQ ID NO: 5452653 - DNA, 25 bp, Homo sapien
ctgtactgtcaaactcagtatattt

SEQ ID NO: 5452654 - DNA, 25 bp, Homo sapien
tgtactgtcaaactcagtatatttt

SEQ ID NO: 5452655 - DNA, 25 bp, Homo sapien
gccttaagaattactgcaagctcac

SEQ ID NO: 5452656 - DNA, 25 bp, Homo sapien
gaagacagcccactgcctataagta

SEQ ID NO: 5452657 - DNA, 25 bp, Homo sapien
agcccactgcctataagtacaagag

SEQ ID NO: 5452658 - DNA, 25 bp, Homo sapien
gtacaagaggtccatccctacgctg

SEQ ID NO: 5452659 - DNA, 25 bp, Homo sapien
cactgcctataagtacaagaggtcc

SEQ ID NO: 5452660 - DNA, 25 bp, Homo sapien
tcttctctggtagcagcaatagcga

SEQ ID NO: 5452661 - DNA, 25 bp, Homo sapien
tctgtataatcgacaggccgcagac

SEQ ID NO: 5452662 - DNA, 25 bp, Homo sapien
gcagtggctagctgaggatgattca

SEQ ID NO: 5452663 - DNA, 25 bp, Homo sapien
gcaatagcgatttcatactttcatc

SEQ ID NO: 5452664 - DNA, 25 bp, Homo sapien
ttttgcagtctggtaaagctcccca

SEQ ID NO: 5452665 - DNA, 25 bp, Homo sapien
gagttggacttcctcccaaaggcaa

SEQ ID NO: 5452666 - DNA, 25 bp, Homo sapien
gggttaccgaataagactgcctgaa

SEQ ID NO: 5452667 - DNA, 25 bp, Homo sapien
tatgaggtactctcgaactgtaagc

SEQ ID NO: 5452668 - DNA, 25 bp, Homo sapien
tgaggtgggaggatcgcttgagccc

SEQ ID NO: 5452669 - DNA, 25 bp, Homo sapien
cttgggcaacacagtgagaccctat

SEQ ID NO: 5452670 - DNA, 25 bp, Homo sapien
tggagttcaagaccagcttgggcaa

SEQ ID NO: 5452671 - DNA, 25 bp, Homo sapien
caaaaaagcataagctttgggaggc

SEQ ID NO: 5452672 - DNA, 25 bp, Homo sapien
agttcaggcctggttattgagaaaa

SEQ ID NO: 5452673 - DNA, 25 bp, Homo sapien
gagtagtaagaatcccatagtctcc

SEQ ID NO: 5452674 - DNA, 25 bp, Homo sapien
gagtaagagatacagtaagcagaga

SEQ ID NO: 5452675 - DNA, 25 bp, Homo sapien
aaagagttccagcaagagtaagaga

SEQ ID NO: 5452676 - DNA, 25 bp, Homo sapien
ggcatgaaggctgattatgagtgca

SEQ ID NO: 5452677 - DNA, 25 bp, Homo sapien
aagtctgctttatcacacaccttga

SEQ ID NO: 5452678 - DNA, 25 bp, Homo sapien
gaatcctcaagtgtagaacccaaga

SEQ ID NO: 5452679 - DNA, 25 bp, Homo sapien
tatgagtgcagaatgtgatgatcac

SEQ ID NO: 5452680 - DNA, 25 bp, Homo sapien
ttttgatacccggtggtgttcacca

SEQ ID NO: 5452681 - DNA, 25 bp, Homo sapien
aagtaacagcttgactatatccaca

SEQ ID NO: 5452682 - DNA, 25 bp, Homo sapien
gcccattcttggctgcatcgtgaag

SEQ ID NO: 5452683 - DNA, 25 bp, Homo sapien
tctggaggctccataggaaagtaac

SEQ ID NO: 5452684 - DNA, 25 bp, Homo sapien
accttcaggtgcccatgattgcaag

SEQ ID NO: 5452685 - DNA, 25 bp, Homo sapien
actaccttcaggtgcccatgattgc

SEQ ID NO: 5452686 - DNA, 25 bp, Homo sapien
ctaccttcaggtgcccatgattgca

SEQ ID NO: 5452687 - DNA, 25 bp, Homo sapien
cactaccttcaggtgcccatgattg

SEQ ID NO: 5452688 - DNA, 25 bp, Homo sapien
catggtctttaacatttggatcact

SEQ ID NO: 5452689 - DNA, 25 bp, Homo sapien
ggtattcaacagaaggtatgtcgcc

SEQ ID NO: 5452690 - DNA, 25 bp, Homo sapien
aaggtattcaacagaaggtatgtcg

SEQ ID NO: 5452691 - DNA, 25 bp, Homo sapien
ccagcatggtctttaacatttggat

SEQ ID NO: 5452692 - DNA, 25 bp, Homo sapien
agctaaggcgagaggcatacattca

SEQ ID NO: 5452693 - DNA, 25 bp, Homo sapien
tagaccaagagtaggcaaactatag

SEQ ID NO: 5452694 - DNA, 25 bp, Homo sapien
taataattccggcaaaactctaagc

SEQ ID NO: 5452695 - DNA, 25 bp, Homo sapien
taacataatctgacaactggtgaca

SEQ ID NO: 5452696 - DNA, 25 bp, Homo sapien
ttaatagaagcaatatggagcaaag

SEQ ID NO: 5452697 - DNA, 25 bp, Homo sapien
tagaagcaatatggagcaaagtctc

SEQ ID NO: 5452698 - DNA, 25 bp, Homo sapien
agcaatatggagcaaagtctctcct

SEQ ID NO: 5452699 - DNA, 25 bp, Homo sapien
cttaatagaagcaatatggagcaaa

SEQ ID NO: 5452700 - DNA, 25 bp, Homo sapien
tatctgactttcttacttcgagggc

SEQ ID NO: 5452701 - DNA, 25 bp, Homo sapien
taacagatggttggctacagaagga

SEQ ID NO: 5452702 - DNA, 25 bp, Homo sapien
taatttttgcagaccttctcaggag

SEQ ID NO: 5452703 - DNA, 25 bp, Homo sapien
tgagggactagacatcactcgcctg

SEQ ID NO: 5452704 - DNA, 25 bp, Homo sapien
tgaaatttattgctcccacatggag

SEQ ID NO: 5452705 - DNA, 25 bp, Homo sapien
catggagctcccgaagaattttgtt

SEQ ID NO: 5452706 - DNA, 25 bp, Homo sapien
ttgtgccatatcctagagactgaag

SEQ ID NO: 5452707 - DNA, 25 bp, Homo sapien
cttactgaatccgactttgtgccat

SEQ ID NO: 5452708 - DNA, 25 bp, Homo sapien
aggtactgcgtaaaatacactgaat

SEQ ID NO: 5452709 - DNA, 25 bp, Homo sapien
ctagataatcaattaccacaaaggt

SEQ ID NO: 5452710 - DNA, 25 bp, Homo sapien
caattaccacaaaggtactgcgtaa

SEQ ID NO: 5452711 - DNA, 25 bp, Homo sapien
tctagaagtacttactagataatca

SEQ ID NO: 5452712 - DNA, 25 bp, Homo sapien
tgtcatgtagcaaatttcgaagctt

SEQ ID NO: 5452713 - DNA, 25 bp, Homo sapien
tcatgtagcaaatttcgaagcttac

SEQ ID NO: 5452714 - DNA, 25 bp, Homo sapien
cattgtcatgtagcaaatttcgaag

SEQ ID NO: 5452715 - DNA, 25 bp, Homo sapien
tcattgtcatgtagcaaatttcgaa

SEQ ID NO: 5452716 - DNA, 25 bp, Homo sapien
acactggacatccagttccaatgca

SEQ ID NO: 5452717 - DNA, 25 bp, Homo sapien
caggccggggtgtaacacactggac

SEQ ID NO: 5452718 - DNA, 25 bp, Homo sapien
caagtcttgtatccaggccggggtg

SEQ ID NO: 5452719 - DNA, 25 bp, Homo sapien
ccagttgtctatttatcttcaagtc

SEQ ID NO: 5452720 - DNA, 25 bp, Homo sapien
tcagcaagacagagatttgcaaaaa

SEQ ID NO: 5452721 - DNA, 25 bp, Homo sapien
caactacaattatgtataaagccag

SEQ ID NO: 5452722 - DNA, 25 bp, Homo sapien
atgatcacccaagccaagaagttga

SEQ ID NO: 5452723 - DNA, 25 bp, Homo sapien
taagttgagaatgtagctgttttcc

SEQ ID NO: 5452724 - DNA, 25 bp, Homo sapien
gaagatgtgctcacatcctcctaaa

SEQ ID NO: 5452725 - DNA, 25 bp, Homo sapien
tacagaagatgtgctcacatcctcc

SEQ ID NO: 5452726 - DNA, 25 bp, Homo sapien
cacaggctctctcagaatgttagta

SEQ ID NO: 5452727 - DNA, 25 bp, Homo sapien
tgtgctcacatcctcctaaacacac

SEQ ID NO: 5452728 - DNA, 25 bp, Homo sapien
tcctaagatgactgaactctttagc

SEQ ID NO: 5452729 - DNA, 25 bp, Homo sapien
caacgccttgattctgtttctcaac

SEQ ID NO: 5452730 - DNA, 25 bp, Homo sapien
gctttctctggcaatacttgactca

SEQ ID NO: 5452731 - DNA, 25 bp, Homo sapien
gatgcagtccgtagccttccggctt

SEQ ID NO: 5452732 - DNA, 25 bp, Homo sapien
cttctccaggcggtcgagcgcggcg

SEQ ID NO: 5452733 - DNA, 25 bp, Homo sapien
aacgaggctcgttcccggagcggat

SEQ ID NO: 5452734 - DNA, 25 bp, Homo sapien
accatccggttccatggcgggcgcg

SEQ ID NO: 5452735 - DNA, 25 bp, Homo sapien
aacgcgagcagcgcagcagcttctc

SEQ ID NO: 5452736 - DNA, 25 bp, Homo sapien
ttcctcggctgccgattatccggca

SEQ ID NO: 5452737 - DNA, 25 bp, Homo sapien
tcctcggctgccgattatccggcat

SEQ ID NO: 5452738 - DNA, 25 bp, Homo sapien
ggttcctcggctgccgattatccgg

SEQ ID NO: 5452739 - DNA, 25 bp, Homo sapien
gttcctcggctgccgattatccggc

SEQ ID NO: 5452740 - DNA, 25 bp, Homo sapien
agcgactcgaaaccggccaagctct

SEQ ID NO: 5452741 - DNA, 25 bp, Homo sapien
tcggatgaaaggctcctcgcagagc

SEQ ID NO: 5452742 - DNA, 25 bp, Homo sapien
agcctcgggaaaccacagggaagct

SEQ ID NO: 5452743 - DNA, 25 bp, Homo sapien
agctcttcccgcgtctgggacggcg

SEQ ID NO: 5452744 - DNA, 25 bp, Homo sapien
gacaggacggctgaaaccgaggtcc

SEQ ID NO: 5452745 - DNA, 25 bp, Homo sapien
gcttaaccgttggaacaatcacaaa

SEQ ID NO: 5452746 - DNA, 25 bp, Homo sapien
ttcccgggagctacgactccaggga

SEQ ID NO: 5452747 - DNA, 25 bp, Homo sapien
agggaccctcatccgagcttaaccg

SEQ ID NO: 5452748 - DNA, 25 bp, Homo sapien
ctcctccagtgataagacagcttag

SEQ ID NO: 5452749 - DNA, 25 bp, Homo sapien
aggccacagaatttggagcaagtat

SEQ ID NO: 5452750 - DNA, 25 bp, Homo sapien
tggtgcagggagaaatagactgaaa

SEQ ID NO: 5452751 - DNA, 25 bp, Homo sapien
caaatattgagattccggatggctc

SEQ ID NO: 5452752 - DNA, 25 bp, Homo sapien
tatcactgggatcagaacacctcct

SEQ ID NO: 5452753 - DNA, 25 bp, Homo sapien
gcagtcaaggtggtgattcagcaac

SEQ ID NO: 5452754 - DNA, 25 bp, Homo sapien
gccagagtttttctgtcaggcagga

SEQ ID NO: 5452755 - DNA, 25 bp, Homo sapien
acaagtttggaagcctgcagtcaag

SEQ ID NO: 5452756 - DNA, 25 bp, Homo sapien
ggcatcagagctttgagtgtgcatt

SEQ ID NO: 5452757 - DNA, 25 bp, Homo sapien
ccccagagatcctcagttaccagga

SEQ ID NO: 5452758 - DNA, 25 bp, Homo sapien
gagatcctcagttaccaggacattg

SEQ ID NO: 5452759 - DNA, 25 bp, Homo sapien
cacatggggatggtttggcatcaga

SEQ ID NO: 5452760 - DNA, 25 bp, Homo sapien
tcttctgaggttgtaacatgtagca

SEQ ID NO: 5452761 - DNA, 25 bp, Homo sapien
tcagtagacctggagagatttaaaa

SEQ ID NO: 5452762 - DNA, 25 bp, Homo sapien
tacaaataggctctgtggtgctttt

SEQ ID NO: 5452763 - DNA, 25 bp, Homo sapien
cattggttgaatatgagcatccaaa

SEQ ID NO: 5452764 - DNA, 25 bp, Homo sapien
cttcagccagaaggctgaaagtatt

SEQ ID NO: 5452765 - DNA, 25 bp, Homo sapien
aaggctgaaagtattttggttatca

SEQ ID NO: 5452766 - DNA, 25 bp, Homo sapien
ggttatcatctggacatttattgac

SEQ ID NO: 5452767 - DNA, 25 bp, Homo sapien
cagccagaaggctgaaagtattttg

SEQ ID NO: 5452768 - DNA, 25 bp, Homo sapien
tagatactgttccactgcctatctc

SEQ ID NO: 5452769 - DNA, 25 bp, Homo sapien
gcaggttgaatgctgacagtgtaga

SEQ ID NO: 5452770 - DNA, 25 bp, Homo sapien
caagtgttgaccctacatttgtcac

SEQ ID NO: 5452771 - DNA, 25 bp, Homo sapien
gaccctacatttgtcaccatctcaa

SEQ ID NO: 5452772 - DNA, 25 bp, Homo sapien
tgaagccattggtcacacgctgaga

SEQ ID NO: 5452773 - DNA, 25 bp, Homo sapien
aatctaggttccgtgtaccaccagg

SEQ ID NO: 5452774 - DNA, 25 bp, Homo sapien
cagcttactattggcaaggcatggc

SEQ ID NO: 5452775 - DNA, 25 bp, Homo sapien
catatacacgattctgggtcaccca

SEQ ID NO: 5452776 - DNA, 25 bp, Homo sapien
tcttgtgagtcaacacttatagtgg

SEQ ID NO: 5452777 - DNA, 25 bp, Homo sapien
cttatagtggaaccttggctgctgg

SEQ ID NO: 5452778 - DNA, 25 bp, Homo sapien
gtgagtcaacacttatagtggaacc

SEQ ID NO: 5452779 - DNA, 25 bp, Homo sapien
tcaacacttatagtggaaccttggc

SEQ ID NO: 5452780 - DNA, 25 bp, Homo sapien
ttcagggaaaataaagccattaatg

SEQ ID NO: 5452781 - DNA, 25 bp, Homo sapien
tcagggaaaataaagccattaatgc

SEQ ID NO: 5452782 - DNA, 25 bp, Homo sapien
tgatttttcagggaaaataaagcca

SEQ ID NO: 5452783 - DNA, 25 bp, Homo sapien
tcctgctgtgactggtacatgatac

SEQ ID NO: 5452784 - DNA, 25 bp, Homo sapien
gactggtacatgatactctagcatg

SEQ ID NO: 5452785 - DNA, 25 bp, Homo sapien
aatgtttgcgactcctcctgctgtg

SEQ ID NO: 5452786 - DNA, 25 bp, Homo sapien
ggtctgactcactaagaaatttgta

SEQ ID NO: 5452787 - DNA, 25 bp, Homo sapien
gcatgaactttgtgagggtctccat

SEQ ID NO: 5452788 - DNA, 25 bp, Homo sapien
tggaaagtgcagctgcatgaacttt

SEQ ID NO: 5452789 - DNA, 25 bp, Homo sapien
ggtctccatggtcactttgttattc

SEQ ID NO: 5452790 - DNA, 25 bp, Homo sapien
tcaagtgaactttgacagtaaatcc

SEQ ID NO: 5452791 - DNA, 25 bp, Homo sapien
tgtgctgcaaagatccaatacattg

SEQ ID NO: 5452792 - DNA, 25 bp, Homo sapien
aacctggtacagagagcttcacatt

SEQ ID NO: 5452793 - DNA, 25 bp, Homo sapien
tgaaactttccattcaccataatgg

SEQ ID NO: 5452794 - DNA, 25 bp, Homo sapien
tgctctttatgtgctgcaaagatcc

SEQ ID NO: 5452795 - DNA, 25 bp, Homo sapien
gagatgtgaggatgacggaacattt

SEQ ID NO: 5452796 - DNA, 25 bp, Homo sapien
ggatgacggaacatttgttctgtac

SEQ ID NO: 5452797 - DNA, 25 bp, Homo sapien
aatgatcttccagaggtgccgtttc

SEQ ID NO: 5452798 - DNA, 25 bp, Homo sapien
tcgacttcggatccatgccagagct

SEQ ID NO: 5452799 - DNA, 25 bp, Homo sapien
cataactgcacatagaggtagctct

SEQ ID NO: 5452800 - DNA, 25 bp, Homo sapien
gaatggaaggtttccctatcaaggc

SEQ ID NO: 5452801 - DNA, 25 bp, Homo sapien
gtctcctaaggagtttatgaacagt

SEQ ID NO: 5452802 - DNA, 25 bp, Homo sapien
ggtttccctatcaaggccagtgcag

SEQ ID NO: 5452803 - DNA, 25 bp, Homo sapien
ttccacagttaccaggtcatctaag

SEQ ID NO: 5452804 - DNA, 25 bp, Homo sapien
acagttaccaggtcatctaaggcat

SEQ ID NO: 5452805 - DNA, 25 bp, Homo sapien
cacagttaccaggtcatctaaggca

SEQ ID NO: 5452806 - DNA, 25 bp, Homo sapien
tccacagttaccaggtcatctaagg

SEQ ID NO: 5452807 - DNA, 25 bp, Homo sapien
tgtgagaatcaacgtgacccagaga

SEQ ID NO: 5452808 - DNA, 25 bp, Homo sapien
ctgtgagaatcaacgtgacccagag

SEQ ID NO: 5452809 - DNA, 25 bp, Homo sapien
gtgagaatcaacgtgacccagagat

SEQ ID NO: 5452810 - DNA, 25 bp, Homo sapien
cattcactccaagaagcccaaaaca

SEQ ID NO: 5452811 - DNA, 25 bp, Homo sapien
tcttgaatatagtggtctttcctgc

SEQ ID NO: 5452812 - DNA, 25 bp, Homo sapien
ctccattcactccaagaagcccaaa

SEQ ID NO: 5452813 - DNA, 25 bp, Homo sapien
agcatcttgaatatagtggtctttc

SEQ ID NO: 5452814 - DNA, 25 bp, Homo sapien
gataagttggtaggtctttgtgaga

SEQ ID NO: 5452815 - DNA, 25 bp, Homo sapien
tattgtctcccttacatgtgaagaa

SEQ ID NO: 5452816 - DNA, 25 bp, Homo sapien
tccagcaggtatcccaatgctgatg

SEQ ID NO: 5452817 - DNA, 25 bp, Homo sapien
ttggaccaagtcaaattcagctgca

SEQ ID NO: 5452818 - DNA, 25 bp, Homo sapien
tatgcttttaagaagtctaggaccg

SEQ ID NO: 5452819 - DNA, 25 bp, Homo sapien
cagggattcgttgattaagagtcgc

SEQ ID NO: 5452820 - DNA, 25 bp, Homo sapien
ccgtagccaaaacagaattgtggga

SEQ ID NO: 5452821 - DNA, 25 bp, Homo sapien
gaaagttcaatcaaaccgtagccaa

SEQ ID NO: 5452822 - DNA, 25 bp, Homo sapien
cacagacgtaagtgatgaaggccat

SEQ ID NO: 5452823 - DNA, 25 bp, Homo sapien
ggaaagaaagtataccactgacagg

SEQ ID NO: 5452824 - DNA, 25 bp, Homo sapien
cggatcattaggcttttccttggaa

SEQ ID NO: 5452825 - DNA, 25 bp, Homo sapien
cagggaaacaatggaattaatgcca

SEQ ID NO: 5452826 - DNA, 25 bp, Homo sapien
aacgctacaggcaccaagtagaaaa

SEQ ID NO: 5452827 - DNA, 25 bp, Homo sapien
agaatgcaggtaatttgaaaatcgc

SEQ ID NO: 5452828 - DNA, 25 bp, Homo sapien
taggagagatacagcgcctaggttg

SEQ ID NO: 5452829 - DNA, 25 bp, Homo sapien
tgaaaatcgcaatgataccaattga

SEQ ID NO: 5452830 - DNA, 25 bp, Homo sapien
gagtagcccatcaagatagacagtg

SEQ ID NO: 5452831 - DNA, 25 bp, Homo sapien
gacagtgccactaaaatatcgatta

SEQ ID NO: 5452832 - DNA, 25 bp, Homo sapien
gttacccagtagcatgtcacgccaa

SEQ ID NO: 5452833 - DNA, 25 bp, Homo sapien
tcacgccaatgcctgaaatgtgctg

SEQ ID NO: 5452834 - DNA, 25 bp, Homo sapien
aagaaaacagtacaagagttggctg

SEQ ID NO: 5452835 - DNA, 25 bp, Homo sapien
tcagaaagattcataactaaaacca

SEQ ID NO: 5452836 - DNA, 25 bp, Homo sapien
cataactaaaaccatcaagaaaaca

SEQ ID NO: 5452837 - DNA, 25 bp, Homo sapien
tacaagagttggctgtgacacaaat

SEQ ID NO: 5452838 - DNA, 25 bp, Homo sapien
tggcttgttcttggtcttgcactcc

SEQ ID NO: 5452839 - DNA, 25 bp, Homo sapien
cttgcactcctggataaggatggct

SEQ ID NO: 5452840 - DNA, 25 bp, Homo sapien
cctggataaggatggctatacatga

SEQ ID NO: 5452841 - DNA, 25 bp, Homo sapien
taaggatggctatacatgatgatgc

SEQ ID NO: 5452842 - DNA, 25 bp, Homo sapien
aaaagagatggaatagctaagacaa

SEQ ID NO: 5452843 - DNA, 25 bp, Homo sapien
acagaagttgcaatacaggacactt

SEQ ID NO: 5452844 - DNA, 25 bp, Homo sapien
agttgcaatacaggacacttttgtg

SEQ ID NO: 5452845 - DNA, 25 bp, Homo sapien
cagaagttgcaatacaggacacttt

SEQ ID NO: 5452846 - DNA, 25 bp, Homo sapien
gaagttgcaatacaggacacttttg

SEQ ID NO: 5452847 - DNA, 25 bp, Homo sapien
gagtgatagccttctggatcatacc

SEQ ID NO: 5452848 - DNA, 25 bp, Homo sapien
tgacatgttaactcgcagaaggaaa

SEQ ID NO: 5452849 - DNA, 25 bp, Homo sapien
catgtcgggcagcatcgtattttga

SEQ ID NO: 5452850 - DNA, 25 bp, Homo sapien
ttcaggctgttgaggtaagctggaa

SEQ ID NO: 5452851 - DNA, 25 bp, Homo sapien
aataaattaggctgtcttaacatct

SEQ ID NO: 5452852 - DNA, 25 bp, Homo sapien
aaataagagcatcaattttccaata

SEQ ID NO: 5452853 - DNA, 25 bp, Homo sapien
aataagagcatcaattttccaataa

SEQ ID NO: 5452854 - DNA, 25 bp, Homo sapien
tcaaataaattaggctgtcttaaca

SEQ ID NO: 5452855 - DNA, 25 bp, Homo sapien
ttttgtcaaaggcagcccaaaactc

SEQ ID NO: 5452856 - DNA, 25 bp, Homo sapien
ttgtcaaaggcagcccaaaactcca

SEQ ID NO: 5452857 - DNA, 25 bp, Homo sapien
cctgttatatcaaaacgaaggtctt

SEQ ID NO: 5452858 - DNA, 25 bp, Homo sapien
gcagggactcctgttatatcaaaac

SEQ ID NO: 5452859 - DNA, 25 bp, Homo sapien
tttccactcgttgcccagtgaggtt

SEQ ID NO: 5452860 - DNA, 25 bp, Homo sapien
aattttccactcgttgcccagtgag

SEQ ID NO: 5452861 - DNA, 25 bp, Homo sapien
ctcgttgcccagtgaggttataaat

SEQ ID NO: 5452862 - DNA, 25 bp, Homo sapien
agataattttccactcgttgcccag

SEQ ID NO: 5452863 - DNA, 25 bp, Homo sapien
taagttcttctgtgcggtggggaat

SEQ ID NO: 5452864 - DNA, 25 bp, Homo sapien
cttctgtgcggtggggaatagttaa

SEQ ID NO: 5452865 - DNA, 25 bp, Homo sapien
ctgtgcggtggggaatagttaaatt

SEQ ID NO: 5452866 - DNA, 25 bp, Homo sapien
ttcttctgtgcggtggggaatagtt

SEQ ID NO: 5452867 - DNA, 25 bp, Homo sapien
gcaaacaccaaaattagtgatgggt

SEQ ID NO: 5452868 - DNA, 25 bp, Homo sapien
gcaggagcaaacaccaaaattagtg

SEQ ID NO: 5452869 - DNA, 25 bp, Homo sapien
caccaaaattagtgatgggttctcc

SEQ ID NO: 5452870 - DNA, 25 bp, Homo sapien
gagcaaacaccaaaattagtgatgg

SEQ ID NO: 5452871 - DNA, 25 bp, Homo sapien
tgagacaagtgcttccgtgctcggg

SEQ ID NO: 5452872 - DNA, 25 bp, Homo sapien
tgttgtcaattccagggaagtccca

SEQ ID NO: 5452873 - DNA, 25 bp, Homo sapien
agatcactggtgttcagacacatgt

SEQ ID NO: 5452874 - DNA, 25 bp, Homo sapien
tgcttccgtgctcgggtgataatta

SEQ ID NO: 5452875 - DNA, 25 bp, Homo sapien
gcatagaaggctgtctgttcggagg

SEQ ID NO: 5452876 - DNA, 25 bp, Homo sapien
atagaaggctgtctgttcggaggta

SEQ ID NO: 5452877 - DNA, 25 bp, Homo sapien
catagaaggctgtctgttcggaggt

SEQ ID NO: 5452878 - DNA, 25 bp, Homo sapien
tagaaggctgtctgttcggaggtac

SEQ ID NO: 5452879 - DNA, 25 bp, Homo sapien
ggagatctgaatctctggataactg

SEQ ID NO: 5452880 - DNA, 25 bp, Homo sapien
tggataactgttgctggaatttctc

SEQ ID NO: 5452881 - DNA, 25 bp, Homo sapien
agggggagatctgaatctctggata

SEQ ID NO: 5452882 - DNA, 25 bp, Homo sapien
tctctggataactgttgctggaatt

SEQ ID NO: 5452883 - DNA, 25 bp, Homo sapien
gtggtaacaaagacgatggggagga

SEQ ID NO: 5452884 - DNA, 25 bp, Homo sapien
tggtaacaaagacgatggggaggat

SEQ ID NO: 5452885 - DNA, 25 bp, Homo sapien
cagtggtaacaaagacgatggggag

SEQ ID NO: 5452886 - DNA, 25 bp, Homo sapien
gcagtggtaacaaagacgatgggga

SEQ ID NO: 5452887 - DNA, 25 bp, Homo sapien
gaacctcttgatgagtatagccatg

SEQ ID NO: 5452888 - DNA, 25 bp, Homo sapien
tgtggtggaacctcttgatgagtat

SEQ ID NO: 5452889 - DNA, 25 bp, Homo sapien
cttgatgagtatagccatgatcttc

SEQ ID NO: 5452890 - DNA, 25 bp, Homo sapien
ttcctgcgggtgtggtggaacctct

SEQ ID NO: 5452891 - DNA, 25 bp, Homo sapien
agataaatcgtcaggagttgagatg

SEQ ID NO: 5452892 - DNA, 25 bp, Homo sapien
tgtgttaagtgctcaagactcatag

SEQ ID NO: 5452893 - DNA, 25 bp, Homo sapien
gatgccattggcattggaattccca

SEQ ID NO: 5452894 - DNA, 25 bp, Homo sapien
gcactatttttttgtgactctttgg

SEQ ID NO: 5452895 - DNA, 25 bp, Homo sapien
tctgaaatgccgtagcacccgatgt

SEQ ID NO: 5452896 - DNA, 25 bp, Homo sapien
gccattgtcgagtgcccgtaggagt

SEQ ID NO: 5452897 - DNA, 25 bp, Homo sapien
tgattggatcattgctgtcacggcc

SEQ ID NO: 5452898 - DNA, 25 bp, Homo sapien
gttgaggtcacccatgccattgtcg

SEQ ID NO: 5452899 - DNA, 25 bp, Homo sapien
tcttggtaagcgtgaggtgataccc

SEQ ID NO: 5452900 - DNA, 25 bp, Homo sapien
ttcttcttggtaagcgtgaggtgat

SEQ ID NO: 5452901 - DNA, 25 bp, Homo sapien
taagcgtgaggtgatacccatcgcc

SEQ ID NO: 5452902 - DNA, 25 bp, Homo sapien
ggtgatacccatcgccaaaggcttc

SEQ ID NO: 5452903 - DNA, 25 bp, Homo sapien
tccaggaaggcgatgcggtcactca

SEQ ID NO: 5452904 - DNA, 25 bp, Homo sapien
tggtgcgttgacagaatgattgttc

SEQ ID NO: 5452905 - DNA, 25 bp, Homo sapien
cttgaggtaaaatggggacccacag

SEQ ID NO: 5452906 - DNA, 25 bp, Homo sapien
acttcagcctcgtccaagtggtgcg

SEQ ID NO: 5452907 - DNA, 25 bp, Homo sapien
gaatgaaacgtgaaagtacagttcc

SEQ ID NO: 5452908 - DNA, 25 bp, Homo sapien
caacagggaatgaaacgtgaaagta

SEQ ID NO: 5452909 - DNA, 25 bp, Homo sapien
gttggccagagtaaatcctgtgaca

SEQ ID NO: 5452910 - DNA, 25 bp, Homo sapien
gaaagtacagttcccaagacacaca

SEQ ID NO: 5452911 - DNA, 25 bp, Homo sapien
gagaacatgggtcaactccagtaga

SEQ ID NO: 5452912 - DNA, 25 bp, Homo sapien
ccttgatccaccaatgagagctatg

SEQ ID NO: 5452913 - DNA, 25 bp, Homo sapien
gatggttcatccaaaattactaccc

SEQ ID NO: 5452914 - DNA, 25 bp, Homo sapien
tataacatcccatatacttcggcga

SEQ ID NO: 5452915 - DNA, 25 bp, Homo sapien
ttatgacgatggctatatagtccag

SEQ ID NO: 5452916 - DNA, 25 bp, Homo sapien
ctctcttatgacgatggctatatag

SEQ ID NO: 5452917 - DNA, 25 bp, Homo sapien
caactctcttatgacgatggctata

SEQ ID NO: 5452918 - DNA, 25 bp, Homo sapien
tcttatgacgatggctatatagtcc

SEQ ID NO: 5452919 - DNA, 25 bp, Homo sapien
ttaggttctcattcctgtcttaact

SEQ ID NO: 5452920 - DNA, 25 bp, Homo sapien
ccatgttcttccgtaccgtgtgtag

SEQ ID NO: 5452921 - DNA, 25 bp, Homo sapien
ggtaactgaacaagacgtcgtgctg

SEQ ID NO: 5452922 - DNA, 25 bp, Homo sapien
tacaaaaatggtgcctgctgaggcc

SEQ ID NO: 5452923 - DNA, 25 bp, Homo sapien
tggaaccatataggagaaggtgctc

SEQ ID NO: 5452924 - DNA, 25 bp, Homo sapien
tcaggctcgatgttagaggaaaaca

SEQ ID NO: 5452925 - DNA, 25 bp, Homo sapien
ggcaaccccgactgtgagatcttta

SEQ ID NO: 5452926 - DNA, 25 bp, Homo sapien
tgggccccagcaatgaagtaatatg

SEQ ID NO: 5452927 - DNA, 25 bp, Homo sapien
gagccatagatctttgtgaccccat

SEQ ID NO: 5452928 - DNA, 25 bp, Homo sapien
aattggaaaataccagggagctgcc

SEQ ID NO: 5452929 - DNA, 25 bp, Homo sapien
gaggccattgctcttctcaggcttc

SEQ ID NO: 5452930 - DNA, 25 bp, Homo sapien
cctctgcacacccaaatcgctcctt

SEQ ID NO: 5452931 - DNA, 25 bp, Homo sapien
caataggaaggaagaattggaaaat

SEQ ID NO: 5452932 - DNA, 25 bp, Homo sapien
tcagctaggattagacagcacagcc

SEQ ID NO: 5452933 - DNA, 25 bp, Homo sapien
aatgaggtggtgtcatcctgaaccg

SEQ ID NO: 5452934 - DNA, 25 bp, Homo sapien
ctgacataccaagcaataaggaaat

SEQ ID NO: 5452935 - DNA, 25 bp, Homo sapien
aataaatgaaagagtcagctaggat

SEQ ID NO: 5452936 - DNA, 25 bp, Homo sapien
caatgccctgttcttcgtatcgtgc

SEQ ID NO: 5452937 - DNA, 25 bp, Homo sapien
gcttgcatagctgaatgctgttggg

SEQ ID NO: 5452938 - DNA, 25 bp, Homo sapien
atgtattggcttgcatagctgaatg

SEQ ID NO: 5452939 - DNA, 25 bp, Homo sapien
tcttcgtatcgtgcaatgtattggc

SEQ ID NO: 5452940 - DNA, 25 bp, Homo sapien
caataaccgagaagctgtagtccga

SEQ ID NO: 5452941 - DNA, 25 bp, Homo sapien
aacactctctataagccaggcaaag

SEQ ID NO: 5452942 - DNA, 25 bp, Homo sapien
tgatgaggatcacgatggtaaccag

SEQ ID NO: 5452943 - DNA, 25 bp, Homo sapien
gcaatgatgtagatgaggcttccga

SEQ ID NO: 5452944 - DNA, 25 bp, Homo sapien
taaatacaacccaggcaaccataag

SEQ ID NO: 5452945 - DNA, 25 bp, Homo sapien
acaacccaggcaaccataagcacaa

SEQ ID NO: 5452946 - DNA, 25 bp, Homo sapien
atgaagccggaggtctttctcatag

SEQ ID NO: 5452947 - DNA, 25 bp, Homo sapien
atacaacccaggcaaccataagcac

SEQ ID NO: 5452948 - DNA, 25 bp, Homo sapien
tgtgcggtcttgagactcatccgga

SEQ ID NO: 5452949 - DNA, 25 bp, Homo sapien
ccctgccatagatctggttgtgtga

SEQ ID NO: 5452950 - DNA, 25 bp, Homo sapien
ggccctggagcccaaatcttggttc

SEQ ID NO: 5452951 - DNA, 25 bp, Homo sapien
taggcttcttgtggtctgtgcggtc

SEQ ID NO: 5452952 - DNA, 25 bp, Homo sapien
gtgtgttaagctgatcgatgatgtc

SEQ ID NO: 5452953 - DNA, 25 bp, Homo sapien
ggtttttgctgcctgaatacggtca

SEQ ID NO: 5452954 - DNA, 25 bp, Homo sapien
aagagttcgttgcttttgtagagcc

SEQ ID NO: 5452955 - DNA, 25 bp, Homo sapien
cgatgatgtcaatgttgttctctaa

SEQ ID NO: 5452956 - DNA, 25 bp, Homo sapien
acttgcacaaaagggttccttagag

SEQ ID NO: 5452957 - DNA, 25 bp, Homo sapien
tatctgtttcaatagttcaacagca

SEQ ID NO: 5452958 - DNA, 25 bp, Homo sapien
tgcacaaaagggttccttagagtat

SEQ ID NO: 5452959 - DNA, 25 bp, Homo sapien
tcgagtcccacggagaactttacaa

SEQ ID NO: 5452960 - DNA, 25 bp, Homo sapien
aaagtggcgacttatccatccactc

SEQ ID NO: 5452961 - DNA, 25 bp, Homo sapien
ttaattccgccagctgtctcagagt

SEQ ID NO: 5452962 - DNA, 25 bp, Homo sapien
gcctggtttaacagatggaaggaat

SEQ ID NO: 5452963 - DNA, 25 bp, Homo sapien
ggaattcatgaaaagtggcgactta

SEQ ID NO: 5452964 - DNA, 25 bp, Homo sapien
gaaagaaatcagtcagctaaagtaa

SEQ ID NO: 5452965 - DNA, 25 bp, Homo sapien
gaaagttagacaccagttgcagagg

SEQ ID NO: 5452966 - DNA, 25 bp, Homo sapien
gaaaaatctgaggtcttgcttcaac

SEQ ID NO: 5452967 - DNA, 25 bp, Homo sapien
tgcttgcacatatccagggcagaag

SEQ ID NO: 5452968 - DNA, 25 bp, Homo sapien
tccagcgggcatgttaatgatgtct

SEQ ID NO: 5452969 - DNA, 25 bp, Homo sapien
cattattgcctttgtgactgggtta

SEQ ID NO: 5452970 - DNA, 25 bp, Homo sapien
ggttatatggtgcatacaaaattct

SEQ ID NO: 5452971 - DNA, 25 bp, Homo sapien
cccaacaacataggtttcaagaaag

SEQ ID NO: 5452972 - DNA, 25 bp, Homo sapien
ccttgtggtgtgttcattcggttgc

SEQ ID NO: 5452973 - DNA, 25 bp, Homo sapien
gatggtgctaaatgatccttgtggt

SEQ ID NO: 5452974 - DNA, 25 bp, Homo sapien
cttgagaacataatgcttgggagat

SEQ ID NO: 5452975 - DNA, 25 bp, Homo sapien
catggcagttaaatattcagtggta

SEQ ID NO: 5452976 - DNA, 25 bp, Homo sapien
tagcagcggatgtgtgccagaagcc

SEQ ID NO: 5452977 - DNA, 25 bp, Homo sapien
tcttttagtcttatgaagagctcca

SEQ ID NO: 5452978 - DNA, 25 bp, Homo sapien
tggaacacttctgggcagatgcatt

SEQ ID NO: 5452979 - DNA, 25 bp, Homo sapien
gcatttgcttcagggatctcatttt

SEQ ID NO: 5452980 - DNA, 25 bp, Homo sapien
tggcttttgatctttcctcgggaaa

SEQ ID NO: 5452981 - DNA, 25 bp, Homo sapien
ttctactggcttttgatctttcctc

SEQ ID NO: 5452982 - DNA, 25 bp, Homo sapien
actggcttttgatctttcctcggga

SEQ ID NO: 5452983 - DNA, 25 bp, Homo sapien
tactggcttttgatctttcctcggg

SEQ ID NO: 5452984 - DNA, 25 bp, Homo sapien
gcatcttctagtttgggagtggtga

SEQ ID NO: 5452985 - DNA, 25 bp, Homo sapien
tgagtccgatgaggtaagactgccg

SEQ ID NO: 5452986 - DNA, 25 bp, Homo sapien
gactgccgggatctctctgaaagag

SEQ ID NO: 5452987 - DNA, 25 bp, Homo sapien
ttaagtagtgcagaagggtgagtcc

SEQ ID NO: 5452988 - DNA, 25 bp, Homo sapien
gtcaatagtcctgttggacattcct

SEQ ID NO: 5452989 - DNA, 25 bp, Homo sapien
cagctctattatcagggatgggaat

SEQ ID NO: 5452990 - DNA, 25 bp, Homo sapien
ggacattcctgttgttctccttaaa

SEQ ID NO: 5452991 - DNA, 25 bp, Homo sapien
gatgggaatggccagcaacttgtca

SEQ ID NO: 5452992 - DNA, 25 bp, Homo sapien
gtattaactgagtgatattttccaa

SEQ ID NO: 5452993 - DNA, 25 bp, Homo sapien
cggtattaactgagtgatattttcc

SEQ ID NO: 5452994 - DNA, 25 bp, Homo sapien
tggcttctatgatcggtattaactg

SEQ ID NO: 5452995 - DNA, 25 bp, Homo sapien
tctatgatcggtattaactgagtga

SEQ ID NO: 5452996 - DNA, 25 bp, Homo sapien
agctctgccgcttcgaggagttgca

SEQ ID NO: 5452997 - DNA, 25 bp, Homo sapien
tcagattcacaaagaagttcggtca

SEQ ID NO: 5452998 - DNA, 25 bp, Homo sapien
cattgtcatggtacagtaagctggc

SEQ ID NO: 5452999 - DNA, 25 bp, Homo sapien
taagctggctgctatttcggtgccc

SEQ ID NO: 5453000 - DNA, 25 bp, Homo sapien
aatttacaactttcatgatcaaatt

SEQ ID NO: 5453001 - DNA, 25 bp, Homo sapien
caaatttacaactttcatgatcaaa

SEQ ID NO: 5453002 - DNA, 25 bp, Homo sapien
actggagatgtcatctcattagaga

SEQ ID NO: 5453003 - DNA, 25 bp, Homo sapien
aactttcatgatcaaattcaaattc

SEQ ID NO: 5453004 - DNA, 25 bp, Homo sapien
acaaggaagtcaggatctaggctca

SEQ ID NO: 5453005 - DNA, 25 bp, Homo sapien
gttttctgcctatcacatgggcatc

SEQ ID NO: 5453006 - DNA, 25 bp, Homo sapien
ctgttttctgcctatcacatgggca

SEQ ID NO: 5453007 - DNA, 25 bp, Homo sapien
aaggaagtcaggatctaggctcagc

SEQ ID NO: 5453008 - DNA, 25 bp, Homo sapien
ggaactggaggaaagtaatcttcat

SEQ ID NO: 5453009 - DNA, 25 bp, Homo sapien
ttttttaaatcgtattgtggactgc

SEQ ID NO: 5453010 - DNA, 25 bp, Homo sapien
gtggactgcaggagtcttagatttt

SEQ ID NO: 5453011 - DNA, 25 bp, Homo sapien
cataggaaccattgcgaagaaaaga

SEQ ID NO: 5453012 - DNA, 25 bp, Homo sapien
gaacctctggccaaactgtcagtca

SEQ ID NO: 5453013 - DNA, 25 bp, Homo sapien
ggtgaacctctggccaaactgtcag

SEQ ID NO: 5453014 - DNA, 25 bp, Homo sapien
cacacatgccaagtaaggaatataa

SEQ ID NO: 5453015 - DNA, 25 bp, Homo sapien
ggaatataaggactatttgctgata

SEQ ID NO: 5453016 - DNA, 25 bp, Homo sapien
cacatgcgttatattatcggagtca

SEQ ID NO: 5453017 - DNA, 25 bp, Homo sapien
tgcagccagactgcttggagataag

SEQ ID NO: 5453018 - DNA, 25 bp, Homo sapien
cattccacacatgcgttatattatc

SEQ ID NO: 5453019 - DNA, 25 bp, Homo sapien
ttggagataaggtctgtccatcatc

SEQ ID NO: 5453020 - DNA, 25 bp, Homo sapien
ctgaagtaataatttttatataggt

SEQ ID NO: 5453021 - DNA, 25 bp, Homo sapien
tgaagtaataatttttatataggta

SEQ ID NO: 5453022 - DNA, 25 bp, Homo sapien
tcccaggtcaaattaatgaggagaa

SEQ ID NO: 5453023 - DNA, 25 bp, Homo sapien
gcagaaatctgcagaatcattctca

SEQ ID NO: 5453024 - DNA, 25 bp, Homo sapien
tcagtgaaaaccatcccaggtcaaa

SEQ ID NO: 5453025 - DNA, 25 bp, Homo sapien
taaaagacatctatgctcttttgtt

SEQ ID NO: 5453026 - DNA, 25 bp, Homo sapien
ggagtccagagtgtacagcagatgt

SEQ ID NO: 5453027 - DNA, 25 bp, Homo sapien
acagacttctggagggttctgaaac

SEQ ID NO: 5453028 - DNA, 25 bp, Homo sapien
ccttcgttagttgcaaaacgtggat

SEQ ID NO: 5453029 - DNA, 25 bp, Homo sapien
gcagatgtttaacagacttctggag

SEQ ID NO: 5453030 - DNA, 25 bp, Homo sapien
gattgcttagtgatgtgtcattctg

SEQ ID NO: 5453031 - DNA, 25 bp, Homo sapien
aatagattgcttagtgatgtgtcat

SEQ ID NO: 5453032 - DNA, 25 bp, Homo sapien
tttcgaagaacatcaaatagattgc

SEQ ID NO: 5453033 - DNA, 25 bp, Homo sapien
tgtttgcctttcgaagaacatcaaa

SEQ ID NO: 5453034 - DNA, 25 bp, Homo sapien
tctgactatttcctgaaacactatc

SEQ ID NO: 5453035 - DNA, 25 bp, Homo sapien
cctgaaacactatcttctgattgtt

SEQ ID NO: 5453036 - DNA, 25 bp, Homo sapien
tctgattgttggggtcactggatag

SEQ ID NO: 5453037 - DNA, 25 bp, Homo sapien
atttcctgaaacactatcttctgat

SEQ ID NO: 5453038 - DNA, 25 bp, Homo sapien
ctaaaagggtcatgttagaaaggca

SEQ ID NO: 5453039 - DNA, 25 bp, Homo sapien
tagttctcttcgtatatcttctgaa

SEQ ID NO: 5453040 - DNA, 25 bp, Homo sapien
tcctagaaaggtccaagagaaggca

SEQ ID NO: 5453041 - DNA, 25 bp, Homo sapien
cacaatgtatcctgaatagctgtca

SEQ ID NO: 5453042 - DNA, 25 bp, Homo sapien
tgccattgaaagtatatgttccggg

SEQ ID NO: 5453043 - DNA, 25 bp, Homo sapien
gaattcgtgcgagcacttgactgcc

SEQ ID NO: 5453044 - DNA, 25 bp, Homo sapien
caaatcagaacttggactgggaaat

SEQ ID NO: 5453045 - DNA, 25 bp, Homo sapien
cttttccaagccaagaattcgtgcg

SEQ ID NO: 5453046 - DNA, 25 bp, Homo sapien
ggaacttgggtgctctggaatgata

SEQ ID NO: 5453047 - DNA, 25 bp, Homo sapien
ctagtgatgcatgccttctttctgg

SEQ ID NO: 5453048 - DNA, 25 bp, Homo sapien
caggttggatgactttctcagaatc

SEQ ID NO: 5453049 - DNA, 25 bp, Homo sapien
tctttctggaacttgggtgctctgg

SEQ ID NO: 5453050 - DNA, 25 bp, Homo sapien
cactttttctatttcagctgtgaca

SEQ ID NO: 5453051 - DNA, 25 bp, Homo sapien
attcccaccactttttctatttcag

SEQ ID NO: 5453052 - DNA, 25 bp, Homo sapien
tctatttcagctgtgacatctttag

SEQ ID NO: 5453053 - DNA, 25 bp, Homo sapien
tgacatctttaggaaaagctgccat

SEQ ID NO: 5453054 - DNA, 25 bp, Homo sapien
ctgtctttaaatagtgcatcatcaa

SEQ ID NO: 5453055 - DNA, 25 bp, Homo sapien
ctgtgtcacagagtagggtctgcag

SEQ ID NO: 5453056 - DNA, 25 bp, Homo sapien
tcaattcctttcctacgaagcagat

SEQ ID NO: 5453057 - DNA, 25 bp, Homo sapien
tcttgtgggccatagggtgtgtctt

SEQ ID NO: 5453058 - DNA, 25 bp, Homo sapien
gatctttctgacatcctctgcatcc

SEQ ID NO: 5453059 - DNA, 25 bp, Homo sapien
gccaagtaccacagccagacggatt

SEQ ID NO: 5453060 - DNA, 25 bp, Homo sapien
gtgggtgtcctacaatgtcgggatc

SEQ ID NO: 5453061 - DNA, 25 bp, Homo sapien
taccacagccagacggattttgaaa

SEQ ID NO: 5453062 - DNA, 25 bp, Homo sapien
ataaccctgtatcttgagtcagttt

SEQ ID NO: 5453063 - DNA, 25 bp, Homo sapien
caagtgttccaagtagaagaatccc

SEQ ID NO: 5453064 - DNA, 25 bp, Homo sapien
ccctgtatcttgagtcagtttcctc

SEQ ID NO: 5453065 - DNA, 25 bp, Homo sapien
tttgcaaatgatttattgtgcaatc

SEQ ID NO: 5453066 - DNA, 25 bp, Homo sapien
caatcgcaaagagacaatttatgtg

SEQ ID NO: 5453067 - DNA, 25 bp, Homo sapien
gacccgtggcttgctttgtatccca

SEQ ID NO: 5453068 - DNA, 25 bp, Homo sapien
caagacctctgccaatcgcaaagag

SEQ ID NO: 5453069 - DNA, 25 bp, Homo sapien
caatttatgtgacccgtggcttgct

SEQ ID NO: 5453070 - DNA, 25 bp, Homo sapien
acagcccgtgttcggtatcaactcc

SEQ ID NO: 5453071 - DNA, 25 bp, Homo sapien
gcccgtgttcggtatcaactccttg

SEQ ID NO: 5453072 - DNA, 25 bp, Homo sapien
taaacagcccgtgttcggtatcaac

SEQ ID NO: 5453073 - DNA, 25 bp, Homo sapien
gtgttcggtatcaactccttggtgc

SEQ ID NO: 5453074 - DNA, 25 bp, Homo sapien
tcttgtcacatccagtaggccgctc

SEQ ID NO: 5453075 - DNA, 25 bp, Homo sapien
taggccgctccattgggaagtcaag

SEQ ID NO: 5453076 - DNA, 25 bp, Homo sapien
gacggtatcttaagtgctgtattcc

SEQ ID NO: 5453077 - DNA, 25 bp, Homo sapien
gagtaaatgatatgccggaggcagc

SEQ ID NO: 5453078 - DNA, 25 bp, Homo sapien
tacatgactgaatgttctagatccc

SEQ ID NO: 5453079 - DNA, 25 bp, Homo sapien
cagctgtctgcattttacatgactg

SEQ ID NO: 5453080 - DNA, 25 bp, Homo sapien
attacccttgcaagacagctgtctg

SEQ ID NO: 5453081 - DNA, 25 bp, Homo sapien
ggtcatttcattacccttgcaagac

SEQ ID NO: 5453082 - DNA, 25 bp, Homo sapien
aaagcctagggtaatactctgccat

SEQ ID NO: 5453083 - DNA, 25 bp, Homo sapien
actcagaaagcctagggtaatactc

SEQ ID NO: 5453084 - DNA, 25 bp, Homo sapien
caactcagaaagcctagggtaatac

SEQ ID NO: 5453085 - DNA, 25 bp, Homo sapien
gaaagcctagggtaatactctgcca

SEQ ID NO: 5453086 - DNA, 25 bp, Homo sapien
gggagatggaccactgccagcagga

SEQ ID NO: 5453087 - DNA, 25 bp, Homo sapien
tccacatcttcgacccctctgtgtg

SEQ ID NO: 5453088 - DNA, 25 bp, Homo sapien
agtgatgcagccgtgtccacatctt

SEQ ID NO: 5453089 - DNA, 25 bp, Homo sapien
tggcattagggtgtgcccatccaca

SEQ ID NO: 5453090 - DNA, 25 bp, Homo sapien
gcattctgactgtgttccctgttag

SEQ ID NO: 5453091 - DNA, 25 bp, Homo sapien
tctgactgtgttccctgttaggaac

SEQ ID NO: 5453092 - DNA, 25 bp, Homo sapien
gttgcattctgactgtgttccctgt

SEQ ID NO: 5453093 - DNA, 25 bp, Homo sapien
ctgttgcattctgactgtgttccct

SEQ ID NO: 5453094 - DNA, 25 bp, Homo sapien
caccaatggtgtcagggattgcagc

SEQ ID NO: 5453095 - DNA, 25 bp, Homo sapien
tcaggtgatgtcaggaatatctatg

SEQ ID NO: 5453096 - DNA, 25 bp, Homo sapien
tgttatctggaccagcaccaatggt

SEQ ID NO: 5453097 - DNA, 25 bp, Homo sapien
gctggttcccgctcatcaaaaatgc

SEQ ID NO: 5453098 - DNA, 25 bp, Homo sapien
tatgaaaataatgactggccataag

SEQ ID NO: 5453099 - DNA, 25 bp, Homo sapien
gccataagatcaagacaagtgtcca

SEQ ID NO: 5453100 - DNA, 25 bp, Homo sapien
ggtccgagtaatagccaaaattatg

SEQ ID NO: 5453101 - DNA, 25 bp, Homo sapien
gaggaaatttggtccgagtaatagc

SEQ ID NO: 5453102 - DNA, 25 bp, Homo sapien
aaacttgactgtacgtggatttctt

SEQ ID NO: 5453103 - DNA, 25 bp, Homo sapien
acttgactgtacgtggatttcttcc

SEQ ID NO: 5453104 - DNA, 25 bp, Homo sapien
tgactgtacgtggatttcttccttt

SEQ ID NO: 5453105 - DNA, 25 bp, Homo sapien
cttgactgtacgtggatttcttcct

SEQ ID NO: 5453106 - DNA, 25 bp, Homo sapien
cctagccaatttttccagaccagga

SEQ ID NO: 5453107 - DNA, 25 bp, Homo sapien
cggctgcctttttacacctagccaa

SEQ ID NO: 5453108 - DNA, 25 bp, Homo sapien
ggctgcctttttacacctagccaat

SEQ ID NO: 5453109 - DNA, 25 bp, Homo sapien
gaaggacccagatcagtatctttgg

SEQ ID NO: 5453110 - DNA, 25 bp, Homo sapien
gcttgttgcacgaagtccagactca

SEQ ID NO: 5453111 - DNA, 25 bp, Homo sapien
tatcagtacccctttcacggcatag

SEQ ID NO: 5453112 - DNA, 25 bp, Homo sapien
aaatgaagaactgatgccccgtcca

SEQ ID NO: 5453113 - DNA, 25 bp, Homo sapien
cactggatgcgtcacagggactagg

SEQ ID NO: 5453114 - DNA, 25 bp, Homo sapien
agaacatgtcacctgcactggatgc

SEQ ID NO: 5453115 - DNA, 25 bp, Homo sapien
aggacttgtcctacattctcttgtc

SEQ ID NO: 5453116 - DNA, 25 bp, Homo sapien
ccagtaggacttgtcctacattctc

SEQ ID NO: 5453117 - DNA, 25 bp, Homo sapien
gccactttgatatagcaacttcatt

SEQ ID NO: 5453118 - DNA, 25 bp, Homo sapien
tgcttagagccaacaaccattttgt

SEQ ID NO: 5453119 - DNA, 25 bp, Homo sapien
tggcaagatgccactttgatatagc

SEQ ID NO: 5453120 - DNA, 25 bp, Homo sapien
tttgtgtagcacagggagcccatga

SEQ ID NO: 5453121 - DNA, 25 bp, Homo sapien
ccctgaattctctttgagcgcagaa

SEQ ID NO: 5453122 - DNA, 25 bp, Homo sapien
ttaaagccccagacactcaagatga

SEQ ID NO: 5453123 - DNA, 25 bp, Homo sapien
ctttctgccctagaagaaggtgact

SEQ ID NO: 5453124 - DNA, 25 bp, Homo sapien
tccgatgtatactggttaaagcccc

SEQ ID NO: 5453125 - DNA, 25 bp, Homo sapien
acctccaatgagtaatgccacagtc

SEQ ID NO: 5453126 - DNA, 25 bp, Homo sapien
acatatcatattttgtcaccaccat

SEQ ID NO: 5453127 - DNA, 25 bp, Homo sapien
taatgcacctccaatgagtaatgcc

SEQ ID NO: 5453128 - DNA, 25 bp, Homo sapien
aatgtctaatgcacctccaatgagt

SEQ ID NO: 5453129 - DNA, 25 bp, Homo sapien
tgtgagacagcatgctgtggcctcc

SEQ ID NO: 5453130 - DNA, 25 bp, Homo sapien
agaaaaagtcactcgttccaaagct

SEQ ID NO: 5453131 - DNA, 25 bp, Homo sapien
gaaaaagtcactcgttccaaagctg

SEQ ID NO: 5453132 - DNA, 25 bp, Homo sapien
ggattcagctgtgagacagcatgct

SEQ ID NO: 5453133 - DNA, 25 bp, Homo sapien
ttcagattcctttgtattgtttatc

SEQ ID NO: 5453134 - DNA, 25 bp, Homo sapien
cattgaagctctttaatattttgaa

SEQ ID NO: 5453135 - DNA, 25 bp, Homo sapien
aagaattattgcattcctctgaaca

SEQ ID NO: 5453136 - DNA, 25 bp, Homo sapien
ctcttatatctcactgggcttcctt

SEQ ID NO: 5453137 - DNA, 25 bp, Homo sapien
aactgcagctcagactcggcacagt

SEQ ID NO: 5453138 - DNA, 25 bp, Homo sapien
cgaagctttaactgcagctcagact

SEQ ID NO: 5453139 - DNA, 25 bp, Homo sapien
gctttaactgcagctcagactcggc

SEQ ID NO: 5453140 - DNA, 25 bp, Homo sapien
tgcattcgaagctttaactgcagct

SEQ ID NO: 5453141 - DNA, 25 bp, Homo sapien
gttcctctcattcccaactgtggtt

SEQ ID NO: 5453142 - DNA, 25 bp, Homo sapien
acatctggaatctcaatccccttca

SEQ ID NO: 5453143 - DNA, 25 bp, Homo sapien
aatccctctcacaatcatcccataa

SEQ ID NO: 5453144 - DNA, 25 bp, Homo sapien
ttttaatcttactctcaacatctgg

SEQ ID NO: 5453145 - DNA, 25 bp, Homo sapien
gacctgataagtgagaatctcgatg

SEQ ID NO: 5453146 - DNA, 25 bp, Homo sapien
caaagttcacacgttggtcacattc

SEQ ID NO: 5453147 - DNA, 25 bp, Homo sapien
agcacaaatccattggccccaaagc

SEQ ID NO: 5453148 - DNA, 25 bp, Homo sapien
gcaactgcagttgtataccccaaag

SEQ ID NO: 5453149 - DNA, 25 bp, Homo sapien
tgcctcagcctgcctgcaatcctgc

SEQ ID NO: 5453150 - DNA, 25 bp, Homo sapien
cagcctgcctgcaatcctgccttcc

SEQ ID NO: 5453151 - DNA, 25 bp, Homo sapien
ctcagcctgcctgcaatcctgcctt

SEQ ID NO: 5453152 - DNA, 25 bp, Homo sapien
agcctgcctgcaatcctgccttcct

SEQ ID NO: 5453153 - DNA, 25 bp, Homo sapien
tacgacctgatctaaaaatggacat

SEQ ID NO: 5453154 - DNA, 25 bp, Homo sapien
tgataccaactaccactacgacctg

SEQ ID NO: 5453155 - DNA, 25 bp, Homo sapien
taaggcaagaaagaggtaggcgtaa

SEQ ID NO: 5453156 - DNA, 25 bp, Homo sapien
cataataagggtggagaacatatcc

SEQ ID NO: 5453157 - DNA, 25 bp, Homo sapien
caccagtcattttgaattaggaccc

SEQ ID NO: 5453158 - DNA, 25 bp, Homo sapien
ttagcccataacacaggccctgtta

SEQ ID NO: 5453159 - DNA, 25 bp, Homo sapien
cgtaatactatatactgactggctt

SEQ ID NO: 5453160 - DNA, 25 bp, Homo sapien
tctccacatagtactgcgggctagt

SEQ ID NO: 5453161 - DNA, 25 bp, Homo sapien
tgctgagaaagctgtaacaactatt

SEQ ID NO: 5453162 - DNA, 25 bp, Homo sapien
cacgtctgtactccccgctttttgg

SEQ ID NO: 5453163 - DNA, 25 bp, Homo sapien
gccaagtgtgagatatgatagagac

SEQ ID NO: 5453164 - DNA, 25 bp, Homo sapien
agagactggagttaagtggttgaca

SEQ ID NO: 5453165 - DNA, 25 bp, Homo sapien
ggcttagacaccatccacaagtgct

SEQ ID NO: 5453166 - DNA, 25 bp, Homo sapien
tgcactcgccttgcaggagataagg

SEQ ID NO: 5453167 - DNA, 25 bp, Homo sapien
gcaggacagcagtctcgtatacact

SEQ ID NO: 5453168 - DNA, 25 bp, Homo sapien
caggttatcggcattggagcaggac

SEQ ID NO: 5453169 - DNA, 25 bp, Homo sapien
ttggtgactattgggctgataaagc

SEQ ID NO: 5453170 - DNA, 25 bp, Homo sapien
tcgctaaggaaacctcatctgagct

SEQ ID NO: 5453171 - DNA, 25 bp, Homo sapien
taaaacctcccctaaatgagatagc

SEQ ID NO: 5453172 - DNA, 25 bp, Homo sapien
ttcaaatgaacatgaggaagtatct

SEQ ID NO: 5453173 - DNA, 25 bp, Homo sapien
aatgacctttacagatcaggagtaa

SEQ ID NO: 5453174 - DNA, 25 bp, Homo sapien
atgtcaaatttaatcccaaagtttg

SEQ ID NO: 5453175 - DNA, 25 bp, Homo sapien
agtaaacaaactgtttagctgggag

SEQ ID NO: 5453176 - DNA, 25 bp, Homo sapien
agtttgtttcctcaatgttaaattg

SEQ ID NO: 5453177 - DNA, 25 bp, Homo sapien
atcttagtcatttttatttcccttg

SEQ ID NO: 5453178 - DNA, 25 bp, Homo sapien
taatatcttagtcatttttatttcc

SEQ ID NO: 5453179 - DNA, 25 bp, Homo sapien
tagtcatttttatttcccttgcagg

SEQ ID NO: 5453180 - DNA, 25 bp, Homo sapien
cttagtcatttttatttcccttgca

SEQ ID NO: 5453181 - DNA, 25 bp, Homo sapien
tttattcaatgaaggaaaggtggag

SEQ ID NO: 5453182 - DNA, 25 bp, Homo sapien
tctttgaacagaggtttattcaatg

SEQ ID NO: 5453183 - DNA, 25 bp, Homo sapien
tacaatggttagaaaagagcaacta

SEQ ID NO: 5453184 - DNA, 25 bp, Homo sapien
tctgaacggtaaactagcaatttta

SEQ ID NO: 5453185 - DNA, 25 bp, Homo sapien
tcccccgaaggtgtcttatatcaaa

SEQ ID NO: 5453186 - DNA, 25 bp, Homo sapien
cagtttttgtagcaactgatttaga

SEQ ID NO: 5453187 - DNA, 25 bp, Homo sapien
tagaaaatcttgtactgaaatcaac

SEQ ID NO: 5453188 - DNA, 25 bp, Homo sapien
tgaaatcaacaattagacttgcaca

SEQ ID NO: 5453189 - DNA, 25 bp, Homo sapien
gtaaagctttggcacatacagtata

SEQ ID NO: 5453190 - DNA, 25 bp, Homo sapien
aagctttggcacatacagtataaaa

SEQ ID NO: 5453191 - DNA, 25 bp, Homo sapien
taattataccaaattcctcttatca

SEQ ID NO: 5453192 - DNA, 25 bp, Homo sapien
tcctcttatcaactgcatactaagt

SEQ ID NO: 5453193 - DNA, 25 bp, Homo sapien
catgcttgttcctacagtattgcgg

SEQ ID NO: 5453194 - DNA, 25 bp, Homo sapien
taggcaattactaggatcatttgga

SEQ ID NO: 5453195 - DNA, 25 bp, Homo sapien
tattgcgggccagacacttaagtga

SEQ ID NO: 5453196 - DNA, 25 bp, Homo sapien
gcatatgctttcctattgatcccaa

SEQ ID NO: 5453197 - DNA, 25 bp, Homo sapien
tgagcggtattgaatacttcgaagc

SEQ ID NO: 5453198 - DNA, 25 bp, Homo sapien
aatactgagcggtattgaatacttc

SEQ ID NO: 5453199 - DNA, 25 bp, Homo sapien
gcggtattgaatacttcgaagcaga

SEQ ID NO: 5453200 - DNA, 25 bp, Homo sapien
ggtattgaatacttcgaagcagaac

SEQ ID NO: 5453201 - DNA, 25 bp, Homo sapien
gaactctaagctgggtctgctaaca

SEQ ID NO: 5453202 - DNA, 25 bp, Homo sapien
aagaactctaagctgggtctgctaa

SEQ ID NO: 5453203 - DNA, 25 bp, Homo sapien
agaactctaagctgggtctgctaac

SEQ ID NO: 5453204 - DNA, 25 bp, Homo sapien
cagtttagatggatcttggcagaga

SEQ ID NO: 5453205 - DNA, 25 bp, Homo sapien
actccagtttagatggatcttggca

SEQ ID NO: 5453206 - DNA, 25 bp, Homo sapien
tccagtttagatggatcttggcaga

SEQ ID NO: 5453207 - DNA, 25 bp, Homo sapien
tcactccagtttagatggatcttgg

SEQ ID NO: 5453208 - DNA, 25 bp, Homo sapien
tactctcgggaatcttctctgtcag

SEQ ID NO: 5453209 - DNA, 25 bp, Homo sapien
ttactctcgggaatcttctctgtca

SEQ ID NO: 5453210 - DNA, 25 bp, Homo sapien
aaggcatgaagcactcaattgggca

SEQ ID NO: 5453211 - DNA, 25 bp, Homo sapien
gaagcactcaattgggcaattaaca

SEQ ID NO: 5453212 - DNA, 25 bp, Homo sapien
ggcatgaagcactcaattgggcaat

SEQ ID NO: 5453213 - DNA, 25 bp, Homo sapien
catgaagcactcaattgggcaatta

SEQ ID NO: 5453214 - DNA, 25 bp, Homo sapien
tctgaagaaagatacctgtagaaag

SEQ ID NO: 5453215 - DNA, 25 bp, Homo sapien
gagactgtctagtatgagggaacac

SEQ ID NO: 5453216 - DNA, 25 bp, Homo sapien
atacctgtagaaagagactgtctag

SEQ ID NO: 5453217 - DNA, 25 bp, Homo sapien
gagggaacacacttgtgctgctaat

SEQ ID NO: 5453218 - DNA, 25 bp, Homo sapien
acccccaggtctgcggcagttgtca

SEQ ID NO: 5453219 - DNA, 25 bp, Homo sapien
actggttgtaggactggccagtagt

SEQ ID NO: 5453220 - DNA, 25 bp, Homo sapien
gaatactggttgtaggactggccag

SEQ ID NO: 5453221 - DNA, 25 bp, Homo sapien
ccaggtctgcggcagttgtcacagc

SEQ ID NO: 5453222 - DNA, 25 bp, Homo sapien
gtagcctgtcacctggccggagatg

SEQ ID NO: 5453223 - DNA, 25 bp, Homo sapien
cactactgttcttaagctggcaggg

SEQ ID NO: 5453224 - DNA, 25 bp, Homo sapien
ggtaaagcaagctcatggaggtcag

SEQ ID NO: 5453225 - DNA, 25 bp, Homo sapien
tttactggaaatgggaggacacaca

SEQ ID NO: 5453226 - DNA, 25 bp, Homo sapien
tagtatctctgacatgctagggagc

SEQ ID NO: 5453227 - DNA, 25 bp, Homo sapien
taatacttccgaagggtctctgccc

SEQ ID NO: 5453228 - DNA, 25 bp, Homo sapien
ttatctaacttgtagggagcctggc

SEQ ID NO: 5453229 - DNA, 25 bp, Homo sapien
tgtgtgtacgacacatccttgcagg

SEQ ID NO: 5453230 - DNA, 25 bp, Homo sapien
tgccactgttctcctacgtggtatg

SEQ ID NO: 5453231 - DNA, 25 bp, Homo sapien
tccaaagcatgtgcaggagcaaatg

SEQ ID NO: 5453232 - DNA, 25 bp, Homo sapien
tcctacgtggtatgtcttcccatca

SEQ ID NO: 5453233 - DNA, 25 bp, Homo sapien
caaatggcaccgagatattccttct

SEQ ID NO: 5453234 - DNA, 25 bp, Homo sapien
agttcacaccattgtcatggcacca

SEQ ID NO: 5453235 - DNA, 25 bp, Homo sapien
ttcacaccattgtcatggcaccatc

SEQ ID NO: 5453236 - DNA, 25 bp, Homo sapien
gttcacaccattgtcatggcaccat

SEQ ID NO: 5453237 - DNA, 25 bp, Homo sapien
tagttcacaccattgtcatggcacc

SEQ ID NO: 5453238 - DNA, 25 bp, Homo sapien
caaataagtctggttctgtggaata

SEQ ID NO: 5453239 - DNA, 25 bp, Homo sapien
cctccagggcttatacaacaaaaca

SEQ ID NO: 5453240 - DNA, 25 bp, Homo sapien
taaatgaacttgacatccccgctcc

SEQ ID NO: 5453241 - DNA, 25 bp, Homo sapien
ggatcagctgatctctacacgccac

SEQ ID NO: 5453242 - DNA, 25 bp, Homo sapien
cccttgaaatgaagcaatgtccaac

SEQ ID NO: 5453243 - DNA, 25 bp, Homo sapien
tccttggcacatgagtgcatgcatg

SEQ ID NO: 5453244 - DNA, 25 bp, Homo sapien
tgcatgcatggaacttgaggagaca

SEQ ID NO: 5453245 - DNA, 25 bp, Homo sapien
aagtggatggacaaagcaactactc

SEQ ID NO: 5453246 - DNA, 25 bp, Homo sapien
agcctaagcactggcacaacagttt

SEQ ID NO: 5453247 - DNA, 25 bp, Homo sapien
gaccacttccaaagcctaagcactg

SEQ ID NO: 5453248 - DNA, 25 bp, Homo sapien
tgaccacttccaaagcctaagcact

SEQ ID NO: 5453249 - DNA, 25 bp, Homo sapien
ccaaagcctaagcactggcacaaca

SEQ ID NO: 5453250 - DNA, 25 bp, Homo sapien
gggtcaaagcacgagtcatccgtag

SEQ ID NO: 5453251 - DNA, 25 bp, Homo sapien
tctccaacggcataatgggaaactg

SEQ ID NO: 5453252 - DNA, 25 bp, Homo sapien
gtaggttggttcaagccttcgttga

SEQ ID NO: 5453253 - DNA, 25 bp, Homo sapien
cactcatctccaacggcataatggg

SEQ ID NO: 5453254 - DNA, 25 bp, Homo sapien
tgctgctgggaataaggagtttaaa

SEQ ID NO: 5453255 - DNA, 25 bp, Homo sapien
tagaatgtagaatactgctgctggg

SEQ ID NO: 5453256 - DNA, 25 bp, Homo sapien
tgagacgtctcaaagctgggagaac

SEQ ID NO: 5453257 - DNA, 25 bp, Homo sapien
ggagaactggtaagtctgagacgtc

SEQ ID NO: 5453258 - DNA, 25 bp, Homo sapien
tcactcaagaggacagcagcatggt

SEQ ID NO: 5453259 - DNA, 25 bp, Homo sapien
gaaacctgtgccctatatcaactca

SEQ ID NO: 5453260 - DNA, 25 bp, Homo sapien
ccaggtggcacgctattgatttaaa

SEQ ID NO: 5453261 - DNA, 25 bp, Homo sapien
tcccaggtgctacaaagaagagtta

SEQ ID NO: 5453262 - DNA, 25 bp, Homo sapien
acctctggtgaggcctgtcagagtg

SEQ ID NO: 5453263 - DNA, 25 bp, Homo sapien
cagtgcctccactatgacgttgtag

SEQ ID NO: 5453264 - DNA, 25 bp, Homo sapien
ttcccgaaccttatgcctctgctgg

SEQ ID NO: 5453265 - DNA, 25 bp, Homo sapien
cagagttgcccacggtaacaacctc

SEQ ID NO: 5453266 - DNA, 25 bp, Homo sapien
catgaagccactttttattcgaggg

SEQ ID NO: 5453267 - DNA, 25 bp, Homo sapien
tcgagggctggtcacttcagttacc

SEQ ID NO: 5453268 - DNA, 25 bp, Homo sapien
tgtgctgccccatgagaagtgaaga

SEQ ID NO: 5453269 - DNA, 25 bp, Homo sapien
tcaaggacaaatcgtaaaggtagtg

SEQ ID NO: 5453270 - DNA, 25 bp, Homo sapien
gcccatgagatggttgtctgagaga

SEQ ID NO: 5453271 - DNA, 25 bp, Homo sapien
cagaagtgtcctggaatggggccca

SEQ ID NO: 5453272 - DNA, 25 bp, Homo sapien
tggttgtctgagagagagcttcttg

SEQ ID NO: 5453273 - DNA, 25 bp, Homo sapien
aaatgatgtactcagaagtgtcctg

SEQ ID NO: 5453274 - DNA, 25 bp, Homo sapien
gtacaggtgatagtctacatcttcc

SEQ ID NO: 5453275 - DNA, 25 bp, Homo sapien
cctggggatgtgaccaatttggatt

SEQ ID NO: 5453276 - DNA, 25 bp, Homo sapien
gggatgtgaccaatttggatttcct

SEQ ID NO: 5453277 - DNA, 25 bp, Homo sapien
tttggattgagtcccggaccgtgtg

SEQ ID NO: 5453278 - DNA, 25 bp, Homo sapien
ccaggaagctgaataccatttccag

SEQ ID NO: 5453279 - DNA, 25 bp, Homo sapien
tgtggtccgcctaaaaccatgttcc

SEQ ID NO: 5453280 - DNA, 25 bp, Homo sapien
gcgggtatggtcttggcctatgcct

SEQ ID NO: 5453281 - DNA, 25 bp, Homo sapien
tccagtgtcatacccagggtgggtg

SEQ ID NO: 5453282 - DNA, 25 bp, Homo sapien
gaacatccaagatctctggtccatg

SEQ ID NO: 5453283 - DNA, 25 bp, Homo sapien
catccaagatctctggtccatgaag

SEQ ID NO: 5453284 - DNA, 25 bp, Homo sapien
gaaggaacatccaagatctctggtc

SEQ ID NO: 5453285 - DNA, 25 bp, Homo sapien
tggaaggaacatccaagatctctgg

SEQ ID NO: 5453286 - DNA, 25 bp, Homo sapien
ttttccttccaatcaggggctcgct

SEQ ID NO: 5453287 - DNA, 25 bp, Homo sapien
cataaattgtatattcggttcccgg

SEQ ID NO: 5453288 - DNA, 25 bp, Homo sapien
ggctcgctcttctgattattcttca

SEQ ID NO: 5453289 - DNA, 25 bp, Homo sapien
ttcttcagggcaatgacataaattg

SEQ ID NO: 5453290 - DNA, 25 bp, Homo sapien
caccagcagacgctactgggagcag

SEQ ID NO: 5453291 - DNA, 25 bp, Homo sapien
caatgggctcagctagtcaagtgga

SEQ ID NO: 5453292 - DNA, 25 bp, Homo sapien
tatcatatctgacgcctgaatagac

SEQ ID NO: 5453293 - DNA, 25 bp, Homo sapien
tcaagtggaagtcggtctcaccagc

SEQ ID NO: 5453294 - DNA, 25 bp, Homo sapien
tggtgcactggcaagtcctgcaaga

SEQ ID NO: 5453295 - DNA, 25 bp, Homo sapien
tcctgtgatagtggtcaacaaggtc

SEQ ID NO: 5453296 - DNA, 25 bp, Homo sapien
caaggtagacaactcttattcccca

SEQ ID NO: 5453297 - DNA, 25 bp, Homo sapien
gcaagattgccatatctatagagag

SEQ ID NO: 5453298 - DNA, 25 bp, Homo sapien
tatcaaagacgctgtgggagtttgc

SEQ ID NO: 5453299 - DNA, 25 bp, Homo sapien
tagtcatgccattagtacagtcttg

SEQ ID NO: 5453300 - DNA, 25 bp, Homo sapien
caggtatctggcaaacttgcagcga

SEQ ID NO: 5453301 - DNA, 25 bp, Homo sapien
agagtttcgcattctcatgacacag

SEQ ID NO: 5453302 - DNA, 25 bp, Homo sapien
gtaatcctggcacgtggcggctgcc

SEQ ID NO: 5453303 - DNA, 25 bp, Homo sapien
cttgatgatgtagccggtaatcctg

SEQ ID NO: 5453304 - DNA, 25 bp, Homo sapien
gaaacgcaggttggatggtgcatca

SEQ ID NO: 5453305 - DNA, 25 bp, Homo sapien
tgataccagcaaggaattgggtgtg

SEQ ID NO: 5453306 - DNA, 25 bp, Homo sapien
tgtaaaccggaaacaagattctctg

SEQ ID NO: 5453307 - DNA, 25 bp, Homo sapien
tcccgagccgttctaaacacactta

SEQ ID NO: 5453308 - DNA, 25 bp, Homo sapien
catgaaactgattgcatacaagtca

SEQ ID NO: 5453309 - DNA, 25 bp, Homo sapien
aagtctctaagaaggcaaataacca

SEQ ID NO: 5453310 - DNA, 25 bp, Homo sapien
tcttgtagtcagtgcctggttgtaa

SEQ ID NO: 5453311 - DNA, 25 bp, Homo sapien
gagctccgagcattgtcattcaagg

SEQ ID NO: 5453312 - DNA, 25 bp, Homo sapien
gtcattcaaggtgtacaggtagatc

SEQ ID NO: 5453313 - DNA, 25 bp, Homo sapien
cagtggaggcgtcgatgaccacagg

SEQ ID NO: 5453314 - DNA, 25 bp, Homo sapien
ttgtttacttttatattaactatgc

SEQ ID NO: 5453315 - DNA, 25 bp, Homo sapien
taactatgctttttaatgctaagat

SEQ ID NO: 5453316 - DNA, 25 bp, Homo sapien
ttatattaactatgctttttaatgc

SEQ ID NO: 5453317 - DNA, 25 bp, Homo sapien
tgtttacttttatattaactatgct

SEQ ID NO: 5453318 - DNA, 25 bp, Homo sapien
cagtgtcagtcgtagaacagttaat

SEQ ID NO: 5453319 - DNA, 25 bp, Homo sapien
gacacttacgcaatttccatgacaa

SEQ ID NO: 5453320 - DNA, 25 bp, Homo sapien
caatgatggaagatcaaacttgttg

SEQ ID NO: 5453321 - DNA, 25 bp, Homo sapien
caggcattcaaaggacaaaactatt

SEQ ID NO: 5453322 - DNA, 25 bp, Homo sapien
gcatctgtcacacgagcccttcttg

SEQ ID NO: 5453323 - DNA, 25 bp, Homo sapien
gatcgtctcagtcttggttctccag

SEQ ID NO: 5453324 - DNA, 25 bp, Homo sapien
ccagctaatggtgatggtggtctca

SEQ ID NO: 5453325 - DNA, 25 bp, Homo sapien
tggctggaacggcatcaacttggaa

SEQ ID NO: 5453326 - DNA, 25 bp, Homo sapien
tgagccactgaaccccactgattta

SEQ ID NO: 5453327 - DNA, 25 bp, Homo sapien
ttttgtctatacagaaggtttgtcc

SEQ ID NO: 5453328 - DNA, 25 bp, Homo sapien
cagggccttgctatttgcccgggta

SEQ ID NO: 5453329 - DNA, 25 bp, Homo sapien
gaaggtttgtccatatgaagacatt

SEQ ID NO: 5453330 - DNA, 25 bp, Homo sapien
agagtggtgacaactccctgagctg

SEQ ID NO: 5453331 - DNA, 25 bp, Homo sapien
tgtccttaagagcatagacactcac

SEQ ID NO: 5453332 - DNA, 25 bp, Homo sapien
ggtctgcttgtcaaagtgtccttaa

SEQ ID NO: 5453333 - DNA, 25 bp, Homo sapien
ctgagctggtctgcttgtcaaagtg

SEQ ID NO: 5453334 - DNA, 25 bp, Homo sapien
cctgatacaaccacggatgagctgt

SEQ ID NO: 5453335 - DNA, 25 bp, Homo sapien
ttcaggtcagttggtgcaggaatag

SEQ ID NO: 5453336 - DNA, 25 bp, Homo sapien
cgcactcgatatccagtgagctgaa

SEQ ID NO: 5453337 - DNA, 25 bp, Homo sapien
gagctgaacattgggtggtgtccac

SEQ ID NO: 5453338 - DNA, 25 bp, Homo sapien
ggttccctggtcaagcaaagattca

SEQ ID NO: 5453339 - DNA, 25 bp, Homo sapien
tgctgctatgaaatgcccgagtttg

SEQ ID NO: 5453340 - DNA, 25 bp, Homo sapien
gaagaaaggtcttacccacgtgtgc

SEQ ID NO: 5453341 - DNA, 25 bp, Homo sapien
gaagaaaactggctcccaacagaag

SEQ ID NO: 5453342 - DNA, 25 bp, Homo sapien
tgtacctggaaacttgcccctgtgg

SEQ ID NO: 5453343 - DNA, 25 bp, Homo sapien
ggctggctctccatatcatcgtgca

SEQ ID NO: 5453344 - DNA, 25 bp, Homo sapien
accatcaggtgcagggaatagctca

SEQ ID NO: 5453345 - DNA, 25 bp, Homo sapien
gaatgccagtcctttagggcgatca

SEQ ID NO: 5453346 - DNA, 25 bp, Homo sapien
aaagacatgtcgtgggcattcagac

SEQ ID NO: 5453347 - DNA, 25 bp, Homo sapien
gcaaataagatttcgctgaggccat

SEQ ID NO: 5453348 - DNA, 25 bp, Homo sapien
tctgtaaattcctcgcttggcactg

SEQ ID NO: 5453349 - DNA, 25 bp, Homo sapien
gatgttcgtaaagggctcagctcaa

SEQ ID NO: 5453350 - DNA, 25 bp, Homo sapien
agaggctgactctctccgcttggat

SEQ ID NO: 5453351 - DNA, 25 bp, Homo sapien
gcttggattctgagcatagacacta

SEQ ID NO: 5453352 - DNA, 25 bp, Homo sapien
gcatagacactaaccacatactcca

SEQ ID NO: 5453353 - DNA, 25 bp, Homo sapien
actaaccacatactccactgtgggc

SEQ ID NO: 5453354 - DNA, 25 bp, Homo sapien
tgttggtcctggtccatttttggga

SEQ ID NO: 5453355 - DNA, 25 bp, Homo sapien
aaggcagccacttgacactaatgct

SEQ ID NO: 5453356 - DNA, 25 bp, Homo sapien
acttgcatctgggatggtttgtcaa

SEQ ID NO: 5453357 - DNA, 25 bp, Homo sapien
gctgttgtcctgaacatcggtcact

SEQ ID NO: 5453358 - DNA, 25 bp, Homo sapien
gatggtagctgtagacttgctccca

SEQ ID NO: 5453359 - DNA, 25 bp, Homo sapien
taatcaactccaggtttaaggccgc

SEQ ID NO: 5453360 - DNA, 25 bp, Homo sapien
agcatacacagtgatggtataatca

SEQ ID NO: 5453361 - DNA, 25 bp, Homo sapien
taaggccgctgatggtagctgtaga

SEQ ID NO: 5453362 - DNA, 25 bp, Homo sapien
tcaacccaggattgcatgcattgtg

SEQ ID NO: 5453363 - DNA, 25 bp, Homo sapien
tatgcatgtagcaaaccttggtaag

SEQ ID NO: 5453364 - DNA, 25 bp, Homo sapien
gggctttcaggttatccacaacaga

SEQ ID NO: 5453365 - DNA, 25 bp, Homo sapien
aagggctccgttgaatggacttgcc

SEQ ID NO: 5453366 - DNA, 25 bp, Homo sapien
cccagctgatcagtaggctggtggg

SEQ ID NO: 5453367 - DNA, 25 bp, Homo sapien
ggtcgcagcaacaacttccaggtcc

SEQ ID NO: 5453368 - DNA, 25 bp, Homo sapien
taatatctcactgtgacagcaggag

SEQ ID NO: 5453369 - DNA, 25 bp, Homo sapien
tctccgtaagtgatcctgtaatatc

SEQ ID NO: 5453370 - DNA, 25 bp, Homo sapien
agccattgcgcctggcccttttttt

SEQ ID NO: 5453371 - DNA, 25 bp, Homo sapien
caggttcaaagattctcctgcctca

SEQ ID NO: 5453372 - DNA, 25 bp, Homo sapien
ccaggttcaaagattctcctgcctc

SEQ ID NO: 5453373 - DNA, 25 bp, Homo sapien
tgagccattgcgcctggcccttttt

SEQ ID NO: 5453374 - DNA, 25 bp, Homo sapien
cagaatctaccaactgggtaggaaa

SEQ ID NO: 5453375 - DNA, 25 bp, Homo sapien
acagcaagctactttacagaatcta

SEQ ID NO: 5453376 - DNA, 25 bp, Homo sapien
gcaagctactttacagaatctacca

SEQ ID NO: 5453377 - DNA, 25 bp, Homo sapien
tactttacagaatctaccaactggg

SEQ ID NO: 5453378 - DNA, 25 bp, Homo sapien
gatgatggcggatcctgtagccagt

SEQ ID NO: 5453379 - DNA, 25 bp, Homo sapien
tatcagaaaagtcaatgccagttgg

SEQ ID NO: 5453380 - DNA, 25 bp, Homo sapien
tctgccattaagagcaacgatgctg

SEQ ID NO: 5453381 - DNA, 25 bp, Homo sapien
tggctcgaggagcaatccagtgcac

SEQ ID NO: 5453382 - DNA, 25 bp, Homo sapien
taagaggtgtgctctcatgttgttc

SEQ ID NO: 5453383 - DNA, 25 bp, Homo sapien
cttcctctaagaggtgtgctctcat

SEQ ID NO: 5453384 - DNA, 25 bp, Homo sapien
tgctctcatgttgttcgtagacact

SEQ ID NO: 5453385 - DNA, 25 bp, Homo sapien
ctggagacactcactacatattctg

SEQ ID NO: 5453386 - DNA, 25 bp, Homo sapien
agaaggtctgtaattagatgataag

SEQ ID NO: 5453387 - DNA, 25 bp, Homo sapien
gagaaggtctgtaattagatgataa

SEQ ID NO: 5453388 - DNA, 25 bp, Homo sapien
aggtctgtaattagatgataaggaa

SEQ ID NO: 5453389 - DNA, 25 bp, Homo sapien
gaaggtctgtaattagatgataagg

SEQ ID NO: 5453390 - DNA, 25 bp, Homo sapien
ctggagggcacatgataatccttgc

SEQ ID NO: 5453391 - DNA, 25 bp, Homo sapien
gatatttctcgcatccacctgagag

SEQ ID NO: 5453392 - DNA, 25 bp, Homo sapien
acctgagagtatgtctctggagggc

SEQ ID NO: 5453393 - DNA, 25 bp, Homo sapien
tcagctggatttcgagtgggatgaa

SEQ ID NO: 5453394 - DNA, 25 bp, Homo sapien
tcttgtcatacaacgtactgcatat

SEQ ID NO: 5453395 - DNA, 25 bp, Homo sapien
ttcttgtcatacaacgtactgcata

SEQ ID NO: 5453396 - DNA, 25 bp, Homo sapien
cttgtcatacaacgtactgcatatc

SEQ ID NO: 5453397 - DNA, 25 bp, Homo sapien
ccaatgttggtgaatcgcaggtcag

SEQ ID NO: 5453398 - DNA, 25 bp, Homo sapien
caggtgacacgcatggtgtctggac

SEQ ID NO: 5453399 - DNA, 25 bp, Homo sapien
ttcacaggtgagtaacgcaccagga

SEQ ID NO: 5453400 - DNA, 25 bp, Homo sapien
ttgttaagaccactgcattgtctga

SEQ ID NO: 5453401 - DNA, 25 bp, Homo sapien
ctagagctacagttccattcagtga

SEQ ID NO: 5453402 - DNA, 25 bp, Homo sapien
gaagaggcttaagttgccacacagc

SEQ ID NO: 5453403 - DNA, 25 bp, Homo sapien
ccccatgtgagatatctagagctac

SEQ ID NO: 5453404 - DNA, 25 bp, Homo sapien
cagattattttatcccaggccgaag

SEQ ID NO: 5453405 - DNA, 25 bp, Homo sapien
aaaatgttgcatgcttgtccccaga

SEQ ID NO: 5453406 - DNA, 25 bp, Homo sapien
taaccggagtaactggtggcagcat

SEQ ID NO: 5453407 - DNA, 25 bp, Homo sapien
cagactgtggttaaagaggtgtttc

SEQ ID NO: 5453408 - DNA, 25 bp, Homo sapien
tggcagcatgcaacaccatctatgt

SEQ ID NO: 5453409 - DNA, 25 bp, Homo sapien
gatatcatagtcaatgcccggctcc

SEQ ID NO: 5453410 - DNA, 25 bp, Homo sapien
gcaactactgtgatgcggtacccaa

SEQ ID NO: 5453411 - DNA, 25 bp, Homo sapien
aaaatagggataccttctcctgccg

SEQ ID NO: 5453412 - DNA, 25 bp, Homo sapien
ccgccattaatgagagtgataacgc

SEQ ID NO: 5453413 - DNA, 25 bp, Homo sapien
aagacttcctaagcatcatgaacag

SEQ ID NO: 5453414 - DNA, 25 bp, Homo sapien
catatggctgtttaggatgtcaaaa

SEQ ID NO: 5453415 - DNA, 25 bp, Homo sapien
catgaacagtttgcttccctagaag

SEQ ID NO: 5453416 - DNA, 25 bp, Homo sapien
tagagcctagacataatatctgaag

SEQ ID NO: 5453417 - DNA, 25 bp, Homo sapien
aactagatgtgtcaaccaaatgctg

SEQ ID NO: 5453418 - DNA, 25 bp, Homo sapien
cagctgggagatcggaattaaatcc

SEQ ID NO: 5453419 - DNA, 25 bp, Homo sapien
cagtactgagtacagacacgtgaca

SEQ ID NO: 5453420 - DNA, 25 bp, Homo sapien
gcatttgtccaaatcgctgctttga

SEQ ID NO: 5453421 - DNA, 25 bp, Homo sapien
gatgatggtatcagagatagggaca

SEQ ID NO: 5453422 - DNA, 25 bp, Homo sapien
ctgggatgatggtatcagagatagg

SEQ ID NO: 5453423 - DNA, 25 bp, Homo sapien
atgatggtatcagagatagggacac

SEQ ID NO: 5453424 - DNA, 25 bp, Homo sapien
gggatgatggtatcagagataggga

SEQ ID NO: 5453425 - DNA, 25 bp, Homo sapien
aatttccctgctggccgtttgtagg

SEQ ID NO: 5453426 - DNA, 25 bp, Homo sapien
caggttatcaaaagtgcaggagctc

SEQ ID NO: 5453427 - DNA, 25 bp, Homo sapien
tgacattgtactccaggccgggact

SEQ ID NO: 5453428 - DNA, 25 bp, Homo sapien
gtcatccttgacagtgtaaacactg

SEQ ID NO: 5453429 - DNA, 25 bp, Homo sapien
tgccattaggaacagggtaaacact

SEQ ID NO: 5453430 - DNA, 25 bp, Homo sapien
ttgagatcattacacttgctagtgg

SEQ ID NO: 5453431 - DNA, 25 bp, Homo sapien
tggcaaatacaaggaaacccaactg

SEQ ID NO: 5453432 - DNA, 25 bp, Homo sapien
ctagtggtcatccatatgtgtgggc

SEQ ID NO: 5453433 - DNA, 25 bp, Homo sapien
gatgatagccttagctctgtgcccc

SEQ ID NO: 5453434 - DNA, 25 bp, Homo sapien
tttcaaattcagagcaactcagctg

SEQ ID NO: 5453435 - DNA, 25 bp, Homo sapien
gctaacaagcacgaagattgtcaac

SEQ ID NO: 5453436 - DNA, 25 bp, Homo sapien
tgtgccccggcaaagataagaacta

SEQ ID NO: 5453437 - DNA, 25 bp, Homo sapien
gtgagcactccagtgtcagggtttg

SEQ ID NO: 5453438 - DNA, 25 bp, Homo sapien
tgagcactccagtgtcagggtttgc

SEQ ID NO: 5453439 - DNA, 25 bp, Homo sapien
tgcaagtttgttggtggagacaatg

SEQ ID NO: 5453440 - DNA, 25 bp, Homo sapien
gatgcaagtttgttggtggagacaa

SEQ ID NO: 5453441 - DNA, 25 bp, Homo sapien
cagatgcaagtttgttggtggagac

SEQ ID NO: 5453442 - DNA, 25 bp, Homo sapien
ctccagatgcaagtttgttggtgga

SEQ ID NO: 5453443 - DNA, 25 bp, Homo sapien
actttgtttacaattggcgcatctc

SEQ ID NO: 5453444 - DNA, 25 bp, Homo sapien
ggtgtagacgtattctactcctgga

SEQ ID NO: 5453445 - DNA, 25 bp, Homo sapien
gacacaacgatgcttcctgagtctg

SEQ ID NO: 5453446 - DNA, 25 bp, Homo sapien
ctgaagtcacttctcgtggtgcctc

SEQ ID NO: 5453447 - DNA, 25 bp, Homo sapien
cctcggtgttgtaaggtggaataga

SEQ ID NO: 5453448 - DNA, 25 bp, Homo sapien
atcacaatggtggtctcagtcacct

SEQ ID NO: 5453449 - DNA, 25 bp, Homo sapien
gagcaggcgtccatgtgatcacaat

SEQ ID NO: 5453450 - DNA, 25 bp, Homo sapien
taaaaccaattcttggagcaggcgt

SEQ ID NO: 5453451 - DNA, 25 bp, Homo sapien
gaaaattgcaaactagtccatggtt

SEQ ID NO: 5453452 - DNA, 25 bp, Homo sapien
taatcttctgcagccaacactcata

SEQ ID NO: 5453453 - DNA, 25 bp, Homo sapien
caatgcccaaagtaatagaatgtag

SEQ ID NO: 5453454 - DNA, 25 bp, Homo sapien
tttaagaaaagagcgattccgtctg

SEQ ID NO: 5453455 - DNA, 25 bp, Homo sapien
aatagagaatgtaaatatagttaag

SEQ ID NO: 5453456 - DNA, 25 bp, Homo sapien
agaatgtaaatatagttaagaaaag

SEQ ID NO: 5453457 - DNA, 25 bp, Homo sapien
tgtaaatatagttaagaaaaggcac

SEQ ID NO: 5453458 - DNA, 25 bp, Homo sapien
tagagaatgtaaatatagttaagaa

SEQ ID NO: 5453459 - DNA, 25 bp, Homo sapien
gatacggtgtactcagatgcaggct

SEQ ID NO: 5453460 - DNA, 25 bp, Homo sapien
ggtatcctgttatctgggcccgagg

SEQ ID NO: 5453461 - DNA, 25 bp, Homo sapien
tttatggccacgagggatacggtgt

SEQ ID NO: 5453462 - DNA, 25 bp, Homo sapien
tcaccaggacagtagaatcagtttc

SEQ ID NO: 5453463 - DNA, 25 bp, Homo sapien
tggaggttagtgggagcatccagtt

SEQ ID NO: 5453464 - DNA, 25 bp, Homo sapien
ttttccagcaagactttcgcatcag

SEQ ID NO: 5453465 - DNA, 25 bp, Homo sapien
ttcgcatcagtctcagaaattatag

SEQ ID NO: 5453466 - DNA, 25 bp, Homo sapien
actgagccagtaagagattgagtgc

SEQ ID NO: 5453467 - DNA, 25 bp, Homo sapien
caaggttgtaactatgtgaaagtca

SEQ ID NO: 5453468 - DNA, 25 bp, Homo sapien
gagatagagataggagaagacatac

SEQ ID NO: 5453469 - DNA, 25 bp, Homo sapien
tgcaagtgagggtggagaatttgga

SEQ ID NO: 5453470 - DNA, 25 bp, Homo sapien
caagtgagggtggagaatttggagg

SEQ ID NO: 5453471 - DNA, 25 bp, Homo sapien
aggctgcaagtgagggtggagaatt

SEQ ID NO: 5453472 - DNA, 25 bp, Homo sapien
ggatcacatccacacggtagccggt

SEQ ID NO: 5453473 - DNA, 25 bp, Homo sapien
tctcaggcggtgtccacatgatggt

SEQ ID NO: 5453474 - DNA, 25 bp, Homo sapien
catgatggtgaccttcacgtctgtc

SEQ ID NO: 5453475 - DNA, 25 bp, Homo sapien
gacagcccggtgacttctgcaaagg

SEQ ID NO: 5453476 - DNA, 25 bp, Homo sapien
gaaggttgagttctgtgctgctacc

SEQ ID NO: 5453477 - DNA, 25 bp, Homo sapien
caggttgcaagtcactgagggtgac

SEQ ID NO: 5453478 - DNA, 25 bp, Homo sapien
tgctaccttctactgatggcgaata

SEQ ID NO: 5453479 - DNA, 25 bp, Homo sapien
tagtgatgttatactgaacaccagg

SEQ ID NO: 5453480 - DNA, 25 bp, Homo sapien
tgctccagcgaacaacaattgaggt

SEQ ID NO: 5453481 - DNA, 25 bp, Homo sapien
cacagtcgtgtcaggaggggcatca

SEQ ID NO: 5453482 - DNA, 25 bp, Homo sapien
gaacaacaattgaggtgtcatcaac

SEQ ID NO: 5453483 - DNA, 25 bp, Homo sapien
tcatcaacttggtccacagtcgtgt

SEQ ID NO: 5453484 - DNA, 25 bp, Homo sapien
gtgctactacaggcctgtgttttac

SEQ ID NO: 5453485 - DNA, 25 bp, Homo sapien
cagtcaggaagtgctactacaggcc

SEQ ID NO: 5453486 - DNA, 25 bp, Homo sapien
agtgctactacaggcctgtgtttta

SEQ ID NO: 5453487 - DNA, 25 bp, Homo sapien
agtcaggaagtgctactacaggcct

SEQ ID NO: 5453488 - DNA, 25 bp, Homo sapien
gttcacagaagtggctgtgcttgga

SEQ ID NO: 5453489 - DNA, 25 bp, Homo sapien
tccccatcctcagatatctgataga

SEQ ID NO: 5453490 - DNA, 25 bp, Homo sapien
acaatgtattttcggccaggaagca

SEQ ID NO: 5453491 - DNA, 25 bp, Homo sapien
cctcagatatctgatagacatttac

SEQ ID NO: 5453492 - DNA, 25 bp, Homo sapien
gtcttgagcgacatattgagcttac

SEQ ID NO: 5453493 - DNA, 25 bp, Homo sapien
ctgccctgaacctgtcttgagcgac

SEQ ID NO: 5453494 - DNA, 25 bp, Homo sapien
gaacctgtcttgagcgacatattga

SEQ ID NO: 5453495 - DNA, 25 bp, Homo sapien
cctgaacctgtcttgagcgacatat

SEQ ID NO: 5453496 - DNA, 25 bp, Homo sapien
actcagctcatattccacccggaat

SEQ ID NO: 5453497 - DNA, 25 bp, Homo sapien
aagctactggctgtgatttcggtca

SEQ ID NO: 5453498 - DNA, 25 bp, Homo sapien
aatcccgacacggtgtcggaagctg

SEQ ID NO: 5453499 - DNA, 25 bp, Homo sapien
gagaaaagggagtcgtctctcctgt

SEQ ID NO: 5453500 - DNA, 25 bp, Homo sapien
gtcctcgtcgccaacatcattttaa

SEQ ID NO: 5453501 - DNA, 25 bp, Homo sapien
ggaaagcattgcctcaggagagcct

SEQ ID NO: 5453502 - DNA, 25 bp, Homo sapien
ggaaagtcagccttcagtcatctag

SEQ ID NO: 5453503 - DNA, 25 bp, Homo sapien
cagtcatctagaaaatttaccgtcc

SEQ ID NO: 5453504 - DNA, 25 bp, Homo sapien
tcttggtggccgtactgctggatgc

SEQ ID NO: 5453505 - DNA, 25 bp, Homo sapien
ctcgtataccacaccaggcttcagg

SEQ ID NO: 5453506 - DNA, 25 bp, Homo sapien
ggcctggtatggtagcttccttcca

SEQ ID NO: 5453507 - DNA, 25 bp, Homo sapien
tggtggtgaagtcaaagcgagtcac

SEQ ID NO: 5453508 - DNA, 25 bp, Homo sapien
ccaagttaattgtgttatatcagta

SEQ ID NO: 5453509 - DNA, 25 bp, Homo sapien
cacccacaccttcacttttaccaag

SEQ ID NO: 5453510 - DNA, 25 bp, Homo sapien
cttcacttttaccaagttaattgtg

SEQ ID NO: 5453511 - DNA, 25 bp, Homo sapien
tttaccaagttaattgtgttatatc

SEQ ID NO: 5453512 - DNA, 25 bp, Homo sapien
gctgaagcattctagactctacgga

SEQ ID NO: 5453513 - DNA, 25 bp, Homo sapien
ggacatcaagttctgcaaatggcca

SEQ ID NO: 5453514 - DNA, 25 bp, Homo sapien
tctacggagactacattgagccaat

SEQ ID NO: 5453515 - DNA, 25 bp, Homo sapien
tgagccaatgagaaagacacgattc

SEQ ID NO: 5453516 - DNA, 25 bp, Homo sapien
gataacctggctgagtatagaagac

SEQ ID NO: 5453517 - DNA, 25 bp, Homo sapien
tctaagccagctacgcagttgttgc

SEQ ID NO: 5453518 - DNA, 25 bp, Homo sapien
tgagtctaacatcatgactgctggg

SEQ ID NO: 5453519 - DNA, 25 bp, Homo sapien
tggaagcactgtttgctggacccca

SEQ ID NO: 5453520 - DNA, 25 bp, Homo sapien
caaatatagtaaatgctataggaat

SEQ ID NO: 5453521 - DNA, 25 bp, Homo sapien
aagaaaccatcagaattgataagat

SEQ ID NO: 5453522 - DNA, 25 bp, Homo sapien
gagttgttggctcaaaagctgggaa

SEQ ID NO: 5453523 - DNA, 25 bp, Homo sapien
gaatagttaatcagagttgttggct

SEQ ID NO: 5453524 - DNA, 25 bp, Homo sapien
tcagtatccaaggtttctgggtggg

SEQ ID NO: 5453525 - DNA, 25 bp, Homo sapien
caaggtttctgggtgggatactcac

SEQ ID NO: 5453526 - DNA, 25 bp, Homo sapien
tccaaggtttctgggtgggatactc

SEQ ID NO: 5453527 - DNA, 25 bp, Homo sapien
tatccaaggtttctgggtgggatac

SEQ ID NO: 5453528 - DNA, 25 bp, Homo sapien
gactcggagtctcagtgataaatac

SEQ ID NO: 5453529 - DNA, 25 bp, Homo sapien
agttgggctgactcggagtctcagt

SEQ ID NO: 5453530 - DNA, 25 bp, Homo sapien
cagtgataaatacttcgacaggacc

SEQ ID NO: 5453531 - DNA, 25 bp, Homo sapien
aatacttcgacaggaccacttgagc

SEQ ID NO: 5453532 - DNA, 25 bp, Homo sapien
tgcacatacttctcccatgaatctc

SEQ ID NO: 5453533 - DNA, 25 bp, Homo sapien
gcagtagcactggtatctgacacca

SEQ ID NO: 5453534 - DNA, 25 bp, Homo sapien
tgaatctccaatttgataaaacgtc

SEQ ID NO: 5453535 - DNA, 25 bp, Homo sapien
gttggcaatgccactccccaatgcc

SEQ ID NO: 5453536 - DNA, 25 bp, Homo sapien
ccctgaccgaagcatgtacagttca

SEQ ID NO: 5453537 - DNA, 25 bp, Homo sapien
tgtgcccctcttcatgacgcttgtg

SEQ ID NO: 5453538 - DNA, 25 bp, Homo sapien
gtcgttcacattgtaagtgatgtca

SEQ ID NO: 5453539 - DNA, 25 bp, Homo sapien
gacgcttgtggaatgtgtcgttcac

SEQ ID NO: 5453540 - DNA, 25 bp, Homo sapien
aaaatacactttcctgtgagaagcc

SEQ ID NO: 5453541 - DNA, 25 bp, Homo sapien
cttttgcagaggttacagtatgctc

SEQ ID NO: 5453542 - DNA, 25 bp, Homo sapien
cagtatgctcaagtaaagaatgtgg

SEQ ID NO: 5453543 - DNA, 25 bp, Homo sapien
ttctcaaagcatacaactacttcca

SEQ ID NO: 5453544 - DNA, 25 bp, Homo sapien
cccttcattggttgtgcagatttcc

SEQ ID NO: 5453545 - DNA, 25 bp, Homo sapien
ggcaatgcatgtccattccccacga

SEQ ID NO: 5453546 - DNA, 25 bp, Homo sapien
tcgaagctgcgagtaggcaatgcat

SEQ ID NO: 5453547 - DNA, 25 bp, Homo sapien
tatcccactgatctccaatgcggta

SEQ ID NO: 5453548 - DNA, 25 bp, Homo sapien
cagaagtgcaatcagtgtaattgtg

SEQ ID NO: 5453549 - DNA, 25 bp, Homo sapien
taattgtggttgttgtataggaagg

SEQ ID NO: 5453550 - DNA, 25 bp, Homo sapien
cccaaacttctggtcggcatcatag

SEQ ID NO: 5453551 - DNA, 25 bp, Homo sapien
tagttctgtgtggtcccacaccact

SEQ ID NO: 5453552 - DNA, 25 bp, Homo sapien
tggtctgtgcagaaagagtatttct

SEQ ID NO: 5453553 - DNA, 25 bp, Homo sapien
tcgaagttgtgctgcaccaaagatg

SEQ ID NO: 5453554 - DNA, 25 bp, Homo sapien
tcctgctcataattcgaagttgtgc

SEQ ID NO: 5453555 - DNA, 25 bp, Homo sapien
gaaagagtatttctggtcctgctca

SEQ ID NO: 5453556 - DNA, 25 bp, Homo sapien
ggtgcaggagtagaacgtcctgcca

SEQ ID NO: 5453557 - DNA, 25 bp, Homo sapien
cttctgtggtgcaggagtagaacgt

SEQ ID NO: 5453558 - DNA, 25 bp, Homo sapien
ctgtggtgcaggagtagaacgtcct

SEQ ID NO: 5453559 - DNA, 25 bp, Homo sapien
tggtgcaggagtagaacgtcctgcc

SEQ ID NO: 5453560 - DNA, 25 bp, Homo sapien
ttgtaggtgaatggtaagacacatg

SEQ ID NO: 5453561 - DNA, 25 bp, Homo sapien
gaatggtaagacacatggctctcca

SEQ ID NO: 5453562 - DNA, 25 bp, Homo sapien
tggctctccatttgagttgccaccg

SEQ ID NO: 5453563 - DNA, 25 bp, Homo sapien
catttgagttgccaccgtaagtctg

SEQ ID NO: 5453564 - DNA, 25 bp, Homo sapien
gatactgagcttgtgccctcaaagg

SEQ ID NO: 5453565 - DNA, 25 bp, Homo sapien
gtgtcagtaaacagagatgctttat

SEQ ID NO: 5453566 - DNA, 25 bp, Homo sapien
gagatgctttatctcccaccagcag

SEQ ID NO: 5453567 - DNA, 25 bp, Homo sapien
caatcataatcaaaagagtgtcagt

SEQ ID NO: 5453568 - DNA, 25 bp, Homo sapien
actgcatccccacagagtagaccac

SEQ ID NO: 5453569 - DNA, 25 bp, Homo sapien
cacaccactgtctgtgacacagtgg

SEQ ID NO: 5453570 - DNA, 25 bp, Homo sapien
tgtctcttggcagctgactccgttg

SEQ ID NO: 5453571 - DNA, 25 bp, Homo sapien
tgcccaggcacgtgcaaagcatttg

SEQ ID NO: 5453572 - DNA, 25 bp, Homo sapien
cacgaacatcggtgaaggggccaga

SEQ ID NO: 5453573 - DNA, 25 bp, Homo sapien
aggctgcggttggtaaacagctgca

SEQ ID NO: 5453574 - DNA, 25 bp, Homo sapien
ggttggtaaacagctgcacgaacat

SEQ ID NO: 5453575 - DNA, 25 bp, Homo sapien
tgcggttggtaaacagctgcacgaa

SEQ ID NO: 5453576 - DNA, 25 bp, Homo sapien
agaatcccaaggtcaaacgtactag

SEQ ID NO: 5453577 - DNA, 25 bp, Homo sapien
aaacgtactagggagacatggcgcc

SEQ ID NO: 5453578 - DNA, 25 bp, Homo sapien
cctacactctaccatggagagtatg

SEQ ID NO: 5453579 - DNA, 25 bp, Homo sapien
taagtgctgctgaacactagaaccc

SEQ ID NO: 5453580 - DNA, 25 bp, Homo sapien
caaaggaaagatggatttgcggaaa

SEQ ID NO: 5453581 - DNA, 25 bp, Homo sapien
tatcttaggttattagctgaaacac

SEQ ID NO: 5453582 - DNA, 25 bp, Homo sapien
tgaaacactgcaaattatcctcaaa

SEQ ID NO: 5453583 - DNA, 25 bp, Homo sapien
ttatcctcaaatggcatgtcaaagg

SEQ ID NO: 5453584 - DNA, 25 bp, Homo sapien
tttcccgcccctgctcgtcctgtgc

SEQ ID NO: 5453585 - DNA, 25 bp, Homo sapien
cccatttcccgcccctgctcgtcct

SEQ ID NO: 5453586 - DNA, 25 bp, Homo sapien
tgcttccccatttcccgcccctgct

SEQ ID NO: 5453587 - DNA, 25 bp, Homo sapien
catttcccgcccctgctcgtcctgt

SEQ ID NO: 5453588 - DNA, 25 bp, Homo sapien
tgtccttgtgtcctgatcgttgcat

SEQ ID NO: 5453589 - DNA, 25 bp, Homo sapien
ccaggtgtctccaattctataggat

SEQ ID NO: 5453590 - DNA, 25 bp, Homo sapien
tctgcacagaggtgtgcctctcaca

SEQ ID NO: 5453591 - DNA, 25 bp, Homo sapien
ggagcaggtttcctcgattatcctt

SEQ ID NO: 5453592 - DNA, 25 bp, Homo sapien
tatggcctgcctttcaatagggacc

SEQ ID NO: 5453593 - DNA, 25 bp, Homo sapien
tacatacatcaggtcgagagtcgca

SEQ ID NO: 5453594 - DNA, 25 bp, Homo sapien
ctaaaaacaggctaagcgcggtggc

SEQ ID NO: 5453595 - DNA, 25 bp, Homo sapien
aaaaaggaatgctatctatgcctgg

SEQ ID NO: 5453596 - DNA, 25 bp, Homo sapien
aacatagtattacccttctctctag

SEQ ID NO: 5453597 - DNA, 25 bp, Homo sapien
ggatgtgttctgagtaacatagtat

SEQ ID NO: 5453598 - DNA, 25 bp, Homo sapien
aaagcatgctgatatactggatgtg

SEQ ID NO: 5453599 - DNA, 25 bp, Homo sapien
tacccttctctctaggaatccagaa

SEQ ID NO: 5453600 - DNA, 25 bp, Homo sapien
ctggcttaatctttaacataaagat

SEQ ID NO: 5453601 - DNA, 25 bp, Homo sapien
tttaacataaagatgtaaaacatac

SEQ ID NO: 5453602 - DNA, 25 bp, Homo sapien
tggcttaatctttaacataaagatg

SEQ ID NO: 5453603 - DNA, 25 bp, Homo sapien
atctttaacataaagatgtaaaaca

SEQ ID NO: 5453604 - DNA, 25 bp, Homo sapien
tcatccagccttggtagggcttctc

SEQ ID NO: 5453605 - DNA, 25 bp, Homo sapien
cgtttctccgaccacataggaagtc

SEQ ID NO: 5453606 - DNA, 25 bp, Homo sapien
ttctagaagtgcaagtgatgcgtcc

SEQ ID NO: 5453607 - DNA, 25 bp, Homo sapien
ccttctcccaggcaagtacaatcta

SEQ ID NO: 5453608 - DNA, 25 bp, Homo sapien
cacactctaacatgtaaccaccagt

SEQ ID NO: 5453609 - DNA, 25 bp, Homo sapien
ccaggtgtcaccaatcttgtaggac

SEQ ID NO: 5453610 - DNA, 25 bp, Homo sapien
ctatgggcttgcaggtccattctcc

SEQ ID NO: 5453611 - DNA, 25 bp, Homo sapien
cttgtaggactgacccccttcatgg

SEQ ID NO: 5453612 - DNA, 25 bp, Homo sapien
gatggtacagcttattctccctcgc

SEQ ID NO: 5453613 - DNA, 25 bp, Homo sapien
gatcatggagtctttaggacgctca

SEQ ID NO: 5453614 - DNA, 25 bp, Homo sapien
tgcaggtacagtcccagatcatgga

SEQ ID NO: 5453615 - DNA, 25 bp, Homo sapien
taagtgtcacccactcggtaagtgt

SEQ ID NO: 5453616 - DNA, 25 bp, Homo sapien
aggtaggtccgctcccactgttgat

SEQ ID NO: 5453617 - DNA, 25 bp, Homo sapien
taacaagtacaaaccaacgcattgc

SEQ ID NO: 5453618 - DNA, 25 bp, Homo sapien
tactctcgcagttaaaacctcggct

SEQ ID NO: 5453619 - DNA, 25 bp, Homo sapien
acctcggcttcctccataacaagta

SEQ ID NO: 5453620 - DNA, 25 bp, Homo sapien
tttgactgacagccaccggggactg

SEQ ID NO: 5453621 - DNA, 25 bp, Homo sapien
ttgactgacagccaccggggactgg

SEQ ID NO: 5453622 - DNA, 25 bp, Homo sapien
ctgaaccatttgctgagcctgcctc

SEQ ID NO: 5453623 - DNA, 25 bp, Homo sapien
ctttgactgacagccaccggggact

SEQ ID NO: 5453624 - DNA, 25 bp, Homo sapien
gagagacgcccgcaccgggaggcaa

SEQ ID NO: 5453625 - DNA, 25 bp, Homo sapien
gcttcccttcgcaacctgcgggaaa

SEQ ID NO: 5453626 - DNA, 25 bp, Homo sapien
tctaatgcctcccgggggttgtcgc

SEQ ID NO: 5453627 - DNA, 25 bp, Homo sapien
gggaggcaagttgccaccaagtttg

SEQ ID NO: 5453628 - DNA, 25 bp, Homo sapien
gcagcacagccggcgcgggcgtccg

SEQ ID NO: 5453629 - DNA, 25 bp, Homo sapien
tgcagcacagccggcgcgggcgtcc

SEQ ID NO: 5453630 - DNA, 25 bp, Homo sapien
cgggagccggggcttatatgggacg

SEQ ID NO: 5453631 - DNA, 25 bp, Homo sapien
gagccggggcttatatgggacggtc

SEQ ID NO: 5453632 - DNA, 25 bp, Homo sapien
gttcgcagcgaacaaaagagatgct

SEQ ID NO: 5453633 - DNA, 25 bp, Homo sapien
tcgcagcgaacaaaagagatgctga

SEQ ID NO: 5453634 - DNA, 25 bp, Homo sapien
tgtgggttcgcagcgaacaaaagag

SEQ ID NO: 5453635 - DNA, 25 bp, Homo sapien
gggttcgcagcgaacaaaagagatg

SEQ ID NO: 5453636 - DNA, 25 bp, Homo sapien
ttttcttttgccctagagcaattgt

SEQ ID NO: 5453637 - DNA, 25 bp, Homo sapien
ttcttttgccctagagcaattgtct

SEQ ID NO: 5453638 - DNA, 25 bp, Homo sapien
attgagccttgataaggaagtcttc

SEQ ID NO: 5453639 - DNA, 25 bp, Homo sapien
tgtctcaatgtacaattgagccttg

SEQ ID NO: 5453640 - DNA, 25 bp, Homo sapien
ggacgccaagtccaggtacacagag

SEQ ID NO: 5453641 - DNA, 25 bp, Homo sapien
tctgagtcacatgttgacgtaactc

SEQ ID NO: 5453642 - DNA, 25 bp, Homo sapien
tgttgacgtaactcagtgtgaagcc

SEQ ID NO: 5453643 - DNA, 25 bp, Homo sapien
gtctgataacaccacatacactccg

SEQ ID NO: 5453644 - DNA, 25 bp, Homo sapien
gaacttgaaccctgtggttgtagat

SEQ ID NO: 5453645 - DNA, 25 bp, Homo sapien
agaacttgaaccctgtggttgtaga

SEQ ID NO: 5453646 - DNA, 25 bp, Homo sapien
ttcagaacttgaaccctgtggttgt

SEQ ID NO: 5453647 - DNA, 25 bp, Homo sapien
tcagaacttgaaccctgtggttgta

SEQ ID NO: 5453648 - DNA, 25 bp, Homo sapien
cattccacagaacaattagaagaat

SEQ ID NO: 5453649 - DNA, 25 bp, Homo sapien
caattagaagaatcctcaggggaca

SEQ ID NO: 5453650 - DNA, 25 bp, Homo sapien
tagtcacgtaatgcacagacatctc

SEQ ID NO: 5453651 - DNA, 25 bp, Homo sapien
tttcagatagtcacgtaatgcacag

SEQ ID NO: 5453652 - DNA, 25 bp, Homo sapien
ggtgtttcctggatgatttccaccc

SEQ ID NO: 5453653 - DNA, 25 bp, Homo sapien
tttcctggatgatttccaccctcct

SEQ ID NO: 5453654 - DNA, 25 bp, Homo sapien
tgtttcctggatgatttccaccctc

SEQ ID NO: 5453655 - DNA, 25 bp, Homo sapien
cttggatggtgtttcctggatgatt

SEQ ID NO: 5453656 - DNA, 25 bp, Homo sapien
aactacctgcatgacaagagactaa

SEQ ID NO: 5453657 - DNA, 25 bp, Homo sapien
gagactaatattcagaatgttacag

SEQ ID NO: 5453658 - DNA, 25 bp, Homo sapien
gagtaaggcattcccgaaagcaaga

SEQ ID NO: 5453659 - DNA, 25 bp, Homo sapien
aatattcgcaaactacctgcatgac

SEQ ID NO: 5453660 - DNA, 25 bp, Homo sapien
gggatattaggacattcccacgact

SEQ ID NO: 5453661 - DNA, 25 bp, Homo sapien
cgggatattaggacattcccacgac

SEQ ID NO: 5453662 - DNA, 25 bp, Homo sapien
tcgggatattaggacattcccacga

SEQ ID NO: 5453663 - DNA, 25 bp, Homo sapien
tccttggcttcctcccgtgtgctgt

SEQ ID NO: 5453664 - DNA, 25 bp, Homo sapien
ctgtactggttgattaaaaattgcc

SEQ ID NO: 5453665 - DNA, 25 bp, Homo sapien
cgtatcacagtagggtcacaggaca

SEQ ID NO: 5453666 - DNA, 25 bp, Homo sapien
gtatcttcagccagaaatccttggc

SEQ ID NO: 5453667 - DNA, 25 bp, Homo sapien
ctttccatagctttgaaaaattgtc

SEQ ID NO: 5453668 - DNA, 25 bp, Homo sapien
tttccatagctttgaaaaattgtcc

SEQ ID NO: 5453669 - DNA, 25 bp, Homo sapien
ttccatagctttgaaaaattgtcca

SEQ ID NO: 5453670 - DNA, 25 bp, Homo sapien
ccttgatttcagctagcagaaaagt

SEQ ID NO: 5453671 - DNA, 25 bp, Homo sapien
ttttctcacatcaaactgtatattc

SEQ ID NO: 5453672 - DNA, 25 bp, Homo sapien
gccgtccttgatttcagctagcaga

SEQ ID NO: 5453673 - DNA, 25 bp, Homo sapien
cgtccttgatttcagctagcagaaa

SEQ ID NO: 5453674 - DNA, 25 bp, Homo sapien
taaaagaaattgtgaatctttagca

SEQ ID NO: 5453675 - DNA, 25 bp, Homo sapien
aaaagaaattgtgaatctttagcaa

SEQ ID NO: 5453676 - DNA, 25 bp, Homo sapien
ttaaaagaaattgtgaatctttagc

SEQ ID NO: 5453677 - DNA, 25 bp, Homo sapien
ctgtaggctgataagtccaaggtca

SEQ ID NO: 5453678 - DNA, 25 bp, Homo sapien
tctttgatgttatgactctcaccgg

SEQ ID NO: 5453679 - DNA, 25 bp, Homo sapien
ggtttctttgatgttatgactctca

SEQ ID NO: 5453680 - DNA, 25 bp, Homo sapien
gatgttatgactctcaccggattct

SEQ ID NO: 5453681 - DNA, 25 bp, Homo sapien
tgactctcaccggattctgtgttga

SEQ ID NO: 5453682 - DNA, 25 bp, Homo sapien
cagggctgaggacgtggctaccttc

SEQ ID NO: 5453683 - DNA, 25 bp, Homo sapien
cagctgctaggatgggttggtggca

SEQ ID NO: 5453684 - DNA, 25 bp, Homo sapien
taccttccggcagaaccttgggagc

SEQ ID NO: 5453685 - DNA, 25 bp, Homo sapien
gtgataggaggtacaactcaggatc

SEQ ID NO: 5453686 - DNA, 25 bp, Homo sapien
gcaaggctgctgtatgagcaatggt

SEQ ID NO: 5453687 - DNA, 25 bp, Homo sapien
ctgtatgagcaatggtctctttcca

SEQ ID NO: 5453688 - DNA, 25 bp, Homo sapien
aggctgctgtatgagcaatggtctc

SEQ ID NO: 5453689 - DNA, 25 bp, Homo sapien
gctgctgtatgagcaatggtctctt

SEQ ID NO: 5453690 - DNA, 25 bp, Homo sapien
catcataaaataggagtgcgggcaa

SEQ ID NO: 5453691 - DNA, 25 bp, Homo sapien
aaataaattggctttggtctgcctg

SEQ ID NO: 5453692 - DNA, 25 bp, Homo sapien
gtaaacaagtacaccaatcccacat

SEQ ID NO: 5453693 - DNA, 25 bp, Homo sapien
gatagttttagttacctgaatgcaa

SEQ ID NO: 5453694 - DNA, 25 bp, Homo sapien
tgcttcaatcggaaagttcagcaag

SEQ ID NO: 5453695 - DNA, 25 bp, Homo sapien
tcagcaaggccagccttagacacat

SEQ ID NO: 5453696 - DNA, 25 bp, Homo sapien
cttgcgttgcttcaatcggaaagtt

SEQ ID NO: 5453697 - DNA, 25 bp, Homo sapien
cgttgcttcaatcggaaagttcagc

SEQ ID NO: 5453698 - DNA, 25 bp, Homo sapien
tttttgtcatagaagatgacagttc

SEQ ID NO: 5453699 - DNA, 25 bp, Homo sapien
gaagaccttctggtaagacacaata

SEQ ID NO: 5453700 - DNA, 25 bp, Homo sapien
cccctgaagaccttctggtaagaca

SEQ ID NO: 5453701 - DNA, 25 bp, Homo sapien
cctgaagaccttctggtaagacaca

SEQ ID NO: 5453702 - DNA, 25 bp, Homo sapien
cctggacaatgaagtgagaccgtgt

SEQ ID NO: 5453703 - DNA, 25 bp, Homo sapien
gaagtggcccagtcaaagcacaact

SEQ ID NO: 5453704 - DNA, 25 bp, Homo sapien
cacaactggactggtcaagggcaaa

SEQ ID NO: 5453705 - DNA, 25 bp, Homo sapien
ccaggaccatctagaagacaaagca

SEQ ID NO: 5453706 - DNA, 25 bp, Homo sapien
gatggaaacgtccttaccaggacca

SEQ ID NO: 5453707 - DNA, 25 bp, Homo sapien
tatagcaagctttctggacgaccaa

SEQ ID NO: 5453708 - DNA, 25 bp, Homo sapien
gcttacatttcctactcaaggcggg

SEQ ID NO: 5453709 - DNA, 25 bp, Homo sapien
ttgactgtgagctgatcctgaccgg

SEQ ID NO: 5453710 - DNA, 25 bp, Homo sapien
tcttggcatctgacacttggcgaaa

SEQ ID NO: 5453711 - DNA, 25 bp, Homo sapien
gcagtaatcgggaaggaagccactt

SEQ ID NO: 5453712 - DNA, 25 bp, Homo sapien
aaaacactgaggcagaagtccgaag

SEQ ID NO: 5453713 - DNA, 25 bp, Homo sapien
cttgggcaacactgacaggactggc

SEQ ID NO: 5453714 - DNA, 25 bp, Homo sapien
gaacaaattggcagtcttgggcaac

SEQ ID NO: 5453715 - DNA, 25 bp, Homo sapien
gacctgtcacattgagcctcggcat

SEQ ID NO: 5453716 - DNA, 25 bp, Homo sapien
tgtcagtgtcgcacattaaagacgc

SEQ ID NO: 5453717 - DNA, 25 bp, Homo sapien
tttatgagtctgaaggacctgtcac

SEQ ID NO: 5453718 - DNA, 25 bp, Homo sapien
tgcatggctgaaacgccttgtcagt

SEQ ID NO: 5453719 - DNA, 25 bp, Homo sapien
catctccacactgctaacaaaaggc

SEQ ID NO: 5453720 - DNA, 25 bp, Homo sapien
gaggcacactttccgattcttggtt

SEQ ID NO: 5453721 - DNA, 25 bp, Homo sapien
accacgctgatcacttttgcctgca

SEQ ID NO: 5453722 - DNA, 25 bp, Homo sapien
taacaaaaggcaactcaccgaggca

SEQ ID NO: 5453723 - DNA, 25 bp, Homo sapien
aatttggagtcctatgcaagtggcc

SEQ ID NO: 5453724 - DNA, 25 bp, Homo sapien
tttacagtaacagggcgtggcaggt

SEQ ID NO: 5453725 - DNA, 25 bp, Homo sapien
aatagggctgaacggcgcagtgctc

SEQ ID NO: 5453726 - DNA, 25 bp, Homo sapien
gaagccccgactgtcacgttgtgca

SEQ ID NO: 5453727 - DNA, 25 bp, Homo sapien
catgtgggccacagattggtctatt

SEQ ID NO: 5453728 - DNA, 25 bp, Homo sapien
ctttcaggtggatctcatgtgggcc

SEQ ID NO: 5453729 - DNA, 25 bp, Homo sapien
catgtttggtgccattctgggtgcc

SEQ ID NO: 5453730 - DNA, 25 bp, Homo sapien
gaagccagcttactcttgatccaaa

SEQ ID NO: 5453731 - DNA, 25 bp, Homo sapien
taagatgccataaagagatcagttg

SEQ ID NO: 5453732 - DNA, 25 bp, Homo sapien
aagtggtgcatcagcttttggtccc

SEQ ID NO: 5453733 - DNA, 25 bp, Homo sapien
aaagagatcagttgctgtcccctcc

SEQ ID NO: 5453734 - DNA, 25 bp, Homo sapien
ggtgccaactctgtataagatgcca

SEQ ID NO: 5453735 - DNA, 25 bp, Homo sapien
tcccagaagggccatacaaagccaa

SEQ ID NO: 5453736 - DNA, 25 bp, Homo sapien
atcccagaagggccatacaaagcca

SEQ ID NO: 5453737 - DNA, 25 bp, Homo sapien
ggcccagggacatcagtgatcccag

SEQ ID NO: 5453738 - DNA, 25 bp, Homo sapien
tgaaatgtcccatgactcaacaaat

SEQ ID NO: 5453739 - DNA, 25 bp, Homo sapien
ctgaaatgtcccatgactcaacaaa

SEQ ID NO: 5453740 - DNA, 25 bp, Homo sapien
aggaagcatgagtagggaaaatcca

SEQ ID NO: 5453741 - DNA, 25 bp, Homo sapien
taggaagcatgagtagggaaaatcc

SEQ ID NO: 5453742 - DNA, 25 bp, Homo sapien
ggaagcatgagtagggaaaatccac

SEQ ID NO: 5453743 - DNA, 25 bp, Homo sapien
acagaatcagaggttgcagtaattt

SEQ ID NO: 5453744 - DNA, 25 bp, Homo sapien
agaaacagaatcagaggttgcagta

SEQ ID NO: 5453745 - DNA, 25 bp, Homo sapien
gaaacagaatcagaggttgcagtaa

SEQ ID NO: 5453746 - DNA, 25 bp, Homo sapien
cttagaaacagaatcagaggttgca

SEQ ID NO: 5453747 - DNA, 25 bp, Homo sapien
tgtggtctccgctgaaccacaagcc

SEQ ID NO: 5453748 - DNA, 25 bp, Homo sapien
ttcagttgtctgttcagtccagtcc

SEQ ID NO: 5453749 - DNA, 25 bp, Homo sapien
ccacaagcccgtaagtataagtaag

SEQ ID NO: 5453750 - DNA, 25 bp, Homo sapien
gcccgtaagtataagtaagacacaa

SEQ ID NO: 5453751 - DNA, 25 bp, Homo sapien
cttccttttcatcgttaaatactct

SEQ ID NO: 5453752 - DNA, 25 bp, Homo sapien
gggaagcacagttccccaaagccca

SEQ ID NO: 5453753 - DNA, 25 bp, Homo sapien
gaagcacagttccccaaagcccatt

SEQ ID NO: 5453754 - DNA, 25 bp, Homo sapien
ggaagcacagttccccaaagcccat

SEQ ID NO: 5453755 - DNA, 25 bp, Homo sapien
ggtcacagcatttgctttctcttac

SEQ ID NO: 5453756 - DNA, 25 bp, Homo sapien
cctggtcacagcatttgctttctct

SEQ ID NO: 5453757 - DNA, 25 bp, Homo sapien
ttgcctggtcacagcatttgctttc

SEQ ID NO: 5453758 - DNA, 25 bp, Homo sapien
gcctggtcacagcatttgctttctc

SEQ ID NO: 5453759 - DNA, 25 bp, Homo sapien
caggacttatggagcggttttgatg

SEQ ID NO: 5453760 - DNA, 25 bp, Homo sapien
gatgcgatatgatactctgccttaa

SEQ ID NO: 5453761 - DNA, 25 bp, Homo sapien
tcatggcattgcacgtggagtggca

SEQ ID NO: 5453762 - DNA, 25 bp, Homo sapien
gagcggttttgatgcgatatgatac

SEQ ID NO: 5453763 - DNA, 25 bp, Homo sapien
ggattttgtgatgctctgaatccat

SEQ ID NO: 5453764 - DNA, 25 bp, Homo sapien
ctggattttgtgatgctctgaatcc

SEQ ID NO: 5453765 - DNA, 25 bp, Homo sapien
ccttccttctctatgttcctggatt

SEQ ID NO: 5453766 - DNA, 25 bp, Homo sapien
tccttctctatgttcctggattttg

SEQ ID NO: 5453767 - DNA, 25 bp, Homo sapien
ctatgtacacagaaaaatgataaga

SEQ ID NO: 5453768 - DNA, 25 bp, Homo sapien
tggaaaccccgaaatagccattgag

SEQ ID NO: 5453769 - DNA, 25 bp, Homo sapien
tagaggcttgtctcgtggcttgcaa

SEQ ID NO: 5453770 - DNA, 25 bp, Homo sapien
taacaataagaacccatggagagtc

SEQ ID NO: 5453771 - DNA, 25 bp, Homo sapien
aatgatcctggagtagcttagaggc

SEQ ID NO: 5453772 - DNA, 25 bp, Homo sapien
ttttctttgggaataagctcagatc

SEQ ID NO: 5453773 - DNA, 25 bp, Homo sapien
tctttgggaataagctcagatctga

SEQ ID NO: 5453774 - DNA, 25 bp, Homo sapien
ttctttgggaataagctcagatctg

SEQ ID NO: 5453775 - DNA, 25 bp, Homo sapien
ttttttctttgggaataagctcaga

SEQ ID NO: 5453776 - DNA, 25 bp, Homo sapien
cgaatgcgttgatggattccacagt

SEQ ID NO: 5453777 - DNA, 25 bp, Homo sapien
tgctgagaatcgacgcgaatgcgtt

SEQ ID NO: 5453778 - DNA, 25 bp, Homo sapien
tggattccacagttctaactatggg

SEQ ID NO: 5453779 - DNA, 25 bp, Homo sapien
gctgctgctgagaatcgacgcgaat

SEQ ID NO: 5453780 - DNA, 25 bp, Homo sapien
cagtattgtcttgaaatagataagg

SEQ ID NO: 5453781 - DNA, 25 bp, Homo sapien
tgaaatagataaggcctctcgtcca

SEQ ID NO: 5453782 - DNA, 25 bp, Homo sapien
tcactaggccctacacatttctgga

SEQ ID NO: 5453783 - DNA, 25 bp, Homo sapien
catttctggatatcatgagtttcag

SEQ ID NO: 5453784 - DNA, 25 bp, Homo sapien
gtttctcattttggcaactgagttg

SEQ ID NO: 5453785 - DNA, 25 bp, Homo sapien
ttctcattttggcaactgagttgaa

SEQ ID NO: 5453786 - DNA, 25 bp, Homo sapien
ctcattttggcaactgagttgaatt

SEQ ID NO: 5453787 - DNA, 25 bp, Homo sapien
cattttggcaactgagttgaatttg

SEQ ID NO: 5453788 - DNA, 25 bp, Homo sapien
tccaggatgggctcgtgactcaata

SEQ ID NO: 5453789 - DNA, 25 bp, Homo sapien
atggacgccgggcaagtcatccaag

SEQ ID NO: 5453790 - DNA, 25 bp, Homo sapien
ctcaataagaggcagtgtttctccc

SEQ ID NO: 5453791 - DNA, 25 bp, Homo sapien
aagcaaagcccagtgaagttccagg

SEQ ID NO: 5453792 - DNA, 25 bp, Homo sapien
ccaaaccttctagcagggtcccatg

SEQ ID NO: 5453793 - DNA, 25 bp, Homo sapien
ccccagcaccgaagatgtattccaa

SEQ ID NO: 5453794 - DNA, 25 bp, Homo sapien
cccatgtgaggtacaggactcggtg

SEQ ID NO: 5453795 - DNA, 25 bp, Homo sapien
ccatgtgaggtacaggactcggtga

SEQ ID NO: 5453796 - DNA, 25 bp, Homo sapien
taataaatctcaacagtccagggag

SEQ ID NO: 5453797 - DNA, 25 bp, Homo sapien
gaatgtgtaaacgtgtgatggtgac

SEQ ID NO: 5453798 - DNA, 25 bp, Homo sapien
tggtccatttgccagagatctgaga

SEQ ID NO: 5453799 - DNA, 25 bp, Homo sapien
tgttcccaggtgattgtcttgccga

SEQ ID NO: 5453800 - DNA, 25 bp, Homo sapien
tcatgataacaatcccaaggaaacc

SEQ ID NO: 5453801 - DNA, 25 bp, Homo sapien
ggcaacctggtacacggctgccttc

SEQ ID NO: 5453802 - DNA, 25 bp, Homo sapien
gaggaaaaccagctgtttttactca

SEQ ID NO: 5453803 - DNA, 25 bp, Homo sapien
caacctggtacacggctgccttctg

SEQ ID NO: 5453804 - DNA, 25 bp, Homo sapien
gggaaccctttgaatctgatgtctt

SEQ ID NO: 5453805 - DNA, 25 bp, Homo sapien
ttggcactggcgatataaaaagaag

SEQ ID NO: 5453806 - DNA, 25 bp, Homo sapien
tacagccaagttgtgctatacgctg

SEQ ID NO: 5453807 - DNA, 25 bp, Homo sapien
gcagtgacaggttataccaacagtt

SEQ ID NO: 5453808 - DNA, 25 bp, Homo sapien
caggttgccttgttagcagggccag

SEQ ID NO: 5453809 - DNA, 25 bp, Homo sapien
ggttgccttgttagcagggccagct

SEQ ID NO: 5453810 - DNA, 25 bp, Homo sapien
gaggcaggttgccttgttagcaggg

SEQ ID NO: 5453811 - DNA, 25 bp, Homo sapien
gcaggttgccttgttagcagggcca

SEQ ID NO: 5453812 - DNA, 25 bp, Homo sapien
cacatcgtctgaacaagtaatcagt

SEQ ID NO: 5453813 - DNA, 25 bp, Homo sapien
ctcacatcgtctgaacaagtaatca

SEQ ID NO: 5453814 - DNA, 25 bp, Homo sapien
cccaggactcacatcgtctgaacaa

SEQ ID NO: 5453815 - DNA, 25 bp, Homo sapien
ggactcacatcgtctgaacaagtaa

SEQ ID NO: 5453816 - DNA, 25 bp, Homo sapien
gaatacagcagtactctattaccca

SEQ ID NO: 5453817 - DNA, 25 bp, Homo sapien
gctcggtcatcgtttctgagtttgg

SEQ ID NO: 5453818 - DNA, 25 bp, Homo sapien
cacagtaggagttgtctagcctcac

SEQ ID NO: 5453819 - DNA, 25 bp, Homo sapien
ggtgacaagggaggtattaccagat

SEQ ID NO: 5453820 - DNA, 25 bp, Homo sapien
attccttgctgtttgagagttgtca

SEQ ID NO: 5453821 - DNA, 25 bp, Homo sapien
ttcagtgcctgccatacccattcct

SEQ ID NO: 5453822 - DNA, 25 bp, Homo sapien
cccattccttgctgtttgagagttg

SEQ ID NO: 5453823 - DNA, 25 bp, Homo sapien
cagtgcctgccatacccattccttg

SEQ ID NO: 5453824 - DNA, 25 bp, Homo sapien
tgtttttcagagattcggcaggaag

SEQ ID NO: 5453825 - DNA, 25 bp, Homo sapien
caacccgtcttttgtgaacaagtag

SEQ ID NO: 5453826 - DNA, 25 bp, Homo sapien
gcttggagtgcactggatgcttttc

SEQ ID NO: 5453827 - DNA, 25 bp, Homo sapien
gtcagcatgactggaactttgatca

SEQ ID NO: 5453828 - DNA, 25 bp, Homo sapien
tcagaactgatcaggtaaagccagc

SEQ ID NO: 5453829 - DNA, 25 bp, Homo sapien
gctctgagttagacccttctgtggc

SEQ ID NO: 5453830 - DNA, 25 bp, Homo sapien
gaagacaagttccagctttgtggga

SEQ ID NO: 5453831 - DNA, 25 bp, Homo sapien
tttgtgggaaatcctgtagccttcg

SEQ ID NO: 5453832 - DNA, 25 bp, Homo sapien
acagcttcagacttaggattgggtt

SEQ ID NO: 5453833 - DNA, 25 bp, Homo sapien
cttaggattgggttgccaagaaggt

SEQ ID NO: 5453834 - DNA, 25 bp, Homo sapien
tcagacttaggattgggttgccaag

SEQ ID NO: 5453835 - DNA, 25 bp, Homo sapien
caagaaggtggggacatgcagacac

SEQ ID NO: 5453836 - DNA, 25 bp, Homo sapien
caatatcccatgtcttggacttttg

SEQ ID NO: 5453837 - DNA, 25 bp, Homo sapien
tttgcagaactgcattctggtttgg

SEQ ID NO: 5453838 - DNA, 25 bp, Homo sapien
tgcagaactgcattctggtttggca

SEQ ID NO: 5453839 - DNA, 25 bp, Homo sapien
ggtttggcaatatcccatgtcttgg

SEQ ID NO: 5453840 - DNA, 25 bp, Homo sapien
gaacattcggtactgcgctagggat

SEQ ID NO: 5453841 - DNA, 25 bp, Homo sapien
cataagacactcttagggccattgg

SEQ ID NO: 5453842 - DNA, 25 bp, Homo sapien
cacttgagggactacggaacattcg

SEQ ID NO: 5453843 - DNA, 25 bp, Homo sapien
gagaaccacagacatattaagcagg

SEQ ID NO: 5453844 - DNA, 25 bp, Homo sapien
gagtttcctgctagatgtattacaa

SEQ ID NO: 5453845 - DNA, 25 bp, Homo sapien
ttggaacttgcagtgtggctatttc

SEQ ID NO: 5453846 - DNA, 25 bp, Homo sapien
ggctatttccgcttttcatttcatc

SEQ ID NO: 5453847 - DNA, 25 bp, Homo sapien
cacattcctttggaattggctcaca

SEQ ID NO: 5453848 - DNA, 25 bp, Homo sapien
cacttaagtccagcaagaatcactc

SEQ ID NO: 5453849 - DNA, 25 bp, Homo sapien
gctttgtgtcgtttctgccactgcc

SEQ ID NO: 5453850 - DNA, 25 bp, Homo sapien
gattgtcaaatataagcacttcccc

SEQ ID NO: 5453851 - DNA, 25 bp, Homo sapien
tttgagagaagcacaaatagttgct

SEQ ID NO: 5453852 - DNA, 25 bp, Homo sapien
agagatgttactcataaacgccctc

SEQ ID NO: 5453853 - DNA, 25 bp, Homo sapien
gagatgttactcataaacgccctca

SEQ ID NO: 5453854 - DNA, 25 bp, Homo sapien
catgtgtctaccagagatgttactc

SEQ ID NO: 5453855 - DNA, 25 bp, Homo sapien
ggctgatctcatgtgtctaccagag

SEQ ID NO: 5453856 - DNA, 25 bp, Homo sapien
aatcagttggagttcttggctggcc

SEQ ID NO: 5453857 - DNA, 25 bp, Homo sapien
gaaaccctagaaacatgatgcaaag

SEQ ID NO: 5453858 - DNA, 25 bp, Homo sapien
taaggtactcaagtgctagggtctg

SEQ ID NO: 5453859 - DNA, 25 bp, Homo sapien
tgtcaaccaagagcgaagccaagag

SEQ ID NO: 5453860 - DNA, 25 bp, Homo sapien
ggtaatcttctatgccctaatggga

SEQ ID NO: 5453861 - DNA, 25 bp, Homo sapien
ccaaagagtgtagggtgccttcacc

SEQ ID NO: 5453862 - DNA, 25 bp, Homo sapien
caaagtcaatatctcaaaggctggt

SEQ ID NO: 5453863 - DNA, 25 bp, Homo sapien
tgactgaaataggagaaccacgtcc

SEQ ID NO: 5453864 - DNA, 25 bp, Homo sapien
cttctgctaaatcctgggctgccag

SEQ ID NO: 5453865 - DNA, 25 bp, Homo sapien
aaatcctgggctgccagctggcaag

SEQ ID NO: 5453866 - DNA, 25 bp, Homo sapien
atcctgggctgccagctggcaaggc

SEQ ID NO: 5453867 - DNA, 25 bp, Homo sapien
ctaaatcctgggctgccagctggca

SEQ ID NO: 5453868 - DNA, 25 bp, Homo sapien
cacgtatgtgtcactgaaggtagac

SEQ ID NO: 5453869 - DNA, 25 bp, Homo sapien
agtgcatcacccctgttaaagcggc

SEQ ID NO: 5453870 - DNA, 25 bp, Homo sapien
gcagtacgagccacaaggtaaaaat

SEQ ID NO: 5453871 - DNA, 25 bp, Homo sapien
gcaaagaatcacgtatgtgtcactg

SEQ ID NO: 5453872 - DNA, 25 bp, Homo sapien
gagaaggctctgtattcccaactgc

SEQ ID NO: 5453873 - DNA, 25 bp, Homo sapien
tgtggtcttcccataggagaaggct

SEQ ID NO: 5453874 - DNA, 25 bp, Homo sapien
tggagagtcctttcatcactgcagt

SEQ ID NO: 5453875 - DNA, 25 bp, Homo sapien
tcctgtctgcctcgttggagagtcc

SEQ ID NO: 5453876 - DNA, 25 bp, Homo sapien
tggtaaagtcagtttcactccagag

SEQ ID NO: 5453877 - DNA, 25 bp, Homo sapien
ggttttatcagcaacacggtagtga

SEQ ID NO: 5453878 - DNA, 25 bp, Homo sapien
gcaacacggtagtgaacatcagaac

SEQ ID NO: 5453879 - DNA, 25 bp, Homo sapien
cagtttcactccagaggtttgacca

SEQ ID NO: 5453880 - DNA, 25 bp, Homo sapien
cttcccaggtatcttgacatagaga

SEQ ID NO: 5453881 - DNA, 25 bp, Homo sapien
gatgcacatactctggcctcttgga

SEQ ID NO: 5453882 - DNA, 25 bp, Homo sapien
ggcttcccaggtatcttgacataga

SEQ ID NO: 5453883 - DNA, 25 bp, Homo sapien
tgcacatactctggcctcttggaat

SEQ ID NO: 5453884 - DNA, 25 bp, Homo sapien
taagcttaaacaaccttgtgaggac

SEQ ID NO: 5453885 - DNA, 25 bp, Homo sapien
gacttttcatagtcaactatttggc

SEQ ID NO: 5453886 - DNA, 25 bp, Homo sapien
gggacccctaacatggcaacaacaa

SEQ ID NO: 5453887 - DNA, 25 bp, Homo sapien
tgtctgtaggctttgtccgcttctt

SEQ ID NO: 5453888 - DNA, 25 bp, Homo sapien
caatgtgagaaattctgggttaaaa

SEQ ID NO: 5453889 - DNA, 25 bp, Homo sapien
atgtgagaaattctgggttaaaagg

SEQ ID NO: 5453890 - DNA, 25 bp, Homo sapien
aatgtgagaaattctgggttaaaag

SEQ ID NO: 5453891 - DNA, 25 bp, Homo sapien
tcaatgtgagaaattctgggttaaa

SEQ ID NO: 5453892 - DNA, 25 bp, Homo sapien
ggtcattgagaggtactgagtattc

SEQ ID NO: 5453893 - DNA, 25 bp, Homo sapien
cgtctgagggtcattgagaggtact

SEQ ID NO: 5453894 - DNA, 25 bp, Homo sapien
tctgagggtcattgagaggtactga

SEQ ID NO: 5453895 - DNA, 25 bp, Homo sapien
ttgagaggtactgagtattctgggc

SEQ ID NO: 5453896 - DNA, 25 bp, Homo sapien
caagggacaggtctggtcccacagt

SEQ ID NO: 5453897 - DNA, 25 bp, Homo sapien
actgcgatctcgcagccttcttctc

SEQ ID NO: 5453898 - DNA, 25 bp, Homo sapien
tgagcttccaagcagaaagagctgt

SEQ ID NO: 5453899 - DNA, 25 bp, Homo sapien
gcccctgagcttccaagcagaaaga

SEQ ID NO: 5453900 - DNA, 25 bp, Homo sapien
aacggagccaccgtcatcagcctgg

SEQ ID NO: 5453901 - DNA, 25 bp, Homo sapien
gtttcagcacagagggcatggatga

SEQ ID NO: 5453902 - DNA, 25 bp, Homo sapien
gactgaagatatggctacagttccc

SEQ ID NO: 5453903 - DNA, 25 bp, Homo sapien
ggaaggattggataggtcacgcatt

SEQ ID NO: 5453904 - DNA, 25 bp, Homo sapien
tgacaggccatgacgggggctcaca

SEQ ID NO: 5453905 - DNA, 25 bp, Homo sapien
cttccctgatagaccacggccttca

SEQ ID NO: 5453906 - DNA, 25 bp, Homo sapien
ttccctgatagaccacggccttcat

SEQ ID NO: 5453907 - DNA, 25 bp, Homo sapien
tcaggaacaccagcggttggaaaaa

SEQ ID NO: 5453908 - DNA, 25 bp, Homo sapien
actggttactccatagcaggagatg

SEQ ID NO: 5453909 - DNA, 25 bp, Homo sapien
ggctggctgcaaccctctggattgt

SEQ ID NO: 5453910 - DNA, 25 bp, Homo sapien
tgaattgccttgaggaagcccaact

SEQ ID NO: 5453911 - DNA, 25 bp, Homo sapien
tacggcttcagaggataggaggaaa

SEQ ID NO: 5453912 - DNA, 25 bp, Homo sapien
tgttgacctctcttgactgcatggg

SEQ ID NO: 5453913 - DNA, 25 bp, Homo sapien
ggacagggtccagaaattctgtgac

SEQ ID NO: 5453914 - DNA, 25 bp, Homo sapien
gaaattctgtgacctcctcttctgc

SEQ ID NO: 5453915 - DNA, 25 bp, Homo sapien
tcaataccgcatctgtacgtgatag

SEQ ID NO: 5453916 - DNA, 25 bp, Homo sapien
ccgcatctgtacgtgatagaggtaa

SEQ ID NO: 5453917 - DNA, 25 bp, Homo sapien
taccgcatctgtacgtgatagaggt

SEQ ID NO: 5453918 - DNA, 25 bp, Homo sapien
catctgtacgtgatagaggtaaaag

SEQ ID NO: 5453919 - DNA, 25 bp, Homo sapien
catctcaatgtctctgcattctatg

SEQ ID NO: 5453920 - DNA, 25 bp, Homo sapien
cccacctggcgatgtgaaacttctg

SEQ ID NO: 5453921 - DNA, 25 bp, Homo sapien
tctgcattctatggctttccagtct

SEQ ID NO: 5453922 - DNA, 25 bp, Homo sapien
ccttctctcggcatttctgcaccag

SEQ ID NO: 5453923 - DNA, 25 bp, Homo sapien
atcagccctagaagaatcacccatg

SEQ ID NO: 5453924 - DNA, 25 bp, Homo sapien
ccctagaagaatcacccatgagcca

SEQ ID NO: 5453925 - DNA, 25 bp, Homo sapien
taccatgtgacgtggctgttccatg

SEQ ID NO: 5453926 - DNA, 25 bp, Homo sapien
cctttgaggttcctgattaccatgt

SEQ ID NO: 5453927 - DNA, 25 bp, Homo sapien
cagcatttcccaggggggcaggcag

SEQ ID NO: 5453928 - DNA, 25 bp, Homo sapien
catttgatgtagaagcaactgctgt

SEQ ID NO: 5453929 - DNA, 25 bp, Homo sapien
tgtagaagcaactgctgtgctgttt

SEQ ID NO: 5453930 - DNA, 25 bp, Homo sapien
tgtcacatttgatgtagaagcaact

SEQ ID NO: 5453931 - DNA, 25 bp, Homo sapien
tgatgtagaagcaactgctgtgctg

SEQ ID NO: 5453932 - DNA, 25 bp, Homo sapien
tgaacaagagtgatagatcctttgc

SEQ ID NO: 5453933 - DNA, 25 bp, Homo sapien
aatactgaacaagagtgatagatcc

SEQ ID NO: 5453934 - DNA, 25 bp, Homo sapien
acaagagtgatagatcctttgcccc

SEQ ID NO: 5453935 - DNA, 25 bp, Homo sapien
tttaaatactgaacaagagtgatag

SEQ ID NO: 5453936 - DNA, 25 bp, Homo sapien
gatgcatagctaaaagctcaatgtt

SEQ ID NO: 5453937 - DNA, 25 bp, Homo sapien
gcacctagaagatgcatagctaaaa

SEQ ID NO: 5453938 - DNA, 25 bp, Homo sapien
tagaagatgcatagctaaaagctca

SEQ ID NO: 5453939 - DNA, 25 bp, Homo sapien
tgttgagcacctagaagatgcatag

SEQ ID NO: 5453940 - DNA, 25 bp, Homo sapien
ttgttacttgcaggcgaaagccctt

SEQ ID NO: 5453941 - DNA, 25 bp, Homo sapien
cacgagtgctggcaatatggagcta

SEQ ID NO: 5453942 - DNA, 25 bp, Homo sapien
ggaaaaactcgagagaatcccagag

SEQ ID NO: 5453943 - DNA, 25 bp, Homo sapien
tgaagcccttcatgcctacaaagca

SEQ ID NO: 5453944 - DNA, 25 bp, Homo sapien
tccaagttgagcctcatatctgtga

SEQ ID NO: 5453945 - DNA, 25 bp, Homo sapien
caagttgagcctcatatctgtgagg

SEQ ID NO: 5453946 - DNA, 25 bp, Homo sapien
cctttgcctggtgtttggaagtcca

SEQ ID NO: 5453947 - DNA, 25 bp, Homo sapien
ctcccctgctatagaatgactctgc

SEQ ID NO: 5453948 - DNA, 25 bp, Homo sapien
gcaagaggttctccgagaagagtga

SEQ ID NO: 5453949 - DNA, 25 bp, Homo sapien
ttctgagcacaaaagtccaagacat

SEQ ID NO: 5453950 - DNA, 25 bp, Homo sapien
tctccgagaagagtgaggtaactcc

SEQ ID NO: 5453951 - DNA, 25 bp, Homo sapien
atagcggcaaaatctctcagcactg

SEQ ID NO: 5453952 - DNA, 25 bp, Homo sapien
gtttcctagagcactatcaaccttg

SEQ ID NO: 5453953 - DNA, 25 bp, Homo sapien
cctaaagaacctgagaactatggac

SEQ ID NO: 5453954 - DNA, 25 bp, Homo sapien
cttccttggcttaaaacagcattga

SEQ ID NO: 5453955 - DNA, 25 bp, Homo sapien
tgcactgaagatgcgattcctaaag

SEQ ID NO: 5453956 - DNA, 25 bp, Homo sapien
tgcggtgagcggagatcgcgccact

SEQ ID NO: 5453957 - DNA, 25 bp, Homo sapien
tcgcttgaacccgggaggcggagct

SEQ ID NO: 5453958 - DNA, 25 bp, Homo sapien
cctgtagtcccagctactcaggagg

SEQ ID NO: 5453959 - DNA, 25 bp, Homo sapien
atttagctgggcgtggtagcacaca

SEQ ID NO: 5453960 - DNA, 25 bp, Homo sapien
ctttatagcgaaacatttcatttgg

SEQ ID NO: 5453961 - DNA, 25 bp, Homo sapien
gctttatagcgaaacatttcatttg

SEQ ID NO: 5453962 - DNA, 25 bp, Homo sapien
tttatagcgaaacatttcatttgga

SEQ ID NO: 5453963 - DNA, 25 bp, Homo sapien
aacaactggattgatcaatgccagg

SEQ ID NO: 5453964 - DNA, 25 bp, Homo sapien
atcaagcttggatgcgtagtggcct

SEQ ID NO: 5453965 - DNA, 25 bp, Homo sapien
cttggatgcgtagtggcctgactga

SEQ ID NO: 5453966 - DNA, 25 bp, Homo sapien
aagcttggatgcgtagtggcctgac

SEQ ID NO: 5453967 - DNA, 25 bp, Homo sapien
taaaggattcatcattggtttattt

SEQ ID NO: 5453968 - DNA, 25 bp, Homo sapien
taatatttacacacaagttctcaga

SEQ ID NO: 5453969 - DNA, 25 bp, Homo sapien
agttctcagagtttcacattttaaa

SEQ ID NO: 5453970 - DNA, 25 bp, Homo sapien
tcaatacagtaataagaattttcaa

SEQ ID NO: 5453971 - DNA, 25 bp, Homo sapien
aagcacagcctgcttatcctttcag

SEQ ID NO: 5453972 - DNA, 25 bp, Homo sapien
gaagcctgaatctgtctgggcaaat

SEQ ID NO: 5453973 - DNA, 25 bp, Homo sapien
aatcctcattatctgcaggggatga

SEQ ID NO: 5453974 - DNA, 25 bp, Homo sapien
aagcctgaatctgtctgggcaaatc

SEQ ID NO: 5453975 - DNA, 25 bp, Homo sapien
ctgccagcagttgagctccagctgc

SEQ ID NO: 5453976 - DNA, 25 bp, Homo sapien
gctggatccagcatccacaattagg

SEQ ID NO: 5453977 - DNA, 25 bp, Homo sapien
ctgctatgtgtagttcaggagctgg

SEQ ID NO: 5453978 - DNA, 25 bp, Homo sapien
tgggtggctggatccagcatccaca

SEQ ID NO: 5453979 - DNA, 25 bp, Homo sapien
aaaaaaatggagtctcactctgtca

SEQ ID NO: 5453980 - DNA, 25 bp, Homo sapien
gtctcagctcactgcaaccaccgcc

SEQ ID NO: 5453981 - DNA, 25 bp, Homo sapien
tccaggctagagtgcagtggtgtgg

SEQ ID NO: 5453982 - DNA, 25 bp, Homo sapien
tctgctctagattatttctttaaaa

SEQ ID NO: 5453983 - DNA, 25 bp, Homo sapien
gctgattgaccaagctgccaagagt

SEQ ID NO: 5453984 - DNA, 25 bp, Homo sapien
ctgattgaccaagctgccaagagtt

SEQ ID NO: 5453985 - DNA, 25 bp, Homo sapien
tccacagggctgcaacttgggtaca

SEQ ID NO: 5453986 - DNA, 25 bp, Homo sapien
aaacaaggcttggattccacagggc

SEQ ID NO: 5453987 - DNA, 25 bp, Homo sapien
aagcagcggcctggctaagcagcca

SEQ ID NO: 5453988 - DNA, 25 bp, Homo sapien
gacattcctgccagcccggcagggt

SEQ ID NO: 5453989 - DNA, 25 bp, Homo sapien
ctagcatgaatagagaactgttttc

SEQ ID NO: 5453990 - DNA, 25 bp, Homo sapien
tgcctagcatgtagcgtgctcagtt

SEQ ID NO: 5453991 - DNA, 25 bp, Homo sapien
gctgtctcccctgcacttagaagag

SEQ ID NO: 5453992 - DNA, 25 bp, Homo sapien
cttccccatttgaatagaagacaca

SEQ ID NO: 5453993 - DNA, 25 bp, Homo sapien
cagctctggcagctgtgtcagaaaa

SEQ ID NO: 5453994 - DNA, 25 bp, Homo sapien
ctcaaattctgccagctctggcagc

SEQ ID NO: 5453995 - DNA, 25 bp, Homo sapien
ctctggcagctgtgtcagaaaatat

SEQ ID NO: 5453996 - DNA, 25 bp, Homo sapien
tcaaattctgccagctctggcagct

SEQ ID NO: 5453997 - DNA, 25 bp, Homo sapien
tgtaccaacccaaaaagcatgccca

SEQ ID NO: 5453998 - DNA, 25 bp, Homo sapien
tcttctttgagtcaagcacctttgt

SEQ ID NO: 5453999 - DNA, 25 bp, Homo sapien
tgcccactacgggtggagcagtgcc

SEQ ID NO: 5454000 - DNA, 25 bp, Homo sapien
gagcagtgccctcacaagtcgttac

SEQ ID NO: 5454001 - DNA, 25 bp, Homo sapien
ttctccaattgtaaccaggggccat

SEQ ID NO: 5454002 - DNA, 25 bp, Homo sapien
gtaaacacacgcatacttgttttgt

SEQ ID NO: 5454003 - DNA, 25 bp, Homo sapien
ctgtaaacacacgcatacttgtttt

SEQ ID NO: 5454004 - DNA, 25 bp, Homo sapien
acattttctccaattgtaaccaggg

SEQ ID NO: 5454005 - DNA, 25 bp, Homo sapien
taatacaaaagttaatgagaaccgc

SEQ ID NO: 5454006 - DNA, 25 bp, Homo sapien
gaatagagcctttgtcctaatctta

SEQ ID NO: 5454007 - DNA, 25 bp, Homo sapien
cctaatcttattaagttgctccaga

SEQ ID NO: 5454008 - DNA, 25 bp, Homo sapien
cgcacatgtgcatcaagaagagaat

SEQ ID NO: 5454009 - DNA, 25 bp, Homo sapien
gtgttaccagttgaagatagtgttc

SEQ ID NO: 5454010 - DNA, 25 bp, Homo sapien
gatagtgttcttgtattccataaat

SEQ ID NO: 5454011 - DNA, 25 bp, Homo sapien
tgaagatagtgttcttgtattccat

SEQ ID NO: 5454012 - DNA, 25 bp, Homo sapien
cttgtgttaccagttgaagatagtg

SEQ ID NO: 5454013 - DNA, 25 bp, Homo sapien
aaattattaatgtctggagaattca

SEQ ID NO: 5454014 - DNA, 25 bp, Homo sapien
gctctggacgtcgatctatgtctac

SEQ ID NO: 5454015 - DNA, 25 bp, Homo sapien
gcagttctagctcagaaatccctac

SEQ ID NO: 5454016 - DNA, 25 bp, Homo sapien
cagaaatccctacaaaggctttgtt

SEQ ID NO: 5454017 - DNA, 25 bp, Homo sapien
gctggctctggacgtcgatctatgt

SEQ ID NO: 5454018 - DNA, 25 bp, Homo sapien
aaactcttcccttgcacagggaagc

SEQ ID NO: 5454019 - DNA, 25 bp, Homo sapien
tttttccttagactgctgaagcctg

SEQ ID NO: 5454020 - DNA, 25 bp, Homo sapien
tggctgcatttttccttagactgct

SEQ ID NO: 5454021 - DNA, 25 bp, Homo sapien
gaagctgtgcaaggcggctccttgt

SEQ ID NO: 5454022 - DNA, 25 bp, Homo sapien
gtcaagtaaagtcaatagtgcttta

SEQ ID NO: 5454023 - DNA, 25 bp, Homo sapien
aagtcaagtaaagtcaatagtgctt

SEQ ID NO: 5454024 - DNA, 25 bp, Homo sapien
caagtaaagtcaatagtgctttact

SEQ ID NO: 5454025 - DNA, 25 bp, Homo sapien
caagtcaagtaaagtcaatagtgct

SEQ ID NO: 5454026 - DNA, 25 bp, Homo sapien
tttgtaaccatcattctgctgtggg

SEQ ID NO: 5454027 - DNA, 25 bp, Homo sapien
ttgtaaccatcattctgctgtggga

SEQ ID NO: 5454028 - DNA, 25 bp, Homo sapien
tgtaaccatcattctgctgtgggag

SEQ ID NO: 5454029 - DNA, 25 bp, Homo sapien
ctttgtaaccatcattctgctgtgg

SEQ ID NO: 5454030 - DNA, 25 bp, Homo sapien
ttgttcccaagacttctggaaattc

SEQ ID NO: 5454031 - DNA, 25 bp, Homo sapien
cttgttcccaagacttctggaaatt

SEQ ID NO: 5454032 - DNA, 25 bp, Homo sapien
caaagtctaaaatgatagcatcggc

SEQ ID NO: 5454033 - DNA, 25 bp, Homo sapien
ccatcgctcaaatcctgcttgtctc

SEQ ID NO: 5454034 - DNA, 25 bp, Homo sapien
tgtctactgagatggaagcctctcg

SEQ ID NO: 5454035 - DNA, 25 bp, Homo sapien
tagcatcggcattttgcatcctctg

SEQ ID NO: 5454036 - DNA, 25 bp, Homo sapien
cagggtcccgctgaacaaattggtt

SEQ ID NO: 5454037 - DNA, 25 bp, Homo sapien
tagcctcgatggagcaagtgttcgc

SEQ ID NO: 5454038 - DNA, 25 bp, Homo sapien
tcaacattctgctccggaaggcggt

SEQ ID NO: 5454039 - DNA, 25 bp, Homo sapien
gaaggcggtctgcagtgttccctgc

SEQ ID NO: 5454040 - DNA, 25 bp, Homo sapien
tcttgcaacaattccagaggcatag

SEQ ID NO: 5454041 - DNA, 25 bp, Homo sapien
caatagctggtagttcttgcaacaa

SEQ ID NO: 5454042 - DNA, 25 bp, Homo sapien
tccagaggcatagctttcaggtcct

SEQ ID NO: 5454043 - DNA, 25 bp, Homo sapien
ctcttcttctccaatagctggtagt

SEQ ID NO: 5454044 - DNA, 25 bp, Homo sapien
tctgaattgatagttcctttccttg

SEQ ID NO: 5454045 - DNA, 25 bp, Homo sapien
gaatgggaatgatggtatcagcaaa

SEQ ID NO: 5454046 - DNA, 25 bp, Homo sapien
tgaggtaactgtctggtgttgaaac

SEQ ID NO: 5454047 - DNA, 25 bp, Homo sapien
gagcaggttatggtaaatctgtgcc

SEQ ID NO: 5454048 - DNA, 25 bp, Homo sapien
ttcagagcaaggaaccaaggtggct

SEQ ID NO: 5454049 - DNA, 25 bp, Homo sapien
gatacaggctgagacttccactgcc

SEQ ID NO: 5454050 - DNA, 25 bp, Homo sapien
tgcactgggtctaaggaacattgcc

SEQ ID NO: 5454051 - DNA, 25 bp, Homo sapien
cagaagcgaggcaatgcagtccagc

SEQ ID NO: 5454052 - DNA, 25 bp, Homo sapien
tccaggtgtcaagcaaggactcaga

SEQ ID NO: 5454053 - DNA, 25 bp, Homo sapien
tatttcccctgcaagagctagtggt

SEQ ID NO: 5454054 - DNA, 25 bp, Homo sapien
cagggccgaaggttgcattctcaaa

SEQ ID NO: 5454055 - DNA, 25 bp, Homo sapien
gcagctgggcgtcattacactcaat

SEQ ID NO: 5454056 - DNA, 25 bp, Homo sapien
gagaaacacttccaagcacacgatg

SEQ ID NO: 5454057 - DNA, 25 bp, Homo sapien
taacataccgactattcctgaatcc

SEQ ID NO: 5454058 - DNA, 25 bp, Homo sapien
tatctttacacacctaacataccga

SEQ ID NO: 5454059 - DNA, 25 bp, Homo sapien
caagcacacgatgtgaatttgtatc

SEQ ID NO: 5454060 - DNA, 25 bp, Homo sapien
gacaactgttctgcaggagacgtcc

SEQ ID NO: 5454061 - DNA, 25 bp, Homo sapien
ggacaactgttctgcaggagacgtc

SEQ ID NO: 5454062 - DNA, 25 bp, Homo sapien
aggacaactgttctgcaggagacgt

SEQ ID NO: 5454063 - DNA, 25 bp, Homo sapien
attttcagggctcagagaacagaca

SEQ ID NO: 5454064 - DNA, 25 bp, Homo sapien
gacaatctgtgaaatgcatattcac

SEQ ID NO: 5454065 - DNA, 25 bp, Homo sapien
ttttcagggctcagagaacagacaa

SEQ ID NO: 5454066 - DNA, 25 bp, Homo sapien
tccaaatcacttttagtaatctgcc

SEQ ID NO: 5454067 - DNA, 25 bp, Homo sapien
aaaatgaagcaagggctctccggtt

SEQ ID NO: 5454068 - DNA, 25 bp, Homo sapien
caaatcacttttagtaatctgcctt

SEQ ID NO: 5454069 - DNA, 25 bp, Homo sapien
aatcacttttagtaatctgcctttt

SEQ ID NO: 5454070 - DNA, 25 bp, Homo sapien
aggagagtcagtgggcagtatcttc

SEQ ID NO: 5454071 - DNA, 25 bp, Homo sapien
gtgggcagtatcttcctaacaccat

SEQ ID NO: 5454072 - DNA, 25 bp, Homo sapien
gagtcagtgggcagtatcttcctaa

SEQ ID NO: 5454073 - DNA, 25 bp, Homo sapien
tgaaggtttactgaaaggagagtca

SEQ ID NO: 5454074 - DNA, 25 bp, Homo sapien
attaagatacatcaggaccaaatta

SEQ ID NO: 5454075 - DNA, 25 bp, Homo sapien
aattaagatacatcaggaccaaatt

SEQ ID NO: 5454076 - DNA, 25 bp, Homo sapien
taagatacatcaggaccaaattata

SEQ ID NO: 5454077 - DNA, 25 bp, Homo sapien
ttaagatacatcaggaccaaattat

SEQ ID NO: 5454078 - DNA, 25 bp, Homo sapien
caaatggagctctaggccttgagta

SEQ ID NO: 5454079 - DNA, 25 bp, Homo sapien
cataatcttgtgaccaggtggcgtg

SEQ ID NO: 5454080 - DNA, 25 bp, Homo sapien
taagatccgacaacatatcgtcagg

SEQ ID NO: 5454081 - DNA, 25 bp, Homo sapien
ttagaaacctgagccaatgtgacct

SEQ ID NO: 5454082 - DNA, 25 bp, Homo sapien
cagacgctgcagttacggttactac

SEQ ID NO: 5454083 - DNA, 25 bp, Homo sapien
gcagtcacaacaaaagcctcagcca

SEQ ID NO: 5454084 - DNA, 25 bp, Homo sapien
caacctaatagggaactctggagca

SEQ ID NO: 5454085 - DNA, 25 bp, Homo sapien
gatcagtggccacaaaccatgtagc

SEQ ID NO: 5454086 - DNA, 25 bp, Homo sapien
gcacacaatctcatctattttgaca

SEQ ID NO: 5454087 - DNA, 25 bp, Homo sapien
cacagagatagtcctatccttattc

SEQ ID NO: 5454088 - DNA, 25 bp, Homo sapien
caaattctgagaccgagagtaaaac

SEQ ID NO: 5454089 - DNA, 25 bp, Homo sapien
aatactgtggtaacaatttatagat

SEQ ID NO: 5454090 - DNA, 25 bp, Homo sapien
tggcaagtaacttttgaagctggac

SEQ ID NO: 5454091 - DNA, 25 bp, Homo sapien
tgtggacgctaccaaaaagctcatt

SEQ ID NO: 5454092 - DNA, 25 bp, Homo sapien
taacatgaggcaaagattaagcact

SEQ ID NO: 5454093 - DNA, 25 bp, Homo sapien
gagaacacggatctcgcctatgaaa

SEQ ID NO: 5454094 - DNA, 25 bp, Homo sapien
tgaagagaagaaggtccagcaaaga

SEQ ID NO: 5454095 - DNA, 25 bp, Homo sapien
cttctgaagagaagaaggtccagca

SEQ ID NO: 5454096 - DNA, 25 bp, Homo sapien
gagaagcaagctgcattcacagcat

SEQ ID NO: 5454097 - DNA, 25 bp, Homo sapien
gcattcacagcattgctcccttttg

SEQ ID NO: 5454098 - DNA, 25 bp, Homo sapien
gcaatactccctgcatatgtgcaag

SEQ ID NO: 5454099 - DNA, 25 bp, Homo sapien
tccctgcatatgtgcaagtctgcat

SEQ ID NO: 5454100 - DNA, 25 bp, Homo sapien
tcagtgcaatactccctgcatatgt

SEQ ID NO: 5454101 - DNA, 25 bp, Homo sapien
gtgcaagtctgcatgagaggtcccc

SEQ ID NO: 5454102 - DNA, 25 bp, Homo sapien
gaaaacagaggtcaaacacttcagt

SEQ ID NO: 5454103 - DNA, 25 bp, Homo sapien
aacagaggtcaaacacttcagttta

SEQ ID NO: 5454104 - DNA, 25 bp, Homo sapien
ctgccagccaacgaatcagaaacag

SEQ ID NO: 5454105 - DNA, 25 bp, Homo sapien
cagccaacgaatcagaaacagatga

SEQ ID NO: 5454106 - DNA, 25 bp, Homo sapien
gcgcggtgactcacgcctgtaatcc

SEQ ID NO: 5454107 - DNA, 25 bp, Homo sapien
ctattccagataaaatgccaagggc

SEQ ID NO: 5454108 - DNA, 25 bp, Homo sapien
gccgggcgcggtgactcacgcctgt

SEQ ID NO: 5454109 - DNA, 25 bp, Homo sapien
ttccagataaaatgccaagggcttg

SEQ ID NO: 5454110 - DNA, 25 bp, Homo sapien
cacctcatgcctagtattattttgg

SEQ ID NO: 5454111 - DNA, 25 bp, Homo sapien
tgacaccctccaaggttctacaagg

SEQ ID NO: 5454112 - DNA, 25 bp, Homo sapien
cattttgggactcaatgacagctct

SEQ ID NO: 5454113 - DNA, 25 bp, Homo sapien
caaatcagagaggtcacctcatgcc

SEQ ID NO: 5454114 - DNA, 25 bp, Homo sapien
cagtcagtaggattaatgatcagag

SEQ ID NO: 5454115 - DNA, 25 bp, Homo sapien
tgaaatagtccactcagtcagtagg

SEQ ID NO: 5454116 - DNA, 25 bp, Homo sapien
ggctctcagaatggaaccacccatt

SEQ ID NO: 5454117 - DNA, 25 bp, Homo sapien
gatcagagattatgacacaactaaa

SEQ ID NO: 5454118 - DNA, 25 bp, Homo sapien
cgtttcaatgcagcctgcacaattc

SEQ ID NO: 5454119 - DNA, 25 bp, Homo sapien
taactttcttcctaaatatgagatc

SEQ ID NO: 5454120 - DNA, 25 bp, Homo sapien
tatccatctgaccaactctttaact

SEQ ID NO: 5454121 - DNA, 25 bp, Homo sapien
tgcacaattcatggggcagggtcct

SEQ ID NO: 5454122 - DNA, 25 bp, Homo sapien
tggttgactgctgagtcctcatgga

SEQ ID NO: 5454123 - DNA, 25 bp, Homo sapien
tgagtcctcatggaagaattcccat

SEQ ID NO: 5454124 - DNA, 25 bp, Homo sapien
tctacatgtaattgtccaactttgg

SEQ ID NO: 5454125 - DNA, 25 bp, Homo sapien
aagaattcccattctgcccctgagc

SEQ ID NO: 5454126 - DNA, 25 bp, Homo sapien
caaggtctcgctgccagtgaaaaat

SEQ ID NO: 5454127 - DNA, 25 bp, Homo sapien
atttttcactggcagcgagaccttg

SEQ ID NO: 5454128 - DNA, 25 bp, Homo sapien
ttcttggggtaagttcgacgagcaa

SEQ ID NO: 5454129 - DNA, 25 bp, Homo sapien
taaagaactcttctgcagcatcaag

SEQ ID NO: 5454130 - DNA, 25 bp, Homo sapien
gacgagcaagcttaaagaactcttc

SEQ ID NO: 5454131 - DNA, 25 bp, Homo sapien
gggtaagttcgacgagcaagcttaa

SEQ ID NO: 5454132 - DNA, 25 bp, Homo sapien
catgtcgatgggaaaaagcaatcta

SEQ ID NO: 5454133 - DNA, 25 bp, Homo sapien
aaaaactgctggcaagataggaacc

SEQ ID NO: 5454134 - DNA, 25 bp, Homo sapien
caatgagcaagtaagacgtttatta

SEQ ID NO: 5454135 - DNA, 25 bp, Homo sapien
cctaacaaatgtagagacacgcctt

SEQ ID NO: 5454136 - DNA, 25 bp, Homo sapien
acatctctcgagctttccttgtgtt

SEQ ID NO: 5454137 - DNA, 25 bp, Homo sapien
aacaaagagatatctctctgagagc

SEQ ID NO: 5454138 - DNA, 25 bp, Homo sapien
gtttagtcactgacaacaaagagtc

SEQ ID NO: 5454139 - DNA, 25 bp, Homo sapien
cagttttaacaacatctctcgagct

SEQ ID NO: 5454140 - DNA, 25 bp, Homo sapien
tatggatatcatagttgagcttctg

SEQ ID NO: 5454141 - DNA, 25 bp, Homo sapien
tatcatagttgagcttctgccactc

SEQ ID NO: 5454142 - DNA, 25 bp, Homo sapien
catctgtttcttacttcccttcgaa

SEQ ID NO: 5454143 - DNA, 25 bp, Homo sapien
gaacctgccgcagggtatggatatc

SEQ ID NO: 5454144 - DNA, 25 bp, Homo sapien
cttccataactccaagaatacgctt

SEQ ID NO: 5454145 - DNA, 25 bp, Homo sapien
aaacttccttgtactccctctatga

SEQ ID NO: 5454146 - DNA, 25 bp, Homo sapien
cctcagagatagctattgttgaaca

SEQ ID NO: 5454147 - DNA, 25 bp, Homo sapien
tctttttctgatagctacttccata

SEQ ID NO: 5454148 - DNA, 25 bp, Homo sapien
catgcactatataccaccctttggg

SEQ ID NO: 5454149 - DNA, 25 bp, Homo sapien
tacacggtgggaatctggattatca

SEQ ID NO: 5454150 - DNA, 25 bp, Homo sapien
gaaaagcattaagctcccacgtgga

SEQ ID NO: 5454151 - DNA, 25 bp, Homo sapien
tagttctgccgctactgaagagtac

SEQ ID NO: 5454152 - DNA, 25 bp, Homo sapien
ggagtcttatagtcctttccaaaga

SEQ ID NO: 5454153 - DNA, 25 bp, Homo sapien
ctgatttaggggagtcttatagtcc

SEQ ID NO: 5454154 - DNA, 25 bp, Homo sapien
tgatttaggggagtcttatagtcct

SEQ ID NO: 5454155 - DNA, 25 bp, Homo sapien
taggggagtcttatagtcctttcca

SEQ ID NO: 5454156 - DNA, 25 bp, Homo sapien
tacccttcttaacatgctttctagg

SEQ ID NO: 5454157 - DNA, 25 bp, Homo sapien
ccttcttaacatgctttctaggttt

SEQ ID NO: 5454158 - DNA, 25 bp, Homo sapien
atcctgatggccatacccttcttaa

SEQ ID NO: 5454159 - DNA, 25 bp, Homo sapien
gatggccatacccttcttaacatgc

SEQ ID NO: 5454160 - DNA, 25 bp, Homo sapien
tgaatgaacctgcatgcctcgacca

SEQ ID NO: 5454161 - DNA, 25 bp, Homo sapien
tatcctccggcacaccttgaatgaa

SEQ ID NO: 5454162 - DNA, 25 bp, Homo sapien
gaatacagtttcaatcccaagaagg

SEQ ID NO: 5454163 - DNA, 25 bp, Homo sapien
gacacttgggaacaccactctatcc

SEQ ID NO: 5454164 - DNA, 25 bp, Homo sapien
gcctggacggtgtcaaggagggcac

SEQ ID NO: 5454165 - DNA, 25 bp, Homo sapien
acggtgtcaaggagggcaccctctt

SEQ ID NO: 5454166 - DNA, 25 bp, Homo sapien
ctgactctctgcatctaccaggcat

SEQ ID NO: 5454167 - DNA, 25 bp, Homo sapien
ctcttccggcactacaaaagctgac

SEQ ID NO: 5454168 - DNA, 25 bp, Homo sapien
aagttgtttatctctgcttgacact

SEQ ID NO: 5454169 - DNA, 25 bp, Homo sapien
caaagctcatgggacagcttgaagg

SEQ ID NO: 5454170 - DNA, 25 bp, Homo sapien
ccaaagctcatgggacagcttgaag

SEQ ID NO: 5454171 - DNA, 25 bp, Homo sapien
aagctcatgggacagcttgaaggga

SEQ ID NO: 5454172 - DNA, 25 bp, Homo sapien
gctcatgggacagcttgaagggatc

SEQ ID NO: 5454173 - DNA, 25 bp, Homo sapien
caaagggcagacgatgactctactt

SEQ ID NO: 5454174 - DNA, 25 bp, Homo sapien
tatgggttaaattgactccccgcaa

SEQ ID NO: 5454175 - DNA, 25 bp, Homo sapien
gaaaagacagtccagaacaaagggc

SEQ ID NO: 5454176 - DNA, 25 bp, Homo sapien
taaagctaggcctacttaggactcc

SEQ ID NO: 5454177 - DNA, 25 bp, Homo sapien
gattcaaagagtggacaccctgtcc

SEQ ID NO: 5454178 - DNA, 25 bp, Homo sapien
tatttttgcagactgccgaggccgg

SEQ ID NO: 5454179 - DNA, 25 bp, Homo sapien
ttacaagctgttgcatgcccactcc

SEQ ID NO: 5454180 - DNA, 25 bp, Homo sapien
aatggataaacgcaggtccctgagg

SEQ ID NO: 5454181 - DNA, 25 bp, Homo sapien
tgaaaaatgcaactccacagccagg

SEQ ID NO: 5454182 - DNA, 25 bp, Homo sapien
ggcacctgaaccttctacttcttag

SEQ ID NO: 5454183 - DNA, 25 bp, Homo sapien
cacagccaggtctggcaatctgtgg

SEQ ID NO: 5454184 - DNA, 25 bp, Homo sapien
tctggcaatctgtggctccaacaca

SEQ ID NO: 5454185 - DNA, 25 bp, Homo sapien
tcaaattgtacagggttctgtcgtc

SEQ ID NO: 5454186 - DNA, 25 bp, Homo sapien
ctttggcctgctgattacgaatgac

SEQ ID NO: 5454187 - DNA, 25 bp, Homo sapien
caccagagttgctccaaatgaggaa

SEQ ID NO: 5454188 - DNA, 25 bp, Homo sapien
tctgtcgtcgtctgcctctgtgtgg

SEQ ID NO: 5454189 - DNA, 25 bp, Homo sapien
gcagcttccattcatgataacaaac

SEQ ID NO: 5454190 - DNA, 25 bp, Homo sapien
tccattcatgataacaaacttgatg

SEQ ID NO: 5454191 - DNA, 25 bp, Homo sapien
gcttccattcatgataacaaacttg

SEQ ID NO: 5454192 - DNA, 25 bp, Homo sapien
ttcatgataacaaacttgatgccct

SEQ ID NO: 5454193 - DNA, 25 bp, Homo sapien
agcagcacacggttctcagccagtc

SEQ ID NO: 5454194 - DNA, 25 bp, Homo sapien
cagcagcacacggttctcagccagt

SEQ ID NO: 5454195 - DNA, 25 bp, Homo sapien
agcacacggttctcagccagtccct

SEQ ID NO: 5454196 - DNA, 25 bp, Homo sapien
cagcagcagcacacggttctcagcc

SEQ ID NO: 5454197 - DNA, 25 bp, Homo sapien
gccgcggcgagcgatcgaggctggg

SEQ ID NO: 5454198 - DNA, 25 bp, Homo sapien
gcagcccgggcgtcgcgggctggtc

SEQ ID NO: 5454199 - DNA, 25 bp, Homo sapien
gcgtcgcgggctggtccgcgcgcat

SEQ ID NO: 5454200 - DNA, 25 bp, Homo sapien
gcctggggccgagtcgccgcggcga

SEQ ID NO: 5454201 - DNA, 25 bp, Homo sapien
ttccccgagcgcaatttggggcgca

SEQ ID NO: 5454202 - DNA, 25 bp, Homo sapien
gcaatttggggcgcatgcgtccacg

SEQ ID NO: 5454203 - DNA, 25 bp, Homo sapien
cctcttttaattccccgagcgcaat

SEQ ID NO: 5454204 - DNA, 25 bp, Homo sapien
ctcctctccttgcgttttgtttggg

SEQ ID NO: 5454205 - DNA, 25 bp, Homo sapien
acaaactcgccagaagctgaaatac

SEQ ID NO: 5454206 - DNA, 25 bp, Homo sapien
cagcatggctgaaaatgcctagggc

SEQ ID NO: 5454207 - DNA, 25 bp, Homo sapien
tcccagcatggctgaaaatgcctag

SEQ ID NO: 5454208 - DNA, 25 bp, Homo sapien
tcacaaactcgccagaagctgaaat

SEQ ID NO: 5454209 - DNA, 25 bp, Homo sapien
tagcctatggctgagtcgtatctct

SEQ ID NO: 5454210 - DNA, 25 bp, Homo sapien
caagcaaaccaaatgtttgtagcct

SEQ ID NO: 5454211 - DNA, 25 bp, Homo sapien
catatgctatcatggtggaccagtc

SEQ ID NO: 5454212 - DNA, 25 bp, Homo sapien
tcggtgcacatgctcatggtggtca

SEQ ID NO: 5454213 - DNA, 25 bp, Homo sapien
tttcggcattccaatttgaacacac

SEQ ID NO: 5454214 - DNA, 25 bp, Homo sapien
ctccaagtaaaatggtaacaacgcg

SEQ ID NO: 5454215 - DNA, 25 bp, Homo sapien
tcattcctccaagtaaaatggtaac

SEQ ID NO: 5454216 - DNA, 25 bp, Homo sapien
gtgggcaatttatttcggcattcca

SEQ ID NO: 5454217 - DNA, 25 bp, Homo sapien
tagaaagcctgaaccataggcatgg

SEQ ID NO: 5454218 - DNA, 25 bp, Homo sapien
tagtcctagtggtgcaggctactcc

SEQ ID NO: 5454219 - DNA, 25 bp, Homo sapien
tggtttctgcgtcactcctcatagt

SEQ ID NO: 5454220 - DNA, 25 bp, Homo sapien
gggcatagcatccaatcaggtgact

SEQ ID NO: 5454221 - DNA, 25 bp, Homo sapien
tggcagtcattaacacaggtcatgt

SEQ ID NO: 5454222 - DNA, 25 bp, Homo sapien
tcgtgctagccctgcttgggagcat

SEQ ID NO: 5454223 - DNA, 25 bp, Homo sapien
gatttaaggagtcgatggcagtcat

SEQ ID NO: 5454224 - DNA, 25 bp, Homo sapien
gaaataactggcaacgctatggaga

SEQ ID NO: 5454225 - DNA, 25 bp, Homo sapien
gatggaggacaccttgtttcctcag

SEQ ID NO: 5454226 - DNA, 25 bp, Homo sapien
ggagttcatgatccctagaattatc

SEQ ID NO: 5454227 - DNA, 25 bp, Homo sapien
atatcctcaagatgtgaaggcactg

SEQ ID NO: 5454228 - DNA, 25 bp, Homo sapien
taaaagactctgattgggacataag

SEQ ID NO: 5454229 - DNA, 25 bp, Homo sapien
tcatctttttgacaacagaaaggtc

SEQ ID NO: 5454230 - DNA, 25 bp, Homo sapien
catctttttgacaacagaaaggtcc

SEQ ID NO: 5454231 - DNA, 25 bp, Homo sapien
taatttccctggttcacacattttc

SEQ ID NO: 5454232 - DNA, 25 bp, Homo sapien
tctcaggtctgccacacgttagctt

SEQ ID NO: 5454233 - DNA, 25 bp, Homo sapien
ctgttaaagaagtggaaagcctcct

SEQ ID NO: 5454234 - DNA, 25 bp, Homo sapien
aaatccttagggcaaacatttgaga

SEQ ID NO: 5454235 - DNA, 25 bp, Homo sapien
gagtgagtatagagactccggcccc

SEQ ID NO: 5454236 - DNA, 25 bp, Homo sapien
cctcatacgagtgagtatagagact

SEQ ID NO: 5454237 - DNA, 25 bp, Homo sapien
tacgagtgagtatagagactccggc

SEQ ID NO: 5454238 - DNA, 25 bp, Homo sapien
ctggtacctcatacgagtgagtata

SEQ ID NO: 5454239 - DNA, 25 bp, Homo sapien
tgtccccaggaaccatagttctcca

SEQ ID NO: 5454240 - DNA, 25 bp, Homo sapien
tcaggaacaccaattcgtttagcgg

SEQ ID NO: 5454241 - DNA, 25 bp, Homo sapien
caattcgtttagcggggattttctg

SEQ ID NO: 5454242 - DNA, 25 bp, Homo sapien
tttgtccccaggaaccatagttctc

SEQ ID NO: 5454243 - DNA, 25 bp, Homo sapien
ttccaaagctaaagatttggtgagg

SEQ ID NO: 5454244 - DNA, 25 bp, Homo sapien
atccgtattccactgcaggcccatt

SEQ ID NO: 5454245 - DNA, 25 bp, Homo sapien
gctaaagatttggtgaggttgtaaa

SEQ ID NO: 5454246 - DNA, 25 bp, Homo sapien
gggcaacacaattgatccgtattcc

SEQ ID NO: 5454247 - DNA, 25 bp, Homo sapien
ggacctgctggcaccattaatattg

SEQ ID NO: 5454248 - DNA, 25 bp, Homo sapien
taaccaggcagggtcagttaatgag

SEQ ID NO: 5454249 - DNA, 25 bp, Homo sapien
ccatgtctgagcgatgatgaccaca

SEQ ID NO: 5454250 - DNA, 25 bp, Homo sapien
tttttgctggcatgacttgagaggc

SEQ ID NO: 5454251 - DNA, 25 bp, Homo sapien
caatgatattgacgatagatcctcc

SEQ ID NO: 5454252 - DNA, 25 bp, Homo sapien
ctttagtagggacaatgatattgac

SEQ ID NO: 5454253 - DNA, 25 bp, Homo sapien
tgacgatagatcctccatgctcttt

SEQ ID NO: 5454254 - DNA, 25 bp, Homo sapien
agctttagtagggacaatgatattg

SEQ ID NO: 5454255 - DNA, 25 bp, Homo sapien
gttgttagcaaggtatcttggattg

SEQ ID NO: 5454256 - DNA, 25 bp, Homo sapien
tatcttggattggtaagacattgct

SEQ ID NO: 5454257 - DNA, 25 bp, Homo sapien
caaggtatcttggattggtaagaca

SEQ ID NO: 5454258 - DNA, 25 bp, Homo sapien
cttggattggtaagacattgctgat

SEQ ID NO: 5454259 - DNA, 25 bp, Homo sapien
catcccttagaactgatgtgttcag

SEQ ID NO: 5454260 - DNA, 25 bp, Homo sapien
ggttggtctcaagcacagcgtgcca

SEQ ID NO: 5454261 - DNA, 25 bp, Homo sapien
cctccattgttcaccaagaaattga

SEQ ID NO: 5454262 - DNA, 25 bp, Homo sapien
tggcctcctccattgttcaccaaga

SEQ ID NO: 5454263 - DNA, 25 bp, Homo sapien
ctaaggtagatttgaccaaattatt

SEQ ID NO: 5454264 - DNA, 25 bp, Homo sapien
aaagtatctaaggtagatttgacca

SEQ ID NO: 5454265 - DNA, 25 bp, Homo sapien
ccaacttacgggatgcaatgaccac

SEQ ID NO: 5454266 - DNA, 25 bp, Homo sapien
ggcctgcagttcatctgccgcagac

SEQ ID NO: 5454267 - DNA, 25 bp, Homo sapien
cattccggatgttgcattgtatggg

SEQ ID NO: 5454268 - DNA, 25 bp, Homo sapien
ggaatgactcgtgcctgctttgtgg

SEQ ID NO: 5454269 - DNA, 25 bp, Homo sapien
gaaatggaagtagagacggtccttc

SEQ ID NO: 5454270 - DNA, 25 bp, Homo sapien
agacaccagtctctcaacaacatgg

SEQ ID NO: 5454271 - DNA, 25 bp, Homo sapien
tccagcgtctatcagtgaatgccca

SEQ ID NO: 5454272 - DNA, 25 bp, Homo sapien
caaataatatagctgtgtcacctcc

SEQ ID NO: 5454273 - DNA, 25 bp, Homo sapien
ctgcagcaaaccaggcgccaggtag

SEQ ID NO: 5454274 - DNA, 25 bp, Homo sapien
gatggcttttccgatgcccgtggcc

SEQ ID NO: 5454275 - DNA, 25 bp, Homo sapien
aaaccaggcgccaggtagctcctgc

SEQ ID NO: 5454276 - DNA, 25 bp, Homo sapien
cttcacgatggcttttccgatgccc

SEQ ID NO: 5454277 - DNA, 25 bp, Homo sapien
ccagagcagctgagcgcaggccctt

SEQ ID NO: 5454278 - DNA, 25 bp, Homo sapien
cagctgagcgcaggcccttctgggt

SEQ ID NO: 5454279 - DNA, 25 bp, Homo sapien
gagcgcaggcccttctgggtctcag

SEQ ID NO: 5454280 - DNA, 25 bp, Homo sapien
ccctgcagcggggtgccagagcagc

SEQ ID NO: 5454281 - DNA, 25 bp, Homo sapien
gcgggcggacagggcggtgctcgag

SEQ ID NO: 5454282 - DNA, 25 bp, Homo sapien
ctatagattcttagaggtgtgccag

SEQ ID NO: 5454283 - DNA, 25 bp, Homo sapien
agattcttagaggtgtgccagggtg

SEQ ID NO: 5454284 - DNA, 25 bp, Homo sapien
tatagattcttagaggtgtgccagg

SEQ ID NO: 5454285 - DNA, 25 bp, Homo sapien
tagattcttagaggtgtgccagggt

SEQ ID NO: 5454286 - DNA, 25 bp, Homo sapien
ggctgctgagcggactgagagtggg

SEQ ID NO: 5454287 - DNA, 25 bp, Homo sapien
tactgaggatgacaaggtgccattc

SEQ ID NO: 5454288 - DNA, 25 bp, Homo sapien
gagagtgggattctgatgtcttcca

SEQ ID NO: 5454289 - DNA, 25 bp, Homo sapien
gactggggcctgcaaaccggttatg

SEQ ID NO: 5454290 - DNA, 25 bp, Homo sapien
acaaaggactgactggatgggttaa

SEQ ID NO: 5454291 - DNA, 25 bp, Homo sapien
aaaggactgactggatgggttaatt

SEQ ID NO: 5454292 - DNA, 25 bp, Homo sapien
ggactgactggatgggttaatttcc

SEQ ID NO: 5454293 - DNA, 25 bp, Homo sapien
aggactgactggatgggttaatttc

SEQ ID NO: 5454294 - DNA, 25 bp, Homo sapien
ggtatagtcaatggccattaacggg

SEQ ID NO: 5454295 - DNA, 25 bp, Homo sapien
ccatagcgggtaccactatagttca

SEQ ID NO: 5454296 - DNA, 25 bp, Homo sapien
ctctttcactaggattaaaactggg

SEQ ID NO: 5454297 - DNA, 25 bp, Homo sapien
cattaacgggctgttaacttcacaa

SEQ ID NO: 5454298 - DNA, 25 bp, Homo sapien
gaggaaagagtcacgcccagaatcc

SEQ ID NO: 5454299 - DNA, 25 bp, Homo sapien
tggaagagccaacagcagtagaagg

SEQ ID NO: 5454300 - DNA, 25 bp, Homo sapien
cccggagaatcagaaggtggagatc

SEQ ID NO: 5454301 - DNA, 25 bp, Homo sapien
tcaggtggaatgcatccttgggaca

SEQ ID NO: 5454302 - DNA, 25 bp, Homo sapien
gaagggaggaattgcatctgccaaa

SEQ ID NO: 5454303 - DNA, 25 bp, Homo sapien
ctcctaagaggtcagcagaatttgg

SEQ ID NO: 5454304 - DNA, 25 bp, Homo sapien
tagccctaagtacaaagaagccaga

SEQ ID NO: 5454305 - DNA, 25 bp, Homo sapien
tccaacagcgatcagtagccctaag

SEQ ID NO: 5454306 - DNA, 25 bp, Homo sapien
tatggagtcgcatcagtctccctgt

SEQ ID NO: 5454307 - DNA, 25 bp, Homo sapien
catttctagggtcaagagatcactt

SEQ ID NO: 5454308 - DNA, 25 bp, Homo sapien
catgtgttgcctgagatataaccac

SEQ ID NO: 5454309 - DNA, 25 bp, Homo sapien
ccatctgttgatcccgttgtctttc

SEQ ID NO: 5454310 - DNA, 25 bp, Homo sapien
tcatgagacttgctgggtatgcagt

SEQ ID NO: 5454311 - DNA, 25 bp, Homo sapien
gcttgctagctaagggcagccttgt

SEQ ID NO: 5454312 - DNA, 25 bp, Homo sapien
tgtgcgccaccattccttgcttctg

SEQ ID NO: 5454313 - DNA, 25 bp, Homo sapien
gatttatctcctaatggcaaaggga

SEQ ID NO: 5454314 - DNA, 25 bp, Homo sapien
tgtagaacttcactcacatgggcag

SEQ ID NO: 5454315 - DNA, 25 bp, Homo sapien
cgctgtcaacaactagagccctgga

SEQ ID NO: 5454316 - DNA, 25 bp, Homo sapien
gagaagagccctacttgtaaggagg

SEQ ID NO: 5454317 - DNA, 25 bp, Homo sapien
caaggcctggcccagtagacttgag

SEQ ID NO: 5454318 - DNA, 25 bp, Homo sapien
atatccgtcacgtctaccgccagat

SEQ ID NO: 5454319 - DNA, 25 bp, Homo sapien
ctaagaattgtagcccctctctgct

SEQ ID NO: 5454320 - DNA, 25 bp, Homo sapien
gggatgactatctcaaataacctgc

SEQ ID NO: 5454321 - DNA, 25 bp, Homo sapien
aaactgcaccctttaatgggttcat

SEQ ID NO: 5454322 - DNA, 25 bp, Homo sapien
gtggttttcatatcctggttcacca

SEQ ID NO: 5454323 - DNA, 25 bp, Homo sapien
tggttttcatatcctggttcaccat

SEQ ID NO: 5454324 - DNA, 25 bp, Homo sapien
tgtggttttcatatcctggttcacc

SEQ ID NO: 5454325 - DNA, 25 bp, Homo sapien
tcttcaacacaagagaaagccataa

SEQ ID NO: 5454326 - DNA, 25 bp, Homo sapien
aaagcccctggaatgtttgcttggg

SEQ ID NO: 5454327 - DNA, 25 bp, Homo sapien
gcttggggttctgtcattaccacac

SEQ ID NO: 5454328 - DNA, 25 bp, Homo sapien
tgtggtcaagcacacattgctgtgt

SEQ ID NO: 5454329 - DNA, 25 bp, Homo sapien
ccgcgctggattcctttggatcatg

SEQ ID NO: 5454330 - DNA, 25 bp, Homo sapien
cctcttggcggcagtggcaatgaca

SEQ ID NO: 5454331 - DNA, 25 bp, Homo sapien
tcctcttggcggcagtggcaatgac

SEQ ID NO: 5454332 - DNA, 25 bp, Homo sapien
taaacaattttctcagccgcgctgg

SEQ ID NO: 5454333 - DNA, 25 bp, Homo sapien
gctcagttgcatccagtacctgttg

SEQ ID NO: 5454334 - DNA, 25 bp, Homo sapien
atttcataagtacgtttgacttctg

SEQ ID NO: 5454335 - DNA, 25 bp, Homo sapien
tgacttctgagaggaccagaatgcc

SEQ ID NO: 5454336 - DNA, 25 bp, Homo sapien
accagaatgccatgggaagtgctca

SEQ ID NO: 5454337 - DNA, 25 bp, Homo sapien
cactgctgcgggatacgttggtaaa

SEQ ID NO: 5454338 - DNA, 25 bp, Homo sapien
aagtagattcttagcaccgatttca

SEQ ID NO: 5454339 - DNA, 25 bp, Homo sapien
gctctgcctactaatcagggttgta

SEQ ID NO: 5454340 - DNA, 25 bp, Homo sapien
cataatctccgagttggtagaaggg

SEQ ID NO: 5454341 - DNA, 25 bp, Homo sapien
gcaatgatttctcattcgaaaggga

SEQ ID NO: 5454342 - DNA, 25 bp, Homo sapien
gcactgttcgacaattatcctgagt

SEQ ID NO: 5454343 - DNA, 25 bp, Homo sapien
tattttgttaagactagggctgatc

SEQ ID NO: 5454344 - DNA, 25 bp, Homo sapien
gagaatattcaggtccagctaaggg

SEQ ID NO: 5454345 - DNA, 25 bp, Homo sapien
tctacctagagaaaggatgctcatg

SEQ ID NO: 5454346 - DNA, 25 bp, Homo sapien
tctgtgcctcacagcaagctagtgg

SEQ ID NO: 5454347 - DNA, 25 bp, Homo sapien
gacattcatagatagcaattggcca

SEQ ID NO: 5454348 - DNA, 25 bp, Homo sapien
cagatgcccgctgtagtcgccttat

SEQ ID NO: 5454349 - DNA, 25 bp, Homo sapien
tacacattcatgtacctgggtgctc

SEQ ID NO: 5454350 - DNA, 25 bp, Homo sapien
gatcttaactgtgcaacttgatgaa

SEQ ID NO: 5454351 - DNA, 25 bp, Homo sapien
cccatcccttgaggtaaccactatt

SEQ ID NO: 5454352 - DNA, 25 bp, Homo sapien
gaacatgtgtacagtaaatgcacag

SEQ ID NO: 5454353 - DNA, 25 bp, Homo sapien
aaagcaggccagtcattgagttctc

SEQ ID NO: 5454354 - DNA, 25 bp, Homo sapien
taatggatggcagcccagcttttaa

SEQ ID NO: 5454355 - DNA, 25 bp, Homo sapien
catgggctagaattacttgcagtta

SEQ ID NO: 5454356 - DNA, 25 bp, Homo sapien
aattgactcctacccctttctgcag

SEQ ID NO: 5454357 - DNA, 25 bp, Homo sapien
ccaaatgaagtagcgtatgccagga

SEQ ID NO: 5454358 - DNA, 25 bp, Homo sapien
gattctcatgctcctttcaaaagag

SEQ ID NO: 5454359 - DNA, 25 bp, Homo sapien
ggacactacacactgtctcgacaag

SEQ ID NO: 5454360 - DNA, 25 bp, Homo sapien
gatgtttcttttgggccgttggcag

SEQ ID NO: 5454361 - DNA, 25 bp, Homo sapien
cctgtgtttcatggtgtcggctata

SEQ ID NO: 5454362 - DNA, 25 bp, Homo sapien
ggttgacaaatgaaacagcccttaa

SEQ ID NO: 5454363 - DNA, 25 bp, Homo sapien
tatgattgaagtcacctgagctgta

SEQ ID NO: 5454364 - DNA, 25 bp, Homo sapien
gaaaaagagctagggaggctattcc

SEQ ID NO: 5454365 - DNA, 25 bp, Homo sapien
gccatatcagtgaacctttagaaac

SEQ ID NO: 5454366 - DNA, 25 bp, Homo sapien
tgttctctacttgcaagcctcaaag

SEQ ID NO: 5454367 - DNA, 25 bp, Homo sapien
tacagacttcttggtacccagtcac

SEQ ID NO: 5454368 - DNA, 25 bp, Homo sapien
ttcagcaccctcataagtcgtcact

SEQ ID NO: 5454369 - DNA, 25 bp, Homo sapien
tatcctgtggggttgagtgaatttt

SEQ ID NO: 5454370 - DNA, 25 bp, Homo sapien
ctgagtattcagtgcaacatccatt

SEQ ID NO: 5454371 - DNA, 25 bp, Homo sapien
ccccactgagtattcagtgcaacat

SEQ ID NO: 5454372 - DNA, 25 bp, Homo sapien
ttcactaatgtgcttggagttggta

SEQ ID NO: 5454373 - DNA, 25 bp, Homo sapien
ctcaagattagagtctaccttgtac

SEQ ID NO: 5454374 - DNA, 25 bp, Homo sapien
tcaagattagagtctaccttgtacc

SEQ ID NO: 5454375 - DNA, 25 bp, Homo sapien
caagattagagtctaccttgtacca

SEQ ID NO: 5454376 - DNA, 25 bp, Homo sapien
ttcccagcatagtcaggaacaactg

SEQ ID NO: 5454377 - DNA, 25 bp, Homo sapien
ttcaaagggaccttggctgtacctg

SEQ ID NO: 5454378 - DNA, 25 bp, Homo sapien
caggaacaactggactttttcaaag

SEQ ID NO: 5454379 - DNA, 25 bp, Homo sapien
gatcctttcccagcatagtcaggaa

SEQ ID NO: 5454380 - DNA, 25 bp, Homo sapien
agtggccaatcggagattcgtttct

SEQ ID NO: 5454381 - DNA, 25 bp, Homo sapien
taatagacatctgagcccctggccc

SEQ ID NO: 5454382 - DNA, 25 bp, Homo sapien
tgtttcgagctagaaaatccgggag

SEQ ID NO: 5454383 - DNA, 25 bp, Homo sapien
ttataatgaccctatatggcagatg

SEQ ID NO: 5454384 - DNA, 25 bp, Homo sapien
tgctacctcccattctttgcagcct

SEQ ID NO: 5454385 - DNA, 25 bp, Homo sapien
gcaaagctctcaccttgtgtcatct

SEQ ID NO: 5454386 - DNA, 25 bp, Homo sapien
tccttccgcaaagctctcaccttgt

SEQ ID NO: 5454387 - DNA, 25 bp, Homo sapien
gtgcttgcagtttgctacctcccat

SEQ ID NO: 5454388 - DNA, 25 bp, Homo sapien
actgactgagcatcctgcaactctg

SEQ ID NO: 5454389 - DNA, 25 bp, Homo sapien
cactgactgagcatcctgcaactct

SEQ ID NO: 5454390 - DNA, 25 bp, Homo sapien
cttgactttatacctttcattggtc

SEQ ID NO: 5454391 - DNA, 25 bp, Homo sapien
gctgcatctgtgtgcggtgcctctc

SEQ ID NO: 5454392 - DNA, 25 bp, Homo sapien
ccctggcctaggaaggatttggaag

SEQ ID NO: 5454393 - DNA, 25 bp, Homo sapien
catacactttgtctgccatcatctt

SEQ ID NO: 5454394 - DNA, 25 bp, Homo sapien
gatgatcctgcttctgtgcttgcca

SEQ ID NO: 5454395 - DNA, 25 bp, Homo sapien
cagatctctggtcgctccaaaggct

SEQ ID NO: 5454396 - DNA, 25 bp, Homo sapien
atctctggtcgctccaaaggctgtt

SEQ ID NO: 5454397 - DNA, 25 bp, Homo sapien
actgcgtgccggcagcaaaaactcc

SEQ ID NO: 5454398 - DNA, 25 bp, Homo sapien
tcaactgcgtgccggcagcaaaaac

SEQ ID NO: 5454399 - DNA, 25 bp, Homo sapien
gacataagagctggtatcccaactc

SEQ ID NO: 5454400 - DNA, 25 bp, Homo sapien
accctttggaaggatcactgcctgg

SEQ ID NO: 5454401 - DNA, 25 bp, Homo sapien
gagggttcccctctcaacaagtcac

SEQ ID NO: 5454402 - DNA, 25 bp, Homo sapien
tcttggaagagggatagcagcctgt

SEQ ID NO: 5454403 - DNA, 25 bp, Homo sapien
tcgaccaactgtggttgggagccag

SEQ ID NO: 5454404 - DNA, 25 bp, Homo sapien
gctgcagtcctcaactggttggctt

SEQ ID NO: 5454405 - DNA, 25 bp, Homo sapien
ccagtggattctcagcgctgtgatg

SEQ ID NO: 5454406 - DNA, 25 bp, Homo sapien
tgaggagtagatgtgggaggaggga

SEQ ID NO: 5454407 - DNA, 25 bp, Homo sapien
acagcaccccaaggattgcctagtt

SEQ ID NO: 5454408 - DNA, 25 bp, Homo sapien
cacttggagtcattccggagtttca

SEQ ID NO: 5454409 - DNA, 25 bp, Homo sapien
ggccagttcctcacacttggagtca

SEQ ID NO: 5454410 - DNA, 25 bp, Homo sapien
taggtactgagctagcccactgacc

SEQ ID NO: 5454411 - DNA, 25 bp, Homo sapien
ttattttcaagcttttaagagaata

SEQ ID NO: 5454412 - DNA, 25 bp, Homo sapien
taagagaatattacaaacaacagag

SEQ ID NO: 5454413 - DNA, 25 bp, Homo sapien
tattacaaacaacagagagttttaa

SEQ ID NO: 5454414 - DNA, 25 bp, Homo sapien
agaatattacaaacaacagagagtt

SEQ ID NO: 5454415 - DNA, 25 bp, Homo sapien
catggatgacgcgaccactgtgcag

SEQ ID NO: 5454416 - DNA, 25 bp, Homo sapien
gcactgagcatcagcctgactgcct

SEQ ID NO: 5454417 - DNA, 25 bp, Homo sapien
cagaaactttgcaggtgaacaccca

SEQ ID NO: 5454418 - DNA, 25 bp, Homo sapien
ttgggcccacctggctacgcgggaa

SEQ ID NO: 5454419 - DNA, 25 bp, Homo sapien
gctctcttggaagcccgtaggtcag

SEQ ID NO: 5454420 - DNA, 25 bp, Homo sapien
tagcccacctgaaatcgggagttcc

SEQ ID NO: 5454421 - DNA, 25 bp, Homo sapien
catttgtcagcgaatcttgcccatc

SEQ ID NO: 5454422 - DNA, 25 bp, Homo sapien
tccgggattgacagcttccaaagct

SEQ ID NO: 5454423 - DNA, 25 bp, Homo sapien
ccgtgcctcctccttttctggctgc

SEQ ID NO: 5454424 - DNA, 25 bp, Homo sapien
ggtggtcatggccttccttccgggc

SEQ ID NO: 5454425 - DNA, 25 bp, Homo sapien
gcttcttcgggtaccttgcctgcag

SEQ ID NO: 5454426 - DNA, 25 bp, Homo sapien
ttcattgttgttgtggagagtggca

SEQ ID NO: 5454427 - DNA, 25 bp, Homo sapien
gccaggttcagcctgtattgcactt

SEQ ID NO: 5454428 - DNA, 25 bp, Homo sapien
tctcaagtgactcaggatgtgcagg

SEQ ID NO: 5454429 - DNA, 25 bp, Homo sapien
gactctcatgaccagctctcggctg

SEQ ID NO: 5454430 - DNA, 25 bp, Homo sapien
taaagatgcggtacaccgagggtcc

SEQ ID NO: 5454431 - DNA, 25 bp, Homo sapien
cagcctgccaccgtttaaagatgcg

SEQ ID NO: 5454432 - DNA, 25 bp, Homo sapien
tcttcctcataaagctgcaagctcc

SEQ ID NO: 5454433 - DNA, 25 bp, Homo sapien
caagctccacgggtcatcagaatcc

SEQ ID NO: 5454434 - DNA, 25 bp, Homo sapien
tctagaagaattgtctcctttgtct

SEQ ID NO: 5454435 - DNA, 25 bp, Homo sapien
tgtacccaaccctgggctgtatttg

SEQ ID NO: 5454436 - DNA, 25 bp, Homo sapien
tccagtgcccagccctgttaagaac

SEQ ID NO: 5454437 - DNA, 25 bp, Homo sapien
cattgccaaccacccatcttccaga

SEQ ID NO: 5454438 - DNA, 25 bp, Homo sapien
ttgccaaccacccatcttccagatt

SEQ ID NO: 5454439 - DNA, 25 bp, Homo sapien
caaccacccatcttccagattccac

SEQ ID NO: 5454440 - DNA, 25 bp, Homo sapien
ggacacaggttcaggcgatctctat

SEQ ID NO: 5454441 - DNA, 25 bp, Homo sapien
aaggttagtaagaagctgagccctg

SEQ ID NO: 5454442 - DNA, 25 bp, Homo sapien
gcagagagaagtgccagttcctcaa

SEQ ID NO: 5454443 - DNA, 25 bp, Homo sapien
tgatcaagcgcttcctacctggtcc

SEQ ID NO: 5454444 - DNA, 25 bp, Homo sapien
ttttgggaggcttagagatctctaa

SEQ ID NO: 5454445 - DNA, 25 bp, Homo sapien
tttgggaggcttagagatctctaaa

SEQ ID NO: 5454446 - DNA, 25 bp, Homo sapien
tttttagagatctctggtaggccag

SEQ ID NO: 5454447 - DNA, 25 bp, Homo sapien
tttagagatctctggtaggccagac

SEQ ID NO: 5454448 - DNA, 25 bp, Homo sapien
gatgtaagatagatgcctcccgtgg

SEQ ID NO: 5454449 - DNA, 25 bp, Homo sapien
catggaagcaaactaacctatcagg

SEQ ID NO: 5454450 - DNA, 25 bp, Homo sapien
tcagtaaatctggtttgggtggcca

SEQ ID NO: 5454451 - DNA, 25 bp, Homo sapien
tgaattgctccacccatccgaggag

SEQ ID NO: 5454452 - DNA, 25 bp, Homo sapien
tccccacctccttagctgcttggac

SEQ ID NO: 5454453 - DNA, 25 bp, Homo sapien
cctccttagctgcttggaccatatc

SEQ ID NO: 5454454 - DNA, 25 bp, Homo sapien
tatcttcagagtcaacagccacaat

SEQ ID NO: 5454455 - DNA, 25 bp, Homo sapien
tagctgcttggaccatatcttcaga

SEQ ID NO: 5454456 - DNA, 25 bp, Homo sapien
tcagagcattgaaacaggcttagag

SEQ ID NO: 5454457 - DNA, 25 bp, Homo sapien
catggagacaaacccccagacccac

SEQ ID NO: 5454458 - DNA, 25 bp, Homo sapien
tgaaccttctcaatgaccgtcagag

SEQ ID NO: 5454459 - DNA, 25 bp, Homo sapien
gccaagaaatactggcgatgaggaa

SEQ ID NO: 5454460 - DNA, 25 bp, Homo sapien
gctgaaagttgaccagatgagccaa

SEQ ID NO: 5454461 - DNA, 25 bp, Homo sapien
catcccgtagcagatctggaagaga

SEQ ID NO: 5454462 - DNA, 25 bp, Homo sapien
tctgatttaggatttaagccagggc

SEQ ID NO: 5454463 - DNA, 25 bp, Homo sapien
ctctgatttaggatttaagccaggg

SEQ ID NO: 5454464 - DNA, 25 bp, Homo sapien
tttcacattgaacttttgatgcaga

SEQ ID NO: 5454465 - DNA, 25 bp, Homo sapien
atttcacattgaacttttgatgcag

SEQ ID NO: 5454466 - DNA, 25 bp, Homo sapien
aatttcacattgaacttttgatgca

SEQ ID NO: 5454467 - DNA, 25 bp, Homo sapien
gcagctgtctcacatgttgctgggc

SEQ ID NO: 5454468 - DNA, 25 bp, Homo sapien
ctgcaaatgatccagctgggctggg

SEQ ID NO: 5454469 - DNA, 25 bp, Homo sapien
tagcccagaagttgcccactgtact

SEQ ID NO: 5454470 - DNA, 25 bp, Homo sapien
cactgtactgagcaggcagctgtct

SEQ ID NO: 5454471 - DNA, 25 bp, Homo sapien
tgtatctatttccctctctttgccc

SEQ ID NO: 5454472 - DNA, 25 bp, Homo sapien
ggtgtgtgcacttgaccgagccatc

SEQ ID NO: 5454473 - DNA, 25 bp, Homo sapien
tgtgcttatggcgatgacgtggtac

SEQ ID NO: 5454474 - DNA, 25 bp, Homo sapien
gtagtagcacagctcgcagctccag

SEQ ID NO: 5454475 - DNA, 25 bp, Homo sapien
cccgctcgctgatccacttgatgag

SEQ ID NO: 5454476 - DNA, 25 bp, Homo sapien
tgcagggagagagcacagggtgatg

SEQ ID NO: 5454477 - DNA, 25 bp, Homo sapien
gcagggagagagcacagggtgatga

SEQ ID NO: 5454478 - DNA, 25 bp, Homo sapien
ggagagagcacagggtgatgaggct

SEQ ID NO: 5454479 - DNA, 25 bp, Homo sapien
gagagcacagggtgatgaggctgag

SEQ ID NO: 5454480 - DNA, 25 bp, Homo sapien
ttggcacacccatcacggcctaagg

SEQ ID NO: 5454481 - DNA, 25 bp, Homo sapien
tcacggcctaagggcccttgtactg

SEQ ID NO: 5454482 - DNA, 25 bp, Homo sapien
tggcacacccatcacggcctaaggg

SEQ ID NO: 5454483 - DNA, 25 bp, Homo sapien
ccatcacggcctaagggcccttgta

SEQ ID NO: 5454484 - DNA, 25 bp, Homo sapien
tcttctgcaactctatttcctactg

SEQ ID NO: 5454485 - DNA, 25 bp, Homo sapien
ttcttctgcaactctatttcctact

SEQ ID NO: 5454486 - DNA, 25 bp, Homo sapien
ttctgcaactctatttcctactgtc

SEQ ID NO: 5454487 - DNA, 25 bp, Homo sapien
ctgcaactctatttcctactgtcac

SEQ ID NO: 5454488 - DNA, 25 bp, Homo sapien
tggtagtgacaggtaaaccaaagac

SEQ ID NO: 5454489 - DNA, 25 bp, Homo sapien
tagtgacaggtaaaccaaagacttc

SEQ ID NO: 5454490 - DNA, 25 bp, Homo sapien
tggtcatcaaaggtcctcctctcct

SEQ ID NO: 5454491 - DNA, 25 bp, Homo sapien
gcctggtcatcaaaggtcctcctct

SEQ ID NO: 5454492 - DNA, 25 bp, Homo sapien
agcatctggtcagactgcctacccc

SEQ ID NO: 5454493 - DNA, 25 bp, Homo sapien
ccccagcatctggtcagactgccta

SEQ ID NO: 5454494 - DNA, 25 bp, Homo sapien
tgacgtggagtattctcatcaagcg

SEQ ID NO: 5454495 - DNA, 25 bp, Homo sapien
tctgagatggcaaactttagggcaa

SEQ ID NO: 5454496 - DNA, 25 bp, Homo sapien
tcatcaagcgtctcagcatagtcag

SEQ ID NO: 5454497 - DNA, 25 bp, Homo sapien
gcagtgcaactgtggcaatcttgga

SEQ ID NO: 5454498 - DNA, 25 bp, Homo sapien
ctcaaccgctggctgagggagtcca

SEQ ID NO: 5454499 - DNA, 25 bp, Homo sapien
accgctggctgagggagtccatcag

SEQ ID NO: 5454500 - DNA, 25 bp, Homo sapien
gggctcaaccgctggctgagggagt

SEQ ID NO: 5454501 - DNA, 25 bp, Homo sapien
tcaaccgctggctgagggagtccat

SEQ ID NO: 5454502 - DNA, 25 bp, Homo sapien
caaatttctagaacggggtattgca

SEQ ID NO: 5454503 - DNA, 25 bp, Homo sapien
gaaatgaaataggtccacagtcctg

SEQ ID NO: 5454504 - DNA, 25 bp, Homo sapien
ggtattgcatagtggaagaaggaaa

SEQ ID NO: 5454505 - DNA, 25 bp, Homo sapien
gaactaagagtagtgtcaaggtact

SEQ ID NO: 5454506 - DNA, 25 bp, Homo sapien
tctgcaggttagtgcctcgatctaa

SEQ ID NO: 5454507 - DNA, 25 bp, Homo sapien
tgtctttactctcaaggttctgcag

SEQ ID NO: 5454508 - DNA, 25 bp, Homo sapien
gaagctcgattcaagtcaccagcag

SEQ ID NO: 5454509 - DNA, 25 bp, Homo sapien
tagtgcctcgatctaagttttcctt

SEQ ID NO: 5454510 - DNA, 25 bp, Homo sapien
tccttgacatgctcctccaatctgg

SEQ ID NO: 5454511 - DNA, 25 bp, Homo sapien
ccttgacatgctcctccaatctgga

SEQ ID NO: 5454512 - DNA, 25 bp, Homo sapien
taattgtttattcagagtgaatagt

SEQ ID NO: 5454513 - DNA, 25 bp, Homo sapien
caactgtaattgtttattcagagtg

SEQ ID NO: 5454514 - DNA, 25 bp, Homo sapien
tgtaattgtttattcagagtgaata

SEQ ID NO: 5454515 - DNA, 25 bp, Homo sapien
actgtaattgtttattcagagtgaa

SEQ ID NO: 5454516 - DNA, 25 bp, Homo sapien
caaatgcgtaatggatgtcaaaatc

SEQ ID NO: 5454517 - DNA, 25 bp, Homo sapien
gaaataaggcagcaagtattgcaca

SEQ ID NO: 5454518 - DNA, 25 bp, Homo sapien
tattgcacagaatgtctgcattgac

SEQ ID NO: 5454519 - DNA, 25 bp, Homo sapien
gactttgcaaagaccagaccctctg

SEQ ID NO: 5454520 - DNA, 25 bp, Homo sapien
tcccccatctcacaggccacagctg

SEQ ID NO: 5454521 - DNA, 25 bp, Homo sapien
ctcccccatctcacaggccacagct

SEQ ID NO: 5454522 - DNA, 25 bp, Homo sapien
gagctttggtaagagccttgagtga

SEQ ID NO: 5454523 - DNA, 25 bp, Homo sapien
caatttaagtaggatcaggactgac

SEQ ID NO: 5454524 - DNA, 25 bp, Homo sapien
agaaaaggttcttggagcttccaat

SEQ ID NO: 5454525 - DNA, 25 bp, Homo sapien
tatctcccaatagagaattagagct

SEQ ID NO: 5454526 - DNA, 25 bp, Homo sapien
agacattcagctactaagattgcag

SEQ ID NO: 5454527 - DNA, 25 bp, Homo sapien
cgtttagcccctatagcagtagtaa

SEQ ID NO: 5454528 - DNA, 25 bp, Homo sapien
ttgtttgggcagagataacaccaag

SEQ ID NO: 5454529 - DNA, 25 bp, Homo sapien
catgtgtagacaattgctggacagc

SEQ ID NO: 5454530 - DNA, 25 bp, Homo sapien
gaagtacttgatggtggcaagatcc

SEQ ID NO: 5454531 - DNA, 25 bp, Homo sapien
tcttttggagagtatgaagtacttg

SEQ ID NO: 5454532 - DNA, 25 bp, Homo sapien
gaggcaccctcttgttgtcagccga

SEQ ID NO: 5454533 - DNA, 25 bp, Homo sapien
tcctgatatcaaagtgaggcaccct

SEQ ID NO: 5454534 - DNA, 25 bp, Homo sapien
cttgcaattgaatactccttctcca

SEQ ID NO: 5454535 - DNA, 25 bp, Homo sapien
cgtgagcctttctatctgtgattct

SEQ ID NO: 5454536 - DNA, 25 bp, Homo sapien
gcgtgagcctttctatctgtgattc

SEQ ID NO: 5454537 - DNA, 25 bp, Homo sapien
agcatcactaactgcgtgagccttt

SEQ ID NO: 5454538 - DNA, 25 bp, Homo sapien
tggagttggaattggagacactagc

SEQ ID NO: 5454539 - DNA, 25 bp, Homo sapien
cactccgttgtttctagatcttcta

SEQ ID NO: 5454540 - DNA, 25 bp, Homo sapien
tctagatcttctattctgaggatgt

SEQ ID NO: 5454541 - DNA, 25 bp, Homo sapien
acactagcattggaaggaaaatgca

SEQ ID NO: 5454542 - DNA, 25 bp, Homo sapien
caagaaacatcaatgagggctctta

SEQ ID NO: 5454543 - DNA, 25 bp, Homo sapien
gcaggcgagtagcaatctgcaagac

SEQ ID NO: 5454544 - DNA, 25 bp, Homo sapien
gacaatataaccgttccccagggca

SEQ ID NO: 5454545 - DNA, 25 bp, Homo sapien
catagagtcctcatactaaagacaa

SEQ ID NO: 5454546 - DNA, 25 bp, Homo sapien
gggcgccgcagtaagaaaaccttca

SEQ ID NO: 5454547 - DNA, 25 bp, Homo sapien
tcaggtcattgaagagcatgcggca

SEQ ID NO: 5454548 - DNA, 25 bp, Homo sapien
gatcctcggtcttctccttacagaa

SEQ ID NO: 5454549 - DNA, 25 bp, Homo sapien
tgctgcccagtgagtagcgatcctc

SEQ ID NO: 5454550 - DNA, 25 bp, Homo sapien
gggctggggcacacaatccatagca

SEQ ID NO: 5454551 - DNA, 25 bp, Homo sapien
atagcagtaccagccggagcagcag

SEQ ID NO: 5454552 - DNA, 25 bp, Homo sapien
gggcacacaatccatagcagtacca

SEQ ID NO: 5454553 - DNA, 25 bp, Homo sapien
atccatagcagtaccagccggagca

SEQ ID NO: 5454554 - DNA, 25 bp, Homo sapien
tgtggggggagtctgctttctcact

SEQ ID NO: 5454555 - DNA, 25 bp, Homo sapien
gtgccccgtggaagtagagagccca

SEQ ID NO: 5454556 - DNA, 25 bp, Homo sapien
caggacaggttttgggggtccacag

SEQ ID NO: 5454557 - DNA, 25 bp, Homo sapien
gctggagtcttaaaagagggggaca

SEQ ID NO: 5454558 - DNA, 25 bp, Homo sapien
cgcagccaaagggttacaccgaaga

SEQ ID NO: 5454559 - DNA, 25 bp, Homo sapien
gatcgtttaacccttgcagaggcgc

SEQ ID NO: 5454560 - DNA, 25 bp, Homo sapien
tcctgagcatgaagatcctggctag

SEQ ID NO: 5454561 - DNA, 25 bp, Homo sapien
ctttctgcttttgacctgaggacac

SEQ ID NO: 5454562 - DNA, 25 bp, Homo sapien
gcgcggtcgcgactccggccttcat

SEQ ID NO: 5454563 - DNA, 25 bp, Homo sapien
tcccttcggtcgaggggcaagagcc

SEQ ID NO: 5454564 - DNA, 25 bp, Homo sapien
tcctcctctgggtcgcggtcgccct

SEQ ID NO: 5454565 - DNA, 25 bp, Homo sapien
tgctgctcggcgtccgggtgtctcc

SEQ ID NO: 5454566 - DNA, 25 bp, Homo sapien
cccttccctgggggccagccctgag

SEQ ID NO: 5454567 - DNA, 25 bp, Homo sapien
ttccctgggggccagccctgagccc

SEQ ID NO: 5454568 - DNA, 25 bp, Homo sapien
tgggggccagccctgagcccccgcg

SEQ ID NO: 5454569 - DNA, 25 bp, Homo sapien
cctgggggccagccctgagcccccg

SEQ ID NO: 5454570 - DNA, 25 bp, Homo sapien
catgcaaccagaggcgaggccggcg

SEQ ID NO: 5454571 - DNA, 25 bp, Homo sapien
gcaaccagaggcgaggccggcgtgg

SEQ ID NO: 5454572 - DNA, 25 bp, Homo sapien
atgcaaccagaggcgaggccggcgt

SEQ ID NO: 5454573 - DNA, 25 bp, Homo sapien
caaccagaggcgaggccggcgtggg

SEQ ID NO: 5454574 - DNA, 25 bp, Homo sapien
tctcaggcaagagtgcttctggagg

SEQ ID NO: 5454575 - DNA, 25 bp, Homo sapien
agtggaataattcggttctcaggca

SEQ ID NO: 5454576 - DNA, 25 bp, Homo sapien
gaaataatactagtggaataattcg

SEQ ID NO: 5454577 - DNA, 25 bp, Homo sapien
ggctggctaggctcgctgttgctac

SEQ ID NO: 5454578 - DNA, 25 bp, Homo sapien
tcgcagatgcaacgaggtaaggctt

SEQ ID NO: 5454579 - DNA, 25 bp, Homo sapien
cttgtttgcggtgccagctgaaggt

SEQ ID NO: 5454580 - DNA, 25 bp, Homo sapien
taaaagccgagaggaagcaaatcag

SEQ ID NO: 5454581 - DNA, 25 bp, Homo sapien
tgccaggtgttgtctcgtcttccgc

SEQ ID NO: 5454582 - DNA, 25 bp, Homo sapien
ctcagcaggaacgtgtcggtgtgga

SEQ ID NO: 5454583 - DNA, 25 bp, Homo sapien
tcagcaggaacgtgtcggtgtggaa

SEQ ID NO: 5454584 - DNA, 25 bp, Homo sapien
cggtgtggaaggtctggttgtagac

SEQ ID NO: 5454585 - DNA, 25 bp, Homo sapien
tgtcggtgtggaaggtctggttgta

SEQ ID NO: 5454586 - DNA, 25 bp, Homo sapien
cacctgtcaaccagagaccgtttct

SEQ ID NO: 5454587 - DNA, 25 bp, Homo sapien
gctcctgactagtgcctgaaaccac

SEQ ID NO: 5454588 - DNA, 25 bp, Homo sapien
aaggctcctgactagtgcctgaaac

SEQ ID NO: 5454589 - DNA, 25 bp, Homo sapien
ctccaaggctcctgactagtgcctg

SEQ ID NO: 5454590 - DNA, 25 bp, Homo sapien
tgactagtgcctgaaaccacacaga

SEQ ID NO: 5454591 - DNA, 25 bp, Homo sapien
tgctgcctaccgccagcctgtgcag

SEQ ID NO: 5454592 - DNA, 25 bp, Homo sapien
ctgctgcctaccgccagcctgtgca

SEQ ID NO: 5454593 - DNA, 25 bp, Homo sapien
cctgctgcctaccgccagcctgtgc

SEQ ID NO: 5454594 - DNA, 25 bp, Homo sapien
gctgcctaccgccagcctgtgcagg

SEQ ID NO: 5454595 - DNA, 25 bp, Homo sapien
ggattctgataattcatggtcatgt

SEQ ID NO: 5454596 - DNA, 25 bp, Homo sapien
ttggccactttactccttgtgcttg

SEQ ID NO: 5454597 - DNA, 25 bp, Homo sapien
tgataattcatggtcatgtcacctt

SEQ ID NO: 5454598 - DNA, 25 bp, Homo sapien
acaaaacagatcaaacctcatagag

SEQ ID NO: 5454599 - DNA, 25 bp, Homo sapien
ttagatacgaagacacggcctgtcg

SEQ ID NO: 5454600 - DNA, 25 bp, Homo sapien
gcctgtcgatccttgggatttgaga

SEQ ID NO: 5454601 - DNA, 25 bp, Homo sapien
ggatttgagagcagtaggtgatgaa

SEQ ID NO: 5454602 - DNA, 25 bp, Homo sapien
tctttccaaacttagatacgaagac

SEQ ID NO: 5454603 - DNA, 25 bp, Homo sapien
gcaggtccaggtgactctgtagggc

SEQ ID NO: 5454604 - DNA, 25 bp, Homo sapien
ttataccaagtcagtgcaggtccag

SEQ ID NO: 5454605 - DNA, 25 bp, Homo sapien
ttcactttgctaggttgactgagca

SEQ ID NO: 5454606 - DNA, 25 bp, Homo sapien
tttcactttgctaggttgactgagc

SEQ ID NO: 5454607 - DNA, 25 bp, Homo sapien
tcactttgctaggttgactgagcat

SEQ ID NO: 5454608 - DNA, 25 bp, Homo sapien
ctttcactttgctaggttgactgag

SEQ ID NO: 5454609 - DNA, 25 bp, Homo sapien
gaaattcctaccattagagttgcta

SEQ ID NO: 5454610 - DNA, 25 bp, Homo sapien
gggacaccgtcccttcttatcaagc

SEQ ID NO: 5454611 - DNA, 25 bp, Homo sapien
ttatcaagcctgaaattcctaccat

SEQ ID NO: 5454612 - DNA, 25 bp, Homo sapien
tagagttgctaagggtttagatgac

SEQ ID NO: 5454613 - DNA, 25 bp, Homo sapien
tcttcatgacatggggaatagcttc

SEQ ID NO: 5454614 - DNA, 25 bp, Homo sapien
ggcaggacgctgtgttcctcaacac

SEQ ID NO: 5454615 - DNA, 25 bp, Homo sapien
aggacgctgtgttcctcaacacatg

SEQ ID NO: 5454616 - DNA, 25 bp, Homo sapien
gacgctgtgttcctcaacacatggc

SEQ ID NO: 5454617 - DNA, 25 bp, Homo sapien
ccaatttgcaggcttcagattcagc

SEQ ID NO: 5454618 - DNA, 25 bp, Homo sapien
tataccagccattgggccaggcatc

SEQ ID NO: 5454619 - DNA, 25 bp, Homo sapien
gagcttgcaggatggaaacatttag

SEQ ID NO: 5454620 - DNA, 25 bp, Homo sapien
caggcatccagaagccctaaggtag

SEQ ID NO: 5454621 - DNA, 25 bp, Homo sapien
gcttccaggaggagctggacagttc

SEQ ID NO: 5454622 - DNA, 25 bp, Homo sapien
ccaggcagaaagaagtctcctcttt

SEQ ID NO: 5454623 - DNA, 25 bp, Homo sapien
aggagctggacagttctttccaagt

SEQ ID NO: 5454624 - DNA, 25 bp, Homo sapien
agtccaggcagaaagaagtctcctc

SEQ ID NO: 5454625 - DNA, 25 bp, Homo sapien
gctgggtgacaggaactaaggaaca

SEQ ID NO: 5454626 - DNA, 25 bp, Homo sapien
cactgctgggctatatcggttcagt

SEQ ID NO: 5454627 - DNA, 25 bp, Homo sapien
tccttgcagattaagttcccagaag

SEQ ID NO: 5454628 - DNA, 25 bp, Homo sapien
ttgcatccactgacttccccgagga

SEQ ID NO: 5454629 - DNA, 25 bp, Homo sapien
gaagcgaaactgcggccgcgttgcc

SEQ ID NO: 5454630 - DNA, 25 bp, Homo sapien
cggccgcgttgcctgctgggaaatg

SEQ ID NO: 5454631 - DNA, 25 bp, Homo sapien
actgcggccgcgttgcctgctggga

SEQ ID NO: 5454632 - DNA, 25 bp, Homo sapien
gaaactgcggccgcgttgcctgctg

SEQ ID NO: 5454633 - DNA, 25 bp, Homo sapien
ccgctacaataaggctggcgaactc

SEQ ID NO: 5454634 - DNA, 25 bp, Homo sapien
cagcgcttgaatacccgtggcctaa

SEQ ID NO: 5454635 - DNA, 25 bp, Homo sapien
tggcctaaccgtccactcggaagac

SEQ ID NO: 5454636 - DNA, 25 bp, Homo sapien
gcgaatgtggctcgcgttctaggcc

SEQ ID NO: 5454637 - DNA, 25 bp, Homo sapien
ggtgagaaagtggtagactggcagg

SEQ ID NO: 5454638 - DNA, 25 bp, Homo sapien
agaaagtggtagactggcaggaagg

SEQ ID NO: 5454639 - DNA, 25 bp, Homo sapien
tgagaaagtggtagactggcaggaa

SEQ ID NO: 5454640 - DNA, 25 bp, Homo sapien
tgggtgagaaagtggtagactggca

SEQ ID NO: 5454641 - DNA, 25 bp, Homo sapien
ggctgggccatgtgagttatcagaa

SEQ ID NO: 5454642 - DNA, 25 bp, Homo sapien
tggctgggccatgtgagttatcaga

SEQ ID NO: 5454643 - DNA, 25 bp, Homo sapien
ctgggccatgtgagttatcagaaga

SEQ ID NO: 5454644 - DNA, 25 bp, Homo sapien
cttggctgggccatgtgagttatca

SEQ ID NO: 5454645 - DNA, 25 bp, Homo sapien
atcgacaaaaggctctggcccgcag

SEQ ID NO: 5454646 - DNA, 25 bp, Homo sapien
gaaaaagattgaagagaatcgacaa

SEQ ID NO: 5454647 - DNA, 25 bp, Homo sapien
gagaatcgacaaaaggctctggccc

SEQ ID NO: 5454648 - DNA, 25 bp, Homo sapien
ttgaagagaatcgacaaaaggctct

SEQ ID NO: 5454649 - DNA, 25 bp, Homo sapien
ttagtatttgcacaccataaggtgg

SEQ ID NO: 5454650 - DNA, 25 bp, Homo sapien
caaagtgagaccgatggcttccgga

SEQ ID NO: 5454651 - DNA, 25 bp, Homo sapien
tggtcctggacgcaattacgcaaga

SEQ ID NO: 5454652 - DNA, 25 bp, Homo sapien
tgtcccaagttgttctaagcaggct

SEQ ID NO: 5454653 - DNA, 25 bp, Homo sapien
gaatccactgattacctctacaagg

SEQ ID NO: 5454654 - DNA, 25 bp, Homo sapien
aacaggcccctgattcaagagaaga

SEQ ID NO: 5454655 - DNA, 25 bp, Homo sapien
aacaagccgttgtcccataagaaca

SEQ ID NO: 5454656 - DNA, 25 bp, Homo sapien
aagttctggcagaagccgggctttc

SEQ ID NO: 5454657 - DNA, 25 bp, Homo sapien
aggtctgagcctcatgcagaaaggg

SEQ ID NO: 5454658 - DNA, 25 bp, Homo sapien
cccagcttggattgttggccagaag

SEQ ID NO: 5454659 - DNA, 25 bp, Homo sapien
aggagtatgccctcctcgagcacag

SEQ ID NO: 5454660 - DNA, 25 bp, Homo sapien
ggccttacggtagcttatcaggaaa

SEQ ID NO: 5454661 - DNA, 25 bp, Homo sapien
cattcctgtgtcattacgtgtgggc

SEQ ID NO: 5454662 - DNA, 25 bp, Homo sapien
cctttgccgaacttacgcagcggga

SEQ ID NO: 5454663 - DNA, 25 bp, Homo sapien
taacctccgctcttctggcttaggg

SEQ ID NO: 5454664 - DNA, 25 bp, Homo sapien
tagagcagcgtgttccattagcaat

SEQ ID NO: 5454665 - DNA, 25 bp, Homo sapien
gtcacacttaatgcaatcttggagg

SEQ ID NO: 5454666 - DNA, 25 bp, Homo sapien
gacagtgagccagatgtacgttaga

SEQ ID NO: 5454667 - DNA, 25 bp, Homo sapien
gaagtctgtctctgcggtccaccag

SEQ ID NO: 5454668 - DNA, 25 bp, Homo sapien
tgccctggtggtctgttagctgagt

SEQ ID NO: 5454669 - DNA, 25 bp, Homo sapien
tatccatgtcctgcgtaaggaaggc

SEQ ID NO: 5454670 - DNA, 25 bp, Homo sapien
tagatcttttgaggacacctaaccc

SEQ ID NO: 5454671 - DNA, 25 bp, Homo sapien
tcaacaactccagttgacagagtag

SEQ ID NO: 5454672 - DNA, 25 bp, Homo sapien
gacactggaatgcaccactttctta

SEQ ID NO: 5454673 - DNA, 25 bp, Homo sapien
gcttccaattggtcactgtgtcaag

SEQ ID NO: 5454674 - DNA, 25 bp, Homo sapien
tgcttccaattggtcactgtgtcaa

SEQ ID NO: 5454675 - DNA, 25 bp, Homo sapien
cttgtttcatggcgtgtggctgctg

SEQ ID NO: 5454676 - DNA, 25 bp, Homo sapien
gtgcttccaattggtcactgtgtca

SEQ ID NO: 5454677 - DNA, 25 bp, Homo sapien
tattgcctagtgtctgtcatagcca

SEQ ID NO: 5454678 - DNA, 25 bp, Homo sapien
tgtttactggatgctactatctagg

SEQ ID NO: 5454679 - DNA, 25 bp, Homo sapien
caacaatgggctgcatgtgccatgg

SEQ ID NO: 5454680 - DNA, 25 bp, Homo sapien
tcaggtactcagttttctaagagca

SEQ ID NO: 5454681 - DNA, 25 bp, Homo sapien
caatgcaggtatggagaagcacgaa

SEQ ID NO: 5454682 - DNA, 25 bp, Homo sapien
gaagtcattcacgtcgtgtgtggcg

SEQ ID NO: 5454683 - DNA, 25 bp, Homo sapien
tggctattgcccttggaggtttata

SEQ ID NO: 5454684 - DNA, 25 bp, Homo sapien
tataactggcaatggacccagagat

SEQ ID NO: 5454685 - DNA, 25 bp, Homo sapien
aagatctggggtctgggcatggtgg

SEQ ID NO: 5454686 - DNA, 25 bp, Homo sapien
taaaccaagatctggggtctgggca

SEQ ID NO: 5454687 - DNA, 25 bp, Homo sapien
tgaaatgccagcactctggaagact

SEQ ID NO: 5454688 - DNA, 25 bp, Homo sapien
tgatattataaaccaagatctgggg

SEQ ID NO: 5454689 - DNA, 25 bp, Homo sapien
agctacttgttaccggacttctgat

SEQ ID NO: 5454690 - DNA, 25 bp, Homo sapien
tggccctctaatcatggattctctc

SEQ ID NO: 5454691 - DNA, 25 bp, Homo sapien
ctcttattccagtagttttctgagc

SEQ ID NO: 5454692 - DNA, 25 bp, Homo sapien
tcttattctctggattagccatccc

SEQ ID NO: 5454693 - DNA, 25 bp, Homo sapien
ggattttagtcaccactgtcgctag

SEQ ID NO: 5454694 - DNA, 25 bp, Homo sapien
tatatgatcgtttgcagctggcctg

SEQ ID NO: 5454695 - DNA, 25 bp, Homo sapien
gaattagtcgcgagcagaaccatcg

SEQ ID NO: 5454696 - DNA, 25 bp, Homo sapien
gcacagtcagccacttttagagagc

SEQ ID NO: 5454697 - DNA, 25 bp, Homo sapien
gcttctgctatggttgtttgtcgcc

SEQ ID NO: 5454698 - DNA, 25 bp, Homo sapien
acctggatgagagagacgccttaca

SEQ ID NO: 5454699 - DNA, 25 bp, Homo sapien
catagtttgcgaatctgggtaaacc

SEQ ID NO: 5454700 - DNA, 25 bp, Homo sapien
tatatgtgaaataatccggacatgc

SEQ ID NO: 5454701 - DNA, 25 bp, Homo sapien
gcgactttaacacaaaaacgaggca

SEQ ID NO: 5454702 - DNA, 25 bp, Homo sapien
tagaagccactaatttccgaggagt

SEQ ID NO: 5454703 - DNA, 25 bp, Homo sapien
taaagcttgcttgtccacaactgag

SEQ ID NO: 5454704 - DNA, 25 bp, Homo sapien
gatgccatcatgtagtttagaagcc

SEQ ID NO: 5454705 - DNA, 25 bp, Homo sapien
tccgctgtcacggtaaagtccgcca

SEQ ID NO: 5454706 - DNA, 25 bp, Homo sapien
gctgtcacggtaaagtccgccatca

SEQ ID NO: 5454707 - DNA, 25 bp, Homo sapien
gtcacggtaaagtccgccatcagaa

SEQ ID NO: 5454708 - DNA, 25 bp, Homo sapien
cacttccgctgtcacggtaaagtcc

SEQ ID NO: 5454709 - DNA, 25 bp, Homo sapien
tgaaagaccagtagacgctcctcta

SEQ ID NO: 5454710 - DNA, 25 bp, Homo sapien
gaaagaccagtagacgctcctctac

SEQ ID NO: 5454711 - DNA, 25 bp, Homo sapien
tctcgaacgcctgacataaagcgag

SEQ ID NO: 5454712 - DNA, 25 bp, Homo sapien
cagctaagttttgtgcagagactgg

SEQ ID NO: 5454713 - DNA, 25 bp, Homo sapien
cgagtggcctcacagggtgttaaga

SEQ ID NO: 5454714 - DNA, 25 bp, Homo sapien
ttttatacacaaccgtattggtcca

SEQ ID NO: 5454715 - DNA, 25 bp, Homo sapien
gacatatccccattatggtacgatt

SEQ ID NO: 5454716 - DNA, 25 bp, Homo sapien
gttcattggtagctctttcagttgg

SEQ ID NO: 5454717 - DNA, 25 bp, Homo sapien
ccagcccacatgtaaggaatggaga

SEQ ID NO: 5454718 - DNA, 25 bp, Homo sapien
ctcttctggagggtacaatatctac

SEQ ID NO: 5454719 - DNA, 25 bp, Homo sapien
gaactccctttctcgattcctgatg

SEQ ID NO: 5454720 - DNA, 25 bp, Homo sapien
cctcggggcctgcttgctattctgg

SEQ ID NO: 5454721 - DNA, 25 bp, Homo sapien
actggtctggaaccttttagggcat

SEQ ID NO: 5454722 - DNA, 25 bp, Homo sapien
ccctttctcgattcctgatgttggc

SEQ ID NO: 5454723 - DNA, 25 bp, Homo sapien
cacaagcatgggaatctatttctcc

SEQ ID NO: 5454724 - DNA, 25 bp, Homo sapien
tctgatcttcctatgctcccacaag

SEQ ID NO: 5454725 - DNA, 25 bp, Homo sapien
tatgctcccacaagcatgggaatct

SEQ ID NO: 5454726 - DNA, 25 bp, Homo sapien
ggtcagtcttttctgatcttcctat

SEQ ID NO: 5454727 - DNA, 25 bp, Homo sapien
tgacctgcattcttccagcacgtgt

SEQ ID NO: 5454728 - DNA, 25 bp, Homo sapien
gatgacctttggcaaccctgctggg

SEQ ID NO: 5454729 - DNA, 25 bp, Homo sapien
cagcacgtgttgtctagggccataa

SEQ ID NO: 5454730 - DNA, 25 bp, Homo sapien
cacacaatgtgggacatcatacccc

SEQ ID NO: 5454731 - DNA, 25 bp, Homo sapien
ccatcagatttcctttgcaaaattt

SEQ ID NO: 5454732 - DNA, 25 bp, Homo sapien
ctctggggagccaccccagatggac

SEQ ID NO: 5454733 - DNA, 25 bp, Homo sapien
gggagccaccccagatggaccccat

SEQ ID NO: 5454734 - DNA, 25 bp, Homo sapien
ttgcaaaatttgtcctctggggagc

SEQ ID NO: 5454735 - DNA, 25 bp, Homo sapien
cctctgtagacgtggcaacaggtcc

SEQ ID NO: 5454736 - DNA, 25 bp, Homo sapien
cttcctctgcatgtccattacagag

SEQ ID NO: 5454737 - DNA, 25 bp, Homo sapien
ccacgttctagctcatcagggatga

SEQ ID NO: 5454738 - DNA, 25 bp, Homo sapien
cctaatatcggtttctggattcagg

SEQ ID NO: 5454739 - DNA, 25 bp, Homo sapien
gcaatacgtacctcctgatgtttct

SEQ ID NO: 5454740 - DNA, 25 bp, Homo sapien
tcccaattccacaaatgaggggtcc

SEQ ID NO: 5454741 - DNA, 25 bp, Homo sapien
cccatggcaatacgtacctcctgat

SEQ ID NO: 5454742 - DNA, 25 bp, Homo sapien
tcagttccccccatggcaatacgta

SEQ ID NO: 5454743 - DNA, 25 bp, Homo sapien
tcaaggcaggcttaaggatccaaac

SEQ ID NO: 5454744 - DNA, 25 bp, Homo sapien
gcttaaggatccaaacaactaagga

SEQ ID NO: 5454745 - DNA, 25 bp, Homo sapien
ggaagatgaaagaaccttgttgatg

SEQ ID NO: 5454746 - DNA, 25 bp, Homo sapien
gatgaaagaaccttgttgatgaagt

SEQ ID NO: 5454747 - DNA, 25 bp, Homo sapien
ctttcatctttaagacgagagattg

SEQ ID NO: 5454748 - DNA, 25 bp, Homo sapien
tttaagacgagagattgtgtttctc

SEQ ID NO: 5454749 - DNA, 25 bp, Homo sapien
tctttaagacgagagattgtgtttc

SEQ ID NO: 5454750 - DNA, 25 bp, Homo sapien
ttcatctttaagacgagagattgtg

SEQ ID NO: 5454751 - DNA, 25 bp, Homo sapien
ccttccagtccatgtattaatagct

SEQ ID NO: 5454752 - DNA, 25 bp, Homo sapien
agtccatgtattaatagctgcacac

SEQ ID NO: 5454753 - DNA, 25 bp, Homo sapien
ggttccttccagtccatgtattaat

SEQ ID NO: 5454754 - DNA, 25 bp, Homo sapien
agtccacggttccttccagtccatg

SEQ ID NO: 5454755 - DNA, 25 bp, Homo sapien
agacatactctgctaagaaggacgc

SEQ ID NO: 5454756 - DNA, 25 bp, Homo sapien
gacatactctgctaagaaggacgcc

SEQ ID NO: 5454757 - DNA, 25 bp, Homo sapien
acatactctgctaagaaggacgccc

SEQ ID NO: 5454758 - DNA, 25 bp, Homo sapien
agaaagggcattgatggcttgatct

SEQ ID NO: 5454759 - DNA, 25 bp, Homo sapien
gagctgtagagtggagcttgggtgg

SEQ ID NO: 5454760 - DNA, 25 bp, Homo sapien
gaagctgattcatgggctcctgagt

SEQ ID NO: 5454761 - DNA, 25 bp, Homo sapien
cacagatgggagtggactcgggcag

SEQ ID NO: 5454762 - DNA, 25 bp, Homo sapien
cagatgggagtggactcgggcagca

SEQ ID NO: 5454763 - DNA, 25 bp, Homo sapien
ttccatggcgggagtgacagctctg

SEQ ID NO: 5454764 - DNA, 25 bp, Homo sapien
tttctggggctagctggccaaagct

SEQ ID NO: 5454765 - DNA, 25 bp, Homo sapien
ttgctctctgatgggccactggaag

SEQ ID NO: 5454766 - DNA, 25 bp, Homo sapien
ctgacttccatggcgggagtgacag

SEQ ID NO: 5454767 - DNA, 25 bp, Homo sapien
gggtgtcacgggtttcttatggcca

SEQ ID NO: 5454768 - DNA, 25 bp, Homo sapien
tgtaggaagtactgccaagaagtgg

SEQ ID NO: 5454769 - DNA, 25 bp, Homo sapien
tggaggagtgaagcatctgtccgtg

SEQ ID NO: 5454770 - DNA, 25 bp, Homo sapien
cgtgtgggacgtgggtacagttcca

SEQ ID NO: 5454771 - DNA, 25 bp, Homo sapien
tcactctcttggtaacatcccccat

SEQ ID NO: 5454772 - DNA, 25 bp, Homo sapien
tggctgccagagcggctgtgtccat

SEQ ID NO: 5454773 - DNA, 25 bp, Homo sapien
tttatcctgatttacaaagtctttc

SEQ ID NO: 5454774 - DNA, 25 bp, Homo sapien
tatcctgatttacaaagtctttccc

SEQ ID NO: 5454775 - DNA, 25 bp, Homo sapien
tatctaagccctcatgggcattcat

SEQ ID NO: 5454776 - DNA, 25 bp, Homo sapien
cttccttatctaagccctcatgggc

SEQ ID NO: 5454777 - DNA, 25 bp, Homo sapien
acagaactcagagccaagtgacgcc

SEQ ID NO: 5454778 - DNA, 25 bp, Homo sapien
ctggaatggagtagtagctgcccct

SEQ ID NO: 5454779 - DNA, 25 bp, Homo sapien
tgaggaagcaaaatccccactaggg

SEQ ID NO: 5454780 - DNA, 25 bp, Homo sapien
gttgcccgtcatggccaattccaga

SEQ ID NO: 5454781 - DNA, 25 bp, Homo sapien
catgctctgatgataaaatgccaaa

SEQ ID NO: 5454782 - DNA, 25 bp, Homo sapien
gctctgatgataaaatgccaaaccg

SEQ ID NO: 5454783 - DNA, 25 bp, Homo sapien
tctgatgataaaatgccaaaccgca

SEQ ID NO: 5454784 - DNA, 25 bp, Homo sapien
ggagcatgctctgatgataaaatgc

SEQ ID NO: 5454785 - DNA, 25 bp, Homo sapien
aaaaaagtgtgctctgggaacaggg

SEQ ID NO: 5454786 - DNA, 25 bp, Homo sapien
ttgaaagaaaggcaattttatttca

SEQ ID NO: 5454787 - DNA, 25 bp, Homo sapien
aaaaaaaagtgtgctctgggaacag

SEQ ID NO: 5454788 - DNA, 25 bp, Homo sapien
tgaaagaaaggcaattttatttcaa

SEQ ID NO: 5454789 - DNA, 25 bp, Homo sapien
ttggtgatgtggatgatgactccca

SEQ ID NO: 5454790 - DNA, 25 bp, Homo sapien
gagatggtttcaaacgggtgttctg

SEQ ID NO: 5454791 - DNA, 25 bp, Homo sapien
tctggatccatgttgggttcccaga

SEQ ID NO: 5454792 - DNA, 25 bp, Homo sapien
gatccatgttgggttcccagaggga

SEQ ID NO: 5454793 - DNA, 25 bp, Homo sapien
catagctgccattgaccacaaagtc

SEQ ID NO: 5454794 - DNA, 25 bp, Homo sapien
ttgttcggcatagctgccattgacc

SEQ ID NO: 5454795 - DNA, 25 bp, Homo sapien
ttcggcatagctgccattgaccaca

SEQ ID NO: 5454796 - DNA, 25 bp, Homo sapien
ggcatagctgccattgaccacaaag

SEQ ID NO: 5454797 - DNA, 25 bp, Homo sapien
tgggcaactctctggacgtcagtgg

SEQ ID NO: 5454798 - DNA, 25 bp, Homo sapien
ccagaccgatgtacaaccaaccacc

SEQ ID NO: 5454799 - DNA, 25 bp, Homo sapien
tacaaccaaccacccatgggaaaga

SEQ ID NO: 5454800 - DNA, 25 bp, Homo sapien
cactgggcaactctctggacgtcag

SEQ ID NO: 5454801 - DNA, 25 bp, Homo sapien
ctccattgccggagcaattccagta

SEQ ID NO: 5454802 - DNA, 25 bp, Homo sapien
tctgcaaggactgaatcaggaatca

SEQ ID NO: 5454803 - DNA, 25 bp, Homo sapien
ctgcaaggactgaatcaggaatcat

SEQ ID NO: 5454804 - DNA, 25 bp, Homo sapien
tgctctgcaaggactgaatcaggaa

SEQ ID NO: 5454805 - DNA, 25 bp, Homo sapien
gctctgcaaggactgaatcaggaat

SEQ ID NO: 5454806 - DNA, 25 bp, Homo sapien
tagccaggaacagatgcggcagatt

SEQ ID NO: 5454807 - DNA, 25 bp, Homo sapien
cagatgcggcagattttctcccatt

SEQ ID NO: 5454808 - DNA, 25 bp, Homo sapien
agccaggaacagatgcggcagattt

SEQ ID NO: 5454809 - DNA, 25 bp, Homo sapien
gaacagatgcggcagattttctccc

SEQ ID NO: 5454810 - DNA, 25 bp, Homo sapien
gaacctcagcagttccggctttgct

SEQ ID NO: 5454811 - DNA, 25 bp, Homo sapien
ctttgttcccgggactcaggggctg

SEQ ID NO: 5454812 - DNA, 25 bp, Homo sapien
cggctttgctgttagctcttttgtc

SEQ ID NO: 5454813 - DNA, 25 bp, Homo sapien
ttatttcgaggcagcgaacctcagc

SEQ ID NO: 5454814 - DNA, 25 bp, Homo sapien
ccgatgtgctgatgtctaggactga

SEQ ID NO: 5454815 - DNA, 25 bp, Homo sapien
gaaggtcctctctgtatagatggcc

SEQ ID NO: 5454816 - DNA, 25 bp, Homo sapien
caagtggtcctagcacatttagcac

SEQ ID NO: 5454817 - DNA, 25 bp, Homo sapien
gctctggagaatccctgaggctaca

SEQ ID NO: 5454818 - DNA, 25 bp, Homo sapien
aggccgcggttcctctctattccgt

SEQ ID NO: 5454819 - DNA, 25 bp, Homo sapien
ctgatgtcaattcttgagcaaggtc

SEQ ID NO: 5454820 - DNA, 25 bp, Homo sapien
tgtctgcaggccgcggttcctctct

SEQ ID NO: 5454821 - DNA, 25 bp, Homo sapien
ttcttgagcaaggtccatcagttct

SEQ ID NO: 5454822 - DNA, 25 bp, Homo sapien
ctgatagggagaaggtaagggtgtt

SEQ ID NO: 5454823 - DNA, 25 bp, Homo sapien
ccactgctgggccccggtagcctga

SEQ ID NO: 5454824 - DNA, 25 bp, Homo sapien
tccactgctgggccccggtagcctg

SEQ ID NO: 5454825 - DNA, 25 bp, Homo sapien
gctccatgaggttttacccacaagg

SEQ ID NO: 5454826 - DNA, 25 bp, Homo sapien
atttgtctaagggtggatgaaggcc

SEQ ID NO: 5454827 - DNA, 25 bp, Homo sapien
cctgaggaggttatgtaggttgcct

SEQ ID NO: 5454828 - DNA, 25 bp, Homo sapien
gaaggccactttacttcatagcaag

SEQ ID NO: 5454829 - DNA, 25 bp, Homo sapien
taagtacaaaatgctaaacgggagc

SEQ ID NO: 5454830 - DNA, 25 bp, Homo sapien
gacaaagatcaaggagtaacataaa

SEQ ID NO: 5454831 - DNA, 25 bp, Homo sapien
atgctaaacgggagccgagctcttc

SEQ ID NO: 5454832 - DNA, 25 bp, Homo sapien
ataaatagtatacagcaatcttcac

SEQ ID NO: 5454833 - DNA, 25 bp, Homo sapien
tctcacaaactggttgcatttgttg

SEQ ID NO: 5454834 - DNA, 25 bp, Homo sapien
tcacaaactggttgcatttgttgat

SEQ ID NO: 5454835 - DNA, 25 bp, Homo sapien
ctcacaaactggttgcatttgttga

SEQ ID NO: 5454836 - DNA, 25 bp, Homo sapien
cacaaactggttgcatttgttgatt

SEQ ID NO: 5454837 - DNA, 25 bp, Homo sapien
acaaccggtaggcaactcggaatct

SEQ ID NO: 5454838 - DNA, 25 bp, Homo sapien
atctgaaggaatcttgtctgacaac

SEQ ID NO: 5454839 - DNA, 25 bp, Homo sapien
tgtactgtggttattgctgtcttca

SEQ ID NO: 5454840 - DNA, 25 bp, Homo sapien
ggagagaacagagttatggtatgaa

SEQ ID NO: 5454841 - DNA, 25 bp, Homo sapien
cagcacttagattcggagccatgga

SEQ ID NO: 5454842 - DNA, 25 bp, Homo sapien
tagtccggagtccaaggtctctggg

SEQ ID NO: 5454843 - DNA, 25 bp, Homo sapien
gcatgatcagaaaagggcctccctg

SEQ ID NO: 5454844 - DNA, 25 bp, Homo sapien
cacagacagtacaaggcccaggttg

SEQ ID NO: 5454845 - DNA, 25 bp, Homo sapien
tttggaaaccggaagagtctggcgc

SEQ ID NO: 5454846 - DNA, 25 bp, Homo sapien
tctcaagaattaggtccaggctggg

SEQ ID NO: 5454847 - DNA, 25 bp, Homo sapien
caaattcgttgttggaggcggtctc

SEQ ID NO: 5454848 - DNA, 25 bp, Homo sapien
actcacaggtttgggttcgcaggca

SEQ ID NO: 5454849 - DNA, 25 bp, Homo sapien
ggctgctgcgctacttacaaattga

SEQ ID NO: 5454850 - DNA, 25 bp, Homo sapien
gaaacggcacgcttcagcatgtact

SEQ ID NO: 5454851 - DNA, 25 bp, Homo sapien
tcctgtagataaatacgagcccact

SEQ ID NO: 5454852 - DNA, 25 bp, Homo sapien
tgtagtcaccgtggaagaacaagtc

SEQ ID NO: 5454853 - DNA, 25 bp, Homo sapien
gcctggtctcggtgcatgtccttcc

SEQ ID NO: 5454854 - DNA, 25 bp, Homo sapien
gagacaacactctgcccaggtaaga

SEQ ID NO: 5454855 - DNA, 25 bp, Homo sapien
ccttgctagagattccgaggtcctc

SEQ ID NO: 5454856 - DNA, 25 bp, Homo sapien
tgttgccattttcgaagttgagccc

SEQ ID NO: 5454857 - DNA, 25 bp, Homo sapien
agatgccacgtttgcggccacggga

SEQ ID NO: 5454858 - DNA, 25 bp, Homo sapien
gtcaacgtactccatgcctggcagc

SEQ ID NO: 5454859 - DNA, 25 bp, Homo sapien
tgaaagtccccgtcaacgtactcca

SEQ ID NO: 5454860 - DNA, 25 bp, Homo sapien
ctgctgtcgaaggtgtggcactgaa

SEQ ID NO: 5454861 - DNA, 25 bp, Homo sapien
gcggtcacaattgggcaggtacaca

SEQ ID NO: 5454862 - DNA, 25 bp, Homo sapien
aggtacacagcacggggcaccatgc

SEQ ID NO: 5454863 - DNA, 25 bp, Homo sapien
gaatcctttgcggtcacaattgggc

SEQ ID NO: 5454864 - DNA, 25 bp, Homo sapien
tctcttgtagaatcctttgcggtca

SEQ ID NO: 5454865 - DNA, 25 bp, Homo sapien
ttggccctgacaagtgtatgctctg

SEQ ID NO: 5454866 - DNA, 25 bp, Homo sapien
tctctgccttggactggacacagct

SEQ ID NO: 5454867 - DNA, 25 bp, Homo sapien
tgtaggtcctctgctgggtctagtc

SEQ ID NO: 5454868 - DNA, 25 bp, Homo sapien
tgctctggaaactctactcccacgt

SEQ ID NO: 5454869 - DNA, 25 bp, Homo sapien
ccttcagctcggagatgcgggtgtg

SEQ ID NO: 5454870 - DNA, 25 bp, Homo sapien
ccgacaaacttggactgggtcagct

SEQ ID NO: 5454871 - DNA, 25 bp, Homo sapien
atctcaggtgcagagatgatccggg

SEQ ID NO: 5454872 - DNA, 25 bp, Homo sapien
tcctcggccatctcagaggtggtgg

SEQ ID NO: 5454873 - DNA, 25 bp, Homo sapien
aaggtgcacacggccagagcccagg

SEQ ID NO: 5454874 - DNA, 25 bp, Homo sapien
gctgaagcagatgtgtctctgccct

SEQ ID NO: 5454875 - DNA, 25 bp, Homo sapien
aataaaggctgaagcagatgtgtct

SEQ ID NO: 5454876 - DNA, 25 bp, Homo sapien
gtcagcccccgtgggccaaggtgca

SEQ ID NO: 5454877 - DNA, 25 bp, Homo sapien
agtgggaccagatgcaggggtgagt

SEQ ID NO: 5454878 - DNA, 25 bp, Homo sapien
ggaccagatgcaggggtgagtggag

SEQ ID NO: 5454879 - DNA, 25 bp, Homo sapien
tggaggtggggggccctgtcttcat

SEQ ID NO: 5454880 - DNA, 25 bp, Homo sapien
cagatgcaggggtgagtggaggtgg

SEQ ID NO: 5454881 - DNA, 25 bp, Homo sapien
gctctgtccatttggtcagagggtg

SEQ ID NO: 5454882 - DNA, 25 bp, Homo sapien
ccatttggtcagagggtgccctttt

SEQ ID NO: 5454883 - DNA, 25 bp, Homo sapien
tggtcagagggtgcccttttccagc

SEQ ID NO: 5454884 - DNA, 25 bp, Homo sapien
tcagagggtgcccttttccagctgt

SEQ ID NO: 5454885 - DNA, 25 bp, Homo sapien
cagctttgcaagctttttggctgct

SEQ ID NO: 5454886 - DNA, 25 bp, Homo sapien
agctttgcaagctttttggctgctt

SEQ ID NO: 5454887 - DNA, 25 bp, Homo sapien
aaaaatcgaagaaacagaggcatcc

SEQ ID NO: 5454888 - DNA, 25 bp, Homo sapien
tccaggaagagtgtcgggctttgcc

SEQ ID NO: 5454889 - DNA, 25 bp, Homo sapien
agagtgtcgggctttgccaggccac

SEQ ID NO: 5454890 - DNA, 25 bp, Homo sapien
aaaatcgaagaaacagaggcatcct

SEQ ID NO: 5454891 - DNA, 25 bp, Homo sapien
agaagataagatgaggacgcctaga

SEQ ID NO: 5454892 - DNA, 25 bp, Homo sapien
agataagatgaggacgcctagaatc

SEQ ID NO: 5454893 - DNA, 25 bp, Homo sapien
gaagataagatgaggacgcctagaa

SEQ ID NO: 5454894 - DNA, 25 bp, Homo sapien
ataagatgaggacgcctagaatctc

SEQ ID NO: 5454895 - DNA, 25 bp, Homo sapien
actgtgctgttggaagcgggccact

SEQ ID NO: 5454896 - DNA, 25 bp, Homo sapien
ggaagcgggccacttctgcaccatg

SEQ ID NO: 5454897 - DNA, 25 bp, Homo sapien
ttctgttggcaccacgtgaggactg

SEQ ID NO: 5454898 - DNA, 25 bp, Homo sapien
ttcaagactacaggccgctgcacag

SEQ ID NO: 5454899 - DNA, 25 bp, Homo sapien
cccatcccatctgttcgggaagaag

SEQ ID NO: 5454900 - DNA, 25 bp, Homo sapien
gctaaaacgccctttccaggagcgc

SEQ ID NO: 5454901 - DNA, 25 bp, Homo sapien
tgtcggcaccagcagcggtggagcg

SEQ ID NO: 5454902 - DNA, 25 bp, Homo sapien
tgttcgggaagaagatgtcggcacc

SEQ ID NO: 5454903 - DNA, 25 bp, Homo sapien
tctgattgaacaagtagctgtgtca

SEQ ID NO: 5454904 - DNA, 25 bp, Homo sapien
gcgaggctcccagtgcgtggctttt

SEQ ID NO: 5454905 - DNA, 25 bp, Homo sapien
ttgcattctgcgtttccagggcccc

SEQ ID NO: 5454906 - DNA, 25 bp, Homo sapien
cataggcgaggaagttgaaagctct

SEQ ID NO: 5454907 - DNA, 25 bp, Homo sapien
ttcagggctcccacccgaaaggcat

SEQ ID NO: 5454908 - DNA, 25 bp, Homo sapien
ccacaggcaatcatcttcaataaaa

SEQ ID NO: 5454909 - DNA, 25 bp, Homo sapien
aaggcattagctaccaaggatgtgg

SEQ ID NO: 5454910 - DNA, 25 bp, Homo sapien
tctaccacaggcaatcatcttcaat

SEQ ID NO: 5454911 - DNA, 25 bp, Homo sapien
agtgcacgaaggagcccaggctctg

SEQ ID NO: 5454912 - DNA, 25 bp, Homo sapien
cgcggtagctcttttcgttgaggca

SEQ ID NO: 5454913 - DNA, 25 bp, Homo sapien
ccagggcgcaggtcatgcagcagcc

SEQ ID NO: 5454914 - DNA, 25 bp, Homo sapien
cgatcttgacttgctcgcggtagct

SEQ ID NO: 5454915 - DNA, 25 bp, Homo sapien
caggttctacgcgaagtccggagaa

SEQ ID NO: 5454916 - DNA, 25 bp, Homo sapien
caagcaaccaccgaaataatgagat

SEQ ID NO: 5454917 - DNA, 25 bp, Homo sapien
ccctcaagcctgagcgggtcagaat

SEQ ID NO: 5454918 - DNA, 25 bp, Homo sapien
tttctaaccctcagctgccagcggt

SEQ ID NO: 5454919 - DNA, 25 bp, Homo sapien
tgtctctccattgagtgtgcggtcc

SEQ ID NO: 5454920 - DNA, 25 bp, Homo sapien
gtgcggtcccctgctgtcccatagg

SEQ ID NO: 5454921 - DNA, 25 bp, Homo sapien
tctgtcacctatggcgttagcctct

SEQ ID NO: 5454922 - DNA, 25 bp, Homo sapien
tttcacatcactgcaaaacatttct

SEQ ID NO: 5454923 - DNA, 25 bp, Homo sapien
tagtctcataaacattccggcttgg

SEQ ID NO: 5454924 - DNA, 25 bp, Homo sapien
gcttggatatcaaccaggttcgcca

SEQ ID NO: 5454925 - DNA, 25 bp, Homo sapien
gaagaggcagagttagtctcataaa

SEQ ID NO: 5454926 - DNA, 25 bp, Homo sapien
gtatcccccgtaggcaagagaagag

SEQ ID NO: 5454927 - DNA, 25 bp, Homo sapien
tgtgtcttgtgtctacctcctttgc

SEQ ID NO: 5454928 - DNA, 25 bp, Homo sapien
tgtcttgtgtctacctcctttgcct

SEQ ID NO: 5454929 - DNA, 25 bp, Homo sapien
ctgtgtcttgtgtctacctcctttg

SEQ ID NO: 5454930 - DNA, 25 bp, Homo sapien
tcttgtgtctacctcctttgcctcc

SEQ ID NO: 5454931 - DNA, 25 bp, Homo sapien
ggcatcagtgtgcatatctggaatt

SEQ ID NO: 5454932 - DNA, 25 bp, Homo sapien
cggacagctttgttaagactggcat

SEQ ID NO: 5454933 - DNA, 25 bp, Homo sapien
ctttggctcggacagctttgttaag

SEQ ID NO: 5454934 - DNA, 25 bp, Homo sapien
tcagtgtgcatatctggaattgcca

SEQ ID NO: 5454935 - DNA, 25 bp, Homo sapien
tgaatgtcgatgatgtattcttcag

SEQ ID NO: 5454936 - DNA, 25 bp, Homo sapien
tgtcgatgatgtattcttcagtcac

SEQ ID NO: 5454937 - DNA, 25 bp, Homo sapien
aatgtcgatgatgtattcttcagtc

SEQ ID NO: 5454938 - DNA, 25 bp, Homo sapien
gaatgtcgatgatgtattcttcagt

SEQ ID NO: 5454939 - DNA, 25 bp, Homo sapien
ttttgccaaattataatgcttcttt

SEQ ID NO: 5454940 - DNA, 25 bp, Homo sapien
tttttgccaaattataatgcttctt

SEQ ID NO: 5454941 - DNA, 25 bp, Homo sapien
tgttcataatgcattccatccctgc

SEQ ID NO: 5454942 - DNA, 25 bp, Homo sapien
caaatagtctgagttttttctgcca

SEQ ID NO: 5454943 - DNA, 25 bp, Homo sapien
aaccaatgcacgctttgtaaagttg

SEQ ID NO: 5454944 - DNA, 25 bp, Homo sapien
gtaaagttgcagacaaatagtctga

SEQ ID NO: 5454945 - DNA, 25 bp, Homo sapien
cttggtttttatagtgaagcttttg

SEQ ID NO: 5454946 - DNA, 25 bp, Homo sapien
tttatagtgaagcttttgccatcag

SEQ ID NO: 5454947 - DNA, 25 bp, Homo sapien
ttatagtgaagcttttgccatcaga

SEQ ID NO: 5454948 - DNA, 25 bp, Homo sapien
tggtttttatagtgaagcttttgcc

SEQ ID NO: 5454949 - DNA, 25 bp, Homo sapien
tccagtgggtagggctctctacggc

SEQ ID NO: 5454950 - DNA, 25 bp, Homo sapien
gagttcaggccaccgccggagtcca

SEQ ID NO: 5454951 - DNA, 25 bp, Homo sapien
tagggctctctacggccggaggtgg

SEQ ID NO: 5454952 - DNA, 25 bp, Homo sapien
ggagttcaggccaccgccggagtcc

SEQ ID NO: 5454953 - DNA, 25 bp, Homo sapien
agaatgccctcgtgggaggccagga

SEQ ID NO: 5454954 - DNA, 25 bp, Homo sapien
gccagtgctggacgccagagcggtc

SEQ ID NO: 5454955 - DNA, 25 bp, Homo sapien
ccagagcggtcagccagaatattcc

SEQ ID NO: 5454956 - DNA, 25 bp, Homo sapien
cctgaggagaatgccctcgtgggag

SEQ ID NO: 5454957 - DNA, 25 bp, Homo sapien
tgggcatctcttgcgccgtggagaa

SEQ ID NO: 5454958 - DNA, 25 bp, Homo sapien
tgggatctccccacatcttcgctga

SEQ ID NO: 5454959 - DNA, 25 bp, Homo sapien
gctcctgcctccgatctgggatctc

SEQ ID NO: 5454960 - DNA, 25 bp, Homo sapien
ggtatgctctgttcagctgacggct

SEQ ID NO: 5454961 - DNA, 25 bp, Homo sapien
gaatgtccgcttttccccattgggc

SEQ ID NO: 5454962 - DNA, 25 bp, Homo sapien
gttcctgctgatcaacagagcaaaa

SEQ ID NO: 5454963 - DNA, 25 bp, Homo sapien
ccattgggcttaagagggaagttga

SEQ ID NO: 5454964 - DNA, 25 bp, Homo sapien
cagttagtagggttagttcctgctg

SEQ ID NO: 5454965 - DNA, 25 bp, Homo sapien
tgcaaaggctcacatccgggaacct

SEQ ID NO: 5454966 - DNA, 25 bp, Homo sapien
tgaaggctgaaaaaccggactgctg

SEQ ID NO: 5454967 - DNA, 25 bp, Homo sapien
acatcagccttgtgggagaggtacc

SEQ ID NO: 5454968 - DNA, 25 bp, Homo sapien
tgatgcacgacgaggttcaggcact

SEQ ID NO: 5454969 - DNA, 25 bp, Homo sapien
cttgtagctcttgatacagcaggag

SEQ ID NO: 5454970 - DNA, 25 bp, Homo sapien
ctcttgatacagcaggagcctggtg

SEQ ID NO: 5454971 - DNA, 25 bp, Homo sapien
tagctcttgatacagcaggagcctg

SEQ ID NO: 5454972 - DNA, 25 bp, Homo sapien
tgtagctcttgatacagcaggagcc

SEQ ID NO: 5454973 - DNA, 25 bp, Homo sapien
tgcccaaggtgaagcaagagaactc

SEQ ID NO: 5454974 - DNA, 25 bp, Homo sapien
ggagttctctgtctcgaggcaagca

SEQ ID NO: 5454975 - DNA, 25 bp, Homo sapien
tgagacgtccaaagacagcatcgct

SEQ ID NO: 5454976 - DNA, 25 bp, Homo sapien
caaagccctggtatagtgccggcca

SEQ ID NO: 5454977 - DNA, 25 bp, Homo sapien
tggcaaattgcagcattcagctccc

SEQ ID NO: 5454978 - DNA, 25 bp, Homo sapien
agcaactcctgatttgtggccccaa

SEQ ID NO: 5454979 - DNA, 25 bp, Homo sapien
ttctggttctgtagacttccgtggc

SEQ ID NO: 5454980 - DNA, 25 bp, Homo sapien
aggtctctcccgcaggaccatggag

SEQ ID NO: 5454981 - DNA, 25 bp, Homo sapien
aataaccaccgatgcttggtctgca

SEQ ID NO: 5454982 - DNA, 25 bp, Homo sapien
cttataacagcatcagtcagattgg

SEQ ID NO: 5454983 - DNA, 25 bp, Homo sapien
tgcatatgattgtccccatgtgccc

SEQ ID NO: 5454984 - DNA, 25 bp, Homo sapien
gctttattgcatatcagtaatggcc

SEQ ID NO: 5454985 - DNA, 25 bp, Homo sapien
taatctaaacataagaggctggtct

SEQ ID NO: 5454986 - DNA, 25 bp, Homo sapien
cactttaccagaggctagagacagt

SEQ ID NO: 5454987 - DNA, 25 bp, Homo sapien
gatgtatgtggtcgcttgtcagcag

SEQ ID NO: 5454988 - DNA, 25 bp, Homo sapien
gcagtttgggttaatggagccctct

SEQ ID NO: 5454989 - DNA, 25 bp, Homo sapien
tttatgggagaggaaagcaagcccc

SEQ ID NO: 5454990 - DNA, 25 bp, Homo sapien
gatgtatgtactctccgatctcagg

SEQ ID NO: 5454991 - DNA, 25 bp, Homo sapien
gatctcaggatctggcctaggcaaa

SEQ ID NO: 5454992 - DNA, 25 bp, Homo sapien
gctctttacagagcaggcgggcacc

SEQ ID NO: 5454993 - DNA, 25 bp, Homo sapien
ccacattccataggctcctctctgg

SEQ ID NO: 5454994 - DNA, 25 bp, Homo sapien
cacaactggcatttgatccacattc

SEQ ID NO: 5454995 - DNA, 25 bp, Homo sapien
acattcctcatttcgtcacaactgg

SEQ ID NO: 5454996 - DNA, 25 bp, Homo sapien
gatctaacatcaggtctccttggca

SEQ ID NO: 5454997 - DNA, 25 bp, Homo sapien
tgtgtgaagcgcaccagggcagagc

SEQ ID NO: 5454998 - DNA, 25 bp, Homo sapien
ctgtgtgaagcgcaccagggcagag

SEQ ID NO: 5454999 - DNA, 25 bp, Homo sapien
aagtgggagcggtaattgcgattgg

SEQ ID NO: 5455000 - DNA, 25 bp, Homo sapien
acagagacacgaattagaacattcc

SEQ ID NO: 5455001 - DNA, 25 bp, Homo sapien
ggaaaggacaggtttgcaacagaga

SEQ ID NO: 5455002 - DNA, 25 bp, Homo sapien
gaacattcccatcaagactcttgtt

SEQ ID NO: 5455003 - DNA, 25 bp, Homo sapien
agaacattcccatcaagactcttgt

SEQ ID NO: 5455004 - DNA, 25 bp, Homo sapien
catcgccccgtttcctacttttcag

SEQ ID NO: 5455005 - DNA, 25 bp, Homo sapien
actctttaatttgcggctggtcgac

SEQ ID NO: 5455006 - DNA, 25 bp, Homo sapien
ccttgtgaggagatcggctcttgct

SEQ ID NO: 5455007 - DNA, 25 bp, Homo sapien
ctcttgactcccttgtgaggagatc

SEQ ID NO: 5455008 - DNA, 25 bp, Homo sapien
cctgaagatttggtggtgttctttc

SEQ ID NO: 5455009 - DNA, 25 bp, Homo sapien
ctggagtctgcctgaagatttggtg

SEQ ID NO: 5455010 - DNA, 25 bp, Homo sapien
agtctgcctgaagatttggtggtgt

SEQ ID NO: 5455011 - DNA, 25 bp, Homo sapien
tctggaggtacagggagcatcctgg

SEQ ID NO: 5455012 - DNA, 25 bp, Homo sapien
ttccgtcaggcttctctcctattct

SEQ ID NO: 5455013 - DNA, 25 bp, Homo sapien
tttccgtcaggcttctctcctattc

SEQ ID NO: 5455014 - DNA, 25 bp, Homo sapien
ttttccgtcaggcttctctcctatt

SEQ ID NO: 5455015 - DNA, 25 bp, Homo sapien
tactgcaacagtgaaagtgcacttt

SEQ ID NO: 5455016 - DNA, 25 bp, Homo sapien
gtaggtcataccatggagatgttct

SEQ ID NO: 5455017 - DNA, 25 bp, Homo sapien
gtaagaaccgtgtcaccatgcagaa

SEQ ID NO: 5455018 - DNA, 25 bp, Homo sapien
tccagatactgtgtagccttattat

SEQ ID NO: 5455019 - DNA, 25 bp, Homo sapien
gaagttcttcagatgggcacacaag

SEQ ID NO: 5455020 - DNA, 25 bp, Homo sapien
ccctggttagagcaggagaacctca

SEQ ID NO: 5455021 - DNA, 25 bp, Homo sapien
tctggtttggcctagcttacttgct

SEQ ID NO: 5455022 - DNA, 25 bp, Homo sapien
ggcacacaaggctaacgtgacattt

SEQ ID NO: 5455023 - DNA, 25 bp, Homo sapien
ttatgtctccccagaaccagctaca

SEQ ID NO: 5455024 - DNA, 25 bp, Homo sapien
atttgtgaagtccaatgcaaaatga

SEQ ID NO: 5455025 - DNA, 25 bp, Homo sapien
aaaatgaatatgctagcctcttgct

SEQ ID NO: 5455026 - DNA, 25 bp, Homo sapien
cagctacataatttgtgaagtccaa

SEQ ID NO: 5455027 - DNA, 25 bp, Homo sapien
cttagtgctcatacttactgctggg

SEQ ID NO: 5455028 - DNA, 25 bp, Homo sapien
ggaggctttccagtcatttgcctga

SEQ ID NO: 5455029 - DNA, 25 bp, Homo sapien
atgctcccgtaggaaactggctgag

SEQ ID NO: 5455030 - DNA, 25 bp, Homo sapien
tctgctgtatcctagtgtggctgaa

SEQ ID NO: 5455031 - DNA, 25 bp, Homo sapien
caagcttcttgaagttgaagctata

SEQ ID NO: 5455032 - DNA, 25 bp, Homo sapien
gatatcaagcttcttgaagttgaag

SEQ ID NO: 5455033 - DNA, 25 bp, Homo sapien
gaagttgaagctatatttctgtggg

SEQ ID NO: 5455034 - DNA, 25 bp, Homo sapien
tctctggccagatatcaagcttctt

SEQ ID NO: 5455035 - DNA, 25 bp, Homo sapien
ttatccaacatttcagtactgcccc

SEQ ID NO: 5455036 - DNA, 25 bp, Homo sapien
cctatgggctggctgataggcagcc

SEQ ID NO: 5455037 - DNA, 25 bp, Homo sapien
tgttgactttcagccattgtgacaa

SEQ ID NO: 5455038 - DNA, 25 bp, Homo sapien
ttgtgacaaggcaccatcaatcatc

SEQ ID NO: 5455039 - DNA, 25 bp, Homo sapien
caggagggcccgtgtcataagccac

SEQ ID NO: 5455040 - DNA, 25 bp, Homo sapien
ggcccgtgtcataagccactatata

SEQ ID NO: 5455041 - DNA, 25 bp, Homo sapien
ggagggcccgtgtcataagccacta

SEQ ID NO: 5455042 - DNA, 25 bp, Homo sapien
gagggcccgtgtcataagccactat

SEQ ID NO: 5455043 - DNA, 25 bp, Homo sapien
tcatgctgaccagagttgaggaaca

SEQ ID NO: 5455044 - DNA, 25 bp, Homo sapien
tgtcatctgaaatattccccacaga

SEQ ID NO: 5455045 - DNA, 25 bp, Homo sapien
gagagggacaacagtaggagcaggc

SEQ ID NO: 5455046 - DNA, 25 bp, Homo sapien
gatcttgctgtttcaaccaaaacct

SEQ ID NO: 5455047 - DNA, 25 bp, Homo sapien
tacaggcacctctggtagtaacagg

SEQ ID NO: 5455048 - DNA, 25 bp, Homo sapien
tgcagcatcgaggtaatcagggtcc

SEQ ID NO: 5455049 - DNA, 25 bp, Homo sapien
gttcatctgacttaggtgggcccca

SEQ ID NO: 5455050 - DNA, 25 bp, Homo sapien
gaccgtctaaacaaggccagtgcag

SEQ ID NO: 5455051 - DNA, 25 bp, Homo sapien
tgttccttctactcagggccttctt

SEQ ID NO: 5455052 - DNA, 25 bp, Homo sapien
cttgttccttctactcagggccttc

SEQ ID NO: 5455053 - DNA, 25 bp, Homo sapien
ctttatacttgtcttgatgggactg

SEQ ID NO: 5455054 - DNA, 25 bp, Homo sapien
ttctgcagtaggctatctttatact

SEQ ID NO: 5455055 - DNA, 25 bp, Homo sapien
gaaccactagttctaagccagatgc

SEQ ID NO: 5455056 - DNA, 25 bp, Homo sapien
taagccagatgctactcaggcagtt

SEQ ID NO: 5455057 - DNA, 25 bp, Homo sapien
aggagcatagggaagtagggctaga

SEQ ID NO: 5455058 - DNA, 25 bp, Homo sapien
ggctagaggacagaaccactagttc

SEQ ID NO: 5455059 - DNA, 25 bp, Homo sapien
aggctgcaagggccagatgggtgat

SEQ ID NO: 5455060 - DNA, 25 bp, Homo sapien
gctgcaagggccagatgggtgattc

SEQ ID NO: 5455061 - DNA, 25 bp, Homo sapien
caaccgacaggctgcaagggccaga

SEQ ID NO: 5455062 - DNA, 25 bp, Homo sapien
accgacaggctgcaagggccagatg

SEQ ID NO: 5455063 - DNA, 25 bp, Homo sapien
cattacggaatgtgtaactaccaaa

SEQ ID NO: 5455064 - DNA, 25 bp, Homo sapien
cctcaactgggcattacggaatgtg

SEQ ID NO: 5455065 - DNA, 25 bp, Homo sapien
tggacaagggttcaggatgagattc

SEQ ID NO: 5455066 - DNA, 25 bp, Homo sapien
ctcagcgtggacaagggttcaggat

SEQ ID NO: 5455067 - DNA, 25 bp, Homo sapien
gaaatggctggtgcaactttgtaac

SEQ ID NO: 5455068 - DNA, 25 bp, Homo sapien
gctggtgcaactttgtaaccaaatc

SEQ ID NO: 5455069 - DNA, 25 bp, Homo sapien
ttgtaaccaaatccgctcaaatccc

SEQ ID NO: 5455070 - DNA, 25 bp, Homo sapien
aaccaaatccgctcaaatccctttg

SEQ ID NO: 5455071 - DNA, 25 bp, Homo sapien
actgccctgctaggtttcagaatag

SEQ ID NO: 5455072 - DNA, 25 bp, Homo sapien
tagcatgggacctgtagctcctttc

SEQ ID NO: 5455073 - DNA, 25 bp, Homo sapien
gtttcagaatagcatgggacctgta

SEQ ID NO: 5455074 - DNA, 25 bp, Homo sapien
tgccctgctaggtttcagaatagca

SEQ ID NO: 5455075 - DNA, 25 bp, Homo sapien
tgttaagcctctgttaccaagttcc

SEQ ID NO: 5455076 - DNA, 25 bp, Homo sapien
tgggaaggcctcaaggagctttact

SEQ ID NO: 5455077 - DNA, 25 bp, Homo sapien
ggaacaggaacattacatggcaagg

SEQ ID NO: 5455078 - DNA, 25 bp, Homo sapien
ctgaaggctatatagaaagcatggc

SEQ ID NO: 5455079 - DNA, 25 bp, Homo sapien
gatattttcctgatgatatccacag

SEQ ID NO: 5455080 - DNA, 25 bp, Homo sapien
tattttcctgatgatatccacagtt

SEQ ID NO: 5455081 - DNA, 25 bp, Homo sapien
atattttcctgatgatatccacagt

SEQ ID NO: 5455082 - DNA, 25 bp, Homo sapien
accagcaactatgggctgccccaga

SEQ ID NO: 5455083 - DNA, 25 bp, Homo sapien
ataatggccctctgttcttagtggg

SEQ ID NO: 5455084 - DNA, 25 bp, Homo sapien
tttcatccctaggagtccgtggtct

SEQ ID NO: 5455085 - DNA, 25 bp, Homo sapien
taagagaagaacgacataatggccc

SEQ ID NO: 5455086 - DNA, 25 bp, Homo sapien
cactgtacaggatgtgactgcttgc

SEQ ID NO: 5455087 - DNA, 25 bp, Homo sapien
caaagatgtcagtttcgtaggcctg

SEQ ID NO: 5455088 - DNA, 25 bp, Homo sapien
gcctgaatcactgtacaggatgtga

SEQ ID NO: 5455089 - DNA, 25 bp, Homo sapien
cggtcaaggcagatctaagtccaat

SEQ ID NO: 5455090 - DNA, 25 bp, Homo sapien
tttcggtgagtaactgaatcacagc

SEQ ID NO: 5455091 - DNA, 25 bp, Homo sapien
tccagtggttttcggtgagtaactg

SEQ ID NO: 5455092 - DNA, 25 bp, Homo sapien
gagtaactgaatcacagctctctcc

SEQ ID NO: 5455093 - DNA, 25 bp, Homo sapien
tggttttcggtgagtaactgaatca

SEQ ID NO: 5455094 - DNA, 25 bp, Homo sapien
attctccctgagaccggcagtccat

SEQ ID NO: 5455095 - DNA, 25 bp, Homo sapien
ccctgagaccggcagtccatcactg

SEQ ID NO: 5455096 - DNA, 25 bp, Homo sapien
ctgattctccctgagaccggcagtc

SEQ ID NO: 5455097 - DNA, 25 bp, Homo sapien
tattaaaccggtttccagatgtctc

SEQ ID NO: 5455098 - DNA, 25 bp, Homo sapien
aatccaaatcaagaagccagaggca

SEQ ID NO: 5455099 - DNA, 25 bp, Homo sapien
aagccacggttctgacataagttca

SEQ ID NO: 5455100 - DNA, 25 bp, Homo sapien
gatcttctttagcaacttctcttcc

SEQ ID NO: 5455101 - DNA, 25 bp, Homo sapien
cctcctgtgagatcttctttagcaa

SEQ ID NO: 5455102 - DNA, 25 bp, Homo sapien
gccacggttctgacataagttcatc

SEQ ID NO: 5455103 - DNA, 25 bp, Homo sapien
ttaaggagtgctccatctttgtcct

SEQ ID NO: 5455104 - DNA, 25 bp, Homo sapien
gtcctgcggcagggcctccttaagg

SEQ ID NO: 5455105 - DNA, 25 bp, Homo sapien
cagggcctccttaaggagtgctcca

SEQ ID NO: 5455106 - DNA, 25 bp, Homo sapien
tccttaaggagtgctccatctttgt

SEQ ID NO: 5455107 - DNA, 25 bp, Homo sapien
cagggtatggggtgggagacctggg

SEQ ID NO: 5455108 - DNA, 25 bp, Homo sapien
ttctggtctcctgaacttgctcctt

SEQ ID NO: 5455109 - DNA, 25 bp, Homo sapien
tctggtctcctgaacttgctccttc

SEQ ID NO: 5455110 - DNA, 25 bp, Homo sapien
tggttgcttggatgggaaggtgtca

SEQ ID NO: 5455111 - DNA, 25 bp, Homo sapien
gtggttgcttggatgggaaggtgtc

SEQ ID NO: 5455112 - DNA, 25 bp, Homo sapien
ggtggttgcttggatgggaaggtgt

SEQ ID NO: 5455113 - DNA, 25 bp, Homo sapien
cagttcaaattgatggagctagagt

SEQ ID NO: 5455114 - DNA, 25 bp, Homo sapien
ggtcactcctttgtagcctaacttg

SEQ ID NO: 5455115 - DNA, 25 bp, Homo sapien
gcctaacttgctcatgcagttcaaa

SEQ ID NO: 5455116 - DNA, 25 bp, Homo sapien
aaatgccgtgaagtttctgaaactc

SEQ ID NO: 5455117 - DNA, 25 bp, Homo sapien
tttggtggaaattggcctgagatgt

SEQ ID NO: 5455118 - DNA, 25 bp, Homo sapien
tcgtcaaatcgtggaagaagatggg

SEQ ID NO: 5455119 - DNA, 25 bp, Homo sapien
tactctggggctcgtcaaatcgtgg

SEQ ID NO: 5455120 - DNA, 25 bp, Homo sapien
aaaatggctgggtggtatctactct

SEQ ID NO: 5455121 - DNA, 25 bp, Homo sapien
tttttcttcatgagcctcacccttg

SEQ ID NO: 5455122 - DNA, 25 bp, Homo sapien
ctcttttttcttcatgagcctcacc

SEQ ID NO: 5455123 - DNA, 25 bp, Homo sapien
caggcagcttctcctcgatctcctc

SEQ ID NO: 5455124 - DNA, 25 bp, Homo sapien
ttcttcatgagcctcacccttggca

SEQ ID NO: 5455125 - DNA, 25 bp, Homo sapien
tttagcagaaagagcccccagttcc

SEQ ID NO: 5455126 - DNA, 25 bp, Homo sapien
cataattcatctgcttgtatgagtt

SEQ ID NO: 5455127 - DNA, 25 bp, Homo sapien
gtttagcagaaagagcccccagttc

SEQ ID NO: 5455128 - DNA, 25 bp, Homo sapien
ctgcaccataattcatctgcttgta

SEQ ID NO: 5455129 - DNA, 25 bp, Homo sapien
cactgttcaatcatgaccatattgt

SEQ ID NO: 5455130 - DNA, 25 bp, Homo sapien
actgttcaatcatgaccatattgtc

SEQ ID NO: 5455131 - DNA, 25 bp, Homo sapien
tcactgttcaatcatgaccatattg

SEQ ID NO: 5455132 - DNA, 25 bp, Homo sapien
actgatcctgaaggtctcaacaatc

SEQ ID NO: 5455133 - DNA, 25 bp, Homo sapien
gatcctgaaggtctcaacaatcttc

SEQ ID NO: 5455134 - DNA, 25 bp, Homo sapien
ggtctcaacaatcttcatctgcctc

SEQ ID NO: 5455135 - DNA, 25 bp, Homo sapien
gaaggtctcaacaatcttcatctgc

SEQ ID NO: 5455136 - DNA, 25 bp, Homo sapien
tgatagccttggttttttctatacc

SEQ ID NO: 5455137 - DNA, 25 bp, Homo sapien
tccagtattcccattcccatgatag

SEQ ID NO: 5455138 - DNA, 25 bp, Homo sapien
tagccatttaaggacagggcacttc

SEQ ID NO: 5455139 - DNA, 25 bp, Homo sapien
ttctttacactctcattgatagcct

SEQ ID NO: 5455140 - DNA, 25 bp, Homo sapien
aacttggtcttatgaatatagttgt

SEQ ID NO: 5455141 - DNA, 25 bp, Homo sapien
ggtcaggtgaatcaacttggtctta

SEQ ID NO: 5455142 - DNA, 25 bp, Homo sapien
tacttctggttctgacggcaaggtc

SEQ ID NO: 5455143 - DNA, 25 bp, Homo sapien
aagtatttatggctacttctggttc

SEQ ID NO: 5455144 - DNA, 25 bp, Homo sapien
cagccagggtgtttgtagttgctcc

SEQ ID NO: 5455145 - DNA, 25 bp, Homo sapien
gatgaagtcatggaatagtgtcccc

SEQ ID NO: 5455146 - DNA, 25 bp, Homo sapien
tgatgggctcccttgactgctggct

SEQ ID NO: 5455147 - DNA, 25 bp, Homo sapien
gaagcaccaggcagcggaaatagct

SEQ ID NO: 5455148 - DNA, 25 bp, Homo sapien
gttcttagcacaaaggtccaggaag

SEQ ID NO: 5455149 - DNA, 25 bp, Homo sapien
tctttggtgtctggttcagtatgga

SEQ ID NO: 5455150 - DNA, 25 bp, Homo sapien
agttcttagcacaaaggtccaggaa

SEQ ID NO: 5455151 - DNA, 25 bp, Homo sapien
agtatggatgttcgggtccctctta

SEQ ID NO: 5455152 - DNA, 25 bp, Homo sapien
attaaagttgccattcgcacatctg

SEQ ID NO: 5455153 - DNA, 25 bp, Homo sapien
tctgttggctcccaggtatggttcc

SEQ ID NO: 5455154 - DNA, 25 bp, Homo sapien
caggatactgggaatgttaggtagt

SEQ ID NO: 5455155 - DNA, 25 bp, Homo sapien
gaatgttaggtagtgagaaagattc

SEQ ID NO: 5455156 - DNA, 25 bp, Homo sapien
ctccagcctttcgcttgtagggttt

SEQ ID NO: 5455157 - DNA, 25 bp, Homo sapien
ccagcctttcgcttgtagggtttga

SEQ ID NO: 5455158 - DNA, 25 bp, Homo sapien
cagcctttcgcttgtagggtttgag

SEQ ID NO: 5455159 - DNA, 25 bp, Homo sapien
agcctttcgcttgtagggtttgagg

SEQ ID NO: 5455160 - DNA, 25 bp, Homo sapien
tacgctctgactctttggatttcac

SEQ ID NO: 5455161 - DNA, 25 bp, Homo sapien
tttagaggtggataatcagggccat

SEQ ID NO: 5455162 - DNA, 25 bp, Homo sapien
tgaagaggtgaagaatcttgtagtt

SEQ ID NO: 5455163 - DNA, 25 bp, Homo sapien
ctgaagaggtgaagaatcttgtagt

SEQ ID NO: 5455164 - DNA, 25 bp, Homo sapien
tcttttggatcttccataacatcgg

SEQ ID NO: 5455165 - DNA, 25 bp, Homo sapien
catcggtcacatagttgggcacaga

SEQ ID NO: 5455166 - DNA, 25 bp, Homo sapien
aattagtgacaatggtggtgctgag

SEQ ID NO: 5455167 - DNA, 25 bp, Homo sapien
atggaatgtagagggatttttctgg

SEQ ID NO: 5455168 - DNA, 25 bp, Homo sapien
ccccatgtacaacatccggctttta

SEQ ID NO: 5455169 - DNA, 25 bp, Homo sapien
cacccccatgtacaacatccggctt

SEQ ID NO: 5455170 - DNA, 25 bp, Homo sapien
catgtacaacatccggcttttactc

SEQ ID NO: 5455171 - DNA, 25 bp, Homo sapien
tccacccccatgtacaacatccggc

SEQ ID NO: 5455172 - DNA, 25 bp, Homo sapien
ttcatccccacacagtggcggcagg

SEQ ID NO: 5455173 - DNA, 25 bp, Homo sapien
atccccacacagtggcggcagggtc

SEQ ID NO: 5455174 - DNA, 25 bp, Homo sapien
cggcagggtcgtgttgtcatgatga

SEQ ID NO: 5455175 - DNA, 25 bp, Homo sapien
tccccacacagtggcggcagggtcg

SEQ ID NO: 5455176 - DNA, 25 bp, Homo sapien
caaatgagtcagctgagataaaaac

SEQ ID NO: 5455177 - DNA, 25 bp, Homo sapien
gcatctctcccaaaggagggtatta

SEQ ID NO: 5455178 - DNA, 25 bp, Homo sapien
cattagtttccttggcgtgtcagca

SEQ ID NO: 5455179 - DNA, 25 bp, Homo sapien
gctaagagttgccttataaacctgt

SEQ ID NO: 5455180 - DNA, 25 bp, Homo sapien
tcagtttcccagttctttcagaacc

SEQ ID NO: 5455181 - DNA, 25 bp, Homo sapien
gtttcccagttctttcagaacctca

SEQ ID NO: 5455182 - DNA, 25 bp, Homo sapien
cagtttcccagttctttcagaacct

SEQ ID NO: 5455183 - DNA, 25 bp, Homo sapien
tttcccagttctttcagaacctcac

SEQ ID NO: 5455184 - DNA, 25 bp, Homo sapien
gatgaagggtcctgccttgagtgta

SEQ ID NO: 5455185 - DNA, 25 bp, Homo sapien
tcagggatatatgcctgcaggctgg

SEQ ID NO: 5455186 - DNA, 25 bp, Homo sapien
gagtgtagggtagagtgattctgag

SEQ ID NO: 5455187 - DNA, 25 bp, Homo sapien
gagtgctttccaacagactgtaaat

SEQ ID NO: 5455188 - DNA, 25 bp, Homo sapien
acaggcctggcggaaacgcaggatg

SEQ ID NO: 5455189 - DNA, 25 bp, Homo sapien
cctggcggaaacgcaggatggccca

SEQ ID NO: 5455190 - DNA, 25 bp, Homo sapien
aggcctggcggaaacgcaggatggc

SEQ ID NO: 5455191 - DNA, 25 bp, Homo sapien
gcctggcggaaacgcaggatggccc

SEQ ID NO: 5455192 - DNA, 25 bp, Homo sapien
ggtggaggatggtgacaggtcctcc

SEQ ID NO: 5455193 - DNA, 25 bp, Homo sapien
tggaggatggtgacaggtcctcctg

SEQ ID NO: 5455194 - DNA, 25 bp, Homo sapien
caaggtggaggatggtgacaggtcc

SEQ ID NO: 5455195 - DNA, 25 bp, Homo sapien
aggatggtgacaggtcctcctggga

SEQ ID NO: 5455196 - DNA, 25 bp, Homo sapien
tcggttgcccgcttgcctcctcccg

SEQ ID NO: 5455197 - DNA, 25 bp, Homo sapien
ctgtgcctacaatgaaggctgtgcc

SEQ ID NO: 5455198 - DNA, 25 bp, Homo sapien
tctgttcggttgcccgcttgcctcc

SEQ ID NO: 5455199 - DNA, 25 bp, Homo sapien
tgcctacaatgaaggctgtgcccat

SEQ ID NO: 5455200 - DNA, 25 bp, Homo sapien
tatcagcaggactgacctccccagt

SEQ ID NO: 5455201 - DNA, 25 bp, Homo sapien
tcagcaggactgacctccccagtgt

SEQ ID NO: 5455202 - DNA, 25 bp, Homo sapien
cactatcagcaggactgacctcccc

SEQ ID NO: 5455203 - DNA, 25 bp, Homo sapien
actatcagcaggactgacctcccca

SEQ ID NO: 5455204 - DNA, 25 bp, Homo sapien
ctgacctgatagatacctggccttt

SEQ ID NO: 5455205 - DNA, 25 bp, Homo sapien
cacctacatgggatgtcagcaaggc

SEQ ID NO: 5455206 - DNA, 25 bp, Homo sapien
gccttttcacctacatgggatgtca

SEQ ID NO: 5455207 - DNA, 25 bp, Homo sapien
tgatagatacctggccttttcacct

SEQ ID NO: 5455208 - DNA, 25 bp, Homo sapien
cagggccccacttcaaattccagca

SEQ ID NO: 5455209 - DNA, 25 bp, Homo sapien
acagctgacaccagcaagtatgcta

SEQ ID NO: 5455210 - DNA, 25 bp, Homo sapien
gacagcatcgaagctgtcctgtgga

SEQ ID NO: 5455211 - DNA, 25 bp, Homo sapien
ccagcaagtatgctaggacagcatc

SEQ ID NO: 5455212 - DNA, 25 bp, Homo sapien
gatccagcatcctatttttgaagat

SEQ ID NO: 5455213 - DNA, 25 bp, Homo sapien
ctgcatggggccatgatccgcatct

SEQ ID NO: 5455214 - DNA, 25 bp, Homo sapien
gccatgatccgcatctgggggtaaa

SEQ ID NO: 5455215 - DNA, 25 bp, Homo sapien
ctgggggtaaaatatcagacatgat

SEQ ID NO: 5455216 - DNA, 25 bp, Homo sapien
catctgggggtaaaatatcagacat

SEQ ID NO: 5455217 - DNA, 25 bp, Homo sapien
tgttatctttcaacactgatatgcc

SEQ ID NO: 5455218 - DNA, 25 bp, Homo sapien
ttatctttcaacactgatatgccaa

SEQ ID NO: 5455219 - DNA, 25 bp, Homo sapien
tggtgttatctttcaacactgatat

SEQ ID NO: 5455220 - DNA, 25 bp, Homo sapien
ggtgttatctttcaacactgatatg

SEQ ID NO: 5455221 - DNA, 25 bp, Homo sapien
atggtgggtcttgctgagcacctgt

SEQ ID NO: 5455222 - DNA, 25 bp, Homo sapien
tgggtcttgctgagcacctgtaagg

SEQ ID NO: 5455223 - DNA, 25 bp, Homo sapien
gggtcttgctgagcacctgtaaggt

SEQ ID NO: 5455224 - DNA, 25 bp, Homo sapien
ggtgggtcttgctgagcacctgtaa

SEQ ID NO: 5455225 - DNA, 25 bp, Homo sapien
tagctcttaatctgccacacctgtg

SEQ ID NO: 5455226 - DNA, 25 bp, Homo sapien
aatgagaatattcccagagtccaag

SEQ ID NO: 5455227 - DNA, 25 bp, Homo sapien
cctggccctcacttaacctcttggg

SEQ ID NO: 5455228 - DNA, 25 bp, Homo sapien
gggctaaggatacctcctaatgaga

SEQ ID NO: 5455229 - DNA, 25 bp, Homo sapien
agtcatgctgaactgggtgccttgg

SEQ ID NO: 5455230 - DNA, 25 bp, Homo sapien
agtggcccactctgcggagcagtca

SEQ ID NO: 5455231 - DNA, 25 bp, Homo sapien
ggcgcttggtggttgacagaaatca

SEQ ID NO: 5455232 - DNA, 25 bp, Homo sapien
ccttggtttgcaactggcgcttggt

SEQ ID NO: 5455233 - DNA, 25 bp, Homo sapien
gacaggcatcaatagtagttaaaaa

SEQ ID NO: 5455234 - DNA, 25 bp, Homo sapien
caatcaactgaatctttatgacagg

SEQ ID NO: 5455235 - DNA, 25 bp, Homo sapien
tttgggccttatgagggcttgctgc

SEQ ID NO: 5455236 - DNA, 25 bp, Homo sapien
tatgacaggcatcaatagtagttaa

SEQ ID NO: 5455237 - DNA, 25 bp, Homo sapien
ggcacagtgctcattcctatattct

SEQ ID NO: 5455238 - DNA, 25 bp, Homo sapien
tgttgctgactccatatagtaaaac

SEQ ID NO: 5455239 - DNA, 25 bp, Homo sapien
gagctctcgtcaccctgatcagcag

SEQ ID NO: 5455240 - DNA, 25 bp, Homo sapien
cagactttcctagcctccttgtgag

SEQ ID NO: 5455241 - DNA, 25 bp, Homo sapien
ctcttggcgcatagcttgtccagag

SEQ ID NO: 5455242 - DNA, 25 bp, Homo sapien
ctctcttggcgcatagcttgtccag

SEQ ID NO: 5455243 - DNA, 25 bp, Homo sapien
gctctcttggcgcatagcttgtcca

SEQ ID NO: 5455244 - DNA, 25 bp, Homo sapien
cagctctcttggcgcatagcttgtc

SEQ ID NO: 5455245 - DNA, 25 bp, Homo sapien
gtaggttgatggcctcttggtgttt

SEQ ID NO: 5455246 - DNA, 25 bp, Homo sapien
taaatgcaaccagatggacaaaaac

SEQ ID NO: 5455247 - DNA, 25 bp, Homo sapien
gaaagagataaatgccccacaatcc

SEQ ID NO: 5455248 - DNA, 25 bp, Homo sapien
gcagcactgaaaattatacctctgg

SEQ ID NO: 5455249 - DNA, 25 bp, Homo sapien
taccttaattgtatggtctaccaga

SEQ ID NO: 5455250 - DNA, 25 bp, Homo sapien
ggccaggctatgaggtaaccacgaa

SEQ ID NO: 5455251 - DNA, 25 bp, Homo sapien
acccggccctagactcatatcattt

SEQ ID NO: 5455252 - DNA, 25 bp, Homo sapien
aacaatgctatgatggaaaattatg

SEQ ID NO: 5455253 - DNA, 25 bp, Homo sapien
ctttgatcactagcaaggatgaaca

SEQ ID NO: 5455254 - DNA, 25 bp, Homo sapien
caaaagcttatatttcctgctacta

SEQ ID NO: 5455255 - DNA, 25 bp, Homo sapien
gagagcttgttctgccgaggtcacc

SEQ ID NO: 5455256 - DNA, 25 bp, Homo sapien
tcacactgaccacaaaagcttatat

SEQ ID NO: 5455257 - DNA, 25 bp, Homo sapien
gacgaagtgatcattacagagagag

SEQ ID NO: 5455258 - DNA, 25 bp, Homo sapien
gccaccaccagagtgagcgatggaa

SEQ ID NO: 5455259 - DNA, 25 bp, Homo sapien
caccaccagagtgagcgatggaaag

SEQ ID NO: 5455260 - DNA, 25 bp, Homo sapien
ccaccaccagagtgagcgatggaaa

SEQ ID NO: 5455261 - DNA, 25 bp, Homo sapien
ccccattcataggtggctgagacag

SEQ ID NO: 5455262 - DNA, 25 bp, Homo sapien
aaggaagccgtggaaagcatgatgc

SEQ ID NO: 5455263 - DNA, 25 bp, Homo sapien
acgtgccccattcataggtggctga

SEQ ID NO: 5455264 - DNA, 25 bp, Homo sapien
gatgctgaccttgccgtactcttct

SEQ ID NO: 5455265 - DNA, 25 bp, Homo sapien
tagcttgaggcataagcaaagggag

SEQ ID NO: 5455266 - DNA, 25 bp, Homo sapien
cagttcatcggctctccacgcttcc

SEQ ID NO: 5455267 - DNA, 25 bp, Homo sapien
agtgcaccacgcgccagttcatcgg

SEQ ID NO: 5455268 - DNA, 25 bp, Homo sapien
gccagacctcaggtttagcttgagg

SEQ ID NO: 5455269 - DNA, 25 bp, Homo sapien
ggcttttacaatgagctccatcttc

SEQ ID NO: 5455270 - DNA, 25 bp, Homo sapien
cggaaggcttttacaatgagctcca

SEQ ID NO: 5455271 - DNA, 25 bp, Homo sapien
cttttacaatgagctccatcttcat

SEQ ID NO: 5455272 - DNA, 25 bp, Homo sapien
aaggcttttacaatgagctccatct

SEQ ID NO: 5455273 - DNA, 25 bp, Homo sapien
gaattcctgttcacgtccaaattgt

SEQ ID NO: 5455274 - DNA, 25 bp, Homo sapien
aaattgtattgggatgtagaactca

SEQ ID NO: 5455275 - DNA, 25 bp, Homo sapien
ccatcttggagtagttctccggtaa

SEQ ID NO: 5455276 - DNA, 25 bp, Homo sapien
gataaagaaggcaacaatgaccttg

SEQ ID NO: 5455277 - DNA, 25 bp, Homo sapien
gagttgctgcttgggtaattgtcct

SEQ ID NO: 5455278 - DNA, 25 bp, Homo sapien
ccaatagtcaatgggtgggtactgt

SEQ ID NO: 5455279 - DNA, 25 bp, Homo sapien
gacaccgtgtaagcaagtggaggaa

SEQ ID NO: 5455280 - DNA, 25 bp, Homo sapien
tgatagaatctagtggttgaggcca

SEQ ID NO: 5455281 - DNA, 25 bp, Homo sapien
cttcattgagcccaatgttaggatg

SEQ ID NO: 5455282 - DNA, 25 bp, Homo sapien
tgagcccaatgttaggatgtgaggc

SEQ ID NO: 5455283 - DNA, 25 bp, Homo sapien
cccaatgttaggatgtgaggctttt

SEQ ID NO: 5455284 - DNA, 25 bp, Homo sapien
tgttaggatgtgaggcttttgagcc

SEQ ID NO: 5455285 - DNA, 25 bp, Homo sapien
gagattttgtttcttgctttggaag

SEQ ID NO: 5455286 - DNA, 25 bp, Homo sapien
gcttgagattttgtttcttgctttg

SEQ ID NO: 5455287 - DNA, 25 bp, Homo sapien
tattaatggagcttgagattttgtt

SEQ ID NO: 5455288 - DNA, 25 bp, Homo sapien
tgagattttgtttcttgctttggaa

SEQ ID NO: 5455289 - DNA, 25 bp, Homo sapien
ttcctctaaagcagacattggcttt

SEQ ID NO: 5455290 - DNA, 25 bp, Homo sapien
tcctctaaagcagacattggctttg

SEQ ID NO: 5455291 - DNA, 25 bp, Homo sapien
attggctttgttcccagagccaggc

SEQ ID NO: 5455292 - DNA, 25 bp, Homo sapien
agacattggctttgttcccagagcc

SEQ ID NO: 5455293 - DNA, 25 bp, Homo sapien
gaaccatatcttgctcctgtgaacc

SEQ ID NO: 5455294 - DNA, 25 bp, Homo sapien
gcagaggactctcagcttgaaccat

SEQ ID NO: 5455295 - DNA, 25 bp, Homo sapien
tataagcaacacctatggacttctg

SEQ ID NO: 5455296 - DNA, 25 bp, Homo sapien
tgtacaccagatccactgccttggg

SEQ ID NO: 5455297 - DNA, 25 bp, Homo sapien
tgagagcactggaccaaaccaagac

SEQ ID NO: 5455298 - DNA, 25 bp, Homo sapien
gacagttgttcggtctggtgttttg

SEQ ID NO: 5455299 - DNA, 25 bp, Homo sapien
aaaccaagacagttgttcggtctgg

SEQ ID NO: 5455300 - DNA, 25 bp, Homo sapien
ctcttgaggaccttggtgagagcac

SEQ ID NO: 5455301 - DNA, 25 bp, Homo sapien
ctatagcgtgacatttttgatggtg

SEQ ID NO: 5455302 - DNA, 25 bp, Homo sapien
gttgcttagtactaaggcactggag

SEQ ID NO: 5455303 - DNA, 25 bp, Homo sapien
gacgactgtatttcctggttgctta

SEQ ID NO: 5455304 - DNA, 25 bp, Homo sapien
ggagcctgcaactcagacgactgta

SEQ ID NO: 5455305 - DNA, 25 bp, Homo sapien
ttttggtatgtgtgggagcctgcaa

SEQ ID NO: 5455306 - DNA, 25 bp, Homo sapien
aatacagatctataaacaaaacccg

SEQ ID NO: 5455307 - DNA, 25 bp, Homo sapien
ctatagatatgtagaactgtaacca

SEQ ID NO: 5455308 - DNA, 25 bp, Homo sapien
gaaaagggatcagtttgcaaacagt

SEQ ID NO: 5455309 - DNA, 25 bp, Homo sapien
gaagtaaagagtgcagttggaaaca

SEQ ID NO: 5455310 - DNA, 25 bp, Homo sapien
tctaacagccagtcaggaaaatctt

SEQ ID NO: 5455311 - DNA, 25 bp, Homo sapien
ttccgccagacttttctggagatgg

SEQ ID NO: 5455312 - DNA, 25 bp, Homo sapien
tcagattgtcgtgtgggtgggtaac

SEQ ID NO: 5455313 - DNA, 25 bp, Homo sapien
taatccagccgtgggatgtggtttc

SEQ ID NO: 5455314 - DNA, 25 bp, Homo sapien
caaatgcagtgcagatccattggtg

SEQ ID NO: 5455315 - DNA, 25 bp, Homo sapien
aggatttctgatgctaatttgttgc

SEQ ID NO: 5455316 - DNA, 25 bp, Homo sapien
cagtgcagatccattggtgagtctt

SEQ ID NO: 5455317 - DNA, 25 bp, Homo sapien
tgatgctaatttgttgcccttggga

SEQ ID NO: 5455318 - DNA, 25 bp, Homo sapien
tccctgctgattgttgggaaatgca

SEQ ID NO: 5455319 - DNA, 25 bp, Homo sapien
gctttgctgccatcgtattgaggta

SEQ ID NO: 5455320 - DNA, 25 bp, Homo sapien
attattcctaatgtggtggtcccag

SEQ ID NO: 5455321 - DNA, 25 bp, Homo sapien
tcccagtactgtttggcgaggaacg

SEQ ID NO: 5455322 - DNA, 25 bp, Homo sapien
cttcagctctgtctggtctccttgt

SEQ ID NO: 5455323 - DNA, 25 bp, Homo sapien
tgagagtctgtcaccacctcttcct

SEQ ID NO: 5455324 - DNA, 25 bp, Homo sapien
tctgtctggtctccttgtgaggctg

SEQ ID NO: 5455325 - DNA, 25 bp, Homo sapien
ctgacacagccctctgagagtctgt

SEQ ID NO: 5455326 - DNA, 25 bp, Homo sapien
gctgttttcgtgatatactgcatta

SEQ ID NO: 5455327 - DNA, 25 bp, Homo sapien
gttttcgtgatatactgcattagag

SEQ ID NO: 5455328 - DNA, 25 bp, Homo sapien
gatatactgcattagagtaagacac

SEQ ID NO: 5455329 - DNA, 25 bp, Homo sapien
tcgtgatatactgcattagagtaag

SEQ ID NO: 5455330 - DNA, 25 bp, Homo sapien
cgtagtcagtcttgccaactgggta

SEQ ID NO: 5455331 - DNA, 25 bp, Homo sapien
tgccaactgggtagataaccaacaa

SEQ ID NO: 5455332 - DNA, 25 bp, Homo sapien
ggtgctttgtagcacgtagtcagtc

SEQ ID NO: 5455333 - DNA, 25 bp, Homo sapien
gataaccaacaatgatacatgccat

SEQ ID NO: 5455334 - DNA, 25 bp, Homo sapien
ttttacttctaatttccacaccatg

SEQ ID NO: 5455335 - DNA, 25 bp, Homo sapien
atttccacaccatgaaaacccagag

SEQ ID NO: 5455336 - DNA, 25 bp, Homo sapien
ttccacaccatgaaaacccagaggc

SEQ ID NO: 5455337 - DNA, 25 bp, Homo sapien
tctaatttccacaccatgaaaaccc

SEQ ID NO: 5455338 - DNA, 25 bp, Homo sapien
ggttaaggactgagcaaaggtttga

SEQ ID NO: 5455339 - DNA, 25 bp, Homo sapien
taaggactgagcaaaggtttgaggc

SEQ ID NO: 5455340 - DNA, 25 bp, Homo sapien
gactgagcaaaggtttgaggcattt

SEQ ID NO: 5455341 - DNA, 25 bp, Homo sapien
cctgggttaaggactgagcaaaggt

SEQ ID NO: 5455342 - DNA, 25 bp, Homo sapien
tttcttttgcgtaaagcacctgcca

SEQ ID NO: 5455343 - DNA, 25 bp, Homo sapien
cttttgcgtaaagcacctgccatat

SEQ ID NO: 5455344 - DNA, 25 bp, Homo sapien
attttcttttgcgtaaagcacctgc

SEQ ID NO: 5455345 - DNA, 25 bp, Homo sapien
ctgattttcttttgcgtaaagcacc

SEQ ID NO: 5455346 - DNA, 25 bp, Homo sapien
cttcctagttaccctctcatctgtg

SEQ ID NO: 5455347 - DNA, 25 bp, Homo sapien
ttcctagttaccctctcatctgtga

SEQ ID NO: 5455348 - DNA, 25 bp, Homo sapien
tgtctatttacgttgttggtgtacg

SEQ ID NO: 5455349 - DNA, 25 bp, Homo sapien
gttggtgtacgtgtgcttgtgtacc

SEQ ID NO: 5455350 - DNA, 25 bp, Homo sapien
gtgtctatttacgttgttggtgtac

SEQ ID NO: 5455351 - DNA, 25 bp, Homo sapien
tgttggtgtacgtgtgcttgtgtac

SEQ ID NO: 5455352 - DNA, 25 bp, Homo sapien
tccacgatgtcccagagttggccag

SEQ ID NO: 5455353 - DNA, 25 bp, Homo sapien
tctcagaggtcgatcagcaagctca

SEQ ID NO: 5455354 - DNA, 25 bp, Homo sapien
tgtacactggactgctcaaagctct

SEQ ID NO: 5455355 - DNA, 25 bp, Homo sapien
taagacttacccctgacttggtcca

SEQ ID NO: 5455356 - DNA, 25 bp, Homo sapien
cttgaaaggcaaatgtgttcaggac

SEQ ID NO: 5455357 - DNA, 25 bp, Homo sapien
tgtgttcaggacaatgttaacactt

SEQ ID NO: 5455358 - DNA, 25 bp, Homo sapien
ttaatcttcttgaaaggcaaatgtg

SEQ ID NO: 5455359 - DNA, 25 bp, Homo sapien
gtgttcaggacaatgttaacactta

SEQ ID NO: 5455360 - DNA, 25 bp, Homo sapien
gagtttccccgtatctgctgctgca

SEQ ID NO: 5455361 - DNA, 25 bp, Homo sapien
tcacttgtgctcagaaaccagtccc

SEQ ID NO: 5455362 - DNA, 25 bp, Homo sapien
gagcaatcccacgtagtatcctgtg

SEQ ID NO: 5455363 - DNA, 25 bp, Homo sapien
tgatcctctgcgaggccactgtggt

SEQ ID NO: 5455364 - DNA, 25 bp, Homo sapien
gaactataactattcaagtccagga

SEQ ID NO: 5455365 - DNA, 25 bp, Homo sapien
ggaatgatattgttgagtcccaacc

SEQ ID NO: 5455366 - DNA, 25 bp, Homo sapien
gatagaggaaaacaggtgagccaaa

SEQ ID NO: 5455367 - DNA, 25 bp, Homo sapien
tgtcagactagataacacagtatgg

SEQ ID NO: 5455368 - DNA, 25 bp, Homo sapien
tggccctgaagttgccttgtcatgg

SEQ ID NO: 5455369 - DNA, 25 bp, Homo sapien
gtagctcatcctccaatattctcca

SEQ ID NO: 5455370 - DNA, 25 bp, Homo sapien
ttcttggccctgaagttgccttgtc

SEQ ID NO: 5455371 - DNA, 25 bp, Homo sapien
ctgaagttgccttgtcatggctccc

SEQ ID NO: 5455372 - DNA, 25 bp, Homo sapien
aaggattagaggcaaagtcgaagga

SEQ ID NO: 5455373 - DNA, 25 bp, Homo sapien
gattagaggcaaagtcgaaggaagc

SEQ ID NO: 5455374 - DNA, 25 bp, Homo sapien
ccaagactagaaggattagaggcaa

SEQ ID NO: 5455375 - DNA, 25 bp, Homo sapien
tcatggaccaagactagaaggatta

SEQ ID NO: 5455376 - DNA, 25 bp, Homo sapien
ccacacacactcatttaaaccttgg

SEQ ID NO: 5455377 - DNA, 25 bp, Homo sapien
gtcaaaattatcctttagcatctgc

SEQ ID NO: 5455378 - DNA, 25 bp, Homo sapien
caaaattatcctttagcatctgcat

SEQ ID NO: 5455379 - DNA, 25 bp, Homo sapien
ccttggtcaaaattatcctttagca

SEQ ID NO: 5455380 - DNA, 25 bp, Homo sapien
tgatataggcatttgaaaacccttg

SEQ ID NO: 5455381 - DNA, 25 bp, Homo sapien
tcagtgcatactgctggagggtcag

SEQ ID NO: 5455382 - DNA, 25 bp, Homo sapien
gggtcagttctgcatcaaggagata

SEQ ID NO: 5455383 - DNA, 25 bp, Homo sapien
taaggtcctgtgggcatcagtgcat

SEQ ID NO: 5455384 - DNA, 25 bp, Homo sapien
atttatcagcggcacatggacccag

SEQ ID NO: 5455385 - DNA, 25 bp, Homo sapien
ttgttaggtcctatcccagggcact

SEQ ID NO: 5455386 - DNA, 25 bp, Homo sapien
tcatactagatgctctgcaggcccg

SEQ ID NO: 5455387 - DNA, 25 bp, Homo sapien
gagggccctctcaaggaaattaata

SEQ ID NO: 5455388 - DNA, 25 bp, Homo sapien
tatcaggaacattaggtcggcatcc

SEQ ID NO: 5455389 - DNA, 25 bp, Homo sapien
tctccctctgttatcaggaacatta

SEQ ID NO: 5455390 - DNA, 25 bp, Homo sapien
ggaacattaggtcggcatcctggtg

SEQ ID NO: 5455391 - DNA, 25 bp, Homo sapien
tctgttatcaggaacattaggtcgg

SEQ ID NO: 5455392 - DNA, 25 bp, Homo sapien
cattcaagttgttggtcgaattcat

SEQ ID NO: 5455393 - DNA, 25 bp, Homo sapien
catgtcctcgagtctgcatgagtga

SEQ ID NO: 5455394 - DNA, 25 bp, Homo sapien
gtgaggtcccagctcttactgactt

SEQ ID NO: 5455395 - DNA, 25 bp, Homo sapien
ctgaagactggactagggaagaatc

SEQ ID NO: 5455396 - DNA, 25 bp, Homo sapien
gcatctcctagtactcatatgcaag

SEQ ID NO: 5455397 - DNA, 25 bp, Homo sapien
taagtagacgtttttatcaatgggc

SEQ ID NO: 5455398 - DNA, 25 bp, Homo sapien
gccgtgaacattgtcatgcatctcc

SEQ ID NO: 5455399 - DNA, 25 bp, Homo sapien
tgtagatcaatcatttccactcgca

SEQ ID NO: 5455400 - DNA, 25 bp, Homo sapien
aatttgcctataattgcccttgggc

SEQ ID NO: 5455401 - DNA, 25 bp, Homo sapien
tcagtgtcaatcagtaaccggatca

SEQ ID NO: 5455402 - DNA, 25 bp, Homo sapien
catggttccagaggcttaactgaca

SEQ ID NO: 5455403 - DNA, 25 bp, Homo sapien
taggaggcaagtccatacaatgaca

SEQ ID NO: 5455404 - DNA, 25 bp, Homo sapien
tcggtgcaaaagcactcttcatata

SEQ ID NO: 5455405 - DNA, 25 bp, Homo sapien
ctagtacagttgattgaaggttcac

SEQ ID NO: 5455406 - DNA, 25 bp, Homo sapien
tactatctcagttaatgcttacaag

SEQ ID NO: 5455407 - DNA, 25 bp, Homo sapien
gctcttccaggcatacaaactagta

SEQ ID NO: 5455408 - DNA, 25 bp, Homo sapien
aatttctacattgcaggcttgaggt

SEQ ID NO: 5455409 - DNA, 25 bp, Homo sapien
ggcgggaaactcaagcagaatttct

SEQ ID NO: 5455410 - DNA, 25 bp, Homo sapien
tcttgactccgaattccacagggca

SEQ ID NO: 5455411 - DNA, 25 bp, Homo sapien
ccagcaggcgggaaactcaagcaga

SEQ ID NO: 5455412 - DNA, 25 bp, Homo sapien
taaggcagtgctacttctgaagtgc

SEQ ID NO: 5455413 - DNA, 25 bp, Homo sapien
gcttccgctgggcattgcagctgca

SEQ ID NO: 5455414 - DNA, 25 bp, Homo sapien
gcctttccccacaggttgctggaga

SEQ ID NO: 5455415 - DNA, 25 bp, Homo sapien
aagtgctgaacattgctgcttccgc

SEQ ID NO: 5455416 - DNA, 25 bp, Homo sapien
tccatagcagccagacagtcactta

SEQ ID NO: 5455417 - DNA, 25 bp, Homo sapien
cagccagacagtcacttaaagatgg

SEQ ID NO: 5455418 - DNA, 25 bp, Homo sapien
ccagacagtcacttaaagatggtaa

SEQ ID NO: 5455419 - DNA, 25 bp, Homo sapien
ccatagcagccagacagtcacttaa

SEQ ID NO: 5455420 - DNA, 25 bp, Homo sapien
agggatggtagttatgtcgtttgat

SEQ ID NO: 5455421 - DNA, 25 bp, Homo sapien
tgttgagctttcctagtaagtatcc

SEQ ID NO: 5455422 - DNA, 25 bp, Homo sapien
cctagtaagtatcccacaccagagg

SEQ ID NO: 5455423 - DNA, 25 bp, Homo sapien
tgtattacaataggtctgttgagct

SEQ ID NO: 5455424 - DNA, 25 bp, Homo sapien
cagttttgcaataccccagggggat

SEQ ID NO: 5455425 - DNA, 25 bp, Homo sapien
tgttgttagactggagatctcccgc

SEQ ID NO: 5455426 - DNA, 25 bp, Homo sapien
cacttattcaaagaccaagatccag

SEQ ID NO: 5455427 - DNA, 25 bp, Homo sapien
cggtgtacaatgatctctgttgtta

SEQ ID NO: 5455428 - DNA, 25 bp, Homo sapien
ggccaatactggcaaatcctctttg

SEQ ID NO: 5455429 - DNA, 25 bp, Homo sapien
cacggtggcttgcaggccaatactg

SEQ ID NO: 5455430 - DNA, 25 bp, Homo sapien
tctttccagaaatcggcacggtggc

SEQ ID NO: 5455431 - DNA, 25 bp, Homo sapien
cttctttccagaaatcggcacggtg

SEQ ID NO: 5455432 - DNA, 25 bp, Homo sapien
cacatttctaagtgggcaatacagt

SEQ ID NO: 5455433 - DNA, 25 bp, Homo sapien
taacatgggaatctaactgcttaac

SEQ ID NO: 5455434 - DNA, 25 bp, Homo sapien
tatgccagctgaccagtaattcccc

SEQ ID NO: 5455435 - DNA, 25 bp, Homo sapien
tacagtattattgacaaccattttg

SEQ ID NO: 5455436 - DNA, 25 bp, Homo sapien
gatatggcaagctccacctctctct

SEQ ID NO: 5455437 - DNA, 25 bp, Homo sapien
ggcaagctccacctctctctttatt

SEQ ID NO: 5455438 - DNA, 25 bp, Homo sapien
cagatatggcaagctccacctctct

SEQ ID NO: 5455439 - DNA, 25 bp, Homo sapien
aagctccacctctctctttattccc

SEQ ID NO: 5455440 - DNA, 25 bp, Homo sapien
tgagcccatgggaaagagccaagaa

SEQ ID NO: 5455441 - DNA, 25 bp, Homo sapien
actcccacagacctcgtgcagggca

SEQ ID NO: 5455442 - DNA, 25 bp, Homo sapien
tgccagcactcccacagacctcgtg

SEQ ID NO: 5455443 - DNA, 25 bp, Homo sapien
gcagtgagcccatgggaaagagcca

SEQ ID NO: 5455444 - DNA, 25 bp, Homo sapien
gtctgatgtgtgctgagtcatatgg

SEQ ID NO: 5455445 - DNA, 25 bp, Homo sapien
cttggaatcagaagctattaaagtg

SEQ ID NO: 5455446 - DNA, 25 bp, Homo sapien
gaacgagcctccaaaggcactacaa

SEQ ID NO: 5455447 - DNA, 25 bp, Homo sapien
ggctccttgccagacacacgtactg

SEQ ID NO: 5455448 - DNA, 25 bp, Homo sapien
caaagatttcttaggtcttacacct

SEQ ID NO: 5455449 - DNA, 25 bp, Homo sapien
gaccttcaatccatatttcacctca

SEQ ID NO: 5455450 - DNA, 25 bp, Homo sapien
taaaaggcagcataggagaacatat

SEQ ID NO: 5455451 - DNA, 25 bp, Homo sapien
tgccaaagaatgaccttcaatccat

SEQ ID NO: 5455452 - DNA, 25 bp, Homo sapien
tatgagggggatacagccgctcagc

SEQ ID NO: 5455453 - DNA, 25 bp, Homo sapien
gagggggatacagccgctcagcaat

SEQ ID NO: 5455454 - DNA, 25 bp, Homo sapien
ccatccttatgagggggatacagcc

SEQ ID NO: 5455455 - DNA, 25 bp, Homo sapien
ccttatgagggggatacagccgctc

SEQ ID NO: 5455456 - DNA, 25 bp, Homo sapien
acaacatgacagctaacttccccag

SEQ ID NO: 5455457 - DNA, 25 bp, Homo sapien
ttgcgacatgaacctctttataaac

SEQ ID NO: 5455458 - DNA, 25 bp, Homo sapien
aacatgacagctaacttccccagag

SEQ ID NO: 5455459 - DNA, 25 bp, Homo sapien
tccattccttgcgacatgaacctct

SEQ ID NO: 5455460 - DNA, 25 bp, Homo sapien
taagttcggacatgtcttagcatcc

SEQ ID NO: 5455461 - DNA, 25 bp, Homo sapien
tagcatcccttggatagtctttgcc

SEQ ID NO: 5455462 - DNA, 25 bp, Homo sapien
tatttcaacaacaatcagcatggga

SEQ ID NO: 5455463 - DNA, 25 bp, Homo sapien
ggctgaggagagtatagacaacttc

SEQ ID NO: 5455464 - DNA, 25 bp, Homo sapien
ggcattttctccctcacgaatgtct

SEQ ID NO: 5455465 - DNA, 25 bp, Homo sapien
gtctgggaaatcctatccttgcttg

SEQ ID NO: 5455466 - DNA, 25 bp, Homo sapien
ccctcacgaatgtctgggaaatcct

SEQ ID NO: 5455467 - DNA, 25 bp, Homo sapien
gaatgtctgggaaatcctatccttg

SEQ ID NO: 5455468 - DNA, 25 bp, Homo sapien
gataagatgggatgccaagcacaag

SEQ ID NO: 5455469 - DNA, 25 bp, Homo sapien
cagtgaatttaagggcagttggtcc

SEQ ID NO: 5455470 - DNA, 25 bp, Homo sapien
tggtccttcactctaggtatgtccc

SEQ ID NO: 5455471 - DNA, 25 bp, Homo sapien
catcacctaacagcagagcaaggag

SEQ ID NO: 5455472 - DNA, 25 bp, Homo sapien
tcctgcttcaacacttttgcatcgt

SEQ ID NO: 5455473 - DNA, 25 bp, Homo sapien
caacacttttgcatcgtgcttccta

SEQ ID NO: 5455474 - DNA, 25 bp, Homo sapien
tatctacgtaacacgaagaatcccc

SEQ ID NO: 5455475 - DNA, 25 bp, Homo sapien
tgcatcgtgcttcctatctacgtaa

SEQ ID NO: 5455476 - DNA, 25 bp, Homo sapien
gattgatgtcatgttgcactggctt

SEQ ID NO: 5455477 - DNA, 25 bp, Homo sapien
atctctctccggttggttttgttgg

SEQ ID NO: 5455478 - DNA, 25 bp, Homo sapien
cttgtgaaaggtgtgaatagtggtg

SEQ ID NO: 5455479 - DNA, 25 bp, Homo sapien
gggacagattgtttgaaaccatctc

SEQ ID NO: 5455480 - DNA, 25 bp, Homo sapien
gaagttaaatatgtggtgatggtac

SEQ ID NO: 5455481 - DNA, 25 bp, Homo sapien
gggaagttaaatatgtggtgatggt

SEQ ID NO: 5455482 - DNA, 25 bp, Homo sapien
gagggggaagttaaatatgtggtga

SEQ ID NO: 5455483 - DNA, 25 bp, Homo sapien
gttaaatatgtggtgatggtactac

SEQ ID NO: 5455484 - DNA, 25 bp, Homo sapien
ggccagcatgaaacgagggtctttt

SEQ ID NO: 5455485 - DNA, 25 bp, Homo sapien
tcggccagcatgaaacgagggtctt

SEQ ID NO: 5455486 - DNA, 25 bp, Homo sapien
cagcatgaaacgagggtctttttaa

SEQ ID NO: 5455487 - DNA, 25 bp, Homo sapien
catcggccagcatgaaacgagggtc

SEQ ID NO: 5455488 - DNA, 25 bp, Homo sapien
aaatcaattcaaacgaaaattgcag

SEQ ID NO: 5455489 - DNA, 25 bp, Homo sapien
attcaaacgaaaattgcagaagggt

SEQ ID NO: 5455490 - DNA, 25 bp, Homo sapien
tcaattcaaacgaaaattgcagaag

SEQ ID NO: 5455491 - DNA, 25 bp, Homo sapien
aaagtgtatatcaggtgcttttaaa

SEQ ID NO: 5455492 - DNA, 25 bp, Homo sapien
ccaactagatatggaaggaacctga

SEQ ID NO: 5455493 - DNA, 25 bp, Homo sapien
gaggaggagaccagcgacactgttt

SEQ ID NO: 5455494 - DNA, 25 bp, Homo sapien
gaggtgaaccccaagatcagaagga

SEQ ID NO: 5455495 - DNA, 25 bp, Homo sapien
tctcaggaaatagggacgggcaaat

SEQ ID NO: 5455496 - DNA, 25 bp, Homo sapien
ctgacccatgggctgtcctgaactg

SEQ ID NO: 5455497 - DNA, 25 bp, Homo sapien
gggcagcgggcacattcctcagttc

SEQ ID NO: 5455498 - DNA, 25 bp, Homo sapien
cccatgggctgtcctgaactgaact

SEQ ID NO: 5455499 - DNA, 25 bp, Homo sapien
tcctcagttccctctgacccatggg

SEQ ID NO: 5455500 - DNA, 25 bp, Homo sapien
gcataggggaatggcttcttgtgtc

SEQ ID NO: 5455501 - DNA, 25 bp, Homo sapien
tcttttcccaatatggtttctgggc

SEQ ID NO: 5455502 - DNA, 25 bp, Homo sapien
ggcataggggaatggcttcttgtgt

SEQ ID NO: 5455503 - DNA, 25 bp, Homo sapien
tttcccaatatggtttctgggcata

SEQ ID NO: 5455504 - DNA, 25 bp, Homo sapien
tgggcattgtgctctcaagggatct

SEQ ID NO: 5455505 - DNA, 25 bp, Homo sapien
gggtcaggcctttatgaatcacaat

SEQ ID NO: 5455506 - DNA, 25 bp, Homo sapien
tttaagaccactgtgaggatcccca

SEQ ID NO: 5455507 - DNA, 25 bp, Homo sapien
caatatgactctcccatcagaagca

SEQ ID NO: 5455508 - DNA, 25 bp, Homo sapien
agtttaagatgctattctgatgtac

SEQ ID NO: 5455509 - DNA, 25 bp, Homo sapien
cagaggctaagtctgggtgttcaca

SEQ ID NO: 5455510 - DNA, 25 bp, Homo sapien
taagctcaatactttcaagaaccca

SEQ ID NO: 5455511 - DNA, 25 bp, Homo sapien
gctattctgatgtacttaagctcaa

SEQ ID NO: 5455512 - DNA, 25 bp, Homo sapien
tttgcagatacaggttccattatgt

SEQ ID NO: 5455513 - DNA, 25 bp, Homo sapien
agattgctgctgaattgtcctttgc

SEQ ID NO: 5455514 - DNA, 25 bp, Homo sapien
tatcagtggctatcaatccaagcag

SEQ ID NO: 5455515 - DNA, 25 bp, Homo sapien
cttcaagcatctggttatcagtggc

SEQ ID NO: 5455516 - DNA, 25 bp, Homo sapien
ggaaacgacaaatccaggactggag

SEQ ID NO: 5455517 - DNA, 25 bp, Homo sapien
gacaataagtggtttgctccagcac

SEQ ID NO: 5455518 - DNA, 25 bp, Homo sapien
gattatggtcatcagtgcatgcaga

SEQ ID NO: 5455519 - DNA, 25 bp, Homo sapien
gagattccccgtgaacaaaagctaa

SEQ ID NO: 5455520 - DNA, 25 bp, Homo sapien
ctgccaaaacccattgctgatgtcc

SEQ ID NO: 5455521 - DNA, 25 bp, Homo sapien
tgccaaaacccattgctgatgtccc

SEQ ID NO: 5455522 - DNA, 25 bp, Homo sapien
tctggaggtcttcctgtagcaccat

SEQ ID NO: 5455523 - DNA, 25 bp, Homo sapien
caaatttctggaggtcttcctgtag

SEQ ID NO: 5455524 - DNA, 25 bp, Homo sapien
tgtcaaatttctggaggtcttcctg

SEQ ID NO: 5455525 - DNA, 25 bp, Homo sapien
ttgtcaaatttctggaggtcttcct

SEQ ID NO: 5455526 - DNA, 25 bp, Homo sapien
gcatgttgacatccctcggactcag

SEQ ID NO: 5455527 - DNA, 25 bp, Homo sapien
ggagagcccagtgctataattccat

SEQ ID NO: 5455528 - DNA, 25 bp, Homo sapien
ggcagctagaattccagcccactga

SEQ ID NO: 5455529 - DNA, 25 bp, Homo sapien
tccatggatatgattgtgaggtctt

SEQ ID NO: 5455530 - DNA, 25 bp, Homo sapien
acagctgcgattaggtgactcacca

SEQ ID NO: 5455531 - DNA, 25 bp, Homo sapien
gattacagctgcgattaggtgactc

SEQ ID NO: 5455532 - DNA, 25 bp, Homo sapien
gccgtgattacagctgcgattaggt

SEQ ID NO: 5455533 - DNA, 25 bp, Homo sapien
gaatgccctcaactgttttgacttc

SEQ ID NO: 5455534 - DNA, 25 bp, Homo sapien
acacctcaatttgcccagttgccag

SEQ ID NO: 5455535 - DNA, 25 bp, Homo sapien
ccctcctttagtcccatattcttca

SEQ ID NO: 5455536 - DNA, 25 bp, Homo sapien
atcttctccctcctttagtcccata

SEQ ID NO: 5455537 - DNA, 25 bp, Homo sapien
ctcctgcaatgacacctcaatttgc

SEQ ID NO: 5455538 - DNA, 25 bp, Homo sapien
tctatcagttgatgggcaaacaaat

SEQ ID NO: 5455539 - DNA, 25 bp, Homo sapien
caaacaaatttgtagtatacccaca

SEQ ID NO: 5455540 - DNA, 25 bp, Homo sapien
ggaatcaataccaatatctatcagt

SEQ ID NO: 5455541 - DNA, 25 bp, Homo sapien
ggaaaagggacaattagcagtgact

SEQ ID NO: 5455542 - DNA, 25 bp, Homo sapien
tcagtcaaatctctttttccatggg

SEQ ID NO: 5455543 - DNA, 25 bp, Homo sapien
gagttcactcaattcttatttcgca

SEQ ID NO: 5455544 - DNA, 25 bp, Homo sapien
gccttgtatgagtgtcgtctgccat

SEQ ID NO: 5455545 - DNA, 25 bp, Homo sapien
tccatgggtactttataacttggcc

SEQ ID NO: 5455546 - DNA, 25 bp, Homo sapien
caggatccaatcttcaacactagtc

SEQ ID NO: 5455547 - DNA, 25 bp, Homo sapien
catctgcatccggaatactggcagc

SEQ ID NO: 5455548 - DNA, 25 bp, Homo sapien
tactggcagcaatgacgacaacaat

SEQ ID NO: 5455549 - DNA, 25 bp, Homo sapien
cgacaacaatagcagatcagcataa

SEQ ID NO: 5455550 - DNA, 25 bp, Homo sapien
atccttcttagaggctgcagtctgc

SEQ ID NO: 5455551 - DNA, 25 bp, Homo sapien
gaggggagctgggtaagctgttgtt

SEQ ID NO: 5455552 - DNA, 25 bp, Homo sapien
tttcctgtaacatccttcttagagg

SEQ ID NO: 5455553 - DNA, 25 bp, Homo sapien
gagctgggtaagctgttgtttttcc

SEQ ID NO: 5455554 - DNA, 25 bp, Homo sapien
agtggtccagaaaattcaaacaggg

SEQ ID NO: 5455555 - DNA, 25 bp, Homo sapien
tcagtggtccagaaaattcaaacag

SEQ ID NO: 5455556 - DNA, 25 bp, Homo sapien
cagtggtccagaaaattcaaacagg

SEQ ID NO: 5455557 - DNA, 25 bp, Homo sapien
caggggcttgacaactctagcagcc

SEQ ID NO: 5455558 - DNA, 25 bp, Homo sapien
cacaacctggcaccccacattcttt

SEQ ID NO: 5455559 - DNA, 25 bp, Homo sapien
ctgacacaacctggcaccccacatt

SEQ ID NO: 5455560 - DNA, 25 bp, Homo sapien
tttctccgatttccctgtcatcagg

SEQ ID NO: 5455561 - DNA, 25 bp, Homo sapien
gaagtcaaccttcatagctgatatt

SEQ ID NO: 5455562 - DNA, 25 bp, Homo sapien
taaatggcaagttgccgcaactctg

SEQ ID NO: 5455563 - DNA, 25 bp, Homo sapien
caaagcatgtaatcattgtgaagtc

SEQ ID NO: 5455564 - DNA, 25 bp, Homo sapien
tgttcttaaagagctctatgccttt

SEQ ID NO: 5455565 - DNA, 25 bp, Homo sapien
gtggacagagccttctggattccac

SEQ ID NO: 5455566 - DNA, 25 bp, Homo sapien
tggacagagccttctggattccact

SEQ ID NO: 5455567 - DNA, 25 bp, Homo sapien
tgtggacagagccttctggattcca

SEQ ID NO: 5455568 - DNA, 25 bp, Homo sapien
aagaggtcttgcagtgtggacagag

SEQ ID NO: 5455569 - DNA, 25 bp, Homo sapien
ttcctgcagccaacatattgagagt

SEQ ID NO: 5455570 - DNA, 25 bp, Homo sapien
ggtcgccccaaagttctggtgttca

SEQ ID NO: 5455571 - DNA, 25 bp, Homo sapien
atgatcggaagggtcgccccaaagt

SEQ ID NO: 5455572 - DNA, 25 bp, Homo sapien
tcatttttcatgatcggaagggtcg

SEQ ID NO: 5455573 - DNA, 25 bp, Homo sapien
cgccccaaagttctggtgttcataa

SEQ ID NO: 5455574 - DNA, 25 bp, Homo sapien
gcacccagatgttagcctgaatttc

SEQ ID NO: 5455575 - DNA, 25 bp, Homo sapien
acccagatgttagcctgaatttccc

SEQ ID NO: 5455576 - DNA, 25 bp, Homo sapien
gagcacccagatgttagcctgaatt

SEQ ID NO: 5455577 - DNA, 25 bp, Homo sapien
gggagcacccagatgttagcctgaa

SEQ ID NO: 5455578 - DNA, 25 bp, Homo sapien
ggatggtgaacacggactcttttcc

SEQ ID NO: 5455579 - DNA, 25 bp, Homo sapien
tggatggtgaacacggactcttttc

SEQ ID NO: 5455580 - DNA, 25 bp, Homo sapien
ctggatggtgaacacggactctttt

SEQ ID NO: 5455581 - DNA, 25 bp, Homo sapien
tggatatagcccacatggcaggagg

SEQ ID NO: 5455582 - DNA, 25 bp, Homo sapien
gattgccctggttgttccccttctg

SEQ ID NO: 5455583 - DNA, 25 bp, Homo sapien
tgctggatgccttgaaaaacccaac

SEQ ID NO: 5455584 - DNA, 25 bp, Homo sapien
tacacgtacagccactaaggacatc

SEQ ID NO: 5455585 - DNA, 25 bp, Homo sapien
acctcagaagatctacctgtcttac

SEQ ID NO: 5455586 - DNA, 25 bp, Homo sapien
cctcagaagatctacctgtcttacc

SEQ ID NO: 5455587 - DNA, 25 bp, Homo sapien
gaagatctacctgtcttacccaaaa

SEQ ID NO: 5455588 - DNA, 25 bp, Homo sapien
ctcagaagatctacctgtcttaccc

SEQ ID NO: 5455589 - DNA, 25 bp, Homo sapien
gacgtactttgtctcatgttttcct

SEQ ID NO: 5455590 - DNA, 25 bp, Homo sapien
caccctgagaatcagatattcttat

SEQ ID NO: 5455591 - DNA, 25 bp, Homo sapien
cctgagaatcagatattcttatccc

SEQ ID NO: 5455592 - DNA, 25 bp, Homo sapien
ccagataaatactttcagacgtact

SEQ ID NO: 5455593 - DNA, 25 bp, Homo sapien
aatcagaagagtccagatgcacaca

SEQ ID NO: 5455594 - DNA, 25 bp, Homo sapien
tcgcccgtgtgcacaggaatcagaa

SEQ ID NO: 5455595 - DNA, 25 bp, Homo sapien
cctcgcccgtgtgcacaggaatcag

SEQ ID NO: 5455596 - DNA, 25 bp, Homo sapien
gaagagtccagatgcacacagccat

SEQ ID NO: 5455597 - DNA, 25 bp, Homo sapien
gatggagtattctggttctgaagtg

SEQ ID NO: 5455598 - DNA, 25 bp, Homo sapien
atggagtattctggttctgaagtgg

SEQ ID NO: 5455599 - DNA, 25 bp, Homo sapien
tggagtattctggttctgaagtgga

SEQ ID NO: 5455600 - DNA, 25 bp, Homo sapien
gaggaagtgaaaaatcccaggtcat

SEQ ID NO: 5455601 - DNA, 25 bp, Homo sapien
tgaggaagtgaaaaatcccaggtca

SEQ ID NO: 5455602 - DNA, 25 bp, Homo sapien
ctgaggaagtgaaaaatcccaggtc

SEQ ID NO: 5455603 - DNA, 25 bp, Homo sapien
gtaggatggtggccagaaccacttg

SEQ ID NO: 5455604 - DNA, 25 bp, Homo sapien
ggtaggatggtggccagaaccactt

SEQ ID NO: 5455605 - DNA, 25 bp, Homo sapien
gggtaggatggtggccagaaccact

SEQ ID NO: 5455606 - DNA, 25 bp, Homo sapien
tataccacccagtagccagtttagt

SEQ ID NO: 5455607 - DNA, 25 bp, Homo sapien
tgtaattttggactgtaccctggac

SEQ ID NO: 5455608 - DNA, 25 bp, Homo sapien
ggtatagcccatagttcagttctca

SEQ ID NO: 5455609 - DNA, 25 bp, Homo sapien
aagtagcccagttggtttcagtcca

SEQ ID NO: 5455610 - DNA, 25 bp, Homo sapien
cggcctataggtgcaaacatctgga

SEQ ID NO: 5455611 - DNA, 25 bp, Homo sapien
ctgcagtcagctttgccggcctata

SEQ ID NO: 5455612 - DNA, 25 bp, Homo sapien
tgcagtcagctttgccggcctatag

SEQ ID NO: 5455613 - DNA, 25 bp, Homo sapien
cagtcagctttgccggcctataggt

SEQ ID NO: 5455614 - DNA, 25 bp, Homo sapien
tagcaccttctgactctccccaggc

SEQ ID NO: 5455615 - DNA, 25 bp, Homo sapien
aggggagcacttaagaggaggacag

SEQ ID NO: 5455616 - DNA, 25 bp, Homo sapien
tgtagcaccttctgactctccccag

SEQ ID NO: 5455617 - DNA, 25 bp, Homo sapien
ttgatgtagcaccttctgactctcc

SEQ ID NO: 5455618 - DNA, 25 bp, Homo sapien
cacagctcagcacccagactccttc

SEQ ID NO: 5455619 - DNA, 25 bp, Homo sapien
ggcacagctcagcacccagactcct

SEQ ID NO: 5455620 - DNA, 25 bp, Homo sapien
tcagcacccagactccttccatcac

SEQ ID NO: 5455621 - DNA, 25 bp, Homo sapien
gtccatggcacagctcagcacccag

SEQ ID NO: 5455622 - DNA, 25 bp, Homo sapien
tggccttgcagggaacggaagggac

SEQ ID NO: 5455623 - DNA, 25 bp, Homo sapien
ctgtcttcgtaagcctccctggaaa

SEQ ID NO: 5455624 - DNA, 25 bp, Homo sapien
aaatggccttgcagggaacggaagg

SEQ ID NO: 5455625 - DNA, 25 bp, Homo sapien
tctgctgtcttcgtaagcctccctg

SEQ ID NO: 5455626 - DNA, 25 bp, Homo sapien
tagcttttccccatagaactcagga

SEQ ID NO: 5455627 - DNA, 25 bp, Homo sapien
gcaatgatacaagagctctgggtcc

SEQ ID NO: 5455628 - DNA, 25 bp, Homo sapien
tctcaggtctcggtgagtcactcca

SEQ ID NO: 5455629 - DNA, 25 bp, Homo sapien
tccaccagggaagatctgagccttt

SEQ ID NO: 5455630 - DNA, 25 bp, Homo sapien
cctcttcatctgtttgttgtaaatt

SEQ ID NO: 5455631 - DNA, 25 bp, Homo sapien
cagaactgtcagcaccatccagctt

SEQ ID NO: 5455632 - DNA, 25 bp, Homo sapien
ctttgctgtgcaggatcaacttccc

SEQ ID NO: 5455633 - DNA, 25 bp, Homo sapien
tgtgcaggatcaacttcccaccaga

SEQ ID NO: 5455634 - DNA, 25 bp, Homo sapien
tgactggagttatggagggtcatct

SEQ ID NO: 5455635 - DNA, 25 bp, Homo sapien
ggggccggtagagccactgctcctt

SEQ ID NO: 5455636 - DNA, 25 bp, Homo sapien
gacatttcccaggggccggtagagc

SEQ ID NO: 5455637 - DNA, 25 bp, Homo sapien
tcccaggggccggtagagccactgc

SEQ ID NO: 5455638 - DNA, 25 bp, Homo sapien
ggtggagtggtcatcccgactgctc

SEQ ID NO: 5455639 - DNA, 25 bp, Homo sapien
gatgccaggacaaatagccttgttg

SEQ ID NO: 5455640 - DNA, 25 bp, Homo sapien
taagtctatgccgttacaaagtgct

SEQ ID NO: 5455641 - DNA, 25 bp, Homo sapien
gacatgtcaatccaagatgccagga

SEQ ID NO: 5455642 - DNA, 25 bp, Homo sapien
tcagcagttcagccgcaggtcacag

SEQ ID NO: 5455643 - DNA, 25 bp, Homo sapien
ccatgcacacccgatgggccgtgga

SEQ ID NO: 5455644 - DNA, 25 bp, Homo sapien
tgggccgtggaggttcccagccagg

SEQ ID NO: 5455645 - DNA, 25 bp, Homo sapien
gttcagccgcaggtcacagcatggc

SEQ ID NO: 5455646 - DNA, 25 bp, Homo sapien
cattccacaatggcagctgtcctgg

SEQ ID NO: 5455647 - DNA, 25 bp, Homo sapien
ctttctggcactgaatcccattcat

SEQ ID NO: 5455648 - DNA, 25 bp, Homo sapien
aggcccagagagcagtcattacttc

SEQ ID NO: 5455649 - DNA, 25 bp, Homo sapien
gagagcagtcattacttctttgcag

SEQ ID NO: 5455650 - DNA, 25 bp, Homo sapien
gataaaaggctcttggtcccaaatg

SEQ ID NO: 5455651 - DNA, 25 bp, Homo sapien
taatgcccagttcgatagcttgaca

SEQ ID NO: 5455652 - DNA, 25 bp, Homo sapien
caaagttggcagatcagggagcacc

SEQ ID NO: 5455653 - DNA, 25 bp, Homo sapien
tcccaaatggcgactgtaaatgcag

SEQ ID NO: 5455654 - DNA, 25 bp, Homo sapien
tttcccaagccagcattcctcacaa

SEQ ID NO: 5455655 - DNA, 25 bp, Homo sapien
ttatgttttcccaagccagcattcc

SEQ ID NO: 5455656 - DNA, 25 bp, Homo sapien
atgttttcccaagccagcattcctc

SEQ ID NO: 5455657 - DNA, 25 bp, Homo sapien
tcccaagccagcattcctcacaaac

SEQ ID NO: 5455658 - DNA, 25 bp, Homo sapien
tcttggctccaatcgctgtctcact

SEQ ID NO: 5455659 - DNA, 25 bp, Homo sapien
ggcactgaagtctagtcttggctcc

SEQ ID NO: 5455660 - DNA, 25 bp, Homo sapien
cactgcactcgacccaaattctttt

SEQ ID NO: 5455661 - DNA, 25 bp, Homo sapien
tccatagagtcttggagcaggtcta

SEQ ID NO: 5455662 - DNA, 25 bp, Homo sapien
agctaattgctcaaatcggccgtga

SEQ ID NO: 5455663 - DNA, 25 bp, Homo sapien
ctcaaatcggccgtgatgtctggct

SEQ ID NO: 5455664 - DNA, 25 bp, Homo sapien
tctggacacccctaatgaggccagc

SEQ ID NO: 5455665 - DNA, 25 bp, Homo sapien
gaggcagtgctagcagtggacatct

SEQ ID NO: 5455666 - DNA, 25 bp, Homo sapien
ggaaatccatagtctccagccacga

SEQ ID NO: 5455667 - DNA, 25 bp, Homo sapien
gacaggttattccaggaataccgag

SEQ ID NO: 5455668 - DNA, 25 bp, Homo sapien
gaataccgagcatgtgatgtgtggc

SEQ ID NO: 5455669 - DNA, 25 bp, Homo sapien
cgaaggctagaaaatgtcctgggac

SEQ ID NO: 5455670 - DNA, 25 bp, Homo sapien
cactatgagtggacagccctttgcc

SEQ ID NO: 5455671 - DNA, 25 bp, Homo sapien
ccacctgggtggtagcttaggctga

SEQ ID NO: 5455672 - DNA, 25 bp, Homo sapien
tgacgtggtcagtagctggtgctcc

SEQ ID NO: 5455673 - DNA, 25 bp, Homo sapien
tgtggacactattgggaagcacctc

SEQ ID NO: 5455674 - DNA, 25 bp, Homo sapien
gaagccgagtcagatccaagaatgg

SEQ ID NO: 5455675 - DNA, 25 bp, Homo sapien
tagacactttgttgtggtttcacac

SEQ ID NO: 5455676 - DNA, 25 bp, Homo sapien
tgtctgaagaagaaccggtctgttt

SEQ ID NO: 5455677 - DNA, 25 bp, Homo sapien
gaaaagagcgcctagatttggctgg

SEQ ID NO: 5455678 - DNA, 25 bp, Homo sapien
tgagtagttgtagccacacaccctg

SEQ ID NO: 5455679 - DNA, 25 bp, Homo sapien
tggactcaagcaggcccctctttga

SEQ ID NO: 5455680 - DNA, 25 bp, Homo sapien
tccaagttctttcctcgacgacaga

SEQ ID NO: 5455681 - DNA, 25 bp, Homo sapien
gatgtacctgccagatctctgagta

SEQ ID NO: 5455682 - DNA, 25 bp, Homo sapien
cctttctaggattgtcagctcccag

SEQ ID NO: 5455683 - DNA, 25 bp, Homo sapien
gtagtggaagtctggtacaggcagc

SEQ ID NO: 5455684 - DNA, 25 bp, Homo sapien
cagcaccactcaaacacctttctag

SEQ ID NO: 5455685 - DNA, 25 bp, Homo sapien
cagccattgctgttgcctgatataa

SEQ ID NO: 5455686 - DNA, 25 bp, Homo sapien
aatacaggggttggctgaaatgtgt

SEQ ID NO: 5455687 - DNA, 25 bp, Homo sapien
atcaatacaggggttggctgaaatg

SEQ ID NO: 5455688 - DNA, 25 bp, Homo sapien
ttacatcaatacaggggttggctga

SEQ ID NO: 5455689 - DNA, 25 bp, Homo sapien
tacatcaatacaggggttggctgaa

SEQ ID NO: 5455690 - DNA, 25 bp, Homo sapien
caatgtatttaggttctagctgtgc

SEQ ID NO: 5455691 - DNA, 25 bp, Homo sapien
taggttctagctgtgcttccctgaa

SEQ ID NO: 5455692 - DNA, 25 bp, Homo sapien
tatttaggttctagctgtgcttccc

SEQ ID NO: 5455693 - DNA, 25 bp, Homo sapien
ttcaccaatgtatttaggttctagc

SEQ ID NO: 5455694 - DNA, 25 bp, Homo sapien
tctctgcattatccaaggactttgc

SEQ ID NO: 5455695 - DNA, 25 bp, Homo sapien
ctgcattatccaaggactttgctcc

SEQ ID NO: 5455696 - DNA, 25 bp, Homo sapien
ttctctgcattatccaaggactttg

SEQ ID NO: 5455697 - DNA, 25 bp, Homo sapien
tctgcattatccaaggactttgctc

SEQ ID NO: 5455698 - DNA, 25 bp, Homo sapien
atgtgtatgtgagttctgtgcttac

SEQ ID NO: 5455699 - DNA, 25 bp, Homo sapien
caatgtgtatgtgagttctgtgctt

SEQ ID NO: 5455700 - DNA, 25 bp, Homo sapien
ctagacaatgtgtatgtgagttctg

SEQ ID NO: 5455701 - DNA, 25 bp, Homo sapien
gacaatgtgtatgtgagttctgtgc

SEQ ID NO: 5455702 - DNA, 25 bp, Homo sapien
aaacaccaatatcatggccaccttc

SEQ ID NO: 5455703 - DNA, 25 bp, Homo sapien
tctggttgcggggatctttgcttat

SEQ ID NO: 5455704 - DNA, 25 bp, Homo sapien
gcttattaccaagaggtgaaaaaca

SEQ ID NO: 5455705 - DNA, 25 bp, Homo sapien
aaaaacaccaatatcatggccacct

SEQ ID NO: 5455706 - DNA, 25 bp, Homo sapien
ttgtggcaggaattcataggcatcc

SEQ ID NO: 5455707 - DNA, 25 bp, Homo sapien
ggaattcataggcatccttttcttc

SEQ ID NO: 5455708 - DNA, 25 bp, Homo sapien
gaattcataggcatccttttcttca

SEQ ID NO: 5455709 - DNA, 25 bp, Homo sapien
ggcaggaattcataggcatcctttt

SEQ ID NO: 5455710 - DNA, 25 bp, Homo sapien
aaaaaaggacagactacgcagccac

SEQ ID NO: 5455711 - DNA, 25 bp, Homo sapien
ccactgggagtgtcaaagccctgaa

SEQ ID NO: 5455712 - DNA, 25 bp, Homo sapien
gattttcatctggtcgctagctaca

SEQ ID NO: 5455713 - DNA, 25 bp, Homo sapien
taaagccatcgaggtagagattgac

SEQ ID NO: 5455714 - DNA, 25 bp, Homo sapien
tctgcgctagaccaatccatctgga

SEQ ID NO: 5455715 - DNA, 25 bp, Homo sapien
tccatctggactagacttgcaaaga

SEQ ID NO: 5455716 - DNA, 25 bp, Homo sapien
cccaattaggagcatagaaaaggct

SEQ ID NO: 5455717 - DNA, 25 bp, Homo sapien
cgtctatgttgacaggcccagggaa

SEQ ID NO: 5455718 - DNA, 25 bp, Homo sapien
gacatcagaactactggcccagaag

SEQ ID NO: 5455719 - DNA, 25 bp, Homo sapien
tgtgaggtagcccttatggattttc

SEQ ID NO: 5455720 - DNA, 25 bp, Homo sapien
gggacatcagaactactggcccaga

SEQ ID NO: 5455721 - DNA, 25 bp, Homo sapien
agattcagacatccatgtgaggtag

SEQ ID NO: 5455722 - DNA, 25 bp, Homo sapien
tagacaaatgtgcatctcggtgttt

SEQ ID NO: 5455723 - DNA, 25 bp, Homo sapien
gacgtctttgtcagtttgactgatg

SEQ ID NO: 5455724 - DNA, 25 bp, Homo sapien
catctcggtgtttgacgtctttgtc

SEQ ID NO: 5455725 - DNA, 25 bp, Homo sapien
caaatgtgcatctcggtgtttgacg

SEQ ID NO: 5455726 - DNA, 25 bp, Homo sapien
agacaaagtaattcagtcactctcc

SEQ ID NO: 5455727 - DNA, 25 bp, Homo sapien
actctcccagccatgtagtagacca

SEQ ID NO: 5455728 - DNA, 25 bp, Homo sapien
tctcccagccatgtagtagaccagg

SEQ ID NO: 5455729 - DNA, 25 bp, Homo sapien
agtaattcagtcactctcccagcca

SEQ ID NO: 5455730 - DNA, 25 bp, Homo sapien
tgcaggaaaaacagaggagtccagt

SEQ ID NO: 5455731 - DNA, 25 bp, Homo sapien
ctgcagctcacaggcgatacctgtt

SEQ ID NO: 5455732 - DNA, 25 bp, Homo sapien
gtttgcaggaaaaacagaggagtcc

SEQ ID NO: 5455733 - DNA, 25 bp, Homo sapien
ggcgatacctgtttgcaggaaaaac

SEQ ID NO: 5455734 - DNA, 25 bp, Homo sapien
gatcagacctatggcagcctccatt

SEQ ID NO: 5455735 - DNA, 25 bp, Homo sapien
gccagtttcaaacgagcccttgcag

SEQ ID NO: 5455736 - DNA, 25 bp, Homo sapien
cacggcacaattattctgggagacg

SEQ ID NO: 5455737 - DNA, 25 bp, Homo sapien
tgggagacgtgctcaaaatggacac

SEQ ID NO: 5455738 - DNA, 25 bp, Homo sapien
caagccacccaagtcacaaggttgg

SEQ ID NO: 5455739 - DNA, 25 bp, Homo sapien
aagataaaaggctctaggagttcca

SEQ ID NO: 5455740 - DNA, 25 bp, Homo sapien
agcagaaaacaagccacccaagtca

SEQ ID NO: 5455741 - DNA, 25 bp, Homo sapien
tggctgcaacaaatgtcttagaggc

SEQ ID NO: 5455742 - DNA, 25 bp, Homo sapien
tccacgtggatttagttcctgactt

SEQ ID NO: 5455743 - DNA, 25 bp, Homo sapien
ggagcaggcatttgacccaggtgac

SEQ ID NO: 5455744 - DNA, 25 bp, Homo sapien
gacagccaaatccacgtggatttag

SEQ ID NO: 5455745 - DNA, 25 bp, Homo sapien
gagcaggcatttgacccaggtgaca

SEQ ID NO: 5455746 - DNA, 25 bp, Homo sapien
tgtcctcacaatagcgactgacctc

SEQ ID NO: 5455747 - DNA, 25 bp, Homo sapien
taagcatgctatcaagtgaaatgag

SEQ ID NO: 5455748 - DNA, 25 bp, Homo sapien
taagcacttgcatgaacatcagtga

SEQ ID NO: 5455749 - DNA, 25 bp, Homo sapien
gatggtactggaaataaggttcaag

SEQ ID NO: 5455750 - DNA, 25 bp, Homo sapien
ccagcccagagtggtcaccacaggc

SEQ ID NO: 5455751 - DNA, 25 bp, Homo sapien
cactggtgctatagcgaatcctcag

SEQ ID NO: 5455752 - DNA, 25 bp, Homo sapien
gctgacccagcacacggactcccag

SEQ ID NO: 5455753 - DNA, 25 bp, Homo sapien
tatagcgaatcctcagcaggagcca

SEQ ID NO: 5455754 - DNA, 25 bp, Homo sapien
catatgtgaaacaacctcggttcag

SEQ ID NO: 5455755 - DNA, 25 bp, Homo sapien
tgagtcattccggtcactccagagt

SEQ ID NO: 5455756 - DNA, 25 bp, Homo sapien
tcccatgggtgacctgacaatacag

SEQ ID NO: 5455757 - DNA, 25 bp, Homo sapien
agcttagtacctctgtcttggccac

SEQ ID NO: 5455758 - DNA, 25 bp, Homo sapien
gaatgcatttccaagctacccacag

SEQ ID NO: 5455759 - DNA, 25 bp, Homo sapien
tattaggaggcacaatctcaaggca

SEQ ID NO: 5455760 - DNA, 25 bp, Homo sapien
gggcagtccctaccaaaggcatcaa

SEQ ID NO: 5455761 - DNA, 25 bp, Homo sapien
tgtccaagaaaacggtgccagagtc

SEQ ID NO: 5455762 - DNA, 25 bp, Homo sapien
caggcaaataatgcatggtctgtgc

SEQ ID NO: 5455763 - DNA, 25 bp, Homo sapien
ctcaggcaaataatgcatggtctgt

SEQ ID NO: 5455764 - DNA, 25 bp, Homo sapien
tgtgcctgcattcgtatacctgatt

SEQ ID NO: 5455765 - DNA, 25 bp, Homo sapien
tctcaggcaaataatgcatggtctg

SEQ ID NO: 5455766 - DNA, 25 bp, Homo sapien
cattcatgacatcaaattatgggtg

SEQ ID NO: 5455767 - DNA, 25 bp, Homo sapien
ttcatgacatcaaattatgggtggg

SEQ ID NO: 5455768 - DNA, 25 bp, Homo sapien
atgacatcaaattatgggtgggggg

SEQ ID NO: 5455769 - DNA, 25 bp, Homo sapien
tcatgacatcaaattatgggtgggg

SEQ ID NO: 5455770 - DNA, 25 bp, Homo sapien
gctgtttccaaacagggaagagaag

SEQ ID NO: 5455771 - DNA, 25 bp, Homo sapien
aggagatgaaatcaaagagcttgtg

SEQ ID NO: 5455772 - DNA, 25 bp, Homo sapien
gagaaggagatgaaatcaaagagct

SEQ ID NO: 5455773 - DNA, 25 bp, Homo sapien
gggaagagaaggagatgaaatcaaa

SEQ ID NO: 5455774 - DNA, 25 bp, Homo sapien
cttagggctgctcggctgaaggagt

SEQ ID NO: 5455775 - DNA, 25 bp, Homo sapien
ggactaactccaccaaagctgtgag

SEQ ID NO: 5455776 - DNA, 25 bp, Homo sapien
taggactcatgagggcgaagtgccc

SEQ ID NO: 5455777 - DNA, 25 bp, Homo sapien
gtatacaatcatgaatccagccgga

SEQ ID NO: 5455778 - DNA, 25 bp, Homo sapien
acagaagtcacgctgtggccctggg

SEQ ID NO: 5455779 - DNA, 25 bp, Homo sapien
tggaataatctgaatgacagattct

SEQ ID NO: 5455780 - DNA, 25 bp, Homo sapien
tcagcatccaggaggcataagtaga

SEQ ID NO: 5455781 - DNA, 25 bp, Homo sapien
gaataatctgaatgacagattcttg

SEQ ID NO: 5455782 - DNA, 25 bp, Homo sapien
ggcaggggctctggaataatctgaa

SEQ ID NO: 5455783 - DNA, 25 bp, Homo sapien
agaggttgagattccctggccagca

SEQ ID NO: 5455784 - DNA, 25 bp, Homo sapien
aacatcctgactggcaagggtccca

SEQ ID NO: 5455785 - DNA, 25 bp, Homo sapien
cagctggcctggatttgctctagca

SEQ ID NO: 5455786 - DNA, 25 bp, Homo sapien
tgcactgcaaatcagacccagggag

SEQ ID NO: 5455787 - DNA, 25 bp, Homo sapien
ggcaactgatttcccctatagtgag

SEQ ID NO: 5455788 - DNA, 25 bp, Homo sapien
gggagagtaaccaacatggaagcca

SEQ ID NO: 5455789 - DNA, 25 bp, Homo sapien
tctcacagggcgcagtcaagatgtt

SEQ ID NO: 5455790 - DNA, 25 bp, Homo sapien
ttagctagggctgtatcatctgaag

SEQ ID NO: 5455791 - DNA, 25 bp, Homo sapien
tagttaaaagtctccctcagtttgc

SEQ ID NO: 5455792 - DNA, 25 bp, Homo sapien
ccccagagtagatctgaaagagact

SEQ ID NO: 5455793 - DNA, 25 bp, Homo sapien
gagacttttagctcttgccctaaga

SEQ ID NO: 5455794 - DNA, 25 bp, Homo sapien
tactccttgtcaagcatttctaggg

SEQ ID NO: 5455795 - DNA, 25 bp, Homo sapien
ctttctggtactgccatcttgaatc

SEQ ID NO: 5455796 - DNA, 25 bp, Homo sapien
caagtggagtcaacctttctggtac

SEQ ID NO: 5455797 - DNA, 25 bp, Homo sapien
aagtggagtcaacctttctggtact

SEQ ID NO: 5455798 - DNA, 25 bp, Homo sapien
tgaatctcaaagcatcgagctccat

SEQ ID NO: 5455799 - DNA, 25 bp, Homo sapien
tccaagctccactcctgttccagct

SEQ ID NO: 5455800 - DNA, 25 bp, Homo sapien
tattgtctccctccaagctccactc

SEQ ID NO: 5455801 - DNA, 25 bp, Homo sapien
cctccaagctccactcctgttccag

SEQ ID NO: 5455802 - DNA, 25 bp, Homo sapien
tctccctccaagctccactcctgtt

SEQ ID NO: 5455803 - DNA, 25 bp, Homo sapien
tctgggcattcttaggccccttcat

SEQ ID NO: 5455804 - DNA, 25 bp, Homo sapien
gagtctgggcattcttaggcccctt

SEQ ID NO: 5455805 - DNA, 25 bp, Homo sapien
ccagagtctgggcattcttaggccc

SEQ ID NO: 5455806 - DNA, 25 bp, Homo sapien
tgccagcttcaccagagtctgggca

SEQ ID NO: 5455807 - DNA, 25 bp, Homo sapien
gccctccagacctaattttgggcta

SEQ ID NO: 5455808 - DNA, 25 bp, Homo sapien
tctccattgggctgagaccccacgt

SEQ ID NO: 5455809 - DNA, 25 bp, Homo sapien
accccacgtgagtgaagaggacagg

SEQ ID NO: 5455810 - DNA, 25 bp, Homo sapien
tttgggctatcactagcacccagcc

SEQ ID NO: 5455811 - DNA, 25 bp, Homo sapien
cgcccagccgagaacagcatcttta

SEQ ID NO: 5455812 - DNA, 25 bp, Homo sapien
aaaatggtgataacctcattaccct

SEQ ID NO: 5455813 - DNA, 25 bp, Homo sapien
taagactctaaccaggtcatagctg

SEQ ID NO: 5455814 - DNA, 25 bp, Homo sapien
agaagacccgctattctgggagaag

SEQ ID NO: 5455815 - DNA, 25 bp, Homo sapien
aaagagaggacccaatgtgctgagc

SEQ ID NO: 5455816 - DNA, 25 bp, Homo sapien
gtcttggataaagaacaccgacagt

SEQ ID NO: 5455817 - DNA, 25 bp, Homo sapien
aagaacaccgacagtcagagatgga

SEQ ID NO: 5455818 - DNA, 25 bp, Homo sapien
atcaattcaatggcctggaatccct

SEQ ID NO: 5455819 - DNA, 25 bp, Homo sapien
agaaaactgaggtccgcatgacgga

SEQ ID NO: 5455820 - DNA, 25 bp, Homo sapien
gggtcaggcacctgcgtaggcacct

SEQ ID NO: 5455821 - DNA, 25 bp, Homo sapien
ctccggagctgctcacacgcaggtg

SEQ ID NO: 5455822 - DNA, 25 bp, Homo sapien
atgacggagcgacttgcccagggtc

SEQ ID NO: 5455823 - DNA, 25 bp, Homo sapien
gaagatgcaacaaagcaggtttcct

SEQ ID NO: 5455824 - DNA, 25 bp, Homo sapien
ccaacattaaacccgagaatagaag

SEQ ID NO: 5455825 - DNA, 25 bp, Homo sapien
tccctgggctttgtcgacagctgca

SEQ ID NO: 5455826 - DNA, 25 bp, Homo sapien
tttgtcgacagctgcaggagtctta

SEQ ID NO: 5455827 - DNA, 25 bp, Homo sapien
cccgatagccaggtgtgcctatctc

SEQ ID NO: 5455828 - DNA, 25 bp, Homo sapien
ttcaccccgatagccaggtgtgcct

SEQ ID NO: 5455829 - DNA, 25 bp, Homo sapien
cgatagccaggtgtgcctatctcct

SEQ ID NO: 5455830 - DNA, 25 bp, Homo sapien
accccgatagccaggtgtgcctatc

SEQ ID NO: 5455831 - DNA, 25 bp, Homo sapien
ctatttttggtagcgtgacaggcca

SEQ ID NO: 5455832 - DNA, 25 bp, Homo sapien
ctgagaaagtggaaagggtccaaga

SEQ ID NO: 5455833 - DNA, 25 bp, Homo sapien
tgagaaagtggaaagggtccaagaa

SEQ ID NO: 5455834 - DNA, 25 bp, Homo sapien
ggtccaagaaccatgagatctcctg

SEQ ID NO: 5455835 - DNA, 25 bp, Homo sapien
catgagatctcctggaaatgctacc

SEQ ID NO: 5455836 - DNA, 25 bp, Homo sapien
cttccctaggtgctcctcaattagt

SEQ ID NO: 5455837 - DNA, 25 bp, Homo sapien
acttccctaggtgctcctcaattag

SEQ ID NO: 5455838 - DNA, 25 bp, Homo sapien
ttccctaggtgctcctcaattagtg

SEQ ID NO: 5455839 - DNA, 25 bp, Homo sapien
gatttgtctttcctcttgctccacc

SEQ ID NO: 5455840 - DNA, 25 bp, Homo sapien
caaagggatttgtctttcctcttgc

SEQ ID NO: 5455841 - DNA, 25 bp, Homo sapien
ccaaagggatttgtctttcctcttg

SEQ ID NO: 5455842 - DNA, 25 bp, Homo sapien
agggatttgtctttcctcttgctcc

SEQ ID NO: 5455843 - DNA, 25 bp, Homo sapien
gaactcatccattttggtgggtggg

SEQ ID NO: 5455844 - DNA, 25 bp, Homo sapien
ttcttcaaaggatgcacagataaag

SEQ ID NO: 5455845 - DNA, 25 bp, Homo sapien
tcagcaacgtggatagaatggaggt

SEQ ID NO: 5455846 - DNA, 25 bp, Homo sapien
tgacacaaaacagcaatcccactac

SEQ ID NO: 5455847 - DNA, 25 bp, Homo sapien
gatgttatcactccttggccctcta

SEQ ID NO: 5455848 - DNA, 25 bp, Homo sapien
ggccaaatcgggactgtaatgtgga

SEQ ID NO: 5455849 - DNA, 25 bp, Homo sapien
taatacatttctaaagaactgaggg

SEQ ID NO: 5455850 - DNA, 25 bp, Homo sapien
gaactctctagtgaagccttcccag

SEQ ID NO: 5455851 - DNA, 25 bp, Homo sapien
cacccagtggtaatgaggagtcacc

SEQ ID NO: 5455852 - DNA, 25 bp, Homo sapien
tgagaagcagtaataaagcacccct

SEQ ID NO: 5455853 - DNA, 25 bp, Homo sapien
tggcaataactgaatgacaacccct

SEQ ID NO: 5455854 - DNA, 25 bp, Homo sapien
cctagggtttagtcagagaaggaca

SEQ ID NO: 5455855 - DNA, 25 bp, Homo sapien
tgtcactggatctttggaccagcca

SEQ ID NO: 5455856 - DNA, 25 bp, Homo sapien
ccagcttcgtctgcctcttggggga

SEQ ID NO: 5455857 - DNA, 25 bp, Homo sapien
cagccaatactatcagttgcctcac

SEQ ID NO: 5455858 - DNA, 25 bp, Homo sapien
gggactgtcctagactctctgtcac

SEQ ID NO: 5455859 - DNA, 25 bp, Homo sapien
ccactcttctctgatctcaatgact

SEQ ID NO: 5455860 - DNA, 25 bp, Homo sapien
ccctcctcttgtcccactcttctct

SEQ ID NO: 5455861 - DNA, 25 bp, Homo sapien
actcttctctgatctcaatgacttc

SEQ ID NO: 5455862 - DNA, 25 bp, Homo sapien
ctctgatctcaatgacttctgccat

SEQ ID NO: 5455863 - DNA, 25 bp, Homo sapien
gggacgcgtcagtgtacaatacatt

SEQ ID NO: 5455864 - DNA, 25 bp, Homo sapien
ccaggatttatacacggtggcagcg

SEQ ID NO: 5455865 - DNA, 25 bp, Homo sapien
gataaggagcatacaccaggattta

SEQ ID NO: 5455866 - DNA, 25 bp, Homo sapien
gcggctataggcacgatgatacaaa

SEQ ID NO: 5455867 - DNA, 25 bp, Homo sapien
ttgaagggtctgatacaccgcccag

SEQ ID NO: 5455868 - DNA, 25 bp, Homo sapien
gaaaagcgaccgtgaaagctgaccc

SEQ ID NO: 5455869 - DNA, 25 bp, Homo sapien
cactttggagggactttggtcacca

SEQ ID NO: 5455870 - DNA, 25 bp, Homo sapien
tgatgtatctgtcccttaagcgcct

SEQ ID NO: 5455871 - DNA, 25 bp, Homo sapien
tgggacaaggacaagccgagctgtt

SEQ ID NO: 5455872 - DNA, 25 bp, Homo sapien
tcactagagtgcaggtgcaggcacc

SEQ ID NO: 5455873 - DNA, 25 bp, Homo sapien
ttttgcagtttccatctacccaggg

SEQ ID NO: 5455874 - DNA, 25 bp, Homo sapien
cagcgtggctcagctagggaaacca

SEQ ID NO: 5455875 - DNA, 25 bp, Homo sapien
gaccttggagacgaagttgacgatg

SEQ ID NO: 5455876 - DNA, 25 bp, Homo sapien
tcttttggccggcattcagcatgac

SEQ ID NO: 5455877 - DNA, 25 bp, Homo sapien
caggcgttgtccgtggtgctgccct

SEQ ID NO: 5455878 - DNA, 25 bp, Homo sapien
tcagcatgaccttggagacgaagtt

SEQ ID NO: 5455879 - DNA, 25 bp, Homo sapien
cttccgggccacgaagccgaagagc

SEQ ID NO: 5455880 - DNA, 25 bp, Homo sapien
ggcaccaccctctgttttcatccac

SEQ ID NO: 5455881 - DNA, 25 bp, Homo sapien
ttagcaggggcaccaccctctgttt

SEQ ID NO: 5455882 - DNA, 25 bp, Homo sapien
gggcaccaccctctgttttcatcca

SEQ ID NO: 5455883 - DNA, 25 bp, Homo sapien
gcaggggcaccaccctctgttttca

SEQ ID NO: 5455884 - DNA, 25 bp, Homo sapien
tgacagtgttgagagggtagtggcg

SEQ ID NO: 5455885 - DNA, 25 bp, Homo sapien
gacagtgttgagagggtagtggcgt

SEQ ID NO: 5455886 - DNA, 25 bp, Homo sapien
tccaggtcacagaaggtgacagtgt

SEQ ID NO: 5455887 - DNA, 25 bp, Homo sapien
ccaggtcacagaaggtgacagtgtt

SEQ ID NO: 5455888 - DNA, 25 bp, Homo sapien
tacacggatgaatagatgagtcaca

SEQ ID NO: 5455889 - DNA, 25 bp, Homo sapien
aggagaaccccaccgaggagcaggc

SEQ ID NO: 5455890 - DNA, 25 bp, Homo sapien
gaaggagaaccccaccgaggagcag

SEQ ID NO: 5455891 - DNA, 25 bp, Homo sapien
gtaaatgtgtgggtacacggatgaa

SEQ ID NO: 5455892 - DNA, 25 bp, Homo sapien
tctgcagccaacgtctcagatgtgg

SEQ ID NO: 5455893 - DNA, 25 bp, Homo sapien
cagagttgacgaagagcacattgca

SEQ ID NO: 5455894 - DNA, 25 bp, Homo sapien
ctttgaagtgaacgatggtggcagc

SEQ ID NO: 5455895 - DNA, 25 bp, Homo sapien
gagtgactccatgtccacagagttg

SEQ ID NO: 5455896 - DNA, 25 bp, Homo sapien
cagggccggagctatctttcgattc

SEQ ID NO: 5455897 - DNA, 25 bp, Homo sapien
gccggagctatctttcgattcatct

SEQ ID NO: 5455898 - DNA, 25 bp, Homo sapien
ctgcagttgagttggcagggccgga

SEQ ID NO: 5455899 - DNA, 25 bp, Homo sapien
ttggcagggccggagctatctttcg

SEQ ID NO: 5455900 - DNA, 25 bp, Homo sapien
tggcaggatcaagacatgacaaggg

SEQ ID NO: 5455901 - DNA, 25 bp, Homo sapien
gcaaaatgacatgtgtcctccagcc

SEQ ID NO: 5455902 - DNA, 25 bp, Homo sapien
atgacaagggccagctcaagggtgt

SEQ ID NO: 5455903 - DNA, 25 bp, Homo sapien
tgagccaggagtctcacgttcctac

SEQ ID NO: 5455904 - DNA, 25 bp, Homo sapien
gaatgaccagcttgcaaggcagggc

SEQ ID NO: 5455905 - DNA, 25 bp, Homo sapien
cggtttggaatgaccagcttgcaag

SEQ ID NO: 5455906 - DNA, 25 bp, Homo sapien
ctcggtttggaatgaccagcttgca

SEQ ID NO: 5455907 - DNA, 25 bp, Homo sapien
tttggaatgaccagcttgcaaggca

SEQ ID NO: 5455908 - DNA, 25 bp, Homo sapien
tggtagaccagggcagacagcgatc

SEQ ID NO: 5455909 - DNA, 25 bp, Homo sapien
ctggtagaccagggcagacagcgat

SEQ ID NO: 5455910 - DNA, 25 bp, Homo sapien
catgtcatgggcagtgatactggaa

SEQ ID NO: 5455911 - DNA, 25 bp, Homo sapien
tgtagggaggcagacggcatgtcat

SEQ ID NO: 5455912 - DNA, 25 bp, Homo sapien
ttattacctctacctcaacccacca

SEQ ID NO: 5455913 - DNA, 25 bp, Homo sapien
tctacccttacaccgatacacacaa

SEQ ID NO: 5455914 - DNA, 25 bp, Homo sapien
gccagtctctatcagaaaatgcctg

SEQ ID NO: 5455915 - DNA, 25 bp, Homo sapien
gaagtttggctcattggggcagccc

SEQ ID NO: 5455916 - DNA, 25 bp, Homo sapien
gggcagcccttgagcttgactcctc

SEQ ID NO: 5455917 - DNA, 25 bp, Homo sapien
atcagaaaatgcctgaccagctcat

SEQ ID NO: 5455918 - DNA, 25 bp, Homo sapien
caggtttagcgactgtaaagctcac

SEQ ID NO: 5455919 - DNA, 25 bp, Homo sapien
tttagcgactgtaaagctcacctgg

SEQ ID NO: 5455920 - DNA, 25 bp, Homo sapien
tccaggtttagcgactgtaaagctc

SEQ ID NO: 5455921 - DNA, 25 bp, Homo sapien
gcgactgtaaagctcacctggtcct

SEQ ID NO: 5455922 - DNA, 25 bp, Homo sapien
tgactgtcgcggatgatgaaggccc

SEQ ID NO: 5455923 - DNA, 25 bp, Homo sapien
gaggtggcgaagacaccttcatggc

SEQ ID NO: 5455924 - DNA, 25 bp, Homo sapien
tacgcgcctcggaaggagtgactgt

SEQ ID NO: 5455925 - DNA, 25 bp, Homo sapien
gctcctggtccttgaggagcgcgat

SEQ ID NO: 5455926 - DNA, 25 bp, Homo sapien
caagacctcggtggcgctagtttta

SEQ ID NO: 5455927 - DNA, 25 bp, Homo sapien
gtctcattgagcctaccgaccttcg

SEQ ID NO: 5455928 - DNA, 25 bp, Homo sapien
ggaccacaggccactattcagtgtg

SEQ ID NO: 5455929 - DNA, 25 bp, Homo sapien
tcctacgggtcttcctgtactcagg

SEQ ID NO: 5455930 - DNA, 25 bp, Homo sapien
cctggctggcaaacttactctgtaa

SEQ ID NO: 5455931 - DNA, 25 bp, Homo sapien
agcacagggaggatgcaagccagca

SEQ ID NO: 5455932 - DNA, 25 bp, Homo sapien
taaatggccggagagtaaatatttc

SEQ ID NO: 5455933 - DNA, 25 bp, Homo sapien
tttcaggcttcgcaggccatgcagc

SEQ ID NO: 5455934 - DNA, 25 bp, Homo sapien
ccctggagatctcaggcttgtacca

SEQ ID NO: 5455935 - DNA, 25 bp, Homo sapien
gacaaacttcactttagcccgcgtc

SEQ ID NO: 5455936 - DNA, 25 bp, Homo sapien
ggagatctcaggcttgtaccaatac

SEQ ID NO: 5455937 - DNA, 25 bp, Homo sapien
gcttgtaccaatacttagaagtgtc

SEQ ID NO: 5455938 - DNA, 25 bp, Homo sapien
gcctgtatgcctggtgtccttacaa

SEQ ID NO: 5455939 - DNA, 25 bp, Homo sapien
gtgatgcgtctacatgccaagggac

SEQ ID NO: 5455940 - DNA, 25 bp, Homo sapien
ccccagtgcttgtgaatttgacctt

SEQ ID NO: 5455941 - DNA, 25 bp, Homo sapien
cacacaggggagagcaccatggaag

SEQ ID NO: 5455942 - DNA, 25 bp, Homo sapien
tctacgaggagtgatgtggcactgt

SEQ ID NO: 5455943 - DNA, 25 bp, Homo sapien
gcatgagtttcgatgaagttgggtc

SEQ ID NO: 5455944 - DNA, 25 bp, Homo sapien
gagtttcgatgaagttgggtctacg

SEQ ID NO: 5455945 - DNA, 25 bp, Homo sapien
ttcgatgaagttgggtctacgagga

SEQ ID NO: 5455946 - DNA, 25 bp, Homo sapien
attgctatgaagaccggaggccagg

SEQ ID NO: 5455947 - DNA, 25 bp, Homo sapien
tggagacagtgctaccatggaagcc

SEQ ID NO: 5455948 - DNA, 25 bp, Homo sapien
tgacatccttcgcttctctggcaag

SEQ ID NO: 5455949 - DNA, 25 bp, Homo sapien
tactgcccacagtcgggagaggaga

SEQ ID NO: 5455950 - DNA, 25 bp, Homo sapien
ctgctctctcccgacgggaaactcc

SEQ ID NO: 5455951 - DNA, 25 bp, Homo sapien
tgctctctcccgacgggaaactccc

SEQ ID NO: 5455952 - DNA, 25 bp, Homo sapien
gctggagcactaaagctcttgggct

SEQ ID NO: 5455953 - DNA, 25 bp, Homo sapien
tcaggggtatctcatggccataggc

SEQ ID NO: 5455954 - DNA, 25 bp, Homo sapien
ctgggggagacaaaggagccaccca

SEQ ID NO: 5455955 - DNA, 25 bp, Homo sapien
gctgtccgtgccacagactccacat

SEQ ID NO: 5455956 - DNA, 25 bp, Homo sapien
tgcccagaatccagaaacagccttg

SEQ ID NO: 5455957 - DNA, 25 bp, Homo sapien
gcccagaatccagaaacagccttgg

SEQ ID NO: 5455958 - DNA, 25 bp, Homo sapien
aatccagaaacagccttggccacct

SEQ ID NO: 5455959 - DNA, 25 bp, Homo sapien
cagaatccagaaacagccttggcca

SEQ ID NO: 5455960 - DNA, 25 bp, Homo sapien
acccctctctgcctgacacactcag

SEQ ID NO: 5455961 - DNA, 25 bp, Homo sapien
cagcccctttgatgccaagacacac

SEQ ID NO: 5455962 - DNA, 25 bp, Homo sapien
cctttgatgccaagacacacccacc

SEQ ID NO: 5455963 - DNA, 25 bp, Homo sapien
ttgatgccaagacacacccacccct

SEQ ID NO: 5455964 - DNA, 25 bp, Homo sapien
tattctaggtagcaggcacaaggtg

SEQ ID NO: 5455965 - DNA, 25 bp, Homo sapien
tctagaccccggaagaggatggtcc

SEQ ID NO: 5455966 - DNA, 25 bp, Homo sapien
cacaaggtgatgtagaaccaggcac

SEQ ID NO: 5455967 - DNA, 25 bp, Homo sapien
caggcacgggaggtctattctaggt

SEQ ID NO: 5455968 - DNA, 25 bp, Homo sapien
cagcacagggtgacttgggctcctc

SEQ ID NO: 5455969 - DNA, 25 bp, Homo sapien
tccggtctggcactgtcagctcctt

SEQ ID NO: 5455970 - DNA, 25 bp, Homo sapien
tccttgtccacaccctgaagtgcat

SEQ ID NO: 5455971 - DNA, 25 bp, Homo sapien
ttctgtctcccaaagaggctctttg

SEQ ID NO: 5455972 - DNA, 25 bp, Homo sapien
gaagtgatcacagcacccatcttgc

SEQ ID NO: 5455973 - DNA, 25 bp, Homo sapien
gaaataggcctgagaaaaccagcca

SEQ ID NO: 5455974 - DNA, 25 bp, Homo sapien
gaacacctaacccatcagaactgga

SEQ ID NO: 5455975 - DNA, 25 bp, Homo sapien
ggtgacagcagatttagaggagcac

SEQ ID NO: 5455976 - DNA, 25 bp, Homo sapien
tgaccaccaccttcccctcatcttc

SEQ ID NO: 5455977 - DNA, 25 bp, Homo sapien
cctgaccaccaccttcccctcatct

SEQ ID NO: 5455978 - DNA, 25 bp, Homo sapien
accaccaccttcccctcatcttcct

SEQ ID NO: 5455979 - DNA, 25 bp, Homo sapien
cttctgacagcctgaccaccacctt

SEQ ID NO: 5455980 - DNA, 25 bp, Homo sapien
caggggtgtcttggccagacccggg

SEQ ID NO: 5455981 - DNA, 25 bp, Homo sapien
gttgtgaggtttcaggcccagagca

SEQ ID NO: 5455982 - DNA, 25 bp, Homo sapien
gggtgcaacaggatgtccgctgggt

SEQ ID NO: 5455983 - DNA, 25 bp, Homo sapien
atgtccgctgggttgtgaggtttca

SEQ ID NO: 5455984 - DNA, 25 bp, Homo sapien
actcccacaggcagggttgagctga

SEQ ID NO: 5455985 - DNA, 25 bp, Homo sapien
tcaggcctggggcactcccacaggc

SEQ ID NO: 5455986 - DNA, 25 bp, Homo sapien
ggcactcccacaggcagggttgagc

SEQ ID NO: 5455987 - DNA, 25 bp, Homo sapien
tggggcactcccacaggcagggttg

SEQ ID NO: 5455988 - DNA, 25 bp, Homo sapien
gaaggcctccttgtagctgtgcaaa

SEQ ID NO: 5455989 - DNA, 25 bp, Homo sapien
ggctgctcggggaggttccctccat

SEQ ID NO: 5455990 - DNA, 25 bp, Homo sapien
aggcctccttgtagctgtgcaaatg

SEQ ID NO: 5455991 - DNA, 25 bp, Homo sapien
tgctcggggaggttccctccatctc

SEQ ID NO: 5455992 - DNA, 25 bp, Homo sapien
cctccaggattgagagcgatggtaa

SEQ ID NO: 5455993 - DNA, 25 bp, Homo sapien
tgtggcttctggagactggttctca

SEQ ID NO: 5455994 - DNA, 25 bp, Homo sapien
gtaagagccagctccggggagacac

SEQ ID NO: 5455995 - DNA, 25 bp, Homo sapien
tctcatactgtccatcactggccgc

SEQ ID NO: 5455996 - DNA, 25 bp, Homo sapien
tgtcaactacttccaacccctggag

SEQ ID NO: 5455997 - DNA, 25 bp, Homo sapien
agaaggcagtgcctcctagctcaga

SEQ ID NO: 5455998 - DNA, 25 bp, Homo sapien
caggaatctctccacacagagctga

SEQ ID NO: 5455999 - DNA, 25 bp, Homo sapien
tgagaccaagaacacaaaggactga

SEQ ID NO: 5456000 - DNA, 25 bp, Homo sapien
ccagtcttccgatttccaaaagact

SEQ ID NO: 5456001 - DNA, 25 bp, Homo sapien
cagtcttccgatttccaaaagactg

SEQ ID NO: 5456002 - DNA, 25 bp, Homo sapien
tccagtcttccgatttccaaaagac

SEQ ID NO: 5456003 - DNA, 25 bp, Homo sapien
ttccagtcttccgatttccaaaaga

SEQ ID NO: 5456004 - DNA, 25 bp, Homo sapien
ctggggaaccccttgtgcttttctg

SEQ ID NO: 5456005 - DNA, 25 bp, Homo sapien
ctggtcatcaccagaaaagtcctta

SEQ ID NO: 5456006 - DNA, 25 bp, Homo sapien
tctcagatgcactagaaggacctgc

SEQ ID NO: 5456007 - DNA, 25 bp, Homo sapien
gctatgttatcctttccttgcccct

SEQ ID NO: 5456008 - DNA, 25 bp, Homo sapien
cttctcctctacaacttaagctgga

SEQ ID NO: 5456009 - DNA, 25 bp, Homo sapien
tctacaacttaagctggaataaggc

SEQ ID NO: 5456010 - DNA, 25 bp, Homo sapien
aaggcacaagggtgattggatcaaa

SEQ ID NO: 5456011 - DNA, 25 bp, Homo sapien
tgattggatcaaagtggaataaacc

SEQ ID NO: 5456012 - DNA, 25 bp, Homo sapien
gaaaaggatctctgctgacaaagcc

SEQ ID NO: 5456013 - DNA, 25 bp, Homo sapien
tctgaagtataggagcagggagcct

SEQ ID NO: 5456014 - DNA, 25 bp, Homo sapien
aaaggaattgttactgctaggccag

SEQ ID NO: 5456015 - DNA, 25 bp, Homo sapien
ttcatccgaggttaagaactgccca

SEQ ID NO: 5456016 - DNA, 25 bp, Homo sapien
gccaccagcccttctaaattcaatg

SEQ ID NO: 5456017 - DNA, 25 bp, Homo sapien
ccttctaaattcaatggctcctcct

SEQ ID NO: 5456018 - DNA, 25 bp, Homo sapien
ggccaccagcccttctaaattcaat

SEQ ID NO: 5456019 - DNA, 25 bp, Homo sapien
ccagcccttctaaattcaatggctc

SEQ ID NO: 5456020 - DNA, 25 bp, Homo sapien
tccgggaggggtctgaagtcgcttc

SEQ ID NO: 5456021 - DNA, 25 bp, Homo sapien
agtccgggaggggtctgaagtcgct

SEQ ID NO: 5456022 - DNA, 25 bp, Homo sapien
ctggactgggtcagtggatgggact

SEQ ID NO: 5456023 - DNA, 25 bp, Homo sapien
aacatggctgatagtcataaggtga

SEQ ID NO: 5456024 - DNA, 25 bp, Homo sapien
tggaaatcctggttaggcccagcca

SEQ ID NO: 5456025 - DNA, 25 bp, Homo sapien
taaggtgagtaagacctgccaggag

SEQ ID NO: 5456026 - DNA, 25 bp, Homo sapien
gacactctgggacttgtgtagtggg

SEQ ID NO: 5456027 - DNA, 25 bp, Homo sapien
catattgagtgtttcgatggactgt

SEQ ID NO: 5456028 - DNA, 25 bp, Homo sapien
cagcatcagcatattgagtgtttcg

SEQ ID NO: 5456029 - DNA, 25 bp, Homo sapien
ccaggtccagcatcagcatattgag

SEQ ID NO: 5456030 - DNA, 25 bp, Homo sapien
gctacaagactctccaagtgggctc

SEQ ID NO: 5456031 - DNA, 25 bp, Homo sapien
gggtctctgccaatggctgagggct

SEQ ID NO: 5456032 - DNA, 25 bp, Homo sapien
gctggctacaagactctccaagtgg

SEQ ID NO: 5456033 - DNA, 25 bp, Homo sapien
aagactctccaagtgggctctttcc

SEQ ID NO: 5456034 - DNA, 25 bp, Homo sapien
ggaggtgggcgaggctgctgctgct

SEQ ID NO: 5456035 - DNA, 25 bp, Homo sapien
gtggaggtgggcgaggctgctgctg

SEQ ID NO: 5456036 - DNA, 25 bp, Homo sapien
cgtggaggtgggcgaggctgctgct

SEQ ID NO: 5456037 - DNA, 25 bp, Homo sapien
tggaggtgggcgaggctgctgctgc

SEQ ID NO: 5456038 - DNA, 25 bp, Homo sapien
tcccctttgcacagcctcccggctg

SEQ ID NO: 5456039 - DNA, 25 bp, Homo sapien
gcctcccggctgcttccccctcgga

SEQ ID NO: 5456040 - DNA, 25 bp, Homo sapien
ccacgaattcagtcccctttgcaca

SEQ ID NO: 5456041 - DNA, 25 bp, Homo sapien
aattcagtcccctttgcacagcctc

SEQ ID NO: 5456042 - DNA, 25 bp, Homo sapien
gaaaaggattgagagcggaacatac

SEQ ID NO: 5456043 - DNA, 25 bp, Homo sapien
tccgaaaaggattgagagcggaaca

SEQ ID NO: 5456044 - DNA, 25 bp, Homo sapien
tcagcttccgaaaaggattgagagc

SEQ ID NO: 5456045 - DNA, 25 bp, Homo sapien
gcagctggggttcagcttccgaaaa

SEQ ID NO: 5456046 - DNA, 25 bp, Homo sapien
aggatgtctgtctcccgctcagatg

SEQ ID NO: 5456047 - DNA, 25 bp, Homo sapien
tggtagccagctaaaccctcctgtg

SEQ ID NO: 5456048 - DNA, 25 bp, Homo sapien
tggtttggcaattcatcgtccagga

SEQ ID NO: 5456049 - DNA, 25 bp, Homo sapien
ttggtgaccccgtccagagaagaga

SEQ ID NO: 5456050 - DNA, 25 bp, Homo sapien
ccgacagtgtaggacgtgtggcatt

SEQ ID NO: 5456051 - DNA, 25 bp, Homo sapien
tgtggcattaacagccccggtgctg

SEQ ID NO: 5456052 - DNA, 25 bp, Homo sapien
ttcttcaccttagcatacaggctcc

SEQ ID NO: 5456053 - DNA, 25 bp, Homo sapien
gccgtgcagggagtctttcttcttc

SEQ ID NO: 5456054 - DNA, 25 bp, Homo sapien
gagttcccactctggattagaggca

SEQ ID NO: 5456055 - DNA, 25 bp, Homo sapien
ccatagaggtatcagcatggacggc

SEQ ID NO: 5456056 - DNA, 25 bp, Homo sapien
gaatgccaggagagtagccattgcc

SEQ ID NO: 5456057 - DNA, 25 bp, Homo sapien
cctgcttcgatgtctggagttccca

SEQ ID NO: 5456058 - DNA, 25 bp, Homo sapien
gaagcccgctctgatttgatcctgg

SEQ ID NO: 5456059 - DNA, 25 bp, Homo sapien
aataattcctacatggctgcagctc

SEQ ID NO: 5456060 - DNA, 25 bp, Homo sapien
tcctggtgccccaagttcccaataa

SEQ ID NO: 5456061 - DNA, 25 bp, Homo sapien
gagggaagcccgctctgatttgatc

SEQ ID NO: 5456062 - DNA, 25 bp, Homo sapien
gaagttctcagtgcaaagctttgga

SEQ ID NO: 5456063 - DNA, 25 bp, Homo sapien
ccattctcagcaaatggaaggcaga

SEQ ID NO: 5456064 - DNA, 25 bp, Homo sapien
gacaggagccccaacatgaagttct

SEQ ID NO: 5456065 - DNA, 25 bp, Homo sapien
aacacaggacctgaatagaaggact

SEQ ID NO: 5456066 - DNA, 25 bp, Homo sapien
tgactggctattggtattctgtttg

SEQ ID NO: 5456067 - DNA, 25 bp, Homo sapien
gtgtgtctggccaggtatattgatc

SEQ ID NO: 5456068 - DNA, 25 bp, Homo sapien
caggtatattgatcctccaggccac

SEQ ID NO: 5456069 - DNA, 25 bp, Homo sapien
tccaggccacctgagatgcttccaa

SEQ ID NO: 5456070 - DNA, 25 bp, Homo sapien
ctactgcgggtttggtgtgctttat

SEQ ID NO: 5456071 - DNA, 25 bp, Homo sapien
gcaggctctgtggacgcatctactg

SEQ ID NO: 5456072 - DNA, 25 bp, Homo sapien
tggacgcatctactgcgggtttggt

SEQ ID NO: 5456073 - DNA, 25 bp, Homo sapien
caagtccaccagggcaagaaatgca

SEQ ID NO: 5456074 - DNA, 25 bp, Homo sapien
ggcacagctttctatatccccaggg

SEQ ID NO: 5456075 - DNA, 25 bp, Homo sapien
gagattacagagcaccaaaggcaca

SEQ ID NO: 5456076 - DNA, 25 bp, Homo sapien
ccagctaagggtccgagggcattga

SEQ ID NO: 5456077 - DNA, 25 bp, Homo sapien
tgatgggtccggatagcttgcactt

SEQ ID NO: 5456078 - DNA, 25 bp, Homo sapien
gaccaattaggctggcagccactga

SEQ ID NO: 5456079 - DNA, 25 bp, Homo sapien
gaacaaattcgctccagcctctgct

SEQ ID NO: 5456080 - DNA, 25 bp, Homo sapien
atccccagcacaacgaccaattagg

SEQ ID NO: 5456081 - DNA, 25 bp, Homo sapien
aaacctcagaacaaattcgctccag

SEQ ID NO: 5456082 - DNA, 25 bp, Homo sapien
gggtgtcttggccaatctgagggtg

SEQ ID NO: 5456083 - DNA, 25 bp, Homo sapien
gtgtcttggccaatctgagggtgct

SEQ ID NO: 5456084 - DNA, 25 bp, Homo sapien
tggggtgtcttggccaatctgaggg

SEQ ID NO: 5456085 - DNA, 25 bp, Homo sapien
ggtgtcttggccaatctgagggtgc

SEQ ID NO: 5456086 - DNA, 25 bp, Homo sapien
ttgtcgtaggagtcccagcggatga

SEQ ID NO: 5456087 - DNA, 25 bp, Homo sapien
tgccgtcatctcgatgcccactgaa

SEQ ID NO: 5456088 - DNA, 25 bp, Homo sapien
tgcccactgaagttgtcgtaggagt

SEQ ID NO: 5456089 - DNA, 25 bp, Homo sapien
cactgaagttgtcgtaggagtccca

SEQ ID NO: 5456090 - DNA, 25 bp, Homo sapien
agacacgctcggcccgttctccagg

SEQ ID NO: 5456091 - DNA, 25 bp, Homo sapien
ttgaattttctctggcccataagaa

SEQ ID NO: 5456092 - DNA, 25 bp, Homo sapien
tacaaactccactttgccatactct

SEQ ID NO: 5456093 - DNA, 25 bp, Homo sapien
actccactttgccatactctggaaa

SEQ ID NO: 5456094 - DNA, 25 bp, Homo sapien
ttgccatactctggaaatcgatcat

SEQ ID NO: 5456095 - DNA, 25 bp, Homo sapien
ccactacgtaagaggaggaaatctg

SEQ ID NO: 5456096 - DNA, 25 bp, Homo sapien
gcctggccatgcctctatttattga

SEQ ID NO: 5456097 - DNA, 25 bp, Homo sapien
tatgtcaattttcgatggtatctcc

SEQ ID NO: 5456098 - DNA, 25 bp, Homo sapien
tggtatctcctgactcccactacgt

SEQ ID NO: 5456099 - DNA, 25 bp, Homo sapien
tgcacacggaagatgacgtctcggg

SEQ ID NO: 5456100 - DNA, 25 bp, Homo sapien
ggaacttcttgtggtagcacttcag

SEQ ID NO: 5456101 - DNA, 25 bp, Homo sapien
tcatggatggcacaggtgtggaact

SEQ ID NO: 5456102 - DNA, 25 bp, Homo sapien
tctcgggctgggcttcggaacttct

SEQ ID NO: 5456103 - DNA, 25 bp, Homo sapien
agctcatcaacaccaaacaggatct

SEQ ID NO: 5456104 - DNA, 25 bp, Homo sapien
tctagaacagcagagaattggaggc

SEQ ID NO: 5456105 - DNA, 25 bp, Homo sapien
cagagaattggaggccagtcttggc

SEQ ID NO: 5456106 - DNA, 25 bp, Homo sapien
tgtggggaaacttctagaacagcag

SEQ ID NO: 5456107 - DNA, 25 bp, Homo sapien
ttggcctctggggacaaaaatgtcc

SEQ ID NO: 5456108 - DNA, 25 bp, Homo sapien
agcagtcctggctcgatggtgatgc

SEQ ID NO: 5456109 - DNA, 25 bp, Homo sapien
tgcagacgctagtctggctgtctcc

SEQ ID NO: 5456110 - DNA, 25 bp, Homo sapien
tcgatggtgatgcagacgctagtct

SEQ ID NO: 5456111 - DNA, 25 bp, Homo sapien
tcctggctcgatggtgatgcagacg

SEQ ID NO: 5456112 - DNA, 25 bp, Homo sapien
acacaggttgcatggcctggtagat

SEQ ID NO: 5456113 - DNA, 25 bp, Homo sapien
tagatgccagatgtgtacacaggtt

SEQ ID NO: 5456114 - DNA, 25 bp, Homo sapien
agatgtgtacacaggttgcatggcc

SEQ ID NO: 5456115 - DNA, 25 bp, Homo sapien
ggcctggtagatgcggagaaatggc

SEQ ID NO: 5456116 - DNA, 25 bp, Homo sapien
tagactcaaagttggggatgccgtg

SEQ ID NO: 5456117 - DNA, 25 bp, Homo sapien
tttagactcaaagttggggatgccg

SEQ ID NO: 5456118 - DNA, 25 bp, Homo sapien
agactcaaagttggggatgccgtgc

SEQ ID NO: 5456119 - DNA, 25 bp, Homo sapien
tcctttagactcaaagttggggatg

SEQ ID NO: 5456120 - DNA, 25 bp, Homo sapien
caggccactgaagtaatgcacgtac

SEQ ID NO: 5456121 - DNA, 25 bp, Homo sapien
agcaggccactgaagtaatgcacgt

SEQ ID NO: 5456122 - DNA, 25 bp, Homo sapien
agaaacaagggcttgttgttcattt

SEQ ID NO: 5456123 - DNA, 25 bp, Homo sapien
gatcacgtggtgcagaaacaagggc

SEQ ID NO: 5456124 - DNA, 25 bp, Homo sapien
tatcagttctcgtgtctgcagtgcc

SEQ ID NO: 5456125 - DNA, 25 bp, Homo sapien
catctgaaaacttgcgcctggtaca

SEQ ID NO: 5456126 - DNA, 25 bp, Homo sapien
tgtgagtacacaagtctagtcccca

SEQ ID NO: 5456127 - DNA, 25 bp, Homo sapien
ttccagggccaagaacagcacatgc

SEQ ID NO: 5456128 - DNA, 25 bp, Homo sapien
catagaaccgcttcattgcaaaccg

SEQ ID NO: 5456129 - DNA, 25 bp, Homo sapien
gcacaatcttatcctcatagaaccg

SEQ ID NO: 5456130 - DNA, 25 bp, Homo sapien
ttgcaaaccggtccagagcctggtc

SEQ ID NO: 5456131 - DNA, 25 bp, Homo sapien
tctttgggatggctggccaatgggc

SEQ ID NO: 5456132 - DNA, 25 bp, Homo sapien
gctgtagtgcatgtaagccgcgatg

SEQ ID NO: 5456133 - DNA, 25 bp, Homo sapien
gacaactcctatcctgcctcggttt

SEQ ID NO: 5456134 - DNA, 25 bp, Homo sapien
gatgacaactcctatcctgcctcgg

SEQ ID NO: 5456135 - DNA, 25 bp, Homo sapien
tgtaagccgcgatgacaactcctat

SEQ ID NO: 5456136 - DNA, 25 bp, Homo sapien
ggaggtcgggccagccaaattccag

SEQ ID NO: 5456137 - DNA, 25 bp, Homo sapien
cttgttgtgtagaacaacgacattg

SEQ ID NO: 5456138 - DNA, 25 bp, Homo sapien
ggtcgggccagccaaattccagtac

SEQ ID NO: 5456139 - DNA, 25 bp, Homo sapien
tgtgtagaacaacgacattgtgagg

SEQ ID NO: 5456140 - DNA, 25 bp, Homo sapien
catggagcttcgtgatgtcaggtct

SEQ ID NO: 5456141 - DNA, 25 bp, Homo sapien
tgatgtcaggtctccgctcagagag

SEQ ID NO: 5456142 - DNA, 25 bp, Homo sapien
cttggcatggagcttcgtgatgtca

SEQ ID NO: 5456143 - DNA, 25 bp, Homo sapien
cttcgtgatgtcaggtctccgctca

SEQ ID NO: 5456144 - DNA, 25 bp, Homo sapien
aacagggcctggctagtagcaagcg

SEQ ID NO: 5456145 - DNA, 25 bp, Homo sapien
gcaagcgctcaataacctgaactct

SEQ ID NO: 5456146 - DNA, 25 bp, Homo sapien
taagtgcgtggaaagcagttggaac

SEQ ID NO: 5456147 - DNA, 25 bp, Homo sapien
aactcttattggtactctcttctcc

SEQ ID NO: 5456148 - DNA, 25 bp, Homo sapien
gttccagatgctacattccagctgc

SEQ ID NO: 5456149 - DNA, 25 bp, Homo sapien
cagctgcagcacactccttagagga

SEQ ID NO: 5456150 - DNA, 25 bp, Homo sapien
gattgaagactcaggcacgagagct

SEQ ID NO: 5456151 - DNA, 25 bp, Homo sapien
gagagtgattgaagactcaggcacg

SEQ ID NO: 5456152 - DNA, 25 bp, Homo sapien
tggcagggataccagtcatgtagag

SEQ ID NO: 5456153 - DNA, 25 bp, Homo sapien
accagtcatgtagaggtggtgagca

SEQ ID NO: 5456154 - DNA, 25 bp, Homo sapien
ataccagtcatgtagaggtggtgag

SEQ ID NO: 5456155 - DNA, 25 bp, Homo sapien
cagggataccagtcatgtagaggtg

SEQ ID NO: 5456156 - DNA, 25 bp, Homo sapien
caggtagttgcctccatgtttggac

SEQ ID NO: 5456157 - DNA, 25 bp, Homo sapien
gcctccatgtttggacttgagcatc

SEQ ID NO: 5456158 - DNA, 25 bp, Homo sapien
tgagcatctgcgccacctcacggag

SEQ ID NO: 5456159 - DNA, 25 bp, Homo sapien
acttgagcatctgcgccacctcacg

SEQ ID NO: 5456160 - DNA, 25 bp, Homo sapien
tgtcctccatggtccggctcacact

SEQ ID NO: 5456161 - DNA, 25 bp, Homo sapien
gcgatgatcctctctgtgacgtaca

SEQ ID NO: 5456162 - DNA, 25 bp, Homo sapien
gggaaggagacagcgatgatcctct

SEQ ID NO: 5456163 - DNA, 25 bp, Homo sapien
ctctctgtgacgtacaccaggtcca

SEQ ID NO: 5456164 - DNA, 25 bp, Homo sapien
ggagggtccatatcagaatccagcc

SEQ ID NO: 5456165 - DNA, 25 bp, Homo sapien
aggcagcggagggtccatatcagaa

SEQ ID NO: 5456166 - DNA, 25 bp, Homo sapien
cagcggagggtccatatcagaatcc

SEQ ID NO: 5456167 - DNA, 25 bp, Homo sapien
agggtccatatcagaatccagccca

SEQ ID NO: 5456168 - DNA, 25 bp, Homo sapien
agcaccatgcgtttcccggagaggt

SEQ ID NO: 5456169 - DNA, 25 bp, Homo sapien
tctgctaacctttcaccacagcggg

SEQ ID NO: 5456170 - DNA, 25 bp, Homo sapien
gaaaggccccagactgctctggaag

SEQ ID NO: 5456171 - DNA, 25 bp, Homo sapien
ggagggcagcgaaaggaataccact

SEQ ID NO: 5456172 - DNA, 25 bp, Homo sapien
aggagcccggtttgagtttgactct

SEQ ID NO: 5456173 - DNA, 25 bp, Homo sapien
gagcccggtttgagtttgactctga

SEQ ID NO: 5456174 - DNA, 25 bp, Homo sapien
ggagcccggtttgagtttgactctg

SEQ ID NO: 5456175 - DNA, 25 bp, Homo sapien
gcacacatacctgcaagcaagtggg

SEQ ID NO: 5456176 - DNA, 25 bp, Homo sapien
tagaatgtcagaaaaactcgcaaga

SEQ ID NO: 5456177 - DNA, 25 bp, Homo sapien
agtctgggacaagaagccacacgca

SEQ ID NO: 5456178 - DNA, 25 bp, Homo sapien
gaaggacgcaaatgcagaacagtgc

SEQ ID NO: 5456179 - DNA, 25 bp, Homo sapien
gccaggacacaaagtcccttgtgca

SEQ ID NO: 5456180 - DNA, 25 bp, Homo sapien
aaaacaaactctctggatcgccagg

SEQ ID NO: 5456181 - DNA, 25 bp, Homo sapien
tggcatccccaatcatctcaggagc

SEQ ID NO: 5456182 - DNA, 25 bp, Homo sapien
tctggatcgccaggacacaaagtcc

SEQ ID NO: 5456183 - DNA, 25 bp, Homo sapien
tgttgcaaggactagatgagctcat

SEQ ID NO: 5456184 - DNA, 25 bp, Homo sapien
acaactgttgccaacggcatccgca

SEQ ID NO: 5456185 - DNA, 25 bp, Homo sapien
aaatgctgctctaccaaagggaata

SEQ ID NO: 5456186 - DNA, 25 bp, Homo sapien
ggtaaataaagactcagctcaaggg

SEQ ID NO: 5456187 - DNA, 25 bp, Homo sapien
ggcaagacttaacagggacacccac

SEQ ID NO: 5456188 - DNA, 25 bp, Homo sapien
ccgtggctttatggctgcagtccgg

SEQ ID NO: 5456189 - DNA, 25 bp, Homo sapien
cttaacagggacacccacagtgacc

SEQ ID NO: 5456190 - DNA, 25 bp, Homo sapien
agaggcaagacttaacagggacacc

SEQ ID NO: 5456191 - DNA, 25 bp, Homo sapien
tggacactcggggtgaccctggtgg

SEQ ID NO: 5456192 - DNA, 25 bp, Homo sapien
gggctggacactcggggtgaccctg

SEQ ID NO: 5456193 - DNA, 25 bp, Homo sapien
ggtggggctggacactcggggtgac

SEQ ID NO: 5456194 - DNA, 25 bp, Homo sapien
gtggggctggacactcggggtgacc

SEQ ID NO: 5456195 - DNA, 25 bp, Homo sapien
aatcccgaatgctgaggagtgcacc

SEQ ID NO: 5456196 - DNA, 25 bp, Homo sapien
gattccacgtgagtgtgcctgcctg

SEQ ID NO: 5456197 - DNA, 25 bp, Homo sapien
gcgatgagagtaatggcgcccctct

SEQ ID NO: 5456198 - DNA, 25 bp, Homo sapien
caagacgaggcctaagacagtgagc

SEQ ID NO: 5456199 - DNA, 25 bp, Homo sapien
cctgggaagttgacggccaggcagg

SEQ ID NO: 5456200 - DNA, 25 bp, Homo sapien
ttgaccacggggtctccaagaagag

SEQ ID NO: 5456201 - DNA, 25 bp, Homo sapien
tggggcttgaccacggggtctccaa

SEQ ID NO: 5456202 - DNA, 25 bp, Homo sapien
ggcttgaccacggggtctccaagaa

SEQ ID NO: 5456203 - DNA, 25 bp, Homo sapien
gcagctctgctaagagggggaccct

SEQ ID NO: 5456204 - DNA, 25 bp, Homo sapien
tgcctcggaccaatgagcagctcct

SEQ ID NO: 5456205 - DNA, 25 bp, Homo sapien
caggataggtgggttccgaggtcca

SEQ ID NO: 5456206 - DNA, 25 bp, Homo sapien
tccagctgtccggaagaaggctctg

SEQ ID NO: 5456207 - DNA, 25 bp, Homo sapien
caacggtagccaagacgtgaggtgt

SEQ ID NO: 5456208 - DNA, 25 bp, Homo sapien
cctgctataaatagccccttgagtt

SEQ ID NO: 5456209 - DNA, 25 bp, Homo sapien
tgatccgtagccacttttggaggaa

SEQ ID NO: 5456210 - DNA, 25 bp, Homo sapien
acaactggaagccacaacggtagcc

SEQ ID NO: 5456211 - DNA, 25 bp, Homo sapien
ccttcctttgctgaaagggcaccat

SEQ ID NO: 5456212 - DNA, 25 bp, Homo sapien
aatccttcctttgctgaaagggcac

SEQ ID NO: 5456213 - DNA, 25 bp, Homo sapien
tccaaaacacaatccttcctttgct

SEQ ID NO: 5456214 - DNA, 25 bp, Homo sapien
ccaaaacacaatccttcctttgctg

SEQ ID NO: 5456215 - DNA, 25 bp, Homo sapien
gccttggtcctcattgcaggcaaga

SEQ ID NO: 5456216 - DNA, 25 bp, Homo sapien
gaaaggaaattcgacagcctcccag

SEQ ID NO: 5456217 - DNA, 25 bp, Homo sapien
gcctcccagacagagtgtcttactt

SEQ ID NO: 5456218 - DNA, 25 bp, Homo sapien
tcagccaactctttttgccttggtc

SEQ ID NO: 5456219 - DNA, 25 bp, Homo sapien
gcctggcgcagtcgctgatgaatga

SEQ ID NO: 5456220 - DNA, 25 bp, Homo sapien
aggcctggcgcagtcgctgatgaat

SEQ ID NO: 5456221 - DNA, 25 bp, Homo sapien
cgaggcctggcgcagtcgctgatga

SEQ ID NO: 5456222 - DNA, 25 bp, Homo sapien
gcaccgaggcctggcgcagtcgctg

SEQ ID NO: 5456223 - DNA, 25 bp, Homo sapien
aggcagcaccaaaggctgaggccca

SEQ ID NO: 5456224 - DNA, 25 bp, Homo sapien
gaggcagcaccaaaggctgaggccc

SEQ ID NO: 5456225 - DNA, 25 bp, Homo sapien
tgtcctcgaggcttttccgtgtgtt

SEQ ID NO: 5456226 - DNA, 25 bp, Homo sapien
tcctcgaggcttttccgtgtgtttc

SEQ ID NO: 5456227 - DNA, 25 bp, Homo sapien
gttgtcctcgaggcttttccgtgtg

SEQ ID NO: 5456228 - DNA, 25 bp, Homo sapien
ttgtcctcgaggcttttccgtgtgt

SEQ ID NO: 5456229 - DNA, 25 bp, Homo sapien
attctttggtgcattctcagtggtg

SEQ ID NO: 5456230 - DNA, 25 bp, Homo sapien
tctttggtgcattctcagtggtgat

SEQ ID NO: 5456231 - DNA, 25 bp, Homo sapien
cttgtccactacattctttggtgca

SEQ ID NO: 5456232 - DNA, 25 bp, Homo sapien
tacattctttggtgcattctcagtg

SEQ ID NO: 5456233 - DNA, 25 bp, Homo sapien
ctctccacttggagtccgaggatgg

SEQ ID NO: 5456234 - DNA, 25 bp, Homo sapien
ctccacttggagtccgaggatggct

SEQ ID NO: 5456235 - DNA, 25 bp, Homo sapien
gctgctaggtacaccaccttctctc

SEQ ID NO: 5456236 - DNA, 25 bp, Homo sapien
tgctgctaggtacaccaccttctct

SEQ ID NO: 5456237 - DNA, 25 bp, Homo sapien
gcaatgaactgcgaggtcaccatcg

SEQ ID NO: 5456238 - DNA, 25 bp, Homo sapien
catggcaatgaactgcgaggtcacc

SEQ ID NO: 5456239 - DNA, 25 bp, Homo sapien
gaactgcgaggtcaccatcgcactg

SEQ ID NO: 5456240 - DNA, 25 bp, Homo sapien
tgccatggcaatgaactgcgaggtc

SEQ ID NO: 5456241 - DNA, 25 bp, Homo sapien
aggcacacaggtgcatgcaggcagc

SEQ ID NO: 5456242 - DNA, 25 bp, Homo sapien
gcagcgcccagagccttgtctgctt

SEQ ID NO: 5456243 - DNA, 25 bp, Homo sapien
ctgtacacaggcacacaggtgcatg

SEQ ID NO: 5456244 - DNA, 25 bp, Homo sapien
cagagccttgtctgcttctagggcc

SEQ ID NO: 5456245 - DNA, 25 bp, Homo sapien
cccagttaccaacatatttgggtct

SEQ ID NO: 5456246 - DNA, 25 bp, Homo sapien
tatttgggtctaaagaaagctgcag

SEQ ID NO: 5456247 - DNA, 25 bp, Homo sapien
taattgtccgacaccccagttacca

SEQ ID NO: 5456248 - DNA, 25 bp, Homo sapien
ttgggtctaaagaaagctgcagctg

SEQ ID NO: 5456249 - DNA, 25 bp, Homo sapien
tggatggaggaacgcagggggcagc

SEQ ID NO: 5456250 - DNA, 25 bp, Homo sapien
ccagctcatggttggatggaggaac

SEQ ID NO: 5456251 - DNA, 25 bp, Homo sapien
caccagctcatggttggatggagga

SEQ ID NO: 5456252 - DNA, 25 bp, Homo sapien
tcatggttggatggaggaacgcagg

SEQ ID NO: 5456253 - DNA, 25 bp, Homo sapien
agaggcagaagcactctctgggagt

SEQ ID NO: 5456254 - DNA, 25 bp, Homo sapien
ccatgagtgtggctaacacatgtgg

SEQ ID NO: 5456255 - DNA, 25 bp, Homo sapien
cactttcccggagcatgcatgaaat

SEQ ID NO: 5456256 - DNA, 25 bp, Homo sapien
ccagcccttccaaagaaagccatga

SEQ ID NO: 5456257 - DNA, 25 bp, Homo sapien
caggacaaaaggccgggacaggcaa

SEQ ID NO: 5456258 - DNA, 25 bp, Homo sapien
catcctggtttcatgatcctgccca

SEQ ID NO: 5456259 - DNA, 25 bp, Homo sapien
ggcccagggcatgacccgtcagcat

SEQ ID NO: 5456260 - DNA, 25 bp, Homo sapien
agggtccccgcaatagccaggacaa

SEQ ID NO: 5456261 - DNA, 25 bp, Homo sapien
aggccacgtagagccaggctgggca

SEQ ID NO: 5456262 - DNA, 25 bp, Homo sapien
caggccacgtagagccaggctgggc

SEQ ID NO: 5456263 - DNA, 25 bp, Homo sapien
ggccacgtagagccaggctgggcat

SEQ ID NO: 5456264 - DNA, 25 bp, Homo sapien
catctcaaatggtacctcttctcca

SEQ ID NO: 5456265 - DNA, 25 bp, Homo sapien
tcctccccgcaaaactccttgccaa

SEQ ID NO: 5456266 - DNA, 25 bp, Homo sapien
aatccatctcaaatggtacctcttc

SEQ ID NO: 5456267 - DNA, 25 bp, Homo sapien
caaaatccatctcaaatggtacctc

SEQ ID NO: 5456268 - DNA, 25 bp, Homo sapien
tccagaagacaggtgagcaaatggg

SEQ ID NO: 5456269 - DNA, 25 bp, Homo sapien
gaaacttgcaaggatcacagaacgc

SEQ ID NO: 5456270 - DNA, 25 bp, Homo sapien
ccatccatgttgagcggcactctgc

SEQ ID NO: 5456271 - DNA, 25 bp, Homo sapien
ggagcttgtaatccatccagaagac

SEQ ID NO: 5456272 - DNA, 25 bp, Homo sapien
tggctggcaagaagctggtttcccc

SEQ ID NO: 5456273 - DNA, 25 bp, Homo sapien
ttcccccagaagaaggcagcgagtg

SEQ ID NO: 5456274 - DNA, 25 bp, Homo sapien
tctgggccaagggactcccaggaca

SEQ ID NO: 5456275 - DNA, 25 bp, Homo sapien
ggagccactaagtcaggtgggtgtc

SEQ ID NO: 5456276 - DNA, 25 bp, Homo sapien
cacatccgtattatcccaacggaca

SEQ ID NO: 5456277 - DNA, 25 bp, Homo sapien
agcaggtatccggaacagcagaatc

SEQ ID NO: 5456278 - DNA, 25 bp, Homo sapien
aacggacatcaaagcgtcccagctc

SEQ ID NO: 5456279 - DNA, 25 bp, Homo sapien
ggtatccggaacagcagaatcctcc

SEQ ID NO: 5456280 - DNA, 25 bp, Homo sapien
ttccatcctccaactttgacggtca

SEQ ID NO: 5456281 - DNA, 25 bp, Homo sapien
ccaactttgacggtcaggcctttct

SEQ ID NO: 5456282 - DNA, 25 bp, Homo sapien
ctttgacggtcaggcctttctcgta

SEQ ID NO: 5456283 - DNA, 25 bp, Homo sapien
cggtcaggcctttctcgtacaccat

SEQ ID NO: 5456284 - DNA, 25 bp, Homo sapien
actggggagcgtgctggccacaccc

SEQ ID NO: 5456285 - DNA, 25 bp, Homo sapien
gctgctaggaacaggataacatcct

SEQ ID NO: 5456286 - DNA, 25 bp, Homo sapien
tgacctttagccaagctggctcctg

SEQ ID NO: 5456287 - DNA, 25 bp, Homo sapien
agcagctgctaggaacaggataaca

SEQ ID NO: 5456288 - DNA, 25 bp, Homo sapien
atgaaggatgcttgggctccaggag

SEQ ID NO: 5456289 - DNA, 25 bp, Homo sapien
tctgcagggcccagatgaaggatgc

SEQ ID NO: 5456290 - DNA, 25 bp, Homo sapien
tcctaatgtccatgaggagggaaag

SEQ ID NO: 5456291 - DNA, 25 bp, Homo sapien
acagtcctgccctccattagatgat

SEQ ID NO: 5456292 - DNA, 25 bp, Homo sapien
cagctgcctgtttaataatgtacag

SEQ ID NO: 5456293 - DNA, 25 bp, Homo sapien
tccagctgcctgtttaataatgtac

SEQ ID NO: 5456294 - DNA, 25 bp, Homo sapien
ccagctgcctgtttaataatgtaca

SEQ ID NO: 5456295 - DNA, 25 bp, Homo sapien
ccaaggtgccccttcatgggaagct

SEQ ID NO: 5456296 - DNA, 25 bp, Homo sapien
gtgccccttcatgggaagctgacat

SEQ ID NO: 5456297 - DNA, 25 bp, Homo sapien
gacatgcagtcccacacggcagtca

SEQ ID NO: 5456298 - DNA, 25 bp, Homo sapien
tgcagtcccacacggcagtcacgca

SEQ ID NO: 5456299 - DNA, 25 bp, Homo sapien
ttcccaaaccgtcgtctgcatcctg

SEQ ID NO: 5456300 - DNA, 25 bp, Homo sapien
cacgggagacatcggtcacagagga

SEQ ID NO: 5456301 - DNA, 25 bp, Homo sapien
tgagcatgcaggttcatggctacac

SEQ ID NO: 5456302 - DNA, 25 bp, Homo sapien
agaggaagagcacgctggcggtggg

SEQ ID NO: 5456303 - DNA, 25 bp, Homo sapien
tcctcacaagacggctggtccagtg

SEQ ID NO: 5456304 - DNA, 25 bp, Homo sapien
ctcacaagacggctggtccagtgga

SEQ ID NO: 5456305 - DNA, 25 bp, Homo sapien
ctcctcacaagacggctggtccagt

SEQ ID NO: 5456306 - DNA, 25 bp, Homo sapien
cacaagacggctggtccagtggaga

SEQ ID NO: 5456307 - DNA, 25 bp, Homo sapien
ggagcaggggtgtcaaagatccttg

SEQ ID NO: 5456308 - DNA, 25 bp, Homo sapien
tggcagggcggagcagagataaaca

SEQ ID NO: 5456309 - DNA, 25 bp, Homo sapien
caagtcactcatcagccaggagcca

SEQ ID NO: 5456310 - DNA, 25 bp, Homo sapien
tcactcatcagccaggagccagaac

SEQ ID NO: 5456311 - DNA, 25 bp, Homo sapien
tagccagctcaacgggcaccacaga

SEQ ID NO: 5456312 - DNA, 25 bp, Homo sapien
cttagccagctcaacgggcaccaca

SEQ ID NO: 5456313 - DNA, 25 bp, Homo sapien
tgcttagccagctcaacgggcacca

SEQ ID NO: 5456314 - DNA, 25 bp, Homo sapien
caacgggcaccacagaccccccgag

SEQ ID NO: 5456315 - DNA, 25 bp, Homo sapien
gaatccatccccagcgaagctgaag

SEQ ID NO: 5456316 - DNA, 25 bp, Homo sapien
aagccagaagaacagacaccagggg

SEQ ID NO: 5456317 - DNA, 25 bp, Homo sapien
atccccagcgaagctgaagccagaa

SEQ ID NO: 5456318 - DNA, 25 bp, Homo sapien
gacaccaggggaagcagtaacttcc

SEQ ID NO: 5456319 - DNA, 25 bp, Homo sapien
cttggcctggcatttccgatgacag

SEQ ID NO: 5456320 - DNA, 25 bp, Homo sapien
gcatttccgatgacaggagaagctg

SEQ ID NO: 5456321 - DNA, 25 bp, Homo sapien
ggcctggcatttccgatgacaggag

SEQ ID NO: 5456322 - DNA, 25 bp, Homo sapien
tggcatttccgatgacaggagaagc

SEQ ID NO: 5456323 - DNA, 25 bp, Homo sapien
gaggcacagatgaatgcccggagca

SEQ ID NO: 5456324 - DNA, 25 bp, Homo sapien
gcacagatgaatgcccggagcagcc

SEQ ID NO: 5456325 - DNA, 25 bp, Homo sapien
gttgaggcacagatgaatgcccgga

SEQ ID NO: 5456326 - DNA, 25 bp, Homo sapien
aggttgaggcacagatgaatgcccg

SEQ ID NO: 5456327 - DNA, 25 bp, Homo sapien
cctgtgtggaatcacaatgatgctg

SEQ ID NO: 5456328 - DNA, 25 bp, Homo sapien
gaatgcttgctatatatcaggctct

SEQ ID NO: 5456329 - DNA, 25 bp, Homo sapien
gagggaggtactgctgtttgtccca

SEQ ID NO: 5456330 - DNA, 25 bp, Homo sapien
gatcatcccatccagtagtgttcaa

SEQ ID NO: 5456331 - DNA, 25 bp, Homo sapien
aaatccagtgggtgccggcttctgc

SEQ ID NO: 5456332 - DNA, 25 bp, Homo sapien
gacggatcgtctttccaggtgcatc

SEQ ID NO: 5456333 - DNA, 25 bp, Homo sapien
ctaggttccccagtgaagtaacagg

SEQ ID NO: 5456334 - DNA, 25 bp, Homo sapien
gacacagggcagaagctaggttccc

SEQ ID NO: 5456335 - DNA, 25 bp, Homo sapien
tgctgagctgccatcctggtatctt

SEQ ID NO: 5456336 - DNA, 25 bp, Homo sapien
cagatcaggccctgatggcagccct

SEQ ID NO: 5456337 - DNA, 25 bp, Homo sapien
gagctgccatcctggtatcttcctg

SEQ ID NO: 5456338 - DNA, 25 bp, Homo sapien
tcaggccctgatggcagccctcggg

SEQ ID NO: 5456339 - DNA, 25 bp, Homo sapien
tgtcagctttggtaccgtgctccat

SEQ ID NO: 5456340 - DNA, 25 bp, Homo sapien
ctgtgtcagctttggtaccgtgctc

SEQ ID NO: 5456341 - DNA, 25 bp, Homo sapien
gctccatgattgtctgactgtgtct

SEQ ID NO: 5456342 - DNA, 25 bp, Homo sapien
gtaccgtgctccatgattgtctgac

SEQ ID NO: 5456343 - DNA, 25 bp, Homo sapien
cctagagccatggaatgtgagggcc

SEQ ID NO: 5456344 - DNA, 25 bp, Homo sapien
tctaggtgaaaccagggccatgtct

SEQ ID NO: 5456345 - DNA, 25 bp, Homo sapien
taatttatgcatcttcgcagggcag

SEQ ID NO: 5456346 - DNA, 25 bp, Homo sapien
ggccatgtcttgctcaccctgggag

SEQ ID NO: 5456347 - DNA, 25 bp, Homo sapien
gtgtgtcttgggggcctccagatcc

SEQ ID NO: 5456348 - DNA, 25 bp, Homo sapien
ggtcttcaccttgaagcggtgtgtc

SEQ ID NO: 5456349 - DNA, 25 bp, Homo sapien
cttcaccttgaagcggtgtgtcttg

SEQ ID NO: 5456350 - DNA, 25 bp, Homo sapien
cctgggtgatgacctggcggcagat

SEQ ID NO: 5456351 - DNA, 25 bp, Homo sapien
ccagagcatgcaggacagacagatc

SEQ ID NO: 5456352 - DNA, 25 bp, Homo sapien
agcatgcaggacagacagatccacg

SEQ ID NO: 5456353 - DNA, 25 bp, Homo sapien
tgcaggacagacagatccacgtcat

SEQ ID NO: 5456354 - DNA, 25 bp, Homo sapien
catgcaggacagacagatccacgtc

SEQ ID NO: 5456355 - DNA, 25 bp, Homo sapien
cactgctggcgtcactgaagacgcc

SEQ ID NO: 5456356 - DNA, 25 bp, Homo sapien
cgtcactgaagacgcctccaggcag

SEQ ID NO: 5456357 - DNA, 25 bp, Homo sapien
agttctgagaagtcaccttggggct

SEQ ID NO: 5456358 - DNA, 25 bp, Homo sapien
gctggcgtcactgaagacgcctcca

SEQ ID NO: 5456359 - DNA, 25 bp, Homo sapien
ggtaactggaacagaagcctgctgg

SEQ ID NO: 5456360 - DNA, 25 bp, Homo sapien
cttgggtaactggaacagaagcctg

SEQ ID NO: 5456361 - DNA, 25 bp, Homo sapien
tgggtaactggaacagaagcctgct

SEQ ID NO: 5456362 - DNA, 25 bp, Homo sapien
gtaactggaacagaagcctgctggc

SEQ ID NO: 5456363 - DNA, 25 bp, Homo sapien
aaccaggctgacgatggccgagacg

SEQ ID NO: 5456364 - DNA, 25 bp, Homo sapien
tctgctgagaaccaggctgacgatg

SEQ ID NO: 5456365 - DNA, 25 bp, Homo sapien
caagcccaagacacccaggggtgtg

SEQ ID NO: 5456366 - DNA, 25 bp, Homo sapien
tatccttcagacttctgatccaagc

SEQ ID NO: 5456367 - DNA, 25 bp, Homo sapien
ttgccccatcggatcacgcaggaga

SEQ ID NO: 5456368 - DNA, 25 bp, Homo sapien
gcacgagaagaggtacttgccccat

SEQ ID NO: 5456369 - DNA, 25 bp, Homo sapien
agaagaggtacttgccccatcggat

SEQ ID NO: 5456370 - DNA, 25 bp, Homo sapien
atcacgcaggagaagcaccaactca

SEQ ID NO: 5456371 - DNA, 25 bp, Homo sapien
tgtgtgaggtcatcctattaggacc

SEQ ID NO: 5456372 - DNA, 25 bp, Homo sapien
ggaatattgtgtgaggtcatcctat

SEQ ID NO: 5456373 - DNA, 25 bp, Homo sapien
gaatattgtgtgaggtcatcctatt

SEQ ID NO: 5456374 - DNA, 25 bp, Homo sapien
tattgtgtgaggtcatcctattagg

SEQ ID NO: 5456375 - DNA, 25 bp, Homo sapien
tcaggcccacagtttccctggctgg

SEQ ID NO: 5456376 - DNA, 25 bp, Homo sapien
ggccctcaggcccacagtttccctg

SEQ ID NO: 5456377 - DNA, 25 bp, Homo sapien
ccacagtttccctggctggttttgt

SEQ ID NO: 5456378 - DNA, 25 bp, Homo sapien
ctgtcacaggccctcaggcccacag

SEQ ID NO: 5456379 - DNA, 25 bp, Homo sapien
ggtgggataggcctggagtgatggt

SEQ ID NO: 5456380 - DNA, 25 bp, Homo sapien
cctggagtgatggtgggtatcgatc

SEQ ID NO: 5456381 - DNA, 25 bp, Homo sapien
ggtatcgatccatggggatcccaca

SEQ ID NO: 5456382 - DNA, 25 bp, Homo sapien
gcagctgacatgataaacggggggt

SEQ ID NO: 5456383 - DNA, 25 bp, Homo sapien
cgtatgaattctcttccagaaacca

SEQ ID NO: 5456384 - DNA, 25 bp, Homo sapien
tgaattctcttccagaaaccaaaac

SEQ ID NO: 5456385 - DNA, 25 bp, Homo sapien
gtatgaattctcttccagaaaccaa

SEQ ID NO: 5456386 - DNA, 25 bp, Homo sapien
tatgaattctcttccagaaaccaaa

SEQ ID NO: 5456387 - DNA, 25 bp, Homo sapien
ctcctgatggagaatgagtccaaaa

SEQ ID NO: 5456388 - DNA, 25 bp, Homo sapien
ctctgagagctctgcacagcccttg

SEQ ID NO: 5456389 - DNA, 25 bp, Homo sapien
ctgagagctctgcacagcccttggg

SEQ ID NO: 5456390 - DNA, 25 bp, Homo sapien
ccttggggctcaggacctcctgatg

SEQ ID NO: 5456391 - DNA, 25 bp, Homo sapien
gccagaagtttcctcccaggagtcg

SEQ ID NO: 5456392 - DNA, 25 bp, Homo sapien
gtgccagaagtttcctcccaggagt

SEQ ID NO: 5456393 - DNA, 25 bp, Homo sapien
ccagaagtttcctcccaggagtcgc

SEQ ID NO: 5456394 - DNA, 25 bp, Homo sapien
cagtgccagaagtttcctcccagga

SEQ ID NO: 5456395 - DNA, 25 bp, Homo sapien
tggcccaacaggcacctgccccatg

SEQ ID NO: 5456396 - DNA, 25 bp, Homo sapien
ggcacctgccccatgtcaaagctgg

SEQ ID NO: 5456397 - DNA, 25 bp, Homo sapien
caggcacctgccccatgtcaaagct

SEQ ID NO: 5456398 - DNA, 25 bp, Homo sapien
cccaacaggcacctgccccatgtca

SEQ ID NO: 5456399 - DNA, 25 bp, Homo sapien
ccagcacagagaaggcaggggtgag

SEQ ID NO: 5456400 - DNA, 25 bp, Homo sapien
gggtgagaggccagcctgtccccac

SEQ ID NO: 5456401 - DNA, 25 bp, Homo sapien
cagcacagagaaggcaggggtgaga

SEQ ID NO: 5456402 - DNA, 25 bp, Homo sapien
cacagagaaggcaggggtgagaggc

SEQ ID NO: 5456403 - DNA, 25 bp, Homo sapien
cacccaacctatttgcccttctagg

SEQ ID NO: 5456404 - DNA, 25 bp, Homo sapien
ctgggtgactcctaaaccaacctca

SEQ ID NO: 5456405 - DNA, 25 bp, Homo sapien
tcccaagggcacaagagacccaggg

SEQ ID NO: 5456406 - DNA, 25 bp, Homo sapien
aagcagactagcaccgtcctgggct

SEQ ID NO: 5456407 - DNA, 25 bp, Homo sapien
tcacacagtgagtgtgtagccaggc

SEQ ID NO: 5456408 - DNA, 25 bp, Homo sapien
gtccaatctttggtctacaggtggg

SEQ ID NO: 5456409 - DNA, 25 bp, Homo sapien
tccactgtgtcccactgctgtacca

SEQ ID NO: 5456410 - DNA, 25 bp, Homo sapien
tgaccccgtcctccctgaatcccat

SEQ ID NO: 5456411 - DNA, 25 bp, Homo sapien
cactactgtttatctttacaacttt

SEQ ID NO: 5456412 - DNA, 25 bp, Homo sapien
agtggcattaagtactcagacatta

SEQ ID NO: 5456413 - DNA, 25 bp, Homo sapien
tcacgatgcccgagaattccacttt

SEQ ID NO: 5456414 - DNA, 25 bp, Homo sapien
tgtcttccgcagtggccacaacatt

SEQ ID NO: 5456415 - DNA, 25 bp, Homo sapien
gagctccagcaagtgatgtagtaat

SEQ ID NO: 5456416 - DNA, 25 bp, Homo sapien
gcacctttgtggacaccttctattt

SEQ ID NO: 5456417 - DNA, 25 bp, Homo sapien
ttagagagtagtggaagtgtgccct

SEQ ID NO: 5456418 - DNA, 25 bp, Homo sapien
gagtagtggaagtgtgccctgaaga

SEQ ID NO: 5456419 - DNA, 25 bp, Homo sapien
gagagtagtggaagtgtgccctgaa

SEQ ID NO: 5456420 - DNA, 25 bp, Homo sapien
tagagagtagtggaagtgtgccctg

SEQ ID NO: 5456421 - DNA, 25 bp, Homo sapien
cctggttgatgtcgttgcggcgctc

SEQ ID NO: 5456422 - DNA, 25 bp, Homo sapien
cagcaaagatgacccacatggtcca

SEQ ID NO: 5456423 - DNA, 25 bp, Homo sapien
ggctataatcttgagaagtccatgg

SEQ ID NO: 5456424 - DNA, 25 bp, Homo sapien
tccagtgcttctgccccatatgggc

SEQ ID NO: 5456425 - DNA, 25 bp, Homo sapien
gatcgcagcggcacgatgaagccaa

SEQ ID NO: 5456426 - DNA, 25 bp, Homo sapien
tcgcagcggcacgatgaagccaaag

SEQ ID NO: 5456427 - DNA, 25 bp, Homo sapien
atcgcagcggcacgatgaagccaaa

SEQ ID NO: 5456428 - DNA, 25 bp, Homo sapien
gcagcggcacgatgaagccaaagga

SEQ ID NO: 5456429 - DNA, 25 bp, Homo sapien
ctggggcaggatccgtaacagcatc

SEQ ID NO: 5456430 - DNA, 25 bp, Homo sapien
gggcaggatccgtaacagcatccac

SEQ ID NO: 5456431 - DNA, 25 bp, Homo sapien
tggggcaggatccgtaacagcatcc

SEQ ID NO: 5456432 - DNA, 25 bp, Homo sapien
ggggcaggatccgtaacagcatcca

SEQ ID NO: 5456433 - DNA, 25 bp, Homo sapien
aaagcaagatgcgtagggacagtaa

SEQ ID NO: 5456434 - DNA, 25 bp, Homo sapien
gatgcgtagggacagtaacaggaac

SEQ ID NO: 5456435 - DNA, 25 bp, Homo sapien
gaaggtccttcggaaaagcaagatg

SEQ ID NO: 5456436 - DNA, 25 bp, Homo sapien
aggtccttcggaaaagcaagatgcg

SEQ ID NO: 5456437 - DNA, 25 bp, Homo sapien
tatgaacttgaccaagtggcgctgc

SEQ ID NO: 5456438 - DNA, 25 bp, Homo sapien
gaacttgaccaagtggcgctgctgg

SEQ ID NO: 5456439 - DNA, 25 bp, Homo sapien
gacaatggccaggtaacagtccatg

SEQ ID NO: 5456440 - DNA, 25 bp, Homo sapien
ccagacatatgaacttgaccaagtg

SEQ ID NO: 5456441 - DNA, 25 bp, Homo sapien
ctgcggcaggccagtagtagaatac

SEQ ID NO: 5456442 - DNA, 25 bp, Homo sapien
gcaggccagtagtagaataccaccg

SEQ ID NO: 5456443 - DNA, 25 bp, Homo sapien
gaataccaccgtagaagttgacttc

SEQ ID NO: 5456444 - DNA, 25 bp, Homo sapien
tagtagaataccaccgtagaagttg

SEQ ID NO: 5456445 - DNA, 25 bp, Homo sapien
caggtagacatcggtgacagtggct

SEQ ID NO: 5456446 - DNA, 25 bp, Homo sapien
tggcacagattgtgccaaaaatcca

SEQ ID NO: 5456447 - DNA, 25 bp, Homo sapien
atgtcagggaaaagaacaggtcggc

SEQ ID NO: 5456448 - DNA, 25 bp, Homo sapien
agccaagatgggcaatgtcagggaa

SEQ ID NO: 5456449 - DNA, 25 bp, Homo sapien
gaaacatcagggcatagatgatgat

SEQ ID NO: 5456450 - DNA, 25 bp, Homo sapien
tgaccagcatcggcagggagtttca

SEQ ID NO: 5456451 - DNA, 25 bp, Homo sapien
gggagtttcacatcacgttcagtag

SEQ ID NO: 5456452 - DNA, 25 bp, Homo sapien
cacgttcagtagaaacatcagggca

SEQ ID NO: 5456453 - DNA, 25 bp, Homo sapien
tgaagatgtcttcccacatgtaatt

SEQ ID NO: 5456454 - DNA, 25 bp, Homo sapien
actgaagatgtcttcccacatgtaa

SEQ ID NO: 5456455 - DNA, 25 bp, Homo sapien
ctgaagatgtcttcccacatgtaat

SEQ ID NO: 5456456 - DNA, 25 bp, Homo sapien
tggccaccagattcgctgtacttac

SEQ ID NO: 5456457 - DNA, 25 bp, Homo sapien
ctggccaccagattcgctgtactta

SEQ ID NO: 5456458 - DNA, 25 bp, Homo sapien
ctggggtgatgtaaactcggggagc

SEQ ID NO: 5456459 - DNA, 25 bp, Homo sapien
ggggtgatgtaaactcggggagcat

SEQ ID NO: 5456460 - DNA, 25 bp, Homo sapien
tggggtgatgtaaactcggggagca

SEQ ID NO: 5456461 - DNA, 25 bp, Homo sapien
gcatttagtaggctccaggcaccaa

SEQ ID NO: 5456462 - DNA, 25 bp, Homo sapien
tgttctagcaggagttaaagcccca

SEQ ID NO: 5456463 - DNA, 25 bp, Homo sapien
tacagtgaataaaccgacagggccc

SEQ ID NO: 5456464 - DNA, 25 bp, Homo sapien
taggcaaggcctaacccagaagatg

SEQ ID NO: 5456465 - DNA, 25 bp, Homo sapien
ctgtgagggtcaacgagagcatcca

SEQ ID NO: 5456466 - DNA, 25 bp, Homo sapien
caatggactggtggctgcacatggc

SEQ ID NO: 5456467 - DNA, 25 bp, Homo sapien
ttccatggaggtgcaaaggccggtc

SEQ ID NO: 5456468 - DNA, 25 bp, Homo sapien
aaaacccagatagtgcctgtccaga

SEQ ID NO: 5456469 - DNA, 25 bp, Homo sapien
gacattgacagacgaagaagtgtag

SEQ ID NO: 5456470 - DNA, 25 bp, Homo sapien
taggaggtaacacgatgacgtgcca

SEQ ID NO: 5456471 - DNA, 25 bp, Homo sapien
cagacgaagaagtgtaggaggtaac

SEQ ID NO: 5456472 - DNA, 25 bp, Homo sapien
ggtaacacgatgacgtgccaagaac

SEQ ID NO: 5456473 - DNA, 25 bp, Homo sapien
ccggccgatgttgttgcggcgctca

SEQ ID NO: 5456474 - DNA, 25 bp, Homo sapien
tagccaggatcttgaggaatccatg

SEQ ID NO: 5456475 - DNA, 25 bp, Homo sapien
gaatccatggcgaaaattttggccg

SEQ ID NO: 5456476 - DNA, 25 bp, Homo sapien
tgaccaggccatgcatagccaggat

SEQ ID NO: 5456477 - DNA, 25 bp, Homo sapien
aggacctcatagcaaactggactgg

SEQ ID NO: 5456478 - DNA, 25 bp, Homo sapien
gcatgacaaacagcggcacgatgaa

SEQ ID NO: 5456479 - DNA, 25 bp, Homo sapien
gaattgtttggatggtaagcctggc

SEQ ID NO: 5456480 - DNA, 25 bp, Homo sapien
gacagattcatagacagtccccagc

SEQ ID NO: 5456481 - DNA, 25 bp, Homo sapien
taggcgatgatcacaacatacttgt

SEQ ID NO: 5456482 - DNA, 25 bp, Homo sapien
gtgtctcagtttctagcatacaggg

SEQ ID NO: 5456483 - DNA, 25 bp, Homo sapien
catctgtggatctgtaatatttgac

SEQ ID NO: 5456484 - DNA, 25 bp, Homo sapien
gcaggaacactagggcataggcgat

SEQ ID NO: 5456485 - DNA, 25 bp, Homo sapien
cctcttcagtttcagcaatggtttg

SEQ ID NO: 5456486 - DNA, 25 bp, Homo sapien
cagtttcagcaatggtttgatctaa

SEQ ID NO: 5456487 - DNA, 25 bp, Homo sapien
gtcctcttcagtttcagcaatggtt

SEQ ID NO: 5456488 - DNA, 25 bp, Homo sapien
tcttcagtttcagcaatggtttgat

SEQ ID NO: 5456489 - DNA, 25 bp, Homo sapien
tgaagcaccggccaggtgtgtccaa

SEQ ID NO: 5456490 - DNA, 25 bp, Homo sapien
gatcagagtgacttaacagctagag

SEQ ID NO: 5456491 - DNA, 25 bp, Homo sapien
ccaacagtaggagctgcagtcagag

SEQ ID NO: 5456492 - DNA, 25 bp, Homo sapien
acagctagagggcacttgatgaata

SEQ ID NO: 5456493 - DNA, 25 bp, Homo sapien
acttcgcagtaggacgagcatttca

SEQ ID NO: 5456494 - DNA, 25 bp, Homo sapien
ccaggagaagttgcatctggaggac

SEQ ID NO: 5456495 - DNA, 25 bp, Homo sapien
gcagccctgctgcatgagtgtggtg

SEQ ID NO: 5456496 - DNA, 25 bp, Homo sapien
gaaagaacctttcacttcgcagtag

SEQ ID NO: 5456497 - DNA, 25 bp, Homo sapien
agaacatctattttgtccctgcatc

SEQ ID NO: 5456498 - DNA, 25 bp, Homo sapien
gaccatgtgaacagcacaatgtggc

SEQ ID NO: 5456499 - DNA, 25 bp, Homo sapien
tctcattcctccagaagaatccact

SEQ ID NO: 5456500 - DNA, 25 bp, Homo sapien
tgtccctgcatcagccttatgccag

SEQ ID NO: 5456501 - DNA, 25 bp, Homo sapien
tcatgcatgcacttggacactgaat

SEQ ID NO: 5456502 - DNA, 25 bp, Homo sapien
tctcatgcatgcacttggacactga

SEQ ID NO: 5456503 - DNA, 25 bp, Homo sapien
ttggacactgaatcatcatgcttat

SEQ ID NO: 5456504 - DNA, 25 bp, Homo sapien
cacatctcatgcatgcacttggaca

SEQ ID NO: 5456505 - DNA, 25 bp, Homo sapien
caagctctacccgatatggcccaac

SEQ ID NO: 5456506 - DNA, 25 bp, Homo sapien
ctgcatagtcaacattctgtctgat

SEQ ID NO: 5456507 - DNA, 25 bp, Homo sapien
tagtcaacattctgtctgatggact

SEQ ID NO: 5456508 - DNA, 25 bp, Homo sapien
catagtcaacattctgtctgatgga

SEQ ID NO: 5456509 - DNA, 25 bp, Homo sapien
acttggctgccaaagcggtatccat

SEQ ID NO: 5456510 - DNA, 25 bp, Homo sapien
gagaatgactcgaaccccagagaca

SEQ ID NO: 5456511 - DNA, 25 bp, Homo sapien
ttttcaacctatttgcatctttgga

SEQ ID NO: 5456512 - DNA, 25 bp, Homo sapien
cttaagttagtctctagtaaaagca

SEQ ID NO: 5456513 - DNA, 25 bp, Homo sapien
catctttggatcttaagttagtctc

SEQ ID NO: 5456514 - DNA, 25 bp, Homo sapien
gatgagttaagattccgcacgcagg

SEQ ID NO: 5456515 - DNA, 25 bp, Homo sapien
aaatgtgttccggacacctggacgc

SEQ ID NO: 5456516 - DNA, 25 bp, Homo sapien
cgcacgcaggtaacaaggagggtat

SEQ ID NO: 5456517 - DNA, 25 bp, Homo sapien
tacatccccagtatagagcaagagc

SEQ ID NO: 5456518 - DNA, 25 bp, Homo sapien
gaagatccatggcactaaatcaccc

SEQ ID NO: 5456519 - DNA, 25 bp, Homo sapien
caaggaacttcaggcacatggtgct

SEQ ID NO: 5456520 - DNA, 25 bp, Homo sapien
tgactacttgctcacctaactaggg

SEQ ID NO: 5456521 - DNA, 25 bp, Homo sapien
tcctcacctttcattggcagtttgc

SEQ ID NO: 5456522 - DNA, 25 bp, Homo sapien
gacaagactaggatttggacccagt

SEQ ID NO: 5456523 - DNA, 25 bp, Homo sapien
tagcctgcagacttcaaaggtggtt

SEQ ID NO: 5456524 - DNA, 25 bp, Homo sapien
ggacccagttctgttcgactcaaaa

SEQ ID NO: 5456525 - DNA, 25 bp, Homo sapien
catgctgcatttggcaagtcacgtc

SEQ ID NO: 5456526 - DNA, 25 bp, Homo sapien
taatcgtagcttttaatgttgcgcc

SEQ ID NO: 5456527 - DNA, 25 bp, Homo sapien
gaaggctggaacacttgctactgga

SEQ ID NO: 5456528 - DNA, 25 bp, Homo sapien
gcctcttcaggttcttaagggattc

SEQ ID NO: 5456529 - DNA, 25 bp, Homo sapien
agaaacgagctgtgcttgcaaagac

SEQ ID NO: 5456530 - DNA, 25 bp, Homo sapien
gcaggataatgcagtcataacttgt

SEQ ID NO: 5456531 - DNA, 25 bp, Homo sapien
tattactggtaatgagttgcaggat

SEQ ID NO: 5456532 - DNA, 25 bp, Homo sapien
cctgtatctaaagaaatacggttgg

SEQ ID NO: 5456533 - DNA, 25 bp, Homo sapien
gtttcgctttgcaatatattactgg

SEQ ID NO: 5456534 - DNA, 25 bp, Homo sapien
tctgaagacggcttgcaccagagcc

SEQ ID NO: 5456535 - DNA, 25 bp, Homo sapien
aggaggattccatgccagagtctga

SEQ ID NO: 5456536 - DNA, 25 bp, Homo sapien
cattggtccagagctggtacccgca

SEQ ID NO: 5456537 - DNA, 25 bp, Homo sapien
aatggaagcggacaaaggaggcaca

SEQ ID NO: 5456538 - DNA, 25 bp, Homo sapien
aaatctttaactagtatctcttcct

SEQ ID NO: 5456539 - DNA, 25 bp, Homo sapien
atacaaatacacaccccatggctca

SEQ ID NO: 5456540 - DNA, 25 bp, Homo sapien
caaacacctactccccacatacaaa

SEQ ID NO: 5456541 - DNA, 25 bp, Homo sapien
catacaaatacacaccccatggctc

SEQ ID NO: 5456542 - DNA, 25 bp, Homo sapien
gaacctcaaacacctactccccaca

SEQ ID NO: 5456543 - DNA, 25 bp, Homo sapien
tccctctgtgccctactgcctctgc

SEQ ID NO: 5456544 - DNA, 25 bp, Homo sapien
ttcgtcccctcaacaccagacacac

SEQ ID NO: 5456545 - DNA, 25 bp, Homo sapien
gcaagtcagttgaagaggctggaaa

SEQ ID NO: 5456546 - DNA, 25 bp, Homo sapien
tcccttcgtcccctcaacaccagac

SEQ ID NO: 5456547 - DNA, 25 bp, Homo sapien
gacacaaaatactttcgctttgtgg

SEQ ID NO: 5456548 - DNA, 25 bp, Homo sapien
gtggtctcctgacgtggtcaccacc

SEQ ID NO: 5456549 - DNA, 25 bp, Homo sapien
ttgtggtctcctgacgtggtcacca

SEQ ID NO: 5456550 - DNA, 25 bp, Homo sapien
acaaaatactttcgctttgtggtct

SEQ ID NO: 5456551 - DNA, 25 bp, Homo sapien
tagtcagtaagcaggcggccggtcc

SEQ ID NO: 5456552 - DNA, 25 bp, Homo sapien
gtccaggatctcagccgtgtggccc

SEQ ID NO: 5456553 - DNA, 25 bp, Homo sapien
cgtgtggccccggtagtcagtaagc

SEQ ID NO: 5456554 - DNA, 25 bp, Homo sapien
gcaggtatataccacggcagtgcct

SEQ ID NO: 5456555 - DNA, 25 bp, Homo sapien
gccaggtcatagatggccaaggtcc

SEQ ID NO: 5456556 - DNA, 25 bp, Homo sapien
tggtgctgacactgatgcctaagag

SEQ ID NO: 5456557 - DNA, 25 bp, Homo sapien
caaggtcccatccaggtagccaaca

SEQ ID NO: 5456558 - DNA, 25 bp, Homo sapien
taagagtctgcgtagccaggtcata

SEQ ID NO: 5456559 - DNA, 25 bp, Homo sapien
cagaggagcgtaccatgaagactca

SEQ ID NO: 5456560 - DNA, 25 bp, Homo sapien
gaggagcgtaccatgaagactcatg

SEQ ID NO: 5456561 - DNA, 25 bp, Homo sapien
ggcctggactcacacgccctgccgt

SEQ ID NO: 5456562 - DNA, 25 bp, Homo sapien
tggccagaggagcgtaccatgaaga

SEQ ID NO: 5456563 - DNA, 25 bp, Homo sapien
acagtctcaggtctaaaaacaccca

SEQ ID NO: 5456564 - DNA, 25 bp, Homo sapien
gccacagtctcaggtctaaaaacac

SEQ ID NO: 5456565 - DNA, 25 bp, Homo sapien
agcccaaggactccaccgagttgga

SEQ ID NO: 5456566 - DNA, 25 bp, Homo sapien
gactccaccgagttggactcactct

SEQ ID NO: 5456567 - DNA, 25 bp, Homo sapien
gagaggagtcgggaaagcggaggcc

SEQ ID NO: 5456568 - DNA, 25 bp, Homo sapien
gagaggagacagtgaagacccagga

SEQ ID NO: 5456569 - DNA, 25 bp, Homo sapien
cagaggaggacacggaatccgggtg

SEQ ID NO: 5456570 - DNA, 25 bp, Homo sapien
aatccgggtgcttgatggagagaaa

SEQ ID NO: 5456571 - DNA, 25 bp, Homo sapien
agtccacagagccagttaggatcaa

SEQ ID NO: 5456572 - DNA, 25 bp, Homo sapien
tgccatcctggttggcagcaacaca

SEQ ID NO: 5456573 - DNA, 25 bp, Homo sapien
catcctggttggcagcaacacaggt

SEQ ID NO: 5456574 - DNA, 25 bp, Homo sapien
gccagttaggatcaagctgccatcc

SEQ ID NO: 5456575 - DNA, 25 bp, Homo sapien
catcttcatagcctaccacagctct

SEQ ID NO: 5456576 - DNA, 25 bp, Homo sapien
catggatagggcttccctgcttcag

SEQ ID NO: 5456577 - DNA, 25 bp, Homo sapien
tcatagcctaccacagctctcttcc

SEQ ID NO: 5456578 - DNA, 25 bp, Homo sapien
atggatagggcttccctgcttcagg

SEQ ID NO: 5456579 - DNA, 25 bp, Homo sapien
tgcacccaggaaaggtcactcaagg

SEQ ID NO: 5456580 - DNA, 25 bp, Homo sapien
agattttgccggctgtgacccagaa

SEQ ID NO: 5456581 - DNA, 25 bp, Homo sapien
tatatcccgggattcggcctctgca

SEQ ID NO: 5456582 - DNA, 25 bp, Homo sapien
cacatacactaagcaagggaatggg

SEQ ID NO: 5456583 - DNA, 25 bp, Homo sapien
ccacatccaggtgttgccgtcagct

SEQ ID NO: 5456584 - DNA, 25 bp, Homo sapien
ttgcagtcaccattcgggactttcc

SEQ ID NO: 5456585 - DNA, 25 bp, Homo sapien
aggtgcccgaggatgccactccatc

SEQ ID NO: 5456586 - DNA, 25 bp, Homo sapien
ggacaggtgcccgaggatgccactc

SEQ ID NO: 5456587 - DNA, 25 bp, Homo sapien
atgagctccacccaaggtttcctgc

SEQ ID NO: 5456588 - DNA, 25 bp, Homo sapien
cgcattggctcagagctggcttggc

SEQ ID NO: 5456589 - DNA, 25 bp, Homo sapien
gctcagagctggcttggcgcaataa

SEQ ID NO: 5456590 - DNA, 25 bp, Homo sapien
ggcttggcgcaataaaggcagaact

SEQ ID NO: 5456591 - DNA, 25 bp, Homo sapien
caggtctcccgcttcaaaggaccag

SEQ ID NO: 5456592 - DNA, 25 bp, Homo sapien
acctcctccttagtgtccacctgcc

SEQ ID NO: 5456593 - DNA, 25 bp, Homo sapien
ttcaagaggccactcatgtcccctg

SEQ ID NO: 5456594 - DNA, 25 bp, Homo sapien
cactagagtggagtcatggctgaaa

SEQ ID NO: 5456595 - DNA, 25 bp, Homo sapien
tccaggctcacacaaaacacagatg

SEQ ID NO: 5456596 - DNA, 25 bp, Homo sapien
agagcagctccccatcgctgagccg

SEQ ID NO: 5456597 - DNA, 25 bp, Homo sapien
gccatacgaaggctttgtcatcttc

SEQ ID NO: 5456598 - DNA, 25 bp, Homo sapien
cccggtcactgccaaggtattggtc

SEQ ID NO: 5456599 - DNA, 25 bp, Homo sapien
cgcacctggccaattatctctaatt

SEQ ID NO: 5456600 - DNA, 25 bp, Homo sapien
tctaattttatactcactactttta

SEQ ID NO: 5456601 - DNA, 25 bp, Homo sapien
ctggccaattatctctaattttata

SEQ ID NO: 5456602 - DNA, 25 bp, Homo sapien
ctctaattttatactcactactttt

SEQ ID NO: 5456603 - DNA, 25 bp, Homo sapien
ttctagaacccagccctcttcgttg

SEQ ID NO: 5456604 - DNA, 25 bp, Homo sapien
caaaggtgacctcgctatcgtcggg

SEQ ID NO: 5456605 - DNA, 25 bp, Homo sapien
cctccatgctgccgaccaccccttc

SEQ ID NO: 5456606 - DNA, 25 bp, Homo sapien
agccctcttcgttgccctcttcctc

SEQ ID NO: 5456607 - DNA, 25 bp, Homo sapien
ctttggggagagggttagaagatgg

SEQ ID NO: 5456608 - DNA, 25 bp, Homo sapien
gggtgagcgtctcctgtcccatggc

SEQ ID NO: 5456609 - DNA, 25 bp, Homo sapien
gagaccgtgcggtaagggagggcca

SEQ ID NO: 5456610 - DNA, 25 bp, Homo sapien
tatcggtaggaatgaccagtcgggt

SEQ ID NO: 5456611 - DNA, 25 bp, Homo sapien
taagaggtacggagagaagcatgag

SEQ ID NO: 5456612 - DNA, 25 bp, Homo sapien
tcaccatggaagcttagggtctcca

SEQ ID NO: 5456613 - DNA, 25 bp, Homo sapien
tttccgattcggactccatgcggcg

SEQ ID NO: 5456614 - DNA, 25 bp, Homo sapien
taccacctcgataatctcttcatca

SEQ ID NO: 5456615 - DNA, 25 bp, Homo sapien
gcggaccgggatcaagttctaccac

SEQ ID NO: 5456616 - DNA, 25 bp, Homo sapien
caccaagcgggaagtggacaaggac

SEQ ID NO: 5456617 - DNA, 25 bp, Homo sapien
caacacgggcgagtatgagagccag

SEQ ID NO: 5456618 - DNA, 25 bp, Homo sapien
ggctcggcagaacatgcggttgtcc

SEQ ID NO: 5456619 - DNA, 25 bp, Homo sapien
ggtttggcccagattccagttcgtg

SEQ ID NO: 5456620 - DNA, 25 bp, Homo sapien
tagtctattgcatccgtccccggaa

SEQ ID NO: 5456621 - DNA, 25 bp, Homo sapien
tccagtgtgatagggttgagctctc

SEQ ID NO: 5456622 - DNA, 25 bp, Homo sapien
gtcaagcactacagccaagaggtct

SEQ ID NO: 5456623 - DNA, 25 bp, Homo sapien
catggtgcagaaaaggtcaagcact

SEQ ID NO: 5456624 - DNA, 25 bp, Homo sapien
tagggcccagccctctagcttggaa

SEQ ID NO: 5456625 - DNA, 25 bp, Homo sapien
ttcctggccacacgtatgactctgc

SEQ ID NO: 5456626 - DNA, 25 bp, Homo sapien
tcttatagcgtcacaagccaggagc

SEQ ID NO: 5456627 - DNA, 25 bp, Homo sapien
caactacgtagtcaagaagcctgtg

SEQ ID NO: 5456628 - DNA, 25 bp, Homo sapien
tgcagggcgccagtgatgtagtcct

SEQ ID NO: 5456629 - DNA, 25 bp, Homo sapien
tgatggtgtgcttccggttccccag

SEQ ID NO: 5456630 - DNA, 25 bp, Homo sapien
tctgtgtaaatctgcagggcgccag

SEQ ID NO: 5456631 - DNA, 25 bp, Homo sapien
ccagctgtgtgtcgtaagccaggaa

SEQ ID NO: 5456632 - DNA, 25 bp, Homo sapien
gcccccagagcagcatagagcatgt

SEQ ID NO: 5456633 - DNA, 25 bp, Homo sapien
agagcagcatagagcatgtggagcc

SEQ ID NO: 5456634 - DNA, 25 bp, Homo sapien
cagagcagcatagagcatgtggagc

SEQ ID NO: 5456635 - DNA, 25 bp, Homo sapien
cccagagcagcatagagcatgtgga

SEQ ID NO: 5456636 - DNA, 25 bp, Homo sapien
aatgctagtgacaatcccagtcacc

SEQ ID NO: 5456637 - DNA, 25 bp, Homo sapien
tattggaagtagagcacaatgctag

SEQ ID NO: 5456638 - DNA, 25 bp, Homo sapien
cagtcaccaggagcacaattcccag

SEQ ID NO: 5456639 - DNA, 25 bp, Homo sapien
cagaagaggcctgtgcacgaggtga

SEQ ID NO: 5456640 - DNA, 25 bp, Homo sapien
taccaccgcagtgatgatcattgca

SEQ ID NO: 5456641 - DNA, 25 bp, Homo sapien
gatggtgactgaaatggataccacc

SEQ ID NO: 5456642 - DNA, 25 bp, Homo sapien
gatgacggctttggtttggtacata

SEQ ID NO: 5456643 - DNA, 25 bp, Homo sapien
tcattgcaatgatgacggctttggt

SEQ ID NO: 5456644 - DNA, 25 bp, Homo sapien
tggtgcccgtcatgaagcccatggc

SEQ ID NO: 5456645 - DNA, 25 bp, Homo sapien
aatggtgcccgtcatgaagcccatg

SEQ ID NO: 5456646 - DNA, 25 bp, Homo sapien
ggaaatggtgcccgtcatgaagccc

SEQ ID NO: 5456647 - DNA, 25 bp, Homo sapien
gtgcccgtcatgaagcccatggcaa

SEQ ID NO: 5456648 - DNA, 25 bp, Homo sapien
aatgatgttccatgggaaacggcgt

SEQ ID NO: 5456649 - DNA, 25 bp, Homo sapien
agggtcagcagaatgatgttccatg

SEQ ID NO: 5456650 - DNA, 25 bp, Homo sapien
tccaaaatactcggcccccatccca

SEQ ID NO: 5456651 - DNA, 25 bp, Homo sapien
cccctctcactgtgttaagtctctg

SEQ ID NO: 5456652 - DNA, 25 bp, Homo sapien
caatccctgtcacccctctcactgt

SEQ ID NO: 5456653 - DNA, 25 bp, Homo sapien
cactgtgttaagtctctgggactca

SEQ ID NO: 5456654 - DNA, 25 bp, Homo sapien
caggcaaggatcaggtaggtgacaa

SEQ ID NO: 5456655 - DNA, 25 bp, Homo sapien
caaggatcaggtaggtgacaacgaa

SEQ ID NO: 5456656 - DNA, 25 bp, Homo sapien
cagcaggcaaggatcaggtaggtga

SEQ ID NO: 5456657 - DNA, 25 bp, Homo sapien
gatcaggtaggtgacaacgaagaca

SEQ ID NO: 5456658 - DNA, 25 bp, Homo sapien
ccagtgatttggggcccaaatagcc

SEQ ID NO: 5456659 - DNA, 25 bp, Homo sapien
ggccagtgatttggggcccaaatag

SEQ ID NO: 5456660 - DNA, 25 bp, Homo sapien
caggccagtgatttggggcccaaat

SEQ ID NO: 5456661 - DNA, 25 bp, Homo sapien
agtgatttggggcccaaatagccgt

SEQ ID NO: 5456662 - DNA, 25 bp, Homo sapien
tctcctcacaaaggcgctgacaggt

SEQ ID NO: 5456663 - DNA, 25 bp, Homo sapien
ggacacgtagtagacagccacattt

SEQ ID NO: 5456664 - DNA, 25 bp, Homo sapien
cctcacaaaggcgctgacaggttcc

SEQ ID NO: 5456665 - DNA, 25 bp, Homo sapien
cacgtagtagacagccacatttctc

SEQ ID NO: 5456666 - DNA, 25 bp, Homo sapien
caaaggtgaagatagcaatgatggc

SEQ ID NO: 5456667 - DNA, 25 bp, Homo sapien
gctgcacggagatgatggagtaaac

SEQ ID NO: 5456668 - DNA, 25 bp, Homo sapien
tgaagatagcaatgatggccacagt

SEQ ID NO: 5456669 - DNA, 25 bp, Homo sapien
tgatgagcagctgcacggagatgat

SEQ ID NO: 5456670 - DNA, 25 bp, Homo sapien
cccactcaagaaccctccctagctg

SEQ ID NO: 5456671 - DNA, 25 bp, Homo sapien
gacggccgggcatgggtcaccatcc

SEQ ID NO: 5456672 - DNA, 25 bp, Homo sapien
ccagtactttcctcccactcaagaa

SEQ ID NO: 5456673 - DNA, 25 bp, Homo sapien
cagaggcgaccccagtgagatgcct

SEQ ID NO: 5456674 - DNA, 25 bp, Homo sapien
aaaagtgtgtcgcactttccggtca

SEQ ID NO: 5456675 - DNA, 25 bp, Homo sapien
tgtgtcgcactttccggtcatccca

SEQ ID NO: 5456676 - DNA, 25 bp, Homo sapien
ctttcggataaaagtgtgtcgcact

SEQ ID NO: 5456677 - DNA, 25 bp, Homo sapien
gataaaagtgtgtcgcactttccgg

SEQ ID NO: 5456678 - DNA, 25 bp, Homo sapien
gcaggagcaggtatgggcatccact

SEQ ID NO: 5456679 - DNA, 25 bp, Homo sapien
acagatgacacttgactcagctggg

SEQ ID NO: 5456680 - DNA, 25 bp, Homo sapien
gggaaacgttcctcacgtgcatctg

SEQ ID NO: 5456681 - DNA, 25 bp, Homo sapien
gagacatgtggcgtcaatcccaaag

SEQ ID NO: 5456682 - DNA, 25 bp, Homo sapien
gtagccagcagggtgaccgtagcca

SEQ ID NO: 5456683 - DNA, 25 bp, Homo sapien
agatggctgcccatagcccccaggg

SEQ ID NO: 5456684 - DNA, 25 bp, Homo sapien
accgtagccaggctgcgggtagcca

SEQ ID NO: 5456685 - DNA, 25 bp, Homo sapien
ggttgcggtcttcatatggtggtgg

SEQ ID NO: 5456686 - DNA, 25 bp, Homo sapien
ggctgagggggaaccccagctgctg

SEQ ID NO: 5456687 - DNA, 25 bp, Homo sapien
gagggggaaccccagctgctgggac

SEQ ID NO: 5456688 - DNA, 25 bp, Homo sapien
gctgagggggaaccccagctgctgg

SEQ ID NO: 5456689 - DNA, 25 bp, Homo sapien
ggctgctcacgggctgagggggaac

SEQ ID NO: 5456690 - DNA, 25 bp, Homo sapien
ccttggttaccgagctggtcctggg

SEQ ID NO: 5456691 - DNA, 25 bp, Homo sapien
gggagttgctaaactcagccacact

SEQ ID NO: 5456692 - DNA, 25 bp, Homo sapien
gaaaccccagcattaacgctagcca

SEQ ID NO: 5456693 - DNA, 25 bp, Homo sapien
gctgtctacatagagagacctgggc

SEQ ID NO: 5456694 - DNA, 25 bp, Homo sapien
tctgagcagtgccaagaacactgtc

SEQ ID NO: 5456695 - DNA, 25 bp, Homo sapien
accagggctgccgggtttggcagct

SEQ ID NO: 5456696 - DNA, 25 bp, Homo sapien
tgtcagactggcaagagcctccggg

SEQ ID NO: 5456697 - DNA, 25 bp, Homo sapien
gggaccagggctgccgggtttggca

SEQ ID NO: 5456698 - DNA, 25 bp, Homo sapien
cagcaaggcctccactagggatgag

SEQ ID NO: 5456699 - DNA, 25 bp, Homo sapien
gcaaggcctccactagggatgaggt

SEQ ID NO: 5456700 - DNA, 25 bp, Homo sapien
aggcctccactagggatgaggtttg

SEQ ID NO: 5456701 - DNA, 25 bp, Homo sapien
atcagcaaggcctccactagggatg

SEQ ID NO: 5456702 - DNA, 25 bp, Homo sapien
tccagcaacatggagcaagcccctt

SEQ ID NO: 5456703 - DNA, 25 bp, Homo sapien
tcagtgtggtaatcctgctgtctgc

SEQ ID NO: 5456704 - DNA, 25 bp, Homo sapien
ttaaggctccggaatctgcagagga

SEQ ID NO: 5456705 - DNA, 25 bp, Homo sapien
tgcagacagctcgattagaacattc

SEQ ID NO: 5456706 - DNA, 25 bp, Homo sapien
aaccccagagccaagaaagttcctg

SEQ ID NO: 5456707 - DNA, 25 bp, Homo sapien
gagccaagaaagttcctgctccacc

SEQ ID NO: 5456708 - DNA, 25 bp, Homo sapien
agacaaggaaaccccagagccaaga

SEQ ID NO: 5456709 - DNA, 25 bp, Homo sapien
ccccagagccaagaaagttcctgct

SEQ ID NO: 5456710 - DNA, 25 bp, Homo sapien
tggctttgggactcactccactgtg

SEQ ID NO: 5456711 - DNA, 25 bp, Homo sapien
cccacagcaggcaaacagcagagat

SEQ ID NO: 5456712 - DNA, 25 bp, Homo sapien
tcccctgcggaaagttgatctgaag

SEQ ID NO: 5456713 - DNA, 25 bp, Homo sapien
cacgcacctgcgtgaataggcagca

SEQ ID NO: 5456714 - DNA, 25 bp, Homo sapien
gccactcgggctggcatggtggata

SEQ ID NO: 5456715 - DNA, 25 bp, Homo sapien
ctcgggctggcatggtggataggcc

SEQ ID NO: 5456716 - DNA, 25 bp, Homo sapien
agctgagggccatgaaagccctcat

SEQ ID NO: 5456717 - DNA, 25 bp, Homo sapien
cagctgagggccatgaaagccctca

SEQ ID NO: 5456718 - DNA, 25 bp, Homo sapien
gcgttcctggcctcggagtgttgca

SEQ ID NO: 5456719 - DNA, 25 bp, Homo sapien
tgcgccgttccagacggagcgttcc

SEQ ID NO: 5456720 - DNA, 25 bp, Homo sapien
tggcctcggagtgttgcaagtcctc

SEQ ID NO: 5456721 - DNA, 25 bp, Homo sapien
gccgggcagggctaggctcggctgg

SEQ ID NO: 5456722 - DNA, 25 bp, Homo sapien
agtgagaaaggcacatggcggatgt

SEQ ID NO: 5456723 - DNA, 25 bp, Homo sapien
tgaaaggcagtgagaaaggcacatg

SEQ ID NO: 5456724 - DNA, 25 bp, Homo sapien
agaaaggcacatggcggatgttgat

SEQ ID NO: 5456725 - DNA, 25 bp, Homo sapien
cacatggcggatgttgatggtgact

SEQ ID NO: 5456726 - DNA, 25 bp, Homo sapien
gccagccagaataccgggggattct

SEQ ID NO: 5456727 - DNA, 25 bp, Homo sapien
gattctcagctttcaagcccctctc

SEQ ID NO: 5456728 - DNA, 25 bp, Homo sapien
ctttcaagcccctctcctcgtccat

SEQ ID NO: 5456729 - DNA, 25 bp, Homo sapien
accctgccctctcgccatggacctc

SEQ ID NO: 5456730 - DNA, 25 bp, Homo sapien
tgtggattgtagcaaagcacacagc

SEQ ID NO: 5456731 - DNA, 25 bp, Homo sapien
cacaggtgaaactggtgagacacat

SEQ ID NO: 5456732 - DNA, 25 bp, Homo sapien
tagctgccctaggtaaggactgtgg

SEQ ID NO: 5456733 - DNA, 25 bp, Homo sapien
catagggctcctgtgaagatcaaat

SEQ ID NO: 5456734 - DNA, 25 bp, Homo sapien
tgcagaacaaagtcttgaggagagc

SEQ ID NO: 5456735 - DNA, 25 bp, Homo sapien
gagacgaataggacacaggcaggtc

SEQ ID NO: 5456736 - DNA, 25 bp, Homo sapien
tcttgcagagccgaggaggtgggta

SEQ ID NO: 5456737 - DNA, 25 bp, Homo sapien
aggaatgtgggactcccccgtgcgt

SEQ ID NO: 5456738 - DNA, 25 bp, Homo sapien
tcaaaggtacccagaatgtgaacac

SEQ ID NO: 5456739 - DNA, 25 bp, Homo sapien
caaaggtacccagaatgtgaacact

SEQ ID NO: 5456740 - DNA, 25 bp, Homo sapien
aggtacccagaatgtgaacacttct

SEQ ID NO: 5456741 - DNA, 25 bp, Homo sapien
cttcaaaggtacccagaatgtgaac

SEQ ID NO: 5456742 - DNA, 25 bp, Homo sapien
tgtagttaagctttaacaacatcgt

SEQ ID NO: 5456743 - DNA, 25 bp, Homo sapien
tggcactagtctgtctttaatgtct

SEQ ID NO: 5456744 - DNA, 25 bp, Homo sapien
gtgacactggttttcagttcataaa

SEQ ID NO: 5456745 - DNA, 25 bp, Homo sapien
ccgggatccaggttcatactttagt

SEQ ID NO: 5456746 - DNA, 25 bp, Homo sapien
ccatcgcttttttttttccaagctg

SEQ ID NO: 5456747 - DNA, 25 bp, Homo sapien
tcgcttttttttttccaagctgcag

SEQ ID NO: 5456748 - DNA, 25 bp, Homo sapien
catcgcttttttttttccaagctgc

SEQ ID NO: 5456749 - DNA, 25 bp, Homo sapien
gcttttttttttccaagctgcagaa

SEQ ID NO: 5456750 - DNA, 25 bp, Homo sapien
ccatcctgtagtttttctgggaccg

SEQ ID NO: 5456751 - DNA, 25 bp, Homo sapien
catcctgtagtttttctgggaccgt

SEQ ID NO: 5456752 - DNA, 25 bp, Homo sapien
tgtcttcctagcttgcagacaagtg

SEQ ID NO: 5456753 - DNA, 25 bp, Homo sapien
gtcttcctagcttgcagacaagtgc

SEQ ID NO: 5456754 - DNA, 25 bp, Homo sapien
ctgtcttcctagcttgcagacaagt

SEQ ID NO: 5456755 - DNA, 25 bp, Homo sapien
agcaggcggtctgggaagattctca

SEQ ID NO: 5456756 - DNA, 25 bp, Homo sapien
cagtccatagcaggcggtctgggaa

SEQ ID NO: 5456757 - DNA, 25 bp, Homo sapien
tagcaggcggtctgggaagattctc

SEQ ID NO: 5456758 - DNA, 25 bp, Homo sapien
ccatagcaggcggtctgggaagatt

SEQ ID NO: 5456759 - DNA, 25 bp, Homo sapien
aatacaggtgggctccccagggtgc

SEQ ID NO: 5456760 - DNA, 25 bp, Homo sapien
ctggccaagagaatacaggtgggct

SEQ ID NO: 5456761 - DNA, 25 bp, Homo sapien
gggtgctgcatcatcaccaagatgc

SEQ ID NO: 5456762 - DNA, 25 bp, Homo sapien
cccagggtgctgcatcatcaccaag

SEQ ID NO: 5456763 - DNA, 25 bp, Homo sapien
ccccacctagatgagattgagccac

SEQ ID NO: 5456764 - DNA, 25 bp, Homo sapien
tccttgttccccacctagatgagat

SEQ ID NO: 5456765 - DNA, 25 bp, Homo sapien
gtttgggtgttctcgggatctcgct

SEQ ID NO: 5456766 - DNA, 25 bp, Homo sapien
gggatctcgctgtgtatccaaggaa

SEQ ID NO: 5456767 - DNA, 25 bp, Homo sapien
ctgattgaaatgcacacccgtaggg

SEQ ID NO: 5456768 - DNA, 25 bp, Homo sapien
tagaaggctccagcgccccttagct

SEQ ID NO: 5456769 - DNA, 25 bp, Homo sapien
agctatctgcggcagcaccccgaag

SEQ ID NO: 5456770 - DNA, 25 bp, Homo sapien
gtccggctgaggctcgggctctgtc

SEQ ID NO: 5456771 - DNA, 25 bp, Homo sapien
cattcccagaaagatcgacagagct

SEQ ID NO: 5456772 - DNA, 25 bp, Homo sapien
cagaaaccctgcagcggttggagga

SEQ ID NO: 5456773 - DNA, 25 bp, Homo sapien
taaggtgaggtaaagcattccaggc

SEQ ID NO: 5456774 - DNA, 25 bp, Homo sapien
catgttgggaacaggccattgaggc

SEQ ID NO: 5456775 - DNA, 25 bp, Homo sapien
gataggataccttgagtcttgaagt

SEQ ID NO: 5456776 - DNA, 25 bp, Homo sapien
ggatgctgaggagataggatacctt

SEQ ID NO: 5456777 - DNA, 25 bp, Homo sapien
agttatgatcttgttactgcactcc

SEQ ID NO: 5456778 - DNA, 25 bp, Homo sapien
gtaagttatgatcttgttactgcac

SEQ ID NO: 5456779 - DNA, 25 bp, Homo sapien
ttccctaggctgtttctaggctccc

SEQ ID NO: 5456780 - DNA, 25 bp, Homo sapien
cctagagttgaacctgggccgggtg

SEQ ID NO: 5456781 - DNA, 25 bp, Homo sapien
cttagggagcggctgggcacccatt

SEQ ID NO: 5456782 - DNA, 25 bp, Homo sapien
ggctgcactttatagacgttcccta

SEQ ID NO: 5456783 - DNA, 25 bp, Homo sapien
acgtttagcgaagaaaggcatctcc

SEQ ID NO: 5456784 - DNA, 25 bp, Homo sapien
cgctgcagagggtacctgggcaaga

SEQ ID NO: 5456785 - DNA, 25 bp, Homo sapien
caaagtcccgaattaaagatgtcag

SEQ ID NO: 5456786 - DNA, 25 bp, Homo sapien
aagatgtcagttctcaaggacccca

SEQ ID NO: 5456787 - DNA, 25 bp, Homo sapien
tttggctacgcgaaaggaacagcgc

SEQ ID NO: 5456788 - DNA, 25 bp, Homo sapien
gcttgcagcgagaagacagggacct

SEQ ID NO: 5456789 - DNA, 25 bp, Homo sapien
ctcgaggtcggtggaatttggctac

SEQ ID NO: 5456790 - DNA, 25 bp, Homo sapien
gaacagcgcgtacgaaaacttcagg

SEQ ID NO: 5456791 - DNA, 25 bp, Homo sapien
caggaatagagagggaactcttcgg

SEQ ID NO: 5456792 - DNA, 25 bp, Homo sapien
gctcctgttcgctcgaggtgaggaa

SEQ ID NO: 5456793 - DNA, 25 bp, Homo sapien
ttccaagagtcgcttggcgcccgcg

SEQ ID NO: 5456794 - DNA, 25 bp, Homo sapien
aaacttcgcgtcacgcgtggaggcg

SEQ ID NO: 5456795 - DNA, 25 bp, Homo sapien
tgggttctgattgggaattttaaca

SEQ ID NO: 5456796 - DNA, 25 bp, Homo sapien
attgccagttgtgacctactgatgg

SEQ ID NO: 5456797 - DNA, 25 bp, Homo sapien
taatttagtgggttctgattgggaa

SEQ ID NO: 5456798 - DNA, 25 bp, Homo sapien
tgatggcccacagaattaatttagt

SEQ ID NO: 5456799 - DNA, 25 bp, Homo sapien
taacatggcgattccggaggtcaag

SEQ ID NO: 5456800 - DNA, 25 bp, Homo sapien
tgctaggcccaccagctaagtgtgt

SEQ ID NO: 5456801 - DNA, 25 bp, Homo sapien
gggtctctacgccagctcatcagtg

SEQ ID NO: 5456802 - DNA, 25 bp, Homo sapien
ttttctgaatggaacaagctgggcc

SEQ ID NO: 5456803 - DNA, 25 bp, Homo sapien
tcagcctgtaggagtatttgggact

SEQ ID NO: 5456804 - DNA, 25 bp, Homo sapien
gcttcagcctgtaggagtatttggg

SEQ ID NO: 5456805 - DNA, 25 bp, Homo sapien
tcccgcttcagcctgtaggagtatt

SEQ ID NO: 5456806 - DNA, 25 bp, Homo sapien
ccgcttcagcctgtaggagtatttg

SEQ ID NO: 5456807 - DNA, 25 bp, Homo sapien
tacaaaataatctgacacattcaca

SEQ ID NO: 5456808 - DNA, 25 bp, Homo sapien
tctgccgctaccctcccgctctaag

SEQ ID NO: 5456809 - DNA, 25 bp, Homo sapien
gacctcagttgtaccttctgccgct

SEQ ID NO: 5456810 - DNA, 25 bp, Homo sapien
ccgctctaagcaaaacctgctccta

SEQ ID NO: 5456811 - DNA, 25 bp, Homo sapien
gcaaactgcctgcaacggaagcact

SEQ ID NO: 5456812 - DNA, 25 bp, Homo sapien
cattagggtaatgctgctccatggc

SEQ ID NO: 5456813 - DNA, 25 bp, Homo sapien
tacatccaagttccaagagtaggac

SEQ ID NO: 5456814 - DNA, 25 bp, Homo sapien
taatcagctacggatgtgagaccaa

SEQ ID NO: 5456815 - DNA, 25 bp, Homo sapien
cccacttccgtgctaagtgactgag

SEQ ID NO: 5456816 - DNA, 25 bp, Homo sapien
ccacttccgtgctaagtgactgaga

SEQ ID NO: 5456817 - DNA, 25 bp, Homo sapien
cttccccacttccgtgctaagtgac

SEQ ID NO: 5456818 - DNA, 25 bp, Homo sapien
tccccacttccgtgctaagtgactg

SEQ ID NO: 5456819 - DNA, 25 bp, Homo sapien
gatcactctgcacggcagcctcttg

SEQ ID NO: 5456820 - DNA, 25 bp, Homo sapien
aaagaagatgtagccactccgatct

SEQ ID NO: 5456821 - DNA, 25 bp, Homo sapien
aaaccacgcttgcttcttaatgtca

SEQ ID NO: 5456822 - DNA, 25 bp, Homo sapien
tacctccaggtcattgtaagtaaac

SEQ ID NO: 5456823 - DNA, 25 bp, Homo sapien
ccggtacgaatgaggcagatttcct

SEQ ID NO: 5456824 - DNA, 25 bp, Homo sapien
gctaccaatgtgactgacaacactg

SEQ ID NO: 5456825 - DNA, 25 bp, Homo sapien
aagaagtgctaccaatgtgactgac

SEQ ID NO: 5456826 - DNA, 25 bp, Homo sapien
gacaacactgatgagccggtacgaa

SEQ ID NO: 5456827 - DNA, 25 bp, Homo sapien
gcttctgtgtactccatatcaaaaa

SEQ ID NO: 5456828 - DNA, 25 bp, Homo sapien
agcttcagcttctgtgtactccata

SEQ ID NO: 5456829 - DNA, 25 bp, Homo sapien
caatgcatccacaaaggagttgtta

SEQ ID NO: 5456830 - DNA, 25 bp, Homo sapien
tcatcagaacccaatgcatccacaa

SEQ ID NO: 5456831 - DNA, 25 bp, Homo sapien
taactcttaaatttcacgtaagata

SEQ ID NO: 5456832 - DNA, 25 bp, Homo sapien
cttaaatttcacgtaagatatacta

SEQ ID NO: 5456833 - DNA, 25 bp, Homo sapien
taaatttcacgtaagatatactaaa

SEQ ID NO: 5456834 - DNA, 25 bp, Homo sapien
ctcttaaatttcacgtaagatatac

SEQ ID NO: 5456835 - DNA, 25 bp, Homo sapien
taactcggtagctcttttgaggtca

SEQ ID NO: 5456836 - DNA, 25 bp, Homo sapien
agacttaactcggtagctcttttga

SEQ ID NO: 5456837 - DNA, 25 bp, Homo sapien
cttgaagacttaactcggtagctct

SEQ ID NO: 5456838 - DNA, 25 bp, Homo sapien
cttaactcggtagctcttttgaggt

SEQ ID NO: 5456839 - DNA, 25 bp, Homo sapien
ctatgaaaaatcagacctgtaagtc

SEQ ID NO: 5456840 - DNA, 25 bp, Homo sapien
gatcctgttgcctataaatctgata

SEQ ID NO: 5456841 - DNA, 25 bp, Homo sapien
ctaaacctacccattcattctaggg

SEQ ID NO: 5456842 - DNA, 25 bp, Homo sapien
tactaacatgacttggattgcacag

SEQ ID NO: 5456843 - DNA, 25 bp, Homo sapien
catactgctggagccaatcaacttc

SEQ ID NO: 5456844 - DNA, 25 bp, Homo sapien
tcttgaaggctctgagccagtgcct

SEQ ID NO: 5456845 - DNA, 25 bp, Homo sapien
tagttatctcagtaaaactggcagg

SEQ ID NO: 5456846 - DNA, 25 bp, Homo sapien
tccctttcacgctccatatcatact

SEQ ID NO: 5456847 - DNA, 25 bp, Homo sapien
ctttgtggtgttggttagaaagatc

SEQ ID NO: 5456848 - DNA, 25 bp, Homo sapien
ttgtggtgttggttagaaagatcag

SEQ ID NO: 5456849 - DNA, 25 bp, Homo sapien
tgtggtgttggttagaaagatcagc

SEQ ID NO: 5456850 - DNA, 25 bp, Homo sapien
tggtgttggttagaaagatcagctg

SEQ ID NO: 5456851 - DNA, 25 bp, Homo sapien
tgggctgctagttggcttatcatca

SEQ ID NO: 5456852 - DNA, 25 bp, Homo sapien
catcttctgcaaatccggtatctgg

SEQ ID NO: 5456853 - DNA, 25 bp, Homo sapien
gatggtgaagcatctctcttactta

SEQ ID NO: 5456854 - DNA, 25 bp, Homo sapien
cattctgtcaaatcctgagttttcc

SEQ ID NO: 5456855 - DNA, 25 bp, Homo sapien
tgaagaagagagttacttttagaag

SEQ ID NO: 5456856 - DNA, 25 bp, Homo sapien
gaagaagagagttacttttagaaga

SEQ ID NO: 5456857 - DNA, 25 bp, Homo sapien
ctgaagaagagagttacttttagaa

SEQ ID NO: 5456858 - DNA, 25 bp, Homo sapien
tcactgtctgaatcaaggcataaag

SEQ ID NO: 5456859 - DNA, 25 bp, Homo sapien
cctgctgctgttcgttgcctaacat

SEQ ID NO: 5456860 - DNA, 25 bp, Homo sapien
tctgaatcaaggcataaagccaagg

SEQ ID NO: 5456861 - DNA, 25 bp, Homo sapien
tgagggccacagaacgttttagctc

SEQ ID NO: 5456862 - DNA, 25 bp, Homo sapien
tgtggaatcctttaatgatgccaga

SEQ ID NO: 5456863 - DNA, 25 bp, Homo sapien
tgatgccagataagtaaggtgttac

SEQ ID NO: 5456864 - DNA, 25 bp, Homo sapien
cttgtaataattaagagcctctgag

SEQ ID NO: 5456865 - DNA, 25 bp, Homo sapien
caatatcatattgaaacacagtgca

SEQ ID NO: 5456866 - DNA, 25 bp, Homo sapien
tggtgatgcaggaattcaccatttg

SEQ ID NO: 5456867 - DNA, 25 bp, Homo sapien
ggtgatgcaggaattcaccatttga

SEQ ID NO: 5456868 - DNA, 25 bp, Homo sapien
ggctggtgatgcaggaattcaccat

SEQ ID NO: 5456869 - DNA, 25 bp, Homo sapien
gctggtgatgcaggaattcaccatt

SEQ ID NO: 5456870 - DNA, 25 bp, Homo sapien
catatgtgcactccaaccaagggta

SEQ ID NO: 5456871 - DNA, 25 bp, Homo sapien
tgctgcccaatcttattgttaagcg

SEQ ID NO: 5456872 - DNA, 25 bp, Homo sapien
gcgagagagccacattgaagctata

SEQ ID NO: 5456873 - DNA, 25 bp, Homo sapien
caggtatcttggaatgatgacttgc

SEQ ID NO: 5456874 - DNA, 25 bp, Homo sapien
tacttcactgttacatagtttaaaa

SEQ ID NO: 5456875 - DNA, 25 bp, Homo sapien
tataaccactactagtaaaataatg

SEQ ID NO: 5456876 - DNA, 25 bp, Homo sapien
aagcaataggttttatataaccact

SEQ ID NO: 5456877 - DNA, 25 bp, Homo sapien
taaatttggcactgatattgggtta

SEQ ID NO: 5456878 - DNA, 25 bp, Homo sapien
agcctgttaaatttgtgcctgacaa

SEQ ID NO: 5456879 - DNA, 25 bp, Homo sapien
ctgacaagagcacacttcccaccac

SEQ ID NO: 5456880 - DNA, 25 bp, Homo sapien
tgttaaatttgtgcctgacaagagc

SEQ ID NO: 5456881 - DNA, 25 bp, Homo sapien
ttaaatttgtgcctgacaagagcac

SEQ ID NO: 5456882 - DNA, 25 bp, Homo sapien
aggtcattaaactgttctcttttgg

SEQ ID NO: 5456883 - DNA, 25 bp, Homo sapien
ggaaggtcaatagagaggtcattaa

SEQ ID NO: 5456884 - DNA, 25 bp, Homo sapien
caagagaatcttgaattgaacgagg

SEQ ID NO: 5456885 - DNA, 25 bp, Homo sapien
tttcctacgaggaaggtcaatagag

SEQ ID NO: 5456886 - DNA, 25 bp, Homo sapien
gaaatcatttcttagacactactta

SEQ ID NO: 5456887 - DNA, 25 bp, Homo sapien
aaatcatttcttagacactacttac

SEQ ID NO: 5456888 - DNA, 25 bp, Homo sapien
ttagtaataacagggcaagtgtatg

SEQ ID NO: 5456889 - DNA, 25 bp, Homo sapien
acaggttcagtcttccaagttttat

SEQ ID NO: 5456890 - DNA, 25 bp, Homo sapien
gctctggtagctgaaatatctggtg

SEQ ID NO: 5456891 - DNA, 25 bp, Homo sapien
tttacaaatgatggagtgctgaacc

SEQ ID NO: 5456892 - DNA, 25 bp, Homo sapien
tctgcatataaccagagaatctctc

SEQ ID NO: 5456893 - DNA, 25 bp, Homo sapien
gaattacagatatcttttttaacaa

SEQ ID NO: 5456894 - DNA, 25 bp, Homo sapien
tggcatttttaaccttcttgagtaa

SEQ ID NO: 5456895 - DNA, 25 bp, Homo sapien
tctctgaattacagatatctttttt

SEQ ID NO: 5456896 - DNA, 25 bp, Homo sapien
aattttcttccatgggataccttgt

SEQ ID NO: 5456897 - DNA, 25 bp, Homo sapien
gggataccttgtttaagcaagtcat

SEQ ID NO: 5456898 - DNA, 25 bp, Homo sapien
aatagagattgtagaatagcattca

SEQ ID NO: 5456899 - DNA, 25 bp, Homo sapien
ctgataagtgcattgagtggaattt

SEQ ID NO: 5456900 - DNA, 25 bp, Homo sapien
catattactacaccctaaccccaag

SEQ ID NO: 5456901 - DNA, 25 bp, Homo sapien
tatagtaggagttctccactttatg

SEQ ID NO: 5456902 - DNA, 25 bp, Homo sapien
ctaaagtatgttcagtatagtagga

SEQ ID NO: 5456903 - DNA, 25 bp, Homo sapien
aggaattcctaaagtatgttcagta

SEQ ID NO: 5456904 - DNA, 25 bp, Homo sapien
ggtttgcgacagacacacatggagt

SEQ ID NO: 5456905 - DNA, 25 bp, Homo sapien
tgactgagcacgcaggtttgcgaca

SEQ ID NO: 5456906 - DNA, 25 bp, Homo sapien
cgcaggtttgcgacagacacacatg

SEQ ID NO: 5456907 - DNA, 25 bp, Homo sapien
tgagcacgcaggtttgcgacagaca

SEQ ID NO: 5456908 - DNA, 25 bp, Homo sapien
gggcactcttggtttattccagcca

SEQ ID NO: 5456909 - DNA, 25 bp, Homo sapien
gggagtctggcttgaaacattagtc

SEQ ID NO: 5456910 - DNA, 25 bp, Homo sapien
tgtaatcctggttacacctcagttt

SEQ ID NO: 5456911 - DNA, 25 bp, Homo sapien
tcttggtttattccagccagtgtaa

SEQ ID NO: 5456912 - DNA, 25 bp, Homo sapien
actcctaatattagaatcttatata

SEQ ID NO: 5456913 - DNA, 25 bp, Homo sapien
caaaatggctttcacccagctactc

SEQ ID NO: 5456914 - DNA, 25 bp, Homo sapien
gctactcctaatattagaatcttat

SEQ ID NO: 5456915 - DNA, 25 bp, Homo sapien
taaccatagtacaatgaccaaaacc

SEQ ID NO: 5456916 - DNA, 25 bp, Homo sapien
tttttctccaattaagcccacagtg

SEQ ID NO: 5456917 - DNA, 25 bp, Homo sapien
gccacactatgtctccgggagtttc

SEQ ID NO: 5456918 - DNA, 25 bp, Homo sapien
gagtttccttctaagccaatgacat

SEQ ID NO: 5456919 - DNA, 25 bp, Homo sapien
tccaaaaagtgctgctacctgtgct

SEQ ID NO: 5456920 - DNA, 25 bp, Homo sapien
tcctggcagcaatttaagatgtcac

SEQ ID NO: 5456921 - DNA, 25 bp, Homo sapien
gcaatctcttctggttcagccaacg

SEQ ID NO: 5456922 - DNA, 25 bp, Homo sapien
caacgtgcttgggaactctggattt

SEQ ID NO: 5456923 - DNA, 25 bp, Homo sapien
tttcagtgcttgcaataactgggcc

SEQ ID NO: 5456924 - DNA, 25 bp, Homo sapien
gaggcttttcgatgtgaggactttc

SEQ ID NO: 5456925 - DNA, 25 bp, Homo sapien
ccaggctggttcgaatggtatttct

SEQ ID NO: 5456926 - DNA, 25 bp, Homo sapien
tttttgaggcttttcgatgtgagga

SEQ ID NO: 5456927 - DNA, 25 bp, Homo sapien
cccaggctggttcgaatggtatttc

SEQ ID NO: 5456928 - DNA, 25 bp, Homo sapien
tgctgcactgcatgatcacatgttc

SEQ ID NO: 5456929 - DNA, 25 bp, Homo sapien
taaaaccatcaacccttctgtgctg

SEQ ID NO: 5456930 - DNA, 25 bp, Homo sapien
ttctgtgctgcactgcatgatcaca

SEQ ID NO: 5456931 - DNA, 25 bp, Homo sapien
gatgggcatttgccattaccctcac

SEQ ID NO: 5456932 - DNA, 25 bp, Homo sapien
tcaacaagtgcttagcaggtatctt

SEQ ID NO: 5456933 - DNA, 25 bp, Homo sapien
caggtatcttatgtatttataccca

SEQ ID NO: 5456934 - DNA, 25 bp, Homo sapien
gcttagcaggtatcttatgtattta

SEQ ID NO: 5456935 - DNA, 25 bp, Homo sapien
caagtgcttagcaggtatcttatgt

SEQ ID NO: 5456936 - DNA, 25 bp, Homo sapien
gaagagtgttccttggatccagctc

SEQ ID NO: 5456937 - DNA, 25 bp, Homo sapien
ctgtctaagttagtgccaccagaag

SEQ ID NO: 5456938 - DNA, 25 bp, Homo sapien
gttagtgccaccagaagagtgttcc

SEQ ID NO: 5456939 - DNA, 25 bp, Homo sapien
gccaccagaagagtgttccttggat

SEQ ID NO: 5456940 - DNA, 25 bp, Homo sapien
ctctactgctggttaaatactttct

SEQ ID NO: 5456941 - DNA, 25 bp, Homo sapien
tcttctgactgtttcaaactcagct

SEQ ID NO: 5456942 - DNA, 25 bp, Homo sapien
ttctctactgctggttaaatacttt

SEQ ID NO: 5456943 - DNA, 25 bp, Homo sapien
cttctgactgtttcaaactcagctg

SEQ ID NO: 5456944 - DNA, 25 bp, Homo sapien
actactgtcgtgctttggataatca

SEQ ID NO: 5456945 - DNA, 25 bp, Homo sapien
tgtggagccactaaacgaaggaatg

SEQ ID NO: 5456946 - DNA, 25 bp, Homo sapien
ttcattgtgctactcaaaacagtgc

SEQ ID NO: 5456947 - DNA, 25 bp, Homo sapien
cagatggaatgggacagctcaaggt

SEQ ID NO: 5456948 - DNA, 25 bp, Homo sapien
tacctttgtgcataaactcgctaga

SEQ ID NO: 5456949 - DNA, 25 bp, Homo sapien
caattacatgcaagatctgggaagt

SEQ ID NO: 5456950 - DNA, 25 bp, Homo sapien
tgacagcacggttctagagaggaca

SEQ ID NO: 5456951 - DNA, 25 bp, Homo sapien
tcatgatagaatagctgggagcatc

SEQ ID NO: 5456952 - DNA, 25 bp, Homo sapien
tcattttccttagggtaatcttcat

SEQ ID NO: 5456953 - DNA, 25 bp, Homo sapien
tagggtaatcttcattcaattctga

SEQ ID NO: 5456954 - DNA, 25 bp, Homo sapien
attctgagccagttgatatcattct

SEQ ID NO: 5456955 - DNA, 25 bp, Homo sapien
gagccagttgatatcattcttttcc

SEQ ID NO: 5456956 - DNA, 25 bp, Homo sapien
tagcaaccctgatctaagaggtgtt

SEQ ID NO: 5456957 - DNA, 25 bp, Homo sapien
cagtcttaatcgatcctctacccgg

SEQ ID NO: 5456958 - DNA, 25 bp, Homo sapien
caagaacttttcgaaatggaatatc

SEQ ID NO: 5456959 - DNA, 25 bp, Homo sapien
tcaaagaaggaatcgtccgagctat

SEQ ID NO: 5456960 - DNA, 25 bp, Homo sapien
gctgcccagaatggctccaaaacta

SEQ ID NO: 5456961 - DNA, 25 bp, Homo sapien
taccagacccctgagacggtttcat

SEQ ID NO: 5456962 - DNA, 25 bp, Homo sapien
tcatatagataggtaagtgtctaag

SEQ ID NO: 5456963 - DNA, 25 bp, Homo sapien
taaaaagatggctgtagggccaggc

SEQ ID NO: 5456964 - DNA, 25 bp, Homo sapien
gggcagaggaacctgatcataccat

SEQ ID NO: 5456965 - DNA, 25 bp, Homo sapien
aaggaaggtcaatcgcttgggccca

SEQ ID NO: 5456966 - DNA, 25 bp, Homo sapien
tgtcaatagacaagaagctgttatc

SEQ ID NO: 5456967 - DNA, 25 bp, Homo sapien
ggtactttgtcaatagacaagaagc

SEQ ID NO: 5456968 - DNA, 25 bp, Homo sapien
ctccactgggtcgaagcaccacatt

SEQ ID NO: 5456969 - DNA, 25 bp, Homo sapien
cagagttaacattaggcggctttgt

SEQ ID NO: 5456970 - DNA, 25 bp, Homo sapien
tttccactttgtaatcccagtctgc

SEQ ID NO: 5456971 - DNA, 25 bp, Homo sapien
tattgtagtgaactactaggctgac

SEQ ID NO: 5456972 - DNA, 25 bp, Homo sapien
acttcgaattctgataggaccatgt

SEQ ID NO: 5456973 - DNA, 25 bp, Homo sapien
aaatatccttggaattcctccagta

SEQ ID NO: 5456974 - DNA, 25 bp, Homo sapien
caaaaatatacctttacctggcagg

SEQ ID NO: 5456975 - DNA, 25 bp, Homo sapien
gcaaaaatatacctttacctggcag

SEQ ID NO: 5456976 - DNA, 25 bp, Homo sapien
tagttggaggtctctggttactgta

SEQ ID NO: 5456977 - DNA, 25 bp, Homo sapien
gcccctagttggaggtctctggtta

SEQ ID NO: 5456978 - DNA, 25 bp, Homo sapien
tctctggttactgtatggcaaataa

SEQ ID NO: 5456979 - DNA, 25 bp, Homo sapien
gaggtctctggttactgtatggcaa

SEQ ID NO: 5456980 - DNA, 25 bp, Homo sapien
taccgaaaaaccctatgtaatagca

SEQ ID NO: 5456981 - DNA, 25 bp, Homo sapien
gaaaaaccctatgtaatagcaattc

SEQ ID NO: 5456982 - DNA, 25 bp, Homo sapien
ccgaaaaaccctatgtaatagcaat

SEQ ID NO: 5456983 - DNA, 25 bp, Homo sapien
aaaaccctatgtaatagcaattcac

SEQ ID NO: 5456984 - DNA, 25 bp, Homo sapien
agttctccggaagccatcaactcag

SEQ ID NO: 5456985 - DNA, 25 bp, Homo sapien
tattctgcagctatgccagttctcc

SEQ ID NO: 5456986 - DNA, 25 bp, Homo sapien
aaaggcaaagcactcttcttgggac

SEQ ID NO: 5456987 - DNA, 25 bp, Homo sapien
tgggacactactcatattctgcagc

SEQ ID NO: 5456988 - DNA, 25 bp, Homo sapien
cccctagtcagggagagcggctgat

SEQ ID NO: 5456989 - DNA, 25 bp, Homo sapien
gacagacccgcggaaagcacggagc

SEQ ID NO: 5456990 - DNA, 25 bp, Homo sapien
tgatggcgggaactgtgaccacacg

SEQ ID NO: 5456991 - DNA, 25 bp, Homo sapien
acccaaaggagggaggccgctagct

SEQ ID NO: 5456992 - DNA, 25 bp, Homo sapien
cattgatttattgcgctgaccaaca

SEQ ID NO: 5456993 - DNA, 25 bp, Homo sapien
tcccggtgtcgggtccctagtctga

SEQ ID NO: 5456994 - DNA, 25 bp, Homo sapien
acgcccgtagcaggccattcattga

SEQ ID NO: 5456995 - DNA, 25 bp, Homo sapien
ttccatggtcaatctgacgcggccc

SEQ ID NO: 5456996 - DNA, 25 bp, Homo sapien
aatgctttgctggagctaagtaaga

SEQ ID NO: 5456997 - DNA, 25 bp, Homo sapien
gctaagtaagaagcgagaatctgtt

SEQ ID NO: 5456998 - DNA, 25 bp, Homo sapien
gctgtccagtcctgagactagggaa

SEQ ID NO: 5456999 - DNA, 25 bp, Homo sapien
cagtggatcaatgagctgtccagtc

SEQ ID NO: 5457000 - DNA, 25 bp, Homo sapien
tgtgtattatcttcgcacaggggcc

SEQ ID NO: 5457001 - DNA, 25 bp, Homo sapien
tattatcttcgcacaggggccacac

SEQ ID NO: 5457002 - DNA, 25 bp, Homo sapien
gaatttgtgtattatcttcgcacag

SEQ ID NO: 5457003 - DNA, 25 bp, Homo sapien
catgaatttgtgtattatcttcgca

SEQ ID NO: 5457004 - DNA, 25 bp, Homo sapien
ctgccttctgccgtagtactaggag

SEQ ID NO: 5457005 - DNA, 25 bp, Homo sapien
cacagccatgataatggcacactat

SEQ ID NO: 5457006 - DNA, 25 bp, Homo sapien
gccgtagtactaggagtacaagcat

SEQ ID NO: 5457007 - DNA, 25 bp, Homo sapien
ccatgataatggcacactatagcct

SEQ ID NO: 5457008 - DNA, 25 bp, Homo sapien
gataatactgctaccatagttttgt

SEQ ID NO: 5457009 - DNA, 25 bp, Homo sapien
cactgctcatctcttattaaggttt

SEQ ID NO: 5457010 - DNA, 25 bp, Homo sapien
ttctaacatgagtattttgacagta

SEQ ID NO: 5457011 - DNA, 25 bp, Homo sapien
cataagtttgatgatatccttgtta

SEQ ID NO: 5457012 - DNA, 25 bp, Homo sapien
gcaaaactttgtcgactggcactgt

SEQ ID NO: 5457013 - DNA, 25 bp, Homo sapien
gaaacgctggcttgcacaactggtg

SEQ ID NO: 5457014 - DNA, 25 bp, Homo sapien
gggtgtcaacaccagcaaatgctgt

SEQ ID NO: 5457015 - DNA, 25 bp, Homo sapien
caccgactgggaatagacaacctca

SEQ ID NO: 5457016 - DNA, 25 bp, Homo sapien
ctatgggaattacagggttgccgct

SEQ ID NO: 5457017 - DNA, 25 bp, Homo sapien
tgaatctgcaacctagtgtaaactg

SEQ ID NO: 5457018 - DNA, 25 bp, Homo sapien
caactctggagagggaccaagtctt

SEQ ID NO: 5457019 - DNA, 25 bp, Homo sapien
gactttcacaaagagagccggactt

SEQ ID NO: 5457020 - DNA, 25 bp, Homo sapien
agaacttcactcctggccatattgg

SEQ ID NO: 5457021 - DNA, 25 bp, Homo sapien
gaacttcactcctggccatattggc

SEQ ID NO: 5457022 - DNA, 25 bp, Homo sapien
acttcactcctggccatattggcca

SEQ ID NO: 5457023 - DNA, 25 bp, Homo sapien
tctcttctcattgcacctgcatcag

SEQ ID NO: 5457024 - DNA, 25 bp, Homo sapien
tatcagatgtcatcctctgtgtttt

SEQ ID NO: 5457025 - DNA, 25 bp, Homo sapien
tgcacctgcatcagctgtgggcatc

SEQ ID NO: 5457026 - DNA, 25 bp, Homo sapien
agtgccctcactcccaaaccctttg

SEQ ID NO: 5457027 - DNA, 25 bp, Homo sapien
cattgactaaacgtgctgaggtgca

SEQ ID NO: 5457028 - DNA, 25 bp, Homo sapien
cttgctctggaactcattgaccgct

SEQ ID NO: 5457029 - DNA, 25 bp, Homo sapien
caagcagccatctgcctgagagaag

SEQ ID NO: 5457030 - DNA, 25 bp, Homo sapien
tcgtacagttctataaggcattgac

SEQ ID NO: 5457031 - DNA, 25 bp, Homo sapien
caggatataacatagagcaaacaca

SEQ ID NO: 5457032 - DNA, 25 bp, Homo sapien
gaggttgacactgatcccagcagta

SEQ ID NO: 5457033 - DNA, 25 bp, Homo sapien
gcccagaggttgacactgatcccag

SEQ ID NO: 5457034 - DNA, 25 bp, Homo sapien
gtcacccaggatataacatagagca

SEQ ID NO: 5457035 - DNA, 25 bp, Homo sapien
ggatattaccagcaggtaccgtgca

SEQ ID NO: 5457036 - DNA, 25 bp, Homo sapien
tgatgggcatttccgccagaatggc

SEQ ID NO: 5457037 - DNA, 25 bp, Homo sapien
tgttgtcagattgtggcccaggctc

SEQ ID NO: 5457038 - DNA, 25 bp, Homo sapien
ggagcactaccacttctacgagata

SEQ ID NO: 5457039 - DNA, 25 bp, Homo sapien
tagaggccggatagcctattaacag

SEQ ID NO: 5457040 - DNA, 25 bp, Homo sapien
cttcctaattgggtaatgttgggca

SEQ ID NO: 5457041 - DNA, 25 bp, Homo sapien
ctggctgggagcgatagcttacacc

SEQ ID NO: 5457042 - DNA, 25 bp, Homo sapien
tggctaggcctgaccggaatgtaga

SEQ ID NO: 5457043 - DNA, 25 bp, Homo sapien
tattggtcagtacaccctgccttgg

SEQ ID NO: 5457044 - DNA, 25 bp, Homo sapien
gacttgaccccaggactgtactacg

SEQ ID NO: 5457045 - DNA, 25 bp, Homo sapien
ggtgcctgaacttgccatgctgcgt

SEQ ID NO: 5457046 - DNA, 25 bp, Homo sapien
taaatcaaggctcaaggcttcccca

SEQ ID NO: 5457047 - DNA, 25 bp, Homo sapien
gctttatagagcattaggcacaaca

SEQ ID NO: 5457048 - DNA, 25 bp, Homo sapien
taaaatccagatcttatagccaggg

SEQ ID NO: 5457049 - DNA, 25 bp, Homo sapien
gaaatcaacgttatagtccatgtcc

SEQ ID NO: 5457050 - DNA, 25 bp, Homo sapien
tcaaagtactatagccagagtccca

SEQ ID NO: 5457051 - DNA, 25 bp, Homo sapien
ggtttggcctcactgtgcttgcgaa

SEQ ID NO: 5457052 - DNA, 25 bp, Homo sapien
gaaagcccgtgcttctcgatgccgg

SEQ ID NO: 5457053 - DNA, 25 bp, Homo sapien
tcagcccggttggtgcagtactcac

SEQ ID NO: 5457054 - DNA, 25 bp, Homo sapien
ctgcgtacgtgcttgaccacctgga

SEQ ID NO: 5457055 - DNA, 25 bp, Homo sapien
gtatgcttggtcatgtggtatttca

SEQ ID NO: 5457056 - DNA, 25 bp, Homo sapien
cgttcctccttgtggatccgcatgt

SEQ ID NO: 5457057 - DNA, 25 bp, Homo sapien
cactcagggcacaggtacttccgtt

SEQ ID NO: 5457058 - DNA, 25 bp, Homo sapien
gctggttgacccacttgcacttgta

SEQ ID NO: 5457059 - DNA, 25 bp, Homo sapien
gcgccacaatgtccagctaattaaa

SEQ ID NO: 5457060 - DNA, 25 bp, Homo sapien
ttgtaaagacagagtctccatatgt

SEQ ID NO: 5457061 - DNA, 25 bp, Homo sapien
acagagtctccatatgttgccctgg

SEQ ID NO: 5457062 - DNA, 25 bp, Homo sapien
cacctcacctggccgataatttttt

SEQ ID NO: 5457063 - DNA, 25 bp, Homo sapien
gatctagtaccagctgatggcggca

SEQ ID NO: 5457064 - DNA, 25 bp, Homo sapien
acgggtgtgtcctcgtaagctggca

SEQ ID NO: 5457065 - DNA, 25 bp, Homo sapien
caagcgcagtttcgagttggtacca

SEQ ID NO: 5457066 - DNA, 25 bp, Homo sapien
taccgtctggtggtcgaaaagtcac

SEQ ID NO: 5457067 - DNA, 25 bp, Homo sapien
cccggatctggtgagtcctcagagc

SEQ ID NO: 5457068 - DNA, 25 bp, Homo sapien
caggagttgcagtgaaacttgccct

SEQ ID NO: 5457069 - DNA, 25 bp, Homo sapien
cagccttcagccacgtgagaggtaa

SEQ ID NO: 5457070 - DNA, 25 bp, Homo sapien
agcagagtccccattgctcaacggg

SEQ ID NO: 5457071 - DNA, 25 bp, Homo sapien
catcttttggaagcagtagctctgc

SEQ ID NO: 5457072 - DNA, 25 bp, Homo sapien
ggagggactgggtcaaagcagtgct

SEQ ID NO: 5457073 - DNA, 25 bp, Homo sapien
aagcagtgcttcttaggggcctctg

SEQ ID NO: 5457074 - DNA, 25 bp, Homo sapien
gactgggtcaaggtggtgcttctta

SEQ ID NO: 5457075 - DNA, 25 bp, Homo sapien
tcctggcttgcatagcggagctgcc

SEQ ID NO: 5457076 - DNA, 25 bp, Homo sapien
catgggccttgcgtttatggaacaa

SEQ ID NO: 5457077 - DNA, 25 bp, Homo sapien
gcttgtggcggctctggtaactgca

SEQ ID NO: 5457078 - DNA, 25 bp, Homo sapien
tctcccggcgagtgataaaagggca

SEQ ID NO: 5457079 - DNA, 25 bp, Homo sapien
gcttccacttggtgacatagccaca

SEQ ID NO: 5457080 - DNA, 25 bp, Homo sapien
cttggataggtagctcacgtctcgg

SEQ ID NO: 5457081 - DNA, 25 bp, Homo sapien
cacgtctcggcatgtgaagtcacac

SEQ ID NO: 5457082 - DNA, 25 bp, Homo sapien
tgttttcgcatgtgcacacggaggt

SEQ ID NO: 5457083 - DNA, 25 bp, Homo sapien
taaagcagcgcttacactctggaca

SEQ ID NO: 5457084 - DNA, 25 bp, Homo sapien
catgtggcggttgagtgcattcctc

SEQ ID NO: 5457085 - DNA, 25 bp, Homo sapien
tagtgactcttgtggtgggcctcca

SEQ ID NO: 5457086 - DNA, 25 bp, Homo sapien
tagaagcatgtgtcggatgagcacc

SEQ ID NO: 5457087 - DNA, 25 bp, Homo sapien
atggcagggtttcaacaatccattc

SEQ ID NO: 5457088 - DNA, 25 bp, Homo sapien
cccaccaccaagggcttcaagcctc

SEQ ID NO: 5457089 - DNA, 25 bp, Homo sapien
tggcagggtttcaacaatccattct

SEQ ID NO: 5457090 - DNA, 25 bp, Homo sapien
caatggcagggtttcaacaatccat

SEQ ID NO: 5457091 - DNA, 25 bp, Homo sapien
tgcttcctgtgaaggttctctctct

SEQ ID NO: 5457092 - DNA, 25 bp, Homo sapien
cagccttttgggagtccttctgggt

SEQ ID NO: 5457093 - DNA, 25 bp, Homo sapien
tggcctttatccacagccttttggg

SEQ ID NO: 5457094 - DNA, 25 bp, Homo sapien
aggcaagggtgtacctgcttcctgt

SEQ ID NO: 5457095 - DNA, 25 bp, Homo sapien
ggagatacataaaacttgataaagt

SEQ ID NO: 5457096 - DNA, 25 bp, Homo sapien
tggagatacataaaacttgataaag

SEQ ID NO: 5457097 - DNA, 25 bp, Homo sapien
ctggagatacataaaacttgataaa

SEQ ID NO: 5457098 - DNA, 25 bp, Homo sapien
gttgtgaaatggatcattagagaat

SEQ ID NO: 5457099 - DNA, 25 bp, Homo sapien
agaaagttgtgaaatggatcattag

SEQ ID NO: 5457100 - DNA, 25 bp, Homo sapien
ggccatagccaatgatggtcatttt

SEQ ID NO: 5457101 - DNA, 25 bp, Homo sapien
tgcccaatccccagttgctctaaag

SEQ ID NO: 5457102 - DNA, 25 bp, Homo sapien
tgatgctgccggaagagtttgacgt

SEQ ID NO: 5457103 - DNA, 25 bp, Homo sapien
tgaacggcagaaagttctccctgtg

SEQ ID NO: 5457104 - DNA, 25 bp, Homo sapien
ctcctgggatggaaggccctgaacg

SEQ ID NO: 5457105 - DNA, 25 bp, Homo sapien
agcaccatggctccgctgatgctgc

SEQ ID NO: 5457106 - DNA, 25 bp, Homo sapien
agacccttgcgatcttcagcagaga

SEQ ID NO: 5457107 - DNA, 25 bp, Homo sapien
gaactgctctgtgagtctgcctcag

SEQ ID NO: 5457108 - DNA, 25 bp, Homo sapien
gcagccccggaaagaacagggcaca

SEQ ID NO: 5457109 - DNA, 25 bp, Homo sapien
ggtaatgcgcctgccggtgcagctc

SEQ ID NO: 5457110 - DNA, 25 bp, Homo sapien
aggagtgccccggtgaatcttgaag

SEQ ID NO: 5457111 - DNA, 25 bp, Homo sapien
agaaggtgtcaggagtgccccggtg

SEQ ID NO: 5457112 - DNA, 25 bp, Homo sapien
tgccccggtgaatcttgaagtggct

SEQ ID NO: 5457113 - DNA, 25 bp, Homo sapien
ccggtgaatcttgaagtggctcttc

SEQ ID NO: 5457114 - DNA, 25 bp, Homo sapien
catggggggctagagaggccctgca

SEQ ID NO: 5457115 - DNA, 25 bp, Homo sapien
catgatagggggctaactggcgggc

SEQ ID NO: 5457116 - DNA, 25 bp, Homo sapien
agggggctaactggcgggctctggc

SEQ ID NO: 5457117 - DNA, 25 bp, Homo sapien
gggaggcagctctacagagcatggg

SEQ ID NO: 5457118 - DNA, 25 bp, Homo sapien
cacagaagtacacctccaccacctt

SEQ ID NO: 5457119 - DNA, 25 bp, Homo sapien
tgcgaagctctgttcacagcgctca

SEQ ID NO: 5457120 - DNA, 25 bp, Homo sapien
gctcacagaagtacacctccaccac

SEQ ID NO: 5457121 - DNA, 25 bp, Homo sapien
gctctgcgaagctctgttcacagcg

SEQ ID NO: 5457122 - DNA, 25 bp, Homo sapien
cagatggaacaagactcataggagt

SEQ ID NO: 5457123 - DNA, 25 bp, Homo sapien
tagttactagtagaaaatgtaggtg

SEQ ID NO: 5457124 - DNA, 25 bp, Homo sapien
aggcatagaatcagatggaacaaga

SEQ ID NO: 5457125 - DNA, 25 bp, Homo sapien
cataggagttagttactagtagaaa

SEQ ID NO: 5457126 - DNA, 25 bp, Homo sapien
aggcttaataaacgctctcatttgg

SEQ ID NO: 5457127 - DNA, 25 bp, Homo sapien
gccctatgacaacaaggtcctgaga

SEQ ID NO: 5457128 - DNA, 25 bp, Homo sapien
tgacaaactagggataatatctgca

SEQ ID NO: 5457129 - DNA, 25 bp, Homo sapien
gtagagccatgactcaaggccaggt

SEQ ID NO: 5457130 - DNA, 25 bp, Homo sapien
tagaaggctgtgcaccacttcgcca

SEQ ID NO: 5457131 - DNA, 25 bp, Homo sapien
ggcagggaaataccagatcacttct

SEQ ID NO: 5457132 - DNA, 25 bp, Homo sapien
ggtttttgcttaatccctggctgca

SEQ ID NO: 5457133 - DNA, 25 bp, Homo sapien
ctgcctagcacacatgaagcccttg

SEQ ID NO: 5457134 - DNA, 25 bp, Homo sapien
gctactgtctccacaatgatctcca

SEQ ID NO: 5457135 - DNA, 25 bp, Homo sapien
ttcagttgctgtggcctctaccagc

SEQ ID NO: 5457136 - DNA, 25 bp, Homo sapien
cctggctcagtaggtataggtgcag

SEQ ID NO: 5457137 - DNA, 25 bp, Homo sapien
cctggtccctcttcagttgctgtgg

SEQ ID NO: 5457138 - DNA, 25 bp, Homo sapien
ctgtgagtccaaaagggggtctgtc

SEQ ID NO: 5457139 - DNA, 25 bp, Homo sapien
caccgacttgtgtgttttggcttct

SEQ ID NO: 5457140 - DNA, 25 bp, Homo sapien
ccgacttgtgtgttttggcttctta

SEQ ID NO: 5457141 - DNA, 25 bp, Homo sapien
caccaccgacttgtgtgttttggct

SEQ ID NO: 5457142 - DNA, 25 bp, Homo sapien
ccaccgacttgtgtgttttggcttc

SEQ ID NO: 5457143 - DNA, 25 bp, Homo sapien
tatcgctgttctggggaatcttcaa

SEQ ID NO: 5457144 - DNA, 25 bp, Homo sapien
agcttgaccatacatggcctccggg

SEQ ID NO: 5457145 - DNA, 25 bp, Homo sapien
aatcttcaagcttgaccatacatgg

SEQ ID NO: 5457146 - DNA, 25 bp, Homo sapien
gctgagccgtcaagattaagaacct

SEQ ID NO: 5457147 - DNA, 25 bp, Homo sapien
aagaaatacgcttatcttccgggca

SEQ ID NO: 5457148 - DNA, 25 bp, Homo sapien
gcagggtgaggtaggagacaggtgg

SEQ ID NO: 5457149 - DNA, 25 bp, Homo sapien
ccagagaagaaatacgcttatcttc

SEQ ID NO: 5457150 - DNA, 25 bp, Homo sapien
gggtgaggtaggagacaggtgggca

SEQ ID NO: 5457151 - DNA, 25 bp, Homo sapien
tcttggacagacacagtcgcttcgc

SEQ ID NO: 5457152 - DNA, 25 bp, Homo sapien
agacacagtcgcttcgcttctctgg

SEQ ID NO: 5457153 - DNA, 25 bp, Homo sapien
tggacagacacagtcgcttcgcttc

SEQ ID NO: 5457154 - DNA, 25 bp, Homo sapien
gacagacacagtcgcttcgcttctc

SEQ ID NO: 5457155 - DNA, 25 bp, Homo sapien
agccagcgaactggaaaggcggttt

SEQ ID NO: 5457156 - DNA, 25 bp, Homo sapien
tgtccacatcgtcgggcaggagctg

SEQ ID NO: 5457157 - DNA, 25 bp, Homo sapien
acagtgtccacatcgtcgggcagga

SEQ ID NO: 5457158 - DNA, 25 bp, Homo sapien
caggagctggatcataagagccagc

SEQ ID NO: 5457159 - DNA, 25 bp, Homo sapien
gggtccagaaccgtgacgcgactgc

SEQ ID NO: 5457160 - DNA, 25 bp, Homo sapien
tctgggtgctcccttcagtacctcc

SEQ ID NO: 5457161 - DNA, 25 bp, Homo sapien
gagcatcgtcatgattttgtcctga

SEQ ID NO: 5457162 - DNA, 25 bp, Homo sapien
ttcagtacctccttccgagagttcc

SEQ ID NO: 5457163 - DNA, 25 bp, Homo sapien
gacccagagccggcgggagccgcat

SEQ ID NO: 5457164 - DNA, 25 bp, Homo sapien
agacccagagccggcgggagccgca

SEQ ID NO: 5457165 - DNA, 25 bp, Homo sapien
ccagacccagagccggcgggagccg

SEQ ID NO: 5457166 - DNA, 25 bp, Homo sapien
ctccagacccagagccggcgggagc

SEQ ID NO: 5457167 - DNA, 25 bp, Homo sapien
gctcagccgcctctaggatattggg

SEQ ID NO: 5457168 - DNA, 25 bp, Homo sapien
gccggggtactctatgttttgtctc

SEQ ID NO: 5457169 - DNA, 25 bp, Homo sapien
cgctttgtgcgaccgcctccggctc

SEQ ID NO: 5457170 - DNA, 25 bp, Homo sapien
ccggctgccggggtactctatgttt

SEQ ID NO: 5457171 - DNA, 25 bp, Homo sapien
gagaagcaccatcgagagctctggg

SEQ ID NO: 5457172 - DNA, 25 bp, Homo sapien
agccggagaagcaccatcgagagct

SEQ ID NO: 5457173 - DNA, 25 bp, Homo sapien
ccggagaagcaccatcgagagctct

SEQ ID NO: 5457174 - DNA, 25 bp, Homo sapien
ctgaagccggagaagcaccatcgag

SEQ ID NO: 5457175 - DNA, 25 bp, Homo sapien
tgatcgttcttattcaggtatcggg

SEQ ID NO: 5457176 - DNA, 25 bp, Homo sapien
tgcagatgatagacttgcagacggg

SEQ ID NO: 5457177 - DNA, 25 bp, Homo sapien
gaacgaagtcgagagatgcagatga

SEQ ID NO: 5457178 - DNA, 25 bp, Homo sapien
ggcaggctttctagggacattgcag

SEQ ID NO: 5457179 - DNA, 25 bp, Homo sapien
ggcgctgctaagcaaagaaagccaa

SEQ ID NO: 5457180 - DNA, 25 bp, Homo sapien
aggcgctgctaagcaaagaaagcca

SEQ ID NO: 5457181 - DNA, 25 bp, Homo sapien
gcgctgctaagcaaagaaagccaaa

SEQ ID NO: 5457182 - DNA, 25 bp, Homo sapien
caaatatctttattgcctccctccc

SEQ ID NO: 5457183 - DNA, 25 bp, Homo sapien
tgcctccctcccatccccaattccc

SEQ ID NO: 5457184 - DNA, 25 bp, Homo sapien
ctccctcccatccccaattccctgt

SEQ ID NO: 5457185 - DNA, 25 bp, Homo sapien
aatatctttattgcctccctcccat

SEQ ID NO: 5457186 - DNA, 25 bp, Homo sapien
tcacatatgtgctgggtcgccacag

SEQ ID NO: 5457187 - DNA, 25 bp, Homo sapien
tagcatagctttctgggtttcgccc

SEQ ID NO: 5457188 - DNA, 25 bp, Homo sapien
ttagagcgctcccagcgaacacagt

SEQ ID NO: 5457189 - DNA, 25 bp, Homo sapien
gatcctttggagacatctacagctg

SEQ ID NO: 5457190 - DNA, 25 bp, Homo sapien
tgctgaaggctgatgaagtatcggt

SEQ ID NO: 5457191 - DNA, 25 bp, Homo sapien
gttcttcttgctggcgcaagctctc

SEQ ID NO: 5457192 - DNA, 25 bp, Homo sapien
gtagagccgcttgcgttcttcttgc

SEQ ID NO: 5457193 - DNA, 25 bp, Homo sapien
tatcggtttcgctcagcctcaaggt

SEQ ID NO: 5457194 - DNA, 25 bp, Homo sapien
gatcatacacgaggggctctctgca

SEQ ID NO: 5457195 - DNA, 25 bp, Homo sapien
aggcaagatcatacacgaggggctc

SEQ ID NO: 5457196 - DNA, 25 bp, Homo sapien
caagatcatacacgaggggctctct

SEQ ID NO: 5457197 - DNA, 25 bp, Homo sapien
acactggacactgcacaccgactgc

SEQ ID NO: 5457198 - DNA, 25 bp, Homo sapien
ctcttgctccatgtgctggatgtac

SEQ ID NO: 5457199 - DNA, 25 bp, Homo sapien
gcatgctgccgttcctgttcctgct

SEQ ID NO: 5457200 - DNA, 25 bp, Homo sapien
cagctcttgctccatgtgctggatg

SEQ ID NO: 5457201 - DNA, 25 bp, Homo sapien
gttgtagcatgctgccgttcctgtt

SEQ ID NO: 5457202 - DNA, 25 bp, Homo sapien
cagtggaagtagtggtaacagggtg

SEQ ID NO: 5457203 - DNA, 25 bp, Homo sapien
agtggaagtagtggtaacagggtgt

SEQ ID NO: 5457204 - DNA, 25 bp, Homo sapien
ctagagggaaggcagatgtagggca

SEQ ID NO: 5457205 - DNA, 25 bp, Homo sapien
aaccatagaggcagatgacacactg

SEQ ID NO: 5457206 - DNA, 25 bp, Homo sapien
ccatgagggatgttgttatctgtga

SEQ ID NO: 5457207 - DNA, 25 bp, Homo sapien
ctggaaaccatagaggcagatgaca

SEQ ID NO: 5457208 - DNA, 25 bp, Homo sapien
ctggccatgagggatgttgttatct

SEQ ID NO: 5457209 - DNA, 25 bp, Homo sapien
tgagttcatacagcatggcagtgcc

SEQ ID NO: 5457210 - DNA, 25 bp, Homo sapien
aatgagttcatacagcatggcagtg

SEQ ID NO: 5457211 - DNA, 25 bp, Homo sapien
caatgagttcatacagcatggcagt

SEQ ID NO: 5457212 - DNA, 25 bp, Homo sapien
ctcaatgagttcatacagcatggca

SEQ ID NO: 5457213 - DNA, 25 bp, Homo sapien
aaagctgtagctgagttttccctgt

SEQ ID NO: 5457214 - DNA, 25 bp, Homo sapien
ccctgttctgacaggttcaacttac

SEQ ID NO: 5457215 - DNA, 25 bp, Homo sapien
ttttccctgttctgacaggttcaac

SEQ ID NO: 5457216 - DNA, 25 bp, Homo sapien
cgggcaaagctgtagctgagttttc

SEQ ID NO: 5457217 - DNA, 25 bp, Homo sapien
gatagagatctgtggcacctcatgg

SEQ ID NO: 5457218 - DNA, 25 bp, Homo sapien
catctgaaagtcctcggggatttcg

SEQ ID NO: 5457219 - DNA, 25 bp, Homo sapien
tcctcggggatttcggatagagatc

SEQ ID NO: 5457220 - DNA, 25 bp, Homo sapien
ggatttcggatagagatctgtggca

SEQ ID NO: 5457221 - DNA, 25 bp, Homo sapien
aataacaagttactgctgaagcggt

SEQ ID NO: 5457222 - DNA, 25 bp, Homo sapien
aaataacaagttactgctgaagcgg

SEQ ID NO: 5457223 - DNA, 25 bp, Homo sapien
ataacaagttactgctgaagcggtc

SEQ ID NO: 5457224 - DNA, 25 bp, Homo sapien
cctgaagcaccagagtgaagcagac

SEQ ID NO: 5457225 - DNA, 25 bp, Homo sapien
ctgaagcaccagagtgaagcagaca

SEQ ID NO: 5457226 - DNA, 25 bp, Homo sapien
ggatgcaaagtgatgtagatctccc

SEQ ID NO: 5457227 - DNA, 25 bp, Homo sapien
tctgcagtggcaggatgcaaagtga

SEQ ID NO: 5457228 - DNA, 25 bp, Homo sapien
cagtggcaggatgcaaagtgatgta

SEQ ID NO: 5457229 - DNA, 25 bp, Homo sapien
tgatgtagatctcccatggtgaagt

SEQ ID NO: 5457230 - DNA, 25 bp, Homo sapien
caagtggacacgcagatgtgactgg

SEQ ID NO: 5457231 - DNA, 25 bp, Homo sapien
tggatcaagtggacacgcagatgtg

SEQ ID NO: 5457232 - DNA, 25 bp, Homo sapien
ggtggatcaagtggacacgcagatg

SEQ ID NO: 5457233 - DNA, 25 bp, Homo sapien
gatcaagtggacacgcagatgtgac

SEQ ID NO: 5457234 - DNA, 25 bp, Homo sapien
aatgtcttaagacccaaattcagca

SEQ ID NO: 5457235 - DNA, 25 bp, Homo sapien
gaaatattatctctgaatcaaggct

SEQ ID NO: 5457236 - DNA, 25 bp, Homo sapien
gcaaaggaagtacacattggactct

SEQ ID NO: 5457237 - DNA, 25 bp, Homo sapien
gattaaaggaatagcttttgtctac

SEQ ID NO: 5457238 - DNA, 25 bp, Homo sapien
catctagatagatggactccaatac

SEQ ID NO: 5457239 - DNA, 25 bp, Homo sapien
ttcctttaatcacctgtagttcatc

SEQ ID NO: 5457240 - DNA, 25 bp, Homo sapien
ctgtagttcatctagatagatggac

SEQ ID NO: 5457241 - DNA, 25 bp, Homo sapien
gatagatggactccaatacttcaac

SEQ ID NO: 5457242 - DNA, 25 bp, Homo sapien
taacaggtaccaatcacttacaagc

SEQ ID NO: 5457243 - DNA, 25 bp, Homo sapien
tatgcaatctgggacgtgacctctc

SEQ ID NO: 5457244 - DNA, 25 bp, Homo sapien
cagttttaacaccagtcaccctaag

SEQ ID NO: 5457245 - DNA, 25 bp, Homo sapien
ccagcagcctcggagttagttaaca

SEQ ID NO: 5457246 - DNA, 25 bp, Homo sapien
aaggctgaggaaagcgtcggcggaa

SEQ ID NO: 5457247 - DNA, 25 bp, Homo sapien
tcggcggaaaaaggctgatccaagg

SEQ ID NO: 5457248 - DNA, 25 bp, Homo sapien
agggggccggaactggagggcactg

SEQ ID NO: 5457249 - DNA, 25 bp, Homo sapien
aaagcgtcggcggaaaaaggctgat

SEQ ID NO: 5457250 - DNA, 25 bp, Homo sapien
cagctgcagacgcagacgccgccat

SEQ ID NO: 5457251 - DNA, 25 bp, Homo sapien
tcccctgcagctgcagacgcagacg

SEQ ID NO: 5457252 - DNA, 25 bp, Homo sapien
tgcagctgcagacgcagacgccgcc

SEQ ID NO: 5457253 - DNA, 25 bp, Homo sapien
cctgcagctgcagacgcagacgccg

SEQ ID NO: 5457254 - DNA, 25 bp, Homo sapien
gcccatgtgtggtccgccgtccatt

SEQ ID NO: 5457255 - DNA, 25 bp, Homo sapien
gccctgaggcagttcggatgtgtcc

SEQ ID NO: 5457256 - DNA, 25 bp, Homo sapien
cagccggaaccggaaatgcccttag

SEQ ID NO: 5457257 - DNA, 25 bp, Homo sapien
tagcgtcgtttctaggcaaccgcag

SEQ ID NO: 5457258 - DNA, 25 bp, Homo sapien
tataagtcaggcaacgtatgcaggc

SEQ ID NO: 5457259 - DNA, 25 bp, Homo sapien
cagggaatccgtcccttggcctgag

SEQ ID NO: 5457260 - DNA, 25 bp, Homo sapien
gcgggtggagaagaattataagtca

SEQ ID NO: 5457261 - DNA, 25 bp, Homo sapien
cagttctagcgagtaaaattgtaag

SEQ ID NO: 5457262 - DNA, 25 bp, Homo sapien
gccctcatggatcccacctctctca

SEQ ID NO: 5457263 - DNA, 25 bp, Homo sapien
cctggccctcatggatcccacctct

SEQ ID NO: 5457264 - DNA, 25 bp, Homo sapien
acgcctggccctcatggatcccacc

SEQ ID NO: 5457265 - DNA, 25 bp, Homo sapien
tggccctcatggatcccacctctct

SEQ ID NO: 5457266 - DNA, 25 bp, Homo sapien
tttgccttagacgtgctggccccag

SEQ ID NO: 5457267 - DNA, 25 bp, Homo sapien
gatgcaggatgttttcaaccagtaa

SEQ ID NO: 5457268 - DNA, 25 bp, Homo sapien
taatgtgcctttaactctagggacc

SEQ ID NO: 5457269 - DNA, 25 bp, Homo sapien
tagaaaagagataagctgccaactc

SEQ ID NO: 5457270 - DNA, 25 bp, Homo sapien
gaagtggaagcagccttgtggtact

SEQ ID NO: 5457271 - DNA, 25 bp, Homo sapien
tataggatatccagctggtggcctc

SEQ ID NO: 5457272 - DNA, 25 bp, Homo sapien
cctgtgccttgcaattggaatctga

SEQ ID NO: 5457273 - DNA, 25 bp, Homo sapien
cacattttgatgaccagaggtgaaa

SEQ ID NO: 5457274 - DNA, 25 bp, Homo sapien
gagaaagcagggtggtgctacacac

SEQ ID NO: 5457275 - DNA, 25 bp, Homo sapien
tatgggtagcatggctgcggaggcc

SEQ ID NO: 5457276 - DNA, 25 bp, Homo sapien
gaaacattcagttgtggcggaaggg

SEQ ID NO: 5457277 - DNA, 25 bp, Homo sapien
ctcaggaaacattcagttgtggcgg

SEQ ID NO: 5457278 - DNA, 25 bp, Homo sapien
ctggctgtgagcccataactggcct

SEQ ID NO: 5457279 - DNA, 25 bp, Homo sapien
ttatccccagaaacccagttcctca

SEQ ID NO: 5457280 - DNA, 25 bp, Homo sapien
gcccagcctttctacccagacgtta

SEQ ID NO: 5457281 - DNA, 25 bp, Homo sapien
gttacctgtgatcaagtgctctggg

SEQ ID NO: 5457282 - DNA, 25 bp, Homo sapien
ggcacctcatatctcagcagagaag

SEQ ID NO: 5457283 - DNA, 25 bp, Homo sapien
gcctggctggcacctcatatctcag

SEQ ID NO: 5457284 - DNA, 25 bp, Homo sapien
tgaagtggttgcattatagagatgg

SEQ ID NO: 5457285 - DNA, 25 bp, Homo sapien
tggtggccacgcagccttataaagc

SEQ ID NO: 5457286 - DNA, 25 bp, Homo sapien
gcgtgttaatattaccaaactatgg

SEQ ID NO: 5457287 - DNA, 25 bp, Homo sapien
cactggaaagcagcttggtagattc

SEQ ID NO: 5457288 - DNA, 25 bp, Homo sapien
catgtccttaacgtatgacctagca

SEQ ID NO: 5457289 - DNA, 25 bp, Homo sapien
gatactgagatattgagaaggtgct

SEQ ID NO: 5457290 - DNA, 25 bp, Homo sapien
caagcgaaaagttatttgagaggcc

SEQ ID NO: 5457291 - DNA, 25 bp, Homo sapien
gctccgaactgactccgggatcaat

SEQ ID NO: 5457292 - DNA, 25 bp, Homo sapien
ggatcaatccggaaggccattggga

SEQ ID NO: 5457293 - DNA, 25 bp, Homo sapien
tacgaaatctggtctcaacctgcag

SEQ ID NO: 5457294 - DNA, 25 bp, Homo sapien
tgttatcaaatctaagaattcattg

SEQ ID NO: 5457295 - DNA, 25 bp, Homo sapien
aattcctcatgcatttgttatcaaa

SEQ ID NO: 5457296 - DNA, 25 bp, Homo sapien
aaaaattcctcatgcatttgttatc

SEQ ID NO: 5457297 - DNA, 25 bp, Homo sapien
taatttttatgaagaactatttatc

SEQ ID NO: 5457298 - DNA, 25 bp, Homo sapien
atgttccagaactcactctatgcca

SEQ ID NO: 5457299 - DNA, 25 bp, Homo sapien
tgttccagaactcactctatgccac

SEQ ID NO: 5457300 - DNA, 25 bp, Homo sapien
cgtcagatccatcgggttaatgttc

SEQ ID NO: 5457301 - DNA, 25 bp, Homo sapien
gatccatcgggttaatgttccagaa

SEQ ID NO: 5457302 - DNA, 25 bp, Homo sapien
tgcagagctggagatgcagctactc

SEQ ID NO: 5457303 - DNA, 25 bp, Homo sapien
gagctggagatgcagctactcctcg

SEQ ID NO: 5457304 - DNA, 25 bp, Homo sapien
gctggagatgcagctactcctcgca

SEQ ID NO: 5457305 - DNA, 25 bp, Homo sapien
ggagatgcagctactcctcgcaagg

SEQ ID NO: 5457306 - DNA, 25 bp, Homo sapien
tatcgcattgctgtccttgggtaga

SEQ ID NO: 5457307 - DNA, 25 bp, Homo sapien
cagaagtacaaggtggtcctggccc

SEQ ID NO: 5457308 - DNA, 25 bp, Homo sapien
tgtcctggttcccaataagaaagtg

SEQ ID NO: 5457309 - DNA, 25 bp, Homo sapien
gcttgtcctagaggctccagctctg

SEQ ID NO: 5457310 - DNA, 25 bp, Homo sapien
caagttcaggtcaaatgactgcagc

SEQ ID NO: 5457311 - DNA, 25 bp, Homo sapien
tccctggagactaagaacatggctc

SEQ ID NO: 5457312 - DNA, 25 bp, Homo sapien
tcactgcgagagctaaggagttttc

SEQ ID NO: 5457313 - DNA, 25 bp, Homo sapien
tcagcagccttgaaatgacaaagcc

SEQ ID NO: 5457314 - DNA, 25 bp, Homo sapien
ctgaaggctgaagccataggtagcc

SEQ ID NO: 5457315 - DNA, 25 bp, Homo sapien
gaaaccgaggaatccagaagccctg

SEQ ID NO: 5457316 - DNA, 25 bp, Homo sapien
taatcctagtgcctctggttcaggg

SEQ ID NO: 5457317 - DNA, 25 bp, Homo sapien
tcagggacctccaagcttgactcag

SEQ ID NO: 5457318 - DNA, 25 bp, Homo sapien
agatgaaggctgagttctccagttc

SEQ ID NO: 5457319 - DNA, 25 bp, Homo sapien
gaaggctgagttctccagttccctt

SEQ ID NO: 5457320 - DNA, 25 bp, Homo sapien
gaatcatagctgaaccagcaaatgg

SEQ ID NO: 5457321 - DNA, 25 bp, Homo sapien
ctgaatcatagctgaaccagcaaat

SEQ ID NO: 5457322 - DNA, 25 bp, Homo sapien
aagagatgctgggtctcgtccacta

SEQ ID NO: 5457323 - DNA, 25 bp, Homo sapien
caccagtgcctgaaggatgtcggag

SEQ ID NO: 5457324 - DNA, 25 bp, Homo sapien
gagagggagaccacgcccaagagat

SEQ ID NO: 5457325 - DNA, 25 bp, Homo sapien
cgagggcatcgatgccagcagggct

SEQ ID NO: 5457326 - DNA, 25 bp, Homo sapien
aaaggactccctccagacatagtgt

SEQ ID NO: 5457327 - DNA, 25 bp, Homo sapien
tgtaggtttgctgggcagccaggtg

SEQ ID NO: 5457328 - DNA, 25 bp, Homo sapien
tgctcccgagcaatcctgtcgatca

SEQ ID NO: 5457329 - DNA, 25 bp, Homo sapien
ccccaagctctcgtggggctggcag

SEQ ID NO: 5457330 - DNA, 25 bp, Homo sapien
cgggaatagaggcccacgacctgac

SEQ ID NO: 5457331 - DNA, 25 bp, Homo sapien
aatcacatcaaagcgggaatagagg

SEQ ID NO: 5457332 - DNA, 25 bp, Homo sapien
atcacatcaaagcgggaatagaggc

SEQ ID NO: 5457333 - DNA, 25 bp, Homo sapien
gcccagcccgagcctctcatcctgg

SEQ ID NO: 5457334 - DNA, 25 bp, Homo sapien
agcccagcccgagcctctcatcctg

SEQ ID NO: 5457335 - DNA, 25 bp, Homo sapien
cattcgttgaccacaggcagtgcag

SEQ ID NO: 5457336 - DNA, 25 bp, Homo sapien
gtctcggaatgtgccgatgcccaaa

SEQ ID NO: 5457337 - DNA, 25 bp, Homo sapien
gacacacgccggtccacaaagatgt

SEQ ID NO: 5457338 - DNA, 25 bp, Homo sapien
gatgcccaaatcttggatagtgcgg

SEQ ID NO: 5457339 - DNA, 25 bp, Homo sapien
caggcgatggatccggttcttgatg

SEQ ID NO: 5457340 - DNA, 25 bp, Homo sapien
cctgacaccgggtcaagaacaggca

SEQ ID NO: 5457341 - DNA, 25 bp, Homo sapien
aggatgtggagtacgttgcctgaca

SEQ ID NO: 5457342 - DNA, 25 bp, Homo sapien
aacaggcaggcgatggatccggttc

SEQ ID NO: 5457343 - DNA, 25 bp, Homo sapien
ggagaccagaggcttgaagcagcct

SEQ ID NO: 5457344 - DNA, 25 bp, Homo sapien
gagaccagaggcttgaagcagcctt

SEQ ID NO: 5457345 - DNA, 25 bp, Homo sapien
gaccagaggcttgaagcagccttgc

SEQ ID NO: 5457346 - DNA, 25 bp, Homo sapien
agaccagaggcttgaagcagccttg

SEQ ID NO: 5457347 - DNA, 25 bp, Homo sapien
atgttgttcaatctcatagatctgg

SEQ ID NO: 5457348 - DNA, 25 bp, Homo sapien
ggtctcaatcttatgttgttcaatc

SEQ ID NO: 5457349 - DNA, 25 bp, Homo sapien
ccctccaggtctcaatcttatgttg

SEQ ID NO: 5457350 - DNA, 25 bp, Homo sapien
ctcaatcttatgttgttcaatctca

SEQ ID NO: 5457351 - DNA, 25 bp, Homo sapien
ctgtagtagcgatgcagcaccagga

SEQ ID NO: 5457352 - DNA, 25 bp, Homo sapien
gtagtagcgatgcagcaccaggatg

SEQ ID NO: 5457353 - DNA, 25 bp, Homo sapien
ggacctgtagtagcgatgcagcacc

SEQ ID NO: 5457354 - DNA, 25 bp, Homo sapien
acctgtagtagcgatgcagcaccag

SEQ ID NO: 5457355 - DNA, 25 bp, Homo sapien
ttcttgctgtcccatagaggggctg

SEQ ID NO: 5457356 - DNA, 25 bp, Homo sapien
gggctgcccgcacaccgttggccac

SEQ ID NO: 5457357 - DNA, 25 bp, Homo sapien
catagaggggctgcccgcacaccgt

SEQ ID NO: 5457358 - DNA, 25 bp, Homo sapien
cacaccgttggccaccagagcaaag

SEQ ID NO: 5457359 - DNA, 25 bp, Homo sapien
ctccagcatggtgtcgaagatgact

SEQ ID NO: 5457360 - DNA, 25 bp, Homo sapien
tggcatcgtagcaggtgtgctcctg

SEQ ID NO: 5457361 - DNA, 25 bp, Homo sapien
ctagcttggagctagttgccatggc

SEQ ID NO: 5457362 - DNA, 25 bp, Homo sapien
ccatggcatcgtagcaggtgtgctc

SEQ ID NO: 5457363 - DNA, 25 bp, Homo sapien
gccgggtttccgcagttcgtcatcc

SEQ ID NO: 5457364 - DNA, 25 bp, Homo sapien
ggcgccgggtttccgcagttcgtca

SEQ ID NO: 5457365 - DNA, 25 bp, Homo sapien
cgggtttccgcagttcgtcatccca

SEQ ID NO: 5457366 - DNA, 25 bp, Homo sapien
ctgggcgccgggtttccgcagttcg

SEQ ID NO: 5457367 - DNA, 25 bp, Homo sapien
ggcctctcttccagcaggccttcta

SEQ ID NO: 5457368 - DNA, 25 bp, Homo sapien
agggcaggcctctcttccagcaggc

SEQ ID NO: 5457369 - DNA, 25 bp, Homo sapien
acaggcacagggcaggcctctcttc

SEQ ID NO: 5457370 - DNA, 25 bp, Homo sapien
ctctcttccagcaggccttctagct

SEQ ID NO: 5457371 - DNA, 25 bp, Homo sapien
cgtggccagctccacatcatctgtg

SEQ ID NO: 5457372 - DNA, 25 bp, Homo sapien
ctgttggtggagtgcccaccccggc

SEQ ID NO: 5457373 - DNA, 25 bp, Homo sapien
cagcttgagccaagggtgtggtctt

SEQ ID NO: 5457374 - DNA, 25 bp, Homo sapien
agaggggaggcagtcccaccctgtt

SEQ ID NO: 5457375 - DNA, 25 bp, Homo sapien
cacagctggtgatggccatgagctg

SEQ ID NO: 5457376 - DNA, 25 bp, Homo sapien
ttcccacggattctttctgagctgc

SEQ ID NO: 5457377 - DNA, 25 bp, Homo sapien
gtttcccacggattctttctgagct

SEQ ID NO: 5457378 - DNA, 25 bp, Homo sapien
ctccgtttcccacggattctttctg

SEQ ID NO: 5457379 - DNA, 25 bp, Homo sapien
ccccaaggctgctccaggaaggggt

SEQ ID NO: 5457380 - DNA, 25 bp, Homo sapien
cttgatgctcagaacccccaaggct

SEQ ID NO: 5457381 - DNA, 25 bp, Homo sapien
tgatgctcagaacccccaaggctgc

SEQ ID NO: 5457382 - DNA, 25 bp, Homo sapien
acccccaaggctgctccaggaaggg

SEQ ID NO: 5457383 - DNA, 25 bp, Homo sapien
gaagagtttctgaaggagtggggaa

SEQ ID NO: 5457384 - DNA, 25 bp, Homo sapien
ctgtggggagaagagtttctgaagg

SEQ ID NO: 5457385 - DNA, 25 bp, Homo sapien
ggagtggggaaagtgccttacattc

SEQ ID NO: 5457386 - DNA, 25 bp, Homo sapien
tggggaaagtgccttacattcccaa

SEQ ID NO: 5457387 - DNA, 25 bp, Homo sapien
cctgcgcagtgcgtgctccagcccg

SEQ ID NO: 5457388 - DNA, 25 bp, Homo sapien
caactgagagcaagtgtgcgacact

SEQ ID NO: 5457389 - DNA, 25 bp, Homo sapien
gggctgcactattctgggcccggcc

SEQ ID NO: 5457390 - DNA, 25 bp, Homo sapien
gctgcactattctgggcccggcccc

SEQ ID NO: 5457391 - DNA, 25 bp, Homo sapien
accaactgagagcaagtgtgcgaca

SEQ ID NO: 5457392 - DNA, 25 bp, Homo sapien
cctgagcccctattccaagagcctc

SEQ ID NO: 5457393 - DNA, 25 bp, Homo sapien
tgggaacatggtcattgagcagagt

SEQ ID NO: 5457394 - DNA, 25 bp, Homo sapien
actgaggacaagctagagggaccct

SEQ ID NO: 5457395 - DNA, 25 bp, Homo sapien
gtcactgaggacaagctagagggac

SEQ ID NO: 5457396 - DNA, 25 bp, Homo sapien
tagggtgaatttggctgctatctct

SEQ ID NO: 5457397 - DNA, 25 bp, Homo sapien
cctagggtgaatttggctgctatct

SEQ ID NO: 5457398 - DNA, 25 bp, Homo sapien
tggagatctgatttgtctcggacat

SEQ ID NO: 5457399 - DNA, 25 bp, Homo sapien
ctggagatctgatttgtctcggaca

SEQ ID NO: 5457400 - DNA, 25 bp, Homo sapien
taaaacaacaacatactgtgttcat

SEQ ID NO: 5457401 - DNA, 25 bp, Homo sapien
tataaaacaacaacatactgtgttc

SEQ ID NO: 5457402 - DNA, 25 bp, Homo sapien
gctctatgacattgatatgcccaag

SEQ ID NO: 5457403 - DNA, 25 bp, Homo sapien
aaacaacaacatactgtgttcattg

SEQ ID NO: 5457404 - DNA, 25 bp, Homo sapien
tcgatctcttgaaagtctgcgacct

SEQ ID NO: 5457405 - DNA, 25 bp, Homo sapien
ccctcgatctcttgaaagtctgcga

SEQ ID NO: 5457406 - DNA, 25 bp, Homo sapien
gatctcttgaaagtctgcgacctcc

SEQ ID NO: 5457407 - DNA, 25 bp, Homo sapien
tctcttgaaagtctgcgacctccat

SEQ ID NO: 5457408 - DNA, 25 bp, Homo sapien
ttaaaggacactgtacaggccctcc

SEQ ID NO: 5457409 - DNA, 25 bp, Homo sapien
gtctaaaggcctctggatactgggc

SEQ ID NO: 5457410 - DNA, 25 bp, Homo sapien
tcgaagagaactgcctgtgccgctt

SEQ ID NO: 5457411 - DNA, 25 bp, Homo sapien
ctagactgacttcgcgcagcggtgg

SEQ ID NO: 5457412 - DNA, 25 bp, Homo sapien
cacacttggatacgtttttttgtat

SEQ ID NO: 5457413 - DNA, 25 bp, Homo sapien
caccaccacacttggatacgttttt

SEQ ID NO: 5457414 - DNA, 25 bp, Homo sapien
cgcgcccggccaaaactgactttca

SEQ ID NO: 5457415 - DNA, 25 bp, Homo sapien
gcccaccaccacacttggatacgtt

SEQ ID NO: 5457416 - DNA, 25 bp, Homo sapien
gtctagggagatgtactaccatgcc

SEQ ID NO: 5457417 - DNA, 25 bp, Homo sapien
ttcaatcctcaaggctcatggtggg

SEQ ID NO: 5457418 - DNA, 25 bp, Homo sapien
tgttaacttaccaaaggagacagtg

SEQ ID NO: 5457419 - DNA, 25 bp, Homo sapien
tgcattcactcggtgacctagcctg

SEQ ID NO: 5457420 - DNA, 25 bp, Homo sapien
tgaggcttacggtcttggcaaggca

SEQ ID NO: 5457421 - DNA, 25 bp, Homo sapien
tgggctctaggactgactgggttct

SEQ ID NO: 5457422 - DNA, 25 bp, Homo sapien
gcatcaccgagtgggtcagcgtctg

SEQ ID NO: 5457423 - DNA, 25 bp, Homo sapien
gaagtaattccataaagggcccaga

SEQ ID NO: 5457424 - DNA, 25 bp, Homo sapien
ccggtgagaaacaaggtcagggtca

SEQ ID NO: 5457425 - DNA, 25 bp, Homo sapien
caaaggtagacttggagttgtagga

SEQ ID NO: 5457426 - DNA, 25 bp, Homo sapien
gcatcccgctttgcagtcactcaag

SEQ ID NO: 5457427 - DNA, 25 bp, Homo sapien
actcaaggtccagggtagaggcact

SEQ ID NO: 5457428 - DNA, 25 bp, Homo sapien
gccattgctccaagggatgcttctt

SEQ ID NO: 5457429 - DNA, 25 bp, Homo sapien
gccacagctctggaatcagccattg

SEQ ID NO: 5457430 - DNA, 25 bp, Homo sapien
ggagtgtcattgtttccagacctct

SEQ ID NO: 5457431 - DNA, 25 bp, Homo sapien
tgtgtagaagccaagatctgggtgc

SEQ ID NO: 5457432 - DNA, 25 bp, Homo sapien
caagtgacggtgagatgagtggcat

SEQ ID NO: 5457433 - DNA, 25 bp, Homo sapien
tcactgaaggtgagggcacgtggag

SEQ ID NO: 5457434 - DNA, 25 bp, Homo sapien
gggaagttccagatgagagcacact

SEQ ID NO: 5457435 - DNA, 25 bp, Homo sapien
agcagccccgaccatgtgggcagca

SEQ ID NO: 5457436 - DNA, 25 bp, Homo sapien
tacgacagtaacgaggccttagagc

SEQ ID NO: 5457437 - DNA, 25 bp, Homo sapien
gactgacttcgagtttcggccgcat

SEQ ID NO: 5457438 - DNA, 25 bp, Homo sapien
taagagtccagtcgatgctgccacg

SEQ ID NO: 5457439 - DNA, 25 bp, Homo sapien
tagcctctcgataggaaccttcagg

SEQ ID NO: 5457440 - DNA, 25 bp, Homo sapien
tgcagggaccgtgctaatctctgta

SEQ ID NO: 5457441 - DNA, 25 bp, Homo sapien
agtatatgtgctgctgaaatgagca

SEQ ID NO: 5457442 - DNA, 25 bp, Homo sapien
cttgtgcagggaccgtgctaatctc

SEQ ID NO: 5457443 - DNA, 25 bp, Homo sapien
tcattccagttttagtatatgtgct

SEQ ID NO: 5457444 - DNA, 25 bp, Homo sapien
catattatagcatgcatccttggct

SEQ ID NO: 5457445 - DNA, 25 bp, Homo sapien
catcctctataaattagtagtcacg

SEQ ID NO: 5457446 - DNA, 25 bp, Homo sapien
tctaaataactctagggaccttatg

SEQ ID NO: 5457447 - DNA, 25 bp, Homo sapien
tatggtaattactgatactgtaggg

SEQ ID NO: 5457448 - DNA, 25 bp, Homo sapien
gtatgattgtttcaactttgctgca

SEQ ID NO: 5457449 - DNA, 25 bp, Homo sapien
aaaccatgagatgaataatcttggt

SEQ ID NO: 5457450 - DNA, 25 bp, Homo sapien
gacttgtattttggtctgacgtatg

SEQ ID NO: 5457451 - DNA, 25 bp, Homo sapien
tttgctgcagtagcacctacaagag

SEQ ID NO: 5457452 - DNA, 25 bp, Homo sapien
ttctttagatgaagacccccaggag

SEQ ID NO: 5457453 - DNA, 25 bp, Homo sapien
ccccaggagagggtaagatgacaga

SEQ ID NO: 5457454 - DNA, 25 bp, Homo sapien
ctctgggtcagaagtgacctcattt

SEQ ID NO: 5457455 - DNA, 25 bp, Homo sapien
ggtaagatgacagagtctctgggtc

SEQ ID NO: 5457456 - DNA, 25 bp, Homo sapien
tcactgttagaggtgagacctggtg

SEQ ID NO: 5457457 - DNA, 25 bp, Homo sapien
cacaagtgagtctgttatgtttggg

SEQ ID NO: 5457458 - DNA, 25 bp, Homo sapien
tgaaagtttacagggcaaagtcaca

SEQ ID NO: 5457459 - DNA, 25 bp, Homo sapien
atgtttggggtgtttgtcctcttca

SEQ ID NO: 5457460 - DNA, 25 bp, Homo sapien
cagaactctaaggtcgggaggcctt

SEQ ID NO: 5457461 - DNA, 25 bp, Homo sapien
acgcagaactctaaggtcgggaggc

SEQ ID NO: 5457462 - DNA, 25 bp, Homo sapien
ctctaaggtcgggaggcctttgtgt

SEQ ID NO: 5457463 - DNA, 25 bp, Homo sapien
tccagacgcagaactctaaggtcgg

SEQ ID NO: 5457464 - DNA, 25 bp, Homo sapien
agcaaaccattggtgtaaatccaag

SEQ ID NO: 5457465 - DNA, 25 bp, Homo sapien
atcacacggcgaagtctcatgatag

SEQ ID NO: 5457466 - DNA, 25 bp, Homo sapien
catcacacggcgaagtctcatgata

SEQ ID NO: 5457467 - DNA, 25 bp, Homo sapien
gagcccccagcaaaccattggtgta

SEQ ID NO: 5457468 - DNA, 25 bp, Homo sapien
cccatttcccattgtgggtctcgat

SEQ ID NO: 5457469 - DNA, 25 bp, Homo sapien
tcccatttcccattgtgggtctcga

SEQ ID NO: 5457470 - DNA, 25 bp, Homo sapien
agcccaggctgtagctgaggccaag

SEQ ID NO: 5457471 - DNA, 25 bp, Homo sapien
ggagcccaggctgtagctgaggcca

SEQ ID NO: 5457472 - DNA, 25 bp, Homo sapien
tggagccggcgccagagccaaagct

SEQ ID NO: 5457473 - DNA, 25 bp, Homo sapien
cccaggctgtagctgaggccaaggg

SEQ ID NO: 5457474 - DNA, 25 bp, Homo sapien
aggcccccataggctgagctcagac

SEQ ID NO: 5457475 - DNA, 25 bp, Homo sapien
cttgtgaggcccccataggctgagc

SEQ ID NO: 5457476 - DNA, 25 bp, Homo sapien
cccccataggctgagctcagaccac

SEQ ID NO: 5457477 - DNA, 25 bp, Homo sapien
gaggcccccataggctgagctcaga

SEQ ID NO: 5457478 - DNA, 25 bp, Homo sapien
tggtggtcttcttatggatactcac

SEQ ID NO: 5457479 - DNA, 25 bp, Homo sapien
agccactggtggtcttcttatggat

SEQ ID NO: 5457480 - DNA, 25 bp, Homo sapien
gcatagccactggtggtcttcttat

SEQ ID NO: 5457481 - DNA, 25 bp, Homo sapien
tagccactggtggtcttcttatgga

SEQ ID NO: 5457482 - DNA, 25 bp, Homo sapien
taggtggcgatctcgatgtccaggg

SEQ ID NO: 5457483 - DNA, 25 bp, Homo sapien
tccagacggctctcctcgccctcca

SEQ ID NO: 5457484 - DNA, 25 bp, Homo sapien
ccagacggctctcctcgccctccag

SEQ ID NO: 5457485 - DNA, 25 bp, Homo sapien
gtggcgatctcgatgtccagggcca

SEQ ID NO: 5457486 - DNA, 25 bp, Homo sapien
cccgactgtggatggtgatctcttc

SEQ ID NO: 5457487 - DNA, 25 bp, Homo sapien
ctcggagatctgtctttgcacaacg

SEQ ID NO: 5457488 - DNA, 25 bp, Homo sapien
cctcagcccgactgtggatggtgat

SEQ ID NO: 5457489 - DNA, 25 bp, Homo sapien
atctgtctttgcacaacgcaggtca

SEQ ID NO: 5457490 - DNA, 25 bp, Homo sapien
tgatgaaaccgagtcccagagagct

SEQ ID NO: 5457491 - DNA, 25 bp, Homo sapien
gagagctgaaattacttccccaagg

SEQ ID NO: 5457492 - DNA, 25 bp, Homo sapien
cagccatagactaggactcccgtgt

SEQ ID NO: 5457493 - DNA, 25 bp, Homo sapien
taggtaacctacagagcaatgaaga

SEQ ID NO: 5457494 - DNA, 25 bp, Homo sapien
ggtcccccggggctgcagtagcagc

SEQ ID NO: 5457495 - DNA, 25 bp, Homo sapien
ccggggctgcagtagcagcggcgcc

SEQ ID NO: 5457496 - DNA, 25 bp, Homo sapien
ccgcccgcggctcccgctggggcct

SEQ ID NO: 5457497 - DNA, 25 bp, Homo sapien
gggctgcagtagcagcggcgccgcc

SEQ ID NO: 5457498 - DNA, 25 bp, Homo sapien
caaacctggtgttcgtgtacctgct

SEQ ID NO: 5457499 - DNA, 25 bp, Homo sapien
tcctacatgggcaacgagatctcct

SEQ ID NO: 5457500 - DNA, 25 bp, Homo sapien
tgctatcgcctcaaggagctgagcc

SEQ ID NO: 5457501 - DNA, 25 bp, Homo sapien
tttcaagacctcaagaacgagggcg

SEQ ID NO: 5457502 - DNA, 25 bp, Homo sapien
ggacatcccgcttccttatccttag

SEQ ID NO: 5457503 - DNA, 25 bp, Homo sapien
taatttggatcgactgaggtgccag

SEQ ID NO: 5457504 - DNA, 25 bp, Homo sapien
tggaggcaaaatcaacctgggagac

SEQ ID NO: 5457505 - DNA, 25 bp, Homo sapien
caaggtgccaatgatgcgggccgac

SEQ ID NO: 5457506 - DNA, 25 bp, Homo sapien
gaagctgagtgtggtaagactgtgg

SEQ ID NO: 5457507 - DNA, 25 bp, Homo sapien
tgaggacaggcctggatcatcagga

SEQ ID NO: 5457508 - DNA, 25 bp, Homo sapien
tgagtgtggtaagactgtggcttct

SEQ ID NO: 5457509 - DNA, 25 bp, Homo sapien
ttcagggattgggtggagtacagtc

SEQ ID NO: 5457510 - DNA, 25 bp, Homo sapien
agcccactctcccatccggggaggc

SEQ ID NO: 5457511 - DNA, 25 bp, Homo sapien
tgatgaatgcaccagcccactctcc

SEQ ID NO: 5457512 - DNA, 25 bp, Homo sapien
tgcttgatgaatgcaccagcccact

SEQ ID NO: 5457513 - DNA, 25 bp, Homo sapien
cttgatgaatgcaccagcccactct

SEQ ID NO: 5457514 - DNA, 25 bp, Homo sapien
aaaagtgaaagagggcgcacatcgc

SEQ ID NO: 5457515 - DNA, 25 bp, Homo sapien
cacggaggacggtggctttcaccaa

SEQ ID NO: 5457516 - DNA, 25 bp, Homo sapien
gaaaagatttggcactcgttaaaga

SEQ ID NO: 5457517 - DNA, 25 bp, Homo sapien
aaggaggaccgtgagaggcctccac

SEQ ID NO: 5457518 - DNA, 25 bp, Homo sapien
cggcaggtggagtaaactctggatt

SEQ ID NO: 5457519 - DNA, 25 bp, Homo sapien
tccccctgctaagtgcggcaggtgg

SEQ ID NO: 5457520 - DNA, 25 bp, Homo sapien
cctccccgggatgccgatgggatcg

SEQ ID NO: 5457521 - DNA, 25 bp, Homo sapien
ttagaggacggttgacggaggctcc

SEQ ID NO: 5457522 - DNA, 25 bp, Homo sapien
gaggccgcaggcacccgaccgcccc

SEQ ID NO: 5457523 - DNA, 25 bp, Homo sapien
aggccgcaggcacccgaccgccccg

SEQ ID NO: 5457524 - DNA, 25 bp, Homo sapien
cgaggccgcaggcacccgaccgccc

SEQ ID NO: 5457525 - DNA, 25 bp, Homo sapien
ggcagcttgtagagcgcgccgtcct

SEQ ID NO: 5457526 - DNA, 25 bp, Homo sapien
gtaatggccccccaagtgcgaggct

SEQ ID NO: 5457527 - DNA, 25 bp, Homo sapien
aagcggtaggcgtagcgcttgccat

SEQ ID NO: 5457528 - DNA, 25 bp, Homo sapien
cggccagtaggagaagccggcgggc

SEQ ID NO: 5457529 - DNA, 25 bp, Homo sapien
gcgttcgcgcggtcagccagcagct

SEQ ID NO: 5457530 - DNA, 25 bp, Homo sapien
tcccacgcgatgcagccggcgttcg

SEQ ID NO: 5457531 - DNA, 25 bp, Homo sapien
gtgagcttgaactcgccgtgaccgc

SEQ ID NO: 5457532 - DNA, 25 bp, Homo sapien
acctcgtccgggtccgtgagcttga

SEQ ID NO: 5457533 - DNA, 25 bp, Homo sapien
aagagtgctggcgggaaactgaccc

SEQ ID NO: 5457534 - DNA, 25 bp, Homo sapien
gaactggggaagagtgctggcggga

SEQ ID NO: 5457535 - DNA, 25 bp, Homo sapien
gtgctggcgggaaactgacccaccc

SEQ ID NO: 5457536 - DNA, 25 bp, Homo sapien
ggggcggtcagccacaggcgggagc

SEQ ID NO: 5457537 - DNA, 25 bp, Homo sapien
caaactgcagctgcgttcggcggga

SEQ ID NO: 5457538 - DNA, 25 bp, Homo sapien
gggctgatcagcagagtggtgtgta

SEQ ID NO: 5457539 - DNA, 25 bp, Homo sapien
ggctgatcagcagagtggtgtgtag

SEQ ID NO: 5457540 - DNA, 25 bp, Homo sapien
ggaaaagtgcaagtcaaactgcagc

SEQ ID NO: 5457541 - DNA, 25 bp, Homo sapien
ggaaatgcggcttccactgaagagc

SEQ ID NO: 5457542 - DNA, 25 bp, Homo sapien
tttgcacaatggaaatgcggcttcc

SEQ ID NO: 5457543 - DNA, 25 bp, Homo sapien
gctttccagatgcacggttttgtgg

SEQ ID NO: 5457544 - DNA, 25 bp, Homo sapien
gcggcttccactgaagagcacgtag

SEQ ID NO: 5457545 - DNA, 25 bp, Homo sapien
ggagcaacctcagcggcttggatga

SEQ ID NO: 5457546 - DNA, 25 bp, Homo sapien
cttggatgaccgttcctgttgggca

SEQ ID NO: 5457547 - DNA, 25 bp, Homo sapien
ctgttgggcatagtttccttctgga

SEQ ID NO: 5457548 - DNA, 25 bp, Homo sapien
acagtcgccaacctcgtttttgtgg

SEQ ID NO: 5457549 - DNA, 25 bp, Homo sapien
ctcgcctccgccgcccagcgcgccg

SEQ ID NO: 5457550 - DNA, 25 bp, Homo sapien
gccgcccagcgcgccggccatctca

SEQ ID NO: 5457551 - DNA, 25 bp, Homo sapien
gcctccgccgcccagcgcgccggcc

SEQ ID NO: 5457552 - DNA, 25 bp, Homo sapien
cctccgccgcccagcgcgccggcca

SEQ ID NO: 5457553 - DNA, 25 bp, Homo sapien
tccttgaagagaccgtctccgacgg

SEQ ID NO: 5457554 - DNA, 25 bp, Homo sapien
ttgaagagaccgtctccgacgggat

SEQ ID NO: 5457555 - DNA, 25 bp, Homo sapien
cccgtccttgaagagaccgtctccg

SEQ ID NO: 5457556 - DNA, 25 bp, Homo sapien
ccgtccttgaagagaccgtctccga

SEQ ID NO: 5457557 - DNA, 25 bp, Homo sapien
ccgggcggaagttgtgggcttgaca

SEQ ID NO: 5457558 - DNA, 25 bp, Homo sapien
gccaaggcttaaggggggtgctgtg

SEQ ID NO: 5457559 - DNA, 25 bp, Homo sapien
ctgtggtccccaggcgcgaggctgg

SEQ ID NO: 5457560 - DNA, 25 bp, Homo sapien
ggcggaagttgtgggcttgacaaaa

SEQ ID NO: 5457561 - DNA, 25 bp, Homo sapien
gctgggaggcgccgctctgtctcat

SEQ ID NO: 5457562 - DNA, 25 bp, Homo sapien
ggtacatgttgatcagcaggggctg

SEQ ID NO: 5457563 - DNA, 25 bp, Homo sapien
aggtacatgttgatcagcaggggct

SEQ ID NO: 5457564 - DNA, 25 bp, Homo sapien
cgatccccgcccgaagcgaccgcgg

SEQ ID NO: 5457565 - DNA, 25 bp, Homo sapien
cgaggcaggctttgcgctcggtggc

SEQ ID NO: 5457566 - DNA, 25 bp, Homo sapien
agcgaccgcgggtgacaaggaggag

SEQ ID NO: 5457567 - DNA, 25 bp, Homo sapien
caaggaggagaagacggcgccgggt

SEQ ID NO: 5457568 - DNA, 25 bp, Homo sapien
tcgcaataaagtctccaacgcgccg

SEQ ID NO: 5457569 - DNA, 25 bp, Homo sapien
gaaacgcttccagctaaggggccgc

SEQ ID NO: 5457570 - DNA, 25 bp, Homo sapien
tcttatcgtcccatcgcaataaagt

SEQ ID NO: 5457571 - DNA, 25 bp, Homo sapien
cgttttaattaaagcgctgccgcct

SEQ ID NO: 5457572 - DNA, 25 bp, Homo sapien
agtgatggggctggtgtacccggcc

SEQ ID NO: 5457573 - DNA, 25 bp, Homo sapien
ctagagcgcgtgtcttttccgcctc

SEQ ID NO: 5457574 - DNA, 25 bp, Homo sapien
tcttccagtcggctcccgctccact

SEQ ID NO: 5457575 - DNA, 25 bp, Homo sapien
gcccgggccatgtgccctgatggga

SEQ ID NO: 5457576 - DNA, 25 bp, Homo sapien
tgttccctgtggaccaaactcaggg

SEQ ID NO: 5457577 - DNA, 25 bp, Homo sapien
gttccctgtggaccaaactcagggc

SEQ ID NO: 5457578 - DNA, 25 bp, Homo sapien
acaggagagtccttggcagtttccc

SEQ ID NO: 5457579 - DNA, 25 bp, Homo sapien
gggaaggtgtctggggccgtggagc

SEQ ID NO: 5457580 - DNA, 25 bp, Homo sapien
caggaacctttattgagtgtcctca

SEQ ID NO: 5457581 - DNA, 25 bp, Homo sapien
aagattcaggaacctttattgagtg

SEQ ID NO: 5457582 - DNA, 25 bp, Homo sapien
gattcaggaacctttattgagtgtc

SEQ ID NO: 5457583 - DNA, 25 bp, Homo sapien
gtgtgggcctgtgtgccgagctcac

SEQ ID NO: 5457584 - DNA, 25 bp, Homo sapien
tgcccagtgtgggcctgtgtgccga

SEQ ID NO: 5457585 - DNA, 25 bp, Homo sapien
tagtgctggactctccggatggact

SEQ ID NO: 5457586 - DNA, 25 bp, Homo sapien
ctagtgctggactctccggatggac

SEQ ID NO: 5457587 - DNA, 25 bp, Homo sapien
cacatactggtagcctcggtagcct

SEQ ID NO: 5457588 - DNA, 25 bp, Homo sapien
gtgccggtcccgctccaacacatac

SEQ ID NO: 5457589 - DNA, 25 bp, Homo sapien
aagtacagaactctccgctgtgccg

SEQ ID NO: 5457590 - DNA, 25 bp, Homo sapien
gtacagaactctccgctgtgccggt

SEQ ID NO: 5457591 - DNA, 25 bp, Homo sapien
gaggtcaaacttgcagccttggaag

SEQ ID NO: 5457592 - DNA, 25 bp, Homo sapien
ccctcaaacagtgtcacacggctgt

SEQ ID NO: 5457593 - DNA, 25 bp, Homo sapien
gagctgactttgagggaacccacat

SEQ ID NO: 5457594 - DNA, 25 bp, Homo sapien
tgggtagtcatcaacgaggtcaaac

SEQ ID NO: 5457595 - DNA, 25 bp, Homo sapien
tgtgaagctgtctaggacccacagg

SEQ ID NO: 5457596 - DNA, 25 bp, Homo sapien
acagaaagatcagggcttccaaagg

SEQ ID NO: 5457597 - DNA, 25 bp, Homo sapien
tgaggcacagcaagatcaggacaga

SEQ ID NO: 5457598 - DNA, 25 bp, Homo sapien
aaagggttaacggatacatcctctg

SEQ ID NO: 5457599 - DNA, 25 bp, Homo sapien
cccagctaagaggtactgggtggca

SEQ ID NO: 5457600 - DNA, 25 bp, Homo sapien
ctaagaggtactgggtggcagaatc

SEQ ID NO: 5457601 - DNA, 25 bp, Homo sapien
cagctaagaggtactgggtggcaga

SEQ ID NO: 5457602 - DNA, 25 bp, Homo sapien
gcccagctaagaggtactgggtggc

SEQ ID NO: 5457603 - DNA, 25 bp, Homo sapien
ccatctcggagtttgtttacacaca

SEQ ID NO: 5457604 - DNA, 25 bp, Homo sapien
ttgaacagcctttctaggtgccatg

SEQ ID NO: 5457605 - DNA, 25 bp, Homo sapien
ttctgagaaataatgctactaccac

SEQ ID NO: 5457606 - DNA, 25 bp, Homo sapien
aactttcttggagacacccttctga

SEQ ID NO: 5457607 - DNA, 25 bp, Homo sapien
tccagaatgaactgctgtccctgga

SEQ ID NO: 5457608 - DNA, 25 bp, Homo sapien
ccagaatgaactgctgtccctggaa

SEQ ID NO: 5457609 - DNA, 25 bp, Homo sapien
gctccagcgaggatagtctcccttc

SEQ ID NO: 5457610 - DNA, 25 bp, Homo sapien
tccaggcgctccagcgaggatagtc

SEQ ID NO: 5457611 - DNA, 25 bp, Homo sapien
acagtcgcttagcagccgacagcga

SEQ ID NO: 5457612 - DNA, 25 bp, Homo sapien
agtcctcctcgtcccagagcgtgag

SEQ ID NO: 5457613 - DNA, 25 bp, Homo sapien
cttgaccgagcgcaccctgggcagg

SEQ ID NO: 5457614 - DNA, 25 bp, Homo sapien
gcgctcgcagacgttcgcacagtcg

SEQ ID NO: 5457615 - DNA, 25 bp, Homo sapien
gggcccggcgcgggggcgctgctca

SEQ ID NO: 5457616 - DNA, 25 bp, Homo sapien
ggcccggcgcgggggcgctgctcat

SEQ ID NO: 5457617 - DNA, 25 bp, Homo sapien
gccgggcccggcgcgggggcgctgc

SEQ ID NO: 5457618 - DNA, 25 bp, Homo sapien
ctggcgggcgccgggcccggcgcgg

SEQ ID NO: 5457619 - DNA, 25 bp, Homo sapien
ccgtttcgagccacacacagcctgc

SEQ ID NO: 5457620 - DNA, 25 bp, Homo sapien
aagggtggcaccacgcgctcagcgt

SEQ ID NO: 5457621 - DNA, 25 bp, Homo sapien
agcgtctcaagagccccgtttcgag

SEQ ID NO: 5457622 - DNA, 25 bp, Homo sapien
gctcagcgtctcaagagccccgttt

SEQ ID NO: 5457623 - DNA, 25 bp, Homo sapien
gccaggggctcgcagtcttcccgcg

SEQ ID NO: 5457624 - DNA, 25 bp, Homo sapien
caggggctcgcagtcttcccgcgct

SEQ ID NO: 5457625 - DNA, 25 bp, Homo sapien
gggctcgcagtcttcccgcgctccc

SEQ ID NO: 5457626 - DNA, 25 bp, Homo sapien
ctgggtagcggatgaagaacccggg

SEQ ID NO: 5457627 - DNA, 25 bp, Homo sapien
cgcgagggaaatggaccggctgcga

SEQ ID NO: 5457628 - DNA, 25 bp, Homo sapien
gagggaaatggaccggctgcgaggc

SEQ ID NO: 5457629 - DNA, 25 bp, Homo sapien
tggaccggctgcgaggctgcgcgcg

SEQ ID NO: 5457630 - DNA, 25 bp, Homo sapien
gaaatggaccggctgcgaggctgcg

SEQ ID NO: 5457631 - DNA, 25 bp, Homo sapien
tggtcacaagatcgtggcatggctg

SEQ ID NO: 5457632 - DNA, 25 bp, Homo sapien
gccaaaaagtgctcacaggccagct

SEQ ID NO: 5457633 - DNA, 25 bp, Homo sapien
caagaatcgagctcagacctttgga

SEQ ID NO: 5457634 - DNA, 25 bp, Homo sapien
tgtccattgaagctcccgtgccaaa

SEQ ID NO: 5457635 - DNA, 25 bp, Homo sapien
ctctgaagttctgggttgctgagag

SEQ ID NO: 5457636 - DNA, 25 bp, Homo sapien
ctgaagttctgggttgctgagagca

SEQ ID NO: 5457637 - DNA, 25 bp, Homo sapien
gaagttctgggttgctgagagcagg

SEQ ID NO: 5457638 - DNA, 25 bp, Homo sapien
agttctgggttgctgagagcaggag

SEQ ID NO: 5457639 - DNA, 25 bp, Homo sapien
tatccgacaattctggattcggcca

SEQ ID NO: 5457640 - DNA, 25 bp, Homo sapien
ggtgaagaatcagatctcgccttcc

SEQ ID NO: 5457641 - DNA, 25 bp, Homo sapien
ggcacgagccagttctggacccttg

SEQ ID NO: 5457642 - DNA, 25 bp, Homo sapien
gtctttgccttcagtgtcaccagcc

SEQ ID NO: 5457643 - DNA, 25 bp, Homo sapien
acgtactctcgagggtcgggctcca

SEQ ID NO: 5457644 - DNA, 25 bp, Homo sapien
tgacgcggacgccaagtgttggtca

SEQ ID NO: 5457645 - DNA, 25 bp, Homo sapien
tgtctgtcggagactggacactgtg

SEQ ID NO: 5457646 - DNA, 25 bp, Homo sapien
gtcaggctgtgcgtctgcgctgtcc

SEQ ID NO: 5457647 - DNA, 25 bp, Homo sapien
gggcactggactcacacacgaatat

SEQ ID NO: 5457648 - DNA, 25 bp, Homo sapien
taatacgatgtactatgtgccacgg

SEQ ID NO: 5457649 - DNA, 25 bp, Homo sapien
aaggtcatacagacaccgaagggtg

SEQ ID NO: 5457650 - DNA, 25 bp, Homo sapien
ttataactggctctgacacacctgc

SEQ ID NO: 5457651 - DNA, 25 bp, Homo sapien
ctaggccagaataattggggtgggt

SEQ ID NO: 5457652 - DNA, 25 bp, Homo sapien
cagggcagctgccatagctgttggc

SEQ ID NO: 5457653 - DNA, 25 bp, Homo sapien
gcagctgccatagctgttggcttgt

SEQ ID NO: 5457654 - DNA, 25 bp, Homo sapien
gggcagctgccatagctgttggctt

SEQ ID NO: 5457655 - DNA, 25 bp, Homo sapien
aggcctgcccggcactgggagaccc

SEQ ID NO: 5457656 - DNA, 25 bp, Homo sapien
ctgcccggcactgggagaccccgcc

SEQ ID NO: 5457657 - DNA, 25 bp, Homo sapien
ctgcaggcctgcccggcactgggag

SEQ ID NO: 5457658 - DNA, 25 bp, Homo sapien
gcctgcccggcactgggagaccccg

SEQ ID NO: 5457659 - DNA, 25 bp, Homo sapien
ctgcagtcttaggatggatagtggg

SEQ ID NO: 5457660 - DNA, 25 bp, Homo sapien
actgcagtcttaggatggatagtgg

SEQ ID NO: 5457661 - DNA, 25 bp, Homo sapien
tgcagtcttaggatggatagtgggt

SEQ ID NO: 5457662 - DNA, 25 bp, Homo sapien
tggcagcggagcagcggaggaggga

SEQ ID NO: 5457663 - DNA, 25 bp, Homo sapien
ttggctccaactccgtgagggcctg

SEQ ID NO: 5457664 - DNA, 25 bp, Homo sapien
ccttggctccaactccgtgagggcc

SEQ ID NO: 5457665 - DNA, 25 bp, Homo sapien
cttggctccaactccgtgagggcct

SEQ ID NO: 5457666 - DNA, 25 bp, Homo sapien
ctggagcggcgcacagcctctccca

SEQ ID NO: 5457667 - DNA, 25 bp, Homo sapien
cccgtattacgacgcagaatggagc

SEQ ID NO: 5457668 - DNA, 25 bp, Homo sapien
tcagcccgtattacgacgcagaatg

SEQ ID NO: 5457669 - DNA, 25 bp, Homo sapien
tattacgacgcagaatggagcctgg

SEQ ID NO: 5457670 - DNA, 25 bp, Homo sapien
ctcacgcgagccgaacgaacaaaac

SEQ ID NO: 5457671 - DNA, 25 bp, Homo sapien
ggtcctggtcttccgcgagctcagt

SEQ ID NO: 5457672 - DNA, 25 bp, Homo sapien
acaaaacgctcaggtccggtttgtg

SEQ ID NO: 5457673 - DNA, 25 bp, Homo sapien
caggtgcctgcgtggcgatcaggcc

SEQ ID NO: 5457674 - DNA, 25 bp, Homo sapien
agatgcttttactggcggtggagag

SEQ ID NO: 5457675 - DNA, 25 bp, Homo sapien
gatgcttttactggcggtggagagg

SEQ ID NO: 5457676 - DNA, 25 bp, Homo sapien
ggccaggcgtgacccctagcggcat

SEQ ID NO: 5457677 - DNA, 25 bp, Homo sapien
cccctagcggcatgtcggagaggct

SEQ ID NO: 5457678 - DNA, 25 bp, Homo sapien
acccctagcggcatgtcggagaggc

SEQ ID NO: 5457679 - DNA, 25 bp, Homo sapien
gcgtgacccctagcggcatgtcgga

SEQ ID NO: 5457680 - DNA, 25 bp, Homo sapien
gaagtggcaccaccgggtggagtac

SEQ ID NO: 5457681 - DNA, 25 bp, Homo sapien
gaaggtcggtaggaagtggcaccac

SEQ ID NO: 5457682 - DNA, 25 bp, Homo sapien
ggaagtggcaccaccgggtggagta

SEQ ID NO: 5457683 - DNA, 25 bp, Homo sapien
tacggaaggtcggtaggaagtggca

SEQ ID NO: 5457684 - DNA, 25 bp, Homo sapien
tgctgcgtcggcagcagcgtgtccg

SEQ ID NO: 5457685 - DNA, 25 bp, Homo sapien
ctgcttgctgcgtcggcagcagcgt

SEQ ID NO: 5457686 - DNA, 25 bp, Homo sapien
cttgctgcgtcggcagcagcgtgtc

SEQ ID NO: 5457687 - DNA, 25 bp, Homo sapien
tgcttgctgcgtcggcagcagcgtg

SEQ ID NO: 5457688 - DNA, 25 bp, Homo sapien
gcgatgacgcgtggccgcgaggtga

SEQ ID NO: 5457689 - DNA, 25 bp, Homo sapien
ctgggcacgcagaacggcggcaggg

SEQ ID NO: 5457690 - DNA, 25 bp, Homo sapien
tggccgcgaggtgagtaccacctcc

SEQ ID NO: 5457691 - DNA, 25 bp, Homo sapien
ccgcggctcgcctccaccaggatgt

SEQ ID NO: 5457692 - DNA, 25 bp, Homo sapien
tcctccttcaccatgacattcagct

SEQ ID NO: 5457693 - DNA, 25 bp, Homo sapien
tgatggcctccttctcgtcctgttc

SEQ ID NO: 5457694 - DNA, 25 bp, Homo sapien
ctccttctcgtcctgttcttgctcc

SEQ ID NO: 5457695 - DNA, 25 bp, Homo sapien
tgctcctccttcaccatgacattca

SEQ ID NO: 5457696 - DNA, 25 bp, Homo sapien
ccttctttcccaaccctggatagtg

SEQ ID NO: 5457697 - DNA, 25 bp, Homo sapien
ccctggatagtgctctggtctgtct

SEQ ID NO: 5457698 - DNA, 25 bp, Homo sapien
tcttccttcggctgcttgcccttcc

SEQ ID NO: 5457699 - DNA, 25 bp, Homo sapien
ttcccaaccctggatagtgctctgg

SEQ ID NO: 5457700 - DNA, 25 bp, Homo sapien
tccatgaacttagttgactgctcat

SEQ ID NO: 5457701 - DNA, 25 bp, Homo sapien
ggtccatgaacttagttgactgctc

SEQ ID NO: 5457702 - DNA, 25 bp, Homo sapien
ccatgaacttagttgactgctcatt

SEQ ID NO: 5457703 - DNA, 25 bp, Homo sapien
gtccatgaacttagttgactgctca

SEQ ID NO: 5457704 - DNA, 25 bp, Homo sapien
ccacagcctcatggaagttcttgtc

SEQ ID NO: 5457705 - DNA, 25 bp, Homo sapien
catggaagttcttgtcttccagcag

SEQ ID NO: 5457706 - DNA, 25 bp, Homo sapien
caggctttggtccacagcctcatgg

SEQ ID NO: 5457707 - DNA, 25 bp, Homo sapien
tgctccaccaggctttggtccacag

SEQ ID NO: 5457708 - DNA, 25 bp, Homo sapien
ggtgagaatgtcaaccaggagctgc

SEQ ID NO: 5457709 - DNA, 25 bp, Homo sapien
tggtgagaatgtcaaccaggagctg

SEQ ID NO: 5457710 - DNA, 25 bp, Homo sapien
cacttgttaggggatttttcctcag

SEQ ID NO: 5457711 - DNA, 25 bp, Homo sapien
gtggcagccatgacattctgagtgg

SEQ ID NO: 5457712 - DNA, 25 bp, Homo sapien
tgtggcagccatgacattctgagtg

SEQ ID NO: 5457713 - DNA, 25 bp, Homo sapien
ggcagccatgacattctgagtggcc

SEQ ID NO: 5457714 - DNA, 25 bp, Homo sapien
ctgtggcagccatgacattctgagt

SEQ ID NO: 5457715 - DNA, 25 bp, Homo sapien
ctcgggcagtaaggcccaggcagag

SEQ ID NO: 5457716 - DNA, 25 bp, Homo sapien
gaagttagccagaaagtagtcggtg

SEQ ID NO: 5457717 - DNA, 25 bp, Homo sapien
catgggctcgggcagtaaggcccag

SEQ ID NO: 5457718 - DNA, 25 bp, Homo sapien
gggaaactctgagaagaagttagcc

SEQ ID NO: 5457719 - DNA, 25 bp, Homo sapien
cttcctcgcaggttcacaggctgtg

SEQ ID NO: 5457720 - DNA, 25 bp, Homo sapien
cttgtacttcctcgcaggttcacag

SEQ ID NO: 5457721 - DNA, 25 bp, Homo sapien
tgtacttcctcgcaggttcacaggc

SEQ ID NO: 5457722 - DNA, 25 bp, Homo sapien
tacttcctcgcaggttcacaggctg

SEQ ID NO: 5457723 - DNA, 25 bp, Homo sapien
atggtgaactccacttcctgccgca

SEQ ID NO: 5457724 - DNA, 25 bp, Homo sapien
ttctcgtccttccactcctgcagct

SEQ ID NO: 5457725 - DNA, 25 bp, Homo sapien
agctccttgtgatactgcctcatga

SEQ ID NO: 5457726 - DNA, 25 bp, Homo sapien
tgtcggtgatggtgaactccacttc

SEQ ID NO: 5457727 - DNA, 25 bp, Homo sapien
acccctatcatgggactcacagaca

SEQ ID NO: 5457728 - DNA, 25 bp, Homo sapien
gagccaccacccctatcatgggact

SEQ ID NO: 5457729 - DNA, 25 bp, Homo sapien
caccacaaatgggaccgtctcttca

SEQ ID NO: 5457730 - DNA, 25 bp, Homo sapien
caaatgggaccgtctcttcaggagc

SEQ ID NO: 5457731 - DNA, 25 bp, Homo sapien
ctgccaggagaaggcaatttcctcg

SEQ ID NO: 5457732 - DNA, 25 bp, Homo sapien
tatgagactgggacaggaagacatt

SEQ ID NO: 5457733 - DNA, 25 bp, Homo sapien
tccccaaaatctagaggacttggct

SEQ ID NO: 5457734 - DNA, 25 bp, Homo sapien
cctcgttcttggagatgttgttgag

SEQ ID NO: 5457735 - DNA, 25 bp, Homo sapien
gaactgttgtcccacgaggagatgt

SEQ ID NO: 5457736 - DNA, 25 bp, Homo sapien
atgagggccgagttccatcccagga

SEQ ID NO: 5457737 - DNA, 25 bp, Homo sapien
ccaggatgtgtatgggcacgtccac

SEQ ID NO: 5457738 - DNA, 25 bp, Homo sapien
accaccagcctagagtgtatggaac

SEQ ID NO: 5457739 - DNA, 25 bp, Homo sapien
taggtcttggcctcgataggtgaga

SEQ ID NO: 5457740 - DNA, 25 bp, Homo sapien
ggacctcatatgtcacgggcactga

SEQ ID NO: 5457741 - DNA, 25 bp, Homo sapien
gacaggacatcggtctggacctcat

SEQ ID NO: 5457742 - DNA, 25 bp, Homo sapien
ggtgagaagatccacaagacccggg

SEQ ID NO: 5457743 - DNA, 25 bp, Homo sapien
gggatgaactggtgggtagtagagg

SEQ ID NO: 5457744 - DNA, 25 bp, Homo sapien
tccggcttcactgtcacacctatga

SEQ ID NO: 5457745 - DNA, 25 bp, Homo sapien
tagaggtgaagtgcacatacttctg

SEQ ID NO: 5457746 - DNA, 25 bp, Homo sapien
gggtagcgtgtcaccaatgggaatg

SEQ ID NO: 5457747 - DNA, 25 bp, Homo sapien
tgggaggtgatcagtaccgatgaac

SEQ ID NO: 5457748 - DNA, 25 bp, Homo sapien
agcactgggaggtgatcagtaccga

SEQ ID NO: 5457749 - DNA, 25 bp, Homo sapien
gtgatcagtaccgatgaacaggtgg

SEQ ID NO: 5457750 - DNA, 25 bp, Homo sapien
aagagcactgggaggtgatcagtac

SEQ ID NO: 5457751 - DNA, 25 bp, Homo sapien
gagctccacgtcaatccgctggtca

SEQ ID NO: 5457752 - DNA, 25 bp, Homo sapien
catctggtggagctcagtggaattc

SEQ ID NO: 5457753 - DNA, 25 bp, Homo sapien
cctgcacgcgcatctggtggagctc

SEQ ID NO: 5457754 - DNA, 25 bp, Homo sapien
cagagctccacgtcaatccgctggt

SEQ ID NO: 5457755 - DNA, 25 bp, Homo sapien
atgcgcgcaacaaacacctgagagg

SEQ ID NO: 5457756 - DNA, 25 bp, Homo sapien
ggaagtgtgcaacgcatacctgaga

SEQ ID NO: 5457757 - DNA, 25 bp, Homo sapien
ctgaaagtgcgcaacacacacccga

SEQ ID NO: 5457758 - DNA, 25 bp, Homo sapien
acccgaagagaatgcgcgcaacaaa

SEQ ID NO: 5457759 - DNA, 25 bp, Homo sapien
ctgagaggaagcacgcaacacacac

SEQ ID NO: 5457760 - DNA, 25 bp, Homo sapien
ctgagaggaagcgtgcaacacacac

SEQ ID NO: 5457761 - DNA, 25 bp, Homo sapien
ctgaggagaatgcgtgcaacacaca

SEQ ID NO: 5457762 - DNA, 25 bp, Homo sapien
tgaggagaatgcgtgcaacacacac

SEQ ID NO: 5457763 - DNA, 25 bp, Homo sapien
ctgacgggaagtgtgcaacacgcac

SEQ ID NO: 5457764 - DNA, 25 bp, Homo sapien
tccctgtccatgaaagagtctagag

SEQ ID NO: 5457765 - DNA, 25 bp, Homo sapien
gaaaagacttgtaaagcgcaggtcc

SEQ ID NO: 5457766 - DNA, 25 bp, Homo sapien
tccacagccgtcaatgtgaggtcca

SEQ ID NO: 5457767 - DNA, 25 bp, Homo sapien
gaatggtcttcgctgagtccttaac

SEQ ID NO: 5457768 - DNA, 25 bp, Homo sapien
gccttgaatggtgcggccccgaaat

SEQ ID NO: 5457769 - DNA, 25 bp, Homo sapien
agggccaggaataccacggaaggtg

SEQ ID NO: 5457770 - DNA, 25 bp, Homo sapien
agggacaccactccgctgttcttca

SEQ ID NO: 5457771 - DNA, 25 bp, Homo sapien
gccccgaaattgaagtcaagcctta

SEQ ID NO: 5457772 - DNA, 25 bp, Homo sapien
tcacgctccaagtaactgttaagca

SEQ ID NO: 5457773 - DNA, 25 bp, Homo sapien
gagaagaggcgccacaggtgcttcc

SEQ ID NO: 5457774 - DNA, 25 bp, Homo sapien
gggtcacgctccaagtaactgttaa

SEQ ID NO: 5457775 - DNA, 25 bp, Homo sapien
ggtgcttccgggtgataccctcagc

SEQ ID NO: 5457776 - DNA, 25 bp, Homo sapien
acggccaccagggagacgcagcaca

SEQ ID NO: 5457777 - DNA, 25 bp, Homo sapien
cggccaccagggagacgcagcacag

SEQ ID NO: 5457778 - DNA, 25 bp, Homo sapien
gctgcttgggacaggcagtcaggca

SEQ ID NO: 5457779 - DNA, 25 bp, Homo sapien
ctcccctctgttcggtccagctgca

SEQ ID NO: 5457780 - DNA, 25 bp, Homo sapien
ggtgatggtccaggagtactgggac

SEQ ID NO: 5457781 - DNA, 25 bp, Homo sapien
tccaggagtactgggaccgctgctt

SEQ ID NO: 5457782 - DNA, 25 bp, Homo sapien
ggtggttgtcaacggcctcagggct

SEQ ID NO: 5457783 - DNA, 25 bp, Homo sapien
tggttgtcaacggcctcagggctgc

SEQ ID NO: 5457784 - DNA, 25 bp, Homo sapien
gggtggttgtcaacggcctcagggc

SEQ ID NO: 5457785 - DNA, 25 bp, Homo sapien
ggttgtcaacggcctcagggctgcc

SEQ ID NO: 5457786 - DNA, 25 bp, Homo sapien
aaggaacctggactgcttgctgttc

SEQ ID NO: 5457787 - DNA, 25 bp, Homo sapien
gtgcagttgccgtcattcaggagga

SEQ ID NO: 5457788 - DNA, 25 bp, Homo sapien
gttgccgtcattcaggaggacaagg

SEQ ID NO: 5457789 - DNA, 25 bp, Homo sapien
aggaacctggactgcttgctgttca

SEQ ID NO: 5457790 - DNA, 25 bp, Homo sapien
aggctgctggtgagcccaacgccca

SEQ ID NO: 5457791 - DNA, 25 bp, Homo sapien
agagaggctgctggtgagcccaacg

SEQ ID NO: 5457792 - DNA, 25 bp, Homo sapien
agaggctgctggtgagcccaacgcc

SEQ ID NO: 5457793 - DNA, 25 bp, Homo sapien
ggctgctggtgagcccaacgcccac

SEQ ID NO: 5457794 - DNA, 25 bp, Homo sapien
gcatttggggacaggccggcttccc

SEQ ID NO: 5457795 - DNA, 25 bp, Homo sapien
cacttggaacaggtacttggtctcc

SEQ ID NO: 5457796 - DNA, 25 bp, Homo sapien
cagccggagcatgtagtgggtggtg

SEQ ID NO: 5457797 - DNA, 25 bp, Homo sapien
cccagacccacatccccacttggaa

SEQ ID NO: 5457798 - DNA, 25 bp, Homo sapien
ggacagccagcagctttcgatgctg

SEQ ID NO: 5457799 - DNA, 25 bp, Homo sapien
cccaggtgggcttgaagtagaggct

SEQ ID NO: 5457800 - DNA, 25 bp, Homo sapien
gagaccctccactcgaactgcaggg

SEQ ID NO: 5457801 - DNA, 25 bp, Homo sapien
aagtctctcgttgggctggattagc

SEQ ID NO: 5457802 - DNA, 25 bp, Homo sapien
gccgaaggatgacgtctgagcctct

SEQ ID NO: 5457803 - DNA, 25 bp, Homo sapien
gatgaggatgatctggtgggccccg

SEQ ID NO: 5457804 - DNA, 25 bp, Homo sapien
tgcagatagaaagtgtgctgcttcc

SEQ ID NO: 5457805 - DNA, 25 bp, Homo sapien
gccacaaggcccgaagtgggccgaa

SEQ ID NO: 5457806 - DNA, 25 bp, Homo sapien
cttggggacatctagggaatactgg

SEQ ID NO: 5457807 - DNA, 25 bp, Homo sapien
cgcaccgtcaggcaccaggatgggc

SEQ ID NO: 5457808 - DNA, 25 bp, Homo sapien
gggcacatggtgcagtcctcctcaa

SEQ ID NO: 5457809 - DNA, 25 bp, Homo sapien
ctcaaagccagcgaaatagctgtgg

SEQ ID NO: 5457810 - DNA, 25 bp, Homo sapien
tagtagagaagctaggaggcctcct

SEQ ID NO: 5457811 - DNA, 25 bp, Homo sapien
tcacggcacgtctcaattgggacca

SEQ ID NO: 5457812 - DNA, 25 bp, Homo sapien
tcctcaaaagatcggacgtggtccc

SEQ ID NO: 5457813 - DNA, 25 bp, Homo sapien
gggagtatctccctgtgcacccagt

SEQ ID NO: 5457814 - DNA, 25 bp, Homo sapien
aaggcttcgagctccaccgtgtaaa

SEQ ID NO: 5457815 - DNA, 25 bp, Homo sapien
atggcgaaggcttcgagctccaccg

SEQ ID NO: 5457816 - DNA, 25 bp, Homo sapien
cttcgagctccaccgtgtaaaggca

SEQ ID NO: 5457817 - DNA, 25 bp, Homo sapien
gcgaaggcttcgagctccaccgtgt

SEQ ID NO: 5457818 - DNA, 25 bp, Homo sapien
ttcgcgtccagaccaccatgatctt

SEQ ID NO: 5457819 - DNA, 25 bp, Homo sapien
cgctggtgccgtcgaagaagaactc

SEQ ID NO: 5457820 - DNA, 25 bp, Homo sapien
tgggcaggcaccgaagtctacctcg

SEQ ID NO: 5457821 - DNA, 25 bp, Homo sapien
tcgacaggctctacactgatgggcg

SEQ ID NO: 5457822 - DNA, 25 bp, Homo sapien
ggatatgcagctggggagggcactg

SEQ ID NO: 5457823 - DNA, 25 bp, Homo sapien
agggatatgcagctggggagggcac

SEQ ID NO: 5457824 - DNA, 25 bp, Homo sapien
gatatgcagctggggagggcactgt

SEQ ID NO: 5457825 - DNA, 25 bp, Homo sapien
tatgcagctggggagggcactgtac

SEQ ID NO: 5457826 - DNA, 25 bp, Homo sapien
tgtccgagtggcaggtccccatcag

SEQ ID NO: 5457827 - DNA, 25 bp, Homo sapien
accaggtgaggtgctgaggcttcag

SEQ ID NO: 5457828 - DNA, 25 bp, Homo sapien
tggatgggaatcatgagagccccgt

SEQ ID NO: 5457829 - DNA, 25 bp, Homo sapien
gagccccgttctggtcctgtgccag

SEQ ID NO: 5457830 - DNA, 25 bp, Homo sapien
gacaggataacagaggcagtggggc

SEQ ID NO: 5457831 - DNA, 25 bp, Homo sapien
agagcaccccggtccttaggacact

SEQ ID NO: 5457832 - DNA, 25 bp, Homo sapien
caggataacagaggcagtggggcag

SEQ ID NO: 5457833 - DNA, 25 bp, Homo sapien
tcaggagagagcaccccggtcctta

SEQ ID NO: 5457834 - DNA, 25 bp, Homo sapien
tgacacagtagtgctgcagggacac

SEQ ID NO: 5457835 - DNA, 25 bp, Homo sapien
cacagtgcagggtcatacgggcctt

SEQ ID NO: 5457836 - DNA, 25 bp, Homo sapien
gacactctccaagcagtcgatggca

SEQ ID NO: 5457837 - DNA, 25 bp, Homo sapien
gcaggcctgatggtaaagacactct

SEQ ID NO: 5457838 - DNA, 25 bp, Homo sapien
agcagggaaggagctcttcagaatc

SEQ ID NO: 5457839 - DNA, 25 bp, Homo sapien
ctcagggccaggctacaggcccaga

SEQ ID NO: 5457840 - DNA, 25 bp, Homo sapien
aggtggccccgcctcctaggagcag

SEQ ID NO: 5457841 - DNA, 25 bp, Homo sapien
cagaactccagcatcactggatgcc

SEQ ID NO: 5457842 - DNA, 25 bp, Homo sapien
gaaggcctggtcttcggccagttca

SEQ ID NO: 5457843 - DNA, 25 bp, Homo sapien
ggtggaagaacaccgacacacattt

SEQ ID NO: 5457844 - DNA, 25 bp, Homo sapien
ctcccggaagcacgatgccatgggc

SEQ ID NO: 5457845 - DNA, 25 bp, Homo sapien
cagaaaccaacgactttaagcaggg

SEQ ID NO: 5457846 - DNA, 25 bp, Homo sapien
gacagctgacatgggttacatgagg

SEQ ID NO: 5457847 - DNA, 25 bp, Homo sapien
agagccaaagtacaacagcttctgg

SEQ ID NO: 5457848 - DNA, 25 bp, Homo sapien
ttctggaagccctcggcatcctggt

SEQ ID NO: 5457849 - DNA, 25 bp, Homo sapien
cgggttgtgtagcctgatctgcctc

SEQ ID NO: 5457850 - DNA, 25 bp, Homo sapien
tggtcctccgggcacttgtgcttta

SEQ ID NO: 5457851 - DNA, 25 bp, Homo sapien
ctggggcagagatgggggagtcttg

SEQ ID NO: 5457852 - DNA, 25 bp, Homo sapien
cagagatgggggagtcttgggggaa

SEQ ID NO: 5457853 - DNA, 25 bp, Homo sapien
gggaacccaccagggcctctgtggc

SEQ ID NO: 5457854 - DNA, 25 bp, Homo sapien
cccaccagggcctctgtggccccag

SEQ ID NO: 5457855 - DNA, 25 bp, Homo sapien
ctcctctgccggctgcccgccccgt

SEQ ID NO: 5457856 - DNA, 25 bp, Homo sapien
agcctgcagctggatgctgctcctc

SEQ ID NO: 5457857 - DNA, 25 bp, Homo sapien
cctctgccggctgcccgccccgtac

SEQ ID NO: 5457858 - DNA, 25 bp, Homo sapien
cctgcagctggatgctgctcctctg

SEQ ID NO: 5457859 - DNA, 25 bp, Homo sapien
ccccgtggcgggcagcatctggaat

SEQ ID NO: 5457860 - DNA, 25 bp, Homo sapien
ggtcaccttgatctgagaggcctgg

SEQ ID NO: 5457861 - DNA, 25 bp, Homo sapien
gctgtaaggggctgaaaggtcacct

SEQ ID NO: 5457862 - DNA, 25 bp, Homo sapien
gtggcctgcacctcgtagatgacgg

SEQ ID NO: 5457863 - DNA, 25 bp, Homo sapien
gtggcccgtaggccgacacagaaca

SEQ ID NO: 5457864 - DNA, 25 bp, Homo sapien
agaacatcccctccgctttctcaaa

SEQ ID NO: 5457865 - DNA, 25 bp, Homo sapien
atggtgggcggcagatcagcctgtg

SEQ ID NO: 5457866 - DNA, 25 bp, Homo sapien
gaaaaaggcctcagtcgtatctccc

SEQ ID NO: 5457867 - DNA, 25 bp, Homo sapien
agcgtgagggttatgcctgggctca

SEQ ID NO: 5457868 - DNA, 25 bp, Homo sapien
tgggctgagggatgaccgtgaagaa

SEQ ID NO: 5457869 - DNA, 25 bp, Homo sapien
agggatgaccgtgaagaagaacttg

SEQ ID NO: 5457870 - DNA, 25 bp, Homo sapien
cgcctccagaggccggaagacgatg

SEQ ID NO: 5457871 - DNA, 25 bp, Homo sapien
tgagagaagatatccacaacgcata

SEQ ID NO: 5457872 - DNA, 25 bp, Homo sapien
ttatggtacaggcacacattgggac

SEQ ID NO: 5457873 - DNA, 25 bp, Homo sapien
gaatagaaggttccatcccgcaagg

SEQ ID NO: 5457874 - DNA, 25 bp, Homo sapien
tgccaacagtcccaaatagaaacag

SEQ ID NO: 5457875 - DNA, 25 bp, Homo sapien
ggtccttgatcccttatactggtac

SEQ ID NO: 5457876 - DNA, 25 bp, Homo sapien
tactgcacgtattttaaacactcac

SEQ ID NO: 5457877 - DNA, 25 bp, Homo sapien
aagagagcctgctttcggggctcaa

SEQ ID NO: 5457878 - DNA, 25 bp, Homo sapien
tggcttttatatggcatgttaaagg

SEQ ID NO: 5457879 - DNA, 25 bp, Homo sapien
tcaaggatcgatttttcagaaccag

SEQ ID NO: 5457880 - DNA, 25 bp, Homo sapien
ttttcagaaccagattccttgtggt

SEQ ID NO: 5457881 - DNA, 25 bp, Homo sapien
gaaccagattccttgtggtctcctt

SEQ ID NO: 5457882 - DNA, 25 bp, Homo sapien
ctggagtttcaaggatcgatttttc

SEQ ID NO: 5457883 - DNA, 25 bp, Homo sapien
gtgcatctgagtgtccatggagctt

SEQ ID NO: 5457884 - DNA, 25 bp, Homo sapien
gagtgcatctgagtgtccatggagc

SEQ ID NO: 5457885 - DNA, 25 bp, Homo sapien
atctgagtgtccatggagcttgcgg

SEQ ID NO: 5457886 - DNA, 25 bp, Homo sapien
gcatctgagtgtccatggagcttgc

SEQ ID NO: 5457887 - DNA, 25 bp, Homo sapien
gctcctggtgattgatgctagtgct

SEQ ID NO: 5457888 - DNA, 25 bp, Homo sapien
tagtgctgccatgtgcggcgtctcc

SEQ ID NO: 5457889 - DNA, 25 bp, Homo sapien
ttccataggcttatccatcacccct

SEQ ID NO: 5457890 - DNA, 25 bp, Homo sapien
tgatgctagtgctgccatgtgcggc

SEQ ID NO: 5457891 - DNA, 25 bp, Homo sapien
ggcaggatccaccagagttcacggt

SEQ ID NO: 5457892 - DNA, 25 bp, Homo sapien
cactgctgtcgttgatggcagggat

SEQ ID NO: 5457893 - DNA, 25 bp, Homo sapien
tcatggctgcactgctgtcgttgat

SEQ ID NO: 5457894 - DNA, 25 bp, Homo sapien
ttcctggacctcacgacggagcttg

SEQ ID NO: 5457895 - DNA, 25 bp, Homo sapien
gggacacagtccaaagggagcactc

SEQ ID NO: 5457896 - DNA, 25 bp, Homo sapien
tccttgggacacagtccaaagggag

SEQ ID NO: 5457897 - DNA, 25 bp, Homo sapien
gacacagtccaaagggagcactctg

SEQ ID NO: 5457898 - DNA, 25 bp, Homo sapien
tccaaagggagcactctgagtatgg

SEQ ID NO: 5457899 - DNA, 25 bp, Homo sapien
agctctggcaacaggtgctacctgg

SEQ ID NO: 5457900 - DNA, 25 bp, Homo sapien
ggaggagagggtctgcttcccagct

SEQ ID NO: 5457901 - DNA, 25 bp, Homo sapien
gaggctgtacacgagatccagggct

SEQ ID NO: 5457902 - DNA, 25 bp, Homo sapien
gaggagactctcatggccatccttg

SEQ ID NO: 5457903 - DNA, 25 bp, Homo sapien
aagctccagtgggtgttactgaagt

SEQ ID NO: 5457904 - DNA, 25 bp, Homo sapien
ttggcactgctcagcaagctccagt

SEQ ID NO: 5457905 - DNA, 25 bp, Homo sapien
gaaggcactccaaagagggacttgg

SEQ ID NO: 5457906 - DNA, 25 bp, Homo sapien
gcccaccccactaggcccctccatg

SEQ ID NO: 5457907 - DNA, 25 bp, Homo sapien
tttatctggcttttactctctgctt

SEQ ID NO: 5457908 - DNA, 25 bp, Homo sapien
caaatgagactgatggattctccac

SEQ ID NO: 5457909 - DNA, 25 bp, Homo sapien
aatgagactgatggattctccacct

SEQ ID NO: 5457910 - DNA, 25 bp, Homo sapien
aggcaaatgagactgatggattctc

SEQ ID NO: 5457911 - DNA, 25 bp, Homo sapien
aaagaagaggcaaatgagactgatg

SEQ ID NO: 5457912 - DNA, 25 bp, Homo sapien
taaatcaatcaaagcataagtcaat

SEQ ID NO: 5457913 - DNA, 25 bp, Homo sapien
cataagtcaatccatctccagagca

SEQ ID NO: 5457914 - DNA, 25 bp, Homo sapien
tatgccagatgctatgtatgcatac

SEQ ID NO: 5457915 - DNA, 25 bp, Homo sapien
agggatcctcgatgactgtagctga

SEQ ID NO: 5457916 - DNA, 25 bp, Homo sapien
cagtttatgattacgtgtgacttgc

SEQ ID NO: 5457917 - DNA, 25 bp, Homo sapien
cattggacagcatcactttaatacc

SEQ ID NO: 5457918 - DNA, 25 bp, Homo sapien
ttaacatgtactgagaatccacgtg

SEQ ID NO: 5457919 - DNA, 25 bp, Homo sapien
acatatggctattggctaccacatt

SEQ ID NO: 5457920 - DNA, 25 bp, Homo sapien
acaatttcatgatcaccctttagga

SEQ ID NO: 5457921 - DNA, 25 bp, Homo sapien
cagtcgttcgttcattcacaaagca

SEQ ID NO: 5457922 - DNA, 25 bp, Homo sapien
ccaaagcggaagattctgttgaccc

SEQ ID NO: 5457923 - DNA, 25 bp, Homo sapien
tagttggcaacatgtctaaaccctc

SEQ ID NO: 5457924 - DNA, 25 bp, Homo sapien
gtgaactggacgttcagatgaaatc

SEQ ID NO: 5457925 - DNA, 25 bp, Homo sapien
ctggacgttcagatgaaatcaaaga

SEQ ID NO: 5457926 - DNA, 25 bp, Homo sapien
ctccaattgtgaactggacgttcag

SEQ ID NO: 5457927 - DNA, 25 bp, Homo sapien
tccaattgtgaactggacgttcaga

SEQ ID NO: 5457928 - DNA, 25 bp, Homo sapien
ggtcttgcagccctgtcctgactca

SEQ ID NO: 5457929 - DNA, 25 bp, Homo sapien
gactgtacagacagctcctgcctca

SEQ ID NO: 5457930 - DNA, 25 bp, Homo sapien
actcattaatgcctctgacctcagg

SEQ ID NO: 5457931 - DNA, 25 bp, Homo sapien
gtccattacttttctgccacgggat

SEQ ID NO: 5457932 - DNA, 25 bp, Homo sapien
cctgctggtagtaactgtgggcttc

SEQ ID NO: 5457933 - DNA, 25 bp, Homo sapien
caagattcgtagaaggcgaaggcac

SEQ ID NO: 5457934 - DNA, 25 bp, Homo sapien
tctccatagatacaggacgcgcagg

SEQ ID NO: 5457935 - DNA, 25 bp, Homo sapien
gcagcccgagtaagtcaagattcgt

SEQ ID NO: 5457936 - DNA, 25 bp, Homo sapien
tgagccgtacaccagctggccttag

SEQ ID NO: 5457937 - DNA, 25 bp, Homo sapien
tgtgagccgtacaccagctggcctt

SEQ ID NO: 5457938 - DNA, 25 bp, Homo sapien
gagccgtacaccagctggccttaga

SEQ ID NO: 5457939 - DNA, 25 bp, Homo sapien
gtgagccgtacaccagctggcctta

SEQ ID NO: 5457940 - DNA, 25 bp, Homo sapien
ttgtacttttgttgtggagatggag

SEQ ID NO: 5457941 - DNA, 25 bp, Homo sapien
tattattattgttaccaagataggg

SEQ ID NO: 5457942 - DNA, 25 bp, Homo sapien
aagcgatcctcctacatcaccccct

SEQ ID NO: 5457943 - DNA, 25 bp, Homo sapien
caatctgccaccaccagtagctggg

SEQ ID NO: 5457944 - DNA, 25 bp, Homo sapien
ggccattcagaagtgtgtgcagaag

SEQ ID NO: 5457945 - DNA, 25 bp, Homo sapien
agtttttccaagttggccattcaga

SEQ ID NO: 5457946 - DNA, 25 bp, Homo sapien
aagccagatgcagatgcacctggag

SEQ ID NO: 5457947 - DNA, 25 bp, Homo sapien
cacctggagtttgttaggggaacag

SEQ ID NO: 5457948 - DNA, 25 bp, Homo sapien
aataaggtatgggagactgaccggc

SEQ ID NO: 5457949 - DNA, 25 bp, Homo sapien
cctaagatggatggaatgggccctc

SEQ ID NO: 5457950 - DNA, 25 bp, Homo sapien
aatgtcatacctcagaatggccggg

SEQ ID NO: 5457951 - DNA, 25 bp, Homo sapien
agctctatgactacaccacgacggg

SEQ ID NO: 5457952 - DNA, 25 bp, Homo sapien
ctccctgccccggacatgcccagtg

SEQ ID NO: 5457953 - DNA, 25 bp, Homo sapien
cctcttctagcaggagacgccccag

SEQ ID NO: 5457954 - DNA, 25 bp, Homo sapien
ggagacgccccaggcggtagagcag

SEQ ID NO: 5457955 - DNA, 25 bp, Homo sapien
ctgccccggacatgcccagtgggtg

SEQ ID NO: 5457956 - DNA, 25 bp, Homo sapien
ccatgccaagctgtgaaagagtctc

SEQ ID NO: 5457957 - DNA, 25 bp, Homo sapien
tgagtctcgatgacctggaaggctc

SEQ ID NO: 5457958 - DNA, 25 bp, Homo sapien
gccacgtgtgtagagacagctgcca

SEQ ID NO: 5457959 - DNA, 25 bp, Homo sapien
gattgtcagccgtaaagagcaggtg

SEQ ID NO: 5457960 - DNA, 25 bp, Homo sapien
tccatctgtccagcttgctctgtct

SEQ ID NO: 5457961 - DNA, 25 bp, Homo sapien
ggacagggccctatcgccctaggct

SEQ ID NO: 5457962 - DNA, 25 bp, Homo sapien
gaggccttgtctggcagcctggctt

SEQ ID NO: 5457963 - DNA, 25 bp, Homo sapien
ccaaaatgtccagcttcagggcaca

SEQ ID NO: 5457964 - DNA, 25 bp, Homo sapien
aggcagtcacggtcaggagcagcct

SEQ ID NO: 5457965 - DNA, 25 bp, Homo sapien
cagccttggagagcgccgctgatgt

SEQ ID NO: 5457966 - DNA, 25 bp, Homo sapien
aggcatgggatgagcaggcagtcac

SEQ ID NO: 5457967 - DNA, 25 bp, Homo sapien
tggagagcgccgctgatgtcctctt

SEQ ID NO: 5457968 - DNA, 25 bp, Homo sapien
tcaccttctcggcactactcctcct

SEQ ID NO: 5457969 - DNA, 25 bp, Homo sapien
cttcaccttctcggcactactcctc

SEQ ID NO: 5457970 - DNA, 25 bp, Homo sapien
ggctcttcaccttctcggcactact

SEQ ID NO: 5457971 - DNA, 25 bp, Homo sapien
ctcttcaccttctcggcactactcc

SEQ ID NO: 5457972 - DNA, 25 bp, Homo sapien
ccatgccctgcggccccggccccgg

SEQ ID NO: 5457973 - DNA, 25 bp, Homo sapien
gcccagccccccggcggcggctcac

SEQ ID NO: 5457974 - DNA, 25 bp, Homo sapien
catgccctgcggccccggccccggg

SEQ ID NO: 5457975 - DNA, 25 bp, Homo sapien
ggcccagccccccggcggcggctca

SEQ ID NO: 5457976 - DNA, 25 bp, Homo sapien
gcgcgccagcagtccatacttattg

SEQ ID NO: 5457977 - DNA, 25 bp, Homo sapien
cggagcaatgcacgtgggcctttga

SEQ ID NO: 5457978 - DNA, 25 bp, Homo sapien
tacttattgcggtcgcggtctgatg

SEQ ID NO: 5457979 - DNA, 25 bp, Homo sapien
ggcctttgactcgtaatacacccag

SEQ ID NO: 5457980 - DNA, 25 bp, Homo sapien
caccgagatagccagcgagttcagg

SEQ ID NO: 5457981 - DNA, 25 bp, Homo sapien
tagccagcgagttcaggcggtcctt

SEQ ID NO: 5457982 - DNA, 25 bp, Homo sapien
ccagcgagttcaggcggtccttgca

SEQ ID NO: 5457983 - DNA, 25 bp, Homo sapien
agatagccagcgagttcaggcggtc

SEQ ID NO: 5457984 - DNA, 25 bp, Homo sapien
gccgaggtgcaggtgtaggcgcagc

SEQ ID NO: 5457985 - DNA, 25 bp, Homo sapien
ggagaggaatgtgcgcgaaatcaac

SEQ ID NO: 5457986 - DNA, 25 bp, Homo sapien
tgtaggcgcagcctcgcccagaact

SEQ ID NO: 5457987 - DNA, 25 bp, Homo sapien
aaccagagcgaaatcagccggagga

SEQ ID NO: 5457988 - DNA, 25 bp, Homo sapien
aggactacacctttcagcgcccggt

SEQ ID NO: 5457989 - DNA, 25 bp, Homo sapien
ttcactggtaggtggaggtcccctc

SEQ ID NO: 5457990 - DNA, 25 bp, Homo sapien
gctgtcttcagctccgggtatccat

SEQ ID NO: 5457991 - DNA, 25 bp, Homo sapien
cacggcggtatcacaaatctggagg

SEQ ID NO: 5457992 - DNA, 25 bp, Homo sapien
agcccgtggcccggatccttatctg

SEQ ID NO: 5457993 - DNA, 25 bp, Homo sapien
ggcccggatccttatctgcattcct

SEQ ID NO: 5457994 - DNA, 25 bp, Homo sapien
cgtggcccggatccttatctgcatt

SEQ ID NO: 5457995 - DNA, 25 bp, Homo sapien
gatccttatctgcattcctcggcgc

SEQ ID NO: 5457996 - DNA, 25 bp, Homo sapien
gctgtgcagaaggttaggccgggag

SEQ ID NO: 5457997 - DNA, 25 bp, Homo sapien
ttcaaaatgaaaggggcacagctgt

SEQ ID NO: 5457998 - DNA, 25 bp, Homo sapien
tgcctcaggggtgccgaaaagtttc

SEQ ID NO: 5457999 - DNA, 25 bp, Homo sapien
tgcagaaggttaggccgggagggac

SEQ ID NO: 5458000 - DNA, 25 bp, Homo sapien
ttggggatgccgacactcctgcctg

SEQ ID NO: 5458001 - DNA, 25 bp, Homo sapien
caggtggccgtgcttcggtggcggc

SEQ ID NO: 5458002 - DNA, 25 bp, Homo sapien
tggcggcgcgctggtagggcggatc

SEQ ID NO: 5458003 - DNA, 25 bp, Homo sapien
cagccagtcgagaaaatgtgccagg

SEQ ID NO: 5458004 - DNA, 25 bp, Homo sapien
ggagctgcgagcgatcttgccttca

SEQ ID NO: 5458005 - DNA, 25 bp, Homo sapien
aagatgatgtctggattgtaattgg

SEQ ID NO: 5458006 - DNA, 25 bp, Homo sapien
ggtcggcgcctgtgttctcctcgtc

SEQ ID NO: 5458007 - DNA, 25 bp, Homo sapien
atagcgtccgctggcgcccagggtc

SEQ ID NO: 5458008 - DNA, 25 bp, Homo sapien
gcggcgggcgaggtctcctggtggg

SEQ ID NO: 5458009 - DNA, 25 bp, Homo sapien
agcggcgggcgaggtctcctggtgg

SEQ ID NO: 5458010 - DNA, 25 bp, Homo sapien
gagcggcgggcgaggtctcctggtg

SEQ ID NO: 5458011 - DNA, 25 bp, Homo sapien
cgggggctcaggcgtccgggtggct

SEQ ID NO: 5458012 - DNA, 25 bp, Homo sapien
caggcgcgtcgacgggagcgctgcg

SEQ ID NO: 5458013 - DNA, 25 bp, Homo sapien
tccaggcgggggcgccatgggcggc

SEQ ID NO: 5458014 - DNA, 25 bp, Homo sapien
ctgatgggcaggcgcgtcgacggga

SEQ ID NO: 5458015 - DNA, 25 bp, Homo sapien
gctcgccggccgccaataaataggc

SEQ ID NO: 5458016 - DNA, 25 bp, Homo sapien
cgggctcgccggccgccaataaata

SEQ ID NO: 5458017 - DNA, 25 bp, Homo sapien
tcgccggccgccaataaataggccg

SEQ ID NO: 5458018 - DNA, 25 bp, Homo sapien
ggctcgccggccgccaataaatagg

SEQ ID NO: 5458019 - DNA, 25 bp, Homo sapien
cgggcggcggggctgcgggccgccg

SEQ ID NO: 5458020 - DNA, 25 bp, Homo sapien
gcggcggggctgcgggccgccgggc

SEQ ID NO: 5458021 - DNA, 25 bp, Homo sapien
ggcggggctgcgggccgccgggctg

SEQ ID NO: 5458022 - DNA, 25 bp, Homo sapien
gcggggctgcgggccgccgggctgg

SEQ ID NO: 5458023 - DNA, 25 bp, Homo sapien
gggctgcagggccccgcggttagca

SEQ ID NO: 5458024 - DNA, 25 bp, Homo sapien
cggcgggctgcagggccccgcggtt

SEQ ID NO: 5458025 - DNA, 25 bp, Homo sapien
gcgggctgcagggccccgcggttag

SEQ ID NO: 5458026 - DNA, 25 bp, Homo sapien
ggctgcagggccccgcggttagcac

SEQ ID NO: 5458027 - DNA, 25 bp, Homo sapien
aaatggaagagatccgggctcgggc

SEQ ID NO: 5458028 - DNA, 25 bp, Homo sapien
gcctcctgtgcgctcgacagcgaac

SEQ ID NO: 5458029 - DNA, 25 bp, Homo sapien
cggcccggcggtcaggcggctcggg

SEQ ID NO: 5458030 - DNA, 25 bp, Homo sapien
cggctcgggcggagcgggagctgct

SEQ ID NO: 5458031 - DNA, 25 bp, Homo sapien
cagcaagggcagcacagcctcctcc

SEQ ID NO: 5458032 - DNA, 25 bp, Homo sapien
ctgcagcaagggcagcacagcctcc

SEQ ID NO: 5458033 - DNA, 25 bp, Homo sapien
tgcagcaagggcagcacagcctcct

SEQ ID NO: 5458034 - DNA, 25 bp, Homo sapien
gcaagggcagcacagcctcctcccc

SEQ ID NO: 5458035 - DNA, 25 bp, Homo sapien
acggagaccgcaacccacggcgcgg

SEQ ID NO: 5458036 - DNA, 25 bp, Homo sapien
gggcagtggccggaccgcacagccg

SEQ ID NO: 5458037 - DNA, 25 bp, Homo sapien
cctaccggctcttcgcggctctggg

SEQ ID NO: 5458038 - DNA, 25 bp, Homo sapien
aggcgcaaacctcccggacaggagc

SEQ ID NO: 5458039 - DNA, 25 bp, Homo sapien
gggcttggtatgaatgccaaaatga

SEQ ID NO: 5458040 - DNA, 25 bp, Homo sapien
acagaataccgaggaaccccgactg

SEQ ID NO: 5458041 - DNA, 25 bp, Homo sapien
gccaaaatgatgcaaagccaccgga

SEQ ID NO: 5458042 - DNA, 25 bp, Homo sapien
accccgactgaccatgttaaagagg

SEQ ID NO: 5458043 - DNA, 25 bp, Homo sapien
atttactcacactctctggatcggt

SEQ ID NO: 5458044 - DNA, 25 bp, Homo sapien
ctgaaaagcagggattgaagcccat

SEQ ID NO: 5458045 - DNA, 25 bp, Homo sapien
gaatgaattaggatcccttctgcca

SEQ ID NO: 5458046 - DNA, 25 bp, Homo sapien
tcgaaacggccaaaggagctattac

SEQ ID NO: 5458047 - DNA, 25 bp, Homo sapien
gaggaaaccctaatatcgtctcaca

SEQ ID NO: 5458048 - DNA, 25 bp, Homo sapien
tcaggttcagagcttgtccaatagg

SEQ ID NO: 5458049 - DNA, 25 bp, Homo sapien
caggcccttgttgactccacggtaa

SEQ ID NO: 5458050 - DNA, 25 bp, Homo sapien
cctagtaatgatgaagagccaagtt

SEQ ID NO: 5458051 - DNA, 25 bp, Homo sapien
cagagtgccccaaacaaaacagact

SEQ ID NO: 5458052 - DNA, 25 bp, Homo sapien
taaaaccacccaagatactgctggt

SEQ ID NO: 5458053 - DNA, 25 bp, Homo sapien
gaacaaataactcactgagcgccat

SEQ ID NO: 5458054 - DNA, 25 bp, Homo sapien
cctcatggaactttattctagtaaa

SEQ ID NO: 5458055 - DNA, 25 bp, Homo sapien
gaatgggctatattgctgaccagga

SEQ ID NO: 5458056 - DNA, 25 bp, Homo sapien
caacagcagagaacacttcagggtt

SEQ ID NO: 5458057 - DNA, 25 bp, Homo sapien
acctagggtgctctgtgatgactca

SEQ ID NO: 5458058 - DNA, 25 bp, Homo sapien
accaggaagggagatataggaagcc

SEQ ID NO: 5458059 - DNA, 25 bp, Homo sapien
gaaatccccgctaggcaacaatgct

SEQ ID NO: 5458060 - DNA, 25 bp, Homo sapien
gaaaaccactcaagtagggccatca

SEQ ID NO: 5458061 - DNA, 25 bp, Homo sapien
taattcacacctatgaaagagggca

SEQ ID NO: 5458062 - DNA, 25 bp, Homo sapien
gcactgctcttgatccctgagtgga

SEQ ID NO: 5458063 - DNA, 25 bp, Homo sapien
gaataaaatttatggagcagccacg

SEQ ID NO: 5458064 - DNA, 25 bp, Homo sapien
caattttgagggattcacaggcctc

SEQ ID NO: 5458065 - DNA, 25 bp, Homo sapien
ccaaagcaattgaaagagtcccttc

SEQ ID NO: 5458066 - DNA, 25 bp, Homo sapien
tatttaagcaataccccaatggaga

SEQ ID NO: 5458067 - DNA, 25 bp, Homo sapien
gagccaaaattgtgcgattgtactc

SEQ ID NO: 5458068 - DNA, 25 bp, Homo sapien
caaaattgtgcgattgtactccagc

SEQ ID NO: 5458069 - DNA, 25 bp, Homo sapien
agtgagccaaaattgtgcgattgta

SEQ ID NO: 5458070 - DNA, 25 bp, Homo sapien
ctaggcaacaagagcaagactccat

SEQ ID NO: 5458071 - DNA, 25 bp, Homo sapien
gacatcaggacagaaacgccagtat

SEQ ID NO: 5458072 - DNA, 25 bp, Homo sapien
taaggaggcatttaaccatcgaaag

SEQ ID NO: 5458073 - DNA, 25 bp, Homo sapien
gaggattgataaactaccccacgtg

SEQ ID NO: 5458074 - DNA, 25 bp, Homo sapien
tgaaggaccagactgatggctagac

SEQ ID NO: 5458075 - DNA, 25 bp, Homo sapien
cctgtgggcctgtcaacatcaactt

SEQ ID NO: 5458076 - DNA, 25 bp, Homo sapien
tctcgcccttacaggaggcctctga

SEQ ID NO: 5458077 - DNA, 25 bp, Homo sapien
tgccctatatacctaaagtccatgg

SEQ ID NO: 5458078 - DNA, 25 bp, Homo sapien
agagcacgggattctcagagactgg

SEQ ID NO: 5458079 - DNA, 25 bp, Homo sapien
cttgacctttgacagctgaggtctc

SEQ ID NO: 5458080 - DNA, 25 bp, Homo sapien
ttaactgaagagaccccttggcttc

SEQ ID NO: 5458081 - DNA, 25 bp, Homo sapien
tcactggccatcaccggaagtggga

SEQ ID NO: 5458082 - DNA, 25 bp, Homo sapien
gacagcaaatgcgatataagaccct

SEQ ID NO: 5458083 - DNA, 25 bp, Homo sapien
ccctaagcaggagatgtagattccc

SEQ ID NO: 5458084 - DNA, 25 bp, Homo sapien
gaatagcctcgctgactatcactgg

SEQ ID NO: 5458085 - DNA, 25 bp, Homo sapien
tgaagcagcaattccagggaccact

SEQ ID NO: 5458086 - DNA, 25 bp, Homo sapien
tagacacctacaatttggagcctgg

SEQ ID NO: 5458087 - DNA, 25 bp, Homo sapien
ctctcagaacaccatccaggaagct

SEQ ID NO: 5458088 - DNA, 25 bp, Homo sapien
ccaagggaagatgtgcaagaccatg

SEQ ID NO: 5458089 - DNA, 25 bp, Homo sapien
ctggtttacacattggctatcgatt

SEQ ID NO: 5458090 - DNA, 25 bp, Homo sapien
tcgattccttgcagggaagcactgt

SEQ ID NO: 5458091 - DNA, 25 bp, Homo sapien
ggagaccagttgttctggctggttt

SEQ ID NO: 5458092 - DNA, 25 bp, Homo sapien
cattggctatcgattccttgcaggg

SEQ ID NO: 5458093 - DNA, 25 bp, Homo sapien
gtggtgactgccatatacagatcct

SEQ ID NO: 5458094 - DNA, 25 bp, Homo sapien
catatacagatcctgcagattcatg

SEQ ID NO: 5458095 - DNA, 25 bp, Homo sapien
catgacaaagggctttccatcacca

SEQ ID NO: 5458096 - DNA, 25 bp, Homo sapien
gctttccatcaccaatgctgcatgc

SEQ ID NO: 5458097 - DNA, 25 bp, Homo sapien
tcccagccaagttagcaggtcccca

SEQ ID NO: 5458098 - DNA, 25 bp, Homo sapien
ccagccaagttagcaggtccccaag

SEQ ID NO: 5458099 - DNA, 25 bp, Homo sapien
agccaagttagcaggtccccaagag

SEQ ID NO: 5458100 - DNA, 25 bp, Homo sapien
caagttagcaggtccccaagagcag

SEQ ID NO: 5458101 - DNA, 25 bp, Homo sapien
gattggcccataccttgggtcaagg

SEQ ID NO: 5458102 - DNA, 25 bp, Homo sapien
ggcccataccttgggtcaagggcac

SEQ ID NO: 5458103 - DNA, 25 bp, Homo sapien
gaaccaacccaagaatcctggattg

SEQ ID NO: 5458104 - DNA, 25 bp, Homo sapien
gaatcctggattggcccataccttg

SEQ ID NO: 5458105 - DNA, 25 bp, Homo sapien
tctaggccaatatgccgggtctcca

SEQ ID NO: 5458106 - DNA, 25 bp, Homo sapien
tatgccgggtctccagttttgatgg

SEQ ID NO: 5458107 - DNA, 25 bp, Homo sapien
cgatgcagcatgtagagttctaggc

SEQ ID NO: 5458108 - DNA, 25 bp, Homo sapien
catgataaaaagagaccgatgcagc

SEQ ID NO: 5458109 - DNA, 25 bp, Homo sapien
tgctgattagtagtaggattgtgcc

SEQ ID NO: 5458110 - DNA, 25 bp, Homo sapien
cacaggttgttaacagagcaggtca

SEQ ID NO: 5458111 - DNA, 25 bp, Homo sapien
tacgccaatcaggtgtccgcactaa

SEQ ID NO: 5458112 - DNA, 25 bp, Homo sapien
aacgggcgaccaccagattgcctaa

SEQ ID NO: 5458113 - DNA, 25 bp, Homo sapien
caactatgccaaaagagctaaggga

SEQ ID NO: 5458114 - DNA, 25 bp, Homo sapien
tgtcccctagtggttgagaacagta

SEQ ID NO: 5458115 - DNA, 25 bp, Homo sapien
gtcaccgcactgcatgaatccagga

SEQ ID NO: 5458116 - DNA, 25 bp, Homo sapien
gctgcaaatgtctagctagagagct

SEQ ID NO: 5458117 - DNA, 25 bp, Homo sapien
ggtgttcccttacaagagggtgcaa

SEQ ID NO: 5458118 - DNA, 25 bp, Homo sapien
cagggtgttcccttacaagagggtg

SEQ ID NO: 5458119 - DNA, 25 bp, Homo sapien
agggtgcaagatctatcaaggctac

SEQ ID NO: 5458120 - DNA, 25 bp, Homo sapien
ccttacaagagggtgcaagatctat

SEQ ID NO: 5458121 - DNA, 25 bp, Homo sapien
gatatggtgtcctgcttcaacaagc

SEQ ID NO: 5458122 - DNA, 25 bp, Homo sapien
caaagagcctatgcttggaacagaa

SEQ ID NO: 5458123 - DNA, 25 bp, Homo sapien
taaaggaggcctacaacagatggat

SEQ ID NO: 5458124 - DNA, 25 bp, Homo sapien
cattgataatgagtgctgagagagc

SEQ ID NO: 5458125 - DNA, 25 bp, Homo sapien
tgccccacgcgcttggccagcatca

SEQ ID NO: 5458126 - DNA, 25 bp, Homo sapien
gccccacgcgcttggccagcatcat

SEQ ID NO: 5458127 - DNA, 25 bp, Homo sapien
tccaaggtattccatacttggaata

SEQ ID NO: 5458128 - DNA, 25 bp, Homo sapien
catttccaaggtattccatacttgg

SEQ ID NO: 5458129 - DNA, 25 bp, Homo sapien
aagatccttggcaaacctattaagc

SEQ ID NO: 5458130 - DNA, 25 bp, Homo sapien
ctgtatgagcctaagatccttggca

SEQ ID NO: 5458131 - DNA, 25 bp, Homo sapien
cctggtcagtaacaaagagatgcac

SEQ ID NO: 5458132 - DNA, 25 bp, Homo sapien
tgaaggcctctaggcaacagtgagc

SEQ ID NO: 5458133 - DNA, 25 bp, Homo sapien
gaacagtaaacatcgcagggaaaag

SEQ ID NO: 5458134 - DNA, 25 bp, Homo sapien
cagactgatgtctctaagccaggga

SEQ ID NO: 5458135 - DNA, 25 bp, Homo sapien
aaaactctgggaagtcctctgacac

SEQ ID NO: 5458136 - DNA, 25 bp, Homo sapien
taagtacagctagaaccagtcctca

SEQ ID NO: 5458137 - DNA, 25 bp, Homo sapien
aggctccgtcccacaaaacatcagg

SEQ ID NO: 5458138 - DNA, 25 bp, Homo sapien
aatatttgccataactaagccaggc

SEQ ID NO: 5458139 - DNA, 25 bp, Homo sapien
catgatggaagaatactggaccgga

SEQ ID NO: 5458140 - DNA, 25 bp, Homo sapien
tgaattgaaagaccctgcatggctg

SEQ ID NO: 5458141 - DNA, 25 bp, Homo sapien
catgtcccaatgtgagagagtcctc

SEQ ID NO: 5458142 - DNA, 25 bp, Homo sapien
taacacgtggcaaggcaatctgaca

SEQ ID NO: 5458143 - DNA, 25 bp, Homo sapien
tcggagaactgacacacataatagg

SEQ ID NO: 5458144 - DNA, 25 bp, Homo sapien
taggttataaaaggactgcaggtcc

SEQ ID NO: 5458145 - DNA, 25 bp, Homo sapien
tatgtctaaggctaccaataggtga

SEQ ID NO: 5458146 - DNA, 25 bp, Homo sapien
ccgaagttgggactgcctttcagaa

SEQ ID NO: 5458147 - DNA, 25 bp, Homo sapien
cttgggtgaccccatgacccttctg

SEQ ID NO: 5458148 - DNA, 25 bp, Homo sapien
gtaggaccccgggcaagcagagtaa

SEQ ID NO: 5458149 - DNA, 25 bp, Homo sapien
ttcagtcttgggtgaccccatgacc

SEQ ID NO: 5458150 - DNA, 25 bp, Homo sapien
ccttctgtgtcctgtttgtaggacc

SEQ ID NO: 5458151 - DNA, 25 bp, Homo sapien
aggccacaattatctactccccatt

SEQ ID NO: 5458152 - DNA, 25 bp, Homo sapien
tgtgattttccacaacctactgtgc

SEQ ID NO: 5458153 - DNA, 25 bp, Homo sapien
aagacagcccccaaatggtagccct

SEQ ID NO: 5458154 - DNA, 25 bp, Homo sapien
agcccccaaatggtagccctaagct

SEQ ID NO: 5458155 - DNA, 25 bp, Homo sapien
tcaatcagtccacttccgcctctta

SEQ ID NO: 5458156 - DNA, 25 bp, Homo sapien
caatcagtccacttccgcctcttac

SEQ ID NO: 5458157 - DNA, 25 bp, Homo sapien
aagggcattccaaccacacaagcca

SEQ ID NO: 5458158 - DNA, 25 bp, Homo sapien
ccttatcagactttctatgggcaac

SEQ ID NO: 5458159 - DNA, 25 bp, Homo sapien
tatgggcaactttttcagacaaagg

SEQ ID NO: 5458160 - DNA, 25 bp, Homo sapien
taagtacatctcaagccttatcaga

SEQ ID NO: 5458161 - DNA, 25 bp, Homo sapien
tcataaattgttccaagaaggaatt

SEQ ID NO: 5458162 - DNA, 25 bp, Homo sapien
cataaattgttccaagaaggaattt

SEQ ID NO: 5458163 - DNA, 25 bp, Homo sapien
atcataaattgttccaagaaggaat

SEQ ID NO: 5458164 - DNA, 25 bp, Homo sapien
aatatgagtcatacaggatgagttt

SEQ ID NO: 5458165 - DNA, 25 bp, Homo sapien
gaaatatgagtcatacaggatgagt

SEQ ID NO: 5458166 - DNA, 25 bp, Homo sapien
aaatatgagtcatacaggatgagtt

SEQ ID NO: 5458167 - DNA, 25 bp, Homo sapien
cactgtaatgccagactcatgccca

SEQ ID NO: 5458168 - DNA, 25 bp, Homo sapien
tcatgcccatcagaggacgaatcaa

SEQ ID NO: 5458169 - DNA, 25 bp, Homo sapien
ggatctctaggtctttcatatgaag

SEQ ID NO: 5458170 - DNA, 25 bp, Homo sapien
tatgaagtaacgttgctagctccct

SEQ ID NO: 5458171 - DNA, 25 bp, Homo sapien
cacccgtagaatcagtgcatctgcc

SEQ ID NO: 5458172 - DNA, 25 bp, Homo sapien
gcagcgtccttcaacaatgggcgaa

SEQ ID NO: 5458173 - DNA, 25 bp, Homo sapien
ttatccaaatgacagaggaaagctg

SEQ ID NO: 5458174 - DNA, 25 bp, Homo sapien
agagagctcacttcgcacccgtaga

SEQ ID NO: 5458175 - DNA, 25 bp, Homo sapien
tcgctggctgaccacactagtgtcc

SEQ ID NO: 5458176 - DNA, 25 bp, Homo sapien
ttggctcgctggctgaccacactag

SEQ ID NO: 5458177 - DNA, 25 bp, Homo sapien
ggctcgctggctgaccacactagtg

SEQ ID NO: 5458178 - DNA, 25 bp, Homo sapien
gctcgctggctgaccacactagtgt

SEQ ID NO: 5458179 - DNA, 25 bp, Homo sapien
aaaccaacaaggcatagccctgctt

SEQ ID NO: 5458180 - DNA, 25 bp, Homo sapien
aagagggagttctctgcaagctgta

SEQ ID NO: 5458181 - DNA, 25 bp, Homo sapien
gcaagctgtagccacgcccatggct

SEQ ID NO: 5458182 - DNA, 25 bp, Homo sapien
tagccctgcttggtgataaaaacct

SEQ ID NO: 5458183 - DNA, 25 bp, Homo sapien
caccaaacaggcgaccaacgagtac

SEQ ID NO: 5458184 - DNA, 25 bp, Homo sapien
cagcggcttcgtcgcaccaaacagg

SEQ ID NO: 5458185 - DNA, 25 bp, Homo sapien
ttcgtcgcaccaaacaggcgaccaa

SEQ ID NO: 5458186 - DNA, 25 bp, Homo sapien
aagccggccaccagcggcttcgtcg

SEQ ID NO: 5458187 - DNA, 25 bp, Homo sapien
cttcactcgagccctaccatccacg

SEQ ID NO: 5458188 - DNA, 25 bp, Homo sapien
ttcactcgagccctaccatccacgc

SEQ ID NO: 5458189 - DNA, 25 bp, Homo sapien
tgcccggactcgaacgcgattccac

SEQ ID NO: 5458190 - DNA, 25 bp, Homo sapien
tcctgcccggactcgaacgcgattc

SEQ ID NO: 5458191 - DNA, 25 bp, Homo sapien
cgccagggccaacccgcagcgtctg

SEQ ID NO: 5458192 - DNA, 25 bp, Homo sapien
tgccctggaccccggcagcgcgcgc

SEQ ID NO: 5458193 - DNA, 25 bp, Homo sapien
gagttgttgaaggaaggagtctccc

SEQ ID NO: 5458194 - DNA, 25 bp, Homo sapien
cactactgagaaatttgaaacccct

SEQ ID NO: 5458195 - DNA, 25 bp, Homo sapien
cgcgcaaaccgaaaggcctagagta

SEQ ID NO: 5458196 - DNA, 25 bp, Homo sapien
tagtggcgcgtcttggagtcacgct

SEQ ID NO: 5458197 - DNA, 25 bp, Homo sapien
taaaccgtaaatgccttgagacggc

SEQ ID NO: 5458198 - DNA, 25 bp, Homo sapien
tctgctctggaacagttaggcctaa

SEQ ID NO: 5458199 - DNA, 25 bp, Homo sapien
tagggctaaattaaccagggcagaa

SEQ ID NO: 5458200 - DNA, 25 bp, Homo sapien
tctccagcagatgagagttagggct

SEQ ID NO: 5458201 - DNA, 25 bp, Homo sapien
ttctctgctagattcagggcatggc

SEQ ID NO: 5458202 - DNA, 25 bp, Homo sapien
tagattcagggcatggctcccctga

SEQ ID NO: 5458203 - DNA, 25 bp, Homo sapien
ctgctagattcagggcatggctccc

SEQ ID NO: 5458204 - DNA, 25 bp, Homo sapien
atctcttctggctcagaggagcctc

SEQ ID NO: 5458205 - DNA, 25 bp, Homo sapien
gatgcagggacagaggttttggatg

SEQ ID NO: 5458206 - DNA, 25 bp, Homo sapien
gggatgcagggacagaggttttgga

SEQ ID NO: 5458207 - DNA, 25 bp, Homo sapien
ctgggggatgcagggacagaggttt

SEQ ID NO: 5458208 - DNA, 25 bp, Homo sapien
tgcagggacagaggttttggatggg

SEQ ID NO: 5458209 - DNA, 25 bp, Homo sapien
cattcgagcctcttgggcagtgaaa

SEQ ID NO: 5458210 - DNA, 25 bp, Homo sapien
gatggtagcccttgacctaggcctc

SEQ ID NO: 5458211 - DNA, 25 bp, Homo sapien
ccctgggcttctgaggcattcgagc

SEQ ID NO: 5458212 - DNA, 25 bp, Homo sapien
cctaggcctcgctcaagctgtgtgc

SEQ ID NO: 5458213 - DNA, 25 bp, Homo sapien
agtaatacatccaaggggctccagc

SEQ ID NO: 5458214 - DNA, 25 bp, Homo sapien
agcagtgagtgcagtaatacatcca

SEQ ID NO: 5458215 - DNA, 25 bp, Homo sapien
caggaatcgtgttctctagtaggaa

SEQ ID NO: 5458216 - DNA, 25 bp, Homo sapien
gtgagtgcagtaatacatccaaggg

SEQ ID NO: 5458217 - DNA, 25 bp, Homo sapien
tagcagcatctttctatccactaaa

SEQ ID NO: 5458218 - DNA, 25 bp, Homo sapien
taagcaatttactgctctcaggaca

SEQ ID NO: 5458219 - DNA, 25 bp, Homo sapien
tctttgcataaatgatggttcctcc

SEQ ID NO: 5458220 - DNA, 25 bp, Homo sapien
agctctgttactggatcacctcaaa

SEQ ID NO: 5458221 - DNA, 25 bp, Homo sapien
agagtctatgtcagccaggtagaag

SEQ ID NO: 5458222 - DNA, 25 bp, Homo sapien
caatgaagatatttcgcccagagtc

SEQ ID NO: 5458223 - DNA, 25 bp, Homo sapien
gggcttcccgaaaccatcttggcag

SEQ ID NO: 5458224 - DNA, 25 bp, Homo sapien
tggagaagcccacaatgaagatatt

SEQ ID NO: 5458225 - DNA, 25 bp, Homo sapien
gagaatccagcagacaaaaccacag

SEQ ID NO: 5458226 - DNA, 25 bp, Homo sapien
agacaaaaccacagcctgggtcacc

SEQ ID NO: 5458227 - DNA, 25 bp, Homo sapien
agcagacaaaaccacagcctgggtc

SEQ ID NO: 5458228 - DNA, 25 bp, Homo sapien
ctggagaatccagcagacaaaacca

SEQ ID NO: 5458229 - DNA, 25 bp, Homo sapien
gagtagccccactaagtgagccact

SEQ ID NO: 5458230 - DNA, 25 bp, Homo sapien
gccccactaagtgagccacttgctg

SEQ ID NO: 5458231 - DNA, 25 bp, Homo sapien
ccacgcagagtagccccactaagtg

SEQ ID NO: 5458232 - DNA, 25 bp, Homo sapien
gggagagtccaagccccacgcagag

SEQ ID NO: 5458233 - DNA, 25 bp, Homo sapien
tgcctcatgcacaggagttccgtgg

SEQ ID NO: 5458234 - DNA, 25 bp, Homo sapien
caatcaatcggtgtaagttcctgtc

SEQ ID NO: 5458235 - DNA, 25 bp, Homo sapien
tttgccctagccttgatacagtgcc

SEQ ID NO: 5458236 - DNA, 25 bp, Homo sapien
taggcacctccccaagtaagatagt

SEQ ID NO: 5458237 - DNA, 25 bp, Homo sapien
ccactcccatcccaggtccacgtac

SEQ ID NO: 5458238 - DNA, 25 bp, Homo sapien
cccactcccatcccaggtccacgta

SEQ ID NO: 5458239 - DNA, 25 bp, Homo sapien
ggaggcaaatgcagcagccggccac

SEQ ID NO: 5458240 - DNA, 25 bp, Homo sapien
gtcagcaaaggccaattccactcac

SEQ ID NO: 5458241 - DNA, 25 bp, Homo sapien
tcagccctcgactgcaggcatgtgg

SEQ ID NO: 5458242 - DNA, 25 bp, Homo sapien
tgggcgtcagcaaaggccaattcca

SEQ ID NO: 5458243 - DNA, 25 bp, Homo sapien
gaatggaggactaggagaaaaccta

SEQ ID NO: 5458244 - DNA, 25 bp, Homo sapien
agaatggaggactaggagaaaacct

SEQ ID NO: 5458245 - DNA, 25 bp, Homo sapien
gagaatggaggactaggagaaaacc

SEQ ID NO: 5458246 - DNA, 25 bp, Homo sapien
tggtgccttggtgggggcagacagt

SEQ ID NO: 5458247 - DNA, 25 bp, Homo sapien
ctgggtgaggcagccaaatccatgg

SEQ ID NO: 5458248 - DNA, 25 bp, Homo sapien
ggtgaggcagccaaatccatggtgc

SEQ ID NO: 5458249 - DNA, 25 bp, Homo sapien
tgaggcagccaaatccatggtgcct

SEQ ID NO: 5458250 - DNA, 25 bp, Homo sapien
cagaaacaatccacacacaggccac

SEQ ID NO: 5458251 - DNA, 25 bp, Homo sapien
gataacactgaatcccacaaaggca

SEQ ID NO: 5458252 - DNA, 25 bp, Homo sapien
agaaacaatccacacacaggccact

SEQ ID NO: 5458253 - DNA, 25 bp, Homo sapien
cagaagccaaaaggtaggggatgga

SEQ ID NO: 5458254 - DNA, 25 bp, Homo sapien
agccttgcaggggtagacagaagcc

SEQ ID NO: 5458255 - DNA, 25 bp, Homo sapien
ccttgcaggggtagacagaagccaa

SEQ ID NO: 5458256 - DNA, 25 bp, Homo sapien
ccagccttgcaggggtagacagaag

SEQ ID NO: 5458257 - DNA, 25 bp, Homo sapien
agtgtgagttgatgacgttgaagct

SEQ ID NO: 5458258 - DNA, 25 bp, Homo sapien
acatgaaactggcaggagcccaggt

SEQ ID NO: 5458259 - DNA, 25 bp, Homo sapien
gatgacgttgaagctcgcctccagg

SEQ ID NO: 5458260 - DNA, 25 bp, Homo sapien
tgagttgatgacgttgaagctcgcc

SEQ ID NO: 5458261 - DNA, 25 bp, Homo sapien
ctgagaacagaccaccatgagcagg

SEQ ID NO: 5458262 - DNA, 25 bp, Homo sapien
tgagaacagaccaccatgagcagga

SEQ ID NO: 5458263 - DNA, 25 bp, Homo sapien
gcaagaggcagtgggtatcctgagg

SEQ ID NO: 5458264 - DNA, 25 bp, Homo sapien
cagtgggtatcctgagggatgggaa

SEQ ID NO: 5458265 - DNA, 25 bp, Homo sapien
agtgggcagaatatcataagagcgg

SEQ ID NO: 5458266 - DNA, 25 bp, Homo sapien
ggagtgggcagaatatcataagagc

SEQ ID NO: 5458267 - DNA, 25 bp, Homo sapien
gaccagatgaatcaaggaaaagtct

SEQ ID NO: 5458268 - DNA, 25 bp, Homo sapien
agagaaggaaactcccatggaagga

SEQ ID NO: 5458269 - DNA, 25 bp, Homo sapien
tcgctgctgaatctgataggaccag

SEQ ID NO: 5458270 - DNA, 25 bp, Homo sapien
aaatatgtccctattccagtcgctg

SEQ ID NO: 5458271 - DNA, 25 bp, Homo sapien
agtgtgtgaagcagaactgggctac

SEQ ID NO: 5458272 - DNA, 25 bp, Homo sapien
gcaaggccaacccccagtgtgtgaa

SEQ ID NO: 5458273 - DNA, 25 bp, Homo sapien
cctgtgggcagagagccctgccaca

SEQ ID NO: 5458274 - DNA, 25 bp, Homo sapien
tgcagcagcccagatactaccactg

SEQ ID NO: 5458275 - DNA, 25 bp, Homo sapien
agagccctgccacaaccaggctggg

SEQ ID NO: 5458276 - DNA, 25 bp, Homo sapien
ccacagtgggggaacacgtggccgg

SEQ ID NO: 5458277 - DNA, 25 bp, Homo sapien
agagaaaacattctgctcaatcaaa

SEQ ID NO: 5458278 - DNA, 25 bp, Homo sapien
attctgctcaatcaaactggcctca

SEQ ID NO: 5458279 - DNA, 25 bp, Homo sapien
gaaaacattctgctcaatcaaactg

SEQ ID NO: 5458280 - DNA, 25 bp, Homo sapien
ctcaatcaaactggcctcagcctgg

SEQ ID NO: 5458281 - DNA, 25 bp, Homo sapien
cagctaggtcccctacaaaggtgca

SEQ ID NO: 5458282 - DNA, 25 bp, Homo sapien
gtcccctacaaaggtgcagcatgag

SEQ ID NO: 5458283 - DNA, 25 bp, Homo sapien
gtgccccaggccatggcagctaggt

SEQ ID NO: 5458284 - DNA, 25 bp, Homo sapien
catggcagctaggtcccctacaaag

SEQ ID NO: 5458285 - DNA, 25 bp, Homo sapien
taaggaactctaaggatggagcctg

SEQ ID NO: 5458286 - DNA, 25 bp, Homo sapien
ccggggtagcttctggctggtcagc

SEQ ID NO: 5458287 - DNA, 25 bp, Homo sapien
agagcagggataaggaactctaagg

SEQ ID NO: 5458288 - DNA, 25 bp, Homo sapien
cagggataaggaactctaaggatgg

SEQ ID NO: 5458289 - DNA, 25 bp, Homo sapien
catccaagtttgcaggatggtagac

SEQ ID NO: 5458290 - DNA, 25 bp, Homo sapien
caagtttgcaggatggtagacatac

SEQ ID NO: 5458291 - DNA, 25 bp, Homo sapien
gcccatccaagtttgcaggatggta

SEQ ID NO: 5458292 - DNA, 25 bp, Homo sapien
ctgcccatccaagtttgcaggatgg

SEQ ID NO: 5458293 - DNA, 25 bp, Homo sapien
tgagaaggggagtaagagagtcctc

SEQ ID NO: 5458294 - DNA, 25 bp, Homo sapien
ctgagaaggggagtaagagagtcct

SEQ ID NO: 5458295 - DNA, 25 bp, Homo sapien
gcagagaagccatgaccaagacatg

SEQ ID NO: 5458296 - DNA, 25 bp, Homo sapien
ctacaatacttccagaggctttcac

SEQ ID NO: 5458297 - DNA, 25 bp, Homo sapien
aatacctacaatacttccagaggct

SEQ ID NO: 5458298 - DNA, 25 bp, Homo sapien
tacctacaatacttccagaggcttt

SEQ ID NO: 5458299 - DNA, 25 bp, Homo sapien
gaaatacctacaatacttccagagg

SEQ ID NO: 5458300 - DNA, 25 bp, Homo sapien
gagcccactgatcggagttggctgg

SEQ ID NO: 5458301 - DNA, 25 bp, Homo sapien
ccactgatcggagttggctgggatt

SEQ ID NO: 5458302 - DNA, 25 bp, Homo sapien
ctgggagcccactgatcggagttgg

SEQ ID NO: 5458303 - DNA, 25 bp, Homo sapien
tgggattgaggggtgatcggctcat

SEQ ID NO: 5458304 - DNA, 25 bp, Homo sapien
gaaggcttaagcacaactaaaccag

SEQ ID NO: 5458305 - DNA, 25 bp, Homo sapien
gaattcttcacagtacgggaggtct

SEQ ID NO: 5458306 - DNA, 25 bp, Homo sapien
ccaggttgacgaaatgccagtagca

SEQ ID NO: 5458307 - DNA, 25 bp, Homo sapien
aggcccctggactacttcaaaatga

SEQ ID NO: 5458308 - DNA, 25 bp, Homo sapien
cacttgttctgggtaagcactctcc

SEQ ID NO: 5458309 - DNA, 25 bp, Homo sapien
gataggcataggcttccatttccaa

SEQ ID NO: 5458310 - DNA, 25 bp, Homo sapien
ggactgctgaggatacttcacggaa

SEQ ID NO: 5458311 - DNA, 25 bp, Homo sapien
tgaagaactccaaggctgggtcatc

SEQ ID NO: 5458312 - DNA, 25 bp, Homo sapien
cactggtctgacacatggtgatggt

SEQ ID NO: 5458313 - DNA, 25 bp, Homo sapien
tgtggatcccaaagcacatctcgtg

SEQ ID NO: 5458314 - DNA, 25 bp, Homo sapien
aatggaagcctatgcctatcaaacg

SEQ ID NO: 5458315 - DNA, 25 bp, Homo sapien
cacgagatgtgctttgggatccaca

SEQ ID NO: 5458316 - DNA, 25 bp, Homo sapien
gaccatcaccatgtgtcagaccagt

SEQ ID NO: 5458317 - DNA, 25 bp, Homo sapien
gagagaagcgtcctcgtggcttgcc

SEQ ID NO: 5458318 - DNA, 25 bp, Homo sapien
cgtgaagtatcctcagcagtcccaa

SEQ ID NO: 5458319 - DNA, 25 bp, Homo sapien
ggagagtgcttacccagaacaagtg

SEQ ID NO: 5458320 - DNA, 25 bp, Homo sapien
ctggccactgctttgtatcagggtt

SEQ ID NO: 5458321 - DNA, 25 bp, Homo sapien
ttttgtagaactgaggtttcaataa

SEQ ID NO: 5458322 - DNA, 25 bp, Homo sapien
tttgtagaactgaggtttcaataaa

SEQ ID NO: 5458323 - DNA, 25 bp, Homo sapien
ttgtagaactgaggtttcaataaac

SEQ ID NO: 5458324 - DNA, 25 bp, Homo sapien
cttttgtagaactgaggtttcaata

SEQ ID NO: 5458325 - DNA, 25 bp, Homo sapien
aaccctgatacaaagcagtggccag

SEQ ID NO: 5458326 - DNA, 25 bp, Homo sapien
gtttattgaaacctcagttctacaa

SEQ ID NO: 5458327 - DNA, 25 bp, Homo sapien
tttattgaaacctcagttctacaaa

SEQ ID NO: 5458328 - DNA, 25 bp, Homo sapien
tattgaaacctcagttctacaaaag

SEQ ID NO: 5458329 - DNA, 25 bp, Homo sapien
ttattgaaacctcagttctacaaaa

SEQ ID NO: 5458330 - DNA, 25 bp, Homo sapien
ttagtgtcctgctcctaggtttccc

SEQ ID NO: 5458331 - DNA, 25 bp, Homo sapien
cttctcttagtgtcctgctcctagg

SEQ ID NO: 5458332 - DNA, 25 bp, Homo sapien
tctcttagtgtcctgctcctaggtt

SEQ ID NO: 5458333 - DNA, 25 bp, Homo sapien
tcttagtgtcctgctcctaggtttc

SEQ ID NO: 5458334 - DNA, 25 bp, Homo sapien
cttagtgtcctgctcctaggtttcc

SEQ ID NO: 5458335 - DNA, 25 bp, Homo sapien
tcttctcttagtgtcctgctcctag

SEQ ID NO: 5458336 - DNA, 25 bp, Homo sapien
ggaaacctaggagcaggacactaag

SEQ ID NO: 5458337 - DNA, 25 bp, Homo sapien
aacctaggagcaggacactaagaga

SEQ ID NO: 5458338 - DNA, 25 bp, Homo sapien
gaaacctaggagcaggacactaaga

SEQ ID NO: 5458339 - DNA, 25 bp, Homo sapien
cctaggagcaggacactaagagaag

SEQ ID NO: 5458340 - DNA, 25 bp, Homo sapien
gggaaacctaggagcaggacactaa

SEQ ID NO: 5458341 - DNA, 25 bp, Homo sapien
ctaggagcaggacactaagagaaga

SEQ ID NO: 5458342 - DNA, 25 bp, Homo sapien
gctgggaccttcaaccctgatcttt

SEQ ID NO: 5458343 - DNA, 25 bp, Homo sapien
tgaggcagggaacccttttcactcc

SEQ ID NO: 5458344 - DNA, 25 bp, Homo sapien
ccttagctttagtctaatggagcca

SEQ ID NO: 5458345 - DNA, 25 bp, Homo sapien
tgggaccttcaaccctgatcttttg

SEQ ID NO: 5458346 - DNA, 25 bp, Homo sapien
gaccttcaaccctgatcttttgtct

SEQ ID NO: 5458347 - DNA, 25 bp, Homo sapien
cccattccttagctttagtctaatg

SEQ ID NO: 5458348 - DNA, 25 bp, Homo sapien
cattagactaaagctaaggaatggg

SEQ ID NO: 5458349 - DNA, 25 bp, Homo sapien
aaagatcagggttgaaggtcccagc

SEQ ID NO: 5458350 - DNA, 25 bp, Homo sapien
tggctccattagactaaagctaagg

SEQ ID NO: 5458351 - DNA, 25 bp, Homo sapien
ggagtgaaaagggttccctgcctca

SEQ ID NO: 5458352 - DNA, 25 bp, Homo sapien
gagtgaaaagggttccctgcctcac

SEQ ID NO: 5458353 - DNA, 25 bp, Homo sapien
gacaaaagatcagggttgaaggtcc

SEQ ID NO: 5458354 - DNA, 25 bp, Homo sapien
catgggcctgtgtgatgtccctgag

SEQ ID NO: 5458355 - DNA, 25 bp, Homo sapien
atgggcctgtgtgatgtccctgagg

SEQ ID NO: 5458356 - DNA, 25 bp, Homo sapien
gcctgtgtgatgtccctgaggcaga

SEQ ID NO: 5458357 - DNA, 25 bp, Homo sapien
tgggcctgtgtgatgtccctgaggc

SEQ ID NO: 5458358 - DNA, 25 bp, Homo sapien
cctgtgtgatgtccctgaggcagaa

SEQ ID NO: 5458359 - DNA, 25 bp, Homo sapien
ctgtgtgatgtccctgaggcagaag

SEQ ID NO: 5458360 - DNA, 25 bp, Homo sapien
gcctcagggacatcacacaggccca

SEQ ID NO: 5458361 - DNA, 25 bp, Homo sapien
tctgcctcagggacatcacacaggc

SEQ ID NO: 5458362 - DNA, 25 bp, Homo sapien
ctcagggacatcacacaggcccatg

SEQ ID NO: 5458363 - DNA, 25 bp, Homo sapien
cttctgcctcagggacatcacacag

SEQ ID NO: 5458364 - DNA, 25 bp, Homo sapien
ttctgcctcagggacatcacacagg

SEQ ID NO: 5458365 - DNA, 25 bp, Homo sapien
cctcagggacatcacacaggcccat

SEQ ID NO: 5458366 - DNA, 25 bp, Homo sapien
gattcagatcctgtctgcctcgctg

SEQ ID NO: 5458367 - DNA, 25 bp, Homo sapien
cagaaggactgaaggtaattcactc

SEQ ID NO: 5458368 - DNA, 25 bp, Homo sapien
taattcactcctagatcgcagtggc

SEQ ID NO: 5458369 - DNA, 25 bp, Homo sapien
tgatttccctaggatggaagagtat

SEQ ID NO: 5458370 - DNA, 25 bp, Homo sapien
tgtgaggaatgcattaagagggttt

SEQ ID NO: 5458371 - DNA, 25 bp, Homo sapien
gagcaaagcttgattcagatcctgt

SEQ ID NO: 5458372 - DNA, 25 bp, Homo sapien
gagtgaattaccttcagtccttctg

SEQ ID NO: 5458373 - DNA, 25 bp, Homo sapien
cagcgaggcagacaggatctgaatc

SEQ ID NO: 5458374 - DNA, 25 bp, Homo sapien
aaaccctcttaatgcattcctcaca

SEQ ID NO: 5458375 - DNA, 25 bp, Homo sapien
tactcttccatcctagggaaatcaa

SEQ ID NO: 5458376 - DNA, 25 bp, Homo sapien
gacaggatctgaatcaagctttgct

SEQ ID NO: 5458377 - DNA, 25 bp, Homo sapien
gccagccactgcgatctaggagtga

SEQ ID NO: 5458378 - DNA, 25 bp, Homo sapien
ctggccttggagcccggtgctcctt

SEQ ID NO: 5458379 - DNA, 25 bp, Homo sapien
gccttggagcccggtgctcctttca

SEQ ID NO: 5458380 - DNA, 25 bp, Homo sapien
gtaccatacctatggcctggctccc

SEQ ID NO: 5458381 - DNA, 25 bp, Homo sapien
ggctcgcctcaagtctttcgttttc

SEQ ID NO: 5458382 - DNA, 25 bp, Homo sapien
ctggctcgcctcaagtctttcgttt

SEQ ID NO: 5458383 - DNA, 25 bp, Homo sapien
cgcctcaagtctttcgttttcccag

SEQ ID NO: 5458384 - DNA, 25 bp, Homo sapien
gaaaacgaaagacttgaggcgagcc

SEQ ID NO: 5458385 - DNA, 25 bp, Homo sapien
gggagccaggccataggtatggtac

SEQ ID NO: 5458386 - DNA, 25 bp, Homo sapien
aaacgaaagacttgaggcgagccag

SEQ ID NO: 5458387 - DNA, 25 bp, Homo sapien
ggaaaacgaaagacttgaggcgagc

SEQ ID NO: 5458388 - DNA, 25 bp, Homo sapien
ctgggaaaacgaaagacttgaggcg

SEQ ID NO: 5458389 - DNA, 25 bp, Homo sapien
tgaaaggagcaccgggctccaaggc

SEQ ID NO: 5458390 - DNA, 25 bp, Homo sapien
cttcataactgccacctttgccaga

SEQ ID NO: 5458391 - DNA, 25 bp, Homo sapien
ctgggccgcctgaccttggactgac

SEQ ID NO: 5458392 - DNA, 25 bp, Homo sapien
cctgttagctgtggcatatgtgagc

SEQ ID NO: 5458393 - DNA, 25 bp, Homo sapien
tgccgtctctcgctaatgtctccag

SEQ ID NO: 5458394 - DNA, 25 bp, Homo sapien
catcggtggccgtaatacatcagtc

SEQ ID NO: 5458395 - DNA, 25 bp, Homo sapien
ggagccctgcataccttctgtgcca

SEQ ID NO: 5458396 - DNA, 25 bp, Homo sapien
cattgtggcacagaaggtatgcagg

SEQ ID NO: 5458397 - DNA, 25 bp, Homo sapien
caaaggtggcagttatgaagaagag

SEQ ID NO: 5458398 - DNA, 25 bp, Homo sapien
ctggagacattagcgagagacggca

SEQ ID NO: 5458399 - DNA, 25 bp, Homo sapien
gctcacatatgccacagctaacagg

SEQ ID NO: 5458400 - DNA, 25 bp, Homo sapien
gtcagtccaaggtcaggcggcccag

SEQ ID NO: 5458401 - DNA, 25 bp, Homo sapien
gactgatgtattacggccaccgatg

SEQ ID NO: 5458402 - DNA, 25 bp, Homo sapien
gacggtggcgaggctggtacaccta

SEQ ID NO: 5458403 - DNA, 25 bp, Homo sapien
acggtggcgaggctggtacacctac

SEQ ID NO: 5458404 - DNA, 25 bp, Homo sapien
ggacggtggcgaggctggtacacct

SEQ ID NO: 5458405 - DNA, 25 bp, Homo sapien
gggacggtggcgaggctggtacacc

SEQ ID NO: 5458406 - DNA, 25 bp, Homo sapien
agggacggtggcgaggctggtacac

SEQ ID NO: 5458407 - DNA, 25 bp, Homo sapien
gtgtaccagcctcgccaccgtccct

SEQ ID NO: 5458408 - DNA, 25 bp, Homo sapien
taggtgtaccagcctcgccaccgtc

SEQ ID NO: 5458409 - DNA, 25 bp, Homo sapien
gtaggtgtaccagcctcgccaccgt

SEQ ID NO: 5458410 - DNA, 25 bp, Homo sapien
aggtgtaccagcctcgccaccgtcc

SEQ ID NO: 5458411 - DNA, 25 bp, Homo sapien
ggtgtaccagcctcgccaccgtccc

SEQ ID NO: 5458412 - DNA, 25 bp, Homo sapien
tgtgtgctgctggagcagccgacct

SEQ ID NO: 5458413 - DNA, 25 bp, Homo sapien
acggtggcgaggctggtacacctac

SEQ ID NO: 5458414 - DNA, 25 bp, Homo sapien
gctggtacacctacacagacctgtg

SEQ ID NO: 5458415 - DNA, 25 bp, Homo sapien
tacacagacctgtgtgtgctgctgg

SEQ ID NO: 5458416 - DNA, 25 bp, Homo sapien
agcagccgacctggcagttggccct

SEQ ID NO: 5458417 - DNA, 25 bp, Homo sapien
tggcagttggccctgggctccctct

SEQ ID NO: 5458418 - DNA, 25 bp, Homo sapien
cacaggtctgtgtaggtgtaccagc

SEQ ID NO: 5458419 - DNA, 25 bp, Homo sapien
tgccaggtcggctgctccagcagca

SEQ ID NO: 5458420 - DNA, 25 bp, Homo sapien
agggccaactgccaggtcggctgct

SEQ ID NO: 5458421 - DNA, 25 bp, Homo sapien
tccagcagcacacacaggtctgtgt

SEQ ID NO: 5458422 - DNA, 25 bp, Homo sapien
gtaggtgtaccagcctcgccaccgt

SEQ ID NO: 5458423 - DNA, 25 bp, Homo sapien
agagggagcccagggccaactgcca

SEQ ID NO: 5458424 - DNA, 25 bp, Homo sapien
tacactgaccctcgggagatctttg

SEQ ID NO: 5458425 - DNA, 25 bp, Homo sapien
tgaggtgctgagctggttggagagc

SEQ ID NO: 5458426 - DNA, 25 bp, Homo sapien
agatctttgaggtgctgagctggtt

SEQ ID NO: 5458427 - DNA, 25 bp, Homo sapien
ctgaccctcgggagatctttgaggt

SEQ ID NO: 5458428 - DNA, 25 bp, Homo sapien
tctacactgaccctcgggagatctt

SEQ ID NO: 5458429 - DNA, 25 bp, Homo sapien
tctctacactgaccctcgggagatc

SEQ ID NO: 5458430 - DNA, 25 bp, Homo sapien
aagatctcccgagggtcagtgtaga

SEQ ID NO: 5458431 - DNA, 25 bp, Homo sapien
cctcaaagatctcccgagggtcagt

SEQ ID NO: 5458432 - DNA, 25 bp, Homo sapien
caaagatctcccgagggtcagtgta

SEQ ID NO: 5458433 - DNA, 25 bp, Homo sapien
gatctcccgagggtcagtgtagaga

SEQ ID NO: 5458434 - DNA, 25 bp, Homo sapien
aaccagctcagcacctcaaagatct

SEQ ID NO: 5458435 - DNA, 25 bp, Homo sapien
acctcaaagatctcccgagggtcag

SEQ ID NO: 5458436 - DNA, 25 bp, Homo sapien
tgttggttcgtcatttctcttcctg

SEQ ID NO: 5458437 - DNA, 25 bp, Homo sapien
tcctcctgcctttgtgttagtgtct

SEQ ID NO: 5458438 - DNA, 25 bp, Homo sapien
tcttctgttggttcgtcatttctct

SEQ ID NO: 5458439 - DNA, 25 bp, Homo sapien
ctcctcctgcctttgtgttagtgtc

SEQ ID NO: 5458440 - DNA, 25 bp, Homo sapien
gttggttcgtcatttctcttcctgt

SEQ ID NO: 5458441 - DNA, 25 bp, Homo sapien
tctgttggttcgtcatttctcttcc

SEQ ID NO: 5458442 - DNA, 25 bp, Homo sapien
cctatctcttcagtactaaccagtt

SEQ ID NO: 5458443 - DNA, 25 bp, Homo sapien
taaccagtttttggagattcgtaga

SEQ ID NO: 5458444 - DNA, 25 bp, Homo sapien
tcttcagtactaaccagtttttgga

SEQ ID NO: 5458445 - DNA, 25 bp, Homo sapien
tcagtactaaccagtttttggagat

SEQ ID NO: 5458446 - DNA, 25 bp, Homo sapien
ttcctatctcttcagtactaaccag

SEQ ID NO: 5458447 - DNA, 25 bp, Homo sapien
ccagtttttggagattcgtagagca

SEQ ID NO: 5458448 - DNA, 25 bp, Homo sapien
aatctccaaaaactggttagtactg

SEQ ID NO: 5458449 - DNA, 25 bp, Homo sapien
aactggttagtactgaagagatagg

SEQ ID NO: 5458450 - DNA, 25 bp, Homo sapien
ggttagtactgaagagataggaaag

SEQ ID NO: 5458451 - DNA, 25 bp, Homo sapien
ccaaaaactggttagtactgaagag

SEQ ID NO: 5458452 - DNA, 25 bp, Homo sapien
tgctctacgaatctccaaaaactgg

SEQ ID NO: 5458453 - DNA, 25 bp, Homo sapien
ctacgaatctccaaaaactggttag

SEQ ID NO: 5458454 - DNA, 25 bp, Homo sapien
acaggaagagaaatgacgaaccaac

SEQ ID NO: 5458455 - DNA, 25 bp, Homo sapien
caggaagagaaatgacgaaccaaca

SEQ ID NO: 5458456 - DNA, 25 bp, Homo sapien
agacactaacacaaaggcaggagga

SEQ ID NO: 5458457 - DNA, 25 bp, Homo sapien
gaagagaaatgacgaaccaacagaa

SEQ ID NO: 5458458 - DNA, 25 bp, Homo sapien
gacactaacacaaaggcaggaggag

SEQ ID NO: 5458459 - DNA, 25 bp, Homo sapien
agagaaatgacgaaccaacagaaga

SEQ ID NO: 5458460 - DNA, 25 bp, Homo sapien
gggtgtggccgtgcccactctcaat

SEQ ID NO: 5458461 - DNA, 25 bp, Homo sapien
tcttcaacgacgaatggggagctgc

SEQ ID NO: 5458462 - DNA, 25 bp, Homo sapien
gaggaggtcttcaacgacgaatggg

SEQ ID NO: 5458463 - DNA, 25 bp, Homo sapien
gtggccgtgcccactctcaatgcct

SEQ ID NO: 5458464 - DNA, 25 bp, Homo sapien
tggtggccagtaagtacctctatga

SEQ ID NO: 5458465 - DNA, 25 bp, Homo sapien
ggtggccagtaagtacctctatgat

SEQ ID NO: 5458466 - DNA, 25 bp, Homo sapien
gctccccattcgtcgttgaagacct

SEQ ID NO: 5458467 - DNA, 25 bp, Homo sapien
catagaggtacttactggccaccat

SEQ ID NO: 5458468 - DNA, 25 bp, Homo sapien
agcagctccccattcgtcgttgaag

SEQ ID NO: 5458469 - DNA, 25 bp, Homo sapien
aggcattgagagtgggcacggccac

SEQ ID NO: 5458470 - DNA, 25 bp, Homo sapien
attgagagtgggcacggccacaccc

SEQ ID NO: 5458471 - DNA, 25 bp, Homo sapien
atcatagaggtacttactggccacc

SEQ ID NO: 5458472 - DNA, 25 bp, Homo sapien
agcctgctatgagctctgctccacc

SEQ ID NO: 5458473 - DNA, 25 bp, Homo sapien
agagcctgctatgagctctgctcca

SEQ ID NO: 5458474 - DNA, 25 bp, Homo sapien
gcctgctatgagctctgctccacca

SEQ ID NO: 5458475 - DNA, 25 bp, Homo sapien
gagcctgctatgagctctgctccac

SEQ ID NO: 5458476 - DNA, 25 bp, Homo sapien
aagagcctgctatgagctctgctcc

SEQ ID NO: 5458477 - DNA, 25 bp, Homo sapien
tggtggagcagagctcatagcaggc

SEQ ID NO: 5458478 - DNA, 25 bp, Homo sapien
ggtggagcagagctcatagcaggct

SEQ ID NO: 5458479 - DNA, 25 bp, Homo sapien
ggagcagagctcatagcaggctctt

SEQ ID NO: 5458480 - DNA, 25 bp, Homo sapien
gtggagcagagctcatagcaggctc

SEQ ID NO: 5458481 - DNA, 25 bp, Homo sapien
tggagcagagctcatagcaggctct

SEQ ID NO: 5458482 - DNA, 25 bp, Homo sapien
tccaccacttctggttcctctgcag

SEQ ID NO: 5458483 - DNA, 25 bp, Homo sapien
tctccctaaagagccaagagcctgc

SEQ ID NO: 5458484 - DNA, 25 bp, Homo sapien
tgagctctgctccaccacttctggt

SEQ ID NO: 5458485 - DNA, 25 bp, Homo sapien
cctaaagagccaagagcctgctatg

SEQ ID NO: 5458486 - DNA, 25 bp, Homo sapien
gagcctgctatgagctctgctccac

SEQ ID NO: 5458487 - DNA, 25 bp, Homo sapien
aagagcctgctatgagctctgctcc

SEQ ID NO: 5458488 - DNA, 25 bp, Homo sapien
accagaagtggtggagcagagctca

SEQ ID NO: 5458489 - DNA, 25 bp, Homo sapien
gcaggctcttggctctttagggaga

SEQ ID NO: 5458490 - DNA, 25 bp, Homo sapien
aagtggtggagcagagctcatagca

SEQ ID NO: 5458491 - DNA, 25 bp, Homo sapien
ctgcagaggaaccagaagtggtgga

SEQ ID NO: 5458492 - DNA, 25 bp, Homo sapien
ggagcagagctcatagcaggctctt

SEQ ID NO: 5458493 - DNA, 25 bp, Homo sapien
gtggagcagagctcatagcaggctc

SEQ ID NO: 5458494 - DNA, 25 bp, Homo sapien
ggcaccgaaacccagactacttgca

SEQ ID NO: 5458495 - DNA, 25 bp, Homo sapien
tctccccatgtgctatgatgctggc

SEQ ID NO: 5458496 - DNA, 25 bp, Homo sapien
tctggtgtacattgaacggctccgg

SEQ ID NO: 5458497 - DNA, 25 bp, Homo sapien
gatgctggctctggtgtacattgaa

SEQ ID NO: 5458498 - DNA, 25 bp, Homo sapien
gtgtcatcctctgacttgttcctga

SEQ ID NO: 5458499 - DNA, 25 bp, Homo sapien
ccgaaacccagactacttgcagcat

SEQ ID NO: 5458500 - DNA, 25 bp, Homo sapien
tgcaagtagtctgggtttcggtgcc

SEQ ID NO: 5458501 - DNA, 25 bp, Homo sapien
gccggagccgttcaatgtacaccag

SEQ ID NO: 5458502 - DNA, 25 bp, Homo sapien
atgctgcaagtagtctgggtttcgg

SEQ ID NO: 5458503 - DNA, 25 bp, Homo sapien
cagagccagcatcatagcacatggg

SEQ ID NO: 5458504 - DNA, 25 bp, Homo sapien
tcaggaacaagtcagaggatgacac

SEQ ID NO: 5458505 - DNA, 25 bp, Homo sapien
cgttcaatgtacaccagagccagca

SEQ ID NO: 5458506 - DNA, 25 bp, Homo sapien
ccctattcgccgactccagaagaaa

SEQ ID NO: 5458507 - DNA, 25 bp, Homo sapien
tgctgtcgaactgctccagaaggca

SEQ ID NO: 5458508 - DNA, 25 bp, Homo sapien
gccctattcgccgactccagaagaa

SEQ ID NO: 5458509 - DNA, 25 bp, Homo sapien
tttcttctggagtcggcgaataggg

SEQ ID NO: 5458510 - DNA, 25 bp, Homo sapien
ttcttctggagtcggcgaatagggc

SEQ ID NO: 5458511 - DNA, 25 bp, Homo sapien
tgccttctggagcagttcgacagca

SEQ ID NO: 5458512 - DNA, 25 bp, Homo sapien
aggctctactatggctgggactggg

SEQ ID NO: 5458513 - DNA, 25 bp, Homo sapien
actgggaagccgactgtagcctgga

SEQ ID NO: 5458514 - DNA, 25 bp, Homo sapien
cagaagctgagtgcccggatccgaa

SEQ ID NO: 5458515 - DNA, 25 bp, Homo sapien
caccagaagctgagtgcccggatcc

SEQ ID NO: 5458516 - DNA, 25 bp, Homo sapien
aaggaggctctactatggctgggac

SEQ ID NO: 5458517 - DNA, 25 bp, Homo sapien
aagccgactgtagcctggaggagct

SEQ ID NO: 5458518 - DNA, 25 bp, Homo sapien
gtcccagccatagtagagcctcctt

SEQ ID NO: 5458519 - DNA, 25 bp, Homo sapien
agtcccagccatagtagagcctcct

SEQ ID NO: 5458520 - DNA, 25 bp, Homo sapien
ttcggatccgggcactcagcttctg

SEQ ID NO: 5458521 - DNA, 25 bp, Homo sapien
ggatccgggcactcagcttctggtg

SEQ ID NO: 5458522 - DNA, 25 bp, Homo sapien
tccaggctacagtcggcttcccagt

SEQ ID NO: 5458523 - DNA, 25 bp, Homo sapien
agctcctccaggctacagtcggctt

SEQ ID NO: 5458524 - DNA, 25 bp, Homo sapien
gccaggatctgcatcatacctttcc

SEQ ID NO: 5458525 - DNA, 25 bp, Homo sapien
agccaggatctgcatcatacctttc

SEQ ID NO: 5458526 - DNA, 25 bp, Homo sapien
ggaaaggtatgatgcagatcctggc

SEQ ID NO: 5458527 - DNA, 25 bp, Homo sapien
gaaaggtatgatgcagatcctggct

SEQ ID NO: 5458528 - DNA, 25 bp, Homo sapien
atggacctgaccgggctcctgctgg

SEQ ID NO: 5458529 - DNA, 25 bp, Homo sapien
ctcctgctggacgaagaaggcacct

SEQ ID NO: 5458530 - DNA, 25 bp, Homo sapien
caccttctccctcgccggcttccag

SEQ ID NO: 5458531 - DNA, 25 bp, Homo sapien
tcctgctggacgaagaaggcacctt

SEQ ID NO: 5458532 - DNA, 25 bp, Homo sapien
ggcaccttctccctcgccggcttcc

SEQ ID NO: 5458533 - DNA, 25 bp, Homo sapien
tccctcgccggcttccaggacttca

SEQ ID NO: 5458534 - DNA, 25 bp, Homo sapien
ggaagccggcgagggagaaggtgcc

SEQ ID NO: 5458535 - DNA, 25 bp, Homo sapien
ctggaagccggcgagggagaaggtg

SEQ ID NO: 5458536 - DNA, 25 bp, Homo sapien
aaggtgccttcttcgtccagcagga

SEQ ID NO: 5458537 - DNA, 25 bp, Homo sapien
ccagcaggagcccggtcaggtccat

SEQ ID NO: 5458538 - DNA, 25 bp, Homo sapien
aggtgccttcttcgtccagcaggag

SEQ ID NO: 5458539 - DNA, 25 bp, Homo sapien
tgaagtcctggaagccggcgaggga

SEQ ID NO: 5458540 - DNA, 25 bp, Homo sapien
aggtggacaggcgggcaaggacagc

SEQ ID NO: 5458541 - DNA, 25 bp, Homo sapien
acagctccgcgagccccctacaact

SEQ ID NO: 5458542 - DNA, 25 bp, Homo sapien
cgtttccttccgttcaccttcgcag

SEQ ID NO: 5458543 - DNA, 25 bp, Homo sapien
gtggacaggcgggcaaggacagctc

SEQ ID NO: 5458544 - DNA, 25 bp, Homo sapien
gcaaggacagctccgcgagccccct

SEQ ID NO: 5458545 - DNA, 25 bp, Homo sapien
tcgtttccttccgttcaccttcgca

SEQ ID NO: 5458546 - DNA, 25 bp, Homo sapien
gagctgtccttgcccgcctgtccac

SEQ ID NO: 5458547 - DNA, 25 bp, Homo sapien
ctgcgaaggtgaacggaaggaaacg

SEQ ID NO: 5458548 - DNA, 25 bp, Homo sapien
gggggctcgcggagctgtccttgcc

SEQ ID NO: 5458549 - DNA, 25 bp, Homo sapien
ttgtagggggctcgcggagctgtcc

SEQ ID NO: 5458550 - DNA, 25 bp, Homo sapien
tgcgaaggtgaacggaaggaaacga

SEQ ID NO: 5458551 - DNA, 25 bp, Homo sapien
aacgagttgtagggggctcgcggag

SEQ ID NO: 5458552 - DNA, 25 bp, Homo sapien
ggcgagggcgaggacggcggcccgc

SEQ ID NO: 5458553 - DNA, 25 bp, Homo sapien
gggaggcaggctggcaggtggacag

SEQ ID NO: 5458554 - DNA, 25 bp, Homo sapien
gcgggcaaggacagctccgcgagcc

SEQ ID NO: 5458555 - DNA, 25 bp, Homo sapien
cgtttccttccgttcaccttcgcag

SEQ ID NO: 5458556 - DNA, 25 bp, Homo sapien
ggcaggtggacaggcgggcaaggac

SEQ ID NO: 5458557 - DNA, 25 bp, Homo sapien
tggacaggcgggcaaggacagctcc

SEQ ID NO: 5458558 - DNA, 25 bp, Homo sapien
ctgcgaaggtgaacggaaggaaacg

SEQ ID NO: 5458559 - DNA, 25 bp, Homo sapien
ttgtagggggctcgcggagctgtcc

SEQ ID NO: 5458560 - DNA, 25 bp, Homo sapien
tgcgaaggtgaacggaaggaaacga

SEQ ID NO: 5458561 - DNA, 25 bp, Homo sapien
ggagctgtccttgcccgcctgtcca

SEQ ID NO: 5458562 - DNA, 25 bp, Homo sapien
ggcgggccgccgtcctcgccctcgc

SEQ ID NO: 5458563 - DNA, 25 bp, Homo sapien
gggctcgcggagctgtccttgcccg

SEQ ID NO: 5458564 - DNA, 25 bp, Homo sapien
gtgccgcctgcaagtcagcgcctgg

SEQ ID NO: 5458565 - DNA, 25 bp, Homo sapien
gctgcgaggcgcgtactccgcctgt

SEQ ID NO: 5458566 - DNA, 25 bp, Homo sapien
tggtctcacggaacgtggccaagcc

SEQ ID NO: 5458567 - DNA, 25 bp, Homo sapien
cgcgggcaggaaccggactcgaact

SEQ ID NO: 5458568 - DNA, 25 bp, Homo sapien
gatcttaagcgaatgtaaggcctca

SEQ ID NO: 5458569 - DNA, 25 bp, Homo sapien
taaactgcatctacccaaggttttg

SEQ ID NO: 5458570 - DNA, 25 bp, Homo sapien
taaggcctcaaaacgtgtcaacacg

SEQ ID NO: 5458571 - DNA, 25 bp, Homo sapien
tgtcaacacgtccacccaaaagtaa

SEQ ID NO: 5458572 - DNA, 25 bp, Homo sapien
cgatctcatgcttgagtaggccgag

SEQ ID NO: 5458573 - DNA, 25 bp, Homo sapien
tctgtcgagtcaagcgctggtgtgt

SEQ ID NO: 5458574 - DNA, 25 bp, Homo sapien
ttggttgagtaatgggacggccacc

SEQ ID NO: 5458575 - DNA, 25 bp, Homo sapien
gaagaagctccgatatgtggaagtg

SEQ ID NO: 5458576 - DNA, 25 bp, Homo sapien
ctgtgtaggcgcagtgtcagcggca

SEQ ID NO: 5458577 - DNA, 25 bp, Homo sapien
gcagccctggctcctcgcgggctcg

SEQ ID NO: 5458578 - DNA, 25 bp, Homo sapien
gcggccgcgcagccctggctcctcg

SEQ ID NO: 5458579 - DNA, 25 bp, Homo sapien
ggccgcgcagccctggctcctcgcg

SEQ ID NO: 5458580 - DNA, 25 bp, Homo sapien
tggctcctcgcgggctcgggcggcg

SEQ ID NO: 5458581 - DNA, 25 bp, Homo sapien
tgtgcccgagttgtgcagatacctg

SEQ ID NO: 5458582 - DNA, 25 bp, Homo sapien
ccgagttgtgcagatacctggctga

SEQ ID NO: 5458583 - DNA, 25 bp, Homo sapien
ctgagtgtgcccgagttgtgcagat

SEQ ID NO: 5458584 - DNA, 25 bp, Homo sapien
gcacctgctgagtgtgcccgagttg

SEQ ID NO: 5458585 - DNA, 25 bp, Homo sapien
tcaccactgaggactttgagttgct

SEQ ID NO: 5458586 - DNA, 25 bp, Homo sapien
gagctgcaggcacagtagggcttcc

SEQ ID NO: 5458587 - DNA, 25 bp, Homo sapien
tatcctcagggacctgtgctgctct

SEQ ID NO: 5458588 - DNA, 25 bp, Homo sapien
tacagtcagaccaagaagctcaggc

SEQ ID NO: 5458589 - DNA, 25 bp, Homo sapien
caaaacagggccgaagcaaggatta

SEQ ID NO: 5458590 - DNA, 25 bp, Homo sapien
cactggccaagctttagggaggctc

SEQ ID NO: 5458591 - DNA, 25 bp, Homo sapien
cagcccggcctttcatgatgcagga

SEQ ID NO: 5458592 - DNA, 25 bp, Homo sapien
tacatggcgccagcactggagttgg

SEQ ID NO: 5458593 - DNA, 25 bp, Homo sapien
taccagcggcagcaggtatgaggct

SEQ ID NO: 5458594 - DNA, 25 bp, Homo sapien
tgagctctgaaatgagggctgtccc

SEQ ID NO: 5458595 - DNA, 25 bp, Homo sapien
gaagaagacctagctttagcacaag

SEQ ID NO: 5458596 - DNA, 25 bp, Homo sapien
ggttttcagtatgactccagcccat

SEQ ID NO: 5458597 - DNA, 25 bp, Homo sapien
gtagaggcccgctgcagtaccccat

SEQ ID NO: 5458598 - DNA, 25 bp, Homo sapien
tgctcatctgacttatgggtagagg

SEQ ID NO: 5458599 - DNA, 25 bp, Homo sapien
gacttatgggtagaggcccgctgca

SEQ ID NO: 5458600 - DNA, 25 bp, Homo sapien
agaatgctcatctgacttatgggta

SEQ ID NO: 5458601 - DNA, 25 bp, Homo sapien
gacacatcttattcccttctgggtt

SEQ ID NO: 5458602 - DNA, 25 bp, Homo sapien
ggttagtctttgagagggaagtggc

SEQ ID NO: 5458603 - DNA, 25 bp, Homo sapien
catcttattcccttctgggttagtc

SEQ ID NO: 5458604 - DNA, 25 bp, Homo sapien
aaggagacacatcttattcccttct

SEQ ID NO: 5458605 - DNA, 25 bp, Homo sapien
tcttcagaggtttcttcctgtccct

SEQ ID NO: 5458606 - DNA, 25 bp, Homo sapien
gtcttcagaggtttcttcctgtccc

SEQ ID NO: 5458607 - DNA, 25 bp, Homo sapien
tgaggcttagtgtcttcagaggttt

SEQ ID NO: 5458608 - DNA, 25 bp, Homo sapien
ctgaggcttagtgtcttcagaggtt

SEQ ID NO: 5458609 - DNA, 25 bp, Homo sapien
cacctcgggacaacagagcctcgtg

SEQ ID NO: 5458610 - DNA, 25 bp, Homo sapien
cccacctcgggacaacagagcctcg

SEQ ID NO: 5458611 - DNA, 25 bp, Homo sapien
accccacctcgggacaacagagcct

SEQ ID NO: 5458612 - DNA, 25 bp, Homo sapien
ccacctcgggacaacagagcctcgt

SEQ ID NO: 5458613 - DNA, 25 bp, Homo sapien
tggtcagcattgaccacagttgaga

SEQ ID NO: 5458614 - DNA, 25 bp, Homo sapien
ccttgatgacgaggatctggtcagc

SEQ ID NO: 5458615 - DNA, 25 bp, Homo sapien
gaggatctggtcagcattgaccaca

SEQ ID NO: 5458616 - DNA, 25 bp, Homo sapien
agccatccttgatgacgaggatctg

SEQ ID NO: 5458617 - DNA, 25 bp, Homo sapien
cctctcattagatgtatccagcgct

SEQ ID NO: 5458618 - DNA, 25 bp, Homo sapien
cattagatgtatccagcgctgacgt

SEQ ID NO: 5458619 - DNA, 25 bp, Homo sapien
ggtgcggttggcacagactttggcc

SEQ ID NO: 5458620 - DNA, 25 bp, Homo sapien
ctgtgtgccactacgatggtggtgc

SEQ ID NO: 5458621 - DNA, 25 bp, Homo sapien
ccttgtttgggcttgagaactggaa

SEQ ID NO: 5458622 - DNA, 25 bp, Homo sapien
gctgaggcctcaagaatacacaaga

SEQ ID NO: 5458623 - DNA, 25 bp, Homo sapien
ggcttgagcatacacaaggcaggaa

SEQ ID NO: 5458624 - DNA, 25 bp, Homo sapien
gtgagatttgaattcatggtatctg

SEQ ID NO: 5458625 - DNA, 25 bp, Homo sapien
ccagcagaatgatgcccggagcctt

SEQ ID NO: 5458626 - DNA, 25 bp, Homo sapien
gaatgatgcccggagccttgaggat

SEQ ID NO: 5458627 - DNA, 25 bp, Homo sapien
tcagtccccgctcgcccacctgtgt

SEQ ID NO: 5458628 - DNA, 25 bp, Homo sapien
gggcaatggcgacgcgctgcttctc

SEQ ID NO: 5458629 - DNA, 25 bp, Homo sapien
tgtggatattacccaccacacgttt

SEQ ID NO: 5458630 - DNA, 25 bp, Homo sapien
ctgtggatattacccaccacacgtt

SEQ ID NO: 5458631 - DNA, 25 bp, Homo sapien
ggggtcagggattagcaggacaaca

SEQ ID NO: 5458632 - DNA, 25 bp, Homo sapien
ggaacaggggtcagggattagcagg

SEQ ID NO: 5458633 - DNA, 25 bp, Homo sapien
gagggaacaggggtcagggattagc

SEQ ID NO: 5458634 - DNA, 25 bp, Homo sapien
ggtcagggattagcaggacaacacc

SEQ ID NO: 5458635 - DNA, 25 bp, Homo sapien
tattgtcggcgatggtgtcattaaa

SEQ ID NO: 5458636 - DNA, 25 bp, Homo sapien
tcagggaaagccataatggcatcat

SEQ ID NO: 5458637 - DNA, 25 bp, Homo sapien
gggcacaactccaatgtgagaccgg

SEQ ID NO: 5458638 - DNA, 25 bp, Homo sapien
tgtgacacggccgtaacggatattg

SEQ ID NO: 5458639 - DNA, 25 bp, Homo sapien
acacctggctacagaatatcgttgt

SEQ ID NO: 5458640 - DNA, 25 bp, Homo sapien
ccacacctggctacagaatatcgtt

SEQ ID NO: 5458641 - DNA, 25 bp, Homo sapien
tgagactacgtcaagctaattttta

SEQ ID NO: 5458642 - DNA, 25 bp, Homo sapien
atggggttgccaggtatgttgccca

SEQ ID NO: 5458643 - DNA, 25 bp, Homo sapien
ccagagctgatgtcgtagaagcgaa

SEQ ID NO: 5458644 - DNA, 25 bp, Homo sapien
aatgtcctgcccatctattcggatg

SEQ ID NO: 5458645 - DNA, 25 bp, Homo sapien
tctattcggatgcagccagagctga

SEQ ID NO: 5458646 - DNA, 25 bp, Homo sapien
aacagcaggcgcaaaattgtgctct

SEQ ID NO: 5458647 - DNA, 25 bp, Homo sapien
aaatgggaaaaatctcaggcccact

SEQ ID NO: 5458648 - DNA, 25 bp, Homo sapien
ggaaatgggaaaaatctcaggccca

SEQ ID NO: 5458649 - DNA, 25 bp, Homo sapien
gaaatgggaaaaatctcaggcccac

SEQ ID NO: 5458650 - DNA, 25 bp, Homo sapien
acagtgaaagacacgtcctgcagag

SEQ ID NO: 5458651 - DNA, 25 bp, Homo sapien
caagtgtctgtccaggcatcacagt

SEQ ID NO: 5458652 - DNA, 25 bp, Homo sapien
cagggcaagtgtctgtccaggcatc

SEQ ID NO: 5458653 - DNA, 25 bp, Homo sapien
gaaagacacgtcctgcagagtctcc

SEQ ID NO: 5458654 - DNA, 25 bp, Homo sapien
accttccatcaccagagctgctagt

SEQ ID NO: 5458655 - DNA, 25 bp, Homo sapien
ccatcaccagagctgctagtaggcc

SEQ ID NO: 5458656 - DNA, 25 bp, Homo sapien
gcagggattcagagcactgagaagc

SEQ ID NO: 5458657 - DNA, 25 bp, Homo sapien
ttccatcaccagagctgctagtagg

SEQ ID NO: 5458658 - DNA, 25 bp, Homo sapien
ctgaagtgcacgttctcaaactcaa

SEQ ID NO: 5458659 - DNA, 25 bp, Homo sapien
tgcacgttctcaaactcaatacggc

SEQ ID NO: 5458660 - DNA, 25 bp, Homo sapien
aatacggcccttctgaaagcgaagg

SEQ ID NO: 5458661 - DNA, 25 bp, Homo sapien
tcaaactcaatacggcccttctgaa

SEQ ID NO: 5458662 - DNA, 25 bp, Homo sapien
tttccaagcacgagaaacaccacac

SEQ ID NO: 5458663 - DNA, 25 bp, Homo sapien
gggcaccacccatgtgtgctgaggt

SEQ ID NO: 5458664 - DNA, 25 bp, Homo sapien
ttccaagcacgagaaacaccacaca

SEQ ID NO: 5458665 - DNA, 25 bp, Homo sapien
ccacccatgtgtgctgaggttctca

SEQ ID NO: 5458666 - DNA, 25 bp, Homo sapien
gcaagtcaaacatgttctccatgtc

SEQ ID NO: 5458667 - DNA, 25 bp, Homo sapien
agcaagtcaaacatgttctccatgt

SEQ ID NO: 5458668 - DNA, 25 bp, Homo sapien
ggataatgtaggtgccaaagagcac

SEQ ID NO: 5458669 - DNA, 25 bp, Homo sapien
tagtaggtgccaaaccaattgaggg

SEQ ID NO: 5458670 - DNA, 25 bp, Homo sapien
tgtagtaggtgccaaaccaattgag

SEQ ID NO: 5458671 - DNA, 25 bp, Homo sapien
caattgaggggcatgtacagctgga

SEQ ID NO: 5458672 - DNA, 25 bp, Homo sapien
tgggtctgatttagtaaaaccagtg

SEQ ID NO: 5458673 - DNA, 25 bp, Homo sapien
ccaatcaccaggttctgggtctgat

SEQ ID NO: 5458674 - DNA, 25 bp, Homo sapien
taaaaccagtgaagcgctcgacttc

SEQ ID NO: 5458675 - DNA, 25 bp, Homo sapien
caaagtatgcgcaaagcagggagcc

SEQ ID NO: 5458676 - DNA, 25 bp, Homo sapien
gatgatggcctctcgatagcgttcc

SEQ ID NO: 5458677 - DNA, 25 bp, Homo sapien
cacttcgtaactctcggcgttgtaa

SEQ ID NO: 5458678 - DNA, 25 bp, Homo sapien
aactctcggcgttgtaatacttcac

SEQ ID NO: 5458679 - DNA, 25 bp, Homo sapien
tagcgttccacttcgtaactctcgg

SEQ ID NO: 5458680 - DNA, 25 bp, Homo sapien
ctctgtcagccccagtggtcctggt

SEQ ID NO: 5458681 - DNA, 25 bp, Homo sapien
atttatttggcatgggcacagcaca

SEQ ID NO: 5458682 - DNA, 25 bp, Homo sapien
acagcacatggcactcgggtcattc

SEQ ID NO: 5458683 - DNA, 25 bp, Homo sapien
cagccccagtggtcctggttacact

SEQ ID NO: 5458684 - DNA, 25 bp, Homo sapien
gctcgtgcccgggtagcgttctcct

SEQ ID NO: 5458685 - DNA, 25 bp, Homo sapien
tcctgtgtgttcatagcacgacgaa

SEQ ID NO: 5458686 - DNA, 25 bp, Homo sapien
tagcacgacgaaacttggttctcca

SEQ ID NO: 5458687 - DNA, 25 bp, Homo sapien
tctcgaagtttagcagagagtccac

SEQ ID NO: 5458688 - DNA, 25 bp, Homo sapien
gaggcttccttgacctgtgtccacg

SEQ ID NO: 5458689 - DNA, 25 bp, Homo sapien
acagctcatggccaagggagtccct

SEQ ID NO: 5458690 - DNA, 25 bp, Homo sapien
catcacatgacgagcactaggagcc

SEQ ID NO: 5458691 - DNA, 25 bp, Homo sapien
tcttgttacacaaacgaggcttcct

SEQ ID NO: 5458692 - DNA, 25 bp, Homo sapien
acacaatgaggccaaaccaggcgtt

SEQ ID NO: 5458693 - DNA, 25 bp, Homo sapien
caatgaggccaaaccaggcgttgaa

SEQ ID NO: 5458694 - DNA, 25 bp, Homo sapien
gaggccaaaccaggcgttgaagaac

SEQ ID NO: 5458695 - DNA, 25 bp, Homo sapien
tgatgtcggccagcgtggggatgac

SEQ ID NO: 5458696 - DNA, 25 bp, Homo sapien
caagaggtgggtggctaaatcaacc

SEQ ID NO: 5458697 - DNA, 25 bp, Homo sapien
tattttcaagcaacagactggaacc

SEQ ID NO: 5458698 - DNA, 25 bp, Homo sapien
tacaatgaatgagggagaccttcag

SEQ ID NO: 5458699 - DNA, 25 bp, Homo sapien
catactaaacagagtgggaagctct

SEQ ID NO: 5458700 - DNA, 25 bp, Homo sapien
acccgccgagacgtgaactgctgca

SEQ ID NO: 5458701 - DNA, 25 bp, Homo sapien
tgctgcacccggatccacaggaagg

SEQ ID NO: 5458702 - DNA, 25 bp, Homo sapien
ccccaggtgccagcgcagtgagagc

SEQ ID NO: 5458703 - DNA, 25 bp, Homo sapien
cctgtgacactggatgtgccccgat

SEQ ID NO: 5458704 - DNA, 25 bp, Homo sapien
ctagcagggtgagggcggagtctct

SEQ ID NO: 5458705 - DNA, 25 bp, Homo sapien
agcagggtgagggcggagtctctca

SEQ ID NO: 5458706 - DNA, 25 bp, Homo sapien
agggtgagggcggagtctctcatac

SEQ ID NO: 5458707 - DNA, 25 bp, Homo sapien
cagggtgagggcggagtctctcata

SEQ ID NO: 5458708 - DNA, 25 bp, Homo sapien
gaagacgtaactggtaacagtccag

SEQ ID NO: 5458709 - DNA, 25 bp, Homo sapien
gaggaacttgaggaagacgtaactg

SEQ ID NO: 5458710 - DNA, 25 bp, Homo sapien
gtaactggtaacagtccaggccaga

SEQ ID NO: 5458711 - DNA, 25 bp, Homo sapien
cttgaggaagacgtaactggtaaca

SEQ ID NO: 5458712 - DNA, 25 bp, Homo sapien
ctccctaggtaaggaccatcccagc

SEQ ID NO: 5458713 - DNA, 25 bp, Homo sapien
cgcccaggactctcttcaggcaaaa

SEQ ID NO: 5458714 - DNA, 25 bp, Homo sapien
gaggaaacgagtcagaacccactta

SEQ ID NO: 5458715 - DNA, 25 bp, Homo sapien
agaacccacttatggcgcccaggac

SEQ ID NO: 5458716 - DNA, 25 bp, Homo sapien
atagaatataggcaccaacacattg

SEQ ID NO: 5458717 - DNA, 25 bp, Homo sapien
ctcgaggccacaggtagccactcag

SEQ ID NO: 5458718 - DNA, 25 bp, Homo sapien
ttgagtgcccgttccaaacccatga

SEQ ID NO: 5458719 - DNA, 25 bp, Homo sapien
aggccacaggtagccactcaggagg

SEQ ID NO: 5458720 - DNA, 25 bp, Homo sapien
tctcgccaggtagactgttgggctg

SEQ ID NO: 5458721 - DNA, 25 bp, Homo sapien
tcgccaggtagactgttgggctgct

SEQ ID NO: 5458722 - DNA, 25 bp, Homo sapien
aatctcgccaggtagactgttgggc

SEQ ID NO: 5458723 - DNA, 25 bp, Homo sapien
aaatctcgccaggtagactgttggg

SEQ ID NO: 5458724 - DNA, 25 bp, Homo sapien
ctttccacatcttggtcctcttcat

SEQ ID NO: 5458725 - DNA, 25 bp, Homo sapien
ccacatcttggtcctcttcatgaac

SEQ ID NO: 5458726 - DNA, 25 bp, Homo sapien
ctcctttccacatcttggtcctctt

SEQ ID NO: 5458727 - DNA, 25 bp, Homo sapien
ttccacatcttggtcctcttcatga

SEQ ID NO: 5458728 - DNA, 25 bp, Homo sapien
ctgcaatgtataggactggggacga

SEQ ID NO: 5458729 - DNA, 25 bp, Homo sapien
gaccacataccgcagcacccacagg

SEQ ID NO: 5458730 - DNA, 25 bp, Homo sapien
caatgtataggactggggacgaagt

SEQ ID NO: 5458731 - DNA, 25 bp, Homo sapien
cagccctccagagaccacataccgc

SEQ ID NO: 5458732 - DNA, 25 bp, Homo sapien
gatgcccattgccagacgctgccgt

SEQ ID NO: 5458733 - DNA, 25 bp, Homo sapien
ccgtgcctggctccgctccacgaca

SEQ ID NO: 5458734 - DNA, 25 bp, Homo sapien
agctgcaaacgccacagtccagagg

SEQ ID NO: 5458735 - DNA, 25 bp, Homo sapien
ccggccagactctccagcacggagg

SEQ ID NO: 5458736 - DNA, 25 bp, Homo sapien
gggcagcgccgcctgaagtgtggcc

SEQ ID NO: 5458737 - DNA, 25 bp, Homo sapien
agcgccgcctgaagtgtggccagaa

SEQ ID NO: 5458738 - DNA, 25 bp, Homo sapien
cgccgcctgaagtgtggccagaagc

SEQ ID NO: 5458739 - DNA, 25 bp, Homo sapien
gcagcgccgcctgaagtgtggccag

SEQ ID NO: 5458740 - DNA, 25 bp, Homo sapien
ttcggcctcgcagtagttgcccaca

SEQ ID NO: 5458741 - DNA, 25 bp, Homo sapien
ccaagacagcgaatcagcaccagcg

SEQ ID NO: 5458742 - DNA, 25 bp, Homo sapien
gtctgcagggaagagccagcaccaa

SEQ ID NO: 5458743 - DNA, 25 bp, Homo sapien
ctgcagcacgtagggagagatgcga

SEQ ID NO: 5458744 - DNA, 25 bp, Homo sapien
ggcaatgcgtggacgccggccgagg

SEQ ID NO: 5458745 - DNA, 25 bp, Homo sapien
atgcgtggacgccggccgaggctgc

SEQ ID NO: 5458746 - DNA, 25 bp, Homo sapien
gcaatgcgtggacgccggccgaggc

SEQ ID NO: 5458747 - DNA, 25 bp, Homo sapien
aatgcgtggacgccggccgaggctg

SEQ ID NO: 5458748 - DNA, 25 bp, Homo sapien
gggcgcggacatccgggtgccttgg

SEQ ID NO: 5458749 - DNA, 25 bp, Homo sapien
gggtgccttggctcacgtagccgct

SEQ ID NO: 5458750 - DNA, 25 bp, Homo sapien
acatccgggtgccttggctcacgta

SEQ ID NO: 5458751 - DNA, 25 bp, Homo sapien
ttggctcacgtagccgctgggcgcc

SEQ ID NO: 5458752 - DNA, 25 bp, Homo sapien
caccgcccactcccctagcgcacgc

SEQ ID NO: 5458753 - DNA, 25 bp, Homo sapien
gcccactcccctagcgcacgcgccg

SEQ ID NO: 5458754 - DNA, 25 bp, Homo sapien
ccgcccactcccctagcgcacgcgc

SEQ ID NO: 5458755 - DNA, 25 bp, Homo sapien
actcccctagcgcacgcgccgccgc

SEQ ID NO: 5458756 - DNA, 25 bp, Homo sapien
caggcccacgggaatgctcggtgtt

SEQ ID NO: 5458757 - DNA, 25 bp, Homo sapien
tcggtgttggactcgcaccgcgctc

SEQ ID NO: 5458758 - DNA, 25 bp, Homo sapien
gggcacgtacgccgtctcagcacgg

SEQ ID NO: 5458759 - DNA, 25 bp, Homo sapien
gaatgctcggtgttggactcgcacc

SEQ ID NO: 5458760 - DNA, 25 bp, Homo sapien
tttattaagggttatcaagctgtac

SEQ ID NO: 5458761 - DNA, 25 bp, Homo sapien
ggttatcaagctgtacacggtccct

SEQ ID NO: 5458762 - DNA, 25 bp, Homo sapien
ttatcaagctgtacacggtccctac

SEQ ID NO: 5458763 - DNA, 25 bp, Homo sapien
taagggttatcaagctgtacacggt

SEQ ID NO: 5458764 - DNA, 25 bp, Homo sapien
accactctcccaaagccggaccaca

SEQ ID NO: 5458765 - DNA, 25 bp, Homo sapien
cgagttcgggcagcgcaattcacca

SEQ ID NO: 5458766 - DNA, 25 bp, Homo sapien
ctccgagttcgggcagcgcaattca

SEQ ID NO: 5458767 - DNA, 25 bp, Homo sapien
ttcgggcagcgcaattcaccactct

SEQ ID NO: 5458768 - DNA, 25 bp, Homo sapien
tccacagttggcacaggttctccct

SEQ ID NO: 5458769 - DNA, 25 bp, Homo sapien
agctcttttgctgggacgcacacag

SEQ ID NO: 5458770 - DNA, 25 bp, Homo sapien
gggtcttcaccctaacgcaaagcaa

SEQ ID NO: 5458771 - DNA, 25 bp, Homo sapien
agcttctatcgtgggcagccctctg

SEQ ID NO: 5458772 - DNA, 25 bp, Homo sapien
aaagggttggtaatggagatagtct

SEQ ID NO: 5458773 - DNA, 25 bp, Homo sapien
ggtaatggagatagtcttcagcttc

SEQ ID NO: 5458774 - DNA, 25 bp, Homo sapien
ttctggttgatacctgctagcccca

SEQ ID NO: 5458775 - DNA, 25 bp, Homo sapien
tgatacctgctagccccatagaaac

SEQ ID NO: 5458776 - DNA, 25 bp, Homo sapien
caagaggcagccgagagaaatgaga

SEQ ID NO: 5458777 - DNA, 25 bp, Homo sapien
tgagggggtagctcatcctccgagc

SEQ ID NO: 5458778 - DNA, 25 bp, Homo sapien
gctcagggtgccttgatgccgactg

SEQ ID NO: 5458779 - DNA, 25 bp, Homo sapien
agccctcttcgggcacgggctcagg

SEQ ID NO: 5458780 - DNA, 25 bp, Homo sapien
agggcagtggtctcaggagctccag

SEQ ID NO: 5458781 - DNA, 25 bp, Homo sapien
atagctagcagagcgagggatagac

SEQ ID NO: 5458782 - DNA, 25 bp, Homo sapien
tctcatcactctcccggcggtgcca

SEQ ID NO: 5458783 - DNA, 25 bp, Homo sapien
gcggtgccatacatgccgctcaggt

SEQ ID NO: 5458784 - DNA, 25 bp, Homo sapien
agctgtccttcccacacgctgctcc

SEQ ID NO: 5458785 - DNA, 25 bp, Homo sapien
gatgcatattctgacagcaccaggc

SEQ ID NO: 5458786 - DNA, 25 bp, Homo sapien
gggcatgcaggctcatctctgtgga

SEQ ID NO: 5458787 - DNA, 25 bp, Homo sapien
ctctgtggatgcatattctgacagc

SEQ ID NO: 5458788 - DNA, 25 bp, Homo sapien
acagagacagacagcagctgtgaac

SEQ ID NO: 5458789 - DNA, 25 bp, Homo sapien
cagagacagacagcagctgtgaact

SEQ ID NO: 5458790 - DNA, 25 bp, Homo sapien
ctcccaacagagacagacagcagct

SEQ ID NO: 5458791 - DNA, 25 bp, Homo sapien
agacagacagcagctgtgaacttct

SEQ ID NO: 5458792 - DNA, 25 bp, Homo sapien
cctgtcatggtgctgtgagcccggc

SEQ ID NO: 5458793 - DNA, 25 bp, Homo sapien
agaggcgacttcagccctgtgcctg

SEQ ID NO: 5458794 - DNA, 25 bp, Homo sapien
tgtgagcccggcctgtgggcgcctg

SEQ ID NO: 5458795 - DNA, 25 bp, Homo sapien
cagaggcgacttcagccctgtgcct

SEQ ID NO: 5458796 - DNA, 25 bp, Homo sapien
gactggatagacgtaaagagggcat

SEQ ID NO: 5458797 - DNA, 25 bp, Homo sapien
aaggctgtgctctcacgtggtggct

SEQ ID NO: 5458798 - DNA, 25 bp, Homo sapien
gatggcaaagtgcatgagtgacaac

SEQ ID NO: 5458799 - DNA, 25 bp, Homo sapien
gggcgaggctagcagctgctccatc

SEQ ID NO: 5458800 - DNA, 25 bp, Homo sapien
tcagcttgctggtacactgaggcct

SEQ ID NO: 5458801 - DNA, 25 bp, Homo sapien
tgaggcctctgtctgcccagcagat

SEQ ID NO: 5458802 - DNA, 25 bp, Homo sapien
aggcctctgtctgcccagcagatag

SEQ ID NO: 5458803 - DNA, 25 bp, Homo sapien
agcttgctggtacactgaggcctct

SEQ ID NO: 5458804 - DNA, 25 bp, Homo sapien
tttcccaaagacactgtatgttcca

SEQ ID NO: 5458805 - DNA, 25 bp, Homo sapien
ccaaagacactgtatgttccagcat

SEQ ID NO: 5458806 - DNA, 25 bp, Homo sapien
gttccagcatcatcccaggccacct

SEQ ID NO: 5458807 - DNA, 25 bp, Homo sapien
cggttttcccaaagacactgtatgt

SEQ ID NO: 5458808 - DNA, 25 bp, Homo sapien
aaggagcaggtatctcccacaccaa

SEQ ID NO: 5458809 - DNA, 25 bp, Homo sapien
ttcggaagaagtctataatctccag

SEQ ID NO: 5458810 - DNA, 25 bp, Homo sapien
catgctggcgaacatccatctgagc

SEQ ID NO: 5458811 - DNA, 25 bp, Homo sapien
caccaacgacctccacggtgaagtt

SEQ ID NO: 5458812 - DNA, 25 bp, Homo sapien
aggccctaactccaactccactcac

SEQ ID NO: 5458813 - DNA, 25 bp, Homo sapien
ccgggtctgcgagcggtgggcatta

SEQ ID NO: 5458814 - DNA, 25 bp, Homo sapien
aactcgtcccgggtctgcgagcggt

SEQ ID NO: 5458815 - DNA, 25 bp, Homo sapien
gggcaaactcgtcccgggtctgcga

SEQ ID NO: 5458816 - DNA, 25 bp, Homo sapien
gagctgggcaaactcgtcccgggtc

SEQ ID NO: 5458817 - DNA, 25 bp, Homo sapien
cagaacaccatgtgctggtccggga

SEQ ID NO: 5458818 - DNA, 25 bp, Homo sapien
tgagcgaggatcacgcggagcagct

SEQ ID NO: 5458819 - DNA, 25 bp, Homo sapien
gtggtcaggcatgtagtggatgtga

SEQ ID NO: 5458820 - DNA, 25 bp, Homo sapien
gcagaacaccatgtgctggtccggg

SEQ ID NO: 5458821 - DNA, 25 bp, Homo sapien
caggagggatttgttaaccagtgcc

SEQ ID NO: 5458822 - DNA, 25 bp, Homo sapien
ggaagttagcgatgccaatccacag

SEQ ID NO: 5458823 - DNA, 25 bp, Homo sapien
caattcatgtacttggaggcgggct

SEQ ID NO: 5458824 - DNA, 25 bp, Homo sapien
aaagttgtacttgagaccacgggtg

SEQ ID NO: 5458825 - DNA, 25 bp, Homo sapien
tgcacttcttgccacgtgcaatacg

SEQ ID NO: 5458826 - DNA, 25 bp, Homo sapien
gccacgtgcaatacggaagggcaga

SEQ ID NO: 5458827 - DNA, 25 bp, Homo sapien
tcttgccacgtgcaatacggaaggg

SEQ ID NO: 5458828 - DNA, 25 bp, Homo sapien
cacttcttgccacgtgcaatacgga

SEQ ID NO: 5458829 - DNA, 25 bp, Homo sapien
tgcggggtggggtggggaagagaca

SEQ ID NO: 5458830 - DNA, 25 bp, Homo sapien
ctatattagaagtgagattcagggg

SEQ ID NO: 5458831 - DNA, 25 bp, Homo sapien
acacctcccaatacgtcttagacta

SEQ ID NO: 5458832 - DNA, 25 bp, Homo sapien
ttagactatgggctaactgcccaac

SEQ ID NO: 5458833 - DNA, 25 bp, Homo sapien
ataactgatgcccaggaatacaccc

SEQ ID NO: 5458834 - DNA, 25 bp, Homo sapien
cagataaggataactgatgcccagg

SEQ ID NO: 5458835 - DNA, 25 bp, Homo sapien
tgcaggtagaaggagtggatctccc

SEQ ID NO: 5458836 - DNA, 25 bp, Homo sapien
gcagcaaatgttatagatgaacttg

SEQ ID NO: 5458837 - DNA, 25 bp, Homo sapien
gatgaacttgataagccggtggatc

SEQ ID NO: 5458838 - DNA, 25 bp, Homo sapien
catagggatgcgcagagcgtgcagg

SEQ ID NO: 5458839 - DNA, 25 bp, Homo sapien
tcagtagggtgaagactgtggttca

SEQ ID NO: 5458840 - DNA, 25 bp, Homo sapien
caaaaaggcgtctggcagagtgacc

SEQ ID NO: 5458841 - DNA, 25 bp, Homo sapien
cagagtgaccttgacgggttcagta

SEQ ID NO: 5458842 - DNA, 25 bp, Homo sapien
tggcactacagacttgagcaggcaa

SEQ ID NO: 5458843 - DNA, 25 bp, Homo sapien
tgaaggcaaccacaaagaggaactg

SEQ ID NO: 5458844 - DNA, 25 bp, Homo sapien
ccaggaaggtagtgaaggcaaccac

SEQ ID NO: 5458845 - DNA, 25 bp, Homo sapien
tgtcatagtccacgcagctgaccag

SEQ ID NO: 5458846 - DNA, 25 bp, Homo sapien
gcaaataggatgtcatagtccacgc

SEQ ID NO: 5458847 - DNA, 25 bp, Homo sapien
gctcaaagatctccccgatgagcat

SEQ ID NO: 5458848 - DNA, 25 bp, Homo sapien
atgagctcaaagatctccccgatga

SEQ ID NO: 5458849 - DNA, 25 bp, Homo sapien
gagctcaaagatctccccgatgagc

SEQ ID NO: 5458850 - DNA, 25 bp, Homo sapien
tgagctcaaagatctccccgatgag

SEQ ID NO: 5458851 - DNA, 25 bp, Homo sapien
gagagacattaaaggtcccagagct

SEQ ID NO: 5458852 - DNA, 25 bp, Homo sapien
tagagagacattaaaggtcccagag

SEQ ID NO: 5458853 - DNA, 25 bp, Homo sapien
ccaccagagccccggcttagagaga

SEQ ID NO: 5458854 - DNA, 25 bp, Homo sapien
gagccccggcttagagagacattaa

SEQ ID NO: 5458855 - DNA, 25 bp, Homo sapien
gaagaggtcaaggttttcaatatgg

SEQ ID NO: 5458856 - DNA, 25 bp, Homo sapien
agaagaagaggtcaaggttttcaat

SEQ ID NO: 5458857 - DNA, 25 bp, Homo sapien
tcgagagaagaagaggtcaaggttt

SEQ ID NO: 5458858 - DNA, 25 bp, Homo sapien
agaggtcaaggttttcaatatggtg

SEQ ID NO: 5458859 - DNA, 25 bp, Homo sapien
tataggaggcctctaggcgctggta

SEQ ID NO: 5458860 - DNA, 25 bp, Homo sapien
cctcggcgacgtgcaccaacaggtc

SEQ ID NO: 5458861 - DNA, 25 bp, Homo sapien
cctcccctgggggtgaatcactata

SEQ ID NO: 5458862 - DNA, 25 bp, Homo sapien
tctaggcgctggtattcagtgtcaa

SEQ ID NO: 5458863 - DNA, 25 bp, Homo sapien
atggacagtatgtgctcctctccag

SEQ ID NO: 5458864 - DNA, 25 bp, Homo sapien
tcctctccagccctcgatgctctgc

SEQ ID NO: 5458865 - DNA, 25 bp, Homo sapien
cagctccatggacagtatgtgctcc

SEQ ID NO: 5458866 - DNA, 25 bp, Homo sapien
cctctccagccctcgatgctctgca

SEQ ID NO: 5458867 - DNA, 25 bp, Homo sapien
ccgatcctaggtgaatttgtgggtt

SEQ ID NO: 5458868 - DNA, 25 bp, Homo sapien
gatccagccggtgagcaaaccttct

SEQ ID NO: 5458869 - DNA, 25 bp, Homo sapien
tgtgggttccctaggtcctgtaagc

SEQ ID NO: 5458870 - DNA, 25 bp, Homo sapien
ggtcagtgtagacccccgatcctag

SEQ ID NO: 5458871 - DNA, 25 bp, Homo sapien
ggggccgtggatcttggcccagcct

SEQ ID NO: 5458872 - DNA, 25 bp, Homo sapien
tgggggccgtggatcttggcccagc

SEQ ID NO: 5458873 - DNA, 25 bp, Homo sapien
ctcagggaagtcaccactcacaggg

SEQ ID NO: 5458874 - DNA, 25 bp, Homo sapien
agcctggccccggtgggattccctg

SEQ ID NO: 5458875 - DNA, 25 bp, Homo sapien
ttacagctgatagcccgggtgggtt

SEQ ID NO: 5458876 - DNA, 25 bp, Homo sapien
cagggatcgagtcagccttacagct

SEQ ID NO: 5458877 - DNA, 25 bp, Homo sapien
tgcggatgttgcagggatcgagtca

SEQ ID NO: 5458878 - DNA, 25 bp, Homo sapien
gcggcgaccgtggaccggagtccac

SEQ ID NO: 5458879 - DNA, 25 bp, Homo sapien
ggattccaataaccggtctcacgtc

SEQ ID NO: 5458880 - DNA, 25 bp, Homo sapien
tccaataaccggtctcacgtcttac

SEQ ID NO: 5458881 - DNA, 25 bp, Homo sapien
attccaataaccggtctcacgtctt

SEQ ID NO: 5458882 - DNA, 25 bp, Homo sapien
ctgggattccaataaccggtctcac

SEQ ID NO: 5458883 - DNA, 25 bp, Homo sapien
ggtgattccagaggctccgccggct

SEQ ID NO: 5458884 - DNA, 25 bp, Homo sapien
caggaacagcgacccgggtgattcc

SEQ ID NO: 5458885 - DNA, 25 bp, Homo sapien
ctcaggaacagcgacccgggtgatt

SEQ ID NO: 5458886 - DNA, 25 bp, Homo sapien
cgggtgattccagaggctccgccgg

SEQ ID NO: 5458887 - DNA, 25 bp, Homo sapien
ggctcggcgcgacccgcggcgctag

SEQ ID NO: 5458888 - DNA, 25 bp, Homo sapien
tcggctcggcgcgacccgcggcgct

SEQ ID NO: 5458889 - DNA, 25 bp, Homo sapien
ctcggctcggcgcgacccgcggcgc

SEQ ID NO: 5458890 - DNA, 25 bp, Homo sapien
tcggcgcgacccgcggcgctaggcc

SEQ ID NO: 5458891 - DNA, 25 bp, Homo sapien
tctttgtgagtctgaagtattgccc

SEQ ID NO: 5458892 - DNA, 25 bp, Homo sapien
tactcatacggagagtccagggact

SEQ ID NO: 5458893 - DNA, 25 bp, Homo sapien
tattgtgcggcaccctaaggctact

SEQ ID NO: 5458894 - DNA, 25 bp, Homo sapien
gagtactccctagatggatttcaca

SEQ ID NO: 5458895 - DNA, 25 bp, Homo sapien
caccttatactgttgcggctgacaa

SEQ ID NO: 5458896 - DNA, 25 bp, Homo sapien
tatatttgaaatcctccaggtgcca

SEQ ID NO: 5458897 - DNA, 25 bp, Homo sapien
ttacaacaaggctcaggtcatctgg

SEQ ID NO: 5458898 - DNA, 25 bp, Homo sapien
tccagatgcctacgattacaacaag

SEQ ID NO: 5458899 - DNA, 25 bp, Homo sapien
gacactcgggaactagggcaaagac

SEQ ID NO: 5458900 - DNA, 25 bp, Homo sapien
tccccgtgaaaccagagatgatttg

SEQ ID NO: 5458901 - DNA, 25 bp, Homo sapien
tcctcttgttcagacgctgctggag

SEQ ID NO: 5458902 - DNA, 25 bp, Homo sapien
gacctgagagggcacattcacagca

SEQ ID NO: 5458903 - DNA, 25 bp, Homo sapien
ggcaaggaatgtgtacttgtactta

SEQ ID NO: 5458904 - DNA, 25 bp, Homo sapien
tagttccttagggtcaccgtggcca

SEQ ID NO: 5458905 - DNA, 25 bp, Homo sapien
tacttacattcagaggcactgtggc

SEQ ID NO: 5458906 - DNA, 25 bp, Homo sapien
ttccttagggtcaccgtggccagca

SEQ ID NO: 5458907 - DNA, 25 bp, Homo sapien
cttaactccattggttcagaggcac

SEQ ID NO: 5458908 - DNA, 25 bp, Homo sapien
tatgtgtcctgtgcaaagtactagt

SEQ ID NO: 5458909 - DNA, 25 bp, Homo sapien
ggataggcttatccaaaaattggac

SEQ ID NO: 5458910 - DNA, 25 bp, Homo sapien
gaggtacatcttctagttccagcaa

SEQ ID NO: 5458911 - DNA, 25 bp, Homo sapien
gttaaacccattgatccagacttgg

SEQ ID NO: 5458912 - DNA, 25 bp, Homo sapien
tagagggtctgttgtggcccctgct

SEQ ID NO: 5458913 - DNA, 25 bp, Homo sapien
ggcccaagttaaacccattgatcca

SEQ ID NO: 5458914 - DNA, 25 bp, Homo sapien
tgctttgtccagtaccggcccaagt

SEQ ID NO: 5458915 - DNA, 25 bp, Homo sapien
tctgctcccctccttctgtgatttt

SEQ ID NO: 5458916 - DNA, 25 bp, Homo sapien
tgctcccctccttctgtgatttttc

SEQ ID NO: 5458917 - DNA, 25 bp, Homo sapien
gctacccaaaccaccaccattacca

SEQ ID NO: 5458918 - DNA, 25 bp, Homo sapien
tttctgctcccctccttctgtgatt

SEQ ID NO: 5458919 - DNA, 25 bp, Homo sapien
ttcagagggaacatcatccactggg

SEQ ID NO: 5458920 - DNA, 25 bp, Homo sapien
tccactgggtaaggattgtttgccc

SEQ ID NO: 5458921 - DNA, 25 bp, Homo sapien
tatggccattttggcaactggaggg

SEQ ID NO: 5458922 - DNA, 25 bp, Homo sapien
gaaatgtgtccccaactgagcctaa

SEQ ID NO: 5458923 - DNA, 25 bp, Homo sapien
ccaagatatccagtttggaccccag

SEQ ID NO: 5458924 - DNA, 25 bp, Homo sapien
agtttgtctctcatatttcgctcca

SEQ ID NO: 5458925 - DNA, 25 bp, Homo sapien
gtctctcatatttcgctccacaaca

SEQ ID NO: 5458926 - DNA, 25 bp, Homo sapien
tgttagacccaaagctgagcctccc

SEQ ID NO: 5458927 - DNA, 25 bp, Homo sapien
ccattatttggcacccagaatggtg

SEQ ID NO: 5458928 - DNA, 25 bp, Homo sapien
cataggcacggtcatggactccatt

SEQ ID NO: 5458929 - DNA, 25 bp, Homo sapien
tgttggctcaaaaatggtatgggtc

SEQ ID NO: 5458930 - DNA, 25 bp, Homo sapien
ggttcggtacaacatgaagccatgg

SEQ ID NO: 5458931 - DNA, 25 bp, Homo sapien
gacagcctcaaaggtcattggcaag

SEQ ID NO: 5458932 - DNA, 25 bp, Homo sapien
cttgacagcctcaaaggtcattggc

SEQ ID NO: 5458933 - DNA, 25 bp, Homo sapien
gcttgacagcctcaaaggtcattgg

SEQ ID NO: 5458934 - DNA, 25 bp, Homo sapien
gattgaatgaatgggcccacggggg

SEQ ID NO: 5458935 - DNA, 25 bp, Homo sapien
ctaggaaagccagtaaatgcccaac

SEQ ID NO: 5458936 - DNA, 25 bp, Homo sapien
caggtgcagagtcacaggtccaagc

SEQ ID NO: 5458937 - DNA, 25 bp, Homo sapien
aggtgcagagtcacaggtccaagca

SEQ ID NO: 5458938 - DNA, 25 bp, Homo sapien
tctctcaggatccataggaaaacca

SEQ ID NO: 5458939 - DNA, 25 bp, Homo sapien
ctctcaggatccataggaaaaccac

SEQ ID NO: 5458940 - DNA, 25 bp, Homo sapien
tctcaggatccataggaaaaccaca

SEQ ID NO: 5458941 - DNA, 25 bp, Homo sapien
ctcaggatccataggaaaaccacag

SEQ ID NO: 5458942 - DNA, 25 bp, Homo sapien
catagctggtagtaatcggaaggaa

SEQ ID NO: 5458943 - DNA, 25 bp, Homo sapien
aaggaagcgtcccttcttatcggca

SEQ ID NO: 5458944 - DNA, 25 bp, Homo sapien
tctcgaagagcaaaaagcttaggtg

SEQ ID NO: 5458945 - DNA, 25 bp, Homo sapien
gggtcccctgcttcagatataggtg

SEQ ID NO: 5458946 - DNA, 25 bp, Homo sapien
tccaaagttggtacctccatggaac

SEQ ID NO: 5458947 - DNA, 25 bp, Homo sapien
aatatccaaagttggtacctccatg

SEQ ID NO: 5458948 - DNA, 25 bp, Homo sapien
gttggtacctccatggaacatgtac

SEQ ID NO: 5458949 - DNA, 25 bp, Homo sapien
attccaatatccaaagttggtacct

SEQ ID NO: 5458950 - DNA, 25 bp, Homo sapien
ttacagctgacacagaccgtgtgga

SEQ ID NO: 5458951 - DNA, 25 bp, Homo sapien
cacactggctcccaacttgagcatg

SEQ ID NO: 5458952 - DNA, 25 bp, Homo sapien
aatccagccagcctgtgtagtactc

SEQ ID NO: 5458953 - DNA, 25 bp, Homo sapien
gtgtggagtgattctggccccagta

SEQ ID NO: 5458954 - DNA, 25 bp, Homo sapien
gcccatggggttcatacttccgaag

SEQ ID NO: 5458955 - DNA, 25 bp, Homo sapien
catacttccgaagcagggtaaagat

SEQ ID NO: 5458956 - DNA, 25 bp, Homo sapien
cgaagcagggtaaagattttggtca

SEQ ID NO: 5458957 - DNA, 25 bp, Homo sapien
gggttcatacttccgaagcagggta

SEQ ID NO: 5458958 - DNA, 25 bp, Homo sapien
tacagtggtatagagtccccggagg

SEQ ID NO: 5458959 - DNA, 25 bp, Homo sapien
gaagtcacaggctctgtagctacca

SEQ ID NO: 5458960 - DNA, 25 bp, Homo sapien
ggagccacacttgagtccttcaggc

SEQ ID NO: 5458961 - DNA, 25 bp, Homo sapien
gatcttttctcctagcagtgcacgg

SEQ ID NO: 5458962 - DNA, 25 bp, Homo sapien
tgaatgctaatgatgttgcccccat

SEQ ID NO: 5458963 - DNA, 25 bp, Homo sapien
tggatatatcttgggcagcaagacc

SEQ ID NO: 5458964 - DNA, 25 bp, Homo sapien
tgtgataaagccatggatatatctt

SEQ ID NO: 5458965 - DNA, 25 bp, Homo sapien
ccccattgtgataaagccatggata

SEQ ID NO: 5458966 - DNA, 25 bp, Homo sapien
ttaatgtttgtcaagatacagctga

SEQ ID NO: 5458967 - DNA, 25 bp, Homo sapien
aatgtttgtcaagatacagctgata

SEQ ID NO: 5458968 - DNA, 25 bp, Homo sapien
taatgtttgtcaagatacagctgat

SEQ ID NO: 5458969 - DNA, 25 bp, Homo sapien
ctggatctgaggttcttagatgaat

SEQ ID NO: 5458970 - DNA, 25 bp, Homo sapien
tgaatttcaggttttcgaagcaacc

SEQ ID NO: 5458971 - DNA, 25 bp, Homo sapien
tgaggttcttagatgaatttcaggt

SEQ ID NO: 5458972 - DNA, 25 bp, Homo sapien
ggttttcgaagcaaccaggatggga

SEQ ID NO: 5458973 - DNA, 25 bp, Homo sapien
caacaggttcgctagagctgcctca

SEQ ID NO: 5458974 - DNA, 25 bp, Homo sapien
tctgcacagatgtaaggtcctggtc

SEQ ID NO: 5458975 - DNA, 25 bp, Homo sapien
aaaggcaatgaggtcccggctgcca

SEQ ID NO: 5458976 - DNA, 25 bp, Homo sapien
taaagttatagaccccaggctgtgg

SEQ ID NO: 5458977 - DNA, 25 bp, Homo sapien
tcttcctgtcccgaccttctttata

SEQ ID NO: 5458978 - DNA, 25 bp, Homo sapien
tccgcggctcttgcgagcacttctt

SEQ ID NO: 5458979 - DNA, 25 bp, Homo sapien
agaaaaagtagatcccatccctccg

SEQ ID NO: 5458980 - DNA, 25 bp, Homo sapien
gctcaggccttgcagggaatctcca

SEQ ID NO: 5458981 - DNA, 25 bp, Homo sapien
tgtatggcgttgaggccgctccatc

SEQ ID NO: 5458982 - DNA, 25 bp, Homo sapien
gcggtacccgaaagtagtgcaggct

SEQ ID NO: 5458983 - DNA, 25 bp, Homo sapien
cgtctaggagaaaccggtcatgacc

SEQ ID NO: 5458984 - DNA, 25 bp, Homo sapien
tcgcatcttcaaaagccggtcggcc

SEQ ID NO: 5458985 - DNA, 25 bp, Homo sapien
ggcagcagcagggaacgaaggcagg

SEQ ID NO: 5458986 - DNA, 25 bp, Homo sapien
agcagtagcgtcaggctgagcggca

SEQ ID NO: 5458987 - DNA, 25 bp, Homo sapien
agcagggaacgaaggcaggacagct

SEQ ID NO: 5458988 - DNA, 25 bp, Homo sapien
ggcagcagtagcgtcaggctgagcg

SEQ ID NO: 5458989 - DNA, 25 bp, Homo sapien
tctgagacggcggacagaccgtcac

SEQ ID NO: 5458990 - DNA, 25 bp, Homo sapien
cctctagtctgagacggcggacaga

SEQ ID NO: 5458991 - DNA, 25 bp, Homo sapien
ggacagaccgtcacgtgtcggattc

SEQ ID NO: 5458992 - DNA, 25 bp, Homo sapien
gcgtttacagcgctcctctagtctg

SEQ ID NO: 5458993 - DNA, 25 bp, Homo sapien
gggcggaaaccacctcaagttgcca

SEQ ID NO: 5458994 - DNA, 25 bp, Homo sapien
cctcaagttgccaggcgtttagcct

SEQ ID NO: 5458995 - DNA, 25 bp, Homo sapien
caggcgtttagcctggacttcctct

SEQ ID NO: 5458996 - DNA, 25 bp, Homo sapien
gaaaccacctcaagttgccaggcgt

SEQ ID NO: 5458997 - DNA, 25 bp, Homo sapien
agcttcatcgacatcacctgggaac

SEQ ID NO: 5458998 - DNA, 25 bp, Homo sapien
gcttcatcgacatcacctgggaact

SEQ ID NO: 5458999 - DNA, 25 bp, Homo sapien
tgtaaaatctcagatcctacctcag

SEQ ID NO: 5459000 - DNA, 25 bp, Homo sapien
caaaattgagaagcatggctttact

SEQ ID NO: 5459001 - DNA, 25 bp, Homo sapien
ggctttacttgactgggctccctga

SEQ ID NO: 5459002 - DNA, 25 bp, Homo sapien
gatcctaggcaccttcaaaattgag

SEQ ID NO: 5459003 - DNA, 25 bp, Homo sapien
ccaacattgggagatggaggtcctg

SEQ ID NO: 5459004 - DNA, 25 bp, Homo sapien
gatgcccagcggttgctgagatacc

SEQ ID NO: 5459005 - DNA, 25 bp, Homo sapien
gttgctgagataccgcgggccgtta

SEQ ID NO: 5459006 - DNA, 25 bp, Homo sapien
tagctagcccggagcctctcagctc

SEQ ID NO: 5459007 - DNA, 25 bp, Homo sapien
taagggtcatgaacagcaaacagag

SEQ ID NO: 5459008 - DNA, 25 bp, Homo sapien
caaacaactctaggagatcgcctgt

SEQ ID NO: 5459009 - DNA, 25 bp, Homo sapien
caagcttatgacgtggctccatgcc

SEQ ID NO: 5459010 - DNA, 25 bp, Homo sapien
cagagttggtaaatgtagaggcagc

SEQ ID NO: 5459011 - DNA, 25 bp, Homo sapien
tcggcgatggcggtcgtgttgctca

SEQ ID NO: 5459012 - DNA, 25 bp, Homo sapien
tcctcataggagtcgatgcccacct

SEQ ID NO: 5459013 - DNA, 25 bp, Homo sapien
agccatatcctcacgggcctcggag

SEQ ID NO: 5459014 - DNA, 25 bp, Homo sapien
atagtcaacagagagccgctccatc

SEQ ID NO: 5459015 - DNA, 25 bp, Homo sapien
ggcaagaacgagaaagaacagttta

SEQ ID NO: 5459016 - DNA, 25 bp, Homo sapien
aaaggcaagaacgagaaagaacagt

SEQ ID NO: 5459017 - DNA, 25 bp, Homo sapien
tgaaaggcaagaacgagaaagaaca

SEQ ID NO: 5459018 - DNA, 25 bp, Homo sapien
ctgaaaggcaagaacgagaaagaac

SEQ ID NO: 5459019 - DNA, 25 bp, Homo sapien
ccatgtatagttagagatgacctcc

SEQ ID NO: 5459020 - DNA, 25 bp, Homo sapien
cagtcagggcaaatactgaggatgc

SEQ ID NO: 5459021 - DNA, 25 bp, Homo sapien
ttagcacagtctcaaaagttccctc

SEQ ID NO: 5459022 - DNA, 25 bp, Homo sapien
gatgacctcctgaaaggatctgaaa

SEQ ID NO: 5459023 - DNA, 25 bp, Homo sapien
tgcggatccgatccagcactgggtc

SEQ ID NO: 5459024 - DNA, 25 bp, Homo sapien
gaagagctgtcggtatgggccattt

SEQ ID NO: 5459025 - DNA, 25 bp, Homo sapien
cggtatgggccatttcggatctcat

SEQ ID NO: 5459026 - DNA, 25 bp, Homo sapien
cgatccagcactgggtcaatgatct

SEQ ID NO: 5459027 - DNA, 25 bp, Homo sapien
caagtacggctaggaattttcaggg

SEQ ID NO: 5459028 - DNA, 25 bp, Homo sapien
cagatgcatggaaggactcatcctc

SEQ ID NO: 5459029 - DNA, 25 bp, Homo sapien
gccagtctcagatcagcttgccttc

SEQ ID NO: 5459030 - DNA, 25 bp, Homo sapien
gaatgcctggtctaaataccctctc

SEQ ID NO: 5459031 - DNA, 25 bp, Homo sapien
cccatgttccaagcaatagagctcc

SEQ ID NO: 5459032 - DNA, 25 bp, Homo sapien
caatgaccgtaggctccagatccac

SEQ ID NO: 5459033 - DNA, 25 bp, Homo sapien
tgcccggggtacgtgttttccagca

SEQ ID NO: 5459034 - DNA, 25 bp, Homo sapien
tgaatcccatgttccaagcaataga

SEQ ID NO: 5459035 - DNA, 25 bp, Homo sapien
cctgccccacgtggactgagatgca

SEQ ID NO: 5459036 - DNA, 25 bp, Homo sapien
gctcttcccacaccgaaatggcggg

SEQ ID NO: 5459037 - DNA, 25 bp, Homo sapien
taatgcttgtaagctcagacagcag

SEQ ID NO: 5459038 - DNA, 25 bp, Homo sapien
tgtcagcccgcacggaaatagcggc

SEQ ID NO: 5459039 - DNA, 25 bp, Homo sapien
tccgtccctgtcagcccgaaattaa

SEQ ID NO: 5459040 - DNA, 25 bp, Homo sapien
cctcggcccgcgcagtgctcagcgc

SEQ ID NO: 5459041 - DNA, 25 bp, Homo sapien
tgcccatccgcgcacccgggcttcg

SEQ ID NO: 5459042 - DNA, 25 bp, Homo sapien
ggcccgcgcagtgctcagcgccagc

SEQ ID NO: 5459043 - DNA, 25 bp, Homo sapien
gctgtctctgcccatccgcgcaccc

SEQ ID NO: 5459044 - DNA, 25 bp, Homo sapien
acgcccggtggaggtccccgagcat

SEQ ID NO: 5459045 - DNA, 25 bp, Homo sapien
tgagtccgggcggtgcgtctcacgt

SEQ ID NO: 5459046 - DNA, 25 bp, Homo sapien
ggtgacaggtctcagtgagaactgc

SEQ ID NO: 5459047 - DNA, 25 bp, Homo sapien
aggtctcagtgagaactgcgctagc

SEQ ID NO: 5459048 - DNA, 25 bp, Homo sapien
cgtctcacgttgagtcggggtgaca

SEQ ID NO: 5459049 - DNA, 25 bp, Homo sapien
agagtcgcgattcgggctttaacca

SEQ ID NO: 5459050 - DNA, 25 bp, Homo sapien
cagattgccaatgccttaggcgctc

SEQ ID NO: 5459051 - DNA, 25 bp, Homo sapien
tgtcccgctgggattaagagtcgcg

SEQ ID NO: 5459052 - DNA, 25 bp, Homo sapien
tcctcgttttgagcagacacgctgg

SEQ ID NO: 5459053 - DNA, 25 bp, Homo sapien
gattggcggagctcatgtcttctgc

SEQ ID NO: 5459054 - DNA, 25 bp, Homo sapien
ccagttggagcatccgattggcgga

SEQ ID NO: 5459055 - DNA, 25 bp, Homo sapien
tcgttggcgaagtattcctgggtcc

SEQ ID NO: 5459056 - DNA, 25 bp, Homo sapien
tagggcccttgcgatgggaattccc

SEQ ID NO: 5459057 - DNA, 25 bp, Homo sapien
gccgcatcaccacacgcaggtgaga

SEQ ID NO: 5459058 - DNA, 25 bp, Homo sapien
acctttgtccaaggacgccgcatca

SEQ ID NO: 5459059 - DNA, 25 bp, Homo sapien
tcccttgtcccgatgccagatttct

SEQ ID NO: 5459060 - DNA, 25 bp, Homo sapien
ggtgcttttcgctctgtttctacat

SEQ ID NO: 5459061 - DNA, 25 bp, Homo sapien
tggtggagccagtcgctgtaacact

SEQ ID NO: 5459062 - DNA, 25 bp, Homo sapien
tggttcccctgacacgtcttgctag

SEQ ID NO: 5459063 - DNA, 25 bp, Homo sapien
gcttggcatgtgatggcagctccag

SEQ ID NO: 5459064 - DNA, 25 bp, Homo sapien
tcagagacgaaccaaaaccagctgg

SEQ ID NO: 5459065 - DNA, 25 bp, Homo sapien
tagcagccgatgttccccttatgag

SEQ ID NO: 5459066 - DNA, 25 bp, Homo sapien
tccacagcacagctaggaccatact

SEQ ID NO: 5459067 - DNA, 25 bp, Homo sapien
ttatggaaccccaagcaatgcttca

SEQ ID NO: 5459068 - DNA, 25 bp, Homo sapien
tgccctccccaggtatgttatggaa

SEQ ID NO: 5459069 - DNA, 25 bp, Homo sapien
gctgcacagacaacacactaacttt

SEQ ID NO: 5459070 - DNA, 25 bp, Homo sapien
tctcttgcgccagaaggagagaggt

SEQ ID NO: 5459071 - DNA, 25 bp, Homo sapien
gaaggctctgggtagaattgctacc

SEQ ID NO: 5459072 - DNA, 25 bp, Homo sapien
cagagcgcccaagtgtgagtcagag

SEQ ID NO: 5459073 - DNA, 25 bp, Homo sapien
aggatggcattcacttcctccgcca

SEQ ID NO: 5459074 - DNA, 25 bp, Homo sapien
agggccttgaggatggcattcactt

SEQ ID NO: 5459075 - DNA, 25 bp, Homo sapien
ctccgccacggctgtcagggcaaat

SEQ ID NO: 5459076 - DNA, 25 bp, Homo sapien
ctgtcagggcaaattcaaactggtc

SEQ ID NO: 5459077 - DNA, 25 bp, Homo sapien
gcagcgatgtcaatctccttcactc

SEQ ID NO: 5459078 - DNA, 25 bp, Homo sapien
gccaggccgctggtcacggacatgc

SEQ ID NO: 5459079 - DNA, 25 bp, Homo sapien
ctccagggtggcagcgatgtcaatc

SEQ ID NO: 5459080 - DNA, 25 bp, Homo sapien
cgctggtcacggacatgctccaggg

SEQ ID NO: 5459081 - DNA, 25 bp, Homo sapien
ttttgccatgcggttcaggaccatg

SEQ ID NO: 5459082 - DNA, 25 bp, Homo sapien
atgaggatgtaggtgccggtcctcc

SEQ ID NO: 5459083 - DNA, 25 bp, Homo sapien
tgcggttcaggaccatgtcgatgag

SEQ ID NO: 5459084 - DNA, 25 bp, Homo sapien
gaggatgtaggtgccggtcctcccc

SEQ ID NO: 5459085 - DNA, 25 bp, Homo sapien
ggagcggccccggtagcacttgttc

SEQ ID NO: 5459086 - DNA, 25 bp, Homo sapien
agcggccccggtagcacttgttcac

SEQ ID NO: 5459087 - DNA, 25 bp, Homo sapien
ggcaggagcggccccggtagcactt

SEQ ID NO: 5459088 - DNA, 25 bp, Homo sapien
caggagcggccccggtagcacttgt

SEQ ID NO: 5459089 - DNA, 25 bp, Homo sapien
cattctttatgaccacccaggctgt

SEQ ID NO: 5459090 - DNA, 25 bp, Homo sapien
tgtcacttgcaagctaggtgcccaa

SEQ ID NO: 5459091 - DNA, 25 bp, Homo sapien
gctgaaacacatgacgtgggcctct

SEQ ID NO: 5459092 - DNA, 25 bp, Homo sapien
tcaactcgggacattgtgctactgc

SEQ ID NO: 5459093 - DNA, 25 bp, Homo sapien
cttgtcctttatgacctttctgctt

SEQ ID NO: 5459094 - DNA, 25 bp, Homo sapien
cctttctgctttgggagtcacctgc

SEQ ID NO: 5459095 - DNA, 25 bp, Homo sapien
gatatccctgcaagccagaaccagg

SEQ ID NO: 5459096 - DNA, 25 bp, Homo sapien
ttgaagtttggaacttcacagtcct

SEQ ID NO: 5459097 - DNA, 25 bp, Homo sapien
gcatctagaattaacggagcccttg

SEQ ID NO: 5459098 - DNA, 25 bp, Homo sapien
cattggctgttacgtcagagggcta

SEQ ID NO: 5459099 - DNA, 25 bp, Homo sapien
gaatggcttcataggagtccacatg

SEQ ID NO: 5459100 - DNA, 25 bp, Homo sapien
gaagtgcgaaccctatcgtgacctg

SEQ ID NO: 5459101 - DNA, 25 bp, Homo sapien
ctgtaccccttgctcccagctcggg

SEQ ID NO: 5459102 - DNA, 25 bp, Homo sapien
ggtggtccccgggccacatgtcctg

SEQ ID NO: 5459103 - DNA, 25 bp, Homo sapien
gatcctcccacactcctttcgacag

SEQ ID NO: 5459104 - DNA, 25 bp, Homo sapien
cccgggccacatgtcctgtctgtcc

SEQ ID NO: 5459105 - DNA, 25 bp, Homo sapien
gccacacctgccaatgatcactttt

SEQ ID NO: 5459106 - DNA, 25 bp, Homo sapien
gagaatactagctgcagatcacaaa

SEQ ID NO: 5459107 - DNA, 25 bp, Homo sapien
gagtgagaatactagctgcagatca

SEQ ID NO: 5459108 - DNA, 25 bp, Homo sapien
gtgagaatactagctgcagatcaca

SEQ ID NO: 5459109 - DNA, 25 bp, Homo sapien
ctggagtgagaatactagctgcaga

SEQ ID NO: 5459110 - DNA, 25 bp, Homo sapien
gggccgcgtggaggccggtgtgccc

SEQ ID NO: 5459111 - DNA, 25 bp, Homo sapien
ctgcggaagtccagcaggggccgcg

SEQ ID NO: 5459112 - DNA, 25 bp, Homo sapien
cggaagtccagcaggggccgcgtgg

SEQ ID NO: 5459113 - DNA, 25 bp, Homo sapien
gcaggggccgcgtggaggccggtgt

SEQ ID NO: 5459114 - DNA, 25 bp, Homo sapien
aactgcgtgagcgtgcgcgtctcct

SEQ ID NO: 5459115 - DNA, 25 bp, Homo sapien
cgcaccagaaagtcctcgcaccaga

SEQ ID NO: 5459116 - DNA, 25 bp, Homo sapien
gggtctgcacgttcttcaggtagaa

SEQ ID NO: 5459117 - DNA, 25 bp, Homo sapien
gcaccagatgtgctccgacaccagg

SEQ ID NO: 5459118 - DNA, 25 bp, Homo sapien
catctggccagtagcggtcacactg

SEQ ID NO: 5459119 - DNA, 25 bp, Homo sapien
agcggtcacactgcttgacaccatc

SEQ ID NO: 5459120 - DNA, 25 bp, Homo sapien
gagggaggcaccctcatctggccag

SEQ ID NO: 5459121 - DNA, 25 bp, Homo sapien
atgacgatgacggtgcagccgctct

SEQ ID NO: 5459122 - DNA, 25 bp, Homo sapien
cagaagtctgcgatggtatgggaca

SEQ ID NO: 5459123 - DNA, 25 bp, Homo sapien
gctggcatccgagggtcatgctcaa

SEQ ID NO: 5459124 - DNA, 25 bp, Homo sapien
ctgccagaagtctgcgatggtatgg

SEQ ID NO: 5459125 - DNA, 25 bp, Homo sapien
tgcgtggctatgtaggctggcatcc

SEQ ID NO: 5459126 - DNA, 25 bp, Homo sapien
accatgagccagtgtgggaaatgcc

SEQ ID NO: 5459127 - DNA, 25 bp, Homo sapien
acaccatgagccagtgtgggaaatg

SEQ ID NO: 5459128 - DNA, 25 bp, Homo sapien
caccatgagccagtgtgggaaatgc

SEQ ID NO: 5459129 - DNA, 25 bp, Homo sapien
taatcgctccgagaagggctgctct

SEQ ID NO: 5459130 - DNA, 25 bp, Homo sapien
ttgatgtaatcgctccgagaagggc

SEQ ID NO: 5459131 - DNA, 25 bp, Homo sapien
ccttcagttttatgcgggcatggtc

SEQ ID NO: 5459132 - DNA, 25 bp, Homo sapien
gggctggcgttgatgtaatcgctcc

SEQ ID NO: 5459133 - DNA, 25 bp, Homo sapien
ctctgcttggtaggcacagagggcc

SEQ ID NO: 5459134 - DNA, 25 bp, Homo sapien
gtggcacaggtgtttggctctgctt

SEQ ID NO: 5459135 - DNA, 25 bp, Homo sapien
gagggcctgccactccttggcaagg

SEQ ID NO: 5459136 - DNA, 25 bp, Homo sapien
tcaggatgccggttctttttgatgt

SEQ ID NO: 5459137 - DNA, 25 bp, Homo sapien
cagaatcatgtgtcccgtggagatg

SEQ ID NO: 5459138 - DNA, 25 bp, Homo sapien
caaggacttcgtggccatgtgctgg

SEQ ID NO: 5459139 - DNA, 25 bp, Homo sapien
tccggtggaccctctgcccggttga

SEQ ID NO: 5459140 - DNA, 25 bp, Homo sapien
actgctcacccgtgaaggctccggt

SEQ ID NO: 5459141 - DNA, 25 bp, Homo sapien
ccttgtcttgctgccgcgcatgctg

SEQ ID NO: 5459142 - DNA, 25 bp, Homo sapien
ctggtactcaaaggtagtgtcacca

SEQ ID NO: 5459143 - DNA, 25 bp, Homo sapien
gctccttgtcttgctgccgcgcatg

SEQ ID NO: 5459144 - DNA, 25 bp, Homo sapien
tcaaaggtagtgtcaccatgggccc

SEQ ID NO: 5459145 - DNA, 25 bp, Homo sapien
gaggtgctgtgcgcagtttggggaa

SEQ ID NO: 5459146 - DNA, 25 bp, Homo sapien
ctgtgcgcagtttggggaaggactg

SEQ ID NO: 5459147 - DNA, 25 bp, Homo sapien
gggtgaggtgctgtgcgcagtttgg

SEQ ID NO: 5459148 - DNA, 25 bp, Homo sapien
gctgtgcgcagtttggggaaggact

SEQ ID NO: 5459149 - DNA, 25 bp, Homo sapien
ttgcggacaacatcagccctctggg

SEQ ID NO: 5459150 - DNA, 25 bp, Homo sapien
tgcctccagctcttgcggacaacat

SEQ ID NO: 5459151 - DNA, 25 bp, Homo sapien
tcttgcggacaacatcagccctctg

SEQ ID NO: 5459152 - DNA, 25 bp, Homo sapien
gctcttgcggacaacatcagccctc

SEQ ID NO: 5459153 - DNA, 25 bp, Homo sapien
gtctgtgcttccagttcagacttca

SEQ ID NO: 5459154 - DNA, 25 bp, Homo sapien
ctgtctgtgcttccagttcagactt

SEQ ID NO: 5459155 - DNA, 25 bp, Homo sapien
ctgtcccactcctgtctgcaagatt

SEQ ID NO: 5459156 - DNA, 25 bp, Homo sapien
cctgtctgcaagatttggagccctg

SEQ ID NO: 5459157 - DNA, 25 bp, Homo sapien
gaggacaaaggtcaggcttgctcca

SEQ ID NO: 5459158 - DNA, 25 bp, Homo sapien
agcaacaggcctggatatatcctct

SEQ ID NO: 5459159 - DNA, 25 bp, Homo sapien
ggattgaggtcgcagagatatttac

SEQ ID NO: 5459160 - DNA, 25 bp, Homo sapien
ggaacatttcaagggggcatcagca

SEQ ID NO: 5459161 - DNA, 25 bp, Homo sapien
ctgcttgttgggtcacatcagccaa

SEQ ID NO: 5459162 - DNA, 25 bp, Homo sapien
cacatcagccaaagacaggttctgc

SEQ ID NO: 5459163 - DNA, 25 bp, Homo sapien
caggttctgctcattgtgccggatg

SEQ ID NO: 5459164 - DNA, 25 bp, Homo sapien
tctgctcattgtgccggatgcggaa

SEQ ID NO: 5459165 - DNA, 25 bp, Homo sapien
tgccagataggagctatgttactgc

SEQ ID NO: 5459166 - DNA, 25 bp, Homo sapien
gaccgcagacttcaaaaaagaggcc

SEQ ID NO: 5459167 - DNA, 25 bp, Homo sapien
cccagaccgcagacttcaaaaaaga

SEQ ID NO: 5459168 - DNA, 25 bp, Homo sapien
gagctatgttactgccttctccacc

SEQ ID NO: 5459169 - DNA, 25 bp, Homo sapien
tgcctgaggacatgtgcacatgctc

SEQ ID NO: 5459170 - DNA, 25 bp, Homo sapien
ctgatgttgatgaagctgcctgagg

SEQ ID NO: 5459171 - DNA, 25 bp, Homo sapien
tgtgcacatgctcagccaggatctc

SEQ ID NO: 5459172 - DNA, 25 bp, Homo sapien
gaagctgcctgaggacatgtgcaca

SEQ ID NO: 5459173 - DNA, 25 bp, Homo sapien
cagtgacgatgtagccatattcctc

SEQ ID NO: 5459174 - DNA, 25 bp, Homo sapien
acgatgtagccatattcctctgctg

SEQ ID NO: 5459175 - DNA, 25 bp, Homo sapien
gatcagtgacgatgtagccatattc

SEQ ID NO: 5459176 - DNA, 25 bp, Homo sapien
ttctgatcagtgacgatgtagccat

SEQ ID NO: 5459177 - DNA, 25 bp, Homo sapien
catgggggatgtgcgggctggaagc

SEQ ID NO: 5459178 - DNA, 25 bp, Homo sapien
gcgggctggaagctctgctgtgtct

SEQ ID NO: 5459179 - DNA, 25 bp, Homo sapien
cttggcacctgctggacttcactgg

SEQ ID NO: 5459180 - DNA, 25 bp, Homo sapien
tggacttcactggaggtagggctgg

SEQ ID NO: 5459181 - DNA, 25 bp, Homo sapien
ctgttcagaagagggtggaggtgtg

SEQ ID NO: 5459182 - DNA, 25 bp, Homo sapien
gagggtggaggtgtggcctctggac

SEQ ID NO: 5459183 - DNA, 25 bp, Homo sapien
aagagggtggaggtgtggcctctgg

SEQ ID NO: 5459184 - DNA, 25 bp, Homo sapien
gggtggaggtgtggcctctggacag

SEQ ID NO: 5459185 - DNA, 25 bp, Homo sapien
tttcttgatatcagctccaacattt

SEQ ID NO: 5459186 - DNA, 25 bp, Homo sapien
atatcagctccaacatttacaaccc

SEQ ID NO: 5459187 - DNA, 25 bp, Homo sapien
ttcttgatatcagctccaacattta

SEQ ID NO: 5459188 - DNA, 25 bp, Homo sapien
ttgatatcagctccaacatttacaa

SEQ ID NO: 5459189 - DNA, 25 bp, Homo sapien
agctgacgcagctctaccccatagc

SEQ ID NO: 5459190 - DNA, 25 bp, Homo sapien
ccatagcccgccagcacagcggcca

SEQ ID NO: 5459191 - DNA, 25 bp, Homo sapien
tcaggggtcagctgacgcagctcta

SEQ ID NO: 5459192 - DNA, 25 bp, Homo sapien
gcacccttgggcagtagctgcagca

SEQ ID NO: 5459193 - DNA, 25 bp, Homo sapien
agcttagggctgattgcgcagtgaa

SEQ ID NO: 5459194 - DNA, 25 bp, Homo sapien
cagagcttagggctgattgcgcagt

SEQ ID NO: 5459195 - DNA, 25 bp, Homo sapien
acacagagcttagggctgattgcgc

SEQ ID NO: 5459196 - DNA, 25 bp, Homo sapien
cacagagcttagggctgattgcgca

SEQ ID NO: 5459197 - DNA, 25 bp, Homo sapien
tggaaggtccccgtaggagtggcca

SEQ ID NO: 5459198 - DNA, 25 bp, Homo sapien
tcttgaaaaagctgggcaggtgaag

SEQ ID NO: 5459199 - DNA, 25 bp, Homo sapien
ccagatagagcagcccagagtcttg

SEQ ID NO: 5459200 - DNA, 25 bp, Homo sapien
ggtccccaaatatgcccttggaggc

SEQ ID NO: 5459201 - DNA, 25 bp, Homo sapien
gcaggttcgtaactcagtgaagggt

SEQ ID NO: 5459202 - DNA, 25 bp, Homo sapien
caggtgctccaagagaggcgggagc

SEQ ID NO: 5459203 - DNA, 25 bp, Homo sapien
caaggcaggttcgtaactcagtgaa

SEQ ID NO: 5459204 - DNA, 25 bp, Homo sapien
ctgcagcaaggcaggttcgtaactc

SEQ ID NO: 5459205 - DNA, 25 bp, Homo sapien
aggggacagagaggagctggcccca

SEQ ID NO: 5459206 - DNA, 25 bp, Homo sapien
acagagaggagctggccccagctcc

SEQ ID NO: 5459207 - DNA, 25 bp, Homo sapien
gacagagaggagctggccccagctc

SEQ ID NO: 5459208 - DNA, 25 bp, Homo sapien
gggacagagaggagctggccccagc

SEQ ID NO: 5459209 - DNA, 25 bp, Homo sapien
ctttgcccactggtggttgtggaag

SEQ ID NO: 5459210 - DNA, 25 bp, Homo sapien
gttgtggaagccgatgctgggcagc

SEQ ID NO: 5459211 - DNA, 25 bp, Homo sapien
tggggatgtcctgtaaaagcagctc

SEQ ID NO: 5459212 - DNA, 25 bp, Homo sapien
gagccagtggggatgtcctgtaaaa

SEQ ID NO: 5459213 - DNA, 25 bp, Homo sapien
caaccacagattcatcagcctcacc

SEQ ID NO: 5459214 - DNA, 25 bp, Homo sapien
catcaattaggacaaccacagattc

SEQ ID NO: 5459215 - DNA, 25 bp, Homo sapien
tccatcaattaggacaaccacagat

SEQ ID NO: 5459216 - DNA, 25 bp, Homo sapien
tctccatcaattaggacaaccacag

SEQ ID NO: 5459217 - DNA, 25 bp, Homo sapien
agagatcacatactgggtgaggtca

SEQ ID NO: 5459218 - DNA, 25 bp, Homo sapien
cctgagagatcacatactgggtgag

SEQ ID NO: 5459219 - DNA, 25 bp, Homo sapien
catctcctgagagatcacatactgg

SEQ ID NO: 5459220 - DNA, 25 bp, Homo sapien
tgcgctccatctcctgagagatcac

SEQ ID NO: 5459221 - DNA, 25 bp, Homo sapien
tgtagcactcagacaatgccagtga

SEQ ID NO: 5459222 - DNA, 25 bp, Homo sapien
gaatagcccatctctagggttccac

SEQ ID NO: 5459223 - DNA, 25 bp, Homo sapien
cagagagtccaaatgtgaatagccc

SEQ ID NO: 5459224 - DNA, 25 bp, Homo sapien
cctaagaagatggaagctggccttt

SEQ ID NO: 5459225 - DNA, 25 bp, Homo sapien
catgagttgtcggagcacaccttgt

SEQ ID NO: 5459226 - DNA, 25 bp, Homo sapien
caccttgtaagcgttggagaactgg

SEQ ID NO: 5459227 - DNA, 25 bp, Homo sapien
tgggacatgagttgtcggagcacac

SEQ ID NO: 5459228 - DNA, 25 bp, Homo sapien
tgtcggagcacaccttgtaagcgtt

SEQ ID NO: 5459229 - DNA, 25 bp, Homo sapien
gcagagcctgcggtcaaatagacag

SEQ ID NO: 5459230 - DNA, 25 bp, Homo sapien
ctgaatacagacttccaggtgagag

SEQ ID NO: 5459231 - DNA, 25 bp, Homo sapien
cctgaatacagacttccaggtgaga

SEQ ID NO: 5459232 - DNA, 25 bp, Homo sapien
cagagcctgcggtcaaatagacagc

SEQ ID NO: 5459233 - DNA, 25 bp, Homo sapien
cgtgggcactaacggcgctgcagcc

SEQ ID NO: 5459234 - DNA, 25 bp, Homo sapien
gtgggcactaacggcgctgcagccc

SEQ ID NO: 5459235 - DNA, 25 bp, Homo sapien
ggcactaacggcgctgcagcccccc

SEQ ID NO: 5459236 - DNA, 25 bp, Homo sapien
ggccggagccgcagcgacgctggcg

SEQ ID NO: 5459237 - DNA, 25 bp, Homo sapien
agctccgggcgctcgctcccgggcc

SEQ ID NO: 5459238 - DNA, 25 bp, Homo sapien
cgcagcgacgctggcgggagcctgc

SEQ ID NO: 5459239 - DNA, 25 bp, Homo sapien
ctttccgagctccgggcgctcgctc

SEQ ID NO: 5459240 - DNA, 25 bp, Homo sapien
agtatacccctacatagcactatgc

SEQ ID NO: 5459241 - DNA, 25 bp, Homo sapien
ttcttaaggcaggtagatatgattt

SEQ ID NO: 5459242 - DNA, 25 bp, Homo sapien
catgctcctaaccagtcagtatacc

SEQ ID NO: 5459243 - DNA, 25 bp, Homo sapien
caccacctagatcaatatgtaggat

SEQ ID NO: 5459244 - DNA, 25 bp, Homo sapien
tcctctgaagggcaatgggaagggt

SEQ ID NO: 5459245 - DNA, 25 bp, Homo sapien
gcagggaggcttcacatgaggtctc

SEQ ID NO: 5459246 - DNA, 25 bp, Homo sapien
gcatgagagtctactttaatgattc

SEQ ID NO: 5459247 - DNA, 25 bp, Homo sapien
acagtaggaagtggcccagagaagc

SEQ ID NO: 5459248 - DNA, 25 bp, Homo sapien
agccccccatatgaacacctatagg

SEQ ID NO: 5459249 - DNA, 25 bp, Homo sapien
gccccccatatgaacacctataggt

SEQ ID NO: 5459250 - DNA, 25 bp, Homo sapien
agggtcccggcgcctgcatcatgtc

SEQ ID NO: 5459251 - DNA, 25 bp, Homo sapien
ccccatatgaacacctataggtaat

SEQ ID NO: 5459252 - DNA, 25 bp, Homo sapien
ttcggaggtaaagcactgatccctg

SEQ ID NO: 5459253 - DNA, 25 bp, Homo sapien
ccacttcggaggtaaagcactgatc

SEQ ID NO: 5459254 - DNA, 25 bp, Homo sapien
ggttggccacctcttgtttcagggc

SEQ ID NO: 5459255 - DNA, 25 bp, Homo sapien
tcagggccttagaaaccacttcgga

SEQ ID NO: 5459256 - DNA, 25 bp, Homo sapien
tggggaataggagttgaagtttctc

SEQ ID NO: 5459257 - DNA, 25 bp, Homo sapien
ataggagttgaagtttctcctcttg

SEQ ID NO: 5459258 - DNA, 25 bp, Homo sapien
gaataggagttgaagtttctcctct

SEQ ID NO: 5459259 - DNA, 25 bp, Homo sapien
aggagttgaagtttctcctcttgct

SEQ ID NO: 5459260 - DNA, 25 bp, Homo sapien
cgtctgtctgccagaatgcttggaa

SEQ ID NO: 5459261 - DNA, 25 bp, Homo sapien
ttccctgttccgtctgtctgccaga

SEQ ID NO: 5459262 - DNA, 25 bp, Homo sapien
ctgccagaatgcttggaatgaccac

SEQ ID NO: 5459263 - DNA, 25 bp, Homo sapien
tgttccgtctgtctgccagaatgct

SEQ ID NO: 5459264 - DNA, 25 bp, Homo sapien
ggtgatgtcatccttccagaacaga

SEQ ID NO: 5459265 - DNA, 25 bp, Homo sapien
ccatccttcaggcatggttcttggg

SEQ ID NO: 5459266 - DNA, 25 bp, Homo sapien
ttcttggggatgcagtctgctggca

SEQ ID NO: 5459267 - DNA, 25 bp, Homo sapien
tgctggcatgctccatcttttggat

SEQ ID NO: 5459268 - DNA, 25 bp, Homo sapien
ggcaaatccttggaggggccaaagc

SEQ ID NO: 5459269 - DNA, 25 bp, Homo sapien
tggaagactggggtggcaaatcctt

SEQ ID NO: 5459270 - DNA, 25 bp, Homo sapien
gggtataatctgctggagcacaacc

SEQ ID NO: 5459271 - DNA, 25 bp, Homo sapien
cacaacctgtaaatgctggaagact

SEQ ID NO: 5459272 - DNA, 25 bp, Homo sapien
agggcaaaatagtggtgtcagcaag

SEQ ID NO: 5459273 - DNA, 25 bp, Homo sapien
ctaagggcaaaatagtggtgtcagc

SEQ ID NO: 5459274 - DNA, 25 bp, Homo sapien
aaatagtggtgtcagcaaggaacct

SEQ ID NO: 5459275 - DNA, 25 bp, Homo sapien
caaaatagtggtgtcagcaaggaac

SEQ ID NO: 5459276 - DNA, 25 bp, Homo sapien
ccttcttccagatcagtgagatagg

SEQ ID NO: 5459277 - DNA, 25 bp, Homo sapien
ctatagtgtagttaccatgagccat

SEQ ID NO: 5459278 - DNA, 25 bp, Homo sapien
tcttccagatcagtgagatagggct

SEQ ID NO: 5459279 - DNA, 25 bp, Homo sapien
tgttttttgctatagtgtagttacc

SEQ ID NO: 5459280 - DNA, 25 bp, Homo sapien
ggcgctgggcggaatgtgggcgaga

SEQ ID NO: 5459281 - DNA, 25 bp, Homo sapien
acatctccgcaaggcttggcggtcc

SEQ ID NO: 5459282 - DNA, 25 bp, Homo sapien
tgggcgagacatctccgcaaggctt

SEQ ID NO: 5459283 - DNA, 25 bp, Homo sapien
cggaatgtgggcgagacatctccgc

SEQ ID NO: 5459284 - DNA, 25 bp, Homo sapien
agtgtcgctgcagccccccgggcag

SEQ ID NO: 5459285 - DNA, 25 bp, Homo sapien
actagtgtcgctgcagccccccggg

SEQ ID NO: 5459286 - DNA, 25 bp, Homo sapien
cgtgggcactagtgtcgctgcagcc

SEQ ID NO: 5459287 - DNA, 25 bp, Homo sapien
gtgggcactagtgtcgctgcagccc

SEQ ID NO: 5459288 - DNA, 25 bp, Homo sapien
ctgttcagcagcaggaagcagacaa

SEQ ID NO: 5459289 - DNA, 25 bp, Homo sapien
tcagcagcaggaagcagacaagcag

SEQ ID NO: 5459290 - DNA, 25 bp, Homo sapien
tgttcagcagcaggaagcagacaag

SEQ ID NO: 5459291 - DNA, 25 bp, Homo sapien
ttcagcagcaggaagcagacaagca

SEQ ID NO: 5459292 - DNA, 25 bp, Homo sapien
agtctcagtgaaggtagcggccacg

SEQ ID NO: 5459293 - DNA, 25 bp, Homo sapien
tgtatcctcccaggctcggcgcgct

SEQ ID NO: 5459294 - DNA, 25 bp, Homo sapien
ccggccaagtctcagtgaaggtagc

SEQ ID NO: 5459295 - DNA, 25 bp, Homo sapien
actccccggccaagtctcagtgaag

SEQ ID NO: 5459296 - DNA, 25 bp, Homo sapien
gagccctcatgacccgattatctct

SEQ ID NO: 5459297 - DNA, 25 bp, Homo sapien
ttcctataaagtcacagtcccactc

SEQ ID NO: 5459298 - DNA, 25 bp, Homo sapien
ggtttcctacagtctcactataatg

SEQ ID NO: 5459299 - DNA, 25 bp, Homo sapien
ggagggaacaagtatctaaaccata

SEQ ID NO: 5459300 - DNA, 25 bp, Homo sapien
gctacgaggttgtgactcagagtag

SEQ ID NO: 5459301 - DNA, 25 bp, Homo sapien
gtgactcagagtagggaatggctca

SEQ ID NO: 5459302 - DNA, 25 bp, Homo sapien
ttaatcagctacgaggttgtgactc

SEQ ID NO: 5459303 - DNA, 25 bp, Homo sapien
tgactcagagtagggaatggctcaa

SEQ ID NO: 5459304 - DNA, 25 bp, Homo sapien
tttctgtgcacatgattgattgtac

SEQ ID NO: 5459305 - DNA, 25 bp, Homo sapien
ggaccaagccatcggaagccccagt

SEQ ID NO: 5459306 - DNA, 25 bp, Homo sapien
tccctgcatcctgagttgcggcaat

SEQ ID NO: 5459307 - DNA, 25 bp, Homo sapien
agtccctgcatcctgagttgcggca

SEQ ID NO: 5459308 - DNA, 25 bp, Homo sapien
tctgaaaccgcttcagatttaaagc

SEQ ID NO: 5459309 - DNA, 25 bp, Homo sapien
tcttggttcaggacctctgaaaccg

SEQ ID NO: 5459310 - DNA, 25 bp, Homo sapien
tcagatttaaagcattgctccctgc

SEQ ID NO: 5459311 - DNA, 25 bp, Homo sapien
tggctggtcacctcttggttcagga

SEQ ID NO: 5459312 - DNA, 25 bp, Homo sapien
gacaagagtctccttgtgcttgctc

SEQ ID NO: 5459313 - DNA, 25 bp, Homo sapien
ggggacaagagtctccttgtgcttg

SEQ ID NO: 5459314 - DNA, 25 bp, Homo sapien
gggacaagagtctccttgtgcttgc

SEQ ID NO: 5459315 - DNA, 25 bp, Homo sapien
taggggacaagagtctccttgtgct

SEQ ID NO: 5459316 - DNA, 25 bp, Homo sapien
cacaccttgagtgatgtcatccttc

SEQ ID NO: 5459317 - DNA, 25 bp, Homo sapien
ggtcctcacaccttgagtgatgtca

SEQ ID NO: 5459318 - DNA, 25 bp, Homo sapien
ggcatggagccagggcgtgtgctct

SEQ ID NO: 5459319 - DNA, 25 bp, Homo sapien
aaggctgcctgtccgctcctcagat

SEQ ID NO: 5459320 - DNA, 25 bp, Homo sapien
cctccctcaggatcgcccctgccct

SEQ ID NO: 5459321 - DNA, 25 bp, Homo sapien
tccctcaggatcgcccctgcccttc

SEQ ID NO: 5459322 - DNA, 25 bp, Homo sapien
ctccctcaggatcgcccctgccctt

SEQ ID NO: 5459323 - DNA, 25 bp, Homo sapien
gtggggactaatggcgtcccagccc

SEQ ID NO: 5459324 - DNA, 25 bp, Homo sapien
caggaagcagagaatcagaggcacc

SEQ ID NO: 5459325 - DNA, 25 bp, Homo sapien
agaatcagaggcacccccgctgggc

SEQ ID NO: 5459326 - DNA, 25 bp, Homo sapien
ccccgagccccatgcgcgcgcaggg

SEQ ID NO: 5459327 - DNA, 25 bp, Homo sapien
tctgcctcagtgctcttatctgtta

SEQ ID NO: 5459328 - DNA, 25 bp, Homo sapien
tgaaacagattttgggtcctgaggc

SEQ ID NO: 5459329 - DNA, 25 bp, Homo sapien
tgatttgctatcacatcctcagtgt

SEQ ID NO: 5459330 - DNA, 25 bp, Homo sapien
tgtctggctcaggacctagctcagc

SEQ ID NO: 5459331 - DNA, 25 bp, Homo sapien
tgtggactgggaatctgagagaggc

SEQ ID NO: 5459332 - DNA, 25 bp, Homo sapien
agtgaagatgttactcagggttggc

SEQ ID NO: 5459333 - DNA, 25 bp, Homo sapien
atgttactcagggttggctgtagtc

SEQ ID NO: 5459334 - DNA, 25 bp, Homo sapien
gttggctgtagtcttctgaaggctt

SEQ ID NO: 5459335 - DNA, 25 bp, Homo sapien
ttgagtgcctcatgacacagcagct

SEQ ID NO: 5459336 - DNA, 25 bp, Homo sapien
ctgcttgagtgcctcatgacacagc

SEQ ID NO: 5459337 - DNA, 25 bp, Homo sapien
ggtctcagttccctaccacatcagc

SEQ ID NO: 5459338 - DNA, 25 bp, Homo sapien
cctcctggcaagacgatgctggctg

SEQ ID NO: 5459339 - DNA, 25 bp, Homo sapien
cagagcgagtctcggtctcaaaaat

SEQ ID NO: 5459340 - DNA, 25 bp, Homo sapien
gcgagtctcggtctcaaaaataaat

SEQ ID NO: 5459341 - DNA, 25 bp, Homo sapien
acagagcgagtctcggtctcaaaaa

SEQ ID NO: 5459342 - DNA, 25 bp, Homo sapien
gagcgagtctcggtctcaaaaataa

SEQ ID NO: 5459343 - DNA, 25 bp, Homo sapien
tgacggatacaggtaagttgccaac

SEQ ID NO: 5459344 - DNA, 25 bp, Homo sapien
tgctggcagctgaaaacggtagtgt

SEQ ID NO: 5459345 - DNA, 25 bp, Homo sapien
aagtaacatttgcagtccccatagg

SEQ ID NO: 5459346 - DNA, 25 bp, Homo sapien
tccccataggataacggcagctgca

SEQ ID NO: 5459347 - DNA, 25 bp, Homo sapien
catagtgtatttgggcttgccttta

SEQ ID NO: 5459348 - DNA, 25 bp, Homo sapien
ccatataatgttttgaaggtactcc

SEQ ID NO: 5459349 - DNA, 25 bp, Homo sapien
taaaatactgtacgccaattgtaag

SEQ ID NO: 5459350 - DNA, 25 bp, Homo sapien
gatcactgtaaaagtttcaggtgca

SEQ ID NO: 5459351 - DNA, 25 bp, Homo sapien
tggcccagtgcagaacaggatctct

SEQ ID NO: 5459352 - DNA, 25 bp, Homo sapien
gagaaacagctttgtctgcccagag

SEQ ID NO: 5459353 - DNA, 25 bp, Homo sapien
caatcaagtaataccagggactgct

SEQ ID NO: 5459354 - DNA, 25 bp, Homo sapien
tagtctccaaataagcgtagcacgg

SEQ ID NO: 5459355 - DNA, 25 bp, Homo sapien
agctgagaacttcccctctcaggtg

SEQ ID NO: 5459356 - DNA, 25 bp, Homo sapien
tttaataatccagcttcagctcagc

SEQ ID NO: 5459357 - DNA, 25 bp, Homo sapien
gctgagaacttcccctctcaggtgc

SEQ ID NO: 5459358 - DNA, 25 bp, Homo sapien
ctgagaacttcccctctcaggtgca

SEQ ID NO: 5459359 - DNA, 25 bp, Homo sapien
agagaagggaacagctcaaagaagc

SEQ ID NO: 5459360 - DNA, 25 bp, Homo sapien
ggcttagagaagggaacagctcaaa

SEQ ID NO: 5459361 - DNA, 25 bp, Homo sapien
tagagaagggaacagctcaaagaag

SEQ ID NO: 5459362 - DNA, 25 bp, Homo sapien
cttagagaagggaacagctcaaaga

SEQ ID NO: 5459363 - DNA, 25 bp, Homo sapien
agcaaccaatccaggcactagaggg

SEQ ID NO: 5459364 - DNA, 25 bp, Homo sapien
tcactttgtgatggcgatgttgtcc

SEQ ID NO: 5459365 - DNA, 25 bp, Homo sapien
tgatggcgatgttgtcccagcaacc

SEQ ID NO: 5459366 - DNA, 25 bp, Homo sapien
gttgtcccagcaaccaatccaggca

SEQ ID NO: 5459367 - DNA, 25 bp, Homo sapien
gaggactcctgtggtgcaggccatc

SEQ ID NO: 5459368 - DNA, 25 bp, Homo sapien
ccccagccgagaagccaagataggt

SEQ ID NO: 5459369 - DNA, 25 bp, Homo sapien
cccggatagagtgcatggccagttg

SEQ ID NO: 5459370 - DNA, 25 bp, Homo sapien
caagataggtccaatggtggttcca

SEQ ID NO: 5459371 - DNA, 25 bp, Homo sapien
gcatagcgttgcttgctgttcacct

SEQ ID NO: 5459372 - DNA, 25 bp, Homo sapien
tctgacaccgcgtttgaagcatagc

SEQ ID NO: 5459373 - DNA, 25 bp, Homo sapien
cgtttgaagcatagcgttgcttgct

SEQ ID NO: 5459374 - DNA, 25 bp, Homo sapien
agggcctctgacaccgcgtttgaag

SEQ ID NO: 5459375 - DNA, 25 bp, Homo sapien
gagagtcaaggtgaggcagaggtaa

SEQ ID NO: 5459376 - DNA, 25 bp, Homo sapien
tggggagagtcaaggtgaggcagag

SEQ ID NO: 5459377 - DNA, 25 bp, Homo sapien
gaataaaggccggtggttctcctca

SEQ ID NO: 5459378 - DNA, 25 bp, Homo sapien
tgtggaataaaggccggtggttctc

SEQ ID NO: 5459379 - DNA, 25 bp, Homo sapien
aataaaggccggtggttctcctcat

SEQ ID NO: 5459380 - DNA, 25 bp, Homo sapien
agagacagataagggccagacatag

SEQ ID NO: 5459381 - DNA, 25 bp, Homo sapien
gcagacatcactaatagatcaccac

SEQ ID NO: 5459382 - DNA, 25 bp, Homo sapien
agggttccgggcagcctctagcaat

SEQ ID NO: 5459383 - DNA, 25 bp, Homo sapien
ggcagcctctagcaatagatggaaa

SEQ ID NO: 5459384 - DNA, 25 bp, Homo sapien
ccaagttggtctcgcagtagtgaaa

SEQ ID NO: 5459385 - DNA, 25 bp, Homo sapien
aaggcaggttatgcttgggtctcca

SEQ ID NO: 5459386 - DNA, 25 bp, Homo sapien
tgaacctcccggcagaatgaagaag

SEQ ID NO: 5459387 - DNA, 25 bp, Homo sapien
taggcattgcatgactttgaccaag

SEQ ID NO: 5459388 - DNA, 25 bp, Homo sapien
catgaaggacttgggtatggcttcc

SEQ ID NO: 5459389 - DNA, 25 bp, Homo sapien
tgggatgcacagcatgggccatgtc

SEQ ID NO: 5459390 - DNA, 25 bp, Homo sapien
tggcacgaggctgagatccgccgca

SEQ ID NO: 5459391 - DNA, 25 bp, Homo sapien
tgggccatgtctgcgctgatcatga

SEQ ID NO: 5459392 - DNA, 25 bp, Homo sapien
gggcctgcacaggaatctatcaagg

SEQ ID NO: 5459393 - DNA, 25 bp, Homo sapien
gtcatagagtgtgaccatgcgcacg

SEQ ID NO: 5459394 - DNA, 25 bp, Homo sapien
accatgcgcacgtgaggctctgtgg

SEQ ID NO: 5459395 - DNA, 25 bp, Homo sapien
tagagtgtgaccatgcgcacgtgag

SEQ ID NO: 5459396 - DNA, 25 bp, Homo sapien
atcaatagctaggtagaaacctttt

SEQ ID NO: 5459397 - DNA, 25 bp, Homo sapien
ccttttcaactgggacaggagacac

SEQ ID NO: 5459398 - DNA, 25 bp, Homo sapien
accttttcaactgggacaggagaca

SEQ ID NO: 5459399 - DNA, 25 bp, Homo sapien
cagatcaatagctaggtagaaacct

SEQ ID NO: 5459400 - DNA, 25 bp, Homo sapien
cttcccatgcaaaaggcagtagaag

SEQ ID NO: 5459401 - DNA, 25 bp, Homo sapien
ccagctctggtctcaattacagccc

SEQ ID NO: 5459402 - DNA, 25 bp, Homo sapien
tggctggttgcctgcagaagtagat

SEQ ID NO: 5459403 - DNA, 25 bp, Homo sapien
tgactggctggttgcctgcagaagt

SEQ ID NO: 5459404 - DNA, 25 bp, Homo sapien
catcaaggtgacatgactggctggt

SEQ ID NO: 5459405 - DNA, 25 bp, Homo sapien
gaccatggtgcctgaaacaacttct

SEQ ID NO: 5459406 - DNA, 25 bp, Homo sapien
caaggctaggacaagagaccatggt

SEQ ID NO: 5459407 - DNA, 25 bp, Homo sapien
aacaccctgatagtgcaagggcaga

SEQ ID NO: 5459408 - DNA, 25 bp, Homo sapien
tatcaaggtgactaggaagagaggc

SEQ ID NO: 5459409 - DNA, 25 bp, Homo sapien
aactcatcataggcaccacccaaga

SEQ ID NO: 5459410 - DNA, 25 bp, Homo sapien
gcagattgtccagccgaggagcaaa

SEQ ID NO: 5459411 - DNA, 25 bp, Homo sapien
cagaagcagctgtgcagattgtcca

SEQ ID NO: 5459412 - DNA, 25 bp, Homo sapien
tgtccagccgaggagcaaagatgaa

SEQ ID NO: 5459413 - DNA, 25 bp, Homo sapien
gaggtaagacagtcagcccgacctt

SEQ ID NO: 5459414 - DNA, 25 bp, Homo sapien
ggtttcttgcgcaacctctccctga

SEQ ID NO: 5459415 - DNA, 25 bp, Homo sapien
ggtctccttggtttcttgcgcaacc

SEQ ID NO: 5459416 - DNA, 25 bp, Homo sapien
tccttggtttcttgcgcaacctctc

SEQ ID NO: 5459417 - DNA, 25 bp, Homo sapien
tctttttgagaaccaccgccctaga

SEQ ID NO: 5459418 - DNA, 25 bp, Homo sapien
gattccttgctaggcaggaccaagc

SEQ ID NO: 5459419 - DNA, 25 bp, Homo sapien
gggccaattcccagatagtcctagt

SEQ ID NO: 5459420 - DNA, 25 bp, Homo sapien
caaaagggtggaggccaatagctct

SEQ ID NO: 5459421 - DNA, 25 bp, Homo sapien
caggctgggtgtctgcaaggcagag

SEQ ID NO: 5459422 - DNA, 25 bp, Homo sapien
agagctccatctccactatgtcctt

SEQ ID NO: 5459423 - DNA, 25 bp, Homo sapien
tgtctgcaaggcagagctccatctc

SEQ ID NO: 5459424 - DNA, 25 bp, Homo sapien
gctccatctccactatgtccttggg

SEQ ID NO: 5459425 - DNA, 25 bp, Homo sapien
tgaggaccgaatggtgccgctcatc

SEQ ID NO: 5459426 - DNA, 25 bp, Homo sapien
gacatgaggaccgaatggtgccgct

SEQ ID NO: 5459427 - DNA, 25 bp, Homo sapien
agggacatgaggaccgaatggtgcc

SEQ ID NO: 5459428 - DNA, 25 bp, Homo sapien
catgaggaccgaatggtgccgctca

SEQ ID NO: 5459429 - DNA, 25 bp, Homo sapien
cacagcattgagaggccctggctca

SEQ ID NO: 5459430 - DNA, 25 bp, Homo sapien
cctcctggatggctgtggcaagaat

SEQ ID NO: 5459431 - DNA, 25 bp, Homo sapien
gaggccctggctcaggagtcccctt

SEQ ID NO: 5459432 - DNA, 25 bp, Homo sapien
tcctggatggctgtggcaagaatgg

SEQ ID NO: 5459433 - DNA, 25 bp, Homo sapien
gctccagccgacctgaggtagggca

SEQ ID NO: 5459434 - DNA, 25 bp, Homo sapien
ggcccaaagttctcgttgatatttc

SEQ ID NO: 5459435 - DNA, 25 bp, Homo sapien
tcgttgatatttcgctgcagatgga

SEQ ID NO: 5459436 - DNA, 25 bp, Homo sapien
ggatgcgaagaatgggccgctccac

SEQ ID NO: 5459437 - DNA, 25 bp, Homo sapien
tgacaatgacgcgtccagccagagt

SEQ ID NO: 5459438 - DNA, 25 bp, Homo sapien
cataggtctccacaccgacttgctg

SEQ ID NO: 5459439 - DNA, 25 bp, Homo sapien
tggctgcggcgagaccgacgtttca

SEQ ID NO: 5459440 - DNA, 25 bp, Homo sapien
agccagagtcaggtcacggtcaaac

SEQ ID NO: 5459441 - DNA, 25 bp, Homo sapien
gtactggccccctacagcaaaagct

SEQ ID NO: 5459442 - DNA, 25 bp, Homo sapien
aagccattgccaggaacgtactggc

SEQ ID NO: 5459443 - DNA, 25 bp, Homo sapien
gggctgtccgtgtgggccccgatga

SEQ ID NO: 5459444 - DNA, 25 bp, Homo sapien
aagctatgatggtggaggagttcct

SEQ ID NO: 5459445 - DNA, 25 bp, Homo sapien
cttgctctcgggcttaatattccat

SEQ ID NO: 5459446 - DNA, 25 bp, Homo sapien
ctggagaaggcggttgcggcattca

SEQ ID NO: 5459447 - DNA, 25 bp, Homo sapien
ggagaaggcggttgcggcattcagc

SEQ ID NO: 5459448 - DNA, 25 bp, Homo sapien
aggcggttgcggcattcagccacag

SEQ ID NO: 5459449 - DNA, 25 bp, Homo sapien
agaaggcggttgcggcattcagcca

SEQ ID NO: 5459450 - DNA, 25 bp, Homo sapien
agagggactccggttcacgaacttg

SEQ ID NO: 5459451 - DNA, 25 bp, Homo sapien
gagttccttagccgcagtctgcacc

SEQ ID NO: 5459452 - DNA, 25 bp, Homo sapien
agtctgcaccgcctctttgcgggcc

SEQ ID NO: 5459453 - DNA, 25 bp, Homo sapien
ttcacgaacttgaggagttccttag

SEQ ID NO: 5459454 - DNA, 25 bp, Homo sapien
ctaggggagggggatgctcagactt

SEQ ID NO: 5459455 - DNA, 25 bp, Homo sapien
gggatgctcagacttttacaaggtc

SEQ ID NO: 5459456 - DNA, 25 bp, Homo sapien
gggagggggatgctcagacttttac

SEQ ID NO: 5459457 - DNA, 25 bp, Homo sapien
ctcagacttttacaaggtctgggac

SEQ ID NO: 5459458 - DNA, 25 bp, Homo sapien
ctgaaactccgttgaaagcttcagc

SEQ ID NO: 5459459 - DNA, 25 bp, Homo sapien
cagggctgaaactccgttgaaagct

SEQ ID NO: 5459460 - DNA, 25 bp, Homo sapien
tgaccactctaaggcacagacctct

SEQ ID NO: 5459461 - DNA, 25 bp, Homo sapien
tgcttccgcccgtccccaccgagag

SEQ ID NO: 5459462 - DNA, 25 bp, Homo sapien
tgcagcaccgcgctaagcttgggcc

SEQ ID NO: 5459463 - DNA, 25 bp, Homo sapien
cagtcccgggaaagtcgtcaggtca

SEQ ID NO: 5459464 - DNA, 25 bp, Homo sapien
gacccggtctgggatcgaaattcaa

SEQ ID NO: 5459465 - DNA, 25 bp, Homo sapien
tttcgctttgggtcaggcggcccca

SEQ ID NO: 5459466 - DNA, 25 bp, Homo sapien
ccgcccctcactagctttgcaggtc

SEQ ID NO: 5459467 - DNA, 25 bp, Homo sapien
tcgtaggccttcatcacgcttcccc

SEQ ID NO: 5459468 - DNA, 25 bp, Homo sapien
tgtgtccgctcatctggcctccggg

SEQ ID NO: 5459469 - DNA, 25 bp, Homo sapien
aggccgcgccgcactcgtaggcctt

SEQ ID NO: 5459470 - DNA, 25 bp, Homo sapien
gtacaaagtgctgtctctcgccaca

SEQ ID NO: 5459471 - DNA, 25 bp, Homo sapien
ccgacgggtacggtacaaagtgctg

SEQ ID NO: 5459472 - DNA, 25 bp, Homo sapien
tacaaagtgctgtctctcgccacag

SEQ ID NO: 5459473 - DNA, 25 bp, Homo sapien
cgacgggtacggtacaaagtgctgt

SEQ ID NO: 5459474 - DNA, 25 bp, Homo sapien
ttaatcttcacaactgccccatcaa

SEQ ID NO: 5459475 - DNA, 25 bp, Homo sapien
aatcttcacaactgccccatcaact

SEQ ID NO: 5459476 - DNA, 25 bp, Homo sapien
atcttcacaactgccccatcaacta

SEQ ID NO: 5459477 - DNA, 25 bp, Homo sapien
taatcttcacaactgccccatcaac

SEQ ID NO: 5459478 - DNA, 25 bp, Homo sapien
acactgactttcttgtacaataatc

SEQ ID NO: 5459479 - DNA, 25 bp, Homo sapien
aaaaacactgactttcttgtacaat

SEQ ID NO: 5459480 - DNA, 25 bp, Homo sapien
aaacactgactttcttgtacaataa

SEQ ID NO: 5459481 - DNA, 25 bp, Homo sapien
actgactttcttgtacaataatcac

SEQ ID NO: 5459482 - DNA, 25 bp, Homo sapien
aatctttaaacatgagggttttcag

SEQ ID NO: 5459483 - DNA, 25 bp, Homo sapien
atctttaaacatgagggttttcagg

SEQ ID NO: 5459484 - DNA, 25 bp, Homo sapien
tctttaaacatgagggttttcaggc

SEQ ID NO: 5459485 - DNA, 25 bp, Homo sapien
taatctttaaacatgagggttttca

SEQ ID NO: 5459486 - DNA, 25 bp, Homo sapien
cttgtggtagccattgagccagctg

SEQ ID NO: 5459487 - DNA, 25 bp, Homo sapien
aggctccgagccatggtgacctgct

SEQ ID NO: 5459488 - DNA, 25 bp, Homo sapien
ccagctgttggggacgaacatgatg

SEQ ID NO: 5459489 - DNA, 25 bp, Homo sapien
catgatggagaggctccgagccatg

SEQ ID NO: 5459490 - DNA, 25 bp, Homo sapien
gtgtgccttttttgccggatccttc

SEQ ID NO: 5459491 - DNA, 25 bp, Homo sapien
agtggacaggcctgaaccgtgtgcc

SEQ ID NO: 5459492 - DNA, 25 bp, Homo sapien
tgaaccgtgtgccttttttgccgga

SEQ ID NO: 5459493 - DNA, 25 bp, Homo sapien
gacaggcctgaaccgtgtgcctttt

SEQ ID NO: 5459494 - DNA, 25 bp, Homo sapien
tacacagacgtggacattgatcaaa

SEQ ID NO: 5459495 - DNA, 25 bp, Homo sapien
aaactggtaccccttgatactcata

SEQ ID NO: 5459496 - DNA, 25 bp, Homo sapien
tagatacaggtacaaacataaagag

SEQ ID NO: 5459497 - DNA, 25 bp, Homo sapien
atttggactggtagttacacagacg

SEQ ID NO: 5459498 - DNA, 25 bp, Homo sapien
gaggtccataccaagaagacggtga

SEQ ID NO: 5459499 - DNA, 25 bp, Homo sapien
cataccaagaagacggtgatgatca

SEQ ID NO: 5459500 - DNA, 25 bp, Homo sapien
agaagacggtgatgatcaagaccat

SEQ ID NO: 5459501 - DNA, 25 bp, Homo sapien
tcaagaccatcgagacacgggatgg

SEQ ID NO: 5459502 - DNA, 25 bp, Homo sapien
tcgtggtccccaacagcgacatagc

SEQ ID NO: 5459503 - DNA, 25 bp, Homo sapien
gcagcatgaagtgctctaaagacag

SEQ ID NO: 5459504 - DNA, 25 bp, Homo sapien
cctctgccaccagagaccgtcctca

SEQ ID NO: 5459505 - DNA, 25 bp, Homo sapien
gaagtgctctaaagacagagaccct

SEQ ID NO: 5459506 - DNA, 25 bp, Homo sapien
ctacaagagggaatccccgaaggtg

SEQ ID NO: 5459507 - DNA, 25 bp, Homo sapien
ccccagagcagggtgttgggatact

SEQ ID NO: 5459508 - DNA, 25 bp, Homo sapien
gagagcggtctcaggctggtgggag

SEQ ID NO: 5459509 - DNA, 25 bp, Homo sapien
ggcttgaaattgtccccgtggtctc

SEQ ID NO: 5459510 - DNA, 25 bp, Homo sapien
gaagcatccgtcttggtctggacca

SEQ ID NO: 5459511 - DNA, 25 bp, Homo sapien
tactggactccagggcatacgtctg

SEQ ID NO: 5459512 - DNA, 25 bp, Homo sapien
cactggtcccacacaatagcgttgg

SEQ ID NO: 5459513 - DNA, 25 bp, Homo sapien
tcatggagggttgtgccaggtcact

SEQ ID NO: 5459514 - DNA, 25 bp, Homo sapien
aggcattgtcctgacagacccaggg

SEQ ID NO: 5459515 - DNA, 25 bp, Homo sapien
tgtctttaggtgtgcatcttggctg

SEQ ID NO: 5459516 - DNA, 25 bp, Homo sapien
ctcagtgctgctcgatccactctct

SEQ ID NO: 5459517 - DNA, 25 bp, Homo sapien
agaagcctacctaggggagccacca

SEQ ID NO: 5459518 - DNA, 25 bp, Homo sapien
tggcctccggtctgcatacgtcaat

SEQ ID NO: 5459519 - DNA, 25 bp, Homo sapien
gagccaggcaggtttagtaaatcgc

SEQ ID NO: 5459520 - DNA, 25 bp, Homo sapien
gaatgggagccataccttggagccg

SEQ ID NO: 5459521 - DNA, 25 bp, Homo sapien
taaggagaaccagctaccatcgagc

SEQ ID NO: 5459522 - DNA, 25 bp, Homo sapien
tagcgccgtgctgcatttcagacag

SEQ ID NO: 5459523 - DNA, 25 bp, Homo sapien
tacgaggtgtacgtggagaacagcc

SEQ ID NO: 5459524 - DNA, 25 bp, Homo sapien
aaactgataagagttgccctcgccg

SEQ ID NO: 5459525 - DNA, 25 bp, Homo sapien
cgcagggtgttcttcgagatcggca

SEQ ID NO: 5459526 - DNA, 25 bp, Homo sapien
tgcccaggcatgaacagctaactcg

SEQ ID NO: 5459527 - DNA, 25 bp, Homo sapien
gcagtcatctcagggtttaaagcca

SEQ ID NO: 5459528 - DNA, 25 bp, Homo sapien
ggatgtcttccagcgtaatcagcag

SEQ ID NO: 5459529 - DNA, 25 bp, Homo sapien
catgcagtcgggtggaaatgcgtct

SEQ ID NO: 5459530 - DNA, 25 bp, Homo sapien
tgctccagccaacgaggttcctggc

SEQ ID NO: 5459531 - DNA, 25 bp, Homo sapien
agtgtctggggcctcccgccattgg

SEQ ID NO: 5459532 - DNA, 25 bp, Homo sapien
taggtagaaatagagggacaggagc

SEQ ID NO: 5459533 - DNA, 25 bp, Homo sapien
cctcccgccattgggcaggggagtt

SEQ ID NO: 5459534 - DNA, 25 bp, Homo sapien
gcacatgcatgacttggtcccgggt

SEQ ID NO: 5459535 - DNA, 25 bp, Homo sapien
tatgtgtgaccaagcacgcactggg

SEQ ID NO: 5459536 - DNA, 25 bp, Homo sapien
tgcatgacttggtcccgggtgaaag

SEQ ID NO: 5459537 - DNA, 25 bp, Homo sapien
gtatgtgtgaccaagcacgcactgg

SEQ ID NO: 5459538 - DNA, 25 bp, Homo sapien
ggagaagttgggagatgccccctcc

SEQ ID NO: 5459539 - DNA, 25 bp, Homo sapien
ccccaacaactcttctacagcccag

SEQ ID NO: 5459540 - DNA, 25 bp, Homo sapien
gcttcggcagggtccaaaagggaga

SEQ ID NO: 5459541 - DNA, 25 bp, Homo sapien
cacttggccagtttattaaaggcag

SEQ ID NO: 5459542 - DNA, 25 bp, Homo sapien
gctggcgtcaggcagactgtactgc

SEQ ID NO: 5459543 - DNA, 25 bp, Homo sapien
aggccacagcccgaatcagcagcgt

SEQ ID NO: 5459544 - DNA, 25 bp, Homo sapien
gaaactgggtttgggatgagaagtg

SEQ ID NO: 5459545 - DNA, 25 bp, Homo sapien
gcacgtcccccagtgcttgtccaga

SEQ ID NO: 5459546 - DNA, 25 bp, Homo sapien
gctacggccagccctgcccagcgag

SEQ ID NO: 5459547 - DNA, 25 bp, Homo sapien
tgccacggcccacggggacagggtg

SEQ ID NO: 5459548 - DNA, 25 bp, Homo sapien
atgccacggcccacggggacagggt

SEQ ID NO: 5459549 - DNA, 25 bp, Homo sapien
gtgtggccatgccacggcccacggg

SEQ ID NO: 5459550 - DNA, 25 bp, Homo sapien
gtggggtgtggccatgccacggccc

SEQ ID NO: 5459551 - DNA, 25 bp, Homo sapien
gacatagggcacaggcaagatctcc

SEQ ID NO: 5459552 - DNA, 25 bp, Homo sapien
ggatcaaagcgtcggtagccattca

SEQ ID NO: 5459553 - DNA, 25 bp, Homo sapien
ccatcggcgcaggagaaagcgtgct

SEQ ID NO: 5459554 - DNA, 25 bp, Homo sapien
tcaaagagtagcatggccagctggg

SEQ ID NO: 5459555 - DNA, 25 bp, Homo sapien
ggctcagctccagatggctatagtg

SEQ ID NO: 5459556 - DNA, 25 bp, Homo sapien
tggatctcctggtacgtgcgttcca

SEQ ID NO: 5459557 - DNA, 25 bp, Homo sapien
gctgtcagggcacttcggaaatgag

SEQ ID NO: 5459558 - DNA, 25 bp, Homo sapien
gctcgggcgaaagctttgtgcagct

SEQ ID NO: 5459559 - DNA, 25 bp, Homo sapien
aatgtccgaattggcatggaaaagc

SEQ ID NO: 5459560 - DNA, 25 bp, Homo sapien
gaaaagcagacctgtatctccaaca

SEQ ID NO: 5459561 - DNA, 25 bp, Homo sapien
catgacaaggaggtatcagtgggat

SEQ ID NO: 5459562 - DNA, 25 bp, Homo sapien
ctctcagagggatttgaacatgaca

SEQ ID NO: 5459563 - DNA, 25 bp, Homo sapien
tcagggcgcgcactgacgatgtcgt

SEQ ID NO: 5459564 - DNA, 25 bp, Homo sapien
tggcatcgagaatgcagcgacccag

SEQ ID NO: 5459565 - DNA, 25 bp, Homo sapien
aaccagtcaaagtcgtcgccgtgct

SEQ ID NO: 5459566 - DNA, 25 bp, Homo sapien
tgcaggtgtccaatgggtcgctcct

SEQ ID NO: 5459567 - DNA, 25 bp, Homo sapien
ttaatgagataggtacattcctccc

SEQ ID NO: 5459568 - DNA, 25 bp, Homo sapien
gaaggtaaattgcagaaccagcatt

SEQ ID NO: 5459569 - DNA, 25 bp, Homo sapien
gttatttcaactcatcagcagagac

SEQ ID NO: 5459570 - DNA, 25 bp, Homo sapien
tgaacccaatgttacttagaagtta

SEQ ID NO: 5459571 - DNA, 25 bp, Homo sapien
ctccgggctgcaccgagttgggccg

SEQ ID NO: 5459572 - DNA, 25 bp, Homo sapien
tgacggcctttttggcggcctggcc

SEQ ID NO: 5459573 - DNA, 25 bp, Homo sapien
gggtggtagggcaagacgcgcggct

SEQ ID NO: 5459574 - DNA, 25 bp, Homo sapien
tcctccacccaggtgacgctgagca

SEQ ID NO: 5459575 - DNA, 25 bp, Homo sapien
ggttcttgcgctcggcactggagcc

SEQ ID NO: 5459576 - DNA, 25 bp, Homo sapien
gtctcgggctctcgctaccggagag

SEQ ID NO: 5459577 - DNA, 25 bp, Homo sapien
gtcccatgtgacgtcagaagcagcc

SEQ ID NO: 5459578 - DNA, 25 bp, Homo sapien
agcagaggccggagctgtccatcag

SEQ ID NO: 5459579 - DNA, 25 bp, Homo sapien
taccgagagcgggtgctagagacac

SEQ ID NO: 5459580 - DNA, 25 bp, Homo sapien
tctcactgggttgctgtttggctcg

SEQ ID NO: 5459581 - DNA, 25 bp, Homo sapien
tccaggttaccgctgcttcaaggca

SEQ ID NO: 5459582 - DNA, 25 bp, Homo sapien
tgatgccgtcatgactccagtgacc

SEQ ID NO: 5459583 - DNA, 25 bp, Homo sapien
acaacaacatatggagtgctggctc

SEQ ID NO: 5459584 - DNA, 25 bp, Homo sapien
cctcgatggcggtagagagctgact

SEQ ID NO: 5459585 - DNA, 25 bp, Homo sapien
tctgggaggatagcacccaggtgcc

SEQ ID NO: 5459586 - DNA, 25 bp, Homo sapien
tacagcagagataacacagacaagg

SEQ ID NO: 5459587 - DNA, 25 bp, Homo sapien
aggaggcctgctaggctgccactca

SEQ ID NO: 5459588 - DNA, 25 bp, Homo sapien
tggtgtctgtcatgccaacctagac

SEQ ID NO: 5459589 - DNA, 25 bp, Homo sapien
aggattgtctcaggcgagtcttggc

SEQ ID NO: 5459590 - DNA, 25 bp, Homo sapien
tcgcagccagactcatctaagggtt

SEQ ID NO: 5459591 - DNA, 25 bp, Homo sapien
tagcacttttattgttccttgtctc

SEQ ID NO: 5459592 - DNA, 25 bp, Homo sapien
ctgtagcacttttattgttccttgt

SEQ ID NO: 5459593 - DNA, 25 bp, Homo sapien
ctgcccagggtaagggcaaacgcct

SEQ ID NO: 5459594 - DNA, 25 bp, Homo sapien
tccaagctgtccaagggcacccgcc

SEQ ID NO: 5459595 - DNA, 25 bp, Homo sapien
ctgcagaggaatgactccacatggg

SEQ ID NO: 5459596 - DNA, 25 bp, Homo sapien
tgcagaggaatgactccacatgggg

SEQ ID NO: 5459597 - DNA, 25 bp, Homo sapien
ggcagagcctggacaccagtacaca

SEQ ID NO: 5459598 - DNA, 25 bp, Homo sapien
cttggttagggctgtcttggcggca

SEQ ID NO: 5459599 - DNA, 25 bp, Homo sapien
gcagagcctggacaccagtacacaa

SEQ ID NO: 5459600 - DNA, 25 bp, Homo sapien
ccttggttagggctgtcttggcggc

SEQ ID NO: 5459601 - DNA, 25 bp, Homo sapien
cagcgcggcacctgaagggaatgct

SEQ ID NO: 5459602 - DNA, 25 bp, Homo sapien
aactggtagaaacagggctgttcaa

SEQ ID NO: 5459603 - DNA, 25 bp, Homo sapien
gaaagaggcttctgccaaggctgac

SEQ ID NO: 5459604 - DNA, 25 bp, Homo sapien
gggctgttcaagagagacaaacatg

SEQ ID NO: 5459605 - DNA, 25 bp, Homo sapien
tgatctgagccaagcagttccaggg

SEQ ID NO: 5459606 - DNA, 25 bp, Homo sapien
tcctacgtatcccaggacccgttgc

SEQ ID NO: 5459607 - DNA, 25 bp, Homo sapien
ggaaagcctcccataggtgtggctt

SEQ ID NO: 5459608 - DNA, 25 bp, Homo sapien
tgtggcttaacccatcagctcccag

SEQ ID NO: 5459609 - DNA, 25 bp, Homo sapien
caccagaacggtcttctcgcgaggg

SEQ ID NO: 5459610 - DNA, 25 bp, Homo sapien
ttggtcctcaggtcgaacgtcatgg

SEQ ID NO: 5459611 - DNA, 25 bp, Homo sapien
tcatacttatctcccgggcacagct

SEQ ID NO: 5459612 - DNA, 25 bp, Homo sapien
gccgtggctgcgcatctcatactta

SEQ ID NO: 5459613 - DNA, 25 bp, Homo sapien
ggatgtacactctctgtcgctccca

SEQ ID NO: 5459614 - DNA, 25 bp, Homo sapien
ggggaaacgcgctgccctctgtgac

SEQ ID NO: 5459615 - DNA, 25 bp, Homo sapien
ggccttagccctctatgccaccagt

SEQ ID NO: 5459616 - DNA, 25 bp, Homo sapien
cttaagttaatagggacacgcatgg

SEQ ID NO: 5459617 - DNA, 25 bp, Homo sapien
cctggaagcggacttcaccggcgtc

SEQ ID NO: 5459618 - DNA, 25 bp, Homo sapien
aagcggacttcaccggcgtcctcgg

SEQ ID NO: 5459619 - DNA, 25 bp, Homo sapien
cctccacttccagtagagccaggga

SEQ ID NO: 5459620 - DNA, 25 bp, Homo sapien
cagctcgctaagcaccagaatgtgt

SEQ ID NO: 5459621 - DNA, 25 bp, Homo sapien
gtgagggggtcgctagcgaggccgg

SEQ ID NO: 5459622 - DNA, 25 bp, Homo sapien
ggggtcgctagcgaggccggagcca

SEQ ID NO: 5459623 - DNA, 25 bp, Homo sapien
ctgggggtgagggggtcgctagcga

SEQ ID NO: 5459624 - DNA, 25 bp, Homo sapien
ggggtgagggggtcgctagcgaggc

SEQ ID NO: 5459625 - DNA, 25 bp, Homo sapien
tcggacgccgttagtgtatgctagg

SEQ ID NO: 5459626 - DNA, 25 bp, Homo sapien
cagcaggcccctgggtcggttcgga

SEQ ID NO: 5459627 - DNA, 25 bp, Homo sapien
ggttcggacgccgttagtgtatgct

SEQ ID NO: 5459628 - DNA, 25 bp, Homo sapien
tcggttcggacgccgttagtgtatg

SEQ ID NO: 5459629 - DNA, 25 bp, Homo sapien
gcttgtcccggtggggcgggatctg

SEQ ID NO: 5459630 - DNA, 25 bp, Homo sapien
ccggtggggcgggatctgttcgagc

SEQ ID NO: 5459631 - DNA, 25 bp, Homo sapien
gggcgggatctgttcgagcctgggc

SEQ ID NO: 5459632 - DNA, 25 bp, Homo sapien
cgggatctgttcgagcctgggcggg

SEQ ID NO: 5459633 - DNA, 25 bp, Homo sapien
cgacacggtgcactcgaacgtagcg

SEQ ID NO: 5459634 - DNA, 25 bp, Homo sapien
ttcctgtcggatgcggacgcgggct

SEQ ID NO: 5459635 - DNA, 25 bp, Homo sapien
aacgtagcgccgtcgccttcgcggg

SEQ ID NO: 5459636 - DNA, 25 bp, Homo sapien
agctcggagagtaccgccacagtac

SEQ ID NO: 5459637 - DNA, 25 bp, Homo sapien
cctttctagaagcacgcgcggtcat

SEQ ID NO: 5459638 - DNA, 25 bp, Homo sapien
gggaagacagctccgcaagtctcgc

SEQ ID NO: 5459639 - DNA, 25 bp, Homo sapien
gcaagtctcgcgcccaaagcagtgc

SEQ ID NO: 5459640 - DNA, 25 bp, Homo sapien
gcagagggcagttaccggtcacgcc

SEQ ID NO: 5459641 - DNA, 25 bp, Homo sapien
ggctaggcgtaagcgcgttcccgtc

SEQ ID NO: 5459642 - DNA, 25 bp, Homo sapien
agaaggcggcgcgtgccgagggcct

SEQ ID NO: 5459643 - DNA, 25 bp, Homo sapien
cacggtcaggcggaccggtccggcg

SEQ ID NO: 5459644 - DNA, 25 bp, Homo sapien
gtccccaccgcgcagctgtaggtcc

SEQ ID NO: 5459645 - DNA, 25 bp, Homo sapien
taatgcaaatcttagcacagtgcca

SEQ ID NO: 5459646 - DNA, 25 bp, Homo sapien
ggcacatccgctcaaggaatattag

SEQ ID NO: 5459647 - DNA, 25 bp, Homo sapien
tcgttggtgttacactgaagtgggc

SEQ ID NO: 5459648 - DNA, 25 bp, Homo sapien
cagtgacaagacctacctcctagag

SEQ ID NO: 5459649 - DNA, 25 bp, Homo sapien
caggtaacatcagccaaagcttggg

SEQ ID NO: 5459650 - DNA, 25 bp, Homo sapien
cactcgaacgtagctgtgtcgccct

SEQ ID NO: 5459651 - DNA, 25 bp, Homo sapien
ggtcacctctaggtcgtgtggcccc

SEQ ID NO: 5459652 - DNA, 25 bp, Homo sapien
gcttgggaaagctcgcactcgaacg

SEQ ID NO: 5459653 - DNA, 25 bp, Homo sapien
gtgggagagggaggacagtgcagag

SEQ ID NO: 5459654 - DNA, 25 bp, Homo sapien
ggagagggaggacagtgcagaggga

SEQ ID NO: 5459655 - DNA, 25 bp, Homo sapien
gggtgggagagggaggacagtgcag

SEQ ID NO: 5459656 - DNA, 25 bp, Homo sapien
tgggagagggaggacagtgcagagg

SEQ ID NO: 5459657 - DNA, 25 bp, Homo sapien
tcatgcctggggtaagtagggccac

SEQ ID NO: 5459658 - DNA, 25 bp, Homo sapien
gccacacagggcctatgagtcaggg

SEQ ID NO: 5459659 - DNA, 25 bp, Homo sapien
tcacactctggcagggatgtcaatg

SEQ ID NO: 5459660 - DNA, 25 bp, Homo sapien
gggtcagtattcatgcctggggtaa

SEQ ID NO: 5459661 - DNA, 25 bp, Homo sapien
tcacaatgagtctggctgcgcagcg

SEQ ID NO: 5459662 - DNA, 25 bp, Homo sapien
taccagtcggtgacggtggccgtcc

SEQ ID NO: 5459663 - DNA, 25 bp, Homo sapien
caggcccaggccattgagtaccagt

SEQ ID NO: 5459664 - DNA, 25 bp, Homo sapien
ccgagtggatgtgacacttgggtcc

SEQ ID NO: 5459665 - DNA, 25 bp, Homo sapien
tgtgtttatagcaaagccgacttgg

SEQ ID NO: 5459666 - DNA, 25 bp, Homo sapien
caaagaggttaacttgcatgaggtc

SEQ ID NO: 5459667 - DNA, 25 bp, Homo sapien
ctgggacggccatgggtgacttttc

SEQ ID NO: 5459668 - DNA, 25 bp, Homo sapien
tagaatacatgcctgaaggatgccc

SEQ ID NO: 5459669 - DNA, 25 bp, Homo sapien
gtggctctcgcagccgtaggtgccc

SEQ ID NO: 5459670 - DNA, 25 bp, Homo sapien
taggtgccctggtcggccagtatga

SEQ ID NO: 5459671 - DNA, 25 bp, Homo sapien
tgcaaccgccgtaggaacagcagct

SEQ ID NO: 5459672 - DNA, 25 bp, Homo sapien
acttcgagacacacatcctggcctt

SEQ ID NO: 5459673 - DNA, 25 bp, Homo sapien
acaggcacgggacacagagtatctc

SEQ ID NO: 5459674 - DNA, 25 bp, Homo sapien
cccactggtctgtccctaggtggag

SEQ ID NO: 5459675 - DNA, 25 bp, Homo sapien
tgctggaatcctggttgggagtaca

SEQ ID NO: 5459676 - DNA, 25 bp, Homo sapien
gggacacagagtatctcatcctcat

SEQ ID NO: 5459677 - DNA, 25 bp, Homo sapien
caaggttaagatgcggcttgaacca

SEQ ID NO: 5459678 - DNA, 25 bp, Homo sapien
tgcggcttgaaccattctgggccat

SEQ ID NO: 5459679 - DNA, 25 bp, Homo sapien
gcccgcaaagtcacggtccctgcat

SEQ ID NO: 5459680 - DNA, 25 bp, Homo sapien
ccccagttggcagcctcgcaaggtt

SEQ ID NO: 5459681 - DNA, 25 bp, Homo sapien
cagtgagtggtgtcagctccgagac

SEQ ID NO: 5459682 - DNA, 25 bp, Homo sapien
gcatcatcgccctcgtggacagtga

SEQ ID NO: 5459683 - DNA, 25 bp, Homo sapien
ttcacaccggaacgtggcatcatcg

SEQ ID NO: 5459684 - DNA, 25 bp, Homo sapien
ctggagtgacgacggccccattgcg

SEQ ID NO: 5459685 - DNA, 25 bp, Homo sapien
gaggacctactatgtatcgaccaca

SEQ ID NO: 5459686 - DNA, 25 bp, Homo sapien
cagaatctaggctggaacctggctg

SEQ ID NO: 5459687 - DNA, 25 bp, Homo sapien
accgatggcccaaaggacaagatgc

SEQ ID NO: 5459688 - DNA, 25 bp, Homo sapien
tcagacaggttgaacaacttggcca

SEQ ID NO: 5459689 - DNA, 25 bp, Homo sapien
ccggagaggtgcaccaccagctcta

SEQ ID NO: 5459690 - DNA, 25 bp, Homo sapien
ttccacgctgacaaggaagatgcgg

SEQ ID NO: 5459691 - DNA, 25 bp, Homo sapien
cgtccttgtaccagcgtacagggcc

SEQ ID NO: 5459692 - DNA, 25 bp, Homo sapien
gtgctccgaaccctcgtctgggctg

SEQ ID NO: 5459693 - DNA, 25 bp, Homo sapien
catgacggggaaggtactgagagaa

SEQ ID NO: 5459694 - DNA, 25 bp, Homo sapien
gaaaagcaggaatcccgcagagttt

SEQ ID NO: 5459695 - DNA, 25 bp, Homo sapien
tcccgcagagtttggggtgccactc

SEQ ID NO: 5459696 - DNA, 25 bp, Homo sapien
cacggggaggcatgacggggaaggt

SEQ ID NO: 5459697 - DNA, 25 bp, Homo sapien
gctgctccagactggcaggtgtaga

SEQ ID NO: 5459698 - DNA, 25 bp, Homo sapien
agcccgggacagttcacagctcagc

SEQ ID NO: 5459699 - DNA, 25 bp, Homo sapien
cagccacctggacggtgaagctgag

SEQ ID NO: 5459700 - DNA, 25 bp, Homo sapien
tcggcatggagctctaggccctcgc

SEQ ID NO: 5459701 - DNA, 25 bp, Homo sapien
caggatgacattgaaggtgatggcc

SEQ ID NO: 5459702 - DNA, 25 bp, Homo sapien
cgggtgggcccctcggcacccagct

SEQ ID NO: 5459703 - DNA, 25 bp, Homo sapien
ggtgatggcctcatgccgggtctca

SEQ ID NO: 5459704 - DNA, 25 bp, Homo sapien
gcccgtccttgtaccagcgcacctg

SEQ ID NO: 5459705 - DNA, 25 bp, Homo sapien
gccgggtgcacaatcctctctggtg

SEQ ID NO: 5459706 - DNA, 25 bp, Homo sapien
ggctgccgggtgcacaatcctctct

SEQ ID NO: 5459707 - DNA, 25 bp, Homo sapien
ctgccgggtgcacaatcctctctgg

SEQ ID NO: 5459708 - DNA, 25 bp, Homo sapien
cgggtgcacaatcctctctggtggg

SEQ ID NO: 5459709 - DNA, 25 bp, Homo sapien
tctcctgcctcacccgccagatcct

SEQ ID NO: 5459710 - DNA, 25 bp, Homo sapien
acagctcttgagaacagtgccagct

SEQ ID NO: 5459711 - DNA, 25 bp, Homo sapien
tgcctcacccgccagatcctcagcc

SEQ ID NO: 5459712 - DNA, 25 bp, Homo sapien
gcacataggcttggccagcaggcct

SEQ ID NO: 5459713 - DNA, 25 bp, Homo sapien
taagcaggattctgatggccaaaca

SEQ ID NO: 5459714 - DNA, 25 bp, Homo sapien
gaatggttctaattgctgggcaccc

SEQ ID NO: 5459715 - DNA, 25 bp, Homo sapien
tccccagcatctaaaacagtgccaa

SEQ ID NO: 5459716 - DNA, 25 bp, Homo sapien
tggtcctgacctgatgtggctaagc

SEQ ID NO: 5459717 - DNA, 25 bp, Homo sapien
acactccaaggtcacggcgatcaag

SEQ ID NO: 5459718 - DNA, 25 bp, Homo sapien
tcacctcatcgcgagggtatatgat

SEQ ID NO: 5459719 - DNA, 25 bp, Homo sapien
gggcatcctcccgagacagttcaca

SEQ ID NO: 5459720 - DNA, 25 bp, Homo sapien
gtgaagaaggccgagtcatctccag

SEQ ID NO: 5459721 - DNA, 25 bp, Homo sapien
cttcggctttttcaagaggacgcat

SEQ ID NO: 5459722 - DNA, 25 bp, Homo sapien
agtgccagctgttcgtcgccatggg

SEQ ID NO: 5459723 - DNA, 25 bp, Homo sapien
ccaggttaggttagcggctgaagca

SEQ ID NO: 5459724 - DNA, 25 bp, Homo sapien
gaggacgcataactccggattgtta

SEQ ID NO: 5459725 - DNA, 25 bp, Homo sapien
caaagcacatgtgtggaatgcgcag

SEQ ID NO: 5459726 - DNA, 25 bp, Homo sapien
agctgcctcctcacctagcctggca

SEQ ID NO: 5459727 - DNA, 25 bp, Homo sapien
caggactacccgtttgcgacccctg

SEQ ID NO: 5459728 - DNA, 25 bp, Homo sapien
tgcgacccctggttaacagctgcct

SEQ ID NO: 5459729 - DNA, 25 bp, Homo sapien
gctgtctctgtgaccccggggagct

SEQ ID NO: 5459730 - DNA, 25 bp, Homo sapien
tcagcaagaaccctggcacatgcac

SEQ ID NO: 5459731 - DNA, 25 bp, Homo sapien
tcagtaaatgagctgtggagcagag

SEQ ID NO: 5459732 - DNA, 25 bp, Homo sapien
tcacctgctactcccagtgcctgat

SEQ ID NO: 5459733 - DNA, 25 bp, Homo sapien
tgaaggaggccgactcatcgtcaat

SEQ ID NO: 5459734 - DNA, 25 bp, Homo sapien
tttcacacaagtactcgccggagtc

SEQ ID NO: 5459735 - DNA, 25 bp, Homo sapien
tcgagctggacagcgggcagcacca

SEQ ID NO: 5459736 - DNA, 25 bp, Homo sapien
accaggcggcggacagtgtcttcct

SEQ ID NO: 5459737 - DNA, 25 bp, Homo sapien
accttgccgctgggatacacgatcc

SEQ ID NO: 5459738 - DNA, 25 bp, Homo sapien
ccttgccgctgggatacacgatcca

SEQ ID NO: 5459739 - DNA, 25 bp, Homo sapien
gaaagccaggcttccttagccaaga

SEQ ID NO: 5459740 - DNA, 25 bp, Homo sapien
tagaccatagcttgaggagaaaggg

SEQ ID NO: 5459741 - DNA, 25 bp, Homo sapien
cactgtccccagagatttcccttgg

SEQ ID NO: 5459742 - DNA, 25 bp, Homo sapien
cctcggctgtagaaacgctccacat

SEQ ID NO: 5459743 - DNA, 25 bp, Homo sapien
cgcactgaaactcgcccccgtctga

SEQ ID NO: 5459744 - DNA, 25 bp, Homo sapien
tcatctccagcgacgcactgaaact

SEQ ID NO: 5459745 - DNA, 25 bp, Homo sapien
ggtgacagtgaagtaggcacactca

SEQ ID NO: 5459746 - DNA, 25 bp, Homo sapien
tggtgacagtgaagtaggcacactc

SEQ ID NO: 5459747 - DNA, 25 bp, Homo sapien
gggtccacgatgtgcacgggaggat

SEQ ID NO: 5459748 - DNA, 25 bp, Homo sapien
ttatggcatgcacgaacacatgttc

SEQ ID NO: 5459749 - DNA, 25 bp, Homo sapien
gtccttgtaccaacgcacaggggcg

SEQ ID NO: 5459750 - DNA, 25 bp, Homo sapien
acaggccagcatgacacactcggaa

SEQ ID NO: 5459751 - DNA, 25 bp, Homo sapien
gaagtccacccttgagagctcacaa

SEQ ID NO: 5459752 - DNA, 25 bp, Homo sapien
ttgtgaaggtcaacgacaccctgtc

SEQ ID NO: 5459753 - DNA, 25 bp, Homo sapien
ttgtaccaggttgccgggaagtcca

SEQ ID NO: 5459754 - DNA, 25 bp, Homo sapien
cctcaggcaggatcagacggtgttt

SEQ ID NO: 5459755 - DNA, 25 bp, Homo sapien
cctctgcctgcgatgctgacagtga

SEQ ID NO: 5459756 - DNA, 25 bp, Homo sapien
ttgattggtcttacaaactccagca

SEQ ID NO: 5459757 - DNA, 25 bp, Homo sapien
gcatgggtgccgacagattccttga

SEQ ID NO: 5459758 - DNA, 25 bp, Homo sapien
caatggtgacatggcaaatgctagc

SEQ ID NO: 5459759 - DNA, 25 bp, Homo sapien
cacaaagcactccagagaattggga

SEQ ID NO: 5459760 - DNA, 25 bp, Homo sapien
ccctggatgttgcatgtgggttgaa

SEQ ID NO: 5459761 - DNA, 25 bp, Homo sapien
tgaaattggccttccggacctctga

SEQ ID NO: 5459762 - DNA, 25 bp, Homo sapien
tatcaagataacaaggggtgccctg

SEQ ID NO: 5459763 - DNA, 25 bp, Homo sapien
ttctgctctatacggtaccgcaggg

SEQ ID NO: 5459764 - DNA, 25 bp, Homo sapien
ggccctccggctcgttactcttgag

SEQ ID NO: 5459765 - DNA, 25 bp, Homo sapien
tcgagggagaagacggcatcttccc

SEQ ID NO: 5459766 - DNA, 25 bp, Homo sapien
tgtcctggtgcttgacggcatgcag

SEQ ID NO: 5459767 - DNA, 25 bp, Homo sapien
agcctgtgagaggaccagcactgag

SEQ ID NO: 5459768 - DNA, 25 bp, Homo sapien
caagcctgtgagaggaccagcactg

SEQ ID NO: 5459769 - DNA, 25 bp, Homo sapien
cctgtgagaggaccagcactgaggg

SEQ ID NO: 5459770 - DNA, 25 bp, Homo sapien
tgtgagaggaccagcactgagggct

SEQ ID NO: 5459771 - DNA, 25 bp, Homo sapien
caaggtgagcagaaccgtggaacac

SEQ ID NO: 5459772 - DNA, 25 bp, Homo sapien
tcaacaggaccgtgttcttgtggcc

SEQ ID NO: 5459773 - DNA, 25 bp, Homo sapien
ggccatgtccgctgactgtgcagat

SEQ ID NO: 5459774 - DNA, 25 bp, Homo sapien
tgcagatgcggaagcggtagtcacc

SEQ ID NO: 5459775 - DNA, 25 bp, Homo sapien
gggggtcctgggggactgtgcttga

SEQ ID NO: 5459776 - DNA, 25 bp, Homo sapien
tgccaatatggggggtcctggggga

SEQ ID NO: 5459777 - DNA, 25 bp, Homo sapien
ctgccaatatggggggtcctggggg

SEQ ID NO: 5459778 - DNA, 25 bp, Homo sapien
ggtcctgggggactgtgcttgacac

SEQ ID NO: 5459779 - DNA, 25 bp, Homo sapien
gcagggatgtgttccggccttgctt

SEQ ID NO: 5459780 - DNA, 25 bp, Homo sapien
ttccaccttaaatctacttcaccaa

SEQ ID NO: 5459781 - DNA, 25 bp, Homo sapien
tgcctcgcctgtccagaggccttcc

SEQ ID NO: 5459782 - DNA, 25 bp, Homo sapien
ccagctccggcatctggccaacctc

SEQ ID NO: 5459783 - DNA, 25 bp, Homo sapien
ttactctgagaagcgtagtggtacg

SEQ ID NO: 5459784 - DNA, 25 bp, Homo sapien
tctagagtttccactagcagcacag

SEQ ID NO: 5459785 - DNA, 25 bp, Homo sapien
tccttccaggacgtcgagcttccgg

SEQ ID NO: 5459786 - DNA, 25 bp, Homo sapien
ggctaaaggtgacctcgccagcatc

SEQ ID NO: 5459787 - DNA, 25 bp, Homo sapien
tgcggacaggaatccatcaacctgg

SEQ ID NO: 5459788 - DNA, 25 bp, Homo sapien
cggacaggaatccatcaacctggaa

SEQ ID NO: 5459789 - DNA, 25 bp, Homo sapien
gcggacaggaatccatcaacctgga

SEQ ID NO: 5459790 - DNA, 25 bp, Homo sapien
gacaggaatccatcaacctggaatc

SEQ ID NO: 5459791 - DNA, 25 bp, Homo sapien
gcatctcgcacaggtagataccatc

SEQ ID NO: 5459792 - DNA, 25 bp, Homo sapien
tggtcctcacggaaccaggccgtgg

SEQ ID NO: 5459793 - DNA, 25 bp, Homo sapien
gatctgctcgtacttgcggcagggc

SEQ ID NO: 5459794 - DNA, 25 bp, Homo sapien
gacagtgccctcttcgatctgctcg

SEQ ID NO: 5459795 - DNA, 25 bp, Homo sapien
accttcctcttcttgcaaacgtggg

SEQ ID NO: 5459796 - DNA, 25 bp, Homo sapien
gagacctactaaatccgaatccctg

SEQ ID NO: 5459797 - DNA, 25 bp, Homo sapien
catctgcctcggaatcatttaagga

SEQ ID NO: 5459798 - DNA, 25 bp, Homo sapien
agaagagttctagggccctccggat

SEQ ID NO: 5459799 - DNA, 25 bp, Homo sapien
cgatccttggcctggcagtaaagca

SEQ ID NO: 5459800 - DNA, 25 bp, Homo sapien
gtaaagcaccttgagcacgaagccg

SEQ ID NO: 5459801 - DNA, 25 bp, Homo sapien
catcacgtagcagcggaacttggcg

SEQ ID NO: 5459802 - DNA, 25 bp, Homo sapien
tcttaggcgcgcacttgagcggctc

SEQ ID NO: 5459803 - DNA, 25 bp, Homo sapien
acccactgggatcgaggccccgtga

SEQ ID NO: 5459804 - DNA, 25 bp, Homo sapien
ccgtccgccgggaagctcaggcgtt

SEQ ID NO: 5459805 - DNA, 25 bp, Homo sapien
aggaccacgcacttgagctcggcct

SEQ ID NO: 5459806 - DNA, 25 bp, Homo sapien
ttaccacccgcacaggccgcgggaa

SEQ ID NO: 5459807 - DNA, 25 bp, Homo sapien
tgcagcggcgaacggtgggggggca

SEQ ID NO: 5459808 - DNA, 25 bp, Homo sapien
gggggtgcggagggcgagccgaggc

SEQ ID NO: 5459809 - DNA, 25 bp, Homo sapien
tgcggagggcgagccgaggcccggg

SEQ ID NO: 5459810 - DNA, 25 bp, Homo sapien
cggccgaccgcctgcagcggcgaac

SEQ ID NO: 5459811 - DNA, 25 bp, Homo sapien
cttcctgtttgcctctccagcgagt

SEQ ID NO: 5459812 - DNA, 25 bp, Homo sapien
agcaggggtgcacagtactcgtata

SEQ ID NO: 5459813 - DNA, 25 bp, Homo sapien
gttgcagtcatattacccttacatc

SEQ ID NO: 5459814 - DNA, 25 bp, Homo sapien
gggtgcacagtactcgtataccctt

SEQ ID NO: 5459815 - DNA, 25 bp, Homo sapien
cagaagttgcagtcatattaccctt

SEQ ID NO: 5459816 - DNA, 25 bp, Homo sapien
tcggagagactgtgcctgaggcctt

SEQ ID NO: 5459817 - DNA, 25 bp, Homo sapien
aaatagtcagcataccaaagcgccg

SEQ ID NO: 5459818 - DNA, 25 bp, Homo sapien
tctatgaaaaatggacagcctgcag

SEQ ID NO: 5459819 - DNA, 25 bp, Homo sapien
cagcaggtggaaacccaacgaggtc

SEQ ID NO: 5459820 - DNA, 25 bp, Homo sapien
aggttatatcctcggtggcctcagc

SEQ ID NO: 5459821 - DNA, 25 bp, Homo sapien
gatacacgagtttggagggagtcta

SEQ ID NO: 5459822 - DNA, 25 bp, Homo sapien
caaaggactaggttcgcgtggagcc

SEQ ID NO: 5459823 - DNA, 25 bp, Homo sapien
cgatctaagtccatcctacggcgga

SEQ ID NO: 5459824 - DNA, 25 bp, Homo sapien
tttcacttgcacctcagttacctcc

SEQ ID NO: 5459825 - DNA, 25 bp, Homo sapien
tcctttcacttgcacctcagttacc

SEQ ID NO: 5459826 - DNA, 25 bp, Homo sapien
tctcctttcacttgcacctcagtta

SEQ ID NO: 5459827 - DNA, 25 bp, Homo sapien
attctcctttcacttgcacctcagt

SEQ ID NO: 5459828 - DNA, 25 bp, Homo sapien
gagttggtgggtgtcagcatcatct

SEQ ID NO: 5459829 - DNA, 25 bp, Homo sapien
ctaataggatgagttggtgggtgtc

SEQ ID NO: 5459830 - DNA, 25 bp, Homo sapien
taggatgagttggtgggtgtcagca

SEQ ID NO: 5459831 - DNA, 25 bp, Homo sapien
cagcatcatcttactccccccagcc

SEQ ID NO: 5459832 - DNA, 25 bp, Homo sapien
tggagagtcacttcaatacatggat

SEQ ID NO: 5459833 - DNA, 25 bp, Homo sapien
tgctttccagctgtgaccatggcag

SEQ ID NO: 5459834 - DNA, 25 bp, Homo sapien
caggtaacgagcctccctgagtctc

SEQ ID NO: 5459835 - DNA, 25 bp, Homo sapien
taatgatgcccaaacctgtcggcag

SEQ ID NO: 5459836 - DNA, 25 bp, Homo sapien
gctgtagtgctataggaatccccaa

SEQ ID NO: 5459837 - DNA, 25 bp, Homo sapien
ccacgtcaaaaggtgtgtagatcct

SEQ ID NO: 5459838 - DNA, 25 bp, Homo sapien
ttcttctttagtttcgccacgtcaa

SEQ ID NO: 5459839 - DNA, 25 bp, Homo sapien
gggaagcagtggctgtagtgctata

SEQ ID NO: 5459840 - DNA, 25 bp, Homo sapien
ctgtccccttggaggccttcatggc

SEQ ID NO: 5459841 - DNA, 25 bp, Homo sapien
tcttctctggctctgtcctcttcat

SEQ ID NO: 5459842 - DNA, 25 bp, Homo sapien
tgtccccttggaggccttcatggct

SEQ ID NO: 5459843 - DNA, 25 bp, Homo sapien
ccccttggaggccttcatggctctt

SEQ ID NO: 5459844 - DNA, 25 bp, Homo sapien
agttttctcaaatcgtctgtaattc

SEQ ID NO: 5459845 - DNA, 25 bp, Homo sapien
ttctttgcccacatttagttttctc

SEQ ID NO: 5459846 - DNA, 25 bp, Homo sapien
attcatgggtagcacagatgtttcc

SEQ ID NO: 5459847 - DNA, 25 bp, Homo sapien
tctgccgatagaattctgtgagttg

SEQ ID NO: 5459848 - DNA, 25 bp, Homo sapien
cccacaagaatcaccctggtgatta

SEQ ID NO: 5459849 - DNA, 25 bp, Homo sapien
caaaggagtatgcagccatgtggcc

SEQ ID NO: 5459850 - DNA, 25 bp, Homo sapien
gctgacgtccaatgctggcagcact

SEQ ID NO: 5459851 - DNA, 25 bp, Homo sapien
gcctgaatctttagcgtatttgtaa

SEQ ID NO: 5459852 - DNA, 25 bp, Homo sapien
tgccagggttgtagtaagtaataaa

SEQ ID NO: 5459853 - DNA, 25 bp, Homo sapien
gttctgaaatagcttctataaccag

SEQ ID NO: 5459854 - DNA, 25 bp, Homo sapien
tagcttctataaccagtttcatcac

SEQ ID NO: 5459855 - DNA, 25 bp, Homo sapien
taatcatccaagacatcattccctg

SEQ ID NO: 5459856 - DNA, 25 bp, Homo sapien
tgggaaccactgtgggttctgaaat

SEQ ID NO: 5459857 - DNA, 25 bp, Homo sapien
gcctctgggcaagctgactacactg

SEQ ID NO: 5459858 - DNA, 25 bp, Homo sapien
ttaaacagtcctttggctcgcggcc

SEQ ID NO: 5459859 - DNA, 25 bp, Homo sapien
tacaggtctgtctttgtgaacgctc

SEQ ID NO: 5459860 - DNA, 25 bp, Homo sapien
tacactgcaacgcaaagtctgcttg

SEQ ID NO: 5459861 - DNA, 25 bp, Homo sapien
gctctgcagacttagctggctgcct

SEQ ID NO: 5459862 - DNA, 25 bp, Homo sapien
agctctgcagacttagctggctgcc

SEQ ID NO: 5459863 - DNA, 25 bp, Homo sapien
ggctgcctcattacaatgacttcat

SEQ ID NO: 5459864 - DNA, 25 bp, Homo sapien
agctggctgcctcattacaatgact

SEQ ID NO: 5459865 - DNA, 25 bp, Homo sapien
actccagcaaggaactcccagcaag

SEQ ID NO: 5459866 - DNA, 25 bp, Homo sapien
ggaactcccagcaagggacattcca

SEQ ID NO: 5459867 - DNA, 25 bp, Homo sapien
cttgtatctggtggtttgccatcct

SEQ ID NO: 5459868 - DNA, 25 bp, Homo sapien
ggacattccagcagttggaactccc

SEQ ID NO: 5459869 - DNA, 25 bp, Homo sapien
ccaagggaagacatagatctttcct

SEQ ID NO: 5459870 - DNA, 25 bp, Homo sapien
caagggaagacatagatctttcctt

SEQ ID NO: 5459871 - DNA, 25 bp, Homo sapien
tctttccttagagcacagctgagac

SEQ ID NO: 5459872 - DNA, 25 bp, Homo sapien
aacagcaaaggggtcttcaatagca

SEQ ID NO: 5459873 - DNA, 25 bp, Homo sapien
accacagctgaacagagttggtttt

SEQ ID NO: 5459874 - DNA, 25 bp, Homo sapien
agcaaaggggtcttcaatagcatta

SEQ ID NO: 5459875 - DNA, 25 bp, Homo sapien
gggaacagcaaaggggtcttcaata

SEQ ID NO: 5459876 - DNA, 25 bp, Homo sapien
tgtcctcactcactagctctgaact

SEQ ID NO: 5459877 - DNA, 25 bp, Homo sapien
tcttgggggactgtttactgctgtc

SEQ ID NO: 5459878 - DNA, 25 bp, Homo sapien
gcagaactcccggttccaacacttc

SEQ ID NO: 5459879 - DNA, 25 bp, Homo sapien
gaacttggttctctgattactgctc

SEQ ID NO: 5459880 - DNA, 25 bp, Homo sapien
gggttggcttgcagtccacaaagtg

SEQ ID NO: 5459881 - DNA, 25 bp, Homo sapien
ggagcacagagaaatagctgtgaag

SEQ ID NO: 5459882 - DNA, 25 bp, Homo sapien
tgtgaagactggcatcctgccagca

SEQ ID NO: 5459883 - DNA, 25 bp, Homo sapien
tgcattctagggttggcttgcagtc

SEQ ID NO: 5459884 - DNA, 25 bp, Homo sapien
tgtgtgcccgtgtccctcgttcttg

SEQ ID NO: 5459885 - DNA, 25 bp, Homo sapien
aagggtgtctgaagcatgcaagtgc

SEQ ID NO: 5459886 - DNA, 25 bp, Homo sapien
ggcttgtccgtcctacccactgagg

SEQ ID NO: 5459887 - DNA, 25 bp, Homo sapien
agtgacacccactaacccagtcagg

SEQ ID NO: 5459888 - DNA, 25 bp, Homo sapien
cagttgctgaaatccggatgggtcc

SEQ ID NO: 5459889 - DNA, 25 bp, Homo sapien
agttgctgaaatccggatgggtccc

SEQ ID NO: 5459890 - DNA, 25 bp, Homo sapien
ctgaaatccggatgggtcccatcat

SEQ ID NO: 5459891 - DNA, 25 bp, Homo sapien
gctgaaatccggatgggtcccatca

SEQ ID NO: 5459892 - DNA, 25 bp, Homo sapien
acaccctggaagtgactggcataag

SEQ ID NO: 5459893 - DNA, 25 bp, Homo sapien
ggctcaaattctacccaattctctg

SEQ ID NO: 5459894 - DNA, 25 bp, Homo sapien
cattagtttaatgcttgccagtgct

SEQ ID NO: 5459895 - DNA, 25 bp, Homo sapien
tgactggcataagcctttagagaga

SEQ ID NO: 5459896 - DNA, 25 bp, Homo sapien
ggcagaaacttcaccgtaaagcaga

SEQ ID NO: 5459897 - DNA, 25 bp, Homo sapien
gcagaaacttcaccgtaaagcagaa

SEQ ID NO: 5459898 - DNA, 25 bp, Homo sapien
cagaaacttcaccgtaaagcagaaa

SEQ ID NO: 5459899 - DNA, 25 bp, Homo sapien
ccccaccttcagatatactccacat

SEQ ID NO: 5459900 - DNA, 25 bp, Homo sapien
tgggccccaccttcagatatactcc

SEQ ID NO: 5459901 - DNA, 25 bp, Homo sapien
gacgggatatgtgaaggctgggccc

SEQ ID NO: 5459902 - DNA, 25 bp, Homo sapien
ctgacgggatatgtgaaggctgggc

SEQ ID NO: 5459903 - DNA, 25 bp, Homo sapien
tcagttacatcagtgcacaaaagag

SEQ ID NO: 5459904 - DNA, 25 bp, Homo sapien
cagggaagcgaatatcatgaaacat

SEQ ID NO: 5459905 - DNA, 25 bp, Homo sapien
gtggcaaacaggataccccactgct

SEQ ID NO: 5459906 - DNA, 25 bp, Homo sapien
agaaacagctgcaccgataccagca

SEQ ID NO: 5459907 - DNA, 25 bp, Homo sapien
agctctctccacagaatacatgttc

SEQ ID NO: 5459908 - DNA, 25 bp, Homo sapien
cagctctctccacagaatacatgtt

SEQ ID NO: 5459909 - DNA, 25 bp, Homo sapien
gctctctccacagaatacatgttct

SEQ ID NO: 5459910 - DNA, 25 bp, Homo sapien
gacaggtatttgagagctgggatcc

SEQ ID NO: 5459911 - DNA, 25 bp, Homo sapien
tcaagtttagcatctgactagcacc

SEQ ID NO: 5459912 - DNA, 25 bp, Homo sapien
cagacattgctggtagctcaggctc

SEQ ID NO: 5459913 - DNA, 25 bp, Homo sapien
tctgggtacacctgacaagtatgca

SEQ ID NO: 5459914 - DNA, 25 bp, Homo sapien
agcccaagcagccaacagggtgggg

SEQ ID NO: 5459915 - DNA, 25 bp, Homo sapien
ggagcccaagcagccaacagggtgg

SEQ ID NO: 5459916 - DNA, 25 bp, Homo sapien
ggggagcccaagcagccaacagggt

SEQ ID NO: 5459917 - DNA, 25 bp, Homo sapien
gggagcccaagcagccaacagggtg

SEQ ID NO: 5459918 - DNA, 25 bp, Homo sapien
tctccctcttttcatcgttctctat

SEQ ID NO: 5459919 - DNA, 25 bp, Homo sapien
ctccagccatgatgcatggcccctt

SEQ ID NO: 5459920 - DNA, 25 bp, Homo sapien
ctgtgcggaggagtgtgaatccctt

SEQ ID NO: 5459921 - DNA, 25 bp, Homo sapien
acattctgcctgacattggccagct

SEQ ID NO: 5459922 - DNA, 25 bp, Homo sapien
tcagcaggtttcctctttcaaagcc

SEQ ID NO: 5459923 - DNA, 25 bp, Homo sapien
gcaggtttcctctttcaaagccagt

SEQ ID NO: 5459924 - DNA, 25 bp, Homo sapien
ctttcagcaggtttcctctttcaaa

SEQ ID NO: 5459925 - DNA, 25 bp, Homo sapien
caggtttcctctttcaaagccagtc

SEQ ID NO: 5459926 - DNA, 25 bp, Homo sapien
tccatggtgtgatgctatgagtgtg

SEQ ID NO: 5459927 - DNA, 25 bp, Homo sapien
gttccatggtgtgatgctatgagtg

SEQ ID NO: 5459928 - DNA, 25 bp, Homo sapien
ccatggtgtgatgctatgagtgtgt

SEQ ID NO: 5459929 - DNA, 25 bp, Homo sapien
ttccatggtgtgatgctatgagtgt

SEQ ID NO: 5459930 - DNA, 25 bp, Homo sapien
tcatctttgagactggcacgcttgg

SEQ ID NO: 5459931 - DNA, 25 bp, Homo sapien
ggtcagcgctcatgtgggaagtcac

SEQ ID NO: 5459932 - DNA, 25 bp, Homo sapien
tcatctcattcattgggtcagcgct

SEQ ID NO: 5459933 - DNA, 25 bp, Homo sapien
tctccttgtgggcagacatctctga

SEQ ID NO: 5459934 - DNA, 25 bp, Homo sapien
ttcttctggtaggagccagatctcc

SEQ ID NO: 5459935 - DNA, 25 bp, Homo sapien
tcaagagctgtggtacatgcagtga

SEQ ID NO: 5459936 - DNA, 25 bp, Homo sapien
ggtacatgcagtgagcaggtccttc

SEQ ID NO: 5459937 - DNA, 25 bp, Homo sapien
caggtccttcttctggtaggagcca

SEQ ID NO: 5459938 - DNA, 25 bp, Homo sapien
atgacccatacaagatgggcagtac

SEQ ID NO: 5459939 - DNA, 25 bp, Homo sapien
tgacccatacaagatgggcagtact

SEQ ID NO: 5459940 - DNA, 25 bp, Homo sapien
gacccatacaagatgggcagtactg

SEQ ID NO: 5459941 - DNA, 25 bp, Homo sapien
taaagcaggtgacccgtcaggtggg

SEQ ID NO: 5459942 - DNA, 25 bp, Homo sapien
ataaagcaggtgacccgtcaggtgg

SEQ ID NO: 5459943 - DNA, 25 bp, Homo sapien
gataaagcaggtgacccgtcaggtg

SEQ ID NO: 5459944 - DNA, 25 bp, Homo sapien
aagcaggtgacccgtcaggtgggct

SEQ ID NO: 5459945 - DNA, 25 bp, Homo sapien
ctggctgaaataggaagccgttcag

SEQ ID NO: 5459946 - DNA, 25 bp, Homo sapien
tgttggcttcatagtttgtggctac

SEQ ID NO: 5459947 - DNA, 25 bp, Homo sapien
gcttcatagtttgtggctacatagg

SEQ ID NO: 5459948 - DNA, 25 bp, Homo sapien
ccgttcagctgaagcctgttggctt

SEQ ID NO: 5459949 - DNA, 25 bp, Homo sapien
cctgcattggctagtgaggagtgac

SEQ ID NO: 5459950 - DNA, 25 bp, Homo sapien
ggagtgaatacccaagggctcaaat

SEQ ID NO: 5459951 - DNA, 25 bp, Homo sapien
cctggaaggatatctgggcattgca

SEQ ID NO: 5459952 - DNA, 25 bp, Homo sapien
aatgggctgaatgggagtgaatacc

SEQ ID NO: 5459953 - DNA, 25 bp, Homo sapien
tttatccactccagtgcatcaaaca

SEQ ID NO: 5459954 - DNA, 25 bp, Homo sapien
cgatagacacataggacatggccac

SEQ ID NO: 5459955 - DNA, 25 bp, Homo sapien
actccagtgcatcaaacaaggtctg

SEQ ID NO: 5459956 - DNA, 25 bp, Homo sapien
taaagatacgatagacacataggac

SEQ ID NO: 5459957 - DNA, 25 bp, Homo sapien
tctcaggaacgtttttagcgggctc

SEQ ID NO: 5459958 - DNA, 25 bp, Homo sapien
caatggcggattgattgctcgagcc

SEQ ID NO: 5459959 - DNA, 25 bp, Homo sapien
tgaaaagggagaactgcacaagcac

SEQ ID NO: 5459960 - DNA, 25 bp, Homo sapien
cacttgaggctgcttaacgtccagg

SEQ ID NO: 5459961 - DNA, 25 bp, Homo sapien
tgtgatccagtcttatccgcaatgt

SEQ ID NO: 5459962 - DNA, 25 bp, Homo sapien
ttatccgcaatgtcagacaggtaca

SEQ ID NO: 5459963 - DNA, 25 bp, Homo sapien
tctgtgatccagtcttatccgcaat

SEQ ID NO: 5459964 - DNA, 25 bp, Homo sapien
cttatccgcaatgtcagacaggtac

SEQ ID NO: 5459965 - DNA, 25 bp, Homo sapien
ttacacagcgctctccattgtcact

SEQ ID NO: 5459966 - DNA, 25 bp, Homo sapien
cgtttcttgttgtttctgccctgca

SEQ ID NO: 5459967 - DNA, 25 bp, Homo sapien
attgtcactcattctcgtttcttgt

SEQ ID NO: 5459968 - DNA, 25 bp, Homo sapien
ctttacacagcgctctccattgtca

SEQ ID NO: 5459969 - DNA, 25 bp, Homo sapien
tttttcaatgtaggctgactgtgat

SEQ ID NO: 5459970 - DNA, 25 bp, Homo sapien
ttttttcaatgtaggctgactgtga

SEQ ID NO: 5459971 - DNA, 25 bp, Homo sapien
atagcccaggttcccaaatgccagc

SEQ ID NO: 5459972 - DNA, 25 bp, Homo sapien
tgttacagccctggattgggatcat

SEQ ID NO: 5459973 - DNA, 25 bp, Homo sapien
gaaagtgttacagccctggattggg

SEQ ID NO: 5459974 - DNA, 25 bp, Homo sapien
gaagaaagtgttacagccctggatt

SEQ ID NO: 5459975 - DNA, 25 bp, Homo sapien
aagaagaaagtgttacagccctgga

SEQ ID NO: 5459976 - DNA, 25 bp, Homo sapien
cccttcggactttcctggagcttgt

SEQ ID NO: 5459977 - DNA, 25 bp, Homo sapien
tggacccttcggactttcctggagc

SEQ ID NO: 5459978 - DNA, 25 bp, Homo sapien
ggagcttgtcgaaattctatttctg

SEQ ID NO: 5459979 - DNA, 25 bp, Homo sapien
ttcctggagcttgtcgaaattctat

SEQ ID NO: 5459980 - DNA, 25 bp, Homo sapien
catgccgggagcttgctcgcagtgt

SEQ ID NO: 5459981 - DNA, 25 bp, Homo sapien
tcccatgccgggagcttgctcgcag

SEQ ID NO: 5459982 - DNA, 25 bp, Homo sapien
cctcagacagcaacagtaggctgct

SEQ ID NO: 5459983 - DNA, 25 bp, Homo sapien
acagcaacagtaggctgctcccatg

SEQ ID NO: 5459984 - DNA, 25 bp, Homo sapien
ccggcgggtcttctccaagagccac

SEQ ID NO: 5459985 - DNA, 25 bp, Homo sapien
gcagctactatatacccagcctggg

SEQ ID NO: 5459986 - DNA, 25 bp, Homo sapien
gggttagcctaatcctggcacatgg

SEQ ID NO: 5459987 - DNA, 25 bp, Homo sapien
tgttttagatgtggtgttctacacc

SEQ ID NO: 5459988 - DNA, 25 bp, Homo sapien
aatcttcattcgtagaaagggttag

SEQ ID NO: 5459989 - DNA, 25 bp, Homo sapien
ctgaagcgcttgtgaagcctgtctg

SEQ ID NO: 5459990 - DNA, 25 bp, Homo sapien
cttttgaatatttatgtcaggacac

SEQ ID NO: 5459991 - DNA, 25 bp, Homo sapien
tctgttctgggcttgaaagtttaat

SEQ ID NO: 5459992 - DNA, 25 bp, Homo sapien
tcattttctgaagcgcttgtgaagc

SEQ ID NO: 5459993 - DNA, 25 bp, Homo sapien
gattccttgcatggccaggttagtg

SEQ ID NO: 5459994 - DNA, 25 bp, Homo sapien
ttagtgaggcggctatgcagacacc

SEQ ID NO: 5459995 - DNA, 25 bp, Homo sapien
ttcatgtgtgcaccaggagcacggc

SEQ ID NO: 5459996 - DNA, 25 bp, Homo sapien
ggagcacggcccaacttagcatcat

SEQ ID NO: 5459997 - DNA, 25 bp, Homo sapien
cagggccccttaattggtcattgac

SEQ ID NO: 5459998 - DNA, 25 bp, Homo sapien
tctgggccagtgtaataacttccat

SEQ ID NO: 5459999 - DNA, 25 bp, Homo sapien
gacagctgaagcacacctaggctct

SEQ ID NO: 5460000 - DNA, 25 bp, Homo sapien
agacatgggaaccagcgggacagct

SEQ ID NO: 5460001 - DNA, 25 bp, Homo sapien
tcttgaaggttgtatgcagctccca

SEQ ID NO: 5460002 - DNA, 25 bp, Homo sapien
taactcgtttttctgtcctgcatcg

SEQ ID NO: 5460003 - DNA, 25 bp, Homo sapien
cagattcgtaaaagatgcatgttcc

SEQ ID NO: 5460004 - DNA, 25 bp, Homo sapien
gaaaagctttggctcgagtctccat

SEQ ID NO: 5460005 - DNA, 25 bp, Homo sapien
tcctgtctgcactagtaattactgt

SEQ ID NO: 5460006 - DNA, 25 bp, Homo sapien
atgtttgctgtaattggatgatgcc

SEQ ID NO: 5460007 - DNA, 25 bp, Homo sapien
gatgatgccacacaatccactgctg

SEQ ID NO: 5460008 - DNA, 25 bp, Homo sapien
tgtaacatcccaacaaatttcctgt

SEQ ID NO: 5460009 - DNA, 25 bp, Homo sapien
aggctttgcagggagcccaagtagc

SEQ ID NO: 5460010 - DNA, 25 bp, Homo sapien
agggcgggctgtgaaaggcaggctt

SEQ ID NO: 5460011 - DNA, 25 bp, Homo sapien
cccaagtagcggtagggcgggctgt

SEQ ID NO: 5460012 - DNA, 25 bp, Homo sapien
cctggtgcttgatgcaagtaggctt

SEQ ID NO: 5460013 - DNA, 25 bp, Homo sapien
tgtttgtgtcaatcaggagagcatc

SEQ ID NO: 5460014 - DNA, 25 bp, Homo sapien
catgggatggcctgtgcttctaaga

SEQ ID NO: 5460015 - DNA, 25 bp, Homo sapien
taaattggcattagggctcccctgc

SEQ ID NO: 5460016 - DNA, 25 bp, Homo sapien
ggcagttagccttgaaccaaaatgg

SEQ ID NO: 5460017 - DNA, 25 bp, Homo sapien
ttctcttttagctgaaacctcaggg

SEQ ID NO: 5460018 - DNA, 25 bp, Homo sapien
cctcattgacgcagcttatgctaat

SEQ ID NO: 5460019 - DNA, 25 bp, Homo sapien
gacacctcattgacgcagcttatgc

SEQ ID NO: 5460020 - DNA, 25 bp, Homo sapien
cttgacacctcattgacgcagctta

SEQ ID NO: 5460021 - DNA, 25 bp, Homo sapien
ccagagaccctatatagtacaagcg

SEQ ID NO: 5460022 - DNA, 25 bp, Homo sapien
cgtgggtctttctgaactttaagtg

SEQ ID NO: 5460023 - DNA, 25 bp, Homo sapien
ctatatagtacaagcgctcctcctg

SEQ ID NO: 5460024 - DNA, 25 bp, Homo sapien
cttctgtctagaagcttggattggg

SEQ ID NO: 5460025 - DNA, 25 bp, Homo sapien
taattggataattaccttaattctc

SEQ ID NO: 5460026 - DNA, 25 bp, Homo sapien
tgtattttgagttctgcaatgatgt

SEQ ID NO: 5460027 - DNA, 25 bp, Homo sapien
taattaccttaattctccacttcat

SEQ ID NO: 5460028 - DNA, 25 bp, Homo sapien
gagttatttagctaacgaataagaa

SEQ ID NO: 5460029 - DNA, 25 bp, Homo sapien
taccataggtctaaattcagctgac

SEQ ID NO: 5460030 - DNA, 25 bp, Homo sapien
cagatgacaaagtgctgtactggag

SEQ ID NO: 5460031 - DNA, 25 bp, Homo sapien
ctggcggaagtgacaagaattggaa

SEQ ID NO: 5460032 - DNA, 25 bp, Homo sapien
gctgtactggagataccataggtct

SEQ ID NO: 5460033 - DNA, 25 bp, Homo sapien
caggaaagtagctgggaaagcctcc

SEQ ID NO: 5460034 - DNA, 25 bp, Homo sapien
ctctgccctggttagcaggaaagta

SEQ ID NO: 5460035 - DNA, 25 bp, Homo sapien
ccctggttagcaggaaagtagctgg

SEQ ID NO: 5460036 - DNA, 25 bp, Homo sapien
agggggatgtagaccagcctctgcc

SEQ ID NO: 5460037 - DNA, 25 bp, Homo sapien
tcccagaacatggagcagagccgtg

SEQ ID NO: 5460038 - DNA, 25 bp, Homo sapien
aaaatgagagtccagtcatgtccca

SEQ ID NO: 5460039 - DNA, 25 bp, Homo sapien
tcatgtatggcatggctcatgggtg

SEQ ID NO: 5460040 - DNA, 25 bp, Homo sapien
cctctgccagataacacagctcaga

SEQ ID NO: 5460041 - DNA, 25 bp, Homo sapien
taagaaatctggcaggtcactgaac

SEQ ID NO: 5460042 - DNA, 25 bp, Homo sapien
ttattctggctatagccgattggac

SEQ ID NO: 5460043 - DNA, 25 bp, Homo sapien
caggtgcccacttgactagtagaaa

SEQ ID NO: 5460044 - DNA, 25 bp, Homo sapien
gccgattggactgggcagatacgct

SEQ ID NO: 5460045 - DNA, 25 bp, Homo sapien
tgccgagtgatgcatctgtctccat

SEQ ID NO: 5460046 - DNA, 25 bp, Homo sapien
catgaggttgctgtatgtttcagaa

SEQ ID NO: 5460047 - DNA, 25 bp, Homo sapien
gcttcccgtgacacccgattttcag

SEQ ID NO: 5460048 - DNA, 25 bp, Homo sapien
ttcagaagtatccttgcaagacatt

SEQ ID NO: 5460049 - DNA, 25 bp, Homo sapien
ggtttccagccaagccaataggaat

SEQ ID NO: 5460050 - DNA, 25 bp, Homo sapien
ccagccaagccaataggaatctggg

SEQ ID NO: 5460051 - DNA, 25 bp, Homo sapien
gtggtttccagccaagccaatagga

SEQ ID NO: 5460052 - DNA, 25 bp, Homo sapien
tcaggctcaagtggaaagattggtg

SEQ ID NO: 5460053 - DNA, 25 bp, Homo sapien
aagaaaagtggtgctatatacgatg

SEQ ID NO: 5460054 - DNA, 25 bp, Homo sapien
gtgctatatacgatgcctcacctac

SEQ ID NO: 5460055 - DNA, 25 bp, Homo sapien
tggttgggtttcacctctgaggatt

SEQ ID NO: 5460056 - DNA, 25 bp, Homo sapien
tgggtttcacctctgaggatttaaa

SEQ ID NO: 5460057 - DNA, 25 bp, Homo sapien
tgccccgcagttgatgattctggcc

SEQ ID NO: 5460058 - DNA, 25 bp, Homo sapien
cctctggctgggcttacattgttcc

SEQ ID NO: 5460059 - DNA, 25 bp, Homo sapien
tctccacgttatgccctctggctgg

SEQ ID NO: 5460060 - DNA, 25 bp, Homo sapien
ctggattctcaaggctgagaggccc

SEQ ID NO: 5460061 - DNA, 25 bp, Homo sapien
gcgacagtgccgtgtgaatgacaac

SEQ ID NO: 5460062 - DNA, 25 bp, Homo sapien
tcgcataataagcacccacagggct

SEQ ID NO: 5460063 - DNA, 25 bp, Homo sapien
ttgtccccgaaccatggcgacagtg

SEQ ID NO: 5460064 - DNA, 25 bp, Homo sapien
ggctccctgttcaatgagtcgcata

SEQ ID NO: 5460065 - DNA, 25 bp, Homo sapien
ggtggctgtctaattccaatcaaaa

SEQ ID NO: 5460066 - DNA, 25 bp, Homo sapien
cactaataacagctaaagatctagc

SEQ ID NO: 5460067 - DNA, 25 bp, Homo sapien
gctaaagatctagctgcaggtggct

SEQ ID NO: 5460068 - DNA, 25 bp, Homo sapien
cttgttgtgaaagggcttaaacaga

SEQ ID NO: 5460069 - DNA, 25 bp, Homo sapien
caggattgttgttagcatgcagctc

SEQ ID NO: 5460070 - DNA, 25 bp, Homo sapien
attgttgttagcatgcagctctttc

SEQ ID NO: 5460071 - DNA, 25 bp, Homo sapien
ggattgttgttagcatgcagctctt

SEQ ID NO: 5460072 - DNA, 25 bp, Homo sapien
aggattgttgttagcatgcagctct

SEQ ID NO: 5460073 - DNA, 25 bp, Homo sapien
gaagggaatccctttgggcagaaca

SEQ ID NO: 5460074 - DNA, 25 bp, Homo sapien
aacaattagcaaagggcatgtatct

SEQ ID NO: 5460075 - DNA, 25 bp, Homo sapien
gagcctgcagaagggaatccctttg

SEQ ID NO: 5460076 - DNA, 25 bp, Homo sapien
aatccctttgggcagaacaattagc

SEQ ID NO: 5460077 - DNA, 25 bp, Homo sapien
tggcaggctgaacccttcctggctg

SEQ ID NO: 5460078 - DNA, 25 bp, Homo sapien
gagagctctggccaaacccttcgtc

SEQ ID NO: 5460079 - DNA, 25 bp, Homo sapien
aaacccttcgtctggcagccaggtg

SEQ ID NO: 5460080 - DNA, 25 bp, Homo sapien
agagcagctagtggcaggctgaacc

SEQ ID NO: 5460081 - DNA, 25 bp, Homo sapien
gcatcatctggtggctgatagactg

SEQ ID NO: 5460082 - DNA, 25 bp, Homo sapien
catctggtggctgatagactgggct

SEQ ID NO: 5460083 - DNA, 25 bp, Homo sapien
ccttcaataagagttcccctctcgc

SEQ ID NO: 5460084 - DNA, 25 bp, Homo sapien
ttcaataagagttcccctctcgccc

SEQ ID NO: 5460085 - DNA, 25 bp, Homo sapien
aaagcagttctgaccagttatacta

SEQ ID NO: 5460086 - DNA, 25 bp, Homo sapien
tctgaccagttatactatgattaaa

SEQ ID NO: 5460087 - DNA, 25 bp, Homo sapien
tacaaagcagttctgaccagttata

SEQ ID NO: 5460088 - DNA, 25 bp, Homo sapien
gcagttctgaccagttatactatga

SEQ ID NO: 5460089 - DNA, 25 bp, Homo sapien
gctaggtgcaatgggataaatgttg

SEQ ID NO: 5460090 - DNA, 25 bp, Homo sapien
gcaatgggataaatgttgtgtccct

SEQ ID NO: 5460091 - DNA, 25 bp, Homo sapien
ggtgcaatgggataaatgttgtgtc

SEQ ID NO: 5460092 - DNA, 25 bp, Homo sapien
tttgctaggtgcaatgggataaatg

SEQ ID NO: 5460093 - DNA, 25 bp, Homo sapien
gctgagcagatattggagtaaaata

SEQ ID NO: 5460094 - DNA, 25 bp, Homo sapien
ggttgagaaattgttagctgagcag

SEQ ID NO: 5460095 - DNA, 25 bp, Homo sapien
caaagaattatgcagtgaacagcca

SEQ ID NO: 5460096 - DNA, 25 bp, Homo sapien
tgttgctcctatacaaattaccatg

SEQ ID NO: 5460097 - DNA, 25 bp, Homo sapien
caagtaaagtctaaatcagccaaga

SEQ ID NO: 5460098 - DNA, 25 bp, Homo sapien
aagatataacctgcttgtgttagcc

SEQ ID NO: 5460099 - DNA, 25 bp, Homo sapien
tcagaccagacacgtgtttgggtcc

SEQ ID NO: 5460100 - DNA, 25 bp, Homo sapien
gggtccgatctgacacaagtaaagt

SEQ ID NO: 5460101 - DNA, 25 bp, Homo sapien
tggatgatgattggctgagatttat

SEQ ID NO: 5460102 - DNA, 25 bp, Homo sapien
ggctgctgaccgtagatttcttttt

SEQ ID NO: 5460103 - DNA, 25 bp, Homo sapien
tattgatggttaaaatcttgtcggc

SEQ ID NO: 5460104 - DNA, 25 bp, Homo sapien
ttttcctgtattgctataagccaga

SEQ ID NO: 5460105 - DNA, 25 bp, Homo sapien
aactcagacccaaggttgcatcaat

SEQ ID NO: 5460106 - DNA, 25 bp, Homo sapien
actcagacccaaggttgcatcaatt

SEQ ID NO: 5460107 - DNA, 25 bp, Homo sapien
tggtcatctaccacaactcctttgt

SEQ ID NO: 5460108 - DNA, 25 bp, Homo sapien
caaggaaggagaatttctccctctt

SEQ ID NO: 5460109 - DNA, 25 bp, Homo sapien
tcccagggattcctggtcatctacc

SEQ ID NO: 5460110 - DNA, 25 bp, Homo sapien
ctcctttgttctctaccaccccaca

SEQ ID NO: 5460111 - DNA, 25 bp, Homo sapien
aagtttcacctcagcgggagagact

SEQ ID NO: 5460112 - DNA, 25 bp, Homo sapien
ctgctgggtgaggtgaacgcttggt

SEQ ID NO: 5460113 - DNA, 25 bp, Homo sapien
agcatctagaagtttcacctcagcg

SEQ ID NO: 5460114 - DNA, 25 bp, Homo sapien
ttggagtttgatctggagaagcatc

SEQ ID NO: 5460115 - DNA, 25 bp, Homo sapien
cttttcactgcagagaccggctttt

SEQ ID NO: 5460116 - DNA, 25 bp, Homo sapien
gagaccggcttttgcttgacacaaa

SEQ ID NO: 5460117 - DNA, 25 bp, Homo sapien
gccatcaattgtcctgtttactaaa

SEQ ID NO: 5460118 - DNA, 25 bp, Homo sapien
gcagcccacgcatcatccattttaa

SEQ ID NO: 5460119 - DNA, 25 bp, Homo sapien
tgagcaaaaagtatgggttgggctc

SEQ ID NO: 5460120 - DNA, 25 bp, Homo sapien
ctgagcaaaaagtatgggttgggct

SEQ ID NO: 5460121 - DNA, 25 bp, Homo sapien
ctttcatctcaacaggctttgtgag

SEQ ID NO: 5460122 - DNA, 25 bp, Homo sapien
gaacctcctcatctatcggcatgtc

SEQ ID NO: 5460123 - DNA, 25 bp, Homo sapien
caccactttctgatttgcttgtgag

SEQ ID NO: 5460124 - DNA, 25 bp, Homo sapien
ggacagatgggatataactactatt

SEQ ID NO: 5460125 - DNA, 25 bp, Homo sapien
tgggtgtatcttggttctggaacct

SEQ ID NO: 5460126 - DNA, 25 bp, Homo sapien
ccagtagatgtgagtggagctcagt

SEQ ID NO: 5460127 - DNA, 25 bp, Homo sapien
cccatagaggccccagtagatgtga

SEQ ID NO: 5460128 - DNA, 25 bp, Homo sapien
cccagtagatgtgagtggagctcag

SEQ ID NO: 5460129 - DNA, 25 bp, Homo sapien
tgtgtctggactgaggcaccagttt

SEQ ID NO: 5460130 - DNA, 25 bp, Homo sapien
cttaattaagatcacctgtgtctgg

SEQ ID NO: 5460131 - DNA, 25 bp, Homo sapien
cagggaagtccttggagtagggtgt

SEQ ID NO: 5460132 - DNA, 25 bp, Homo sapien
cacctgtgtctggactgaggcacca

SEQ ID NO: 5460133 - DNA, 25 bp, Homo sapien
tttatgcaaagcttgtgacacaggg

SEQ ID NO: 5460134 - DNA, 25 bp, Homo sapien
gggattgatcccataggccacggtt

SEQ ID NO: 5460135 - DNA, 25 bp, Homo sapien
tcctgcccacgaatctgaaatctga

SEQ ID NO: 5460136 - DNA, 25 bp, Homo sapien
acggttgtacggtatggccctgcct

SEQ ID NO: 5460137 - DNA, 25 bp, Homo sapien
ggcttgcatatgtggtgagatcttg

SEQ ID NO: 5460138 - DNA, 25 bp, Homo sapien
cttggtattggctccatttcttgct

SEQ ID NO: 5460139 - DNA, 25 bp, Homo sapien
ggaagggggcttgcatatgtggtga

SEQ ID NO: 5460140 - DNA, 25 bp, Homo sapien
atcttggtattggctccatttcttg

SEQ ID NO: 5460141 - DNA, 25 bp, Homo sapien
gtccagcttgtgcaaaaatgggttc

SEQ ID NO: 5460142 - DNA, 25 bp, Homo sapien
ctatagatgaattgccaggcagaaa

SEQ ID NO: 5460143 - DNA, 25 bp, Homo sapien
gtggtactgtgtccccaaggccacg

SEQ ID NO: 5460144 - DNA, 25 bp, Homo sapien
tgctcaggtctatagatgaattgcc

SEQ ID NO: 5460145 - DNA, 25 bp, Homo sapien
gagtcgttcactaaagccgtcaaac

SEQ ID NO: 5460146 - DNA, 25 bp, Homo sapien
cagagtcgttcactaaagccgtcaa

SEQ ID NO: 5460147 - DNA, 25 bp, Homo sapien
gtcgttcactaaagccgtcaaacat

SEQ ID NO: 5460148 - DNA, 25 bp, Homo sapien
cacagagtcgttcactaaagccgtc

SEQ ID NO: 5460149 - DNA, 25 bp, Homo sapien
tgcccggctgtaatggacggtcctt

SEQ ID NO: 5460150 - DNA, 25 bp, Homo sapien
atgcccggctgtaatggacggtcct

SEQ ID NO: 5460151 - DNA, 25 bp, Homo sapien
atggacggtccttcactttgcaaag

SEQ ID NO: 5460152 - DNA, 25 bp, Homo sapien
tgagggtccacggagaatttctcga

SEQ ID NO: 5460153 - DNA, 25 bp, Homo sapien
gaacaaggaaaccagaccgtgcatg

SEQ ID NO: 5460154 - DNA, 25 bp, Homo sapien
cagacaggttcgaaagcactgaagc

SEQ ID NO: 5460155 - DNA, 25 bp, Homo sapien
cattacttaacgaggaggaggcttc

SEQ ID NO: 5460156 - DNA, 25 bp, Homo sapien
taccaaatcctccaattatgattgg

SEQ ID NO: 5460157 - DNA, 25 bp, Homo sapien
attgcgtgcaccaattatcagaggg

SEQ ID NO: 5460158 - DNA, 25 bp, Homo sapien
tgatgaatgcgtgggtggtaacaat

SEQ ID NO: 5460159 - DNA, 25 bp, Homo sapien
gggaaatgccatattgcgtgcacca

SEQ ID NO: 5460160 - DNA, 25 bp, Homo sapien
ggtcttcaaagtaacactcgcaggg

SEQ ID NO: 5460161 - DNA, 25 bp, Homo sapien
cagctcggttgctggacagtggtct

SEQ ID NO: 5460162 - DNA, 25 bp, Homo sapien
tcttcaaagtaacactcgcagggtc

SEQ ID NO: 5460163 - DNA, 25 bp, Homo sapien
ctcggttgctggacagtggtcttca

SEQ ID NO: 5460164 - DNA, 25 bp, Homo sapien
ggcatccctgagcacatgcagctct

SEQ ID NO: 5460165 - DNA, 25 bp, Homo sapien
aaggcatccctgagcacatgcagct

SEQ ID NO: 5460166 - DNA, 25 bp, Homo sapien
ggaaggcatccctgagcacatgcag

SEQ ID NO: 5460167 - DNA, 25 bp, Homo sapien
tcaggaaggcatccctgagcacatg

SEQ ID NO: 5460168 - DNA, 25 bp, Homo sapien
aggccccaggaaagaaagtgattgc

SEQ ID NO: 5460169 - DNA, 25 bp, Homo sapien
catctcctctgatcggtttttggag

SEQ ID NO: 5460170 - DNA, 25 bp, Homo sapien
cagcaagggtcgaggggcatctgtt

SEQ ID NO: 5460171 - DNA, 25 bp, Homo sapien
atcagacatctcctctgatcggttt

SEQ ID NO: 5460172 - DNA, 25 bp, Homo sapien
gatgtcctgacaacggcattccctt

SEQ ID NO: 5460173 - DNA, 25 bp, Homo sapien
gacagggcttggtcacagattgcgt

SEQ ID NO: 5460174 - DNA, 25 bp, Homo sapien
gacggatttcttgcttcggagactg

SEQ ID NO: 5460175 - DNA, 25 bp, Homo sapien
taaaacaactcttccctgtggtcca

SEQ ID NO: 5460176 - DNA, 25 bp, Homo sapien
gtgaggaagccgggaaggtgaccca

SEQ ID NO: 5460177 - DNA, 25 bp, Homo sapien
tgaggaagccgggaaggtgacccat

SEQ ID NO: 5460178 - DNA, 25 bp, Homo sapien
caaagaacttctgtaattttccaag

SEQ ID NO: 5460179 - DNA, 25 bp, Homo sapien
ggttaatatgagcaccaagataaat

SEQ ID NO: 5460180 - DNA, 25 bp, Homo sapien
gactgctattcgaccgtttaactgg

SEQ ID NO: 5460181 - DNA, 25 bp, Homo sapien
tgacagcttggactaaaccaccagt

SEQ ID NO: 5460182 - DNA, 25 bp, Homo sapien
tcccagtcgttgactgctattcgac

SEQ ID NO: 5460183 - DNA, 25 bp, Homo sapien
tgaccactgcctgtcacaagtgatg

SEQ ID NO: 5460184 - DNA, 25 bp, Homo sapien
ggcagcacagcacttcttggtcgtg

SEQ ID NO: 5460185 - DNA, 25 bp, Homo sapien
cccagagtaggagacatggcagcac

SEQ ID NO: 5460186 - DNA, 25 bp, Homo sapien
cactgcctgtcacaagtgatgggca

SEQ ID NO: 5460187 - DNA, 25 bp, Homo sapien
tacccagcaggtaagcattcttcca

SEQ ID NO: 5460188 - DNA, 25 bp, Homo sapien
tgaagatgtgtgaggtgtacccagc

SEQ ID NO: 5460189 - DNA, 25 bp, Homo sapien
tgcccttcagagtggaattttcctg

SEQ ID NO: 5460190 - DNA, 25 bp, Homo sapien
tagtaatagcttcagtgcccttcag

SEQ ID NO: 5460191 - DNA, 25 bp, Homo sapien
cgtcgtgtgacaggatctagtgtct

SEQ ID NO: 5460192 - DNA, 25 bp, Homo sapien
tatctggaaagggtgaccactgcca

SEQ ID NO: 5460193 - DNA, 25 bp, Homo sapien
ctcttcattcatgcgtttatctgga

SEQ ID NO: 5460194 - DNA, 25 bp, Homo sapien
gaccactgccaattccgtcgtgtga

SEQ ID NO: 5460195 - DNA, 25 bp, Homo sapien
aaagacagtaacagatacgagggag

SEQ ID NO: 5460196 - DNA, 25 bp, Homo sapien
taacagatacgagggagatgacttt

SEQ ID NO: 5460197 - DNA, 25 bp, Homo sapien
tgttggtgcactgcaccgagtggag

SEQ ID NO: 5460198 - DNA, 25 bp, Homo sapien
tgcactgcaccgagtggagggagct

SEQ ID NO: 5460199 - DNA, 25 bp, Homo sapien
ctgcctgtaaaaatcaaaggctgac

SEQ ID NO: 5460200 - DNA, 25 bp, Homo sapien
aaaaatcaaaggctgacaatatttg

SEQ ID NO: 5460201 - DNA, 25 bp, Homo sapien
aaatcaaaggctgacaatatttggt

SEQ ID NO: 5460202 - DNA, 25 bp, Homo sapien
tgtaaaaatcaaaggctgacaatat

SEQ ID NO: 5460203 - DNA, 25 bp, Homo sapien
tcctgccctgggttctttgtaagta

SEQ ID NO: 5460204 - DNA, 25 bp, Homo sapien
tgccctgggttctttgtaagtactg

SEQ ID NO: 5460205 - DNA, 25 bp, Homo sapien
tgggttctttgtaagtactggagcc

SEQ ID NO: 5460206 - DNA, 25 bp, Homo sapien
tgtggcaatgatggcctttctatca

SEQ ID NO: 5460207 - DNA, 25 bp, Homo sapien
tcctctttttaattctgacagacgc

SEQ ID NO: 5460208 - DNA, 25 bp, Homo sapien
tctcctctttttaattctgacagac

SEQ ID NO: 5460209 - DNA, 25 bp, Homo sapien
ctgtcccagcataaacatctcctct

SEQ ID NO: 5460210 - DNA, 25 bp, Homo sapien
gtcccagcataaacatctcctcttt

SEQ ID NO: 5460211 - DNA, 25 bp, Homo sapien
gaggagtgatccaaggtaactgtgt

SEQ ID NO: 5460212 - DNA, 25 bp, Homo sapien
gtgtccccatgagttgtccacagtt

SEQ ID NO: 5460213 - DNA, 25 bp, Homo sapien
gatccaaggtaactgtgtccccatg

SEQ ID NO: 5460214 - DNA, 25 bp, Homo sapien
tgtgtggttgaggagtgatccaagg

SEQ ID NO: 5460215 - DNA, 25 bp, Homo sapien
gagactggcgcatgctcagaatgga

SEQ ID NO: 5460216 - DNA, 25 bp, Homo sapien
gtcctgaggcttagcttgaatctgc

SEQ ID NO: 5460217 - DNA, 25 bp, Homo sapien
gaaggtttcgtacacttccctgtga

SEQ ID NO: 5460218 - DNA, 25 bp, Homo sapien
tgtccatagaagaggccaacatgtg

SEQ ID NO: 5460219 - DNA, 25 bp, Homo sapien
actgatccttgtttctggaaacaca

SEQ ID NO: 5460220 - DNA, 25 bp, Homo sapien
aactgatccttgtttctggaaacac

SEQ ID NO: 5460221 - DNA, 25 bp, Homo sapien
tcttgaatatagttgtccttgtagt

SEQ ID NO: 5460222 - DNA, 25 bp, Homo sapien
aaactgatccttgtttctggaaaca

SEQ ID NO: 5460223 - DNA, 25 bp, Homo sapien
cagtgcgatgtggacaaattttgcc

SEQ ID NO: 5460224 - DNA, 25 bp, Homo sapien
cattctcagtgcgatgtggacaaat

SEQ ID NO: 5460225 - DNA, 25 bp, Homo sapien
agcttctgtcattctcagtgcgatg

SEQ ID NO: 5460226 - DNA, 25 bp, Homo sapien
tctgtcattctcagtgcgatgtgga

SEQ ID NO: 5460227 - DNA, 25 bp, Homo sapien
taaggttagaattggaagtgacagg

SEQ ID NO: 5460228 - DNA, 25 bp, Homo sapien
ccatcacaacagaaagtaaggttag

SEQ ID NO: 5460229 - DNA, 25 bp, Homo sapien
agtaaggttagaattggaagtgaca

SEQ ID NO: 5460230 - DNA, 25 bp, Homo sapien
tctacagccatcacaacagaaagta

SEQ ID NO: 5460231 - DNA, 25 bp, Homo sapien
tctgcatggttgctgtgtcactcac

SEQ ID NO: 5460232 - DNA, 25 bp, Homo sapien
agggtctgcatggttgctgtgtcac

SEQ ID NO: 5460233 - DNA, 25 bp, Homo sapien
ggtctgcatggttgctgtgtcactc

SEQ ID NO: 5460234 - DNA, 25 bp, Homo sapien
cagggtctgcatggttgctgtgtca

SEQ ID NO: 5460235 - DNA, 25 bp, Homo sapien
tcctcttctcggaacacccatcctt

SEQ ID NO: 5460236 - DNA, 25 bp, Homo sapien
ggccttgggtttgtacctttgctca

SEQ ID NO: 5460237 - DNA, 25 bp, Homo sapien
gagtgagtctacttcgccttgctct

SEQ ID NO: 5460238 - DNA, 25 bp, Homo sapien
tacctttgctcatgtcgctcctctt

SEQ ID NO: 5460239 - DNA, 25 bp, Homo sapien
tgctacatccccgatcaccttccac

SEQ ID NO: 5460240 - DNA, 25 bp, Homo sapien
gctacatccccgatcaccttccacc

SEQ ID NO: 5460241 - DNA, 25 bp, Homo sapien
ctgctacatccccgatcaccttcca

SEQ ID NO: 5460242 - DNA, 25 bp, Homo sapien
ctacatccccgatcaccttccacca

SEQ ID NO: 5460243 - DNA, 25 bp, Homo sapien
ttcctttaagaattgaaagtactgc

SEQ ID NO: 5460244 - DNA, 25 bp, Homo sapien
gaattgaaagtactgctacctccac

SEQ ID NO: 5460245 - DNA, 25 bp, Homo sapien
gcttgaaccgttgctgcttgcggat

SEQ ID NO: 5460246 - DNA, 25 bp, Homo sapien
aatactccggcctccctaatggcag

SEQ ID NO: 5460247 - DNA, 25 bp, Homo sapien
tctgttgagcagactttgagcacgt

SEQ ID NO: 5460248 - DNA, 25 bp, Homo sapien
tgttgagcagactttgagcacgtgg

SEQ ID NO: 5460249 - DNA, 25 bp, Homo sapien
ggtctgttgagcagactttgagcac

SEQ ID NO: 5460250 - DNA, 25 bp, Homo sapien
gggtctgttgagcagactttgagca

SEQ ID NO: 5460251 - DNA, 25 bp, Homo sapien
cttgacaaaacaggcatgatattca

SEQ ID NO: 5460252 - DNA, 25 bp, Homo sapien
gacagagctggcattacggggctta

SEQ ID NO: 5460253 - DNA, 25 bp, Homo sapien
taaccgttgcagttgcccagcggag

SEQ ID NO: 5460254 - DNA, 25 bp, Homo sapien
cattacggggcttaattctggcagg

SEQ ID NO: 5460255 - DNA, 25 bp, Homo sapien
tctggcaggtaaccgttgcagttgc

SEQ ID NO: 5460256 - DNA, 25 bp, Homo sapien
ttggcatcgacaggtctctgtagag

SEQ ID NO: 5460257 - DNA, 25 bp, Homo sapien
gaaggcttggttggctaattcatct

SEQ ID NO: 5460258 - DNA, 25 bp, Homo sapien
tagcgcaaataattgtggctgtggc

SEQ ID NO: 5460259 - DNA, 25 bp, Homo sapien
ggctggaacggctcatctcttggca

SEQ ID NO: 5460260 - DNA, 25 bp, Homo sapien
cttcctcctgaagcctctcgtccat

SEQ ID NO: 5460261 - DNA, 25 bp, Homo sapien
gtgcttcctcctgaagcctctcgtc

SEQ ID NO: 5460262 - DNA, 25 bp, Homo sapien
ctgtgcttcctcctgaagcctctcg

SEQ ID NO: 5460263 - DNA, 25 bp, Homo sapien
gcttcctcctgaagcctctcgtcca

SEQ ID NO: 5460264 - DNA, 25 bp, Homo sapien
aggtgaacttggtgtcagggcttcc

SEQ ID NO: 5460265 - DNA, 25 bp, Homo sapien
gagccagagcctttgccttttgcct

SEQ ID NO: 5460266 - DNA, 25 bp, Homo sapien
tcataaaggtgaacttggtgtcagg

SEQ ID NO: 5460267 - DNA, 25 bp, Homo sapien
cttttgccttctgtcagactgaaca

SEQ ID NO: 5460268 - DNA, 25 bp, Homo sapien
gaaacactgttacatgaggcacaaa

SEQ ID NO: 5460269 - DNA, 25 bp, Homo sapien
tggcccctgtcgattgtttaaagga

SEQ ID NO: 5460270 - DNA, 25 bp, Homo sapien
tggaaggtggcccctgtcgattgtt

SEQ ID NO: 5460271 - DNA, 25 bp, Homo sapien
caaataacaatgctgcatcccgatc

SEQ ID NO: 5460272 - DNA, 25 bp, Homo sapien
ggccttgaacttggctgactctgaa

SEQ ID NO: 5460273 - DNA, 25 bp, Homo sapien
ccctcatgttctgtgccaagacctg

SEQ ID NO: 5460274 - DNA, 25 bp, Homo sapien
tgtgccaagacctggtgctcccatg

SEQ ID NO: 5460275 - DNA, 25 bp, Homo sapien
tgccaagacctggtgctcccatgaa

SEQ ID NO: 5460276 - DNA, 25 bp, Homo sapien
gatgccctcatgttctgtgccaaga

SEQ ID NO: 5460277 - DNA, 25 bp, Homo sapien
taatcataaggtacttctcttgaaa

SEQ ID NO: 5460278 - DNA, 25 bp, Homo sapien
atcataaggtacttctcttgaaatt

SEQ ID NO: 5460279 - DNA, 25 bp, Homo sapien
cttaatcataaggtacttctcttga

SEQ ID NO: 5460280 - DNA, 25 bp, Homo sapien
gcttaatcataaggtacttctcttg

SEQ ID NO: 5460281 - DNA, 25 bp, Homo sapien
tattagccccactctgaatctggcc

SEQ ID NO: 5460282 - DNA, 25 bp, Homo sapien
tgctgtagcatggagctttatcagg

SEQ ID NO: 5460283 - DNA, 25 bp, Homo sapien
ttttgcagagcctagtattagcccc

SEQ ID NO: 5460284 - DNA, 25 bp, Homo sapien
ggttgtagtcctcatatttggagac

SEQ ID NO: 5460285 - DNA, 25 bp, Homo sapien
ttatcttctgatatgaaggtagatt

SEQ ID NO: 5460286 - DNA, 25 bp, Homo sapien
atattgaattacacctgtgtttggg

SEQ ID NO: 5460287 - DNA, 25 bp, Homo sapien
gtttgggggtcagtttatcttctga

SEQ ID NO: 5460288 - DNA, 25 bp, Homo sapien
aaatagaatattgaattacacctgt

SEQ ID NO: 5460289 - DNA, 25 bp, Homo sapien
aagacgctgcggtcaacgagaggag

SEQ ID NO: 5460290 - DNA, 25 bp, Homo sapien
tgggcattgtgtggatccacgctca

SEQ ID NO: 5460291 - DNA, 25 bp, Homo sapien
ccaggtcggtgaagctcggaagtct

SEQ ID NO: 5460292 - DNA, 25 bp, Homo sapien
cactcaacggttcgcagttttggct

SEQ ID NO: 5460293 - DNA, 25 bp, Homo sapien
ctttggtgaggagagagatttgttg

SEQ ID NO: 5460294 - DNA, 25 bp, Homo sapien
tttgagcagctacactgttgtcaca

SEQ ID NO: 5460295 - DNA, 25 bp, Homo sapien
cactgttgtcacataatttttctgc

SEQ ID NO: 5460296 - DNA, 25 bp, Homo sapien
acactgttgtcacataatttttctg

SEQ ID NO: 5460297 - DNA, 25 bp, Homo sapien
attctttgagcagctacactgttgt

SEQ ID NO: 5460298 - DNA, 25 bp, Homo sapien
tcagaaataatcgcagctgcccatt

SEQ ID NO: 5460299 - DNA, 25 bp, Homo sapien
agaaataatcgcagctgcccatttc

SEQ ID NO: 5460300 - DNA, 25 bp, Homo sapien
gaaataatcgcagctgcccatttct

SEQ ID NO: 5460301 - DNA, 25 bp, Homo sapien
cagaaataatcgcagctgcccattt

SEQ ID NO: 5460302 - DNA, 25 bp, Homo sapien
tgtttgtcaccatgactttgctccc

SEQ ID NO: 5460303 - DNA, 25 bp, Homo sapien
aaagcttgtttgtcaccatgacttt

SEQ ID NO: 5460304 - DNA, 25 bp, Homo sapien
catgactttgctcccaggtgccttg

SEQ ID NO: 5460305 - DNA, 25 bp, Homo sapien
ttgtcaccatgactttgctcccagg

SEQ ID NO: 5460306 - DNA, 25 bp, Homo sapien
gagcatgcagtgtagagaaatatcc

SEQ ID NO: 5460307 - DNA, 25 bp, Homo sapien
gcagtgtagagaaatatcctccaag

SEQ ID NO: 5460308 - DNA, 25 bp, Homo sapien
agtgtgagcatgcagtgtagagaaa

SEQ ID NO: 5460309 - DNA, 25 bp, Homo sapien
ttgatgagtgtgagcatgcagtgta

SEQ ID NO: 5460310 - DNA, 25 bp, Homo sapien
tgctagaaacttttgcagtttttcc

SEQ ID NO: 5460311 - DNA, 25 bp, Homo sapien
gctgctagaaacttttgcagttttt

SEQ ID NO: 5460312 - DNA, 25 bp, Homo sapien
gagagctgctagaaacttttgcagt

SEQ ID NO: 5460313 - DNA, 25 bp, Homo sapien
agagctgctagaaacttttgcagtt

SEQ ID NO: 5460314 - DNA, 25 bp, Homo sapien
tttagatcggttctgctctcctggc

SEQ ID NO: 5460315 - DNA, 25 bp, Homo sapien
tcttcataagttgggagtagtatat

SEQ ID NO: 5460316 - DNA, 25 bp, Homo sapien
cttctttgcacccagaattacattt

SEQ ID NO: 5460317 - DNA, 25 bp, Homo sapien
tatctagtaaagaaatgagaccctt

SEQ ID NO: 5460318 - DNA, 25 bp, Homo sapien
taatcctatgaaagcccattggttc

SEQ ID NO: 5460319 - DNA, 25 bp, Homo sapien
actccttgctgagagggcttgctga

SEQ ID NO: 5460320 - DNA, 25 bp, Homo sapien
taaagaccacggtccatgccttggc

SEQ ID NO: 5460321 - DNA, 25 bp, Homo sapien
tggccacaaagatctgcctggatac

SEQ ID NO: 5460322 - DNA, 25 bp, Homo sapien
tgcagctttgccttcaatgaaatcc

SEQ ID NO: 5460323 - DNA, 25 bp, Homo sapien
ttgcagctttgccttcaatgaaatc

SEQ ID NO: 5460324 - DNA, 25 bp, Homo sapien
ttcaatgaaatcctttggattcctt

SEQ ID NO: 5460325 - DNA, 25 bp, Homo sapien
cttcaatgaaatcctttggattcct

SEQ ID NO: 5460326 - DNA, 25 bp, Homo sapien
gaaatgtgctccaaaggtctgtggc

SEQ ID NO: 5460327 - DNA, 25 bp, Homo sapien
tccactgttgcatgtttgagcgcct

SEQ ID NO: 5460328 - DNA, 25 bp, Homo sapien
tctggacaagtctttagaacttttc

SEQ ID NO: 5460329 - DNA, 25 bp, Homo sapien
ttgcatgtttgagcgcctctggaca

SEQ ID NO: 5460330 - DNA, 25 bp, Homo sapien
caaaatttcagatgattcacaagct

SEQ ID NO: 5460331 - DNA, 25 bp, Homo sapien
agctggcagtgacagacggtgacat

SEQ ID NO: 5460332 - DNA, 25 bp, Homo sapien
cactcccctggtgaagagggaaaca

SEQ ID NO: 5460333 - DNA, 25 bp, Homo sapien
gacatcttgatttaacactcccctg

SEQ ID NO: 5460334 - DNA, 25 bp, Homo sapien
ctgaaatcaccctactaagtcttgg

SEQ ID NO: 5460335 - DNA, 25 bp, Homo sapien
accctactaagtcttggtgaatgac

SEQ ID NO: 5460336 - DNA, 25 bp, Homo sapien
tcaccctactaagtcttggtgaatg

SEQ ID NO: 5460337 - DNA, 25 bp, Homo sapien
gaaatcaccctactaagtcttggtg

SEQ ID NO: 5460338 - DNA, 25 bp, Homo sapien
acaatgcttcagaaagaggctccat

SEQ ID NO: 5460339 - DNA, 25 bp, Homo sapien
tatctaggaaaaacaatgcttcaga

SEQ ID NO: 5460340 - DNA, 25 bp, Homo sapien
aaacaatgcttcagaaagaggctcc

SEQ ID NO: 5460341 - DNA, 25 bp, Homo sapien
taggaaaaacaatgcttcagaaaga

SEQ ID NO: 5460342 - DNA, 25 bp, Homo sapien
gtctggacccccaggctgtctgcat

SEQ ID NO: 5460343 - DNA, 25 bp, Homo sapien
ggcatcccatggtctggacccccag

SEQ ID NO: 5460344 - DNA, 25 bp, Homo sapien
aggctgtctgcattgccactcccaa

SEQ ID NO: 5460345 - DNA, 25 bp, Homo sapien
caattctgcaccacactagtgcctt

SEQ ID NO: 5460346 - DNA, 25 bp, Homo sapien
tgctgctaccacctgcatggagtta

SEQ ID NO: 5460347 - DNA, 25 bp, Homo sapien
tgtagcatttctgaggagacccaca

SEQ ID NO: 5460348 - DNA, 25 bp, Homo sapien
tgcaaaagcaaccttggtgccatct

SEQ ID NO: 5460349 - DNA, 25 bp, Homo sapien
tgtctgccagttcgcagtgcaaaag

SEQ ID NO: 5460350 - DNA, 25 bp, Homo sapien
tagctcatacattatgatggaaaac

SEQ ID NO: 5460351 - DNA, 25 bp, Homo sapien
gagtagctcatacattatgatggaa

SEQ ID NO: 5460352 - DNA, 25 bp, Homo sapien
gctcatacattatgatggaaaacat

SEQ ID NO: 5460353 - DNA, 25 bp, Homo sapien
ctcatacattatgatggaaaacatc

SEQ ID NO: 5460354 - DNA, 25 bp, Homo sapien
cttttaaatggaagtcttgcatttt

SEQ ID NO: 5460355 - DNA, 25 bp, Homo sapien
taaatggaagtcttgcattttaaac

SEQ ID NO: 5460356 - DNA, 25 bp, Homo sapien
tttaaatggaagtcttgcattttaa

SEQ ID NO: 5460357 - DNA, 25 bp, Homo sapien
tatcttttaaatggaagtcttgcat

SEQ ID NO: 5460358 - DNA, 25 bp, Homo sapien
ctccaacgccgagaaaaacttcctg

SEQ ID NO: 5460359 - DNA, 25 bp, Homo sapien
acttcctggattgtagcccctggta

SEQ ID NO: 5460360 - DNA, 25 bp, Homo sapien
ttcatgcttcctccaacgccgagaa

SEQ ID NO: 5460361 - DNA, 25 bp, Homo sapien
tgcctttccctcaataggcttccag

SEQ ID NO: 5460362 - DNA, 25 bp, Homo sapien
tcccctgaccactcaagcctctggt

SEQ ID NO: 5460363 - DNA, 25 bp, Homo sapien
tataactaataccacagtcttgtgc

SEQ ID NO: 5460364 - DNA, 25 bp, Homo sapien
tatgagatcaactcttacaaattcc

SEQ ID NO: 5460365 - DNA, 25 bp, Homo sapien
tatgtatttgcctcttatggatatt

SEQ ID NO: 5460366 - DNA, 25 bp, Homo sapien
tccaaagaagccatccttaaaccac

SEQ ID NO: 5460367 - DNA, 25 bp, Homo sapien
aaagaagccatccttaaaccactct

SEQ ID NO: 5460368 - DNA, 25 bp, Homo sapien
gaagccatccttaaaccactctaat

SEQ ID NO: 5460369 - DNA, 25 bp, Homo sapien
ttatccaaagaagccatccttaaac

SEQ ID NO: 5460370 - DNA, 25 bp, Homo sapien
gcagcaatccgcaaggactttcctg

SEQ ID NO: 5460371 - DNA, 25 bp, Homo sapien
catcagatgatggttagagagaccg

SEQ ID NO: 5460372 - DNA, 25 bp, Homo sapien
gagagaccgatcttcccgcatttgt

SEQ ID NO: 5460373 - DNA, 25 bp, Homo sapien
ttctgaccttcctagatgcctccat

SEQ ID NO: 5460374 - DNA, 25 bp, Homo sapien
gggcttgttctttataaagaccaca

SEQ ID NO: 5460375 - DNA, 25 bp, Homo sapien
ttggattttactaggtcactgggct

SEQ ID NO: 5460376 - DNA, 25 bp, Homo sapien
ggcttgttctttataaagaccacat

SEQ ID NO: 5460377 - DNA, 25 bp, Homo sapien
catttggattttactaggtcactgg

SEQ ID NO: 5460378 - DNA, 25 bp, Homo sapien
tttaggtttcaaggcaccagcaagg

SEQ ID NO: 5460379 - DNA, 25 bp, Homo sapien
tacacagctctattgagaaagcctg

SEQ ID NO: 5460380 - DNA, 25 bp, Homo sapien
gttctgatgctatcatgttacacag

SEQ ID NO: 5460381 - DNA, 25 bp, Homo sapien
tattgtaataccctgctcttggttc

SEQ ID NO: 5460382 - DNA, 25 bp, Homo sapien
acacacactctgcaagcttggtgtt

SEQ ID NO: 5460383 - DNA, 25 bp, Homo sapien
caaacacacacactctgcaagcttg

SEQ ID NO: 5460384 - DNA, 25 bp, Homo sapien
cacacacactctgcaagcttggtgt

SEQ ID NO: 5460385 - DNA, 25 bp, Homo sapien
aacacacacactctgcaagcttggt

SEQ ID NO: 5460386 - DNA, 25 bp, Homo sapien
tgcgtgatctgtccgctagggaaga

SEQ ID NO: 5460387 - DNA, 25 bp, Homo sapien
tagggaagacctgttgtcttccagc

SEQ ID NO: 5460388 - DNA, 25 bp, Homo sapien
ctgctcccaaatccgaaggtgtgaa

SEQ ID NO: 5460389 - DNA, 25 bp, Homo sapien
gaaagaaccagagtgcgtgatctgt

SEQ ID NO: 5460390 - DNA, 25 bp, Homo sapien
aaaaactcagggactgactcaccag

SEQ ID NO: 5460391 - DNA, 25 bp, Homo sapien
aattgtaaaaactcagggactgact

SEQ ID NO: 5460392 - DNA, 25 bp, Homo sapien
gatgtttatcgtttttagaataata

SEQ ID NO: 5460393 - DNA, 25 bp, Homo sapien
tgtaaaaactcagggactgactcac

SEQ ID NO: 5460394 - DNA, 25 bp, Homo sapien
taatatagcagggtatctgcctctg

SEQ ID NO: 5460395 - DNA, 25 bp, Homo sapien
ttatcagttatttgcttagggagga

SEQ ID NO: 5460396 - DNA, 25 bp, Homo sapien
tccgtttattgcatctgacagcttt

SEQ ID NO: 5460397 - DNA, 25 bp, Homo sapien
ccagagagtccaggcaaacagtccg

SEQ ID NO: 5460398 - DNA, 25 bp, Homo sapien
gctaatgggattctgacaaggttct

SEQ ID NO: 5460399 - DNA, 25 bp, Homo sapien
actgcgtgtcccctaaaagtccttg

SEQ ID NO: 5460400 - DNA, 25 bp, Homo sapien
taaaagtccttgaggaataccagta

SEQ ID NO: 5460401 - DNA, 25 bp, Homo sapien
ccccttgatttagagttgagaggga

SEQ ID NO: 5460402 - DNA, 25 bp, Homo sapien
gctctacatggcctgcaaatgaacc

SEQ ID NO: 5460403 - DNA, 25 bp, Homo sapien
tctacatggcctgcaaatgaaccat

SEQ ID NO: 5460404 - DNA, 25 bp, Homo sapien
ttcttagcagctctacatggcctgc

SEQ ID NO: 5460405 - DNA, 25 bp, Homo sapien
tagcagctctacatggcctgcaaat

SEQ ID NO: 5460406 - DNA, 25 bp, Homo sapien
cagtcagggacatagcaaccaaaat

SEQ ID NO: 5460407 - DNA, 25 bp, Homo sapien
tgtggcaacagagtgctccttaata

SEQ ID NO: 5460408 - DNA, 25 bp, Homo sapien
cattagagctagatacagtcaggga

SEQ ID NO: 5460409 - DNA, 25 bp, Homo sapien
catttgtggtagagctatggagatc

SEQ ID NO: 5460410 - DNA, 25 bp, Homo sapien
ccttgggctcttaagtaatttgtct

SEQ ID NO: 5460411 - DNA, 25 bp, Homo sapien
aaatattgtggaaactcctcaggca

SEQ ID NO: 5460412 - DNA, 25 bp, Homo sapien
gaaaagagtcacaaatcctttgctg

SEQ ID NO: 5460413 - DNA, 25 bp, Homo sapien
tagagataatctccttgggctctta

SEQ ID NO: 5460414 - DNA, 25 bp, Homo sapien
gcagtctggcatcttctttgctgtg

SEQ ID NO: 5460415 - DNA, 25 bp, Homo sapien
ctgtgtcttatcagctatttgtggt

SEQ ID NO: 5460416 - DNA, 25 bp, Homo sapien
ttttgaggagggcttgcatgagcca

SEQ ID NO: 5460417 - DNA, 25 bp, Homo sapien
caaattatttttaggcgcaattcca

SEQ ID NO: 5460418 - DNA, 25 bp, Homo sapien
tgtgtcgtttggcttagggaatagt

SEQ ID NO: 5460419 - DNA, 25 bp, Homo sapien
tgcctgagtcgccaatgtgtcgttt

SEQ ID NO: 5460420 - DNA, 25 bp, Homo sapien
gccctgatggtagatgtgcagtccc

SEQ ID NO: 5460421 - DNA, 25 bp, Homo sapien
gatgtgcagtcccaaggtatccaga

SEQ ID NO: 5460422 - DNA, 25 bp, Homo sapien
taaatagtactctggaaggatgaca

SEQ ID NO: 5460423 - DNA, 25 bp, Homo sapien
caggcatacaaatccgctgttgcaa

SEQ ID NO: 5460424 - DNA, 25 bp, Homo sapien
tccgctgttgcaaggagaaagtgga

SEQ ID NO: 5460425 - DNA, 25 bp, Homo sapien
gaaaagcaatgcatttcgggaattc

SEQ ID NO: 5460426 - DNA, 25 bp, Homo sapien
cttcctcaagcctggtatttccaaa

SEQ ID NO: 5460427 - DNA, 25 bp, Homo sapien
tgtagtctgtgaatgaaaatcaggc

SEQ ID NO: 5460428 - DNA, 25 bp, Homo sapien
taagtttgactctgatgatgtagtc

SEQ ID NO: 5460429 - DNA, 25 bp, Homo sapien
gatgagggaatgtaagtttgactct

SEQ ID NO: 5460430 - DNA, 25 bp, Homo sapien
ctatgaagaggtttcgtcagcattt

SEQ ID NO: 5460431 - DNA, 25 bp, Homo sapien
gatcactactggtctgctgtcttcc

SEQ ID NO: 5460432 - DNA, 25 bp, Homo sapien
ttggagtgtcttgtcctaagagtgc

SEQ ID NO: 5460433 - DNA, 25 bp, Homo sapien
caatcggtcatctctgattgggaaa

SEQ ID NO: 5460434 - DNA, 25 bp, Homo sapien
taagtcaccagtggagatgatgaat

SEQ ID NO: 5460435 - DNA, 25 bp, Homo sapien
ccagtaagtcaccagtggagatgat

SEQ ID NO: 5460436 - DNA, 25 bp, Homo sapien
tgaggcttgtcacagcggacaggaa

SEQ ID NO: 5460437 - DNA, 25 bp, Homo sapien
gccgtgaggcttgtcacagcggaca

SEQ ID NO: 5460438 - DNA, 25 bp, Homo sapien
gagataaaagcttgtgaacactgca

SEQ ID NO: 5460439 - DNA, 25 bp, Homo sapien
gaaaatatgttctgcctgtgggtaa

SEQ ID NO: 5460440 - DNA, 25 bp, Homo sapien
cactggaattctattttggcaaacc

SEQ ID NO: 5460441 - DNA, 25 bp, Homo sapien
cccattcgtgatgtgtgcagatgaa

SEQ ID NO: 5460442 - DNA, 25 bp, Homo sapien
gtcctctgtaaaacactgtgctcat

SEQ ID NO: 5460443 - DNA, 25 bp, Homo sapien
agatctgtcctctgtaaaacactgt

SEQ ID NO: 5460444 - DNA, 25 bp, Homo sapien
gatctgtcctctgtaaaacactgtg

SEQ ID NO: 5460445 - DNA, 25 bp, Homo sapien
tctgtcctctgtaaaacactgtgct

SEQ ID NO: 5460446 - DNA, 25 bp, Homo sapien
tcctcatcgagggaaagggagaact

SEQ ID NO: 5460447 - DNA, 25 bp, Homo sapien
gcgagccctagaacgtgacaggtct

SEQ ID NO: 5460448 - DNA, 25 bp, Homo sapien
gtgttccaaggaagcagcgagccct

SEQ ID NO: 5460449 - DNA, 25 bp, Homo sapien
gagagtccatttccgctgtgttcca

SEQ ID NO: 5460450 - DNA, 25 bp, Homo sapien
gactgacaccaaattgacaaaccac

SEQ ID NO: 5460451 - DNA, 25 bp, Homo sapien
tggtctcggtggactgacaccaaat

SEQ ID NO: 5460452 - DNA, 25 bp, Homo sapien
caatattctggtctcggtggactga

SEQ ID NO: 5460453 - DNA, 25 bp, Homo sapien
cggtggactgacaccaaattgacaa

SEQ ID NO: 5460454 - DNA, 25 bp, Homo sapien
gacaggtgggactaatcagttcata

SEQ ID NO: 5460455 - DNA, 25 bp, Homo sapien
ggattcaatcctcttttcaatatac

SEQ ID NO: 5460456 - DNA, 25 bp, Homo sapien
ggatttcttgatccgtggtggattc

SEQ ID NO: 5460457 - DNA, 25 bp, Homo sapien
gggactaatcagttcataggtaaaa

SEQ ID NO: 5460458 - DNA, 25 bp, Homo sapien
caaggggacatctcaaccctggctt

SEQ ID NO: 5460459 - DNA, 25 bp, Homo sapien
ttccctaattctacagctaaccaaa

SEQ ID NO: 5460460 - DNA, 25 bp, Homo sapien
gacatctcaaccctggctttcccta

SEQ ID NO: 5460461 - DNA, 25 bp, Homo sapien
tggctttccctaattctacagctaa

SEQ ID NO: 5460462 - DNA, 25 bp, Homo sapien
gaacagctacagtggtagttgaggt

SEQ ID NO: 5460463 - DNA, 25 bp, Homo sapien
tgggtgggcaaggtgaaggaaggca

SEQ ID NO: 5460464 - DNA, 25 bp, Homo sapien
tacagtggtagttgaggtccagaga

SEQ ID NO: 5460465 - DNA, 25 bp, Homo sapien
tttgttggtgatgtggaccgaggtg

SEQ ID NO: 5460466 - DNA, 25 bp, Homo sapien
tgttgtcaccttcgccagcatgagg

SEQ ID NO: 5460467 - DNA, 25 bp, Homo sapien
gtcaccttcgccagcatgaggggtg

SEQ ID NO: 5460468 - DNA, 25 bp, Homo sapien
cttgttgtcaccttcgccagcatga

SEQ ID NO: 5460469 - DNA, 25 bp, Homo sapien
caccttcgccagcatgaggggtgtg

SEQ ID NO: 5460470 - DNA, 25 bp, Homo sapien
ctaaatttcatcttttcgctgtttt

SEQ ID NO: 5460471 - DNA, 25 bp, Homo sapien
tggagtcccttcttcgactttgttc

SEQ ID NO: 5460472 - DNA, 25 bp, Homo sapien
atgtgttttggtgctcccctcttcc

SEQ ID NO: 5460473 - DNA, 25 bp, Homo sapien
tcaagcgattaaatgtgttttggtg

SEQ ID NO: 5460474 - DNA, 25 bp, Homo sapien
agtcccttcttcgactttgttctca

SEQ ID NO: 5460475 - DNA, 25 bp, Homo sapien
tgactatcacttggcatcttctttt

SEQ ID NO: 5460476 - DNA, 25 bp, Homo sapien
catcacatttattatgggatgaaaa

SEQ ID NO: 5460477 - DNA, 25 bp, Homo sapien
cttgactatcacttggcatcttctt

SEQ ID NO: 5460478 - DNA, 25 bp, Homo sapien
tcatcacatttattatgggatgaaa

SEQ ID NO: 5460479 - DNA, 25 bp, Homo sapien
ggagatgggcttaagcatgcagaat

SEQ ID NO: 5460480 - DNA, 25 bp, Homo sapien
cactaggcttgcatgaaagggagat

SEQ ID NO: 5460481 - DNA, 25 bp, Homo sapien
cactctccatcactaggcttgcatg

SEQ ID NO: 5460482 - DNA, 25 bp, Homo sapien
cagcagggcctgacaatcaagcatg

SEQ ID NO: 5460483 - DNA, 25 bp, Homo sapien
gcttggctaatattgtacaatctgt

SEQ ID NO: 5460484 - DNA, 25 bp, Homo sapien
tctgttgataaacacccaggctatt

SEQ ID NO: 5460485 - DNA, 25 bp, Homo sapien
aagtttggggaatctgcttggctaa

SEQ ID NO: 5460486 - DNA, 25 bp, Homo sapien
aacacccaggctattttaatctcct

SEQ ID NO: 5460487 - DNA, 25 bp, Homo sapien
acaataaccagtaagctggtgtctc

SEQ ID NO: 5460488 - DNA, 25 bp, Homo sapien
agctggtgtctcaactcaagaggag

SEQ ID NO: 5460489 - DNA, 25 bp, Homo sapien
caattagggaaggtggttctcggct

SEQ ID NO: 5460490 - DNA, 25 bp, Homo sapien
ccagtaagctggtgtctcaactcaa

SEQ ID NO: 5460491 - DNA, 25 bp, Homo sapien
caaaaattagattttaggctgttca

SEQ ID NO: 5460492 - DNA, 25 bp, Homo sapien
tgttcagagactgaaaatggtggca

SEQ ID NO: 5460493 - DNA, 25 bp, Homo sapien
agataaaataagacttactggagtt

SEQ ID NO: 5460494 - DNA, 25 bp, Homo sapien
gggagattgcactagtggtgactgc

SEQ ID NO: 5460495 - DNA, 25 bp, Homo sapien
ttgcacttatagcaagaagctgctg

SEQ ID NO: 5460496 - DNA, 25 bp, Homo sapien
cagaatataagagtcacatggattt

SEQ ID NO: 5460497 - DNA, 25 bp, Homo sapien
tgctaggcatgagaccacactggag

SEQ ID NO: 5460498 - DNA, 25 bp, Homo sapien
tgcatgggccatagcaggaacctct

SEQ ID NO: 5460499 - DNA, 25 bp, Homo sapien
tggagcccagcgtaaagtgaaaatg

SEQ ID NO: 5460500 - DNA, 25 bp, Homo sapien
tatgatgagggataccagtttctgc

SEQ ID NO: 5460501 - DNA, 25 bp, Homo sapien
tttagtattttgcagcgttgacctc

SEQ ID NO: 5460502 - DNA, 25 bp, Homo sapien
tgacccttcaccatttagtattttg

SEQ ID NO: 5460503 - DNA, 25 bp, Homo sapien
ccagattgagaagaaatgcgtgtga

SEQ ID NO: 5460504 - DNA, 25 bp, Homo sapien
aagaaatgcgtgtgagtggttgtcc

SEQ ID NO: 5460505 - DNA, 25 bp, Homo sapien
caaagaaaagagcagattggagatg

SEQ ID NO: 5460506 - DNA, 25 bp, Homo sapien
agattggagatgctatgtcctcctc

SEQ ID NO: 5460507 - DNA, 25 bp, Homo sapien
gttccaggcaggacttccaattaga

SEQ ID NO: 5460508 - DNA, 25 bp, Homo sapien
caggcaggacttccaattagaatgc

SEQ ID NO: 5460509 - DNA, 25 bp, Homo sapien
caattcttaatcacactgggtttta

SEQ ID NO: 5460510 - DNA, 25 bp, Homo sapien
cttaatcacactgggttttacctct

SEQ ID NO: 5460511 - DNA, 25 bp, Homo sapien
cacatctgattcttcacatttggta

SEQ ID NO: 5460512 - DNA, 25 bp, Homo sapien
tcttttctcttattctccacatctg

SEQ ID NO: 5460513 - DNA, 25 bp, Homo sapien
caaaggctctagaatggcagtcagg

SEQ ID NO: 5460514 - DNA, 25 bp, Homo sapien
cctctggcagacactaggaaagagt

SEQ ID NO: 5460515 - DNA, 25 bp, Homo sapien
aagcaaaggctctagaatggcagtc

SEQ ID NO: 5460516 - DNA, 25 bp, Homo sapien
ggcagtcaggtttgactattcctct

SEQ ID NO: 5460517 - DNA, 25 bp, Homo sapien
tagttctgaaccctggatactttgc

SEQ ID NO: 5460518 - DNA, 25 bp, Homo sapien
gaattcactgaagggacacatgatg

SEQ ID NO: 5460519 - DNA, 25 bp, Homo sapien
cttggtttgtccctacgactgtgca

SEQ ID NO: 5460520 - DNA, 25 bp, Homo sapien
gatcggatctgcttgcctatcataa

SEQ ID NO: 5460521 - DNA, 25 bp, Homo sapien
gtggccacagccagtgacttatttc

SEQ ID NO: 5460522 - DNA, 25 bp, Homo sapien
ccggaaggcagatgcggtgtggcca

SEQ ID NO: 5460523 - DNA, 25 bp, Homo sapien
gtatgcagcaacgaatgactgcccc

SEQ ID NO: 5460524 - DNA, 25 bp, Homo sapien
aggggaaactactgcccctccgcag

SEQ ID NO: 5460525 - DNA, 25 bp, Homo sapien
ggttgggtatgcagcaacgaatgac

SEQ ID NO: 5460526 - DNA, 25 bp, Homo sapien
tcagaaaaggccacctggaactggc

SEQ ID NO: 5460527 - DNA, 25 bp, Homo sapien
cacctggaactggcattcgacactc

SEQ ID NO: 5460528 - DNA, 25 bp, Homo sapien
ctgcaggcctcagaaaaggccacct

SEQ ID NO: 5460529 - DNA, 25 bp, Homo sapien
aaaaggccacctggaactggcattc

SEQ ID NO: 5460530 - DNA, 25 bp, Homo sapien
gaaatttcctgagagcctagtgctt

SEQ ID NO: 5460531 - DNA, 25 bp, Homo sapien
aaatttcctgagagcctagtgcttg

SEQ ID NO: 5460532 - DNA, 25 bp, Homo sapien
gctgctgcccttcggcctgccgtcc

SEQ ID NO: 5460533 - DNA, 25 bp, Homo sapien
cgtccacccgcttgttgcctgttca

SEQ ID NO: 5460534 - DNA, 25 bp, Homo sapien
gtctgttgagttggcttcctgctgt

SEQ ID NO: 5460535 - DNA, 25 bp, Homo sapien
ggtctgttgagttggcttcctgctg

SEQ ID NO: 5460536 - DNA, 25 bp, Homo sapien
agaactcatagcgtgtgtgccctgt

SEQ ID NO: 5460537 - DNA, 25 bp, Homo sapien
gccagaactcatagcgtgtgtgccc

SEQ ID NO: 5460538 - DNA, 25 bp, Homo sapien
ctatgggccagaactcatagcgtgt

SEQ ID NO: 5460539 - DNA, 25 bp, Homo sapien
tgggccagaactcatagcgtgtgtg

SEQ ID NO: 5460540 - DNA, 25 bp, Homo sapien
cttatgactgcgtcctaaagcctgg

SEQ ID NO: 5460541 - DNA, 25 bp, Homo sapien
ctgcgtcctaaagcctggtacaatg

SEQ ID NO: 5460542 - DNA, 25 bp, Homo sapien
gctttttctgcttatgactgcgtcc

SEQ ID NO: 5460543 - DNA, 25 bp, Homo sapien
tttctgcttatgactgcgtcctaaa

SEQ ID NO: 5460544 - DNA, 25 bp, Homo sapien
cttcctttctgaagaacgttgtgat

SEQ ID NO: 5460545 - DNA, 25 bp, Homo sapien
cctttctgaagaacgttgtgatttt

SEQ ID NO: 5460546 - DNA, 25 bp, Homo sapien
ttgcttcctttctgaagaacgttgt

SEQ ID NO: 5460547 - DNA, 25 bp, Homo sapien
ctgaagaacgttgtgattttggctc

SEQ ID NO: 5460548 - DNA, 25 bp, Homo sapien
tctcaggatcccatttttccaccag

SEQ ID NO: 5460549 - DNA, 25 bp, Homo sapien
tccaacagcatgacatagtccactg

SEQ ID NO: 5460550 - DNA, 25 bp, Homo sapien
gtgcagtgcacgacaactcttctcc

SEQ ID NO: 5460551 - DNA, 25 bp, Homo sapien
gcagtgcacgacaactcttctccaa

SEQ ID NO: 5460552 - DNA, 25 bp, Homo sapien
actacagcctttgttctgtttaagc

SEQ ID NO: 5460553 - DNA, 25 bp, Homo sapien
cctacaaagagtattagtttcttga

SEQ ID NO: 5460554 - DNA, 25 bp, Homo sapien
catttccagcagtgagtcaactaca

SEQ ID NO: 5460555 - DNA, 25 bp, Homo sapien
ttcttgagtcccgagtacagctgcc

SEQ ID NO: 5460556 - DNA, 25 bp, Homo sapien
gaaaaagttgaccagatcttgagtg

SEQ ID NO: 5460557 - DNA, 25 bp, Homo sapien
gctgccaatccgaaattctcttgtg

SEQ ID NO: 5460558 - DNA, 25 bp, Homo sapien
tgtcaaagcacttatccttccgatt

SEQ ID NO: 5460559 - DNA, 25 bp, Homo sapien
tgaagggttgggatgctgccaatcc

SEQ ID NO: 5460560 - DNA, 25 bp, Homo sapien
agcgctggaactcagggcgttcttg

SEQ ID NO: 5460561 - DNA, 25 bp, Homo sapien
cgttcttgtggggtgaaattagcag

SEQ ID NO: 5460562 - DNA, 25 bp, Homo sapien
tcttgtggggtgaaattagcagtct

SEQ ID NO: 5460563 - DNA, 25 bp, Homo sapien
cgctggaactcagggcgttcttgtg

SEQ ID NO: 5460564 - DNA, 25 bp, Homo sapien
tgtaacccagctctggcaaatggaa

SEQ ID NO: 5460565 - DNA, 25 bp, Homo sapien
ttacttgtgtccctggcacgtcact

SEQ ID NO: 5460566 - DNA, 25 bp, Homo sapien
aggcaggtcttttacttgtgtccct

SEQ ID NO: 5460567 - DNA, 25 bp, Homo sapien
agtgggggccgtgtaacccagctct

SEQ ID NO: 5460568 - DNA, 25 bp, Homo sapien
ttgctgctagcaaaacggcttccct

SEQ ID NO: 5460569 - DNA, 25 bp, Homo sapien
tcttgctgctagcaaaacggcttcc

SEQ ID NO: 5460570 - DNA, 25 bp, Homo sapien
gctgctagcaaaacggcttccctca

SEQ ID NO: 5460571 - DNA, 25 bp, Homo sapien
tctctcttgctgctagcaaaacggc

SEQ ID NO: 5460572 - DNA, 25 bp, Homo sapien
cctctttgttgaatgccgtaataca

SEQ ID NO: 5460573 - DNA, 25 bp, Homo sapien
tgctcatgtccaaggtactcattct

SEQ ID NO: 5460574 - DNA, 25 bp, Homo sapien
ttttcacccaattcaaagagagcca

SEQ ID NO: 5460575 - DNA, 25 bp, Homo sapien
agcaggatgctcatgtccaaggtac

SEQ ID NO: 5460576 - DNA, 25 bp, Homo sapien
catttcttaaaggtgaagattcctc

SEQ ID NO: 5460577 - DNA, 25 bp, Homo sapien
tccccttgaaactggatcaacatgt

SEQ ID NO: 5460578 - DNA, 25 bp, Homo sapien
gaaaatatgctccttatatgtccac

SEQ ID NO: 5460579 - DNA, 25 bp, Homo sapien
attcctcagaggaatagaaggtaga

SEQ ID NO: 5460580 - DNA, 25 bp, Homo sapien
agctcttgttttcgctttctttgtg

SEQ ID NO: 5460581 - DNA, 25 bp, Homo sapien
ctctgcagtcagctcttgttttcgc

SEQ ID NO: 5460582 - DNA, 25 bp, Homo sapien
tcttgatagtccagagagcaggaga

SEQ ID NO: 5460583 - DNA, 25 bp, Homo sapien
gcagtcagctcttgttttcgctttc

SEQ ID NO: 5460584 - DNA, 25 bp, Homo sapien
gcagcagggaccaccctctcaccat

SEQ ID NO: 5460585 - DNA, 25 bp, Homo sapien
gtctgagttcctaagtactgctgcc

SEQ ID NO: 5460586 - DNA, 25 bp, Homo sapien
ctgagttcctaagtactgctgccct

SEQ ID NO: 5460587 - DNA, 25 bp, Homo sapien
cagtctgagttcctaagtactgctg

SEQ ID NO: 5460588 - DNA, 25 bp, Homo sapien
atccctgtccagcatagtcctgagc

SEQ ID NO: 5460589 - DNA, 25 bp, Homo sapien
tgtctctccgatgacatctgtttct

SEQ ID NO: 5460590 - DNA, 25 bp, Homo sapien
gacaatccctgtccagcatagtcct

SEQ ID NO: 5460591 - DNA, 25 bp, Homo sapien
gccctgtctctccgatgacatctgt

SEQ ID NO: 5460592 - DNA, 25 bp, Homo sapien
tccatagagatcttgtgcctggtaa

SEQ ID NO: 5460593 - DNA, 25 bp, Homo sapien
cctggtaatataccccatcccacct

SEQ ID NO: 5460594 - DNA, 25 bp, Homo sapien
ctggtaatataccccatcccacctg

SEQ ID NO: 5460595 - DNA, 25 bp, Homo sapien
ctatccatagagatcttgtgcctgg

SEQ ID NO: 5460596 - DNA, 25 bp, Homo sapien
tattttggctgtttcatgatctcgt

SEQ ID NO: 5460597 - DNA, 25 bp, Homo sapien
tcttgtgggtaactcttattttggc

SEQ ID NO: 5460598 - DNA, 25 bp, Homo sapien
tcttgttgtctttccgtccattttc

SEQ ID NO: 5460599 - DNA, 25 bp, Homo sapien
tcttcccggtgaaatcctcctcttc

SEQ ID NO: 5460600 - DNA, 25 bp, Homo sapien
gacagacagtcttgtgaccatctgt

SEQ ID NO: 5460601 - DNA, 25 bp, Homo sapien
accagacagacagtcttgtgaccat

SEQ ID NO: 5460602 - DNA, 25 bp, Homo sapien
cagacagacagtcttgtgaccatct

SEQ ID NO: 5460603 - DNA, 25 bp, Homo sapien
cgtttttcccattaagcagagatct

SEQ ID NO: 5460604 - DNA, 25 bp, Homo sapien
tgcccacctgaaaactgagcagtct

SEQ ID NO: 5460605 - DNA, 25 bp, Homo sapien
tccgaagaatatgcccacctgaaaa

SEQ ID NO: 5460606 - DNA, 25 bp, Homo sapien
ggtatccgaagaatatgcccacctg

SEQ ID NO: 5460607 - DNA, 25 bp, Homo sapien
aatccaaagtgggtatccgaagaat

SEQ ID NO: 5460608 - DNA, 25 bp, Homo sapien
aagcaaccaccagcaaccgatacat

SEQ ID NO: 5460609 - DNA, 25 bp, Homo sapien
tgatagcttccgtgtcacctgttgc

SEQ ID NO: 5460610 - DNA, 25 bp, Homo sapien
tcagtgatagcttccgtgtcacctg

SEQ ID NO: 5460611 - DNA, 25 bp, Homo sapien
cacctgttgcctgaacactaagcca

SEQ ID NO: 5460612 - DNA, 25 bp, Homo sapien
ttccgtgtcacctgttgcctgaaca

SEQ ID NO: 5460613 - DNA, 25 bp, Homo sapien
acttctacatctccccagaaacata

SEQ ID NO: 5460614 - DNA, 25 bp, Homo sapien
tttcatcacttctacatctccccag

SEQ ID NO: 5460615 - DNA, 25 bp, Homo sapien
tacatctccccagaaacataggcat

SEQ ID NO: 5460616 - DNA, 25 bp, Homo sapien
acctttttcatcacttctacatctc

SEQ ID NO: 5460617 - DNA, 25 bp, Homo sapien
tgcagagcaaaaccacaaggcctag

SEQ ID NO: 5460618 - DNA, 25 bp, Homo sapien
gccattggttgctatgcagagcaaa

SEQ ID NO: 5460619 - DNA, 25 bp, Homo sapien
atgcagagcaaaaccacaaggccta

SEQ ID NO: 5460620 - DNA, 25 bp, Homo sapien
tctgccattggttgctatgcagagc

SEQ ID NO: 5460621 - DNA, 25 bp, Homo sapien
tagcctggatggatgcaacatgctc

SEQ ID NO: 5460622 - DNA, 25 bp, Homo sapien
cacccaggctaaaattcttatagca

SEQ ID NO: 5460623 - DNA, 25 bp, Homo sapien
ttctcacccaggctaaaattcttat

SEQ ID NO: 5460624 - DNA, 25 bp, Homo sapien
tgctccccaaggattgaaataagtt

SEQ ID NO: 5460625 - DNA, 25 bp, Homo sapien
ttttacactgccaaccaggagcaag

SEQ ID NO: 5460626 - DNA, 25 bp, Homo sapien
tgagagctttcaaggtgcaccaaga

SEQ ID NO: 5460627 - DNA, 25 bp, Homo sapien
tacttccctggctgcttgtgccctt

SEQ ID NO: 5460628 - DNA, 25 bp, Homo sapien
caggtgcttaaacggaaactgtggg

SEQ ID NO: 5460629 - DNA, 25 bp, Homo sapien
cactaccatataataggtcaggaag

SEQ ID NO: 5460630 - DNA, 25 bp, Homo sapien
tcagagtcactaccatataataggt

SEQ ID NO: 5460631 - DNA, 25 bp, Homo sapien
tcaactcagagtcactaccatataa

SEQ ID NO: 5460632 - DNA, 25 bp, Homo sapien
accatataataggtcaggaagtcca

SEQ ID NO: 5460633 - DNA, 25 bp, Homo sapien
tagtacgacattgagatatcttcat

SEQ ID NO: 5460634 - DNA, 25 bp, Homo sapien
tgagtagtacgacattgagatatct

SEQ ID NO: 5460635 - DNA, 25 bp, Homo sapien
agtagtacgacattgagatatcttc

SEQ ID NO: 5460636 - DNA, 25 bp, Homo sapien
ttgagtagtacgacattgagatatc

SEQ ID NO: 5460637 - DNA, 25 bp, Homo sapien
aagttattcctgctacccaacatac

SEQ ID NO: 5460638 - DNA, 25 bp, Homo sapien
tcagcttatttggaagttattcctg

SEQ ID NO: 5460639 - DNA, 25 bp, Homo sapien
tatttggaagttattcctgctaccc

SEQ ID NO: 5460640 - DNA, 25 bp, Homo sapien
tggaagttattcctgctacccaaca

SEQ ID NO: 5460641 - DNA, 25 bp, Homo sapien
gatttggagaaacttcacctgcccc

SEQ ID NO: 5460642 - DNA, 25 bp, Homo sapien
ggatttggagaaacttcacctgccc

SEQ ID NO: 5460643 - DNA, 25 bp, Homo sapien
tttggagaaacttcacctgccccca

SEQ ID NO: 5460644 - DNA, 25 bp, Homo sapien
aataagcatgtgaatccctccctgg

SEQ ID NO: 5460645 - DNA, 25 bp, Homo sapien
gaactgactagaaggctggtgcgat

SEQ ID NO: 5460646 - DNA, 25 bp, Homo sapien
caagcaaggtatccaggttctctca

SEQ ID NO: 5460647 - DNA, 25 bp, Homo sapien
gtgagcatgctacccagccaaggaa

SEQ ID NO: 5460648 - DNA, 25 bp, Homo sapien
cacacaggatcaatgcacctttgca

SEQ ID NO: 5460649 - DNA, 25 bp, Homo sapien
gaatggaggatctgactgagaatgt

SEQ ID NO: 5460650 - DNA, 25 bp, Homo sapien
ctgactgagaatgttaagaggagtg

SEQ ID NO: 5460651 - DNA, 25 bp, Homo sapien
catggaaggaccacacaggatcaat

SEQ ID NO: 5460652 - DNA, 25 bp, Homo sapien
ctatctgtaactgcccgcctttcca

SEQ ID NO: 5460653 - DNA, 25 bp, Homo sapien
cctatctgtaactgcccgcctttcc

SEQ ID NO: 5460654 - DNA, 25 bp, Homo sapien
ccttttccctgataattgcccccat

SEQ ID NO: 5460655 - DNA, 25 bp, Homo sapien
gcctttccaactcaatcccttatca

SEQ ID NO: 5460656 - DNA, 25 bp, Homo sapien
ttatgaagcctaactcagtcaaagc

SEQ ID NO: 5460657 - DNA, 25 bp, Homo sapien
gcttcaatgggtgcgttccctgcat

SEQ ID NO: 5460658 - DNA, 25 bp, Homo sapien
gtatctttagaattggtccttccag

SEQ ID NO: 5460659 - DNA, 25 bp, Homo sapien
tccctgcattttgatatgtcacctg

SEQ ID NO: 5460660 - DNA, 25 bp, Homo sapien
tatgtggcatgtatactcaaagttc

SEQ ID NO: 5460661 - DNA, 25 bp, Homo sapien
tctcccagattggaaatgtcctctg

SEQ ID NO: 5460662 - DNA, 25 bp, Homo sapien
catagagtgtctggaattggcccac

SEQ ID NO: 5460663 - DNA, 25 bp, Homo sapien
tttgagccaacaatagacatcacag

SEQ ID NO: 5460664 - DNA, 25 bp, Homo sapien
cctgtccagccgctgttgcaccctg

SEQ ID NO: 5460665 - DNA, 25 bp, Homo sapien
ctgaatgctccttgactgctgcttt

SEQ ID NO: 5460666 - DNA, 25 bp, Homo sapien
cagccgctgttgcaccctggccctg

SEQ ID NO: 5460667 - DNA, 25 bp, Homo sapien
ccctgaatgctccttgactgctgct

SEQ ID NO: 5460668 - DNA, 25 bp, Homo sapien
cacccctcctcctaatttcttcata

SEQ ID NO: 5460669 - DNA, 25 bp, Homo sapien
cccataccattaaatcttaacctca

SEQ ID NO: 5460670 - DNA, 25 bp, Homo sapien
tcttcatattaatgatcccaacatt

SEQ ID NO: 5460671 - DNA, 25 bp, Homo sapien
ggtgctcctattcactaacacccct

SEQ ID NO: 5460672 - DNA, 25 bp, Homo sapien
tctattgaggaaatatctctcattc

SEQ ID NO: 5460673 - DNA, 25 bp, Homo sapien
attgaggaaatatctctcattctca

SEQ ID NO: 5460674 - DNA, 25 bp, Homo sapien
gaggaaatatctctcattctcattt

SEQ ID NO: 5460675 - DNA, 25 bp, Homo sapien
tcatctattgaggaaatatctctca

SEQ ID NO: 5460676 - DNA, 25 bp, Homo sapien
tcatcttccagttctatgcaaaaat

SEQ ID NO: 5460677 - DNA, 25 bp, Homo sapien
gaacctgctccaaaaggagccaagg

SEQ ID NO: 5460678 - DNA, 25 bp, Homo sapien
ttggactgtcccctggaacctgctc

SEQ ID NO: 5460679 - DNA, 25 bp, Homo sapien
ctggaacctgctccaaaaggagcca

SEQ ID NO: 5460680 - DNA, 25 bp, Homo sapien
gatctctgtcttggactgtcccctg

SEQ ID NO: 5460681 - DNA, 25 bp, Homo sapien
ttgattttggtattgttgtaactct

SEQ ID NO: 5460682 - DNA, 25 bp, Homo sapien
tttgattttggtattgttgtaactc

SEQ ID NO: 5460683 - DNA, 25 bp, Homo sapien
tggttcccttagaatcacagaagta

SEQ ID NO: 5460684 - DNA, 25 bp, Homo sapien
ttgaatacccagtatccagagcttc

SEQ ID NO: 5460685 - DNA, 25 bp, Homo sapien
gattcatcagagcatgctgtgccag

SEQ ID NO: 5460686 - DNA, 25 bp, Homo sapien
cagatgagtgtatccttgaataccc

SEQ ID NO: 5460687 - DNA, 25 bp, Homo sapien
gacaactgtcaatcttgatgtttct

SEQ ID NO: 5460688 - DNA, 25 bp, Homo sapien
atgacaactgtcaatcttgatgttt

SEQ ID NO: 5460689 - DNA, 25 bp, Homo sapien
tgacaactgtcaatcttgatgtttc

SEQ ID NO: 5460690 - DNA, 25 bp, Homo sapien
cttgatgtttcttaagggactggct

SEQ ID NO: 5460691 - DNA, 25 bp, Homo sapien
gtattgttgacccattgttttgagg

SEQ ID NO: 5460692 - DNA, 25 bp, Homo sapien
tgaccaaagagataggaattacaac

SEQ ID NO: 5460693 - DNA, 25 bp, Homo sapien
gcccgatttggccatttaacaattc

SEQ ID NO: 5460694 - DNA, 25 bp, Homo sapien
gaatttcaattccaagcccgatttg

SEQ ID NO: 5460695 - DNA, 25 bp, Homo sapien
tttctgtgtcagaggaagaacagat

SEQ ID NO: 5460696 - DNA, 25 bp, Homo sapien
tgctctgcttccagcatgttctttc

SEQ ID NO: 5460697 - DNA, 25 bp, Homo sapien
tcctttctgtgtcagaggaagaaca

SEQ ID NO: 5460698 - DNA, 25 bp, Homo sapien
ctgtgtcagaggaagaacagatcat

SEQ ID NO: 5460699 - DNA, 25 bp, Homo sapien
caaatctcctgtgaagcttttgaga

SEQ ID NO: 5460700 - DNA, 25 bp, Homo sapien
taaggtagtctagctggaaaggcaa

SEQ ID NO: 5460701 - DNA, 25 bp, Homo sapien
tattggctgtaaaatgtctaacgaa

SEQ ID NO: 5460702 - DNA, 25 bp, Homo sapien
gcttgcataagcttcccaggacaca

SEQ ID NO: 5460703 - DNA, 25 bp, Homo sapien
cacctgaaggcgcaaagtttatttt

SEQ ID NO: 5460704 - DNA, 25 bp, Homo sapien
cagatgattggttgcaaatttcttt

SEQ ID NO: 5460705 - DNA, 25 bp, Homo sapien
tgggaggtgctaccttacctcctaa

SEQ ID NO: 5460706 - DNA, 25 bp, Homo sapien
gactggtgtcagatgattggttgca

SEQ ID NO: 5460707 - DNA, 25 bp, Homo sapien
tcaagtcatctttccaggtggcctc

SEQ ID NO: 5460708 - DNA, 25 bp, Homo sapien
gaactgttgcatggccgttttctcc

SEQ ID NO: 5460709 - DNA, 25 bp, Homo sapien
tgaaataaccctcattctctcccaa

SEQ ID NO: 5460710 - DNA, 25 bp, Homo sapien
aggtggcctctgagatatcagtcat

SEQ ID NO: 5460711 - DNA, 25 bp, Homo sapien
cacttgcagctgctcgaagtaatgg

SEQ ID NO: 5460712 - DNA, 25 bp, Homo sapien
gctgctcgaagtaatggattatgcc

SEQ ID NO: 5460713 - DNA, 25 bp, Homo sapien
gattatgcctttgaacttgccagta

SEQ ID NO: 5460714 - DNA, 25 bp, Homo sapien
tcacggtcccggtataaatatcaaa

SEQ ID NO: 5460715 - DNA, 25 bp, Homo sapien
tgcaagtgccatgaaaggtttatcc

SEQ ID NO: 5460716 - DNA, 25 bp, Homo sapien
gagtatagctcaatgcaaaagaggg

SEQ ID NO: 5460717 - DNA, 25 bp, Homo sapien
ttagccactgagcattcaagcctga

SEQ ID NO: 5460718 - DNA, 25 bp, Homo sapien
ggtttatcctttctacttcctgagc

SEQ ID NO: 5460719 - DNA, 25 bp, Homo sapien
caaaagtttgcatgaagtatcagcc

SEQ ID NO: 5460720 - DNA, 25 bp, Homo sapien
gtctcctttgtccatactgaacaag

SEQ ID NO: 5460721 - DNA, 25 bp, Homo sapien
tgaaggagaactaccctttctgtgt

SEQ ID NO: 5460722 - DNA, 25 bp, Homo sapien
tcttagagatggctttcaaaagttt

SEQ ID NO: 5460723 - DNA, 25 bp, Homo sapien
tcttagtggatgcttctctagcttt

SEQ ID NO: 5460724 - DNA, 25 bp, Homo sapien
cttagtggatgcttctctagctttg

SEQ ID NO: 5460725 - DNA, 25 bp, Homo sapien
ttcttagtggatgcttctctagctt

SEQ ID NO: 5460726 - DNA, 25 bp, Homo sapien
gttcttagtggatgcttctctagct

SEQ ID NO: 5460727 - DNA, 25 bp, Homo sapien
tacttaaatccacctttccactagc

SEQ ID NO: 5460728 - DNA, 25 bp, Homo sapien
tctctgtacctctgcagtcgagggc

SEQ ID NO: 5460729 - DNA, 25 bp, Homo sapien
cattcgcatgacaaaggttcttggg

SEQ ID NO: 5460730 - DNA, 25 bp, Homo sapien
ccttccttaggatgatttgctttgc

SEQ ID NO: 5460731 - DNA, 25 bp, Homo sapien
cacgcatgctttggatgagcatgag

SEQ ID NO: 5460732 - DNA, 25 bp, Homo sapien
cacaatgtcacacgcatgctttgga

SEQ ID NO: 5460733 - DNA, 25 bp, Homo sapien
tgtcacacgcatgctttggatgagc

SEQ ID NO: 5460734 - DNA, 25 bp, Homo sapien
cagaacacaatgtcacacgcatgct

SEQ ID NO: 5460735 - DNA, 25 bp, Homo sapien
tgtggctggactgaacttgttttgg

SEQ ID NO: 5460736 - DNA, 25 bp, Homo sapien
ctgtggctggactgaacttgttttg

SEQ ID NO: 5460737 - DNA, 25 bp, Homo sapien
tggctggactgaacttgttttgggt

SEQ ID NO: 5460738 - DNA, 25 bp, Homo sapien
tctgtggctggactgaacttgtttt

SEQ ID NO: 5460739 - DNA, 25 bp, Homo sapien
tgtgcaaatgccaacaggcgaaggg

SEQ ID NO: 5460740 - DNA, 25 bp, Homo sapien
cctgtgcagaaatgtgcaaatgcca

SEQ ID NO: 5460741 - DNA, 25 bp, Homo sapien
tgtactccatatactcctgtgcaga

SEQ ID NO: 5460742 - DNA, 25 bp, Homo sapien
ttagatggagaatactgctgtgtac

SEQ ID NO: 5460743 - DNA, 25 bp, Homo sapien
agagagggacaacagcagaacagtt

SEQ ID NO: 5460744 - DNA, 25 bp, Homo sapien
caggatgctgcccactggacagagc

SEQ ID NO: 5460745 - DNA, 25 bp, Homo sapien
ggcaggatgctgcccactggacaga

SEQ ID NO: 5460746 - DNA, 25 bp, Homo sapien
ctaagctcggggcaggatgctgccc

SEQ ID NO: 5460747 - DNA, 25 bp, Homo sapien
aagctcggggcaggatgctgcccac

SEQ ID NO: 5460748 - DNA, 25 bp, Homo sapien
gccctctgctgcttatagctctttg

SEQ ID NO: 5460749 - DNA, 25 bp, Homo sapien
cagtcacccctattaaaaccatcaa

SEQ ID NO: 5460750 - DNA, 25 bp, Homo sapien
gctctttgtacactgggccaatgac

SEQ ID NO: 5460751 - DNA, 25 bp, Homo sapien
tccgattgttctaatgaagcccata

SEQ ID NO: 5460752 - DNA, 25 bp, Homo sapien
ctgtgaagcctactttgaacttcat

SEQ ID NO: 5460753 - DNA, 25 bp, Homo sapien
agaagtctcctgtgggctcctagat

SEQ ID NO: 5460754 - DNA, 25 bp, Homo sapien
gcatcactacactgcaaaccagtgg

SEQ ID NO: 5460755 - DNA, 25 bp, Homo sapien
gttcagcatcactacactgcaaacc

SEQ ID NO: 5460756 - DNA, 25 bp, Homo sapien
tcactacactgcaaaccagtgggat

SEQ ID NO: 5460757 - DNA, 25 bp, Homo sapien
agggcgtgcttgagaatcatttcag

SEQ ID NO: 5460758 - DNA, 25 bp, Homo sapien
attggagtccggttgagctggcttc

SEQ ID NO: 5460759 - DNA, 25 bp, Homo sapien
cttgcagaccaagcagactacatct

SEQ ID NO: 5460760 - DNA, 25 bp, Homo sapien
tcatttcagatgtggatttcaccca

SEQ ID NO: 5460761 - DNA, 25 bp, Homo sapien
tagcttctgccaagacaatgcattg

SEQ ID NO: 5460762 - DNA, 25 bp, Homo sapien
ggttggagattagctcatctggagg

SEQ ID NO: 5460763 - DNA, 25 bp, Homo sapien
ctggttggagattagctcatctgga

SEQ ID NO: 5460764 - DNA, 25 bp, Homo sapien
tggttggagattagctcatctggag

SEQ ID NO: 5460765 - DNA, 25 bp, Homo sapien
caccatcccactactgaccagaacg

SEQ ID NO: 5460766 - DNA, 25 bp, Homo sapien
catcccactactgaccagaacggga

SEQ ID NO: 5460767 - DNA, 25 bp, Homo sapien
ccactactgaccagaacgggagttc

SEQ ID NO: 5460768 - DNA, 25 bp, Homo sapien
cactactgaccagaacgggagttct

SEQ ID NO: 5460769 - DNA, 25 bp, Homo sapien
catctggttcactggctaagtcccc

SEQ ID NO: 5460770 - DNA, 25 bp, Homo sapien
tatcttcaagtggacccggaatctc

SEQ ID NO: 5460771 - DNA, 25 bp, Homo sapien
gaagcacacagcgagagaaggtttc

SEQ ID NO: 5460772 - DNA, 25 bp, Homo sapien
gatgggtctgtgagccaaagttcaa

SEQ ID NO: 5460773 - DNA, 25 bp, Homo sapien
attgagaaaccattcaaaaggagga

SEQ ID NO: 5460774 - DNA, 25 bp, Homo sapien
gtaattgagaaaccattcaaaagga

SEQ ID NO: 5460775 - DNA, 25 bp, Homo sapien
gagagggagttgtaggatgaggttc

SEQ ID NO: 5460776 - DNA, 25 bp, Homo sapien
agggagttgtaggatgaggttcttc

SEQ ID NO: 5460777 - DNA, 25 bp, Homo sapien
ttggagaaagctgtactgacgatga

SEQ ID NO: 5460778 - DNA, 25 bp, Homo sapien
ttaaaactaggctggtggacttgga

SEQ ID NO: 5460779 - DNA, 25 bp, Homo sapien
tttctgcgtatacaattagaagaga

SEQ ID NO: 5460780 - DNA, 25 bp, Homo sapien
taaaactaggctggtggacttggag

SEQ ID NO: 5460781 - DNA, 25 bp, Homo sapien
gtgtgaaaatcctgagtgcacagtc

SEQ ID NO: 5460782 - DNA, 25 bp, Homo sapien
tggtgtgaaaatcctgagtgcacag

SEQ ID NO: 5460783 - DNA, 25 bp, Homo sapien
tgagcatatgaggatcttgatggtg

SEQ ID NO: 5460784 - DNA, 25 bp, Homo sapien
tgccttgaagaacctaggagactga

SEQ ID NO: 5460785 - DNA, 25 bp, Homo sapien
ctaagcaattgattcctgttggggt

SEQ ID NO: 5460786 - DNA, 25 bp, Homo sapien
cccactgggaaagattgtttctgaa

SEQ ID NO: 5460787 - DNA, 25 bp, Homo sapien
gtcccactgggaaagattgtttctg

SEQ ID NO: 5460788 - DNA, 25 bp, Homo sapien
aagcaattgattcctgttggggtcc

SEQ ID NO: 5460789 - DNA, 25 bp, Homo sapien
cctctccaccatgagggtgcagccc

SEQ ID NO: 5460790 - DNA, 25 bp, Homo sapien
ggattgctgatagattgccctgtgt

SEQ ID NO: 5460791 - DNA, 25 bp, Homo sapien
cctcattttgatgtgagtaaatccc

SEQ ID NO: 5460792 - DNA, 25 bp, Homo sapien
ccttcatcttttgtccgtagcatcc

SEQ ID NO: 5460793 - DNA, 25 bp, Homo sapien
agaagattggaatagttgccatgat

SEQ ID NO: 5460794 - DNA, 25 bp, Homo sapien
atctaagagtaagtcacagttgcag

SEQ ID NO: 5460795 - DNA, 25 bp, Homo sapien
aagaatctaagagtaagtcacagtt

SEQ ID NO: 5460796 - DNA, 25 bp, Homo sapien
gaatagttgccatgattccatcaaa

SEQ ID NO: 5460797 - DNA, 25 bp, Homo sapien
gtcgcaaagatctggtgcttccaca

SEQ ID NO: 5460798 - DNA, 25 bp, Homo sapien
cattaccccgcaagcaaacaaatgc

SEQ ID NO: 5460799 - DNA, 25 bp, Homo sapien
gaattacacatagcccattaccccg

SEQ ID NO: 5460800 - DNA, 25 bp, Homo sapien
aactttccatacacaggtcgcaaag

SEQ ID NO: 5460801 - DNA, 25 bp, Homo sapien
tgcaagtccagaatgccagcctcgt

SEQ ID NO: 5460802 - DNA, 25 bp, Homo sapien
aaatcccacagtatctttttccgat

SEQ ID NO: 5460803 - DNA, 25 bp, Homo sapien
aaagccagcgctgggtttccatcag

SEQ ID NO: 5460804 - DNA, 25 bp, Homo sapien
tcacaccagtagctctctcgactat

SEQ ID NO: 5460805 - DNA, 25 bp, Homo sapien
ttgaccatgattccccatcatcagc

SEQ ID NO: 5460806 - DNA, 25 bp, Homo sapien
tttgaccatgattccccatcatcag

SEQ ID NO: 5460807 - DNA, 25 bp, Homo sapien
gaccatgattccccatcatcagcac

SEQ ID NO: 5460808 - DNA, 25 bp, Homo sapien
ctttgaccatgattccccatcatca

SEQ ID NO: 5460809 - DNA, 25 bp, Homo sapien
cagagaccataaggtgcttggctcc

SEQ ID NO: 5460810 - DNA, 25 bp, Homo sapien
cagtatctccatgtagaggaggcag

SEQ ID NO: 5460811 - DNA, 25 bp, Homo sapien
tctgaaagctggacagcagtatctc

SEQ ID NO: 5460812 - DNA, 25 bp, Homo sapien
gctgtttagtctgggcaggcgtctc

SEQ ID NO: 5460813 - DNA, 25 bp, Homo sapien
gcaggcacaactgaagagaggaaga

SEQ ID NO: 5460814 - DNA, 25 bp, Homo sapien
caggcacaactgaagagaggaagat

SEQ ID NO: 5460815 - DNA, 25 bp, Homo sapien
aggcacaactgaagagaggaagatg

SEQ ID NO: 5460816 - DNA, 25 bp, Homo sapien
gaggaagacagagcatgaggacatc

SEQ ID NO: 5460817 - DNA, 25 bp, Homo sapien
aagaagttttgcagagcgggaggaa

SEQ ID NO: 5460818 - DNA, 25 bp, Homo sapien
acaaagtgtgccgagctggagagca

SEQ ID NO: 5460819 - DNA, 25 bp, Homo sapien
gggtatcatgtactgccaaaagtca

SEQ ID NO: 5460820 - DNA, 25 bp, Homo sapien
aaaagtcaacaaagtgtgccgagct

SEQ ID NO: 5460821 - DNA, 25 bp, Homo sapien
catgtactgccaaaagtcaacaaag

SEQ ID NO: 5460822 - DNA, 25 bp, Homo sapien
tgtacatcccttaagctgccacaga

SEQ ID NO: 5460823 - DNA, 25 bp, Homo sapien
ctctgccacttgacttgtgtgtaca

SEQ ID NO: 5460824 - DNA, 25 bp, Homo sapien
gccacttgacttgtgtgtacatccc

SEQ ID NO: 5460825 - DNA, 25 bp, Homo sapien
tgacttgtgtgtacatcccttaagc

SEQ ID NO: 5460826 - DNA, 25 bp, Homo sapien
cctggggccaatcacccacagttct

SEQ ID NO: 5460827 - DNA, 25 bp, Homo sapien
tctcattaagctcccagccaggaac

SEQ ID NO: 5460828 - DNA, 25 bp, Homo sapien
tcagcgaggctttgattccagccca

SEQ ID NO: 5460829 - DNA, 25 bp, Homo sapien
aagcaagggtggaccaacaattggg

SEQ ID NO: 5460830 - DNA, 25 bp, Homo sapien
taaaatagacaaatttcagcgaggc

SEQ ID NO: 5460831 - DNA, 25 bp, Homo sapien
acttaaaatgctattgctagaatgt

SEQ ID NO: 5460832 - DNA, 25 bp, Homo sapien
taaaatgctattgctagaatgtggc

SEQ ID NO: 5460833 - DNA, 25 bp, Homo sapien
aaatgctattgctagaatgtggcat

SEQ ID NO: 5460834 - DNA, 25 bp, Homo sapien
ttaaaatgctattgctagaatgtgg

SEQ ID NO: 5460835 - DNA, 25 bp, Homo sapien
agcctgtcccatggatgtccccatg

SEQ ID NO: 5460836 - DNA, 25 bp, Homo sapien
gtcccatggatgtccccatgggtgg

SEQ ID NO: 5460837 - DNA, 25 bp, Homo sapien
atgggtggacctgccccctgaaagc

SEQ ID NO: 5460838 - DNA, 25 bp, Homo sapien
ccctgaaagctctccagtctgtctc

SEQ ID NO: 5460839 - DNA, 25 bp, Homo sapien
gaaggtcatatctctattttcacat

SEQ ID NO: 5460840 - DNA, 25 bp, Homo sapien
aaggatggtgtcaatgttgaaggtc

SEQ ID NO: 5460841 - DNA, 25 bp, Homo sapien
ccaggaaggatggtgtcaatgttga

SEQ ID NO: 5460842 - DNA, 25 bp, Homo sapien
tgtcaatgttgaaggtcatatctct

SEQ ID NO: 5460843 - DNA, 25 bp, Homo sapien
gcatcctgccggttcctcatgtttt

SEQ ID NO: 5460844 - DNA, 25 bp, Homo sapien
aaatgcgccctcccctttaggagca

SEQ ID NO: 5460845 - DNA, 25 bp, Homo sapien
tttccaggaccaaatgcgccctccc

SEQ ID NO: 5460846 - DNA, 25 bp, Homo sapien
gctggcttatctatgtttggcacca

SEQ ID NO: 5460847 - DNA, 25 bp, Homo sapien
gtgtggaccaggcagaagtcttttc

SEQ ID NO: 5460848 - DNA, 25 bp, Homo sapien
tgtggaccaggcagaagtcttttct

SEQ ID NO: 5460849 - DNA, 25 bp, Homo sapien
ggaccaggcagaagtcttttctccc

SEQ ID NO: 5460850 - DNA, 25 bp, Homo sapien
aggcagaagtcttttctccctgctc

SEQ ID NO: 5460851 - DNA, 25 bp, Homo sapien
cttgatggtccggtcatagaaatcc

SEQ ID NO: 5460852 - DNA, 25 bp, Homo sapien
ctacttgatggtccggtcatagaaa

SEQ ID NO: 5460853 - DNA, 25 bp, Homo sapien
tgatggtccggtcatagaaatcctc

SEQ ID NO: 5460854 - DNA, 25 bp, Homo sapien
gatggtccggtcatagaaatcctct

SEQ ID NO: 5460855 - DNA, 25 bp, Homo sapien
aaagtaaacagagggctctgttaga

SEQ ID NO: 5460856 - DNA, 25 bp, Homo sapien
aaattgtccattaatcagtcctggc

SEQ ID NO: 5460857 - DNA, 25 bp, Homo sapien
ttttcacaaatgagccataaaattg

SEQ ID NO: 5460858 - DNA, 25 bp, Homo sapien
cttcttgatatgaattgtaggagca

SEQ ID NO: 5460859 - DNA, 25 bp, Homo sapien
gctgcattccacggtgttgcattta

SEQ ID NO: 5460860 - DNA, 25 bp, Homo sapien
cgtgcatatagacaggaaggtctgc

SEQ ID NO: 5460861 - DNA, 25 bp, Homo sapien
gaggtctcgtctgacttggtatttg

SEQ ID NO: 5460862 - DNA, 25 bp, Homo sapien
ttgcatttatgcagctcagatctga

SEQ ID NO: 5460863 - DNA, 25 bp, Homo sapien
gccagagtggtagccaaaagagacc

SEQ ID NO: 5460864 - DNA, 25 bp, Homo sapien
agagtggtagccaaaagagaccttc

SEQ ID NO: 5460865 - DNA, 25 bp, Homo sapien
agtggtagccaaaagagaccttcat

SEQ ID NO: 5460866 - DNA, 25 bp, Homo sapien
tggccagagtggtagccaaaagaga

SEQ ID NO: 5460867 - DNA, 25 bp, Homo sapien
cactggtgcccatgtcacccaggaa

SEQ ID NO: 5460868 - DNA, 25 bp, Homo sapien
tggtgcccatgtcacccaggaaaac

SEQ ID NO: 5460869 - DNA, 25 bp, Homo sapien
ggtgcccatgtcacccaggaaaacc

SEQ ID NO: 5460870 - DNA, 25 bp, Homo sapien
tatgcatatttccactggtgcccat

SEQ ID NO: 5460871 - DNA, 25 bp, Homo sapien
tggggaaaaggccaagaagctgtcc

SEQ ID NO: 5460872 - DNA, 25 bp, Homo sapien
acgtggggaaaaggccaagaagctg

SEQ ID NO: 5460873 - DNA, 25 bp, Homo sapien
aaaggccaagaagctgtccagcttc

SEQ ID NO: 5460874 - DNA, 25 bp, Homo sapien
ggaaaaggccaagaagctgtccagc

SEQ ID NO: 5460875 - DNA, 25 bp, Homo sapien
tcacaaggtgtccacatgtgtcttc

SEQ ID NO: 5460876 - DNA, 25 bp, Homo sapien
ccaggcttctgtaccaggcaatcaa

SEQ ID NO: 5460877 - DNA, 25 bp, Homo sapien
tgctgattgactgccatcgccaggc

SEQ ID NO: 5460878 - DNA, 25 bp, Homo sapien
gatggctctggaaggcaccacaagt

SEQ ID NO: 5460879 - DNA, 25 bp, Homo sapien
tggaaaataggaccccaggcagtcg

SEQ ID NO: 5460880 - DNA, 25 bp, Homo sapien
agaggtcatgaccacaggacttatt

SEQ ID NO: 5460881 - DNA, 25 bp, Homo sapien
gatacccgagttctgctatgcagcc

SEQ ID NO: 5460882 - DNA, 25 bp, Homo sapien
agcatgatgcatgatacccgagttc

SEQ ID NO: 5460883 - DNA, 25 bp, Homo sapien
acagaggtcatgaccacaggactta

SEQ ID NO: 5460884 - DNA, 25 bp, Homo sapien
gatattcccttctaatggaagctgg

SEQ ID NO: 5460885 - DNA, 25 bp, Homo sapien
tggaagctgggtgccaagtgacaac

SEQ ID NO: 5460886 - DNA, 25 bp, Homo sapien
gattgcccaatcagtgccctgaaca

SEQ ID NO: 5460887 - DNA, 25 bp, Homo sapien
tcgtatggtacctggccagtgccac

SEQ ID NO: 5460888 - DNA, 25 bp, Homo sapien
cccataggaagaaaacagagtccct

SEQ ID NO: 5460889 - DNA, 25 bp, Homo sapien
gcccccataggaagaaaacagagtc

SEQ ID NO: 5460890 - DNA, 25 bp, Homo sapien
ctgcccccataggaagaaaacagag

SEQ ID NO: 5460891 - DNA, 25 bp, Homo sapien
ataggaagaaaacagagtccctctg

SEQ ID NO: 5460892 - DNA, 25 bp, Homo sapien
ccaaagcagccacgcacatggatgg

SEQ ID NO: 5460893 - DNA, 25 bp, Homo sapien
ccccaaagcagccacgcacatggat

SEQ ID NO: 5460894 - DNA, 25 bp, Homo sapien
cccaaagcagccacgcacatggatg

SEQ ID NO: 5460895 - DNA, 25 bp, Homo sapien
taactgctgaatcacaaacacttcc

SEQ ID NO: 5460896 - DNA, 25 bp, Homo sapien
catatttccctgacgttttctgtac

SEQ ID NO: 5460897 - DNA, 25 bp, Homo sapien
cccaggatggtcagcaaaaccacag

SEQ ID NO: 5460898 - DNA, 25 bp, Homo sapien
cactcctgcactgtgtaactgctga

SEQ ID NO: 5460899 - DNA, 25 bp, Homo sapien
caagaaatgatgttctctccactgc

SEQ ID NO: 5460900 - DNA, 25 bp, Homo sapien
gtcccatgctgagacccatgactgg

SEQ ID NO: 5460901 - DNA, 25 bp, Homo sapien
cagtgcaagaaatgatgttctctcc

SEQ ID NO: 5460902 - DNA, 25 bp, Homo sapien
tctccactgctagcagatgtcccat

SEQ ID NO: 5460903 - DNA, 25 bp, Homo sapien
aaaacctgttgctatcccacggcca

SEQ ID NO: 5460904 - DNA, 25 bp, Homo sapien
taaaaacctgttgctatcccacggc

SEQ ID NO: 5460905 - DNA, 25 bp, Homo sapien
gttgctatcccacggccacaggtct

SEQ ID NO: 5460906 - DNA, 25 bp, Homo sapien
acctgttgctatcccacggccacag

SEQ ID NO: 5460907 - DNA, 25 bp, Homo sapien
ctcttactcttccttgtacagatgt

SEQ ID NO: 5460908 - DNA, 25 bp, Homo sapien
tcttactcttccttgtacagatgtc

SEQ ID NO: 5460909 - DNA, 25 bp, Homo sapien
ttactcttccttgtacagatgtcat

SEQ ID NO: 5460910 - DNA, 25 bp, Homo sapien
cttactcttccttgtacagatgtca

SEQ ID NO: 5460911 - DNA, 25 bp, Homo sapien
gctgtattaattgccctggagggta

SEQ ID NO: 5460912 - DNA, 25 bp, Homo sapien
tcccctgaggattcaatgcatttgg

SEQ ID NO: 5460913 - DNA, 25 bp, Homo sapien
ggttcaagcaccattgaacgtgatg

SEQ ID NO: 5460914 - DNA, 25 bp, Homo sapien
tagcgaggcctttgaactgtggctg

SEQ ID NO: 5460915 - DNA, 25 bp, Homo sapien
ctggacagcggccaaataaactgtt

SEQ ID NO: 5460916 - DNA, 25 bp, Homo sapien
cctggacagcggccaaataaactgt

SEQ ID NO: 5460917 - DNA, 25 bp, Homo sapien
tgtgtcttcaccctcgcttttaatc

SEQ ID NO: 5460918 - DNA, 25 bp, Homo sapien
taacccctgcacctgtgttcgcaag

SEQ ID NO: 5460919 - DNA, 25 bp, Homo sapien
tctccccatccattgctaacccctg

SEQ ID NO: 5460920 - DNA, 25 bp, Homo sapien
ctgtgttcgcaagctctgttttttc

SEQ ID NO: 5460921 - DNA, 25 bp, Homo sapien
attccatataatctgaacttttggg

SEQ ID NO: 5460922 - DNA, 25 bp, Homo sapien
gaaaggcagtattccatataatctg

SEQ ID NO: 5460923 - DNA, 25 bp, Homo sapien
catcctagttacaccctgtttgcta

SEQ ID NO: 5460924 - DNA, 25 bp, Homo sapien
ttgccccacagtgactcccatggca

SEQ ID NO: 5460925 - DNA, 25 bp, Homo sapien
tcatttctgcattacccactccacc

SEQ ID NO: 5460926 - DNA, 25 bp, Homo sapien
gactcccatggcaagtctcatccta

SEQ ID NO: 5460927 - DNA, 25 bp, Homo sapien
attaatgttgttagtggttagttgg

SEQ ID NO: 5460928 - DNA, 25 bp, Homo sapien
tgttattaatgttgttagtggttag

SEQ ID NO: 5460929 - DNA, 25 bp, Homo sapien
ttgttattaatgttgttagtggtta

SEQ ID NO: 5460930 - DNA, 25 bp, Homo sapien
tattaatgttgttagtggttagttg

SEQ ID NO: 5460931 - DNA, 25 bp, Homo sapien
tcatcttcctgacttatatatggcc

SEQ ID NO: 5460932 - DNA, 25 bp, Homo sapien
taaaacccaggatacagctgcacaa

SEQ ID NO: 5460933 - DNA, 25 bp, Homo sapien
gccctggagtgtccactaaaaccca

SEQ ID NO: 5460934 - DNA, 25 bp, Homo sapien
tgttctggttcctaattcttggata

SEQ ID NO: 5460935 - DNA, 25 bp, Homo sapien
tcctgatgatagttcaaagtcttct

SEQ ID NO: 5460936 - DNA, 25 bp, Homo sapien
tccaacccatatggctgaaactgag

SEQ ID NO: 5460937 - DNA, 25 bp, Homo sapien
tctcttccaacccatatggctgaaa

SEQ ID NO: 5460938 - DNA, 25 bp, Homo sapien
tatggctgaaactgagtggatttca

SEQ ID NO: 5460939 - DNA, 25 bp, Homo sapien
catttagatcaaagattgtctgctt

SEQ ID NO: 5460940 - DNA, 25 bp, Homo sapien
gacatttagatcaaagattgtctgc

SEQ ID NO: 5460941 - DNA, 25 bp, Homo sapien
actttagctgactgagatttgttct

SEQ ID NO: 5460942 - DNA, 25 bp, Homo sapien
acatttagatcaaagattgtctgct

SEQ ID NO: 5460943 - DNA, 25 bp, Homo sapien
tattaaacgtggtgatgaagtcaac

SEQ ID NO: 5460944 - DNA, 25 bp, Homo sapien
acagtgtcagaatgtgcctccaaag

SEQ ID NO: 5460945 - DNA, 25 bp, Homo sapien
tgtgcctccaaaggagtatgggtta

SEQ ID NO: 5460946 - DNA, 25 bp, Homo sapien
tagcagggaagaccccccttgagaa

SEQ ID NO: 5460947 - DNA, 25 bp, Homo sapien
actgccaatgtcaagccccaaaggc

SEQ ID NO: 5460948 - DNA, 25 bp, Homo sapien
gcatgactcaaatctgggacagaaa

SEQ ID NO: 5460949 - DNA, 25 bp, Homo sapien
tgagaacaggtaatttttgcaatgt

SEQ ID NO: 5460950 - DNA, 25 bp, Homo sapien
ccaaaggcaatggattacaaattgc

SEQ ID NO: 5460951 - DNA, 25 bp, Homo sapien
tatacgtctgccaattttgtaaaga

SEQ ID NO: 5460952 - DNA, 25 bp, Homo sapien
tagagtttaacaatgtggcagtgga

SEQ ID NO: 5460953 - DNA, 25 bp, Homo sapien
catgagaccatgactaccagaaaga

SEQ ID NO: 5460954 - DNA, 25 bp, Homo sapien
tgtccaaagggatcatatacgtctg

SEQ ID NO: 5460955 - DNA, 25 bp, Homo sapien
tattttgaatgcaagtgtaaacaga

SEQ ID NO: 5460956 - DNA, 25 bp, Homo sapien
gaaaccatttgagggtttgtgtgcc

SEQ ID NO: 5460957 - DNA, 25 bp, Homo sapien
tggaaaccatttgagggtttgtgtg

SEQ ID NO: 5460958 - DNA, 25 bp, Homo sapien
cttattttgaatgcaagtgtaaaca

SEQ ID NO: 5460959 - DNA, 25 bp, Homo sapien
aaatctgcatgcgttgacagtcaac

SEQ ID NO: 5460960 - DNA, 25 bp, Homo sapien
tctgttgccaggcatagataaatct

SEQ ID NO: 5460961 - DNA, 25 bp, Homo sapien
gcgttgacagtcaacctgattaaaa

SEQ ID NO: 5460962 - DNA, 25 bp, Homo sapien
catagataaatctgcatgcgttgac

SEQ ID NO: 5460963 - DNA, 25 bp, Homo sapien
ttatgttcaccatctaaaggatcag

SEQ ID NO: 5460964 - DNA, 25 bp, Homo sapien
aactgtccttcagaactatcttatg

SEQ ID NO: 5460965 - DNA, 25 bp, Homo sapien
tacctggtaagttgatgaaatcata

SEQ ID NO: 5460966 - DNA, 25 bp, Homo sapien
aaaaatccttggattgatacaagca

SEQ ID NO: 5460967 - DNA, 25 bp, Homo sapien
tggcacaatactgtactaaaagtcc

SEQ ID NO: 5460968 - DNA, 25 bp, Homo sapien
aaattaaaagtctggcacaatactg

SEQ ID NO: 5460969 - DNA, 25 bp, Homo sapien
gcacaatactgtactaaaagtccat

SEQ ID NO: 5460970 - DNA, 25 bp, Homo sapien
gaaaattaaaagtctggcacaatac

SEQ ID NO: 5460971 - DNA, 25 bp, Homo sapien
agtacaaactttgagaacaggaagg

SEQ ID NO: 5460972 - DNA, 25 bp, Homo sapien
tcttaaaagctgttagggcactgag

SEQ ID NO: 5460973 - DNA, 25 bp, Homo sapien
tatttcatcacgagattcccaaatg

SEQ ID NO: 5460974 - DNA, 25 bp, Homo sapien
caggaagggtttccaaacatcaggg

SEQ ID NO: 5460975 - DNA, 25 bp, Homo sapien
cagcaaagagcctctaagctcagac

SEQ ID NO: 5460976 - DNA, 25 bp, Homo sapien
tcagcaaagagcctctaagctcaga

SEQ ID NO: 5460977 - DNA, 25 bp, Homo sapien
tggctgagtacctacaactaaagtt

SEQ ID NO: 5460978 - DNA, 25 bp, Homo sapien
tctttgaagctcctaagcacagtaa

SEQ ID NO: 5460979 - DNA, 25 bp, Homo sapien
gatagtgccattaaaataaagggac

SEQ ID NO: 5460980 - DNA, 25 bp, Homo sapien
gggacaaagacattaactgttcagt

SEQ ID NO: 5460981 - DNA, 25 bp, Homo sapien
ctgtgaacgcccagaaactgtctcc

SEQ ID NO: 5460982 - DNA, 25 bp, Homo sapien
gcccagaaactgtctccatccttag

SEQ ID NO: 5460983 - DNA, 25 bp, Homo sapien
tgaacgcccagaaactgtctccatc

SEQ ID NO: 5460984 - DNA, 25 bp, Homo sapien
cgcccagaaactgtctccatcctta

SEQ ID NO: 5460985 - DNA, 25 bp, Homo sapien
ttctgtctgagaatgaggcttacat

SEQ ID NO: 5460986 - DNA, 25 bp, Homo sapien
ctttctgtctgagaatgaggcttac

SEQ ID NO: 5460987 - DNA, 25 bp, Homo sapien
tctgtctgagaatgaggcttacatt

SEQ ID NO: 5460988 - DNA, 25 bp, Homo sapien
tgctttctgtctgagaatgaggctt

SEQ ID NO: 5460989 - DNA, 25 bp, Homo sapien
cagcctgctctgaattaccaagtgc

SEQ ID NO: 5460990 - DNA, 25 bp, Homo sapien
acacagcctgctctgaattaccaag

SEQ ID NO: 5460991 - DNA, 25 bp, Homo sapien
cacagcctgctctgaattaccaagt

SEQ ID NO: 5460992 - DNA, 25 bp, Homo sapien
acagcctgctctgaattaccaagtg

SEQ ID NO: 5460993 - DNA, 25 bp, Homo sapien
tacaggatttaagcaaataacagga

SEQ ID NO: 5460994 - DNA, 25 bp, Homo sapien
caaaagtctagagtcctgaactcct

SEQ ID NO: 5460995 - DNA, 25 bp, Homo sapien
tgatatgaacatgatgggcacgggt

SEQ ID NO: 5460996 - DNA, 25 bp, Homo sapien
cttcctttgccggaatcactggata

SEQ ID NO: 5460997 - DNA, 25 bp, Homo sapien
tcactggatatccagactttgacca

SEQ ID NO: 5460998 - DNA, 25 bp, Homo sapien
tatctgcagtgttaaggaggttaac

SEQ ID NO: 5460999 - DNA, 25 bp, Homo sapien
tattagtgttaatttatctgcagtg

SEQ ID NO: 5461000 - DNA, 25 bp, Homo sapien
cagtgttaaggaggttaacgacact

SEQ ID NO: 5461001 - DNA, 25 bp, Homo sapien
ctcttattagtgttaatttatctgc

SEQ ID NO: 5461002 - DNA, 25 bp, Homo sapien
ttctacgtgatttagacccaaagga

SEQ ID NO: 5461003 - DNA, 25 bp, Homo sapien
ttagttacatctacacgaaagggtc

SEQ ID NO: 5461004 - DNA, 25 bp, Homo sapien
tgttccattccgatgggtctggaga

SEQ ID NO: 5461005 - DNA, 25 bp, Homo sapien
aaagggtctcgattctgtttctacg

SEQ ID NO: 5461006 - DNA, 25 bp, Homo sapien
taatgtaattacaagaatgggcagc

SEQ ID NO: 5461007 - DNA, 25 bp, Homo sapien
gaactgaagtgtaactgtggcccta

SEQ ID NO: 5461008 - DNA, 25 bp, Homo sapien
tgatcgcagcgcacaggaaaacttg

SEQ ID NO: 5461009 - DNA, 25 bp, Homo sapien
ggaaaacttgtcatgtaaagtcaag

SEQ ID NO: 5461010 - DNA, 25 bp, Homo sapien
gtcttggtccaaaaaaacagacaca

SEQ ID NO: 5461011 - DNA, 25 bp, Homo sapien
gagaaaactgagaaaccacactgtc

SEQ ID NO: 5461012 - DNA, 25 bp, Homo sapien
gaaaccacactgtcttggtccaaaa

SEQ ID NO: 5461013 - DNA, 25 bp, Homo sapien
cactgtcttggtccaaaaaaacaga

SEQ ID NO: 5461014 - DNA, 25 bp, Homo sapien
agtcttagtgtctctggattattgg

SEQ ID NO: 5461015 - DNA, 25 bp, Homo sapien
ctacatgtgtagacgtttagcattt

SEQ ID NO: 5461016 - DNA, 25 bp, Homo sapien
gtgtagacgtttagcatttccattt

SEQ ID NO: 5461017 - DNA, 25 bp, Homo sapien
tgcaccaagtcttagtgtctctgga

SEQ ID NO: 5461018 - DNA, 25 bp, Homo sapien
tctcaagaaacctgaagctagagtc

SEQ ID NO: 5461019 - DNA, 25 bp, Homo sapien
tcaagaaacctgaagctagagtcct

SEQ ID NO: 5461020 - DNA, 25 bp, Homo sapien
aagaaacctgaagctagagtcctcc

SEQ ID NO: 5461021 - DNA, 25 bp, Homo sapien
ctactctcaagaaacctgaagctag

SEQ ID NO: 5461022 - DNA, 25 bp, Homo sapien
tctccactgacagctaccctaatcc

SEQ ID NO: 5461023 - DNA, 25 bp, Homo sapien
gactgtaagcaagcaacctctggag

SEQ ID NO: 5461024 - DNA, 25 bp, Homo sapien
tgcggttccactgtgctcatcagct

SEQ ID NO: 5461025 - DNA, 25 bp, Homo sapien
caacctctggaggaatgcggttcca

SEQ ID NO: 5461026 - DNA, 25 bp, Homo sapien
gaacgatttgtttctattatgttga

SEQ ID NO: 5461027 - DNA, 25 bp, Homo sapien
agcagcatttctgctttagaacgat

SEQ ID NO: 5461028 - DNA, 25 bp, Homo sapien
tgggatgtgaaatggttttgtaagc

SEQ ID NO: 5461029 - DNA, 25 bp, Homo sapien
ttgggatgtgaaatggttttgtaag

SEQ ID NO: 5461030 - DNA, 25 bp, Homo sapien
tccagcaaacttctggcgaatctcc

SEQ ID NO: 5461031 - DNA, 25 bp, Homo sapien
ccagcaaacttctggcgaatctcct

SEQ ID NO: 5461032 - DNA, 25 bp, Homo sapien
ggtctcagaatgcacacaccagcag

SEQ ID NO: 5461033 - DNA, 25 bp, Homo sapien
ttaggataagcaaggcagccactca

SEQ ID NO: 5461034 - DNA, 25 bp, Homo sapien
tacctctggaaaagatgaactgctc

SEQ ID NO: 5461035 - DNA, 25 bp, Homo sapien
ttagcattggagctcactcggccag

SEQ ID NO: 5461036 - DNA, 25 bp, Homo sapien
gatacaggatgcgtgtagatacagg

SEQ ID NO: 5461037 - DNA, 25 bp, Homo sapien
tctccaggtgtagcattccacaaca

SEQ ID NO: 5461038 - DNA, 25 bp, Homo sapien
gatggtctccaggtccactgtatca

SEQ ID NO: 5461039 - DNA, 25 bp, Homo sapien
tgtgacagctacaaaatacacgtgt

SEQ ID NO: 5461040 - DNA, 25 bp, Homo sapien
agcatgaggctacgcacatacacac

SEQ ID NO: 5461041 - DNA, 25 bp, Homo sapien
agacaggcacgcatacagacacact

SEQ ID NO: 5461042 - DNA, 25 bp, Homo sapien
agacacactcacacctatgtacaca

SEQ ID NO: 5461043 - DNA, 25 bp, Homo sapien
ctaagcatgaggctacgcacataca

SEQ ID NO: 5461044 - DNA, 25 bp, Homo sapien
ccaatgcagcagtgacacacaggaa

SEQ ID NO: 5461045 - DNA, 25 bp, Homo sapien
gctggtgctgcgagacagtgcattc

SEQ ID NO: 5461046 - DNA, 25 bp, Homo sapien
actgcaatggcacaccctgggtaaa

SEQ ID NO: 5461047 - DNA, 25 bp, Homo sapien
gacctggtgtccatagtaagacctg

SEQ ID NO: 5461048 - DNA, 25 bp, Homo sapien
gctttgtaatcaacaggaagggctg

SEQ ID NO: 5461049 - DNA, 25 bp, Homo sapien
tcttttcaggtatgggtgttgtttc

SEQ ID NO: 5461050 - DNA, 25 bp, Homo sapien
gaaacacatttagacggaactgagg

SEQ ID NO: 5461051 - DNA, 25 bp, Homo sapien
cagaactggtgtaattgaagcagaa

SEQ ID NO: 5461052 - DNA, 25 bp, Homo sapien
taacgtgaatatccagaactcctag

SEQ ID NO: 5461053 - DNA, 25 bp, Homo sapien
aaaatacaatgccacctgggcgcag

SEQ ID NO: 5461054 - DNA, 25 bp, Homo sapien
cctagacttctgcaaaagtggtgat

SEQ ID NO: 5461055 - DNA, 25 bp, Homo sapien
atagctttcaggatacaaccaaggg

SEQ ID NO: 5461056 - DNA, 25 bp, Homo sapien
tacttctccattgaggtaaactctc

SEQ ID NO: 5461057 - DNA, 25 bp, Homo sapien
taatggaaaagtctcgccagtactt

SEQ ID NO: 5461058 - DNA, 25 bp, Homo sapien
actctccaaaggacgggacccatga

SEQ ID NO: 5461059 - DNA, 25 bp, Homo sapien
aatgaggctaatggaaaagtctcgc

SEQ ID NO: 5461060 - DNA, 25 bp, Homo sapien
ctaacaaggttagagagaaagcctc

SEQ ID NO: 5461061 - DNA, 25 bp, Homo sapien
aggttagagagaaagcctcctgtgc

SEQ ID NO: 5461062 - DNA, 25 bp, Homo sapien
tagagagaaagcctcctgtgcttgc

SEQ ID NO: 5461063 - DNA, 25 bp, Homo sapien
caaggttagagagaaagcctcctgt

SEQ ID NO: 5461064 - DNA, 25 bp, Homo sapien
ctttcgctgtcaaaaaaggactgaa

SEQ ID NO: 5461065 - DNA, 25 bp, Homo sapien
tctcctctttcgctgtcaaaaaagg

SEQ ID NO: 5461066 - DNA, 25 bp, Homo sapien
ctctttcgctgtcaaaaaaggactg

SEQ ID NO: 5461067 - DNA, 25 bp, Homo sapien
acttctccccggaagaatagcaggg

SEQ ID NO: 5461068 - DNA, 25 bp, Homo sapien
ggagcgaagtgtgaacgttctctat

SEQ ID NO: 5461069 - DNA, 25 bp, Homo sapien
taaaggagcgaagtgtgaacgttct

SEQ ID NO: 5461070 - DNA, 25 bp, Homo sapien
ctttaaaggagcgaagtgtgaacgt

SEQ ID NO: 5461071 - DNA, 25 bp, Homo sapien
agcgaagtgtgaacgttctctattc

SEQ ID NO: 5461072 - DNA, 25 bp, Homo sapien
gcaatctgtgcaccaagcaacgctg

SEQ ID NO: 5461073 - DNA, 25 bp, Homo sapien
tgaccggcagtcatttctgtaagcc

SEQ ID NO: 5461074 - DNA, 25 bp, Homo sapien
ctttaatttcagagggcgaagacga

SEQ ID NO: 5461075 - DNA, 25 bp, Homo sapien
gcttgagcactgaagaggcaacact

SEQ ID NO: 5461076 - DNA, 25 bp, Homo sapien
caaaatcttattctggtgcgtgatg

SEQ ID NO: 5461077 - DNA, 25 bp, Homo sapien
tgggttcgcattgcctggacactgc

SEQ ID NO: 5461078 - DNA, 25 bp, Homo sapien
gatggctgtgataccaattcttgcc

SEQ ID NO: 5461079 - DNA, 25 bp, Homo sapien
catctgctgcatttgggttcgcatt

SEQ ID NO: 5461080 - DNA, 25 bp, Homo sapien
cctttcgtgttacatcgttgagtac

SEQ ID NO: 5461081 - DNA, 25 bp, Homo sapien
ctttcgtgttacatcgttgagtact

SEQ ID NO: 5461082 - DNA, 25 bp, Homo sapien
ttcgtgttacatcgttgagtactta

SEQ ID NO: 5461083 - DNA, 25 bp, Homo sapien
tcgtgttacatcgttgagtacttac

SEQ ID NO: 5461084 - DNA, 25 bp, Homo sapien
ttttaatggcctggagccaatcgcc

SEQ ID NO: 5461085 - DNA, 25 bp, Homo sapien
tgtgaagttatccttataccggtcc

SEQ ID NO: 5461086 - DNA, 25 bp, Homo sapien
cagcctctagtgtggtataaccagc

SEQ ID NO: 5461087 - DNA, 25 bp, Homo sapien
cttggatccaacaaggcagtgttag

SEQ ID NO: 5461088 - DNA, 25 bp, Homo sapien
aaatttaggcctgtcgctcctctcc

SEQ ID NO: 5461089 - DNA, 25 bp, Homo sapien
ccaacatgttgacaatctgcccaaa

SEQ ID NO: 5461090 - DNA, 25 bp, Homo sapien
gggtaaccgatagccttcctcaatg

SEQ ID NO: 5461091 - DNA, 25 bp, Homo sapien
tagcatcagctggtggagcgcaatg

SEQ ID NO: 5461092 - DNA, 25 bp, Homo sapien
atagacagccagtgtgtcaacacca

SEQ ID NO: 5461093 - DNA, 25 bp, Homo sapien
aacaccagagtccaagtccagacgc

SEQ ID NO: 5461094 - DNA, 25 bp, Homo sapien
acagccagtgtgtcaacaccagagt

SEQ ID NO: 5461095 - DNA, 25 bp, Homo sapien
gtgtcaacaccagagtccaagtcca

SEQ ID NO: 5461096 - DNA, 25 bp, Homo sapien
ctttaattgataaggcaacctgcat

SEQ ID NO: 5461097 - DNA, 25 bp, Homo sapien
tctttaattgataaggcaacctgca

SEQ ID NO: 5461098 - DNA, 25 bp, Homo sapien
tttaattgataaggcaacctgcatc

SEQ ID NO: 5461099 - DNA, 25 bp, Homo sapien
tatatttcagaacatagagacttac

SEQ ID NO: 5461100 - DNA, 25 bp, Homo sapien
aaaaatatatttcagaacatagaga

SEQ ID NO: 5461101 - DNA, 25 bp, Homo sapien
atatatttcagaacatagagactta

SEQ ID NO: 5461102 - DNA, 25 bp, Homo sapien
aaatatatttcagaacatagagact

SEQ ID NO: 5461103 - DNA, 25 bp, Homo sapien
aatagggcctctccccgtacgacat

SEQ ID NO: 5461104 - DNA, 25 bp, Homo sapien
gtacgacatcacttcccacataacg

SEQ ID NO: 5461105 - DNA, 25 bp, Homo sapien
tacgataggcaattgcttctggcgc

SEQ ID NO: 5461106 - DNA, 25 bp, Homo sapien
ctggcgcagtccaccggataggaat

SEQ ID NO: 5461107 - DNA, 25 bp, Homo sapien
tttgagccataagttattccttaag

SEQ ID NO: 5461108 - DNA, 25 bp, Homo sapien
tgtgaacatttgagccataagttat

SEQ ID NO: 5461109 - DNA, 25 bp, Homo sapien
gaacatttgagccataagttattcc

SEQ ID NO: 5461110 - DNA, 25 bp, Homo sapien
aacatttgagccataagttattcct

SEQ ID NO: 5461111 - DNA, 25 bp, Homo sapien
ctattatctgagctctgcttaaggc

SEQ ID NO: 5461112 - DNA, 25 bp, Homo sapien
ttatctgagctctgcttaaggcaat

SEQ ID NO: 5461113 - DNA, 25 bp, Homo sapien
tattatctgagctctgcttaaggca

SEQ ID NO: 5461114 - DNA, 25 bp, Homo sapien
tctgagctctgcttaaggcaatatt

SEQ ID NO: 5461115 - DNA, 25 bp, Homo sapien
tgtaagctgcttccggatcatcctc

SEQ ID NO: 5461116 - DNA, 25 bp, Homo sapien
caggatgttccgtgcggccagatca

SEQ ID NO: 5461117 - DNA, 25 bp, Homo sapien
cacgatgcacatagctcatatcaga

SEQ ID NO: 5461118 - DNA, 25 bp, Homo sapien
agcactcgggacatgccaaaatcag

SEQ ID NO: 5461119 - DNA, 25 bp, Homo sapien
gcatagaaaaggagtgaggaacaat

SEQ ID NO: 5461120 - DNA, 25 bp, Homo sapien
tgcatagaaaaggagtgaggaacaa

SEQ ID NO: 5461121 - DNA, 25 bp, Homo sapien
ctgcatagaaaaggagtgaggaaca

SEQ ID NO: 5461122 - DNA, 25 bp, Homo sapien
ttctccatgtactctgttatgatca

SEQ ID NO: 5461123 - DNA, 25 bp, Homo sapien
tctccatgtactctgttatgatcat

SEQ ID NO: 5461124 - DNA, 25 bp, Homo sapien
ctgaggaatgcatccaaggagccat

SEQ ID NO: 5461125 - DNA, 25 bp, Homo sapien
aatgcatccaaggagccattctcca

SEQ ID NO: 5461126 - DNA, 25 bp, Homo sapien
tgcatttcaccagatccctctggag

SEQ ID NO: 5461127 - DNA, 25 bp, Homo sapien
tcatggctgtgcattaacacctcct

SEQ ID NO: 5461128 - DNA, 25 bp, Homo sapien
ggtggtatgcggtcgtttgtcccca

SEQ ID NO: 5461129 - DNA, 25 bp, Homo sapien
ggttctcaaagcgtgattcccatac

SEQ ID NO: 5461130 - DNA, 25 bp, Homo sapien
taatagcaccactgaacacgtacga

SEQ ID NO: 5461131 - DNA, 25 bp, Homo sapien
gcagcattggcttcacctgtggtga

SEQ ID NO: 5461132 - DNA, 25 bp, Homo sapien
ctaggaatgatatggacaggcggca

SEQ ID NO: 5461133 - DNA, 25 bp, Homo sapien
tggtactatcgtagctcactaggaa

SEQ ID NO: 5461134 - DNA, 25 bp, Homo sapien
cactggaaaccgtgggcattacctt

SEQ ID NO: 5461135 - DNA, 25 bp, Homo sapien
cattaccttaggaatagtcaaactc

SEQ ID NO: 5461136 - DNA, 25 bp, Homo sapien
aagcaaaacaagtcacaccccatta

SEQ ID NO: 5461137 - DNA, 25 bp, Homo sapien
caccccattacaagtcccacgaggg

SEQ ID NO: 5461138 - DNA, 25 bp, Homo sapien
caggtatgagtgattacacccagca

SEQ ID NO: 5461139 - DNA, 25 bp, Homo sapien
ggtccaggaaacttacccatctcaa

SEQ ID NO: 5461140 - DNA, 25 bp, Homo sapien
tatattgccattactctgcacacgc

SEQ ID NO: 5461141 - DNA, 25 bp, Homo sapien
cactggggtggctatattgccatta

SEQ ID NO: 5461142 - DNA, 25 bp, Homo sapien
tctgcacacgctgactgaagatgct

SEQ ID NO: 5461143 - DNA, 25 bp, Homo sapien
gccattactctgcacacgctgactg

SEQ ID NO: 5461144 - DNA, 25 bp, Homo sapien
ttaaacagggactgcctcagctgtg

SEQ ID NO: 5461145 - DNA, 25 bp, Homo sapien
tagccagccttacagatttactcag

SEQ ID NO: 5461146 - DNA, 25 bp, Homo sapien
gaagcgtggttcataggctcagcga

SEQ ID NO: 5461147 - DNA, 25 bp, Homo sapien
tgtatgagggctcttggaacacagc

SEQ ID NO: 5461148 - DNA, 25 bp, Homo sapien
ctggaaccaaagattccagcacaag

SEQ ID NO: 5461149 - DNA, 25 bp, Homo sapien
aatatattcaagattcccaagcttc

SEQ ID NO: 5461150 - DNA, 25 bp, Homo sapien
tcactctctgcatctggaaccaaag

SEQ ID NO: 5461151 - DNA, 25 bp, Homo sapien
ggcagagcagacaagcaaatcccgc

SEQ ID NO: 5461152 - DNA, 25 bp, Homo sapien
cagctttcagagtcttgatagccac

SEQ ID NO: 5461153 - DNA, 25 bp, Homo sapien
tcctctgtttgtctgtataaccagc

SEQ ID NO: 5461154 - DNA, 25 bp, Homo sapien
caagtgaatgatgttcggatggtca

SEQ ID NO: 5461155 - DNA, 25 bp, Homo sapien
ggcactttgagacgcccactgcata

SEQ ID NO: 5461156 - DNA, 25 bp, Homo sapien
caagaaaacagactcattagcagac

SEQ ID NO: 5461157 - DNA, 25 bp, Homo sapien
tagcagacggacactcagacactta

SEQ ID NO: 5461158 - DNA, 25 bp, Homo sapien
tatttaacatccaccaagaaaacag

SEQ ID NO: 5461159 - DNA, 25 bp, Homo sapien
gactcattagcagacggacactcag

SEQ ID NO: 5461160 - DNA, 25 bp, Homo sapien
tttttcaatcttaatgcaggatgcg

SEQ ID NO: 5461161 - DNA, 25 bp, Homo sapien
caggatgcgtcaatttctttggcaa

SEQ ID NO: 5461162 - DNA, 25 bp, Homo sapien
tctttggcaaactctcgcactgctt

SEQ ID NO: 5461163 - DNA, 25 bp, Homo sapien
ctcgcactgcttggttgggatcttc

SEQ ID NO: 5461164 - DNA, 25 bp, Homo sapien
aggacaccagttggcccagtccctt

SEQ ID NO: 5461165 - DNA, 25 bp, Homo sapien
tcgactttccaagcctgtaggtctt

SEQ ID NO: 5461166 - DNA, 25 bp, Homo sapien
ttcgactttccaagcctgtaggtct

SEQ ID NO: 5461167 - DNA, 25 bp, Homo sapien
agggtatgaaggacaccagttggcc

SEQ ID NO: 5461168 - DNA, 25 bp, Homo sapien
tttctcttcatccgcttcttgtttg

SEQ ID NO: 5461169 - DNA, 25 bp, Homo sapien
gtttctcttcatccgcttcttgttt

SEQ ID NO: 5461170 - DNA, 25 bp, Homo sapien
gctgagtgtgcatgagccgctgcaa

SEQ ID NO: 5461171 - DNA, 25 bp, Homo sapien
gaggagaagaattggctgagtgtgc

SEQ ID NO: 5461172 - DNA, 25 bp, Homo sapien
tcccatgacagctttacggccgaca

SEQ ID NO: 5461173 - DNA, 25 bp, Homo sapien
agcctgtcagctacctggctccggg

SEQ ID NO: 5461174 - DNA, 25 bp, Homo sapien
caaagagatggtcaagacacaaggc

SEQ ID NO: 5461175 - DNA, 25 bp, Homo sapien
tggactacaactagagaatgtttcc

SEQ ID NO: 5461176 - DNA, 25 bp, Homo sapien
cagtttgactgctgtatttagggcc

SEQ ID NO: 5461177 - DNA, 25 bp, Homo sapien
ggatgctattttccgtagtcacggc

SEQ ID NO: 5461178 - DNA, 25 bp, Homo sapien
tgagaattaccaccagcaccacact

SEQ ID NO: 5461179 - DNA, 25 bp, Homo sapien
ctccggctgatgacaaaagctgcaa

SEQ ID NO: 5461180 - DNA, 25 bp, Homo sapien
agcaccacactgcccgagacagaga

SEQ ID NO: 5461181 - DNA, 25 bp, Homo sapien
gctgatgacaaaagctgcaatgaga

SEQ ID NO: 5461182 - DNA, 25 bp, Homo sapien
aatgggattcagctgtattataaaa

SEQ ID NO: 5461183 - DNA, 25 bp, Homo sapien
cttagatttcactgtaatgggattc

SEQ ID NO: 5461184 - DNA, 25 bp, Homo sapien
ccaaaaattacagacaactccttag

SEQ ID NO: 5461185 - DNA, 25 bp, Homo sapien
aaatagcctcagaagtgactgagtc

SEQ ID NO: 5461186 - DNA, 25 bp, Homo sapien
tcctggcagctgtccgaactatacg

SEQ ID NO: 5461187 - DNA, 25 bp, Homo sapien
ggctcgcacgtggaaaacataggaa

SEQ ID NO: 5461188 - DNA, 25 bp, Homo sapien
tgagagggttcaggcctttgatatc

SEQ ID NO: 5461189 - DNA, 25 bp, Homo sapien
tgtaacctccaagggctcactgaag

SEQ ID NO: 5461190 - DNA, 25 bp, Homo sapien
tcttgtgacttctttagcctggacc

SEQ ID NO: 5461191 - DNA, 25 bp, Homo sapien
catattccaggattaccccattggg

SEQ ID NO: 5461192 - DNA, 25 bp, Homo sapien
tgtgacttctttagcctggaccaaa

SEQ ID NO: 5461193 - DNA, 25 bp, Homo sapien
cattgggccgatctggttccagcca

SEQ ID NO: 5461194 - DNA, 25 bp, Homo sapien
ccatttccacagcacgtagagacat

SEQ ID NO: 5461195 - DNA, 25 bp, Homo sapien
ctgcagtggtcgcatctccagccag

SEQ ID NO: 5461196 - DNA, 25 bp, Homo sapien
ctccgctgcagtggtcgcatctcca

SEQ ID NO: 5461197 - DNA, 25 bp, Homo sapien
tccagccagctgttatcaggctctg

SEQ ID NO: 5461198 - DNA, 25 bp, Homo sapien
cagccagctgttatcaggctctgct

SEQ ID NO: 5461199 - DNA, 25 bp, Homo sapien
aacctggatgttctccacatcataa

SEQ ID NO: 5461200 - DNA, 25 bp, Homo sapien
ctggatgttctccacatcataagcc

SEQ ID NO: 5461201 - DNA, 25 bp, Homo sapien
ggaaaggaggcaacctggatgttct

SEQ ID NO: 5461202 - DNA, 25 bp, Homo sapien
tggaaaggaggcaacctggatgttc

SEQ ID NO: 5461203 - DNA, 25 bp, Homo sapien
aaacagccttcaactttacatctag

SEQ ID NO: 5461204 - DNA, 25 bp, Homo sapien
cagccttcaactttacatctagaag

SEQ ID NO: 5461205 - DNA, 25 bp, Homo sapien
cttcaactttacatctagaaggcat

SEQ ID NO: 5461206 - DNA, 25 bp, Homo sapien
ccttcaactttacatctagaaggca

SEQ ID NO: 5461207 - DNA, 25 bp, Homo sapien
taaggacagttttgtgcctccagac

SEQ ID NO: 5461208 - DNA, 25 bp, Homo sapien
ggtctaaggtgcctatccccgagac

SEQ ID NO: 5461209 - DNA, 25 bp, Homo sapien
tattacccctaaggagatttcagca

SEQ ID NO: 5461210 - DNA, 25 bp, Homo sapien
taaggcaagcactcctaaagggtag

SEQ ID NO: 5461211 - DNA, 25 bp, Homo sapien
tatccacccatttgtgagaaactgg

SEQ ID NO: 5461212 - DNA, 25 bp, Homo sapien
taaactgtagaagtactgtggccca

SEQ ID NO: 5461213 - DNA, 25 bp, Homo sapien
tccagctggtcatgcacgatgagca

SEQ ID NO: 5461214 - DNA, 25 bp, Homo sapien
ggtctgtggttttgcagcttcctga

SEQ ID NO: 5461215 - DNA, 25 bp, Homo sapien
gtctttgctgcagttcaagtgtgtc

SEQ ID NO: 5461216 - DNA, 25 bp, Homo sapien
aaggatagctcaacacttgccaaca

SEQ ID NO: 5461217 - DNA, 25 bp, Homo sapien
cctgtgtttcgtctgggagctgctt

SEQ ID NO: 5461218 - DNA, 25 bp, Homo sapien
tgttggcaggttctgacaaggatag

SEQ ID NO: 5461219 - DNA, 25 bp, Homo sapien
gatctcagaccacaactcaggtcca

SEQ ID NO: 5461220 - DNA, 25 bp, Homo sapien
catttcaggccaaactggacttccc

SEQ ID NO: 5461221 - DNA, 25 bp, Homo sapien
catttatctcaacatagtcagaggc

SEQ ID NO: 5461222 - DNA, 25 bp, Homo sapien
ctcatacctaactgtgggccagaac

SEQ ID NO: 5461223 - DNA, 25 bp, Homo sapien
caaaagacaaaacagtcgctacagg

SEQ ID NO: 5461224 - DNA, 25 bp, Homo sapien
acagtcgctacaggatgaaagatga

SEQ ID NO: 5461225 - DNA, 25 bp, Homo sapien
acaaaacagtcgctacaggatgaaa

SEQ ID NO: 5461226 - DNA, 25 bp, Homo sapien
aagacaaaacagtcgctacaggatg

SEQ ID NO: 5461227 - DNA, 25 bp, Homo sapien
acatccttccatcagcttatcagca

SEQ ID NO: 5461228 - DNA, 25 bp, Homo sapien
gaagcaagcccttttggccacagat

SEQ ID NO: 5461229 - DNA, 25 bp, Homo sapien
ttttggccacagatataaagctcac

SEQ ID NO: 5461230 - DNA, 25 bp, Homo sapien
tataaagctcacatccttccatcag

SEQ ID NO: 5461231 - DNA, 25 bp, Homo sapien
cagggggtcatagaagtctccccca

SEQ ID NO: 5461232 - DNA, 25 bp, Homo sapien
agcctgtcctcagcgcatctcccac

SEQ ID NO: 5461233 - DNA, 25 bp, Homo sapien
ctcagcgcatctcccacaggctttt

SEQ ID NO: 5461234 - DNA, 25 bp, Homo sapien
gtcatagaagtctcccccaaaatct

SEQ ID NO: 5461235 - DNA, 25 bp, Homo sapien
cattataggaaatgtcctggcggcc

SEQ ID NO: 5461236 - DNA, 25 bp, Homo sapien
tgagggctactccattccaagttca

SEQ ID NO: 5461237 - DNA, 25 bp, Homo sapien
acttccacagggtcggcacttgctg

SEQ ID NO: 5461238 - DNA, 25 bp, Homo sapien
ctggcggccacctgtattctgaggg

SEQ ID NO: 5461239 - DNA, 25 bp, Homo sapien
gaaatccattaacctccttgccaag

SEQ ID NO: 5461240 - DNA, 25 bp, Homo sapien
tggtttatcaaatgggtcagtcatt

SEQ ID NO: 5461241 - DNA, 25 bp, Homo sapien
gctgtgacttccagggttaaataag

SEQ ID NO: 5461242 - DNA, 25 bp, Homo sapien
caaatgggtcagtcattggttcttc

SEQ ID NO: 5461243 - DNA, 25 bp, Homo sapien
agagagtggctaggagtttctatta

SEQ ID NO: 5461244 - DNA, 25 bp, Homo sapien
gagagtggctaggagtttctattaa

SEQ ID NO: 5461245 - DNA, 25 bp, Homo sapien
cttctgtgcaagagagtggctagga

SEQ ID NO: 5461246 - DNA, 25 bp, Homo sapien
gtgcaagagagtggctaggagtttc

SEQ ID NO: 5461247 - DNA, 25 bp, Homo sapien
ctgaaaaagcctcggtcacaggtgc

SEQ ID NO: 5461248 - DNA, 25 bp, Homo sapien
cgtggagagagccttgtaatatcca

SEQ ID NO: 5461249 - DNA, 25 bp, Homo sapien
tggcatccgtggagagagccttgta

SEQ ID NO: 5461250 - DNA, 25 bp, Homo sapien
aggtgcacgaggtggctccttccca

SEQ ID NO: 5461251 - DNA, 25 bp, Homo sapien
cccgagagcctggtgtagagaacac

SEQ ID NO: 5461252 - DNA, 25 bp, Homo sapien
agagcctggtgtagagaacacgggc

SEQ ID NO: 5461253 - DNA, 25 bp, Homo sapien
ccgagagcctggtgtagagaacacg

SEQ ID NO: 5461254 - DNA, 25 bp, Homo sapien
gcctggtgtagagaacacgggccat

SEQ ID NO: 5461255 - DNA, 25 bp, Homo sapien
gaagatcgacaaggacaagaaactg

SEQ ID NO: 5461256 - DNA, 25 bp, Homo sapien
agtgggagtggaagatcgacaagga

SEQ ID NO: 5461257 - DNA, 25 bp, Homo sapien
cagtgactgatcatcacaaagtcca

SEQ ID NO: 5461258 - DNA, 25 bp, Homo sapien
gtgactgatcatcacaaagtccaaa

SEQ ID NO: 5461259 - DNA, 25 bp, Homo sapien
ccactaccataacaaagtcgaattt

SEQ ID NO: 5461260 - DNA, 25 bp, Homo sapien
taagatagtcttggtaacgtagtat

SEQ ID NO: 5461261 - DNA, 25 bp, Homo sapien
cttggtaacgtagtatcttctggat

SEQ ID NO: 5461262 - DNA, 25 bp, Homo sapien
ccataacaaagtcgaattttaagat

SEQ ID NO: 5461263 - DNA, 25 bp, Homo sapien
ctaatacccggatgctaaagggaca

SEQ ID NO: 5461264 - DNA, 25 bp, Homo sapien
gcatttcttatatactcccaggcaa

SEQ ID NO: 5461265 - DNA, 25 bp, Homo sapien
gcttaactgtaaatagacccgtgtc

SEQ ID NO: 5461266 - DNA, 25 bp, Homo sapien
gatgacaacattgctggtccaggga

SEQ ID NO: 5461267 - DNA, 25 bp, Homo sapien
tcccaaattgttgagattacaagca

SEQ ID NO: 5461268 - DNA, 25 bp, Homo sapien
atctgcccatgtcggcctcccaaat

SEQ ID NO: 5461269 - DNA, 25 bp, Homo sapien
cccaaattgttgagattacaagcat

SEQ ID NO: 5461270 - DNA, 25 bp, Homo sapien
tgcccatgtcggcctcccaaattgt

SEQ ID NO: 5461271 - DNA, 25 bp, Homo sapien
tatccaacccatcaggtactgcctg

SEQ ID NO: 5461272 - DNA, 25 bp, Homo sapien
ttagcaccagtatccaacccatcag

SEQ ID NO: 5461273 - DNA, 25 bp, Homo sapien
taactccacttcttagcaccagtat

SEQ ID NO: 5461274 - DNA, 25 bp, Homo sapien
atcaggtactgcctgagcacccttt

SEQ ID NO: 5461275 - DNA, 25 bp, Homo sapien
aacaccagctggattagttgccaca

SEQ ID NO: 5461276 - DNA, 25 bp, Homo sapien
aaagcttgatgtgatggctacggca

SEQ ID NO: 5461277 - DNA, 25 bp, Homo sapien
gctacggcacggctactgctcatga

SEQ ID NO: 5461278 - DNA, 25 bp, Homo sapien
acggcttgacttaacctgggaagat

SEQ ID NO: 5461279 - DNA, 25 bp, Homo sapien
cagagcagctgcaaatcatctgtcc

SEQ ID NO: 5461280 - DNA, 25 bp, Homo sapien
acctcagtgttcacaatggcctcag

SEQ ID NO: 5461281 - DNA, 25 bp, Homo sapien
ctgtcagggacctcagtgttcacaa

SEQ ID NO: 5461282 - DNA, 25 bp, Homo sapien
tctgtccccggcaatgtgagcacag

SEQ ID NO: 5461283 - DNA, 25 bp, Homo sapien
gaagctgatatgttccaagcagaat

SEQ ID NO: 5461284 - DNA, 25 bp, Homo sapien
gatgcagatgcgctattcactgaga

SEQ ID NO: 5461285 - DNA, 25 bp, Homo sapien
cactgagatggctgatgactcggag

SEQ ID NO: 5461286 - DNA, 25 bp, Homo sapien
ccccgtatgtatcaataaaggatgc

SEQ ID NO: 5461287 - DNA, 25 bp, Homo sapien
aaatgaacacccaactagtctgcac

SEQ ID NO: 5461288 - DNA, 25 bp, Homo sapien
aaacaaatgaacacccaactagtct

SEQ ID NO: 5461289 - DNA, 25 bp, Homo sapien
caaatgaacacccaactagtctgca

SEQ ID NO: 5461290 - DNA, 25 bp, Homo sapien
tgaacacccaactagtctgcactgc

SEQ ID NO: 5461291 - DNA, 25 bp, Homo sapien
tggcacctctgtcaagggcctccta

SEQ ID NO: 5461292 - DNA, 25 bp, Homo sapien
tcaatgttccccacttgggctactg

SEQ ID NO: 5461293 - DNA, 25 bp, Homo sapien
tcaagggcctcctagggttcttcaa

SEQ ID NO: 5461294 - DNA, 25 bp, Homo sapien
tgttccccacttgggctactgacag

SEQ ID NO: 5461295 - DNA, 25 bp, Homo sapien
tattctgttaacctctgacccctca

SEQ ID NO: 5461296 - DNA, 25 bp, Homo sapien
gcagacaaaggcccaatctggagcc

SEQ ID NO: 5461297 - DNA, 25 bp, Homo sapien
acccctcagatctgaagcagacaaa

SEQ ID NO: 5461298 - DNA, 25 bp, Homo sapien
gtattctgttaacctctgacccctc

SEQ ID NO: 5461299 - DNA, 25 bp, Homo sapien
aaacagcagggaagcgattgttaca

SEQ ID NO: 5461300 - DNA, 25 bp, Homo sapien
cagggaagcgattgttacagaaaca

SEQ ID NO: 5461301 - DNA, 25 bp, Homo sapien
ggagaacatagccaaatgtcaaaca

SEQ ID NO: 5461302 - DNA, 25 bp, Homo sapien
acatagccaaatgtcaaacagcagg

SEQ ID NO: 5461303 - DNA, 25 bp, Homo sapien
aaactgtaccacagctttgtactgg

SEQ ID NO: 5461304 - DNA, 25 bp, Homo sapien
attaagaaactgtaccacagctttg

SEQ ID NO: 5461305 - DNA, 25 bp, Homo sapien
ccacagctttgtactggtgcagaaa

SEQ ID NO: 5461306 - DNA, 25 bp, Homo sapien
taccacagctttgtactggtgcaga

SEQ ID NO: 5461307 - DNA, 25 bp, Homo sapien
ctttgagaagtgtgggtctgtttaa

SEQ ID NO: 5461308 - DNA, 25 bp, Homo sapien
ccccaaaacagctcagaggtaccag

SEQ ID NO: 5461309 - DNA, 25 bp, Homo sapien
ttctcctccccaaaacagctcagag

SEQ ID NO: 5461310 - DNA, 25 bp, Homo sapien
ctccccaaaacagctcagaggtacc

SEQ ID NO: 5461311 - DNA, 25 bp, Homo sapien
tgttctcctccccaaaacagctcag

SEQ ID NO: 5461312 - DNA, 25 bp, Homo sapien
catttcttcattaggggtatgtctg

SEQ ID NO: 5461313 - DNA, 25 bp, Homo sapien
tttcctttttccaacagtctgatgt

SEQ ID NO: 5461314 - DNA, 25 bp, Homo sapien
tgtctgtccggaaggagatgtctga

SEQ ID NO: 5461315 - DNA, 25 bp, Homo sapien
cctttttccaacagtctgatgtggc

SEQ ID NO: 5461316 - DNA, 25 bp, Homo sapien
cacagtagaaccattgaaaagacaa

SEQ ID NO: 5461317 - DNA, 25 bp, Homo sapien
tctatttgtcctgccacagtagaac

SEQ ID NO: 5461318 - DNA, 25 bp, Homo sapien
tctttcttgtcctacccacaagtca

SEQ ID NO: 5461319 - DNA, 25 bp, Homo sapien
cccggaccccaaggaagatggatga

SEQ ID NO: 5461320 - DNA, 25 bp, Homo sapien
ttagatacacgaagatgtgctaatg

SEQ ID NO: 5461321 - DNA, 25 bp, Homo sapien
aatcaatgacattagatacacgaag

SEQ ID NO: 5461322 - DNA, 25 bp, Homo sapien
taggctctgtgacaattgaaaatca

SEQ ID NO: 5461323 - DNA, 25 bp, Homo sapien
ggctctgtgacaattgaaaatcaat

SEQ ID NO: 5461324 - DNA, 25 bp, Homo sapien
tatagctaagcaggaatgccacttc

SEQ ID NO: 5461325 - DNA, 25 bp, Homo sapien
ggcagccgcagactgttgataacta

SEQ ID NO: 5461326 - DNA, 25 bp, Homo sapien
taaccataatggattggcagccgca

SEQ ID NO: 5461327 - DNA, 25 bp, Homo sapien
gcagtcagttaattcaggcccttta

SEQ ID NO: 5461328 - DNA, 25 bp, Homo sapien
gaaactgggccagattgcggactgt

SEQ ID NO: 5461329 - DNA, 25 bp, Homo sapien
cccagcgttgcataggcagttgcca

SEQ ID NO: 5461330 - DNA, 25 bp, Homo sapien
cacttgggtgaagctctcatcagca

SEQ ID NO: 5461331 - DNA, 25 bp, Homo sapien
catgacgcccggaagactattgcag

SEQ ID NO: 5461332 - DNA, 25 bp, Homo sapien
ctgactggttatttagggggagtag

SEQ ID NO: 5461333 - DNA, 25 bp, Homo sapien
tctgactggttatttagggggagta

SEQ ID NO: 5461334 - DNA, 25 bp, Homo sapien
gggcttgctatccacccaagttctc

SEQ ID NO: 5461335 - DNA, 25 bp, Homo sapien
cagagggcttgctatccacccaagt

SEQ ID NO: 5461336 - DNA, 25 bp, Homo sapien
ccaagttctccctgaacagatctgg

SEQ ID NO: 5461337 - DNA, 25 bp, Homo sapien
cccaagttctccctgaacagatctg

SEQ ID NO: 5461338 - DNA, 25 bp, Homo sapien
tgctagaaatcaggtcactggcgcc

SEQ ID NO: 5461339 - DNA, 25 bp, Homo sapien
gtccgaacggatgcacagaaaactg

SEQ ID NO: 5461340 - DNA, 25 bp, Homo sapien
cagaaaactgagcacccagacgggt

SEQ ID NO: 5461341 - DNA, 25 bp, Homo sapien
cagggctcgggaaactttgcagaaa

SEQ ID NO: 5461342 - DNA, 25 bp, Homo sapien
ctagaatccgggagcaccaagcctt

SEQ ID NO: 5461343 - DNA, 25 bp, Homo sapien
gcggatgctgataaactttggcctt

SEQ ID NO: 5461344 - DNA, 25 bp, Homo sapien
gtgcatcccctcagggcgcctcgag

SEQ ID NO: 5461345 - DNA, 25 bp, Homo sapien
taaatcccggcgttgtctcccgtgc

SEQ ID NO: 5461346 - DNA, 25 bp, Homo sapien
tcctgaggacccctcacccgcgatg

SEQ ID NO: 5461347 - DNA, 25 bp, Homo sapien
ctcgctgtccccgaccacagaaagg

SEQ ID NO: 5461348 - DNA, 25 bp, Homo sapien
gaatcgggacgcaccattcacactg

SEQ ID NO: 5461349 - DNA, 25 bp, Homo sapien
cacagaaaggccgtcccgctcttac

SEQ ID NO: 5461350 - DNA, 25 bp, Homo sapien
ctggaacctgtgacagcgtcgcaaa

SEQ ID NO: 5461351 - DNA, 25 bp, Homo sapien
gcaaatcccgaagagacacgaaaat

SEQ ID NO: 5461352 - DNA, 25 bp, Homo sapien
tgacagcgtcgcaaatcccgaagag

SEQ ID NO: 5461353 - DNA, 25 bp, Homo sapien
gacacgaaaatagggcgaaatagaa

SEQ ID NO: 5461354 - DNA, 25 bp, Homo sapien
ctgccgcttctatcccagtggaata

SEQ ID NO: 5461355 - DNA, 25 bp, Homo sapien
gcttctatcccagtggaataaatgc

SEQ ID NO: 5461356 - DNA, 25 bp, Homo sapien
gttaggagagcagcgggctgaagac

SEQ ID NO: 5461357 - DNA, 25 bp, Homo sapien
ttaagttaggagagcagcgggctga

SEQ ID NO: 5461358 - DNA, 25 bp, Homo sapien
ttacacaagatgagcacgcgtgccg

SEQ ID NO: 5461359 - DNA, 25 bp, Homo sapien
caagtctcgtgcactagggctactc

SEQ ID NO: 5461360 - DNA, 25 bp, Homo sapien
gctgctctcggaaaagcggatccta

SEQ ID NO: 5461361 - DNA, 25 bp, Homo sapien
aacagcttgtgcgagactctgggca

SEQ ID NO: 5461362 - DNA, 25 bp, Homo sapien
gccgattgtcaatccgtgtcaccag

SEQ ID NO: 5461363 - DNA, 25 bp, Homo sapien
cctgttggggtgtgtgataataaag

SEQ ID NO: 5461364 - DNA, 25 bp, Homo sapien
tgtcaatccgtgtcaccagatgaat

SEQ ID NO: 5461365 - DNA, 25 bp, Homo sapien
tcagcgccgattgtcaatccgtgtc

SEQ ID NO: 5461366 - DNA, 25 bp, Homo sapien
ctgacacgccgcaggtggtacgtga

SEQ ID NO: 5461367 - DNA, 25 bp, Homo sapien
tacgtgacatgtcgtggcttctggc

SEQ ID NO: 5461368 - DNA, 25 bp, Homo sapien
agccccccatgcagtgcagcggagt

SEQ ID NO: 5461369 - DNA, 25 bp, Homo sapien
agtgcagcggagtgggcaacaaagg

SEQ ID NO: 5461370 - DNA, 25 bp, Homo sapien
ttacagcatggtggatcaaattcag

SEQ ID NO: 5461371 - DNA, 25 bp, Homo sapien
gctctgcacttcttattcatggcaa

SEQ ID NO: 5461372 - DNA, 25 bp, Homo sapien
tcagcgcaatggtttttaaatcgca

SEQ ID NO: 5461373 - DNA, 25 bp, Homo sapien
gacgttcagcctacaatatttaaaa

SEQ ID NO: 5461374 - DNA, 25 bp, Homo sapien
tgtactggtgtaagtttctacacga

SEQ ID NO: 5461375 - DNA, 25 bp, Homo sapien
tagttgactgtactggtgtaagttt

SEQ ID NO: 5461376 - DNA, 25 bp, Homo sapien
ggtgtaagtttctacacgaatgagc

SEQ ID NO: 5461377 - DNA, 25 bp, Homo sapien
gactgtactggtgtaagtttctaca

SEQ ID NO: 5461378 - DNA, 25 bp, Homo sapien
gaagtacaccgccaatgccaaggtc

SEQ ID NO: 5461379 - DNA, 25 bp, Homo sapien
aataccaggaagatgcacgcccgtt

SEQ ID NO: 5461380 - DNA, 25 bp, Homo sapien
tttttgagatgccagtcagccggct

SEQ ID NO: 5461381 - DNA, 25 bp, Homo sapien
tccgtgttggttgtcagcttgaagc

SEQ ID NO: 5461382 - DNA, 25 bp, Homo sapien
ctatgagggcacgttgaggcactgg

SEQ ID NO: 5461383 - DNA, 25 bp, Homo sapien
tatgagggcacgttgaggcactggg

SEQ ID NO: 5461384 - DNA, 25 bp, Homo sapien
cactgggaccagcgcagggaaacag

SEQ ID NO: 5461385 - DNA, 25 bp, Homo sapien
tgggaccagcgcagggaaacagcaa

SEQ ID NO: 5461386 - DNA, 25 bp, Homo sapien
gctgcgaccccagctataccggagt

SEQ ID NO: 5461387 - DNA, 25 bp, Homo sapien
gttgagtttctgtagccatgcggca

SEQ ID NO: 5461388 - DNA, 25 bp, Homo sapien
tgttttagtcccaccctggccatag

SEQ ID NO: 5461389 - DNA, 25 bp, Homo sapien
tctccagccatcactgacaaattga

SEQ ID NO: 5461390 - DNA, 25 bp, Homo sapien
ttcaccaggaaccatggtaatatgg

SEQ ID NO: 5461391 - DNA, 25 bp, Homo sapien
tgtttttcaccaggaaccatggtaa

SEQ ID NO: 5461392 - DNA, 25 bp, Homo sapien
ggaaccatggtaatatggctatttt

SEQ ID NO: 5461393 - DNA, 25 bp, Homo sapien
ccaggaaccatggtaatatggctat

SEQ ID NO: 5461394 - DNA, 25 bp, Homo sapien
tggatgataagtttccctgtgaata

SEQ ID NO: 5461395 - DNA, 25 bp, Homo sapien
ttatgagataagaagctgtttctgg

SEQ ID NO: 5461396 - DNA, 25 bp, Homo sapien
tatttggtgcatactggatgttaca

SEQ ID NO: 5461397 - DNA, 25 bp, Homo sapien
taacaggtgaattagttgaattacg

SEQ ID NO: 5461398 - DNA, 25 bp, Homo sapien
ttattgcatatgttgtcaaaacagg

SEQ ID NO: 5461399 - DNA, 25 bp, Homo sapien
acccctactagagccatcacatgtg

SEQ ID NO: 5461400 - DNA, 25 bp, Homo sapien
aaaacaggtcctgtgcacctggacc

SEQ ID NO: 5461401 - DNA, 25 bp, Homo sapien
catgtgtttggtaatgacgtagttc

SEQ ID NO: 5461402 - DNA, 25 bp, Homo sapien
gggtccagagaagcatataaacgtt

SEQ ID NO: 5461403 - DNA, 25 bp, Homo sapien
aaaagaaacgcctgcctgtatccag

SEQ ID NO: 5461404 - DNA, 25 bp, Homo sapien
tgtatccagtcttttgcagggcaag

SEQ ID NO: 5461405 - DNA, 25 bp, Homo sapien
ggctcaggtctcttcatggagaaat

SEQ ID NO: 5461406 - DNA, 25 bp, Homo sapien
gacgagctactttgtcttcctaagt

SEQ ID NO: 5461407 - DNA, 25 bp, Homo sapien
aaaatgttctgctctcttgtaccga

SEQ ID NO: 5461408 - DNA, 25 bp, Homo sapien
cacctaagcgctgatttgaaatagc

SEQ ID NO: 5461409 - DNA, 25 bp, Homo sapien
tggcataagtagaattagacgagct

SEQ ID NO: 5461410 - DNA, 25 bp, Homo sapien
gccacttttgactggtgggagctat

SEQ ID NO: 5461411 - DNA, 25 bp, Homo sapien
ggtgggagctattatacctgtttgt

SEQ ID NO: 5461412 - DNA, 25 bp, Homo sapien
caaacaccaatcctgcaatgccaag

SEQ ID NO: 5461413 - DNA, 25 bp, Homo sapien
ccaatcctgcaatgccaagttcagc

SEQ ID NO: 5461414 - DNA, 25 bp, Homo sapien
ttcatgcagcacactaaagagagct

SEQ ID NO: 5461415 - DNA, 25 bp, Homo sapien
catatacacacatgggcctgagctc

SEQ ID NO: 5461416 - DNA, 25 bp, Homo sapien
caaaggtacagaagcgtgcacacac

SEQ ID NO: 5461417 - DNA, 25 bp, Homo sapien
aaagcagagccactagaatgaggga

SEQ ID NO: 5461418 - DNA, 25 bp, Homo sapien
gcacaacattttcgggtaatgacgg

SEQ ID NO: 5461419 - DNA, 25 bp, Homo sapien
ttcagtattgagcacaacattttcg

SEQ ID NO: 5461420 - DNA, 25 bp, Homo sapien
gacggaagctgatcttccgtcttca

SEQ ID NO: 5461421 - DNA, 25 bp, Homo sapien
cgggtaatgacggaagctgatcttc

SEQ ID NO: 5461422 - DNA, 25 bp, Homo sapien
gctggagcgtgcttgcgaccatttg

SEQ ID NO: 5461423 - DNA, 25 bp, Homo sapien
gtgcttgcgaccatttggaccacat

SEQ ID NO: 5461424 - DNA, 25 bp, Homo sapien
cctgcagctgaattataaaggctgg

SEQ ID NO: 5461425 - DNA, 25 bp, Homo sapien
ctgaattataaaggctggagcgtgc

SEQ ID NO: 5461426 - DNA, 25 bp, Homo sapien
aaatcttgatggctccttctgtgcc

SEQ ID NO: 5461427 - DNA, 25 bp, Homo sapien
caaatcttgatggctccttctgtgc

SEQ ID NO: 5461428 - DNA, 25 bp, Homo sapien
aatcttgatggctccttctgtgcct

SEQ ID NO: 5461429 - DNA, 25 bp, Homo sapien
aacagaggcccatgttgaaatcagc

SEQ ID NO: 5461430 - DNA, 25 bp, Homo sapien
gcaaaaggtttgatgaccaatgagg

SEQ ID NO: 5461431 - DNA, 25 bp, Homo sapien
tgttatcacctacagaaagaagcct

SEQ ID NO: 5461432 - DNA, 25 bp, Homo sapien
gaaggtgactccaaggctgaaggca

SEQ ID NO: 5461433 - DNA, 25 bp, Homo sapien
caccatgcaatgtactatgtttgca

SEQ ID NO: 5461434 - DNA, 25 bp, Homo sapien
tttttcagggttagcaatttcacca

SEQ ID NO: 5461435 - DNA, 25 bp, Homo sapien
tcatgaagccttgcatctttttcag

SEQ ID NO: 5461436 - DNA, 25 bp, Homo sapien
attgtacaattgcaatgaccaggaa

SEQ ID NO: 5461437 - DNA, 25 bp, Homo sapien
gtctcaaccgttcttttagtatgga

SEQ ID NO: 5461438 - DNA, 25 bp, Homo sapien
gatgagttgatcaaatccattaggg

SEQ ID NO: 5461439 - DNA, 25 bp, Homo sapien
attttgaggcccttagtctcaaccg

SEQ ID NO: 5461440 - DNA, 25 bp, Homo sapien
gtgggagccaagacggtctgatttt

SEQ ID NO: 5461441 - DNA, 25 bp, Homo sapien
ccaatccccactgtacttccctgtt

SEQ ID NO: 5461442 - DNA, 25 bp, Homo sapien
tccccactgtacttccctgttcctc

SEQ ID NO: 5461443 - DNA, 25 bp, Homo sapien
caatccccactgtacttccctgttc

SEQ ID NO: 5461444 - DNA, 25 bp, Homo sapien
ccccaatccccactgtacttccctg

SEQ ID NO: 5461445 - DNA, 25 bp, Homo sapien
gcttttctcagatgtgctgtctgcc

SEQ ID NO: 5461446 - DNA, 25 bp, Homo sapien
ttctccctgttattcttcctatgac

SEQ ID NO: 5461447 - DNA, 25 bp, Homo sapien
gacttgtacttcttcgatagaagga

SEQ ID NO: 5461448 - DNA, 25 bp, Homo sapien
tctgcttggatttgtgtataaagac

SEQ ID NO: 5461449 - DNA, 25 bp, Homo sapien
gtacagtcacgtgatatctctgtgg

SEQ ID NO: 5461450 - DNA, 25 bp, Homo sapien
caccaagggatactgaaatctgtgt

SEQ ID NO: 5461451 - DNA, 25 bp, Homo sapien
tcatgtacagtcacgtgatatctct

SEQ ID NO: 5461452 - DNA, 25 bp, Homo sapien
gttgaactccgctttatctcttgca

SEQ ID NO: 5461453 - DNA, 25 bp, Homo sapien
tcatctcgagggctccaacagatgc

SEQ ID NO: 5461454 - DNA, 25 bp, Homo sapien
acccacaccccaagtttgagttctg

SEQ ID NO: 5461455 - DNA, 25 bp, Homo sapien
tccaggcaagggaagtgacgtttgc

SEQ ID NO: 5461456 - DNA, 25 bp, Homo sapien
ccaagtttgagttctgtaatgaggc

SEQ ID NO: 5461457 - DNA, 25 bp, Homo sapien
tggagacagcctgatagccaccctt

SEQ ID NO: 5461458 - DNA, 25 bp, Homo sapien
gattggatagagagccaaaagtcca

SEQ ID NO: 5461459 - DNA, 25 bp, Homo sapien
aggagcacgattggatagagagcca

SEQ ID NO: 5461460 - DNA, 25 bp, Homo sapien
tcaggatcgaggagcacgattggat

SEQ ID NO: 5461461 - DNA, 25 bp, Homo sapien
gagagccaaaagtccaattttcact

SEQ ID NO: 5461462 - DNA, 25 bp, Homo sapien
tttcaattttgacctgcaggtactc

SEQ ID NO: 5461463 - DNA, 25 bp, Homo sapien
aattttgacctgcaggtactcgaga

SEQ ID NO: 5461464 - DNA, 25 bp, Homo sapien
tcaattttgacctgcaggtactcga

SEQ ID NO: 5461465 - DNA, 25 bp, Homo sapien
caggtactcgagagttgtgaaagtt

SEQ ID NO: 5461466 - DNA, 25 bp, Homo sapien
ctgaccaggaaagagccaaaaggga

SEQ ID NO: 5461467 - DNA, 25 bp, Homo sapien
cagtgacttctggaacagtgattgt

SEQ ID NO: 5461468 - DNA, 25 bp, Homo sapien
gtaatatcttctagaacagttttgc

SEQ ID NO: 5461469 - DNA, 25 bp, Homo sapien
gaagttcaacagatgtattaccaca

SEQ ID NO: 5461470 - DNA, 25 bp, Homo sapien
gtgaccttttatacgctattatctg

SEQ ID NO: 5461471 - DNA, 25 bp, Homo sapien
tgggacttgatgcttaccactgctt

SEQ ID NO: 5461472 - DNA, 25 bp, Homo sapien
gggacttgatgcttaccactgcttt

SEQ ID NO: 5461473 - DNA, 25 bp, Homo sapien
acctcctctcttatttgggacttga

SEQ ID NO: 5461474 - DNA, 25 bp, Homo sapien
tttgaacctcctctcttatttggga

SEQ ID NO: 5461475 - DNA, 25 bp, Homo sapien
taaatataggactccccacgaagtc

SEQ ID NO: 5461476 - DNA, 25 bp, Homo sapien
tataggactccccacgaagtctacc

SEQ ID NO: 5461477 - DNA, 25 bp, Homo sapien
ccccacgaagtctaccctgacgcat

SEQ ID NO: 5461478 - DNA, 25 bp, Homo sapien
ctggtaaatataggactccccacga

SEQ ID NO: 5461479 - DNA, 25 bp, Homo sapien
cagatatgctgaaataggccctaca

SEQ ID NO: 5461480 - DNA, 25 bp, Homo sapien
gattacatatgccagatatgctgaa

SEQ ID NO: 5461481 - DNA, 25 bp, Homo sapien
cctacaaagccacgaaacagctgct

SEQ ID NO: 5461482 - DNA, 25 bp, Homo sapien
tgaaataggccctacaaagccacga

SEQ ID NO: 5461483 - DNA, 25 bp, Homo sapien
atgattttgactcgctgcaacttct

SEQ ID NO: 5461484 - DNA, 25 bp, Homo sapien
gaaagggaatctgagacatgtgacc

SEQ ID NO: 5461485 - DNA, 25 bp, Homo sapien
gcctttgggcaaactctgatcttgt

SEQ ID NO: 5461486 - DNA, 25 bp, Homo sapien
gacaggctccagcaacactgacttg

SEQ ID NO: 5461487 - DNA, 25 bp, Homo sapien
gaacagggtcacctaatgcagacat

SEQ ID NO: 5461488 - DNA, 25 bp, Homo sapien
tctctttctaaatgatagcgtgatg

SEQ ID NO: 5461489 - DNA, 25 bp, Homo sapien
gtataaggctatgcaactcttgctg

SEQ ID NO: 5461490 - DNA, 25 bp, Homo sapien
tagcgtgatgttgtgtcaccagcag

SEQ ID NO: 5461491 - DNA, 25 bp, Homo sapien
ttttaatggtccagaaaatgacacc

SEQ ID NO: 5461492 - DNA, 25 bp, Homo sapien
taatacatgttatggtgcacagtga

SEQ ID NO: 5461493 - DNA, 25 bp, Homo sapien
ttatagccctaacaccatccatggt

SEQ ID NO: 5461494 - DNA, 25 bp, Homo sapien
tagacaatctcagtagggacctcca

SEQ ID NO: 5461495 - DNA, 25 bp, Homo sapien
tgaggccgctgtaacaaacataact

SEQ ID NO: 5461496 - DNA, 25 bp, Homo sapien
caaagttgaccctctgatcactagg

SEQ ID NO: 5461497 - DNA, 25 bp, Homo sapien
gacagcactgttggatctcttccca

SEQ ID NO: 5461498 - DNA, 25 bp, Homo sapien
ggaataccccacatgtttgttggag

SEQ ID NO: 5461499 - DNA, 25 bp, Homo sapien
tcccaaggcttctggagtgggctac

SEQ ID NO: 5461500 - DNA, 25 bp, Homo sapien
ggagcctgaagtctcatacagcctt

SEQ ID NO: 5461501 - DNA, 25 bp, Homo sapien
tctgctttgtgaacctcaggaccag

SEQ ID NO: 5461502 - DNA, 25 bp, Homo sapien
tgagaggaacccctttgtctggctg

SEQ ID NO: 5461503 - DNA, 25 bp, Homo sapien
ttacaatgcaaactctgcaaggcgc

SEQ ID NO: 5461504 - DNA, 25 bp, Homo sapien
tggaaggagacaaaactgccagagg

SEQ ID NO: 5461505 - DNA, 25 bp, Homo sapien
ggatcatcatgagagatgttgacag

SEQ ID NO: 5461506 - DNA, 25 bp, Homo sapien
tcctaactcctgctgcatcaaagtg

SEQ ID NO: 5461507 - DNA, 25 bp, Homo sapien
gagactgacaagaggagtgttgcct

SEQ ID NO: 5461508 - DNA, 25 bp, Homo sapien
gacacgatttaatcttataaaggtc

SEQ ID NO: 5461509 - DNA, 25 bp, Homo sapien
gaatcatatttaaacttcgttttgc

SEQ ID NO: 5461510 - DNA, 25 bp, Homo sapien
tcttataaaggtcaagaatcatatt

SEQ ID NO: 5461511 - DNA, 25 bp, Homo sapien
aattcagttgccacttgacacgatt

SEQ ID NO: 5461512 - DNA, 25 bp, Homo sapien
gaggaacacaaaagcctgtcgggta

SEQ ID NO: 5461513 - DNA, 25 bp, Homo sapien
ctgaggaacacaaaagcctgtcggg

SEQ ID NO: 5461514 - DNA, 25 bp, Homo sapien
tgaggaacacaaaagcctgtcgggt

SEQ ID NO: 5461515 - DNA, 25 bp, Homo sapien
aggaacacaaaagcctgtcgggtag

SEQ ID NO: 5461516 - DNA, 25 bp, Homo sapien
gggtctgtctagaaccagcagcaca

SEQ ID NO: 5461517 - DNA, 25 bp, Homo sapien
tttgggtctgtctagaaccagcagc

SEQ ID NO: 5461518 - DNA, 25 bp, Homo sapien
cttttgggtctgtctagaaccagca

SEQ ID NO: 5461519 - DNA, 25 bp, Homo sapien
tgggtctgtctagaaccagcagcac

SEQ ID NO: 5461520 - DNA, 25 bp, Homo sapien
tcaagattatacacagttaagcagt

SEQ ID NO: 5461521 - DNA, 25 bp, Homo sapien
tgggaacccagctcttgagcggtct

SEQ ID NO: 5461522 - DNA, 25 bp, Homo sapien
agcggtctgcccatctgtagcttca

SEQ ID NO: 5461523 - DNA, 25 bp, Homo sapien
gaaacaagtgtcttgtgggaaccca

SEQ ID NO: 5461524 - DNA, 25 bp, Homo sapien
tcaataggtgaaggaagcaacctcc

SEQ ID NO: 5461525 - DNA, 25 bp, Homo sapien
tcttcctcaataggtgaaggaagca

SEQ ID NO: 5461526 - DNA, 25 bp, Homo sapien
tgattcttcctcaataggtgaagga

SEQ ID NO: 5461527 - DNA, 25 bp, Homo sapien
gacacagaaggctgaaattggcatt

SEQ ID NO: 5461528 - DNA, 25 bp, Homo sapien
tcttatattttgaggattgagaggc

SEQ ID NO: 5461529 - DNA, 25 bp, Homo sapien
gtgtgctccacggatgctgccttta

SEQ ID NO: 5461530 - DNA, 25 bp, Homo sapien
cggatgctgcctttacatttgtact

SEQ ID NO: 5461531 - DNA, 25 bp, Homo sapien
tgtgcagcgtgtgctccacggatgc

SEQ ID NO: 5461532 - DNA, 25 bp, Homo sapien
atacattgttctgggctcaaggtgg

SEQ ID NO: 5461533 - DNA, 25 bp, Homo sapien
catgactacagtgttaaaaggaaca

SEQ ID NO: 5461534 - DNA, 25 bp, Homo sapien
gtggcagacagccattttaccagag

SEQ ID NO: 5461535 - DNA, 25 bp, Homo sapien
gctaatcaggtatgtacaagtttaa

SEQ ID NO: 5461536 - DNA, 25 bp, Homo sapien
ttccctttatggcagcagagtggcc

SEQ ID NO: 5461537 - DNA, 25 bp, Homo sapien
gccaatgggatgtttggaagtacac

SEQ ID NO: 5461538 - DNA, 25 bp, Homo sapien
cacacactgtgacgtgaagcttata

SEQ ID NO: 5461539 - DNA, 25 bp, Homo sapien
cacataaatgattacagccaatggg

SEQ ID NO: 5461540 - DNA, 25 bp, Homo sapien
catcagtggctatctttgagtggta

SEQ ID NO: 5461541 - DNA, 25 bp, Homo sapien
gagcttgtttactctttccgccaca

SEQ ID NO: 5461542 - DNA, 25 bp, Homo sapien
tgaaaccgcagcaagacagaacctg

SEQ ID NO: 5461543 - DNA, 25 bp, Homo sapien
tttgtaccctagtagtgcctgaaac

SEQ ID NO: 5461544 - DNA, 25 bp, Homo sapien
tactgcttaggagattagcagtgcc

SEQ ID NO: 5461545 - DNA, 25 bp, Homo sapien
tgtatctaattgtccagaactatcc

SEQ ID NO: 5461546 - DNA, 25 bp, Homo sapien
ccaagtagacttgtatttgtatcta

SEQ ID NO: 5461547 - DNA, 25 bp, Homo sapien
taaccatatccactaaggaccctag

SEQ ID NO: 5461548 - DNA, 25 bp, Homo sapien
gattcacgtttcttcagcatagtag

SEQ ID NO: 5461549 - DNA, 25 bp, Homo sapien
gccattagctgtacaggattcacgt

SEQ ID NO: 5461550 - DNA, 25 bp, Homo sapien
tgtgatgtccataatagccattagc

SEQ ID NO: 5461551 - DNA, 25 bp, Homo sapien
catagtagccccagtagcagatggc

SEQ ID NO: 5461552 - DNA, 25 bp, Homo sapien
tctcagattaataggattccaccag

SEQ ID NO: 5461553 - DNA, 25 bp, Homo sapien
tatcgtttgccgcagaaacacagga

SEQ ID NO: 5461554 - DNA, 25 bp, Homo sapien
tgttgacattattgggctgagctac

SEQ ID NO: 5461555 - DNA, 25 bp, Homo sapien
tacttaacaaggtgagctctcagat

SEQ ID NO: 5461556 - DNA, 25 bp, Homo sapien
catcattaacgataagcacattatc

SEQ ID NO: 5461557 - DNA, 25 bp, Homo sapien
tcacatcattaacgataagcacatt

SEQ ID NO: 5461558 - DNA, 25 bp, Homo sapien
cattaacgataagcacattatcatc

SEQ ID NO: 5461559 - DNA, 25 bp, Homo sapien
ttcaatcacatcattaacgataagc

SEQ ID NO: 5461560 - DNA, 25 bp, Homo sapien
cacagcaaaattgacgatgcagctt

SEQ ID NO: 5461561 - DNA, 25 bp, Homo sapien
tgagattatgggaaacgcacagcaa

SEQ ID NO: 5461562 - DNA, 25 bp, Homo sapien
aatttaaggcttgactactccacac

SEQ ID NO: 5461563 - DNA, 25 bp, Homo sapien
taagttgtgcctatctcctttggac

SEQ ID NO: 5461564 - DNA, 25 bp, Homo sapien
catgtgaccagtggttactatattg

SEQ ID NO: 5461565 - DNA, 25 bp, Homo sapien
cacttgcaatacatctcatttggac

SEQ ID NO: 5461566 - DNA, 25 bp, Homo sapien
gaccagtggttactatattggacag

SEQ ID NO: 5461567 - DNA, 25 bp, Homo sapien
actagccgtgttgcaaatgatcaaa

SEQ ID NO: 5461568 - DNA, 25 bp, Homo sapien
tcacggcttaaagccacataaactg

SEQ ID NO: 5461569 - DNA, 25 bp, Homo sapien
agaaataactagaaacctcacggct

SEQ ID NO: 5461570 - DNA, 25 bp, Homo sapien
ttctttggaggctctagaagagaat

SEQ ID NO: 5461571 - DNA, 25 bp, Homo sapien
ttctagaagctcgaagtctgaaatg

SEQ ID NO: 5461572 - DNA, 25 bp, Homo sapien
tttctttggaggctctagaagagaa

SEQ ID NO: 5461573 - DNA, 25 bp, Homo sapien
tgtgtgacatttaggcccacagaca

SEQ ID NO: 5461574 - DNA, 25 bp, Homo sapien
gacacccatgtgattctagaaaatg

SEQ ID NO: 5461575 - DNA, 25 bp, Homo sapien
ctgtgtgtgacatttaggcccacag

SEQ ID NO: 5461576 - DNA, 25 bp, Homo sapien
ctttttagttgccacagaaatcttt

SEQ ID NO: 5461577 - DNA, 25 bp, Homo sapien
gagcctcctcaggactccgtttttc

SEQ ID NO: 5461578 - DNA, 25 bp, Homo sapien
ggaaagctgtcttgttcctcgcact

SEQ ID NO: 5461579 - DNA, 25 bp, Homo sapien
aggaaagctgtcttgttcctcgcac

SEQ ID NO: 5461580 - DNA, 25 bp, Homo sapien
tttcacagcacaatgagcctcctca

SEQ ID NO: 5461581 - DNA, 25 bp, Homo sapien
cggagagcactttctcgggtgcaaa

SEQ ID NO: 5461582 - DNA, 25 bp, Homo sapien
cactttctcgggtgcaaatgcttga

SEQ ID NO: 5461583 - DNA, 25 bp, Homo sapien
ccccggagacggagagcactttctc

SEQ ID NO: 5461584 - DNA, 25 bp, Homo sapien
ggtgcaaatgcttgaccacatgcct

SEQ ID NO: 5461585 - DNA, 25 bp, Homo sapien
aagccatggagaaatctggctatcc

SEQ ID NO: 5461586 - DNA, 25 bp, Homo sapien
catcactaccctcaaagccatggag

SEQ ID NO: 5461587 - DNA, 25 bp, Homo sapien
cttgcactcaggccctttcactttt

SEQ ID NO: 5461588 - DNA, 25 bp, Homo sapien
tggctatcctacagtcccaaaatgc

SEQ ID NO: 5461589 - DNA, 25 bp, Homo sapien
gacctcgggcacatcaatgtcacag

SEQ ID NO: 5461590 - DNA, 25 bp, Homo sapien
gatgatcacaattttgttgggaata

SEQ ID NO: 5461591 - DNA, 25 bp, Homo sapien
cacaattttgttgggaatatccaaa

SEQ ID NO: 5461592 - DNA, 25 bp, Homo sapien
tctccatcaaacctaatcagggtgt

SEQ ID NO: 5461593 - DNA, 25 bp, Homo sapien
gccaccagaagatgggtgacgtgca

SEQ ID NO: 5461594 - DNA, 25 bp, Homo sapien
cgtggcagacccagtagtcagcgaa

SEQ ID NO: 5461595 - DNA, 25 bp, Homo sapien
tgtcttcttcgtggcagacccagta

SEQ ID NO: 5461596 - DNA, 25 bp, Homo sapien
gacccagtagtcagcgaaaacgtga

SEQ ID NO: 5461597 - DNA, 25 bp, Homo sapien
gaggggcaggagctttcttctttgc

SEQ ID NO: 5461598 - DNA, 25 bp, Homo sapien
cttggccttcaaaaccttcgctttg

SEQ ID NO: 5461599 - DNA, 25 bp, Homo sapien
taggaggggcaggagctttcttctt

SEQ ID NO: 5461600 - DNA, 25 bp, Homo sapien
aggggcaggagctttcttctttgcc

SEQ ID NO: 5461601 - DNA, 25 bp, Homo sapien
aaagtgtagcggaattatcaaaggg

SEQ ID NO: 5461602 - DNA, 25 bp, Homo sapien
gggtgccattagcaagaactctgtt

SEQ ID NO: 5461603 - DNA, 25 bp, Homo sapien
gttcgaatctgctgcgatgcaatag

SEQ ID NO: 5461604 - DNA, 25 bp, Homo sapien
caaaagcatgcctgaacttttccca

SEQ ID NO: 5461605 - DNA, 25 bp, Homo sapien
tggagggcatggtaaaacagaacct

SEQ ID NO: 5461606 - DNA, 25 bp, Homo sapien
caggtctacttcacgacagcagtta

SEQ ID NO: 5461607 - DNA, 25 bp, Homo sapien
ggaaagtgaactgggccaggtctac

SEQ ID NO: 5461608 - DNA, 25 bp, Homo sapien
gaaagtgccagaactaaatcatggg

SEQ ID NO: 5461609 - DNA, 25 bp, Homo sapien
gacagccagtgatcatgggaaggac

SEQ ID NO: 5461610 - DNA, 25 bp, Homo sapien
atgaggagcagttcagcacagtgac

SEQ ID NO: 5461611 - DNA, 25 bp, Homo sapien
cagtgatcatgggaaggactgacag

SEQ ID NO: 5461612 - DNA, 25 bp, Homo sapien
agatgaggagcagttcagcacagtg

SEQ ID NO: 5461613 - DNA, 25 bp, Homo sapien
cacaagagctcatagcaggaactga

SEQ ID NO: 5461614 - DNA, 25 bp, Homo sapien
gcatggaacatgctgcactgctccc

SEQ ID NO: 5461615 - DNA, 25 bp, Homo sapien
gtgtgacttgcaggcagcaacacaa

SEQ ID NO: 5461616 - DNA, 25 bp, Homo sapien
caactccttacacagccaggcctca

SEQ ID NO: 5461617 - DNA, 25 bp, Homo sapien
ggaatctccctttgagaactttgga

SEQ ID NO: 5461618 - DNA, 25 bp, Homo sapien
tcttagctgcagtttatcccatctt

SEQ ID NO: 5461619 - DNA, 25 bp, Homo sapien
ctttggaaactgagtctaatccagt

SEQ ID NO: 5461620 - DNA, 25 bp, Homo sapien
ttcctcctggaagccgtaaggaatc

SEQ ID NO: 5461621 - DNA, 25 bp, Homo sapien
cgtttctgctttattgccaactgtc

SEQ ID NO: 5461622 - DNA, 25 bp, Homo sapien
gctcaaatttgctggacagcctatg

SEQ ID NO: 5461623 - DNA, 25 bp, Homo sapien
tcttaatttcagtcctagagatgga

SEQ ID NO: 5461624 - DNA, 25 bp, Homo sapien
catggctttggattacgatgcttca

SEQ ID NO: 5461625 - DNA, 25 bp, Homo sapien
gggcctagataaacaaggtgtacga

SEQ ID NO: 5461626 - DNA, 25 bp, Homo sapien
gtttatagtctgtgaacacggggcc

SEQ ID NO: 5461627 - DNA, 25 bp, Homo sapien
tcagatgcccatatctggtttatag

SEQ ID NO: 5461628 - DNA, 25 bp, Homo sapien
gagccaataccacaggcactgcaga

SEQ ID NO: 5461629 - DNA, 25 bp, Homo sapien
agcgagcgagccatgccgtgcatgt

SEQ ID NO: 5461630 - DNA, 25 bp, Homo sapien
gcagatcagtaggaaaacggagaga

SEQ ID NO: 5461631 - DNA, 25 bp, Homo sapien
cactgtctctgcagatcagtaggaa

SEQ ID NO: 5461632 - DNA, 25 bp, Homo sapien
cgaacccgtcagatagtccttcatt

SEQ ID NO: 5461633 - DNA, 25 bp, Homo sapien
gacataacctgaccgtgacaccgtc

SEQ ID NO: 5461634 - DNA, 25 bp, Homo sapien
cacttaatacattgacataacctga

SEQ ID NO: 5461635 - DNA, 25 bp, Homo sapien
cattgacataacctgaccgtgacac

SEQ ID NO: 5461636 - DNA, 25 bp, Homo sapien
ctgataccacttaatacattgacat

SEQ ID NO: 5461637 - DNA, 25 bp, Homo sapien
acaagacctgactcgccatgatggc

SEQ ID NO: 5461638 - DNA, 25 bp, Homo sapien
gtttccaaatcctgacaatcacaac

SEQ ID NO: 5461639 - DNA, 25 bp, Homo sapien
ttccaaatcctgacaatcacaacaa

SEQ ID NO: 5461640 - DNA, 25 bp, Homo sapien
aacaagacctgactcgccatgatgg

SEQ ID NO: 5461641 - DNA, 25 bp, Homo sapien
gccacccaaggacagggtgtatatg

SEQ ID NO: 5461642 - DNA, 25 bp, Homo sapien
cccaaggacagggtgtatatgacaa

SEQ ID NO: 5461643 - DNA, 25 bp, Homo sapien
cacccaaggacagggtgtatatgac

SEQ ID NO: 5461644 - DNA, 25 bp, Homo sapien
gagccacccaaggacagggtgtata

SEQ ID NO: 5461645 - DNA, 25 bp, Homo sapien
catatttccttttgccagttgccaa

SEQ ID NO: 5461646 - DNA, 25 bp, Homo sapien
ttcatatttccttttgccagttgcc

SEQ ID NO: 5461647 - DNA, 25 bp, Homo sapien
ttccttttgccagttgccaaccagg

SEQ ID NO: 5461648 - DNA, 25 bp, Homo sapien
atttccttttgccagttgccaacca

SEQ ID NO: 5461649 - DNA, 25 bp, Homo sapien
taattctgcacttggatatttgtgg

SEQ ID NO: 5461650 - DNA, 25 bp, Homo sapien
taaaccgctcattagtatgcagtgg

SEQ ID NO: 5461651 - DNA, 25 bp, Homo sapien
cttggtgcttgtgtgaaacaggagt

SEQ ID NO: 5461652 - DNA, 25 bp, Homo sapien
aacaggagttaagcatatggcaaac

SEQ ID NO: 5461653 - DNA, 25 bp, Homo sapien
ggtgctctccataacacaagaacat

SEQ ID NO: 5461654 - DNA, 25 bp, Homo sapien
ccagcaggtgctctccataacacaa

SEQ ID NO: 5461655 - DNA, 25 bp, Homo sapien
tccttattgcaaataagcctctcct

SEQ ID NO: 5461656 - DNA, 25 bp, Homo sapien
gcaaataagcctctcctgtagattc

SEQ ID NO: 5461657 - DNA, 25 bp, Homo sapien
ttctccccagaacggaggagtactc

SEQ ID NO: 5461658 - DNA, 25 bp, Homo sapien
ctccccagaacggaggagtactctt

SEQ ID NO: 5461659 - DNA, 25 bp, Homo sapien
cccagaacggaggagtactctttca

SEQ ID NO: 5461660 - DNA, 25 bp, Homo sapien
cagaacggaggagtactctttcata

SEQ ID NO: 5461661 - DNA, 25 bp, Homo sapien
gcatgcccaagagcaggtgagtatt

SEQ ID NO: 5461662 - DNA, 25 bp, Homo sapien
catgcccaagagcaggtgagtattt

SEQ ID NO: 5461663 - DNA, 25 bp, Homo sapien
gcaggtgagtattttcattgtgcat

SEQ ID NO: 5461664 - DNA, 25 bp, Homo sapien
atagcatgaatcctggtgtgatttt

SEQ ID NO: 5461665 - DNA, 25 bp, Homo sapien
cagcctccttcaggtatagcatgaa

SEQ ID NO: 5461666 - DNA, 25 bp, Homo sapien
gctttttagttggcacactggcgca

SEQ ID NO: 5461667 - DNA, 25 bp, Homo sapien
tgctgagatgcaactggtactactg

SEQ ID NO: 5461668 - DNA, 25 bp, Homo sapien
tcagccgtctgcctgcaggctccat

SEQ ID NO: 5461669 - DNA, 25 bp, Homo sapien
cattccacaacccaaagaatatctt

SEQ ID NO: 5461670 - DNA, 25 bp, Homo sapien
ccattccacaacccaaagaatatct

SEQ ID NO: 5461671 - DNA, 25 bp, Homo sapien
attccacaacccaaagaatatcttc

SEQ ID NO: 5461672 - DNA, 25 bp, Homo sapien
cccattccacaacccaaagaatatc

SEQ ID NO: 5461673 - DNA, 25 bp, Homo sapien
atgattgaatatagaattttgtggt

SEQ ID NO: 5461674 - DNA, 25 bp, Homo sapien
gattgaatatagaattttgtggttt

SEQ ID NO: 5461675 - DNA, 25 bp, Homo sapien
tgaatatagaattttgtggttttct

SEQ ID NO: 5461676 - DNA, 25 bp, Homo sapien
acttttctcctcgaaatttcaatga

SEQ ID NO: 5461677 - DNA, 25 bp, Homo sapien
aggtgaaggaccatattcagttaca

SEQ ID NO: 5461678 - DNA, 25 bp, Homo sapien
tggaaggtgaaggaccatattcagt

SEQ ID NO: 5461679 - DNA, 25 bp, Homo sapien
gaaggtgaaggaccatattcagtta

SEQ ID NO: 5461680 - DNA, 25 bp, Homo sapien
ggtgaaggaccatattcagttacac

SEQ ID NO: 5461681 - DNA, 25 bp, Homo sapien
ggccacggttgcaatgcagccagag

SEQ ID NO: 5461682 - DNA, 25 bp, Homo sapien
gtgtggccacggttgcaatgcagcc

SEQ ID NO: 5461683 - DNA, 25 bp, Homo sapien
gcagccagaggcttctcccggagct

SEQ ID NO: 5461684 - DNA, 25 bp, Homo sapien
ctagtcaggtgtggccacggttgca

SEQ ID NO: 5461685 - DNA, 25 bp, Homo sapien
tccatgaggtacacagtattgcaca

SEQ ID NO: 5461686 - DNA, 25 bp, Homo sapien
tctaatcaaaggagcaacccgggtg

SEQ ID NO: 5461687 - DNA, 25 bp, Homo sapien
taaaatgtcaccacacaaacgtatg

SEQ ID NO: 5461688 - DNA, 25 bp, Homo sapien
gattttgcttatatcgccttgggca

SEQ ID NO: 5461689 - DNA, 25 bp, Homo sapien
ggtagcccatatcctgttagcaaga

SEQ ID NO: 5461690 - DNA, 25 bp, Homo sapien
gttagcaagacatgtccgggccatt

SEQ ID NO: 5461691 - DNA, 25 bp, Homo sapien
gcagatatgtgaatgcatgtcactt

SEQ ID NO: 5461692 - DNA, 25 bp, Homo sapien
ggtgggctaccaaataaatgtgaac

SEQ ID NO: 5461693 - DNA, 25 bp, Homo sapien
ggaggtcctttacagctagtctagc

SEQ ID NO: 5461694 - DNA, 25 bp, Homo sapien
gctcctcgatgatcagcactaaaga

SEQ ID NO: 5461695 - DNA, 25 bp, Homo sapien
gaacagtctgcttgcccaaaccagt

SEQ ID NO: 5461696 - DNA, 25 bp, Homo sapien
gtagaagtatcagcatcgaacatcg

SEQ ID NO: 5461697 - DNA, 25 bp, Homo sapien
ttctccactgcttttgtcgaacgtg

SEQ ID NO: 5461698 - DNA, 25 bp, Homo sapien
tctccactgcttttgtcgaacgtgt

SEQ ID NO: 5461699 - DNA, 25 bp, Homo sapien
ttgtctcctattgggaccactgccc

SEQ ID NO: 5461700 - DNA, 25 bp, Homo sapien
taggctgcgaagaccagaaacaggg

SEQ ID NO: 5461701 - DNA, 25 bp, Homo sapien
ttcatatctaggctgcgaagaccag

SEQ ID NO: 5461702 - DNA, 25 bp, Homo sapien
gaaacagggccagttttagctccaa

SEQ ID NO: 5461703 - DNA, 25 bp, Homo sapien
atctggcttgagataatgaaaggca

SEQ ID NO: 5461704 - DNA, 25 bp, Homo sapien
tatctggcttgagataatgaaaggc

SEQ ID NO: 5461705 - DNA, 25 bp, Homo sapien
gatcctggagctgacctcattaaga

SEQ ID NO: 5461706 - DNA, 25 bp, Homo sapien
gaaacacacgcagctttttaggtca

SEQ ID NO: 5461707 - DNA, 25 bp, Homo sapien
catgctgggacaattcacagtcagg

SEQ ID NO: 5461708 - DNA, 25 bp, Homo sapien
aataccgtgctatcaaaggcttgag

SEQ ID NO: 5461709 - DNA, 25 bp, Homo sapien
tgggtggacagtaggactgagatgt

SEQ ID NO: 5461710 - DNA, 25 bp, Homo sapien
gtagcctgtgacagggtccatactg

SEQ ID NO: 5461711 - DNA, 25 bp, Homo sapien
tggtagcctgtgacagggtccatac

SEQ ID NO: 5461712 - DNA, 25 bp, Homo sapien
cctgtggtgctataggtgggtggac

SEQ ID NO: 5461713 - DNA, 25 bp, Homo sapien
tgaggtaccccaccgtggttggtca

SEQ ID NO: 5461714 - DNA, 25 bp, Homo sapien
ggctgatgaggtaccccaccgtggt

SEQ ID NO: 5461715 - DNA, 25 bp, Homo sapien
gacaccgtggtggtaggttccagac

SEQ ID NO: 5461716 - DNA, 25 bp, Homo sapien
agctcttcatatggtctagtctctg

SEQ ID NO: 5461717 - DNA, 25 bp, Homo sapien
aaatgcagtatccaacaattccaca

SEQ ID NO: 5461718 - DNA, 25 bp, Homo sapien
ttattttaggaagtgtgaagcctac

SEQ ID NO: 5461719 - DNA, 25 bp, Homo sapien
tttaaatgcagtatccaacaattcc

SEQ ID NO: 5461720 - DNA, 25 bp, Homo sapien
gagattaaagtgtgcaaataagaga

SEQ ID NO: 5461721 - DNA, 25 bp, Homo sapien
tagaacctcggatctaggagttcca

SEQ ID NO: 5461722 - DNA, 25 bp, Homo sapien
tcggatctaggagttccagtaaggc

SEQ ID NO: 5461723 - DNA, 25 bp, Homo sapien
tctaggagttccagtaaggcaggaa

SEQ ID NO: 5461724 - DNA, 25 bp, Homo sapien
attcaggcaatagaacctcggatct

SEQ ID NO: 5461725 - DNA, 25 bp, Homo sapien
atttgaacggatgtccctgccttcc

SEQ ID NO: 5461726 - DNA, 25 bp, Homo sapien
acagaaaatttgaacggatgtccct

SEQ ID NO: 5461727 - DNA, 25 bp, Homo sapien
gattatcaattatccactcttcctc

SEQ ID NO: 5461728 - DNA, 25 bp, Homo sapien
tctgtggattatcaattatccactc

SEQ ID NO: 5461729 - DNA, 25 bp, Homo sapien
tttttgccaatgtgggtgttactgg

SEQ ID NO: 5461730 - DNA, 25 bp, Homo sapien
ggaattatcctgcagttgattagca

SEQ ID NO: 5461731 - DNA, 25 bp, Homo sapien
gaattacagctttgtatgacataaa

SEQ ID NO: 5461732 - DNA, 25 bp, Homo sapien
gcagagactttcctgaaaatgtcct

SEQ ID NO: 5461733 - DNA, 25 bp, Homo sapien
atcttgagcatatggtagtacttcc

SEQ ID NO: 5461734 - DNA, 25 bp, Homo sapien
ggtagtacttcctcggtactccata

SEQ ID NO: 5461735 - DNA, 25 bp, Homo sapien
taggaaggtgctggtaatgtactct

SEQ ID NO: 5461736 - DNA, 25 bp, Homo sapien
tcctcggtactccatattccaaggc

SEQ ID NO: 5461737 - DNA, 25 bp, Homo sapien
atatttggttctggtatacagcaaa

SEQ ID NO: 5461738 - DNA, 25 bp, Homo sapien
tctggtatacagcaaatcgtctgtc

SEQ ID NO: 5461739 - DNA, 25 bp, Homo sapien
gtctgtctagaaacacgggactgac

SEQ ID NO: 5461740 - DNA, 25 bp, Homo sapien
gcaaatcgtctgtctagaaacacgg

SEQ ID NO: 5461741 - DNA, 25 bp, Homo sapien
tagctggaaaatccatgcctggtgc

SEQ ID NO: 5461742 - DNA, 25 bp, Homo sapien
cacaaagctgtctgtatagctggaa

SEQ ID NO: 5461743 - DNA, 25 bp, Homo sapien
gaacggtgctgctgggatctgacac

SEQ ID NO: 5461744 - DNA, 25 bp, Homo sapien
tctgggttggaaggaatcgtgcttt

SEQ ID NO: 5461745 - DNA, 25 bp, Homo sapien
taatctccttgactcttcctcggta

SEQ ID NO: 5461746 - DNA, 25 bp, Homo sapien
tctaatctccttgactcttcctcgg

SEQ ID NO: 5461747 - DNA, 25 bp, Homo sapien
tttctaatctccttgactcttcctc

SEQ ID NO: 5461748 - DNA, 25 bp, Homo sapien
aatctccttgactcttcctcggtac

SEQ ID NO: 5461749 - DNA, 25 bp, Homo sapien
ttgcacggcggttgctaaaccagac

SEQ ID NO: 5461750 - DNA, 25 bp, Homo sapien
cccgggaatgagatggttgaaagcc

SEQ ID NO: 5461751 - DNA, 25 bp, Homo sapien
aagccatcagttgattggccccagc

SEQ ID NO: 5461752 - DNA, 25 bp, Homo sapien
tccgacagctggtacgttggcaagg

SEQ ID NO: 5461753 - DNA, 25 bp, Homo sapien
catgggcaggaatcactgagcagga

SEQ ID NO: 5461754 - DNA, 25 bp, Homo sapien
caaatagatgcaagagttctctgcc

SEQ ID NO: 5461755 - DNA, 25 bp, Homo sapien
ccatgaaccttatgaggaccatggg

SEQ ID NO: 5461756 - DNA, 25 bp, Homo sapien
gggacccaccatgatcttgcaacaa

SEQ ID NO: 5461757 - DNA, 25 bp, Homo sapien
tgggaacaaactgtgttagcttggg

SEQ ID NO: 5461758 - DNA, 25 bp, Homo sapien
tcaagaaagttctgggaacaaactg

SEQ ID NO: 5461759 - DNA, 25 bp, Homo sapien
ccaaaggcatcagggtaagaaaatc

SEQ ID NO: 5461760 - DNA, 25 bp, Homo sapien
cggtctgagtgcctgttaccacggc

SEQ ID NO: 5461761 - DNA, 25 bp, Homo sapien
gaaccaagcgtagtgatcctaggag

SEQ ID NO: 5461762 - DNA, 25 bp, Homo sapien
gcaaactggcctatgactgatgttc

SEQ ID NO: 5461763 - DNA, 25 bp, Homo sapien
gaatagcagtagcaacagaggcaaa

SEQ ID NO: 5461764 - DNA, 25 bp, Homo sapien
tttcaatacctgaacgaaccaagcg

SEQ ID NO: 5461765 - DNA, 25 bp, Homo sapien
gggattgacatatgttttagatgag

SEQ ID NO: 5461766 - DNA, 25 bp, Homo sapien
ttgggggggattgacatatgtttta

SEQ ID NO: 5461767 - DNA, 25 bp, Homo sapien
gacacggaggtttgggcaacagtac

SEQ ID NO: 5461768 - DNA, 25 bp, Homo sapien
tctggactgaagtaggacacggagg

SEQ ID NO: 5461769 - DNA, 25 bp, Homo sapien
ttctctcaaaagcacgctccagttc

SEQ ID NO: 5461770 - DNA, 25 bp, Homo sapien
gccagttcctccctagtataaatgt

SEQ ID NO: 5461771 - DNA, 25 bp, Homo sapien
tcctctttagtggtaaatctggttc

SEQ ID NO: 5461772 - DNA, 25 bp, Homo sapien
aaggtggttcggcttctgcgctgtt

SEQ ID NO: 5461773 - DNA, 25 bp, Homo sapien
aaccctaaatctttgcttgtacatt

SEQ ID NO: 5461774 - DNA, 25 bp, Homo sapien
gagaaccctaaatctttgcttgtac

SEQ ID NO: 5461775 - DNA, 25 bp, Homo sapien
gaaccctaaatctttgcttgtacat

SEQ ID NO: 5461776 - DNA, 25 bp, Homo sapien
aagagaaccctaaatctttgcttgt

SEQ ID NO: 5461777 - DNA, 25 bp, Homo sapien
tgtcaaacaggaatgcaggtatcct

SEQ ID NO: 5461778 - DNA, 25 bp, Homo sapien
ggcaaaagctcccttgatcctgact

SEQ ID NO: 5461779 - DNA, 25 bp, Homo sapien
tatcctaaggtgagttcagggagga

SEQ ID NO: 5461780 - DNA, 25 bp, Homo sapien
ccttgatcctgactttgagtataaa

SEQ ID NO: 5461781 - DNA, 25 bp, Homo sapien
aatgacctctctcgtgtttactcgg

SEQ ID NO: 5461782 - DNA, 25 bp, Homo sapien
ggctgaggcctattctaccgatttc

SEQ ID NO: 5461783 - DNA, 25 bp, Homo sapien
gaagtagcccttttacgctgagaaa

SEQ ID NO: 5461784 - DNA, 25 bp, Homo sapien
tcaacgtgaagggtacaatgggaca

SEQ ID NO: 5461785 - DNA, 25 bp, Homo sapien
ctgtttaagcaactcctttcgaagg

SEQ ID NO: 5461786 - DNA, 25 bp, Homo sapien
tacctgtttaagcaactcctttcga

SEQ ID NO: 5461787 - DNA, 25 bp, Homo sapien
cctgtttaagcaactcctttcgaag

SEQ ID NO: 5461788 - DNA, 25 bp, Homo sapien
ttatcgcgggctggccatcatgtcc

SEQ ID NO: 5461789 - DNA, 25 bp, Homo sapien
gccacaattgccctcttatcgcggg

SEQ ID NO: 5461790 - DNA, 25 bp, Homo sapien
aagagagaggccattattgaccata

SEQ ID NO: 5461791 - DNA, 25 bp, Homo sapien
gaactgggtaattgagctgctgaca

SEQ ID NO: 5461792 - DNA, 25 bp, Homo sapien
ctggcaaaggaattagcagcaacat

SEQ ID NO: 5461793 - DNA, 25 bp, Homo sapien
tcatcagaaatcatgcttgggatac

SEQ ID NO: 5461794 - DNA, 25 bp, Homo sapien
ggcaaaggaattagcagcaacatca

SEQ ID NO: 5461795 - DNA, 25 bp, Homo sapien
catcatcagaaatcatgcttgggat

SEQ ID NO: 5461796 - DNA, 25 bp, Homo sapien
tataagtctcctgtctacaaggtgg

SEQ ID NO: 5461797 - DNA, 25 bp, Homo sapien
tacaaggtggtccttcagattagtg

SEQ ID NO: 5461798 - DNA, 25 bp, Homo sapien
ttagtgtcacatccaaccaatggac

SEQ ID NO: 5461799 - DNA, 25 bp, Homo sapien
gaagagagtgtgattcctccccttc

SEQ ID NO: 5461800 - DNA, 25 bp, Homo sapien
ggtctcaaagcccagtttcacaaag

SEQ ID NO: 5461801 - DNA, 25 bp, Homo sapien
aatgccacatgcaggtctcaaagcc

SEQ ID NO: 5461802 - DNA, 25 bp, Homo sapien
ttctgcacatcttcacacaatgcca

SEQ ID NO: 5461803 - DNA, 25 bp, Homo sapien
caaagcattcactgaacctcacagc

SEQ ID NO: 5461804 - DNA, 25 bp, Homo sapien
aacttgcaggtcaactcttgttgca

SEQ ID NO: 5461805 - DNA, 25 bp, Homo sapien
cttggtaattaaactattgactaca

SEQ ID NO: 5461806 - DNA, 25 bp, Homo sapien
tttctctgattgaccacttccttga

SEQ ID NO: 5461807 - DNA, 25 bp, Homo sapien
gttgcaaccacacttatttctctga

SEQ ID NO: 5461808 - DNA, 25 bp, Homo sapien
tctcatatatttaaggctcactatt

SEQ ID NO: 5461809 - DNA, 25 bp, Homo sapien
gcagcattaatacaaactgagattt

SEQ ID NO: 5461810 - DNA, 25 bp, Homo sapien
gactctcatatatttaaggctcact

SEQ ID NO: 5461811 - DNA, 25 bp, Homo sapien
tagactctcatatatttaaggctca

SEQ ID NO: 5461812 - DNA, 25 bp, Homo sapien
ctcaatgacgtacaagggaggtcct

SEQ ID NO: 5461813 - DNA, 25 bp, Homo sapien
gagttgccaattttgcattcgtgca

SEQ ID NO: 5461814 - DNA, 25 bp, Homo sapien
cagatgtttccatcggtctccaaaa

SEQ ID NO: 5461815 - DNA, 25 bp, Homo sapien
cattcgtgcaataaaattgtcgctg

SEQ ID NO: 5461816 - DNA, 25 bp, Homo sapien
ccacatgaaagaagccttctaaagc

SEQ ID NO: 5461817 - DNA, 25 bp, Homo sapien
agttccacatgaaagaagccttcta

SEQ ID NO: 5461818 - DNA, 25 bp, Homo sapien
aagaagccttctaaagcttaacctg

SEQ ID NO: 5461819 - DNA, 25 bp, Homo sapien
agaagccttctaaagcttaacctgc

SEQ ID NO: 5461820 - DNA, 25 bp, Homo sapien
tctagcagtatggaacagggttgtg

SEQ ID NO: 5461821 - DNA, 25 bp, Homo sapien
ccttggctatttgcctagctgtgga

SEQ ID NO: 5461822 - DNA, 25 bp, Homo sapien
tagctgtggacaataaggcaggaag

SEQ ID NO: 5461823 - DNA, 25 bp, Homo sapien
tacaacatgatactgaatctagcag

SEQ ID NO: 5461824 - DNA, 25 bp, Homo sapien
gaattgtacaacagagtctctaagc

SEQ ID NO: 5461825 - DNA, 25 bp, Homo sapien
tacagaatccttaatatgctctctc

SEQ ID NO: 5461826 - DNA, 25 bp, Homo sapien
aatctgttctgcaagtaaattcgga

SEQ ID NO: 5461827 - DNA, 25 bp, Homo sapien
tcaaacatccaaaatgaattgtaca

SEQ ID NO: 5461828 - DNA, 25 bp, Homo sapien
gaggtacaagaaagcacgcatctcc

SEQ ID NO: 5461829 - DNA, 25 bp, Homo sapien
gaagccacagctttgacaagaggta

SEQ ID NO: 5461830 - DNA, 25 bp, Homo sapien
ctccctgcgtggaagaagagccggt

SEQ ID NO: 5461831 - DNA, 25 bp, Homo sapien
tcaaaacaatacccagaggcctttc

SEQ ID NO: 5461832 - DNA, 25 bp, Homo sapien
cttccagcacctaaaggcatctttt

SEQ ID NO: 5461833 - DNA, 25 bp, Homo sapien
gcagttgctcaccttctaagatatg

SEQ ID NO: 5461834 - DNA, 25 bp, Homo sapien
gatatgaagggtcccggtcctctcc

SEQ ID NO: 5461835 - DNA, 25 bp, Homo sapien
cttttccctcaaagacaaggcaagg

SEQ ID NO: 5461836 - DNA, 25 bp, Homo sapien
ccttgccctgattccctggctgcct

SEQ ID NO: 5461837 - DNA, 25 bp, Homo sapien
ccctgattccctggctgcctggggg

SEQ ID NO: 5461838 - DNA, 25 bp, Homo sapien
ttgccctgattccctggctgcctgg

SEQ ID NO: 5461839 - DNA, 25 bp, Homo sapien
ctgattccctggctgcctgggggcc

SEQ ID NO: 5461840 - DNA, 25 bp, Homo sapien
aataattcatccctcattgcaagcc

SEQ ID NO: 5461841 - DNA, 25 bp, Homo sapien
ctattggggctcattgaataattca

SEQ ID NO: 5461842 - DNA, 25 bp, Homo sapien
tcagccttttgtggtgctgttttct

SEQ ID NO: 5461843 - DNA, 25 bp, Homo sapien
cattgcaagcccataatgtctattc

SEQ ID NO: 5461844 - DNA, 25 bp, Homo sapien
cagctcatttgggacgttttgtctc

SEQ ID NO: 5461845 - DNA, 25 bp, Homo sapien
gcctgtactgcgagagagcagccag

SEQ ID NO: 5461846 - DNA, 25 bp, Homo sapien
aacaagtagcaaagccgtgagtccc

SEQ ID NO: 5461847 - DNA, 25 bp, Homo sapien
tgtagattgtgtagagaaggacttc

SEQ ID NO: 5461848 - DNA, 25 bp, Homo sapien
tggagggccgttgcccaaaagagta

SEQ ID NO: 5461849 - DNA, 25 bp, Homo sapien
gccgttgcccaaaagagtactctct

SEQ ID NO: 5461850 - DNA, 25 bp, Homo sapien
cagacatatttataaggcagccaat

SEQ ID NO: 5461851 - DNA, 25 bp, Homo sapien
cagccaatgtgggggcaattttgga

SEQ ID NO: 5461852 - DNA, 25 bp, Homo sapien
ttaatgcgaggaaactccggagacc

SEQ ID NO: 5461853 - DNA, 25 bp, Homo sapien
gttttgattcctagtgtccctctgg

SEQ ID NO: 5461854 - DNA, 25 bp, Homo sapien
acaccgcgcatgaagggaccttgat

SEQ ID NO: 5461855 - DNA, 25 bp, Homo sapien
gttccatgtcgttactcaggcgcag

SEQ ID NO: 5461856 - DNA, 25 bp, Homo sapien
ccggccctacaattgctcagagatg

SEQ ID NO: 5461857 - DNA, 25 bp, Homo sapien
tgcgccgcccaaggcgccaccgctt

SEQ ID NO: 5461858 - DNA, 25 bp, Homo sapien
tcacccagcaagtgcgccgcccaag

SEQ ID NO: 5461859 - DNA, 25 bp, Homo sapien
tcagctagccgatgccctccaagtc

SEQ ID NO: 5461860 - DNA, 25 bp, Homo sapien
tagccgatgccctccaagtcaccca

SEQ ID NO: 5461861 - DNA, 25 bp, Homo sapien
ccgaatttacttctcaggatgcggc

SEQ ID NO: 5461862 - DNA, 25 bp, Homo sapien
aatttacttctcaggatgcggctga

SEQ ID NO: 5461863 - DNA, 25 bp, Homo sapien
ctttcccgaatttacttctcaggat

SEQ ID NO: 5461864 - DNA, 25 bp, Homo sapien
tcccgaatttacttctcaggatgcg

SEQ ID NO: 5461865 - DNA, 25 bp, Homo sapien
cacggctttgcgcacacggcaaagt

SEQ ID NO: 5461866 - DNA, 25 bp, Homo sapien
cggaccgtccctgagactctcggag

SEQ ID NO: 5461867 - DNA, 25 bp, Homo sapien
ccctgagactctcggaggaaatcgg

SEQ ID NO: 5461868 - DNA, 25 bp, Homo sapien
gctttgcgcacacggcaaagtccct

SEQ ID NO: 5461869 - DNA, 25 bp, Homo sapien
acagaccgcgtccttgagtaatttg

SEQ ID NO: 5461870 - DNA, 25 bp, Homo sapien
tcttctccacgtcaggcgttgtcac

SEQ ID NO: 5461871 - DNA, 25 bp, Homo sapien
gctgaacatgcccgggttctctctt

SEQ ID NO: 5461872 - DNA, 25 bp, Homo sapien
gacggcacggtgtttcgatcacaga

SEQ ID NO: 5461873 - DNA, 25 bp, Homo sapien
ccgcctctgggcctgtcgggatgct

SEQ ID NO: 5461874 - DNA, 25 bp, Homo sapien
gatgctcctcgctgaatcctctggg

SEQ ID NO: 5461875 - DNA, 25 bp, Homo sapien
ctttaagagaacaggcgggcaggcg

SEQ ID NO: 5461876 - DNA, 25 bp, Homo sapien
gaacaggcgggcaggcgttggtacc

SEQ ID NO: 5461877 - DNA, 25 bp, Homo sapien
gggcagcggcctgccgttgataaaa

SEQ ID NO: 5461878 - DNA, 25 bp, Homo sapien
gtggcggatgtggttgggcagcggc

SEQ ID NO: 5461879 - DNA, 25 bp, Homo sapien
cgccgatggcaccaggacgtatgga

SEQ ID NO: 5461880 - DNA, 25 bp, Homo sapien
gttgataaaaacaccgccgagctgg

SEQ ID NO: 5461881 - DNA, 25 bp, Homo sapien
gacgctgaaactgctcgacatcgga

SEQ ID NO: 5461882 - DNA, 25 bp, Homo sapien
agaacagcagcacgtaatttcgcag

SEQ ID NO: 5461883 - DNA, 25 bp, Homo sapien
cagagaaagcgtcttccccttcggg

SEQ ID NO: 5461884 - DNA, 25 bp, Homo sapien
tatcctcatgttacagcaccgacgc

SEQ ID NO: 5461885 - DNA, 25 bp, Homo sapien
aacagggacaagtctccccggctcg

SEQ ID NO: 5461886 - DNA, 25 bp, Homo sapien
acaacagggacaagtctccccggct

SEQ ID NO: 5461887 - DNA, 25 bp, Homo sapien
ctccaccgcggcatttccaaaacaa

SEQ ID NO: 5461888 - DNA, 25 bp, Homo sapien
ctccttctccaccgcggcatttcca

SEQ ID NO: 5461889 - DNA, 25 bp, Homo sapien
gagcagcgcgctccatttgcagaaa

SEQ ID NO: 5461890 - DNA, 25 bp, Homo sapien
ttgcagaaaggaaatcgagtaggtc

SEQ ID NO: 5461891 - DNA, 25 bp, Homo sapien
gaaaggaaatcgagtaggtcctcgc

SEQ ID NO: 5461892 - DNA, 25 bp, Homo sapien
cccagctccgccaggatttgcagag

SEQ ID NO: 5461893 - DNA, 25 bp, Homo sapien
cttccagcgggaacccgctacgcgg

SEQ ID NO: 5461894 - DNA, 25 bp, Homo sapien
gaacccgctacgcgggtagttctgc

SEQ ID NO: 5461895 - DNA, 25 bp, Homo sapien
gcccggccgcatcatcctgggcaca

SEQ ID NO: 5461896 - DNA, 25 bp, Homo sapien
gcacagcgccggccagcgtggtcat

SEQ ID NO: 5461897 - DNA, 25 bp, Homo sapien
tgtcggttcctagtccagaggccgg

SEQ ID NO: 5461898 - DNA, 25 bp, Homo sapien
gaaaagtttggtacgagtctgggca

SEQ ID NO: 5461899 - DNA, 25 bp, Homo sapien
tatatccaggtgaaggcgaaacgga

SEQ ID NO: 5461900 - DNA, 25 bp, Homo sapien
gatgaccctcgggaactatccggag

SEQ ID NO: 5461901 - DNA, 25 bp, Homo sapien
agccctgagctgcgattggccgacg

SEQ ID NO: 5461902 - DNA, 25 bp, Homo sapien
cggagacacgcgctgattgggcaac

SEQ ID NO: 5461903 - DNA, 25 bp, Homo sapien
tgcgattggccgacgggtagaccgt

SEQ ID NO: 5461904 - DNA, 25 bp, Homo sapien
tgggcaacagcgaccactttctctt

SEQ ID NO: 5461905 - DNA, 25 bp, Homo sapien
cagggtgcgctgatgttcttttgtc

SEQ ID NO: 5461906 - DNA, 25 bp, Homo sapien
tttgtcttctccgtccgcaagcggg

SEQ ID NO: 5461907 - DNA, 25 bp, Homo sapien
caattccaataagaaggcatctggg

SEQ ID NO: 5461908 - DNA, 25 bp, Homo sapien
tgccccttggcctaggcttgttaag

SEQ ID NO: 5461909 - DNA, 25 bp, Homo sapien
gagaaggtaccattgtgcatagcct

SEQ ID NO: 5461910 - DNA, 25 bp, Homo sapien
ttggtaagtgccagcgaactcgcct

SEQ ID NO: 5461911 - DNA, 25 bp, Homo sapien
tgacgccaggagtgttgtaaagact

SEQ ID NO: 5461912 - DNA, 25 bp, Homo sapien
tgtccccagcaggatatgacgccag

SEQ ID NO: 5461913 - DNA, 25 bp, Homo sapien
ggcaagctttcagcctgcctgatgc

SEQ ID NO: 5461914 - DNA, 25 bp, Homo sapien
ttggttgaccctcagagccacggag

SEQ ID NO: 5461915 - DNA, 25 bp, Homo sapien
ttggggaaaccaggcaagctttcag

SEQ ID NO: 5461916 - DNA, 25 bp, Homo sapien
aaggcttggttgaccctcagagcca

SEQ ID NO: 5461917 - DNA, 25 bp, Homo sapien
agaggtccctggacacccggagagg

SEQ ID NO: 5461918 - DNA, 25 bp, Homo sapien
ccagaggtccctggacacccggaga

SEQ ID NO: 5461919 - DNA, 25 bp, Homo sapien
ggccagaggtccctggacacccgga

SEQ ID NO: 5461920 - DNA, 25 bp, Homo sapien
gtggccagaggtccctggacacccg

SEQ ID NO: 5461921 - DNA, 25 bp, Homo sapien
gtggcctgtgtccccgaagtccgac

SEQ ID NO: 5461922 - DNA, 25 bp, Homo sapien
catccaaagacttaatgaatctaaa

SEQ ID NO: 5461923 - DNA, 25 bp, Homo sapien
ctgggccacatccaaagacttaatg

SEQ ID NO: 5461924 - DNA, 25 bp, Homo sapien
taatgaatctaaatttcttgtggcc

SEQ ID NO: 5461925 - DNA, 25 bp, Homo sapien
aatttggccgcggtacaggcgctaa

SEQ ID NO: 5461926 - DNA, 25 bp, Homo sapien
atccgcagccggtgggccaaggagt

SEQ ID NO: 5461927 - DNA, 25 bp, Homo sapien
caaggagtcctggtgccaaatttgg

SEQ ID NO: 5461928 - DNA, 25 bp, Homo sapien
caaaccccgcagctggatgggagtc

SEQ ID NO: 5461929 - DNA, 25 bp, Homo sapien
gtgatgatacaggattggtgaatgc

SEQ ID NO: 5461930 - DNA, 25 bp, Homo sapien
gggaggacatcaaaacgccaggttc

SEQ ID NO: 5461931 - DNA, 25 bp, Homo sapien
cgtgatcatgagcttccggtccgga

SEQ ID NO: 5461932 - DNA, 25 bp, Homo sapien
ttccggtccggatgtgatgatacag

SEQ ID NO: 5461933 - DNA, 25 bp, Homo sapien
cagaaactcgcacagggactcgcgt

SEQ ID NO: 5461934 - DNA, 25 bp, Homo sapien
ggcacgcgctcgtacgcagaaactc

SEQ ID NO: 5461935 - DNA, 25 bp, Homo sapien
cgcgtggacactttatggcccattt

SEQ ID NO: 5461936 - DNA, 25 bp, Homo sapien
cagtggggaccacgcggttctcagt

SEQ ID NO: 5461937 - DNA, 25 bp, Homo sapien
gctgtcactgttgacgtgccagagg

SEQ ID NO: 5461938 - DNA, 25 bp, Homo sapien
ctcccttccggtgatcgtggctcaa

SEQ ID NO: 5461939 - DNA, 25 bp, Homo sapien
tgccagaggtatgagcctcctccct

SEQ ID NO: 5461940 - DNA, 25 bp, Homo sapien
ccttccggtgatcgtggctcaaaaa

SEQ ID NO: 5461941 - DNA, 25 bp, Homo sapien
tcttggggctggcaacacgagagct

SEQ ID NO: 5461942 - DNA, 25 bp, Homo sapien
gatttctcggaggacattttggtgt

SEQ ID NO: 5461943 - DNA, 25 bp, Homo sapien
tcttcatgagatttctcggaggaca

SEQ ID NO: 5461944 - DNA, 25 bp, Homo sapien
tctgtcttggggacgacactcttca

SEQ ID NO: 5461945 - DNA, 25 bp, Homo sapien
ggggtccccatccaaataagctgaa

SEQ ID NO: 5461946 - DNA, 25 bp, Homo sapien
agggggtccccatccaaataagctg

SEQ ID NO: 5461947 - DNA, 25 bp, Homo sapien
gcagggggtccccatccaaataagc

SEQ ID NO: 5461948 - DNA, 25 bp, Homo sapien
ctgcagggggtccccatccaaataa

SEQ ID NO: 5461949 - DNA, 25 bp, Homo sapien
ctaaggaaatccacacgtggtgacg

SEQ ID NO: 5461950 - DNA, 25 bp, Homo sapien
ggaaatccacacgtggtgacgatag

SEQ ID NO: 5461951 - DNA, 25 bp, Homo sapien
cacgtggtgacgatagtacttgata

SEQ ID NO: 5461952 - DNA, 25 bp, Homo sapien
cgatagtacttgataatggtgaatc

SEQ ID NO: 5461953 - DNA, 25 bp, Homo sapien
tctttgcgggcgttctgagtcattc

SEQ ID NO: 5461954 - DNA, 25 bp, Homo sapien
tgagtcattcctactccgctgcaag

SEQ ID NO: 5461955 - DNA, 25 bp, Homo sapien
cctgttacagccgatctgctctgca

SEQ ID NO: 5461956 - DNA, 25 bp, Homo sapien
ttcccgaccgccaagtctgattgta

SEQ ID NO: 5461957 - DNA, 25 bp, Homo sapien
ctggaataaggactgtgttgctgca

SEQ ID NO: 5461958 - DNA, 25 bp, Homo sapien
ggaataaggactgtgttgctgcaga

SEQ ID NO: 5461959 - DNA, 25 bp, Homo sapien
tgttgctgcagaggccgggtcttgg

SEQ ID NO: 5461960 - DNA, 25 bp, Homo sapien
gctgcagaggccgggtcttgggccc

SEQ ID NO: 5461961 - DNA, 25 bp, Homo sapien
tcaagactcctaaggtgtttccaag

SEQ ID NO: 5461962 - DNA, 25 bp, Homo sapien
ccccgccctcggacaatgagagggt

SEQ ID NO: 5461963 - DNA, 25 bp, Homo sapien
ctgagattctcgaacccctgctggg

SEQ ID NO: 5461964 - DNA, 25 bp, Homo sapien
aactttcgtgtccaggtcacgctgc

SEQ ID NO: 5461965 - DNA, 25 bp, Homo sapien
gaacgcggagctttcgggcgggctc

SEQ ID NO: 5461966 - DNA, 25 bp, Homo sapien
aataaatgcgaacgcggagctttcg

SEQ ID NO: 5461967 - DNA, 25 bp, Homo sapien
ggctctgggagcggcccgtgggcat

SEQ ID NO: 5461968 - DNA, 25 bp, Homo sapien
gttacaaataaatgcgaacgcggag

SEQ ID NO: 5461969 - DNA, 25 bp, Homo sapien
gattaattccagagtgtcccttcag

SEQ ID NO: 5461970 - DNA, 25 bp, Homo sapien
ccttggaggcgacaatgtagacatg

SEQ ID NO: 5461971 - DNA, 25 bp, Homo sapien
ttagtctctctagcggttcctatcg

SEQ ID NO: 5461972 - DNA, 25 bp, Homo sapien
aatggaggccaaatgtcctttagtc

SEQ ID NO: 5461973 - DNA, 25 bp, Homo sapien
taaactcctgctttgtctaaggtgc

SEQ ID NO: 5461974 - DNA, 25 bp, Homo sapien
tagaacctaggcagaatgtggccca

SEQ ID NO: 5461975 - DNA, 25 bp, Homo sapien
ggagagagacctgaatgccagataa

SEQ ID NO: 5461976 - DNA, 25 bp, Homo sapien
tgatgatgagtctaacctgtagccc

SEQ ID NO: 5461977 - DNA, 25 bp, Homo sapien
taaatgcccatcttagcaacgcaca

SEQ ID NO: 5461978 - DNA, 25 bp, Homo sapien
tagaaataatcccactaaatgccca

SEQ ID NO: 5461979 - DNA, 25 bp, Homo sapien
tatacatgtgtagctgcacttgtgc

SEQ ID NO: 5461980 - DNA, 25 bp, Homo sapien
cagaatacaacagatctcactgggc

SEQ ID NO: 5461981 - DNA, 25 bp, Homo sapien
agacttcctggcagtaacaccgtga

SEQ ID NO: 5461982 - DNA, 25 bp, Homo sapien
tttccaggaccgctaggaagcagga

SEQ ID NO: 5461983 - DNA, 25 bp, Homo sapien
gaacaggctctttaagctccctgag

SEQ ID NO: 5461984 - DNA, 25 bp, Homo sapien
gacagcttgcataaatactcgagga

SEQ ID NO: 5461985 - DNA, 25 bp, Homo sapien
ccgctgccccccgtcgagcccgcgg

SEQ ID NO: 5461986 - DNA, 25 bp, Homo sapien
tgacaacgaccgagaagagtgccag

SEQ ID NO: 5461987 - DNA, 25 bp, Homo sapien
accgacaggcagatgggccccacgg

SEQ ID NO: 5461988 - DNA, 25 bp, Homo sapien
aacgaccgagaagagtgccaggatg

SEQ ID NO: 5461989 - DNA, 25 bp, Homo sapien
gacccaggtgacaacgaccgagaag

SEQ ID NO: 5461990 - DNA, 25 bp, Homo sapien
agcgccgcgcgcttgcagttctggc

SEQ ID NO: 5461991 - DNA, 25 bp, Homo sapien
gccggtccgcgtcgaagtagttgta

SEQ ID NO: 5461992 - DNA, 25 bp, Homo sapien
ttgcactcgtagtcctcaagcggag

SEQ ID NO: 5461993 - DNA, 25 bp, Homo sapien
cagttctggcagctgtcgtaggcgc

SEQ ID NO: 5461994 - DNA, 25 bp, Homo sapien
cacagctgggaatgttcctactttt

SEQ ID NO: 5461995 - DNA, 25 bp, Homo sapien
aaatcaccacacaagaggtggagaa

SEQ ID NO: 5461996 - DNA, 25 bp, Homo sapien
gctaatagtgaatgtgatgtcttca

SEQ ID NO: 5461997 - DNA, 25 bp, Homo sapien
ctggatgggaagcaagctgaagaaa

SEQ ID NO: 5461998 - DNA, 25 bp, Homo sapien
cacgtaactcttgtcgatttggcat

SEQ ID NO: 5461999 - DNA, 25 bp, Homo sapien
caccacgtaactcttgtcgatttgg

SEQ ID NO: 5462000 - DNA, 25 bp, Homo sapien
ccaggaggcaccacgtaactcttgt

SEQ ID NO: 5462001 - DNA, 25 bp, Homo sapien
gaggcaccacgtaactcttgtcgat

SEQ ID NO: 5462002 - DNA, 25 bp, Homo sapien
tggtgtggagactcctacctgttga

SEQ ID NO: 5462003 - DNA, 25 bp, Homo sapien
caacaagatttattccttcatcaga

SEQ ID NO: 5462004 - DNA, 25 bp, Homo sapien
gcaggtggtgtggagactcctacct

SEQ ID NO: 5462005 - DNA, 25 bp, Homo sapien
caacaacatcaacaagatttattcc

SEQ ID NO: 5462006 - DNA, 25 bp, Homo sapien
tccatggcagtagcaagcagactct

SEQ ID NO: 5462007 - DNA, 25 bp, Homo sapien
tccaaggccctgacatgggtaggaa

SEQ ID NO: 5462008 - DNA, 25 bp, Homo sapien
gctttggtgatctagtgactgtgaa

SEQ ID NO: 5462009 - DNA, 25 bp, Homo sapien
tgaagcgaaggtaggaagcagctca

SEQ ID NO: 5462010 - DNA, 25 bp, Homo sapien
tgccagtttctggctgtctagccct

SEQ ID NO: 5462011 - DNA, 25 bp, Homo sapien
tctgccagtttctggctgtctagcc

SEQ ID NO: 5462012 - DNA, 25 bp, Homo sapien
ctgccagtttctggctgtctagccc

SEQ ID NO: 5462013 - DNA, 25 bp, Homo sapien
ttctgccagtttctggctgtctagc

SEQ ID NO: 5462014 - DNA, 25 bp, Homo sapien
tctcactaggccttatagagcttgt

SEQ ID NO: 5462015 - DNA, 25 bp, Homo sapien
aagatgttcagagccaaattctctt

SEQ ID NO: 5462016 - DNA, 25 bp, Homo sapien
ccttcctagattgaatgactccagc

SEQ ID NO: 5462017 - DNA, 25 bp, Homo sapien
gactccagcacaatacaccttctta

SEQ ID NO: 5462018 - DNA, 25 bp, Homo sapien
ctaaattcgggagacacatgatgca

SEQ ID NO: 5462019 - DNA, 25 bp, Homo sapien
gaacaggtccccaacgatcacagct

SEQ ID NO: 5462020 - DNA, 25 bp, Homo sapien
tctttaacacataagcagaacaggt

SEQ ID NO: 5462021 - DNA, 25 bp, Homo sapien
ggagacacatgatgcaagtgccttc

SEQ ID NO: 5462022 - DNA, 25 bp, Homo sapien
gtgtgatcccgccagacatgacaat

SEQ ID NO: 5462023 - DNA, 25 bp, Homo sapien
tcctgggccggacatttctgtgtgt

SEQ ID NO: 5462024 - DNA, 25 bp, Homo sapien
tgacagccagaagcattgtggagag

SEQ ID NO: 5462025 - DNA, 25 bp, Homo sapien
cccttgactttgctctccagacagg

SEQ ID NO: 5462026 - DNA, 25 bp, Homo sapien
aagcggtaagcatctttgttctcaa

SEQ ID NO: 5462027 - DNA, 25 bp, Homo sapien
gaggcagagcggaaagaaagaagta

SEQ ID NO: 5462028 - DNA, 25 bp, Homo sapien
gaagtaggagaaagcggtaagcatc

SEQ ID NO: 5462029 - DNA, 25 bp, Homo sapien
ttctcaatgcggaaaacccagaagg

SEQ ID NO: 5462030 - DNA, 25 bp, Homo sapien
ggcagcgacgcggaagatgactcag

SEQ ID NO: 5462031 - DNA, 25 bp, Homo sapien
tgggtacttgagcaagctcaagggt

SEQ ID NO: 5462032 - DNA, 25 bp, Homo sapien
cccagttgccaaatcagaagggcag

SEQ ID NO: 5462033 - DNA, 25 bp, Homo sapien
aaatgttccccagttgccaaatcag

SEQ ID NO: 5462034 - DNA, 25 bp, Homo sapien
agaacggcgcggaccccacggagcg

SEQ ID NO: 5462035 - DNA, 25 bp, Homo sapien
aggattcccagctcgtcgcccgctt

SEQ ID NO: 5462036 - DNA, 25 bp, Homo sapien
ggctcttccccgctccggatgaagg

SEQ ID NO: 5462037 - DNA, 25 bp, Homo sapien
tcgcccgcttccagcgccgctgcgg

SEQ ID NO: 5462038 - DNA, 25 bp, Homo sapien
ggccttccagtaaccaggatgccac

SEQ ID NO: 5462039 - DNA, 25 bp, Homo sapien
aggtaaccatgggcaggtgttcgcc

SEQ ID NO: 5462040 - DNA, 25 bp, Homo sapien
agccaacggcaagggcggcgaggct

SEQ ID NO: 5462041 - DNA, 25 bp, Homo sapien
ggcggctgcggacgtgcgggtccct

SEQ ID NO: 5462042 - DNA, 25 bp, Homo sapien
gatgtccttggcacttccccgggga

SEQ ID NO: 5462043 - DNA, 25 bp, Homo sapien
tgtaagagttacgtaatggaacgga

SEQ ID NO: 5462044 - DNA, 25 bp, Homo sapien
tagttaaattcacgtagatgccagc

SEQ ID NO: 5462045 - DNA, 25 bp, Homo sapien
aatatgtaagagttacgtaatggaa

SEQ ID NO: 5462046 - DNA, 25 bp, Homo sapien
aataattcgaattccttgtacacag

SEQ ID NO: 5462047 - DNA, 25 bp, Homo sapien
tgccttttccctcggcaaagtcaaa

SEQ ID NO: 5462048 - DNA, 25 bp, Homo sapien
tcgaattccttgtacacagccacat

SEQ ID NO: 5462049 - DNA, 25 bp, Homo sapien
agtgtggcgcaggagaacagaaata

SEQ ID NO: 5462050 - DNA, 25 bp, Homo sapien
ctctttctttacctggattctcatg

SEQ ID NO: 5462051 - DNA, 25 bp, Homo sapien
ggcttaaagagtgggtaggaatcaa

SEQ ID NO: 5462052 - DNA, 25 bp, Homo sapien
caggggagcccatgaagtcttgagt

SEQ ID NO: 5462053 - DNA, 25 bp, Homo sapien
tgggtaggaatcaaacaggcaaaaa

SEQ ID NO: 5462054 - DNA, 25 bp, Homo sapien
caaatcggaattggcaactgagagc

SEQ ID NO: 5462055 - DNA, 25 bp, Homo sapien
gatagcagtcaatttcatcccgtgt

SEQ ID NO: 5462056 - DNA, 25 bp, Homo sapien
tttcatcccgtgtgccaaatcggaa

SEQ ID NO: 5462057 - DNA, 25 bp, Homo sapien
tcctatagacaagaagatagcagtc

SEQ ID NO: 5462058 - DNA, 25 bp, Homo sapien
ggtttcttaagacagaggttgccat

SEQ ID NO: 5462059 - DNA, 25 bp, Homo sapien
gatacttctattgtcactctcaccc

SEQ ID NO: 5462060 - DNA, 25 bp, Homo sapien
tctcacccacagatgatttacgagg

SEQ ID NO: 5462061 - DNA, 25 bp, Homo sapien
tgggtcctttgtgatacttctattg

SEQ ID NO: 5462062 - DNA, 25 bp, Homo sapien
tctaaaagccagttatgtgtgtacc

SEQ ID NO: 5462063 - DNA, 25 bp, Homo sapien
gggaatgtagatctgtgggtcataa

SEQ ID NO: 5462064 - DNA, 25 bp, Homo sapien
taattccatgtgcagggtgcttgtt

SEQ ID NO: 5462065 - DNA, 25 bp, Homo sapien
caagctgattttcaagagcagtatg

SEQ ID NO: 5462066 - DNA, 25 bp, Homo sapien
ttagcagcagcatagccatttgtgg

SEQ ID NO: 5462067 - DNA, 25 bp, Homo sapien
cagccattgcctgagtaacatccat

SEQ ID NO: 5462068 - DNA, 25 bp, Homo sapien
gcccttcctgggactaatggcttta

SEQ ID NO: 5462069 - DNA, 25 bp, Homo sapien
accaagcagcttaaagagtctgccc

SEQ ID NO: 5462070 - DNA, 25 bp, Homo sapien
ctgtggttgctgcagcttgaattgc

SEQ ID NO: 5462071 - DNA, 25 bp, Homo sapien
tgcggccagttgtttttctgccacc

SEQ ID NO: 5462072 - DNA, 25 bp, Homo sapien
ctattctgcggccagttgtttttct

SEQ ID NO: 5462073 - DNA, 25 bp, Homo sapien
ttctgcggccagttgtttttctgcc

SEQ ID NO: 5462074 - DNA, 25 bp, Homo sapien
cattgctattctgcggccagttgtt

SEQ ID NO: 5462075 - DNA, 25 bp, Homo sapien
ttcttgcatctgttgaaggctgagg

SEQ ID NO: 5462076 - DNA, 25 bp, Homo sapien
taaggttcaggatattggaaagttc

SEQ ID NO: 5462077 - DNA, 25 bp, Homo sapien
gtagctaaggttcaggatattggaa

SEQ ID NO: 5462078 - DNA, 25 bp, Homo sapien
ttgaaggctgaggtatttctgtctc

SEQ ID NO: 5462079 - DNA, 25 bp, Homo sapien
tcttttgtggcgctattctctgcag

SEQ ID NO: 5462080 - DNA, 25 bp, Homo sapien
tccttcttttgtggcgctattctct

SEQ ID NO: 5462081 - DNA, 25 bp, Homo sapien
ttttgtggcgctattctctgcagca

SEQ ID NO: 5462082 - DNA, 25 bp, Homo sapien
ttgtggcgctattctctgcagcagt

SEQ ID NO: 5462083 - DNA, 25 bp, Homo sapien
gaccgtcatgagtcatgcctgtccc

SEQ ID NO: 5462084 - DNA, 25 bp, Homo sapien
tgcctcagcacagcgaccgtcatga

SEQ ID NO: 5462085 - DNA, 25 bp, Homo sapien
cacagcgaccgtcatgagtcatgcc

SEQ ID NO: 5462086 - DNA, 25 bp, Homo sapien
tcagcacagcgaccgtcatgagtca

SEQ ID NO: 5462087 - DNA, 25 bp, Homo sapien
ggcttggtttcacgtctgctcttga

SEQ ID NO: 5462088 - DNA, 25 bp, Homo sapien
tggtttcacgtctgctcttgaggtc

SEQ ID NO: 5462089 - DNA, 25 bp, Homo sapien
tctgggcttggtttcacgtctgctc

SEQ ID NO: 5462090 - DNA, 25 bp, Homo sapien
tgggcttggtttcacgtctgctctt

SEQ ID NO: 5462091 - DNA, 25 bp, Homo sapien
ttgtctgggctcagttcctgtgttg

SEQ ID NO: 5462092 - DNA, 25 bp, Homo sapien
gcttgtctgggctcagttcctgtgt

SEQ ID NO: 5462093 - DNA, 25 bp, Homo sapien
gtgcttgtctgggctcagttcctgt

SEQ ID NO: 5462094 - DNA, 25 bp, Homo sapien
tgtctgggctcagttcctgtgttgc

SEQ ID NO: 5462095 - DNA, 25 bp, Homo sapien
tcctgttgagacatttctttgcctg

SEQ ID NO: 5462096 - DNA, 25 bp, Homo sapien
tcatcgtcatcaacagccatgtcct

SEQ ID NO: 5462097 - DNA, 25 bp, Homo sapien
ctttgcctgctctgatctgagtacc

SEQ ID NO: 5462098 - DNA, 25 bp, Homo sapien
gccatgtcctgttgagacatttctt

SEQ ID NO: 5462099 - DNA, 25 bp, Homo sapien
gagactgaattcttatgcttatcat

SEQ ID NO: 5462100 - DNA, 25 bp, Homo sapien
cactgctcggcttgagactgaattc

SEQ ID NO: 5462101 - DNA, 25 bp, Homo sapien
cggtagtcctgtgcactgctcggct

SEQ ID NO: 5462102 - DNA, 25 bp, Homo sapien
tgaccagtaactgtctcccggtagt

SEQ ID NO: 5462103 - DNA, 25 bp, Homo sapien
taaaatcggtgcatggcctggttca

SEQ ID NO: 5462104 - DNA, 25 bp, Homo sapien
tattctgtgtggtcattgtaaggaa

SEQ ID NO: 5462105 - DNA, 25 bp, Homo sapien
aaggtagtgtgtgcgttcctgccag

SEQ ID NO: 5462106 - DNA, 25 bp, Homo sapien
aagcgtaaggtaatgtgagaaggca

SEQ ID NO: 5462107 - DNA, 25 bp, Homo sapien
ttaatgtttctggtgtgtagtttcc

SEQ ID NO: 5462108 - DNA, 25 bp, Homo sapien
tatgacctcccaggtcctttacagg

SEQ ID NO: 5462109 - DNA, 25 bp, Homo sapien
cctgtcctcgggcacttaatgtttc

SEQ ID NO: 5462110 - DNA, 25 bp, Homo sapien
gccatttaatgtgggactcctgtcc

SEQ ID NO: 5462111 - DNA, 25 bp, Homo sapien
gtcccagatagagcccgttgttccc

SEQ ID NO: 5462112 - DNA, 25 bp, Homo sapien
ggagtagaattgtagctgtcccaga

SEQ ID NO: 5462113 - DNA, 25 bp, Homo sapien
ctgttggtggagtagaattgtagct

SEQ ID NO: 5462114 - DNA, 25 bp, Homo sapien
gtagctgtcccagatagagcccgtt

SEQ ID NO: 5462115 - DNA, 25 bp, Homo sapien
aattcggttggatctgctaaagtga

SEQ ID NO: 5462116 - DNA, 25 bp, Homo sapien
ccttttggacttatgccagctgtaa

SEQ ID NO: 5462117 - DNA, 25 bp, Homo sapien
catttactgtatcgtgtggatggat

SEQ ID NO: 5462118 - DNA, 25 bp, Homo sapien
caggtagaaaattgtttggatcatc

SEQ ID NO: 5462119 - DNA, 25 bp, Homo sapien
gagcatcctgatatggcagagggta

SEQ ID NO: 5462120 - DNA, 25 bp, Homo sapien
tcttgctgtggctaaacctgattcc

SEQ ID NO: 5462121 - DNA, 25 bp, Homo sapien
tctactgcctgcaggcggattggtc

SEQ ID NO: 5462122 - DNA, 25 bp, Homo sapien
cattgccaagttacatgtagacccc

SEQ ID NO: 5462123 - DNA, 25 bp, Homo sapien
tccatgacagtcaccaagtggtcca

SEQ ID NO: 5462124 - DNA, 25 bp, Homo sapien
gccctgcgtgtgcagttccatgaca

SEQ ID NO: 5462125 - DNA, 25 bp, Homo sapien
tatccaaaatcttggcgtgaggctt

SEQ ID NO: 5462126 - DNA, 25 bp, Homo sapien
ttcacatgagacatgccgagggcgc

SEQ ID NO: 5462127 - DNA, 25 bp, Homo sapien
gaacatttctggaaacattccctcc

SEQ ID NO: 5462128 - DNA, 25 bp, Homo sapien
tggaccctggaaattttgtattctg

SEQ ID NO: 5462129 - DNA, 25 bp, Homo sapien
tatggaccctggaaattttgtattc

SEQ ID NO: 5462130 - DNA, 25 bp, Homo sapien
cttgtatggaccctggaaattttgt

SEQ ID NO: 5462131 - DNA, 25 bp, Homo sapien
gcactattgcagtagatgttctcat

SEQ ID NO: 5462132 - DNA, 25 bp, Homo sapien
ttgcactattgcagtagatgttctc

SEQ ID NO: 5462133 - DNA, 25 bp, Homo sapien
tcaggcctgcgtcatctttattttg

SEQ ID NO: 5462134 - DNA, 25 bp, Homo sapien
attttgcactattgcagtagatgtt

SEQ ID NO: 5462135 - DNA, 25 bp, Homo sapien
ccacgttagcacagtcatcatcgat

SEQ ID NO: 5462136 - DNA, 25 bp, Homo sapien
tccacgttagcacagtcatcatcga

SEQ ID NO: 5462137 - DNA, 25 bp, Homo sapien
ctccacgttagcacagtcatcatcg

SEQ ID NO: 5462138 - DNA, 25 bp, Homo sapien
gatggccacagtatccactttggaa

SEQ ID NO: 5462139 - DNA, 25 bp, Homo sapien
cactttggaagcagcctggtaacta

SEQ ID NO: 5462140 - DNA, 25 bp, Homo sapien
cgtagtccctattgctgaggtcaag

SEQ ID NO: 5462141 - DNA, 25 bp, Homo sapien
tatagacaagcccatttaatccagc

SEQ ID NO: 5462142 - DNA, 25 bp, Homo sapien
cagtggctctgattggcagcaaagg

SEQ ID NO: 5462143 - DNA, 25 bp, Homo sapien
aaagtgcctcctggcatcagaagca

SEQ ID NO: 5462144 - DNA, 25 bp, Homo sapien
cctggataataagtccgtggctgca

SEQ ID NO: 5462145 - DNA, 25 bp, Homo sapien
gctctctgcatctatagcatggcat

SEQ ID NO: 5462146 - DNA, 25 bp, Homo sapien
gatcctcttggttcgtcagcttgta

SEQ ID NO: 5462147 - DNA, 25 bp, Homo sapien
gctggagtgaccataggattctgga

SEQ ID NO: 5462148 - DNA, 25 bp, Homo sapien
tgggtggcgtcctgatcaccgcact

SEQ ID NO: 5462149 - DNA, 25 bp, Homo sapien
tggaccttcatcgactgcctggact

SEQ ID NO: 5462150 - DNA, 25 bp, Homo sapien
ttgcaggattccaggtaccattacc

SEQ ID NO: 5462151 - DNA, 25 bp, Homo sapien
cttctgacccatgaaaccaactggc

SEQ ID NO: 5462152 - DNA, 25 bp, Homo sapien
tcatgttggaataaggatctgctct

SEQ ID NO: 5462153 - DNA, 25 bp, Homo sapien
tataagtcctgctgttcatgttgga

SEQ ID NO: 5462154 - DNA, 25 bp, Homo sapien
ggccctctgcccatcgtcagcagtt

SEQ ID NO: 5462155 - DNA, 25 bp, Homo sapien
ttttttgctttcatacaaacctgga

SEQ ID NO: 5462156 - DNA, 25 bp, Homo sapien
ttttgctttcatacaaacctggaag

SEQ ID NO: 5462157 - DNA, 25 bp, Homo sapien
tgctttcatacaaacctggaaggca

SEQ ID NO: 5462158 - DNA, 25 bp, Homo sapien
gaagggccttagcttacaggtactc

SEQ ID NO: 5462159 - DNA, 25 bp, Homo sapien
aattgtggttgacttgtctgaagcc

SEQ ID NO: 5462160 - DNA, 25 bp, Homo sapien
ccagtatttgcagcacaactcaggg

SEQ ID NO: 5462161 - DNA, 25 bp, Homo sapien
gcaaagatcaagatgacctgccgtt

SEQ ID NO: 5462162 - DNA, 25 bp, Homo sapien
gatgaaaacgtagaagacacccctg

SEQ ID NO: 5462163 - DNA, 25 bp, Homo sapien
agttttgctcaaacctgcaccgtca

SEQ ID NO: 5462164 - DNA, 25 bp, Homo sapien
gaattactccaaaacgtgcccagtg

SEQ ID NO: 5462165 - DNA, 25 bp, Homo sapien
caatgtaagcctatggtctggccaa

SEQ ID NO: 5462166 - DNA, 25 bp, Homo sapien
tgccatctctgcacgcacagcgtca

SEQ ID NO: 5462167 - DNA, 25 bp, Homo sapien
gccatctctgcacgcacagcgtcat

SEQ ID NO: 5462168 - DNA, 25 bp, Homo sapien
cttcttgttcctctcttggcagaca

SEQ ID NO: 5462169 - DNA, 25 bp, Homo sapien
ttcttgttcctctcttggcagacat

SEQ ID NO: 5462170 - DNA, 25 bp, Homo sapien
ccttcttgttcctctcttggcagac

SEQ ID NO: 5462171 - DNA, 25 bp, Homo sapien
ttctgcttaaggcaatggtgtccct

SEQ ID NO: 5462172 - DNA, 25 bp, Homo sapien
aaaacacatcctttgacctagcgac

SEQ ID NO: 5462173 - DNA, 25 bp, Homo sapien
ccagaacttggatatcagatgggtc

SEQ ID NO: 5462174 - DNA, 25 bp, Homo sapien
cctcttctgtatgtgtgcgccaggt

SEQ ID NO: 5462175 - DNA, 25 bp, Homo sapien
tatgcaggagtaatccgttccaatg

SEQ ID NO: 5462176 - DNA, 25 bp, Homo sapien
cacaagctggcctaatatgcaggga

SEQ ID NO: 5462177 - DNA, 25 bp, Homo sapien
cagtaacatgtatggcctatggcaa

SEQ ID NO: 5462178 - DNA, 25 bp, Homo sapien
gaaatgggatcttgttatgcaggag

SEQ ID NO: 5462179 - DNA, 25 bp, Homo sapien
tcaaagcccaaatagatgttccctg

SEQ ID NO: 5462180 - DNA, 25 bp, Homo sapien
aaagggacacctgggaagagaatca

SEQ ID NO: 5462181 - DNA, 25 bp, Homo sapien
caaatagatgttccctgtggaggag

SEQ ID NO: 5462182 - DNA, 25 bp, Homo sapien
gagaatcacaccacagagaccaatc

SEQ ID NO: 5462183 - DNA, 25 bp, Homo sapien
cgctttgacccctggcaaagatctc

SEQ ID NO: 5462184 - DNA, 25 bp, Homo sapien
gaccccaagcttcccgacgctttga

SEQ ID NO: 5462185 - DNA, 25 bp, Homo sapien
agatctctgcacatcgcccggggaa

SEQ ID NO: 5462186 - DNA, 25 bp, Homo sapien
caacattgatttctagggaggagca

SEQ ID NO: 5462187 - DNA, 25 bp, Homo sapien
taaactataaacacccatgcagagc

SEQ ID NO: 5462188 - DNA, 25 bp, Homo sapien
cactggctatgaaaagagaacgctt

SEQ ID NO: 5462189 - DNA, 25 bp, Homo sapien
taaaaatgaacatatgggcccactc

SEQ ID NO: 5462190 - DNA, 25 bp, Homo sapien
tgacaggccatgctaccagaaggca

SEQ ID NO: 5462191 - DNA, 25 bp, Homo sapien
aaaggaagcatgctgccctatcatc

SEQ ID NO: 5462192 - DNA, 25 bp, Homo sapien
ccaactcacacgtaaaaaggaagca

SEQ ID NO: 5462193 - DNA, 25 bp, Homo sapien
caaactattttggaatctaagccag

SEQ ID NO: 5462194 - DNA, 25 bp, Homo sapien
aaggccttcacagcggtccaatgga

SEQ ID NO: 5462195 - DNA, 25 bp, Homo sapien
taagtggtacgcacataaaagctcc

SEQ ID NO: 5462196 - DNA, 25 bp, Homo sapien
gtctattggtacaacagagagaacc

SEQ ID NO: 5462197 - DNA, 25 bp, Homo sapien
gactcctcttttcagcaaggttaag

SEQ ID NO: 5462198 - DNA, 25 bp, Homo sapien
gaaaacaagggagatatagctgacc

SEQ ID NO: 5462199 - DNA, 25 bp, Homo sapien
caacacagggcagggtatactatta

SEQ ID NO: 5462200 - DNA, 25 bp, Homo sapien
tacatgatgtgaggctcgaacccac

SEQ ID NO: 5462201 - DNA, 25 bp, Homo sapien
ttttttgagggcaccgatggactac

SEQ ID NO: 5462202 - DNA, 25 bp, Homo sapien
gccactgggccaactgaatgtactg

SEQ ID NO: 5462203 - DNA, 25 bp, Homo sapien
tatcacagttgattagcatgcatcc

SEQ ID NO: 5462204 - DNA, 25 bp, Homo sapien
tgttaaatggactctatcacagttg

SEQ ID NO: 5462205 - DNA, 25 bp, Homo sapien
taatgtctattccatcttgggaact

SEQ ID NO: 5462206 - DNA, 25 bp, Homo sapien
tgagtttgtattcacgtgtctaaag

SEQ ID NO: 5462207 - DNA, 25 bp, Homo sapien
tcataagaccctcagcaagaagatc

SEQ ID NO: 5462208 - DNA, 25 bp, Homo sapien
caggtgctcagatgtatttccaagg

SEQ ID NO: 5462209 - DNA, 25 bp, Homo sapien
ccaaggttaggccacagctattcaa

SEQ ID NO: 5462210 - DNA, 25 bp, Homo sapien
tgagacttcagtaaagttaacgggc

SEQ ID NO: 5462211 - DNA, 25 bp, Homo sapien
ggttaatgcgaagatcaatcagatg

SEQ ID NO: 5462212 - DNA, 25 bp, Homo sapien
cagatttcttataacgcacggagcc

SEQ ID NO: 5462213 - DNA, 25 bp, Homo sapien
tataacgcacggagccaggtttctc

SEQ ID NO: 5462214 - DNA, 25 bp, Homo sapien
caaaggtgaatcgagttctgttcca

SEQ ID NO: 5462215 - DNA, 25 bp, Homo sapien
aaaacttctgggttcaccatgtgct

SEQ ID NO: 5462216 - DNA, 25 bp, Homo sapien
taaaggtgccagtgatttagccatt

SEQ ID NO: 5462217 - DNA, 25 bp, Homo sapien
taggtcttaccagcttccagttaaa

SEQ ID NO: 5462218 - DNA, 25 bp, Homo sapien
ggcagcttttgagtgcaaaccatca

SEQ ID NO: 5462219 - DNA, 25 bp, Homo sapien
cataattctgtccagcagcccatga

SEQ ID NO: 5462220 - DNA, 25 bp, Homo sapien
actgcataattctgtccagcagccc

SEQ ID NO: 5462221 - DNA, 25 bp, Homo sapien
tgcataattctgtccagcagcccat

SEQ ID NO: 5462222 - DNA, 25 bp, Homo sapien
ggaggcacatcgagcaactgcataa

SEQ ID NO: 5462223 - DNA, 25 bp, Homo sapien
tatctttatgatgctgcgtatttct

SEQ ID NO: 5462224 - DNA, 25 bp, Homo sapien
tatgaaagaacgtggtgtatcttcc

SEQ ID NO: 5462225 - DNA, 25 bp, Homo sapien
gagagaagtgatatctttatgatgc

SEQ ID NO: 5462226 - DNA, 25 bp, Homo sapien
ctgcacccattaatgagagaagtga

SEQ ID NO: 5462227 - DNA, 25 bp, Homo sapien
caaacatagaacgaatgctggcctc

SEQ ID NO: 5462228 - DNA, 25 bp, Homo sapien
tacattctggagaccgctgctctaa

SEQ ID NO: 5462229 - DNA, 25 bp, Homo sapien
gagcaaaacttcttccacggattta

SEQ ID NO: 5462230 - DNA, 25 bp, Homo sapien
tcccataggtaaaagctactagcaa

SEQ ID NO: 5462231 - DNA, 25 bp, Homo sapien
ccagcctggccaacatggtgaaaca

SEQ ID NO: 5462232 - DNA, 25 bp, Homo sapien
ggctgaggcgggtggtcagaagttc

SEQ ID NO: 5462233 - DNA, 25 bp, Homo sapien
ctgaggcgggtggtcagaagttcga

SEQ ID NO: 5462234 - DNA, 25 bp, Homo sapien
gaggcgggtggtcagaagttcgagt

SEQ ID NO: 5462235 - DNA, 25 bp, Homo sapien
caggaagaagggtagtgcgtgccac

SEQ ID NO: 5462236 - DNA, 25 bp, Homo sapien
gctgctatggtcttcaggaggccag

SEQ ID NO: 5462237 - DNA, 25 bp, Homo sapien
ggaggccaggaagaagggtagtgcg

SEQ ID NO: 5462238 - DNA, 25 bp, Homo sapien
ggcatcttacgatttgctgctatgg

SEQ ID NO: 5462239 - DNA, 25 bp, Homo sapien
gcagagatatccacacctagtttat

SEQ ID NO: 5462240 - DNA, 25 bp, Homo sapien
tgcagagatatccacacctagttta

SEQ ID NO: 5462241 - DNA, 25 bp, Homo sapien
attcagctgttttaggattacttat

SEQ ID NO: 5462242 - DNA, 25 bp, Homo sapien
cagctgttttaggattacttatgtg

SEQ ID NO: 5462243 - DNA, 25 bp, Homo sapien
tccatactgacttgtggcagaacag

SEQ ID NO: 5462244 - DNA, 25 bp, Homo sapien
agataatgcaagtatggtgcctggc

SEQ ID NO: 5462245 - DNA, 25 bp, Homo sapien
gctgagtacccaccaatcgaagaga

SEQ ID NO: 5462246 - DNA, 25 bp, Homo sapien
cagtaggactgacaacagaattcaa

SEQ ID NO: 5462247 - DNA, 25 bp, Homo sapien
tcatgtcggagaagttcagtgagct

SEQ ID NO: 5462248 - DNA, 25 bp, Homo sapien
gccagcggctgccatgtcatgtcgg

SEQ ID NO: 5462249 - DNA, 25 bp, Homo sapien
gttcagtgagcttattaagaggaaa

SEQ ID NO: 5462250 - DNA, 25 bp, Homo sapien
gggcaaaggtaagtgcttcagtgaa

SEQ ID NO: 5462251 - DNA, 25 bp, Homo sapien
tagctatggtgtaagttttcgggag

SEQ ID NO: 5462252 - DNA, 25 bp, Homo sapien
aaatacatcctggtcagaagtttgg

SEQ ID NO: 5462253 - DNA, 25 bp, Homo sapien
gattcccatcacctatgacttctga

SEQ ID NO: 5462254 - DNA, 25 bp, Homo sapien
gtaagttttcgggagagtcatctga

SEQ ID NO: 5462255 - DNA, 25 bp, Homo sapien
attaagtgaagttttcagagcatac

SEQ ID NO: 5462256 - DNA, 25 bp, Homo sapien
gaacaaaccataaacttcattggat

SEQ ID NO: 5462257 - DNA, 25 bp, Homo sapien
tgtttcaacatatgctactagctga

SEQ ID NO: 5462258 - DNA, 25 bp, Homo sapien
taacagactctgaaggatcgcaaaa

SEQ ID NO: 5462259 - DNA, 25 bp, Homo sapien
tctcaccatctcctttcggtaagct

SEQ ID NO: 5462260 - DNA, 25 bp, Homo sapien
taattaggtcagctctcaccatctc

SEQ ID NO: 5462261 - DNA, 25 bp, Homo sapien
caccatctcctttcggtaagctaat

SEQ ID NO: 5462262 - DNA, 25 bp, Homo sapien
cttttttgttaattaggtcagctct

SEQ ID NO: 5462263 - DNA, 25 bp, Homo sapien
ctcgtcctatgcaagcagatggata

SEQ ID NO: 5462264 - DNA, 25 bp, Homo sapien
tacttgctagacagtttgcactgcc

SEQ ID NO: 5462265 - DNA, 25 bp, Homo sapien
gagccacacattgagaataaacttg

SEQ ID NO: 5462266 - DNA, 25 bp, Homo sapien
tataactccaccgtattagtgaggt

SEQ ID NO: 5462267 - DNA, 25 bp, Homo sapien
tgatcttagcaggtttcatctactg

SEQ ID NO: 5462268 - DNA, 25 bp, Homo sapien
tcaaagaatgctctcactgaatgag

SEQ ID NO: 5462269 - DNA, 25 bp, Homo sapien
aaatgttaatgtcttccggaatggg

SEQ ID NO: 5462270 - DNA, 25 bp, Homo sapien
tgaatgagaaccacgaagtgactgt

SEQ ID NO: 5462271 - DNA, 25 bp, Homo sapien
tccattaggaaaaaccacttcagca

SEQ ID NO: 5462272 - DNA, 25 bp, Homo sapien
cattaggaaaaaccacttcagcagc

SEQ ID NO: 5462273 - DNA, 25 bp, Homo sapien
ggaaaggtatgtgattttccattag

SEQ ID NO: 5462274 - DNA, 25 bp, Homo sapien
aaggtatgtgattttccattaggaa

SEQ ID NO: 5462275 - DNA, 25 bp, Homo sapien
cactgaacatggtgacaataatatc

SEQ ID NO: 5462276 - DNA, 25 bp, Homo sapien
gaacatggtgacaataatatcaaga

SEQ ID NO: 5462277 - DNA, 25 bp, Homo sapien
tgaacatggtgacaataatatcaag

SEQ ID NO: 5462278 - DNA, 25 bp, Homo sapien
actgaacatggtgacaataatatca

SEQ ID NO: 5462279 - DNA, 25 bp, Homo sapien
tctagtatttactgttattctggaa

SEQ ID NO: 5462280 - DNA, 25 bp, Homo sapien
tcagttcccgtgcattcaataaaaa

SEQ ID NO: 5462281 - DNA, 25 bp, Homo sapien
tttactgttattctggaatgatccc

SEQ ID NO: 5462282 - DNA, 25 bp, Homo sapien
cttagtaaagtcagttcccgtgcat

SEQ ID NO: 5462283 - DNA, 25 bp, Homo sapien
ggacgacaccattgctatcatagat

SEQ ID NO: 5462284 - DNA, 25 bp, Homo sapien
cattgctatcatagataactggata

SEQ ID NO: 5462285 - DNA, 25 bp, Homo sapien
cattgaaaggacgacaccattgcta

SEQ ID NO: 5462286 - DNA, 25 bp, Homo sapien
atgggaggcattgaaaggacgacac

SEQ ID NO: 5462287 - DNA, 25 bp, Homo sapien
gggcccgacaaagtgtccaaatcat

SEQ ID NO: 5462288 - DNA, 25 bp, Homo sapien
gaaggacgctttgcagtataagtaa

SEQ ID NO: 5462289 - DNA, 25 bp, Homo sapien
tcacaggctgtatactccttggtct

SEQ ID NO: 5462290 - DNA, 25 bp, Homo sapien
ttgaatttgatatctgaaggacgct

SEQ ID NO: 5462291 - DNA, 25 bp, Homo sapien
taatttctcctgaagttcaatgaag

SEQ ID NO: 5462292 - DNA, 25 bp, Homo sapien
ctttatattacggagaactgctgct

SEQ ID NO: 5462293 - DNA, 25 bp, Homo sapien
gctaccgcaaaaggacgtatcttag

SEQ ID NO: 5462294 - DNA, 25 bp, Homo sapien
gtcatatcgatctttagtaaacttt

SEQ ID NO: 5462295 - DNA, 25 bp, Homo sapien
tttccatcaggcattacccgtttat

SEQ ID NO: 5462296 - DNA, 25 bp, Homo sapien
catcaggcattacccgtttatacac

SEQ ID NO: 5462297 - DNA, 25 bp, Homo sapien
cattacccgtttatacactggagcc

SEQ ID NO: 5462298 - DNA, 25 bp, Homo sapien
caggcattacccgtttatacactgg

SEQ ID NO: 5462299 - DNA, 25 bp, Homo sapien
agctaaagctacgttcctctacaag

SEQ ID NO: 5462300 - DNA, 25 bp, Homo sapien
taagggtatttattgctagctctcc

SEQ ID NO: 5462301 - DNA, 25 bp, Homo sapien
cacagagccgtcataagatctttgg

SEQ ID NO: 5462302 - DNA, 25 bp, Homo sapien
tagagaggccaactaacttgctcaa

SEQ ID NO: 5462303 - DNA, 25 bp, Homo sapien
tcctcgaaccaatccttccagacac

SEQ ID NO: 5462304 - DNA, 25 bp, Homo sapien
cctcgaaccaatccttccagacaca

SEQ ID NO: 5462305 - DNA, 25 bp, Homo sapien
cctgaagtcctcgaaccaatccttc

SEQ ID NO: 5462306 - DNA, 25 bp, Homo sapien
gaagtcctcgaaccaatccttccag

SEQ ID NO: 5462307 - DNA, 25 bp, Homo sapien
gaacaacatcagaggctcctgctgc

SEQ ID NO: 5462308 - DNA, 25 bp, Homo sapien
ttgtaaagaacaacatcagaggctc

SEQ ID NO: 5462309 - DNA, 25 bp, Homo sapien
gcagggacgtcaattttgtaaagaa

SEQ ID NO: 5462310 - DNA, 25 bp, Homo sapien
tcctgctgcctttacattaccttgt

SEQ ID NO: 5462311 - DNA, 25 bp, Homo sapien
tatgtgccaaagtcccacctgagga

SEQ ID NO: 5462312 - DNA, 25 bp, Homo sapien
tctaaaacctaaatcctgtgggcac

SEQ ID NO: 5462313 - DNA, 25 bp, Homo sapien
gaaccacaggagtctatgcaatgct

SEQ ID NO: 5462314 - DNA, 25 bp, Homo sapien
tggtgctgggctccaaaaaacctct

SEQ ID NO: 5462315 - DNA, 25 bp, Homo sapien
tattttcaaaccacagtttgctgca

SEQ ID NO: 5462316 - DNA, 25 bp, Homo sapien
tttcaaaccacagtttgctgcaggt

SEQ ID NO: 5462317 - DNA, 25 bp, Homo sapien
caaaccacagtttgctgcaggtaac

SEQ ID NO: 5462318 - DNA, 25 bp, Homo sapien
ctattttcaaaccacagtttgctgc

SEQ ID NO: 5462319 - DNA, 25 bp, Homo sapien
ctttgtcattgaccccataatttat

SEQ ID NO: 5462320 - DNA, 25 bp, Homo sapien
ggagagtcactacagacaccaagaa

SEQ ID NO: 5462321 - DNA, 25 bp, Homo sapien
tattccgactagattaccaaattct

SEQ ID NO: 5462322 - DNA, 25 bp, Homo sapien
cttactaggtgttacttttggcagc

SEQ ID NO: 5462323 - DNA, 25 bp, Homo sapien
ggtgcattgtattgctccagttttt

SEQ ID NO: 5462324 - DNA, 25 bp, Homo sapien
tttttcaattagttccactctctcc

SEQ ID NO: 5462325 - DNA, 25 bp, Homo sapien
ggtttgtatagttatgactttttca

SEQ ID NO: 5462326 - DNA, 25 bp, Homo sapien
tccacggtgcattgtattgctccag

SEQ ID NO: 5462327 - DNA, 25 bp, Homo sapien
gatgctggtgatcagtggacaaact

SEQ ID NO: 5462328 - DNA, 25 bp, Homo sapien
ctggtgatcagtggacaaactgcac

SEQ ID NO: 5462329 - DNA, 25 bp, Homo sapien
cttggacataaaagctctaggtctt

SEQ ID NO: 5462330 - DNA, 25 bp, Homo sapien
ttggacataaaagctctaggtcttt

SEQ ID NO: 5462331 - DNA, 25 bp, Homo sapien
cagggctgtcacaaattctacggag

SEQ ID NO: 5462332 - DNA, 25 bp, Homo sapien
agggctgtcacaaattctacggagc

SEQ ID NO: 5462333 - DNA, 25 bp, Homo sapien
tcaagacccactatgcagtggattc

SEQ ID NO: 5462334 - DNA, 25 bp, Homo sapien
ccttagcttcagacttcacagcctg

SEQ ID NO: 5462335 - DNA, 25 bp, Homo sapien
agagctcaagacccactatgcagtg

SEQ ID NO: 5462336 - DNA, 25 bp, Homo sapien
agctcaagacccactatgcagtgga

SEQ ID NO: 5462337 - DNA, 25 bp, Homo sapien
tcaaaacatagttcatcaaattctt

SEQ ID NO: 5462338 - DNA, 25 bp, Homo sapien
aacatagttcatcaaattcttcgtc

SEQ ID NO: 5462339 - DNA, 25 bp, Homo sapien
aaacatagttcatcaaattcttcgt

SEQ ID NO: 5462340 - DNA, 25 bp, Homo sapien
aaaacatagttcatcaaattcttcg

SEQ ID NO: 5462341 - DNA, 25 bp, Homo sapien
tttgcatgtacacagaagaaaaaca

SEQ ID NO: 5462342 - DNA, 25 bp, Homo sapien
cactgggaagtttgcatgtacacag

SEQ ID NO: 5462343 - DNA, 25 bp, Homo sapien
acagccttgaccgccttggtttaag

SEQ ID NO: 5462344 - DNA, 25 bp, Homo sapien
agccttgaccgccttggtttaagcg

SEQ ID NO: 5462345 - DNA, 25 bp, Homo sapien
actacagccttgaccgccttggttt

SEQ ID NO: 5462346 - DNA, 25 bp, Homo sapien
gccttgaccgccttggtttaagcga

SEQ ID NO: 5462347 - DNA, 25 bp, Homo sapien
gatcacgcttcacgctgacagtcgg

SEQ ID NO: 5462348 - DNA, 25 bp, Homo sapien
ttggaagagcagatcacgcttcacg

SEQ ID NO: 5462349 - DNA, 25 bp, Homo sapien
gagcagatcacgcttcacgctgaca

SEQ ID NO: 5462350 - DNA, 25 bp, Homo sapien
cacgcttcacgctgacagtcggcat

SEQ ID NO: 5462351 - DNA, 25 bp, Homo sapien
gaatatcgccattctgctggcaaca

SEQ ID NO: 5462352 - DNA, 25 bp, Homo sapien
taggacccgcctcttcttgtgcgtg

SEQ ID NO: 5462353 - DNA, 25 bp, Homo sapien
ttccctagcgaagcgcgtaggaccc

SEQ ID NO: 5462354 - DNA, 25 bp, Homo sapien
tcatgccattacctcgctgattaaa

SEQ ID NO: 5462355 - DNA, 25 bp, Homo sapien
cttggttatccaagcgcccggatgg

SEQ ID NO: 5462356 - DNA, 25 bp, Homo sapien
cacacggatgcgcttgacagcttgg

SEQ ID NO: 5462357 - DNA, 25 bp, Homo sapien
tccagctggtgtgcgattcctcaaa

SEQ ID NO: 5462358 - DNA, 25 bp, Homo sapien
aaggcaagcgctgggtgatcgatca

SEQ ID NO: 5462359 - DNA, 25 bp, Homo sapien
catgtgcccgtgagcacccaatctt

SEQ ID NO: 5462360 - DNA, 25 bp, Homo sapien
tcacatgtgcccgtgagcacccaat

SEQ ID NO: 5462361 - DNA, 25 bp, Homo sapien
tgtgcccgtgagcacccaatcttca

SEQ ID NO: 5462362 - DNA, 25 bp, Homo sapien
tttcacatgtgcccgtgagcaccca

SEQ ID NO: 5462363 - DNA, 25 bp, Homo sapien
tagttcgccatatacagctagagga

SEQ ID NO: 5462364 - DNA, 25 bp, Homo sapien
cacagatgactgtaggataaggttg

SEQ ID NO: 5462365 - DNA, 25 bp, Homo sapien
gagcctttggtcatatcaacaacaa

SEQ ID NO: 5462366 - DNA, 25 bp, Homo sapien
gcccatttgggagacactgtgtaaa

SEQ ID NO: 5462367 - DNA, 25 bp, Homo sapien
aaaatacagcagaaagcgggggcgg

SEQ ID NO: 5462368 - DNA, 25 bp, Homo sapien
aaatacagcagaaagcgggggcggg

SEQ ID NO: 5462369 - DNA, 25 bp, Homo sapien
ctggcaggaggaaacgagtccgcca

SEQ ID NO: 5462370 - DNA, 25 bp, Homo sapien
ggctcctcggattcagaaatattca

SEQ ID NO: 5462371 - DNA, 25 bp, Homo sapien
aacaaagaggctcctcggattcaga

SEQ ID NO: 5462372 - DNA, 25 bp, Homo sapien
caactgccgtggtctcatgtgcctg

SEQ ID NO: 5462373 - DNA, 25 bp, Homo sapien
ccctttggatgtcagcgccttgtag

SEQ ID NO: 5462374 - DNA, 25 bp, Homo sapien
tgtcagcgccttgtaggacgaagct

SEQ ID NO: 5462375 - DNA, 25 bp, Homo sapien
gatttgtgaggcctgtttgtgttcc

SEQ ID NO: 5462376 - DNA, 25 bp, Homo sapien
aggacgaagcttctaccttgatttg

SEQ ID NO: 5462377 - DNA, 25 bp, Homo sapien
gaattgtaacaagattatagaaggg

SEQ ID NO: 5462378 - DNA, 25 bp, Homo sapien
tgatgatataagagcagaatcatac

SEQ ID NO: 5462379 - DNA, 25 bp, Homo sapien
gcaaatgcgtttcatttagccacaa

SEQ ID NO: 5462380 - DNA, 25 bp, Homo sapien
gctgaaataaaggaatggtgtaatt

SEQ ID NO: 5462381 - DNA, 25 bp, Homo sapien
ggcaatgggtaaactttccagccag

SEQ ID NO: 5462382 - DNA, 25 bp, Homo sapien
gcaatgggtaaactttccagccagg

SEQ ID NO: 5462383 - DNA, 25 bp, Homo sapien
tttcctcttcacattggcttctgct

SEQ ID NO: 5462384 - DNA, 25 bp, Homo sapien
cctgtactgccctaacatgagggct

SEQ ID NO: 5462385 - DNA, 25 bp, Homo sapien
caagttccaagaccgcacaaagcag

SEQ ID NO: 5462386 - DNA, 25 bp, Homo sapien
gccctaacatgagggctctatgcct

SEQ ID NO: 5462387 - DNA, 25 bp, Homo sapien
gccccagtgaagactgtgagtaggg

SEQ ID NO: 5462388 - DNA, 25 bp, Homo sapien
ctaatagtctggaggcgaatggtcc

SEQ ID NO: 5462389 - DNA, 25 bp, Homo sapien
ctggaggcgaatggtccaggatggt

SEQ ID NO: 5462390 - DNA, 25 bp, Homo sapien
gctgttcaccagcccctagggtgtt

SEQ ID NO: 5462391 - DNA, 25 bp, Homo sapien
tgttcaccagcccctagggtgttgt

SEQ ID NO: 5462392 - DNA, 25 bp, Homo sapien
ggcagaaacttaatgccagagagaa

SEQ ID NO: 5462393 - DNA, 25 bp, Homo sapien
gaagctgagctatggaaggcaccac

SEQ ID NO: 5462394 - DNA, 25 bp, Homo sapien
gaaagtccggtaaggagtaagctga

SEQ ID NO: 5462395 - DNA, 25 bp, Homo sapien
gcaccacctaactgaaggttgaggg

SEQ ID NO: 5462396 - DNA, 25 bp, Homo sapien
gcccctgaagaggtgtgccttgaca

SEQ ID NO: 5462397 - DNA, 25 bp, Homo sapien
gaagaggtgtgccttgacacacaga

SEQ ID NO: 5462398 - DNA, 25 bp, Homo sapien
gcaagtgcgatgaatttttgacccc

SEQ ID NO: 5462399 - DNA, 25 bp, Homo sapien
acacagatgttgcaagtgcgatgaa

SEQ ID NO: 5462400 - DNA, 25 bp, Homo sapien
tttcttaggtaaatcaatccagcct

SEQ ID NO: 5462401 - DNA, 25 bp, Homo sapien
agttctcctctctacaagttcctga

SEQ ID NO: 5462402 - DNA, 25 bp, Homo sapien
agcctctcttgttacgtccagttct

SEQ ID NO: 5462403 - DNA, 25 bp, Homo sapien
cagcgccctgacctttcttaggtaa

SEQ ID NO: 5462404 - DNA, 25 bp, Homo sapien
atgctgacatccagcgaattaggta

SEQ ID NO: 5462405 - DNA, 25 bp, Homo sapien
catccagcgaattaggtaagcagca

SEQ ID NO: 5462406 - DNA, 25 bp, Homo sapien
gaattaggtaagcagcattccagct

SEQ ID NO: 5462407 - DNA, 25 bp, Homo sapien
tctttaaatgctcaaactacctgct

SEQ ID NO: 5462408 - DNA, 25 bp, Homo sapien
gacttagtgaccgatcgaatgtggg

SEQ ID NO: 5462409 - DNA, 25 bp, Homo sapien
tgaacccactgctgttgaggatgcg

SEQ ID NO: 5462410 - DNA, 25 bp, Homo sapien
ggcagtgatgtgagggactcacaac

SEQ ID NO: 5462411 - DNA, 25 bp, Homo sapien
caacgaggttcagatttgattgagc

SEQ ID NO: 5462412 - DNA, 25 bp, Homo sapien
ttccttgaaggattgactccttttg

SEQ ID NO: 5462413 - DNA, 25 bp, Homo sapien
tgaaggattgactccttttggcttt

SEQ ID NO: 5462414 - DNA, 25 bp, Homo sapien
cgggtctttccttgaaggattgact

SEQ ID NO: 5462415 - DNA, 25 bp, Homo sapien
ggtctttccttgaaggattgactcc

SEQ ID NO: 5462416 - DNA, 25 bp, Homo sapien
gctttgaccggaagattcttccggc

SEQ ID NO: 5462417 - DNA, 25 bp, Homo sapien
cggaagattcttccggctagtcaca

SEQ ID NO: 5462418 - DNA, 25 bp, Homo sapien
tagtcacagtctctcctcgcctttc

SEQ ID NO: 5462419 - DNA, 25 bp, Homo sapien
ttcttccggctagtcacagtctctc

SEQ ID NO: 5462420 - DNA, 25 bp, Homo sapien
aatgactgtgcctgccacgacagag

SEQ ID NO: 5462421 - DNA, 25 bp, Homo sapien
tttgggatcaagtcagtttggccac

SEQ ID NO: 5462422 - DNA, 25 bp, Homo sapien
cacgacagaggctggtttgggatca

SEQ ID NO: 5462423 - DNA, 25 bp, Homo sapien
aacagactcagactgcggtagcagg

SEQ ID NO: 5462424 - DNA, 25 bp, Homo sapien
gctatagaaagttagacaggcctgg

SEQ ID NO: 5462425 - DNA, 25 bp, Homo sapien
tataaaatataccaccagatggctg

SEQ ID NO: 5462426 - DNA, 25 bp, Homo sapien
catgatctcaagaaggtgcctcaca

SEQ ID NO: 5462427 - DNA, 25 bp, Homo sapien
tactacccatcaagtcagccaaggc

SEQ ID NO: 5462428 - DNA, 25 bp, Homo sapien
ggcatgccaaggcactagaaatcag

SEQ ID NO: 5462429 - DNA, 25 bp, Homo sapien
tctgtgcctggctctaaagtaagcg

SEQ ID NO: 5462430 - DNA, 25 bp, Homo sapien
tctctgggcctgtcgttttcttctc

SEQ ID NO: 5462431 - DNA, 25 bp, Homo sapien
cacaaggtccctgttcggcatgcca

SEQ ID NO: 5462432 - DNA, 25 bp, Homo sapien
ccatattttgaagtgggagaacagt

SEQ ID NO: 5462433 - DNA, 25 bp, Homo sapien
tgcctgagtcaggtatccatccctt

SEQ ID NO: 5462434 - DNA, 25 bp, Homo sapien
taatgagcaactgaactgccatatt

SEQ ID NO: 5462435 - DNA, 25 bp, Homo sapien
tctctgcagagctgcgaatgtcttt

SEQ ID NO: 5462436 - DNA, 25 bp, Homo sapien
tgttgacactcctgacaacaagtgt

SEQ ID NO: 5462437 - DNA, 25 bp, Homo sapien
gttgacactcctgacaacaagtgtt

SEQ ID NO: 5462438 - DNA, 25 bp, Homo sapien
tgacactcctgacaacaagtgtttg

SEQ ID NO: 5462439 - DNA, 25 bp, Homo sapien
ctctgcagccttgttgacactcctg

SEQ ID NO: 5462440 - DNA, 25 bp, Homo sapien
tatgcgctcatatttgtgtctgttc

SEQ ID NO: 5462441 - DNA, 25 bp, Homo sapien
taacatccagccctatatttatgcg

SEQ ID NO: 5462442 - DNA, 25 bp, Homo sapien
gacctctgcatcttcagctgtttgg

SEQ ID NO: 5462443 - DNA, 25 bp, Homo sapien
tgtattcctcgttacacgccaccat

SEQ ID NO: 5462444 - DNA, 25 bp, Homo sapien
agtggaataaggggggtctgaggtg

SEQ ID NO: 5462445 - DNA, 25 bp, Homo sapien
tcataataggaacatgtcccacagc

SEQ ID NO: 5462446 - DNA, 25 bp, Homo sapien
ccacagcctttagtaggatgtcaga

SEQ ID NO: 5462447 - DNA, 25 bp, Homo sapien
tttcataataggaacatgtcccaca

SEQ ID NO: 5462448 - DNA, 25 bp, Homo sapien
aacagagtggctaaacctggaggcc

SEQ ID NO: 5462449 - DNA, 25 bp, Homo sapien
taggcatggtgactctacaagttcc

SEQ ID NO: 5462450 - DNA, 25 bp, Homo sapien
tatcttgtcctatgtgaattacctg

SEQ ID NO: 5462451 - DNA, 25 bp, Homo sapien
caaaaaagcgtcagaaaatgttagc

SEQ ID NO: 5462452 - DNA, 25 bp, Homo sapien
tcaccaacagggaatggtggcttca

SEQ ID NO: 5462453 - DNA, 25 bp, Homo sapien
caactcaaattttaggcacctggaa

SEQ ID NO: 5462454 - DNA, 25 bp, Homo sapien
tatctagtagtatgtggttcctgga

SEQ ID NO: 5462455 - DNA, 25 bp, Homo sapien
gcttcagaggctactaaggactagt

SEQ ID NO: 5462456 - DNA, 25 bp, Homo sapien
cagttgataattggtctctagtagc

SEQ ID NO: 5462457 - DNA, 25 bp, Homo sapien
cacagcatgtgtagcaccagttgat

SEQ ID NO: 5462458 - DNA, 25 bp, Homo sapien
tagtagcttactgtcaaaatgttca

SEQ ID NO: 5462459 - DNA, 25 bp, Homo sapien
gaatatatgcctgtcagtgtcttct

SEQ ID NO: 5462460 - DNA, 25 bp, Homo sapien
gtgagttcatttccgatgtgttctt

SEQ ID NO: 5462461 - DNA, 25 bp, Homo sapien
ctgtgagttcatttccgatgtgttc

SEQ ID NO: 5462462 - DNA, 25 bp, Homo sapien
gttcatttccgatgtgttcttggtt

SEQ ID NO: 5462463 - DNA, 25 bp, Homo sapien
gagttcatttccgatgtgttcttgg

SEQ ID NO: 5462464 - DNA, 25 bp, Homo sapien
caccgtctgcctttgtaggtttctt

SEQ ID NO: 5462465 - DNA, 25 bp, Homo sapien
tatagctacaggttttcccacaccg

SEQ ID NO: 5462466 - DNA, 25 bp, Homo sapien
tggaatgtaccctctcatgttgaga

SEQ ID NO: 5462467 - DNA, 25 bp, Homo sapien
tgttgagagagcgaagagctatagc

SEQ ID NO: 5462468 - DNA, 25 bp, Homo sapien
gggaaatggtggtcgcagtggtgct

SEQ ID NO: 5462469 - DNA, 25 bp, Homo sapien
aaatggtggtcgcagtggtgctgct

SEQ ID NO: 5462470 - DNA, 25 bp, Homo sapien
tctcctgggtcgagaggctgcactg

SEQ ID NO: 5462471 - DNA, 25 bp, Homo sapien
cctgggtcgagaggctgcactgtca

SEQ ID NO: 5462472 - DNA, 25 bp, Homo sapien
aagacagaaagagcctgtgtcctta

SEQ ID NO: 5462473 - DNA, 25 bp, Homo sapien
aattatcaaggagccccataccaag

SEQ ID NO: 5462474 - DNA, 25 bp, Homo sapien
ttggagtttccagtcacatgcagcc

SEQ ID NO: 5462475 - DNA, 25 bp, Homo sapien
gcaagttgtcaacggaaggccaaca

SEQ ID NO: 5462476 - DNA, 25 bp, Homo sapien
ttgacaatgtccctgcacagagaac

SEQ ID NO: 5462477 - DNA, 25 bp, Homo sapien
atctgtcttcccaacaaaggaaagg

SEQ ID NO: 5462478 - DNA, 25 bp, Homo sapien
gcatcactttttgaagccatggaaa

SEQ ID NO: 5462479 - DNA, 25 bp, Homo sapien
gcacaggcatggtttccatgacatc

SEQ ID NO: 5462480 - DNA, 25 bp, Homo sapien
gtacttcaagactgctgaccttaac

SEQ ID NO: 5462481 - DNA, 25 bp, Homo sapien
tctgtacttcaagactgctgacctt

SEQ ID NO: 5462482 - DNA, 25 bp, Homo sapien
aagaacaactgtctgtacttcaaga

SEQ ID NO: 5462483 - DNA, 25 bp, Homo sapien
aactgtctgtacttcaagactgctg

SEQ ID NO: 5462484 - DNA, 25 bp, Homo sapien
gcttggtgcccctgaaggtcactct

SEQ ID NO: 5462485 - DNA, 25 bp, Homo sapien
ttctgaagggctcggaacatcgttc

SEQ ID NO: 5462486 - DNA, 25 bp, Homo sapien
caggttgttccacttaacggcaggt

SEQ ID NO: 5462487 - DNA, 25 bp, Homo sapien
gattctgacagtggtacctggacgt

SEQ ID NO: 5462488 - DNA, 25 bp, Homo sapien
ggtgtcctcggtgttcctagcctca

SEQ ID NO: 5462489 - DNA, 25 bp, Homo sapien
gtgtcctcggtgttcctagcctcat

SEQ ID NO: 5462490 - DNA, 25 bp, Homo sapien
cggtgtcctcggtgttcctagcctc

SEQ ID NO: 5462491 - DNA, 25 bp, Homo sapien
ttcccagatgcccttttctagtgct

SEQ ID NO: 5462492 - DNA, 25 bp, Homo sapien
actcccatttgcgagtcttcccaga

SEQ ID NO: 5462493 - DNA, 25 bp, Homo sapien
ttctagtgcttcaaccacggtcccc

SEQ ID NO: 5462494 - DNA, 25 bp, Homo sapien
tcccatttgcgagtcttcccagatg

SEQ ID NO: 5462495 - DNA, 25 bp, Homo sapien
catagccttggagccatttctgtgt

SEQ ID NO: 5462496 - DNA, 25 bp, Homo sapien
tagccttggagccatttctgtgtgg

SEQ ID NO: 5462497 - DNA, 25 bp, Homo sapien
ttgcatcatagccttggagccattt

SEQ ID NO: 5462498 - DNA, 25 bp, Homo sapien
cttggagccatttctgtgtggcaga

SEQ ID NO: 5462499 - DNA, 25 bp, Homo sapien
tccccacttcccgtctccattgaca

SEQ ID NO: 5462500 - DNA, 25 bp, Homo sapien
tgatgtgtgcctctgactttctgca

SEQ ID NO: 5462501 - DNA, 25 bp, Homo sapien
ttgaagctgatgtgtgcctctgact

SEQ ID NO: 5462502 - DNA, 25 bp, Homo sapien
ttcccgtctccattgacagccttct

SEQ ID NO: 5462503 - DNA, 25 bp, Homo sapien
tgcagatatgcatagaggttctgct

SEQ ID NO: 5462504 - DNA, 25 bp, Homo sapien
gcttgatcatctgaatgcagatatg

SEQ ID NO: 5462505 - DNA, 25 bp, Homo sapien
ggctagccattctacagcttgatca

SEQ ID NO: 5462506 - DNA, 25 bp, Homo sapien
ggttctgctcgtgaccatgtgaccc

SEQ ID NO: 5462507 - DNA, 25 bp, Homo sapien
tggcagtctacattcatgctgcaga

SEQ ID NO: 5462508 - DNA, 25 bp, Homo sapien
tgctgctggactggatatgttgatg

SEQ ID NO: 5462509 - DNA, 25 bp, Homo sapien
ggatgtaagacacctctttcttcag

SEQ ID NO: 5462510 - DNA, 25 bp, Homo sapien
tcttcagacttcctccatgtggacc

SEQ ID NO: 5462511 - DNA, 25 bp, Homo sapien
agagctagattttgagcgtcttcca

SEQ ID NO: 5462512 - DNA, 25 bp, Homo sapien
gcctttgggccaagggcattcagcc

SEQ ID NO: 5462513 - DNA, 25 bp, Homo sapien
gcattcagccttccattgctcccaa

SEQ ID NO: 5462514 - DNA, 25 bp, Homo sapien
ctaagcctttgggccaagggcattc

SEQ ID NO: 5462515 - DNA, 25 bp, Homo sapien
tttctagtggcaggactgagtggca

SEQ ID NO: 5462516 - DNA, 25 bp, Homo sapien
gaactgtgtccagtgtcttggcagt

SEQ ID NO: 5462517 - DNA, 25 bp, Homo sapien
gaacgggcagtagtactgttggccc

SEQ ID NO: 5462518 - DNA, 25 bp, Homo sapien
gcttggtagccctctggaaagatgc

SEQ ID NO: 5462519 - DNA, 25 bp, Homo sapien
tggagctggagctctgagaagaaat

SEQ ID NO: 5462520 - DNA, 25 bp, Homo sapien
agggttcttctgtttggagctggag

SEQ ID NO: 5462521 - DNA, 25 bp, Homo sapien
tgagacggaccaatctttctttagg

SEQ ID NO: 5462522 - DNA, 25 bp, Homo sapien
gctctgagaagaaatcttgcactgg

SEQ ID NO: 5462523 - DNA, 25 bp, Homo sapien
aacctttagtcattggattatgagg

SEQ ID NO: 5462524 - DNA, 25 bp, Homo sapien
ttagtcattggattatgaggagatg

SEQ ID NO: 5462525 - DNA, 25 bp, Homo sapien
ttaacctttagtcattggattatga

SEQ ID NO: 5462526 - DNA, 25 bp, Homo sapien
cctttagtcattggattatgaggag

SEQ ID NO: 5462527 - DNA, 25 bp, Homo sapien
ggtatttctcaaaaggctcagcaca

SEQ ID NO: 5462528 - DNA, 25 bp, Homo sapien
gctcagcacagccaactcttgtgtg

SEQ ID NO: 5462529 - DNA, 25 bp, Homo sapien
ggctcagcacagccaactcttgtgt

SEQ ID NO: 5462530 - DNA, 25 bp, Homo sapien
cttggtatttctcaaaaggctcagc

SEQ ID NO: 5462531 - DNA, 25 bp, Homo sapien
tctgaatgagttcccgttagtccaa

SEQ ID NO: 5462532 - DNA, 25 bp, Homo sapien
ccgttagtccaagtgtaagcagata

SEQ ID NO: 5462533 - DNA, 25 bp, Homo sapien
tgtaagcagataaggactgggattt

SEQ ID NO: 5462534 - DNA, 25 bp, Homo sapien
tgagttcccgttagtccaagtgtaa

SEQ ID NO: 5462535 - DNA, 25 bp, Homo sapien
gggtaacagacaggctatctctctc

SEQ ID NO: 5462536 - DNA, 25 bp, Homo sapien
agcaaagggtaacagacaggctatc

SEQ ID NO: 5462537 - DNA, 25 bp, Homo sapien
gcagtcctggttcacaaggtggccc

SEQ ID NO: 5462538 - DNA, 25 bp, Homo sapien
gagtgacagggaagtgcagtcctgg

SEQ ID NO: 5462539 - DNA, 25 bp, Homo sapien
tggtggaacatgcagaccctgctct

SEQ ID NO: 5462540 - DNA, 25 bp, Homo sapien
gactagcgtgagaacttgggtcgat

SEQ ID NO: 5462541 - DNA, 25 bp, Homo sapien
ggcttccactccaaggacgtgctgg

SEQ ID NO: 5462542 - DNA, 25 bp, Homo sapien
tgttacctcgtttggcaggcttcca

SEQ ID NO: 5462543 - DNA, 25 bp, Homo sapien
ccagtgcggcctcaaggtgagttca

SEQ ID NO: 5462544 - DNA, 25 bp, Homo sapien
caggaaaattgcagctcagaggaac

SEQ ID NO: 5462545 - DNA, 25 bp, Homo sapien
tgctgggcccttgtacccaaggaaa

SEQ ID NO: 5462546 - DNA, 25 bp, Homo sapien
ggtgagttaccacagcatgctgctg

SEQ ID NO: 5462547 - DNA, 25 bp, Homo sapien
ccaaaccacccagctccaggataca

SEQ ID NO: 5462548 - DNA, 25 bp, Homo sapien
taagccaaaccacccagctccagga

SEQ ID NO: 5462549 - DNA, 25 bp, Homo sapien
agccaaaccacccagctccaggata

SEQ ID NO: 5462550 - DNA, 25 bp, Homo sapien
ctaagccaaaccacccagctccagg

SEQ ID NO: 5462551 - DNA, 25 bp, Homo sapien
tgtgaggtgccagcaagtctggaag

SEQ ID NO: 5462552 - DNA, 25 bp, Homo sapien
aggtgccagcaagtctggaagcata

SEQ ID NO: 5462553 - DNA, 25 bp, Homo sapien
ccttcccactagatgatctgtgagg

SEQ ID NO: 5462554 - DNA, 25 bp, Homo sapien
cttcccactagatgatctgtgaggt

SEQ ID NO: 5462555 - DNA, 25 bp, Homo sapien
tccacttcaagcaaagggcagcctg

SEQ ID NO: 5462556 - DNA, 25 bp, Homo sapien
ggtccacttcaagcaaagggcagcc

SEQ ID NO: 5462557 - DNA, 25 bp, Homo sapien
aaagggcagcctgcccctgagccat

SEQ ID NO: 5462558 - DNA, 25 bp, Homo sapien
cacttcaagcaaagggcagcctgcc

SEQ ID NO: 5462559 - DNA, 25 bp, Homo sapien
catgctgttgatagagtgagctttc

SEQ ID NO: 5462560 - DNA, 25 bp, Homo sapien
gagaactctagttgtggcaaaatag

SEQ ID NO: 5462561 - DNA, 25 bp, Homo sapien
gcccattctttttgcctagctagga

SEQ ID NO: 5462562 - DNA, 25 bp, Homo sapien
gtgagctttcttgatgagttgccca

SEQ ID NO: 5462563 - DNA, 25 bp, Homo sapien
gtttaatccgatgagattcacagcc

SEQ ID NO: 5462564 - DNA, 25 bp, Homo sapien
ttaatccgatgagattcacagccat

SEQ ID NO: 5462565 - DNA, 25 bp, Homo sapien
tttaatccgatgagattcacagcca

SEQ ID NO: 5462566 - DNA, 25 bp, Homo sapien
tgtggtcccgggcatgtcatcaaga

SEQ ID NO: 5462567 - DNA, 25 bp, Homo sapien
tgatgttaacactcccagctaaggg

SEQ ID NO: 5462568 - DNA, 25 bp, Homo sapien
aacagtttcgcagatccgttaggcc

SEQ ID NO: 5462569 - DNA, 25 bp, Homo sapien
gaatctaacctgcactcccgatggt

SEQ ID NO: 5462570 - DNA, 25 bp, Homo sapien
tggcctcttgcctggaatcacttga

SEQ ID NO: 5462571 - DNA, 25 bp, Homo sapien
tgtaggagctggtttatcagtccgc

SEQ ID NO: 5462572 - DNA, 25 bp, Homo sapien
aatgctctgcatggattggagacac

SEQ ID NO: 5462573 - DNA, 25 bp, Homo sapien
tctgaaatttcactgcgacggacat

SEQ ID NO: 5462574 - DNA, 25 bp, Homo sapien
ttcaagagaagtaaccggggctctg

SEQ ID NO: 5462575 - DNA, 25 bp, Homo sapien
tccaggatagttgtgctagaaataa

SEQ ID NO: 5462576 - DNA, 25 bp, Homo sapien
ctgagatggcggttctccaggatag

SEQ ID NO: 5462577 - DNA, 25 bp, Homo sapien
atgaaattatcctctgaactgagat

SEQ ID NO: 5462578 - DNA, 25 bp, Homo sapien
cttttctggagtgttcgcctcatct

SEQ ID NO: 5462579 - DNA, 25 bp, Homo sapien
ttttctggagtgttcgcctcatctc

SEQ ID NO: 5462580 - DNA, 25 bp, Homo sapien
ccacaagtcacaccgaaagagtcat

SEQ ID NO: 5462581 - DNA, 25 bp, Homo sapien
aagatgcctgccaaaccacaagtca

SEQ ID NO: 5462582 - DNA, 25 bp, Homo sapien
aagtcacacgaccaaagctgggaat

SEQ ID NO: 5462583 - DNA, 25 bp, Homo sapien
tcctatggtggaggctcaagatgcc

SEQ ID NO: 5462584 - DNA, 25 bp, Homo sapien
ttatgcaaaaggtgttctcatagac

SEQ ID NO: 5462585 - DNA, 25 bp, Homo sapien
tgttcttgtagacttcttgtctcca

SEQ ID NO: 5462586 - DNA, 25 bp, Homo sapien
gactccctgtcctcctcataagctc

SEQ ID NO: 5462587 - DNA, 25 bp, Homo sapien
tgtcctcctcataagctctagatcc

SEQ ID NO: 5462588 - DNA, 25 bp, Homo sapien
taagctctagatccccatctgggtt

SEQ ID NO: 5462589 - DNA, 25 bp, Homo sapien
ctcataagctctagatccccatctg

SEQ ID NO: 5462590 - DNA, 25 bp, Homo sapien
gctccacccttgactggaaggatgg

SEQ ID NO: 5462591 - DNA, 25 bp, Homo sapien
ctccacccttgactggaaggatggc

SEQ ID NO: 5462592 - DNA, 25 bp, Homo sapien
gtcgtggagtctgtgattttccatc

SEQ ID NO: 5462593 - DNA, 25 bp, Homo sapien
gtgtcgtggagtctgtgattttcca

SEQ ID NO: 5462594 - DNA, 25 bp, Homo sapien
tggatgtccctggaccacctcgccc

SEQ ID NO: 5462595 - DNA, 25 bp, Homo sapien
ctctctccatggtctggtcactggg

SEQ ID NO: 5462596 - DNA, 25 bp, Homo sapien
catggtctggtcactggggcccctc

SEQ ID NO: 5462597 - DNA, 25 bp, Homo sapien
ctacagcggctcttctgagcctgct

SEQ ID NO: 5462598 - DNA, 25 bp, Homo sapien
ggttcagctttttgaactccaagga

SEQ ID NO: 5462599 - DNA, 25 bp, Homo sapien
aaactccttgtgcacttctcccgtg

SEQ ID NO: 5462600 - DNA, 25 bp, Homo sapien
cattcaagagcttgacaaagcagtg

SEQ ID NO: 5462601 - DNA, 25 bp, Homo sapien
tccttccctgggataaggcatggtt

SEQ ID NO: 5462602 - DNA, 25 bp, Homo sapien
gggaaaaggcgatcatgccatccat

SEQ ID NO: 5462603 - DNA, 25 bp, Homo sapien
atgggaaaaggcgatcatgccatcc

SEQ ID NO: 5462604 - DNA, 25 bp, Homo sapien
ggatgggaaaaggcgatcatgccat

SEQ ID NO: 5462605 - DNA, 25 bp, Homo sapien
ctgggatgggaaaaggcgatcatgc

SEQ ID NO: 5462606 - DNA, 25 bp, Homo sapien
gccctcgagagccttctaggcacat

SEQ ID NO: 5462607 - DNA, 25 bp, Homo sapien
aatgttccagacacatcgtcttgtg

SEQ ID NO: 5462608 - DNA, 25 bp, Homo sapien
tatctacatgtgtaatgttccagac

SEQ ID NO: 5462609 - DNA, 25 bp, Homo sapien
cgtcttgtgaaatgccctcgagagc

SEQ ID NO: 5462610 - DNA, 25 bp, Homo sapien
gagccacgcctactccctgtggaaa

SEQ ID NO: 5462611 - DNA, 25 bp, Homo sapien
tgtgagcctgtcagctacatcctgc

SEQ ID NO: 5462612 - DNA, 25 bp, Homo sapien
cctgcagcaccctgtttgatgccag

SEQ ID NO: 5462613 - DNA, 25 bp, Homo sapien
ttccgcacaggctgaaggacatctg

SEQ ID NO: 5462614 - DNA, 25 bp, Homo sapien
gcttgaggccaaaaagaacctgtat

SEQ ID NO: 5462615 - DNA, 25 bp, Homo sapien
caatgaggcagtctaacatgggcag

SEQ ID NO: 5462616 - DNA, 25 bp, Homo sapien
gactgttgttggtaagccctgtatc

SEQ ID NO: 5462617 - DNA, 25 bp, Homo sapien
cccagaagtgaggagcaatgaggca

SEQ ID NO: 5462618 - DNA, 25 bp, Homo sapien
cacctttaaggaagtcttctcatgt

SEQ ID NO: 5462619 - DNA, 25 bp, Homo sapien
tcacctttaaggaagtcttctcatg

SEQ ID NO: 5462620 - DNA, 25 bp, Homo sapien
gctagattcttcacacttattacca

SEQ ID NO: 5462621 - DNA, 25 bp, Homo sapien
ctgctagattcttcacacttattac

SEQ ID NO: 5462622 - DNA, 25 bp, Homo sapien
cacacttattaccagtgtttagaaa

SEQ ID NO: 5462623 - DNA, 25 bp, Homo sapien
gattcttcacacttattaccagtgt

SEQ ID NO: 5462624 - DNA, 25 bp, Homo sapien
tctttctggagtccgaagtggctcc

SEQ ID NO: 5462625 - DNA, 25 bp, Homo sapien
cctgagttggtggtgcaattgttct

SEQ ID NO: 5462626 - DNA, 25 bp, Homo sapien
tggctcctgagttggtggtgcaatt

SEQ ID NO: 5462627 - DNA, 25 bp, Homo sapien
attgttctatcagcagtgggtgtgg

SEQ ID NO: 5462628 - DNA, 25 bp, Homo sapien
tggtattgtaagaggttaagcccac

SEQ ID NO: 5462629 - DNA, 25 bp, Homo sapien
aaaacgtaaggctggtgagcaatgg

SEQ ID NO: 5462630 - DNA, 25 bp, Homo sapien
tagagtggctgcgtgaaaacgtaag

SEQ ID NO: 5462631 - DNA, 25 bp, Homo sapien
cattcggaggcaatgaatgccagtg

SEQ ID NO: 5462632 - DNA, 25 bp, Homo sapien
agtagcgcccttggcatggataccc

SEQ ID NO: 5462633 - DNA, 25 bp, Homo sapien
cgcccttggcatggataccctgggt

SEQ ID NO: 5462634 - DNA, 25 bp, Homo sapien
ccttggcatggataccctgggtgac

SEQ ID NO: 5462635 - DNA, 25 bp, Homo sapien
tagcgcccttggcatggataccctg

SEQ ID NO: 5462636 - DNA, 25 bp, Homo sapien
aatggccaagcaacaaaagtctcgc

SEQ ID NO: 5462637 - DNA, 25 bp, Homo sapien
tgatcgagtgagtgtacaggagaac

SEQ ID NO: 5462638 - DNA, 25 bp, Homo sapien
aaatctttgtttacttggcggcagg

SEQ ID NO: 5462639 - DNA, 25 bp, Homo sapien
tttacttggcggcaggattctgatc

SEQ ID NO: 5462640 - DNA, 25 bp, Homo sapien
gacttctgtcatcgaagctgcatcc

SEQ ID NO: 5462641 - DNA, 25 bp, Homo sapien
ccctggacttctgtcatcgaagctg

SEQ ID NO: 5462642 - DNA, 25 bp, Homo sapien
tggacttctgtcatcgaagctgcat

SEQ ID NO: 5462643 - DNA, 25 bp, Homo sapien
cttctgtcatcgaagctgcatccat

SEQ ID NO: 5462644 - DNA, 25 bp, Homo sapien
ctttgtcattgattagtgcttctcc

SEQ ID NO: 5462645 - DNA, 25 bp, Homo sapien
cttctccaagtgaagactcttttgg

SEQ ID NO: 5462646 - DNA, 25 bp, Homo sapien
ccaagtgaagactcttttggatgga

SEQ ID NO: 5462647 - DNA, 25 bp, Homo sapien
cttctttgtcattgattagtgcttc

SEQ ID NO: 5462648 - DNA, 25 bp, Homo sapien
gaaaccctaaagtcagtggcggaca

SEQ ID NO: 5462649 - DNA, 25 bp, Homo sapien
cacagtgtacccagcacctgtatgt

SEQ ID NO: 5462650 - DNA, 25 bp, Homo sapien
gagaggtatcttttgactgactagc

SEQ ID NO: 5462651 - DNA, 25 bp, Homo sapien
gagcttgacgtgactgaaaccctaa

SEQ ID NO: 5462652 - DNA, 25 bp, Homo sapien
tacccttctgaatatcgatgtgatg

SEQ ID NO: 5462653 - DNA, 25 bp, Homo sapien
ccataataatgaaaggtctaccctt

SEQ ID NO: 5462654 - DNA, 25 bp, Homo sapien
taatgaaaggtctacccttctgaat

SEQ ID NO: 5462655 - DNA, 25 bp, Homo sapien
gaatatcgatgtgatggacagataa

SEQ ID NO: 5462656 - DNA, 25 bp, Homo sapien
ggaaaatcactgaaagatctttgat

SEQ ID NO: 5462657 - DNA, 25 bp, Homo sapien
aatcactgaaagatctttgatttct

SEQ ID NO: 5462658 - DNA, 25 bp, Homo sapien
cttcttggtggaaaatcactgaaag

SEQ ID NO: 5462659 - DNA, 25 bp, Homo sapien
ttctggtgtttttcaatgccagcat

SEQ ID NO: 5462660 - DNA, 25 bp, Homo sapien
gagagtctaacaaccaacagcctga

SEQ ID NO: 5462661 - DNA, 25 bp, Homo sapien
aattatctactctggctcaatgtgc

SEQ ID NO: 5462662 - DNA, 25 bp, Homo sapien
gatcatccaggatggttacctgaca

SEQ ID NO: 5462663 - DNA, 25 bp, Homo sapien
tggaggaaatccctacatcagagag

SEQ ID NO: 5462664 - DNA, 25 bp, Homo sapien
ggccctgagggcatgaaggttgctg

SEQ ID NO: 5462665 - DNA, 25 bp, Homo sapien
tgagggcatgaaggttgctgggaac

SEQ ID NO: 5462666 - DNA, 25 bp, Homo sapien
gaggccctgagggcatgaaggttgc

SEQ ID NO: 5462667 - DNA, 25 bp, Homo sapien
tcagaggccctgagggcatgaaggt

SEQ ID NO: 5462668 - DNA, 25 bp, Homo sapien
cagcgtcttcttctgacatcgtttt

SEQ ID NO: 5462669 - DNA, 25 bp, Homo sapien
cccagcgtcttcttctgacatcgtt

SEQ ID NO: 5462670 - DNA, 25 bp, Homo sapien
tgaacagtacatgaacgggttggcc

SEQ ID NO: 5462671 - DNA, 25 bp, Homo sapien
catgaacgggttggccagtgaaagc

SEQ ID NO: 5462672 - DNA, 25 bp, Homo sapien
ttgaggacccaaagctggcctctag

SEQ ID NO: 5462673 - DNA, 25 bp, Homo sapien
ttgagtttgtctgtgttgagacctt

SEQ ID NO: 5462674 - DNA, 25 bp, Homo sapien
ctcctttgaggacccaaagctggcc

SEQ ID NO: 5462675 - DNA, 25 bp, Homo sapien
tctgtgttgagaccttaggagactc

SEQ ID NO: 5462676 - DNA, 25 bp, Homo sapien
agttccctgttctgttactggaaag

SEQ ID NO: 5462677 - DNA, 25 bp, Homo sapien
gttgatcctttatctgacacttccc

SEQ ID NO: 5462678 - DNA, 25 bp, Homo sapien
tgtcaaccaccatgagtctgttgat

SEQ ID NO: 5462679 - DNA, 25 bp, Homo sapien
cccagttccctgttctgttactgga

SEQ ID NO: 5462680 - DNA, 25 bp, Homo sapien
gaaactccacaggtactgcctttgt

SEQ ID NO: 5462681 - DNA, 25 bp, Homo sapien
tccacaggtactgcctttgtagcaa

SEQ ID NO: 5462682 - DNA, 25 bp, Homo sapien
tcctaaatagaaactccacaggtac

SEQ ID NO: 5462683 - DNA, 25 bp, Homo sapien
gtactgcctttgtagcaatacccat

SEQ ID NO: 5462684 - DNA, 25 bp, Homo sapien
gaagacctggcactcttatactgtg

SEQ ID NO: 5462685 - DNA, 25 bp, Homo sapien
tatcgtggcagtcagatccttggga

SEQ ID NO: 5462686 - DNA, 25 bp, Homo sapien
agaggtgtctctagcgtggcagtca

SEQ ID NO: 5462687 - DNA, 25 bp, Homo sapien
gcaatagctatacagctgctccccg

SEQ ID NO: 5462688 - DNA, 25 bp, Homo sapien
aggaactccagtactgttttctcag

SEQ ID NO: 5462689 - DNA, 25 bp, Homo sapien
cttcacagcatcggtctctcctcct

SEQ ID NO: 5462690 - DNA, 25 bp, Homo sapien
catttcttcacagcatcggtctctc

SEQ ID NO: 5462691 - DNA, 25 bp, Homo sapien
agtttctccacttggttgggttatg

SEQ ID NO: 5462692 - DNA, 25 bp, Homo sapien
tatggacagaacatgaagccatctc

SEQ ID NO: 5462693 - DNA, 25 bp, Homo sapien
agtaattgccttcccaaacaacatc

SEQ ID NO: 5462694 - DNA, 25 bp, Homo sapien
ctccagtgctctctgaacctatctt

SEQ ID NO: 5462695 - DNA, 25 bp, Homo sapien
ctttttggcagcttcagtaattgcc

SEQ ID NO: 5462696 - DNA, 25 bp, Homo sapien
cagccaaactgatttcccgttgtcc

SEQ ID NO: 5462697 - DNA, 25 bp, Homo sapien
cgcatacatttccacttttacggtt

SEQ ID NO: 5462698 - DNA, 25 bp, Homo sapien
tgaacctgccgcatacatttccact

SEQ ID NO: 5462699 - DNA, 25 bp, Homo sapien
cgttgtcccctgaacctgccgcata

SEQ ID NO: 5462700 - DNA, 25 bp, Homo sapien
tcccttcttgggcaatttggtccgc

SEQ ID NO: 5462701 - DNA, 25 bp, Homo sapien
ttcatcccttcttgggcaatttggt

SEQ ID NO: 5462702 - DNA, 25 bp, Homo sapien
tcttgggcaatttggtccgctcctg

SEQ ID NO: 5462703 - DNA, 25 bp, Homo sapien
caatttggtccgctcctgggaggac

SEQ ID NO: 5462704 - DNA, 25 bp, Homo sapien
accagggctgcaggtagatgtccat

SEQ ID NO: 5462705 - DNA, 25 bp, Homo sapien
ttgtccaccagggctgcaggtagat

SEQ ID NO: 5462706 - DNA, 25 bp, Homo sapien
tccaccagggctgcaggtagatgtc

SEQ ID NO: 5462707 - DNA, 25 bp, Homo sapien
cttgtccaccagggctgcaggtaga

SEQ ID NO: 5462708 - DNA, 25 bp, Homo sapien
tatgacctaagatacatcaagttgc

SEQ ID NO: 5462709 - DNA, 25 bp, Homo sapien
caagttgcaataagttatgacatta

SEQ ID NO: 5462710 - DNA, 25 bp, Homo sapien
tcaactagaaggtaaacttcttgag

SEQ ID NO: 5462711 - DNA, 25 bp, Homo sapien
ggaatttatcggttttgtttgctgc

SEQ ID NO: 5462712 - DNA, 25 bp, Homo sapien
tgttagcagtaaaactaggacatgg

SEQ ID NO: 5462713 - DNA, 25 bp, Homo sapien
gattcataagttgagcagcccctga

SEQ ID NO: 5462714 - DNA, 25 bp, Homo sapien
tcaaaataggtccagagattctctg

SEQ ID NO: 5462715 - DNA, 25 bp, Homo sapien
tacatgccggtaagttagagttcat

SEQ ID NO: 5462716 - DNA, 25 bp, Homo sapien
caggttgtctcctaacttccataga

SEQ ID NO: 5462717 - DNA, 25 bp, Homo sapien
taaacttatgttatcaggaatgtgg

SEQ ID NO: 5462718 - DNA, 25 bp, Homo sapien
gctactgtggactgagagtttattc

SEQ ID NO: 5462719 - DNA, 25 bp, Homo sapien
ggtagggttctctggataatcttcc

SEQ ID NO: 5462720 - DNA, 25 bp, Homo sapien
tccatgatcctgaatatttcgtgcc

SEQ ID NO: 5462721 - DNA, 25 bp, Homo sapien
tatttcgtgcctggagtggtgagaa

SEQ ID NO: 5462722 - DNA, 25 bp, Homo sapien
cacaagcagctggagtaataccaag

SEQ ID NO: 5462723 - DNA, 25 bp, Homo sapien
agaattataattccgctgctcccca

SEQ ID NO: 5462724 - DNA, 25 bp, Homo sapien
cagattgtaatgtcaagaagattct

SEQ ID NO: 5462725 - DNA, 25 bp, Homo sapien
gattgtaatgtcaagaagattcttc

SEQ ID NO: 5462726 - DNA, 25 bp, Homo sapien
attgtaatgtcaagaagattcttct

SEQ ID NO: 5462727 - DNA, 25 bp, Homo sapien
agattgtaatgtcaagaagattctt

SEQ ID NO: 5462728 - DNA, 25 bp, Homo sapien
caatagattccaaggatgttggaac

SEQ ID NO: 5462729 - DNA, 25 bp, Homo sapien
caaggatgttggaacgtgatgctgc

SEQ ID NO: 5462730 - DNA, 25 bp, Homo sapien
tattgagcgagttcagtgcagccat

SEQ ID NO: 5462731 - DNA, 25 bp, Homo sapien
gaacgtgatgctgctattgagcgag

SEQ ID NO: 5462732 - DNA, 25 bp, Homo sapien
tacactgaatttttactctttagac

SEQ ID NO: 5462733 - DNA, 25 bp, Homo sapien
ttacactgaatttttactctttaga

SEQ ID NO: 5462734 - DNA, 25 bp, Homo sapien
tggtgcttctgtgatccctcttcag

SEQ ID NO: 5462735 - DNA, 25 bp, Homo sapien
tcagcattagaaaatgttgcaccca

SEQ ID NO: 5462736 - DNA, 25 bp, Homo sapien
gatccctcttcagcattagaaaatg

SEQ ID NO: 5462737 - DNA, 25 bp, Homo sapien
ttagaaaatgttgcacccatgcctg

SEQ ID NO: 5462738 - DNA, 25 bp, Homo sapien
tgcctggacatggacttaaaccctg

SEQ ID NO: 5462739 - DNA, 25 bp, Homo sapien
tactctaccaactgagttaccccaa

SEQ ID NO: 5462740 - DNA, 25 bp, Homo sapien
atgcctggacatggacttaaaccct

SEQ ID NO: 5462741 - DNA, 25 bp, Homo sapien
gaccctcagatgaaaagtctgctac

SEQ ID NO: 5462742 - DNA, 25 bp, Homo sapien
cagattgttggcaagagaagactct

SEQ ID NO: 5462743 - DNA, 25 bp, Homo sapien
ctatgtcctcaaggctttacacaga

SEQ ID NO: 5462744 - DNA, 25 bp, Homo sapien
gactcttggtccttgattagtgtgc

SEQ ID NO: 5462745 - DNA, 25 bp, Homo sapien
ccttgattagtgtgctcatgccctc

SEQ ID NO: 5462746 - DNA, 25 bp, Homo sapien
ccaggtcattgcatccttgcttcat

SEQ ID NO: 5462747 - DNA, 25 bp, Homo sapien
ggaagcctgcttcacaccatcaagt

SEQ ID NO: 5462748 - DNA, 25 bp, Homo sapien
ccccaggtcattgcatccttgcttc

SEQ ID NO: 5462749 - DNA, 25 bp, Homo sapien
agcctgcttcacaccatcaagtcct

SEQ ID NO: 5462750 - DNA, 25 bp, Homo sapien
gggagaagaataatgcgtctgtagc

SEQ ID NO: 5462751 - DNA, 25 bp, Homo sapien
gatttgtcgaatccacatgcaacaa

SEQ ID NO: 5462752 - DNA, 25 bp, Homo sapien
tccaatacatggagtagcccatacc

SEQ ID NO: 5462753 - DNA, 25 bp, Homo sapien
taaaacctgccagtccaatgggaga

SEQ ID NO: 5462754 - DNA, 25 bp, Homo sapien
tcttctatgtcgattgagctctagc

SEQ ID NO: 5462755 - DNA, 25 bp, Homo sapien
catggtcagtcttctatgtcgattg

SEQ ID NO: 5462756 - DNA, 25 bp, Homo sapien
tatgtcgattgagctctagccttcc

SEQ ID NO: 5462757 - DNA, 25 bp, Homo sapien
tgagctctagccttccacagatctg

SEQ ID NO: 5462758 - DNA, 25 bp, Homo sapien
catcctaaatggaatctctcccaag

SEQ ID NO: 5462759 - DNA, 25 bp, Homo sapien
ctctcccaagaagatgacccggaga

SEQ ID NO: 5462760 - DNA, 25 bp, Homo sapien
tagaatagagcctgcctaaagtcat

SEQ ID NO: 5462761 - DNA, 25 bp, Homo sapien
gaagatgacccggagaagtgtagct

SEQ ID NO: 5462762 - DNA, 25 bp, Homo sapien
agaacgagtggaacatactgttatc

SEQ ID NO: 5462763 - DNA, 25 bp, Homo sapien
ttttagaacgagtggaacatactgt

SEQ ID NO: 5462764 - DNA, 25 bp, Homo sapien
tttttagaacgagtggaacatactg

SEQ ID NO: 5462765 - DNA, 25 bp, Homo sapien
ttagaacgagtggaacatactgtta

SEQ ID NO: 5462766 - DNA, 25 bp, Homo sapien
tattacattctcaatgaggcttttc

SEQ ID NO: 5462767 - DNA, 25 bp, Homo sapien
caagaagttaatttactactggcac

SEQ ID NO: 5462768 - DNA, 25 bp, Homo sapien
catctggattatggttttttcttta

SEQ ID NO: 5462769 - DNA, 25 bp, Homo sapien
ctctacccactcatttcaaacagag

SEQ ID NO: 5462770 - DNA, 25 bp, Homo sapien
gtggaaactttctgtagacaagcca

SEQ ID NO: 5462771 - DNA, 25 bp, Homo sapien
aaatcagcactcacaaaacagcttc

SEQ ID NO: 5462772 - DNA, 25 bp, Homo sapien
tttctgtagacaagccaaaatcagc

SEQ ID NO: 5462773 - DNA, 25 bp, Homo sapien
tcaaaacagccggatctttgccaag

SEQ ID NO: 5462774 - DNA, 25 bp, Homo sapien
tgaggtaccctgagcctgtgtccac

SEQ ID NO: 5462775 - DNA, 25 bp, Homo sapien
ccctgaggtaccctgagcctgtgtc

SEQ ID NO: 5462776 - DNA, 25 bp, Homo sapien
cctgtgtccacatgcacttgaagat

SEQ ID NO: 5462777 - DNA, 25 bp, Homo sapien
ccacatgcacttgaagatggcggct

SEQ ID NO: 5462778 - DNA, 25 bp, Homo sapien
tggctgctgaagcacaattagagtc

SEQ ID NO: 5462779 - DNA, 25 bp, Homo sapien
agtggctgctgaagcacaattagag

SEQ ID NO: 5462780 - DNA, 25 bp, Homo sapien
cagtggctgctgaagcacaattaga

SEQ ID NO: 5462781 - DNA, 25 bp, Homo sapien
gctgctgaagcacaattagagtcat

SEQ ID NO: 5462782 - DNA, 25 bp, Homo sapien
cttgtgatgctcagttgattcctgg

SEQ ID NO: 5462783 - DNA, 25 bp, Homo sapien
tgtgatgctcagttgattcctggcc

SEQ ID NO: 5462784 - DNA, 25 bp, Homo sapien
gatgctcagttgattcctggcctag

SEQ ID NO: 5462785 - DNA, 25 bp, Homo sapien
tgctcagttgattcctggcctaggt

SEQ ID NO: 5462786 - DNA, 25 bp, Homo sapien
tacagtgaaagataacgagggagct

SEQ ID NO: 5462787 - DNA, 25 bp, Homo sapien
cacagaccgtgctgaatggaagcaa

SEQ ID NO: 5462788 - DNA, 25 bp, Homo sapien
aagcccctggacagtcggaacacag

SEQ ID NO: 5462789 - DNA, 25 bp, Homo sapien
catcaatctgtgggctgttcctgga

SEQ ID NO: 5462790 - DNA, 25 bp, Homo sapien
aaacaaggggcaaagcttgggaatg

SEQ ID NO: 5462791 - DNA, 25 bp, Homo sapien
gggaatggaattgtgcaccaatctg

SEQ ID NO: 5462792 - DNA, 25 bp, Homo sapien
accaatctgacataagaggagaaac

SEQ ID NO: 5462793 - DNA, 25 bp, Homo sapien
gaattgtgcaccaatctgacataag

SEQ ID NO: 5462794 - DNA, 25 bp, Homo sapien
gagctgtgtcttccattacagagaa

SEQ ID NO: 5462795 - DNA, 25 bp, Homo sapien
tcacatgactcatggctttgagctg

SEQ ID NO: 5462796 - DNA, 25 bp, Homo sapien
tgtagcctggacgagtcacatgact

SEQ ID NO: 5462797 - DNA, 25 bp, Homo sapien
cttccattacagagaagtcagccag

SEQ ID NO: 5462798 - DNA, 25 bp, Homo sapien
ttttcttaaagatgcagggagcctg

SEQ ID NO: 5462799 - DNA, 25 bp, Homo sapien
gtttaaagcacaaaattgctctcac

SEQ ID NO: 5462800 - DNA, 25 bp, Homo sapien
gcagggagcctgcagtttaaagcac

SEQ ID NO: 5462801 - DNA, 25 bp, Homo sapien
ttcttaaagatgcagggagcctgca

SEQ ID NO: 5462802 - DNA, 25 bp, Homo sapien
tgccatgaattttgaagcgcctcct

SEQ ID NO: 5462803 - DNA, 25 bp, Homo sapien
tgcactgatgtcacattgtagaacg

SEQ ID NO: 5462804 - DNA, 25 bp, Homo sapien
cctgagtcgcctgctaccatagcaa

SEQ ID NO: 5462805 - DNA, 25 bp, Homo sapien
gaacgaatggttcaatgttgtaacc

SEQ ID NO: 5462806 - DNA, 25 bp, Homo sapien
ctaaacattccaattcccgtgaaat

SEQ ID NO: 5462807 - DNA, 25 bp, Homo sapien
aacattccaattcccgtgaaatggc

SEQ ID NO: 5462808 - DNA, 25 bp, Homo sapien
tggccccagttaaattgtatcccat

SEQ ID NO: 5462809 - DNA, 25 bp, Homo sapien
ttccaattcccgtgaaatggcccca

SEQ ID NO: 5462810 - DNA, 25 bp, Homo sapien
acagatggaatcagaacttgttgct

SEQ ID NO: 5462811 - DNA, 25 bp, Homo sapien
taagacatgtgtgaggacttcattg

SEQ ID NO: 5462812 - DNA, 25 bp, Homo sapien
aagacatgtgtgaggacttcattgt

SEQ ID NO: 5462813 - DNA, 25 bp, Homo sapien
agtaagacatgtgtgaggacttcat

SEQ ID NO: 5462814 - DNA, 25 bp, Homo sapien
ccagtaagacatgtgtgaggacttc

SEQ ID NO: 5462815 - DNA, 25 bp, Homo sapien
atggcagaagagcaagggacatctt

SEQ ID NO: 5462816 - DNA, 25 bp, Homo sapien
agagcaagggacatcttacatggtg

SEQ ID NO: 5462817 - DNA, 25 bp, Homo sapien
tcatggcagaagagcaagggacatc

SEQ ID NO: 5462818 - DNA, 25 bp, Homo sapien
gcagaagagcaagggacatcttaca

SEQ ID NO: 5462819 - DNA, 25 bp, Homo sapien
tctggttttccataattaagagtcc

SEQ ID NO: 5462820 - DNA, 25 bp, Homo sapien
tctcttttggcttcatactgcttgc

SEQ ID NO: 5462821 - DNA, 25 bp, Homo sapien
catactgcttgcttcgtagacattg

SEQ ID NO: 5462822 - DNA, 25 bp, Homo sapien
gtctctggttttccataattaagag

SEQ ID NO: 5462823 - DNA, 25 bp, Homo sapien
cacaatagaaaaggccttataaata

SEQ ID NO: 5462824 - DNA, 25 bp, Homo sapien
acacaatagaaaaggccttataaat

SEQ ID NO: 5462825 - DNA, 25 bp, Homo sapien
gccacagccattagatatactatta

SEQ ID NO: 5462826 - DNA, 25 bp, Homo sapien
tttggtccagtactccacaaaacac

SEQ ID NO: 5462827 - DNA, 25 bp, Homo sapien
gttaacaggatagaagtcaacacac

SEQ ID NO: 5462828 - DNA, 25 bp, Homo sapien
tacacaagataacagctcagaggaa

SEQ ID NO: 5462829 - DNA, 25 bp, Homo sapien
tctaggtcaacaggaaggtcaagct

SEQ ID NO: 5462830 - DNA, 25 bp, Homo sapien
ttaaagggataagagacagggctgc

SEQ ID NO: 5462831 - DNA, 25 bp, Homo sapien
tagatcttccagcaccataagggag

SEQ ID NO: 5462832 - DNA, 25 bp, Homo sapien
gtatttaactagcatcctggccaag

SEQ ID NO: 5462833 - DNA, 25 bp, Homo sapien
tatcgacataagcttgccaaacagt

SEQ ID NO: 5462834 - DNA, 25 bp, Homo sapien
tcaagtagtataaagcatagacccg

SEQ ID NO: 5462835 - DNA, 25 bp, Homo sapien
tgtccttacattggctgatgagcag

SEQ ID NO: 5462836 - DNA, 25 bp, Homo sapien
tatacccctggcttcgtatctggct

SEQ ID NO: 5462837 - DNA, 25 bp, Homo sapien
gcttctcgggccgtttcagcacacg

SEQ ID NO: 5462838 - DNA, 25 bp, Homo sapien
gggccgtttcagcacacggacagct

SEQ ID NO: 5462839 - DNA, 25 bp, Homo sapien
gctcctctgcttatagggagccgct

SEQ ID NO: 5462840 - DNA, 25 bp, Homo sapien
gtttatatggcagaggagctccaca

SEQ ID NO: 5462841 - DNA, 25 bp, Homo sapien
gggatggattggctccactaggctc

SEQ ID NO: 5462842 - DNA, 25 bp, Homo sapien
aaatctccaagtagatgtgagatgc

SEQ ID NO: 5462843 - DNA, 25 bp, Homo sapien
ggatggattggctccactaggctca

SEQ ID NO: 5462844 - DNA, 25 bp, Homo sapien
ccaagtagatgtgagatgccaggag

SEQ ID NO: 5462845 - DNA, 25 bp, Homo sapien
ttggattcttggaaccatctggtac

SEQ ID NO: 5462846 - DNA, 25 bp, Homo sapien
catctggtacttggaagaaaagcaa

SEQ ID NO: 5462847 - DNA, 25 bp, Homo sapien
cctcgatggatttcgggagaaggaa

SEQ ID NO: 5462848 - DNA, 25 bp, Homo sapien
ccaataccatgaatgtttgggcatc

SEQ ID NO: 5462849 - DNA, 25 bp, Homo sapien
aattcaatgtaagacttgaaaacag

SEQ ID NO: 5462850 - DNA, 25 bp, Homo sapien
cctaattcaatgtaagacttgaaaa

SEQ ID NO: 5462851 - DNA, 25 bp, Homo sapien
taattcaatgtaagacttgaaaaca

SEQ ID NO: 5462852 - DNA, 25 bp, Homo sapien
tcctgatgggagaactacacgatgc

SEQ ID NO: 5462853 - DNA, 25 bp, Homo sapien
cgttcattacagtcatcctcgggct

SEQ ID NO: 5462854 - DNA, 25 bp, Homo sapien
ttaatcatcagtgtctccgcacagc

SEQ ID NO: 5462855 - DNA, 25 bp, Homo sapien
gccctaatgagactcaggaacaagg

SEQ ID NO: 5462856 - DNA, 25 bp, Homo sapien
gtattcaggaccctagctgcaaggg

SEQ ID NO: 5462857 - DNA, 25 bp, Homo sapien
gagagagccaatccaagcaaccagt

SEQ ID NO: 5462858 - DNA, 25 bp, Homo sapien
tgcaagggaatcagggtaacatcac

SEQ ID NO: 5462859 - DNA, 25 bp, Homo sapien
gatgaactgaagattgagagagcca

SEQ ID NO: 5462860 - DNA, 25 bp, Homo sapien
tctgccaaaaggagtaacaagggcc

SEQ ID NO: 5462861 - DNA, 25 bp, Homo sapien
taatataagttcagagcatgccacc

SEQ ID NO: 5462862 - DNA, 25 bp, Homo sapien
gctcacaggccgttaacaggacaga

SEQ ID NO: 5462863 - DNA, 25 bp, Homo sapien
tgtgaagctccggaaatctgccaaa

SEQ ID NO: 5462864 - DNA, 25 bp, Homo sapien
cagaaatagagagcacatggagcca

SEQ ID NO: 5462865 - DNA, 25 bp, Homo sapien
ccttggtagggatactcacagaaat

SEQ ID NO: 5462866 - DNA, 25 bp, Homo sapien
cgctcctgtcatcaagcttgggcta

SEQ ID NO: 5462867 - DNA, 25 bp, Homo sapien
gatccagccaatatcctcaagtaga

SEQ ID NO: 5462868 - DNA, 25 bp, Homo sapien
ggaaggtggcccaatccccaatcca

SEQ ID NO: 5462869 - DNA, 25 bp, Homo sapien
caatccaagggtatatttggacaga

SEQ ID NO: 5462870 - DNA, 25 bp, Homo sapien
ctatgcaatatgctcagggaaggtg

SEQ ID NO: 5462871 - DNA, 25 bp, Homo sapien
gactttcgcagcaatcctgttttcc

SEQ ID NO: 5462872 - DNA, 25 bp, Homo sapien
cactgttgcgattgtgtgagatacc

SEQ ID NO: 5462873 - DNA, 25 bp, Homo sapien
ttgtttactgcactggaagctctca

SEQ ID NO: 5462874 - DNA, 25 bp, Homo sapien
attgtgtgagataccagctgcccgc

SEQ ID NO: 5462875 - DNA, 25 bp, Homo sapien
gtgcaatcccctgactgcatgcaag

SEQ ID NO: 5462876 - DNA, 25 bp, Homo sapien
tccaagccagtgttatgcagcataa

SEQ ID NO: 5462877 - DNA, 25 bp, Homo sapien
gagaggctcttcgcatccctccaag

SEQ ID NO: 5462878 - DNA, 25 bp, Homo sapien
ctgctaaacctgcccctgaaggcga

SEQ ID NO: 5462879 - DNA, 25 bp, Homo sapien
aggtggcatcgcagccaactgggaa

SEQ ID NO: 5462880 - DNA, 25 bp, Homo sapien
tagcccttgatagcacgcactgttg

SEQ ID NO: 5462881 - DNA, 25 bp, Homo sapien
tgctggaaaagctcaacactccctc

SEQ ID NO: 5462882 - DNA, 25 bp, Homo sapien
cctggcccaaaaatcactgttctga

SEQ ID NO: 5462883 - DNA, 25 bp, Homo sapien
gctggtaagggcaacaggacccaat

SEQ ID NO: 5462884 - DNA, 25 bp, Homo sapien
ctccaccatctaggttcctcgagtc

SEQ ID NO: 5462885 - DNA, 25 bp, Homo sapien
ctaagaagagaacgaagcaggaaga

SEQ ID NO: 5462886 - DNA, 25 bp, Homo sapien
aggatctccagatgcaagatgaaat

SEQ ID NO: 5462887 - DNA, 25 bp, Homo sapien
taggatctccagatgcaagatgaaa

SEQ ID NO: 5462888 - DNA, 25 bp, Homo sapien
cttaggatctccagatgcaagatga

SEQ ID NO: 5462889 - DNA, 25 bp, Homo sapien
ttaggatctccagatgcaagatgaa

SEQ ID NO: 5462890 - DNA, 25 bp, Homo sapien
caaatggattcgttctgatgaaggg

SEQ ID NO: 5462891 - DNA, 25 bp, Homo sapien
ttcgttctgatgaaggggcagtttt

SEQ ID NO: 5462892 - DNA, 25 bp, Homo sapien
gattcgttctgatgaaggggcagtt

SEQ ID NO: 5462893 - DNA, 25 bp, Homo sapien
ctccaaatggattcgttctgatgaa

SEQ ID NO: 5462894 - DNA, 25 bp, Homo sapien
ctttctaaggccaagtgagcccatg

SEQ ID NO: 5462895 - DNA, 25 bp, Homo sapien
tgcaactggtgtatgtatgaagccg

SEQ ID NO: 5462896 - DNA, 25 bp, Homo sapien
ataacccgggtaggactgaagccag

SEQ ID NO: 5462897 - DNA, 25 bp, Homo sapien
tgaagccgtagctgcataacccggg

SEQ ID NO: 5462898 - DNA, 25 bp, Homo sapien
aaaattatctaggcgtggtgagagg

SEQ ID NO: 5462899 - DNA, 25 bp, Homo sapien
tatctaggcgtggtgagaggcacct

SEQ ID NO: 5462900 - DNA, 25 bp, Homo sapien
aattatctaggcgtggtgagaggca

SEQ ID NO: 5462901 - DNA, 25 bp, Homo sapien
ttatctaggcgtggtgagaggcacc

SEQ ID NO: 5462902 - DNA, 25 bp, Homo sapien
gtaaaggtggagtacatctacagct

SEQ ID NO: 5462903 - DNA, 25 bp, Homo sapien
tacagctacaaaagctcagacctca

SEQ ID NO: 5462904 - DNA, 25 bp, Homo sapien
catctacagctacaaaagctcagac

SEQ ID NO: 5462905 - DNA, 25 bp, Homo sapien
tgggtaaaggtggagtacatctaca

SEQ ID NO: 5462906 - DNA, 25 bp, Homo sapien
ccaccaagagtcctacaaggaccag

SEQ ID NO: 5462907 - DNA, 25 bp, Homo sapien
gacagtagtgtctagagctaatagc

SEQ ID NO: 5462908 - DNA, 25 bp, Homo sapien
tcctacaaggaccagtagtggtgag

SEQ ID NO: 5462909 - DNA, 25 bp, Homo sapien
tagcatcggttccaccagtgcctct

SEQ ID NO: 5462910 - DNA, 25 bp, Homo sapien
agaccatcatccccacatgccagca

SEQ ID NO: 5462911 - DNA, 25 bp, Homo sapien
tcagaccatcatccccacatgccag

SEQ ID NO: 5462912 - DNA, 25 bp, Homo sapien
tcctgcattggctcccgaaagctca

SEQ ID NO: 5462913 - DNA, 25 bp, Homo sapien
accatcatccccacatgccagcagc

SEQ ID NO: 5462914 - DNA, 25 bp, Homo sapien
tctgtgaccaacttctaggagctgt

SEQ ID NO: 5462915 - DNA, 25 bp, Homo sapien
catgggagatcgtgattggcatcca

SEQ ID NO: 5462916 - DNA, 25 bp, Homo sapien
caaggtcagtgtgtttcgaggtatc

SEQ ID NO: 5462917 - DNA, 25 bp, Homo sapien
tagattgaggagcactgcaagccac

SEQ ID NO: 5462918 - DNA, 25 bp, Homo sapien
ccttggtcagtttcgcttggtgttt

SEQ ID NO: 5462919 - DNA, 25 bp, Homo sapien
tggacccatgagactgaactgcaac

SEQ ID NO: 5462920 - DNA, 25 bp, Homo sapien
aactgcaacagctcaccttggtcag

SEQ ID NO: 5462921 - DNA, 25 bp, Homo sapien
cttgagtctctatttggccactgag

SEQ ID NO: 5462922 - DNA, 25 bp, Homo sapien
cagtagtatagctcatgatggatta

SEQ ID NO: 5462923 - DNA, 25 bp, Homo sapien
gaagccctactggaaaacattggca

SEQ ID NO: 5462924 - DNA, 25 bp, Homo sapien
cagacttccagttaattttctacga

SEQ ID NO: 5462925 - DNA, 25 bp, Homo sapien
caaaaattgtaaaccagtagtatag

SEQ ID NO: 5462926 - DNA, 25 bp, Homo sapien
gtcctagttaaccaggaggctgaag

SEQ ID NO: 5462927 - DNA, 25 bp, Homo sapien
ggctgaagctgaaggatcccttgag

SEQ ID NO: 5462928 - DNA, 25 bp, Homo sapien
ctgcagtaagctgcaatggtgccac

SEQ ID NO: 5462929 - DNA, 25 bp, Homo sapien
tatagtcctagttaaccaggaggct

SEQ ID NO: 5462930 - DNA, 25 bp, Homo sapien
tttcatcaagtggtcattaaaatac

SEQ ID NO: 5462931 - DNA, 25 bp, Homo sapien
tcatcaagtggtcattaaaatactt

SEQ ID NO: 5462932 - DNA, 25 bp, Homo sapien
gaataacgaagtgctgaatgacttt

SEQ ID NO: 5462933 - DNA, 25 bp, Homo sapien
tttaataagaataacgaagtgctga

SEQ ID NO: 5462934 - DNA, 25 bp, Homo sapien
ttgcagcatgcatacatcatagtga

SEQ ID NO: 5462935 - DNA, 25 bp, Homo sapien
catagtgaagcggttttgttgtctg

SEQ ID NO: 5462936 - DNA, 25 bp, Homo sapien
tacatcatagtgaagcggttttgtt

SEQ ID NO: 5462937 - DNA, 25 bp, Homo sapien
ttcctttgcagcatgcatacatcat

SEQ ID NO: 5462938 - DNA, 25 bp, Homo sapien
tttggagcaccaaacatgtggaggc

SEQ ID NO: 5462939 - DNA, 25 bp, Homo sapien
tgagatgtttgcatggacttgccaa

SEQ ID NO: 5462940 - DNA, 25 bp, Homo sapien
tatccttggcgtgttctatctgggc

SEQ ID NO: 5462941 - DNA, 25 bp, Homo sapien
caactggacagaaatgggttcgtgc

SEQ ID NO: 5462942 - DNA, 25 bp, Homo sapien
tcaaacttccattcctccattttga

SEQ ID NO: 5462943 - DNA, 25 bp, Homo sapien
aacttccattcctccattttgagca

SEQ ID NO: 5462944 - DNA, 25 bp, Homo sapien
cattttgagcatcttcttggccaat

SEQ ID NO: 5462945 - DNA, 25 bp, Homo sapien
ccattttgagcatcttcttggccaa

SEQ ID NO: 5462946 - DNA, 25 bp, Homo sapien
tagctacactgcttctgtagagtga

SEQ ID NO: 5462947 - DNA, 25 bp, Homo sapien
tggctgcagcttcctagctacactg

SEQ ID NO: 5462948 - DNA, 25 bp, Homo sapien
tgtagagtgacttcggctgccgacc

SEQ ID NO: 5462949 - DNA, 25 bp, Homo sapien
cactgcttctgtagagtgacttcgg

SEQ ID NO: 5462950 - DNA, 25 bp, Homo sapien
gtatcctgggctagacggtatgacc

SEQ ID NO: 5462951 - DNA, 25 bp, Homo sapien
tcctgggctagacggtatgaccctg

SEQ ID NO: 5462952 - DNA, 25 bp, Homo sapien
tggagaagcttcctcaagaggggag

SEQ ID NO: 5462953 - DNA, 25 bp, Homo sapien
ggctagacggtatgaccctggtgtc

SEQ ID NO: 5462954 - DNA, 25 bp, Homo sapien
tatacttgctttgtttggtgaagca

SEQ ID NO: 5462955 - DNA, 25 bp, Homo sapien
aaagcagcggaagggagtcaagata

SEQ ID NO: 5462956 - DNA, 25 bp, Homo sapien
ttggcatcagggatgatattagcct

SEQ ID NO: 5462957 - DNA, 25 bp, Homo sapien
tttgtcagatttgtccatttggcat

SEQ ID NO: 5462958 - DNA, 25 bp, Homo sapien
tgggcagttagaaccttcaaatcgg

SEQ ID NO: 5462959 - DNA, 25 bp, Homo sapien
tcaaatcggcaaaattgccagtcat

SEQ ID NO: 5462960 - DNA, 25 bp, Homo sapien
ccagcagggcagtcctagcaaggct

SEQ ID NO: 5462961 - DNA, 25 bp, Homo sapien
cagtcccatgcaagtctatggtccc

SEQ ID NO: 5462962 - DNA, 25 bp, Homo sapien
catactaaccctttgcttactgtcc

SEQ ID NO: 5462963 - DNA, 25 bp, Homo sapien
acatactaaccctttgcttactgtc

SEQ ID NO: 5462964 - DNA, 25 bp, Homo sapien
gaaccaaccttcaagagaggctgca

SEQ ID NO: 5462965 - DNA, 25 bp, Homo sapien
gagagttttgtgagccagacctgca

SEQ ID NO: 5462966 - DNA, 25 bp, Homo sapien
aacaaaatttgtacgcaggtgcagg

SEQ ID NO: 5462967 - DNA, 25 bp, Homo sapien
gatcctcctgatggtagcgcacagt

SEQ ID NO: 5462968 - DNA, 25 bp, Homo sapien
agcacgaaggtcctcaattcctact

SEQ ID NO: 5462969 - DNA, 25 bp, Homo sapien
tcatctgattctaacattccatcca

SEQ ID NO: 5462970 - DNA, 25 bp, Homo sapien
tccattccaaagagcaagtccaaga

SEQ ID NO: 5462971 - DNA, 25 bp, Homo sapien
aagtccaagagccttgtcagtggca

SEQ ID NO: 5462972 - DNA, 25 bp, Homo sapien
taaaaggcactgatagccaggcaag

SEQ ID NO: 5462973 - DNA, 25 bp, Homo sapien
tttactctgagagactgatagttga

SEQ ID NO: 5462974 - DNA, 25 bp, Homo sapien
tccaaaagttcacacgagttgaaat

SEQ ID NO: 5462975 - DNA, 25 bp, Homo sapien
gaacatcacaaccagtgtactatgg

SEQ ID NO: 5462976 - DNA, 25 bp, Homo sapien
cactactgatgcagtatgaggacta

SEQ ID NO: 5462977 - DNA, 25 bp, Homo sapien
tgaggactatcttacttgtggaacc

SEQ ID NO: 5462978 - DNA, 25 bp, Homo sapien
tacaaatgtgtgtaactccctcagt

SEQ ID NO: 5462979 - DNA, 25 bp, Homo sapien
agtgcgctgctatcgtgctactgca

SEQ ID NO: 5462980 - DNA, 25 bp, Homo sapien
ctgcaatctctgcctctggggctca

SEQ ID NO: 5462981 - DNA, 25 bp, Homo sapien
gcaatctctgcctctggggctcaaa

SEQ ID NO: 5462982 - DNA, 25 bp, Homo sapien
aatctctgcctctggggctcaaacg

SEQ ID NO: 5462983 - DNA, 25 bp, Homo sapien
atctctgcctctggggctcaaacga

SEQ ID NO: 5462984 - DNA, 25 bp, Homo sapien
gaattctaaagaagacgctggctga

SEQ ID NO: 5462985 - DNA, 25 bp, Homo sapien
aaaagtcagtaggagcaaaagcaat

SEQ ID NO: 5462986 - DNA, 25 bp, Homo sapien
tcagggaccattgtgaataagtaca

SEQ ID NO: 5462987 - DNA, 25 bp, Homo sapien
caaagtacatggtctactggtaaac

SEQ ID NO: 5462988 - DNA, 25 bp, Homo sapien
ggaagatgtccctaaaatccctcaa

SEQ ID NO: 5462989 - DNA, 25 bp, Homo sapien
caatgactattttagcctaggccca

SEQ ID NO: 5462990 - DNA, 25 bp, Homo sapien
aaatttaccccactgtgccatatag

SEQ ID NO: 5462991 - DNA, 25 bp, Homo sapien
ccttgcccagaagagatatatttac

SEQ ID NO: 5462992 - DNA, 25 bp, Homo sapien
ggaaacacactcttctaggaaatca

SEQ ID NO: 5462993 - DNA, 25 bp, Homo sapien
tctaatatgaatgataccagacctc

SEQ ID NO: 5462994 - DNA, 25 bp, Homo sapien
ccagatgggatctcctaaagaatcc

SEQ ID NO: 5462995 - DNA, 25 bp, Homo sapien
ggtaaaacatcaaatagcaggcagc

SEQ ID NO: 5462996 - DNA, 25 bp, Homo sapien
ttgtttgtttgagacgaagtctcgc

SEQ ID NO: 5462997 - DNA, 25 bp, Homo sapien
cctggagtgcactggtatgaccttg

SEQ ID NO: 5462998 - DNA, 25 bp, Homo sapien
gcatgagccactgtacccggcctaa

SEQ ID NO: 5462999 - DNA, 25 bp, Homo sapien
gtcacccgcctggagtgcactggta

SEQ ID NO: 5463000 - DNA, 25 bp, Homo sapien
tgttaggacctggttatacagaatt

SEQ ID NO: 5463001 - DNA, 25 bp, Homo sapien
gctatttccctgtaatatgtctgat

SEQ ID NO: 5463002 - DNA, 25 bp, Homo sapien
aatatgtctgatcactgttaggacc

SEQ ID NO: 5463003 - DNA, 25 bp, Homo sapien
ccggcctacaagctatttccctgta

SEQ ID NO: 5463004 - DNA, 25 bp, Homo sapien
aataatggtcagcagcaaatctttt

SEQ ID NO: 5463005 - DNA, 25 bp, Homo sapien
taataatggtcagcagcaaatcttt

SEQ ID NO: 5463006 - DNA, 25 bp, Homo sapien
gtaataatggtcagcagcaaatctt

SEQ ID NO: 5463007 - DNA, 25 bp, Homo sapien
agtaataatggtcagcagcaaatct

SEQ ID NO: 5463008 - DNA, 25 bp, Homo sapien
ttttggcatggtgcctgaggctcca

SEQ ID NO: 5463009 - DNA, 25 bp, Homo sapien
gaaaggaatctaccatataggctgt

SEQ ID NO: 5463010 - DNA, 25 bp, Homo sapien
catctaagagtgcttggaacgtgaa

SEQ ID NO: 5463011 - DNA, 25 bp, Homo sapien
tgaggctccatcaaaaaaccggatg

SEQ ID NO: 5463012 - DNA, 25 bp, Homo sapien
tcttcttactaaatccgcaggcagg

SEQ ID NO: 5463013 - DNA, 25 bp, Homo sapien
ctttgagcatttggagatttgaggc

SEQ ID NO: 5463014 - DNA, 25 bp, Homo sapien
ggctactgaagattgacagctgttc

SEQ ID NO: 5463015 - DNA, 25 bp, Homo sapien
gccaccacacgctcagaataagctt

SEQ ID NO: 5463016 - DNA, 25 bp, Homo sapien
gatcctcttgacctacttatttgaa

SEQ ID NO: 5463017 - DNA, 25 bp, Homo sapien
tcctcttgacctacttatttgaaaa

SEQ ID NO: 5463018 - DNA, 25 bp, Homo sapien
tggatcctcttgacctacttatttg

SEQ ID NO: 5463019 - DNA, 25 bp, Homo sapien
gctctggatcctcttgacctactta

SEQ ID NO: 5463020 - DNA, 25 bp, Homo sapien
catctttctcccatggtttgggaaa

SEQ ID NO: 5463021 - DNA, 25 bp, Homo sapien
cccacctattataaactcgtccagg

SEQ ID NO: 5463022 - DNA, 25 bp, Homo sapien
ccccacctattataaactcgtccag

SEQ ID NO: 5463023 - DNA, 25 bp, Homo sapien
tccccacctattataaactcgtcca

SEQ ID NO: 5463024 - DNA, 25 bp, Homo sapien
cagagtcttcaatggctttgacagc

SEQ ID NO: 5463025 - DNA, 25 bp, Homo sapien
taattatgcaaataccccggcttct

SEQ ID NO: 5463026 - DNA, 25 bp, Homo sapien
gtgattccactccttctaattatgc

SEQ ID NO: 5463027 - DNA, 25 bp, Homo sapien
tgaggttgtcccaatacaacaaaaa

SEQ ID NO: 5463028 - DNA, 25 bp, Homo sapien
tattttctcgtgtatctagattctg

SEQ ID NO: 5463029 - DNA, 25 bp, Homo sapien
agaactgaagtaagagctgagatgg

SEQ ID NO: 5463030 - DNA, 25 bp, Homo sapien
gaagggatgtgaccagagacagaac

SEQ ID NO: 5463031 - DNA, 25 bp, Homo sapien
tgagatggggactgtagctaatcct

SEQ ID NO: 5463032 - DNA, 25 bp, Homo sapien
taatcctaaccgacaaggacaacac

SEQ ID NO: 5463033 - DNA, 25 bp, Homo sapien
tccacgtaacgatgcacaatctcta

SEQ ID NO: 5463034 - DNA, 25 bp, Homo sapien
gtaacgatgcacaatctctagcgtc

SEQ ID NO: 5463035 - DNA, 25 bp, Homo sapien
gatgcacaatctctagcgtcaagag

SEQ ID NO: 5463036 - DNA, 25 bp, Homo sapien
tctctagcgtcaagagctcattgtc

SEQ ID NO: 5463037 - DNA, 25 bp, Homo sapien
acagcaaaaatataaactagcatac

SEQ ID NO: 5463038 - DNA, 25 bp, Homo sapien
ctattgcacagcaaaaatataaact

SEQ ID NO: 5463039 - DNA, 25 bp, Homo sapien
attgcacagcaaaaatataaactag

SEQ ID NO: 5463040 - DNA, 25 bp, Homo sapien
gcacagcaaaaatataaactagcat

SEQ ID NO: 5463041 - DNA, 25 bp, Homo sapien
gcatgcgtgcactatcaaggtgtag

SEQ ID NO: 5463042 - DNA, 25 bp, Homo sapien
tagaatccatcctggcacctagaat

SEQ ID NO: 5463043 - DNA, 25 bp, Homo sapien
tattggtacaaatatctgggcccca

SEQ ID NO: 5463044 - DNA, 25 bp, Homo sapien
ggccccagccttcaaagatttcagt

SEQ ID NO: 5463045 - DNA, 25 bp, Homo sapien
taatctgaacaatttcccgggtgat

SEQ ID NO: 5463046 - DNA, 25 bp, Homo sapien
tctttatcagggagagtgatgtacc

SEQ ID NO: 5463047 - DNA, 25 bp, Homo sapien
aactgcttgtcctgtgaccacggga

SEQ ID NO: 5463048 - DNA, 25 bp, Homo sapien
taatttcccttgtcgactgaagagc

SEQ ID NO: 5463049 - DNA, 25 bp, Homo sapien
ctccgagggaagcacgaagcgcagc

SEQ ID NO: 5463050 - DNA, 25 bp, Homo sapien
gggacactgttagtcctccgaggga

SEQ ID NO: 5463051 - DNA, 25 bp, Homo sapien
cctggccggtgtccgcatcttcctt

SEQ ID NO: 5463052 - DNA, 25 bp, Homo sapien
gtctgctgagtctgcgccctggccg

SEQ ID NO: 5463053 - DNA, 25 bp, Homo sapien
ccggactagctcgtatctcaggacc

SEQ ID NO: 5463054 - DNA, 25 bp, Homo sapien
aaacaccagcctttccggactagct

SEQ ID NO: 5463055 - DNA, 25 bp, Homo sapien
gtccccagtattgtcacattccaaa

SEQ ID NO: 5463056 - DNA, 25 bp, Homo sapien
ctgtccccagtattgtcacattcca

SEQ ID NO: 5463057 - DNA, 25 bp, Homo sapien
tctcatctttgcttttatatgaagg

SEQ ID NO: 5463058 - DNA, 25 bp, Homo sapien
catccactctcatctttgcttttat

SEQ ID NO: 5463059 - DNA, 25 bp, Homo sapien
tgcaaattcccaaacccgatcagca

SEQ ID NO: 5463060 - DNA, 25 bp, Homo sapien
ctgcaaattcccaaacccgatcagc

SEQ ID NO: 5463061 - DNA, 25 bp, Homo sapien
tccctttgatcccccacgtgggtca

SEQ ID NO: 5463062 - DNA, 25 bp, Homo sapien
ctctcaatacaaaggatttccaagc

SEQ ID NO: 5463063 - DNA, 25 bp, Homo sapien
ccctttgatcccccacgtgggtcat

SEQ ID NO: 5463064 - DNA, 25 bp, Homo sapien
aatcactgttccggatttcatccag

SEQ ID NO: 5463065 - DNA, 25 bp, Homo sapien
caatcactgttccggatttcatcca

SEQ ID NO: 5463066 - DNA, 25 bp, Homo sapien
tcaatcactgttccggatttcatcc

SEQ ID NO: 5463067 - DNA, 25 bp, Homo sapien
atcactgttccggatttcatccagg

SEQ ID NO: 5463068 - DNA, 25 bp, Homo sapien
tggtgaagtaaggccccagagcaga

SEQ ID NO: 5463069 - DNA, 25 bp, Homo sapien
cagtgacagaggtgtgatcatgcag

SEQ ID NO: 5463070 - DNA, 25 bp, Homo sapien
caggcagtgacagaggtgtgatcat

SEQ ID NO: 5463071 - DNA, 25 bp, Homo sapien
gaacagagctggtataagttcttcc

SEQ ID NO: 5463072 - DNA, 25 bp, Homo sapien
cccagggaagcagtactatttcctt

SEQ ID NO: 5463073 - DNA, 25 bp, Homo sapien
ccagggaagcagtactatttccttt

SEQ ID NO: 5463074 - DNA, 25 bp, Homo sapien
agtggcttccgaaaatggaagtggc

SEQ ID NO: 5463075 - DNA, 25 bp, Homo sapien
cagtggcttccgaaaatggaagtgg

SEQ ID NO: 5463076 - DNA, 25 bp, Homo sapien
acggctggcatcactaggtatctca

SEQ ID NO: 5463077 - DNA, 25 bp, Homo sapien
gacttcaagaagcaagtaagagaaa

SEQ ID NO: 5463078 - DNA, 25 bp, Homo sapien
aaagacttcaagaagcaagtaagag

SEQ ID NO: 5463079 - DNA, 25 bp, Homo sapien
aggcctcagtggatacggctggcat

SEQ ID NO: 5463080 - DNA, 25 bp, Homo sapien
tctgccccatctagttcatagccgg

SEQ ID NO: 5463081 - DNA, 25 bp, Homo sapien
aatgggacgtggctgttctctgcct

SEQ ID NO: 5463082 - DNA, 25 bp, Homo sapien
tgttttctgtgttaacaatgggacg

SEQ ID NO: 5463083 - DNA, 25 bp, Homo sapien
catctagttcatagccggcagcctc

SEQ ID NO: 5463084 - DNA, 25 bp, Homo sapien
aagacggttattcatgtttccaaag

SEQ ID NO: 5463085 - DNA, 25 bp, Homo sapien
tatgagaacggaatttgcaacacaa

SEQ ID NO: 5463086 - DNA, 25 bp, Homo sapien
agtttctttcaatgggtggctctac

SEQ ID NO: 5463087 - DNA, 25 bp, Homo sapien
tcagaagcacatggactacatacat

SEQ ID NO: 5463088 - DNA, 25 bp, Homo sapien
ccgcctcccccgccttgcgagcaag

SEQ ID NO: 5463089 - DNA, 25 bp, Homo sapien
tcccccgccttgcgagcaaggagcg

SEQ ID NO: 5463090 - DNA, 25 bp, Homo sapien
cctcccccgccttgcgagcaaggag

SEQ ID NO: 5463091 - DNA, 25 bp, Homo sapien
gcctcccccgccttgcgagcaagga

SEQ ID NO: 5463092 - DNA, 25 bp, Homo sapien
gcgagcgctggagccggtgcggctg

SEQ ID NO: 5463093 - DNA, 25 bp, Homo sapien
gctgacaggtgaggcgcccggctta

SEQ ID NO: 5463094 - DNA, 25 bp, Homo sapien
cgctggagccggtgcggctgacagg

SEQ ID NO: 5463095 - DNA, 25 bp, Homo sapien
cgcccggcttagaccatggctgctt

SEQ ID NO: 5463096 - DNA, 25 bp, Homo sapien
aggttgatctcgagaatccctggcc

SEQ ID NO: 5463097 - DNA, 25 bp, Homo sapien
cctggtcagatcctaaagaggcttt

SEQ ID NO: 5463098 - DNA, 25 bp, Homo sapien
taccagtctaaagaggagttccctg

SEQ ID NO: 5463099 - DNA, 25 bp, Homo sapien
cacacgtggcccacaaatagcaaaa

SEQ ID NO: 5463100 - DNA, 25 bp, Homo sapien
catgagcttgtactgtctgatccaa

SEQ ID NO: 5463101 - DNA, 25 bp, Homo sapien
taccaatgagatcaccatgagcttg

SEQ ID NO: 5463102 - DNA, 25 bp, Homo sapien
tcagtaaggacaactcatgtgattc

SEQ ID NO: 5463103 - DNA, 25 bp, Homo sapien
catttcacacatcagcagcattaga

SEQ ID NO: 5463104 - DNA, 25 bp, Homo sapien
catttaaagagccatgagacatcaa

SEQ ID NO: 5463105 - DNA, 25 bp, Homo sapien
tgaccatggcctgtggacacagtcc

SEQ ID NO: 5463106 - DNA, 25 bp, Homo sapien
tggccggggttggggcacaacttgc

SEQ ID NO: 5463107 - DNA, 25 bp, Homo sapien
aggccggacaactcaaaggcgggcg

SEQ ID NO: 5463108 - DNA, 25 bp, Homo sapien
ggtgccagacagatccctaaggaaa

SEQ ID NO: 5463109 - DNA, 25 bp, Homo sapien
ggtcatctggccgtgaaattcaaag

SEQ ID NO: 5463110 - DNA, 25 bp, Homo sapien
agaaatgactctttgaattcctcaa

SEQ ID NO: 5463111 - DNA, 25 bp, Homo sapien
gctttccatgcagttagggtttatg

SEQ ID NO: 5463112 - DNA, 25 bp, Homo sapien
tgtgttcccatgtaaagaccagctt

SEQ ID NO: 5463113 - DNA, 25 bp, Homo sapien
gaccagcttttgagttgatcctaca

SEQ ID NO: 5463114 - DNA, 25 bp, Homo sapien
aaatgcaccttagatatgggctggc

SEQ ID NO: 5463115 - DNA, 25 bp, Homo sapien
tataaaaagtgctcaggccaagccc

SEQ ID NO: 5463116 - DNA, 25 bp, Homo sapien
tctgcagggtaaggaatataaaagc

SEQ ID NO: 5463117 - DNA, 25 bp, Homo sapien
ggctctgtgcggtcacatgcatagg

SEQ ID NO: 5463118 - DNA, 25 bp, Homo sapien
aacagtcatcgcacacagaagcagg

SEQ ID NO: 5463119 - DNA, 25 bp, Homo sapien
tcaacaaacaagcagaacagtcatc

SEQ ID NO: 5463120 - DNA, 25 bp, Homo sapien
atttaaaacaatcagggctactgca

SEQ ID NO: 5463121 - DNA, 25 bp, Homo sapien
tttaaaacaatcagggctactgcag

SEQ ID NO: 5463122 - DNA, 25 bp, Homo sapien
ttccacaggcttcagagtgaattat

SEQ ID NO: 5463123 - DNA, 25 bp, Homo sapien
ccatcacaagtgaagccttgaaggc

SEQ ID NO: 5463124 - DNA, 25 bp, Homo sapien
tcccaatgacttgcttcatacccag

SEQ ID NO: 5463125 - DNA, 25 bp, Homo sapien
ccagtagaggcgttagagttccgac

SEQ ID NO: 5463126 - DNA, 25 bp, Homo sapien
agcctccctgtgcaacacaggaaat

SEQ ID NO: 5463127 - DNA, 25 bp, Homo sapien
gagcctccctgtgcaacacaggaaa

SEQ ID NO: 5463128 - DNA, 25 bp, Homo sapien
cgagcctccctgtgcaacacaggaa

SEQ ID NO: 5463129 - DNA, 25 bp, Homo sapien
taatagtcttacgagaggcagatgc

SEQ ID NO: 5463130 - DNA, 25 bp, Homo sapien
ccaaggccattttaggccaaggcat

SEQ ID NO: 5463131 - DNA, 25 bp, Homo sapien
ccattttaggccaaggcatggcagt

SEQ ID NO: 5463132 - DNA, 25 bp, Homo sapien
agtactaagttaatagtcttacgag

SEQ ID NO: 5463133 - DNA, 25 bp, Homo sapien
agtaagagcctttccccaccctctg

SEQ ID NO: 5463134 - DNA, 25 bp, Homo sapien
gtaagagcctttccccaccctctga

SEQ ID NO: 5463135 - DNA, 25 bp, Homo sapien
taagagcctttccccaccctctgac

SEQ ID NO: 5463136 - DNA, 25 bp, Homo sapien
cagtaagagcctttccccaccctct

SEQ ID NO: 5463137 - DNA, 25 bp, Homo sapien
aatgttctttatgaaccagggttat

SEQ ID NO: 5463138 - DNA, 25 bp, Homo sapien
cagggttatgaatgaagttcttaga

SEQ ID NO: 5463139 - DNA, 25 bp, Homo sapien
ccagggttatgaatgaagttcttag

SEQ ID NO: 5463140 - DNA, 25 bp, Homo sapien
agggttatgaatgaagttcttagaa

SEQ ID NO: 5463141 - DNA, 25 bp, Homo sapien
acaggaatggcatgatttgagtcac

SEQ ID NO: 5463142 - DNA, 25 bp, Homo sapien
ctatgtggcttgataggagtcagca

SEQ ID NO: 5463143 - DNA, 25 bp, Homo sapien
gaacttccactatgaatgggatggg

SEQ ID NO: 5463144 - DNA, 25 bp, Homo sapien
ggataacacggagaactatgtggct

SEQ ID NO: 5463145 - DNA, 25 bp, Homo sapien
atgtactttctagaaagaattaaga

SEQ ID NO: 5463146 - DNA, 25 bp, Homo sapien
aatgtactttctagaaagaattaag

SEQ ID NO: 5463147 - DNA, 25 bp, Homo sapien
tgtactttctagaaagaattaagac

SEQ ID NO: 5463148 - DNA, 25 bp, Homo sapien
gaatggcttagcgtcacacttcacc

SEQ ID NO: 5463149 - DNA, 25 bp, Homo sapien
tggtaccagaggctcacctgcagta

SEQ ID NO: 5463150 - DNA, 25 bp, Homo sapien
tcttgacctcaaatggagacgtggg

SEQ ID NO: 5463151 - DNA, 25 bp, Homo sapien
ggagttctactttttgacacgggca

SEQ ID NO: 5463152 - DNA, 25 bp, Homo sapien
gccttacacttacgatgagcagatg

SEQ ID NO: 5463153 - DNA, 25 bp, Homo sapien
cctaggatagcacctttgtatgggc

SEQ ID NO: 5463154 - DNA, 25 bp, Homo sapien
cctagcatatgagagagacaagact

SEQ ID NO: 5463155 - DNA, 25 bp, Homo sapien
tctagcatctctgggatacacaggg

SEQ ID NO: 5463156 - DNA, 25 bp, Homo sapien
atactggaatattaaaagacaggct

SEQ ID NO: 5463157 - DNA, 25 bp, Homo sapien
agatatatgtactgttgtcaaaaaa

SEQ ID NO: 5463158 - DNA, 25 bp, Homo sapien
actggaatattaaaagacaggctcc

SEQ ID NO: 5463159 - DNA, 25 bp, Homo sapien
aaatcaaacacacaaatactggaat

SEQ ID NO: 5463160 - DNA, 25 bp, Homo sapien
tacacagtgcccaaaagctttagaa

SEQ ID NO: 5463161 - DNA, 25 bp, Homo sapien
atgccattatgaacaatagcttttg

SEQ ID NO: 5463162 - DNA, 25 bp, Homo sapien
tcctggtacacagtgcccaaaagct

SEQ ID NO: 5463163 - DNA, 25 bp, Homo sapien
ctggtacacagtgcccaaaagcttt

SEQ ID NO: 5463164 - DNA, 25 bp, Homo sapien
tgccaagtcatagggaaaggtctct

SEQ ID NO: 5463165 - DNA, 25 bp, Homo sapien
ttcagggaaccactatggacagacc

SEQ ID NO: 5463166 - DNA, 25 bp, Homo sapien
gatcatttcgcatcacagtggtggc

SEQ ID NO: 5463167 - DNA, 25 bp, Homo sapien
tgacaaccccgaaagttcacctgtg

SEQ ID NO: 5463168 - DNA, 25 bp, Homo sapien
tgctgttcttaggtgtggacgccgc

SEQ ID NO: 5463169 - DNA, 25 bp, Homo sapien
agggacttcatttggtggagctgct

SEQ ID NO: 5463170 - DNA, 25 bp, Homo sapien
cattcacgagacagcgctgtggagc

SEQ ID NO: 5463171 - DNA, 25 bp, Homo sapien
taagtggctactgtccattcacgag

SEQ ID NO: 5463172 - DNA, 25 bp, Homo sapien
gcggagaaaacccagtcgccagact

SEQ ID NO: 5463173 - DNA, 25 bp, Homo sapien
tcagtgcggagaaaacccagtcgcc

SEQ ID NO: 5463174 - DNA, 25 bp, Homo sapien
agaaaacccagtcgccagactgcag

SEQ ID NO: 5463175 - DNA, 25 bp, Homo sapien
agtgcggagaaaacccagtcgccag

SEQ ID NO: 5463176 - DNA, 25 bp, Homo sapien
tcagtcccctggcaatgtccatgga

SEQ ID NO: 5463177 - DNA, 25 bp, Homo sapien
ttttccttcatgaaaggtcgctaga

SEQ ID NO: 5463178 - DNA, 25 bp, Homo sapien
catgaaaggtcgctagagaagtccg

SEQ ID NO: 5463179 - DNA, 25 bp, Homo sapien
ctttacaatgcggtcggtcccacag

SEQ ID NO: 5463180 - DNA, 25 bp, Homo sapien
tatagagaaccagctcaaccactgc

SEQ ID NO: 5463181 - DNA, 25 bp, Homo sapien
actgtgttcaggagaaagctgccca

SEQ ID NO: 5463182 - DNA, 25 bp, Homo sapien
caatttaagaatagactgctaggcc

SEQ ID NO: 5463183 - DNA, 25 bp, Homo sapien
gttcatttaccaacaccagtcgtga

SEQ ID NO: 5463184 - DNA, 25 bp, Homo sapien
ttggaactcgaagcccatgactggg

SEQ ID NO: 5463185 - DNA, 25 bp, Homo sapien
ctttgatggagtcgtaacaagaatc

SEQ ID NO: 5463186 - DNA, 25 bp, Homo sapien
tcacaaacccggacttggaactcga

SEQ ID NO: 5463187 - DNA, 25 bp, Homo sapien
taacttgagcgcttgctgctgcact

SEQ ID NO: 5463188 - DNA, 25 bp, Homo sapien
aatattccaggtatgcttataaggg

SEQ ID NO: 5463189 - DNA, 25 bp, Homo sapien
ggtcaggcattcaagtgaggactaa

SEQ ID NO: 5463190 - DNA, 25 bp, Homo sapien
tgtttaaaaataggctctcaggatt

SEQ ID NO: 5463191 - DNA, 25 bp, Homo sapien
tctcaggattttctacgcacccctg

SEQ ID NO: 5463192 - DNA, 25 bp, Homo sapien
gacaagaatcactttccaaccactg

SEQ ID NO: 5463193 - DNA, 25 bp, Homo sapien
aagaatcactttccaaccactgagg

SEQ ID NO: 5463194 - DNA, 25 bp, Homo sapien
caagaatcactttccaaccactgag

SEQ ID NO: 5463195 - DNA, 25 bp, Homo sapien
gaatcactttccaaccactgaggag

SEQ ID NO: 5463196 - DNA, 25 bp, Homo sapien
tgcaattccgccgtccgaggaacag

SEQ ID NO: 5463197 - DNA, 25 bp, Homo sapien
ttccgccgtccgaggaacaggagac

SEQ ID NO: 5463198 - DNA, 25 bp, Homo sapien
tccgaggaacaggagacgagctgcc

SEQ ID NO: 5463199 - DNA, 25 bp, Homo sapien
ttccacactgcaattccgccgtccg

SEQ ID NO: 5463200 - DNA, 25 bp, Homo sapien
gaaggtagcacagcgactgcacctt

SEQ ID NO: 5463201 - DNA, 25 bp, Homo sapien
aggtagcacagcgactgcaccttgt

SEQ ID NO: 5463202 - DNA, 25 bp, Homo sapien
ctgaaggtagcacagcgactgcacc

SEQ ID NO: 5463203 - DNA, 25 bp, Homo sapien
gtagcacagcgactgcaccttgtca

SEQ ID NO: 5463204 - DNA, 25 bp, Homo sapien
tgtcttcatttaggctcaaattgct

SEQ ID NO: 5463205 - DNA, 25 bp, Homo sapien
cacttgtctccatgcggaaaaacac

SEQ ID NO: 5463206 - DNA, 25 bp, Homo sapien
tttaggctcaaattgctctcctcat

SEQ ID NO: 5463207 - DNA, 25 bp, Homo sapien
agtcacttgtctccatgcggaaaaa

SEQ ID NO: 5463208 - DNA, 25 bp, Homo sapien
tttgcagaaagtggtatcagactat

SEQ ID NO: 5463209 - DNA, 25 bp, Homo sapien
gggtttgcagaaagtggtatcagac

SEQ ID NO: 5463210 - DNA, 25 bp, Homo sapien
aagtggtatcagactattaatgcct

SEQ ID NO: 5463211 - DNA, 25 bp, Homo sapien
gcagaaagtggtatcagactattaa

SEQ ID NO: 5463212 - DNA, 25 bp, Homo sapien
ccccacccccacaagtggtcacgca

SEQ ID NO: 5463213 - DNA, 25 bp, Homo sapien
tccccacccccacaagtggtcacgc

SEQ ID NO: 5463214 - DNA, 25 bp, Homo sapien
cccacccccacaagtggtcacgcac

SEQ ID NO: 5463215 - DNA, 25 bp, Homo sapien
tttccttcctccgatgtcccacatg

SEQ ID NO: 5463216 - DNA, 25 bp, Homo sapien
tgaatagggtcccaccagaggcagg

SEQ ID NO: 5463217 - DNA, 25 bp, Homo sapien
ccctgaagtaacagcgtccggcctt

SEQ ID NO: 5463218 - DNA, 25 bp, Homo sapien
ctgagaagagtaaccgctgaatagg

SEQ ID NO: 5463219 - DNA, 25 bp, Homo sapien
catgtcctttgagggttgtgatgac

SEQ ID NO: 5463220 - DNA, 25 bp, Homo sapien
tcaccaacgaaagcatactgagtgt

SEQ ID NO: 5463221 - DNA, 25 bp, Homo sapien
gttctgttcaagcttcagcagggtg

SEQ ID NO: 5463222 - DNA, 25 bp, Homo sapien
gttgtgatgactgaacacgtgttct

SEQ ID NO: 5463223 - DNA, 25 bp, Homo sapien
aggagaagcagtcaaggatgtagaa

SEQ ID NO: 5463224 - DNA, 25 bp, Homo sapien
caaaacgcagttatttgtggcggta

SEQ ID NO: 5463225 - DNA, 25 bp, Homo sapien
aaagagcaccgtaaactagggcatg

SEQ ID NO: 5463226 - DNA, 25 bp, Homo sapien
tcattactttctcgatttgtggtca

SEQ ID NO: 5463227 - DNA, 25 bp, Homo sapien
aactatcactcttccaaaacacggg

SEQ ID NO: 5463228 - DNA, 25 bp, Homo sapien
cggaagttctcggattttcagtgaa

SEQ ID NO: 5463229 - DNA, 25 bp, Homo sapien
ttagatctcagccatttgggatgag

SEQ ID NO: 5463230 - DNA, 25 bp, Homo sapien
tttgcacaaacttaaataggtttca

SEQ ID NO: 5463231 - DNA, 25 bp, Homo sapien
caatttacagcaaacttacggaagt

SEQ ID NO: 5463232 - DNA, 25 bp, Homo sapien
ggagaggtccgtggctctgaaggat

SEQ ID NO: 5463233 - DNA, 25 bp, Homo sapien
ggaaggagaggtccgtggctctgaa

SEQ ID NO: 5463234 - DNA, 25 bp, Homo sapien
aaggagaggtccgtggctctgaagg

SEQ ID NO: 5463235 - DNA, 25 bp, Homo sapien
ggggaaggagaggtccgtggctctg

SEQ ID NO: 5463236 - DNA, 25 bp, Homo sapien
gcatgttcccgctccgcgtgcacat

SEQ ID NO: 5463237 - DNA, 25 bp, Homo sapien
gaagtgcctcccgagcatgttcccg

SEQ ID NO: 5463238 - DNA, 25 bp, Homo sapien
gctccgcgtgcacatccagctcaca

SEQ ID NO: 5463239 - DNA, 25 bp, Homo sapien
acgaagcccaggacgtgaagaagtg

SEQ ID NO: 5463240 - DNA, 25 bp, Homo sapien
aagctgaagataatcgcagacaccc

SEQ ID NO: 5463241 - DNA, 25 bp, Homo sapien
taatcgcagacacccggttctgatg

SEQ ID NO: 5463242 - DNA, 25 bp, Homo sapien
ttgtcgtggccggtactgatcaccc

SEQ ID NO: 5463243 - DNA, 25 bp, Homo sapien
ccggtactgatcacccactctgtgg

SEQ ID NO: 5463244 - DNA, 25 bp, Homo sapien
tccaaggcggtgccctctgctcccc

SEQ ID NO: 5463245 - DNA, 25 bp, Homo sapien
ggctctctccaaggcggtgccctct

SEQ ID NO: 5463246 - DNA, 25 bp, Homo sapien
gctctctccaaggcggtgccctctg

SEQ ID NO: 5463247 - DNA, 25 bp, Homo sapien
ctctccaaggcggtgccctctgctc

SEQ ID NO: 5463248 - DNA, 25 bp, Homo sapien
ttgctctcagctgtacagactgctt

SEQ ID NO: 5463249 - DNA, 25 bp, Homo sapien
caggtcaattataagccacaccggg

SEQ ID NO: 5463250 - DNA, 25 bp, Homo sapien
ctgtatgaacaagaaccatgtggaa

SEQ ID NO: 5463251 - DNA, 25 bp, Homo sapien
gaaagcagcagttgtaacagtgcaa

SEQ ID NO: 5463252 - DNA, 25 bp, Homo sapien
tgggtaggtcttgataaagttcatt

SEQ ID NO: 5463253 - DNA, 25 bp, Homo sapien
ctgggtaggtcttgataaagttcat

SEQ ID NO: 5463254 - DNA, 25 bp, Homo sapien
gagcacccagctatcaattacgaca

SEQ ID NO: 5463255 - DNA, 25 bp, Homo sapien
tctccaccatcacggctaagggatg

SEQ ID NO: 5463256 - DNA, 25 bp, Homo sapien
tatgatctgtgggtcagcccgagca

SEQ ID NO: 5463257 - DNA, 25 bp, Homo sapien
tgagttgctagctgaatgaccacac

SEQ ID NO: 5463258 - DNA, 25 bp, Homo sapien
gatggtaagccatagcagagcaagg

SEQ ID NO: 5463259 - DNA, 25 bp, Homo sapien
tggcccacaaatatccgtctgctgt

SEQ ID NO: 5463260 - DNA, 25 bp, Homo sapien
tctgctgtcatgatggtaagccata

SEQ ID NO: 5463261 - DNA, 25 bp, Homo sapien
cacaaatatccgtctgctgtcatga

SEQ ID NO: 5463262 - DNA, 25 bp, Homo sapien
ctttaagttgttcttcaaagtgatt

SEQ ID NO: 5463263 - DNA, 25 bp, Homo sapien
gctaagcactttaagttgttcttca

SEQ ID NO: 5463264 - DNA, 25 bp, Homo sapien
cattaccagcaaagctaagcacttt

SEQ ID NO: 5463265 - DNA, 25 bp, Homo sapien
agaccacattaccagcaaagctaag

SEQ ID NO: 5463266 - DNA, 25 bp, Homo sapien
tcctaaattggataatctgcggata

SEQ ID NO: 5463267 - DNA, 25 bp, Homo sapien
tctgcggatagcttttagaactaac

SEQ ID NO: 5463268 - DNA, 25 bp, Homo sapien
aaggcttggcttattgatcactctg

SEQ ID NO: 5463269 - DNA, 25 bp, Homo sapien
ggtggatataaccactaagacatcc

SEQ ID NO: 5463270 - DNA, 25 bp, Homo sapien
tcttcttgtggtgtatctgcagttt

SEQ ID NO: 5463271 - DNA, 25 bp, Homo sapien
ttcttcttgtggtgtatctgcagtt

SEQ ID NO: 5463272 - DNA, 25 bp, Homo sapien
tttcttcttgtggtgtatctgcagt

SEQ ID NO: 5463273 - DNA, 25 bp, Homo sapien
ttttcttcttgtggtgtatctgcag

SEQ ID NO: 5463274 - DNA, 25 bp, Homo sapien
ctgaacatgtgcagatacaaacatg

SEQ ID NO: 5463275 - DNA, 25 bp, Homo sapien
tgtcgaccacccactgcgaagctgt

SEQ ID NO: 5463276 - DNA, 25 bp, Homo sapien
gatacaaacatgtaggtgtcgacca

SEQ ID NO: 5463277 - DNA, 25 bp, Homo sapien
ctagaagtaacacactgaacatgtg

SEQ ID NO: 5463278 - DNA, 25 bp, Homo sapien
gccactggaaagtaaggagttagcc

SEQ ID NO: 5463279 - DNA, 25 bp, Homo sapien
tgcaagtcaaggagtaactgaacca

SEQ ID NO: 5463280 - DNA, 25 bp, Homo sapien
aaacatttcccagcactgatacgcg

SEQ ID NO: 5463281 - DNA, 25 bp, Homo sapien
gactcagggagattaagctatgacc

SEQ ID NO: 5463282 - DNA, 25 bp, Homo sapien
ggagtgcggtggagcaaccttgacc

SEQ ID NO: 5463283 - DNA, 25 bp, Homo sapien
cctgtcagaggtattaggcaactaa

SEQ ID NO: 5463284 - DNA, 25 bp, Homo sapien
ttctctcaaatggaacagttcagct

SEQ ID NO: 5463285 - DNA, 25 bp, Homo sapien
ccatgctcagccgacattttgaaat

SEQ ID NO: 5463286 - DNA, 25 bp, Homo sapien
tcttttcagccatacccggatggtt

SEQ ID NO: 5463287 - DNA, 25 bp, Homo sapien
ctcttttcagccatacccggatggt

SEQ ID NO: 5463288 - DNA, 25 bp, Homo sapien
gggccagtattgaccactgtctctt

SEQ ID NO: 5463289 - DNA, 25 bp, Homo sapien
gccattgtgtggtaaatgctgggcc

SEQ ID NO: 5463290 - DNA, 25 bp, Homo sapien
gatgatataaggtaagttatgcagt

SEQ ID NO: 5463291 - DNA, 25 bp, Homo sapien
taaggtaagttatgcagtacctagg

SEQ ID NO: 5463292 - DNA, 25 bp, Homo sapien
taagttatgcagtacctaggagtca

SEQ ID NO: 5463293 - DNA, 25 bp, Homo sapien
ttatgcagtacctaggagtcaggat

SEQ ID NO: 5463294 - DNA, 25 bp, Homo sapien
gaaatcattccacaccacatctctg

SEQ ID NO: 5463295 - DNA, 25 bp, Homo sapien
tctggggccctctttcatcggaaca

SEQ ID NO: 5463296 - DNA, 25 bp, Homo sapien
gctcgggcttgggcatggcaattct

SEQ ID NO: 5463297 - DNA, 25 bp, Homo sapien
tctttcatcggaacatgcacagggt

SEQ ID NO: 5463298 - DNA, 25 bp, Homo sapien
cttgaaaatgcacaaagacaacagg

SEQ ID NO: 5463299 - DNA, 25 bp, Homo sapien
caggtatgcgatttgaaggctgtca

SEQ ID NO: 5463300 - DNA, 25 bp, Homo sapien
gctgtcagaagatctttaagaagca

SEQ ID NO: 5463301 - DNA, 25 bp, Homo sapien
aatgcacaaagacaacaggtatgcg

SEQ ID NO: 5463302 - DNA, 25 bp, Homo sapien
agtgacccgctgctcaagtgtgccc

SEQ ID NO: 5463303 - DNA, 25 bp, Homo sapien
acccgctgctcaagtgtgcccaggg

SEQ ID NO: 5463304 - DNA, 25 bp, Homo sapien
tgacccgctgctcaagtgtgcccag

SEQ ID NO: 5463305 - DNA, 25 bp, Homo sapien
ctgctcaagtgtgcccagggggatc

SEQ ID NO: 5463306 - DNA, 25 bp, Homo sapien
gacatggacctggacaccagactag

SEQ ID NO: 5463307 - DNA, 25 bp, Homo sapien
agccccaggaccaaaaaggagacat

SEQ ID NO: 5463308 - DNA, 25 bp, Homo sapien
cgttcccaaaggagcagtgagcaga

SEQ ID NO: 5463309 - DNA, 25 bp, Homo sapien
agtctattagtggattcaacgtgtc

SEQ ID NO: 5463310 - DNA, 25 bp, Homo sapien
ttttctagtatgtattaccagtatg

SEQ ID NO: 5463311 - DNA, 25 bp, Homo sapien
tatacatttgggttcaatacatatt

SEQ ID NO: 5463312 - DNA, 25 bp, Homo sapien
acctgtaattccataagggtataca

SEQ ID NO: 5463313 - DNA, 25 bp, Homo sapien
cataagggtatacatttgggttcaa

SEQ ID NO: 5463314 - DNA, 25 bp, Homo sapien
acattaagacgtttgcctgaaaggg

SEQ ID NO: 5463315 - DNA, 25 bp, Homo sapien
tatcgaataaatagcaatttccttc

SEQ ID NO: 5463316 - DNA, 25 bp, Homo sapien
caacatagctatcattgccatctgt

SEQ ID NO: 5463317 - DNA, 25 bp, Homo sapien
ttccaacgagtctctggaattctgc

SEQ ID NO: 5463318 - DNA, 25 bp, Homo sapien
tctgtgaccaagaattagactgctg

SEQ ID NO: 5463319 - DNA, 25 bp, Homo sapien
ggacagcttcaagggtctgtgacca

SEQ ID NO: 5463320 - DNA, 25 bp, Homo sapien
ttttgtagaggagaattagattggc

SEQ ID NO: 5463321 - DNA, 25 bp, Homo sapien
ttattctctaaattaaaaggcagag

SEQ ID NO: 5463322 - DNA, 25 bp, Homo sapien
tccatggaggatctaggcaacactt

SEQ ID NO: 5463323 - DNA, 25 bp, Homo sapien
gagcaggaataatctagacaggctg

SEQ ID NO: 5463324 - DNA, 25 bp, Homo sapien
gcctggcaacataccaataccctgt

SEQ ID NO: 5463325 - DNA, 25 bp, Homo sapien
tacattacaaagtctggccaggcac

SEQ ID NO: 5463326 - DNA, 25 bp, Homo sapien
gggacagatccaagtacagtatgct

SEQ ID NO: 5463327 - DNA, 25 bp, Homo sapien
caatctgaattagcctgtcctgtga

SEQ ID NO: 5463328 - DNA, 25 bp, Homo sapien
taaagcaggtacaaaacggactcat

SEQ ID NO: 5463329 - DNA, 25 bp, Homo sapien
taatgaattccagctatgccagcct

SEQ ID NO: 5463330 - DNA, 25 bp, Homo sapien
gataagtacatgaagcccggactgg

SEQ ID NO: 5463331 - DNA, 25 bp, Homo sapien
tggttgtacataggcaagcacagtg

SEQ ID NO: 5463332 - DNA, 25 bp, Homo sapien
agagccgtggttctaagtgtggtcc

SEQ ID NO: 5463333 - DNA, 25 bp, Homo sapien
catcagcatcaacgtcacctggaaa

SEQ ID NO: 5463334 - DNA, 25 bp, Homo sapien
tgccacgagaacagtatgggggaaa

SEQ ID NO: 5463335 - DNA, 25 bp, Homo sapien
gcgtttgtaaaatgaattcacttca

SEQ ID NO: 5463336 - DNA, 25 bp, Homo sapien
cagctggaccctactttaaatgtaa

SEQ ID NO: 5463337 - DNA, 25 bp, Homo sapien
aatgctctcagctagttctcactgc

SEQ ID NO: 5463338 - DNA, 25 bp, Homo sapien
aatgtaaaaagctactggctcatgc

SEQ ID NO: 5463339 - DNA, 25 bp, Homo sapien
tagaaatagctatggttctttccct

SEQ ID NO: 5463340 - DNA, 25 bp, Homo sapien
acttagaaatagctatggttctttc

SEQ ID NO: 5463341 - DNA, 25 bp, Homo sapien
cactgcccaccttttgctctggtca

SEQ ID NO: 5463342 - DNA, 25 bp, Homo sapien
gaaatagctatggttctttccctct

SEQ ID NO: 5463343 - DNA, 25 bp, Homo sapien
tcaacgaccttctctaggaggctgt

SEQ ID NO: 5463344 - DNA, 25 bp, Homo sapien
catctcttcactagactgttcagcc

SEQ ID NO: 5463345 - DNA, 25 bp, Homo sapien
tacataggggccatctcttcactag

SEQ ID NO: 5463346 - DNA, 25 bp, Homo sapien
gccccagcccaaagagcctcctctt

SEQ ID NO: 5463347 - DNA, 25 bp, Homo sapien
aggtctcatgcactcgatctctctc

SEQ ID NO: 5463348 - DNA, 25 bp, Homo sapien
caggtctcatgcactcgatctctct

SEQ ID NO: 5463349 - DNA, 25 bp, Homo sapien
tctcatgcactcgatctctctcact

SEQ ID NO: 5463350 - DNA, 25 bp, Homo sapien
ggtctcatgcactcgatctctctca

SEQ ID NO: 5463351 - DNA, 25 bp, Homo sapien
gcctggagtggatttcggccgccat

SEQ ID NO: 5463352 - DNA, 25 bp, Homo sapien
ggtgcccctcgatcttgctcagcag

SEQ ID NO: 5463353 - DNA, 25 bp, Homo sapien
agcagcgcggccgtgacggcgtcct

SEQ ID NO: 5463354 - DNA, 25 bp, Homo sapien
tggccgtgatcacgccgtcctcctt

SEQ ID NO: 5463355 - DNA, 25 bp, Homo sapien
ccatcagctgacgcctgggcgggcg

SEQ ID NO: 5463356 - DNA, 25 bp, Homo sapien
ggcagcccatcagctgacgcctggg

SEQ ID NO: 5463357 - DNA, 25 bp, Homo sapien
atcagctgacgcctgggcgggcggg

SEQ ID NO: 5463358 - DNA, 25 bp, Homo sapien
cagcccatcagctgacgcctgggcg

SEQ ID NO: 5463359 - DNA, 25 bp, Homo sapien
ggctgctcgagtggcccttagaaaa

SEQ ID NO: 5463360 - DNA, 25 bp, Homo sapien
gattcacagaaaatagacggccgtg

SEQ ID NO: 5463361 - DNA, 25 bp, Homo sapien
agctagccgccatggatgcagcagc

SEQ ID NO: 5463362 - DNA, 25 bp, Homo sapien
aatgtcaaaggtgtttcaagccaga

SEQ ID NO: 5463363 - DNA, 25 bp, Homo sapien
tcaactcctagtaatggaacacaag

SEQ ID NO: 5463364 - DNA, 25 bp, Homo sapien
tatgtgttactcacaagtaaacatg

SEQ ID NO: 5463365 - DNA, 25 bp, Homo sapien
cacaagtaaacatgatttgataagc

SEQ ID NO: 5463366 - DNA, 25 bp, Homo sapien
gatagaggaccaaaaccagtggtaa

SEQ ID NO: 5463367 - DNA, 25 bp, Homo sapien
ttctattcaccggaaagaaggaaga

SEQ ID NO: 5463368 - DNA, 25 bp, Homo sapien
tgatgtatgaacaattcacctgaga

SEQ ID NO: 5463369 - DNA, 25 bp, Homo sapien
ttcttccctcgcctttggatgttac

SEQ ID NO: 5463370 - DNA, 25 bp, Homo sapien
ttttgagctcttttctattcaccgg

SEQ ID NO: 5463371 - DNA, 25 bp, Homo sapien
gctttcagtgtatttgggtcggtac

SEQ ID NO: 5463372 - DNA, 25 bp, Homo sapien
aggccagctaagtcagagctttcag

SEQ ID NO: 5463373 - DNA, 25 bp, Homo sapien
tgaccaaggcagaatcggaagtacc

SEQ ID NO: 5463374 - DNA, 25 bp, Homo sapien
tttaggacagagtgaaaggccagct

SEQ ID NO: 5463375 - DNA, 25 bp, Homo sapien
tattttcaaatagcagagaaatagc

SEQ ID NO: 5463376 - DNA, 25 bp, Homo sapien
caaggagtacagaccagtagtgaca

SEQ ID NO: 5463377 - DNA, 25 bp, Homo sapien
aaggagtacagaccagtagtgacag

SEQ ID NO: 5463378 - DNA, 25 bp, Homo sapien
tccaaggagtacagaccagtagtga

SEQ ID NO: 5463379 - DNA, 25 bp, Homo sapien
ggagtacagaccagtagtgacaggc

SEQ ID NO: 5463380 - DNA, 25 bp, Homo sapien
gaaaagccgcacatatagacaaaac

SEQ ID NO: 5463381 - DNA, 25 bp, Homo sapien
aacgcttgctatcaagactttggag

SEQ ID NO: 5463382 - DNA, 25 bp, Homo sapien
cctgaactggacaaacagcaaatac

SEQ ID NO: 5463383 - DNA, 25 bp, Homo sapien
caaagaggctagagatttcaccgtt

SEQ ID NO: 5463384 - DNA, 25 bp, Homo sapien
agaaacacttgcatcgagtctgttc

SEQ ID NO: 5463385 - DNA, 25 bp, Homo sapien
tcagtacagtgttccagccatcctg

SEQ ID NO: 5463386 - DNA, 25 bp, Homo sapien
cacttgcatcgagtctgttcctaag

SEQ ID NO: 5463387 - DNA, 25 bp, Homo sapien
cagtacagtgttccagccatcctgc

SEQ ID NO: 5463388 - DNA, 25 bp, Homo sapien
caaagtagtcgttgctttgcatggt

SEQ ID NO: 5463389 - DNA, 25 bp, Homo sapien
gaaaggagtctttcttcgtagcaaa

SEQ ID NO: 5463390 - DNA, 25 bp, Homo sapien
tagttttgaaaaagaagcgatgtac

SEQ ID NO: 5463391 - DNA, 25 bp, Homo sapien
gaaaaagaagcgatgtacaaaaata

SEQ ID NO: 5463392 - DNA, 25 bp, Homo sapien
agggtttgtttatctgccccatgaa

SEQ ID NO: 5463393 - DNA, 25 bp, Homo sapien
tgtttatctgccccatgaataacac

SEQ ID NO: 5463394 - DNA, 25 bp, Homo sapien
tatctgccccatgaataacacagca

SEQ ID NO: 5463395 - DNA, 25 bp, Homo sapien
tttatctgccccatgaataacacag

SEQ ID NO: 5463396 - DNA, 25 bp, Homo sapien
gtctactataaaccagggaggcgat

SEQ ID NO: 5463397 - DNA, 25 bp, Homo sapien
tgtaggattatgtcggatgaaaaac

SEQ ID NO: 5463398 - DNA, 25 bp, Homo sapien
cagaaaaggtctgtctactataaac

SEQ ID NO: 5463399 - DNA, 25 bp, Homo sapien
ggattatgtcggatgaaaaacagaa

SEQ ID NO: 5463400 - DNA, 25 bp, Homo sapien
tactaagcctaccttgggccaggcc

SEQ ID NO: 5463401 - DNA, 25 bp, Homo sapien
gaatgtagaccactcatccgggacc

SEQ ID NO: 5463402 - DNA, 25 bp, Homo sapien
gttagctagcttcatggaccctcag

SEQ ID NO: 5463403 - DNA, 25 bp, Homo sapien
tgttacaacaggctcaatggtcacc

SEQ ID NO: 5463404 - DNA, 25 bp, Homo sapien
tcttggccattcctcgtctgccagg

SEQ ID NO: 5463405 - DNA, 25 bp, Homo sapien
tagcctcatgggtcttggccattcc

SEQ ID NO: 5463406 - DNA, 25 bp, Homo sapien
cttctttagcctcatgggtcttggc

SEQ ID NO: 5463407 - DNA, 25 bp, Homo sapien
tgggtcttggccattcctcgtctgc

SEQ ID NO: 5463408 - DNA, 25 bp, Homo sapien
tatttgacccagctgcaagtgtagc

SEQ ID NO: 5463409 - DNA, 25 bp, Homo sapien
gaacatgttttatcctcctgagagc

SEQ ID NO: 5463410 - DNA, 25 bp, Homo sapien
catattttcatttggcacaggaccc

SEQ ID NO: 5463411 - DNA, 25 bp, Homo sapien
gattttcactttatgggctcacaga

SEQ ID NO: 5463412 - DNA, 25 bp, Homo sapien
gatatgagaaacatggaggttttct

SEQ ID NO: 5463413 - DNA, 25 bp, Homo sapien
gcaagatatgagaaacatggaggtt

SEQ ID NO: 5463414 - DNA, 25 bp, Homo sapien
ctttttgcaagatatgagaaacatg

SEQ ID NO: 5463415 - DNA, 25 bp, Homo sapien
tttgcaagatatgagaaacatggag

SEQ ID NO: 5463416 - DNA, 25 bp, Homo sapien
tgttccctgcaatcatacggctagt

SEQ ID NO: 5463417 - DNA, 25 bp, Homo sapien
tatagggcccaagtcacatgcagtg

SEQ ID NO: 5463418 - DNA, 25 bp, Homo sapien
tgtaaatgcagttgtgcctcaggga

SEQ ID NO: 5463419 - DNA, 25 bp, Homo sapien
tgaaaacagagcgacaacacctaag

SEQ ID NO: 5463420 - DNA, 25 bp, Homo sapien
aatgccaagaactttcagcggctcc

SEQ ID NO: 5463421 - DNA, 25 bp, Homo sapien
tgaatcaaacatgtcagtaatgcca

SEQ ID NO: 5463422 - DNA, 25 bp, Homo sapien
tttgcctttgatgaatcaaacatgt

SEQ ID NO: 5463423 - DNA, 25 bp, Homo sapien
gcggctccttcaaatctgtttgtgc

SEQ ID NO: 5463424 - DNA, 25 bp, Homo sapien
gcatgctgatgctttccccgtggta

SEQ ID NO: 5463425 - DNA, 25 bp, Homo sapien
agtggagctctcagtcggcagtgca

SEQ ID NO: 5463426 - DNA, 25 bp, Homo sapien
tccagctgtctatggtcttggtgct

SEQ ID NO: 5463427 - DNA, 25 bp, Homo sapien
tcttgggcaccatgatgctcatcca

SEQ ID NO: 5463428 - DNA, 25 bp, Homo sapien
agcaggttcagtgtatccttgttga

SEQ ID NO: 5463429 - DNA, 25 bp, Homo sapien
aaatcagaagcaggttcagtgtatc

SEQ ID NO: 5463430 - DNA, 25 bp, Homo sapien
caggttcagtgtatccttgttgact

SEQ ID NO: 5463431 - DNA, 25 bp, Homo sapien
gaagcaggttcagtgtatccttgtt

SEQ ID NO: 5463432 - DNA, 25 bp, Homo sapien
ctgtttttgggacaagagcggctaa

SEQ ID NO: 5463433 - DNA, 25 bp, Homo sapien
gaagtaacctccaaaggatgcacgg

SEQ ID NO: 5463434 - DNA, 25 bp, Homo sapien
tactcattgagcaggaatcccaaca

SEQ ID NO: 5463435 - DNA, 25 bp, Homo sapien
tatcaacccttcaacaggctgagga

SEQ ID NO: 5463436 - DNA, 25 bp, Homo sapien
gttaataagtgattgctccagggca

SEQ ID NO: 5463437 - DNA, 25 bp, Homo sapien
taaatctctattctggcggagctaa

SEQ ID NO: 5463438 - DNA, 25 bp, Homo sapien
agggctgttcagtaacccgggtgca

SEQ ID NO: 5463439 - DNA, 25 bp, Homo sapien
tatggcaccacaggatgacactaca

SEQ ID NO: 5463440 - DNA, 25 bp, Homo sapien
ctgtctttctacctggtcactcaag

SEQ ID NO: 5463441 - DNA, 25 bp, Homo sapien
tttatttggtgccttgaggagctgg

SEQ ID NO: 5463442 - DNA, 25 bp, Homo sapien
ctacctggtcactcaagtactgcat

SEQ ID NO: 5463443 - DNA, 25 bp, Homo sapien
ggagctgggagataaaataacacct

SEQ ID NO: 5463444 - DNA, 25 bp, Homo sapien
ggctttccataggatagcatgatac

SEQ ID NO: 5463445 - DNA, 25 bp, Homo sapien
ctcactgcagtgttgttataggaaa

SEQ ID NO: 5463446 - DNA, 25 bp, Homo sapien
gtaacaactatgacttggagattcc

SEQ ID NO: 5463447 - DNA, 25 bp, Homo sapien
tgaattggcacaaaaagttgtccac

SEQ ID NO: 5463448 - DNA, 25 bp, Homo sapien
gacaatccttccctatcttatcatg

SEQ ID NO: 5463449 - DNA, 25 bp, Homo sapien
gaacagagtcgcatccagttccagg

SEQ ID NO: 5463450 - DNA, 25 bp, Homo sapien
cacaaatggcggtactttcttcaca

SEQ ID NO: 5463451 - DNA, 25 bp, Homo sapien
tatcatgataagctgggttttggcc

SEQ ID NO: 5463452 - DNA, 25 bp, Homo sapien
tacactgcgttgacgaggaccagtc

SEQ ID NO: 5463453 - DNA, 25 bp, Homo sapien
gtcggctgccacgaaagtgcgtttc

SEQ ID NO: 5463454 - DNA, 25 bp, Homo sapien
gagcacaccatcaataagatctggg

SEQ ID NO: 5463455 - DNA, 25 bp, Homo sapien
cattggcacttgataggatttcccg

SEQ ID NO: 5463456 - DNA, 25 bp, Homo sapien
gaaaaataacctcaggactggtggc

SEQ ID NO: 5463457 - DNA, 25 bp, Homo sapien
caaatggcagctgtcatcaggtaga

SEQ ID NO: 5463458 - DNA, 25 bp, Homo sapien
tggtggccggcttgagggcaaatgg

SEQ ID NO: 5463459 - DNA, 25 bp, Homo sapien
aaataacctcaggactggtggccgg

SEQ ID NO: 5463460 - DNA, 25 bp, Homo sapien
tctttgtccacctcttcactagttc

SEQ ID NO: 5463461 - DNA, 25 bp, Homo sapien
tcttcactagttctgctaatgggtc

SEQ ID NO: 5463462 - DNA, 25 bp, Homo sapien
cctggagccttctttgtccacctct

SEQ ID NO: 5463463 - DNA, 25 bp, Homo sapien
actagttctgctaatgggtctccaa

SEQ ID NO: 5463464 - DNA, 25 bp, Homo sapien
ggtgtaaaagttgtaatcatgtgcc

SEQ ID NO: 5463465 - DNA, 25 bp, Homo sapien
caatcataacggacaacagggtacc

SEQ ID NO: 5463466 - DNA, 25 bp, Homo sapien
catggaaggcaaagagatcaatcaa

SEQ ID NO: 5463467 - DNA, 25 bp, Homo sapien
acctatgtctttggcaatggcagaa

SEQ ID NO: 5463468 - DNA, 25 bp, Homo sapien
ggcgttagccactgtcacaatgtct

SEQ ID NO: 5463469 - DNA, 25 bp, Homo sapien
caaaaggcacttcaatttcagaggc

SEQ ID NO: 5463470 - DNA, 25 bp, Homo sapien
tattcttcttggagacgatggcctt

SEQ ID NO: 5463471 - DNA, 25 bp, Homo sapien
gaggcattcttaacaaacacggcgt

SEQ ID NO: 5463472 - DNA, 25 bp, Homo sapien
aagatacagcaatacttccataaga

SEQ ID NO: 5463473 - DNA, 25 bp, Homo sapien
gatacagcaatacttccataagaat

SEQ ID NO: 5463474 - DNA, 25 bp, Homo sapien
gaagatacagcaatacttccataag

SEQ ID NO: 5463475 - DNA, 25 bp, Homo sapien
agatacagcaatacttccataagaa

SEQ ID NO: 5463476 - DNA, 25 bp, Homo sapien
tggtaacaagctcaaagagtaagga

SEQ ID NO: 5463477 - DNA, 25 bp, Homo sapien
acttggtaacaagctcaaagagtaa

SEQ ID NO: 5463478 - DNA, 25 bp, Homo sapien
taacaagctcaaagagtaaggagat

SEQ ID NO: 5463479 - DNA, 25 bp, Homo sapien
caagctcaaagagtaaggagattaa

SEQ ID NO: 5463480 - DNA, 25 bp, Homo sapien
gctattttggaactgtctcggccga

SEQ ID NO: 5463481 - DNA, 25 bp, Homo sapien
tgaaagacaattccaaggccaactg

SEQ ID NO: 5463482 - DNA, 25 bp, Homo sapien
ggtgaacaaactgcaaactcgtaca

SEQ ID NO: 5463483 - DNA, 25 bp, Homo sapien
tgtagggctttacaacgtgcatggc

SEQ ID NO: 5463484 - DNA, 25 bp, Homo sapien
agaacacgggcaggaagactccctt

SEQ ID NO: 5463485 - DNA, 25 bp, Homo sapien
ttccaacgaagggagcagacctaga

SEQ ID NO: 5463486 - DNA, 25 bp, Homo sapien
cgccagtgcagtcaagattctcaga

SEQ ID NO: 5463487 - DNA, 25 bp, Homo sapien
gattctcagaactttcgggccagcc

SEQ ID NO: 5463488 - DNA, 25 bp, Homo sapien
cagaggatgaagctcgtgcagttaa

SEQ ID NO: 5463489 - DNA, 25 bp, Homo sapien
agacccctcagctgaagtaaaacag

SEQ ID NO: 5463490 - DNA, 25 bp, Homo sapien
gctcgtgcagttaaatgggtcattt

SEQ ID NO: 5463491 - DNA, 25 bp, Homo sapien
cagctgaagtaaaacagtgccagag

SEQ ID NO: 5463492 - DNA, 25 bp, Homo sapien
caactcaaccctgggcgccatggag

SEQ ID NO: 5463493 - DNA, 25 bp, Homo sapien
tcacaagcacatctacgatcacagc

SEQ ID NO: 5463494 - DNA, 25 bp, Homo sapien
tcgctggaacgagggctggagccct

SEQ ID NO: 5463495 - DNA, 25 bp, Homo sapien
ccatggaggcggtaagccaggaagt

SEQ ID NO: 5463496 - DNA, 25 bp, Homo sapien
gatccccgtgttggagcctagttcc

SEQ ID NO: 5463497 - DNA, 25 bp, Homo sapien
tctgattgaaaacctggatccccgt

SEQ ID NO: 5463498 - DNA, 25 bp, Homo sapien
tatctcatcaccatggcgagctgct

SEQ ID NO: 5463499 - DNA, 25 bp, Homo sapien
gatcacgatgttgtcatgaggcctc

SEQ ID NO: 5463500 - DNA, 25 bp, Homo sapien
ccgctgaaaagtatggcagcaacat

SEQ ID NO: 5463501 - DNA, 25 bp, Homo sapien
gctgaaaagtatggcagcaacatcc

SEQ ID NO: 5463502 - DNA, 25 bp, Homo sapien
ttttcagccgctgaaaagtatggca

SEQ ID NO: 5463503 - DNA, 25 bp, Homo sapien
cagccgctgaaaagtatggcagcaa

SEQ ID NO: 5463504 - DNA, 25 bp, Homo sapien
gaggtgcaccgtgtcaggaggctgg

SEQ ID NO: 5463505 - DNA, 25 bp, Homo sapien
aggaggtgcaccgtgtcaggaggct

SEQ ID NO: 5463506 - DNA, 25 bp, Homo sapien
tttcaggaggtgcaccgtgtcagga

SEQ ID NO: 5463507 - DNA, 25 bp, Homo sapien
ggtttcaggaggtgcaccgtgtcag

SEQ ID NO: 5463508 - DNA, 25 bp, Homo sapien
cagtcactcagcctggggttcacac

SEQ ID NO: 5463509 - DNA, 25 bp, Homo sapien
tgtagatgaacctgggctgacaaat

SEQ ID NO: 5463510 - DNA, 25 bp, Homo sapien
tgccaaacttctcaacaggatgtag

SEQ ID NO: 5463511 - DNA, 25 bp, Homo sapien
acaaattggataaggtgggctggca

SEQ ID NO: 5463512 - DNA, 25 bp, Homo sapien
cgcagtgcttgttgcaggaggttca

SEQ ID NO: 5463513 - DNA, 25 bp, Homo sapien
ctgggccagggtgagaggcagtggc

SEQ ID NO: 5463514 - DNA, 25 bp, Homo sapien
ggccagggtgagaggcagtggccag

SEQ ID NO: 5463515 - DNA, 25 bp, Homo sapien
gaagtgctcctgggaagggccacat

SEQ ID NO: 5463516 - DNA, 25 bp, Homo sapien
gaggcagtggccagggaagtgctcc

SEQ ID NO: 5463517 - DNA, 25 bp, Homo sapien
ttacagcctttgcaagacaagggca

SEQ ID NO: 5463518 - DNA, 25 bp, Homo sapien
cttacagcctttgcaagacaagggc

SEQ ID NO: 5463519 - DNA, 25 bp, Homo sapien
ccttacagcctttgcaagacaaggg

SEQ ID NO: 5463520 - DNA, 25 bp, Homo sapien
caggttctatatctttctaagtgac

SEQ ID NO: 5463521 - DNA, 25 bp, Homo sapien
cctaagccaaagtctggaaactgtc

SEQ ID NO: 5463522 - DNA, 25 bp, Homo sapien
acaccaccaactgttcatccaagaa

SEQ ID NO: 5463523 - DNA, 25 bp, Homo sapien
caccaactgttcatccaagaaccta

SEQ ID NO: 5463524 - DNA, 25 bp, Homo sapien
ggttggcaaccactattacagagaa

SEQ ID NO: 5463525 - DNA, 25 bp, Homo sapien
gaactgtctaccctgagagactcag

SEQ ID NO: 5463526 - DNA, 25 bp, Homo sapien
gaggaaggatcacccctggttggca

SEQ ID NO: 5463527 - DNA, 25 bp, Homo sapien
gatggaccaaccaaatgtctggaga

SEQ ID NO: 5463528 - DNA, 25 bp, Homo sapien
tagtcaattgtgttctctgagcaat

SEQ ID NO: 5463529 - DNA, 25 bp, Homo sapien
tttctgcagctaattgaaaatactg

SEQ ID NO: 5463530 - DNA, 25 bp, Homo sapien
tgcatgatttaaagcacccaggagg

SEQ ID NO: 5463531 - DNA, 25 bp, Homo sapien
tacagccacaccgaacatatttttt

SEQ ID NO: 5463532 - DNA, 25 bp, Homo sapien
ttgcttcatggccaacgcacaagag

SEQ ID NO: 5463533 - DNA, 25 bp, Homo sapien
cagaaggaggttatttcatgcaaca

SEQ ID NO: 5463534 - DNA, 25 bp, Homo sapien
ctgcaacgtgttccctggaagacct

SEQ ID NO: 5463535 - DNA, 25 bp, Homo sapien
tgtttacatctcacaaatgcaaggg

SEQ ID NO: 5463536 - DNA, 25 bp, Homo sapien
tactgcgtgaccgtggaccctttat

SEQ ID NO: 5463537 - DNA, 25 bp, Homo sapien
gatactagggctatcacgcagcacg

SEQ ID NO: 5463538 - DNA, 25 bp, Homo sapien
gacacataaaggctgtgcgacccta

SEQ ID NO: 5463539 - DNA, 25 bp, Homo sapien
ggttcacacatctacagacccgggt

SEQ ID NO: 5463540 - DNA, 25 bp, Homo sapien
aagtagccaaagcaagacagcagca

SEQ ID NO: 5463541 - DNA, 25 bp, Homo sapien
tcagacaaataaacggcttcttggc

SEQ ID NO: 5463542 - DNA, 25 bp, Homo sapien
gatgctaaatataagaacgtcccct

SEQ ID NO: 5463543 - DNA, 25 bp, Homo sapien
gacagcagcattcgagatttctcca

SEQ ID NO: 5463544 - DNA, 25 bp, Homo sapien
taacaagtaagagtgcgccagtctc

SEQ ID NO: 5463545 - DNA, 25 bp, Homo sapien
cgctcgggttaaatcggctgccaga

SEQ ID NO: 5463546 - DNA, 25 bp, Homo sapien
tagcaaagacctgctcgctcgggtt

SEQ ID NO: 5463547 - DNA, 25 bp, Homo sapien
ggcgagcagctggaaacctcaggtt

SEQ ID NO: 5463548 - DNA, 25 bp, Homo sapien
gcccgggactcaccgcgcagcctgt

SEQ ID NO: 5463549 - DNA, 25 bp, Homo sapien
cgcccgggactcaccgcgcagcctg

SEQ ID NO: 5463550 - DNA, 25 bp, Homo sapien
cccgggactcaccgcgcagcctgta

SEQ ID NO: 5463551 - DNA, 25 bp, Homo sapien
gtcacagccggaaagaggcagcggt

SEQ ID NO: 5463552 - DNA, 25 bp, Homo sapien
ctcctttgtgtggccgcgggccgca

SEQ ID NO: 5463553 - DNA, 25 bp, Homo sapien
aaccggagcgggagcctggtctcgg

SEQ ID NO: 5463554 - DNA, 25 bp, Homo sapien
tccgcctgcgacttctcggatgccg

SEQ ID NO: 5463555 - DNA, 25 bp, Homo sapien
taatgactgacatttacttccccat

SEQ ID NO: 5463556 - DNA, 25 bp, Homo sapien
tctttgggttacactttaatgactg

SEQ ID NO: 5463557 - DNA, 25 bp, Homo sapien
tctttcctgtagtgtcgaaggaaca

SEQ ID NO: 5463558 - DNA, 25 bp, Homo sapien
gcaatactgtacgtgacttgtcaat

SEQ ID NO: 5463559 - DNA, 25 bp, Homo sapien
ccaaatcatttaacacttctacctg

SEQ ID NO: 5463560 - DNA, 25 bp, Homo sapien
gatgcatttctcatagatgtgtact

SEQ ID NO: 5463561 - DNA, 25 bp, Homo sapien
tttgaccctttttgagatgcatttc

SEQ ID NO: 5463562 - DNA, 25 bp, Homo sapien
agcaggttcctcctccagtattctc

SEQ ID NO: 5463563 - DNA, 25 bp, Homo sapien
ctgacatcagaaagtgaagggcgga

SEQ ID NO: 5463564 - DNA, 25 bp, Homo sapien
tgccctggaggaacctgaagaagat

SEQ ID NO: 5463565 - DNA, 25 bp, Homo sapien
ccttgcaatagtgtggggcagcagc

SEQ ID NO: 5463566 - DNA, 25 bp, Homo sapien
aagcaatgaatgaactgacatcaga

SEQ ID NO: 5463567 - DNA, 25 bp, Homo sapien
caagtggtccggtttgatggctaag

SEQ ID NO: 5463568 - DNA, 25 bp, Homo sapien
ggtaagatctctgagtggtcatggc

SEQ ID NO: 5463569 - DNA, 25 bp, Homo sapien
gctggtaacagtagccaagtggtcc

SEQ ID NO: 5463570 - DNA, 25 bp, Homo sapien
tctgagtggtcatggcagccagcat

SEQ ID NO: 5463571 - DNA, 25 bp, Homo sapien
ggaatgaaccagtattactgacaaa

SEQ ID NO: 5463572 - DNA, 25 bp, Homo sapien
aatgaaccagtattactgacaaatg

SEQ ID NO: 5463573 - DNA, 25 bp, Homo sapien
tttggaatgaaccagtattactgac

SEQ ID NO: 5463574 - DNA, 25 bp, Homo sapien
tgcatttggaatgaaccagtattac

SEQ ID NO: 5463575 - DNA, 25 bp, Homo sapien
taccagactgggcactccctctcca

SEQ ID NO: 5463576 - DNA, 25 bp, Homo sapien
tgggatcctggtcttccaccttcct

SEQ ID NO: 5463577 - DNA, 25 bp, Homo sapien
ctaggcagctgcctaccagactggg

SEQ ID NO: 5463578 - DNA, 25 bp, Homo sapien
ctccagctccaacatcgggtatcat

SEQ ID NO: 5463579 - DNA, 25 bp, Homo sapien
tgttgctttgggaattacctccttc

SEQ ID NO: 5463580 - DNA, 25 bp, Homo sapien
tcaagttgcagaaccttgatgttgc

SEQ ID NO: 5463581 - DNA, 25 bp, Homo sapien
tcctgggggtactgccaatcaaggt

SEQ ID NO: 5463582 - DNA, 25 bp, Homo sapien
ttgattccattggaagcagtcctgg

SEQ ID NO: 5463583 - DNA, 25 bp, Homo sapien
agatagccggaactctctgaagaga

SEQ ID NO: 5463584 - DNA, 25 bp, Homo sapien
ggagtagaaatatgagcctcagtac

SEQ ID NO: 5463585 - DNA, 25 bp, Homo sapien
tgacataccacaggcatagcctttg

SEQ ID NO: 5463586 - DNA, 25 bp, Homo sapien
ggaattccaagtaaagggccagata

SEQ ID NO: 5463587 - DNA, 25 bp, Homo sapien
ggaaacaactccctcagaattctgg

SEQ ID NO: 5463588 - DNA, 25 bp, Homo sapien
tcatgtaacaagtcgtggaaacaac

SEQ ID NO: 5463589 - DNA, 25 bp, Homo sapien
ctggttgatctctttccctgagaaa

SEQ ID NO: 5463590 - DNA, 25 bp, Homo sapien
caagtcgtggaaacaactccctcag

SEQ ID NO: 5463591 - DNA, 25 bp, Homo sapien
tatatcacctgttttaggcccttcc

SEQ ID NO: 5463592 - DNA, 25 bp, Homo sapien
tgcgagtagggtacaaaataggtgt

SEQ ID NO: 5463593 - DNA, 25 bp, Homo sapien
aaataggtgtgacctatatcacctg

SEQ ID NO: 5463594 - DNA, 25 bp, Homo sapien
atcccagagtgcgagtagggtacaa

SEQ ID NO: 5463595 - DNA, 25 bp, Homo sapien
ctctaggcaccaactgatagaccat

SEQ ID NO: 5463596 - DNA, 25 bp, Homo sapien
atgccctctaggcaccaactgatag

SEQ ID NO: 5463597 - DNA, 25 bp, Homo sapien
tcatgccctctaggcaccaactgat

SEQ ID NO: 5463598 - DNA, 25 bp, Homo sapien
gccctctaggcaccaactgatagac

SEQ ID NO: 5463599 - DNA, 25 bp, Homo sapien
ggtgggataagcctccatacaggat

SEQ ID NO: 5463600 - DNA, 25 bp, Homo sapien
tagtcgacaagacatggaggaggcc

SEQ ID NO: 5463601 - DNA, 25 bp, Homo sapien
gtccataatggagtatccagtccca

SEQ ID NO: 5463602 - DNA, 25 bp, Homo sapien
catactttagatccccgaacaggac

SEQ ID NO: 5463603 - DNA, 25 bp, Homo sapien
gatacatgtcgcttttcaatcacag

SEQ ID NO: 5463604 - DNA, 25 bp, Homo sapien
tcaggtgtctgaggatacatgtcgc

SEQ ID NO: 5463605 - DNA, 25 bp, Homo sapien
tctcccacaaggcattaacaggttc

SEQ ID NO: 5463606 - DNA, 25 bp, Homo sapien
caatcactctctgcttaatacacac

SEQ ID NO: 5463607 - DNA, 25 bp, Homo sapien
ggcagattccagcttactaagtgct

SEQ ID NO: 5463608 - DNA, 25 bp, Homo sapien
tccaaatgctgagaatacggaagca

SEQ ID NO: 5463609 - DNA, 25 bp, Homo sapien
tgctagttggcaccaatgtgctaag

SEQ ID NO: 5463610 - DNA, 25 bp, Homo sapien
tgcgaaatgcagacttagcctgcag

SEQ ID NO: 5463611 - DNA, 25 bp, Homo sapien
gggaacacgtatctgcacagtgtcc

SEQ ID NO: 5463612 - DNA, 25 bp, Homo sapien
tttgttgcacttgagttagtttagc

SEQ ID NO: 5463613 - DNA, 25 bp, Homo sapien
ttcagagagatcaatcatattagct

SEQ ID NO: 5463614 - DNA, 25 bp, Homo sapien
tagctgaatcgtatctgtatgggaa

SEQ ID NO: 5463615 - DNA, 25 bp, Homo sapien
tatcacctgcttagtggtattttgt

SEQ ID NO: 5463616 - DNA, 25 bp, Homo sapien
ctatcacctgcttagtggtattttg

SEQ ID NO: 5463617 - DNA, 25 bp, Homo sapien
agatatctgaacattgccgaagaaa

SEQ ID NO: 5463618 - DNA, 25 bp, Homo sapien
gaagtggcattgaactcagagccaa

SEQ ID NO: 5463619 - DNA, 25 bp, Homo sapien
ctgaagtggcattgaactcagagcc

SEQ ID NO: 5463620 - DNA, 25 bp, Homo sapien
atatctgaacattgccgaagaaaaa

SEQ ID NO: 5463621 - DNA, 25 bp, Homo sapien
cagtgggaggacgaaacctcagtgc

SEQ ID NO: 5463622 - DNA, 25 bp, Homo sapien
aggacgaaacctcagtgcagagcat

SEQ ID NO: 5463623 - DNA, 25 bp, Homo sapien
gacacagtgggaggacgaaacctca

SEQ ID NO: 5463624 - DNA, 25 bp, Homo sapien
tgggaggacgaaacctcagtgcaga

SEQ ID NO: 5463625 - DNA, 25 bp, Homo sapien
aattgtgagtaggagactaccttta

SEQ ID NO: 5463626 - DNA, 25 bp, Homo sapien
tgtgagtaggagactacctttaaag

SEQ ID NO: 5463627 - DNA, 25 bp, Homo sapien
ctctcatgagtaatcctcttttccc

SEQ ID NO: 5463628 - DNA, 25 bp, Homo sapien
ctttgtctctcatgagtaatcctct

SEQ ID NO: 5463629 - DNA, 25 bp, Homo sapien
cctctgttctgctagtgatggctgg

SEQ ID NO: 5463630 - DNA, 25 bp, Homo sapien
caagtagtctgttgtgtctgaacct

SEQ ID NO: 5463631 - DNA, 25 bp, Homo sapien
tcagcttcaacctgatccctgtgtt

SEQ ID NO: 5463632 - DNA, 25 bp, Homo sapien
cagagtcttctgtgggagtccttcc

SEQ ID NO: 5463633 - DNA, 25 bp, Homo sapien
tcgttcagtgcttgaagggctccag

SEQ ID NO: 5463634 - DNA, 25 bp, Homo sapien
gtcacatcgtgtcttagtagtccaa

SEQ ID NO: 5463635 - DNA, 25 bp, Homo sapien
taacatggaaatttctagtctagat

SEQ ID NO: 5463636 - DNA, 25 bp, Homo sapien
ctagatattagaacaacataaactt

SEQ ID NO: 5463637 - DNA, 25 bp, Homo sapien
cccacatatggtggtgagctccaca

SEQ ID NO: 5463638 - DNA, 25 bp, Homo sapien
agtgatgattgctgtccaaggctgc

SEQ ID NO: 5463639 - DNA, 25 bp, Homo sapien
tacctgtgctgaggcagtaaaggcg

SEQ ID NO: 5463640 - DNA, 25 bp, Homo sapien
tttatcctcaaccactctgcaaggg

SEQ ID NO: 5463641 - DNA, 25 bp, Homo sapien
gactagtgcttatacttgaagtttc

SEQ ID NO: 5463642 - DNA, 25 bp, Homo sapien
actagtgcttatacttgaagtttca

SEQ ID NO: 5463643 - DNA, 25 bp, Homo sapien
gaagactagtgcttatacttgaagt

SEQ ID NO: 5463644 - DNA, 25 bp, Homo sapien
atagaagactagtgcttatacttga

SEQ ID NO: 5463645 - DNA, 25 bp, Homo sapien
tagttcagctgaatcggtagtttgg

SEQ ID NO: 5463646 - DNA, 25 bp, Homo sapien
tagttagccacttttgcagaaactc

SEQ ID NO: 5463647 - DNA, 25 bp, Homo sapien
tttttctcgtcacaagttagttcag

SEQ ID NO: 5463648 - DNA, 25 bp, Homo sapien
catcgatcacttgggttagttagcc

SEQ ID NO: 5463649 - DNA, 25 bp, Homo sapien
cataccctccagacaccttcactgg

SEQ ID NO: 5463650 - DNA, 25 bp, Homo sapien
gcctcaaaaactagatgcttaaaac

SEQ ID NO: 5463651 - DNA, 25 bp, Homo sapien
cactggagcctcaaaaactagatgc

SEQ ID NO: 5463652 - DNA, 25 bp, Homo sapien
gatgcttaaaacagagccaaatatc

SEQ ID NO: 5463653 - DNA, 25 bp, Homo sapien
atcttctccacttgtacatcctctc

SEQ ID NO: 5463654 - DNA, 25 bp, Homo sapien
tcttctccacttgtacatcctctct

SEQ ID NO: 5463655 - DNA, 25 bp, Homo sapien
ttctccacttgtacatcctctcttc

SEQ ID NO: 5463656 - DNA, 25 bp, Homo sapien
catcttctccacttgtacatcctct

SEQ ID NO: 5463657 - DNA, 25 bp, Homo sapien
ttccagatcttctccgaccttcttg

SEQ ID NO: 5463658 - DNA, 25 bp, Homo sapien
ccagatcttctccgaccttcttgca

SEQ ID NO: 5463659 - DNA, 25 bp, Homo sapien
tccagatcttctccgaccttcttgc

SEQ ID NO: 5463660 - DNA, 25 bp, Homo sapien
tcctgcacagtgtttagttgaggta

SEQ ID NO: 5463661 - DNA, 25 bp, Homo sapien
tagttgaggtatgctgttgactcac

SEQ ID NO: 5463662 - DNA, 25 bp, Homo sapien
tgcacagtgtttagttgaggtatgc

SEQ ID NO: 5463663 - DNA, 25 bp, Homo sapien
gcacagtgtttagttgaggtatgct

SEQ ID NO: 5463664 - DNA, 25 bp, Homo sapien
ccttcatagttgatagggttagagg

SEQ ID NO: 5463665 - DNA, 25 bp, Homo sapien
atcccttcatagttgatagggttag

SEQ ID NO: 5463666 - DNA, 25 bp, Homo sapien
aggtttcttattagagctgctagat

SEQ ID NO: 5463667 - DNA, 25 bp, Homo sapien
gagctgctagattttcataaatccc

SEQ ID NO: 5463668 - DNA, 25 bp, Homo sapien
ttgaaatctttcgtcagctcatcat

SEQ ID NO: 5463669 - DNA, 25 bp, Homo sapien
ttcgtcagctcatcatggtttgctg

SEQ ID NO: 5463670 - DNA, 25 bp, Homo sapien
tctttcgtcagctcatcatggtttg

SEQ ID NO: 5463671 - DNA, 25 bp, Homo sapien
gaaatctttcgtcagctcatcatgg

SEQ ID NO: 5463672 - DNA, 25 bp, Homo sapien
gatgtcagaagcctgccacaatttc

SEQ ID NO: 5463673 - DNA, 25 bp, Homo sapien
agaagcctgccacaatttctgggca

SEQ ID NO: 5463674 - DNA, 25 bp, Homo sapien
gaagcctgccacaatttctgggcat

SEQ ID NO: 5463675 - DNA, 25 bp, Homo sapien
acttttgctaagagtgatgcactgc

SEQ ID NO: 5463676 - DNA, 25 bp, Homo sapien
cacttcaagggatcctgcgcaagaa

SEQ ID NO: 5463677 - DNA, 25 bp, Homo sapien
tccacgactgcagcaaacaacttgg

SEQ ID NO: 5463678 - DNA, 25 bp, Homo sapien
ggagtattttattctcaaccacact

SEQ ID NO: 5463679 - DNA, 25 bp, Homo sapien
tcatccttctctgtcgacggtggag

SEQ ID NO: 5463680 - DNA, 25 bp, Homo sapien
ctgtcgacggtggagcagatcgcct

SEQ ID NO: 5463681 - DNA, 25 bp, Homo sapien
gagcagatcgcctccatctggggat

SEQ ID NO: 5463682 - DNA, 25 bp, Homo sapien
aagcttttgttggaaccattggtca

SEQ ID NO: 5463683 - DNA, 25 bp, Homo sapien
ctaaatctggaaaaggcggaaatct

SEQ ID NO: 5463684 - DNA, 25 bp, Homo sapien
tagtctattagtggcctctgacccg

SEQ ID NO: 5463685 - DNA, 25 bp, Homo sapien
gcggaaatctggaactctgccatca

SEQ ID NO: 5463686 - DNA, 25 bp, Homo sapien
tctgacccggttcttccatgtggac

SEQ ID NO: 5463687 - DNA, 25 bp, Homo sapien
atgatgctatgttctttgaaccgcc

SEQ ID NO: 5463688 - DNA, 25 bp, Homo sapien
gatgctatgttctttgaaccgcccc

SEQ ID NO: 5463689 - DNA, 25 bp, Homo sapien
ttctcgctaagctcatcctctctat

SEQ ID NO: 5463690 - DNA, 25 bp, Homo sapien
gctcatcctctctatgatgctatgt

SEQ ID NO: 5463691 - DNA, 25 bp, Homo sapien
gtgttttccaagcccggtgcttagc

SEQ ID NO: 5463692 - DNA, 25 bp, Homo sapien
ggcccacagccaatgggtgctggct

SEQ ID NO: 5463693 - DNA, 25 bp, Homo sapien
gttttccaagcccggtgcttagcat

SEQ ID NO: 5463694 - DNA, 25 bp, Homo sapien
caggcccacagccaatgggtgctgg

SEQ ID NO: 5463695 - DNA, 25 bp, Homo sapien
ctttctattttcatccacttctgta

SEQ ID NO: 5463696 - DNA, 25 bp, Homo sapien
attttcatccacttctgtaggcttt

SEQ ID NO: 5463697 - DNA, 25 bp, Homo sapien
tctattttcatccacttctgtaggc

SEQ ID NO: 5463698 - DNA, 25 bp, Homo sapien
tattttcatccacttctgtaggctt

SEQ ID NO: 5463699 - DNA, 25 bp, Homo sapien
gcccatttagaagttgcagctgcgt

SEQ ID NO: 5463700 - DNA, 25 bp, Homo sapien
gagcttaggcgaggaggcccattta

SEQ ID NO: 5463701 - DNA, 25 bp, Homo sapien
tattgctcattctctgagcttaggc

SEQ ID NO: 5463702 - DNA, 25 bp, Homo sapien
agctgcgtctcagccccttgaggga

SEQ ID NO: 5463703 - DNA, 25 bp, Homo sapien
ccgaaggaccaatggtattaataat

SEQ ID NO: 5463704 - DNA, 25 bp, Homo sapien
attttttgttgcctcattgatttca

SEQ ID NO: 5463705 - DNA, 25 bp, Homo sapien
aactgtgggtccgaaggaccaatgg

SEQ ID NO: 5463706 - DNA, 25 bp, Homo sapien
gcctcattgatttcactaaaacttg

SEQ ID NO: 5463707 - DNA, 25 bp, Homo sapien
tacaagtaggatagaatagatgaca

SEQ ID NO: 5463708 - DNA, 25 bp, Homo sapien
cggccatagaccgaaggctgctcta

SEQ ID NO: 5463709 - DNA, 25 bp, Homo sapien
gggttctagggccttcggccataga

SEQ ID NO: 5463710 - DNA, 25 bp, Homo sapien
tggtatttccatcccatcatgttgt

SEQ ID NO: 5463711 - DNA, 25 bp, Homo sapien
agtgaagttcgtggaattgaataac

SEQ ID NO: 5463712 - DNA, 25 bp, Homo sapien
aagatccagctaaatcaacatttac

SEQ ID NO: 5463713 - DNA, 25 bp, Homo sapien
catttacactcttatgtaacatctg

SEQ ID NO: 5463714 - DNA, 25 bp, Homo sapien
tgttctgagagtgaagttcgtggaa

SEQ ID NO: 5463715 - DNA, 25 bp, Homo sapien
tctccacggaacaaaagcattcggt

SEQ ID NO: 5463716 - DNA, 25 bp, Homo sapien
tgttctcttatgactgtgacggcaa

SEQ ID NO: 5463717 - DNA, 25 bp, Homo sapien
ggaatctgggagtcaaaatctggcc

SEQ ID NO: 5463718 - DNA, 25 bp, Homo sapien
caactaacaggctgattctgggtca

SEQ ID NO: 5463719 - DNA, 25 bp, Homo sapien
caagtggcaaaggagagactctttc

SEQ ID NO: 5463720 - DNA, 25 bp, Homo sapien
ctctttccttaaggacactgttgtt

SEQ ID NO: 5463721 - DNA, 25 bp, Homo sapien
gcaagtggcaaaggagagactcttt

SEQ ID NO: 5463722 - DNA, 25 bp, Homo sapien
agcaagtggcaaaggagagactctt

SEQ ID NO: 5463723 - DNA, 25 bp, Homo sapien
tcagaatttatgatggtcaagccgg

SEQ ID NO: 5463724 - DNA, 25 bp, Homo sapien
ggctggtctgtaaatcccttggaaa

SEQ ID NO: 5463725 - DNA, 25 bp, Homo sapien
ccaaaataagtctgcctgggttcag

SEQ ID NO: 5463726 - DNA, 25 bp, Homo sapien
tgtcaacattcgtctcggcctcaag

SEQ ID NO: 5463727 - DNA, 25 bp, Homo sapien
ggttctgaggtcctctttgcagaga

SEQ ID NO: 5463728 - DNA, 25 bp, Homo sapien
aatgaccggccagggcttttccacg

SEQ ID NO: 5463729 - DNA, 25 bp, Homo sapien
gaccttcattctggccccggattca

SEQ ID NO: 5463730 - DNA, 25 bp, Homo sapien
cacgaagtgccagcacacctgtctg

SEQ ID NO: 5463731 - DNA, 25 bp, Homo sapien
tcccaagatgccattcttaacacca

SEQ ID NO: 5463732 - DNA, 25 bp, Homo sapien
tccctccacaggatggagttcactg

SEQ ID NO: 5463733 - DNA, 25 bp, Homo sapien
ctccacaggatggagttcactgacc

SEQ ID NO: 5463734 - DNA, 25 bp, Homo sapien
cctccacaggatggagttcactgac

SEQ ID NO: 5463735 - DNA, 25 bp, Homo sapien
ccctccacaggatggagttcactga

SEQ ID NO: 5463736 - DNA, 25 bp, Homo sapien
gagaaatggttcagggttgatatta

SEQ ID NO: 5463737 - DNA, 25 bp, Homo sapien
ggttcagggttgatattagattatc

SEQ ID NO: 5463738 - DNA, 25 bp, Homo sapien
tcagggttgatattagattatccaa

SEQ ID NO: 5463739 - DNA, 25 bp, Homo sapien
gaaatggaaactggcatggatattt

SEQ ID NO: 5463740 - DNA, 25 bp, Homo sapien
gggcttgtatttcattctctagcaa

SEQ ID NO: 5463741 - DNA, 25 bp, Homo sapien
actctggggcttgtatttcattctc

SEQ ID NO: 5463742 - DNA, 25 bp, Homo sapien
aatcaataactttgactctggggct

SEQ ID NO: 5463743 - DNA, 25 bp, Homo sapien
aaagaaatcaataactttgactctg

SEQ ID NO: 5463744 - DNA, 25 bp, Homo sapien
aggatgccacagaaacacatcggtc

SEQ ID NO: 5463745 - DNA, 25 bp, Homo sapien
ctgaacatgtgttcaggatgccaca

SEQ ID NO: 5463746 - DNA, 25 bp, Homo sapien
gatgccacagaaacacatcggtctg

SEQ ID NO: 5463747 - DNA, 25 bp, Homo sapien
agaaacacatcggtctgtgaaatgg

SEQ ID NO: 5463748 - DNA, 25 bp, Homo sapien
taactcagtgacctggaatttagag

SEQ ID NO: 5463749 - DNA, 25 bp, Homo sapien
caaagtcatggactctacccttgga

SEQ ID NO: 5463750 - DNA, 25 bp, Homo sapien
gtctgccagagcctgacaccaaagt

SEQ ID NO: 5463751 - DNA, 25 bp, Homo sapien
tcatggactctacccttggattgcc

SEQ ID NO: 5463752 - DNA, 25 bp, Homo sapien
ttaagtcaatacgagttgatgggtg

SEQ ID NO: 5463753 - DNA, 25 bp, Homo sapien
tcgaggatggttacaaaggaaggct

SEQ ID NO: 5463754 - DNA, 25 bp, Homo sapien
cctaaacaagctcggccaacatagt

SEQ ID NO: 5463755 - DNA, 25 bp, Homo sapien
cacatgctatgttaggttttcgagg

SEQ ID NO: 5463756 - DNA, 25 bp, Homo sapien
gaaggtgaagacctcagggagctat

SEQ ID NO: 5463757 - DNA, 25 bp, Homo sapien
aggtgaagacctcagggagctatga

SEQ ID NO: 5463758 - DNA, 25 bp, Homo sapien
aaggtgaagacctcagggagctatg

SEQ ID NO: 5463759 - DNA, 25 bp, Homo sapien
agaaggtgaagacctcagggagcta

SEQ ID NO: 5463760 - DNA, 25 bp, Homo sapien
aactgcagcaccgaagactctttgg

SEQ ID NO: 5463761 - DNA, 25 bp, Homo sapien
ttcagacacctgaaagagccggacc

SEQ ID NO: 5463762 - DNA, 25 bp, Homo sapien
ttgggtagcagaggcactaactggc

SEQ ID NO: 5463763 - DNA, 25 bp, Homo sapien
caaggtcgcttctctctgcaggatc

SEQ ID NO: 5463764 - DNA, 25 bp, Homo sapien
ccagaggcccctgtgtctcatccat

SEQ ID NO: 5463765 - DNA, 25 bp, Homo sapien
gccagaggcccctgtgtctcatcca

SEQ ID NO: 5463766 - DNA, 25 bp, Homo sapien
ggccagaggcccctgtgtctcatcc

SEQ ID NO: 5463767 - DNA, 25 bp, Homo sapien
tggacttacggcaagagaagctcac

SEQ ID NO: 5463768 - DNA, 25 bp, Homo sapien
taaccagactaacacgtgctcctgg

SEQ ID NO: 5463769 - DNA, 25 bp, Homo sapien
gcgtgtgtagaaggcccactgttca

SEQ ID NO: 5463770 - DNA, 25 bp, Homo sapien
gaagctcacaccagctcgggttcag

SEQ ID NO: 5463771 - DNA, 25 bp, Homo sapien
gtttacagtagcctgctccaccaat

SEQ ID NO: 5463772 - DNA, 25 bp, Homo sapien
tgaaaacaattctcaaaacctgacc

SEQ ID NO: 5463773 - DNA, 25 bp, Homo sapien
gtagcctgctccaccaatctgaata

SEQ ID NO: 5463774 - DNA, 25 bp, Homo sapien
tgctccaccaatctgaatacaatga

SEQ ID NO: 5463775 - DNA, 25 bp, Homo sapien
cattggaacccatgaaaatcctcgg

SEQ ID NO: 5463776 - DNA, 25 bp, Homo sapien
gatgagtcgctcaagcaaacctaga

SEQ ID NO: 5463777 - DNA, 25 bp, Homo sapien
gctggtgatgagtcgctcaagcaaa

SEQ ID NO: 5463778 - DNA, 25 bp, Homo sapien
aaacctagaaaatccgaggctccat

SEQ ID NO: 5463779 - DNA, 25 bp, Homo sapien
gctgtaattctgtagcgagttcatc

SEQ ID NO: 5463780 - DNA, 25 bp, Homo sapien
gcgagttcatcaaactgtcctgctc

SEQ ID NO: 5463781 - DNA, 25 bp, Homo sapien
ctcagccagctacctaggaccaagt

SEQ ID NO: 5463782 - DNA, 25 bp, Homo sapien
tctgtagcgagttcatcaaactgtc

SEQ ID NO: 5463783 - DNA, 25 bp, Homo sapien
cctgatccagacctccatggagatg

SEQ ID NO: 5463784 - DNA, 25 bp, Homo sapien
ctgatccagacctccatggagatgc

SEQ ID NO: 5463785 - DNA, 25 bp, Homo sapien
gatccagacctccatggagatgctg

SEQ ID NO: 5463786 - DNA, 25 bp, Homo sapien
tgatccagacctccatggagatgct

SEQ ID NO: 5463787 - DNA, 25 bp, Homo sapien
cctgcagaataaagcgcagctcctg

SEQ ID NO: 5463788 - DNA, 25 bp, Homo sapien
ttcgagagccccacgcccgacaggc

SEQ ID NO: 5463789 - DNA, 25 bp, Homo sapien
ggcctgacaccaacggcttcgagag

SEQ ID NO: 5463790 - DNA, 25 bp, Homo sapien
accgttcaggattcccactgtctgc

SEQ ID NO: 5463791 - DNA, 25 bp, Homo sapien
gggagaggaaggacgccgaagcgta

SEQ ID NO: 5463792 - DNA, 25 bp, Homo sapien
aaggacgccgaagcgtagcgtcccg

SEQ ID NO: 5463793 - DNA, 25 bp, Homo sapien
gaagcctaactcaggattcaggaac

SEQ ID NO: 5463794 - DNA, 25 bp, Homo sapien
aggaaccagactaacagagggcaat

SEQ ID NO: 5463795 - DNA, 25 bp, Homo sapien
ctctgcgctccacgagctgctcctg

SEQ ID NO: 5463796 - DNA, 25 bp, Homo sapien
ggctggctggattcgcctctcggcc

SEQ ID NO: 5463797 - DNA, 25 bp, Homo sapien
caagaccgaggacgcgccgagccga

SEQ ID NO: 5463798 - DNA, 25 bp, Homo sapien
ccggtgccacgtgtaacgccgcggg

SEQ ID NO: 5463799 - DNA, 25 bp, Homo sapien
tggtccatccggttctgatggggtc

SEQ ID NO: 5463800 - DNA, 25 bp, Homo sapien
gcagggaaaaggcactatcccggaa

SEQ ID NO: 5463801 - DNA, 25 bp, Homo sapien
gggtccgcagggaaaaggcactatc

SEQ ID NO: 5463802 - DNA, 25 bp, Homo sapien
catccggttctgatggggtccgcag

SEQ ID NO: 5463803 - DNA, 25 bp, Homo sapien
tctgcaacctcaggcatgcaccacc

SEQ ID NO: 5463804 - DNA, 25 bp, Homo sapien
accaccacatccggctaatttttgt

SEQ ID NO: 5463805 - DNA, 25 bp, Homo sapien
ccttggcttggtgaggaaaacctgt

SEQ ID NO: 5463806 - DNA, 25 bp, Homo sapien
caaagtcctcttcttggagccttgg

SEQ ID NO: 5463807 - DNA, 25 bp, Homo sapien
tatgaggcctctattcccagctggg

SEQ ID NO: 5463808 - DNA, 25 bp, Homo sapien
gaaaacctgtgttaaaatgactatg

SEQ ID NO: 5463809 - DNA, 25 bp, Homo sapien
aattaacaagcagcaggtagggcaa

SEQ ID NO: 5463810 - DNA, 25 bp, Homo sapien
gcaggtagggcaaagtctgtggtgg

SEQ ID NO: 5463811 - DNA, 25 bp, Homo sapien
cactgaattaacaagcagcaggtag

SEQ ID NO: 5463812 - DNA, 25 bp, Homo sapien
gatggggacactgaattaacaagca

SEQ ID NO: 5463813 - DNA, 25 bp, Homo sapien
tctttcttgattgtttagctctgca

SEQ ID NO: 5463814 - DNA, 25 bp, Homo sapien
ccattcagtgcttccaatgtgttaa

SEQ ID NO: 5463815 - DNA, 25 bp, Homo sapien
tgggaatgttcatcccattcagtgc

SEQ ID NO: 5463816 - DNA, 25 bp, Homo sapien
ttagctctgcactctggaagagttc

SEQ ID NO: 5463817 - DNA, 25 bp, Homo sapien
gctttctgcattaattctgtcttac

SEQ ID NO: 5463818 - DNA, 25 bp, Homo sapien
tttgctttctgcattaattctgtct

SEQ ID NO: 5463819 - DNA, 25 bp, Homo sapien
ttgctttctgcattaattctgtctt

SEQ ID NO: 5463820 - DNA, 25 bp, Homo sapien
tgctttctgcattaattctgtctta

SEQ ID NO: 5463821 - DNA, 25 bp, Homo sapien
gctgatgctattcaggacccatgca

SEQ ID NO: 5463822 - DNA, 25 bp, Homo sapien
atcaactcttcagtttggcatcctg

SEQ ID NO: 5463823 - DNA, 25 bp, Homo sapien
cttccagtggctgatgctattcagg

SEQ ID NO: 5463824 - DNA, 25 bp, Homo sapien
gggccatttatcaactcttcagttt

SEQ ID NO: 5463825 - DNA, 25 bp, Homo sapien
ctgcaatcgtagagcctaattgtat

SEQ ID NO: 5463826 - DNA, 25 bp, Homo sapien
tgggctgtcagtctccacggtggtc

SEQ ID NO: 5463827 - DNA, 25 bp, Homo sapien
taccttgggccagtgagtatgtcgg

SEQ ID NO: 5463828 - DNA, 25 bp, Homo sapien
agcctaattgtatcgtattactggg

SEQ ID NO: 5463829 - DNA, 25 bp, Homo sapien
taagattgtaggagacaaagcgcct

SEQ ID NO: 5463830 - DNA, 25 bp, Homo sapien
taatttgacataggaaaggcacaca

SEQ ID NO: 5463831 - DNA, 25 bp, Homo sapien
gaggctgtgcgttccctaattgcaa

SEQ ID NO: 5463832 - DNA, 25 bp, Homo sapien
tgcacgggtttcaagacatcctagt

SEQ ID NO: 5463833 - DNA, 25 bp, Homo sapien
gaagcacaggatatctgacaagaat

SEQ ID NO: 5463834 - DNA, 25 bp, Homo sapien
gactctttggaggacaatagctaaa

SEQ ID NO: 5463835 - DNA, 25 bp, Homo sapien
cagtactgatagtcaacgaagggtc

SEQ ID NO: 5463836 - DNA, 25 bp, Homo sapien
cagaaatctatagtggtttgcccca

SEQ ID NO: 5463837 - DNA, 25 bp, Homo sapien
tcaggatgtgtacttgagcccaaaa

SEQ ID NO: 5463838 - DNA, 25 bp, Homo sapien
ctattagcagtgagtacaacagcaa

SEQ ID NO: 5463839 - DNA, 25 bp, Homo sapien
gctgccaactttgtgctctgacata

SEQ ID NO: 5463840 - DNA, 25 bp, Homo sapien
caagtggtagaatacagcatgctca

SEQ ID NO: 5463841 - DNA, 25 bp, Homo sapien
gataaacgttgtaaagcctgaagct

SEQ ID NO: 5463842 - DNA, 25 bp, Homo sapien
tcaactgatgttggaaactctcaaa

SEQ ID NO: 5463843 - DNA, 25 bp, Homo sapien
tttcccgaggaactgtaaagatgat

SEQ ID NO: 5463844 - DNA, 25 bp, Homo sapien
caaagggagtaaaggcttgatctca

SEQ ID NO: 5463845 - DNA, 25 bp, Homo sapien
gagtacagtccaagaataaatcaaa

SEQ ID NO: 5463846 - DNA, 25 bp, Homo sapien
taatagaagagatggtcgtcttaat

SEQ ID NO: 5463847 - DNA, 25 bp, Homo sapien
agaacttcccagtccatgcgaagag

SEQ ID NO: 5463848 - DNA, 25 bp, Homo sapien
catgtactgtaatttaatagaagag

SEQ ID NO: 5463849 - DNA, 25 bp, Homo sapien
tctctcaataagtccttcaatacgt

SEQ ID NO: 5463850 - DNA, 25 bp, Homo sapien
aagaatcgcgccttcaactgctgag

SEQ ID NO: 5463851 - DNA, 25 bp, Homo sapien
tttgcgatcctcaggtgttcgtgcc

SEQ ID NO: 5463852 - DNA, 25 bp, Homo sapien
tggacttggtaagaatcgcgccttc

SEQ ID NO: 5463853 - DNA, 25 bp, Homo sapien
gaatctaaacctttctgacctcaaa

SEQ ID NO: 5463854 - DNA, 25 bp, Homo sapien
tatttaatgttcttaaccctgcaaa

SEQ ID NO: 5463855 - DNA, 25 bp, Homo sapien
ttaaccctgcaaaataagttgtctc

SEQ ID NO: 5463856 - DNA, 25 bp, Homo sapien
tctaatgcatccatgagccagcttt

SEQ ID NO: 5463857 - DNA, 25 bp, Homo sapien
taacctgtcacgtaattgccaaagt

SEQ ID NO: 5463858 - DNA, 25 bp, Homo sapien
atgctcagtatcctcccattttggg

SEQ ID NO: 5463859 - DNA, 25 bp, Homo sapien
gatatccactttcacgagtccaatg

SEQ ID NO: 5463860 - DNA, 25 bp, Homo sapien
tctcaaggcactaccactggatatc

SEQ ID NO: 5463861 - DNA, 25 bp, Homo sapien
tccgctactagaacattgtgctgca

SEQ ID NO: 5463862 - DNA, 25 bp, Homo sapien
cattatccgcactatagcagcttct

SEQ ID NO: 5463863 - DNA, 25 bp, Homo sapien
ggtcggattcaccttgtttggcagc

SEQ ID NO: 5463864 - DNA, 25 bp, Homo sapien
tgtcgtcgtctactttctgccttgt

SEQ ID NO: 5463865 - DNA, 25 bp, Homo sapien
tgagacaactgaggcaatatgggtg

SEQ ID NO: 5463866 - DNA, 25 bp, Homo sapien
gaaaccgtaaaattgcaaagcagca

SEQ ID NO: 5463867 - DNA, 25 bp, Homo sapien
tagatagccacgagacagcagattg

SEQ ID NO: 5463868 - DNA, 25 bp, Homo sapien
gactggtaaacgtaggtcacagcca

SEQ ID NO: 5463869 - DNA, 25 bp, Homo sapien
tcttttgtaagaacccgctgtgttg

SEQ ID NO: 5463870 - DNA, 25 bp, Homo sapien
tggatgtgaattgatcattaactgt

SEQ ID NO: 5463871 - DNA, 25 bp, Homo sapien
gcgagggactgtagggctctaacaa

SEQ ID NO: 5463872 - DNA, 25 bp, Homo sapien
tgttggtttaccacaggcgagggac

SEQ ID NO: 5463873 - DNA, 25 bp, Homo sapien
acaatcaaaatttaccatccagact

SEQ ID NO: 5463874 - DNA, 25 bp, Homo sapien
tccatccaagtttatccagactact

SEQ ID NO: 5463875 - DNA, 25 bp, Homo sapien
tgagctcaggccttctaccatacaa

SEQ ID NO: 5463876 - DNA, 25 bp, Homo sapien
tgtatgcttctatgaccaaatgaag

SEQ ID NO: 5463877 - DNA, 25 bp, Homo sapien
tacgagtaactgatctggagagtca

SEQ ID NO: 5463878 - DNA, 25 bp, Homo sapien
tctagacaagtctttgagcaacagt

SEQ ID NO: 5463879 - DNA, 25 bp, Homo sapien
taagattacagatcatcccaagagg

SEQ ID NO: 5463880 - DNA, 25 bp, Homo sapien
tgaaatgcccctaaagtcataaggt

SEQ ID NO: 5463881 - DNA, 25 bp, Homo sapien
gagattaaagctacaaggaattcca

SEQ ID NO: 5463882 - DNA, 25 bp, Homo sapien
tctgttggtacatgcatttctgact

SEQ ID NO: 5463883 - DNA, 25 bp, Homo sapien
tatatttgcgccaagcacggttgct

SEQ ID NO: 5463884 - DNA, 25 bp, Homo sapien
tctgactttgagcacgaaagcctgt

SEQ ID NO: 5463885 - DNA, 25 bp, Homo sapien
catcatatagatgtgttatcactta

SEQ ID NO: 5463886 - DNA, 25 bp, Homo sapien
gtatatgaatatccactccctcaca

SEQ ID NO: 5463887 - DNA, 25 bp, Homo sapien
tgccttcatactgatttactgatgc

SEQ ID NO: 5463888 - DNA, 25 bp, Homo sapien
tctcatgaccactatgggaaaaaat

SEQ ID NO: 5463889 - DNA, 25 bp, Homo sapien
tcccagtggcagccggaaccccagc

SEQ ID NO: 5463890 - DNA, 25 bp, Homo sapien
cagtggcagccggaaccccagcgag

SEQ ID NO: 5463891 - DNA, 25 bp, Homo sapien
agccggaaccccagcgagagagaac

SEQ ID NO: 5463892 - DNA, 25 bp, Homo sapien
tggcagccggaaccccagcgagaga

SEQ ID NO: 5463893 - DNA, 25 bp, Homo sapien
tcctcagtctaatagaaaggtgtct

SEQ ID NO: 5463894 - DNA, 25 bp, Homo sapien
ccattctaaggtggcgatgagtccc

SEQ ID NO: 5463895 - DNA, 25 bp, Homo sapien
accttatggcattaagggcaatcca

SEQ ID NO: 5463896 - DNA, 25 bp, Homo sapien
tggtgcctggcaattaggcaactgc

SEQ ID NO: 5463897 - DNA, 25 bp, Homo sapien
taaagactgcagatgatgtagagcg

SEQ ID NO: 5463898 - DNA, 25 bp, Homo sapien
tgtagagcgactggaccgtcttgca

SEQ ID NO: 5463899 - DNA, 25 bp, Homo sapien
tattacacaccaactaaagcggctc

SEQ ID NO: 5463900 - DNA, 25 bp, Homo sapien
caacgcaattttggaggtaatgctc

SEQ ID NO: 5463901 - DNA, 25 bp, Homo sapien
tatgtgcttccgtgtattagagcca

SEQ ID NO: 5463902 - DNA, 25 bp, Homo sapien
gttacttgtgcacctccaacaccaa

SEQ ID NO: 5463903 - DNA, 25 bp, Homo sapien
tattagagccagttacttgtgcacc

SEQ ID NO: 5463904 - DNA, 25 bp, Homo sapien
gtggaaacttgcaatatgtgcttcc

SEQ ID NO: 5463905 - DNA, 25 bp, Homo sapien
cccatatgatgctggagtgtgagct

SEQ ID NO: 5463906 - DNA, 25 bp, Homo sapien
gtgagctgtcgaccactgtgtttgg

SEQ ID NO: 5463907 - DNA, 25 bp, Homo sapien
tttaactggtccataaaatgtggca

SEQ ID NO: 5463908 - DNA, 25 bp, Homo sapien
tgagatctgcagaacccatatgatg

SEQ ID NO: 5463909 - DNA, 25 bp, Homo sapien
ctgaagtgttcagaaaagtccaagg

SEQ ID NO: 5463910 - DNA, 25 bp, Homo sapien
ttagctgaagtgttcagaaaagtcc

SEQ ID NO: 5463911 - DNA, 25 bp, Homo sapien
gctgaagtgttcagaaaagtccaag

SEQ ID NO: 5463912 - DNA, 25 bp, Homo sapien
tagctgaagtgttcagaaaagtcca

SEQ ID NO: 5463913 - DNA, 25 bp, Homo sapien
aatatcctgtcgtgagcacccggac

SEQ ID NO: 5463914 - DNA, 25 bp, Homo sapien
tggctgactgagtgggccaatatcc

SEQ ID NO: 5463915 - DNA, 25 bp, Homo sapien
cacccggactgtaagatcaacacca

SEQ ID NO: 5463916 - DNA, 25 bp, Homo sapien
tcttggtgctggtgggatgttgcac

SEQ ID NO: 5463917 - DNA, 25 bp, Homo sapien
aattttaactacatggcaaatagct

SEQ ID NO: 5463918 - DNA, 25 bp, Homo sapien
cttactgttatcactgagaactgaa

SEQ ID NO: 5463919 - DNA, 25 bp, Homo sapien
tggcacataaatcaagtcttactgt

SEQ ID NO: 5463920 - DNA, 25 bp, Homo sapien
tttcccaaattttaactacatggca

SEQ ID NO: 5463921 - DNA, 25 bp, Homo sapien
cagaataagaggcaatgtgaaggaa

SEQ ID NO: 5463922 - DNA, 25 bp, Homo sapien
gaaacaactgtcatctgctaagtgg

SEQ ID NO: 5463923 - DNA, 25 bp, Homo sapien
tattaacaacagaataattctcttt

SEQ ID NO: 5463924 - DNA, 25 bp, Homo sapien
taaattgtcagtgtattccttcaag

SEQ ID NO: 5463925 - DNA, 25 bp, Homo sapien
agtagaaattaacgcagaatcttac

SEQ ID NO: 5463926 - DNA, 25 bp, Homo sapien
aagtagaaattaacgcagaatctta

SEQ ID NO: 5463927 - DNA, 25 bp, Homo sapien
taagtagaaattaacgcagaatctt

SEQ ID NO: 5463928 - DNA, 25 bp, Homo sapien
tgtgtttgagatgctcatatcccta

SEQ ID NO: 5463929 - DNA, 25 bp, Homo sapien
ccagttgcctgtagatgttgcctga

SEQ ID NO: 5463930 - DNA, 25 bp, Homo sapien
gaattcatccatcgttgtgtttgag

SEQ ID NO: 5463931 - DNA, 25 bp, Homo sapien
gacgtgaactgacatccacattcag

SEQ ID NO: 5463932 - DNA, 25 bp, Homo sapien
acacaaataaatggtagatgtttct

SEQ ID NO: 5463933 - DNA, 25 bp, Homo sapien
gattctttcagagattccaatatac

SEQ ID NO: 5463934 - DNA, 25 bp, Homo sapien
tatttcatgttattgctatccctga

SEQ ID NO: 5463935 - DNA, 25 bp, Homo sapien
tcacgtgcaagtattctatggacca

SEQ ID NO: 5463936 - DNA, 25 bp, Homo sapien
aggaccattgctttatccaatattg

SEQ ID NO: 5463937 - DNA, 25 bp, Homo sapien
gagaagtctccttgccaagtgttgt

SEQ ID NO: 5463938 - DNA, 25 bp, Homo sapien
ggaccattgctttatccaatattgt

SEQ ID NO: 5463939 - DNA, 25 bp, Homo sapien
tatttgtgagaagtctccttgccaa

SEQ ID NO: 5463940 - DNA, 25 bp, Homo sapien
tatgcaggcaaaaacttacacagcc

SEQ ID NO: 5463941 - DNA, 25 bp, Homo sapien
gcagtactacggttcatttacagct

SEQ ID NO: 5463942 - DNA, 25 bp, Homo sapien
taatatagcgctgggttaagggatg

SEQ ID NO: 5463943 - DNA, 25 bp, Homo sapien
gaattctattccgtagagggctacc

SEQ ID NO: 5463944 - DNA, 25 bp, Homo sapien
gaacctactcttcagatccaataag

SEQ ID NO: 5463945 - DNA, 25 bp, Homo sapien
gagacggtcattgttgaatgattcc

SEQ ID NO: 5463946 - DNA, 25 bp, Homo sapien
tactcaaagtcacccgcaatagttt

SEQ ID NO: 5463947 - DNA, 25 bp, Homo sapien
caggaggaagcgatcgaacctactc

SEQ ID NO: 5463948 - DNA, 25 bp, Homo sapien
ttcaaaccatttggcacacgactaa

SEQ ID NO: 5463949 - DNA, 25 bp, Homo sapien
ggcacacgactaaataacttgtaca

SEQ ID NO: 5463950 - DNA, 25 bp, Homo sapien
taccttgctccctcaaataggaact

SEQ ID NO: 5463951 - DNA, 25 bp, Homo sapien
tatagtcaacaggattctttccttc

SEQ ID NO: 5463952 - DNA, 25 bp, Homo sapien
gagcaatccctaatgtttcccaggt

SEQ ID NO: 5463953 - DNA, 25 bp, Homo sapien
gaatgaaaactctggatcctatcca

SEQ ID NO: 5463954 - DNA, 25 bp, Homo sapien
aattggtagtccctgtaatgaggaa

SEQ ID NO: 5463955 - DNA, 25 bp, Homo sapien
tctaatgcagacctaatgacactac

SEQ ID NO: 5463956 - DNA, 25 bp, Homo sapien
gcctaccttggtctacagttctaag

SEQ ID NO: 5463957 - DNA, 25 bp, Homo sapien
taataagatactggcgagacacggt

SEQ ID NO: 5463958 - DNA, 25 bp, Homo sapien
taaatgtggcacaccaaatacttct

SEQ ID NO: 5463959 - DNA, 25 bp, Homo sapien
tatgcccatagtaacctacacatgg

SEQ ID NO: 5463960 - DNA, 25 bp, Homo sapien
ttccactagagataaacatggctca

SEQ ID NO: 5463961 - DNA, 25 bp, Homo sapien
aaacacaaggtaaggattccactag

SEQ ID NO: 5463962 - DNA, 25 bp, Homo sapien
gctcatgaccccaacaggcaatatg

SEQ ID NO: 5463963 - DNA, 25 bp, Homo sapien
tagatttcgtctaggaagcaggaga

SEQ ID NO: 5463964 - DNA, 25 bp, Homo sapien
tcatgtgcttggaaatgagttccct

SEQ ID NO: 5463965 - DNA, 25 bp, Homo sapien
ccgttgatttgtcaaggcagtgcat

SEQ ID NO: 5463966 - DNA, 25 bp, Homo sapien
ttttcaacatatgtactagcccaga

SEQ ID NO: 5463967 - DNA, 25 bp, Homo sapien
gaattctccatttctactatagtct

SEQ ID NO: 5463968 - DNA, 25 bp, Homo sapien
ctgaagcactattttctgctaaaaa

SEQ ID NO: 5463969 - DNA, 25 bp, Homo sapien
tttctttatatatactgaagcacta

SEQ ID NO: 5463970 - DNA, 25 bp, Homo sapien
tctgctaaaaatttctggctttcca

SEQ ID NO: 5463971 - DNA, 25 bp, Homo sapien
ttaattctagcttctactttcttta

SEQ ID NO: 5463972 - DNA, 25 bp, Homo sapien
tttagcttcctacgaatacatctgt

SEQ ID NO: 5463973 - DNA, 25 bp, Homo sapien
gctcaggtagttacggttttcagga

SEQ ID NO: 5463974 - DNA, 25 bp, Homo sapien
aatgccttgttacagttaccttata

SEQ ID NO: 5463975 - DNA, 25 bp, Homo sapien
aattcctactgttaactgctcaggt

SEQ ID NO: 5463976 - DNA, 25 bp, Homo sapien
cctgcagatgagacttcgttggtga

SEQ ID NO: 5463977 - DNA, 25 bp, Homo sapien
ggcaaatatgcactacagaatcatc

SEQ ID NO: 5463978 - DNA, 25 bp, Homo sapien
tagacagcaagatcaagccctcctt

SEQ ID NO: 5463979 - DNA, 25 bp, Homo sapien
cacaggtccatgaagtggattttct

SEQ ID NO: 5463980 - DNA, 25 bp, Homo sapien
gatcttccttcgagacctaaaatca

SEQ ID NO: 5463981 - DNA, 25 bp, Homo sapien
gactgatcttccttcgagacctaaa

SEQ ID NO: 5463982 - DNA, 25 bp, Homo sapien
catagactgatcttccttcgagacc

SEQ ID NO: 5463983 - DNA, 25 bp, Homo sapien
ttcttcatagactgatcttccttcg

SEQ ID NO: 5463984 - DNA, 25 bp, Homo sapien
accacaagagtaaagagagaaattt

SEQ ID NO: 5463985 - DNA, 25 bp, Homo sapien
accaaaaccacaagagtaaagagag

SEQ ID NO: 5463986 - DNA, 25 bp, Homo sapien
caaaaccacaagagtaaagagagaa

SEQ ID NO: 5463987 - DNA, 25 bp, Homo sapien
aaaccacaagagtaaagagagaaat

SEQ ID NO: 5463988 - DNA, 25 bp, Homo sapien
agagtttgccgtagatgatccctaa

SEQ ID NO: 5463989 - DNA, 25 bp, Homo sapien
aatcccaaattgtagacgttctcca

SEQ ID NO: 5463990 - DNA, 25 bp, Homo sapien
tattttgttgtacatacacacggtc

SEQ ID NO: 5463991 - DNA, 25 bp, Homo sapien
ccataacgtacaacttgatctcgaa

SEQ ID NO: 5463992 - DNA, 25 bp, Homo sapien
gagtacagttcttgtgagcataata

SEQ ID NO: 5463993 - DNA, 25 bp, Homo sapien
cttcaaatgatcttaagcaatgtgc

SEQ ID NO: 5463994 - DNA, 25 bp, Homo sapien
aaatatgagtacagttcttgtgagc

SEQ ID NO: 5463995 - DNA, 25 bp, Homo sapien
ttaagcaatgtgcaactttccagca

SEQ ID NO: 5463996 - DNA, 25 bp, Homo sapien
catgaatctacaggttatagctaac

SEQ ID NO: 5463997 - DNA, 25 bp, Homo sapien
tttgttcacgcttaagtactttgga

SEQ ID NO: 5463998 - DNA, 25 bp, Homo sapien
tatagctaacgataaggtgaacatg

SEQ ID NO: 5463999 - DNA, 25 bp, Homo sapien
tttctcgtctcagcaaggatctctc

SEQ ID NO: 5464000 - DNA, 25 bp, Homo sapien
agaaccttttatcgggatttgcagc

SEQ ID NO: 5464001 - DNA, 25 bp, Homo sapien
ttagggctaaacagcactccattgc

SEQ ID NO: 5464002 - DNA, 25 bp, Homo sapien
ttcaataagcacaaagttcaactgg

SEQ ID NO: 5464003 - DNA, 25 bp, Homo sapien
tgcagctagaatagaaagtactggc

SEQ ID NO: 5464004 - DNA, 25 bp, Homo sapien
tgatggtatcgctactaaaggaggt

SEQ ID NO: 5464005 - DNA, 25 bp, Homo sapien
tatttgctatcggtctcccatggct

SEQ ID NO: 5464006 - DNA, 25 bp, Homo sapien
ttcattgtggccctcagtaaaacaa

SEQ ID NO: 5464007 - DNA, 25 bp, Homo sapien
tcccctgtcccaactttaagcatag

SEQ ID NO: 5464008 - DNA, 25 bp, Homo sapien
tacaatgtctgctatcttaagccct

SEQ ID NO: 5464009 - DNA, 25 bp, Homo sapien
cttatggcctacaatgtctgctatc

SEQ ID NO: 5464010 - DNA, 25 bp, Homo sapien
tatggcctacaatgtctgctatctt

SEQ ID NO: 5464011 - DNA, 25 bp, Homo sapien
tggcctacaatgtctgctatcttaa

SEQ ID NO: 5464012 - DNA, 25 bp, Homo sapien
catgcatcgggttgcagccaaaact

SEQ ID NO: 5464013 - DNA, 25 bp, Homo sapien
gatgcttcagtaaaggaagccaagg

SEQ ID NO: 5464014 - DNA, 25 bp, Homo sapien
tcagaatacatagtttggagcaccc

SEQ ID NO: 5464015 - DNA, 25 bp, Homo sapien
gaagccaaggcatgtgatcagaata

SEQ ID NO: 5464016 - DNA, 25 bp, Homo sapien
attcaactctgaaagcttagtataa

SEQ ID NO: 5464017 - DNA, 25 bp, Homo sapien
caactctgaaagcttagtataaata

SEQ ID NO: 5464018 - DNA, 25 bp, Homo sapien
ttcaactctgaaagcttagtataaa

SEQ ID NO: 5464019 - DNA, 25 bp, Homo sapien
tcaactctgaaagcttagtataaat

SEQ ID NO: 5464020 - DNA, 25 bp, Homo sapien
ttttactactactcctaatagacca

SEQ ID NO: 5464021 - DNA, 25 bp, Homo sapien
tcagtacttttactactactcctaa

SEQ ID NO: 5464022 - DNA, 25 bp, Homo sapien
cctaatagaccaaggatagttattt

SEQ ID NO: 5464023 - DNA, 25 bp, Homo sapien
tttattagtacttattcatctatcc

SEQ ID NO: 5464024 - DNA, 25 bp, Homo sapien
ttgtaagaccaacgcccctggaaga

SEQ ID NO: 5464025 - DNA, 25 bp, Homo sapien
tgattcaagaaccaaatagcctctg

SEQ ID NO: 5464026 - DNA, 25 bp, Homo sapien
gaaacctaagatagtatagctgctg

SEQ ID NO: 5464027 - DNA, 25 bp, Homo sapien
tagagctctcgtgcactgttggtgg

SEQ ID NO: 5464028 - DNA, 25 bp, Homo sapien
catctctctggtaagaaccagtatg

SEQ ID NO: 5464029 - DNA, 25 bp, Homo sapien
aaagtccatcactccagtctgtttc

SEQ ID NO: 5464030 - DNA, 25 bp, Homo sapien
cagtatgattacatcaggcccaggg

SEQ ID NO: 5464031 - DNA, 25 bp, Homo sapien
gccatataaaggcaatattcccagg

SEQ ID NO: 5464032 - DNA, 25 bp, Homo sapien
gtggcttgaacatgtttaatgctgg

SEQ ID NO: 5464033 - DNA, 25 bp, Homo sapien
gacagtgcaggggttcaccagagaa

SEQ ID NO: 5464034 - DNA, 25 bp, Homo sapien
tgaatgacacacgacagatcctggg

SEQ ID NO: 5464035 - DNA, 25 bp, Homo sapien
ttcaccagagaatttaacagaattg

SEQ ID NO: 5464036 - DNA, 25 bp, Homo sapien
atgaatttagtacatcttctcgcac

SEQ ID NO: 5464037 - DNA, 25 bp, Homo sapien
catagctgtttgatgatcattccaa

SEQ ID NO: 5464038 - DNA, 25 bp, Homo sapien
cattccaagcttgatttagcgtttg

SEQ ID NO: 5464039 - DNA, 25 bp, Homo sapien
gaagaaagttgttattcaatgaatt

SEQ ID NO: 5464040 - DNA, 25 bp, Homo sapien
ctgtgcctgagaatgtatggctcag

SEQ ID NO: 5464041 - DNA, 25 bp, Homo sapien
aaacactatcacttcctcaaacagc

SEQ ID NO: 5464042 - DNA, 25 bp, Homo sapien
tgtgagcgcttattcttctaatccc

SEQ ID NO: 5464043 - DNA, 25 bp, Homo sapien
cctagaatactcttcaacccacttt

SEQ ID NO: 5464044 - DNA, 25 bp, Homo sapien
cagatgccggcaatgatcattaatg

SEQ ID NO: 5464045 - DNA, 25 bp, Homo sapien
tcagatgccggcaatgatcattaat

SEQ ID NO: 5464046 - DNA, 25 bp, Homo sapien
agatgccggcaatgatcattaatga

SEQ ID NO: 5464047 - DNA, 25 bp, Homo sapien
gtggagaaatctggcggacaccaat

SEQ ID NO: 5464048 - DNA, 25 bp, Homo sapien
cagtggagaaatctggcggacacca

SEQ ID NO: 5464049 - DNA, 25 bp, Homo sapien
agaaatctggcggacaccaatgatc

SEQ ID NO: 5464050 - DNA, 25 bp, Homo sapien
tctggcggacaccaatgatcaaagt

SEQ ID NO: 5464051 - DNA, 25 bp, Homo sapien
gaataaggaatgtattaggcaacag

SEQ ID NO: 5464052 - DNA, 25 bp, Homo sapien
accaaaaactgagggataatctaca

SEQ ID NO: 5464053 - DNA, 25 bp, Homo sapien
tgaggaactgaacatgagatcctgg

SEQ ID NO: 5464054 - DNA, 25 bp, Homo sapien
aatcaccactaaacaggacaattgg

SEQ ID NO: 5464055 - DNA, 25 bp, Homo sapien
tacatgcattggaagagttcactct

SEQ ID NO: 5464056 - DNA, 25 bp, Homo sapien
aaagtcaattttagttagtgatcca

SEQ ID NO: 5464057 - DNA, 25 bp, Homo sapien
tattatagctcacaaacttcatctc

SEQ ID NO: 5464058 - DNA, 25 bp, Homo sapien
tatttgacaatcttaaagcaaggca

SEQ ID NO: 5464059 - DNA, 25 bp, Homo sapien
caacttctcttagtccagtgtagag

SEQ ID NO: 5464060 - DNA, 25 bp, Homo sapien
cttacgctggatttcttgaattgca

SEQ ID NO: 5464061 - DNA, 25 bp, Homo sapien
gagctcctcaaaactaagaccactg

SEQ ID NO: 5464062 - DNA, 25 bp, Homo sapien
aagaccactgttattcttacgctgg

SEQ ID NO: 5464063 - DNA, 25 bp, Homo sapien
gcatctcaaacttaccaagcctgaa

SEQ ID NO: 5464064 - DNA, 25 bp, Homo sapien
gaaaatgctgttgtctctaacttca

SEQ ID NO: 5464065 - DNA, 25 bp, Homo sapien
tacatgccagagtcatatatccagc

SEQ ID NO: 5464066 - DNA, 25 bp, Homo sapien
cactttaatgcgtagtaggcatctc

SEQ ID NO: 5464067 - DNA, 25 bp, Homo sapien
aaaaaatgttccttctggtgatagc

SEQ ID NO: 5464068 - DNA, 25 bp, Homo sapien
gtagaggctgaagtaaggcgagatc

SEQ ID NO: 5464069 - DNA, 25 bp, Homo sapien
ccttctggtgatagctaaggttaaa

SEQ ID NO: 5464070 - DNA, 25 bp, Homo sapien
aatgttccttctggtgatagctaag

SEQ ID NO: 5464071 - DNA, 25 bp, Homo sapien
aataacagcatctatctcaaagggc

SEQ ID NO: 5464072 - DNA, 25 bp, Homo sapien
gaatctcttgaacgctcatcgacag

SEQ ID NO: 5464073 - DNA, 25 bp, Homo sapien
ttaagtcctgggttcaataacagca

SEQ ID NO: 5464074 - DNA, 25 bp, Homo sapien
gacagccttaggtttgtgccacagc

SEQ ID NO: 5464075 - DNA, 25 bp, Homo sapien
taagaataaatcttctcgccagggt

SEQ ID NO: 5464076 - DNA, 25 bp, Homo sapien
aactacagaagtatggccactatca

SEQ ID NO: 5464077 - DNA, 25 bp, Homo sapien
ccatcacaagggttaagtacagtac

SEQ ID NO: 5464078 - DNA, 25 bp, Homo sapien
tcatctcataccatcacaagggtta

SEQ ID NO: 5464079 - DNA, 25 bp, Homo sapien
gccactatcattcaccttacttcat

SEQ ID NO: 5464080 - DNA, 25 bp, Homo sapien
aaaaaggtgatgcagctagaaagac

SEQ ID NO: 5464081 - DNA, 25 bp, Homo sapien
cacagaagttaaacggatacaacct

SEQ ID NO: 5464082 - DNA, 25 bp, Homo sapien
tatgctgggtaagatactgctacac

SEQ ID NO: 5464083 - DNA, 25 bp, Homo sapien
caagcccacactcttaactactatg

SEQ ID NO: 5464084 - DNA, 25 bp, Homo sapien
taacaggactactaaagaccatcca

SEQ ID NO: 5464085 - DNA, 25 bp, Homo sapien
gaccatccatgtactctggaatgaa

SEQ ID NO: 5464086 - DNA, 25 bp, Homo sapien
gacaaatgctttcatcccttaactt

SEQ ID NO: 5464087 - DNA, 25 bp, Homo sapien
tctgttgaccttacaatgggctaac

SEQ ID NO: 5464088 - DNA, 25 bp, Homo sapien
gtacattttaattgcttgccacggg

SEQ ID NO: 5464089 - DNA, 25 bp, Homo sapien
tagttcgtctgtcttgacgtatgcc

SEQ ID NO: 5464090 - DNA, 25 bp, Homo sapien
tagcgacataggcaagtatgcccag

SEQ ID NO: 5464091 - DNA, 25 bp, Homo sapien
gtatgcccagttcgttaacagtaca

SEQ ID NO: 5464092 - DNA, 25 bp, Homo sapien
acggagcattccgtggaaccactgt

SEQ ID NO: 5464093 - DNA, 25 bp, Homo sapien
gcattccgtggaaccactgtcactg

SEQ ID NO: 5464094 - DNA, 25 bp, Homo sapien
gtggaaccactgtcactgcgtcggg

SEQ ID NO: 5464095 - DNA, 25 bp, Homo sapien
ttatgaccacggagcattccgtgga

SEQ ID NO: 5464096 - DNA, 25 bp, Homo sapien
tgcccgtgcctttgctcagattcga

SEQ ID NO: 5464097 - DNA, 25 bp, Homo sapien
cttggtgtccttccggctgcccgtg

SEQ ID NO: 5464098 - DNA, 25 bp, Homo sapien
cccggatccgcatcttggtgtcctt

SEQ ID NO: 5464099 - DNA, 25 bp, Homo sapien
ccgtgcctttgctcagattcgacat

SEQ ID NO: 5464100 - DNA, 25 bp, Homo sapien
tgtcacatttaaggcgggcaggcag

SEQ ID NO: 5464101 - DNA, 25 bp, Homo sapien
tctcactgcgcaggccgaacgtcgt

SEQ ID NO: 5464102 - DNA, 25 bp, Homo sapien
actctggcgactccgatgcggctgg

SEQ ID NO: 5464103 - DNA, 25 bp, Homo sapien
cggcggcggcgacggacaaacatct

SEQ ID NO: 5464104 - DNA, 25 bp, Homo sapien
ggttgtactctcatatggcccagtt

SEQ ID NO: 5464105 - DNA, 25 bp, Homo sapien
gttgactgtaaggttgaatttgccc

SEQ ID NO: 5464106 - DNA, 25 bp, Homo sapien
taaactaagattgggagaggctctg

SEQ ID NO: 5464107 - DNA, 25 bp, Homo sapien
ttatgagtgttgtgcttaaagcccc

SEQ ID NO: 5464108 - DNA, 25 bp, Homo sapien
acttgataaactaccatgttgcagt

SEQ ID NO: 5464109 - DNA, 25 bp, Homo sapien
cattaagcggatgttgctgcatgac

SEQ ID NO: 5464110 - DNA, 25 bp, Homo sapien
ataataactcatactggccgggcgc

SEQ ID NO: 5464111 - DNA, 25 bp, Homo sapien
tctgcacttaggaggcattaagcgg

SEQ ID NO: 5464112 - DNA, 25 bp, Homo sapien
aaaatcatggtgaagctagacttac

SEQ ID NO: 5464113 - DNA, 25 bp, Homo sapien
tgaagctagacttacttgggttggg

SEQ ID NO: 5464114 - DNA, 25 bp, Homo sapien
caggggtgcatctttttgtaaagtg

SEQ ID NO: 5464115 - DNA, 25 bp, Homo sapien
tttcctaaaatcatggtgaagctag

SEQ ID NO: 5464116 - DNA, 25 bp, Homo sapien
gtggtgaatggatacgccagttcca

SEQ ID NO: 5464117 - DNA, 25 bp, Homo sapien
tccatcctcaggcccgtggtgaatg

SEQ ID NO: 5464118 - DNA, 25 bp, Homo sapien
ccgtggtgaatggatacgccagttc

SEQ ID NO: 5464119 - DNA, 25 bp, Homo sapien
catcctcaggcccgtggtgaatgga

SEQ ID NO: 5464120 - DNA, 25 bp, Homo sapien
gctgacggttctgatttaggggacc

SEQ ID NO: 5464121 - DNA, 25 bp, Homo sapien
tccagaagctgacggttctgattta

SEQ ID NO: 5464122 - DNA, 25 bp, Homo sapien
ttccagaagctgacggttctgattt

SEQ ID NO: 5464123 - DNA, 25 bp, Homo sapien
agaagctgacggttctgatttaggg

SEQ ID NO: 5464124 - DNA, 25 bp, Homo sapien
ttaccgtcctagaataaacatagcc

SEQ ID NO: 5464125 - DNA, 25 bp, Homo sapien
gatgaaactcggaaggaccttcaaa

SEQ ID NO: 5464126 - DNA, 25 bp, Homo sapien
agaactgtgatgaaactcggaagga

SEQ ID NO: 5464127 - DNA, 25 bp, Homo sapien
gaccttcaaagcttggttaccatta

SEQ ID NO: 5464128 - DNA, 25 bp, Homo sapien
tggatagcagcatttgtctaaatcc

SEQ ID NO: 5464129 - DNA, 25 bp, Homo sapien
aatccgggatacttaatgttgcaaa

SEQ ID NO: 5464130 - DNA, 25 bp, Homo sapien
taaatccgggatacttaatgttgca

SEQ ID NO: 5464131 - DNA, 25 bp, Homo sapien
gcatttgtctaaatccgggatactt

SEQ ID NO: 5464132 - DNA, 25 bp, Homo sapien
cctgttgctggcgttgaacccagtg

SEQ ID NO: 5464133 - DNA, 25 bp, Homo sapien
ttgctggcgttgaacccagtggtca

SEQ ID NO: 5464134 - DNA, 25 bp, Homo sapien
tatagtcagacccatagtttgatgc

SEQ ID NO: 5464135 - DNA, 25 bp, Homo sapien
gtcagacccatagtttgatgcagtg

SEQ ID NO: 5464136 - DNA, 25 bp, Homo sapien
cgctggaaccgagcatgctaatcat

SEQ ID NO: 5464137 - DNA, 25 bp, Homo sapien
cactatagagctttctgtggtgcaa

SEQ ID NO: 5464138 - DNA, 25 bp, Homo sapien
cagcagcaattgatccactatagag

SEQ ID NO: 5464139 - DNA, 25 bp, Homo sapien
tgcaatatgactggacgctggaacc

SEQ ID NO: 5464140 - DNA, 25 bp, Homo sapien
aagggtcttctggatattttggaga

SEQ ID NO: 5464141 - DNA, 25 bp, Homo sapien
gatttgttggacaaaatgtgcttca

SEQ ID NO: 5464142 - DNA, 25 bp, Homo sapien
gcttcaaaatcaaagggtcttctgg

SEQ ID NO: 5464143 - DNA, 25 bp, Homo sapien
tagcaagtcttggttgttccgtcat

SEQ ID NO: 5464144 - DNA, 25 bp, Homo sapien
ccagtataagaattctgaagtgact

SEQ ID NO: 5464145 - DNA, 25 bp, Homo sapien
tctgaagtgactgaaagaggagata

SEQ ID NO: 5464146 - DNA, 25 bp, Homo sapien
cagtataagaattctgaagtgactg

SEQ ID NO: 5464147 - DNA, 25 bp, Homo sapien
agtataagaattctgaagtgactga

SEQ ID NO: 5464148 - DNA, 25 bp, Homo sapien
tttggaatatgaagacatgtccatg

SEQ ID NO: 5464149 - DNA, 25 bp, Homo sapien
ccatgggtaacaggaaactgactgc

SEQ ID NO: 5464150 - DNA, 25 bp, Homo sapien
gatacttagctggtttgtggcctga

SEQ ID NO: 5464151 - DNA, 25 bp, Homo sapien
ctattctgcaatgatacttagctgg

SEQ ID NO: 5464152 - DNA, 25 bp, Homo sapien
tctagaattccgctctttgggtgac

SEQ ID NO: 5464153 - DNA, 25 bp, Homo sapien
gagaatctgtggcaaacaccttttc

SEQ ID NO: 5464154 - DNA, 25 bp, Homo sapien
gcttcttaattggagaacatgccaa

SEQ ID NO: 5464155 - DNA, 25 bp, Homo sapien
gctggtcctattgctggtgagagaa

SEQ ID NO: 5464156 - DNA, 25 bp, Homo sapien
tagcgtctaacaatcatgacattgc

SEQ ID NO: 5464157 - DNA, 25 bp, Homo sapien
tgatgaaatggaatagcgtctaaca

SEQ ID NO: 5464158 - DNA, 25 bp, Homo sapien
ggaatagcgtctaacaatcatgaca

SEQ ID NO: 5464159 - DNA, 25 bp, Homo sapien
tgaaatggaatagcgtctaacaatc

SEQ ID NO: 5464160 - DNA, 25 bp, Homo sapien
cctgaagggttgctggagattgtcc

SEQ ID NO: 5464161 - DNA, 25 bp, Homo sapien
tgctggtgctgcatcagtggaaacg

SEQ ID NO: 5464162 - DNA, 25 bp, Homo sapien
tacttgcagtgagtttcatccggag

SEQ ID NO: 5464163 - DNA, 25 bp, Homo sapien
cctggataagtctcatgagctggat

SEQ ID NO: 5464164 - DNA, 25 bp, Homo sapien
caagttggcatataaagttaactgt

SEQ ID NO: 5464165 - DNA, 25 bp, Homo sapien
tagtcaagttggcatataaagttaa

SEQ ID NO: 5464166 - DNA, 25 bp, Homo sapien
ccctatggtgtagtcaagttggcat

SEQ ID NO: 5464167 - DNA, 25 bp, Homo sapien
tttgggaaccctatggtgtagtcaa

SEQ ID NO: 5464168 - DNA, 25 bp, Homo sapien
tatacagaatgttcagttagcctca

SEQ ID NO: 5464169 - DNA, 25 bp, Homo sapien
cagaatgttcagttagcctcagcag

SEQ ID NO: 5464170 - DNA, 25 bp, Homo sapien
tctcccagaggtatacagaatgttc

SEQ ID NO: 5464171 - DNA, 25 bp, Homo sapien
tctctcccagaggtatacagaatgt

SEQ ID NO: 5464172 - DNA, 25 bp, Homo sapien
caaagtgtaatagattccatgcagc

SEQ ID NO: 5464173 - DNA, 25 bp, Homo sapien
aagccttttggctggaagttctgcc

SEQ ID NO: 5464174 - DNA, 25 bp, Homo sapien
cccaagttatcctggagtgtctgga

SEQ ID NO: 5464175 - DNA, 25 bp, Homo sapien
tccatgcagcttatggagtcctcag

SEQ ID NO: 5464176 - DNA, 25 bp, Homo sapien
cctagaagcagctcagttcgggtcc

SEQ ID NO: 5464177 - DNA, 25 bp, Homo sapien
gctgctgaaggtgagtatgaaatta

SEQ ID NO: 5464178 - DNA, 25 bp, Homo sapien
agctcagttcgggtccatggcagcc

SEQ ID NO: 5464179 - DNA, 25 bp, Homo sapien
gtgagtatgaaattagattctctag

SEQ ID NO: 5464180 - DNA, 25 bp, Homo sapien
gcatttgagctacacattcactgga

SEQ ID NO: 5464181 - DNA, 25 bp, Homo sapien
aattctgaagctagcgaggtaaaca

SEQ ID NO: 5464182 - DNA, 25 bp, Homo sapien
catggcaaatattcaacctggcttg

SEQ ID NO: 5464183 - DNA, 25 bp, Homo sapien
ttaaaatatgtgtactaggactggg

SEQ ID NO: 5464184 - DNA, 25 bp, Homo sapien
tctcttccccgagattagctgcaaa

SEQ ID NO: 5464185 - DNA, 25 bp, Homo sapien
tcttagaggtgggtctgatgctgca

SEQ ID NO: 5464186 - DNA, 25 bp, Homo sapien
ctcttccccgagattagctgcaaat

SEQ ID NO: 5464187 - DNA, 25 bp, Homo sapien
ctttctcttccccgagattagctgc

SEQ ID NO: 5464188 - DNA, 25 bp, Homo sapien
ctagatgagatggagaccgtgggta

SEQ ID NO: 5464189 - DNA, 25 bp, Homo sapien
tactcgagtgcaggtttggtccact

SEQ ID NO: 5464190 - DNA, 25 bp, Homo sapien
gtccactccgcgctttgacaggtcg

SEQ ID NO: 5464191 - DNA, 25 bp, Homo sapien
gtagggccggagttgctttgctaat

SEQ ID NO: 5464192 - DNA, 25 bp, Homo sapien
tcattccccacagggtaatttattc

SEQ ID NO: 5464193 - DNA, 25 bp, Homo sapien
cacaacagaatgcagaggttaatgt

SEQ ID NO: 5464194 - DNA, 25 bp, Homo sapien
cctcttctgctatctgacataaatt

SEQ ID NO: 5464195 - DNA, 25 bp, Homo sapien
ccaagaccacgtgctagctttaact

SEQ ID NO: 5464196 - DNA, 25 bp, Homo sapien
gacgtgtaagcataataacaacaga

SEQ ID NO: 5464197 - DNA, 25 bp, Homo sapien
tcagattgattcaaacaatgacgtg

SEQ ID NO: 5464198 - DNA, 25 bp, Homo sapien
cacacattatcccactgtgccatga

SEQ ID NO: 5464199 - DNA, 25 bp, Homo sapien
taatgttagtgtgcctaaaaaatac

SEQ ID NO: 5464200 - DNA, 25 bp, Homo sapien
aaattctccttatgatcaatatcac

SEQ ID NO: 5464201 - DNA, 25 bp, Homo sapien
agctgagagcatcctatactaccaa

SEQ ID NO: 5464202 - DNA, 25 bp, Homo sapien
tcctatactaccaataaattctcct

SEQ ID NO: 5464203 - DNA, 25 bp, Homo sapien
gatcaatatcacaaagctctgaata

SEQ ID NO: 5464204 - DNA, 25 bp, Homo sapien
ttgtaggagtgtgccaccacacagg

SEQ ID NO: 5464205 - DNA, 25 bp, Homo sapien
ctggcctgtttctatttttaagtgt

SEQ ID NO: 5464206 - DNA, 25 bp, Homo sapien
ccgtgcctggcctgtttctattttt

SEQ ID NO: 5464207 - DNA, 25 bp, Homo sapien
gattgtaggagtgtgccaccacaca

SEQ ID NO: 5464208 - DNA, 25 bp, Homo sapien
gatggagacctaggtgacaaatccc

SEQ ID NO: 5464209 - DNA, 25 bp, Homo sapien
gaaggtattcctatagatggagacc

SEQ ID NO: 5464210 - DNA, 25 bp, Homo sapien
tgtcagtttccatgaggcatagagt

SEQ ID NO: 5464211 - DNA, 25 bp, Homo sapien
gatctatttctataacaaggcctgt

SEQ ID NO: 5464212 - DNA, 25 bp, Homo sapien
ctgagggaaatactagacacagagg

SEQ ID NO: 5464213 - DNA, 25 bp, Homo sapien
gaggaacagaagctgtataaacacg

SEQ ID NO: 5464214 - DNA, 25 bp, Homo sapien
cacttttgcttacagtactgaggga

SEQ ID NO: 5464215 - DNA, 25 bp, Homo sapien
tgtataaacacggacctcgacagag

SEQ ID NO: 5464216 - DNA, 25 bp, Homo sapien
caatataactcggtcaaccatttct

SEQ ID NO: 5464217 - DNA, 25 bp, Homo sapien
cattttctccaatataactcggtca

SEQ ID NO: 5464218 - DNA, 25 bp, Homo sapien
attcattttctccaatataactcgg

SEQ ID NO: 5464219 - DNA, 25 bp, Homo sapien
tctccaatataactcggtcaaccat

SEQ ID NO: 5464220 - DNA, 25 bp, Homo sapien
cagctggtcctctttgatgaggcgc

SEQ ID NO: 5464221 - DNA, 25 bp, Homo sapien
tggtactccagctggtcctctttga

SEQ ID NO: 5464222 - DNA, 25 bp, Homo sapien
ctgtggagagttcgctgagcatgtc

SEQ ID NO: 5464223 - DNA, 25 bp, Homo sapien
gatgaggcgctcattcacgtcaagg

SEQ ID NO: 5464224 - DNA, 25 bp, Homo sapien
cttcaagaaaagctcgtgcataggc

SEQ ID NO: 5464225 - DNA, 25 bp, Homo sapien
caagaaaagctcgtgcataggccat

SEQ ID NO: 5464226 - DNA, 25 bp, Homo sapien
ttgtcagggtacttctttgcattgg

SEQ ID NO: 5464227 - DNA, 25 bp, Homo sapien
agctttacttggttgtcagggtact

SEQ ID NO: 5464228 - DNA, 25 bp, Homo sapien
gacatctcgtcaattgccacttcaa

SEQ ID NO: 5464229 - DNA, 25 bp, Homo sapien
cgctgacacttccttgcagtttgag

SEQ ID NO: 5464230 - DNA, 25 bp, Homo sapien
gcaaagctgattaagctcagaaacc

SEQ ID NO: 5464231 - DNA, 25 bp, Homo sapien
gattcagttctgtgctcgattggct

SEQ ID NO: 5464232 - DNA, 25 bp, Homo sapien
aggattagtgaagagtcaagggttt

SEQ ID NO: 5464233 - DNA, 25 bp, Homo sapien
gccatacaaagggatttcaaggttg

SEQ ID NO: 5464234 - DNA, 25 bp, Homo sapien
gattagtgaagagtcaagggtttcc

SEQ ID NO: 5464235 - DNA, 25 bp, Homo sapien
ggattagtgaagagtcaagggtttc

SEQ ID NO: 5464236 - DNA, 25 bp, Homo sapien
taatacctcttagcttgtgcccaag

SEQ ID NO: 5464237 - DNA, 25 bp, Homo sapien
catgcttttcatgcatgggagttac

SEQ ID NO: 5464238 - DNA, 25 bp, Homo sapien
tcatttcacggcacatggcaccttc

SEQ ID NO: 5464239 - DNA, 25 bp, Homo sapien
gtgcccaagctcctttgacctgtgt

SEQ ID NO: 5464240 - DNA, 25 bp, Homo sapien
atcgtccgccgcttgcactgctccg

SEQ ID NO: 5464241 - DNA, 25 bp, Homo sapien
aggatcgtccgccgcttgcactgct

SEQ ID NO: 5464242 - DNA, 25 bp, Homo sapien
ttgtcaggatcgtccgccgcttgca

SEQ ID NO: 5464243 - DNA, 25 bp, Homo sapien
gtccgccgcttgcactgctccgcca

SEQ ID NO: 5464244 - DNA, 25 bp, Homo sapien
tgcttcttgcccgacagcgtgaagg

SEQ ID NO: 5464245 - DNA, 25 bp, Homo sapien
tgcatttcgaaatctgtcttccggt

SEQ ID NO: 5464246 - DNA, 25 bp, Homo sapien
aaagaacggcgtcacataggtcacc

SEQ ID NO: 5464247 - DNA, 25 bp, Homo sapien
tctcgaagacaaagcggttgatgtt

SEQ ID NO: 5464248 - DNA, 25 bp, Homo sapien
cctgtcagcttaggctctttataaa

SEQ ID NO: 5464249 - DNA, 25 bp, Homo sapien
taatctttgggaaatctcggacaga

SEQ ID NO: 5464250 - DNA, 25 bp, Homo sapien
tcggacagacctgtcagcttaggct

SEQ ID NO: 5464251 - DNA, 25 bp, Homo sapien
gggaaatctcggacagacctgtcag

SEQ ID NO: 5464252 - DNA, 25 bp, Homo sapien
caatggtactacctacttgcatata

SEQ ID NO: 5464253 - DNA, 25 bp, Homo sapien
tatggagcaatttttggcagcattc

SEQ ID NO: 5464254 - DNA, 25 bp, Homo sapien
gggtagaacacgaaatatggagcaa

SEQ ID NO: 5464255 - DNA, 25 bp, Homo sapien
ggcagcattcaaagagcagtcagta

SEQ ID NO: 5464256 - DNA, 25 bp, Homo sapien
tatctggtttcttctaattgtagag

SEQ ID NO: 5464257 - DNA, 25 bp, Homo sapien
ttaattaaggtggagtttcgccatg

SEQ ID NO: 5464258 - DNA, 25 bp, Homo sapien
ggattacaggctatatctggtttct

SEQ ID NO: 5464259 - DNA, 25 bp, Homo sapien
ctgggattacaggctatatctggtt

SEQ ID NO: 5464260 - DNA, 25 bp, Homo sapien
gatagtagcgaccaaacagccgctt

SEQ ID NO: 5464261 - DNA, 25 bp, Homo sapien
gatgaatgtcgtagtagagatctga

SEQ ID NO: 5464262 - DNA, 25 bp, Homo sapien
cccataaaatgccacacgatagtag

SEQ ID NO: 5464263 - DNA, 25 bp, Homo sapien
tgccactttcagatatgaccgatga

SEQ ID NO: 5464264 - DNA, 25 bp, Homo sapien
tcatatcgctcagacttccagagaa

SEQ ID NO: 5464265 - DNA, 25 bp, Homo sapien
gacatcagcaatgagttcatatcgc

SEQ ID NO: 5464266 - DNA, 25 bp, Homo sapien
catgtatagctgctccaccaggata

SEQ ID NO: 5464267 - DNA, 25 bp, Homo sapien
ctcaaagacagcaatgatgggcttg

SEQ ID NO: 5464268 - DNA, 25 bp, Homo sapien
gtttggtgtaatgctcaaaaaagct

SEQ ID NO: 5464269 - DNA, 25 bp, Homo sapien
gtatggtgtatcttgcattccagaa

SEQ ID NO: 5464270 - DNA, 25 bp, Homo sapien
cttccttaatgtttggtgtaatgct

SEQ ID NO: 5464271 - DNA, 25 bp, Homo sapien
tccagaatcctctttcatcgctcct

SEQ ID NO: 5464272 - DNA, 25 bp, Homo sapien
ttcctccactgggagttgttagtaa

SEQ ID NO: 5464273 - DNA, 25 bp, Homo sapien
caggggtgggtatcctccgagagca

SEQ ID NO: 5464274 - DNA, 25 bp, Homo sapien
ctgggagttgttagtaatgagttgc

SEQ ID NO: 5464275 - DNA, 25 bp, Homo sapien
gttgttagtaatgagttgctatcac

SEQ ID NO: 5464276 - DNA, 25 bp, Homo sapien
gagagcagcaatatggatgtaacac

SEQ ID NO: 5464277 - DNA, 25 bp, Homo sapien
ttcttttcagatactctgcaatgag

SEQ ID NO: 5464278 - DNA, 25 bp, Homo sapien
agagcagcaatatggatgtaacaca

SEQ ID NO: 5464279 - DNA, 25 bp, Homo sapien
ttcaggagtgcttgcgtaggagttt

SEQ ID NO: 5464280 - DNA, 25 bp, Homo sapien
gctgtggccatcaaaacagtcctta

SEQ ID NO: 5464281 - DNA, 25 bp, Homo sapien
cagccaggtcctgcgtagttcagga

SEQ ID NO: 5464282 - DNA, 25 bp, Homo sapien
gataaatctccgtttctggcatgaa

SEQ ID NO: 5464283 - DNA, 25 bp, Homo sapien
aaaaattctgcagtaaaagcccaca

SEQ ID NO: 5464284 - DNA, 25 bp, Homo sapien
cgaaattattggtaattgcaagcga

SEQ ID NO: 5464285 - DNA, 25 bp, Homo sapien
gcatcggctattaactggctcacag

SEQ ID NO: 5464286 - DNA, 25 bp, Homo sapien
cgaatgttgaaaccgagagcctcca

SEQ ID NO: 5464287 - DNA, 25 bp, Homo sapien
gcttatctccattggcgaaattatt

SEQ ID NO: 5464288 - DNA, 25 bp, Homo sapien
gtcagcaggcccttgaaagaacgct

SEQ ID NO: 5464289 - DNA, 25 bp, Homo sapien
gagttgaccgtgacctgtggttaca

SEQ ID NO: 5464290 - DNA, 25 bp, Homo sapien
tgggaccggacaattgacttctgct

SEQ ID NO: 5464291 - DNA, 25 bp, Homo sapien
gctgaggcttctgtctgagttgacc

SEQ ID NO: 5464292 - DNA, 25 bp, Homo sapien
aaaaagagcatgtaggtatcaaaga

SEQ ID NO: 5464293 - DNA, 25 bp, Homo sapien
ggcaaacacatgcttcagcgctgtg

SEQ ID NO: 5464294 - DNA, 25 bp, Homo sapien
taggtatcaaagacccttttcatca

SEQ ID NO: 5464295 - DNA, 25 bp, Homo sapien
aggcaaacacatgcttcagcgctgt

SEQ ID NO: 5464296 - DNA, 25 bp, Homo sapien
gcctcagtgtctacatgatgcacga

SEQ ID NO: 5464297 - DNA, 25 bp, Homo sapien
caaacctccgtagctatattggcct

SEQ ID NO: 5464298 - DNA, 25 bp, Homo sapien
ccagaatagtgaggcaaacctccgt

SEQ ID NO: 5464299 - DNA, 25 bp, Homo sapien
gatgcacgatgtctatttcattgga

SEQ ID NO: 5464300 - DNA, 25 bp, Homo sapien
taggtaaagtttgtgatctgtgctg

SEQ ID NO: 5464301 - DNA, 25 bp, Homo sapien
tgatctgtgctgcttatggccttca

SEQ ID NO: 5464302 - DNA, 25 bp, Homo sapien
gtgcatttttgcctcgaattatagg

SEQ ID NO: 5464303 - DNA, 25 bp, Homo sapien
tgtctaacatctgtaagagtttggg

SEQ ID NO: 5464304 - DNA, 25 bp, Homo sapien
tgacaagagacctgatgtctggcag

SEQ ID NO: 5464305 - DNA, 25 bp, Homo sapien
ggatcctttgagagttccattgttc

SEQ ID NO: 5464306 - DNA, 25 bp, Homo sapien
tctggcaggaaggattggatccttt

SEQ ID NO: 5464307 - DNA, 25 bp, Homo sapien
cattgtgacaagagacctgatgtct

SEQ ID NO: 5464308 - DNA, 25 bp, Homo sapien
cttattatgttgcgttttcctaggt

SEQ ID NO: 5464309 - DNA, 25 bp, Homo sapien
ttattatgttgcgttttcctaggta

SEQ ID NO: 5464310 - DNA, 25 bp, Homo sapien
caagatgctgaagaagtcggacacc

SEQ ID NO: 5464311 - DNA, 25 bp, Homo sapien
ggagctctctgccagtaggcaatca

SEQ ID NO: 5464312 - DNA, 25 bp, Homo sapien
tctctgccagtaggcaatcagagtc

SEQ ID NO: 5464313 - DNA, 25 bp, Homo sapien
tccaagatgctgaagaagtcggaca

SEQ ID NO: 5464314 - DNA, 25 bp, Homo sapien
aacaccaggtagtatgagaatctga

SEQ ID NO: 5464315 - DNA, 25 bp, Homo sapien
acaccaggtagtatgagaatctgaa

SEQ ID NO: 5464316 - DNA, 25 bp, Homo sapien
gcttgatctaacttgtcaaatcgaa

SEQ ID NO: 5464317 - DNA, 25 bp, Homo sapien
aacacatcaggagactcctggtttc

SEQ ID NO: 5464318 - DNA, 25 bp, Homo sapien
cctggtttctgcttgatctaacttg

SEQ ID NO: 5464319 - DNA, 25 bp, Homo sapien
gatctaacttgtcaaatcgaagagt

SEQ ID NO: 5464320 - DNA, 25 bp, Homo sapien
gagtcaagacttgctaaagatgctc

SEQ ID NO: 5464321 - DNA, 25 bp, Homo sapien
tcactgctcttctcattggtacttg

SEQ ID NO: 5464322 - DNA, 25 bp, Homo sapien
cattggtacttggattggagtcaag

SEQ ID NO: 5464323 - DNA, 25 bp, Homo sapien
cttttcacagttgtccgtcttctca

SEQ ID NO: 5464324 - DNA, 25 bp, Homo sapien
aaaatgatgtatccacagagtttgc

SEQ ID NO: 5464325 - DNA, 25 bp, Homo sapien
tccattggtgcttagatcatctcta

SEQ ID NO: 5464326 - DNA, 25 bp, Homo sapien
gaaatcctccattggtgcttagatc

SEQ ID NO: 5464327 - DNA, 25 bp, Homo sapien
tttgcatgtttgatagctgtctggc

SEQ ID NO: 5464328 - DNA, 25 bp, Homo sapien
cagtaaaaggatacaggtccttcag

SEQ ID NO: 5464329 - DNA, 25 bp, Homo sapien
ttgtccaggagcatgccgtacaggg

SEQ ID NO: 5464330 - DNA, 25 bp, Homo sapien
gatacaggtccttcagataaatcct

SEQ ID NO: 5464331 - DNA, 25 bp, Homo sapien
tataaacttgctatctgggcctgct

SEQ ID NO: 5464332 - DNA, 25 bp, Homo sapien
gctaaagctaagtgtctgacatctt

SEQ ID NO: 5464333 - DNA, 25 bp, Homo sapien
ggcaaagccaacttctcggagcaga

SEQ ID NO: 5464334 - DNA, 25 bp, Homo sapien
ggctctctgtatcgatcatcaaatg

SEQ ID NO: 5464335 - DNA, 25 bp, Homo sapien
tagccattagattttttaggacagc

SEQ ID NO: 5464336 - DNA, 25 bp, Homo sapien
tggtggacaataagagaatacttga

SEQ ID NO: 5464337 - DNA, 25 bp, Homo sapien
caggtgaacctaagagtcattatgc

SEQ ID NO: 5464338 - DNA, 25 bp, Homo sapien
aaagaaatcaaactctggtggacaa

SEQ ID NO: 5464339 - DNA, 25 bp, Homo sapien
gaatacttgataggtacgatgtaca

SEQ ID NO: 5464340 - DNA, 25 bp, Homo sapien
catgtaactcttgagtcgattctga

SEQ ID NO: 5464341 - DNA, 25 bp, Homo sapien
ctgatgcatgtaactcttgagtcga

SEQ ID NO: 5464342 - DNA, 25 bp, Homo sapien
gtcgattctgaaggtgtcaaaggat

SEQ ID NO: 5464343 - DNA, 25 bp, Homo sapien
tcttgagtcgattctgaaggtgtca

SEQ ID NO: 5464344 - DNA, 25 bp, Homo sapien
gggtctgatacccatgtgacagctt

SEQ ID NO: 5464345 - DNA, 25 bp, Homo sapien
tgctgatcttatgggcagacacaaa

SEQ ID NO: 5464346 - DNA, 25 bp, Homo sapien
atgtttgctgatcttatgggcagac

SEQ ID NO: 5464347 - DNA, 25 bp, Homo sapien
atgttgacatacttcttgaagaaaa

SEQ ID NO: 5464348 - DNA, 25 bp, Homo sapien
cagacacaaagggataaagtgttca

SEQ ID NO: 5464349 - DNA, 25 bp, Homo sapien
aacatgctgatgtaattgttgacca

SEQ ID NO: 5464350 - DNA, 25 bp, Homo sapien
atcttaaacacataccctcggtcca

SEQ ID NO: 5464351 - DNA, 25 bp, Homo sapien
taaggtcaccggaggagaacatgct

SEQ ID NO: 5464352 - DNA, 25 bp, Homo sapien
ccctcggtccataaatgtaaagcag

SEQ ID NO: 5464353 - DNA, 25 bp, Homo sapien
gaaattaggctggattaaagctcac

SEQ ID NO: 5464354 - DNA, 25 bp, Homo sapien
taaagctcaccagtgacaagttggg

SEQ ID NO: 5464355 - DNA, 25 bp, Homo sapien
gagttagactaaagaaggaggcaca

SEQ ID NO: 5464356 - DNA, 25 bp, Homo sapien
taataaggagggtaactatgaggtc

SEQ ID NO: 5464357 - DNA, 25 bp, Homo sapien
aatctggcaacgctgtggtttgccc

SEQ ID NO: 5464358 - DNA, 25 bp, Homo sapien
tcttcaagtgcatccttgtatttcc

SEQ ID NO: 5464359 - DNA, 25 bp, Homo sapien
tgtatttccaaatcacatggtcgga

SEQ ID NO: 5464360 - DNA, 25 bp, Homo sapien
ggaccatgacaagattgtccaattc

SEQ ID NO: 5464361 - DNA, 25 bp, Homo sapien
gatgatattgcaaaggcctctccct

SEQ ID NO: 5464362 - DNA, 25 bp, Homo sapien
ttagctatcatgtaccaccaggagg

SEQ ID NO: 5464363 - DNA, 25 bp, Homo sapien
tagaaatcaggcaaacccttgagga

SEQ ID NO: 5464364 - DNA, 25 bp, Homo sapien
taaatcctagcttaacccagctggg

SEQ ID NO: 5464365 - DNA, 25 bp, Homo sapien
ggataattgcaaagaagaaccagga

SEQ ID NO: 5464366 - DNA, 25 bp, Homo sapien
ttaggataattgcaaagaagaacca

SEQ ID NO: 5464367 - DNA, 25 bp, Homo sapien
tgtcaatcaagtgctgtgccatcga

SEQ ID NO: 5464368 - DNA, 25 bp, Homo sapien
gctgtgccatcgattttaggataat

SEQ ID NO: 5464369 - DNA, 25 bp, Homo sapien
atgtacagtcctctccttgcatgcc

SEQ ID NO: 5464370 - DNA, 25 bp, Homo sapien
ctttaggacatgctttactgttgtt

SEQ ID NO: 5464371 - DNA, 25 bp, Homo sapien
tactgttgttgagtcatttgatttc

SEQ ID NO: 5464372 - DNA, 25 bp, Homo sapien
ttcctcatgtacagtcctctccttg

SEQ ID NO: 5464373 - DNA, 25 bp, Homo sapien
gagaaaacttcccacttactgcaga

SEQ ID NO: 5464374 - DNA, 25 bp, Homo sapien
tgagtgaacacttgacgtaggacac

SEQ ID NO: 5464375 - DNA, 25 bp, Homo sapien
cctgatattactgtggtgggcgcca

SEQ ID NO: 5464376 - DNA, 25 bp, Homo sapien
cagtgcacactgatggaatgggcaa

SEQ ID NO: 5464377 - DNA, 25 bp, Homo sapien
cttggccacaatgtcggtcagaacc

SEQ ID NO: 5464378 - DNA, 25 bp, Homo sapien
cacttggccacaatgtcggtcagaa

SEQ ID NO: 5464379 - DNA, 25 bp, Homo sapien
gcacttggccacaatgtcggtcaga

SEQ ID NO: 5464380 - DNA, 25 bp, Homo sapien
tggcacttggccacaatgtcggtca

SEQ ID NO: 5464381 - DNA, 25 bp, Homo sapien
ctgcaaaagcaaagctgttcagtgg

SEQ ID NO: 5464382 - DNA, 25 bp, Homo sapien
gcaaaagcaaagctgttcagtggcc

SEQ ID NO: 5464383 - DNA, 25 bp, Homo sapien
aaagcaaagctgttcagtggccttt

SEQ ID NO: 5464384 - DNA, 25 bp, Homo sapien
caaaagcaaagctgttcagtggcct

SEQ ID NO: 5464385 - DNA, 25 bp, Homo sapien
agagctgattcaaaattataggcag

SEQ ID NO: 5464386 - DNA, 25 bp, Homo sapien
gaagagctgattcaaaattataggc

SEQ ID NO: 5464387 - DNA, 25 bp, Homo sapien
tgaagagctgattcaaaattatagg

SEQ ID NO: 5464388 - DNA, 25 bp, Homo sapien
gagctgattcaaaattataggcaga

SEQ ID NO: 5464389 - DNA, 25 bp, Homo sapien
tgaatcttttccacattcaataagt

SEQ ID NO: 5464390 - DNA, 25 bp, Homo sapien
gattgcatgaatcttttccacattc

SEQ ID NO: 5464391 - DNA, 25 bp, Homo sapien
gaatcttttccacattcaataagtt

SEQ ID NO: 5464392 - DNA, 25 bp, Homo sapien
gcatgaatcttttccacattcaata

SEQ ID NO: 5464393 - DNA, 25 bp, Homo sapien
taggtgactgagacatatctttctc

SEQ ID NO: 5464394 - DNA, 25 bp, Homo sapien
ggtaggtgactgagacatatctttc

SEQ ID NO: 5464395 - DNA, 25 bp, Homo sapien
aggtgactgagacatatctttctct

SEQ ID NO: 5464396 - DNA, 25 bp, Homo sapien
cttacaagagcggatgaaatttgag

SEQ ID NO: 5464397 - DNA, 25 bp, Homo sapien
cattatttatggaaagctgactgca

SEQ ID NO: 5464398 - DNA, 25 bp, Homo sapien
ctcattatttatggaaagctgactg

SEQ ID NO: 5464399 - DNA, 25 bp, Homo sapien
tatttatggaaagctgactgcatac

SEQ ID NO: 5464400 - DNA, 25 bp, Homo sapien
ttatttatggaaagctgactgcata

SEQ ID NO: 5464401 - DNA, 25 bp, Homo sapien
ggtttgccaccatcaacccatttaa

SEQ ID NO: 5464402 - DNA, 25 bp, Homo sapien
ctgagtatttactgttgatacaaca

SEQ ID NO: 5464403 - DNA, 25 bp, Homo sapien
caacaaatgtcgacactttgaaaag

SEQ ID NO: 5464404 - DNA, 25 bp, Homo sapien
gacactttgaaaagtggtttgccac

SEQ ID NO: 5464405 - DNA, 25 bp, Homo sapien
ccacttgcagaatcttgaaagctta

SEQ ID NO: 5464406 - DNA, 25 bp, Homo sapien
cagacttgttgctattgggatgttg

SEQ ID NO: 5464407 - DNA, 25 bp, Homo sapien
cgtgtttcatcagaggaagccaagc

SEQ ID NO: 5464408 - DNA, 25 bp, Homo sapien
tcttgagaagctatctgatcgtgtt

SEQ ID NO: 5464409 - DNA, 25 bp, Homo sapien
tctcatggagttgtgttggtagctc

SEQ ID NO: 5464410 - DNA, 25 bp, Homo sapien
ccttctttttggcattagcttttgc

SEQ ID NO: 5464411 - DNA, 25 bp, Homo sapien
cattagcttttgcattgatgtcaca

SEQ ID NO: 5464412 - DNA, 25 bp, Homo sapien
cacaggtgacgtgataaaaagaaaa

SEQ ID NO: 5464413 - DNA, 25 bp, Homo sapien
ccggattctgagagtggtgcagaac

SEQ ID NO: 5464414 - DNA, 25 bp, Homo sapien
gtgtaggcggctgaggtgaagaggg

SEQ ID NO: 5464415 - DNA, 25 bp, Homo sapien
gaaatccggattctgagagtggtgc

SEQ ID NO: 5464416 - DNA, 25 bp, Homo sapien
tcatctgagaaatccggattctgag

SEQ ID NO: 5464417 - DNA, 25 bp, Homo sapien
catgtgatcagcaaccgggactgac

SEQ ID NO: 5464418 - DNA, 25 bp, Homo sapien
cccgttgcagctttgtagagtgaaa

SEQ ID NO: 5464419 - DNA, 25 bp, Homo sapien
tcaaatatgaactctaaaaaatgcc

SEQ ID NO: 5464420 - DNA, 25 bp, Homo sapien
cacagttcctacaaacctcatagtt

SEQ ID NO: 5464421 - DNA, 25 bp, Homo sapien
ccacattagctattgggccagtatg

SEQ ID NO: 5464422 - DNA, 25 bp, Homo sapien
tatgcggcagttctgcgtagaccat

SEQ ID NO: 5464423 - DNA, 25 bp, Homo sapien
tgcgtagaccatacgagggccggct

SEQ ID NO: 5464424 - DNA, 25 bp, Homo sapien
ttttccagttcctcaggcacttggc

SEQ ID NO: 5464425 - DNA, 25 bp, Homo sapien
ctgttttaaatcaagcacgccgaat

SEQ ID NO: 5464426 - DNA, 25 bp, Homo sapien
gcacgccgaatcgagaggcaggcta

SEQ ID NO: 5464427 - DNA, 25 bp, Homo sapien
tcccaagtcgtgaaaagctaaaaga

SEQ ID NO: 5464428 - DNA, 25 bp, Homo sapien
gagagaggaatttctaatagatcta

SEQ ID NO: 5464429 - DNA, 25 bp, Homo sapien
ctgccttcccactttatgctgggtc

SEQ ID NO: 5464430 - DNA, 25 bp, Homo sapien
tgctgggtccctttgctgacttggc

SEQ ID NO: 5464431 - DNA, 25 bp, Homo sapien
actttatgctgggtccctttgctga

SEQ ID NO: 5464432 - DNA, 25 bp, Homo sapien
tcccactttatgctgggtccctttg

SEQ ID NO: 5464433 - DNA, 25 bp, Homo sapien
tcatctgaatttttgaattcaatgc

SEQ ID NO: 5464434 - DNA, 25 bp, Homo sapien
gggcttggcactttcttcatctgaa

SEQ ID NO: 5464435 - DNA, 25 bp, Homo sapien
caatgcacacagttatattccgtgc

SEQ ID NO: 5464436 - DNA, 25 bp, Homo sapien
attcaatgcacacagttatattccg

SEQ ID NO: 5464437 - DNA, 25 bp, Homo sapien
ctgtaaggccgacaatactttgttg

SEQ ID NO: 5464438 - DNA, 25 bp, Homo sapien
ggctatcatacttgaggtgtttggg

SEQ ID NO: 5464439 - DNA, 25 bp, Homo sapien
aagcatttctggctatcatacttga

SEQ ID NO: 5464440 - DNA, 25 bp, Homo sapien
tgttgaatcgtaaacaaattcttcc

SEQ ID NO: 5464441 - DNA, 25 bp, Homo sapien
cagggataaaggacgatgttacaca

SEQ ID NO: 5464442 - DNA, 25 bp, Homo sapien
cttgacagggataaaggacgatgtt

SEQ ID NO: 5464443 - DNA, 25 bp, Homo sapien
gggataaaggacgatgttacacaat

SEQ ID NO: 5464444 - DNA, 25 bp, Homo sapien
tgacagggataaaggacgatgttac

SEQ ID NO: 5464445 - DNA, 25 bp, Homo sapien
aacagcaatatccaggcttccagga

SEQ ID NO: 5464446 - DNA, 25 bp, Homo sapien
ttggatgctccaagggaacgttgtc

SEQ ID NO: 5464447 - DNA, 25 bp, Homo sapien
gaacgttgtcaacagcaatatccag

SEQ ID NO: 5464448 - DNA, 25 bp, Homo sapien
ctccaagggaacgttgtcaacagca

SEQ ID NO: 5464449 - DNA, 25 bp, Homo sapien
gctacaatcgctaagtggatggtcc

SEQ ID NO: 5464450 - DNA, 25 bp, Homo sapien
ggaagctgctggtaacagtcgcaag

SEQ ID NO: 5464451 - DNA, 25 bp, Homo sapien
ctctaagtgtatggtggaaatgctc

SEQ ID NO: 5464452 - DNA, 25 bp, Homo sapien
gaaatgctctattagggtgcacatc

SEQ ID NO: 5464453 - DNA, 25 bp, Homo sapien
catgcttcagcatactggcaaaaag

SEQ ID NO: 5464454 - DNA, 25 bp, Homo sapien
ctatttgggcatatgtgaagtcacc

SEQ ID NO: 5464455 - DNA, 25 bp, Homo sapien
ggtgttcgagaatgagatcctcagg

SEQ ID NO: 5464456 - DNA, 25 bp, Homo sapien
actcagatgtgctcaaattgtggac

SEQ ID NO: 5464457 - DNA, 25 bp, Homo sapien
tcagttgaaatcttgctactttctt

SEQ ID NO: 5464458 - DNA, 25 bp, Homo sapien
ctcagttgaaatcttgctactttct

SEQ ID NO: 5464459 - DNA, 25 bp, Homo sapien
ggtgaaaatcttgagtctctgtcca

SEQ ID NO: 5464460 - DNA, 25 bp, Homo sapien
tccctggttgtccttaaatactgat

SEQ ID NO: 5464461 - DNA, 25 bp, Homo sapien
ttccctggttgtccttaaatactga

SEQ ID NO: 5464462 - DNA, 25 bp, Homo sapien
aaatcttgagtctctgtccacattt

SEQ ID NO: 5464463 - DNA, 25 bp, Homo sapien
tactaggatttacgagtggtggaac

SEQ ID NO: 5464464 - DNA, 25 bp, Homo sapien
gacaccttaaacctgggcaggacag

SEQ ID NO: 5464465 - DNA, 25 bp, Homo sapien
cagagtcacttcaatttgggtggca

SEQ ID NO: 5464466 - DNA, 25 bp, Homo sapien
aaaccttggagtatcagggaagtgg

SEQ ID NO: 5464467 - DNA, 25 bp, Homo sapien
gaaattgctcacttacattggacac

SEQ ID NO: 5464468 - DNA, 25 bp, Homo sapien
aaatatataactggtggctgggcgc

SEQ ID NO: 5464469 - DNA, 25 bp, Homo sapien
tgaagagtacagcaccatgggagaa

SEQ ID NO: 5464470 - DNA, 25 bp, Homo sapien
tgggagaagttttgctcacagtgcc

SEQ ID NO: 5464471 - DNA, 25 bp, Homo sapien
tacaaccagaccactaattgggcat

SEQ ID NO: 5464472 - DNA, 25 bp, Homo sapien
gtttcattagctttcctatccaagg

SEQ ID NO: 5464473 - DNA, 25 bp, Homo sapien
ccaagtggtctgacatggtatcttt

SEQ ID NO: 5464474 - DNA, 25 bp, Homo sapien
tacacaggttggtggtgtttcctaa

SEQ ID NO: 5464475 - DNA, 25 bp, Homo sapien
tagggcaaacgaattcctggagact

SEQ ID NO: 5464476 - DNA, 25 bp, Homo sapien
tgaccttaagtgaacctccaggaga

SEQ ID NO: 5464477 - DNA, 25 bp, Homo sapien
aacgtttattagactcccaggcctg

SEQ ID NO: 5464478 - DNA, 25 bp, Homo sapien
tacgccaaatgcttgtgcacttgag

SEQ ID NO: 5464479 - DNA, 25 bp, Homo sapien
actggtactgataaatttggctggg

SEQ ID NO: 5464480 - DNA, 25 bp, Homo sapien
ccaagtgaatgatgtgtccatctat

SEQ ID NO: 5464481 - DNA, 25 bp, Homo sapien
tgtgtccatctatgtccacagaact

SEQ ID NO: 5464482 - DNA, 25 bp, Homo sapien
tttcagaggcaactggtactgataa

SEQ ID NO: 5464483 - DNA, 25 bp, Homo sapien
tggacgtccatatatagacctgagc

SEQ ID NO: 5464484 - DNA, 25 bp, Homo sapien
ttttaggcacaccagactctcagga

SEQ ID NO: 5464485 - DNA, 25 bp, Homo sapien
catgcagggtacatgtgtcacggcc

SEQ ID NO: 5464486 - DNA, 25 bp, Homo sapien
gacctgagctctacgcataaatgaa

SEQ ID NO: 5464487 - DNA, 25 bp, Homo sapien
caagcaaaaggcatacggtattttc

SEQ ID NO: 5464488 - DNA, 25 bp, Homo sapien
ttactgcccaagcaaaaggcatacg

SEQ ID NO: 5464489 - DNA, 25 bp, Homo sapien
gcccaagcaaaaggcatacggtatt

SEQ ID NO: 5464490 - DNA, 25 bp, Homo sapien
tcccaatttgctgcagaattgtctg

SEQ ID NO: 5464491 - DNA, 25 bp, Homo sapien
tataaggttcggcaccacttgcaat

SEQ ID NO: 5464492 - DNA, 25 bp, Homo sapien
cacttgcaatgtttcccatcaagac

SEQ ID NO: 5464493 - DNA, 25 bp, Homo sapien
tggagtctgggttcttaatataagg

SEQ ID NO: 5464494 - DNA, 25 bp, Homo sapien
tcagaatgtggattgcttacagaaa

SEQ ID NO: 5464495 - DNA, 25 bp, Homo sapien
acagcagcatggtttagatccacat

SEQ ID NO: 5464496 - DNA, 25 bp, Homo sapien
tctgaggtcataaagtgccacactc

SEQ ID NO: 5464497 - DNA, 25 bp, Homo sapien
cattcctctggaagtcccttgatgt

SEQ ID NO: 5464498 - DNA, 25 bp, Homo sapien
ccccaagagcatctgtctgacagca

SEQ ID NO: 5464499 - DNA, 25 bp, Homo sapien
cagcaataatggctgggaagtcaca

SEQ ID NO: 5464500 - DNA, 25 bp, Homo sapien
gcctgctaaagtactaagacgaagt

SEQ ID NO: 5464501 - DNA, 25 bp, Homo sapien
taaaaatgtccctgtaaaagccatc

SEQ ID NO: 5464502 - DNA, 25 bp, Homo sapien
cattaacaatctagtgggactgcct

SEQ ID NO: 5464503 - DNA, 25 bp, Homo sapien
cagactcaggttccaagagatcttt

SEQ ID NO: 5464504 - DNA, 25 bp, Homo sapien
cacagactcaggttccaagagatct

SEQ ID NO: 5464505 - DNA, 25 bp, Homo sapien
tccgtaacacatccctgaagatttg

SEQ ID NO: 5464506 - DNA, 25 bp, Homo sapien
attcgttatcggatcattttcattc

SEQ ID NO: 5464507 - DNA, 25 bp, Homo sapien
catgtttcgagttgtttttacagta

SEQ ID NO: 5464508 - DNA, 25 bp, Homo sapien
tctccatgtttcgagttgtttttac

SEQ ID NO: 5464509 - DNA, 25 bp, Homo sapien
cagatttagcctctccatgtttcga

SEQ ID NO: 5464510 - DNA, 25 bp, Homo sapien
gagagaacagatttagcctctccat

SEQ ID NO: 5464511 - DNA, 25 bp, Homo sapien
cacaagttacagaattatccagcga

SEQ ID NO: 5464512 - DNA, 25 bp, Homo sapien
agtctgcgtgtaggttgttctctga

SEQ ID NO: 5464513 - DNA, 25 bp, Homo sapien
ctttgcaaagtctgcgtgtaggttg

SEQ ID NO: 5464514 - DNA, 25 bp, Homo sapien
tctgtttcctctggcgtgcattcac

SEQ ID NO: 5464515 - DNA, 25 bp, Homo sapien
acccagatcagtgagctctgtgctc

SEQ ID NO: 5464516 - DNA, 25 bp, Homo sapien
ttgagggtgtggatccattcatcca

SEQ ID NO: 5464517 - DNA, 25 bp, Homo sapien
ttgcagaatgcggttgagggtgtgg

SEQ ID NO: 5464518 - DNA, 25 bp, Homo sapien
ggtgtggatccattcatccatatct

SEQ ID NO: 5464519 - DNA, 25 bp, Homo sapien
agcacaaaataggtcagatcattca

SEQ ID NO: 5464520 - DNA, 25 bp, Homo sapien
gcacaaaataggtcagatcattcat

SEQ ID NO: 5464521 - DNA, 25 bp, Homo sapien
aaggcatattttcttagtctgttat

SEQ ID NO: 5464522 - DNA, 25 bp, Homo sapien
aggcatattttcttagtctgttatt

SEQ ID NO: 5464523 - DNA, 25 bp, Homo sapien
aattcaaaggcatattttcttagtc

SEQ ID NO: 5464524 - DNA, 25 bp, Homo sapien
tttcaattcaaaggcatattttctt

SEQ ID NO: 5464525 - DNA, 25 bp, Homo sapien
agaagggctacaaaatcacctgcga

SEQ ID NO: 5464526 - DNA, 25 bp, Homo sapien
gggtagatgtcctccacgtgtcctc

SEQ ID NO: 5464527 - DNA, 25 bp, Homo sapien
cacctgcgaccttcactgatggaca

SEQ ID NO: 5464528 - DNA, 25 bp, Homo sapien
tacaaaatcacctgcgaccttcact

SEQ ID NO: 5464529 - DNA, 25 bp, Homo sapien
gaagacatgagccacacctattttc

SEQ ID NO: 5464530 - DNA, 25 bp, Homo sapien
tcatgttccatcaagtgctgtcaaa

SEQ ID NO: 5464531 - DNA, 25 bp, Homo sapien
tgtgacctgtgaaagacactctacc

SEQ ID NO: 5464532 - DNA, 25 bp, Homo sapien
gttttttctgcccacatagcttatg

SEQ ID NO: 5464533 - DNA, 25 bp, Homo sapien
gccactgtcttggaacccatatcca

SEQ ID NO: 5464534 - DNA, 25 bp, Homo sapien
gcttgacctacaggaggtatctgca

SEQ ID NO: 5464535 - DNA, 25 bp, Homo sapien
tagcctttggttagtcacatgaagc

SEQ ID NO: 5464536 - DNA, 25 bp, Homo sapien
cctctcttcatgcatgcagggggct

SEQ ID NO: 5464537 - DNA, 25 bp, Homo sapien
ctcaaggaaatgagccttgtccacc

SEQ ID NO: 5464538 - DNA, 25 bp, Homo sapien
tcaaggaaatgagccttgtccacca

SEQ ID NO: 5464539 - DNA, 25 bp, Homo sapien
actcaaggaaatgagccttgtccac

SEQ ID NO: 5464540 - DNA, 25 bp, Homo sapien
agccacccttgtaatatacgtctaa

SEQ ID NO: 5464541 - DNA, 25 bp, Homo sapien
tgtaatatacgtctaagaattccaa

SEQ ID NO: 5464542 - DNA, 25 bp, Homo sapien
cacccttgtaatatacgtctaagaa

SEQ ID NO: 5464543 - DNA, 25 bp, Homo sapien
cccttgtaatatacgtctaagaatt

SEQ ID NO: 5464544 - DNA, 25 bp, Homo sapien
taacaagctaggtgaatgctgaggt

SEQ ID NO: 5464545 - DNA, 25 bp, Homo sapien
gatgtaatttcagctcgtaacaagc

SEQ ID NO: 5464546 - DNA, 25 bp, Homo sapien
tacttgcatccacatatccaagggc

SEQ ID NO: 5464547 - DNA, 25 bp, Homo sapien
gcctccaggagtggtctgtgatgta

SEQ ID NO: 5464548 - DNA, 25 bp, Homo sapien
cagctggaagtagcgctttttgaat

SEQ ID NO: 5464549 - DNA, 25 bp, Homo sapien
cataatgtaggagttatctggtaac

SEQ ID NO: 5464550 - DNA, 25 bp, Homo sapien
aagttcataatgtaggagttatctg

SEQ ID NO: 5464551 - DNA, 25 bp, Homo sapien
gcaccactcctgtacaggaatccaa

SEQ ID NO: 5464552 - DNA, 25 bp, Homo sapien
tggaagacgagtgggaagtggtatc

SEQ ID NO: 5464553 - DNA, 25 bp, Homo sapien
ccttgtagagccagccggacttgaa

SEQ ID NO: 5464554 - DNA, 25 bp, Homo sapien
tgttcacggtgctgttaaaattccc

SEQ ID NO: 5464555 - DNA, 25 bp, Homo sapien
cagccggacttgaaaacaccagttc

SEQ ID NO: 5464556 - DNA, 25 bp, Homo sapien
tcatggtcaatctcaaaggaatgtg

SEQ ID NO: 5464557 - DNA, 25 bp, Homo sapien
aagcttctctggtttgtattctgct

SEQ ID NO: 5464558 - DNA, 25 bp, Homo sapien
ttcatccttatcagcatcttcatgg

SEQ ID NO: 5464559 - DNA, 25 bp, Homo sapien
tgtgaaggaagcttctctggtttgt

SEQ ID NO: 5464560 - DNA, 25 bp, Homo sapien
tcttctgggatctccaagttagtgc

SEQ ID NO: 5464561 - DNA, 25 bp, Homo sapien
tattcctagtgtgtaaaggcttaca

SEQ ID NO: 5464562 - DNA, 25 bp, Homo sapien
ttcagtatcttcctatggaccctcg

SEQ ID NO: 5464563 - DNA, 25 bp, Homo sapien
tctttctatcaaatcgaccatggta

SEQ ID NO: 5464564 - DNA, 25 bp, Homo sapien
gctgtcgaatgtctccagaatattg

SEQ ID NO: 5464565 - DNA, 25 bp, Homo sapien
atttgtagtttaccacatgccactg

SEQ ID NO: 5464566 - DNA, 25 bp, Homo sapien
gggtagctgtcgaatgtctccagaa

SEQ ID NO: 5464567 - DNA, 25 bp, Homo sapien
cggggtagctgtcgaatgtctccag

SEQ ID NO: 5464568 - DNA, 25 bp, Homo sapien
acatgagtgataatgtggtccagtc

SEQ ID NO: 5464569 - DNA, 25 bp, Homo sapien
tctgaccatgaacggagagccttgg

SEQ ID NO: 5464570 - DNA, 25 bp, Homo sapien
gagtgataatgtggtccagtccttg

SEQ ID NO: 5464571 - DNA, 25 bp, Homo sapien
tccagtccttgtctgaccatgaacg

SEQ ID NO: 5464572 - DNA, 25 bp, Homo sapien
tattcatgttccattatcatcacgg

SEQ ID NO: 5464573 - DNA, 25 bp, Homo sapien
tgttgagtacaacgtgcggatatcc

SEQ ID NO: 5464574 - DNA, 25 bp, Homo sapien
ctctgcatcttcaggtactgttgag

SEQ ID NO: 5464575 - DNA, 25 bp, Homo sapien
tacaacgtgcggatatcccaggaaa

SEQ ID NO: 5464576 - DNA, 25 bp, Homo sapien
tcttcaggtactgttgagtacaacg

SEQ ID NO: 5464577 - DNA, 25 bp, Homo sapien
gaaattgagtcctccggcttagaag

SEQ ID NO: 5464578 - DNA, 25 bp, Homo sapien
cctccggcttagaagtgtcgagcag

SEQ ID NO: 5464579 - DNA, 25 bp, Homo sapien
gagtcctccggcttagaagtgtcga

SEQ ID NO: 5464580 - DNA, 25 bp, Homo sapien
atgaaaagaaattgagtcctccggc

SEQ ID NO: 5464581 - DNA, 25 bp, Homo sapien
ctctgccaccaagggcggcgtcctt

SEQ ID NO: 5464582 - DNA, 25 bp, Homo sapien
tttcttcactcctgatgtaagtgca

SEQ ID NO: 5464583 - DNA, 25 bp, Homo sapien
ctcctttcttcactcctgatgtaag

SEQ ID NO: 5464584 - DNA, 25 bp, Homo sapien
cctttcttcactcctgatgtaagtg

SEQ ID NO: 5464585 - DNA, 25 bp, Homo sapien
aagacttccttccaagcacatcagg

SEQ ID NO: 5464586 - DNA, 25 bp, Homo sapien
cttgtagcctgcagtggatggtctt

SEQ ID NO: 5464587 - DNA, 25 bp, Homo sapien
tcttggaggtttcgttacagccacc

SEQ ID NO: 5464588 - DNA, 25 bp, Homo sapien
caggactatctctcaattggccaaa

SEQ ID NO: 5464589 - DNA, 25 bp, Homo sapien
cattctacatatgggaagatgtgag

SEQ ID NO: 5464590 - DNA, 25 bp, Homo sapien
taatagaaacgaggtgctccaacaa

SEQ ID NO: 5464591 - DNA, 25 bp, Homo sapien
gtctcatctcctctaaagaggtgag

SEQ ID NO: 5464592 - DNA, 25 bp, Homo sapien
ctaaagaggtgaggaccaaacattc

SEQ ID NO: 5464593 - DNA, 25 bp, Homo sapien
cagtgaagagggttgcctgctgcga

SEQ ID NO: 5464594 - DNA, 25 bp, Homo sapien
gtttaccatccaagaaagcccagtg

SEQ ID NO: 5464595 - DNA, 25 bp, Homo sapien
tggcaaagactctgaggtctgtggt

SEQ ID NO: 5464596 - DNA, 25 bp, Homo sapien
cccctggcaaagactctgaggtctg

SEQ ID NO: 5464597 - DNA, 25 bp, Homo sapien
cctggctgcccgcatttctccttca

SEQ ID NO: 5464598 - DNA, 25 bp, Homo sapien
tggctgcccgcatttctccttcagg

SEQ ID NO: 5464599 - DNA, 25 bp, Homo sapien
cacctggctgcccgcatttctcctt

SEQ ID NO: 5464600 - DNA, 25 bp, Homo sapien
tcccacctggctgcccgcatttctc

SEQ ID NO: 5464601 - DNA, 25 bp, Homo sapien
tgaccacttcacattgactccgtgg

SEQ ID NO: 5464602 - DNA, 25 bp, Homo sapien
gaccacttcacattgactccgtgga

SEQ ID NO: 5464603 - DNA, 25 bp, Homo sapien
attgactccgtggagattgactcca

SEQ ID NO: 5464604 - DNA, 25 bp, Homo sapien
actccgtggagattgactccacaca

SEQ ID NO: 5464605 - DNA, 25 bp, Homo sapien
tggacacttcctgttggtgcgccac

SEQ ID NO: 5464606 - DNA, 25 bp, Homo sapien
tgttggtgcgccacgtccctaaaat

SEQ ID NO: 5464607 - DNA, 25 bp, Homo sapien
tgacatgcttgctgactgcatggac

SEQ ID NO: 5464608 - DNA, 25 bp, Homo sapien
gccacgtccctaaaatgtgacatag

SEQ ID NO: 5464609 - DNA, 25 bp, Homo sapien
gctcgagaagcctaggcttttcttg

SEQ ID NO: 5464610 - DNA, 25 bp, Homo sapien
tgaagaggatcattccggtaggtct

SEQ ID NO: 5464611 - DNA, 25 bp, Homo sapien
tcttcaatgacagtctcataatcca

SEQ ID NO: 5464612 - DNA, 25 bp, Homo sapien
taatccaaaggctcgagaagcctag

SEQ ID NO: 5464613 - DNA, 25 bp, Homo sapien
tacagcaatagtccatgatgtggct

SEQ ID NO: 5464614 - DNA, 25 bp, Homo sapien
gtagtctttatcttaccctgcagca

SEQ ID NO: 5464615 - DNA, 25 bp, Homo sapien
tccaattcagctgtaggcctcagta

SEQ ID NO: 5464616 - DNA, 25 bp, Homo sapien
tttcaggaagctcttacgtctgcct

SEQ ID NO: 5464617 - DNA, 25 bp, Homo sapien
cctctgatctgtgttcacctggatt

SEQ ID NO: 5464618 - DNA, 25 bp, Homo sapien
acccaggtcctctgatctgtgttca

SEQ ID NO: 5464619 - DNA, 25 bp, Homo sapien
agtgttgcagctcacacccaggtcc

SEQ ID NO: 5464620 - DNA, 25 bp, Homo sapien
cctgacacatgagctaactgttcag

SEQ ID NO: 5464621 - DNA, 25 bp, Homo sapien
gattgaattcacatcccccggttac

SEQ ID NO: 5464622 - DNA, 25 bp, Homo sapien
catcccccggttactcctgcttctt

SEQ ID NO: 5464623 - DNA, 25 bp, Homo sapien
cttggattgaattcacatcccccgg

SEQ ID NO: 5464624 - DNA, 25 bp, Homo sapien
tggattgaattcacatcccccggtt

SEQ ID NO: 5464625 - DNA, 25 bp, Homo sapien
ggtttactctcctcacagttcgtct

SEQ ID NO: 5464626 - DNA, 25 bp, Homo sapien
tcttggtttactctcctcacagttc

SEQ ID NO: 5464627 - DNA, 25 bp, Homo sapien
tctcctcacagttcgtctcttcttc

SEQ ID NO: 5464628 - DNA, 25 bp, Homo sapien
cttccaaaattcactgggctcccgt

SEQ ID NO: 5464629 - DNA, 25 bp, Homo sapien
tatcaatgtcgttaaactcttctct

SEQ ID NO: 5464630 - DNA, 25 bp, Homo sapien
caaaatatcaatgtcgttaaactct

SEQ ID NO: 5464631 - DNA, 25 bp, Homo sapien
tgtcgttaaactcttctcttctgaa

SEQ ID NO: 5464632 - DNA, 25 bp, Homo sapien
cgtattgctataatttgagtcacaa

SEQ ID NO: 5464633 - DNA, 25 bp, Homo sapien
tttgtgcatatatcctccctcttca

SEQ ID NO: 5464634 - DNA, 25 bp, Homo sapien
gagtaactaactaccagctgttcag

SEQ ID NO: 5464635 - DNA, 25 bp, Homo sapien
ttttgtgcatatatcctccctcttc

SEQ ID NO: 5464636 - DNA, 25 bp, Homo sapien
cctgtgagtaactaactaccagctg

SEQ ID NO: 5464637 - DNA, 25 bp, Homo sapien
gaagccagggcataacaataatgac

SEQ ID NO: 5464638 - DNA, 25 bp, Homo sapien
ccaactgtcttcgagaagtcatgtg

SEQ ID NO: 5464639 - DNA, 25 bp, Homo sapien
ggcatgcagctaattctcacctaga

SEQ ID NO: 5464640 - DNA, 25 bp, Homo sapien
tatatgcctggattgatactgctct

SEQ ID NO: 5464641 - DNA, 25 bp, Homo sapien
gggactgtaaattcccagagcaata

SEQ ID NO: 5464642 - DNA, 25 bp, Homo sapien
tctgtgcacaactacaaaaggttcc

SEQ ID NO: 5464643 - DNA, 25 bp, Homo sapien
tacttttctgcctaagcgggactgt

SEQ ID NO: 5464644 - DNA, 25 bp, Homo sapien
cagtatcctctttatgtttcaacgg

SEQ ID NO: 5464645 - DNA, 25 bp, Homo sapien
tcagaagtttagagccagagtaaga

SEQ ID NO: 5464646 - DNA, 25 bp, Homo sapien
taagaagacgattagccaatataag

SEQ ID NO: 5464647 - DNA, 25 bp, Homo sapien
ccagagtaagaagacgattagccaa

SEQ ID NO: 5464648 - DNA, 25 bp, Homo sapien
gacgattagccaatataagaacatc

SEQ ID NO: 5464649 - DNA, 25 bp, Homo sapien
cattatgatgagggttctgggtcta

SEQ ID NO: 5464650 - DNA, 25 bp, Homo sapien
gatgagggttctgggtctattcatt

SEQ ID NO: 5464651 - DNA, 25 bp, Homo sapien
tgagggttctgggtctattcatttc

SEQ ID NO: 5464652 - DNA, 25 bp, Homo sapien
tatgatgagggttctgggtctattc

SEQ ID NO: 5464653 - DNA, 25 bp, Homo sapien
tctggaccacagaacgaaaagcttg

SEQ ID NO: 5464654 - DNA, 25 bp, Homo sapien
gcaaaatttcgtgggatggttcctc

SEQ ID NO: 5464655 - DNA, 25 bp, Homo sapien
cttggcgtcgtctacaaatgtgtgg

SEQ ID NO: 5464656 - DNA, 25 bp, Homo sapien
agtgcagcccatcgctgcatcctgg

SEQ ID NO: 5464657 - DNA, 25 bp, Homo sapien
cactctgtgagtgtggacttggttg

SEQ ID NO: 5464658 - DNA, 25 bp, Homo sapien
gctgatcctggagagttggctgaca

SEQ ID NO: 5464659 - DNA, 25 bp, Homo sapien
gagtgtggacttggttgcccacgct

SEQ ID NO: 5464660 - DNA, 25 bp, Homo sapien
ggctgacagctcaaacatgtcgctg

SEQ ID NO: 5464661 - DNA, 25 bp, Homo sapien
aatttctactggaaggatgtccccg

SEQ ID NO: 5464662 - DNA, 25 bp, Homo sapien
atgtccccggtgaaggcaggtgggc

SEQ ID NO: 5464663 - DNA, 25 bp, Homo sapien
ggcaggtgggctgaaagcttcttca

SEQ ID NO: 5464664 - DNA, 25 bp, Homo sapien
aggtgggctgaaagcttcttcaagg

SEQ ID NO: 5464665 - DNA, 25 bp, Homo sapien
gcttaatagtgaagaggtcccatag

SEQ ID NO: 5464666 - DNA, 25 bp, Homo sapien
tcagcaatatgaccagggcttaata

SEQ ID NO: 5464667 - DNA, 25 bp, Homo sapien
cactgagcagctttcgaacttgact

SEQ ID NO: 5464668 - DNA, 25 bp, Homo sapien
tagtgaagaagcactgagcagcttt

SEQ ID NO: 5464669 - DNA, 25 bp, Homo sapien
ctctggaaacaatctctgtactctc

SEQ ID NO: 5464670 - DNA, 25 bp, Homo sapien
gtgtcagatgcaagggaaggtttcc

SEQ ID NO: 5464671 - DNA, 25 bp, Homo sapien
ctccttggtgtcagatgcaagggaa

SEQ ID NO: 5464672 - DNA, 25 bp, Homo sapien
ggaaacaatctctgtactctcatct

SEQ ID NO: 5464673 - DNA, 25 bp, Homo sapien
tctcgtcacccacagaatgttgttg

SEQ ID NO: 5464674 - DNA, 25 bp, Homo sapien
cagtgtggtctgtcttgcatgatcg

SEQ ID NO: 5464675 - DNA, 25 bp, Homo sapien
gcaagaaccgagaaatgaccagggt

SEQ ID NO: 5464676 - DNA, 25 bp, Homo sapien
cactgcagaactggtatgaaccaca

SEQ ID NO: 5464677 - DNA, 25 bp, Homo sapien
gagatcctaagttcactgatggtgg

SEQ ID NO: 5464678 - DNA, 25 bp, Homo sapien
aattctccttagaaccgtggctgat

SEQ ID NO: 5464679 - DNA, 25 bp, Homo sapien
caactcgaatcagaagaaagaccca

SEQ ID NO: 5464680 - DNA, 25 bp, Homo sapien
cgtgcctggctggaaggttacattt

SEQ ID NO: 5464681 - DNA, 25 bp, Homo sapien
aaagtgactttccacgcatagcaga

SEQ ID NO: 5464682 - DNA, 25 bp, Homo sapien
ctgtgccctgccgagaattcacaaa

SEQ ID NO: 5464683 - DNA, 25 bp, Homo sapien
aagtaaaagctgtaccaaacatggg

SEQ ID NO: 5464684 - DNA, 25 bp, Homo sapien
tcacccaaaggagtagagttaaagc

SEQ ID NO: 5464685 - DNA, 25 bp, Homo sapien
gcacagcaaggacatactgatccca

SEQ ID NO: 5464686 - DNA, 25 bp, Homo sapien
gatgagtcaaatacttcgaagggaa

SEQ ID NO: 5464687 - DNA, 25 bp, Homo sapien
cagctaagaagctaaacggcacagc

SEQ ID NO: 5464688 - DNA, 25 bp, Homo sapien
gcctctatcaaatgggtcagctaag

SEQ ID NO: 5464689 - DNA, 25 bp, Homo sapien
ctctgcaaggctattggcagtgtca

SEQ ID NO: 5464690 - DNA, 25 bp, Homo sapien
gctattggcagtgtcatagaattga

SEQ ID NO: 5464691 - DNA, 25 bp, Homo sapien
ccaccagctctgcaaggctattggc

SEQ ID NO: 5464692 - DNA, 25 bp, Homo sapien
tcatagaattgacacagaaaatcca

SEQ ID NO: 5464693 - DNA, 25 bp, Homo sapien
cagtataagaatacccactgctttg

SEQ ID NO: 5464694 - DNA, 25 bp, Homo sapien
cactgctttgtattggatgagatta

SEQ ID NO: 5464695 - DNA, 25 bp, Homo sapien
tgtgttgagagaaagcttagttgct

SEQ ID NO: 5464696 - DNA, 25 bp, Homo sapien
tctgttttctagagttactgggtac

SEQ ID NO: 5464697 - DNA, 25 bp, Homo sapien
gcctaaatgggatagcatgtgctaa

SEQ ID NO: 5464698 - DNA, 25 bp, Homo sapien
cacagagtttttgctaggcctaaat

SEQ ID NO: 5464699 - DNA, 25 bp, Homo sapien
cccagtctgcttctagacgcgctat

SEQ ID NO: 5464700 - DNA, 25 bp, Homo sapien
cagtggagctccattgcaatcaata

SEQ ID NO: 5464701 - DNA, 25 bp, Homo sapien
ccgctatcctgtgtgggatcttgaa

SEQ ID NO: 5464702 - DNA, 25 bp, Homo sapien
caccctgaccacatgatgtgttcgt

SEQ ID NO: 5464703 - DNA, 25 bp, Homo sapien
gttgggtcgcagtggagaccaatca

SEQ ID NO: 5464704 - DNA, 25 bp, Homo sapien
cagtggagaccaatcatctagcatt

SEQ ID NO: 5464705 - DNA, 25 bp, Homo sapien
taatgcagttgggacaaaagctaga

SEQ ID NO: 5464706 - DNA, 25 bp, Homo sapien
gcagcaggttcctgtaacgatcaca

SEQ ID NO: 5464707 - DNA, 25 bp, Homo sapien
aagctagaagagtcgcaggtttttg

SEQ ID NO: 5464708 - DNA, 25 bp, Homo sapien
gacataacaatttgagtgttggcat

SEQ ID NO: 5464709 - DNA, 25 bp, Homo sapien
ctgagccccggtcttgctgtgaggc

SEQ ID NO: 5464710 - DNA, 25 bp, Homo sapien
ggattccggtccaccaaacgcaggc

SEQ ID NO: 5464711 - DNA, 25 bp, Homo sapien
aacgcaggccaagagcgcggctgct

SEQ ID NO: 5464712 - DNA, 25 bp, Homo sapien
tcgcttcccgtttccactagagttg

SEQ ID NO: 5464713 - DNA, 25 bp, Homo sapien
gcgctgcctcgctgaggtggcgccg

SEQ ID NO: 5464714 - DNA, 25 bp, Homo sapien
gctgctcctctgagcgtcccgcgtg

SEQ ID NO: 5464715 - DNA, 25 bp, Homo sapien
ccggtccttacgcgtcggtggcgct

SEQ ID NO: 5464716 - DNA, 25 bp, Homo sapien
tgagcgtcccgcgtgcacaaacgcg

SEQ ID NO: 5464717 - DNA, 25 bp, Homo sapien
ccgccgagcttttggggaagctggg

SEQ ID NO: 5464718 - DNA, 25 bp, Homo sapien
cgccgagcttttggggaagctgggc

SEQ ID NO: 5464719 - DNA, 25 bp, Homo sapien
cccgccgagcttttggggaagctgg

SEQ ID NO: 5464720 - DNA, 25 bp, Homo sapien
gcccgccgagcttttggggaagctg

SEQ ID NO: 5464721 - DNA, 25 bp, Homo sapien
ggcggacgcggcgctgtgccggagc

SEQ ID NO: 5464722 - DNA, 25 bp, Homo sapien
cccaggtctcaacaggctccgggtg

SEQ ID NO: 5464723 - DNA, 25 bp, Homo sapien
ccgggtgaacctgcgggtccgctca

SEQ ID NO: 5464724 - DNA, 25 bp, Homo sapien
caggctccgggtgaacctgcgggtc

SEQ ID NO: 5464725 - DNA, 25 bp, Homo sapien
ccggtcacgccaatcgcgccgcggg

SEQ ID NO: 5464726 - DNA, 25 bp, Homo sapien
tcttccccgcgccaaccttctctat

SEQ ID NO: 5464727 - DNA, 25 bp, Homo sapien
cgccggtcacgccaatcgcgccgcg

SEQ ID NO: 5464728 - DNA, 25 bp, Homo sapien
tccccgcgccaaccttctctatcca

SEQ ID NO: 5464729 - DNA, 25 bp, Homo sapien
ttcaggaagcggaactcggagcctt

SEQ ID NO: 5464730 - DNA, 25 bp, Homo sapien
caactcgcaagaggcgggtttttct

SEQ ID NO: 5464731 - DNA, 25 bp, Homo sapien
cgccgttcaggaagcggaactcgga

SEQ ID NO: 5464732 - DNA, 25 bp, Homo sapien
tcttcctcgctcaactcgcaagagg

SEQ ID NO: 5464733 - DNA, 25 bp, Homo sapien
ctcctctgaagcttctcgaagactt

SEQ ID NO: 5464734 - DNA, 25 bp, Homo sapien
tcctctgaagcttctcgaagacttt

SEQ ID NO: 5464735 - DNA, 25 bp, Homo sapien
agatatgatccgataggtccgttca

SEQ ID NO: 5464736 - DNA, 25 bp, Homo sapien
caatatgcttgatatcttttcttat

SEQ ID NO: 5464737 - DNA, 25 bp, Homo sapien
tctatgcttatgtcatttccagcca

SEQ ID NO: 5464738 - DNA, 25 bp, Homo sapien
tgcagttcggttcatgtcatctctc

SEQ ID NO: 5464739 - DNA, 25 bp, Homo sapien
ctttagggctttgatgctgtttagc

SEQ ID NO: 5464740 - DNA, 25 bp, Homo sapien
gagggattgtcttatttcacacagg

SEQ ID NO: 5464741 - DNA, 25 bp, Homo sapien
ttaatatagctctttcaaaacctga

SEQ ID NO: 5464742 - DNA, 25 bp, Homo sapien
gacaacactacttcatcaaactgag

SEQ ID NO: 5464743 - DNA, 25 bp, Homo sapien
aggcaatttgggaattgtagtagga

SEQ ID NO: 5464744 - DNA, 25 bp, Homo sapien
taggatgcctggtgatgcgagcttt

SEQ ID NO: 5464745 - DNA, 25 bp, Homo sapien
attgtagtaggatgcctggtgatgc

SEQ ID NO: 5464746 - DNA, 25 bp, Homo sapien
ctggtgatgcgagctttacaggaaa

SEQ ID NO: 5464747 - DNA, 25 bp, Homo sapien
ttagccccggatccagcaaagtgga

SEQ ID NO: 5464748 - DNA, 25 bp, Homo sapien
aacttagccccggatccagcaaagt

SEQ ID NO: 5464749 - DNA, 25 bp, Homo sapien
gccttggagagtggatgaccacttt

SEQ ID NO: 5464750 - DNA, 25 bp, Homo sapien
gatgaccactttttcagggtggatg

SEQ ID NO: 5464751 - DNA, 25 bp, Homo sapien
tcacttgctgggcaaggaaagccca

SEQ ID NO: 5464752 - DNA, 25 bp, Homo sapien
cacttgctgggcaaggaaagcccac

SEQ ID NO: 5464753 - DNA, 25 bp, Homo sapien
gatatcaacatgaaggaccttggca

SEQ ID NO: 5464754 - DNA, 25 bp, Homo sapien
taatgatggaagaccgatccaggac

SEQ ID NO: 5464755 - DNA, 25 bp, Homo sapien
aacaagaggattgttccctgcaggc

SEQ ID NO: 5464756 - DNA, 25 bp, Homo sapien
tattttgcagagtagaggcccatgc

SEQ ID NO: 5464757 - DNA, 25 bp, Homo sapien
cagtgtaattgtactagattcagtg

SEQ ID NO: 5464758 - DNA, 25 bp, Homo sapien
gtgtaattgtactagattcagtgta

SEQ ID NO: 5464759 - DNA, 25 bp, Homo sapien
catcagtgtaattgtactagattca

SEQ ID NO: 5464760 - DNA, 25 bp, Homo sapien
taattgtactagattcagtgtataa

SEQ ID NO: 5464761 - DNA, 25 bp, Homo sapien
agcctcaggaactgctttaactttt

SEQ ID NO: 5464762 - DNA, 25 bp, Homo sapien
actttatttttgtgtggagcagcct

SEQ ID NO: 5464763 - DNA, 25 bp, Homo sapien
caggaactgctttaacttttcccat

SEQ ID NO: 5464764 - DNA, 25 bp, Homo sapien
tatttttgtgtggagcagcctcagg

SEQ ID NO: 5464765 - DNA, 25 bp, Homo sapien
aatcacccacggtccaatttttgct

SEQ ID NO: 5464766 - DNA, 25 bp, Homo sapien
tagcttggggcatcttcgattggaa

SEQ ID NO: 5464767 - DNA, 25 bp, Homo sapien
gctgtttgacttaaaagtagcttgg

SEQ ID NO: 5464768 - DNA, 25 bp, Homo sapien
gaaggcctggaaacataaatcaccc

SEQ ID NO: 5464769 - DNA, 25 bp, Homo sapien
gctggtcacctagctttaactctga

SEQ ID NO: 5464770 - DNA, 25 bp, Homo sapien
tctgattctaggaactggtgacagc

SEQ ID NO: 5464771 - DNA, 25 bp, Homo sapien
tgcacccagccctgcggaaggtttt

SEQ ID NO: 5464772 - DNA, 25 bp, Homo sapien
tcagctcgctgaagcattgaattct

SEQ ID NO: 5464773 - DNA, 25 bp, Homo sapien
tctggtagtgccttcatccaagctt

SEQ ID NO: 5464774 - DNA, 25 bp, Homo sapien
aatggccttgcagattcctgtacag

SEQ ID NO: 5464775 - DNA, 25 bp, Homo sapien
cataacttcctaaatggccttgcag

SEQ ID NO: 5464776 - DNA, 25 bp, Homo sapien
gtacagttagccctttgtatctgtg

SEQ ID NO: 5464777 - DNA, 25 bp, Homo sapien
gcagaagctaaagccctcccagtaa

SEQ ID NO: 5464778 - DNA, 25 bp, Homo sapien
catgaaagccatgagagctttccca

SEQ ID NO: 5464779 - DNA, 25 bp, Homo sapien
agatgctgcagaagctaaagccctc

SEQ ID NO: 5464780 - DNA, 25 bp, Homo sapien
ccctcccagtaaagggcagttggtg

SEQ ID NO: 5464781 - DNA, 25 bp, Homo sapien
tctttggtgagaaacagtagaaggg

SEQ ID NO: 5464782 - DNA, 25 bp, Homo sapien
ttacaacatgagtctgctgcccaca

SEQ ID NO: 5464783 - DNA, 25 bp, Homo sapien
ttctttggtgagaaacagtagaagg

SEQ ID NO: 5464784 - DNA, 25 bp, Homo sapien
tttttacaacatgagtctgctgccc

SEQ ID NO: 5464785 - DNA, 25 bp, Homo sapien
tttgagagctcagtggtattaactt

SEQ ID NO: 5464786 - DNA, 25 bp, Homo sapien
tcagtggtattaacttgatgatctc

SEQ ID NO: 5464787 - DNA, 25 bp, Homo sapien
gacttccagtactgtcgccagtaag

SEQ ID NO: 5464788 - DNA, 25 bp, Homo sapien
ttccagtactgtcgccagtaagcca

SEQ ID NO: 5464789 - DNA, 25 bp, Homo sapien
ccaaaattacattaattctcctcat

SEQ ID NO: 5464790 - DNA, 25 bp, Homo sapien
tggtcttggcatattccaaaattac

SEQ ID NO: 5464791 - DNA, 25 bp, Homo sapien
tattccaaaattacattaattctcc

SEQ ID NO: 5464792 - DNA, 25 bp, Homo sapien
accacctggtcttggcatattccaa

SEQ ID NO: 5464793 - DNA, 25 bp, Homo sapien
cctgtggatgaaacagttgggcttc

SEQ ID NO: 5464794 - DNA, 25 bp, Homo sapien
tttctgaggatcttctgagatccac

SEQ ID NO: 5464795 - DNA, 25 bp, Homo sapien
gagatccacatagactggctcagta

SEQ ID NO: 5464796 - DNA, 25 bp, Homo sapien
gagtcctttctaaagacttcaattc

SEQ ID NO: 5464797 - DNA, 25 bp, Homo sapien
gctcagtaacttctctactggcata

SEQ ID NO: 5464798 - DNA, 25 bp, Homo sapien
ttttcctagctttgatgtaagaggg

SEQ ID NO: 5464799 - DNA, 25 bp, Homo sapien
cttcctccttttcctagctttgatg

SEQ ID NO: 5464800 - DNA, 25 bp, Homo sapien
ctccttttcctagctttgatgtaag

SEQ ID NO: 5464801 - DNA, 25 bp, Homo sapien
tcaaatcaggcccttccggttcttc

SEQ ID NO: 5464802 - DNA, 25 bp, Homo sapien
gagtagcagagaaccatggcaatgg

SEQ ID NO: 5464803 - DNA, 25 bp, Homo sapien
tcaaactctggagtagcagagaacc

SEQ ID NO: 5464804 - DNA, 25 bp, Homo sapien
tctggagtagcagagaaccatggca

SEQ ID NO: 5464805 - DNA, 25 bp, Homo sapien
tagcagagaaccatggcaatggaga

SEQ ID NO: 5464806 - DNA, 25 bp, Homo sapien
tccatgagtgcaggtaagactgtct

SEQ ID NO: 5464807 - DNA, 25 bp, Homo sapien
tcttggaatcgcagaggccacattg

SEQ ID NO: 5464808 - DNA, 25 bp, Homo sapien
gaactgtatggcagatcttggaatc

SEQ ID NO: 5464809 - DNA, 25 bp, Homo sapien
gaagaattcatggagctgttggaga

SEQ ID NO: 5464810 - DNA, 25 bp, Homo sapien
tacagagcaggaaactccctgaatg

SEQ ID NO: 5464811 - DNA, 25 bp, Homo sapien
agagcaggaaactccctgaatgacc

SEQ ID NO: 5464812 - DNA, 25 bp, Homo sapien
tagtacagagcaggaaactccctga

SEQ ID NO: 5464813 - DNA, 25 bp, Homo sapien
ctgtagtacagagcaggaaactccc

SEQ ID NO: 5464814 - DNA, 25 bp, Homo sapien
gagaagtccccttgcaactactgag

SEQ ID NO: 5464815 - DNA, 25 bp, Homo sapien
gaccattggagtaaggggccaggga

SEQ ID NO: 5464816 - DNA, 25 bp, Homo sapien
ccattggagtaaggggccagggaga

SEQ ID NO: 5464817 - DNA, 25 bp, Homo sapien
ggagagagaagtccccttgcaacta

SEQ ID NO: 5464818 - DNA, 25 bp, Homo sapien
gggtgtctttttgtcgactgtgctg

SEQ ID NO: 5464819 - DNA, 25 bp, Homo sapien
catctgcatttgtggggtcatgttc

SEQ ID NO: 5464820 - DNA, 25 bp, Homo sapien
ctgtgctggatgtgaccacacttgc

SEQ ID NO: 5464821 - DNA, 25 bp, Homo sapien
tgtggggtcatgttcacatgttgcc

SEQ ID NO: 5464822 - DNA, 25 bp, Homo sapien
tgcctgattccaggtcctatgattt

SEQ ID NO: 5464823 - DNA, 25 bp, Homo sapien
tgagattcaaatcagctctgcctga

SEQ ID NO: 5464824 - DNA, 25 bp, Homo sapien
agaagagttcaaggcacttctagtg

SEQ ID NO: 5464825 - DNA, 25 bp, Homo sapien
cacttctagtggagttgagattcaa

SEQ ID NO: 5464826 - DNA, 25 bp, Homo sapien
aggcgaacattattcagattggagc

SEQ ID NO: 5464827 - DNA, 25 bp, Homo sapien
ctttgatgtggaggcgaacattatt

SEQ ID NO: 5464828 - DNA, 25 bp, Homo sapien
tgatgtggaggcgaacattattcag

SEQ ID NO: 5464829 - DNA, 25 bp, Homo sapien
tggaggcgaacattattcagattgg

SEQ ID NO: 5464830 - DNA, 25 bp, Homo sapien
gagatctatccgaaagacaatagca

SEQ ID NO: 5464831 - DNA, 25 bp, Homo sapien
ggaagctggatgagatctatccgaa

SEQ ID NO: 5464832 - DNA, 25 bp, Homo sapien
agaagtgatactggagaggcgacaa

SEQ ID NO: 5464833 - DNA, 25 bp, Homo sapien
gcgacaacaaattcagaaggaagct

SEQ ID NO: 5464834 - DNA, 25 bp, Homo sapien
cattccctattcttgccttggtcag

SEQ ID NO: 5464835 - DNA, 25 bp, Homo sapien
ttccctattcttgccttggtcaggt

SEQ ID NO: 5464836 - DNA, 25 bp, Homo sapien
attccctattcttgccttggtcagg

SEQ ID NO: 5464837 - DNA, 25 bp, Homo sapien
cattctccaagtgatcacatatcca

SEQ ID NO: 5464838 - DNA, 25 bp, Homo sapien
taattctgagacaaagacccacagc

SEQ ID NO: 5464839 - DNA, 25 bp, Homo sapien
gctcctgggagttaacatctagaag

SEQ ID NO: 5464840 - DNA, 25 bp, Homo sapien
tgacagcatgcaactgagagagagt

SEQ ID NO: 5464841 - DNA, 25 bp, Homo sapien
gagctgttgccttgggtaattctga

SEQ ID NO: 5464842 - DNA, 25 bp, Homo sapien
tcatttccctggcactcgcatctct

SEQ ID NO: 5464843 - DNA, 25 bp, Homo sapien
gggaacctccttcaccagtggactc

SEQ ID NO: 5464844 - DNA, 25 bp, Homo sapien
tctcgggaacctccttcaccagtgg

SEQ ID NO: 5464845 - DNA, 25 bp, Homo sapien
tggcactcgcatctctcgggaacct

SEQ ID NO: 5464846 - DNA, 25 bp, Homo sapien
ttttatgttcagtgacaagcagcat

SEQ ID NO: 5464847 - DNA, 25 bp, Homo sapien
atggatggtggctttgccaatgtgc

SEQ ID NO: 5464848 - DNA, 25 bp, Homo sapien
tttgccaatgtgctgacttctgtca

SEQ ID NO: 5464849 - DNA, 25 bp, Homo sapien
tatgaatgattctactccgctgatt

SEQ ID NO: 5464850 - DNA, 25 bp, Homo sapien
agcctcttatttggtctccagattc

SEQ ID NO: 5464851 - DNA, 25 bp, Homo sapien
tagcctcttatttggtctccagatt

SEQ ID NO: 5464852 - DNA, 25 bp, Homo sapien
agtgaaagaacacgagaagttttgg

SEQ ID NO: 5464853 - DNA, 25 bp, Homo sapien
tcaaggtatgggaaagtgaaagaac

SEQ ID NO: 5464854 - DNA, 25 bp, Homo sapien
tgggaaagtgaaagaacacgagaag

SEQ ID NO: 5464855 - DNA, 25 bp, Homo sapien
gaacacgagaagttttgggtcagcc

SEQ ID NO: 5464856 - DNA, 25 bp, Homo sapien
ctgacttgcagttcttcttggaatt

SEQ ID NO: 5464857 - DNA, 25 bp, Homo sapien
tcttcttggaattgactagggatgg

SEQ ID NO: 5464858 - DNA, 25 bp, Homo sapien
gcagttcttcttggaattgactagg

SEQ ID NO: 5464859 - DNA, 25 bp, Homo sapien
ttggaattgactagggatggaagaa

SEQ ID NO: 5464860 - DNA, 25 bp, Homo sapien
ttcagatgaggatgtctcacttctt

SEQ ID NO: 5464861 - DNA, 25 bp, Homo sapien
tcagatgaggatgtctcacttcttc

SEQ ID NO: 5464862 - DNA, 25 bp, Homo sapien
gttcagatgaggatgtctcacttct

SEQ ID NO: 5464863 - DNA, 25 bp, Homo sapien
ccagatttggaaatatactagcaca

SEQ ID NO: 5464864 - DNA, 25 bp, Homo sapien
gaaatgggcacactcagatcttgaa

SEQ ID NO: 5464865 - DNA, 25 bp, Homo sapien
caattcctgtccctggtactgccat

SEQ ID NO: 5464866 - DNA, 25 bp, Homo sapien
ctgccatactattggcagtgaaatg

SEQ ID NO: 5464867 - DNA, 25 bp, Homo sapien
ccaagcttccttgggacctgaatgc

SEQ ID NO: 5464868 - DNA, 25 bp, Homo sapien
ttaactgaggcagggatccggatgc

SEQ ID NO: 5464869 - DNA, 25 bp, Homo sapien
tgaaatctcttggtgtcattacaca

SEQ ID NO: 5464870 - DNA, 25 bp, Homo sapien
gaaagatcagtcaggtactctcctc

SEQ ID NO: 5464871 - DNA, 25 bp, Homo sapien
ttgtcgtggatttcccattgttgct

SEQ ID NO: 5464872 - DNA, 25 bp, Homo sapien
tctgaatttggcacaagctcttgtc

SEQ ID NO: 5464873 - DNA, 25 bp, Homo sapien
caagctcttgtcgtggatttcccat

SEQ ID NO: 5464874 - DNA, 25 bp, Homo sapien
tttggcacaagctcttgtcgtggat

SEQ ID NO: 5464875 - DNA, 25 bp, Homo sapien
gcaactgcatggtatttctctataa

SEQ ID NO: 5464876 - DNA, 25 bp, Homo sapien
cactcgtaataactccactgcgtgg

SEQ ID NO: 5464877 - DNA, 25 bp, Homo sapien
gctcttttggctgggctgcatcgaa

SEQ ID NO: 5464878 - DNA, 25 bp, Homo sapien
taactccaccaggattcagttgcca

SEQ ID NO: 5464879 - DNA, 25 bp, Homo sapien
tcgtgccaggccttttacataagac

SEQ ID NO: 5464880 - DNA, 25 bp, Homo sapien
tacataagacgatcccaatagggtg

SEQ ID NO: 5464881 - DNA, 25 bp, Homo sapien
ctatgattacagattgaggcgcttt

SEQ ID NO: 5464882 - DNA, 25 bp, Homo sapien
taataataccttgcactcgtgccag

SEQ ID NO: 5464883 - DNA, 25 bp, Homo sapien
gttgcagatattgccaacttggtaa

SEQ ID NO: 5464884 - DNA, 25 bp, Homo sapien
ttgcagatattgccaacttggtaat

SEQ ID NO: 5464885 - DNA, 25 bp, Homo sapien
tgccgctttccggtttcttgcaatt

SEQ ID NO: 5464886 - DNA, 25 bp, Homo sapien
gaaatccaaagtagaacgatgccgc

SEQ ID NO: 5464887 - DNA, 25 bp, Homo sapien
cccagggagccgaaatccaaagtag

SEQ ID NO: 5464888 - DNA, 25 bp, Homo sapien
aacgatgccgctttccggtttcttg

SEQ ID NO: 5464889 - DNA, 25 bp, Homo sapien
tagtgagcaggaactatccaaggtg

SEQ ID NO: 5464890 - DNA, 25 bp, Homo sapien
ggtgctagaacgctggcagccttgc

SEQ ID NO: 5464891 - DNA, 25 bp, Homo sapien
tgccgttcaatgcagacggattgca

SEQ ID NO: 5464892 - DNA, 25 bp, Homo sapien
gcagccttgccgttcaatgcagacg

SEQ ID NO: 5464893 - DNA, 25 bp, Homo sapien
ggaaggacatcgagaatgctctgat

SEQ ID NO: 5464894 - DNA, 25 bp, Homo sapien
gtcttccgccactgcatcttcctag

SEQ ID NO: 5464895 - DNA, 25 bp, Homo sapien
ttttatctgataggaaggacatcga

SEQ ID NO: 5464896 - DNA, 25 bp, Homo sapien
gataggaaggacatcgagaatgctc

SEQ ID NO: 5464897 - DNA, 25 bp, Homo sapien
tttttccaactactcagcaatattt

SEQ ID NO: 5464898 - DNA, 25 bp, Homo sapien
taaatacaagacatgtgagtatttc

SEQ ID NO: 5464899 - DNA, 25 bp, Homo sapien
ttcttattttgttggggtgtctcca

SEQ ID NO: 5464900 - DNA, 25 bp, Homo sapien
gtggacttgttttacttgggacatg

SEQ ID NO: 5464901 - DNA, 25 bp, Homo sapien
gaataacaaatatagagaaagagtg

SEQ ID NO: 5464902 - DNA, 25 bp, Homo sapien
tctaaatatagccgaaaaataatga

SEQ ID NO: 5464903 - DNA, 25 bp, Homo sapien
tgatgtagttttagtcattttaaca

SEQ ID NO: 5464904 - DNA, 25 bp, Homo sapien
gcatttataaccaagtagtgtggaa

SEQ ID NO: 5464905 - DNA, 25 bp, Homo sapien
tggcccaagcctccaaaaagtatct

SEQ ID NO: 5464906 - DNA, 25 bp, Homo sapien
gcatgagtctccaatattaatggaa

SEQ ID NO: 5464907 - DNA, 25 bp, Homo sapien
aaaagtatctcagccactggcattt

SEQ ID NO: 5464908 - DNA, 25 bp, Homo sapien
ataatgccttgtaagcatctggaac

SEQ ID NO: 5464909 - DNA, 25 bp, Homo sapien
tggaagatgagggggagataccaat

SEQ ID NO: 5464910 - DNA, 25 bp, Homo sapien
acctggaagatgagggggagatacc

SEQ ID NO: 5464911 - DNA, 25 bp, Homo sapien
gacaacctggaagatgagggggaga

SEQ ID NO: 5464912 - DNA, 25 bp, Homo sapien
aagatgagggggagataccaattca

SEQ ID NO: 5464913 - DNA, 25 bp, Homo sapien
gccttttgcgcagttagtgaaatca

SEQ ID NO: 5464914 - DNA, 25 bp, Homo sapien
caaatgaacaattgcctagaggtct

SEQ ID NO: 5464915 - DNA, 25 bp, Homo sapien
cagtttagggcagagatgacagtca

SEQ ID NO: 5464916 - DNA, 25 bp, Homo sapien
tgaaatcatgcagtcggcgatactg

SEQ ID NO: 5464917 - DNA, 25 bp, Homo sapien
tgactatctcaataacatcacatgg

SEQ ID NO: 5464918 - DNA, 25 bp, Homo sapien
gtgactatctcaataacatcacatg

SEQ ID NO: 5464919 - DNA, 25 bp, Homo sapien
tgtggactggccatgtaatctccca

SEQ ID NO: 5464920 - DNA, 25 bp, Homo sapien
gtccttgagggtattgctcacacag

SEQ ID NO: 5464921 - DNA, 25 bp, Homo sapien
tctcccaccgttgagtccttgaggg

SEQ ID NO: 5464922 - DNA, 25 bp, Homo sapien
gaaacatttaaggtccctagcacac

SEQ ID NO: 5464923 - DNA, 25 bp, Homo sapien
tgggacagctttcacatcggatccg

SEQ ID NO: 5464924 - DNA, 25 bp, Homo sapien
tgcatagtgatactggataaccaag

SEQ ID NO: 5464925 - DNA, 25 bp, Homo sapien
gataaccaagaggaccttctgagca

SEQ ID NO: 5464926 - DNA, 25 bp, Homo sapien
ccacaaactggtacttgggacagct

SEQ ID NO: 5464927 - DNA, 25 bp, Homo sapien
gatgtccaggaccttattaatttcc

SEQ ID NO: 5464928 - DNA, 25 bp, Homo sapien
gataaaaatgtttttcgatgtccag

SEQ ID NO: 5464929 - DNA, 25 bp, Homo sapien
tcaaaatcttagaacatgaataaca

SEQ ID NO: 5464930 - DNA, 25 bp, Homo sapien
tgtttttcgatgtccaggaccttat

SEQ ID NO: 5464931 - DNA, 25 bp, Homo sapien
agcatagcctgttttactctatcca

SEQ ID NO: 5464932 - DNA, 25 bp, Homo sapien
ctacttcaccagcatagcctgtttt

SEQ ID NO: 5464933 - DNA, 25 bp, Homo sapien
catagagccagcaatgagttaaagg

SEQ ID NO: 5464934 - DNA, 25 bp, Homo sapien
gagccagcaatgagttaaaggaaca

SEQ ID NO: 5464935 - DNA, 25 bp, Homo sapien
aggtttcccagattagaatcctagt

SEQ ID NO: 5464936 - DNA, 25 bp, Homo sapien
gaatcctagtttgaggacttaagtc

SEQ ID NO: 5464937 - DNA, 25 bp, Homo sapien
cagattagaatcctagtttgaggac

SEQ ID NO: 5464938 - DNA, 25 bp, Homo sapien
ggacttaagtcagcaccagtcaggg

SEQ ID NO: 5464939 - DNA, 25 bp, Homo sapien
caaataactgatgggtgatgaacac

SEQ ID NO: 5464940 - DNA, 25 bp, Homo sapien
actgatgggtgatgaacacacacca

SEQ ID NO: 5464941 - DNA, 25 bp, Homo sapien
gaataaacaccctcacaaataactg

SEQ ID NO: 5464942 - DNA, 25 bp, Homo sapien
acacacaccaagttcgaccaaagca

SEQ ID NO: 5464943 - DNA, 25 bp, Homo sapien
tcccctcaggcaaagcagtgacctg

SEQ ID NO: 5464944 - DNA, 25 bp, Homo sapien
gccaggtaccatcatcgttagccaa

SEQ ID NO: 5464945 - DNA, 25 bp, Homo sapien
tcctgtgatacaacttgccaaatgc

SEQ ID NO: 5464946 - DNA, 25 bp, Homo sapien
aaattaggccggtctgcgtcgacgt

SEQ ID NO: 5464947 - DNA, 25 bp, Homo sapien
tatgtattggcttagtggttctttt

SEQ ID NO: 5464948 - DNA, 25 bp, Homo sapien
tgtactatatgtattggcttagtgg

SEQ ID NO: 5464949 - DNA, 25 bp, Homo sapien
aacttgtactatatgtattggctta

SEQ ID NO: 5464950 - DNA, 25 bp, Homo sapien
actatatgtattggcttagtggttc

SEQ ID NO: 5464951 - DNA, 25 bp, Homo sapien
tgttcttcagtccttaatatttcca

SEQ ID NO: 5464952 - DNA, 25 bp, Homo sapien
caccaccagagctacaggtgtgaag

SEQ ID NO: 5464953 - DNA, 25 bp, Homo sapien
cttcagcatccgaggtcagagttat

SEQ ID NO: 5464954 - DNA, 25 bp, Homo sapien
tagcagaagtacgtactccagcttt

SEQ ID NO: 5464955 - DNA, 25 bp, Homo sapien
gaggtcagagttatcaacttcacca

SEQ ID NO: 5464956 - DNA, 25 bp, Homo sapien
tactgtcataaccatgaaaggcctt

SEQ ID NO: 5464957 - DNA, 25 bp, Homo sapien
gcatgcctccaagagttgcctgact

SEQ ID NO: 5464958 - DNA, 25 bp, Homo sapien
ttttaaatattcctggcatgcctcc

SEQ ID NO: 5464959 - DNA, 25 bp, Homo sapien
ttggaacaccctccctagtccttga

SEQ ID NO: 5464960 - DNA, 25 bp, Homo sapien
caccaataactgacatatatcactg

SEQ ID NO: 5464961 - DNA, 25 bp, Homo sapien
caagcaaacaccaataactgacata

SEQ ID NO: 5464962 - DNA, 25 bp, Homo sapien
ttgcaccaccaagcaaacaccaata

SEQ ID NO: 5464963 - DNA, 25 bp, Homo sapien
tgacatatatcactgtcattgacat

SEQ ID NO: 5464964 - DNA, 25 bp, Homo sapien
cactgtggcaataatcattccatga

SEQ ID NO: 5464965 - DNA, 25 bp, Homo sapien
tctgtgcctatacgattgtccactg

SEQ ID NO: 5464966 - DNA, 25 bp, Homo sapien
ttattctgtgcctatacgattgtcc

SEQ ID NO: 5464967 - DNA, 25 bp, Homo sapien
gcctatacgattgtccactgtggca

SEQ ID NO: 5464968 - DNA, 25 bp, Homo sapien
ttttactgcactcgcctgatccatg

SEQ ID NO: 5464969 - DNA, 25 bp, Homo sapien
tcgcctgatccatgcttgagctttg

SEQ ID NO: 5464970 - DNA, 25 bp, Homo sapien
catgcttgagctttggtgactctgg

SEQ ID NO: 5464971 - DNA, 25 bp, Homo sapien
caccatttaggaccaccttttactg

SEQ ID NO: 5464972 - DNA, 25 bp, Homo sapien
gtaactccagaatatcattttccct

SEQ ID NO: 5464973 - DNA, 25 bp, Homo sapien
tcatagtaactccagaatatcattt

SEQ ID NO: 5464974 - DNA, 25 bp, Homo sapien
cttctccttcaatttagcacctttc

SEQ ID NO: 5464975 - DNA, 25 bp, Homo sapien
ttcttctccttcaatttagcacctt

SEQ ID NO: 5464976 - DNA, 25 bp, Homo sapien
agactctcagcaaacatagcttcat

SEQ ID NO: 5464977 - DNA, 25 bp, Homo sapien
cagactctcagcaaacatagcttca

SEQ ID NO: 5464978 - DNA, 25 bp, Homo sapien
cagcagctctcccccgcagactctc

SEQ ID NO: 5464979 - DNA, 25 bp, Homo sapien
aacagcagctctcccccgcagactc

SEQ ID NO: 5464980 - DNA, 25 bp, Homo sapien
gcaccagctgaacttgctcatcaga

SEQ ID NO: 5464981 - DNA, 25 bp, Homo sapien
tagcagcatggatgagtatcacacc

SEQ ID NO: 5464982 - DNA, 25 bp, Homo sapien
cagtaagaacagtcactctcctcct

SEQ ID NO: 5464983 - DNA, 25 bp, Homo sapien
actctcctcctaacagccatagcag

SEQ ID NO: 5464984 - DNA, 25 bp, Homo sapien
ctatctagttagaatatggaaaaca

SEQ ID NO: 5464985 - DNA, 25 bp, Homo sapien
aatgatacctttcccgaactaccag

SEQ ID NO: 5464986 - DNA, 25 bp, Homo sapien
gaactaccagtaaaggtgcccaaga

SEQ ID NO: 5464987 - DNA, 25 bp, Homo sapien
gaaggcaatgtgaagtaacttgatg

SEQ ID NO: 5464988 - DNA, 25 bp, Homo sapien
gacatatattcagaggtgcaaatga

SEQ ID NO: 5464989 - DNA, 25 bp, Homo sapien
ttctctggcttgctggatcctgcat

SEQ ID NO: 5464990 - DNA, 25 bp, Homo sapien
cttccagcagaaaggtagctgcttt

SEQ ID NO: 5464991 - DNA, 25 bp, Homo sapien
tttcttctctggcttgctggatcct

SEQ ID NO: 5464992 - DNA, 25 bp, Homo sapien
tccagcagaaaggtagctgctttct

SEQ ID NO: 5464993 - DNA, 25 bp, Homo sapien
tttcagacctacttcaaacattctt

SEQ ID NO: 5464994 - DNA, 25 bp, Homo sapien
cggggaaatacagccggactttctg

SEQ ID NO: 5464995 - DNA, 25 bp, Homo sapien
ctacttcaaacattcttaactcggg

SEQ ID NO: 5464996 - DNA, 25 bp, Homo sapien
tttctgatttggcagattgtccaaa

SEQ ID NO: 5464997 - DNA, 25 bp, Homo sapien
tctcctcatgggcagtacaagatcc

SEQ ID NO: 5464998 - DNA, 25 bp, Homo sapien
catgggtatcaatcatgtctatata

SEQ ID NO: 5464999 - DNA, 25 bp, Homo sapien
aaagagattgcatcactatctcctc

SEQ ID NO: 5465000 - DNA, 25 bp, Homo sapien
tcctccaagccttatgtcttccttt

SEQ ID NO: 5465001 - DNA, 25 bp, Homo sapien
tgaccttacaagtgaaaccactctg

SEQ ID NO: 5465002 - DNA, 25 bp, Homo sapien
gcattaatagcctgcttgatcacag

SEQ ID NO: 5465003 - DNA, 25 bp, Homo sapien
gagccaactgcactatttgcattaa

SEQ ID NO: 5465004 - DNA, 25 bp, Homo sapien
tgccttactgagtcagagccaactg

SEQ ID NO: 5465005 - DNA, 25 bp, Homo sapien
aaggtctgagcggaagtggaaatca

SEQ ID NO: 5465006 - DNA, 25 bp, Homo sapien
tgatgagagatggaacaaggtctga

SEQ ID NO: 5465007 - DNA, 25 bp, Homo sapien
aatcattttcgtaagcagaagtgga

SEQ ID NO: 5465008 - DNA, 25 bp, Homo sapien
tgtaaagtctaattcaaccacagag

SEQ ID NO: 5465009 - DNA, 25 bp, Homo sapien
agaactgaagacaggatgtgatgag

SEQ ID NO: 5465010 - DNA, 25 bp, Homo sapien
gcgtagaactgaagacaggatgtga

SEQ ID NO: 5465011 - DNA, 25 bp, Homo sapien
atgtgatgagggctttaagagacct

SEQ ID NO: 5465012 - DNA, 25 bp, Homo sapien
cagggcgtagaactgaagacaggat

SEQ ID NO: 5465013 - DNA, 25 bp, Homo sapien
gagataaatccaggggtatctccaa

SEQ ID NO: 5465014 - DNA, 25 bp, Homo sapien
ataaatccaggggtatctccaacag

SEQ ID NO: 5465015 - DNA, 25 bp, Homo sapien
tggagataaatccaggggtatctcc

SEQ ID NO: 5465016 - DNA, 25 bp, Homo sapien
aggttggagataaatccaggggtat

SEQ ID NO: 5465017 - DNA, 25 bp, Homo sapien
tatgagcctaaaggggttgaaaggc

SEQ ID NO: 5465018 - DNA, 25 bp, Homo sapien
tgcaggagatgtctaagagcactgt

SEQ ID NO: 5465019 - DNA, 25 bp, Homo sapien
gggttgaaaggcactttagatgtat

SEQ ID NO: 5465020 - DNA, 25 bp, Homo sapien
cactttagatgtatgcaggagatgt

SEQ ID NO: 5465021 - DNA, 25 bp, Homo sapien
tgcagttgtaacttgcttatgacct

SEQ ID NO: 5465022 - DNA, 25 bp, Homo sapien
ccaccaggtgtgcagttgtaacttg

SEQ ID NO: 5465023 - DNA, 25 bp, Homo sapien
tgcttatgaccttcagaaccaaagg

SEQ ID NO: 5465024 - DNA, 25 bp, Homo sapien
gtaacttgcttatgaccttcagaac

SEQ ID NO: 5465025 - DNA, 25 bp, Homo sapien
cccctttgatcaccttggagctgtc

SEQ ID NO: 5465026 - DNA, 25 bp, Homo sapien
ctggcagagcaagccgttcacgcag

SEQ ID NO: 5465027 - DNA, 25 bp, Homo sapien
tctttctaataaacggctggcagag

SEQ ID NO: 5465028 - DNA, 25 bp, Homo sapien
tcaggccgatctctttctatttgat

SEQ ID NO: 5465029 - DNA, 25 bp, Homo sapien
atgcaagcttttgctgacccacacc

SEQ ID NO: 5465030 - DNA, 25 bp, Homo sapien
ccggatcccgcaggcatctgtgttc

SEQ ID NO: 5465031 - DNA, 25 bp, Homo sapien
ttcgggaaggcgagcattgttttcc

SEQ ID NO: 5465032 - DNA, 25 bp, Homo sapien
ccctggacttgagcgttttggtctc

SEQ ID NO: 5465033 - DNA, 25 bp, Homo sapien
tgcctgcataccaagactgagaaag

SEQ ID NO: 5465034 - DNA, 25 bp, Homo sapien
cacattcttatagtgcctgtgcctg

SEQ ID NO: 5465035 - DNA, 25 bp, Homo sapien
gaatactaaaatgatggtgcagctg

SEQ ID NO: 5465036 - DNA, 25 bp, Homo sapien
tagaggatttcagtttaaggagcat

SEQ ID NO: 5465037 - DNA, 25 bp, Homo sapien
gctgtatttgttgaacactagagga

SEQ ID NO: 5465038 - DNA, 25 bp, Homo sapien
ctgaatactaaaatgatggtgcagc

SEQ ID NO: 5465039 - DNA, 25 bp, Homo sapien
cacttccttggtaaatccaattcca

SEQ ID NO: 5465040 - DNA, 25 bp, Homo sapien
tccttggtaaatccaattccaaaga

SEQ ID NO: 5465041 - DNA, 25 bp, Homo sapien
tggtaaatccaattccaaagaatat

SEQ ID NO: 5465042 - DNA, 25 bp, Homo sapien
cttggtaaatccaattccaaagaat

SEQ ID NO: 5465043 - DNA, 25 bp, Homo sapien
cactgagcatgagccaaggaagcca

SEQ ID NO: 5465044 - DNA, 25 bp, Homo sapien
ggaagccatgcgaagccttcttttt

SEQ ID NO: 5465045 - DNA, 25 bp, Homo sapien
gctttgttgtattcagagggctttg

SEQ ID NO: 5465046 - DNA, 25 bp, Homo sapien
tcaccccagtgaatagtaccactga

SEQ ID NO: 5465047 - DNA, 25 bp, Homo sapien
tctccatctttacaactcacagcca

SEQ ID NO: 5465048 - DNA, 25 bp, Homo sapien
cccctaagagcttgctctcctgtgt

SEQ ID NO: 5465049 - DNA, 25 bp, Homo sapien
ccatcctctcccctaagagcttgct

SEQ ID NO: 5465050 - DNA, 25 bp, Homo sapien
ctctccatctttacaactcacagcc

SEQ ID NO: 5465051 - DNA, 25 bp, Homo sapien
ttgatctgcgttctgcctgaggccc

SEQ ID NO: 5465052 - DNA, 25 bp, Homo sapien
gaggcccacaagtactcaaagactt

SEQ ID NO: 5465053 - DNA, 25 bp, Homo sapien
tactggatacaagcaattgatctgc

SEQ ID NO: 5465054 - DNA, 25 bp, Homo sapien
cttccatgaaaatctactggataca

SEQ ID NO: 5465055 - DNA, 25 bp, Homo sapien
gctttcttgcacctatattcttctt

SEQ ID NO: 5465056 - DNA, 25 bp, Homo sapien
tgctttcttgcacctatattcttct

SEQ ID NO: 5465057 - DNA, 25 bp, Homo sapien
tagaacaacatttctctcttggtat

SEQ ID NO: 5465058 - DNA, 25 bp, Homo sapien
gaacaacatttctctcttggtattt

SEQ ID NO: 5465059 - DNA, 25 bp, Homo sapien
ctagaacaacatttctctcttggta

SEQ ID NO: 5465060 - DNA, 25 bp, Homo sapien
acaacatttctctcttggtatttac

SEQ ID NO: 5465061 - DNA, 25 bp, Homo sapien
tatttaaaggtgttgtaccattcac

SEQ ID NO: 5465062 - DNA, 25 bp, Homo sapien
tcatcaggctgatgtaaggacttgc

SEQ ID NO: 5465063 - DNA, 25 bp, Homo sapien
cattcacttgcaaagaaactgtttt

SEQ ID NO: 5465064 - DNA, 25 bp, Homo sapien
gacttgctactgcattcattgtcag

SEQ ID NO: 5465065 - DNA, 25 bp, Homo sapien
aagaatggcaatgcaattcagccat

SEQ ID NO: 5465066 - DNA, 25 bp, Homo sapien
ttggaagaatggcaatgcaattcag

SEQ ID NO: 5465067 - DNA, 25 bp, Homo sapien
ggaagaatggcaatgcaattcagcc

SEQ ID NO: 5465068 - DNA, 25 bp, Homo sapien
ctttggaagaatggcaatgcaattc

SEQ ID NO: 5465069 - DNA, 25 bp, Homo sapien
cacagagcagcccattggccttaat

SEQ ID NO: 5465070 - DNA, 25 bp, Homo sapien
tccaggctctgtcatcgttttgcac

SEQ ID NO: 5465071 - DNA, 25 bp, Homo sapien
ccaggtatttcagggtcactcagca

SEQ ID NO: 5465072 - DNA, 25 bp, Homo sapien
catcgttttgcaccgcacagagcag

SEQ ID NO: 5465073 - DNA, 25 bp, Homo sapien
taattgtgtccattacagcccttgc

SEQ ID NO: 5465074 - DNA, 25 bp, Homo sapien
tatagaactatagaaccaagaccct

SEQ ID NO: 5465075 - DNA, 25 bp, Homo sapien
gatgaatctcagaccctggctcggg

SEQ ID NO: 5465076 - DNA, 25 bp, Homo sapien
tcgggtctaagcttgcaaatgaggg

SEQ ID NO: 5465077 - DNA, 25 bp, Homo sapien
tgactcaacttttaaaatacaagga

SEQ ID NO: 5465078 - DNA, 25 bp, Homo sapien
gaatgctggcaactagaaacctgcg

SEQ ID NO: 5465079 - DNA, 25 bp, Homo sapien
tacacaagaagtcctcggttcaggg

SEQ ID NO: 5465080 - DNA, 25 bp, Homo sapien
cgagaggcctttgtgaaaacagcgc

SEQ ID NO: 5465081 - DNA, 25 bp, Homo sapien
taatgtcatcttgtaaacaccagcg

SEQ ID NO: 5465082 - DNA, 25 bp, Homo sapien
gggatgaacagctgcgtgaacttgg

SEQ ID NO: 5465083 - DNA, 25 bp, Homo sapien
ggatgaacagctgcgtgaacttgga

SEQ ID NO: 5465084 - DNA, 25 bp, Homo sapien
aggggatgaacagctgcgtgaactt

SEQ ID NO: 5465085 - DNA, 25 bp, Homo sapien
gatgaacagctgcgtgaacttggag

SEQ ID NO: 5465086 - DNA, 25 bp, Homo sapien
ccatctctggcttgctagaatgttt

SEQ ID NO: 5465087 - DNA, 25 bp, Homo sapien
ttcaataagagctttgacacaactg

SEQ ID NO: 5465088 - DNA, 25 bp, Homo sapien
ccaaaattgttatctccagaatttt

SEQ ID NO: 5465089 - DNA, 25 bp, Homo sapien
cacaactgagatgtatatctgaatt

SEQ ID NO: 5465090 - DNA, 25 bp, Homo sapien
ccagaaacctgggtttgtgcccata

SEQ ID NO: 5465091 - DNA, 25 bp, Homo sapien
agaatagccagatgagattggagag

SEQ ID NO: 5465092 - DNA, 25 bp, Homo sapien
tgacagcgtaacagtccttccagaa

SEQ ID NO: 5465093 - DNA, 25 bp, Homo sapien
tttctccataggcaagaatagccag

SEQ ID NO: 5465094 - DNA, 25 bp, Homo sapien
cttgtggaagtgtccagaataacca

SEQ ID NO: 5465095 - DNA, 25 bp, Homo sapien
gaaccttaagctggaattgttcttc

SEQ ID NO: 5465096 - DNA, 25 bp, Homo sapien
tgattgctaccacctgcaaccaaga

SEQ ID NO: 5465097 - DNA, 25 bp, Homo sapien
gcaagagggtccgacccttgtggaa

SEQ ID NO: 5465098 - DNA, 25 bp, Homo sapien
gacatttctgatacggttgcccttg

SEQ ID NO: 5465099 - DNA, 25 bp, Homo sapien
gaaagccttcctgtcatagttaaga

SEQ ID NO: 5465100 - DNA, 25 bp, Homo sapien
tagatctgtagagttcgaagggtga

SEQ ID NO: 5465101 - DNA, 25 bp, Homo sapien
caaggtcgacgatatctgaattgac

SEQ ID NO: 5465102 - DNA, 25 bp, Homo sapien
aaatgaagtggaaaatgaaggcgaa

SEQ ID NO: 5465103 - DNA, 25 bp, Homo sapien
aagtggaaaatgaaggcgaataaat

SEQ ID NO: 5465104 - DNA, 25 bp, Homo sapien
tgaagtggaaaatgaaggcgaataa

SEQ ID NO: 5465105 - DNA, 25 bp, Homo sapien
aatgaagtggaaaatgaaggcgaat

SEQ ID NO: 5465106 - DNA, 25 bp, Homo sapien
ggccactgaaactcatgtctgcttc

SEQ ID NO: 5465107 - DNA, 25 bp, Homo sapien
ctggggccactgaaactcatgtctg

SEQ ID NO: 5465108 - DNA, 25 bp, Homo sapien
gcacctttgcttgtcactactctca

SEQ ID NO: 5465109 - DNA, 25 bp, Homo sapien
cactgaaactcatgtctgcttcttt

SEQ ID NO: 5465110 - DNA, 25 bp, Homo sapien
actgcatttgctaagccaggggtac

SEQ ID NO: 5465111 - DNA, 25 bp, Homo sapien
gcaaatgtcacggttgaggcatctg

SEQ ID NO: 5465112 - DNA, 25 bp, Homo sapien
catttgctaagccaggggtaccagg

SEQ ID NO: 5465113 - DNA, 25 bp, Homo sapien
tgtcacggttgaggcatctgccaaa

SEQ ID NO: 5465114 - DNA, 25 bp, Homo sapien
cttctccagttccatcgagggttgg

SEQ ID NO: 5465115 - DNA, 25 bp, Homo sapien
tatggcaactccctctgattcatgt

SEQ ID NO: 5465116 - DNA, 25 bp, Homo sapien
cacctgccctgagcaaatgtcgagc

SEQ ID NO: 5465117 - DNA, 25 bp, Homo sapien
taagccaaatcttcgagaccacctg

SEQ ID NO: 5465118 - DNA, 25 bp, Homo sapien
cccaaatcgaatatgagtgcccaat

SEQ ID NO: 5465119 - DNA, 25 bp, Homo sapien
atttaacaattggccttgccgcctc

SEQ ID NO: 5465120 - DNA, 25 bp, Homo sapien
tatgagtgcccaatctgtatgcaac

SEQ ID NO: 5465121 - DNA, 25 bp, Homo sapien
tatgcaactgatctgaatttaacaa

SEQ ID NO: 5465122 - DNA, 25 bp, Homo sapien
gacttctccaatcctctggccaggg

SEQ ID NO: 5465123 - DNA, 25 bp, Homo sapien
tcctcctttaacgagacctcagaag

SEQ ID NO: 5465124 - DNA, 25 bp, Homo sapien
tacactcatgccgtagcaacaggag

SEQ ID NO: 5465125 - DNA, 25 bp, Homo sapien
tgatgttgtccaagagcagcaaggc

SEQ ID NO: 5465126 - DNA, 25 bp, Homo sapien
tcattctgaccaagtgcctggtgtt

SEQ ID NO: 5465127 - DNA, 25 bp, Homo sapien
catggaaatagtatttagacttctc

SEQ ID NO: 5465128 - DNA, 25 bp, Homo sapien
tgtgagtaggtgttctgtgttacac

SEQ ID NO: 5465129 - DNA, 25 bp, Homo sapien
aagaaggatacttgttgtgtgagta

SEQ ID NO: 5465130 - DNA, 25 bp, Homo sapien
agagctgttcagtgaaaatcagcat

SEQ ID NO: 5465131 - DNA, 25 bp, Homo sapien
tagagctgttcagtgaaaatcagca

SEQ ID NO: 5465132 - DNA, 25 bp, Homo sapien
cgtatagagctgttcagtgaaaatc

SEQ ID NO: 5465133 - DNA, 25 bp, Homo sapien
tatagagctgttcagtgaaaatcag

SEQ ID NO: 5465134 - DNA, 25 bp, Homo sapien
ctataccactgggtccaaggaaggc

SEQ ID NO: 5465135 - DNA, 25 bp, Homo sapien
accactgggtccaaggaaggcacac

SEQ ID NO: 5465136 - DNA, 25 bp, Homo sapien
taccactgggtccaaggaaggcaca

SEQ ID NO: 5465137 - DNA, 25 bp, Homo sapien
tataccactgggtccaaggaaggca

SEQ ID NO: 5465138 - DNA, 25 bp, Homo sapien
aattgccgatttccagttggcccct

SEQ ID NO: 5465139 - DNA, 25 bp, Homo sapien
tgccgatttccagttggcccctcat

SEQ ID NO: 5465140 - DNA, 25 bp, Homo sapien
ttaaaattgccgatttccagttggc

SEQ ID NO: 5465141 - DNA, 25 bp, Homo sapien
taaaattgccgatttccagttggcc

SEQ ID NO: 5465142 - DNA, 25 bp, Homo sapien
acctgaagcaggtattaaggctaaa

SEQ ID NO: 5465143 - DNA, 25 bp, Homo sapien
acactcagactgagaatgtttcagg

SEQ ID NO: 5465144 - DNA, 25 bp, Homo sapien
tcctcaaaggtgataaaacgaacag

SEQ ID NO: 5465145 - DNA, 25 bp, Homo sapien
gaaacactcagactgagaatgtttc

SEQ ID NO: 5465146 - DNA, 25 bp, Homo sapien
caaatgtcatgttcttctggaataa

SEQ ID NO: 5465147 - DNA, 25 bp, Homo sapien
aaatgtcatgttcttctggaataaa

SEQ ID NO: 5465148 - DNA, 25 bp, Homo sapien
tagtactacagagggtctcaacagg

SEQ ID NO: 5465149 - DNA, 25 bp, Homo sapien
cacctgagccagttttgcaaagaaa

SEQ ID NO: 5465150 - DNA, 25 bp, Homo sapien
cacaggtattaaggtcatgaatcca

SEQ ID NO: 5465151 - DNA, 25 bp, Homo sapien
gggatctgagatggctctcccctac

SEQ ID NO: 5465152 - DNA, 25 bp, Homo sapien
ctaaagttatgtgggtaggcagcca

SEQ ID NO: 5465153 - DNA, 25 bp, Homo sapien
gacacactttggttcagcgagattg

SEQ ID NO: 5465154 - DNA, 25 bp, Homo sapien
cacccagtaggagagttaaacacgt

SEQ ID NO: 5465155 - DNA, 25 bp, Homo sapien
caagatgcatggacacgtttcctag

SEQ ID NO: 5465156 - DNA, 25 bp, Homo sapien
tttcccagccgatgcaccccaaaca

SEQ ID NO: 5465157 - DNA, 25 bp, Homo sapien
gagtggattcttcacggctttccca

SEQ ID NO: 5465158 - DNA, 25 bp, Homo sapien
gcaaggccagccctacagcaatgca

SEQ ID NO: 5465159 - DNA, 25 bp, Homo sapien
caaacaccaacgatccaagacctgt

SEQ ID NO: 5465160 - DNA, 25 bp, Homo sapien
aaacaacgcgtcctatagggcaagt

SEQ ID NO: 5465161 - DNA, 25 bp, Homo sapien
tgctcgtggatctctcttggaaaca

SEQ ID NO: 5465162 - DNA, 25 bp, Homo sapien
gggaccgtgcatctttgctcgtgga

SEQ ID NO: 5465163 - DNA, 25 bp, Homo sapien
aggaagatgacaagagcctctcttg

SEQ ID NO: 5465164 - DNA, 25 bp, Homo sapien
tgatcaatggaccagcaggttccaa

SEQ ID NO: 5465165 - DNA, 25 bp, Homo sapien
tgttctgtttcataagcccctttgc

SEQ ID NO: 5465166 - DNA, 25 bp, Homo sapien
catggacttttgcaattgagcactg

SEQ ID NO: 5465167 - DNA, 25 bp, Homo sapien
gagcactggcggctttacattgttc

SEQ ID NO: 5465168 - DNA, 25 bp, Homo sapien
tctactgaaaactctaagtcttgac

SEQ ID NO: 5465169 - DNA, 25 bp, Homo sapien
actgaaaactctaagtcttgactgt

SEQ ID NO: 5465170 - DNA, 25 bp, Homo sapien
tgaaaactctaagtcttgactgttc

SEQ ID NO: 5465171 - DNA, 25 bp, Homo sapien
tactgaaaactctaagtcttgactg

SEQ ID NO: 5465172 - DNA, 25 bp, Homo sapien
tcttgctgacaccaagatcccctgg

SEQ ID NO: 5465173 - DNA, 25 bp, Homo sapien
tttcttgctgacaccaagatcccct

SEQ ID NO: 5465174 - DNA, 25 bp, Homo sapien
ttcttgctgacaccaagatcccctg

SEQ ID NO: 5465175 - DNA, 25 bp, Homo sapien
gagattcaggcatatccctgtggcc

SEQ ID NO: 5465176 - DNA, 25 bp, Homo sapien
aattaggaccgtgagcacagagcag

SEQ ID NO: 5465177 - DNA, 25 bp, Homo sapien
tcaggcctacatcacaaattaggac

SEQ ID NO: 5465178 - DNA, 25 bp, Homo sapien
ccttgagattcaggcatatccctgt

SEQ ID NO: 5465179 - DNA, 25 bp, Homo sapien
cagatgaaaccaaagtatgccttct

SEQ ID NO: 5465180 - DNA, 25 bp, Homo sapien
agatgaaaccaaagtatgccttctt

SEQ ID NO: 5465181 - DNA, 25 bp, Homo sapien
tgaaaccaaagtatgccttctttgg

SEQ ID NO: 5465182 - DNA, 25 bp, Homo sapien
gatgaaaccaaagtatgccttcttt

SEQ ID NO: 5465183 - DNA, 25 bp, Homo sapien
gattgattgaatctttgacgtgatt

SEQ ID NO: 5465184 - DNA, 25 bp, Homo sapien
gacgtgattcaccagatgttttagc

SEQ ID NO: 5465185 - DNA, 25 bp, Homo sapien
gtgattcaccagatgttttagcctc

SEQ ID NO: 5465186 - DNA, 25 bp, Homo sapien
tcaccagatgttttagcctcttgga

SEQ ID NO: 5465187 - DNA, 25 bp, Homo sapien
ggtgctcctaactcttctggcattt

SEQ ID NO: 5465188 - DNA, 25 bp, Homo sapien
cgcctccccttatcttcagtgaagg

SEQ ID NO: 5465189 - DNA, 25 bp, Homo sapien
cagcctctggttcatccctgaggct

SEQ ID NO: 5465190 - DNA, 25 bp, Homo sapien
catttgggcctaagcagtcctgaga

SEQ ID NO: 5465191 - DNA, 25 bp, Homo sapien
gaacacagctgaattcgagaactcc

SEQ ID NO: 5465192 - DNA, 25 bp, Homo sapien
ggcacaggtaaaagtgttgatctta

SEQ ID NO: 5465193 - DNA, 25 bp, Homo sapien
ccaggtgcatatgaggacttgtctt

SEQ ID NO: 5465194 - DNA, 25 bp, Homo sapien
aaatgggagactccgctctgccagg

SEQ ID NO: 5465195 - DNA, 25 bp, Homo sapien
aagtctaaggggactgattgtgagt

SEQ ID NO: 5465196 - DNA, 25 bp, Homo sapien
caatcttctgagtaaagtctaaggg

SEQ ID NO: 5465197 - DNA, 25 bp, Homo sapien
ctgattgtgagtaagctgacagcaa

SEQ ID NO: 5465198 - DNA, 25 bp, Homo sapien
gggatgtgtccaggtgtagataggg

SEQ ID NO: 5465199 - DNA, 25 bp, Homo sapien
ccatgtctgagtatcagtgagaaga

SEQ ID NO: 5465200 - DNA, 25 bp, Homo sapien
aaataacatccatgtctgagtatca

SEQ ID NO: 5465201 - DNA, 25 bp, Homo sapien
cactctctcctaattgagtcagcat

SEQ ID NO: 5465202 - DNA, 25 bp, Homo sapien
gagtatcagtgagaagatttatcca

SEQ ID NO: 5465203 - DNA, 25 bp, Homo sapien
ccagaagttctgaagtggatactga

SEQ ID NO: 5465204 - DNA, 25 bp, Homo sapien
tggatactgaagaaggagatttcct

SEQ ID NO: 5465205 - DNA, 25 bp, Homo sapien
gaaatgctctagcaacacgttgtgg

SEQ ID NO: 5465206 - DNA, 25 bp, Homo sapien
taaaaaccgagacaactgaaatgct

SEQ ID NO: 5465207 - DNA, 25 bp, Homo sapien
taaggcttataggtcttcctgaaat

SEQ ID NO: 5465208 - DNA, 25 bp, Homo sapien
tcccatttaaggcttataggtcttc

SEQ ID NO: 5465209 - DNA, 25 bp, Homo sapien
catttaaggcttataggtcttcctg

SEQ ID NO: 5465210 - DNA, 25 bp, Homo sapien
aggcttataggtcttcctgaaatac

SEQ ID NO: 5465211 - DNA, 25 bp, Homo sapien
tcacaattaggtacttggaatttat

SEQ ID NO: 5465212 - DNA, 25 bp, Homo sapien
cttcacaattaggtacttggaattt

SEQ ID NO: 5465213 - DNA, 25 bp, Homo sapien
ccttcacaattaggtacttggaatt

SEQ ID NO: 5465214 - DNA, 25 bp, Homo sapien
cacaattaggtacttggaatttatt

SEQ ID NO: 5465215 - DNA, 25 bp, Homo sapien
tccaaacatccttgacagaaacaca

SEQ ID NO: 5465216 - DNA, 25 bp, Homo sapien
aggtgaggaaacgtggctttgtcca

SEQ ID NO: 5465217 - DNA, 25 bp, Homo sapien
gaggaaacgtggctttgtccaaaca

SEQ ID NO: 5465218 - DNA, 25 bp, Homo sapien
ccaaatcctgtccaaccctgcagga

SEQ ID NO: 5465219 - DNA, 25 bp, Homo sapien
cctttgagcaaagttgcccaacttc

SEQ ID NO: 5465220 - DNA, 25 bp, Homo sapien
agaaaagtttccaaggatcgtagcg

SEQ ID NO: 5465221 - DNA, 25 bp, Homo sapien
ccaaggatcgtagcgctctcctttg

SEQ ID NO: 5465222 - DNA, 25 bp, Homo sapien
acttctgtctcacgggggcctgcct

SEQ ID NO: 5465223 - DNA, 25 bp, Homo sapien
cttggaaacctgcatcagttgcaaa

SEQ ID NO: 5465224 - DNA, 25 bp, Homo sapien
acttggatttggcaacacactgtcc

SEQ ID NO: 5465225 - DNA, 25 bp, Homo sapien
ctgtgtgagaaggtcctgctcccat

SEQ ID NO: 5465226 - DNA, 25 bp, Homo sapien
ctcaggtgagttacagaagcccaaa

SEQ ID NO: 5465227 - DNA, 25 bp, Homo sapien
ttttctcagacgtttccaacactct

SEQ ID NO: 5465228 - DNA, 25 bp, Homo sapien
tgcaaattcacagtcctttgatcct

SEQ ID NO: 5465229 - DNA, 25 bp, Homo sapien
caacactctcgtaattgcaaattca

SEQ ID NO: 5465230 - DNA, 25 bp, Homo sapien
ctttgatccttgtcatccctgcaga

SEQ ID NO: 5465231 - DNA, 25 bp, Homo sapien
ggtaagttgtgtgttgacaaatgct

SEQ ID NO: 5465232 - DNA, 25 bp, Homo sapien
accatcatctacaattctcacactt

SEQ ID NO: 5465233 - DNA, 25 bp, Homo sapien
aaatgcttgtgtgttggtaagttgt

SEQ ID NO: 5465234 - DNA, 25 bp, Homo sapien
tgtgttgatgtgttgatgaccacca

SEQ ID NO: 5465235 - DNA, 25 bp, Homo sapien
tcctcccttcttcctcttcttcctc

SEQ ID NO: 5465236 - DNA, 25 bp, Homo sapien
tcccttcttcctcttcttcctccat

SEQ ID NO: 5465237 - DNA, 25 bp, Homo sapien
ctcctttgtaaggccttcttcattt

SEQ ID NO: 5465238 - DNA, 25 bp, Homo sapien
tcttcattttcctcccttcttcctc

SEQ ID NO: 5465239 - DNA, 25 bp, Homo sapien
agcactgagcagcccgtgacaaatc

SEQ ID NO: 5465240 - DNA, 25 bp, Homo sapien
agcccgtgacaaatctcatcactgg

SEQ ID NO: 5465241 - DNA, 25 bp, Homo sapien
gagcagcccgtgacaaatctcatca

SEQ ID NO: 5465242 - DNA, 25 bp, Homo sapien
actgagcagcccgtgacaaatctca

SEQ ID NO: 5465243 - DNA, 25 bp, Homo sapien
tatttccagacacttgcttacggga

SEQ ID NO: 5465244 - DNA, 25 bp, Homo sapien
tggcatgcatgtcccctctagtata

SEQ ID NO: 5465245 - DNA, 25 bp, Homo sapien
gctaatccataaggcgctatttcca

SEQ ID NO: 5465246 - DNA, 25 bp, Homo sapien
cctggaaatatgctgaagagtctga

SEQ ID NO: 5465247 - DNA, 25 bp, Homo sapien
ccaatgcatcataggtagggttgaa

SEQ ID NO: 5465248 - DNA, 25 bp, Homo sapien
tgtaatatgtctccctgcgtgcaaa

SEQ ID NO: 5465249 - DNA, 25 bp, Homo sapien
gggttgaaagtactggccacacatt

SEQ ID NO: 5465250 - DNA, 25 bp, Homo sapien
tctccttaagttcctgccatgccag

SEQ ID NO: 5465251 - DNA, 25 bp, Homo sapien
caatcctgaccggtggtccccaagt

SEQ ID NO: 5465252 - DNA, 25 bp, Homo sapien
tcaaaccaatcctgaccggtggtcc

SEQ ID NO: 5465253 - DNA, 25 bp, Homo sapien
aatcctgaccggtggtccccaagtg

SEQ ID NO: 5465254 - DNA, 25 bp, Homo sapien
cttgctcaaaccaatcctgaccggt

SEQ ID NO: 5465255 - DNA, 25 bp, Homo sapien
ttagaaaacatcctatggctgccac

SEQ ID NO: 5465256 - DNA, 25 bp, Homo sapien
cagcctgcaatgagacggaccagag

SEQ ID NO: 5465257 - DNA, 25 bp, Homo sapien
caggcaccaagaactagtggagatg

SEQ ID NO: 5465258 - DNA, 25 bp, Homo sapien
ggcacctcggcacgtcttcattgat

SEQ ID NO: 5465259 - DNA, 25 bp, Homo sapien
tgccattgaccttgttttgtaactg

SEQ ID NO: 5465260 - DNA, 25 bp, Homo sapien
ttttgtaactggtacatcagcccct

SEQ ID NO: 5465261 - DNA, 25 bp, Homo sapien
ttcagtgactggtgcacaggcactg

SEQ ID NO: 5465262 - DNA, 25 bp, Homo sapien
gactggtgcacaggcactggattct

SEQ ID NO: 5465263 - DNA, 25 bp, Homo sapien
ctgtacacaaggagcgggcatcagc

SEQ ID NO: 5465264 - DNA, 25 bp, Homo sapien
ggagcgggcatcagcacacccacgg

SEQ ID NO: 5465265 - DNA, 25 bp, Homo sapien
acttggtgaagactgtacacaagga

SEQ ID NO: 5465266 - DNA, 25 bp, Homo sapien
tggtatcttgaattcctcctcgaag

SEQ ID NO: 5465267 - DNA, 25 bp, Homo sapien
ttaccaccagtaggcgtaggggtgc

SEQ ID NO: 5465268 - DNA, 25 bp, Homo sapien
taggggtgctaaaggcagccacaaa

SEQ ID NO: 5465269 - DNA, 25 bp, Homo sapien
cgtaggggtgctaaaggcagccaca

SEQ ID NO: 5465270 - DNA, 25 bp, Homo sapien
caccagtaggcgtaggggtgctaaa

SEQ ID NO: 5465271 - DNA, 25 bp, Homo sapien
gtaggtggagttggtgcaggagaac

SEQ ID NO: 5465272 - DNA, 25 bp, Homo sapien
tccagatcctgtgctggtaacgtag

SEQ ID NO: 5465273 - DNA, 25 bp, Homo sapien
tgaaataatctgcatgtgagctcca

SEQ ID NO: 5465274 - DNA, 25 bp, Homo sapien
gaaataatctgcatgtgagctccag

SEQ ID NO: 5465275 - DNA, 25 bp, Homo sapien
accatgacacggtaggtgcataaga

SEQ ID NO: 5465276 - DNA, 25 bp, Homo sapien
acagagaaagctcagagtagctctg

SEQ ID NO: 5465277 - DNA, 25 bp, Homo sapien
aaaaccatgacacggtaggtgcata

SEQ ID NO: 5465278 - DNA, 25 bp, Homo sapien
ctgaaaaccatgacacggtaggtgc

SEQ ID NO: 5465279 - DNA, 25 bp, Homo sapien
gaggcccagagcaatactgagttga

SEQ ID NO: 5465280 - DNA, 25 bp, Homo sapien
aggcccagagcaatactgagttgaa

SEQ ID NO: 5465281 - DNA, 25 bp, Homo sapien
ttgaggcccagagcaatactgagtt

SEQ ID NO: 5465282 - DNA, 25 bp, Homo sapien
tgaggcccagagcaatactgagttg

SEQ ID NO: 5465283 - DNA, 25 bp, Homo sapien
ccagtaaacgtggagtgagtcatcc

SEQ ID NO: 5465284 - DNA, 25 bp, Homo sapien
tgtcaataagttcgctcagaggcag

SEQ ID NO: 5465285 - DNA, 25 bp, Homo sapien
tcatcctggtgcactgtaagcttcc

SEQ ID NO: 5465286 - DNA, 25 bp, Homo sapien
aattgagcacaataagggccttcct

SEQ ID NO: 5465287 - DNA, 25 bp, Homo sapien
ttggacagggcctcattgccagccc

SEQ ID NO: 5465288 - DNA, 25 bp, Homo sapien
acaacaagaaaattgcgctcccggc

SEQ ID NO: 5465289 - DNA, 25 bp, Homo sapien
tgcgctcccggccaaagtgtgtgtt

SEQ ID NO: 5465290 - DNA, 25 bp, Homo sapien
ggtcctgaggctatacggtggcttc

SEQ ID NO: 5465291 - DNA, 25 bp, Homo sapien
ccagaacacccactgttcaggaaga

SEQ ID NO: 5465292 - DNA, 25 bp, Homo sapien
tgatgagagatcatctgccttgcag

SEQ ID NO: 5465293 - DNA, 25 bp, Homo sapien
aatatccatccatcaagtgtgcagg

SEQ ID NO: 5465294 - DNA, 25 bp, Homo sapien
caccacggaaaccatccacaaggga

SEQ ID NO: 5465295 - DNA, 25 bp, Homo sapien
ggcacgtgggtgattgcaatactct

SEQ ID NO: 5465296 - DNA, 25 bp, Homo sapien
tgattgcaatactctggatgtgcac

SEQ ID NO: 5465297 - DNA, 25 bp, Homo sapien
cctggcacgtgggtgattgcaatac

SEQ ID NO: 5465298 - DNA, 25 bp, Homo sapien
cgtgggtgattgcaatactctggat

SEQ ID NO: 5465299 - DNA, 25 bp, Homo sapien
ttccacagccgtcgcttggattcac

SEQ ID NO: 5465300 - DNA, 25 bp, Homo sapien
ccacagccgtcgcttggattcactg

SEQ ID NO: 5465301 - DNA, 25 bp, Homo sapien
cttccacagccgtcgcttggattca

SEQ ID NO: 5465302 - DNA, 25 bp, Homo sapien
acagccgtcgcttggattcactggc

SEQ ID NO: 5465303 - DNA, 25 bp, Homo sapien
aagacagtgccgagaatgggtggca

SEQ ID NO: 5465304 - DNA, 25 bp, Homo sapien
tagaagacagtgccgagaatgggtg

SEQ ID NO: 5465305 - DNA, 25 bp, Homo sapien
gaagacagtgccgagaatgggtggc

SEQ ID NO: 5465306 - DNA, 25 bp, Homo sapien
gacagtgccgagaatgggtggcaaa

SEQ ID NO: 5465307 - DNA, 25 bp, Homo sapien
tccctttgtctcttagcgttgccaa

SEQ ID NO: 5465308 - DNA, 25 bp, Homo sapien
tgtggctattgtgcctgtttttctc

SEQ ID NO: 5465309 - DNA, 25 bp, Homo sapien
ttcagtgactactgctgtggctatt

SEQ ID NO: 5465310 - DNA, 25 bp, Homo sapien
cgttgccaaacacgcgcagatcaga

SEQ ID NO: 5465311 - DNA, 25 bp, Homo sapien
ggttatagacccctgaacacaaata

SEQ ID NO: 5465312 - DNA, 25 bp, Homo sapien
cccatgtcaggggatttgaagacat

SEQ ID NO: 5465313 - DNA, 25 bp, Homo sapien
tatagacccctgaacacaaatatcc

SEQ ID NO: 5465314 - DNA, 25 bp, Homo sapien
tttcttggttatagacccctgaaca

SEQ ID NO: 5465315 - DNA, 25 bp, Homo sapien
gcttggtgttatcatgggtgttaca

SEQ ID NO: 5465316 - DNA, 25 bp, Homo sapien
ggtgttacacaccaaagtccatgga

SEQ ID NO: 5465317 - DNA, 25 bp, Homo sapien
caccaaagtccatggagacattgga

SEQ ID NO: 5465318 - DNA, 25 bp, Homo sapien
tgccttcgtggcccagtgacaaatg

SEQ ID NO: 5465319 - DNA, 25 bp, Homo sapien
tttatactgctattttgaaagcctt

SEQ ID NO: 5465320 - DNA, 25 bp, Homo sapien
tttgaaagcctttagaatttgattc

SEQ ID NO: 5465321 - DNA, 25 bp, Homo sapien
gaaagcctttagaatttgattctct

SEQ ID NO: 5465322 - DNA, 25 bp, Homo sapien
ttgttcatttatactgctattttga

SEQ ID NO: 5465323 - DNA, 25 bp, Homo sapien
tcagggcacatgcaaaaggccttag

SEQ ID NO: 5465324 - DNA, 25 bp, Homo sapien
gatagttcctggatagcccctttca

SEQ ID NO: 5465325 - DNA, 25 bp, Homo sapien
gaggctacagcatttcagaggactt

SEQ ID NO: 5465326 - DNA, 25 bp, Homo sapien
tccatcgttggagtcctgtccagcc

SEQ ID NO: 5465327 - DNA, 25 bp, Homo sapien
tgttttcctgagatacatacagctg

SEQ ID NO: 5465328 - DNA, 25 bp, Homo sapien
ttagtaacagactgttttcctgaga

SEQ ID NO: 5465329 - DNA, 25 bp, Homo sapien
agatagactctatttttagtaacag

SEQ ID NO: 5465330 - DNA, 25 bp, Homo sapien
taacagactgttttcctgagataca

SEQ ID NO: 5465331 - DNA, 25 bp, Homo sapien
caaagctcatattctcgtccttcct

SEQ ID NO: 5465332 - DNA, 25 bp, Homo sapien
ctttttcacaaagctcatattctcg

SEQ ID NO: 5465333 - DNA, 25 bp, Homo sapien
agctcatattctcgtccttcctttt

SEQ ID NO: 5465334 - DNA, 25 bp, Homo sapien
ttcacaaagctcatattctcgtcct

SEQ ID NO: 5465335 - DNA, 25 bp, Homo sapien
ggtgatgggcaccagaaatcaatgt

SEQ ID NO: 5465336 - DNA, 25 bp, Homo sapien
aatcaatgtaacactccccttcaca

SEQ ID NO: 5465337 - DNA, 25 bp, Homo sapien
gcttttaactcatttcctaagctct

SEQ ID NO: 5465338 - DNA, 25 bp, Homo sapien
cctaagctctcttggggacctggtg

SEQ ID NO: 5465339 - DNA, 25 bp, Homo sapien
cttctcaaaagactcctacacccca

SEQ ID NO: 5465340 - DNA, 25 bp, Homo sapien
ttctcaaaagactcctacaccccat

SEQ ID NO: 5465341 - DNA, 25 bp, Homo sapien
caaccatggaatcttgcggagacca

SEQ ID NO: 5465342 - DNA, 25 bp, Homo sapien
caagtactaccatttgcactttcac

SEQ ID NO: 5465343 - DNA, 25 bp, Homo sapien
gcccagactacagtttggaagttgt

SEQ ID NO: 5465344 - DNA, 25 bp, Homo sapien
ggaatcttgcggagaccatttcctc

SEQ ID NO: 5465345 - DNA, 25 bp, Homo sapien
gatagtccacactggttagatacat

SEQ ID NO: 5465346 - DNA, 25 bp, Homo sapien
atacatggagatgaatgactttcaa

SEQ ID NO: 5465347 - DNA, 25 bp, Homo sapien
cctgatagtccacactggttagata

SEQ ID NO: 5465348 - DNA, 25 bp, Homo sapien
tcccctccctgatagtccacactgg

SEQ ID NO: 5465349 - DNA, 25 bp, Homo sapien
ttagaggcactagtgcctctgacag

SEQ ID NO: 5465350 - DNA, 25 bp, Homo sapien
aattagaggcactagtgcctctgac

SEQ ID NO: 5465351 - DNA, 25 bp, Homo sapien
aaaattagaggcactagtgcctctg

SEQ ID NO: 5465352 - DNA, 25 bp, Homo sapien
agaggcactagtgcctctgacagtc

SEQ ID NO: 5465353 - DNA, 25 bp, Homo sapien
tttgtggtccatgaaactgttagct

SEQ ID NO: 5465354 - DNA, 25 bp, Homo sapien
caatgtaccaattagaaatagtgct

SEQ ID NO: 5465355 - DNA, 25 bp, Homo sapien
atgtaccaattagaaatagtgctgc

SEQ ID NO: 5465356 - DNA, 25 bp, Homo sapien
gaaactgttagctttgtgttactta

SEQ ID NO: 5465357 - DNA, 25 bp, Homo sapien
ggcaagagcttcctctttctctttc

SEQ ID NO: 5465358 - DNA, 25 bp, Homo sapien
caagagcttcctctttctctttcat

SEQ ID NO: 5465359 - DNA, 25 bp, Homo sapien
atggcaagagcttcctctttctctt

SEQ ID NO: 5465360 - DNA, 25 bp, Homo sapien
gcaagagcttcctctttctctttca

SEQ ID NO: 5465361 - DNA, 25 bp, Homo sapien
tccccaaagtctgggagattggagt

SEQ ID NO: 5465362 - DNA, 25 bp, Homo sapien
gattggagtgtgaaacggtttggct

SEQ ID NO: 5465363 - DNA, 25 bp, Homo sapien
gaggaacccagtgtgagataattaa

SEQ ID NO: 5465364 - DNA, 25 bp, Homo sapien
tggaaggttgaaaagaccctccgca

SEQ ID NO: 5465365 - DNA, 25 bp, Homo sapien
tcaactccatcgctggggtacggaa

SEQ ID NO: 5465366 - DNA, 25 bp, Homo sapien
gctgagagtttctttgtgtcacgaa

SEQ ID NO: 5465367 - DNA, 25 bp, Homo sapien
caacaaggagttgtttgtcagccag

SEQ ID NO: 5465368 - DNA, 25 bp, Homo sapien
aaatagatttcccattagtagcaac

SEQ ID NO: 5465369 - DNA, 25 bp, Homo sapien
acagaattcactttcctgcgactca

SEQ ID NO: 5465370 - DNA, 25 bp, Homo sapien
tggacagaattcactttcctgcgac

SEQ ID NO: 5465371 - DNA, 25 bp, Homo sapien
tgtcttcctggacagaattcacttt

SEQ ID NO: 5465372 - DNA, 25 bp, Homo sapien
tcctggacagaattcactttcctgc

SEQ ID NO: 5465373 - DNA, 25 bp, Homo sapien
gcagtttgtttcatgtccagcaatc

SEQ ID NO: 5465374 - DNA, 25 bp, Homo sapien
ccagcaatcaaagacattaaggacc

SEQ ID NO: 5465375 - DNA, 25 bp, Homo sapien
taaatgttttggtagcaatacagac

SEQ ID NO: 5465376 - DNA, 25 bp, Homo sapien
cactacaattctaagtaccagacag

SEQ ID NO: 5465377 - DNA, 25 bp, Homo sapien
gacttacagaactacggaaggacca

SEQ ID NO: 5465378 - DNA, 25 bp, Homo sapien
tatatgtttaatttggcccaccctg

SEQ ID NO: 5465379 - DNA, 25 bp, Homo sapien
tagtgggagacacacaacaggctac

SEQ ID NO: 5465380 - DNA, 25 bp, Homo sapien
tcctcgagtagggttaagcacctcc

SEQ ID NO: 5465381 - DNA, 25 bp, Homo sapien
aaggaaacccttcgtgtcgccagag

SEQ ID NO: 5465382 - DNA, 25 bp, Homo sapien
gaatgaacagtaacacgggcctcag

SEQ ID NO: 5465383 - DNA, 25 bp, Homo sapien
cacccagggagcttaggcgttcaga

SEQ ID NO: 5465384 - DNA, 25 bp, Homo sapien
aatgttgctcctcccaatagtaggg

SEQ ID NO: 5465385 - DNA, 25 bp, Homo sapien
taatcactaataggccagcacccac

SEQ ID NO: 5465386 - DNA, 25 bp, Homo sapien
cacagactcagagggagcctgatat

SEQ ID NO: 5465387 - DNA, 25 bp, Homo sapien
gacacatagccctggtcataatgaa

SEQ ID NO: 5465388 - DNA, 25 bp, Homo sapien
taacattttcactgctggctaggtg

SEQ ID NO: 5465389 - DNA, 25 bp, Homo sapien
gcaggaaacttacagaagtggtggg

SEQ ID NO: 5465390 - DNA, 25 bp, Homo sapien
taatttctggttagcaacagctcac

SEQ ID NO: 5465391 - DNA, 25 bp, Homo sapien
aacagctcacttgccttaccatctt

SEQ ID NO: 5465392 - DNA, 25 bp, Homo sapien
aaaaaatggtgggaatagagcagga

SEQ ID NO: 5465393 - DNA, 25 bp, Homo sapien
gagcttttgaattgaaggaatcacc

SEQ ID NO: 5465394 - DNA, 25 bp, Homo sapien
ccagaatttacaaacgcccacattg

SEQ ID NO: 5465395 - DNA, 25 bp, Homo sapien
tttacaatacatgcaatggaagact

SEQ ID NO: 5465396 - DNA, 25 bp, Homo sapien
gcccacattgttcattccaaagaga

SEQ ID NO: 5465397 - DNA, 25 bp, Homo sapien
gactcattattctggtgtcacagtg

SEQ ID NO: 5465398 - DNA, 25 bp, Homo sapien
cattctctcatgacacggtggtggg

SEQ ID NO: 5465399 - DNA, 25 bp, Homo sapien
ttcgcttggcacaatatagaacgtg

SEQ ID NO: 5465400 - DNA, 25 bp, Homo sapien
catggcctattgtcttacaggaaaa

SEQ ID NO: 5465401 - DNA, 25 bp, Homo sapien
gaaaggcgaccatcaagcctgtcag

SEQ ID NO: 5465402 - DNA, 25 bp, Homo sapien
tatgagaggccatctcgctccagtt

SEQ ID NO: 5465403 - DNA, 25 bp, Homo sapien
aagtcagaccacacgtactctcagg

SEQ ID NO: 5465404 - DNA, 25 bp, Homo sapien
gaaggcagaccaaaacaacatttag

SEQ ID NO: 5465405 - DNA, 25 bp, Homo sapien
caagcatttgcatagacaaccctgg

SEQ ID NO: 5465406 - DNA, 25 bp, Homo sapien
tctgcagcggactgaggtaagaatc

SEQ ID NO: 5465407 - DNA, 25 bp, Homo sapien
ttttccataatagcccaggaatcag

SEQ ID NO: 5465408 - DNA, 25 bp, Homo sapien
tgactacccaattgtttctcaagca

SEQ ID NO: 5465409 - DNA, 25 bp, Homo sapien
gcccctaaacacagccactgacttg

SEQ ID NO: 5465410 - DNA, 25 bp, Homo sapien
cagccactgacttgccccacatcat

SEQ ID NO: 5465411 - DNA, 25 bp, Homo sapien
agggcccctaaacacagccactgac

SEQ ID NO: 5465412 - DNA, 25 bp, Homo sapien
aaacacagccactgacttgccccac

SEQ ID NO: 5465413 - DNA, 25 bp, Homo sapien
caaaagccggcatcaagaatctcat

SEQ ID NO: 5465414 - DNA, 25 bp, Homo sapien
tacaagaggatctcacagatagcaa

SEQ ID NO: 5465415 - DNA, 25 bp, Homo sapien
taaatctgggcacgtatgaaggcaa

SEQ ID NO: 5465416 - DNA, 25 bp, Homo sapien
tgaaggcaaccacttgcatgcatgc

SEQ ID NO: 5465417 - DNA, 25 bp, Homo sapien
aagaactatgcaggatgtcttcatc

SEQ ID NO: 5465418 - DNA, 25 bp, Homo sapien
ccgtaaaagaactatgcaggatgtc

SEQ ID NO: 5465419 - DNA, 25 bp, Homo sapien
tcctctgccacttccgtaaaagaac

SEQ ID NO: 5465420 - DNA, 25 bp, Homo sapien
cacttccgtaaaagaactatgcagg

SEQ ID NO: 5465421 - DNA, 25 bp, Homo sapien
tagggcttcccagatgtaccacata

SEQ ID NO: 5465422 - DNA, 25 bp, Homo sapien
tgtgccctgggaaagttggtcctct

SEQ ID NO: 5465423 - DNA, 25 bp, Homo sapien
taagctatggttcatgacatccctg

SEQ ID NO: 5465424 - DNA, 25 bp, Homo sapien
tccaaagctgcaacataagctatgg

SEQ ID NO: 5465425 - DNA, 25 bp, Homo sapien
tccttaggagacagggtagattctc

SEQ ID NO: 5465426 - DNA, 25 bp, Homo sapien
tgtttttgaccactagagaagctcc

SEQ ID NO: 5465427 - DNA, 25 bp, Homo sapien
tagcaagaatagcagggtaccagtc

SEQ ID NO: 5465428 - DNA, 25 bp, Homo sapien
tcttcctggaccacaattagcaaga

SEQ ID NO: 5465429 - DNA, 25 bp, Homo sapien
tgatcttctgattgtccccacaacc

SEQ ID NO: 5465430 - DNA, 25 bp, Homo sapien
gcaattactcaatattccagtggcc

SEQ ID NO: 5465431 - DNA, 25 bp, Homo sapien
gcttagggcctatttgacaaaagca

SEQ ID NO: 5465432 - DNA, 25 bp, Homo sapien
ccagtggcctttaactaactgctaa

SEQ ID NO: 5465433 - DNA, 25 bp, Homo sapien
cacagcccaggaggatgcgttttcc

SEQ ID NO: 5465434 - DNA, 25 bp, Homo sapien
tactggagggtacacaacacaaatc

SEQ ID NO: 5465435 - DNA, 25 bp, Homo sapien
taaattgacgggctgtcactgggac

SEQ ID NO: 5465436 - DNA, 25 bp, Homo sapien
tcaaaatcgatgtgcccagcctaaa

SEQ ID NO: 5465437 - DNA, 25 bp, Homo sapien
ttgggctctcaatttactctctgca

SEQ ID NO: 5465438 - DNA, 25 bp, Homo sapien
aaactgaacccaaaaggcatggctg

SEQ ID NO: 5465439 - DNA, 25 bp, Homo sapien
ggggagggcataacaaagaatgaca

SEQ ID NO: 5465440 - DNA, 25 bp, Homo sapien
tgctatgaccgagtctgagaggctc

SEQ ID NO: 5465441 - DNA, 25 bp, Homo sapien
ttccaacaagtagagctcctgagct

SEQ ID NO: 5465442 - DNA, 25 bp, Homo sapien
tgcacacacattcggagcagaagct

SEQ ID NO: 5465443 - DNA, 25 bp, Homo sapien
gagatgtttcaacagagcccacgcc

SEQ ID NO: 5465444 - DNA, 25 bp, Homo sapien
tagtactagaaaacgagcaagccag

SEQ ID NO: 5465445 - DNA, 25 bp, Homo sapien
ttttaatgcatccaacacataggag

SEQ ID NO: 5465446 - DNA, 25 bp, Homo sapien
tgtttttttaatgcatccaacacat

SEQ ID NO: 5465447 - DNA, 25 bp, Homo sapien
ttaatgcatccaacacataggagaa

SEQ ID NO: 5465448 - DNA, 25 bp, Homo sapien
ttttttaatgcatccaacacatagg

SEQ ID NO: 5465449 - DNA, 25 bp, Homo sapien
ggaactctacaaaacgcagaactgg

SEQ ID NO: 5465450 - DNA, 25 bp, Homo sapien
caggatcaacagaacgaagggcagg

SEQ ID NO: 5465451 - DNA, 25 bp, Homo sapien
tgggtcccagacacatacagagttt

SEQ ID NO: 5465452 - DNA, 25 bp, Homo sapien
gagtttcctgcatatcctgtacaag

SEQ ID NO: 5465453 - DNA, 25 bp, Homo sapien
ttgactctctgccagatgtcagtgt

SEQ ID NO: 5465454 - DNA, 25 bp, Homo sapien
ttgtgtgccctgagaatgtaagtgc

SEQ ID NO: 5465455 - DNA, 25 bp, Homo sapien
gtggctgctcctacatgtttgtttg

SEQ ID NO: 5465456 - DNA, 25 bp, Homo sapien
ggtgagcatcttgtgtgccctgaga

SEQ ID NO: 5465457 - DNA, 25 bp, Homo sapien
aagcagttttgtcttctgactttgt

SEQ ID NO: 5465458 - DNA, 25 bp, Homo sapien
aaagcagttttgtcttctgactttg

SEQ ID NO: 5465459 - DNA, 25 bp, Homo sapien
ggcagaggcgaagaacagaattcaa

SEQ ID NO: 5465460 - DNA, 25 bp, Homo sapien
ggggcagaggcgaagaacagaattc

SEQ ID NO: 5465461 - DNA, 25 bp, Homo sapien
gcttaaatcctcacttgagcggcgg

SEQ ID NO: 5465462 - DNA, 25 bp, Homo sapien
taggcgcttaaatcctcacttgagc

SEQ ID NO: 5465463 - DNA, 25 bp, Homo sapien
aatcctcacttgagcggcgggtgga

SEQ ID NO: 5465464 - DNA, 25 bp, Homo sapien
ctggcataggcgcttaaatcctcac

SEQ ID NO: 5465465 - DNA, 25 bp, Homo sapien
ccaaatccaggtctatgtagttaag

SEQ ID NO: 5465466 - DNA, 25 bp, Homo sapien
agagctgtggcgtttcacatcctcg

SEQ ID NO: 5465467 - DNA, 25 bp, Homo sapien
ctgtttgaagtccttgaccaaatcc

SEQ ID NO: 5465468 - DNA, 25 bp, Homo sapien
gggtgcactcctgagggcactgttt

SEQ ID NO: 5465469 - DNA, 25 bp, Homo sapien
cttgtgggtctgcacggatcacttt

SEQ ID NO: 5465470 - DNA, 25 bp, Homo sapien
aagtctcggagctatgcctccgccg

SEQ ID NO: 5465471 - DNA, 25 bp, Homo sapien
taggactgaggttcacccgggtgaa

SEQ ID NO: 5465472 - DNA, 25 bp, Homo sapien
tggcactctggttgcggttaggact

SEQ ID NO: 5465473 - DNA, 25 bp, Homo sapien
ctgcagcaatgcctgttcgcatgtc

SEQ ID NO: 5465474 - DNA, 25 bp, Homo sapien
gcaatgcctgttcgcatgtcagcat

SEQ ID NO: 5465475 - DNA, 25 bp, Homo sapien
ctgttcgcatgtcagcatagcttac

SEQ ID NO: 5465476 - DNA, 25 bp, Homo sapien
tgcctgttcgcatgtcagcatagct

SEQ ID NO: 5465477 - DNA, 25 bp, Homo sapien
ccgggtaggcctgcaaatgctagca

SEQ ID NO: 5465478 - DNA, 25 bp, Homo sapien
gggccagacaagtagccagactgat

SEQ ID NO: 5465479 - DNA, 25 bp, Homo sapien
gctggcgaggtgtccacgtagctct

SEQ ID NO: 5465480 - DNA, 25 bp, Homo sapien
tgcatggtcatgtagtcaccccggc

SEQ ID NO: 5465481 - DNA, 25 bp, Homo sapien
cgggccaggcggctattggtctgag

SEQ ID NO: 5465482 - DNA, 25 bp, Homo sapien
gtgtccacctttcgaggcagatggg

SEQ ID NO: 5465483 - DNA, 25 bp, Homo sapien
aggtaaggtgctggccttgggatcc

SEQ ID NO: 5465484 - DNA, 25 bp, Homo sapien
ctctcgggcccgaggtaaggtgctg

SEQ ID NO: 5465485 - DNA, 25 bp, Homo sapien
gcgctgggtgtgcttaaaggatctt

SEQ ID NO: 5465486 - DNA, 25 bp, Homo sapien
ccccactggtgacatgttcatgtag

SEQ ID NO: 5465487 - DNA, 25 bp, Homo sapien
catagagaaggcgaccagagctagt

SEQ ID NO: 5465488 - DNA, 25 bp, Homo sapien
tcctcagggccgtagtagcagtcgg

SEQ ID NO: 5465489 - DNA, 25 bp, Homo sapien
ggtgaggcaagacatgagagtggtg

SEQ ID NO: 5465490 - DNA, 25 bp, Homo sapien
ttccatagctggtcccggaagggac

SEQ ID NO: 5465491 - DNA, 25 bp, Homo sapien
acagctttccatagctggtcccgga

SEQ ID NO: 5465492 - DNA, 25 bp, Homo sapien
tcccggaagggacggcgttgctgct

SEQ ID NO: 5465493 - DNA, 25 bp, Homo sapien
gatgtgcctgccgagtgagttctct

SEQ ID NO: 5465494 - DNA, 25 bp, Homo sapien
ggcatgtagccatcatccgtgtgga

SEQ ID NO: 5465495 - DNA, 25 bp, Homo sapien
ttgccaccccgagacaaaatgtagt

SEQ ID NO: 5465496 - DNA, 25 bp, Homo sapien
gaaccgattatccagatctgcagca

SEQ ID NO: 5465497 - DNA, 25 bp, Homo sapien
tccggaaatcgcagggactggagcc

SEQ ID NO: 5465498 - DNA, 25 bp, Homo sapien
gaagcactagatcgccgtgggaaga

SEQ ID NO: 5465499 - DNA, 25 bp, Homo sapien
tgacactgcggaaggaactccggaa

SEQ ID NO: 5465500 - DNA, 25 bp, Homo sapien
tgctactggacgacagactgaccgg

SEQ ID NO: 5465501 - DNA, 25 bp, Homo sapien
tgcgtgatcggcgggtcagccccac

SEQ ID NO: 5465502 - DNA, 25 bp, Homo sapien
agtgcgtgatcggcgggtcagcccc

SEQ ID NO: 5465503 - DNA, 25 bp, Homo sapien
tcagtgcgtgatcggcgggtcagcc

SEQ ID NO: 5465504 - DNA, 25 bp, Homo sapien
ctcagtgcgtgatcggcgggtcagc

SEQ ID NO: 5465505 - DNA, 25 bp, Homo sapien
ctcttgctgcgagggcggaactcat

SEQ ID NO: 5465506 - DNA, 25 bp, Homo sapien
agaagttttccgagtggccacagcg

SEQ ID NO: 5465507 - DNA, 25 bp, Homo sapien
tggtggcccttagcacggttgtgca

SEQ ID NO: 5465508 - DNA, 25 bp, Homo sapien
caaagtgctcgtcccgggtgtagag

SEQ ID NO: 5465509 - DNA, 25 bp, Homo sapien
tggaggcagcagaaaccccgactct

SEQ ID NO: 5465510 - DNA, 25 bp, Homo sapien
tgagcagagggaggctccgaaaaac

SEQ ID NO: 5465511 - DNA, 25 bp, Homo sapien
tctggaagcagcgattcccgaggca

SEQ ID NO: 5465512 - DNA, 25 bp, Homo sapien
gagcgaagatgcatctctcgtcgcc

SEQ ID NO: 5465513 - DNA, 25 bp, Homo sapien
caaataccagctcagtcgcagagac

SEQ ID NO: 5465514 - DNA, 25 bp, Homo sapien
cagctcagtcgcagagaccgcggcg

SEQ ID NO: 5465515 - DNA, 25 bp, Homo sapien
gcccaaataccagctcagtcgcaga

SEQ ID NO: 5465516 - DNA, 25 bp, Homo sapien
accagccgcccaaataccagctcag

SEQ ID NO: 5465517 - DNA, 25 bp, Homo sapien
ttttccatgcgaaacgataccgggc

SEQ ID NO: 5465518 - DNA, 25 bp, Homo sapien
aagacgcctgttcctcgggaggcgc

SEQ ID NO: 5465519 - DNA, 25 bp, Homo sapien
tcctcggagagttgccgagagcccc

SEQ ID NO: 5465520 - DNA, 25 bp, Homo sapien
caaccaaaacaagcggcggcgtctg

SEQ ID NO: 5465521 - DNA, 25 bp, Homo sapien
ccccagatttgctgccgtgaggtac

SEQ ID NO: 5465522 - DNA, 25 bp, Homo sapien
gatccccagatttgctgccgtgagg

SEQ ID NO: 5465523 - DNA, 25 bp, Homo sapien
tgggatccccagatttgctgccgtg

SEQ ID NO: 5465524 - DNA, 25 bp, Homo sapien
cttgggatccccagatttgctgccg

SEQ ID NO: 5465525 - DNA, 25 bp, Homo sapien
agtttcccggggaggcctgctgatt

SEQ ID NO: 5465526 - DNA, 25 bp, Homo sapien
ctgaggggcggagcgagtttcccgg

SEQ ID NO: 5465527 - DNA, 25 bp, Homo sapien
gcctcggcccaatgcggctgagggg

SEQ ID NO: 5465528 - DNA, 25 bp, Homo sapien
tcagcagtcgaggcgctgggcatgc

SEQ ID NO: 5465529 - DNA, 25 bp, Homo sapien
ctgtggtgttgtccggtgtgactct

SEQ ID NO: 5465530 - DNA, 25 bp, Homo sapien
tacaagtgggcagagggttacccat

SEQ ID NO: 5465531 - DNA, 25 bp, Homo sapien
tgttgtccggtgtgactctacaagt

SEQ ID NO: 5465532 - DNA, 25 bp, Homo sapien
tggtgttgtccggtgtgactctaca

SEQ ID NO: 5465533 - DNA, 25 bp, Homo sapien
aaacactcatttaagtcgggtggct

SEQ ID NO: 5465534 - DNA, 25 bp, Homo sapien
cgggtggcttaatcataggtattgc

SEQ ID NO: 5465535 - DNA, 25 bp, Homo sapien
gacacttgtctaccttcctgccagt

SEQ ID NO: 5465536 - DNA, 25 bp, Homo sapien
ggtattgttgcctgacgtcctctca

SEQ ID NO: 5465537 - DNA, 25 bp, Homo sapien
tcatatgattgtggttcagaaggat

SEQ ID NO: 5465538 - DNA, 25 bp, Homo sapien
tattatacggacaagaaaatgatgc

SEQ ID NO: 5465539 - DNA, 25 bp, Homo sapien
gacttcttgatttgtggctccctta

SEQ ID NO: 5465540 - DNA, 25 bp, Homo sapien
caacaaatcacgtaggacaaaagag

SEQ ID NO: 5465541 - DNA, 25 bp, Homo sapien
tgggactctgcgataagccgccctc

SEQ ID NO: 5465542 - DNA, 25 bp, Homo sapien
cctccgcctaacaggcggtatctga

SEQ ID NO: 5465543 - DNA, 25 bp, Homo sapien
taacaggcggtatctgacccttcca

SEQ ID NO: 5465544 - DNA, 25 bp, Homo sapien
gttgtctgcgatagctcctgaagca

SEQ ID NO: 5465545 - DNA, 25 bp, Homo sapien
ctagtcttcgggtcccttgaacgca

SEQ ID NO: 5465546 - DNA, 25 bp, Homo sapien
gcttgtttgccttacgcgtagtcag

SEQ ID NO: 5465547 - DNA, 25 bp, Homo sapien
cttacgcgtagtcagcggccagtgg

SEQ ID NO: 5465548 - DNA, 25 bp, Homo sapien
gaacgcaggtcgcttgtttgcctta

SEQ ID NO: 5465549 - DNA, 25 bp, Homo sapien
gatcgggaacgtgcgtgatgacgca

SEQ ID NO: 5465550 - DNA, 25 bp, Homo sapien
gccccggatcgggaacgtgcgtgat

SEQ ID NO: 5465551 - DNA, 25 bp, Homo sapien
ccggatcgggaacgtgcgtgatgac

SEQ ID NO: 5465552 - DNA, 25 bp, Homo sapien
gcgccccggatcgggaacgtgcgtg

SEQ ID NO: 5465553 - DNA, 25 bp, Homo sapien
gacgtggggacgcaggcgggtcgta

SEQ ID NO: 5465554 - DNA, 25 bp, Homo sapien
ggcgggtcgtagagagcgtgagttt

SEQ ID NO: 5465555 - DNA, 25 bp, Homo sapien
gcgcgcgaagacgtggggacgcagg

SEQ ID NO: 5465556 - DNA, 25 bp, Homo sapien
ggacgcaggcgggtcgtagagagcg

SEQ ID NO: 5465557 - DNA, 25 bp, Homo sapien
tgtgagcggcatctctcgccgtttc

SEQ ID NO: 5465558 - DNA, 25 bp, Homo sapien
ctctcgccgtttccccgggctgcgg

SEQ ID NO: 5465559 - DNA, 25 bp, Homo sapien
tttggtccggctgctgtcgttggtt

SEQ ID NO: 5465560 - DNA, 25 bp, Homo sapien
ctgtcgttggttgtgagcggcatct

SEQ ID NO: 5465561 - DNA, 25 bp, Homo sapien
gggtcttgtcgaagttgccgcatct

SEQ ID NO: 5465562 - DNA, 25 bp, Homo sapien
ggaccgcacgggaacgacgtgccca

SEQ ID NO: 5465563 - DNA, 25 bp, Homo sapien
tcgaagttgccgcatctccgccgga

SEQ ID NO: 5465564 - DNA, 25 bp, Homo sapien
cgacgtgcccacactcggaggaagg

SEQ ID NO: 5465565 - DNA, 25 bp, Homo sapien
gaagtgacgttgcatcagcaacaga

SEQ ID NO: 5465566 - DNA, 25 bp, Homo sapien
aagtgacgttgcatcagcaacagag

SEQ ID NO: 5465567 - DNA, 25 bp, Homo sapien
tgctcccaaggctataccatggctc

SEQ ID NO: 5465568 - DNA, 25 bp, Homo sapien
caaaccgtggcctacacatgtcgtt

SEQ ID NO: 5465569 - DNA, 25 bp, Homo sapien
ccatggctcctggatattgagagag

SEQ ID NO: 5465570 - DNA, 25 bp, Homo sapien
tgagaaggtcagtgccaaaccgtgg

SEQ ID NO: 5465571 - DNA, 25 bp, Homo sapien
tgtaaaactcaggagccgagaagct

SEQ ID NO: 5465572 - DNA, 25 bp, Homo sapien
ggcgtgcctagggaacctcggattc

SEQ ID NO: 5465573 - DNA, 25 bp, Homo sapien
cttggtccttggcagcgatattagg

SEQ ID NO: 5465574 - DNA, 25 bp, Homo sapien
ttaagaacagtgaggttgaagggca

SEQ ID NO: 5465575 - DNA, 25 bp, Homo sapien
aacaatgtgtgcattccggtttgca

SEQ ID NO: 5465576 - DNA, 25 bp, Homo sapien
tgatggccaactaacaatgtgtgca

SEQ ID NO: 5465577 - DNA, 25 bp, Homo sapien
ctttgggatctacgtgatggccaac

SEQ ID NO: 5465578 - DNA, 25 bp, Homo sapien
gatctacgtgatggccaactaacaa

SEQ ID NO: 5465579 - DNA, 25 bp, Homo sapien
gtgctttctctggccccggatgtcc

SEQ ID NO: 5465580 - DNA, 25 bp, Homo sapien
gctttctctggccccggatgtcctc

SEQ ID NO: 5465581 - DNA, 25 bp, Homo sapien
agtgctttctctggccccggatgtc

SEQ ID NO: 5465582 - DNA, 25 bp, Homo sapien
aagtgctttctctggccccggatgt

SEQ ID NO: 5465583 - DNA, 25 bp, Homo sapien
cacagcaacgacagagagtcaaggc

SEQ ID NO: 5465584 - DNA, 25 bp, Homo sapien
ctatgacaacacagcaacgacagag

SEQ ID NO: 5465585 - DNA, 25 bp, Homo sapien
tgacaacacagcaacgacagagagt

SEQ ID NO: 5465586 - DNA, 25 bp, Homo sapien
caacgacagagagtcaaggcagact

SEQ ID NO: 5465587 - DNA, 25 bp, Homo sapien
caaggagagttgataaattcctctc

SEQ ID NO: 5465588 - DNA, 25 bp, Homo sapien
gagttgataaattcctctccatttc

SEQ ID NO: 5465589 - DNA, 25 bp, Homo sapien
atcaaggagagttgataaattcctc

SEQ ID NO: 5465590 - DNA, 25 bp, Homo sapien
tttccatcaaggagagttgataaat

SEQ ID NO: 5465591 - DNA, 25 bp, Homo sapien
aagactagaattagagttcctgagc

SEQ ID NO: 5465592 - DNA, 25 bp, Homo sapien
gcagagcaacttgatgatccaactg

SEQ ID NO: 5465593 - DNA, 25 bp, Homo sapien
agttcctgagctccgtgtgcagcag

SEQ ID NO: 5465594 - DNA, 25 bp, Homo sapien
tgtgcagcagagcaacttgatgatc

SEQ ID NO: 5465595 - DNA, 25 bp, Homo sapien
gtagtaaagcttggcgtttgttgcg

SEQ ID NO: 5465596 - DNA, 25 bp, Homo sapien
tcctttggatcttttaccctcaaca

SEQ ID NO: 5465597 - DNA, 25 bp, Homo sapien
ctttggatcttttaccctcaacagc

SEQ ID NO: 5465598 - DNA, 25 bp, Homo sapien
gccagtcgtcagtgtagtaaagctt

SEQ ID NO: 5465599 - DNA, 25 bp, Homo sapien
tgttgagctaaaatgaagcattgtt

SEQ ID NO: 5465600 - DNA, 25 bp, Homo sapien
ttttacactgcatattacagatgga

SEQ ID NO: 5465601 - DNA, 25 bp, Homo sapien
gcagtcctcctacattggccttaca

SEQ ID NO: 5465602 - DNA, 25 bp, Homo sapien
gtcctcctacattggccttacaaaa

SEQ ID NO: 5465603 - DNA, 25 bp, Homo sapien
gaagaggcccaaccatcagtggcat

SEQ ID NO: 5465604 - DNA, 25 bp, Homo sapien
gtaacaatagcttcagtcccacgtg

SEQ ID NO: 5465605 - DNA, 25 bp, Homo sapien
tctggagcccatgtcaaaagcatac

SEQ ID NO: 5465606 - DNA, 25 bp, Homo sapien
tacctctctagtcacgggaagactg

SEQ ID NO: 5465607 - DNA, 25 bp, Homo sapien
agatacaaagggtatctgattggcc

SEQ ID NO: 5465608 - DNA, 25 bp, Homo sapien
tggccagtgcaggtcgcatgcctgt

SEQ ID NO: 5465609 - DNA, 25 bp, Homo sapien
ctgattggccagtgcaggtcgcatg

SEQ ID NO: 5465610 - DNA, 25 bp, Homo sapien
tagatacaaagggtatctgattggc

SEQ ID NO: 5465611 - DNA, 25 bp, Homo sapien
caagttgcgtccttaatgaggtcat

SEQ ID NO: 5465612 - DNA, 25 bp, Homo sapien
tctccaagttgcgtccttaatgagg

SEQ ID NO: 5465613 - DNA, 25 bp, Homo sapien
ttgcgtccttaatgaggtcatttgc

SEQ ID NO: 5465614 - DNA, 25 bp, Homo sapien
actgtgtctccaagttgcgtcctta

SEQ ID NO: 5465615 - DNA, 25 bp, Homo sapien
tgaatgctgcttcggatggcatctt

SEQ ID NO: 5465616 - DNA, 25 bp, Homo sapien
ctagttgcaggattgtccctgaatg

SEQ ID NO: 5465617 - DNA, 25 bp, Homo sapien
gttgcaggattgtccctgaatgctg

SEQ ID NO: 5465618 - DNA, 25 bp, Homo sapien
gtccctgaatgctgcttcggatggc

SEQ ID NO: 5465619 - DNA, 25 bp, Homo sapien
gcctcaggaccaactatcaaaaatt

SEQ ID NO: 5465620 - DNA, 25 bp, Homo sapien
gctgtactctgtgggataatatgga

SEQ ID NO: 5465621 - DNA, 25 bp, Homo sapien
tattaaagctccaactcaggcctgt

SEQ ID NO: 5465622 - DNA, 25 bp, Homo sapien
gaaaatgaagtctactagagtgctg

SEQ ID NO: 5465623 - DNA, 25 bp, Homo sapien
gcagctctggatatcaggattatta

SEQ ID NO: 5465624 - DNA, 25 bp, Homo sapien
gaagcacccaggaactatgacacgt

SEQ ID NO: 5465625 - DNA, 25 bp, Homo sapien
caacagtccatagctgtgttctaga

SEQ ID NO: 5465626 - DNA, 25 bp, Homo sapien
gattattatccgcatggcaggccag

SEQ ID NO: 5465627 - DNA, 25 bp, Homo sapien
gaagaagaacagctcgagagagcat

SEQ ID NO: 5465628 - DNA, 25 bp, Homo sapien
tgctaagactaaatgatccagagtt

SEQ ID NO: 5465629 - DNA, 25 bp, Homo sapien
tataagactcgcttggtgagaagag

SEQ ID NO: 5465630 - DNA, 25 bp, Homo sapien
cctcacagtagaagattgctaagac

SEQ ID NO: 5465631 - DNA, 25 bp, Homo sapien
tacctctgtctaactagttgcttgg

SEQ ID NO: 5465632 - DNA, 25 bp, Homo sapien
ttctagggctcccatgagtctccct

SEQ ID NO: 5465633 - DNA, 25 bp, Homo sapien
tcaagtgcacttctccatcggcctt

SEQ ID NO: 5465634 - DNA, 25 bp, Homo sapien
tctccctagagctgaacctcaagtg

SEQ ID NO: 5465635 - DNA, 25 bp, Homo sapien
catgagtctccctagagctgaacct

SEQ ID NO: 5465636 - DNA, 25 bp, Homo sapien
ctagaaatcccacctgaattccaag

SEQ ID NO: 5465637 - DNA, 25 bp, Homo sapien
ccaagtagtcccaaggtggaccatg

SEQ ID NO: 5465638 - DNA, 25 bp, Homo sapien
tgagcgtgcagttcgggttttgttt

SEQ ID NO: 5465639 - DNA, 25 bp, Homo sapien
tttgttttgctatgggaattgactt

SEQ ID NO: 5465640 - DNA, 25 bp, Homo sapien
ttgctcagtatagtcttgctggtgg

SEQ ID NO: 5465641 - DNA, 25 bp, Homo sapien
gagtgcctcttaaatcagttgtcat

SEQ ID NO: 5465642 - DNA, 25 bp, Homo sapien
gatccaagtggccattgttgacagg

SEQ ID NO: 5465643 - DNA, 25 bp, Homo sapien
agcttgtttctgttatgcctttgct

SEQ ID NO: 5465644 - DNA, 25 bp, Homo sapien
gacttgccttcctacagtatcgagg

SEQ ID NO: 5465645 - DNA, 25 bp, Homo sapien
gagggacttgccttcctacagtatc

SEQ ID NO: 5465646 - DNA, 25 bp, Homo sapien
tgccttcctacagtatcgaggtggg

SEQ ID NO: 5465647 - DNA, 25 bp, Homo sapien
cccagagggacttgccttcctacag

SEQ ID NO: 5465648 - DNA, 25 bp, Homo sapien
gttgttttgatgttactctttgttg

SEQ ID NO: 5465649 - DNA, 25 bp, Homo sapien
ttgccccaggggcatatacagcttt

SEQ ID NO: 5465650 - DNA, 25 bp, Homo sapien
atatgcagctttttagcatctaggg

SEQ ID NO: 5465651 - DNA, 25 bp, Homo sapien
gctttttagcatctagggtcactga

SEQ ID NO: 5465652 - DNA, 25 bp, Homo sapien
ctttgagaatgggaccacaaagtca

SEQ ID NO: 5465653 - DNA, 25 bp, Homo sapien
tttgagaatgggaccacaaagtcat

SEQ ID NO: 5465654 - DNA, 25 bp, Homo sapien
ttacttctatttcaatcaattttgg

SEQ ID NO: 5465655 - DNA, 25 bp, Homo sapien
taggtcacttatagaaatcgttctt

SEQ ID NO: 5465656 - DNA, 25 bp, Homo sapien
acttctatttcaatcaattttggaa

SEQ ID NO: 5465657 - DNA, 25 bp, Homo sapien
cacttaggtcacttatagaaatcgt

SEQ ID NO: 5465658 - DNA, 25 bp, Homo sapien
ttacatttacttctggcaagaggat

SEQ ID NO: 5465659 - DNA, 25 bp, Homo sapien
taattttccagtatgcaggaactgg

SEQ ID NO: 5465660 - DNA, 25 bp, Homo sapien
actgaaattaatttgtggctgcaat

SEQ ID NO: 5465661 - DNA, 25 bp, Homo sapien
tatgcaggaactggtaaagaacaca

SEQ ID NO: 5465662 - DNA, 25 bp, Homo sapien
ggacatctcagatgcatcatgtaca

SEQ ID NO: 5465663 - DNA, 25 bp, Homo sapien
tccactttacctttgaacatcagcc

SEQ ID NO: 5465664 - DNA, 25 bp, Homo sapien
ggctttcctaatatggtctggtctc

SEQ ID NO: 5465665 - DNA, 25 bp, Homo sapien
gacgtagtgagtaaccaagccttct

SEQ ID NO: 5465666 - DNA, 25 bp, Homo sapien
gagtttatagagaggacttacagca

SEQ ID NO: 5465667 - DNA, 25 bp, Homo sapien
gagaaccgcaattgcttgaaaaagc

SEQ ID NO: 5465668 - DNA, 25 bp, Homo sapien
gaattagtagagctccatgtgccat

SEQ ID NO: 5465669 - DNA, 25 bp, Homo sapien
tacaggaattagagttcagtctcag

SEQ ID NO: 5465670 - DNA, 25 bp, Homo sapien
gacatgagcctacctacaaagaagt

SEQ ID NO: 5465671 - DNA, 25 bp, Homo sapien
gcaggaactctcaggcacttggctg

SEQ ID NO: 5465672 - DNA, 25 bp, Homo sapien
tatctcataggagggtgaaacaccc

SEQ ID NO: 5465673 - DNA, 25 bp, Homo sapien
gttacagtaccaccaataagctgga

SEQ ID NO: 5465674 - DNA, 25 bp, Homo sapien
caaggtatggaccagtcatggacac

SEQ ID NO: 5465675 - DNA, 25 bp, Homo sapien
tcatggacacaggccaaaagccaag

SEQ ID NO: 5465676 - DNA, 25 bp, Homo sapien
ccagaagctactcttcccatgtcag

SEQ ID NO: 5465677 - DNA, 25 bp, Homo sapien
ctctggctaatgtgagatgggctcc

SEQ ID NO: 5465678 - DNA, 25 bp, Homo sapien
gaacgggcatcttcaagctgtgtat

SEQ ID NO: 5465679 - DNA, 25 bp, Homo sapien
acagtgaagcagaacgggcatcttc

SEQ ID NO: 5465680 - DNA, 25 bp, Homo sapien
gtgtatcaaagtgtgttcctcccca

SEQ ID NO: 5465681 - DNA, 25 bp, Homo sapien
caagctgtgtatcaaagtgtgttcc

SEQ ID NO: 5465682 - DNA, 25 bp, Homo sapien
gctctttgatagcagagtggctgcc

SEQ ID NO: 5465683 - DNA, 25 bp, Homo sapien
tctgcaatgagcttgagggttttgt

SEQ ID NO: 5465684 - DNA, 25 bp, Homo sapien
gagaatctccttttcgttcgcatgg

SEQ ID NO: 5465685 - DNA, 25 bp, Homo sapien
ctcaccgcctttccacatgcttgcc

SEQ ID NO: 5465686 - DNA, 25 bp, Homo sapien
gacagatggccggcgtttgtctcac

SEQ ID NO: 5465687 - DNA, 25 bp, Homo sapien
ctttgacagatggccggcgtttgtc

SEQ ID NO: 5465688 - DNA, 25 bp, Homo sapien
ttgacagatggccggcgtttgtctc

SEQ ID NO: 5465689 - DNA, 25 bp, Homo sapien
gctttgacagatggccggcgtttgt

SEQ ID NO: 5465690 - DNA, 25 bp, Homo sapien
gcactcggtgtaacacttcaaagaa

SEQ ID NO: 5465691 - DNA, 25 bp, Homo sapien
ttgcacagcactcggtgtaacactt

SEQ ID NO: 5465692 - DNA, 25 bp, Homo sapien
cggtgtaacacttcaaagaaataat

SEQ ID NO: 5465693 - DNA, 25 bp, Homo sapien
gcacagcactcggtgtaacacttca

SEQ ID NO: 5465694 - DNA, 25 bp, Homo sapien
cagtgctgagagtcgtgaaccatac

SEQ ID NO: 5465695 - DNA, 25 bp, Homo sapien
ggcaccaggatcctctttagtgtcc

SEQ ID NO: 5465696 - DNA, 25 bp, Homo sapien
ccctgcaggctgagagtcgtgaact

SEQ ID NO: 5465697 - DNA, 25 bp, Homo sapien
cccaagagcagggtggatactccct

SEQ ID NO: 5465698 - DNA, 25 bp, Homo sapien
attggagatcactcttttcaggtac

SEQ ID NO: 5465699 - DNA, 25 bp, Homo sapien
ggtgtcatcgtataattggagatca

SEQ ID NO: 5465700 - DNA, 25 bp, Homo sapien
ataattggagatcactcttttcagg

SEQ ID NO: 5465701 - DNA, 25 bp, Homo sapien
taattggagatcactcttttcaggt

SEQ ID NO: 5465702 - DNA, 25 bp, Homo sapien
ggtgctcccattaccattttcaggc

SEQ ID NO: 5465703 - DNA, 25 bp, Homo sapien
cagatgaggcctagttccactgctc

SEQ ID NO: 5465704 - DNA, 25 bp, Homo sapien
cactgctctgatggccacacgtgaa

SEQ ID NO: 5465705 - DNA, 25 bp, Homo sapien
agggacatcctggagatcttggtgc

SEQ ID NO: 5465706 - DNA, 25 bp, Homo sapien
actgggactcttagtgggtagcaag

SEQ ID NO: 5465707 - DNA, 25 bp, Homo sapien
ctctgagggttctgattgagtgcat

SEQ ID NO: 5465708 - DNA, 25 bp, Homo sapien
tctgattgagtgcatttggctgcag

SEQ ID NO: 5465709 - DNA, 25 bp, Homo sapien
agtggccccagggttgttgtgttct

SEQ ID NO: 5465710 - DNA, 25 bp, Homo sapien
ccagggttgttgtgttctgtatcta

SEQ ID NO: 5465711 - DNA, 25 bp, Homo sapien
agtcacactcatggttccagttgaa

SEQ ID NO: 5465712 - DNA, 25 bp, Homo sapien
cagtcacactcatggttccagttga

SEQ ID NO: 5465713 - DNA, 25 bp, Homo sapien
gtcacactcatggttccagttgaaa

SEQ ID NO: 5465714 - DNA, 25 bp, Homo sapien
atggttccagttgaaaataggtctc

SEQ ID NO: 5465715 - DNA, 25 bp, Homo sapien
gtccaggtgtggagctcttgtccat

SEQ ID NO: 5465716 - DNA, 25 bp, Homo sapien
cttagcagccaagcagggcttctgg

SEQ ID NO: 5465717 - DNA, 25 bp, Homo sapien
ttggaaggtgtgagagcacagcctg

SEQ ID NO: 5465718 - DNA, 25 bp, Homo sapien
aaggccagcccaaacttagcagcca

SEQ ID NO: 5465719 - DNA, 25 bp, Homo sapien
ggcttggatctgacccctggacata

SEQ ID NO: 5465720 - DNA, 25 bp, Homo sapien
caaactggcggaatatgaagagtgc

SEQ ID NO: 5465721 - DNA, 25 bp, Homo sapien
tcacaacgcagtgagaatgcacgct

SEQ ID NO: 5465722 - DNA, 25 bp, Homo sapien
catgtgtgtactggtgtccaaagca

SEQ ID NO: 5465723 - DNA, 25 bp, Homo sapien
cagagcagtttgtcttcctctagtt

SEQ ID NO: 5465724 - DNA, 25 bp, Homo sapien
gagcagtttgtcttcctctagttcc

SEQ ID NO: 5465725 - DNA, 25 bp, Homo sapien
tcagagcagtttgtcttcctctagt

SEQ ID NO: 5465726 - DNA, 25 bp, Homo sapien
gcagtttgtcttcctctagttccac

SEQ ID NO: 5465727 - DNA, 25 bp, Homo sapien
cgtataggagggtgagccatgcagc

SEQ ID NO: 5465728 - DNA, 25 bp, Homo sapien
ctttagctgaacagaagatttgaga

SEQ ID NO: 5465729 - DNA, 25 bp, Homo sapien
gcctgggcaaaacgcaatggtgtgg

SEQ ID NO: 5465730 - DNA, 25 bp, Homo sapien
ggaactgtccctgctcgtataggag

SEQ ID NO: 5465731 - DNA, 25 bp, Homo sapien
tcagcaaatttggagcacattgacc

SEQ ID NO: 5465732 - DNA, 25 bp, Homo sapien
acattgaccatggagttttgtgtcc

SEQ ID NO: 5465733 - DNA, 25 bp, Homo sapien
tcacctgtagccctacccttagagg

SEQ ID NO: 5465734 - DNA, 25 bp, Homo sapien
gaagaggccttgacacctgcatgga

SEQ ID NO: 5465735 - DNA, 25 bp, Homo sapien
tctctagtagggaataagcacttag

SEQ ID NO: 5465736 - DNA, 25 bp, Homo sapien
cagatacaaagacacgggattagat

SEQ ID NO: 5465737 - DNA, 25 bp, Homo sapien
taatggacttgcctgtaacaagtgc

SEQ ID NO: 5465738 - DNA, 25 bp, Homo sapien
gattgtctgttaagcccctggttcc

SEQ ID NO: 5465739 - DNA, 25 bp, Homo sapien
tattttagaatcacagactctcagc

SEQ ID NO: 5465740 - DNA, 25 bp, Homo sapien
tcaaagtcattagcctcaacagtgg

SEQ ID NO: 5465741 - DNA, 25 bp, Homo sapien
tctctgctgccaaaggataaaggtc

SEQ ID NO: 5465742 - DNA, 25 bp, Homo sapien
cacagaggctggtaactagtctcac

SEQ ID NO: 5465743 - DNA, 25 bp, Homo sapien
tgtaacagacacaaccacatctaca

SEQ ID NO: 5465744 - DNA, 25 bp, Homo sapien
gagtgttcctgatcttgtgacattc

SEQ ID NO: 5465745 - DNA, 25 bp, Homo sapien
tacacagtttccacataccacttgg

SEQ ID NO: 5465746 - DNA, 25 bp, Homo sapien
tgtgcttttacatggaacagctctt

SEQ ID NO: 5465747 - DNA, 25 bp, Homo sapien
tgctttttacaggtctgcgttggat

SEQ ID NO: 5465748 - DNA, 25 bp, Homo sapien
gattcccacacgaccaagaagtgtc

SEQ ID NO: 5465749 - DNA, 25 bp, Homo sapien
cctgtgagtagtaccgaatcttgcc

SEQ ID NO: 5465750 - DNA, 25 bp, Homo sapien
aaagctcaagattcccacacgacca

SEQ ID NO: 5465751 - DNA, 25 bp, Homo sapien
ggcattaggcatacaaaaacgagtc

SEQ ID NO: 5465752 - DNA, 25 bp, Homo sapien
caagagtagctgttatgtcccaccg

SEQ ID NO: 5465753 - DNA, 25 bp, Homo sapien
gataaagcccaattgtagtgcacca

SEQ ID NO: 5465754 - DNA, 25 bp, Homo sapien
gaagggtcttctcagtcggatctct

SEQ ID NO: 5465755 - DNA, 25 bp, Homo sapien
gacaggaaatactcctagagggaac

SEQ ID NO: 5465756 - DNA, 25 bp, Homo sapien
caggagcaaagtcgaagaggtgctg

SEQ ID NO: 5465757 - DNA, 25 bp, Homo sapien
cagggaggacatcactggtgaagca

SEQ ID NO: 5465758 - DNA, 25 bp, Homo sapien
tgcacacagttcatcatgacaggaa

SEQ ID NO: 5465759 - DNA, 25 bp, Homo sapien
ggaggtagccatccaaagcagcgat

SEQ ID NO: 5465760 - DNA, 25 bp, Homo sapien
acttcatgggcagcggagtcacaga

SEQ ID NO: 5465761 - DNA, 25 bp, Homo sapien
gatttgaaactaaggcaccaactgg

SEQ ID NO: 5465762 - DNA, 25 bp, Homo sapien
caccaactgggagatgcctactgca

SEQ ID NO: 5465763 - DNA, 25 bp, Homo sapien
taatgtgtaaggaaccagaggactc

SEQ ID NO: 5465764 - DNA, 25 bp, Homo sapien
taaagatagtgccatgtcctcctga

SEQ ID NO: 5465765 - DNA, 25 bp, Homo sapien
catctctggaatacggcgactgtgg

SEQ ID NO: 5465766 - DNA, 25 bp, Homo sapien
tgagtgagccccatgtagcgtcagt

SEQ ID NO: 5465767 - DNA, 25 bp, Homo sapien
gagcagaggaaaactgcaagtctgc

SEQ ID NO: 5465768 - DNA, 25 bp, Homo sapien
tggcaccggctgattttctggcgtt

SEQ ID NO: 5465769 - DNA, 25 bp, Homo sapien
gcaagtctgctttcaccgttgtgag

SEQ ID NO: 5465770 - DNA, 25 bp, Homo sapien
aagtggcaagttccctgccggccct

SEQ ID NO: 5465771 - DNA, 25 bp, Homo sapien
cttatgtcctaagcgcagagtgctc

SEQ ID NO: 5465772 - DNA, 25 bp, Homo sapien
caagcgctgaaaaggagtcgtactc

SEQ ID NO: 5465773 - DNA, 25 bp, Homo sapien
aattggctccagtttcaccgatggc

SEQ ID NO: 5465774 - DNA, 25 bp, Homo sapien
caacaggctatggtttgcaacagtc

SEQ ID NO: 5465775 - DNA, 25 bp, Homo sapien
gaatgaatacccgatccagaggctc

SEQ ID NO: 5465776 - DNA, 25 bp, Homo sapien
gctggccagccagtaggatctgtcg

SEQ ID NO: 5465777 - DNA, 25 bp, Homo sapien
taaatacgggaaggcaagaccctgc

SEQ ID NO: 5465778 - DNA, 25 bp, Homo sapien
cacctggtggatgttgcagtaggca

SEQ ID NO: 5465779 - DNA, 25 bp, Homo sapien
ggtgtccaagcaccccatgtaggtg

SEQ ID NO: 5465780 - DNA, 25 bp, Homo sapien
gcctttgcagatacgtgttctgaaa

SEQ ID NO: 5465781 - DNA, 25 bp, Homo sapien
acgtgttctgaaatctggaggccct

SEQ ID NO: 5465782 - DNA, 25 bp, Homo sapien
tggaggccctcgccaaagcctgctt

SEQ ID NO: 5465783 - DNA, 25 bp, Homo sapien
ccctggtcctgtgggccagccctca

SEQ ID NO: 5465784 - DNA, 25 bp, Homo sapien
acctccctggtcctgtgggccagcc

SEQ ID NO: 5465785 - DNA, 25 bp, Homo sapien
gaagccatttctgacacctccctgg

SEQ ID NO: 5465786 - DNA, 25 bp, Homo sapien
atttctgacacctccctggtcctgt

SEQ ID NO: 5465787 - DNA, 25 bp, Homo sapien
aaggagcaccaaaagatgaccctca

SEQ ID NO: 5465788 - DNA, 25 bp, Homo sapien
ggagcaccaaaagatgaccctcaaa

SEQ ID NO: 5465789 - DNA, 25 bp, Homo sapien
caaggagcaccaaaagatgaccctc

SEQ ID NO: 5465790 - DNA, 25 bp, Homo sapien
aggagcaccaaaagatgaccctcaa

SEQ ID NO: 5465791 - DNA, 25 bp, Homo sapien
taaaggattagctgagaatgaccat

SEQ ID NO: 5465792 - DNA, 25 bp, Homo sapien
tctggttaatttacatttggaagca

SEQ ID NO: 5465793 - DNA, 25 bp, Homo sapien
gaatgaccatgctagtgtttttgtt

SEQ ID NO: 5465794 - DNA, 25 bp, Homo sapien
taaggttagtgatcatttaaggtgc

SEQ ID NO: 5465795 - DNA, 25 bp, Homo sapien
gagatgggcgatcctgtatccatac

SEQ ID NO: 5465796 - DNA, 25 bp, Homo sapien
tggagatgggcgatcctgtatccat

SEQ ID NO: 5465797 - DNA, 25 bp, Homo sapien
aatggagatgggcgatcctgtatcc

SEQ ID NO: 5465798 - DNA, 25 bp, Homo sapien
tcaggcaatggagatgggcgatcct

SEQ ID NO: 5465799 - DNA, 25 bp, Homo sapien
gcccttccaggtataacagactata

SEQ ID NO: 5465800 - DNA, 25 bp, Homo sapien
aggaggaagccaccgaggtatccag

SEQ ID NO: 5465801 - DNA, 25 bp, Homo sapien
tgcccttccaggtataacagactat

SEQ ID NO: 5465802 - DNA, 25 bp, Homo sapien
ggaagccaccgaggtatccagggcc

SEQ ID NO: 5465803 - DNA, 25 bp, Homo sapien
tttgggcccaggatccccaatggga

SEQ ID NO: 5465804 - DNA, 25 bp, Homo sapien
gcccaggatccccaatgggaccagg

SEQ ID NO: 5465805 - DNA, 25 bp, Homo sapien
tgggcccaggatccccaatgggacc

SEQ ID NO: 5465806 - DNA, 25 bp, Homo sapien
ggcccaggatccccaatgggaccag

SEQ ID NO: 5465807 - DNA, 25 bp, Homo sapien
cctcttaagggtgatcccacagcca

SEQ ID NO: 5465808 - DNA, 25 bp, Homo sapien
accaggctgaccgtcccttcatgac

SEQ ID NO: 5465809 - DNA, 25 bp, Homo sapien
gtccctgaggtcttcatcacagcct

SEQ ID NO: 5465810 - DNA, 25 bp, Homo sapien
tcacagcctcttaagggtgatccca

SEQ ID NO: 5465811 - DNA, 25 bp, Homo sapien
gtcttctcctgtgtcacctttacgt

SEQ ID NO: 5465812 - DNA, 25 bp, Homo sapien
aggagacccagggacgccatccaca

SEQ ID NO: 5465813 - DNA, 25 bp, Homo sapien
tgtgtcacctttacgtccgggaggc

SEQ ID NO: 5465814 - DNA, 25 bp, Homo sapien
gtagccgtcttctcctgtgtcacct

SEQ ID NO: 5465815 - DNA, 25 bp, Homo sapien
cacaaaagtttatgatgctggtggt

SEQ ID NO: 5465816 - DNA, 25 bp, Homo sapien
acaaaagtttatgatgctggtggtg

SEQ ID NO: 5465817 - DNA, 25 bp, Homo sapien
taggctaaaggtacatctcccatct

SEQ ID NO: 5465818 - DNA, 25 bp, Homo sapien
ccttccctacataaatggtcttcaa

SEQ ID NO: 5465819 - DNA, 25 bp, Homo sapien
tcaccccagcagacacttggcaatg

SEQ ID NO: 5465820 - DNA, 25 bp, Homo sapien
aacattaggtggttctgcaccgccc

SEQ ID NO: 5465821 - DNA, 25 bp, Homo sapien
catctcttgggcacttaacttcttg

SEQ ID NO: 5465822 - DNA, 25 bp, Homo sapien
tctcttgggcacttaacttcttggt

SEQ ID NO: 5465823 - DNA, 25 bp, Homo sapien
aacatctcttgggcacttaacttct

SEQ ID NO: 5465824 - DNA, 25 bp, Homo sapien
ctcttgggcacttaacttcttggtt

SEQ ID NO: 5465825 - DNA, 25 bp, Homo sapien
tgggattcggggacagtcatccaca

SEQ ID NO: 5465826 - DNA, 25 bp, Homo sapien
gggattcggggacagtcatccacat

SEQ ID NO: 5465827 - DNA, 25 bp, Homo sapien
cctctcatgcctggcgccccaggaa

SEQ ID NO: 5465828 - DNA, 25 bp, Homo sapien
cattttttactggagtagcagccac

SEQ ID NO: 5465829 - DNA, 25 bp, Homo sapien
tgtgtccctgagtccttactctaca

SEQ ID NO: 5465830 - DNA, 25 bp, Homo sapien
taaagctcagcttcatgtgtccctg

SEQ ID NO: 5465831 - DNA, 25 bp, Homo sapien
cacaggtagcattgcaagagggact

SEQ ID NO: 5465832 - DNA, 25 bp, Homo sapien
gctgaaagcacagttggaaagctat

SEQ ID NO: 5465833 - DNA, 25 bp, Homo sapien
tgtttaactcccacgatgattccag

SEQ ID NO: 5465834 - DNA, 25 bp, Homo sapien
cttgataataggatgtggcctgagc

SEQ ID NO: 5465835 - DNA, 25 bp, Homo sapien
gatctgggaatctcactttgaaaaa

SEQ ID NO: 5465836 - DNA, 25 bp, Homo sapien
agaccagtgggcccttttctccctg

SEQ ID NO: 5465837 - DNA, 25 bp, Homo sapien
ggtggcccaggaaatccatgtggtc

SEQ ID NO: 5465838 - DNA, 25 bp, Homo sapien
ccaggaaatccatgtggtccctgcg

SEQ ID NO: 5465839 - DNA, 25 bp, Homo sapien
gaaatccatgtggtccctgcggtcc

SEQ ID NO: 5465840 - DNA, 25 bp, Homo sapien
ctggaaagcctttgtatcctggagg

SEQ ID NO: 5465841 - DNA, 25 bp, Homo sapien
cctggtagaccacagtcacctggct

SEQ ID NO: 5465842 - DNA, 25 bp, Homo sapien
cagaaggtcaacactcccagggagg

SEQ ID NO: 5465843 - DNA, 25 bp, Homo sapien
aaagcctttgtatcctggagggcct

SEQ ID NO: 5465844 - DNA, 25 bp, Homo sapien
ctccaggtggacccgggtcaggaat

SEQ ID NO: 5465845 - DNA, 25 bp, Homo sapien
gtcaggaatgtccttaggagctctt

SEQ ID NO: 5465846 - DNA, 25 bp, Homo sapien
caggtggacccgggtcaggaatgtc

SEQ ID NO: 5465847 - DNA, 25 bp, Homo sapien
ggtcaggaatgtccttaggagctct

SEQ ID NO: 5465848 - DNA, 25 bp, Homo sapien
ctcccagggtctcctctctcccctt

SEQ ID NO: 5465849 - DNA, 25 bp, Homo sapien
cagggtctcctctctccccttttag

SEQ ID NO: 5465850 - DNA, 25 bp, Homo sapien
ctggaggagagattcctgggctccc

SEQ ID NO: 5465851 - DNA, 25 bp, Homo sapien
ctctctccccttttagcccaggtat

SEQ ID NO: 5465852 - DNA, 25 bp, Homo sapien
ccaggtggccccacatcatgcaaac

SEQ ID NO: 5465853 - DNA, 25 bp, Homo sapien
tggaccaggtggccccacatcatgc

SEQ ID NO: 5465854 - DNA, 25 bp, Homo sapien
ctggaccaggtggccccacatcatg

SEQ ID NO: 5465855 - DNA, 25 bp, Homo sapien
gaccaggtggccccacatcatgcaa

SEQ ID NO: 5465856 - DNA, 25 bp, Homo sapien
tgacctttcaatccatgcaagccgt

SEQ ID NO: 5465857 - DNA, 25 bp, Homo sapien
ccgttcaggccaggtgatccggagg

SEQ ID NO: 5465858 - DNA, 25 bp, Homo sapien
ttcaggccaggtgatccggagggac

SEQ ID NO: 5465859 - DNA, 25 bp, Homo sapien
tcaatccatgcaagccgttcaggcc

SEQ ID NO: 5465860 - DNA, 25 bp, Homo sapien
ctgtgacccaaaggaagaccagcca

SEQ ID NO: 5465861 - DNA, 25 bp, Homo sapien
ggaagaccagccaccggtactcact

SEQ ID NO: 5465862 - DNA, 25 bp, Homo sapien
tgtgacccaaaggaagaccagccac

SEQ ID NO: 5465863 - DNA, 25 bp, Homo sapien
ttctttatctgccaaatctgggtat

SEQ ID NO: 5465864 - DNA, 25 bp, Homo sapien
cttctttatctgccaaatctgggta

SEQ ID NO: 5465865 - DNA, 25 bp, Homo sapien
gtccctgacttgacagaacaaacag

SEQ ID NO: 5465866 - DNA, 25 bp, Homo sapien
aagacgatgcgggacaagtctgtcc

SEQ ID NO: 5465867 - DNA, 25 bp, Homo sapien
tggcaggtgctgtcaagacgatgcg

SEQ ID NO: 5465868 - DNA, 25 bp, Homo sapien
aggcaattacatccagtgtggtaag

SEQ ID NO: 5465869 - DNA, 25 bp, Homo sapien
tcccggaggacctggtatccctgga

SEQ ID NO: 5465870 - DNA, 25 bp, Homo sapien
cccctcagcccaggcatcccgtgat

SEQ ID NO: 5465871 - DNA, 25 bp, Homo sapien
tggctgtcccctcagcccaggcatc

SEQ ID NO: 5465872 - DNA, 25 bp, Homo sapien
ctcagcccaggcatcccgtgatcac

SEQ ID NO: 5465873 - DNA, 25 bp, Homo sapien
gtcccctcagcccaggcatcccgtg

SEQ ID NO: 5465874 - DNA, 25 bp, Homo sapien
ggccttccaggtgatcctctgggcc

SEQ ID NO: 5465875 - DNA, 25 bp, Homo sapien
ctgctctccggatgctccaaaatgc

SEQ ID NO: 5465876 - DNA, 25 bp, Homo sapien
tgctctccggatgctccaaaatgcc

SEQ ID NO: 5465877 - DNA, 25 bp, Homo sapien
gaccaggtggaccaaagtgactggc

SEQ ID NO: 5465878 - DNA, 25 bp, Homo sapien
ccaggtggaccaaagtgactggcag

SEQ ID NO: 5465879 - DNA, 25 bp, Homo sapien
gaccaaagtgactggcagggtcacc

SEQ ID NO: 5465880 - DNA, 25 bp, Homo sapien
ttggaccaggtggaccaaagtgact

SEQ ID NO: 5465881 - DNA, 25 bp, Homo sapien
ctttaggtcctcttgctccatcaat

SEQ ID NO: 5465882 - DNA, 25 bp, Homo sapien
ttaggtcctcttgctccatcaattc

SEQ ID NO: 5465883 - DNA, 25 bp, Homo sapien
tttaggtcctcttgctccatcaatt

SEQ ID NO: 5465884 - DNA, 25 bp, Homo sapien
ccagggggacctggagaacctggct

SEQ ID NO: 5465885 - DNA, 25 bp, Homo sapien
ctgaaaatccagggggacctggaga

SEQ ID NO: 5465886 - DNA, 25 bp, Homo sapien
ggggacctggagaacctggctcacc

SEQ ID NO: 5465887 - DNA, 25 bp, Homo sapien
agggggacctggagaacctggctca

SEQ ID NO: 5465888 - DNA, 25 bp, Homo sapien
aatgaaccctcttagaccagttgag

SEQ ID NO: 5465889 - DNA, 25 bp, Homo sapien
tctcaccaggttcccctctgtgaaa

SEQ ID NO: 5465890 - DNA, 25 bp, Homo sapien
tcttctcccttgcatcccgggagtt

SEQ ID NO: 5465891 - DNA, 25 bp, Homo sapien
tctgtgaaatccaggtggtccgtat

SEQ ID NO: 5465892 - DNA, 25 bp, Homo sapien
tcatctccgggaggtcctatggctc

SEQ ID NO: 5465893 - DNA, 25 bp, Homo sapien
ttctcctgggaatccatcatctcca

SEQ ID NO: 5465894 - DNA, 25 bp, Homo sapien
tccttcatctccgggaggtcctatg

SEQ ID NO: 5465895 - DNA, 25 bp, Homo sapien
tctttctcctgggaatccatcatct

SEQ ID NO: 5465896 - DNA, 25 bp, Homo sapien
caggaaggccagacatgcccttctc

SEQ ID NO: 5465897 - DNA, 25 bp, Homo sapien
cctctcagtccccggtctccaggaa

SEQ ID NO: 5465898 - DNA, 25 bp, Homo sapien
gttctccctttgcgccaggacatcc

SEQ ID NO: 5465899 - DNA, 25 bp, Homo sapien
ccaggttctccctttgcgccaggac

SEQ ID NO: 5465900 - DNA, 25 bp, Homo sapien
catcatctccaaagggacctgggat

SEQ ID NO: 5465901 - DNA, 25 bp, Homo sapien
ccatcatctccaaagggacctggga

SEQ ID NO: 5465902 - DNA, 25 bp, Homo sapien
gagtccggggaggcctttcattcca

SEQ ID NO: 5465903 - DNA, 25 bp, Homo sapien
ggaggccccacatctcccggctgtc

SEQ ID NO: 5465904 - DNA, 25 bp, Homo sapien
ggaggcctttcattccagctggccc

SEQ ID NO: 5465905 - DNA, 25 bp, Homo sapien
tccggggaggcctttcattccagct

SEQ ID NO: 5465906 - DNA, 25 bp, Homo sapien
ctaagacaaaccacagtgaccacag

SEQ ID NO: 5465907 - DNA, 25 bp, Homo sapien
taagacaaaccacagtgaccacagt

SEQ ID NO: 5465908 - DNA, 25 bp, Homo sapien
acagtgaccacagtgtgtgaaggct

SEQ ID NO: 5465909 - DNA, 25 bp, Homo sapien
aaaccacagtgaccacagtgtgtga

SEQ ID NO: 5465910 - DNA, 25 bp, Homo sapien
caggtggacctgggacacctggaaa

SEQ ID NO: 5465911 - DNA, 25 bp, Homo sapien
ctgggctacctggatacccagggag

SEQ ID NO: 5465912 - DNA, 25 bp, Homo sapien
tgggctacctggatacccagggagt

SEQ ID NO: 5465913 - DNA, 25 bp, Homo sapien
tggacctgggacacctggaaaccca
